United States Patent Application Publication US 2007/0054278 A1 - sequence listing, part 9

SEQ ID NO: 14937 - protein, 493 aa, Homo sapiens
MADSEALPSLAGDPVAVEALLRAVFGVVVDEAIQKGTSVSQKVCEWKEPEELKQLLDLELRSQGESQKQILERCRAVIRYSVKTGHPRFFNQLFSGLDPHALAGRIITESLNTSQYTYEIAPVFVLMEEEVLRKLRALVGWSSGDGIFCPGGSISNMYAVNLARYQRYPDCKQRGLRTLPPLALFTSKECHYSIQKGAAFLGLGTDSVRVVKADERGKMVPEDLERQIGMAEAEGAVPFLVSATSGTTVLGAFDPLEAIADVCQRHGLWLHVDAAWGGSVLLSQTHRHLLDGIQRADSVAWNPHKLLAAGLQCSALLLQDTSNLLKRCHGSQASYLFQQDKFYDVALDTGDKVVQCGRRVDCLKLWLMWKAQGDQGLERRIDQAFVLARYLVEEMKKREGFELVMEPEFVNVCFWFVPPSLRGKQESPDYHERLSKVAPVLKERMVKEGSMMIGYQPHGTRGNFFRVVVANSALTCADMDFLLNELERLGQDL

SEQ ID NO: 14938 - protein, 267 aa, Homo sapiens
MADSEALPSLAGDPVAVEALLRAVFGVVVDEAIQKGTSVSQKVCEWKEPEELKQLLDLELRSQGESQKQILERCRAVIRYSVKTGHPRFFNQLFSGLDPHALAGRIITESLNTSQYTYEIAPVFVLMEEEVLRKLRALVGWSSGDGIFCPGGSISNMYAVNLARYQRYPDCKQRGLRTLPPLALFTSKEVGKRHRPNPGLLILISSHVTTPSRRELRFWDLAPTVSEWSRLMREGKWSPRIWRGRLVWPRLRVLCRSWSVPPLAPLC

SEQ ID NO: 14939 - protein, 522 aa, Homo sapiens
MEPGGARLRLQRTEGLGGERERQPCGDGNTETHRAPDLVQWTRHMEAVKAQLLEQAQGQLRELLDRAMREAIQSYPSQDKPLPPPPPGSLSRTQEPSLGKQKVFIIRKSLLDELMEVQHFRTIYHMFIAGLCVFIISTLAIDFIDEGRLLLEFDLLIFSFGQLPLALVTWVPMFLSTLLAPYQALRLWARGTWTQATGLGCALLAAHAVVLCALPVHVAVEHQLPPASRCVLVFEQVRFLMKSYSFLREAVPGTLRARRGEGIQAPSFSSYLYFLFCPTLIYRETYPRTPYVRWNYVAKNFAQALGCVLYACFILGRLCVPVFANMSREPFSTRALVLSILHATLPGIFMLLLIFFAFLHCWLNAFAEMLRFGDRMFYRDWWNSTSFSNYYRTWNVVVHDWLYSYVYQDGLRLLGARARGVAMLGVFLVSAVAHEYIFCFVLGFFYPVMLILFLVIGGMLNFMMHDQRTGPAWNVLMWTMLFLGQGIQVSLYCQEWYARRHCPLPQATFWGLVTPRSWSCHT

SEQ ID NO: 14940 - protein, 437 aa, Homo sapiens
MLKGYIPPYNATVVQKLLDQGALLMGKTNLDEFAMGSGSTDGVFGPVKNPWSYSKQYREKRKQNPHSENEDSDWLITGGSSGGSAAAVSAFTCYAALGSDTGGSTRNPAAHCGLVGFKPSYGLVSRHGLIPLVNSMDVPGILTRCVDDAAIVLGALAGPDPRDSTTVHEPINKPFMLPSLADVSKLCIGIPKEYLVPELSSEVQSLWSKAADLFESEGAKVIEVSLPHTSYSIVCYHVLCTSEVASNMARFDGLQYGHRCDIDVSTEAMYAATRREGFNDVVRGRILSGNFFLLKENYENYFVKAQKVRRLIANDFVNAFNSGVDVLLTPTTLSEAVPYLEFIKEDNRTRSAQDDIFTQAVNMAGLPAVSIPVALSNQGLPIGLQFIGRAFCDQQLLTVAKWFEKQVQFPVIQLQELMDDCSAVLENEKLASVSLKQ

SEQ ID NO: 14941 - protein, 528 aa, Homo sapiens
MLGRSLREVSAALKQGQITPTELCQKCLSLIKKTKFLNAYITVSEEVALKQAEESEKRYKNGQSLGDLDGIPIAVKDNFSTSGIETTCASNMLKGYIPPYNATVVQKLLDQGALLMGKTNLDEFAMGSGSTDGVFGPVKNPWSYSKQYREKRKQNPHSENEDSDWLITGGSSGGSAAAVSAFTCYAALGSDTGGSTRNPAAHCGLVGFKPSYGLVSRHGLIPLVNSMDVPGILTRCVDDAAIVLGALAGPDPRDSTTVHEPINKPFMLPSLADVSKLCIGIPKEYLVPELSSEVQSLWSKAADLFESEGAKVIEVSLPHTSYSIVCYHVLCTSEVASNMARFDGLQYGHRCDIDVSTEAMYAATRREGFNDVVRGRILSGNFFLLKENYENYFVKAQKVRRLIANDFVNAFNSGVDVLLTPTTLSEAVPYLEFIKEDNRTRSAQDDIFTQAVNMAGLPAVSIPVALSNQGLPIGLQFIGRAFCDQQLLTVAKWFEKQVQFPVIQLQELMDDCSAVLENEKLASVSLKQ

SEQ ID NO: 14942 - protein, 226 aa, Homo sapiens
MEFLKTCVLRRNACTAVCFWRSKVVQKPSVRRISTTSPRSTVMPAWVIDKYGKNEVLRFTQNMMMPIIHYPNEVIVKVHAASVNPIDVNMRSGYGATALNMKRDPLHVKIKGEEFPLTLGRDVSGVVMECGLDVKYFKPGDEVWAAVPPWKQGTLSEFVVVSGNEVSHKPKSLTHTQAASLPYVALTAWSAINKVGGLNDKNCTGKRISGKESIIAGHFSWPVAHV

SEQ ID NO: 14943 - protein, 396 aa, Homo sapiens
MEFLKTCVLRRNACTAVCFWRSKVVQKPSVRRISTTSPRSTVMPAWVIDKYGKNEVLRFTQNMMMPIIHYPNEVIVKVHAASVNPIDVNMRSGYGATALNMKRDPLHVKIKGEEFPLTLGRDVSGVVMECGLDVKYFKPGDEVWAAVPPWKQGTLSEFVVVSGNEVSHKPKSLTHTQAASLPYVALTAWSAINKVGGLNDKNCTGKRVLILGASGGVGTFAIQVMKAWDAHVTAVCSQDASELVRKLGADDVIDYKSGSVEEQLKSLKPFDFILDNVGGSTETWAPDFLKKWSGATYVTLVTPFLLNMDRLGIADGMLQTGVTVGSKALKHFWKGVHYRWAFFMASGPCLDDIAELVDAGKIRPVIEQTFPFSKVPEAFLKVERGHARGKTVINVV

SEQ ID NO: 14944 - protein, 301 aa, Homo sapiens
MVELVISPSLTVNSDCLDKLKFNRADAAVWTLSDRQGITKSAPLRVSQLFSRSCPRVLPRQPSTAMAAYGQTQYSAGIQQATPYTAYPPPAQAYGIPSYSIKTEDSLNHSPGQSGFLSYGSSFSTSPTGQSPYTYQMHGTTGFYQGGNGLGNAAGFGSVHQDYPSYPGFPQSQYPQYYGSSYNPPYVPASSICPSPLSTSTYVLQEASHNVPNQSSESLAGEYNTHNGPSTPAKEGDTDRPHRASDGKLRGRSKRSSDPSPAGDNEIEEKQLKDVFKQNKEENQGRETWDPENSGSNPEIQ

SEQ ID NO: 14945 - protein, 538 aa, Homo sapiens
MVELVISPSLTVNSDCLDKLKFNRADAAVWTLSDRQGITKSAPLRVSQLFSRSCPRVLPRQPSTAMAAYGQTQYSAGIQQATPYTAYPPPAQAYGIPSYSIKTEDSLNHSPGQSGFLSYGSSFSTSPTGQSPYTYQMHGTTGFYQGGNGLGNAAGFGSVHQDYPSYPGFPQSQYPQYYGSSYNPPYVPASSICPSPLSTSTYVLQEASHNVPNQSSESLAGEYNTHNGPSTPAKEGDTDRPHRASDGKLRGRSKRSSDPSPAGDNEIERVFVWDLDETIIIFHSLLTGTFASRYGKDTTTSVRIGLMMEEMIFNLADTHLFFNDLEDCDQIHVDDVSSDDNGQDLSTYNFSADGFHSSAPGANLCLGSGVHGGVDWMRKLAFRYRRVKEMYNTYKNNVGGLIGTPKRETWLQLRAELEALTDLWLTHSLKALNLINSRPNCVNVLVTTTQLIPALAKVLLYGLGSVFPIENIYSATKTGKESCFERIMQRFGRKAVYVVIGDGVEEEQGAKKHNMPFWRISCHADLEALRHALELEYL

SEQ ID NO: 14946 - protein, 459 aa, Homo sapiens
MVELVISPSLTVNSDCLDKLKFNRADAAVWTLSDRQGITKSAPLRVSQLFSRSCPRVLPRQPSTAMAAYGQTQYSAGIQQATPYTAYPPPAQAYGIPSYSIKTEDSLNHSPGQSGFLSYGSSFSTSPTGQSPYTYQMHGTTGFYQGGNGLGNAAGFGSVHQDYPSYPGFPQSQYPQYYGSSYNPPYVPASSICPSPLSTSTYVLQEASHNVPNQSSESLAGEYNTHNGPSTPAKEGDTDRPHRASDGKLRGRSKRSSDPSPAGDNEIERVFVWDLDETIIIFHSLLTGTFASRYGKDTTTSVRIGLMMEEMIFNLADTHLFFNDLEDCDQIHVDDVSSDDNGQDLSTYNFSADGFHSSAPGANLCLGSGVHGGVDWMRKLAFRYRRVKEMYNTYKNNVGGKESCFERIMQRFGRKAVYVVIGDGVEEEQGAKKHNMPFWRISCHADLEALRHALELEYL

SEQ ID NO: 14947 - protein, 538 aa, Homo sapiens; identical to SEQ ID NO: 14945

SEQ ID NO: 14948 - protein, 313 aa, Homo sapiens
MEGSLEREAPAGALAAVLKHSSTLPPESTQVRGYDFNRGVNYRALLEAFGTTGFQATNFGRAVQQVNAMIEKKLEPLSQDEDQHADLTQSRRPLTSCTIFLGYTSNLISSGIRETIRYLVQHNMVDVLVTTAGGVEEDLIKCLAPTYLGEFSLRGKELRENGINRIGNLLVPNENYCKFEDWLMPILDQMVMEQNTEGVKWTPSKMIARLGKEINNPESVYYWAQKNHIPVFSPALTDGSLGDMIFFHSYKNPGLVLDIVEGARPDEAVSWGKIRVDAQPVKVYADASLVFPLLVAETFAQKMDAFMHEKNED

SEQ ID NO: 14949 - protein, 313 aa, Homo sapiens; identical to SEQ ID NO: 14948

SEQ ID NO: 14950 - protein, 322 aa, Homo sapiens
MEGSLEREAPAGALAAVLKHSSTLPPESTQVRGYDFNRGVNYRALLEAFGTTGFQATNFGRAVQQVNAMIEKKLEPLSQDEDQHADLTQSRRPLTSCTIFLGYTSNLISSGIRETIRYLVQHNMVDVLVTTAGGVEEDLIKCLAPTYLGEFSLRGKELRENGINRIGNLLVPNENYCKFEDWLMPILDQMVMEQNTEGVKWTPSKMIARLGKEINNPESVYYWAQKNHIPVFSPALTDGSLGDMIFFHSYKNPGLVLDIVEAQEFDGSDSGARPDEAVSWGKIRVDAQPVKVYADASLVFPLLVAETFAQKMDAFMHEKNED

SEQ ID NO: 14951 - protein, 186 aa, Homo sapiens
MPILDQMVMEQNTEGVKWTPSKMIARLGKEINNPESVYYWAQKNHIPVFSPALTDGSLGDMIFFHSYKNPGLVLDIVEDLRLINTQAIFAKCTGMIILGGGVVKHHIANANLMRNGADYAVYINTAQEFDGSDSGARPDEAVSWGKIRVDAQPVKVYADASLVFPLLVAETFAQKMDAFMHEKNED

SEQ ID NO: 14952 - protein, 369 aa, Homo sapiens
MEGSLEREAPAGALAAVLKHSSTLPPESTQVRGYDFNRGVNYRALLEAFGTTGFQATNFGRAVQQVNAMIEKKLEPLSQDEDQHADLTQSRRPLTSCTIFLGYTSNLISSGIRETIRYLVQHNMVDVLVTTAGGVEEDLIKCLAPTYLGEFSLRGKELRENGINRIGNLLVPNENYCKFEDWLMPILDQMVMEQNTEGVKWTPSKMIARLGKEINNPESVYYWAQKNHIPVFSPALTDGSLGDMIFFHSYKNPGLVLDIVEDLRLINTQAIFAKCTGMIILGGGVVKHHIANANLMRNGADYAVYINTAQEFDGSDSGARPDEAVSWGKIRVDAQPVKVYADASLVFPLLVAETFAQKMDAFMHEKNED

SEQ ID NO: 14953 - protein, 322 aa, Homo sapiens; identical to SEQ ID NO: 14950

SEQ ID NO: 14954 - protein, 355 aa, Homo sapiens
MEGSLEREAPAGALAAVLKHSSTLPPESTQVRGYDFNRGVNYRALLEAFGTTGFQATNFGRAVQQVNAMHADLTQSRRPLTSCTIFLGYTSNLISSGIRETIRYLVQHNMVDVLVTTAGGVEEDLIKCLAPTYLGEFSLRGKELRENGINRIGNLLVPNENYCKFEDWLMPILDQMVMEQNTEGVKWTPSKMIARLGKEINNPESVYYWAQKNHIPVFSPALTDGSLGDMIFFHSYKNPGLVLDIVEDLRLINTQAIFAKCTGMIILGGGVVKHHIANANLMRNGADYAVYINTAQEFDGSDSGARPDEAVSWGKIRVDAQPVKVYADASLVFPLLVAETFAQKMDAFMHEKNED

SEQ ID NO: 14955 - protein, 369 aa, Homo sapiens; identical to SEQ ID NO: 14952

SEQ ID NO: 14956 - protein, 255 aa, Homo sapiens [sequence omitted]

SEQ ID NO: 14957 - protein, 578 aa, Homo sapiens
MRQQDAPKPTPAACRCSGLARRVLTIAFALLILGLMTWAYAAGVPLASDRYGLLAFGLYGAFLSAHLVAQSLFAYLEHRRVAAAARGPLDAATARSVALTISAYQEDPAYLRQCLASARALLYPRARLRVLMVVDGNRAEDLYMVDMFREVFADEDPATYVWDGNYHQPWEPAAAGAVGAGAYREVEAEDPGRLAVEALVRTRRCVCVAQRWGGKREVMYTAFKALGDSVDYVQVCDSDTRLDPMALLELVRVLDEDPRVGAVGGDVRILNPLDSWVSFLSSLRYWVAFNVERACQSYFHCVSCISGPLGLYRNNLLQQFLEAWYNQKFLGTHCTFGDDRHLTNRMLSMGYATKYTSRSRCYSETPSSFLRWLSQQTRWSKSYFREWLYNALWWHRHHAWMTYEAVVSGLFPFFVAATVLRLFYAGRPWALLWVLLCVQGVALAKAAFAAWLRGCLRMVLLSLYAPLYMCGLLPAKFLALVTMNQSGWGTSGRRKLAANYVPLLPLALWALLLLGGLVRSVAHEARADWSGPSRAAEAYHLAAGAGAYVGYWVAMLTLYWVGVRRLCRRRTGGYRVQV

SEQ ID NO: 14958 - protein, 577 aa, Homo sapiens
MRQDAPKPTPAACRCSGLARRVLTIAFALLILGLMTWAYAAGVPLASDRYGLLAFGLYGAFLSAHLVAQSLFAYLEHRRVAAAARGPLDAATARSVALTISAYQEDPAYLRQCLASARALLYPRARLRVLMVVDGNRAEDLYMVDMFREVFADEDPATYVWDGNYHQPWEPAAAGAVGAGAYREVEAEDPGRLAVEALVRTRRCVCVAQRWGGKREVMYTAFKALGDSVDYVQVCDSDTRLDPMALLELVRVLDEDPRVGAVGGDVRILNPLDSWVSFLSSLRYWVAFNVERACQSYFHCVSCISGPLGLYRNNLLQQFLEAWYNQKFLGTHCTFGDDRHLTNRMLSMGYATKYTSRSRCYSETPSSFLRWLSQQTRWSKSYFREWLYNALWWHRHHAWMTYEAVVSGLFPFFVAATVLRLFYAGRPWALLWVLLCVQGVALAKAAFAAWLRGCLRMVLLSLYAPLYMCGLLPAKFLALVTMNQSGWGTSGRRKLAANYVPLLPLALWALLLLGGLVRSVAHEARADWSGPSRAAEAYHLAAGAGAYVGYWVAMLTLYWVGVRRLCRRRTGGYRVQV

SEQ ID NO: 14959 - protein, 114 aa, Homo sapiens
PLRAARGQREPTLGGQRPGAPPTLRSPRPRPDPASPAVQPAPRHLPSRSEGPCSPEDGGPHGTRGPSFRPGSPGHGSSGGAAQGAGAGVGPTARRPRPGPGQSLRIWPRPGNTS

SEQ ID NO: 14960 - protein, 212 aa, Homo sapiens
MAARRGALIVLEGVDRAGKSTQSRKLVEALCAAGHRAELLRFPERSTEIGKLLSSYLQKKSDVEDHSVHLLFSANRWEQVPLIKEKLSQGVTLVVDRYAFSGVAFTGAKENFSLDWCKQPDVGLPKPDLVLFLQLQLADAAKRGAFGHERYENGAFQERALRCFHQLMKDTTLNWKMVDASKSIEAVHEDIRVLSEDAIRTATEKPLGELWK

SEQ ID NO: 14961 - protein, 254 aa, Homo sapiens [sequence omitted]

SEQ ID NO: 14962 - protein, 114 aa, Homo sapiens; identical to SEQ ID NO: 14959

SEQ ID NO: 14963 - protein, 472 aa, Homo sapiens
MAGKVRSLLPPLLLAAAGLAGLLLLCVPTRDVREPPALKYGIVLDAGSSHTSMFIYKWPADKENDTGIVGQHSSCDVPGGGISSYADNPSGASQSLVGCLEQALQDVPKERHAGTPLYLGATAGMRLLNLTNPEASTSVLMAVTHTLTQYPFDFRGARILSGQEEGVFGWVTANYLLENFIKYGWVGRWFRPRKGTLGAMDLGGASTQITFETTSPAEDRASEVQLHLYGQHYRVYTHSFLCYGRDQVLQRLLASALQTHGFHPCWPRGFSTQVLLGDVYQSPCTMAQRPQNFNSSARVSLSGSSDPHLCRDLVSGLFSFSSCPFSRCSFNGVFQPPVAGNFVAFSAFFYTVDFLRTSMGLPVATLQQLEAAAVNVCNQTWAQQLLSRGYGFDERAFGGVIFQKKAADTAVGWALGYMLNLTNLIPADPPGLRKGTDFSSWVVLLLLFASALLAALVLLLRQVHSAKLPSTI

SEQ ID NO: 14964 - protein, 495 aa, Homo sapiens
MAGKVRSLLPPLLLAAAGLAGLLLLCVPTRDVREPPALKYGIVLDAGSSHTSMFIYKWPADKENDTGIVGQHSSCDVPGGGISSYADNPSGASQSLVGCLEQALQDVPKERHAGTPLYLGATAGMRLLNLTNPEASTSVLMAVTHTLTQYPFDFRGARILSGQEEGVFGWVTANYLLENFIKYGWVGRWFRPRKGTLGAMDLGGASTQITFETTSPAEDRASEVQLHLYGQHYRVYTHSFLCYGRDQVLQRLLASALQTHGFHPCWPRGFSTQVLLGDVYQSPCTMAQRPQNFNSSARVSLSGSSDPHLCRDLVSGLFSFSSCPFSRCSFNGVFQPPVAGNFVAFSAFFYTVDFLRTSMGLPVATLQQLEAAAVNVCNQTWAQLQARVPGQRARLADYCAGAMFVQQLLSRGYGFDERAFGGVIFQKKAADTAVGWALGYMLNLTNLIPADPPGLRKGTDFSSWVVLLLLFASALLAALVLLLRQVHSAKLPSTI

SEQ ID NO: 14965 - protein, 163 aa, Homo sapiens
MLTPAFHFNILKSYITIFNKSANIMLDKWQHLASEGSSRLDMFEHISLMTLDSLQKCIFSFDSHCQERPSEYIATILELSALVEKRSQHILQHMDFLYYLSHDGRRFHRACRLVHDFTDAVIRERRRTLPTQGIDDFFKDKAKSKTLDFIDVLLLSKVGFSMI

SEQ ID NO: 14966 - protein, 524 aa, Homo sapiens
MSLLSLPWLGLRPVAMSPWLLLLLVVGSWLLARILAWTYAFYNNCRRLQCFPQPPKRNWFWGHLGLITPTEEGLKDSTQMSATYSQGFTVWLGPIIPFIVLCHPDTIRSITNASAAIAPKDNLFIRFLKPWLGEGILLSGGDKWSRHRRMLTPAFHFNILKSYITIFNKSANIMLDKWQHLASEGSSRLDMFEHISLMTLDSLQKCIFSFDSHCQERPSEYIATILELSALVEKRSQHILQHMDFLYYLSHDGRRFHRACRLVHDFTDAVIRERRRTLPTQGIDDFFKDKAKSKTLDFIDVLLLSKDEDGKALSDEDIRAEADTFMFGGHDTTASGLSWVLYNLARHPEYQERCRQEVQELLKDRDPKEIEWDDLAQLPFLTMCVKESLRLHPPAPFISRCCTQDIVLPDGRVIPKGITCLIDIIGVHHNPTVWPDPEVYDPFRFDPENSKGRSPLAFIPFSAGPRNCIGQAFAMAEMKVVLALMLLHFRFLPDHTEPRRKLELIMRAEGGLWLRVEPLNVGLQ

SEQ ID NO: 14967 - protein, 546 aa, Homo sapiens
MLAWETGGFLVNGLLANSQGFRMSLLSLPWLGLRPVAMSPWLLLLLVVGSWLLARILAWTYAFYNNCRRLQCFPQPPKRNWFWGHLGLITPTEEGLKDSTQMSATYSQGFTVWLGPIIPFIVLCHPDTIRSITNASAAIAPKDNLFIRFLKPWLGEGILLSGGDKWSRHRRMLTPAFHFNILKSYITIFNKSANIMLDKWQHLASEGSSRLDMFEHISLMTLDSLQKCIFSFDSHCQERPSEYIATILELSALVEKRSQHILQHMDFLYYLSHDGRRFHRACRLVHDFTDAVIRERRRTLPTQGIDDFFKDKAKSKTLDFIDVLLLSKDEDGKALSDEDIRAEADTFMFGGHDTTASGLSWVLYNLARHPEYQERCRQEVQELLKDRDPKEIEWDDLAQLPFLTMCVKESLRLHPPAPFISRCCTQDIVLPDGRVIPKGITCLIDIIGVHHNPTVWPDPEVYDPFRFDPENSKGRSPLAFIPFSAGPRNCIGQAFAMAEMKVVLALMLLHFRFLPDHTEPRRKLELIMRAEGGLWLRVEPLNVGLQ

SEQ ID NO: 14968 - protein, 463 aa, Homo sapiens
MSLLSLPWLGLRPVAMSPWLLLLLVVGSWLLARILAWTYAFYNNCRRLQCFPQPPKRNWFWGHLGLITPTEEGLKDSTQMSATYSQGFTVWLGPIIPFIVLCHPDTIRSITNASAAIAPKDNLFIRFLKPWLGEGILLSGGDKWSRHRRMLTPAFHFNILKSYITIFNKSANIMLDKWQHLASEGSSRLDMFEHISLMTLDSLQKCIFSFDSHCQERPSEYIATILELSALVEKRSQHILQHMDFLYYLSHDGRRFHRACRLVHDFTDAVIRERRRTLPTQGIDDFFKDKAKSKTLDFIDVLLLSKDEDGKALSDEDIRAEADTFMFGGHDTTASGLSWVLYNLARHPEYQERCRQEVQELLKDRDPKEIEWDDLAQLPFLTMCVKESLRLHPPAPFISRCCTQDIVLPDGRVIPKGITCLIDIIGVHHNPTVWPDPEVLPSPFTTTTPILYFCVCVCEFQGS

SEQ ID NO: 14969 - protein, 375 aa, Homo sapiens
MLTPAFHFNILKSYITIFNKSANIMLDKWQHLASEGSSRLDMFEHISLMTLDSLQKCIFSFDSHCQERPSEYIATILELSALVEKRSQHILQHMDFLYYLSHDGRRFHRACRLVHDFTDAVIRERRRTLPTQGIDDFFKDKAKSKTLDFIDVLLLSKDEDGKALSDEDIRAEADTFMFGGHDTTASGLSWVLYNLARHPEYQERCRQEVQELLKDRDPKEIEWDDLAQLPFLTMCVKESLRLHPPAPFISRCCTQDIVLPDGRVIPKGITCLIDIIGVHHNPTVWPDPEVYDPFRFDPENSKGRSPLAFIPFSAGPRNCIGQAFAMAEMKVVLALMLLHFRFLPDHTEPRRKLELIMRAEGGLWLRVEPLNVGLQ

SEQ ID NO: 14970 - protein, 581 aa, Homo sapiens [sequence omitted]

SEQ ID NO: 14971 - protein, 331 aa, Homo sapiens [sequence omitted]

SEQ ID NO: 14972 - protein, 501 aa, Homo sapiens [sequence omitted]

SEQ ID NO: 14973 - protein, 520 aa, Homo sapiens [sequence omitted]

SEQ ID NO: 14974 - protein, 331 aa, Homo sapiens [sequence omitted]

SEQ ID NO: 14975 - protein, 581 aa, Homo sapiens [sequence omitted]

SEQ ID NO: 14976 - protein, 177 aa, Homo sapiens
MLELNQTLTVLQAFLFHNRIEHIGQIKLKFYHLSLPRVYDLTKPGELGWNADAKAICQALVGLLVLRGLAPGTRGGNRSSVVSVGPPEGNGRGPEDPAGLMVVSEGGPHKLGRSGSSCLCSRLWSIRPACREDLCQHVASTSQPARFAHGGAGTTADGRLLMERFKGEELQGVSIMA

SEQ ID NO: 14977 - protein, 508 aa, Homo sapiens
MLRRALLCLAVAALVRADAPEEEDHVLVLRKSNFAEALAAHKYLLVEFYAPWCGHCKALAPEYAKAAGKLKAEGSEIRLAKVDATEESDLAQQYGVRGYPTIKFFRNGDTASPKEYTAGREADDIVNWLKKRTGPAATTLPDGAAAESLVESSEVAVIGFFKDVESDSAKQFLQAAEAIDDIPFGITSNSDVFSKYQLDKDGVVLFKKFDEGRNNFEGEVTKENLLDFIKHNQLPLVIEFTEQTAPKIFGGEIKTHILLFLPKSVSDYDGKLSNFKTAAESFKGKILFIFIDSDHTDNQRILEFFGLKKEECPAVRLITLEEEMTKYKPESEELTAERITEFCHRFLEGKIKPHLMSQELPEDWDKQPVKVLVGKNFEDVAFDEKKNVFVEFYAPWCGHCKQLAPIWDKLGETYKDHENIVIAKMDSTANEVEAVKVHSFPTLKFFPASADRTVIDYNGERTLDGFKKFLESGGQDGAGDDDDLEDLEEAEEPDMEEDDDQKAVKDEL

SEQ ID NO: 14978 - protein, 357 aa, Homo sapiens
METRLPPRNIQDVESDSAKQFLQAAEAIDDIPFGITSNSDVFSKYQLDKDGVVLFKKFDEGRNNFEGEVTKENLLDFIKHNQLPLVIEFTEQTAPKIFGGEIKTHILLFLPKSVSDYDGKLSNFKTAAESFKGKILFIFIDSDHTDNQRILEFFGLKKEECPAVRLITLEEEMTKYKPESEELTAERITEFCHRFLEGKIKPHLMSQELPEDWDKQPVKVLVGKNFEDVAFDEKKNVFVEFYAPWCGHCKQLAPIWDKLGETYKDHENIVIAKMDSTANEVEAVKVHSFPTLKFFPASADRTVIDYNGERTLDGFKKFLESGGQDGAGDDDDLEDLEEAEEPDMEEDDDQKAVKDEL

SEQ ID NO: 14979 - protein, 185 aa, Homo sapiens
MTKYKPESEELTAERITEFCHRFLEGKIKPHLMSQELPEDWDKQPVKVLVGKNFEDVAFDEKKNVFVEFYAPWCGHCKQLAPIWDKLGETYKDHENIVIAKMDSTANEVEAVKVHSFPTLKFFPASADRTVIDYNGERTLDGFKKFLESGGQDGAGDDDDLEDLEEAEEPDMEEDDDQKAVKDEL

SEQ ID NO: 14980 - protein, 508 aa, Homo sapiens; identical to SEQ ID NO: 14977

SEQ ID NO: 14981 - protein, 508 aa, Homo sapiens; identical to SEQ ID NO: 14977

SEQ ID NO: 14982 - protein, 862 aa, Homo sapiens [sequence omitted]

SEQ ID NO: 14983 - protein, 379 aa, Homo sapiens
MAGPRVEVDGSIMEGGGQILRVSTALSCLLGLPLRVQKIRAGRSTPGLSSGGWKSKIKVLTRPQHLSGLEMIRDLCDGQLEGAEIGSTEITFTPEKIKGGIHTADTKTAGSVCLLMQVSMPCVLFAASPSELHLKGGTNAEMAPQIDYTVMVFKPIVEKFGFIFNCDIKTRGYYPKGGGEVIVRMSPVKQLNPINLTERGCVTKIYGRAFVAGVLPFKVAKDMAAAAVRCIRKEIRDLYVNIQPVQEPKDQAFGNGNGIIIIAETSTGCLFAGSSLGKRGVNADKVGIEAAEMLLANLRHGGTVDEYLQDQLIVFMALANGVSRIKTGPVTLHTQTAIHFAEQIAKAKFIVKKSEDEEDAAKDTYIIECQGIGMTNPNL

SEQ ID NO: 14984 - protein, 366 aa, Homo sapiens
MAGPRVEVDGSIMEGGGQILRVSTALSCLLGLPLRVQKIRAGRSTPGLRPQHLSGLEMIRDLCDGQLEGAEIGSTEITFTPEKIKGGIHTADTKTAGSVCLLMQVSMPCVLFAASPSELHLKGGTNAEMAPQIDYTVMVFKPIVEKFGFIFNCDIKTRGYYPKGGGEVIVRMSPVKQLNPINLTERGCVTKIYGRAFVAGVLPFKVAKDMAAAAVRCIRKEIRDLYVNIQPVQEPKDQAFGNGNGIIIIAETSTGCLFAGSSLGKRGVNADKVGIEAAEMLLANLRHGGTVDEYLQDQLIVFMALANGVSRIKTGPVTLHTQTAIHFAEQIAKAKFIVKKSEDEEDAAKDTYIIECQGIGMTNPNL

SEQ ID NO: 14985 - protein, 856 aa, Homo sapiens
MKPRPAGFVDNKLKQRVIQYLTSNKCGKYVDIGVLASDLQRVYSIDYGRRKRNAFRIQVEKVFSIISSEKELKNLTELEDEHLAKRARQGEEDNEYTESYSDDDSSMEDYPDPQSANHMNSSLLSLYRKGNPDSVSNTPEMEQRETTSSTPRISSKTGSIPLKTPAKDSEGGWFIDKTPSVKKDSFFLDLSCEKSNPKKPITEIQDSKDSSLLESDMKRKGKLKNKGSKRKKEDLQEVDGEIEAVLQKKAKARGLEFQISNVKFEDVGGNDMTLKEVCKMLIHMRHPEVYHHLGVVPPRGVLLHGPPGCGKTLLAHAIAGELDLPILKVAAPEIVSGVSGESEQKLRELFEQAVSNAPCIIFIDEIDAITPKREVASKDMERRIVAQLLTCMDDLNNVAATARVLVIGATNRPDSLDPALRRAGRFDREICLGIPDEASRERILQTLCRKLRLPQAFDFCHLAHLTPGFVGADLMALCREAAMCAVNRVLMKLQEQQKKNPEMEDLPSKGVQEERLGTEPTSETQDELQRLLGLLRDQDPLSEEQMQGLCIELNDFIVALSSVQPSAKREGFVTVPNVTWADIGALEDIREELTMAILAPVRNPDQFKALGLVTPAGVLLAGPPGCGKTLLAKAVANESGLNFISVKGPELLNMYVGESERAVRQVFQRAKNSAPCVIFFDEVDALCPRRSDRETGASVRVVNQLLTEMDGLEARQQVFIMAATNRPDIIDPAILRPGRLDKTLFVGLPPPADRLAILKTITKNGTKPPLDADVNLEAIAGDLRCDCYTGADLSALVREASICALRQEMARQKSGNEKGELKVSHKHFEEAFKKVRSSISKKDQIMYERLQESLSR

SEQ ID NO: 14986 - protein, 750 aa, Homo sapiens
MEDYPDPQSANHMNSSLLSLYRKGNPDSVSNTPEMEQRETTSSTPRISSKTGSIPLKTPAKDSEGGWFIDKTPSVKKDSFFLDLSCEKSNPKKPITEIQDSKDSSLLESDMKRKGKLKNKGSKRKKEDLQEVDGEIEAVLQKKAKARGLEFQISNVKFEDVGGNDMTLKEVCKMLIHMRHPEVYHHLGVVPPRGVLLHGPPGCGKTLLAHAIAGELDLPILKVAAPEIVSGVSGESEQKLRELFEQAVSNAPCIIFIDEIDAITPKREVASKDMERRIVAQLLTCMDDLNNVAATARVLVIGATNRPDSLDPALRRAGRFDREICLGIPDEASRERILQTLCRKLRLPQAFDFCHLAHLTPGFVGADLMALCREAAMCAVNRVLMKLQEQQKKNPEMEDLPSKGVQEERLGTEPTSETQDELQRLLGLLRDQDPLSEEQMQGLCIELNDFIVALSSVQPSAKREGFVTVPNVTWADIGALEDIREELTMAILAPVRNPDQFKALGLVTPAGVLLAGPPGCGKTLLAKAVANESGLNFISVKGPELLNMYVGESERAVRQVFQRAKNSAPCVIFFDEVDALCPRRSDRETGASVRVVNQLLTEMDGLEARQQVFIMAATNRPDIIDPAILRPGRLDKTLFVGLPPPADRLAILKTITKNGTKPPLDADVNLEAIAGDLRCDCYTGADLSALVREASICALRQEMARQKSGNEKGELKVSHKHFEEAFKKVRSSISKKDQIMYERLQESLSR

SEQ ID NO: 14987 - protein, 175 aa, Homo sapiens
MSQYLDSLKVGDVVEFRGPSGLLTYTGKGHFNIQPNKKSPPEPRVAKKLGMIAGGTGITPMLQLIRAILKVPEDPTQCFLLFANQTEKDIILREDLEELQARYPNRFKLWFTLDHPPKDWAYSKGFVTADMIREHLPAPGDDVLVLLCGPPPMVQLACHPNLDKLGYSQKMRFTY

SEQ ID NO: 14988 - protein, 305 aa, Homo sapiens
MGIQTSPVLLASLGVGLVTLLGLAVGSYLVRRSRRPQVTLLDPNEKYLLRLLDKTTVSHNTKRFRFALPTAHHTLGLPVGKHIYLSTRIDGSLVIRPYTPVTSDEDQGYVDLVIKVYLKGVHPKFPEGGKMSQYLDSLKVGDVVEFRGPSGLLTYTGKGHFNIQPNKKSPPEPRVAKKLGMIAGGTGITPMLQLIRAILKVPEDPTQCFLLFANQTEKDIILREDLEELQARYPNRFKLWFTLDHPPKDWAYSKGFVTADMIREHLPAPGDDVLVLLCGPPPMVQLACHPNLDKLGYSQKMRFTY

SEQ ID NO: 14989 - protein, 305 aa, Homo sapiens [sequence omitted]

SEQ ID NO: 14990 - protein, 245 aa, Homo sapiens
MGIQTSPVLLASLGVGLVTLLGLAVGSYLVRRSRRPQVTLLDPNEKYLLRLLDKTVYLKGVHPKFPEGGKMSQYLDSLKVGDVVEFRGPSGLLTYTGKGHFNIQPNKKSPPEPRVAKKLGMIAGGTGITPMLQLIRAILKVPEDPTQCFLLFANQTEKDIILREDLEELQARYPNRFKLWFTLDHPPKDWAYSKGFVTADMIREHLPAPGDDVLVLLCGPPPMVQLACHPNLDKLGYSQKMRFTY

SEQ ID NO: 14991 - protein, 1061 aa, Homo sapiens
MPGPRRPAGSRLRLLLLLLLPPLLLLLRGSHAGNLTVAVVLPLANTSYPWSWARVGPAVELALAQVKARPDLLPGWTVRTVLGSSENALGVCSDTAAPLAAVDLKWEHNPAVFLGPGCVYAAAPVGRFTAHWRVPLLTAGAPALGFGVKDEYALTTRAGPSYAKLGDFVAALHRRLGWERQALMLYAYRPGDEEHCFFLVEGLFMRVRDRLNITVDHLEFAEDDLSHYTRLLRTMPRKGRVIYICSSPDAFRTLMLLALEAGLCGEDYVFFHLDIFGQSLQGGQGPAPRRPWERGDGQDVSARQAFQAAKIITYKDPDNPEYLEFLKQLKHLAYEQFNFTMEDGLVNTIPASFHDGLLLYIQAVTETLAHGGTVTDGENITQRMWNRSFQGVTGYLKIDSSGDRETDFSLWDMDPENGAFRVVLNYNGTSQELVAVSGRKLNWPLGYPPPDIPKCGFDNEDPACNQDHLSTLEVLALVGSLSLLGILIVSFFIYRKMQLEKELASELWRVRWEDVEPSSLERHLRSAGSRLTLSGRGSNYGSLLTTEGQFQVFAKTAYYKGNLVAVKRVNRKRIELTRKVLFELKHMRDVQNEHLTRFVGACTDPPNICILTEYCPRGSLQDILENESITLDWMFRYSLTNDIVKGMLFLHNGAICSHGNLKSSNCVVDGRFVLKITDYGLESFRDLDPEQGHTVYAKKLWTAPELLRMASPPVRGSQAGDVYSFGIILQEIALRSGVFHVEGLDLSPKEIIERVTRGEQPPFRPSLALQSHLEELGLLMQRCWAEDPQERPPFQQIRLTLRKFNRENSSNILDNLLSRMEQYANNLEELVEERTQAYLEEKRKAEALLYQILPHSVAEQLKRGETVQAEAFDSVTIYFSDIVGFTALSAESTPMQVVTLLNDLYTCFDAVIDNFDVYKVETIGDAYMVVSGLPVRNGRLHACEVARMALALLDAVRSFRIRHRPQEQLRLRIGIHTGPVCAGVVGLKMPRYCLFGDTVNTASRMESNGEALKIHLSSETKAVLEEFGGFELELRGDVEMKGKGKVRTYWLLGERGSSTRG

SEQ ID NO: 14992 - protein, 291 aa, Homo sapiens
MIDSMHQSWLPRVVAAAFQSEDPADPCALLQRRQAQAVTAASTCCPQMPLQKLLFSATLTQNPEKLQQLGLHQPRLFSTGLAHRGLEDTDGDGDSGKYAFPVGLTHHYVPCSLSSKPLVVLHLVLEMGFSRVLCFTNSRENSHRLFLLVQAFGGVDVAEFSSRYGPGQRRMILKQFEQGKIQLLISTDATARGIDVQGVELVVNYDAPQYLRTYVHRVGRTARAGKTGQAFTLLLKVQERRFLRMLTEAGAPELQRHELSSKLLQPLVPRYEEALSQLEESVKEERKQRAA

SEQ ID NO: 14993 - protein, 332 aa, Homo sapiens
MATLKDQLIYNLLKEEQTPQNKITVVGVGAVGMACAISILMKDLADELALVDVIEDKLKGEMMDLQHGSLFLRTPKIVSGKDYNVTANSKLVIITAGARQQEGESRLNLVQRNVNIFKFIIPNVVKYSPNCKLLIVSNPVDILTYVAWKISGFPKNRVIGSGCNLDSARFRYLMGERLGVHPLSCHGWVLGEHGDSSVPVWSGMNVAGVSLKTLHPDLGTDKDKEQWKEVHKQVVESAYEVIKLKGYTSWAIGLSVADLAESIMKNLRRVHPVSTMIKGLYGIKDDVFLSVPCILGQNGISDLVKVTLTSEEEARLKKSADTLWGIQKELQF

SEQ ID NO: 14994 - protein, 332 aa, Homo sapiens; identical to SEQ ID NO: 14993

SEQ ID NO: 14995 - protein, 793 aa, Homo sapiens
MPTCRLGPKFLLVSGVSAMAALDSLSLFTSLGLSEQKARETLKNSALSAQLREAATQAQQTLGSTIDKATGILLYGLASRLRDTRRLSFLVSYIASKKIHTEPQLSAALEYVRSHPLDPIDTVDFERECGVGVIVTPEQIEEAVEAAINRHRPQLLVERYHFNMGLLMGEARAVLKWADGKMIKNEVDMQVLHLLGPKLEADLEKKFKVAKARLEETDRRTAKDVVENGETADQTLSLMEQLRGEALKFHKPGENYKTPGYVVTPHTMNLLKQHLEITGGQVRTRFPPEPNGILHIGHAKAINFNFGYAKANNGICFLRFDDTNPEKEEAKFFTAICDMVAWLGYTPYKVTYASDYFDQLYAWAVELIRRGLAYVCHQRGEELKGHNTLPSPWRDRPMEESLLLFEAMRKGKFSEGEATLRMKLVMEDGKMDPVAYRVKYTPHHRTGDKWCIYPTYDYTHCLCDSIEHITHSLCTKEFQARRSSYFWLCNALDVYCPVQWEYGRLNLHYAVVSKRKILQLVATGAVRDWDDPRLFTLTALRRRGFPPEAINNFCARVGVTVAQTTMEPHLLEACVRDVLNDTAPRAMAVLESLRVIITNFPAAKSLDIQVPNFPADETKGFHQVPFAPIVFIERTDFKEEPEPGFKRLAWGQPVGLRHTGYVIELQHVVKGPSGCVESLEVTCRRADAGEKPKAFIHWVSQPLMCEVRLYERLFQHKNPEDPTEVPGGFLSDLNLASLHVVDAALVDCSVALAKPFDKFQFERLGYFSVDPDSHQGKLVFNRTVTLKEDPGKV

SEQ ID NO: 14996 - protein, 630 aa, Homo sapiens
MGLLMGEARAVLKWADGKMIKNEVDMQVLHLLGPKLEADLEKKFKVAKARLEETDRRTAKDVVENGETADQTLSLMEQLRGEALKFHKPGENYKTPGYVVTPHTMNLLKQHLEITGGQVRTRFPPEPNGILHIGHAKAINFNFGYAKANNGICFLRFDDTNPEKEEAKFFTAICDMVAWLGYTPYKVTYASDYFDQLYAWAVELIRRGLAYVCHQRGEELKGHNTLPSPWRDRPMEESLLLFEAMRKGKFSEGEATLRMKLVMEDGKMDPVAYRVKYTPHHRTGDKWCIYPTYDYTHCLCDSIEHITHSLCTKEFQARRSSYFWLCNALDVYCPVQWEYGRLNLHYAVVSKRKILQLVATGAVRDWDDPRLFTLTALRRRGFPPEAINNFCARVGVTVAQTTMEPHLLEACVRDVLNDTAPRAMAVLESLRVIITNFPAAKSLDIQVPNFPADETKGFHQVPFAPIVFIERTDFKEEPEPGFKRLAWGQPVGLRHTGYVIELQHVVKGPSGCVESLEVTCRRADAGEKPKAFIHWVSQPLMCEVRLYERLFQHKNPEDPTEVPGGFLSDLNLASLHVVDAALVDCSVALAKPFDKFQFERLGYFSVDPDSHQGKLVFNRTVTLKEDPGKV

SEQ ID NO: 14997 - DNA, 201 bp, Homo sapiens
cttttaactctagtatcctttgcttgcttcttaccccctttcctaggtgaattctcccacagtggtctgtatctcaacattttctttttaaaggaaaaaawatatatatatagtttctttttattgatcaggtctgtaaatgtgtactaaaaaaatcagagtttatttataaacagaatagtttatttaaagagaaggtct

SEQ ID NO: 14998 - DNA, 201 bp, Homo sapiens
gagacattgttggcctttaaaatctcagaaatgaatgacttaatttagtgtcctgaaagagcttttaaaagaggattttgtggcaatgtttctcttactaygtactcacaggtttgcaaatgggaaaaaagtttacatttcagtttaggggcatatctaagctatgctattccctttagaaaattagcctccaaaatcttt

SEQ ID NO: 14999 - DNA, 201 bp, Homo sapiens
atgtatttttctaggcccttttctatgtctttacatctctgtctcacacacacacacgtatacacacacacagtttatttttaataaaataggattatacyacacacatcctgtcacttgcttttttgcttaagagtatatctaagagaatcctttgtgtcagtgaagctggagctacctcattcttttaactggctgcgt

SEQ ID NO: 15000 - DNA, 201 bp, Homo sapiens
cctcccccgacaatcctgtccttgtgtttgtgtgtgctaacagaaataagttgcagtatggtcgtacttttaactctagtatcctttgcttgcttcttacsccctttcctaggtgaattctcccacagtggtctgtatctcaacattttctttttaaaggaaaaaatatatatatatagtttctttttattgatcaggtct

SEQ ID NO: 15001 - DNA, 201 bp, Homo sapiens
aacattttctttttaaaggaaaaaatatatatatatagtttctttttattgatcaggtctgtaaatgtgtactaaaaaaatcagagtttatttataaacaraatagtttatttaaagagaaggtctcttccttattgatatcatggtatgcattaattccatttgttactattgtgcacaaaagccctgttcacaggggaa

SEQ ID NO: 15002 - DNA, 201 bp, Homo sapiens
ggttctccttgaggatagtgcttagataacagactcattaaacatttactgagtgtctgtcagggatcattcacatccacatcatcctcccggcccctccycgtgttgttcatggagggagtactggcggtccccattttcatgtatggagacttcaggtgaaagaagttaagtgaattctttgttgagtcacaaatcttg

SEQ ID NO: 15003 - DNA, 201 bp, Homo sapiens
aatcagagtttatttataaacagaatagtttatttaaagagaaggtctcttccttattgatatcatggtatgcattaattccatttgttactattgtgcayaaaagccctgttcacaggggaatggtgtaaacatttatactgttttgttcactgtatttagtagacataactgttgaatagttactgaatcatgatgtaa

SEQ ID NO: 15004 - DNA, 201 bp, Homo sapiens
gaaacaagacaacatccttcataccaggaatggtcaagataatgcaagaagaaaaaagctttcaaacaaatcagaaggcagtcaacaaacagaaagggggmcattccttccctggcagttactcaaaactgaaattgcttattgtgtacaccggggcttgtacttggggaatttaataaaaatgctcattaccaagctcca

SEQ ID NO: 15005 - DNA, 201 bp, Homo sapiens
ctatgtgtactacaagattgattgcaacttgctggaattcaagtgaaaatgggctcctcccccgacaatcctgtccttgtgtttgtgtgtgctaacagaartaagttgcagtatggtcgtacttttaactctagtatcctttgcttgcttcttaccccctttcctaggtgaattctcccacagtggtctgtatctcaacat

SEQ ID NO: 15006 - DNA, 201 bp, Homo sapiens
acaaagccagagaaaacaaattcattgttcgtgacttccagtataatgaagaggagatgaaagcagataaagaagaaatgaacaggctttctactgataaraaaaaacaatttggaccacttgtacggtggctgaaagtgaattttagtgaagcatttattgcatggattcacgtgaaagcattacgggttttcgttgagt

SEQ ID NO: 15007 - DNA, 201 bp, Homo sapiens
atgcggcaacttcaaagaacaataatcttgctgtcacttccaagttcaatattcctgacttaaaggttggcacgttggatgtcttggttggcttgtcagaygaactggctaaactggatgcatttgtagaaggagtggttaagaaagtagctcaatacatggctgatgtattggaagatagcaaagacaaagttcaagaga

SEQ ID NO: 15008 - DNA, 201 bp, Homo sapiens
tggccaaatatccaatcaagcagtccctgaaaaatatttctgaaataattgccaagggagtaactcagattgataatgacctgaaatctcgagcatctgcmtacaataacctgaaaggaaatcttcagaatttggaacgaaagaatgcaggaagtttgctaactagaagtctagcagaaattgtgaagaaggatgactttg

SEQ ID NO: 15009 - DNA, 201 bp, Homo sapiens
tgtctgaaacgacgggactttcactgtgatttccaccagagaaattatagcagagtggctgagcatgtgctctgaggccaggccccagctctgctgctgaygagctgtgtggtcctgggcagagtggtctccgagttccagtccctcctctgtaaaatgggcatgattagagtgcccaccgcattagggatgttggggtga

SEQ ID NO: 15010 - DNA, 201 bp, Homo sapiens
tccccgtgttgttcatggagggagtactggcggtccccattttcatgtatggagacttcaggtgaaagaagttaagtgaattctttgttgagtcacaaatyttgagccagtcagaatttgaacctaagatttttgactgctggttgtcacacttcccgccccacactcaactgttgtgtgaatgagccagacacattgctt

SEQ ID NO: 15011 - DNA, 201 bp, Homo sapiens
tattcggtatggagaatcagatgttaacttgtgttgctatttttgttttgttttgttttgttttgtttttgagacaaggtcttgctctgtcacccaggctrgagtgcagtggcatgatcagggcttactgcagcctcaccctcgatttcctgggctcaagcaatcctcccacctcagcccccaagtagctgggcctacagg

SEQ ID NO: 15012 - DNA, 201 bp, Homo sapiens
gcagtggcatgatcagggcttactgcagcctcaccctcgatttcctgggctcaagcaatcctcccacctcagcccccaagtagctgggcctacaggtgcgygctaccacgcctggccaattttttaaattttagcacagatgaggtctcactatgttgcccgggctggtctcgaactcctgagctcaagggatcctcccgc

SEQ ID NO: 15013 - DNA, 201 bp, Homo sapiens
gtctcactatgttgcccgggctggtctcgaactcctgagctcaagggatcctcccgcctcagcctcccaaagtgctggtgttacaggcataagccaccacrcctggcctgtgttgctattatatttggcaggaacccagagtccagaacatttcatctatgatgggttagataatgtgtctagttgtttgcatgccaattt

SEQ ID NO: 15014 - DNA, 201 bp, Homo sapiens
aaaatcttttgtttcaaaatattatattatttcataaataatttcaagcaaatacagacatccacaatgtagaacatgagagaccccctccctcaatttcmacctcccaagggaagtttatgtatttttctaggcccttttctatgtctttacatctctgtctcacacacacacacgtatacacacacacagtttattttt

SEQ ID NO: 15015 - DNA, 201 bp, Homo sapiens
tggatttacccttagagtatttttagatctgagctgatgacttgtgagagaaaaagggaacagagtaaagccatggaagccatgaacagtaagagactgcygcctggcatggtttcttcttctgcagaagatgaaactgaggagaaacaagacaacatccttcataccaggaatggtcaagataatgcaagaagaaaaaag

SEQ ID NO: 15016 - DNA, 201 bp, Homo sapiens; identical to SEQ ID NO: 14997

SEQ ID NO: 15017 - DNA, 201 bp, Homo sapiens; identical to SEQ ID NO: 14998

SEQ ID NO: 15018 - DNA, 201 bp, Homo sapiens; identical to SEQ ID NO: 14999

SEQ ID NO: 15019 - DNA, 201 bp, Homo sapiens; identical to SEQ ID NO: 15000

SEQ ID NO: 15020 - DNA, 201 bp, Homo sapiens; identical to SEQ ID NO: 15001

SEQ ID NO: 15021 - DNA, 201 bp, Homo sapiens; identical to SEQ ID NO: 15002

SEQ ID NO: 15022 - DNA, 201 bp, Homo sapiens; identical to SEQ ID NO: 15003

SEQ ID NO: 15023 - DNA, 201 bp, Homo sapiens; identical to SEQ ID NO: 15004

SEQ ID NO: 15024 - DNA, 201 bp, Homo sapiens; identical to SEQ ID NO: 15005

SEQ ID NO: 15025 - DNA, 201 bp, Homo sapiens; identical to SEQ ID NO: 15006

SEQ ID NO: 15026 - DNA, 201 bp, Homo sapiens; identical to SEQ ID NO: 15007

SEQ ID NO: 15027 - DNA, 201 bp, Homo sapiens; identical to SEQ ID NO: 15008

SEQ ID NO: 15028 - DNA, 201 bp, Homo sapiens; identical to SEQ ID NO: 15009

SEQ ID NO: 15029 - DNA, 201 bp, Homo sapiens; identical to SEQ ID NO: 15010

SEQ ID NO: 15030 - DNA, 201 bp, Homo sapiens; identical to SEQ ID NO: 15011

SEQ ID NO: 15031 - DNA, 201 bp, Homo sapiens; identical to SEQ ID NO: 15012

SEQ ID NO: 15032 - DNA, 201 bp, Homo sapiens; identical to SEQ ID NO: 15013

SEQ ID NO: 15033 - DNA, 201 bp, Homo sapiens; identical to SEQ ID NO: 15014

SEQ ID NO: 15034 - DNA, 201 bp, Homo sapiens; identical to SEQ ID NO: 15015

SEQ ID NO: 15035 - DNA, 201 bp, Homo sapiens
tgacggcccgtggcatctgcgtgtccctagggcactcagtggctgacctgcgggcggcagaggatgctgtgtggagcggagccaccttcatcacccacctsttcaacgccatgctgcctttccaccaccgcgacccaggcatcgtggggctcctgaccagcgaccggctgcccgcaggccgctgcatcttctatgggatga

SEQ ID NO: 15036 - DNA, 201 bp, Homo sapiens
gcagggagaggcaggtgaggttctcagccgatgtgttagaggttgagcatcgcctgtgcccagcttgctggctgtcagtgcttgatgtgcccatcctcagstaaaacccagagctggcatgttggtcatccccacctcagacgggacgcccagtccagagctggtgagccctgggccagcctttgggcctggcctgcccca

SEQ ID NO: 15037 - DNA, 201 bp, Homo sapiens
agtgcttgccggctgtggtgaccctgcctggtgctggagggcagtatgggaggcaccagtgtgccctgctcaccccattagtgtcatcctgccatcttctktgtccccttggccctggcacacacccatgtggcaaacacgggccgtgaggctccctgaacagcttcgaggcgggtgggcttctggagccctcttggctct

SEQ ID NO: 15038 - DNA, 201 bp, Homo sapiens; identical to SEQ ID NO: 15035

SEQ ID NO: 15039 - DNA, 201 bp, Homo sapiens; identical to SEQ ID NO: 15036

SEQ ID NO: 15040 - DNA, 201 bp, Homo sapiens; identical to SEQ ID NO: 15037

SEQ ID NO: 15041 - DNA, 201 bp, Homo sapiens; identical to SEQ ID NO: 15035

SEQ ID NO: 15042 - DNA, 201 bp, Homo sapiens; identical to SEQ ID NO: 15036

SEQ ID NO: 15043 - DNA, 201 bp, Homo sapiens; identical to SEQ ID NO: 15037

SEQ ID NO: 15044 - DNA, 201 bp, Homo sapiens
tgtactgattttgtggccagatgcaatgatctttaaaaacaaatcttttcaatggcataagaagttgacaaaaatttcttaaagtgcaatagattttcaartgtattgtgccttgttctaaaacttttaagtaggtgcacttgacagtattgaggtcatttgttaaggtgctatttcaattagtgtaggtttagactcttg

SEQ ID NO: 15045 - DNA, 201 bp, Homo sapiens
cagtgaagaagtagattcctaaattttattggggaccatggaatggtagttgagaagaaaactatttgcacacaacagattttagatactttttgctgctrgttgtgtaatatttattgaacattttgacaaatatttatttttgtaagcctaaaaatgattctttgaaagtttaaagaaacttgaccaaaagacagtaca

SEQ ID NO: 15046 - DNA, 201 bp, Homo sapiens
aacatcttaaagcattaaagcatagttttttgtatggccaaccttactaaattaagttctgacttgctcactctatcctggataggcacttgggaacttasactctttaagccattccagtcatgatgaggtggaatgtatcagtataccaattaatatttttgaaagagctcttttaggttaatttaagtacagcaattt

SEQ ID NO: 15047 - DNA, 201 bp, Homo sapiens
ctctatcctggataggcacttgggaacttacactctttaagccattccagtcatgatgaggtggaatgtatcagtataccaattaatatttttgaaagagytcttttaggttaatttaagtacagcaatttctcatgtaatgtttagggagtttattctaacctaggcaaacggcatgctatcacaagaaaggtttaaagc

SEQ ID NO: 15048 - DNA, 201 bp, Homo sapiens
ccactaaaaatgcctctcccacttggaattctgtactgattttgtggccagatgcaatgatctttaaaaacaaatcttttcaatggcataagaagttgacraaaatttcttaaagtgcaatagattttcaagtgtattgtgccttgttctaaaacttttaagtaggtgcacttgacagtattgaggtcatttgttaaggtg

SEQ ID NO: 15049 - DNA, 201 bp, Homo sapiens; identical to SEQ ID NO: 15044

SEQ ID NO: 15050 - DNA, 201 bp, Homo sapiens; identical to SEQ ID NO: 15045

SEQ ID NO: 15051 - DNA, 201 bp, Homo sapiens; identical to SEQ ID NO: 15046

SEQ ID NO: 15052 - DNA, 201 bp, Homo sapiens; identical to SEQ ID NO: 15047

SEQ ID NO: 15053 - DNA, 201 bp, Homo sapiens; identical to SEQ ID NO: 15048

SEQ ID NO: 15054 - DNA, 201 bp, Homo sapiens
catttgatcgctccaccaaggtgctggactttcatcacccacaccagttgctggaaggcatggagggcttcaacttggagctctctgaccaccccgagtcyctggagcagatcctggttgactgcagagacaccttgaagtatggggttcgcacaggtcatcctcgatttttcaaccagctctccactggattggatatta

SEQ ID NO: 15055 - DNA, 152 bp, Homo sapiens
ctgatggcgtcttcgaccccatcttcgtccgcaacctcctcgaacgcgggascggaccccaataccactaacctgcgccccacaacgtacgatacctggtgcggcgtggcccatggatgcaccagaaaactggggctcaagatctgcggctt

SEQ ID NO: 15056 - DNA, 201 bp, Homo sapiens
cgaccccatcttcgtccgcaacctcctcgaacgcgggagcggaccccaataccactaacctgcgccccacaacgtacgatacctggtgcggcgtggcccayggatgcaccagaaaactggggctcaagatctgcggcttcttgcaaaggaccaacagcctggaagagaagagtcgccttgtgagtgccttcaaggagaggc

SEQ ID NO: 15057 - DNA, 201 bp, Homo sapiens; identical to SEQ ID NO: 15054

SEQ ID NO: 15058 - DNA, 156 bp, Homo sapiens
gagagggaactagcgagaacgaggaagcagctggaggtgacgccgggcagattacrcctgtcagggccgagccgagcggatcgctgggcgctgtgcagaggaaaggcgggagtgcccggctcgctgtcgcagagccgagctgatggcgtcttcgac

SEQ ID NO: 15059 - DNA, 176 bp, Homo sapiens
gagagggaactagcgagaacgaggaagcagctggaggtgacgccgggcagattacgcctgtcagggccgagccgarcggatcgctgggcgctgtgcagaggaaaggcgggagtgcccggctcgctgtcgcagagccgagctgatggcgtcttcgaccccatcttcgtccgcaacct

SEQ ID NO: 15060 - DNA, 201 bp, Homo sapiens
ctgtgcagaggaaaggcgggagtgcccggctcgctgtcgcagagccgagctgatggcgtcttcgaccccatcttcgtccgcaacctcctcgaacgcgggascggaccccaataccactaacctgcgccccacaacgtacgatacctggtgcggcgtggcccatggatgcaccagaaaactggggctcaagatctgcggctt

SEQ ID NO: 15061 - DNA, 201 bp, Homo sapiens; identical to SEQ ID NO: 15056

SEQ ID NO: 15062 - DNA, 201 bp, Homo sapiens; identical to SEQ ID NO: 15054

SEQ ID NO: 15063 - DNA, 201 bp, Homo sapiens
gcagccgcctctccgaatctctctcttctcctggcgctcgcgtgcgagagggaactagcgagaacgaggaagcagctggaggtgacgccgggcagattacrcctgtcagggccgagccgagcggatcgctgggcgctgtgcagaggaaaggcgggagtgcccggctcgctgtcgcagagccgagcctgtttctgcgccgga

SEQ ID NO: 15064 - DNA, 201 bp, Homo sapiens
ctctcttctcctggcgctcgcgtgcgagagggaactagcgagaacgaggaagcagctggaggtgacgccgggcagattacgcctgtcagggccgagccgarcggatcgctgggcgctgtgcagaggaaaggcgggagtgcccggctcgctgtcgcagagccgagcctgtttctgcgccggaccagtcgaggactctggaca

SEQ ID NO: 15065 - DNA, 201 bp, Homo sapiens
gggccgagccgagcggatcgctgggcgctgtgcagaggaaaggcgggagtgcccggctcgctgtcgcagagccgagcctgtttctgcgccggaccagtcgmggactctggacagtagaggccccgggacgaccgagctgatggcgtcttcgaccccatcttcgtccgcaacctcctcgaacgcgggagcggaccccaatac

SEQ ID NO: 15066 - DNA, 201 bp, Homo sapiens
gccggaccagtcgaggactctggacagtagaggccccgggacgaccgagctgatggcgtcttcgaccccatcttcgtccgcaacctcctcgaacgcgggascggaccccaataccactaacctgcgccccacaacgtacgatacctggtgcggcgtggcccatggatgcaccagaaaactggggctcaagatctgcggctt

SEQ ID NO: 15067 - DNA, 201 bp, Homo sapiens; identical to SEQ ID NO: 15056

SEQ ID NO: 15068 - DNA, 201 bp, Homo sapiens
agtgagtgtggcttagtaatagatcacggcatgtttcccgctccaagagaattcactttaccttcagcagttaccgaggagctaaacatgctgccaaccarcttgtccaacaactccaggaaaactgtttttcaaaacgccatgtcctaggggccaagggaaatgctgttggtgagaatcgacctcactgtcagcgtttct

SEQ ID NO: 15069 - DNA, 201 bp, Homo sapiens
tgaggagatagaaagactgggccaggatctgtaatcatccttcgcagaacatgagtttatgggaatgccttttccctctggcactccagaacaaacctctrtatgttgctgaaacacacaggccatttcattgagggaaaacataatatcttgaagaatattgttaaaaccttacttaaagcttgtttgttctagttagca

SEQ ID NO: 15070 - DNA, 201 bp, Homo sapiens
ctttaccttcagcagttaccgaggagctaaacatgctgccaaccagcttgtccaacaactccaggaaaactgtttttcaaaacgccatgtcctaggggccragggaaatgctgttggtgagaatcgacctcactgtcagcgtttctccacctgaagtgatgatggatgagaaaaaacaccaccaaatgacaagtcacaccc

SEQ ID NO: 15071 - DNA, 201 bp, Homo sapiens
ctgacattgacttcctcattgaggagatagaaagactgggccaggatctgtaatcatccttcgcagaacatgagtttatgggaatgccttttccctctggyactccagaacaaacctctatatgttgctgaaacacacaggccatttcattgagggaaaacataatatcttgaagaatattgttaaaaccttacttaaagc

SEQ ID NO: 15072 - DNA, 201 bp, Homo sapiens; identical to SEQ ID NO: 15056

SEQ ID NO: 15073 - DNA, 201 bp, Homo sapiens
tctgtaagagaattctaagattgtacataaagtcatatatatggaaatcctgttacttaaatagcatctgctcttctcttacgctctctgtctggctgtaygtctggtgttctcaatgcttttctagcaactgttggataataactagatctcctgtaattttgtagtagttgatgaccaatctctgtgactcgcttagct

SEQ ID NO: 15074 - DNA, 201 bp, Homo sapiens; identical to SEQ ID NO: 15054

SEQ ID NO: 15075 - DNA, 156 bp, Homo sapiens; identical to SEQ ID NO: 15058

SEQ ID NO: 15076 - DNA, 201 bp, Homo sapiens
caattcagtgtggccgccacgtggatatcttcaagttctggctgatgtggaaagcaaagggcacagtgggatttgaaaaccagatcaacaaatgcctggarctggctgaatacctctatgccaagattaaaaacagagaagaatttgagatggttttcaatggcgagcctgagcacacaaacgtctgtttttggtatattc

SEQ ID NO: 15077 - DNA, 176 bp, Homo sapiens; identical to SEQ ID NO: 15059

SEQ ID NO: 15078 - DNA, 201 bp, Homo sapiens
ggaagcaccgccataaactcaacggcatagaaagggccaactcagtcacctggaaccctcacaagatgatgggcgtgctgttgcagtgctctgccattctygtcaaggaaaagggtatactccaaggatgcaaccagatgtgtgcaggatacctcttccagccagacaagcagtatgatgtctcctacgacaccggggaca

SEQ ID NO: 15079 - DNA, 201 bp, Homo sapiens; identical to SEQ ID NO: 15060

SEQ ID NO: 15080 - DNA, 201 bp, Homo sapiens
agattgcagatatatgtgagaaatataacctttggttgcatgtcgatgctgcctggggaggtgggctgctcatgtccaggaagcaccgccataaactcaayggcatagaaagggccaactcagtcacctggaaccctcacaagatgatgggcgtgctgttgcagtgctctgccattctcgtcaaggaaaagggtatactcc

SEQ ID NO: 15081 - DNA, 201 bp, Homo sapiens
tagttggatggtcaagtaaagatggtgatgggatattttctcctgggggcgccatatccaacatgtacagcatcatggctgctcgctacaagtacttcccrgaagttaagacaaagggcatggcggctgtgcctaaactggtcctcttcacctcagaacagagtcactattccataaagaaagctggggctgcacttggct

SEQ ID NO: 15082 - DNA, 201 bp, Homo sapiens
caaggcaattcagtgtggccgccacgtggatatcttcaagttctggctgatgtggaaagcaaagggcacagtgggatttgaaaaccagatcaacaaatgcytggaactggctgaatacctctatgccaagattaaaaacagagaagaatttgagatggttttcaatggcgagcctgagcacacaaacgtctgtttttggta

SEQ ID NO: 15083 - DNA, 201 bp, Homo sapiens
ggaaccctcacaagatgatgggcgtgctgttgcagtgctctgccattctcgtcaaggaaaagggtatactccaaggatgcaaccagatgtgtgcaggatayctcttccagccagacaagcagtatgatgtctcctacgacaccggggacaaggcaattcagtgtggccgccacgtggatatcttcaagttctggctgatgt

SEQ ID NO: 15084 - DNA, 201 bp, Homo sapiens
tccaaggatgcaaccagatgtgtgcaggatacctcttccagccagacaagcagtatgatgtctcctacgacaccggggacaaggcaattcagtgtggccgycacgtggatatcttcaagttctggctgatgtggaaagcaaagggcacagtgggatttgaaaaccagatcaacaaatgcctggaactggctgaatacctct

SEQ ID NO: 15085 - DNA, 201 bp, Homo sapiens
gaatttgagatggttttcaatggcgagcctgagcacacaaacgtctgtttttggtatattccacaaagcctcaggggtgtgccagacagccctcaacgacrggaaaagctacacaaggtggctccaaaaatcaaagccctgatgatggagtcaggtacgaccatggttggctaccagccccaaggggacaaggccaacttc

SEQ ID NO: 15086 - DNA, 201 bp, Homo sapiens
gggaaaagctacacaaggtggctccaaaaatcaaagccctgatgatggagtcaggtacgaccatggttggctaccagccccaaggggacaaggccaacttmttccggatggtcatctccaacccagccgctacccagtctgacattgacttcctcattgaggagatagaaagactgggccaggatctgtaatcatccttcg

SEQ ID NO: 15087 - DNA, 201 bp, Homo sapiens
acttaaagcttgtttgttctagttagcaggaaatagtgttctttttaaaaagttgcacattaggaacagagtatatatgtacagttatacatacctctctmtatatatacatgtatagtgagtgtggcttagtaatagatcacggcatgtttcccgctccaagagaattcactttaccttcagcagttaccgaggagctaa

SEQ ID NO: 15088 - DNA, 201 bp, Homo sapiens
cagtatgatgtctcctacgacaccggggacaaggcaattcagtgtggccgccacgtggatatcttcaagttctggctgatgtggaaagcaaagggcacagkgggatttgaaaaccagatcaacaaatgcctggaactggctgaatacctctatgccaagattaaaaacagagaagaatttgagatggttttcaatggcgag

SEQ ID NO: 15089 - DNA, 201 bp, Homo sapiens; identical to SEQ ID NO: 15068

SEQ ID NO: 15090 - DNA, 201 bp, Homo sapiens; identical to SEQ ID NO: 15069

SEQ ID NO: 15091 - DNA, 201 bp, Homo sapiens; identical to SEQ ID NO: 15070

SEQ ID NO: 15092 - DNA, 201 bp, Homo sapiens; identical to SEQ ID NO: 15071

SEQ ID NO: 15093 - DNA, 201 bp, Homo sapiens; identical to SEQ ID NO: 15065

SEQ ID NO: 15094 - DNA, 201 bp, Homo sapiens; identical to SEQ ID NO: 15056

SEQ ID NO: 15095 - DNA, 201 bp, Homo sapiens; identical to SEQ ID NO: 15073

SEQ ID NO: 15096 - DNA, 201 bp, Homo sapiens; identical to SEQ ID NO: 15054

SEQ ID NO: 15097 - DNA, 201 bp, Homo sapiens; identical to SEQ ID NO: 15064

SEQ ID NO: 15098 - DNA, 201 bp, Homo sapiens; identical to SEQ ID NO: 15083

SEQ ID NO: 15099 - DNA, 201 bp, Homo sapiens; identical to SEQ ID NO: 15084

SEQ ID NO: 15100 - DNA, 201 bp, Homo sapiens; identical to SEQ ID NO: 15088

SEQ ID NO: 15101 - DNA, 201 bp, Homo sapiens; identical to SEQ ID NO: 15063

SEQ ID NO: 15102 - DNA, 201 bp, Homo sapiens; identical to SEQ ID NO: 15076

SEQ ID NO: 15103 - DNA, 201 bp, Homo sapiens; identical to SEQ ID NO: 15078

SEQ ID NO: 15104 - DNA, 201 bp, Homo sapiens; identical to SEQ ID NO: 15066

SEQ ID NO: 15105 - DNA, 201 bp, Homo sapiens; identical to SEQ ID NO: 15080

SEQ ID NO: 15106 - DNA, 201 bp, Homo sapiens; identical to SEQ ID NO: 15081

SEQ ID NO: 15107 - DNA, 201 bp, Homo sapiens; identical to SEQ ID NO: 15082

SEQ ID NO: 15108 - DNA, 201 bp, Homo sapiens; identical to SEQ ID NO: 15085

SEQ ID NO: 15109 - DNA, 201 bp, Homo sapiens; identical to SEQ ID NO: 15086

SEQ ID NO: 15110 - DNA, 201 bp, Homo sapiens; identical to SEQ ID NO: 15087

SEQ ID NO: 15111 - DNA, 201 bp, Homo sapiens
gtaactggctttgggcttctatgacttttatggcccgcttctcccggagtagctcaaggtctcctgttcgaactcgagggaccctggaggagatgccaacygttcaacatcctttcctcaatgtcttcgagttggagcggctcctctacacaggcaagacagcctgtaaccatgccgacgaggtctggccaggcctctatc

SEQ ID NO: 15112 - DNA, 201 bp, Homo sapiens
tgtcttgggcagaaacagcggcggcgacaagcagcagctacctggcaactgaacccatcatcaccacagccactcctgcagctgccacggtttctgccacytctaagatgtgccctggtaactggctttgggcttctatgacttttatggcccgcttctcccggagtagctcaaggtctcctgttcgaactcgagggaccc

SEQ ID NO: 15113 - DNA, 201 bp, Homo sapiens
atgtcaccagcgcacacgctgatttgaaccctgcttcgacgtgtgtgtcatggcttaaaaatagctgctaatctgtcaacctgtcttgggcagaaacagcsgcggcgacaagcagcagctacctggcaactgaacccatcatcaccacagccactcctgcagctgccacggtttctgccacctctaagatgtgccctggta

SEQ ID NO: 15114 - DNA, 201 bp, Homo sapiens
tgggcatcacgcacgtcctcaatgcctcacacagccggtggcgaggcacgcccgaggcctatgaggggctgggcatccgctacctgggtgttgaggcccaygactcgccagcctttgacatgagcatccacttccagacggctgccgacttcatccaccgggcgctgagccagccaggagggaagatcctggtgcattgtg

SEQ ID NO: 15115 - DNA, 168 bp, Homo sapiens
ggctggggagcccacgctgcctggcgactcgggccaccgaatgtgagaccgagtccctttatgtcacyagcgcacacgctgatttgaaccctgcttcgacgtgtgtgtcatggcttaaaaatagctgctaatctgtcaacctgtcttgggcagaaacagcggcggcga

SEQ ID NO: 15116 - DNA, 201 bp, Homo sapiens; identical to SEQ ID NO: 15111

SEQ ID NO: 15117 - DNA, 201 bp, Homo sapiens
gactgaggcccagcgcagcgcttgcaaagagcagcagctacctggcaactgaacccatcatcaccacagccactcctgcagctgccacggtttctgccacytctaagatgtgccctggtaactggctttgggcttctatgacttttatggcccgcttctcccggagtagctcaaggtctcctgttcgaactcgagggaccc

SEQ ID NO: 15118 - DNA, 201 bp, Homo sapiens
atgtcaccagcgcacacgctgatttgaaccctgcttcgacgtgtgtgtcatggcttaaaaatagctgctaatctgtcaacctgtcttgggcagaaacagcsgcggcgacagcagcaggagcgtcatggccgtggcgctgtctgcgccggcgatccgcctttcggactgaggcccagcgcagcgcttgcaaagagcagcagc

SEQ ID NO: 15119 - DNA, 201 bp, Homo sapiens; identical to SEQ ID NO: 15114

SEQ ID NO: 15120 - DNA, 201 bp, Homo sapiens
tggtctgcaaggcgcgcgggctcgtggggggttggctggggagcccacgctgcctggcgactcgggccaccgaatgtgagaccgagtccctttatgtcacyagcgcacacgctgatttgaaccctgcttcgacgtgtgtgtcatggcttaaaaatagctgctaatctgtcaacctgtcttgggcagaaacagcggcggcga

SEQ ID NO: 15121 - DNA, 201 bp, Homo sapiens
aagaggaaaactctaccggtgcaggtaagtggtatgaggctcaagttgagcacagggatcagttgtccttgtttttttttggtcttttcttcatttgaagmttaagtattggagccatgggaataaaggttcaacgtcctcgatgtttttttgacattgccattaacaatcaacctgctggaagagttgtctttgaattat

SEQ ID NO: 15122 - DNA, 201 bp, Homo sapiens
gtacggatactcagttgtggagagctgattcccaaatctaaagttaagaaagaagaaaagaaaaggcataaatcatcatcatcttcctcctcctcatctaktgactcagatagctcaagtgattctcagtcctcttctgattcctctgattccgaaagtgctactgaagagaaatcaaagaaaagaaaaaagaaacatcgg

SEQ ID NO: 15123 - DNA, 189 bp, Homo sapiens
gcgggctttagcgccttttctggcggcggtagatttgaagcgcttcaaaggaccggacccagagaagaggaaaactctaccggtgcagrtaagtggtatgaggctcaagttgagcacagggatcagttgtccttgtttttttttggtcttttcttcatttgaagattaagtattggagccatgggaata

SEQ ID NO: 15124 - DNA, 201 bp, Homo sapiens
agatgcaggcattgaattatatattctctttcttaagcagcttctgtatgttggtacttcccaacagaaaatccatgagatatgaatagattttacatttrcatggtataaaatgggatcgaggtctttcttgtctcccgtgtttcttggcaatcactgtatctctattcttgttaaaaataaataaaaattaaccctatt

SEQ ID NO: 15125 - DNA, 201 bp, Homo sapiens
aatcatcatcatcttcctcctcctcatctagtgactcagatagctcaagtgattctcagtcctcttctgattcctctgattccgaaagtgctactgaagaraaatcaaagaaaagaaaaaagaaacatcggaaaaattcccgaaaacacaagaaagaaaagaaaaagcgaaagaaaagcaagaagagtgcatctagtgaga

SEQ ID NO: 15126 - DNA, 201 bp, Homo sapiens
ctggaagagttgtctttgaattattttctgatgtgtgccccaaaacatgcgagaactttcgttgtctttgtacaggtgaaaaggggaccgggaaatcaacwcagaaaccattacattataagagttgtctctttcacagagttgtcaaggattttatggttcaaggtggtgacttcagtgaaggaaatggacgaggagggg

SEQ ID NO: 15127 - DNA, 201 bp, Homo sapiens
tatctgagagtccaaacagaaaaaatgaaaaggagaagaaagttaaagaccataaatctaacagcaaagagagagacatcagaagaaattcagaaaaagawgacaagtataaaaacaaagtgaagaaaagggccaaatctaaaagtaggagtaagagcaaagagaaatcaaagagtaaagaaagagattcaaaacataata

SEQ ID NO: 15128 - DNA, 201 bp, Homo sapiens
gtcacgaagccgagagagaagaacaccaccaggaagatcaagaagtaaagataggaggagaaggaggagagactcacggagctcagagagagaagaaagtsaaagcagaaacaaagacaaatacagaaaccaagagagtaagagctcacacagaaaagaaaattctgagagtgagaaaagaatgtactctaaaagtcgtga

SEQ ID NO: 15129 - DNA, 201 bp, Homo sapiens
gcttcaaaggaccggacccagagaagaggaaaactctaccggtgcaggagcacagggatcagttgtccttgtttttttttggtcttttcttcatttgaagmttaagtattggagccatgggaataaaggttcaacgtcctcgatgtttttttgacattgccattaacaatcaacctgctggaagagttgtctttgaattat

SEQ ID NO: 15130 - DNA, 201 bp, Homo sapiens; identical to SEQ ID NO: 15122

SEQ ID NO: 15131 - DNA, 101 bp, Homo sapiens
tcttaatgtggatttcattgagttgattttttgataatctgcaatctggataatttgtactgctaaagttttaataaactcgacatgagaaaaacactttr

SEQ ID NO: 15132 - DNA, 201 bp, Homo sapiens
ctctaaaagtcgtgatcataatagctcaaataacagcagggaaaaaaaggctgatagagatcaaagtcccttctcaaaaataaaacaaagcagtcaggacratgaattaaagtcctccatgttgaaaaataaggaggatgagaagatcagatcctcagtggaaaaagaaaaccaaaaatcaaaaggtcaagaaaatgacca

SEQ ID NO: 15133 - DNA, 201 bp, Homo sapiens; identical to SEQ ID NO: 15125

SEQ ID NO: 15134 - DNA, 201 bp, Homo sapiens; identical to SEQ ID NO: 15126

SEQ ID NO: 15135 - DNA, 201 bp, Homo sapiens; identical to SEQ ID NO: 15127

SEQ ID NO: 15136 - DNA, 201 bp, Homo sapiens; identical to SEQ ID NO: 15128

SEQ ID NO: 15137 - DNA, 201 bp, Homo sapiens; identical to SEQ ID NO: 15121

SEQ ID NO: 15138 - DNA, 201 bp, Homo sapiens; identical to SEQ ID NO: 15122

SEQ ID NO: 15139 - DNA, 189 bp, Homo sapiens; identical to SEQ ID NO: 15123

SEQ ID NO: 15140 - DNA, 201 bp, Homo sapiens; identical to SEQ ID NO: 15132

SEQ ID NO: 15141 - DNA, 201 bp, Homo sapiens; identical to SEQ ID NO: 15125

SEQ ID NO: 15142 - DNA, 201 bp, Homo sapiens; identical to SEQ ID NO: 15126

SEQ ID NO: 15143 - DNA, 201 bp, Homo sapiens
ttgaggtgagtctgttcagtgataagcagcttgcccctccctatagtggaagacagtggttggctagctttacctctgcctagttacataagtttaactcrggaatgtggcagagactgcaagttgtccatcagtatcctttcccctttctgtaatagaattctccatttaacaaaagtacatgactacccagaatactca

SEQ ID NO: 15144 - DNA, 201 bp, Homo sapiens
gaacccagcatgtgtggctcagccccttctgtgttcccctcctgcaagcgattgacccttgaggtgagtctgttcagtgataagcagcttgcccctccctrtagtggaagacagtggttggctagctttacctctgcctagttacataagtttaactcaggaatgtggcagagactgcaagttgtccatcagtatcctttc

SEQ ID NO: 15145 - DNA, 201 bp, Homo sapiens
gtagttggacctggagcagacattgatcccactcaaataacctttcccggatgcatttgtgtcaaaactccctgcctccctggcacttgctcctgtctccrccatggagagaactatgatgataactcatgccttagagatataggatctggaggaaagtatgcagagcctgtttttgaatgcaatgtcctgtgccgatgc

SEQ ID NO: 15146 - DNA, 201 bp, Homo sapiens
gtaatggaaacatttgttgaccctacttatataggaaatattggaagattccttaatcattcttgtgagccaaaccttttgatgattcctgtccgaattgmctcaatggtacctaagttggcactttttgcagccaaagatattgtgccagaagaagaactctcttatgattattcaggaagatatcttaatctaacagtc

SEQ ID NO: 15147 - DNA, 201 bp, Homo sapiens
ccctcctgcaagcgattgacccttgaggtgagtctgttcagtgataagcagcttgcccctccctatagtggaagacagtggttggctagctttacctctgsctagttacataagtttaactcaggaatgtggcagagactgcaagttgtccatcagtatcctttcccctttctgtaatagaattctccatttaacaaaagt

SEQ ID NO: 15148 - DNA, 201 bp, Homo sapiens
tccaccgtattcacctgacctcttgccaaccaactaccacgtctttaagcatctcaacaactttttgcagggaaaacgcttccacaaccagcaggatgcaraaaatgctttccaagagttcgtcgaatcccaaagcacggatttttacgctacaggaataaaccaacttatttctcgttggcaaaaatgtgttgattgtaa

SEQ ID NO: 15149 - DNA, 201 bp, Homo sapiens
ttgacaacgaccagttgagagcaatcatcgaagctgatccccttacaactacacgagaagttgctgaagaactcaatgtcaaccattctacggtcgttcgrcatttgaagcaaattggaaaggtgaaaaagctcgataagtgggtgcctcatgagctgactgaaaatcaaaaaaatcgtcgttttgaagtgtcatcttctc

SEQ ID NO: 15150 - DNA, 201 bp, Homo sapiens; identical to SEQ ID NO: 15145

SEQ ID NO: 15151 - DNA, 201 bp, Homo sapiens; identical to SEQ ID NO: 15146

SEQ ID NO: 15152 - DNA, 201 bp, Homo sapiens; identical to SEQ ID NO: 15148

SEQ ID NO: 15153 - DNA, 201 bp, Homo sapiens; identical to SEQ ID NO: 15149

SEQ ID NO: 15154 - DNA, 201 bp, Homo sapiens
tgttaaaggttttctctaacttctcaagtcccttgttttgtgttgtttttgttttttcttgccaggtagataaaactgacatagagaaaaggctggagagmgattctgttgcatagactagtcctatggaaaaaaccaagcttcgttagaatgtctgccttactggtttccccagggaaggaaaaatacacttccaccctt

SEQ ID NO: 15155 - DNA, 201 bp, Homo sapiens
tcccacactggtaccacttctcctgcttctggaaggtgggccactccatccggcaccctgacgttgaggtggatgggttctctgagcttcggtgggatgaycagcagaaagtcaagaagacagcggaagctggaggagtgacaggcaaaggccaggatggaattggtagcaaggcagagaagactctgggtgactttgcag

SEQ ID NO: 15156 - DNA, 201 bp, Homo sapiens
tttgtttgcctcttgtggtgaggggtgtgggaagaccaaaggaaggaacgctaacaatttctcatacttagaaacaaaaagagctttccttctccaggaayactgaacatgggagctcttgaaatatgtagtattaaaagttgcatttgaaattcttgactttcttatgggcacttttgtcttccaaattaaaactctacc

SEQ ID NO: 15157 - DNA, 201 bp, Homo sapiens
gcaagaaatgcagcgagagcatccccaaggactcgctccggatggccatcatggtgcagtcgcccatgtttgatggaaaagtcccacactggtaccacttstcctgcttctggaaggtgggccactccatccggcaccctgacgttgaggtggatgggttctctgagcttcggtgggatgatcagcagaaagtcaagaaga

SEQ ID NO: 15158 - DNA, 201 bp, Homo sapiens
tattgctcaggtaaatctgaagtatctgctgaaactgaaattcaattttaagacctccctgtggtaattgggagaggtagccgagtcacacccggtggctstggtatgaattcacccgaagcgcttctgcaccaactcacctggccgctaagttgctgatgggtagtacctgtactaaaccacctcagaaaggattttaca

SEQ ID NO: 15159 - DNA, 201 bp, Homo sapiens
tactgccatacgtctcagggagacccaataggcttaatcctgttgggagaagttgcccttggaaacatgtatgaactgaagcacgcttcacatatcagcargttacccaagggcaagcacagtgtcaaaggtttgggcaaaactacccctgatccttcagctaacattagtctggatggtgtagacgttcctcttgggacc

SEQ ID NO: 15160 - DNA, 201 bp, Homo sapiens
gcgcccgtgacaggctacatgtttggtaaagggatctatttcgctgacatggtctccaagagtgccaactactgccatacgtctcagggagacccaatagscttaatcctgttgggagaagttgcccttggaaacatgtatgaactgaagcacgcttcacatatcagcaagttacccaagggcaagcacagtgtcaaaggt

SEQ ID NO: 15161 - DNA, 201 bp, Homo sapiens
atcctggatctctcaaatcgcttttacaccctgatcccccacgactttgggatgaagaagcctccgctcctgaacaatgcagacagtgtgcaggccaaggyggaaatgcttgacaacctgctggacatcgaggtggcctacagtctgctcaggggagggtctgatgatagcagcaaggatcccatcgatgtcaactatgag

SEQ ID NO: 15162 - DNA, 201 bp, Homo sapiens
ccaagtgtatggtcaagacacagacacccaaccggaaggagtgggtaaccccaaaggaattccgagaaatctcttacctcaagaaattgaaggttaaaaarcaggaccgtatattccccccagaaaccagcgcctccgtggcggccacgcctccgccctccacagcctcggctcctgctgctgtgaactcctctgcttcag

SEQ ID NO: 15163 - DNA, 201 bp, Homo sapiens
aggcttccctgtgcatcagcaccaaaaaggaggtggaaaagatgaataagaagatggaggaagtaaaggaagccaacatccgagttgtgtctgaggacttyctccaggacgtctccgcctccaccaagagccttcaggagttgttcttagcgcacatcttgtccccttggggggcagaggtgaaggcagagcctgttgaag

SEQ ID NO: 15164 - DNA, 201 bp, Homo sapiens
cagggtcttcggatagccccgcctgaagcgcccgtgacaggctacatgtttggtaaagggatctatttcgctgacatggtctccaagagtgccaactactrccatacgtctcagggagacccaataggcttaatcctgttgggagaagttgcccttggaaacatgtatgaactgaagcacgcttcacatatcagcaagtta

SEQ ID NO: 15165 - DNA, 201 bp, Homo sapiens
tgaccgctggtaccatccaggctgctttgtcaagaacagggaggagctgggtttccggcccgagtacagtgcgagtcagctcaagggcttcagcctccttrctacagaggataaagaagccctgaagaagcagctcccaggagtcaagagtgaaggaaagagaaaaggcgatgaggtggatggagtggatgaagtggcgaa

SEQ ID NO: 15166 - DNA, 201 bp, Homo sapiens
agctaaagaaagtgtgttcaactaatgacctgaaggagctactcatcttcaacaagcagcaagtgccttctggggagtcggcgatcttggaccgagtagcygatggcatggtgttcggtgccctccttccctgcgaggaatgctcgggtcagctggtcttcaagagcgatgcctattactgcactggggacgtcactgcct

SEQ ID NO: 15167 - DNA, 201 bp, Homo sapiens
cctctgcttcagcagataagccattatccaacatgaagatcctgactctcgggaagctgtcccggaacaaggatgaagtgaaggccatgattgagaaactyggggggaagttgacggggacggccaacaaggcttccctgtgcatcagcaccaaaaaggaggtggaaaagatgaataagaagatggaggaagtaaaggaag

SEQ ID NO: 15168 - DNA, 201 bp, Homo sapiens
aaaacaggtattggatattcaggtcctggggccgtgtgggtacggtgatcggtagcaacaaactggaacagatgccgtccaaggaggatgccattgagcasttcatgaaattatatgaagaaaaaaccgggaacgcttggcactccaaaaatttcacgaagtatcccaaaaagttctaccccctggagattgactatggcc

SEQ ID NO: 15169 - DNA, 201 bp, Homo sapiens
cggctctggccgctcaggcgcctgcggctgggtgagcgcacgcgaggcggcgaggcggcagcgtgtttctaggtcgtggcgtcgggcttccggagctttgscggcagctaggggaggatggcggagtcttcggataagctctatcgagtcgagtacgccaagagcgggcgcgcctcttgcaagaaatgcagcgagagcatc

SEQ ID NO: 15170 - DNA, 201 bp, Homo sapiens
ccttgttttgtgttgtgtctgtggggaggggttgttttggggttgtttttgttttttcttgccaggtagataaaactgacatagagaaaaggctggagagmgattctgttgcatagactagtcctatggaaaaaaccaagcttcgttagaatgtctgccttactggtttccccagggaaggaaaaatacacttccaccctt

SEQ ID NO: 15171 - DNA, 201 bp, Homo sapiens; identical to SEQ ID NO: 15155

SEQ ID NO: 15172 - DNA, 201 bp, Homo sapiens; identical to SEQ ID NO: 15156

SEQ ID NO: 15173 - DNA, 201 bp, Homo sapiens; identical to SEQ ID NO: 15157

SEQ ID NO: 15174 - DNA, 201 bp, Homo sapiens; identical to SEQ ID NO: 15158

SEQ ID NO: 15175 - DNA, 201 bp, Homo sapiens; identical to SEQ ID NO: 15159

SEQ ID NO: 15176 - DNA, 201 bp, Homo sapiens; identical to SEQ ID NO: 15160

SEQ ID NO: 15177 - DNA, 201 bp, Homo sapiens; identical to SEQ ID NO: 15161

SEQ ID NO: 15178 - DNA, 201 bp, Homo sapiens; identical to SEQ ID NO: 15162

SEQ ID NO: 15179 - DNA, 201 bp, Homo sapiens; identical to SEQ ID NO: 15163

SEQ ID NO: 15180 - DNA, 201 bp, Homo sapiens; identical to SEQ ID NO: 15164

SEQ ID NO: 15181 - DNA, 201 bp, Homo sapiens; identical to SEQ ID NO: 15165

SEQ ID NO: 15182 - DNA, 201 bp, Homo sapiens; identical to SEQ ID NO: 15166

SEQ ID NO: 15183 - DNA, 201 bp, Homo sapiens; identical to SEQ ID NO: 15167

SEQ ID NO: 15184 - DNA, 201 bp, Homo sapiens; identical to SEQ ID NO: 15168

SEQ ID NO: 15185 - DNA, 201 bp, Homo sapiens; identical to SEQ ID NO: 15169

SEQ ID NO: 15186 - DNA, 121 bp, Homo sapiens
tttcatctggtgtgaatgacacctctctactatataacgagtacattgtctatgatattgctcaggtagataaaactgacatagagaaaaggctggagagmgattctgttgcatagactag

SEQ ID NO: 15187 - DNA, 201 bp, Homo sapiens
tcccacactggtaccacttctcctgcttctggaaggtgggccactccatccggcaccctgacgttgaggtggatgggttctctgagcttcggtgggatgaycagcagaaagtcaagaagacagcggaagctggaggagtgacagagaagactctgggtgactttgcagcagagtatgccaagtccaacagaagtacgtgca

SEQ ID NO: 15188 - DNA, 201 bp, Homo sapiens; identical to SEQ ID NO: 15157

SEQ ID NO: 15189 - DNA, 201 bp, Homo sapiens; identical to SEQ ID NO: 15159

SEQ ID NO: 15190 - DNA, 201 bp, Homo sapiens
gaagcgcccacaggctacatgtttggtaaagggatctatttcgctgacatggtctccaagagtgccaactactgccatacgtctcagggagacccaatagscttaatcctgttgggagaagttgcccttggaaacatgtatgaactgaagcacgcttcacatatcagcaagttacccaagggcaagcacagtgtcaaaggt

SEQ ID NO: 15191 - DNA, 201 bp, Homo sapiens; identical to SEQ ID NO: 15161

SEQ ID NO: 15192 - DNA, 201 bp, Homo sapiens; identical to SEQ ID NO: 15163

SEQ ID NO: 15193 - DNA, 201 bp, Homo sapiens; identical to SEQ ID NO: 15165

SEQ ID NO: 15194 - DNA, 201 bp, Homo sapiens
tcccagggtcttcggatagccccgcctgaagcgcccacaggctacatgtttggtaaagggatctatttcgctgacatggtctccaagagtgccaactactrccatacgtctcagggagacccaataggcttaatcctgttgggagaagttgcccttggaaacatgtatgaactgaagcacgcttcacatatcagcaagtta

SEQ ID NO: 15195 - DNA, 201 bp, Homo sapiens; identical to SEQ ID NO: 15168

SEQ ID NO: 15196 - DNA, 201 bp, Homo sapiens
gcaaactacgcaaatataagccattatccaacatgaagatcctgactctcgggaagctgtcccggaacaaggatgaagtgaaggccatgattgagaaactyggggggaagttgacggggacggccaacaaggcttccctgtgcatcagcaccaaaaaggaggtggaaaagatgaataagaagatggaggaagtaaaggaag

SEQ ID NO: 15197 - DNA, 201 bp, Homo sapiens; identical to SEQ ID NO: 15166

SEQ ID NO: 15198 - DNA, 201 bp, Homo sapiens; identical to SEQ ID NO: 15169

SEQ ID NO: 15199 - DNA, 201 bp, Homo sapiens
tcttgaagtatatatatcatagcaaataagtcatctgatgagaacaagctatttgggcacaacacatcaggaaagagagcaccacgtgatggagtttctcyagaagctccagtgataagagatgttgactctaaagttgatttaaggccaggcatggtggtttacgcctataatcccagcattttgggagtccgaggtggg

SEQ ID NO: 15200 - DNA, 201 bp, Homo sapiens
atctacatgtctagagaacactgtgctctattaccattatggataaagatgagatggtttctagagatggtttctactggctgccagaatctagagcaaasccatccccgctcctggttggtcacagaatgactgacaaagacatcgattgatatgcttctttgtgttatttccctcccaagtaaatgtttgtccttgggt

SEQ ID NO: 15201 - DNA, 201 bp, Homo sapiens
ttctatgcttgtaactgtcttctagcagtgagccaaatgtaaaatagtgaataaagtcattattaggaagttcaaaagcattgcttttataatgaacttaraaaaacgtatgtgtgtgtgtttaattagaataaaattcctctaggcagatttcaggagctccctttgttggactctgctggcagagagaatcctatggga

SEQ ID NO: 15202 - DNA, 201 bp, Homo sapiens
gcatctaaaggacaggcttttgccatgtgggcattgccatcctcacaccctgccttttgaatctgcccagagcagggtctgaactcacagtgacccacagrctgctgctggatgaacactcaggctacctaggtcttctcataatggagtggtagtgcaggctgcttgttcagctagaaagaggctgttatgcataggatg

SEQ ID NO: 15203 - DNA, 201 bp, Homo sapiens
ccagctgtcctctggagaggtttgctgagctggttggccctgtgatccctcaagactggtccacggagtgtatgaccacaaacagccatcaaggtactgargacagtacagattagtgtgcacagagatctctgtagaaggagtagctgccctttctcagggcagatgatgctttgagaacatactttggccattaccccc

SEQ ID NO: 15204 - DNA, 201 bp, Homo sapiens
attaccattatggataaagatgagatggtttctagagatggtttctactggctgccagaatctagagcaaagccatccccgctcctggttggtcacagaaygactgacaaagacatcgattgatatgcttctttgtgttatttccctcccaagtaaatgtttgtccttgggtccattttctatgcttgtaactgtcttcta

SEQ ID NO: 15205 - DNA, 201 bp, Homo sapiens
taaagatgagatggtttctagagatggtttctactggctgccagaatctagagcaaagccatccccgctcctggttggtcacagaatgactgacaaagacrtcgattgatatgcttctttgtgttatttccctcccaagtaaatgtttgtccttgggtccattttctatgcttgtaactgtcttctagcagtgagccaaat

SEQ ID NO: 15206 - DNA, 129 bp, Homo sapiens
tgaagtggtagcagttcctcctaactccygccagaaacagctctcctcaacatgagagctgcacccctcctcctggccagggcagcaagccttagccttggcttcttgtttctgctttttttctggcta

SEQ ID NO: 15207 - DNA, 201 bp, Homo sapiens
gcaagagagcgagaccctgtctcaataaataaataaataaataaataaataaataaataaataaataaaaacaaagttgattaagaaaggaagtataggcyaggcacagtggctcacacctgtaatccttgcattttggaaggctgaggcaggaggatcactttaggcctggtgtgttcaagaccagcctggtcaacatag

SEQ ID NO: 15208 - DNA, 201 bp, Homo sapiens
tggcgctagatgtttacaacggactccttcctccctatgcttcttgccacttgacggaattgtactttgagaagggggagtactttgtggagatgtactaycggaatgagacgcagcacgagccgtatcccctcatgctacctggctgcagccccagctgtcctctggagaggtttgctgagctggttggccctgtgatcc

SEQ ID NO: 15209 - DNA, 201 bp, Homo sapiens
ttgatatgcttctttgtgttatttccctcccaagtaaatgtttgtccttgggtccattttctatgcttgtaactgtcttctagcagtgagccaaatgtaaratagtgaataaagtcattattaggaagttcaaaagcattgcttttataatgaacttagaaaaacgtatgtgtgtgtgtttaattagaataaaattcctct

SEQ ID NO: 15210 - DNA, 201 bp, Homo sapiens
ggccaggcacagtggctcacacctgtaatccttgcattttggaaggctgaggcaggaggatcactttaggcctggtgtgttcaagaccagcctggtcaacrtagtgagacactgtctctaccaaaaaaaggaaggaagggacacatatcaaactgaaacaaaattagaaatgtaattatgttctaagtgcctccaagttca

SEQ ID NO: 15211 - DNA, 201 bp, Homo sapiens
tgttcaagaccagcctggtcaacatagtgagacactgtctctaccaaaaaaaggaaggaagggacacatatcaaactgaaacaaaattagaaatgtaattrtgttctaagtgcctccaagttcaaaacttattggaatgttgagagtgtggttacgaaatacgttaggaggacaaaaggaatgtgtaagtctttaatgccg

SEQ ID NO: 15212 - DNA, 201 bp, Homo sapiens
ccaagagtgcactactgtactccagccagggcaagagagcgagaccctgtctcaataaataaataaataaataaataaataaataaataaataaataaaaacaaagttgattaagaaaggaagtataggccaggcacagtggctcacacctgtaatccttgcattttggaaggctgaggcaggaggatcactttaggcctg

SEQ ID NO: 15213 - DNA, 201 bp, Homo sapiens
gctaaggcaggaggatcacttgagccccggaggtcgaggctacagtgagccaagagtgcactactgtactccagccagggcaagagagcgagaccctgtcycaataaataaataaataaataaataaataaataaataaataaataaaaacaaagttgattaagaaaggaagtataggccaggcacagtggctcacacctg

SEQ ID NO: 15214 - DNA, 201 bp, Homo sapiens
ggtgggcagatcacttgagctcaggaggtcaagatcagcctgggcaacatggtgaaacctggtctctacataaaatacaaaaacttagatgggcatggtgstgtgtgcctatagtcccactacttgtggggctaaggcaggaggatcacttgagccccggaggtcgaggctacagtgagccaagagtgcactactgtactc

SEQ ID NO: 15215 - DNA, 201 bp, Homo sapiens
ttaggaggacaaaaggaatgtgtaagtctttaatgccgatatcttcagaaaacctaagcaaacttacaggtcctgctgaaactgcccactctgcaagaagraatcatgatatagctttgccatgtggcagatctacatgtctagagaacactgtgctctattaccattatggataaagatgagatggtttctagagatggt

SEQ ID NO: 15216 - DNA, 201 bp, Homo sapiens
agatggtttctactggctgccagaatctagagcaaagccatccccgctcctggttggtcacagaatgactgacaaagacatcgattgatatgcttctttgwgttatttccctcccaagtaaatgtttgtccttgggtccattttctatgcttgtaactgtcttctagcagtgagccaaatgtaaaatagtgaataaagtca

SEQ ID NO: 15217 - DNA, 201 bp, Homo sapiens
ggtggtttacgcctataatcccagcattttgggagtccgaggtgggcagatcacttgagctcaggaggtcaagatcagcctgggcaacatggtgaaacctkgtctctacataaaatacaaaaacttagatgggcatggtggtgtgtgcctatagtcccactacttgtggggctaaggcaggaggatcacttgagccccgga

SEQ ID NO: 15218 - DNA, 201 bp, Homo sapiens
ttaatgccgatatcttcagaaaacctaagcaaacttacaggtcctgctgaaactgcccactctgcaagaagaaatcatgatatagctttgccatgtggcakatctacatgtctagagaacactgtgctctattaccattatggataaagatgagatggtttctagagatggtttctactggctgccagaatctagagcaaa

SEQ ID NO: 15219 - DNA, 201 bp, Homo sapiens
ctgtgatccctcaagactggtccacggagtgtatgaccacaaacagccatcaaggtactgaagacagtacagattagtgtgcacagagatctctgtagaargagtagctgccctttctcagggcagatgatgctttgagaacatactttggccattacccccagctttgaggaaaatgggctttggatgattattttatgt

SEQ ID NO: 15220 - DNA, 201 bp, Homo sapiens
atgttttagggacccccaacctcaggcaattcctacctcttcacctgaccctgcccccacttgccataaaacttagctaagttttgttttgtttttcagcrttaatgtaaaggggcagcagtgccaaaatataatcagagataaagcttaggtcaaagttcatagagttcccatgaactatatgactggccacacaggatc

SEQ ID NO: 15221 - DNA, 201 bp, Homo sapiens
gatgtgaataggctgatgggcaaaaaaccaatttacccatcagttccagccttctctcaaggagaggcaaagaaaggagatacagtggagacatctggaargttttctccactggaaaactgctactatctgtttttatatttctgttaaaatatatgaggctacagaactaaaaattaaaacctctttgtgtcccttggt

SEQ ID NO: 15222 - DNA, 201 bp, Homo sapiens
aggtcaaagttcatagagttcccatgaactatatgactggccacacaggatcttttgtatttaaggattctgagattttgcttgagcaggattagataagkctgttctttaaatgtctgaaatggaacagatttcaaaaaaaaaccccacaatctagggtgggaacaaggaaggaaagatgtgaataggctgatgggcaaa

SEQ ID NO: 15223 - DNA, 201 bp, Homo sapiens
gccctgtgatccctcaagactggtccacggagtgtatgaccacaaacagccatcaaggtactgaagacagtacagattagtgtgcacagagatctctgtasaaggagtagctgccctttctcagggcagatgatgctttgagaacatactttggccattacccccagctttgaggaaaatgggctttggatgattatttta

SEQ ID NO: 15224 - DNA, 201 bp, Homo sapiens
agagttcccatgaactatatgactggccacacaggatcttttgtatttaaggattctgagattttgcttgagcaggattagataaggctgttctttaaatktctgaaatggaacagatttcaaaaaaaaaccccacaatctagggtgggaacaaggaaggaaagatgtgaataggctgatgggcaaaaaaccaatttaccc

SEQ ID NO: 15225 - DNA, 201 bp, Homo sapiens
cagaattgtccctcctgtccctctatggaattcacaagcagaaagagaaatctaggctccaagggggtgtcctggtcaatgaaatcctcaatcacatgaaragagcaactcagataccaagctacaaaaaactcatcatgtattctgcgcatgacactactgtgagtggcctacagatggcgctagatgtttacaacggac

SEQ ID NO: 15226 - DNA, 201 bp, Homo sapiens
tgatgagaacaagctatttgggcacaacacatcaggaaagagagcaccacgtgatggagtttctctagaagctccagtgataagagatgttgactctaaakttgatttaaggccaggcatggtggtttacgcctataatcccagcattttgggagtccgaggtgggcagatcacttgagctcaggaggtcaagatcagcct

SEQ ID NO: 15227 - DNA, 201 bp, Homo sapiens
acaggatcttttgtatttaaggattctgagattttgcttgagcaggattagataaggctgttctttaaatgtctgaaatggaacagatttcaaaaaaaaaycccacaatctagggtgggaacaaggaaggaaagatgtgaataggctgatgggcaaaaaaccaatttacccatcagttccagccttctctcaaggagaggc

SEQ ID NO: 15228 - DNA, 201 bp, Homo sapiens
taggaggacaaaaggaatgtgtaagtctttaatgccgatatcttcagaaaacctaagcaaacttacaggtcctgctgaaactgcccactctgcaagaagaratcatgatatagctttgccatgtggcagatctacatgtctagagaacactgtgctctattaccattatggataaagatgagatggtttctagagatggtt

SEQ ID NO: 15229 - DNA, 201 bp, Homo sapiens
cgaaatacgttaggaggacaaaaggaatgtgtaagtctttaatgccgatatcttcagaaaacctaagcaaacttacaggtcctgctgaaactgcccactcygcaagaagaaatcatgatatagctttgccatgtggcagatctacatgtctagagaacactgtgctctattaccattatggataaagatgagatggtttct

SEQ ID NO: 15230 - DNA, 201 bp, Homo sapiens
cttcagaaaacctaagcaaacttacaggtcctgctgaaactgcccactctgcaagaagaaatcatgatatagctttgccatgtggcagatctacatgtctrgagaacactgtgctctattaccattatggataaagatgagatggtttctagagatggtttctactggctgccagaatctagagcaaagccatccccgctc

SEQ ID NO: 15231 - DNA, 201 bp, Homo sapiens
tagctttgccatgtggcagatctacatgtctagagaacactgtgctctattaccattatggataaagatgagatggtttctagagatggtttctactggcygccagaatctagagcaaagccatccccgctcctggttggtcacagaatgactgacaaagacatcgattgatatgcttctttgtgttatttccctcccaag

SEQ ID NO: 15232 - DNA, 201 bp, Homo sapiens
gcccactctgcaagaagaaatcatgatatagctttgccatgtggcagatctacatgtctagagaacactgtgctctattaccattatggataaagatgagrtggtttctagagatggtttctactggctgccagaatctagagcaaagccatccccgctcctggttggtcacagaatgactgacaaagacatcgattgata

SEQ ID NO: 15233 - DNA, 201 bp, Homo sapiens
cagatctacatgtctagagaacactgtgctctattaccattatggataaagatgagatggtttctagagatggtttctactggctgccagaatctagagcraagccatccccgctcctggttggtcacagaatgactgacaaagacatcgattgatatgcttctttgtgttatttccctcccaagtaaatgtttgtccttg

SEQ ID NO: 15234 - DNA, 201 bp, Homo sapiens
agactggtccacggagtgtatgaccacaaacagccatcaaggtactgaagacagtacagattagtgtgcacagagatctctgtagaaggagtagctgcccyttctcagggcagatgatgctttgagaacatactttggccattacccccagctttgaggaaaatgggctttggatgattattttatgttttagggaccccc

SEQ ID NO: 15235 - DNA, 201 bp, Homo sapiens
atttaaggattctgagattttgcttgagcaggattagataaggctgttctttaaatgtctgaaatggaacagatttcaaaaaaaaaccccacaatctaggrtgggaacaaggaaggaaagatgtgaataggctgatgggcaaaaaaccaatttacccatcagttccagccttctctcaaggagaggcaaagaaaggagata

SEQ ID NO: 15236 - DNA, 201 bp, Homo sapiens
acaagcagaaagagaaatctaggctccaagggggtgtcctggtcaatgaaatcctcaatcacatgaagagagcaactcagataccaagctacaaaaaactyatcatgtattctgcgcatgacactactgtgagtggcctacagatggcgctagatgtttacaacggactccttcctccctatgcttcttgccacttgacgg

SEQ ID NO: 15237 - DNA, 201 bp, Homo sapiens
tctgcaagaagaaatcatgatatagctttgccatgtggcagatctacatgtctagagaacactgtgctctattaccattatggataaagatgagatggttyctagagatggtttctactggctgccagaatctagagcaaagccatccccgctcctggttggtcacagaatgactgacaaagacatcgattgatatgcttc

SEQ ID NO: 15238 - DNA, 201 bp, Homo sapiens
ttctttaaatgtctgaaatggaacagatttcaaaaaaaaaccccacaatctagggtgggaacaaggaaggaaagatgtgaataggctgatgggcaaaaaamcaatttacccatcagttccagccttctctcaaggagaggcaaagaaaggagatacagtggagacatctggaaagttttctccactggaaaactgctacta

SEQ ID NO: 15239 - DNA, 201 bp, Homo sapiens; identical to SEQ ID NO: 15199

SEQ ID NO: 15240 - DNA, 201 bp, Homo sapiens; identical to SEQ ID NO: 15200

SEQ ID NO: 15241 - DNA, 201 bp, Homo sapiens
ttctatgcttgtaactgtcttctagcagtgagccaaatgtaaaatagtgaataaagtcattattaggaagttcaaaagcattgcttttataatgaacttaraaaaacgtatgtgtgtgtgtttaattagaataaaattcctctaggcagatttcaggagctccctttgtgtttggggtttttgttttagtataacaagatg

SEQ ID NO: 15242 - DNA, 201 bp, Homo sapiens; identical to SEQ ID NO: 15203

SEQ ID NO: 15243 - DNA, 201 bp, Homo sapiens; identical to SEQ ID NO: 15204

SEQ ID NO: 15244 - DNA, 201 bp, Homo sapiens; identical to SEQ ID NO: 15205

SEQ ID NO: 15245 - DNA, 129 bp, Homo sapiens; identical to SEQ ID NO: 15206

SEQ ID NO: 15246 - DNA, 201 bp, Homo sapiens; identical to SEQ ID NO: 15207

SEQ ID NO: 15247 - DNA, 201 bp, Homo sapiens; identical to SEQ ID NO: 15208

SEQ ID NO: 15248 - DNA, 201 bp, Homo sapiens; identical to SEQ ID NO: 15209

SEQ ID NO: 15249 - DNA, 201 bp, Homo sapiens; identical to SEQ ID NO: 15210

SEQ ID NO: 15250 - DNA, 201 bp, Homo sapiens; identical to SEQ ID NO: 15212

SEQ ID NO: 15251 - DNA, 201 bp, Homo sapiens; identical to SEQ ID NO: 15211

SEQ ID NO: 15252 - DNA, 201 bp, Homo sapiens; identical to SEQ ID NO: 15213

SEQ ID NO: 15253 - DNA, 201 bp, Homo sapiens; identical to SEQ ID NO: 15214

SEQ ID NO: 15254 - DNA, 201 bp, Homo sapiens; identical to SEQ ID NO: 15215

SEQ ID NO: 15255 - DNA, 201 bp, Homo sapiens; identical to SEQ ID NO: 15216

SEQ ID NO: 15256 - DNA, 201 bp, Homo sapiens; identical to SEQ ID NO: 15217

SEQ ID NO: 15257 - DNA, 201 bp, Homo sapiens; identical to SEQ ID NO: 15218

SEQ ID NO: 15258 - DNA, 201 bp, Homo sapiens; identical to SEQ ID NO: 15219

SEQ ID NO: 15259 - DNA, 201 bp, Homo sapiens; identical to SEQ ID NO: 15220

SEQ ID NO: 15260 - DNA, 201 bp, Homo sapiens; identical to SEQ ID NO: 15221

SEQ ID NO: 15261 - DNA, 201 bp, Homo sapiens; identical to SEQ ID NO: 15222

SEQ ID NO: 15262 - DNA, 201 bp, Homo sapiens; identical to SEQ ID NO: 15223

SEQ ID NO: 15263 - DNA, 201 bp, Homo sapiens; identical to SEQ ID NO: 15224

SEQ ID NO: 15264 - DNA, 201 bp, Homo sapiens; identical to SEQ ID NO: 15225

SEQ ID NO: 15265 - DNA, 201 bp, Homo sapiens; identical to SEQ ID NO: 15226

SEQ ID NO: 15266 - DNA, 201 bp, Homo sapiens; identical to SEQ ID NO: 15227

SEQ ID NO: 15267 - DNA, 201 bp, Homo sapiens; identical to SEQ ID NO: 15228

SEQ ID NO: 15268 - DNA, 201 bp, Homo sapiens; identical to SEQ ID NO: 15229

SEQ ID NO: 15269 - DNA, 201 bp, Homo sapiens; identical to SEQ ID NO: 15230

SEQ ID NO: 15270 - DNA, 201 bp, Homo sapiens; identical to SEQ ID NO: 15231

SEQ ID NO: 15271 - DNA, 201 bp, Homo sapiens; identical to SEQ ID NO: 15232

SEQ ID NO: 15272 - DNA, 201 bp, Homo sapiens; identical to SEQ ID NO: 15233

SEQ ID NO: 15273 - DNA, 201 bp, Homo sapiens; identical to SEQ ID NO: 15234

SEQ ID NO: 15274 - DNA, 201 bp, Homo sapiens; identical to SEQ ID NO: 15235

SEQ ID NO: 15275 - DNA, 201 bp, Homo sapiens; identical to SEQ ID NO: 15236

SEQ ID NO: 15276 - DNA, 201 bp, Homo sapiens; identical to SEQ ID NO: 15237

SEQ ID NO: 15277 - DNA, 201 bp, Homo sapiens; identical to SEQ ID NO: 15238

SEQ ID NO: 15278 - DNA, 129 bp, Homo sapiens; identical to SEQ ID NO: 15206

SEQ ID NO: 15279 - DNA, 201 bp, Homo sapiens; identical to SEQ ID NO: 15208

SEQ ID NO: 15280 - DNA, 201 bp, Homo sapiens; identical to SEQ ID NO: 15202

SEQ ID NO: 15281 - DNA, 201 bp, Homo sapiens; identical to SEQ ID NO: 15225

SEQ ID NO: 15282 - DNA, 201 bp, Homo sapiens; identical to SEQ ID NO: 15236

SEQ ID NO: 15283 - DNA, 201 bp, Homo sapiens; identical to SEQ ID NO: 15199

SEQ ID NO: 15284 - DNA, 201 bp, Homo sapiens; identical to SEQ ID NO: 15200

SEQ ID NO: 15285 - DNA, 201 bp, Homo sapiens; identical to SEQ ID NO: 15201

SEQ ID NO: 15286 - DNA, 201 bp, Homo sapiens; identical to SEQ ID NO: 15202

SEQ ID NO: 15287 - DNA, 201 bp, Homo sapiens; identical to SEQ ID NO: 15203

SEQ ID NO: 15288 - DNA, 201 bp, Homo sapiens; identical to SEQ ID NO: 15204

SEQ ID NO: 15289 - DNA, 201 bp, Homo sapiens; identical to SEQ ID NO: 15205

SEQ ID NO: 15290 - DNA, 129 bp, Homo sapiens; identical to SEQ ID NO: 15206

SEQ ID NO: 15291 - DNA, 201 bp, Homo sapiens; identical to SEQ ID NO: 15207

SEQ ID NO: 15292 - DNA, 201 bp, Homo sapiens; identical to SEQ ID NO: 15208

SEQ ID NO: 15293 - DNA, 201 bp, Homo sapiens; identical to SEQ ID NO: 15209

SEQ ID NO: 15294 - DNA, 201 bp, Homo sapiens; identical to SEQ ID NO: 15210

SEQ ID NO: 15295 - DNA, 201 bp, Homo sapiens; identical to SEQ ID NO: 15211

SEQ ID NO: 15296 - DNA, 201 bp, Homo sapiens; identical to SEQ ID NO: 15212

SEQ ID NO: 15297 - DNA, 201 bp, Homo sapiens; identical to SEQ ID NO: 15213

SEQ ID NO: 15298 - DNA, 201 bp, Homo sapiens; identical to SEQ ID NO: 15214

SEQ ID NO: 15299 - DNA, 201 bp, Homo sapiens; identical to SEQ ID NO: 15215

SEQ ID NO: 15300 - DNA, 201 bp, Homo sapiens; identical to SEQ ID NO: 15216

SEQ ID NO: 15301 - DNA, 201 bp, Homo sapiens; identical to SEQ ID NO: 15217

SEQ ID NO: 15302 - DNA, 201 bp, Homo sapiens; identical to SEQ ID NO: 15218

SEQ ID NO: 15303 - DNA, 201 bp, Homo sapiens; identical to SEQ ID NO: 15219

SEQ ID NO: 15304 - DNA, 201 bp, Homo sapiens; identical to SEQ ID NO: 15220

SEQ ID NO: 15305 - DNA, 201 bp, Homo sapiens; identical to SEQ ID NO: 15221

SEQ ID NO: 15306 - DNA, 201 bp, Homo sapiens; identical to SEQ ID NO: 15222

SEQ ID NO: 15307 - DNA, 201 bp, Homo sapiens; identical to SEQ ID NO: 15223

SEQ ID NO: 15308 - DNA, 201 bp, Homo sapiens; identical to SEQ ID NO: 15224

SEQ ID NO: 15309 - DNA, 201 bp, Homo sapiens; identical to SEQ ID NO: 15225

SEQ ID NO: 15310 - DNA, 201 bp, Homo sapiens; identical to SEQ ID NO: 15226

SEQ ID NO: 15311 - DNA, 201 bp, Homo sapiens; identical to SEQ ID NO: 15227

SEQ ID NO: 15312 - DNA, 201 bp, Homo sapiens; identical to SEQ ID NO: 15228

SEQ ID NO: 15313 - DNA, 201 bp, Homo sapiens; identical to SEQ ID NO: 15229

SEQ ID NO: 15314 - DNA, 201 bp, Homo sapiens; identical to SEQ ID NO: 15230

SEQ ID NO: 15315 - DNA, 201 bp, Homo sapiens; identical to SEQ ID NO: 15231

SEQ ID NO: 15316 - DNA, 201 bp, Homo sapiens; identical to SEQ ID NO: 15232

SEQ ID NO: 15317 - DNA, 201 bp, Homo sapiens; identical to SEQ ID NO: 15233

SEQ ID NO: 15318 - DNA, 201 bp, Homo sapiens; identical to SEQ ID NO: 15234

SEQ ID NO: 15319 - DNA, 201 bp, Homo sapiens; identical to SEQ ID NO: 15235

SEQ ID NO: 15320 - DNA, 201 bp, Homo sapiens; identical to SEQ ID NO: 15236

SEQ ID NO: 15321 - DNA, 201 bp, Homo sapiens; identical to SEQ ID NO: 15237

SEQ ID NO: 15322 - DNA, 201 bp, Homo sapiens; identical to SEQ ID NO: 15238

SEQ ID NO: 15323 - DNA, 201 bp, Homo sapiens
agtagaaaccaagattttaaaatgaagtgtcaagacgaaggcaaaacctgagcagttcctaaaaagatttgctgttagaaattttctttgtggcagtcatytattaaggattcaactcgtgatacaccaaaagaagagttgacttcagagatgtgttccatgctctctagcacaggaatgaataaatttataacacctgct

SEQ ID NO: 15324 - DNA, 142 bp, Homo sapiens
atttgcttgcaacactggcacctctgccctgcaccccgggartgagcagtgagtgaggctcgggtctgggcgctggctccgaatcttcgggctgggagagactccaccatctgggggcggcctgggggagcagccttagtgt

SEQ ID NO: 15325 - DNA, 201 bp, Homo sapiens
aaatagaggataccaacttgtctacatttcagaccgagtttgtcagcttttttgaaaacacatcagtagaaaccaagattttaaaatgaagtgtcaagacraaggcaaaacctgagcagttcctaaaaagatttgctgttagaaattttctttgtggcagtcatttattaaggattcaactcgtgatacaccaaaagaaga

SEQ ID NO: 15326 - DNA, 201 bp, Homo sapiens
aggagtgacaaggcggtgcattctggacctggcacatcagtggggtgaatttaaggtgtcagagagatacctcaccatggatgacttgacaacagccctgraggggaacagagtgagagagatgtttggctctggtacagcctgtgttgtttgcccagtttctgatatactgtacaaaggcgagacaatacacattccaac

SEQ ID NO: 15327 - DNA, 201 bp, Homo sapiens
cttgacaacagccctggaggggaacagagtgagagagatgtttggctctggtacagcctgtgttgtttgcccagtttctgatatactgtacaaaggcgagscaatacacattccaactatggagaatggtcctaagctggcaagccgcatcttgagcaaattaactgatatccagtatggaagagaagagagcgactggac

SEQ ID NO: 15328 - DNA, 201 bp, Homo sapiens
gaagagaagagagcgactggacaattgtgctatcctgaatggaaaatagaggatacaatggaaaatagaggataccaacttgtctacatttcagaccgagyttgtcagcttttttgaaaacacatcagtagaaaccaagattttaaaatgaagtgtcaagacgaaggcaaaacctgagcagttcctaaaaagatttgctgt

SEQ ID NO: 15329 - DNA, 201 bp, Homo sapiens
cctggcacatcagtggggtgaatttaaggtgtcagagagatacctcaccatggatgacttgacaacagccctggaggggaacagagtgagagagatgtttrgctctggtacagcctgtgttgtttgcccagtttctgatatactgtacaaaggcgagacaatacacattccaactatggagaatggtcctaagctggcaag

SEQ ID NO: 15330 - DNA, 201 bp, Homo sapiens
ttaactgatatccagtatggaagagaagagagcgactggacaattgtgctatcctgaatggaaaatagaggatacaatggaaaatagaggataccaacttktctacatttcagaccgagtttgtcagcttttttgaaaacacatcagtagaaaccaagattttaaaatgaagtgtcaagacgaaggcaaaacctgagcagt

SEQ ID NO: 15331 - DNA, 201 bp, Homo sapiens
tctggtttatctaaggaaagtcaaatcttgacagaaaacatttttccttggaaggtcaactctcagacattgtattttggtttccctcagtcctcataacktccttcttgctgaacatattttattctcttttcagagaaggaaaataaaaaggattctaaaagtttgatgcattggaaaaatttccttgaggcatttagc

SEQ ID NO: 15332 - DNA, 201 bp, Homo sapiens; identical to SEQ ID NO: 15326

SEQ ID NO: 15333 - DNA, 201 bp, Homo sapiens
catgggattttcctcaatgattttagtgcctccttttgtacttcactcagatactaaatagtagtttattctttaatataagttacattctgctcctcaamcaaatgcaattttttgtgtgtgtttgaaagctaatttgagaaaatttcataggttacatttcctgcagcctatctttatccacagaaagtgttttctttt

SEQ ID NO: 15334 - DNA, 201 bp, Homo sapiens
aagagtgattgtttcttcatgccagagaaaatgaattgcaatcatcaaatggtgtttcataacttggtagtagtaacttaccttaccttacctagaaaaayattaatgtaagccatataacatgggattttcctcaatgattttagtgcctccttttgtacttcactcagatactaaatagtagtttattctttaatataa

SEQ ID NO: 15335 - DNA, 201 bp, Homo sapiens
cttgacaacagccctggaggggaacagagtgagagagatgtttggctctggtacagcctgtgttgtttgcccagtttctgatatactgtacaaaggcgagscaatacacattccaactatggagaatggtcctaagctggcaagccgcatcttgagcaaattaactgatatccaggtaaagtatggaagagaagagagcga

SEQ ID NO: 15336 - DNA, 201 bp, Homo sapiens
aaaatgggctttgattcttttccaaaacttttagccatagggtcttttatagacagggatagtaaaatgaaaattgagaaatataagatgaaaaggaatgrtaaaaatatcttttagggggcttttaattggtgatctgaaatcttgggagaagctgttcttttcaggcctgaggtgctcttgactgtcgcctgcgcactg

SEQ ID NO: 15337 - DNA, 201 bp, Homo sapiens; identical to SEQ ID NO: 15329

SEQ ID NO: 15338 - DNA, 201 bp, Homo sapiens
ttgaatggagatttgatgagcaagtggttaggatgcagggagagctactatgggtgatattttccttgtttaggagctgtgagttaaaattgtatcctttstggtttatctaaggaaagtcaaatcttgacagaaaacatttttccttggaaggtcaactctcagacattgtattttggtttccctcagtcctcataactt

SEQ ID NO: 15339 - DNA, 201 bp, Homo sapiens; identical to SEQ ID NO: 15331

SEQ ID NO: 15340 - DNA, 201 bp, Homo sapiens; identical to SEQ ID NO: 15326

SEQ ID NO: 15341 - DNA, 201 bp, Homo sapiens; identical to SEQ ID NO: 15333

SEQ ID NO: 15342 - DNA, 201 bp, Homo sapiens; identical to SEQ ID NO: 15334

SEQ ID NO: 15343 - DNA, 201 bp, Homo sapiens; identical to SEQ ID NO: 15327

SEQ ID NO: 15344 - DNA, 201 bp, Homo sapiens; identical to SEQ ID NO: 15336

SEQ ID NO: 15345 - DNA, 201 bp, Homo sapiens; identical to SEQ ID NO: 15329

SEQ ID NO: 15346 - DNA, 201 bp, Homo sapiens; identical to SEQ ID NO: 15338

SEQ ID NO: 15347 - DNA, 201 bp, Homo sapiens; identical to SEQ ID NO: 15331

SEQ ID NO: 15348 - DNA, 142 bp, Homo sapiens; identical to SEQ ID NO: 15324

SEQ ID NO: 15349 - DNA, 201 bp, Homo sapiens; identical to SEQ ID NO: 15326

SEQ ID NO: 15350 - DNA, 201 bp, Homo sapiens; identical to SEQ ID NO: 15333

SEQ ID NO: 15351 - DNA, 201 bp, Homo sapiens; identical to SEQ ID NO: 15334

SEQ ID NO: 15352 - DNA, 201 bp, Homo sapiens; identical to SEQ ID NO: 15327

SEQ ID NO: 15353 - DNA, 201 bp, Homo sapiens; identical to SEQ ID NO: 15336

SEQ ID NO: 15354 - DNA, 201 bp, Homo sapiens; identical to SEQ ID NO: 15329

SEQ ID NO: 15355 - DNA, 201 bp, Homo sapiens; identical to SEQ ID NO: 15338

SEQ ID NO: 15356 - DNA, 201 bp, Homo sapiens
tctggtcctgaactgggacagctgacatttcttggcttggtgggaatcattgatccacctagaactggtgtgaaagaagctgttacaacactcattgcctsaggagtatcaataaaaatgattactggagattcacaggagactgcagttgcaatcgccagtcgtctgggattgtattccaaaacttcccagtcagtctca

SEQ ID NO: 15357 - DNA, 201 bp, Homo sapiens
gacatcaaaaaaagcaagtgaattaccagtcagtgaagttgcaagcattctccaagctgatcttcagaatggtctaaacaaatgtgaagttagtcataggygagcctttcatggctggaatgagtttgatattagtgaagatgagccactgtggaagaagtatatttctcagtttaaaaatccccttattatgctgcttct

SEQ ID NO: 15358 - DNA, 201 bp, Homo sapiens
agagttcctgctgacttacgcttgtttgaggctgtggatctttccattgatgagtccagcttgacaggtgagacaacgccttgttctaaggtgacagctcytcagccagctgcaactaatggagatcttgcatcgagaagtaacattgcctttatgggaacactggtcagatgtggcaaagcaaagggtgttgtcattgga

SEQ ID NO: 15359 - DNA, 167 bp, Homo sapiens
tgtttgagattggactctgcagtaatagaatgttttgctatgcagttcttggatccatcatgggacaattactagttatttactttcctccgcttcagaargtttttcagactgagagcctaagcatactgggtctggctctgggagaggagtggacagcagctggt

SEQ ID NO: 15360 - DNA, 193 bp, Homo sapiens
gtgttcatacttggctgtctggtttcaccaggaactctacccaaaagaggaaacagcaaggagaacatttgctttgtttgtaggagggaagtkgtcgagctacaaacaaatctttaggcatctgaggaattgctaagtttctaatttcatatggttgctgacaaggaggtgcagacaaggaccctcttgcttt

SEQ ID NO: 15361 - DNA, 201 bp, Homo sapiens
gcctttctgttggggatagagttcctgctgacttacgcttgtttgaggctgtggatctttccattgatgagtccagcttgacaggtgagacaacgccttgytctaaggtgacagctcctcagccagctgcaactaatggagatcttgcatcgagaagtaacattgcctttatgggaacactggtcagatgtggcaaagcaa

SEQ ID NO: 15362 - DNA, 201 bp, Homo sapiens
accaaaggttgcagtattttacagagctagcccaaggcacaagatgaaaattattaagtcgctacagaagaacggttcagttgtagccatgacaggagatrgagtaaatgatgcagttgctctgaaggctgcagacattggagttgcgatgggccagactggtacagatgtttgcaaagaggcagcagacatgatcctagt

SEQ ID NO: 15363 - DNA, 201 bp, Homo sapiens
atcctagtggatgatgattttcaaaccataatgtctgcaatcgaagagggtaaagggatttataataacattaaaaatttcgttagattccagctgagcaygagtatagcagcattaactttaatctcattggctacattaatgaactttcctaatcctctcaatgccatgcagattttgtggatcaatattattatggat

SEQ ID NO: 15364 - DNA, 201 bp, Homo sapiens
cattgcctttatgggaacactggtcagatgtggcaaagcaaagggtgttgtcattggaacaggagaaaattctgaatttggggaggtttttaaaatgatgyaagcagaagaggcaccaaaaacccctctgcagaagagcatggacctcttaggaaaacaactttccttttactcctttggtataataggaatcatcatgtt

SEQ ID NO: 15365 - DNA, 201 bp, Homo sapiens
cacgagtatagcagcattaactttaatctcattggctacattaatgaactttcctaatcctctcaatgccatgcagattttgtggatcaatattattatgkatggacccccagctcagagccttggagtagaaccagtggataaagatgtcattcgtaaacctcctcgcaactggaaagacagcattttgactaaaaactt

SEQ ID NO: 15366 - DNA, 201 bp, Homo sapiens
ttcatcaataatcattgtttgtgggactttgtttgtcttctggcgtgagctacgagacaatgtgattacacctcgagacacaacaatgaccttcacatgcyttgtgttttttgacatgttcaatgcactaagttccagatcccagaccaagtctgtgtttgagattggactctgcagtaatagaatgttttgctatgcagt

SEQ ID NO: 15367 - DNA, 201 bp, Homo sapiens
agcattaactttaatctcattggctacattaatgaactttcctaatcctctcaatgccatgcagattttgtggatcaatattattatggatggacccccarctcagagccttggagtagaaccagtggataaagatgtcattcgtaaacctcctcgcaactggaaagacagcattttgactaaaaacttgatacttaaaat

SEQ ID NO: 15368 - DNA, 201 bp, Homo sapiens
ctggaaagacagcattttgactaaaaacttgatacttaaaatacttgtttcatcaataatcattgtttgtgggactttgtttgtcttctggcgtgagctaygagacaatgtgattacacctcgagacacaacaatgaccttcacatgctttgtgttttttgacatgttcaatgcactaagttccagatcccagaccaagtc

SEQ ID NO: 15369 - DNA, 201 bp, Homo sapiens
atagcagcattaactttaatctcattggctacattaatgaactttcctaatcctctcaatgccatgcagattttgtggatcaatattattatggatggacscccagctcagagccttggagtagaaccagtggataaagatgtcattcgtaaacctcctcgcaactggaaagacagcattttgactaaaaacttgatactt

SEQ ID NO: 15370 - DNA, 201 bp, Homo sapiens
tggttactgggaaaagatatcctggaaatgtttactattagtgtaagtttggctgtagcagcaattcctgaaggtctccccattgtggtcacagtgacgcyagctcttggtgttatgagaatggtgaagaaaagggccattgtgaaaaagctgcctattgttgaaactctgggctgctgtaatgtgatttgttcagataaa

SEQ ID NO: 15371 - DNA, 201 bp, Homo sapiens
gaaggtctccccattgtggtcacagtgacgctagctcttggtgttatgagaatggtgaagaaaagggccattgtgaaaaagctgcctattgttgaaactcygggctgctgtaatgtgatttgttcagataaaactggaacactgacgaagaatgaaatgactgttactcacatatttacttcagatggtctgcatgctgag

SEQ ID NO: 15372 - DNA, 201 bp, Homo sapiens
cccattgtggtcacagtgacgctagctcttggtgttatgagaatggtgaagaaaagggccattgtgaaaaagctgcctattgttgaaactctgggctgctrtaatgtgatttgttcagataaaactggaacactgacgaagaatgaaatgactgttactcacatatttacttcagatggtctgcatgctgaggttactgga

SEQ ID NO: 15373 - DNA, 201 bp, Homo sapiens
atgtgtaccaacaagagaaggcacgcatgggctcagcgggactcagagttcttgctttggcttctggtcctgaactgggacagctgacatttcttggcttsgtgggaatcattgatccacctagaactggtgtgaaagaagctgttacaacactcattgcctcaggagtatcaataaaaatgattactggagattcacagg

SEQ ID NO: 15374 - DNA, 201 bp, Homo sapiens
ttaatctcattggctacattaatgaactttcctaatcctctcaatgccatgcagattttgtggatcaatattattatggatggacccccagctcagagccktggagtagaaccagtggataaagatgtcattcgtaaacctcctcgcaactggaaagacagcattttgactaaaaacttgatacttaaaatacttgtttca

SEQ ID NO: 15375 - DNA, 201 bp, Homo sapiens
agttggctataatcaatttggggaagtgattgttgatggtgatgttgttcatggattctataacccagctgttagcagaattgttgaggcgggctgtgtgygcaatgatgctgtaattagaaacaatactctaatggggaagccaacagaaggggccttaattgctcttgcaatgaagatgggtcttgatggacttcaaca

SEQ ID NO: 15376 - DNA, 201 bp, Homo sapiens
taggaaaacaactttccttttactcctttggtataataggaatcatcatgttggttggctggttactgggaaaagatatcctggaaatgtttactattagwgtaagtttggctgtagcagcaattcctgaaggtctccccattgtggtcacagtgacgctagctcttggtgttatgagaatggtgaagaaaagggccattg

SEQ ID NO: 15377 - DNA, 201 bp, Homo sapiens
tagaaacaatactctaatggggaagccaacagaaggggccttaattgctcttgcaatgaagatgggtcttgatggacttcaacaagactacatcagaaaarctgaatacccttttagctctgagcaaaagtggatggctgttaagtgtgtacaccgaacacagcaggacagaccagagatttgttttatgaaaggtgctta

SEQ ID NO: 15378 - DNA, 201 bp, Homo sapiens
tgtgtgcaatgatgctgtaattagaaacaatactctaatggggaagccaacagaaggggccttaattgctcttgcaatgaagatgggtcttgatggacttyaacaagactacatcagaaaagctgaatacccttttagctctgagcaaaagtggatggctgttaagtgtgtacaccgaacacagcaggacagaccagagat

SEQ ID NO: 15379 - DNA, 201 bp, Homo sapiens
tccacctagaactggtgtgaaagaagctgttacaacactcattgcctcaggagtatcaataaaaatgattactggagattcacaggagactgcagttgcartcgccagtcgtctgggattgtattccaaaacttcccagtcagtctcaggagaagaaatagatgcaatggatgttcagcagctttcacaaatagtaccaaa

SEQ ID NO: 15380 - DNA, 201 bp, Homo sapiens
tggatctttccattgatgagtccagcttgacaggtgagacaacgccttgttctaaggtgacagctcctcagccagctgcaactaatggagatcttgcatcragaagtaacattgcctttatgggaacactggtcagatgtggcaaagcaaagggtgttgtcattggaacaggagaaaattctgaatttggggaggttttta

SEQ ID NO: 15381 - DNA, 201 bp, Homo sapiens
ggtgtgaaagaagctgttacaacactcattgcctcaggagtatcaataaaaatgattactggagattcacaggagactgcagttgcaatcgccagtcgtcygggattgtattccaaaacttcccagtcagtctcaggagaagaaatagatgcaatggatgttcagcagctttcacaaatagtaccaaaggttgcagtattt

SEQ ID NO: 15382 - DNA, 201 bp, Homo sapiens
gagcaaaagtggatggctgttaagtgtgtacaccgaacacagcaggacagaccagagatttgttttatgaaaggtgcttacgaacaagtaattaagtactktactacataccagagcaaagggcagaccttgacacttactcagcagcagagagatgtgtaccaacaagagaaggcacgcatgggctcagcgggactcaga

SEQ ID NO: 15383 - DNA, 201 bp, Homo sapiens; identical to SEQ ID NO: 15356

SEQ ID NO: 15384 - DNA, 201 bp, Homo sapiens; identical to SEQ ID NO: 15357

SEQ ID NO: 15385 - DNA, 201 bp, Homo sapiens; identical to SEQ ID NO: 15358

SEQ ID NO: 15386 - DNA, 201 bp, Homo sapiens
tccccatctggagacaggactgccactgacagaagatgtgagctgtgtctaagtccagtcttgtgcccagccgtgtctgcgccttcactctttggaactckgcatacaacatcttagcaccatcttcctgcagctcttccttacctaaataaagaaacagcccaagggcagtatttctaaaagcactgtaacagcttttca

SEQ ID NO: 15387 - DNA, 201 bp, Homo sapiens
tgtttgagattggactctgcagtaatagaatgttttgctatgcagttcttggatccatcatgggacaattactagttatttactttcctccgcttcagaargtttttcagactgagagcctaagcatactggatctgttgtttcttttgggtctcacctcatcagtgtgcatagtggcagaaattataaagaaggttgaaa

SEQ ID NO: 15388 - DNA, 193 bp, Homo sapiens; identical to SEQ ID NO: 15360

SEQ ID NO: 15389 - DNA, 201 bp, Homo sapiens; identical to SEQ ID NO: 15361

SEQ ID NO: 15390 - DNA, 201 bp, Homo sapiens; identical to SEQ ID NO: 15362

SEQ ID NO: 15391 - DNA, 201 bp, Homo sapiens; identical to SEQ ID NO: 15363

SEQ ID NO: 15392 - DNA, 201 bp, Homo sapiens; identical to SEQ ID NO: 15364

SEQ ID NO: 15393 - DNA, 201 bp, Homo sapiens; identical to SEQ ID NO: 15365

SEQ ID NO: 15394 - DNA, 201 bp, Homo sapiens; identical to SEQ ID NO: 15366

SEQ ID NO: 15395 - DNA, 201 bp, Homo sapiens; identical to SEQ ID NO: 15367

SEQ ID NO: 15396 - DNA, 201 bp, Homo sapiens; identical to SEQ ID NO: 15368

SEQ ID NO: 15397 - DNA, 201 bp, Homo sapiens; identical to SEQ ID NO: 15369

SEQ ID NO: 15398 - DNA, 201 bp, Homo sapiens; identical to SEQ ID NO: 15370

SEQ ID NO: 15399 - DNA, 201 bp, Homo sapiens; identical to SEQ ID NO: 15371

SEQ ID NO: 15400 - DNA, 201 bp, Homo sapiens; identical to SEQ ID NO: 15372

SEQ ID NO: 15401 - DNA, 201 bp, Homo sapiens; identical to SEQ ID NO: 15373

SEQ ID NO: 15402 - DNA, 201 bp, Homo sapiens; identical to SEQ ID NO: 15374

SEQ ID NO: 15403 - DNA, 201 bp, Homo sapiens; identical to SEQ ID NO: 15375

SEQ ID NO: 15404 - DNA, 201 bp, Homo sapiens; identical to SEQ ID NO: 15376

SEQ ID NO: 15405 - DNA, 201 bp, Homo sapiens; identical to SEQ ID NO: 15377

SEQ ID NO: 15406 - DNA, 201 bp, Homo sapiens; identical to SEQ ID NO: 15378

SEQ ID NO: 15407 - DNA, 201 bp, Homo sapiens; identical to SEQ ID NO: 15379

SEQ ID NO: 15408 - DNA, 201 bp, Homo sapiens; identical to SEQ ID NO: 15380

SEQ ID NO: 15409 - DNA, 201 bp, Homo sapiens; identical to SEQ ID NO: 15381

SEQ ID NO: 15410 - DNA, 201 bp, Homo sapiens; identical to SEQ ID NO: 15382

SEQ ID NO: 15411 - DNA, 201 bp, Homo sapiens; identical to SEQ ID NO: 15356

SEQ ID NO: 15412 - DNA, 201 bp, Homo sapiens; identical to SEQ ID NO: 15357

SEQ ID NO: 15413 - DNA, 201 bp, Homo sapiens; identical to SEQ ID NO: 15358

SEQ ID NO: 15414 - DNA, 201 bp, Homo sapiens
gtgggagcagccgtgggacgcgtggccgggagcgggggtgacagcctgggattccgggggcttctcttccttgtcctcctcctctcctctctattcccagwgtggccgtggctgacactaaagactttgtagccatcaacccgagtgcagtttcgatggaaaatgaaggttgcacgttttcaaaaaatacctaatggtgaa

SEQ ID NO: 15415 - DNA, 201 bp, Homo sapiens; identical to SEQ ID NO: 15387

SEQ ID NO: 15416 - DNA, 201 bp, Homo sapiens; identical to SEQ ID NO: 15361

SEQ ID NO: 15417 - DNA, 201 bp, Homo sapiens; identical to SEQ ID NO: 15362

SEQ ID NO: 15418 - DNA, 201 bp, Homo sapiens; identical to SEQ ID NO: 15363

SEQ ID NO: 15419 - DNA, 201 bp, Homo sapiens; identical to SEQ ID NO: 15364

SEQ ID NO: 15420 - DNA, 201 bp, Homo sapiens; identical to SEQ ID NO: 15365

SEQ ID NO: 15421 - DNA, 201 bp, Homo sapiens; identical to SEQ ID NO: 15366

SEQ ID NO: 15422 - DNA, 201 bp, Homo sapiens; identical to SEQ ID NO: 15367

SEQ ID NO: 15423 - DNA, 201 bp, Homo sapiens; identical to SEQ ID NO: 15368

SEQ ID NO: 15424 - DNA, 201 bp, Homo sapiens; identical to SEQ ID NO: 15369

SEQ ID NO: 15425 - DNA, 201 bp, Homo sapiens; identical to SEQ ID NO: 15370

SEQ ID NO: 15426 - DNA, 201 bp, Homo sapiens; identical to SEQ ID NO: 15371

SEQ ID NO: 15427 - DNA, 201 bp, Homo sapiens; identical to SEQ ID NO: 15372

SEQ ID NO: 15428 - DNA, 201 bp, Homo sapiens; identical to SEQ ID NO: 15373

SEQ ID NO: 15429 - DNA, 201 bp, Homo sapiens; identical to SEQ ID NO: 15374

SEQ ID NO: 15430 - DNA, 201 bp, Homo sapiens; identical to SEQ ID NO: 15375

SEQ ID NO: 15431 - DNA, 201 bp, Homo sapiens; identical to SEQ ID NO: 15376

SEQ ID NO: 15432 - DNA, 201 bp, Homo sapiens; identical to SEQ ID NO: 15377

SEQ ID NO: 15433 - DNA, 201 bp, Homo sapiens; identical to SEQ ID NO: 15378

SEQ ID NO: 15434 - DNA, 201 bp, Homo sapiens; identical to SEQ ID NO: 15379

SEQ ID NO: 15435 - DNA, 201 bp, Homo sapiens; identical to SEQ ID NO: 15380

SEQ ID NO: 15436 - DNA, 201 bp, Homo sapiens; identical to SEQ ID NO: 15381

SEQ ID NO: 15437 - DNA, 201 bp, Homo sapiens; identical to SEQ ID NO: 15382

SEQ ID NO: 15438 - DNA, 201 bp, Homo sapiens; identical to SEQ ID NO: 15356

SEQ ID NO: 15439 - DNA, 201 bp, Homo sapiens; identical to SEQ ID NO: 15357

SEQ ID NO: 15440 - DNA, 201 bp, Homo sapiens; identical to SEQ ID NO: 15358

SEQ ID NO: 15441 - DNA, 201 bp, Homo sapiens; identical to SEQ ID NO: 15387

SEQ ID NO: 15442 - DNA, 193 bp, Homo sapiens; identical to SEQ ID NO: 15360

SEQ ID NO: 15443 - DNA, 201 bp, Homo sapiens; identical to SEQ ID NO: 15361

SEQ ID NO: 15444 - DNA, 201 bp, Homo sapiens; identical to SEQ ID NO: 15362

SEQ ID NO: 15445 - DNA, 201 bp, Homo sapiens; identical to SEQ ID NO: 15363

SEQ ID NO: 15446 - DNA, 201 bp, Homo sapiens; identical to SEQ ID NO: 15364

SEQ ID NO: 15447 - DNA, 201 bp, Homo sapiens; identical to SEQ ID NO: 15365

SEQ ID NO: 15448 - DNA, 201 bp, Homo sapiens; identical to SEQ ID NO: 15366

SEQ ID NO: 15449 - DNA, 201 bp, Homo sapiens; identical to SEQ ID NO: 15367

SEQ ID NO: 15450 - DNA, 201 bp, Homo sapiens; identical to SEQ ID NO: 15368

SEQ ID NO: 15451 - DNA, 201 bp, Homo sapiens; identical to SEQ ID NO: 15369

SEQ ID NO: 15452 - DNA, 201 bp, Homo sapiens; identical to SEQ ID NO: 15370

SEQ ID NO: 15453 - DNA, 201 bp, Homo sapiens; identical to SEQ ID NO: 15371

SEQ ID NO: 15454 - DNA, 201 bp, Homo sapiens; identical to SEQ ID NO: 15372

SEQ ID NO: 15455 - DNA, 201 bp, Homo sapiens; identical to SEQ ID NO: 15373

SEQ ID NO: 15456 - DNA, 201 bp, Homo sapiens; identical to SEQ ID NO: 15374

SEQ ID NO: 15457 - DNA, 201 bp, Homo sapiens; identical to SEQ ID NO: 15375

SEQ ID NO: 15458 - DNA, 201 bp, Homo sapiens; identical to SEQ ID NO: 15376

SEQ ID NO: 15459 - DNA, 201 bp, Homo sapiens; identical to SEQ ID NO: 15377

SEQ ID NO: 15460 - DNA, 201 bp, Homo sapiens; identical to SEQ ID NO: 15378

SEQ ID NO: 15461 - DNA, 201 bp, Homo sapiens; identical to SEQ ID NO: 15379

SEQ ID NO: 15462 - DNA, 201 bp, Homo sapiens; identical to SEQ ID NO: 15380

SEQ ID NO: 15463 - DNA, 201 bp, Homo sapiens; identical to SEQ ID NO: 15381

SEQ ID NO: 15464 - DNA, 201 bp, Homo sapiens; identical to SEQ ID NO: 15382

SEQ ID NO: 15465 - DNA, 201 bp, Homo sapiens
ggcaaaaggcggtgcattggcgaagaactttctaagatgcagctttttctcttcatctccatcctggctcaccagtgcgatttcagggccaacccaaatgrgcctgcgaaaatgaatttcagttatggtctaaccattaaacccaagtcatttaaagtcaatgtcactctcagagagtccatggagctccttgatagtgct

SEQ ID NO: 15466 - DNA, 201 bp, Homo sapiens
ctgctactcctgtcggtgctggccactgtgcatgtgggccagcggctgctgaggcaacggaggcggcagctccggtccgcgcccccgggcccgtttgcgtrgccactgatcggaaacgcggcggcggtgggccaggcggctcacctctcgttcgctcgcctggcgcggcgctacggcgacgttttccagatccgcctgggc

SEQ ID NO: 15467 - DNA, 201 bp, Homo sapiens
gctgcagtggctgctcctcctcttcaccaggtatcctgatgtgcagactcgagtgcaggcagaattggatcaggtcgtggggagggaccgtctgccttgtrtgggtgaccagcccaacctgccctatgtcctggccttcctttatgaagccatgcgcttctccagctttgtgcctgtcactattcctcatgccaccactgc

SEQ ID NO: 15468 - DNA, 201 bp, Homo sapiens
gcctgcgggttcctgttgacgtcttgccctaggcaaaggtcccagttccttctcggagccggctgtcccgcgccactggaaaccgcacctccccgcagcaygggcaccagcctcagcccgaacgacccttggccgctaaacccgctgtccatccagcagaccacgctcctgctactcctgtcggtgctggccactgtgcat

SEQ ID NO: 15469 - DNA, 201 bp, Homo sapiens
tcttcacgcgccagccgcgcagccgccaagtcctcgagggccacgtgctgagcgaggcgcgcgagctggtggcgctgctggtgcgcggcagcgcggacggmgccttcctcgacccgaggccgctgaccgtcgtggccgtggccaacgtcatgagtgccgtgtgtttcggctgccgctacagccacgacgaccccgagttcc

SEQ ID NO: 15470 - DNA, 201 bp, Homo sapiens
tggcgcgcggctggatttggagaacgtaccggccactatcactgacatcttcggcgccagccaggacaccctgtccaccgcgctgcagtggctgctcctcytcttcaccaggtatcctgatgtgcagactcgagtgcaggcagaattggatcaggtcgtggggagggaccgtctgccttgtatgggtgaccagcccaacct

SEQ ID NO: 15471 - DNA, 201 bp, Homo sapiens
ctgtccaccgcgctgcagtggctgctcctcctcttcaccaggtatcctgatgtgcagactcgagtgcaggcagaattggatcaggtcgtggggagggaccrtctgccttgtatgggtgaccagcccaacctgccctatgtcctggccttcctttatgaagccatgcgcttctccagctttgtgcctgtcactattcctcat

SEQ ID NO: 15472 - DNA, 201 bp, Homo sapiens
gctgaccgtcgtggccgtggccaacgtcatgagtgccgtgtgtttcggctgccgctacagccacgacgaccccgagttccgtgagctgctcagccacaacraagagttcgggcgcacggtgggcgcgggcagcctggtggacgtgatgccctggctgcagtacttccccaacccggtgcgcaccgttttccgcgaattcga

SEQ ID NO: 15473 - DNA, 201 bp, Homo sapiens
agcgcggacggcgccttcctcgacccgaggccgctgaccgtcgtggccgtggccaacgtcatgagtgccgtgtgtttcggctgccgctacagccacgacgwccccgagttccgtgagctgctcagccacaacgaagagttcgggcgcacggtgggcgcgggcagcctggtggacgtgatgccctggctgcagtacttcccc

SEQ ID NO: 15474 - DNA, 201 bp, Homo sapiens
tcggctgccgctacagccacgacgaccccgagttccgtgagctgctcagccacaacgaagagttcgggcgcacggtgggcgcgggcagcctggtggacgtsatgccctggctgcagtacttccccaacccggtgcgcaccgttttccgcgaattcgagcagctcaaccgcaacttcagcaacttcatcctggacaagttct

SEQ ID NO: 15475 - DNA, 201 bp, Homo sapiens
tcggtgctggccactgtgcatgtgggccagcggctgctgaggcaacggaggcggcagctccggtccgcgcccccgggcccgtttgcgtggccactgatcgraaacgcggcggcggtgggccaggcggctcacctctcgttcgctcgcctggcgcggcgctacggcgacgttttccagatccgcctgggcagctgccccata

SEQ ID NO: 15476 - DNA, 201 bp, Homo sapiens
cagtgaagtggcctaacccggagaactttgatccagctcgattcttggacaaggatggcctcatcaacaaggacctgaccagcagagtgatgattttttcwgtgggcaaaaggcggtgcattggcgaagaactttctaagatgcagctttttctcttcatctccatcctggctcaccagtgcgatttcagggccaacccaa

SEQ ID NO: 15477 - DNA, 201 bp, Homo sapiens
ttgggctaccacattcccaaggacactgtggtttttgtcaaccagtggtctgtgaatcatgacccagtgaagtggcctaacccggagaactttgatccagstcgattcttggacaaggatggcctcatcaacaaggacctgaccagcagagtgatgattttttcagtgggcaaaaggcggtgcattggcgaagaactttct

SEQ ID NO: 15478 - DNA, 201 bp, Homo sapiens
gtggctgctcctcctcttcaccaggtatcctgatgtgcagactcgagtgcaggcagaattggatcaggtcgtggggagggaccgtctgccttgtatgggtraccagcccaacctgccctatgtcctggccttcctttatgaagccatgcgcttctccagctttgtgcctgtcactattcctcatgccaccactgccaacac

SEQ ID NO: 15479 - DNA, 201 bp, Homo sapiens
gcagtacttccccaacccggtgcgcaccgttttccgcgaattcgagcagctcaaccgcaacttcagcaacttcatcctggacaagttcttgaggcactgckaaagccttcggcccggggccgccccccgcgacatgatggacgcctttatcctctctgcggaaaagaaggcggccggggactcgcacggtggtggcgcgcg

SEQ ID NO: 15480 - DNA, 201 bp, Homo sapiens
caggcagaattggatcaggtcgtggggagggaccgtctgccttgtatgggtgaccagcccaacctgccctatgtcctggccttcctttatgaagccatgcrcttctccagctttgtgcctgtcactattcctcatgccaccactgccaacacctctgtcttgggctaccacattcccaaggacactgtggtttttgtcaac

SEQ ID NO: 15481 - DNA, 201 bp, Homo sapiens
gactcgagtgcaggcagaattggatcaggtcgtggggagggaccgtctgccttgtatgggtgaccagcccaacctgccctatgtcctggccttcctttatraagccatgcgcttctccagctttgtgcctgtcactattcctcatgccaccactgccaacacctctgtcttgggctaccacattcccaaggacactgtggt

SEQ ID NO: 15482 - DNA, 201 bp, Homo sapiens
aggacactgtggtttttgtcaaccagtggtctgtgaatcatgacccagtgaagtggcctaacccggagaactttgatccagctcgattcttggacaaggahggcctcatcaacaaggacctgaccagcagagtgatgattttttcagtgggcaaaaggcggtgcattggcgaagaactttctaagatgcagctttttctct

SEQ ID NO: 15483 - DNA, 201 bp, Homo sapiens
actgccaacacctctgtcttgggctaccacattcccaaggacactgtggtttttgtcaaccagtggtctgtgaatcatgacccagtgaagtggcctaaccyggagaactttgatccagctcgattcttggacaaggatggcctcatcaacaaggacctgaccagcagagtgatgattttttcagtgggcaaaaggcggtgc

SEQ ID NO: 15484 - DNA, 201 bp, Homo sapiens
tattcctcatgccaccactgccaacacctctgtcttgggctaccacattcccaaggacactgtggtttttgtcaaccagtggtctgtgaatcatgacccastgaagtggcctaacccggagaactttgatccagctcgattcttggacaaggatggcctcatcaacaaggacctgaccagcagagtgatgattttttcagt

SEQ ID NO: 15485 - DNA, 201 bp, Homo sapiens
ttcaccaggtatcctgatgtgcagactcgagtgcaggcagaattggatcaggtcgtggggagggaccgtctgccttgtatgggtgaccagcccaacctgcyctatgtcctggccttcctttatgaagccatgcgcttctccagctttgtgcctgtcactattcctcatgccaccactgccaacacctctgtcttgggctac

SEQ ID NO: 15486 - DNA, 201 bp, Homo sapiens
cggagccggctgtcccgcgccactggaaaccgcacctccccgcagcatgggcaccagcctcagcccgaacgacccttggccgctaaacccgctgtccatcyagcagaccacgctcctgctactcctgtcggtgctggccactgtgcatgtgggccagcggctgctgaggcaacggaggcggcagctccggtccgcgccccc

SEQ ID NO: 15487 - DNA, 201 bp, Homo sapiens
ccgcgcagccgccaagtcctcgagggccacgtgctgagcgaggcgcgcgagctggtggcgctgctggtgcgcggcagcgcggacggcgccttcctcgaccygaggccgctgaccgtcgtggccgtggccaacgtcatgagtgccgtgtgtttcggctgccgctacagccacgacgaccccgagttccgtgagctgctcagc

SEQ ID NO: 15488 - DNA, 201 bp, Homo sapiens
gtgcgcggcagcgcggacggcgccttcctcgacccgaggccgctgaccgtcgtggccgtggccaacgtcatgagtgccgtgtgtttcggctgccgctacakccacgacgaccccgagttccgtgagctgctcagccacaacgaagagttcgggcgcacggtgggcgcgggcagcctggtggacgtgatgccctggctgcag

SEQ ID NO: 15489 - DNA, 201 bp, Homo sapiens
gtcttgggctaccacattcccaaggacactgtggtttttgtcaaccagtggtctgtgaatcatgacccagtgaagtggcctaacccggagaactttgatcsagctcgattcttggacaaggatggcctcatcaacaaggacctgaccagcagagtgatgattttttcagtgggcaaaaggcggtgcattggcgaagaactt

SEQ ID NO: 15490 - DNA, 201 bp, Homo sapiens
atctcaacgctgtgaggaaacctcgactttgccaggtccccaagggcagcggggctcggcgagcgaggcacccttctccgtccccatcccaatccaagcgytcctggcactgacgacgccaagagactcgagtgggagttaaagcttccagtgagggcagcaggtgtccaggccgggcctgcgggttcctgttgacgtctt

SEQ ID NO: 15491 - DNA, 201 bp, Homo sapiens
tgctactcctgtcggtgctggccactgtgcatgtgggccagcggctgctgaggcaacggaggcggcagctccggtccgcgcccccgggcccgtttgcgtgsccactgatcggaaacgcggcggcggtgggccaggcggctcacctctcgttcgctcgcctggcgcggcgctacggcgacgttttccagatccgcctgggca

SEQ ID NO: 15492 - DNA, 201 bp, Homo sapiens
ccaggacaccctgtccaccgcgctgcagtggctgctcctcctcttcaccaggtatcctgatgtgcagactcgagtgcaggcagaattggatcaggtcgtgkggagggaccgtctgccttgtatgggtgaccagcccaacctgccctatgtcctggccttcctttatgaagccatgcgcttctccagctttgtgcctgtcac

SEQ ID NO: 15493 - DNA, 201 bp, Homo sapiens
taacccggagaactttgatccagctcgattcttggacaaggatggcctcatcaacaaggacctgaccagcagagtgatgattttttcagtgggcaaaaggyggtgcattggcgaagaactttctaagatgcagctttttctcttcatctccatcctggctcaccagtgcgatttcagggccaacccaaatgagcctgcgaa

SEQ ID NO: 15494 - DNA, 201 bp, Homo sapiens
cagccgcgcagccgccaagtcctcgagggccacgtgctgagcgaggcgcgcgagctggtggcgctgctggtgcgcggcagcgcggacggcgccttcctcgwcccgaggccgctgaccgtcgtggccgtggccaacgtcatgagtgccgtgtgtttcggctgccgctacagccacgacgaccccgagttccgtgagctgctc

SEQ ID NO: 15495 - DNA, 201 bp, Homo sapiens
agtcctcgagggccacgtgctgagcgaggcgcgcgagctggtggcgctgctggtgcgcggcagcgcggacggcgccttcctcgacccgaggccgctgaccrtcgtggccgtggccaacgtcatgagtgccgtgtgtttcggctgccgctacagccacgacgaccccgagttccgtgagctgctcagccacaacgaagagtt

SEQ ID NO: 15496 - DNA, 201 bp, Homo sapiens
aggcggcagctccggtccgcgcccccgggcccgtttgcgtggccactgatcggaaacgcggcggcggtgggccaggcggctcacctctcgttcgctcgccyggcgcggcgctacggcgacgttttccagatccgcctgggcagctgccccatagtggtgctgaatggcgagcgcgccatccaccaggccctggtgcagcag

SEQ ID NO: 15497 - DNA, 201 bp, Homo sapiens
tgcagtacttccccaacccggtgcgcaccgttttccgcgaattcgagcagctcaaccgcaacttcagcaacttcatcctggacaagttcttgaggcactgmgaaagccttcggcccggggccgccccccgcgacatgatggacgcctttatcctctctgcggaaaagaaggcggccggggactcgcacggtggtggcgcgc

SEQ ID NO: 15498 - DNA, 201 bp, Homo sapiens
ggccgccccccgcgacatgatggacgcctttatcctctctgcggaaaagaaggcggccggggactcgcacggtggtggcgcgcggctggatttggagaacktaccggccactatcactgacatcttcggcgccagccaggacaccctgtccaccgcgctgcagtggctgctcctcctcttcaccaggtatcctgatgtgca

SEQ ID NO: 15499 - DNA, 201 bp, Homo sapiens
caaaggtcccagttccttctcggagccggctgtcccgcgccactggaaaccgcacctccccgcagcatgggcaccagcctcagcccgaacgacccttggcygctaaacccgctgtccatccagcagaccacgctcctgctactcctgtcggtgctggccactgtgcatgtgggccagcggctgctgaggcaacggaggcgg

SEQ ID NO: 15500 - DNA, 201 bp, Homo sapiens
gtttttgtcaaccagtggtctgtgaatcatgacccagtgaagtggcctaacccggagaactttgatccagctcgattcttggacaaggatggcctcatcarcaaggacctgaccagcagagtgatgattttttcagtgggcaaaaggcggtgcattggcgaagaactttctaagatgcagctttttctcttcatctccatc

SEQ ID NO: 15501 - DNA, 201 bp, Homo sapiens
ccggtccgcgcccccgggcccgtttgcgtggccactgatcggaaacgcggcggcggtgggccaggcggctcacctctcgttcgctcgcctggcgcggcgcwacggcgacgttttccagatccgcctgggcagctgccccatagtggtgctgaatggcgagcgcgccatccaccaggccctggtgcagcagggctcggcctt

SEQ ID NO: 15502 - DNA, 201 bp, Homo sapiens
ccagatccgcctgggcagctgccccatagtggtgctgaatggcgagcgcgccatccaccaggccctggtgcagcagggctcggccttcgccgaccggccgkccttcgcctccttccgtgtggtgtccggcggccgcagcatggctttcggccactactcggagcactggaaggtgcagcggcgcgcagcccacagcatgat

SEQ ID NO: 15503 - DNA, 201 bp, Homo sapiens
ggccactatcactgacatcttcggcgccagccaggacaccctgtccaccgcgctgcagtggctgctcctcctcttcaccaggtatcctgatgtgcagactygagtgcaggcagaattggatcaggtcgtggggagggaccgtctgccttgtatgggtgaccagcccaacctgccctatgtcctggccttcctttatgaagc

SEQ ID NO: 15504 - DNA, 201 bp, Homo sapiens
cagccaggacaccctgtccaccgcgctgcagtggctgctcctcctcttcaccaggtatcctgatgtgcagactcgagtgcaggcagaattggatcaggtcrtggggagggaccgtctgccttgtatgggtgaccagcccaacctgccctatgtcctggccttcctttatgaagccatgcgcttctccagctttgtgcctgt

SEQ ID NO: 15505 - DNA, 201 bp, Homo sapiens
cccgctgtccatccagcagaccacgctcctgctactcctgtcggtgctggccactgtgcatgtgggccagcggctgctgaggcaacggaggcggcagctcsggtccgcgcccccgggcccgtttgcgtggccactgatcggaaacgcggcggcggtgggccaggcggctcacctctcgttcgctcgcctggcgcggcgcta

SEQ ID NO: 15506 - DNA, 201 bp, Homo sapiens
gcaggcagaattggatcaggtcgtggggagggaccgtctgccttgtatgggtgaccagcccaacctgccctatgtcctggccttcctttatgaagccatgmgcttctccagctttgtgcctgtcactattcctcatgccaccactgccaacacctctgtcttgggctaccacattcccaaggacactgtggtttttgtcaa

SEQ ID NO: 15507 - DNA, 201 bp, Homo sapiens
ggctaccacattcccaaggacactgtggtttttgtcaaccagtggtctgtgaatcatgacccagtgaagtggcctaacccggagaactttgatccagctcrattcttggacaaggatggcctcatcaacaaggacctgaccagcagagtgatgattttttcagtgggcaaaaggcggtgcattggcgaagaactttctaag

SEQ ID NO: 15508 - DNA, 201 bp, Homo sapiens; identical to SEQ ID NO: 15465

SEQ ID NO: 15509 - DNA, 201 bp, Homo sapiens; identical to SEQ ID NO: 15466

SEQ ID NO: 15510 - DNA, 201 bp, Homo sapiens
gccttctggtatacttccttacttttaaggataaatcataaagtcagttgctcaaaaagaaatcaatagttgaattagtgagtatagtggggttccatgakttatcatgaattttaaagtatgcattattaaattgtaaaactccaaggtgatgttgtacctcttttgcttgccaaagtacagaatttgaattatcagcaa

SEQ ID NO: 15511 - DNA, 201 bp, Homo sapiens; identical to SEQ ID NO: 15467

SEQ ID NO: 15512 - DNA, 201 bp, Homo sapiens
tatcatgaattttaaagtatgcattattaaattgtaaaactccaaggtgatgttgtacctcttttgcttgccaaagtacagaatttgaattatcagcaaaraaaaaaaaaaaagccagccaagctttaaattatgtgaccataatgtactgatttcagtaagtctcataggttaaaaaaaaaagtcaccaaatagtgtgaa

SEQ ID NO: 15513 - DNA, 201 bp, Homo sapiens
  misc_feature (1)...(201): n = A,T,C or G
aaaaagtcaccaaatagtgtgaaatatattacttaactgtccgtaagcagtatattagtattatcttgttcaggaaaaggttgaataatatatgccttgtntaatattgaaaattgaaaagtacaactaacgcaaccaagtgtgctaaaaatgagcttgattaaatcaaccacctatttttgacatggaaatgaagcaggg

SEQ ID NO: 15514 - DNA, 201 bp, Homo sapiens
gcgtttaaggtgagcataaatcaactgtccatcaggtgaggtgtgctccatacccagcggttcttcatgagtagtgggctatgcaggagcttctgggagatttttttgagtcaaagacttaaagggcccaatgaattattatatacatactgcatcttggttatttctgaaggtagcattctttggagttaaaatgcacat

SEQ ID NO: 15515 - DNA, 201 bp, Homo sapiens; identical to SEQ ID NO: 15468

SEQ ID NO: 15516 - DNA, 201 bp, Homo sapiens; identical to SEQ ID NO: 15469

SEQ ID NO: 15517 - DNA, 201 bp, Homo sapiens; identical to SEQ ID NO: 15470

SEQ ID NO: 15518 - DNA, 201 bp, Homo sapiens; identical to SEQ ID NO: 15471

SEQ ID NO: 15519 - DNA, 201 bp, Homo sapiens; identical to SEQ ID NO: 15472

SEQ ID NO: 15520 - DNA, 201 bp, Homo sapiens; identical to SEQ ID NO: 15473

SEQ ID NO: 15521 - DNA, 201 bp, Homo sapiens; identical to SEQ ID NO: 15474

SEQ ID NO: 15522 - DNA, 201 bp, Homo sapiens; identical to SEQ ID NO: 15475

SEQ ID NO: 15523 - DNA, 201 bp, Homo sapiens; identical to SEQ ID NO: 15476

SEQ ID NO: 15524 - DNA, 201 bp, Homo sapiens; identical to SEQ ID NO: 15478

SEQ ID NO: 15525 - DNA, 201 bp, Homo sapiens; identical to SEQ ID NO: 15477

SEQ ID NO: 15526 - DNA, 201 bp, Homo sapiens; identical to SEQ ID NO: 15479

SEQ ID NO: 15527 - DNA, 201 bp, Homo sapiens; identical to SEQ ID NO: 15480

SEQ ID NO: 15528 - DNA, 201 bp, Homo sapiens
gtttttacgtatgtaggcccagtcgtcatcagatgcttgcggcaaaaggaaagctgtgtttatatggaagaaagtaaggtgcttggagtttacctggcttwtttaatatgcttataacctagttaaagaaaggaaaagaaaacaaaaaacgaatgaaaataactgaatttggaggctggagtaatcagattactgctttaa

SEQ ID NO: 15529 - DNA, 201 bp, Homo sapiens; identical to SEQ ID NO: 15481

SEQ ID NO: 15530 - DNA, 201 bp, Homo sapiens; identical to SEQ ID NO: 15482

SEQ ID NO: 15531 - DNA, 201 bp, Homo sapiens; identical to SEQ ID NO: 15483

SEQ ID NO: 15532 - DNA, 201 bp, Homo sapiens; identical to SEQ ID NO: 15484

SEQ ID NO: 15533 - DNA, 201 bp, Homo sapiens; identical to SEQ ID NO: 15485

SEQ ID NO: 15534 - DNA, 201 bp, Homo sapiens
gaaattttagaaatattcacatcttcggagatgaggagtaaaattcagtttttttccagttcctcttttgtgctgcttctcaattagcgtttaaggtgagsataaatcaactgtccatcaggtgaggtgtgctccatacccagcggttcttcatgagtagtgggctatgcaggagcttctgggagatttttttgagtcaaa

SEQ ID NO: 15535 - DNA, 145 bp, Homo sapiens
tagacaaagtacattctggggaaacaacatttatatgtagcctttactgtttgatataccaaattaaaaaaaaattgtatctcattacttatactgggacmccattaccaaaataataaaaatcactttcataatcttgttatga

SEQ ID NO: 15536 - DNA, 201 bp, Homo sapiens; identical to SEQ ID NO: 15486

SEQ ID NO: 15537 - DNA, 201 bp, Homo sapiens; identical to SEQ ID NO: 15487

SEQ ID NO: 15538 - DNA, 201 bp, Homo sapiens; identical to SEQ ID NO: 15488

SEQ ID NO: 15539 - DNA, 201 bp, Homo sapiens; identical to SEQ ID NO: 15489

SEQ ID NO: 15540 - DNA, 201 bp, Homo sapiens; identical to SEQ ID NO: 15490

SEQ ID NO: 15541 - DNA, 201 bp, Homo sapiens; identical to SEQ ID NO: 15491

SEQ ID NO: 15542 - DNA, 201 bp, Homo sapiens; identical to SEQ ID NO: 15492

SEQ ID NO: 15543 - DNA, 201 bp, Homo sapiens; identical to SEQ ID NO: 15493

SEQ ID NO: 15544 - DNA, 201 bp, Homo sapiens; identical to SEQ ID NO: 15494

SEQ ID NO: 15545 - DNA, 201 bp, Homo sapiens; identical to SEQ ID NO: 15495

SEQ ID NO: 15546 - DNA, 201 bp, Homo sapiens; identical to SEQ ID NO: 15496

SEQ ID NO: 15547 - DNA, 201 bp, Homo sapiens; identical to SEQ ID NO: 15497

SEQ ID NO: 15548 - DNA, 201 bp, Homo sapiens
attattatatacatactgcatcttggttatttctgaaggtagcattctttggagttaaaatgcacatatagacacatacacccaaacacttacaccaaacwactgaatgaagaagtattttggtaaccaggccatttttggtgggaatccaagattggtctcccatatgcagaaatagacaaaaagtatattaaacaaagt

SEQ ID NO: 15549 - DNA, 201 bp, Homo sapiens; identical to SEQ ID NO: 15498

SEQ ID NO: 15550 - DNA, 201 bp, Homo sapiens; identical to SEQ ID NO: 15499

SEQ ID NO: 15551 - DNA, 201 bp, Homo sapiens; identical to SEQ ID NO: 15500

SEQ ID NO: 15552 - DNA, 201 bp, Homo sapiens; identical to SEQ ID NO: 15501

SEQ ID NO: 15553 - DNA, 201 bp, Homo sapiens; identical to SEQ ID NO: 15502

SEQ ID NO: 15554 - DNA, 201 bp, Homo sapiens; identical to SEQ ID NO: 15503

SEQ ID NO: 15555 - DNA, 201 bp, Homo sapiens; identical to SEQ ID NO: 15504

SEQ ID NO: 15556 - DNA, 201 bp, Homo sapiens; identical to SEQ ID NO: 15505

SEQ ID NO: 15557 - DNA, 201 bp, Homo sapiens; identical to SEQ ID NO: 15506

SEQ ID NO: 15558 - DNA, 201 bp, Homo sapiens; identical to SEQ ID NO: 15507

SEQ ID NO: 15559 - DNA, 201 bp, Homo sapiens
atactgcatcttggttatttctgaaggtagcattctttggagttaaaatgcacatatagacacatacacccaaacacttacaccaaactactgaatgaagmagtattttggtaaccaggccatttttggtgggaatccaagattggtctcccatatgcagaaatagacaaaaagtatattaaacaaagtttcagagtatat

SEQ ID NO: 15560 - DNA, 201 bp, Homo sapiens
aaaatgccagaaggataatattgattcctcacatctttaacttagtattttacctagcatttcaaaacccaaatggctagaacatgtttaattaaatttcmcaatataaagttctacagttaattatgtgcatattaaaacaatggcctggttcaatttctttctttccttaataaatttaagttttttccccccaaaatt

SEQ ID NO: 15561 - DNA, 201 bp, Homo sapiens
tttcactccttgcaaactttgccatctttgttgcagagaatcgggaatccaaatgagactcagaacaatagcacaagctggcctgtcttcaaaagcactgwacaaaaatatctaaccttgaatacagagtcaacaagaataatgacgaaactacgtgctcaacaatgtcgattctggacatcattttttccaaaagtcttg

SEQ ID NO: 15562 - DNA, 201 bp, Homo sapiens
tgcaaactttgccatctttgttgcagagaatcgggaatccaaatgagactcagaacaatagcacaagctggcctgtcttcaaaagcactgaacaaaaatawctaaccttgaatacagagtcaacaagaataatgacgaaactacgtgctcaacaatgtcgattctggacatcattttttccaaaagtcttggaaatgacag

SEQ ID NO: 15563 - DNA, 201 bp, Homo sapiens
aacaatagcacaagctggcctgtcttcaaaagcactgaacaaaaatatctaaccttgaatacagagtcaacaagaataatgacgaaactacgtgctcaacwatgtcgattctggacatcattttttccaaaagtcttggaaatgacaggaaatattgatgaagcagaatgggagtggaaagcaggattccatcgctggaac

SEQ ID NO: 15564 - DNA, 201 bp, Homo sapiens
agagtcaacaagaataatgacgaaactacgtgctcaacaatgtcgattctggacatcattttttccaaaagtcttggaaatgacaggaaatattgatgaarcagaatgggagtggaaagcaggattccatcgctggaacaattacatgatggactggaaaaatcaatttaacgattacactagcaagaaagaaagttgtgt

SEQ ID NO: 15565 - DNA, 201 bp, Homo sapiens
tgagactcagaacaatagcacaagctggcctgtcttcaaaagcactgaacaaaaatatctaaccttgaatacagagtcaacaagaataatgacgaaactaygtgctcaacaatgtcgattctggacatcattttttccaaaagtcttggaaatgacaggaaatattgatgaagcagaatgggagtggaaagcaggattcca

SEQ ID NO: 15566 - DNA, 201 bp, Homo sapiens
taacactgaatgtcagtgcagtccaatttacaggctggagcagcagctgcatcctgcatttccccgaagtattacatgattttcactccttgcaaactttrccatctttgttgcagagaatcgggaatccaaatgagactcagaacaatagcacaagctggcctgtcttcaaaagcactgaacaaaaatatctaaccttga

SEQ ID NO: 15567 - DNA, 201 bp, Homo sapiens
attatgtagctgaaacaaaaatgccagaaggataatattgattcctcacatctttaacttagtattttacctagcatttcaaaacccaaatggctagaacrtgtttaattaaatttcacaatataaagttctacagttaattatgtgcatattaaaacaatggcctggttcaatttctttctttccttaataaatttaagt

SEQ ID NO: 15568 - DNA, 201 bp, Homo sapiens; identical to SEQ ID NO: 15560

SEQ ID NO: 15569 - DNA, 201 bp, Homo sapiens
agtagatccatagtgaaacggtgggcaaattttgcaaaatatgggaatccaaatgagactcagaacaatagcacaagctggcctgtcttcaaaagcactgwacaaaaatatctaaccttgaatacagagtcaacaagaataatgacgaaactacgtgctcaacaatgtcgattctggacatcattttttccaaaagtcttg

SEQ ID NO: 15570 - DNA, 201 bp, Homo sapiens
tgcaaagtggatcctttaatgctccttgggcggtaacatctctttatgaagctaggaacagaacgttgaacttagctaaattgactggttgctctagagasaatgagactgaaataatcaagtgtcttagaaataaagatccccaagaaattcttctgaatgaagcatttgttgtcccctatgggactcctttgtcagtaa

SEQ ID NO: 15571 - DNA, 201 bp, Homo sapiens
atgggtttatttgatcaacagttggctcttcagtgggttcaaaaaaatatagcagcctttggtggaaatcctaaaagtgtaactctctttggagaaagtgyaggagcagcttcagttagcctgcatttgctttctcctggaagccattcattgttcaccagagccattctgcaaagtggatcctttaatgctccttgggcg

SEQ ID NO: 15572 - DNA, 201 bp, Homo sapiens
tttatttgatcaacagttggctcttcagtgggttcaaaaaaatatagcagcctttggtggaaatcctaaaagtgtaactctctttggagaaagtgcaggarcagcttcagttagcctgcatttgctttctcctggaagccattcattgttcaccagagccattctgcaaagtggatcctttaatgctccttgggcggtaac

SEQ ID NO: 15573 - DNA, 201 bp, Homo sapiens
cactgacctcagtgaagactgtttatatctaaatgtatggattccagcacctaaaccaaaaaatgccactgtattgatatggatttatggtggtggttttyaaactggaacatcatctttacatgtttatgatggcaagtttctggctcgggttgaaagagttattgtagtgtcaatgaactatagggtgggtgccctagg

SEQ ID NO: 15574 - DNA, 201 bp, Homo sapiens
tagtgaaacggtgggcaaattttgcaaaatatgggaatccaaatgagactcagaacaatagcacaagctggcctgtcttcaaaagcactgaacaaaaatawctaaccttgaatacagagtcaacaagaataatgacgaaactacgtgctcaacaatgtcgattctggacatcattttttccaaaagtcttggaaatgacag

SEQ ID NO: 15575 - DNA, 201 bp, Homo sapiens; identical to SEQ ID NO: 15563

SEQ ID NO: 15576 - DNA, 201 bp, Homo sapiens
ctaaatgtatggattccagcacctaaaccaaaaaatgccactgtattgatatggatttatggtggtggttttcaaactggaacatcatctttacatgtttrtgatggcaagtttctggctcgggttgaaagagttattgtagtgtcaatgaactatagggtgggtgccctaggattcttagctttgccaggaaatcctgag

SEQ ID NO: 15577 - DNA, 201 bp, Homo sapiens
tctcctggaagccattcattgttcaccagagccattctgcaaagtggatcctttaatgctccttgggcggtaacatctctttatgaagctaggaacagaaygttgaacttagctaaattgactggttgctctagagagaatgagactgaaataatcaagtgtcttagaaataaagatccccaagaaattcttctgaatgaa

SEQ ID NO: 15578 - DNA, 201 bp, Homo sapiens
tcagaacatagatcaaagttttccaggcttccatggatcagagatgtggaacccaaacactgacctcagtgaagactgtttatatctaaatgtatggattycagcacctaaaccaaaaaatgccactgtattgatatggatttatggtggtggttttcaaactggaacatcatctttacatgtttatgatggcaagtttct

SEQ ID NO: 15579 - DNA, 201 bp, Homo sapiens
actgaagatgacatcataattgcaacaaagaatggaaaagtcagagggatgaacttgacagtttttggtggcacggtaacagcctttcttggaattccctrtgcacagccacctcttggtagacttcgattcaaaaagccacagtctctgaccaagtggtctgatatttggaatgccacaaaatatgcaaattcttgctgt

SEQ ID NO: 15580 - DNA, 201 bp, Homo sapiens; identical to SEQ ID NO: 15565

SEQ ID NO: 15581 - DNA, 201 bp, Homo sapiens
gaacatgggtttatttgatcaacagttggctcttcagtgggttcaaaaaaatatagcagcctttggtggaaatcctaaaagtgtaactctctttggagaargtgcaggagcagcttcagttagcctgcatttgctttctcctggaagccattcattgttcaccagagccattctgcaaagtggatcctttaatgctccttg

SEQ ID NO: 15582 - DNA, 201 bp, Homo sapiens
taacactgaatgtcagtgcagtccaatttacaggctggagcagcagctgcatcctgcatttccccgaagtattacatgattttcactccttgcaaactttrccatctttgttgcagagaatcggaaatcaatatgcatagcaaagtcacaatcatatgcatcagatttctcttttggtttcttttgctctgcatgcttatt

SEQ ID NO: 15583 - DNA, 201 bp, Homo sapiens
ctatggtgctcctggcttcagcaaagataacaatagtatcataactagaaaagaatttcaggaaggtttaaaaatattttttccaggagtgagtgagtttvgaaaggaatccatcctttttcattacacagactgggtagatgatcagagacctgaaaactaccgtgaggccttgggtgatgttgttggggattataattt

SEQ ID NO: 15584 - DNA, 201 bp, Homo sapiens
aaagagttattgtagtgtcaatgaactatagggtgggtgccctaggattcttagctttgccaggaaatcctgaggctccagggaacatgggtttatttgakcaacagttggctcttcagtgggttcaaaaaaatatagcagcctttggtggaaatcctaaaagtgtaactctctttggagaaagtgcaggagcagcttcag

SEQ ID NO: 15585 - DNA, 201 bp, Homo sapiens
catcataattgcaacaaagaatggaaaagtcagagggatgaacttgacagtttttggtggcacggtaacagcctttcttggaattccctatgcacagccayctcttggtagacttcgattcaaaaagccacagtctctgaccaagtggtctgatatttggaatgccacaaaatatgcaaattcttgctgtcagaacataga

SEQ ID NO: 15586 - DNA, 201 bp, Homo sapiens; identical to SEQ ID NO: 15564

SEQ ID NO: 15587 - DNA, 201 bp, Homo sapiens
tgattttctcactgacatgccagacatattacttgaacttggacaatttaaaaaaacccagattttggtgggtgttaataaagatgaagggacagcttttwtagtctatggtgctcctggcttcagcaaagataacaatagtatcataactagaaaagaatttcaggaaggtttaaaaatattttttccaggagtgagtga

SEQ ID NO: 15588 - DNA, 201 bp, Homo sapiens
gtttatatctaaatgtatggattccagcacctaaaccaaaaaatgccactgtattgatatggatttatggtggtggttttcaaactggaacatcatctttwcatgtttatgatggcaagtttctggctcgggttgaaagagttattgtagtgtcaatgaactatagggtgggtgccctaggattcttagctttgccaggaa

SEQ ID NO: 15589 - DNA, 201 bp, Homo sapiens
tgtattgatatggatttatggtggtggttttcaaactggaacatcatctttacatgtttatgatggcaagtttctggctcgggttgaaagagttattgtartgtcaatgaactatagggtgggtgccctaggattcttagctttgccaggaaatcctgaggctccagggaacatgggtttatttgatcaacagttggctct

SEQ ID NO: 15590 - DNA, 201 bp, Homo sapiens
acctcttggtagacttcgattcaaaaagccacagtctctgaccaagtggtctgatatttggaatgccacaaaatatgcaaattcttgctgtcagaacatasatcaaagttttccaggcttccatggatcagagatgtggaacccaaacactgacctcagtgaagactgtttatatctaaatgtatggattccagcacctaa

SEQ ID NO: 15591 - DNA, 201 bp, Homo sapiens
ttttttccaggagtgagtgagtttggaaaggaatccatcctttttcattacacagactgggtagatgatcagagacctgaaaactaccgtgaggccttggktgatgttgttggggattataatttcatatgccctgccttggagttcaccaagaagttctcagaatggggaaataatgcctttttctactattttgaacac

SEQ ID NO: 15592 - DNA, 201 bp, Homo sapiens
tgatcaacagttggctcttcagtgggttcaaaaaaatatagcagcctttggtggaaatcctaaaagtgtaactctctttggagaaagtgcaggagcagctycagttagcctgcatttgctttctcctggaagccattcattgttcaccagagccattctgcaaagtggatcctttaatgctccttgggcggtaacatctct

SEQ ID NO: 15593 - DNA, 201 bp, Homo sapiens
tgaagctaggaacagaacgttgaacttagctaaattgactggttgctctagagagaatgagactgaaataatcaagtgtcttagaaataaagatccccaakaaattcttctgaatgaagcatttgttgtcccctatgggactcctttgtcagtaaactttggtccgaccgtggatggtgattttctcactgacatgccaga

SEQ ID NO: 15594 - DNA, 201 bp, Homo sapiens
cctcttggtagacttcgattcaaaaagccacagtctctgaccaagtggtctgatatttggaatgccacaaaatatgcaaattcttgctgtcagaacatagrtcaaagttttccaggcttccatggatcagagatgtggaacccaaacactgacctcagtgaagactgtttatatctaaatgtatggattccagcacctaaa

SEQ ID NO: 15595 - DNA, 201 bp, Homo sapiens; identical to SEQ ID NO: 15567

SEQ ID NO: 15596 - DNA, 201 bp, Homo sapiens; identical to SEQ ID NO: 15560

SEQ ID NO: 15597 - DNA, 201 bp, Homo sapiens; identical to SEQ ID NO: 15569

SEQ ID NO: 15598 - DNA, 201 bp, Homo sapiens; identical to SEQ ID NO: 15570

SEQ ID NO: 15599 - DNA, 201 bp, Homo sapiens; identical to SEQ ID NO: 15571

SEQ ID NO: 15600 - DNA, 201 bp, Homo sapiens; identical to SEQ ID NO: 15572

SEQ ID NO: 15601 - DNA, 201 bp, Homo sapiens; identical to SEQ ID NO: 15573

SEQ ID NO: 15602 - DNA, 201 bp, Homo sapiens; identical to SEQ ID NO: 15574

SEQ ID NO: 15603 - DNA, 201 bp, Homo sapiens; identical to SEQ ID NO: 15563

SEQ ID NO: 15604 - DNA, 201 bp, Homo sapiens; identical to SEQ ID NO: 15576

SEQ ID NO: 15605 - DNA, 201 bp, Homo sapiens; identical to SEQ ID NO: 15577

SEQ ID NO: 15606 - DNA, 201 bp, Homo sapiens; identical to SEQ ID NO: 15578

SEQ ID NO: 15607 - DNA, 201 bp, Homo sapiens; identical to SEQ ID NO: 15579

SEQ ID NO: 15608 - DNA, 201 bp, Homo sapiens; identical to SEQ ID NO: 15565

SEQ ID NO: 15609 - DNA, 201 bp, Homo sapiens; identical to SEQ ID NO: 15581

SEQ ID NO: 15610 - DNA, 201 bp, Homo sapiens; identical to SEQ ID NO: 15582

SEQ ID NO: 15611 - DNA, 201 bp, Homo sapiens; identical to SEQ ID NO: 15583

SEQ ID NO: 15612 - DNA, 201 bp, Homo sapiens; identical to SEQ ID NO: 15584

SEQ ID NO: 15613 - DNA, 201 bp, Homo sapiens; identical to SEQ ID NO: 15585

SEQ ID NO: 15614 - DNA, 201 bp, Homo sapiens; identical to SEQ ID NO: 15564

SEQ ID NO: 15615 - DNA, 201 bp, Homo sapiens; identical to SEQ ID NO: 15587

SEQ ID NO: 15616 - DNA, 201 bp, Homo sapiens; identical to SEQ ID NO: 15588

SEQ ID NO: 15617 - DNA, 201 bp, Homo sapiens; identical to SEQ ID NO: 15589

SEQ ID NO: 15618 - DNA, 201 bp, Homo sapiens; identical to SEQ ID NO: 15590

SEQ ID NO: 15619 - DNA, 201 bp, Homo sapiens; identical to SEQ ID NO: 15591

SEQ ID NO: 15620 - DNA, 201 bp, Homo sapiens; identical to SEQ ID NO: 15592

SEQ ID NO: 15621 - DNA, 201 bp, Homo sapiens; identical to SEQ ID NO: 15593

SEQ ID NO: 15622 - DNA, 201 bp, Homo sapiens; identical to SEQ ID NO: 15594

SEQ ID NO: 15623 - DNA, 201 bp, Homo sapiens; identical to SEQ ID NO: 15567

SEQ ID NO: 15624 - DNA, 201 bp, Homo sapiens; identical to SEQ ID NO: 15561

SEQ ID NO: 15625 - DNA, 201 bp, Homo sapiens; identical to SEQ ID NO: 15562

SEQ ID NO: 15626 - DNA, 201 bp, Homo sapiens
tgagactcagaacaatagcacaagctggcctgtcttcaaaagcactgaacaaaaatatctaaccttgaatacagagtcaacaagaataatgacgaaactaygtgctcaacaatgtcgattctggacatcattttttccaaaagtcttggaaatgacagagcctatatgctgctactgtgagccaggaactgcactagcagc

SEQ ID NO: 15627 - DNA, 201 bp, Homo sapiens; identical to SEQ ID NO: 15566

SEQ ID NO: 15628 - DNA, 201 bp, Homo sapiens
aacaatagcacaagctggcctgtcttcaaaagcactgaacaaaaatatctaaccttgaatacagagtcaacaagaataatgacgaaactacgtgctcaacwatgtcgattctggacatcattttttccaaaagtcttggaaatgacagagcctatatgctgctactgtgagccaggaactgcactagcagctagagctgca

SEQ ID NO: 15629 - DNA, 201 bp, Homo sapiens
ggtgggaagcgtgggtgacctccaccggccttcaggtgggcatcaccgtcaccgacaacgccagcatcgggaagacgctgaacgagggggagcactcgagygtgcagtgcttcagccatacggtgaacctgatcgtcagcgaggccattaagagccagcggatggtgcagaacctgctgagcctcgcccggaagatctgcg

SEQ ID NO: 15630 - DNA, 201 bp, Homo sapiens
aaagaatggactttaaaagcgagcaggaggacatgaagcagacagacagcggtggggagcgagcgggcctcggtgggacgggttgcagctgcaagccccckgggaagtacttgtctgcagagagtgaggatgactatggcgcgctgttctcccagtacagcagcaccctatacgacgtggccatggaggccgtgacccaga

SEQ ID NO: 15631 - DNA, 201 bp, Homo sapiens
gtggcaacagcattcagaagcagctggagtgctggtgggaagcgtgggtgacctccaccggccttcaggtgggcatcaccgtcaccgacaacgccagcatygggaagacgctgaacgagggggagcactcgagcgtgcagtgcttcagccatacggtgaacctgatcgtcagcgaggccattaagagccagcggatggtgc

SEQ ID NO: 15632 - DNA, 201 bp, Homo sapiens
gtgatgtgggcaccagctgcctgatgagacatctctaccggcgccatccagaagttgtcgggagccagaagggcttcctgggtgcaagtctggcaaactcyccgtatgccactttggcctctgcagaaagttcctcttccaaattgactgacttgccaacagtggtcacaaaaaacaatcaagttatgtttcctgttaata

SEQ ID NO: 15633 - DNA, 201 bp, Homo sapiens
tgactgaggacttgcagtctcacttgaaccctggagatgggctgatggaagacgtggcggccttctcatcttccgatgacataggggaggcctcggcgtcytctcctgagaagcagcaggctgatgggctgagtcctagattgtttgaatctggtgccatcttccagcagaataaaaaggtcatgaaaagactgaagtcgg

SEQ ID NO: 15634 - DNA, 201 bp, Homo sapiens
agttcagcagaggcaaaaacgagaaagacttgagtaccagttgtctcatgaggcacgtgaggcgcgcacacccgaccgtgctcattcaggaaaatggcagygtgtctgccgtgtcctcgttcccctctccctcactcctgcttccaccgcagcctgcggacgcgggtgacctcagcaccatcctctcacccatcaaacttg

SEQ ID NO: 15635 - DNA, 201 bp, Homo sapiens
tgaggcacgtgaggcgcgcacacccgaccgtgctcattcaggaaaatggcagcgtgtctgccgtgtcctcgttcccctctccctcactcctgcttccaccrcagcctgcggacgcgggtgacctcagcaccatcctctcacccatcaaacttgtccagaaagtggcgtctaagatcccgtcccccgatcgaataacagagg

SEQ ID NO: 15636 - DNA, 201 bp, Homo sapiens
tggcggccttctcatcttccgatgacataggggaggcctcggcgtcctctcctgagaagcagcaggctgatgggctgagtcctagattgtttgaatctggygccatcttccagcagaataaaaaggtcatgaaaagactgaagtcggaggtctggcatcacttctccctggcccccatggacagcctcaaggccgagtgtc

SEQ ID NO: 15637 - DNA, 201 bp, Homo sapiens
ttaacgagatgtccgtcgagtgtaacttccgagagctgatcagctgcgaccagtgggaggtcatgcagtccgtgtgccgtgcgctaaagcccttcgaggcygcgagccgggagatgagcacgcagatgtccaccctcagccaggtcatccccatggtacacatcctcaacaggaaggtggagatgctcttcgaggagacga

SEQ ID NO: 15638 - DNA, 201 bp, Homo sapiens
ctcctcctcccctgacaggctgactgaggacttgcagtctcacttgaaccctggagatgggctgatggaagacgtggcggccttctcatcttccgatgacrtaggggaggcctcggcgtcctctcctgagaagcagcaggctgatgggctgagtcctagattgtttgaatctggtgccatcttccagcagaataaaaaggt

SEQ ID NO: 15639 - DNA, 201 bp, Homo sapiens
acgggggcacgggcatcccgccactgtactccacccctcccactctgctgccttccttgctgccgccggagggggagctcagctctgtgtcctcgtctccrgtaaagccggtcagagagtccccttcggcctcctcctcccctgacaggctgactgaggacttgcagtctcacttgaaccctggagatgggctgatggaag

SEQ ID NO: 15640 - DNA, 201 bp, Homo sapiens
atattttcaaatcccaaggacatcagagtgaagtgtcagttgtcagatgattttaaaagttatgtcttcagagaaaaaaagattcattttctcattttaarccaattaaatattctgagtgagactaatcactcatttgcctacgaccttttagaaaagttgttttgttgaaatactgtacgtacgcttaatctaaatttg

SEQ ID NO: 15641 - DNA, 201 bp, Homo sapiens
aagaagcttgttatattccagttgtaagaatagccttagtgtttagatttttttatgatagggaagatgcggccatcactgggatattttcaaatcccaargacatcagagtgaagtgtcagttgtcagatgattttaaaagttatgtcttcagagaaaaaaagattcattttctcattttaagccaattaaatattctga

SEQ ID NO: 15642 - DNA, 201 bp, Homo sapiens
atgtcttcagagaaaaaaagattcattttctcattttaagccaattaaatattctgagtgagactaatcactcatttgcctacgaccttttagaaaagttrttttgttgaaatactgtacgtacgcttaatctaaatttgcattgactatgttttagtgtatttataaatggtgaactcagtttctgaaattaaacttctt

SEQ ID NO: 15643 - DNA, 201 bp, Homo sapiens
ctccctcgccagcagccctggccagtgtcatcctggtgtagaaagggttgcgcacaggataggagggagccacagttcttgcttagctgtgctcacgaccrgcttgcagtcctgtgtttcttaagattgtatttggaatggtaatatccttagaattttgggatattgagcttcatggattttctctccaaaacaagccag

SEQ ID NO: 15644 - DNA, 201 bp, Homo sapiens
ggcactctgcccatttttctaagtgaaattttcttggaatacagtcacagctgtttttttaacatggtgtcttggctactttcaggctgcgacgggagaaytgaatagttgtgacagagaccacaggcccactgaaagggacaaacagggctgaaaatactcactgtttggccctttccagaatagcaagtttgctggccc

SEQ ID NO: 15645 - DNA, 201 bp, Homo sapiens
gatttttttatgatagggaagatgcggccatcactgggatattttcaaatcccaaggacatcagagtgaagtgtcagttgtcagatgattttaaaagttaygtcttcagagaaaaaaagattcattttctcattttaagccaattaaatattctgagtgagactaatcactcatttgcctacgaccttttagaaaagttgt

SEQ ID NO: 15646 - DNA, 120 bp, Homo sapiens
actctagcctggacaacagagcaagatcctctctcttaaaaccaccaacaatgacaacaacaaaacaacatttttatttctcaatgtaagctccatcaagrtcaagatacttttgtaagc

SEQ ID NO: 15647 - DNA, 201 bp, Homo sapiens
acactggctttttatttttaggataagaaaacaggcatattctttgtggtccattatctagagcccatacttgggcagcatttgaaatttcaccttaaccmcagacagggctccagggaagtggagatgtaattcttacaacaacagttctgatcatggccatggtgatgactttccaggtctcgtgttcaagtggtgcca

SEQ ID NO: 15648 - DNA, 201 bp, Homo sapiens
ggccgggagccgccccagaggccgggccgaggtaatgcacaagggtcacgtgtatgctctcaagatgatcaggcagatcctgtcctcaggaccagaagcaygtctctgctgcacacattgttgtctacaccatgagtgtttagtagcaggactcttggaaagcagtgatctatgctgtaagaccatgagtcacagattctt

SEQ ID NO: 15649 - DNA, 201 bp, Homo sapiens
tggccggctctccgtgctcctcttggtacctcattttggggagaaccttaaacccactcgagcagataatctccgccttgaccggtgccaccaaagaagcsttggaaccatgtggacttttctgggcattgccactttcacctatttttataagaagttcggggacttcatcactttggccaacagggaggtcctgttgtg

SEQ ID NO: 15650 - DNA, 192 bp, Homo sapiens
ccctcgtctgggccgagcccgcccagctggctgagacgcgtggagcctggcggcgagtgggggcgtgcgacggttactctggttactggggscgcgccgcgctggcgagagccgccgcccgcgagggatgctggtgaggaagccgtcgggagccgccgccgccatctgagggaggtaccctggaaaccacct

SEQ ID NO: 15651 - DNA, 201 bp, Homo sapiens
atttggattaatttgtttttgaagttttttgtatataaatatgtaaatacatgctttaatttgcaatttaaaatgaaggggttaaataagttagacatttraaagaaatgattgttaccataaattagtgctaatgctgaggagaactacagtttttcttttgaatttagtatttgagatgagttgttgggacatgcaaat

SEQ ID NO: 15652 - DNA, 165 bp, Homo sapiens
tgctttaatttgcaatttaaaatgaaggggttaaataagttagacatttaaaagaaatgattgttaccataaattagtgctaatgctgaggagaactacastttttcttttgaatttagtatttgagatgagttgttgggacatgcaaataaaatgaagaatgaa

SEQ ID NO: 15653 - DNA, 201 bp, Homo sapiens
cataccacttataaagtggaaactcttggaccaagatttggattaatttgtttttgaagttttttgtatataaatatgtaaatacatgctttaatttgcartttaaaatgaaggggttaaataagttagacatttaaaagaaatgattgttaccataaattagtgctaatgctgaggagaactacagtttttcttttgaat

SEQ ID NO: 15654 - DNA, 201 bp, Homo sapiens
gaaacaagcttaataggaacagctgcctgtacatcaacatcttctcagaatgacccagaagttatcatcgtgggagctggcgtgcttggctctgctttggyagctgtgctttccagagatggaagaaaggtgacagtcattgagagagacttaaaagagcctgacagaatagttggagaattcctgcagccgggtggttat

SEQ ID NO: 15655 - DNA, 191 bp, Homo sapiens
ccctcgtctgggccgagcccgcccagctggctgagacgcgtggagcctggcggcgagtgggggcgtgcgacggttactctggttactgggsccgcgccgcgctggcgagagccgccgcccgcgagggatgctggtgaggaagccgtcgggagccgccgccgccatctgagggaggtaccctggaaaccacc

SEQ ID NO: 15656 - DNA, 201 bp, Homo sapiens
gcctctaaatctttaggttggggctgcattgccctggagccgcactcttgagtccgaggccatcttttgttggagaaggcgtcggcgttggcgttttcccsaggttgggctgtacagtgtctccgtccgcggaaaaagaagcctctgaacccgcgccggcccgcagcccccgtgccttccggccgctgctcgccgtcgcca

SEQ ID NO: 15657 - DNA, 201 bp, Homo sapiens
ttggtggcgaatgtgttgcgggtcctgttgggctgctttctgtattgtctcctaaccctctagttttaattggacacttctttgctgttgcaatctatgcygtgtatttttgctttaagtcagaaccttggattacaaaacctcgagcccttctcagtagtggtgctgtattgtacaaagcgtgttctgtaatatttcctc

SEQ ID NO: 15658 - DNA, 201 bp, Homo sapiens
gtacaagaaaaggactaaaagattggtcgtttttgatgctcgatgaatgctgggaattcagaggaatgtcttcacttatacttggatttgctctcttcccrtttctgattgttgtatagctttcgattttgcttacagtagttcccccttatcttcgggagatacattccaaggcccccagtgaactcctgaaacctcaaa

SEQ ID NO: 15659 - DNA, 201 bp, Homo sapiens
taataataatgtaatagaacaatgataacatactataataaaagttatgtgaatgtggttggtctctcttgctttcaaaatatcttcttgtacagtactcrcctattttagaatgtggttgactacaggaatacaactatatacatatgattttatttttaagaccatattatatttgggtatctactaatattttgtata

SEQ ID NO: 15660 - DNA, 201 bp, Homo sapiens
ttcagaggaatgtcttcacttatacttggatttgctctcttcccatttctgattgttgtatagctttcgattttgcttacagtagttcccccttatcttckggagatacattccaaggcccccagtgaactcctgaaacctcaaacagtaccaaacctttatacactgttttttccatatatatatacctatgataaagta

SEQ ID NO: 15661 - DNA, 201 bp, Homo sapiens; identical to SEQ ID NO: 15658

SEQ ID NO: 15662 - DNA, 201 bp, Homo sapiens
taataataatgtaatagaacaatgataacatactataataaaagttatgtgaatgtggttggtctctcttgctttcaaaatatcttcttgtacagtactcrcctattttagaatgtggttgactacaggtaaccaaaaccacagaaagggaaactttggatgaggggggcactactgtacttaggaatacaactatataca

SEQ ID NO: 15663 - DNA, 201 bp, Homo sapiens
taagaccatattatatttgggtatctactaatattttgtataaagcaattttttgttccattacgtgactttttgttttattgtatatgtaatttaacacmcaataaagggtaaagttgcttccccaaaccacacttttaatcaaaacctagaatcatctgcagtccttgttaaaaatgcaggtttctagaaccctctgaa

SEQ ID NO: 15664 - DNA, 201 bp, Homo sapiens; identical to SEQ ID NO: 15660

SEQ ID NO: 15665 - DNA, 196 bp, Homo sapiens
tttgtataaagcaattttttgttccattacgtgactttttgttttattgtatatgtaatttaacacacaataaagggtaaagttgcttccccaaaccacasttttaatcaaaacctagaatcatctgcagtccttgttaaaaatgcaggtttctagaaccctctgaagttctgattaaataaatttattgcaaacc

SEQ ID NO: 15666 - DNA, 201 bp, Homo sapiens
ggagccaacagacctttgactatctcctgagccatgtccattctcccaacgctgaaaacctgggcctgttcctaatctcgggctacaacctcttccatgargccattccggacccttcctggaaggacacagttctgggatttcggaagctgacccccagagagctggatatgttcccagattacgggcaaaggggactgg

SEQ ID NO: 15667 - DNA, 201 bp, Homo sapiens
ggacccttcctggaaggacacagttctgggatttcggaagctgacccccagagagctggatatgttcccagattacgggcaaaggggactggggcctgacragttagcagacctgtccagaaggcagcagagggtagaggcaccagatttcctgtcctacccaggccctggtaccctggtctcctggtccttggtccagct

SEQ ID NO: 15668 - DNA, 201 bp, Homo sapiens
acaacccacaggaggcggactggagccaacagacctttgactatctcctgagccatgtccattctcccaacgctgaaaacctgggcctgttcctaatctcrggctacaacctcttccatgaagccattccggacccttcctggaaggacacagttctgggatttcggaagctgacccccagagagctggatatgttcccag

SEQ ID NO: 15669 - DNA, 124 bp, Homo sapiens
cttggtccagctccttcagagaggctacccactcaaacctggccttgggctgggaagctatggctggttccacacaagcctaattctggagggaaagaacyatctacagtggctgactgaaagg

SEQ ID NO: 15670 - DNA, 201 bp, Homo sapiens
actggaccttcaaacacagaggtcatccacaactatggccatggaggctacgggctcaccatccactggggatgtgccctggaggcagccaagctctttgkgagaatcctggaagaaaagaaattgtccagaatgccaccatcccacctctgaagactccagtgactgctgcctccccccacaagaactcccttctcccct

SEQ ID NO: 15671 - DNA, 201 bp, Homo sapiens
ctggaccttcaaacacagaggtcatccacaactatggccatggaggctacgggctcaccatccactggggatgtgccctggaggcagccaagctctttggkagaatcctggaagaaaagaaattgtccagaatgccaccatcccacctctgaagactccagtgactgctgcctccccccacaagaactcccttctcccctc

SEQ ID NO: 15672 - DNA, 201 bp, Homo sapiens
ctcatcactgaaatccctctaccttctctgggtctggcattataaagaacagctgaggctgtcattccatgagtcttcagaagaaaggacagctcagaaartcaaagaggccaactgcccagagccacagaaaatggaggataattgaggctaagtaacctgattacaagttgtactaacatattaaaggttctgaaaagt

SEQ ID NO: 15673 - DNA, 201 bp, Homo sapiens
tggaggcagccaagctctttgggagaatcctggaagaaaagaaattgtccagaatgccaccatcccacctctgaagactccagtgactgctgcctcccccsacaagaactcccttctcccctcagccaatgaatcaatgtgctccttcataagccattgcttctccctcacttctttcctcaaagaagcatgaggtgagag

SEQ ID NO: 15674 - DNA, 201 bp, Homo sapiens
ggagccaacagacctttgactatctcctgagccatgtccattctcccaacgctgaaaacctgggcctgttcctaatctcgggctacaacctcttccatgargccattccggacccttcctggaaggacacagttctgggatttcggaagctgacccccagagagctggatatgttcccagattacggctatggctggttcc

SEQ ID NO: 15675 - DNA, 201 bp, Homo sapiens; identical to SEQ ID NO: 15668

SEQ ID NO: 15676 - DNA, 201 bp, Homo sapiens
agttctgggatttcggaagctgacccccagagagctggatatgttcccagattacggctatggctggttccacacaagcctaattctggagggaaagaacyatctacagtggctgactgaaaggttaactgagaggggagtgaagttcttccagcggaaagtggagtcttttgaggaggtggcaagagaaggcgcagacgt

SEQ ID NO: 15677 - DNA, 201 bp, Homo sapiens; identical to SEQ ID NO: 15670

SEQ ID NO: 15678 - DNA, 201 bp, Homo sapiens; identical to SEQ ID NO: 15671

SEQ ID NO: 15679 - DNA, 201 bp, Homo sapiens; identical to SEQ ID NO: 15672

SEQ ID NO: 15680 - DNA, 201 bp, Homo sapiens; identical to SEQ ID NO: 15673

SEQ ID NO: 15681 - DNA, 201 bp, Homo sapiens; identical to SEQ ID NO: 15674

SEQ ID NO: 15682 - DNA, 201 bp, Homo sapiens; identical to SEQ ID NO: 15668

SEQ ID NO: 15683 - DNA, 201 bp, Homo sapiens; identical to SEQ ID NO: 15676

SEQ ID NO: 15684 - DNA, 201 bp, Homo sapiens
ggaggtgcaggttccagaggctcgctgtttctatggctttcaaattctcatcgagaatgttcactcagagatgtacagtttgctgatagacacttacatcwgagatcccaagaaaagggaatttttatttaatgcaattgaaaccatgccctatgttaagaaaaaagcagattgggccttgcgatggatagcagatagaaa

SEQ ID NO: 15685 - DNA, 201 bp, Homo sapiens
tttctttgagaaacgagtttcagagtatcagcgttttgcagttatggcagaaaccacagataacgtcttcaccttggatgcagatttttaaaaaacctctygttttaaaactctataaacttgtcattggtaaatagtagtctattttcctctgcttaaaaaaaattttaagtatatcctttaaaggactgggggtttgct

SEQ ID NO: 15686 - DNA, 133 bp, Homo sapiens
ccccatttaggcttcaaagacgaaccctactgcatctttttaaaagcattttctgacttgcagatgctgtagtagcaagtacatgagaaatgggttccgtsatggataaattggtaccctgccttagggggca

SEQ ID NO: 15687 - DNA, 201 bp, Homo sapiens
gagattgtcatctcatatatataaaatggacacgtggctataaaacaccatataagagatgagtagtgcgttttattttatatgccaatctactttgtttwaaaaaggtctgaatcaggacttgtgaaaacctgtagtgaaataccttaagctgttaactaactgtaaggcgtggaataggagttgctcagtggattggtt

SEQ ID NO: 15688 - DNA, 201 bp, Homo sapiens
tggaatttgttttcccttcttggaagggaacattgatatttaacagagtttttagagattgtcatctcatatatataaaatggacacgtggctataaaacmccatataagagatgagtagtgcgttttattttatatgccaatctactttgtttaaaaaaggtctgaatcaggacttgtgaaaacctgtagtgaaatacct

SEQ ID NO: 15689 - DNA, 118 bp, Homo sapiens
aaagacgaaccctactgcatctttttaaaagcattttctgacttgcagatgctgtagtagcaagtacatgagaaatgggttccgtcatggataaattggtmccctgccttagggggca

SEQ ID NO: 15690 - DNA, 201 bp, Homo sapiens
ttgcggggtggggtggggggttcgctatgtcggatgacgattcgagggccagcaccagctcctcctcatcttcgtcttccaaccagcaaaccgagaaagamacaaacacccccaagaagaaggagagtaaagtcagcatgagcaaaaactccaaactcctctccaccagcgccaagagaattcagaaggagctggcggaca

SEQ ID NO: 15691 - DNA, 119 bp, Homo sapiens
gagattgtcatctcatatatataaaatggacacgtggctataaaacaccatataagagatgagtagtgcgttttattttatatgccaatctactttgtttwaaaaaggtctgaatcagg

SEQ ID NO: 15692 - DNA, 173 bp, Homo sapiens
tggaatttgttttcccttcttggaagggaacattgatatttaacagagtttttagagattgtcatctcatatatataaaatggacacgtggctataaaacmccatataagagatgagtagtgcgttttattttatatgccaatctactttgtttaaaaaaggtctgaatcagg

SEQ ID NO: 15693 - DNA, 133 bp, Homo sapiens; identical to SEQ ID NO: 15686

SEQ ID NO: 15694 - DNA, 201 bp, Homo sapiens; identical to SEQ ID NO: 15687

SEQ ID NO: 15695 - DNA, 201 bp, Homo sapiens; identical to SEQ ID NO: 15688

SEQ ID NO: 15696 - DNA, 118 bp, Homo sapiens; identical to SEQ ID NO: 15689

SEQ ID NO: 15697 - DNA, 133 bp, Homo sapiens; identical to SEQ ID NO: 15686

SEQ ID NO: 15698 - DNA, 201 bp, Homo sapiens; identical to SEQ ID NO: 15690

SEQ ID NO: 15699 - DNA, 201 bp, Homo sapiens; identical to SEQ ID NO: 15687

SEQ ID NO: 15700 - DNA, 201 bp, Homo sapiens; identical to SEQ ID NO: 15688

SEQ ID NO: 15701 - DNA, 118 bp, Homo sapiens; identical to SEQ ID NO: 15689

SEQ ID NO: 15702 - DNA, 201 bp, Homo sapiens
gcctactgccttctgttgggaccaaagaggccatagtgcccatggaggtttggacttaagagatattcattggcagctcaaagacttccaccctggagacmacactgcacacagtgacttcctggggatgtcatagccaaagccaggcctgacgcattctcgtatccaacccaaggaccttttggaatgactggggagggc

SEQ ID NO: 15703 - DNA, 201 bp, Homo sapiens
ccgccaacgcgcaggtgctagcggccccttcgccctgcagcccctttgcttttactctgtccaaagttaacatgtcactgaaaaacgagccacgggtaaayacctctgcactgcagaaaattgctgctgacatgagtaatatcatagaaaatctggacacgcgggaactccactttgagggagaggaggtagactacgacg

SEQ ID NO: 15704 - DNA, 201 bp, Homo sapiens
atcccattcgagctgaggaggaactgaagaagatccgtggatttttggtgcaattccccttttatttcttgtctgaagaaagcctactgccttctgttggraccaaagaggccatagtgcccatggaggtttggacttaagagatattcattggcagctcaaagacttccaccctggagaccacactgcacacagtgactt

SEQ ID NO: 15705 - DNA, 201 bp, Homo sapiens
tcactatagaagtcatcacaatttaatccatggtttaaaaccccacttcaaactctttcacccgtccagtgagtctgagcaaggactcactagacctcatkctgataccgggtccatccgtagtttacagacaggtgtgggagagctgcatggggaaaccagattctggcatggaaaggactactgcaatttcgtcttcaa

SEQ ID NO: 15706 - DNA, 201 bp, Homo sapiens
agcagctcgaaatgctacaatttatgacaaggttttccggtgccttcccaatgatgaagtacacaatttaattcagctgagagactttataaacaagcccrtattagctaaggaagatcccattcgagctgaggaggaactgaagaagatccgtggatttttggtgcaattccccttttatttcttgtctgaagaaagcct

SEQ ID NO: 15707 - DNA, 201 bp, Homo sapiens
atttaatccatggtttaaaaccccacttcaaactctttcacccgtccagtgagtctgagcaaggactcactagacctcatgctgataccgggtccatccgyagtttacagacaggtgtgggagagctgcatggggaaaccagattctggcatggaaaggactactgcaatttcgtcttcaaagactgggttcaacttgata

SEQ ID NO: 15708 - DNA, 201 bp, Homo sapiens
tgagatatcaagtgcctgggtctgtccatgctaacgtacagttgctccgctctgctgctgattggtctgctggtataaagtaccatgaagagtccatccaygccgcttacgtccatgtgatagagaacagcaggcactatatctatatcgaaaaccagtttttcataagctgtgctgatgacaaagttgtgttcaacaaga

SEQ ID NO: 15709 - DNA, 201 bp, Homo sapiens
gaaaattgctgctgacatgagtaatatcatagaaaatctggacacgcgggaactccactttgagggagaggaggtagactacgacgtgtctcccagcgatsccaagatacaagaagtgtatatccctttctctgctatttataacactcaaggatttaaggagcctaatatacagacgtatctctccggctgtccaataaa

SEQ ID NO: 15710 - DNA, 201 bp, Homo sapiens
gactagcaacattgctgcagcccattgttggcctctctcttcactttatcattgcccaagaatgaggatatgcagtaaacagaattcaggcaagatacctytaagctgttttgaaccctctgatattttgtatttatgtgtttgtctgtctccccctactagaatgtaagctccatggggcagggacttcactgtattttg

SEQ ID NO: 15711 - DNA, 201 bp, Homo sapiens
ctgtgctgatgacaaagttgtgttcaacaagataggcgatgccattgcccagaggatcctgaaagctcacagggaaaaccagaaataccgggtatatgtcrtgataccacttctgccagggttcgaaggagacatttcaaccggcggaggaaatgctctacaggcaatcatgcacttcaactacagaaccatgtgcagagg

SEQ ID NO: 15712 - DNA, 201 bp, Homo sapiens
ccatccttggacagttaaaagcagagcttggtaatcagtggataaattacatatcattctgtggtcttagaacacatgcagagctcgaaggaaacctagtmactgagcttatctatgtccacagcaagttgttaattgctgatgataacactgttattattggctctgccaacataaatgaccgcagcatgctgggaaagc

SEQ ID NO: 15713 - DNA, 201 bp, Homo sapiens; identical to SEQ ID NO: 15702

SEQ ID NO: 15714 - DNA, 201 bp, Homo sapiens; identical to SEQ ID NO: 15703

SEQ ID NO: 15715 - DNA, 201 bp, Homo sapiens; identical to SEQ ID NO: 15704

SEQ ID NO: 15716 - DNA, 201 bp, Homo sapiens; identical to SEQ ID NO: 15705

SEQ ID NO: 15717 - DNA, 201 bp, Homo sapiens; identical to SEQ ID NO: 15706

SEQ ID NO: 15718 - DNA, 201 bp, Homo sapiens; identical to SEQ ID NO: 15707

SEQ ID NO: 15719 - DNA, 201 bp, Homo sapiens; identical to SEQ ID NO: 15708

SEQ ID NO: 15720 - DNA, 201 bp, Homo sapiens; identical to SEQ ID NO: 15709

SEQ ID NO: 15721 - DNA, 201 bp, Homo sapiens; identical to SEQ ID NO: 15710

SEQ ID NO: 15722 - DNA, 201 bp, Homo sapiens; identical to SEQ ID NO: 15711

SEQ ID NO: 15723 - DNA, 201 bp, Homo sapiens; identical to SEQ ID NO: 15712

SEQ ID NO: 15724 - DNA, 201 bp, Homo sapiens
acctatcctggttttactcttatcatttccatccataatggtcccactggcccggattttgcccaataagaaccgagacgaactgaatggcttttttaacraactcattaggaatgtgattgccttgcgggaccagcaagctgccgaagagaggcggagagacttcctccaaatggtcctggatgcccgacattctgcaag

SEQ ID NO: 15725 - DNA, 201 bp, Homo sapiens
ggttttactcttatcatttccatccataatggtcccactggcccggattttgcccaataagaaccgagacgaactgaatggcttttttaacaaactcattrggaatgtgattgccttgcgggaccagcaagctgccgaagagaggcggagagacttcctccaaatggtcctggatgcccgacattctgcaagtcccatggg

SEQ ID NO: 15726 - DNA, 201 bp, Homo sapiens
cctggatgcccgacattctgcaagtcccatgggcgtgcaagactttgacatcgtcagagacgttttctcctctactgggtgcaagccgaacccttcccggmaacaccagcccagccctatggccaggcctttgactgtggatgagattgtgggccaggccttcatcttcctcatcgctggctatgaaatcatcaccaacac

SEQ ID NO: 15727 - DNA, 201 bp, Homo sapiens
gttctgcagcctcgaggaaggcctgccctatctggacatggtgattgcagagacgctgaggatgtacccgccagctttcagattcacacgggaggcagctsaggactgcgaggtgctggggcagcgcatccccgcaggcgctgtgctagagatggccgtgggtgccctgcaccatgaccctgagcactggccaagcccgga

SEQ ID NO: 15728 - DNA, 201 bp, Homo sapiens
aggcgctgtgctagagatggccgtgggtgccctgcaccatgaccctgagcactggccaagcccggagaccttcaaccctgaaaggttcacggctgaggccmggcagcagcaccggcccttcacgtacctgcccttcggggccggcccacggagctgcctcggggtgcgtctagggctgcttgaggtcaagttgacactgct

SEQ ID NO: 15729 - DNA, 201 bp, Homo sapiens
gacatcgtcagagacgttttctcctctactgggtgcaagccgaacccttcccggcaacaccagcccagccctatggccaggcctttgactgtggatgagaytgtgggccaggccttcatcttcctcatcgctggctatgaaatcatcaccaacacactttcttttgccacctacctactggccaccaaccctgactgccaa

SEQ ID NO: 15730 - DNA, 201 bp, Homo sapiens
gccctatctggacatggtgattgcagagacgctgaggatgtacccgccagctttcagattcacacgggaggcagctcaggactgcgaggtgctggggcagygcatccccgcaggcgctgtgctagagatggccgtgggtgccctgcaccatgaccctgagcactggccaagcccggagaccttcaaccctgaaaggttcac

SEQ ID NO: 15731 - DNA, 201 bp, Homo sapiens
gggagggcacccccaaattcaaagaaaaccctaagtgtggatgttcagaattttggaaaaatgtcactgaagtgattgaaagagtgcctggcatgcaaggrtaagaggttctttacataacatttcctaaatgcttaataaacgtttgttgcacttggttttgacattgccaatggggtttgaaccagtgctctctctaaa

SEQ ID NO: 15732 - DNA, 201 bp, Homo sapiens
gacccaggtaccgctgcagctagaatccaaatctgccctaggtccaaaaaatggtgtctatatcaagatcgtatcccgctgacacagaaggctgccgggtsgggggagggcacccccaaattcaaagaaaaccctaagtgtggatgttcagaattttggaaaaatgtcactgaagtgattgaaagagtgcctggcatgcaa

SEQ ID NO: 15733 - DNA, 201 bp, Homo sapiens
tgtttattgttatttctgagccagacatgatcaagcaggtgttggttgagaacttcagtaactttaccaacagaatggcgtcgggtttggagttcaagtcrgtagccgacagcgttctgtttttacgtgacaaaagatgggaagaggtcagaggtgccctgatgtctgctttcagtcctgaaaagctgaacgagatggttc

SEQ ID NO: 15734 - DNA, 201 bp, Homo sapiens
ttctcctggctcatttaaaacgctatgcggaatctggggacgcatttgacatccagaggtgctactgcaattacaccacagatgtggttgccagcgtcgcstttggcaccccggtggactcctggcaggcccctgaggatccctttgtgaaacactgcaagcgtttcttcgaattctgcatccccagacctatcctggttt

SEQ ID NO: 15735 - DNA, 201 bp, Homo sapiens
cagcctcctgtctcatctggaagaccaccactctggggtctcagaggaatgatggaagccttggggtttctaaaattggaagtgaatggccccatggtgayggtggccctgtcagtggctctcttggccctcctgaaatggtactccacatcagcattctcaagactggagaagttaggcctcagacatcccaagccttct

SEQ ID NO: 15736 - DNA, 165 bp, Homo sapiens
ttcagaattttggaaaaatgtcactgaagtgattgaaagagtgcctggcatgcaaggataagaggttctttacataacatttcctaaatgcttaataaacrtttgttgcacttggttttgacattgccaatggggtttgaaccagtgctctctctaaatgaagaa

SEQ ID NO: 15737 - DNA, 201 bp, Homo sapiens
cggctccgagtccagcgcagccgagccggtctgcagaggggcccccagaactttgtgtgtgtgtgtgcacgcgcgcgcgtgtgtgcccaggtgcgagggtkcgcgcgtgtgctggcggggagggaaccgacccgaaagagagccccacgctggcaaagtggctcgcccatctcacagccggttggcgctcgcggaggagac

SEQ ID NO: 15738 - DNA, 201 bp, Homo sapiens
cacctacctactggccaccaaccctgactgccaagagaagcttctgagagaggtagacgtttttaaggagaaacacatggcccctgagttctgcagcctcraggaaggcctgccctatctggacatggtgattgcagagacgctgaggatgtacccgccagctttcagattcacacgggaggcagctcaggactgcgaggt

SEQ ID NO: 15739 - DNA, 201 bp, Homo sapiens
ctcctgaaatggtactccacatcagcattctcaagactggagaagttaggcctcagacatcccaagccttctcctttcattggaaacttgacatttttccrccagggtttttgggaaagccaaatggagctcagaaagctgtatggacctctgtgtgggtactatcttggtcgtcggatgtttattgttatttctgagcca

SEQ ID NO: 15740 - DNA, 201 bp, Homo sapiens
ggccaggcctttgactgtggatgagattgtgggccaggccttcatcttcctcatcgctggctatgaaatcatcaccaacacactttcttttgccacctacstactggccaccaaccctgactgccaagagaagcttctgagagaggtagacgtttttaaggagaaacacatggcccctgagttctgcagcctcgaggaagg

SEQ ID NO: 15741 - DNA, 201 bp, Homo sapiens
ggacatggtgattgcagagacgctgaggatgtacccgccagctttcagattcacacgggaggcagctcaggactgcgaggtgctggggcagcgcatccccrcaggcgctgtgctagagatggccgtgggtgccctgcaccatgaccctgagcactggccaagcccggagaccttcaaccctgaaaggttcacggctgaggc

SEQ ID NO: 15742 - DNA, 131 bp, Homo sapiens
gcctggacccggcgggcgcacggctccgagyccagcgcagccgagccggtctgcagaggggcccccagaactttgtgtgtgtgtgtgcacgcgcgcgcgtgtgtgcccaggtgcgagggtgcgcgcgtgtg

SEQ ID NO: 15743 - DNA, 201 bp, Homo sapiens
tacgtgacaaaagatgggaagaggtcagaggtgccctgatgtctgctttcagtcctgaaaagctgaacgagatggttcccctcatcagccaagcctgcgamcttctcctggctcatttaaaacgctatgcggaatctggggacgcatttgacatccagaggtgctactgcaattacaccacagatgtggttgccagcgtcg

SEQ ID NO: 15744 - DNA, 201 bp, Homo sapiens
ctactggccaccaaccctgactgccaagagaagcttctgagagaggtagacgtttttaaggagaaacacatggcccctgagttctgcagcctcgaggaagkcctgccctatctggacatggtgattgcagagacgctgaggatgtacccgccagctttcagattcacacgggaggcagctcaggactgcgaggtgctgggg

SEQ ID NO: 15745 - DNA, 201 bp, Homo sapiens
ggtgattgcagagacgctgaggatgtacccgccagctttcagattcacacgggaggcagctcaggactgcgaggtgctggggcagcgcatccccgcaggcrctgtgctagagatggccgtgggtgccctgcaccatgaccctgagcactggccaagcccggagaccttcaaccctgaaaggttcacggctgaggcccggca

SEQ ID NO: 15746 - DNA, 201 bp, Homo sapiens
tgagagaggtagacgtttttaaggagaaacacatggcccctgagttctgcagcctcgaggaaggcctgccctatctggacatggtgattgcagagacgctraggatgtacccgccagctttcagattcacacgggaggcagctcaggactgcgaggtgctggggcagcgcatccccgcaggcgctgtgctagagatggccg

SEQ ID NO: 15747 - DNA, 201 bp, Homo sapiens
tgaggatgtacccgccagctttcagattcacacgggaggcagctcaggactgcgaggtgctggggcagcgcatccccgcaggcgctgtgctagagatggcygtgggtgccctgcaccatgaccctgagcactggccaagcccggagaccttcaaccctgaaaggttcacggctgaggcccggcagcagcaccggcccttca

SEQ ID NO: 15748 - DNA, 201 bp, Homo sapiens
tgacaaaagatgggaagaggtcagaggtgccctgatgtctgctttcagtcctgaaaagctgaacgagatggttcccctcatcagccaagcctgcgaccttmtcctggctcatttaaaacgctatgcggaatctggggacgcatttgacatccagaggtgctactgcaattacaccacagatgtggttgccagcgtcgcctt

SEQ ID NO: 15749 - DNA, 201 bp, Homo sapiens
gactgcgaggtgctggggcagcgcatccccgcaggcgctgtgctagagatggccgtgggtgccctgcaccatgaccctgagcactggccaagcccggagamcttcaaccctgaaaggttcacggctgaggcccggcagcagcaccggcccttcacgtacctgcccttcggggccggcccacggagctgcctcggggtgcgt

SEQ ID NO: 15750 - DNA, 201 bp, Homo sapiens; identical to SEQ ID NO: 15724

SEQ ID NO: 15751 - DNA, 201 bp, Homo sapiens; identical to SEQ ID NO: 15725

SEQ ID NO: 15752 - DNA, 201 bp, Homo sapiens; identical to SEQ ID NO: 15726

SEQ ID NO: 15753 - DNA, 201 bp, Homo sapiens; identical to SEQ ID NO: 15727

SEQ ID NO: 15754 - DNA, 201 bp, Homo sapiens; identical to SEQ ID NO: 15728

SEQ ID NO: 15755 - DNA, 201 bp, Homo sapiens; identical to SEQ ID NO: 15729

SEQ ID NO: 15756 - DNA, 201 bp, Homo sapiens; identical to SEQ ID NO: 15730

SEQ ID NO: 15757 - DNA, 201 bp, Homo sapiens; identical to SEQ ID NO: 15731

SEQ ID NO: 15758 - DNA, 201 bp, Homo sapiens; identical to SEQ ID NO: 15732

SEQ ID NO: 15759 - DNA, 201 bp, Homo sapiens; identical to SEQ ID NO: 15733

SEQ ID NO: 15760 - DNA, 201 bp, Homo sapiens; identical to SEQ ID NO: 15734

SEQ ID NO: 15761 - DNA, 201 bp, Homo sapiens; identical to SEQ ID NO: 15735

SEQ ID NO: 15762 - DNA, 165 bp, Homo sapiens; identical to SEQ ID NO: 15736

SEQ ID NO: 15763 - DNA, 201 bp, Homo sapiens; identical to SEQ ID NO: 15738

SEQ ID NO: 15764 - DNA, 201 bp, Homo sapiens; identical to SEQ ID NO: 15739

SEQ ID NO: 15765 - DNA, 201 bp, Homo sapiens; identical to SEQ ID NO: 15740

SEQ ID NO: 15766 - DNA, 201 bp, Homo sapiens; identical to SEQ ID NO: 15741

SEQ ID NO: 15767 - DNA, 201 bp, Homo sapiens; identical to SEQ ID NO: 15743

SEQ ID NO: 15768 - DNA, 201 bp, Homo sapiens; identical to SEQ ID NO: 15744

SEQ ID NO: 15769 - DNA, 201 bp, Homo sapiens; identical to SEQ ID NO: 15745

SEQ ID NO: 15770 - DNA, 201 bp, Homo sapiens; identical to SEQ ID NO: 15746

SEQ ID NO: 15771 - DNA, 201 bp, Homo sapiens; identical to SEQ ID NO: 15747

SEQ ID NO: 15772 - DNA, 201 bp, Homo sapiens; identical to SEQ ID NO: 15748

SEQ ID NO: 15773 - DNA, 201 bp, Homo sapiens; identical to SEQ ID NO: 15749

SEQ ID NO: 15774 - DNA, 201 bp, Homo sapiens; identical to SEQ ID NO: 15724

SEQ ID NO: 15775 - DNA, 201 bp, Homo sapiens; identical to SEQ ID NO: 15725

SEQ ID NO: 15776 - DNA, 201 bp, Homo sapiens; identical to SEQ ID NO: 15726

SEQ ID NO: 15777 - DNA, 201 bp, Homo sapiens; identical to SEQ ID NO: 15727

SEQ ID NO: 15778 - DNA, 201 bp, Homo sapiens; identical to SEQ ID NO: 15729

SEQ ID NO: 15779 - DNA, 201 bp, Homo sapiens
gccctatctggacatggtgattgcagagacgctgaggatgtacccgccagctttcagattcacacgggaggcagctcaggactgcgaggtgctggggcagygcatccccgcaggcgctgtgctagagatggccgtgggtgccctgcaccatgaccctgagcactggccaagcccggagaccttcaaccctgaaaggtaccg

SEQ ID NO: 15780 - DNA, 201 bp, Homo sapiens; identical to SEQ ID NO: 15731

SEQ ID NO: 15781 - DNA, 201 bp, Homo sapiens
ctgaaaggtaccgctgcagctagaatccaaatctgccctaggtccaaaaaatggtgtctatatcaagatcgtatcccgctgacacagaaggctgccgggtsgggggagggcacccccaaattcaaagaaaaccctaagtgtggatgttcagaattttggaaaaatgtcactgaagtgattgaaagagtgcctggcatgcaa

SEQ ID NO: 15782 - DNA, 201 bp, Homo sapiens; identical to SEQ ID NO: 15733

SEQ ID NO: 15783 - DNA, 201 bp, Homo sapiens; identical to SEQ ID NO: 15734

SEQ ID NO: 15784 - DNA, 201 bp, Homo sapiens; identical to SEQ ID NO: 15735

SEQ ID NO: 15785 - DNA, 165 bp, Homo sapiens; identical to SEQ ID NO: 15736

SEQ ID NO: 15786 - DNA, 201 bp, Homo sapiens; identical to SEQ ID NO: 15738

SEQ ID NO: 15787 - DNA, 201 bp, Homo sapiens; identical to SEQ ID NO: 15739

SEQ ID NO: 15788 - DNA, 201 bp, Homo sapiens; identical to SEQ ID NO: 15740

SEQ ID NO: 15789 - DNA, 201 bp, Homo sapiens
ggacatggtgattgcagagacgctgaggatgtacccgccagctttcagattcacacgggaggcagctcaggactgcgaggtgctggggcagcgcatccccrcaggcgctgtgctagagatggccgtgggtgccctgcaccatgaccctgagcactggccaagcccggagaccttcaaccctgaaaggtaccgctgcagcta

SEQ ID NO: 15790 - DNA, 201 bp, Homo sapiens; identical to SEQ ID NO: 15743

SEQ ID NO: 15791 - DNA, 201 bp, Homo sapiens; identical to SEQ ID NO: 15744

SEQ ID NO: 15792 - DNA, 201 bp, Homo sapiens
ggtgattgcagagacgctgaggatgtacccgccagctttcagattcacacgggaggcagctcaggactgcgaggtgctggggcagcgcatccccgcaggcrctgtgctagagatggccgtgggtgccctgcaccatgaccctgagcactggccaagcccggagaccttcaaccctgaaaggtaccgctgcagctagaatcc

SEQ ID NO: 15793 - DNA, 201 bp, Homo sapiens; identical to SEQ ID NO: 15746

SEQ ID NO: 15794 - DNA, 201 bp, Homo sapiens
tgaggatgtacccgccagctttcagattcacacgggaggcagctcaggactgcgaggtgctggggcagcgcatccccgcaggcgctgtgctagagatggcygtgggtgccctgcaccatgaccctgagcactggccaagcccggagaccttcaaccctgaaaggtaccgctgcagctagaatccaaatctgccctaggtcc

SEQ ID NO: 15795 - DNA, 201 bp, Homo sapiens; identical to SEQ ID NO: 15748

SEQ ID NO: 15796 - DNA, 201 bp, Homo sapiens
gactgcgaggtgctggggcagcgcatccccgcaggcgctgtgctagagatggccgtgggtgccctgcaccatgaccctgagcactggccaagcccggagamcttcaaccctgaaaggtaccgctgcagctagaatccaaatctgccctaggtccaaaaaatggtgtctatatcaagatcgtatcccgctgacacagaaggc

SEQ ID NO: 15797 - DNA, 201 bp, Homo sapiens
tcatatttcagaagtcaaaatacaaaactggattatcaaaacggttggtgtggtcactttaaactggactatcagtatggttgccgtggtcactttaagckggattatcagtacggttggtgtggtcactttggtttatcatcaatacagttggtgtggtcactttaaactggattaccaatatggttggtgtggtcgctt

SEQ ID NO: 15798 - DNA, 201 bp, Homo sapiens
ctcagtgggggttcaccacaaaacacgggccccaggagggaagcgctgtctaggcacacggcaaggccttagtaacagcatgctacactgctcgaggtacrgtatgtcccatcgccctgtgcaccgtagagacctcagtcatctcaaggaagaatacatttgcttctccttagaggcgttcgaactagaagctatgcgtta

SEQ ID NO: 15799 - DNA, 201 bp, Homo sapiens
ggaccttggagatctgtctccagagggcaggtttactggcctggagtccatattccgtgctgtcaattatatgtacatgggaaaaaacactggaaaaattktagttgaattacctcactctgtcaacagtaagctgtaaaaacagaacaatgacataaatcaagggagaaagaaaatgggcactttatgtctcagaattac

SEQ ID NO: 15800 - DNA, 201 bp, Homo sapiens
tcagcctgaaagagctcggaggactgtcggaagggaaaaaagttttggtgacagcagcagctgggggaacgggccagtttgccatgcagctttcaaagaargcaaagtgccatgtaattggaacctgctcttctgatgaaaagtctgcttttctgaaatctcttggctgtgatcgtcctatcaactataaaactgaacccg

SEQ ID NO: 15801 - DNA, 201 bp, Homo sapiens
aatataatctgaaaacctcatgttctctctttccccaaactaagaaagtgcactgcatgctgttttcacttattcttagaaaacaagcatgaaagattcckcccattcagataatgccaaaaatatgtttaaacttttttttattcttttgaaaaatgatttgtaaattgagggtcatagttcagcatcagtttcatcttc

SEQ ID NO: 15802 - DNA, 201 bp, Homo sapiens
agaaatctgccagcgtacagggcttcttcctgaaccattacctttctaagtatcaagcagccatgagccacttgctcgagatgtgtgtgagcggagacctkgtttgtgaggtggaccttggagatctgtctccagagggcaggtttactggcctggagtccatattccgtgctgtcaattatatgtacatgggaaaaaaca

SEQ ID NO: 15803 - DNA, 201 bp, Homo sapiens
ttcagggcaattgtcagtctttttagagaaggggccagggtggaacaatcccagtgagtaaattatttctcagcgtggacttctctgcatgtcgggcttarggtcaccagccgggcagggtggaaggagcttgcctctttgagaaaccaaggagtcccagtgatctgttaccatttggttatgacttctaaagagccaaat

SEQ ID NO: 15804 - DNA, 201 bp, Homo sapiens
gctgtcaattatatgtacatgggaaaaaacactggaaaaattgtagttgaattacctcactctgtcaacagtaagctgtaaaaacagaacaatgacataartcaagggagaaagaaaatgggcactttatgtctcagaattactcaaatcaatttatttttagttggtaatggatataatatttcttaaaacaaaagtaag

SEQ ID NO: 15805 - DNA, 201 bp, Homo sapiens
ccagccaaactgctcaagaaatctgccagcgtacagggcttcttcctgaaccattacctttctaagtatcaagcagccatgagccacttgctcgagatgtktgtgagcggagacctggtttgtgaggtggaccttggagatctgtctccagagggcaggtttactggcctggagtccatattccgtgctgtcaattatatg

SEQ ID NO: 15806 - DNA, 201 bp, Homo sapiens
tatagcaaagggttactggtgcaggggactaggaaaaacccgtccagtgtggtgcttagttattcatccatccctttcagacctaacagccacagccacayggaaagagactttgcctcacttttacattcacaaacaaacaaaggaggggggagcaggttttatgaatgtaactgtgcacaggaaatgactggtaatgga

SEQ ID NO: 15807 - DNA, 201 bp, Homo sapiens
gagaaaccaaggagtcccagtgatctgttaccatttggttatgacttctaaagagccaaatgctattccttcaagcctgttttgcaggcagaaaataccakcagtgtcatttaggggttcctttgatgatgactactgctgttaactgacctcagcattaaaaaaaaaaaaattcagggaatagtttgcaaagaaatgaag

SEQ ID NO: 15808 - DNA, 201 bp, Homo sapiens
tcggtgtatctaacctgctcagtaaatatggacgcaattaaagatgctctaggaaatttggggactgtatttaatttttctttccttccatctgaggagcraggaaatcctactgctgaatagctgttagtatctattttacaagatttactcattttcaggtacctaatgtagctgctagcatgcatgcacaacaataca

SEQ ID NO: 15809 - DNA, 201 bp, Homo sapiens
agtgcagtgacaagtagctgcttcttattaaaatgaaaatcctgcattatgtacttgaggaacattccagctaatgaggatgtaatgtcctcagtacaacrcagaccttctttttgtgttcaccaccacaagatgctggaagcttgacaaatgatatcatttaagacacatgcctgccttagggacctggtttttggcttc

SEQ ID NO: 15810 - DNA, 116 bp, Homo sapiens
atttgttggtgttaaygcatctgacatcaactattcagcaggccgctatgacccctcagttaagcctccctttgacataggtttcgaaggcattggggaggtggtggccctaggcc

SEQ ID NO: 15811 - DNA, 117 bp, Homo sapiens
tttatcatcaatacagttggtgtggtcactttaaactggattaccaatatggttggtgtggtcgctttaaagtttgttttcattttttttctatttttaawtcttacgggtatatag

SEQ ID NO: 15812 - DNA, 201 bp, Homo sapiens
tagtaatgcacagctttcagaataaaaacaatgataaaaaagaccaagcactatcaactttggacagtaatttcctaggtgttaaacaagttttctgaatrcaatctggatgcaaaacggcctgatttgatgaattcataattttcttctgtatactttcattttattaaatattttattacttggttaaacacaagaatt

SEQ ID NO: 15813 - DNA, 201 bp, Homo sapiens; identical to SEQ ID NO: 15797

SEQ ID NO: 15814 - DNA, 201 bp, Homo sapiens; identical to SEQ ID NO: 15798

SEQ ID NO: 15815 - DNA, 201 bp, Homo sapiens; identical to SEQ ID NO: 15799

SEQ ID NO: 15816 - DNA, 201 bp, Homo sapiens; identical to SEQ ID NO: 15800

SEQ ID NO: 15817 - DNA, 175 bp, Homo sapiens
tccccgccctgcccggggtccccggtcgtgccccgccgcccgggccgcgctcggggttgattcgtaccaccttgsaaggaagtgaacgcttcgcacgggaaggggaggcgcctgcgccggccgccgcgcagctccggggacgcccggggctgccgccggctcggggccgcagacg

SEQ ID NO: 15818 - DNA, 201 bp, Homo sapiens; identical to SEQ ID NO: 15801

SEQ ID NO: 15819 - DNA, 201 bp, Homo sapiens; identical to SEQ ID NO: 15802

SEQ ID NO: 15820 - DNA, 201 bp, Homo sapiens; identical to SEQ ID NO: 15803

SEQ ID NO: 15821 - DNA, 201 bp, Homo sapiens; identical to SEQ ID NO: 15804

SEQ ID NO: 15822 - DNA, 201 bp, Homo sapiens; identical to SEQ ID NO: 15805

SEQ ID NO: 15823 - DNA, 201 bp, Homo sapiens; identical to SEQ ID NO: 15806

SEQ ID NO: 15824 - DNA, 201 bp, Homo sapiens; identical to SEQ ID NO: 15807

SEQ ID NO: 15825 - DNA, 201 bp, Homo sapiens; identical to SEQ ID NO: 15808

SEQ ID NO: 15826 - DNA, 201 bp, Homo sapiens; identical to SEQ ID NO: 15809

SEQ ID NO: 15827 - DNA, 201 bp, Homo sapiens
gccccaacttccgcgaggccgtcaccctgagccgggactgcccggtgccgctccccggggacggagacctcctcgtccggaaccgatttgttggtgttaaygcatctgacatcaactattcagcaggccgctatgacccctcagttaagcctccctttgacataggtttcgaaggcattggggaggtggtggccctaggcc

SEQ ID NO: 15828 - DNA, 117 bp, Homo sapiens; identical to SEQ ID NO: 15811

SEQ ID NO: 15829 - DNA, 201 bp, Homo sapiens; identical to SEQ ID NO: 15812

SEQ ID NO: 15830 - DNA, 201 bp, Homo sapiens
taaaagaagggggtatgcaccccctagtttgccaagattgagaaatagcctcttcactggtatgcaaacagatttgattttgcatcctatcatttaaaaaraaattatgtctgcaccccaacataggcatacttaagtaatatacatactcctgtgctaacatgtatactagaaaacaaaaagatgttagaaaaataaaag

SEQ ID NO: 15831 - DNA, 201 bp, Homo sapiens
tgtttcgcattaagagggcactggacctgaacttgaagcatcagatcttgcctaaagagcagtggaccaaatatgaagaggaaaatttctaccttgaaccrtatctgaaagaggttattcgggaaagaaaagaaagagaagaatgggcaaagaagtaatcatgtagttgaagtctgtggatgcagctgttatgaagatggt

SEQ ID NO: 15832 - DNA, 201 bp, Homo sapiens
gatacaatatacgaggatgaagatgtaaaagaagccataagaagacttcctgagaacctttataatgacaggatgtttcgcattaagagggcactggaccygaacttgaagcatcagatcttgcctaaagagcagtggaccaaatatgaagaggaaaatttctaccttgaaccgtatctgaaagaggttattcgggaaaga

SEQ ID NO: 15833 - DNA, 201 bp, Homo sapiens
tttctggtcaaaatggctggtaagcaggccgtttcagcatcaggcaagtggctggatggtattcgaaaatggtattacaatgctgcaggattcaataaacyggggttaatgcgagatgatacaatatacgaggatgaagatgtaaaagaagccataagaagacttcctgagaacctttataatgacaggatgtttcgcatt

SEQ ID NO: 15834 - DNA, 201 bp, Homo sapiens
cagcgtggaggagctggggtcgctgtgggtcgcgaagcagagcccgggacgtgcgcgcttggtgcacgatcctgaaggggagctccgaggggcccgggtckccagggctgctgcggccattcccggagcccggcgcggggcccgcgagatactggtttaggccgtcccagggctccgggcgcacccggtggccgctgctgc

SEQ ID NO: 15835 - DNA, 201 bp, Homo sapiens
cctgggggcgtggctctctgctccggtgcaggcccgcagggcgccctgggctgggagcaacgcgactgaccgtggtcgtgggcggacggcggctgcagcgyggaggagctggggtcgctgtgggtcgcgaagcagagcccgggacgtgcgcgcttggtgcacgatcctgaaggggagctccgaggggcccgggtcgccagg

SEQ ID NO: 15836 - DNA, 201 bp, Homo sapiens
ccggaagtcttcctcgggcagcaggtgggaagtgggagccggagcggcagctggcagcgttctctccgcaggtcggcaccatgcgccctgcagccctgcgyggggccctgctgggctgcctctgcctggcgttgctttgcctgggcggtgcggacaagcgcctgcgtgacaaccatgagtggaaaaaactaattatggttc

SEQ ID NO: 15837 - DNA, 201 bp, Homo sapiens
agtgccttccaccaagccaggatgaggaagtacagacaattggtcagatagaactgtgcctcactaagcaagaccagcagctgcaaaactgcaccgagccrggggagcagccgtcccccaagcaggaagtctggctggcaaatggggccgccgagagccggggtctgagagtctgtgaagatggcccagtcttctatcccc

SEQ ID NO: 15838 - DNA, 201 bp, Homo sapiens
ttctcccggaagtcttcctcgggcagcaggtgggaagtgggagccggagcggcagctggcagcgttctctccgcaggtcggcaccatgcgccctgcagccytgcgcggggccctgctgggctgcctctgcctggcgttgctttgcctgggcggtgcggacaagcgcctgcgtgacaaccatgagtggaaaaaactaattat

SEQ ID NO: 15839 - DNA, 201 bp, Homo sapiens
agccaggatgaggaagtacagacaattggtcagatagaactgtgcctcactaagcaagaccagcagctgcaaaactgcaccgagccgggggagcagccgtmccccaagcaggaagtctggctggcaaatggggccgccgagagccggggtctgagagtctgtgaagatggcccagtcttctatcccccacctaaaaagacc

SEQ ID NO: 15840 - DNA, 113 bp, Homo sapiens
cctgacacgccckcaaggcccgcggagctgctcctgcctcggcctctctgagccaaccacggggcggggcgtgaacgccgggcggggacgtgccgttctggggggcgtgtcca

SEQ ID NO: 15841 - DNA, 201 bp, Homo sapiens
tggaactctacagggagctggacctcaacagtgtgcttctaaaattggggataaaaccatccatcaattactaccaagttgcagattttaaagatgccctygccagagtatatggagtgatacccaaaatccagtgccttccaccaagccaggatgaggaagtacagacaattggtcagatagaactgtgcctcactaagc

SEQ ID NO: 15842 - DNA, 201 bp, Homo sapiens
cctcactaagcaagaccagcagctgcaaaactgcaccgagccgggggagcagccgtcccccaagcaggaagtctggctggcaaatggggccgccgagagcyggggtctgagagtctgtgaagatggcccagtcttctatcccccacctaaaaagaccaagcattgatgcccaagttttggaaatattctgttttaaaaagc

SEQ ID NO: 15843 - DNA, 201 bp, Homo sapiens
gcttctggaagcatgagtgggaaaagcatgggacctgcgccgcccaggtggatgcgctcaactcccagaagaagtactttggcagaagcctggaactctayagggagctggacctcaacagtgtgcttctaaaattggggataaaaccatccatcaattactaccaagttgcagattttaaagatgcccttgccagagtat

SEQ ID NO: 15844 - DNA, 201 bp, Homo sapiens; identical to SEQ ID NO: 15834

SEQ ID NO: 15845 - DNA, 201 bp, Homo sapiens; identical to SEQ ID NO: 15835

SEQ ID NO: 15846 - DNA, 201 bp, Homo sapiens; identical to SEQ ID NO: 15837

SEQ ID NO: 15847 - DNA, 201 bp, Homo sapiens
ccggaagtcttcctcgggcagcaggtgggaagtgggagccggagcggcagctggcagcgttctctccgcaggtcggcaccatgcgccctgcagccctgcgyggggccctgctgggctgcctctgcctggcgttgctttgcctgggcggtgcggacaagcgcctgcgactgctcccagcctaggacgcgacaaagcaggtgg

SEQ ID NO: 15848 - DNA, 201 bp, Homo sapiens; identical to SEQ ID NO: 15839

SEQ ID NO: 15849 - DNA, 201 bp, Homo sapiens
ttctcccggaagtcttcctcgggcagcaggtgggaagtgggagccggagcggcagctggcagcgttctctccgcaggtcggcaccatgcgccctgcagccytgcgcggggccctgctgggctgcctctgcctggcgttgctttgcctgggcggtgcggacaagcgcctgcgactgctcccagcctaggacgcgacaaagca

SEQ ID NO: 15850 - DNA, 113 bp, Homo sapiens; identical to SEQ ID NO: 15840

SEQ ID NO: 15851 - DNA, 201 bp, Homo sapiens; identical to SEQ ID NO: 15841

SEQ ID NO: 15852 - DNA, 201 bp, Homo sapiens; identical to SEQ ID NO: 15842

SEQ ID NO: 15853 - DNA, 201 bp, Homo sapiens; identical to SEQ ID NO: 15843

SEQ ID NO: 15854 - DNA, 201 bp, Homo sapiens; identical to SEQ ID NO: 15841

SEQ ID NO: 15855 - DNA, 201 bp, Homo sapiens; identical to SEQ ID NO: 15842

SEQ ID NO: 15856 - DNA, 189 bp, Homo sapiens
ttggtgctcccagcacctagcaccgggagactggagaggtttccaggagagtgacccgagtcggcaccatgcgccctgcagccctgcgyggggccctgctgggctgcctctgcctggcgttgctttgcctgggcggtgcggacaagcgcctgcgtgacaaccatgagtggaaaaaactaattatggttc

SEQ ID NO: 15857 - DNA, 201 bp, Homo sapiens; identical to SEQ ID NO: 15837

SEQ ID NO: 15858 - DNA, 184 bp, Homo sapiens
ttggtgctcccagcacctagcaccgggagactggagaggtttccaggagagtgacccgagtcggcaccatgcgccctgcagccytgcgcggggccctgctgggctgcctctgcctggcgttgctttgcctgggcggtgcggacaagcgcctgcgtgacaaccatgagtggaaaaaactaattat

SEQ ID NO: 15859 - DNA, 201 bp, Homo sapiens; identical to SEQ ID NO: 15839

SEQ ID NO: 15860 - DNA, 201 bp, Homo sapiens; identical to SEQ ID NO: 15843

SEQ ID NO: 15861 - DNA, 201 bp, Homo sapiens; identical to SEQ ID NO: 15834

SEQ ID NO: 15862 - DNA, 201 bp, Homo sapiens; identical to SEQ ID NO: 15835

SEQ ID NO: 15863 - DNA, 201 bp, Homo sapiens; identical to SEQ ID NO: 15836

SEQ ID NO: 15864 - DNA, 201 bp, Homo sapiens
agtgggtgcagagtattgggatgcccatctgggcaccatctcatcatcagagtcggccatagggaaaacgaggactccaaccagcatgtgccgttctcagscatgattcctgataaaggatagtgcattaataagtcgtttccttagaaagacggaaactctggaagtctgtaggtctttgccgcagaactcctggaacaa

SEQ ID NO: 15865 - DNA, 201 bp, Homo sapiens; identical to SEQ ID NO: 15838

SEQ ID NO: 15866 - DNA, 113 bp, Homo sapiens; identical to SEQ ID NO: 15840

SEQ ID NO: 15867 - DNA, 201 bp, Homo sapiens
ctacagggagctggacctcaacaggtgggtgcgcccttcccccggctgcacttcccagtggggatctctgctgtcgcccaagcctgacagctggatccagkggagtgggtgtagacctcactgccctccagcagcttctgcatgtgcactattcggctactgggatcattcctgaggaatgttctgagcctaccaagcctt

SEQ ID NO: 15868 - DNA, 201 bp, Homo sapiens
ccagatcattctacatcacgatcacacagagtgggtgcagagtattgggatgcccatctgggcaccatctcatcatcagagtcggccatagggaaaacgakgactccaaccagcatgtgccgttctcagccatgattcctgataaaggatagtgcattaataagtcgtttccttagaaagacggaaactctggaagtctgt

SEQ ID NO: 15869 - DNA, 201 bp, Homo sapiens
agacagttcactcccttccccctcaacatgggacctgcgccgcccaggtggatgcgctcaactcccagaagaagtactttggcagaagcctggaactctayagggagctggacctcaacaggtgggtgcgcccttcccccggctgcacttcccagtggggatctctgctgtcgcccaagcctgacagctggatccagggga

SEQ ID NO: 15870 - DNA, 201 bp, Homo sapiens; identical to SEQ ID NO: 15834

SEQ ID NO: 15871 - DNA, 201 bp, Homo sapiens; identical to SEQ ID NO: 15835

SEQ ID NO: 15872 - DNA, 201 bp, Homo sapiens; identical to SEQ ID NO: 15837

SEQ ID NO: 15873 - DNA, 201 bp, Homo sapiens; identical to SEQ ID NO: 15836

SEQ ID NO: 15874 - DNA, 201 bp, Homo sapiens; identical to SEQ ID NO: 15839

SEQ ID NO: 15875 - DNA, 201 bp, Homo sapiens; identical to SEQ ID NO: 15838

SEQ ID NO: 15876 - DNA, 113 bp, Homo sapiens; identical to SEQ ID NO: 15840

SEQ ID NO: 15877 - DNA, 201 bp, Homo sapiens; identical to SEQ ID NO: 15841

SEQ ID NO: 15878 - DNA, 201 bp, Homo sapiens; identical to SEQ ID NO: 15842

SEQ ID NO: 15879 - DNA, 201 bp, Homo sapiens; identical to SEQ ID NO: 15843

SEQ ID NO: 15880 - DNA, 201 bp, Homo sapiens
gaatccgatttcaattgctgtcttttaaagcaggtgtggcaaacgggtggtgatgtgtgtgccagctccactcggtggtggccccagcgctcccatgctcygaaggagtcaggaactggaaagggtacctgcctggagcagtttgtgtgtgtgctaaggggtggggaaggcggggactgggaaccatgtatttgcagtcca

SEQ ID NO: 15881 - DNA, 201 bp, Homo sapiens
ttccaggagagtgacccgagtaggtcccctcctaattctggagccgtccctcgggctgcgcagtggagcgccgaggtggcgggaggctgcggggagcctgsgcggccaagcaccatctgcagtcaggagctcccgggcagcttgcagggcgcagtttttgaaagcgggtgctgcgtgcggaccgcgggcctgcagggatct

SEQ ID NO: 15882 - DNA, 201 bp, Homo sapiens
agcgccgaggtggcgggaggctgcggggagcctgggcggccaagcaccatctgcagtcaggagctcccgggcagcttgcagggcgcagtttttgaaagcgrgtgctgcgtgcggaccgcgggcctgcagggatcttttgccagaaatgagggcatactggcctgacgtaattcactcgtttcccaatcgcagccgcttctg

SEQ ID NO: 15883 - DNA, 201 bp, Homo sapiens
gtgtgtgccagctccactcggtggtggccccagcgctcccatgctccgaaggagtcaggaactggaaagggtacctgcctggagcagtttgtgtgtgtgcyaaggggtggggaaggcggggactgggaaccatgtatttgcagtccatgttgacacatttgttgcataaagtcatagaaaacactttcctttaagagtgtc

SEQ ID NO: 15884 - DNA, 201 bp, Homo sapiens
aaagcaggtgtggcaaacgggtggtgatgtgtgtgccagctccactcggtggtggccccagcgctcccatgctccgaaggagtcaggaactggaaagggtrcctgcctggagcagtttgtgtgtgtgctaaggggtggggaaggcggggactgggaaccatgtatttgcagtccatgttgacacatttgttgcataaagtc

SEQ ID NO: 15885 - DNA, 201 bp, Homo sapiens
ccagatcattctacatcacgatcacacagagtgggtgcagagtattgggatgcccatctgggcaccatctcatcatcagagtcggccatagggaaaacgakgactccaaccagcatgtgccgaactctgtggccaagacagtctgacaataagttattgcccacagaggatgtctaagtctttgtgtccactctgtgatcg

SEQ ID NO: 15886 - DNA, 201 bp, Homo sapiens; identical to SEQ ID NO: 15867

SEQ ID NO: 15887 - DNA, 201 bp, Homo sapiens
aggctgcttagaccagtgatttggaagcacagatttcatggctccctttgtgagaagtgtgtgctccagggtccggcagagcaggtggaatctgcagtttsaagagtcacattcacttttataacgtagtcttatatttgtttgtggtttgttttcatgataaaattgtgatttgttttatgataaaagaaactatagata

SEQ ID NO: 15888 - DNA, 201 bp, Homo sapiens
aagcctggaatccgatttcaattgctgtcttttaaagcaggtgtggcaaacgggtggtgatgtgtgtgccagctccactcggtggtggccccagcgctccyatgctccgaaggagtcaggaactggaaagggtacctgcctggagcagtttgtgtgtgtgctaaggggtggggaaggcggggactgggaaccatgtatttg

SEQ ID NO: 15889 - DNA, 201 bp, Homo sapiens
gcttctggaagcatgagtgggaaaagcatgggacctgcgccgcccaggtggatgcgctcaactcccagaagaagtactttggcagaagcctggaactctayagggagctggacctcaacaggtgggtgcgcccttcccccggctgcacttcccagtggggatctctgctgtcgcccaagcctgacagctggatccagggga

SEQ ID NO: 15890 - DNA, 201 bp, Homo sapiens
catgttgacacatttgttgcataaagtcatagaaaacactttcctttaagagtgtcttaatttttaccatgaaatatgatacctgaaaagaacaagaaagsaaagtggaccttcattatacagctaacttttttaaatttaaattttagtgtgcttctaaaattggggataaaaccatccatcaattactaccaagtaagt

SEQ ID NO: 15891 - DNA, 201 bp, Homo sapiens
gtccactctgtgatcgtgatctagaattttctaccaaggcttgatggggaactaggatattcttctgcaatgattcagaattttacagtgtacctttatamtttaataagtgaattctatatatggtagtttggtaggattctgtgtagaagtgctttaggaggtgattgaaagctgtagggacttaccatacggttatgt

SEQ ID NO: 15892 - DNA, 201 bp, Homo sapiens; identical to SEQ ID NO: 15834

SEQ ID NO: 15893 - DNA, 201 bp, Homo sapiens; identical to SEQ ID NO: 15835

SEQ ID NO: 15894 - DNA, 201 bp, Homo sapiens; identical to SEQ ID NO: 15836

SEQ ID NO: 15895 - DNA, 201 bp, Homo sapiens; identical to SEQ ID NO: 15887

SEQ ID NO: 15896 - DNA, 201 bp, Homo sapiens; identical to SEQ ID NO: 15838

SEQ ID NO: 15897 - DNA, 201 bp, Homo sapiens
gcttctggaagcatgagtgggaaaagcatgggacctgcgccgcccaggtggatgcgctcaactcccagaagaagtactttggcagaagcctggaactctayagggagctggacctcaacagtgtgcttctaaaattggggataaaaccatccatcaattactaccaagagctgaaggctgcttagaccagtgatttggaag

SEQ ID NO: 15898 - DNA, 113 bp, Homo sapiens; identical to SEQ ID NO: 15840

SEQ ID NO: 15899 - DNA, 201 bp, Homo sapiens; identical to SEQ ID NO: 15834

SEQ ID NO: 15900 - DNA, 201 bp, Homo sapiens; identical to SEQ ID NO: 15835

SEQ ID NO: 15901 - DNA, 201 bp, Homo sapiens; identical to SEQ ID NO: 15837

SEQ ID NO: 15902 - DNA, 201 bp, Homo sapiens; identical to SEQ ID NO: 15847

SEQ ID NO: 15903 - DNA, 201 bp, Homo sapiens; identical to SEQ ID NO: 15839

SEQ ID NO: 15904 - DNA, 201 bp, Homo sapiens; identical to SEQ ID NO: 15849

SEQ ID NO: 15905 - DNA, 113 bp, Homo sapiens; identical to SEQ ID NO: 15840

SEQ ID NO: 15906 - DNA, 201 bp, Homo sapiens; identical to SEQ ID NO: 15841

SEQ ID NO: 15907 - DNA, 201 bp, Homo sapiens; identical to SEQ ID NO: 15842

SEQ ID NO: 15908 - DNA, 201 bp, Homo sapiens; identical to SEQ ID NO: 15843

SEQ ID NO: 15909 - DNA, 199 bp, Homo sapiens
ccaggagagtgacccgagtaggtcccctcctaattctggagccgtccctcgggctgcgcagtggagcgccgaggtggcgggaggctgcggggagcctgsgcggccaagcaccatctgcagtcaggagctcccgggcagcttgcagggcgcagtttttgaaagcgggtgctgcgtgcggaccgcgggcctgcagggtcgg

SEQ ID NO: 15910 - DNA, 201 bp, Homo sapiens
agcgccgaggtggcgggaggctgcggggagcctgggcggccaagcaccatctgcagtcaggagctcccgggcagcttgcagggcgcagtttttgaaagcgrgtgctgcgtgcggaccgcgggcctgcagggtcggcaccatgcgccctgcagccctgcgcggggccctgctgggctgcctctgcctggcgttgctttgcct

SEQ ID NO: 15911 - DNA, 201 bp, Homo sapiens
ggagctcccgggcagcttgcagggcgcagtttttgaaagcgggtgctgcgtgcggaccgcgggcctgcagggtcggcaccatgcgccctgcagccctgcgyggggccctgctgggctgcctctgcctggcgttgctttgcctgggcggtgcggacaagcgcctgcgtgacaaccatgagtggaaaaaactaattatggttc

SEQ ID NO: 15912 - DNA, 201 bp, Homo sapiens; identical to SEQ ID NO: 15837

SEQ ID NO: 15913 - DNA, 201 bp, Homo sapiens
agtcaggagctcccgggcagcttgcagggcgcagtttttgaaagcgggtgctgcgtgcggaccgcgggcctgcagggtcggcaccatgcgccctgcagccytgcgcggggccctgctgggctgcctctgcctggcgttgctttgcctgggcggtgcggacaagcgcctgcgtgacaaccatgagtggaaaaaactaattat

SEQ ID NO: 15914 - DNA, 201 bp, Homo sapiens; identical to SEQ ID NO: 15839

SEQ ID NO: 15915 - DNA, 201 bp, Homo sapiens; identical to SEQ ID NO: 15841

SEQ ID NO: 15916 - DNA, 201 bp, Homo sapiens; identical to SEQ ID NO: 15842

SEQ ID NO: 15917 - DNA, 201 bp, Homo sapiens; identical to SEQ ID NO: 15843

SEQ ID NO: 15918 - DNA, 201 bp, Homo sapiens
caatgaaatctgtaacctcagcacactcacatgctgcgcacaggagcgaccaagggaagaaagcccattcatgacttagagtcctgccgtggctcaggtgkatctaaaactcaagaacaaattctatttatttattattggaaaatgaaaagcaactcaaaacaacttcaacgtggaggtgcatttataattcagtctgca

SEQ ID NO: 15919 - DNA, 201 bp, Homo sapiens
gatagcatacacgctggtgggccaatgaaatctgtaacctcagcacactcacatgctgcgcacaggagcgaccaagggaagaaagcccattcatgacttaragtcctgccgtggctcaggtggatctaaaactcaagaacaaattctatttatttattattggaaaatgaaaagcaactcaaaacaacttcaacgtggagg

SEQ ID NO: 15920 - DNA, 201 bp, Homo sapiens
cgaggtctggaccgaattaatgagcgaatgccaccccgaaaggatagcatacacgctggtgggccaatgaaatctgtaacctcagcacactcacatgctgygcacaggagcgaccaagggaagaaagcccattcatgacttagagtcctgccgtggctcaggtggatctaaaactcaagaacaaattctatttatttatta

SEQ ID NO: 15921 - DNA, 201 bp, Homo sapiens
gacttagagtcctgccgtggctcaggtggatctaaaactcaagaacaaattctatttatttattattggaaaatgaaaagcaactcaaaacaacttcaacstggaggtgcatttataattcagtctgcatttattctgtaaaaaggtggctgttttataaattcttttaatttatgttcaatatatataaaaagtgcatct

SEQ ID NO: 15922 - DNA, 201 bp, Homo sapiens
attctatttatttattattggaaaatgaaaagcaactcaaaacaacttcaacgtggaggtgcatttataattcagtctgcatttattctgtaaaaaggtgrctgttttataaattcttttaatttatgttcaatatatataaaaagtgcatctgttttgtttttcccttttttctccataattttaagaaatgaatctgat

SEQ ID NO: 15923 - DNA, 201 bp, Homo sapiens
ccgtcccggtcgccacccttagcagcggtcgcggtcggtgccgaagcggtgttccccgccttagccgctggcgcctcccaagagagcggccggtgggccckcgtcctgtcagtggcgtcggaggccggcgctgcggtggccgcgcccttctggtgctcggacaccgctgaggagccggggccgggcacggctggctgacgg

SEQ ID NO: 15924 - DNA, 201 bp, Homo sapiens
gccgggtccgctaggacagcggggccgctgggaagttgtgagagcggcgctcgggggcgcgcttgcgtgcacgagggcccgggccgcgagcagccgcggcygtcccggtcgccacccttagcagcggtcgcggtcggtgccgaagcggtgttccccgccttagccgctggcgcctcccaagagagcggccggtgggccctc

SEQ ID NO: 15925 - DNA, 201 bp, Homo sapiens
ggaagttgtgagagcggcgctcgggggcgcgcttgcgtgcacgagggcccgggccgcgagcagccgcggccgtcccggtcgccacccttagcagcggtcgmggtcggtgccgaagcggtgttccccgccttagccgctggcgcctcccaagagagcggccggtgggccctcgtcctgtcagtggcgtcggaggccggcgct

SEQ ID NO: 15926 - DNA, 201 bp, Homo sapiens; identical to SEQ ID NO: 15918

SEQ ID NO: 15927 - DNA, 201 bp, Homo sapiens; identical to SEQ ID NO: 15919

SEQ ID NO: 15928 - DNA, 201 bp, Homo sapiens; identical to SEQ ID NO: 15920

SEQ ID NO: 15929 - DNA, 201 bp, Homo sapiens; identical to SEQ ID NO: 15921

SEQ ID NO: 15930 - DNA, 201 bp, Homo sapiens; identical to SEQ ID NO: 15922

SEQ ID NO: 15931 - DNA, 201 bp, Homo sapiens; identical to SEQ ID NO: 15923

SEQ ID NO: 15932 - DNA, 201 bp, Homo sapiens; identical to SEQ ID NO: 15924

SEQ ID NO: 15933 - DNA, 201 bp, Homo sapiens; identical to SEQ ID NO: 15925

SEQ ID NO: 15934 - DNA, 201 bp, Homo sapiens
gcatctcccttcgcttccctcggtttattcgagtccgtgaagacaagcagccggagcaggccaccaccagtgctcaggtggcctgtttgtaccggaagcaragtcagattcagaaccaacaaggcgaggactcaggctctgaccctgaagatacctactaagccctcgccctcctagggcctgggtacagggcatgagttg

SEQ ID NO: 15935 - DNA, 201 bp, Homo sapiens
gcggatctgagtgtgttgcccgggcagcggcgcgcgggaccaacgcaaggcaacagctgacagacgaagaaaagtgctggacaggaagggagaattctgaygccaacatgcagcgaagtatcatgtcatttttccaccccaagaaagagggtaaagcaaagaagcctgagaaggaggcatccaatagcagcagagagacgg

SEQ ID NO: 15936 - DNA, 155 bp, Homo sapiens
cagggttattattgcctttgctttttagcaaatctgctgtggcaggctgtggattttgagagtcaggggaggggtgtgtgtgtgagggggtggcttactcyggagtctgggattcatcccgtcatttctttcaataaataattatcggatagcta

SEQ ID NO: 15937 - DNA, 201 bp, Homo sapiens
ggggcctggtggatagtgacaagggcatctcccttcgcttccctcggtttattcgagtccgtgaagacaagcagccggagcaggccaccaccagtgctcakgtggcctgtttgtaccggaagcaaagtcagattcagaaccaacaaggcgaggactcaggctctgaccctgaagatacctactaagccctcgccctcctag

SEQ ID NO: 15938 - DNA, 201 bp, Homo sapiens
gactgctcacaggtctccccgccccgtcctgccacatctcctgagaacaatgcttccctctctgacacctctcccatggacagttccccatcagggattcygaagcgtcgcacagctcggaagcagctcccgaaacggaccattcaggaagtcctggaagagcagagtgaggacgaggacagagaagccaagaggaagaag

SEQ ID NO: 15939 - DNA, 201 bp, Homo sapiens
ggaagcgggccggccggtacgggggcttcctgctggcctcctacgacgaggacagtgaggagctgcaggccatatgcaagcttggaactggcttcagtgaygaggagctggaggagcatcaccagagcctcaaggccctggtgctgcccagcccacgcccttacgtgcggatagatggcgctgtgattcccgaccactggc

SEQ ID NO: 15940 - DNA, 201 bp, Homo sapiens
cctcctacgacgaggacagtgaggagctgcaggccatatgcaagcttggaactggcttcagtgacgaggagctggaggagcatcaccagagcctcaaggcsctggtgctgcccagcccacgcccttacgtgcggatagatggcgctgtgattcccgaccactggctggaccccagcgctgtgtgggaggtgaagtgcgctg

SEQ ID NO: 15941 - DNA, 201 bp, Homo sapiens
tgatcctgaagcagacgttctgcgaggttcccgacctggaccgaattatccccgtgctgctggagcacggcctggaacgtctcccggagcactgcaagctsagcccagggattcccctgaaaccaatgttggcccatcccacccggggcatcagcgaggtcctgaaacgctttgaggaggcagctttcacctgcgaataca

SEQ ID NO: 15942 - DNA, 110 bp, Homo sapiens
gctgtggattttgagagtcaggggaggggtgtgtgtgtgagggggtggcttactccggagtctgggattcatcccgtcatttctttcaataaataattatyggatagcta

SEQ ID NO: 15943 - DNA, 201 bp, Homo sapiens
gagatcgcacaactggctcaagctgaagaaggactaccttgatggcgtgggtgacaccctggacctggtggtgatcggcgcctacctgggccgggggaagygggccggccggtacgggggcttcctgctggcctcctacgacgaggacagtgaggagctgcaggccatatgcaagcttggaactggcttcagtgacgagga

SEQ ID NO: 15944 - DNA, 201 bp, Homo sapiens
tggaagagcagagtgaggacgaggacagagaagccaagaggaagaaggaggaggaagaagaggagaccccgaaagaaagcctcacagaggctgaagtggcmacagagaaggaaggagaagacggggaccagcccaccacgcctcccaagcccctaaagacctccaaagcagagaccccgacggaaagcgtttcagagcctg

SEQ ID NO: 15945 - DNA, 201 bp, Homo sapiens
attaaactcccatcggtcacatccttcatcctggacaccgaagccgtggcttgggaccgggaaaagaagcagatccagccattccaagtgctcaccaccckcaaacgcaaggaggtggatgcgtctgagatccaggtgcaggtgtgtttgtacgccttcgacctcatctacctcaatggagagtccctggtacgtgagccc

SEQ ID NO: 15946 - DNA, 201 bp, Homo sapiens
tctctcccatctaccctgctgcgcggggcctggtggatagtgacaagggcatctcccttcgcttccctcggtttattcgagtccgtgaagacaagcagccrgagcaggccaccaccagtgctcaggtggcctgtttgtaccggaagcaaagtcagattcagaaccaacaaggcgaggactcaggctctgaccctgaagata

SEQ ID NO: 15947 - DNA, 201 bp, Homo sapiens
caaccaccttgggccaccccagcagggcctggagcttggcgtgggtgatggtgtccttctcaaggcagtggcccaggccacaggtcggcagctggagtccrtccgggctgaggcagccgagaaaggcgacgtggggctggtggccgagaacagccgcagcacccagaggctcatgctgccaccacctccgctcactgcctc

SEQ ID NO: 15948 - DNA, 201 bp, Homo sapiens
actggctcaagctgaagaaggactaccttgatggcgtgggtgacaccctggacctggtggtgatcggcgcctacctgggccgggggaagcgggccggccgrtacgggggcttcctgctggcctcctacgacgaggacagtgaggagctgcaggccatatgcaagcttggaactggcttcagtgacgaggagctggaggagc

SEQ ID NO: 15949 - DNA, 201 bp, Homo sapiens
ttgatgccacctacgagatcgccaagagatcgcacaactggctcaagctgaagaaggactaccttgatggcgtgggtgacaccctggacctggtggtgatyggcgcctacctgggccgggggaagcgggccggccggtacgggggcttcctgctggcctcctacgacgaggacagtgaggagctgcaggccatatgcaagc

SEQ ID NO: 15950 - DNA, 201 bp, Homo sapiens; identical to SEQ ID NO: 15934

SEQ ID NO: 15951 - DNA, 201 bp, Homo sapiens
gcggatctgagtgtgttgcccgggcagcggcgcgcgggaccaacgcaaggcaacagctgacagacgaagaaaagtgctggacaggaagggagaattctgaygccaacatgcagcgaagtatcatggcggcactgaaggagtggaatggagtggtgtccgagagtgactctccggtgaagaggccagggaggaaggcggccc

SEQ ID NO: 15952 - DNA, 155 bp, Homo sapiens; identical to SEQ ID NO: 15936

SEQ ID NO: 15953 - DNA, 201 bp, Homo sapiens; identical to SEQ ID NO: 15937

SEQ ID NO: 15954 - DNA, 201 bp, Homo sapiens; identical to SEQ ID NO: 15938

SEQ ID NO: 15955 - DNA, 201 bp, Homo sapiens; identical to SEQ ID NO: 15939

SEQ ID NO: 15956 - DNA, 201 bp, Homo sapiens; identical to SEQ ID NO: 15940

SEQ ID NO: 15957 - DNA, 201 bp, Homo sapiens; identical to SEQ ID NO: 15941

SEQ ID NO: 15958 - DNA, 110 bp, Homo sapiens; identical to SEQ ID NO: 15942

SEQ ID NO: 15959 - DNA, 201 bp, Homo sapiens; identical to SEQ ID NO: 15943

SEQ ID NO: 15960 - DNA, 201 bp, Homo sapiens; identical to SEQ ID NO: 15944

SEQ ID NO: 15961 - DNA, 201 bp, Homo sapiens; identical to SEQ ID NO: 15945

SEQ ID NO: 15962 - DNA, 201 bp, Homo sapiens; identical to SEQ ID NO: 15946

SEQ ID NO: 15963 - DNA, 201 bp, Homo sapiens; identical to SEQ ID NO: 15947

SEQ ID NO: 15964 - DNA, 201 bp, Homo sapiens; identical to SEQ ID NO: 15948

SEQ ID NO: 15965 - DNA, 201 bp, Homo sapiens; identical to SEQ ID NO: 15949

SEQ ID NO: 15966 - DNA, 201 bp, Homo sapiens
aatcttcctacatgcaagacagtgctatagattcttcttccaaggatcaccactggtcacgtggtaccctgaggcacatctcggagaactcctttgggccrtctgggggcctgcgggaaggaagcctgagttctcaagattccaggactgagagtgccagcttgtctcaaagccaggtcaatggtttctttgccagccatt

SEQ ID NO: 15967 - DNA, 201 bp, Homo sapiens
tgtgctaccggaaattgatactgcgcttttgaccccacttcagtctccagcacaagtacttccaaacagcagtaaagactcttctcagccatcatgtgtgragcaaagcaccagctcagatgaaaatgaaatgtcagacaaaagcaaaaaacagtgcaagtccccatccagaagagacagttacagtgacagcagtgggag

SEQ ID NO: 15968 - DNA, 113 bp, Homo sapiens
tatatttatatactttttcatgaaaatggagttatcagttatctgtttgttactgcatcatctgtttgtaatcattatctcactttgtaaataaaaacacmccttaaaacatg

SEQ ID NO: 15969 - DNA, 201 bp, Homo sapiens
atgtcagacaaaagcaaaaaacagtgcaagtccccatccagaagagacagttacagtgacagcagtgggagtggagaagatgacttagtgacagctccagsaaacatatcaaattcgacctggagttcagctttgcatcagactctaagcaacatggtatcacaggcacagagtcatcatgaagcacccaagagtcaagaa

SEQ ID NO: 15970 - DNA, 201 bp, Homo sapiens
tcctcagaaaattcccaataaaccagagtttgaggacagtaatccttcccctctaccaccggatatggctcctgggcagagttatcaaccccaatcagaayctgcttcctctagttcgatggataagtatcatatacatcacatttctgaaccaactagacaagaaaactggacacctttgaaaaatgacttggaaaatca

SEQ ID NO: 15971 - DNA, 201 bp, Homo sapiens
tccgggctgcatccaaaacagtcagattagttattggacgagttctagaattacccagaataccaatgttgcctcatttgctaccggacataacactaacrtgcaacaaagaggagttgggtttttccttatgtggaggtcatgacagcctttatcaagtggtatatattagtgatattaatccaaggtccgtcgcagcca

SEQ ID NO: 15972 - DNA, 201 bp, Homo sapiens
aagggctttgtggtgagggcaatgacccttgaagatattcagaccagagaggtgcgccatatttctcatctgaatttcactgcctggccagaccatgatayaccttctcaaccagatgatctgcttacttttatctcctacatgagacacatccacagatcaggcccaatcattacgcactgcagtgctggcattggacgt

SEQ ID NO: 15973 - DNA, 201 bp, Homo sapiens
atctgctccgggctgcatccaaaacagtcagattagttattggacgagttctagaattacccagaataccaatgttgcctcatttgctaccggacataacrctaacgtgcaacaaagaggagttgggtttttccttatgtggaggtcatgacagcctttatcaagtggtatatattagtgatattaatccaaggtccgtcg

SEQ ID NO: 15974 - DNA, 201 bp, Homo sapiens
tggatgaagccacttactccagcagtcaggatcatcaaacaccaaaacaggaatcttcctcttcagtgaatacatccaacaagatgaattttaaaactttbtcttcatcacctcctaagcctggagatatctttgaggttgaactggctaaaaatgataacagcttggggataagtgtcacgggaggtgtgaatacgagtg

SEQ ID NO: 15975 - DNA, 201 bp, Homo sapiens
ctggcattggacgttcagggaccctgatttgcatagatgtggttctgggattaatcagtcaggatcttgattttgacatctctgatttggtgcgctgcatkagactacaaagacacggaatggttcagacagaggatcaatatattttctgctatcaagtcatcctttatgtcctgacacgtcttcaagcagaagaagagc

SEQ ID NO: 15976 - DNA, 201 bp, Homo sapiens
aagactacagctttgtcactgaagaaaatacatttgaggtaaaattatttaaaaatagctcaggtctaggattcagtttttctcgagaagataatcttatrccggagcaaattaatgccagcatagtaagggttaaaaagctctttcctggacagccagcagcagaaagtggaaaaattgatgtaggagatgttatcttga

SEQ ID NO: 15977 - DNA, 201 bp, Homo sapiens
tctgggattaatcagtcaggatcttgattttgacatctctgatttggtgcgctgcatgagactacaaagacacggaatggttcagacagaggatcaatatrttttctgctatcaagtcatcctttatgtcctgacacgtcttcaagcagaagaagagcaaaaacagcagcctcagcttctgaagtgacatgaaaagagcct

SEQ ID NO: 15978 - DNA, 201 bp, Homo sapiens
caagcagaagaagagcaaaaacagcagcctcagcttctgaagtgacatgaaaagagcctctggatgcatttccatttctctccttaacctccagcagactmctgctctctatccaaaataaagatcacagagcagcaagttcatacaacatgcatgttctcctctatcttagaggggtattcttcttgaaaataaaaaata

SEQ ID NO: 15979 - DNA, 201 bp, Homo sapiens
caaggacattttatcagataattctggacgtgaagattctgaaaatacattctccccttaccagttcaaaactagtggcccagaaaaaaaacccatccctrgcattgatgtgctttctaagaagaagatctgggcttcatccatggacttgctttgtacagctgacagagacttctcttcaggagagactgccacatatcg

SEQ ID NO: 15980 - DNA, 201 bp, Homo sapiens
tatagccttggatatctttggccctcagaaaatggatccaatatatcacactcgagaattgcccacctcctcagcaatatcaagtgctttggaccgaatcygagagagacaaaagaaacttcaggttctgagggaagccatgaatgtagaagaaccagttcgaagatacaaaacttatcatggtgatgtctttagtacctc

SEQ ID NO: 15981 - DNA, 201 bp, Homo sapiens
aactagacaagaaaactggacacctttgaaaaatgacttggaaaatcaccttgaagactttgaactggaagtagaactcctcattaccctaattaaatcaraaaaaggaagcctgggttttacagtaaccaaaggcaatcagagaattggttgttatgttcatgatgtcatacaggatccagccaaaagtgatggaaggct

SEQ ID NO: 15982 - DNA, 201 bp, Homo sapiens
catttatgatgattcccaagaagctgaagttatccagtctctgctggatgttgtggatgaggaagcccagaatcttttaaacgaaaataatgcagcaggakactcctgtggtccaggtacattaaagatgaatgggaagttatcagaagagagaacagaagatacagactgcgatggttcacctttacctgagtattttac

SEQ ID NO: 15983 - DNA, 201 bp, Homo sapiens; identical to SEQ ID NO: 15966

SEQ ID NO: 15984 - DNA, 201 bp, Homo sapiens; identical to SEQ ID NO: 15967

SEQ ID NO: 15985 - DNA, 113 bp, Homo sapiens; identical to SEQ ID NO: 15968

SEQ ID NO: 15986 - DNA, 201 bp, Homo sapiens; identical to SEQ ID NO: 15969

SEQ ID NO: 15987 - DNA, 201 bp, Homo sapiens; identical to SEQ ID NO: 15970

SEQ ID NO: 15988 - DNA, 201 bp, Homo sapiens; identical to SEQ ID NO: 15971

SEQ ID NO: 15989 - DNA, 201 bp, Homo sapiens
tccaagcagagtctgttagaggatttaatatgggacgagcaatcagcactggcagtctggccagcagcaccctcaacaaacttgctgttcgacctttatcrgttcaagctgagattctgaagaggctatcctgctcagagctgtcgctttaccagccattgcaaaacagttcaaaagagaagaatgacaaagcttcatggg

SEQ ID NO: 15990 - DNA, 201 bp, Homo sapiens; identical to SEQ ID NO: 15973

SEQ ID NO: 15991 - DNA, 201 bp, Homo sapiens; identical to SEQ ID NO: 15972

SEQ ID NO: 15992 - DNA, 201 bp, Homo sapiens; identical to SEQ ID NO: 15974

SEQ ID NO: 15993 - DNA, 201 bp, Homo sapiens; identical to SEQ ID NO: 15975

SEQ ID NO: 15994 - DNA, 201 bp, Homo sapiens; identical to SEQ ID NO: 15976

SEQ ID NO: 15995 - DNA, 201 bp, Homo sapiens; identical to SEQ ID NO: 15977

SEQ ID NO: 15996 - DNA, 201 bp, Homo sapiens; identical to SEQ ID NO: 15978

SEQ ID NO: 15997 - DNA, 201 bp, Homo sapiens; identical to SEQ ID NO: 15979

SEQ ID NO: 15998 - DNA, 201 bp, Homo sapiens; identical to SEQ ID NO: 15980

SEQ ID NO: 15999 - DNA, 201 bp, Homo sapiens; identical to SEQ ID NO: 15981

SEQ ID NO: 16000 - DNA, 201 bp, Homo sapiens; identical to SEQ ID NO: 15982

SEQ ID NO: 16001 - DNA, 201 bp, Homo sapiens; identical to SEQ ID NO: 15966

SEQ ID NO: 16002 - DNA, 201 bp, Homo sapiens; identical to SEQ ID NO: 15967

SEQ ID NO: 16003 - DNA, 113 bp, Homo sapiens; identical to SEQ ID NO: 15968

SEQ ID NO: 16004 - DNA, 201 bp, Homo sapiens; identical to SEQ ID NO: 15969

SEQ ID NO: 16005 - DNA, 201 bp, Homo sapiens; identical to SEQ ID NO: 15970

SEQ ID NO: 16006 - DNA, 201 bp, Homo sapiens; identical to SEQ ID NO: 15971

SEQ ID NO: 16007 - DNA, 201 bp, Homo sapiens; identical to SEQ ID NO: 15989

SEQ ID NO: 16008 - DNA, 201 bp, Homo sapiens; identical to SEQ ID NO: 15973

SEQ ID NO: 16009 - DNA, 201 bp, Homo sapiens; identical to SEQ ID NO: 15972

SEQ ID NO: 16010 - DNA, 201 bp, Homo sapiens
tggatgaagccacttactccagcagtcaggatcatcaaacaccaaaacaggaatcttcctcttcagtgaatacatccaacaagatgaattttaaaactttbtcttcatcacctcctaagcctggagatatctttgaggttgaactggctaaaaatgataacagcttggggataagtgtcacggtactgtttgacaagggag

SEQ ID NO: 16011 - DNA, 201 bp, Homo sapiens; identical to SEQ ID NO: 15975

SEQ ID NO: 16012 - DNA, 201 bp, Homo sapiens; identical to SEQ ID NO: 15976

SEQ ID NO: 16013 - DNA, 201 bp, Homo sapiens; identical to SEQ ID NO: 15977

SEQ ID NO: 16014 - DNA, 201 bp, Homo sapiens; identical to SEQ ID NO: 15978

SEQ ID NO: 16015 - DNA, 201 bp, Homo sapiens; identical to SEQ ID NO: 15979

SEQ ID NO: 16016 - DNA, 201 bp, Homo sapiens; identical to SEQ ID NO: 15980

SEQ ID NO: 16017 - DNA, 201 bp, Homo sapiens; identical to SEQ ID NO: 15981

SEQ ID NO: 16018 - DNA, 201 bp, Homo sapiens; identical to SEQ ID NO: 15982

SEQ ID NO: 16019 - DNA, 201 bp, Homo sapiens; identical to SEQ ID NO: 15966

SEQ ID NO: 16020 - DNA, 201 bp, Homo sapiens; identical to SEQ ID NO: 15967

SEQ ID NO: 16021 - DNA, 113 bp, Homo sapiens; identical to SEQ ID NO: 15968

SEQ ID NO: 16022 - DNA, 201 bp, Homo sapiens; identical to SEQ ID NO: 15969

SEQ ID NO: 16023 - DNA, 201 bp, Homo sapiens; identical to SEQ ID NO: 15970

SEQ ID NO: 16024 - DNA, 201 bp, Homo sapiens; identical to SEQ ID NO: 15971

SEQ ID NO: 16025 - DNA, 201 bp, Homo sapiens; identical to SEQ ID NO: 15989

SEQ ID NO: 16026 - DNA, 201 bp, Homo sapiens; identical to SEQ ID NO: 15973

SEQ ID NO: 16027 - DNA, 201 bp, Homo sapiens; identical to SEQ ID NO: 15972

SEQ ID NO: 16028 - DNA, 201 bp, Homo sapiens; identical to SEQ ID NO: 15974

SEQ ID NO: 16029 - DNA, 201 bp, Homo sapiens; identical to SEQ ID NO: 15975

SEQ ID NO: 16030 - DNA, 201 bp, Homo sapiens; identical to SEQ ID NO: 15976

SEQ ID NO: 16031 - DNA, 201 bp, Homo sapiens; identical to SEQ ID NO: 15977

SEQ ID NO: 16032 - DNA, 201 bp, Homo sapiens; identical to SEQ ID NO: 15978

SEQ ID NO: 16033 - DNA, 201 bp, Homo sapiens; identical to SEQ ID NO: 15979

SEQ ID NO: 16034 - DNA, 201 bp, Homo sapiens; identical to SEQ ID NO: 15980

SEQ ID NO: 16035 - DNA, 201 bp, Homo sapiens; identical to SEQ ID NO: 15981

SEQ ID NO: 16036 - DNA, 201 bp, Homo sapiens; identical to SEQ ID NO: 15982

SEQ ID NO: 16037 - DNA, 201 bp, Homo sapiens
ttacaggaccttgataatatctgggcagcacaggcaggaaaacatgaagccattgtgaagaatgtacatgatctgctagcaaagttggcttgggatttttstcctggacaacttgatcatctttttgattgctttaaggcaagttggacaaatgcaagtaaaaagcaacgtgaaaagctccttgagttgatacgccgtctt

SEQ ID NO: 16038 - DNA, 201 bp, Homo sapiens
gataatatctgggcagcacaggcaggaaaacatgaagccattgtgaagaatgtacatgatctgctagcaaagttggcttgggatttttctcctggacaacwtgatcatctttttgattgctttaaggcaagttggacaaatgcaagtaaaaagcaacgtgaaaagctccttgagttgatacgccgtcttgcagaagatgat

SEQ ID NO: 16039 - DNA, 201 bp, Homo sapiens
ggccttaaatcctcactgcaagtttcatatctacaatggtacacgtccgtgtgaattaatttcctcaaatgctcagttgcctgaagatgaattatttgctygttcttcagatcctcgatcaccaaaaggttggctagtggatctcatcaataaatttggcacattaaatgggttccagattttgcatgatcgtttttttaa

SEQ ID NO: 16040 - DNA, 201 bp, Homo sapiens
agaggtggaaagttgtttgcctggggtgataatgtcagtgcatcccagatacatctctttcctttggcaagttgcagacttaggtagcaacctgaatatgycacctcttagagatggagcaagagtacttatgaaacttatgccaccagatagaacagctgtagaaaaattacgagctgtttgtttggaccatgcaaaact

SEQ ID NO: 16041 - DNA, 201 bp, Homo sapiens
tagatggtacagaccccataacacagattaaccaagttactcatgatcaagcagtggtgctacaaagtgcccttcagagcattcctaatccctcatccgartgcgtacttagaaatgagtccatacttcttgctcaggaaatatctaatgaggcttcaagatatatgcctgatatttgtgtaattagggctatacagaaaa

SEQ ID NO: 16042 - DNA, 201 bp, Homo sapiens
cacaggcaggaaaacatgaagccattgtgaagaatgtacatgatctgctagcaaagttggcttgggatttttctcctggacaacttgatcatctttttgaytgctttaaggcaagttggacaaatgcaagtaaaaagcaacgtgaaaagctccttgagttgatacgccgtcttgcagaagatgataaagatggtgtgatgg

SEQ ID NO: 16043 - DNA, 201 bp, Homo sapiens
taattgatgatttcatctttcccgcatccaaagtttacctgcagtatttaagaagtggagaactaccagctgagcaggctattccagtctgtagttcaccygttaccatcaatgccggttttgagctacttgtagcattagctattggctgtgtgaggaatctcaaacagatagtagactgtttgactgaaatgtattaca

SEQ ID NO: 16044 - DNA, 201 bp, Homo sapiens
acagttcaggctttggggtgaacctgttaatctccgtgaacaacatgatgccttagagttttttaattctttggtggatagtttagatgaagctttaaaakctttaggacacccggctatactaagtaaagtcctaggaggctcctttgctgatcagaagatctgccaaggctgcccacataggtatgaatgtgaagaatc

SEQ ID NO: 16045 - DNA, 201 bp, Homo sapiens
gcgttcttctccgtcacagcaaaaatgtacgtttttggtttactcataatgtcctttttaatgtatcaaatcgcttctctgaataccttctggagtgcccyagtgcagaagtgaggggtgcatttgcaaaacttatagtgtttattgcacacttttccttgcaagatgggtcttgtccttctccttttgcatctccaggac

SEQ ID NO: 16046 - DNA, 201 bp, Homo sapiens
gtgcaagacaagaagccattcgaatggttagagtattaactgttataaaagagtacattaatgaatgtgacagtgattatcacaaggaaagaatgattctmcctatgtcgagagcatttcgtggcaaacacctctctcttatagttcggtttccaaaccagggcagacaggttgatgagttggatatatggtctcatacga

SEQ ID NO: 16047 - DNA, 201 bp, Homo sapiens
tcatagtttgaggtagaatactgtttgctggtcttaaaaactgtggtattttggtgattccataaattaggtcagatacttccactggagggaaacagttyaaaggatatatgtgatactattaatagaatgaggaagacacaccagatatttaggagggaattagcgagcttgaaactaagagctggtttgaatgagact

SEQ ID NO: 16048 - DNA, 201 bp, Homo sapiens
agacttaggtagcaacctgaatatgccacctcttagagatggagcaagagtacttatgaaacttatgccaccagatagaacagctgtagaaaaattacgarctgtttgtttggaccatgcaaaacttggagaaggcaaacttagtccaccccttgactctcttttctttggtccttctgcctcccaagttctatacctaac

SEQ ID NO: 16049 - DNA, 201 bp, Homo sapiens; identical to SEQ ID NO: 16037

SEQ ID NO: 16050 - DNA, 201 bp, Homo sapiens; identical to SEQ ID NO: 16038

SEQ ID NO: 16051 - DNA, 201 bp, Homo sapiens; identical to SEQ ID NO: 16039

SEQ ID NO: 16052 - DNA, 201 bp, Homo sapiens; identical to SEQ ID NO: 16040

SEQ ID NO: 16053 - DNA, 201 bp, Homo sapiens; identical to SEQ ID NO: 16041

SEQ ID NO: 16054 - DNA, 201 bp, Homo sapiens; identical to SEQ ID NO: 16042

SEQ ID NO: 16055 - DNA, 201 bp, Homo sapiens; identical to SEQ ID NO: 16043

SEQ ID NO: 16056 - DNA, 201 bp, Homo sapiens; identical to SEQ ID NO: 16044

SEQ ID NO: 16057 - DNA, 201 bp, Homo sapiens
gtggtcctgccagtgactgcaaaaatgtacgtttttggtttactcataatgtcctttttaatgtatcaaatcgcttctctgaataccttctggagtgcccyagtgcagaagtgaggggtgcatttgcaaaacttatagtgtttattgcacacttttccttgcaagatgggtcttgtccttctccttttgcatctccaggac

SEQ ID NO: 16058 - DNA, 201 bp, Homo sapiens; identical to SEQ ID NO: 16047

SEQ ID NO: 16059 - DNA, 201 bp, Homo sapiens; identical to SEQ ID NO: 16048

SEQ ID NO: 16060 - DNA, 201 bp, Homo sapiens
cctggaggcggatcatctaattctctgtggaatgaatacacacatatatattacaagggataatttagaccccatacaagtttataaagagtcattgttawtttctggttggtgtattattttttctgtggtcttactgatctttgtatattacatacatgctttgaagtttctggaaagtagatcttttcttgacctagt

SEQ ID NO: 16061 - DNA, 201 bp, Homo sapiens
tcccttcatactccttttaagcagtgagttatggtggtggtctcatgaagaaaagaccttttggcccaatctctgccatatcagtgaacctttagaaactmaaaaactgagaaatttactacagtagttagaattatatcacttcactgttctctacttgcaagcctcaaagagagaaagtttcgttatattaaaacactt

SEQ ID NO: 16062 - DNA, 201 bp, Homo sapiens
ttttctggttggtgtattattttttctgtggtcttactgatctttgtatattacatacatgctttgaagtttctggaaagtagatcttttcttgacctagyatatcagtgacagttgcagcccttgtgatgtgattagtgtctcatgtggaaccatggcatggttattgatgagtttcttaaccctttccagagtcctcct

SEQ ID NO: 16063 - DNA, 161 bp, Homo sapiens
tttttcttgtcctcattcttgccttgagttccagttcctctttggtgtacagacttcttggtacccagtcacctctgtcttcagcaccctcataagtcgtsactaatacacagttttgtacatgtaacattaaaggcataaatgactcatctctctgtgaa

SEQ ID NO: 16064 - DNA, 201 bp, Homo sapiens
ttcagtgtctgctgcacagagctttacatccccgggagcctctacccccaattcagcagcatatttggaatatgctgaatcctcccgctgaggtgacaacraaaagtcagattcctctctctaaaataaagaccctttttcctctgattgaagccaagaaaaaggatcaagtgactgctcaggaaattttccaagacaacc

SEQ ID NO: 16065 - DNA, 201 bp, Homo sapiens
atgtgattagtgtctcatgtggaaccatggcatggttattgatgagtttcttaaccctttccagagtcctcctttgcctgatcctccaacagctgtcacarcttgtgttgagcaagcagtagcatttgcttcctcccaacaagcagctgggttaggaaaaccatgggtaaggacggactcacttctctttttagttgaggc

SEQ ID NO: 16066 - DNA, 201 bp, Homo sapiens
gaatcctcccgctgaggtgacaacgaaaagtcagattcctctctctaaaataaagaccctttttcctctgattgaagccaagaaaaaggatcaagtgactkctcaggaaattttccaagacaaccatgaagatggacctacagctaaaaaattaaagactgagcaagggggagcccacttcagcgtctccagtctggctga

SEQ ID NO: 16067 - DNA, 201 bp, Homo sapiens
gctcagagttccggggcacggtttccccgcccctttcaggcctagcaggaaacgaagcggctctttccgctatctgccgcttgtccaccggaagcgagttrcgacacggcaggttcccgcccggaagaagcgaccaaagcgcctgaggaccggcaacatggtgcggtcggggaataaggcagctgttgtgctgtgtatgga

SEQ ID NO: 16068 - DNA, 201 bp, Homo sapiens
gagctgccatcgctgtgatgctgggagttctaacaaaacaagttggatgcggccattcaaggggagccaaaatctcaagaaattcccagcaggttacctgraggcggatcatctaattctctgtggaatgaatacacacatatatattacaagggataatttagaccccatacaagtttataaagagtcattgttattttc

SEQ ID NO: 16069 - DNA, 201 bp, Homo sapiens
agacttgtttccaaccaccaaaatcccaaatcctcgatttcagagattatttcagtgtctgctgcacagagctttacatccccgggagcctctacccccarttcagcagcatatttggaatatgctgaatcctcccgctgaggtgacaacgaaaagtcagattcctctctctaaaataaagaccctttttcctctgattga

SEQ ID NO: 16070 - DNA, 201 bp, Homo sapiens
cgctcccgactacggcggaatggagagaatgtgcgcatgctcggcgggaatctgcgcatgctcggcgggaatctgcgcatgctcggagagaatctgcgcawgctcggccggaatctgcgcgagctcggcgggaatctgcgcaagctcggcgggaatctgcgcatgctcagagttccggggcacggtttccccgcccctttc

SEQ ID NO: 16071 - DNA, 201 bp, Homo sapiens
acaagatatgtgtttcaggcggctcaaacaccacacgctcccgactacggcggaatggagagaatgtgcgcatgctcggcgggaatctgcgcatgctcggmgggaatctgcgcatgctcggagagaatctgcgcatgctcggccggaatctgcgcgagctcggcgggaatctgcgcaagctcggcgggaatctgcgcatgc

SEQ ID NO: 16072 - DNA, 201 bp, Homo sapiens
acttaggtaacttttcggtctttcccatttctacctaagtcagctttcatctttgtggatggtgtctcctttactaaataagaaaataacaaagcccttawtctctttttttcttgtcctcattcttgccttgagttccagttcctctttggtgtacagacttcttggtacccagtcacctctgtcttcagcaccctcata

SEQ ID NO: 16073 - DNA, 201 bp, Homo sapiens
tttactacagtagttagaattatatcacttcactgttctctacttgcaagcctcaaagagagaaagtttcgttatattaaaacacttaggtaacttttcgrtctttcccatttctacctaagtcagctttcatctttgtggatggtgtctcctttactaaataagaaaataacaaagcccttattctctttttttcttgtc

SEQ ID NO: 16074 - DNA, 201 bp, Homo sapiens
tgcggcaatacatgttttcatccttgaaaaacagtaagaaatatgctcccaccgaggcacagttgaatgctgttgatgctttgattgactccatgagcttsgcaaagaaagatgagaagacagacacccttgaagacttgtttccaaccaccaaaatcccaaatcctcgatttcagagattatttcagtgtctgctgcaca

SEQ ID NO: 16075 - DNA, 201 bp, Homo sapiens
actacggcggaatggagagaatgtgcgcatgctcggcgggaatctgcgcatgctcggcgggaatctgcgcatgctcggagagaatctgcgcatgctcggcsggaatctgcgcgagctcggcgggaatctgcgcaagctcggcgggaatctgcgcatgctcagagttccggggcacggtttccccgcccctttcaggcctag

SEQ ID NO: 16076 - DNA, 201 bp, Homo sapiens
agttgaggccttctagttaccacattactctgcctctgtatataggtggttttctttaagtggggtgggaaggggagcacaatttcccttcatactccttwtaagcagtgagttatggtggtggtctcatgaagaaaagaccttttggcccaatctctgccatatcagtgaacctttagaaactcaaaaactgagaaattt

SEQ ID NO: 16077 - DNA, 201 bp, Homo sapiens; identical to SEQ ID NO: 16060

SEQ ID NO: 16078 - DNA, 201 bp, Homo sapiens; identical to SEQ ID NO: 16061

SEQ ID NO: 16079 - DNA, 201 bp, Homo sapiens; identical to SEQ ID NO: 16062

SEQ ID NO: 16080 - DNA, 161 bp, Homo sapiens; identical to SEQ ID NO: 16063

SEQ ID NO: 16081 - DNA, 201 bp, Homo sapiens; identical to SEQ ID NO: 16064

SEQ ID NO: 16082 - DNA, 201 bp, Homo sapiens; identical to SEQ ID NO: 16065

SEQ ID NO: 16083 - DNA, 201 bp, Homo sapiens; identical to SEQ ID NO: 16066

SEQ ID NO: 16084 - DNA, 201 bp, Homo sapiens; identical to SEQ ID NO: 16067

SEQ ID NO: 16085 - DNA, 201 bp, Homo sapiens; identical to SEQ ID NO: 16068

SEQ ID NO: 16086 - DNA, 201 bp, Homo sapiens; identical to SEQ ID NO: 16069

SEQ ID NO: 16087 - DNA, 201 bp, Homo sapiens; identical to SEQ ID NO: 16070

SEQ ID NO: 16088 - DNA, 191 bp, Homo sapiens
tgtttcaggcggctcaaacaccacacgctcccgactacggcggaatggagagaatgtgcgcatgctcggcgggaatctgcgcatgctcggmgggaatctgcgcatgctcggagagaatctgcgcatgctcggccggaatctgcgcgagctcggcgggaatctgcgcaagctcggcgggaatctgcgcatgc

SEQ ID NO: 16089 - DNA, 201 bp, Homo sapiens; identical to SEQ ID NO: 16072

SEQ ID NO: 16090 - DNA, 201 bp, Homo sapiens; identical to SEQ ID NO: 16073

SEQ ID NO: 16091 - DNA, 201 bp, Homo sapiens; identical to SEQ ID NO: 16074

SEQ ID NO: 16092 - DNA, 201 bp, Homo sapiens; identical to SEQ ID NO: 16075

SEQ ID NO: 16093 - DNA, 201 bp, Homo sapiens; identical to SEQ ID NO: 16076

SEQ ID NO: 16094 - DNA, 201 bp, Homo sapiens; identical to SEQ ID NO: 16074

SEQ ID NO: 16095 - DNA, 201 bp, Homo sapiens; identical to SEQ ID NO: 16060

SEQ ID NO: 16096 - DNA, 201 bp, Homo sapiens; identical to SEQ ID NO: 16062

SEQ ID NO: 16097 - DNA, 149 bp, Homo sapiens
ctcccaacaagcagctgggttaggaaaaccatggttcctctttggtgtacagacttcttggtacccagtcacctctgtcttcagcaccctcataagtcgtsactaatacacagttttgtacatgtaacattaaaggcataaatgactca

SEQ ID NO: 16098 - DNA, 201 bp, Homo sapiens; identical to SEQ ID NO: 16064

SEQ ID NO: 16099 - DNA, 201 bp, Homo sapiens
atgtgattagtgtctcatgtggaaccatggcatggttattgatgagtttcttaaccctttccagagtcctcctttgcctgatcctccaacagctgtcacarcttgtgttgagcaagcagtagcatttgcttcctcccaacaagcagctgggttaggaaaaccatggttcctctttggtgtacagacttcttggtacccagt

SEQ ID NO: 16100 - DNA, 201 bp, Homo sapiens; identical to SEQ ID NO: 16066

SEQ ID NO: 16101 - DNA, 189 bp, Homo sapiens
ggggcacggtttccccgcccctttcaggcctagcaggaaacgaagcggctctttccgctatctgccgcttgtccaccggaagcgagttrcgacacggcaggttcccgcccggaagaagcgaccaaagcgcctgaggaccggcaacatggtgcggtcggggaataaggcagctgttgtgctgtgtatgga

SEQ ID NO: 16102 - DNA, 201 bp, Homo sapiens; identical to SEQ ID NO: 16068

SEQ ID NO: 16103 - DNA, 201 bp, Homo sapiens; identical to SEQ ID NO: 16069

SEQ ID NO: 16104 - DNA, 201 bp, Homo sapiens
actattgcagattttcatcccattctactgcttgattgaccatcaactccatcctatcgagatttatttaagaatgaagaacataattttctgctgatgcygtaccctcacccttttcagcaaagaatagtggagagtaggaaactgtactttatctcggcatcctcttgaatgatagtgcaagtttctccagttgggatg

SEQ ID NO: 16105 - DNA, 201 bp, Homo sapiens
cggcctcgtgtctgtcctcccatcttggaacaaccttatcaacaggccgcactgcagaaatgatgttttatgaaaaccaatgaggctgctgccactccagmaagggaaataatgcagtttcctgtcttatttaagaaaaagagaaggctctcttttctcccttgtcattgccgttcttttccttacacgcaaagatttttt

SEQ ID NO: 16106 - DNA, 201 bp, Homo sapiens
tatcaacaggccgcactgcagaaatgatgttttatgaaaaccaatgaggctgctgccactccagcaagggaaataatgcagtttcctgtcttatttaagaraaagagaaggctctcttttctcccttgtcattgccgttcttttccttacacgcaaagattttttaactattgcagattttcatcccattctactgcttga

SEQ ID NO: 16107 - DNA, 201 bp, Homo sapiens
  misc_feature (1)...(201): n = A,T,C or G
tgtctttctgcccaaaccaacctggggaaaccacacacccatcttcagggatgctggcatgcagctacaaggttatcggtattatgaccccaagacttgcngttttgacttcacaggcgctgtggaggatatttcaaaaataccagagcagagtgttcttcttctgcatgcctgcgcccacaatcccacgggagtggaccc

SEQ ID NO: 16108 - DNA, 201 bp, Homo sapiens
  misc_feature (1)...(201): n = A,T,C or G
cctgtccttaccttcagcaggagccggttccctgtgtgtgtgtccgctcgccctctgctccgtcctgcggctgcccactgccctcctacggtccaccatgnccctgctgcactccggccgcgtcctccccgggatcgccgccgccttccacccgggcctcgccgccgcggcctctgccagagccagctcctggtggaccca

SEQ ID NO: 16109 - DNA, 201 bp, Homo sapiens
tgggacctccagatcccattctgggagtcactgaagcctttaagagggacaccaatagcaaaaagatgaatctgggagttggtgcctaccgggatgataayggaaagccttacgtgctgcctagcgtccgcaaggcagaggcccagattgccgcaaaaaatttggacaaggaatacctgcccattgggggactggctgaat

SEQ ID NO: 16110 - DNA, 201 bp, Homo sapiens
ggggcccggattgctgctgccattctgaacaccccagatttgcgaaaacaatggctgcaagaagtgaaaggcatggctgaccgcatcattggcatgcggaytcaactggtctccaacctcaagaaggagggttccacccacaattggcaacacatcaccgaccaaattggcatgttctgtttcacagggctaaagcctgaa

SEQ ID NO: 16111 - DNA, 201 bp, Homo sapiens
tgtaacactcagcatttgaatgtttctcagaaaagaacatgtagtgacacagggcagaggcatccatggctggcgtctggaatattaaaccaaactctccycggtccttttttctccaacttttctcaaagagtttacatgtgcaagaaagtcatcgcaccaaaaaacctgtcaattatgccattgcaatatttcagaagc

SEQ ID NO: 16112 - DNA, 201 bp, Homo sapiens
cgtcccatgtattccaaccctcccctcaatggggcccggattgctgctgccattctgaacaccccagatttgcgaaaacaatggctgcaagaagtgaaagkcatggctgaccgcatcattggcatgcggactcaactggtctccaacctcaagaaggagggttccacccacaattggcaacacatcaccgaccaaattggc

SEQ ID NO: 16113 - DNA, 201 bp, Homo sapiens
ccattctgggagtcactgaagcctttaagagggacaccaatagcaaaaagatgaatctgggagttggtgcctaccgggatgataacggaaagccttacgtkctgcctagcgtccgcaaggcagaggcccagattgccgcaaaaaatttggacaaggaatacctgcccattgggggactggctgaattttgcaaggcatctg

SEQ ID NO: 16114 - DNA, 201 bp, Homo sapiens; identical to SEQ ID NO: 16104

SEQ ID NO: 16115 - DNA, 201 bp, Homo sapiens; identical to SEQ ID NO: 16105

SEQ ID NO: 16116 - DNA, 201 bp, Homo sapiens; identical to SEQ ID NO: 16106

SEQ ID NO: 16117 - DNA, 201 bp, Homo sapiens; identical to SEQ ID NO: 16107
  misc_feature (1)...(201): n = A,T,C or G

SEQ ID NO: 16118 - DNA, 201 bp, Homo sapiens; identical to SEQ ID NO: 16108
  misc_feature (1)...(201): n = A,T,C or G

SEQ ID NO: 16119 - DNA, 201 bp, Homo sapiens; identical to SEQ ID NO: 16109

SEQ ID NO: 16120 - DNA, 201 bp, Homo sapiens; identical to SEQ ID NO: 16110

SEQ ID NO: 16121 - DNA, 201 bp, Homo sapiens; identical to SEQ ID NO: 16111

SEQ ID NO: 16122 - DNA, 201 bp, Homo sapiens; identical to SEQ ID NO: 16112

SEQ ID NO: 16123 - DNA, 201 bp, Homo sapiens; identical to SEQ ID NO: 16113

SEQ ID NO: 16124 - DNA, 201 bp, Homo sapiens
cagaggcagtggaggcagaggccacgctgagagccatcaccatagccagcgctgtgaactgtcctctctacattgtgcatgtgatgagcaagtctgcagcyaaggtgatagcggatgcaaggagagatgggaaggtggtctatggtgaacccatagcagccagtcttggcacagatggcactcactactggaataaagaat

SEQ ID NO: 16125 - DNA, 201 bp, Homo sapiens
agatggcactcactactggaataaagaatggcaccatgcagcccaccatgtcatgggtccacctttgcgaccagacccctcaacacccgacttcctcatgwatctgttggctaatgatgatctaaccacaacagggactgataactgcactttcaacacctgccagaaagctcttgggaaggatgattttaccaagatccc

SEQ ID NO: 16126 - DNA, 201 bp, Homo sapiens
cggtggggaccttgcaggagggcaccccaagcccgcccggcccgcccaacccagcccctgcgcgcagcccgggccgagtaggaccccgcgcgcccctcgcyatggcggcgccctcgcggctcctgatccgcgggggtcgcgtggtcaacgatgacttctcggaggtggccgacgtgctggtggaggacggcgtggtgcggg

SEQ ID NO: 16127 - DNA, 201 bp, Homo sapiens
ccacaacagggactgataactgcactttcaacacctgccagaaagctcttgggaaggatgattttaccaagatccccaatggggtgaatggtgttgaagaycggatgtccgtaatatgggaaaaaggcgtgcatagtggtaaaatggatgaaaacagatttgtggcagttaccagcacaaatgcagccaaaatttttaatc

SEQ ID NO: 16128 - DNA, 201 bp, Homo sapiens
tccatgcggaaaatggagacttaattgcagagggagcaaagaagatgttggctctggggataacaggccctgagggccacgagctgtgccgcccagaggcrgtggaggcagaggccacgctgagagccatcaccatagccagcgctgtgaactgtcctctctacattgtgcatgtgatgagcaagtctgcagctaaggtga

SEQ ID NO: 16129 - DNA, 201 bp, Homo sapiens
ctcgggcacgacctgctgcctcccgggggcgctcctgcggggctgcgggtcctcgacgccgccggcaagctcgtcctgcccggaggcatcgacacacacasgcacatgcagttccccttcatgggctcgcggtccatcgacgacttccaccagggcaccaaggctgctctctcaggaggcaccaccatgattattgatttc

SEQ ID NO: 16130 - DNA, 201 bp, Homo sapiens
aatccttgtgcaagataaaggtgttaactctttcaagatgtttatggcctataaagatctgtacatggtgacagacctggagctgtacgaagccttctctyggtgcaaggaaattggagcaattgcccaggtccatgcggaaaatggagacttaattgcagagggagcaaagaagatgttggctctggggataacaggccc

SEQ ID NO: 16131 - DNA, 201 bp, Homo sapiens
taactgcactttcaacacctgccagaaagctcttgggaaggatgattttaccaagatccccaatggggtgaatggtgttgaagatcggatgtccgtaataygggaaaaaggcgtgcatagtggtaaaatggatgaaaacagatttgtggcagttaccagcacaaatgcagccaaaatttttaatctctatccaagaaaagg

SEQ ID NO: 16132 - DNA, 201 bp, Homo sapiens
tgctgcctcccgggggcgctcctgcggggctgcgggtcctcgacgccgccggcaagctcgtcctgcccggaggcatcgacacacacacgcacatgcagttycccttcatgggctcgcggtccatcgacgacttccaccagggcaccaaggctgctctctcaggaggcaccaccatgattattgatttcgccattcctcaga

SEQ ID NO: 16133 - DNA, 201 bp, Homo sapiens
ttaacttcaacattttcgagggcatggtttgccacggggtgccccttgtgactatttcaagaggcaaagtggtatatgaagccggagtgttcagtgtcacrgcaggagatgggaagtttattcctcgaaaaccatttgctgaatatatttacaaacgaataaagcagcgagaccggacttgcacacctacccctgtggagc

SEQ ID NO: 16134 - DNA, 201 bp, Homo sapiens
ttgcgaccagacccctcaacacccgacttcctcatgaatctgttggctaatgatgatctaaccacaacagggactgataactgcactttcaacacctgccrgaaagctcttgggaaggatgattttaccaagatccccaatggggtgaatggtgttgaagatcggatgtccgtaatatgggaaaaaggcgtgcatagtggt

SEQ ID NO: 16135 - DNA, 201 bp, Homo sapiens
tgacattgttatttgggacccaaaaggcacaaggactatctcagcaaaaactcatcatcaggctgttaacttcaacattttcgagggcatggtttgccacrgggtgccccttgtgactatttcaagaggcaaagtggtatatgaagccggagtgttcagtgtcacggcaggagatgggaagtttattcctcgaaaaccatt

SEQ ID NO: 16136 - DNA, 201 bp, Homo sapiens
atacttctatggtacctattacaagctgaccaagataaaaagaagtatgtaacccactgtgctgtcaagcatcatgattccgggcagttttcattttactrtggattttgctatacttatgcaaggacttacactaacctcctggctgtaaatcaaacaaggtgactgaaagtggcatttatgttttcacaagggacatgc

SEQ ID NO: 16137 - DNA, 201 bp, Homo sapiens
aaagtaaaaagtgttctgtagtgaggttacatatcaggaacatatgagttgagcagagtaatttggtagtgtaagtcgatgcaaaaatacttctatggtayctattacaagctgaccaagataaaaagaagtatgtaacccactgtgctgtcaagcatcatgattccgggcagttttcattttactatggattttgctata

SEQ ID NO: 16138 - DNA, 201 bp, Homo sapiens
gaaaataaaaaattcctctccaaacatgggtagttttatgtcaaaatattggcttttcaagaacaggactcatatcttgatatttaagagatgtttaaaaytttaaactttttctaccttctactgtttaaaggttttacacagggtgtatctcacattaaacaaaacacctttttttcaaaatgaaataccaatgtaaag

SEQ ID NO: 16139 - DNA, 201 bp, Homo sapiens
gcacgccgactggaccgagctcaccagctgtgtgccctccgtggtggacggcaagcgcgacgccaggctgagaccgtccaggtggaggatttttcagattytagatgcagcaaggttttctattctttctgtgggtatagtaaggataaacggggttctccaaacactaacgcaggcgccaactctccgtcatccacaaag

SEQ ID NO: 16140 - DNA, 201 bp, Homo sapiens; identical to SEQ ID NO: 16136

SEQ ID NO: 16141 - DNA, 201 bp, Homo sapiens; identical to SEQ ID NO: 16137

SEQ ID NO: 16142 - DNA, 201 bp, Homo sapiens; identical to SEQ ID NO: 16138

SEQ ID NO: 16143 - DNA, 201 bp, Homo sapiens
gcacgccgactggaccgagctcaccagctgtgtgccctccgtggtggacggcaagcgcgacgccaggctgagaccgtccaggtggaggatttttcagattytagatgcagcaagtaaggataaacggggttctccaaacactaacgcaggcgccaactctccgtcatccacaaagacccggaacacatctaagagtgggaa

SEQ ID NO: 16144 - DNA, 201 bp, Homo sapiens
cttgcctattgactttgtcactgctgagaaatttgatgagaatgccaagactggccaagccactgtggcttctggcatacctgctggctgaatgggcttgractgtggtcctgaaagcagcaagaagtatgctgagactgtcacttgggctaagcagattgtgtggaatggtcctgtggggggtatttgaatgggaagctt

SEQ ID NO: 16145 - DNA, 201 bp, Homo sapiens
ctgcctgcggcccctggacattgagttcctgcagcggctgtgccggactgtgaatgtggtgcccgtgattgccagggccgacagcctgaccatggaggagygagaggccttcaggcgcaggatccagcagaacctgaggacccactgcatcgacgtctacccccagatgtgctttgacgaggacatcaatgacaaaatcct

SEQ ID NO: 16146 - DNA, 201 bp, Homo sapiens
ggtttgagttcaacatcatggtggtggggcaaagcgggctgggcaagtccacgatggtgaacacgctgttcaagtccaaagtgtggaagtcaaacccaccrggcttgggggtgcccacaccccagacgctgcagctgcattcactgacccatgtcatagaggagaagggtgtgaagctgaagctgacggtgacggacacgc

SEQ ID NO: 16147 - DNA, 201 bp, Homo sapiens
ctgcagcggctgtgccggactgtgaatgtggtgcccgtgattgccagggccgacagcctgaccatggaggagcgagaggccttcaggcgcaggatccagcrgaacctgaggacccactgcatcgacgtctacccccagatgtgctttgacgaggacatcaatgacaaaatcctcaacagcaagttacgggaccgaatccct

SEQ ID NO: 16148 - DNA, 201 bp, Homo sapiens
gctgggaccccatcctgggctacatcaacgagcaatacgagcagtacctgcaggaggagatcctcatcacccgccagcgccacatcccagacacccgggtrcactgctgcgtgtactttgtaccacccactgggcactgcctgcggcccctggacattgagttcctgcagcggctgtgccggactgtgaatgtggtgcccg

SEQ ID NO: 16149 - DNA, 134 bp, Homo sapiens
ctcccccatcacacacaccaggccctgccaggayaaggcagctcctggaagctccaccaggacccacgtccaccaggcatctcgaacccttggcccccatggaccccctgaggcgctccccctctccctgcctg

SEQ ID NO: 16150 - DNA, 201 bp, Homo sapiens
gagctgggactcgggactcccccgcctgtcagtctggccccctgtgctttgctccctgtgctcagtggtcactttcccgctcccacttggggctgggagcygtgccaccatcccctagaagtcctgtcctcttcaccctgccctacctgagccgctgactcttctggcaaaaattctgttgggatttaaggccaagggtca

SEQ ID NO: 16151 - DNA, 201 bp, Homo sapiens
tccagccctggggaggcgcacccttaagcaacacagactgggctgaggctgacaggcagaagactaacagagcgcagtctgcacacgcaggttctgggcgmcctctggccctggccatctctgcactaactcatctgaattatgaaggtggcagtcttggtcagtagtttaaagagtttccctactttttaaccctttttg

SEQ ID NO: 16152 - DNA, 201 bp, Homo sapiens
atatatggcatccacgcatgggatctgcaagctggagccctcctacccgcaggcttgagcacagcatcatccagccctggggaggcgcacccttaagcaasacagactgggctgaggctgacaggcagaagactaacagagcgcagtctgcacacgcaggttctgggcgacctctggccctggccatctctgcactaactc

SEQ ID NO: 16153 - DNA, 201 bp, Homo sapiens
agtcctgtcctcttcaccctgccctacctgagccgctgactcttctggcaaaaattctgttgggatttaaggccaagggtcagtgggtggcagggggctgrcaatgagcttgtgtgttgttggtctgcttggtgtgtgtgatcgggaagataagctgggaggggtctcctgctggggtcctgatgcctctgtttccaaaca

SEQ ID NO: 16154 - DNA, 201 bp, Homo sapiens
ctcctatggggaggtggcttgacccacccggtgccaggaggcagggaaggaggtagcttgcaaagcccactttattgagtgctggagcatttacacagcgyggaggaggagataagctggggctgagcaaaccgcacccaaggggttagagggattctgggtgagagggatgagctcccaaggcctctgaggcttccaccc

SEQ ID NO: 16155 - DNA, 201 bp, Homo sapiens
gcccccacccacccatgggctactaccccccagggccctacacgccagggccctaccctggccctgggggccacacagccacagtcctggtcccttcaggrgctgccaccacggtgacagtgctgcagggagagatctttgagggagcgcctgtgcagacggtgtgtccccactgccagcaggccatcaccaccaagatct

SEQ ID NO: 16156 - DNA, 201 bp, Homo sapiens
taataaaattatttaagttcatgtttctcttttagagaatgaattgtttaaatacaaatatgtgcttttttaaaacccttatttttaaatatatatatatwttttaaaaaaaccttttaagtaggaaacctctaaggtatttctgagctaaaaaatagcagtgctggatacactttaaagatctttgcaagacggttagag

SEQ ID NO: 16157 - DNA, 201 bp, Homo sapiens
ggtcccccttgtgggtgcgcttggatgtgcagagccttctccatggattttcttccctgtaagtgccgggcccctcaccccagctgacaggctgttgctgwgcctgctcacacctgctcctgcaggcacactgggctagggacgaggaaggagcagccacaagtggtagaactgccttggtggacaccagcctcgccctgt

SEQ ID NO: 16158 - DNA, 201 bp, Homo sapiens
ctgcaaagcctacatctacacgtacaagcgcctgtgctaacggagctgggactcgggactcccccgcctgtcagtctggccccctgtgctttgctccctgygctcagtggtcactttcccgctcccacttggggctgggagccgtgccaccatcccctagaagtcctgtcctcttcaccctgccctacctgagccgctgac

SEQ ID NO: 16159 - DNA, 201 bp, Homo sapiens; identical to SEQ ID NO: 16150

SEQ ID NO: 16160 - DNA, 201 bp, Homo sapiens; identical to SEQ ID NO: 16151

SEQ ID NO: 16161 - DNA, 201 bp, Homo sapiens; identical to SEQ ID NO: 16152

SEQ ID NO: 16162 - DNA, 201 bp, Homo sapiens; identical to SEQ ID NO: 16153

SEQ ID NO: 16163 - DNA, 201 bp, Homo sapiens; identical to SEQ ID NO: 16154

SEQ ID NO: 16164 - DNA, 201 bp, Homo sapiens; identical to SEQ ID NO: 16155

SEQ ID NO: 16165 - DNA, 201 bp, Homo sapiens; identical to SEQ ID NO: 16156

SEQ ID NO: 16166 - DNA, 201 bp, Homo sapiens; identical to SEQ ID NO: 16157

SEQ ID NO: 16167 - DNA, 201 bp, Homo sapiens; identical to SEQ ID NO: 16158

SEQ ID NO: 16168 - DNA, 201 bp, Homo sapiens
tagatgctgtcgaagagttcctcaggagagccaaagggaaagaccagacgtcatcccacaattcttctgatgacaagaatcgacgtaattccagtgaggaragaagtaggccaaactcaggtgatgagaagcgcaaacttagcctgtctgaagggaaggtgaagaagaacatgggagaaggaaagaagagggtgtcttcag

SEQ ID NO: 16169 - DNA, 201 bp, Homo sapiens
agaaaatgtgacacttgtgaaaaagcttgtaagaaagcccctcccttttttctttaaacctttaaatgacaaatctaggtaattaaggttgtgaatttttwtttttgctttgtttttaatgaacatttgtctttcagaataggattgtgtgataatgtttaaatggcaaaaacaaaacatgattttgtgcaattaacaaag

SEQ ID NO: 16170 - DNA, 201 bp, Homo sapiens
aatgataaaaattaacaagggtaaacgattccagcaagcggtagatgctgtcgaagagttcctcaggagagccaaagggaaagaccagacgtcatcccacrattcttctgatgacaagaatcgacgtaattccagtgaggagagaagtaggccaaactcaggtgatgagaagcgcaaacttagcctgtctgaagggaaggt

SEQ ID NO: 16171 - DNA, 201 bp, Homo sapiens
tcctaggtgaagtgggcaatgcagccaagatgatgctgatcgtgaacatggtccaagggagcttcatggccactattgccgaggggctgaccctggcccasgtgacaggccagtcccagcagacactcttggacatcctcaatcagggacagttggccagcatcttcctggaccagaagtgccaaaatatcctgcaaggaa

SEQ ID NO: 16172 - DNA, 201 bp, Homo sapiens
ttgcaaaaaaaaaagttacccaagggatgtcagttttttatccctctgcatgggttggattttccaaaatcataatttgcagaaggaaggccagcatttaygatgcaatatgtaattatatatagggtggccacactagggcggggtccttcccccctcacagctttggcccctttcagagattagaaactgggttagagg

SEQ ID NO: 16173 - DNA, 201 bp, Homo sapiens; identical to SEQ ID NO: 16168

SEQ ID NO: 16174 - DNA, 201 bp, Homo sapiens; identical to SEQ ID NO: 16169

SEQ ID NO: 16175 - DNA, 201 bp, Homo sapiens; identical to SEQ ID NO: 16170

SEQ ID NO: 16176 - DNA, 201 bp, Homo sapiens; identical to SEQ ID NO: 16171

SEQ ID NO: 16177 - DNA, 201 bp, Homo sapiens; identical to SEQ ID NO: 16172

SEQ ID NO: 16178 - DNA, 201 bp, Homo sapiens; identical to SEQ ID NO: 16168

SEQ ID NO: 16179 - DNA, 201 bp, Homo sapiens; identical to SEQ ID NO: 16169

SEQ ID NO: 16180 - DNA, 201 bp, Homo sapiens; identical to SEQ ID NO: 16170

SEQ ID NO: 16181 - DNA, 201 bp, Homo sapiens; identical to SEQ ID NO: 16171

SEQ ID NO: 16182 - DNA, 201 bp, Homo sapiens; identical to SEQ ID NO: 16172

SEQ ID NO: 16183 - DNA, 201 bp, Homo sapiens; identical to SEQ ID NO: 16168

SEQ ID NO: 16184 - DNA, 201 bp, Homo sapiens; identical to SEQ ID NO: 16169

SEQ ID NO: 16185 - DNA, 201 bp, Homo sapiens; identical to SEQ ID NO: 16170

SEQ ID NO: 16186 - DNA, 201 bp, Homo sapiens; identical to SEQ ID NO: 16171

SEQ ID NO: 16187 - DNA, 201 bp, Homo sapiens; identical to SEQ ID NO: 16172

SEQ ID NO: 16188 - DNA, 201 bp, Homo sapiens; identical to SEQ ID NO: 16168

SEQ ID NO: 16189 - DNA, 201 bp, Homo sapiens; identical to SEQ ID NO: 16169

SEQ ID NO: 16190 - DNA, 201 bp, Homo sapiens; identical to SEQ ID NO: 16170

SEQ ID NO: 16191 - DNA, 201 bp, Homo sapiens; identical to SEQ ID NO: 16171

SEQ ID NO: 16192 - DNA, 201 bp, Homo sapiens; identical to SEQ ID NO: 16172

SEQ ID NO: 16193 - DNA, 201 bp, Homo sapiens
cagcttctcgctagtgacgcgcggtgcgggctcatctccttcccctccttcctcacctcccctagtccggaccccgtccgccgccgggaccagaccgtccycgtagcccgcagccagcagccgcccctctcctcccccggccgcccctctcccaacgcccgtctgccgctggccggcggcgcgcccctggtcccggccgcc

SEQ ID NO: 16194 - DNA, 201 bp, Homo sapiens
aaggcagacgacgtgccaccttgcttagcgcccgtcaaggaatgatgtctgcacgaggagacttcctaaattatgctctgtctctaatgcggtctcataaygatgagcattctgatgttcttccagttttggatgtttgctcattgaagcatgtggcatatgtttttcaagcacttatatactggattaaggcaatgaatc

SEQ ID NO: 16195 - DNA, 201 bp, Homo sapiens
gcgagaactcttggaactgggtattgataatgaagattcagaacatgaaaatgatgatgacaccaatcaaagtgctactttgaatgataaggatgatgacyctcttcctgcagaaactggccaaaaccatccatttttccgacgttcagactccatgacattccttgggtgtatacccccaaatccatttgaagtgcctct

SEQ ID NO: 16196 - DNA, 201 bp, Homo sapiens
tagagcctccaagatttgcccagcttgcattggagcgtgttctacaggactggaatgccttgaaatctatgattatgtttgggtcgcaggagaataaagaycctcttagtgccagcagtagaataggccatcttttgccagaagagcaagtatacctcaatcagcaaagtggcacaattcggctggactgtttcactcatt

SEQ ID NO: 16197 - DNA, 201 bp, Homo sapiens; identical to SEQ ID NO: 16193

SEQ ID NO: 16198 - DNA, 201 bp, Homo sapiens
agacggtggagcattgtcaatacaggccacctcgaatcagggaagatcgtaaccgaaaaacagccagtcctgaagattcagatatgccagatcatgatttrgagcctccaagatttgcccagcttgcattggagcgtgttctacaggactggaatgccttgaaatctatgattatgtttgggtcgcaggagaataaagacc

SEQ ID NO: 16199 - DNA, 201 bp, Homo sapiens
ttaccacagcagcaaccggtactggtcaaggaccaagcacctccactattccaggtccttccacagagccatctgtagtagaatccaaggatcgaaaggcraatgctcattttatattgaaattgttatgtgacagtgtggttctccagccctatctacgagaacttctttctgccaaggatgcaagagggatgaccccat

SEQ ID NO: 16200 - DNA, 201 bp, Homo sapiens
acatgcaatgaggaaaggtctactagatgtgcttccaaaaaattcattagaagatttaacggcagaagattttaggcttttggtaaatggctgcggtgaaktcaatgtgcaaatgctgatcagttttacctctttcaatgatgaatcaggagaaaatgctgagaagcttctgcagttcaagcgttggttctggtcaatagt

SEQ ID NO: 16201 - DNA, 201 bp, Homo sapiens
gttcagtggcaagagtttttgttattctgagtgtggaaatggcttcatccaaaaagaaaaacaactttattccacagccaattggaaaatgcaagcgtgtrttccaagcattgctaccttacgctgtggaagaattgtgcaacgtagcagagtcactgattgttcctgtcagaatggggattgctcgtccaactgcaccat

SEQ ID NO: 16202 - DNA, 201 bp, Homo sapiens
gaaacattggcaggattcttggactatgtctgttacagaatgaactatgtcctatcacattgaatagacatgtaattaaagtattgcttggtagaaaagtsaattggcatgattttgctttttttgatcctgtaatgtatgagagtttgcggcaactaatcctcgcgtctcagagttcagatgctgatgctgttttctcag

SEQ ID NO: 16203 - DNA, 201 bp, Homo sapiens
gattttatactccaaggcctggcaagaacacagaagcaaggttgaattgtttcagaaacattggcaggattcttggactatgtctgttacagaatgaactmtgtcctatcacattgaatagacatgtaattaaagtattgcttggtagaaaagtcaattggcatgattttgctttttttgatcctgtaatgtatgagagtt

SEQ ID NO: 16204 - DNA, 201 bp, Homo sapiens
actctggtttaagtagctttattcagtggcataataacactgttttcttccttaagtcttcaatgaagtgacttaaaacagtcactttacatattaaaaaygaggagagcaattctctggaatctctcctttcagttcctttgtaggatttctggccttgaggatagtcttcatgttcaaaggcactatgcttttattata

SEQ ID NO: 16205 - DNA, 201 bp, Homo sapiens
tatattggtttgctagtcaccaacttctgggtctaaccccagccaaagatgacagcagaacaacataatttacactgtgatttatctttttgctgaggggraaaaaatgtaaatgttctgaaaattcactgctgcctttgtggaaactgtttcagcaaaggttcttgtatagagggaatagggaatttcaaaataaaaaat

SEQ ID NO: 16206 - DNA, 201 bp, Homo sapiens; identical to SEQ ID NO: 16194

SEQ ID NO: 16207 - DNA, 201 bp, Homo sapiens; identical to SEQ ID NO: 16195

SEQ ID NO: 16208 - DNA, 201 bp, Homo sapiens; identical to SEQ ID NO: 16196

SEQ ID NO: 16209 - DNA, 201 bp, Homo sapiens; identical to SEQ ID NO: 16193

SEQ ID NO: 16210 - DNA, 201 bp, Homo sapiens; identical to SEQ ID NO: 16198

SEQ ID NO: 16211 - DNA, 201 bp, Homo sapiens; identical to SEQ ID NO: 16199

SEQ ID NO: 16212 - DNA, 201 bp, Homo sapiens; identical to SEQ ID NO: 16200

SEQ ID NO: 16213 - DNA, 201 bp, Homo sapiens; identical to SEQ ID NO: 16201

SEQ ID NO: 16214 - DNA, 201 bp, Homo sapiens; identical to SEQ ID NO: 16202

SEQ ID NO: 16215 - DNA, 201 bp, Homo sapiens; identical to SEQ ID NO: 16203

SEQ ID NO: 16216 - DNA, 201 bp, Homo sapiens; identical to SEQ ID NO: 16204

SEQ ID NO: 16217 - DNA, 201 bp, Homo sapiens; identical to SEQ ID NO: 16205

SEQ ID NO: 16218 - DNA, 201 bp, Homo sapiens; identical to SEQ ID NO: 16194

SEQ ID NO: 16219 - DNA, 201 bp, Homo sapiens; identical to SEQ ID NO: 16195

SEQ ID NO: 16220 - DNA, 201 bp, Homo sapiens; identical to SEQ ID NO: 16196

SEQ ID NO: 16221 - DNA, 201 bp, Homo sapiens; identical to SEQ ID NO: 16193

SEQ ID NO: 16222 - DNA, 201 bp, Homo sapiens; identical to SEQ ID NO: 16198

SEQ ID NO: 16223 - DNA, 201 bp, Homo sapiens; identical to SEQ ID NO: 16199

SEQ ID NO: 16224 - DNA, 201 bp, Homo sapiens; identical to SEQ ID NO: 16200

SEQ ID NO: 16225 - DNA, 201 bp, Homo sapiens; identical to SEQ ID NO: 16201

SEQ ID NO: 16226 - DNA, 201 bp, Homo sapiens; identical to SEQ ID NO: 16202

SEQ ID NO: 16227 - DNA, 201 bp, Homo sapiens; identical to SEQ ID NO: 16203

SEQ ID NO: 16228 - DNA, 201 bp, Homo sapiens; identical to SEQ ID NO: 16204

SEQ ID NO: 16229 - DNA, 201 bp, Homo sapiens; identical to SEQ ID NO: 16205

SEQ ID NO: 16230 - DNA, 201 bp, Homo sapiens
cagtctgtcaggagcacatgcccaaaagatctgcaaaatcatggaccaggccataacggtgggggctccagtgattgggctgaatgactctgggggagcayggatccaagaaggagtggagtctttggctggctatgcagacatctttctgaggaatgttacggcatccggagtcatccctcagatttctctgatcatggg

SEQ ID NO: 16231 - DNA, 138 bp, Homo sapiens
attacgggtggcggcggtcggggcaaggctcagcgttmtggcgagcggtctccgcgccgcggtccgcagcctttgcagccaggccacctctgttaacgaacgcatcgaaaacaagcgccggaccgcgctgctgggagg

SEQ ID NO: 16232 - DNA, 201 bp, Homo sapiens
ggggcaaggctcagcgttctggcgagcggtctccgcgccgcggtccgcagcctttgcagccaggccacctctgttaacgaacgcatcgaaaacaagcgccsgaccgcgctgctgggagggggccaacgccgtattgacgcgcagcacaagcgagattttacagtttttggaggcagtctgtcaggagcacatgcccaaaag

SEQ ID NO: 16233 - DNA, 201 bp, Homo sapiens
aggagcacatgcccaaaagatctgcaaaatcatggaccaggccataacggtgggggctccagtgattgggctgaatgactctgggggagcacggatccaaraaggagtggagtctttggctggctatgcagacatctttctgaggaatgttacggcatccggagtcatccctcagatttctctgatcatgggcccatgtgc

SEQ ID NO: 16234 - DNA, 201 bp, Homo sapiens
tctttggctggctatgcagacatctttctgaggaatgttacggcatccggagtcatccctcagatttctctgatcatgggcccatgtgctggtggggccgwctactccccagccctaacagacttcacgttcatggtaaaggacacctcctacctgttcatcactggccctgatgttgtgaagtctgtcaccaatgaggat

SEQ ID NO: 16235 - DNA, 201 bp, Homo sapiens
cggatccaagaaggagtggagtctttggctggctatgcagacatctttctgaggaatgttacggcatccggagtcatccctcagatttctctgatcatggrcccatgtgctggtggggccgtctactccccagccctaacagacttcacgttcatggtaaaggacacctcctacctgttcatcactggccctgatgttgtg

SEQ ID NO: 16236 - DNA, 201 bp, Homo sapiens
agtctgtcaggagcacatgcccaaaagatctgcaaaatcatggaccaggccataacggtgggggctccagtgattgggctgaatgactctgggggagcacrgatccaagaaggagtggagtctttggctggctatgcagacatctttctgaggaatgttacggcatccggagtcatccctcagatttctctgatcatgggc

SEQ ID NO: 16237 - DNA, 191 bp, Homo sapiens
gtactcaggtgcgccggtaggggacgcgccggcacagcaaaaatggcggcggcattacgggtggcggcggtcggggcaaggctcagcgttmtggcgagcggtctccgcgccgcggtccgcagcctttgcagccaggccacctctgttaacgaacgcatcgaaaacaagcgccggaccgcgctgctgggagg

SEQ ID NO: 16238 - DNA, 201 bp, Homo sapiens
cctggctttctacctggcacagcacaggaatacgggggcatcatccggcatggtgccaagcttctctacgcatttgctgaggcaactgtacccaaagtcayagtcatcaccaggaaggcctatggaggtgcctatgatgtcatgagctctaagcacctttgtggtgataccaactatgcctggcccaccgcagagattgca

SEQ ID NO: 16239 - DNA, 201 bp, Homo sapiens
ggagcaaagggcgctgtggagatcatcttcaaagggcatgagaatgtggaagctgctcaggcagagtacatcgagaagtttgccaaccctttccctgcagyagtgcgagggtttgtggatgacatcatccaaccttcttccacacgtgcccgaatctgctgtgacctggatgtcttggccagcaagaaggtacaacgtcct

SEQ ID NO: 16240 - DNA, 201 bp, Homo sapiens
aaagggcgctgtggagatcatcttcaaagggcatgagaatgtggaagctgctcaggcagagtacatcgagaagtttgccaaccctttccctgcagcagtgygagggtttgtggatgacatcatccaaccttcttccacacgtgcccgaatctgctgtgacctggatgtcttggccagcaagaaggtacaacgtccttggag

SEQ ID NO: 16241 - DNA, 201 bp, Homo sapiens
ggggcaaggctcagcgttctggcgagcggtctccgcgccgcggtccgcagcctttgcagccaggccacctctgttaacgaacgcatcgaaaacaagcgccsgaccgcgctgctgggagggggccaacgccgtattgacgcgcagcacaagcgaggaaagctaacagccagggagaggatcagtctcttgctggaccctggc

SEQ ID NO: 16242 - DNA, 201 bp, Homo sapiens; identical to SEQ ID NO: 16233

SEQ ID NO: 16243 - DNA, 106 bp, Homo sapiens
gtactyaggtgcgccggtaggggacgcgccggcacagcaaaaatggcggcggcattacgggtggcggcggtcggggcaaggctcagcgttctggcgagcggtctcc

SEQ ID NO: 16244 - DNA, 201 bp, Homo sapiens
tgcgagggtttgtggatgacatcatccaaccttcttccacacgtgcccgaatctgctgtgacctggatgtcttggccagcaagaaggtacaacgtccttgragaaaacatgcaaatattccattgtaaacaaatcaaaggaaaagaaaccaagaactgaattactgtctgcccattcacatcccattcctgccttttgcaa

SEQ ID NO: 16245 - DNA, 201 bp, Homo sapiens; identical to SEQ ID NO: 16230

SEQ ID NO: 16246 - DNA, 201 bp, Homo sapiens
ggatgacatcatccaaccttcttccacacgtgcccgaatctgctgtgacctggatgtcttggccagcaagaaggtacaacgtccttggagaaaacatgcaratattccattgtaaacaaatcaaaggaaaagaaaccaagaactgaattactgtctgcccattcacatcccattcctgccttttgcaatcatgaaacctgg

SEQ ID NO: 16247 - DNA, 201 bp, Homo sapiens; identical to SEQ ID NO: 16234

SEQ ID NO: 16248 - DNA, 201 bp, Homo sapiens; identical to SEQ ID NO: 16236

SEQ ID NO: 16249 - DNA, 201 bp, Homo sapiens
gcacaggaatacgggggcatcatccggcatggtgccaagcttctctacgcatttgctgaggcaactgtacccaaagtcacagtcatcaccaggaaggcctrtggaggtgcctatgatgtcatgagctctaagcacctttgtggtgataccaactatgcctggcccaccgcagagattgcagtcatgggagcaaagggcgct

SEQ ID NO: 16250 - DNA, 201 bp, Homo sapiens
gggggcatcatccggcatggtgccaagcttctctacgcatttgctgaggcaactgtacccaaagtcacagtcatcaccaggaaggcctatggaggtgcctrtgatgtcatgagctctaagcacctttgtggtgataccaactatgcctggcccaccgcagagattgcagtcatgggagcaaagggcgctgtggagatcatc

SEQ ID NO: 16251 - DNA, 201 bp, Homo sapiens
agctgctcaggcagagtacatcgagaagtttgccaaccctttccctgcagcagtgcgagggtttgtggatgacatcatccaaccttcttccacacgtgccygaatctgctgtgacctggatgtcttggccagcaagaaggtacaacgtccttggagaaaacatgcaaatattccattgtaaacaaatcaaaggaaaagaaa

SEQ ID NO: 16252 - DNA, 201 bp, Homo sapiens
ctatggaggtgcctatgatgtcatgagctctaagcacctttgtggtgataccaactatgcctggcccaccgcagagattgcagtcatgggagcaaagggcrctgtggagatcatcttcaaagggcatgagaatgtggaagctgctcaggcagagtacatcgagaagtttgccaaccctttccctgcagcagtgcgagggtt

SEQ ID NO: 16253 - DNA, 201 bp, Homo sapiens; identical to SEQ ID NO: 16235

SEQ ID NO: 16254 - DNA, 201 bp, Homo sapiens
tacatcgagaagtttgccaaccctttccctgcagcagtgcgagggtttgtggatgacatcatccaaccttcttccacacgtgcccgaatctgctgtgaccyggatgtcttggccagcaagaaggtacaacgtccttggagaaaacatgcaaatattccattgtaaacaaatcaaaggaaaagaaaccaagaactgaattac

SEQ ID NO: 16255 - DNA, 201 bp, Homo sapiens
gagctgatgatactctcttcatgatgaaggaattggctggtgccaaggtggaacggccgccttctccattctccatggccccacaagcttcccttcccccrgtgccaccacgacttgaccttctgccgcagcgagtatgtgttccctcaagtgcttctgctcttggaactgcttctaaggctgcttctggctcccttcata

SEQ ID NO: 16256 - DNA, 201 bp, Homo sapiens
tcaactctgaacggaaagctggcagctgtcagcaaggtagtggtcctgccgcctctgctgccaccgcctcacctcagctctccagtgagatcgagaacctyatgagtcaggggtactcctaccaggacatccagaaagctttggtcattgcccagaacaacatcgagatggccaaaaacatcctccgggaatttgtttcca

SEQ ID NO: 16257 - DNA, 201 bp, Homo sapiens
gttcccaagttcccgagaggcctccaaaaccattcccgcggagaatcaactctgaacggaaagctggcagctgtcagcaaggtagtggtcctgccgcctcwgctgccaccgcctcacctcagctctccagtgagatcgagaacctcatgagtcaggggtactcctaccaggacatccagaaagctttggtcattgcccaga

SEQ ID NO: 16258 - DNA, 201 bp, Homo sapiens
aaagaatgtatgaggagaattctcagcctaggcgaaacctaaccaaactgtccctcatcttcagccacatgctggcagaactaaaaggaatctttccaagyggactctttcagggagacacatttcggattactaaagcagatgctgcggaattttggagaaaagcttttggggaaaagacaatagtcccttggaagagct

SEQ ID NO: 16259 - DNA, 201 bp, Homo sapiens
gatgtgaaattaaaggtactgaacccatcgtggtagatccgtttgatcctagagggagtggcagcctgttgaggcaaggagcagagggagctccctccccmaattatgatgatgatgatgatgaacgagctgatgatactctcttcatgatgaaggaattggctggtgccaaggtggaacggccgccttctccattctcca

SEQ ID NO: 16260 - DNA, 201 bp, Homo sapiens
acctttggtgaagggaatttggccgcagcccatgccaacactggtcccgaggagtcagaaaatgaggatgatgggtatgatgtcccaaagccacctgtgcyggccgtgctggcccgccgaactctctcagatatctctaatgccagctcctcctttggctggttgtctctggatggtgatcctacaacaaatgtcactgaa

SEQ ID NO: 16261 - DNA, 201 bp, Homo sapiens
ctaccaggacatccagaaagctttggtcattgcccagaacaacatcgagatggccaaaaacatcctccgggaatttgtttccatttcttctcctgcccatrtagctacctagcacaccatctccctgctgcaggtttagaggaccagtgagttgggagttattactcaagtggcacctagaagggcaggagttcctttggt

SEQ ID NO: 16262 - DNA, 201 bp, Homo sapiens
tgaagtttccataattcctgggctccagaaagaagaaaaggcggccgtggagagacgaagacttcatgtgctgaaagctctgaagaagctaaggattgagsctgatgaggccccagttgttgctgtgctgggctcaggcggaggactgcgggctcacattgcctgccttggggtcctgagtgagatgaaagaacagggcct

SEQ ID NO: 16263 - DNA, 201 bp, Homo sapiens
tacccgacaggagtgggacttggctaagagcctacagaaaaccatccaagcagcgaggtctgagaattactctctgaccgacttctgggcctacatggttrtctctaagcaaaccagagaactgccggagtctcatttgtccaatatgaagaagcccgtggaagaagggacactaccctacccgatatttgcagccattga

SEQ ID NO: 16264 - DNA, 201 bp, Homo sapiens
ccccgcagtcttcacccgcggagattccggctgaaggagctgtccagcgactacaccgctaagcgcagggagcccaagcctccgcaccggattccggagcmcaagctccaccgcgcatgcgcacacgccccagacccaggctcaggcaagccgactgagaattttctgaccgcagtgcaccatgggaaggtaactctgaag

SEQ ID NO: 16265 - DNA, 201 bp, Homo sapiens
ggacttggctaagagcctacagaaaaccatccaagcagcgaggtctgagaattactctctgaccgacttctgggcctacatggttatctctaagcaaaccrgagaactgccggagtctcatttgtccaatatgaagaagcccgtggaagaagggacactaccctacccgatatttgcagccattgacaatgacctgcaacc

SEQ ID NO: 16266 - DNA, 201 bp, Homo sapiens
aatgatggtgacatggaagctctcgaggctgacctgaaacatcgatttacccgacaggagtgggacttggctaagagcctacagaaaaccatccaagcagygaggtctgagaattactctctgaccgacttctgggcctacatggttatctctaagcaaaccagagaactgccggagtctcatttgtccaatatgaagaag

SEQ ID NO: 16267 - DNA, 201 bp, Homo sapiens
atttacccgacaggagtgggacttggctaagagcctacagaaaaccatccaagcagcgaggtctgagaattactctctgaccgacttctgggcctacatgkttatctctaagcaaaccagagaactgccggagtctcatttgtccaatatgaagaagcccgtggaagaagggacactaccctacccgatatttgcagccat

SEQ ID NO: 16268 - DNA, 201 bp, Homo sapiens
aagagcctacagaaaaccatccaagcagcgaggtctgagaattactctctgaccgacttctgggcctacatggttatctctaagcaaaccagagaactgcyggagtctcatttgtccaatatgaagaagcccgtggaagaagggacactaccctacccgatatttgcagccattgacaatgacctgcaaccttcctggcag

SEQ ID NO: 16269 - DNA, 188 bp, Homo sapiens
tctgggcctacatggttatctctaagcaaaccagagaactgccggagtctcatttgtccaatatgaagaagcccgtggaagaagggacactaccctacccratatttgcagccattgacaatgacctgcaaccttcctggcaggaggcaagagcaccaggtaagcaaacatttagagggagggagagg

SEQ ID NO: 16270 - DNA, 201 bp, Homo sapiens; identical to SEQ ID NO: 16263

SEQ ID NO: 16271 - DNA, 201 bp, Homo sapiens
ccccgcagtcttcacccgcggagattccggctgaaggagctgtccagcgactacaccgctaagcgcagggagcccaagcctccgcaccggattccggagcmcaagctccaccgcgcatgcgcacacgccccagacccaggctcagagtttcactcttgttgcccagactggagtgcaatggcatgatctctgctcactggc

SEQ ID NO: 16272 - DNA, 201 bp, Homo sapiens; identical to SEQ ID NO: 16265

SEQ ID NO: 16273 - DNA, 201 bp, Homo sapiens
tccccaagtagaagaggctgagctggatttgtggtccaaggcccccgccagctgctacatcctgaaaggagaaactggaccagtggtgatgcattttcccytgttcaacatagatgcctgtggaggtgatattgaggcatggagtgacacatacgacacattcaagcttgctgacacctacactctagatgtggtggtgct

SEQ ID NO: 16274 - DNA, 201 bp, Homo sapiens
gttggtctactagggccctgaagtccacctggccttcctgttcttcactcccttcagccacacgcttcatggccttgagttcaccttggctgtcctaacarggccaatcaccagtgaccagctagactgtgattttgatagcgtcattcagaagaaggcgtccaaggagctgaaggtggtgaaatttgtcctgcaggtccc

SEQ ID NO: 16275 - DNA, 201 bp, Homo sapiens
aaggcgtccaaggagctgaaggtggtgaaatttgtcctgcaggtccctcgggagatcctggagctggagcatgagtgtctgacaatcagaagcatcatgtycaatgtccagatggccagaatgaatgtgatagttcagaccaatgccttccactgctcctttatgactgcacttctagccagtagctctgcacaagttagc

SEQ ID NO: 16276 - DNA, 201 bp, Homo sapiens; identical to SEQ ID NO: 16266

SEQ ID NO: 16277 - DNA, 201 bp, Homo sapiens; identical to SEQ ID NO: 16267

SEQ ID NO: 16278 - DNA, 201 bp, Homo sapiens; identical to SEQ ID NO: 16268

SEQ ID NO: 16279 - DNA, 201 bp, Homo sapiens
tctgggcctacatggttatctctaagcaaaccagagaactgccggagtctcatttgtccaatatgaagaagcccgtggaagaagggacactaccctacccratatttgcagccattgacaatgacctgcaaccttcctggcaggaggcaagagcaccagagacctggttcgagttcacccctcaccacgctggcttctctg

SEQ ID NO: 16280 - DNA, 201 bp, Homo sapiens
ggccaatcaccagtgaccagctagactgtgattttgatagcgtcattcagaagaaggcgtccaaggagctgaaggtggtgaaatttgtcctgcaggtcccycgggagatcctggagctggagcatgagtgtctgacaatcagaagcatcatgtccaatgtccagatggccagaatgaatgtgatagttcagaccaatgcct

SEQ ID NO: 16281 - DNA, 201 bp, Homo sapiens
ggctctactacccgaaggatagtgcccgaagttgctgcttggcatagatgagcctcagcttccagggcactgtgggcctgttggtctactagggccctgawgtccacctggccttcctgttcttcactcccttcagccacacgcttcatggccttgagttcaccttggctgtcctaacagggccaatcaccagtgaccagc

SEQ ID NO: 16282 - DNA, 201 bp, Homo sapiens
gattactgaggctgcaagaaagttcacaaggggaacatcctcccccagaagatgaaggcggtgagcctgaacacacctggctgactgagatgctcgagaaytggaccaggacctccctggaaaagcaggagcagccccatgaggaccccgaaaggaaaggctcactcagtaacttgatggattttgtgaagaaaacaggca

SEQ ID NO: 16283 - DNA, 201 bp, Homo sapiens
cacacgcttcatggccttgagttcaccttggctgtcctaacagggccaatcaccagtgaccagctagactgtgattttgatagcgtcattcagaagaaggygtccaaggagctgaaggtggtgaaatttgtcctgcaggtccctcgggagatcctggagctggagcatgagtgtctgacaatcagaagcatcatgtccaat

SEQ ID NO: 16284 - DNA, 201 bp, Homo sapiens
gccatcaacactcccttcccactcgtgctgcccccgacgcgggaggttcacctcatcctctccttcgacttcagtgccggagatcctttcgagaccatccrggctaccactgactactgccgccgccacaagatcccctttccccaagtagaagaggctgagctggatttgtggtccaaggcccccgccagctgctacatc

SEQ ID NO: 16285 - DNA, 201 bp, Homo sapiens
cccgatatttgcagccattgacaatgacctgcaaccttcctggcaggaggcaagagcaccagagacctggttcgagttcacccctcaccacgctggcttcyctgcactgggggcctttgtttccataacccacttcggaagcaaattcaagaagggaagactggtcagaactcaccctgagagagacctgactttcctgag

SEQ ID NO: 16286 - DNA, 201 bp, Homo sapiens
gttgatgaacgtggccgggctctactacccgaaggatagtgcccgaagttgctgcttggcatagatgagcctcagcttccagggcactgtgggcctgttgrtctactagggccctgaagtccacctggccttcctgttcttcactcccttcagccacacgcttcatggccttgagttcaccttggctgtcctaacagggcc

SEQ ID NO: 16287 - DNA, 201 bp, Homo sapiens
gcagccccatgaggaccccgaaaggaaaggctcactcagtaacttgatggattttgtgaagaaaacaggcatttgcgcttcaaagtgggaatgggggaccmctcacaacttcctgtacaaacacgagtttgactcttttcatcagcaagaggaaccattcccagaggtactgtcttagtctgctcaggctgctgtgacaaa

SEQ ID NO: 16288 - DNA, 201 bp, Homo sapiens; identical to SEQ ID NO: 16262

SEQ ID NO: 16289 - DNA, 201 bp, Homo sapiens
ccttcccactcgtgctgcccccgacgcgggaggttcacctcatcctctccttcgacttcagtgccggagatcctttcgagaccatccgggctaccactgaytactgccgccgccacaagatcccctttccccaagtagaagaggctgagctggatttgtggtccaaggcccccgccagctgctacatcctgaaaggagaaa

SEQ ID NO: 16290 - DNA, 201 bp, Homo sapiens
tgagttcaccttggctgtcctaacagggccaatcaccagtgaccagctagactgtgattttgatagcgtcattcagaagaaggcgtccaaggagctgaagrtggtgaaatttgtcctgcaggtccctcgggagatcctggagctggagcatgagtgtctgacaatcagaagcatcatgtccaatgtccagatggccagaat

SEQ ID NO: 16291 - DNA, 201 bp, Homo sapiens; identical to SEQ ID NO: 16263

SEQ ID NO: 16292 - DNA, 201 bp, Homo sapiens; identical to SEQ ID NO: 16271

SEQ ID NO: 16293 - DNA, 201 bp, Homo sapiens; identical to SEQ ID NO: 16265

SEQ ID NO: 16294 - DNA, 201 bp, Homo sapiens; identical to SEQ ID NO: 16273

SEQ ID NO: 16295 - DNA, 201 bp, Homo sapiens; identical to SEQ ID NO: 16266

SEQ ID NO: 16296 - DNA, 201 bp, Homo sapiens; identical to SEQ ID NO: 16275

SEQ ID NO: 16297 - DNA, 201 bp, Homo sapiens; identical to SEQ ID NO: 16274

SEQ ID NO: 16298 - DNA, 201 bp, Homo sapiens; identical to SEQ ID NO: 16279

SEQ ID NO: 16299 - DNA, 201 bp, Homo sapiens; identical to SEQ ID NO: 16268

SEQ ID NO: 16300 - DNA, 201 bp, Homo sapiens; identical to SEQ ID NO: 16267

SEQ ID NO: 16301 - DNA, 201 bp, Homo sapiens; identical to SEQ ID NO: 16280

SEQ ID NO: 16302 - DNA, 201 bp, Homo sapiens; identical to SEQ ID NO: 16281

SEQ ID NO: 16303 - DNA, 201 bp, Homo sapiens; identical to SEQ ID NO: 16284

SEQ ID NO: 16304 - DNA, 201 bp, Homo sapiens; identical to SEQ ID NO: 16282

SEQ ID NO: 16305 - DNA, 201 bp, Homo sapiens; identical to SEQ ID NO: 16283

SEQ ID NO: 16306 - DNA, 201 bp, Homo sapiens; identical to SEQ ID NO: 16285

SEQ ID NO: 16307 - DNA, 201 bp, Homo sapiens; identical to SEQ ID NO: 16286

SEQ ID NO: 16308 - DNA, 201 bp, Homo sapiens
gcagccccatgaggaccccgaaaggaaaggctcactcagtaacttgatggattttgtgaagaaaacaggcatttgcgcttcaaagtgggaatgggggaccmctcacaacttcctgtacaaacacggtggcatccgggacaagataatgagcagccggaagcacctccacctggtggatgctggtttagccatcaacactcc

SEQ ID NO: 16309 - DNA, 201 bp, Homo sapiens; identical to SEQ ID NO: 16262

SEQ ID NO: 16310 - DNA, 201 bp, Homo sapiens; identical to SEQ ID NO: 16290

SEQ ID NO: 16311 - DNA, 201 bp, Homo sapiens; identical to SEQ ID NO: 16289

SEQ ID NO: 16312 - DNA, 201 bp, Homo sapiens; identical to SEQ ID NO: 16263

SEQ ID NO: 16313 - DNA, 201 bp, Homo sapiens
ccccgcagtcttcacccgcggagattccggctgaaggagctgtccagcgactacaccgctaagcgcagggagcccaagcctccgcaccggattccggagcmcaagctccaccgcgcatgcgcacacgccccagacccaggctcaggaggactgagaattttctgaccgcagtgcaccatgggaagctctgaagtttccata

SEQ ID NO: 16314 - DNA, 201 bp, Homo sapiens; identical to SEQ ID NO: 16265

SEQ ID NO: 16315 - DNA, 201 bp, Homo sapiens; identical to SEQ ID NO: 16273

SEQ ID NO: 16316 - DNA, 201 bp, Homo sapiens; identical to SEQ ID NO: 16266

SEQ ID NO: 16317 - DNA, 201 bp, Homo sapiens; identical to SEQ ID NO: 16275

SEQ ID NO: 16318 - DNA, 201 bp, Homo sapiens; identical to SEQ ID NO: 16274

SEQ ID NO: 16319 - DNA, 201 bp, Homo sapiens; identical to SEQ ID NO: 16279

SEQ ID NO: 16320 - DNA, 201 bp, Homo sapiens; identical to SEQ ID NO: 16268

SEQ ID NO: 16321 - DNA, 201 bp, Homo sapiens; identical to SEQ ID NO: 16267

SEQ ID NO: 16322 - DNA, 201 bp, Homo sapiens; identical to SEQ ID NO: 16280

SEQ ID NO: 16323 - DNA, 201 bp, Homo sapiens; identical to SEQ ID NO: 16281

SEQ ID NO: 16324 - DNA, 201 bp, Homo sapiens; identical to SEQ ID NO: 16284

SEQ ID NO: 16325 - DNA, 201 bp, Homo sapiens; identical to SEQ ID NO: 16282

SEQ ID NO: 16326 - DNA, 201 bp, Homo sapiens; identical to SEQ ID NO: 16283

SEQ ID NO: 16327 - DNA, 201 bp, Homo sapiens; identical to SEQ ID NO: 16285

SEQ ID NO: 16328 - DNA, 201 bp, Homo sapiens; identical to SEQ ID NO: 16286

SEQ ID NO: 16329 - DNA, 201 bp, Homo sapiens; identical to SEQ ID NO: 16308

SEQ ID NO: 16330 - DNA, 201 bp, Homo sapiens; identical to SEQ ID NO: 16262

SEQ ID NO: 16331 - DNA, 201 bp, Homo sapiens; identical to SEQ ID NO: 16290

SEQ ID NO: 16332 - DNA, 201 bp, Homo sapiens; identical to SEQ ID NO: 16289

SEQ ID NO: 16333 - DNA, 201 bp, Homo sapiens
tcgcggggccttcctccggaaaggggtctgtggcgactggaagaaccacttcacggtggcccagagcgaagccttcgatcgtgcctaccgcaagcagatgsgggggatgccgaccttcccctgggatgaagacccggaggaggacggcagcccagatcctgagcccagccctgagcctgagcccaagcccagccttgagcc

SEQ ID NO: 16334 - DNA, 201 bp, Homo sapiens
accacttcacggtggcccagagcgaagccttcgatcgtgcctaccgcaagcagatgcgggggatgccgaccttcccctgggatgaagacccggaggaggayggcagcccagatcctgagcccagccctgagcctgagcccaagcccagccttgagcccaacaccagcctggagcgtgagcccagacccaactccagcccca

SEQ ID NO: 16335 - DNA, 201 bp, Homo sapiens
atttatcacctacgaggagctgcagcaggacttacagggctccgtggagcgcatctgtgggttcctgggccgtccgctgggcaaggaggcactgggctccrtcgtggcacactcaaccttcagcgccatgaaggccaacaccatgtccaactacacgctgctgcctcccagcctgctggaccaccgtcgcggggccttcct

SEQ ID NO: 16336 - DNA, 201 bp, Homo sapiens
cctcaaaggcgaagtgcagtttggctcctggttcgaccacattaagggctggcttcggatgaagggcaaagacaacttcctatttatcacctacgaggagytgcagcaggacttacagggctccgtggagcgcatctgtgggttcctgggccgtccgctgggcaaggaggcactgggctccgtcgtggcacactcaacctt

SEQ ID NO: 16337 - DNA, 201 bp, Homo sapiens
tcgagatcatctgcttaatcctgaaggaaggggatccatcctggatccgctccgtgcccatctgggagcgggcaccctggtgtgagaccattgtgggtgcyttcagcctcccggaccagtacagcccccgcctcatgagctcccatcttcccatccagatcttcaccaaggccttcttcagctccaaggccaaggtgatct

SEQ ID NO: 16338 - DNA, 201 bp, Homo sapiens
ccttcagcgccatgaaggccaacaccatgtccaactacacgctgctgcctcccagcctgctggaccaccgtcgcggggccttcctccggaaaggggtctgyggcgactggaagaaccacttcacggtggcccagagcgaagccttcgatcgtgcctaccgcaagcagatgcgggggatgccgaccttcccctgggatgaag

SEQ ID NO: 16339 - DNA, 201 bp, Homo sapiens
cagcacccacctccctactctccctcatggcgtctcccccacctttccacagccagaagttgccaggtgaatacttccggtacaagggcgtccccttcccygtcggcctgtactcgctcgagagcatcagcttggcggagaacacccaagatgtgcgggacgacgacatctttatcatcacctaccccaagtcaggcacga

SEQ ID NO: 16340 - DNA, 143 bp, Homo sapiens
ccgtgatctcggctcactgcaacctccgcctcctgggttcaarcgattctcctgcctcagcctccggagtaactgggagtacaggcatgcgccaccacgcctggctgatttttgtctttttagtaggggcggggtttcaccat

SEQ ID NO: 16341 - DNA, 187 bp, Homo sapiens
gacccggaggaggacggcagcccagatcctgagcccagccctgagcctgagcccaagcccagccttgagcccaacaccagcctggagcgtgagcccagacycaactccagccccagccccagccccggccaggcctctgagaccccgcacccacgaccctcataataaacacgtcgattctgtccag

SEQ ID NO: 16342 - DNA, 201 bp, Homo sapiens; identical to SEQ ID NO: 16333

SEQ ID NO: 16343 - DNA, 201 bp, Homo sapiens
cccagatcccgggcttgtgggacacctatgaagatgacatctcggaaatcagccagaagttgccaggtgaatacttccggtacaagggcgtccccttcccygtcggcctgtactcgctcgagagcatcagcttggcggagaacacccaagatgtgcgggacgacgacatctttatcatcacctaccccaagtcaggcacga

SEQ ID NO: 16344 - DNA, 201 bp, Homo sapiens; identical to SEQ ID NO: 16334

SEQ ID NO: 16345 - DNA, 201 bp, Homo sapiens; identical to SEQ ID NO: 16335

SEQ ID NO: 16346 - DNA, 201 bp, Homo sapiens; identical to SEQ ID NO: 16336

SEQ ID NO: 16347 - DNA, 122 bp, Homo sapiens
aggtggcagacgctgtcgctgygcacacctggcctctgtgccgcctgctccctgctcgtcctcccctccccaccctcacccacctgccatggacgggcccgccgagccccagatcccgggct

SEQ ID NO: 16348 - DNA, 201 bp, Homo sapiens; identical to SEQ ID NO: 16337

SEQ ID NO: 16349 - DNA, 201 bp, Homo sapiens
gtggcagacgctgtcgctgcgcacacctggcctctgtgccgcctgctccctgctcgtcctcccctccccaccctcacccacctgccatggacgggcccgcygagccccagatcccgggcttgtgggacacctatgaagatgacatctcggaaatcagccagaagttgccaggtgaatacttccggtacaagggcgtcccct

SEQ ID NO: 16350 - DNA, 187 bp, Homo sapiens; identical to SEQ ID NO: 16341

SEQ ID NO: 16351 - DNA, 201 bp, Homo sapiens; identical to SEQ ID NO: 16338

SEQ ID NO: 16352 - DNA, 201 bp, Homo sapiens
ccagggaaacttcgtgccagggcctcctttctggggcctggtgaatgcagcgtggagtctgtgtgctgtggggaagcggcagagccccgtggatgtggagstgaagagggttctttatgacccctttctgcccccattaaggctcagcactggaggagagaagctccggggaaccttgtacaacaccggccgacatgtctc

SEQ ID NO: 16353 - DNA, 201 bp, Homo sapiens
cgttgggcaggggtccctcggaggcctcctggggatgggggctgcagctcgtctgagcgcccctcgagcgctggtactctgggctgcactgggggcagcasctcacatcggaccagcacctgaccccgaggactggtggagctacaaggataatctccagggaaacttcgtgccagggcctcctttctggggcctggtgaa

SEQ ID NO: 16354 - DNA, 201 bp, Homo sapiens
tgggcaggggtccctcggaggcctcctggggatgggggctgcagctcgtctgagcgcccctcgagcgctggtactctgggctgcactgggggcagcagctmacatcggaccagcacctgaccccgaggactggtggagctacaaggataatctccagggaaacttcgtgccagggcctcctttctggggcctggtgaatgc

SEQ ID NO: 16355 - DNA, 201 bp, Homo sapiens
ttggcccacagggcactgaggggcaacagggacccccggcaccccgagaggcgctgccgaggccccaactaccgcctgcatgcccagtgcttctcgacctrgtacattctggttccccgctcgcagacttccgacgtggatggtgtcccccatggtcgctgagactccccttcgaggattgcacccgcccgtcctaagcct

SEQ ID NO: 16356 - DNA, 201 bp, Homo sapiens; identical to SEQ ID NO: 16352

SEQ ID NO: 16357 - DNA, 201 bp, Homo sapiens; identical to SEQ ID NO: 16353

SEQ ID NO: 16358 - DNA, 201 bp, Homo sapiens; identical to SEQ ID NO: 16354

SEQ ID NO: 16359 - DNA, 201 bp, Homo sapiens
cgaggactggtggagctacaaggataatctccagggaaacttcgtgccagcgtggagtctgtgtgctgtggggaagcggcagagccccgtggatgtggagstgaagagggttctttatgacccctttctgcccccattaaggctcagcactggaggagagaagctccggggaaccttgtacaacaccggccgacatgtctc

SEQ ID NO: 16360 - DNA, 201 bp, Homo sapiens
cgttgggcaggggtccctcggaggcctcctggggatgggggctgcagctcgtctgagcgcccctcgagcgctggtactctgggctgcactgggggcagcasctcacatcggaccagcacctgaccccgaggactggtggagctacaaggataatctccagggaaacttcgtgccagcgtggagtctgtgtgctgtggggaa

SEQ ID NO: 16361 - DNA, 201 bp, Homo sapiens
tgggcaggggtccctcggaggcctcctggggatgggggctgcagctcgtctgagcgcccctcgagcgctggtactctgggctgcactgggggcagcagctmacatcggaccagcacctgaccccgaggactggtggagctacaaggataatctccagggaaacttcgtgccagcgtggagtctgtgtgctgtggggaagcg

SEQ ID NO: 16362 - DNA, 201 bp, Homo sapiens
gctccgctgtccccggacccactgctgtcttcacctcctggctctcccaaggcagctctacactcacccgtctccgaaggggcccccgtaattcccccatyctctgggctcccacttcccacccctgatgcccgggtaggggcctccacctgcggcccgcccgaccacctgctgcctccgctgggcaccccgctgccccca

SEQ ID NO: 16363 - DNA, 201 bp, Homo sapiens
ggcagggctcagtcctgacgcttgccacctgctcctacccggccaggatggctgagggcggagtctattttacgcgtcgcccaatgacaggacctggaatktactggctggggtaggcctcagtgagtcggccggtcagggcccgcagcctcgccccatccactccggtgcctccatttagctggccaatcagcccaggag

SEQ ID NO: 16364 - DNA, 201 bp, Homo sapiens
cccccgtaattcccccatcctctgggctcccacttcccacccctgatgcccgggtaggggcctccacctgcggcccgcccgaccacctgctgcctccgctrggcaccccgctgcccccagactgggtgacgctggagggggactttgtgctcatgttggccatctcgcccagccacctaggcgctgacctggtggcagctc

SEQ ID NO: 16365 - DNA, 201 bp, Homo sapiens
acccaggccgtgttctcgatagctttccggaagaaagggatctgggagcgagatgcgtgtagctagcacgatgcgtcgcgcggtgacgctctggcccgacrccgacggcctctcagtggctcccggaggacccggcgggcccagtgttggagagctgaaggtcaggccaggacagtgagacctgactccttgctcctacca

SEQ ID NO: 16366 - DNA, 201 bp, Homo sapiens
cgttggccgaggtctcaggctgctgcaccctgcgaagccgcagcccctcagactcagcggcctacttctgcatctacacctaccctcggggccggcgcggrgcccggcgcagagccactcgcaccttccgggcagatggggccgccacctacgaagagaaccgtgccgaggcccagcgctgggccactgccctcacctgtc

SEQ ID NO: 16367 - DNA, 201 bp, Homo sapiens; identical to SEQ ID NO: 16362

SEQ ID NO: 16368 - DNA, 201 bp, Homo sapiens
tctactcttccccccacccgccagggaggcccctgcctcttggttctcaggcacattgagcctggaagggcctcctgcagttggctgtcaatgctgctcckcacttacctctcctccacagagctgaaggtcaggccaggacagtgagacctgactccttgctcctaccagcctactatggcttaagacccagggccaggg

SEQ ID NO: 16369 - DNA, 201 bp, Homo sapiens; identical to SEQ ID NO: 16364

SEQ ID NO: 16370 - DNA, 201 bp, Homo sapiens; identical to SEQ ID NO: 16366

SEQ ID NO: 16371 - DNA, 201 bp, Homo sapiens
gtgattaaaatgacttatctactcttccccccacccgccagggaggcccctgcctcttggttctcaggcacattgagcctggaagggcctcctgcagttgrctgtcaatgctgctcctcacttacctctcctccacagagctgaaggtcaggccaggacagtgagacctgactccttgctcctaccagcctactatggctt

SEQ ID NO: 16372 - DNA, 201 bp, Homo sapiens
gctggccggagcagtgaaccagcacgggggcccgcgggaggactcagactccagcacttccagcagcgcctgccctctatggacgacagcccggagctgcycacgggctgcagccagtatgccagggagctgccctcttcttccacaacagctggctctggggttctcaagatttattcaggatcgtgttaacggaggcgg

SEQ ID NO: 16373 - DNA, 201 bp, Homo sapiens; identical to SEQ ID NO: 16368

SEQ ID NO: 16374 - DNA, 201 bp, Homo sapiens
acgggggcccgcgggaggactcagactccagcacttccagcagcgcctgccctctatggacgacagcccggagctgcccacgggctgcagccagtatgccwgggagctgccctcttcttccacaacagctggctctggggttctcaagatttattcaggatcgtgttaacggaggcggtgggaggatagggtccctgacgt

SEQ ID NO: 16375 - DNA, 201 bp, Homo sapiens; identical to SEQ ID NO: 16366

SEQ ID NO: 16376 - DNA, 201 bp, Homo sapiens; identical to SEQ ID NO: 16371

SEQ ID NO: 16377 - DNA, 201 bp, Homo sapiens; identical to SEQ ID NO: 16362

SEQ ID NO: 16378 - DNA, 201 bp, Homo sapiens; identical to SEQ ID NO: 16363

SEQ ID NO: 16379 - DNA, 201 bp, Homo sapiens; identical to SEQ ID NO: 16364

SEQ ID NO: 16380 - DNA, 201 bp, Homo sapiens; identical to SEQ ID NO: 16365

SEQ ID NO: 16381 - DNA, 201 bp, Homo sapiens; identical to SEQ ID NO: 16366

SEQ ID NO: 16382 - DNA, 201 bp, Homo sapiens; identical to SEQ ID NO: 16362

SEQ ID NO: 16383 - DNA, 201 bp, Homo sapiens; identical to SEQ ID NO: 16363

SEQ ID NO: 16384 - DNA, 201 bp, Homo sapiens; identical to SEQ ID NO: 16364

SEQ ID NO: 16385 - DNA, 201 bp, Homo sapiens; identical to SEQ ID NO: 16366

SEQ ID NO: 16386 - DNA, 201 bp, Homo sapiens
caccaaggcttataccagtcagttcatctctctggtgatgtttggtttgatgatgtctgaagaccgaatttcactacaaaacaggaggcaagagatcatcygtggcttgagatctttacctgagctgatcaaggaagtgctgtctctggaggagaagatccacgacttggccctggagctctacacgcagagatcgctgct

SEQ ID NO: 16387 - DNA, 201 bp, Homo sapiens
tcctataagtccagttgaaatctcagcctccttcaacattttcttctcgtgtgtggcccacatccctccacttctccaacttctgtttaatctgatcacgkctctttttaagccctggcagcattttggtccctgctccttgcccatagtaaaacagcttgaaatatcccatgcaagagagtagtttcaagtgggcaactc

SEQ ID NO: 16388 - DNA, 201 bp, Homo sapiens
ggcattcatctcagatgtgagcacaaggcattggccctctggactcctttctccttttctttcctctctaggctgctcctgaatcctgttctctgacatcygtggagcccctcctgcatccacctatgcctcctataagtccagttgaaatctcagcctccttcaacattttcttctcgtgtgtggcccacatccctccac

SEQ ID NO: 16389 - DNA, 201 bp, Homo sapiens
gccagaacgccctgcagcaagtcacggcccgccagggtcgccccattatactgtgctccaaggacgatactgaaagttccaagtttgcgtataagacaatygagctgccccacactgtggactgcctccagggcatcctgagcgtgattccgctgcagctgctgtccttccacctggctgttctccgaggatatgacgttg

SEQ ID NO: 16390 - DNA, 105 bp, Homo sapiens
ggcaactctgctctctatttaaaagcgtgcacaatcaaaagtactatgcaattttaggacaataaagaacatacagtttttttgtgtgtgtttgcattttrttaa

SEQ ID NO: 16391 - DNA, 201 bp, Homo sapiens
ctcctttctccttttctttcctctctaggctgctcctgaatcctgttctctgacatccgtggagcccctcctgcatccacctatgcctcctataagtccarttgaaatctcagcctccttcaacattttcttctcgtgtgtggcccacatccctccacttctccaacttctgtttaatctgatcacggctctttttaagcc

SEQ ID NO: 16392 - DNA, 201 bp, Homo sapiens
ctatcatagagcacaccaaccgggtcatcttcctggaggacgatgacatcgccgcagtggctgatgggaaactctccattcaccgggtcaagcgctcggcyagtgatgacccatctcgagccatccagaccttgcagatggaactgcagcaaatcatgaaaggcaggtgtaacttcagtgcgtttatgcagaaggagatct

SEQ ID NO: 16393 - DNA, 201 bp, Homo sapiens
gagccatccagaccttgcagatggaactgcagcaaatcatgaaaggcaggtgtaacttcagtgcgtttatgcagaaggagatcttcgaacagccagaatcmgttttcaatactatgagaggtcgggtgaattttgaaaccaacacagtgctcctgggtggcttgaaggaccacttgaaggagattcgacgatgccgacggc

SEQ ID NO: 16394 - DNA, 201 bp, Homo sapiens
taaggaccgcggcgctctcaccgtgggcgtcaccaacaccgtgggcagctccatctctcgcgagaccgactgcggcgtccacatcaacgcagggccggagrtcggcgtggccagcaccaaggcttataccagtcagttcatctctctggtgatgtttggtttgatgatgtctgaagaccgaatttcactacaaaacaggag

SEQ ID NO: 16395 - DNA, 201 bp, Homo sapiens; identical to SEQ ID NO: 16386

SEQ ID NO: 16396 - DNA, 201 bp, Homo sapiens; identical to SEQ ID NO: 16387

SEQ ID NO: 16397 - DNA, 201 bp, Homo sapiens; identical to SEQ ID NO: 16388

SEQ ID NO: 16398 - DNA, 201 bp, Homo sapiens; identical to SEQ ID NO: 16389

SEQ ID NO: 16399 - DNA, 105 bp, Homo sapiens; identical to SEQ ID NO: 16390

SEQ ID NO: 16400 - DNA, 201 bp, Homo sapiens; identical to SEQ ID NO: 16391

SEQ ID NO: 16401 - DNA, 201 bp, Homo sapiens
ctatcatagagcacaccaaccgggtcatcttcctggaggacgatgacatcgccgcagtggctgatgggaaactctccattcaccgggtcaagcgctcggcyagtgatgacccatctcgagccatccagaccttgcagatggaactgcagcaaatcatgaaaggtaacttcagtgcgtttatgcagaaggagatcttcgaac

SEQ ID NO: 16402 - DNA, 201 bp, Homo sapiens
catctcgagccatccagaccttgcagatggaactgcagcaaatcatgaaaggtaacttcagtgcgtttatgcagaaggagatcttcgaacagccagaatcmgttttcaatactatgagaggtcgggtgaattttgaaaccaacacagtgctcctgggtggcttgaaggaccacttgaaggagattcgacgatgccgacggc

SEQ ID NO: 16403 - DNA, 201 bp, Homo sapiens; identical to SEQ ID NO: 16394

SEQ ID NO: 16404 - DNA, 149 bp, Homo sapiens
tgctcttcctctcctgggccgtcctctgagcagcagacggggctaagcrttccccagctcgccttcacacacagcccgtgccaccacaccgacggtaccatgaaggacgaggtagctctactggctgctgtcaccctcctgggagtcct

SEQ ID NO: 16405 - DNA, 190 bp, Homo sapiens
tgctcttcctctcctgggccgtcctctgagcagcagacggggctaagcgttccccagctcgccttcacacacagcccgtgccaccacacygacggtaccatgaaggacgaggtagctctactggctgctgtcaccctcctgggagtcctgctgcaagcctacttctccctgcaggtgatctcggcgcgca

SEQ ID NO: 16406 - DNA, 149 bp, Homo sapiens; identical to SEQ ID NO: 16404

SEQ ID NO: 16407 - DNA, 190 bp, Homo sapiens; identical to SEQ ID NO: 16405

SEQ ID NO: 16408 - DNA, 201 bp, Homo sapiens
cggcaatcgcacctggggccgcctaacagaggacccccgattgaagccgtggaacggctcacaccggcacgtgctgcacctgcccaccgtcttccatcacytgccacacctgctggccaaggagagcagtctgcagcccgcggtgcgcgtgggccagggccgcaccggagtgtcggtggtgatgggcatcccgagcgtgcg

SEQ ID NO: 16409 - DNA, 201 bp, Homo sapiens
acttctcccgcctccgagagtcctttggggaccccaaggagagagtcaggtggaggaccaaacagaacctcgattactgcttcctcatgatgtacgcgcastccaaaggcatctactacgtgcagctggaggatgacatcgtggccaagcccaactacctgagcaccatgaagaactttgcactgcagcagccttcagagg

SEQ ID NO: 16410 - DNA, 201 bp, Homo sapiens
tgcttcctcatgatgtacgcgcagtccaaaggcatctactacgtgcagctggaggatgacatcgtggccaagcccaactacctgagcaccatgaagaactytgcactgcagcagccttcagaggactggatgatcctggagttctcccagctgggcttcattggtaagatgttcaagtcgctggacctgagcctgattgta

SEQ ID NO: 16411 - DNA, 201 bp, Homo sapiens
tggacctgagcctgattgtagagttcattctcatgttctaccgggacaagcccatcgactggctcctggaccatattctgtgggtgaaagtctgcaacccygagaaggatgcgaagcactgtgaccggcagaaagccaacctgcggatccgcttcaaaccgtccctcttccagcacgtgggcactcactcctcgctggctg

SEQ ID NO: 16412 - DNA, 201 bp, Homo sapiens
tctctggcgcgaacactggaatgcatatactactttatgtgctgtgttttttattcttggatacatttgattttttcacgtaagtccacatatacttctataagagcgtgacttgtaataaagggttaatgaagtgtgtgcctcaaatgtgagcgccctgggcatctccctctgcccctgcggttggcttcatttggtctg

SEQ ID NO: 16413 - DNA, 201 bp, Homo sapiens
aggaggcaggcggcccccacactgtgcctgaggcccggaaccgttcgcacccggcctgccccagtcaggccgttttagaagagcttttacttgggcgcccsccgtctctggcgcgaacactggaatgcatatactactttatgtgctgtgttttttattcttggatacatttgattttttcacgtaagtccacatatactt

SEQ ID NO: 16414 - DNA, 201 bp, Homo sapiens; identical to SEQ ID NO: 16408

SEQ ID NO: 16415 - DNA, 201 bp, Homo sapiens; identical to SEQ ID NO: 16409

SEQ ID NO: 16416 - DNA, 201 bp, Homo sapiens
tgcttcctcatgatgtacgcgcagtccaaaggcatctactacgtgcagctggaggatgacatcgtggccaagcccaactacctgagcaccatgaagaactytgcactgcagcagccttcagaggactggatgatcctggagttctcccagctgggcttcattgcacgtgggcactcactcctcgctggctggcaagatcca

SEQ ID NO: 16417 - DNA, 201 bp, Homo sapiens; identical to SEQ ID NO: 16412

SEQ ID NO: 16418 - DNA, 201 bp, Homo sapiens; identical to SEQ ID NO: 16413

SEQ ID NO: 16419 - DNA, 201 bp, Homo sapiens; identical to SEQ ID NO: 16408

SEQ ID NO: 16420 - DNA, 201 bp, Homo sapiens; identical to SEQ ID NO: 16409

SEQ ID NO: 16421 - DNA, 201 bp, Homo sapiens; identical to SEQ ID NO: 16410

SEQ ID NO: 16422 - DNA, 201 bp, Homo sapiens; identical to SEQ ID NO: 16411

SEQ ID NO: 16423 - DNA, 149 bp, Homo sapiens
tctctggcgcgaacactggaatgcatatactactttatgtgctgtgttttttattcttggatacatttgattttttcacgtaagtccacatatacttctataagagcgtgacttgtaataaagggttaatgaagtgtgtgcctcaaatg

SEQ ID NO: 16424 - DNA, 201 bp, Homo sapiens; identical to SEQ ID NO: 16413

SEQ ID NO: 16425 - DNA, 201 bp, Homo sapiens; identical to SEQ ID NO: 16408

SEQ ID NO: 16426 - DNA, 201 bp, Homo sapiens; identical to SEQ ID NO: 16409

SEQ ID NO: 16427 - DNA, 201 bp, Homo sapiens; identical to SEQ ID NO: 16410

SEQ ID NO: 16428 - DNA, 201 bp, Homo sapiens; identical to SEQ ID NO: 16411

SEQ ID NO: 16429 - DNA, 201 bp, Homo sapiens; identical to SEQ ID NO: 16412

SEQ ID NO: 16430 - DNA, 201 bp, Homo sapiens; identical to SEQ ID NO: 16413

SEQ ID NO: 16431 - DNA, 201 bp, Homo sapiens
gacggcaatcgcacctggggccgcctaacaggacccccgattgaagccgtggaacggctcacaccggcacgtgctgcacctgcccaccgtcttccatcacytgccacacctgctggccaaggagagcagtctgcagcccgcggtgcgcgtgggccagggccgcaccggagtgtcggtggtgatgggcatcccgagcgtgcg

SEQ ID NO: 16432 - DNA, 201 bp, Homo sapiens; identical to SEQ ID NO: 16409

SEQ ID NO: 16433 - DNA, 201 bp, Homo sapiens; identical to SEQ ID NO: 16410

SEQ ID NO: 16434 - DNA, 201 bp, Homo sapiens; identical to SEQ ID NO: 16411

SEQ ID NO: 16435 - DNA, 149 bp, Homo sapiens; identical to SEQ ID NO: 16423

SEQ ID NO: 16436 - DNA, 201 bp, Homo sapiens; identical to SEQ ID NO: 16413

SEQ ID NO: 16437 - DNA, 201 bp, Homo sapiens; identical to SEQ ID NO: 16408

SEQ ID NO: 16438 - DNA, 201 bp, Homo sapiens; identical to SEQ ID NO: 16409

SEQ ID NO: 16439 - DNA, 201 bp, Homo sapiens; identical to SEQ ID NO: 16410

SEQ ID NO: 16440 - DNA, 201 bp, Homo sapiens; identical to SEQ ID NO: 16411

SEQ ID NO: 16441 - DNA, 201 bp, Homo sapiens; identical to SEQ ID NO: 16412

SEQ ID NO: 16442 - DNA, 201 bp, Homo sapiens; identical to SEQ ID NO: 16413

SEQ ID NO: 16443 - DNA, 201 bp, Homo sapiens; identical to SEQ ID NO: 16408

SEQ ID NO: 16444 - DNA, 201 bp, Homo sapiens; identical to SEQ ID NO: 16409

SEQ ID NO: 16445 - DNA, 201 bp, Homo sapiens; identical to SEQ ID NO: 16410

SEQ ID NO: 16446 - DNA, 201 bp, Homo sapiens; identical to SEQ ID NO: 16411

SEQ ID NO: 16447 - DNA, 201 bp, Homo sapiens; identical to SEQ ID NO: 16412

SEQ ID NO: 16448 - DNA, 201 bp, Homo sapiens; identical to SEQ ID NO: 16413

SEQ ID NO: 16449 - DNA, 201 bp, Homo sapiens; identical to SEQ ID NO: 16408

SEQ ID NO: 16450 - DNA, 201 bp, Homo sapiens
cttggagacttggaaacagaaggccttgtaggccacataggttttcagagactcgcctggcagaggcctggagcgtcctgctgcgtggactgtgggcaccsagccaccaggaggttgttgatctcattcttgctcactggtccctgccagactggtggtgcctctctactgtcgggcagccccacctctgtgctgccccat

SEQ ID NO: 16451 - DNA, 201 bp, Homo sapiens; identical to SEQ ID NO: 16409

SEQ ID NO: 16452 - DNA, 201 bp, Homo sapiens; identical to SEQ ID NO: 16410

SEQ ID NO: 16453 - DNA, 201 bp, Homo sapiens; identical to SEQ ID NO: 16411

SEQ ID NO: 16454 - DNA, 201 bp, Homo sapiens
tggcatgcggacccttcagggtgccccaggcgcagcacaggtctccagagacacaggcaccagggcgttcagagctagtcccctcgctgctgttgactgtscttgagcagccccagggccggtttctcaacctcatttgctcacctgagcaatgaagtgaggtgggctcctggaactgcagcagccaccccccggggccat

SEQ ID NO: 16455 - DNA, 201 bp, Homo sapiens
tgggcaccgagccaccaggaggttgttgatctcattcttgctcactggtccctgccagactggtggtgcctctctactgtcgggcagccccacctctgtgstgccccatccacctacagccctcatgcctgggcccagctggaggttctgacaggggccccctggggtggcatgcggacccttcagggtgccccaggcgca

SEQ ID NO: 16456 - DNA, 149 bp, Homo sapiens; identical to SEQ ID NO: 16423

SEQ ID NO: 16457 - DNA, 201 bp, Homo sapiens; identical to SEQ ID NO: 16413

SEQ ID NO: 16458 - DNA, 201 bp, Homo sapiens; identical to SEQ ID NO: 16408

SEQ ID NO: 16459 - DNA, 201 bp, Homo sapiens; identical to SEQ ID NO: 16450

SEQ ID NO: 16460 - DNA, 201 bp, Homo sapiens; identical to SEQ ID NO: 16409

SEQ ID NO: 16461 - DNA, 201 bp, Homo sapiens; identical to SEQ ID NO: 16410

SEQ ID NO: 16462 - DNA, 201 bp, Homo sapiens; identical to SEQ ID NO: 16411

SEQ ID NO: 16463 - DNA, 201 bp, Homo sapiens; identical to SEQ ID NO: 16454

SEQ ID NO: 16464 - DNA, 201 bp, Homo sapiens; identical to SEQ ID NO: 16455

SEQ ID NO: 16465 - DNA, 201 bp, Homo sapiens; identical to SEQ ID NO: 16412

SEQ ID NO: 16466 - DNA, 201 bp, Homo sapiens; identical to SEQ ID NO: 16413

SEQ ID NO: 16467 - DNA, 201 bp, Homo sapiens
tttggcttctggtatgtgtttctgattgcttcctgttgagcacaaagtgagagctgccactgagcagccctgccaggggtgctgtttcaggctgggcatcsccaggcggcctccctgcaaaccaagggctgggggcaaaggggcatgatccagggtcccccagggtgggctcagctccagggagaggccacccacgtggca

SEQ ID NO: 16468 - DNA, 201 bp, Homo sapiens
gggccaaaagggcctggtcatcgccaagatggacgccactgccaacgacgtccccagcgaccgctataaggtggagggcttccccaccatctacttcgccmccagtggggacaaaaagaacccagttaaatttgagggtggagacagagatctggagcatttgagcaagtttatagaagaacatgccacaaaactgagcag

SEQ ID NO: 16469 - DNA, 201 bp, Homo sapiens
atcaagatccttaagaaggggcaggctgtagactacgagggctccagaacccaggaagaaattgttgccaaggtcagagaagtctcccagcccgactggaygcctccaccagaagtcacgcttgtgttgaccaaagagaactttgatgaagttgtgaatgatgcagatatcattctggtggagttttatgccccatggtgt

SEQ ID NO: 16470 - DNA, 201 bp, Homo sapiens
tgactctgacaccctccgcgagtttgtcactgctttcaaaaaaggaaaactgaagccagtcatcaaatcccagccagtgcccaagaacaacaagggacccrtcaaggtcgtggtgggaaagacctttgactccattgtgatggaccccaagaaggacgtcctcatcgagttctacgcgccatggtgcgggcactgcaagca

SEQ ID NO: 16471 - DNA, 201 bp, Homo sapiens
ttgatgtctctggctatcccaccctgaaaattttccgcaaaggaaggccttatgactacaacggcccacgagaaaaatatggaatcgttgattacatgatygagcagtccgggcctccctccaaggagattctgaccctgaagcaggtccaggagttcctgaaggatggagacgatgtcatcatcatcggggtctttaagg

SEQ ID NO: 16472 - DNA, 201 bp, Homo sapiens
ggtgtggacactgcaagaaacttgcccccgagtatgagaaggccgccaaggagctcagcaagcgttctcctccaattcccctggcaaaggtcgacgccacygcagaaacagacctggccaagaggtttgatgtctctggctatcccaccctgaaaattttccgcaaaggaaggccttatgactacaacggcccacgagaaa

SEQ ID NO: 16473 - DNA, 201 bp, Homo sapiens
aatttttttttacaccttctaatttctttatttctcaaagcagataattcttctgtgtgaaaatgttttctttttttaatttaaggtttaaaattcctttkccaaatcatgttgattttgctctttgctttttcgttgtctgagaaattgttggcgtagatttggcttctggtatgtgtttctgattgcttcctgttgagc

SEQ ID NO: 16474 - DNA, 134 bp, Homo sapiens
agttttaaacgcgcagccgagggccgcgcgcagragtagggagggcctagggcggcggagccgactcgtcgcggccgaggcgcgcgcggtccgtgccggcgtcagtctgggattggccggcccgcgacttcctc

SEQ ID NO: 16475 - DNA, 201 bp, Homo sapiens
gcatttgagcaagtttatagaagaacatgccacaaaactgagcaggaccaaggaagagctttgaaggcctgaggtctgcggaaggtgggaggaggcagacrccctgcgtggcccatggtcggggcgtccacgccgaggccggcaacaaacgacagtatctcggattcctttttttttttttttaattttttatactttggt

SEQ ID NO: 16476 - DNA, 170 bp, Homo sapiens
agttttaaacgcgcagccgagggccgcgcgcaggagtagggagggcctagggcggcggagccgactcgtmgcggccgaggcgcgcgcggtccgtgccggcgtcagtctgggattggccggcccgcgacttcctccgccccctgccaatcgccggggacgacttccgtggg

SEQ ID NO: 16477 - DNA, 184 bp, Homo sapiens
agttttaaacgcgcagccgagggccgcgcgcaggagtagggagggcctagggcggcggagccgactcgtcgcggccgaggcgcrcgcggtccgtgccggcgtcagtctgggattggccggcccgcgacttcctccgccccctgccaatcgccggggacgacttccgtgggtttttccggctccc

SEQ ID NO: 16478 - DNA, 194 bp, Homo sapiens
agttttaaacgcgcagccgagggccgcgcgcaggagtagggagggcctagggcggcggagccgactcgtcgcggccgaggcgcgcgcggtccgygccggcgtcagtctgggattggccggcccgcgacttcctccgccccctgccaatcgccggggacgacttccgtgggtttttccggctcccccgcgtcgct

SEQ ID NO: 16479 - DNA, 201 bp, Homo sapiens
tcagttttggcggagcaaagtcctagaggtggccaaggacttccctgagtacacctttgccattgcggacgaagaggactatgctggggaggtgaaggacytggggctcagcgagagtggggaggatgtcaatgccgccatcctggacgagagtgggaagaagttcgccatggagccagaggagtttgactctgacaccct

SEQ ID NO: 16480 - DNA, 201 bp, Homo sapiens
cgcgcggtccgtgccggcgtcagtctgggattggccggcccgcgacttcctccgccccctgccaatcgccggggacgacttccgtgggtttttccggctcycccgcgtcgctaaggagcgacgggctgtcggccagaccccgagttctcggtgcgctcagcggccgccgacgctaggaggccgcgctccgcccccgctacc

SEQ ID NO: 16481 - DNA, 201 bp, Homo sapiens
tttggcttctggtatgtgtttctgattgcttcctgttgagcacaaagtgagagctgccactgagcagccctgccaggggtgctgtttcaggctgggcatcsccaggcggcctccctgcaaaccaagggctgggggcaaaggggcatgatccaggccccacctcttgagagcccccagtgccggagcagaaaggaccctgga

SEQ ID NO: 16482 - DNA, 201 bp, Homo sapiens; identical to SEQ ID NO: 16468

SEQ ID NO: 16483 - DNA, 201 bp, Homo sapiens; identical to SEQ ID NO: 16469

SEQ ID NO: 16484 - DNA, 201 bp, Homo sapiens; identical to SEQ ID NO: 16470

SEQ ID NO: 16485 - DNA, 201 bp, Homo sapiens; identical to SEQ ID NO: 16471

SEQ ID NO: 16486 - DNA, 201 bp, Homo sapiens; identical to SEQ ID NO: 16472

SEQ ID NO: 16487 - DNA, 201 bp, Homo sapiens; identical to SEQ ID NO: 16473

SEQ ID NO: 16488 - DNA, 134 bp, Homo sapiens; identical to SEQ ID NO: 16474

SEQ ID NO: 16489 - DNA, 201 bp, Homo sapiens; identical to SEQ ID NO: 16475

SEQ ID NO: 16490 - DNA, 170 bp, Homo sapiens; identical to SEQ ID NO: 16476

SEQ ID NO: 16491 - DNA, 184 bp, Homo sapiens; identical to SEQ ID NO: 16477

SEQ ID NO: 16492 - DNA, 194 bp, Homo sapiens; identical to SEQ ID NO: 16478

SEQ ID NO: 16493 - DNA, 201 bp, Homo sapiens; identical to SEQ ID NO: 16479

SEQ ID NO: 16494 - DNA, 201 bp, Homo sapiens; identical to SEQ ID NO: 16480

SEQ ID NO: 16495 - DNA, 131 bp, Homo sapiens
atatgttcagttgtttatgtataaaaataactttctggattttgtggggaggagcaggagaggaaggaagttaatacctatgtaatacatagaaacttccmcaataaaatgccattgatggttgaaattgc

SEQ ID NO: 16496 - DNA, 175 bp, Homo sapiens
atgtgtgactggctgattcatgtgtcatcttccaatcgggcaggtcgaggtggtgcatctatctatggcaaacartttgaagatgaacttcatccagacttgaaattcacgggggctggaattctcgcaatggccaatgcggggccagataccaatggcagccagttctttgtga

SEQ ID NO: 16497 - DNA, 131 bp, Homo sapiens; identical to SEQ ID NO: 16495

SEQ ID NO: 16498 - DNA, 201 bp, Homo sapiens
acccttctgggtagacttgctaccctcttgagcagctcttctgagatggccccagtgaaccagcttctagatgacatagaatgacatgtaatgctaaatttcattttggctttgcaagtcatgaagcttaggaggcctggcatcttgggtgagttagagatggaagtacattttaataggatgcttcttttctcttccccc

SEQ ID NO: 16499 - DNA, 201 bp, Homo sapiens
acaatggcacaaaattccacagaattatcaaagacttcatgatccaaggaggtgacccaacagggacaggtcgaggtggtgcatctatctatggcaaacartttgaagatgaacttcatccagacttgaaattcacgggggctggaattctcgcaatggccaatgcggggccagataccaatggcagccagttctttgtga

SEQ ID NO: 16500 - DNA, 201 bp, Homo sapiens
gcaattcccccagattcctggcagccacccaacgtttacttggagaccagcatgggaatcattgtgctggagctgtactggaagcatgctccaaagacctstaagaactttgctgagttggctcgtcgaggttactacaatggcacaaaattccacagaattatcaaagacttcatgatccaaggaggtgacccaacaggg

SEQ ID NO: 16501 - DNA, 131 bp, Homo sapiens; identical to SEQ ID NO: 16495

SEQ ID NO: 16502 - DNA, 201 bp, Homo sapiens; identical to SEQ ID NO: 16499

SEQ ID NO: 16503 - DNA, 201 bp, Homo sapiens; identical to SEQ ID NO: 16500

SEQ ID NO: 16504 - DNA, 201 bp, Homo sapiens
cgggctctcctcgcgtcactggagccatggcgttcgccgagacctacccggcggcatcctccctgcccaacggcgattgcggccgccccagggcgcggccsggaggaaaccgggtgacggtggtgctcggtgcgcagtggggcgacgaaggcaaagggaaggtggtggacctgctggcgcaggacgccgacatcgtgtgcc

SEQ ID NO: 16505 - DNA, 201 bp, Homo sapiens
gagaggtttaaagttctagctaaccaatacaaatctatataccccactttggaaatagacattgaaggtgaattacaaaaactcaagggttatatggaaargattaaaccaatggtgagagatggagtttattttctatatgaggccctacatggaccaccaaagaaaatcttggtagaaggtgcaaatgcagcactatta

SEQ ID NO: 16506 - DNA, 201 bp, Homo sapiens
aaatcatttgttgctcctgctgctctcatggtgccacgtttttttttttcaatgtttagtaatagtataatccatgttgtttgatatcaaaagtagaattrcttttaatgtagtttttcttcattattgtcattgcgtgttcttaagttttacccctattagatggtaagaacaattaatgcagttttgcacaaatatttt

SEQ ID NO: 16507 - DNA, 201 bp, Homo sapiens; identical to SEQ ID NO: 16504

SEQ ID NO: 16508 - DNA, 201 bp, Homo sapiens; identical to SEQ ID NO: 16505

SEQ ID NO: 16509 - DNA, 201 bp, Homo sapiens
actacactcagaatagcctggctgcttctctgtctccgagaccggaggtagtgggaaccaacagctgggctggagagttggtgctggcaaaacagtccttsccctggggccggttcttacccaggtccagagaaaccaacgcgggatgtcagacttcaccaaaaggactttctggttgcccctggctggcttcctggaggc

SEQ ID NO: 16510 - DNA, 201 bp, Homo sapiens
acatgtggaaaatgacggttataagaccatttatttctttggagacaaaactatgccaggtggcaatgaccatgagatcttcacagaccccagaaccatgbgctactccgtgacagcgcctgaggacacgcgcaggatctgtgaactgctgttctcctaacgtgggagcgggaggggcggggtcccggctgacaagccagc

SEQ ID NO: 16511 - DNA, 201 bp, Homo sapiens
cctctagtttctcagggatggagcgagagcccagccagagaacagtaagaggagctgctctcctatctgcactcacccaggccttcacccagactttaccrcggaggcggctgagtgcagctacagctaggtccgcgtccctcactcttttcatcttctgcacgttcttcgtgaaactggaaggatcccgggtctcagcta

SEQ ID NO: 16512 - DNA, 201 bp, Homo sapiens
gccagcatagggcattcggtggccagagccgagggtcctcccacacgtgctcacccacccgcagcctaggcaggctctgcatgctatgccaggcatgtgcmgtctggacttccacctccagtgccagaaacttccagaaggaaggagaaaactcttgtcaagaatggcccagaggaatgcctcgcacaaaaggtcttcccc

SEQ ID NO: 16513 - DNA, 201 bp, Homo sapiens
ttccagaaaatggcttggtagcatacaaagatgggaaactcttgtgtagacagaatattcaaagtcatctgggtgaggccctaatccaagatttaatcaastactgtctgagctacattgcgaaaattaaactcccgaagaagaggggtactttcattgaattccgaaatgggatgttaaacgtgtcccctattggaagaa

SEQ ID NO: 16514 - DNA, 201 bp, Homo sapiens
gtgacccagcccaggacgaagtttacaaacacctcctggaacgaagctcccgcctgcatgtcaccttgatgggggctgtgagtggggcagtgtgatacccrgtgactagacgcactctgcgttttcccgtgtttggggctgaggcctgctggacagatggctggccaagtgggagcagaccctagggagtttgcacctcgg

SEQ ID NO: 16515 - DNA, 201 bp, Homo sapiens
agcagatctacggaaagagtttgctggaaaaggcctcacgttttccataggaggccagatcagctttgatgtctttcctgatggatgggacaagagatackgtctgcgacatgtggaaaatgacggttataagaccatttatttctttggagacaaaactatgccaggtggcaatgaccatgagatcttcacagaccccag

SEQ ID NO: 16516 - DNA, 201 bp, Homo sapiens
attcaaagtcatctgggtgaggccctaatccaagatttaatcaactactgtctgagctacattgcgaaaattaaactcccgaagaagaggggtactttcaytgaattccgaaatgggatgttaaacgtgtcccctattggaagaagctgcagccaagaagaacgcattgagttctacgaactcgataaaaaagaaaatata

SEQ ID NO: 16517 - DNA, 201 bp, Homo sapiens
catctgggtgaggccctaatccaagatttaatcaactactgtctgagctacattgcgaaaattaaactcccgaagaagaggggtactttcattgaattccraaatgggatgttaaacgtgtcccctattggaagaagctgcagccaagaagaacgcattgagttctacgaactcgataaaaaagaaaatataagacaaaag

SEQ ID NO: 16518 - DNA, 201 bp, Homo sapiens
tcatctgggtgaggccctaatccaagatttaatcaactactgtctgagctacattgcgaaaattaaactcccgaagaagaggggtactttcattgaattcbgaaatgggatgttaaacgtgtcccctattggaagaagctgcagccaagaagaacgcattgagttctacgaactcgataaaaaagaaaatataagacaaaa

SEQ ID NO: 16519 - DNA, 201 bp, Homo sapiens
ctacattgcgaaaattaaactcccgaagaagaggggtactttcattgaattccgaaatgggatgttaaacgtgtcccctattggaagaagctgcagccaaraagaacgcattgagttctacgaactcgataaaaaagaaaatataagacaaaagtttgtagcagatctacggaaagagtttgctggaaaaggcctcacgtt

SEQ ID NO: 16520 - DNA, 201 bp, Homo sapiens
taaactcccgaagaagaggggtactttcattgaattccgaaatgggatgttaaacgtgtcccctattggaagaagctgcagccaagaagaacgcattgagytctacgaactcgataaaaaagaaaatataagacaaaagtttgtagcagatctacggaaagagtttgctggaaaaggcctcacgttttccataggaggcca

SEQ ID NO: 16521 - DNA, 201 bp, Homo sapiens
tccgggccgagttcctcgtgccaacgtgtcttgtaaggtgcggctagaaactggggacatggcagcgcctggcccagcgctctgcctcttcgacgtggatsggaccctcaccgccccgcggcagaaaattaccaaagaaatggatgacttcctacaaaaattgaggcagaagatcaaaatcggagtggtaggcggatcgga

SEQ ID NO: 16522 - DNA, 201 bp, Homo sapiens
gaagaggggtactttcattgaattccgaaatgggatgttaaacgtgtcccctattggaagaagctgcagccaagaagaacgcattgagttctacgaactcrataaaaaagaaaatataagacaaaagtttgtagcagatctacggaaagagtttgctggaaaaggcctcacgttttccataggaggccagatcagctttga

SEQ ID NO: 16523 - DNA, 201 bp, Homo sapiens
tttctttggagacaaaactatgccaggtggcaatgaccatgagatcttcacagaccccagaaccatgggctactccgtgacagcgcctgaggacacgcgcwggatctgtgaactgctgttctcctaacgtgggagcgggaggggcggggtcccggctgacaagccagcatagggcattcggtggccagagccgagggtcct

SEQ ID NO: 16524 - DNA, 201 bp, Homo sapiens
ctgcctcttcgacgtggatgggaccctcaccgccccgcggcagaaaattaccaaagaaatggatgacttcctacaaaaattgaggcagaagatcaaaatcrgagtggtaggcggatcggactttgagaaagtgcaggagcaactgggaaatgatgtggttgaaaaatacgattatgtgtttccagaaaatggcttggtagc

SEQ ID NO: 16525 - DNA, 201 bp, Homo sapiens
actttcattgaattccgaaatgggatgttaaacgtgtcccctattggaagaagctgcagccaagaagaacgcattgagttctacgaactcgataaaaaagraaatataagacaaaagtttgtagcagatctacggaaagagtttgctggaaaaggcctcacgttttccataggaggccagatcagctttgatgtctttcct

SEQ ID NO: 16526 - DNA, 201 bp, Homo sapiens
cggttataagaccatttatttctttggagacaaaactatgccaggtggcaatgaccatgagatcttcacagaccccagaaccatgggctactccgtgacarcgcctgaggacacgcgcaggatctgtgaactgctgttctcctaacgtgggagcgggaggggcggggtcccggctgacaagccagcatagggcattcggtg

SEQ ID NO: 16527 - DNA, 201 bp, Homo sapiens
ttcctacaaaaattgaggcagaagatcaaaatcggagtggtaggcggatcggactttgagaaagtgcaggagcaactgggaaatgatgtggttgaaaaatrcgattatgtgtttccagaaaatggcttggtagcatacaaagatgggaaactcttgtgtagacagaatattcaaagtcatctgggtgaggccctaatccaa

SEQ ID NO: 16528 - DNA, 201 bp, Homo sapiens
attgaattccgaaatgggatgttaaacgtgtcccctattggaagaagctgcagccaagaagaacgcattgagttctacgaactcgataaaaaagaaaatayaagacaaaagtttgtagcagatctacggaaagagtttgctggaaaaggcctcacgttttccataggaggccagatcagctttgatgtctttcctgatgga

SEQ ID NO: 16529 - DNA, 201 bp, Homo sapiens
tatttctttggagacaaaactatgccaggtggcaatgaccatgagatcttcacagaccccagaaccatgggctactccgtgacagcgcctgaggacacgcscaggatctgtgaactgctgttctcctaacgtgggagcgggaggggcggggtcccggctgacaagccagcatagggcattcggtggccagagccgagggtc

SEQ ID NO: 16530 - DNA, 201 bp, Homo sapiens
agaagaacgcattgagttctacgaactcgataaaaaagaaaatataagacaaaagtttgtagcagatctacggaaagagtttgctggaaaaggcctcacgktttccataggaggccagatcagctttgatgtctttcctgatggatgggacaagagatactgtctgcgacatgtggaaaatgacggttataagaccattta

SEQ ID NO: 16531 - DNA, 201 bp, Homo sapiens
cattgagttctacgaactcgataaaaaagaaaatataagacaaaagtttgtagcagatctacggaaagagtttgctggaaaaggcctcacgttttccatasgaggccagatcagctttgatgtctttcctgatggatgggacaagagatactgtctgcgacatgtggaaaatgacggttataagaccatttatttctttgg

SEQ ID NO: 16532 - DNA, 201 bp, Homo sapiens
aaatgacggttataagaccatttatttctttggagacaaaactatgccaggtggcaatgaccatgagatcttcacagaccccagaaccatgggctactccrtgacagcgcctgaggacacgcgcaggatctgtgaactgctgttctcctaacgtgggagcgggaggggcggggtcccggctgacaagccagcatagggcat

SEQ ID NO: 16533 - DNA, 201 bp, Homo sapiens
cagctttgatgtctttcctgatggatgggacaagagatactgtctgcgacatgtggaaaatgacggttataagaccatttatttctttggagacaaaactrtgccaggtggcaatgaccatgagatcttcacagaccccagaaccatgggctactccgtgacagcgcctgaggacacgcgcaggatctgtgaactgctgtt

SEQ ID NO: 16534 - DNA, 201 bp, Homo sapiens
ttcgacgtggatgggaccctcaccgccccgcggcagaaaattaccaaagaaatggatgacttcctacaaaaattgaggcagaagatcaaaatcggagtggyaggcggatcggactttgagaaagtgcaggagcaactgggaaatgatgtggttgaaaaatacgattatgtgtttccagaaaatggcttggtagcatacaaa

SEQ ID NO: 16535 - DNA, 201 bp, Homo sapiens
caaaagtttgtagcagatctacggaaagagtttgctggaaaaggcctcacgttttccataggaggccagatcagctttgatgtctttcctgatggatgggrcaagagatactgtctgcgacatgtggaaaatgacggttataagaccatttatttctttggagacaaaactatgccaggtggcaatgaccatgagatcttc

SEQ ID NO: 16536 - DNA, 201 bp, Homo sapiens
ttatttctttggagacaaaactatgccaggtggcaatgaccatgagatcttcacagaccccagaaccatgggctactccgtgacagcgcctgaggacacgsgcaggatctgtgaactgctgttctcctaacgtgggagcgggaggggcggggtcccggctgacaagccagcatagggcattcggtggccagagccgagggt

SEQ ID NO: 16537 - DNA, 201 bp, Homo sapiens
gtggaaaatgacggttataagaccatttatttctttggagacaaaactatgccaggtggcaatgaccatgagatcttcacagaccccagaaccatgggctmctccgtgacagcgcctgaggacacgcgcaggatctgtgaactgctgttctcctaacgtgggagcgggaggggcggggtcccggctgacaagccagcatag

SEQ ID NO: 16538 - DNA, 201 bp, Homo sapiens
agatttaatcaactactgtctgagctacattgcgaaaattaaactcccgaagaagaggggtactttcattgaattccgaaatgggatgttaaacgtgtccsctattggaagaagctgcagccaagaagaacgcattgagttctacgaactcgataaaaaagaaaatataagacaaaagtttgtagcagatctacggaaaga

SEQ ID NO: 16539 - DNA, 201 bp, Homo sapiens
atttatttctttggagacaaaactatgccaggtggcaatgaccatgagatcttcacagaccccagaaccatgggctactccgtgacagcgcctgaggacabgcgcaggatctgtgaactgctgttctcctaacgtgggagcgggaggggcggggtcccggctgacaagccagcatagggcattcggtggccagagccgagg

SEQ ID NO: 16540 - DNA, 201 bp, Homo sapiens
tccagtgccagaaacttccagaaggaaggagaaaactcttgtcaagaatggcccagaggaatgcctcgcacaaaaggtcttccccacccacccccagcccmctagtctaatacccaccctgatacgtgcaatcatgtagttttggcggaaatttccccatcattctaggatgatacagaaagaaaaactgtgcctggaccc

SEQ ID NO: 16541 - DNA, 201 bp, Homo sapiens
ttaatcaactactgtctgagctacattgcgaaaattaaactcccgaagaagaggggtactttcattgaattccgaaatgggatgttaaacgtgtcccctahtggaagaagctgcagccaagaagaacgcattgagttctacgaactcgataaaaaagaaaatataagacaaaagtttgtagcagatctacggaaagagttt

SEQ ID NO: 16542 - DNA, 201 bp, Homo sapiens
atcttcacagaccccagaaccatgggctactccgtgacagcgcctgaggacacgcgcaggatctgtgaactgctgttctcctaacgtgggagcgggagggrcggggtcccggctgacaagccagcatagggcattcggtggccagagccgagggtcctcccacacgtgctcacccacccgcagcctaggcaggctctgcat

SEQ ID NO: 16543 - DNA, 201 bp, Homo sapiens
cggaaagagtttgctggaaaaggcctcacgttttccataggaggccagatcagctttgatgtctttcctgatggatgggacaagagatactgtctgcgacrtgtggaaaatgacggttataagaccatttatttctttggagacaaaactatgccaggtggcaatgaccatgagatcttcacagaccccagaaccatgggc

SEQ ID NO: 16544 - DNA, 173 bp, Homo sapiens
cgtggctgccgctactcccaggcgttatgggaacggagtcccctcctcttcccgacgtgccctgcgactcagsggccgaacccggaagttccgggccgagttcctcgtgccaacgtgtcttgtaaggtgcggctagaaactggggacatggcagcgcctggcccagcgctctg

SEQ ID NO: 16545 - DNA, 201 bp, Homo sapiens
cccacacgtgctcacccacccgcagcctaggcaggctctgcatgctatgccaggcatgtgcagtctggacttccacctccagtgccagaaacttccagaargaaggagaaaactcttgtcaagaatggcccagaggaatgcctcgcacaaaaggtcttccccacccacccccagccccctagtctaatacccaccctgata

SEQ ID NO: 16546 - DNA, 201 bp, Homo sapiens
ggagacaaaactatgccaggtggcaatgaccatgagatcttcacagaccccagaaccatgggctactccgtgacagcgcctgaggacacgcgcaggatctstgaactgctgttctcctaacgtgggagcgggaggggcggggtcccggctgacaagccagcatagggcattcggtggccagagccgagggtcctcccacac

SEQ ID NO: 16547 - DNA, 201 bp, Homo sapiens
cctacaaaaattgaggcagaagatcaaaatcggagtggtaggcggatcggactttgagaaagtgcaggagcaactgggaaatgatgtggttgaaaaatackattatgtgtttccagaaaatggcttggtagcatacaaagatgggaaactcttgtgtagacagaatattcaaagtcatctgggtgaggccctaatccaaga

SEQ ID NO: 16548 - DNA, 201 bp, Homo sapiens
aaaattgaggcagaagatcaaaatcggagtggtaggcggatcggactttgagaaagtgcaggagcaactgggaaatgatgtggttgaaaaatacgattatrtgtttccagaaaatggcttggtagcatacaaagatgggaaactcttgtgtagacagaatattcaaagtcatctgggtgaggccctaatccaagatttaat

SEQ ID NO: 16549 - DNA, 201 bp, Homo sapiens
ctggggacatggcagcgcctggcccagcgctctgcctcttcgacgtggatgggaccctcaccgccccgcggcagaaaattaccaaagaaatggatgacttyctacaaaaattgaggcagaagatcaaaatcggagtggtaggcggatcggactttgagaaagtgcaggagcaactgggaaatgatgtggttgaaaaatacg

SEQ ID NO: 16550 - DNA, 201 bp, Homo sapiens
aaactcttgtgtagacagaatattcaaagtcatctgggtgaggccctaatccaagatttaatcaactactgtctgagctacattgcgaaaattaaactccygaagaagaggggtactttcattgaattccgaaatgggatgttaaacgtgtcccctattggaagaagctgcagccaagaagaacgcattgagttctacgaa

SEQ ID NO: 16551 - DNA, 201 bp, Homo sapiens
tagacagaatattcaaagtcatctgggtgaggccctaatccaagatttaatcaactactgtctgagctacattgcgaaaattaaactcccgaagaagaggsgtactttcattgaattccgaaatgggatgttaaacgtgtcccctattggaagaagctgcagccaagaagaacgcattgagttctacgaactcgataaaaa

SEQ ID NO: 16552 - DNA, 201 bp, Homo sapiens
tgagaaaccaggacaggccatctgcagtgacccagcccaggacgaagtttacaaacacctcctggaacgaagctcccgcctgcatgtcaccttgatggggrctgtgagtggggcagtgtgatacccagtgactagacgcactctgcgttttcccgtgtttggggctgaggcctgctggacagatggctggccaagtgggag

SEQ ID NO: 16553 - DNA, 201 bp, Homo sapiens
atattcaaagtcatctgggtgaggccctaatccaagatttaatcaactactgtctgagctacattgcgaaaattaaactcccgaagaagaggggtactttmattgaattccgaaatgggatgttaaacgtgtcccctattggaagaagctgcagccaagaagaacgcattgagttctacgaactcgataaaaaagaaaata

SEQ ID NO: 16554 - DNA, 201 bp, Homo sapiens
gagtttgctggaaaaggcctcacgttttccataggaggccagatcagctttgatgtctttcctgatggatgggacaagagatactgtctgcgacatgtggmaaatgacggttataagaccatttatttctttggagacaaaactatgccaggtggcaatgaccatgagatcttcacagaccccagaaccatgggctactcc

SEQ ID NO: 16555 - DNA, 201 bp, Homo sapiens
cctggcccagcgctctgcctcttcgacgtggatgggaccctcaccgccccgcggcagaaaattaccaaagaaatggatgacttcctacaaaaattgaggcwgaagatcaaaatcggagtggtaggcggatcggactttgagaaagtgcaggagcaactgggaaatgatgtggttgaaaaatacgattatgtgtttccagaa

SEQ ID NO: 16556 - DNA, 201 bp, Homo sapiens
gaaaatggcttggtagcatacaaagatgggaaactcttgtgtagacagaatattcaaagtcatctgggtgaggccctaatccaagatttaatcaactactktctgagctacattgcgaaaattaaactcccgaagaagaggggtactttcattgaattccgaaatgggatgttaaacgtgtcccctattggaagaagctgc

SEQ ID NO: 16557 - DNA, 201 bp, Homo sapiens; identical to SEQ ID NO: 16509

SEQ ID NO: 16558 - DNA, 201 bp, Homo sapiens; identical to SEQ ID NO: 16510

SEQ ID NO: 16559 - DNA, 201 bp, Homo sapiens; identical to SEQ ID NO: 16511

SEQ ID NO: 16560 - DNA, 201 bp, Homo sapiens; identical to SEQ ID NO: 16512

SEQ ID NO: 16561 - DNA, 201 bp, Homo sapiens; identical to SEQ ID NO: 16513

SEQ ID NO: 16562 - DNA, 201 bp, Homo sapiens; identical to SEQ ID NO: 16514

SEQ ID NO: 16563 - DNA, 201 bp, Homo sapiens; identical to SEQ ID NO: 16515

SEQ ID NO: 16564 - DNA, 201 bp, Homo sapiens; identical to SEQ ID NO: 16516

SEQ ID NO: 16565 - DNA, 201 bp, Homo sapiens; identical to SEQ ID NO: 16517

SEQ ID NO: 16566 - DNA, 201 bp, Homo sapiens; identical to SEQ ID NO: 16518

SEQ ID NO: 16567 - DNA, 201 bp, Homo sapiens; identical to SEQ ID NO: 16519

SEQ ID NO: 16568 - DNA, 201 bp, Homo sapiens; identical to SEQ ID NO: 16520

SEQ ID NO: 16569 - DNA, 201 bp, Homo sapiens; identical to SEQ ID NO: 16521

SEQ ID NO: 16570 - DNA, 201 bp, Homo sapiens; identical to SEQ ID NO: 16522

SEQ ID NO: 16571 - DNA, 201 bp, Homo sapiens; identical to SEQ ID NO: 16523

SEQ ID NO: 16572 - DNA, 201 bp, Homo sapiens; identical to SEQ ID NO: 16524

SEQ ID NO: 16573 - DNA, 201 bp, Homo sapiens; identical to SEQ ID NO: 16525

SEQ ID NO: 16574 - DNA, 201 bp, Homo sapiens; identical to SEQ ID NO: 16526

SEQ ID NO: 16575 - DNA, 201 bp, Homo sapiens; identical to SEQ ID NO: 16527

SEQ ID NO: 16576 - DNA, 201 bp, Homo sapiens; identical to SEQ ID NO: 16528

SEQ ID NO: 16577 - DNA, 201 bp, Homo sapiens; identical to SEQ ID NO: 16529

SEQ ID NO: 16578 - DNA, 201 bp, Homo sapiens; identical to SEQ ID NO: 16530

SEQ ID NO: 16579 - DNA, 201 bp, Homo sapiens; identical to SEQ ID NO: 16531

SEQ ID NO: 16580 - DNA, 201 bp, Homo sapiens; identical to SEQ ID NO: 16532

SEQ ID NO: 16581 - DNA, 201 bp, Homo sapiens; identical to SEQ ID NO: 16533

SEQ ID NO: 16582 - DNA, 201 bp, Homo sapiens; identical to SEQ ID NO: 16534

SEQ ID NO: 16583 - DNA, 201 bp, Homo sapiens; identical to SEQ ID NO: 16535

SEQ ID NO: 16584 - DNA, 201 bp, Homo sapiens; identical to SEQ ID NO: 16536

SEQ ID NO: 16585 - DNA, 201 bp, Homo sapiens; identical to SEQ ID NO: 16537

SEQ ID NO: 16586 - DNA, 201 bp, Homo sapiens; identical to SEQ ID NO: 16538

SEQ ID NO: 16587 - DNA, 201 bp, Homo sapiens; identical to SEQ ID NO: 16539

SEQ ID NO: 16588 - DNA, 201 bp, Homo sapiens; identical to SEQ ID NO: 16540

SEQ ID NO: 16589 - DNA, 201 bp, Homo sapiens; identical to SEQ ID NO: 16541

SEQ ID NO: 16590 - DNA, 201 bp, Homo sapiens; identical to SEQ ID NO: 16542

SEQ ID NO: 16591 - DNA, 201 bp, Homo sapiens; identical to SEQ ID NO: 16543

SEQ ID NO: 16592 - DNA, 173 bp, Homo sapiens; identical to SEQ ID NO: 16544

SEQ ID NO: 16593 - DNA, 201 bp, Homo sapiens; identical to SEQ ID NO: 16545

SEQ ID NO: 16594 - DNA, 201 bp, Homo sapiens; identical to SEQ ID NO: 16546

SEQ ID NO: 16595 - DNA, 201 bp, Homo sapiens; identical to SEQ ID NO: 16547

SEQ ID NO: 16596 - DNA, 201 bp, Homo sapiens; identical to SEQ ID NO: 16548

SEQ ID NO: 16597 - DNA, 201 bp, Homo sapiens; identical to SEQ ID NO: 16549

SEQ ID NO: 16598 - DNA, 201 bp, Homo sapiens; identical to SEQ ID NO: 16550

SEQ ID NO: 16599 - DNA, 201 bp, Homo sapiens; identical to SEQ ID NO: 16551

SEQ ID NO: 16600 - DNA, 201 bp, Homo sapiens
tccctcttggtgggtctccatctgcagtgacccagcccaggacgaagtttacaaacacctcctggaacgaagctcccgcctgcatgtcaccttgatggggrctgtgagtggggcagtgtgatacccagtgactagacgcactctgcgttttcccgtgtttggggctgaggcctgctggacagatggctggccaagtgggag

SEQ ID NO: 16601 - DNA, 201 bp, Homo sapiens; identical to SEQ ID NO: 16553

SEQ ID NO: 16602 - DNA, 201 bp, Homo sapiens; identical to SEQ ID NO: 16554

SEQ ID NO: 16603 - DNA, 201 bp, Homo sapiens; identical to SEQ ID NO: 16555

SEQ ID NO: 16604 - DNA, 201 bp, Homo sapiens; identical to SEQ ID NO: 16556

SEQ ID NO: 16605 - DNA, 201 bp, Homo sapiens
gatttggaaagggtgtttattcctcatggactaattatggacaggactgaacgtcttgctcgagatgtgatgaaggagatgggaggccatcacattgtagmcctctgtgtgctcaaggggggctataaattctttgctgacctgctggattacatcaaagcactgaatagaaatagtgatagatccattcctatgactgta

SEQ ID NO: 16606 - DNA, 201 bp, Homo sapiens
  misc_feature (1)...(201): n = A,T,C or G
tattcctcatggactaattatggacaggactgaacgtcttgctcgagatgtgatgaaggagatgggaggccatcacattgtagccctctgtgtgctcaagnggggctataaattctttgctgacctgctggattacatcaaagcactgaatagaaatagtgatagatccattcctatgactgtagattttatcagactgaa

SEQ ID NO: 16607 - DNA, 201 bp, Homo sapiens
attcctcatggactaattatggacaggactgaacgtcttgctcgagatgtgatgaaggagatgggaggccatcacattgtagccctctgtgtgctcaaggrgggctataaattctttgctgacctgctggattacatcaaagcactgaatagaaatagtgatagatccattcctatgactgtagattttatcagactgaag

SEQ ID NO: 16608 - DNA, 201 bp, Homo sapiens
cgccggccggctccgttatggcgacccgcagccctggcgtcgtgattagtgatgatgaaccaggttatgaccttgatttattttgcatacctaatcattakgctgaggatttggaaagggtgtttattcctcatggactaattatggacaggactgaacgtcttgctcgagatgtgatgaaggagatgggaggccatcaca

SEQ ID NO: 16609 - DNA, 201 bp, Homo sapiens
gtcgtgattagtgatgatgaaccaggttatgaccttgatttattttgcatacctaatcattatgctgaggatttggaaagggtgtttattcctcatggacyaattatggacaggactgaacgtcttgctcgagatgtgatgaaggagatgggaggccatcacattgtagccctctgtgtgctcaaggggggctataaattc

SEQ ID NO: 16610 - DNA, 201 bp, Homo sapiens
cgtgattagtgatgatgaaccaggttatgaccttgatttattttgcatacctaatcattatgctgaggatttggaaagggtgtttattcctcatggactawttatggacaggactgaacgtcttgctcgagatgtgatgaaggagatgggaggccatcacattgtagccctctgtgtgctcaaggggggctataaattctt

SEQ ID NO: 16611 - DNA, 201 bp, Homo sapiens
gtgattagtgatgatgaaccaggttatgaccttgatttattttgcatacctaatcattatgctgaggatttggaaagggtgtttattcctcatggactaaytatggacaggactgaacgtcttgctcgagatgtgatgaaggagatgggaggccatcacattgtagccctctgtgtgctcaaggggggctataaattcttt

SEQ ID NO: 16612 - DNA, 201 bp, Homo sapiens
attagtgatgatgaaccaggttatgaccttgatttattttgcatacctaatcattatgctgaggatttggaaagggtgtttattcctcatggactaattakggacaggactgaacgtcttgctcgagatgtgatgaaggagatgggaggccatcacattgtagccctctgtgtgctcaaggggggctataaattctttgct

SEQ ID NO: 16613 - DNA, 201 bp, Homo sapiens
tagtgatgatgaaccaggttatgaccttgatttattttgcatacctaatcattatgctgaggatttggaaagggtgtttattcctcatggactaattatgracaggactgaacgtcttgctcgagatgtgatgaaggagatgggaggccatcacattgtagccctctgtgtgctcaaggggggctataaattctttgctga

SEQ ID NO: 16614 - DNA, 201 bp, Homo sapiens
gtcaggcagtataatccaaagatggtcaaggtcgcaagcttgctggtgaaaaggaccccacgaagtgttggatataagccagactttgttggatttgaaaytccagacaagtttgttgtaggatatgcccttgactataatgaatacttcagggatttgaatcatgtttgtgtcattagtgaaactggaaaagcaaaatac

SEQ ID NO: 16615 - DNA, 201 bp, Homo sapiens
gatgatgaaccaggttatgaccttgatttattttgcatacctaatcattatgctgaggatttggaaagggtgtttattcctcatggactaattatggacargactgaacgtcttgctcgagatgtgatgaaggagatgggaggccatcacattgtagccctctgtgtgctcaaggggggctataaattctttgctgacctg

SEQ ID NO: 16616 - DNA, 201 bp, Homo sapiens
ctggtgaaaaggaccccacgaagtgttggatataagccagactttgttggatttgaaattccagacaagtttgttgtaggatatgcccttgactataatgwatacttcagggatttgaatcatgtttgtgtcattagtgaaactggaaaagcaaaatacaaagcctaagatgagagttcaagttgagtttggaaacatctg

SEQ ID NO: 16617 - DNA, 201 bp, Homo sapiens
gaaccaggttatgaccttgatttattttgcatacctaatcattatgctgaggatttggaaagggtgtttattcctcatggactaattatggacaggactgdacgtcttgctcgagatgtgatgaaggagatgggaggccatcacattgtagccctctgtgtgctcaaggggggctataaattctttgctgacctgctggat

SEQ ID NO: 16618 - DNA, 201 bp, Homo sapiens
gaaaaggaccccacgaagtgttggatataagccagactttgttggatttgaaattccagacaagtttgttgtaggatatgcccttgactataatgaatacktcagggatttgaatcatgtttgtgtcattagtgaaactggaaaagcaaaatacaaagcctaagatgagagttcaagttgagtttggaaacatctggagtc

SEQ ID NO: 16619 - DNA, 201 bp, Homo sapiens
ccaggttatgaccttgatttattttgcatacctaatcattatgctgaggatttggaaagggtgtttattcctcatggactaattatggacaggactgaacrtcttgctcgagatgtgatgaaggagatgggaggccatcacattgtagccctctgtgtgctcaaggggggctataaattctttgctgacctgctggattac

SEQ ID NO: 16620 - DNA, 201 bp, Homo sapiens
aggaccccacgaagtgttggatataagccagactttgttggatttgaaattccagacaagtttgttgtaggatatgcccttgactataatgaatacttcasggatttgaatcatgtttgtgtcattagtgaaactggaaaagcaaaatacaaagcctaagatgagagttcaagttgagtttggaaacatctggagtcctat

SEQ ID NO: 16621 - DNA, 201 bp, Homo sapiens
gaccccacgaagtgttggatataagccagactttgttggatttgaaattccagacaagtttgttgtaggatatgcccttgactataatgaatacttcaggdatttgaatcatgtttgtgtcattagtgaaactggaaaagcaaaatacaaagcctaagatgagagttcaagttgagtttggaaacatctggagtcctattg

SEQ ID NO: 16622 - DNA, 201 bp, Homo sapiens
ttatgaccttgatttattttgcatacctaatcattatgctgaggatttggaaagggtgtttattcctcatggactaattatggacaggactgaacgtcttsctcgagatgtgatgaaggagatgggaggccatcacattgtagccctctgtgtgctcaaggggggctataaattctttgctgacctgctggattacatcaa

SEQ ID NO: 16623 - DNA, 201 bp, Homo sapiens
tatgaccttgatttattttgcatacctaatcattatgctgaggatttggaaagggtgtttattcctcatggactaattatggacaggactgaacgtcttgytcgagatgtgatgaaggagatgggaggccatcacattgtagccctctgtgtgctcaaggggggctataaattctttgctgacctgctggattacatcaaa

SEQ ID NO: 16624 - DNA, 201 bp, Homo sapiens
accccacgaagtgttggatataagccagactttgttggatttgaaattccagacaagtttgttgtaggatatgcccttgactataatgaatacttcagggdtttgaatcatgtttgtgtcattagtgaaactggaaaagcaaaatacaaagcctaagatgagagttcaagttgagtttggaaacatctggagtcctattga

SEQ ID NO: 16625 - DNA, 201 bp, Homo sapiens
  misc_feature (1)...(201): n = A,T,C or G
gaagtgttggatataagccagactttgttggatttgaaattccagacaagtttgttgtaggatatgcccttgactataatgaatacttcagggatttgaancatgtttgtgtcattagtgaaactggaaaagcaaaatacaaagcctaagatgagagttcaagttgagtttggaaacatctggagtcctattgacatcgcc

SEQ ID NO: 16626 - DNA, 201 bp, Homo sapiens
cctcatggactaattatggacaggactgaacgtcttgctcgagatgtgatgaaggagatgggaggccatcacattgtagccctctgtgtgctcaagggggkctataaattctttgctgacctgctggattacatcaaagcactgaatagaaatagtgatagatccattcctatgactgtagattttatcagactgaagagc

SEQ ID NO: 16627 - DNA, 201 bp, Homo sapiens
ttggaaagggtgtttattcctcatggactaattatggacaggactgaacgtcttgctcgagatgtgatgaaggagatgggaggccatcacattgtagcccyctgtgtgctcaaggggggctataaattctttgctgacctgctggattacatcaaagcactgaatagaaatagtgatagatccattcctatgactgtagat

SEQ ID NO: 16628 - DNA, 201 bp, Homo sapiens
tttggaaagggtgtttattcctcatggactaattatggacaggactgaacgtcttgctcgagatgtgatgaaggagatgggaggccatcacattgtagccytctgtgtgctcaaggggggctataaattctttgctgacctgctggattacatcaaagcactgaatagaaatagtgatagatccattcctatgactgtaga

SEQ ID NO: 16629 - DNA, 201 bp, Homo sapiens
tcctcatggactaattatggacaggactgaacgtcttgctcgagatgtgatgaaggagatgggaggccatcacattgtagccctctgtgtgctcaaggggsgctataaattctttgctgacctgctggattacatcaaagcactgaatagaaatagtgatagatccattcctatgactgtagattttatcagactgaagag

SEQ ID NO: 16630 - DNA, 201 bp, Homo sapiens
gtcagcccgcgcgccggccggctccgttatggcgacccgcagccctggcgtcgtgattagtgatgatgaaccaggttatgaccttgatttattttgcatamctaatcattatgctgaggatttggaaagggtgtttattcctcatggactaattatggacaggactgaacgtcttgctcgagatgtgatgaaggagatggg

SEQ ID NO: 16631 - DNA, 201 bp, Homo sapiens
ggatttggaaagggtgtttattcctcatggactaattatggacaggactgaacgtcttgctcgagatgtgatgaaggagatgggaggccatcacattgtasccctctgtgtgctcaaggggggctataaattctttgctgacctgctggattacatcaaagcactgaatagaaatagtgatagatccattcctatgactgt

SEQ ID NO: 16632 - DNA, 201 bp, Homo sapiens
taattatggacaggactgaacgtcttgctcgagatgtgatgaaggagatgggaggccatcacattgtagccctctgtgtgctcaaggggggctataaattmtttgctgacctgctggattacatcaaagcactgaatagaaatagtgatagatccattcctatgactgtagattttatcagactgaagagctattgtaatg

SEQ ID NO: 16633 - DNA, 201 bp, Homo sapiens
agcagtcagcccgcgcgccggccggctccgttatggcgacccgcagccctggcgtcgtgattagtgatgatgaaccaggttatgaccttgatttattttgsatacctaatcattatgctgaggatttggaaagggtgtttattcctcatggactaattatggacaggactgaacgtcttgctcgagatgtgatgaaggaga

SEQ ID NO: 16634 - DNA, 201 bp, Homo sapiens
gactgaacgtcttgctcgagatgtgatgaaggagatgggaggccatcacattgtagccctctgtgtgctcaaggggggctataaattctttgctgacctgstggattacatcaaagcactgaatagaaatagtgatagatccattcctatgactgtagattttatcagactgaagagctattgtaatgaccagtcaacagg

SEQ ID NO: 16635 - DNA, 201 bp, Homo sapiens
actgaacgtcttgctcgagatgtgatgaaggagatgggaggccatcacattgtagccctctgtgtgctcaaggggggctataaattctttgctgacctgcwggattacatcaaagcactgaatagaaatagtgatagatccattcctatgactgtagattttatcagactgaagagctattgtaatgaccagtcaacaggg

SEQ ID NO: 16636 - DNA, 201 bp, Homo sapiens
gaacgtcttgctcgagatgtgatgaaggagatgggaggccatcacattgtagccctctgtgtgctcaaggggggctataaattctttgctgacctgctggwttacatcaaagcactgaatagaaatagtgatagatccattcctatgactgtagattttatcagactgaagagctattgtaatgaccagtcaacaggggac

SEQ ID NO: 16637 - DNA, 201 bp, Homo sapiens
gagcagtcagcccgcgcgccggccggctccgttatggcgacccgcagccctggcgtcgtgattagtgatgatgaaccaggttatgaccttgatttattttkcatacctaatcattatgctgaggatttggaaagggtgtttattcctcatggactaattatggacaggactgaacgtcttgctcgagatgtgatgaaggag

SEQ ID NO: 16638 - DNA, 201 bp, Homo sapiens
ctaattatggacaggactgaacgtcttgctcgagatgtgatgaaggagatgggaggccatcacattgtagccctctgtgtgctcaaggggggctataaatkctttgctgacctgctggattacatcaaagcactgaatagaaatagtgatagatccattcctatgactgtagattttatcagactgaagagctattgtaat

SEQ ID NO: 16639 - DNA, 201 bp, Homo sapiens
aggactgaacgtcttgctcgagatgtgatgaaggagatgggaggccatcacattgtagccctctgtgtgctcaaggggggctataaattctttgctgaccwgctggattacatcaaagcactgaatagaaatagtgatagatccattcctatgactgtagattttatcagactgaagagctattgtaatgaccagtcaaca

SEQ ID NO: 16640 - DNA, 201 bp, Homo sapiens
cattatgctgaggatttggaaagggtgtttattcctcatggactaattatggacaggactgaacgtcttgctcgagatgtgatgaaggagatgggaggccrtcacattgtagccctctgtgtgctcaaggggggctataaattctttgctgacctgctggattacatcaaagcactgaatagaaatagtgatagatccatt

SEQ ID NO: 16641 - DNA, 201 bp, Homo sapiens
gaccttgatttattttgcatacctaatcattatgctgaggatttggaaagggtgtttattcctcatggactaattatggacaggactgaacgtcttgctcvagatgtgatgaaggagatgggaggccatcacattgtagccctctgtgtgctcaaggggggctataaattctttgctgacctgctggattacatcaaagca

SEQ ID NO: 16642 - DNA, 201 bp, Homo sapiens
tgaccttgatttattttgcatacctaatcattatgctgaggatttggaaagggtgtttattcctcatggactaattatggacaggactgaacgtcttgctbgagatgtgatgaaggagatgggaggccatcacattgtagccctctgtgtgctcaaggggggctataaattctttgctgacctgctggattacatcaaagc

SEQ ID NO: 16643 - DNA, 201 bp, Homo sapiens
cttgatttattttgcatacctaatcattatgctgaggatttggaaagggtgtttattcctcatggactaattatggacaggactgaacgtcttgctcgagrtgtgatgaaggagatgggaggccatcacattgtagccctctgtgtgctcaaggggggctataaattctttgctgacctgctggattacatcaaagcactg

SEQ ID NO: 16644 - DNA, 201 bp, Homo sapiens
tttaactggaaagaatgtcttgattgtggaagatataattgacactggcaaaacaatgcagactttgctttccttggtcaggcagtataatccaaagatgktcaaggtcgcaagcttgctggtgaaaaggaccccacgaagtgttggatataagccagactttgttggatttgaaattccagacaagtttgttgtaggata

SEQ ID NO: 16645 - DNA, 201 bp, Homo sapiens
agccctggcgtcgtgattagtgatgatgaaccaggttatgaccttgatttattttgcatacctaatcattatgctgaggatttggaaagggtgtttattcytcatggactaattatggacaggactgaacgtcttgctcgagatgtgatgaaggagatgggaggccatcacattgtagccctctgtgtgctcaaggggggc

SEQ ID NO: 16646 - DNA, 201 bp, Homo sapiens
aagaatgtcttgattgtggaagatataattgacactggcaaaacaatgcagactttgctttccttggtcaggcagtataatccaaagatggtcaaggtcgmaagcttgctggtgaaaaggaccccacgaagtgttggatataagccagactttgttggatttgaaattccagacaagtttgttgtaggatatgcccttgac

SEQ ID NO: 16647 - DNA, 201 bp, Homo sapiens
tggcgtcgtgattagtgatgatgaaccaggttatgaccttgatttattttgcatacctaatcattatgctgaggatttggaaagggtgtttattcctcatrgactaattatggacaggactgaacgtcttgctcgagatgtgatgaaggagatgggaggccatcacattgtagccctctgtgtgctcaaggggggctataa

SEQ ID NO: 16648 - DNA, 201 bp, Homo sapiens
aaagaatgtcttgattgtggaagatataattgacactggcaaaacaatgcagactttgctttccttggtcaggcagtataatccaaagatggtcaaggtckcaagcttgctggtgaaaaggaccccacgaagtgttggatataagccagactttgttggatttgaaattccagacaagtttgttgtaggatatgcccttga

SEQ ID NO: 16649 - DNA, 201 bp, Homo sapiens
atgtcttgattgtggaagatataattgacactggcaaaacaatgcagactttgctttccttggtcaggcagtataatccaaagatggtcaaggtcgcaagsttgctggtgaaaaggaccccacgaagtgttggatataagccagactttgttggatttgaaattccagacaagtttgttgtaggatatgcccttgactata

SEQ ID NO: 16650 - DNA, 201 bp, Homo sapiens
tgatgaaggagatgggaggccatcacattgtagccctctgtgtgctcaaggggggctataaattctttgctgacctgctggattacatcaaagcactgaakagaaatagtgatagatccattcctatgactgtagattttatcagactgaagagctattgtaatgaccagtcaacaggggacataaaagtaattggtggag

SEQ ID NO: 16651 - DNA, 201 bp, Homo sapiens
gcagactttgctttccttggtcaggcagtataatccaaagatggtcaaggtcgcaagcttgctggtgaaaaggaccccacgaagtgttggatataagccakactttgttggatttgaaattccagacaagtttgttgtaggatatgcccttgactataatgaatacttcagggatttgaatcatgtttgtgtcattagtga

SEQ ID NO: 16652 - DNA, 201 bp, Homo sapiens
aactggaaagaatgtcttgattgtggaagatataattgacactggcaaaacaatgcagactttgctttccttggtcaggcagtataatccaaagatggtcraggtcgcaagcttgctggtgaaaaggaccccacgaagtgttggatataagccagactttgttggatttgaaattccagacaagtttgttgtaggatatgc

SEQ ID NO: 16653 - DNA, 201 bp, Homo sapiens
cagactttgctttccttggtcaggcagtataatccaaagatggtcaaggtcgcaagcttgctggtgaaaaggaccccacgaagtgttggatataagccagwctttgttggatttgaaattccagacaagtttgttgtaggatatgcccttgactataatgaatacttcagggatttgaatcatgtttgtgtcattagtgaa

SEQ ID NO: 16654 - DNA, 201 bp, Homo sapiens
ctttccttggtcaggcagtataatccaaagatggtcaaggtcgcaagcttgctggtgaaaaggaccccacgaagtgttggatataagccagactttgttgratttgaaattccagacaagtttgttgtaggatatgcccttgactataatgaatacttcagggatttgaatcatgtttgtgtcattagtgaaactggaaaa

SEQ ID NO: 16655 - DNA, 201 bp, Homo sapiens
catggactaattatggacaggactgaacgtcttgctcgagatgtgatgaaggagatgggaggccatcacattgtagccctctgtgtgctcaaggggggctrtaaattctttgctgacctgctggattacatcaaagcactgaatagaaatagtgatagatccattcctatgactgtagattttatcagactgaagagctat

SEQ ID NO: 16656 - DNA, 201 bp, Homo sapiens
gtgtttattcctcatggactaattatggacaggactgaacgtcttgctcgagatgtgatgaaggagatgggaggccatcacattgtagccctctgtgtgckcaaggggggctataaattctttgctgacctgctggattacatcaaagcactgaatagaaatagtgatagatccattcctatgactgtagattttatcaga

SEQ ID NO: 16657 - DNA, 201 bp, Homo sapiens
ggaaagggtgtttattcctcatggactaattatggacaggactgaacgtcttgctcgagatgtgatgaaggagatgggaggccatcacattgtagccctcygtgtgctcaaggggggctataaattctttgctgacctgctggattacatcaaagcactgaatagaaatagtgatagatccattcctatgactgtagattt

SEQ ID NO: 16658 - DNA, 201 bp, Homo sapiens; identical to SEQ ID NO: 16605

SEQ ID NO: 16659 - DNA, 201 bp, Homo sapiens; identical to SEQ ID NO: 16606
  misc_feature (1)...(201): n = A,T,C or G

SEQ ID NO: 16660 - DNA, 201 bp, Homo sapiens; identical to SEQ ID NO: 16607

SEQ ID NO: 16661 - DNA, 201 bp, Homo sapiens; identical to SEQ ID NO: 16608

SEQ ID NO: 16662 - DNA, 201 bp, Homo sapiens; identical to SEQ ID NO: 16609

SEQ ID NO: 16663 - DNA, 201 bp, Homo sapiens; identical to SEQ ID NO: 16610

SEQ ID NO: 16664 - DNA, 201 bp, Homo sapiens; identical to SEQ ID NO: 16611

SEQ ID NO: 16665 - DNA, 201 bp, Homo sapiens; identical to SEQ ID NO: 16612

SEQ ID NO: 16666 - DNA, 201 bp, Homo sapiens; identical to SEQ ID NO: 16613

SEQ ID NO: 16667 - DNA, 201 bp, Homo sapiens; identical to SEQ ID NO: 16614

SEQ ID NO: 16668 - DNA, 201 bp, Homo sapiens; identical to SEQ ID NO: 16615

SEQ ID NO: 16669 - DNA, 201 bp, Homo sapiens; identical to SEQ ID NO: 16616

SEQ ID NO: 16670 - DNA, 201 bp, Homo sapiens; identical to SEQ ID NO: 16617

SEQ ID NO: 16671 - DNA, 201 bp, Homo sapiens; identical to SEQ ID NO: 16618

SEQ ID NO: 16672 - DNA, 201 bp, Homo sapiens; identical to SEQ ID NO: 16619

SEQ ID NO: 16673 - DNA, 201 bp, Homo sapiens; identical to SEQ ID NO: 16620

SEQ ID NO: 16674 - DNA, 201 bp, Homo sapiens; identical to SEQ ID NO: 16621

SEQ ID NO: 16675 - DNA, 201 bp, Homo sapiens; identical to SEQ ID NO: 16622

SEQ ID NO: 16676 - DNA, 201 bp, Homo sapiens; identical to SEQ ID NO: 16623

SEQ ID NO: 16677 - DNA, 201 bp, Homo sapiens; identical to SEQ ID NO: 16624

SEQ ID NO: 16678 - DNA, 201 bp, Homo sapiens; identical to SEQ ID NO: 16625
  misc_feature (1)...(201): n = A,T,C or G

SEQ ID NO: 16679 - DNA, 201 bp, Homo sapiens; identical to SEQ ID NO: 16626

SEQ ID NO: 16680 - DNA, 201 bp, Homo sapiens; identical to SEQ ID NO: 16627

SEQ ID NO: 16681 - DNA, 201 bp, Homo sapiens; identical to SEQ ID NO: 16628

SEQ ID NO: 16682 - DNA, 201 bp, Homo sapiens; identical to SEQ ID NO: 16629

SEQ ID NO: 16683 - DNA, 201 bp, Homo sapiens; identical to SEQ ID NO: 16630

SEQ ID NO: 16684 - DNA, 201 bp, Homo sapiens; identical to SEQ ID NO: 16631

SEQ ID NO: 16685 - DNA, 201 bp, Homo sapiens; identical to SEQ ID NO: 16632

SEQ ID NO: 16686 - DNA, 201 bp, Homo sapiens; identical to SEQ ID NO: 16633

SEQ ID NO: 16687 - DNA, 201 bp, Homo sapiens; identical to SEQ ID NO: 16634

SEQ ID NO: 16688 - DNA, 201 bp, Homo sapiens; identical to SEQ ID NO: 16635

SEQ ID NO: 16689 - DNA, 201 bp, Homo sapiens; identical to SEQ ID NO: 16636

SEQ ID NO: 16690 - DNA, 201 bp, Homo sapiens; identical to SEQ ID NO: 16637

SEQ ID NO: 16691 - DNA, 201 bp, Homo sapiens; identical to SEQ ID NO: 16638

SEQ ID NO: 16692 - DNA, 201 bp, Homo sapiens; identical to SEQ ID NO: 16639

SEQ ID NO: 16693 - DNA, 201 bp, Homo sapiens; identical to SEQ ID NO: 16640

SEQ ID NO: 16694 - DNA, 201 bp, Homo sapiens; identical to SEQ ID NO: 16641

SEQ ID NO: 16695 - DNA, 201 bp, Homo sapiens; identical to SEQ ID NO: 16642

SEQ ID NO: 16696 - DNA, 201 bp, Homo sapiens; identical to SEQ ID NO: 16643

SEQ ID NO: 16697 - DNA, 201 bp, Homo sapiens; identical to SEQ ID NO: 16644

SEQ ID NO: 16698 - DNA, 201 bp, Homo sapiens; identical to SEQ ID NO: 16645

SEQ ID NO: 16699 - DNA, 201 bp, Homo sapiens; identical to SEQ ID NO: 16646

SEQ ID NO: 16700 - DNA, 201 bp, Homo sapiens; identical to SEQ ID NO: 16647

SEQ ID NO: 16701 - DNA, 201 bp, Homo sapiens; identical to SEQ ID NO: 16648

SEQ ID NO: 16702 - DNA, 201 bp, Homo sapiens; identical to SEQ ID NO: 16649

SEQ ID NO: 16703 - DNA, 201 bp, Homo sapiens; identical to SEQ ID NO: 16650

SEQ ID NO: 16704 - DNA, 201 bp, Homo sapiens; identical to SEQ ID NO: 16651

SEQ ID NO: 16705 - DNA, 201 bp, Homo sapiens; identical to SEQ ID NO: 16652

SEQ ID NO: 16706 - DNA, 201 bp, Homo sapiens; identical to SEQ ID NO: 16653

SEQ ID NO: 16707 - DNA, 201 bp, Homo sapiens; identical to SEQ ID NO: 16654

SEQ ID NO: 16708 - DNA, 201 bp, Homo sapiens; identical to SEQ ID NO: 16655

SEQ ID NO: 16709 - DNA, 201 bp, Homo sapiens; identical to SEQ ID NO: 16656

SEQ ID NO: 16710 - DNA, 201 bp, Homo sapiens; identical to SEQ ID NO: 16657

SEQ ID NO: 16711 - DNA, 201 bp, Homo sapiens
tgtacctgctgcggctgcggcgcatccacaggcgcactccccggagcagctcggccgccgccctctggatggaggagggccttcccgcccagaatgccccrgggaccttgtgatccagctcacagctccacgaagactcaaaaggaaaagccatttttgcctcagggtttctcctctttattttcctgtggttttgttttt

SEQ ID NO: 16712 - DNA, 201 bp, Homo sapiens
gtctagattattttcaagatgagttttgaaacaaaccaagaaacctgcccctcacccaaaattgtttaaaaagagaccactcaagggagttcattatgccrtatggagatgtctgcagtcgcagcaaatcacattccagagaaggtctcgcgtaggtgaagacagccaggtgctttctctaagagatacagggtgggtgag

SEQ ID NO: 16713 - DNA, 201 bp, Homo sapiens
gagagaaaaggcctgtattgccatgaactgagcattaggggcagttctgctgagggatcagaagagaagaccaagggaattctgtcccagttgtggctcaractgcctcaggtgcagcttaacctgcgtctctggaaggtaaaatgcatctgatccttgaggcaagagctgtgggggcatggctccctcacctggatttca

SEQ ID NO: 16714 - DNA, 201 bp, Homo sapiens
ctggagggaggtggaaagatgcattctgtcagtggagaggggactgaatagtgatgctttcatagaaccaaaaaacttactgcctgaaatgataatcctcttttttctctatcttgaaagctctaacctgaagagggtgatttttttttttatttattgttcaggtctgttactgtatatgttttctttgcaaatttaaat

SEQ ID NO: 16715 - DNA, 201 bp, Homo sapiens
ttaaactcaggcctacacagagtagttttccttataaggagcatgtatcacttagcaagaaactaaaaatggcaaatgagtttttcatcctttaagaaaaraatcagctttagaattctctgcggtcagttgtgtgcaatgcaacaaaactacctttcagtaaattacttagttatttatttcagtgttttgtttcttttg

SEQ ID NO: 16716 - DNA, 201 bp, Homo sapiens
ttcctgtcaactataaaagcttaaagactgccttgcaagtttacgacaaggaggttcagtggacccttggagccatcctctacaggacccgctttctaccrttaagagacatccagcaggaggccttccgagccagtcacacccactggcggggcgtttcctttgtctacaaccactacctgttctctggctgcttcctgg

SEQ ID NO: 16717 - DNA, 201 bp, Homo sapiens
gttgttaagaaaggggtgagcttctggctacctaataagttggtcttggccacctgcctgcgacacttcctggaggagccatggattattggtggaggctkcagggagctggcgatggagccactggtgtcagcagcagagagggaagaaaggaaaggaaggggccacaaatggttgaagtgggcaggtgggcacccaggg

SEQ ID NO: 16718 - DNA, 201 bp, Homo sapiens
cctgctgtctagaagtattgcgtttagccattttgagtacagcattaaattgaggagtggggaagagggaaattcacttgatttttgctgcacaggatatytgccaaaaataaatgagatttctggggtttctctaaggaatgttaaatttaaacacatgcactttgatactggagggaggtggaaagatgcattctgtca

SEQ ID NO: 16719 - DNA, 201 bp, Homo sapiens
aattctatggcttctccgaattctactactgcaccgaggatgtgttacgaatggggggagactacaatgctgctaaatttactaaagctgcaaaggattaytgtgcaacaaagtggtccattttgcgggaacgctttgaccgaggactgtacgcctctcatgctgacctccacaggcttaagtatcagtgcttcaaatcgg

SEQ ID NO: 16720 - DNA, 201 bp, Homo sapiens
gcaatgctgctcgacagagatacgaagacagaatatttgccaacaccattcaaaagaacaggctcctgggtaaacagactggtctgactcctgatatgccrtacttggacccctgcctacccctagacattaaagatgaaatccagcaaaatggacaaaccatatacctacgagggactggagactttgacctgtgtcgag

SEQ ID NO: 16721 - DNA, 201 bp, Homo sapiens
aattagctgggtgtggtggcgggcgcccgtagtcccagctactcaggaggctgaggcaggagaatggcatgaacctgggaggcagagcttgcagtgagccragatcacaccactgcactccagcctgggcgacagagtgagactccgtctcaaaaaaaaaaaaatgcattgtttataagccctgctgtctagaagtattgc

SEQ ID NO: 16722 - DNA, 201 bp, Homo sapiens
aagatgaaatccagcaaaatggacaaaccatatacctacgagggactggagactttgacctgtgtcgagagactatccagcctttcatgaataaaacaaaygagacccagacttccctcaatggggtctaccagcccccaattcacttccagaacagtgaattctatggcttctccgaattctactactgcaccgaggatg

SEQ ID NO: 16723 - DNA, 201 bp, Homo sapiens
tatgtggccacgtttcttgggtttggtggcaatgctgctcgacagagatacgaagacagaatatttgccaacaccattcaaaagaacaggctcctgggtaracagactggtctgactcctgatatgccgtacttggacccctgcctacccctagacattaaagatgaaatccagcaaaatggacaaaccatatacctacga

SEQ ID NO: 16724 - DNA, 201 bp, Homo sapiens
gctttgcgtcctcacagcaggaagaagtagctaaaaacttgttagctgaatttaacttgggatgtgatgttcaccaaactgagcatgtgtatcgagtctaygtggccacgtttcttgggtttggtggcaatgctgctcgacagagatacgaagacagaatatttgccaacaccattcaaaagaacaggctcctgggtaaac

SEQ ID NO: 16725 - DNA, 201 bp, Homo sapiens
tgcagaagtaatttctgggaaacaagaaggtgtgtatgcttggattggcattaattttgtccttggacgatttgagcatattgaagatgatgatgaggccrttgtggaagttaacattcctggaagtgaaagcagcgaagccattgtccgtaaaaggacagcgggcattctcgacatgggcggcgtgtcgactcagatagc

SEQ ID NO: 16726 - DNA, 201 bp, Homo sapiens
ttaaattttttaaaccatttatatccaaaacagagaaacatgggcaccaggagataaccatttataaaagtgatagtgaactatcgactacagctttgtgygagtgtgtgaaaaatcccaagaaaccagcgtgaggggaggcaatgctggttctttaaaaacacacacttcagaatttactggtacattttatttagaaaa

SEQ ID NO: 16727 - DNA, 201 bp, Homo sapiens
acaaagagacacctctctacattctctgcacggctggaatgagaatcctccccgaaagccagcagaaagctattctggaagaccttctgaccgatatcccygtgcactttgactttctgttttctgactctcatgcagaagtaatttctgggaaacaagaaggtgtgtatgcttggattggcattaattttgtccttggac

SEQ ID NO: 16728 - DNA, 201 bp, Homo sapiens
tggattggcatatgtgagattggtgttttttcacctatttatttagttgagaagtttggggaattctcgtacagtttttttaggtggagtttgttttgtgygagtgtctgtgtgtgctgttccctaactccagaacagttaaattcctgtagttggtagcagattagtacccagaagtggggttgttgctataacagataa

SEQ ID NO: 16729 - DNA, 201 bp, Homo sapiens
ctatgtggccacgtttcttgggtttggtggcaatgctgctcgacagagatacgaagacagaatatttgccaacaccattcaaaagaacaggctcctgggtraacagactggtctgactcctgatatgccgtacttggacccctgcctacccctagacattaaagatgaaatccagcaaaatggacaaaccatatacctacg

SEQ ID NO: 16730 - DNA, 201 bp, Homo sapiens
ttaccagcagcctggggacccaggctctgcctctggatttacctgcatcgtatttgcgcttcgtggtcaaagttgttaagaaaggggtgagcttctggctmcctaataagttggtcttggccacctgcctgcgacacttcctggaggagccatggattattggtggaggctgcagggagctggcgatggagccactggtgt

SEQ ID NO: 16731 - DNA, 201 bp, Homo sapiens
agtgaagacgctgctggtggctgaggccagtaacatggggcccctgcccagccaccctgaaggctgggtaggtccctcttttcaccaccagttttccacayctgtgtactctagattaacaaactctggataaacagatatttacattttaaactcaggcctacacagagtagttttccttataaggagcatgtatcactt

SEQ ID NO: 16732 - DNA, 201 bp, Homo sapiens
tgccatgaactgagcattaggggcagttctgctgagggatcagaagagaagaccaagggaattctgtcccagttgtggctcaaactgcctcaggtgcagcytaacctgcgtctctggaaggtaaaatgcatctgatccttgaggcaagagctgtgggggcatggctccctcacctggatttcaaagcgtgttaccagcagc

SEQ ID NO: 16733 - DNA, 201 bp, Homo sapiens; identical to SEQ ID NO: 16711

SEQ ID NO: 16734 - DNA, 201 bp, Homo sapiens; identical to SEQ ID NO: 16712

SEQ ID NO: 16735 - DNA, 201 bp, Homo sapiens; identical to SEQ ID NO: 16713

SEQ ID NO: 16736 - DNA, 201 bp, Homo sapiens; identical to SEQ ID NO: 16714

SEQ ID NO: 16737 - DNA, 201 bp, Homo sapiens; identical to SEQ ID NO: 16715

SEQ ID NO: 16738 - DNA, 201 bp, Homo sapiens; identical to SEQ ID NO: 16716

SEQ ID NO: 16739 - DNA, 201 bp, Homo sapiens; identical to SEQ ID NO: 16717

SEQ ID NO: 16740 - DNA, 201 bp, Homo sapiens; identical to SEQ ID NO: 16718

SEQ ID NO: 16741 - DNA, 201 bp, Homo sapiens; identical to SEQ ID NO: 16719

SEQ ID NO: 16742 - DNA, 201 bp, Homo sapiens; identical to SEQ ID NO: 16720

SEQ ID NO: 16743 - DNA, 201 bp, Homo sapiens; identical to SEQ ID NO: 16721

SEQ ID NO: 16744 - DNA, 201 bp, Homo sapiens; identical to SEQ ID NO: 16722

SEQ ID NO: 16745 - DNA, 201 bp, Homo sapiens; identical to SEQ ID NO: 16723

SEQ ID NO: 16746 - DNA, 201 bp, Homo sapiens
cgtacgaagtccccaaaactgaagaagtagctaaaaacttgttagctgaatttaacttgggatgtgatgttcaccaaactgagcatgtgtatcgagtctaygtggccacgtttcttgggtttggtggcaatgctgctcgacagagatacgaagacagaatatttgccaacaccattcaaaagaacaggctcctgggtaaac

SEQ ID NO: 16747 - DNA, 201 bp, Homo sapiens; identical to SEQ ID NO: 16725

SEQ ID NO: 16748 - DNA, 201 bp, Homo sapiens; identical to SEQ ID NO: 16726

SEQ ID NO: 16749 - DNA, 201 bp, Homo sapiens; identical to SEQ ID NO: 16727

SEQ ID NO: 16750 - DNA, 201 bp, Homo sapiens; identical to SEQ ID NO: 16728

SEQ ID NO: 16751 - DNA, 201 bp, Homo sapiens; identical to SEQ ID NO: 16729

SEQ ID NO: 16752 - DNA, 201 bp, Homo sapiens; identical to SEQ ID NO: 16730

SEQ ID NO: 16753 - DNA, 201 bp, Homo sapiens; identical to SEQ ID NO: 16731

SEQ ID NO: 16754 - DNA, 201 bp, Homo sapiens; identical to SEQ ID NO: 16732

SEQ ID NO: 16755 - DNA, 201 bp, Homo sapiens; identical to SEQ ID NO: 16711

SEQ ID NO: 16756 - DNA, 201 bp, Homo sapiens; identical to SEQ ID NO: 16712

SEQ ID NO: 16757 - DNA, 201 bp, Homo sapiens; identical to SEQ ID NO: 16713

SEQ ID NO: 16758 - DNA, 201 bp, Homo sapiens; identical to SEQ ID NO: 16714

SEQ ID NO: 16759 - DNA, 201 bp, Homo sapiens; identical to SEQ ID NO: 16715

SEQ ID NO: 16760 - DNA, 117 bp, Homo sapiens
cgggcgcaggcggtgamgtgttgccggcgggggccgggcgggggtgcggctccaggaaaggagcgcggcctccaggaagccggctggccgtgatgctgcccaatggtggtcccccgc

SEQ ID NO: 16761 - DNA, 201 bp, Homo sapiens; identical to SEQ ID NO: 16716

SEQ ID NO: 16762 - DNA, 201 bp, Homo sapiens; identical to SEQ ID NO: 16717

SEQ ID NO: 16763 - DNA, 201 bp, Homo sapiens; identical to SEQ ID NO: 16718

SEQ ID NO: 16764 - DNA, 201 bp, Homo sapiens; identical to SEQ ID NO: 16719

SEQ ID NO: 16765 - DNA, 201 bp, Homo sapiens; identical to SEQ ID NO: 16720

SEQ ID NO: 16766 - DNA, 201 bp, Homo sapiens; identical to SEQ ID NO: 16721

SEQ ID NO: 16767 - DNA, 201 bp, Homo sapiens; identical to SEQ ID NO: 16722

SEQ ID NO: 16768 - DNA, 201 bp, Homo sapiens; identical to SEQ ID NO: 16723

SEQ ID NO: 16769 - DNA, 201 bp, Homo sapiens; identical to SEQ ID NO: 16724

SEQ ID NO: 16770 - DNA, 201 bp, Homo sapiens; identical to SEQ ID NO: 16725

SEQ ID NO: 16771 - DNA, 201 bp, Homo sapiens; identical to SEQ ID NO: 16727

SEQ ID NO: 16772 - DNA, 201 bp, Homo sapiens; identical to SEQ ID NO: 16726

SEQ ID NO: 16773 - DNA, 201 bp, Homo sapiens; identical to SEQ ID NO: 16728

SEQ ID NO: 16774 - DNA, 201 bp, Homo sapiens; identical to SEQ ID NO: 16729

SEQ ID NO: 16775 - DNA, 201 bp, Homo sapiens; identical to SEQ ID NO: 16730

SEQ ID NO: 16776 - DNA, 201 bp, Homo sapiens; identical to SEQ ID NO: 16731

SEQ ID NO: 16777 - DNA, 201 bp, Homo sapiens; identical to SEQ ID NO: 16732

SEQ ID NO: 16778 - DNA, 201 bp, Homo sapiens
ccctcttaccattcgagggccctcgtctgctggccagtccacccctagtccccacctggtgccttcacctgccccatctccagggcctggtccggtacccyctcgccccccagcagcagaaccacccccttgcctgcgccgaggcgccgcagctgcagacctgctctcctccagcccggagagccagcatggcggcactca

SEQ ID NO: 16779 - DNA, 201 bp, Homo sapiens
accccacccctgctcctcccccgccctgcttccctgtgcccccaccgcagccactgcccacgccttacacctaccctgcaggggctaagcaacccatcccrgcacagcaccacttctcttctgggatccccgcaggttttccagccccaaggattgggccccagccccagccccatcctcagccccatccttcacaagcgt

SEQ ID NO: 16780 - DNA, 201 bp, Homo sapiens
ggaagagctttctggtggcccgcatcagtgcacaggtggtagattactacaaggaggcatgccgggccttggagaaccccgacactgcctcactgctgggycggatccagaaggactggaagaaacttgtgcagatgaagatctactacttcgcagccgtggctcatctgcacatgggaaagcaggccgaggagcagcaga

SEQ ID NO: 16781 - DNA, 185 bp, Homo sapiens
gagcttctcagtgggcacagtctcttactcccatttctgctgcctttggccctgcctggcccagcctgcacccctgtggggtggaaatgtactgcaggctytgggtcaggttctgctcctttatgggacccgacatttttcagctctttgctattgaaataataaaccaccctgttctgtggccc

SEQ ID NO: 16782 - DNA, 201 bp, Homo sapiens
cagaatgctgtccgtgtcccacgagactttgagggctgtagtgtcctccgcaagtacctcggccagcttcattacctgcagagtcgggtccccatgggctygggccaggaggccgctgtccctgtcacctggacagagatcttctcaggcaagtctgtggcccatgaggacatcaagtacgagcaggcctgtattctctac

SEQ ID NO: 16783 - DNA, 201 bp, Homo sapiens
ctcctgggggtgggcagcccctgctgcagcccaccaaggtggatgcagctgagggtcgtcggccgcaggccctgcggctgattgagcgggacccctatgarcatcctgagaggctgcggcagttgcagcaggagctggaggcctttcggggtcagctgggggatgtgggagctctggacactgtctggcgagagctgcaag

SEQ ID NO: 16784 - DNA, 201 bp, Homo sapiens
acgcgcttcgcttcactatggatgtcattgggggaaagtacaattctgccaagaaggacaacgacttcatttaccatgaggctgtcccagcattggacacycttcagcctgtaaaaggagcccccttggtgaagcccttgccagtgaaccccacagacccagctgttacaggccctgacatctttgccaaactggtaccca

SEQ ID NO: 16785 - DNA, 201 bp, Homo sapiens
aggcagcccctcttaccattcgagggccctcgtctgctggccagtccacccctagtccccacctggtgccttcacctgccccatctccagggcctggtccrgtaccccctcgccccccagcagcagaaccacccccttgcctgcgccgaggcgccgcagctgcagacctgctctcctccagcccggagagccagcatggcg

SEQ ID NO: 16786 - DNA, 201 bp, Homo sapiens
ttcaccaacagtgagctgcaccgtgccatgaacctgcacgtcggcaacctgcgcctgctcagcgggccgcttgaccaggtccgggctgccctgcccacacyggccctctccccagaggacaaggccgtgctgcaaaacctaaagcgcatcctggctaaggtgcaggagatgcgggaccagcgcgtgtccctggagcagcag

SEQ ID NO: 16787 - DNA, 201 bp, Homo sapiens; identical to SEQ ID NO: 16778

SEQ ID NO: 16788 - DNA, 201 bp, Homo sapiens; identical to SEQ ID NO: 16779

SEQ ID NO: 16789 - DNA, 201 bp, Homo sapiens; identical to SEQ ID NO: 16780

SEQ ID NO: 16790 - DNA, 184 bp, Homo sapiens
gagcttctcagtgggcacagtctcttactcccatttctgctgcctttggccctgcctggcccagcctgcacccctgtggggtggaaatgtactgcaggctytgggtcaggttctgctcctttatgggacccgacatttttcagctctttgctattgaaataataaaccaccctgttctgtggcc

SEQ ID NO: 16791 - DNA, 201 bp, Homo sapiens; identical to SEQ ID NO: 16782

SEQ ID NO: 16792 - DNA, 201 bp, Homo sapiens; identical to SEQ ID NO: 16783

SEQ ID NO: 16793 - DNA, 201 bp, Homo sapiens; identical to SEQ ID NO: 16784

SEQ ID NO: 16794 - DNA, 201 bp, Homo sapiens; identical to SEQ ID NO: 16785

SEQ ID NO: 16795 - DNA, 201 bp, Homo sapiens; identical to SEQ ID NO: 16786

SEQ ID NO: 16796 - DNA, 201 bp, Homo sapiens
gctagtgccctacttggagaagagaataaaggcttctattacatcatgaaagagcttccacaggaaaggctgttaattgctgatgtggcaatttcagctastgaattcatgtttgaagaaaccaggaactatgttaaacaaagaaaagcttttggcaaaacagttgctcacctacagacagtgcaacataaattagcagaa

SEQ ID NO: 16797 - DNA, 201 bp, Homo sapiens
ttttctgaatcttgcctaggtgtttcatttatctctaaaattctaaaaagcataaatcattcaaatcttcaaaccaaggcagaaataattttatgtcgctmtagtataaaaacattaataagatagcacattgacttttaaagggaaaagtaaatataacttagcatgtaaactcatttcggctaccatttgctccaaatt

SEQ ID NO: 16798 - DNA, 201 bp, Homo sapiens
cttctccgagggtccctacgcgtcctgggcggccaccgtgcgccgcgccagctgcccgccgcgcgatgttctcattccggaggggaagaacgtctagaaaytccttctgctaaaaaattaacagatataggaattcgaagaatcttttctccagagcatgacattttccggaaaagtgtaaggaagtttttccaagaagaa

SEQ ID NO: 16799 - DNA, 201 bp, Homo sapiens
cttttttgggaggacaccacaggtggacgcctcagctgatcgtcctccctcccggggaccctgccccgagtcgccgagtagccgcagagtcgcctccgtcsccccgccgcccctgtgtttcggacatggccgcacgccttctccgagggtccctacgcgtcctgggcggccaccgtgcgccgcgccagctgcccgccgcgc

SEQ ID NO: 16800 - DNA, 201 bp, Homo sapiens
aatttcagctagtgaattcatgtttgaagaaaccaggaactatgttaaacaaagaaaagcttttggcaaaacagttgctcacctacagacagtgcaacatmaattagcagaattaaaaacacatatatgtgtaacccgagcatttgtggacaactgtctccagctgcatgaagcgaaacgtttggactccgccactgcttg

SEQ ID NO: 16801 - DNA, 201 bp, Homo sapiens
ccaacactagtcctgaattccaagaaatgagtctcttggaaagggcagatcagcggtttgtatggaatggtcatcttctaagagaactttctgcacagccrgaggttcatcggtttgcccttccagtgttacatggctttattaccatgcattcatgttctattaatggaaaatactttgattggattctcatctcgagga

SEQ ID NO: 16802 - DNA, 201 bp, Homo sapiens
ttatgttgtccttaaatatttctaaaagcgcctttatttcagcattacctttttttcatcactatcttttataaaacattaatataagtcgttacttttawaaactaaaggaaataatagctggaaaaccctctgtagtttaaaatcagtcattaaactcacaatagggtaagtaaatatagccacctgttaacatgtaaa

SEQ ID NO: 16803 - DNA, 150 bp, Homo sapiens
agaggctgggagctgcggccgctgtgccagggtgaccggtagagttgtasccgaggtggcggcgcggggcggggcgggcggagagagaaggaaggaggtggttgtgcaggatggcgacggcggcctacgagcagctgaagctgcatatca

SEQ ID NO: 16804 - DNA, 201 bp, Homo sapiens
ctggccaggtggtggcaaaccaggaaggcgtgttccgaagcaattgcatggattgtctagatagaaccaatgtgatccagagtttgttagctcgtcgttcwcttcaggcccaacttcagagactaggagttttgcatgtgggacaaaagcttgaagaacaagatgaatttgagaagatttacaaaaatgcctgggctgaca

SEQ ID NO: 16805 - DNA, 201 bp, Homo sapiens
gccagtgcaccagcagtttaggtgtgatgagagaattcagatatactttatctttttaaaaaagtgtaaataaaatcaaagaatgtaaagtctatctcttscgctagaggtccaaagctgcctctgttttaaagattatcccaatgtggaagatgcccatgactggtcagctacttcctcctatacattttggtttctttg

SEQ ID NO: 16806 - DNA, 201 bp, Homo sapiens; identical to SEQ ID NO: 16801

SEQ ID NO: 16807 - DNA, 201 bp, Homo sapiens; identical to SEQ ID NO: 16802

SEQ ID NO: 16808 - DNA, 150 bp, Homo sapiens; identical to SEQ ID NO: 16803

SEQ ID NO: 16809 - DNA, 201 bp, Homo sapiens; identical to SEQ ID NO: 16804

SEQ ID NO: 16810 - DNA, 201 bp, Homo sapiens; identical to SEQ ID NO: 16805

SEQ ID NO: 16811 - DNA, 201 bp, Homo sapiens; identical to SEQ ID NO: 16801

SEQ ID NO: 16812 - DNA, 201 bp, Homo sapiens
aatataagtcgttacttttagaaactaaaggaaataatagctggaaaaccctctgtagtttaaaatcagtcattaaactcacaatagggtaagtaaatatwgccacctgttaacatgtaaataagcataatttgttccaaagatggaatattgaaacttagttcatgtctgctgtaaaatattatttaaatgctgctgggc

SEQ ID NO: 16813 - DNA, 150 bp, Homo sapiens; identical to SEQ ID NO: 16803

SEQ ID NO: 16814 - DNA, 201 bp, Homo sapiens
agtttgttagctcgtcgttcacttcaggcccaacttcagagactaggagttttgcatgtgggacaaaagcttgaagaacaagatgaatttgagaagatttwcaaaaatgcctgggctgacaacgcaaatgcttgtgccaagcaatatgcgggaactggtgccttgaagactgactttaccagaactggaaagagaactcat

SEQ ID NO: 16815 - DNA, 201 bp, Homo sapiens
gaatgtaaagtctatctcttacgctagaggtccaaagctgcctctgttttaaagattatcccaatgtggaagatgcccatgactggtcagctacttcctcstatacattttggtttctttgagggtcactcattgagacacgcaggcctctgagagggtcttgttctagatttcatattgcacttggagggtaacagctgc

SEQ ID NO: 16816 - DNA, 201 bp, Homo sapiens
gactgtggaccttgacaactcggtttattgaggccagggcttctgggaagtctccccagcctcagctgctgagtaacaaggagaaagccgaggccaggaakctctgggagtacaagaactccgtcatctctcaggtgaccacccatttcacagaggacttctcactgaattctgcaatttctcagctgatgggactcagca

SEQ ID NO: 16817 - DNA, 201 bp, Homo sapiens
atatcttgtgggatgtgaaaactgatgctctccctggggtgctgagatggcaacaacgactgtggaccttgacaactcggtttattgaggccagggcttcygggaagtctccccagcctcagctgctgagtaacaaggagaaagccgaggccaggaagctctgggagtacaagaactccgtcatctctcaggtgaccaccc

SEQ ID NO: 16818 - DNA, 201 bp, Homo sapiens
ctacagataaaaaacattatttaatctatctgggatttactccggcttatgatttgagggccttctcaccttctgaagaatggcttctgtttggcagagaytgggtttttatgcctctcttctgaaaagacagctaaatggtgggccagatgtcatcaagtgggaaaggagagtaattcccggatgtaccagaagcatcta

SEQ ID NO: 16819 - DNA, 201 bp, Homo sapiens
gatggcaacaacgactgtggaccttgacaactcggtttattgaggccagggcttctgggaagtctccccagcctcagctgctgagtaacaaggagaaagcygaggccaggaagctctgggagtacaagaactccgtcatctctcaggtgaccacccatttcacagaggacttctcactgaattctgcaatttctcagctga

SEQ ID NO: 16820 - DNA, 201 bp, Homo sapiens
tttctcagctgatgggactcagcaatgccctctcgcaagcctctcagagcgtcattctccacagccccgagtttgaggatgctttgtgtgccctgatggtratggctgctccactggcccctcatgtaacctcagagatctgggcaggcctggcgctggtgccgaggaagctctgtgcccactacacttgggatgccagtg

SEQ ID NO: 16821 - DNA, 201 bp, Homo sapiens
tgggaagccatcagagacactgctggtgggagcaggaaggagcagtgcccctcgagcagccaggaagcctgcggatctgggaaatggctctgccttaggcrcttctcgggaatttgaggccagcctgaggaactgcaggactcaggtgcaatgtgccagccacttggaactgctaactgagcctccagatggtagtgaatg

SEQ ID NO: 16822 - DNA, 201 bp, Homo sapiens
tgctttgaatcaaaaggcaggcagtgctggttcctctgcctgtgtccccaccactccccagctctgtcatgcaggcctgtcctccccaaccccagctggaygtgcctcccaggcctgctgtggttctgacacacaggatcccaggcaaggcaccacttcctcacatgaatgaggagcagcaagtcataaccactcccttgg

SEQ ID NO: 16823 - DNA, 201 bp, Homo sapiens
agcggtactggggcacaccaatccccattgtccactgcccagtctgtggccccacacctgtgcccctggaggacttgcctgtgaccctgcccaacatcgcrtctttcactggcaagggaggccccccactggccatggcttcagagtgggtgaactgctcctgcccaaggtgcaagggagcagccaagagagagacagaca

SEQ ID NO: 16824 - DNA, 201 bp, Homo sapiens
agaaagcccgggggaagagagtgggtggagacgtgacaagtgataaactgaaagactggctgatttcacggcagcggtactggggcacaccaatccccatygtccactgcccagtctgtggccccacacctgtgcccctggaggacttgcctgtgaccctgcccaacatcgcatctttcactggcaagggaggccccccac

SEQ ID NO: 16825 - DNA, 201 bp, Homo sapiens
acagactcctacatgggcacagctctctgaaggaagccttgaggatggcccttgtccctggcaaagattgcctcacgcctgtaatggctgtgaacatgctyacccagcaggaggtccctgtcgttattttggccaaagctgacttggaaggctctctggattcaaaaataggaattcccagtactagctcagaggacacca

SEQ ID NO: 16826 - DNA, 201 bp, Homo sapiens
agatctgggcaggcctggcgctggtgccgaggaagctctgtgcccactacacttgggatgccagtgtgctgctccaggcatggcctgctgtggacccggakttcctgcagcagcctgaggttgtccagatggcagttctgatcaacaataaagcttgtggcaaaattcctgtgccccaacaagttgcccgggaccaggaca

SEQ ID NO: 16827 - DNA, 201 bp, Homo sapiens
aaacgaaagagaagttagaggtgacgtgggagaagatgagtaagtccaaacacaacggggtggacccagaggaagttgtggagcagtatgggatcgacacrattcggctctacatcctttttgctgcccctcctgagaaggatatcttgtgggatgtgaaaactgatgctctccctggggtgctgagatggcaacaacgac

SEQ ID NO: 16828 - DNA, 201 bp, Homo sapiens
gcagcctgaggttgtccagatggcagttctgatcaacaataaagcttgtggcaaaattcctgtgccccaacaagttgcccgggaccaggacaaagtccacraatttgttcttcaaagcgagctgggtgtcaggcttttgcaaggacgaagcatcaagaagtccttcctttccccgagaactgccctcatcaacttcctggt

SEQ ID NO: 16829 - DNA, 201 bp, Homo sapiens
ctgcccaagggctacgacggctggcaggctgtggacgcaacgccgcaggagcgaagccagggtgtcttctgctgtgggccatcaccactgaccgccatccrcaaaggtgacatctttattgtctatgacaccagattcgtcttctcagaagtgaatggtgacaggctcatctggttggtgaagatggtgaatgggcaggag

SEQ ID NO: 16830 - DNA, 201 bp, Homo sapiens
agaaggctcctctgaggagaggcaggtcatggatcatgccttcctccttctcagttctgagagggagcacagacgacctgtaaaagagaactttcttcacrtgtcggtacaatcagatgatgtgctgctgggaaactctgttaatttcaccgtgattcttaaaaggaagaccgctgccctacagaatgtcaacatcttggg

SEQ ID NO: 16831 - DNA, 201 bp, Homo sapiens
atcctagcatcgccaaacacaccctggtggtgctcgacccgaggacgccctcagaccactacaactggcaggcaacccttcaaaatgagtctggcaaagasgtcacagtggctgtcaccagttcccccaatgccatcctgggcaagtaccaactaaacgtgaaaactggaaaccacatccttaagtctgaagaaaacatcc

SEQ ID NO: 16832 - DNA, 201 bp, Homo sapiens
cagccgaggccacagaatcccatccctttcctgagtcatggcctcaaaaatcagggccaccattgtctcaattcaaatccatagatttcgaagccacagaktctctccctggagcagcagactatgggcagcccagtgctgccacctgctgacgacccttgagaagctgccatatcttcaggccatgggttcaccagccct

SEQ ID NO: 16833 - DNA, 201 bp, Homo sapiens
gcaggaggagttacacgtaatttcaatggagaccacaagcatcgggaaaaacatcagcaccaaggcagtgggccaagacaggcggagagatatcacctatsagtacaagtatccagaaggctcctctgaggagaggcaggtcatggatcatgccttcctccttctcagttctgagagggagcacagacgacctgtaaaaga

SEQ ID NO: 16834 - DNA, 201 bp, Homo sapiens
gagagcgttgggcatcccagcacgcagtgtgacaggcttcgattcagctcacgacacagaaaggaacctcacggtggacacctatgtgaatgagaatggcragaaaatcaccagtatgacccacgactctgtctggaatttccatgtgtggacggatgcctggatgaagcgaccggatctgcccaagggctacgacggctg

SEQ ID NO: 16835 - DNA, 201 bp, Homo sapiens
cagataggagggaccccgtgctggtgtgcagggccatgtgtgctatgatgagctttgagaaaggccagggcgtgctcattgggaattggactggggactaygaaggtggcacagccccatacaagtggacaggcagtgccccgatcctgcagcagtactacaacacgaagcaggctgtgtgctttggccagtgctgggtgt

SEQ ID NO: 16836 - DNA, 201 bp, Homo sapiens
atgtgtgctatgatgagctttgagaaaggccagggcgtgctcattgggaattggactggggactacgaaggtggcacagccccatacaagtggacaggcastgccccgatcctgcagcagtactacaacacgaagcaggctgtgtgctttggccagtgctgggtgtttgctgggatcctgactacagtgctgagagcgttg

SEQ ID NO: 16837 - DNA, 201 bp, Homo sapiens
tccgcaaaggtgacatctttattgtctatgacaccagattcgtcttctcagaagtgaatggtgacaggctcatctggttggtgaagatggtgaatgggcargaggagttacacgtaatttcaatggagaccacaagcatcgggaaaaacatcagcaccaaggcagtgggccaagacaggcggagagatatcacctatgagt

SEQ ID NO: 16838 - DNA, 201 bp, Homo sapiens
gatagagtcttccctggcattgcaggagagaatctgaagggatgatggatgcatcaaaagagctgcaagttctccacattgacttcttgaatcaggacaaygccgtttctcaccacacatgggagttccaaacgagcagtcctgtgttccggcgaggacaggtgtttcacctgcggctggtgctgaaccagcccctacaat

SEQ ID NO: 16839 - DNA, 201 bp, Homo sapiens
agagtcttccctggcattgcaggagagaatctgaagggatgatggatgcatcaaaagagctgcaagttctccacattgacttcttgaatcaggacaacgcygtttctcaccacacatgggagttccaaacgagcagtcctgtgttccggcgaggacaggtgtttcacctgcggctggtgctgaaccagcccctacaatcct

SEQ ID NO: 16840 - DNA, 201 bp, Homo sapiens
caccccaataaaaactggacccaagaaatttatcgtcaagttaagttccaaacaagtgaaagagattaatgctcagaagattgttctcatcaccaagtagscttgtctgatgctgtggagccttagttgagatttcagcatttcctaccttgtgcttagctttcagattatggatgattaaatttgatgacttatatgagg

SEQ ID NO: 16841 - DNA, 201 bp, Homo sapiens
tctgcccaagggctacgacggctggcaggctgtggacgcaacgccgcaggagcgaagccagggtgtcttctgctgtgggccatcaccactgaccgccatcygcaaaggtgacatctttattgtctatgacaccagattcgtcttctcagaagtgaatggtgacaggctcatctggttggtgaagatggtgaatgggcagga

SEQ ID NO: 16842 - DNA, 201 bp, Homo sapiens
catctttattgtctatgacaccagattcgtcttctcagaagtgaatggtgacaggctcatctggttggtgaagatggtgaatgggcaggaggagttacacrtaatttcaatggagaccacaagcatcgggaaaaacatcagcaccaaggcagtgggccaagacaggcggagagatatcacctatgagtacaagtatccaga

SEQ ID NO: 16843 - DNA, 201 bp, Homo sapiens
gctggtgtgcagggccatgtgtgctatgatgagctttgagaaaggccagggcgtgctcattgggaattggactggggactacgaaggtggcacagccccayacaagtggacaggcagtgccccgatcctgcagcagtactacaacacgaagcaggctgtgtgctttggccagtgctgggtgtttgctgggatcctgactac

SEQ ID NO: 16844 - DNA, 201 bp, Homo sapiens
accacatccttaagtctgaagaaaacatcctataccttctcttcaacccatggtgtaaagaggacatggttttcatgcctgatgaggacgagcgcaaagartacatcctcaatgacacgggctgccattacgtgggggctgccagaagtatcaaatgcaaaccctggaactttggtcagtttgagaaaaatgtcctggact

SEQ ID NO: 16845 - DNA, 201 bp, Homo sapiens
atgacttatatgagggcagattcaagagccagcaggtcaaaaaggccaacacaaccataagcagccagacccacaaggccaggtcctgtgctatcacaggrtcacctcttttacagttagaaacaccagccgaggccacagaatcccatccctttcctgagtcatggcctcaaaaatcagggccaccattgtctcaattca

SEQ ID NO: 16846 - DNA, 201 bp, Homo sapiens
tctgctgtgggccatcaccactgaccgccatccgcaaaggtgacatctttattgtctatgacaccagattcgtcttctcagaagtgaatggtgacaggctyatctggttggtgaagatggtgaatgggcaggaggagttacacgtaatttcaatggagaccacaagcatcgggaaaaacatcagcaccaaggcagtgggcc

SEQ ID NO: 16847 - DNA, 201 bp, Homo sapiens
ctacgacggctggcaggctgtggacgcaacgccgcaggagcgaagccagggtgtcttctgctgtgggccatcaccactgaccgccatccgcaaaggtgacrtctttattgtctatgacaccagattcgtcttctcagaagtgaatggtgacaggctcatctggttggtgaagatggtgaatgggcaggaggagttacacgt

SEQ ID NO: 16848 - DNA, 201 bp, Homo sapiens; identical to SEQ ID NO: 16829

SEQ ID NO: 16849 - DNA, 201 bp, Homo sapiens; identical to SEQ ID NO: 16830

SEQ ID NO: 16850 - DNA, 201 bp, Homo sapiens; identical to SEQ ID NO: 16831

SEQ ID NO: 16851 - DNA, 201 bp, Homo sapiens
aatgcaccccaataaaaactggacccaagaaatttatcgtcaagttaagttccaaacaagtgaaagagattaatgctcagaagattgttctcatcaccaaktagccttgtctgatgctgtggagccttagttgagatttcagcatttcctaccttgtgcttagctttcagattatggatgattaaatttgatgacttatat

SEQ ID NO: 16852 - DNA, 201 bp, Homo sapiens; identical to SEQ ID NO: 16833

SEQ ID NO: 16853 - DNA, 201 bp, Homo sapiens; identical to SEQ ID NO: 16834

SEQ ID NO: 16854 - DNA, 201 bp, Homo sapiens; identical to SEQ ID NO: 16835

SEQ ID NO: 16855 - DNA, 201 bp, Homo sapiens; identical to SEQ ID NO: 16836

SEQ ID NO: 16856 - DNA, 201 bp, Homo sapiens; identical to SEQ ID NO: 16837

SEQ ID NO: 16857 - DNA, 201 bp, Homo sapiens; identical to SEQ ID NO: 16838

SEQ ID NO: 16858 - DNA, 201 bp, Homo sapiens; identical to SEQ ID NO: 16839

SEQ ID NO: 16859 - DNA, 201 bp, Homo sapiens; identical to SEQ ID NO: 16840

SEQ ID NO: 16860 - DNA, 201 bp, Homo sapiens; identical to SEQ ID NO: 16841

SEQ ID NO: 16861 - DNA, 201 bp, Homo sapiens; identical to SEQ ID NO: 16842

SEQ ID NO: 16862 - DNA, 201 bp, Homo sapiens; identical to SEQ ID NO: 16843

SEQ ID NO: 16863 - DNA, 201 bp, Homo sapiens; identical to SEQ ID NO: 16844

SEQ ID NO: 16864 - DNA, 201 bp, Homo sapiens; identical to SEQ ID NO: 16845

SEQ ID NO: 16865 - DNA, 201 bp, Homo sapiens; identical to SEQ ID NO: 16846

SEQ ID NO: 16866 - DNA, 201 bp, Homo sapiens; identical to SEQ ID NO: 16847

SEQ ID NO: 16867 - DNA, 201 bp, Homo sapiens
cacaataggaagtcagttctcctgcacttcctcctcatgtagtctggagtactttctaaagggcttagttggatttaaaaaaaaaaaaaaaagattgtctrcttttcaaagaagtaaccatttgccaggggaaaacattctgcttttaggtagtttcaaaattcaggggagggagcctgaaatttttgccatgattggttt

SEQ ID NO: 16868 - DNA, 201 bp, Homo sapiens
ttccttccccttacttgctaggtttcataatttaaaagactggtatttaaaagagtcaaacactataaaatgagtaagttgacgatgttttaagattgcayctggcagtgtgcctttttgcacaaatatttacttttgcacttggagctgcttttaattttagcaaaatgttttatgcaaggcacaataggaagtcagttc

SEQ ID NO: 16869 - DNA, 201 bp, Homo sapiens
ttgtcagtatttgatggcaacttttgtacatgtgtacatcacaagttttataaggggcccaaatcccagcaaagtgctacagcagttgttggtgcttcaasctgaacagcagttaaatatatataaaaccctgaagactcatctcattgagaaaggaatcctacaacccaccttgaaggtataactggatccagagaggga

SEQ ID NO: 16870 - DNA, 201 bp, Homo sapiens
gaaggtataactggatccagagagggaaggactgacaagaaggaattattcagaaaaacactgacagatgttttataaattgtacagaaaaatagttaaamatgcaataggttgaagttttggagatatgtttctctctgaaattactgtgaatatttaacaaacacttacttgatctatgttatgaaataagtagcaaat

SEQ ID NO: 16871 - DNA, 201 bp, Homo sapiens
atagaacccctgagattctcaaaaaagctctatctggtttatcttcaaggtggaaaaactggtggatacgtggaattctcactctaactatgatctcgttktttttcctgatcatctatatgggatccttcatgctgatgcttcttgttctgggcatccaagtgaaatgcttccatgaaattatcactataggttatagag

SEQ ID NO: 16872 - DNA, 201 bp, Homo sapiens
gttatgaaataagtagcaaattgccagcaaaatgtcttgtaccttttctaaagtgtattttctgatgtgaacttccttccccttacttgctaggtttcaayctggcagtgtgcctttttgcacaaatatttacttttgcacttggagctgcttttaattttagcaaaatgttttatgcaaggcacaataggaagtcagttc

SEQ ID NO: 16873 - DNA, 201 bp, Homo sapiens; identical to SEQ ID NO: 16869

SEQ ID NO: 16874 - DNA, 201 bp, Homo sapiens; identical to SEQ ID NO: 16870

SEQ ID NO: 16875 - DNA, 201 bp, Homo sapiens; identical to SEQ ID NO: 16871

SEQ ID NO: 16876 - DNA, 201 bp, Homo sapiens
ctgagatcgccttccagtacaggcacggcgacccgattccccgtgtggagtacaccgccgaggagattgccacctggaaggaggtctacaccacgctgaarggcctctacgccacgcacgcctgcggggagcacctggaggcctttgctttgctggagcgcttcagcggctaccgggaagacaatatcccccagctggagg

SEQ ID NO: 16877 - DNA, 201 bp, Homo sapiens
ggagcgggaggcggcggtggcagcagcggccgctgcagtcccctcggagcccggggaccccctggaggctgtggcctttgaggagaaggaggggaaggccrtgctaaacctgctcttctccccgagggccaccaagccctcggcgctgtcccgagctgtgaaggtgtttgagacgtttgaagccaaaatccaccatctaga

SEQ ID NO: 16878 - DNA, 201 bp, Homo sapiens
gcaggcagagcctcatcgaggacgcccgcaaggagcgggaggcggcggtggcagcagcggccgctgcagtcccctcggagcccggggaccccctggaggcygtggcctttgaggagaaggaggggaaggccgtgctaaacctgctcttctccccgagggccaccaagccctcggcgctgtcccgagctgtgaaggtgtttg

SEQ ID NO: 16879 - DNA, 201 bp, Homo sapiens
tccgcccgggacttcctggccagcctggccttccgcgtgttccagtgcacccagtatatccgccacgcgtcctcgcccatgcactcccctgagccggactkctgccacgagctgctggggcacgtgcccatgctggccgaccgcaccttcgcgcagttctcgcaggacattggcctggcgtccctgggggcctcggatgag

SEQ ID NO: 16880 - DNA, 201 bp, Homo sapiens
tgtcctcctacggggagctcctgcactgcctgtctgaggagcctgagattcgggccttcgaccctgaggctgcggccgtgcagccctaccaagaccagacrtaccagtcagtctacttcgtgtctgagagcttcagtgacgccaaggacaagctcaggagctatgcctcacgcatccagcgccccttctccgtgaagttcg

SEQ ID NO: 16881 - DNA, 201 bp, Homo sapiens
tgagagcttcagtgacgccaaggacaagctcaggagctatgcctcacgcatccagcgccccttctccgtgaagttcgacccgtacacgctggccatcgacrtgctggacagcccccaggccgtgcggcgctccctggagggtgtccaggatgagctggacacccttgcccatgcgctgagtgccattggctaggtgcacgg

SEQ ID NO: 16882 - DNA, 201 bp, Homo sapiens
tcatgtccccgcggttcattgggcgcaggcagagcctcatcgaggacgcccgcaaggagcgggaggcggcggtggcagcagcggccgctgcagtcccctcrgagcccggggaccccctggaggctgtggcctttgaggagaaggaggggaaggccgtgctaaacctgctcttctccccgagggccaccaagccctcggcgc

SEQ ID NO: 16883 - DNA, 201 bp, Homo sapiens
gaggacgtctcccgcttcctgaaggagcgcacgggcttccagctgcggcctgtggccggcctgctgtccgcccgggacttcctggccagcctggccttccrcgtgttccagtgcacccagtatatccgccacgcgtcctcgcccatgcactcccctgagccggactgctgccacgagctgctggggcacgtgcccatgctg

SEQ ID NO: 16884 - DNA, 201 bp, Homo sapiens
gtctacttcgtgtctgagagcttcagtgacgccaaggacaagctcaggagctatgcctcacgcatccagcgccccttctccgtgaagttcgacccgtacaygctggccatcgacgtgctggacagcccccaggccgtgcggcgctccctggagggtgtccaggatgagctggacacccttgcccatgcgctgagtgccatt

SEQ ID NO: 16885 - DNA, 201 bp, Homo sapiens
cggaccaggtgtaccgccagcgcaggaagctgattgctgagatcgccttccagtacaggcacggcgacccgattccccgtgtggagtacaccgccgaggarattgccacctggaaggaggtctacaccacgctgaagggcctctacgccacgcacgcctgcggggagcacctggaggcctttgctttgctggagcgcttca

SEQ ID NO: 16886 - DNA, 201 bp, Homo sapiens
gagcacctggaggcctttgctttgctggagcgcttcagcggctaccgggaagacaatatcccccagctggaggacgtctcccgcttcctgaaggagcgcaygggcttccagctgcggcctgtggccggcctgctgtccgcccgggacttcctggccagcctggccttccgcgtgttccagtgcacccagtatatccgccac

SEQ ID NO: 16887 - DNA, 201 bp, Homo sapiens; identical to SEQ ID NO: 16876

SEQ ID NO: 16888 - DNA, 201 bp, Homo sapiens; identical to SEQ ID NO: 16883

SEQ ID NO: 16889 - DNA, 201 bp, Homo sapiens; identical to SEQ ID NO: 16885

SEQ ID NO: 16890 - DNA, 201 bp, Homo sapiens; identical to SEQ ID NO: 16884

SEQ ID NO: 16891 - DNA, 201 bp, Homo sapiens; identical to SEQ ID NO: 16886

SEQ ID NO: 16892 - DNA, 201 bp, Homo sapiens; identical to SEQ ID NO: 16879

SEQ ID NO: 16893 - DNA, 201 bp, Homo sapiens; identical to SEQ ID NO: 16880

SEQ ID NO: 16894 - DNA, 201 bp, Homo sapiens; identical to SEQ ID NO: 16881

SEQ ID NO: 16895 - DNA, 201 bp, Homo sapiens; identical to SEQ ID NO: 16876

SEQ ID NO: 16896 - DNA, 201 bp, Homo sapiens; identical to SEQ ID NO: 16877

SEQ ID NO: 16897 - DNA, 201 bp, Homo sapiens; identical to SEQ ID NO: 16878

SEQ ID NO: 16898 - DNA, 201 bp, Homo sapiens; identical to SEQ ID NO: 16879

SEQ ID NO: 16899 - DNA, 201 bp, Homo sapiens; identical to SEQ ID NO: 16880

SEQ ID NO: 16900 - DNA, 201 bp, Homo sapiens; identical to SEQ ID NO: 16881

SEQ ID NO: 16901 - DNA, 201 bp, Homo sapiens
caaggtccccgcggttcattgggcgcaggcagagcctcatcgaggacgcccgcaaggagcgggaggcggcggtggcagcagcggccgctgcagtcccctcrgagcccggggaccccctggaggctgtggcctttgaggagaaggaggggaaggccgtgctaaacctgctcttctccccgagggccaccaagccctcggcgc

SEQ ID NO: 16902 - DNA, 201 bp, Homo sapiens; identical to SEQ ID NO: 16883

SEQ ID NO: 16903 - DNA, 201 bp, Homo sapiens; identical to SEQ ID NO: 16885

SEQ ID NO: 16904 - DNA, 201 bp, Homo sapiens
cgccacaggccaagggcttccgcagggccgtgtctgagctggacgccaagcaggcagaggccatcatgggcgccccggggcccagcctcacaggctctccrtggcctggaactgcagccccagctgcatcctacacccccaccccaaggtccccgcggttcattgggcgcaggcagagcctcatcgaggacgcccgcaagg

SEQ ID NO: 16905 - DNA, 201 bp, Homo sapiens; identical to SEQ ID NO: 16884

SEQ ID NO: 16906 - DNA, 201 bp, Homo sapiens; identical to SEQ ID NO: 16886

SEQ ID NO: 16907 - DNA, 201 bp, Homo sapiens; identical to SEQ ID NO: 16876

SEQ ID NO: 16908 - DNA, 201 bp, Homo sapiens; identical to SEQ ID NO: 16877

SEQ ID NO: 16909 - DNA, 201 bp, Homo sapiens; identical to SEQ ID NO: 16878

SEQ ID NO: 16910 - DNA, 201 bp, Homo sapiens; identical to SEQ ID NO: 16879

SEQ ID NO: 16911 - DNA, 201 bp, Homo sapiens; identical to SEQ ID NO: 16880

SEQ ID NO: 16912 - DNA, 201 bp, Homo sapiens; identical to SEQ ID NO: 16881

SEQ ID NO: 16913 - DNA, 201 bp, Homo sapiens
ggcagtccccgcggttcattgggcgcaggcagagcctcatcgaggacgcccgcaaggagcgggaggcggcggtggcagcagcggccgctgcagtcccctcrgagcccggggaccccctggaggctgtggcctttgaggagaaggaggggaaggccgtgctaaacctgctcttctccccgagggccaccaagccctcggcgc

SEQ ID NO: 16914 - DNA, 201 bp, Homo sapiens; identical to SEQ ID NO: 16883

SEQ ID NO: 16915 - DNA, 201 bp, Homo sapiens; identical to SEQ ID NO: 16884

SEQ ID NO: 16916 - DNA, 201 bp, Homo sapiens; identical to SEQ ID NO: 16885

SEQ ID NO: 16917 - DNA, 201 bp, Homo sapiens; identical to SEQ ID NO: 16886

SEQ ID NO: 16918 - DNA, 201 bp, Homo sapiens; identical to SEQ ID NO: 16876

SEQ ID NO: 16919 - DNA, 201 bp, Homo sapiens; identical to SEQ ID NO: 16877

SEQ ID NO: 16920 - DNA, 201 bp, Homo sapiens; identical to SEQ ID NO: 16878

SEQ ID NO: 16921 - DNA, 201 bp, Homo sapiens; identical to SEQ ID NO: 16879

SEQ ID NO: 16922 - DNA, 201 bp, Homo sapiens; identical to SEQ ID NO: 16880

SEQ ID NO: 16923 - DNA, 201 bp, Homo sapiens; identical to SEQ ID NO: 16881

SEQ ID NO: 16924 - DNA, 201 bp, Homo sapiens; identical to SEQ ID NO: 16901

SEQ ID NO: 16925 - DNA, 201 bp, Homo sapiens; identical to SEQ ID NO: 16883

SEQ ID NO: 16926 - DNA, 201 bp, Homo sapiens; identical to SEQ ID NO: 16885

SEQ ID NO: 16927 - DNA, 201 bp, Homo sapiens
agggcttccgcagggccgtgtctgagctggacgccaagcaggcagaggccatcatggtaagagggcagggcgccccggggcccagcctcacaggctctccrtggcctggaactgcagccccagctgcatcctacacccccaccccaaggtccccgcggttcattgggcgcaggcagagcctcatcgaggacgcccgcaagg

SEQ ID NO: 16928 - DNA, 201 bp, Homo sapiens; identical to SEQ ID NO: 16884

SEQ ID NO: 16929 - DNA, 201 bp, Homo sapiens; identical to SEQ ID NO: 16886

SEQ ID NO: 16930 - DNA, 137 bp, Homo sapiens
cgtgcgtgtctcgagtcgcacggagggcaaccgtcgmcgggcttagcgcctcaactgtcgttggtgtatttttctggtgtcacttctgtgccttccttcaaaggtggtgctttgtccctgtgggtcatctgtactga

SEQ ID NO: 16931 - DNA, 201 bp, Homo sapiens
tattggactgtctgtgatggatctggtaggatccattttgaaaaatcttaggagagtgcacccagtttccaccatggttaagggattatatggaataaaasaagaactctttctcagtatcccttgtgtcttggggcggaatggtgtctcagatgttgtgaaaattaacttgaattctgaggaggaggcccttttcaagaa

SEQ ID NO: 16932 - DNA, 201 bp, Homo sapiens
acactggaaaaatatccataaacaagttattcaaagtgcctatgaaattatcaagctgaaggggtatacctcttgggctattggactgtctgtgatggatytggtaggatccattttgaaaaatcttaggagagtgcacccagtttccaccatggttaagggattatatggaataaaagaagaactctttctcagtatccc

SEQ ID NO: 16933 - DNA, 194 bp, Homo sapiens
tttcatccgttagagtaccagcatattcacttcattacattagcgtcatatgtttatgtataatcattataaatgtggccgggcactgcagcctgggtgamagagtgaggctctgtctcaaaaaaaatcattataaatgcttatttttaagaccatatatatcaaaaagaaataaaaagctgagtgctgtggct

SEQ ID NO: 16934 - DNA, 152 bp, Homo sapiens
cgtgcgtgtctcgagtcgcacggagggcaaccgtcgacgggcttagcgcctyaactgtcgttggtgtatttttctggtgtcacttctgtgccttccttcaaaggtggtgctttgtccctgtgggtcatctgtactgattgcgccaagcaaag

SEQ ID NO: 16935 - DNA, 139 bp, Homo sapiens
aacgtgcgtgtctcgagtcgcacggagggcaaccgtcgmcgggcttagcgcctcaactgtcgttggtgtatttttctggtgtcacttctgtgccttccttcaaaggttctccaaatgtcaactgtcaaggagcagctaa

SEQ ID NO: 16936 - DNA, 201 bp, Homo sapiens; identical to SEQ ID NO: 16931

SEQ ID NO: 16937 - DNA, 201 bp, Homo sapiens; identical to SEQ ID NO: 16932

SEQ ID NO: 16938 - DNA, 194 bp, Homo sapiens; identical to SEQ ID NO: 16933

SEQ ID NO: 16939 - DNA, 154 bp, Homo sapiens
aacgtgcgtgtctcgagtcgcacggagggcaaccgtcgacgggcttagcgcctyaactgtcgttggtgtatttttctggtgtcacttctgtgccttccttcaaaggttctccaaatgtcaactgtcaaggagcagctaattgagaagctaattg

SEQ ID NO: 16940 - DNA, 201 bp, Homo sapiens
aggataatatcccacaattggaagatgtctccaactttttaaaagagcgtacaggtttttccatccgtcctgtggctggttacttatcaccaagagatttyttatcaggtttagcctttcgagtttttcactgcactcaatatgtgagacacagttcagatcccttctataccccagagccagatacctgccatgaactct

SEQ ID NO: 16941 - DNA, 201 bp, Homo sapiens
agagcgattggtttagaaaaaaaacaaaagggaactactaacatgtattctattctaggcaggtgtcaggcaaagttgtatcttattttggtctcactagwttcttgcaaagcttatctgcatatccaggttttataaaaggttaagaaactgaagctcctagaagtaaatgagcccttagttatcaaatattgtctgcat

SEQ ID NO: 16942 - DNA, 201 bp, Homo sapiens
gtcctgtggctggttacttatcaccaagagatttcttatcaggtttagcctttcgagtttttcactgcactcaatatgtgagacacagttcagatcccttytataccccagagccagatacctgccatgaactcttaggtcatgtcccgcttttggctgaacctagttttgcccaattctcccaagaaattggcttggctt

SEQ ID NO: 16943 - DNA, 201 bp, Homo sapiens
ggggcataatcattaagactaggctaaaaattcgagactttattttttaggcattagggagccccttcccaagtgactatcttccttgaaactttgttttytttcaatgacatcacacgatactggttttattctggactatctatcctactcatgggtccaagggaaacttagtagagatgcgacttgcatggggctgta

SEQ ID NO: 16944 - DNA, 201 bp, Homo sapiens; identical to SEQ ID NO: 16940

SEQ ID NO: 16945 - DNA, 201 bp, Homo sapiens; identical to SEQ ID NO: 16941

SEQ ID NO: 16946 - DNA, 201 bp, Homo sapiens; identical to SEQ ID NO: 16942

SEQ ID NO: 16947 - DNA, 201 bp, Homo sapiens; identical to SEQ ID NO: 16943

SEQ ID NO: 16948 - DNA, 201 bp, Homo sapiens
tacttcccaaccctcacagcagagtgtgtctgacctcaccagaccctgacgaccctctgagttcctacatcaatgccaactacatccggggctatggtggrgaggagaaggtgtacatcgccactcagggacccatcgtcagcacggtcgccgacttctggcgcatggtgtggcaggagcacacgcccatcattgtcatga

SEQ ID NO: 16949 - DNA, 201 bp, Homo sapiens
tgactctgggacgtggggagtccccagtctgctgctggtctttctgtccgtgggcctggtcctcgttaccaccctggtgtggcacctcctgaggacacccscagagccacccaccccactgccccctgaggacaggcgccagtcagtgagccgccagccctccttcacctactcagagtggatggaggagaagatcgagga

SEQ ID NO: 16950 - DNA, 201 bp, Homo sapiens
caggccaggcctggggccccggggcctgacccacaccacgcagaccccgggctccagtttttaacgatggttccatcaatacctgatccagaatgtttccstgctacactttgtgtcctgctgcaatgtgttctgtctgtccatccatctctgccctctgtaccggacactgtgtctcctcagccaggaaggggtaatgag

SEQ ID NO: 16951 - DNA, 201 bp, Homo sapiens
actgtgcccccatcatcgtccactgcagtgcagggattgggaggaccggctgcttcattgccaccagcatctgctgccagcagctgcggcaggagggtgtrgtggacatcctgaagaccacgtgccagctccgtcaggacaggggcggcatgatccagacatgcgagcagtaccagtttgtgcaccacgtcatgagcctct

SEQ ID NO: 16952 - DNA, 201 bp, Homo sapiens; identical to SEQ ID NO: 16948

SEQ ID NO: 16953 - DNA, 201 bp, Homo sapiens; identical to SEQ ID NO: 16950

SEQ ID NO: 16954 - DNA, 201 bp, Homo sapiens; identical to SEQ ID NO: 16949

SEQ ID NO: 16955 - DNA, 201 bp, Homo sapiens
ttaccggctgcgactcatctccctcaagtgcagggattgggaggaccggctgcttcattgccaccagcatctgctgccagcagctgcggcaggagggtgtrgtggacatcctgaagaccacgtgccagctccgtcaggacaggggcggcatgatccagacatgcgagcagtaccagtttgtgcaccacgtcatgagcctct

SEQ ID NO: 16956 - DNA, 201 bp, Homo sapiens; identical to SEQ ID NO: 16948

SEQ ID NO: 16957 - DNA, 201 bp, Homo sapiens
tgcggcaggagggtgtagtggacatcctgaagaccacgtgccagctccgtcaggacagcccatccctccacgaccctgcccccactgtgcatctctgccgkgcaggggcggcatgatccagacatgcgagcagtaccagtttgtgcaccacgtcatgagcctctacgaaaagcagctgtcccaccagtccccagaatgact

SEQ ID NO: 16958 - DNA, 201 bp, Homo sapiens; identical to SEQ ID NO: 16949

SEQ ID NO: 16959 - DNA, 201 bp, Homo sapiens; identical to SEQ ID NO: 16950

SEQ ID NO: 16960 - DNA, 201 bp, Homo sapiens
actgtgcccccatcatcgtccactgcagtgcagggattgggaggaccggctgcttcattgccaccagcatctgctgccagcagctgcggcaggagggtgtrgtggacatcctgaagaccacgtgccagctccgtcaggacagcccatccctccacgaccctgcccccactgtgcatctctgccgggcaggggcggcatgat

SEQ ID NO: 16961 - DNA, 201 bp, Homo sapiens; identical to SEQ ID NO: 16950

SEQ ID NO: 16962 - DNA, 201 bp, Homo sapiens; identical to SEQ ID NO: 16951

SEQ ID NO: 16963 - DNA, 201 bp, Homo sapiens; identical to SEQ ID NO: 16948

SEQ ID NO: 16964 - DNA, 201 bp, Homo sapiens; identical to SEQ ID NO: 16949

SEQ ID NO: 16965 - DNA, 201 bp, Homo sapiens; identical to SEQ ID NO: 16950

SEQ ID NO: 16966 - DNA, 201 bp, Homo sapiens; identical to SEQ ID NO: 16951

SEQ ID NO: 16967 - DNA, 201 bp, Homo sapiens
accgggcagagggtccaccggagccttcacgggtgagcagtgtgtcctcccagttcagcgacgcagcccaggccagccccagctcccacagcagcaccccstcctggtgcgaggagccggcccaagccaacatggacatctccacgggacacatgattctggcatacatggaggatcacctgcggaaccgggaccgccttg

SEQ ID NO: 16968 - DNA, 201 bp, Homo sapiens
agggaggtggggagcggcaagccccgcctcagcccctctggcaggctcccgccagcgtcgctgcggctccggcccgggagcgagcgcccggagctcggaargatgcggcgcccgcggcggcctgggggtctcgggggatccgggggtctccggctgctcctctgcctcctgctgctgagcagccgcccggggggctgcagc

SEQ ID NO: 16969 - DNA, 201 bp, Homo sapiens
cctggggttctgggagttccctgaacatctgtgtgtgtccccctatgctccagtatggaagaatggggtggagggtcgccacacccggctccccctgcttytcagccccgggcctgcctctgactcacacttgggcgctctgccctccctggcctcacgcccagcctcctcccaccaccctcccaccatgcgctgctcaac

SEQ ID NO: 16970 - DNA, 201 bp, Homo sapiens
cctgaacatctgtgtgtgtccccctatgctccagtatggaagaatggggtggagggtcgccacacccggctccccctgcttctcagccccgggcctgcctytgactcacacttgggcgctctgccctccctggcctcacgcccagcctcctcccaccaccctcccaccatgcgctgctcaacctctctccttctggcgcaa

SEQ ID NO: 16971 - DNA, 181 bp, Homo sapiens
gcctgcctctgactcacacttgggcgctctgccctccctggcctcacgcccagcctcctcccaccaccctcccaccatgcgctgctcaacctctctccttytggcgcaagagaacatttctagaaaaaactacttttgtaccagtgtgaataaagttagtgtgttgtctgtgcagctgcaa

SEQ ID NO: 16972 - DNA, 201 bp, Homo sapiens
ccggctccccctgcttctcagccccgggcctgcctctgactcacacttgggcgctctgccctccctggcctcacgcccagcctcctcccaccaccctcccmccatgcgctgctcaacctctctccttctggcgcaagagaacatttctagaaaaaactacttttgtaccagtgtgaataaagttagtgtgttgtctgtgca

SEQ ID NO: 16973 - DNA, 201 bp, Homo sapiens
agaaaacaatggaggggccggtggagggcagagacacagcagagcttccagcccgcacatcccccatgcctggacaccccactgccagccctacctccagkgaagtccagcaggtgccaagccctgtctcctctgagcctcccaaagctgccagaccccctgtgacacctgtcctgctagagaagaaaagcccactgggcc

SEQ ID NO: 16974 - DNA, 201 bp, Homo sapiens
gcacagacagggctccaaatcttgcagacaggagtgggacagagggaggaggcagctgcagtccttccccaaactgcgcacagcacctcacccatgcgctyagtgctgctcactctggtggccctggcaggtgtggctgggctgctggtggctctggctgtggctctgtgtgtgcggcagcatgcgcggcagcaagacaag

SEQ ID NO: 16975 - DNA, 201 bp, Homo sapiens
acctgtgccgccagcacatggccacgaagtccttgttcaaccgggcagagggtccaccggagccttcacgggtgagcagtgtgtcctcccagttcagcgaygcagcccaggccagccccagctcccacagcagcaccccgtcctggtgcgaggagccggcccaagccaacatggacatctccacgggacacatgattctgg

SEQ ID NO: 16976 - DNA, 201 bp, Homo sapiens
acggctgtctatttgaccgcaggctctgctctcacctggaagtctgtattcaggatggcttgtttgggcagtgccaggtgggagtggggcaggcccggccycttttgcaagtcacctccccagttctccaacgcttacaaggtgtgctccgacaactcatgtcccaaggattgtcctggcacgatgacctcacccagtatg

SEQ ID NO: 16977 - DNA, 201 bp, Homo sapiens; identical to SEQ ID NO: 16967

SEQ ID NO: 16978 - DNA, 201 bp, Homo sapiens
ccgggacaatggaggggccggtggagggcagagacacagcagagcttccagcccgcacatcccccatgcctggacaccccactgccagccctacctccagkgaagtccagcaggtgccaagccctgtctcctctgagcctcccaaagctgccagaccccctgtgacacctgtcctgctagagaagaaaagcccactgggcc

SEQ ID NO: 16979 - DNA, 201 bp, Homo sapiens; identical to SEQ ID NO: 16969

SEQ ID NO: 16980 - DNA, 201 bp, Homo sapiens; identical to SEQ ID NO: 16970

SEQ ID NO: 16981 - DNA, 181 bp, Homo sapiens; identical to SEQ ID NO: 16971

SEQ ID NO: 16982 - DNA, 201 bp, Homo sapiens; identical to SEQ ID NO: 16974

SEQ ID NO: 16983 - DNA, 201 bp, Homo sapiens; identical to SEQ ID NO: 16975

SEQ ID NO: 16984 - DNA, 201 bp, Homo sapiens
gcctcctgctgctgagcagccgcccggggggctgcagcgccgttagtgcccacgatggcttgtttgggcagtgccaggtgggagtggggcaggcccggccycttttgcaagtcacctccccagttctccaacgcttacaaggtgtgctccgacaactcatgtcccaaggattgtcctggcacgatgacctcacccagtatg

SEQ ID NO: 16985 - DNA, 201 bp, Homo sapiens; identical to SEQ ID NO: 16972

SEQ ID NO: 16986 - DNA, 201 bp, Homo sapiens
agctatttgctacatcctgttcgagaaacgcattggctgcctgcagcgatccatccccgaggacaccgtgaccttcgtcagatccatcgggttaatgttcyagaactcactctatgccaccttcctccccaagtggactcgccccgtgctgcctttctggaagcgatacctggatggttggaatgccatcttttcctttgg

SEQ ID NO: 16987 - DNA, 201 bp, Homo sapiens
ctcgccccgtgctgcctttctggaagcgatacctggatggttggaatgccatcttttcctttgggaagaagctgattgatgagaagctcgaagatatggargcccaactgcaggcagcagggccagatggcatccaggtgtctggctacctgcacttcttactggccagtggacagctcagtcctcgggaggccatgggca

SEQ ID NO: 16988 - DNA, 201 bp, Homo sapiens
ctcactctatgccaccttcctccccaagtggactcgccccgtgctgcctttctggaagcgatacctggatggttggaatgccatcttttcctttgggaagwagctgattgatgagaagctcgaagatatggaggcccaactgcaggcagcagggccagatggcatccaggtgtctggctacctgcacttcttactggccag

SEQ ID NO: 16989 - DNA, 201 bp, Homo sapiens
ccgtgctgcctttctggaagcgatacctggatggttggaatgccatcttttcctttgggaagaagctgattgatgagaagctcgaagatatggaggcccarctgcaggcagcagggccagatggcatccaggtgtctggctacctgcacttcttactggccagtggacagctcagtcctcgggaggccatgggcagcctgc

SEQ ID NO: 16990 - DNA, 201 bp, Homo sapiens
gaaccagcggttgctgaagccagcggaagcagcgctctatacggatgctttcaatgaggtgattgatgactttatgactcgactggaccagctgcgggcakagagtgcttcggggaaccaggtgtcggacatggctcaactcttctactactttgccttggaagctatttgctacatcctgttcgagaaacgcattggctg

SEQ ID NO: 16991 - DNA, 201 bp, Homo sapiens
ctctcaaaggaccctgagatccaggaggccttgcacgaggaagtggtgggtgtggtgccagccgggcaagtgccccagcacaaggactttgcccacatgcygttgctcaaagctgtgcttaaggagactctgcgtctctaccctgtggtccccacaaactcccggatcatagaaaaggaaattgaagttgatggcttcctc

SEQ ID NO: 16992 - DNA, 201 bp, Homo sapiens
cgcttcttctttcagctgttcgttcaaggctatgccctgcaactgcaccagttacagggaaggacaccactggtaccagctgcgccaggctctgaaccagyggttgctgaagccagcggaagcagcgctctatacggatgctttcaatgaggtgattgatgactttatgactcgactggaccagctgcgggcagagagtgc

SEQ ID NO: 16993 - DNA, 201 bp, Homo sapiens
cctgaaagcttccagccccaccgctggctgagaaacagccagcctgctacccccaggatccagcacccatttggctctgtgccctttggctatggggtccrggcctgcctgggccgcaggattgcagagctggagatgcagctactcctcgcaaggctgatccagaagtacaaggtggtcctggccccggagacgggggag

SEQ ID NO: 16994 - DNA, 201 bp, Homo sapiens
tgttcgttcaaggctatgccctgcaactgcaccagttacagggaaggacaccactggtaccagctgcgccaggctctgaaccagcggttgctgaagccagyggaagcagcgctctatacggatgctttcaatgaggtgattgatgactttatgactcgactggaccagctgcgggcagagagtgcttcggggaaccaggtg

SEQ ID NO: 16995 - DNA, 201 bp, Homo sapiens
caggtgtctggctacctgcacttcttactggccagtggacagctcagtcctcgggaggccatgggcagcctgcctgagctgctcatggctggagtggacaygacatccaacacgctgacatgggccctgtaccacctctcaaaggaccctgagatccaggaggccttgcacgaggaagtggtgggtgtggtgccagccggg

SEQ ID NO: 16996 - DNA, 201 bp, Homo sapiens
ggctgcctgcagcgatccatccccgaggacaccgtgaccttcgtcagatccatcgggttaatgttccagaactcactctatgccaccttcctccccaagtrgactcgccccgtgctgcctttctggaagcgatacctggatggttggaatgccatcttttcctttgggaagaagctgattgatgagaagctcgaagatatg

SEQ ID NO: 16997 - DNA, 201 bp, Homo sapiens
gcacgaggaagtggtgggtgtggtgccagccgggcaagtgccccagcacaaggactttgcccacatgccgttgctcaaagctgtgcttaaggagactctgygtctctaccctgtggtccccacaaactcccggatcatagaaaaggaaattgaagttgatggcttcctcttccccaagaacacccagtttgtgttctgcca

SEQ ID NO: 16998 - DNA, 201 bp, Homo sapiens
agtcctcgggaggccatgggcagcctgcctgagctgctcatggctggagtggacacgacatccaacacgctgacatgggccctgtaccacctctcaaaggrccctgagatccaggaggccttgcacgaggaagtggtgggtgtggtgccagccgggcaagtgccccagcacaaggactttgcccacatgccgttgctcaaa

SEQ ID NO: 16999 - DNA, 201 bp, Homo sapiens
cacgaggaagtggtgggtgtggtgccagccgggcaagtgccccagcacaaggactttgcccacatgccgttgctcaaagctgtgcttaaggagactctgcrtctctaccctgtggtccccacaaactcccggatcatagaaaaggaaattgaagttgatggcttcctcttccccaagaacacccagtttgtgttctgccac

SEQ ID NO: 17000 - DNA, 201 bp, Homo sapiens
gccccaccgctggctgagaaacagccagcctgctacccccaggatccagcacccatttggctctgtgccctttggctatggggtccgggcctgcctgggcygcaggattgcagagctggagatgcagctactcctcgcaaggctgatccagaagtacaaggtggtcctggccccggagacgggggagttgaagagtgtggc

SEQ ID NO: 17001 - DNA, 201 bp, Homo sapiens
attggctgcctgcagcgatccatccccgaggacaccgtgaccttcgtcagatccatcgggttaatgttccagaactcactctatgccaccttcctccccargtggactcgccccgtgctgcctttctggaagcgatacctggatggttggaatgccatcttttcctttgggaagaagctgattgatgagaagctcgaagat

SEQ ID NO: 17002 - DNA, 201 bp, Homo sapiens
gtggtgccagccgggcaagtgccccagcacaaggactttgcccacatgccgttgctcaaagctgtgcttaaggagactctgcgtctctaccctgtggtccscacaaactcccggatcatagaaaaggaaattgaagttgatggcttcctcttccccaagaacacccagtttgtgttctgccactatgtggtgtcccgggac

SEQ ID NO: 17003 - DNA, 201 bp, Homo sapiens
ttcggggaaccaggtgtcggacatggctcaactcttctactactttgccttggaagctatttgctacatcctgttcgagaaacgcattggctgcctgcagygatccatccccgaggacaccgtgaccttcgtcagatccatcgggttaatgttccagaactcactctatgccaccttcctccccaagtggactcgccccgt

SEQ ID NO: 17004 - DNA, 201 bp, Homo sapiens
gcctgaaagcttccagccccaccgctggctgagaaacagccagcctgctacccccaggatccagcacccatttggctctgtgccctttggctatggggtcygggcctgcctgggccgcaggattgcagagctggagatgcagctactcctcgcaaggctgatccagaagtacaaggtggtcctggccccggagacggggga

SEQ ID NO: 17005 - DNA, 201 bp, Homo sapiens
aggccaagtacggtccaatgtggatgtcctacttagggcctcagatgcacgtgaacctggccagtgccccgctcttggagcaagtgatgcggcaagagggmaagtacccagtacggaacgacatggagctatggaaggagcaccgggaccagcacgacctgacctatgggccgttcaccacggaaggacaccactggtacc

SEQ ID NO: 17006 - DNA, 201 bp, Homo sapiens; identical to SEQ ID NO: 16987

SEQ ID NO: 17007 - DNA, 201 bp, Homo sapiens; identical to SEQ ID NO: 16989

SEQ ID NO: 17008 - DNA, 201 bp, Homo sapiens; identical to SEQ ID NO: 16990

SEQ ID NO: 17009 - DNA, 201 bp, Homo sapiens; identical to SEQ ID NO: 16991

SEQ ID NO: 17010 - DNA, 201 bp, Homo sapiens
tccaatgtggatgtcctacttagggcctcagatgcacgtgaacctggccagtgccccgctcttggagcaagtgatgcggcaagagggcaagtacccagtayggaacgacatggagctatggaaggagcaccgggaccagcacgacctgacctatgggccgttcaccacggaaggacaccactggtaccagctgcgccaggc

SEQ ID NO: 17011 - DNA, 201 bp, Homo sapiens; identical to SEQ ID NO: 16996

SEQ ID NO: 17012 - DNA, 201 bp, Homo sapiens
tcttggagcaagtgatgcggcaagagggcaagtacccagtacggaacgacatggagctatggaaggagcaccgggaccagcacgacctgacctatgggccrttcaccacggaaggacaccactggtaccagctgcgccaggctctgaaccagcggttgctgaagccagcggaagcagcgctctatacggatgctttcaatg

SEQ ID NO: 17013 - DNA, 201 bp, Homo sapiens; identical to SEQ ID NO: 16998

SEQ ID NO: 17014 - DNA, 201 bp, Homo sapiens; identical to SEQ ID NO: 17001

SEQ ID NO: 17015 - DNA, 201 bp, Homo sapiens
ccaatgtggatgtcctacttagggcctcagatgcacgtgaacctggccagtgccccgctcttggagcaagtgatgcggcaagagggcaagtacccagtacrgaacgacatggagctatggaaggagcaccgggaccagcacgacctgacctatgggccgttcaccacggaaggacaccactggtaccagctgcgccaggct

SEQ ID NO: 17016 - DNA, 201 bp, Homo sapiens; identical to SEQ ID NO: 17004

SEQ ID NO: 17017 - DNA, 201 bp, Homo sapiens; identical to SEQ ID NO: 16986

SEQ ID NO: 17018 - DNA, 201 bp, Homo sapiens
ccgctcttggagcaagtgatgcggcaagagggcaagtacccagtacggaacgacatggagctatggaaggagcaccgggaccagcacgacctgacctatgrgccgttcaccacggaaggacaccactggtaccagctgcgccaggctctgaaccagcggttgctgaagccagcggaagcagcgctctatacggatgctttc

SEQ ID NO: 17019 - DNA, 201 bp, Homo sapiens; identical to SEQ ID NO: 16988

SEQ ID NO: 17020 - DNA, 201 bp, Homo sapiens; identical to SEQ ID NO: 16993

SEQ ID NO: 17021 - DNA, 201 bp, Homo sapiens
ggagctatggaaggagcaccgggaccagcacgacctgacctatgggccgttcaccacggaaggacaccactggtaccagctgcgccaggctctgaaccagyggttgctgaagccagcggaagcagcgctctatacggatgctttcaatgaggtgattgatgactttatgactcgactggaccagctgcgggcagagagtgc

SEQ ID NO: 17022 - DNA, 201 bp, Homo sapiens
caccgggaccagcacgacctgacctatgggccgttcaccacggaaggacaccactggtaccagctgcgccaggctctgaaccagcggttgctgaagccagyggaagcagcgctctatacggatgctttcaatgaggtgattgatgactttatgactcgactggaccagctgcgggcagagagtgcttcggggaaccaggtg

SEQ ID NO: 17023 - DNA, 201 bp, Homo sapiens; identical to SEQ ID NO: 16995

SEQ ID NO: 17024 - DNA, 201 bp, Homo sapiens; identical to SEQ ID NO: 16997

SEQ ID NO: 17025 - DNA, 201 bp, Homo sapiens; identical to SEQ ID NO: 17000

SEQ ID NO: 17026 - DNA, 201 bp, Homo sapiens; identical to SEQ ID NO: 16999

SEQ ID NO: 17027 - DNA, 201 bp, Homo sapiens; identical to SEQ ID NO: 17002

SEQ ID NO: 17028 - DNA, 201 bp, Homo sapiens; identical to SEQ ID NO: 17003

SEQ ID NO: 17029 - DNA, 201 bp, Homo sapiens
cagattctccatttctaacaagttcccaggtgacgtcgatgaagctggaatccgacacgtgacggtctgtccgccgtctcagactagaggagcgctgtaarcgccatggctcccaagaagctgtcctgccttcgttccctgctgctgccgctcagcctgacgctactgctgccccaggcagacactcggtcgttcgtagtg

SEQ ID NO: 17030 - DNA, 201 bp, Homo sapiens
agcactagtactttgcacaggacacatatcaattccctttcagctgatacactgagtgcctctgaaccaatggagttaagtgggcactgaaaggtaggccrggcatggtggctcatgcctgtaatcccagcactttgggaggctgagacgggtggattacctgaggtcaggacttcaagaccagcctggccaacatggtga

SEQ ID NO: 17031 - DNA, 201 bp, Homo sapiens
ccaagggccaagtctggatcaatgggtttaacttgggccggtactggacaaagcaggggccacaacagaccctctacgtgccaagattcctgctgtttccyaggggagccctcaacaaaattacattgctggaactagaagatgtacctctccagccccaagtccaatttttggataagcctatcctcaatagcactagta

SEQ ID NO: 17032 - DNA, 104 bp, Homo sapiens
gcaggatcccttggtgctggccacggtgaccctaaggaactaaaggccacagtgcctctgaatgtaagtacaagtacacattccttgccaaactttattgkgat

SEQ ID NO: 17033 - DNA, 201 bp, Homo sapiens; identical to SEQ ID NO: 17029

SEQ ID NO: 17034 - DNA, 201 bp, Homo sapiens; identical to SEQ ID NO: 17030

SEQ ID NO: 17035 - DNA, 201 bp, Homo sapiens; identical to SEQ ID NO: 17031

SEQ ID NO: 17036 - DNA, 104 bp, Homo sapiens; identical to SEQ ID NO: 17032

SEQ ID NO: 17037 - DNA, 201 bp, Homo sapiens; identical to SEQ ID NO: 17030

SEQ ID NO: 17038 - DNA, 201 bp, Homo sapiens; identical to SEQ ID NO: 17031

SEQ ID NO: 17039 - DNA, 104 bp, Homo sapiens; identical to SEQ ID NO: 17032

SEQ ID NO: 17040 - DNA, 201 bp, Homo sapiens
cgggctcggcccgaggcccccaggacctccatctcccaatgttggaggaatccgacacgtgacggtctgtccgccgtctcagactagaggagcgctgtaarcgccatggctcccaagaagctgtcctgccttcgttccctgctgctgccgctcagcctgacgctactgctgccccaggcagacactcggtcgttcgtagtg

SEQ ID NO: 17041 - DNA, 201 bp, Homo sapiens; identical to SEQ ID NO: 17030

SEQ ID NO: 17042 - DNA, 201 bp, Homo sapiens; identical to SEQ ID NO: 17031

SEQ ID NO: 17043 - DNA, 104 bp, Homo sapiens; identical to SEQ ID NO: 17032

SEQ ID NO: 17044 - DNA, 201 bp, Homo sapiens
ctatcaccatcctgggctgccgagtccggatccctgccgaggtgctcatcctgaactcgattgttctgccacacaaggagctgagccgaagcttcaccaaycagatcatcctctgagtagggctgccagaaggcccccagctcctacccactccccttgaggctgctgcctgcttggccagcctctgtccagaaaggacca

SEQ ID NO: 17045 - DNA, 201 bp, Homo sapiens
ggagtgaagggagctagtgtttaggtagcagtcaccattatgctcaaagcggtgatcctgattggaggccctcaaaagggaactcgcttcagacctttgtyttttgaggtgcccaaaccattgtttcctgtggcaggggtccctatgatccaacaccatattgaagcctgtgcccaggtccctggaatgcaggagattctg

SEQ ID NO: 17046 - DNA, 201 bp, Homo sapiens
tttctcctgaagccttgaagcctcttcgggatgtcttccagcgtaatcagcaggatgggcaattggaggactcaccaggcttgtggccaggggcaggtacyatccgcctagagcaggatgtgttttcagccctggcagggcagggccagatatacgtgcatctcactgatggtatctggagtcagatcaagtccgcaggtt

SEQ ID NO: 17047 - DNA, 201 bp, Homo sapiens
tgggtgagggtgtgcggctccgggagagcatcgtcctccatggagccactttgcaggagcacacgtgtgttctgcatagcatcgtgggctgggggagcacygtgggacgctgggcccgcgtggagggtacccccagtgaccctaaccccaacgatccccgagcccgcatggacagtgagagcctcttcaaggacgggaagc

SEQ ID NO: 17048 - DNA, 201 bp, Homo sapiens
tgtggcaggggtccctatgatccaacaccatattgaagcctgtgcccaggtccctggaatgcaggagattctgctcattggcttctaccaacctgatgagyccctcacccagttcctagaagccgcccagcaggagtttaaccttccagtcaggtacctgcaggaatttgcccccctaggcacagggggtggtctttacca

SEQ ID NO: 17049 - DNA, 201 bp, Homo sapiens
ggctccgggagagcatcgtcctccatggagccactttgcaggagcacacgtgtgttctgcatagcatcgtgggctgggggagcaccgtgggacgctgggcscgcgtggagggtacccccagtgaccctaaccccaacgatccccgagcccgcatggacagtgagagcctcttcaaggacgggaagctgctgcctgctatca

SEQ ID NO: 17050 - DNA, 201 bp, Homo sapiens
tgggctgccgagtccggatccctgccgaggtgctcatcctgaactcgattgttctgccacacaaggagctgagccgaagcttcaccaaccagatcatcctytgagtagggctgccagaaggcccccagctcctacccactccccttgaggctgctgcctgcttggccagcctctgtccagaaaggaccagagaaagccagg

SEQ ID NO: 17051 - DNA, 201 bp, Homo sapiens
cccaccgacgccagcgtcaccctttcttactccttggcactacggctaacaggacgcaatccctcaactacggctgcatcgttgagaatccacagacacasgaggtattgcactatgtggagaaacccagcacatttatcagtgacatcatcaactgcggcatctacctcttttctcctgaagccttgaagcctcttcggg

SEQ ID NO: 17052 - DNA, 201 bp, Homo sapiens; identical to SEQ ID NO: 17044

SEQ ID NO: 17053 - DNA, 201 bp, Homo sapiens
tggggttcaacatacagagtttaggtagcagtcaccattatgctcaaagcggtgatcctgattggaggccctcaaaagggaactcgcttcagacctttgtyttttgaggtgcccaaaccattgtttcctgtggcaggggtccctatgatccaacaccatattgaagcctgtgcccaggtccctggaatgcaggagattctg

SEQ ID NO: 17054 - DNA, 201 bp, Homo sapiens; identical to SEQ ID NO: 17046

SEQ ID NO: 17055 - DNA, 201 bp, Homo sapiens; identical to SEQ ID NO: 17047

SEQ ID NO: 17056 - DNA, 201 bp, Homo sapiens; identical to SEQ ID NO: 17048

SEQ ID NO: 17057 - DNA, 201 bp, Homo sapiens
agagtcagttgtggggttcagagggtcagcaatcaatcaatcctccgaatccagagatttagacccagtcgtccgtattaggactggaggggggtcaatargttcagtgtttgagatgccaagggaacctgtcttttgatttggggttcaacatacagagtttaggtagcagtcaccattatgctcaaagcggtgatcctg

SEQ ID NO: 17058 - DNA, 201 bp, Homo sapiens; identical to SEQ ID NO: 17049

SEQ ID NO: 17059 - DNA, 201 bp, Homo sapiens; identical to SEQ ID NO: 17050

SEQ ID NO: 17060 - DNA, 201 bp, Homo sapiens; identical to SEQ ID NO: 17051

SEQ ID NO: 17061 - DNA, 201 bp, Homo sapiens; identical to SEQ ID NO: 17044

SEQ ID NO: 17062 - DNA, 201 bp, Homo sapiens; identical to SEQ ID NO: 17045

SEQ ID NO: 17063 - DNA, 201 bp, Homo sapiens; identical to SEQ ID NO: 17046

SEQ ID NO: 17064 - DNA, 201 bp, Homo sapiens
tgtggcaggggtccctatgatccaacaccatattgaagcctgtgcccaggtccctggaatgcaggagattctgctcattggcttctaccaacctgatgagyccctcacccagttcctagaagccgcccagcaggagtttaaccttccagtcaggtgtttgtgcacacactcgtatatgggggggtggggatgccctaggcc

SEQ ID NO: 17065 - DNA, 201 bp, Homo sapiens; identical to SEQ ID NO: 17047

SEQ ID NO: 17066 - DNA, 201 bp, Homo sapiens
ttggcttctaccaacctgatgagcccctcacccagttcctagaagccgcccagcaggagtttaaccttccagtcaggtgtttgtgcacacactcgtatatsggggggtggggatgccctaggcctctgagttcttggaagtgggttgagtcagcatttgctggagttcatcctcgcctactagaaggattcttgtttggac

SEQ ID NO: 17067 - DNA, 201 bp, Homo sapiens; identical to SEQ ID NO: 17051

SEQ ID NO: 17068 - DNA, 201 bp, Homo sapiens; identical to SEQ ID NO: 17049

SEQ ID NO: 17069 - DNA, 201 bp, Homo sapiens; identical to SEQ ID NO: 17050

SEQ ID NO: 17070 - DNA, 201 bp, Homo sapiens; identical to SEQ ID NO: 17044

SEQ ID NO: 17071 - DNA, 201 bp, Homo sapiens; identical to SEQ ID NO: 17045

SEQ ID NO: 17072 - DNA, 201 bp, Homo sapiens; identical to SEQ ID NO: 17046

SEQ ID NO: 17073 - DNA, 201 bp, Homo sapiens; identical to SEQ ID NO: 17047

SEQ ID NO: 17074 - DNA, 201 bp, Homo sapiens; identical to SEQ ID NO: 17048

SEQ ID NO: 17075 - DNA, 201 bp, Homo sapiens; identical to SEQ ID NO: 17049

SEQ ID NO: 17076 - DNA, 201 bp, Homo sapiens; identical to SEQ ID NO: 17050

SEQ ID NO: 17077 - DNA, 201 bp, Homo sapiens; identical to SEQ ID NO: 17051

SEQ ID NO: 17078 - DNA, 201 bp, Homo sapiens
ctcttacagctctacctggggccaactcagggacctgagagggcacattcacagcagccctaggttttttcttccccgtgaaaccagagatgatttggaaratgggggtgaaggacactcgggaactagggcaaagacagggctagaggtatgtggagctggtactgtctctggaattttaatcacaataaagtttggcaa

SEQ ID NO: 17079 - DNA, 201 bp, Homo sapiens
tttgctggatgaggccaaagcccctggtcagccagagctctggaatgcactgcttgctgcttgccgagctggagatgttggagtgctaaagctgcagctarctcccagccctgcagaccctagagttctgtctctgctcagtgcccccttgggctccggtggctttactctcctgcatgcagcagctgcagctggaagagg

SEQ ID NO: 17080 - DNA, 201 bp, Homo sapiens
gccgtcaggcagggaggccctcttcctgatctcttacagctctacctggggccaactcagggacctgagagggcacattcacagcagccctaggttttttyttccccgtgaaaccagagatgatttggaagatgggggtgaaggacactcgggaactagggcaaagacagggctagaggtatgtggagctggtactgtctc

SEQ ID NO: 17081 - DNA, 201 bp, Homo sapiens
cattcacagcagccctaggttttttcttccccgtgaaaccagagatgatttggaagatgggggtgaaggacactcgggaactagggcaaagacagggctaraggtatgtggagctggtactgtctctggaattttaatcacaataaagtttggcaaggaatgtgtacttgtacttacattcagaggcactgtggcctttag

SEQ ID NO: 17082 - DNA, 201 bp, Homo sapiens
ctccaatccctgactctgcaatcgtcaatactcgacgctgctggagttgtggggcatccctccaaggcctgactccctttcactacctcgacttctctttytgctccacacgttgcctccaggatcatcgccgtcaggcagggaggccctcttcctgatctcttacagctctacctggggccaactcagggacctgagagg

SEQ ID NO: 17083 - DNA, 201 bp, Homo sapiens
ctcaaggacaagcctctcctgtctgccctggactttgaaaagcagagctccacaggagatctttccagcatctcgggatcagaagactcagactcagccastgaggaggacttgcagacactggatcgggagagggctacatttgagaagttgagccgacccccaggcttttaccctcatcgagttcttttccagaatgcc

SEQ ID NO: 17084 - DNA, 201 bp, Homo sapiens
cgggccaagcggggcacagcccaggggcttcgggatgcccgaggtgggccatcacactctgctggagccaacctgaggcgctacaatgaagccacactatrtaaggatgttcgtgacctgctggcagggccaagctgggctaaggcgctggaggaggctggtacaatactgttgcgtgctccccgctctggccggtctttg

SEQ ID NO: 17085 - DNA, 201 bp, Homo sapiens
cagagatgatttggaagatgggggtgaaggacactcgggaactagggcaaagacagggctagaggtatgtggagctggtactgtctctggaattttaatcmcaataaagtttggcaaggaatgtgtacttgtacttacattcagaggcactgtggcctttagttccttagggtcaccgtggccagcaccaagggatcctgc

SEQ ID NO: 17086 - DNA, 201 bp, Homo sapiens
gaaaagcagagctccacaggagatctttccagcatctcgggatcagaagactcagactcagccagtgaggaggacttgcagacactggatcgggagagggytacatttgagaagttgagccgacccccaggcttttaccctcatcgagttcttttccagaatgcccagggccagtttctttatgcctaccgctgtgtccta

SEQ ID NO: 17087 - DNA, 201 bp, Homo sapiens
caaggccagacacggggcctgggattccaataaccggtctcacgtcttacctcaggaacagcgacccgggtgattccagaggctccgccggctccgctcgrctcggctcggctcggcgcgacccgcggcgctaggccgggtgtctgccactcactgtcacccgcagccaggctggccaataagcacggggggcggagacac

SEQ ID NO: 17088 - DNA, 201 bp, Homo sapiens
gcgggtcttggacagtcagcggcccaatagtgtgctctacgtggggcggggctcaggtgcggacgccgccggttgtcctcttcgctgctccgtagtgacgrggattgttgtgttgcagaaatccggcaatcgacctgaggacttgcgagccgctcagctcccgggacgtttggagctgctgctaaataatttctgctcagc

SEQ ID NO: 17089 - DNA, 201 bp, Homo sapiens
tccggtggctttactctcctgcatgcagcagctgcagctggaagaggctcagtggttcgtctgctgctggaagcaggtgctgaccccactgtgcaggactstcgggcccggccaccttatactgttgcggctgacaaatcaacacgtaatgagttccgaaggttcatggagaagaatccagatgcctacgattacaacaag

SEQ ID NO: 17090 - DNA, 201 bp, Homo sapiens
ctttactctcctgcatgcagcagctgcagctggaagaggctcagtggttcgtctgctgctggaagcaggtgctgaccccactgtgcaggactctcgggccyggccaccttatactgttgcggctgacaaatcaacacgtaatgagttccgaaggttcatggagaagaatccagatgcctacgattacaacaaggctcaggt

SEQ ID NO: 17091 - DNA, 201 bp, Homo sapiens
cagctgcagctggaagaggctcagtggttcgtctgctgctggaagcaggtgctgaccccactgtgcaggactctcgggcccggccaccttatactgttgcrgctgacaaatcaacacgtaatgagttccgaaggttcatggagaagaatccagatgcctacgattacaacaaggctcaggtgccaggaccattgacaccag

SEQ ID NO: 17092 - DNA, 201 bp, Homo sapiens
cgagaagagcagcggcgatttgccgccctcagtgaccgagagaagagagctctggctgcagagcgccgactcgctgcccagttgggagcccctacctctcyaatccctgactctgcaatcgtcaatactcgacgctgctggagttgtggggcatccctccaaggcctgactccctttcactacctcgacttctctttctgc

SEQ ID NO: 17093 - DNA, 201 bp, Homo sapiens; identical to SEQ ID NO: 17078

SEQ ID NO: 17094 - DNA, 201 bp, Homo sapiens; identical to SEQ ID NO: 17079

SEQ ID NO: 17095 - DNA, 201 bp, Homo sapiens; identical to SEQ ID NO: 17080

SEQ ID NO: 17096 - DNA, 201 bp, Homo sapiens; identical to SEQ ID NO: 17081

SEQ ID NO: 17097 - DNA, 201 bp, Homo sapiens; identical to SEQ ID NO: 17082

SEQ ID NO: 17098 - DNA, 201 bp, Homo sapiens; identical to SEQ ID NO: 17083

SEQ ID NO: 17099 - DNA, 201 bp, Homo sapiens; identical to SEQ ID NO: 17084

SEQ ID NO: 17100 - DNA, 201 bp, Homo sapiens; identical to SEQ ID NO: 17085

SEQ ID NO: 17101 - DNA, 201 bp, Homo sapiens; identical to SEQ ID NO: 17086

SEQ ID NO: 17102 - DNA, 201 bp, Homo sapiens; identical to SEQ ID NO: 17087

SEQ ID NO: 17103 - DNA, 201 bp, Homo sapiens; identical to SEQ ID NO: 17088

SEQ ID NO: 17104 - DNA, 201 bp, Homo sapiens; identical to SEQ ID NO: 17089

SEQ ID NO: 17105 - DNA, 201 bp, Homo sapiens; identical to SEQ ID NO: 17090

SEQ ID NO: 17106 - DNA, 201 bp, Homo sapiens; identical to SEQ ID NO: 17091

SEQ ID NO: 17107 - DNA, 201 bp, Homo sapiens; identical to SEQ ID NO: 17092

SEQ ID NO: 17108 - DNA, 201 bp, Homo sapiens; identical to SEQ ID NO: 17078

SEQ ID NO: 17109 - DNA, 201 bp, Homo sapiens; identical to SEQ ID NO: 17079

SEQ ID NO: 17110 - DNA, 201 bp, Homo sapiens; identical to SEQ ID NO: 17080

SEQ ID NO: 17111 - DNA, 201 bp, Homo sapiens; identical to SEQ ID NO: 17081

SEQ ID NO: 17112 - DNA, 201 bp, Homo sapiens; identical to SEQ ID NO: 17082

SEQ ID NO: 17113 - DNA, 201 bp, Homo sapiens; identical to SEQ ID NO: 17083

SEQ ID NO: 17114 - DNA, 201 bp, Homo sapiens; identical to SEQ ID NO: 17084

SEQ ID NO: 17115 - DNA, 201 bp, Homo sapiens; identical to SEQ ID NO: 17085

SEQ ID NO: 17116 - DNA, 201 bp, Homo sapiens; identical to SEQ ID NO: 17086

SEQ ID NO: 17117 - DNA, 201 bp, Homo sapiens; identical to SEQ ID NO: 17087

SEQ ID NO: 17118 - DNA, 201 bp, Homo sapiens; identical to SEQ ID NO: 17088

SEQ ID NO: 17119 - DNA, 201 bp, Homo sapiens; identical to SEQ ID NO: 17089

SEQ ID NO: 17120 - DNA, 201 bp, Homo sapiens; identical to SEQ ID NO: 17090

SEQ ID NO: 17121 - DNA, 201 bp, Homo sapiens; identical to SEQ ID NO: 17091

SEQ ID NO: 17122 - DNA, 201 bp, Homo sapiens; identical to SEQ ID NO: 17092

SEQ ID NO: 17123 - DNA, 201 bp, Homo sapiens
agcgatggagagtcgggggccagtagccagccaaccccgtggggaccggggttgtctgtcatttatgtggctggaaagcacccaaagtggtggtcaggagkgtcgctgctgtggaaggggtctccgttcttggtgctgtatttgaaacgggtgtagagagaagcttgtgtttttgtttgtaatggggagaagcgtggccag

SEQ ID NO: 17124 - DNA, 201 bp, Homo sapiens
gggggaatctggacacttgtttattctgacggagttcacttcttcagaaccttcctgaaatgagcagaaattgttcactaggtcttcagaatggacgtccytctgccagagacttccagcgggcggctccaaaggcccaatgcagaggagcccgcggagcatgtgctgagggaagtctgcctggtgaggctggcaggtggg

SEQ ID NO: 17125 - DNA, 201 bp, Homo sapiens
tttattgtattttatagagcttttcactggaaatctacataaatgtcagtaaaccaaataaaagttcatttccaaggggaatcaggagcgagccacaccckaatggtagaaagatctcagggttaactctttatttttgtagttttattatctaaggcacagccattctgttctcacttggttctgagatagtggtgagaa

SEQ ID NO: 17126 - DNA, 201 bp, Homo sapiens; identical to SEQ ID NO: 17123

SEQ ID NO: 17127 - DNA, 201 bp, Homo sapiens; identical to SEQ ID NO: 17124

SEQ ID NO: 17128 - DNA, 201 bp, Homo sapiens; identical to SEQ ID NO: 17125

SEQ ID NO: 17129 - DNA, 201 bp, Homo sapiens
gctcctggtttgagcacgtgcaggagttctgggagcaccgcatggactcgaacgtgctttttctcaagtatgaagacatgcatcggacggcccttcctgcmcccataggccaagttcaaagggatccaggaatagatctggaatgttccagatccatttccaaggcttcctttagttcagtagctggccggacagcaagtg

SEQ ID NO: 17130 - DNA, 201 bp, Homo sapiens
catggactcgaacgtgctttttctcaagtatgaagacatgcatcggacggcccttcctgcccccataggccaagttcaaagggatccaggaatagatctgraatgttccagatccatttccaaggcttcctttagttcagtagctggccggacagcaagtggccccagcagttctcttgtttgcgtttcaggaagagttgg

SEQ ID NO: 17131 - DNA, 201 bp, Homo sapiens; identical to SEQ ID NO: 17123

SEQ ID NO: 17132 - DNA, 201 bp, Homo sapiens; identical to SEQ ID NO: 17124

SEQ ID NO: 17133 - DNA, 201 bp, Homo sapiens; identical to SEQ ID NO: 17125

SEQ ID NO: 17134 - DNA, 201 bp, Homo sapiens
tgctgaagctagcacagcagtgtctggagagggcccagtcgacggccgccaagcttgggaaaacacgcctgaagccaaccatgcctgcagctgctcccatyccccagcctgccggccgacaccgccgtgtatactccgatgaaggaggaaagctctctccttttctgccacccgagatcttccagaagcttcagggggcag

SEQ ID NO: 17135 - DNA, 201 bp, Homo sapiens
gggccctttacgccgccatcctggagtacgaacaggaccatgactggccgaagcactggaaggccaagctcaagaggaatccgggggacctgtcactcgtraccagcctggtctcacacctgctcagcctccccgaccacccgatcgcgcagctcctgaggcggctgcagtgctccgtgtacagcgccctgtatcccgccg

SEQ ID NO: 17136 - DNA, 201 bp, Homo sapiens
gggctgaatcagctccaggaggaaccaggccctgctctcctgtgtaggcctcagagaggccaagaagggaagctttgggcttcggtgggtgcaggctcagygatgaacatctggctggggcagctcctggggagcatcagggaagagggggccatgagccggccagcagtggagacggcagtccagtttctctcccctctg

SEQ ID NO: 17137 - DNA, 201 bp, Homo sapiens
ggcctggggtgcagctggtgtcagggtatgctgtttgctgatgggcagggacacccctgcagggtctcgggctctgagcccaggacattccctgccccttrctcaccttggctgtgggctgtgaacattccgggaccctgggcatcttatctaggtccgtgcagcccaagggtcagccctcttgactgtcacatgctgccc

SEQ ID NO: 17138 - DNA, 201 bp, Homo sapiens
tgaggagcatccactatatctcccaggtgttactagaagaagtggaaaccactaaagaagctggggaaactgtgccccccgacacctccaagatgctgaarctagcacagcagtgtctggagagggcccagtcgacggccgccaagcttgggaaaacacgcctgaagccaaccatgcctgcagctgctcccattccccagc

SEQ ID NO: 17139 - DNA, 201 bp, Homo sapiens
gccctggaggagttcatccacgaggggtacctgatcggagaggagggctactgcctcacatcactgcagagtgccctgagctacgtggagctgctgccccrgggaggcctggccaagtagtacagctagagcccagggtccctgcagggcctggcctcgcctcccagggctgtctctcctacacctggagccatgggatct

SEQ ID NO: 17140 - DNA, 201 bp, Homo sapiens
aggcatacacggaatacctgaggagcatccactatatctcccaggtgttactagaagaagtggaaaccactaaagaagctggggaaactgtgccccccgayacctccaagatgctgaagctagcacagcagtgtctggagagggcccagtcgacggccgccaagcttgggaaaacacgcctgaagccaaccatgcctgcag

SEQ ID NO: 17141 - DNA, 201 bp, Homo sapiens
caagaagggaagctttgggcttcggtgggtgcaggctcagcgatgaacatctggctggggcagctcctggggagcatcagggaagagggggccatgagccrgccagcagtggagacggcagtccagtttctctcccctctgacccctagaaggggagttgtagccccatgaactagtttcttgtctgggtcaggaacaagg

SEQ ID NO: 17142 - DNA, 201 bp, Homo sapiens; identical to SEQ ID NO: 17134

SEQ ID NO: 17143 - DNA, 201 bp, Homo sapiens; identical to SEQ ID NO: 17135

SEQ ID NO: 17144 - DNA, 201 bp, Homo sapiens; identical to SEQ ID NO: 17136

SEQ ID NO: 17145 - DNA, 201 bp, Homo sapiens; identical to SEQ ID NO: 17137

SEQ ID NO: 17146 - DNA, 201 bp, Homo sapiens; identical to SEQ ID NO: 17140

SEQ ID NO: 17147 - DNA, 201 bp, Homo sapiens; identical to SEQ ID NO: 17138

SEQ ID NO: 17148 - DNA, 201 bp, Homo sapiens; identical to SEQ ID NO: 17139

SEQ ID NO: 17149 - DNA, 201 bp, Homo sapiens; identical to SEQ ID NO: 17141

SEQ ID NO: 17150 - DNA, 201 bp, Homo sapiens; identical to SEQ ID NO: 17134

SEQ ID NO: 17151 - DNA, 201 bp, Homo sapiens; identical to SEQ ID NO: 17135

SEQ ID NO: 17152 - DNA, 201 bp, Homo sapiens; identical to SEQ ID NO: 17136

SEQ ID NO: 17153 - DNA, 201 bp, Homo sapiens; identical to SEQ ID NO: 17137

SEQ ID NO: 17154 - DNA, 201 bp, Homo sapiens; identical to SEQ ID NO: 17138

SEQ ID NO: 17155 - DNA, 201 bp, Homo sapiens; identical to SEQ ID NO: 17139

SEQ ID NO: 17156 - DNA, 201 bp, Homo sapiens; identical to SEQ ID NO: 17140

SEQ ID NO: 17157 - DNA, 201 bp, Homo sapiens; identical to SEQ ID NO: 17141

SEQ ID NO: 17158 - DNA, 178 bp, Homo sapiens
ggccatggacgcagtggctgtgtatcatggcaaaatcagcagggaaaccggcgagaagctcctgcttgccactgggctggatggcagctatttgctgaggkacagcgagagcgtgccaggcgtgtactgcctatgtgtgctacagcacctggggtacataaaagatatttccggaaaa

SEQ ID NO: 17159 - DNA, 136 bp, Homo sapiens
ggaaaccggcgagaagctcctgcttgccactgggctggatggcagctatttgctgagggacagcgagagcgtgccaggcgtgtactgcctatgtgtgctayagcacctggggtacataaaagatatttccggaaaa

SEQ ID NO: 17160 - DNA, 180 bp, Homo sapiens
caggccatggacgcagtggctgtgtatcatggcaaaatcagcagggaaaccggcgagaagctcctgcttgccactgggctggatggcagctatttgctgasggacagcgagagcgtgccaggcgtgtactgcctatgtgtgctacagcacctggggtacataaaagatatttccggaaaa

SEQ ID NO: 17161 - DNA, 201 bp, Homo sapiens
actgggagtcaggtggttgacttgtgcctggctgcagtagcagcggcatctcccttgcacagttctcctcctcggcctgcccaagagtccaccaggccatkgacgcagtggctgtgtatcatggcaaaatcagcagggaaaccggcgagaagctcctgcttgccactgggctggatggcagctatttgctgagggacagcg

SEQ ID NO: 17162 - DNA, 201 bp, Homo sapiens
tgacttgtgcctggctgcagtagcagcggcatctcccttgcacagttctcctcctcggcctgcccaagagtccaccaggccatggacgcagtggctgtgtrtcatggcaaaatcagcagggaaaccggcgagaagctcctgcttgccactgggctggatggcagctatttgctgagggacagcgagagcgtgccaggcgtg

SEQ ID NO: 17163 - DNA, 201 bp, Homo sapiens
acttgtgcctggctgcagtagcagcggcatctcccttgcacagttctcctcctcggcctgcccaagagtccaccaggccatggacgcagtggctgtgtatsatggcaaaatcagcagggaaaccggcgagaagctcctgcttgccactgggctggatggcagctatttgctgagggacagcgagagcgtgccaggcgtgta

SEQ ID NO: 17164 - DNA, 191 bp, Homo sapiens
caagagtccaccaggccatggacgcagtggctgtgtatcatggcaaaatcagcagggaaaccggcgagaagctcctgcttgccactgggctggatggcagstatttgctgagggacagcgagagcgtgccaggcgtgtactgcctatgtgtgctacagcacctggggtacataaaagatatttccggaaaa

SEQ ID NO: 17165 - DNA, 196 bp, Homo sapiens
ctgcccaagagtccaccaggccatggacgcagtggctgtgtatcatggcaaaatcagcagggaaaccggcgagaagctcctgcttgccactgggctggatrgcagctatttgctgagggacagcgagagcgtgccaggcgtgtactgcctatgtgtgctacagcacctggggtacataaaagatatttccggaaaa

SEQ ID NO: 17166 - DNA, 183 bp, Homo sapiens
caccaggccatggacgcagtggctgtgtatcatggcaaaatcagcagggaaaccggcgagaagctcctgcttgccactgggctggatggcagctatttgcygagggacagcgagagcgtgccaggcgtgtactgcctatgtgtgctacagcacctggggtacataaaagatatttccggaaaa

SEQ ID NO: 17167 - DNA, 190 bp, Homo sapiens
ggccatggacgcagtggctgtgtatcatggcaaaatcagcagggaaaccggcgagaagctcctgcttgccactgggctggatggcagctatttgctgaggkacagcgagagcgtgccaggcgtgtactgcctatgtgtgctcatttcagaagccagatcaaggcattgtaatacctctgcagtatccagt

SEQ ID NO: 17168 - DNA, 110 bp, Homo sapiens
atggcagctatttgctgagggacagcgagagcgtgccaggcgtgtactgcctatgtgtgctcatttcagaagccagatcaaggcattgtaatacctctgcmgtatccagt

SEQ ID NO: 17169 - DNA, 101 bp, Homo sapiens
atttgctgagggacagcgagagcgtgccaggcgtgtactgcctatgtgtgctcatttcagaagccagatcaaggcattgtaatacctctgcagtatccagk

SEQ ID NO: 17170 - DNA, 192 bp, Homo sapiens
caggccatggacgcagtggctgtgtatcatggcaaaatcagcagggaaaccggcgagaagctcctgcttgccactgggctggatggcagctatttgctgasggacagcgagagcgtgccaggcgtgtactgcctatgtgtgctcatttcagaagccagatcaaggcattgtaatacctctgcagtatccagt

SEQ ID NO: 17171 - DNA, 201 bp, Homo sapiens; identical to SEQ ID NO: 17161

SEQ ID NO: 17172 - DNA, 106 bp, Homo sapiens
cagctatttgctgagggacagcgagagcgtgccaggcgtgtactgcctatgtgtgctcatttcagaagccagatcaaggcattgtaatacctctgcagtawccagt

SEQ ID NO: 17173 - DNA, 201 bp, Homo sapiens; identical to SEQ ID NO: 17162

SEQ ID NO: 17174 - DNA, 201 bp, Homo sapiens; identical to SEQ ID NO: 17163

SEQ ID NO: 17175 - DNA, 201 bp, Homo sapiens
caagagtccaccaggccatggacgcagtggctgtgtatcatggcaaaatcagcagggaaaccggcgagaagctcctgcttgccactgggctggatggcagstatttgctgagggacagcgagagcgtgccaggcgtgtactgcctatgtgtgctcatttcagaagccagatcaaggcattgtaatacctctgcagtatcca

SEQ ID NO: 17176 - DNA, 146 bp, Homo sapiens
aaaccggcgagaagctcctgcttgccactgggctggatggcagctatttgctgagggacagcgagagcgtgccaggcgtgtactgcctatgtgtgctcatytcagaagccagatcaaggcattgtaatacctctgcagtatccagt

SEQ ID NO: 17177 - DNA, 195 bp, Homo sapiens
caccaggccatggacgcagtggctgtgtatcatggcaaaatcagcagggaaaccggcgagaagctcctgcttgccactgggctggatggcagctatttgcygagggacagcgagagcgtgccaggcgtgtactgcctatgtgtgctcatttcagaagccagatcaaggcattgtaatacctctgcagtatccagt

SEQ ID NO: 17178 - DNA, 201 bp, Homo sapiens
ctgcccaagagtccaccaggccatggacgcagtggctgtgtatcatggcaaaatcagcagggaaaccggcgagaagctcctgcttgccactgggctggatrgcagctatttgctgagggacagcgagagcgtgccaggcgtgtactgcctatgtgtgctcatttcagaagccagatcaaggcattgtaatacctctgcagt

SEQ ID NO: 17179 - DNA, 104 bp, Homo sapiens
gctatttgctgagggacagcgagagcgtgccaggcgtgtactgcctatgtgtgctcatttcagaagccagatcaaggcattgtaatacctctgcagtatcyagt

SEQ ID NO: 17180 - DNA, 201 bp, Homo sapiens
ggccatggacgcagtggctgtgtatcatggcaaaatcagcagggaaaccggcgagaagctcctgcttgccactgggctggatggcagctatttgctgaggkacagcgagagcgtgccaggcgtgtactgcctatgtgtgctgtatcacggttacatttatacataccgagtgtcccagacagaaacaggttcttggagtgc

SEQ ID NO: 17181 - DNA, 201 bp, Homo sapiens
gagagcgtgccaggcgtgtactgcctatgtgtgctgtatcacggttacatttatacataccgagtgtcccagacagaaacaggttcttggagtgctgagayagcacctggggtacataaaagatatttccggaaaataaaaaatctcatttcagcatttcagaagccagatcaaggcattgtaatacctctgcagtatcca

SEQ ID NO: 17182 - DNA, 201 bp, Homo sapiens
gctgagacagcacctggggtacataaaagatatttccggaaaataaaaaatctcatttcagcatttcagaagccagatcaaggcattgtaatacctctgcmgtatccagttgagaagaagtcctcagctagaagtacacaaggtactacagggataagagaagatcctgatgtctgcctgaaagccccatgaagaaaaata

SEQ ID NO: 17183 - DNA, 201 bp, Homo sapiens
gcacctggggtacataaaagatatttccggaaaataaaaaatctcatttcagcatttcagaagccagatcaaggcattgtaatacctctgcagtatccagktgagaagaagtcctcagctagaagtacacaaggtactacagggataagagaagatcctgatgtctgcctgaaagccccatgaagaaaaataaaacacctt

SEQ ID NO: 17184 - DNA, 201 bp, Homo sapiens
caggccatggacgcagtggctgtgtatcatggcaaaatcagcagggaaaccggcgagaagctcctgcttgccactgggctggatggcagctatttgctgasggacagcgagagcgtgccaggcgtgtactgcctatgtgtgctgtatcacggttacatttatacataccgagtgtcccagacagaaacaggttcttggagt

SEQ ID NO: 17185 - DNA, 201 bp, Homo sapiens; identical to SEQ ID NO: 17161

SEQ ID NO: 17186 - DNA, 201 bp, Homo sapiens; identical to SEQ ID NO: 17162

SEQ ID NO: 17187 - DNA, 201 bp, Homo sapiens
agacagcacctggggtacataaaagatatttccggaaaataaaaaatctcatttcagcatttcagaagccagatcaaggcattgtaatacctctgcagtawccagttgagaagaagtcctcagctagaagtacacaaggtactacagggataagagaagatcctgatgtctgcctgaaagccccatgaagaaaaataaaac

SEQ ID NO: 17188 - DNA, 201 bp, Homo sapiens; identical to SEQ ID NO: 17163

SEQ ID NO: 17189 - DNA, 201 bp, Homo sapiens
ctgagggacagcgagagcgtgccaggcgtgtactgcctatgtgtgctgtatcacggttacatttatacataccgagtgtcccagacagaaacaggttcttrgagtgctgagacagcacctggggtacataaaagatatttccggaaaataaaaaatctcatttcagcatttcagaagccagatcaaggcattgtaatacct

SEQ ID NO: 17190 - DNA, 201 bp, Homo sapiens
caagagtccaccaggccatggacgcagtggctgtgtatcatggcaaaatcagcagggaaaccggcgagaagctcctgcttgccactgggctggatggcagstatttgctgagggacagcgagagcgtgccaggcgtgtactgcctatgtgtgctgtatcacggttacatttatacataccgagtgtcccagacagaaacag

SEQ ID NO: 17191 - DNA, 201 bp, Homo sapiens
taccgagtgtcccagacagaaacaggttcttggagtgctgagacagcacctggggtacataaaagatatttccggaaaataaaaaatctcatttcagcatytcagaagccagatcaaggcattgtaatacctctgcagtatccagttgagaagaagtcctcagctagaagtacacaaggtactacagggataagagaagat

SEQ ID NO: 17192 - DNA, 201 bp, Homo sapiens
caccaggccatggacgcagtggctgtgtatcatggcaaaatcagcagggaaaccggcgagaagctcctgcttgccactgggctggatggcagctatttgcygagggacagcgagagcgtgccaggcgtgtactgcctatgtgtgctgtatcacggttacatttatacataccgagtgtcccagacagaaacaggttcttgg

SEQ ID NO: 17193 - DNA, 201 bp, Homo sapiens
ctgcccaagagtccaccaggccatggacgcagtggctgtgtatcatggcaaaatcagcagggaaaccggcgagaagctcctgcttgccactgggctggatrgcagctatttgctgagggacagcgagagcgtgccaggcgtgtactgcctatgtgtgctgtatcacggttacatttatacataccgagtgtcccagacaga

SEQ ID NO: 17194 - DNA, 201 bp, Homo sapiens
acagcacctggggtacataaaagatatttccggaaaataaaaaatctcatttcagcatttcagaagccagatcaaggcattgtaatacctctgcagtatcyagttgagaagaagtcctcagctagaagtacacaaggtactacagggataagagaagatcctgatgtctgcctgaaagccccatgaagaaaaataaaacac

SEQ ID NO: 17195 - DNA, 191 bp, Homo sapiens
agtttcagtttccatttctgatttctgctctctgcgctgagcacagcggcaccaggctgagctaagcagggccgccttgggcaggcctacstggtggtgcaggcgagacccaggctgggcaaggcgcagtttcagtttccatcttgggtctctgagctgagcagagtggcaccaggctgagttaagtggga

SEQ ID NO: 17196 - DNA, 187 bp, Homo sapiens
agtttcagtttccatttctgatttctgctctctgcgctgagcacagcggcaccaggctgagctaagcagggccgccttgggcaggcmtacgtggtggtgcaggcgagacccaggctgggcaaggcgcagtttcagtttccatcttgggtctctgagctgagcagagtggcaccaggctgagttaagt

SEQ ID NO: 17197 - DNA, 201 bp, Homo sapiens
atgtggccaagcggcacctagagactgtggatggagccaaggtggttgtattggtcaacagggtgcacctggtgacccagcatggtgaagagttcaggcgyatgctggatggacgctggaccgtgacaaccctgagtggggacatgggaccacgtgctggctttggccacctggcccggtgccatgacctgctcatctgca

SEQ ID NO: 17198 - DNA, 201 bp, Homo sapiens
agagactgtggatggagccaaggtggttgtattggtcaacagggtgcacctggtgacccagcatggtgaagagttcaggcgcatgctggatggacgctggrccgtgacaaccctgagtggggacatgggaccacgtgctggctttggccacctggcccggtgccatgacctgctcatctgcacagcagagcttctgcagat

SEQ ID NO: 17199 - DNA, 201 bp, Homo sapiens
cagcatggtgaagagttcaggcgcatgctggatggacgctggaccgtgacaaccctgagtggggacatgggaccacgtgctggctttggccacctggcccrgtgccatgacctgctcatctgcacagcagagcttctgcagatggcactgaccagccccgaggaggaggagcacgtggagctcactgtcttctccctgatc

SEQ ID NO: 17200 - DNA, 201 bp, Homo sapiens
aggatttctatcacagggagcacgtcactaaaacccagatcctgtgtgccgagcgccggctgctggccctgttcgatgagggaccagcaagaagtgatccrgaagttccaagatggaaccctgaaccttctggtggccacgagtgtggcggaggaggggctggacatcccacattgcaatgtggtggtgcgttatgggctc

SEQ ID NO: 17201 - DNA, 201 bp, Homo sapiens
gcacagcggcaccaggctgagctaagcagggccgccttgggcaggcctacgtggtggtgcaggcgagacccaggctgggcaaggcgcagtttcagtttccrtcttgggtctctgagctgagcagagtggcaccaggctgagttaagtgggactgccctgggcagacctacctactagagcagaatggagcttcggtcctac

SEQ ID NO: 17202 - DNA, 201 bp, Homo sapiens
ctgaagcgggagctgatcaacgaggcgctggagacgctgatggagcaggcagtggctgctgtgcagaaaatggaccaggccgagtaccaggccaagatccrggatctgcagcaggcagccttgaccaagcgggcggcccaggcagcccagcgggagaaccagcggcagcagttcccagtggagcacgtgcagctactctgc

SEQ ID NO: 17203 - DNA, 201 bp, Homo sapiens
atggaccaggccgagtaccaggccaagatccgggatctgcagcaggcagccttgaccaagcgggcggcccaggcagcccagcgggagaaccagcggcagcrgttcccagtggagcacgtgcagctactctgcatcaactgcatggtggctgtgggccatggcagcgacctgcggaaggtggagggcacccaccatgtcaat

SEQ ID NO: 17204 - DNA, 201 bp, Homo sapiens
caagatggaaccctgaaccttctggtggccacgagtgtggcggaggaggggctggacatcccacattgcaatgtggtggtgcgttatgggctcttgaccartgaaatctccatggtccaggccaggggccgtgcccgggccgatcagagtgtatacgcgtttgtagcaactgaaggtagccgggagctgaagcgggagctg

SEQ ID NO: 17205 - DNA, 191 bp, Homo sapiens; identical to SEQ ID NO: 17195

SEQ ID NO: 17206 - DNA, 187 bp, Homo sapiens; identical to SEQ ID NO: 17196

SEQ ID NO: 17207 - DNA, 201 bp, Homo sapiens; identical to SEQ ID NO: 17197

SEQ ID NO: 17208 - DNA, 201 bp, Homo sapiens; identical to SEQ ID NO: 17198

SEQ ID NO: 17209 - DNA, 201 bp, Homo sapiens; identical to SEQ ID NO: 17199

SEQ ID NO: 17210 - DNA, 201 bp, Homo sapiens
ggcctgcagactgtggacatccgggcccagctactgattggggctgggaacagcagccagagcacccacatgacccagagggaccagcaagaagtgatccrgaagttccaagatggaaccctgaaccttctggtggccacgagtgtggcggaggaggggctggacatcccacattgcaatgtggtggtgcgttatgggctc

SEQ ID NO: 17211 - DNA, 201 bp, Homo sapiens; identical to SEQ ID NO: 17201

SEQ ID NO: 17212 - DNA, 201 bp, Homo sapiens; identical to SEQ ID NO: 17203

SEQ ID NO: 17213 - DNA, 201 bp, Homo sapiens; identical to SEQ ID NO: 17202

SEQ ID NO: 17214 - DNA, 201 bp, Homo sapiens; identical to SEQ ID NO: 17204

SEQ ID NO: 17215 - DNA, 176 bp, Homo sapiens
ttctgatttctgctctctgcgctgagcacagcggcaccaggctgagctaagcagggccgccttgggcaggcctacstggtggtgcaggcgagacccaggctgggcaaggcgcaggtgtagcctgtgttactcccaccccccccccacccccaccttttggccacagcaggcttctg

SEQ ID NO: 17216 - DNA, 172 bp, Homo sapiens
ttctgatttctgctctctgcgctgagcacagcggcaccaggctgagctaagcagggccgccttgggcaggcmtacgtggtggtgcaggcgagacccaggctgggcaaggcgcaggtgtagcctgtgttactcccaccccccccccacccccaccttttggccacagcaggct

SEQ ID NO: 17217 - DNA, 201 bp, Homo sapiens; identical to SEQ ID NO: 17197

SEQ ID NO: 17218 - DNA, 201 bp, Homo sapiens; identical to SEQ ID NO: 17198

SEQ ID NO: 17219 - DNA, 201 bp, Homo sapiens; identical to SEQ ID NO: 17199

SEQ ID NO: 17220 - DNA, 201 bp, Homo sapiens
ggagttgggatgagtggagggcccagtgggtctgagtcccctgccattcccagaatggagctgtggccctaccaatgggaggtgatcatgcctgccagggygctggcgcagcagcagtacttaaccggagtttgtactcacggcagttggcgatgactgttagcacaaacggttcttttctcttggttctttttcctgggg

SEQ ID NO: 17221 - DNA, 201 bp, Homo sapiens; identical to SEQ ID NO: 17210

SEQ ID NO: 17222 - DNA, 201 bp, Homo sapiens
accggagtttgtactcacggcagttggcgatgactgttagcacaaacggttcttttctcttggttctttttcctggggcggggatgggagattcctaagtyggctcagctggctccttccctcagtttcagtttccatcttgggtctctgagctgagcagagtggcaccaggctgagttaagtgggactgccctgggcaga

SEQ ID NO: 17223 - DNA, 201 bp, Homo sapiens
ttagcacaaacggttcttttctcttggttctttttcctggggcggggatgggagattcctaagtcggctcagctggctccttccctcagtttcagtttccrtcttgggtctctgagctgagcagagtggcaccaggctgagttaagtgggactgccctgggcagacctacctactagagcagaatggagcttcggtcctac

SEQ ID NO: 17224 - DNA, 201 bp, Homo sapiens; identical to SEQ ID NO: 17203

SEQ ID NO: 17225 - DNA, 201 bp, Homo sapiens; identical to SEQ ID NO: 17202

SEQ ID NO: 17226 - DNA, 201 bp, Homo sapiens; identical to SEQ ID NO: 17204

SEQ ID NO: 17227 - DNA, 201 bp, Homo sapiens; identical to SEQ ID NO: 17198

SEQ ID NO: 17228 - DNA, 201 bp, Homo sapiens; identical to SEQ ID NO: 17199

SEQ ID NO: 17229 - DNA, 191 bp, Homo sapiens; identical to SEQ ID NO: 17195

SEQ ID NO: 17230 - DNA, 201 bp, Homo sapiens; identical to SEQ ID NO: 17201

SEQ ID NO: 17231 - DNA, 187 bp, Homo sapiens; identical to SEQ ID NO: 17196

SEQ ID NO: 17232 - DNA, 201 bp, Homo sapiens; identical to SEQ ID NO: 17197

SEQ ID NO: 17233 - DNA, 201 bp, Homo sapiens
tgaccacaatccatgctgccactcctgcccagaagactcgatggcctctgtgggaaactgtggcatatgtctgtggggctctccagaacatcatccctgcmtctactggtgttgccaaggctgtgggcaaggccatccccgagctgaacaggaagctcactagcatggccttccgtgtccttctgcaaacgtgttggttgt

SEQ ID NO: 17234 - DNA, 201 bp, Homo sapiens
aaattccaccacaccgtcaaggctgagaatgggaagcttgtcatcaatggaaatcccatcaccatcttccaggagcaagatcctaccaaaatcaaatgggrtgatgctgaagctgagtatgccgtggagtccactggcatcttcatgaccatagagaaggctggggctcacttaatgggggagccaaaagggtcatcatct

SEQ ID NO: 17235 - DNA, 201 bp, Homo sapiens
gttgtggacctgacctgccatctggagaaacctgccaaatatgatgacatcaaaaaggtggtgaagcaggcgtcagagggcccctcaagggcatcttgggstacactgaacaccaggttgtttcctctgactttaacagtgacactcactcttccactttcgatgctggggctgccattgccctcagtgaccactttgtca

SEQ ID NO: 17236 - DNA, 201 bp, Homo sapiens
agggctgcttttaactctagtaaagtggatattgtcaccatcaatgacccttcattgacctcaactacatggtctgcatgttccagtatttctacccatgrcaaattccaccacaccgtcaaggctgagaatgggaagcttgtcatcaatggaaatcccatcaccatcttccaggagcaagatcctaccaaaatcaaatgg

SEQ ID NO: 17237 - DNA, 201 bp, Homo sapiens
gggccatattgggcacctggtcaccagggctgcttttaactctagtaaagtggatattgtcaccatcaatgacccttcattgacctcaactacatggtctrcatgttccagtatttctacccatggcaaattccaccacaccgtcaaggctgagaatgggaagcttgtcatcaatggaaatcccatcaccatcttccagga

SEQ ID NO: 17238 - DNA, 201 bp, Homo sapiens
ccgattattcccttcccaatattattcatccagacttagccacagtgcacaaaagcaaacctgctagagaggcagtgaacaccacagcttctccccagctwggtgccttttacatcgggtttgttctccttccatggtgtgttgctgacattgtcactgagtcccatgtgaggtgctggtgagtattacctttcatctgtg

SEQ ID NO: 17239 - DNA, 201 bp, Homo sapiens
cctggtattcctactcttcctgaatttcgagcaggttaaatctctaatgtattggctagatccaaatcttcgatacgccacaagggaagcagatgtcatgsagtatgctgtgaactgccatgtgatcacctgggagaggattatcagccactttgatatttttgcatttggacatttctggggctgggccatgaaggcctt

SEQ ID NO: 17240 - DNA, 153 bp, Homo sapiens
tgtgttgctgacattgtcactgagtcccatgtgaggtgctggtgagtattacctttcatctgtgccatgctctagaaccttgaccttgatagttcaccacstctgatggatccctgttttaaataaaaacgattcactttaaagcctatcaaa

SEQ ID NO: 17241 - DNA, 175 bp, Homo sapiens
acgcggggagacagcgggctacgtgctctgaaaagagccagccaggggccccggctacccttctccggctcgctmttcctctgaagtcctgtggacttggagtctgaaaattcctcgagtggtagagatgcctcagctaggatgacagcgtggggacggccggcggcgtcccctg

SEQ ID NO: 17242 - DNA, 201 bp, Homo sapiens
cgttggaaagaaatgaaaaaccctggttaatcaaagatgttccagagtgcctagaactgagagggaaatggaactcatttggaactccccgtgaggaggtygaggcgcacagggcaagcaggaagaggcgagggcacttgggggtcattatttgagatcgtaagtcttgtttcccacagacctggccgcgtcaggcagatc

SEQ ID NO: 17243 - DNA, 201 bp, Homo sapiens
cctttaccagggatgactctgttccagaagacaacatctggagaggcatcctctctgttattttcttctttcttatcatcagtgtgttagctttccccaayggtccgttcactcgacctcatccagccttatggcgaatggtttttggactcagtgtgctctacttcctgttcctggtattcctactcttcctgaatttcg

SEQ ID NO: 17244 - DNA, 201 bp, Homo sapiens
aggaggtcgaggcgcacagggcaagcaggaagaggcgagggcacttgggggtcattatttgagatcgtaagtcttgtttcccacagacctggccgcgtcargcagatcatcgcctggggggcctttgccaacgtggggtctcttctaacttcagcacttgacatgcggtcaccggtggcagcgcggtgtgttgaagggaaa

SEQ ID NO: 17245 - DNA, 201 bp, Homo sapiens
tttttaagttaggatgctttttaacagcctttagaagccgctgctgaaattgatactgggggaagggttccccttccttctagagcagaaaagggagagargtgttgtattcctgtttggtaacctcagtctcctgtaagacctcctaccacatggcgagtatacaccaatcaggagagggtagctgcctgcataggagcc

SEQ ID NO: 17246 - DNA, 201 bp, Homo sapiens; identical to SEQ ID NO: 17238

SEQ ID NO: 17247 - DNA, 201 bp, Homo sapiens
tttaccagggatgactctgttccagaagacaacatctggagaggcatcctctctgttattttcttctttcttatcatcagtgtgttagctttccccaatgsagtatgctgtgaactgccatgtgatcacctgggagaggattatcagccactttgatatttttgcatttggacatttctggggctgggccatgaaggcctt

SEQ ID NO: 17248 - DNA, 153 bp, Homo sapiens; identical to SEQ ID NO: 17240

SEQ ID NO: 17249 - DNA, 175 bp, Homo sapiens; identical to SEQ ID NO: 17241

SEQ ID NO: 17250 - DNA, 201 bp, Homo sapiens; identical to SEQ ID NO: 17242

SEQ ID NO: 17251 - DNA, 201 bp, Homo sapiens
cctttaccagggatgactctgttccagaagacaacatctggagaggcatcctctctgttattttcttctttcttatcatcagtgtgttagctttccccaayggagtatgctgtgaactgccatgtgatcacctgggagaggattatcagccactttgatatttttgcatttggacatttctggggctgggccatgaaggcc

SEQ ID NO: 17252 - DNA, 201 bp, Homo sapiens; identical to SEQ ID NO: 17244

SEQ ID NO: 17253 - DNA, 201 bp, Homo sapiens; identical to SEQ ID NO: 17245

SEQ ID NO: 17254 - DNA, 201 bp, Homo sapiens
ggacaggagtggttcaactgcagtgggagttatgatttcacctaagcatatctactttatcaactgtggtgattcacgtgctgttctgtataggaatggasaagtctgcttttctacccaggatcacaaaccttgcaatccaagggaaaaggagcgaatccaaaatgcaggaggcagcgtgatgatacaacgtgttaatgg

SEQ ID NO: 17255 - DNA, 201 bp, Homo sapiens
agaaacgggatggacaggagtggttcaactgcagtgggagttatgatttcacctaagcatatctactttatcaactgtggtgattcacgtgctgttctgtrtaggaatggacaagtctgcttttctacccaggatcacaaaccttgcaatccaagggaaaaggagcgaatccaaaatgcaggaggcagcgtgatgatacaa

SEQ ID NO: 17256 - DNA, 201 bp, Homo sapiens
gggttcggtggttggaagatgctccagagagacgaggctgcggcggaggaggtggcggcggccgaatcggcaacggcgctagggtggagagaaggcggcakcggcggcggcggcggcgtgaggggccgggcggtgtaaacagccccggaggcggcggtcgagaccccgagggggaagcggcggctgagtcagggtcgcgcc

SEQ ID NO: 17257 - DNA, 201 bp, Homo sapiens
cagggtcgcgcctccgttggaaacttgggctgagtaccgcggcgggcgcgagcgaggcgccctagacatcttctccctcccttgcctcagatttattgctraacatgggtgcatttttggataaacccaaaactgaaaaacataatgctcatggtgctgggaatggtttacgttatggcctgagcagcatgcaaggatgga

SEQ ID NO: 17258 - DNA, 201 bp, Homo sapiens; identical to SEQ ID NO: 17254

SEQ ID NO: 17259 - DNA, 201 bp, Homo sapiens; identical to SEQ ID NO: 17255

SEQ ID NO: 17260 - DNA, 201 bp, Homo sapiens
atgaagcaattctgacctgtagatttttgagacaagcataggcatatgtttgttgcctgactagctaatgaaaacagcattttccccaattataaaaaaaaggtatatacttactattggaaaaaaaatccagatgatgaagaaaatatagagaaacacccaaaattttgccatccaccctaagtcagctactttcattgt

SEQ ID NO: 17261 - DNA, 201 bp, Homo sapiens; identical to SEQ ID NO: 17256

SEQ ID NO: 17262 - DNA, 201 bp, Homo sapiens; identical to SEQ ID NO: 17257

SEQ ID NO: 17263 - DNA, 201 bp, Homo sapiens; identical to SEQ ID NO: 17254

SEQ ID NO: 17264 - DNA, 201 bp, Homo sapiens; identical to SEQ ID NO: 17255

SEQ ID NO: 17265 - DNA, 111 bp, Homo sapiens
atttattgctraacatgggtgcatttttggataaacccaaaactgaaaaacataatgctcatggtgctgggaatggtttacgttatggcctgagcagcatgcaaggatgga

SEQ ID NO: 17266 - DNA, 201 bp, Homo sapiens; identical to SEQ ID NO: 17256

SEQ ID NO: 17267 - DNA, 201 bp, Homo sapiens; identical to SEQ ID NO: 17254

SEQ ID NO: 17268 - DNA, 201 bp, Homo sapiens; identical to SEQ ID NO: 17255

SEQ ID NO: 17269 - DNA, 201 bp, Homo sapiens; identical to SEQ ID NO: 17256

SEQ ID NO: 17270 - DNA, 201 bp, Homo sapiens; identical to SEQ ID NO: 17257

SEQ ID NO: 17271 - DNA, 201 bp, Homo sapiens
ttgccccgccctgcaggactgcagaatttcctttccggcggcgcgctgtcgtcacgcgtcccgcgcctcctcgcgcctgcgccgtggttggaaggtcgtcyctgtgaccggcttggcggttggagcggctgtcgccatgttgtcggtagcagcccgctcgggcccgttcgcgcccgtcctgtcggccacgtcccgcggggt

SEQ ID NO: 17272 - DNA, 118 bp, Homo sapiens
gcttctttaaatatgtaagaattgatgatgtatttgcaaacattaatgtgaaataaattgaatttaatgttgaatactttcaggcattcacttaataaagmcactgttaagcactgtt

SEQ ID NO: 17273 - DNA, 201 bp, Homo sapiens
actatgatgcatctggcaggatcagattgggtcctgctcctctcaaccttgaagtccccacgtatgagttcaccagtgacgatatggtgattgttggttaagagacttggactcaagtcataggcttctttaaatatgtaagaattgatgatgtatttgcaaacattaatgtgaaataaattgaatttaatgttgaatact

SEQ ID NO: 17274 - DNA, 201 bp, Homo sapiens
ttgtgtacccattgcaaatgcaggagattttggtggttattactgcccttgccatgggtcacactatgatgcatctggcaggatcagattgggtcctgctmctctcaaccttgaagtccccacgtatgagttcaccagtgacgatatggtgattgttggttaagagacttggactcaagtcataggcttctttaaatatgt

SEQ ID NO: 17275 - DNA, 201 bp, Homo sapiens
ctgcagttgaattatcacagttgagggacccacagcatgatctagatcgagtaaagaaacctgaatgggttatcctgataggtgtttgcactcatcttggytgtgtacccattgcaaatgcaggagattttggtggttattactgcccttgccatgggtcacactatgatgcatctggcaggatcagattgggtcctgctc

SEQ ID NO: 17276 - DNA, 201 bp, Homo sapiens
catctggcaggatcagattgggtcctgctcctctcaaccttgaagtccccacgtatgagttcaccagtgacgatatggtgattgttggttaagagacttgractcaagtcataggcttctttaaatatgtaagaattgatgatgtatttgcaaacattaatgtgaaataaattgaatttaatgttgaatactttcaggcat

SEQ ID NO: 17277 - DNA, 201 bp, Homo sapiens
cccgcgcctcctcgcgcctgcgccgtggttggaaggtcgtccctgtgaccggcttggcggttggagcggctgtcgccatgttgtcggtagcagcccgctcrggcccgttcgcgcccgtcctgtcggccacgtcccgcggggtggcgggcgcgctgcggcccttggtgcaggccacggtgcccgccaccccggagcagcctg

SEQ ID NO: 17278 - DNA, 201 bp, Homo sapiens
aatcgaaatcaagttatccgatattccagaaggcaagaacatggctttcaaatggagaggcaaacccctgtttgtgcgtcatagaacccagaaggaaattragcaggaagctgcagttgaattatcacagttgagggacccacagcatgatctagatcgagtaaagaaacctgaatgggttatcctgataggtgtttgcac

SEQ ID NO: 17279 - DNA, 201 bp, Homo sapiens
tcacgcgtcccgcgcctcctcgcgcctgcgccgtggttggaaggtcgtccctgtgaccggcttggcggttggagcggctgtcgccatgttgtcggtagcakcccgctcgggcccgttcgcgcccgtcctgtcggccacgtcccgcggggtggcgggcgcgctgcggcccttggtgcaggccacggtgcccgccaccccgga

SEQ ID NO: 17280 - DNA, 201 bp, Homo sapiens
ctgctgatgtgttggccctggcgaaaatcgaaatcaagttatccgatattccagaaggcaagaacatggctttcaaatggagaggcaaacccctgtttgtrcgtcatagaacccagaaggaaattgagcaggaagctgcagttgaattatcacagttgagggacccacagcatgatctagatcgagtaaagaaacctgaat

SEQ ID NO: 17281 - DNA, 201 bp, Homo sapiens
agccctctcgttcttctggggatctctcgggacactgacgaggtggcaccgggacctacaggtgggccgcaagccccgcccccagcgacggcttgtagccycgtcccccgacgcagcgcctctccaagtttgccccgccctgcaggactgcagaatttcctttccggcggcgcgctgtcgtcacgcgtcccgcgcctcctc

SEQ ID NO: 17282 - DNA, 201 bp, Homo sapiens
tcgggacactgacgaggtggcaccgggacctacaggtgggccgcaagccccgcccccagcgacggcttgtagccccgtcccccgacgcagcgcctctccargtttgccccgccctgcaggactgcagaatttcctttccggcggcgcgctgtcgtcacgcgtcccgcgcctcctcgcgcctgcgccgtggttggaaggtcg

SEQ ID NO: 17283 - DNA, 201 bp, Homo sapiens
tggggtcccctgttcagccctctcgttcttctggggatctctcgggacactgacgaggtggcaccgggacctacaggtgggccgcaagccccgcccccagygacggcttgtagccccgtcccccgacgcagcgcctctccaagtttgccccgccctgcaggactgcagaatttcctttccggcggcgcgctgtcgtcacgc

SEQ ID NO: 17284 - DNA, 201 bp, Homo sapiens; identical to SEQ ID NO: 17271

SEQ ID NO: 17285 - DNA, 165 bp, Homo sapiens
gtgaaataaattgaatttaatgttgaatactttcaggcattcacttaataaagacactgttaagcactgttatgctcagtcatacacgcgaaaggtacaaygtcttttagctaattctaattaaaaattacagactggtgtacaagatacttgtgaaatctgtaa

SEQ ID NO: 17286 - DNA, 201 bp, Homo sapiens
ttgatttgaaatatgtaagaattgatgatgtatttgcaaacattaatgtgaaataaattgaatttaatgttgaatactttcaggcattcacttaataaagmcactgttaagcactgttatgctcagtcatacacgcgaaaggtacaatgtcttttagctaattctaattaaaaattacagactggtgtacaagatacttgt

SEQ ID NO: 17287 - DNA, 201 bp, Homo sapiens
actatgatgcatctggcaggatcagattgggtcctgctcctctcaaccttgaagtccccacgtatgagttcaccagtgacgatatggtgattgttggttaagagacttggactcaagtcataggcttctttcagtctttatgtcacctcaggagacttatttgagaggaagccttctgtacttgaagttgatttgaaatat

SEQ ID NO: 17288 - DNA, 201 bp, Homo sapiens
ttgtgtacccattgcaaatgcaggagattttggtggttattactgcccttgccatgggtcacactatgatgcatctggcaggatcagattgggtcctgctmctctcaaccttgaagtccccacgtatgagttcaccagtgacgatatggtgattgttggttaagagacttggactcaagtcataggcttctttcagtcttt

SEQ ID NO: 17289 - DNA, 201 bp, Homo sapiens; identical to SEQ ID NO: 17275

SEQ ID NO: 17290 - DNA, 201 bp, Homo sapiens
catctggcaggatcagattgggtcctgctcctctcaaccttgaagtccccacgtatgagttcaccagtgacgatatggtgattgttggttaagagacttgractcaagtcataggcttctttcagtctttatgtcacctcaggagacttatttgagaggaagccttctgtacttgaagttgatttgaaatatgtaagaatt

SEQ ID NO: 17291 - DNA, 201 bp, Homo sapiens; identical to SEQ ID NO: 17277

SEQ ID NO: 17292 - DNA, 201 bp, Homo sapiens; identical to SEQ ID NO: 17278

SEQ ID NO: 17293 - DNA, 201 bp, Homo sapiens; identical to SEQ ID NO: 17279

SEQ ID NO: 17294 - DNA, 201 bp, Homo sapiens; identical to SEQ ID NO: 17280

SEQ ID NO: 17295 - DNA, 201 bp, Homo sapiens; identical to SEQ ID NO: 17281

SEQ ID NO: 17296 - DNA, 201 bp, Homo sapiens; identical to SEQ ID NO: 17282

SEQ ID NO: 17297 - DNA, 201 bp, Homo sapiens; identical to SEQ ID NO: 17283

SEQ ID NO: 17298 - DNA, 201 bp, Homo sapiens
aatccttactgctcacaatgctagtggggcccttgattgccataatcaacagccctggtaaggaagagctgcaggaagatggtgctaagatgttgtatgcmgagttccaaagagtgaaggcgcagacacggctgggcacaagactggacttagacacagctcacatcttctgtcagtggcagtcctgtctccagatgggga

SEQ ID NO: 17299 - DNA, 201 bp, Homo sapiens
caccacatctggacaagacatcctggaatgcattgcctcctcagcctctagctttcagtgaagtggaaaggattaataaaaatatcagaacctcaatcatkgatgcagtagaactggccaaggatcattctgacttaagcagattgactgagctctccttgaggaggcggcagatgcttctgttagaaaccctgaaggtga

SEQ ID NO: 17300 - DNA, 201 bp, Homo sapiens; identical to SEQ ID NO: 17298

SEQ ID NO: 17301 - DNA, 201 bp, Homo sapiens; identical to SEQ ID NO: 17299

SEQ ID NO: 17302 - DNA, 201 bp, Homo sapiens
ctctagcgggcttctgatggaggagctactcctctgggaggacagaaattagcagcagcctctgtcaccatccaaagattacaacccatgaaaccattgartttgtgccttgtatcagaaagcaaaggagaatgaaaaagcacagctaacattgcttgaggatctaggcgattaattctttagactgtcatcatgggtatc

SEQ ID NO: 17303 - DNA, 201 bp, Homo sapiens
gaggatgtgacatttcagataaaaagcttacaactttaaaggatagagctagagagaagatccagatggcccattccctttctgttggtgggagtgggtaygtatgtcccttactcatccgggaagtattcatacaggttttgatcaagctgcgggtgtgttttgtccagtgcttttcagaagcagatcgggacattatga

SEQ ID NO: 17304 - DNA, 201 bp, Homo sapiens
gtgctggtgtttcccaggattaccctctggctaacatgtatgctataacccgagttttgcgtttagcagatggacctgacgaagttcatctttcagcaatygcaacaatggagctgcgggaccaagccaaaagactgacagccaagatataaggagggtggcactgccacatcccactggcagaaactctcctttatacaa

SEQ ID NO: 17305 - DNA, 201 bp, Homo sapiens
cttcactgtacttcacacgcattggtgttaacattttaatcttagaagaccctgacccactgagggtttgttgtgagaattgctgaagccacgtagaagcmccttgaaatctgtaaaaccacaagaaagtactttataaaaggtatccttatttgaagtggataaatcttgtaactcgaaaagttgtgatttagaagacag

SEQ ID NO: 17306 - DNA, 201 bp, Homo sapiens
tctgggaaataattcatctgaggatagctttttatttgccaatattgtgcaacctctggcagaaactggactacaactctccaaacgaactttcagtactktactaccacagattgatactactggacagttgtttgtacagactcggaaaggtcaggaagttcttattaaggtgaagcatttcatgaaacaacacattct

SEQ ID NO: 17307 - DNA, 201 bp, Homo sapiens
ctaatactaggtgaaggtaggggatttgaaatttcccaaggccgccttggacctggcagaatccaccactgtatgagaacagtaggtttggcggaacgcgmtttgcagatcatgtgtgagcgggcaacacaaaggatagctttcaagaagaagttgtatgcacatgaggttgtggctcactggattgctgaaagccgcatt

SEQ ID NO: 17308 - DNA, 201 bp, Homo sapiens
gcaaaaaatggtggagcagtggagctgggaatcccaagtgcaaaattgcaattgttttgggaagaactcaaaatacttctctctccaggtaattaaacaawtctgattgagaaacctgtgtaggaatgagccagtcttcctcctatctaggtaatttacttaaaattcactgtttggactcacaaatcataatgtaagata

SEQ ID NO: 17309 - DNA, 201 bp, Homo sapiens; identical to SEQ ID NO: 17304

SEQ ID NO: 17310 - DNA, 201 bp, Homo sapiens; identical to SEQ ID NO: 17305

SEQ ID NO: 17311 - DNA, 201 bp, Homo sapiens; identical to SEQ ID NO: 17306

SEQ ID NO: 17312 - DNA, 174 bp, Homo sapiens
gctctttcggcttccttcctcgctgggccggctaaacccggccgcagcagcaccggggtgataagtgtccaggrcaggaggccagcgatgttgccttgctaaccgggtatctaagagaaacagggtctttttattcttaggctcgacagtctgacggccctttttctgaacggg

SEQ ID NO: 17313 - DNA, 201 bp, Homo sapiens
gtgcagggtcgaatcttccgtgatttaacaattcctggacttagcccagcagaacgttcagccatatatgtggccacggtagaaacattggctcagttacrttccttgaatatacagtcactgcagctggaaggatatggtataggtgctgggtactgcaaaagacaggtatcaacctggacaaagcaatatcaagctgca

SEQ ID NO: 17314 - DNA, 201 bp, Homo sapiens; identical to SEQ ID NO: 17307

SEQ ID NO: 17315 - DNA, 201 bp, Homo sapiens; identical to SEQ ID NO: 17304

SEQ ID NO: 17316 - DNA, 201 bp, Homo sapiens; identical to SEQ ID NO: 17305

SEQ ID NO: 17317 - DNA, 201 bp, Homo sapiens; identical to SEQ ID NO: 17306

SEQ ID NO: 17318 - DNA, 201 bp, Homo sapiens; identical to SEQ ID NO: 17313

SEQ ID NO: 17319 - DNA, 201 bp, Homo sapiens; identical to SEQ ID NO: 17307

SEQ ID NO: 17320 - DNA, 201 bp, Homo sapiens; identical to SEQ ID NO: 17304

SEQ ID NO: 17321 - DNA, 201 bp, Homo sapiens; identical to SEQ ID NO: 17305

SEQ ID NO: 17322 - DNA, 201 bp, Homo sapiens; identical to SEQ ID NO: 17306

SEQ ID NO: 17323 - DNA, 174 bp, Homo sapiens; identical to SEQ ID NO: 17312

SEQ ID NO: 17324 - DNA, 201 bp, Homo sapiens; identical to SEQ ID NO: 17313

SEQ ID NO: 17325 - DNA, 201 bp, Homo sapiens; identical to SEQ ID NO: 17307

SEQ ID NO: 17326 - DNA, 201 bp, Homo sapiens
tgtaatgaacttggacaaacatggatggaatctggggtcagtgaaaatgcagtttcagggcatatacagcttataattcctggagaatctgcttgttttgygtgtgctccaccacttgtagttgctgcaaatattgatgaaaagactctgaaacgagaaggtgtttgtgcagccagtcttcctaccactatgggtgtggtt

SEQ ID NO: 17327 - DNA, 201 bp, Homo sapiens
ggaagcggctccgaggaaggcctgtgggagtctcggagacgtgtctgtctgtgaggcgctgggtgcacgtccccagggctctgggctaggaaggcagcggsgaggtgcctccccacgtacccctcgcgggcccagccgagcaacgtggggcgaaggcggcggcgaaggcccgggctgggagcgttggcggccggagtccca

SEQ ID NO: 17328 - DNA, 201 bp, Homo sapiens
cccgttcagaaaaagggccgtcagactgtcgagcctaagaataaaaagaccctgtttctcttagatacccggttagcaaggcaacatcgctggcctcctgycctggacacttatcaccccggtgctgctgcggccgggtttagccggcccagcgaggaaggaagccgaaagagccaggtttttgatgagggggagcgatgt

SEQ ID NO: 17329 - DNA, 201 bp, Homo sapiens
agacgtgtctgtctgtgaggcgctgggtgcacgtccccagggctctgggctaggaaggcagcggcgaggtgcctccccacgtacccctcgcgggcccagcmgagcaacgtggggcgaaggcggcggcgaaggcccgggctgggagcgttggcggccggagtcccagccatggcggagtctgtggagcgcctgcagcagcgg

SEQ ID NO: 17330 - DNA, 201 bp, Homo sapiens
tctgttgcatgaggacatggacaataaagtagtatatgatcctcagatacagggagaaggacaaggcatacagcttattgattagagctggcaagcatctkctcattatgtttggaattgctttctataagaaaattgcccactactactaacttgatcaacaatgaattcaaaatagttaacctatgaaataacatcctc

SEQ ID NO: 17331 - DNA, 201 bp, Homo sapiens
caaaaaagcaagaagattctgtcactgagttaacagtggaagattctggtgaaagcttggaagacctcatggccaaaatgaagaatatgtagataatggastgggatatattgtatttctcatgttaaagcctcttcccttgaaattaaaaaaaaattttaactgataaaacttagggcaacattaattaatgtatattct

SEQ ID NO: 17332 - DNA, 201 bp, Homo sapiens; identical to SEQ ID NO: 17326

SEQ ID NO: 17333 - DNA, 201 bp, Homo sapiens; identical to SEQ ID NO: 17327

SEQ ID NO: 17334 - DNA, 201 bp, Homo sapiens; identical to SEQ ID NO: 17328

SEQ ID NO: 17335 - DNA, 201 bp, Homo sapiens; identical to SEQ ID NO: 17329

SEQ ID NO: 17336 - DNA, 201 bp, Homo sapiens; identical to SEQ ID NO: 17330

SEQ ID NO: 17337 - DNA, 201 bp, Homo sapiens; identical to SEQ ID NO: 17331

SEQ ID NO: 17338 - DNA, 201 bp, Homo sapiens
aatccgtaggaggaaaaattttatttgcaacagatgacttttttgctcctgcagaaaacctcataaagagtgacagcccgtgcttcaaagagcatgaatayacggagtttgggaaatggatggatggctgggagaccaggaggaaaaggattccaggtcacgactggtgtgtcctcaggctggggatccaaggagtcatcc

SEQ ID NO: 17339 - DNA, 201 bp, Homo sapiens
gatggttgggaaactgcaagaaggctggaccggccaccaatattagaaaatgatgagaatggcattctcttggttccgggttgtgaatgggcagttttccrattggcacatcctggagtaataactcgaattgaaattgacacaaaatattttgaaggcaatgctcctgacagctgtaaagtggatgggtgcatcctgaca

SEQ ID NO: 17340 - DNA, 201 bp, Homo sapiens
tccgggttgtgaatgggcagttttccgattggcacatcctggagtaataactcgaattgaaattgacacaaaatattttgaaggcaatgctcctgacagcygtaaagtggatgggtgcatcctgacaactcaggaagaagaagccgtgatcaggcaaaagtggattctcccggcccacaagtggaaaccactgcttccagt

SEQ ID NO: 17341 - DNA, 201 bp, Homo sapiens; identical to SEQ ID NO: 17339

SEQ ID NO: 17342 - DNA, 201 bp, Homo sapiens; identical to SEQ ID NO: 17340

SEQ ID NO: 17343 - DNA, 201 bp, Homo sapiens
cctccggagtagctggctttacagcttgaaggatgccaatgatgtaccaatccaatgtgaaatctctcctcttatctcctatgctggagaaggattagaargttatgtggcagataaagaattccatgcacctctaatcatcgatgagaatggagttcatgagctggtgaaaaatggtatttgaaccagataccaagtttt

SEQ ID NO: 17344 - DNA, 201 bp, Homo sapiens
aattgtgagagatgaaaaggaagtatattatgtaaaagagggaagaagcaactaggaggtattctgaaagaatggaaacaaccatgctgagttttgactcsatattatttttatttctcaccttaatgcttactgaatagtgttagctaccaaaaggatgcatggctaaagaattgtggggcagtaggtttattgggctaa

SEQ ID NO: 17345 - DNA, 201 bp, Homo sapiens
gctaatttgcttatatcctgagattttacatttggtgatggtagcttctgttttccctccttcagggcatccaattttgtttactgaagttcactccttartttcttggggtatctttgtggtagtagaatggaagttacatattcaggccagctgtatatgtgtttcttgggttcacaaccaccttctgttcctgctaca

SEQ ID NO: 17346 - DNA, 201 bp, Homo sapiens
catcacagctgatgtcaatcacaacttgaaggatgccaatgatgtaccaatccaatgtgaaatctctcctcttatctcctatgctggagaaggattagaargttatgtggcagataaagaattccatgcacctctaatcatcgatgagaatggagttcatgagctggtgaaaaatggtatttgaaccagataccaagtttt

SEQ ID NO: 17347 - DNA, 201 bp, Homo sapiens
ggagtttaccaggtggtagaatatagtgagatttccctggcaacagctcaaaaacgaagctcagacggacgactgctgttcaatgcggggaacattgccarccatttcttcactgtaccatttctgagagatgttgtcaatgtttatgaacctcagttgcagcaccatgtggctcaaaagaagattccttatgtggatacc

SEQ ID NO: 17348 - DNA, 201 bp, Homo sapiens
caaagaagtttgtggtatatgaagtattgcgagaagatgagttttccccactaaagaatgctgatagtcagaatgggaaagacaaccctactactgcaagrcatgctttgatgtcccttcatcattgctgggtcctcaatgcagggggccatttcatagatgaaaatggctctcgccttccagcaattccccgcagtgcta

SEQ ID NO: 17349 - DNA, 201 bp, Homo sapiens
tttgccgagtggatggagtttaccaggtggtagaatatagtgagatttccctggcaacagctcaaaaacgaagctcagacggacgactgctgttcaatgcrgggaacattgccaaccatttcttcactgtaccatttctgagagatgttgtcaatgtttatgaacctcagttgcagcaccatgtggctcaaaagaagattc

SEQ ID NO: 17350 - DNA, 201 bp, Homo sapiens
atcttccagtttgcaaagaagtttgtggtatatgaagtattgcgagaagatgagttttccccactaaagaatgctgatagtcagaatgggaaagacaaccmtactactgcaaggcatgctttgatgtcccttcatcattgctgggtcctcaatgcagggggccatttcatagatgaaaatggctctcgccttccagcaatt

SEQ ID NO: 17351 - DNA, 201 bp, Homo sapiens
gattccttatgtggatacccaaggacagttaattaagccagacaaacccaatggaataaagatggaaaaatttgtctttgacatcttccagtttgcaaagmagtttgtggtatatgaagtattgcgagaagatgagttttccccactaaagaatgctgatagtcagaatgggaaagacaaccctactactgcaaggcatgc

SEQ ID NO: 17352 - DNA, 201 bp, Homo sapiens
aatgcagggggccatttcatagatgaaaatggctctcgccttccagcaattccccgcagtgctacaaatgggaagtcagagaccatcacagctgatgtcartcacaacttgaaggatgccaatgatgtaccaatccaatgtgaaatctctcctcttatctcctatgctggagaaggattagaaagttatgtggcagataaa

SEQ ID NO: 17353 - DNA, 201 bp, Homo sapiens
ctctcgccttccagcaattccccgcttgaaggatgccaatgatgtaccaatccaatgtgaaatctctcctcttatctcctatgctggagaaggattagaargttatgtggcagataaagaattccatgcacctctaatcatcgatgagaatggagttcatgagctggtgaaaaatggtatttgaaccagataccaagtttt

SEQ ID NO: 17354 - DNA, 201 bp, Homo sapiens; identical to SEQ ID NO: 17347

SEQ ID NO: 17355 - DNA, 201 bp, Homo sapiens
caaagaagtttgtggtatatgaagtattgcgagaagatgagttttccccactaaagaatgctgatagtcagaatgggaaagacaaccctactactgcaagrcatgctttgatgtcccttcatcattgctgggtcctcaatgcagggggccatttcatagatgaaaatggctctcgccttccagcaattccccgcttgaagg

SEQ ID NO: 17356 - DNA, 201 bp, Homo sapiens; identical to SEQ ID NO: 17349

SEQ ID NO: 17357 - DNA, 201 bp, Homo sapiens; identical to SEQ ID NO: 17350

SEQ ID NO: 17358 - DNA, 201 bp, Homo sapiens; identical to SEQ ID NO: 17351

SEQ ID NO: 17359 - DNA, 106 bp, Homo sapiens
gataaaatcacttgatgtaacctggaaactatgctttacatggcaatcaaagccttttgatcatgtacattttatttgatattaaaatcttttataaccasatact

SEQ ID NO: 17360 - DNA, 201 bp, Homo sapiens
ttgagttcagctgctcctgatgtctctttcctgaaaatttcaatactaagagctcgagaaaccctgtatttggggaagcttatccttcaccatcaactttrggggtaggggtcagagggaacaagggtggaaaggccgcgctgaatggggccgaagctccgcccctcagcgataagtccagattcctgcggccgacgtggt

SEQ ID NO: 17361 - DNA, 158 bp, Homo sapiens
aaagcctgcttccttcaaccctttccaaaatccccaaataaaagcccaaaatctgtakaggatcttcctaacatcctcgtgctgagatgccctgaaattctccataactcatgactgagtaataaaaccaacttgcttaattaaagttggtttcttgt

SEQ ID NO: 17362 - DNA, 201 bp, Homo sapiens
gatggctccataatattgaaaacaattttacttcaaatgcataaaatgatgcttctgattcagctggtgcgacatttatttcacatttgagttcagctgcwcctgatgtctctttcctgaaaatttcaatactaagagctcgagaaaccctgtatttggggaagcttatccttcaccatcaactttgggggtaggggtcag

SEQ ID NO: 17363 - DNA, 201 bp, Homo sapiens
cctttgaaaaagcctatgaaaagctccagattctcaaaccagaggctaagatgaatgaggggtttgagtggcaactgaaattataccaggcaatgggataygaagtggatacctctagtgcaatttataagcaatatcgtttacaaaaggttacagagaagtatccagaattgcagaatttacctcaagaactctttgctg

SEQ ID NO: 17364 - DNA, 201 bp, Homo sapiens
tggacctatagcctttgcccacaagagaatgacaccatcttccatgcttaccacagggaggcaagctcaatgtacatcttatttcattgaacctgtacagwggatggaatctgctttgttgggagtgatggatggacagcttctttgcccaaaatgcagtgccaagttgggttccttcaactggtatggtgaacagtgctc

SEQ ID NO: 17365 - DNA, 201 bp, Homo sapiens
ctagtgcaatttataagcaatatcgtttacaaaaggttacagagaagtatccagaattgcagaatttacctcaagaactctttgctgttgacccaactacygtttcacaaggattgaaagatgaggttctctacaagtgtagaaagtgcaggcgatcattatttcgaagttctagtattctggatcaccgtgaaggaagtg

SEQ ID NO: 17366 - DNA, 201 bp, Homo sapiens
gccagcagagtcagctgtgccgggcagatgctggaagtgcagccaggattgtatttcggtggggccgcggccgtcgcggagccagatcacctgagggaagmgggcatcacggccgtgctaacagtggactcggaggagcccagcttcaaggcggggcctggggtcgaggatctatggcgcctcttcgtgccagcgctggac

SEQ ID NO: 17367 - DNA, 201 bp, Homo sapiens
taaacatcaacaaggattcacaccccaataatgaaattgggcagaaaaaggaaaaataatcatgaaatgcacagtaaagatggctccataatattgaaaamaattttacttcaaatgcataaaatgatgcttctgattcagctggtgcgacatttatttcacatttgagttcagctgctcctgatgtctctttcctgaaaa

SEQ ID NO: 17368 - DNA, 201 bp, Homo sapiens
gtttacccagtgcgcaatgttctgactacttgaatacttttgagttcatggacaaacttggagaaaacttgaagatcaaactggctcaggccaaactttamgttcatacctgggctgaggaggataagtgtcttttgataactaggtctacaggttttcatttttctgtgtcacactcaaggataaaggcaaaatcgattg

SEQ ID NO: 17369 - DNA, 201 bp, Homo sapiens
gagcataggctcgctgatgacatggtggcccaagctatgaaatcagaaggaggcttcatctgggcctgtaaaaactatgatggtgacatgcagtcagactytgtggcccaagggtatggctctcttggcatgatgaccagcatgctagtgtgtccacatggcaagacagtagaagcagaggctgcccactggactgtaacc

SEQ ID NO: 17370 - DNA, 201 bp, Homo sapiens
caagggtatggctctcttggcatgatgaccagcatgctagtgtgtccacatggcaagacagtagaagcagaggctgcccactggactgtaacccgtcactwctgcatgtaccagaaaggccaggagatatccaccaatcccattgcttccatttttgcctggaccagagggttggccctccgagcaaagactgataacaat

SEQ ID NO: 17371 - DNA, 201 bp, Homo sapiens
tttgataactaggtctacaggttttcatttttctgtgtcacactcaaggataaaggcaaaatcgattgtgtaatttgtttagaagctagagtttatctttwttgtaagtttatagacatatatatatatacagttattgccaccgttgtgaatatgggaagggactttaaattttattttctggtagcagcctaggaattc

SEQ ID NO: 17372 - DNA, 201 bp, Homo sapiens; identical to SEQ ID NO: 17368

SEQ ID NO: 17373 - DNA, 201 bp, Homo sapiens
gaggataagtgtcttttgataactaggtctacaggttttcatttttctgtgtcacactcaaggataaaggcaaaatcgattgtgtaatttgtttagaagcyagagtttatctttattgtaagtttatagacatatatatatatacagttattgccaccgttgtgaatatgggaagggactttaaattttattttctggtag

SEQ ID NO: 17374 - DNA, 201 bp, Homo sapiens; identical to SEQ ID NO: 17369

SEQ ID NO: 17375 - DNA, 178 bp, Homo sapiens
ccgttgtgaatatgggaagggactttaaattttattttctggtagcagcctaggaattcggttagtactcatttgtattcactgtcactgtttctcatgtyctaatataaatgaccaaaatcaagagtgctcaaagggtaagtgatagccacagtattgttccctaaaatatgcataa

SEQ ID NO: 17376 - DNA, 201 bp, Homo sapiens; identical to SEQ ID NO: 17370

SEQ ID NO: 17377 - DNA, 201 bp, Homo sapiens
ggctggatggcaagcatgtggtgtttggagaggtcaccgaaggcctagatgtcttgcggcaaattgagaaacaaggagagtcagcaattaccagccagccraggtcctggaagctgacgtagagctcgtgccgacggcagacctgccggccgtgggagccgtggacgtcatctgcagggacagaaggggcaaggtcttttc

SEQ ID NO: 17378 - DNA, 183 bp, Homo sapiens
agctgacgtagagctcgtgccgacggcagacctgccggccgtgggagccgtggacgtcatctgcagggacagaaggggcaaggtcttttctggggttcctrctgtgtgcagctactatggggtaccagggtgggggatgccctgatgagcacatttgtcaaataaatgaatgacaggaaacca

SEQ ID NO: 17379 - DNA, 201 bp, Homo sapiens
aattgagaaacaaggagagtcagcaattaccagccagccgaggtcctggaagctgacgtagagctcgtgccgacggcagacctgccggccgtgggagccgyggacgtcatctgcagggacagaaggggcaaggtcttttctggggttcctactgtgtgcagctactatggggtaccagggtgggggatgccctgatgagca

SEQ ID NO: 17380 - DNA, 176 bp, Homo sapiens
ggcggaaaagcgcgcgagcaagatggccaccaccaagcgcgtcttgtacgtgggtggactggcagaggaagtggaygacaaagttcttcatgctgcgttcattccttttggagacatcacagatattcagattcctctggattatgaaacagaaaagcaccgaggatttgcttttg

SEQ ID NO: 17381 - DNA, 201 bp, Homo sapiens
ttcctgacatgtgacaagacagactggctggatggcaagcatgtggtgtttggagaggtcaccgaaggcctagatgtcttgcggcaaattgagaaacaagragagtcagcaattaccagccagccgaggtcctggaagctgacgtagagctcgtgccgacggcagacctgccggccgtgggagccgtggacgtcatctgca

SEQ ID NO: 17382 - DNA, 201 bp, Homo sapiens
ggcagcaaggacgggaagccaaagcagaaggtgatcatcgccgactgtggggagtacgtgtgaggcggcactctctctgcttccccctccgctcttgaccytgcatatccaggaaggaactgccagcctcagaggaggcagcaccgagggtgcctgtttgaagcaagcagcatttgggatatgtgcccttcctcagggtct

SEQ ID NO: 17383 - DNA, 201 bp, Homo sapiens
ctctgcaggcacagcctggactattcccaggcacagctgtgggcccaggagccagctcaggtgctcccctccaccatgggcaggctgtgcaaaaagccacyggcttttctcagcatttgctgctgggcctctcctgggactaccagtgtggctcttacgtgttttctttgctaaaataaaccctagttcttatattgctct

SEQ ID NO: 17384 - DNA, 176 bp, Homo sapiens; identical to SEQ ID NO: 17380

SEQ ID NO: 17385 - DNA, 201 bp, Homo sapiens
tccagtgactggctccaggccatgtctaatgaccagctcgattccctgtgcagttcagagggcaagtgaacccaaccaacaatgtcgtcatctaagccctraccctagccagggactcccatgctgctgttggctccatctctccacactgcctctttcttttcaactttttgcccttcctttctttaaagctattctcac

SEQ ID NO: 17386 - DNA, 201 bp, Homo sapiens
gtggctgttctgagaatcagtctgggtattgatttccttttccagtgactggctccaggccatgtctaatgaccagctcgattccctgtgcagttcagagrgcaagtgaacccaaccaacaatgtcgtcatctaagccctgaccctagccagggactcccatgctgctgttggctccatctctccacactgcctctttctt

SEQ ID NO: 17387 - DNA, 201 bp, Homo sapiens
gagggacagtggagaagttccagctgcagtcagacctcttgagagtggacatcatctcctggggctgcacgatcacagccctagaggtcaaagacaggcargggagagcctcggacgtggtgcttggcttcgccgagttggaaggatacctccaaaagcagccatactttggagcagttattgggagggtggccaaccgaa

SEQ ID NO: 17388 - DNA, 199 bp, Homo sapiens
caaagtttgcccctcttgttaccctcaggcaaatgattgatttagaaaggccccaggggctattttttgcaggaacggtcactccctaaatccaggcarggaaagggaggagtctgagccgagtcacgccccttctcctgtaaacttgggtcgcctctagcttagcgagcgctggagtttgaagagcgggcagtggctg

SEQ ID NO: 17389 - DNA, 201 bp, Homo sapiens
ggcaggcggatcacgaggtcaggagatcgagaccatcctggctaacacggtgaaaccccgtctctacataaaaaattagctgggtgtggtagcacgcaccygtagtcccagctacttgggaggctgaagcaggagaatcgcttgaacctgggaggtggaggttgcagtgagccgagatcatgccactgcactgggcaacag

SEQ ID NO: 17390 - DNA, 201 bp, Homo sapiens
gctcatagtcaactacagagcacaagccagtcaggccacaccagtcaacctgaccaaccattcttacttcaacctggcaggccaggcttccccaaatatawatgaccatgaagtcaccatagaagcggatacttatttgcctgtggatgaaaccctgattcctacaggagaagttgccccagtgcaaggcactgcattcga

SEQ ID NO: 17391 - DNA, 201 bp, Homo sapiens
cggatcacgaggtcaggagatcgagaccatcctggctaacacggtgaaaccccgtctctacataaaaaattagctgggtgtggtagcacgcacctgtagtyccagctacttgggaggctgaagcaggagaatcgcttgaacctgggaggtggaggttgcagtgagccgagatcatgccactgcactgggcaacagagcaaa

SEQ ID NO: 17392 - DNA, 201 bp, Homo sapiens
tgatgcagtcaatcagccccgcttccctcctgtgctgctgaggcctggtgaggagtatgaccacaccacctggttcaagttttctgtggcttaaggaagtrtgaagatatgatccagtccagggctaggctcagccacctgtctcctgtccagaaaaaaggtgaagattaagaagctttcagaatgattctatggattaaa

SEQ ID NO: 17393 - DNA, 201 bp, Homo sapiens
ggcggccttctccgagatgggtgtaatgcctgagattgcacaagctgtggaagagatggattggctcctcccaactgatatccaggctgaatctatcccaytgatcttaggaggaggtgatgtacttatggctgcagaaacaggaagtggcaaaactggtgcttttagtattccagttatccagatagtttatgaaactct

SEQ ID NO: 17394 - DNA, 201 bp, Homo sapiens
ccaaaaatggaaaagatcttggtctggcatttgaaataccaccacatatgaaaaaccaagccctctttcctgcctgtgttttgaagaatgctgaactgaartttaacttcggtgaagaggaatttaagtttccaccaaaagatggctttgttgctctttccaaggcaccggatggttacattgtcaaatcacagcactcag

SEQ ID NO: 17395 - DNA, 201 bp, Homo sapiens
cctttccttccatcggaaccgttctcccggggctgagtccctgcccggactccgaacgccgaagaccaggggccggaagcgcgcgccgccactgccacgcygtgtcagtcgggagggagggagcgagcaggcgaagccgcggaggacggggtgaagatggcggccttctccgagatgggtgtaatgcctgagattgcacaa

SEQ ID NO: 17396 - DNA, 201 bp, Homo sapiens
ctaataccttcctgacagactgtgaccctgataccgcgtggtgtgctccgaacacatggtgcccagaacgaaggcggcgtccagaagccctaggtcccagmggtccgctcagcggcaggcgcataaggcggggccggcgcgggcctttccttccatcggaaccgttctcccggggctgagtccctgcccggactccgaacg

SEQ ID NO: 17397 - DNA, 201 bp, Homo sapiens
actcaggtaatgcacaggtgacacaaacaaagtttctccccaatgctccgaaagctctcattgttgaaccttcccgggagttagctgaacaaactttgaayaacatcaagcagtttaagaaatacattgataatcctaaattaagggagcttctgataattggaggtgttgcagcccgggatcagctctctgttttggaaa

SEQ ID NO: 17398 - DNA, 201 bp, Homo sapiens
cgggcctttccttccatcggaaccgttctcccggggctgagtccctgcccggactccgaacgccgaagaccaggggccggaagcgcgcgccgccactgccrcgccgtgtcagtcgggagggagggagcgagcaggcgaagccgcggaggacggggtgaagatggcggccttctccgagatgggtgtaatgcctgagattgc

SEQ ID NO: 17399 - DNA, 201 bp, Homo sapiens
atggtctttgttgtcaaagcagagaagtaaaggaatggcatgggtgtagagctactaaaggattaatgaaagggaaacactactatgaagtatcctgtcaygaccaagggttatgcagggtcgggtggtctaccatgcaggcctctttggacctaggtactgacaagtttggatttggctttggtggaacaggaaagaaat

SEQ ID NO: 17400 - DNA, 201 bp, Homo sapiens; identical to SEQ ID NO: 17393

SEQ ID NO: 17401 - DNA, 201 bp, Homo sapiens; identical to SEQ ID NO: 17394

SEQ ID NO: 17402 - DNA, 201 bp, Homo sapiens; identical to SEQ ID NO: 17395

SEQ ID NO: 17403 - DNA, 201 bp, Homo sapiens; identical to SEQ ID NO: 17396

SEQ ID NO: 17404 - DNA, 201 bp, Homo sapiens; identical to SEQ ID NO: 17397

SEQ ID NO: 17405 - DNA, 201 bp, Homo sapiens; identical to SEQ ID NO: 17398

SEQ ID NO: 17406 - DNA, 201 bp, Homo sapiens; identical to SEQ ID NO: 17399

SEQ ID NO: 17407 - DNA, 201 bp, Homo sapiens; identical to SEQ ID NO: 17393

SEQ ID NO: 17408 - DNA, 201 bp, Homo sapiens; identical to SEQ ID NO: 17394

SEQ ID NO: 17409 - DNA, 201 bp, Homo sapiens; identical to SEQ ID NO: 17395

SEQ ID NO: 17410 - DNA, 182 bp, Homo sapiens
ctgtgaccctgataccgcgtggtgtgctccgaacacatggtgcccagaacgaaggcggcgtccagaagccctaggtcccagmggtccgctcagcggcaggcgcataaggcggggccggcgcgggcctttccttccatcggaaccgttctcccggggctgagtccctgcccggactccgaacg

SEQ ID NO: 17411 - DNA, 201 bp, Homo sapiens; identical to SEQ ID NO: 17397

SEQ ID NO: 17412 - DNA, 201 bp, Homo sapiens; identical to SEQ ID NO: 17398

SEQ ID NO: 17413 - DNA, 201 bp, Homo sapiens; identical to SEQ ID NO: 17399

SEQ ID NO: 17414 - DNA, 201 bp, Homo sapiens
ctgcagcagtaggagggtccgggaggccctgccgtcctgtctcctgcaccattgggtggagtctggtgatcacattattgattatgtttcttaaactttcygcgaaactaatatacctcagtattccatcatggtctgaaagtcaaacttcggcaaggcacggacgactgtgcagacacagcagcggcaagaagcgagaac

SEQ ID NO: 17415 - DNA, 201 bp, Homo sapiens
gcggttacttattttgacagatatcggcgacagggcagaccaatgatgccaggcagctgtcacacgctagtattggcttcattgtgatctgagccctgcaygctgggccttcagaattaatggccagcagtgtcagggatgagcccgtcagccagggcacaggcctggctcacagtcctgcacacctgctggcctggggag

SEQ ID NO: 17416 - DNA, 201 bp, Homo sapiens
tcaggactatctcaccctcccactcctgtttttaaaactcagaattctttcctaagagcccttcgagcaaagcgtgccgaagttagttgtcttctctgtgstggtcctttcttatgtcctcataaaagctcagatgatggtatctgtgagtatgttttgcaaattcaaaatatagtttggtaatttttttttccagttgat

SEQ ID NO: 17417 - DNA, 201 bp, Homo sapiens
agcggttacttattttgacagatatcggcgacagggcagaccaatgatgccaggcagctgtcacacgctagtattggcttcattgtgatctgagccctgcmcgctgggccttcagaattaatggccagcagtgtcagggatgagcccgtcagccagggcacaggcctggctcacagtcctgcacacctgctggcctgggga

SEQ ID NO: 17418 - DNA, 201 bp, Homo sapiens
cattgtgatctgagccctgcacgctgggccttcagaattaatggccagcagtgtcagggatgagcccgtcagccagggcacaggcctggctcacagtcctkcacacctgctggcctggggagctccagccaggcagcgagtcctgccccgcccgcagctccctcccacaccccgcctggccaagatgactgcttcaggggg

SEQ ID NO: 17419 - DNA, 201 bp, Homo sapiens
gagtgacacccagcgacaaccgactggggagtggtagaagcaactgaacggatgcgtgcgagctgaggacagggcgggaggagggggcacacatgccccakgggagcgaggagaactcttgaaatctccattttcaatcccttcgaaatcacgtatggtttccacaaagccgagtcgtgtcacgtggcaggtttacgtcaa

SEQ ID NO: 17420 - DNA, 201 bp, Homo sapiens
ggcttctacctgggtgctcaggaatgttcctcgtcacccctgccactctgtggtcggtgccctgcttcctcctccactcctggccgccttctccagcgccrcacacacagatgctcggtctcagagaggctggcacggcctggcagtctgagaaaagcgtcagttaggcacacctgcaggcccctcggtgggacagcggcg

SEQ ID NO: 17421 - DNA, 201 bp, Homo sapiens
ctcaggaatgttcctcgtcacccctgccactctgtggtcggtgccctgcttcctcctccactcctggccgccttctccagcgccgcacacacagatgctcrgtctcagagaggctggcacggcctggcagtctgagaaaagcgtcagttaggcacacctgcaggcccctcggtgggacagcggcggccttggagttaggag

SEQ ID NO: 17422 - DNA, 201 bp, Homo sapiens
cggaggacaggactcgggttgtgtcacccatcatcgatgtcattaatatggacaactttcagtatgtgggggcatctgctgacttgaagggcggttttgaytggaacttggtattcaagtgggattacatgacgcctgagcagagaaggtcccggcaggggaacccagtcgcccctataaaaacccccatgattgctggtg

SEQ ID NO: 17423 - DNA, 201 bp, Homo sapiens
catgctcctccctgtgtcttgtatgaaaggggtcctttgcggtgagctatgtttacatgacacagtgtgccaaagtgacttactgcggttgcgttagtttytagtcatcaggactatctcaccctcccactcctgtttttaaaactcagaattctttcctaagagcccttcgagcaaagcgtgccgaagttagttgtcttc

SEQ ID NO: 17424 - DNA, 201 bp, Homo sapiens
ttacgcccgcaacaagttcaaccaggtggagagtgataagcttcgaatggacagagccatccctgacacccggcatgaccagtgtcagcggaagcagtggygggtggatctgccggccaccagcgtggtgatcacgtttcacaatgaagccaggtcggccctactcaggaccgtggtcagcgtgcttaagaaaagcccgcc

SEQ ID NO: 17425 - DNA, 201 bp, Homo sapiens
gaatgtacggtcagttccctatggtttctgtagatcatcgtcatcttgtatattccccacaaagccgttcgcagcttccgggagaaggggccagagcccgktggggccagtttctcacagagggaggaggtggcctttgtcccctggagcccgatcagccagttggtgctactgctgtggccagctggggggcttcctcca

SEQ ID NO: 17426 - DNA, 201 bp, Homo sapiens
gctcctccctgtgtcttgtatgaaaggggtcctttgcggtgagctatgtttacatgacacagtgtgccaaagtgacttactgcggttgcgttagtttctartcatcaggactatctcaccctcccactcctgtttttaaaactcagaattctttcctaagagcccttcgagcaaagcgtgccgaagttagttgtcttctct

SEQ ID NO: 17427 - DNA, 201 bp, Homo sapiens
gcctcgacactttgggacactttgctgatggtgtggttggagtttatgaatgtcacaatgctgggggaaaccaggaatgggccttgacgaaggagaagtcrgtgaagcacatggatttgtgccttactgtggtggaccgggcaccgggctctcttataaagctgcagggctgccgagaaaatgacagcagacagaaatggg

SEQ ID NO: 17428 - DNA, 201 bp, Homo sapiens
ggaggtgtgtggcccggccctttcgcagcagtggaagttcacgctcaacctgcagcagtaggagggtccgggaggccctgccgtcctgtctcctgcaccaytgggtggagtctggtgatcacattattgattatgtttcttaaactttccgcgaaactaatatacctcagtattccatcatggtctgaaagtcaaacttcg

SEQ ID NO: 17429 - DNA, 201 bp, Homo sapiens
agtcgcacggccaagagcgggggcctaagcgtggaggtgtgtggcccggccctttcgcagcagtggaagttcacgctcaacctgcagcagtaggagggtcygggaggccctgccgtcctgtctcctgcaccattgggtggagtctggtgatcacattattgattatgtttcttaaactttccgcgaaactaatatacctca

SEQ ID NO: 17430 - DNA, 201 bp, Homo sapiens
gaaatgggaacagatcgagggcaactccaagctgaggcacgtgggcagcaacctgtgcctggacagtcgcacggccaagagcgggggcctaagcgtggagrtgtgtggcccggccctttcgcagcagtggaagttcacgctcaacctgcagcagtaggagggtccgggaggccctgccgtcctgtctcctgcaccattggg

SEQ ID NO: 17431 - DNA, 201 bp, Homo sapiens
ggcgggtggatctgccggccaccagcgtggtgatcacgtttcacaatgaagccaggtcggccctactcaggaccgtggtcagcgtgcttaagaaaagcccrccccatctcataaaagaaatcatcttggtggatgactacagcaatgatcctgaggacggggctctcttggggaaaattgagaaagtgcgagttcttagaa

SEQ ID NO: 17432 - DNA, 201 bp, Homo sapiens
tcgatgtcattaatatggacaactttcagtatgtgggggcatctgctgacttgaagggcggttttgattggaacttggtattcaagtgggattacatgacrcctgagcagagaaggtcccggcaggggaacccagtcgcccctataaaaacccccatgattgctggtgggctgtttgtgatggataagttctattttgaag

SEQ ID NO: 17433 - DNA, 201 bp, Homo sapiens
tcacagagggaggaggtggcctttgtcccctggagcccgatcagccagttggtgctactgctgtggccagctggggggcttcctccagaccaccggcctcrgccccggcatccctgttgggcgtcagcctgagagtccctactgtgcgtcagaatccaccttgcgtgctgtgcgtatctgtgaacctggagcggttactta

SEQ ID NO: 17434 - DNA, 110 bp, Homo sapiens
gtctgtcctggtgtgtgagggctgggtggggtgggtgtggggactgggattggggtcagccttctgcagctcctgctcagtggctgtttcttatcaccttytgcagatgc

SEQ ID NO: 17435 - DNA, 101 bp, Homo sapiens
ggtgtgtgagggctgggtggggtgggtgtggggactgggattggggtcagccttctgcagctcctgctcagtggctgtttcttatcaccttttgcagatgy

SEQ ID NO: 17436 - DNA, 201 bp, Homo sapiens
tgaatctggctcgttttaaaatcacgttttctgacgaatcctttgccccttcacctttaccccgcccgcacccctaggccctctcagccttcctatcatcycacgtgtctacccagacccttgtgcggcccatgccccgggggcggcgtcctgtccctgagctgggaggcggctttggatggtccgggcgtcaagagcagg

SEQ ID NO: 17437 - DNA, 201 bp, Homo sapiens
ctgtgacctgcgagctgctactactgtaaggagggaaatggatgaatctggctcgttttaaaatcacgttttctgacgaatcctttgccccttcacctttrccccgcccgcacccctaggccctctcagccttcctatcatcccacgtgtctacccagacccttgtgcggcccatgccccgggggcggcgtcctgtccctg

SEQ ID NO: 17438 - DNA, 201 bp, Homo sapiens
tgagccagcaataccgctgccccctggcgacagggcagaccaatgatgccaggcagctgtcacacgctagtattggcttcattgtgatctgagccctgcaygctgggccttcagaattaatggccagcagtgtcagggatgagcccgtcagccagggcacaggcctggctcacagtcctgcacacctgctggcctggggag

SEQ ID NO: 17439 - DNA, 201 bp, Homo sapiens; identical to SEQ ID NO: 17416

SEQ ID NO: 17440 - DNA, 201 bp, Homo sapiens
gtgagccagcaataccgctgccccctggcgacagggcagaccaatgatgccaggcagctgtcacacgctagtattggcttcattgtgatctgagccctgcmcgctgggccttcagaattaatggccagcagtgtcagggatgagcccgtcagccagggcacaggcctggctcacagtcctgcacacctgctggcctgggga

SEQ ID NO: 17441 - DNA, 201 bp, Homo sapiens
tgaacctggagcggttacttattttgacagatatcactttgggtctttttacattaaatttcttttctctaaggaatataagacataccccatagctctgygtgagccagcaataccgctgccccctggcgacagggcagaccaatgatgccaggcagctgtcacacgctagtattggcttcattgtgatctgagccctgc

SEQ ID NO: 17442 - DNA, 201 bp, Homo sapiens; identical to SEQ ID NO: 17418

SEQ ID NO: 17443 - DNA, 201 bp, Homo sapiens; identical to SEQ ID NO: 17419

SEQ ID NO: 17444 - DNA, 201 bp, Homo sapiens; identical to SEQ ID NO: 17420

SEQ ID NO: 17445 - DNA, 201 bp, Homo sapiens; identical to SEQ ID NO: 17421

SEQ ID NO: 17446 - DNA, 201 bp, Homo sapiens; identical to SEQ ID NO: 17422

SEQ ID NO: 17447 - DNA, 201 bp, Homo sapiens
cgtagcccccagcacccaggttcttctgtcagaccctgtgacctgcgagctgctactactgtaaggagggaaatggatgaatctggctcgttttaaaatcrcgttttctgacgaatcctttgccccttcacctttaccccgcccgcacccctaggccctctcagccttcctatcatcccacgtgtctacccagacccttgt

SEQ ID NO: 17448 - DNA, 201 bp, Homo sapiens
ggcgtcaagagcaggggtgggccggggaggggtcctttgcggtgagctatgtttacatgacacagtgtgccaaagtgacttactgcggttgcgttagtttytagtcatcaggactatctcaccctcccactcctgtttttaaaactcagaattctttcctaagagcccttcgagcaaagcgtgccgaagttagttgtcttc

SEQ ID NO: 17449 - DNA, 201 bp, Homo sapiens; identical to SEQ ID NO: 17424

SEQ ID NO: 17450 - DNA, 201 bp, Homo sapiens; identical to SEQ ID NO: 17425

SEQ ID NO: 17451 - DNA, 201 bp, Homo sapiens
gtcaagagcaggggtgggccggggaggggtcctttgcggtgagctatgtttacatgacacagtgtgccaaagtgacttactgcggttgcgttagtttctartcatcaggactatctcaccctcccactcctgtttttaaaactcagaattctttcctaagagcccttcgagcaaagcgtgccgaagttagttgtcttctct

SEQ ID NO: 17452 - DNA, 201 bp, Homo sapiens
acgttttctgacgaatcctttgccccttcacctttaccccgcccgcacccctaggccctctcagccttcctatcatcccacgtgtctacccagacccttgygcggcccatgccccgggggcggcgtcctgtccctgagctgggaggcggctttggatggtccgggcgtcaagagcaggggtgggccggggaggggtccttt

SEQ ID NO: 17453 - DNA, 201 bp, Homo sapiens; identical to SEQ ID NO: 17427

SEQ ID NO: 17454 - DNA, 201 bp, Homo sapiens
gttaggagccaccctgggaggttgtgccggtgccatgctcctccctgtgtcttgtatgaaaggggccactgtgtgtcttcctccccggcgggagccccacrtgtgtgcactgtaggacagcggccccgaggtggaagcctggctggagggctgccctataggtcttctcttcccgcctcccctgccatgcaaccagatgtg

SEQ ID NO: 17455 - DNA, 201 bp, Homo sapiens; identical to SEQ ID NO: 17431

SEQ ID NO: 17456 - DNA, 201 bp, Homo sapiens; identical to SEQ ID NO: 17432

SEQ ID NO: 17457 - DNA, 201 bp, Homo sapiens; identical to SEQ ID NO: 17433

SEQ ID NO: 17458 - DNA, 201 bp, Homo sapiens
ggagttaggagccaccctgggaggttgtgccggtgccatgctcctccctgtgtcttgtatgaaaggggccactgtgtgtcttcctccccggcgggagcccyacatgtgtgcactgtaggacagcggccccgaggtggaagcctggctggagggctgccctataggtcttctcttcccgcctcccctgccatgcaaccagat

SEQ ID NO: 17459 - DNA, 201 bp, Homo sapiens
tgtgcactgtaggacagcggccccgaggtggaagcctggctggagggctgccctataggtcttctcttcccgcctcccctgccatgcaaccagatgtgttstgagtgggcagcgtgcccccacgctggagtaactccgcacgcttctgtctttcacggtgggcgctcggggggagcctgaggaaaacccccttaggtacct

SEQ ID NO: 17460 - DNA, 201 bp, Homo sapiens
atcctttgccccttcacctttaccccgcccgcacccctaggccctctcagccttcctatcatcccacgtgtctacccagacccttgtgcggcccatgcccygggggcggcgtcctgtccctgagctgggaggcggctttggatggtccgggcgtcaagagcaggggtgggccggggaggggtcctttgcggtgagctatgt

SEQ ID NO: 17461 - DNA, 201 bp, Homo sapiens; identical to SEQ ID NO: 17436

SEQ ID NO: 17462 - DNA, 201 bp, Homo sapiens; identical to SEQ ID NO: 17414

SEQ ID NO: 17463 - DNA, 201 bp, Homo sapiens; identical to SEQ ID NO: 17437

SEQ ID NO: 17464 - DNA, 201 bp, Homo sapiens; identical to SEQ ID NO: 17438

SEQ ID NO: 17465 - DNA, 201 bp, Homo sapiens; identical to SEQ ID NO: 17416

SEQ ID NO: 17466 - DNA, 201 bp, Homo sapiens; identical to SEQ ID NO: 17440

SEQ ID NO: 17467 - DNA, 201 bp, Homo sapiens; identical to SEQ ID NO: 17441

SEQ ID NO: 17468 - DNA, 201 bp, Homo sapiens; identical to SEQ ID NO: 17418

SEQ ID NO: 17469 - DNA, 201 bp, Homo sapiens; identical to SEQ ID NO: 17419

SEQ ID NO: 17470 - DNA, 201 bp, Homo sapiens; identical to SEQ ID NO: 17420

SEQ ID NO: 17471 - DNA, 201 bp, Homo sapiens; identical to SEQ ID NO: 17421

SEQ ID NO: 17472 - DNA, 201 bp, Homo sapiens; identical to SEQ ID NO: 17422

SEQ ID NO: 17473 - DNA, 201 bp, Homo sapiens; identical to SEQ ID NO: 17447

SEQ ID NO: 17474 - DNA, 201 bp, Homo sapiens; identical to SEQ ID NO: 17448

SEQ ID NO: 17475 - DNA, 201 bp, Homo sapiens; identical to SEQ ID NO: 17424

SEQ ID NO: 17476 - DNA, 201 bp, Homo sapiens; identical to SEQ ID NO: 17425

SEQ ID NO: 17477 - DNA, 201 bp, Homo sapiens; identical to SEQ ID NO: 17451

SEQ ID NO: 17478 - DNA, 201 bp, Homo sapiens; identical to SEQ ID NO: 17452

SEQ ID NO: 17479 - DNA, 201 bp, Homo sapiens; identical to SEQ ID NO: 17427

SEQ ID NO: 17480 - DNA, 201 bp, Homo sapiens; identical to SEQ ID NO: 17428

SEQ ID NO: 17481 - DNA, 201 bp, Homo sapiens; identical to SEQ ID NO: 17429

SEQ ID NO: 17482 - DNA, 201 bp, Homo sapiens; identical to SEQ ID NO: 17430

SEQ ID NO: 17483 - DNA, 201 bp, Homo sapiens; identical to SEQ ID NO: 17454

SEQ ID NO: 17484 - DNA, 201 bp, Homo sapiens; identical to SEQ ID NO: 17431

SEQ ID NO: 17485 - DNA, 201 bp, Homo sapiens; identical to SEQ ID NO: 17432

SEQ ID NO: 17486 - DNA, 201 bp, Homo sapiens; identical to SEQ ID NO: 17433

SEQ ID NO: 17487 - DNA, 201 bp, Homo sapiens; identical to SEQ ID NO: 17458

SEQ ID NO: 17488 - DNA, 201 bp, Homo sapiens; identical to SEQ ID NO: 17459

SEQ ID NO: 17489 - DNA, 110 bp, Homo sapiens; identical to SEQ ID NO: 17434

SEQ ID NO: 17490 - DNA, 101 bp, Homo sapiens; identical to SEQ ID NO: 17435

SEQ ID NO: 17491 - DNA, 201 bp, Homo sapiens; identical to SEQ ID NO: 17460

SEQ ID NO: 17492 - DNA, 201 bp, Homo sapiens; identical to SEQ ID NO: 17436

SEQ ID NO: 17493 - DNA, 201 bp, Homo sapiens; identical to SEQ ID NO: 17414

SEQ ID NO: 17494 - DNA, 201 bp, Homo sapiens; identical to SEQ ID NO: 17437

SEQ ID NO: 17495 - DNA, 201 bp, Homo sapiens; identical to SEQ ID NO: 17438

SEQ ID NO: 17496 - DNA, 201 bp, Homo sapiens; identical to SEQ ID NO: 17416

SEQ ID NO: 17497 - DNA, 201 bp, Homo sapiens; identical to SEQ ID NO: 17440

SEQ ID NO: 17498 - DNA, 201 bp, Homo sapiens; identical to SEQ ID NO: 17441

SEQ ID NO: 17499 - DNA, 201 bp, Homo sapiens; identical to SEQ ID NO: 17418

SEQ ID NO: 17500 - DNA, 201 bp, Homo sapiens; identical to SEQ ID NO: 17419

SEQ ID NO: 17501 - DNA, 201 bp, Homo sapiens; identical to SEQ ID NO: 17420

SEQ ID NO: 17502 - DNA, 201 bp, Homo sapiens; identical to SEQ ID NO: 17421

SEQ ID NO: 17503 - DNA, 201 bp, Homo sapiens; identical to SEQ ID NO: 17422

SEQ ID NO: 17504 - DNA, 201 bp, Homo sapiens; identical to SEQ ID NO: 17447

SEQ ID NO: 17505 - DNA, 201 bp, Homo sapiens; identical to SEQ ID NO: 17448

SEQ ID NO: 17506 - DNA, 201 bp, Homo sapiens; identical to SEQ ID NO: 17424

SEQ ID NO: 17507 - DNA, 201 bp, Homo sapiens; identical to SEQ ID NO: 17425

SEQ ID NO: 17508 - DNA, 201 bp, Homo sapiens; identical to SEQ ID NO: 17451

SEQ ID NO: 17509 - DNA, 201 bp, Homo sapiens; identical to SEQ ID NO: 17452

SEQ ID NO: 17510 - DNA, 201 bp, Homo sapiens; identical to SEQ ID NO: 17427

SEQ ID NO: 17511 - DNA, 201 bp, Homo sapiens; identical to SEQ ID NO: 17428

SEQ ID NO: 17512 - DNA, 201 bp, Homo sapiens; identical to SEQ ID NO: 17429

SEQ ID NO: 17513 - DNA, 201 bp, Homo sapiens; identical to SEQ ID NO: 17430

SEQ ID NO: 17514 - DNA, 201 bp, Homo sapiens; identical to SEQ ID NO: 17454

SEQ ID NO: 17515 - DNA, 201 bp, Homo sapiens; identical to SEQ ID NO: 17431

SEQ ID NO: 17516 - DNA, 201 bp, Homo sapiens; identical to SEQ ID NO: 17432

SEQ ID NO: 17517 - DNA, 201 bp, Homo sapiens; identical to SEQ ID NO: 17433

SEQ ID NO: 17518 - DNA, 201 bp, Homo sapiens; identical to SEQ ID NO: 17458

SEQ ID NO: 17519 - DNA, 201 bp, Homo sapiens; identical to SEQ ID NO: 17459

SEQ ID NO: 17520 - DNA, 110 bp, Homo sapiens; identical to SEQ ID NO: 17434

SEQ ID NO: 17521 - DNA, 101 bp, Homo sapiens; identical to SEQ ID NO: 17435

SEQ ID NO: 17522 - DNA, 201 bp, Homo sapiens; identical to SEQ ID NO: 17460

SEQ ID NO: 17523 - DNA, 201 bp, Homo sapiens
aatactacctggaggtttgtcctctccatttttctctttctcctcctggcctggcctgaatattatactactctaaatagcatatttcatccaagtgcaayaatgtaagctgaatcttttttggacttctgctggcctgttttatttcttttatataaatgtgatttctcagaaattgatattaaacactatcttatcttc

SEQ ID NO: 17524 - DNA, 201 bp, Homo sapiens
gtttaggccgcaggagagtttggaatccggaataaatactacctggaggtttgtcctctccatttttctctttctcctcctggcctggcctgaatattatrctactctaaatagcatatttcatccaagtgcaataatgtaagctgaatcttttttggacttctgctggcctgttttatttcttttatataaatgtgattt

SEQ ID NO: 17525 - DNA, 201 bp, Homo sapiens
caacgttctgactacttgaatacatttgagttcatggataaacttggagaaaacttgaagatcaaactagctcaggccaaactttaagttcatacctgagytaagaaggataattgtcttttggtaactaggtctacaggtttacatttttctgtgttacactcaaggataaaggcaaaatcaattttgtaatttgtttag

SEQ ID NO: 17526 - DNA, 201 bp, Homo sapiens
ctaagaaggataattgtcttttggtaactaggtctacaggtttacatttttctgtgttacactcaaggataaaggcaaaatcaattttgtaatttgtttaraagccagagtttatcttttctataagtttacagcctttttcttatatatacagttattgccacctttgtgaacatggcaagggacttttttacaattttt

SEQ ID NO: 17527 - DNA, 201 bp, Homo sapiens
tgttgttcctgggcctggaaaagtagagataacctacacaccaagtgacggaacccaaaaggtgacatacctggtacataactttgaagaaggtggtggtrttgccatggggatgtataatcaagataagtcaattgaagattttgcacacagttccttccaaatggctctgtctaagggttggcctttgtatctgagcac

SEQ ID NO: 17528 - DNA, 201 bp, Homo sapiens
ggaaaagtagagataacctacacaccaagtgacggaacccaaaaggtgacatacctggtacataactttgaagaaggtggtggtgttgccatggggatgtrtaatcaagataagtcaattgaagattttgcacacagttccttccaaatggctctgtctaagggttggcctttgtatctgagcaccaaaaacactattctg

SEQ ID NO: 17529 - DNA, 201 bp, Homo sapiens
gtttacccaatgtgcaacgttctgactacttgaatacatttgagttcatggataaacttggagaaaacttgaagatcaaactagctcaggccaaactttamgttcatacctgagctaagaaggataattgtcttttggtaactaggtctacaggtttacatttttctgtgttacactcaaggataaaggcaaaatcaattt

SEQ ID NO: 17530 - DNA, 201 bp, Homo sapiens
ctaggaattcggttagtactcatttgtattcactgtcactttttctcatgttctaattataaatgaccaaaatcaagattgctcaaaagggtaaatgatarccacagtattgctccctaaaatatgcataaagtagaaattcactgccttcccctcctgtccatgaccttgggcacagggaagttctggtgtcatagatat

SEQ ID NO: 17531 - DNA, 201 bp, Homo sapiens
tggtgctctgggcactgcaggggtgctggctggactgcggttaccgcagcgcggaaccccctaggcgaccccgcgctggccgggagcactctttcttcagmcaaagagtctacttcagaagcggaggcactgggagtccggtttgggattgccaggctgtggttgtgagtctgagcttgtgagcggctgtggcgccccaac

SEQ ID NO: 17532 - DNA, 201 bp, Homo sapiens; identical to SEQ ID NO: 17523

SEQ ID NO: 17533 - DNA, 201 bp, Homo sapiens; identical to SEQ ID NO: 17524

SEQ ID NO: 17534 - DNA, 201 bp, Homo sapiens; identical to SEQ ID NO: 17525

SEQ ID NO: 17535 - DNA, 201 bp, Homo sapiens; identical to SEQ ID NO: 17526

SEQ ID NO: 17536 - DNA, 201 bp, Homo sapiens; identical to SEQ ID NO: 17527

SEQ ID NO: 17537 - DNA, 201 bp, Homo sapiens; identical to SEQ ID NO: 17528

SEQ ID NO: 17538 - DNA, 201 bp, Homo sapiens; identical to SEQ ID NO: 17529

SEQ ID NO: 17539 - DNA, 201 bp, Homo sapiens; identical to SEQ ID NO: 17530

SEQ ID NO: 17540 - DNA, 201 bp, Homo sapiens; identical to SEQ ID NO: 17523

SEQ ID NO: 17541 - DNA, 201 bp, Homo sapiens; identical to SEQ ID NO: 17524

SEQ ID NO: 17542 - DNA, 201 bp, Homo sapiens; identical to SEQ ID NO: 17525

SEQ ID NO: 17543 - DNA, 201 bp, Homo sapiens; identical to SEQ ID NO: 17526

SEQ ID NO: 17544 - DNA, 201 bp, Homo sapiens; identical to SEQ ID NO: 17527

SEQ ID NO: 17545 - DNA, 201 bp, Homo sapiens; identical to SEQ ID NO: 17528

SEQ ID NO: 17546 - DNA, 201 bp, Homo sapiens; identical to SEQ ID NO: 17529

SEQ ID NO: 17547 - DNA, 201 bp, Homo sapiens; identical to SEQ ID NO: 17530

SEQ ID NO: 17548 - DNA, 201 bp, Homo sapiens; identical to SEQ ID NO: 17531

SEQ ID NO: 17549 - DNA, 201 bp, Homo sapiens; identical to SEQ ID NO: 17525

SEQ ID NO: 17550 - DNA, 201 bp, Homo sapiens; identical to SEQ ID NO: 17526

SEQ ID NO: 17551 - DNA, 201 bp, Homo sapiens; identical to SEQ ID NO: 17527

SEQ ID NO: 17552 - DNA, 201 bp, Homo sapiens; identical to SEQ ID NO: 17528

SEQ ID NO: 17553 - DNA, 201 bp, Homo sapiens; identical to SEQ ID NO: 17529

SEQ ID NO: 17554 - DNA, 181 bp, Homo sapiens
gtgaacatggcaagggacttttttacaatttttattttattttctagtaccagcctaggaattcggttagtactcatttgtattcactgtcacttttttarccacagtattgctccctaaaatatgcataaagtagaaattcactgccttcccctcctgtccatgaccttgggcacaggga

SEQ ID NO: 17555 - DNA, 201 bp, Homo sapiens
tgagtgggtgtctctctcaaaggccaggattgtagaatatgagaaacagatggagaagatgaagaacttaattccatttgatcagatgaccactgaggacytgaacgaagctttcccagaaaccaaattagacgagaaaaagtatccttattggcctcaccaactaatcgagaatttataaaattgagtccaggaggaagt

SEQ ID NO: 17556 - DNA, 201 bp, Homo sapiens
aagagattttggaagaaaaacaaaaactataatcaacagaaaaactctgaaagaaattttaagatgaacaaccttcaagaagttaaaggcggctgcagtgsaccgtgggcagccagggtcggtgaagaatcccaacatggctgggcgaaaacttgctctaaaaaccactgactgagtagcttttgcagagatcatacccca

SEQ ID NO: 17557 - DNA, 201 bp, Homo sapiens
acagaaaaactctgaaagaaattttaagatgaacaaccttcaagaagttaaaggcggctgcagtggaccgtgggcagccagggtcggtgaagaatcccaaratggctgggcgaaaacttgctctaaaaaccactgactgagtagcttttgcagagatcataccccagaaccaaaaggccattgctagtttcctgaaatcct

SEQ ID NO: 17558 - DNA, 201 bp, Homo sapiens
ccagaaccaaaaggccattgctagtttcctgaaatcctggaatgagaccctcacctccaggttggctgctttacctgagaatccaccggttatcgactggkcttactacaaggccaacgtggccaaggccggtttggtggatgactttaagaagtttaatgccctgaaggttcccgtgccagaggataaatatactgcgca

SEQ ID NO: 17559 - DNA, 201 bp, Homo sapiens
gggcatggtcctgctgcttcacccctcccctagcctgccgtgtggcactgcccacaggctggggacaagcagcccttgtgttgagtcaggttggccctgtytagggtggaacagaaggacagatggacccaggagggagggcagctgagtaactgggtaacttattggggctgggcatgcactggggggctggaggagctg

SEQ ID NO: 17560 - DNA, 201 bp, Homo sapiens; identical to SEQ ID NO: 17559

SEQ ID NO: 17561 - DNA, 201 bp, Homo sapiens
aaggtggcattggtgaggctgtgtccagtgcagtagtgggcgagcctggcatcactgtcacccacctggcagttaaccgggtaccaagaagtgggaagccrgctgagctgctgaagatgtttggtatcgacagggatgccattgcacaagctgtgaggggcctcatcaccaaggcctagggcgggtatgaagtgtggggcg

SEQ ID NO: 17562 - DNA, 201 bp, Homo sapiens
ctggctccctgggccagggcctcggggccgcttgtgggatggcctacaccggcaaatacttcgacaaggccagctaccgagtctattgcttgctgggagayggggagctgtcagagggctctgtatgggaggccatggccttcgccagcatctataagctggacaaccttgtggccattctagacatcaatcgcctgggcc

SEQ ID NO: 17563 - DNA, 201 bp, Homo sapiens
cattggtgaggctgtgtccagtgcagtagtgggcgagcctggcatcactgtcacccacctggcagttaaccgggtaccaagaagtgggaagccggctgagstgctgaagatgtttggtatcgacagggatgccattgcacaagctgtgaggggcctcatcaccaaggcctagggcgggtatgaagtgtggggcgggggtct

SEQ ID NO: 17564 - DNA, 201 bp, Homo sapiens
tatgaaggtggcattggtgaggctgtgtccagtgcagtagtgggcgagcctggcatcactgtcacccacctggcagttaaccgggtaccaagaagtgggargccggctgagctgctgaagatgtttggtatcgacagggatgccattgcacaagctgtgaggggcctcatcaccaaggcctagggcgggtatgaagtgtgg

SEQ ID NO: 17565 - DNA, 201 bp, Homo sapiens
gtgccacccgcaacaggacggtgcccttctgcagcacttttgcagccttcttcacgcgggcctttgaccagattcgcatggccgccatctccgagagcaayatcaacctctgcggctcccactgcggcgtttccatcggggaagacgggccctcccagatggccctagaagatctggctatgtttcggtcagtccccacat

SEQ ID NO: 17566 - DNA, 201 bp, Homo sapiens
gctctgtatgggaggccatggccttcgccagcatctataagctggacaaccttgtggccattctagacatcaatcgcctgggccagagtgacccggccccrctgcagcaccagatggacatctaccagaagcggtgcgaggccttcggttggcatgccatcatcgtggatggacacagcgtggaggagctgtgcaaggcct

SEQ ID NO: 17567 - DNA, 191 bp, Homo sapiens
cggctgagctgctgaagatgtttggtatcgacagggatgccattgcacaagctgtgaggggcctcatcaccaaggcctagggcgggtatgaagtgtggggygggggtctatacattcctgagattctgggaaaggtgctcaaagatgtactgagaggaggggtaaatatatgttttgagaaaaatgaattg

SEQ ID NO: 17568 - DNA, 201 bp, Homo sapiens
tgaacctgaggaagatcagctccgacttggacgggcacccggtcccgaaacaagctttcaccgacgtggccactggctccctgggccagggcctcggggcygcttgtgggatggcctacaccggcaaatacttcgacaaggccagctaccgagtctattgcttgctgggagacggggagctgtcagagggctctgtatggg

SEQ ID NO: 17569 - DNA, 201 bp, Homo sapiens
taaccgggtaccaagaagtgggaagccggctgagctgctgaagatgtttggtatcgacagggatgccattgcacaagctgtgaggggcctcatcaccaagkcctagggcgggtatgaagtgtggggcgggggtctatacattcctgagattctgggaaaggtgctcaaagatgtactgagaggaggggtaaatatatgttt

SEQ ID NO: 17570 - DNA, 201 bp, Homo sapiens
aaggtggcattggtgaggctgtgtccagtgcagtagtgggcgagcctggcatcactgtcacccacctggcagttaaccgggtaccaagaagtgggaagccrgctgagctgctgaagatgtttggtatcgacagggatgccattgcacaagctgtgaggggcctcatcaccaaggcctagggcggccagtgcaggttctggg

SEQ ID NO: 17571 - DNA, 201 bp, Homo sapiens; identical to SEQ ID NO: 17562

SEQ ID NO: 17572 - DNA, 201 bp, Homo sapiens
cattggtgaggctgtgtccagtgcagtagtgggcgagcctggcatcactgtcacccacctggcagttaaccgggtaccaagaagtgggaagccggctgagstgctgaagatgtttggtatcgacagggatgccattgcacaagctgtgaggggcctcatcaccaaggcctagggcggccagtgcaggttctggggaagaag

SEQ ID NO: 17573 - DNA, 201 bp, Homo sapiens
tatgaaggtggcattggtgaggctgtgtccagtgcagtagtgggcgagcctggcatcactgtcacccacctggcagttaaccgggtaccaagaagtgggargccggctgagctgctgaagatgtttggtatcgacagggatgccattgcacaagctgtgaggggcctcatcaccaaggcctagggcggccagtgcaggttc

SEQ ID NO: 17574 - DNA, 201 bp, Homo sapiens; identical to SEQ ID NO: 17565

SEQ ID NO: 17575 - DNA, 201 bp, Homo sapiens; identical to SEQ ID NO: 17566

SEQ ID NO: 17576 - DNA, 156 bp, Homo sapiens
tagtgctgggggaggagggctgggtgccccggccactggtggagtccccaggaaatcctcagagctgttgcgaggatgagacacatttgtggacacgtccmcctgtcctcctgaccgtctggagagaataaacctgtcaaagccaaggtcaggcaa

SEQ ID NO: 17577 - DNA, 201 bp, Homo sapiens
gctgagctgctgaagatgtttggtatcgacagggatgccattgcacaagctgtgaggggcctcatcaccaaggcctagggcggccagtgcaggttctgggraagaagcgtggagggtgcgctagggaggctggtgtccttggtcctgggccaggacctgggtgtcccaagtccccttggaatcacctgcaactgccctcaa

SEQ ID NO: 17578 - DNA, 201 bp, Homo sapiens
gatttctgggtcttgccaatggggcctgggactccatgtgacaactggcccaggagcttctgatgtcacacagaattctgcagtcccaagctccagccccracctgctctgctgttcctaggtgactgccctcacactgctgaccacagtggatttctccccctgctgctcgggctcagctggggtcagccctgcttataa

SEQ ID NO: 17579 - DNA, 201 bp, Homo sapiens; identical to SEQ ID NO: 17568

SEQ ID NO: 17580 - DNA, 195 bp, Homo sapiens
ggtcaactgtgcaaaaccttatactggccaagaacaaactagtgctgggggaggagggctgggtgccccggccactggtggagtccccaggaaatcctcaragctgttgcgaggatgagacacatttgtggacacgtccacctgtcctcctgaccgtctggagagaataaacctgtcaaagccaaggtcaggcaa

SEQ ID NO: 17581 - DNA, 201 bp, Homo sapiens
taaccgggtaccaagaagtgggaagccggctgagctgctgaagatgtttggtatcgacagggatgccattgcacaagctgtgaggggcctcatcaccaagkcctagggcggccagtgcaggttctggggaagaagcgtggagggtgcgctagggaggctggtgtccttggtcctgggccaggacctgggtgtcccaagtcc

SEQ ID NO: 17582 - DNA, 201 bp, Homo sapiens
tcccaagtgtggaactgtccccctcaacttgttaaaatgcagatttctgggtcttgccaatggggcctgggactccatgtgacaactggcccaggagcttytgatgtcacacagaattctgcagtcccaagctccagccccgacctgctctgctgttcctaggtgactgccctcacactgctgaccacagtggatttctcc

SEQ ID NO: 17583 - DNA, 201 bp, Homo sapiens
aggacatgcggaaggagctccagctctccctgtcagtcaccttgctgcttgtctgtggcttcctctaccagttcaccctgaagtccagctgcctcttctgyttgccttctttcaagtcccaccaggggctggaagccctcctgagccacagacgtggcattgtgtttctagagacctcagagagaatggagccaccccatt

SEQ ID NO: 17584 - DNA, 201 bp, Homo sapiens
gtctgaacatatccttcttacacccccaaagattttaccccatctcctatcgagagtggaggcgctactatgaagtgtgggatacagagccaagcttcaaygtctcttatgccctgcatttgtggaaccacatgaaccaggaggggcgggctgtgattagaggaagcaacacactggtggaaaatctctatcgcaagcact

SEQ ID NO: 17585 - DNA, 201 bp, Homo sapiens
caggcttctcggtactctagtaatggaatatttgggttcctcccccaccacccctttttgtgggaatgcatggaaaactttgttgaacactataattcagmcatttggggcaaccaaggccctgagttgatgacaaggatgttgagggtatggtgtaaacttgaagacttccaggaggtgagcgacctcaggtgtctgaac

SEQ ID NO: 17586 - DNA, 143 bp, Homo sapiens
tggaaaatctctatcgcaagcactgtcccaggacttacagggacctgattaaaggcccagaggggtcagtgactggggagctgggtccaggtaacaaataragctaacactcgtttgctgctgctgcagtgtggaaatggaca

SEQ ID NO: 17587 - DNA, 112 bp, Homo sapiens
tggttaactgcrtttgcagctagaagttaggctctgattcactgttttgtattttctaaaagggttatatgtaatttgaaagatagacctgccaagacgtgagatctgtgtt

SEQ ID NO: 17588 - DNA, 201 bp, Homo sapiens
gtggtgtagatttagtcattgaagcagtatttgaggaaatgagcctgaagaagcaggtctttgctgaactctcagctgtgtgcaaaccagaagcatttttrtgcactaatacttcagccctggatgttgatgagattgcttcttccactgatcgtcctcacttggtcattggcacccacttcttttcgccagctcatgtca

SEQ ID NO: 17589 - DNA, 201 bp, Homo sapiens
ctctgtgaattaggacgatttggccagaagacaggtaagggttggtatcaatatgacaagccattgggtaggattcacaaacctgatccctggctttccamattcctatcacggtatagaaaaacccatcacattgaaccacgtaccattagccaggatgagatccttgaacgctgcttatattcacttatcaatgaagca

SEQ ID NO: 17590 - DNA, 201 bp, Homo sapiens
ggacgatttggccagaagacaggtaagggttggtatcaatatgacaagccattgggtaggattcacaaacctgatccctggctttccaaattcctatcacrgtatagaaaaacccatcacattgaaccacgtaccattagccaggatgagatccttgaacgctgcttatattcacttatcaatgaagcattccgtatcttg

SEQ ID NO: 17591 - DNA, 201 bp, Homo sapiens
ttgtcatttcttttgcaagggccaggattcctgtgattgctgtagactcggacaaaaaccagctagcaactgcaaacaagatgataacctctgtcttggaraaagaagcctccaaaatgcaacagagcggccacccttggtcaggaccaaaacccaggttaacttcatctgtgaaggagcttggtggtgtagatttagtca

SEQ ID NO: 17592 - DNA, 201 bp, Homo sapiens
ccagaagacaggtaagggttggtatcaatatgacaagccattgggtaggattcacaaacctgatccctggctttccaaattcctatcacggtatagaaaamcccatcacattgaaccacgtaccattagccaggatgagatccttgaacgctgcttatattcacttatcaatgaagcattccgtatcttgggagaagggat

SEQ ID NO: 17593 - DNA, 201 bp, Homo sapiens
tgttgttggcttgggaacaatgggccgaggcattgtcatttcttttgcaagggccaggattcctgtgattgctgtagactcggacaaaaaccagctagcarctgcaaacaagatgataacctctgtcttggaaaaagaagcctccaaaatgcaacagagcggccacccttggtcaggaccaaaacccaggttaacttcatc

SEQ ID NO: 17594 - DNA, 201 bp, Homo sapiens
tgaggcaggaggattgtttgaggccagaaatttgagaccagcctgggcaacatagcaaaaccctgtctctacaaaaaatactttccgtacattagtggttrcctaaggctagaattgggggtgatgaatggggagtacaggattcatctaatgggtacaggatttctttatggttcatgaaaatggtctaaacttattgtg

SEQ ID NO: 17595 - DNA, 201 bp, Homo sapiens
caagaaggaggaggagctgtttctatatcttttgcaatcagggcaggctagagccctgcaatatgctttcttcgctgaaaggaaagcaaataagtggtcarctccctccggagcatcgtggaaaacagcatcagcgcggcctgtctcctcagttggtgttgttggcttgggaacaatgggccgaggcattgtcatttcttt

SEQ ID NO: 17596 - DNA, 201 bp, Homo sapiens
caatcagggcaggctagagccctgcaatatgctttcttcgctgaaaggaaagcaaataagtggtcaactccctccggagcatcgtggaaaacagcatcagygcggcctgtctcctcagttggtgttgttggcttgggaacaatgggccgaggcattgtcatttcttttgcaagggccaggattcctgtgattgctgtagac

SEQ ID NO: 17597 - DNA, 201 bp, Homo sapiens
  misc_feature (1)...(201): n = A,T,C or G
acatggatatggatggccaaggcacaagggcgggcccatgttctatgcttccacagttgggttgcccacagttctagagaaattgcagaaatattacaggnagaaccctgatattccccaactggagccaagtgactatctaaaaaaactggcttctcagggaaaccctcccctgaaagaatggcaaagcttggcaggctc

SEQ ID NO: 17598 - DNA, 201 bp, Homo sapiens
  misc_feature (1)...(201): n = A,T,C or G
tattacaggcagaaccctgatattccccaactggagccaagtgactatctaaaaaaactggcttctcagggaaaccctcccctgaaagaatggcaaagctnggcaggctcccctagcagtaaattgtgattcagtcttccagattatgcctcacatgctagcatcaggtaatgctgactgaatttcagtgaaattaaatca

SEQ ID NO: 17599 - DNA, 201 bp, Homo sapiens
tgtgcagtatccctatgaagtgggcatcaagaaggaggaggagctgtttctatatcttttgcaatcagggcaggctagagccctgcaatatgctttcttcrctgaaaggaaagcaaataagtggtcaactccctccggagcatcgtggaaaacagcatcagcgcggcctgtctcctcagttggtgttgttggcttgggaac

SEQ ID NO: 17600 - DNA, 201 bp, Homo sapiens
cacaacgccttggcgctaatccgcctccgaaacccgccggtcaacgcgatcagtacgactttactccgtgacataaaagaaggactacagaaagctgtaakagaccatacaataaaagccattgtgatttgtggagcagagggcaaattttctgcaggtgctgatattcgtggcttcagtgctcctaggacatttggcctt

SEQ ID NO: 17601 - DNA, 201 bp, Homo sapiens
gaccatacaataaaagccattgtgatttgtggagcagagggcaaattttctgcaggtgctgatattcgtggcttcagtgctcctaggacatttggccttayactgggacatgtagtagatgaaatacagagaaatgagaagcccgtggtggcagcaatccaaggcatggctttcggagggggactagagctggccctgggc

SEQ ID NO: 17602 - DNA, 201 bp, Homo sapiens
ctgcacaacgccttggcgctaatccgcctccgaaacccgccggtcaacgcgatcagtacgactttactccgtgacataaaagaaggactacagaaagctgkaatagaccatacaataaaagccattgtgatttgtggagcagagggcaaattttctgcaggtgctgatattcgtggcttcagtgctcctaggacatttggc

SEQ ID NO: 17603 - DNA, 201 bp, Homo sapiens
tccaaggcatggctttcggagggggactagagctggccctgggctgtcactataggattgcccacgcagaggctcaagttggcttaccagaagttacactkggacttctccctggtgcaagaggaacccagcttctccccagactcactggagttcctgctgcacttgacttaattacctcaggaagacgtattttagcag

SEQ ID NO: 17604 - DNA, 201 bp, Homo sapiens
gcatcagcgcggcctgtctcctcagttggtgttgttggcttgggaacaatgggccgaggcattgtcatttcttttgcaagggccaggattcctgtgattgstgtagactcggacaaaaaccagctagcaactgcaaacaagatgataacctctgtcttggaaaaagaagcctccaaaatgcaacagagcggccacccttgg

SEQ ID NO: 17605 - DNA, 201 bp, Homo sapiens; identical to SEQ ID NO: 17588

SEQ ID NO: 17606 - DNA, 201 bp, Homo sapiens; identical to SEQ ID NO: 17589

SEQ ID NO: 17607 - DNA, 201 bp, Homo sapiens; identical to SEQ ID NO: 17590

SEQ ID NO: 17608 - DNA, 201 bp, Homo sapiens
tcctcagttggtgttgttgggccaggattcctgtgattgctgtagactcggacaaaaaccagctagcaactgcaaacaagatgataacctctgtcttggaraaagaagcctccaaaatgcaacagagcggccacccttggtcaggaccaaaacccaggttaacttcatctgtgaaggagcttggtggtgtagatttagtca

SEQ ID NO: 17609 - DNA, 201 bp, Homo sapiens; identical to SEQ ID NO: 17592

SEQ ID NO: 17610 - DNA, 201 bp, Homo sapiens
catcgtggaaaacagcatcagcgcggcctgtctcctcagttggtgttgttgggccaggattcctgtgattgctgtagactcggacaaaaaccagctagcarctgcaaacaagatgataacctctgtcttggaaaaagaagcctccaaaatgcaacagagcggccacccttggtcaggaccaaaacccaggttaacttcatc

SEQ ID NO: 17611 - DNA, 201 bp, Homo sapiens; identical to SEQ ID NO: 17594

SEQ ID NO: 17612 - DNA, 201 bp, Homo sapiens
caagaaggaggaggagctgtttctatatcttttgcaatcagggcaggctagagccctgcaatatgctttcttcgctgaaaggaaagcaaataagtggtcarctccctccggagcatcgtggaaaacagcatcagcgcggcctgtctcctcagttggtgttgttgggccaggattcctgtgattgctgtagactcggacaaa

SEQ ID NO: 17613 - DNA, 201 bp, Homo sapiens
caatcagggcaggctagagccctgcaatatgctttcttcgctgaaaggaaagcaaataagtggtcaactccctccggagcatcgtggaaaacagcatcagygcggcctgtctcctcagttggtgttgttgggccaggattcctgtgattgctgtagactcggacaaaaaccagctagcaactgcaaacaagatgataacct

SEQ ID NO: 17614 - DNA, 201 bp, Homo sapiens; identical to SEQ ID NO: 17597
  misc_feature (1)...(201): n = A,T,C or G

SEQ ID NO: 17615 - DNA, 201 bp, Homo sapiens; identical to SEQ ID NO: 17598
  misc_feature (1)...(201): n = A,T,C or G

SEQ ID NO: 17616 - DNA, 201 bp, Homo sapiens
tgtgcagtatccctatgaagtgggcatcaagaaggaggaggagctgtttctatatcttttgcaatcagggcaggctagagccctgcaatatgctttcttcrctgaaaggaaagcaaataagtggtcaactccctccggagcatcgtggaaaacagcatcagcgcggcctgtctcctcagttggtgttgttgggccaggatt

SEQ ID NO: 17617 - DNA, 201 bp, Homo sapiens; identical to SEQ ID NO: 17600

SEQ ID NO: 17618 - DNA, 201 bp, Homo sapiens; identical to SEQ ID NO: 17601

SEQ ID NO: 17619 - DNA, 201 bp, Homo sapiens; identical to SEQ ID NO: 17602

SEQ ID NO: 17620 - DNA, 201 bp, Homo sapiens; identical to SEQ ID NO: 17603

SEQ ID NO: 17621 - DNA, 201 bp, Homo sapiens
agcaaataagtggtcaactccctccggagcatcgtggaaaacagcatcagcgcggcctgtctcctcagttggtgttgttgggccaggattcctgtgattgstgtagactcggacaaaaaccagctagcaactgcaaacaagatgataacctctgtcttggaaaaagaagcctccaaaatgcaacagagcggccacccttgg

SEQ ID NO: 17622 - DNA, 201 bp, Homo sapiens; identical to SEQ ID NO: 17588

SEQ ID NO: 17623 - DNA, 201 bp, Homo sapiens; identical to SEQ ID NO: 17589

SEQ ID NO: 17624 - DNA, 201 bp, Homo sapiens; identical to SEQ ID NO: 17590

SEQ ID NO: 17625 - DNA, 201 bp, Homo sapiens; identical to SEQ ID NO: 17591

SEQ ID NO: 17626 - DNA, 201 bp, Homo sapiens; identical to SEQ ID NO: 17592

SEQ ID NO: 17627 - DNA, 201 bp, Homo sapiens; identical to SEQ ID NO: 17593

SEQ ID NO: 17628 - DNA, 201 bp, Homo sapiens; identical to SEQ ID NO: 17594

SEQ ID NO: 17629 - DNA, 201 bp, Homo sapiens; identical to SEQ ID NO: 17595

SEQ ID NO: 17630 - DNA, 201 bp, Homo sapiens; identical to SEQ ID NO: 17596

SEQ ID NO: 17631 - DNA, 201 bp, Homo sapiens; identical to SEQ ID NO: 17597
  misc_feature (1)...(201): n = A,T,C or G

SEQ ID NO: 17632 - DNA, 201 bp, Homo sapiens; identical to SEQ ID NO: 17598
  misc_feature (1)...(201): n = A,T,C or G

SEQ ID NO: 17633 - DNA, 201 bp, Homo sapiens; identical to SEQ ID NO: 17599

SEQ ID NO: 17634 - DNA, 201 bp, Homo sapiens; identical to SEQ ID NO: 17600

SEQ ID NO: 17635 - DNA, 201 bp, Homo sapiens; identical to SEQ ID NO: 17601

SEQ ID NO: 17636 - DNA, 201 bp, Homo sapiens; identical to SEQ ID NO: 17602

SEQ ID NO: 17637 - DNA, 201 bp, Homo sapiens; identical to SEQ ID NO: 17603

SEQ ID NO: 17638 - DNA, 201 bp, Homo sapiens; identical to SEQ ID NO: 17604

SEQ ID NO: 17639 - DNA, 201 bp, Homo sapiens
tgacttgatgttttatcacttctctaagtaaggttgaaatatccttattgtagctactgtttttaatgtaaaggttaaacttgaaaagaaattcttaatcmcggtgccaaaattcattttctaacaccatgtgttagaaaattataaaaaataaaataattttagaaagttttgttgttctattattggtgtttatcttcc

SEQ ID NO: 17640 - DNA, 201 bp, Homo sapiens
gcatgaaggacttcctgttaaaaatggaacaagatacattgcagtgtcatttatagatccctaagttatttacttttcattgaattgaaatttattttggrtgaatgactggcatgaacacgtctttgaagttgtggctgagaagatgagaggaatatttaaataacatcaacagaacaacttcactttgggccaaacatt

SEQ ID NO: 17641 - DNA, 201 bp, Homo sapiens
tggctgagaagatgagaggaatatttaaataacatcaacagaacaacttcactttgggccaaacatttgaaaaactttttataaaaaattgtttgatattkcttaatgtctgctctgagccttaaaacacagattgaagaagaaaagaaagaaaaaacttaaatatttatttctatgctttgttgcctctgagaataatga

SEQ ID NO: 17642 - DNA, 201 bp, Homo sapiens
tgggggaaaacatcatgatagccgtatatctggtggttatgaaaatgtcccaactgatgatatccacatgaagcaagttgatctggagaatgtatggcttsattttatccgggagttcattgcaccagttacactgaaggtctttgcaggctattatacgaagggatttgcactactgaattttgtagtaaaatactcccc

SEQ ID NO: 17643 - DNA, 201 bp, Homo sapiens
tacttgttgacttgatgttttatcacttctctaagtaaggttgaaatatccttattgtagctactgtttttaatgtaaaggttaaacttgaaaagaaattyttaatcacggtgccaaaattcattttctaacaccatgtgttagaaaattataaaaaataaaataattttagaaagttttgttgttctattattggtgttt

SEQ ID NO: 17644 - DNA, 201 bp, Homo sapiens
ttgatgttttatcacttctctaagtaaggttgaaatatccttattgtagctactgtttttaatgtaaaggttaaacttgaaaagaaattcttaatcacggkgccaaaattcattttctaacaccatgtgttagaaaattataaaaaataaaataattttagaaagttttgttgttctattattggtgtttatcttccaaag

SEQ ID NO: 17645 - DNA, 201 bp, Homo sapiens; identical to SEQ ID NO: 17639

SEQ ID NO: 17646 - DNA, 201 bp, Homo sapiens; identical to SEQ ID NO: 17640

SEQ ID NO: 17647 - DNA, 201 bp, Homo sapiens; identical to SEQ ID NO: 17641

SEQ ID NO: 17648 - DNA, 201 bp, Homo sapiens; identical to SEQ ID NO: 17642

SEQ ID NO: 17649 - DNA, 201 bp, Homo sapiens; identical to SEQ ID NO: 17643

SEQ ID NO: 17650 - DNA, 201 bp, Homo sapiens; identical to SEQ ID NO: 17644

SEQ ID NO: 17651 - DNA, 201 bp, Homo sapiens
ttcctagtgggaactttttctactttacctacaagttctatatatgtagaaatgaataaatatatatttaagtacagttttcatgaggaagttttaaaagrccatgttcctaagcttccaagaaggttttggatactagaagtattaatctatggcttttctcccagtaaaaccataggcctgaagttcacattgggtctt

SEQ ID NO: 17652 - DNA, 201 bp, Homo sapiens
atgctggttctcggcatcatgatttccaccacatgaacttcattggaaactatgcttcaacatttacatggtgggatcgaatttttggaacagactctcartataatgcctataatgaaaagaggaagaagtttgagaaaaagactgaataaatatctcacgtaaaccttcctgaaagataaacgttttcctgaattcaga

SEQ ID NO: 17653 - DNA, 201 bp, Homo sapiens
gggtctttaaatcttttagatatatactggtcatttcagaaaattcttcatagtggtattggccttatatttaactttttttttattttttttttgagacraagccacactctgtctccttggctggagtgtggtggcacagtctcagctcactgcaacctctgcctcccagttcaagcaattcttctgcctcagcctccc

SEQ ID NO: 17654 - DNA, 201 bp, Homo sapiens
tatactggtcatttcagaaaattcttcatagtggtattggccttatatttaactttttttttattttttttttgagacaaagccacactctgtctccttgkctggagtgtggtggcacagtctcagctcactgcaacctctgcctcccagttcaagcaattcttctgcctcagcctcccaagtagctgggattacaggcac

SEQ ID NO: 17655 - DNA, 201 bp, Homo sapiens
taaacatgttttagaattcacctaaagatcaaaatatcatggattgaacctcatcaattgatagcagtgagtgactgaagcttccaaatcaagaaaagccrgcaccaagaacttccattctaatctagagctgaccagtttgagctgattctctctttgaagagtccttcttgattgcagtgcagtactggcatttctgaa

SEQ ID NO: 17656 - DNA, 201 bp, Homo sapiens
atggatgtaagtggagtattttagtctaaaggcttttcaaattacttgaatttttttaaaaattgaggagctttatttctatttacccttccatttttgtrtatcaaatttccattgtcattaaaaactgtatcttgaaactttgtgaactgacttgctgtatttgcactttgagctcttgaaataaatgtgatttttgtg

SEQ ID NO: 17657 - DNA, 201 bp, Homo sapiens
agaaggttttggatactagaagtattaatctatggcttttctcccagtaaaaccataggcctgaagttcacattgggtctttaaatcttttagatatatastggtcatttcagaaaattcttcatagtggtattggccttatatttaactttttttttattttttttttgagacaaagccacactctgtctccttggctgg

SEQ ID NO: 17658 - DNA, 201 bp, Homo sapiens
ccttcctgaaagataaacgttttcctgaattcagaaactagtagctaacattgcttctggagagcagaaataagcatgtcttctggctactaagtgataaraagaacattaacaacctttaattaccttcctagtgggaactttttctactttacctacaagttctatatatgtagaaatgaataaatatatatttaagta

SEQ ID NO: 17659 - DNA, 201 bp, Homo sapiens
tgggaaaaccaatggaagtgtttcaaagttcttctctttaatcacttctgtatccagctgcctttgatttgtggaacctattattttacagagtatttcartattccttatgattgggaaagaatgccaagatggtattttcttttggcaagatgctttggttgtgcagtcattgaagatacttggcactattttctgcat

SEQ ID NO: 17660 - DNA, 201 bp, Homo sapiens
aagttttaaaagaccatgttcctaagcttccaagaaggttttggatactagaagtattaatctatggcttttctcccagtaaaaccataggcctgaagttsacattgggtctttaaatcttttagatatatactggtcatttcagaaaattcttcatagtggtattggccttatatttaactttttttttatttttttttt

SEQ ID NO: 17661 - DNA, 201 bp, Homo sapiens; identical to SEQ ID NO: 17651

SEQ ID NO: 17662 - DNA, 201 bp, Homo sapiens; identical to SEQ ID NO: 17652

SEQ ID NO: 17663 - DNA, 201 bp, Homo sapiens; identical to SEQ ID NO: 17653

SEQ ID NO: 17664 - DNA, 201 bp, Homo sapiens; identical to SEQ ID NO: 17654

SEQ ID NO: 17665 - DNA, 201 bp, Homo sapiens; identical to SEQ ID NO: 17655

SEQ ID NO: 17666 - DNA, 201 bp, Homo sapiens; identical to SEQ ID NO: 17656

SEQ ID NO: 17667 - DNA, 201 bp, Homo sapiens; identical to SEQ ID NO: 17657

SEQ ID NO: 17668 - DNA, 201 bp, Homo sapiens; identical to SEQ ID NO: 17658

SEQ ID NO: 17669 - DNA, 201 bp, Homo sapiens; identical to SEQ ID NO: 17659

SEQ ID NO: 17670 - DNA, 201 bp, Homo sapiens; identical to SEQ ID NO: 17660

SEQ ID NO: 17671 - DNA, 201 bp, Homo sapiens
ccaggaccagttaaaaaccaccacaacagccgtcatcagcaaggacttcaccgaggaccggatttggctgaatggccgggaggaggatgtggggcagccgmggctgcaggcctgcctgcgggagatccgctgcctggcccggaagcggaggaactcacgggatggggacccgctgccctccagcctcagctgcaaggtgca

SEQ ID NO: 17672 - DNA, 106 bp, Homo sapiens
tgtctcggagggtggctgcccacggcctgggtgtggctggaatggtggcaggagtgggcaccagtgcggccccggtggccatggggaataaaccagcattrctgcc

SEQ ID NO: 17673 - DNA, 201 bp, Homo sapiens
gctgaagggctttctcaccccagctctggctatgcccagttctctgagaaaggagctcagtggggaggtggtccctccagcggaccagggaaggggtcacygtgctgggagcagcctccttgggcctcaggaaaccaccaagtgcctcggatggtggctgcccacggcgcttctgctgagaccctgcccccggcccaggtg

SEQ ID NO: 17674 - DNA, 201 bp, Homo sapiens
ggccagggcctcaaatcctggatgacccctgcgcccacctcctgggtcctgacggcctgccgaagccagctgcctgactgcctcagcagggaccgcatgcygcttggagaaggggtggcctcgccggagctagggagcggatgtggtgggctggccggactcctgggacatgtgggtggtggcttgaccccgggcccatgg

SEQ ID NO: 17675 - DNA, 201 bp, Homo sapiens
ccgggagcgagacttccccagcttcgcccagctgaccatgaaggacagcaaccagttccacgccacctgcctcgacaccttcccgcccatctcttacctcmatgccatctcctggcgcatcatccacctggtgcaccgcttcaacgcccaccacggggacaccaaggtggcgtacacctttgacgcgggccccaatgccgt

SEQ ID NO: 17676 - DNA, 201 bp, Homo sapiens
cgtacacctttgacgcgggccccaatgccgtgatcttcaccctggacgacactgtggctgagtttgtggctgctgtgtggcacggctttcccccaggctcraatggagacacgtttctgaaggggctgcaggtgaggccggcccctctctcagctgagcttcaggctgcgctggccatggagccgacccccggtggggtca

SEQ ID NO: 17677 - DNA, 201 bp, Homo sapiens
caccacggggacaccaaggtggcgtacacctttgacgcgggccccaatgccgtgatcttcaccctggacgacactgtggctgagtttgtggctgctgtgtkgcacggctttcccccaggctcgaatggagacacgtttctgaaggggctgcaggtgaggccggcccctctctcagctgagcttcaggctgcgctggccatg

SEQ ID NO: 17678 - DNA, 201 bp, Homo sapiens
ccctccagcggaccagggaaggggtcaccgtgctgggagcagcctccttgggcctcaggaaaccaccaagtgcctcggatggtggctgcccacggcgcttytgctgagaccctgcccccggcccaggtgtctcggagggtggctgcccacggcctgggtgtggctggaatggtggcaggagtgggcaccagtgcggccccg

SEQ ID NO: 17679 - DNA, 201 bp, Homo sapiens
ggtcctgacggcctgccgaagccagctgcctgactgcctcagcagggaccgcatgccgcttggagaaggggtggcctcgccggagctagggagcggatgtrgtgggctggccggactcctgggacatgtgggtggtggcttgaccccgggcccatgggcagcttgctgtggggcagtgcagggagtcctgcggccgcccag

SEQ ID NO: 17680 - DNA, 201 bp, Homo sapiens
aggtgaggccggcccctctctcagctgagcttcaggctgcgctggccatggagccgacccccggtggggtcaaatacatcattgtcactcaggtggggccrgggcctcaaatcctggatgacccctgcgcccacctcctgggtcctgacggcctgccgaagccagctgcctgactgcctcagcagggaccgcatgccgctt

SEQ ID NO: 17681 - DNA, 201 bp, Homo sapiens
tcaggtggggccagggcctcaaatcctggatgacccctgcgcccacctcctgggtcctgacggcctgccgaagccagctgcctgactgcctcagcagggascgcatgccgcttggagaaggggtggcctcgccggagctagggagcggatgtggtgggctggccggactcctgggacatgtgggtggtggcttgaccccgg

SEQ ID NO: 17682 - DNA, 201 bp, Homo sapiens; identical to SEQ ID NO: 17671

SEQ ID NO: 17683 - DNA, 106 bp, Homo sapiens; identical to SEQ ID NO: 17672

SEQ ID NO: 17684 - DNA, 201 bp, Homo sapiens
gctatgcctgcctaggtaccttttgttgcccttgtcgcaggccgcaagctctgcaggccgtgaacagagagtgtccgagagtggaactagcggaggtgggrgacagacggctgggccggtgaatgctggcctcaaaggctgatggcccagaagccctgtcatctggaaatccccatttgccgtggggtgtgggacgttcct

SEQ ID NO: 17685 - DNA, 201 bp, Homo sapiens; identical to SEQ ID NO: 17673

SEQ ID NO: 17686 - DNA, 201 bp, Homo sapiens; identical to SEQ ID NO: 17674

SEQ ID NO: 17687 - DNA, 201 bp, Homo sapiens; identical to SEQ ID NO: 17675

SEQ ID NO: 17688 - DNA, 201 bp, Homo sapiens; identical to SEQ ID NO: 17676

SEQ ID NO: 17689 - DNA, 201 bp, Homo sapiens
ctcctcagcggcgggctatgcctgcctaggtaccttttgttgcccttgtcgcaggccgcaagctctgcaggccgtgaacagagagtgtccgagagtggaastagcggaggtgggggacagacggctgggccggtgaatgctggcctcaaaggctgatggcccagaagccctgtcatctggaaatccccatttgccgtgggg

SEQ ID NO: 17690 - DNA, 201 bp, Homo sapiens; identical to SEQ ID NO: 17677

SEQ ID NO: 17691 - DNA, 201 bp, Homo sapiens; identical to SEQ ID NO: 17678

SEQ ID NO: 17692 - DNA, 201 bp, Homo sapiens; identical to SEQ ID NO: 17679

SEQ ID NO: 17693 - DNA, 201 bp, Homo sapiens; identical to SEQ ID NO: 17680

SEQ ID NO: 17694 - DNA, 201 bp, Homo sapiens; identical to SEQ ID NO: 17681

SEQ ID NO: 17695 - DNA, 201 bp, Homo sapiens; identical to SEQ ID NO: 17671

SEQ ID NO: 17696 - DNA, 106 bp, Homo sapiens; identical to SEQ ID NO: 17672

SEQ ID NO: 17697 - DNA, 201 bp, Homo sapiens; identical to SEQ ID NO: 17673

SEQ ID NO: 17698 - DNA, 201 bp, Homo sapiens; identical to SEQ ID NO: 17674

SEQ ID NO: 17699 - DNA, 201 bp, Homo sapiens; identical to SEQ ID NO: 17675

SEQ ID NO: 17700 - DNA, 201 bp, Homo sapiens
ggcatcggtgaacaacttccccacggctgcgggcctggcctcctcagcggcgggctatgcctgcctaggggtgacgcttcctggcccacctgggctcctgygccttccctgaaccaccctcggtgaccagggtgggtgaccagacctggagcctacaccctggcccgtgtctacggcgtggagagtgacctctcagaagtg

SEQ ID NO: 17701 - DNA, 201 bp, Homo sapiens; identical to SEQ ID NO: 17676

SEQ ID NO: 17702 - DNA, 201 bp, Homo sapiens
cgaaggcgtccatccaggctttgcttggctcctggggtcagcgggggctgaaggaacagaagcgtggttgagtgctcaggaaccgctcccatgcggcgggygccaccacccgctgggatctggaagttgcccctgcgtcacccctgctgtggccgggaggcctctgtggtcaggcaggtggcactgactcccacccccgct

SEQ ID NO: 17703 - DNA, 201 bp, Homo sapiens; identical to SEQ ID NO: 17677

SEQ ID NO: 17704 - DNA, 201 bp, Homo sapiens; identical to SEQ ID NO: 17678

SEQ ID NO: 17705 - DNA, 201 bp, Homo sapiens; identical to SEQ ID NO: 17679

SEQ ID NO: 17706 - DNA, 201 bp, Homo sapiens; identical to SEQ ID NO: 17680

SEQ ID NO: 17707 - DNA, 201 bp, Homo sapiens
gtggagcagcagcccggtggcctctgtccctagtcagggctgctgccgggagcaggagcgaaggcgtccatccaggctttgcttggctcctggggtcagcrggggctgaaggaacagaagcgtggttgagtgctcaggaaccgctcccatgcggcgggcgccaccacccgctgggatctggaagttgcccctgcgtcaccc

SEQ ID NO: 17708 - DNA, 201 bp, Homo sapiens; identical to SEQ ID NO: 17681

SEQ ID NO: 17709 - DNA, 201 bp, Homo sapiens
cactgctgctccccaaatttgatgaggtatatgcccgctcttactgcttctcagccaactacatctaccacttgtttgtgaacggttacaaattcacagakgagacttggccccaaatacactttgaaaaagaagtggggaatagcagcatagcctggtctcttggctacatgctcagcctgaccaaccagatcccagctg

SEQ ID NO: 17710 - DNA, 201 bp, Homo sapiens
gcaggagagaagatggatctgaacaccagcgacatcatgcaggtgtccctgtatggctacgtatacacgctctacacacacagcttccagtgctatggccrgaatgaggctgagaagaagtttctggcaatgctcctgcagaattctcctaccaaaaaccatctcaccaatccctgttaccctcgggattatagcatcagc

SEQ ID NO: 17711 - DNA, 201 bp, Homo sapiens
tacatgctcagcctgaccaaccagatcccagctgaaagccctctgatccgtctgcccatagaaccacctgtctttgtgggcaccctcgctttcttcacagyggcagccttgctgtgtctggcatttcttgcatacctgtgttcagcaaccagaagaaagaggcactccgagcatgcctttgaccatgcagtggattctgac

SEQ ID NO: 17712 - DNA, 201 bp, Homo sapiens
atccctgttaccctcgggattatagcatcagcttcaccatgggccatgtatttgatagcctgtgcactgtggaccagaggccagaaagttataaccccaaygatgtcatcacttttgaaggaactggggacccatctctgtgtaaggagaaggtggcttccatatttgacttcaaagcttgccatgatcaagaaacctgtt

SEQ ID NO: 17713 - DNA, 201 bp, Homo sapiens
aaagaggcactccgagcatgcctttgaccatgcagtggattctgactgagccttcaaagcagctcctggagtccaatggctgcttagagtcagcctgggtrgcaccaggcaatgcaggtgaagtggctgccttcaggaaatacaactaactaaaatcaaacacctaggtcacgtgcctctcaaatactgatttctgccaca

SEQ ID NO: 17714 - DNA, 201 bp, Homo sapiens
cccagctgaaagccctctgatccgtctgcccatagaaccacctgtctttgtgggcaccctcgctttcttcacagcggcagccttgctgtgtctggcatttyttgcatacctgtgttcagcaaccagaagaaagaggcactccgagcatgcctttgaccatgcagtggattctgactgagccttcaaagcagctcctggagt

SEQ ID NO: 17715 - DNA, 201 bp, Homo sapiens
agtggaaagccagtactgtgggagccactggtacatgcgccccttcaggcagctgctgtgacctccaatgtggccattgccctgactcatcagcggggccytctgcccctctcccctgactctccagccaccctccttgctcgctctgcttggcgctcagcaggctctccagcttccccgctggtgcccgtccgagctggc

SEQ ID NO: 17716 - DNA, 201 bp, Homo sapiens
tgccagcctctgtggtccttgcccaaacccatcagcgcaatacttgaaccttctcccaggtaggggcaggaggagccacatgagagagggagaaggaccgygtttacctttagagttttgttttgttttttccttctgagtttgctgttggtgcaggaataagggaaaggcccaaggtatccaagcctggggaagggcagg

SEQ ID NO: 17717 - DNA, 201 bp, Homo sapiens
caccccaagggatgggatgcctggggttatggaattaaccagccaaactgggattaaagactcaaggcatcttagggcctgctgagcagattggatgcagrgaatgtacaattggtgctgttgggtggccagtgcataattggacacagactttcaggacctgtgtgaaatggagatggggaaggggcaacctcgaagggg

SEQ ID NO: 17718 - DNA, 201 bp, Homo sapiens
cagccagtgttcgggctgacacctactgccgcctttactcactcagcgtggaccatttcaatgctgtgcttgaggagttccccatgatgcgccgggccttygagactgtggccatggatcggctgctccgcatcggcaagaagaattccatactgcagcggaagcgctccgagccaagtccaggcagcagtggtggcatca

SEQ ID NO: 17719 - DNA, 201 bp, Homo sapiens
gcgaggagatcattaacttcacctgtcggggcctggtggcccacatgccgctgtttgcccatgccgaccccagcttcgtcactgcagttctcaccaagctkcgctttgaggtcttccagccgggggatctcgtggtgcgtgagggctccgtggggaggaagatgtacttcatccagcatgggctgctcagtgtgctggccc

SEQ ID NO: 17720 - DNA, 201 bp, Homo sapiens
tgccaagtaactagatgtctctgtttccctgccaatgatcctgcaggttctgcccggtctggttatcttcctgttcctgtagcatagccaggcactgccartcacctgtgcccccattgctgtcagcagatgtcttgggtcctgagtgtgggtatccacttttacccgctcactgccacctgtggacactctgtgtctacc

SEQ ID NO: 17721 - DNA, 201 bp, Homo sapiens
tgccctgttcaaggccatgagccacatgctgtgcattggctatgggcagcaggcacctgtaggcatgcccgacgtctggctcaccatgctcagcatgatcrtaggtgccacatgctacgccatgttcatcggccatgccacggcactcatccagtccctggactcttcccggcgtcagtaccaggagaagtacaagcaggt

SEQ ID NO: 17722 - DNA, 201 bp, Homo sapiens
aagtaactagatgtctctgtttccctgccaatgatcctgcaggttctgcccggtctggttatcttcctgttcctgtagcatagccaggcactgccagtcayctgtgcccccattgctgtcagcagatgtcttgggtcctgagtgtgggtatccacttttacccgctcactgccacctgtggacactctgtgtctaccctct

SEQ ID NO: 17723 - DNA, 201 bp, Homo sapiens; identical to SEQ ID NO: 17715

SEQ ID NO: 17724 - DNA, 201 bp, Homo sapiens; identical to SEQ ID NO: 17716

SEQ ID NO: 17725 - DNA, 201 bp, Homo sapiens; identical to SEQ ID NO: 17717

SEQ ID NO: 17726 - DNA, 201 bp, Homo sapiens; identical to SEQ ID NO: 17718

SEQ ID NO: 17727 - DNA, 201 bp, Homo sapiens; identical to SEQ ID NO: 17719

SEQ ID NO: 17728 - DNA, 201 bp, Homo sapiens; identical to SEQ ID NO: 17721

SEQ ID NO: 17729 - DNA, 201 bp, Homo sapiens; identical to SEQ ID NO: 17715

SEQ ID NO: 17730 - DNA, 201 bp, Homo sapiens; identical to SEQ ID NO: 17716

SEQ ID NO: 17731 - DNA, 201 bp, Homo sapiens; identical to SEQ ID NO: 17717

SEQ ID NO: 17732 - DNA, 201 bp, Homo sapiens; identical to SEQ ID NO: 17718

SEQ ID NO: 17733 - DNA, 201 bp, Homo sapiens; identical to SEQ ID NO: 17719

SEQ ID NO: 17734 - DNA, 201 bp, Homo sapiens; identical to SEQ ID NO: 17721

SEQ ID NO: 17735 - DNA, 201 bp, Homo sapiens; identical to SEQ ID NO: 17716

SEQ ID NO: 17736 - DNA, 201 bp, Homo sapiens; identical to SEQ ID NO: 17715

SEQ ID NO: 17737 - DNA, 201 bp, Homo sapiens; identical to SEQ ID NO: 17717

SEQ ID NO: 17738 - DNA, 201 bp, Homo sapiens; identical to SEQ ID NO: 17718

SEQ ID NO: 17739 - DNA, 201 bp, Homo sapiens; identical to SEQ ID NO: 17720

SEQ ID NO: 17740 - DNA, 201 bp, Homo sapiens
gcgaggagatcattaacttcacctgtcggggcctggtggcccacatgccgctgtttgcccatgccgaccccagcttcgtcactgcagttctcaccaagctkcgctttgaggtcttccagccgggggatctcgtgagatctgcctgctaactaggggccggcgcacagccagtgttcgggctgacacctactgccgccttta

SEQ ID NO: 17741 - DNA, 201 bp, Homo sapiens; identical to SEQ ID NO: 17722

SEQ ID NO: 17742 - DNA, 201 bp, Homo sapiens
tgccctgttcaaggccatgagccacatgctgtgcattggctatgggcagcaggcacctgtaggcatgcccgacgtctggctcaccatgctcagcatgatcrtaggtgccacatgctacgccatgttcatcggccatgccacggcactcatccagtccctggactcttcccggcgtcagtaccaggagaaggtcagcaggga

SEQ ID NO: 17743 - DNA, 201 bp, Homo sapiens
accacaactggccgctcagcccagcttctgtctcggtaccgacctcgggcagcagtcattgctgtcacccgctctgcccaggctgcccgccaggtccactkatgccgaggagtcttccccttgctttaccgtgaacctccagaagccatctgggcagatgatgtagatcgccgggtgcaatttggcattgaaagtggaaag

SEQ ID NO: 17744 - DNA, 201 bp, Homo sapiens
aagtgctgtgctgctgccatcattgtgctgaccacaactggccgctcagcccagcttctgtctcggtaccgacctcgggcagcagtcattgctgtcacccrctctgcccaggctgcccgccaggtccacttatgccgaggagtcttccccttgctttaccgtgaacctccagaagccatctgggcagatgatgtagatcgc

SEQ ID NO: 17745 - DNA, 201 bp, Homo sapiens
ggaggcagaggccgcagtgtaccaccggcagctgtttgaggagctacgtcgggcagcgccactaagccgtgatcccactgaggtcaccgccattggtgctrtggaggctgccttcaagtgctgtgctgctgccatcattgtgctgaccacaactggccgctcagcccagcttctgtctcggtaccgacctcgggcagcagt

SEQ ID NO: 17746 - DNA, 201 bp, Homo sapiens
tgctgctgccatcattgtgctgaccacaactggccgctcagcccagcttctgtctcggtaccgacctcgggcagcagtcattgctgtcacccgctctgccyaggctgcccgccaggtccacttatgccgaggagtcttccccttgctttaccgtgaacctccagaagccatctgggcagatgatgtagatcgccgggtgca

SEQ ID NO: 17747 - DNA, 201 bp, Homo sapiens
atcattgtgctgaccacaactggccgctcagcccagcttctgtctcggtaccgacctcgggcagcagtcattgctgtcacccgctctgcccaggctgccckccaggtccacttatgccgaggagtcttccccttgctttaccgtgaacctccagaagccatctgggcagatgatgtagatcgccgggtgcaatttggcatt

SEQ ID NO: 17748 - DNA, 201 bp, Homo sapiens
gagagcatgattaccaagccccggccaacgagggcagagacaagcgatgtcgccaatgctgtgctggatggggctgactgcatcatgctgtcaggggagaytgccaagggcaacttccctgtggaagcggtgaagatgcagcatgcgattgcccgggaggcagaggccgcagtgtaccaccggcagctgtttgaggagcta

SEQ ID NO: 17749 - DNA, 201 bp, Homo sapiens
aacttggcgggcaagcctgttgtctgtgccacacagatgctggagagcatgattaccaagccccggccaacgagggcagagacaagcgatgtcgccaatghtgtgctggatggggctgactgcatcatgctgtcaggggagactgccaagggcaacttccctgtggaagcggtgaagatgcagcatgcgattgcccgggag

SEQ ID NO: 17750 - DNA, 201 bp, Homo sapiens
atcaagatcatcagcaaaattgagaaccacgaaggcgtgaagaggtttgatgaaatcctggaggtgagcgacggcatcatggtggcacggggggacctagvcatcgagatcccagcagagaaggttttcctggctcagaagatgatgattgggcgctgcaacttggcgggcaagcctgttgtctgtgccacacagatgctg

SEQ ID NO: 17751 - DNA, 201 bp, Homo sapiens
gcaacttggcgggcaagcctgttgtctgtgccacacagatgctggagagcatgattaccaagccccggccaacgagggcagagacaagcgatgtcgccaawgctgtgctggatggggctgactgcatcatgctgtcaggggagactgccaagggcaacttccctgtggaagcggtgaagatgcagcatgcgattgcccggg

SEQ ID NO: 17752 - DNA, 201 bp, Homo sapiens
acacggcatcaagatcatcagcaaaattgagaaccacgaaggcgtgaagaggtttgatgaaatcctggaggtgagcgacggcatcatggtggcacgggggsacctaggcatcgagatcccagcagagaaggttttcctggctcagaagatgatgattgggcgctgcaacttggcgggcaagcctgttgtctgtgccacaca

SEQ ID NO: 17753 - DNA, 201 bp, Homo sapiens
tgcaacttggcgggcaagcctgttgtctgtgccacacagatgctggagagcatgattaccaagccccggccaacgagggcagagacaagcgatgtcgccartgctgtgctggatggggctgactgcatcatgctgtcaggggagactgccaagggcaacttccctgtggaagcggtgaagatgcagcatgcgattgcccgg

SEQ ID NO: 17754 - DNA, 201 bp, Homo sapiens
gaaggacacggcatcaagatcatcagcaaaattgagaaccacgaaggcgtgaagaggtttgatgaaatcctggaggtgagcgacggcatcatggtggcacvgggggacctaggcatcgagatcccagcagagaaggttttcctggctcagaagatgatgattgggcgctgcaacttggcgggcaagcctgttgtctgtgcc

SEQ ID NO: 17755 - DNA, 201 bp, Homo sapiens
gcgctgcaacttggcgggcaagcctgttgtctgtgccacacagatgctggagagcatgattaccaagccccggccaacgagggcagagacaagcgatgtcrccaatgctgtgctggatggggctgactgcatcatgctgtcaggggagactgccaagggcaacttccctgtggaagcggtgaagatgcagcatgcgattgc

SEQ ID NO: 17756 - DNA, 201 bp, Homo sapiens
tgcaatttggcattgaaagtggaaagctccgtggcttcctccgtgttggagacctggtgattgtggtgacaggctggcgacctggctccggctacaccaamatcatgcgggtgctaagcatatcctgagacgcccctccctcctctggcccagcctacccttgtaccccatcccttcctccccagtctacgttctccagcc

SEQ ID NO: 17757 - DNA, 201 bp, Homo sapiens
tccggaaggacacggcatcaagatcatcagcaaaattgagaaccacgaaggcgtgaagaggtttgatgaaatcctggaggtgagcgacggcatcatggtgkcacggggggacctaggcatcgagatcccagcagagaaggttttcctggctcagaagatgatgattgggcgctgcaacttggcgggcaagcctgttgtctg

SEQ ID NO: 17758 - DNA, 201 bp, Homo sapiens
aagatgatgattgggcgctgcaacttggcgggcaagcctgttgtctgtgccacacagatgctggagagcatgattaccaagccccggccaacgagggcagrgacaagcgatgtcgccaatgctgtgctggatggggctgactgcatcatgctgtcaggggagactgccaagggcaacttccctgtggaagcggtgaagatg

SEQ ID NO: 17759 - DNA, 201 bp, Homo sapiens
gcatctcgctccgtggagcgcctcaaggagatgatcaaggccgggatgaacattgcgcgactcaacttctcccacggctcccacgagtaccatgctgagtmcatcgccaacgtccgggaggcggtggagagctttgcaggttccccactcagctaccggcccgtggccatcgccctggacaccaagggaccggagatccgc

SEQ ID NO: 17760 - DNA, 201 bp, Homo sapiens
tgtgctgaccacaactggccgctcagcccagcttctgtctcggtaccgacctcgggcagcagtcattgctgtcacccgctctgcccaggctgcccgccagrtccacttatgccgaggagtcttccccttgctttaccgtgaacctccagaagccatctgggcagatgatgtagatcgccgggtgcaatttggcattgaaag

SEQ ID NO: 17761 - DNA, 201 bp, Homo sapiens
gattgggcgctgcaacttggcgggcaagcctgttgtctgtgccacacagatgctggagagcatgattaccaagccccggccaacgagggcagagacaagcratgtcgccaatgctgtgctggatggggctgactgcatcatgctgtcaggggagactgccaagggcaacttccctgtggaagcggtgaagatgcagcatgc

SEQ ID NO: 17762 - DNA, 201 bp, Homo sapiens
tggcattgaaagtggaaagctccgtggcttcctccgtgttggagacctggtgattgtggtgacaggctggcgacctggctccggctacaccaacatcatgmgggtgctaagcatatcctgagacgcccctccctcctctggcccagcctacccttgtaccccatcccttcctccccagtctacgttctccagcccacaccc

SEQ ID NO: 17763 - DNA, 201 bp, Homo sapiens
cctgcccttccccaggcttggataccttgggcctttcccttattcctgcaccaacagcaaactcagaaggaaaaaacaaaacaaaactctaaaggtaaacrcggtccttctccctctctcatgtggctcctcctgcccctacctgggagaaggttcaagtattgcgctgatgggtttgggcaaggaccacagaggctggca

SEQ ID NO: 17764 - DNA, 201 bp, Homo sapiens
ccccttcgaggttgccccttccccatctccatttcacacaggtcctgaaagtctgtgtccaattatgcactggccacccaacagcaccaattgtacattcyctgcatccaatctgctcagcaggccctaagatgccttgagtctttaatcccagtttggctggttaattccataaccccaggcatcccatcccttggggtg

SEQ ID NO: 17765 - DNA, 201 bp, Homo sapiens
agaaccacgaaggcgtgaagaggtttgatgaaatcctggaggtgagcgacggcatcatggtggcacggggggacctaggcatcgagatcccagcagagaakgttttcctggctcagaagatgatgattgggcgctgcaacttggcgggcaagcctgttgtctgtgccacacagatgctggagagcatgattaccaagcccc

SEQ ID NO: 17766 - DNA, 201 bp, Homo sapiens
aggggggtccagagtcggaagtggagctggtgaagggctcccaggtgctggtgactgtggaccccgcgttccggacgcgggggaacgcgaacaccgtgtgrgtggactaccccaatattgtccgggtcgtgccggtggggggccgcatctacattgacgacgggctcatctccctagtggtccagaaaatcggcccagagg

SEQ ID NO: 17767 - DNA, 201 bp, Homo sapiens
ccgtgttggagacctggtgattgtggtgacaggctggcgacctggctccggctacaccaacatcatgcgggtgctaagcatatcctgagacgcccctcccycctctggcccagcctacccttgtaccccatcccttcctccccagtctacgttctccagcccacacccctccaaagccccacctttaagtcctctcttctc

SEQ ID NO: 17768 - DNA, 201 bp, Homo sapiens
ggcagatgatgtagatcgccgggtgcaatttggcattgaaagtggaaagctccgtggcttcctccgtgttggagacctggtgattgtggtgacaggctggbgacctggctccggctacaccaacatcatgcgggtgctaagcatatcctgagacgcccctccctcctctggcccagcctacccttgtaccccatcccttcc

SEQ ID NO: 17769 - DNA, 201 bp, Homo sapiens
ggagagcatgattaccaagccccggccaacgagggcagagacaagcgatgtcgccaatgctgtgctggatggggctgactgcatcatgctgtcaggggagrctgccaagggcaacttccctgtggaagcggtgaagatgcagcatgcgattgcccgggaggcagaggccgcagtgtaccaccggcagctgtttgaggagct

SEQ ID NO: 17770 - DNA, 201 bp, Homo sapiens
gccagctgctatggcagacaccttcctggaacacctctgcctactggacattgactccgagcccgtggctgctcgcagtaccagcatcattgccaccatcrggccagcatctcgctccgtggagcgcctcaaggagatgatcaaggccgggatgaacattgcgcgactcaacttctcccacggctcccacgagtaccatgc

SEQ ID NO: 17771 - DNA, 201 bp, Homo sapiens
cgggaggcagaggccgcagtgtaccaccggcagctgtttgaggagctacgtcgggcagcgccactaagccgtgatcccactgaggtcaccgccattggtgytgtggaggctgccttcaagtgctgtgctgctgccatcattgtgctgaccacaactggccgctcagcccagcttctgtctcggtaccgacctcgggcagca

SEQ ID NO: 17772 - DNA, 201 bp, Homo sapiens
ggctgccttcaagtgctgtgctgctgccatcattgtgctgaccacaactggccgctcagcccagcttctgtctcggtaccgacctcgggcagcagtcattrctgtcacccgctctgcccaggctgcccgccaggtccacttatgccgaggagtcttccccttgctttaccgtgaacctccagaagccatctgggcagatga

SEQ ID NO: 17773 - DNA, 201 bp, Homo sapiens
tggccgctcagcccagcttctgtctcggtaccgacctcgggcagcagtcattgctgtcacccgctctgcccaggctgcccgccaggtccacttatgccgargagtcttccccttgctttaccgtgaacctccagaagccatctgggcagatgatgtagatcgccgggtgcaatttggcattgaaagtggaaagctccgtgg

SEQ ID NO: 17774 - DNA, 201 bp, Homo sapiens
gcccgggaggcagaggccgcagtgtaccaccggcagctgtttgaggagctacgtcgggcagcgccactaagccgtgatcccactgaggtcaccgccattgrtgctgtggaggctgccttcaagtgctgtgctgctgccatcattgtgctgaccacaactggccgctcagcccagcttctgtctcggtaccgacctcgggca

SEQ ID NO: 17775 - DNA, 201 bp, Homo sapiens
gctgccttcaagtgctgtgctgctgccatcattgtgctgaccacaactggccgctcagcccagcttctgtctcggtaccgacctcgggcagcagtcattgytgtcacccgctctgcccaggctgcccgccaggtccacttatgccgaggagtcttccccttgctttaccgtgaacctccagaagccatctgggcagatgat

SEQ ID NO: 17776 - DNA, 201 bp, Homo sapiens
actggccgctcagcccagcttctgtctcggtaccgacctcgggcagcagtcattgctgtcacccgctctgcccaggctgcccgccaggtccacttatgccraggagtcttccccttgctttaccgtgaacctccagaagccatctgggcagatgatgtagatcgccgggtgcaatttggcattgaaagtggaaagctccgt

SEQ ID NO: 17777 - DNA, 201 bp, Homo sapiens
caagtgctgtgctgctgccatcattgtgctgaccacaactggccgctcagcccagcttctgtctcggtaccgacctcgggcagcagtcattgctgtcaccygctctgcccaggctgcccgccaggtccacttatgccgaggagtcttccccttgctttaccgtgaacctccagaagccatctgggcagatgatgtagatcg

SEQ ID NO: 17778 - DNA, 201 bp, Homo sapiens
gtctcggtaccgacctcgggcagcagtcattgctgtcacccgctctgcccaggctgcccgccaggtccacttatgccgaggagtcttccccttgctttacmgtgaacctccagaagccatctgggcagatgatgtagatcgccgggtgcaatttggcattgaaagtggaaagctccgtggcttcctccgtgttggagacct

SEQ ID NO: 17779 - DNA, 201 bp, Homo sapiens
ggcgtgaagaggtttgatgaaatcctggaggtgagcgacggcatcatggtggcacggggggacctaggcatcgagatcccagcagagaaggttttcctggmtcagaagatgatgattgggcgctgcaacttggcgggcaagcctgttgtctgtgccacacagatgctggagagcatgattaccaagccccggccaacgagg

SEQ ID NO: 17780 - DNA, 201 bp, Homo sapiens
caagatcatcagcaaaattgagaaccacgaaggcgtgaagaggtttgatgaaatcctggaggtgagcgacggcatcatggtggcacggggggacctaggcwtcgagatcccagcagagaaggttttcctggctcagaagatgatgattgggcgctgcaacttggcgggcaagcctgttgtctgtgccacacagatgctgga

SEQ ID NO: 17781 - DNA, 201 bp, Homo sapiens
actgacccaggagctgggcactgccttcttccagcagcagcagctgccagctgctatggcagacaccttcctggaacacctctgcctactggacattgacyccgagcccgtggctgctcgcagtaccagcatcattgccaccatcgggccagcatctcgctccgtggagcgcctcaaggagatgatcaaggccgggatgaa

SEQ ID NO: 17782 - DNA, 201 bp, Homo sapiens
atctgggcagatgatgtagatcgccgggtgcaatttggcattgaaagtggaaagctccgtggcttcctccgtgttggagacctggtgattgtggtgacagsctggcgacctggctccggctacaccaacatcatgcgggtgctaagcatatcctgagacgcccctccctcctctggcccagcctacccttgtaccccatcc

SEQ ID NO: 17783 - DNA, 201 bp, Homo sapiens
cccgggctgtccgagcaggacgtccgagacctgcgcttcggggtggagcatggggtggacatcgtctttgcctcctttgtgcggaaagccagcgacgtggytgccgtcagggctgctctgggtccggaaggacacggcatcaagatcatcagcaaaattgagaaccacgaaggcgtgaagaggtttgatgaaatcctggag

SEQ ID NO: 17784 - DNA, 201 bp, Homo sapiens
ggacttgcccgggctgtccgagcaggacgtccgagacctgcgcttcggggtggagcatggggtggacatcgtctttgcctcctttgtgcggaaagccagcracgtggctgccgtcagggctgctctgggtccggaaggacacggcatcaagatcatcagcaaaattgagaaccacgaaggcgtgaagaggtttgatgaaat

SEQ ID NO: 17785 - DNA, 201 bp, Homo sapiens
gccaggggcccaggtggacttgcccgggctgtccgagcaggacgtccgagacctgcgcttcggggtggagcatggggtggacatcgtctttgcctcctttktgcggaaagccagcgacgtggctgccgtcagggctgctctgggtccggaaggacacggcatcaagatcatcagcaaaattgagaaccacgaaggcgtgaa

SEQ ID NO: 17786 - DNA, 201 bp, Homo sapiens
gaaaatcggcccagagggactggtgacccaagtggagaacggcggcgtcctgggcagccggaagggcgtgaacttgccaggggcccaggtggacttgcccdggctgtccgagcaggacgtccgagacctgcgcttcggggtggagcatggggtggacatcgtctttgcctcctttgtgcggaaagccagcgacgtggctgc

SEQ ID NO: 17787 - DNA, 201 bp, Homo sapiens
cttgccaggggcccaggtggacttgcccgggctgtccgagcaggacgtccgagacctgcgcttcggggtggagcatggggtggacatcgtctttgcctcckttgtgcggaaagccagcgacgtggctgccgtcagggctgctctgggtccggaaggacacggcatcaagatcatcagcaaaattgagaaccacgaaggcgt

SEQ ID NO: 17788 - DNA, 201 bp, Homo sapiens
tcccacggctcccacgagtaccatgctgagtccatcgccaacgtccgggaggcggtggagagctttgcaggttccccactcagctaccggcccgtggccaycgccctggacaccaagggaccggagatccgcactgggatcctgcaggggggtccagagtcggaagtggagctggtgaagggctcccaggtgctggtgact

SEQ ID NO: 17789 - DNA, 201 bp, Homo sapiens
cagccggaagggcgtgaacttgccaggggcccaggtggacttgcccgggctgtccgagcaggacgtccgagacctgcgcttcggggtggagcatggggtgracatcgtctttgcctcctttgtgcggaaagccagcgacgtggctgccgtcagggctgctctgggtccggaaggacacggcatcaagatcatcagcaaaat

SEQ ID NO: 17790 - DNA, 201 bp, Homo sapiens
ggctcccacgagtaccatgctgagtccatcgccaacgtccgggaggcggtggagagctttgcaggttccccactcagctaccggcccgtggccatcgcccyggacaccaagggaccggagatccgcactgggatcctgcaggggggtccagagtcggaagtggagctggtgaagggctcccaggtgctggtgactgtggac

SEQ ID NO: 17791 - DNA, 201 bp, Homo sapiens
gaacggcggcgtcctgggcagccggaagggcgtgaacttgccaggggcccaggtggacttgcccgggctgtccgagcaggacgtccgagacctgcgcttcvgggtggagcatggggtggacatcgtctttgcctcctttgtgcggaaagccagcgacgtggctgccgtcagggctgctctgggtccggaaggacacggcat

SEQ ID NO: 17792 - DNA, 201 bp, Homo sapiens
gatgaaatcctggaggtgagcgacggcatcatggtggcacggggggacctaggcatcgagatcccagcagagaaggttttcctggctcagaagatgatgaytgggcgctgcaacttggcgggcaagcctgttgtctgtgccacacagatgctggagagcatgattaccaagccccggccaacgagggcagagacaagcgat

SEQ ID NO: 17793 - DNA, 201 bp, Homo sapiens
ggtgacccaagtggagaacggcggcgtcctgggcagccggaagggcgtgaacttgccaggggcccaggtggacttgcccgggctgtccgagcaggacgtcygagacctgcgcttcggggtggagcatggggtggacatcgtctttgcctcctttgtgcggaaagccagcgacgtggctgccgtcagggctgctctgggtcc

SEQ ID NO: 17794 - DNA, 201 bp, Homo sapiens
aatcctggaggtgagcgacggcatcatggtggcacggggggacctaggcatcgagatcccagcagagaaggttttcctggctcagaagatgatgattgggygctgcaacttggcgggcaagcctgttgtctgtgccacacagatgctggagagcatgattaccaagccccggccaacgagggcagagacaagcgatgtcgc

SEQ ID NO: 17795 - DNA, 201 bp, Homo sapiens
aactggccgctcagcccagcttctgtctcggtaccgacctcgggcagcagtcattgctgtcacccgctctgcccaggctgcccgccaggtccacttatgcygaggagtcttccccttgctttaccgtgaacctccagaagccatctgggcagatgatgtagatcgccgggtgcaatttggcattgaaagtggaaagctccg

SEQ ID NO: 17796 - DNA, 201 bp, Homo sapiens; identical to SEQ ID NO: 17743

SEQ ID NO: 17797 - DNA, 201 bp, Homo sapiens; identical to SEQ ID NO: 17744

SEQ ID NO: 17798 - DNA, 201 bp, Homo sapiens; identical to SEQ ID NO: 17745

SEQ ID NO: 17799 - DNA, 201 bp, Homo sapiens; identical to SEQ ID NO: 17746

SEQ ID NO: 17800 - DNA, 201 bp, Homo sapiens; identical to SEQ ID NO: 17747

SEQ ID NO: 17801 - DNA, 201 bp, Homo sapiens; identical to SEQ ID NO: 17748

SEQ ID NO: 17802 - DNA, 201 bp, Homo sapiens; identical to SEQ ID NO: 17749

SEQ ID NO: 17803 - DNA, 201 bp, Homo sapiens; identical to SEQ ID NO: 17750

SEQ ID NO: 17804 - DNA, 201 bp, Homo sapiens; identical to SEQ ID NO: 17751

SEQ ID NO: 17805 - DNA, 201 bp, Homo sapiens; identical to SEQ ID NO: 17752

SEQ ID NO: 17806 - DNA, 201 bp, Homo sapiens; identical to SEQ ID NO: 17753

SEQ ID NO: 17807 - DNA, 201 bp, Homo sapiens; identical to SEQ ID NO: 17754

SEQ ID NO: 17808 - DNA, 201 bp, Homo sapiens; identical to SEQ ID NO: 17755

SEQ ID NO: 17809 - DNA, 201 bp, Homo sapiens; identical to SEQ ID NO: 17756

SEQ ID NO: 17810 - DNA, 201 bp, Homo sapiens; identical to SEQ ID NO: 17757

SEQ ID NO: 17811 - DNA, 201 bp, Homo sapiens; identical to SEQ ID NO: 17758

SEQ ID NO: 17812 - DNA, 201 bp, Homo sapiens; identical to SEQ ID NO: 17759

SEQ ID NO: 17813 - DNA, 201 bp, Homo sapiens; identical to SEQ ID NO: 17760

SEQ ID NO: 17814 - DNA, 201 bp, Homo sapiens; identical to SEQ ID NO: 17761

SEQ ID NO: 17815 - DNA, 201 bp, Homo sapiens; identical to SEQ ID NO: 17762

SEQ ID NO: 17816 - DNA, 201 bp, Homo sapiens; identical to SEQ ID NO: 17763

SEQ ID NO: 17817 - DNA, 201 bp, Homo sapiens; identical to SEQ ID NO: 17764

SEQ ID NO: 17818 - DNA, 201 bp, Homo sapiens; identical to SEQ ID NO: 17765

SEQ ID NO: 17819 - DNA, 201 bp, Homo sapiens; identical to SEQ ID NO: 17766

SEQ ID NO: 17820 - DNA, 201 bp, Homo sapiens; identical to SEQ ID NO: 17767

SEQ ID NO: 17821 - DNA, 201 bp, Homo sapiens; identical to SEQ ID NO: 17768

SEQ ID NO: 17822 - DNA, 201 bp, Homo sapiens; identical to SEQ ID NO: 17769

SEQ ID NO: 17823 - DNA, 201 bp, Homo sapiens; identical to SEQ ID NO: 17770

SEQ ID NO: 17824 - DNA, 201 bp, Homo sapiens; identical to SEQ ID NO: 17771

SEQ ID NO: 17825 - DNA, 201 bp, Homo sapiens; identical to SEQ ID NO: 17772

SEQ ID NO: 17826 - DNA, 201 bp, Homo sapiens; identical to SEQ ID NO: 17773

SEQ ID NO: 17827 - DNA, 201 bp, Homo sapiens; identical to SEQ ID NO: 17774

SEQ ID NO: 17828 - DNA, 201 bp, Homo sapiens; identical to SEQ ID NO: 17775

SEQ ID NO: 17829 - DNA, 201 bp, Homo sapiens; identical to SEQ ID NO: 17776

SEQ ID NO: 17830 - DNA, 201 bp, Homo sapiens; identical to SEQ ID NO: 17777

SEQ ID NO: 17831 - DNA, 201 bp, Homo sapiens; identical to SEQ ID NO: 17778

SEQ ID NO: 17832 - DNA, 201 bp, Homo sapiens; identical to SEQ ID NO: 17779

SEQ ID NO: 17833 - DNA, 201 bp, Homo sapiens; identical to SEQ ID NO: 17780

SEQ ID NO: 17834 - DNA, 201 bp, Homo sapiens; identical to SEQ ID NO: 17781

SEQ ID NO: 17835 - DNA, 201 bp, Homo sapiens; identical to SEQ ID NO: 17782

SEQ ID NO: 17836 - DNA, 201 bp, Homo sapiens; identical to SEQ ID NO: 17783

SEQ ID NO: 17837 - DNA, 201 bp, Homo sapiens; identical to SEQ ID NO: 17784

SEQ ID NO: 17838 - DNA, 201 bp, Homo sapiens; identical to SEQ ID NO: 17785

SEQ ID NO: 17839 - DNA, 201 bp, Homo sapiens; identical to SEQ ID NO: 17786

SEQ ID NO: 17840 - DNA, 201 bp, Homo sapiens; identical to SEQ ID NO: 17787

SEQ ID NO: 17841 - DNA, 201 bp, Homo sapiens; identical to SEQ ID NO: 17788

SEQ ID NO: 17842 - DNA, 201 bp, Homo sapiens; identical to SEQ ID NO: 17789

SEQ ID NO: 17843 - DNA, 201 bp, Homo sapiens; identical to SEQ ID NO: 17790

SEQ ID NO: 17844 - DNA, 201 bp, Homo sapiens; identical to SEQ ID NO: 17791

SEQ ID NO: 17845 - DNA, 201 bp, Homo sapiens; identical to SEQ ID NO: 17792

SEQ ID NO: 17846 - DNA, 201 bp, Homo sapiens; identical to SEQ ID NO: 17793

SEQ ID NO: 17847 - DNA, 201 bp, Homo sapiens; identical to SEQ ID NO: 17794

SEQ ID NO: 17848 - DNA, 201 bp, Homo sapiens; identical to SEQ ID NO: 17795

SEQ ID NO: 17849 - DNA, 201 bp, Homo sapiens
cgctccacagtcatccggctgaagaagacctgttggactggatcttctcgggttttctttcagatattgttttgtatttacccatgaagacattgtttttyggactctgcaaataggacatttcaaagatgagtgaaaaaaaattggaaacaactgcacagcagcggaaatgtcctgaatggatgaatgtgcagaataaaa

SEQ ID NO: 17850 - DNA, 201 bp, Homo sapiens
gaaaaaaaattggaaacaactgcacagcagcggaaatgtcctgaatggatgaatgtgcagaataaaagatgtgctgtagaagaaagaaaggcatgtgttcrgaagagtgtttttgaagatgacctccccttcttagaattcactggatccattgtgtatagttacgatgctagtgattgctctttcctgtcagaagatatt

SEQ ID NO: 17851 - DNA, 201 bp, Homo sapiens
tcaaagatgagtgaaaaaaaattggaaacaactgcacagcagcggaaatgtcctgaatggatgaatgtgcagaataaaagatgtgctgtagaagaaagaarggcatgtgttcggaagagtgtttttgaagatgacctccccttcttagaattcactggatccattgtgtatagttacgatgctagtgattgctctttcctg

SEQ ID NO: 17852 - DNA, 201 bp, Homo sapiens
taggaattgaaggagatcagtggaaacttctacgtgactttgatatcaaattgaagaattttgtggagttgacagatgttgccaataaaaagctgaaatgyacagagacctggagccttaacagtctggttaaacacctcttaggtaaacagctcctgaaagacaagtctatccgctgtagcaattggagtaaatttcctc

SEQ ID NO: 17853 - DNA, 201 bp, Homo sapiens
tagctaaacatgatggagaagatgtacttggaaataaagtggaacgaaaagaagatggatttgaagatggagtagaagacaacaaattgaaagagaatatrgaaagagcttgtttgatgtcgttagatattacagaacatgaactccaaattttggaacagcagtctcaggaagaatatcttagtgatattgcttataaat

SEQ ID NO: 17854 - DNA, 201 bp, Homo sapiens
ttgtacgttgcttaaatctgagaaatcctcagatcacctgtactggttttgatcgaccaaacctgtatttagaagttaggcgaaaaacagggaatatcctkcaggatctgcagccatttcttgtcaaaacaagttcccactgggaatttgaaggtccaacaatcatctactgtccttctagaaaaatgacacaacaagtta

SEQ ID NO: 17855 - DNA, 201 bp, Homo sapiens
gcgcccttacgaaaaagggtagaaattggcttcataaagctaatacagaatctcagagcctcatccttcaagctaatgaagaattgtgtccaaagaagttkcttctgcctagttcgaaaactgtatcttcgggcaccaaagagcattgttataatcaagtaccagttgaattaagtacagagaagaagtctaacttggaga

SEQ ID NO: 17856 - DNA, 201 bp, Homo sapiens
ttgtcaaaacaagttcccactgggaatttgaaggtccaacaatcatctactgtccttctagaaaaatgacacaacaagttacaggtgaacttaggaaactkaatctatcctgtggaacataccatgcgggcatgagttttagcacaaggaaagacattcatcataggtttgtaagagatgaaattcagtgtgtcatagcta

SEQ ID NO: 17857 - DNA, 201 bp, Homo sapiens
atcaatactgagacttcatctgcagagagaaagagacgattacctgtgtggtttgccaaaggaagtgataccagcaagaaattaatggacaaaacgaaaasgggaggtctttttagttaagctggcaattaccagaacaattatgtttcttgctgtattataagaggatagctatattttatttctgaagagtaaggagta

SEQ ID NO: 17858 - DNA, 201 bp, Homo sapiens
atcatttagctaaacatgatggagaagatgtacttggaaataaagtggaacgaaaagaagatggatttgaagatggagtagaagacaacaaattgaaagaraatatggaaagagcttgtttgatgtcgttagatattacagaacatgaactccaaattttggaacagcagtctcaggaagaatatcttagtgatattgctt

SEQ ID NO: 17859 - DNA, 201 bp, Homo sapiens
atttgacatggagtggccaccattatacaatagagggaaacttggcaaagttgcactaattcagttgtgtgtttctgagagcaaatgttacttgttccacrtttcttccatgtcagtttttccccagggattaaaaatgttgcttgaaaataaagcagttaaaaaggcaggtgtaggaattgaaggagatcagtggaaact

SEQ ID NO: 17860 - DNA, 201 bp, Homo sapiens
cctaatcagaatgttagttcctgaaaacattgacacgtaccttatccacatggcaattgagatccttaaacatggtcctgacagcggacttcaaccttcaygtgatgtcaacaaaaggagatgttttcccggttctgaagagatctgttcaagttctaagagaagcaaggaagaagtaggcatcaatactgagacttcatc

SEQ ID NO: 17861 - DNA, 201 bp, Homo sapiens
tcaacctcttttgtgtatcccaccagacttttttatattcatttgtttttaggtaaaatataaaagtctcgtatattcccatttttctgcattgcattachagaaggtagtggcgcctattaaatatgtgatatgttgttgtccagccatggcttctgcatttgcatgcttttgtgtgtgcatctgcaataccctgtgaat

SEQ ID NO: 17862 - DNA, 201 bp, Homo sapiens
atatgagtaaaattagcctaatcagaatgttagttcctgaaaacattgacacgtaccttatccacatggcaattgagatccttaaacatggtcctgacagyggacttcaaccttcatgtgatgtcaacaaaaggagatgttttcccggttctgaagagatctgttcaagttctaagagaagcaaggaagaagtaggcatca

SEQ ID NO: 17863 - DNA, 201 bp, Homo sapiens
aaaatgaaaataaaaatcattcatagttttactagtagctaatcacagtcaacctcttttgtgtatcccaccagacttttttatattcatttgtttttagktaaaatataaaagtctcgtatattcccatttttctgcattgcattaccagaaggtagtggcgcctattaaatatgtgatatgttgttgtccagccatggc

SEQ ID NO: 17864 - DNA, 201 bp, Homo sapiens
aagggtagaaattggcttcataaagctaatacagaatctcagagcctcatccttcaagctaatgaagaattgtgtccaaagaagttgcttctgcctagttygaaaactgtatcttcgggcaccaaagagcattgttataatcaagtaccagttgaattaagtacagagaagaagtctaacttggagaagttatattcttat

SEQ ID NO: 17865 - DNA, 201 bp, Homo sapiens; identical to SEQ ID NO: 17849

SEQ ID NO: 17866 - DNA, 201 bp, Homo sapiens; identical to SEQ ID NO: 17850

SEQ ID NO: 17867 - DNA, 201 bp, Homo sapiens; identical to SEQ ID NO: 17851

SEQ ID NO: 17868 - DNA, 201 bp, Homo sapiens; identical to SEQ ID NO: 17852

SEQ ID NO: 17869 - DNA, 201 bp, Homo sapiens; identical to SEQ ID NO: 17853

SEQ ID NO: 17870 - DNA, 201 bp, Homo sapiens; identical to SEQ ID NO: 17854

SEQ ID NO: 17871 - DNA, 201 bp, Homo sapiens; identical to SEQ ID NO: 17855

SEQ ID NO: 17872 - DNA, 201 bp, Homo sapiens; identical to SEQ ID NO: 17856

SEQ ID NO: 17873 - DNA, 201 bp, Homo sapiens; identical to SEQ ID NO: 17857

SEQ ID NO: 17874 - DNA, 201 bp, Homo sapiens; identical to SEQ ID NO: 17858

SEQ ID NO: 17875 - DNA, 201 bp, Homo sapiens; identical to SEQ ID NO: 17859

SEQ ID NO: 17876 - DNA, 201 bp, Homo sapiens; identical to SEQ ID NO: 17860

SEQ ID NO: 17877 - DNA, 201 bp, Homo sapiens; identical to SEQ ID NO: 17861

SEQ ID NO: 17878 - DNA, 201 bp, Homo sapiens; identical to SEQ ID NO: 17862

SEQ ID NO: 17879 - DNA, 201 bp, Homo sapiens; identical to SEQ ID NO: 17863

SEQ ID NO: 17880 - DNA, 201 bp, Homo sapiens; identical to SEQ ID NO: 17864

SEQ ID NO: 17881 - DNA, 201 bp, Homo sapiens; identical to SEQ ID NO: 17849

SEQ ID NO: 17882 - DNA, 201 bp, Homo sapiens; identical to SEQ ID NO: 17850

SEQ ID NO: 17883 - DNA, 201 bp, Homo sapiens; identical to SEQ ID NO: 17851

SEQ ID NO: 17884 - DNA, 201 bp, Homo sapiens; identical to SEQ ID NO: 17852

SEQ ID NO: 17885 - DNA, 201 bp, Homo sapiens; identical to SEQ ID NO: 17853

SEQ ID NO: 17886 - DNA, 201 bp, Homo sapiens; identical to SEQ ID NO: 17854

SEQ ID NO: 17887 - DNA, 201 bp, Homo sapiens; identical to SEQ ID NO: 17855

SEQ ID NO: 17888 - DNA, 201 bp, Homo sapiens; identical to SEQ ID NO: 17856

SEQ ID NO: 17889 - DNA, 201 bp, Homo sapiens; identical to SEQ ID NO: 17857

SEQ ID NO: 17890 - DNA, 201 bp, Homo sapiens; identical to SEQ ID NO: 17858

SEQ ID NO: 17891 - DNA, 201 bp, Homo sapiens; identical to SEQ ID NO: 17859

SEQ ID NO: 17892 - DNA, 201 bp, Homo sapiens; identical to SEQ ID NO: 17860

SEQ ID NO: 17893 - DNA, 201 bp, Homo sapiens; identical to SEQ ID NO: 17861

SEQ ID NO: 17894 - DNA, 201 bp, Homo sapiens; identical to SEQ ID NO: 17862

SEQ ID NO: 17895 - DNA, 201 bp, Homo sapiens; identical to SEQ ID NO: 17863

SEQ ID NO: 17896 - DNA, 201 bp, Homo sapiens; identical to SEQ ID NO: 17864

SEQ ID NO: 17897 - DNA, 201 bp, Homo sapiens
gctaatccaatccagttcactctaaataaggagaagctaaaagataaagaaaaggtatcaaaagaggaagaagagaaggagaggaacacagcagccatggygtgctctttggagaatagagatgaatgtctgatgtgtggatcctgaggaaagacttggaagagaccagcatgtcttcagtagccaaactacttcttgagc

SEQ ID NO: 17898 - DNA, 201 bp, Homo sapiens
tgaacatccacattgctgagcctaactatggcaaactcactagtatgcacttctacggctggaagcagggtttgaagactgggatgtattatttaaggacragaccagcagctaatccaatccagttcactctaaataaggagaagctaaaagataaagaaaaggtatcaaaagaggaagaagagaaggagaggaacacag

SEQ ID NO: 17899 - DNA, 201 bp, Homo sapiens
cactctgtcaccttctcgatcccgccggcgctttagagccgcagtccagtcttggatccttcagagcctcagccactagctgcgatgcatgtgatcaagcragatggccgccaagaacgagtcatgtttgacaaaattacatctcgaatccagaagctttgttatggactcaatatggattttgttgatcctgctcagatc

SEQ ID NO: 17900 - DNA, 201 bp, Homo sapiens
acattgctgagcctaactatggcaaactcactagtatgcacttctacggctggaagcagggtttgaagactgggatgtattatttaaggacaagaccagcrgctaatccaatccagttcactctaaataaggagaagctaaaagataaagaaaaggtatcaaaagaggaagaagagaaggagaggaacacagcagccatgg

SEQ ID NO: 17901 - DNA, 201 bp, Homo sapiens
gagcatagataggtatagtgggtttgcttgaggtggtaaggctttgctggaccctgttgcaggcaaaaggagtaattgatttaaagtactgttaatgatgwtaatgatttttttttaaactcatatattgggattttcaccaaaataatgcttttgaaaaaaagaaaaaaaaaacggatatattgagaatcaaagtagaag

SEQ ID NO: 17902 - DNA, 109 bp, Homo sapiens
tctctagaagcaaaactgagtgataactcatgagaagtactgataggacctttatctggatatggtcctataggttattctgaaataaagataaacatttytaagtgat

SEQ ID NO: 17903 - DNA, 201 bp, Homo sapiens
aaaaaaaaaacggatatattgagaatcaaagtagaagttttaggaatgcaaaataagtcatcttgcatacagggagtggttaagtaaggtttcatcacccmtttagcactgcttttctgaagacttcagttttgttaaggagatttagttttactgctttgactggtgggtctctagaagcaaaactgagtgataactcat

SEQ ID NO: 17904 - DNA, 201 bp, Homo sapiens
gttaagtaaggtttcatcacccctttagcactgcttttctgaagacttcagttttgttaaggagatttagttttactgctttgactggtgggtctctagawgcaaaactgagtgataactcatgagaagtactgataggacctttatctggatatggtcctataggttattctgaaataaagataaacatttctaagtgat

SEQ ID NO: 17905 - DNA, 201 bp, Homo sapiens
tagtgggtttgcttgaggtggtaaggctttgctggaccctgttgcaggcaaaaggagtaattgatttaaagtactgttaatgatgttaatgatttttttttaaactcatatattgggattttcaccaaaataatgcttttgaaaaaaagaaaaaaaaaacggatatattgagaatcaaagtagaagttttaggaatgcaaa

SEQ ID NO: 17906 - DNA, 201 bp, Homo sapiens
gtgctgtctggctccaactccagttctttcccctgagcagcgcctggaacctaacccttcccactctgtcaccttctcgatcccgccggcgctttagagcsgcagtccagtcttggatccttcagagcctcagccactagctgcgatgcatgtgatcaagcgagatggccgccaagaacgagtcatgtttgacaaaattac

SEQ ID NO: 17907 - DNA, 201 bp, Homo sapiens
gcgtcacgggtggcgggcgcgggaaggggatttggattgttgcgcctctgctctgaagaaagtgctgtctggctccaactccagttctttcccctgagcarcgcctggaacctaacccttcccactctgtcaccttctcgatcccgccggcgctttagagccgcagtccagtcttggatccttcagagcctcagccactag

SEQ ID NO: 17908 - DNA, 201 bp, Homo sapiens
tgctgtgagttgtattcgggctactggcagctacattgctgggactaatggcaattccaatggccttgtaccgatgctgagagtatataacaacacagctmgatatgtggatcaaggtgggaacaagcgtcctggggcatttgctatttacctggagccttggcatttagacatctttgaattccttgatttaaagaagaa

SEQ ID NO: 17909 - DNA, 201 bp, Homo sapiens
tgccttggggcccctatcaagggctactccttcttccctggagaggaagaggtgctgatccccccctttgagaccttccaagtgatcaatgccagcagacyggcccagggccccgcccgcatctacctccgagccctgggcaagcacagcacctacaactgcgagtacatcaaagacaagaagtgcaagtctgggccttgc

SEQ ID NO: 17910 - DNA, 201 bp, Homo sapiens
ttccaggccaaccaggtgtatgcagacagctggacactggcaagcagccaatggcaggagcgtcaggccaggtggccagagtggagtctcagccccacccrtccatccccgccacccctgggcttccgcgatgagcatggggtggccctcctggcctacacagccaacagccccctgcacaaggagttcaatgcagccgtg

SEQ ID NO: 17911 - DNA, 201 bp, Homo sapiens
gtcaggccaggtggccagagtggagtctcagccccacccgtccatccccgccacccctgggcttccgcgatgagcatggggtggccctcctggcctacacrgccaacagccccctgcacaaggagttcaatgcagccgtgcgtgaggcgggccgctcccgggcccactacctccaccacttctccttcaagacactccatt

SEQ ID NO: 17912 - DNA, 201 bp, Homo sapiens
acaagaagtgcaagtctgggccttgccatctggataattcagccatgggtcagagccccctctctgcagtctggtctttgctgctgctgctctggttcctygtggtgagggcctttccagatggtccaggcctcctttgatgcatgagacacgggacagcctcgcctgctgcctctgcccatcctgaggatgttggccatg

SEQ ID NO: 17913 - DNA, 201 bp, Homo sapiens
tggccagagtggagtctcagccccacccgtccatccccgccacccctgggcttccgcgatgagcatggggtggccctcctggcctacacagccaacagccscctgcacaaggagttcaatgcagccgtgcgtgaggcgggccgctcccgggcccactacctccaccacttctccttcaagacactccatttcctgctgact

SEQ ID NO: 17914 - DNA, 201 bp, Homo sapiens
aaccaggtgtatgcagacagctggacactggcaagcagccaatggcaggagcgtcaggccaggtggccagagtggagtctcagccccacccgtccatcccygccacccctgggcttccgcgatgagcatggggtggccctcctggcctacacagccaacagccccctgcacaaggagttcaatgcagccgtgcgtgaggcg

SEQ ID NO: 17915 - DNA, 201 bp, Homo sapiens
ttcttgtgtctgtgggcctcatggaagcacttcaggcccagagccaccccatcacacgacgagacctcttctctcaagagattcagctggacatggccctrgcctcctttgatgaccagtacgctggctgtgctgctgccatgacagctgctctcccggatctcaaccacacggagttccaggccaaccaggtgtatgcag

SEQ ID NO: 17916 - DNA, 201 bp, Homo sapiens
ctgcagtctggtctttgctgctgctgctctggttcctcgtggtgagggcctttccagatggtccaggcctcctttgatgcatgagacacgggacagcctcrcctgctgcctctgcccatcctgaggatgttggccatgtgtgctttcagtgtaaccaagattcctgtcaatcccatctgcagggaactctgggaccttctc

SEQ ID NO: 17917 - DNA, 201 bp, Homo sapiens
gagttccaggccaaccaggtgtatgcagacagctggacactggcaagcagccaatggcaggagcgtcaggccaggtggccagagtggagtctcagccccasccgtccatccccgccacccctgggcttccgcgatgagcatggggtggccctcctggcctacacagccaacagccccctgcacaaggagttcaatgcagcc

SEQ ID NO: 17918 - DNA, 201 bp, Homo sapiens
tgtgggcctcatggaagcacttcaggcccagagccaccccatcacacgacgagactctcttgtcagcacagatgtaacttctgctctaatccatgagtccygaggctcctctcatcacggctcactgtagcctcaaactcctggtttcaagagatcctcccacctcagcctcccaagtagctgggactacagatatgtgcc

SEQ ID NO: 17919 - DNA, 201 bp, Homo sapiens
acttcaggcccagagccaccccatcacacgacgagactctcttgtcagcacagatgtaacttctgctctaatccatgagtcctgaggctcctctcatcacrgctcactgtagcctcaaactcctggtttcaagagatcctcccacctcagcctcccaagtagctgggactacagatatgtgccaccacacctgactaattt

SEQ ID NO: 17920 - DNA, 201 bp, Homo sapiens
tatccagcgacagcgagagcagcagtgagtccgagggcacgaagtcctcctcctccgcctctgatggcgaaagcgaggggaaaagaggccggcagaagccraaggctgccccagagggagccggggcgctggcacagggcagttccctggagccggggcggcctgcagcaccgagtctccccggagaggccgagcctggcg

SEQ ID NO: 17921 - DNA, 201 bp, Homo sapiens
ccgacgagatggccaaggcgctggaggcggagctcaacgacctcatgtgagcgcgggcagcgggcagggactgaagcctgaccgacctccagcagcactcrgacgtccccggaccagccctcagtctcggtccacgctgctttcttcccaaaggacatgtatatttgcagagctccacatacagaaacacattattttgca

SEQ ID NO: 17922 - DNA, 201 bp, Homo sapiens
gaggagcagctcttcccgctcagggacgatcacaccaaggcacagagggagaacagccctgcggcctttcccgaccgggagggtgtgccccccaccgcctygttccacccgatgccggttcttcccaaggcccagcctggccccgaggttcggatctacgactccaacacggggaagctcatcaggacgggcgcccggggg

SEQ ID NO: 17923 - DNA, 201 bp, Homo sapiens
ttcacttccagctgggccggggtgagcccatgctgcacacgcgcctgcgtccacactgcaaggacttcctggagaagatcgccaagctgtacgagctgcaygtcttcaccttcggcagccggctgtacgcacacaccatcgcaggctttttagaccccgagaagaagcttttttctcaccgaatattatcaagggatgaat

SEQ ID NO: 17924 - DNA, 201 bp, Homo sapiens
ctgcggcctttcccgaccgggagggtgtgccccccaccgccttgttccacccgatgccggttcttcccaaggcccagcctggccccgaggttcggatctaygactccaacacggggaagctcatcaggacgggcgcccgggggcccccagcaccctccagctccctacccatccgccaggagccctcttccttcagagcgg

SEQ ID NO: 17925 - DNA, 201 bp, Homo sapiens
tgcgtgcgccccgcgcggccggaacgcaggctgaggtcggagcgcgcgggcgtggtgcgggagctgtgcgcgcagccgggccaggtggtcgccccaggagyggttctggtgaggttggaaggatgcagccacccggttgtcatgaaaggcctgtgtgctgaatgtggccaagacctcacccagttgcagagtaagaacggg

SEQ ID NO: 17926 - DNA, 201 bp, Homo sapiens
ttcggatctacgactccaacacggggaagctcatcaggacgggcgcccgggggcccccagcaccctccagctccctacccatccgccaggagccctcttcyttcagagcggttccgccaccccagccgcagatgtttggtgaagagctgcctgacgctcaggacggagagcagcctggcccttctagaagaaagcgacagc

SEQ ID NO: 17927 - DNA, 201 bp, Homo sapiens
aggtgctggcagacgtggccataattttcagtgggctacacccgacaaacttcccgatagagaagacgcgggagcattaccacgccacggcgctgggagcraagatcctcactcggctggtgctgagccccgacgcccctgacagggccacgcacctgatcgccgcgcgagctggcacagagaaggtgctgcaggcacagg

SEQ ID NO: 17928 - DNA, 201 bp, Homo sapiens
tcttccttcagagcggttccgccaccccagccgcagatgtttggtgaagagctgcctgacgctcaggacggagagcagcctggcccttctagaagaaagcracagcccagtatgtctgagacaatgccgctgtacactctttgtaaggaggatttagagagtatggacaaagaggtggacgacatccttggagaaggcagc

SEQ ID NO: 17929 - DNA, 201 bp, Homo sapiens
ctcttctcgtgggtgtgtggcagcggtgagcacccgcctcctccctcgctgggatccagctccttagctgtgaaacagaaacgaaaaaattcccacggacrggaccgtgtggaacggcagaaatggaaaccgcagaactgcgagcgtgatgatctcagggtttcgcctctgagcataagaaccaggcttgtagctggtatt

SEQ ID NO: 17930 - DNA, 201 bp, Homo sapiens
cccgcagggagcggacgctcggggcacctgcaggccacaagaggaagctgaatgaagaggacgccgccagcgagtccagcagggagtccagcaacgaggaygagggcagcagctccgaggccgacgagatggccaaggcgctggaggcggagctcaacgacctcatgtgagcgcgggcagcgggcagggactgaagcctga

SEQ ID NO: 17931 - DNA, 201 bp, Homo sapiens
tgaacggcagcgaggccgccaccccgcgggactcaccccgccccgggaagccagacgagagggacatctggccccctgcccaggcccccaccagcagccargagctggcaggcgctcctgagccccagggatcctgtgcgcagggtggccgggtggcaccgggacagcggcctgcccagggtgccacgggcactgacctgg

SEQ ID NO: 17932 - DNA, 201 bp, Homo sapiens
gcctgggcaacggctgtgccgacaggaaggaggcggagaccgagtcacagaacagcgagctgtcgggggtcactgcgggtgagtccctggaccagagcatrgaggaggaggaggaggaggacacggatgaggatgaccacctcatctacctggaggagatcctggtccgtgtacacactgactactatgccaagtatgacc

SEQ ID NO: 17933 - DNA, 201 bp, Homo sapiens
aagccgaaggctgccccagagggagccggggcgctggcacagggcagttccctggagccggggcggcctgcagcaccgagtctccccggagaggccgagcmtggcgcgcatgccccggacaaggagcctgagctgggtgggcaggaggagggcgagcgggatggcctctgcggcctgggcaacggctgtgccgacaggaag

SEQ ID NO: 17934 - DNA, 201 bp, Homo sapiens
gtggagactcaatggtttgcattattgatgatcgagaagatgtctggaagtttgcccccaatctgataactgtgaagaaatatgtatacttccagggcacrggtgatatgaatgcgccccctgggtcccgagaatctcagacgagaaagaaagtaaatcattctcgaggcactgaggtctcagagccatctccgcccgtga

SEQ ID NO: 17935 - DNA, 201 bp, Homo sapiens
agggcagcagctccgaggccgacgagatggccaaggcgctggaggcggagctcaacgacctcatgtgagcgcgggcagcgggcagggactgaagcctgacygacctccagcagcactcggacgtccccggaccagccctcagtctcggtccacgctgctttcttcccaaaggacatgtatatttgcagagctccacataca

SEQ ID NO: 17936 - DNA, 201 bp, Homo sapiens
gtctggaagtttgcccccaatctgataactgtgaagaaatatgtatacttccagggcacgggtgatatgaatgcgccccctgggtcccgagaatctcagaygagaaagaaagtaaatcattctcgaggcactgaggtctcagagccatctccgcccgtgagagaccctgagggggtaacgcaggcccctggagtggagccc

SEQ ID NO: 17937 - DNA, 201 bp, Homo sapiens
cccccaccgccttgttccacccgatgccggttcttcccaaggcccagcctggccccgaggttcggatctacgactccaacacggggaagctcatcaggacsggcgcccgggggcccccagcaccctccagctccctacccatccgccaggagccctcttccttcagagcggttccgccaccccagccgcagatgtttggtg

SEQ ID NO: 17938 - DNA, 201 bp, Homo sapiens; identical to SEQ ID NO: 17920

SEQ ID NO: 17939 - DNA, 201 bp, Homo sapiens; identical to SEQ ID NO: 17921

SEQ ID NO: 17940 - DNA, 201 bp, Homo sapiens; identical to SEQ ID NO: 17922

SEQ ID NO: 17941 - DNA, 201 bp, Homo sapiens; identical to SEQ ID NO: 17923

SEQ ID NO: 17942 - DNA, 201 bp, Homo sapiens; identical to SEQ ID NO: 17924

SEQ ID NO: 17943 - DNA, 201 bp, Homo sapiens; identical to SEQ ID NO: 17925

SEQ ID NO: 17944 - DNA, 201 bp, Homo sapiens; identical to SEQ ID NO: 17926

SEQ ID NO: 17945 - DNA, 201 bp, Homo sapiens; identical to SEQ ID NO: 17927

SEQ ID NO: 17946 - DNA, 201 bp, Homo sapiens; identical to SEQ ID NO: 17928

SEQ ID NO: 17947 - DNA, 201 bp, Homo sapiens; identical to SEQ ID NO: 17929

SEQ ID NO: 17948 - DNA, 201 bp, Homo sapiens
agaggagcgcggcagggggccgggggcccagaggccacaagaggaagctgaatgaagaggacgccgccagcgagtccagcagggagtccagcaacgaggaygagggcagcagctccgaggccgacgagatggccaaggcgctggaggcggagctcaacgacctcatgtgagcgcgggcagcgggcagggactgaagcctga

SEQ ID NO: 17949 - DNA, 201 bp, Homo sapiens; identical to SEQ ID NO: 17931

SEQ ID NO: 17950 - DNA, 201 bp, Homo sapiens; identical to SEQ ID NO: 17932

SEQ ID NO: 17951 - DNA, 201 bp, Homo sapiens; identical to SEQ ID NO: 17933

SEQ ID NO: 17952 - DNA, 201 bp, Homo sapiens; identical to SEQ ID NO: 17934

SEQ ID NO: 17953 - DNA, 201 bp, Homo sapiens; identical to SEQ ID NO: 17935

SEQ ID NO: 17954 - DNA, 201 bp, Homo sapiens; identical to SEQ ID NO: 17936

SEQ ID NO: 17955 - DNA, 201 bp, Homo sapiens; identical to SEQ ID NO: 17937

SEQ ID NO: 17956 - DNA, 201 bp, Homo sapiens; identical to SEQ ID NO: 17920

SEQ ID NO: 17957 - DNA, 201 bp, Homo sapiens; identical to SEQ ID NO: 17921

SEQ ID NO: 17958 - DNA, 201 bp, Homo sapiens; identical to SEQ ID NO: 17922

SEQ ID NO: 17959 - DNA, 201 bp, Homo sapiens; identical to SEQ ID NO: 17923

SEQ ID NO: 17960 - DNA, 201 bp, Homo sapiens
ctgcggcctttcccgaccgggagggtgtgccccccaccgccttgttccacccgatgccggttcttcccaaggcccagcctggccccgaggttcggatctaygactccaacacggggaagctcatcaggacgggcgcccgggggcccccagcaccctccagctccctacccatccgccaggagccctcttccttcaggtgga

SEQ ID NO: 17961 - DNA, 201 bp, Homo sapiens; identical to SEQ ID NO: 17925

SEQ ID NO: 17962 - DNA, 201 bp, Homo sapiens
ttcggatctacgactccaacacggggaagctcatcaggacgggcgcccgggggcccccagcaccctccagctccctacccatccgccaggagccctcttcyttcaggtggacgacatccttggagaaggcagcgacgacagcgacagcgagaagaggaggcctgaggagcaggaggaggagccccagccccggaagccagg

SEQ ID NO: 17963 - DNA, 201 bp, Homo sapiens; identical to SEQ ID NO: 17927

SEQ ID NO: 17964 - DNA, 201 bp, Homo sapiens; identical to SEQ ID NO: 17929

SEQ ID NO: 17965 - DNA, 201 bp, Homo sapiens; identical to SEQ ID NO: 17948

SEQ ID NO: 17966 - DNA, 201 bp, Homo sapiens; identical to SEQ ID NO: 17931

SEQ ID NO: 17967 - DNA, 201 bp, Homo sapiens; identical to SEQ ID NO: 17932

SEQ ID NO: 17968 - DNA, 201 bp, Homo sapiens; identical to SEQ ID NO: 17933

SEQ ID NO: 17969 - DNA, 201 bp, Homo sapiens; identical to SEQ ID NO: 17934

SEQ ID NO: 17970 - DNA, 201 bp, Homo sapiens; identical to SEQ ID NO: 17936

SEQ ID NO: 17971 - DNA, 201 bp, Homo sapiens; identical to SEQ ID NO: 17935

SEQ ID NO: 17972 - DNA, 201 bp, Homo sapiens
cccccaccgccttgttccacccgatgccggttcttcccaaggcccagcctggccccgaggttcggatctacgactccaacacggggaagctcatcaggacsggcgcccgggggcccccagcaccctccagctccctacccatccgccaggagccctcttccttcaggtggacgacatccttggagaaggcagcgacgacag

SEQ ID NO: 17973 - DNA, 165 bp, Homo sapiens
atgtttggtgaagagctgcctgacgctcaggacggagagcagcctggcccttctagaagaaagcracagcccagtatgtctgagacaatgccgctgtacactctttgtaaggaggatttagagagtatggacaaagaggtgagccaaccccacgccccggtgccc

SEQ ID NO: 17974 - DNA, 188 bp, Homo sapiens
atgcgcgtgcgcggcccggcccggctgatcgcttcgggtgctcgactcctgttgcgcatgctcagcgcgctgcccggctggggacccrcgcacctgcagcgcccgctgctcggccctgcatcctgcctgggcatcctgcgcccggccatgacggcgcactcattcgccctcccggtcatcatcttcac

SEQ ID NO: 17975 - DNA, 201 bp, Homo sapiens
gtctttccctttacagacggggcagatgccaggactcagcccatcctgaggaggacacgtgtcctcatggagagggtgctccggcccaggcgggggagtcrgtgcccagtcagcagctctgccaccatcctgctgggaactgggggggcctctattgggttataggcaaggccttttctctggcatggaattgttaatttt

SEQ ID NO: 17976 - DNA, 128 bp, Homo sapiens
atgcgcgtgcgcggcccggcccggctgmtcgcttcgggtgctcgactcctgttgcgcatgctcagcgcgctgcccggctggggacccgcgcacctgcagcgcccgctgctcggccctgcatcctgcct

SEQ ID NO: 17977 - DNA, 201 bp, Homo sapiens
tggtgctccaggggaagaaacgacagcctcacttctgtatggactgctgatgtggcctgccatcctgttcagcgggcattgtctttggagcagcaggagamtaggatgcctctcactcacatgccagttcctggctggccagctgctcagggctcaggctggggcctcccattgacatcctccccctacactccctctctg

SEQ ID NO: 17978 - DNA, 201 bp, Homo sapiens
taaagtcccgccacgcccccacaatatttacatatttatgaggaaccatcgagatctttgaagaaccagctagcctagaggagccagaacatctcgctccycgcgcgtttccgtttccgctaggactctggcagttggtgagcatcatggcaaccgttacagccacaaccaaagtcccggagatccgtgatgtaacaagga

SEQ ID NO: 17979 - DNA, 201 bp, Homo sapiens
ctacgacctgggcaccaagatgattgagtccctgaccaaggacaaggtccaggccggggacgtgatcaccatcgacaaggcgacgggcaagatctccaagytgggccgctccttcacacgcgcccgcgactacgacgctatgggctcccagaccaagttcgtgcagtgcccagatggggagctccagaaacgcaaggaggt

SEQ ID NO: 17980 - DNA, 141 bp, Homo sapiens
gagcttgccgctgcgctttacggaaacgagtggccttcagytctgtcaatctggagctggaggcctcaaagtggggaggaggaggagggtgggataaagaggaaaggagcgtggaggacgtgtggttactcaaagaacagc

SEQ ID NO: 17981 - DNA, 201 bp, Homo sapiens
tatttatgaggaaccatcgagatctttgaagaaccagctagcctagaggagccagaacatctcgctcctcgcgcgtttccgtttccgctaggactctggcrgttggtgagcatcatggcaaccgttacagccacaaccaaagtcccggagatccgtgatgtaacaaggattgagcgaatcggtgcccactcccacatccgg

SEQ ID NO: 17982 - DNA, 146 bp, Homo sapiens
tttccaccagagttctgacactgtgactctgtataaaatggttgggaagctgcacccaccctgtgtatgtgtggttgccctgagcccacagaaagacacckccagagtgcggattgagaagcctttattgtgggaggatcggggtg

SEQ ID NO: 17983 - DNA, 136 bp, Homo sapiens
agttctgacactgtgactctgtataaaatggttgggaagctgcacccaccctgtgtatgtgtggttgccctgagcccacagaaagacaccgccagagtgcrgattgagaagcctttattgtgggaggatcggggtg

SEQ ID NO: 17984 - DNA, 201 bp, Homo sapiens
gtgcccactcccacatccggggactggggctggacgatgccttggagcctcggcaggcttcgcaaggcatggtgggtcagctggcggcacggcgggcggcyggcgtggtgctggagatgatccgggaagggaagattgccggtcgggcagtccttattgctggccagccgggcacggggaagacggccatcgccatgggca

SEQ ID NO: 17985 - DNA, 201 bp, Homo sapiens
tggggctgagcaaaaggaggaggagccaggagacattgggaatggacccaggagttccggacgcccgtcttccagcgcagcctcggtgggagggcggggcmtaaagtcccgccacgcccccacaatatttacatatttatgaggaaccatcgagatctttgaagaaccagctagcctagaggagccagaacatctcgctcc

SEQ ID NO: 17986 - DNA, 201 bp, Homo sapiens
cggagatccgtgatgtaacaaggattgagcgaatcggtgcccactcccacatccggggactggggctggacgatgccttggagcctcggcaggcttcgcarggcatggtgggtcagctggcggcacggcgggcggctggcgtggtgctggagatgatccgggaagggaagattgccggtcgggcagtccttattgctggcc

SEQ ID NO: 17987 - DNA, 201 bp, Homo sapiens
taaagtcccgccacgcccccacaatatttacatatttatgaggaaccatcgagatctttgaagaaccagctagcctagaggagccagaacatctcgctccycgcgcgtttccgtttccgctaggactctggcagttgacagccacaaccaaagtcccggagatccgtgatgtaacaaggattgagcgaatcggtgcccact

SEQ ID NO: 17988 - DNA, 201 bp, Homo sapiens; identical to SEQ ID NO: 17979

SEQ ID NO: 17989 - DNA, 141 bp, Homo sapiens; identical to SEQ ID NO: 17980

SEQ ID NO: 17990 - DNA, 201 bp, Homo sapiens
tatttatgaggaaccatcgagatctttgaagaaccagctagcctagaggagccagaacatctcgctcctcgcgcgtttccgtttccgctaggactctggcrgttgacagccacaaccaaagtcccggagatccgtgatgtaacaaggattgagcgaatcggtgcccactcccacatccggggactggggctggacgatgcc

SEQ ID NO: 17991 - DNA, 146 bp, Homo sapiens; identical to SEQ ID NO: 17982

SEQ ID NO: 17992 - DNA, 136 bp, Homo sapiens; identical to SEQ ID NO: 17983

SEQ ID NO: 17993 - DNA, 201 bp, Homo sapiens; identical to SEQ ID NO: 17984

SEQ ID NO: 17994 - DNA, 201 bp, Homo sapiens; identical to SEQ ID NO: 17985

SEQ ID NO: 17995 - DNA, 201 bp, Homo sapiens; identical to SEQ ID NO: 17986

SEQ ID NO: 17996 - DNA, 146 bp, Homo sapiens; identical to SEQ ID NO: 17982

SEQ ID NO: 17997 - DNA, 136 bp, Homo sapiens; identical to SEQ ID NO: 17983

SEQ ID NO: 17998 - DNA, 201 bp, Homo sapiens; identical to SEQ ID NO: 17979

SEQ ID NO: 17999 - DNA, 201 bp, Homo sapiens; identical to SEQ ID NO: 17984

SEQ ID NO: 18000 - DNA, 110 bp, Homo sapiens
gactctggcrgttggtgagcatcatggcaaccgttgaactccaactttcaaaatcatcttggcgcaacggccggttccgcagtccttggcgccagtgtgtgatgaggagg

SEQ ID NO: 18001 - DNA, 201 bp, Homo sapiens; identical to SEQ ID NO: 17986

SEQ ID NO: 18002 - DNA, 146 bp, Homo sapiens; identical to SEQ ID NO: 17982

SEQ ID NO: 18003 - DNA, 136 bp, Homo sapiens; identical to SEQ ID NO: 17983

SEQ ID NO: 18004 - DNA, 201 bp, Homo sapiens; identical to SEQ ID NO: 17979

SEQ ID NO: 18005 - DNA, 201 bp, Homo sapiens; identical to SEQ ID NO: 17984

SEQ ID NO: 18006 - DNA, 201 bp, Homo sapiens; identical to SEQ ID NO: 17986

SEQ ID NO: 18007 - DNA, 201 bp, Homo sapiens
ccagcactcgcctccctaccaatgactcacctgaagtgcaatacgaaataaaaggccagcgggcggcgtctgggtctctggcgcccccatgtggttgcgamactcccaaagccgtaagggccgacccaggcatcttggcccccagcccctcgtcgcgggttcaggtccgcccattactccttgtcgtgcggtcaaggatac

SEQ ID NO: 18008 - DNA, 201 bp, Homo sapiens
gaagtggacaaggactgggtccccgatgccgccggcaccagcctctatgtgcggcctgtgctcattgggaacgagccctcgctgggtgtcagccagcccasgcgcgcgctcctgttcgtcattctctgcccagtgggtgcctacttccctggaggctccgtgaccccggtctccctcctggccgacccagccttcatccgg

SEQ ID NO: 18009 - DNA, 201 bp, Homo sapiens
gcctggagtggtcagacagagtctactggacatggctcagacctggggtgagttccgggtggtggagcgcacgatcaccatgaagcagttgctgcgggccytggaggagggccgcgtgcgggaagtctttggctcgggcaccgcttgccaggtctgcccagtgcaccgaatcctgtacaaagacaggaacctccacattcc

SEQ ID NO: 18010 - DNA, 201 bp, Homo sapiens
ttccagaaggagctgaaggagatccagtacggaatcagagcccacgagtggatgttcccggtgtgaagctgcaggctgtgctccagatccaccgacccgtrgcatctcgtcacgccagcactcgcctccctaccaatgactcacctgaagtgcaatacgaaataaaaggccagcgggcggcgtctgggtctctggcgcccc

SEQ ID NO: 18011 - DNA, 201 bp, Homo sapiens
gcccacgagtggatgttcccggtgtgaagctgcaggctgtgctccagatccaccgacccgtagcatctcgtcacgccagcactcgcctccctaccaatgaytcacctgaagtgcaatacgaaataaaaggccagcgggcggcgtctgggtctctggcgcccccatgtggttgcgacactcccaaagccgtaagggccgacc

SEQ ID NO: 18012 - DNA, 201 bp, Homo sapiens; identical to SEQ ID NO: 18007

SEQ ID NO: 18013 - DNA, 201 bp, Homo sapiens; identical to SEQ ID NO: 18008

SEQ ID NO: 18014 - DNA, 201 bp, Homo sapiens; identical to SEQ ID NO: 18009

SEQ ID NO: 18015 - DNA, 201 bp, Homo sapiens; identical to SEQ ID NO: 18010

SEQ ID NO: 18016 - DNA, 201 bp, Homo sapiens; identical to SEQ ID NO: 18011

SEQ ID NO: 18017 - DNA, 201 bp, Homo sapiens
catctcggctcactgcaacctctgcctccccgattcaagcaattctcctgcctcagctttccgagtagctaagattacaggcgcccgccaccacgcccggstaattttttgtatttttagtagagacggggtttcatcatgttggaccaggctggtctctaactcctgacctcaggtaatccgcccgcttcggcctcccaa

SEQ ID NO: 18018 - DNA, 201 bp, Homo sapiens; identical to SEQ ID NO: 18007

SEQ ID NO: 18019 - DNA, 201 bp, Homo sapiens; identical to SEQ ID NO: 18008

SEQ ID NO: 18020 - DNA, 201 bp, Homo sapiens; identical to SEQ ID NO: 18009

SEQ ID NO: 18021 - DNA, 201 bp, Homo sapiens; identical to SEQ ID NO: 18010

SEQ ID NO: 18022 - DNA, 201 bp, Homo sapiens; identical to SEQ ID NO: 18011

SEQ ID NO: 18023 - DNA, 201 bp, Homo sapiens
tggtctcgatctcctgaccttgtcatccacctgtcttggcctcccaaagtgctgggattactggcatgagccactgtgcccagcccggatatttttttttwaattatttatttatttatttatttattgagacggagtcttgctctgtagcccaggccagagtgcagtggcgcgatctcagctcactgcaagctctgcctc

SEQ ID NO: 18024 - DNA, 201 bp, Homo sapiens
caggttatgcctcagcgctggaagggtgtggtgggcgacagcgcctacctccggcaggccatggactggttccgggcacggcacgaagcccccgttttcgwggtcaccagcaacggcatggagtggtgtaaagaaaacatcgacacctcccagggcgatgtgacgtttgctggcgatggacaggaggctacaccgtggaaa

SEQ ID NO: 18025 - DNA, 201 bp, Homo sapiens
ttgcggagggtgcgctccggccacgaaaagcggactgtggatctgccacctgcaagcagctcggccatgtggctccggagccatcgtcagctctgcctggycttcctgctagtctgtgtcctctctgtaatcttcttcctccatatccatcaagacagctttccacatggcctaggcctgtcgatcctgtgtccagaccgc

SEQ ID NO: 18026 - DNA, 201 bp, Homo sapiens
cttctggagcagaactttccagggatccagggacacttttttttaaagctcataaactgccaagagctccatatattgggtgtgagttcaggttgcctctyacaatgaaggaagttggtctttgtctgcaggtgggctgctgagggtctgggatctgttttctggaagtgtgcaggtataaacacaccctctgtgcttgtg

SEQ ID NO: 18027 - DNA, 201 bp, Homo sapiens
gctggcgatggacaggaggctacaccgtggaaagactttgccctgctcacacagtgcaaccacaccattatgaccattggcaccttcggcttctgggctgyctacctggctggcggagacactgtctacctggccaacttcaccctgccagactctgagttcctgaagatctttaagccggaggcggccttcctgcccgag

SEQ ID NO: 18028 - DNA, 201 bp, Homo sapiens
acctggctggcggagacactgtctacctggccaacttcaccctgccagactctgagttcctgaagatctttaagccggaggcggccttcctgcccgagtgsgtgggcattaatgcagacttgtctccactctggacattggctaagccttgagagccagggagactttctgaagtagcctgatctttctagagccagcagt

SEQ ID NO: 18029 - DNA, 201 bp, Homo sapiens
ctgccaagagctccatatattgggtgtgagttcaggttgcctctcacaatgaaggaagttggtctttgtctgcaggtgggctgctgagggtctgggatctkttttctggaagtgtgcaggtataaacacaccctctgtgcttgtgacaaactggcaggtaccgtgctcattgctaaccactgtctgtccctgaactcccag

SEQ ID NO: 18030 - DNA, 201 bp, Homo sapiens
acctccggcaggccatggactggttccgggcacggcacgaagcccccgttttcgtggtcaccagcaacggcatggagtggtgtaaagaaaacatcgacacmtcccagggcgatgtgacgtttgctggcgatggacaggaggctacaccgtggaaagactttgccctgctcacacagtgcaaccacaccattatgaccattg

SEQ ID NO: 18031 - DNA, 201 bp, Homo sapiens
ctgggtcagctccgcctgggccgcacaggggaccgcccgcgcacctttgtcggcgtccacgtgcgccgtggggactatctgcaggttatgcctcagcgctrgaagggtgtggtgggcgacagcgcctacctccggcaggccatggactggttccgggcacggcacgaagcccccgttttcgtggtcaccagcaacggcatg

SEQ ID NO: 18032 - DNA, 201 bp, Homo sapiens
gaccgcccgcgcacctttgtcggcgtccacgtgcgccgtggggactatctgcaggttatgcctcagcgctggaagggtgtggtgggcgacagcgcctacckccggcaggccatggactggttccgggcacggcacgaagcccccgttttcgtggtcaccagcaacggcatggagtggtgtaaagaaaacatcgacacctcc

SEQ ID NO: 18033 - DNA, 201 bp, Homo sapiens
tgcctacctggctggcggagacactgtctacctggccaacttcaccctgccagactctgagttcctgaagatctttaagccggaggcggccttcctgcccragtgggtgggcattaatgcagacttgtctccactctggacattggctaagccttgagagccagggagactttctgaagtagcctgatctttctagagcca

SEQ ID NO: 18034 - DNA, 201 bp, Homo sapiens
ctaccccaatggccggtttggtaatcagatgggacagtatgccacgctgctggctctggcccagctcaacggccgccgggcctttatcctgcctgccatgyatgccgccctggccccggtattccgcatcaccctgcccgtgctggccccagaagtggacagccgcacgccgtggcgggagctgcagcttcacgactggat

SEQ ID NO: 18035 - DNA, 201 bp, Homo sapiens
ctggccccagaagtggacagccgcacgccgtggcgggagctgcagcttcacgactggatgtcggaggagtacgcggacttgagagatcctttcctgaagcwctctggcttcccctgctcttggactttcttccaccatctccgggaacagatccgcagagagttcaccctgcacgaccaccttcgggaagaggcgcagagt

SEQ ID NO: 18036 - DNA, 201 bp, Homo sapiens
gcgatggacaggaggctacaccgtggaaagactttgccctgctcacacagtgcaaccacaccattatgaccattggcaccttcggcttctgggctgcctasctggctggcggagacactgtctacctggccaacttcaccctgccagactctgagttcctgaagatctttaagccggaggcggccttcctgcccgagtggg

SEQ ID NO: 18037 - DNA, 201 bp, Homo sapiens
cctgcacgaccaccttcgggaagaggcgcagagtgtgctgggtcagctccgcctgggccgcacaggggaccgcccgcgcacctttgtcggcgtccacgtgygccgtggggactatctgcaggttatgcctcagcgctggaagggtgtggtgggcgacagcgcctacctccggcaggccatggactggttccgggcacggca

SEQ ID NO: 18038 - DNA, 201 bp, Homo sapiens
ccccggtattccgcatcaccctgcccgtgctggccccagaagtggacagccgcacgccgtggcgggagctgcagcttcacgactggatgtcggaggagtamgcggacttgagagatcctttcctgaagctctctggcttcccctgctcttggactttcttccaccatctccgggaacagatccgcagagagttcaccctgc

SEQ ID NO: 18039 - DNA, 201 bp, Homo sapiens
gccccggtattccgcatcaccctgcccgtgctggccccagaagtggacagccgcacgccgtggcgggagctgcagcttcacgactggatgtcggaggagtrcgcggacttgagagatcctttcctgaagctctctggcttcccctgctcttggactttcttccaccatctccgggaacagatccgcagagagttcaccctg

SEQ ID NO: 18040 - DNA, 201 bp, Homo sapiens
gcacgccgtggcgggagctgcagcttcacgactggatgtcggaggagtacgcggacttgagagatcctttcctgaagctctctggcttcccctgctcttgsactttcttccaccatctccgggaacagatccgcagagagttcaccctgcacgaccaccttcgggaagaggcgcagagtgtgctgggtcagctccgcctgg

SEQ ID NO: 18041 - DNA, 201 bp, Homo sapiens
ctgcacgaccaccttcgggaagaggcgcagagtgtgctgggtcagctccgcctgggccgcacaggggaccgcccgcgcacctttgtcggcgtccacgtgcrccgtggggactatctgcaggttatgcctcagcgctggaagggtgtggtgggcgacagcgcctacctccggcaggccatggactggttccgggcacggcac

SEQ ID NO: 18042 - DNA, 201 bp, Homo sapiens
aggggaccgcccgcgcacctttgtcggcgtccacgtgcgccgtggggactatctgcaggttatgcctcagcgctggaagggtgtggtgggcgacagcgccyacctccggcaggccatggactggttccgggcacggcacgaagcccccgttttcgtggtcaccagcaacggcatggagtggtgtaaagaaaacatcgacac

SEQ ID NO: 18043 - DNA, 201 bp, Homo sapiens
ggccatggactggttccgggcacggcacgaagcccccgttttcgtggtcaccagcaacggcatggagtggtgtaaagaaaacatcgacacctcccagggcratgtgacgtttgctggcgatggacaggaggctacaccgtggaaagactttgccctgctcacacagtgcaaccacaccattatgaccattggcaccttcgg

SEQ ID NO: 18044 - DNA, 201 bp, Homo sapiens
gtgtggtgggcgacagcgcctacctccggcaggccatggactggttccgggcacggcacgaagcccccgttttcgtggtcaccagcaacggcatggagtgstgtaaagaaaacatcgacacctcccagggcgatgtgacgtttgctggcgatggacaggaggctacaccgtggaaagactttgccctgctcacacagtgca

SEQ ID NO: 18045 - DNA, 201 bp, Homo sapiens
atgcctgtgaagaaccctgcagggcccttatggacaggatggggttctggaaatccagataactaaggtgaagaatctttttagttttttttttttttttttggagacagggtctcgctctgttgcccaggctggagtgcagtggcgtgatcttggctcactgcaacttccgcctcctgtgttcaagcgattctcctgtct

SEQ ID NO: 18046 - DNA, 201 bp, Homo sapiens
gatgcctgtgaagaaccctgcagggcccttatggacaggatggggttctggaaatccagataactaaggtgaagaatctttttagttttttttttttttttttggagacagggtctcgctctgttgcccaggctggagtgcagtggcgtgatcttggctcactgcaacttccgcctcctgtgttcaagcgattctcctgtc

SEQ ID NO: 18047 - DNA, 201 bp, Homo sapiens
tgccatgcatgccgccctggccccggtattccgcatcaccctgcccgtgctggccccagaagtggacagccgcacgccgtggcgggagctgcagcttcackactggatgtcggaggagtacgcggacttgagagatcctttcctgaagctctctggcttcccctgctcttggactttcttccaccatctccgggaacagat

SEQ ID NO: 18048 - DNA, 201 bp, Homo sapiens
ggccccggtattccgcatcaccctgcccgtgctggccccagaagtggacagccgcacgccgtggcgggagctgcagcttcacgactggatgtcggaggagyacgcggacttgagagatcctttcctgaagctctctggcttcccctgctcttggactttcttccaccatctccgggaacagatccgcagagagttcaccct

SEQ ID NO: 18049 - DNA, 201 bp, Homo sapiens
atttttgtagagacgaggtcttgtgatattgcccaggctgttcttcaactcctgggctcaagcagtcctcccaccttggcctcccagaatgctgggtttayagatgtgagccagcacaccgggccaagtgaagaatctaatgaatgtgcaacctaattgtagcatctaatgaatgttccaccattgctggaaaaattgaga

SEQ ID NO: 18050 - DNA, 201 bp, Homo sapiens
cctgtgttcaagcgattctcctgtctcagcctcctgagtagatgggactacaggcacaggccattatgcctggctaatttttgtatttttagtagagacarggtttcaccatgttggccaggatggtctcgatctcctgaccttgtcatccacctgtcttggcctcccaaagtgctgggattactggcatgagccactgtg

SEQ ID NO: 18051 - DNA, 201 bp, Homo sapiens
gggcattaatgcagacttgtctccactctggacattggctaagccttgagagccagggagactttctgaagtagcctgatctttctagagccagcagtacrtggcttcagaggcctggcatcttctggagaagcttgtggtgttcctgaagcaaatgggtgcccgtatccagagtgattctagttgggagagttggagaga

SEQ ID NO: 18052 - DNA, 201 bp, Homo sapiens
ccggcaggccatggactggttccgggcacggcacgaagcccccgttttcgtggtcaccagcaacggcatggagtggtgtaaagaaaacatcgacacctccyagggcgatgtgacgtttgctggcgatggacaggaggctacaccgtggaaagactttgccctgctcacacagtgcaaccacaccattatgaccattggcac

SEQ ID NO: 18053 - DNA, 201 bp, Homo sapiens
tgcctgtgaagaaccctgcagggcccttatggacaggatggggttctggaaatccagataactaaggtgaagaatctttttagttttttttttttttttttggagacagggtctcgctctgttgcccaggctggagtgcagtggcgtgatcttggctcactgcaacttccgcctcctgtgttcaagcgattctcctgtctc

SEQ ID NO: 18054 - DNA, 201 bp, Homo sapiens
agaagcttgtggtgttcctgaagcaaatgggtgcccgtatccagagtgattctagttgggagagttggagagaagggggacgtttctggaactgtctgaayattctagaactagcaaaacatcttttcctgatggctggcaggcagttctagaagccacagtgcccacctgctcttcccagcccatatctacagtacttcc

SEQ ID NO: 18055 - DNA, 201 bp, Homo sapiens
tgcgcgtgctgcaggcggtcctgccgcccctgcctcaggtggtgtgcacctaccgtgatgtgcgcttcgagtccatccggctccctggctgcccgcgtggygtggaccccgtggtctccttccctgtggctctcagctgtcgctgtggaccctgccgccgcagcacctctgactgtgggggtcccaaagaccaccccttga

SEQ ID NO: 18056 - DNA, 201 bp, Homo sapiens
ggcaggggatgcaccaaggatggagatgctccaggggctgctgctgttgctgctgctgagcatgggcggggcatgggcatccagggagccgcttcggccayggtgccaccccatcaatgccatcctggctgtcgagaaggagggctgccccgtgtgcatcaccgtcaacaccaccatctgtgccggctactgccccaccat

SEQ ID NO: 18057 - DNA, 201 bp, Homo sapiens
aggggctgctgctgttgctgctgctgagcatgggcggggcatgggcatccagggagccgcttcggccatggtgccaccccatcaatgccatcctggctgtsgagaaggagggctgccccgtgtgcatcaccgtcaacaccaccatctgtgccggctactgccccaccatgatgcgcgtgctgcaggcggtcctgccgcccc

SEQ ID NO: 18058 - DNA, 168 bp, Homo sapiens
tgtccaggttaccccagcatcctatcacctcctggtggccttgccgcccccacaaccccgaggtatawagccagatacacgaggcaggggatgcaccaaggatggagatgctccaggggctgctgctgttgctgctgctgagcatgggcggggcatgggcatccaggg

SEQ ID NO: 18059 - DNA, 201 bp, Homo sapiens
tgctgctgagcatgggcggggcatgggcatccagggagccgcttcggccatggtgccaccccatcaatgccatcctggctgtcgagaaggagggctgcccmgtgtgcatcaccgtcaacaccaccatctgtgccggctactgccccaccatgatgcgcgtgctgcaggcggtcctgccgcccctgcctcaggtggtgtgca

SEQ ID NO: 18060 - DNA, 201 bp, Homo sapiens
gctccctggctgcccgcgtggcgtggaccccgtggtctccttccctgtggctctcagctgtcgctgtggaccctgccgccgcagcacctctgactgtgggrgtcccaaagaccaccccttgacctgtgaccacccccaactctcaggcctcctcttcctctaaagaccctccccgcagccttccaagtccatcccgactcc

SEQ ID NO: 18061 - DNA, 106 bp, Homo sapiens
cctcctcttcctctaaagaccctccccgcagccttccaagtccatcccgactcctggagccctgacaccccgatcctcccacaataaaggcttctcaatcygcact

SEQ ID NO: 18062 - DNA, 201 bp, Homo sapiens
gatgcaccaaggatggagatgctccaggggctgctgctgttgctgctgctgagcatgggcggggcatgggcatccagggagccgcttcggccatggtgccrccccatcaatgccatcctggctgtcgagaaggagggctgccccgtgtgcatcaccgtcaacaccaccatctgtgccggctactgccccaccatgatgcgc

SEQ ID NO: 18063 - DNA, 201 bp, Homo sapiens
gagatgctccaggggctgctgctgttgctgctgctgagcatgggcggggcatgggcatccagggagccgcttcggccatggtgccaccccatcaatgccaycctggctgtcgagaaggagggctgccccgtgtgcatcaccgtcaacaccaccatctgtgccggctactgccccaccatgatgcgcgtgctgcaggcggtc

SEQ ID NO: 18064 - DNA, 201 bp, Homo sapiens
gagggctgccccgtgtgcatcaccgtcaacaccaccatctgtgccggctactgccccaccatgatgcgcgtgctgcaggcggtcctgccgcccctgcctcrggtggtgtgcacctaccgtgatgtgcgcttcgagtccatccggctccctggctgcccgcgtggcgtggaccccgtggtctccttccctgtggctctcagc

SEQ ID NO: 18065 - DNA, 201 bp, Homo sapiens; identical to SEQ ID NO: 18055

SEQ ID NO: 18066 - DNA, 167 bp, Homo sapiens
gggctgctgctgttgctgctgctgagcatgggcggggcatgggcatccagggagccgcttcggccayggtgccaccccatcaatgccatcctggctgtcgagaaggagggctgccccgtgtgcatcaccgtcaacaccaccatctgtgccggctactgccccaccat

SEQ ID NO: 18067 - DNA, 199 bp, Homo sapiens
gggctgctgctgttgctgctgctgagcatgggcggggcatgggcatccagggagccgcttcggccatggtgccaccccatcaatgccatcctggctgtsgagaaggagggctgccccgtgtgcatcaccgtcaacaccaccatctgtgccggctactgccccaccatgatgcgcgtgctgcaggcggtcctgccgcccc

SEQ ID NO: 18068 - DNA, 201 bp, Homo sapiens; identical to SEQ ID NO: 18059

SEQ ID NO: 18069 - DNA, 201 bp, Homo sapiens; identical to SEQ ID NO: 18060

SEQ ID NO: 18070 - DNA, 106 bp, Homo sapiens; identical to SEQ ID NO: 18061

SEQ ID NO: 18071 - DNA, 174 bp, Homo sapiens
gggctgctgctgttgctgctgctgagcatgggcggggcatgggcatccagggagccgcttcggccatggtgccrccccatcaatgccatcctggctgtcgagaaggagggctgccccgtgtgcatcaccgtcaacaccaccatctgtgccggctactgccccaccatgatgcgc

SEQ ID NO: 18072 - DNA, 189 bp, Homo sapiens
gggctgctgctgttgctgctgctgagcatgggcggggcatgggcatccagggagccgcttcggccatggtgccaccccatcaatgccaycctggctgtcgagaaggagggctgccccgtgtgcatcaccgtcaacaccaccatctgtgccggctactgccccaccatgatgcgcgtgctgcaggcggtc

SEQ ID NO: 18073 - DNA, 201 bp, Homo sapiens; identical to SEQ ID NO: 18064

SEQ ID NO: 18074 - DNA, 201 bp, Homo sapiens
tgccaatttggacactctagtagctgtaatagaatgccagcaaccagaagcagacttatacagattcatgggacgaatgatcataacccaacaaatggaaraaattgtaagacctctggggccggagagtctcctgcttcgtggagccagattaaaaaacacaaaagaaatttttggtgttgcggtatacactggaatgga

SEQ ID NO: 18075 - DNA, 201 bp, Homo sapiens
cagggatatgaagattggttacggcataactcagataatgaagtaaatggagctcctgtttatgttgttcgaagtggtggccttgtaaaaactagatcaaraaacattcgggtgggtgatattgttcgaatagccaaagatgaaatttttcctgcagacttggtgcttctgtcctcagatcgactggatggttcctgtcac

SEQ ID NO: 18076 - DNA, 201 bp, Homo sapiens
caaagagttacgtaaaacatgttttattaattttggtccccacgtacagacattttatttctattttgaaatgagttatctattttcataaaagtaaaacrctattaaagtgctgttttatgtgaaataacttgaatgttgttcctataaaaaatagatcataactcatgatatgtttgtaatcatggtaatttagatttt

SEQ ID NO: 18077 - DNA, 201 bp, Homo sapiens
attggaccatcctgggcttcagtcatgcctttattttcttttttggatcctatttactaatagggaaagatacatctctgcttggaaatggccagatgttyggaaactggacatttggcactttggtcttcacagtcatggttattacagtcacagtaaagatggctctggaaactcatttttggacttggatcaaccatc

SEQ ID NO: 18078 - DNA, 201 bp, Homo sapiens; identical to SEQ ID NO: 18074

SEQ ID NO: 18079 - DNA, 201 bp, Homo sapiens; identical to SEQ ID NO: 18075

SEQ ID NO: 18080 - DNA, 201 bp, Homo sapiens; identical to SEQ ID NO: 18077

SEQ ID NO: 18081 - DNA, 201 bp, Homo sapiens; identical to SEQ ID NO: 18076

SEQ ID NO: 18082 - DNA, 201 bp, Homo sapiens; identical to SEQ ID NO: 18074

SEQ ID NO: 18083 - DNA, 201 bp, Homo sapiens; identical to SEQ ID NO: 18075

SEQ ID NO: 18084 - DNA, 201 bp, Homo sapiens; identical to SEQ ID NO: 18077

SEQ ID NO: 18085 - DNA, 201 bp, Homo sapiens; identical to SEQ ID NO: 18074

SEQ ID NO: 18086 - DNA, 201 bp, Homo sapiens; identical to SEQ ID NO: 18075

SEQ ID NO: 18087 - DNA, 201 bp, Homo sapiens; identical to SEQ ID NO: 18077

SEQ ID NO: 18088 - DNA, 201 bp, Homo sapiens
ccagagggcctggttatactcagtatggagtttcaatgcactgtgtgagggaagaacattccgctgtcaatatgaacctccactacttggaaaatggcacwgttatgttgaactttatttaccgaaaagaactgttctttcttcctttgggatttgcacttaaggcacttgtcagcttttctgattatcagatctttcagg

SEQ ID NO: 18089 - DNA, 201 bp, Homo sapiens
gagatttttcaacggtgttagaactctcaaccaagacctgaaaaccaagtatgcaaggtttctgaatctctctggtagattaactattgacaatgattttytgttatctttgttcaaaaagttcatgtcttctcaaaatatgaaatattgataaatggaagagcatacggtgacaagtctcctttccaaccccaggttccc

SEQ ID NO: 18090 - DNA, 201 bp, Homo sapiens
agtggtccttatacccatgacaggaaaaccaagtctgtacccaggattgttcctttttaccactccttgtagactggtacggcctgtgcagaacttagcaytgggcaaagaagagctaattggaactatggaacagatcttcatgaatgtcgctatctttgaggatgaagtttttgctggagttaccacacaccaggaact

SEQ ID NO: 18091 - DNA, 201 bp, Homo sapiens
tatcagatctttcaggagctcatcaaaggaaaagaggatgattctttccttaggaactctgtttctcagatgttaaggattgtaatggaagagggttgttygacacaaaaacaggtccttaactacctaggtgaatgcttcagagtaaaactcaatgttcctgactggtacccaaatgagcaagctgcggagttcctgttt

SEQ ID NO: 18092 - DNA, 201 bp, Homo sapiens
tcacacagtttgtgtatacggcatctattccagctttactgtgcaacttgggggtcactcccattgatggagctccccaccgatcatacagtgagtgctaycctgtcctgctggacggtgtcatggttggctgggtggataaggatcttgctccaggcatcgcagattctcttcgtcattttaaggtgttgagagagaaaa

SEQ ID NO: 18093 - DNA, 201 bp, Homo sapiens
gggagccctgtggcctgatgaaccacctaactgccgtatgtgaggttgtcacacagtttgtgtatacggcatctattccagctttactgtgcaacttgggsgtcactcccattgatggagctccccaccgatcatacagtgagtgctaccctgtcctgctggacggtgtcatggttggctgggtggataaggatcttgctc

SEQ ID NO: 18094 - DNA, 201 bp, Homo sapiens
atccaatactgaaaagttttatatgctttgtctcatgacgcgaaagctctttgctttagccaaaggagagtgcatggaggacaatcctgatagtttggtgmaccaggaagtcctcacaccgggtcagctcttccttatgttcctgaaggaaaaactggaaggttggttagtgtctattaaaatagcttttgataagaaggc

SEQ ID NO: 18095 - DNA, 201 bp, Homo sapiens
gatgttgaccttttggattaagaggactatcagattaaagcaaaatgtaattttaattcaatgaagatatcattaccaggttactcttgagatttttcaayggtgttagaactctcaaccaagacctgaaaaccaagtatgcaaggtttctgaatctctctggtagattaactattgacaatgattttctgttatctttgt

SEQ ID NO: 18096 - DNA, 201 bp, Homo sapiens; identical to SEQ ID NO: 18090

SEQ ID NO: 18097 - DNA, 201 bp, Homo sapiens; identical to SEQ ID NO: 18091

SEQ ID NO: 18098 - DNA, 201 bp, Homo sapiens; identical to SEQ ID NO: 18092

SEQ ID NO: 18099 - DNA, 201 bp, Homo sapiens; identical to SEQ ID NO: 18093

SEQ ID NO: 18100 - DNA, 201 bp, Homo sapiens; identical to SEQ ID NO: 18094

SEQ ID NO: 18101 - DNA, 201 bp, Homo sapiens; identical to SEQ ID NO: 18095

SEQ ID NO: 18102 - DNA, 201 bp, Homo sapiens; identical to SEQ ID NO: 18089

SEQ ID NO: 18103 - DNA, 201 bp, Homo sapiens; identical to SEQ ID NO: 18088

SEQ ID NO: 18104 - DNA, 201 bp, Homo sapiens
tctgccatgatgctacacccttcatcttctcagaggagaactcggccttagaatactttggtgagatgttaaaggctgctggctacaatttctatggcacygagaggttatatagtggcatcagtgggctagaactggaagcagacatcttcataggagtggtttattatcagcgcttacgccatatggtctcagacaaat

SEQ ID NO: 18105 - DNA, 201 bp, Homo sapiens
aggctgctggctacaatttctatggcaccgagaggttatatagtggcatcagtgggctagaactggaagcagacatcttcataggagtggtttattatcarcgcttacgccatatggtctcagacaaatttcaagtaaggacaactggagcccgagacagagtcaccaaccagcctattgggggaagaaatgtccagggtg

SEQ ID NO: 18106 - DNA, 201 bp, Homo sapiens; identical to SEQ ID NO: 18088

SEQ ID NO: 18107 - DNA, 201 bp, Homo sapiens; identical to SEQ ID NO: 18089

SEQ ID NO: 18108 - DNA, 201 bp, Homo sapiens; identical to SEQ ID NO: 18090

SEQ ID NO: 18109 - DNA, 201 bp, Homo sapiens; identical to SEQ ID NO: 18091

SEQ ID NO: 18110 - DNA, 201 bp, Homo sapiens; identical to SEQ ID NO: 18092

SEQ ID NO: 18111 - DNA, 201 bp, Homo sapiens; identical to SEQ ID NO: 18093

SEQ ID NO: 18112 - DNA, 201 bp, Homo sapiens; identical to SEQ ID NO: 18094

SEQ ID NO: 18113 - DNA, 201 bp, Homo sapiens; identical to SEQ ID NO: 18095

SEQ ID NO: 18114 - DNA, 201 bp, Homo sapiens; identical to SEQ ID NO: 18090

SEQ ID NO: 18115 - DNA, 201 bp, Homo sapiens; identical to SEQ ID NO: 18091

SEQ ID NO: 18116 - DNA, 201 bp, Homo sapiens; identical to SEQ ID NO: 18092

SEQ ID NO: 18117 - DNA, 201 bp, Homo sapiens; identical to SEQ ID NO: 18093

SEQ ID NO: 18118 - DNA, 201 bp, Homo sapiens; identical to SEQ ID NO: 18094

SEQ ID NO: 18119 - DNA, 201 bp, Homo sapiens; identical to SEQ ID NO: 18095

SEQ ID NO: 18120 - DNA, 201 bp, Homo sapiens; identical to SEQ ID NO: 18089

SEQ ID NO: 18121 - DNA, 201 bp, Homo sapiens; identical to SEQ ID NO: 18088

SEQ ID NO: 18122 - DNA, 201 bp, Homo sapiens; identical to SEQ ID NO: 18104

SEQ ID NO: 18123 - DNA, 201 bp, Homo sapiens; identical to SEQ ID NO: 18105

SEQ ID NO: 18124 - DNA, 201 bp, Homo sapiens; identical to SEQ ID NO: 18089

SEQ ID NO: 18125 - DNA, 201 bp, Homo sapiens; identical to SEQ ID NO: 18104

SEQ ID NO: 18126 - DNA, 201 bp, Homo sapiens; identical to SEQ ID NO: 18105

SEQ ID NO: 18127 - DNA, 201 bp, Homo sapiens; identical to SEQ ID NO: 18095

SEQ ID NO: 18128 - DNA, 201 bp, Homo sapiens
tatgactcaacccctgaaccactacttcatctgctcttctcataacacctacctagtgggggaccagctttgcggccagagcagcgtcgagggatatataygggccctgaagcgggggtgccgctgcgtggaggtggatgtatgggatggacctagcggggaacctgtcgtttaccacggacacaccctgacctcccgcat

SEQ ID NO: 18129 - DNA, 201 bp, Homo sapiens
cagctgctgtagaagaggggaggaaacaagccagtgcaaggggagcaaaagagaaaaggagccaggctgggcttcctgatcccacagcatcgcagagctcrggaggcacagctcacagacacaggaaacacaggactgctattctgctctcctgcccacggtgatctggtgccagctggtggaacagtgggtgatggcgtc

SEQ ID NO: 18130 - DNA, 201 bp, Homo sapiens
acccagcctgcctccccatctatcaggatatgactcaacccctgaaccactacttcatctgctcttctcataacacctacctagtgggggaccagctttgyggccagagcagcgtcgagggatatatacgggccctgaagcgggggtgccgctgcgtggaggtggatgtatgggatggacctagcggggaacctgtcgttt

SEQ ID NO: 18131 - DNA, 201 bp, Homo sapiens; identical to SEQ ID NO: 18128

SEQ ID NO: 18132 - DNA, 201 bp, Homo sapiens
ctgtccaaagatggcatcagcctccgcccagcttccatctttgtgtatatctgcatccaggaaggcctggagggggatgagtcctgaggtgggcatttcaygggaagggttggtgtgctggctttagacggggagaaacatctggaaggatgctcgagagaacaaatggaggtggtgaaaatcaagctttggattgtgcat

SEQ ID NO: 18133 - DNA, 201 bp, Homo sapiens; identical to SEQ ID NO: 18129

SEQ ID NO: 18134 - DNA, 201 bp, Homo sapiens; identical to SEQ ID NO: 18130

SEQ ID NO: 18135 - DNA, 201 bp, Homo sapiens
catcagcctccgcccagcttccatctttgtgtatatctgcatccaggaaggcctggagggggatgagtcctgaggtgggcatttcacgggaagggttggtrtgctggctttagacggggagaaacatctggaaggatgctcgagagaacaaatggaggtggtgaaaatcaagctttggattgtgcattcctaggcacaaaa

SEQ ID NO: 18136 - DNA, 201 bp, Homo sapiens
tggtgaataatgctgggacagtatatccagccgatcttctcagcaccaaggatgaagagattaccaagacatttgaggtcaacatcctaggacatttttgratcacaaaagcacttcttccatcgatgatggagagaaatcatggccacatcgtcacagtggcttcagtgtgcggccacgaagggattccttacctcatcc

SEQ ID NO: 18137 - DNA, 196 bp, Homo sapiens
gactacacaaggactgaaccagaaggaagaggacagagcaaagccatgaacatcatcctagaaatccttctgcttctgatcaccatcatctactcytacttggagtcgttggtgaagtttttcattcctcagaggagaaaatctgtggctggggagattgttctcattactggagctgggcatggaataggcaggc

SEQ ID NO: 18138 - DNA, 201 bp, Homo sapiens; identical to SEQ ID NO: 18136

SEQ ID NO: 18139 - DNA, 196 bp, Homo sapiens; identical to SEQ ID NO: 18137

SEQ ID NO: 18140 - DNA, 201 bp, Homo sapiens
actacagtccatgccatcactgccacccagaagactgtggatggcccctctgggaaactgtggcgtgacagctgcagggctctccagaacatcatccctgmctctactggtgctgccaaggctgtgggaaaggccctctctgagctgaatgggaagctcactggcatggccttctgtgtcaccactgccaaggtgtcggtc

SEQ ID NO: 18141 - DNA, 201 bp, Homo sapiens
aaggtgatggccggagtcaacggatttggtcgtattggatgcctggtcaccagggttgcttttaactctggaaaagtggatattgtcgccatcaatgaccrcttcattgacctcaactacatggctgagaatgggaagcttgtcatcagtggaaatcccattaccatcttccaggagcgagatccctccaaaatcaaatgg

SEQ ID NO: 18142 - DNA, 201 bp, Homo sapiens
gaaatcccattaccatcttccaggagcgagatccctccaaaatcaaatggggcaatgctgacgctgagtacgttgtggagtccactggtgttttcaccccyatggagaaggctggagctcacttgcaggaaggagccaaaagggtcatcatctctccccactttgttgacgcccccatgttagtgatgggcatgaaccatg

SEQ ID NO: 18143 - DNA, 201 bp, Homo sapiens
gacatcaagaaggtggtgaagcagacatcggagggccccctcaagggcatcctgggctacactgagcaccaggctgtctcctccaacttcaacagcaacaygcactcttccaccttcaatgttagggctggcattgccctcaacaaccactttgtcaagatcatttcttggtatagcgatgaatttggctacagcaacaag

SEQ ID NO: 18144 - DNA, 201 bp, Homo sapiens
tggggaagaaaaggggagggggaaggcaagaatcactgaaaaatcttaaatctgtgttttctggaataagatatctagacagcctaaatctgattttggtyttttaggcagtgttttgcagactttggggagtggtctatgtggccaaatattgtgtgtatagacagaatttgaaatcaagtcctgcttcatttacaagaa

SEQ ID NO: 18145 - DNA, 201 bp, Homo sapiens
agcccagatcttagctggaggaagaggaaaaggtgtcttcaatagtggtttgaaaggaggtgttcatttaacaaaagaccctaatgttgtgggacagctgrctaaacagatgattgggtacaatctagcgacaaaacaaactccaaaagaaggtgtgaaagttaacaaggtgatggttgctgaagccttggatatttccag

SEQ ID NO: 18146 - DNA, 201 bp, Homo sapiens
ttgcagactttggggagtggtctatgtggccaaatattgtgtgtatagacagaatttgaaatcaagtcctgcttcatttacaagaattttggtgggcatckaatcctacataatgaaaaagaaaaacagaccatttaaaaactcagacaagattatatttaatatattaattactaaaaaggcacaagattacactgaaca

SEQ ID NO: 18147 - DNA, 201 bp, Homo sapiens
cattggggaagaaaaggggagggggaaggcaagaatcactgaaaaatcttaaatctgtgttttctggaataagatatctagacagcctaaatctgattttrgtcttttaggcagtgttttgcagactttggggagtggtctatgtggccaaatattgtgtgtatagacagaatttgaaatcaagtcctgcttcatttacaa

SEQ ID NO: 18148 - DNA, 201 bp, Homo sapiens
agccattgacctggaggatgcagccaagaaggctgtggccagtgtggccaagaagtgatgtctttgtcctgatccaatggagaaagaaagccatttttccrtaaaaagggatggttcatcattgtgaaagaaatggttatctcattggggaagaaaaggggagggggaaggcaagaatcactgaaaaatcttaaatctgtg

SEQ ID NO: 18149 - DNA, 201 bp, Homo sapiens
aattttggtgggcatcgaatcctacataatgaaaaagaaaaacagaccatttaaaaactcagacaagattatatttaatatattaattactaaaaaggcayaagattacactgaacatattagctactaaaaaggcactgctaagacattcaagcaaatagctattacacactactgcagattttacaggtttctaattct

SEQ ID NO: 18150 - DNA, 201 bp, Homo sapiens
atggctacttgtgatatcattttccttaatggtgggaagccagccaacttcttggatcttggaggtggtgtaaaggaagctcaagtatatcaagcattcarattgctcacagctgatcctaaggttgaagccatccttgtcaatatatttggtggtatcgtcaactgtgccatcattgccaatgggatcaccaaagcctgc

SEQ ID NO: 18151 - DNA, 201 bp, Homo sapiens
attgctcacagctgatcctaaggttgaagccatccttgtcaatatatttggtggtatcgtcaactgtgccatcattgccaatgggatcaccaaagcctgcygggagctagaactcaaggtgcccctggtggtccggcttgaaggaaccaacgtccaagaggcccagaagatactcaacaacagcggactccccattacttc

SEQ ID NO: 18152 - DNA, 201 bp, Homo sapiens
atttggtggtatcgtcaactgtgccatcattgccaatgggatcaccaaagcctgccgggagctagaactcaaggtgcccctggtggtccggcttgaaggarccaacgtccaagaggcccagaagatactcaacaacagcggactccccattacttcagccattgacctggaggatgcagccaagaaggctgtggccagtgt

SEQ ID NO: 18153 - DNA, 201 bp, Homo sapiens
gggggaaggcaagaatcactgaaaaatcttaaatctgtgttttctggaataagatatctagacagcctaaatctgattttggtctttataaaaataatatmttgtgttctcatacttttctgtcactgtaagcctgcccagtaggcagtgttttgcagactttggggagtggtctatgtggccaaatattgtgtgtataga

SEQ ID NO: 18154 - DNA, 201 bp, Homo sapiens
tggggaagaaaaggggagggggaaggcaagaatcactgaaaaatcttaaatctgtgttttctggaataagatatctagacagcctaaatctgattttggtytttataaaaataatatcttgtgttctcatacttttctgtcactgtaagcctgcccagtaggcagtgttttgcagactttggggagtggtctatgtggcca

SEQ ID NO: 18155 - DNA, 201 bp, Homo sapiens; identical to SEQ ID NO: 18145

SEQ ID NO: 18156 - DNA, 201 bp, Homo sapiens
gagggggaaggcaagaatcactgaaaaatcttaaatctgtgttttctggaataagatatctagacagcctaaatctgattttggtctttataaaaataatrtcttgtgttctcatacttttctgtcactgtaagcctgcccagtaggcagtgttttgcagactttggggagtggtctatgtggccaaatattgtgtgtata

SEQ ID NO: 18157 - DNA, 201 bp, Homo sapiens; identical to SEQ ID NO: 18146

SEQ ID NO: 18158 - DNA, 201 bp, Homo sapiens
cattggggaagaaaaggggagggggaaggcaagaatcactgaaaaatcttaaatctgtgttttctggaataagatatctagacagcctaaatctgattttrgtctttataaaaataatatcttgtgttctcatacttttctgtcactgtaagcctgcccagtaggcagtgttttgcagactttggggagtggtctatgtgg

SEQ ID NO: 18159 - DNA, 201 bp, Homo sapiens; identical to SEQ ID NO: 18148

SEQ ID NO: 18160 - DNA, 201 bp, Homo sapiens; identical to SEQ ID NO: 18149

SEQ ID NO: 18161 - DNA, 201 bp, Homo sapiens; identical to SEQ ID NO: 18150

SEQ ID NO: 18162 - DNA, 201 bp, Homo sapiens; identical to SEQ ID NO: 18151

SEQ ID NO: 18163 - DNA, 201 bp, Homo sapiens; identical to SEQ ID NO: 18152

SEQ ID NO: 18164 - DNA, 104 bp, Homo sapiens
agaatgatgccaagatcctcaatgacatgcaggatcgctttgaggtcaatcgtagtgatctgcctgatgagagagacatcttctcctgctttgaaaagacmtgg

SEQ ID NO: 18165 - DNA, 201 bp, Homo sapiens
ggatgtccagggaatttttcgcatgaccccaccggctaccttgagcaaagagatccgtccagtctgccacaagttcatgcaagatccagtggagatcttcrtggataatgagatgaagttgatgctgcatgggttgcagcagtactacatgaaactgaaggacaaccagaagaactggaagcgctatgaccttctgaatgt

SEQ ID NO: 18166 - DNA, 182 bp, Homo sapiens
ctgacacctacctgcattgggtggccagagccagccggtttggcaccaagagcttggctatcacatttgtgtctgacgagaatgatgccaagatcctcaawgacatgcaggatcgctttgaggtcaatcgtagtgatctgcctgatgagagagacatcttctcctgctttgaaaagacatgg

SEQ ID NO: 18167 - DNA, 201 bp, Homo sapiens
taaatatatgcccaatgtcaagaaggatgaagaggtgctgaagaagaactgcctgcatatcgtcgtggggactccaggccgtatcctagccctggctggarataagagcctcaacctcaaacacataaaacactttatttcaaatgaatgtgataagacgtttgaacagctcaacatgtgtcgggatgtccagggaatttt

SEQ ID NO: 18168 - DNA, 201 bp, Homo sapiens
ggacattgagcgggtgaacattgcttttaattatgacatgcctgaggattctgacacctacctgcattgggtggccagagccagccggtttggcaccaagrgcttggctatcacatttgtgtctgacgagaatgatgccaagatcctcaatgacatgcaggatcgctttgaggtcaatcgtagtgatctgcctgatgagag

SEQ ID NO: 18169 - DNA, 127 bp, Homo sapiens
tgctggagtgcagtggcgcaatcatggctcactgtagccttgacctcctgggcccaagtgatcctcccacctcagcctcctaagtaggtgcacaccaccaygcgtagctaatttttgtattttttgt

SEQ ID NO: 18170 - DNA, 201 bp, Homo sapiens
ttcccttggaaacagaagacctcacctcagtataattttagtgggagataacccagcaagccatacatatgtcaggaataagataagagctgcctctgctrtaggtatttgtagtgagctcattctaaaacctaaggatgtttctcaggaagaacttttggacgtaactgatcaattgaatatggacccaagagtcagcgg

SEQ ID NO: 18171 - DNA, 201 bp, Homo sapiens
gctttatcactccagttccaggaggtgtgggacccatgacagtggcaatgcttctgaagaacacccttctggcagctaaaaaaatcatttactagatcacrtgaaaggataaagcaaactgaagtcatgctatttgtttatttgacaaagggtaaaacctttatattttactacaaagctatttatttctacatggtattt

SEQ ID NO: 18172 - DNA, 201 bp, Homo sapiens; identical to SEQ ID NO: 18170

SEQ ID NO: 18173 - DNA, 108 bp, Homo sapiens
gctttatcactccagttccaggaggtgtgggacccatgacagtggcaatgcttctgaagaacacccttctggcagctaaaaaaatcatttactagatcacrtgaaagg

SEQ ID NO: 18174 - DNA, 201 bp, Homo sapiens; identical to SEQ ID NO: 18170

SEQ ID NO: 18175 - DNA, 201 bp, Homo sapiens; identical to SEQ ID NO: 18171

SEQ ID NO: 18176 - DNA, 201 bp, Homo sapiens; identical to SEQ ID NO: 18170

SEQ ID NO: 18177 - DNA, 201 bp, Homo sapiens; identical to SEQ ID NO: 18171

SEQ ID NO: 18178 - DNA, 201 bp, Homo sapiens
gtgcaacatcgacgtcacccagcagtgtgtcatcgccgagatctggttcccggtggcagatgccacacgtatcaagagggcactggagcaaggcatggaamtaagtggctcctccatggcccccatcatgaccacagtgcaatctaaaacagcccctcccacatttaacaggaccaataaattcacagctggcttccagaa

SEQ ID NO: 18179 - DNA, 201 bp, Homo sapiens
tgcagtctcatttccagttcctccatgacgtggcaagtgaagacaggaatgaaaggaatgtaaagcagcttttctctgaagagaagaagagagagagacasagccaagaccgaggctgggccaagatggtgtctgtgtttcgaagcgaggagatgtgtttgtcacaactgtttctccaggtggaagctgcatattgctgtg

SEQ ID NO: 18180 - DNA, 201 bp, Homo sapiens
gtggcaagtgaagacaggaatgaaaggaatgtaaagcagcttttctctgaagagaagaagagagagagacacagccaagaccgaggctgggccaagatggygtctgtgtttcgaagcgaggagatgtgtttgtcacaactgtttctccaggtggaagctgcatattgctgtgtggctgagctcggagagctcggattggtt

SEQ ID NO: 18181 - DNA, 201 bp, Homo sapiens
caaacacagcctcctacctgcggctctgggccctcagcctggctcatgcacaactgtctgaagtgctctggactatggtgatgaacagcggccttcagacrcgaggctggggaggaatcgtcggggtttttattatttttgccgtatttgctgtcctgacagtagccatccttctgatcatggagggcctctctgctttcc

SEQ ID NO: 18182 - DNA, 201 bp, Homo sapiens
ccatcatgaccacagtgcaatctaaaacagcccctcccacatttaacaggaccaataaattcacagctggcttccagaatattgttgatgcctatggtgtyggcagctaccgggagataaacccagccccctacaccatcatcactttccccttcctgttcgctgtgatgtttggagactgtggtcatggaaccgtgatgc

SEQ ID NO: 18183 - DNA, 201 bp, Homo sapiens
tacaggaagccaaccagaaccagcaggccttgaaacaaagcttcctagaactgacagaactgaaatacctcctgaagaaaacccaagacttctttgagacrgaaaccaatttagctgatgatttctttactgaggacacttctggcctcctggagttgaaagcagtgcctgcatatatgaccggaaagttggggttcatag

SEQ ID NO: 18184 - DNA, 201 bp, Homo sapiens
tcaaacacagcctcctacctgcggctctgggccctcagcctggctcatgcacaactgtctgaagtgctctggactatggtgatgaacagcggccttcagaygcgaggctggggaggaatcgtcggggtttttattatttttgccgtatttgctgtcctgacagtagccatccttctgatcatggagggcctctctgctttc

SEQ ID NO: 18185 - DNA, 201 bp, Homo sapiens
agcagtgcctgcatatatgaccggaaagttggggttcatagccggtgtgatcaacagggagaggatggcttcctttgagcggttactgtggcgaatctgcygaggaaacgtgtacttgaagttcagtgagatggacgcccctctggaggatcctgtgacgaaagaagaaattcagaagaacatattcatcatattttacca

SEQ ID NO: 18186 - DNA, 201 bp, Homo sapiens
ttggaaatccatacccgtttgggattgatccgatttggaacttggcttcaaacaaactcacatttctgaactcgtataaaatgaagatgtcggtgatcctrggaattgtccagatggtttttggtgtcatcctcagccttttcaatcacatatacttcagaagaactctcaacatcattctgcaatttatccctgagatga

SEQ ID NO: 18187 - DNA, 192 bp, Homo sapiens
gacgtcagcctgtggatttgatacgacttaaccacgtcagaggaaggactttggcaagtgatattgtcttcatgtggggtattaattctcaaataataaartaattgacaaatgaggggagaatgctaaacagatgtcttcttgcaatattttaaatattgtatttgagaaaataaacatctgagtcattca

SEQ ID NO: 18188 - DNA, 201 bp, Homo sapiens
catcctggatggcacagccgaggagtaggctgagggctgcacctcccacggtggtcaccatgccaatgaaggaagttcagtcttgtctttgatatcagccyctgcaaggcgctcaatgggaaggttgttcttggctcacctgaagcatgaaactgtgtattatttggacgtcagcctgtggatttgatacgacttaaccac

SEQ ID NO: 18189 - DNA, 201 bp, Homo sapiens
acatcattctgcaatttatccctgagatgatttttatcctgtgtctgtttggatacctggttttcatgatcattttcaaatggtgctgctttgacgtccaygtatctcagcacgcccccagcatcctcatccacttcatcaacatgtttctgtttaactacagtgactcttccaacgcacccctctacaaacatcagcaag

SEQ ID NO: 18190 - DNA, 201 bp, Homo sapiens
ctgggaattgtccagatggtttttggtgtcatcctcagccttttcaatcacatatacttcagaagaactctcaacatcattctgcaatttatccctgagaygatttttatcctgtgtctgtttggatacctggttttcatgatcattttcaaatggtgctgctttgacgtccatgtatctcagcacgcccccagcatcctc

SEQ ID NO: 18191 - DNA, 201 bp, Homo sapiens
aagaacatattcatcatattttaccaaggagagcagctcaggcagaaaatcaagaagatctgtgatgggtttcgagccactgtctacccttgcccagagcstgcggtggagcgcagagagatgttggagagcgtcaatgtgaggctggaagatttaatcaccgtcataacacaaacagagtctcaccgccagcgcctgctg

SEQ ID NO: 18192 - DNA, 201 bp, Homo sapiens
ggattgatccgatttggaacttggcttcaaacaaactcacatttctgaactcgtataaaatgaagatgtcggtgatcctgggaattgtccagatggttttyggtgtcatcctcagccttttcaatcacatatacttcagaagaactctcaacatcattctgcaatttatccctgagatgatttttatcctgtgtctgtttg

SEQ ID NO: 18193 - DNA, 201 bp, Homo sapiens; identical to SEQ ID NO: 18178

SEQ ID NO: 18194 - DNA, 201 bp, Homo sapiens
tcgggtctcatttccagttcctccatgacgtggcaagtgaagacaggaatgaaaggaatgtaaagcagcttttctctgaagagaagaagagagagagacasagccaagaccgaggctgggccaagatggtgtctgtgtttcgaagcgaggagatgtgtttgtcacaactgtttctccaggtggaagctgcatattgctgtg

SEQ ID NO: 18195 - DNA, 201 bp, Homo sapiens; identical to SEQ ID NO: 18180

SEQ ID NO: 18196 - DNA, 201 bp, Homo sapiens; identical to SEQ ID NO: 18181

SEQ ID NO: 18197 - DNA, 201 bp, Homo sapiens; identical to SEQ ID NO: 18182

SEQ ID NO: 18198 - DNA, 201 bp, Homo sapiens; identical to SEQ ID NO: 18183

SEQ ID NO: 18199 - DNA, 201 bp, Homo sapiens; identical to SEQ ID NO: 18184

SEQ ID NO: 18200 - DNA, 201 bp, Homo sapiens; identical to SEQ ID NO: 18185

SEQ ID NO: 18201 - DNA, 201 bp, Homo sapiens; identical to SEQ ID NO: 18186

SEQ ID NO: 18202 - DNA, 192 bp, Homo sapiens; identical to SEQ ID NO: 18187

SEQ ID NO: 18203 - DNA, 201 bp, Homo sapiens; identical to SEQ ID NO: 18188

SEQ ID NO: 18204 - DNA, 201 bp, Homo sapiens; identical to SEQ ID NO: 18189

SEQ ID NO: 18205 - DNA, 201 bp, Homo sapiens; identical to SEQ ID NO: 18190

SEQ ID NO: 18206 - DNA, 201 bp, Homo sapiens; identical to SEQ ID NO: 18191

SEQ ID NO: 18207 - DNA, 201 bp, Homo sapiens; identical to SEQ ID NO: 18192

SEQ ID NO: 18208 - DNA, 201 bp, Homo sapiens; identical to SEQ ID NO: 18178

SEQ ID NO: 18209 - DNA, 201 bp, Homo sapiens; identical to SEQ ID NO: 18194

SEQ ID NO: 18210 - DNA, 201 bp, Homo sapiens; identical to SEQ ID NO: 18180

SEQ ID NO: 18211 - DNA, 201 bp, Homo sapiens; identical to SEQ ID NO: 18181

SEQ ID NO: 18212 - DNA, 201 bp, Homo sapiens; identical to SEQ ID NO: 18182

SEQ ID NO: 18213 - DNA, 201 bp, Homo sapiens; identical to SEQ ID NO: 18183

SEQ ID NO: 18214 - DNA, 201 bp, Homo sapiens; identical to SEQ ID NO: 18184

SEQ ID NO: 18215 - DNA, 201 bp, Homo sapiens; identical to SEQ ID NO: 18185

SEQ ID NO: 18216 - DNA, 192 bp, Homo sapiens; identical to SEQ ID NO: 18187

SEQ ID NO: 18217 - DNA, 201 bp, Homo sapiens; identical to SEQ ID NO: 18188

SEQ ID NO: 18218 - DNA, 201 bp, Homo sapiens; identical to SEQ ID NO: 18191

SEQ ID NO: 18219 - DNA, 201 bp, Homo sapiens; identical to SEQ ID NO: 18178

SEQ ID NO: 18220 - DNA, 201 bp, Homo sapiens
ctgcatgctggaggctgtgctgagtgcccggtgcaggtgagccggtcctgcggagttgtgccgagtgcctgctgcagagaccgaggctgggccaagatggygtctgtgtttcgaagcgaggagatgtgtttgtcacaactgtttctccaggtggaagctgcatattgctgtgtggctgagctcggagagctcggattggtt

SEQ ID NO: 18221 - DNA, 201 bp, Homo sapiens; identical to SEQ ID NO: 18181

SEQ ID NO: 18222 - DNA, 201 bp, Homo sapiens; identical to SEQ ID NO: 18182

SEQ ID NO: 18223 - DNA, 201 bp, Homo sapiens; identical to SEQ ID NO: 18183

SEQ ID NO: 18224 - DNA, 201 bp, Homo sapiens; identical to SEQ ID NO: 18184

SEQ ID NO: 18225 - DNA, 201 bp, Homo sapiens; identical to SEQ ID NO: 18185

SEQ ID NO: 18226 - DNA, 201 bp, Homo sapiens; identical to SEQ ID NO: 18186

SEQ ID NO: 18227 - DNA, 192 bp, Homo sapiens; identical to SEQ ID NO: 18187

SEQ ID NO: 18228 - DNA, 201 bp, Homo sapiens; identical to SEQ ID NO: 18188

SEQ ID NO: 18229 - DNA, 201 bp, Homo sapiens; identical to SEQ ID NO: 18189

SEQ ID NO: 18230 - DNA, 201 bp, Homo sapiens; identical to SEQ ID NO: 18190

SEQ ID NO: 18231 - DNA, 201 bp, Homo sapiens; identical to SEQ ID NO: 18191

SEQ ID NO: 18232 - DNA, 201 bp, Homo sapiens; identical to SEQ ID NO: 18192

SEQ ID NO: 18233 - DNA, 201 bp, Homo sapiens; identical to SEQ ID NO: 18178

SEQ ID NO: 18234 - DNA, 201 bp, Homo sapiens
cgctgcatgctggaggctgtgctgagtgcccggtgcaggtgagccggtcctgcggagttgtgccgagtgcctgctgcagaccgaggctgggccaagatggygtctgtgtttcgaagcgaggagatgtgtttgtcacaactgtttctccaggtggaagctgcatattgctgtgtggctgagctcggagagctcggattggtt

SEQ ID NO: 18235 - DNA, 201 bp, Homo sapiens; identical to SEQ ID NO: 18181

SEQ ID NO: 18236 - DNA, 201 bp, Homo sapiens; identical to SEQ ID NO: 18182

SEQ ID NO: 18237 - DNA, 201 bp, Homo sapiens; identical to SEQ ID NO: 18183

SEQ ID NO: 18238 - DNA, 201 bp, Homo sapiens; identical to SEQ ID NO: 18184

SEQ ID NO: 18239 - DNA, 201 bp, Homo sapiens; identical to SEQ ID NO: 18185

SEQ ID NO: 18240 - DNA, 201 bp, Homo sapiens; identical to SEQ ID NO: 18186

SEQ ID NO: 18241 - DNA, 192 bp, Homo sapiens; identical to SEQ ID NO: 18187

SEQ ID NO: 18242 - DNA, 201 bp, Homo sapiens; identical to SEQ ID NO: 18188

SEQ ID NO: 18243 - DNA, 201 bp, Homo sapiens; identical to SEQ ID NO: 18189

SEQ ID NO: 18244 - DNA, 201 bp, Homo sapiens; identical to SEQ ID NO: 18190

SEQ ID NO: 18245 - DNA, 201 bp, Homo sapiens; identical to SEQ ID NO: 18191

SEQ ID NO: 18246 - DNA, 201 bp, Homo sapiens; identical to SEQ ID NO: 18192

SEQ ID NO: 18247 - DNA, 201 bp, Homo sapiens; identical to SEQ ID NO: 18178

SEQ ID NO: 18248 - DNA, 201 bp, Homo sapiens
tccctgctccgtgcgtcaggttggggaaaccaccgtctgccccagaccctgacccaggacccgcctggaggaagctgggaccgaggctgggccaagatggygtctgtgtttcgaagcgaggagatgtgtttgtcacaactgtttctccaggtggaagctgcatattgctgtgtggctgagctcggagagctcggattggtt

SEQ ID NO: 18249 - DNA, 201 bp, Homo sapiens; identical to SEQ ID NO: 18181

SEQ ID NO: 18250 - DNA, 201 bp, Homo sapiens; identical to SEQ ID NO: 18182

SEQ ID NO: 18251 - DNA, 201 bp, Homo sapiens; identical to SEQ ID NO: 18183

SEQ ID NO: 18252 - DNA, 201 bp, Homo sapiens; identical to SEQ ID NO: 18184

SEQ ID NO: 18253 - DNA, 201 bp, Homo sapiens; identical to SEQ ID NO: 18185

SEQ ID NO: 18254 - DNA, 201 bp, Homo sapiens; identical to SEQ ID NO: 18186

SEQ ID NO: 18255 - DNA, 192 bp, Homo sapiens; identical to SEQ ID NO: 18187

SEQ ID NO: 18256 - DNA, 201 bp, Homo sapiens; identical to SEQ ID NO: 18188

SEQ ID NO: 18257 - DNA, 201 bp, Homo sapiens; identical to SEQ ID NO: 18189

SEQ ID NO: 18258 - DNA, 201 bp, Homo sapiens; identical to SEQ ID NO: 18190

SEQ ID NO: 18259 - DNA, 201 bp, Homo sapiens; identical to SEQ ID NO: 18191

SEQ ID NO: 18260 - DNA, 201 bp, Homo sapiens; identical to SEQ ID NO: 18192

SEQ ID NO: 18261 - DNA, 201 bp, Homo sapiens
gggctgcagctccatctgcatcacccaggaagtgatggcctacagctggccccagggcactgctgtgtacaaggtggccgagtatgcccggcactttgccratggcggcatccagaccatggggaacatggtcaaggccctggcccttggagcctccacagtgatgatgggctcccttctggccgccaccacggaggtccc

SEQ ID NO: 18262 - DNA, 201 bp, Homo sapiens
accggggtatgggctcactggatgccctggagaagagcagcggcagccagaaacaatacttcatggagggggataagttgaagatcgcgcagggtgtctcyagctccatccaggacaaagggtccattcagaagttcgtgtcctacctcatagcgggcatccagcatggctgccaggatactggggtctgcaacctgtctg

SEQ ID NO: 18263 - DNA, 201 bp, Homo sapiens
cgaaggcctgagacagaatgtggacgtgtggctgtggcagctggcaagtgatgaggcccaacagtctccatttgattctcctgctcctcttctccaggagsgctcctcggtggtgacaatggggggacggcgcctgagcctggcccctgatgacagcctcctggtgctagctgggacctcgtatgcctgggagcgaacaca

SEQ ID NO: 18264 - DNA, 201 bp, Homo sapiens
ctatgagacccaggtgatcgcctatgggcaaggcagcagcgaaggcctgagacagaatgtggacgtgtggctgtggcagctggcaagtgatgaggcccaasagtctccatttgattctcctgctcctcttctccaggagggctcctcggtggtgacaatggggggacggcgcctgagcctggcccctgatgacagcctcct

SEQ ID NO: 18265 - DNA, 201 bp, Homo sapiens
gagtgccatccctgccaaacaactctcccagcccccactacctctctgtgtactgccgctgtgtcccccacagacctgcacattgttgtcacccaccctcytgcccttctcagcccagatgccatgcccctgggcgggcagcagctccccatcttctctggcagactcagcccactgccttgccagtcttgccaggtggtc

SEQ ID NO: 18266 - DNA, 201 bp, Homo sapiens
ccccaacaccaggaaggactatcacatcgaagagggtgaagaggtattttaccagctggagggagacatggttctccgagtcctggagcaagggaaacacygggatgtggtcattcggcagggagagatattcctcctgcctgccagggtgccccactcaccacagaggtttgccaacaccgtggggctggtggttgagcg

SEQ ID NO: 18267 - DNA, 201 bp, Homo sapiens
tggggtgaccctcttgccatggcctgaagcagccacaggtgtgccaagcaccctcgagtgccatccctgccaaacaactctcccagcccccactacctctmtgtgtactgccgctgtgtcccccacagacctgcacattgttgtcacccaccctcctgcccttctcagcccagatgccatgcccctgggcgggcagcagct

SEQ ID NO: 18268 - DNA, 201 bp, Homo sapiens
agcagccacaggtgtgccaagcaccctcgagtgccatccctgccaaacaactctcccagcccccactacctctctgtgtactgccgctgtgtcccccacakacctgcacattgttgtcacccaccctcctgcccttctcagcccagatgccatgcccctgggcgggcagcagctccccatcttctctggcagactcagccc

SEQ ID NO: 18269 - DNA, 201 bp, Homo sapiens
ccgcctgggagtgagggcctgggtgaaggagaaccggggctccttccagcccccggtctgcaacaagctcatgcaccaggagcagctcaaagtcatgttcrtcggaggccccaacaccaggaaggactatcacatcgaagagggtgaagaggtattttaccagctggagggagacatggttctccgagtcctggagcaagg

SEQ ID NO: 18270 - DNA, 201 bp, Homo sapiens
ccactacctctctgtgtactgccgctgtgtcccccacagacctgcacattgttgtcacccaccctcctgcccttctcagcccagatgccatgcccctgggygggcagcagctccccatcttctctggcagactcagcccactgccttgccagtcttgccaggtggtctacccccggccccgctcctgcccattcctctgtc

SEQ ID NO: 18271 - DNA, 201 bp, Homo sapiens
gtgtcccccacagacctgcacattgttgtcacccaccctcctgcccttctcagcccagatgccatgcccctgggcgggcagcagctccccatcttctctgrcagactcagcccactgccttgccagtcttgccaggtggtctacccccggccccgctcctgcccattcctctgtccctgcagactcagtgcagcacttcca

SEQ ID NO: 18272 - DNA, 201 bp, Homo sapiens
gggcaaagtccgcgggccccaagcccccaccacggggtcgcgggggtttgctccgcctcgtgagcttgggattctggttaaaaaggcggctgggcggagcygcgggcctccgacggcgggaggacagcgctgcgaggaggcgcccgggacagtcatggagcgccgcctgggagtgagggcctgggtgaaggagaaccgggg

SEQ ID NO: 18273 - DNA, 201 bp, Homo sapiens
cccagcgctgccgccgccgcgctcgccagggcctggagtggcgcggagggcggcgggctcagaccaaagtccaccagggggcaaagtccgcgggccccaakcccccaccacggggtcgcgggggtttgctccgcctcgtgagcttgggattctggttaaaaaggcggctgggcggagctgcgggcctccgacggcgggagg

SEQ ID NO: 18274 - DNA, 201 bp, Homo sapiens
ctttgtcctccgccgggagcaggccccaccgcaggcgccagtgtgtggggcgccccggagacggtggcggggaccgagcccctgccccgcggagaagcagrgggcgcgggacgccgttccccagcgctgccgccgccgcgctcgccagggcctggagtggcgcggagggcggcgggctcagaccaaagtccaccagggggc

SEQ ID NO: 18275 - DNA, 201 bp, Homo sapiens
agcccatccctgaccagctgctcaaggagccaccattccctctgagcacacgatccatcatggagcccatgtccctggatgcctggctggacagccaccayagggagctgcaggcaggcacaccactcagcctgtttggggacacctatgagacccaggtgatcgcctatgggcaaggcagcagcgaaggcctgagacaga

SEQ ID NO: 18276 - DNA, 201 bp, Homo sapiens
accctgcctgcaagaagcccctggggtgaccctcttgccatggcctgaagcagccacaggtgtgccaagcaccctcgagtgccatccctgccaaacaactstcccagcccccactacctctctgtgtactgccgctgtgtcccccacagacctgcacattgttgtcacccaccctcctgcccttctcagcccagatgccat

SEQ ID NO: 18277 - DNA, 201 bp, Homo sapiens
cccaagcccccaccacggggtcgcgggggtttgctccgcctcgtgagcttgggattctggttaaaaaggcggctgggcggagctgcgggcctccgacggcrggaggacagcgctgcgaggaggcgcccgggacagtcatggagcgccgcctgggagtgagggcctgggtgaaggagaaccggggctccttccagcccccgg

SEQ ID NO: 18278 - DNA, 201 bp, Homo sapiens
ggcctgggtgaaggagaaccggggctccttccagcccccggtctgcaacaagctcatgcaccaggagcagctcaaagtcatgttcatcggaggccccaacwccaggaaggactatcacatcgaagagggtgaagaggtattttaccagctggagggagacatggttctccgagtcctggagcaagggaaacaccgggatgt

SEQ ID NO: 18279 - DNA, 201 bp, Homo sapiens
ctgtttggggacacctatgagacccaggtgatcgcctatgggcaaggcagcagcgaaggcctgagacagaatgtggacgtgtggctgtggcagctggcaasgctcctcggtggtgacaatggggggacggcgcctgagcctggcccctgatgacagcctcctggtgctagctgggacctcgtatgcctgggagcgaacaca

SEQ ID NO: 18280 - DNA, 201 bp, Homo sapiens; identical to SEQ ID NO: 18276

SEQ ID NO: 18281 - DNA, 201 bp, Homo sapiens; identical to SEQ ID NO: 18265

SEQ ID NO: 18282 - DNA, 201 bp, Homo sapiens; identical to SEQ ID NO: 18266

SEQ ID NO: 18283 - DNA, 201 bp, Homo sapiens; identical to SEQ ID NO: 18267

SEQ ID NO: 18284 - DNA, 201 bp, Homo sapiens; identical to SEQ ID NO: 18268

SEQ ID NO: 18285 - DNA, 201 bp, Homo sapiens; identical to SEQ ID NO: 18278

SEQ ID NO: 18286 - DNA, 201 bp, Homo sapiens; identical to SEQ ID NO: 18277

SEQ ID NO: 18287 - DNA, 201 bp, Homo sapiens; identical to SEQ ID NO: 18269

SEQ ID NO: 18288 - DNA, 201 bp, Homo sapiens; identical to SEQ ID NO: 18270

SEQ ID NO: 18289 - DNA, 201 bp, Homo sapiens; identical to SEQ ID NO: 18271

SEQ ID NO: 18290 - DNA, 201 bp, Homo sapiens; identical to SEQ ID NO: 18272

SEQ ID NO: 18291 - DNA, 201 bp, Homo sapiens; identical to SEQ ID NO: 18273

SEQ ID NO: 18292 - DNA, 201 bp, Homo sapiens; identical to SEQ ID NO: 18274

SEQ ID NO: 18293 - DNA, 201 bp, Homo sapiens; identical to SEQ ID NO: 18275

SEQ ID NO: 18294 - DNA, 201 bp, Homo sapiens
tcattgaatccatgttgaaaaatctatccaggattcatctcgtgtcaacaatggtaaaggggatgtatggcatcgagaatgaagtcttcctgagccttccrtatatcctcaatgcccggggattaaccagcgttatcaaccagaagctaaaggatgatgaggttgctcagttcaagaaaagtacagataccccgtgggaca

SEQ ID NO: 18295 - DNA, 201 bp, Homo sapiens
ttgaaaaatctatccaggattcatctcgtgtcaacaatggtaaaggggatgtatggcatcgagaatgaagtcttcctgagccttccatatatcctcaatgyccggggattaaccagcgttatcaaccagaagctaaaggatgatgaggttgctcagttcaagaaaagtacagataccccgtgggacatccagaaggaccta

SEQ ID NO: 18296 - DNA, 201 bp, Homo sapiens
ttgtggcagataaagattattctgtgactgccagttataagattgtagtggtaactgcaggagtccttcagcaagagggggagaggcgggacattcttacrtatgttacctggaaaataagtggattactcaaacaccatgtgattggaagtggatgtaatccggattctgctagatttcactgccttatggatgaaaaat

SEQ ID NO: 18297 - DNA, 201 bp, Homo sapiens
gattactcaaacaccatgtgattggaagtggatgtaatccggattctgctagatttcactgccttatggatgaaaaatttggcattcatcccagcagctgycatggaaggattttgggggaacatagtgactcaagtgtggctgtgtggattggcatgaatgtgacaggtttttctctccaggaattgaatccagaaatag

SEQ ID NO: 18298 - DNA, 201 bp, Homo sapiens
gatggatctgcagcatgggagcttatttctcaagacgcttaaaattgtggcagataaagattattctgtgactgccagttataagattgtagtggtaactkcaggagtccttcagcaagagggggagaggcgggacattcttacatatgttacctggaaaataagtggattactcaaacaccatgtgattggaagtggatg

SEQ ID NO: 18299 - DNA, 201 bp, Homo sapiens
cattgtaccagttgcggaagaagaggcaacagtccaaaacaataagatcactgtagtgagtgttggacaagttggtatggcgtgtgctatcagcattctgsgaaaatctctggctgatgaatttgcttttgtggatgttttggaagataagcttaaaggagaaatgatggatctgcagcatgggagcttatttctcaagac

SEQ ID NO: 18300 - DNA, 201 bp, Homo sapiens
ggaaaatctctggctgatgaatttgcttttgtggatgttttggaagataagcttaaaggagaaatgatggatctgcagcatgggagcttatttctcaagamgcttaaaattgtggcagataaagattattctgtgactgccagttataagattgtagtggtaactgcaggagtccttcagcaagagggggagaggcgggac

SEQ ID NO: 18301 - DNA, 201 bp, Homo sapiens
tagttccaccttctgggtgttgggagtagttccagcactttccagagccttctctctcctgtgcaaaatagcaactcttaaggaaaaactcattgtaccakttgcggaagaagaggcaacagtccaaaacaataagatcactgtagtgagtgttggacaagttggtatggcgtgtgctatcagcattctgggaaaatctct

SEQ ID NO: 18302 - DNA, 201 bp, Homo sapiens
ttttggaagataagcttaaaggagaaatgatggatctgcagcatgggagcttatttctcaagacgcttaaaattgtggcagataaagattattctgtgacygccagttataagattgtagtggtaactgcaggagtccttcagcaagagggggagaggcgggacattcttacatatgttacctggaaaataagtggattac

SEQ ID NO: 18303 - DNA, 201 bp, Homo sapiens
gggggagctggcacccgagctaggggaggagccccagccccgcgacgaggaggaagcggagctggagctgctgaggcagtttgacctggcctggcagtacrggccctgcaccgggatcacacggctgcagcgctggtgtcgggccaagcagatgggcttggagcctcccccagaggtgtggcaggtgctgaagacccaccc

SEQ ID NO: 18304 - DNA, 201 bp, Homo sapiens
cgctgggcacagcaagggggagctggcacccgagctaggggaggagccccagccccgcgacgaggaggaagcggagctggagctgctgaggcagtttgacstggcctggcagtacgggccctgcaccgggatcacacggctgcagcgctggtgtcgggccaagcagatgggcttggagcctcccccagaggtgtggcaggt

SEQ ID NO: 18305 - DNA, 201 bp, Homo sapiens
tgaagacccaccccggagacccccgcttccagtgcagtctctggcatctctatcccctatgaggcaccacgtaagacctcctgcccttagctctcttgctyaccacccaagaacctcaggacagaagcgagagcccattgctcctgctcagctcagcccggctgcggaggaacccttggcaggcagaacctggaggtgtca

SEQ ID NO: 18306 - DNA, 195 bp, Homo sapiens
gcagctgaagcagagtgcttctagatggagagtggtcactggggaaaaggacctggccatcaccttccaatacctgctgcctgtctccctgacccatgatytggcaagttaggcacagtcagacatggacagttgatccatgactcccagggcaaggggttcactaatgcttatcaataaagaatattgagcctg

SEQ ID NO: 18307 - DNA, 201 bp, Homo sapiens
ctcatcactgattcctacccggttgtgaagaggagggaggggcccgctgggcacagcaagggggagctggcacccgagctaggggaggagccccagccccscgacgaggaggaagcggagctggagctgctgaggcagtttgacctggcctggcagtacgggccctgcaccgggatcacacggctgcagcgctggtgtcgg

SEQ ID NO: 18308 - DNA, 201 bp, Homo sapiens
tcatcactgattcctacccggttgtgaagaggagggaggggcccgctgggcacagcaagggggagctggcacccgagctaggggaggagccccagccccgmgacgaggaggaagcggagctggagctgctgaggcagtttgacctggcctggcagtacgggccctgcaccgggatcacacggctgcagcgctggtgtcggg

SEQ ID NO: 18309 - DNA, 201 bp, Homo sapiens; identical to SEQ ID NO: 18304

SEQ ID NO: 18310 - DNA, 201 bp, Homo sapiens; identical to SEQ ID NO: 18305

SEQ ID NO: 18311 - DNA, 201 bp, Homo sapiens; identical to SEQ ID NO: 18307

SEQ ID NO: 18312 - DNA, 201 bp, Homo sapiens; identical to SEQ ID NO: 18308

SEQ ID NO: 18313 - DNA, 201 bp, Homo sapiens; identical to SEQ ID NO: 18303

SEQ ID NO: 18314 - DNA, 184 bp, Homo sapiens
ctgcctgtctccctgacccatgatctggcaagttaggcacagtcagacatggacagttgatccatgaggaaaagatgctctcccacctaaggccaggaatytgagagcaggactggctgagctcccagggcaaggggttcactaatgcttatcaataaagaatattgagcctggaatcctgacc

SEQ ID NO: 18315 - DNA, 200 bp, Homo sapiens
caccttccaatacctgctgcctgtctccctgacccatgatctggcaagttaggcacagtcagacatggacagttgatccatgaggaaaagatgctctcccmcctaaggccaggaatctgagagcaggactggctgagctcccagggcaaggggttcactaatgcttatcaataaagaatattgagcctggaatcctgacc

SEQ ID NO: 18316 - DNA, 201 bp, Homo sapiens
gcagctgaagcagagtgcttctagatggagagtggtcactggggaaaaggacctggccatcaccttccaatacctgctgcctgtctccctgacccatgatytggcaagttaggcacagtcagacatggacagttgatccatgaggaaaagatgctctcccacctaaggccaggaatctgagagcaggactggctgagctcc

SEQ ID NO: 18317 - DNA, 201 bp, Homo sapiens
cgctgcccacgcccgggccggacagggacagggagctcacggccgactccgatgtcgacgagtttctggacaagtttctcagtgctggcgtgaagcagagygaccttcccagaaaggagacggagcagccgcctgcgccggggagcatggaggagagcgtgagaggctacgactggtccccgcgcgacgcccggcgcagcc

SEQ ID NO: 18318 - DNA, 201 bp, Homo sapiens
ttccaggatccccagctcccgagggcccccgtgtgcctgctgtcacctgaacggggctccccggccccgccgaccgcagccctggagcctgcagacgccakcagcaccggcaggttcccagcaggatgccccggctctgcaggaagctgaagtgagaggcccggagagggcccagcccgcccggggcaggatgaccaaggc

SEQ ID NO: 18319 - DNA, 201 bp, Homo sapiens
ctgctgcaccgcggtgcgccctaccgcgacccgctgcgcatcccgcgcgagcacgtgcacaacgccagcgcgcacctgaccttcaacaagttctggcgcckctacgggaagctctcccgccacctcatgaaggtcaagctcaagaagtacaccaagttcctcttcgtgcgcgaccccttcgtgcgcctgatctccgccttc

SEQ ID NO: 18320 - DNA, 201 bp, Homo sapiens
caagtttctcagtgctggcgtgaagcagagcgaccttcccagaaaggagacggagcagccgcctgcgccggggagcatggaggagagcgtgagaggctacsactggtccccgcgcgacgcccggcgcagcccagaccagggccggcagcaggcggagcggaggagcgtgctgcggggcttctgcgccaactccagcctggc

SEQ ID NO: 18321 - DNA, 201 bp, Homo sapiens
tgctggcgtgaagcagagcgaccttcccagaaaggagacggagcagccgcctgcgccggggagcatggaggagagcgtgagaggctacgactggtccccgmgcgacgcccggcgcagcccagaccagggccggcagcaggcggagcggaggagcgtgctgcggggcttctgcgccaactccagcctggccttccccaccaa

SEQ ID NO: 18322 - DNA, 201 bp, Homo sapiens
agttctttgtttaagtgttgtacttgaaaaggtcaatcttcagggcttcctgtttgaagtcaagtcagaggtaaaccggtcagttacagaagcaggatttytaggatttctaactccagctgttcccatactgtctagtttaaattatggctgttaaggccgggcgggtgactcaggcaggtaatcccagaactttgggag

SEQ ID NO: 18323 - DNA, 201 bp, Homo sapiens
  misc_feature (1)...(201): n = A,T,C or G
acggccgactccgatgtcgacgagtttctggacaagtttctcagtgctggcgtgaagcagagcgaccttcccagaaaggagacggagcagccgcctgcgcnggggagcatggaggagagcgtgagaggctacgactggtccccgcgcgacgcccggcgcagcccagaccagggccggcagcaggcggagcggaggagcgtg

SEQ ID NO: 18324 - DNA, 201 bp, Homo sapiens
cagcgcaggcgccgcgcacttctacttgcacacgtccttctctaggccgcacacggggccgccgctgcccacgcccgggccggacagggacagggagctchcggccgactccgatgtcgacgagtttctggacaagtttctcagtgctggcgtgaagcagagcgaccttcccagaaaggagacggagcagccgcctgcgcc

SEQ ID NO: 18325 - DNA, 201 bp, Homo sapiens
atcctgctgatcatcgtgtactgggacagcgcaggcgccgcgcacttctacttgcacacgtccttctctaggccgcacacggggccgccgctgcccacgcmcgggccggacagggacagggagctcacggccgactccgatgtcgacgagtttctggacaagtttctcagtgctggcgtgaagcagagcgaccttcccaga

SEQ ID NO: 18326 - DNA, 201 bp, Homo sapiens
ctacgaggccgactttgttctcttcggctaccccaagcccgaaaacctcctccgagactgaaagctttcgcgttgctttttctcgcgtgcctggaacctgmcgcacgcgcactccagtttttttatgacctacgattttgcaatctgggcttcttgttcactccactgcctctatccattgagtactgtatcgatattgtt

SEQ ID NO: 18327 - DNA, 201 bp, Homo sapiens
tatcgatattgttttttaagattaatatatttcaggtatttaatacgaaatgtggaagggaatgctggagtaaaatatcccctctcccctccgcccgcccrcccgcccgcccgctcgcccgcccgcccgctcgcccgctcctgtggtttttctgagcgtgcgggctccgggaggggatgctgaggctgatggagctgcctc

SEQ ID NO: 18328 - DNA, 201 bp, Homo sapiens
tggagtaaaatatcccctctcccctccgcccgcccgcccgcccgcccgctcgcccgcccgcccgctcgcccgctcctgtggtttttctgagcgtgcgggckccgggaggggatgctgaggctgatggagctgcctccagggctagggccactcaccggaggagggcggggcctgcacttgaagtcaggccgcacctgtctg

SEQ ID NO: 18329 - DNA, 201 bp, Homo sapiens
ctgatctccgccttccgcagcaagttcgagctggagaacgaggagttctaccgcaagttcgccgtgcccatgctgcggctgtacgccaaccacaccagccwgcccgcctcggcgcgcgaggccttccgcgctggcctcaaggtgtccttcgccaacttcatccagtacctgctggacccgcacacggagaagctggcgccc

SEQ ID NO: 18330 - DNA, 201 bp, Homo sapiens; identical to SEQ ID NO: 18317

SEQ ID NO: 18331 - DNA, 201 bp, Homo sapiens; identical to SEQ ID NO: 18319

SEQ ID NO: 18332 - DNA, 201 bp, Homo sapiens; identical to SEQ ID NO: 18320

SEQ ID NO: 18333 - DNA, 201 bp, Homo sapiens; identical to SEQ ID NO: 18321

SEQ ID NO: 18334 - DNA, 201 bp, Homo sapiens; identical to SEQ ID NO: 18322

SEQ ID NO: 18335 - DNA, 201 bp, Homo sapiens; identical to SEQ ID NO: 18323
  misc_feature (1)...(201): n = A,T,C or G

SEQ ID NO: 18336 - DNA, 201 bp, Homo sapiens; identical to SEQ ID NO: 18324

SEQ ID NO: 18337 - DNA, 201 bp, Homo sapiens; identical to SEQ ID NO: 18325

SEQ ID NO: 18338 - DNA, 201 bp, Homo sapiens; identical to SEQ ID NO: 18326

SEQ ID NO: 18339 - DNA, 201 bp, Homo sapiens; identical to SEQ ID NO: 18327

SEQ ID NO: 18340 - DNA, 201 bp, Homo sapiens; identical to SEQ ID NO: 18328

SEQ ID NO: 18341 - DNA, 201 bp, Homo sapiens; identical to SEQ ID NO: 18329

SEQ ID NO: 18342 - DNA, 201 bp, Homo sapiens
ttccaggatccccagctcccgagggcccccgtgtgcctgctgtcacctgaacggggctccccggccccgccgaccgcagccctggagcctgcagacgccakcagcaccggcaggtcgctcagggtatcccttaaatgacctctcactccagaagccgcagccctgcccctctgggagaggaaaccgtgcatttagtccggg

SEQ ID NO: 18343 - DNA, 184 bp, Homo sapiens
aggcgggttgggtgggaggaggaagaaagggaagaattaggtttgaattgctttttaaaaaaaaaagaaaagaaaaagacagcatctcactatgttgccawggctcatcttgagaagcaggcgggttgggtgggaggaggaagaaagggaagaattaggtttgaattgcttttttaaaaaaaaa

SEQ ID NO: 18344 - DNA, 185 bp, Homo sapiens
caggcgggttgggtgggaggaggaagaaagggaagaattaggtttgaattgctttttaaaaaaaaaagaaaagaaaaagacagcatctcactatgttgccwaggctcatcttgagaagcaggcgggttgggtgggaggaggaagaaagggaagaattaggtttgaattgcttttttaaaaaaaaa

SEQ ID NO: 18345 - DNA, 201 bp, Homo sapiens
cagagtctcaaggcggctatgagaggttttcctccgagtacccagaattctgttctaaaaccaaggccctggcagccatcccacccccggttccccccagygccacagagcccttggacctgggctgcagctcctgtgggaccccactacacgaccaggggggtcctgtggagatccttcccttcctctacctcggcagtg

SEQ ID NO: 18346 - DNA, 144 bp, Homo sapiens
gcagttcagacccccccacacccatcaaagagccgctcctcccscccgcaggcgccttcgccgcctccctcccttcctttcctttccgctcctcttccgacctgtccacccgggaggaagggagctggaaagggggcggaaacc

SEQ ID NO: 18347 - DNA, 201 bp, Homo sapiens
ccgacctgtccacccgggaggaagggagctggaaagggggcggaaacctctcccctccaaaaagcacaacaaaactgttcagtgcggaggagccgggttcrcccctgccggacagcggggggctttgttccccgcagttgtttcctgcccatttgacctgtcagctgctggggaaacgctgctgttgacctttggttgaac

SEQ ID NO: 18348 - DNA, 201 bp, Homo sapiens
aggtgtaaattgagagtgaaatttgaccctttagaccgtcacaacttccttgggcttatcctgggtgcttataggagaggtgggctccacccacaaaaatrgactgctcagaaaaatgagggagagagaaagggtggccactttcccgagccaagaaattccttgaaaaaaaatcagaacatctgaaaccagagagccgat

SEQ ID NO: 18349 - DNA, 201 bp, Homo sapiens
tccccaggagggcaatggcatcaaacagcacagctctgggggatgtcaatattgcataccttttctacctaaagggaaaatgactcgcttttctgcttgcaaataaatttctgcttgcaaatatggtagtttctgcttacaaatgtaatacaatgcccatgacagccaaggactggaagcataagttgctaggtcttacag

SEQ ID NO: 18350 - DNA, 201 bp, Homo sapiens
ccccaggagggcaatggcatcaaacagcacagctctgggggatgtcaatattgcataccttttctacctaaagggaaaatgactcgcttttctgcttgcaaataaatttctgcttgcaaatatggtagtttctgcttacaaatgtaatacaatgcccatgacagccaaggactggaagcataagttgctaggtcttacagg

SEQ ID NO: 18351 - DNA, 201 bp, Homo sapiens
atttgacctgtcagctgctggggaaacgctgctgttgacctttggttgaactgctaaggcgattttgctgatttttctttctttttccgcgagggctgtcttttgctcctccaaatgagcccagtccccctcccttctccccaaagcgctccaagagaaagtgccaggaaggggcttgtcccggaaggcctggcggctgag

SEQ ID NO: 18352 - DNA, 201 bp, Homo sapiens
cccaggagggcaatggcatcaaacagcacagctctgggggatgtcaatattgcataccttttctacctaaagggaaaatgactcgcttttctgcttgcaaataaatttctgcttgcaaatatggtagtttctgcttacaaatgtaatacaatgcccatgacagccaaggactggaagcataagttgctaggtcttacaggt

SEQ ID NO: 18353 - DNA, 201 bp, Homo sapiens
tttgacctgtcagctgctggggaaacgctgctgttgacctttggttgaactgctaaggcgattttgctgatttttctttctttttccgcgagggctgtcttttgctcctccaaatgagcccagtccccctcccttctccccaaagcgctccaagagaaagtgccaggaaggggcttgtcccggaaggcctggcggctgagc

SEQ ID NO: 18354 - DNA, 201 bp, Homo sapiens
ggcttatcctgggtgcttataggagaggtgggctccacccacaaaaatggactgctcagaaaaatgagggagagagaaagggtggccactttcccgagccaagaaattccttgaaaaaaaatcagaacatctgaaaccagagagccgatttccttaccgggaggcagttcctggctaacgaagaggaagcacgatgggaag

SEQ ID NO: 18355 - DNA, 201 bp, Homo sapiens
gcttgtcccggaaggcctggcggctgagcggggccaggtcctggttaggccaccagggtgggcgtccgcgccattgtttgagcttgtcggcgctggtgggrgagatgagggcaattcctctgggacgcaagtcccctcgaatggccggggctggccgggatgttccccgcacggcgctgccctcgagtccccccgatggag

SEQ ID NO: 18356 - DNA, 201 bp, Homo sapiens
ttcagttccccaggagggcaatggcatcaaacagcacagctctgggggatgtcaatattgcataccttttctacctaaagggaaaatgactcgcttttctgcttgcaaataaatttctgcttgcaaatatggtagtttctgcttacaaatgtaatacaatgcccatgacagccaaggactggaagcataagttgctaggtc

SEQ ID NO: 18357 - DNA, 201 bp, Homo sapiens
cagttccccaggagggcaatggcatcaaacagcacagctctgggggatgtcaatattgcataccttttctacctaaagggaaaatgactcgcttttctgcttgcaaataaatttctgcttgcaaatatggtagtttctgcttacaaatgtaatacaatgcccatgacagccaaggactggaagcataagttgctaggtctt

SEQ ID NO: 18358 - DNA, 201 bp, Homo sapiens
agttccccaggagggcaatggcatcaaacagcacagctctgggggatgtcaatattgcataccttttctacctaaagggaaaatgactcgcttttctgcttgcaaataaatttctgcttgcaaatatggtagtttctgcttacaaatgtaatacaatgcccatgacagccaaggactggaagcataagttgctaggtctta

SEQ ID NO: 18359 - DNA, 201 bp, Homo sapiens
gtccccctcccttctccccaaagcgctccaagagaaagtgccaggaaggggcttgtcccggaaggcctggcggctgagcggggccaggtcctggttaggcyaccagggtgggcgtccgcgccattgtttgagcttgtcggcgctggtgggagagatgagggcaattcctctgggacgcaagtcccctcgaatggccggggc

SEQ ID NO: 18360 - DNA, 180 bp, Homo sapiens
gggttgggtgggaggaggaagaaagggaagaattaggtttgaattgctttttaaaaaaaaaagaaaagaaaaagacagcatctcactatgttgccaaggcwcatcttgagaagcaggcgggttgggtgggaggaggaagaaagggaagaattaggtttgaattgcttttttaaaaaaaaa

SEQ ID NO: 18361 - DNA, 201 bp, Homo sapiens
aggctctcccgcgggagcccttgaggaccaagtttgcggccacttctgcaggcgtcccttcttagctctcgcccgcccctttctgcagcctaggcggcccrggttctcttctcttcctcgcgcgcccagccgcctcggttcccggcgaccatggtgacgatggaggagctgcgggagatggactgcagtgtgctcaaaagg

SEQ ID NO: 18362 - DNA, 184 bp, Homo sapiens; identical to SEQ ID NO: 18343

SEQ ID NO: 18363 - DNA, 185 bp, Homo sapiens; identical to SEQ ID NO: 18344

SEQ ID NO: 18364 - DNA, 201 bp, Homo sapiens
tgcgggaggaaggggacagggaagaagaggctctcccgcgggagcccttgaggaccaagtttgcggccacttctgcaggcgtcccttcttagctctcgccygcccctttctgcagcctaggcggcccgggttctcttctcttcctcgcgcgcccagccgcctcggttcccggcgaccatggtgacgatggaggagctgcgg

SEQ ID NO: 18365 - DNA, 201 bp, Homo sapiens
gcctgctcaaaggcggctatgagaggttttcctccgagtacccagaattctgttctaaaaccaaggccctggcagccatcccacccccggttccccccagygccacagagcccttggacctgggctgcagctcctgtgggaccccactacacgaccaggggggtcctgtggagatccttcccttcctctacctcggcagtg

SEQ ID NO: 18366 - DNA, 188 bp, Homo sapiens
aataaacctctaagccgaggagaaaactctggctggggcagtgcgctgagcgccggaggagcgtaggcagggcagcgctggcgccagyggcgacaggagccgcgcgaccggcaaaaatacacgggaggccgtcgccgaaaagagtccgcggtcctctctcgtaaacacactctcctccaccggcgcct

SEQ ID NO: 18367 - DNA, 180 bp, Homo sapiens; identical to SEQ ID NO: 18360

SEQ ID NO: 18368 - DNA, 184 bp, Homo sapiens; identical to SEQ ID NO: 18343

SEQ ID NO: 18369 - DNA, 185 bp, Homo sapiens; identical to SEQ ID NO: 18344

SEQ ID NO: 18370 - DNA, 201 bp, Homo sapiens; identical to SEQ ID NO: 18365

SEQ ID NO: 18371 - DNA, 190 bp, Homo sapiens
ttaataaacctctaagccgaggagaaaactctggctggggcagtgcgctgagcgccggaggagcgtaggcagggcagcgctggcgccagyggcgacaggagccgcgcgaccggcaaaaatacacgggaggccgtcgccgaaaagagtccgcggtcctctctcgtaaacacactctcctccaccggcgcct

SEQ ID NO: 18372 - DNA, 180 bp, Homo sapiens; identical to SEQ ID NO: 18360

SEQ ID NO: 18373 - DNA, 184 bp, Homo sapiens; identical to SEQ ID NO: 18343

SEQ ID NO: 18374 - DNA, 201 bp, Homo sapiens
cccggctgggcgcccgaggccgctccgactgctatgtgaccgcgaggctgcggttctcttctcttcctcgcgcgcccagccgcctcggttcccggcgaccrtggtgacgatggaggagctgcgggagatggactgcagtgtgctcaaaaggctgatgaaccgggacgagaatggcggcggcgcgggcggcagcggcagcca

SEQ ID NO: 18375 - DNA, 185 bp, Homo sapiens; identical to SEQ ID NO: 18344

SEQ ID NO: 18376 - DNA, 201 bp, Homo sapiens; identical to SEQ ID NO: 18365

SEQ ID NO: 18377 - DNA, 124 bp, Homo sapiens
aggcagggcagcgctggcgccagyggcgacaggagccgcgcgaccggcaaaaatacacgggaggccgtcgccgaaaagagtccgcggtcctctctcgtaaacacactctcctccaccggcgcct

SEQ ID NO: 18378 - DNA, 180 bp, Homo sapiens; identical to SEQ ID NO: 18360

SEQ ID NO: 18379 - DNA, 164 bp, Homo sapiens
gcagagatggcaggtgagatcgccaaggctcaggtcgctcggcctggtggcaacactgtcttcrggaagatcatctgcaaggaaatcccagccaaaatcatttttgaggatgaccagtgccttgctttccatgacacttcccctcaagcaccaacacgttttct

SEQ ID NO: 18380 - DNA, 201 bp, Homo sapiens
gcctgaataagggttatcaaatggtggtgaataaaggttcagatggtggacagtctgtctgtcaagttcatctccatgttcttggaggttggcagatgcaytggcctcctggttaagcacattttggtgataattttcccttctctgggcaatgattaagttaggcaagttccagtatgttaagtagcacacttatttttt

SEQ ID NO: 18381 - DNA, 201 bp, Homo sapiens
aggggcaacagaagaagccctttgaggagcactggaggaagcacaccctgtcctatgtggacgttggcactgggaaggtcactctggaatatagacccgtratcgacaaaactttgaacgaggctgactgtgccaccgtcccgccagccattcgctcctactgatgagacaagatgtggtgatgacagaatcagctttttg

SEQ ID NO: 18382 - DNA, 201 bp, Homo sapiens
tggtcgagctagaaaattatggcatgccgtttagcagaactgaagatgggaagatttatcagcgtgcatttggtggacagagcctcaagtttggaaagggygggcaggcccatcggtgctgctgtgtggctgatcggactggccactcgctattgcacaccttatatggaaggtctctgcgatatgataccagctattttg

SEQ ID NO: 18383 - DNA, 201 bp, Homo sapiens
caaggggcaggtcctgaggcacgtgaatggccaggatcagattgtgcccggcctgtacgcctgtggggaggccgcctgtgcctcggtacatggtgccaacygcctcggggcaaactcgctcttggacctggttgtctttggtcgggcatgtgccctgagcatcgaagagtcatgcaggcctggagataaagtccctccaat

SEQ ID NO: 18384 - DNA, 201 bp, Homo sapiens
ggtcactctggaatatagacccgtgatcgacaaaactttgaacgaggctgactgtgccaccgtcccgccagccattcgctcctactgatgagacaagatgyggtgatgacagaatcagctttttgcacagccagagaacaacacatcacacacaggaaacagttgtgctcatgtgatgggggcctcagcactaggaaggag

SEQ ID NO: 18385 - DNA, 201 bp, Homo sapiens
tatgtggacgttggcactgggaaggtcactctggaatatagacccgtgatcgacaaaactttgaacgaggctgactgtgccaccgtcccgccagccattcrctcctactgatgagacaagatgtggtgatgacagaatcagctttttgcacagccagagaacaacacatcacacacaggaaacagttgtgctcatgtgatg

SEQ ID NO: 18386 - DNA, 201 bp, Homo sapiens
aaagcacctgaagacgttcgaccggggaatggtctggaacacggacctggtggagaccctggagctgcagaacctgatgctgtgtgcgctgcagaccatcwacggagcagaggcacggaaggagtcacggggcgcgcatgccagggaagactacaaggtgcggattgatgagtacgattactccaagcccatccaggggca

SEQ ID NO: 18387 - DNA, 201 bp, Homo sapiens
gaagcacaccctgtcctatgtggacgttggcactgggaaggtcactctggaatatagacccgtgatcgacaaaactttgaacgaggctgactgtgccaccrtcccgccagccattcgctcctactgatgagacaagatgtggtgatgacagaatcagctttttgcacagccagagaacaacacatcacacacaggaaacag

SEQ ID NO: 18388 - DNA, 201 bp, Homo sapiens
catatatggtgctggttgtctcattacggaaggatgtcgtggagagggaggcattctcattaacagtcaaggcgaaaggtttatggagcgatacgcccctrtcgcgaaggacctggcgtctagagatgtggtgtctcggtccatgactctggagatccgagaaggaagaggctgtggccctgagaaagatcacgtctacct

SEQ ID NO: 18389 - DNA, 201 bp, Homo sapiens
cctaaagcacctgaagacgttcgaccggggaatggtctggaacacggacctggtggagaccctggagctgcagaacctgatgctgtgtgcgctgcagaccrtctacggagcagaggcacggaaggagtcacggggcgcgcatgccagggaagactacaaggtgcggattgatgagtacgattactccaagcccatccaggg

SEQ ID NO: 18390 - DNA, 201 bp, Homo sapiens
cctttgaggagcactggaggaagcacaccctgtcctatgtggacgttggcactgggaaggtcactctggaatatagacccgtgatcgacaaaactttgaaygaggctgactgtgccaccgtcccgccagccattcgctcctactgatgagacaagatgtggtgatgacagaatcagctttttgcacagccagagaacaaca

SEQ ID NO: 18391 - DNA, 201 bp, Homo sapiens
gcatatatggtgctggttgtctcattacggaaggatgtcgtggagagggaggcattctcattaacagtcaaggcgaaaggtttatggagcgatacgccccygtcgcgaaggacctggcgtctagagatgtggtgtctcggtccatgactctggagatccgagaaggaagaggctgtggccctgagaaagatcacgtctacc

SEQ ID NO: 18392 - DNA, 201 bp, Homo sapiens
gcaagctctatggagacctaaagcacctgaagacgttcgaccggggaatggtctggaacacggacctggtggagaccctggagctgcagaacctgatgctrtgtgcgctgcagaccatctacggagcagaggcacggaaggagtcacggggcgcgcatgccagggaagactacaaggtgcggattgatgagtacgattact

SEQ ID NO: 18393 - DNA, 201 bp, Homo sapiens
aatcagcaagctctatggagacctaaagcacctgaagacgttcgaccggggaatggtctggaacacggacctggtggagaccctggagctgcagaacctgrtgctgtgtgcgctgcagaccatctacggagcagaggcacggaaggagtcacggggcgcgcatgccagggaagactacaaggtgcggattgatgagtacga

SEQ ID NO: 18394 - DNA, 154 bp, Homo sapiens
gcaggcgcagtctgcgcagggactggcgggactgcgcggcggcaacagcagacrtgtcgggggtccggggcctgtcgcggctgctgagcgctcggcgcctggcgctggccaaggcgtggccaacagtgttgcaaacaggaacccgaggttttca

SEQ ID NO: 18395 - DNA, 201 bp, Homo sapiens
aaggtctctgcgatatgataccagctattttgtggagtattttgccttggatctcctgatggagaatggggagtgccgtggtgtcatcgcactgtgcatasaggacgggtccatccatcgcataagagcaaagaacactgttgttgccacaggaggctacgggcgcacctacttcagctgcacgtctgcccacaccagcac

SEQ ID NO: 18396 - DNA, 201 bp, Homo sapiens
tcagctgcacgtctgcccacaccagcactggcgacggcacggccatgatcaccagggcaggccttccttgccaggacctagagtttgttcagttccacccyacaggcatatatggtgctggttgtctcattacggaaggatgtcgtggagagggaggcattctcattaacagtcaaggcgaaaggtttatggagcgatacg

SEQ ID NO: 18397 - DNA, 201 bp, Homo sapiens
aggacgggtccatccatcgcataagagcaaagaacactgttgttgccacaggaggctacgggcgcacctacttcagctgcacgtctgcccacaccagcacyggcgacggcacggccatgatcaccagggcaggccttccttgccaggacctagagtttgttcagttccaccccacaggcatatatggtgctggttgtctca

SEQ ID NO: 18398 - DNA, 201 bp, Homo sapiens
ctccagagcagctggccacgcgcctgcctggcatttcagagacagccatgatcttcgctggcgtggacgtcacgaaggagccgatccctgtcctccccacygtgcattataacatgggcggcattcccaccaactacaaggggcaggtcctgaggcacgtgaatggccaggatcagattgtgcccggcctgtacgcctgtg

SEQ ID NO: 18399 - DNA, 201 bp, Homo sapiens
agcacctgaagacgttcgaccggggaatggtctggaacacggacctggtggagaccctggagctgcagaacctgatgctgtgtgcgctgcagaccatctayggagcagaggcacggaaggagtcacggggcgcgcatgccagggaagactacaaggtgcggattgatgagtacgattactccaagcccatccaggggcaac

SEQ ID NO: 18400 - DNA, 201 bp, Homo sapiens
ggactggccactcgctattgcacaccttatatggaaggtctctgcgatatgataccagctattttgtggagtattttgccttggatctcctgatggagaayggggagtgccgtggtgtcatcgcactgtgcatagaggacgggtccatccatcgcataagagcaaagaacactgttgttgccacaggaggctacgggcgca

SEQ ID NO: 18401 - DNA, 201 bp, Homo sapiens
cgttcgaccggggaatggtctggaacacggacctggtggagaccctggagctgcagaacctgatgctgtgtgcgctgcagaccatctacggagcagaggcrcggaaggagtcacggggcgcgcatgccagggaagactacaaggtgcggattgatgagtacgattactccaagcccatccaggggcaacagaagaagccct

SEQ ID NO: 18402 - DNA, 201 bp, Homo sapiens
ctttggtcgggcatgtgccctgagcatcgaagagtcatgcaggcctggagataaagtccctccaattaaaccaaacgctggggaagaatctgtcatgaatsttgacaaattgagatttgctgatggaagcataagaacatcggaactgcgactcagcatgcagaagtcaatgcaaaatcatgctgccgtgttccgtgtggg

SEQ ID NO: 18403 - DNA, 201 bp, Homo sapiens
ctgagaaagatcacgtctacctgcagctgcaccacctacctccagagcagctggccacgcgcctgcctggcatttcagagacagccatgatcttcgctggygtggacgtcacgaaggagccgatccctgtcctccccaccgtgcattataacatgggcggcattcccaccaactacaaggggcaggtcctgaggcacgtga

SEQ ID NO: 18404 - DNA, 144 bp, Homo sapiens
gcaggcgcagtctgcgcagggactggcgggactgcgcggcggcracagcagacatgtcgggggtccggggcctgtcgcggctgctgagcgctcggcgcctggcgctggccaaggcgtggccaacagtgttgcaaacaggaaccc

SEQ ID NO: 18405 - DNA, 201 bp, Homo sapiens
tggtggacagagcctcaagtttggaaagggcgggcaggcccatcggtgctgctgtgtggctgatcggactggccactcgctattgcacaccttatatggamggtctctgcgatatgataccagctattttgtggagtattttgccttggatctcctgatggagaatggggagtgccgtggtgtcatcgcactgtgcataga

SEQ ID NO: 18406 - DNA, 201 bp, Homo sapiens
ggaagcacaccctgtcctatgtggacgttggcactgggaaggtcactctggaatatagacccgtgatcgacaaaactttgaacgaggctgactgtgccacygtcccgccagccattcgctcctactgatgagacaagatgtggtgatgacagaatcagctttttgcacagccagagaacaacacatcacacacaggaaaca

SEQ ID NO: 18407 - DNA, 201 bp, Homo sapiens
aggggcaacagaagaagccctttgaggagcactggaggaagcacaccctgtcctatgtggacgttggcactgggaaggtcactctggaatatagacccgtratcgacaaaactttgaacgaggctgactgtgccaccgtcccgccagccattcgctcctactgatgagacaagatgtggtgatgacagaatcagcttttgt

SEQ ID NO: 18408 - DNA, 201 bp, Homo sapiens; identical to SEQ ID NO: 18382

SEQ ID NO: 18409 - DNA, 201 bp, Homo sapiens
tcagcttttgtaattatgtataatagctcatgcatgtgtccatgtcataactgtcttcatacgcttctgcactctggggaagaaggagtacattgaagggrgattggcacctagtggctgggagcttgccaggaacccagtggccagggagcgtggcacttacctttgtcccttgcttcattcttgtgagatgataaaact

SEQ ID NO: 18410 - DNA, 201 bp, Homo sapiens; identical to SEQ ID NO: 18383

SEQ ID NO: 18411 - DNA, 201 bp, Homo sapiens
ggtcactctggaatatagacccgtgatcgacaaaactttgaacgaggctgactgtgccaccgtcccgccagccattcgctcctactgatgagacaagatgyggtgatgacagaatcagcttttgtaattatgtataatagctcatgcatgtgtccatgtcataactgtcttcatacgcttctgcactctggggaagaagga

SEQ ID NO: 18412 - DNA, 201 bp, Homo sapiens
cataactgtcttcatacgcttctgcactctggggaagaaggagtacattgaagggagattggcacctagtggctgggagcttgccaggaacccagtggccrgggagcgtggcacttacctttgtcccttgcttcattcttgtgagatgataaaactgggcacagctcttaaataaaatataaatgaacaaactttctttta

SEQ ID NO: 18413 - DNA, 201 bp, Homo sapiens
tgagacaagatgtggtgatgacagaatcagcttttgtaattatgtataatagctcatgcatgtgtccatgtcataactgtcttcatacgcttctgcactcyggggaagaaggagtacattgaagggagattggcacctagtggctgggagcttgccaggaacccagtggccagggagcgtggcacttacctttgtcccttg

SEQ ID NO: 18414 - DNA, 201 bp, Homo sapiens
aattatgtataatagctcatgcatgtgtccatgtcataactgtcttcatacgcttctgcactctggggaagaaggagtacattgaagggagattggcaccyagtggctgggagcttgccaggaacccagtggccagggagcgtggcacttacctttgtcccttgcttcattcttgtgagatgataaaactgggcacagctc

SEQ ID NO: 18415 - DNA, 201 bp, Homo sapiens
tatgtggacgttggcactgggaaggtcactctggaatatagacccgtgatcgacaaaactttgaacgaggctgactgtgccaccgtcccgccagccattcrctcctactgatgagacaagatgtggtgatgacagaatcagcttttgtaattatgtataatagctcatgcatgtgtccatgtcataactgtcttcatacgc

SEQ ID NO: 18416 - DNA, 201 bp, Homo sapiens
gaagcacaccctgtcctatgtggacgttggcactgggaaggtcactctggaatatagacccgtgatcgacaaaactttgaacgaggctgactgtgccaccrtcccgccagccattcgctcctactgatgagacaagatgtggtgatgacagaatcagcttttgtaattatgtataatagctcatgcatgtgtccatgtcat

SEQ ID NO: 18417 - DNA, 201 bp, Homo sapiens; identical to SEQ ID NO: 18386

SEQ ID NO: 18418 - DNA, 201 bp, Homo sapiens
taattatgtataatagctcatgcatgtgtccatgtcataactgtcttcatacgcttctgcactctggggaagaaggagtacattgaagggagattggcacytagtggctgggagcttgccaggaacccagtggccagggagcgtggcacttacctttgtcccttgcttcattcttgtgagatgataaaactgggcacagct

SEQ ID NO: 18419 - DNA, 201 bp, Homo sapiens; identical to SEQ ID NO: 18391

SEQ ID NO: 18420 - DNA, 201 bp, Homo sapiens
cctttgaggagcactggaggaagcacaccctgtcctatgtggacgttggcactgggaaggtcactctggaatatagacccgtgatcgacaaaactttgaaygaggctgactgtgccaccgtcccgccagccattcgctcctactgatgagacaagatgtggtgatgacagaatcagcttttgtaattatgtataatagctc

SEQ ID NO: 18421 - DNA, 201 bp, Homo sapiens; identical to SEQ ID NO: 18389

SEQ ID NO: 18422 - DNA, 201 bp, Homo sapiens; identical to SEQ ID NO: 18388

SEQ ID NO: 18423 - DNA, 201 bp, Homo sapiens; identical to SEQ ID NO: 18392

SEQ ID NO: 18424 - DNA, 201 bp, Homo sapiens; identical to SEQ ID NO: 18393

SEQ ID NO: 18425 - DNA, 201 bp, Homo sapiens; identical to SEQ ID NO: 18396

SEQ ID NO: 18426 - DNA, 201 bp, Homo sapiens; identical to SEQ ID NO: 18395

SEQ ID NO: 18427 - DNA, 154 bp, Homo sapiens; identical to SEQ ID NO: 18394

SEQ ID NO: 18428 - DNA, 201 bp, Homo sapiens; identical to SEQ ID NO: 18397

SEQ ID NO: 18429 - DNA, 201 bp, Homo sapiens; identical to SEQ ID NO: 18398

SEQ ID NO: 18430 - DNA, 201 bp, Homo sapiens; identical to SEQ ID NO: 18399

SEQ ID NO: 18431 - DNA, 201 bp, Homo sapiens; identical to SEQ ID NO: 18400

SEQ ID NO: 18432 - DNA, 201 bp, Homo sapiens; identical to SEQ ID NO: 18401

SEQ ID NO: 18433 - DNA, 201 bp, Homo sapiens; identical to SEQ ID NO: 18402

SEQ ID NO: 18434 - DNA, 201 bp, Homo sapiens; identical to SEQ ID NO: 18403

SEQ ID NO: 18435 - DNA, 144 bp, Homo sapiens; identical to SEQ ID NO: 18404

SEQ ID NO: 18436 - DNA, 201 bp, Homo sapiens; identical to SEQ ID NO: 18405

SEQ ID NO: 18437 - DNA, 201 bp, Homo sapiens
ggaagcacaccctgtcctatgtggacgttggcactgggaaggtcactctggaatatagacccgtgatcgacaaaactttgaacgaggctgactgtgccacygtcccgccagccattcgctcctactgatgagacaagatgtggtgatgacagaatcagcttttgtaattatgtataatagctcatgcatgtgtccatgtca

SEQ ID NO: 18438 - DNA, 201 bp, Homo sapiens
ctttcccaaggagcgcgaggtgctgattcccccccatgaagtctttttggttaccagattctctcaggatggagcccagagcttggtgactctctggagcyataatcagacctgtagccattttaactgcgcctatctgggtggggagaagaggcggggctgtgtgtctgcgccaggagccctgggaacgggtgaccttca

SEQ ID NO: 18439 - DNA, 201 bp, Homo sapiens
cagttagcctcgagaacctttgctttcagccggactccggactcctccggggacagcgcagcgcccgccagagccctcggcgctccctcccgctggcggcytccgcagccttcaaggatggcgctggcggctttgatgatcgccctcggcagcctcggcctccacacctggcaggcccaggctgttcccaccatcctgccc

SEQ ID NO: 18440 - DNA, 201 bp, Homo sapiens
cagacctgtagccattttaactgcgcctatctgggtggggagaagaggcggggctgtgtgtctgcgccaggagccctgggaacgggtgaccttcatatgamgaagaggcacctccagcagccttgagaagcaagaacatggttccggacccagccctagcagccttctccccaaccaggatgttggcctggggaggccaca

SEQ ID NO: 18441 - DNA, 201 bp, Homo sapiens
gctctacatgaggcactttcccttcaaggccctgcatttctacctgatccgggccctgcagctgctgcgaggcagtgggggctgcagcaggggacctgggraggtggtgttccgaggtgtgggcagccttcgctttgaacccaagaggctgggggactctgtccgcttgggccagtttgcctccagctccctggataaggc

SEQ ID NO: 18442 - DNA, 133 bp, Homo sapiens
gtgatggggacttcctgggacaagcaaggaaagtactgaggcagccacttgattgaacggtgttgcaatgtggagacatggagttttattgaggtagctaygtgattaaatggtattgcagtgtggagacatg

SEQ ID NO: 18443 - DNA, 201 bp, Homo sapiens
ccctgcagctgctgcgaggcagtgggggctgcagcaggggacctggggaggtggtgttccgaggtgtgggcagccttcgctttgaacccaagaggctgggrgactctgtccgcttgggccagtttgcctccagctccctggataaggcagtggcccacagatttggtaatgccaccctcttctctctaacaacttgctttg

SEQ ID NO: 18444 - DNA, 201 bp, Homo sapiens
gaacctttgctttcagccggactccggactcctccggggacagcgcagcgcccgccagagccctcggcgctccctcccgctggcggcttccgcagccttcraggatggcgctggcggctttgatgatcgccctcggcagcctcggcctccacacctggcaggcccaggctgttcccaccatcctgcccctgggcctggctc

SEQ ID NO: 18445 - DNA, 201 bp, Homo sapiens
agggcttaccttgccccctggcttcaaagcccagaatggaatagccattatggtctacaccaactcatcgaacaccttgtactgggagttgaatcaggccrtgcggacgggcggaggctcccgggagctctacatgaggcactttcccttcaaggccctgcatttctacctgatccgggccctgcagctgctgcgaggcag

SEQ ID NO: 18446 - DNA, 201 bp, Homo sapiens
caagaggctgggggactctgtccgcttgggccagtttgcctccagctccctggataaggcagtggcccacagatttggtaatgccaccctcttctctctarcaacttgctttggggcccctatacaggccttctctgtctttcccaaggagcgcgaggtgctgattcccccccatgaagtctttttggttaccagattctc

SEQ ID NO: 18447 - DNA, 201 bp, Homo sapiens; identical to SEQ ID NO: 18438

SEQ ID NO: 18448 - DNA, 196 bp, Homo sapiens
agcctcgagaacctttgctttcagccggactccggactcctccggggacagcgcagcgcccgccagagccctcggcgctccctcccgctggcggcytccgcagccttcaagtgggtcctccgcccccggccctcccctctcaggcggagccaaactgcggccccgcctttacagtctcggaaaggtccccagactg

SEQ ID NO: 18449 - DNA, 201 bp, Homo sapiens; identical to SEQ ID NO: 18440

SEQ ID NO: 18450 - DNA, 201 bp, Homo sapiens; identical to SEQ ID NO: 18441

SEQ ID NO: 18451 - DNA, 133 bp, Homo sapiens; identical to SEQ ID NO: 18442

SEQ ID NO: 18452 - DNA, 201 bp, Homo sapiens; identical to SEQ ID NO: 18443

SEQ ID NO: 18453 - DNA, 201 bp, Homo sapiens
gaacctttgctttcagccggactccggactcctccggggacagcgcagcgcccgccagagccctcggcgctccctcccgctggcggcttccgcagccttcragtgggtcctccgcccccggccctcccctctcaggcggagccaaactgcggccccgcctttacagtctcggaaaggtccccagactggaggctctgagga

SEQ ID NO: 18454 - DNA, 201 bp, Homo sapiens; identical to SEQ ID NO: 18445

SEQ ID NO: 18455 - DNA, 201 bp, Homo sapiens; identical to SEQ ID NO: 18446

SEQ ID NO: 18456 - DNA, 201 bp, Homo sapiens
cggagccaaactgcggccccgcctttacagtctcggaaaggtccccagactggaggctctgaggaaggggtgtggggagtcgggggcggagacttggggcrgggggcgggcaataaactcccaggccccgcccacgccccgccggggccctaatcctggacccgggatcccgcgcgcctggagacagggtccagatctgcc

SEQ ID NO: 18457 - DNA, 201 bp, Homo sapiens
tttcacagaattattccagggtttatgtgtcagggtggtgacttcacacaccataatggcactagcagcaagtccatctacggggagaaatttgatgatgmgaacttcatcctaaagcatacaggtcctggcatcttgtccatggcaaatgctggacccaacacaaacagttcccagtttttcatctgcactgccaagact

SEQ ID NO: 18458 - DNA, 201 bp, Homo sapiens
actgagtggttggatggcaagcatgtggtctttggcaaggcgaaagaaggcatgaatattgtggaggccatagagcactttgggtccaggaatggcaagamcagcaagaagatcaccactgctgactgtggacaactcttaataagtttgacttgtgttttatcttagccaccagaccattccttctgtaggtcaggagag

SEQ ID NO: 18459 - DNA, 201 bp, Homo sapiens
ggtcctggcatcttgtccatggcaaatgctggacccaacacaaacagttcccagtttttcatctgcactgccaagactgagtggttggatggcaagcatgyggtctttggcaaggcgaaagaaggcatgaatattgtggaggccatagagcactttgggtccaggaatggcaagaccagcaagaagatcaccactgctgac

SEQ ID NO: 18460 - DNA, 201 bp, Homo sapiens
tccatggcaaatgctggacccaacacaaacagttcccagtttttcatctgcactgccaagactgagtggttggatggcaagcatgtggtctttggcaaggygaaagaaggcatgaatattgtggaggccatagagcactttgggtccaggaatggcaagaccagcaagaagatcaccactgctgactgtggacaactctta

SEQ ID NO: 18461 - DNA, 201 bp, Homo sapiens
ccccgtactatcagccgtggttaaccccaccgtgttcttcgacattgctgtcaacagcgagcccttgggccatgtctccttcaagctatttgcagacaagkttccaaagacagcagaaaactttcgtgctctgagcactggagagaaaggatttggttataagggttcctgctttcacagaattattccagggtttatgtg

SEQ ID NO: 18462 - DNA, 201 bp, Homo sapiens
ccaggaaaggagggggctcaggccatccagccaccacctacagcccagtgggtaccaggcaggctcccttcctggggaaaagaagcacccagaccccgcgmcccgctgatctttgcttcagtccttgaatcacctgtgggacttgaggactcgggatcttcaggacgcctggagaagggtggtttcctgccaccctgctgg

SEQ ID NO: 18463 - DNA, 201 bp, Homo sapiens
cgccccgctgatctttgcttcagtccttgaatcacctgtgggacttgaggactcgggatcttcaggacgcctggagaagggtggtttcctgccaccctgcyggccaaggaggctcctggggtggggatcaccagggggattttgacacagccttcggctgccccccactaagctaattccacacccctgtacccccccagg

SEQ ID NO: 18464 - DNA, 201 bp, Homo sapiens
gaaaggagggggctcaggccatccagccaccacctacagcccagtgggtaccaggcaggctcccttcctggggaaaagaagcacccagaccccgcgccccsctgatctttgcttcagtccttgaatcacctgtgggacttgaggactcgggatcttcaggacgcctggagaagggtggtttcctgccaccctgctggccaa

SEQ ID NO: 18465 - DNA, 201 bp, Homo sapiens
cagaccctgagtacccagatgactacagccaaggtgggaccaggctggacgggaagaatctggtgcaggaatggctggcgaagcgccagggtgcccggtaygtgtggaaccgcactgagctcatgcaggcttccctggacccgtctgtgacccatctcatgggtctctttgagcctggagacatgaaatacgagatccacc

SEQ ID NO: 18466 - DNA, 201 bp, Homo sapiens
ctacagccaaggtgggaccaggctggacgggaagaatctggtgcaggaatggctggcgaagcgccagggtgcccggtacgtgtggaaccgcactgagctcmtgcaggcttccctggacccgtctgtgacccatctcatgggtctctttgagcctggagacatgaaatacgagatccaccgagactccacactggacccctc

SEQ ID NO: 18467 - DNA, 201 bp, Homo sapiens
agtcgtcatccccggagtccctatacagaggtcctgccatggaaccttcccctccccgtgcgctctggggactgagcccatgacaccaaacctgccccttrgctgctctcggactccctaccccaaccccagggactgcaggttgtgccctgtggctgcctgcaccccaggaaaggagggggctcaggccatccagccacc

SEQ ID NO: 18468 - DNA, 201 bp, Homo sapiens
ctgtacccccccagggggccctctgcctcatggcaaaggcttgccccaaatctcaacttctcagacgttccatacccccacatgccaatttcagcacccamctgagatccgaggagctcctgggaagccctgggtgcaggacactggtcgagagccaaaggtccctccccagacatctggacactgggcatagatttctca

SEQ ID NO: 18469 - DNA, 201 bp, Homo sapiens
gtcgtcatccccggagtccctatacagaggtcctgccatggaaccttcccctccccgtgcgctctggggactgagcccatgacaccaaacctgccccttgkctgctctcggactccctaccccaaccccagggactgcaggttgtgccctgtggctgcctgcaccccaggaaaggagggggctcaggccatccagccacca

SEQ ID NO: 18470 - DNA, 201 bp, Homo sapiens
ccccccagggggccctctgcctcatggcaaaggcttgccccaaatctcaacttctcagacgttccatacccccacatgccaatttcagcacccaactgagwtccgaggagctcctgggaagccctgggtgcaggacactggtcgagagccaaaggtccctccccagacatctggacactgggcatagatttctcaagaagg

SEQ ID NO: 18471 - DNA, 201 bp, Homo sapiens
ccccggagtccctatacagaggtcctgccatggaaccttcccctccccgtgcgctctggggactgagcccatgacaccaaacctgccccttggctgctctyggactccctaccccaaccccagggactgcaggttgtgccctgtggctgcctgcaccccaggaaaggagggggctcaggccatccagccaccacctacagc

SEQ ID NO: 18472 - DNA, 201 bp, Homo sapiens
gccaccctgctggccaaggaggctcctggggtggggatcaccagggggattttgacacagccttcggctgccccccactaagctaattccacacccctgtrcccccccagggggccctctgcctcatggcaaaggcttgccccaaatctcaacttctcagacgttccatacccccacatgccaatttcagcacccaactga

SEQ ID NO: 18473 - DNA, 201 bp, Homo sapiens
catccagccaccacctacagcccagtgggtaccaggcaggctcccttcctggggaaaagaagcacccagaccccgcgccccgctgatctttgcttcagtcmttgaatcacctgtgggacttgaggactcgggatcttcaggacgcctggagaagggtggtttcctgccaccctgctggccaaggaggctcctggggtgggg

SEQ ID NO: 18474 - DNA, 201 bp, Homo sapiens
cctgctggccaaggaggctcctggggtggggatcaccagggggattttgacacagccttcggctgccccccactaagctaattccacacccctgtaccccyccagggggccctctgcctcatggcaaaggcttgccccaaatctcaacttctcagacgttccatacccccacatgccaatttcagcacccaactgagatcc

SEQ ID NO: 18475 - DNA, 201 bp, Homo sapiens
ggaggctcctggggtggggatcaccagggggattttgacacagccttcggctgccccccactaagctaattccacacccctgtacccccccagggggcccwctgcctcatggcaaaggcttgccccaaatctcaacttctcagacgttccatacccccacatgccaatttcagcacccaactgagatccgaggagctcctg

SEQ ID NO: 18476 - DNA, 201 bp, Homo sapiens
gctcctggggtggggatcaccagggggattttgacacagccttcggctgccccccactaagctaattccacacccctgtacccccccagggggccctctgmctcatggcaaaggcttgccccaaatctcaacttctcagacgttccatacccccacatgccaatttcagcacccaactgagatccgaggagctcctgggaa

SEQ ID NO: 18477 - DNA, 201 bp, Homo sapiens
cctaccccaaccccagggactgcaggttgtgccctgtggctgcctgcaccccaggaaaggagggggctcaggccatccagccaccacctacagcccagtgkgtaccaggcaggctcccttcctggggaaaagaagcacccagaccccgcgccccgctgatctttgcttcagtccttgaatcacctgtgggacttgaggact

SEQ ID NO: 18478 - DNA, 201 bp, Homo sapiens
agcccgagtcgtcatccccggagtccctatacagaggtcctgccatggaaccttcccctccccgtgcgctctggggactgagcccatgacaccaaacctgycccttggctgctctcggactccctaccccaaccccagggactgcaggttgtgccctgtggctgcctgcaccccaggaaaggagggggctcaggccatcca

SEQ ID NO: 18479 - DNA, 201 bp, Homo sapiens
gagtggtaaccaccacacgagtgcagcacgcctcgccagccggcacctacgcccacacggtgaaccgcaactggtactcggacgccgacgtgcctgcctcsgcccgccaggaggggtgccaggacatcgctacgcagctcatctccaacatggacattgacgtgatcctaggtggaggccgaaagtacatgtttcgcatgg

SEQ ID NO: 18480 - DNA, 201 bp, Homo sapiens
tctcggactccctaccccaaccccagggactgcaggttgtgccctgtggctgcctgcaccccaggaaaggagggggctcaggccatccagccaccacctayagcccagtgggtaccaggcaggctcccttcctggggaaaagaagcacccagaccccgcgccccgctgatctttgcttcagtccttgaatcacctgtggga

SEQ ID NO: 18481 - DNA, 201 bp, Homo sapiens
ggactccctaccccaaccccagggactgcaggttgtgccctgtggctgcctgcaccccaggaaaggagggggctcaggccatccagccaccacctacagcycagtgggtaccaggcaggctcccttcctggggaaaagaagcacccagaccccgcgccccgctgatctttgcttcagtccttgaatcacctgtgggacttg

SEQ ID NO: 18482 - DNA, 201 bp, Homo sapiens
tggaaccttcccctccccgtgcgctctggggactgagcccatgacaccaaacctgccccttggctgctctcggactccctaccccaaccccagggactgcrggttgtgccctgtggctgcctgcaccccaggaaaggagggggctcaggccatccagccaccacctacagcccagtgggtaccaggcaggctcccttcctg

SEQ ID NO: 18483 - DNA, 201 bp, Homo sapiens
gactccctaccccaaccccagggactgcaggttgtgccctgtggctgcctgcaccccaggaaaggagggggctcaggccatccagccaccacctacagccsagtgggtaccaggcaggctcccttcctggggaaaagaagcacccagaccccgcgccccgctgatctttgcttcagtccttgaatcacctgtgggacttga

SEQ ID NO: 18484 - DNA, 201 bp, Homo sapiens
gccctctgcctcatggcaaaggcttgccccaaatctcaacttctcagacgttccatacccccacatgccaatttcagcacccaactgagatccgaggagcwcctgggaagccctgggtgcaggacactggtcgagagccaaaggtccctccccagacatctggacactgggcatagatttctcaagaaggaagactcccct

SEQ ID NO: 18485 - DNA, 201 bp, Homo sapiens
cccaaatctcaacttctcagacgttccatacccccacatgccaatttcagcacccaactgagatccgaggagctcctgggaagccctgggtgcaggacacwggtcgagagccaaaggtccctccccagacatctggacactgggcatagatttctcaagaaggaagactcccctgcctccccagggcctctgctctcctgg

SEQ ID NO: 18486 - DNA, 201 bp, Homo sapiens
tccagccaccacctacagcccagtgggtaccaggcaggctcccttcctggggaaaagaagcacccagaccccgcgccccgctgatctttgcttcagtcctkgaatcacctgtgggacttgaggactcgggatcttcaggacgcctggagaagggtggtttcctgccaccctgctggccaaggaggctcctggggtggggat

SEQ ID NO: 18487 - DNA, 201 bp, Homo sapiens
ggtccaggctatgtgctcaaggacggcgcccggccggatgttaccgagagcgagagcgggagccccgagtatcggcagcagtcagcagtgcccctggacgragagacccacgcaggcgaggacgtggcggtgttcgcgcgcggcccgcaggcgcacctggttcacggcgtgcaggagcagaccttcatagcgcacgtcatg

SEQ ID NO: 18488 - DNA, 201 bp, Homo sapiens
catggcaaaggcttgccccaaatctcaacttctcagacgttccatacccccacatgccaatttcagcacccaactgagatccgaggagctcctgggaagcyctgggtgcaggacactggtcgagagccaaaggtccctccccagacatctggacactgggcatagatttctcaagaaggaagactcccctgcctccccagg

SEQ ID NO: 18489 - DNA, 201 bp, Homo sapiens
cagccaccacctacagcccagtgggtaccaggcaggctcccttcctggggaaaagaagcacccagaccccgcgccccgctgatctttgcttcagtccttgmatcacctgtgggacttgaggactcgggatcttcaggacgcctggagaagggtggtttcctgccaccctgctggccaaggaggctcctggggtggggatca

SEQ ID NO: 18490 - DNA, 201 bp, Homo sapiens
ggactgcaggttgtgccctgtggctgcctgcaccccaggaaaggagggggctcaggccatccagccaccacctacagcccagtgggtaccaggcaggctcycttcctggggaaaagaagcacccagaccccgcgccccgctgatctttgcttcagtccttgaatcacctgtgggacttgaggactcgggatcttcaggacg

SEQ ID NO: 18491 - DNA, 201 bp, Homo sapiens
ttctcagacgttccatacccccacatgccaatttcagcacccaactgagatccgaggagctcctgggaagccctgggtgcaggacactggtcgagagccawaggtccctccccagacatctggacactgggcatagatttctcaagaaggaagactcccctgcctccccagggcctctgctctcctgggagacaaagcaat

SEQ ID NO: 18492 - DNA, 201 bp, Homo sapiens
gcgcacctggttcacggcgtgcaggagcagaccttcatagcgcacgtcatggccttcgccgcctgcctggagccctacaccgcctgcgacctggcgccccscgccggcaccaccgacgccgcgcacccggggcggtccgtggtccccgcgttgcttcctctgctggccgggaccctgctgctgctggagacggccactgct

SEQ ID NO: 18493 - DNA, 201 bp, Homo sapiens
cgcgccccgctgatctttgcttcagtccttgaatcacctgtgggacttgaggactcgggatcttcaggacgcctggagaagggtggtttcctgccaccctsctggccaaggaggctcctggggtggggatcaccagggggattttgacacagccttcggctgccccccactaagctaattccacacccctgtaccccccca

SEQ ID NO: 18494 - DNA, 201 bp, Homo sapiens
ccatacccccacatgccaatttcagcacccaactgagatccgaggagctcctgggaagccctgggtgcaggacactggtcgagagccaaaggtccctcccyagacatctggacactgggcatagatttctcaagaaggaagactcccctgcctccccagggcctctgctctcctgggagacaaagcaataataaaaggaag

SEQ ID NO: 18495 - DNA, 201 bp, Homo sapiens
tacccccacatgccaatttcagcacccaactgagatccgaggagctcctgggaagccctgggtgcaggacactggtcgagagccaaaggtccctccccagmcatctggacactgggcatagatttctcaagaaggaagactcccctgcctccccagggcctctgctctcctgggagacaaagcaataataaaaggaagtgt

SEQ ID NO: 18496 - DNA, 201 bp, Homo sapiens
ggccctgcatgctgctgctgctgctgctgctgggcctgaggctacagctctccctgggcatcatcccagttgaggaggagaacccggacttctggaaccgygaggcagccgaggccctgggtgccgccaagaagctgcagcctgcacagacagccgccaagaacctcatcatcttcctgggcgatgggatgggggtgtcta

SEQ ID NO: 18497 - DNA, 201 bp, Homo sapiens
ttcatagcgcacgtcatggccttcgccgcctgcctggagccctacaccgcctgcgacctggcgccccccgccggcaccaccgacgccgcgcacccggggcsgtccgtggtccccgcgttgcttcctctgctggccgggaccctgctgctgctggagacggccactgctccctgagtgtcccgtccctggggctcctgcttc

SEQ ID NO: 18498 - DNA, 201 bp, Homo sapiens
tggagccctacaccgcctgcgacctggcgccccccgccggcaccaccgacgccgcgcacccggggcggtccgtggtccccgcgttgcttcctctgctggcmgggaccctgctgctgctggagacggccactgctccctgagtgtcccgtccctggggctcctgcttccccatcccggagttctcctgctccccacctcctg

SEQ ID NO: 18499 - DNA, 201 bp, Homo sapiens
ccggagtccctatacagaggtcctgccatggaaccttcccctccccgtgcgctctggggactgagcccatgacaccaaacctgccccttggctgctctcgractccctaccccaaccccagggactgcaggttgtgccctgtggctgcctgcaccccaggaaaggagggggctcaggccatccagccaccacctacagccc

SEQ ID NO: 18500 - DNA, 201 bp, Homo sapiens
atgccaatttcagcacccaactgagatccgaggagctcctgggaagccctgggtgcaggacactggtcgagagccaaaggtccctccccagacatctggayactgggcatagatttctcaagaaggaagactcccctgcctccccagggcctctgctctcctgggagacaaagcaataataaaaggaagtgtttgtaatcc

SEQ ID NO: 18501 - DNA, 201 bp, Homo sapiens
ctacaccgcctgcgacctggcgccccccgccggcaccaccgacgccgcgcacccggggcggtccgtggtccccgcgttgcttcctctgctggccgggaccytgctgctgctggagacggccactgctccctgagtgtcccgtccctggggctcctgcttccccatcccggagttctcctgctccccacctcctgtcgtcct

SEQ ID NO: 18502 - DNA, 201 bp, Homo sapiens
agtccctatacagaggtcctgccatggaaccttcccctccccgtgcgctctggggactgagcccatgacaccaaacctgccccttggctgctctcggactycctaccccaaccccagggactgcaggttgtgccctgtggctgcctgcaccccaggaaaggagggggctcaggccatccagccaccacctacagcccagtg

SEQ ID NO: 18503 - DNA, 201 bp, Homo sapiens
cagcacccaactgagatccgaggagctcctgggaagccctgggtgcaggacactggtcgagagccaaaggtccctccccagacatctggacactgggcatrgatttctcaagaaggaagactcccctgcctccccagggcctctgctctcctgggagacaaagcaataataaaaggaagtgtttgtaatcccagcactttg

SEQ ID NO: 18504 - DNA, 201 bp, Homo sapiens
gccaccacctacagcccagtgggtaccaggcaggctcccttcctggggaaaagaagcacccagaccccgcgccccgctgatctttgcttcagtccttgaakcacctgtgggacttgaggactcgggatcttcaggacgcctggagaagggtggtttcctgccaccctgctggccaaggaggctcctggggtggggatcacc

SEQ ID NO: 18505 - DNA, 201 bp, Homo sapiens
gacctggcgccccccgccggcaccaccgacgccgcgcacccggggcggtccgtggtccccgcgttgcttcctctgctggccgggaccctgctgctgctggrgacggccactgctccctgagtgtcccgtccctggggctcctgcttccccatcccggagttctcctgctccccacctcctgtcgtcctgcctggcctccag

SEQ ID NO: 18506 - DNA, 201 bp, Homo sapiens
gtccctatacagaggtcctgccatggaaccttcccctccccgtgcgctctggggactgagcccatgacaccaaacctgccccttggctgctctcggactcyctaccccaaccccagggactgcaggttgtgccctgtggctgcctgcaccccaggaaaggagggggctcaggccatccagccaccacctacagcccagtgg

SEQ ID NO: 18507 - DNA, 201 bp, Homo sapiens
cctacagcccagtgggtaccaggcaggctcccttcctggggaaaagaagcacccagaccccgcgccccgctgatctttgcttcagtccttgaatcacctgwgggacttgaggactcgggatcttcaggacgcctggagaagggtggtttcctgccaccctgctggccaaggaggctcctggggtggggatcaccaggggga

SEQ ID NO: 18508 - DNA, 201 bp, Homo sapiens
tccctgagtgtcccgtccctggggctcctgcttccccatcccggagttctcctgctccccacctcctgtcgtcctgcctggcctccagcccgagtcgtcayccccggagtccctatacagaggtcctgccatggaaccttcccctccccgtgcgctctggggactgagcccatgacaccaaacctgccccttggctgctct

SEQ ID NO: 18509 - DNA, 201 bp, Homo sapiens
gtaccaggcaggctcccttcctggggaaaagaagcacccagaccccgcgccccgctgatctttgcttcagtccttgaatcacctgtgggacttgaggactygggatcttcaggacgcctggagaagggtggtttcctgccaccctgctggccaaggaggctcctggggtggggatcaccagggggattttgacacagcctt

SEQ ID NO: 18510 - DNA, 201 bp, Homo sapiens
ctcctggggtggggatcaccagggggattttgacacagccttcggctgccccccactaagctaattccacacccctgtacccccccagggggccctctgcstcatggcaaaggcttgccccaaatctcaacttctcagacgttccatacccccacatgccaatttcagcacccaactgagatccgaggagctcctgggaag

SEQ ID NO: 18511 - DNA, 201 bp, Homo sapiens
gggattttgacacagccttcggctgccccccactaagctaattccacacccctgtacccccccagggggccctctgcctcatggcaaaggcttgccccaartctcaacttctcagacgttccatacccccacatgccaatttcagcacccaactgagatccgaggagctcctgggaagccctgggtgcaggacactggtcg

SEQ ID NO: 18512 - DNA, 201 bp, Homo sapiens
tcgccactgtcctgctgccctccagacatgctggggccctgcatgctgctgctgctgctgctgctgggcctgaggctacagctctccctgggcatcatccyagttgaggaggagaacccggacttctggaaccgcgaggcagccgaggccctgggtgccgccaagaagctgcagcctgcacagacagccgccaagaacctc

SEQ ID NO: 18513 - DNA, 201 bp, Homo sapiens
attttgacacagccttcggctgccccccactaagctaattccacacccctgtacccccccagggggccctctgcctcatggcaaaggcttgccccaaatcwcaacttctcagacgttccatacccccacatgccaatttcagcacccaactgagatccgaggagctcctgggaagccctgggtgcaggacactggtcgaga

SEQ ID NO: 18514 - DNA, 201 bp, Homo sapiens
ttgacacagccttcggctgccccccactaagctaattccacacccctgtacccccccagggggccctctgcctcatggcaaaggcttgccccaaatctcarcttctcagacgttccatacccccacatgccaatttcagcacccaactgagatccgaggagctcctgggaagccctgggtgcaggacactggtcgagagcc

SEQ ID NO: 18515 - DNA, 201 bp, Homo sapiens
gacacagccttcggctgccccccactaagctaattccacacccctgtacccccccagggggccctctgcctcatggcaaaggcttgccccaaatctcaacytctcagacgttccatacccccacatgccaatttcagcacccaactgagatccgaggagctcctgggaagccctgggtgcaggacactggtcgagagccaa

SEQ ID NO: 18516 - DNA, 201 bp, Homo sapiens
acacagccttcggctgccccccactaagctaattccacacccctgtacccccccagggggccctctgcctcatggcaaaggcttgccccaaatctcaactwctcagacgttccatacccccacatgccaatttcagcacccaactgagatccgaggagctcctgggaagccctgggtgcaggacactggtcgagagccaaa

SEQ ID NO: 18517 - DNA, 201 bp, Homo sapiens
ctgcaggttgtgccctgtggctgcctgcaccccaggaaaggagggggctcaggccatccagccaccacctacagcccagtgggtaccaggcaggctccctycctggggaaaagaagcacccagaccccgcgccccgctgatctttgcttcagtccttgaatcacctgtgggacttgaggactcgggatcttcaggacgcct

SEQ ID NO: 18518 - DNA, 201 bp, Homo sapiens
caggttgtgccctgtggctgcctgcaccccaggaaaggagggggctcaggccatccagccaccacctacagcccagtgggtaccaggcaggctcccttccyggggaaaagaagcacccagaccccgcgccccgctgatctttgcttcagtccttgaatcacctgtgggacttgaggactcgggatcttcaggacgcctgga

SEQ ID NO: 18519 - DNA, 201 bp, Homo sapiens
cctgggaagccctgggtgcaggacactggtcgagagccaaaggtccctccccagacatctggacactgggcatagatttctcaagaaggaagactcccctkcctccccagggcctctgctctcctgggagacaaagcaataataaaaggaagtgtttgtaatcccagcactttgggaggccgaggtgggcggatcacgagg

SEQ ID NO: 18520 - DNA, 201 bp, Homo sapiens
tccctggggctcctgcttccccatcccggagttctcctgctccccacctcctgtcgtcctgcctggcctccagcccgagtcgtcatccccggagtccctayacagaggtcctgccatggaaccttcccctccccgtgcgctctggggactgagcccatgacaccaaacctgccccttggctgctctcggactccctacccc

SEQ ID NO: 18521 - DNA, 201 bp, Homo sapiens
gtgccctgtggctgcctgcaccccaggaaaggagggggctcaggccatccagccaccacctacagcccagtgggtaccaggcaggctcccttcctggggamaagaagcacccagaccccgcgccccgctgatctttgcttcagtccttgaatcacctgtgggacttgaggactcgggatcttcaggacgcctggagaaggg

SEQ ID NO: 18522 - DNA, 201 bp, Homo sapiens
gccctgtggctgcctgcaccccaggaaaggagggggctcaggccatccagccaccacctacagcccagtgggtaccaggcaggctcccttcctggggaaawgaagcacccagaccccgcgccccgctgatctttgcttcagtccttgaatcacctgtgggacttgaggactcgggatcttcaggacgcctggagaagggtg

SEQ ID NO: 18523 - DNA, 201 bp, Homo sapiens
gccctgggtgcaggacactggtcgagagccaaaggtccctccccagacatctggacactgggcatagatttctcaagaaggaagactcccctgcctccccwgggcctctgctctcctgggagacaaagcaataataaaaggaagtgtttgtaatcccagcactttgggaggccgaggtgggcggatcacgaggtcaggaga

SEQ ID NO: 18524 - DNA, 201 bp, Homo sapiens
gctccccacctcctgtcgtcctgcctggcctccagcccgagtcgtcatccccggagtccctatacagaggtcctgccatggaaccttcccctccccgtgcrctctggggactgagcccatgacaccaaacctgccccttggctgctctcggactccctaccccaaccccagggactgcaggttgtgccctgtggctgcctg

SEQ ID NO: 18525 - DNA, 201 bp, Homo sapiens
ctgtggctgcctgcaccccaggaaaggagggggctcaggccatccagccaccacctacagcccagtgggtaccaggcaggctcccttcctggggaaaagargcacccagaccccgcgccccgctgatctttgcttcagtccttgaatcacctgtgggacttgaggactcgggatcttcaggacgcctggagaagggtggtt

SEQ ID NO: 18526 - DNA, 201 bp, Homo sapiens
gcaggacactggtcgagagccaaaggtccctccccagacatctggacactgggcatagatttctcaagaaggaagactcccctgcctccccagggcctctrctctcctgggagacaaagcaataataaaaggaagtgtttgtaatcccagcactttgggaggccgaggtgggcggatcacgaggtcaggagatggagacca

SEQ ID NO: 18527 - DNA, 201 bp, Homo sapiens
tccccacctcctgtcgtcctgcctggcctccagcccgagtcgtcatccccggagtccctatacagaggtcctgccatggaaccttcccctccccgtgcgcyctggggactgagcccatgacaccaaacctgccccttggctgctctcggactccctaccccaaccccagggactgcaggttgtgccctgtggctgcctgca

SEQ ID NO: 18528 - DNA, 201 bp, Homo sapiens
acactggtcgagagccaaaggtccctccccagacatctggacactgggcatagatttctcaagaaggaagactcccctgcctccccagggcctctgctctyctgggagacaaagcaataataaaaggaagtgtttgtaatcccagcactttgggaggccgaggtgggcggatcacgaggtcaggagatggagaccatcctg

SEQ ID NO: 18529 - DNA, 201 bp, Homo sapiens
gaggtcctgccatggaaccttcccctccccgtgcgctctggggactgagcccatgacaccaaacctgccccttggctgctctcggactccctaccccaacyccagggactgcaggttgtgccctgtggctgcctgcaccccaggaaaggagggggctcaggccatccagccaccacctacagcccagtgggtaccaggcag

SEQ ID NO: 18530 - DNA, 201 bp, Homo sapiens
atggaaccttcccctccccgtgcgctctggggactgagcccatgacaccaaacctgccccttggctgctctcggactccctaccccaaccccagggactgsaggttgtgccctgtggctgcctgcaccccaggaaaggagggggctcaggccatccagccaccacctacagcccagtgggtaccaggcaggctcccttcct

SEQ ID NO: 18531 - DNA, 201 bp, Homo sapiens
gcaggctcccttcctggggaaaagaagcacccagaccccgcgccccgctgatctttgcttcagtccttgaatcacctgtgggacttgaggactcgggatcwtcaggacgcctggagaagggtggtttcctgccaccctgctggccaaggaggctcctggggtggggatcaccagggggattttgacacagccttcggctgc

SEQ ID NO: 18532 - DNA, 201 bp, Homo sapiens
tggggactgagcccatgacaccaaacctgccccttggctgctctcggactccctaccccaaccccagggactgcaggttgtgccctgtggctgcctgcacyccaggaaaggagggggctcaggccatccagccaccacctacagcccagtgggtaccaggcaggctcccttcctggggaaaagaagcacccagaccccgcg

SEQ ID NO: 18533 - DNA, 201 bp, Homo sapiens
aaaagaagcacccagaccccgcgccccgctgatctttgcttcagtccttgaatcacctgtgggacttgaggactcgggatcttcaggacgcctggagaagsgtggtttcctgccaccctgctggccaaggaggctcctggggtggggatcaccagggggattttgacacagccttcggctgccccccactaagctaattcc

SEQ ID NO: 18534 - DNA, 201 bp, Homo sapiens
aagcacccagaccccgcgccccgctgatctttgcttcagtccttgaatcacctgtgggacttgaggactcgggatcttcaggacgcctggagaagggtggyttcctgccaccctgctggccaaggaggctcctggggtggggatcaccagggggattttgacacagccttcggctgccccccactaagctaattccacacc

SEQ ID NO: 18535 - DNA, 201 bp, Homo sapiens
cttcggctgccccccactaagctaattccacacccctgtacccccccagggggccctctgcctcatggcaaaggcttgccccaaatctcaacttctcagaygttccatacccccacatgccaatttcagcacccaactgagatccgaggagctcctgggaagccctgggtgcaggacactggtcgagagccaaaggtccct

SEQ ID NO: 18536 - DNA, 201 bp, Homo sapiens
gctgccccccactaagctaattccacacccctgtacccccccagggggccctctgcctcatggcaaaggcttgccccaaatctcaacttctcagacgttcsatacccccacatgccaatttcagcacccaactgagatccgaggagctcctgggaagccctgggtgcaggacactggtcgagagccaaaggtccctcccca

SEQ ID NO: 18537 - DNA, 201 bp, Homo sapiens
agcccatgacaccaaacctgccccttggctgctctcggactccctaccccaaccccagggactgcaggttgtgccctgtggctgcctgcaccccaggaaargagggggctcaggccatccagccaccacctacagcccagtgggtaccaggcaggctcccttcctggggaaaagaagcacccagaccccgcgccccgctga

SEQ ID NO: 18538 - DNA, 201 bp, Homo sapiens
gccctgcatgctgctgctgctgctgctgctgggcctgaggctacagctctccctgggcatcatcccagttgaggaggagaacccggacttctggaaccgcsaggcagccgaggccctgggtgccgccaagaagctgcagcctgcacagacagccgccaagaacctcatcatcttcctgggcgatgggatgggggtgtctac

SEQ ID NO: 18539 - DNA, 201 bp, Homo sapiens
tgccccccactaagctaattccacacccctgtacccccccagggggccctctgcctcatggcaaaggcttgccccaaatctcaacttctcagacgttccayacccccacatgccaatttcagcacccaactgagatccgaggagctcctgggaagccctgggtgcaggacactggtcgagagccaaaggtccctccccaga

SEQ ID NO: 18540 - DNA, 201 bp, Homo sapiens
acccggacttctggaaccgcgaggcagccgaggccctgggtgccgccaagaagctgcagcctgcacagacagccgccaagaacctcatcatcttcctgggygatgggatgggggtgtctacggtgacagctgccaggatcctaaaagggcagaagaaggacaaactggggcctgagatacccctggccatggaccgcttcc

SEQ ID NO: 18541 - DNA, 201 bp, Homo sapiens
cggacttctggaaccgcgaggcagccgaggccctgggtgccgccaagaagctgcagcctgcacagacagccgccaagaacctcatcatcttcctgggcgaygggatgggggtgtctacggtgacagctgccaggatcctaaaagggcagaagaaggacaaactggggcctgagatacccctggccatggaccgcttcccat

SEQ ID NO: 18542 - DNA, 201 bp, Homo sapiens
caagaacctcatcatcttcctgggcgatgggatgggggtgtctacggtgacagctgccaggatcctaaaagggcagaagaaggacaaactggggcctgagwtacccctggccatggaccgcttcccatatgtggctctgtccaagacatacaatgtagacaaacatgtgccagacagtggagccacagccacggcctacct

SEQ ID NO: 18543 - DNA, 201 bp, Homo sapiens
ggaagccctgggtgcaggacactggtcgagagccaaaggtccctccccagacatctggacactgggcatagatttctcaagaaggaagactcccctgcctycccagggcctctgctctcctgggagacaaagcaataataaaaggaagtgtttgtaatcccagcactttgggaggccgaggtgggcggatcacgaggtcag

SEQ ID NO: 18544 - DNA, 201 bp, Homo sapiens
gggaagccctgggtgcaggacactggtcgagagccaaaggtccctccccagacatctggacactgggcatagatttctcaagaaggaagactcccctgccyccccagggcctctgctctcctgggagacaaagcaataataaaaggaagtgtttgtaatcccagcactttgggaggccgaggtgggcggatcacgaggtca

SEQ ID NO: 18545 - DNA, 201 bp, Homo sapiens
gctttaaccagtgcaacacgacacgcggcaacgaggtcatctccgtgatgaatcgggccaagaaagcagggaagtcagtgggagtggtaaccaccacacgrgtgcagcacgcctcgccagccggcacctacgcccacacggtgaaccgcaactggtactcggacgccgacgtgcctgcctcggcccgccaggaggggtgcc

SEQ ID NO: 18546 - DNA, 201 bp, Homo sapiens
gcctgcaccccaggaaaggagggggctcaggccatccagccaccacctacagcccagtgggtaccaggcaggctcccttcctggggaaaagaagcacccakaccccgcgccccgctgatctttgcttcagtccttgaatcacctgtgggacttgaggactcgggatcttcaggacgcctggagaagggtggtttcctgcca

SEQ ID NO: 18547 - DNA, 201 bp, Homo sapiens
agtgcaacacgacacgcggcaacgaggtcatctccgtgatgaatcgggccaagaaagcagggaagtcagtgggagtggtaaccaccacacgagtgcagcaygcctcgccagccggcacctacgcccacacggtgaaccgcaactggtactcggacgccgacgtgcctgcctcggcccgccaggaggggtgccaggacatcg

SEQ ID NO: 18548 - DNA, 201 bp, Homo sapiens
gcaccccaggaaaggagggggctcaggccatccagccaccacctacagcccagtgggtaccaggcaggctcccttcctggggaaaagaagcacccagaccycgcgccccgctgatctttgcttcagtccttgaatcacctgtgggacttgaggactcgggatcttcaggacgcctggagaagggtggtttcctgccaccct

SEQ ID NO: 18549 - DNA, 201 bp, Homo sapiens
aagcagggaagtcagtgggagtggtaaccaccacacgagtgcagcacgcctcgccagccggcacctacgcccacacggtgaaccgcaactggtactcggaygccgacgtgcctgcctcggcccgccaggaggggtgccaggacatcgctacgcagctcatctccaacatggacattgacgtgatcctaggtggaggccgaa

SEQ ID NO: 18550 - DNA, 201 bp, Homo sapiens
ttgcttcagtccttgaatcacctgtgggacttgaggactcgggatcttcaggacgcctggagaagggtggtttcctgccaccctgctggccaaggaggctsctggggtggggatcaccagggggattttgacacagccttcggctgccccccactaagctaattccacacccctgtacccccccagggggccctctgcctc

SEQ ID NO: 18551 - DNA, 201 bp, Homo sapiens
tcgagagccaaaggtccctccccagacatctggacactgggcatagatttctcaagaaggaagactcccctgcctccccagggcctctgctctcctgggaracaaagcaataataaaaggaagtgtttgtaatcccagcactttgggaggccgaggtgggcggatcacgaggtcaggagatggagaccatcctggctaaca

SEQ ID NO: 18552 - DNA, 201 bp, Homo sapiens
tcctgcctggcctccagcccgagtcgtcatccccggagtccctatacagaggtcctgccatggaaccttcccctccccgtgcgctctggggactgagcccwtgacaccaaacctgccccttggctgctctcggactccctaccccaaccccagggactgcaggttgtgccctgtggctgcctgcaccccaggaaaggaggg

SEQ ID NO: 18553 - DNA, 201 bp, Homo sapiens
ttcagtccttgaatcacctgtgggacttgaggactcgggatcttcaggacgcctggagaagggtggtttcctgccaccctgctggccaaggaggctcctgkggtggggatcaccagggggattttgacacagccttcggctgccccccactaagctaattccacacccctgtacccccccagggggccctctgcctcatgg

SEQ ID NO: 18554 - DNA, 201 bp, Homo sapiens
gcctccagcccgagtcgtcatccccggagtccctatacagaggtcctgccatggaaccttcccctccccgtgcgctctggggactgagcccatgacaccamacctgccccttggctgctctcggactccctaccccaaccccagggactgcaggttgtgccctgtggctgcctgcaccccaggaaaggagggggctcaggc

SEQ ID NO: 18555 - DNA, 201 bp, Homo sapiens
aatcacctgtgggacttgaggactcgggatcttcaggacgcctggagaagggtggtttcctgccaccctgctggccaaggaggctcctggggtggggatcmccagggggattttgacacagccttcggctgccccccactaagctaattccacacccctgtacccccccagggggccctctgcctcatggcaaaggcttgc

SEQ ID NO: 18556 - DNA, 201 bp, Homo sapiens
cctccagcccgagtcgtcatccccggagtccctatacagaggtcctgccatggaaccttcccctccccgtgcgctctggggactgagcccatgacaccaarcctgccccttggctgctctcggactccctaccccaaccccagggactgcaggttgtgccctgtggctgcctgcaccccaggaaaggagggggctcaggcc

SEQ ID NO: 18557 - DNA, 201 bp, Homo sapiens
tgggacttgaggactcgggatcttcaggacgcctggagaagggtggtttcctgccaccctgctggccaaggaggctcctggggtggggatcaccagggggmttttgacacagccttcggctgccccccactaagctaattccacacccctgtacccccccagggggccctctgcctcatggcaaaggcttgccccaaatct

SEQ ID NO: 18558 - DNA, 201 bp, Homo sapiens
ttcaggacgcctggagaagggtggtttcctgccaccctgctggccaaggaggctcctggggtggggatcaccagggggattttgacacagccttcggctgycccccactaagctaattccacacccctgtacccccccagggggccctctgcctcatggcaaaggcttgccccaaatctcaacttctcagacgttccatac

SEQ ID NO: 18559 - DNA, 201 bp, Homo sapiens
tgaaccgcaactggtactcggacgccgacgtgcctgcctcggcccgccaggaggggtgccaggacatcgctacgcagctcatctccaacatggacattgaygtgatcctaggtggaggccgaaagtacatgtttcgcatgggaaccccagaccctgagtacccagatgactacagccaaggtgggaccaggctggacggga

SEQ ID NO: 18560 - DNA, 201 bp, Homo sapiens
ggatcttcaggacgcctggagaagggtggtttcctgccaccctgctggccaaggaggctcctggggtggggatcaccagggggattttgacacagccttckgctgccccccactaagctaattccacacccctgtacccccccagggggccctctgcctcatggcaaaggcttgccccaaatctcaacttctcagacgttc

SEQ ID NO: 18561 - DNA, 201 bp, Homo sapiens
cctggagaagggtggtttcctgccaccctgctggccaaggaggctcctggggtggggatcaccagggggattttgacacagccttcggctgccccccactragctaattccacacccctgtacccccccagggggccctctgcctcatggcaaaggcttgccccaaatctcaacttctcagacgttccatacccccacatg

SEQ ID NO: 18562 - DNA, 201 bp, Homo sapiens
atgacaccaaacctgccccttggctgctctcggactccctaccccaaccccagggactgcaggttgtgccctgtggctgcctgcaccccaggaaaggaggrggctcaggccatccagccaccacctacagcccagtgggtaccaggcaggctcccttcctggggaaaagaagcacccagaccccgcgccccgctgatcttt

SEQ ID NO: 18563 - DNA, 201 bp, Homo sapiens
ctggagaagggtggtttcctgccaccctgctggccaaggaggctcctggggtggggatcaccagggggattttgacacagccttcggctgccccccactargctaattccacacccctgtacccccccagggggccctctgcctcatggcaaaggcttgccccaaatctcaacttctcagacgttccatacccccacatgc

SEQ ID NO: 18564 - DNA, 201 bp, Homo sapiens
tgccccaaatctcaacttctcagacgttccatacccccacatgccaatttcagcacccaactgagatccgaggagctcctgggaagccctgggtgcaggayactggtcgagagccaaaggtccctccccagacatctggacactgggcatagatttctcaagaaggaagactcccctgcctccccagggcctctgctctcc

SEQ ID NO: 18565 - DNA, 201 bp, Homo sapiens
aaacctgccccttggctgctctcggactccctaccccaaccccagggactgcaggttgtgccctgtggctgcctgcaccccaggaaaggagggggctcagrccatccagccaccacctacagcccagtgggtaccaggcaggctcccttcctggggaaaagaagcacccagaccccgcgccccgctgatctttgcttcagt

SEQ ID NO: 18566 - DNA, 201 bp, Homo sapiens
ttggctgctctcggactccctaccccaaccccagggactgcaggttgtgccctgtggctgcctgcaccccaggaaaggagggggctcaggccatccagccmccacctacagcccagtgggtaccaggcaggctcccttcctggggaaaagaagcacccagaccccgcgccccgctgatctttgcttcagtccttgaatcac

SEQ ID NO: 18567 - DNA, 201 bp, Homo sapiens
ggagaagggtggtttcctgccaccctgctggccaaggaggctcctggggtggggatcaccagggggattttgacacagccttcggctgccccccactaagytaattccacacccctgtacccccccagggggccctctgcctcatggcaaaggcttgccccaaatctcaacttctcagacgttccatacccccacatgcca

SEQ ID NO: 18568 - DNA, 201 bp, Homo sapiens
gctgctctcggactccctaccccaaccccagggactgcaggttgtgccctgtggctgcctgcaccccaggaaaggagggggctcaggccatccagccaccrcctacagcccagtgggtaccaggcaggctcccttcctggggaaaagaagcacccagaccccgcgccccgctgatctttgcttcagtccttgaatcacctg

SEQ ID NO: 18569 - DNA, 201 bp, Homo sapiens
ggtggtttcctgccaccctgctggccaaggaggctcctggggtggggatcaccagggggattttgacacagccttcggctgccccccactaagctaattcyacacccctgtacccccccagggggccctctgcctcatggcaaaggcttgccccaaatctcaacttctcagacgttccatacccccacatgccaatttcag

SEQ ID NO: 18570 - DNA, 201 bp, Homo sapiens
gctctcggactccctaccccaaccccagggactgcaggttgtgccctgtggctgcctgcaccccaggaaaggagggggctcaggccatccagccaccaccyacagcccagtgggtaccaggcaggctcccttcctggggaaaagaagcacccagaccccgcgccccgctgatctttgcttcagtccttgaatcacctgtgg

SEQ ID NO: 18571 - DNA, 201 bp, Homo sapiens
ccccaaccccagggactgcaggttgtgccctgtggctgcctgcaccccaggaaaggagggggctcaggccatccagccaccacctacagcccagtgggtaycaggcaggctcccttcctggggaaaagaagcacccagaccccgcgccccgctgatctttgcttcagtccttgaatcacctgtgggacttgaggactcggg

SEQ ID NO: 18572 - DNA, 201 bp, Homo sapiens
cctatacagaggtcctgccatggaaccttcccctccccgtgcgctctggggactgagcccatgacaccaaacctgccccttggctgctctcggactccctrccccaaccccagggactgcaggttgtgccctgtggctgcctgcaccccaggaaaggagggggctcaggccatccagccaccacctacagcccagtgggta

SEQ ID NO: 18573 - DNA, 201 bp, Homo sapiens
ccactaagctaattccacacccctgtacccccccagggggccctctgcctcatggcaaaggcttgccccaaatctcaacttctcagacgttccataccccyacatgccaatttcagcacccaactgagatccgaggagctcctgggaagccctgggtgcaggacactggtcgagagccaaaggtccctccccagacatctg

SEQ ID NO: 18574 - DNA, 201 bp, Homo sapiens
tccctatacagaggtcctgccatggaaccttcccctccccgtgcgctctggggactgagcccatgacaccaaacctgccccttggctgctctcggactccytaccccaaccccagggactgcaggttgtgccctgtggctgcctgcaccccaggaaaggagggggctcaggccatccagccaccacctacagcccagtggg

SEQ ID NO: 18575 - DNA, 201 bp, Homo sapiens
gccccgctgatctttgcttcagtccttgaatcacctgtgggacttgaggactcgggatcttcaggacgcctggagaagggtggtttcctgccaccctgctrgccaaggaggctcctggggtggggatcaccagggggattttgacacagccttcggctgccccccactaagctaattccacacccctgtacccccccaggg

SEQ ID NO: 18576 - DNA, 201 bp, Homo sapiens
taccccaaccccagggactgcaggttgtgccctgtggctgcctgcaccccaggaaaggagggggctcaggccatccagccaccacctacagcccagtgggkaccaggcaggctcccttcctggggaaaagaagcacccagaccccgcgccccgctgatctttgcttcagtccttgaatcacctgtgggacttgaggactcg

SEQ ID NO: 18577 - DNA, 201 bp, Homo sapiens
cccagtgggtaccaggcaggctcccttcctggggaaaagaagcacccagaccccgcgccccgctgatctttgcttcagtccttgaatcacctgtgggactygaggactcgggatcttcaggacgcctggagaagggtggtttcctgccaccctgctggccaaggaggctcctggggtggggatcaccagggggattttgac

SEQ ID NO: 18578 - DNA, 201 bp, Homo sapiens
gcctcggcccgccaggaggggtgccaggacatcgctacgcagctcatctccaacatggacattgacgtgatcctaggtggaggccgaaagtacatgtttcscatgggaaccccagaccctgagtacccagatgactacagccaaggtgggaccaggctggacgggaagaatctggtgcaggaatggctggcgaagcgccag

SEQ ID NO: 18579 - DNA, 201 bp, Homo sapiens
gccccccactaagctaattccacacccctgtacccccccagggggccctctgcctcatggcaaaggcttgccccaaatctcaacttctcagacgttccatrcccccacatgccaatttcagcacccaactgagatccgaggagctcctgggaagccctgggtgcaggacactggtcgagagccaaaggtccctccccagac

SEQ ID NO: 18580 - DNA, 201 bp, Homo sapiens
cccgccaggaggggtgccaggacatcgctacgcagctcatctccaacatggacattgacgtgatcctaggtggaggccgaaagtacatgtttcgcatgggraccccagaccctgagtacccagatgactacagccaaggtgggaccaggctggacgggaagaatctggtgcaggaatggctggcgaagcgccagggtgccc

SEQ ID NO: 18581 - DNA, 201 bp, Homo sapiens
taagctaattccacacccctgtacccccccagggggccctctgcctcatggcaaaggcttgccccaaatctcaacttctcagacgttccatacccccacakgccaatttcagcacccaactgagatccgaggagctcctgggaagccctgggtgcaggacactggtcgagagccaaaggtccctccccagacatctggaca

SEQ ID NO: 18582 - DNA, 201 bp, Homo sapiens
tttcgcatgggaaccccagaccctgagtacccagatgactacagccaaggtgggaccaggctggacgggaagaatctggtgcaggaatggctggcgaagcrccagggtgcccggtacgtgtggaaccgcactgagctcatgcaggcttccctggacccgtctgtgacccatctcatgggtctctttgagcctggagacatg

SEQ ID NO: 18583 - DNA, 201 bp, Homo sapiens
ttccacacccctgtacccccccagggggccctctgcctcatggcaaaggcttgccccaaatctcaacttctcagacgttccatacccccacatgccaattycagcacccaactgagatccgaggagctcctgggaagccctgggtgcaggacactggtcgagagccaaaggtccctccccagacatctggacactgggcat

SEQ ID NO: 18584 - DNA, 201 bp, Homo sapiens
caccccaggaaaggagggggctcaggccatccagccaccacctacagcccagtgggtaccaggcaggctcccttcctggggaaaagaagcacccagacccmgcgccccgctgatctttgcttcagtccttgaatcacctgtgggacttgaggactcgggatcttcaggacgcctggagaagggtggtttcctgccaccctg

SEQ ID NO: 18585 - DNA, 201 bp, Homo sapiens
cgcatggccatatcacctcactggccgtgaagcgttcacaccggcgcctcggcctggcccagaagctgatggaccaggcctccagggccatgatagagaaytttaacgccaaatacgtgtctctgcacgtcaggaagagtaaccggccagccttgcacctttattctaacaccctcaactttcagattagtgaggtggaac

SEQ ID NO: 18586 - DNA, 134 bp, Homo sapiens
agccgcagtttggcaccatcttttccatctcctsctccttccgccttcccgccatccgccctccacacgattcagcccggtggtgttagccccctggactcgattcctgaggcaaacagtgccccttaaggtcg

SEQ ID NO: 18587 - DNA, 201 bp, Homo sapiens
tgggatcatgaaggaatacctggacacaagagccactgcacaacagccaaggaactttgagacctgccattacagaacctttcttggcctactcacactaygctgccattttattctgtttgtagtagtcctctgttgggtgtggttatcctgcaagtttttctccttttagaatgatgaacaggaagcagggcaaactct

SEQ ID NO: 18588 - DNA, 187 bp, Homo sapiens
agccgcagtttggcaccatcttttccatctcctgctccttccgccttcccgccatccgccctccacacgattcagcccggtggtgtyagccccctggactcgattcctgaggcaaacagtgccccttaaggtcggcgacagcctcttctgggttcactgcagtccaaccggttccctaccctctgcc

SEQ ID NO: 18589 - DNA, 201 bp, Homo sapiens
cctgaggcaaacagtgccccttaaggtcggcgacagcctcttctgggttcactgcagtccaaccggttccctaccctctgccattatgaacatccgcaacrctcagccagacgacctgatgaatatgcaacactgcaacctcctttgccttcctgagaactaccagatgaaatactatttatatcatggcctttcctggcc

SEQ ID NO: 18590 - DNA, 201 bp, Homo sapiens
cttctgggttcactgcagtccaaccggttccctaccctctgccattatgaacatccgcaacgctcagccagacgacctgatgaatatgcaacactgcaacytcctttgccttcctgagaactaccagatgaaatactatttatatcatggcctttcctggccccagctttcttacatcgctgaggatgaggacgggaagat

SEQ ID NO: 18591 - DNA, 201 bp, Homo sapiens
tgcctttgggattttttatagtgagtagcatggtaatgctaattggagcaagatatatctcgggtgtgccataataataccagctatggagtcccaagatktaaacattttacataatgaaagcatatagcagttctgcctcttaatataatgacactattatagactctgattttgtttataaaccacttgctacatgac

SEQ ID NO: 18592 - DNA, 201 bp, Homo sapiens
aattggagcaagatatatctcgggtgtgccataataataccagctatggagtcccaagatgtaaacattttacataatgaaagcatatagcagttctgccycttaatataatgacactattatagactctgattttgtttataaaccacttgctacatgacccatgaaaaccctagacttgtgacctgaaataaagaaaat

SEQ ID NO: 18593 - DNA, 201 bp, Homo sapiens
agatccaggccacagaaagtgaaattcgttatgccacatggaagaaagccgtaatgaagtcaatgggttgggttaccagtcagtctcctgaaggtggtgayccttctatcttctctagtctgcctttgggattttttatagtgagtagcatggtaatgctaattggagcaagatatatctcgggtgtgccataataatacc

SEQ ID NO: 18594 - DNA, 201 bp, Homo sapiens
tgtgctcctgactggctgcgctccctgcccccaacaccgccgtggcctgggaaacggtcccagagctgctgagccgacctactggtgtcatggcagccccraagacagcagctgtggggccgttggtgggagcggtggtccagggcaccaactccactcgctttctggttttcaattcaaaaacagcggaactacttagtc

SEQ ID NO: 18595 - DNA, 201 bp, Homo sapiens
ggctcaccgcacagcagctctttgccagcgctgacgacctcacctacaacgatttcctgattctcccaggattcatagacttcctagctggtgaggtggamctgacctcagccctgacccggaagatcacgctgaagacgccactgatctcctttcccacggacactgtgatagaggccgacatggccatcgcgatggctc

SEQ ID NO: 18596 - DNA, 201 bp, Homo sapiens
agaccgtggggcacgtggtcaaggccctggcccttggagcctccacagtgatgatgggctccctgctggccaccaccacggaggcctccggtgaatacttsttctcagacggggtgccgctcaagaagtatcagggcatgggctctgtggatgccatggagaagagcagtagcagccagaaacgatacttcagcgaggcgg

SEQ ID NO: 18597 - DNA, 201 bp, Homo sapiens
caccctggaaatgatggcctgtggtcggacccacggcactgctgtgtacaaggtggccgagtatgcctggcgttttggtgtgcccatcatagctgatggtrgcatccagaccgtggggcacgtggtcaaggccctggcccttggagcctccacagtgatgatgggctccctgctggccaccaccacggaggcctccggtga

SEQ ID NO: 18598 - DNA, 201 bp, Homo sapiens; identical to SEQ ID NO: 18595

SEQ ID NO: 18599 - DNA, 201 bp, Homo sapiens; identical to SEQ ID NO: 18596

SEQ ID NO: 18600 - DNA, 201 bp, Homo sapiens; identical to SEQ ID NO: 18597

SEQ ID NO: 18601 - DNA, 201 bp, Homo sapiens
gtcaacaaagttaaatccaaattcaaaattatccattaaagttacatcttcatgtatcacaatttttaaagttgaaaagcatcccagttaaactagatgtgatagttaaaccagatgaaagcatgatgatccatctgtgtaatgtggttttattcactagaataatggcaaatacttctaatttttttccctaaacatttt

SEQ ID NO: 18602 - DNA, 201 bp, Homo sapiens
acaggaattgacactgatttggatttgtgcactctaatttttaacttattgatgctctattgtgcagtagcatttcatttaagataaggctcatatagtaytacccaactagttggtaatgtgattatgtggtaccttggctttaggttttcattcgcacggaacaccttttggcatgcttaacttcctggtaacaccttc

SEQ ID NO: 18603 - DNA, 201 bp, Homo sapiens
ttcgaggcttatgtatcaagtctcgggagatctttctcagccagcctattcttttggaattggaagcaccgctgaaaatttgtggagatattcatggacartatacagatttactgagattatttgaatatggaggtttcccaccagaagccaactatcttttcttaggagattatgtggacagaggaaagcagtctttgg

SEQ ID NO: 18604 - DNA, 170 bp, Homo sapiens
tcttttttttttttttttttttttgagttgttgtttgtttttagatccacagtacatgagaatccttttttgacaagccttggaaagctgacactgtctcyttttcctccctctatacgaaggatgtatttaaatgaatgctggtcagtgggacattttgtcaactatgg

SEQ ID NO: 18605 - DNA, 201 bp, Homo sapiens
taatgcccttctatatgtgctaccatagatgtgacatttttgaccttaatatcgtctttgaaaatgttaaattgagaaacctgttaacttacattttatgrattggcacattgtattacttactgcaagagatatttcattttcagcacagtgcaaaagttctttaaaatgcatatgtctttttttctaattccgttttgt

SEQ ID NO: 18606 - DNA, 201 bp, Homo sapiens
attgtctggcttttgtaaattcatccaggtcaagactaagtatgttggttaataggaatccttttttttttttttaaagactaaatgtgaaaaaataatcmctacttaagctaattaatattggtcattaaatttaaaggatggaaatttatcatgtttaaaaattattcaagcactcttaaaaccacttaaacagcctcc

SEQ ID NO: 18607 - DNA, 201 bp, Homo sapiens
gtcaacaaagttaaatccaaattcaaaattatccattaaagttacatcttcatgtatcacaatttttaaagttgaaaagcatcccagttaaactagatgtgatagttaaaccagatgaaagcatgatgatccatctgtgtaatgtggttttagtgttgcttggttgtttaattattttgagcttgttttgtttttgtttgt

SEQ ID NO: 18608 - DNA, 201 bp, Homo sapiens; identical to SEQ ID NO: 18602

SEQ ID NO: 18609 - DNA, 201 bp, Homo sapiens; identical to SEQ ID NO: 18603

SEQ ID NO: 18610 - DNA, 201 bp, Homo sapiens
aacacagtagatatctgttataatgtggtgtatcacatggattataaagcaaagttatggtcgatttctattcttgaaagaatcaactacagtgaatcctwtgcatttgaagccttaacatgcattgctttaattttgcccagggacaaattttaataatcagcaagactggtttgtgcaaagcgttgagtcatcaggtat

SEQ ID NO: 18611 - DNA, 201 bp, Homo sapiens
tcttttttttttttttttttttttgagttgttgtttgtttttagatccacagtacatgagaatccttttttgacaagccttggaaagctgacactgtctcyttttcctccctctatacgaaggatgtatttaaatgaatgctggtcagtgggacattttgtcaactatgggtattgggtgcttaactgtctaatattgcca

SEQ ID NO: 18612 - DNA, 201 bp, Homo sapiens
acttctccacgcccctgacccatggggtggactgcccctacctggccacctacgtggactggcacttcctttttgagtcccaggccgccaagacaatacgygatgccttttgtatatttgaacagaaccagggcctccccctgcggcgacaccactcagatctctactcccactactttgggggccttgcggaaacggtgc

SEQ ID NO: 18613 - DNA, 201 bp, Homo sapiens
ttgaggccggcctggtgaatgtggtgctgatcccagacaatggcacaggtgggtcctggtccctgaagtcccctgtgcccccgggtccagctccccctctrcagttccatccccaaggcccccgcttcagtgtccagggaagtcgagtggcctcctcactgtggactttctcctttggcctcggagcattcagtggcccaa

SEQ ID NO: 18614 - DNA, 201 bp, Homo sapiens
cccatgggaggcgccacccctcgctacctgtacctggccagcaaccacagcaacaagtggggtcacccccggggctaccgcatccaggtgcgcagcttttytggggagccactgccccagaacagctccgtggagagaggcttcagctgggggaggtaccagctggtggtaacccagcggaaggaggaggaacctagtagc

SEQ ID NO: 18615 - DNA, 201 bp, Homo sapiens
aggaacctagtagcaccagcatctacaatttgaatgacccttggacacccactgtggacttcactgacttcatcaacaatgagaccattgcagggcaggayttggtggcctgggtgacagctggttttctgcatatcccacatgcagaggacattcctaacacagtgactgtggggaacagcgtgggcttcttcctccgac

SEQ ID NO: 18616 - DNA, 201 bp, Homo sapiens
ctggatgtagcaggactggagaactgggtctgggccgaggatatggcctttgtccccatggctgtgccctggagccctgagcaccagatgcagaggctgcrggtgacccggaagctgctggagacagaggagcaagccaccttccccatgggaggcgccacccctcgctacctgtacctggccagcaaccacagcaacaag

SEQ ID NO: 18617 - DNA, 201 bp, Homo sapiens
tgagaccattgcagggcaggacttggtggcctgggtgacagctggttttctgcatatcccacatgcagaggacattcctaacacagtgactgtggggaacrgcgtgggcttcttcctccgaccctacaacttctttgacgaagacccctccttctactctgccgactccatctacttccgaggggaccaggatgctggggc

SEQ ID NO: 18618 - DNA, 201 bp, Homo sapiens
caccagatgcagaggctgcaggtgacccggaagctgctggagacagaggagcaagccaccttccccatgggaggcgccacccctcgctacctgtacctggscagcaaccacagcaacaagtggggtcacccccggggctaccgcatccaggtgcgcagcttttctggggagccactgccccagaacagctccgtggagaga

SEQ ID NO: 18619 - DNA, 201 bp, Homo sapiens
aggtaccagctggtggtaacccagcggaaggaggaggaacctagtagcaccagcatctacaatttgaatgacccttggacacccactgtggacttcactgrcttcatcaacaatgagaccattgcagggcaggacttggtggcctgggtgacagctggttttctgcatatcccacatgcagaggacattcctaacacagtg

SEQ ID NO: 18620 - DNA, 201 bp, Homo sapiens
tttggtgctgcccagaggtatggaaacaaagtttcagagcacaccctgggcacggtccacacccacagcgcccacttcaaggtggacctggatgtagcagmactggagaactgggtctgggccgaggatatggcctttgtccccatggctgtgccctggagccctgagcaccagatgcagaggctgcaggtgacccggaag

SEQ ID NO: 18621 - DNA, 201 bp, Homo sapiens
gtgctgcccagaggtatggaaacaaagtttcagagcacaccctgggcacggtccacacccacagcgcccacttcaaggtggacctggatgtagcaggactrgagaactgggtctgggccgaggatatggcctttgtccccatggctgtgccctggagccctgagcaccagatgcagaggctgcaggtgacccggaagctgc

SEQ ID NO: 18622 - DNA, 201 bp, Homo sapiens
tggcctgggtgacagctggttttctgcatatcccacatgcagaggacattcctaacacagtgactgtggggaacagcgtgggcttcttcctccgaccctayaacttctttgacgaagacccctccttctactctgccgactccatctacttccgaggggaccaggatgctggggcctgcgaggtcaaccccctagcttgcc

SEQ ID NO: 18623 - DNA, 201 bp, Homo sapiens
taggcggtcctgggatggggcatgtggccaagggctccagggccagggtgtgagggatggggagcagctgggcactgggccggcagcctggttccctcttycctgtgccaggactctcttccctccactgccctccttcacatccccctctgagccaggagcctcctgaccctgtgatgcctgacacaggggacagtcagc

SEQ ID NO: 18624 - DNA, 201 bp, Homo sapiens
gggccagggtgtgagggatggggagcagctgggcactgggccggcagcctggttccctcttccctgtgccaggactctcttccctccactgccctccttcrcatccccctctgagccaggagcctcctgaccctgtgatgcctgacacaggggacagtcagctttgttgatgccagctgtgctgagttcccatccagagag

SEQ ID NO: 18625 - DNA, 201 bp, Homo sapiens
aggcggccttggccatctatggaggcaattctccttctgctctacgaagccggtacatagatagtggctttggcttgggccacttctccacgcccctgacycatggggtggactgcccctacctggccacctacgtggactggcacttcctttttgagtcccaggccgccaagacaatacgcgatgccttttgtatatttg

SEQ ID NO: 18626 - DNA, 201 bp, Homo sapiens
cagaaggtgttgaggctttaaaagtgggtgctgtgccacctcgagttgtgttgcatccacagggacaaataccgatactttgcttgtttgatgagagcccrgtctgaagaacatacgaacgaaaaggatatgatgaaggccatccggctgctgaaggaggctgaggaagaattctggtaccatcagcatccacagccatgc

SEQ ID NO: 18627 - DNA, 201 bp, Homo sapiens
atcaaatggtctgtcagttcaaacagtggtaggaatgctctataaccccttctcaggttactggcattggagtgaaaataccagccttaactatgcagctyatgctgtgaaatccagggtccaggaacacccagcctctgctgagtttgttttaaagggagaaacagaagagctccaagctaatgcctgcaccaatccagc

SEQ ID NO: 18628 - DNA, 201 bp, Homo sapiens
ctgtcaagtgttaaaacccggtggttctttattcattactacaatcaacaaaacacaactttcctatgccttgggaattgttttttcagagcaaattgcargtattgtaccaaaaggtactcatacatgggagaagtttgtttcacctgaaacactagagagcattctggaatcaaatggtctgtcagttcaaacagtggt

SEQ ID NO: 18629 - DNA, 171 bp, Homo sapiens
cttggatatctgatgttttcaaatacaaaaatgtacaatttatcctttgagagagaatcatgaagaaaagaaggtcaataaaaagggctaaaaccttggamaaaagtttttgttatttcgtctaatagctactttcaagggattctgtgaataaaaagttttgtcaagata

SEQ ID NO: 18630 - DNA, 201 bp, Homo sapiens
ctgctttgaggccattggaaatctggacgttctggcagctgccctcgcctcctgcaatgagagctatggggtctgtgtggttgttggggtgttgcctgccrgtgttcaactcaaaatcagtggccagttgttcttctcaggacgttctttgaagggttctgtttttggaggctggaagagcagacagcacatccctaaact

SEQ ID NO: 18631 - DNA, 201 bp, Homo sapiens
gctcctctagagaaagtatgcctaattagctgtggcttttccactgggtttggtgctgcaatcaatactgccaaggtgactccaggttctacctgtgctgrgttggcctgggaggagtcggcttgtctgttgtcatgggttgtaaagcagcaggagcagccaggatcattggagtggatgtcaacaaggagaaatttaaga

SEQ ID NO: 18632 - DNA, 201 bp, Homo sapiens
tatcactttggtaataccagcaccttctgtgaatacacagtgataaaggaaatctcagttgccaagattgatgcagtcgctcctctagagaaagtatgcckaattagctgtggcttttccactgggtttggtgctgcaatcaatactgccaaggtgactccaggttctacctgtgctgtgttggcctgggaggagtcggct

SEQ ID NO: 18633 - DNA, 201 bp, Homo sapiens
acagtcaaaaacccaactgatgtctgatggtaccagcaggtttacctgcaagggaaaatcaatatatcactttggtaataccagcaccttctgtgaatacmcagtgataaaggaaatctcagttgccaagattgatgcagtcgctcctctagagaaagtatgcctaattagctgtggcttttccactgggtttggtgctgc

SEQ ID NO: 18634 - DNA, 201 bp, Homo sapiens
aggagtaagcacagtgaaaccaggtgacaaagttatcacactctttctgccacagtgtggagaatgtacctcttgcctgaattctgagggcaatttttgtrtacaattcaaacagtcaaaaacccaactgatgtctgatggtaccagcaggtttacctgcaagggaaaatcaatatatcactttggtaataccagcacctt

SEQ ID NO: 18635 - DNA, 196 bp, Homo sapiens
cagtcgcctgtgtacctttgtactttctacagtgaaagttgctacaggatctccctttctcaataaattcatctgcggtggagaaaatcagcatgwgtactacaggccaagtcatcagatgcaaagcagccatactctggaagcctggtgcaccattttctattgaagaggtagaagtggccccaccaaaggcaaa

SEQ ID NO: 18636 - DNA, 201 bp, Homo sapiens
tcacataaaacaggaataattgtatactttcttactaatgtgttccatggagtttttcctccaagaagtggcttaggggaaaatgagccccagtaatgctytgtggcatccaatccttctaccccgaccctttgactttctgccccagcccctcttagttctcctagaattaggactaaggttaagtgccctcttgggata

SEQ ID NO: 18637 - DNA, 201 bp, Homo sapiens
tcagcagttcatagtacccatcttcataactaagccacctagggatccagcagaaaaaaaagggatgaggggagtcatcatacaggaggtggatcatttascaggatccacacttcctacaaagcggttgtaatattaaataacaaaactgttttttattccaatcttcacataaaacaggaataattgtatactttctta

SEQ ID NO: 18638 - DNA, 201 bp, Homo sapiens
attgccaaagaaaattcaaattattcttcaattagtcaggatgatttgactatcagcagttcatagtacccatcttcataactaagccacctagggatccrgcagaaaaaaaagggatgaggggagtcatcatacaggaggtggatcatttaccaggatccacacttcctacaaagcggttgtaatattaaataacaaaac

SEQ ID NO: 18639 - DNA, 196 bp, Homo sapiens; identical to SEQ ID NO: 18635

SEQ ID NO: 18640 - DNA, 201 bp, Homo sapiens; identical to SEQ ID NO: 18630

SEQ ID NO: 18641 - DNA, 201 bp, Homo sapiens; identical to SEQ ID NO: 18631

SEQ ID NO: 18642 - DNA, 201 bp, Homo sapiens; identical to SEQ ID NO: 18632

SEQ ID NO: 18643 - DNA, 201 bp, Homo sapiens; identical to SEQ ID NO: 18633

SEQ ID NO: 18644 - DNA, 201 bp, Homo sapiens; identical to SEQ ID NO: 18634

SEQ ID NO: 18645 - DNA, 201 bp, Homo sapiens
gagggaccccattcggattcttgtcaagaaggaagagttaaccctgaaggattttactgtctctgccatgcatggagatatggaccaaaaggaacgagatrtggtcatgagggagtatcgttctggctctagcagagttttgattaccactgacctgctgcccagaggcattgatgtgcagcagctttctttagtcatcaa

SEQ ID NO: 18646 - DNA, 201 bp, Homo sapiens
agggagtatcgttctggctctagcagagttttgattaccactgacctgctgcccagaggcattgatgtgcagcagctttctttagtcatcaactacgaccytcccacgaacagggaaaactatatccacagaatcggtcgaggtggacagtttggccataaaggtgtggctattaacatggtggcagaagacaagaggact

SEQ ID NO: 18647 - DNA, 201 bp, Homo sapiens
ctctgccatgcatggagatatggaccaaaaggaacgagatgtggtcatgagggagtatcgttctggctctagcagagttttgattaccactgacctgctgsccagaggcattgatgtgcagcagctttctttagtcatcaactacgaccttcccacgaacagggaaaactatatccacagaatcggtcgaggtggacagtt

SEQ ID NO: 18648 - DNA, 201 bp, Homo sapiens
tgagggaccccattcggattcttgtcaagaaggaagagttaaccctgaaggattttactgtctctgccatgcatggagatatggaccaaaaggaacgagaygtggtcatgagggagtatcgttctggctctagcagagttttgattaccactgacctgctgcccagaggcattgatgtgcagcagctttctttagtcatca

SEQ ID NO: 18649 - DNA, 201 bp, Homo sapiens
ttgtaaaaattgtatttgttaacactgtgcacaaacgttttatactaaataaatatcaaactacattcttctgaaagatgtttctattatttcttaggtcrcttccatatatattatgtatagtgaaaccatttttaaaaagcaatgacttaggcaaaccaaccctagtttgttaaaccatttccctgtttttatttaaaa

SEQ ID NO: 18650 - DNA, 201 bp, Homo sapiens
ctgataaaggatacgttgttcctaatgtggatctaccacccctgtgttcatcgagattccggtctggacctcctggagaagaggcccaagtggctagccarttcattgcagatgtcattgaaaattcacagataattcagaaagaggacttatgcatttctccaggaaagcttgtctgggttctatactgtgatctcattt

SEQ ID NO: 18651 - DNA, 201 bp, Homo sapiens
ccaggcattgggctaactggagctaaacttcaggactgtatgagccgagcagttacaagacacaaagaagttaaaaaactgatggatgaagtaattaagastatgaaacccaaataaacagccaccacattttcaaaacagatttgtaaaaattgtatttgttaacactgtgcacaaacgttttatactaaataaatatca

SEQ ID NO: 18652 - DNA, 201 bp, Homo sapiens
aaacaaaaagtagaaactcaattcttttgattcagtgctcttgtgtttttaaaaaaggaacaaaaagtaatgcaagactcaaaattttggagtggttggcrtgcctctcttcattttactttttgactggctgcctgtatgccgatgatgatgtagctgagctgtttgtgctgctgctgctgccatagccatttgatgctg

SEQ ID NO: 18653 - DNA, 201 bp, Homo sapiens
gggtgcgctccagtgtgaaaaaacttacaagtctctgagcacacaaagagataagattccaagggaaaattaaagaaccgaagaaaaggagagtgaaactmcaggaaactccgaggtcaggaatttgggggaatctaggggaaaagggacttctccgagaactggtagcgcggaggaggggacgcctgaggagccgcagtc

SEQ ID NO: 18654 - DNA, 102 bp, Homo sapiens
grgcaggctagggagcacaccccttctgggggctcgagacctccctgggtggagcagaactgcagcggctgcaggtcccggagagtctgggagaggtcgagg

SEQ ID NO: 18655 - DNA, 201 bp, Homo sapiens; identical to SEQ ID NO: 18649

SEQ ID NO: 18656 - DNA, 201 bp, Homo sapiens; identical to SEQ ID NO: 18650

SEQ ID NO: 18657 - DNA, 201 bp, Homo sapiens; identical to SEQ ID NO: 18651

SEQ ID NO: 18658 - DNA, 201 bp, Homo sapiens
aacgctccacacgcactgcttgattctgcgctagaaaccctgttatctccgaactgttggtgttattctgagtcacagcaccagctcttttataaagaggragacccgctccttctttaacagcagattcgtcaaaatacgtccaaggcaaggaaacctagaaaggcgtctgggcaggggaaagtcgatgcgagggcgggc

SEQ ID NO: 18659 - DNA, 201 bp, Homo sapiens; identical to SEQ ID NO: 18652

SEQ ID NO: 18660 - DNA, 201 bp, Homo sapiens
agaaaaaagacgcagaaacattggaataacgctccacacgcactgcttgattctgcgctagaaaccctgttatctccgaactgttggtgttattctgagtyacagcaccagctcttttataaagagggagacccgctccttctttaacagcagattcgtcaaaatacgtccaaggcaaggaaacctagaaaggcgtctggg

SEQ ID NO: 18661 - DNA, 201 bp, Homo sapiens
ccacacgcactgcttgattctgcgctagaaaccctgttatctccgaactgttggtgttattctgagtcacagcaccagctcttttataaagagggagaccygctccttctttaacagcagattcgtcaaaatacgtccaaggcaaggaaacctagaaaggcgtctgggcaggggaaagtcgatgcgagggcgggccaggga

SEQ ID NO: 18662 - DNA, 201 bp, Homo sapiens
gatagttggtggtagttctattttataaggaatccatgaatcactcaagcagtcttaaactatttgtcacaaggatcatacaggactttgaaagtgacacrttttttccagaaattgatttggagaaatataaatttctgccagaatacccaggtgttttctttgatgtccaggaggagaaaggcattaagtacaaatttg

SEQ ID NO: 18663 - DNA, 110 bp, Homo sapiens
agtgcggacvtccagtttcgcagtgggagtcttcattgcgccagtgactaaaaagagaattaaatatgggtgatgttgagaaaggcaagaagatttttattatgaagtgt

SEQ ID NO: 18664 - DNA, 201 bp, Homo sapiens
agcttaaccagacactgaaggagttcaaagtccagtttggggacaagccaagtgaggggcagcggcggcgcacggacctcaccgcgctggtggcccacaaygatgaccccaccgacaagatgtttgtgttctttccagaggagcccaaggtgggcatcaagaccctcaacgtgtactgccggcgcatgcagcaggagaaca

SEQ ID NO: 18665 - DNA, 201 bp, Homo sapiens
tggaaaatccgcaagaccatcatgcagctgtgccatgaccgtggctacctagtgacctaggacgagcttaaccagacactgaaggagttcaaagtccagtytggggacaagccaagtgaggggcagcggcggcgcacggacctcaccgcgctggtggcccacaacgatgaccccaccgacaagatgtttgtgttctttcca

SEQ ID NO: 18666 - DNA, 201 bp, Homo sapiens
gtactgccggcgcatgcagcaggagaacatcacgcgggtcctcatcatggtgcagcagggcatgacgccctccgccaagtagtgcctggtccacatggctsccaagtacatcctggagcagtttctgcagcagaaattgctcatcgacatcacagagtacgagctagtccctgagtacgttgtcatgaccaaggaggaggt

SEQ ID NO: 18667 - DNA, 201 bp, Homo sapiens
gtcctcggagagcacctgggacgcatggaacgagaggctgctggagattgagaaggaggcttcccggaggtaccacgccaagagcaagagagaggaggcgrcagacaggagctcagaagcagggagcagggtgcgggaggatgatgaggacagcgtgggctctgaggccagttccttctacaacttctgcagcaggaacaa

SEQ ID NO: 18668 - DNA, 201 bp, Homo sapiens
agctttatgaggtctgaagaagagggagagaaagagaggacagaaaacagagaagaagggaggtttgcatctggacggcggtcccagtatcggagaagcamtgacagggaggaagaggaagaaatggacgatgaagccatcattgctgcttggagacgccggcaagaagaaaccaggaccaagctgcagaaaaggagggag

SEQ ID NO: 18669 - DNA, 201 bp, Homo sapiens
gcccatcttcagcctctttgctgacaatgtggacctaaaggaacttggccggaaggagaaggagatgcagatggagcttagggagaagatgtctgagtacmaaatggaaaagctggcctcagacaacaaacgcagctccctcttcaagaagaagaaggtcaaggaagatgaggatgatggtgtgggtgatggggatgagga

SEQ ID NO: 18670 - DNA, 126 bp, Homo sapiens
aactcaagccaccgggggtcagagcwgacgcagagtgtccaggcatgctggagtctgctgaacagctgctggtggaggacctgtacaaccgcgtcagggagaagatggatgacaccagcctctata

SEQ ID NO: 18671 - DNA, 201 bp, Homo sapiens
gggccctggttcaggatcgccaagaggcgccctggaatgaggtggatgaggtctggcccaatgtcttcatagctgagaagagtgtggctgtgaacaagggsaggctgaagaggctgggaatcacccacattctgaatgctgcgcatggcaccggcgtttacactggccccgaattctacactggcctggagatccagtacc

SEQ ID NO: 18672 - DNA, 201 bp, Homo sapiens
ctgacatgcagtctgtgctgtcctgcaacaccacactgagctcacccgcggaaagttgcagaagcaaagtgagggggaccagcaagcccatcttcagcctytttgctgacaatgtggacctaaaggaacttggccggaaggagaaggagatgcagatggagcttagggagaagatgtctgagtacaaaatggaaaagctgg

SEQ ID NO: 18673 - DNA, 201 bp, Homo sapiens
ggacctaaaggaacttggccggaaggagaaggagatgcagatggagcttagggagaagatgtctgagtacaaaatggaaaagctggcctcagacaacaaaygcagctccctcttcaagaagaagaaggtcaaggaagatgaggatgatggtgtgggtgatggggatgaggacactgacagtgccatagggagcttccgata

SEQ ID NO: 18674 - DNA, 201 bp, Homo sapiens
tggaaaagctggcctcagacaacaaacgcagctccctcttcaagaagaagaaggtcaaggaagatgaggatgatggtgtgggtgatggggatgaggacacwgacagtgccatagggagcttccgatattcttcccgcagtaattcccagaaacctgaaacagacacatgctcctccctggctgtctgtgatcactatgcaa

SEQ ID NO: 18675 - DNA, 201 bp, Homo sapiens
agcaagcccatcttcagcctctttgctgacaatgtggacctaaaggaacttggccggaaggagaaggagatgcagatggagcttagggagaagatgtctgmgtacaaaatggaaaagctggcctcagacaacaaacgcagctccctcttcaagaagaagaaggtcaaggaagatgaggatgatggtgtgggtgatggggat

SEQ ID NO: 18676 - DNA, 201 bp, Homo sapiens
agaggagagcccagagccctacttcttccgccggaccccagagtcctcagaaagggaagagtccccagaaccacagcgcccaaattgggccaggtccaggractgggaagatgtggaagagtcatccaagtcagacttctctgaatttggagccaagaggaagttcacccagagctttatgaggtctgaagaagagggaga

SEQ ID NO: 18677 - DNA, 201 bp, Homo sapiens
ctcttcaagaagaagaaggtcaaggaagatgaggatgatggtgtgggtgatggggatgaggacactgacagtgccatagggagcttccgatattcttcccrcagtaattcccagaaacctgaaacagacacatgctcctccctggctgtctgtgatcactatgcaagtggcagcagagttggcaaagagatggatagcagt

SEQ ID NO: 18678 - DNA, 201 bp, Homo sapiens
aaccatcaatacgaatacgaggtccgaatgctggaccaactgataccattttctgttgctcagcgccctctaagctttggtgtttcacttaatgtatttgrcagtgttcatcacaggctagagaggtgagcttggaaaagcactgtagtttgtcagagactccagtttacatccagaaaggccatgaacataggacacgct

SEQ ID NO: 18679 - DNA, 201 bp, Homo sapiens
cagcagtgctggtggtcgcctacctgatgatcttccacaacatggccatcctggaggctttgatgaccgtgcgtaagaagcgggccatctaccccaatgasggcttcctgaagcagctgcgggagctcaatgagaagttgatggaggagagagaagaggactatggccgggaggggggatcagctgaggctgaggagggcg

SEQ ID NO: 18680 - DNA, 201 bp, Homo sapiens
accctgagcgagagcagcgcctgggagagcgtgagcagccacgacatctgggtcctgaagcagcagctggagctgaaccgcccggaccacggcaggaggcrccgcgcagactcgatgtcctcggagagcacctgggacgcatggaacgagaggctgctggagattgagaaggaggcttcccggaggtaccacgccaagagc

SEQ ID NO: 18681 - DNA, 201 bp, Homo sapiens
agctggggaaaatctgagaacactgaaagaaaccactcacgttagcatagggctcagggcacacgttgccaccactcatcgcaggatgaggatacagagargatcttccagaggggcagagccaaaatgagaggtaccaagcataagggcagcagaggtggagtagggaggaggcaaggagggggagaaccatcaatacga

SEQ ID NO: 18682 - DNA, 201 bp, Homo sapiens
caccagtaagaacaaaggcatcacctggggagaggatacactgatggagtatttggagaatcccaagaagtacatccctggaacaaaaatgatctttgccrgcattaagaaggaggcagaaagagcagacttgatagcttatctcaaaaaagctactaatgagtaataattggccactgccttatttattacaacacagaa

SEQ ID NO: 18683 - DNA, 201 bp, Homo sapiens
ttcctagaagaggatcactacttagccccagacttttaccatgtcttcaaaaagatgtggaaactgaagcagcaagagtgccctgaatgtgatgttctctycctggggacctatagtgccagtcgcagtttctatggcatggctgacaaggtagatgtgaaaacttggaaatccacagagcacaatatgggtctagccttg

SEQ ID NO: 18684 - DNA, 201 bp, Homo sapiens
gactaatttctgtgtaaagatattacgggctgggtgtggtggctcatgtctgtaatcccagcactctgggaggttgaggcaggcagattgcttgaactcargagtttgagaccagcctgggcaacatggcgaaaacccatctctactaaaaatacaaaaaattagccgggtgtagtggtgcatctgtagtcccagctactt

SEQ ID NO: 18685 - DNA, 201 bp, Homo sapiens
tttatttaaattgcatttattaatctttttatctgaaactttgtacacttttccactttcaaaacctattttaagtacagcaaaatttatttaaaactgtsatagcagtaaaaagtattacgatgaaattgttagggtattaatggaacaaacccagtttcactctcttgacacacttattaggaagggattgcttcactg

SEQ ID NO: 18686 - DNA, 201 bp, Homo sapiens
ggtgcggttgggaccgcggctgagctttttccgggacccgtggtgctgaatggagaggacggagacgaagccgagccgcggctcctagcggcggcgccgaygctcgagctgtagctgccaggcgaggatgtgtggagcgcaggcggcgcggggtaaatgagaggtctcgggccccaggacccccggggcccgggatgagtt

SEQ ID NO: 18687 - DNA, 201 bp, Homo sapiens
gaggcgaggccgcgtcgctcagttctggccgtctagggcccctgtaaggatgagagcgcagaggacgcagggccgctggaggcgcaggtaacgaagctagkgtgcggttgggaccgcggctgagctttttccgggacccgtggtgctgaatggagaggacggagacgaagccgagccgcggctcctagcggcggcgccgat

SEQ ID NO: 18688 - DNA, 201 bp, Homo sapiens
tacatgtttccagaaactctaactatcagtgaaaagtttactgtggtagccatttccccacctagaaaaaatggagggtggggagatattagggaccatgwactctgtaaaagttatagaagactgcagtgaaaatcacagttacaaaagcgacagtcttctatttttgatatttgtccaaacaggacatacaattgaata

SEQ ID NO: 18689 - DNA, 169 bp, Homo sapiens
gccggaggggtgtgggccggagggccgcggtgtgccgcggggcagttgcgggttgtcataacggtcccygccggagtgaggcgaggccgcgtcgctcagttctggccgtctagggcccctgtaaggatgagagcgcagaggacgcagggccgctggaggcgcaggtaac

SEQ ID NO: 18690 - DNA, 201 bp, Homo sapiens
gtggggaccacccctctgtggctgtgggcatccgcagggtctccaacgtgtcggcggcttccctggtcccggcggtcccccagcccgaggcggacaacctkacgctgcggtaccggtccctggtgtaccagctgaactttgatcagaccctgaggaatgtagataaggctggcacctgggccccccgggagctggtgctgg

SEQ ID NO: 18691 - DNA, 201 bp, Homo sapiens
tgaatgtgatgttctctccctggggacctatagtgccagtcgcagtttctatggcatggctgacaaggtagatgtgaaaacttggaaatccacagagcacratatgggtctagccttgacccggaatgcctatcagaagctgatcgagtgcacagacactttctgtacttatgatgattataactgggactggactcttca

SEQ ID NO: 18692 - DNA, 201 bp, Homo sapiens
aggtagatgtgaaaacttggaaatccacagagcacaatatgggtctagccttgacccggaatgcctatcagaagctgatcgagtgcacagacactttctgwacttatgatgattataactgggactggactcttcaatacttgactgtatcttgtcttccaaaattctggaaagtgctggttcctcaaattcctaggatct

SEQ ID NO: 18693 - DNA, 201 bp, Homo sapiens
cagaccaaacatcactggtggtggaagctgcattttgtgtgggaaagagtgaaaattcttcgagattatgctggccttatacttttcctagaagaggatcrctacttagccccagacttttaccatgtcttcaaaaagatgtggaaactgaagcagcaagagtgccctgaatgtgatgttctctccctggggacctatagt

SEQ ID NO: 18694 - DNA, 201 bp, Homo sapiens
tggttcctcaaattcctaggatctttcatgctggagactgtggtatgcatcacaagaaaacctgtagaccatccactcagagtgcccaaattgagtcactyttaaataataacaaacaatacatgtttccagaaactctaactatcagtgaaaagtttactgtggtagccatttccccacctagaaaaaatggagggtggg

SEQ ID NO: 18695 - DNA, 201 bp, Homo sapiens
tttctagtgccagctttaacttaaatcatacgttttaaaaggacagatacagaaaattataggaaacaggcttaaattttgctccatatttaatgtagacrtttatagaagtttcccttaatttgtaattgcattcaaccgagaatttctcataaaagactaatttctgtgtaaagatattacgggctgggtgtggtggct

SEQ ID NO: 18696 - DNA, 201 bp, Homo sapiens
agttgaaaatggtgaacattgtgattttacaattctaagaaatatgctgataaaaacacacactcaggacttgaaagatgttactaataatgtccactatragaactacagaagcagaaaactggcagctgtgacttataatggagttgataacaacaagaataaagggcagctgactaagagccctctggcacaaatgga

SEQ ID NO: 18697 - DNA, 201 bp, Homo sapiens
gacgtcagatgcctaatagcagggtgcagtgttgtttatacttcattgctccttcaggacatgaacttaaaccattggatattgagtttatgaagcgttcrcatgaaaaagtgattatcatccaacttattgccaaagcagacacacttataccagaggaatgccaacagtttaaaaaacagataatgaaagaaatccaag

SEQ ID NO: 18698 - DNA, 201 bp, Homo sapiens
aacagacgtcagatgcctaatagcagggtgcagtgttgtttatacttcattgctccttcaggacatgaacttaaaccattggatattgagtttatgaagcrttcgcatgaaaaagtgattatcatccaacttattgccaaagcagacacacttataccagaggaatgccaacagtttaaaaaacagataatgaaagaaatc

SEQ ID NO: 18699 - DNA, 201 bp, Homo sapiens
tacaggagaacattttactgttgtacaatcatgttctcgtggtttgattgtttacagcctattccaaaataaaaggactgtggaaggttaaaaaaaaaaawtagttaagggccaggagcagtggctcacacctgtaatcccagcactttggaaggccaaggcaggcagatcacttgaggtcaggagttcgagaccagcctg

SEQ ID NO: 18700 - DNA, 201 bp, Homo sapiens
acataaaattaagatatatgattttccagaaatagatgatgaagaagaaaataaacttgctaaaaaggacttgaaagatgttactaataatgtccactatragaactacagaagcagaaaactggcagctgtgacttataatggagttgataacaacaagaataaagggcagctgactaagagccctctggcacaaatgga

SEQ ID NO: 18701 - DNA, 201 bp, Homo sapiens
aacgggccggcgcctggcgggcacgatcgcaagatttgtatgctccagagtatccaggacatgaacttaaaccattggatattgagtttatgaagcgttcrcatgaaaaagtgattatcatccaacttattgccaaagcagacacacttataccagaggaatgccaacagtttaaaaaacagataatgaaagaaatccaag

SEQ ID NO: 18702 - DNA, 201 bp, Homo sapiens
agccaacgggccggcgcctggcgggcacgatcgcaagatttgtatgctccagagtatccaggacatgaacttaaaccattggatattgagtttatgaagcrttcgcatgaaaaagtgattatcatccaacttattgccaaagcagacacacttataccagaggaatgccaacagtttaaaaaacagataatgaaagaaatc

SEQ ID NO: 18703 - DNA, 201 bp, Homo sapiens
gggtattgtgattgctacgggagactccacagtgatgggcagaattgcctccctgacgtcaggcctggcggttggccagacacctatcgctgctgagatcraacacttcatccatctgatcactgtggtggccgtcttccttggtgtcactttttttgcgctctcacttctcttgggctatggttggctggaggctatcat

SEQ ID NO: 18704 - DNA, 201 bp, Homo sapiens
ctttttttgcgctctcacttctcttgggctatggttggctggaggctatcatttttctcattggcatcattgtggccaatgtgcctgaggggctgttggcyacagtcactgtgtgcctgaccctcacagccaagcgcatggcgcggaagaactgcctggtgaagaacctggaggcggtggagacgctgggctccacgtcca

SEQ ID NO: 18705 - DNA, 201 bp, Homo sapiens
gatgatcacaaattaaccttggaagagctgagcaccaagtactccgtggacctgacaaagggccatagccaccaaagggcaaaggaaatcctgactcgagrtggacccaatactgttaccccaccccccaccactccagaatgggtcaaattctgtaagcaactgttcggaggcttctccctcctactatggactggggcc

SEQ ID NO: 18706 - DNA, 201 bp, Homo sapiens
gcctccactgggaagataaatacttgaatgacctggaggacagctacggacagcagtggacctatgagcaacgaaaagttgtggagttcacatgccaaacrgccttttttgtcaccatcgtggttgtgcagtgggcggatctcatcatctccaagactcgccgcaactcacttttccagcagggcatgagaaacaaagtct

SEQ ID NO: 18707 - DNA, 201 bp, Homo sapiens
gaagagggaaaaacagaagcgcaatatggaggaactgaagaaggaagtggtcatggatgatcacaaattaaccttggaagagctgagcaccaagtactccrtggacctgacaaagggccatagccaccaaagggcaaaggaaatcctgactcgagatggacccaatactgttaccccaccccccaccactccagaatgggt

SEQ ID NO: 18708 - DNA, 201 bp, Homo sapiens
cccccttgcccgcgcgccctcttcccttccccttgcctcactctctcagctttcttcccacagttgagctcgggcagctctttctggggatagctatgggrctttgggggaagaaagggacagtggctccccatgaccagagtccaagacgaagacctaaaaaagggcttatcaagaaaaaaatggtgaagagggaaaaac

SEQ ID NO: 18709 - DNA, 201 bp, Homo sapiens
ccagcagggcatgagaaacaaagtcttaatatttgggatcctggaggagacactcttggctgcatttctgtcctacactccaggcatggacgtggccctgygaatgtacccactcaagataacctggtggctctgtgccattccctacagtattctcatcttcgtctatgatgaaatcagaaaactcctcatccgtcagca

SEQ ID NO: 18710 - DNA, 201 bp, Homo sapiens
aggctatcatttttctcattggcatcattgtggccaatgtgcctgaggggctgttggctacagtcactgtgtgcctgaccctcacagccaagcgcatggcrcggaagaactgcctggtgaagaacctggaggcggtggagacgctgggctccacgtccaccatctgctcagacaagacgggcaccctcacccagaaccgca

SEQ ID NO: 18711 - DNA, 201 bp, Homo sapiens
gtgctccggagaggatcttggagttttgttctacctttcttctgaatgggcaggagtactcaatgaacgatgaaatgaaggaagccttccaaaatgcctayttagaactgggaggtctgggggaacgtgtgctaggcttctgcttcttgaatctgcctagcagcttctccaagggattcccatttaatacagatgaaataa

SEQ ID NO: 18712 - DNA, 201 bp, Homo sapiens
ttgagctcgggcagctctttctggggatagctatggggctttgggggaagaaagggacagtggctccccatgaccagagtccaagacgaagacctaaaaargggcttatcaagaaaaaaatggtgaagagggaaaaacagaagcgcaatatggaggaactgaagaaggaagtggtcatggatgatcacaaattaaccttgg

SEQ ID NO: 18713 - DNA, 201 bp, Homo sapiens
ggcttatctctgcacaaggatgtaaggtggacaactcatccttgactggggagtcagaaccccagagccgctcccctgacttcacccatgagaaccctctrgagacccgaaacatctgcttcttttccaccaactgtgtggaaggaaccgcccggggtattgtgattgctacgggagactccacagtgatgggcagaattg

SEQ ID NO: 18714 - DNA, 201 bp, Homo sapiens
atgaaataaatttccccatggacaacctttgttttgtgggcctcatatccatgattgaccctccccgagctgcagtgcctgatgctgtgagcaagtgtcgmagtgcaggaattaaggtgatcatggtaacaggagatcatcccattacagctaaggccattgccaagggtgtgggcatcatctcagaaggcactgagacgg

SEQ ID NO: 18715 - DNA, 201 bp, Homo sapiens
tcctctctctcaccttcaccacccaacacctccctccctgcctctttctttctgctccctcattctctccccaccactctcttctcgtggcccccttgccygcgcgccctcttcccttccccttgcctcactctctcagctttcttcccacagttgagctcgggcagctctttctggggatagctatggggctttggggga

SEQ ID NO: 18716 - DNA, 201 bp, Homo sapiens
cattctctgctttgtggcctacagcatccagatatatttcaatgaggagcctaccaaagacaacctctacctgagcatcgtactgtccgtcgtggtcatcrtcactggctgcttctcctattatcaggaggccaagagctccaagatcatggagtcttttaagaacatggtgcctcagcaagctctggtaattcgaggagg

SEQ ID NO: 18717 - DNA, 201 bp, Homo sapiens
ttcccagatccttgaagctcactccgcctcctcactctcactgcatttcccaccttcctgtgggccttgcggcatcttcatcactgaggcacctggttackcttcacctcttgtttcctgccctcactgcattccctcacctctacctttttatccttccaccctaggcttctctcctccctcttccctcactcctgactc

SEQ ID NO: 18718 - DNA, 201 bp, Homo sapiens
ttcttatttgccatctcaccgagaaaatgagcatggtatagttttgaccagggatgtagccataaaactcgtgagcttatatttcaccaaggatgaagcayttccctgggcaatgagaagaaaccaacacatgcctctggagtcaagacatctgtttaagtttgttaactggagtattcttcttcctgagaagtatagaaa

SEQ ID NO: 18719 - DNA, 201 bp, Homo sapiens
atacatcacagtgactgatacaacatttgttgacattccagtacgattgtacttgccaaaaagaaagtcagaaacccgaaggcgagctgtgatatattttsatggtggtggtttttgttttggaagttccaaacagagggcttttgacttcctgaatagatggacggcaaacacgcttgatgctgttgttgtaggcgtgga

SEQ ID NO: 18720 - DNA, 201 bp, Homo sapiens
aggtcttaggataagagatatgtatgtaagttggctggataagaatttataaatatgtgatgtgtatgtatagcccttacatagtggattgtaatttgtgrtattttgtggttttggagcaaagaacaatgtcatttgagttatctaaatctacatttgcaacatttgtagcagttaatgtgtgtccttgaagagttatta

SEQ ID NO: 18721 - DNA, 201 bp, Homo sapiens
gccaggacttacagacagcagagcattacccttgttggccaatgattctcagttacagaatttgccactaacctatattcttacttgtcaacatgatctcwtaagagatgatggacttatgtatgttacaagacttcgaaatgttggagtccaagttgttcatgaacatattgaggatggaattcatggagctttatcatt

SEQ ID NO: 18722 - DNA, 201 bp, Homo sapiens
ctttcctgctcagtttgaagatggccttgctgcagtcaaattttttcttttggaaaaaattcttacaaaatatggagtggatcccacccgaatctgcattkcgggagacagttctgggggcaatttagcaacagcggtcactcaacagaatattaccatatattttcaggtgcagaatgatgctgaaataaaacataaaat

SEQ ID NO: 18723 - DNA, 201 bp, Homo sapiens
tcttaggataagagatatgtatgtaagttggctggataagaatttataaatatgtgatgtgtatgtatagcccttacatagtggattgtaatttgtgatawtttgtggttttggagcaaagaacaatgtcatttgagttatctaaatctacatttgcaacatttgtagcagttaatgtgtgtccttgaagagttattaaat

SEQ ID NO: 18724 - DNA, 201 bp, Homo sapiens
tctggtgattatgggtaggaagacctggttctccattcctgagaagaatcgacctttaaaggatagaattaatttagttctcagcagagaactcaaggaasctccacaaggagctcattttcttgccagaagtttggatgatgccttaaaacttactgaacgaccagaattagcaaataaagtagacatgatttggatagt

SEQ ID NO: 18725 - DNA, 201 bp, Homo sapiens
taaactatttgtgacaaggatcatgcaggactttgaaagtgacacgtttttttcagaaattgacttggagaaatataaacttctgcctgaatacccaggtrttctctctgatgtccaggaggggaaacacatcaagtacaaatttgaagtatgtgagaaggatgattaatatgaaggtgttttctggtttaagttgttccc

SEQ ID NO: 18726 - DNA, 145 bp, Homo sapiens
ggcgtagctttgggcggccggaccttagaaagtcacacatctgcscgcctgtgcggcccctgcttctgcggatgctgaggcacgtaaaaaaatttgaagaagggaatttcgcggcattcttggcctggcttcctggcgtagccag

SEQ ID NO: 18727 - DNA, 154 bp, Homo sapiens
ggcgtagctttgggcggccggaccttagaaagtcacacatctgcgcgcctgtgmggcccctgcttctgcggatgctgaggcacgtaaaaaaatttgaagaagggaatttcgcggcattcttggcctggcttcctggcgtagccagcaagttcgg

SEQ ID NO: 18728 - DNA, 201 bp, Homo sapiens; identical to SEQ ID NO: 18724

SEQ ID NO: 18729 - DNA, 201 bp, Homo sapiens; identical to SEQ ID NO: 18725

SEQ ID NO: 18730 - DNA, 146 bp, Homo sapiens
ggcgtagctttgggcggccggaccttagaaagtcacacatctgcgygcctgtgcggcccctgcttctgcggatgctgaggcacgtaaaaaaatttgaagaagggaatttcgcggcattcttggcctggcttcctggcgtagccagc

SEQ ID NO: 18731 - DNA, 143 bp, Homo sapiens
gcgggtgtttgtcgcttcgcggggccttgcggcagcatggcgraccatctgatcagtggcggcaccggctacgtgccccaggactggctcaccgtgcagcagctcttcctcggcgccaactgccgcacccacaacaacttcct

SEQ ID NO: 18732 - DNA, 201 bp, Homo sapiens
tacctccacctccaggtgattgggaggaatgtggtgacagcagcccaggctaagaacctgattgacactggtgtggatggactgcatgtagttatgggctrcagctctatctgcatcacccaggaagtgatggcctgcggtcagccccagggcactgctgtgtacaaggtggccaagtacgctcagcactttggtgtgtcc

SEQ ID NO: 18733 - DNA, 201 bp, Homo sapiens
aggtagacctaacttcagccctgacccggaagatcatgctgaagacaccactgatctcttcccctatggacactgagacagaggccgacatggccatcgcratggctctgatgggaggtattggtttcattcaccacaactgcaccccagagttccaggccaacgaggtgcataaggtcaagaagtttgaacagggcttca

SEQ ID NO: 18734 - DNA, 201 bp, Homo sapiens
tgtggcatccagaccgtggggcacgtggtcaaggccctggcccttggagcctccacagtgatgatgggctccctgctggccaccaccacggaggcccagcrgcgagtacttcttctcagacagggtgcagctcaagaagtactggggcatgggctcgctagatgccatggagaagagcagcagcagccagaaacgatactt

SEQ ID NO: 18735 - DNA, 201 bp, Homo sapiens
ccgtggtgctgagcccctcacacactgtgggtgatgtgctggaggccaagatccggcatggcttctcttgcatcctcatcactgagatgggcaccatgggsagcaagttggtgggcatcatctcctcccgagacatcaactttcttgctgagaaggaccacaccaccctcctcagtgaggtgatgacgccaaggatcaagc

SEQ ID NO: 18736 - DNA, 186 bp, Homo sapiens
gtgcagggtgtctcggcctccatccaggacaaagggtccattcagaagtttgtgccctacctcatagcgagtaaccagcatggctccatgatgtactcagragagctcaaatttgagaagtggaccatgtcagcccagatcgagggtggcgtccatggcctgcacgcttaccagaagcagctgtac

SEQ ID NO: 18737 - DNA, 201 bp, Homo sapiens
catcaactttcttgctgagaaggaccacaccaccctcctcagtgaggtgatgacgccaaggatcaagctgatggtggctccagcaggcatgacattgaaasaggcaaatgagatccttcagcctagcaagggaagctgcctatggtcaatgatcgccatgagctagtggccatcgtctcccacaccaacctgaagaagaat

SEQ ID NO: 18738 - DNA, 201 bp, Homo sapiens
gtgaggtgatgacgccaaggatcaagctgatggtggctccagcaggcatgacattgaaacaggcaaatgagatccttcagcctagcaagggaagctgcctrtggtcaatgatcgccatgagctagtggccatcgtctcccacaccaacctgaagaagaatcgagactacattctggcctccaaggattcccacaagcagct

SEQ ID NO: 18739 - DNA, 201 bp, Homo sapiens
gcctagcaagggaagctgcctatggtcaatgatcgccatgagctagtggccatcgtctcccacaccaacctgaagaagaatcgagactacattctggcctycaaggattcccacaagcagctgctgtgcagggcagctgtgggcacccatgaggatgacaaatactgcctggacctgctcacctgggtaggcatcaacgtc

SEQ ID NO: 18740 - DNA, 201 bp, Homo sapiens
accaccctcctcagtgaggtgatgacgccaaggatcaagctgatggtggctccagcaggcatgacattgaaacaggcaaatgagatccttcagcctagcargggaagctgcctatggtcaatgatcgccatgagctagtggccatcgtctcccacaccaacctgaagaagaatcgagactacattctggcctccaaggatt

SEQ ID NO: 18741 - DNA, 201 bp, Homo sapiens
cccacaccaacctgaagaagaatcgagactacattctggcctccaaggattcccacaagcagctgctgtgcagggcagctgtgggcacccatgaggatgamaaatactgcctggacctgctcacctgggtaggcatcaacgtcatagtcttggactcctcccaagggaactcggtgtatcaaatcaccatggtgcattaca

SEQ ID NO: 18742 - DNA, 201 bp, Homo sapiens
gtgtatcaaatcaccatggtgcattacatcaaacagaagtacctccacctccaggtgattgggaggaatgtggtgacagcagcccaggctaagaacctgaytgacactggtgtggatggactgcatgtagttatgggctgcagctctatctgcatcacccaggaagtgatggcctgcggtcagccccagggcactgctgtg

SEQ ID NO: 18743 - DNA, 201 bp, Homo sapiens
ctgggcctccgatatccgtccgccaggagcttggctggatgcacgggcggccagtcctcttatttccccgccctcccgccgcgtggagcggctgctgggtyccgagcctccgggcgggggcgggatcggggcggggcggaggcatctccctcccagcaccgcccccttagctgccccgagccctgcctgcgcccgcccccg

SEQ ID NO: 18744 - DNA, 201 bp, Homo sapiens
atcggggcggggcggaggcatctccctcccagcaccgcccccttagctgccccgagccctgcctgcgcccgcccccgaagcggcgcgggacgcctggcgcygtccgcgatccgcagggctgcccgcttaggcttaggcccggcccgctggcaaagccgagccgcagcattttatttcgttcgtggtttccgcacaggctgg

SEQ ID NO: 18745 - DNA, 201 bp, Homo sapiens
gagtttcgtgggttgggtcgtacttgggacctcggcgaagaggacccgtttatttttttttctttccaaaatggcagcctccagtcgcgcacaagtgttakctctgtaccgggcgatgctgagagagagcaagcgtttcagcgcctacaattacagaacatatgctgtcaggaggataagagatgccttcagagaaaataa

SEQ ID NO: 18746 - DNA, 201 bp, Homo sapiens
cacaaatgtctccgccaagaccccagacggttcccaaaggctctccgtgatgcaactgcacgtccctcgaatgcctgggcctccgatatccgtccgccagsagcttggctggatgcacgggcggccagtcctcttatttccccgccctcccgccgcgtggagcggctgctgggtcccgagcctccgggcgggggcgggatc

SEQ ID NO: 18747 - DNA, 201 bp, Homo sapiens; identical to SEQ ID NO: 18743

SEQ ID NO: 18748 - DNA, 180 bp, Homo sapiens
ttttaaaaagacatctctcagcacttccctctctgcagattctgactcagtaagtgaggggtgaggcacagtcatttttctctattctgaagctctcccastgttttcaatgtttaaccaactggggacccctgctctttaagtatattacaggtaataaagatattgtttgtatgcttt

SEQ ID NO: 18749 - DNA, 201 bp, Homo sapiens; identical to SEQ ID NO: 18744

SEQ ID NO: 18750 - DNA, 201 bp, Homo sapiens; identical to SEQ ID NO: 18745

SEQ ID NO: 18751 - DNA, 201 bp, Homo sapiens
cagggagggttcaactctgagacgagaactgccttggtgaaggcaagttcaagcaccacttgagactgggggcagcatggagtagggcagggctacggggrtacacggtgcaccctgcaacttatacctgagcccagtacaacaaaggtgacgggtgtgtaggtacacacccagagatggagcactgcagatcagcaacct

SEQ ID NO: 18752 - DNA, 201 bp, Homo sapiens; identical to SEQ ID NO: 18746

SEQ ID NO: 18753 - DNA, 201 bp, Homo sapiens
gtgtgtaggtacacacccagagatggagcactgcagatcagcaacctcagccccacctgggaatttgctggaaatgcaggctcaagcccctccccacaccyggtgaatgagagagccccagcctgacccaagcccagggcgactcccataccctgaagcctggggcatgctgggcagcaccggtgcccaaatctggctggt

SEQ ID NO: 18754 - DNA, 201 bp, Homo sapiens
ctgatcattgagaatcgagacatgcccaggacctagcaagccggggaccagccaccagtggcggccagggaccaccttcagcatccactctctgtttgagmtgggggctcccaaaaccagcttacaatagccttttgcgctgcctgtcctgtgggagctgataaaccaagtcacatttgcattctgttgcaggcttagtga

SEQ ID NO: 18755 - DNA, 201 bp, Homo sapiens; identical to SEQ ID NO: 18743

SEQ ID NO: 18756 - DNA, 201 bp, Homo sapiens; identical to SEQ ID NO: 18744

SEQ ID NO: 18757 - DNA, 201 bp, Homo sapiens; identical to SEQ ID NO: 18745

SEQ ID NO: 18758 - DNA, 201 bp, Homo sapiens; identical to SEQ ID NO: 18751

SEQ ID NO: 18759 - DNA, 201 bp, Homo sapiens; identical to SEQ ID NO: 18753

SEQ ID NO: 18760 - DNA, 201 bp, Homo sapiens; identical to SEQ ID NO: 18754

SEQ ID NO: 18761 - DNA, 201 bp, Homo sapiens; identical to SEQ ID NO: 18746

SEQ ID NO: 18762 - DNA, 132 bp, Homo sapiens
cacctctgctggtggtcaagggggatgagattcgagagtccagtgaactcattaacaaggccatcttatcattctgagggtagcagctgttttcaatggtycctgggagccggctggagacaggtggtcctg

SEQ ID NO: 18763 - DNA, 201 bp, Homo sapiens
tgctgaaaatacagaaaaaaaatgggtattatcttgagaaatgaacccatgaagctaccttctgatgttgtaactgccaaaccaaagattgtgatgcttgraaggtgtgtctacgacttcaagattatggacttctggccaagccaacctgtggcgacatcatcaggtttcacctctgctggtggtcaagggggatgagat

SEQ ID NO: 18764 - DNA, 201 bp, Homo sapiens
aaatgggtattatcttgagaaatgaacccatgaagctaccttctgatgttgtaactgccaaaccaaagattgtgatgcttggaaggtgtgtctacgacttyaagattatggacttctggccaagccaacctgtggcgacatcatcaggtttcacctctgctggtggtcaagggggatgagattcgagagtccagtgaactc

SEQ ID NO: 18765 - DNA, 201 bp, Homo sapiens
tgatgcttggaaggtgtgtctacgacttcaagattatggacttctggccaagccaacctgtggcgacatcatcaggtttcacctctgctggtggtcaaggrggatgagattcgagagtccagtgaactcattaacaaggccatcttatcattctgagggtagcagctgttttcaatggtccctgggagccggctggagaca

SEQ ID NO: 18766 - DNA, 201 bp, Homo sapiens
acccatgaagctaccttctgatgttgtaactgccgtaagaggaaagaaaggaattattaaacgctattgttattaaagaaaccaaagattgtgatgcttgraaggtgtgtctacgacttcaagattatggacttctggccaagccaacctgtggcgacatcatcaggtttcacctctgctggtggtcaagggggatgagat

SEQ ID NO: 18767 - DNA, 201 bp, Homo sapiens
gatgttgtaactgccgtaagaggaaagaaaggaattattaaacgctattgttattaaagaaaccaaagattgtgatgcttggaaggtgtgtctacgacttyaagattatggacttctggccaagccaacctgtggcgacatcatcaggtttcacctctgctggtggtcaagggggatgagattcgagagtccagtgaactc

SEQ ID NO: 18768 - DNA, 160 bp, Homo sapiens
tgatgcttggaaggtgtgtctacgacttcaagattatggacttctggccaagccaacctgtggcgacatcatcaggtttcacctctgctggtggtcaaggrggatgagattcgagagtccagtgaactcattaacaaggccatcttatcattctgagggt

SEQ ID NO: 18769 - DNA, 153 bp, Homo sapiens
ggctgccaagtgacaattgcagcccttgaggttttagaagaagaaaaccttgctgaaaatacagaaaaaaaatgggtttcacctctgctggtggtcaaggrggatgagattcgagagtccagtgaactcattaacaaggccatcttatcattc

SEQ ID NO: 18770 - DNA, 201 bp, Homo sapiens
tggcccacagaatacagccattggataaatatgaagacaatcctggaagagcttgttcagaggggtcatgaggtgattgtgttgacatcttcggcttctaytcttgtcaatgccagtaaatcatctgctattaaattagaagtttatcctacatctttaactaaaaatgatttggaagatttttttatgaaaatgttcgat

SEQ ID NO: 18771 - DNA, 201 bp, Homo sapiens
atactcgactgtataagtggttaccccagaatgaccttcttggtcatcccaaaaccaaagcttttataactcatggtggaaccaatggcatctatgaggcratctaccatgggatccctatggtgggcattcccttgtttgcggatcaacatgataacattgctcacatgaaagccaagggagcagccctcagtgtggaca

SEQ ID NO: 18772 - DNA, 201 bp, Homo sapiens
atgcagttttgaacaagaaacttatgagaaaactacaagagtcaaaatttgatgtccttctggcagatgccgttaatccctgtggtgagctgctggctgarctacttaacataccctttctgtacagtctccgcttctctgttggctacacagttgagaagaatggtggaggatttctgttccctccttcctatgtacctg

SEQ ID NO: 18773 - DNA, 201 bp, Homo sapiens
tgaggtgattgtgttgacatcttcggcttctattcttgtcaatgccagtaaatcatctgctattaaattagaagtttatcctacatctttaactaaaaatkatttggaagatttttttatgaaaatgttcgatagatggacatatagtatttcaaaaaatacattttggtcatatttttcacaactacaagaattgtgttg

SEQ ID NO: 18774 - DNA, 201 bp, Homo sapiens; identical to SEQ ID NO: 18770

SEQ ID NO: 18775 - DNA, 201 bp, Homo sapiens; identical to SEQ ID NO: 18771

SEQ ID NO: 18776 - DNA, 201 bp, Homo sapiens; identical to SEQ ID NO: 18772

SEQ ID NO: 18777 - DNA, 201 bp, Homo sapiens; identical to SEQ ID NO: 18773

SEQ ID NO: 18778 - DNA, 201 bp, Homo sapiens; identical to SEQ ID NO: 18770

SEQ ID NO: 18779 - DNA, 201 bp, Homo sapiens; identical to SEQ ID NO: 18771

SEQ ID NO: 18780 - DNA, 201 bp, Homo sapiens; identical to SEQ ID NO: 18772

SEQ ID NO: 18781 - DNA, 201 bp, Homo sapiens; identical to SEQ ID NO: 18773

SEQ ID NO: 18782 - DNA, 199 bp, Homo sapiens
atggtttttattgttatactaaggagtgttatctctggagacacatttgcctgtgttttaatattggctgtgtttctttctctgcaaactgaggataawaacacctatgttattcagttactattcactgaactgaagggcacaggctacaaagtgccccaagatgtcctgcaaaaattgctggaatctttacagaacc

SEQ ID NO: 18783 - DNA, 122 bp, Homo sapiens
caaaatgtgaatcccacacccggggccacctcttaatctaagcagaaatagctgtttggttttgtttttaaatagatctatttcctttatcatcgcttcarttaaagactataagcaacaaa

SEQ ID NO: 18784 - DNA, 144 bp, Homo sapiens
gggcgcaaagcgagccggtggatccataaagaacccagccaacycgcagagggaagggaggggctgagctgtgaggagagtggggcccaacaaccatatctacatgggagtcctttaacccggaaagttacgaattggacaaaa

SEQ ID NO: 18785 - DNA, 201 bp, Homo sapiens
caaaatgtgaatcccacacccggggccacctcttaatctaagcagaaatagctgtttggttttgtttttaaatagatctatttcctttatcatcgcttcarttaaagactataagcaacaaaaatctcactgtatctacatatcaggtgaccttaggtcagtttgtaagtggatacaattaataaaataaaatccatgcct

SEQ ID NO: 18786 - DNA, 172 bp, Homo sapiens
tcgcttcaattaaagactataagcaacaaaaatctcactgtatctacatatcaggtgaccttaggtcagtttgtaagtggatacaattaataaaataaaayccatgcctttttttcctgtcacattaactgaagatgcacctaatcttgaggcagcttctgagttgagaatt

SEQ ID NO: 18787 - DNA, 201 bp, Homo sapiens
ctttgggtccaggaatggaaagaccagcaagaaaatcaccattgctgactgtggacaacttgaataagtttgacttgtgttttatcttaaccaccagaccmttccttttgtagctcaggagagcaccctccaccccatttgcttgcagtatcctagaatctttgtgctcttgctgcagttccctttgggttccatgttttc

SEQ ID NO: 18788 - DNA, 201 bp, Homo sapiens
cagtttttcatctgcactgccaagagtgagtggttggatggcaagcatgtggtctttggcaagatgaaagaaggcataaatattgtggaggccacggggcrctttgggtccaggaatggaaagaccagcaagaaaatcaccattgctgactgtggacaacttgaataagtttgacttgtgttttatcttaaccaccagacc

SEQ ID NO: 18789 - DNA, 201 bp, Homo sapiens
ggaggtaaagtggcagagggtcttgtatgagcaacagccctttcctgataactttgtggaccggcggttcctggaagagctctggaaaaacatccatgctyggaaataccaatattgggctatggtatttgagtccagtgtggtgatcctgcagctgtgcagtgtttttgtttttctggttatctggtggtatatggatga

SEQ ID NO: 18790 - DNA, 201 bp, Homo sapiens
aactttgtggaccggcggttcctggaagagctctggaaaaacatccatgctcggaaataccaatattgggctatggtatttgagtccagtgtggtgatccygcagctgtgcagtgtttttgtttttctggttatctggtggtatatggatgagggtcttctggccccccaatggctttttgggactggcctggcttcttca

SEQ ID NO: 18791 - DNA, 201 bp, Homo sapiens
gtggtatatggatgagggtcttctggccccccaatggctttttgggactggcctggcttcttcactgattgggtatgttttgtttgatctcactgatggargtgaagggcagaagagtgggtggacccggtgggctgacctgaagagtgccctagtcttcattactttcacttatggcttttcaccagtgctaagaccctg

SEQ ID NO: 18792 - DNA, 201 bp, Homo sapiens
ttcaaaatgtcatcaacaagaaccacatggacctctgtgagagggatgattaaactagcctgagtttgaatgaaaggattatgtgtacccaacctgtaacwaacaccaaggaggtaaagtggcagagggtcttgtatgagcaacagccctttcctgataactttgtggaccggcggttcctggaagagctctggaaaaaca

SEQ ID NO: 18793 - DNA, 185 bp, Homo sapiens
ctcatttcaaaatgtcatcaacaagaaccacatggacctctgtgagagggatgattaaactagcctgagtttgaatgaaaggattatgtgtacccaacctgtaacaaacaccaaggaggtaaagtggcagagggtcttgtatgagcaacagccctttcctgataactttgtggaccggcggttcc

SEQ ID NO: 18794 - DNA, 201 bp, Homo sapiens
ttttgggactggcctggcttcttcactgattgggtatgttttgtttgatctcactgatggaggtgaagggcagaagagtgggtggacccggtgggctgacytgaagagtgccctagtcttcattactttcacttatggcttttcaccagtgctaagaccctgacagagtctgtcagcactgacaccatctatgccatgtca

SEQ ID NO: 18795 - DNA, 201 bp, Homo sapiens
ttttttggcaaggcctagtaaaagtacccctggagacttcacatgttccattagaagaaatagagctgtcacccacatcaagattcagaacactggacccrtttggggggaaaagtttgccacttcggctgagttggtccagtattacatggaacatcacaggcaattaaaagagaagaatggagatgttgttgagcttaa

SEQ ID NO: 18796 - DNA, 201 bp, Homo sapiens
gcaatgacagcaagtgtaaagtgacccatgtcatgattcgctgtcaggaactgaaatacgacgttggtggaggaaaacggtttgattctttgacggatctygtggaacattacaagaagaatcctatgctggaaacattgggtacagtactacgactcaagcagccccttaacatgactcgtataaatgctgctgaaatag

SEQ ID NO: 18797 - DNA, 102 bp, Homo sapiens
tacaagaagaatcctatgctggaaacattgggtacagtactacgactcaagcagccccttaacatgactcgtataaatgctgctgaaatagaaagcagagyt

SEQ ID NO: 18798 - DNA, 201 bp, Homo sapiens
acccctggagacttcacatgttccattagaagaaatagagctgtcacccacatcaagattcagaacactggacccgtttggggggaaaagtttgccacttmggctgagttggtccagtattacatggaacatcacaggcaattaaaagagaagaatggagatgttgttgagcttaaatatcctctgaactgtgcggatcct

SEQ ID NO: 18799 - DNA, 201 bp, Homo sapiens
tcatggtggtgacttcacacaccataatggcactggtggcaagtcaatctacggggagaaagttgatgatgacaacttcatcctgaagcatacaggtcctrgcatattgtccatggcaaatgctggacccaacacaaatggttcccagtttttcatctgcactgccaagtctgagtggttggatagcaagcatgtggtcat

SEQ ID NO: 18800 - DNA, 201 bp, Homo sapiens
ctggtggcaagtcaatctacggggagaaagttgatgatgacaacttcatcctgaagcatacaggtcctggcatattgtccatggcaaatgctggacccaayacaaatggttcccagtttttcatctgcactgccaagtctgagtggttggatagcaagcatgtggtcattggcaaggtgaaagaaggcatgaatattgtgg

SEQ ID NO: 18801 - DNA, 201 bp, Homo sapiens
tgtgtcatggtggtgacttcacacaccataatggcactggtggcaagtcaatctacggggagaaagttgatgatgacaacttcatcctgaagcatacaggycctggcatattgtccatggcaaatgctggacccaacacaaatggttcccagtttttcatctgcactgccaagtctgagtggttggatagcaagcatgtgg

SEQ ID NO: 18802 - DNA, 201 bp, Homo sapiens
catggagcactttgggtccaggaatggcaagaccagcaagaaggtcaccattcctgactttggacaactcgaataagtttgacttgtgttttatcttaacyactggaccattccttctgcagctcaggagagcagccctccaccccatctgctcgcagtattctagaatctttgtgctctcgctgcagttccctttgggtt

SEQ ID NO: 18803 - DNA, 201 bp, Homo sapiens
ttgacttgtgttttatcttaaccactggaccattccttctgcagctcaggagagcagccctccaccccatctgctcgcagtattctagaatctttgtgctytcgctgcagttccctttgggttccatgttttccttgttcccttccatgcctagttagatggcagagttaagtttgtgattatgaaatgaaaactaaataa

SEQ ID NO: 18804 - DNA, 122 bp, Homo sapiens
gtattctagaatctttgtgctctcgctgcagttccctttgggttccatgttttccttgttcccttccatgcctagttagatggcagagttaagtttgtgattatgaaatgaaaactaaataa

SEQ ID NO: 18805 - DNA, 201 bp, Homo sapiens
tcatgcacataaacaatgccaacttctccaaggactctggcatcacctacctgggcatcaaggccaatgaagtgcaggagttcaacctcagcacctacttkgaaagggctacagacttcactgaccaggccttggctcaaaatggccaggtgctcgtccagtgctgggaaggttacagccatctccagctctagttatcat

SEQ ID NO: 18806 - DNA, 143 bp, Homo sapiens
taccttatgattgtcagaagttggacatcaagtccatcctgagtatcatgaggcagaactgtgagatcagccccaatgatgggttcctggctcagctttgycatctcaatgacaaactagccaaggaggggaaggtgaaaccc

SEQ ID NO: 18807 - DNA, 201 bp, Homo sapiens
tgcccccaacttcaaagccacagccattatgccagacagtcagtttaaagatatcagcctgtctgactacaaaggaaatatgttgtattcttcttttaccsgcttgacttcacttttgtgtgccccacagagaacattgctttcagtgatacagaagaatttaagaaattcaactgccaagtgattggtgcttctgtggat

SEQ ID NO: 18808 - DNA, 201 bp, Homo sapiens
gagaaagaattattaaacaataaatactttcaagacaattttaattgtgaacctaccatgttgcctcccatcttctgaaaaaacaaaaaaattccaaggcygggcgcggtagctcatgcctgtaatcccagcactttgggaggccaaggcggatgggaggatcgcttgagaccagcctgggaaacatagtgagaccccgtt

SEQ ID NO: 18809 - DNA, 201 bp, Homo sapiens
tcaagtcagagtacacagtgaagtggcctccctgcaggagaagcagcatacaaccaccaatgtctttcatttcacgttcatgtcggaaaaagaagtgccaytggttttcccaaaaacatatggagagtccatgttgtacttagatgggcagcggcatttcaactccatgagtggcccagcgaccttgagaaaggactacct

SEQ ID NO: 18810 - DNA, 201 bp, Homo sapiens
aagggccggcatttgtaaatccactcatccctgaaagcccagaggaagaggagctctttagacaaggggaattgaacaaggggagaagaattgccttcagytccacgtcgttactgaaaatggcccccagcgctgaggagaggaccaccatacatgagatgtttctcagcacactggatccaaagactataagttttcgga

SEQ ID NO: 18811 - DNA, 117 bp, Homo sapiens
cgggctgtcctcagcargggcgcggtctggtactcgtgcgtcttttatcgcctcagtttccctccgccgactagcgcgcggggcccggttctccatcgcgcgcacggcagcctagcg

SEQ ID NO: 18812 - DNA, 201 bp, Homo sapiens
ggatccaaagactataagttttcggagtcgagttttaccctctaatgcagtgtggatggagaattcaaaactgaagagtttggaaatttgccaccctcagsagcggaacattttcaatcggatctttggtggtttccttatgaggaaggcatatgaacttgcgtgggctactgcttgtagctttggtggttctcgaccgtt

SEQ ID NO: 18813 - DNA, 201 bp, Homo sapiens
aacctgttgaggttggctcattgctctttctttcttcacaggtatgctttactcagaataattatattcaagtcagagtacacagtgaagtggcctccctkcaggagaagcagcatacaaccaccaatgtctttcatttcacgttcatgtcggaaaaagaagtgccattggttttcccaaaaacatatggagagtccatgt

SEQ ID NO: 18814 - DNA, 201 bp, Homo sapiens
ttacttcatagtttcttggctaaatcacaggatggactgcctcctaggagaatgaaggacagttatattgaagttctcttgcctttgggcagtgagcctgrattacgagagaaatatttgactgttcaaaacaccgtaagatttggcaggattcttgaggatcttgacagcttgggagttcttatttgttacatgcacaac

SEQ ID NO: 18815 - DNA, 201 bp, Homo sapiens
agcctagcgcaatgaggcgggcagcactgcgttcgagataagttgcgggagatagtaggagcatccacaaactggagagaccatgtgaaggcaatggaagraaggaaattacttcatagtttcttggctaaatcacaggatggactgcctcctaggagaatgaaggacagttatattgaagttctcttgcctttgggcagt

SEQ ID NO: 18816 - DNA, 201 bp, Homo sapiens
accaccaatgtctttcatttcacgttcatgtcggaaaaagaagtgccattggttttcccaaaaacatatggagagtccatgttgtacttagatgggcagckgcatttcaactccatgagtggcccagcgaccttgagaaaggactaccttgtggagccctaagaacaccacatttgttgaaaactagcactctacccacag

SEQ ID NO: 18817 - DNA, 201 bp, Homo sapiens; identical to SEQ ID NO: 18808

SEQ ID NO: 18818 - DNA, 201 bp, Homo sapiens; identical to SEQ ID NO: 18809

SEQ ID NO: 18819 - DNA, 201 bp, Homo sapiens; identical to SEQ ID NO: 18810

SEQ ID NO: 18820 - DNA, 150 bp, Homo sapiens
cggtcccgcccccggacaccgctgtcccgctcccgggctgtcctcagcargggcgcggtctggtactcgtgcgtcttttatcgcctcagtttccctccgccgactagcgcgcggggcccggttctccatcgcgcgcacggcagcctagcg

SEQ ID NO: 18821 - DNA, 118 bp, Homo sapiens
cggtcccgcccccggacrccgctgtcccgctcccgggctgtcctcagcaagggcgcggtctggtactcgtgcgtcttttatcgcctcagtttccctccgccgactagcgcgcggggcc

SEQ ID NO: 18822 - DNA, 201 bp, Homo sapiens; identical to SEQ ID NO: 18812

SEQ ID NO: 18823 - DNA, 201 bp, Homo sapiens; identical to SEQ ID NO: 18813

SEQ ID NO: 18824 - DNA, 128 bp, Homo sapiens
cggtcccgcccccggacaccgctgtccsgctcccgggctgtcctcagcaagggcgcggtctggtactcgtgcgtcttttatcgcctcagtttccctccgccgactagcgcgcggggcccggttctcca

SEQ ID NO: 18825 - DNA, 201 bp, Homo sapiens; identical to SEQ ID NO: 18814

SEQ ID NO: 18826 - DNA, 201 bp, Homo sapiens
aagaaacagggaatcttccacattcatgaagttcgagataagttgcgggagatagtaggagcatccacaaactggagagaccatgtgaaggcaatggaagraaggaaattacttcatagtttcttggctaaatcacaggatggactgcctcctaggagaatgaaggacagttatattgaagttctcttgcctttgggcagt

SEQ ID NO: 18827 - DNA, 201 bp, Homo sapiens; identical to SEQ ID NO: 18816

SEQ ID NO: 18828 - DNA, 201 bp, Homo sapiens
gctaatggcagtgccaaggacctggccatcctccagtgccatggggagctggaccccatggtgcccgtacggtttggggccctgatggctgagaagctccrgtctgttgtcacacctgccagggtccagttccagacatacctgggtgtcatgcacagctcctgtcctcaggagatggcagctgtgaaggaatttcttgag

SEQ ID NO: 18829 - DNA, 201 bp, Homo sapiens
cttttcacagggccgggccctgtccctctacatggccctcacctgcccccaccctctggctggcatcctggctttgagctgctggccgcctctgcaccggrccttcccccaggcagctaatggcagtgccaaggacctggccatcctccagtgccatggggagctggaccccatggtgcccgtacggtttggggccctgat

SEQ ID NO: 18830 - DNA, 201 bp, Homo sapiens
gggccgggccctgtccctctacatggccctcacctgcccccaccctctggctggcatcctggctttgagctgctggccgcctctgcaccgggccttccccmaggcagctaatggcagtgccaaggacctggccatcctccagtgccatggggagctggaccccatggtgcccgtacggtttggggccctgatggctgagaa

SEQ ID NO: 18831 - DNA, 201 bp, Homo sapiens
ttttcacagggccgggccctgtccctctacatggccctcacctgcccccaccctctggctggcatcctggctttgagctgctggccgcctctgcaccgggmcttcccccaggcagctaatggcagtgccaaggacctggccatcctccagtgccatggggagctggaccccatggtgcccgtacggtttggggccctgatg

SEQ ID NO: 18832 - DNA, 201 bp, Homo sapiens
tccttccctgcaggcctggagcctgtagggctggactgaggttcaggtctccccccagctgtctcacccccactttgtccccactctagagcagggaggcrgtgggggaggagttgtgtcttgtcttctgtctccatgtggtttttgggtgtttttcttcttgtgtcctggattctgataaaattaaagaaattgcttcct

SEQ ID NO: 18833 - DNA, 201 bp, Homo sapiens
aggcttttcacagggccgggccctgtccctctacatggccctcacctgcccccaccctctggctggcatcctggctttgagctgctggccgcctctgcacygggccttcccccaggcagctaatggcagtgccaaggacctggccatcctccagtgccatggggagctggaccccatggtgcccgtacggtttggggccct

SEQ ID NO: 18834 - DNA, 201 bp, Homo sapiens
cccccaggcagctaatggcagtgccaaggacctggccatcctccagtgccatggggagctggaccccatggtgcccgtacggtttggggccctgatggctragaagctccggtctgttgtcacacctgccagggtccagttccagacatacctgggtgtcatgcacagctcctgtcctcaggagatggcagctgtgaagga

SEQ ID NO: 18835 - DNA, 201 bp, Homo sapiens
gaggtggagccttttgaggggggccttccctcagctgtttccccacactggggggctgggccctgcctccccgttaccctccttccctgcaggcctggagyctgtagggctggactgaggttcaggtctccccccagctgtctcacccccactttgtccccactctagagcagggaggcagtgggggaggagttgtgtctt

SEQ ID NO: 18836 - DNA, 201 bp, Homo sapiens
atcaaatcatcctgggaggcttttcacagggccgggccctgtccctctacatggccctcacctgcccccaccctctggctggcatcctggctttgagctgstggccgcctctgcaccgggccttcccccaggcagctaatggcagtgccaaggacctggccatcctccagtgccatggggagctggaccccatggtgcccg

SEQ ID NO: 18837 - DNA, 201 bp, Homo sapiens
ggcttttcacagggccgggccctgtccctctacatggccctcacctgcccccaccctctggctggcatcctggctttgagctgctggccgcctctgcaccrggccttcccccaggcagctaatggcagtgccaaggacctggccatcctccagtgccatggggagctggaccccatggtgcccgtacggtttggggccctg

SEQ ID NO: 18838 - DNA, 201 bp, Homo sapiens
gtggtaacaccatgtctgtgcccctgctcaacgatgctgccaccgtgtctggagctgagcgggaaacggccgtggttatttttttacatggacttggagamacagggcacagctgggctgacgccctctccaccattcggctccctcacgtcaagtacatctgttcccatgagcctaggatccctgtgaccctcaacatga

SEQ ID NO: 18839 - DNA, 201 bp, Homo sapiens; identical to SEQ ID NO: 18828

SEQ ID NO: 18840 - DNA, 201 bp, Homo sapiens
cagagaacagggccgggccctgtccctctacatggccctcacctgcccccaccctctggctggcatcctggctttgagctgctggccgcctctgcaccggrccttcccccaggcagctaatggcagtgccaaggacctggccatcctccagtgccatggggagctggaccccatggtgcccgtacggtttggggccctgat

SEQ ID NO: 18841 - DNA, 201 bp, Homo sapiens; identical to SEQ ID NO: 18830

SEQ ID NO: 18842 - DNA, 201 bp, Homo sapiens; identical to SEQ ID NO: 18832

SEQ ID NO: 18843 - DNA, 201 bp, Homo sapiens
agagaacagggccgggccctgtccctctacatggccctcacctgcccccaccctctggctggcatcctggctttgagctgctggccgcctctgcaccgggmcttcccccaggcagctaatggcagtgccaaggacctggccatcctccagtgccatggggagctggaccccatggtgcccgtacggtttggggccctgatg

SEQ ID NO: 18844 - DNA, 201 bp, Homo sapiens
cagcagagaacagggccgggccctgtccctctacatggccctcacctgcccccaccctctggctggcatcctggctttgagctgctggccgcctctgcacygggccttcccccaggcagctaatggcagtgccaaggacctggccatcctccagtgccatggggagctggaccccatggtgcccgtacggtttggggccct

SEQ ID NO: 18845 - DNA, 201 bp, Homo sapiens; identical to SEQ ID NO: 18834

SEQ ID NO: 18846 - DNA, 201 bp, Homo sapiens; identical to SEQ ID NO: 18835

SEQ ID NO: 18847 - DNA, 201 bp, Homo sapiens
gctggcatcaagaaggcagcagagaacagggccgggccctgtccctctacatggccctcacctgcccccaccctctggctggcatcctggctttgagctgstggccgcctctgcaccgggccttcccccaggcagctaatggcagtgccaaggacctggccatcctccagtgccatggggagctggaccccatggtgcccg

SEQ ID NO: 18848 - DNA, 201 bp, Homo sapiens
agcagagaacagggccgggccctgtccctctacatggccctcacctgcccccaccctctggctggcatcctggctttgagctgctggccgcctctgcaccrggccttcccccaggcagctaatggcagtgccaaggacctggccatcctccagtgccatggggagctggaccccatggtgcccgtacggtttggggccctg

SEQ ID NO: 18849 - DNA, 201 bp, Homo sapiens; identical to SEQ ID NO: 18838

SEQ ID NO: 18850 - DNA, 201 bp, Homo sapiens; identical to SEQ ID NO: 18828

SEQ ID NO: 18851 - DNA, 201 bp, Homo sapiens; identical to SEQ ID NO: 18829

SEQ ID NO: 18852 - DNA, 201 bp, Homo sapiens; identical to SEQ ID NO: 18830

SEQ ID NO: 18853 - DNA, 201 bp, Homo sapiens; identical to SEQ ID NO: 18831

SEQ ID NO: 18854 - DNA, 201 bp, Homo sapiens; identical to SEQ ID NO: 18832

SEQ ID NO: 18855 - DNA, 201 bp, Homo sapiens; identical to SEQ ID NO: 18833

SEQ ID NO: 18856 - DNA, 201 bp, Homo sapiens; identical to SEQ ID NO: 18834

SEQ ID NO: 18857 - DNA, 201 bp, Homo sapiens; identical to SEQ ID NO: 18835

SEQ ID NO: 18858 - DNA, 201 bp, Homo sapiens; identical to SEQ ID NO: 18836

SEQ ID NO: 18859 - DNA, 201 bp, Homo sapiens; identical to SEQ ID NO: 18837

SEQ ID NO: 18860 - DNA, 175 bp, Homo sapiens
gggaggcttttcacagggccgggccctgtccctctacatggccctcacctgcccccacctgtctcacccccactttgtccccactctagagcagggaggcrgtgggggaggagttgtgtcttgtcttctgtctccatgtggtttttgggtgtttttcttcttgtgtcctggattc

SEQ ID NO: 18861 - DNA, 201 bp, Homo sapiens; identical to SEQ ID NO: 18828

SEQ ID NO: 18862 - DNA, 201 bp, Homo sapiens; identical to SEQ ID NO: 18829

SEQ ID NO: 18863 - DNA, 201 bp, Homo sapiens; identical to SEQ ID NO: 18830

SEQ ID NO: 18864 - DNA, 201 bp, Homo sapiens; identical to SEQ ID NO: 18831

SEQ ID NO: 18865 - DNA, 201 bp, Homo sapiens; identical to SEQ ID NO: 18832

SEQ ID NO: 18866 - DNA, 201 bp, Homo sapiens; identical to SEQ ID NO: 18833

SEQ ID NO: 18867 - DNA, 201 bp, Homo sapiens; identical to SEQ ID NO: 18834

SEQ ID NO: 18868 - DNA, 201 bp, Homo sapiens; identical to SEQ ID NO: 18835

SEQ ID NO: 18869 - DNA, 201 bp, Homo sapiens; identical to SEQ ID NO: 18836

SEQ ID NO: 18870 - DNA, 201 bp, Homo sapiens; identical to SEQ ID NO: 18837

SEQ ID NO: 18871 - DNA, 201 bp, Homo sapiens; identical to SEQ ID NO: 18838

SEQ ID NO: 18872 - DNA, 194 bp, Homo sapiens
cccagccatgcccaccatcattgagcgggagttcaaggagttggatgctcagcatcgctggcagctgccgtacttggaaattcgaaatgagtcycatgactatcttcatagagtggccaagtttccagaaaacagaaatcgaaatagatacagagatgtaagcccatatgatcacagtcgtgttaaactgcaga

SEQ ID NO: 18873 - DNA, 201 bp, Homo sapiens
tgagggtcctgacccagctggtggccacctacccccagggctttgtgaggtggttgggccccatcactcccatcatcaacttgtgccaccctgacatcgtycgatctgtcatcaatacctcagatgccattacagacaaggacatagtcttctacaagaccctgaagccctggctgggggatgggctcttgttaagtgttg

SEQ ID NO: 18874 - DNA, 201 bp, Homo sapiens
gacaaggacatagtcttctacaagaccctgaagccctggctgggggatgggctcttgttaagtgttggtgacaagtggagacaccaccgtcgcttgctgaygcctgccttccatttcaacatcctgaagccctatataaagattttcagcaagagtgcaaacatcatgcatgccaagtggcaacgcctggccatggagggc

SEQ ID NO: 18875 - DNA, 201 bp, Homo sapiens
aggcctgcagtgacccacccacctacctttgcatcacctacctttgcaccaattaccttttcagatttccggtaataaatctgtgttggcccctgtgcctsagtcccacggatggccagtagggggcgctggaggactgcggggatctagggcctggctgggaagaggcggggagatgtctctgtgcccaagatactcact

SEQ ID NO: 18876 - DNA, 201 bp, Homo sapiens
gtctctgtgcccaagatactcactgcctctctgggtgagcacaggagccccgtgctgagggtgggatctcccagagtctaagtaaagactttttccccccmaaaataattgtgtattctgatataaatttttgccaatttagaatccctgttttttagctaggtgcatagcagcctgaaatacagatcacatttgaaagcc

SEQ ID NO: 18877 - DNA, 201 bp, Homo sapiens
tcctgctggtggtcggggcctcctggctcctggcccgcatcctggcctggacctatgccttctatcacaacggccgccgcctccggtgtttcccgcagccmcggaaacagaactggttcttgggtcacctgggcctggtcactcccacagaggagggcttgagggtcctgacccagctggtggccacctacccccagggct

SEQ ID NO: 18878 - DNA, 201 bp, Homo sapiens
tggcccctgtgcctgagtcccacggatggccagtagggggcgctggaggactgcggggatctagggcctggctgggaagaggcggggagatgtctctgtgyccaagatactcactgcctctctgggtgagcacaggagccccgtgctgagggtgggatctcccagagtctaagtaaagactttttccccccaaaaataatt

SEQ ID NO: 18879 - DNA, 201 bp, Homo sapiens
tccccaaagggaatgtctgtaacatcaacatcttcgcaatccatcacaacccctcagtctggccagaccctgaggtctatgaccccttccgcttcgacccmgaaaacgcccagaagaggtcacctatggcttttattcctttctcggcggggcccaggaactgcatcgggcagaagttcgcgatggcagagatgaaggtgg

SEQ ID NO: 18880 - DNA, 201 bp, Homo sapiens
ttgggccccatcactcccatcatcaacttgtgccaccctgacatcgtccgatctgtcatcaatacctcagatgccattacagacaaggacatagtcttctwcaagaccctgaagccctggctgggggatgggctcttgttaagtgttggtgacaagtggagacaccaccgtcgcttgctgacgcctgccttccatttcaac

SEQ ID NO: 18881 - DNA, 201 bp, Homo sapiens
cagtgacccacccacctacctttgcatcacctacctttgcaccaattaccttttcagatttccggtaataaatctgtgttggcccctgtgcctgagtcccrcggatggccagtagggggcgctggaggactgcggggatctagggcctggctgggaagaggcggggagatgtctctgtgcccaagatactcactgcctctc

SEQ ID NO: 18882 - DNA, 201 bp, Homo sapiens
tttgcgtgcggaggacggactttggctgcgagtagaacccctgggctgaggcctgcagtgacccacccacctacctttgcatcacctacctttgcaccaaytaccttttcagatttccggtaataaatctgtgttggcccctgtgcctgagtcccacggatggccagtagggggcgctggaggactgcggggatctagggc

SEQ ID NO: 18883 - DNA, 201 bp, Homo sapiens
gtgagcctaaagagattgaatgggacgacctggcccagttgcccttcctgaccatgtgcctgaaggagagcctgcggttgcatcccccaatccctacattygcccgcggctgcacccaggacgtggtgctcccagacagccgagtcatccccaaagggaatgtctgtaacatcaacatcttcgcaatccatcacaacccct

SEQ ID NO: 18884 - DNA, 201 bp, Homo sapiens
gccagccggccatggcggggctgtactcgctgggagtgagcgtcttctccgaccagggcgggaggaagtacatggaggacgttactcaaatcgttgtggarcccgaaccgacggctgaagaaaagccctcgccgcggcggtcgctgtctcagccgttgcctccgcggccgtcgccggccgcccttcccggcggcgaagtct

SEQ ID NO: 18885 - DNA, 201 bp, Homo sapiens
aggtgtagtcataccctcaaaagatccagaaccacttgaagaaaattgcgctaaagccctgactttaaggatacatgattctttgaataatagccttccarttggccttgtgcctactaattcaacaaacactgtcatggaccaaaaaaatttgaagatgtcaactcctggccaaatgaaagcccaagaaattgaaagaac

SEQ ID NO: 18886 - DNA, 201 bp, Homo sapiens
gttgcctccgcggccgtcgccggccgcccttcccggcggcgaagtctcggggaaaggcccagcggtggcagcccgagaggctcgcgaccctctcccggackccggggcctcgccggcacctagccgctgctgccgccgccgttcctccgtggcctttttcgccgtgtgcgacgggcacggcgggcgggaggcggcacagtt

SEQ ID NO: 18887 - DNA, 201 bp, Homo sapiens
ggacaatcttgtgccaaaatgcttgtgaatcgagcattgggccgctggaggcagcgtatgctccgagcagataacactagtgccatagtaatctgcatctytccagaagtggacaatcagggaaactttaccaatgaagatgagttatacctgaacctgactgacagcccttcctataatagtcaagaaacctgtgtgatg

SEQ ID NO: 18888 - DNA, 201 bp, Homo sapiens
aggatcaacaactgccgacaacccggagggcgaaaacgcccgcggcgtaggggaagcaaactaggagatgcgcgggcccagcgccagcggcgggaggaggsagcgcggccgtcgcaggcgggagcgaaggcggggacggagggcgggctcgctccactcgactccggattggtcgagcttagagagccgagtgacgtcagc

SEQ ID NO: 18889 - DNA, 201 bp, Homo sapiens
ttagagagccgagtgacgtcagcgggggagaacgcctgatttgtgtggtgggcgcgggcggtggggggaagcgcagtgcgcaggcgcaactgcctggctcygctcgctccggcgctccggcccagctctcgcggacaagtccagacatcgcgcgcccccccttctccgggtccgccccctcccccttctcggcgtcgtcga

SEQ ID NO: 18890 - DNA, 201 bp, Homo sapiens
aaagcctacacagaccaagccgctcgggaaaggatcaacaactgccgacaacccggagggcgaaaacgcccgcggcgtaggggaagcaaactaggagatgmgcgggcccagcgccagcggcgggaggagggagcgcggccgtcgcaggcgggagcgaaggcggggacggagggcgggctcgctccactcgactccggattg

SEQ ID NO: 18891 - DNA, 201 bp, Homo sapiens
agtgaccagatgaagcttatgcaattgccaaaaaattaggttcaaaagatgttgtgatgaaggcacaggttttagctggtggtagaggaaaaggaacattkgaaagtggcctcaaaggaggagtgaagatggttttctctccagaagaagcaaaagctgttccttcacaaatgattaggaaacagttgtttaccaagcaaa

SEQ ID NO: 18892 - DNA, 123 bp, Homo sapiens
atggtggcctccatgttcttccrcccgctgttggtggccgccacccttcggaccacactgcgggctgctgctcaggttctgggaagttctggattgtttaataaccatggactccaagtacag

SEQ ID NO: 18893 - DNA, 201 bp, Homo sapiens
ttggatgaggattctgatgggattagtcctgaagagcatctactttctggcattactgatttatgtcttcaggatttgcctttaaaggaacgaatatttayaaaattatcatatcctcaggataatctacaaccagatgtcaacctgaaaactttgtccatacttagtgtaaaagaatcttgtattgctaacagtggttct

SEQ ID NO: 18894 - DNA, 201 bp, Homo sapiens
tcgtatctcatatttaacacaaatggatgtaaaactggtatttgttatggaaggggaaccaccaaagctgaaagctgatgtcataagcaagaggaatcagwctcggtatgggtcttctggaaaatcgtggtctcagaaaacagggagatcacattttaaatcagtcttaagagagtgcctccatatgctcgaatgcttagg

SEQ ID NO: 18895 - DNA, 201 bp, Homo sapiens
tttaaatcagtcttaagagagtgcctccatatgctcgaatgcttaggaatcccctgggttcaggctgctggggaagctgaagccatgtgtgcttatctcartgctggtggtcatgtcgatggctgcctcaccaatgatggagatactttcctttatggggcccagactgtttacaggaatttcactatgaatacaaaggac

SEQ ID NO: 18896 - DNA, 201 bp, Homo sapiens
gctttgaaaatatcccagaacaactgtcctgtgaatcagaaaggtacactgcaaacataaagaaagtgttggatgaggattctgatgggattagtcctgargagcatctactttctggcattactgatttatgtcttcaggatttgcctttaaaggaacgaatatttataaaattatcatatcctcaggataatctacaac

SEQ ID NO: 18897 - DNA, 201 bp, Homo sapiens
ggttgatctcttcacctcagaaggtctcttcagagctgctgtgcccagtggtgcttcaactggtatctatgaggtcctagagctccaggacaatgataagmctcgctatatggggaagggtgtctcaaagcctgttgagcagctctagccttgcagtcatgtaattggcccaagtgtcatctccggggtggccacaggcaa

SEQ ID NO: 18898 - DNA, 201 bp, Homo sapiens
atgaaaaatcagggagaagaaaatggctttccagatagcactggagatcctcttccagagatcagcaaggacaactcctgcaaagaaaactgtacttgttyctcctgcttgctccgggcccccaccataagtgacttgctcaatgatcaggacttactagacgtgatcaggataaagctggatccgtgtcacccaacggtg

SEQ ID NO: 18899 - DNA, 201 bp, Homo sapiens
tcaggacttactagacgtgatcaggataaagctggatccgtgtcacccaacggtgaaaaactggaggaattttgcaagcaaatgggggatgtcctatgacraattgtgcttcctggagcagaggccacagagccccaccttggagttcttgctccggaacagtcagaggacggtgggccagctgatggagctctgcaggct

SEQ ID NO: 18900 - DNA, 201 bp, Homo sapiens
tcagcaaggacaactcctgcaaagaaaactgtacttgttcctcctgcttgctccgggcccccaccataagtgacttgctcaatgatcaggacttactagaygtgatcaggataaagctggatccgtgtcacccaacggtgaaaaactggaggaattttgcaagcaaatgggggatgtcctatgacgaattgtgcttcctgg

SEQ ID NO: 18901 - DNA, 201 bp, Homo sapiens
gatctcttcacctcagaaggtctcttcagagctgctgtgcccagtggtgcttcaactggtatctatgaggtcctagagctccaggacaatgataagactcrctatatggggaagggtgtctcaaagcctgttgagcagctctagccttgcagtcatgtaattggcccaagtgtcatctccggggtggccacaggcaagatc

SEQ ID NO: 18902 - DNA, 127 bp, Homo sapiens
atgggcctcaggacgactaaacagatrgggagaggcactaaagctcctggtcaccaagaggatcatatggtaaaggaaccagtggaagacacagaccctagcactttatcctttaatatggtagaca

SEQ ID NO: 18903 - DNA, 166 bp, Homo sapiens
ggttgatctcttcacctcagaaggtctcttcagagctgctgtgcccagtggtgcttcaactggtatctatgaggtcctagagctccaggacaatgataagmctcgctatatggggaagggtgtctcaaagcctgttgagcccatcaataaaactattgcacctgtc

SEQ ID NO: 18904 - DNA, 201 bp, Homo sapiens; identical to SEQ ID NO: 18898

SEQ ID NO: 18905 - DNA, 201 bp, Homo sapiens; identical to SEQ ID NO: 18899

SEQ ID NO: 18906 - DNA, 201 bp, Homo sapiens; identical to SEQ ID NO: 18900

SEQ ID NO: 18907 - DNA, 162 bp, Homo sapiens
gatctcttcacctcagaaggtctcttcagagctgctgtgcccagtggtgcttcaactggtatctatgaggtcctagagctccaggacaatgataagactcrctatatggggaagggtgtctcaaagcctgttgagcccatcaataaaactattgcacctgtc

SEQ ID NO: 18908 - DNA, 201 bp, Homo sapiens; identical to SEQ ID NO: 18897

SEQ ID NO: 18909 - DNA, 201 bp, Homo sapiens; identical to SEQ ID NO: 18898

SEQ ID NO: 18910 - DNA, 201 bp, Homo sapiens; identical to SEQ ID NO: 18899

SEQ ID NO: 18911 - DNA, 201 bp, Homo sapiens; identical to SEQ ID NO: 18900

SEQ ID NO: 18912 - DNA, 201 bp, Homo sapiens; identical to SEQ ID NO: 18901

SEQ ID NO: 18913 - DNA, 201 bp, Homo sapiens
gagcatcttctcgcaatctgttgcttcttccatggcaaactccagagaattaagaagccaaactcaacatcgccatgggcctcaggacgactaaacagatrgggagaggcactaaagctcctggtcaccaagagggacttttcatccccgtggtcccacggtcctcccgcgccccggaggcctgccagccccgctcggacg

SEQ ID NO: 18914 - DNA, 201 bp, Homo sapiens
cctcggccgtgaatgagaagaagtgcaactgcctcctgctcaaagtgaaccagattcgctctgtgactgagtcccttcaggcgtgcaagctggcccaggcsaatggttggtgtgtcatggtgcctcatcattctggggagactgaaaataccttcatcactgacctggtggtggggctgtgacctgggcagctcaagactg

SEQ ID NO: 18915 - DNA, 201 bp, Homo sapiens
gaggacagcctcggccgtgaatgagaagaagtgcaactgcctcctgctcaaagtgaaccagattcgctctgtgactgagtcccttcaggcgtgcaagctgkcccaggccaatggttggtgtgtcatggtgcctcatcattctggggagactgaaaataccttcatcactgacctggtggtggggctgtgacctgggcagct

SEQ ID NO: 18916 - DNA, 201 bp, Homo sapiens
tcctttaatatgggagaagaaaatggctttccagatagcactggagatcctcttccagagatcagcaaggacaactcctgcaaagaaaactgtacttgttyctcctgcttgctccgggcccccaccataagtgacttgctcaatgatcaggacttactagacgtgatcaggataaagctggatccgtgtcacccaacggtg

SEQ ID NO: 18917 - DNA, 201 bp, Homo sapiens; identical to SEQ ID NO: 18899

SEQ ID NO: 18918 - DNA, 201 bp, Homo sapiens; identical to SEQ ID NO: 18900

SEQ ID NO: 18919 - DNA, 201 bp, Homo sapiens
tggaggatgatctcagagtgaccaacccaaagaggacagcctcggccgtgaatgagaagaagtgcaactgcctcctgctcaaagtgaaccagattcgctcygtgactgagtcccttcaggcgtgcaagctggcccaggccaatggttggtgtgtcatggtgcctcatcattctggggagactgaaaataccttcatcactg

SEQ ID NO: 18920 - DNA, 201 bp, Homo sapiens
gatctcttcacctcagaaggtctcttcagagctgctgtgcccagtggtgcttcaactggtatctatgaggtcctagagctccaggacaatgataagactcrctatatggggaagggtgtctcaaagcctgttgagcccatcaataaaactattgcacctgtcctggttagcaagaaactgaacgtcacagaacaagagaag

SEQ ID NO: 18921 - DNA, 201 bp, Homo sapiens
atgagaagaagtgcaactgcctcctgctcaaagtgaaccagattcgctctgtgactgagtcccttcaggcgtgcaagctggcccaggccaatggttggtgygtcatggtgcctcatcattctggggagactgaaaataccttcatcactgacctggtggtggggctgtgacctgggcagctcaagactggtgccccttgct

SEQ ID NO: 18922 - DNA, 201 bp, Homo sapiens
ggttgatctcttcacctcagaaggtctcttcagagctgctgtgcccagtggtgcttcaactggtatctatgaggtcctagagctccaggacaatgataagmctcgctatatggggaagggtgtctcaaagcctgttgagcccatcaataaaactattgcacctgtcctggttagcaagaaactgaacgtcacagaacaaga

SEQ ID NO: 18923 - DNA, 201 bp, Homo sapiens
gtctggctgacctgtacaagtccttcatcaaaaactacccagtggtgtctactgaagatccctttgaccaggatgactggggagcttggcagaagttcacrgccagtgcaggaatccaggtagtggaggatgatctcagagtgaccaacccaaagaggacagcctcggccgtgaatgagaagaagtgcaactgcctcctgc

SEQ ID NO: 18924 - DNA, 201 bp, Homo sapiens
tgcctgcaaagctagtgctgttgagaagggggttcccctgtaccaccacatcgccgacttgtctggcaactccaaagtcatcttgccagtcccggtgttcratgtcatcaatggcagttctcatgctgtcaccaagctggccatgcaggagttcatggtcctcccagtcggtgcagcaaacttcagggaagccatgcccat

SEQ ID NO: 18925 - DNA, 201 bp, Homo sapiens
ggcagctcaagactggtgccccttgctgatctgagcgcttggccaagtacaaccagctcctcagaattgaagaggagctgggcagcaaggctaagtttgcyggcaggaacttcagaaaccccccagccaagtaagctgtgggcaggcaagcccttcagtcacctggtggctaattagacccctccccttgtgtcaactccg

SEQ ID NO: 18926 - DNA, 201 bp, Homo sapiens
cgtttgctcccaacatcctggagaataaagaaggcctggagctgctgaagactgcgattgggaaagctggctacactgataaggtgatcgtcagcatggaygtagaggcctccgagttcttcaggtctggaaagtatgacctggaattcaagtttctcgacgaccccaccaggtacatctcacctgactgtctggctgacc

SEQ ID NO: 18927 - DNA, 201 bp, Homo sapiens; identical to SEQ ID NO: 18913

SEQ ID NO: 18928 - DNA, 201 bp, Homo sapiens
ggtggggctgtgacctgggcagctcaagactggtgccccttgctgatctgagcgcttggccaagtacaaccagctcctcagaattgaagaggagctgggcmgcaaggctaagtttgccggcaggaacttcagaaaccccccagccaagtaagctgtgggcaggcaagcccttcagtcacctggtggctaattagacccctc

SEQ ID NO: 18929 - DNA, 201 bp, Homo sapiens; identical to SEQ ID NO: 18897

SEQ ID NO: 18930 - DNA, 201 bp, Homo sapiens; identical to SEQ ID NO: 18898

SEQ ID NO: 18931 - DNA, 201 bp, Homo sapiens; identical to SEQ ID NO: 18899

SEQ ID NO: 18932 - DNA, 201 bp, Homo sapiens; identical to SEQ ID NO: 18900

SEQ ID NO: 18933 - DNA, 201 bp, Homo sapiens; identical to SEQ ID NO: 18901

SEQ ID NO: 18934 - DNA, 201 bp, Homo sapiens
tcagacaacttgttatttacctttgtggccaggtgattcttgatcagatttgtagtaatatcatgttacttctgggtggattcaacaccaacaatatgaayatgagccgagcaagtgtatatgctgcccacactcttgctggaacatctgtgcaaaatattctacactggagccaggcagtgaattctggtgaactccggg

SEQ ID NO: 18935 - DNA, 201 bp, Homo sapiens
ggcaaaaaagaatttctgtatcagaccagatttctcagacaacttgttatttacctttgtggccaggtgattcttgatcagatttgtagtaatatcatgtyacttctgggtggattcaacaccaacaatatgaacatgagccgagcaagtgtatatgctgcccacactcttgctggaacatctgtgcaaaatattctacac

SEQ ID NO: 18936 - DNA, 201 bp, Homo sapiens
gccaggcagtgaattctggtgaactccgggcatttgactgggggagtgagaccaaaaatctggaaaaatgcaatcagccaactcctgtaaggtacagagtyagagatatgacggtccctacagcaatgtggacaggaggtcaggactggctttcaaatccagaagacgtgaaaatgctgctctctgaggtgaccaacctca

SEQ ID NO: 18937 - DNA, 201 bp, Homo sapiens
gatttctcagacaacttgttatttacctttgtggccaggtgattcttgatcagatttgtagtaatatcatgttacttctgggtggattcaacaccaacaayatgaacatgagccgagcaagtgtatatgctgcccacactcttgctggaacatctgtgcaaaatattctacactggagccaggcagtgaattctggtgaac

SEQ ID NO: 18938 - DNA, 201 bp, Homo sapiens
tttccaccatgccagagctggctcagaaaatcaaaatgtattttgctttagcacccatagccactgttaagcatgcaaaaagccccgggaccaaatttttsttgctgccagatatgatgatcaagggattgtttggcaaaaaagaatttctgtatcagaccagatttctcagacaacttgttatttacctttgtggccagg

SEQ ID NO: 18939 - DNA, 201 bp, Homo sapiens
aattctggtgaactccgggcatttgactgggggagtgagaccaaaaatctggaaaaatgcaatcagccaactcctgtaaggtacagagtcagagatatgayggtccctacagcaatgtggacaggaggtcaggactggctttcaaatccagaagacgtgaaaatgctgctctctgaggtgaccaacctcatctaccataag

SEQ ID NO: 18940 - DNA, 201 bp, Homo sapiens
caggaggtcaggactggctttcaaatccagaagacgtgaaaatgctgctctctgaggtgaccaacctcatctaccataagaatattcctgaatgggctcaygtggatttcatctggggtttggatgctcctcaccgtatgtacaatgaaatcatccatctgatgcagcaggaggagaccaacctttcccagggacggtgtg

SEQ ID NO: 18941 - DNA, 118 bp, Homo sapiens
ggctcacgtggatttcatctggggtttggatgctcctcaccgtatgtacaatgaaatcatccatctgatgcagcaggaggagaccaacctttcccagggayggtgtgaggccgtattg

SEQ ID NO: 18942 - DNA, 201 bp, Homo sapiens
tcccggcgcagtcaccggcacaggctatggctgcgacttccctcatgtccaggttggctgcctggctgctgcagcccgtgcacagctgctccctctgcccycgccccttccacctcacggcagttacagatgaagctgttgtaatttctggaaggaaactggcccagcagatcaagcaggaagtgcggcaggaggtagaag

SEQ ID NO: 18943 - DNA, 201 bp, Homo sapiens
caagtcactcctacgtcctcaacaaaaccagggcagctgcagatgtgggaatcaacagtgagacaattgtgaaaccagcttcaatttcagaggaagaattrttgaatttaatcagcaaactgaataattatgataatgtagatggcctccttgttcagctgcctcttccagacatattgatgagagaaggatctgcaatgc

SEQ ID NO: 18944 - DNA, 201 bp, Homo sapiens; identical to SEQ ID NO: 18942

SEQ ID NO: 18945 - DNA, 201 bp, Homo sapiens; identical to SEQ ID NO: 18943

SEQ ID NO: 18946 - DNA, 201 bp, Homo sapiens
tcaacattgcaattgatagtgagtccttgggctgcatctccttcaagctatttgcagacaaagttctaaagatggaagaaaatttttgtgctctgaacacyggagagaaagtatttgaattattccggggtgtgtgtcagggtggtgacttcacacaccataatggcactggtggcaagtccctctacagcaaggaatttg

SEQ ID NO: 18947 - DNA, 201 bp, Homo sapiens
gcaaggaatttgatgatgagaacttcatcctaagcatacagctcctggcgtcttgtccacggcaaatgctggacccaccacaaatggttcccagtttttcwtctgtactgccaagacagaggatggatgacagcatgtggtctttggcaagccctcaggagctgcagaccactgttgcacgtgggctgttacccacagggt

SEQ ID NO: 18948 - DNA, 201 bp, Homo sapiens
cttgggctgcatctccttcaagctatttgcagacaaagttctaaagatggaagaaaatttttgtgctctgaacactggagagaaagtatttggtgataaakgtccctgcttttacagaattattccggggtgtgtgtcagggtggtgacttcacacaccataatggcactggtggcaagtccctctacagcaaggaatttg

SEQ ID NO: 18949 - DNA, 191 bp, Homo sapiens
aggtttaaataaaatagaatgtatttctctccatacgacaatcttaggatagtccagggcaggtaggcaattccgttccacaaggtcataaggagaacaggctagaggagcagccctctcttccttaacatgtaatttctgaattttggtcccagtgagtcctgtacttttcatcatttccgagccagaga

SEQ ID NO: 18950 - DNA, 201 bp, Homo sapiens
tcaacattgcaattgatagtgagtccttgggctgcatctccttcaagctatttgcagacaaagttctaaagatggaagaaaatttttgtgctctgaacacyggagagaaagtatttggtgataaatgtccctgcttttacagaattattccggggtgtgtgtcagggtggtgacttcacacaccataatggcactggtggc

SEQ ID NO: 18951 - DNA, 201 bp, Homo sapiens
gcaaggaatttgatgatgagaacttcatcctaagcatacagctcctggcgtcttgtccacggcaaatgctggacccaccacaaatggttcccagtttttcwtctgtactgccaagacagaggatggatgacagcatgtggtctttggcaaggtgaaagatggcatgagtattgtggaagccctggaacgctctgggtccag

SEQ ID NO: 18952 - DNA, 201 bp, Homo sapiens
ttttaaagaagcacaacgggtcattttcctttgtatgttcctagcgcagaactgtttctaaaacaacttgaagtatagttttgttatctaagcaatttttkttttaagtaagtaagtgtactagaatgcgaagccgttatggttcaggtttttaaaaactggtacagtattgtatttgtctcatctgttgcactgtatttc

SEQ ID NO: 18953 - DNA, 201 bp, Homo sapiens
atgtacgatggaatccacggatgagacctcagatgcccattcaccagaatctcaaggagctgctggccgtcagggcggagctgcagaagcgtgtggagggyctacagcgggaggtggccacgcgcgccgtctcatcctcatctgagcggggctcctcgccctcccactccgccacctccgtccacacctcggtctgatggg

SEQ ID NO: 18954 - DNA, 201 bp, Homo sapiens
tagttttgttatctaagcaatttttgttttaagtaagtaagtgtactagaatgcgaagccgttatggttcaggtttttaaaaactggtacagtattgtatytgtctcatctgttgcactgtatttcaatcatctgtaattaaaatgatcatatgtttgctccctggtcttttttaagtaagtaagtaagtatcttagtaga

SEQ ID NO: 18955 - DNA, 201 bp, Homo sapiens
gccgttatggttcaggtttttaaaaactggtacagtattgtatttgtctcatctgttgcactgtatttcaatcatctgtaattaaaatgatcatatgtttrctccctggtcttttttaagtaagtaagtaagtatcttagtagatttttcctttgaggaaaatcggtaataaaataacatggattgaatgtttactgtgcg

SEQ ID NO: 18956 - DNA, 201 bp, Homo sapiens; identical to SEQ ID NO: 18952

SEQ ID NO: 18957 - DNA, 201 bp, Homo sapiens; identical to SEQ ID NO: 18953

SEQ ID NO: 18958 - DNA, 201 bp, Homo sapiens
agaatggatttttttttaactgggaacctcctgattcttacggaaaattatccttctataagaagataccagagagatttattcaaggtaatttgataacytaaaatcaattctccattttttatcatatgtgggatttgttgctaagtcgtgttcaacaatagcttttatgttcctaacatatctgaaagcttatttatg

SEQ ID NO: 18959 - DNA, 157 bp, Homo sapiens
tagttttgttatctaagcaatttttgttttaagtaagtaagtgtactagaatgcgaagccgttatggttcaggtttttaaaaactggtacagtattgtatytgtctcatctgttgcactgtatttcaatcatctgtaattaaaatgatcatatgttt

SEQ ID NO: 18960 - DNA, 201 bp, Homo sapiens
ctctgtgtgacatgccacagatgactattgcacacctgggtcctgccccagcaggccatgcccctcccatgtgccgtgcctgttgctgcagctgccccccsaccccgccactggctgcaggaattcagcctttagaggcagaggcagctgcagcggcccctgaggtcaaaccccagtgtgactgcatagcagtgttagctg

SEQ ID NO: 18961 - DNA, 201 bp, Homo sapiens; identical to SEQ ID NO: 18952

SEQ ID NO: 18962 - DNA, 201 bp, Homo sapiens; identical to SEQ ID NO: 18953

SEQ ID NO: 18963 - DNA, 201 bp, Homo sapiens; identical to SEQ ID NO: 18958

SEQ ID NO: 18964 - DNA, 157 bp, Homo sapiens; identical to SEQ ID NO: 18959

SEQ ID NO: 18965 - DNA, 201 bp, Homo sapiens; identical to SEQ ID NO: 18960

SEQ ID NO: 18966 - DNA, 201 bp, Homo sapiens; identical to SEQ ID NO: 18952

SEQ ID NO: 18967 - DNA, 201 bp, Homo sapiens; identical to SEQ ID NO: 18953

SEQ ID NO: 18968 - DNA, 201 bp, Homo sapiens; identical to SEQ ID NO: 18954

SEQ ID NO: 18969 - DNA, 201 bp, Homo sapiens; identical to SEQ ID NO: 18955

SEQ ID NO: 18970 - DNA, 201 bp, Homo sapiens; identical to SEQ ID NO: 18952

SEQ ID NO: 18971 - DNA, 201 bp, Homo sapiens; identical to SEQ ID NO: 18953

SEQ ID NO: 18972 - DNA, 201 bp, Homo sapiens; identical to SEQ ID NO: 18954

SEQ ID NO: 18973 - DNA, 201 bp, Homo sapiens; identical to SEQ ID NO: 18955

SEQ ID NO: 18974 - DNA, 201 bp, Homo sapiens
catctcttacctcacctacagcaggaaccttgaaattggacttctgcctcacaccctgcaatctcatctccacattatgaccagagtgatcttcttttttwaaaaaaacttattgttactatttcaattgataaatgaattgtatatatttatggtgtacaacgtggtattttgattgtgtacacattgtggaatggctaa

SEQ ID NO: 18975 - DNA, 201 bp, Homo sapiens
aagaagaggagaagagacagacacagacaaaggaaagaaggtcaggtggaaatggaggcagagatcagaatgatgtgtgtataagccaagaacacctgggrctatcggaacctggggcagccaaggaaggatcctcccctagagtgttcggaggaagcatggcactgccgataccttgaattcagacttccagcctccaga

SEQ ID NO: 18976 - DNA, 201 bp, Homo sapiens; identical to SEQ ID NO: 18952

SEQ ID NO: 18977 - DNA, 201 bp, Homo sapiens; identical to SEQ ID NO: 18953

SEQ ID NO: 18978 - DNA, 201 bp, Homo sapiens; identical to SEQ ID NO: 18954

SEQ ID NO: 18979 - DNA, 201 bp, Homo sapiens; identical to SEQ ID NO: 18955

SEQ ID NO: 18980 - DNA, 201 bp, Homo sapiens; identical to SEQ ID NO: 18974

SEQ ID NO: 18981 - DNA, 201 bp, Homo sapiens
ccctcgagtcttctttgacgtggacatcggaggggagcgagttggtcgaattgtcttagaattgtttgcagatatcgtacccaaaactgcggaaaattttygtgcactgtgtacaggagaaaaaggcattggacacacgactgggaaacctctccatttcaaaggatgcccttttcatcgaattattaagaaatttatgat

SEQ ID NO: 18982 - DNA, 171 bp, Homo sapiens
attctttgatgtatccatggtggatgatgctaggttttcatacttatagataatacacacacacacacacacacaaacttgttcagggatgggcatacttyttctgcaagggccagatcataaagtttttaggctttgtagaccatgtaatgtcacacccactcacctgca

SEQ ID NO: 18983 - DNA, 201 bp, Homo sapiens
aaggcagtatatgcaaaaatgtttgcttagaaaggattcagttttgcttattgtgtgttgattgtataaatgcaataagaaaatgtaaaggtttttgtctrtgaatatgatccctaatgtgtttcttttgacaccttagttccttactgtttacagtttaggagtactgataggggttcatgcttaataaacatgtcacaa

SEQ ID NO: 18984 - DNA, 106 bp, Homo sapiens
cacacacacaaacttgttcagggatgggcatacttcttctgcaagggccagatcataaagtttttaggctttgtagaccatgtaatgtcacacccactcamctgca

SEQ ID NO: 18985 - DNA, 201 bp, Homo sapiens
gcaacctatagctttaagctgtgtactgaatattggtgcttgtaaactgaagatgtcaaattggcagggagcaattgacagttgtttagaggctcttgaamtagacccatcaaataccaaagcattgtaccgcagagctcaaggatggcaaggattaaaagaatatgatcaagcattggctgatcttaagaaagctcaggg

SEQ ID NO: 18986 - DNA, 159 bp, Homo sapiens
cggaagtggccggtcagcgtcgctgccggtctccggcggagacggactctggagtttgrgcggcccgggcggccactaggtactctgatattccgtactaaacacgtctgcaagtcaagatgtcgcacccgtccccccaagccaagccctccaacccca

SEQ ID NO: 18987 - DNA, 201 bp, Homo sapiens
tccctgaggatgcggatatagatttaaaagatgtagataaaattttattaataacagaagacttaaaaaacattggaaatacttttttcaaatcccagaaytgggagatggctattaaaaaatatgcagaagttttaagatacgtggacagttcaaaggctgttattgagacagcagatagagccaagctgcaacctatag

SEQ ID NO: 18988 - DNA, 166 bp, Homo sapiens
cggaagtggccggtcagcgtcgctgccggtctccggcggagacggactctggagtttgggcggccsgggcggccactaggtactctgatattccgtactaaacacgtctgcaagtcaagatgtcgcacccgtccccccaagccaagccctccaaccccagtaaccc

SEQ ID NO: 18989 - DNA, 201 bp, Homo sapiens
ctagacccatcaaataccaaagcattgtaccgcagagctcaaggatggcaaggattaaaagaatatgatcaagcattggctgatcttaagaaagctcaggrgatagcaccagaagataaagctatccaggcagaattgctgaaagtcaaacaaaagataaaggcacagaaagataaagagaaggcagtatatgcaaaaatg

SEQ ID NO: 18990 - DNA, 201 bp, Homo sapiens
cttccctgcgcttttcagaccatactctttacggtactaggcactgctgagctgggagatgtcggcggcgtgttgggaggaaccgtggggtcttcccggcrgctttgcgaagcgggtcctggtgaccggcggtgctggtttcattgcatcacatatgattgtctctttagtggaagattatccaaactatatgatcataaa

SEQ ID NO: 18991 - DNA, 201 bp, Homo sapiens
acaaacagaactacaaatttatacagggtgacatatgtgattctcactttgtgaaactgctttttgaaacagagaaaatagatatagtactacattttgcygcacaaacacatgtagatctttcattcgtacgtgcctttgagtttacctatgttaatgtttatggcactcacgttttggtaagtgctgctcatgaagcca

SEQ ID NO: 18992 - DNA, 195 bp, Homo sapiens
tccggaagctgcctctggctgctctgttaacgtgtcccgcgagcgaggcgcgtcgcaaaaggtcgcggcggaacttccctgcgcttttcagaccmtactctttacggtactaggcactgctgagctgggagatgtcggcggcgtgttgggaggaaccgtggggtcttcccggcggctttgcgaagcgggtcctgg

SEQ ID NO: 18993 - DNA, 201 bp, Homo sapiens
ttcttttttaagatctgatatgctatcattgccttaataatggaacaaaatagaagcatatctaacactttttaaattgataattttgtaaaattgattamgttgaatgctttttaagagaagtgtgtaaagtttttatattttcacaaaaatttatcatgtttactgtttaaaatgattgtatttataaaattgtcaata

SEQ ID NO: 18994 - DNA, 201 bp, Homo sapiens
cagaatgcctcaatctttgggagagtttcagtactggcatagaatttaaatgtcaaaattctttctgaaaccctttctcctagaaactaggaaataatagstgtagaagactctccctaagggtagccaggaagaagtctcctgattcggacaaccatgaggggtagtggtgctagggagaaggcaaccttcactggtttt

SEQ ID NO: 18995 - DNA, 126 bp, Homo sapiens
ttattccaaaattgcttagtcacgacgcagtgtctgtatttttatatatgtattcatatatacatgattgtaatacataataagaatgaagtggtattacwttattcctaataatacagataatgc

SEQ ID NO: 18996 - DNA, 201 bp, Homo sapiens
gggatatttctgtaccccgctaacaagaagagccccaatggaaagctgagactgctgtacgaatgcaaccccatggcctacgtcatggagaaggctggggkaatggccaccactgggaaggaggccgtgttagacgtcattcccacagacattcaccagagggcgccggtgatcttggggtcccccgacgacgtgctcgag

SEQ ID NO: 18997 - DNA, 201 bp, Homo sapiens
gcattgctggttctaccaacgtgacaggtgatcaagttaagaagctggacgtcctctccaacgacctggttatgaacatgttaaagtcatcctttgccacktgtgttctcgtgtcagaagaagataaacacgccatcatagtggaaccggagaaaaggggtaaatatgtggtctgttttgatccccttgatggatcttcca

SEQ ID NO: 18998 - DNA, 201 bp, Homo sapiens
gggtaggcggggcgcaagagtgttcccgggggcggggggccgacccgcgtctaaaggtttccgcgattcacccgccggcgcctggcctggcccagttgcaycacgagcgctgcggacactcggggcggcagtcggtctgtcagtcctcccgccaggtcccgcggcccgcacctgccgcccgcacctgcagctccgcacctg

SEQ ID NO: 18999 - DNA, 148 bp, Homo sapiens
cttggcactccctaaccaaatgctgtctccataatgccactggtgttaagatatattttgagtggatggaggagaaataaacttattcctccttaaaaaaagtctcccttgctttgtgtcaaataataatgatgatgacaataataac

SEQ ID NO: 19000 - DNA, 201 bp, Homo sapiens
gcttcatgctggacccggccatcggggagttcattttggtggacaaggatgtgaagataaaaaagaaaggtaaaatctacagccttaacgagggctacgcyaaggactttgaccctgccgtcactgagtacatccagaggaagaagttccccccagataattcagctccttatggggcccggtatgtgggctccatggtgg

SEQ ID NO: 19001 - DNA, 201 bp, Homo sapiens
agagggcgccggtgatcttggggtcccccgacgacgtgctcgagttcctgaaggtgtatgagaagcactctgcccagtgagcacctgccctgcctgcatcyggagaattgcctctacctggaccttttgtctcacacagcagtaccctgacctgctgtgcaccttacattcctagagagcagaaataaaaagcatgactat

SEQ ID NO: 19002 - DNA, 201 bp, Homo sapiens
ggatgtgaagataaaaaagaaaggtaaaatctacagccttaacgagggctacgccaaggactttgaccctgccgtcactgagtacatccagaggaagaagwtccccccagataattcagctccttatggggcccggtatgtgggctccatggtggctgatgttcatcgcactctggtctacggagggatatttctgtaccc

SEQ ID NO: 19003 - DNA, 201 bp, Homo sapiens
catagctttctctctggcagagtccgatggcccgagtcccgctccacagtgcgggtggagggcacggaggggtgtgtgtggggggcgacagcccaggaagwctagggggcggcagggcgcgtgggggcgggggttgggagaccgcagggaggatccccgaccttgtctgaagatccaagcaggcggagccgcggtctggtc

SEQ ID NO: 19004 - DNA, 201 bp, Homo sapiens
cggagaattgcctctacctggaccttttgtctcacacagcagtaccctgacctgctgtgcaccttacattcctagagagcagaaataaaaagcatgactakttccaccatcaaatgctgtagaatgcttggcactccctaaccaaatgctgtctccataatgccactggtgttaagatatattttgagtggatggaggaga

SEQ ID NO: 19005 - DNA, 201 bp, Homo sapiens
gtacatccagaggaagaagttccccccagataattcagctccttatggggcccggtatgtgggctccatggtggctgatgttcatcgcactctggtctacrgagggatatttctgtaccccgctaacaagaagagccccaatggaaagctgagactgctgtacgaatgcaaccccatggcctacgtcatggagaaggctgg

SEQ ID NO: 19006 - DNA, 201 bp, Homo sapiens
acccggttcaagcatggctgaccaggcgcccttcgacacggacgtcaacaccctgacccgcttcgtcatggaggagggcaggaaggcccgcggcacgggckagttgacccagctgctcaactcgctctgcacagcagtcaaagccatctcttcggcggtgcgcaaggcgggcatcgcgcacctctatggcattgctggttc

SEQ ID NO: 19007 - DNA, 201 bp, Homo sapiens
tgtgtccgttggaaccatttttggcatctatagaaagaaatcaactgatgagccttctgagaaggatgctctgcaaccaggccggaacctggtggcagccrgctacgcactgtatggcagtgccaccatgctggtccttgccatggactgtggggtcaactgcttcatgctggacccggccatcggggagttcattttggt

SEQ ID NO: 19008 - DNA, 201 bp, Homo sapiens
ttcatgctggacccggccatcggggagttcattttggtggacaaggatgtgaagataaaaaagaaaggtaaaatctacagccttaacgagggctacgccarggactttgaccctgccgtcactgagtacatccagaggaagaagttccccccagataattcagctccttatggggcccggtatgtgggctccatggtggct

SEQ ID NO: 19009 - DNA, 201 bp, Homo sapiens
aattgcctctacctggaccttttgtctcacacagcagtaccctgacctgctgtgcaccttacattcctagagagcagaaataaaaagcatgactatttccmccatcaaatgctgtagaatgcttggcactccctaaccaaatgctgtctccataatgccactggtgttaagatatattttgagtggatggaggagaaataa

SEQ ID NO: 19010 - DNA, 201 bp, Homo sapiens
caccagagggcgccggtgatcttggggtcccccgacgacgtgctcgagttcctgaaggtgtatgagaagcactctgcccagtgagcacctgccctgcctgyatccggagaattgcctctacctggaccttttgtctcacacagcagtaccctgacctgctgtgcaccttacattcctagagagcagaaataaaaagcatga

SEQ ID NO: 19011 - DNA, 201 bp, Homo sapiens
acgtcatggagaaggctgggggaatggccaccactgggaaggaggccgtgttagacgtcattcccacagacattcaccagagggcgccggtgatcttgggrtcccccgacgacgtgctcgagttcctgaaggtgtatgagaagcactctgcccagtgagcacctgccctgcctgcatccggagaattgcctctacctggac

SEQ ID NO: 19012 - DNA, 201 bp, Homo sapiens
gtggggtcaactgcttcatgctggacccggccatcggggagttcattttggtggacaaggatgtgaagataaaaaagaaaggtaaaatctacagccttaasgagggctacgccaaggactttgaccctgccgtcactgagtacatccagaggaagaagttccccccagataattcagctccttatggggcccggtatgtgg

SEQ ID NO: 19013 - DNA, 201 bp, Homo sapiens
ccgagagccgcgcctgccgcggcgtcaccaccctgccccctgaggccttctaccccatcccctggcaggactggaagaagtactttgaggacatcaacccsgaggagctgccgcggctgctcagtgccacctatgctgtccacgtgtggaacaagaagagccagggcacgcggttcgaggccacgtccagggcactgctgg

SEQ ID NO: 19014 - DNA, 201 bp, Homo sapiens
gccttctagacaacaggcaggaaggatgaacctcagggcacccccaggtggtgcggaaagccaggcagttgggacagaggtgcccacgagggcagaggccrgtgctaaggggatggggaagaagggacaagattcccagagaggagaggaggctgttggtaggaaagtggcagggctgggggagacccagccccaagggtc

SEQ ID NO: 19015 - DNA, 201 bp, Homo sapiens
ttgaggacatcaaccccgaggagctgccgcggctgctcagtgccacctatgctgtccacgtgtggaacaagaagagccagggcacgcggttcgaggccacrtccagggcactgctggcccagctgcatgcccgctactgccccacgacgcacgaggccatgaaaatgtacttgtgaggggcccgccaggtcacctccccaa

SEQ ID NO: 19016 - DNA, 201 bp, Homo sapiens
cgagggcagaggccggtgctaaggggatggggaagaagggacaagattcccagagaggagaggaggctgttggtaggaaagtggcagggctgggggagacmcagccccaagggtccggggcggaggatgctttgttcttttctggttttggttcctctttcgcggggggtgggggaggtcaacagggactgagtggggcag

SEQ ID NO: 19017 - DNA, 201 bp, Homo sapiens
ggggaagaagggacaagattcccagagaggagaggaggctgttggtaggaaagtggcagggctgggggagacccagccccaagggtccggggcggaggatrctttgttcttttctggttttggttcctctttcgcggggggtgggggaggtcaacagggactgagtggggcagaggcccagaagtgccagcctggggagcc

SEQ ID NO: 19018 - DNA, 201 bp, Homo sapiens
ggcccagaagtgccagcctggggagccgtttgggggcagccccttctgcccaccccatccttcttcctctccagagatgccaggggggcgtgtatgctctrccccttccctcagacaggggctgggtggggaggctctttaggctcaggagaagcattttaaagaaacccccaccctgccgcccgcattataaacacagga

SEQ ID NO: 19019 - DNA, 201 bp, Homo sapiens; identical to SEQ ID NO: 19013

SEQ ID NO: 19020 - DNA, 201 bp, Homo sapiens; identical to SEQ ID NO: 19014

SEQ ID NO: 19021 - DNA, 201 bp, Homo sapiens; identical to SEQ ID NO: 19015

SEQ ID NO: 19022 - DNA, 201 bp, Homo sapiens; identical to SEQ ID NO: 19016

SEQ ID NO: 19023 - DNA, 201 bp, Homo sapiens; identical to SEQ ID NO: 19017

SEQ ID NO: 19024 - DNA, 201 bp, Homo sapiens; identical to SEQ ID NO: 19018

SEQ ID NO: 19025 - DNA, 201 bp, Homo sapiens
tggtgagagcttccttcaaatgaggctgctggatcttgccctcttcaggaaaggaaacctaccattggagagcttggttccttgcctccttctggtgctcytactccaagtctatttcatttttccacactgagcaatgaatgtgagagatgtggtcaccaagatctaagttacttgttgaaagaaagttactttcgacaa

SEQ ID NO: 19026 - DNA, 201 bp, Homo sapiens
cacgccgccctgcgaggaatgcattgtgtggctgctgctgaaggagcccatgaccgtgagctctgaccagatggccaagctgcggagcctcctctccagtrctgagaacgagcccccagtgcctcttgtgagcaactggcgacctccacagcctatcaataacagggtggtgagagcttccttcaaatgaggctgctggat

SEQ ID NO: 19027 - DNA, 201 bp, Homo sapiens
gcaactggcgacctccacagcctatcaataacagggtggtgagagcttccttcaaatgaggctgctggatcttgccctcttcaggaaaggaaacctaccaytggagagcttggttccttgcctccttctggtgctcttactccaagtctatttcatttttccacactgagcaatgaatgtgagagatgtggtcaccaagat

SEQ ID NO: 19028 - DNA, 201 bp, Homo sapiens
tcattggcttcctctacccggcctcccaaacaccaccccaatctagtttagccccccgccccaccctcgctgacctaataaggccatgcagtgtgcggggsagctacataaaagcgcgggctcgcggcgactctgcaccacgcaggggaagagaaagcaggagccgtccagcacggaggaaggcgaccatggccaaggagt

SEQ ID NO: 19029 - DNA, 201 bp, Homo sapiens
gaaggcgaccatggccaaggagtggggctacgccagtcacaacggtcctgaccactggcatgaacttttcccaaatgccaagggggaaaaccagtcgcccrttgagctgcatactaaagacatcaggcatgacccttctctgcagccatggtctgtgtcttatgatggtggctctgccaagaccatcctgaataatgggaa

SEQ ID NO: 19030 - DNA, 201 bp, Homo sapiens
taaagatatttttaaaatggctagctattgggcaccagtttttctgttatctaaaatttcacacaacttcattgtttttatttttatattatgagttgtcmatcttaaagaaatatgagtaattctacatgtagtagaggtgtatgaagatcatataacaattaaacataagccagaaattaaaatgactatagacagcaa

SEQ ID NO: 19031 - DNA, 201 bp, Homo sapiens
cggcctcccaaacaccaccccaatctagtttagccccccgccccaccctcgctgacctaataaggccatgcagtgtgcgggggagctacataaaagcgcgrgctcgcggcgactctgcaccacgcaggggaagagaaagcaggagccgtccagcacggaggaaggcgaccatggccaaggagtggggctacgccagtcaca

SEQ ID NO: 19032 - DNA, 201 bp, Homo sapiens
acacaatacaatcaggagttttcaaatttttgattcagtatttgaatttcttcttcataaatgtagttgaatttatcctagtatttttctttacctgaagkagggccatttatttttaatttcactacatttttctttgcatgattattaaaataaaaactgcctctgttgtgtttctcactggaggctggaatgaatgat

SEQ ID NO: 19033 - DNA, 201 bp, Homo sapiens; identical to SEQ ID NO: 19025

SEQ ID NO: 19034 - DNA, 201 bp, Homo sapiens; identical to SEQ ID NO: 19029

SEQ ID NO: 19035 - DNA, 201 bp, Homo sapiens; identical to SEQ ID NO: 19028

SEQ ID NO: 19036 - DNA, 201 bp, Homo sapiens; identical to SEQ ID NO: 19026

SEQ ID NO: 19037 - DNA, 201 bp, Homo sapiens; identical to SEQ ID NO: 19031

SEQ ID NO: 19038 - DNA, 128 bp, Homo sapiens
ctataaaagtagcattttggctagctattgggcaccagtttttctgttatctaaaatttcacacaacttcattgtttttatttttatattatgagttgtcmatcttaaagaaatatgagtaattctac

SEQ ID NO: 19039 - DNA, 201 bp, Homo sapiens; identical to SEQ ID NO: 19027

SEQ ID NO: 19040 - DNA, 201 bp, Homo sapiens
ataacaatgtgatcaacccaactttacctagagtgggagcatccaagattatagtggagacaaatgttggaaaacagttcaacttctgtagtccagaaacygtcagggaggaagttctgctcaccctcacaccgtgttaggagactactgttatttgaccaatgaattgacttctaataaaatctagtggtgatgcattac

SEQ ID NO: 19041 - DNA, 201 bp, Homo sapiens
aatgagccaagtcgtgggccacctagatttctttccaaatggaggagtggaaatgcctggatgtaaaaagaacattctctctcagattgtggacatagacrgaatctgggaagggactcgagactttgcggcctgtaatcacttaagaagctacaaatattacactgatagcatcgtcaaccctgatggctttgctggatt

SEQ ID NO: 19042 - DNA, 201 bp, Homo sapiens
gaatgagccaagtcgtgggccacctagatttctttccaaatggaggagtggaaatgcctggatgtaaaaagaacattctctctcagattgtggacatagayggaatctgggaagggactcgagactttgcggcctgtaatcacttaagaagctacaaatattacactgatagcatcgtcaaccctgatggctttgctggat

SEQ ID NO: 19043 - DNA, 201 bp, Homo sapiens
ctggatacacacaagcctcgcagaacatcaggatcgtgggagcagaagtggcatattttgttgaatttcttcagtcggcgttcggttactcaccttccaaygtgcatgtcattggccacagcctgggtgcccacgctgctggggaggctggaaggagaaccaatgggaccattggacgcatcacagggttggacccagcag

SEQ ID NO: 19044 - DNA, 201 bp, Homo sapiens
ggacatagacggaatctgggaagggactcgagactttgcggcctgtaatcacttaagaagctacaaatattacactgatagcatcgtcaaccctgatggcyttgctggattcccctgtgcctcttacaacgtcttcactgcaaacaagtgtttcccttgtccaagtggaggctgcccacagatgggtcactatgctgatag

SEQ ID NO: 19045 - DNA, 201 bp, Homo sapiens
tgtagatgctgccactttggactctttcactgctgctgggagcagtagcaggaaaagaagtttgctacgaaagactcggctgcttcagtgatgactccccmtggtcaggaattacggaaagacccctccatatattgccttggtctccaaaagatgtcaacacccgcttcctcctatatactaatgagaacccaaacaact

SEQ ID NO: 19046 - DNA, 201 bp, Homo sapiens
tattaaaatagcctgattttttttttctccccctctccccaatgtatttgctctggcccttgctttttaccctccagagctaagaggtagcagagtctctkgggatgagtgattcaccctcttacttggcgaccactgatgagatcaacaacaggtgaactataaacctattatttattgcagaactaataaaaaatccaa

SEQ ID NO: 19047 - DNA, 201 bp, Homo sapiens
gagtgattcaccctcttacttggcgaccactgatgagatcaacaacaggtgaactataaacctattatttattgcagaactaataaaaaatccaaagcctkgtatttgtacatctttattatttctaaagcactttcctcaacctaatttcagtttttacaattggtactcaagaaaatagagacagaaatcatttgattt

SEQ ID NO: 19048 - DNA, 201 bp, Homo sapiens
ggttgcagtgagccgaaattgcgccactgcactccagcctgatgacagagcaagactgtctcaaaaaaaaaaaaaaaaataccacatatactttatctccmaaacctaatctgattataaattctaagctaggaaacaaaaacttttgggacaagtacttttttttttgacggggtctcctttgtcacccaggctggagtg

SEQ ID NO: 19049 - DNA, 201 bp, Homo sapiens
gtgggcctgggggccaggcccaggctgaggcccctgatctctacacctacttcaccatgctcaaggccatctgtgtggatgtggaccatgggctgctgccrcgggaggagtggcaggccaaggtggcaggcagcgaagagaatggaaccgcagagacagaggaagtcgaggacgagagtgcctcaggagagctggacctgg

SEQ ID NO: 19050 - DNA, 201 bp, Homo sapiens
tcacatgatagaagacagactctttgatgaggtcggcggagcagttcactagccaatgatgagagcagaaaggcctagacctgcagccagaagtgaaggcrgctcagttctccgggatgcttctctacctcctgagcaccaattcctggattccagtcactggctcacctttagaatgtctgttgctattcactgctcccc

SEQ ID NO: 19051 - DNA, 201 bp, Homo sapiens
actgtggggcatccacttgatgcccccaagaatcctagtagaatgtttactaccaaatggaatgatagtgactttagaatgcctccgtgaggctacattartaaccataaagcatgaactatttaaagaagcaagaaaataccccctccatcaacttcttcaagatgaatcttcttacattttcgtaagtgttactcaaga

SEQ ID NO: 19052 - DNA, 201 bp, Homo sapiens
agttttatatgtaaaacttgcaaagaatcagaacaatgcctccacgaccatcatcaggtgaactgtggggcatccacttgatgcccccaagaatcctagtrgaatgtttactaccaaatggaatgatagtgactttagaatgcctccgtgaggctacattaataaccataaagcatgaactatttaaagaagcaagaaaat

SEQ ID NO: 19053 - DNA, 186 bp, Homo sapiens
gtttctgctttgggacaaccatacatctaattccttaaagtagttttatatgtaaaacttgcaaagaatcagaacaatgcctccamgaccatcatcaggtgaactgtggggcatccacttgatgcccccaagaatcctagtagaatgtttactaccaaatggaatgatagtgactttagaatgcct

SEQ ID NO: 19054 - DNA, 201 bp, Homo sapiens
tggactgttttacaatgccatcttattccagacgcatttccacagctacaccatatatgaatggagaaacatctacaaaatccctttgggttataaatagwgcactcagaataaaaattctttgtgcaacctacgtgaatgtaaatattcgagacattgataagatctatgttcgaacaggtatctaccatggaggagaac

SEQ ID NO: 19055 - DNA, 201 bp, Homo sapiens
aagtacaggacttccgaagaaatattctgaacgtttgtaaagaagctgtggatcttagggacctcaattcacctcatagtagagcaatgtatgtctatcckccaaatgtagaatcttcaccagaattgccaaagcacatatataataaattagataaagggcaaataatagtggtgatctgggtaatagtttctccaaata

SEQ ID NO: 19056 - DNA, 201 bp, Homo sapiens
gcatgccagtgtgtgaatttgatatggttaaagatccagaagtacaggacttccgaagaaatattctgaacgtttgtaaagaagctgtggatcttagggayctcaattcacctcatagtagagcaatgtatgtctatcctccaaatgtagaatcttcaccagaattgccaaagcacatatataataaattagataaagggc

SEQ ID NO: 19057 - DNA, 139 bp, Homo sapiens
ccatgtgcagtgcactcagaacacagagatcaatgggatgcagtcccacccacacacttcccatgtcagggctgatttccaacaggcaaaaaatgctacaygagatgtgttgatttgcaatgaattaaattataacttc

SEQ ID NO: 19058 - DNA, 201 bp, Homo sapiens
tcctcaatcgagaaattggttttgctatcggcatgccagtgtgtgaatttgatatggttaaagatccagaagtacaggacttccgaagaaatattctgaaygtttgtaaagaagctgtggatcttagggacctcaattcacctcatagtagagcaatgtatgtctatcctccaaatgtagaatcttcaccagaattgccaa

SEQ ID NO: 19059 - DNA, 201 bp, Homo sapiens
agatcctcaatcgagaaattggttttgctatcggcatgccagtgtgtgaatttgatatggttaaagatccagaagtacaggacttccgaagaaatattctkaacgtttgtaaagaagctgtggatcttagggacctcaattcacctcatagtagagcaatgtatgtctatcctccaaatgtagaatcttcaccagaattgc

SEQ ID NO: 19060 - DNA, 201 bp, Homo sapiens
taattgaaccagtaggcaaccgtgaagaaaagatcctcaatcgagaaattggttttgctatcggcatgccagtgtgtgaatttgatatggttaaagatccwgaagtacaggacttccgaagaaatattctgaacgtttgtaaagaagctgtggatcttagggacctcaattcacctcatagtagagcaatgtatgtctatc

SEQ ID NO: 19061 - DNA, 201 bp, Homo sapiens
atgaatcttcttacattttcgtaagtgttactcaagaagcagaaagggaagaattttttgatgaaacaagacgactttgtgaccttcggctttttcaaccmtttttaaaagtaattgaaccagtaggcaaccgtgaagaaaagatcctcaatcgagaaattggttttgctatcggcatgccagtgtgtgaatttgatatgg

SEQ ID NO: 19062 - DNA, 201 bp, Homo sapiens; identical to SEQ ID NO: 19051

SEQ ID NO: 19063 - DNA, 201 bp, Homo sapiens
agtagcccagatgtattgcttggtaaaagattggcctccaatcaaacctgaacaggctatggaacttctggactgtaattacccagatcctatggttcgargttttgctgttcggtgcttggaaaaatatttaacagatgacaaactttctcagtatttaattcagctagtacaggtcctaaaatatgaacaatatttgga

SEQ ID NO: 19064 - DNA, 201 bp, Homo sapiens; identical to SEQ ID NO: 19052

SEQ ID NO: 19065 - DNA, 201 bp, Homo sapiens
tattgcttggtaaaagattggcctccaatcaaacctgaacaggctatggaacttctggactgtaattacccagatcctatggttcgaggttttgctgttcrgtgcttggaaaaatatttaacagatgacaaactttctcagtatttaattcagctagtacaggtcctaaaatatgaacaatatttggataacttgcttgtg

SEQ ID NO: 19066 - DNA, 186 bp, Homo sapiens; identical to SEQ ID NO: 19053

SEQ ID NO: 19067 - DNA, 201 bp, Homo sapiens; identical to SEQ ID NO: 19054

SEQ ID NO: 19068 - DNA, 201 bp, Homo sapiens; identical to SEQ ID NO: 19055

SEQ ID NO: 19069 - DNA, 201 bp, Homo sapiens; identical to SEQ ID NO: 19056

SEQ ID NO: 19070 - DNA, 201 bp, Homo sapiens; identical to SEQ ID NO: 19058

SEQ ID NO: 19071 - DNA, 201 bp, Homo sapiens; identical to SEQ ID NO: 19059

SEQ ID NO: 19072 - DNA, 201 bp, Homo sapiens; identical to SEQ ID NO: 19060

SEQ ID NO: 19073 - DNA, 201 bp, Homo sapiens
tgttaaattacattgattggaaaagaatgaaaatttcttatttttccattgctgttcaatttatagtttgaagtgggtttttgactgcttgtttaatgaaraaaaatgcttggggtggaagggactcttgagatttcaccagagactttttctttttaataaatcaaaccttttgatgatttgaggttttatctgcagttt

SEQ ID NO: 19074 - DNA, 201 bp, Homo sapiens; identical to SEQ ID NO: 19061

SEQ ID NO: 19075 - DNA, 201 bp, Homo sapiens
aatcaaacctgaacaggctatggaacttctggactgtaattacccagatcctatggttcgaggttttgctgttcggtgcttggaaaaatatttaacagatracaaactttctcagtatttaattcagctagtacaggtcctaaaatatgaacaatatttggataacttgcttgtgagatttttactgaagaaagcattgac

SEQ ID NO: 19076 - DNA, 201 bp, Homo sapiens
aaaggtaaactttgaagattgtttgtatctttttttaaaaaacaaaacaaaacaaaaatccccaaaatatatagaaatgatggagaaggaaaaagtgatgkttttttttgtcttgcaaatgttctatgttttgaaatgtggacacaacaaaggctgttattgcattaggtgtaagtaaactggagtttatgttaaattaca

SEQ ID NO: 19077 - DNA, 194 bp, Homo sapiens
ctcaattccgcgccaggcctgccagacacctgcgccctcctgcagccaccgccacagctgccagcatgtctggcccagacatcaagacgccgamcgccatccagatctgccggattatgcggacgctaatgtggcccgcaatgtctaggcgggaccatcctgaagatgatcaaagaggcgggcgccatcatcag

SEQ ID NO: 19078 - DNA, 138 bp, Homo sapiens
gcggctttgcagatgacgccgccgaggaaaactgtgtrctattagccatggtcaaccccaccgtgttcttcgacattgccgtcgatggcgagcccttgggccgcgtctcctttgagctgttagctgacaaggtcccaa

SEQ ID NO: 19079 - DNA, 201 bp, Homo sapiens
ttgcactcaacattggcaaattggctcactttgaaccatctcagtgacaaaaccaagtgggtatagttcctcggtcacctccacaatccagatggaatccytggactactagcgacattgctgagggacctctggcttttgcttctccagagcaaataagcttggacctcaagaatgaattggtgtaccagttggaacagg

SEQ ID NO: 19080 - DNA, 201 bp, Homo sapiens
tgtcgttgactcctgcaagcagaaagtgaaactctttgctactcacaacaatatgaccaactatgctacagtatggggatcaaaaacaaaccttgaacagyggaaagggcaacctggccgaatacggcctggattctgctttcacctctgcagccgagctcgttttgagagacttgaaacccacatgacaccagagatgtt

SEQ ID NO: 19081 - DNA, 201 bp, Homo sapiens
cagaaagtgaaactctttgctactcacaacaatatgaccaactatgctacagtatggggatcaaaaacaaaccttgaacagtggaaagggcaacctggccraatacggcctggattctgctttcacctctgcagccgagctcgttttgagagacttgaaacccacatgacaccagagatgttccaaacaccattgcatgaa

SEQ ID NO: 19082 - DNA, 201 bp, Homo sapiens
ccagctttttggggttgcatctctgcccccacttactgatattcctgacactacagcaaatgctgaaggaggtttaccaacaaccatgggaggtcctcttscgccacatctggctctcaaagctgaaaataattctgaggtaggggcctctggctatggtgttcctgggaccaaggagccaacttgaaggattactactca

SEQ ID NO: 19083 - DNA, 201 bp, Homo sapiens
atcatttgagagctaaattttgagattatgcccccgcctgaagatccttctatgccagttgcactcaacattggcaaattggctcactttgaaccatctcrgtgacaaaaccaagtgggtatagttcctcggtcacctccacaatccagatggaatccttggactactagcgacattgctgagggacctctggcttttgct

SEQ ID NO: 19084 - DNA, 201 bp, Homo sapiens
ttctgcacatgaacatggatcaaataagaaattggcagcacagtcctgtgccctgtcactagtcagacaactctaccatcttggagtggttgaagcttacwtcagacttacaaagaaggaaggagagagagtggaaccttacaaagtaaacctctctcaagatttagagcatcagccacaaaacatcatttgagagctaaa

SEQ ID NO: 19085 - DNA, 201 bp, Homo sapiens
gcccagaagaatcagtgtagtttccatggcagagtgagttgcatttgagagaggagaagagtctgtaaaaagctgtggttacagtgttcaatttgagtctrtacttccttgtcctcatgccagtataatgctttgtactgtaggtgtgctcctaagaaaattagaagcaggcatttgaggaatcagtcatgtaattgtaga

SEQ ID NO: 19086 - DNA, 201 bp, Homo sapiens
gcatgttgtgtgaatatttcttcaattgccccatcatttaagtgtatgggaggacttacccagttcaagaatattttctggaagactgcattcagatgacycactttgttccttcaccgaaaaccaagaagaaggacaaggatgatgatggtggtgaggatgatgatgcaaattgcaacttgatctgtggtgatgaatatg

SEQ ID NO: 19087 - DNA, 201 bp, Homo sapiens
attccttgacaggaacagcgcaaagtgtttgatccagtaccagttggagtaaccaaggttattttgtccacaaatattgctgaaacaagcattatcataaytgatgtttatgtcgttgactcctgcaagcagaaagtgaaactctttgctactcacaacaatatgaccaactatgctacagtatggggatcaaaaacaaac

SEQ ID NO: 19088 - DNA, 201 bp, Homo sapiens
gctatggcagtggctatagcagtggaggctatcgtagcggaggctatggtggcagctccagctcctgtcgggcaggatatggtgcaggtgttggtggaggstatagagaagtttcctgaggtggctatagaggcaactctggaggagattacagagggcctagtagaggctacagatgatctgggggattccagcgaggag

SEQ ID NO: 19089 - DNA, 201 bp, Homo sapiens
tgctgaaacaagcattatcataaatgatgtttatgtcgttgactcctgcaagcagaaagtgaaactctttgctactcacaacaatatgaccaactatgctrcagtatggggatcaaaaacaaaccttgaacagtggaaagggcaacctggccgaatacggcctggattctgctttcacctctgcagccgagctcgttttga

SEQ ID NO: 19090 - DNA, 201 bp, Homo sapiens
tgagcctcgttttggcaaaatgatgataatggtgtgtattttctatgtgggagatgctatctgtaccattcctgctgctacctgctttccagagccttttrtaaatgaaggaaagtggctgggctacaaccattgaaattttgctggaaacggattttctcatcatgtagcccttttatcagtattccaagccggagatga

SEQ ID NO: 19091 - DNA, 190 bp, Homo sapiens
ttctgcacatgaacatggatcaaataagaaattggcagcacagtcctgtgccctgtcactagtcagacaactctaccatcttggagtggttgaagcttacwtcagacttacaaagaaggaaggagagagagtggaaccttacaaagtaaacctctctcaagatttagagcatcagccacaaaacatcatt

SEQ ID NO: 19092 - DNA, 106 bp, Homo sapiens
atgacycactttgttccttcaccgaaaaccaagaagaaggacaaggatgatgatggtggtgaggatgatgatgcaaattgcaacttgatctgtggtgatgaatatg

SEQ ID NO: 19093 - DNA, 201 bp, Homo sapiens; identical to SEQ ID NO: 19080

SEQ ID NO: 19094 - DNA, 201 bp, Homo sapiens; identical to SEQ ID NO: 19081

SEQ ID NO: 19095 - DNA, 116 bp, Homo sapiens
gctatggcagtggctatagcagtggaggctatcgtagcggaggctatggtggcagctccagctcctgtcgggcaggatatggtgcaggtgttggtggaggstatagagaagtttcc

SEQ ID NO: 19096 - DNA, 201 bp, Homo sapiens; identical to SEQ ID NO: 19089

SEQ ID NO: 19097 - DNA, 201 bp, Homo sapiens
tgttgctggttttgtccatcatggaactgtcctggattgtgaggagaaagactgggacttctcgatgaatctcaatgtgcgcagcacgtacctgatgatcraggcattccttcctaaaatgcttgctcaaaaatctggcaatattatcaccatgttttctgtggtttccagcatcaaaggagttgtgaacagatgtgtgta

SEQ ID NO: 19098 - DNA, 126 bp, Homo sapiens
agtttgttgctcccaccgagttctgragaacgccagcagctcgctgcttaaaattaaaccacagggttccatgatgggtcgacttgatgggaaagtcatcatcctgacagccgctgctcaggggat

SEQ ID NO: 19099 - DNA, 181 bp, Homo sapiens
agtttgttgctcccaccgagttctggagaacgccagcagctcgctgcttaaaattaaaccacagggttccatgatgggtcracttgatgggaaagtcatcatcctgacagccgctgctcaggggattggccaagcagctgccttagcttttgtaagagaaggtgccaaagtcatagccaca

SEQ ID NO: 19100 - DNA, 201 bp, Homo sapiens
gacattaatgtgtccaaacttcaggaactggaaaagtacctgggtattcaaactcgtgtccttgatgtcacaaagaagaaacaaattgatcagttcgccartgaagttgagagacttgatgttctctttaatgttgctggttttgtccatcatggaactgtcctggattgtgaggagaaagactgggacttctcgatgaat

SEQ ID NO: 19101 - DNA, 201 bp, Homo sapiens
ggttccatgatgggtcgacttgatgggaaagtcatcatcctgacagccgctgctcaggggattggccaagcagctgccttagcttttgtaagagaaggtgycaaagtcatagccacagacattaatgtgtccaaacttcaggaactggaaaagtacctgggtattcaaactcgtgtccttgatgtcacaaagaagaaacaa

SEQ ID NO: 19102 - DNA, 201 bp, Homo sapiens
caggtcctggcatcttgtccatggcaaatgctggacccaacacaaatggttcccagtttttcatctgcactgccaagagtgagtggttggatggcaagcaygtgctctttggcaaagtgaaagaaggcacgaatattgtggaggcatggagtgctttgggtccaggaatggcaagaccagcaagaagatcaccattgctga

SEQ ID NO: 19103 - DNA, 201 bp, Homo sapiens
taggtcaggatgttgatggagacaggatggaaatcattgaactggcaaatcatccttattttgttggtgtccagttccatcctgagttttcttctaggccratgaagccttcccctccgtatctggggctgttacttgcagcaactgggaacctgaatgcctacttgcaacagggttgcaaactgtcttccagtgatagat

SEQ ID NO: 19104 - DNA, 149 bp, Homo sapiens
atatacaccttatatacatagcctaaaggtaatttgatacaatattttaaataattttgtgcatgaaacaaagtttcgactgcattttgactgtgatttcwggcatgagatcagttatggaattttccacttctagcgtcatgttggca

SEQ ID NO: 19105 - DNA, 201 bp, Homo sapiens
taatacatacttctgtcaaccagaaccagaggggtagttttcttttccctccagaggcagcctttggtacttaaaatatctgtagctgattaaatttttcycaacaacctcactggggagaaagtgtgttcatgttttgtccagcggatcaggatgttaggatgacgagcaagagtccaggtcactgtgcctttgctgtgt

SEQ ID NO: 19106 - DNA, 201 bp, Homo sapiens; identical to SEQ ID NO: 19103

SEQ ID NO: 19107 - DNA, 149 bp, Homo sapiens; identical to SEQ ID NO: 19104

SEQ ID NO: 19108 - DNA, 201 bp, Homo sapiens; identical to SEQ ID NO: 19105

SEQ ID NO: 19109 - DNA, 201 bp, Homo sapiens
atctgtggttattcgaacctttattactagtgactccctgactggtatacctgcaacacctggcaatgagatccctgtagaggtggtattaaagatggtcmctgagattaagaagattcctggtatttctcgaattatagccggaggctgctacctgcatttcacaggtgagaaaaccaaggcacacgaggccatgccctc

SEQ ID NO: 19110 - DNA, 201 bp, Homo sapiens
atctgtggttattcgaacctttattactagtgactccctgactggtatacctgcaacacctggcaatgagatccctgtagaggtggtattaaagatggtcmctgagattaagaagattcctggtatttctcgaattatgtatgacttaacatcaaagcccccaggaactactgagtgggagtaataaacttcttgttctat

SEQ ID NO: 19111 - DNA, 201 bp, Homo sapiens
agcgtctctttcacaagatgctctccgtgagccacagccaggagaaggagggcatcagcaactggctgggcaacatgcttcagtttctgagggagcagggkgtaccctcagctatgcaggacaagttcaacttcatgatgctctgggcctcccaggggaacacggggcctacctctttctgggccctcttgtacctcctga

SEQ ID NO: 19112 - DNA, 201 bp, Homo sapiens
tctttgcactcagtgaggtgaagctctttatcctgcttatggtcacacactttgacttagagttggtggaccctgacacaccactaccccatgttgacccrcagcgctggggttttggcaccatgcagcccagccacgatgtgcgcttccgctaccgcctgcatcctacagagtgagcttggccaagccagctgcaaacct

SEQ ID NO: 19113 - DNA, 201 bp, Homo sapiens
gtctggtatgtactgtacttttgcagttcttcccagttcagactagccacattccaagtgcttaattgccgtgtgtggcaggtggctgccctattggatascaacaggtctagagaaatgatacctttttttttttttgagacagagtctcactctgttgcccaggctgcagtgcagtggtgtgatcttggctcactacaa

SEQ ID NO: 19114 - DNA, 201 bp, Homo sapiens
ttggccaatgcagaacttggcatctgaacccctgcctcttccctgaaccactcctcctcctgatttccctgctctctctgctcagaacactaccattcacyccatctcccagagacactctccctcctcctctttcaccttcatacaagcaggcccccgtcctatcagtacacccccctgtgatgcctctgaaatatgtac

SEQ ID NO: 19115 - DNA, 201 bp, Homo sapiens
gagttccgcaagtttgaccttcttttcccaaggtttgtctactccctgctgtggccccgggagtggctagaagtgggccgactccagcgtctctttcacargatgctctccgtgagccacagccaggagaaggagggcatcagcaactggctgggcaacatgcttcagtttctgagggagcagggggtaccctcagctatg

SEQ ID NO: 19116 - DNA, 201 bp, Homo sapiens
tgaatttctgaagcgcatgaggaccaagcatggggatgtgttcacagtgcagctagggggccagtacttcaccttcgtcatggaccccctctcctttggcyccatcctcaaggacacacagagaaaactagactttgggcaatatgcaaaaaaactggtgctgaaggtatttggataccgttcagtgcaaggggaccatga

SEQ ID NO: 19117 - DNA, 201 bp, Homo sapiens
ctggtatgtactgtacttttgcagttcttcccagttcagactagccacattccaagtgcttaattgccgtgtgtggcaggtggctgccctattggatagcmacaggtctagagaaatgatacctttttttttttttgagacagagtctcactctgttgcccaggctgcagtgcagtggtgtgatcttggctcactacaacc

SEQ ID NO: 19118 - DNA, 201 bp, Homo sapiens
agcagtcctttgccttcaaactcggtgccctgcaacacaccccagttctagacagcgtggtggaggagacgctgcggctgagggctgcacccaccctcctyaggttggttcatgaagactataccctgaagatgtccagtgggcaggagtatctgttccgccatggagacatcctggccctctttccctacctctcagtgc

SEQ ID NO: 19119 - DNA, 201 bp, Homo sapiens
caagcagtcctttgccttcaaactcggtgccctgcaacacaccccagttctagacagcgtggtggaggagacgctgcggctgagggctgcacccaccctcytcaggttggttcatgaagactataccctgaagatgtccagtgggcaggagtatctgttccgccatggagacatcctggccctctttccctacctctcagt

SEQ ID NO: 19120 - DNA, 201 bp, Homo sapiens
accctcagctatgcaggacaagttcaacttcatgatgctctgggcctcccaggggaacacggggcctacctctttctgggccctcttgtacctcctgaagyacccagaagctattcgggctgtgagggaggaagctacccaggtcctgggtgaggccaggctggagaccaagcagtcctttgccttcaaactcggtgccct

SEQ ID NO: 19121 - DNA, 201 bp, Homo sapiens
ttcctggttcccctttgacttcacacacttgacgtttacattttgtcacagttggtcccccttgccttcacatacctgatgtttaaattttgtcacggttrgtctccaaacttctcaactttgccagctttctccaatgaaaccatcagtagagacattgctgttcctgcccatcccagtgccagctactccttcctggaa

SEQ ID NO: 19122 - DNA, 201 bp, Homo sapiens
tgcccatcccagtgccagctactccttcctggaagccttcctggatttcacgcatcccatcctctggccagaaatggcctccgaactgtgcagctcctgcrgcaccatttgtatcatagcatatctgttatgtgtcgttgctttctgtgtcttggtttctgcctgctgcccacttccctagactggagcctactggggcat

SEQ ID NO: 19123 - DNA, 201 bp, Homo sapiens
atagtttaccttcggaccaatcctgagacttgttaccagaggttaaagaagagatgcagggaagaggagaaggtcattccgctggaatacctggaagcaawtcaccatctccatgaggagtggctcatcaaaggcagccttttccccatggcagcccctgttctggtgattgaggctgaccaccacatggagaggatgtta

SEQ ID NO: 19124 - DNA, 201 bp, Homo sapiens
ttatgctgcatttggctggagcccggtgttcagtggtttccctgcccgaggtcgctgcagccccatctaccacatcttcatgtggacattgagattcacaygctggctcctgaagggtgctcagtctccttggtgattaaggggcagccagccctggcttccaaggctcccgtactgtctgtgtccttgtataaggagctt

SEQ ID NO: 19125 - DNA, 201 bp, Homo sapiens
aaatgtccgtggccacaatcctctgggcctgatgtaccacgatgcctctcgctggggtcttacgctacagacttatgtgcagctcaccatgctggacaggmatactcgtcctcaggtgtcatctgtacggttgatggagaggtcgattcacagcgcaagatacatttttgtagaaaacctgtatagaagtgggaagatgcc

SEQ ID NO: 19126 - DNA, 201 bp, Homo sapiens; identical to SEQ ID NO: 19123

SEQ ID NO: 19127 - DNA, 187 bp, Homo sapiens
gtctctttaagggccaggcgccgggatccaggcggcgcccaacggctggactagcagtcgtccgcgccgactcgcacaagaaggaascccgggcctctggatccgctcgcccggctatgctgctgtggccgctgcggggctgggccgcccgggcgctgcgctgctttgggccgggaagtcgcgggag

SEQ ID NO: 19128 - DNA, 201 bp, Homo sapiens
ttatgctgcatttggctggagcccggtgttcagtggtttccctgcccgaggtcgctgcagccccatctaccacatcttcatgtggacattgagattcacaygctggctcctgaagggtgctcagtctccttggtgattaaggtcctgcttgaactgctgccaactccatgtcagggaagtcgcttttggtgcctggctggt

SEQ ID NO: 19129 - DNA, 201 bp, Homo sapiens; identical to SEQ ID NO: 19125

SEQ ID NO: 19130 - DNA, 179 bp, Homo sapiens
gtctctttaagggccaggcgccgggatccaggcggcgcccaacggctggactagcagtcgtccgcgccgactcgcacargaaggaaccccgggcctctggatccgctcgcccggctatgctgctgtggccgctgcggggctgggccgcccgggcgctgcgctgctttgggccgggaagt

SEQ ID NO: 19131 - DNA, 201 bp, Homo sapiens; identical to SEQ ID NO: 19123

SEQ ID NO: 19132 - DNA, 187 bp, Homo sapiens; identical to SEQ ID NO: 19127

SEQ ID NO: 19133 - DNA, 201 bp, Homo sapiens; identical to SEQ ID NO: 19124

SEQ ID NO: 19134 - DNA, 201 bp, Homo sapiens; identical to SEQ ID NO: 19125

SEQ ID NO: 19135 - DNA, 179 bp, Homo sapiens; identical to SEQ ID NO: 19130

SEQ ID NO: 19136 - DNA, 201 bp, Homo sapiens; identical to SEQ ID NO: 19123

SEQ ID NO: 19137 - DNA, 201 bp, Homo sapiens; identical to SEQ ID NO: 19128

SEQ ID NO: 19138 - DNA, 201 bp, Homo sapiens; identical to SEQ ID NO: 19125

SEQ ID NO: 19139 - DNA, 201 bp, Homo sapiens
gaaaggcaagaagatttttattatgaagcgttcccagtgccacattgttgaaaagggaggcaagcataagactgggccaaatctccatggtctcttcgggyggaagacaggtcaggcccctggacactcttacatagccaccattaagaacaaagacatcatctggggagaggatacactgatggagtatttggagaatcc

SEQ ID NO: 19140 - DNA, 201 bp, Homo sapiens
cagtgccacattgttgaaaagggaggcaagcataagactgggccaaatctccatggtctcttcgggcggaagacaggtcaggcccctggacactcttacayagccaccattaagaacaaagacatcatctggggagaggatacactgatggagtatttggagaatcccaagaagtacatccctggaacaaaaatgatcttt

SEQ ID NO: 19141 - DNA, 201 bp, Homo sapiens
tttaaaatggttccttttacttattgaaaggcattttagtgtggtttatgtgtaatattaaagattattcaacacctctcacatcttatagatctataagrtcacatgcttttaaaatagtagcaagttaaacttcactcttgaattctttacaatctaagtcaaactaggttataatttaggattgtctttaaacagcca

SEQ ID NO: 19142 - DNA, 201 bp, Homo sapiens
aaacttgaaaaaacaacatacatggctcctattggtaaaactggaacttgggactcagtgaaacatacaaccaggaaagaacagactggtgatgatgtagyggtcatccctgtgctgcagagaacgcttcactacgagtgtatcgttctggtgaaacagtcctgaccaccaatgggtggctactgcatagagttccctgca

SEQ ID NO: 19143 - DNA, 201 bp, Homo sapiens
agctcagttcttgattcgtattgggtctgttggccgaaatagggctgaagcctctttggagcgagctcagaatcttaaccccatggtggatgtgaagttgsacactgaggatatagagaagaaaccagagtcatttttcactcaatttgatgctgtgtgttgacttgctgctccagggctgtcatagttaaggttgaccag

SEQ ID NO: 19144 - DNA, 201 bp, Homo sapiens
tgcaggcatgaaaggactcggggctgaaattgccaagaatctcatcctggcaggagtgaaaggactgaccatgctggatcacaaacagatatctccagaakaacccggagctcagttcttgattcgtattgggtctgttggccgaaatagggctgaagcctctttggagcgagctcagaatcttaaccccatggtggatgt

SEQ ID NO: 19145 - DNA, 201 bp, Homo sapiens
gagtcatttttcactcaatttgatgctgtgtgttgacttgctgctccagggctgtcatagttaaggttgaccagatctgtcacaaaaatagcatcaagttmtttgcaggagatgtttttagctaccatggatacacatttgccaatctaggagaacatgagtttgtagaggagaaaactaaagttgctaaagttagccaag

SEQ ID NO: 19146 - DNA, 201 bp, Homo sapiens
gccatccagtccagcgcactgtatgaggaccactacctcctgggtacttctctcaccaggccctgcatcgcccacaaaaaagtggaaaccgtccagcgggwgggggccaagtatgaaggtccctggagggctccctggaggatgcccgagttctacaactggttcaagggccgcagtgacctgatggaatatgcaaagcaa

SEQ ID NO: 19147 - DNA, 201 bp, Homo sapiens
accccaagaaccaagtgcctccaggtctctacacaaagatccaggacccagccaaagcccccaacacccctgacattctcaagatccaattcaaaaaaggrgtccccgtgagggtgaccagcgtcaaggatggcaccacccaccagacctccttggagctcttcatgtacctgaacgaagttgcaggcaagcacggtgtgg

SEQ ID NO: 19148 - DNA, 201 bp, Homo sapiens
ccgagttctacaactggttcaagggccgcagtgacctgatggaatatgcaaagcaacacgggattcccatcctggtcactcccaagaacctgtggagcatsgacaagaacctcatgcacatcagctacaaggctggaatcctggagaaccccaagaaccaagtgcctccaggtctctacacaaagatccaggacccagcca

SEQ ID NO: 19149 - DNA, 152 bp, Homo sapiens
gctgggagtccccactgtctctctacaatgaggagctgatgagcgtgaacgtgcagggtgattatgagccgattgatgacaccgggttcatcaacatcaaytccctcagactgaaggaataccattgtctccagagtaagttcactgccaga

SEQ ID NO: 19150 - DNA, 119 bp, Homo sapiens
caaacccagtgtaagttaycaggctaattcttgcatatagcagtaaacacatggagtttacagtgtaatgaaaaaggcaagcattaaacaggtgaattaaacagtgatgagtgctatga

SEQ ID NO: 19151 - DNA, 201 bp, Homo sapiens
tacagtggaaatttttaaatttgaagaagcagaaaattctctgttgcatctgaaaacagtcaaacatgagcttcttccaagtgtgaatgacatcacagctsttggaccggcacatttctatgccacaaatgaccactacttctctgatcctttcttaaagtatttagaaacatacttgaacttacactgggcaaatgttgt

SEQ ID NO: 19152 - DNA, 201 bp, Homo sapiens
gacatctgggtaggctgtcatcctaatggccagaagctcttcgtgtatgacccgaacaatcctccctcgtcagaggttctccgcatccagaacattctatstgagaagcctacagtgactacagtttatgccaacaatgggtctgttctccaaggaagttctgtagcctcagtgtatgatgggaagctgctcataggcact

SEQ ID NO: 19153 - DNA, 201 bp, Homo sapiens
agaacatggattccactgaaatagagtgaattatatttccttaaaatgtgagtgacctcacttctggcactgtgactactatggctgtttagaactactgwtaacgtattttgatgttttgtacttacatctttgtttaccattaaaaagttggagttatattaaagactaactaaaatcccagttttgtctgtgtttaat

SEQ ID NO: 19154 - DNA, 201 bp, Homo sapiens
ggcatcagcactttcatagacaacgatgacacagtttatctctttgttgtaaaccacccagaattcaagaatacagtggaaatttttaaatttgaagaagsagaaaattctctgttgcatctgaaaacagtcaaacatgagcttcttccaagtgtgaatgacatcacagctgttggaccggcacatttctatgccacaaat

SEQ ID NO: 19155 - DNA, 201 bp, Homo sapiens; identical to SEQ ID NO: 19151

SEQ ID NO: 19156 - DNA, 201 bp, Homo sapiens; identical to SEQ ID NO: 19152

SEQ ID NO: 19157 - DNA, 201 bp, Homo sapiens; identical to SEQ ID NO: 19153

SEQ ID NO: 19158 - DNA, 201 bp, Homo sapiens
agtcgtgggtttgatttggcctcattcaatccacatggcatcagcactttcatagacaacgaattcaagaatacagtggaaatttttaaatttgaagaagsagaaaattctctgttgcatctgaaaacagtcaaacatgagcttcttccaagtgtgaatgacatcacagctgttggaccggcacatttctatgccacaaat

SEQ ID NO: 19159 - DNA, 201 bp, Homo sapiens
ccatcctttctacagcaacatcagtaaggatcgtaggtatgcagacctcacagatgatcagctatcctcctgtgagagtctgaaggacactattgccagckctctgcccttttggaataaagaaatagttccccagatcaaggaagggaaatgggtactgattgcagcccatggcaacagcctccggggcattgtcaagca

SEQ ID NO: 19160 - DNA, 201 bp, Homo sapiens
gcctcccaagcccgccgccatggccgcctacaaactggtgctgatccagcatggagagtgcatggaacctggagatccacttcagcagctggtacgactcygacctgagcccggcaggccaccaggaggtgaagcgcaggcgggcaggcgctgctagatgttggctatgagtttgacatctgcttcacctcagtgcagaag

SEQ ID NO: 19161 - DNA, 201 bp, Homo sapiens
cctgctggagcctgaccatcctttctacagcaacatcagtaaggatcgtaggtatgcagacctcacagatgatcagctatcctcctgtgagagtctgaagracactattgccagcgctctgcccttttggaataaagaaatagttccccagatcaaggaagggaaatgggtactgattgcagcccatggcaacagcctccg

SEQ ID NO: 19162 - DNA, 201 bp, Homo sapiens
accttcccgacggtcaaccctaccaccggggaggtcatcgggcacgtggctgaaggtgaccgggctgatgtggatcgggccgtgaaagcagcccgggaagycttccgcctggggtccccatggcgccggatggatgcctctgagcggggccggctgctgaacctcctggcagacctagtggagcgggatcgagtctacttg

SEQ ID NO: 19163 - DNA, 201 bp, Homo sapiens
gccaacaacaccaggtatggcctggctgcggctgtgttcacccgggatctggacaaggccatgtacttcacccaggcactccaggccgggaccgtgtgggyaaacacctacaacatcgtcacctgccacacgccatttggagggtttaaggaatctggaaacgggagggagctgggtgaggatgggcttaaggcctacaca

SEQ ID NO: 19164 - DNA, 201 bp, Homo sapiens
gtatttggcctccctcatcaaggaggcaggctttccccctggggtggtgaacatcatcacggggtatggcccaacagcaggtgcggccatcgcccagcacrtggatgttgacaaagttgccttcaccggttccaccgaggtgggccacctgatccagaaagcagctggcgattccaacctcaagagagtcaccctggagct

SEQ ID NO: 19165 - DNA, 201 bp, Homo sapiens
gaggtaaagacggtcaccatcaaggttcctcagaagaactcgtaagagcagctgtcagggaggcccagtcacagtccagcaattccacaaccaccttgacsaatgcttgccaagctgttttaaagccaagaacaccctttctttgttccaaattaactcttagaagaaaccccacaaataaagcaattcaatcaaggctgt

SEQ ID NO: 19166 - DNA, 201 bp, Homo sapiens
cagacatcccctacaaccagctgttcatcaacaatgaatggcaagatgcagtcagcaagaagaccttcccgacggtcaaccctaccaccggggaggtcatygggcacgtggctgaaggtgaccgggctgatgtggatcgggccgtgaaagcagcccgggaagccttccgcctggggtccccatggcgccggatggatgcct

SEQ ID NO: 19167 - DNA, 201 bp, Homo sapiens
ccattctgaacccagacatcccctacaaccagctgttcatcaacaatgaatggcaagatgcagtcagcaagaagaccttcccgacggtcaaccctaccacyggggaggtcatcgggcacgtggctgaaggtgaccgggctgatgtggatcgggccgtgaaagcagcccgggaagccttccgcctggggtccccatggcgcc

SEQ ID NO: 19168 - DNA, 201 bp, Homo sapiens
gatcatcccgtggaacttccccttggtcatgcagggttggaaacttgccccggcactcgccacaggcaacactgtggttatgaaggtggcagagcagaccyccctctctgccctgtatttggcctccctcatcaaggaggcaggctttccccctggggtggtgaacatcatcacggggtatggcccaacagcaggtgcggc

SEQ ID NO: 19169 - DNA, 201 bp, Homo sapiens
gctgatgtggatcgggccgtgaaagcagcccgggaagccttccgcctggggtccccatggcgccggatggatgcctctgagcggggccggctgctgaacckcctggcagacctagtggagcgggatcgagtctacttggcctcactcgagaccttggacaatgggaagcctttccaagagtcttacgccttggacttggat

SEQ ID NO: 19170 - DNA, 201 bp, Homo sapiens
ctgaactgaagggcacaggctgcaaagtgccccaagatgtcctgcaaaaattgctgtaatctttataggagaaccacttccaagaagatgagcagtttctsggagccgttacgccaaggcttggcattggaatggatactcgtgtcattcctttgaggcacggtgggctttccttggttcaaactacagattacgtttacc

SEQ ID NO: 19171 - DNA, 103 bp, Homo sapiens
aaagaacccagccaacccgcagagggtggggagggggcaagctgtgaggagagcggacccaagaaccatgtctacgcgtgagtcctttaaccccgaaagttac

SEQ ID NO: 19172 - DNA, 201 bp, Homo sapiens
gaagcaggaacatctgtaatgggtggccaaaccatactaaacccctggattgccctgggaggagtcgctaccactgtctgccagcccaatgaatttatcayggccagccccaagttggaccagcaacaggggatggtgttccctcctgggatctgtgaggcagcagctgaaggacagataaatttgaagttggagaagacc

SEQ ID NO: 19173 - DNA, 201 bp, Homo sapiens
tccatgatgggcaggatagcacgtgccagtgtcttcagtgacctctacgcaatgtgggtcacggaatgtgacaatatgctgatgctccttggagtcagtcmtaaaatgaccgacagggaaagggataaaatgatgtctctgattatccagggttttaaagacgcagctgaggaagcaggaacatctgtaatgggtggccaa

SEQ ID NO: 19174 - DNA, 201 bp, Homo sapiens
ttaaattgagtgatgaggagatggcaaccatactcagcttcaacagaaactggagggcctttgacttcaaggaattctctcatttggaggactttcccttygatgcagaatattgaggttgaatctcctggtgagattacacaggggattctctttcttcgctgaagtgtgactgtctccactcaagaactattttagcca

SEQ ID NO: 19175 - DNA, 201 bp, Homo sapiens
ttgacttcaaggaattctctcatttggaggactttcccttcgatgcagaatattgaggttgaatctcctggtgagattacacaggggattctctttcttcrctgaagtgtgactgtctccactcaagaactattttagccaagcttatctgagatcacagtgaactttgtcctgttgtagaccagaatggaggtgctgttt

SEQ ID NO: 19176 - DNA, 201 bp, Homo sapiens
catacctcacgcaggagaaactgatccagtactgccactccaagggcatcaccgttacggcctacagccccctgggctctccggatagaccttgggccaarcctgaggacccttccctgctggaggatcccaagattaaggagattgctgcaaagcacaaaaaaaccacagcccaggttctgatccgtttccatatccaga

SEQ ID NO: 19177 - DNA, 201 bp, Homo sapiens
tcacgcaggagaaactgatccagtactgccactccaagggcatcaccgttacggcctacagccccctgggctctccggatagaccttgggccaaacctgargacccttccctgctggaggatcccaagattaaggagattgctgcaaagcacaaaaaaaccacagcccaggttctgatccgtttccatatccagaggaatg

SEQ ID NO: 19178 - DNA, 201 bp, Homo sapiens
ccccctgggctctccggatagaccttgggccaaacctgaggacccttccctgctggaggatcccaagattaaggagattgctgcaaagcacaaaaaaaccrcagcccaggttctgatccgtttccatatccagaggaatgtgacagtgatccccaagtctatgacaccagcacacattgttgagaacattcaggtctttga

SEQ ID NO: 19179 - DNA, 201 bp, Homo sapiens; identical to SEQ ID NO: 19174

SEQ ID NO: 19180 - DNA, 201 bp, Homo sapiens; identical to SEQ ID NO: 19175

SEQ ID NO: 19181 - DNA, 201 bp, Homo sapiens; identical to SEQ ID NO: 19176

SEQ ID NO: 19182 - DNA, 201 bp, Homo sapiens; identical to SEQ ID NO: 19177

SEQ ID NO: 19183 - DNA, 201 bp, Homo sapiens; identical to SEQ ID NO: 19178

SEQ ID NO: 19184 - DNA, 201 bp, Homo sapiens
ctgtggaggactctacctaaggtcagagcagcgagataccccacctccctcaacctcatcctctccacagctgcctcttccctcttccttccctgctgtgraagaagtaactacagttagggctcctattcaacacacacatgcttccctttcctgagtcccatccctgcgtgattttgggggtgaagagtgggttgtgag

SEQ ID NO: 19185 - DNA, 201 bp, Homo sapiens
ggagcccatatgtgccagtccactttgatgcttctgtggaggactctacctaaggtcagagcagcgagataccccacctccctcaacctcatcctctccamagctgcctcttccctcttccttccctgctgtgaaagaagtaactacagttagggctcctattcaacacacacatgcttccctttcctgagtcccatccct

SEQ ID NO: 19186 - DNA, 201 bp, Homo sapiens
aagaaattccagcggcagcatatggactcagacagttcccccagcagcagctccacctactgtaaccaaatgatgaggcgccggaatatgacacaggggckgtgcaaaccagtgaacacctttgtgcacgagcccctggtagatgtccagaatgtctgtttccaggaaaaggtcacctgcaagaacgggcagggcaactgc

SEQ ID NO: 19187 - DNA, 201 bp, Homo sapiens
gactctacctaaggtcagagcagcgagataccccacctccctcaacctcatcctctccacagctgcctcttccctcttccttccctgctgtgaaagaagtwactacagttagggctcctattcaacacacacatgcttccctttcctgagtcccatccctgcgtgattttgggggtgaagagtgggttgtgaggtgggccc

SEQ ID NO: 19188 - DNA, 201 bp, Homo sapiens
gaaagaagtaactacagttagggctcctattcaacacacacatgcttccctttcctgagtcccatccctgcgtgattttgggggtgaagagtgggttgtgwggtgggccccatgttaacccctccactctttctttcaataaaacgcagttgcaaacacctgatttctgaagcggttctgtctaggtactgtttctggcat

SEQ ID NO: 19189 - DNA, 201 bp, Homo sapiens
cctcaacctcatcctctccacagctgcctcttccctcttccttccctgctgtgaaagaagtaactacagttagggctcctattcaacacacacatgcttcyctttcctgagtcccatccctgcgtgattttgggggtgaagagtgggttgtgaggtgggccccatgttaacccctccactctttctttcaataaaacgcag

SEQ ID NO: 19190 - DNA, 201 bp, Homo sapiens
ccacagctgcctcttccctcttccttccctgctgtgaaagaagtaactacagttagggctcctattcaacacacacatgcttccctttcctgagtcccatycctgcgtgattttgggggtgaagagtgggttgtgaggtgggccccatgttaacccctccactctttctttcaataaaacgcagttgcaaacacctgattt

SEQ ID NO: 19191 - DNA, 201 bp, Homo sapiens; identical to SEQ ID NO: 19184

SEQ ID NO: 19192 - DNA, 201 bp, Homo sapiens; identical to SEQ ID NO: 19185

SEQ ID NO: 19193 - DNA, 201 bp, Homo sapiens; identical to SEQ ID NO: 19186

SEQ ID NO: 19194 - DNA, 201 bp, Homo sapiens; identical to SEQ ID NO: 19187

SEQ ID NO: 19195 - DNA, 201 bp, Homo sapiens; identical to SEQ ID NO: 19188

SEQ ID NO: 19196 - DNA, 201 bp, Homo sapiens; identical to SEQ ID NO: 19189

SEQ ID NO: 19197 - DNA, 201 bp, Homo sapiens; identical to SEQ ID NO: 19190

SEQ ID NO: 19198 - DNA, 201 bp, Homo sapiens
gtgctgctgcccagtacaaattcttcattgttgcctgtgacccccctcagaagagcgatcccccctacaagttggttcctgtacacttagatagtattctstaaggcatccactgcatttcctttcatttgacatagcttctgttacaattgcatccacgttttcttttcttttgttgattttcttgttcccgtagaagaa

SEQ ID NO: 19199 - DNA, 201 bp, Homo sapiens
gcaaaaatcgtcggcacaactgccaccagagctcaaagcctgtcaacatgactgactgcagactcacttcaggaaagtatccccagtgccgctatagtgcygctgcccagtacaaattcttcattgttgcctgtgacccccctcagaagagcgatcccccctacaagttggttcctgtacacttagatagtattctctaag

SEQ ID NO: 19200 - DNA, 201 bp, Homo sapiens
tatacccagcactgtaagcatcaaaatacctttctgcatgactctttccagaatgtggctgctgtctgtgatttgctcagcattgtctgcaaaaatcgtcrgcacaactgccaccagagctcaaagcctgtcaacatgactgactgcagactcacttcaggaaagtatccccagtgccgctatagtgctgctgcccagtac

SEQ ID NO: 19201 - DNA, 201 bp, Homo sapiens
agccaagtcctctccaatgcaacagggcaatgagtggcatcaacaattatacccagcactgtaagcatcaaaatacctttctgcatgactctttccagaaygtggctgctgtctgtgatttgctcagcattgtctgcaaaaatcgtcggcacaactgccaccagagctcaaagcctgtcaacatgactgactgcagactca

SEQ ID NO: 19202 - DNA, 201 bp, Homo sapiens
atggtgctatgctttcctcttcttttactgctgctggttctatggggaccagtgtgtccacttcatgcttggcctaagcgtctcaccaaggctcactggtytgaaattcagcatatacagccaagtcctctccaatgcaacagggcaatgagtggcatcaacaattatacccagcactgtaagcatcaaaatacctttctg

SEQ ID NO: 19203 - DNA, 201 bp, Homo sapiens
aagctcagaatatttcttccccttccctatacacacagggctcgaagggttagagaagaaaggcagacaacagcttctgagctttggactaatcacagccyctgttctcagcaggagccccaacactgagaccagatggtgctatgctttcctcttcttttactgctgctggttctatggggaccagtgtgtccacttcat

SEQ ID NO: 19204 - DNA, 201 bp, Homo sapiens; identical to SEQ ID NO: 19198

SEQ ID NO: 19205 - DNA, 201 bp, Homo sapiens; identical to SEQ ID NO: 19199

SEQ ID NO: 19206 - DNA, 201 bp, Homo sapiens; identical to SEQ ID NO: 19200

SEQ ID NO: 19207 - DNA, 201 bp, Homo sapiens; identical to SEQ ID NO: 19201

SEQ ID NO: 19208 - DNA, 201 bp, Homo sapiens
cgaacccgcagcctgcatcgccctgggataacttgcgagaagccacctcctaccctaatttgtgcctccagaactcagagtggctgctcttagatcaacayatgctcaaggtgcattacccgaaattcggagtgtcagaagactgcctctacctgaacatctatgcgcctgcccacgccgatacaggctccaagctccccg

SEQ ID NO: 19209 - DNA, 201 bp, Homo sapiens
gggagccataagtgtttctagtcttatactgtctcccatggccaaaggcttattccacaaagccatcatggagagtggggtggccatcatcccttacctgraggcccatgattatgagaagagtgaggacctgcaggtggttgcacatttctgtggtaacaatgcgtcagactctgaggccctgctgaggtgcctgaggac

SEQ ID NO: 19210 - DNA, 201 bp, Homo sapiens
ggatggattcagggcaagcaagtcactgtgctgggaagccctgtgcctgtgaacgtgttcctcggagtcccctttgctgctcccccgctgggatccctgcratttacgaacccgcagcctgcatcgccctgggataacttgcgagaagccacctcctaccctaatttgtgcctccagaactcagagtggctgctcttagat

SEQ ID NO: 19211 - DNA, 201 bp, Homo sapiens
gagcatggccccagccctggacaagacacgttctgccagggcaaagctgatgggctctatcccaatcctcgggaacggtccagcttctacagctgtgcagsggggcggctgttccagcaaagctgcccgacaggcctggtgttcagcaactcctgcaaatgctgcacctggaattgagtcgctaaagcccctccagtccca

SEQ ID NO: 19212 - DNA, 201 bp, Homo sapiens
tgggcaggtttcatggtcctgctgatgatcccatggggctctgctgcaaaactggtctgctacttcaccaactgggcccagtacagacagggggaggctcrcttcctgcccaaggacttggaccccagcctttgcacccacctcatctacgccttcgctggcatgaccaaccaccagctgagcaccactgagtggaatgac

SEQ ID NO: 19213 - DNA, 201 bp, Homo sapiens
actgggagtacccaggaagccaggggagccctgccgtagacaaggagcgcttcacaaccctggtacaggacttggccaatgccttccagcaggaagcccakacctcagggaaggaacgccttcttctgagtgcagcggttccagctgggcagacctatgtggatgctggatacgaggtggacaaaatcgcccagaacctgg

SEQ ID NO: 19214 - DNA, 201 bp, Homo sapiens
tgggcactggacttagatgactttgccggcttctcctgcaaccagggccgataccccctcatccagacgctacggcaggaactgagtcttccatacttgcsttcaggcaccccagagcttgaagttccaaaaccaggtcagccctctgaacctgagcatggccccagccctggacaagacacgttctgccagggcaaagct

SEQ ID NO: 19215 - DNA, 201 bp, Homo sapiens
  misc_feature (1)...(201): n = A,T,C or G
cactgagtggaatgacgagactctctaccaggagttcaatggcctgaagaagatgaatcccaagctgaagaccctgttagccatcggaggctggaatttcngcactcagaagttcacagatatggtagccacggccaacaaccgtcagacctttgtcaactcggccatcaggtttctgcgcaaatacagctttgacggcct

SEQ ID NO: 19216 - DNA, 201 bp, Homo sapiens
ccaaggaaggagggatgctggcctactatgaagtctgctcctggaagggggccaccaaacagagaatccaggatcagaaggtgccctacatcttccgggayaaccagtgggtgggctttgatgatgtggagagcttcaaaaccaaggtcagctatctgaagcagaagggactgggcggggccatggtctgggcactggact

SEQ ID NO: 19217 - DNA, 201 bp, Homo sapiens
acgggacataacagccccctctacaagaggcaagaagagagtggtgcagcagccagcctcaacgtggatgctgctgtgcaacagtggctgcagaaggggasccctgccagcaagctgatccttggcatgcctacctacggacgctccttcacactggcctcctcatcagacaccagagtgggggccccagccacagggtct

SEQ ID NO: 19218 - DNA, 201 bp, Homo sapiens
tctgtgggacttggatgaaaccatcatcatcttccactcacttcttactggatcctatgcccagaaatatggaaaggacccaacagtagtgattggctcargtttaacaatggaagaaatgatttttgaagtggctgatactcatctatttttcaatgacttagaggagtgtgaccaggtacatgtggaagatgtggcttc

SEQ ID NO: 19219 - DNA, 201 bp, Homo sapiens; identical to SEQ ID NO: 19218

SEQ ID NO: 19220 - DNA, 142 bp, Homo sapiens
ttcaagagtggtgtgcgtctaactgagttgctgaagcaaggmcagtattctcccatggctattgaagaacaagtggctgttatctatgtgggtgtaaggaggtatcttgataaattggagcccagcaaggttacaaagtttg

SEQ ID NO: 19221 - DNA, 109 bp, Homo sapiens
ggttccataatggcaaaaaaaaaaaaactagaaaattaagatcaatgaaaccaagcccaacattagtagaggaagaatataatacatatcaaagcagaaaygaacaaaa

SEQ ID NO: 19222 - DNA, 125 bp, Homo sapiens
ccttaagctcaccttctttacttgtatcaaatgatgactggtatactggtctcccatccctttgcttgtggcaggagatggcttaaataaataacttaaayttaaaaaaataaaataaaataatg

SEQ ID NO: 19223 - DNA, 201 bp, Homo sapiens
cccgagttcatcgcctacccccatctccgcatcaggaccaagccgtttccctggggagatggtaaccatactctattccataaccctcatgtgaatccacytccaactggctacgaagatgaataaagagaatctggaccactacccgggcaccagggaccacagcactggtttggaccattactctgcacatggaccaga

SEQ ID NO: 19224 - DNA, 201 bp, Homo sapiens
gtggcagtcagcatgctgaatgtgtacctgaagtcgcaccacggagagcacgagagacccgagttcatcgcctacccccatctccgcatcaggaccaagcygtttccctggggagatggtaaccatactctattccataaccctcatgtgaatccacttccaactggctacgaagatgaataaagagaatctggaccacta

SEQ ID NO: 19225 - DNA, 201 bp, Homo sapiens
gtcccgcccacagctggggcggcctatgtcgagtggcgcccatggagaagagggctcagctcgcatgtggaagaccctcaccttcttcgtcgcgctccccrgggtggcagtcagcatgctgaatgtgtacctgaagtcgcaccacggagagcacgagagacccgagttcatcgcctacccccatctccgcatcaggaccaa

SEQ ID NO: 19226 - DNA, 153 bp, Homo sapiens
gcacatggaccagaaaaagtatatgggaccttaagctcaccttctttacttgtatcaaatgatgactggtatactggtctcccatccctttgcttgtggcrggagatggcttaaataaataacttaaacttaaaaaaataaaataaaataatg

SEQ ID NO: 19227 - DNA, 201 bp, Homo sapiens
tgggtgagcacagccctagctcaggccactgggcaagccacaccatccaaagaggaggtcctctgccccaggacccccacaccaccccagctccctgtttygctgaggcctggagcccccatggcctcactgagccgagccctacgtgtggctgctgcccaccctcgccagagccctacccggggcatggggccatgcaac

SEQ ID NO: 19228 - DNA, 201 bp, Homo sapiens
gagtcaaggtcccgctggtggccatgcaccatgcctatgtcgtcaccgagcgcatcgaggggattcagaacatgcccaatgtccgtgatcatgatgcctcygtctacctccgcctccaaggggatgccttgtctgtgggtggctatgaggccaaccccatcttttgggaggaggcagtcaaatacagacccagggcagctg

SEQ ID NO: 19229 - DNA, 201 bp, Homo sapiens
accccagctccctgttttgctgaggcctggagcccccatggcctcactgagccgagccctacgtgtggctgctgcccaccctcgccagagccctacccggkgcatggggccatgcaacctgtccagcgcagctggccccacagccgagaagagtgtgccatatcagcggaccctgaaggagggacagggcacctcggtggt

SEQ ID NO: 19230 - DNA, 201 bp, Homo sapiens
caagaggctcatgtcgctgggcaaggcgtatggtgtggaatcccatgtgctgagcccggcagagaccaagactctgtacccgctgatgaatgtggacgacytctacgggaccctgtatgtgccgcacgacggtaccatggaccccgctggcacctgtaccaccctcgccagggcagcttctgcccgaggagcacaggtcat

SEQ ID NO: 19231 - DNA, 201 bp, Homo sapiens
agagccctacccggggcatggggccatgcaacctgtccagcgcagctggccccacagccgagaagagtgtgccatatcagcggaccctgaaggagggacarggcacctcggtggtggcccaaggcccaagccggcccctgcccagcacggccaacgtggtggtcattggtggaggcagcttgggctgccagaccctgtacc

SEQ ID NO: 19232 - DNA, 201 bp, Homo sapiens
cctgtaccaccctcgccagggcagcttctgcccgaggagcacaggtcattgagaactgcccagtgaccggcattcgtgtgtggacggatgattttggggtrcggcgggtcgcgggtgtggagactcagcatggttccatccagacaccctgcgtggtcaactgtgcaggagtgtgggcaagtgctgtgggccggatggctg

SEQ ID NO: 19233 - DNA, 201 bp, Homo sapiens
cgcatcgaggggattcagaacatgcccaatgtccgtgatcatgatgcctctgtctacctccgcctccaaggggatgccttgtctgtgggtggctatgaggycaaccccatcttttgggaggaggcagtcaaatacagacccagggcagctggagggctttgcctcaaaacatccacagagaaggtctgcgcagtgtggagt

SEQ ID NO: 19234 - DNA, 201 bp, Homo sapiens
aggaggtgtcagacaagtttgccttcggcctctttgacctggactgggaggtgttcacccagcacattgaaggcgccatcaacagggtccccgtgctggakaagacaggaatcaagtccacggtctgcggccctgaatccttcacgcccgaccacaagcccctgatgggggaggcacctgagctccgagggttcttcctgg

SEQ ID NO: 19235 - DNA, 201 bp, Homo sapiens
ctggaaggcagtctctaatccaccccaatcctcccagaaagcaaacctgtaagtgtcttgggctcagggaccatggcttgtagccctttccaagcttctaraaggtgcttagtaaatacttgataagccccacgtgaaaacagcgaagcaaataggcttcatcttttactccaggcttgactgatcggtggcgggcttccc

SEQ ID NO: 19236 - DNA, 201 bp, Homo sapiens
gagtcaaggtcccgctggtggccatgcaccatgcctatgtcgtcaccgagcgcatcgaggggattcagaacatgcccaatgtccgtgatcatgatgcctcygtctacctccgcctccaaggggatgccttgtctgtgggtggctatgaggccaaccccatcttttgggaggaggtgtcagacaagtttgccttcggcctct

SEQ ID NO: 19237 - DNA, 201 bp, Homo sapiens
cacagcgcacatggaggcctgggaccaaggccattcttcaggatggtgcctctcggctctcaggtcggaacaggagctggaaagctcttcttaccttgctsgacctccctgttcttcaggtggcaaagcctcctgagagtcggcagcccgggaacacagaggagccgaagcagggagcgggcggggcctcagattggtgcc

SEQ ID NO: 19238 - DNA, 201 bp, Homo sapiens
tcgacctccctgttcttcaggtggcaaagcctcctgagagtcggcagcccgggaacacagaggagccgaagcagggagcgggcggggcctcagattggtgycctcctcacccacacagaagtgccagctcctgcctcagtttccccttgagcccctcgctcaccaggcccaggcaggagggacgtgctgctgggtaagagt

SEQ ID NO: 19239 - DNA, 201 bp, Homo sapiens
cgcctaccgcaggctgctggcagacgagtacaccttcgccttcccgccccaccacgacacggtgcatcaagaaggagtgcctggcctgcagaggggccgcygctgtgtttgacatgtcctacttcgggaagttctacctggtggggctggatgcaaggaaggctgccgactggctcttctccgcagatgtcagccgacccc

SEQ ID NO: 19240 - DNA, 201 bp, Homo sapiens; identical to SEQ ID NO: 19230

SEQ ID NO: 19241 - DNA, 120 bp, Homo sapiens
gctgggtaagagtctggtggagtccccctttctaggtgacctttgtctttgctgttgatttggacgcggttcctgcccatgccctcctccttgtctggcccttgcaggaggaccctctct

SEQ ID NO: 19242 - DNA, 201 bp, Homo sapiens
tggcctgcagaggggccgccgctgtgtttgacatgtcctacttcgggaagttctacctggtggggctggatgcaaggaaggctgccgactggctcttctcygcagatgtcagccgacccccaggctccaccgtgtacacgtgcatgctcaaccaccgtgggggcaccgagagtgacctgactgtcagccgcctggcaccca

SEQ ID NO: 19243 - DNA, 201 bp, Homo sapiens
cgcatcgaggggattcagaacatgcccaatgtccgtgatcatgatgcctctgtctacctccgcctccaaggggatgccttgtctgtgggtggctatgaggycaaccccatcttttgggaggaggtgtcagacaagtttgccttcggcctctttgacctggactgggaggtgttcacccagcacattgaaggcgccatcaac

SEQ ID NO: 19244 - DNA, 201 bp, Homo sapiens; identical to SEQ ID NO: 19232

SEQ ID NO: 19245 - DNA, 201 bp, Homo sapiens; identical to SEQ ID NO: 19227

SEQ ID NO: 19246 - DNA, 201 bp, Homo sapiens
gggagctgcacattccaaaggcgtcctgcgtgcctgtgtaccgggctgtgatggccgcgggtgccaagcacggcctcatcaacgcagggtaccgcgccatygactccctgagcattgagaaaggctaccggcactggcacgcggacctgcggccagacgacagccccctggaggcaggcctggccttcacctgcaagctca

SEQ ID NO: 19247 - DNA, 201 bp, Homo sapiens
tgctggacgcagacctgagcaacgaggccttcccgttctccacccacaagctactgagagccgcagggcacctggtccgagccatgcggctgtcctttgtsggggagctgggctgggagctgcacattccaaaggcgtcctgcgtgcctgtgtaccgggctgtgatggccgcgggtgccaagcacggcctcatcaacgcag

SEQ ID NO: 19248 - DNA, 201 bp, Homo sapiens
ctggtggggctggatgcaaggaaggctgccgactggctcttctccgcagatgtcagccgacccccaggctccaccgtgtacacgtgcatgctcaaccaccrtgggggcaccgagagtgacctgactgtcagccgcctggcacccagccaccaggcctccccgctggcccccgcctttgaaggggacggttactacctggcc

SEQ ID NO: 19249 - DNA, 201 bp, Homo sapiens
tctagaaggtgcttagtaaatacttgataagccccacgtgaaaacagcgaagcaaataggcttcatcttttactccaggcttgactgatcggtggcgggcytccctggggcacttggctgaagagcatgaggctgtgtctgggtcaggaaagagaggtgatcgactggcattgtctgccacagcgcacatggaggcctggg

SEQ ID NO: 19250 - DNA, 201 bp, Homo sapiens
tgggggcaccgagagtgacctgactgtcagccgcctggcacccagccaccaggcctccccgctggcccccgcctttgaaggggacggttactacctggccrtgggcggggccgtggcccagcacaactggtcccacatcaccaccgtgctgcaggaccagaagtcccagtgccagctcatcgacagctccgaggacctggg

SEQ ID NO: 19251 - DNA, 201 bp, Homo sapiens
tccgagagcgaagccatgagtcctacgccaagaactactccgtcgtcttcccccacgatgagccgctggccgggcgcaacatgaggagagacccgctgcaygaggaactccttggacaaggctgcgtgttccaggagcggcatggctgggagcgaccgggatggtttcatccccgaggcccagctccggtcctcgagtacg

SEQ ID NO: 19252 - DNA, 201 bp, Homo sapiens
ggtccccgtgctggagaagacaggaatcaagtccacggtctgcggccctgaatccttcacgcccgaccacaagcccctgatgggggaggcacctgagctcygagggttcttcctgggctgtggcttcaacagcgcaggaatgatgctgggtggtggctgtgggcaggagctggcccactggatcatccatgggcgcccgga

SEQ ID NO: 19253 - DNA, 201 bp, Homo sapiens; identical to SEQ ID NO: 19229

SEQ ID NO: 19254 - DNA, 201 bp, Homo sapiens
ccgagagcgaagccatgagtcctacgccaagaactactccgtcgtcttcccccacgatgagccgctggccgggcgcaacatgaggagagacccgctgcacraggaactccttggacaaggctgcgtgttccaggagcggcatggctgggagcgaccgggatggtttcatccccgaggcccagctccggtcctcgagtacga

SEQ ID NO: 19255 - DNA, 201 bp, Homo sapiens; identical to SEQ ID NO: 19231

SEQ ID NO: 19256 - DNA, 201 bp, Homo sapiens
tcgctcacggaccacccccgctggatccgagagcgaagccatgagtcctacgccaagaactactccgtcgtcttcccccacgatgagccgctggccgggcrcaacatgaggagagacccgctgcacgaggaactccttggacaaggctgcgtgttccaggagcggcatggctgggagcgaccgggatggtttcatccccga

SEQ ID NO: 19257 - DNA, 201 bp, Homo sapiens
gccagacgacagccccctggaggcaggcctggccttcacctgcaagctcaagtcgccggtgcccttcctggggagggaggccctggagcagcagcgggccrcaggcctccgccggcgcctggtgtgcttcaccatggaggacaaagtacccatgtttggcctggaggccatctggaggaacggccaagtggtgggccatgt

SEQ ID NO: 19258 - DNA, 201 bp, Homo sapiens; identical to SEQ ID NO: 19234

SEQ ID NO: 19259 - DNA, 201 bp, Homo sapiens; identical to SEQ ID NO: 19235

SEQ ID NO: 19260 - DNA, 201 bp, Homo sapiens; identical to SEQ ID NO: 19236

SEQ ID NO: 19261 - DNA, 201 bp, Homo sapiens; identical to SEQ ID NO: 19237

SEQ ID NO: 19262 - DNA, 201 bp, Homo sapiens; identical to SEQ ID NO: 19238

SEQ ID NO: 19263 - DNA, 201 bp, Homo sapiens
actacgcctaccgcaggctgctggcagacgagtacaccttcgccttcccgccccaccacgacacgatcaagaaggagtgcctggcctgcagaggggccgcygctgtgtttgacatgtcctacttcgggaagttctacctggtggggctggatgcaaggaaggctgccgactggctcttctccgcagatgtcagccgacccc

SEQ ID NO: 19264 - DNA, 201 bp, Homo sapiens; identical to SEQ ID NO: 19230

SEQ ID NO: 19265 - DNA, 120 bp, Homo sapiens; identical to SEQ ID NO: 19241

SEQ ID NO: 19266 - DNA, 201 bp, Homo sapiens; identical to SEQ ID NO: 19242

SEQ ID NO: 19267 - DNA, 201 bp, Homo sapiens; identical to SEQ ID NO: 19243

SEQ ID NO: 19268 - DNA, 201 bp, Homo sapiens; identical to SEQ ID NO: 19232

SEQ ID NO: 19269 - DNA, 201 bp, Homo sapiens; identical to SEQ ID NO: 19227

SEQ ID NO: 19270 - DNA, 201 bp, Homo sapiens; identical to SEQ ID NO: 19246

SEQ ID NO: 19271 - DNA, 201 bp, Homo sapiens; identical to SEQ ID NO: 19247

SEQ ID NO: 19272 - DNA, 201 bp, Homo sapiens; identical to SEQ ID NO: 19248

SEQ ID NO: 19273 - DNA, 201 bp, Homo sapiens; identical to SEQ ID NO: 19249

SEQ ID NO: 19274 - DNA, 201 bp, Homo sapiens; identical to SEQ ID NO: 19250

SEQ ID NO: 19275 - DNA, 201 bp, Homo sapiens; identical to SEQ ID NO: 19251

SEQ ID NO: 19276 - DNA, 201 bp, Homo sapiens; identical to SEQ ID NO: 19252

SEQ ID NO: 19277 - DNA, 201 bp, Homo sapiens; identical to SEQ ID NO: 19229

SEQ ID NO: 19278 - DNA, 201 bp, Homo sapiens; identical to SEQ ID NO: 19254

SEQ ID NO: 19279 - DNA, 201 bp, Homo sapiens; identical to SEQ ID NO: 19231

SEQ ID NO: 19280 - DNA, 201 bp, Homo sapiens; identical to SEQ ID NO: 19256

SEQ ID NO: 19281 - DNA, 201 bp, Homo sapiens; identical to SEQ ID NO: 19257

SEQ ID NO: 19282 - DNA, 201 bp, Homo sapiens; identical to SEQ ID NO: 19234

SEQ ID NO: 19283 - DNA, 201 bp, Homo sapiens; identical to SEQ ID NO: 19235

SEQ ID NO: 19284 - DNA, 201 bp, Homo sapiens; identical to SEQ ID NO: 19236

SEQ ID NO: 19285 - DNA, 201 bp, Homo sapiens; identical to SEQ ID NO: 19237

SEQ ID NO: 19286 - DNA, 201 bp, Homo sapiens; identical to SEQ ID NO: 19238

SEQ ID NO: 19287 - DNA, 201 bp, Homo sapiens; identical to SEQ ID NO: 19263

SEQ ID NO: 19288 - DNA, 201 bp, Homo sapiens; identical to SEQ ID NO: 19230

SEQ ID NO: 19289 - DNA, 120 bp, Homo sapiens; identical to SEQ ID NO: 19241

SEQ ID NO: 19290 - DNA, 201 bp, Homo sapiens; identical to SEQ ID NO: 19242

SEQ ID NO: 19291 - DNA, 201 bp, Homo sapiens; identical to SEQ ID NO: 19243

SEQ ID NO: 19292 - DNA, 201 bp, Homo sapiens; identical to SEQ ID NO: 19232

SEQ ID NO: 19293 - DNA, 201 bp, Homo sapiens; identical to SEQ ID NO: 19227

SEQ ID NO: 19294 - DNA, 201 bp, Homo sapiens; identical to SEQ ID NO: 19246

SEQ ID NO: 19295 - DNA, 201 bp, Homo sapiens; identical to SEQ ID NO: 19247

SEQ ID NO: 19296 - DNA, 201 bp, Homo sapiens; identical to SEQ ID NO: 19248

SEQ ID NO: 19297 - DNA, 201 bp, Homo sapiens; identical to SEQ ID NO: 19249

SEQ ID NO: 19298 - DNA, 201 bp, Homo sapiens; identical to SEQ ID NO: 19250

SEQ ID NO: 19299 - DNA, 201 bp, Homo sapiens; identical to SEQ ID NO: 19251

SEQ ID NO: 19300 - DNA, 201 bp, Homo sapiens; identical to SEQ ID NO: 19252

SEQ ID NO: 19301 - DNA, 201 bp, Homo sapiens; identical to SEQ ID NO: 19229

SEQ ID NO: 19302 - DNA, 201 bp, Homo sapiens; identical to SEQ ID NO: 19254

SEQ ID NO: 19303 - DNA, 201 bp, Homo sapiens; identical to SEQ ID NO: 19231

SEQ ID NO: 19304 - DNA, 201 bp, Homo sapiens; identical to SEQ ID NO: 19256

SEQ ID NO: 19305 - DNA, 201 bp, Homo sapiens; identical to SEQ ID NO: 19257

SEQ ID NO: 19306 - DNA, 201 bp, Homo sapiens
cgggttcaagcaattctcgtgcctcagcctcccatgtagctgggattaaatgtgcccgtcaccacacccggctgatttttttttgtattttagtagagacrgagtttcaccatgttgccaaggctggtctcgaactcctgagctcaggcaatccacccatctcggacttccaaagtgctaggattacaggcgtgagccacc

SEQ ID NO: 19307 - DNA, 201 bp, Homo sapiens; identical to SEQ ID NO: 19227

SEQ ID NO: 19308 - DNA, 201 bp, Homo sapiens
ccatgtagctgggattaaatgtgcccgtcaccacacccggctgatttttttttgtattttagtagagacggagtttcaccatgttgccaaggctggtctcraactcctgagctcaggcaatccacccatctcggacttccaaagtgctaggattacaggcgtgagccaccatgcttagctgattatgtaaacattgttaat

SEQ ID NO: 19309 - DNA, 201 bp, Homo sapiens; identical to SEQ ID NO: 19230

SEQ ID NO: 19310 - DNA, 201 bp, Homo sapiens
tggagtacagtggcacagtgtcagctcactgcaacctccgcctcccgggttcaagcaattctcgtgcctcagcctcccatgtagctgggattaaatgtgcycgtcaccacacccggctgatttttttttgtattttagtagagacggagtttcaccatgttgccaaggctggtctcgaactcctgagctcaggcaatccac

SEQ ID NO: 19311 - DNA, 201 bp, Homo sapiens
tttttgtgtttcttggagttattaacagtttttgtcccagctgctcagtttcttttgtaactgttatgtgtgtgtgtgtaacattatcttcgtgccccaaracccatacccgttatcaatcactccccatttcccaccctgtccccagacttaggcaatcccaaatctgatttctgcctcgatggagtttcctattctgga

SEQ ID NO: 19312 - DNA, 201 bp, Homo sapiens
gtgtccaactttttgtgtttcttggagttattaacagtttttgtcccagctgctcagtttcttttgtaactgttatgtgtgtgtgtgtaacattatcttcrtgccccaagacccatacccgttatcaatcactccccatttcccaccctgtccccagacttaggcaatcccaaatctgatttctgcctcgatggagtttcc

SEQ ID NO: 19313 - DNA, 201 bp, Homo sapiens; identical to SEQ ID NO: 19229

SEQ ID NO: 19314 - DNA, 201 bp, Homo sapiens; identical to SEQ ID NO: 19231

SEQ ID NO: 19315 - DNA, 201 bp, Homo sapiens; identical to SEQ ID NO: 19232

SEQ ID NO: 19316 - DNA, 201 bp, Homo sapiens
tggctggtgcatcccggatcattggtgtggacatccatcaagataaatttccaagggctaaagagtttggagccactgaatgtatgaaccgtcaggatttwagtcaacccatccaggaagtgctcattgagcggactgatggaggagtggactactcctttgaatgtattaggaatgtcaaggtcgtgagagcagcacttg

SEQ ID NO: 19317 - DNA, 201 bp, Homo sapiens
ggagtggactactcctttgaatgtattaggaatgtcaaggtcgtgagagcagcacttgaggcatgtcagcagggctggggcgtcagtgtggtggttggagyagctgcttcaggtcaagaaattgccactcatccattccagctggtaacaggtcgcacatggaaaggcactgcctttggagggtgaaagagtgtagaaagt

SEQ ID NO: 19318 - DNA, 201 bp, Homo sapiens
gggatacccctcccctgcctcccagaaaggggtccccctcatcctccaagatctcccagcccagtgacatcaacactttctctttggtcgaacaattgccrggcaaactgctagagcatcggatcctagaagaggaagaggtgctgggaggtgggggtcaggggcgcctactggggtctgtggactatgatggtatcaatg

SEQ ID NO: 19319 - DNA, 201 bp, Homo sapiens
ctagtcgcttcgtgatcggccgctcccggggagaggcggtggccgagcggcggagggaggagctaaacggttacatctggcacttgatccacgcacccccygaggtggccgagtgtgatttggtgtacaccttcttccacccactgccccgggatgagaaggctatgggcaccagcccagctcctaagtcctcagatggca

SEQ ID NO: 19320 - DNA, 201 bp, Homo sapiens
ccctgggctgggtcactaccccactcttcaacttcaggcaggtcctgacctgtggccggaagcttctgggtttgtggccagcaacacaggaaaatcccagygcccgttggagtgcacctaatttccaccagccagacagtgtcatcctgcagattgacttccccacctcggcctttgacatcaagttcaccagcccccctg

SEQ ID NO: 19321 - DNA, 201 bp, Homo sapiens
gtggactatgatggtatcaatgatgcaattactaggctcaacttgaaatcgacctatgatgcggagatgttgcgggatgccaccaggggctggaaggaggrccgagggccgctggacttcagcaaagacacctctggaaaacccgtggccaggagcaagactatgccccctcaggtgcccccccgcacctatgcctcccgc

SEQ ID NO: 19322 - DNA, 125 bp, Homo sapiens
aaatttacttccccaaaacactggracattgggatggaattcactcaccccaaatcatcaccctggttaaggagactaaagaatcagaagacatttgtgctttggggagcagaggccctcagggt

SEQ ID NO: 19323 - DNA, 201 bp, Homo sapiens
tcccggccccacactgttgccaatggccatgagttgtttgaggtctcagaagagagagatgaggaggttgctgcattttgccacatgctggatatccttcratctggctctgacatccaagactacttcctcactggctatgtctggagtgctgtcacccctagcccagagcacctcggggatgaggtcaacctgaaggtg

SEQ ID NO: 19324 - DNA, 201 bp, Homo sapiens
tgaggaaaaactacagtttgccttgccaggtagaagaatcaggcgcccagacaccatgtcacaaccctccagaactgacgttggcaggaagtagagacttygttgcctgtgtcccccatcctcaccatgtcttcgactcagggcaatggggaacactggaagtccctggagtcagtgggcatcagccgcaaagagctagcg

SEQ ID NO: 19325 - DNA, 201 bp, Homo sapiens
ttgaaatcgacctatgatgcggagatgttgcgggatgccaccaggggctggaaggagggccgagggccgctggacttcagcaaagacacctctggaaaacmcgtggccaggagcaagactatgccccctcaggtgcccccccgcacctatgcctcccgctatggcaaccgaaagaatgcgacgcctggcaagaaccgccgg

SEQ ID NO: 19326 - DNA, 201 bp, Homo sapiens
cccgggatgagaaggctatgggcaccagcccagctcctaagtcctcagatggcacatgggcccggcccgtcggaaaggtgggaggggaggtgaagctgtcyatctcctacaaaaacaataaactcttcatcatggtgatgcatattcggggcttgcaactgctccaggatggaaatgaccctgacccctatgtgaaaattt

SEQ ID NO: 19327 - DNA, 201 bp, Homo sapiens
acctgaggaatgtggacgtgggtgactttgtgctaaagccctgcgggctggaggagttcctgcagaacaagcatgccttgggcagtcatgagtacatccartactgccgcaagtttgacattgacattcggctacagctgatggagcagaaggttgtgcgcagtgacctggcccggacggtgaatgatgaccagagcccct

SEQ ID NO: 19328 - DNA, 201 bp, Homo sapiens
ctggggtagacttttacagcaagccagcaggaaggcggaccgacctcaagctgttacgcggtctctctggctctgatcctacccttaactacaactcactmtccccacaggaagggccgcccaaccactctacctcccaagggccacagcctggctcagatccctggcccaaaggctccctgtctggagactatctctaca

SEQ ID NO: 19329 - DNA, 201 bp, Homo sapiens
agtcatggcaccttgtgagcccagcagagccaccacccagcatcccaggctggtggcaggagctgggggagaggactctcccctgtgagactcctccttgkgaagggccagggccctgggcaggcctccagctcggtccaggtgattctggcctctgtggtaggaggcagggagagtaagacatgctctgctgtctcttcc

SEQ ID NO: 19330 - DNA, 201 bp, Homo sapiens
acctcattcgcaagcacacccacctcttcctcaaccttctgggcctgatgttgtcctgtgggatccctgaactctcagacctggaggacctcaagtatgtrtacgatgccctgaggcctcaggatacagaggccaatgccactacctacttcactaggttgattgagtccagcctgggcagtgtagccacaaagctcaatt

SEQ ID NO: 19331 - DNA, 201 bp, Homo sapiens
tccctagtcgcttcgtgatcggccgctcccggggagaggcggtggccgagcggcggagggaggagctaaacggttacatctggcacttgatccacgcaccycctgaggtggccgagtgtgatttggtgtacaccttcttccacccactgccccgggatgagaaggctatgggcaccagcccagctcctaagtcctcagatg

SEQ ID NO: 19332 - DNA, 201 bp, Homo sapiens
aagggagagactgagactgactcccttatctcttcatattctttattccctaccagatggatttttttttttttttttggagacggagtctcgccctgtcrccaggctggagtgtagtggcatgatctcgactcactgcaaaatctgcctcccgggttcaagcgattctcctacctcagcctcccgagtagctgggattac

SEQ ID NO: 19333 - DNA, 201 bp, Homo sapiens
ctggccgaatcagtgatgttttcctctgccgccatgagaagatcttccaccccaacaaaggctatatatatgtggtaaaggtgatgcgagagaacactcaygaggccacctacatccagcggacctttgaggagttccaggaattacacaataagttgcggctgctcttcccttcttcccacttgcccagcttccctagtc

SEQ ID NO: 19334 - DNA, 201 bp, Homo sapiens
ctggggaggacgagtatgagaaggctgtggagaactttatctactcctgcgctggctgctgcgtggccacgtacgtcttgggcatctgtgaccgacataaygacaacatcatgctgaagaccactggtcacatgttccacattgattttggccgcttcctgggccatgcccagatgtttggcaacatcaagcgggaccgtg

SEQ ID NO: 19335 - DNA, 201 bp, Homo sapiens
actgcaacacattcaacgcagacttccagacggcagtgcccgggagccgcaagcatgacctggtccaggaggcctgccatttcgccaggtccctggccttyactgtctatgccacccaccgcatccccatcatctgggctaccagctatgaagatttctacctctcctgctccctcagccatggcggcaaggagctgtgca

SEQ ID NO: 19336 - DNA, 201 bp, Homo sapiens; identical to SEQ ID NO: 19318

SEQ ID NO: 19337 - DNA, 201 bp, Homo sapiens; identical to SEQ ID NO: 19319

SEQ ID NO: 19338 - DNA, 201 bp, Homo sapiens; identical to SEQ ID NO: 19320

SEQ ID NO: 19339 - DNA, 201 bp, Homo sapiens; identical to SEQ ID NO: 19321

SEQ ID NO: 19340 - DNA, 125 bp, Homo sapiens; identical to SEQ ID NO: 19322

SEQ ID NO: 19341 - DNA, 201 bp, Homo sapiens; identical to SEQ ID NO: 19323

SEQ ID NO: 19342 - DNA, 201 bp, Homo sapiens; identical to SEQ ID NO: 19324

SEQ ID NO: 19343 - DNA, 201 bp, Homo sapiens; identical to SEQ ID NO: 19325

SEQ ID NO: 19344 - DNA, 201 bp, Homo sapiens; identical to SEQ ID NO: 19326

SEQ ID NO: 19345 - DNA, 201 bp, Homo sapiens; identical to SEQ ID NO: 19327

SEQ ID NO: 19346 - DNA, 201 bp, Homo sapiens; identical to SEQ ID NO: 19328

SEQ ID NO: 19347 - DNA, 201 bp, Homo sapiens; identical to SEQ ID NO: 19329

SEQ ID NO: 19348 - DNA, 201 bp, Homo sapiens; identical to SEQ ID NO: 19330

SEQ ID NO: 19349 - DNA, 201 bp, Homo sapiens; identical to SEQ ID NO: 19331

SEQ ID NO: 19350 - DNA, 201 bp, Homo sapiens; identical to SEQ ID NO: 19332

SEQ ID NO: 19351 - DNA, 201 bp, Homo sapiens; identical to SEQ ID NO: 19333

SEQ ID NO: 19352 - DNA, 201 bp, Homo sapiens; identical to SEQ ID NO: 19334

SEQ ID NO: 19353 - DNA, 201 bp, Homo sapiens; identical to SEQ ID NO: 19335

SEQ ID NO: 19354 - DNA, 201 bp, Homo sapiens
cgttatgtccagcaaaggctcagtggttctggcctacagtggcggtctggacacctcgtgtatcctcgtgtggctgaaggaacaaggctatgacgtcactrcctacctggccaacattggccagaaggaagacttcgaggaagcaaggaagaaggcaccaaagcttgggaccaaaaaggtgttcactgagggtgtcagcag

SEQ ID NO: 19355 - DNA, 201 bp, Homo sapiens
atcctcggctgggagtccccacggtctctctacaacgaggagctggtgagcatgaacgtgcatggtgattatgagccaattgatgccaccggtttcatcamcatcaattccctcaggctgaaggaatatcatcatctccagagcaaggtcactgccaattagaaccctgtacagggagaagctggggcttcctcaatttgc

SEQ ID NO: 19356 - DNA, 201 bp, Homo sapiens
cccaagaacccgtggaacatggacgagaacctcatgcacatcagctacgaagctggaatcctagaggacccccaagaaccaagcgcctccaggtctctacmcgaagacccaggactggccaaagcccccaacacccctgacattctcgagatcgagttcaaaaaaggggtcttcttgaaggttaccaacgtcaaggatggc

SEQ ID NO: 19357 - DNA, 201 bp, Homo sapiens
aagaaccaagcgcctccaggtctctacacgaagacccaggactggccaaagcccccaacacccctgacattctcgagatcgagttcaaaaaaggggtcttyttgaaggttaccaacgtcaaggatggcaccacccaccagacctccttggcgctcttcatgtacctgaatgaagtcacgggaaagcactgcgtgggccgta

SEQ ID NO: 19358 - DNA, 201 bp, Homo sapiens
acctccttggcgctcttcatgtacctgaatgaagtcacgggaaagcactgcgtgggccgtattgacatcgtggagaactgcttcattggaatgaagtcccraggtatctacgagaccccagcaggcaccatcctttaccacgctcatttagacatcgagaccttcaccatggactgggaagtgcgcaaaatcaaacaaggc

SEQ ID NO: 19359 - DNA, 201 bp, Homo sapiens
ctccttggcgctcttcatgtacctgaatgaagtcacgggaaagcactgcgtgggccgtattgacatcgtggagaactgcttcattggaatgaagtcccgasgtatctacgagaccccagcaggcaccatcctttaccacgctcatttagacatcgagaccttcaccatggactgggaagtgcgcaaaatcaaacaaggcct

SEQ ID NO: 19360 - DNA, 201 bp, Homo sapiens
cgagatcgagttcaaaaaaggggtcttcttgaaggttaccaacgtcaaggatggcaccacccaccagacctccttggcgctcttcatgtacctgaatgaartcacgggaaagcactgcgtgggccgtattgacatcgtggagaactgcttcattggaatgaagtcccgaggtatctacgagaccccagcaggcaccatcct

SEQ ID NO: 19361 - DNA, 179 bp, Homo sapiens
aaggaatatcatcatctccagagcaaggtcactgccaattagaaccctgtacagggagaagctggggcttcctcaatttgcagatcccccaagtacaggcrctaattgttgtgataatttgcagttgtgacttgttctcccctgcaggcagcgtagtggggctgccaggcccccgcttt

SEQ ID NO: 19362 - DNA, 201 bp, Homo sapiens
cagattccagacgccgggaactcgtgcctctaatcccagacgttatgtccagcaaaggctcagtggttctggcctacagtggcggtctggacacctcgtgyatcctcgtgtggctgaaggaacaaggctatgacgtcactgcctacctggccaacattggccagaaggaagacttcgaggaagcaaggaagaaggcaccaa

SEQ ID NO: 19363 - DNA, 201 bp, Homo sapiens
cagacgccgggaactcgtgcctctaatcccagacgttatgtccagcaaaggctcagtggttctggcctacagtggcggtctggacacctcgtgtatcctcktgtggctgaaggaacaaggctatgacgtcactgcctacctggccaacattggccagaaggaagacttcgaggaagcaaggaagaaggcaccaaagcttgg

SEQ ID NO: 19364 - DNA, 201 bp, Homo sapiens
gaaagcactgcgtgggccgtattgacatcgtggagaactgcttcattggaatgaagtcccgaggtatctacgagaccccagcaggcaccatcctttaccaygctcatttagacatcgagaccttcaccatggactgggaagtgcgcaaaatcaaacaaggcctgggcttgaaatgtgctgagctggtgtatactggtttct

SEQ ID NO: 19365 - DNA, 201 bp, Homo sapiens
gacctccttggcgctcttcatgtacctgaatgaagtcacgggaaagcactgcgtgggccgtattgacatcgtggagaactgcttcattggaatgaagtccygaggtatctacgagaccccagcaggcaccatcctttaccacgctcatttagacatcgagaccttcaccatggactgggaagtgcgcaaaatcaaacaagg

SEQ ID NO: 19366 - DNA, 201 bp, Homo sapiens
cgtgtccttcaacatcgctgtcaatggtgagcccttgggctgtgtctccttcaagctgtttgcagacaagtttccaaagacagcagaaaactttcgtgctstgagcactggagagaaaggatttgattataaatgttcctcctttcacagaattattccaggggtggtgacttcacacgccataatggcactgtttttcat

SEQ ID NO: 19367 - DNA, 161 bp, Homo sapiens
ttttcatctgcactgccaagactgagtggttggatggcaagcccatggtctttggcaaggtgaaagatggcatgaatattgtggaggccatggagcacttygggtctgggaatggcaagaccatcaagaagatcaccatcgctgactgtacacaacttgac

SEQ ID NO: 19368 - DNA, 131 bp, Homo sapiens
atggtcaaccccaccgtgtccttcaacatcrctgtcaatggtgagcccttgggctgtgtctccttcaagctgtttgcagacaagtttccaaagacagcagaaaactttcgtgctctgagcactggagagaa

SEQ ID NO: 19369 - DNA, 201 bp, Homo sapiens
cgtgtccttcaacatcgctgtcaatggtgagcccttgggctgtgtctccttcaagctgtttgcagacaagtttccaaagacagcagaaaactttcgtgctstgagcactggagagaaaggatttgattataaatgttcctcctttcacagaattattccagggtttatgtgtcagggtggtgacttcacacgccataatgg

SEQ ID NO: 19370 - DNA, 120 bp, Homo sapiens
ggccatggagcacttcgggtctgggaatggcaagaccatcaagaagatcaccatcgctgactgtacacaacttgactaagtttgacttgtgttttttttttgagactgagtttcgctctt

SEQ ID NO: 19371 - DNA, 106 bp, Homo sapiens
tcgggtctgggaatggcaagaccatcaagaagatcaccatcgctgactgtacacaacttgactaagtttgacttgtgttttttttttgagactgagtttcrctctt

SEQ ID NO: 19372 - DNA, 201 bp, Homo sapiens
ttttcatctgcactgccaagactgagtggttggatggcaagcccatggtctttggcaaggtgaaagatggcatgaatattgtggaggccatggagcacttygggtctgggaatggcaagaccatcaagaagatcaccatcgctgactgtacacaacttgactaagtttgacttgtgttttttttttgagactgagtttcgc

SEQ ID NO: 19373 - DNA, 143 bp, Homo sapiens
atactatcagccatggtcaaccccaccgtgtccttcaacatcrctgtcaatggtgagcccttgggctgtgtctccttcaagctgtttgcagacaagtttccaaagacagcagaaaactttcgtgctctgagcactggagagaa

SEQ ID NO: 19374 - DNA, 201 bp, Homo sapiens
agccccgcgatttcattgattgcttgaccagatggacgtcggtaatgacgacgcattttttttttggcgtcaccgaaaccacgagcaccaccctgtgctaygggctcctcattctgcttaagtacctagaggtggcagccaaggtgcaggagctggaccctgtggtagggtggaggcccgccccaagcctggactatcgcg

SEQ ID NO: 19375 - DNA, 201 bp, Homo sapiens
aaagaagcaaagggaacgaagccggccgcaggagtcggaggcccctaaagggatgtagccagtgacccggcgcttcctggatagggcgtggccggctcccsggcccgcctcctttcccgtccccaccacaggaatcttgttttctaaccggccgtgctggtggacactgcgcaattttgcacttggagcgcttaagaagtt

SEQ ID NO: 19376 - DNA, 201 bp, Homo sapiens
tcctttcccgtccccaccacaggaatcttgttttctaaccggccgtgctggtggacactgcgcaattttgcacttggagcgcttaagaagttcgggttggrtacgcggaccgtcgaggcgcgcgtcctggaggaggcggcttgtctgctagacgaatttcaagccaccattgcttcggcctggccgggagagcggaagggc

SEQ ID NO: 19377 - DNA, 201 bp, Homo sapiens
cggcgctaaagcgtaaggttagaatggaggttcatcctgcagccaacaggagaaaagagcctaagagtcaaagcccgagagccagcctaggtcagggatgragcccagcaaaggcggggccaatgtgtggatagggcacttggaggtctggtaaagaagcaaagggaacgaagccggccgcaggagtcggaggcccctaaa

SEQ ID NO: 19378 - DNA, 201 bp, Homo sapiens
ttagtgctacaggcggatgcggtctctggccgcgggtccatggcagtcttcgaacgcttcacacgcggaaacagtgaggccccggcgctggacttgccggyccggacgctccaggctgggcgggtaaatggtagaggcgggcaaatgggggcggggcctaatagagactccagctaatgaggtgcaaacggccgagagagg

SEQ ID NO: 19379 - DNA, 201 bp, Homo sapiens
ggctctggggtacctggtgctcactgtgcacctgtgtacccggcaaagcagatgtgcctgggcacaggcctggcccactcgggtatcttcctattccttayggccaccttacagaggttctgcctgctccctgtggtacgccctggcaccatcaacctcacctgcagtgcactggcctgggcagtgtccccccagacttcc

SEQ ID NO: 19380 - DNA, 201 bp, Homo sapiens
ggcgcgcgtcctggaggaggcggcttgtctgctagacgaatttcaagccaccattgcttcggcctggccgggagagcggaagggcctggtgctgtatccartgttatctgttcttgtcttcgggaaccgctatcgctatggggacccggagttcctgaggctcctgaacctcttcagtgacaacttctgcatcattagttc

SEQ ID NO: 19381 - DNA, 201 bp, Homo sapiens
cgtcctggaggaggcggcttgtctgctagacgaatttcaagccaccattgcttcggcctggccgggagagcggaagggcctggtgctgtatccaatgttayctgttcttgtcttcgggaaccgctatcgctatggggacccggagttcctgaggctcctgaacctcttcagtgacaacttctgcatcattagttccagatg

SEQ ID NO: 19382 - DNA, 201 bp, Homo sapiens
ggctcctgaacctcttcagtgacaacttctgcatcattagttccagatggggcgagatgtacatttgcctgtccctcatggactggctcccgggcccgcaycaccgaatcttccgaaacttttcggagctgcgggtcatctctgagcaaattcaacgacactggcagatgcggcagccagcggagccccgcgatttcattg

SEQ ID NO: 19383 - DNA, 201 bp, Homo sapiens
caaattactggcccatctcggacttgctgaatcaatttgataggattaatctccagtgaagctgtgtttacagggcattccaagtgattcttatcaggaartgtgaaaaacactcctgtacataatcggttaatttaaaattttacttaataagtgaacaagtaatgaagatttcacctgtttacttagggtatctaccca

SEQ ID NO: 19384 - DNA, 201 bp, Homo sapiens
gaaaacattttatcaaaccaaatgttaaaaagactttccttttgtaaaactggattagagaagacttttcagtgggttatctctaggatgatcagtagttsagcacttaaaaactgcagagaaaactgaaagttatgttccagataactttccgttgtttaccaaattttcttagatttggtcatcatcaggaagcatttg

SEQ ID NO: 19385 - DNA, 201 bp, Homo sapiens
agagcttcacggcgtcctgcccggtcagcgcgttcgtgcccaaggagaagatccctgaccctcacaagctgaagctctggctcaaggtcaacggcgaactsagacaggagggtgagacatcctccatgattttttccatcccctacatcatcagctatgtttctaagatcataaccttggaagaaggagatattatcttga

SEQ ID NO: 19386 - DNA, 201 bp, Homo sapiens
agggctcgcccatcctcatgcccgcgtacactcgcaacctgcaccacgagctggagctgggcgtggtgatgggcaagcgctgccgcgcagtccccgaggcygcggccatggactacgtgggcggctatgccctgtgcctggatatgaccgcccgggacgtgcaggacgagtgcaagaagaaggggctgccctggactctgg

SEQ ID NO: 19387 - DNA, 201 bp, Homo sapiens
ggagttggaccggttaaagaaaacgatgagatcgaggctggcatacacgggctggtcagtatgacatttaaagtggaaaagccagaatattgagttatttsttaacaagtttcgagagagaagggagcaagacaagagcaagcaacggctattaaatgtcacaatcctttaattagaaaccatttattggccggacgcggt

SEQ ID NO: 19388 - DNA, 201 bp, Homo sapiens
ttatctctaggatgatcagtagttcagcacttaaaaactgcagagaaaactgaaagttatgttccagataactttccgttgtttaccaaattttcttagayttggtcatcatcaggaagcatttgtaaaaataaaaatctccacaaattactggcccatctcggacttgctgaatcaatttgataggattaatctccagtg

SEQ ID NO: 19389 - DNA, 201 bp, Homo sapiens
tgaaaacaggcaagtaaagtatttcttcggaaaacattttatcaaaccaaatgttaaaaagactttccttttgtaaaactggattagagaagacttttcartgggttatctctaggatgatcagtagttcagcacttaaaaactgcagagaaaactgaaagttatgttccagataactttccgttgtttaccaaattttct

SEQ ID NO: 19390 - DNA, 201 bp, Homo sapiens
gaaaactgaaagttatgttccagataactttccgttgtttaccaaattttcttagatttggtcatcatcaggaagcatttgtaaaaataaaaatctccacmaattactggcccatctcggacttgctgaatcaatttgataggattaatctccagtgaagctgtgtttacagggcattccaagtgattcttatcaggaaat

SEQ ID NO: 19391 - DNA, 201 bp, Homo sapiens
gcgccacgccgcccgggtacccggcagatcgcgaggtggaacgggccgtcgctgcgggggacagcgttccgaggcagttggtcctctccgggatgccgtakgcatcagctgaccggcccagcccacgtgactacaggggcacttgatgggaatcatggcagcatccaggccattgtcccgcttctgggagtggggaaagaa

SEQ ID NO: 19392 - DNA, 158 bp, Homo sapiens
ctcctgtacataatcggttaatttaaaattttacttaataagtgaacaagtaatgaagatttcacctgtttacttagggtatctacccagacccatcgatyctgagttcgggagatgattttgaaattactgttttccaaataaaggtgctcccttct

SEQ ID NO: 19393 - DNA, 201 bp, Homo sapiens
ggtgatgggcaagcgctgccgcgcagtccccgaggctgcggccatggactacgtgggcggctatgccctgtgcctggatatgaccgcccgggacgtgcagracgagtgcaagaagaaggggctgccctggactctggcgaagagcttcacggcgtcctgcccggtcagcgcgttcgtgcccaaggagaagatccctgaccc

SEQ ID NO: 19394 - DNA, 201 bp, Homo sapiens
ctgtgtttacagggcattccaagtgattcttatcaggaaatgtgaaaaacactcctgtacataatcggttaatttaaaattttacttaataagtgaacaaktaatgaagatttcacctgtttacttagggtatctacccagacccatcgattctgagttcgggagatgattttgaaattactgttttccaaataaaggtgc

SEQ ID NO: 19395 - DNA, 201 bp, Homo sapiens
agcaatgtggatgcagctggaggccattatcccaaacaaattaacacaggaacagaaaaacaaatactgcatgttctcatttataagtgggagctaaacaytgagaactcatgaacataaatatggcaacaatagacactggggactcacagaatgcggatgaaggaaggaaagcaagagttgcaaacctaacttttgggt

SEQ ID NO: 19396 - DNA, 201 bp, Homo sapiens
gagaaccaggatgcccgttatacacagcaaagaatgaccacctttcaagtccacttggcaaagcaatcacagccgtatgtgcatcctccatttcaatacgycaaccttgcatgctgcgtagctcgtatcgcaactaattaccccacccccaggcattatgctcttccatctttgcttgtctaaagatggtcccattatgtc

SEQ ID NO: 19397 - DNA, 201 bp, Homo sapiens
tattgaatctaaaatgaaagttgaaattatttttaaaaactttatgctagtataattttaaagcatcctacatatactagcttttgaacatattattacartactcatatcattttattgtagagattagggaagctttgttttctgaccagtattagaaaagatttgagtaacaattacctgcaatctttaagcaaactt

SEQ ID NO: 19398 - DNA, 201 bp, Homo sapiens
aactttcctgttcctacaaagtaaacgtctagagtcttcatagttaatgaaataattatgttggggagaaagtaagacgcttacatctgttgacccacttmtatctgcaccatgtttcttctctgacataactctcgtgttcatcaatctccaggaaacctgttctgattccattctttacattttccaaagaaggtgctc

SEQ ID NO: 19399 - DNA, 148 bp, Homo sapiens
ctttttctagcggatttgcaatttgtgaagaaatgaactttcctgttyctacaaagtaaacgtctagagtcttcatagttaatgaaataattatgttggggagaaagtaagacgcttacatctgttgacccacttatatctgcaccat

SEQ ID NO: 19400 - DNA, 201 bp, Homo sapiens
gttctgctatcgatccaggccttgttaaatgctcccaatccagatgatccattagcaaatgatgtagtggagcagtggaagaccaacgaagcccaagccaytgaaacagctagagcatggactaggctatatgccatgaatagtatttaaattgatccaatcattaagtgtgcatcacttctcctgttctgccaagacttc

SEQ ID NO: 19401 - DNA, 201 bp, Homo sapiens
gaactattacttgcagaagaatacccaatggcagcccctaaagtacgtttcatgaccaaaatttatcatccaaatgtagacaagttggaaagaataagttkagatattttgaaagataagtggtccccagccctgcagatccgcacagttctgctatcgatccaggccttgttaaatgctcccaatccagatgatccatta

SEQ ID NO: 19402 - DNA, 201 bp, Homo sapiens
caagttggaaagaataagtttagatattttgaaagataagtggtccccagccctgcagatccgcacagttctgctatcgatccaggccttgttaaatgctyccaatccagatgatccattagcaaatgatgtagtggagcagtggaagaccaacgaagcccaagccattgaaacagctagagcatggactaggctatatgc

SEQ ID NO: 19403 - DNA, 201 bp, Homo sapiens; identical to SEQ ID NO: 19400

SEQ ID NO: 19404 - DNA, 201 bp, Homo sapiens; identical to SEQ ID NO: 19401

SEQ ID NO: 19405 - DNA, 201 bp, Homo sapiens; identical to SEQ ID NO: 19402

SEQ ID NO: 19406 - DNA, 116 bp, Homo sapiens
gatgagaccagaggcygaactcaggttctgatggccgagctgccccacaggatcatcaaggaaacccagcgtttgctggcagagccagttcctggcatcaaagcagaaccagatga

SEQ ID NO: 19407 - DNA, 201 bp, Homo sapiens
ctccctggtggttgagtttaaggagcttgtttacccaccagattacaatcctgaagggaaatttaccaagagaaaacaaaataatgaagattttggaagcraaagacccaagatgaagtattcagaagaggagctgaaggccaatatcagcaagggcatgctgggcaatttcactgtgcccatgctgaaagaggcatatgg

SEQ ID NO: 19408 - DNA, 201 bp, Homo sapiens
gctctcaagccttctccaataaagctctattgggaaacaaatgaaccagtgaaaaccaagacccagacatttaatacaaatacaggaagtttgcttctgcytagtgataccaagaggtctgagatctatgggagtctcagattataatggagaaaggggaaacagaagagttaaaacagtttgatgatccaggtttgatgc

SEQ ID NO: 19409 - DNA, 201 bp, Homo sapiens
caaaggagttggcattagtgttcttgaaatgagtcacaggccatcagattttgccaagattattaacgatacagagaatcttgtgcgggaattgccagccrttccagacagctataaggtgatttttgtgcaaggaagtgggtctggccagttcggtgctgtccccttaaacctgattggcttgaaagcaggaagatgtgc

SEQ ID NO: 19410 - DNA, 201 bp, Homo sapiens
tcacgtgttcggtcctccttagctgactcgccgccctcgctgccgcaccatggacgccccgaggcacgtggtcaacttcgggcctggtcccgccaagctgyctcactcagtgttgttagagataaaaaaggaattattagactacaaaggagttggcattagtgttcttgaaatgagtcacaggccatcagattttgccaa

SEQ ID NO: 19411 - DNA, 201 bp, Homo sapiens
catcagattttgccaagattattaacgatacagagaatcttgtgcgggaattgccagccgttccagacagctataaggtgatttttgtgcaaggaagtggrtctggccagttcggtgctgtccccttaaacctgattggcttgaaagcaggaagatgtgcggactatgtggtgacagggacttggtcagctaaggccgcag

SEQ ID NO: 19412 - DNA, 201 bp, Homo sapiens
ggaagatgtgcggactatgtggtgacagggacttggtcagctaaggccgcagaagaagccaagaagtttgggactataaatatcattcaccctaaacttgrgagttatacaaaaattccagatccaagcacctggaacctcaacccggatgcctcctatgtgtattattgcgcaaatgaggtggtgcatggtgtggagttt

SEQ ID NO: 19413 - DNA, 201 bp, Homo sapiens
ccaagcacctggaacctcaacccggatgcctcctatgtgtattattgcgcaaatgaggtggtgcatggtgtggagtttgactttataccctatgtcaaggkagcagtactggtttgtgacatgtcctcaaacttcctgtccaagccagtggatgtccaagtttggtgtgatttttgctggtgcccagacgaatgttggctt

SEQ ID NO: 19414 - DNA, 201 bp, Homo sapiens
attagtgttcttgaaatgagtcacaggccatcagattttgccaagattattaacgatacagagaatcttgtgcgggaattgccagccgttccagacagctrtaaggtgatttttgtgcaaggaagtgggtctggccagttcggtgctgtccccttaaacctgattggcttgaaagcaggaagatgtgcggactatgtggtg

SEQ ID NO: 19415 - DNA, 201 bp, Homo sapiens
gactacaaaggagttggcattagtgttcttgaaatgagtcacaggccatcagattttgccaagattattaacgatacagagaatcttgtgcgggaattgcyagccgttccagacagctataaggtgatttttgtgcaaggaagtgggtctggccagttcggtgctgtccccttaaacctgattggcttgaaagcaggaaga

SEQ ID NO: 19416 - DNA, 104 bp, Homo sapiens
gccrttccagacagctataaggtgatttttgtgcaaggaagtgggtctggccagttcggtgctgtccccttaaacctgattggcttgaaagcaggaagatgtgc

SEQ ID NO: 19417 - DNA, 145 bp, Homo sapiens
gccgttccagacagctataaggtgatttttgtgcaaggaagtggrtctggccagttcggtgctgtccccttaaacctgattggcttgaaagcaggaagatgtgcggactatgtggtgacagggacttggtcagctaaggccgcag

SEQ ID NO: 19418 - DNA, 201 bp, Homo sapiens; identical to SEQ ID NO: 19412

SEQ ID NO: 19419 - DNA, 201 bp, Homo sapiens
ccaagcacctggaacctcaacccggatgcctcctatgtgtattattgcgcaaatgaggtggtgcatggtgtggagtttgactttataccctatgtcaaggkagcagtactggtttgtgacatgtcctcaaacttcctgtccaagccagtggatgtccaaagtgccccttggtcctagaatacgaggtacaggctggaaaca

SEQ ID NO: 19420 - DNA, 117 bp, Homo sapiens
gccgttccagacagctrtaaggtgatttttgtgcaaggaagtgggtctggccagttcggtgctgtccccttaaacctgattggcttgaaagcaggaagatgtgcggactatgtggtg

SEQ ID NO: 19421 - DNA, 201 bp, Homo sapiens; identical to SEQ ID NO: 19409

SEQ ID NO: 19422 - DNA, 201 bp, Homo sapiens; identical to SEQ ID NO: 19410

SEQ ID NO: 19423 - DNA, 201 bp, Homo sapiens; identical to SEQ ID NO: 19411

SEQ ID NO: 19424 - DNA, 201 bp, Homo sapiens; identical to SEQ ID NO: 19412

SEQ ID NO: 19425 - DNA, 201 bp, Homo sapiens; identical to SEQ ID NO: 19413

SEQ ID NO: 19426 - DNA, 201 bp, Homo sapiens; identical to SEQ ID NO: 19414

SEQ ID NO: 19427 - DNA, 201 bp, Homo sapiens; identical to SEQ ID NO: 19415

SEQ ID NO: 19428 - DNA, 201 bp, Homo sapiens
tcttctccctgtcctactgcaaccgctcctacctgtctctcggcactggtggacccctgcaggaggcctatgatgcagtgctcaccatcagccaggagtckggccccatagacaaggcctttgctgctgcccggcctgatggagaggcggctgcccaccttgagccagagcaggtaggtgtgctccttgtgcagaccccga

SEQ ID NO: 19429 - DNA, 201 bp, Homo sapiens
tacatggtggtgtgggggctgcctcagtgcaatggcagtcagcatgcggccgagatcaataacatggctctggatatccttggctctgtgggtgacttccrgaagaggcatgcacccaacgtgcccatttgcatcagggctggcctgcattcagggccctgtgcagcaggggtcgtgggtctcacgatgccttggtattgc

SEQ ID NO: 19430 - DNA, 201 bp, Homo sapiens
atgctgttctgggcagccatgacctgtataaggtggagaccattggggacgcctacatggtggtgtgggggctgcctcagtgcaatggcagtcagcatgcrgccgagatcaataacatggctctggatatccttggctctgtgggtgacttccggaagaggcatgcacccaacgtgcccatttgcatcagggctggcctgc

SEQ ID NO: 19431 - DNA, 201 bp, Homo sapiens
gccctgagtgaacccattgaggcggtgggcttgctcaacgatctctacatgctgtttgatgctgttctgggcagccatgacctgtataaggtggagaccaytggggacgcctacatggtggtgtgggggctgcctcagtgcaatggcagtcagcatgcggccgagatcaataacatggctctggatatccttggctctgtg

SEQ ID NO: 19432 - DNA, 201 bp, Homo sapiens
gactcgggcccactctactgctcctcgggacttccagtggaagaatcataatgatgatgataatgataagcaggcagtgtcgttcacacctgtggggaacyggcacgccagtgtctgcgtggcaaggctggaggaaagagctgcgctgtcaaggtttcaagatcattggtgggcattgttggcaacagagcagcggcagtt

SEQ ID NO: 19433 - DNA, 201 bp, Homo sapiens
gagtctgccaggaccccaggcccgccccatggtgttggttgccgaaatcatcaggagggtggcatctccccctcctctgtgccggccgctgaagtgctggracgaggctccagaggacagacctagcatggaccagatctacagccagttcaaaagcatcaaccaaggcaagaggaccagtgttgctgactccatgctgtg

SEQ ID NO: 19434 - DNA, 201 bp, Homo sapiens
ggatggtgggagcctgagatgctttgtgctcaaggtcactgaccatgagctgctatggacagctcctgagctgctgccggggcctgggcgccctgggcggygcaccctcacaggggacatcttcagcactggcatcatcctgcaggaggtgctgactcgggcccactctactgctcctcgggacttccagtggaagaatca

SEQ ID NO: 19435 - DNA, 201 bp, Homo sapiens
caaggcctttgctgctgcccggcctgatggagaggcggctgcccaccttgagccagagcaggtaggtgtgctccttgtgcagaccccgaatgccttgagtrggggtccggggcaggggtgcacgcggtcaggactcagtgaacttgggtctcctggggatgcccgtttcttggtgttaagaagacagcagtgcctggaggt

SEQ ID NO: 19436 - DNA, 201 bp, Homo sapiens; identical to SEQ ID NO: 19428

SEQ ID NO: 19437 - DNA, 201 bp, Homo sapiens
tacatggtggtgtgggggctgcctcagtgcaatggcagtcagcatgcggccgagatcaataacatggctctggatatccttggctctgtgggtgacttccrgaagaggcatgcacccaacgtgcccatttgcatcagggctggcctgcattcagacctgctggagctcactgggtacattcgagtttcagggccctgtgca

SEQ ID NO: 19438 - DNA, 201 bp, Homo sapiens; identical to SEQ ID NO: 19430

SEQ ID NO: 19439 - DNA, 201 bp, Homo sapiens
acagcaccacggattgcaaagctccagcaacccttgaaacctggtcctccagcatccccagtcagacagcccaacaccatgccaagctcctggcgtctccrcacctacccctatccattagcaagtctggagcctccagagcctctggggaggcagaacaggggtgaggacagcaccttccagctctccaccacctccaca

SEQ ID NO: 19440 - DNA, 201 bp, Homo sapiens
gaagggcatcgaagagacctactgggtggggggaaggcaggcttccccaggcccctccccgcacctgtggacatcagacctggctctggctgctcactcartggttccttctggggcttcacagcaccacggattgcaaagctccagcaacccttgaaacctggtcctccagcatccccagtcagacagcccaacaccatg

SEQ ID NO: 19441 - DNA, 201 bp, Homo sapiens; identical to SEQ ID NO: 19431

SEQ ID NO: 19442 - DNA, 135 bp, Homo sapiens
gtccacaacaagggcaccaggcttcatgctgctctcttgcctctattcccacccctaatctacctgcaacgcagaccttgcgacgtcacttttcgacttakcaagtgtgcactactgatgaccaagggcctttgc

SEQ ID NO: 19443 - DNA, 201 bp, Homo sapiens; identical to SEQ ID NO: 19432

SEQ ID NO: 19444 - DNA, 201 bp, Homo sapiens; identical to SEQ ID NO: 19433

SEQ ID NO: 19445 - DNA, 201 bp, Homo sapiens; identical to SEQ ID NO: 19434

SEQ ID NO: 19446 - DNA, 201 bp, Homo sapiens; identical to SEQ ID NO: 19435

SEQ ID NO: 19447 - DNA, 201 bp, Homo sapiens
gtcgacgtcatagtcttggacttgtccgaagggaacttgctgtatcaactgccatggtgtattacgtcaaacagaagtactcccacctccaggtgattggrgggaacgtggtgacagcagcccaggccaagaacctgattgatgctggtgtggacgggctgtgtgtgggcataggctgcggctccctctgcatcacccagg

SEQ ID NO: 19448 - DNA, 201 bp, Homo sapiens
ttgaatttgaagttgttggtgatgccccggaaaaagtggggcccaaacaagctgaagatgctgccaaaagcataaccaatggcagtgatgatggagctcarccctccacctccacagctcaagagcaagatgacgttctcatagttgattcggatgaagaagattcttcaaataatgccgacgtcagtgaagaagagagaa

SEQ ID NO: 19449 - DNA, 136 bp, Homo sapiens
cttcccccacccgcttccggccgcggctcggttctmccgcctccgcctccgccgcggctcgtggttgtcccgccatggcactgtcgcgggggctgccccgggagctggctgaggcggtggccgggggccgggtgct

SEQ ID NO: 19450 - DNA, 201 bp, Homo sapiens
gtaggaatatagttttaaaaaccctttgaacaaagtgtgtgcataaccagtcatgagataaaacaacacaatgcatgttgcctttttaatgtaaatacccktaggtatcattaatagtttcaaaatattgtggtttagtaaagttgatacctggttataaatattatgcctttatttttggctagaagaagaattattttt

SEQ ID NO: 19451 - DNA, 201 bp, Homo sapiens
cggaaaaggaaacctccagttccgttggactgggctgaagtacaaagtcaaggagaagaaacgaatgcatcagatcaacagaatgaaccccagttaggcckgaaagaccagcaggttctagatgtaaagagctatgcacgtcttttttcaaagagcatcgagactttgagagttcatttagcagaaaagggggatggagct

SEQ ID NO: 19452 - DNA, 201 bp, Homo sapiens
gttgccaaggaaagtgtactgcagttttacccgaaagctaatatcgttgcctaccatgacagcatcatgaaccctgactataatgtggaatttttccgacrgtttatactggttatgaatgctttagataacagagctgcccgaaaccatgttaatagaatgtgcctggcagctgatgttcctcttattgaaagtggaaca

SEQ ID NO: 19453 - DNA, 201 bp, Homo sapiens
atgtgcctggcagctgatgttcctcttattgaaagtggaacagctgggtatcttggacaagtaactactatcaaaaagggtgtgaccgagtgttatgagtktcatcctaagccgacccagagaacctttcctggctgtacaattcgtaacacaccttcagaacctatacattgcatcgtttgggcaaagtacttgttcaac

SEQ ID NO: 19454 - DNA, 201 bp, Homo sapiens
gtatgtctgtgtaagaagccaatttttgtgtattgttacagtttcaggttatttatattcgatgttttgtaaaactcaaataacgactatacttatggacmaaataaatggcatctgcattcttgttacacatgcctgcacagttcctgtttctgctgccttatatctactgcaggaatgtcaaattcttttcattaaaaa

SEQ ID NO: 19455 - DNA, 201 bp, Homo sapiens
ctgaagatgctgccaaaagcataaccaatggcagtgatgatggagctcagccctccacctccacagctcaagagcaagatgacgttctcatagttgattcrgatgaagaagattcttcaaataatgccgacgtcagtgaagaagagagaagccgcaagaggaaattagatgagaaagagaatctcagtgcaaagaggtcac

SEQ ID NO: 19456 - DNA, 201 bp, Homo sapiens
cggctcggttctcccgcctccgcctccgccgcggctcgtggttgtcccgccatggcactgtcgcgggggctgccccgggagctggctgaggcggtggccgrgggccgggtgctggtggtgggggcgggcggcatcggctgcgagctcctcaagaatctcgtgctcaccggtttctcccacatcgacctgattgatctggat

SEQ ID NO: 19457 - DNA, 193 bp, Homo sapiens
ggagtagcactgtcttcctggtcccggacctcagagggctttgcctgttagggtactcttatcactcagagatgggccttgagttttcagagaacagaaasccattaagctgtttcccctattgtattcatgtgccctttgtgtttctggcaataatttattttatatttcaactaaattttaaatttctaat

SEQ ID NO: 19458 - DNA, 201 bp, Homo sapiens; identical to SEQ ID NO: 19448

SEQ ID NO: 19459 - DNA, 136 bp, Homo sapiens; identical to SEQ ID NO: 19449

SEQ ID NO: 19460 - DNA, 201 bp, Homo sapiens; identical to SEQ ID NO: 19450

SEQ ID NO: 19461 - DNA, 201 bp, Homo sapiens; identical to SEQ ID NO: 19451

SEQ ID NO: 19462 - DNA, 201 bp, Homo sapiens; identical to SEQ ID NO: 19452

SEQ ID NO: 19463 - DNA, 201 bp, Homo sapiens; identical to SEQ ID NO: 19453

SEQ ID NO: 19464 - DNA, 201 bp, Homo sapiens; identical to SEQ ID NO: 19454

SEQ ID NO: 19465 - DNA, 201 bp, Homo sapiens; identical to SEQ ID NO: 19455

SEQ ID NO: 19466 - DNA, 201 bp, Homo sapiens; identical to SEQ ID NO: 19456

SEQ ID NO: 19467 - DNA, 201 bp, Homo sapiens
ccagagttggtttagtttgcgccgagtcgagatcatttccaacaattcaatccaagcagtctttaacccaactggcgtatatgctccctctggttactccyaccgctgccaacgcgtgggcagcctgcagcaggaccaggccctcttgctgcccagcgacacggatgatgggtcgagcctgtgggaggtcacttttattga

SEQ ID NO: 19468 - DNA, 201 bp, Homo sapiens
gcaaaggattccaggcttggtctcaactccaaatggttgtctttgaagcttggtgatgctggaaaccccagaagtcttgctataagattcatccttaccarttacaacaagttgtccatccagagttggtttagtttgcgccgagtcgagatcatttccaacaattcaatccaagcagtctttaacccaactggcgtatat

SEQ ID NO: 19469 - DNA, 201 bp, Homo sapiens
tcagggatcccacagagacaaatatgactgttagttgcctcaaagtaccctgaaagcaaaggggtatttcaagtacggaaaaagagagagagagaagaagraggaggaggaggaggaggaggagaaggagaaggaggagcaggaggaagaggaggaggaggaggaaagggagggagggagggagagggagagagagagaaa

SEQ ID NO: 19470 - DNA, 201 bp, Homo sapiens
aatgtaagattgagtcactgccaagcatttgaaatatgcagttgtgttttaattataatttatgtatagttagatgtatgtagtgcattgtgtggtattayttggtttgtaagaatttatttttaagggtcaaggtcatttgtaacattttgtgtgtgtcaattcaatgcaatgttggctgccttttgaagtctttgatat

SEQ ID NO: 19471 - DNA, 201 bp, Homo sapiens
aaggctggggcttcatgccctatttgcaagaaagagattcagctggttattaaggtttttatagcataatggtagtacgaacataaaaatgcatttattcmgttcacttaccacattatttgaaaatcaatcctttatttaattttatttccaacctgtcagagaatgttcttaggcatcaaaatccaaggtagctgtaag

SEQ ID NO: 19472 - DNA, 201 bp, Homo sapiens
gattttttttactcactgccactaaactaaagcaaggcatagtttatatgtgaagtgttcagagtttactgctataaggaaacttccaaatactgacattyaccttttagctgtagttattgggaccatgtgctctggttttctggagactgccaaattgctcccatttttctgcatcccacctggtttctttctgcatgt

SEQ ID NO: 19473 - DNA, 201 bp, Homo sapiens
tgtgccagaagactaaagaaggctggggcttcatgccctatttgcaagaaagagattcagctggttattaaggtttttatagcataatggtagtacgaacwtaaaaatgcatttattccgttcacttaccacattatttgaaaatcaatcctttatttaattttatttccaacctgtcagagaatgttcttaggcatcaaa

SEQ ID NO: 19474 - DNA, 201 bp, Homo sapiens
agcagttaggtgttggaataaaagttgaagctgctgatactgaacaaacaagtgaagaagtagggaaagtaagtgacaaaaaggtgattgaagtgggaaamaatgatgacctggaggactctaagtccttaagtgatgataccgatgtagaggttacctctgaggatgagtggcagtgtactgaatgcaagaaatttaact

SEQ ID NO: 19475 - DNA, 201 bp, Homo sapiens
ccacccgggctcggcgggggagcgactcatggagctgccgtaagttttaccaacagactgcagtttcttcactaccaaaatgacatcattttccacctctrctcagtgttcaacatctgacagtgcttgcaggatctctcctggacaaatcaatcaggtacgaccaaaactgccgcttttgaagattttgcatgcagcagg

SEQ ID NO: 19476 - DNA, 201 bp, Homo sapiens
caaggcatagtttatatgtgaagtgttcagagtttactgctataaggaaacttccaaatactgacatttaccttttagctgtagttattgggaccatgtgytctggttttctggagactgccaaattgctcccatttttctgcatcccacctggtttctttctgcatgtcccctttcactttcaaacctcttcatttggat

SEQ ID NO: 19477 - DNA, 201 bp, Homo sapiens
caacatattgcatattatatatgtgctttaaagttttttttttttttgagagacggtctcactttgtcatccaagctggagtgcagtggtgcaaacacggmccacctcctgggctcaagtgatcctccagcctcagcttccctcacaggcattcactatcactcccagctaattaaaataatttgtagacggtgtctcgtt

SEQ ID NO: 19478 - DNA, 201 bp, Homo sapiens
tgtagcttatgtgagaaaagaccacgagacgggaacattattcatggaaggacgggccatcttgtcacttgttttcactgtgccagaagactaaagaaggstggggcttcatgccctatttgcaagaaagagattcagctggttattaaggtttttatagcataatggtagtacgaacataaaaatgcatttattccgttc

SEQ ID NO: 19479 - DNA, 201 bp, Homo sapiens; identical to SEQ ID NO: 19474

SEQ ID NO: 19480 - DNA, 201 bp, Homo sapiens; identical to SEQ ID NO: 19473

SEQ ID NO: 19481 - DNA, 201 bp, Homo sapiens; identical to SEQ ID NO: 19475

SEQ ID NO: 19482 - DNA, 201 bp, Homo sapiens; identical to SEQ ID NO: 19471

SEQ ID NO: 19483 - DNA, 133 bp, Homo sapiens
caggggtgtccaatcttttggcttccctggtccacaatggaagaagaattgtcttggaccacacataaaatacactaacactaacaatagctgatgagctaaaaaaaaaaaaaaaaaaaatcgtggaccgggc

SEQ ID NO: 19484 - DNA, 201 bp, Homo sapiens; identical to SEQ ID NO: 19478

SEQ ID NO: 19485 - DNA, 201 bp, Homo sapiens; identical to SEQ ID NO: 19477

SEQ ID NO: 19486 - DNA, 201 bp, Homo sapiens
gtgtgggaaaatgcaaaagccaaatgggcagcccgaaagactcaaatctttctccctatgaattttaaggataaccatggaatagccctgatggcatatayttccgaagctcaagagcaaactcccttttaccatctgttcagtgaagctgtgaagatggctggccaatctcgagaagattatatctatggcttccagttc

SEQ ID NO: 19487 - DNA, 201 bp, Homo sapiens
ggtcatcattttaatcagtgtttctgctataaatctctttgttgctctgtagtttgatgcattgtttatctttcttattctttacttgaaataactatagrgatacacaggagatcaaaaggaatgatgtattttttacgtgttggccaaagtcactggataaaatgagaattgtatatttgttattcattttgcaaattc

SEQ ID NO: 19488 - DNA, 201 bp, Homo sapiens
cccacccaaatacctgaagataaaagtcaaggaaatatcaacaatcctactccaggtccagttcctgttccaggtcccaaaagccatccttctgcatcctygggcaaactgctgcttccacagtttgggatggtcatcattttaatcagtgtttctgctataaatctctttgttgctctgtagtttgatgcattgtttatc

SEQ ID NO: 19489 - DNA, 201 bp, Homo sapiens
atcattttaatcagtgtttctgctataaatctctttgttgctctgtagtttgatgcattgtttatctttcttattctttacttgaaataactatagggatmcacaggagatcaaaaggaatgatgtattttttacgtgttggccaaagtcactggataaaatgagaattgtatatttgttattcattttgcaaattcagaa

SEQ ID NO: 19490 - DNA, 201 bp, Homo sapiens; identical to SEQ ID NO: 19486

SEQ ID NO: 19491 - DNA, 201 bp, Homo sapiens; identical to SEQ ID NO: 19487

SEQ ID NO: 19492 - DNA, 201 bp, Homo sapiens
aagcttgaagaccatggtgtgaaaatccttgaacccacccaaatacctgctccaggtccagttcctgttccaggtcccaaaagccatccttctgcatcctygggcaaactgctgcttccacagtttgggatggtcatcattttaatcagtgtttctgctataaatctctttgttgctctgtagtttgatgcattgtttatc

SEQ ID NO: 19493 - DNA, 201 bp, Homo sapiens; identical to SEQ ID NO: 19489

SEQ ID NO: 19494 - DNA, 201 bp, Homo sapiens; identical to SEQ ID NO: 19486

SEQ ID NO: 19495 - DNA, 201 bp, Homo sapiens; identical to SEQ ID NO: 19487

SEQ ID NO: 19496 - DNA, 201 bp, Homo sapiens; identical to SEQ ID NO: 19492

SEQ ID NO: 19497 - DNA, 201 bp, Homo sapiens; identical to SEQ ID NO: 19489

SEQ ID NO: 19498 - DNA, 201 bp, Homo sapiens; identical to SEQ ID NO: 19486

SEQ ID NO: 19499 - DNA, 201 bp, Homo sapiens; identical to SEQ ID NO: 19487

SEQ ID NO: 19500 - DNA, 201 bp, Homo sapiens; identical to SEQ ID NO: 19488

SEQ ID NO: 19501 - DNA, 201 bp, Homo sapiens; identical to SEQ ID NO: 19489

SEQ ID NO: 19502 - DNA, 201 bp, Homo sapiens; identical to SEQ ID NO: 19486

SEQ ID NO: 19503 - DNA, 201 bp, Homo sapiens; identical to SEQ ID NO: 19487

SEQ ID NO: 19504 - DNA, 201 bp, Homo sapiens
ccttttccactacctgaagataaaagtcaaggaaatatcaacaatcctactccaggtccagttcctgttccaggtcccaaaagccatccttctgcatcctygggcaaactgctgcttccacagtttgggatggtcatcattttaatcagtgtttctgctataaatctctttgttgctctgtagtttgatgcattgtttatc

SEQ ID NO: 19505 - DNA, 201 bp, Homo sapiens; identical to SEQ ID NO: 19489

SEQ ID NO: 19506 - DNA, 201 bp, Homo sapiens; identical to SEQ ID NO: 19486

SEQ ID NO: 19507 - DNA, 201 bp, Homo sapiens; identical to SEQ ID NO: 19487

SEQ ID NO: 19508 - DNA, 201 bp, Homo sapiens; identical to SEQ ID NO: 19492

SEQ ID NO: 19509 - DNA, 201 bp, Homo sapiens; identical to SEQ ID NO: 19489

SEQ ID NO: 19510 - DNA, 201 bp, Homo sapiens; identical to SEQ ID NO: 19487

SEQ ID NO: 19511 - DNA, 201 bp, Homo sapiens; identical to SEQ ID NO: 19492

SEQ ID NO: 19512 - DNA, 201 bp, Homo sapiens; identical to SEQ ID NO: 19489

SEQ ID NO: 19513 - DNA, 201 bp, Homo sapiens
aagtattcttactgttgcactgttcttgctggagataagaggttacagcaaattacatgatgacctaggagagtttccatatggattgtttgaacttgtcrttagtataatatctttcctctttttcactgacatgttcatctactggattcacagaggccttcatcatagactggtatataagcgcctacataaacctca

SEQ ID NO: 19514 - DNA, 201 bp, Homo sapiens
ttcactttgtgggataggattggcggctcattcaaaaatccttcatcctttgaggggaagggaccgctcagttatgtgaaggagatgacagagggaaagcrcagcagccattcaggaaatggctgtaagaatgaaaaattattcaatggagagtttacaaagactgaatagattattgcccagttattcttaagtaaggac

SEQ ID NO: 19515 - DNA, 201 bp, Homo sapiens
tttaaaaatatcgatatcaccatgatttaatccagatctgggattatgtagctaaacattgtgatgattattatttaaaaccattatttaataagagtaaraatatgtgaatctggatatatttaaaaaaagaaatttgatgcccagataatatattaggcactactgattttttagttaaattgatgcactacacttttg

SEQ ID NO: 19516 - DNA, 201 bp, Homo sapiens
agtttacaaagactgaatagattattgcccagttattcttaagtaaggacaaagaaggaaatatcatcgtatttcttttttttaataaggaaaaaataatmtccatacagtcaagatacatagtaaatggtatcatttggaaatcagcatcgtgggcactgctgaggaatgatcctagtggtaggtcagaagaagatgctg

SEQ ID NO: 19517 - DNA, 201 bp, Homo sapiens
aagtattcttactgttgcactgttcttgctggagataagaggttacagcaaattacatgatgacctaggagagtttccatatggattgtttgaacttgtcrttagtataatatctttcctctttttcactgacatgttcatctactggattcacagaggccttcatcatagactggtatataaggtaaagtcatttgtggt

SEQ ID NO: 19518 - DNA, 201 bp, Homo sapiens; identical to SEQ ID NO: 19513

SEQ ID NO: 19519 - DNA, 201 bp, Homo sapiens; identical to SEQ ID NO: 19514

SEQ ID NO: 19520 - DNA, 201 bp, Homo sapiens; identical to SEQ ID NO: 19515

SEQ ID NO: 19521 - DNA, 201 bp, Homo sapiens; identical to SEQ ID NO: 19516

SEQ ID NO: 19522 - DNA, 122 bp, Homo sapiens
tggtggtgcacacctgtagtcccagctactcaggagggtgaggcaggagaatcccttgaacctgggaggcagagattgcgccactgcactccagcctgggygacagagcgagactccgtctc

SEQ ID NO: 19523 - DNA, 201 bp, Homo sapiens
tagtttccttaaaaaaacaagtctgcccttttttttttcatcttttaaaataattacaaattattcagttgttttttaatgttctattttcatgtgttcaygtcttgccacatgtgcatttctttagtttttctatcaatctgaaagtctgctgtagatgagattgtgtctggcggaagattggagtgatcagagatgggt

SEQ ID NO: 19524 - DNA, 201 bp, Homo sapiens
gatgctactcttcaggaggaggcctgctcgctggccagcttgctggtgtcggtgaccagcaagggagttgtgacgtgcatgaggaaagtggggaagggcascctggacccagagagcatcttcgagatgatggagactggcaagcgtgtgggcaaggtactgcatgcctccttgcagagtgttgtgcacaaggaagaaagc

SEQ ID NO: 19525 - DNA, 201 bp, Homo sapiens
gaaagtggggaagggcagcctggacccagagagcatcttcgagatgatggagactggcaagcgtgtgggcaaggtactgcatgcctccttgcagagtgttstgcacaaggaagaaagcctggggcccaagagacagaaagttggattcctgggatgatttgcacatcaactgctcaactgtggattgttttttacttttcc

SEQ ID NO: 19526 - DNA, 201 bp, Homo sapiens
tatgtggatgtgctgcttctggaatgtggtggaaatttgtttgatgccatttccattgctgtaaaggctgctctcttcaatacaaggataccaagggttcragttttggaggatgaagaggggtcgaaggacattgaattgtcagatgacccttatgactgcatacgactaagtgtggagaatgtcccctgcattgtcact

SEQ ID NO: 19527 - DNA, 201 bp, Homo sapiens
gggagcactgctgggttctctatgtggatgtgctgcttctggaatgtggtggaaatttgtttgatgccatttccattgctgtaaaggctgctctcttcaayacaaggataccaagggttcgagttttggaggatgaagaggggtcgaaggacattgaattgtcagatgacccttatgactgcatacgactaagtgtggaga

SEQ ID NO: 19528 - DNA, 201 bp, Homo sapiens; identical to SEQ ID NO: 19524

SEQ ID NO: 19529 - DNA, 201 bp, Homo sapiens; identical to SEQ ID NO: 19525

SEQ ID NO: 19530 - DNA, 201 bp, Homo sapiens; identical to SEQ ID NO: 19526

SEQ ID NO: 19531 - DNA, 201 bp, Homo sapiens; identical to SEQ ID NO: 19527

SEQ ID NO: 19532 - DNA, 201 bp, Homo sapiens
gagattggcacttctctgtttgatgaagagggagccaagactgtcaaagacctaatgtccaaagctgagaagaatggtgtgaagattatcttgcctgttgwctttgtcactgctggcaagtttgatgagaataccaagactggccaagccactgtggcttctggcatacctgctggctggctgggcttggactgtggccct

SEQ ID NO: 19533 - DNA, 201 bp, Homo sapiens
cacagctccatggcagaagtcaatctgccacagaaggctggtggttttttgatgaagaaggagctgaactactttgccgaggccttggagagcccagagcsacccttcctggccatcctgggcagaactaaagttgcagacaagatccagctgatcaagaacatgctgggcaaagtcaatgagatgattattggtagtgga

SEQ ID NO: 19534 - DNA, 147 bp, Homo sapiens
cacagcccctaagtcaacttagcattttctgcatctccacttggcattagctaaaactttccatgtcaagattcagctagtggccaagagatgcagtgccrggaacccttaaatggttacacagaatctcagctcatctctactgca

SEQ ID NO: 19535 - DNA, 201 bp, Homo sapiens
gtggaatggtcctgtggggggtttttgaatgggaagcttttgcccggggaaccaaagccctcatggatgaggtggtggagacactgccacttgctgtgtaraatggaacatggaggataaagtcagccaggtgagcactgggggtggtgccggtttagagctcctagaaggtaaagtccatcctggggttgatactcttgg

SEQ ID NO: 19536 - DNA, 201 bp, Homo sapiens
gatgagaataccaagactggccaagccactgtggcttctggcatacctgctggctggctgggcttggactgtggccctgaaagcagcaagaagtatgctgrggctgtcactcaggctaagcagattgtgtggaatggtcctgtggggggtttttgaatgggaagcttttgcccggggaaccaaagccctcatggatgaggt

SEQ ID NO: 19537 - DNA, 201 bp, Homo sapiens
gtggaggaagagggaagggaaaagatgcttctgggaacaaggctaatgctgatccagccaaattagaagctttccaagcttcacttcccaagctaggggawgtctatgtcaatgatgcttttggcactgctcacagagcccacagctccatggcagaagtcaatctgccacagaaggctggtggttttttgatgaagaagg

SEQ ID NO: 19538 - DNA, 201 bp, Homo sapiens
caagatccagctgatcaagaacatgctgggcaaagtcaatgagatgattattggtagtggaatggcttgtaccttccttaaggtgctcagcaacatggagrttggcacttctctgtttgatgaagagggagccaagactgtcaaagacctaatgtccaaagctgagaagaatggtgtgaagattatcttgcctgttgactt

SEQ ID NO: 19539 - DNA, 201 bp, Homo sapiens
tgtaccaacccagctgctgggtctgtcatcctgcgggagaacctccgctttcatgtggaggaagagggaagggaaaagatgcttctgggaacaaggctaaygctgatccagccaaattagaagctttccaagcttcacttcccaagctaggggaagtctatgtcaatgatgcttttggcactgctcacagagcccacagct

SEQ ID NO: 19540 - DNA, 201 bp, Homo sapiens
agctgaactactttgccgaggccttggagagcccagagcgacccttcctggccatcctgggcagaactaaagttgcagacaagatccagctgatcaagaayatgctgggcaaagtcaatgagatgattattggtagtggaatggcttgtaccttccttaaggtgctcagcaacatggagattggcacttctctgtttgatg

SEQ ID NO: 19541 - DNA, 201 bp, Homo sapiens
gggaaaagatgcttctgggaacaaggctaatgctgatccagccaaattagaagctttccaagcttcacttcccaagctaggggaagtctatgtcaatgatrcttttggcactgctcacagagcccacagctccatggcagaagtcaatctgccacagaaggctggtggttttttgatgaagaaggagctgaactactttgc

SEQ ID NO: 19542 - DNA, 201 bp, Homo sapiens
aagatccagctgatcaagaacatgctgggcaaagtcaatgagatgattattggtagtggaatggcttgtaccttccttaaggtgctcagcaacatggagaytggcacttctctgtttgatgaagagggagccaagactgtcaaagacctaatgtccaaagctgagaagaatggtgtgaagattatcttgcctgttgacttt

SEQ ID NO: 19543 - DNA, 201 bp, Homo sapiens
cccactccctcgccggacccccccgccggggctagcgtctgccgcggctccgagggggtggggctgctgggaatggctgtgcccccttcggcccctcagcmgcgcgcgtcctttcacctgaggaggcacacgccttgcccgcagtgctcatggggcatggaggagaaggcggcggccagcgccagctgccgggagccgccg

SEQ ID NO: 19544 - DNA, 201 bp, Homo sapiens
tctacgtgcaagtcaacaagtttgccctgggtcctagctgtgtgtcttccacaatgactgcatccctccagtgctgtagagtcggaaacaggcatggggasattgccaggctgaccctctctggtctgtttccaggcgtctcacttcttctgggctctctgggccctcatccagaaccagtactccaccatcgactttgat

SEQ ID NO: 19545 - DNA, 201 bp, Homo sapiens
cccatcctctggcacaagatgcacaattatttcacgcttgtgaagaacgagatcaaccccagcctttctgcagatgtccctaaggtagaggtgttggaacrggagctggcctggctgaaggagcatctgtcccagctggagtcccctgtggtgttttgtcacaatgacctgctctgcaagaatatcatctatgacagcatc

SEQ ID NO: 19546 - DNA, 201 bp, Homo sapiens
acatgcagggtgtggccctggagcctgagcacatccgtgagccccggcttttcaggttaatcgccttagaaatggcaaagattcatactatccacgccaasggcagcctgcccaagcccatcctctggcacaagatgcacaattatttcacgcttgtgaagaacgagatcaaccccagcctttctgcagatgtccctaagg

SEQ ID NO: 19547 - DNA, 201 bp, Homo sapiens; identical to SEQ ID NO: 19543

SEQ ID NO: 19548 - DNA, 201 bp, Homo sapiens; identical to SEQ ID NO: 19544

SEQ ID NO: 19549 - DNA, 201 bp, Homo sapiens; identical to SEQ ID NO: 19545

SEQ ID NO: 19550 - DNA, 201 bp, Homo sapiens; identical to SEQ ID NO: 19546

SEQ ID NO: 19551 - DNA, 201 bp, Homo sapiens; identical to SEQ ID NO: 19543

SEQ ID NO: 19552 - DNA, 201 bp, Homo sapiens; identical to SEQ ID NO: 19545

SEQ ID NO: 19553 - DNA, 201 bp, Homo sapiens; identical to SEQ ID NO: 19546

SEQ ID NO: 19554 - DNA, 201 bp, Homo sapiens
gggtggtggtcccctaggtatcagcctctcttactgtactctccgggaatgttaacctttctattttcagcctgtgccacctgtctaggcaagctggcttmcccattggcccctgtgggtccacagcagcgtggctgccccccagggccaccgcttctttcttgatcctctttccttaacagtgacttgggcttgagtctg

SEQ ID NO: 19555 - DNA, 201 bp, Homo sapiens
tccagacacccttgttcagacattttatttgaatttatgacagtgatggggatttgactgagatgccttatggagaagtaccccaccctctatgaagacaraatcactctctgccattcattctgcctgatgctaacaacacgcagctgatttagggagtgtcccagcctagctggatcaagggaaattccaggagccctg

SEQ ID NO: 19556 - DNA, 201 bp, Homo sapiens
ctccacggccttcgatacttatgcaagcctggtgttgctcctgtcctcagagtcatcctgcgctcatgccttttcccgaatgggttcacctctggcagttrccgcttcagtcttggccttagcctcatcttgaattctgccaggtgctccatgctggggacaagtaggagactgccagggcccaaagaaatggctgccttt

SEQ ID NO: 19557 - DNA, 201 bp, Homo sapiens
ccttactgctcctcccaccaatgggctccctcacacccaggacaggactaagagggagctggcggagaatggaggtgtcctgcagctggtgggcccagagragaagatgggcctcccgggctcaggtacagtgggcagtgctaggggtgtccagcccagtgctgcgggcactgtcagtaaatcaaagcgactcacagaaag

SEQ ID NO: 19558 - DNA, 201 bp, Homo sapiens
tctgtggccagccctgagcctgcaggcccttcaggctccccagagcttgtcagctccccggctgcttcgtcctcctcagctactgctttgcagattcagcycccgggtagcccagaccctcctccagctccgccagccccagctcctgctagttccgccccagggcatgtggccaagctccctcagaaggaaccggtgggc

SEQ ID NO: 19559 - DNA, 201 bp, Homo sapiens
cacagtggacggccgcccccgaggcacctcagggatgggggcccgggtgtccctgcaggcgctggaggcggaggcggaggctggcgctgagacagaggccrtgctgcagcgccacattgaccgtgtctaccgggatgacacctttgttggccggtccacgggtacccgggccccaccattgacccggcccatgtccctagc

SEQ ID NO: 19560 - DNA, 201 bp, Homo sapiens
aagaaaacctgggcaccagtatttttccaattataaggactgtggcataaatttttaaatgagttatattgaaaccagatttctccagctgccaagggaaraaggtagggctggactccctgctgtggcccagcccttgttaggggttggtctctcactgcagccagacaggatgatcctgggttctggggagggtaagct

SEQ ID NO: 19561 - DNA, 201 bp, Homo sapiens
tccagctcacatccagacacccttgttcagacattttatttgaatttatgacagtgatggggatttgactgagatgccttatggagaagtaccccaccctytatgaagacagaatcactctctgccattcattctgcctgatgctaacaacacgcagctgatttagggagtgtcccagcctagctggatcaagggaaattc

SEQ ID NO: 19562 - DNA, 201 bp, Homo sapiens
cagtgagcactgttctgctcagagctcctgatctaccccaccccctaggatccaggactgggtcaaagctgcatgaaaccaggccctggcagcaacctggsaatggctggaggtgggagagaacctgacttctctttccctctccctcctccaacattactggaactctatcctgttaggatcttctgagcttgtttccct

SEQ ID NO: 19563 - DNA, 201 bp, Homo sapiens
actgaacaagggtggctgggaccatggagacacccagagtatccagtcctcccggacggggccggatgaagacaacatctccttctgcagtcagaccacaycctacgtggctgagagctccacagcagaggacgcgctctccatccgctcggagatgatccagcgcaaaggctccaccttccgaccccatgactcatttcc

SEQ ID NO: 19564 - DNA, 201 bp, Homo sapiens
caggtaccagatcccagctaggggcgcagctgcttggataactccaagaaaacctgggcaccagtatttttccaattataaggactgtggcataaattttyaaatgagttatattgaaaccagatttctccagctgccaagggaagaaggtagggctggactccctgctgtggcccagcccttgttaggggttggtctctc

SEQ ID NO: 19565 - DNA, 201 bp, Homo sapiens
gtgcacgggatgccgtacgcatccccacagtggacggccgcccccgaggcacctcagggatgggggcccgggtgtccctgcaggcgctggaggcggaggcrgaggctggcgctgagacagaggccatgctgcagcgccacattgaccgtgtctaccgggatgacacctttgttggccggtccacgggtacccgggccccac

SEQ ID NO: 19566 - DNA, 201 bp, Homo sapiens
ggctgagaatgacaaacatctaagtgtagggcctggccaggggccagggtctgcagtggatgagcaccaggacaacgtcttctttcccagtgggcgacccycccacctggaagagctgcacactcaggcccaggaggggctccgctccctacaacaccaagagaaacagaaactgaacaagggtggctgggaccatggaga

SEQ ID NO: 19567 - DNA, 201 bp, Homo sapiens
cctcactggcactgctgacccatcccagaaacacaatctcagggacccgagcagctccaaggacgagaggatacagcagacacaacctaatagagagggcrcctgcagccttaacctccacggccttcgatacttatgcaagcctggtgttgctcctgtcctcagagtcatcctgcgctcatgccttttcccgaatgggtt

SEQ ID NO: 19568 - DNA, 201 bp, Homo sapiens
cctctgatttttaatttccataaaatgttagaagtatatatatacatatatatatttctttaaatttttgagtctttgatatgtctaaaaatccattcccyctgccctgaagcctgagtgagacacatgaagaaaactgtgtttcatttaaagatgttaattaaatgattgaaacttggctgtggctactgcttcttaatg

SEQ ID NO: 19569 - DNA, 201 bp, Homo sapiens
tgcattttactcaagtcttctctagtcaatgaggggcacccagtgcttctagggcaggctgggtggtggtcccctaggtatcagcctctcttactgtactmtccgggaatgttaacctttctattttcagcctgtgccacctgtctaggcaagctggcttccccattggcccctgtgggtccacagcagcgtggctgcccc

SEQ ID NO: 19570 - DNA, 201 bp, Homo sapiens; identical to SEQ ID NO: 19554

SEQ ID NO: 19571 - DNA, 201 bp, Homo sapiens; identical to SEQ ID NO: 19555

SEQ ID NO: 19572 - DNA, 201 bp, Homo sapiens; identical to SEQ ID NO: 19556

SEQ ID NO: 19573 - DNA, 201 bp, Homo sapiens; identical to SEQ ID NO: 19557

SEQ ID NO: 19574 - DNA, 201 bp, Homo sapiens; identical to SEQ ID NO: 19558

SEQ ID NO: 19575 - DNA, 201 bp, Homo sapiens; identical to SEQ ID NO: 19559

SEQ ID NO: 19576 - DNA, 201 bp, Homo sapiens; identical to SEQ ID NO: 19560

SEQ ID NO: 19577 - DNA, 201 bp, Homo sapiens; identical to SEQ ID NO: 19561

SEQ ID NO: 19578 - DNA, 201 bp, Homo sapiens; identical to SEQ ID NO: 19562

SEQ ID NO: 19579 - DNA, 201 bp, Homo sapiens; identical to SEQ ID NO: 19563

SEQ ID NO: 19580 - DNA, 201 bp, Homo sapiens; identical to SEQ ID NO: 19564

SEQ ID NO: 19581 - DNA, 201 bp, Homo sapiens; identical to SEQ ID NO: 19565

SEQ ID NO: 19582 - DNA, 201 bp, Homo sapiens; identical to SEQ ID NO: 19566

SEQ ID NO: 19583 - DNA, 201 bp, Homo sapiens; identical to SEQ ID NO: 19567

SEQ ID NO: 19584 - DNA, 201 bp, Homo sapiens; identical to SEQ ID NO: 19568

SEQ ID NO: 19585 - DNA, 201 bp, Homo sapiens; identical to SEQ ID NO: 19569

SEQ ID NO: 19586 - DNA, 201 bp, Homo sapiens
ggtgcagtccctgctggagcctctgggcctgcactgcatcttcattgatgactacttgtcctaccacgagctgcagggggagatccactgtggcaccaacrtgcgcaggaagccctttcccttcaaatggtggaacatggtgccctgagcctgcccccacccgccatcctctctgccctcttgctagggaaccctgccagg

SEQ ID NO: 19587 - DNA, 201 bp, Homo sapiens
atgggccccacttagaattgctcccccttcattctgatgcctccctggggaacaaggataatgactttgcatctgcacctggaacggggcctgggggaccwggggtctggtgtgccaggcaccaggctgcctctgctcttggaaaactaggaaaggggatcagaaacatcctctccccgctctaggtttcttctcccaaag

SEQ ID NO: 19588 - DNA, 201 bp, Homo sapiens
ggggagatccactgtggcaccaacgtgcgcaggaagccctttcccttcaaatggtggaacatggtgccctgagcctgcccccacccgccatcctctctgcbctcttgctagggaaccctgccagggtgaaggcaaggaacaaccacctggcctccattctcttgggggagtcttggcactttgcaaacatcctggccacca

SEQ ID NO: 19589 - DNA, 201 bp, Homo sapiens
tgatctaggaggctgggagccaggtgacaggatggccccaaagagagttgtgcagctgtccctgaagatgcctacccatgccgtgtgtgtggtgggagtcraggcacatgtggacattcacagtgatgtgcccaagggtgccaacagcttcagggtctctggaagctccggggtggaggtcttcatggtctacaaccgcac

SEQ ID NO: 19590 - DNA, 132 bp, Homo sapiens
acacttcttcctggcaaagaagtgcccaggaygggagctggggagccagggctgatctaggaggctgggagccaggtgacaggatggccccaaagagagttgtgcagctgtccctgaagatgcctacccatg

SEQ ID NO: 19591 - DNA, 201 bp, Homo sapiens
tcaagttgaaaatcgaaatgaccgctggatccaggacgagatggagtttggctacatcgaggcccctcacaaatccttccccgtggtctttgactcccccmggaacaggggcctgaaagatttcccctataagaggatcctgggtcctgactttggatatgttacccgggagatcccgctccctggtccctccagccttga

SEQ ID NO: 19592 - DNA, 201 bp, Homo sapiens
cgggagctggggagccagggctgatctaggaggctgggagccaggtgacaggatggccccaaagagagttgtgcagctgtccctgaagatgcctacccatsccgtgtgtgtggtgggagtcgaggcacatgtggacattcacagtgatgtgcccaagggtgccaacagcttcagggtctctggaagctccggggtggaggt

SEQ ID NO: 19593 - DNA, 125 bp, Homo sapiens
acacttcttcctggcaaagaagtgyccaggacgggagctggggagccagggctgatctaggaggctgggagccaggtgacaggatggccccaaagagagttgtgcagctgtccctgaagatgcct

SEQ ID NO: 19594 - DNA, 201 bp, Homo sapiens
ggagctggggagccagggctgatctaggaggctgggagccaggtgacaggatggccccaaagagagttgtgcagctgtccctgaagatgcctacccatgcygtgtgtgtggtgggagtcgaggcacatgtggacattcacagtgatgtgcccaagggtgccaacagcttcagggtctctggaagctccggggtggaggtct

SEQ ID NO: 19595 - DNA, 201 bp, Homo sapiens
aagagcccataggcaaggcccgttggccgctagacactgatgcagacatggtcgtatctgtgggcacagccagtaaggaattaaaggacttcaaggtgagrgtctcctactttggggagcaggaagaccaagctctgggccgcagcgtgctttacctcactggcgtcgatatttcccttgaggttgacacaggccgcacag

SEQ ID NO: 19596 - DNA, 201 bp, Homo sapiens
tggtttccctcagtgtcagcctggtggacccggggaccctgcccgaggtgaccctcttcacagacactgtgggcttccgcatggccccctggatcatgackcccaacactcagcctcctgaggagctgtatgtgtgcagagtgatggacactcatggctccaatgagaaattcctggaggacatgtcttatctgacattga

SEQ ID NO: 19597 - DNA, 201 bp, Homo sapiens
agaaattcctggaggacatgtcttatctgacattgaaagccaactgcaagctgaccatctgccctcaagttgaaaatcgaaatgaccgctggatccaggaygagatggagtttggctacatcgaggcccctcacaaatccttccccgtggtctttgactcccccaggaacaggggcctgaaagatttcccctataagagga

SEQ ID NO: 19598 - DNA, 201 bp, Homo sapiens
agtcaatgccgtctttcagctggacatcaccaaaaatgggaagaccattttgcggtggaccattgatctgaagaatggttctggggacatgtatccgggayctgccaggctcccagcagacactgtctttacaatcccggagtctgtctttatggagctggttttgggcaaaatgaacccgcagaaggctttccttgccgg

SEQ ID NO: 19599 - DNA, 201 bp, Homo sapiens
ggcttcacatcagggaagtgggagctcaattggtcaagaaagtcaatgccgtctttcagctggacatcaccaaaaatgggaagaccattttgcggtggacyattgatctgaagaatggttctggggacatgtatccgggacctgccaggctcccagcagacactgtctttacaatcccggagtctgtctttatggagctgg

SEQ ID NO: 19600 - DNA, 201 bp, Homo sapiens
aaattttaagcatgcaaaaataccaaggaagaacttctcttcgatgataatgtcgagtggaaatcatgcttaatctgaagattaaagtaaaaagtatccartatttttactcaaattcttcctattcaagtttaattgattttcctgttgatgggtaaattttcagggagggttctgaagcagtaaaaagcgttgtagtgc

SEQ ID NO: 19601 - DNA, 115 bp, Homo sapiens
aagtatccaatatttttactcaaattcttcctattcaagtttaattgattttcctgttgatgggtaaattttcagggagggttctgaagcagtaaaaagcrttgtagtgcatcaa

SEQ ID NO: 19602 - DNA, 201 bp, Homo sapiens
gcagtcagcaccacagcacctggcctcctgcacaccctgaaggtagcacccctgcctttggctcagagtatgctggtgccggtgccagctcccagaaaggratatgagtctagtttttccaatgaggaaacacagaaggcacaggcccttcaactggcctcttacctcaacctggccatgtgtcatctgaaactacaggcc

SEQ ID NO: 19603 - DNA, 201 bp, Homo sapiens
gtgccggtgccagctcccagaaaggaatatgagtctagtttttccaatgaggaaacacagaaggcacaggcccttcaactggcctcttacctcaacctggycatgtgtcatctgaaactacaggccttctctgctgccactgaaagctgtaacaaggccctggaactgggcagcaacaacgagaagggcctcttccattgg

SEQ ID NO: 19604 - DNA, 201 bp, Homo sapiens
accaaatgcctagctgaaatatgaattacacctcaagagttttgaaaagaccaaggagtcttgggagatgaattcagaagagaagctggagcagagcaccrcagtgaaagagtgggacactgtgtacttcaaggaaggcaaatacaagcaagctttactataatataagaggattgtgtcctgggtagaatatgagtctag

SEQ ID NO: 19605 - DNA, 173 bp, Homo sapiens
aagggtgcgctgcgtggagatgacagttgaggagatgaaggagactgagaatgggacacagttggcgcctctkcccatggagggagtggacattcgcccaaacaggaggaaggcatgctgaaggtcatcgagagagggcacaggtacagagatgcccatgattggggactgaa

SEQ ID NO: 19606 - DNA, 201 bp, Homo sapiens
tggagcagagcaccacagtgaaagagtgggacactgtgtacttcaaggaaggcaaatacaagcaagctttactataatataagaggattgtgtcctgggtrgaatatgagtctagtttttccaatgaggaaacacagaaggcacaggcccttcaactggcctcttacctcaacctggccatgtgtcatctgaaactacagg

SEQ ID NO: 19607 - DNA, 146 bp, Homo sapiens
aagggtgcgctgcgtggagatgacagttgaggagatgaaggagacygagaatgggacacagttggcgcctcttcccatggagggagtggacattcgcccaaacaggaggaaggcatgctgaaggtcatcgagagagggcacaggta

SEQ ID NO: 19608 - DNA, 201 bp, Homo sapiens
tataagaggattgtgtcctgggtagaatatgagtctagtttttccaatgaggaaacacagaaggcacaggcccttcaactggcctcttacctcaacctggycatgtgtcatctgaaactacaggccttctctgctgccactgaaagctgtaacaaggccctggaactgggcagcaacaacgagaagggcctcttccattgg

SEQ ID NO: 19609 - DNA, 114 bp, Homo sapiens
aagggtgcgctgcrtggagatgacagttgaggagatgaaggagactgagaatgggacacagttggcgcctcttcccatggagggagtggacattcgcccaaacaggaggaaggc

SEQ ID NO: 19610 - DNA, 201 bp, Homo sapiens
cagaaaattttcgtgctctgagcactggagagaaaggatttggttataagggttcctgctttcacagaattattccagggtttatgtgtcagggtggtgamttcacacgccataatggcactggtggcaagtccatctatggggagaaatttgagcatgaatattgtggaggccatggagcgctttgggtccaggaatggc

SEQ ID NO: 19611 - DNA, 191 bp, Homo sapiens
aaaccgtgtactattagccatggtcaaccccaccgtgttcttcgacattgccgtcgacggcgagcccttgggccgcgtctcctttgagctrtttgcagacaaggtcccaaagacagcagaaaattttcgtgctctgagcactggagagaaaggatttggttataagggttcctgctttcacagaattattc

SEQ ID NO: 19612 - DNA, 201 bp, Homo sapiens
cgcgtctcctttgagctatttgcagacaaggtcccaaagacagcagaaaattttcgtgctctgagcactggagagaaaggatttggttataagggttcctrctttcacagaattattccagggtttatgtgtcagggtggtgacttcacacgccataatggcactggtggcaagtccatctatggggagaaatttgagcat

SEQ ID NO: 19613 - DNA, 125 bp, Homo sapiens
aaaccgtgtactattagccatggtyaaccccaccgtgttcttcgacattgccgtcgacggcgagcccttgggccgcgtctcctttgagctatttgcagacaaggtcccaaagacagcagaaaatt

SEQ ID NO: 19614 - DNA, 110 bp, Homo sapiens
aaaccgtgtrctattagccatggtcaaccccaccgtgttcttcgacattgccgtcgacggcgagcccttgggccgcgtctcctttgagctatttgcagacaaggtcccaa

SEQ ID NO: 19615 - DNA, 201 bp, Homo sapiens
ggtttatgtgtcagggtggtgacttcacacgccataatggcactggtggcaagtccatctatggggagaaatttgaagatgagaacttcatcctaaagcayacaggtcctggcatcttgtccatggcaaatgctggacccaacacaaatggatcccagtttttcatctgcactgccaagactgagtggttggatggcaagc

SEQ ID NO: 19616 - DNA, 201 bp, Homo sapiens
cagaaaattttcgtgctctgagcactggagagaaaggatttggttataagggttcctgctttcacagaattattccagggtttatgtgtcagggtggtgamttcacacgccataatggcactggtggcaagtccatctatggggagaaatttgaagatgagaacttcatcctaaagcatacaggtcctggcatcttgtcca

SEQ ID NO: 19617 - DNA, 201 bp, Homo sapiens
ccgccgaggaaaaccgtgtactattagccatggtcaaccccaccgtgttcttcgacattgccgtcgacggcgagcccttgggccgcgtctcctttgagctrtttgcagacaaggtcccaaagacagcagaaaattttcgtgctctgagcactggagagaaaggatttggttataagggttcctgctttcacagaattattc

SEQ ID NO: 19618 - DNA, 201 bp, Homo sapiens
cgcgtctcctttgagctatttgcagacaaggtcccaaagacagcagaaaattttcgtgctctgagcactggagagaaaggatttggttataagggttcctrctttcacagaattattccagggtttatgtgtcagggtggtgacttcacacgccataatggcactggtggcaagtccatctatggggagaaatttgaagat

SEQ ID NO: 19619 - DNA, 155 bp, Homo sapiens
acttggctttgcagacgccgccgccgaggaaaaccgtgtactattagccatggtyaaccccaccgtgttcttcgacattgccgtcgacggcgagcccttgggccgcgtctcctttgagctatttgcagacaaggtcccaaagacagcagaaaatt

SEQ ID NO: 19620 - DNA, 140 bp, Homo sapiens
acttggctttgcagacgccgccgccgaggaaaaccgtgtrctattagccatggtcaaccccaccgtgttcttcgacattgccgtcgacggcgagcccttgggccgcgtctcctttgagctatttgcagacaaggtcccaa

SEQ ID NO: 19621 - DNA, 201 bp, Homo sapiens
atccttttctccctcccttccataatggatcgtggtctgtgtgactgaacccacacagagtgtcatgggtgacagtttctggttgaagtagctccacgcckggcttctgtggacagcagattcttttccttctcacaaggggctcatttaaaatttggaggctgggtgctgtggctcacgcctgcaatcccagcactttgg

SEQ ID NO: 19622 - DNA, 201 bp, Homo sapiens
gatccttttctccctcccttccataatggatcgtggtctgtgtgactgaacccacacagagtgtcatgggtgacagtttctggttgaagtagctccacgcytggcttctgtggacagcagattcttttccttctcacaaggggctcatttaaaatttggaggctgggtgctgtggctcacgcctgcaatcccagcactttg

SEQ ID NO: 19623 - DNA, 201 bp, Homo sapiens
gtggttcccatgttctctaacagggccagctgagcagcacaggccaggaggccacagtgtaagcaataacagatctgccacatgcagaagcaaatatcagkcctgtcgcacacgggcggcatttaaataggaatttctatttttgaaataagggatggtctatgaggcatacagtagatttgatgtgatccttttctccct

SEQ ID NO: 19624 - DNA, 201 bp, Homo sapiens
atgctctgtgctggtaccaaacaaggcagacttgcaagaaccacggcatcttttttttttttcaaacctttcctacttcaaacaggcttctcttctgaaaygatgacttaatgtcgaatattgacagcttactgcagttttacagtattcctcacaaagggcttcaggtagattatcagagctgtcagcactacctctccc

SEQ ID NO: 19625 - DNA, 201 bp, Homo sapiens
atttacgtttgtatattagtaactagtgcattactagagcaggtgcaggtgaggtctttaaagtttcaatgaaagtttcttctggatctacagaaaaaatwtttttttttcaatctaaaaactggaaattctagggtttttgtacattttggatgcactgggaatttattagcacaaaatcattctttgcaactcaaaatt

SEQ ID NO: 19626 - DNA, 201 bp, Homo sapiens
gatttacgtttgtatattagtaactagtgcattactagagcaggtgcaggtgaggtctttaaagtttcaatgaaagtttcttctggatctacagaaaaaawttttttttttcaatctaaaaactggaaattctagggtttttgtacattttggatgcactgggaatttattagcacaaaatcattctttgcaactcaaaat

SEQ ID NO: 19627 - DNA, 201 bp, Homo sapiens
attacaaaaaattagctgggcgtggtggtgcacgcctgtagtctcagctactcaggaggctgaggcaggagaatcgcttgaacccgggaggcagaggtagyagtgagctgaagtcccgccactgcactccagcctgggcaacagagcgagactcagtctcaaaaagaaaaaagaaatttattgctgatcacaaggacagac

SEQ ID NO: 19628 - DNA, 201 bp, Homo sapiens
gaggagcctgtggccactgcccccagggagcacaccagatcatcccagctgggattcctcacggcgggggcttttctgcagacttgggttagctctggcaygttttcttctgtttctgatctcccttctgtcattctgtggtcttcctctggaattctcaggttagttggggtctgtgagacggatgtgttcactaaccta

SEQ ID NO: 19629 - DNA, 201 bp, Homo sapiens
gacttccaggggacgatggaatacccagaacgctccttctgaagaaatggggccctgtagctgcagcacaggggaagggcccggcaccctttctgggtccytcctggttccctgtgggccccatgaggagtccattacttcctttcttccttcatattttacaggcagatgcttttcttataatctaattacatcttttca

SEQ ID NO: 19630 - DNA, 201 bp, Homo sapiens
ctgccctgcagtgtgtgtccctttgtcgtattgtcagaggagcctgtggccactgcccccagggagcacaccagatcatcccagctgggattcctcacggygggggcttttctgcagacttgggttagctctggcacgttttcttctgtttctgatctcccttctgtcattctgtggtcttcctctggaattctcaggtta

SEQ ID NO: 19631 - DNA, 201 bp, Homo sapiens
gcgcacacacaccgccaagcagctcagcattctcccccggcacacttagtgacagtgatgctctgtgctggtaccaaacaaggcagacttgcaagaaccayggcatcttttttttttttcaaacctttcctacttcaaacaggcttctcttctgaaatgatgacttaatgtcgaatattgacagcttactgcagttttaca

SEQ ID NO: 19632 - DNA, 201 bp, Homo sapiens
gagtgagactctgtctcaaaaaaaaaaaaaaaaaaaatggaacgcagggcaagaactcgtatttggaaggagatgggggaaaggagcggtattatacctawgttgtatttgcaggcaaatgagatggagccctctctgtaaagaagagtcatttgtgcaagtagacggggtctgtgggtgcaggccctggaggggcacaca

SEQ ID NO: 19633 - DNA, 201 bp, Homo sapiens
gcgatgaccgggagcagttctataagattgccaagcagatcgtccagaagtctctgggactgtgagacctggcctcgcacaggcgcacacacaccgccaakcagctcagcattctcccccggcacacttagtgacagtgatgctctgtgctggtaccaaacaaggcagacttgcaagaaccacggcatctttttttttttt

SEQ ID NO: 19634 - DNA, 201 bp, Homo sapiens
gtccaaaatgtggcgcgatgaccgggagcagttctataagattgccaagcagatcgtccagaagtctctgggactgtgagacctggcctcgcacaggcgcrcacacaccgccaagcagctcagcattctcccccggcacacttagtgacagtgatgctctgtgctggtaccaaacaaggcagacttgcaagaaccacggca

SEQ ID NO: 19635 - DNA, 201 bp, Homo sapiens
acgtggatgcgtccaaaatgtggcgcgatgaccgggagcagttctataagattgccaagcagatcgtccagaagtctctgggactgtgagacctggcctcrcacaggcgcacacacaccgccaagcagctcagcattctcccccggcacacttagtgacagtgatgctctgtgctggtaccaaacaaggcagacttgcaag

SEQ ID NO: 19636 - DNA, 201 bp, Homo sapiens
gatctgccacatgcagaagcaaatatcaggcctgtcgcacacgggcggcatttaaataggaatttctatttttgaaataagggatggtctatgaggcatayagtagatttgatgtgatccttttctccctcccttccataatggatcgtggtctgtgtgactgaacccacacagagtgtcatgggtgacagtttctggttg

SEQ ID NO: 19637 - DNA, 201 bp, Homo sapiens
ccgggcgtggtggcgggcgcctgtagtcccagctactctgaagactgaggcaggagaatggcgtgaacccaggaggcggagcttgcagtgagctgagatcrcgccactgcactccagcctgggcaacagagtgagactctgtctcaaaaaaaaaaaaaaaaaaaatggaacgcagggcaagaactcgtatttggaaggaga

SEQ ID NO: 19638 - DNA, 201 bp, Homo sapiens
cggtgtcggggcaggaggcacgcgcgcggctgaggcgaggtcgctcggcgcagctgttgcggggccatggcggggaccgcgctcaagaggctgatggccgwgtacaaacaattaacactgaatcctccggaaggaattgtagcaggccccatgaatgaagagaacttttttgaatgggaggcattgatcatgggcccagaa

SEQ ID NO: 19639 - DNA, 201 bp, Homo sapiens
gaggcggagcttgcagtgagctgagatcacgccactgcactccagcctgggcaacagagtgagactctgtctcaaaaaaaaaaaaaaaaaaaatggaacgsagggcaagaactcgtatttggaaggagatgggggaaaggagcggtattatacctatgttgtatttgcaggcaaatgagatggagccctctctgtaaagaa

SEQ ID NO: 19640 - DNA, 201 bp, Homo sapiens; identical to SEQ ID NO: 19621

SEQ ID NO: 19641 - DNA, 201 bp, Homo sapiens; identical to SEQ ID NO: 19622

SEQ ID NO: 19642 - DNA, 201 bp, Homo sapiens; identical to SEQ ID NO: 19623

SEQ ID NO: 19643 - DNA, 201 bp, Homo sapiens; identical to SEQ ID NO: 19624

SEQ ID NO: 19644 - DNA, 201 bp, Homo sapiens; identical to SEQ ID NO: 19625

SEQ ID NO: 19645 - DNA, 201 bp, Homo sapiens; identical to SEQ ID NO: 19626

SEQ ID NO: 19646 - DNA, 201 bp, Homo sapiens; identical to SEQ ID NO: 19627

SEQ ID NO: 19647 - DNA, 201 bp, Homo sapiens; identical to SEQ ID NO: 19628

SEQ ID NO: 19648 - DNA, 201 bp, Homo sapiens; identical to SEQ ID NO: 19629

SEQ ID NO: 19649 - DNA, 201 bp, Homo sapiens; identical to SEQ ID NO: 19630

SEQ ID NO: 19650 - DNA, 201 bp, Homo sapiens; identical to SEQ ID NO: 19631

SEQ ID NO: 19651 - DNA, 201 bp, Homo sapiens; identical to SEQ ID NO: 19632

SEQ ID NO: 19652 - DNA, 201 bp, Homo sapiens; identical to SEQ ID NO: 19633

SEQ ID NO: 19653 - DNA, 201 bp, Homo sapiens; identical to SEQ ID NO: 19634

SEQ ID NO: 19654 - DNA, 201 bp, Homo sapiens; identical to SEQ ID NO: 19635

SEQ ID NO: 19655 - DNA, 201 bp, Homo sapiens; identical to SEQ ID NO: 19636

SEQ ID NO: 19656 - DNA, 201 bp, Homo sapiens; identical to SEQ ID NO: 19637

SEQ ID NO: 19657 - DNA, 201 bp, Homo sapiens; identical to SEQ ID NO: 19638

SEQ ID NO: 19658 - DNA, 201 bp, Homo sapiens; identical to SEQ ID NO: 19639

SEQ ID NO: 19659 - DNA, 201 bp, Homo sapiens; identical to SEQ ID NO: 19621

SEQ ID NO: 19660 - DNA, 201 bp, Homo sapiens; identical to SEQ ID NO: 19638

SEQ ID NO: 19661 - DNA, 201 bp, Homo sapiens; identical to SEQ ID NO: 19622

SEQ ID NO: 19662 - DNA, 201 bp, Homo sapiens; identical to SEQ ID NO: 19623

SEQ ID NO: 19663 - DNA, 201 bp, Homo sapiens; identical to SEQ ID NO: 19624

SEQ ID NO: 19664 - DNA, 201 bp, Homo sapiens; identical to SEQ ID NO: 19625

SEQ ID NO: 19665 - DNA, 201 bp, Homo sapiens; identical to SEQ ID NO: 19626

SEQ ID NO: 19666 - DNA, 201 bp, Homo sapiens; identical to SEQ ID NO: 19627

SEQ ID NO: 19667 - DNA, 201 bp, Homo sapiens
gacttccaggggacgatggaatacccagaacgctccttctgaagaaatggggccctgtagctgcagcacaggggaagggcccggcaccctttctgggtccytcctggttccctgtgggccccatgaggagtccattacttccttacatcttttcatttgttatatattacaaaccatcacacttagaaatacttccaggaa

SEQ ID NO: 19668 - DNA, 201 bp, Homo sapiens; identical to SEQ ID NO: 19631

SEQ ID NO: 19669 - DNA, 201 bp, Homo sapiens
gaacccaggaggcggagcttgcagtgagctgagatcacgccactgcactccagcctgggcaacagagtgagactctgtctcaaaaacggtattatacctawgttgtatttgcaggcaaatgagatggagccctctctgtaaagaagagtcatttgtgcaagtagacggggtctgtgggtgcaggccctggaggggcacaca

SEQ ID NO: 19670 - DNA, 201 bp, Homo sapiens; identical to SEQ ID NO: 19633

SEQ ID NO: 19671 - DNA, 201 bp, Homo sapiens; identical to SEQ ID NO: 19634

SEQ ID NO: 19672 - DNA, 201 bp, Homo sapiens; identical to SEQ ID NO: 19635

SEQ ID NO: 19673 - DNA, 201 bp, Homo sapiens; identical to SEQ ID NO: 19636

SEQ ID NO: 19674 - DNA, 201 bp, Homo sapiens
ccgggcgtggtggcgggcgcctgtagtcccagctactctgaagactgaggcaggagaatggcgtgaacccaggaggcggagcttgcagtgagctgagatcrcgccactgcactccagcctgggcaacagagtgagactctgtctcaaaaacggtattatacctatgttgtatttgcaggcaaatgagatggagccctctct

SEQ ID NO: 19675 - DNA, 182 bp, Homo sapiens
acgcgcgcggctgaggcgaggtcgctcggcgcagctgttgcggggccatggcggggaccgcgctcaagaggctgatggccgwgtacaaacccttgagaacgtgcagtgagagcttgaggaagaaggcctgacttgctgctgcggaattaggagggaaaagtgtatgcgttaaaaggggaaag

SEQ ID NO: 19676 - DNA, 190 bp, Homo sapiens
agtgttatttgtaatggtgaaaattttgacttaacctgggtttttaacacaagaataaattaagttatatattgtattagtctgttgtcacgctgctaatraagacatattcaagtctgggtaatttataaaggaaagagatttaatggactcacagttccacatggctggggagacctcacaatcatgg

SEQ ID NO: 19677 - DNA, 201 bp, Homo sapiens; identical to SEQ ID NO: 19621

SEQ ID NO: 19678 - DNA, 182 bp, Homo sapiens; identical to SEQ ID NO: 19675

SEQ ID NO: 19679 - DNA, 201 bp, Homo sapiens; identical to SEQ ID NO: 19622

SEQ ID NO: 19680 - DNA, 201 bp, Homo sapiens; identical to SEQ ID NO: 19623

SEQ ID NO: 19681 - DNA, 201 bp, Homo sapiens; identical to SEQ ID NO: 19624

SEQ ID NO: 19682 - DNA, 201 bp, Homo sapiens; identical to SEQ ID NO: 19625

SEQ ID NO: 19683 - DNA, 201 bp, Homo sapiens; identical to SEQ ID NO: 19626

SEQ ID NO: 19684 - DNA, 201 bp, Homo sapiens; identical to SEQ ID NO: 19627

SEQ ID NO: 19685 - DNA, 201 bp, Homo sapiens; identical to SEQ ID NO: 19667

SEQ ID NO: 19686 - DNA, 201 bp, Homo sapiens; identical to SEQ ID NO: 19631

SEQ ID NO: 19687 - DNA, 201 bp, Homo sapiens; identical to SEQ ID NO: 19669

SEQ ID NO: 19688 - DNA, 201 bp, Homo sapiens; identical to SEQ ID NO: 19633

SEQ ID NO: 19689 - DNA, 201 bp, Homo sapiens; identical to SEQ ID NO: 19634

SEQ ID NO: 19690 - DNA, 201 bp, Homo sapiens; identical to SEQ ID NO: 19635

SEQ ID NO: 19691 - DNA, 201 bp, Homo sapiens; identical to SEQ ID NO: 19636

SEQ ID NO: 19692 - DNA, 201 bp, Homo sapiens; identical to SEQ ID NO: 19674

SEQ ID NO: 19693 - DNA, 201 bp, Homo sapiens
atgtcactctgcaggcgattgcagctcagaacactgtggtccaggctgtcaatgcacactccaacatattgaaagccgccatggacaattctgagattgasggcaagaagaagtctgctaagtggcacacagtgcaaggtgcgttgaaggaacacagaaaggcagtagatgaagctgccaatgcccttctcaaagccaaag

SEQ ID NO: 19694 - DNA, 201 bp, Homo sapiens
taaagtacagcatgaagacctcatctgcagaaatgcctgctgtcccactgggtagtgcagttgaggccatcaaagccaactgttctgataatgaatttacyaaagctttagccacagctatccctccagagtccctgacccatggggtgtacagtgaagagacccttagagtccgcttttatgctgttcaaaaactggccc

SEQ ID NO: 19695 - DNA, 201 bp, Homo sapiens
ttgaggctaagcttgtatctcagtatcatgagctggtgggccaagctcaggatgactttaaacgacagctggacagtattactccagaagtccttcctggrtggaaaggaatgagcgtttcggacccagctgacaagctctctactgatgatctgaactccctgattgcccgtgcacatcgtcacatcgatcagctgaaca

SEQ ID NO: 19696 - DNA, 201 bp, Homo sapiens
tcgtcacatcgatcagctgaacagagagctagcagaacagaaggccacagaaaagcagcacatcacattagccttggagaaacaaacgctggaagaaaagygggttcaagaacaggaattgaagtatgaatttgagcagaacctgtctgagaaactctcggaacaagaattacagtttcatcatctaagtcaagagcaagt

SEQ ID NO: 19697 - DNA, 201 bp, Homo sapiens
cacagtgcaaggtgcgttgaaggaacacagaaaggcagtagatgaagctgccaatgcccttctcaaagccaaagaagaggtccaagcagctcaatttgagkctaagcttgtatctcagtatcatgagctggtgggccaagctcaggatgactttaaacgacagctggacagtattactccagaagtccttcctgggtggaa

SEQ ID NO: 19698 - DNA, 201 bp, Homo sapiens
aattgatgaaggaaaacccacacctgcactttcagaagaagcatcctcatcttctataagggaacgaccatgtgaagaaattgcagcttgccttgcacaasaggaaaaacaagaacaagttaaaactgagtctctagccaagagctttgaagatgctctgaggcaaactgcaaatgtcactctgcaggcgattgcagctca

SEQ ID NO: 19699 - DNA, 201 bp, Homo sapiens
ctcagaacactgtggtccaggctgtcaatgcacactccaacatattgaaagccgccatggacaattctgagattgagggcaagaagaagtctgctaagtgscacacagtgcaaggtgcgttgaaggaacacagaaaggcagtagatgaagctgccaatgcccttctcaaagccaaagaagaggtccaagcagctcaatttg

SEQ ID NO: 19700 - DNA, 201 bp, Homo sapiens
caaaaacaaaagggagatactccagcttcagcaaccgcaggtgatacagtgttggtccctggggttcagcatgaggaatctttaaaaactgatcaccctgmaattgatgaaggaaaacccacacctgcactttcagaagaagcatcctcatcttctataagggaacgaccatgtgaagaaattgcagcttgccttgcacaa

SEQ ID NO: 19701 - DNA, 201 bp, Homo sapiens
gtggttcttggttctgcaccttataatgttccattgccaaagaaatcaactcagtctggtccactaaaaatctctagtgtatcagaagtaacaaaagaatktaaacagcctgcctcacaactccaaaaacaaaagggagatactccagcttcagcaaccgcaggtgatacagtgttggtccctggggttcagcatgaggaa

SEQ ID NO: 19702 - DNA, 201 bp, Homo sapiens
atgcacactccaacatattgaaagccgccatggacaattctgagattgagggcaagaagaagtctgctaagtggcacacagtgcaaggtgcgttgaaggarcacagaaaggcagtagatgaagctgccaatgcccttctcaaagccaaagaagaggtccaagcagctcaatttgaggctaagcttgtatctcagtatcatg

SEQ ID NO: 19703 - DNA, 201 bp, Homo sapiens; identical to SEQ ID NO: 19693

SEQ ID NO: 19704 - DNA, 201 bp, Homo sapiens
agcaccgtccgctcgacagatactgcgggcctgtcagttatcgagtgtgaccgctgtggcccagagttgtctctatgggaagttagtcctccgtccactgygaccatgccgccgatactctacttcaggcagctctgtggttgactactggcaacattgctggagctggccttttgttttttggtggaggtattggtggca

SEQ ID NO: 19705 - DNA, 201 bp, Homo sapiens; identical to SEQ ID NO: 19694

SEQ ID NO: 19706 - DNA, 201 bp, Homo sapiens; identical to SEQ ID NO: 19695

SEQ ID NO: 19707 - DNA, 201 bp, Homo sapiens
tggagaaacaaacgctggaagaaaagcgggcatttgactctgtagtagcaaaagcattagaacatcatggaagtaaaatgcaggctgaataggacagaaasgtagaggaagtcagagatgccatggagaatgaaatgagaacctagcttcactgacaggcagctgcccacactgatcacttgtgagatgtccttagggttc

SEQ ID NO: 19708 - DNA, 201 bp, Homo sapiens
tcgtcacatcgatcagctgaacagagagctagcagaacagaaggccacagaaaagcagcacatcacattagccttggagaaacaaacgctggaagaaaagygggcatttgactctgtagtagcaaaagcattagaacatcatggaagtaaaatgcaggctgaataggacagaaaggtagaggaagtcagagatgccatgga

SEQ ID NO: 19709 - DNA, 201 bp, Homo sapiens
agaaagaagaggttgctggggccaagcctcatataaacttcacaacatgatagttgatctggataatgtggtcaaaaaggtccaagcagctcaatttgagkctaagcttgtatctcagtatcatgagctggtgggccaagctcaggatgactttaaacgacagctggacagtattactccagaagtccttcctgggtggaa

SEQ ID NO: 19710 - DNA, 201 bp, Homo sapiens
ctcagaacactgtggtccaggctgtcaatgcacactccaacatattgaaagccgccatggacaattctgagattgagggcaagaagaagtctgctaagtgscacacagtgcaaggtgcgttgaaggaacacagaaaggcagtagatgaagctgccaatgcccttctcaaagccaaagaagaggtagagaagatgaaaagtg

SEQ ID NO: 19711 - DNA, 201 bp, Homo sapiens; identical to SEQ ID NO: 19698

SEQ ID NO: 19712 - DNA, 201 bp, Homo sapiens; identical to SEQ ID NO: 19700

SEQ ID NO: 19713 - DNA, 201 bp, Homo sapiens
aaacagataatggaaatcctgacagcatatgccagcgccgtaggcacaagaaccactcaagtacagccagagtaaggtctaggaagattttcgtaaagtcrtatttcatgtcaaggaaatcagcagtgatacatgaagggtttgccgcaagggtcccagaattgtctagacatgagcaggcttacaagtactgttctaaat

SEQ ID NO: 19714 - DNA, 201 bp, Homo sapiens; identical to SEQ ID NO: 19701

SEQ ID NO: 19715 - DNA, 201 bp, Homo sapiens
atgcacactccaacatattgaaagccgccatggacaattctgagattgagggcaagaagaagtctgctaagtggcacacagtgcaaggtgcgttgaaggarcacagaaaggcagtagatgaagctgccaatgcccttctcaaagccaaagaagaggtagagaagatgaaaagtgtgactgaaaatgcaaagaaagaagagg

SEQ ID NO: 19716 - DNA, 110 bp, Homo sapiens
ttactgatcagacttgtgaggccaatcaaaataatgtttgtgatctctactactgttgattttgccctcggagcaaactgaataaacaagatgaaaactgaaaaaaaaaa

SEQ ID NO: 19717 - DNA, 201 bp, Homo sapiens
gcttctgtttgttattcccacacagacgtcaaggtgcctgacttctctgaataccgccgccttgaagttttagatagtacgaagtcttcaagagaaagcascgaggctaggaaaggtttctcctatttggtaactggagtaactactgtgggtgtcgcatatgctgccaagaatgccgtcacccagttcgtttccagcatg

SEQ ID NO: 19718 - DNA, 201 bp, Homo sapiens
agcagcctgtgttggacctgaagcggcccttcctcagccgggagtcgctgagcggccaggccgtgcgccggcctttggtcgcctccgtgggcctcaatgtmcctgcttctgtttgttattcccacacagacgtcaaggtgcctgacttctctgaataccgccgccttgaagttttagatagtacgaagtcttcaagagaaa

SEQ ID NO: 19719 - DNA, 201 bp, Homo sapiens
tgctcacacagaactccagaacaagatcaagctgacagtgctggaaggagacattctggatgagccattcctgaagagagcctgccaggacgtgtcggtcrtcatccacaccgcctgtatcattgatgtcttcggagtcactcacagacagtctatcatgaatgtcaatgtgaaagcatgctctttctgggcgggtaccca

SEQ ID NO: 19720 - DNA, 201 bp, Homo sapiens
gcagctaatgggtggactctgaaaaatggtgataccttgtacacttgtgccttaagacccatgtatatctatggggaaggaagcccatttcttactgccartataaatgaggccctgaacaacaatgggatcctgtcgagtgtcagcaagttctccacagccaacccagtctatgttggcaacgtggcctgggcccacatt

SEQ ID NO: 19721 - DNA, 201 bp, Homo sapiens
agagttcggcccctgccttgattccagatgaagccttcttttattcctgatgtactggattggcttcctgctgggaatagtgagcctcctgctcaggccartttgcacctatcaaccgcccttcgactgccacacagtgacattgtcaaatagcatgttcaccttctcttacaagaaggctcagcgagatctggcatataa

SEQ ID NO: 19722 - DNA, 201 bp, Homo sapiens
gaaggccccaagtgtcctaggacagttctactatatctcagatgacacgcctcaccaaagttatgataaccttaattacatcttgagcaaagagttcggcycctgccttgattccagatgaagccttcttttattcctgatgtactggattggcttcctgctgggaatagtgagcctcctgctcaggccagtttgcaccta

SEQ ID NO: 19723 - DNA, 162 bp, Homo sapiens
atgacaggctggagctgccttgtgacaggagcaggagggtttctgggtcagaggatcatctscctgttagtggaggagacagagctgaaggagatcagggccttggacaggccaaatcattccaatgacctaacctctgctcacacagaactccagaacaag

SEQ ID NO: 19724 - DNA, 201 bp, Homo sapiens
ggccttgcgggaccccaagaaggccccaagtgtcctaggacagttctactatatctcagatgacacgcctcaccaaagttatgataaccttaattacatcytgagcaaagagttcggcccctgccttgattccagatgaagccttcttttattcctgatgtactggattggcttcctgctgggaatagtgagcctcctgct

SEQ ID NO: 19725 - DNA, 201 bp, Homo sapiens
gcccatgaagaagactttctggaaaacacatggtctgctccatatccatacagcaaaaagtttgctgagaaggctgtgctggcagctaatgggtggactcwgaaaaatggtgataccttgtacacttgtgccttaagacccatgtatatctatggggaaggaagcccatttcttactgccaatataaatgaggccctgaac

SEQ ID NO: 19726 - DNA, 201 bp, Homo sapiens
aaaaatggtgataccttgtacacttgtgccttaagacccatgtatatctatggggaaggaagcccatttcttactgccaatataaatgaggccctgaacarcaatgggatcctgtcgagtgtcagcaagttctccacagccaacccagtctatgttggcaacgtggcctgggcccacattctggccttgagggccttgcgg

SEQ ID NO: 19727 - DNA, 201 bp, Homo sapiens
gttagccgggcccaactcctacaaggaaatcattgagaatgcccatgaagaagactttctggaaaacacatggtctgctccatatccatacagcaaaaagyttgctgagaaggctgtgctggcagctaatgggtggactctgaaaaatggtgataccttgtacacttgtgccttaagacccatgtatatctatggggaagg

SEQ ID NO: 19728 - DNA, 201 bp, Homo sapiens; identical to SEQ ID NO: 19720

SEQ ID NO: 19729 - DNA, 201 bp, Homo sapiens
ggaattttctaaactccagaacaagatcaagctgacagtgctggaaggagacattctggatgagccattcctgaagagagcctgccaggacgtgtcggtcrtcatccacaccgcctgtatcattgatgtcttcggagtcactcacagacagtctatcatgaatgtcaatgtgaaaggtaggggatacttcctgacactgaa

SEQ ID NO: 19730 - DNA, 201 bp, Homo sapiens; identical to SEQ ID NO: 19721

SEQ ID NO: 19731 - DNA, 201 bp, Homo sapiens; identical to SEQ ID NO: 19722

SEQ ID NO: 19732 - DNA, 201 bp, Homo sapiens
tgtttcctggagagtgtttcctgctacctcggattggccatgacaggctggagctgccttgtgacaggagcaggagggtttctgggtcagaggatcatctscctgttagtggaggagacagagctgaaggagatcagggccttggacaggccttcagaccaggattgagggaggaattttctaaactccagaacaagatca

SEQ ID NO: 19733 - DNA, 201 bp, Homo sapiens; identical to SEQ ID NO: 19724

SEQ ID NO: 19734 - DNA, 201 bp, Homo sapiens; identical to SEQ ID NO: 19725

SEQ ID NO: 19735 - DNA, 175 bp, Homo sapiens
ggacaccctagaataagatcttctccccagcatcttctgtttcctggagagtgtttcctgctacctcggattggycatgacaggctggagctgccttgtgacaggagcaggagggtttctgggtcagaggatcatctgcctgttagtggaggagacagagctgaaggagatcagg

SEQ ID NO: 19736 - DNA, 201 bp, Homo sapiens; identical to SEQ ID NO: 19726

SEQ ID NO: 19737 - DNA, 201 bp, Homo sapiens; identical to SEQ ID NO: 19727

SEQ ID NO: 19738 - DNA, 168 bp, Homo sapiens
ggacaccctagaataagatcttctccccagcatcttctgtttcctggagagtgtttcctgctacctcrgattggccatgacaggctggagctgccttgtgacaggagcaggagggtttctgggtcagaggatcatctgcctgttagtggaggagacagagctgaagga

SEQ ID NO: 19739 - DNA, 165 bp, Homo sapiens
ggacaccctagaataagatcttctccccagcatcttctgtttcctggagagtgtttcctgctacytcggattggccatgacaggctggagctgccttgtgacaggagcaggagggtttctgggtcagaggatcatctgcctgttagtggaggagacagagctgaa

SEQ ID NO: 19740 - DNA, 201 bp, Homo sapiens
aggctcagcgagatctggcatataagccactttacagctgggaggaagccaagcagaaaaccatggagtgagttggttcccttgtggaccggcacaaggaraacctgaagtccaagactcagtgctttaaggatgacagagatgtgcatgtgggtattgttaggagatgtcatcaagctccatcctcctggcttcatacag

SEQ ID NO: 19741 - DNA, 163 bp, Homo sapiens
ggacaccctagaataagatcttctccccagcatcttctgtttcctggagagtgtttcctgctmcctcggattggccatgacaggctggagctgccttgtgacaggagcaggagggtttctgggtcagaggatcatctgcctgttagtggaggagacagagctg

SEQ ID NO: 19742 - DNA, 201 bp, Homo sapiens
aggagaacctgaagtccaagactcagtgctttaaggatgacagagatgtgcatgtgggtattgttaggagatgtcatcaagctccatcctcctggcttcayacagaatgtgacaagggcataagcccaggtcctgctgcctccctttcacacaatgcccaacttattgtcttcctcgtgtcatcaaaacctgcccattccc

SEQ ID NO: 19743 - DNA, 201 bp, Homo sapiens
agccgtgcactgtgctcgccacccgcctgcagtgcctttccccgaggcgccatcagcagcgaggccgtgtgcaagccactgtgcgcgcggcagtccttcascctggcccgggaggcctgccgctcctacagccacgtggtgctcaaggaggtgcgcttcttcaacctgcaggtgctctacccgctgctcagcgaccccgcg

SEQ ID NO: 19744 - DNA, 201 bp, Homo sapiens
cccgcctgcagtgcctttccccgaggcgccatcagcagcgaggccgtgtgcaagccactgtgcgcgcggcagtccttcaccctggcccgggaggcctgccsctcctacagccacgtggtgctcaaggaggtgcgcttcttcaacctgcaggtgctctacccgctgctcagcgaccccgcgctcaacctacgcatcgtgcac

SEQ ID NO: 19745 - DNA, 201 bp, Homo sapiens
tcttcctgtgcgacatggacgtgtttgatgcctatctgccttggcgccgcaacctgtccgacctcttccagtgggccgtgagccgtgcactgtgctcgccrcccgcctgcagtgcctttccccgaggcgccatcagcagcgaggccgtgtgcaagccactgtgcgcgcggcagtccttcaccctggcccgggaggcctgcc

SEQ ID NO: 19746 - DNA, 201 bp, Homo sapiens
cgtggtgcgcgaggtgtgccgtagccacgtacgcatcgccgaggccgccacactcaagccgccaccctttctgcgcggccgctaccgcctggtgcgcttcraggacctggcgcgggagccgctggcagaaatccgtgcgctctacgccttcactgggctcagtctcacgccacagctcgaggcctggatccataacatcac

SEQ ID NO: 19747 - DNA, 125 bp, Homo sapiens
ctgtccctcgtgacaattataggaggaaggtatttaaaaccccagatttatgaatgtgtactacatggcttagagaatgtctttgttcttgttcaggtggktataacaaaataccttaagagtgg

SEQ ID NO: 19748 - DNA, 201 bp, Homo sapiens
acgtggtgctcaaggaggtgcgcttcttcaacctgcaggtgctctacccgctgctcagcgaccccgcgctcaacctacgcatcgtgcacctggtgcgcgamccgcgggccgtgctgcgctcccgggagcagacagccaaggctctggcgcgtgacaacggcatcgtgctgggcaccaacggcacgtgggtggaggccgacc

SEQ ID NO: 19749 - DNA, 201 bp, Homo sapiens
ctcaaggaggtgcgcttcttcaacctgcaggtgctctacccgctgctcagcgaccccgcgctcaacctacgcatcgtgcacctggtgcgcgacccgcgggycgtgctgcgctcccgggagcagacagccaaggctctggcgcgtgacaacggcatcgtgctgggcaccaacggcacgtgggtggaggccgaccccggcctg

SEQ ID NO: 19750 - DNA, 201 bp, Homo sapiens
acatggacgtgtttgatgcctatctgccttggcgccgcaacctgtccgacctcttccagtgggccgtgagccgtgcactgtgctcgccacccgcctgcagygcctttccccgaggcgccatcagcagcgaggccgtgtgcaagccactgtgcgcgcggcagtccttcaccctggcccgggaggcctgccgctcctacagcc

SEQ ID NO: 19751 - DNA, 201 bp, Homo sapiens
ctggtgcgctccgtcttcctgtgcgacatggacgtgtttgatgcctatctgccttggcgccgcaacctgtccgacctcttccagtgggccgtgagccgtgyactgtgctcgccacccgcctgcagtgcctttccccgaggcgccatcagcagcgaggccgtgtgcaagccactgtgcgcgcggcagtccttcaccctggcc

SEQ ID NO: 19752 - DNA, 201 bp, Homo sapiens
cgtccttcgtgggccaactcttcaaccagcaccccgacgtcttctacctaatggagcccgcgtggcacgtgtggaccaccctgtcgcagggcagcgccgcmacgctgcacatggctgtgcgcgacctggtgcgctccgtcttcctgtgcgacatggacgtgtttgatgcctatctgccttggcgccgcaacctgtccgacc

SEQ ID NO: 19753 - DNA, 201 bp, Homo sapiens
agcagtcagcatgtggctgccgcgcgtctccagcacagcagtgaccgcgctcctcctggcgcagaccttcctcctcctctttctggtttcccggccagggycctcgtccccagcaggcggcgaggcgcgcgtgcatgtgctggtgctgtcctcgtggcgctcgggctcgtccttcgtgggccaactcttcaaccagcaccc

SEQ ID NO: 19754 - DNA, 201 bp, Homo sapiens
ggcgccatcagcagcgaggccgtgtgcaagccactgtgcgcgcggcagtccttcaccctggcccgggaggcctgccgctcctacagccacgtggtgctcarggaggtgcgcttcttcaacctgcaggtgctctacccgctgctcagcgaccccgcgctcaacctacgcatcgtgcacctggtgcgcgacccgcgggccgtg

SEQ ID NO: 19755 - DNA, 201 bp, Homo sapiens
ccagcacagcagtgaccgcgctcctcctggcgcagaccttcctcctcctctttctggtttcccggccagggccctcgtccccagcaggcggcgaggcgcgygtgcatgtgctggtgctgtcctcgtggcgctcgggctcgtccttcgtgggccaactcttcaaccagcaccccgacgtcttctacctaatggagcccgcgt

SEQ ID NO: 19756 - DNA, 201 bp, Homo sapiens
aggcgcgcgtgcatgtgctggtgctgtcctcgtggcgctcgggctcgtccttcgtgggccaactcttcaaccagcaccccgacgtcttctacctaatggakcccgcgtggcacgtgtggaccaccctgtcgcagggcagcgccgcaacgctgcacatggctgtgcgcgacctggtgcgctccgtcttcctgtgcgacatgg

SEQ ID NO: 19757 - DNA, 201 bp, Homo sapiens
ggcgcagaccttcctcctcctctttctggtttcccggccagggccctcgtccccagcaggcggcgaggcgcgcgtgcatgtgctggtgctgtcctcgtggygctcgggctcgtccttcgtgggccaactcttcaaccagcaccccgacgtcttctacctaatggagcccgcgtggcacgtgtggaccaccctgtcgcaggg

SEQ ID NO: 19758 - DNA, 201 bp, Homo sapiens
cttcttcaacctgcaggtgctctacccgctgctcagcgaccccgcgctcaacctacgcatcgtgcacctggtgcgcgacccgcgggccgtgctgcgctccygggagcagacagccaaggctctggcgcgtgacaacggcatcgtgctgggcaccaacggcacgtgggtggaggccgaccccggcctgcgcgtggtgcgcga

SEQ ID NO: 19759 - DNA, 201 bp, Homo sapiens
ggcgcgcgtgcatgtgctggtgctgtcctcgtggcgctcgggctcgtccttcgtgggccaactcttcaaccagcaccccgacgtcttctacctaatggagyccgcgtggcacgtgtggaccaccctgtcgcagggcagcgccgcaacgctgcacatggctgtgcgcgacctggtgcgctccgtcttcctgtgcgacatgga

SEQ ID NO: 19760 - DNA, 201 bp, Homo sapiens
tggcacgtgtggaccaccctgtcgcagggcagcgccgcaacgctgcacatggctgtgcgcgacctggtgcgctccgtcttcctgtgcgacatggacgtgtytgatgcctatctgccttggcgccgcaacctgtccgacctcttccagtgggccgtgagccgtgcactgtgctcgccacccgcctgcagtgcctttccccga

SEQ ID NO: 19761 - DNA, 201 bp, Homo sapiens
tcctacagccacgtggtgctcaaggaggtgcgcttcttcaacctgcaggtgctctacccgctgctcagcgaccccgcgctcaacctacgcatcgtgcacckggtgcgcgacccgcgggccgtgctgcgctcccgggagcagacagccaaggctctggcgcgtgacaacggcatcgtgctgggcaccaacggcacgtgggtg

SEQ ID NO: 19762 - DNA, 201 bp, Homo sapiens
tctacgccttcactgggctcagtctcacgccacagctcgaggcctggatccataacatcacccacggatctggacctggtgcgcgccgcgaagccttcaakacttcgtccaggaatgcgctcaacgtctcccaggcctggcgccatgcgctgccctttgccaagatccgccgcgtgcaggaactgtgcgctggtgcgctgc

SEQ ID NO: 19763 - DNA, 201 bp, Homo sapiens
tgcgctgccctttgccaagatccgccgcgtgcaggaactgtgcgctggtgcgctgcagctgctgggctaccggcctgtgtactctgaggacgagcagcgcracctcgcccttgatctggtgctgccacgaggcctgaacggcttcacttgggcatcatccaccgcctcgcacccccgaaattagtggaggccacagttgta

SEQ ID NO: 19764 - DNA, 201 bp, Homo sapiens
taattgccttcagctgaaaatcattttttatgtgaaaaaggcatagtctgagctgacgcctctgctttcctccacctgaagagaacctgcgtgctgctccyttgcttcggacctccgcctctgcccgggagaaagcccaggccagcctgctggacaagcagagaccatgagaaggagagttcaggggtcccaatccaggcc

SEQ ID NO: 19765 - DNA, 201 bp, Homo sapiens; identical to SEQ ID NO: 19743

SEQ ID NO: 19766 - DNA, 201 bp, Homo sapiens; identical to SEQ ID NO: 19744

SEQ ID NO: 19767 - DNA, 170 bp, Homo sapiens
ttctactggccaaagggagtcccagggctcacccagattcagaggtggggaaactgagtccaccacttgagaagagtagctataaagacatatgagcgagrccagctgagcccagcactgcggccaagtcgaagactttaggagcaataaaagtgcttattgtgtttcag

SEQ ID NO: 19768 - DNA, 201 bp, Homo sapiens; identical to SEQ ID NO: 19745

SEQ ID NO: 19769 - DNA, 201 bp, Homo sapiens; identical to SEQ ID NO: 19746

SEQ ID NO: 19770 - DNA, 201 bp, Homo sapiens
ctgtccctcgtgacaattataggaggaaggtatttaaaaccccagatttatgaatgtgtactacatggcttagagaatgtctttgttcttgttcaggtggktataacaaaataccttaagagtgggattacaggcatgagccactgtacctggcgaaaaacagtttgttaacacaggcagccaacatcactcaggataagc

SEQ ID NO: 19771 - DNA, 201 bp, Homo sapiens; identical to SEQ ID NO: 19748

SEQ ID NO: 19772 - DNA, 201 bp, Homo sapiens; identical to SEQ ID NO: 19749

SEQ ID NO: 19773 - DNA, 201 bp, Homo sapiens; identical to SEQ ID NO: 19750

SEQ ID NO: 19774 - DNA, 201 bp, Homo sapiens; identical to SEQ ID NO: 19751

SEQ ID NO: 19775 - DNA, 201 bp, Homo sapiens; identical to SEQ ID NO: 19752

SEQ ID NO: 19776 - DNA, 201 bp, Homo sapiens; identical to SEQ ID NO: 19753

SEQ ID NO: 19777 - DNA, 201 bp, Homo sapiens; identical to SEQ ID NO: 19754

SEQ ID NO: 19778 - DNA, 201 bp, Homo sapiens; identical to SEQ ID NO: 19755

SEQ ID NO: 19779 - DNA, 201 bp, Homo sapiens; identical to SEQ ID NO: 19756

SEQ ID NO: 19780 - DNA, 201 bp, Homo sapiens; identical to SEQ ID NO: 19759

SEQ ID NO: 19781 - DNA, 201 bp, Homo sapiens; identical to SEQ ID NO: 19758

SEQ ID NO: 19782 - DNA, 201 bp, Homo sapiens; identical to SEQ ID NO: 19757

SEQ ID NO: 19783 - DNA, 201 bp, Homo sapiens; identical to SEQ ID NO: 19760

SEQ ID NO: 19784 - DNA, 201 bp, Homo sapiens; identical to SEQ ID NO: 19761

SEQ ID NO: 19785 - DNA, 201 bp, Homo sapiens; identical to SEQ ID NO: 19762

SEQ ID NO: 19786 - DNA, 201 bp, Homo sapiens; identical to SEQ ID NO: 19763

SEQ ID NO: 19787 - DNA, 182 bp, Homo sapiens
tatatcttcaccctgtaatggttgagaccaggccaatcccttctccgcttactataatggttggaactaaacgtcaccaaggtggcttctccttggctgaragatggaaagggtggaatttgctcctgggtcccctaggccccagtgaaggcaggagataaaccatcctctcccttcttaca

SEQ ID NO: 19788 - DNA, 201 bp, Homo sapiens
tgaacacagtgctgaagagcaagatgctggccaagaagttactgggtctctacgggacccctgacaacatcgacatctggataggggccattgctgagccrctggtggaaaggggtcgggtggggcctctcctggcctgcctcttgggcaagcagttccagcagatccgtgatggagacaggttctggtgggaaaaccctg

SEQ ID NO: 19789 - DNA, 201 bp, Homo sapiens
cctttggtccacagggccatttcaagcaagttcaatgacctggtcccttagagctccatatcccagtcccagcccttctttgcagctgggcctctctatayccctggatgaacagcttgctcaggccccagggtggctgcctcggccctcccagctcttacactcagctccagtggcttctcctttctgtcaagacttagc

SEQ ID NO: 19790 - DNA, 201 bp, Homo sapiens
caaccctcagtgggatggagagaagctctaccaggaagcccggaaaatcctgggagccttcgtgcagattatcacctttagggactacctacccattttgytaggtgaccacatgcagaagtggatacccccatatcaaggctacagtgaatctgtggatcccagaatttccaatgtcttcaccttcgccttccgctttgg

SEQ ID NO: 19791 - DNA, 201 bp, Homo sapiens
tacagtgaatctgtggatcccagaatttccaatgtcttcaccttcgccttccgctttggccacttggaggtcccctctagtatgttccgcctggatgagarttatcagccatgggggccagaaccagaactccccctccacaccctcttcttcaacacttggaggatggtcaaagatggtggaattgatcctctggtgcgg

SEQ ID NO: 19792 - DNA, 201 bp, Homo sapiens
atcccagcctggacttgacttcactgtctctggaggtgggctgtggtgctcctgctcccgtggtgagatgcgacccgtgcagcccttaccgcaccattacsggagactgcaataacaggaggaagcctgcgctgggcgccgccaacagggctctggcgcgctggctgcccgcggagtacgaggacgggctctccctgccct

SEQ ID NO: 19793 - DNA, 201 bp, Homo sapiens
gggtcttcacgaacgagcagaaggactctctacagaaaatgtccttctcacgccttgtctgtgacaacacccgcatcaccaaggtcccacgggacccattytgggccaacagctacccctatgacttcgtggattgctcagccatcgacaagctggacctgtcaccctgggcctcagtgaagaattaggggcccgcgctgc

SEQ ID NO: 19794 - DNA, 201 bp, Homo sapiens
ccgcgagcataaccggctggccagagaactaaagagactcaaccctcagtgggatggagagaagctctaccaggaagcccggaaaatcctgggagccttcrtgcagattatcacctttagggactacctacccattttgctaggtgaccacatgcagaagtggatacccccatatcaaggctacagtgaatctgtggatcc

SEQ ID NO: 19795 - DNA, 201 bp, Homo sapiens
tgaacacagtgctgaagagcaagatgctggccaagaagttactgggtctctacgggacccctgacaacatcgacatctggataggggccattgctgagccrctggtggaaaggggtcgggtggggcctctcctggcctgcctcttgggcaagcagttccagcagatccgtgatggagacgttctggtgggaaaaccctggg

SEQ ID NO: 19796 - DNA, 201 bp, Homo sapiens; identical to SEQ ID NO: 19789

SEQ ID NO: 19797 - DNA, 201 bp, Homo sapiens; identical to SEQ ID NO: 19790

SEQ ID NO: 19798 - DNA, 201 bp, Homo sapiens; identical to SEQ ID NO: 19791

SEQ ID NO: 19799 - DNA, 201 bp, Homo sapiens; identical to SEQ ID NO: 19792

SEQ ID NO: 19800 - DNA, 201 bp, Homo sapiens; identical to SEQ ID NO: 19794

SEQ ID NO: 19801 - DNA, 201 bp, Homo sapiens; identical to SEQ ID NO: 19793

SEQ ID NO: 19802 - DNA, 201 bp, Homo sapiens
caggcctcccttgggccagcccgatgtgactgagcccagcagaccctgagcaagaagcaggtccatcgcggagccagagggcaggaggaacatgacatcayggaaatggtttcacccaaatatcactggtgtggaggcagaaaacctactgttgacaagaggagttgatggcagtttttcggcaaggcctagtaaaagtaa

SEQ ID NO: 19803 - DNA, 201 bp, Homo sapiens
aacaacaggagtgcaaacttctctacagccgaaaagagggtcaaaggcaagaaaacaaaaacaaaaatagatataaaaacatcctaccctttgatcatackagggttgtcctacacgacggtgatcccgatgagcctgtttcagattacatcagtgcaaataccatcatgcctgaatttgaaaccaggtgcaacaattcaa

SEQ ID NO: 19804 - DNA, 201 bp, Homo sapiens
ttgccacacaaggctgtcagcaaaacacagtgaatgacttttggcagatgaagttccaagaaaactcccgagtgattgtcatgacaacaaaagaagtggakagaggaaagagtaaatgtgtcaaatactggcctgatgagtatgctttaaaagaatatggcgtcatgcgtgttaggaacgtcaaagaaagcgcagctcatg

SEQ ID NO: 19805 - DNA, 201 bp, Homo sapiens
ggtgcaacaattcaaagcccaaaacgtgttacattgccacacaaggctgtcagcaaaacacagtgaatgacttttggcagatgaagttccaagaaaactcmcgagtgattgtcatgacaacaaaagaagtggatagaggaaagagtaaatgtgtcaaatactggcctgatgagtatgctttaaaagaatatggcgtcatgc

SEQ ID NO: 19806 - DNA, 201 bp, Homo sapiens
ccctttgatcatactagggttgtcctacacgacggtgatcccgatgagcctgtttcagattacatcagtgcaaataccatcatgcctgaatttgaaaccargtgcaacaattcaaagcccaaaacgtgttacattgccacacaaggctgtcagcaaaacacagtgaatgacttttggcagatgaagttccaagaaaactcc

SEQ ID NO: 19807 - DNA, 116 bp, Homo sapiens
gaggaagcagttaacttgtgcactgtattttgcagatgatggggattcaaattctagtaataggcttttttttttctttttataaccttaaccagtttaaktttttttcctcattg

SEQ ID NO: 19808 - DNA, 201 bp, Homo sapiens
atcagggtggtgacttcacacccataatggcactggtggcaagtccatttacggggagaaatttggtgatgaaaacttcatcctaaagcatacaggtcctrgcatcttgtccatggcaaatgctggacccaacacaaacggttcccagtttttcatctgcactgccaagactgagtggttggatggcaagcatgtggtctg

SEQ ID NO: 19809 - DNA, 201 bp, Homo sapiens
ccaagactgagtggttggatggcaagcatgtggtctgtggcaaggcgaaagaaggcaagaatattgtggaggccatggagcgctgtggttccaggaatggyaagaccagcaagaagatcaccattgctgactgtgaacaactctaataagtttgacttgtgttttatcttaaccaccagaccattccttctgtagctcagg

SEQ ID NO: 19810 - DNA, 109 bp, Homo sapiens
ttgtgctcttgctgcagttccctttgggttccatgttttccttgttcccttccgtgcctagctggattgcagtgttaagtttatgattatgaataaaaacraaataaca

SEQ ID NO: 19811 - DNA, 188 bp, Homo sapiens
atgccaccgccgctgggagccctgtactatcagccatggtcaaccccactgttcttcaacattgctgacgaaggcaagcccttgggcygcgtctccttcaacctgtttgcagacaagattccaaagacagcagaaaactttcatgctctgagcactggcgagaaaggatttggttttaagggtttccg

SEQ ID NO: 19812 - DNA, 201 bp, Homo sapiens
cactggtggcaagtccatttacggggagaaatttggtgatgaaaacttcatcctaaagcatacaggtcctggcatcttgtccatggcaaatgctggacccracacaaacggttcccagtttttcatctgcactgccaagactgagtggttggatggcaagcatgtggtctgtggcaaggcgaaagaaggcaagaatattgt

SEQ ID NO: 19813 - DNA, 192 bp, Homo sapiens
ctggcccagtgctgcccagcctccccgcccgctcccaggcgccccatgtcctcacaggccaggacgccatggcaggatggagaggacttggtggatttttktttcttgcctgacctcagtttcatgaaagaaagtggaagctacagaattattttctaaaataaaggctgaattgtctgaaaaatatttatg

SEQ ID NO: 19814 - DNA, 185 bp, Homo sapiens
agtgctgcccagcctccccgcccgctcccaggcgccccatgtcctcacaggccaggacgccatggcaggatggagaggacttggtggatttttgtttcttkcctgacctcagtttcatgaaagaaagtggaagctacagaattattttctaaaataaaggctgaattgtctgaaaaatatttatg

SEQ ID NO: 19815 - DNA, 201 bp, Homo sapiens
ccaccctcagtcagcgctctcgatggcgaccccgccagcctcacccgggaagtgattcgcctggcccaagacgccgaggtggagctggagcggcagcgtgrgctgctgcagcagatcggggatgccctgtcgagccagcgggggagggtgcccaccgcggcccctcccgcccagccgcgtgtgcctgtgacccccgcgccg

SEQ ID NO: 19816 - DNA, 201 bp, Homo sapiens
ttacctgcagcgggaggcctatgaccgagatttcctcgcccgcgtctacggtgctccccagctgcaggtggagaaagtgaggaccaatgaccggaaggagytgggggaggtgcgggtgcagtatacgggcagggacagcttcaaggctttcgccaaggctctgggtgtcatggatgaccttaagtcgggggttccgagagc

SEQ ID NO: 19817 - DNA, 201 bp, Homo sapiens
gggaggcctatgaccgagatttcctcgcccgcgtctacggtgctccccagctgcaggtggagaaagtgaggaccaatgaccggaaggagctgggggaggtkcgggtgcagtatacgggcagggacagcttcaaggctttcgccaaggctctgggtgtcatggatgaccttaagtcgggggttccgagagctggctaccggg

SEQ ID NO: 19818 - DNA, 201 bp, Homo sapiens
cccagctgtcaggagagaggtgcagggaggaaggccttgtgctgggacaacctctctcttgccttacctcagagagggactatgccctgacccctcctttytgaaaatcagtgccctccctgttgctctaggaggctcctgctggcttggtagaagacagaattcgatctgcctgtccctttttcccctggggtttgacac

SEQ ID NO: 19819 - DNA, 201 bp, Homo sapiens
tcctaatcccatagtccagaggaggcatccctaggactgcgggcaagggagccgggcaagcccagggcagccttgaaccgtcccctggcctgccctccccrgtgggggccaggatgctgaagaagcagtctgcagggcttgtgctgtggggcgctatcctctttgtggcctggaatgccctgctgctcctcttcttctgga

SEQ ID NO: 19820 - DNA, 201 bp, Homo sapiens
ggtgtcatggatgaccttaagtcgggggttccgagagctggctaccggggtattgtcaccttccagttccggggccgccgtgtccacctggcgcccccacygacgtgggagggctatgatcctagctggaattagcacctgcctgtccttcctgggcccctccttgccacatcatgagctgaggtgggaccacagtcccca

SEQ ID NO: 19821 - DNA, 201 bp, Homo sapiens
ggacacgtgcatggctgcctcctaatcccatagtccagaggaggcatccctaggactgcgggcaagggagccgggcaagcccagggcagccttgaaccgtsccctggcctgccctccccggtgggggccaggatgctgaagaagcagtctgcagggcttgtgctgtggggcgctatcctctttgtggcctggaatgccctg

SEQ ID NO: 19822 - DNA, 201 bp, Homo sapiens
cgctgggcgctgggccaggtcttccggcagtttcgcttccccgcggccgtggtggtggaggatgacctggaggtggccccggacttcttcgagtactttcrggccacctatccgctgctgaaggccgacccctccctgtggtgcgtctcggcctggaatgacaacggcaaggagcagatggtggacgccagcaggcctgag

SEQ ID NO: 19823 - DNA, 201 bp, Homo sapiens
tggggcgctatcctctttgtggcctggaatgccctgctgctcctcttcttctggacgcgcccagcacctggcaggccaccctcagtcagcgctctcgatgrcgaccccgccagcctcacccgggaagtgattcgcctggcccaagacgccgaggtggagctggagcggcagcgtgggctgctgcagcagatcggggatgcc

SEQ ID NO: 19824 - DNA, 201 bp, Homo sapiens
gctgtggggcgctatcctctttgtggcctggaatgccctgctgctcctcttcttctggacgcgcccagcacctggcaggccaccctcagtcagcgctctcratggcgaccccgccagcctcacccgggaagtgattcgcctggcccaagacgccgaggtggagctggagcggcagcgtgggctgctgcagcagatcgggga

SEQ ID NO: 19825 - DNA, 201 bp, Homo sapiens
gcaggcctgagctgctctaccgcaccgactttttccctggcctgggctggctgctgttggccgagctctgggctgagctggagcccaagtggccaaaggcyttctgggacgactggatgcggcggccggagcagcggcaggggcgggcctgcatacgccctgagatctcaagaacgatgacctttggccgcaagggtgtga

SEQ ID NO: 19826 - DNA, 201 bp, Homo sapiens
gtgcagaaggtgttgagctggcgagttcgcggaggctactattcaggaaatcttatccagatgagtacactggaagctacacctctccattactctgtccrgagcctggcagagagcaggtgtgtgatacacgtcgtcaggtgactgaccgaggaattcagggcaaacagatcatctcaatttgccttgctgatgtgccag

SEQ ID NO: 19827 - DNA, 201 bp, Homo sapiens
ggagagcaactgagacaagagaagaaaggtaaggctcctgtctcatttcccacttaatgtcttgctgtgcctgtgcagaaggtgttgagctggcgagttcrcggaggctactattcaggaaatcttatccagatgagtacactggaagctacacctctccattactctgtccagagcctggcagagagcaggtgtgtgata

SEQ ID NO: 19828 - DNA, 102 bp, Homo sapiens
gmctgtagtcctcggctacccaccctcaccgcctggggtcccatggtgagacagctgggtgggcatcaggcttctgcagagggccaggccggagggagctgg

SEQ ID NO: 19829 - DNA, 201 bp, Homo sapiens; identical to SEQ ID NO: 19820

SEQ ID NO: 19830 - DNA, 201 bp, Homo sapiens; identical to SEQ ID NO: 19822

SEQ ID NO: 19831 - DNA, 201 bp, Homo sapiens; identical to SEQ ID NO: 19823

SEQ ID NO: 19832 - DNA, 201 bp, Homo sapiens; identical to SEQ ID NO: 19824

SEQ ID NO: 19833 - DNA, 201 bp, Homo sapiens
agctgggcgagggagtggggctggctcctggcttgcaccggcctcgtggaatccaggcctcagacctgatcgctggcgaaactggctctgtgcgctggagyccctggtcttctgcgtctgtcctcctcccggccagactttactcctggctcagcgacaggtgcatggctgcctcctaatcccatagtccagaggaggcat

SEQ ID NO: 19834 - DNA, 192 bp, Homo sapiens; identical to SEQ ID NO: 19813

SEQ ID NO: 19835 - DNA, 185 bp, Homo sapiens; identical to SEQ ID NO: 19814

SEQ ID NO: 19836 - DNA, 201 bp, Homo sapiens; identical to SEQ ID NO: 19815

SEQ ID NO: 19837 - DNA, 201 bp, Homo sapiens
gctggctcctggcttgcaccggcctcgtggaatccaggcctcagacctgatcgctggcgaaactggctctgtgcgctggagcccctggtcttctgcgtctstcctcctcccggccagactttactcctggctcagcgacaggtgcatggctgcctcctaatcccatagtccagaggaggcatccctaggactgcgggcaag

SEQ ID NO: 19838 - DNA, 201 bp, Homo sapiens; identical to SEQ ID NO: 19816

SEQ ID NO: 19839 - DNA, 201 bp, Homo sapiens; identical to SEQ ID NO: 19817

SEQ ID NO: 19840 - DNA, 201 bp, Homo sapiens; identical to SEQ ID NO: 19819

SEQ ID NO: 19841 - DNA, 201 bp, Homo sapiens; identical to SEQ ID NO: 19818

SEQ ID NO: 19842 - DNA, 201 bp, Homo sapiens
cgacaggtgcatggctgcctcctaatcccatagtccagaggaggcatccctaggactgcgggcaagggagccgggcaagcccagggcagccttgaaccgtsccctggcctgccctccccggtgggggccaggatgctgaagaagcagtctgcagggcttgtgctgtggggcgctatcctctttgtggcctggaatgccctg

SEQ ID NO: 19843 - DNA, 201 bp, Homo sapiens; identical to SEQ ID NO: 19825

SEQ ID NO: 19844 - DNA, 164 bp, Homo sapiens
aggggggaaggagtgcgaggggagggccgggccgctgggggtcgagggggtggggcctgggccrgcgctggggatcgggcctggggcctggattgcgacccgcggcgggccgcggctcctagccgagacggggcgggcgggaaccaggttaacacagaaatctg

SEQ ID NO: 19845 - DNA, 192 bp, Homo sapiens; identical to SEQ ID NO: 19813

SEQ ID NO: 19846 - DNA, 185 bp, Homo sapiens; identical to SEQ ID NO: 19814

SEQ ID NO: 19847 - DNA, 201 bp, Homo sapiens; identical to SEQ ID NO: 19815

SEQ ID NO: 19848 - DNA, 201 bp, Homo sapiens; identical to SEQ ID NO: 19816

SEQ ID NO: 19849 - DNA, 201 bp, Homo sapiens; identical to SEQ ID NO: 19817

SEQ ID NO: 19850 - DNA, 201 bp, Homo sapiens; identical to SEQ ID NO: 19818

SEQ ID NO: 19851 - DNA, 201 bp, Homo sapiens; identical to SEQ ID NO: 19819

SEQ ID NO: 19852 - DNA, 201 bp, Homo sapiens
agaaaggtgcatggctgcctcctaatcccatagtccagaggaggcatccctaggactgcgggcaagggagccgggcaagcccagggcagccttgaaccgtsccctggcctgccctccccggtgggggccaggatgctgaagaagcagtctgcagggcttgtgctgtggggcgctatcctctttgtggcctggaatgccctg

SEQ ID NO: 19853 - DNA, 201 bp, Homo sapiens; identical to SEQ ID NO: 19820

SEQ ID NO: 19854 - DNA, 201 bp, Homo sapiens
gggggaaggagtgcgaggggagggccgggccgctgggggtcgagggggtggggcctgggccagcgctggggatcgggcctggggcctggattgcgacccgsggcgggccgcggctcctagccgagacggggcgggcgggaaccaggttaacacagaaatctgcctcctgggccatgccgcttctaaggcctgtttcttctc

SEQ ID NO: 19855 - DNA, 201 bp, Homo sapiens; identical to SEQ ID NO: 19822

SEQ ID NO: 19856 - DNA, 201 bp, Homo sapiens; identical to SEQ ID NO: 19823

SEQ ID NO: 19857 - DNA, 201 bp, Homo sapiens; identical to SEQ ID NO: 19824

SEQ ID NO: 19858 - DNA, 201 bp, Homo sapiens; identical to SEQ ID NO: 19825

SEQ ID NO: 19859 - DNA, 192 bp, Homo sapiens; identical to SEQ ID NO: 19813

SEQ ID NO: 19860 - DNA, 185 bp, Homo sapiens; identical to SEQ ID NO: 19814

SEQ ID NO: 19861 - DNA, 201 bp, Homo sapiens; identical to SEQ ID NO: 19815

SEQ ID NO: 19862 - DNA, 201 bp, Homo sapiens; identical to SEQ ID NO: 19816

SEQ ID NO: 19863 - DNA, 201 bp, Homo sapiens; identical to SEQ ID NO: 19817

SEQ ID NO: 19864 - DNA, 201 bp, Homo sapiens; identical to SEQ ID NO: 19818

SEQ ID NO: 19865 - DNA, 201 bp, Homo sapiens; identical to SEQ ID NO: 19819

SEQ ID NO: 19866 - DNA, 201 bp, Homo sapiens; identical to SEQ ID NO: 19820

SEQ ID NO: 19867 - DNA, 201 bp, Homo sapiens
tcagaggtgcatggctgcctcctaatcccatagtccagaggaggcatccctaggactgcgggcaagggagccgggcaagcccagggcagccttgaaccgtsccctggcctgccctccccggtgggggccaggatgctgaagaagcagtctgcagggcttgtgctgtggggcgctatcctctttgtggcctggaatgccctg

SEQ ID NO: 19868 - DNA, 201 bp, Homo sapiens; identical to SEQ ID NO: 19822

SEQ ID NO: 19869 - DNA, 201 bp, Homo sapiens; identical to SEQ ID NO: 19823

SEQ ID NO: 19870 - DNA, 201 bp, Homo sapiens; identical to SEQ ID NO: 19824

SEQ ID NO: 19871 - DNA, 201 bp, Homo sapiens; identical to SEQ ID NO: 19825

SEQ ID NO: 19872 - DNA, 192 bp, Homo sapiens; identical to SEQ ID NO: 19813

SEQ ID NO: 19873 - DNA, 185 bp, Homo sapiens; identical to SEQ ID NO: 19814

SEQ ID NO: 19874 - DNA, 201 bp, Homo sapiens; identical to SEQ ID NO: 19815

SEQ ID NO: 19875 - DNA, 201 bp, Homo sapiens; identical to SEQ ID NO: 19816

SEQ ID NO: 19876 - DNA, 201 bp, Homo sapiens; identical to SEQ ID NO: 19817

SEQ ID NO: 19877 - DNA, 201 bp, Homo sapiens
cccgccccgcctgccggggaagggccacgttgcccgcccggccgtccggccccggcgcgccgcagaaagggctggcgagtcgaaaggcgaggcggccgcgrcagcgcttgggacgcgcctgggcaccgggctcgctccctgcgccccggagcaggccaagttcggggccaggacgtcgggaggacctggtgcatggctgcc

SEQ ID NO: 19878 - DNA, 201 bp, Homo sapiens; identical to SEQ ID NO: 19818

SEQ ID NO: 19879 - DNA, 201 bp, Homo sapiens; identical to SEQ ID NO: 19819

SEQ ID NO: 19880 - DNA, 201 bp, Homo sapiens; identical to SEQ ID NO: 19820

SEQ ID NO: 19881 - DNA, 201 bp, Homo sapiens
gacctggtgcatggctgcctcctaatcccatagtccagaggaggcatccctaggactgcgggcaagggagccgggcaagcccagggcagccttgaaccgtsccctggcctgccctccccggtgggggccaggatgctgaagaagcagtctgcagggcttgtgctgtggggcgctatcctctttgtggcctggaatgccctg

SEQ ID NO: 19882 - DNA, 201 bp, Homo sapiens; identical to SEQ ID NO: 19822

SEQ ID NO: 19883 - DNA, 201 bp, Homo sapiens; identical to SEQ ID NO: 19823

SEQ ID NO: 19884 - DNA, 201 bp, Homo sapiens; identical to SEQ ID NO: 19824

SEQ ID NO: 19885 - DNA, 201 bp, Homo sapiens; identical to SEQ ID NO: 19825

SEQ ID NO: 19886 - DNA, 201 bp, Homo sapiens
aggggaaatgaaatctgacaggtagaaagaggggagttggggttctttttctctctccctccaccagcatcactctctgcctctccctcaaaaatacgttsctgggtcaggatatatgttgactccctagagagctctggagtcaacctcctggccttcctccaccctcactcttggccttttcctgcccccatttcctct

SEQ ID NO: 19887 - DNA, 185 bp, Homo sapiens
ctggcccagtgctgcccagcctccccgcccgctcccaggcgccccatgtcctcacaggccaggacgccatggcaggatggagaggacttggtggatttttktttcttgcctgacctcagtttcatgaaagaaagtggaagctacagaattattttctaaaataaaggctgaattgtctgaaaaat

SEQ ID NO: 19888 - DNA, 178 bp, Homo sapiens
agtgctgcccagcctccccgcccgctcccaggcgccccatgtcctcacaggccaggacgccatggcaggatggagaggacttggtggatttttgtttcttkcctgacctcagtttcatgaaagaaagtggaagctacagaattattttctaaaataaaggctgaattgtctgaaaaat

SEQ ID NO: 19889 - DNA, 201 bp, Homo sapiens; identical to SEQ ID NO: 19815

SEQ ID NO: 19890 - DNA, 201 bp, Homo sapiens
ctccctagagagctctggagtcaacctcctggccttcctccaccctcactcttggccttttcctgcccccatttcctctacctgtggggcatggagccacragcctttgtgtgacggtttgctttctctctcctgtctttaggtgcatggctgcctcctaatcccatagtccagaggaggcatccctaggactgcgggcaa

SEQ ID NO: 19891 - DNA, 201 bp, Homo sapiens; identical to SEQ ID NO: 19816

SEQ ID NO: 19892 - DNA, 201 bp, Homo sapiens; identical to SEQ ID NO: 19817

SEQ ID NO: 19893 - DNA, 201 bp, Homo sapiens; identical to SEQ ID NO: 19818

SEQ ID NO: 19894 - DNA, 201 bp, Homo sapiens; identical to SEQ ID NO: 19819

SEQ ID NO: 19895 - DNA, 201 bp, Homo sapiens; identical to SEQ ID NO: 19820

SEQ ID NO: 19896 - DNA, 201 bp, Homo sapiens
ctttaggtgcatggctgcctcctaatcccatagtccagaggaggcatccctaggactgcgggcaagggagccgggcaagcccagggcagccttgaaccgtsccctggcctgccctccccggtgggggccaggatgctgaagaagcagtctgcagggcttgtgctgtggggcgctatcctctttgtggcctggaatgccctg

SEQ ID NO: 19897 - DNA, 201 bp, Homo sapiens; identical to SEQ ID NO: 19822

SEQ ID NO: 19898 - DNA, 201 bp, Homo sapiens; identical to SEQ ID NO: 19823

SEQ ID NO: 19899 - DNA, 201 bp, Homo sapiens; identical to SEQ ID NO: 19824

SEQ ID NO: 19900 - DNA, 201 bp, Homo sapiens; identical to SEQ ID NO: 19825

SEQ ID NO: 19901 - DNA, 201 bp, Homo sapiens
ggatcttatggttggtgatgaggcaggtgaattacgatcaatgttggaagttaattaccctatggaaaatggcatagtaagaaattaggatgacgtgaaamacctgtgggactacacgtttggaccagagaaacttaatatagataccagaaattgtaaaatcttactcacagaacctcctatgaacccaaccaaaaacac

SEQ ID NO: 19902 - DNA, 201 bp, Homo sapiens
agcggtagactctggagatagtgtgagtcatatttgcccagtatatgaaggcttttctctccctcatcttaccaggagactggatattgctgagagggatrtaactagataccaggttgcttctattgcgaggatatgccttcaaccaccctgctgattttgaaacggtttgcatgattaaagaaaaactgttacgtggga

SEQ ID NO: 19903 - DNA, 201 bp, Homo sapiens
gcagaaactggccttagaaaccaaagtattagttgaatcttatacattcccagatggacatatcatcaaagttggaggggagagatttgaagcaccagaarttttatttcagcctcacttgatcagtgttgaaggagttggtgttgctgaattgcttttgaacacaattcaggcagctgacattgatacctgatctgaatc

SEQ ID NO: 19904 - DNA, 201 bp, Homo sapiens
gtattagttgaatcttatacattcccagatggacatatcatcaaagttggaggggagagatttgaagcaccagaaattttatttcagcctcacttgatcartgttgaaggagttggtgttgctgaattgcttttgaacacaattcaggcagctgacattgatacctgatctgaatcctacaaacacattgtgctttctgga

SEQ ID NO: 19905 - DNA, 201 bp, Homo sapiens
ctggcctgtcatcaaggttggaacgagaacttaaacagctttacttagaacgagttttaaagggtgatgtggaaaaactttttaaatttaagatccgcatygaagacctacccctcagaaagcacatgggtggtgcagttctagcagataccatgaaagacaaagacaacttttggatgacccgacaagagtaccaagaaa

SEQ ID NO: 19906 - DNA, 201 bp, Homo sapiens
agacaaagacaacttttggatgacccgacaagagtaccaagaaaggggtgtccgtgtgctagagaaacttggtgtgactgttcgataaactccaaagcttkttcccatcacacccgtaatgctttcttttttcctttattgccaatcttttgaactcattcaacgcctggacatggaagaggcctctgtgtgccttttgac

SEQ ID NO: 19907 - DNA, 201 bp, Homo sapiens
tataaaaacctgcagggtctggctattgatgaagctgattgtatcttggacattgggtttgaagataaattaaagcaaattattaaacttttgccaacacrcaggcagactatgctcttttctgccacctaaactcgaaaagttgaggacctggcaaggatttctccgaaaaaggagccattgtatgttggtgttgatgaa

SEQ ID NO: 19908 - DNA, 201 bp, Homo sapiens
cagcatgtctcacctgctgatgaaactcctgagcaaggaaatggagaagcagaacctcaaattgtggcagtggaacctaaagttgcagggggcctcaaatmtgaccctaccagaaactcaaaatggagatgtgtctgaagaaacaatgggaggtagaaaggttaaaaaatcaaaacattctataaatgtggccttatcaga

SEQ ID NO: 19909 - DNA, 201 bp, Homo sapiens
cctactagacaactagccatgcaaacttttggtgttcttaaagagctaatgactcaccatgtgcacacctatgggttgataataggtggcagtaacagatmtgctgaagcacagaaacttgctaatgggatcaacatcattgtggtcacaccaggccgtctgctggaccatacgcagaataccccagggtttatgtataaa

SEQ ID NO: 19910 - DNA, 201 bp, Homo sapiens
ttcttggacagcatgtctcacctgctgatgaaactcctgagcaaggaaatggagaagcagaacctcaaattgtggcagtggaacctaaagttgcagggggmctcaaatctgaccctaccagaaactcaaaatggagatgtgtctgaagaaacaatgggaggtagaaaggttaaaaaatcaaaacattctataaatgtggcc

SEQ ID NO: 19911 - DNA, 201 bp, Homo sapiens
cacaccaggccgtctgctggaccatacgcagaataccccagggtttatgtataaaaacctgcagggtctggctattgatgaagctgattgtatcttggacrttgggtttgaagataaattaaagcaaattattaaacttttgccaacacacaggcagactatgctcttttctgccacctaaactcgaaaagttgaggacct

SEQ ID NO: 19912 - DNA, 201 bp, Homo sapiens
ggctgttctcatccctgctattgaactcgttgttaagttaaagttcatgcccaggaatggaacaggggtccttattctctcacctactagacaactagccrtgcaaacttttggtgttcttaaagagctaatgactcaccatgtgcacacctatgggttgataataggtggcagtaacagatctgctgaagcacagaaact

SEQ ID NO: 19913 - DNA, 201 bp, Homo sapiens
aaattcagcataaaactatcagaccacttctggaaggcagggatcttctagcagctgtaaaaacaggcagtggtaaaaccttggctgttctcatccctgcwattgaactcgttgttaagttaaagttcatgcccaggaatggaacaggggtccttattctctcacctactagacaactagccatgcaaacttttggtgttc

SEQ ID NO: 19914 - DNA, 201 bp, Homo sapiens
gaccctaccagaaactcaaaatggagatgtgtctgaagaaacaatgggaggtagaaaggttaaaaaatcaaaacattctataaatgtggccttatcagaasctcaaaatggagacgtgtctcaagaaacagtggaaaatgtaaaagttaaaaaatctccccagaaatccaccatattaaccaatggagatgcagaaatgca

SEQ ID NO: 19915 - DNA, 201 bp, Homo sapiens
ctactagacaactagccatgcaaacttttggtgttcttaaagagctaatgactcaccatgtgcacacctatgggttgataataggtggcagtaacagatcygctgaagcacagaaacttgctaatgggatcaacatcattgtggtcacaccaggccgtctgctggaccatacgcagaataccccagggtttatgtataaaa

SEQ ID NO: 19916 - DNA, 201 bp, Homo sapiens
agaaatccaccatattaaccaatggagatgcagaaatgcagtctcccaagtcagaatcaaaaaagaaaaagaagaagaaaaagagaaaaatggcgaatgaygctgggcctgataaaaaaaaagcaaaaactgaaaacaaaggagaatctgaagaataaagtgccgagacttctaaagaaacagaaaataatgtggagaagc

SEQ ID NO: 19917 - DNA, 201 bp, Homo sapiens; identical to SEQ ID NO: 19912

SEQ ID NO: 19918 - DNA, 201 bp, Homo sapiens; identical to SEQ ID NO: 19913

SEQ ID NO: 19919 - DNA, 201 bp, Homo sapiens; identical to SEQ ID NO: 19915

SEQ ID NO: 19920 - DNA, 201 bp, Homo sapiens; identical to SEQ ID NO: 19909

SEQ ID NO: 19921 - DNA, 201 bp, Homo sapiens
tcatccctacatctactagtggtgccaaggctgtgggccaggttactcccgagctgaatgggaagctcattggcatggccttccatgtctccactgccaamttgttggtcatggacctgacttgccatctggagaaagctgccaaatatgatgacatcaagaaggtggtaaagcaggaattggaggccccctcatgggcat

SEQ ID NO: 19922 - DNA, 201 bp, Homo sapiens
catccctacatctactagtggtgccaaggctgtgggccaggttactcccgagctgaatgggaagctcattggcatggccttccatgtctccactgccaaaktgttggtcatggacctgacttgccatctggagaaagctgccaaatatgatgacatcaagaaggtggtaaagcaggaattggaggccccctcatgggcatc

SEQ ID NO: 19923 - DNA, 172 bp, Homo sapiens
ctctctgctcctcccgtaagacagacagctgcatcttgtcatgcagcaccagctgtatccctgagacaccayggtgaaggtgaagaccaaagtaaatggatttggccatgttgggtgtctggtcaccagggctgcttttaactttggcaaagtggatactgtcaccatcaat

SEQ ID NO: 19924 - DNA, 201 bp, Homo sapiens
agatgggctcctgcacacatggagaagagatcaactctctttgcatgcctgtggttcagaatcttatggagagaaaaaatctttcctacgattgcactggscgactggaagttggaacagagacaatcaaggacaaatcaaagtcagtgaagactaatttgatgcagctgtttgaggagtctggggatatagatatagaag

SEQ ID NO: 19925 - DNA, 201 bp, Homo sapiens
accatattgtaaactggtgagtttatctctagctcggatgttgcggaatgacttccttaatgatcagaacagagataaaaatagtgtttagaatgtcctgraagcctttgggaatgttaaattagaagacatctattttgatacagatgtggagatggcatttatgaaggatagttccgaactctcccatcagaaaacaaa

SEQ ID NO: 19926 - DNA, 201 bp, Homo sapiens
caccatattgtaaactggtgagtttatctctagctcggatgttgcggaatgacttccttaatgatcagaacagagataaaaatagtgtttagaatgtcctsgaagcctttgggaatgttaaattagaagacatctattttgatacagatgtggagatggcatttatgaaggatagttccgaactctcccatcagaaaacaa

SEQ ID NO: 19927 - DNA, 201 bp, Homo sapiens
gacggaaatgataaagattttaccttgaataattttggcttcttgatccttcactcaccatattgtaaactggtgagtttatctctagctcggatgttgcrgaatgacttccttaatgatcagaacagagataaaaatagtgtttagaatgtcctggaagcctttgggaatgttaaattagaagacatctattttgataca

SEQ ID NO: 19928 - DNA, 201 bp, Homo sapiens
cagggaagagactggagtgttctcgtacggttctggttcagccgccaccctgtactctcttaaagttccaccagatgccacaccatggtctgctgttgataaaataacagcaagcttatgggatcttaaatcaaggtgtagctcaagaacttgtgtggtaccagatgtctttgttgaaaacatgaagctcagagaggacac

SEQ ID NO: 19929 - DNA, 201 bp, Homo sapiens
ctgtcccagcgcagtactcacctcagcaatgatcagggaagagactggagtgttctcgtacggttctggttcagccgccaccctgtactctcttaaagttmcaccagatgccacaccatggtctgctgttgataaaataacagcaagcttatgggatcttaaatcaaggtgtagctcaagaacttgtgtggtaccagatgt

SEQ ID NO: 19930 - DNA, 201 bp, Homo sapiens
taaaaatagtgtttagaatgtcctggaagcctttgggaatgttaaattagaagacatctattttgatacagatgtggagatggcatttatgaaggatagtyccgaactctcccatcagaaaacaaaggcatctttgctgtatccagtgaaaatggaaatacgtacacatcgtcagtatatggttccccgcaactgtcccag

SEQ ID NO: 19931 - DNA, 201 bp, Homo sapiens
acaggtagagtcagagcagtagctctgctaattgagccaaatgcaactttaatttttgaacgagggcttcgtgggacacatatgcaacgtgcctatggctyttatgagcctgatatgctctctgaatgtcctatagtagatggaaaaccctccacacagtgctgcttcagtgcattagatcactgctattctgtcgactgc

SEQ ID NO: 19932 - DNA, 201 bp, Homo sapiens
ctgacaggtagagtcagagcagtagctctgctaattgagccaaatgcaactttaatttttgaacgagggcttcgtgggacacatatgcaacgtgcctatgrcttttatgagcctgatatgctctctgaatgtcctatagtagatggaaaaccctccacacagtgctgcttcagtgcattagatcactgctattctgtcgac

SEQ ID NO: 19933 - DNA, 201 bp, Homo sapiens
ctggattgagtccagctcctgggatggacagtttgccctggagtttgtaggagatattgctgtatatcccacaggaaaagttagactgacaggtagagtcrgagcagtagctctgctaattgagccaaatgcaactttaatttttgaacgagggcttcgtgggacacatatgcaacgtgcctatggcttttatgagcctga

SEQ ID NO: 19934 - DNA, 201 bp, Homo sapiens
ggaagttggaacagagacaatcaaggacaaatcaaagtcagtgaagactaatttgatgcagctgtttgaggagtctggggatatagatatagaaggaaccracacaactcatgcatgctatggagccccagctgctgtcttcagtgctgttaactggattgagtccagctcctgggatggacagtttgccctggagtttgt

SEQ ID NO: 19935 - DNA, 201 bp, Homo sapiens
tagacatcgaggccttcaccatgtaccgggaagtgcacaaaatcaaacaatgccggggcttgaaatttgctgagctggtgtatactggtttctggctttcyggcacagccctgagtgtgaatttgtccgccactgcatcgccgagtcccaggagtgagtggaagggaaagtgcaggtgtctgtccttaaaggccaggtgta

SEQ ID NO: 19936 - DNA, 201 bp, Homo sapiens
ggaccgctacctcctgggaacctctctcgccaggccctgcatcacccacaaacaagtggaagtcgcccagcgggagggggccaaatatgtgtcccacggcrccacgggaaaggggaatgatcaggtctggtttgagctcacctgctactcgctggcccccacagataaaggtcattgctccctgaagtatgcccgaattct

SEQ ID NO: 19937 - DNA, 184 bp, Homo sapiens
atggtgagttaccaggagagccgcctatggtgtgagtgtgagctaatcatgcaagatgctgctgccgctgctgggatccccatmctgtcagccgtggtcaaccctgccgtgttcttcgacatcgctgtcgataagaaggttccaaagacagcagaaaactttcatgctctgaactttcatgctt

SEQ ID NO: 19938 - DNA, 201 bp, Homo sapiens
tgtcagggtggtgacttcacataccataatgacactggtggcaagtccatctacagggagaaatttgatgatgagaacttcatcctaaagcatacaggccytggcatcttgtctatggcaaatgctggacccaacatgaatggctcccagtttttcatctgcactgccaagactgagtggttggatggcaagcatgtagta

SEQ ID NO: 19939 - DNA, 120 bp, Homo sapiens
gcaaggtgaaagaaggcatgaagattatggaggccatggagcgctttgggtccaggagtggcaagactagcaagaagatcaccattgctgactgtggacarctccaataaattagacttg

SEQ ID NO: 19940 - DNA, 201 bp, Homo sapiens
tgagtgtgagctaatcatgcaagatgctgctgccgctgctgggatccccatactgtcagccgtggtcaaccctgccgtgttcttcgacatcgctgtcgatyagaaggttccaaagacagcagaaaactttcatgctctgaactttcatgctttcatggagagaacggatttggttataagggttcctgctttcacagaaat

SEQ ID NO: 19941 - DNA, 201 bp, Homo sapiens
cgagagttttacatgaaggatatgtacacctttgactcctccccagaggctgcccagcagacctacagcctggtgtgtgatgcctactgcagcctgttcarcaagctagggctgccatttgtcaaggtccaggccgatgtgggcaccatcgggggcacagtgtctcatgagttccagctcccagtggatattggagaggac

SEQ ID NO: 19942 - DNA, 201 bp, Homo sapiens
gtgagatcatgttagggaaatcaatttttatctagtcatttgttcagattatttgtatttaaagtcattaacttgatccctttctccagactggccatgcrgccatatacctttccttttgtattccattgtggaagcttctaggaggctgagaagcaggagatccaagctccagtcctgggtgttaccctgaggggggaa

SEQ ID NO: 19943 - DNA, 201 bp, Homo sapiens
cccggtgccagggtgtcatggaagggctgctgacaagatgcagagcattgcccgccctggccacctgcagccgccagctctctgggtatgttccttgcagktttcaccactgtgccccaagaagagggcggcgcctgctgctgtctcgtgtgttccagccacagaaccttcgggaagaccgggtgctctccctgcaggaca

SEQ ID NO: 19944 - DNA, 201 bp, Homo sapiens
tgagatcatgttagggaaatcaatttttatctagtcatttgttcagattatttgtatttaaagtcattaacttgatccctttctccagactggccatgccrccatatacctttccttttgtattccattgtggaagcttctaggaggctgagaagcaggagatccaagctccagtcctgggtgttaccctgaggggggaag

SEQ ID NO: 19945 - DNA, 201 bp, Homo sapiens
aaaccaaccctggctgaaatggggtgctatggcttgggtgtgacacggatcttggctgctgccattgaagtcctctctacagaagactgtgtccgctggcscagcctactggccccttaccaagcctgcctcatcccccctaagaagggcagtaaggagcaggcggcctccgagctcatagggcagctgtacgaccacatc

SEQ ID NO: 19946 - DNA, 201 bp, Homo sapiens
gggacttccagatcctatcctgggagtcaccaaagcctttaagagagacattgatagcaaaaaggtgaatctggtaattggtgccaaccaggacaacaacrgaaagctttatctgctgtctaacatctgcaaggcagaggcccagactgccacaaaaaatttggacaaggaatacctgctcattggggtactggctgaatt

SEQ ID NO: 19947 - DNA, 201 bp, Homo sapiens
agggatgctggcacacagctacaagcttatcagtactatgaccccaagacttgtggttctgacttcacaggcactatggaggacatttcaaaaataccagygcaaagtgttcttctcctgcatgcctgggcccataatctcatggaagaggacccttgtccagagcagtggaaggaaatagcaatggggtgaagaaaaaga

SEQ ID NO: 19948 - DNA, 201 bp, Homo sapiens
tctgttactactacgacggggatgttggaaattaatattatagacaagaccatccaatgaagcctcaccaaatctactactcacaatttgctgcccagctrtggtctccactgaacaatagaaatctgtcaccctcacaaacccagtactgaggagatgaccaagtaccacagggatgactacattaaattcttgcgctcc

SEQ ID NO: 19949 - DNA, 201 bp, Homo sapiens
cctggatacagagatccctaatgagcttccatacagcgactacttggaatagtttggaccagatttcaggctccacatcagtccttccagtatgactaacmagaacacgaatggtacttggagaagataaacagcgactgtttgagaacctgagaatgctgccccacaaacctgggtccaaatgcaggtgattccagagga

SEQ ID NO: 19950 - DNA, 201 bp, Homo sapiens
aagcctgaggcatctggcttctattacatcaatgacattgtcttggccatcctggaactgctaacctatcaccagagggtgctgtatattgacattgatawtcaccacggcgatgggatggaagaggccttctataccacagactgggtcatgactatgtcttctcctaagtagggagagaacttttcaggaactagggat

SEQ ID NO: 19951 - DNA, 201 bp, Homo sapiens; identical to SEQ ID NO: 19948

SEQ ID NO: 19952 - DNA, 201 bp, Homo sapiens; identical to SEQ ID NO: 19950

SEQ ID NO: 19953 - DNA, 201 bp, Homo sapiens
gaagtggagaaagcctgtgccaacccagctcctggttcagtcatcctgctggagaacctgcgctttcatgtggaggaagaagggaagggccaagatccctstggaaagaagattaaagctgagccagataaaatagaagccttccgagcatcactttccaagctaggggacgtctatgtcaatgatgcttttggcactgca

SEQ ID NO: 19954 - DNA, 109 bp, Homo sapiens
gctggagasagtgaggagaagaaaggggcgggacaagggcaaaggcgttagaagtcaccaccgacccagcccctcaacagcaagttggttcttcagcattaagatccag

SEQ ID NO: 19955 - DNA, 201 bp, Homo sapiens
tggagaacctgcgctttcatgtggaggaagaagggaagggccaagatccctctggaaagaagattaaagctgagccagataaaatagaagccttccgagcrtcactttccaagctaggggacgtctatgtcaatgatgcttttggcactgcacaccgcgctcatagttccatggtgggagtgaatctgccccataaagcat

SEQ ID NO: 19956 - DNA, 201 bp, Homo sapiens
actcttgcatcatctcactgaggcatggaggcctgtcactggtgcagaccacggacgtcttttaccccttggtggaggatccctacatgaagggtgcattmataatgcctgataatgccgctattggggatgtgctggtattaaccaaacccttaggaacccaagttgctgtcaatgcccaccaatggctggaggatactg

SEQ ID NO: 19957 - DNA, 201 bp, Homo sapiens
ttccagccctgggcattgggatagactcttgcatcatctcactgaggcatggaggcctgtcactggtgcagaccacggacgtcttttaccccttggtggargatccctacatgaagggtgcattcataatgcctgataatgccgctattggggatgtgctggtattaaccaaacccttaggaacccaagttgctgtcaatg

SEQ ID NO: 19958 - DNA, 201 bp, Homo sapiens
aagcacccctgccaatgcccttccagccctgggcattgggatagactcttgcatcatctcactgaggcatggaggcctgtcactggtgcagaccacggacktcttttaccccttggtggaggatccctacatgaagggtgcattcataatgcctgataatgccgctattggggatgtgctggtattaaccaaacccttagg

SEQ ID NO: 19959 - DNA, 201 bp, Homo sapiens
agtggcctcattttcaatggcaggtgttagcagagtggtcatcctgtctgtgtgtgttccatgtcacccctacctgctggtagcctcattaactctggcaygtagcagcagaagagggcattggaaagagtccagtggagcagagaaaggtggggagtggacgatcaagggcagccaggtcttgatttggaaaagatgccc

SEQ ID NO: 19960 - DNA, 201 bp, Homo sapiens
actgaggagggaggaactgcagtgacaggtggacaaacgtggtcaactcttggcttatcatgggtggagttgccactgtggtgtgtcggccaagtgcattmataatgcctgataatgccgctattggggatgtgctggtattaaccaaacccttaggaacccaagttgctgtcaatgcccaccaatggctggaggatactg

SEQ ID NO: 19961 - DNA, 201 bp, Homo sapiens
ttccagccctgggcattgggatagactcttgcatcatctcactgaggcatggaggcctgtcactggtgcagaccacggacgtcttttaccccttggtggargatccctacatgaaggggtgcatagcttgtgccaacgtgctgagtgacctctaggacataggcattactgagtgtgaaaacgtgttgacgttactcagcc

SEQ ID NO: 19962 - DNA, 155 bp, Homo sapiens
ccaagcatggattgttggcattgtggaaaagggaaatcggacagcctggatcattgacaagcctcgagttattgaggtccttcctcgtggggccactgcccactgcccctgctcttgctcctgcacattccaatgtgtcctcagagcctagctca

SEQ ID NO: 19963 - DNA, 201 bp, Homo sapiens
aagcacccctgccaatgcccttccagccctgggcattgggatagactcttgcatcatctcactgaggcatggaggcctgtcactggtgcagaccacggacktcttttaccccttggtggaggatccctacatgaaggggtgcatagcttgtgccaacgtgctgagtgacctctaggacataggcattactgagtgtgaaaa

SEQ ID NO: 19964 - DNA, 177 bp, Homo sapiens
gccatggcggcggcggaagtctcatcaagcccggcggccttgtctctgggctgggccttctcgagctactggccctkctagccccagttgtggggtctcagcctgagctggcgactgaccggcttctccggcaggaagggctgaggctgcaagctcccgcaggaggcactgcccaaa

SEQ ID NO: 19965 - DNA, 154 bp, Homo sapiens
aatgaaacatgaagatgcagtacaattcataggacaaaagcggagtggagcttttaaaagcaagcaacttttgtatttggagaagtatcatcctaaaatgyggctgcgcttcaaagattccaatagtcatataaacaactgttgcattcaataa

SEQ ID NO: 19966 - DNA, 201 bp, Homo sapiens
tgctggacccaacacaaacggttcccagttttccacacgcactgccaagactgagtggttgaacgcaagcacgtggtctccggcaagaagtgcggtgacayggaagagaccacacagtaagaagacaccaggggctggggctccctgctcctctgacctgactcagttcacccctgggatcctcacgcagcacctcccacc

SEQ ID NO: 19967 - DNA, 201 bp, Homo sapiens
ggcgggggtgcagccgcgcagagcactcaccgtggcggacgccaggctgttgtcggccagcgttaggtggtgcggctcccagcgcctcaggaatttcgagktgaggatcttgctgagaaagcccactgtggggtcaccccgggccacactggtggaggacccactcgatcaactcaatgctaggagctgggatgccaaact

SEQ ID NO: 19968 - DNA, 201 bp, Homo sapiens
gtgacacggaagagaccacacagtaagaagacaccaggggctggggctccctgctcctctgacctgactcagttcacccctgggatcctcacgcagcaccycccaccagaggtgtggtctgaagttcccagggaggaggcagaatctttggctgaacaaattcggttcagcccaagtctcccagggaaacggcgctgtgct

SEQ ID NO: 19969 - DNA, 179 bp, Homo sapiens
atggtcaaccccactgtgttctctgacatcgctgtcaacggcgagcccttgggccgcatctccttcgagctgtttgcaracaagtttccaaagacagcagaaaactttcacgctctgagcactggagagaaaggagttggttataagggttcctgctttcacaggaacattccagggtt

SEQ ID NO: 19970 - DNA, 201 bp, Homo sapiens
aagccgggggggcgctggcgcgaggccgcctggcaactctgcgactactacctgccctacgcgctgggcggcggctacgtgctctcggccgacctggtgcrctacctgcgcctcagccgcgactacctgcgcgcctggcacagcgaggacgtgtctctgggcgcctggctggcgccggtggacgtccagcgggagcacgac

SEQ ID NO: 19971 - DNA, 201 bp, Homo sapiens
tctgaagagactttcctttcaaggcttcccatgggtccgcgccacacagggccggtgctgctttatttcagactctgccccaggttccaggaatccgaacyccggagtgctgacgcggttccccaacttccgccttaagaaaacaggaccagccggcaccaggcccgtctctcacgtactttaacacatccttgaaagccc

SEQ ID NO: 19972 - DNA, 201 bp, Homo sapiens
tcagaaaaatgggactaaaagaaactattttgtaaaataagaagacttccatttttaatgaccaacatgtattaagatggacacctactctacgaaacacraagttctatggtctcgaagaagcccgtgcctgtttaaaactgatcctaactaaaaacagacttgagtggatatgagaatgttggttagtggcagaagagt

SEQ ID NO: 19973 - DNA, 201 bp, Homo sapiens
tcctcgttctacagggtgttccattcttccgcaatctcagaaaaatgggactaaaagaaactattttgtaaaataagaagacttccatttttaatgaccarcatgtattaagatggacacctactctacgaaacacgaagttctatggtctcgaagaagcccgtgcctgtttaaaactgatcctaactaaaaacagacttg

SEQ ID NO: 19974 - DNA, 201 bp, Homo sapiens; identical to SEQ ID NO: 19972

SEQ ID NO: 19975 - DNA, 201 bp, Homo sapiens; identical to SEQ ID NO: 19973

SEQ ID NO: 19976 - DNA, 201 bp, Homo sapiens; identical to SEQ ID NO: 19972

SEQ ID NO: 19977 - DNA, 201 bp, Homo sapiens; identical to SEQ ID NO: 19973

SEQ ID NO: 19978 - DNA, 201 bp, Homo sapiens; identical to SEQ ID NO: 19972

SEQ ID NO: 19979 - DNA, 201 bp, Homo sapiens; identical to SEQ ID NO: 19973

SEQ ID NO: 19980 - DNA, 201 bp, Homo sapiens
ccatggaattcatccagggagaggctcggctgggcgacaccatggaggccgatgaccatatgggtggcatccctgctcagaatagtaaaggggaaaggctkctgctttatattggcatcattgacattctacagtcttacacgtttcttaagaagttggagcactcttggaaagccgtggtacatgatggggacgctgtct

SEQ ID NO: 19981 - DNA, 201 bp, Homo sapiens
ggtctggcttatctttctctctgcatacgggctccagtggcaactcctgcattacttaccagccattggtctctgaggaacacaagtcacaagtgataaasgtgcaagtggagccaggtgttcaccttggtcgttctgatgttttacctcagacctcagaatccacctttggaggaaatcagtgagggctcactattactg

SEQ ID NO: 19982 - DNA, 135 bp, Homo sapiens
gcattagtgccttggacagttgaggaccactccatcctctccacagcatcccctccactccagagttgggtggcacggattttcaactggctaaccttggyttccacaactgaatttttttcagacccccattct

SEQ ID NO: 19983 - DNA, 201 bp, Homo sapiens
cccacatttaaagatctagacttcttacaagacatccctgatggtctttttttggatgctgacacgtacaatgctctctgtaagaccctgcagcgtgactrtttggtgctgcagagcttcaagataatggactatagcctctggctgtcaatccacaatatagatcatgcacaacgagagcccttaagcagcgacactctt

SEQ ID NO: 19984 - DNA, 201 bp, Homo sapiens
ctgccgggaagggggctgccaagatggcgtcggcctcctcccaaccgtcgttggcggtcggtttttcatcctttgatcccggggccccttcctgtaccgcrtcctcagcatctggaatcttgagccccacggcatctgaggtgccttatgcctctggcatgcccatcaagaaaacaggccatcgaggtgtcgattcctcag

SEQ ID NO: 19985 - DNA, 201 bp, Homo sapiens
tactcttctgtgaaagcggaaagtctcctctgaggaaagcggttgaacttgtggagggcgtgcgagacgggcgttctcccccatgccaggcgaatggtgcsgccttgagctggtccagcagccggctcgatgacaggtctgagggaggccccagaggcggcgggaaggtggcccgcagaacgcgggttctgtaaagacacg

SEQ ID NO: 19986 - DNA, 201 bp, Homo sapiens
gcgagacgggcgttctcccccatgccaggcgaatggtgcggccttgagctggtccagcagccggctcgatgacaggtctgagggaggccccagaggcggcrggaaggtggcccgcagaacgcgggttctgtaaagacacgtggagaagattcgattccgagaacaggaagaggcggatggaaagacagccaggcggctgcc

SEQ ID NO: 19987 - DNA, 201 bp, Homo sapiens
agacgggcgttctcccccatgccaggcgaatggtgcggccttgagctggtccagcagccggctcgatgacaggtctgagggaggccccagaggcggcgggraggtggcccgcagaacgcgggttctgtaaagacacgtggagaagattcgattccgagaacaggaagaggcggatggaaagacagccaggcggctgccggg

SEQ ID NO: 19988 - DNA, 201 bp, Homo sapiens
tcaaagactggctccccaaaaggctctgtattccacagccatggaattcatccagggagaggctcggctgggcgacaccatggaggccgatgaccatatgsgtggcatccctgctcagaatagtaaaggggaaaggcttctgctttatattggcatcattgacattctacagtcttacacgtttcttaagaagttggagca

SEQ ID NO: 19989 - DNA, 201 bp, Homo sapiens
ccctgttctatgtgtccagcgacgatgaactcattattaagacactccaacataaagaggcggagtttctgcagaagctgcttccaggatactacttgaayctcagccagaaccctcggactttgctgcctaaattctttggactgtactgtgtgcagacaggtggcaagaacattcggattgtggtgatgaacaatcttt

SEQ ID NO: 19990 - DNA, 201 bp, Homo sapiens
gatccccttgaagccttctccttccaaaaagtttcggtctggcttatctttctctctgcatacgggctccagtggcaactcctgcattacttaccagccaytggtctctgaggaacacaagtcacaagtgataaaggtgcaagtggagccaggtgttcaccttggtcgttctgatgttttacctcagacctcagaatccac

SEQ ID NO: 19991 - DNA, 135 bp, Homo sapiens
aacagcaatgaaggcaagcataaaaagagaggaggcgagagtagattcagctaccagaaaaccaagaaagttaagtccataatctttaaaaacattagcamgaaatcatctgatagcaggcagttctgtcactga

SEQ ID NO: 19992 - DNA, 201 bp, Homo sapiens
atacaaaaaaagcaaaaactgaaaacaaaggggaatccgaagaagatggtatcgaggctcctgaagaaacagaaaactggggggaagccagacaatgggaragatgagaatacttcatttcttctctaattttgtcagtgaaaacactttgaaggcaataaaagaaatgggctttaccaacatgactgaaatttagcataa

SEQ ID NO: 19993 - DNA, 201 bp, Homo sapiens
agggatattgtgtacagatgaggcagggagagagctagatattcctggctggattgttcagtattatcctccagatgaccctaaggaatatgttcatcgtsgggggacaatagccagggacctaaacgaaagagggcatgccttgctcagtttttgcccagaagaattgggttttgtttgttacctgaagcaacccaaggt

SEQ ID NO: 19994 - DNA, 201 bp, Homo sapiens
gtgatacaaaaaaagcaaaaactgaaaacaaaggggaatccgaagaagatggtatcgaggctcctgaagaaacagaaaactggggggaagccagacaatgrgagagatgagaatacttcatttcttctctaattttgtcagtgaaaacactttgaaggcaataaaagaaatgggctttaccaacatgactgaaatttagca

SEQ ID NO: 19995 - DNA, 201 bp, Homo sapiens
atatgttgttcgtccctctgaaaaaggattccttttgctctttatattccttaagaactgaaagaagaaactgatggtcttcttttcatcctgtaggtccrtaaaataccactatgagttgcggaactacattgacttgcctacctcagccattcatttccagaagcaaaattacgtgtagaattacattttttccagttc

SEQ ID NO: 19996 - DNA, 132 bp, Homo sapiens
aacagcaatgaaggcaagcataaaaagagaggaggcgagagtagattcagctaccagaaaaccaagaaagttaagtccataatctttaaaaacattagcamgaaatcatctgatagcaggcagttctgtcac

SEQ ID NO: 19997 - DNA, 201 bp, Homo sapiens; identical to SEQ ID NO: 19993

SEQ ID NO: 19998 - DNA, 152 bp, Homo sapiens
tccctctacccagaactgatttttaaaaagaagtaatttttctccctgggctgggaaaaccctaatgaactgaaacacacttttactttaaaatttttctrtctggcgtttttgtaatcatactattaaatgactctggagtcatgttaatg

SEQ ID NO: 19999 - DNA, 201 bp, Homo sapiens
agactggcgcccgacccgctctggagggtcggtgaacgatgaagggccggcggcggcgacgccgagagtactgcaagttcgcgctgctgttggtgctgtayacgctggtgctgttgctcgtcccctccgtattggacggcggccgcgacggggacaagggcgccgagcactgccccggcctgcagcgcagcctgggagtgt

SEQ ID NO: 20000 - DNA, 201 bp, Homo sapiens
aggcgctgtatccgggcgacgccgagagcttgcagggcgcgctgcgcgacatgctgcgttcgctcttccgctgcgacttctccgtgctgcggctgtacgcsccgccgggggaccccgctgcgcgcgccccggacacggccaatcttaccacggccgccctcttccgctggcggactaacaaggtcatctgctcgccgccac

SEQ ID NO: 20001 - DNA, 153 bp, Homo sapiens
tccctctacccagaactgatttttaaaaagaagtaatttttctccctgggctgggaaaaccctaatgaactgaaacacacttttactttaaaatttttctrtctggcgtttttgtaatcatactattaaatgactctggagtcatgttaatga

SEQ ID NO: 20002 - DNA, 201 bp, Homo sapiens
gcgcctcaagtctaggcagggactgctgcgcgagagcatccaggtgctgcgcacccgccagaggggcgaccgcttccaccgtgtgctgctggcgcacggcstgggtgctcgccccgggggccagtctcgcgcgctgcccgccgcgccgcgcgccgatttcttcctgaccggtgcgctcgaggtgatctgcgaagcctggct

SEQ ID NO: 20003 - DNA, 146 bp, Homo sapiens
ggctttatccagatgacagatcaatcacaaatctttcagaaaccctttttactactgttgattctcactctagttagtggactaattgggtgatcccggcyatctcagcactcaccgtagccctgagatatcacctctacatggcc

SEQ ID NO: 20004 - DNA, 201 bp, Homo sapiens
gataatacaccaggctgtaccagggcagttccttactttaatcctttaaccaaaaaccacagtgggccaaggatcaagagaggcaggttggagacctgggwaatgtggccgctggcaaagatgtgtcgccaacatgtctgttgaagattctctggtctcactctcaggacactattccatcactgcccacacaatggtgtc

SEQ ID NO: 20005 - DNA, 201 bp, Homo sapiens
aaccagattgagttccacctgtacctcactcagaagttaatccagtactgccagtccaaaggcatcttggtgaccacctatagcccccttggctctcctgwtaaaccctgggccaagcctgaggccccttctatcctggaggatcccaggatcaaggtgatcacagccaagcacaataaaaccacagcccagattctgatc

SEQ ID NO: 20006 - DNA, 201 bp, Homo sapiens
accacctctaatgaagcccaaccatcctttctacagcaacatcagtaaggatggcaggtatgcagacctcactgaagatcagctaccttcctgtgagcatmtgaaggacactaccaccagagctctactcttttggaatgaagaaatagctccccagatcaaggaggggaaatgagtactgattgcagcccatggaaacag

SEQ ID NO: 20007 - DNA, 192 bp, Homo sapiens
aacactggtgattactgtgatctgtgtggaggggagaaattttccactttggctgagttggtccggcattacacagaacatcacgggcaatkaaaagagaagaatggagatgttattgagcttaaatatcctctgaactgtgcagatcctgcctctgaaaggtggtttcagggacacctctctgggaaagaa

SEQ ID NO: 20008 - DNA, 201 bp, Homo sapiens
gcaggattgaagaagagcagaaaagcaagaggaaaggtcatgaatatacaaatattaagtattctctagcggaccagacgagtggagatcagagccccccsccccgccttgtactccaactccacgctgtgcagaaatgagagcagacagtgctagagtgtatgaaaacgtgggcctgatgcaacagcagaagagtttcag

SEQ ID NO: 20009 - DNA, 178 bp, Homo sapiens
gcaagaggaaaggtcatgaatatacaaatattaagtattctctagcggaccagacgagtggagatcagagcccccccccccgccttgtactccaactccaygctgtgcagaaatgagagcagacagtgctagagtgtatgaaaacgtgggcctgatgcaacagcagaagagtttcaga

SEQ ID NO: 20010 - DNA, 201 bp, Homo sapiens
tggactgcctggaaagtactctagaaaagtcactccaagcaaagtttccttcaaatctcaaggtctccattctcttagacttcacgcggggctcacgaggycggaagaactcccgcacaatgctgctcccactcctgcggaggttcccagagcaggtccgagtctccctctttcacacgccgcacctccgtgggctgcttc

SEQ ID NO: 20011 - DNA, 201 bp, Homo sapiens
tgctgcatgcccagaccttccacagcaactctcttttgacccaggaagatgcagcagctgctggggatcgcagaccagcccctgacacctggatttatccrctgattcagatgaagcccttcgagattcaaatcgatgagattgtcactgagaccctgttgactgaggcggagcgcggggcaaaggtctacctcaccactg

SEQ ID NO: 20012 - DNA, 201 bp, Homo sapiens
ccagaggtgaatggcttctttggggccaagggggtggccggcgccatcccagcggcctatgtgcacatcgagcgacagttcttcagtgaggtgtgcagcckgggacagcaggagcgggtccagcttcaggagtactggcggaggggctggacgttccacgccaaaggcctctggctgtacctggcagggagcagcctgccc

SEQ ID NO: 20013 - DNA, 201 bp, Homo sapiens; identical to SEQ ID NO: 20010

SEQ ID NO: 20014 - DNA, 201 bp, Homo sapiens; identical to SEQ ID NO: 20011

SEQ ID NO: 20015 - DNA, 201 bp, Homo sapiens; identical to SEQ ID NO: 20012

SEQ ID NO: 20016 - DNA, 201 bp, Homo sapiens; identical to SEQ ID NO: 20010

SEQ ID NO: 20017 - DNA, 201 bp, Homo sapiens; identical to SEQ ID NO: 20011

SEQ ID NO: 20018 - DNA, 201 bp, Homo sapiens; identical to SEQ ID NO: 20012

SEQ ID NO: 20019 - DNA, 201 bp, Homo sapiens
gttatagctggtggagagagggccaggactgaggtggatgtggcagccaccaggctagggagcttgagagctgtgtggaagcccccaggggagaggcttcraggtggaccacctgagtcaccagaggatgagagtgccaagctgggcttcgaggcccactggttctgggagcagtgccaggatgatgtgaccttcttgtaa

SEQ ID NO: 20020 - DNA, 201 bp, Homo sapiens
gctgctccgcgggctgcgaggcgagtgtgagctgggaacctctggcgccctgctgctcccaggggcgtctagcaccggccacgacttgggggacaagatcmtggcgctgaagatggagctggcttacctgcgagccatcgatgtgaagatcctgcagcagctggtgaccttgaatgagggcatcgaggcagtgcgctggct

SEQ ID NO: 20021 - DNA, 101 bp, Homo sapiens
aagatggttggctgataaagatgacactgagtaactcttcagaactggattaacttatgagtgaagaagtgtatgagacatacataaaatctattgaggar

SEQ ID NO: 20022 - DNA, 118 bp, Homo sapiens
atggccctgcaagcagcrcggagcatgcgggccgtgctctgcagcctgcgcgcgctctgggcacccgccgtgccctgcctgccaaggccctggcagctgggggcgggcgccatctgga

SEQ ID NO: 20023 - DNA, 201 bp, Homo sapiens
gatgttgtttactgtagtctgtctgaagttgggacaaaattgaacaaacaagatgagttttgtgctttggaaagtgtgaaagctgctagtgaaatctattmtctttaatcaggagaagtaactgaaattaatgaagctcttgcagaaaatccaggacttgtcaacaaatcttgttgtgaagatggttggctgataaagatg

SEQ ID NO: 20024 - DNA, 201 bp, Homo sapiens
tgtatgaccttaaacaagtcaccttagttttcagtgaaatgggaatatcattgtctcctctttcatgaatgctgtgagaatcagatgtgcaacaggtacakacttgccctttgaaatctatacctctggatacattagaggcattttattaacaaaggcccttctaaatgtgctatttatttgacaataactatcagattt

SEQ ID NO: 20025 - DNA, 201 bp, Homo sapiens
ctggagcagtctatgtagcagaaattggagcaaaacaagtacaaaaatatgtccctttgaatagctatgttccttcatttggttcataatgtttctttccygggaatatttcaagtggcagttcagattctcaattcactaagtgcttaaaaatgatgttcaagcacaagaatttatttttctagtataaaagatctagta

SEQ ID NO: 20026 - DNA, 201 bp, Homo sapiens
tacaaaaatatgtccctttgaatagctatgttccttcatttggttcataatgtttctttcctgggaatatttcaagtggcagttcagattctcaattcacyaagtgcttaaaaatgatgttcaagcacaagaatttatttttctagtataaaagatctagtatcagaaagatttgtttttgtatcattaagaatcttatat

SEQ ID NO: 20027 - DNA, 201 bp, Homo sapiens
ggcttctttcttgcatttttggttttgcattcgcgtttttgtggctctccagttttgaggaactttacttttgcagtttcctggagaactgagaaaattckttaccggctggatgtgggttggcctaagcacccagaatattttaccggaacaacattttgtgttgcagttgactccctcaatggattggtttacataggt

SEQ ID NO: 20028 - DNA, 201 bp, Homo sapiens
gggccccgggcagaccctctgtgccgctgcaaaccgttgcagcctgaggctgtcaggtcctcccccagacacctgcggaccctccctctcctggcttcccrtctggtcatggcgagattctgggtctgcgtagccggtgctggcttctttcttgcatttttggttttgcattcgcgtttttgtggctctccagttttgagg

SEQ ID NO: 20029 - DNA, 201 bp, Homo sapiens
ccctgggtaaaaaaaatgggaataaaaatgagcttgcatgataatttattaaatttcatgtgaagaactccagacctccagattgtgcaactaacataaartgagctgcttgagagattgtaaataagatgaactattgattaatttgagtacccacagagtgctgtgtcttgacgacttaaaaatgaaaaagcaggattg

SEQ ID NO: 20030 - DNA, 201 bp, Homo sapiens
aatcctttgagctgttaagatgataatttcctgctttcctcctacatcttctcctcccactccctcctttggtgtgaatattggcttcccaattaagacctttttttttttttttccagtttgttttagcttattataggttttggaggaactttgccattttgtaatctttcaaatcattcttcacccttcctcacatca

SEQ ID NO: 20031 - DNA, 201 bp, Homo sapiens
tggtcttctgtgattttcattcgccctggtctctgttccctttcgtactcaaagctcgtgcatccagggaggggaaaccggagatagggtcttcgggcccmgggcagaccctctgtgccgctgcaaaccgttgcagcctgaggctgtcaggtcctcccccagacacctgcggaccctccctctcctggcttcccgtctggt

SEQ ID NO: 20032 - DNA, 201 bp, Homo sapiens; identical to SEQ ID NO: 20024

SEQ ID NO: 20033 - DNA, 201 bp, Homo sapiens; identical to SEQ ID NO: 20025

SEQ ID NO: 20034 - DNA, 201 bp, Homo sapiens; identical to SEQ ID NO: 20026

SEQ ID NO: 20035 - DNA, 201 bp, Homo sapiens
ctctcctggcttcccgtctggtcatggcgagattctgggtctgcgtagccggttttgaggaactttacttttgcagtttcctggagaactgagaaaattckttaccggctggatgtgggttggcctaagcacccagaatattttaccggaacaacattttgtgttgcagttgactccctcaatggattggtttacataggt

SEQ ID NO: 20036 - DNA, 201 bp, Homo sapiens
gggccccgggcagaccctctgtgccgctgcaaaccgttgcagcctgaggctgtcaggtcctcccccagacacctgcggaccctccctctcctggcttcccrtctggtcatggcgagattctgggtctgcgtagccggttttgaggaactttacttttgcagtttcctggagaactgagaaaattctttaccggctggatgt

SEQ ID NO: 20037 - DNA, 201 bp, Homo sapiens; identical to SEQ ID NO: 20030

SEQ ID NO: 20038 - DNA, 201 bp, Homo sapiens; identical to SEQ ID NO: 20029

SEQ ID NO: 20039 - DNA, 201 bp, Homo sapiens; identical to SEQ ID NO: 20031

SEQ ID NO: 20040 - DNA, 201 bp, Homo sapiens
aagcctgcatgtggggctgcaaaaggagaagacgatgctgtaggaggcagggagagcaaattaccacagctttttggcccagctctgcccttctttgcttygggattgcactgggccataagctcatgccaggctatgggggcagccagttggcattgctccccagactgaacagaaacctggctgtctgatgggacctcc

SEQ ID NO: 20041 - DNA, 201 bp, Homo sapiens
agaaccctcacatccctttttccaggtcctcactcttgggttatggaggcttaggaaaacaatccgactccctagcccagaccctcaggtcgggaagcctscatgtggggctgcaaaaggagaagacgatgctgtaggaggcagggagagcaaattaccacagctttttggcccagctctgcccttctttgctttgggatt

SEQ ID NO: 20042 - DNA, 201 bp, Homo sapiens
gccaggcaccatcctcaccaagaagcgccggggagagaccatctttgcctgacacagcattcttcctgttcactgagggcatttccaaagctgcctcatgyctgttcttcagaaccctcacatccctttttccaggtcctcactcttgggttatggaggcttaggaaaacaatccgactccctagcccagaccctcaggtc

SEQ ID NO: 20043 - DNA, 201 bp, Homo sapiens
caagccatcctggaaagcccagtgtcttcctgtccccccaaactagccaatcacccagatgcccagcataagccaggcaccatcctcaccaagaagcgccrgggagagaccatctttgcctgacacagcattcttcctgttcactgagggcatttccaaagctgcctcatgcctgttcttcagaaccctcacatccctttt

SEQ ID NO: 20044 - DNA, 201 bp, Homo sapiens
agacttgggcaggaagatgttggaagattctcaggaacacagggagaggatggagccagagaccagtggaaatgaggatgagaaagggcagcagaagataygggaagagaaggataagagcaaagaactgcatgccattaaggagcattacctgggtggcatcaaaaagcggcaccaaacaagacatctcaatgaccgaaa

SEQ ID NO: 20045 - DNA, 201 bp, Homo sapiens
agagtggggtggccatcaccttcctcacaaaagaggactctgcagttttctacgagctgaagcaagccatcctggaaagcccagtgtcttcctgtcccccmaaactagccaatcacccagatgcccagcataagccaggcaccatcctcaccaagaagcgccggggagagaccatctttgcctgacacagcattcttcctg

SEQ ID NO: 20046 - DNA, 201 bp, Homo sapiens
cttctggccaagaaaaaggctaaggaagaagctgaggttaagcccaagttcctctccaaagcagaacaagaggctgaagctctaaagcaacggcagcaggrggtggaagagcagcagaggatgcttgtagaggagaggaagaaaaggaaacagttccaagacttgggcaggaagatgttggaagattctcaggaacacagg

SEQ ID NO: 20047 - DNA, 201 bp, Homo sapiens
ataagagcaaagaactgcatgccattaaggagcattacctgggtggcatcaaaaagcggcaccaaacaagacatctcaatgaccgaaagtttgtttttgagggggatgcatctgaggatacatccattgactacaaccccctgtacaaagaacggcaccaggtgcagttgttagggcaaggtttcattacaggcattgacc

SEQ ID NO: 20048 - DNA, 201 bp, Homo sapiens
aggatacatccattgactacaaccccctgtacaaagaacggcaccaggtgcagttgttagggcaaggtttcattacaggcattgacctcaagagcagtcaygtttctgtggagacctaatggaaaagaggcgaaccctggaagaaaaggagcaggaggaggcaagactccgcaaacttcataagaaggaagccaagtgcgc

SEQ ID NO: 20049 - DNA, 201 bp, Homo sapiens
ggcaccaggtgcagttgttagggcaaggtttcattacaggcattgacctcaagagcagtcatgtttctgtggagacctaatggaaaagaggcgaaccctgraagaaaaggagcaggaggaggcaagactccgcaaacttcataagaaggaagccaagtgcgctgggatgatcgtcattggtctcagaaaaagttagatgag

SEQ ID NO: 20050 - DNA, 201 bp, Homo sapiens
agatgacggacagggactggtggctcttccgtgagggctacagcatcaccaccaaaggtggcaagatccccaatcccatctgatcctggaaagagtctttctgctgccacacatcttggaggtcattgataagtgtggctacaaggaatcaacacctatccagcgtcaggcaattccctttgggctacagaatcgtgacat

SEQ ID NO: 20051 - DNA, 201 bp, Homo sapiens
ggcaagatccccaatcccatctgatcctggaaagagtctttctgctgccacacatcttggaggtcattgataagtgtggctacaaggaatcaacacctatmcagcgtcaggcaattccctttgggctacagaatcgtgacatcattggtgtggctgagactggccgcagcaagacaacagccttcctcatcccactgctag

SEQ ID NO: 20052 - DNA, 201 bp, Homo sapiens
atgccattaaggagcattacctgggtggcatcaaaaagcggcaccaaacaagacatctcaatgaccgaaagtttgtttttgagggggatgcatctgaggasacatccattgactacaaccccctgtacaaagaacggcaccaggtgcagttgttagggcaaggtttcattacaggcattgacctcaagagcagtcatgttt

SEQ ID NO: 20053 - DNA, 201 bp, Homo sapiens
gagatgacggacagggactggtggctcttccgtgagggctacagcatcaccaccaaaggtggcaagatccccaatcccatctgatcctggaaagagtcttyctgctgccacacatcttggaggtcattgataagtgtggctacaaggaatcaacacctatccagcgtcaggcaattccctttgggctacagaatcgtgaca

SEQ ID NO: 20054 - DNA, 201 bp, Homo sapiens
attggtggcatctccagagaagactggggcttcaggctgctcatgggttgtgagattgtgatcgccacccctgggcatttgattgatgtgctggagaatcrctacctggtgctgagctgctgtacctacgtggttctggatgaggcagataggatgattgacgtgggcttcgagccagatgtccagaagatcctggagcac

SEQ ID NO: 20055 - DNA, 201 bp, Homo sapiens
tcattacaggcattgacctcaagagcagtcatgtttctgtggagacctaatggaaaagaggcgaaccctggaagaaaaggagcaggaggaggcaagactcygcaaacttcataagaaggaagccaagtgcgctgggatgatcgtcattggtctcagaaaaagttagatgagatgacggacagggactggtggctcttccgt

SEQ ID NO: 20056 - DNA, 201 bp, Homo sapiens
gtctcagaaaaagttagatgagatgacggacagggactggtggctcttccgtgagggctacagcatcaccaccaaaggtggcaagatccccaatcccatcygatcctggaaagagtctttctgctgccacacatcttggaggtcattgataagtgtggctacaaggaatcaacacctatccagcgtcaggcaattcccttt

SEQ ID NO: 20057 - DNA, 178 bp, Homo sapiens
tgtgcacagccctgcaccaaggagtgctgtgtgctctaggcatcccttccccaggggattttctaagtagatggggggacagggtgaactgactgtgtccyttgtcactgaatgaaatctctgttttctattctctgagaagatgtttgtatgttctgagaataaatatatgaatatt

SEQ ID NO: 20058 - DNA, 201 bp, Homo sapiens
tcattggtggcatctccagagaagactggggcttcaggctgctcatgggttgtgagattgtgatcgccacccctgggcatttgattgatgtgctggagaawcgctacctggtgctgagctgctgtacctacgtggttctggatgaggcagataggatgattgacgtgggcttcgagccagatgtccagaagatcctggagc

SEQ ID NO: 20059 - DNA, 201 bp, Homo sapiens
gaaaacgttaagtaccatcaaagtcatgttcatggccaccaagcccccagcagtggagtgtctggccaggagctatcttcggcgacctgctgtggtgtacmttgaccccgcaggcaagccccatgagcgtgtggaacaggtcttcctcatgtcagagtcagaaaagaggaaaaagctgctggaaatcttgaagcaaggctt

SEQ ID NO: 20060 - DNA, 201 bp, Homo sapiens
gtgtgtgggcatgggctgcggctccatctgcgtcacccgggaagtgatggcttgtggtcagccccagggcactgctgtgtacaaggaggccaagtatgccyggcgctttggtgtgcccatcatagccaatggcagcatccagaccatggggcacatagtcaaggccctggcccttggagtctccacagtgatgatgggctc

SEQ ID NO: 20061 - DNA, 201 bp, Homo sapiens
cacccgggaagtgatggcttgtggtcagccccagggcactgctgtgtacaaggaggccaagtatgcccggcgctttggtgtgcccatcatagccaatggcrgcatccagaccatggggcacatagtcaaggccctggcccttggagtctccacagtgatgatgggctccctgctggccatcaccatggaggcccctggtga

SEQ ID NO: 20062 - DNA, 201 bp, Homo sapiens
tccagaccatggggcacatagtcaaggccctggcccttggagtctccacagtgatgatgggctccctgctggccatcaccatggaggcccctggtgagtasttctcagacgaggtgcggctcaagaagtactggggcatgggctcactggatgccatggagaagagcagcagcagccagaaacgatacttcagcaaggggg

SEQ ID NO: 20063 - DNA, 201 bp, Homo sapiens
acactgacagaggctgacatggcaatcgggatggctctgatgggaggtattggtttcattcaccacaactgcaccccagagttcgaggccaatgaggtgckgaaggtcaagaagtttgaacagggcttcatcacggaccctgtggtgctgagccccttgcacaccgtgggtgatgtgcttggaggccaagatgctgcatgg

SEQ ID NO: 20064 - DNA, 201 bp, Homo sapiens
tgattctcccaggattcatagacttcatagctgatgatgaggtggacctgacctcagccctgacccacaagggctgaagacgccgctgatctcctcccctrtggacactgacagaggctgacatggcaatcgggatggctctgatgggaggtattggtttcattcaccacaactgcaccccagagttcgaggccaatgagg

SEQ ID NO: 20065 - DNA, 201 bp, Homo sapiens
ggatatcggggcccgcagcctgtctgtcctttggtccatgatgtactcaggggagctcaagtttgagaagcagaccatgtcggcccagatcaagggtggtrtccatggcctgcactcgtatgagaagcagctgtgatgaggacagcggtggaggctgaggtggtggagggggtgcaccccagtgtccaccttggggcacag

SEQ ID NO: 20066 - DNA, 201 bp, Homo sapiens
ccaccttcatcagtgaggtgatgacgccaaggatggaactggtggtggctgacgttgaaaggtgtgacgttgaaagaggcaaatgagatcctgcagcgtarcaagaaagggaagctgcctatcgtcagtgatcgcgatgagctggtggccatcattgcccgcactgacctgaagaagaatcgagactaccctctggcctcc

SEQ ID NO: 20067 - DNA, 201 bp, Homo sapiens
gaaatgatgctcagaaattcatctatgaatctgatgtgttgttgaaacatcagagcaacattcacatggtgaatgaatggatgactattgagatctcattsacaaaaatctggagagtcctcagaagggatcagagcatttgctagttggcaccagatcttgtccaataataccttgaaaagcagaatttgtacagctccg

SEQ ID NO: 20068 - DNA, 201 bp, Homo sapiens
tggacgaaagaggaagtggactgaacaaagacaagattctgatcaagaggaatcccctagagccaaaaatgaaaggtgcgccaaaggtccatctgctgtgygggggtagatttactggagtctttggtgttctcagtttgtggatgagtgaagatatcatccaaatcgtggcagattatgagctcatatgtattacttgat

SEQ ID NO: 20069 - DNA, 201 bp, Homo sapiens
gccacccaaaattccaaatgggtagaagttgacacatgggaaagtcttcagaaggagtggatagagactgttaaggtgctaaggcaccatcaagagaaacygaaggccagtaactgtgatcaccagcagaactcacctacattaggaaggcctggacgaaagaggaagtggactgaacaaagacaagattctgatcaagag

SEQ ID NO: 20070 - DNA, 201 bp, Homo sapiens
ctgttggcgatgcatacaagaagaaaggactcattcctgcccatcaccaggtcatcacggcagaacttgccacccaaaattccaaatgggtagaagttgayacatgggaaagtcttcagaaggagtggatagagactgttaaggtgctaaggcaccatcaagagaaaccgaaggccagtaactgtgatcaccagcagaact

SEQ ID NO: 20071 - DNA, 201 bp, Homo sapiens
atggaaaattcagagaagacagaagtggctctctgtgcttgtggttcctttaattctatcaccaacaagcacctcaggttgtttgagctggccaaggattrcatgaatggaacaggaagatatagagttgtcaaaggcataatctctcctgttggcgatgcatacaagaagaaaggactcattcctgcccatcaccaggtc

SEQ ID NO: 20072 - DNA, 144 bp, Homo sapiens
gttcttgccatggaaaattcagagaagacagaagtggctctctktgcttgtggttcctttaattctatcaccaacaagcacctcaggttgtttgagctggccaaggattgcatgaatggaacaggaagatatagagttgtcaaa

SEQ ID NO: 20073 - DNA, 201 bp, Homo sapiens
ctgccttactaccatggacgtctgaccaagcaagactgtgagaccttgctgctcaaggaaggggtggatggcaactttcttttaagagacagcgagtcgayaccaggagtcctgtgcctctgtgtctcgtttaaaaatattgtctacacataccgaatcttcagagagaaacacgggtattacaggatacaggtaagaaca

SEQ ID NO: 20074 - DNA, 201 bp, Homo sapiens
aggtagctccacaggaggtacagctgcttacacatctctcctcagagctgtcccttgacttgggggtgaatttcaggccaacagggcttcctgggatacargagcgttctccatggatctgccttactaccatggacgtctgaccaagcaagactgtgagaccttgctgctcaaggaaggggtggatggcaactttctttt

SEQ ID NO: 20075 - DNA, 196 bp, Homo sapiens
ctagaggaagaggtagctccacaggaggtacagctgcttacacatctctcctcagagctgtcccttgacttgggggtgaatttcaggccaacaggscttcctgggatacaagagcgttctccatggatctgccttactaccatggacgtctgaccaagcaagactgtgagaccttgctgctcaaggaaggggtgga

SEQ ID NO: 20076 - DNA, 119 bp, Homo sapiens
aacctggtttttccctgaagagaaataggaaggttctaggcttgggttctactttttttgttgttgttttgttttttttagacggagtctcgctctgtcgyccaggctggagtgcagtg

SEQ ID NO: 20077 - DNA, 118 bp, Homo sapiens
aaactgccaaactgtttyccaaagtgatcatgcgatctcactattcccatgggcattacatgagttctgattgctctacatccttaccaacatgtggaacggtttaaaaatattgtct

SEQ ID NO: 20078 - DNA, 201 bp, Homo sapiens
tgtgtagaaatttgtgctgcccagagctgtgcctagttcatagaaactgactggaagcacattgctgagggaggtttgttgaattggtttttaaggtttaytgaaattgatttgctgaatttttctgctagttcaaaatgtgaattaggacctggtcagtttgaaatataccaaattctatgccctttctcttacctatca

SEQ ID NO: 20079 - DNA, 201 bp, Homo sapiens
caaatcaggggatggtggttcaccttttaaagccaataaagagaaccagccccagcttgagatggagaggattgaaattagagttggaaacatttgtgaamagtaacagcgattatgtggatgtcttgccttgaagataaggctgccggacaaagcaagttgaagagatgagtaacagttctcactgatgacccacttctg

SEQ ID NO: 20080 - DNA, 201 bp, Homo sapiens
atcaaattgtagtaatgtatttcaccccactggacttatcttcagagttttaaaagagaggagctctcgacttagaggtaatatgaacagatgaacagacwctgtggctggagccccaaagtgtggagcattgtgagatttggggtcacagcaatttatggctactattccctgggtctggtaggtaggacaaatgtcctc

SEQ ID NO: 20081 - DNA, 201 bp, Homo sapiens
gtaggacaaatgtcctcttttacttttcaaaactggcttaggtattcatggaccttgattcttctatatacattttataataaatacgtgaaattgcttamaacctctttttggaatttttaatgaacttgcaacaaatttgtaaataggagagaactgacgttcttgtgatgttttctcatgcataaacatgccacatcc

SEQ ID NO: 20082 - DNA, 201 bp, Homo sapiens
aataaatacgtgaaattgcttaaaacctctttttggaatttttaatgaacttgcaacaaatttgtaaataggagagaactgacgttcttgtgatgttttcycatgcataaacatgccacatccatgttcttgggtcatcttttttgccctttcatggagtcataaattttcccaactgaagtcttgtatattctgttagat

SEQ ID NO: 20083 - DNA, 201 bp, Homo sapiens
ccaataaagagaaccagccccagcttgagatggagaggattgaaattagagttggaaacatttgtgaacagtaacagcgattatgtggatgtcttgccttraagataaggctgccggacaaagcaagttgaagagatgagtaacagttctcactgatgacccacttctgcaggcataggtccagagcaccaaactctagtg

SEQ ID NO: 20084 - DNA, 196 bp, Homo sapiens; identical to SEQ ID NO: 20075

SEQ ID NO: 20085 - DNA, 201 bp, Homo sapiens; identical to SEQ ID NO: 20078

SEQ ID NO: 20086 - DNA, 201 bp, Homo sapiens; identical to SEQ ID NO: 20079

SEQ ID NO: 20087 - DNA, 201 bp, Homo sapiens; identical to SEQ ID NO: 20080

SEQ ID NO: 20088 - DNA, 201 bp, Homo sapiens; identical to SEQ ID NO: 20081

SEQ ID NO: 20089 - DNA, 201 bp, Homo sapiens; identical to SEQ ID NO: 20082

SEQ ID NO: 20090 - DNA, 201 bp, Homo sapiens; identical to SEQ ID NO: 20083

SEQ ID NO: 20091 - DNA, 201 bp, Homo sapiens; identical to SEQ ID NO: 20074

SEQ ID NO: 20092 - DNA, 201 bp, Homo sapiens
ctgccttactaccatggacgtctgaccaagcaagactgtgagaccttgctgctcaaggaaggggtggatggcaactttcttttaagagacagcgagtcgayaccaggagtcctgtgcctctgtgtctcgtttaaaaatattgtctacacataccgaatcttcagagagaaacacgggtattacaggatacagactgcagaa

SEQ ID NO: 20093 - DNA, 201 bp, Homo sapiens
aaacggctgcttcttggtgaaaacgggtgctaaatggctgttcgagtgctgaggtcttgatgggaggcagtccctgttcgcagaggacgagtgagccagtscgtgagcgggtgggcagcaggggccctgtagcctctgggttggactcgtcagggtgaaggtcaggcgttgactcgcattaacataaagagcgggaacagc

SEQ ID NO: 20094 - DNA, 201 bp, Homo sapiens
tgggaagctcagcagccatggccagccacctcaagctcaacaacactgccaaaatgcccatcctgaggctgggcacctggaagtcccctccaggccaggtmaccgaggctatgaagatggcgattggcattgggtaccaccacactgactgcacctacaccagaacaagcatgaggtgcaggtggcccaggagaagctcag

SEQ ID NO: 20095 - DNA, 201 bp, Homo sapiens
gagggctttcctagcttgatgttgcgtttggagagcagtacccacagagtacaagtctcttccagttttctttgcccttattgttgcccagctggggaaartacaacttgaatacccttttctgaccaaggaaaagcaaaatgtacaaagtcaaaatagtgccactaatagttgagttttgatgcttggaactgtaatcct

SEQ ID NO: 20096 - DNA, 201 bp, Homo sapiens
agaccattgagggctttcctagcttgatgttgcgtttggagagcagtacccacagagtacaagtctcttccagttttctttgcccttattgttgcccagcyggggaaagtacaacttgaatacccttttctgaccaaggaaaagcaaaatgtacaaagtcaaaatagtgccactaatagttgagttttgatgcttggaact

SEQ ID NO: 20097 - DNA, 201 bp, Homo sapiens
tttacctgcttcttagggtgctcaacattgacctgctgtggtccgtgcccatagccaaaaagtggtgtgctaaccccgactggatccacattgacaccacrccttttgctggactcgtgagaaaccttggggtcctctttggcttgggctttgcaatcaactcagagatgttcctcctgagctgccgagggggaaataact

SEQ ID NO: 20098 - DNA, 142 bp, Homo sapiens
acaacacagagcctgcatccccagctggagacaactgaccagagctgcatactaacagtccccagtaggaggcaaggactccattttctcacagtcttcarcatcccagcaggagccccactatgattcctttatcttctta

SEQ ID NO: 20099 - DNA, 201 bp, Homo sapiens
ctcatcaagttattcttggagtaattggtggcatgctggtggcagaggcctttgaacacactccaggcatccaaacggccagtctgggcacatacctgaaraccaacctctttctcttcctgtttgcagttggcttttacctgcttcttagggtgctcaacattgacctgctgtggtccgtgcccatagccaaaaagtggt

SEQ ID NO: 20100 - DNA, 201 bp, Homo sapiens
atcacccttctccatccaccagtagagccacagagtaggcacagaccagaggcttctaatccgacttcacagaatagcggcacaggccccattccccataragatgtttagtttggccttcgcactggtctttttttttaatccttcagttaccaatatttagatacaagaatatttgacataaaaatcggaagttctgta

SEQ ID NO: 20101 - DNA, 178 bp, Homo sapiens
ggaagttctgtatttcttgaaaaatctgatagtatgacaacacagagcctgcatccccagctggagacaactgaccagagctgcatactaacagtccccaktaggaggcaaggactccattttctcacagtcttcagcatcccagcaggagccccactatgattcctttatcttctta

SEQ ID NO: 20102 - DNA, 201 bp, Homo sapiens
cattttcctcatcaagttattcttggagtaattggtggcatgctggtggcagaggcctttgaacacactccaggcatccaaacggccagtctgggcacatmcctgaagaccaacctctttctcttcctgtttgcagttggcttttacctgcttcttagggtgctcaacattgacctgctgtggtccgtgcccatagccaaa

SEQ ID NO: 20103 - DNA, 201 bp, Homo sapiens
ccctaactgtggttgctttcattccctactctgttcatatgttaatgaaacaaagcggaaagaagagtcagtagagtggtgcctagagttagtgctctgtrtcacagatcacccttctccatccaccagtagagccacagagtaggcacagaccagaggcttctaatccgacttcacagaatagcggcacaggccccattc

SEQ ID NO: 20104 - DNA, 185 bp, Homo sapiens
aaaaatcggaagttctgtatttcttgaaaaatctgatagtatgacaacacagagcctgcatccccagctggagacaactgaccagagctgcatactaacartccccagtaggaggcaaggactccattttctcacagtcttcagcatcccagcaggagccccactatgattcctttatcttctta

SEQ ID NO: 20105 - DNA, 201 bp, Homo sapiens
gatggataagttctctatcactctgcacagactgacctggtcatttctttggagtgttttttggttgattcaaatcagtgtctgcatctccagagtattcrtagcaacacattttcctcatcaagttattcttggagtaattggtggcatgctggtggcagaggcctttgaacacactccaggcatccaaacggccagtct

SEQ ID NO: 20106 - DNA, 201 bp, Homo sapiens
tggcatgctggtggcagaggcctttgaacacactccaggcatccaaacggccagtctgggcacatacctgaagaccaacctctttctcttcctgtttgcasttggcttttacctgcttcttagggtgctcaacattgacctgctgtggtccgtgcccatagccaaaaagtggtgtgctaaccccgactggatccacattga

SEQ ID NO: 20107 - DNA, 201 bp, Homo sapiens
gaattgcctctttttcaagatggatttccttcacaggaatggagtgctcataattcagcatttgcagaaggactaccgagcttactacacttttctaaatkttatgtccaatgttggagaccccaggaatatctttttcatttattttccactttgttttcaatttaatcagacagttggaaccaagatgatatgggtagc

SEQ ID NO: 20108 - DNA, 201 bp, Homo sapiens
ttcctccagatcccgactcacgaagagcatttattttatgtgctgtctttttgtaaaagtgcatccattcccctaactgtggttgctttcattccctactstgttcatatgttaatgaaacaaagcggaaagaagagtcagtagagtggtgcctagagttagtgctctgtgtcacagatcacccttctccatccaccagta

SEQ ID NO: 20109 - DNA, 201 bp, Homo sapiens
taccatttcctccagatcccgactcacgaagagcatttattttatgtgctgtctttttgtaaaagtgcatccattcccctaactgtggttgctttcattcyctactctgttcatatgttaatgaaacaaagcggaaagaagagtcagtagagtggtgcctagagttagtgctctgtgtcacagatcacccttctccatcca

SEQ ID NO: 20110 - DNA, 201 bp, Homo sapiens
gagcttccggttgctctgtgccttgacctcattgacaatactgcagctctaccatttcctccagatcccgactcacgaagagcatttattttatgtgctgyctttttgtaaaagtgcatccattcccctaactgtggttgctttcattccctactctgttcatatgttaatgaaacaaagcggaaagaagagtcagtagag

SEQ ID NO: 20111 - DNA, 201 bp, Homo sapiens
tgtttagaattgcctctttttcaagatggatttccttcacaggaatggagtgctcataattcagcatttgcagaaggactaccgagcttactacacttttytaaattttatgtccaatgttggagaccccaggaatatctttttcatttattttccactttgttttcaatttaatcagacagttggaaccaagatgatatg

SEQ ID NO: 20112 - DNA, 201 bp, Homo sapiens
gaacaagtacatcaaagcaggtgacgatgaaccagagtacaaggacagctggggctttggcaatggggagctggccaaagccgagcagctgaaggcacccrctgtgtcatgtggcttggagagaccacctataatacaacaagcagcccatgtaccacaaagccatctacgaagtcctgccggtggccagcagtgtacagg

SEQ ID NO: 20113 - DNA, 201 bp, Homo sapiens
aggtagccagaaggaacctgattattcgaaccacacatccaccttcatgaacagagggcagtgtgagggatcctttctagtcaccgggaatgacagacatmatcaacagttagccaggaaatcacaaataaaacagctacccctaagaaggcagaaaccaaaaaagcatcaaagcagctttttgcagcaagaagatccaca

SEQ ID NO: 20114 - DNA, 201 bp, Homo sapiens
aattccatgatgattaatgccaaggaagtgtcagctgcacaccagaactactacatctgtggtaaccttcccagtaagagcaggccattggcattcactaygaatgtaagctggagctgcaggagtgtgtggagcatggcagaaaagccaaggtcagcaaagcgaggaccattactaccaggtcaaactccataatgcagg

SEQ ID NO: 20115 - DNA, 201 bp, Homo sapiens
cgagcagctgaaggcacccactgtgtcatgtggcttggagagaccacctataatacaacaagcagcccatgtaccacaaagccatctacgaagtcctgccrgtggccagcagtgtacaggggagctgttctcagggagccatgacagtgatgagagtgacactgccaaggatacagaggtgcagagcaagcagatattcag

SEQ ID NO: 20116 - DNA, 201 bp, Homo sapiens
tcatgtggcttggagagaccacctataatacaacaagcagcccatgtaccacaaagccatctacgaagtcctgccggtggccagcagtgtacaggggagcwgttctcagggagccatgacagtgatgagagtgacactgccaaggatacagaggtgcagagcaagcagatattcagatggacctttggggggttccagcct

SEQ ID NO: 20117 - DNA, 201 bp, Homo sapiens
ttcatcaaagcgtcgtgctcccacctcatgctaagtaaagcagctggtgaatgttatgtcgtgcactgcagatggattggtggtggcaggcccagagctcrccacatctacttaaacaggtgtttgattctgcattttccaggtagccagaaggaacctgattattcgaaccacacatccaccttcatgaacagagggcag

SEQ ID NO: 20118 - DNA, 201 bp, Homo sapiens
ctgcagtggcgggatgactggccctctcagctccagatgttcttccccaataaccctaaccaggaatttgaccctctggaagtctactcgcctgtcccagytgagaaaaggaagccgcccatccaggggaggatcatgcacatcagggatacccgaaccatcatacagaagcacaaccaggatgtggtggccatgggcact

SEQ ID NO: 20119 - DNA, 201 bp, Homo sapiens
ttcagtaccagaacatgctagaggagaacctgaacccagcctgaattatcgcccaatctccttaataaatgtggacagggaaatctcagtaaaggtgctgrctaataggctggaacagatattcccacaccaaatccatcccaatcagcccagcaaccccacatcccccactgtcgttaccacacctgagcctgtggggac

SEQ ID NO: 20120 - DNA, 201 bp, Homo sapiens
atactctcagtgccagctaaattacctgaaattaaagaatattatgatggaaacatcttttaattccagacagaggagtggctggtcaggccagtcaggtkgtcgatctggcaattggtcaggtagagagagtcgacaaagcagttgctcaggaaagtcggcaagatggtagaagacgaagtggaacagaaatagatcaag

SEQ ID NO: 20121 - DNA, 201 bp, Homo sapiens
gcaccttgctgaagtccaatatggtcaccccaggccatgcctgcatccagaagttttctcatgaggagattgccatggcaacttgctgcactgcacagtgycccccactgtccctgggatcaccttcctgtctggaggccagagcaaggaagtgtccatcaacctcaatgccattaacaagtgccccctcctgaagccctg

SEQ ID NO: 20122 - DNA, 201 bp, Homo sapiens
cagccctcaccatcattgaaaatgccaacatcagctgggcgcgtgtgtcaatgtcctggcccactatgccagcatctgccagcagaatggcattgtgctcwtcgtggagcctgaggatcctccccagtggggaccatgacttgtagtactgccagtatgtaaccgagaaggtgtggctgctctacaaggctctgagtgacc

SEQ ID NO: 20123 - DNA, 201 bp, Homo sapiens
caaggaagtgtccatcaacctcaatgccattaacaagtgccccctcctgaagccctggggcctgaccttctcatatagctgagccctgcaggcctctgccytgaaggcctggggcaggaagaaggagaacctgaaggctgtgcagaaggagtatgtcaagtgagccctggcagatagccacgcctgtcaaggaaagtatac

SEQ ID NO: 20124 - DNA, 201 bp, Homo sapiens
accctccaggaaactgtggtgtgatggccacggggctctccagatcatcatccctgcatctactggtgctgccaaagctgtaggcaaggtcatccccgagmtgaatgggaagattactagcatggccttccgtgtccccaccaccaatgtgtcggtcatgcatctgacctgccatctggaaaatcctgccaaatatgatga

SEQ ID NO: 20125 - DNA, 139 bp, Homo sapiens
catggccttccgtgtccccaccaccaatgtgtcggtcatgcatctgacctgccatctggaaaatcctgccaaatatgatgacatcaagaaggtggtgaaasaggcatcagaggcccctcaagggcatcctggactacac

SEQ ID NO: 20126 - DNA, 186 bp, Homo sapiens
aaagctgtaggcaaggtcatccccgagatgaatgggaagattactagcatggccttccgtgtccccaccaccaatgtgtcggtcatgcatctgacctgccrtctggaaaatcctgccaaatatgatgacatcaagaaggtggtgaaacaggcatcagaggcccctcaagggcatcctggactacac

SEQ ID NO: 20127 - DNA, 201 bp, Homo sapiens
ttgttgccatcagtgaccccttcactggcctcaactacatggtctacgtgttccagtgtggttctacccatggcaaattccatggcactgtcaaggctgasaatgggaagcttgtcattaacggaaatctcatcaccatctttcaggagcgagatcccaccaaaatcaaatgggacaatgttgacgctgagtacatttggg

SEQ ID NO: 20128 - DNA, 201 bp, Homo sapiens
catggcactgtcaaggctgagaatgggaagcttgtcattaacggaaatctcatcaccatctttcaggagcgagatcccaccaaaatcaaatgggacaatgytgacgctgagtacatttgggtgtccaccgcctccctggccaagctcatccatgacaactttggtattgtggaaggactcatgaccacgacccacaccatc

SEQ ID NO: 20129 - DNA, 201 bp, Homo sapiens
atggaccctccaggaaactgtggtgtgatggccacggggctctccagatcatcatccctgcatctactggtgctgccaaagctgtaggcaaggtcatcccygagatgaatgggaagattactagcatggccttccgtgtccccaccaccaatgtgtcggtcatgcatctgacctgccatctggaaaatcctgccaaatatg

SEQ ID NO: 20130 - DNA, 201 bp, Homo sapiens
tgggacaatgttgacgctgagtacatttgggtgtccaccgcctccctggccaagctcatccatgacaactttggtattgtggaaggactcatgaccacgayccacaccatcactgccacccagaagactgtagatggaccctccaggaaactgtggtgtgatggccacggggctctccagatcatcatccctgcatctact

SEQ ID NO: 20131 - DNA, 201 bp, Homo sapiens
aaagctgtaggcaaggtcatccccgagatgaatgggaagattactagcatggccttccgtgtccccaccaccaatgtgtcggtcatgcatctgacctgccrtctggaaaatcctgccaaatatgatgacatcaagaaggtggtgaaacaggcatcagaggcccctcaagggcatcctggactacactgagcaccacgttgt

SEQ ID NO: 20132 - DNA, 201 bp, Homo sapiens
catggcactgtcaaggctgagaatgggaagcttgtcattaacggaaatctcatcaccatctttcaggagcgagatcccaccaaaatcaaatgggacaatgytgacgctgagtacatttgggtgtccaccggtgtcttcaccaccacagagaaggctggggctcacttgcagcagggagccaaaagggtcataatctctact

SEQ ID NO: 20133 - DNA, 201 bp, Homo sapiens; identical to SEQ ID NO: 20129

SEQ ID NO: 20134 - DNA, 201 bp, Homo sapiens; identical to SEQ ID NO: 20124

SEQ ID NO: 20135 - DNA, 201 bp, Homo sapiens
atttgggtgtccaccggtgtcttcaccaccacagagaaggctggggctcacttgcagcagggagccaaaagggtcataatctctactccctctgctgacgyccccatgttcatgatgggcgtgaaccataagaaatatgaaaacagcctcaagatcatcagcaattgcctcctgtaccaccaacttcttagcctccctggc

SEQ ID NO: 20136 - DNA, 201 bp, Homo sapiens
catggccttccgtgtccccaccaccaatgtgtcggtcatgcatctgacctgccatctggaaaatcctgccaaatatgatgacatcaagaaggtggtgaaasaggcatcagaggcccctcaagggcatcctggactacactgagcaccacgttgtctcctccagctttaacagtgacacccactcttccaccttcaatgatg

SEQ ID NO: 20137 - DNA, 201 bp, Homo sapiens
ctgccatctggaaaatcctgccaaatatgatgacatcaagaaggtggtgaaacaggcatcagaggcccctcaagggcatcctggactacactgagcaccasgttgtctcctccagctttaacagtgacacccactcttccaccttcaatgatggggctggtattgccctcaatgaccattttgtcaagctcatttcctgtt

SEQ ID NO: 20138 - DNA, 201 bp, Homo sapiens
cactgagcaccacgttgtctcctccagctttaacagtgacacccactcttccaccttcaatgatggggctggtattgccctcaatgaccattttgtcaagytcatttcctgttatgacaatgcatttggctacaacaacagggcagtggacctcatggcccacatggcctccaagaagtaagacccccagaccaccagcct

SEQ ID NO: 20139 - DNA, 201 bp, Homo sapiens; identical to SEQ ID NO: 20127

SEQ ID NO: 20140 - DNA, 201 bp, Homo sapiens
agatcatcagcaattgcctcctgtaccaccaacttcttagcctccctggccaagctcatccatgacaactttggtattgtggaaggactcatgaccacgayccacaccatcactgccacccagaagactgtagatggaccctccaggaaactgtggtgtgatggccacggggctctccagatcatcatccctgcatctact

SEQ ID NO: 20141 - DNA, 201 bp, Homo sapiens
tgcactgaacaggaagctcactggcacagccttccgagtccctgccaccaatgtgttggtggttgacccgacctgccatctggagaaacctgccaaatatsatgacctcaagaaggtggtgaaacaggcattgggggggccccctcaagggcatcccgggctacattgagaacaaggttatatcctccgcctttgttttta

SEQ ID NO: 20142 - DNA, 201 bp, Homo sapiens
tccatcagcgaagtgtggtgggcagcacacagtgactatgattcctggagatggcactgggactgaacttatgctgcctgtcaagattatgttcagacatsttagcgttaaaactgacgacaccctgccaccatcatacaaatccttcaacaacatgttgcataccaccctagatctctatgccagtgtcattcatttaaa

SEQ ID NO: 20143 - DNA, 201 bp, Homo sapiens
tgtttgggaaaacacagagggtgagtatagcaatctggagcatgagagtgtgaaaggagtgacagagagcctaaagatcatgactaaggccaagtctttgygcattgctgaatatgccttccagctggcccagaagatgggatgcaaaaaagtgatggctgtgcacaaggtcaacatcacgaaactgggagatggtctctt

SEQ ID NO: 20144 - DNA, 201 bp, Homo sapiens
cctgccaccatcatacaaatccttcaacaacatgttgcataccaccctagatctctatgccagtgtcattcatttaaaaaatttgccaaacgtggagaccyggcacaaagatgtagacatcctagttgtttgggaaaacacagagggtgagtatagcaatctggagcatgagagtgtgaaaggagtgacagagagcctaaa

SEQ ID NO: 20145 - DNA, 201 bp, Homo sapiens
ggaagaagaggagaatggggcctgcagcgggtgtgagcagcccagagggtggggctggattatcccgaaggcgtcctcgccctccacgtccctcctccgcsggggtggcctggggcgccgggtcacgtggccggggaagaggttttatcccgcggcccctcggaaccccgccgctgctctgccgcccaggcccatggccgc

SEQ ID NO: 20146 - DNA, 201 bp, Homo sapiens
aggtgcggtgcaggctgagccactgcctgagccgctgctccacgtcctgggccttagcttcccgctgcagacctgccggccgattcttcgctgccctcccsgtctcatgaagccgctggtcgtgtttgtccacggcggtcccggcgcgctggcatccttgagaaagatggctacacacacctttctgcaggagagttactt

SEQ ID NO: 20147 - DNA, 196 bp, Homo sapiens
atgccctggcagcccgcccctttcccacaccgcctccccggcacacgccgcacctgtcagccctctgagctccgaggtgcggtgcaggctgagccrctgcctgagccgctgctccacgtcctgggccttagcttcccgctgcagacctgccggccgattcttcgctgccctcccggtctcatgaagccgctggtcg

SEQ ID NO: 20148 - DNA, 201 bp, Homo sapiens
ggaccagtggagataaccatcagtttattaaagagggaaatggatcagacaatggctgtcagtgctcaaaagagtacatctttgatcgatggatgggtttmcaagaaatcaagacaaccttcaagggcaggaaagctaaacactagagtggtagacctaggtgtgattgctgatcacatgcactgcctaaagcctaatctt

SEQ ID NO: 20149 - DNA, 201 bp, Homo sapiens
cttgttcctactcccccgcaatgcagaggtaccctggacatgtgcctgtgaccggtgctggcaggccatggcgtcctcgccctccacgtccctcctccgcsggggtggcctggggcgccgggtcacgtggccggggaagaggttttatcccgcggcccctcggaaccccgccgctgctctgccgcccaggcccatggccgc

SEQ ID NO: 20150 - DNA, 201 bp, Homo sapiens
tggcagcccgcccctttcccacaccgcctccccggcacacgccgcacctgtcagccctctgagctccgagacctgccggccgattcttcgctgccctcccsgtctcatgaagccgctggtcgtgtttgtccacggcggtcccggcgcgctggcatccttgagaaagatggctacacacacctttctgcaggagagttactt

SEQ ID NO: 20151 - DNA, 201 bp, Homo sapiens
ggggacaaggtggaggaagggctgcaggaggaggagctctagcatcgcgacccgccccgtcccgtccagtctggcctgggcgccgcgggaacgctgtcctrgctgccgccacccgaacagcctgtcctggtgccccggctccctgccccgcgcccagtcatgaccctgcgcccctcactcctcccgctccatctgctgctg

SEQ ID NO: 20152 - DNA, 201 bp, Homo sapiens
tctgatttgcacaaggtgactaaaggaccagcagcaaacaaaagcaaaggtcttctagagtgcactaaagcagaagataacgtaacatttttatcttaccrtgaaagtattatctgaaggacagttaaagctttgtgttgttcaaccagtacatctcacttcatggctccttatattttttattctaaagtctatctcttg

SEQ ID NO: 20153 - DNA, 201 bp, Homo sapiens
catcctttgccattcaacctctgatttgcacaaggtgactaaaggaccagcagcaaacaaaagcaaaggtcttctagagtgcactaaagcagaagataacrtaacatttttatcttaccatgaaagtattatctgaaggacagttaaagctttgtgttgttcaaccagtacatctcacttcatggctccttatatttttta

SEQ ID NO: 20154 - DNA, 201 bp, Homo sapiens
acaaggcagaggcccagattgcagccaaaaatttggacgaggactacttctccattgggcggctggctgaattttgcaaggcatctgcagaagtagccttrggcgagaatagcgaagtctcgaaaagtggccggtttgtcactgtgcagaccatttctggaactagtgccttaaggatcagagctagttttctgcaaagat

SEQ ID NO: 20155 - DNA, 201 bp, Homo sapiens
ggcaatggtaacaaggatgcctgggctgtgcgccactctgccaattatacgccattgtcgctgccaatcatacaccaagaacatggtcttacacagtgagrgtgtggcaggcttcaccatggtttgcaaagacgcagatgaagccaagagggtagagtcacatttgaagatcttgatgtgtcccatgtattccaaccctcc

SEQ ID NO: 20156 - DNA, 201 bp, Homo sapiens
acaaaaatctctttgcactcttcgacatggcctaccaaggctttgccagtggcaatggtaacaaggatgcctgggctgtgcgccactctgccaattatacrccattgtcgctgccaatcatacaccaagaacatggtcttacacagtgagggtgtggcaggcttcaccatggtttgcaaagacgcagatgaagccaagagg

SEQ ID NO: 20157 - DNA, 201 bp, Homo sapiens
gaatctgggagttagtgcctacagggaccacaacggaaagccttacagcatccacaaggcagaggcccagattgcagccaaaaatttggacgaggactacytctccattgggcggctggctgaattttgcaaggcatctgcagaagtagccttgggcgagaatagcgaagtctcgaaaagtggccggtttgtcactgtgca

SEQ ID NO: 20158 - DNA, 201 bp, Homo sapiens
agcatccacaaggcagaggcccagattgcagccaaaaatttggacgaggactacttctccattgggcggctggctgaattttgcaaggcatctgcagaagyagccttgggcgagaatagcgaagtctcgaaaagtggccggtttgtcactgtgcagaccatttctggaactagtgccttaaggatcagagctagttttctg

SEQ ID NO: 20159 - DNA, 201 bp, Homo sapiens
aatgggacccgtttgcttctaccattctgaatgctccagatttgtgaaaacaatggttgcaagaagtgaaaggcaaggcccatcgcatcattagcatgcaractcagctggtctctaacctcaagaaggagggttctacccactactggccacacatcactgcccaaattgacatgttttgtttcacagggttaaagcccg

SEQ ID NO: 20160 - DNA, 201 bp, Homo sapiens
gtttgtcactgtgcagaccatttctggaactagtgccttaaggatcagagctagttttctgcaaagatttcttaagttcagccaagatgtctttctgcccraaccaacctggggaagtcgcacacccatcttcagggatactggcatgcagctacaaggttatcgatactatgaccgcaagacttgcggttttgacttcac

SEQ ID NO: 20161 - DNA, 201 bp, Homo sapiens
agaacatggtcttacacagtgagggtgtggcaggcttcaccatggtttgcaaagacgcagatgaagccaagagggtagagtcacatttgaagatcttgatstgtcccatgtattccaaccctcccctcaatgggacccgtttgcttctaccattctgaatgctccagatttgtgaaaacaatggttgcaagaagtgaaagg

SEQ ID NO: 20162 - DNA, 201 bp, Homo sapiens
ttgcttctaccattctgaatgctccagatttgtgaaaacaatggttgcaagaagtgaaaggcaaggcccatcgcatcattagcatgcagactcagctggtstctaacctcaagaaggagggttctacccactactggccacacatcactgcccaaattgacatgttttgtttcacagggttaaagcccgaacaggtggaaa

SEQ ID NO: 20163 - DNA, 201 bp, Homo sapiens
tctctgcagatggtaacagtcagtaataacatagccttaattcagccaggcttctcactgatgaattttgatggacaagttttcttctttggacaaaaagkctggcccaaaagatcctgccccactggagttttccatctggatgtaaagcataaccatgtcaaactgaagcctacaattttctctaaggattcctgctac

SEQ ID NO: 20164 - DNA, 201 bp, Homo sapiens
ctgccctacttgtgatgtggatatcaacacttgggtaccattctattcaactgagctcaacaaacccgccatgatctactgctctcatggggatgggcacwgggtccatgctcagtgcatggatctggcagaacgcacactcatccatctgtcagcaggaagcaacaagtattactgcaatgagcatgtggagatagcaag

SEQ ID NO: 20165 - DNA, 201 bp, Homo sapiens
ttggtggctatcagcttgaaaatcaaaaaagaatgatctgcaacatcatctctttagaggacaacaagatagaaattcgtgagatggagaccccagattgraccccagacattaagcacagcaagatatggtttggaagcaacatgggaaatggaactgtttttcttggcataccaggagacaataaacaagttgtttcag

SEQ ID NO: 20166 - DNA, 201 bp, Homo sapiens
caagaacaacaaaaaggttacttttcgctgcacagagaaagacttggtaggagatgttcctgaagccagatatggtcattccattaatgtggtgtacagcygagggaaaagtatgggtgttctctttggaggacgctcatacatgccttctacccacagaaccacagaaaaatggaatagtgtagctgactgcctgccctg

SEQ ID NO: 20167 - DNA, 201 bp, Homo sapiens
tttctctaaggattcctgctacctccctcctcttcgctacccagccacttgcacattcaaaggcagcttggagtctgaaaagcatcaatacatcatccatrgagggaaaacaccaaacaatgaggtttcagataagatttatgtcatgtctattgtttgcaagaacaacaaaaaggttacttttcgctgcacagagaaaga

SEQ ID NO: 20168 - DNA, 201 bp, Homo sapiens
cattcttccagaacttcaggatgggctatcttttcatgtctctattgccaaaaatgacaccatctatattttaggaggacattcacttgccaataatatcyggcctgccaacctgtacagaataagggttgatcttcccctgggtagcccagctgtgaattgcacagtcttgccaggaggaatctctgtctccagtgcaat

SEQ ID NO: 20169 - DNA, 201 bp, Homo sapiens
aatagtgtagctgactgcctgccctgtgttttcctggtggattttgaatttgggtgtgctacatcatacattcttccagaacttcaggatgggctatcttktcatgtctctattgccaaaaatgacaccatctatattttaggaggacattcacttgccaataatatccggcctgccaacctgtacagaataagggttgat

SEQ ID NO: 20170 - DNA, 201 bp, Homo sapiens
gatctggcagaacgcacactcatccatctgtcagcaggaagcaacaagtattactgcaatgagcatgtggagatagcaagagctctacacactccccaaaragtcctacccttaaaaaagcctccaatgaaatccctccgtaaaaaaggttctggaaaaatcttgactcctgccaagaaatcctttcttagaaggttgttt

SEQ ID NO: 20171 - DNA, 201 bp, Homo sapiens
aaacacccagaagcagtaataatcatcgaggtatgtttatatttattatataagtcttggtaacaaataacctataaagtgtttatgacaaatttagccartaaagaaattaacacccaaaagaattaaattgattattttgtgcaacataacaattcggcagttggccaaaacttaaaagcaagatctactacatcccac

SEQ ID NO: 20172 - DNA, 201 bp, Homo sapiens
atgatactaatgaagagcagacaacattcacaaacagtcaaacatcaacagaagatccaggggattccactccctttgaagactctgaagaattttgtttmagtgcagaagcaaatagttttgatggtgatgatgaatttgacacctataatgaagatgatgaagaagatgagtctgagacaggctactggattacatgct

SEQ ID NO: 20173 - DNA, 201 bp, Homo sapiens
aagaataatattatttcccaaaataatgtaagtttaaagaatttcatgacatttacaggcagaagatttaaatggaggaaaagaaatgtatttgtgtgagtgtgtgtgtgtgtgtgtgtgtgtgtgtagttaacatgtggagattgctgccagtgaatattataaaatcagtgatcttgccaaggtctaattagacactcg

SEQ ID NO: 20174 - DNA, 201 bp, Homo sapiens
agcacagcaagatatggtttggaagcaacatgggaaatggaactgtttttcttggcataccaggagacaataaacaagttgtttcagaaggattctatttytatatgttgaaatgtgctgaagatgatactaatgaagagcagacaacattcacaaacagtcaaacatcaacagaagatccaggggattccactccctttg

SEQ ID NO: 20175 - DNA, 201 bp, Homo sapiens
tactgctctcatggggatgggcactgggtccatgctcagtgcatggatctggcagaacgcacactcatccatctgtcagcaggaagcaacaagtattactrcaatgagcatgtggagatagcaagagctctacacactccccaaagagtcctacccttaaaaaagcctccaatgaaatccctccgtaaaaaaggttctgga

SEQ ID NO: 20176 - DNA, 201 bp, Homo sapiens
agtgcaatcctgactcaaactaacaatgatgaatttgttattgttggtggctatcagcttgaaaatcaaaaaagaatgatctgcaacatcatctctttagrggacaacaagatagaaattcgtgagatggagaccccagattggaccccagacattaagcacagcaagatatggtttggaagcaacatgggaaatggaact

SEQ ID NO: 20177 - DNA, 201 bp, Homo sapiens
ttttgtttatttaaaatgcctatgttttcttttagttacatgaattaagggccagaaaaaagtgtttataatgcaatgataaataaagtcattctagaccmtatacattttgaaaatattttacccaaatactcaatttactaatttattcttcactgaggatttctgatctgattttttattcaacaaaccttaaacacc

SEQ ID NO: 20178 - DNA, 201 bp, Homo sapiens
tctatttttaaaatcataacattgattttaaaaatacatttttgtttatttaaaatgcctatgttttcttttagttacatgaattaagggccagaaaaaaktgtttataatgcaatgataaataaagtcattctagaccctatacattttgaaaatattttacccaaatactcaatttactaatttattcttcactgagga

SEQ ID NO: 20179 - DNA, 201 bp, Homo sapiens
acaccatctatattttaggaggacattcacttgccaataatatccggcctgccaacctgtacagaataagggttgatcttcccctgggtagcccagctgtraattgcacagtcttgccaggaggaatctctgtctccagtgcaatcctgactcaaactaacaatgatgaatttgttattgttggtggctatcagcttgaaa

SEQ ID NO: 20180 - DNA, 201 bp, Homo sapiens
gttttcctggtggattttgaatttgggtgtgctacatcatacattcttccagaacttcaggatgggctatcttttcatgtctctattgccaaaaatgacaycatctatattttaggaggacattcacttgccaataatatccggcctgccaacctgtacagaataagggttgatcttcccctgggtagcccagctgtgaat

SEQ ID NO: 20181 - DNA, 182 bp, Homo sapiens
tgaaagttccatgtccccagatactgaaattaactttgataaactgaatcatattcactctgtttcaataatgttgctcgctgaatattcctgttgaacarttgttgcacattgatttgatcttttgttgtttccatcacctatataaaaataataaaatataaaaatcttctatttatatt

SEQ ID NO: 20182 - DNA, 201 bp, Homo sapiens
ttgccaggaggaatctctgtctccagtgcaatcctgactcaaactaacaatgatgaatttgttattgttggtggctatcagcttgaaaatcaaaaaagaakgatctgcaacatcatctctttagaggacaacaagatagaaattcgtgagatggagaccccagattggaccccagacattaagcacagcaagatatggttt

SEQ ID NO: 20183 - DNA, 201 bp, Homo sapiens
caaatgtctttcctcctgaaatattttccggaaaaaaaaattttctggaaaaaccttatcttaagagcttcagccacagttacagtgaagactcttactcytcactgaaagtctacagtgtgtaaggtacaactaacaaatttacgggaaacatgaattatgcaagagatgaaacgctggagtacaagttcttctgctgaa

SEQ ID NO: 20184 - DNA, 201 bp, Homo sapiens
cccgccatgatctactgctctcatggggatgggcactgggtccatgctcagtgcatggatctggcagaacgcacactcatccatctgtcagcaggaagcarcaagtattactgcaatgagcatgtggagatagcaagagctctacacactccccaaagagtcctacccttaaaaaagcctccaatgaaatccctccgtaaa

SEQ ID NO: 20185 - DNA, 201 bp, Homo sapiens
attcttccagaacttcaggatgggctatcttttcatgtctctattgccaaaaatgacaccatctatattttaggaggacattcacttgccaataatatccrgcctgccaacctgtacagaataagggttgatcttcccctgggtagcccagctgtgaattgcacagtcttgccaggaggaatctctgtctccagtgcaatc

SEQ ID NO: 20186 - DNA, 201 bp, Homo sapiens
tacaggcagaagatttaaatggaggaaaagaaatgtatttgtgtgagtgtgtgtgtgtgtgtgtgtgtgtgtgtagttaacatgtggagattgctgccagygaatattataaaatcagtgatcttgccaaggtctaattagacactcgctaggatgaaactagttaaaatgactgttaattttaagggttcaagacatcag

SEQ ID NO: 20187 - DNA, 201 bp, Homo sapiens
ggtaacagtcagtaataacatagccttaattcagccaggcttctcactgatgaattttgatggacaagttttcttctttggacaaaaaggctggcccaaargatcctgccccactggagttttccatctggatgtaaagcataaccatgtcaaactgaagcctacaattttctctaaggattcctgctacctccctcctct

SEQ ID NO: 20188 - DNA, 201 bp, Homo sapiens
tcagtaataacatagccttaattcagccaggcttctcactgatgaattttgatggacaagttttcttctttggacaaaaaggctggcccaaaagatcctgscccactggagttttccatctggatgtaaagcataaccatgtcaaactgaagcctacaattttctctaaggattcctgctacctccctcctcttcgctacc

SEQ ID NO: 20189 - DNA, 201 bp, Homo sapiens
gaagaataatattatttcccaaaataatgtaagtttaaagaatttcatgacatttacaggcagaagatttaaatggaggaaaagaaatgtatttgtgtgagtgtgtgtgtgtgtgtgtgtgtgtgtgtagttaacatgtggagattgctgccagtgaatattataaaatcagtgatcttgccaaggtctaattagacactc

SEQ ID NO: 20190 - DNA, 201 bp, Homo sapiens
ttgcatagaaaggtgtattttgaatagttcccatgttgtgttctcacattagagtaatttctatattaaaccatgaaaattgcctttatgagtgatacccrtttgagggcctctaaacccttcaatttggtactcacgtgaagagggaaagcggaagatggtaatttttttttatggatgatatggcaggatgattggttc

SEQ ID NO: 20191 - DNA, 201 bp, Homo sapiens
ggagctgctcccggacaagatatgagaaatgagtgttggacgtcgaagaataaagttgttgggtatcctgatgatggcaaatgtcttcatttattttattrtggaagtctccaaaagcagtagccaagaaaaaaatggaaaaggggaagtaataatacccaaagagaagttctggaagatatctacccctcccgaggcata

SEQ ID NO: 20192 - DNA, 201 bp, Homo sapiens
gaaaattgcctttatgagtgatacccatttgagggcctctaaacccttcaatttggtactcacgtgaagagggaaagcggaagatggtaatttttttttayggatgatatggcaggatgattggttctgatcttaccggctagtggtcatttttaaaaaacttgtaccctcttatctgaaatcctgtttctggaatttggc

SEQ ID NO: 20193 - DNA, 201 bp, Homo sapiens
tgctcatttaaaatgctaaaatagatacaaactcaattttgcatagaaaggtgtattttgaatagttcccatgttgtgttctcacattagagtaatttctrtattaaaccatgaaaattgcctttatgagtgatacccatttgagggcctctaaacccttcaatttggtactcacgtgaagagggaaagcggaagatggta

SEQ ID NO: 20194 - DNA, 201 bp, Homo sapiens
tctcaaagtaatacactaaaaaagttttgcccttaataccattatatcttgtagaggccaagaatgagggacttctgtctttaaagagccctaaaaatctygtttgctcacatgatatgaattaccgtatttgttgtaaatgcgcaactttgtatacactaaaagcactgccaatatgattttttatcagttgtgcctcag

SEQ ID NO: 20195 - DNA, 201 bp, Homo sapiens
acaaccccatcctgagcatgctgaccaaccagacgggggaggcgggcaggctctccaatataagccatctgaactactgcgaacctgacctgagggtcacrtcggtggttacgggttttaacaacttgccggacagatttaaagactttctgctgtatttgagatgccgcaattattcactgcttatagatcagccggata

SEQ ID NO: 20196 - DNA, 201 bp, Homo sapiens
acatttgcatttgtccaaaaaacctgaccacgcattctcaggtaataggtttctcctctcagaggaatttcaattttttttcttgttagagattccccttytctgaggtttcaagtctcttgtagagaaagaagagatggagcaggttttgaatgaggtgtggagggccactggggggccttttgtgagccttcagtccac

SEQ ID NO: 20197 - DNA, 201 bp, Homo sapiens
acatctgctcctatgtagatctgatgttagtacatagtagaaaacctcaagagatgattgatatttggtctcagttgcagagtgctcatttaaaatgctaraatagatacaaactcaattttgcatagaaaggtgtattttgaatagttcccatgttgtgttctcacattagagtaatttctatattaaaccatgaaaatt

SEQ ID NO: 20198 - DNA, 201 bp, Homo sapiens
cgtcggtggttacgggttttaacaacttgccggacagatttaaagactttctgctgtatttgagatgccgcaattattcactgcttatagatcagccggawaagtgtgcaaagaaacctttcttgttgctggcgattaagtccctcactccacattttgccagaaggcaagcaatccgggaatcctggggccaagaaagca

SEQ ID NO: 20199 - DNA, 201 bp, Homo sapiens
tagtggtcatttttaaaaaacttgtaccctcttatctgaaatcctgtttctggaatttggccattttaagtgattttgtttgccctcttctataatattcytacttcccataataatgactgatttatttgtaattcaggtatttataaacctattggctacaaagactttgttaaacattatccagtggttttcgtgaaa

SEQ ID NO: 20200 - DNA, 201 bp, Homo sapiens; identical to SEQ ID NO: 20190

SEQ ID NO: 20201 - DNA, 201 bp, Homo sapiens; identical to SEQ ID NO: 20191

SEQ ID NO: 20202 - DNA, 201 bp, Homo sapiens; identical to SEQ ID NO: 20192

SEQ ID NO: 20203 - DNA, 201 bp, Homo sapiens; identical to SEQ ID NO: 20193

SEQ ID NO: 20204 - DNA, 201 bp, Homo sapiens; identical to SEQ ID NO: 20195

SEQ ID NO: 20205 - DNA, 201 bp, Homo sapiens; identical to SEQ ID NO: 20197

SEQ ID NO: 20206 - DNA, 201 bp, Homo sapiens; identical to SEQ ID NO: 20198

SEQ ID NO: 20207 - DNA, 201 bp, Homo sapiens; identical to SEQ ID NO: 20199

SEQ ID NO: 20208 - DNA, 201 bp, Homo sapiens; identical to SEQ ID NO: 20190

SEQ ID NO: 20209 - DNA, 201 bp, Homo sapiens
tcccgcccttgcccccgccccgccgagctggagctgctcccggacaagaataaagttgttgggtatcctgatgatggcaaatgtcttcatttattttattrtggaagtctccaaaagcagtagccaagaaaaaaatggaaaaggggaagtaataatacccaaagagaagttctggaagatatctacccctcccgaggcata

SEQ ID NO: 20210 - DNA, 201 bp, Homo sapiens; identical to SEQ ID NO: 20192

SEQ ID NO: 20211 - DNA, 201 bp, Homo sapiens; identical to SEQ ID NO: 20193

SEQ ID NO: 20212 - DNA, 201 bp, Homo sapiens; identical to SEQ ID NO: 20195

SEQ ID NO: 20213 - DNA, 201 bp, Homo sapiens; identical to SEQ ID NO: 20197

SEQ ID NO: 20214 - DNA, 201 bp, Homo sapiens; identical to SEQ ID NO: 20198

SEQ ID NO: 20215 - DNA, 201 bp, Homo sapiens; identical to SEQ ID NO: 20199

SEQ ID NO: 20216 - DNA, 201 bp, Homo sapiens; identical to SEQ ID NO: 20190

SEQ ID NO: 20217 - DNA, 201 bp, Homo sapiens; identical to SEQ ID NO: 20191

SEQ ID NO: 20218 - DNA, 201 bp, Homo sapiens; identical to SEQ ID NO: 20192

SEQ ID NO: 20219 - DNA, 201 bp, Homo sapiens; identical to SEQ ID NO: 20193

SEQ ID NO: 20220 - DNA, 201 bp, Homo sapiens; identical to SEQ ID NO: 20194

SEQ ID NO: 20221 - DNA, 201 bp, Homo sapiens; identical to SEQ ID NO: 20195

SEQ ID NO: 20222 - DNA, 201 bp, Homo sapiens; identical to SEQ ID NO: 20196

SEQ ID NO: 20223 - DNA, 201 bp, Homo sapiens; identical to SEQ ID NO: 20197

SEQ ID NO: 20224 - DNA, 201 bp, Homo sapiens; identical to SEQ ID NO: 20198

SEQ ID NO: 20225 - DNA, 201 bp, Homo sapiens
tagtggtcatttttaaaaaacttgtaccctcttatctgaaatcctgtttctggaatttggccattttaagtgattttgtttgccctcttctataatattcytacttcccataataatgactgatttatttgtaattcaggtattttggttttcgtgaaatggaattatgtttatttttatgggatttgggtaaattttaaa

SEQ ID NO: 20226 - DNA, 201 bp, Homo sapiens
cccaccaggacttatcccagaaaattgctgaccgcctgggcctggagctaggcaaggtggtgactaagaaattcagcaaccaggagacctgcgtggaaatygatgagagtgtgcgtggagaggatgtctacatcgttcagagtggttgtggcgaaatcaacgacagtctaatggagcttttgatcatgattaatgcctgca

SEQ ID NO: 20227 - DNA, 201 bp, Homo sapiens
ctatcttgactcatggaatcttttctggcccagccatttctcgcatcaacactgcatgctttgaagcagtggtagtcaccaataccatacctcaagatgakaagatgaagcattgctccaaaatacgagtaattgacatctccatgatccttgcagaagccataaggagaactcataatggggaatctgtttcctacctgt

SEQ ID NO: 20228 - DNA, 201 bp, Homo sapiens
cgccgaatatcaaaatcttcagcggcagctcccaccaggacttatcccagaaaattgctgaccgcctgggcctggagctaggcaaggtggtgactaagaarttcagcaaccaggagacctgcgtggaaattgatgagagtgtgcgtggagaggatgtctacatcgttcagagtggttgtggcgaaatcaacgacagtctaa

SEQ ID NO: 20229 - DNA, 201 bp, Homo sapiens
atgcctgcaagattgcttcagctagccgagttactgcagtcatcccatgcttcccttatgcccgacaggataagaaggataagagccggtccccaatctcygccaagcttgttgcaaatatgctctctatagcaggtgcggatcatatcatcaccatggacctacatgcttctcaaattcagggcttttttgatatcccag

SEQ ID NO: 20230 - DNA, 201 bp, Homo sapiens
tttggatgaacaccaccacatagggcctgaatgtgaaagaagaccctctatttgtctgttccggggcagcctggtagtaaaacactgttgaatgggccacrgtttcagcagaccatcaggtgaatgggaccagtctctcttcttccaaaatatcagaagttaaacacttggaacggagatttggccaagatgacccattta

SEQ ID NO: 20231 - DNA, 201 bp, Homo sapiens
agaaatcagacataaaataaacagacatcatatatgatatccttacttgtgccatgttttccaagaccagtgcatatttttagacatctcttattcgcccagccatctgcatgacatgggtatttattagtattaccagttggtgctcaaagtcaaacaaaaatattttagttaataatgggcagtaaaatatgattttac

SEQ ID NO: 20232 - DNA, 201 bp, Homo sapiens
tgtcaaaggtcattttatttacctagtctccttagaaatggagtccccaactactcattcaaaagaaatcagacataaaataaacagacatcatatatgayatccttacttgtgccatgttttccaagaccagtgcatatttttagacatctcttattcgcccagccatctgcatgacatgggtatttattagtattacca

SEQ ID NO: 20233 - DNA, 201 bp, Homo sapiens
tgacacaaggtcctccactcctgaacccctgcagtgactgtcaccagccatcggtctgagcagccaaagttggacaaagacttgagagatgcttttttttycccccagtgaggggactggaggatgatgcaaggcatttatgtaaaaaagattctccctcctttcatatttattgtagtaaattgaaaaaataaagactaa

SEQ ID NO: 20234 - DNA, 201 bp, Homo sapiens
cttgacacaaggtcctccactcctgaacccctgcagtgactgtcaccagccatcggtctgagcagccaaagttggacaaagacttgagagatgcttttttyttcccccagtgaggggactggaggatgatgcaaggcatttatgtaaaaaagattctccctcctttcatatttattgtagtaaattgaaaaaataaagact

SEQ ID NO: 20235 - DNA, 201 bp, Homo sapiens
gacacaaggtcctccactcctgaacccctgcagtgactgtcaccagccatcggtctgagcagccaaagttggacaaagacttgagagatgctttttttttyccccagtgaggggactggaggatgatgcaaggcatttatgtaaaaaagattctccctcctttcatatttattgtagtaaattgaaaaaataaagactaaa

SEQ ID NO: 20236 - DNA, 201 bp, Homo sapiens
actccaagtacagcagcaatagcacaggaatctctcactacatgaatacatgagtatggaattattgcaagaagctggtgtctccgtttccaaaggatatrtggcaaaatcaccagatgaagcttatgcaattgccaaaaaagtaggttcaaaagaagttgagatgaaggcgcaggtttcagctgatggtcgaggaaaagg

SEQ ID NO: 20237 - DNA, 201 bp, Homo sapiens
atacatgagtatggaattattgcaagaagctggtgtctccgtttccaaaggatatgtggcaaaatcaccagatgaagcttatgcaattgccaaaaaagtargttcaaaagaagttgagatgaaggcgcaggtttcagctgatggtcgaggaaaaggaacatttgaaagtggcctcaaaggaggagtgaagatagttttctc

SEQ ID NO: 20238 - DNA, 201 bp, Homo sapiens
atgcaattaaagaacctgttgatattgtagaaggcatcaaaaaggaacaagctctccggcttgaacagaagatgggatttccacctaatattgtggattcygcagcagaaaacatggtcaagctttacagcctttttctgaaatatgatgcaaccatgataagaaataaatccaatggtgaagattcagatggagctgtgc

SEQ ID NO: 20239 - DNA, 178 bp, Homo sapiens
atggcagcctccatgttctacagccagctgttggccgcagctacccttcggggccaccttctctggacagccctgcgsgccactgctcaggctctaggaagttatggattgttgaataaccatggactccaagtacagcagcaatagcacaggaatctctcactacatgaatacatga

SEQ ID NO: 20240 - DNA, 201 bp, Homo sapiens
gaacccaagaagatgaaaatgacaaagacgctgctaaggcagatctcaactacattggcctgaaaggaaatacagactgtctagtaaatggtgctggtttggccatggcctcaatagatataataaaacttcaggggccaggagtggtggctcatgcctggactccagccagcttccttgatgttggtggtggtgctacag

SEQ ID NO: 20241 - DNA, 196 bp, Homo sapiens
tgcagttgttaacacaggcactaagctggctgacctggaaaactatatccacagaatcagtcgagatggatggtttggccgtaagggtgtggctattaacrtggtgacagaagaagacaaggggacttttcaaaacatcgagaacttctacaacacttccattgaggaaattcccctcaatgttcctgacctcatc

SEQ ID NO: 20242 - DNA, 201 bp, Homo sapiens
attcctcttggtcgaaatctcaagagagaaaccagtgcagttgttaacacaggcactaagctggctgacctggaaaactatatccacagaatcagtcgagrtggatggtttggccgtaagggtgtggctattaacatggtgacagaagaagacaaggggacttttcaaaacatcgagaacttctacaacacttccattgag

SEQ ID NO: 20243 - DNA, 151 bp, Homo sapiens
aggggaaggaaaggagccaagggatggacgtcttgtcattttttttctttgaataaatatcattttttgaggcaaaagaaaaaaaagtaggcaaaggacaygaacagacactttccaaaagaagacatacatgcagccaacaagcatatga

SEQ ID NO: 20244 - DNA, 201 bp, Homo sapiens
ggtttctttagtcaaccatgaccttcccaccaacagggaaaactatatccacagaatcagtcgagatggatggtttggccgtaagggtgtggctattaacrtggtgacagaagaagacaaggggacttttcaaaacatcgagaacttctacaacacttccattgaggaaattcccctcaatgttcctgacctcatctgagg

SEQ ID NO: 20245 - DNA, 201 bp, Homo sapiens
ttcttgacataggccagaggcattgatgtgcagcaggtttctttagtcaaccatgaccttcccaccaacagggaaaactatatccacagaatcagtcgagrtggatggtttggccgtaagggtgtggctattaacatggtgacagaagaagacaaggggacttttcaaaacatcgagaacttctacaacacttccattgag

SEQ ID NO: 20246 - DNA, 201 bp, Homo sapiens
aaagcaaccccattaaaaagtgggcaaagtaaggtctttggggaacagggatgcttatttcctctgccttccttgtctgcctacacggatacctacgtctyttccctttgagatacatctcacgcacatgctgaagagttgtctttcttgacataggccagaggcattgatgtgcagcaggtttctttagtcaaccatgac

SEQ ID NO: 20247 - DNA, 201 bp, Homo sapiens
cactgtgttctttgacatcgccatcaacagccaacaaatttccaaaaacaacgaaaactttcatgctctgagcactgtagagaaaggatttggttataagrgttcctgctttcacagaattatttcagagtttatgtgtcagggtggtgacttcccatgccataatggcactgatggcaagttcatctacggggagaaatt

SEQ ID NO: 20248 - DNA, 201 bp, Homo sapiens
cgccagataaaatcgcgattattggagccggaattggtggcacttcagcagcctattacctgcggcagaaatttgggaaagatgtgaagatagacctgttkgaaagagaagaggtcgggggccgcctggctaccatgatggtgcaggggcaagaatacgaggcaggaggttctgtcatccatcctttaaatctgcacatga

SEQ ID NO: 20249 - DNA, 201 bp, Homo sapiens
tgtaatcccagcactttgggaggccaaggcaaacggatcacgaggtcaggagatcaagaccatcctggccaacatggtgaaaccccatctctactgaatayacaaaaattggctggacatggtggcgcatgtctgtaatcccagctactgtaatctcagctacttgggaggctgaggcaggagaattgcctcaaccgggag

SEQ ID NO: 20250 - DNA, 201 bp, Homo sapiens
aaaaggccggcttttctgagaagttcctcaatgaaatgattgctcctgttatgagggtcaattatggccaaagcacggacatcaatgcctttgtgggggcrgtgtcactgtcctgttctgattctggcctttgggcagtagaaggtggcaataaacttgtttgctcagggcttctgcaggcatccaaaagcaatcttatat

SEQ ID NO: 20251 - DNA, 180 bp, Homo sapiens
acttcatgattatattcaaaataaacaactacatcattacttcttgtcttttgcttctgttgtactatatttggaatgtagatgtacttgggaaagtcagrctagatcaaagttactattcttacaagttttgaaaattagtgttttagaagaaactcactcatgtttgtaacttcttta

SEQ ID NO: 20252 - DNA, 201 bp, Homo sapiens
ggcctactggggatatataatggagagactctggtatttgaggagagcaactggttcataattaacgtgattaaattagtttggcgctatggatttcaatycctccgtatgcacatgtgggtagaggacgtgttagacaagttcatgaggatctaccgctaccagtctcatgactatgccttcagtagtgtcgaaaaatta

SEQ ID NO: 20253 - DNA, 201 bp, Homo sapiens
ctggccaacatggtgaaaccccatctctactgaatacacaaaaattggctggacatggtggcgcatgtctgtaatcccagctactgtaatctcagctactygggaggctgaggcaggagaattgcctcaaccgggaggcggaggttgcagtgagccaagatcgcaccactgcactccagcctggcaacagagcgagactct

SEQ ID NO: 20254 - DNA, 201 bp, Homo sapiens
ccaagtacacaggaaatccaacaaagatgtatgaagtggtctaccaaattggaactgagactcgttcagacttctatgacatcgtcttggtggccactcckttgaatcgaaaaatgtcgaatattacttttctcaactttgatcctccaattgaggaattccatcaatattatcaacatatagtgacaactttagttaagg

SEQ ID NO: 20255 - DNA, 201 bp, Homo sapiens
tgggaggctgaggcaggtggatctcttgaggtcgggagtttgagaccagcctggccaacatggtgaaaccctgtctttactaaaaatacaaaaattagccrggcatggtggcgtgtgccagtaatcccagctacttgggaggctgaggcgcgagaatcgcttgaaccctggagatggaggttgcagtgagcagagatcgca

SEQ ID NO: 20256 - DNA, 201 bp, Homo sapiens
gccatggcttgcatatcctcactataagcccccggagaaatgcccctctatcattctccatgatcgactttattacctcaatggcatagagtgtgcagcargtgccatggagatgagtgccattgcagcccacaacgctgcactccttgcctatcaccgctggaacgggcacacagacatgattgatcaggatggcttata

SEQ ID NO: 20257 - DNA, 201 bp, Homo sapiens
tcaaaagtaaataaaaataatcacctggagtttgttaaaccatatggattctcaagctcctctcttgaagattctgattcagtaggtctgggagtggcgcsctggattttgatcaaaattgtagagcattttaaggtgagtacctgagggagaacttaaagacatcttagttggggagtagtccttttgaattttacagct

SEQ ID NO: 20258 - DNA, 201 bp, Homo sapiens
gagttaggaggtggtggttgcagtgagccaatctcaccattgcacttcagcctgagcaacacgagcaaaactccgtctcaaaagtaaataaaaataatcasctggagtttgttaaaccatatggattctcaagctcctctcttgaagattctgattcagtaggtctgggagtggcgcgctggattttgatcaaaattgtag

SEQ ID NO: 20259 - DNA, 201 bp, Homo sapiens
ctgtcctagtgcaaagtgaatttagagtgagccagattatggaggattctgtgactcttgccaaataattttgacttcatcctgtaggtattaagtcattaaggcgttttaaatcatacagtcaggtttgtatttctgagctgtctataatgaatgatatagaaggtggtttcgaaggaggagactccagacaaggaaaac

SEQ ID NO: 20260 - DNA, 201 bp, Homo sapiens
aatgtttggatatatgaaattacatccagaggattttcctgaagaagataagaaaacatatggtgaaatttttgaaaaattccatccaatacgttgaagtyttcaaaatgcttgctccagtttcactgatacctgctgtttctgaatttgatggaacatgtttcttatgacagttgaagcttatgctaatctgtatgttga

SEQ ID NO: 20261 - DNA, 201 bp, Homo sapiens
cctgtcctagtgcaaagtgaatttagagtgagccagattatggaggattctgtgactcttgccaaataattttgacttcatcctgtaggtattaagtcattaaggcgttttaaatcatacagtcaggtttgtatttctgagctgtctataatgaatgatatagaaggtggtttcgaaggaggagactccagacaaggaaaa

SEQ ID NO: 20262 - DNA, 201 bp, Homo sapiens
cactccagcctgggtgacaaaggagaccccgtcaaaaaaaaaagtacttgtcccaaaagtttttgtttcctagcttagaatttataatcagattaggtttkggagataaagtatatgtggtatttttttttttttttttgagacagtcttgctctgtcatcaggctggagtgcagtggcgcaatttcggctcactgcaacc

SEQ ID NO: 20263 - DNA, 201 bp, Homo sapiens
ccctgtcctagtgcaaagtgaatttagagtgagccagattatggaggattctgtgactcttgccaaataattttgacttcatcctgtaggtattaagtcattaaggcgttttaaatcatacagtcaggtttgtatttctgagctgtctataatgaatgatatagaaggtggtttcgaaggaggagactccagacaaggaaa

SEQ ID NO: 20264 - DNA, 201 bp, Homo sapiens
gagaaagctgaccgcttaggcccgggtagtggtcgtcgtggttttccttgtagttcgtggtctgagaccaggcctcaagtggaaacggcgtcaccatgatmgcacggcggaacccagaacccttacggtttctgccggatgaggcccggagcctgcccccgcccaagctgaccgacccgcggctcctctacatcggcttct

SEQ ID NO: 20265 - DNA, 201 bp, Homo sapiens
gcccctgtcctagtgcaaagtgaatttagagtgagccagattatggaggattctgtgactcttgccaaataattttgacttcatcctgtaggtattaagtcattaaggcgttttaaatcatacagtcaggtttgtatttctgagctgtctataatgaatgatatagaaggtggtttcgaaggaggagactccagacaagga

SEQ ID NO: 20266 - DNA, 201 bp, Homo sapiens
caattaattacgtttatcaaaactacgcatcatgcccatttgtgggtattggatgaaaagataaatctttccagaaggggcaggggagggagaggcaattstggttggggaagttgggagaaaagaaaatcagtatctcctagtcttcgcccagtttggctcgtttggggtactcctcgaccccgcgttaccaggcccgtg

SEQ ID NO: 20267 - DNA, 201 bp, Homo sapiens
ttggattttttattagttctgcaataaataataggtttatagttcacctgttgttgatctcatcagtggtcgccaagtaagagggtgaatcactcatcccmagagactctgctacctcttagctctggagggtaaaaagcaagggccagagcaaatacattggggagagggggagaatttagttttcataagcttgtgagg

SEQ ID NO: 20268 - DNA, 201 bp, Homo sapiens
tgccggatgaggcccggagcctgcccccgcccaagctgaccgacccgcggctcctctacatcggcttcttgggctactgctccggcctgattgataacctratccggcggaggccgatcgcgacggctggtttgcatcgccagcttctatatattacggcctttttttttgctggatattatcttgtaaaacgtgaagact

SEQ ID NO: 20269 - DNA, 201 bp, Homo sapiens
aaatcaaatgatttctgtctctattttcttgagtaccaattgtaaaaactgaaattaggttgaggaaagtgctttagaaataataaagatgtacaaatacmaggctttggattttttattagttctgcaataaataataggtttatagttcacctgttgttgatctcatcagtggtcgccaagtaagagggtgaatcactc

SEQ ID NO: 20270 - DNA, 201 bp, Homo sapiens
tctgccggatgaggcccggagcctgcccccgcccaagctgaccgacccgcggctcctctacatcggcttcttgggctactgctccggcctgattgataacstgatccggcggaggccgatcgcgacggctggtttgcatcgccagcttctatatattacggcctttttttttgctggatattatcttgtaaaacgtgaaga

SEQ ID NO: 20271 - DNA, 201 bp, Homo sapiens
cagcaacacgtaccgggaagcgtttgggcgctgcaccgcgctgcgccgtgcccgtgagtccggcgcgcagaggaggaggagaaagctgaccgcttaggccsgggtagtggtcgtcgtggttttccttgtagttcgtggtctgagaccaggcctcaagtggaaacggcgtcaccatgatcgcacggcggaacccagaaccct

SEQ ID NO: 20272 - DNA, 201 bp, Homo sapiens
ttgtgggtattggatgaaaagataaatctttccagaaggggcaggggagggagaggcaattctggttggggaagttgggagaaaagaaaatcagtatctcstagtcttcgcccagtttggctcgtttggggtactcctcgaccccgcgttaccaggcccgtgaatcccactcccaccagagaattagcgcgggcggacgag

SEQ ID NO: 20273 - DNA, 201 bp, Homo sapiens
ttgggagaaaagaaaatcagtatctcctagtcttcgcccagtttggctcgtttggggtactcctcgaccccgcgttaccaggcccgtgaatcccactcccrccagagaattagcgcgggcggacgagcaaagtgaaacttagtagcccggaacttcgcgtgccgggttcccgcagcaacacgtaccgggaagcgtttgggc

SEQ ID NO: 20274 - DNA, 201 bp, Homo sapiens
ccagagaattagcgcgggcggacgagcaaagtgaaacttagtagcccggaacttcgcgtgccgggttcccgcagcaacacgtaccgggaagcgtttgggcrctgcaccgcgctgcgccgtgcccgtgagtccggcgcgcagaggaggaggagaaagctgaccgcttaggcccgggtagtggtcgtcgtggttttccttgta

SEQ ID NO: 20275 - DNA, 201 bp, Homo sapiens; identical to SEQ ID NO: 20259

SEQ ID NO: 20276 - DNA, 201 bp, Homo sapiens; identical to SEQ ID NO: 20260

SEQ ID NO: 20277 - DNA, 201 bp, Homo sapiens; identical to SEQ ID NO: 20261

SEQ ID NO: 20278 - DNA, 201 bp, Homo sapiens; identical to SEQ ID NO: 20262

SEQ ID NO: 20279 - DNA, 201 bp, Homo sapiens; identical to SEQ ID NO: 20263

SEQ ID NO: 20280 - DNA, 201 bp, Homo sapiens; identical to SEQ ID NO: 20264

SEQ ID NO: 20281 - DNA, 201 bp, Homo sapiens; identical to SEQ ID NO: 20265

SEQ ID NO: 20282 - DNA, 201 bp, Homo sapiens; identical to SEQ ID NO: 20266

SEQ ID NO: 20283 - DNA, 201 bp, Homo sapiens
ttggattttttattagttctgcaataaataataggtttatagttcacctgttgttgatctcatcagtggtcgccaagtaagagggtgaatcactcatcccmagagactctgctacctcttagctctggagggtaaaaagcaagggccagagcaaatacattggggagagggggagaaaaaaaaaatcaggctattttaata

SEQ ID NO: 20284 - DNA, 201 bp, Homo sapiens; identical to SEQ ID NO: 20268

SEQ ID NO: 20285 - DNA, 201 bp, Homo sapiens; identical to SEQ ID NO: 20269

SEQ ID NO: 20286 - DNA, 201 bp, Homo sapiens; identical to SEQ ID NO: 20270

SEQ ID NO: 20287 - DNA, 201 bp, Homo sapiens; identical to SEQ ID NO: 20271

SEQ ID NO: 20288 - DNA, 201 bp, Homo sapiens; identical to SEQ ID NO: 20272

SEQ ID NO: 20289 - DNA, 201 bp, Homo sapiens; identical to SEQ ID NO: 20273

SEQ ID NO: 20290 - DNA, 201 bp, Homo sapiens; identical to SEQ ID NO: 20274

SEQ ID NO: 20291 - DNA, 179 bp, Homo sapiens
acaattggggtcctgccagcaggtaccagcagcaagtcccagcaggagaaccaggaggtgatcgtggctcctcccaaataggagagctccaccttgtgcawcatctctggtcctataaagacccacagtcttgggaggagacccgaagtgctgcctgcaggaagagggcttgggatgaa

SEQ ID NO: 20292 - DNA, 201 bp, Homo sapiens
cacgtgctgtagggagcaggaccaggcactgcacctgtggaggttctcaggtggctactcagccctcgcggactgcatgacaaggagtacctggaggtccrgaaggagtgcagctggatgctgttgtccaggagacaccaattgctccttgagttcagcttctggaatgagccatagcccagcgtggaccccaacatctta

SEQ ID NO: 20293 - DNA, 201 bp, Homo sapiens
gttgtccaggagacaccaattgctccttgagttcagcttctggaatgagccatagcccagcgtggaccccaacatcttatgagctgaggacatgcaagctkaagccaggaaccatgatggagtaggggaacaattggggtcctgccagcaggtaccagcagcaagtcccagcaggagaaccaggaggtgatcgtggctcct

SEQ ID NO: 20294 - DNA, 201 bp, Homo sapiens
gtcacagtggctactggaaggcccaggcctgtgctggggatgttgcagctgcggctgtgctgcatttctatcccaaggacaacgaaggctactggttctgytccctctttgttcacaaagtggatccctggaaggatgcccactctgccctgctgtccaagaaggagaccagcaacctctacaagatccagtttcacagtg

SEQ ID NO: 20295 - DNA, 201 bp, Homo sapiens
acaattggggtcctgccagcaggtaccagcagcaagtcccagcaggagaaccaggaggtgatcgtggctcctcccaaataggagagctccaccttgtgcawcatctctggtcctataaagacccacagtcttgggaggagacccgaagtgctgcctgcaggaagagggcttgggatgaaatgtctattgtacagttcccct

SEQ ID NO: 20296 - DNA, 201 bp, Homo sapiens; identical to SEQ ID NO: 20292

SEQ ID NO: 20297 - DNA, 121 bp, Homo sapiens
cctataaagacccacagtcttgggaggagacccgaagtgctgcctgcaggaagagggcttgggatgaaatgtctattgtacagttcccctcgggcaacacktggagtcttggatcctcttg

SEQ ID NO: 20298 - DNA, 201 bp, Homo sapiens; identical to SEQ ID NO: 20293

SEQ ID NO: 20299 - DNA, 201 bp, Homo sapiens; identical to SEQ ID NO: 20294

SEQ ID NO: 20300 - DNA, 201 bp, Homo sapiens
gatcggtgggcatggcctgcgctatcagcatcttattaaaaggcttgagtgatgaacttgcccttgtggatcttgatgaagacaaactgaagggtgagacratggatcttcaacatggcagccctttcacgaaaatgccaaatattgtttgtagcaaagattactttgtcacagcaaactccaacctagtgattatcacag

SEQ ID NO: 20301 - DNA, 201 bp, Homo sapiens
aaagcttggtatccattctgaaagctgccatggatggatcctcggagagcatggagactcaagtgttcctgtgtggagtggagtgaacatagctggtgtcyctttgaaggatctgaactctgatataggaactgataaagatcctgagcaatggaaaaatgtccacaaagaagtgactgcaactgcctatgagattattaa

SEQ ID NO: 20302 - DNA, 201 bp, Homo sapiens
cagtgagcagccatgagttggactgtgcctgttgtgcgggccagccagagaatgagctcggtgggagcgaatttcctatgcctggggatggccctgtgtcygcgtcaagcaacgcgcatcccgctcaacggcacctggctcttcacacccgtgagcaagatggcgactgtgaagagtgagcttattgagcgtttcacttcc

SEQ ID NO: 20303 - DNA, 201 bp, Homo sapiens
gatggatcctcggagagcatggagactcaagtgttcctgtgtggagtggagtgaacatagctggtgtccctttgaaggatctgaactctgatataggaackgataaagatcctgagcaatggaaaaatgtccacaaagaagtgactgcaactgcctatgagattattaaaatgaaaggttatacttcttgggccattggcc

SEQ ID NO: 20304 - DNA, 201 bp, Homo sapiens
ctaagtatttttggtacctctgatgtagcagcacttgccatgttatatatatgtagttggcatttggttcccaaaaagtaggatgtaggtatttattgtgytctagaaattccgactcttttcattagatatatgctatttctttcattcttgctggtttatacctatgttcatttatatgctgtaaaaaagtagtagctt

SEQ ID NO: 20305 - DNA, 201 bp, Homo sapiens
gtgcacgccaagaaaagggagaaacgcgccttaatttagtccagcgaaatgtggccatcttcaagttaatgatttccagtattgtccagtacagcccccaytgcaaactgattattgtttccaatccagtggatatcttaacttatgtagcttggaagttgagtgcatttcccaaaaaccgtattattggaagcggctgta

SEQ ID NO: 20306 - DNA, 201 bp, Homo sapiens
gtattccttgtatcctgggagagaacggtattaccaaccttataaagataaagctgacccctgaagaagaggcccatctgaaaaaaagtgcaaaaacactytgggaaattcagaataagcttaagctttaaagttgcctaaaactaccattccgaaattattgaagagatcatagatacaggattatataacgaaattttg

SEQ ID NO: 20307 - DNA, 201 bp, Homo sapiens
ctcaacgttcggatcagcagcttttttccattctctctctccacttcttcagtgagcagccatgagttggactgtgcctgttgtgcgggccagccagagartgagctcggtgggagcgaatttcctatgcctggggatggccctgtgtctgcgtcaagcaacgcgcatcccgctcaacggcacctggctcttcacacccgt

SEQ ID NO: 20308 - DNA, 201 bp, Homo sapiens
tccgaaattattgaagagatcatagatacaggattatataacgaaattttgaataaacttgaattcctaaaagatggaaacaggaaagtaggtagagtgaytttcctatttatttagtcctccagctcttttattgagcatccacgtgctggacgatacttatttacaattcctaagtatttttggtacctctgatgtagc

SEQ ID NO: 20309 - DNA, 201 bp, Homo sapiens
gttggactgtgcctgttgtgcgggccagccagagaatgagctcggtgggagcgaatttcctatgcctggggatggccctgtgtctgcgtcaagcaacgcgmatcccgctcaacggcacctggctcttcacacccgtgagcaagatggcgactgtgaagagtgagcttattgagcgtttcacttccgagaagcccgttcatc

SEQ ID NO: 20310 - DNA, 201 bp, Homo sapiens
agagaatgagctcggtgggagcgaatttcctatgcctggggatggccctgtgtctgcgtcaagcaacgcgcatcccgctcaacggcacctggctcttcacmcccgtgagcaagatggcgactgtgaagagtgagcttattgagcgtttcacttccgagaagcccgttcatcacagtaaggtctccatcataggaactggat

SEQ ID NO: 20311 - DNA, 201 bp, Homo sapiens
atgaaaggttatacttcttgggccattggcctatctgtggccgatttaacagaaagtattttgaagaatcttaggagaatacatccagtttccaccataaytaagggcctctatggaatagatgaagaagtattcctcagtattccttgtatcctgggagagaacggtattaccaaccttataaagataaagctgacccct

SEQ ID NO: 20312 - DNA, 201 bp, Homo sapiens
tgaaaggttatacttcttgggccattggcctatctgtggccgatttaacagaaagtattttgaagaatcttaggagaatacatccagtttccaccataatyaagggcctctatggaatagatgaagaagtattcctcagtattccttgtatcctgggagagaacggtattaccaaccttataaagataaagctgacccctg

SEQ ID NO: 20313 - DNA, 201 bp, Homo sapiens
gcggggcacgcgcacctgccgtagagtgctgaaggtcctgccaacggctctcttggcgtctcaacgttcggatcagcagcttttttccattctctctctcyacttcttcagtgagcagccatgagttggactgtgcctgttgtgcgggccagccagagaatgagctcggtgggagcgaatttcctatgcctggggatggcc

SEQ ID NO: 20314 - DNA, 201 bp, Homo sapiens
aaaaacactctgggaaattcagaataagcttaagctttaaagttgcctaaaactaccattccgaaattattgaagagatcatagatacaggattatataaygaaattttgaataaacttgaattcctaaaagatggaaacaggaaagtaggtagagtgattttcctatttatttagtcctccagctcttttattgagcatc

SEQ ID NO: 20315 - DNA, 137 bp, Homo sapiens
tggagagttctgccaggcaaattttgtgcatagccatgaggtataacctgggattggacatgaggaccaccgtctatgtcaacgccattgagaaagtgttyaaagtatacaatgaagccagagtgaccttcacgtag

SEQ ID NO: 20316 - DNA, 201 bp, Homo sapiens
gaaagcacagtggaactattctcattatacccacagcagagttccaagacaggatatcaggtgcatcagagaaagacaccatgcatgctgacttggtgtasgcaatggagagttctgccaggcaaattttgtgcatagccatgaggtataacctgggattggacatgaggaccaccgtctatgtcaacgccattgagaaag

SEQ ID NO: 20317 - DNA, 154 bp, Homo sapiens
aggagcattatggttattccagatctctacatgaatgccaaaggagagacagcrtccaactttgagtggctgaagaatctaaatcatgtcagctatggctgtttgaccttcaaatatgaaagggagtgtaactaccacttgctaatatctgttc

SEQ ID NO: 20318 - DNA, 201 bp, Homo sapiens
ttagcaagaaaatttggaaagcacagtggaactattctcattatacccacagcagagttccaagacaggatatcaggtgcatcagagaaagacaccatgcwtgctgacttggtgtacgcaatggagagttctgccaggcaaattttgtgcatagccatgaggtataacctgggattggacatgaggaccaccgtctatgtc

SEQ ID NO: 20319 - DNA, 201 bp, Homo sapiens
acaccgtactgagcctcgccagccaccgtacgcgaggtcgcggcgcgtccgtgacgtcactgatgtgcgcttctcccgcactaagggaaacatggctctarcgcggccggtgcggctcttttccctcgtgactcggttgctcctggcgccgcgacggggcctcacggtccgcagtcccgacgaacccctgccggtggtgcg

SEQ ID NO: 20320 - DNA, 201 bp, Homo sapiens
cgcgccccgaggcctggtccttgttccttcccgagaattggcccaacaggtgcgggctgtggcccaacccttgggccgctccttgggcctgctggtgcggsacctggagggaggccacggcatgcgtaggatcaggctgcagctgtccagacagccttcagcagatgtgcttgtggccactccaggggctctgtggaaggc

SEQ ID NO: 20321 - DNA, 201 bp, Homo sapiens
cgtaggatcaggctgcagctgtccagacagccttcagcagatgtgcttgtggccactccaggggctctgtggaaggccctgaaaagtcgactgatcagtcyggagcaactctccttcttggtgttggatgaggcagacacactgctggatgaaagcttcctggaactggtggactacatcttagagaagagccacatagca

SEQ ID NO: 20322 - DNA, 201 bp, Homo sapiens
cgaggtgccaggcaccgtcatcagttttgtgacccatccctgggatgtgagcctggttcagaagattgagctggcggctcgccgaaggagaagtcttccargactagcatcctcggtgaaagagcctttgccccaagcaacctgattttgacaaatctgattaaaatgtgatgctagaacagggatctttcccagtatctt

SEQ ID NO: 20323 - DNA, 201 bp, Homo sapiens
cccatccctgggatgtgagcctggttcagaagattgagctggcggctcgccgaaggagaagtcttccaggactagcatcctcggtgaaagagcctttgccscaagcaacctgattttgacaaatctgattaaaatgtgatgctagaacagggatctttcccagtatcttgagtgggtgaccacacttgtcagtgggaggct

SEQ ID NO: 20324 - DNA, 201 bp, Homo sapiens
agacctcgcagctgaactcttaaaaagaacctcgcttcttcctcacggtgctccagctccacacaccgtactgagcctcgccagccaccgtacgcgaggtsgcggcgcgtccgtgacgtcactgatgtgcgcttctcccgcactaagggaaacatggctctagcgcggccggtgcggctcttttccctcgtgactcggttg

SEQ ID NO: 20325 - DNA, 201 bp, Homo sapiens
gacaaatctgattaaaatgtgatgctagaacagggatctttcccagtatcttgagtgggtgaccacacttgtcagtgggaggctctgggctgccctgtcgrctccttgagggcgggatgaactgctttgtgacttggaaaggtacgctgctggccagcattggagaagaagctgctgagcatggctttctgtagtctttag

SEQ ID NO: 20326 - DNA, 201 bp, Homo sapiens
ctcaataaacacggattaccagaccctgcgcagggaacacatctgggaaaacagctgcaacctcggataccagcacgggacaagctatctcagggcaatgrggaacaactaaagagaatcccaggaaccaggtaaccaatcgccagaagccctccgccctcatggtccattgggtcaaggccccactgccgcctcgtatcg

SEQ ID NO: 20327 - DNA, 201 bp, Homo sapiens
atggcactggtggcaagtccatctacggggagaaatttgaagatgagaaatttatcctaaagcgtacaggtcctggcatcttgtccatggcaaattctggwcccaacacaaactgttccgtttttcatctgcactgccaagacggggtggttggatggcaagcatgtagtctttggcaaggaactcttggtttgtttagtc

SEQ ID NO: 20328 - DNA, 185 bp, Homo sapiens
atggtcaaccacaccatgttcttcgacgttgctgtcgacagtgagcccttggaccacgtctcctttgagctgtttgcagaaaagkttccaaagacagcagaaaacgttcgtgctctgagcactgaagagaaaggatttggttataagggtccctgctttcacagaattataccagcatttatgtg

SEQ ID NO: 20329 - DNA, 201 bp, Homo sapiens
atggcactggtggcaagtccatctacggggagaaatttgaagatgagaaatttatcctaaagcgtacaggtcctggcatcttgtccatggcaaattctggwcccaacacaaactgttccgtttttcatctgcactgccaagacggggtggttggatggcaagcatgtagtctttggcaaggtgaaagaaggcatgaatatt

SEQ ID NO: 20330 - DNA, 197 bp, Homo sapiens
gtactatcagccatggtcaaccacaccatgttcttcgacgttgctgtcgacagtgagcccttggaccacgtctcctttgagctgtttgcagaaaagkttccaaagacagcagaaaacgttcgtgctctgagcactgaagagaaaggatttggttataagggtccctgctttcacagaattataccagcatttatgtg

SEQ ID NO: 20331 - DNA, 201 bp, Homo sapiens
gcaagaccagtaagaagatcaccattgctgactgtgggcaactctaataagtttgacttgtgttttatcttaaccaccagaccattccttctgtagctcasgagagcaccctccaccccatttgctcgcagtatcctagaatctttgtgctctcactgcagttccctttgggttctatgttttccttgttcctttccatgc

SEQ ID NO: 20332 - DNA, 119 bp, Homo sapiens
tctcactgcagttccctttgggttctatgttttccttgttcctttccatgcctagctagattgcagagttaagtttatgattatgaaataaaaactaattmacaacagcaacaaaaaaa

SEQ ID NO: 20333 - DNA, 148 bp, Homo sapiens
gccactgcctccaggggccccatactatcagctatggtcaaccccacyaagttcttcaatgagccctggggccgcatctccatccagctgtttgcagacaagtttccaaagacagcagaaaatgtttgtgctctgagcattggagaga

SEQ ID NO: 20334 - DNA, 201 bp, Homo sapiens
aaagacagcagaaaatgtttgtgctctgagcattggagagaaaggatttggttataagggttcctgctttcacagaattattccggggtttatgtgtcacrgtggtgacttcacacaccataatggcagtggtggcaagtacatctatggggagaaatttgatgatgagaacttcatcctgaagcagacaggttctggcat

SEQ ID NO: 20335 - DNA, 181 bp, Homo sapiens
gccactgcctccaggggccccatactatcagctatggtcaaccccaccaagttcttcaatgagccctggggccgcatctcyatccagctgtttgcagacaagtttccaaagacagcagaaaatgtttgtgctctgagcattggagagaaaggatttggttataagggttcctgctttcaca

SEQ ID NO: 20336 - DNA, 201 bp, Homo sapiens
tggcagtggtggcaagtacatctatggggagaaatttgatgatgagaacttcatcctgaagcagacaggttctggcatcttgtccaaggaaaatgctggayccaacacaaacggttcccagtttttcatctgcagtgccaagagtgagtggttggatggtgagcatgtgttctttggcaaggtgaaagaaggcatgaatat

SEQ ID NO: 20337 - DNA, 201 bp, Homo sapiens
aaagacaccagaaaactttcatgctctaagcactggagaaaaaggatttggttataagggttcctgctttcacagaattattcccggggttatgtgtcagygtggtgacttcacaagtcataatggcactggtggcaagtccatccaaggggagaaatttgatgacaagaacttcatcctaaagcacgcaggtcctggcat

SEQ ID NO: 20338 - DNA, 201 bp, Homo sapiens
acaagaacttcatcctaaagcacgcaggtcctggcatcttgtccatggcaaatactggacccaacacaaacagtttccagtgtttcatctgcactgccaasgctgagtggttggatggcaagcatgtggtctttggcaaggtgaaagaaggcataaatattgtcgaggccatggagcgctttgggtccaggaatggcaaga

SEQ ID NO: 20339 - DNA, 201 bp, Homo sapiens
gggcccatactgatggagctgcaaacctaccgttatcatggacacagtatgagtgatcctggagtcagttatcgtacacgagaagaaattcaggaagtaaraagtaagagggatcctataataattctccaagatagaatggtaaacagcaagctcgccactgtggaagaattaaaggaaattggggctgaggtgaggaaa

SEQ ID NO: 20340 - DNA, 201 bp, Homo sapiens
gaggatcgatgcatatgtataccaagaacttctatgggggcaatggcatcgtcggtgcacagggccccctgggcgctggcattgctctggcctgtaaatayaaaggaaacgatgagatctgtttgactttatatggggatggcgctgcgaatcaggggcagatagccgaagctttcaatatggcagctttatggaaattac

SEQ ID NO: 20341 - DNA, 201 bp, Homo sapiens
cagagaaagggaatggagctccagaagagtctaaggaaggttcagtttgccaaagcctttgtgttgtctttaagccaaagtcagctgtcggggatagctcrggtcctccaggaacagattggccttagtatccctgccatgctcattcactgcttacagcatgtgaatttgggcttgaatggaagaattaaggataacaat

SEQ ID NO: 20342 - DNA, 201 bp, Homo sapiens
aaacagcaagctcgccactgtggaagaattaaaggaaattggggctgaggtgaggaaagaaattgatgatgctgcccagtttgctaccactgatcctgagycacatttggaagaattaggccatcacatctacagcagtgattcatcttttgaagttcgtggtgcaaatccatggatcaagtttaagtccgtcagttaaag

SEQ ID NO: 20343 - DNA, 201 bp, Homo sapiens
ccaccaactcactgggaaggagtcaacattgatgagaatttccagagaaagggaatggagctccagaagagtctaaggaaggttcagtttgccaaagcctytgtgttgtctttaagccaaagtcagctgtcggggatagctcgggtcctccaggaacagattggccttagtatccctgccatgctcattcactgcttacag

SEQ ID NO: 20344 - DNA, 201 bp, Homo sapiens; identical to SEQ ID NO: 20339

SEQ ID NO: 20345 - DNA, 201 bp, Homo sapiens; identical to SEQ ID NO: 20340

SEQ ID NO: 20346 - DNA, 201 bp, Homo sapiens; identical to SEQ ID NO: 20342

SEQ ID NO: 20347 - DNA, 201 bp, Homo sapiens
tcatcctgaagcggcggccagagaagacacaaagacatgagcatcggatcaccatgcctttcttggccatccagaaaagattcggccttaacatagatcartggtggacaatccagagtgctgaacagccctacaagattgctgctcgatgccatgcttttgaaaaagaatggatagaatgtgcatatggaatcagtgtta

SEQ ID NO: 20348 - DNA, 197 bp, Homo sapiens
agagcccggtttatcgcgaggggcagtccccagggctgccgaatccagcagcgatggagagcggcaccgggccctgcggagaagagcgcccacgttwagtccagcagacgacagtcactgagggggctgccaaaatcccagcgccaacgaggtcttttataaccttgtgcaggaattcagtcgggacatgacgtgct

SEQ ID NO: 20349 - DNA, 107 bp, Homo sapiens
agagccmggtttatcgcgaggggcagtccccagggctgccgaatccagcagcgatggagagcggcaccgggccctgcggagaagagcgcccacgtttagtccagcag

SEQ ID NO: 20350 - DNA, 196 bp, Homo sapiens
agagcccggtttatcgcgaggggcagtccccagggctgccgaatccagcagcgatggagagcggcaccgggccctgcggagaagagcgcccacgtktagtccagcagacgacagtcactgagggggctgccaaaatcccagcgccaacgaggtcttttataaccttgtgcaggaattcagtcgggacatgacgtgc

SEQ ID NO: 20351 - DNA, 150 bp, Homo sapiens
ctgcaagaaatggctgtggagctgctagggctggggcgcaccctctttgygccctccaacactatggccaacctcatctctgtgatgtgtcactgctggcgccggggctcccagctcctccttgggcaggagtgccacctccacgtctat

SEQ ID NO: 20352 - DNA, 201 bp, Homo sapiens
cctctccaagggcctgggcgccccagtggggtccctggctgggaggcccaaggacttcattgaagaagcctggcgcctccaaaaagccctgggtggaagcrtgcaccaggtggggatgctggctgcggtggccctggtgggactggttgacacaaagcaggcactgtggcaagaccatgggaacgcccagagattcaccca

SEQ ID NO: 20353 - DNA, 201 bp, Homo sapiens
tgctttgagcactggagagaaaggatttggttacaagggttcctgctttcacataattattccagggtttatgtgtcagggtggtgacttcaaacaccatratggcactggtggcaagtccatctatggggagaaatttgatgatgagaaattcatcctgaagaatacaggtcctggcatcttgtccatggcaatgctaga

SEQ ID NO: 20354 - DNA, 201 bp, Homo sapiens
ctggcatcttgtccatggcaatgctagacccaacacaaatggttctcagtttttcatctgcactgccaagactgagtggttggatggcaagcatgtggtcytggcaaggtgaaagaaggcatgaatattgtggacgccatggagtgctttgggtccaggaatgtcaagaccagcaagaatatcaccattgctgactgtgga

SEQ ID NO: 20355 - DNA, 201 bp, Homo sapiens
ttgtaccagtgaaggacaagaaacttctggaggtcaaactaggggagctgccaagctggatcttgatgtgggacttcagccctagtggccttgatggagcrtttcaaagaggttactactggtactacaacaagtacatcaacgtgaagaaggggagcatctcggggtttaccatggtgctggcagggtacatgctcttca

SEQ ID NO: 20356 - DNA, 151 bp, Homo sapiens
aagaggttactactggtactacaacaagtacatcaacgtgaagaaggggagcatctcggggtttaccatggtgctggcagggtacatgctcttcatctacygcctttcctacaaggagctcaagcacgagcggctatgcaagtaccactga

SEQ ID NO: 20357 - DNA, 201 bp, Homo sapiens
gtcaaactaggggagctgccaagctggatcttgatgtgggacttcagccctagtggccttgatggagcgtttcaaagaggttactactggtactacaacargtacatcaacgtgaagaaggggagcatctcggggtttaccatggtgctggcagggtacatgctcttcatctactgcctttcctacaaggagctcaagcac

SEQ ID NO: 20358 - DNA, 201 bp, Homo sapiens
tatctgccctgatgatgacttgtactccctctgcagtgagccactgattgaactcagtagctctggagctgatggttccctgttacatgtgtccatccacratgaattcattattaaaacagtccaacataaacaggcggagtttctgcagaagctgattccaggataccacatcgacctcaaccagaactcttggacttt

SEQ ID NO: 20359 - DNA, 201 bp, Homo sapiens
gatcatgcacgagagcccttgagcagccaaacacaatgctcagttcacacttgaagaccagccccccaaagggctctgtattccacagccatggaatccayccagggagaggcttgacggggcagccccatggagactgatgaccatatgggtggcatccctgcccagaatagtgagggggaaagaatcctgctttgtatt

SEQ ID NO: 20360 - DNA, 201 bp, Homo sapiens; identical to SEQ ID NO: 20358

SEQ ID NO: 20361 - DNA, 201 bp, Homo sapiens
  misc_feature (1)...(201): n = A,T,C or G
gtgtactgccacaataactgaaagcagagatactggtgtaatggtaaaattatatccaaatatgattttggtactgctttataacacacaacttgatcaangaaatattaaacatcctactgccctaggattagaagttggccaagaaattcaggtgaaatactttggatgtgacccagctgatggaagaatgaggctttc

SEQ ID NO: 20362 - DNA, 201 bp, Homo sapiens
tgttaacaaaataagattagatacagaggaacaactaaaagaaatatttccagaggtcgatctatatgagataatagaatccttcaatactgttgcaaagraagtttttagaagtattattttgaatgaatacaaaagatgcgatggtcgggatttgactttacttcggaatataagttgtgaggtagatatgtttaaaac

SEQ ID NO: 20363 - DNA, 142 bp, Homo sapiens
  misc_feature (1)...(142): n = A,T,C or G
ctttggatgtgacccagctgatggaagaatgaggctttctcataaagtgcttcagtcttcagctacaactgttgtcagaactttgaatgacagaagtagtnttgtactgggagaacctatttcacagtcatcatctaataat

SEQ ID NO: 20364 - DNA, 201 bp, Homo sapiens
catgtggtggaagtttagcattaatggattcagggcttccaatttaatctgctgtcacaggtgtagcaatgggattggccaccaaaaccgatcttgagaasggtgaaatagaagattatcatttgctaacagatattctgggaattgaagcttacaatggtgacatggacttcaaaatagctggcactaataaaggaataa

SEQ ID NO: 20365 - DNA, 201 bp, Homo sapiens
caaaatgagaaaaatttgttggaccaggtggatataacttaaaaaacttcaggctgaaacagttgtaactattagtcaggtggatgaagaaacgttttctrtatttgcaccaacacccggtgctatgcatgaggcaagagacttcattgctgaaatccgcaaggatgatcaggagcagcaattagaatttggagcagtgtg

SEQ ID NO: 20366 - DNA, 201 bp, Homo sapiens
cagagatgaagctgttaacaaaataagattagatacagaggaacaactaaaagaaatatttccagaggtcgatctatatgagataatagaatccttcaatrctgttgcaaagaaagtttttagaagtattattttgaatgaatacaaaagatgcgatggtcgggatttgactttacttcggaatataagttgtgaggtaga

SEQ ID NO: 20367 - DNA, 201 bp, Homo sapiens
ctctgctgtaatacagtcaggtgacactgcggtaatggccacagccgtcagtaaaacaaaaccttccccttcccagtttatgcctttggtggttgactacrgacaaaaggctgctgcagtaggtagaattcccacaaaccctctgagaagagagattagtacttctgataaagaaattcttacacgttgaatagtagattg

SEQ ID NO: 20368 - DNA, 201 bp, Homo sapiens
ctcaagctgtggccatggacttgggcaacaggaaattagaaatatcctctggaaagctggccagatttgcaaatggctctgctgtaatacagtcaggtgayactgcggtaatggccacagccgtcagtaaaacaaaaccttccccttcccagtttatgcctttggtggttgactacggacaaaaggctgctgcagtaggta

SEQ ID NO: 20369 - DNA, 201 bp, Homo sapiens
ggatcgagttataacaactataaatgggataaaagataaaaatttcatgctgcactatgagtttcctccttatgcaactaatgaaattgtcaaagtcaccrgtataaatagaagagaacttgggcctgatgctcttgctgagaaagctttgtatcctgttattcccaaagattttccttttgccataagagttacatctga

SEQ ID NO: 20370 - DNA, 201 bp, Homo sapiens
tggacttgggcaacaggaaattagaaatatcctctggaaagctggccagatttgcaaatggctctgctgtaatacagtcaggtgacactgcggtaatggcsacagccgtcagtaaaacaaaaccttccccttcccagtttatgcctttggtggttgactacggacaaaaggctgctgcagtaggtagaattcccacaaacc

SEQ ID NO: 20371 - DNA, 201 bp, Homo sapiens
atatacaggttctgtgtaatctgttagcagtagatggtattaatgaacttgatgtcctagcaattaatggcaacctctgtagccctctcattatcagataytctttggaatggacctgttgggacagtatgaataggaatgactgatggagaatgtgttgttaacccaacaagaaaagaaatgtcttctagtactttaaat

SEQ ID NO: 20372 - DNA, 201 bp, Homo sapiens
gttgttaacccaacaagaaaagaaatgtcttctagtactttaaatgtagtggttgctggagcacctaaaagtcagactgtcatgttggaagcctctgcagrgaacattttacagcaggacttttgccacgctatcaaagtgggagtgaaatatacccagcaaataattcagggcatccagcagctggtaaaagaaattggt

SEQ ID NO: 20373 - DNA, 201 bp, Homo sapiens
ataaaagataaaaatttcatgctgcactatgagtttcctccttatgcaactaatgaaattgtcaaagtcaccggtataaatagaagagaacttgggcctgrtgctcttgctgagaaagctttgtatcctgttattcccaaagattttccttttgccataagagttacatctgaagtcctagagtcaaatgggtcatcttct

SEQ ID NO: 20374 - DNA, 201 bp, Homo sapiens
cagcaaataattcagggcatccagcagctggtaaaagaaattggtgttaccaagaggacacctcagaagttatttaccccttcacaagagattgtgaaacrtgctcataaactcactatggagagactctatgcagtttttacagattatgaacatgataaaatttccagagatgaagctgttaacaaaataagattagat

SEQ ID NO: 20375 - DNA, 201 bp, Homo sapiens
ttgcgctctttgacatggcctaccaaggctttgccagtggtgatggtgataaggatgcctgggctctgcaccacttcatcgaacagggcattaatgtttgyctctgccaatcatatgccaagaacatgggcttatatggtgagcatgtaggagccttcactgtggtctgcaaagatgcagatgaagccaaaagggtagagt

SEQ ID NO: 20376 - DNA, 201 bp, Homo sapiens
ttcctgaaggtgcatgagtataaacctggcatggatggccaactcttctgggagcccatgaaggtccatgatatccgctggaactttgagaaatttctggyggggcccgatggagtccctgtcatgcattggttccaccaggctccagtcagcacagtcaagtcagacatcctggagtacctaaagcagttcaatacccac

SEQ ID NO: 20377 - DNA, 201 bp, Homo sapiens
acaagaaccaggaacaaactcagaaatacttcttggtctcaagtatgtgtgtccaggtagtggctttgtccccagtttccagctctttgagaaaggggatrtgaatggagaaaaagaacagaaggtctttactttcctgaaggtgcatgagtataaacctggcatggatggccaactcttctgggagcccatgaaggtcca

SEQ ID NO: 20378 - DNA, 142 bp, Homo sapiens
cttcggtctcagtctggcaagacgctgggtcttcaggctccatgccaacagagcccctggtgcaatgcggtcacaggttttatgggactttggtgagctgsgcggtcatggttttgaaataaatgtattttgttactttctg

SEQ ID NO: 20379 - DNA, 201 bp, Homo sapiens
ccctgggctccagctggcttggtggggagaagagaagccccctgcagaagctctatgacctggatcaggacccgcgctcgaccctggcgaaggtgcaccgkcagcggcgcgacctgctgaacagcgcctgtagccgccactcacgccggcagcgcctgctacagccggaggacctgcggcacgtgctggtggacgacgcgc

SEQ ID NO: 20380 - DNA, 201 bp, Homo sapiens
gcacgcggcgtgaggagcccttcaacgagcactgggagcgcgcgcacgcgctctgccacccgtgtcgcctccgctacgacgtcgtgggcaagttcgagacrctggtggaggacgcggccttcgtgctgggcctggcgggcgcatccgacctgagcttccctgggccgccgcggccccggggagccgccgcctcccgcgacc

SEQ ID NO: 20381 - DNA, 201 bp, Homo sapiens
gcccaaggtggcctgcaccaactggaagcgcgtgctgctggcgctgagcggccaagcccgcggcgacccgcgcgccatctccgcgcaagaggcgcacgcgyctggccgcctgccctcactggccgacttcagccccgccgagatcaaccggcgcctgcgcgcctacttggccttcctgttcgtgcgggagcccttcgagcg

SEQ ID NO: 20382 - DNA, 201 bp, Homo sapiens
agcgcgtgctgctggcgctgagcggccaagcccgcggcgacccgcgcgccatctccgcgcaagaggcgcacgcgcctggccgcctgccctcactggccgayttcagccccgccgagatcaaccggcgcctgcgcgcctacttggccttcctgttcgtgcgggagcccttcgagcgcctggcatcggcttaccgcaacaagc

SEQ ID NO: 20383 - DNA, 201 bp, Homo sapiens
cggcgtgaggagcccttcaacgagcactgggagcgcgcgcacgcgctctgccacccgtgtcgcctccgctacgacgtcgtgggcaagttcgagacactggyggaggacgcggccttcgtgctgggcctggcgggcgcatccgacctgagcttccctgggccgccgcggccccggggagccgccgcctcccgcgacctggca

SEQ ID NO: 20384 - DNA, 201 bp, Homo sapiens
tccgacctgagcttccctgggccgccgcggccccggggagccgccgcctcccgcgacctggcagcgcgcctcttccgggacatcagccccttctaccagcrgcgcctcttcgacctctacaagatggacttcctgcttttcaactactccgccccctcctacctgcggctgctctagcggtcctggaggtcctgtggccac

SEQ ID NO: 20385 - DNA, 201 bp, Homo sapiens
acttggccttcctgttcgtgcgggagcccttcgagcgcctggcatcggcttaccgcaacaagctcgcgcgcccctacagcgccgccttccagaggcgctayggtgcacgcatcgttcagcgcctgcggccgcgcgcgctccccgacgcccgggcccgcggccacgacgtgcgcttcgcggagttcctggcctacctgctgg

SEQ ID NO: 20386 - DNA, 201 bp, Homo sapiens
ttattatttccgccagatggcaaaaatgcacccagatcctggaacttgggaggagttcctggaaaaattcatgactggaaagttgtgttttggttcctggyatgaccatgtgaagggctggtgggaaaagaagaaagattatcgtatcctttacctattttatgaagacatgaaagagtgtgaaattcagaaggtgttaaa

SEQ ID NO: 20387 - DNA, 201 bp, Homo sapiens
atgcagagaaatgtaaacgtgatgcaatatacaagcgagtgactttcatggaacttataattcctggactcacaaatggtgttgagcagttgcaaaacatrcagtctcctcaattagtgaaaacacacctgcctgttcaacttctcccttcttcattttggaagaataacttcctgctttttcaaatctctccacagatga

SEQ ID NO: 20388 - DNA, 136 bp, Homo sapiens
atggacaatgagcagcgtgtcttcagaagggagttrgtggatgttcaggggattccccttttctagagcattgctgaagagtggtttcaagtagaattgtttgaggcctgaccagatgatattctgatctctacct

SEQ ID NO: 20389 - DNA, 201 bp, Homo sapiens
cccttttctagagcattgctgaagagtggtttcaagtagaattgtttgaggcctgaccagatgatattctgatctctacctatcccaaatctggaagacaytttcattttgaaatattggatttgatctttaacaatggggatgcagagaaatgtaaacgtgatgcaatatacaagcgagtgactttcatggaacttataa

SEQ ID NO: 20390 - DNA, 201 bp, Homo sapiens
caatgagcagcgtgtcttcagaagggagttagtggatgttcaggggattccccttttctagagcattgctgaagagtggtttcaagtagaattgtttgagscctgaccagatgatattctgatctctacctatcccaaatctggaagacattttcattttgaaatattggatttgatctttaacaatggggatgcagagaa

SEQ ID NO: 20391 - DNA, 201 bp, Homo sapiens
atggacaatgagcagcgtgtcttcagaagggagttagtggatgttcaggggattccccttttctagagcattgctgaagagtggtttcaagtagaattgtytgaggcctgaccagatgatattctgatctctacctatcccaaatctggaagacattttcattttgaaatattggatttgatctttaacaatggggatgca

SEQ ID NO: 20392 - DNA, 201 bp, Homo sapiens
tgctaagaaacaggcatccatatacagagatgaaaatgatgattttcaagtagagaagaaaagaattcgacccttagaaactacacagcagattagaaaaygtcattgctttggaacagaagtacacaatttggatgcaaaagttgattcaggaaagactgtaaaactcaactctccactggaaaagataaactccttttc

SEQ ID NO: 20393 - DNA, 201 bp, Homo sapiens
gatctgcccttctctgcctccctaagttgctgggattacaggtgtgagccacagtgcctggcccattcttgagttttgataaagtaattcatacaaagtaytgtcctcaaataagtcttccttagctaaatgcaatttaaaattattcaaagatcctagggcacttctagtttcacgtaaatattcatattaagagatcac

SEQ ID NO: 20394 - DNA, 201 bp, Homo sapiens
ttgtaagtaataatttgtaaattgaataagtggcatactttttaaaaaactattttatgttcagaaatgtaaatgttattattcttgagtttttgggtttytttttttgagacagagtcttggtctgttgcccaggctggaatgcagtggtgtgctctgggctcactgcaaccttcacctccaggttcaagtgattctcct

SEQ ID NO: 20395 - DNA, 201 bp, Homo sapiens
atccaagatacccaaaatatattttgggacacgcacacacaagcagattgctcagattactagagagctccggaggacggcatattcaggggttccaatgrctattctttccagcagggatcatacttgtgtccatcctgaggtagtcggtaacttcaacagaaatgagaagtgcatggaattgctagatgggaaaaacgg

SEQ ID NO: 20396 - DNA, 201 bp, Homo sapiens
gattgatgccacccttactagaaaaaatcattctgaacatccgctctgttctgaagaagccctggatccagacattgaattgtctctagtaagtgaagaakataaacagtccacttcaaatagagattttgaaacagaagcagaagatgaatctatctattttacacctgaactttacgatcctgaagatacagatgaaga

SEQ ID NO: 20397 - DNA, 201 bp, Homo sapiens
attttgaaacagaagcagaagatgaatctatctattttacacctgaactttacgatcctgaagatacagatgaagaaaaaaatgacctagctgaaactgayagaggaaatagattggctaacaattcagattgcattttagctaaagacctttttgaaattagaactataaaagaagtagattcagccagagaagtgaaag

SEQ ID NO: 20398 - DNA, 201 bp, Homo sapiens
gaagatttactttccttataaagcttacccgtcacagcttgctatgatgaattctattctcagaggattaaacagcaagcaacattgtttgttggagagtsccacaggaagtggaaaaagcttagccttactttgttctgctttagcatggcaacaatctcttagtgggaaaccagcagatgagggcgtaagtgaaaaagc

SEQ ID NO: 20399 - DNA, 201 bp, Homo sapiens
atgatcgctttaggaataacccaagtcgctatatatctggactttctaaatgggtacggcagcagattcagcaccattcaacctttgaaagtgcactggartccttggctgaattttccaaaaagcatcaaaaagttcttaatgtatccataaaggacagaaccaatatacaggacaatgagtctacacttgaagtgacct

SEQ ID NO: 20400 - DNA, 201 bp, Homo sapiens
aattgtctctagtaagtgaagaagataaacagtccacttcaaatagagattttgaaacagaagcagaagatgaatctatctattttacacctgaactttaygatcctgaagatacagatgaagaaaaaaatgacctagctgaaactgatagaggaaatagattggctaacaattcagattgcattttagctaaagaccttt

SEQ ID NO: 20401 - DNA, 201 bp, Homo sapiens
caaaaagcatcaaaaagttcttaatgtatccataaaggacagaaccaatatacaggacaatgagtctacacttgaagtgacctctttaaagtacagtaccycaccttatttactggaagcagcaagtcatctatcaccagaaaattttgtggaagatgaagcaaagatatgtgtccaggaactacagtgtcctaaaattat

SEQ ID NO: 20402 - DNA, 201 bp, Homo sapiens; identical to SEQ ID NO: 20392

SEQ ID NO: 20403 - DNA, 201 bp, Homo sapiens
gatctgcccttctctgcctccctaagttgctgggattacaggtgtgagccacagtgcctggcccattcttgagttttgataaagtaattcatacaaagtaytgtcctcaaataagtcttccttagctaaatgcaatttaaaattattcaaagatcctagggcacttctagtttcacgtaaatattcatattaggtggttct

SEQ ID NO: 20404 - DNA, 201 bp, Homo sapiens; identical to SEQ ID NO: 20394

SEQ ID NO: 20405 - DNA, 201 bp, Homo sapiens; identical to SEQ ID NO: 20395

SEQ ID NO: 20406 - DNA, 201 bp, Homo sapiens; identical to SEQ ID NO: 20396

SEQ ID NO: 20407 - DNA, 201 bp, Homo sapiens; identical to SEQ ID NO: 20397

SEQ ID NO: 20408 - DNA, 201 bp, Homo sapiens; identical to SEQ ID NO: 20398

SEQ ID NO: 20409 - DNA, 201 bp, Homo sapiens; identical to SEQ ID NO: 20399

SEQ ID NO: 20410 - DNA, 201 bp, Homo sapiens; identical to SEQ ID NO: 20400

SEQ ID NO: 20411 - DNA, 201 bp, Homo sapiens; identical to SEQ ID NO: 20401

SEQ ID NO: 20412 - DNA, 201 bp, Homo sapiens; identical to SEQ ID NO: 20392

SEQ ID NO: 20413 - DNA, 201 bp, Homo sapiens; identical to SEQ ID NO: 20393

SEQ ID NO: 20414 - DNA, 201 bp, Homo sapiens; identical to SEQ ID NO: 20394

SEQ ID NO: 20415 - DNA, 201 bp, Homo sapiens; identical to SEQ ID NO: 20395

SEQ ID NO: 20416 - DNA, 201 bp, Homo sapiens; identical to SEQ ID NO: 20396

SEQ ID NO: 20417 - DNA, 201 bp, Homo sapiens; identical to SEQ ID NO: 20397

SEQ ID NO: 20418 - DNA, 201 bp, Homo sapiens; identical to SEQ ID NO: 20398

SEQ ID NO: 20419 - DNA, 201 bp, Homo sapiens; identical to SEQ ID NO: 20399

SEQ ID NO: 20420 - DNA, 201 bp, Homo sapiens; identical to SEQ ID NO: 20400

SEQ ID NO: 20421 - DNA, 201 bp, Homo sapiens; identical to SEQ ID NO: 20401

SEQ ID NO: 20422 - DNA, 201 bp, Homo sapiens; identical to SEQ ID NO: 20392

SEQ ID NO: 20423 - DNA, 201 bp, Homo sapiens; identical to SEQ ID NO: 20403

SEQ ID NO: 20424 - DNA, 201 bp, Homo sapiens; identical to SEQ ID NO: 20394

SEQ ID NO: 20425 - DNA, 201 bp, Homo sapiens; identical to SEQ ID NO: 20395

SEQ ID NO: 20426 - DNA, 201 bp, Homo sapiens; identical to SEQ ID NO: 20396

SEQ ID NO: 20427 - DNA, 201 bp, Homo sapiens; identical to SEQ ID NO: 20397

SEQ ID NO: 20428 - DNA, 201 bp, Homo sapiens; identical to SEQ ID NO: 20398

SEQ ID NO: 20429 - DNA, 201 bp, Homo sapiens; identical to SEQ ID NO: 20399

SEQ ID NO: 20430 - DNA, 201 bp, Homo sapiens; identical to SEQ ID NO: 20400

SEQ ID NO: 20431 - DNA, 201 bp, Homo sapiens; identical to SEQ ID NO: 20401

SEQ ID NO: 20432 - DNA, 201 bp, Homo sapiens
gagcttgttgatggtccctttgataccaagattggacacaaagtagagaatgaaagttatcaaaggattgcagactgcactgggggctcaaccaacaacaytttgtttctgacagatgttactcaagaggccagtgctgctgaggaagcagatgtgcacgtagcggtggtggtgagacttggagacataattgaaagatga

SEQ ID NO: 20433 - DNA, 201 bp, Homo sapiens
cgttaggagtgcactctttttcaggggtgcaaaggttcaacatttcaagccataatcagtctccaaagagacatagtatttctcattctccaaatagtaaktctaatggctcctttcttgcaccagaaacggagccaattgttcctgaactgtgtattgaccatttgtggacagaaacgattactaatataagagagaaaa

SEQ ID NO: 20434 - DNA, 201 bp, Homo sapiens
cactctttttcaggggtgcaaaggttcaacatttcaagccataatcagtctccaaagagacatagtatttctcattctccaaatagtaattctaatggctyctttcttgcaccagaaacggagccaattgttcctgaactgtgtattgaccatttgtggacagaaacgattactaatataagagagaaaaattcacaagcc

SEQ ID NO: 20435 - DNA, 201 bp, Homo sapiens
caggtcaaacaggatttatgcatcatccatcattttttacgtctgagccaccaagtatttatcagtgggtgagttcttgtctgaagggtgaaggaatgccrccttatccttacctccctggaatctgtgaaagaagcagacttgtagtcttgagtattgcactgtacatacttggtgatgagagcttggtttctgatgaat

SEQ ID NO: 20436 - DNA, 201 bp, Homo sapiens
gcacaattgatccaggtcaaacaggatttatgcatcatccatcattttttacgtctgagccaccaagtatttatcagtgggtgagttcttgtctgaagggygaaggaatgccaccttatccttacctccctggaatctgtgaaagaagcagacttgtagtcttgagtattgcactgtacatacttggtgatgagagcttgg

SEQ ID NO: 20437 - DNA, 201 bp, Homo sapiens
ggatcactttctcctgtcattgcgcccaaaaaagcaaggccttccgagactggatctgatgatgactgggaatatttactaaattcagactaccaccagartgttgagtctcatcttttgaacagatctttatgtctgagtccttcagaagcttcacagatgaaggatgaggatttttcacagaatctcagtctggattct

SEQ ID NO: 20438 - DNA, 201 bp, Homo sapiens
attactatagagactacccaacgcttgtcagaactactggacaagtgtgcacaattgatccaggtcaaacaggatttatgcatcatccatcattttttacrtctgagccaccaagtatttatcagtgggtgagttcttgtctgaagggtgaaggaatgccaccttatccttacctccctggaatctgtgaaagaagcagac

SEQ ID NO: 20439 - DNA, 201 bp, Homo sapiens
acatgatgggttataacacagaccgcttagcatggactagaaattttgactttgaaggatcactttctcctgtcattgcgcccaaaaaagcaaggccttcygagactggatctgatgatgactgggaatatttactaaattcagactaccaccagaatgttgagtctcatcttttgaacagatctttatgtctgagtcctt

SEQ ID NO: 20440 - DNA, 201 bp, Homo sapiens
ggaatttgttccttttggtggagaccactgcaagcaccaccctaatgctttgaaccttcaacttcgccagctgcagccagcttctgaattatggtcttctratggtgctgctggcttggtgggatcccttcaggaggttacaatccacgagaaacagaaggaaagctggcagttaaggaaaggagtaagtgaaattggaga

SEQ ID NO: 20441 - DNA, 201 bp, Homo sapiens
gcaaagctcatgtattaacatgcatagcatagaaggaaaggattacatagcttcattaccatttcaggttgcaaatgtttggcccactaaatatggattgytgtttgaacgaagcgcttcttcacatgaagtacctccaggttcacccagagaacctttacctactatgttcagcatgctgcacccactagatgaaataac

SEQ ID NO: 20442 - DNA, 201 bp, Homo sapiens
ctatgttgctggaaatatggtgatatggagcaaaggaagtaaaagccaggcattggcagtttataaagcatttacagttgacagtcctgttcagcaggcaytgtggtgtgacttcattatatcacaggataagtctgaaaaggcctacagtagcaatgaagtagaaaaatgcatatgtatattgcaaagctcatgtattaa

SEQ ID NO: 20443 - DNA, 201 bp, Homo sapiens
cacttctctttactcacatacctgcaatttttttcgttcttcaccttgtgtatgaggagcttaagttgaatactctaatgggagaaggaatttgttcactygttgaacttctcgttcagttggcaagggacttaaaattggggccttatgtagatcattactatagagactacccaacgcttgtcagaactactggacaag

SEQ ID NO: 20444 - DNA, 176 bp, Homo sapiens
cgcgtccatttgaacgtctcgcacgccttcctgccattagcactcgagcccgctgctgttgcccgttcttcctccrgaataggggagggagagggaatgagaagctgctgcggcccaagagtcactgtgaaggaccccgccgctgccctcgggcctcctcggcccctgcgcctccg

SEQ ID NO: 20445 - DNA, 201 bp, Homo sapiens
tacaggtcacagtagacacaccaactagcccagttaccagtggacttccacttttctttgttataactgttacagccatcaagcagggatatgaggattgkctgagacacagagctgacaatgaagtcaacaaaagcactgtttacattattgaaaatgcaaagcgagtgagaaaagaaagtgaaaaaatcaaggttggtg

SEQ ID NO: 20446 - DNA, 201 bp, Homo sapiens
ccttgagagggacctggctttcctttttaaaagatattttactgaagagctaaaaactggccagtgtggggttagcagatcgaataacttgaaatagaccrtgcagtattcctagcactcaatgtaatcaccctatttgtgacagagaaagggaaaaaaatataataagatcatctacctataatttgaataattttgagc

SEQ ID NO: 20447 - DNA, 201 bp, Homo sapiens
atcgaaatggatatatgagagtagagaaccaaagaaaagaaatagaagaatatgaacttcttcacaccttaaactttgatgctgtccggcgacgtatgagygtaattgtgaagactcaagaaggagacatacttctcttttgtaaaggagcagactcggcagtttttcccagagtgcaaaatcatgaaattgagttaacta

SEQ ID NO: 20448 - DNA, 201 bp, Homo sapiens
cctatgttattgtcctacaagcatactgacagtggttacagctaaaaaagaaagcatgaagaaacaactacaaaaagttatcatctcaggatacttgataygcaacacactaaaccactctcatgtctagagttcacaataaatgttcattaaaataccaaatgattctcttaagcatttaccattattgtaagtagcctt

SEQ ID NO: 20449 - DNA, 201 bp, Homo sapiens; identical to SEQ ID NO: 20445

SEQ ID NO: 20450 - DNA, 201 bp, Homo sapiens
atatctcctcttcaccagatgaaatagctttggtgaaaggagctaaaagatatgaacttcttcacaccttaaactttgatgctgtccggcgacgtatgagygtaattgtgaagactcaagaaggagacatacttctcttttgtaaaggagcagactcggcagtttttcccagagtgcaaaatcatgaaattgagttaacta

SEQ ID NO: 20451 - DNA, 201 bp, Homo sapiens
agccaagaagaaagtggcagagaaggaggccaagcaggaagaactcactgctgtcaccaaccataccactgacagtggtgtgggtactgaggagaagagcytggacccaaatcaacactacaagatccatagtcaggcagtttatcaactgaatgtcaatggggaacacccatacccacacaagttccatgcagacatctc

SEQ ID NO: 20452 - DNA, 201 bp, Homo sapiens
tgctgtcaccaaccataccactgacagtggtgtgggtactgaggagaagagcctggacccaaatcaacactacaagatccatagtcaggcagtttatcaastgaatgtcaatggggaacacccatacccacacaagttccatgcagacatctcattcaatgacttcatccaagaatatagtcaccagcagcctgggggtca

SEQ ID NO: 20453 - DNA, 201 bp, Homo sapiens
gaaggacaccctggactactccagcaacaccatggagtcagcgcttcaatatgagaagttcttgaatgagtttttcttaaatgtgaaagatatccttcgcrctcctgttgacatcactggtcagtttgagaagtggggagaagaagaagcagaactgaataagaacttttatgacaagaagacagcaattcacaaagccct

SEQ ID NO: 20454 - DNA, 201 bp, Homo sapiens
gctcttggaggatgttcaggccgccctgaagccattttcagtaaaattaaatgagaccacggatcccgataaaaagcagatgctcgaacggattcagcackcagtgcagcttgccacagagccacttgagaaagctgtgcagtccagactcacgggagaggaagtcaacagctgtgtggaggtgttgctggaagaagccaa

SEQ ID NO: 20455 - DNA, 201 bp, Homo sapiens
tctagcgagaagcactcctatgggaagctggtgcctgaggccgttggagatcagaaagcccttcaagaaggggaaggtgacctgagcatctctgcagaccrcctgagtgagaagcgctctcccaacgactttgccttatggaaggcctctaagcccggagaaccgtcctggccgtgcccttggggaaagggtcgtccgggc

SEQ ID NO: 20456 - DNA, 201 bp, Homo sapiens
ccgtcatggaagagatgcgggccttggtcagtcagtgcaacctctatatggcagcccggaaagccgtgaggaagaggcccaaccaggctctgctggagaayatcgccctgtacctcacccatatgctgaagatctttggggccgtagaagaggacagctccctgggattcccggtcggagggcctggaaccagcctcagtc

SEQ ID NO: 20457 - DNA, 201 bp, Homo sapiens
ttgagaagtggggagaagaagaagcagaactgaataagaacttttatgacaagaagacagcaattcacaaagccctctgtgacaatgttgacacccgcacygtcatggaagagatgcgggccttggtcagtcagtgcaacctctatatggcagcccggaaagccgtgaggaagaggcccaaccaggctctgctggagaaca

SEQ ID NO: 20458 - DNA, 201 bp, Homo sapiens
tcatggaagagatgcgggccttggtcagtcagtgcaacctctatatggcagcccggaaagccgtgaggaagaggcccaaccaggctctgctggagaacatmgccctgtacctcacccatatgctgaagatctttggggccgtagaagaggacagctccctgggattcccggtcggagggcctggaaccagcctcagtctcg

SEQ ID NO: 20459 - DNA, 201 bp, Homo sapiens
gcagtatcgggagaagaggcctgaagcggcacagctcttggaggatgttcaggccgccctgaagccattttcagtaaaattaaatgagaccacggatcccrataaaaagcagatgctcgaacggattcagcacgcagtgcagcttgccacagagccacttgagaaagctgtgcagtccagactcacgggagaggaagtcaa

SEQ ID NO: 20460 - DNA, 201 bp, Homo sapiens
gcctcaccaggaacaaggaagtgttcatacctcaagatgggaaaaaggtgacgtggtattgctgtgggccaaccgtctatgacgcatctcacatggggcaygccaggtcctacatctcttttgatatcttgagaagagtgttgaaggattacttcaaatttgatgtcttttattgcatgaacattacggatattgatgaca

SEQ ID NO: 20461 - DNA, 201 bp, Homo sapiens
tgttatcagaattccgagaaggagtgcggaagattgcccgagagcaaaaagtccctgagattctgcagctcagcgatgccctgcgggacaacatcctgccygagcttggggtgcggtttgaagaccacgaaggactgcccacagtggtgaaactggtagacagaaacaccttattaaaagagagagaagaaaagagacggg

SEQ ID NO: 20462 - DNA, 201 bp, Homo sapiens
gagtgttgaaggattacttcaaatttgatgtcttttattgcatgaacattacggatattgatgacaagatcatcaagagggcccggcagaaccacctgttygagcagtatcgggagaagaggcctgaagcggcacagctcttggaggatgttcaggccgccctgaagccattttcagtaaaattaaatgagaccacggatc

SEQ ID NO: 20463 - DNA, 201 bp, Homo sapiens; identical to SEQ ID NO: 20453

SEQ ID NO: 20464 - DNA, 201 bp, Homo sapiens; identical to SEQ ID NO: 20454

SEQ ID NO: 20465 - DNA, 201 bp, Homo sapiens; identical to SEQ ID NO: 20455

SEQ ID NO: 20466 - DNA, 201 bp, Homo sapiens; identical to SEQ ID NO: 20456

SEQ ID NO: 20467 - DNA, 201 bp, Homo sapiens; identical to SEQ ID NO: 20457

SEQ ID NO: 20468 - DNA, 201 bp, Homo sapiens; identical to SEQ ID NO: 20458

SEQ ID NO: 20469 - DNA, 201 bp, Homo sapiens; identical to SEQ ID NO: 20459

SEQ ID NO: 20470 - DNA, 201 bp, Homo sapiens; identical to SEQ ID NO: 20460

SEQ ID NO: 20471 - DNA, 201 bp, Homo sapiens; identical to SEQ ID NO: 20461

SEQ ID NO: 20472 - DNA, 201 bp, Homo sapiens; identical to SEQ ID NO: 20462

SEQ ID NO: 20473 - DNA, 201 bp, Homo sapiens; identical to SEQ ID NO: 20453

SEQ ID NO: 20474 - DNA, 201 bp, Homo sapiens; identical to SEQ ID NO: 20454

SEQ ID NO: 20475 - DNA, 201 bp, Homo sapiens; identical to SEQ ID NO: 20455

SEQ ID NO: 20476 - DNA, 201 bp, Homo sapiens; identical to SEQ ID NO: 20456

SEQ ID NO: 20477 - DNA, 201 bp, Homo sapiens; identical to SEQ ID NO: 20457

SEQ ID NO: 20478 - DNA, 201 bp, Homo sapiens; identical to SEQ ID NO: 20458

SEQ ID NO: 20479 - DNA, 201 bp, Homo sapiens; identical to SEQ ID NO: 20459

SEQ ID NO: 20480 - DNA, 201 bp, Homo sapiens; identical to SEQ ID NO: 20460

SEQ ID NO: 20481 - DNA, 201 bp, Homo sapiens; identical to SEQ ID NO: 20461

SEQ ID NO: 20482 - DNA, 201 bp, Homo sapiens; identical to SEQ ID NO: 20462

SEQ ID NO: 20483 - DNA, 201 bp, Homo sapiens; identical to SEQ ID NO: 20453

SEQ ID NO: 20484 - DNA, 201 bp, Homo sapiens; identical to SEQ ID NO: 20454

SEQ ID NO: 20485 - DNA, 201 bp, Homo sapiens; identical to SEQ ID NO: 20455

SEQ ID NO: 20486 - DNA, 201 bp, Homo sapiens; identical to SEQ ID NO: 20456

SEQ ID NO: 20487 - DNA, 201 bp, Homo sapiens; identical to SEQ ID NO: 20457

SEQ ID NO: 20488 - DNA, 201 bp, Homo sapiens; identical to SEQ ID NO: 20458

SEQ ID NO: 20489 - DNA, 201 bp, Homo sapiens; identical to SEQ ID NO: 20459

SEQ ID NO: 20490 - DNA, 201 bp, Homo sapiens; identical to SEQ ID NO: 20460

SEQ ID NO: 20491 - DNA, 201 bp, Homo sapiens; identical to SEQ ID NO: 20461

SEQ ID NO: 20492 - DNA, 201 bp, Homo sapiens; identical to SEQ ID NO: 20462

SEQ ID NO: 20493 - DNA, 201 bp, Homo sapiens
actggtggcaagtccatctacgggaagaaatttgatgatgagaacttcgtcctaaattatacaggtcctggcatcttgtccgtggagaatgtgctggaccyaacacaaatggttcccagtttttcatctgcactgccatgtctgagtggttggatggcatgcaggtggtctttggcaagggaaggaaggcgtgagtattgt

SEQ ID NO: 20494 - DNA, 201 bp, Homo sapiens
gcataatggcactggtggcaagtccatctacgggaagaaatttgatgatgagaacttcgtcctaaattatacaggtcctggcatcttgtccgtggagaatktgctggacccaacacaaatggttcccagtttttcatctgcactgccatgtctgagtggttggatggcatgcaggtggtctttggcaagggaaggaaggcg

SEQ ID NO: 20495 - DNA, 201 bp, Homo sapiens
gccatggagtgctttgggtccacaaatggcaagaccagcaagaagatcaccattgctgactgtggacaactctaataggtttgacttgtgttttatcttcrccaccagaccattccttctgttgctcaggagagcacccctctaccccacttgctcacagtatcccatcatctttgtgctcttgctgcagttccctttggg

SEQ ID NO: 20496 - DNA, 198 bp, Homo sapiens
atggtatcagttataccagtgaaggagaagaaactcctggatgtcaaactaggggagctgccaagctggatactgatgcaagatttcacccctagtgscattgctggagcatttcaaagaggtttctactggtactacaacaagtacatcgacgtgaagaaagggtgtctcagggggttccacggtactggcagctta

SEQ ID NO: 20497 - DNA, 201 bp, Homo sapiens
cccagctactcctgaggctcagtcaggagaatcgcttgaacttgggaggcggaggttgcagtgagctgagctcataccactgcactccagcctgaacagartgagatcctgtcaaaaaagaaaagaaaaagaaagcagcattcaaatgtaagacaactgtaaaatattgagccccacttggtctaaaattcaaaaagaaga

SEQ ID NO: 20498 - DNA, 201 bp, Homo sapiens
tgtttaagtcagaaaccaaatttgactccggttcaggttggccttcattccacgatgtgatcaattctgaggcaatcacattcacagatgacttttcctaygggatgcacagggtggaaacaagctgctctcagtgtggtgctcaccttgggcacatttttgatgatgggcctcgtccaactgggaaaagatactgcataa

SEQ ID NO: 20499 - DNA, 201 bp, Homo sapiens
aggccctgggttcactctggaattcgtaggcttcacgtctctctagaaatgacgtgtaaaatttaagaccagacctcagccatcagcgtccagaccatccwagaagtctttcccaatctcacagagaaagccctagtatttcccagtgaccccaggattccacgttggggtggccaaagaaataggtctctcagggctttg

SEQ ID NO: 20500 - DNA, 201 bp, Homo sapiens
caaagatcctggaatatataaatgtgttgtttgtggaactccattgtttaagtcagaaaccaaatttgactccggttcaggttggccttcattccacgatrtgatcaattctgaggcaatcacattcacagatgacttttcctatgggatgcacagggtggaaacaagctgctctcagtgtggtgctcaccttgggcacat

SEQ ID NO: 20501 - DNA, 201 bp, Homo sapiens
ctcagtgtggtgctcaccttgggcacatttttgatgatgggcctcgtccaactgggaaaagatactgcataaattcggctgccttgtcttttacacctgcrgatagcagtggcaccgccgagggaggcagtggggtcgccagcccggcccaggcagacaaagcggagctctagagtaatggagagtgatggaaacaaagtg

SEQ ID NO: 20502 - DNA, 201 bp, Homo sapiens
gtcaacattgctgtagccaggtgtgaaggttgtatggtgtgtgacgaatgtacatcatgtttgtaggtttggatgctaatcttgaattgtagtttaaaaahtacgtatttttgtaactctttgaaagtttatgaagactgacagctttccttgtaagcactaagagaaaaaaaagaaagagggacatttgacaattttaaa

SEQ ID NO: 20503 - DNA, 201 bp, Homo sapiens
caggcgtggtggtgggcacctgtagtcccagctactcaggaggctgaggcaggagaatggcgtgaacccggaaggcggagcttgcagttagccgagatcaygccactgcactccagcctacatgacaatgtgacactccatctcaaaaaataataataataacaatataagaactagctgggcatggtggcgcatgcatgt

SEQ ID NO: 20504 - DNA, 201 bp, Homo sapiens
tgatgtaagtcaacattgctgtagccaggtgtgaaggttgtatggtgtgtgacgaatgtacatcatgtttgtaggtttggatgctaatcttgaattgtagyttaaaaaatacgtatttttgtaactctttgaaagtttatgaagactgacagctttccttgtaagcactaagagaaaaaaaagaaagagggacatttgaca

SEQ ID NO: 20505 - DNA, 201 bp, Homo sapiens
gtgaacccggaaggcggagcttgcagttagccgagatcatgccactgcactccagcctacatgacaatgtgacactccatctcaaaaaataataataatamcaatataagaactagctgggcatggtggcgcatgcatgtagtcccagctactcctgaggctcagtcaggagaatcgcttgaacttgggaggcggaggttg

SEQ ID NO: 20506 - DNA, 146 bp, Homo sapiens
ctgccaagactgagtggttggatggcaagcatgtggtctttggcaaggtgaaagaaagcatgagcattgtagaggccatggagcactttgggtccaggaayggcaagaccaacaagaagatcaccattgctgactatgaacaactc

SEQ ID NO: 20507 - DNA, 143 bp, Homo sapiens
taatgtatgattttcgagcttctgtatgctaagaaaataggtgtgaaaaactggtgttctgaaatagcctaacatttattgtaattctgaattttctgccsttttattcattgcatattaaagtattagagtataaaaactaa

SEQ ID NO: 20508 - DNA, 201 bp, Homo sapiens
gctcggcgcccatgcatggctttgccatctggttccaggtgaccttccctggaggggagtcggagaaacccctggtgctgtccacctcgccttttcacccrgccactcactggaaacaggcgctcctctacctgaacgagccggtgcaagtggagcaagacacggacgtttcaggagagatcacgctgctgccctcccggg

SEQ ID NO: 20509 - DNA, 201 bp, Homo sapiens
ctcctgcacgagtccatgctgagctccgtcctccacgcgcgaaccaagtggctgaaggagggcggtcttctcctgccggcctccgccgagctcttcatagyccccatcagcgaccagatgctggaatggcgcctgggcttctggagccaggtgaagcagcactatggtgtggacatgagctgcctggagggcttcgccacg

SEQ ID NO: 20510 - DNA, 201 bp, Homo sapiens
gtgagggggaagaacacggatgaaaatgtcagtttttgaagggtccatgcacatccctgacacctcacaccttatctaagtctgaagctggggagaaaggrgttcatttagacttcatacatttccagtacgactttagtatctctccagagccatattttctcagtccgaattaattccccctccctaggtgcctgtagg

SEQ ID NO: 20511 - DNA, 201 bp, Homo sapiens
ccacgcgctgtctcatgggccactcggagatcgttgtgcagggattgtccggcgaggacgtgctggcccggccgcagcgctttgctcagctagagctctcycgcgccggcttggagcaggagctggaggccggagtgggcgggcgcttccgctgcagctgctatggctcggcgcccatgcatggctttgccatctggttcc

SEQ ID NO: 20512 - DNA, 201 bp, Homo sapiens
ccatctggttccaggtgaccttccctggaggggagtcggagaaacccctggtgctgtccacctcgccttttcacccggccactcactggaaacaggcgctyctctacctgaacgagccggtgcaagtggagcaagacacggacgtttcaggagagatcacgctgctgccctcccgggacaacccccgtcgcctgcgcgtgc

SEQ ID NO: 20513 - DNA, 201 bp, Homo sapiens
acagcttttatgcctttgaagtgaaggatgcaaaaggaagaactgtttctctggaaaagtataaaggcaaagtttcactagttgtaaacgtggccagtgaytgccaactcacagacagaaattacttagggctgaaggaactgcacaaagagtttggaccatcccacttcagcgtgttggcttttccctgcaatcagtttg

SEQ ID NO: 20514 - DNA, 201 bp, Homo sapiens
cctgcatttagatttcttgttgattcttcaaagaaggaaccaaggtggaatttttggaagtatcttgtcaaccctgagggtcaagttgtgaagttctggargccagaggagcccattgaagtcatcaggcctgacatagcagctctggttagacaagtgatcataaaaaagaaagaggatctatgagaatgccattgcgtt

SEQ ID NO: 20515 - DNA, 201 bp, Homo sapiens
ggcaacagagcgagaccccatcttaaagaccctgtctcaaaaaagagagaaaaagaaaaagaaaaatatcaggcatcacatgaaagagtattcagctgtcrttcttgtgaaaaaggaaaaggacaaaatcaaatgcattttaactgtggtaactaattcactgacttgaagtttgctttgtttgttttctttggtgcgtag

SEQ ID NO: 20516 - DNA, 201 bp, Homo sapiens
gaggccagaggagcccattgaagtcatcaggcctgacatagcagctctggttagacaagtgatcataaaaaagaaagaggatctatgagaatgccattgcrtttctaatagaacagagaaatgtctccatgagggtttggtctcattttaaacattttttttttggagacagtgtctcactcttgcactccaacctgggca

SEQ ID NO: 20517 - DNA, 144 bp, Homo sapiens
gtactctcagccatggtgaatcccaccgtgttcttccacattcyagtggacagcgagcccttgggccgcgtctccttcaagctgtttgcagacaagtttccaaagacagcagaaaactttcgtgctctgagcactggagagaaa

SEQ ID NO: 20518 - DNA, 124 bp, Homo sapiens
gaatctttgtgctcttgctgcagttccctttgggttccatgttttccttgttcccttccatgactagctggattgcagagttgaattaagtttatgattakgaaataaaaactaaataacaaaa

SEQ ID NO: 20519 - DNA, 122 bp, Homo sapiens
aggacatgaccctggtggacgccatccagcaagtggccaagaaccgctgcgtcctcccgaaccggggctttttgaagcagctccgggagctggacaagcarctggtgcagcagaggcgacgg

SEQ ID NO: 20520 - DNA, 201 bp, Homo sapiens
gaaatgaggaaagaactataaatacaacctctttaacccaaaacattaaagtactgaagaaatatacccaatatatcattgaggtgtctgctagtacactsaaaggtgaaggagttcggagtgctcccataagtatactgacggaggaagatgctcctgattctccccctcaagacttctctgtaaaacagttgtctggtg

SEQ ID NO: 20521 - DNA, 201 bp, Homo sapiens
gaagggtttgttggaaacctgacttacgaatccatttcgtcaactgcaataaatgtaagctgggtcccaccggctcaaccaaacggtctagtcttctactrtgtttcactgatcttacagcagactcctcgccatgtgagaccacctcttgttacatatgagagaagcatatattttgataatctggaaaaatacactgat

SEQ ID NO: 20522 - DNA, 201 bp, Homo sapiens
ctactatacattttggttaacagcaagtacttcagttggaaatgggaataaaagcagtgacatcattgaagtatacacagatcaagacatacctgaagggyttgttggaaacctgacttacgaatccatttcgtcaactgcaataaatgtaagctgggtcccaccggctcaaccaaacggtctagtcttctactatgtttc

SEQ ID NO: 20523 - DNA, 201 bp, Homo sapiens
cagcaagtacttcagttggaaatgggaataaaagcagtgacatcattgaagtatacacagatcaagacatacctgaagggtttgttggaaacctgacttaygaatccatttcgtcaactgcaataaatgtaagctgggtcccaccggctcaaccaaacggtctagtcttctactatgtttcactgatcttacagcagactc

SEQ ID NO: 20524 - DNA, 201 bp, Homo sapiens
ttgacacagaatgagatcagctctgtgtggaaagagcctatcagttttgtagtgacacacttgagaccttatacaacatatctttttgaagtttcagctgytacaactgaagcaggttatattgatagtacgattgtcagaacaccagaatcagtgcctgaaggaccaccacaaaactgcgtaacaggcaacatcacagga

SEQ ID NO: 20525 - DNA, 201 bp, Homo sapiens
tgaagtatacacagatcaagacatacctgaagggtttgttggaaacctgacttacgaatccatttcgtcaactgcaataaatgtaagctgggtcccaccgsctcaaccaaacggtctagtcttctactatgtttcactgatcttacagcagactcctcgccatgtgagaccacctcttgttacatatgagagaagcatata

SEQ ID NO: 20526 - DNA, 201 bp, Homo sapiens
ctttacaaggaccaaatgaaaattattctttcattacttctgataattacataatattggaagagctttcaccatttacattatatagcttttttgctgcygcaagaactagaaaaggacttggtccttccagtattcttttcttttacacagatgagtcagtgccgttagcacctccacaaaatttgactttaatcaact

SEQ ID NO: 20527 - DNA, 201 bp, Homo sapiens
atattactctgtttattacagaaatacttcaggtacttttatgcagaattttacactccatgaagtaaccaatgactttgacaatatgactgtatccacarttatagataaactgacaatattcagctactatacattttggttaacagcaagtacttcagttggaaatgggaataaaagcagtgacatcattgaagtata

SEQ ID NO: 20528 - DNA, 201 bp, Homo sapiens
ggattttcttatcatttttcttttactttttattgggacttcagagacacagtgtgaactcatattgctctttggaaatttcaaattttacatttataaayactgttattatgtatttttgtgaaaatgcaataattatttgaccttttaacaaaatggattttttaaaaatagaaccagggcctccagtcttcctagccg

SEQ ID NO: 20529 - DNA, 201 bp, Homo sapiens
aacagagcattccagataactaccatagataacagctttctcataacagggttaaagaaatacacaaaatacaaaatgagagtggcagcctcaacccacgwtggagaaagttctttgtctgaagaaaatgacatctttgtgagaacttcagaagatgaaccggaatcatcacctcaagatgtcgaagtaattgatgttacc

SEQ ID NO: 20530 - DNA, 201 bp, Homo sapiens
tcaaatgaagaaaataaaaccatagaaattaaagatttagaaatattcacaaggtattctgtagtgatcactgcatttactgggaacattagtgctgcatwtgtagaagggaagtcaagtgctgaaatgattgttactactttagaatcagccccaaaggacccacctaacaacatgacatttcagaagataccagatgaa

SEQ ID NO: 20531 - DNA, 201 bp, Homo sapiens
ccttcatcaagtcaaatgaagaaaataaaaccatagaaattaaagatttagaaatattcacaaggtattctgtagtgatcactgcatttactgggaacatyagtgctgcatatgtagaagggaagtcaagtgctgaaatgattgttactactttagaatcagccccaaaggacccacctaacaacatgacatttcagaaga

SEQ ID NO: 20532 - DNA, 201 bp, Homo sapiens
acttcaacaacaattacaatcagaatgccaatatgttactacagtgatgatcatggaccaataaaaaatgtacaagtgcttgtgacagaaacaggagctcmgcatgatggaaatgtaacaaagtggtatgatgcatattttaataaagcaaggccatattttacaaatgaaggctttcctaaccctccatgtacagaagga

SEQ ID NO: 20533 - DNA, 201 bp, Homo sapiens
ttttgtgaaaatgcaataattatttgaccttttaacaaaatggattttttaaaaatagaaccagggcctccagtcttcctagccggggaaagagtcggatstgctgggattcttctgtcttggaatacaccacctaatccaaatggaaggattatatcttacattgtcaaatataaggaagtttgtccgtggatgcaaaca

SEQ ID NO: 20534 - DNA, 201 bp, Homo sapiens
ctcaagagaagtaatggaaatgaggaaagaactataaatacaacctctttaacccaaaacattaaagtactgaagaaatatacccaatatatcattgaggygtctgctagtacactgaaaggtgaaggagttcggagtgctcccataagtatactgacggaggaagatgctcctgattctccccctcaagacttctctgta

SEQ ID NO: 20535 - DNA, 201 bp, Homo sapiens
gtatttttgtgaaaatgcaataattatttgaccttttaacaaaatggattttttaaaaatagaaccagggcctccagtcttcctagccggggaaagagtcrgatctgctgggattcttctgtcttggaatacaccacctaatccaaatggaaggattatatcttacattgtcaaatataaggaagtttgtccgtggatgca

SEQ ID NO: 20536 - DNA, 201 bp, Homo sapiens
tactttcaaaattacaaaattaccactcaacttcgtgctcaaaaatgcaaagaatgggaatccgaagaatgtgttgaatatcaaaaaattcaatacctctrtgaagctcacttaactgaagagacagtatatggattaaagaaatttagatggtatagattccaagtggctgccagcaccaatgctggctatggcaatgct

SEQ ID NO: 20537 - DNA, 201 bp, Homo sapiens
tactttttattgggacttcagagacacagtgtgaactcatattgctctttggaaatttcaaattttacatttataaatactgttattatgtatttttgtgwaaatgcaataattatttgaccttttaacaaaatggattttttaaaaatagaaccagggcctccagtcttcctagccggggaaagagtcggatctgctggg

SEQ ID NO: 20538 - DNA, 201 bp, Homo sapiens
ggggcagtgtttgatttacaacttgcagaggtagaatccacgcaagtaagaattacttggaagaaaccacgacaaccaaatggaattattaaccaataccragtgaaagtgctagttccagagacaggaataattttggaaaatactttgctcactggaaataatgagtatataaatgaccccatggctccagaaattgtg

SEQ ID NO: 20539 - DNA, 201 bp, Homo sapiens
tgttccaggggcagtgtttgatttacaacttgcagaggtagaatccacgcaagtaagaattacttggaagaaaccacgacaaccaaatggaattattaacsaataccgagtgaaagtgctagttccagagacaggaataattttggaaaatactttgctcactggaaataatgagtatataaatgaccccatggctccaga

SEQ ID NO: 20540 - DNA, 201 bp, Homo sapiens
tgtgcctgatagtgcaccagaaaatatcacttacaaaaatatttcttctggagagattgagctatcattccttcccccaagtagtcccaatggaatcatamaaaaatatacaatttatctcaagagaagtaatggaaatgaggaaagaactataaatacaacctctttaacccaaaacattaaagtactgaagaaatatac

SEQ ID NO: 20541 - DNA, 201 bp, Homo sapiens
agaaagaaggtggcacatactctcctcaggatgcagaaattattgacactaaattgaagctggatcagctcatcacagtggcagacctggaactgaaggaygagagattaacgcggttacttagttatagaaaatccatcaagccaataagcaagaaatccttcctgcaacatgttgaagagctttgcacaaacaacaacc

SEQ ID NO: 20542 - DNA, 201 bp, Homo sapiens
attttggataacagcacaaaagacctcaagtttgcattcactaacctaacaccatttacaatgtatgatgtctatattgcggctgaaaccagtgcagggastgggcccaagtcaaatatttcagtattcactccaccagatgttccaggggcagtgtttgatttacaacttgcagaggtagaatccacgcaagtaagaatt

SEQ ID NO: 20543 - DNA, 201 bp, Homo sapiens
atcatgggatcccccagtaaagccaaatggtgcaataataagttatgatttaactttacaaggaccaaatgaaaattattctttcattacttctgataatyacataatattggaagagctttcaccatttacattatatagcttttttgctgccgcaagaactagaaaaggacttggtccttccagtattcttttctttta

SEQ ID NO: 20544 - DNA, 201 bp, Homo sapiens
aatttagttatagagttgaattatatggaccatcaggtcgcattttggataacagcacaaaagacctcaagtttgcattcactaacctaacaccatttacratgtatgatgtctatattgcggctgaaaccagtgcagggactgggcccaagtcaaatatttcagtattcactccaccagatgttccaggggcagtgtttg

SEQ ID NO: 20545 - DNA, 201 bp, Homo sapiens
cttatcatgggatcccccagtaaagccaaatggtgcaataataagttatgatttaactttacaaggaccaaatgaaaattattctttcattacttctgatrattacataatattggaagagctttcaccatttacattatatagcttttttgctgccgcaagaactagaaaaggacttggtccttccagtattcttttctt

SEQ ID NO: 20546 - DNA, 201 bp, Homo sapiens
tcggattatattaatgccagctatatttctggttatttatgtccaaatgaatttattgctactcaaggtccactaccaggaacagttggagatttttggaraatggtgtgggaaaccagagcaaaaacattagtaatgctaacacagtgttttgaaaaaggacggatcagatgccatcagtattggccagaggacaacaag

SEQ ID NO: 20547 - DNA, 201 bp, Homo sapiens
cccaatggaatcataaaaaaatatacaatttatctcaagagaagtaatggaaatgaggaaagaactataaatacaacctctttaacccaaaacattaaagkactgaagaaatatacccaatatatcattgaggtgtctgctagtacactgaaaggtgaaggagttcggagtgctcccataagtatactgacggaggaagat

SEQ ID NO: 20548 - DNA, 151 bp, Homo sapiens
caacccaccatgttctttgacatcgccatcaacggtaagcctttgggccawgtctgctttgagttgcttgcagacaagtttctgaagacagcagaaaactttcatgctctgagcactggagagaaaggatttggttataatggttcttgcc

SEQ ID NO: 20549 - DNA, 133 bp, Homo sapiens
caacccaccatgttctttgacatcgccatcaayggtaagcctttgggccatgtctgctttgagttgcttgcagacaagtttctgaagacagcagaaaactttcatgctctgagcactggagagaaaggatttg

SEQ ID NO: 20550 - DNA, 201 bp, Homo sapiens
ggcttatcttgtatggtttatccaaagaaatatatatgattaccccagagaccttctctaccacatcgataaacatgatgcttcgaaagaaacaagaacayatgataaattgggtggagaagcacgtggtgcagagcatctctgcacagcaggaaaaggagacaattgccaagtgcattgccaacctaaagctgctggcaa

SEQ ID NO: 20551 - DNA, 201 bp, Homo sapiens
tttataatttaactggaattgagatgaaggccagtgacatgacaactgtgacctaagaaatgggaagattatctttcaagatagctgcctagaattgttcracagtgagtaacttccagaagccaaaagagtttggcttcatgaggcaaggtgattgactcaatggcttgttgaatctcagcagttccgccatcttgaaga

SEQ ID NO: 20552 - DNA, 201 bp, Homo sapiens
tattttataggcccaaggtgtgtttctccaaacattacattctcattgccaagtgccagctgttacacatggagaggaaatgattccttatattaaacctraccagagctttttgccttctagggatttatttttcccatagtgtatcagttgttatgccacaataacaacaataataatgttcttaatgtccaaagtgct

SEQ ID NO: 20553 - DNA, 201 bp, Homo sapiens
aggattgagacaattctatttttcatatactcgttgctcattaaatagtaaagggttgatttgctgcaagagtagctgagaattcaaaaacatccttgcasaatgattcaaaagacaaaagccaggctcaacttatagaatgttttggaaactggaagtaatgatacatttcacttcagaagcacttgtaggtctttacta

SEQ ID NO: 20554 - DNA, 201 bp, Homo sapiens
tggttgagtgctaaatatttcagaaggctacttaacatgtaagataccaacttcaacactgtaataacatatactgtgaaaacattcctaaaaagtaaccraagggtttgctaactctgcttcaacatccaacaacacaaaactatatgatttttaaaatcatgaaatagagacagcaaagcatatttttacatcaatttg

SEQ ID NO: 20555 - DNA, 201 bp, Homo sapiens
tgaaaaagacagttggtatctatccgaatgcccaaatatacgtgaccacagagaagcgcatgagttactgtgatggagtttttaagaaggaaactgggaargacagagtccagtctggctcatatctcagcacagggtggtttaccttcattctggccatggacgcctgttatggcattcacgtctacgggatgataaatg

SEQ ID NO: 20556 - DNA, 201 bp, Homo sapiens
ttttcctgctggttgtgcgtcttgtaaatgaagtgaatttcccattgctactaaactgctttggacaacctggtacaaagtggataccattctcctacacrtacaggcggccccttcgaactcactatggatacataaatgtgaagacacaagagcctttgcaactggactgtgacctttgtgccatagtgtcaaactcag

SEQ ID NO: 20557 - DNA, 201 bp, Homo sapiens
tcaatggcttgttgaatctcagcagttccgccatcttgaagaatgattgattgtcaaacactgacccaagaactgctatcagggtgcaagtatcttactasttagcctaaggatgggaaaatatctcttcctaatataccatctttctacagtatttcctacagctaaagcctcaggccattgcctaattaacaatgaaga

SEQ ID NO: 20558 - DNA, 201 bp, Homo sapiens
agagaagcgcatgagttactgtgatggagtttttaagaaggaaactgggaaggacagagtccagtctggctcatatctcagcacagggtggtttaccttcmttctggccatggacgcctgttatggcattcacgtctacgggatgataaatgacacctactgcaagacagaagggtatagaaaagtcccctaccattatta

SEQ ID NO: 20559 - DNA, 201 bp, Homo sapiens
tgaaaaagacagttggtatctatccgaatgcccaaatatacgtgaccacagagaagcgcatgagttactgtgatggagtttttaagaaggaaactgggaargacagtacagagtgaccatgcagtgttgattgatcgaacagcaaccaccacatacatgtcctgccccaccacaaaaggaaggaaggaataaaagaaagaa

SEQ ID NO: 20560 - DNA, 201 bp, Homo sapiens; identical to SEQ ID NO: 20556

SEQ ID NO: 20561 - DNA, 201 bp, Homo sapiens
gggatccctggagaggttgcagctggatgtaaggaactcaagctccctggccgctgcccgggaacgcgtgaccgagggccgtgtggatgtgctggtgtgtracacaggcctgggcctgctggggccgctgggggaggacgccgtggcctctgtactggatgtgaatgtagtaggtactgtgcgggtgctgcaggacttcct

SEQ ID NO: 20562 - DNA, 201 bp, Homo sapiens
gctccctggccgctgcccgggaacgcgtgaccgagggccgtgtggatgtgctggtgtgtaacacaggcctgggcctgctggggccgctgggggaggacgcygtggcctctgtactggatgtgaatgtagtaggtactgtgcgggtgctgcaggacttcctgccagacatgaagcggccgggttcgggacgcgtgttggtga

SEQ ID NO: 20563 - DNA, 201 bp, Homo sapiens
tctgcagcaaactgcggtcactataatcgctcctgtggcacagaggcatacccaggggaatctgcccagggggccactctgtgcccacatgggaacccacrtctgcttgtaaagcctcccctccctctgaccagaaacgaggacagtttgttgttccaagcagtgggctcatgtctgttttggctcagaacagggtgggga

SEQ ID NO: 20564 - DNA, 201 bp, Homo sapiens
ggtcccgaccaggtgatggaccgcacgaacacccggaccttccgcctcttgcactaatacctccaccacagcaaggagatctaccgcgaggaggcgcagcmccctgaggaggtggtgaaggtcttcctcaccgctatgcgcgccccgaagccgaccctgcgctacttcacaaccaggcgcttcctgcaccagctgctgatg

SEQ ID NO: 20565 - DNA, 201 bp, Homo sapiens
ccgctgggggaggacgccgtggcctctgtactggatgtgaatgtagtaggtactgtgcgggtgctgcaggacttcctgccagacatgaagcggccgggttygggacgcgtgttggtgactgggagcatgggaggattgatggggctgcctttcaatgacgtttattgcgccagcaagttcgcgctcgaaggcttatgcgag

SEQ ID NO: 20566 - DNA, 201 bp, Homo sapiens
ggcctctgtactggatgtgaatgtagtaggtactgtgcgggtgctgcaggacttcctgccagacatgaagcggccgggttcgggacgcgtgttggtgactkggagcatgggaggattgatggggctgcctttcaatgacgtttattgcgccagcaagttcgcgctcgaaggcttatgcgagagtctggcggttctgctgct

SEQ ID NO: 20567 - DNA, 201 bp, Homo sapiens
actttcacagcctctgcagcaaactgcggtcactataatcgctcctgtggcacagaggcatacccaggggaatctgcccagggggccactctgtgcccacrtgggaacccacatctgcttgtaaagcctcccctccctctgaccagaaacgaggacagtttgttgttccaagcagtgggctcatgtctgttttggctcaga

SEQ ID NO: 20568 - DNA, 115 bp, Homo sapiens
tgcgccagcaagttcgcgctcgaaggcttatgcgagagtctggcggttctgctgctgccctttggggtccacaaggagatctaccgcgaggaggcgcagcmccctgaggaggtgg

SEQ ID NO: 20569 - DNA, 165 bp, Homo sapiens
caacaaaagagaaaattaaatatgagtgatgttgagaaaggcaataagatttttgttcagaagtktgcccagtgccataccgtggaaaagggaggcaagcgcaagactgagacaaatctccatggcctctttgggcagaatacaggtcaggctgttggattctct

SEQ ID NO: 20570 - DNA, 201 bp, Homo sapiens
atgaaggcatgcttacaggagaaagtatacctgttacaaagacaccattgccccagatggagaacactatgccttggaaatgtcacagtttggaggattayaggaaacacgtccttttctgtggaacagaagttatccaggtcaagccctctgggcaggggcctgtacgagcagtcgttttgcaaacaggttacaatacag

SEQ ID NO: 20571 - DNA, 201 bp, Homo sapiens
ctcctgggcagaaatcaagccttattgaagaatttcagaaattaaattattatgtgggcatgtgtggagatggagctaacgactgtggggctttgaaagcrgctcatgcaggcatttcattatcagagcaggaagcatctgtggcatccccttttacctctaaaacaaccaacatccagtgtgtgcctcatctcatcagag

SEQ ID NO: 20572 - DNA, 201 bp, Homo sapiens
tgcctccgaagaacatcctaaagctgtgtccaatgatcttgttaagctccctgttgttgatgggcttgcagagtccagtggaagccatcatcaccttgtgycagtttccattttcctcgagcctgcagaggatgtccgtgatcgctcagctagctggggagaatcatttccatgtctacatgaaaggtgccccagaaatgg

SEQ ID NO: 20573 - DNA, 201 bp, Homo sapiens
catcattttgactgttatctccattgtcttaagtgtgtatgatttgcgacagcaatcagttaagctgcataacctcgtggaggaccacaacaaagtccagrttacaatcattgtaaaagacaaaggtttggaggagctggaatcccgtctcttggttcccggagacattcttattcttccaggaaaattttcattgccatg

SEQ ID NO: 20574 - DNA, 201 bp, Homo sapiens
atttctgggccaggctgtaatcagaattgtcgtcgtacatgctcaacagcattgcttttttccccaaaattaacacattgtggagaagtgatgatactctycccttacctttcctctctccattcaagcattcaaagtatattttcaatgaattaaaccttgcagcaagggaccttagataggcttattctgactgtatgc

SEQ ID NO: 20575 - DNA, 201 bp, Homo sapiens
tgtattgcctctgtggcacaactctgtggctggtattatatttcagaaggtagatttcctctatttaaagagtttccatagatcaaaacaggagaaaatayggcaaaattacctctgcaatccatttgctatctctcattttgacccaggaaggaagagcatttcttctgcttcagcttggggaaatttcgaccccatcag

SEQ ID NO: 20576 - DNA, 201 bp, Homo sapiens
tgcaagaagcagacactgttttgctgaggacaacagtgcgtgcctttctgttttctattttgaaagccatgatcgtgtcttctgtattgcctctgtggcayaactctgtggctggtattatatttcagaaggtagatttcctctatttaaagagtttccatagatcaaaacaggagaaaatatggcaaaattacctctgca

SEQ ID NO: 20577 - DNA, 201 bp, Homo sapiens
gctttgacaaaactggcactctcactgaagatgggctggacctctgggggactgtccctactgctgacaactgcttccaggaagcccacagctttgcctcrggccaggctgtgccatggagcccactgtgtgcggccatggccagctgccactctctgatccttctcaatgggaccatccagggagaccctctggacctca

SEQ ID NO: 20578 - DNA, 201 bp, Homo sapiens
caagttatataccgtggaatggagttgatcccaaccataacatcgtggagggttttaattttggtggtagccctcacccaattctgtgtggctttctttgyagaggattccatccttcaaaatcatgaactctggctgttgatcaaaagagaatttggattctactctaaaagtcaatataggacttggcaaaagaagcta

SEQ ID NO: 20579 - DNA, 201 bp, Homo sapiens
tggcaaaattacctctgcaatccatttgctatctctcattttgacccaggaaggaagagcatttcttctgcttcagcttggggaaatttcgaccccatcaygttgctagaagacagcaattcctgctctgacatccatcagacatttggattgggtctgaccagtgaagagcaagaggtcagaagattagtgtgtgggccc

SEQ ID NO: 20580 - DNA, 201 bp, Homo sapiens
tctgtattgcctctgtggcacaactctgtggctggtattatatttcagaaggtagatttcctctatttaaagagtttccatagatcaaaacaggagaaaayatggcaaaattacctctgcaatccatttgctatctctcattttgacccaggaaggaagagcatttcttctgcttcagcttggggaaatttcgaccccatc

SEQ ID NO: 20581 - DNA, 201 bp, Homo sapiens
gaaggaactgagtgaggcccgtatcaggactgtgatgattacaggtgataaccttcaaacggccattactgttgcaaagaattctgaaatgatccctccargcagccaagtgatcattgttgaggccgatgaaccagaagaatttgttcctgcctctgtgacctggcagctggtggagaaccaagagactggacctgggaa

SEQ ID NO: 20582 - DNA, 201 bp, Homo sapiens
tggagagtgtgggccaactgcatcccatgccccttgcaagaagcagacactgttttgctgaggacaacagtgcgtgcctttctgttttctattttgaaagycatgatcgtgtcttctgtattgcctctgtggcacaactctgtggctggtattatatttcagaaggtagatttcctctatttaaagagtttccatagatca

SEQ ID NO: 20583 - DNA, 201 bp, Homo sapiens
caatgaagagccaaacaagtagagggtgttcactaattaactggttagttaattacatcctgttgcctccgaagaacatcctaaagctgtgtccaatgatsttgttaagctccctgttgttgatgggcttgcagagtccagtggaagccatcatcaccttgtgccagtttccattttcctcgagcctgcagaggatgtccg

SEQ ID NO: 20584 - DNA, 201 bp, Homo sapiens
agtggagagtgtgggccaactgcatcccatgccccttgcaagaagcagacactgttttgctgaggacaacagtgcgtgcctttctgttttctattttgaawgccatgatcgtgtcttctgtattgcctctgtggcacaactctgtggctggtattatatttcagaaggtagatttcctctatttaaagagtttccatagat

SEQ ID NO: 20585 - DNA, 201 bp, Homo sapiens
aggcatgcttacaggagaaagtatacctgttacaaagacaccattgccccagatggagaacactatgccttggaaatgtcacagtttggaggattataggraacacgtccttttctgtggaacagaagttatccaggtcaagccctctgggcaggggcctgtacgagcagtcgttttgcaaacaggttacaatacagccaa

SEQ ID NO: 20586 - DNA, 201 bp, Homo sapiens
cctctggacctcaaaatgtttgagggcactgcctgggtaagcacaatgaagagccaaacaagtagagggtgttcactaattaactggttagttaattacaycctgttgcctccgaagaacatcctaaagctgtgtccaatgatcttgttaagctccctgttgttgatgggcttgcagagtccagtggaagccatcatcacc

SEQ ID NO: 20587 - DNA, 201 bp, Homo sapiens
ttgtcctccacatattgaaagtttcagtgatgttgagatgggagaaactatcatgggaaacatggaggttattatactagcctgactccagtgcaaaagcwtgctgttactattagaaaagagaaaagagacttgatggcttgtgcccaaacagggtctggaaaactgcagcatttctcttgcccatgttgagtcagatgt

SEQ ID NO: 20588 - DNA, 185 bp, Homo sapiens
ccagaggctactgacaaaatagtggtgctagccgttccagtttcagcagcagccatgcaagcagcagacacagtggtggaggtggccacggcagcagcagmagatttggtggaggtggctatggaggcttttgcaacactaatagatatggaggaaattataactcccagagagttgactggtgg

SEQ ID NO: 20589 - DNA, 201 bp, Homo sapiens
cttatgaacaccactaccagggtagtaattgtggacgttctaagagtggcagatttagtggaggatttggtgccagaggctactgacaaaatagtggtgcyagccgttccagtttcagcagcagccatgcaagcagcagacacagtggtggaggtggccacggcagcagcagcagatttggtggaggtggctatggaggct

SEQ ID NO: 20590 - DNA, 201 bp, Homo sapiens
acaccattctcagagggatagggaagaagctcttcaccagttaccctcaggaaaaagcccaatgctagtggctatagcagtagcagtaagaggactggacmtttcaaatgtggaacatgttatcaattttgatttgccaagtgatattgaagaatatgtatatggcattggccatacaagatgtgtagaaaaccttggcct

SEQ ID NO: 20591 - DNA, 201 bp, Homo sapiens
aaacttttatgaatacttggtgttagaagaagctgatcagatgttggatatggggtttgagcctcagatacatagaaaagttgaacaagataccatgcctycaaagggtgtccaccaaactatgatgtttagtgctacttggcctaaggacatacagatgctcgctcatgatttcttcaatgaatatattaataccttatt

SEQ ID NO: 20592 - DNA, 201 bp, Homo sapiens
gtgcttgggctggaccagcagtttgctggcctagacctggcctattcagataatcagagtgggggaagtacagccagcaaagggcactatatcccttttcrttgaggaacagagcagctactaaggattctaccataaagacagtttagggtggcgttctagcaaagataaggatgcctacagcagttttgaatctcctaa

SEQ ID NO: 20593 - DNA, 201 bp, Homo sapiens
agatttagtggaggatttggtgccagaggctactgacaaaatagtggtgctagccgttccagtttcagcagcagccatgcaagcagcagacacagtggtgraggtggccacggcagcagcagcagatttggtggaggtggctatggaggcttttgcaacactaatagatatggaggaaattataactcccagagagttgac

SEQ ID NO: 20594 - DNA, 201 bp, Homo sapiens
ttgccagcaaggtagctgtggtagcggtctatggtgatgtgggcaagggctgtgcccaggccctgcagggattcggggctcacgtcattatcaccgagatygaccccatcaatgcactgcaggctgccatgcagcgctatgaggggaccaccatggacaaggcctgtcaggagggcaacatctttgtcaccaccacaggct

SEQ ID NO: 20595 - DNA, 201 bp, Homo sapiens
aaagttcctgctttcacagaattattccagggtttatgtgtcggggtgatgacttcacatgccataacagcactggtggcaagtccgtctatggggagaartttgttgacgagaacttcgtcctgaagcatacagatcctggcatcttgtccagggcaaatgctggacccagtacaaatggttcccagttttttacctgca

SEQ ID NO: 20596 - DNA, 201 bp, Homo sapiens
agaaaggatttggttataaaagttcctgctttcacagaattattccagggtttatgtgtcggggtgatgacttcacatgccataacagcactggtggcaartccgtctatggggagaagtttgttgacgagaacttcgtcctgaagcatacagatcctggcatcttgtccagggcaaatgctggacccagtacaaatggtt

SEQ ID NO: 20597 - DNA, 201 bp, Homo sapiens
aaagacagaagaaaactttcatcttctgagcactggagagaaaggatttggttataaaagttcctgctttcacagaattattccagggtttatgtgtcggrgtgatgacttcacatgccataacagcactggtggcaagtccgtctatggggagaagtttgttgacgagaacttcgtcctgaagcatacagatcctggcat

SEQ ID NO: 20598 - DNA, 181 bp, Homo sapiens
catcttgtccagggcaaatgctggacccagtacaaatggttcccagttttttacctgcactgctaagaccgagtggttcggcaaggtgaaagaacgcatgrttattgtggaggccatggggcgctttgcggggaatgggaagaccagcaagaagatcgctgttgctgactgtgggctactc

SEQ ID NO: 20599 - DNA, 201 bp, Homo sapiens
ttgcagagaagtttccaaagacagaagaaaactttcatcttctgagcactggagagaaaggatttggttataaaagttcctgctttcacagaattattccmgggtttatgtgtcggggtgatgacttcacatgccataacagcactggtggcaagtccgtctatggggagaagtttgttgacgagaacttcgtcctgaagc

SEQ ID NO: 20600 - DNA, 165 bp, Homo sapiens
atggtcaaccctactgtgttcttcgacatcaccgtcgatggcgagcccttgggcagcgtctcctycgagctgtttgcagagaagtttccaaagacagaagaaaactttcatcttctgagcactggagagaaaggatttggttataaaagttcctgctttcacaga

SEQ ID NO: 20601 - DNA, 201 bp, Homo sapiens
gaagacattttggagaaccagcttgtggacaaccacgtgcagctggccagactctgctacaacccagattttaagaaactgaagccagaatacctggaggmactccctgcaatgctgaagctctactcacagtttctggggaagcagctattgtttcttggggacaagatcacacttgtggatttcatcgcgtatggcatc

SEQ ID NO: 20602 - DNA, 201 bp, Homo sapiens
gagaaccagcttgtggacaaccacgtgcagctggccagactctgctacaacccagattttaagaaactgaagccagaatacctggaggcactccctgcaawgctgaagctctactcacagtttctggggaagcagctattgtttcttggggacaagatcacacttgtggatttcatcgcgtatggcatccttgagagaaac

SEQ ID NO: 20603 - DNA, 201 bp, Homo sapiens
cagtttctggggaagcagctattgtttcttggggacaagatcacacttgtggatttcatcgcgtatggcatccttgagagaaaccaagtatttgagcccargtggttggacgccttcccaaacctgaaggacttcatctcccgatttgagggcttggagatctctgcctacatgaaatccagctgcttcctcctgagacct

SEQ ID NO: 20604 - DNA, 199 bp, Homo sapiens
atgcccgtgacactggggtactgggacatctgagggctggcccacgccgtctgcctgctcctgcaatacacagacttaagctatgaggaaaagaagtayatgatgggggacgctcctgactatgacagaagccagtggctgaatgaaaaattcaagctgggcctggactttcccaatctgccctacttgattgatgggg

SEQ ID NO: 20605 - DNA, 201 bp, Homo sapiens
actgggacatctgagggctggcccacgccgtctgcctgctcctgcaatacacagacttaagctatgaggaaaagaagtacatgatgggggacgctcctgaytatgacagaagccagtggctgaatgaaaaattcaagctgggcctggactttcccaatctgccctacttgattgatggggctcacaagatcacccagagca

SEQ ID NO: 20606 - DNA, 201 bp, Homo sapiens
gcccgtgacactggggtactgggacatctgagggctggcccacgccgtctgcctgctcctgcaatacacagacttaagctatgaggaaaagaagtacatgmtgggggacgctcctgactatgacagaagccagtggctgaatgaaaaattcaagctgggcctggactttcccaatctgccctacttgattgatggggctca

SEQ ID NO: 20607 - DNA, 201 bp, Homo sapiens
aagccagtggctgaatgaaaaattcaagctgggcctggactttcccaatctgccctacttgattgatggggctcacaagatcacccagagcaaggccatcytgggctgcattgcctacaagcacaacctgtgtggggagacagaaggggagaagatttgggaagacattttggagaaccagcttgtggacaaccacgtgca

SEQ ID NO: 20608 - DNA, 155 bp, Homo sapiens
atgcccgtgacactggggtactgggacatctgagggctggcccacgccgtctgcytgctcctgcaatacacagacttaagctatgaggaaaagaagtacatgatgggggacgctcctgactatgacagaagccagtggctgaatgaaaaattcaa

SEQ ID NO: 20609 - DNA, 201 bp, Homo sapiens
ggaagcagctattgtttcttggggacaagatcacacttgtggatttcatcgcgtatggcatccttgagagaaaccaagtatttgagcccaagtggttggaygccttcccaaacctgaaggacttcatctcccgatttgagggcttggagatctctgcctacatgaaatccagctgcttcctcctgagacctgtgttcacaa

SEQ ID NO: 20610 - DNA, 201 bp, Homo sapiens
tgtttcttggggacaagatcacacttgtggatttcatcgcgtatggcatccttgagagaaaccaagtatttgagcccaagtggttggacgccttcccaaayctgaaggacttcatctcccgatttgagggcttggagatctctgcctacatgaaatccagctgcttcctcctgagacctgtgttcacaaagatggctgtct

SEQ ID NO: 20611 - DNA, 201 bp, Homo sapiens
agtggctgaatgaaaaattcaagctgggcctggactttcccaatctgccctacttgattgatggggctcacaagatcacccagagcaaggccatcctgggstgcattgcctacaagcacaacctgtgtggggagacagaaggggagaagatttgggaagacattttggagaaccagcttgtggacaaccacgtgcagctgg

SEQ ID NO: 20612 - DNA, 201 bp, Homo sapiens
gatttgggaagacattttggagaaccagcttgtggacaaccacgtgcagctggccagactctgctacaacccagattttaagaaactgaagccagaatacytggaggcactccctgcaatgctgaagctctactcacagtttctggggaagcagctattgtttcttggggacaagatcacacttgtggatttcatcgcgta

SEQ ID NO: 20613 - DNA, 201 bp, Homo sapiens
ttgggaagacattttggagaaccagcttgtggacaaccacgtgcagctggccagactctgctacaacccagattttaagaaactgaagccagaatacctgsaggcactccctgcaatgctgaagctctactcacagtttctggggaagcagctattgtttcttggggacaagatcacacttgtggatttcatcgcgtatgg

SEQ ID NO: 20614 - DNA, 201 bp, Homo sapiens
gaccacagtccatgctgtccctgccacccagaagactgtggatggaccatccaggagactgtggtgtgatagccatggggctctccagaacatcatccctrcccctagtgacgctgccaaggctgtggccaaggtcatccctgagctgaatgggaagctcactggcatggccttctgtgtccccactgccaacttgtcagt

SEQ ID NO: 20615 - DNA, 201 bp, Homo sapiens
tgatgacatcaagaaggtggtaaagcaggtgtcagagggccccctcaagggcatcctgggctacactgagtaccagcttgtctcctctgacttcaacagcracacccactcttccaccttcgacgctggggctagcattgccctcaacgaccactttttcaagctcatttcctggtatgacaatgaatttggctacagcaa

SEQ ID NO: 20616 - DNA, 201 bp, Homo sapiens
accagggctgcttttaactctgctaaagtagatattgtggccatcagtgacctcttcattgacctcaactacatggtctacatgttccagtatggttctamccatggcaaattccatggcactgtcaaggctgagaacaggaagcttgtcatcactggaaatctcatcaccatcttccaggagcgagatccctccaaaatc

SEQ ID NO: 20617 - DNA, 201 bp, Homo sapiens
ctgccaacaccctgatgttcgtgatgggcgtgacccatgagaattatgacagcagcctcaagatcatcagcaatgcctcctgcaccatgaattgcttagcrcccctggccaaagtcatccgtgacaactttggtatcatggaaggactcatgaccacagtccatgctgtccctgccacccagaagactgtggatggaccat

SEQ ID NO: 20618 - DNA, 201 bp, Homo sapiens
tccaaggattaaatctggtcagcaggtggaatgtgtataaaatgctacttaacaaagtaaacaaaagattttttttttctttttttttctttcttttttgktttgctctttcagaacaaacattaaatggtgcctccaaggaaactttgccaaatataatctcacctgcttccttccagacagtgtcgctaagtgcatttc

SEQ ID NO: 20619 - DNA, 201 bp, Homo sapiens
gatttatgagtcatggaaccctccatcagatttggaagaaagtagaatgagcgcagaggtgacagacagccactgaggcccatggacaatctccacctcasgcttctctatcaaacttgaagatttattagtaatatgctgcctttggaagatgaaaacaaactagtgccaaggaggcgtattcttcaatatttggaatag

SEQ ID NO: 20620 - DNA, 107 bp, Homo sapiens
ggctacrcagcttgctcctggcacgggcaccttgaatctcctcctcacacagatggagaccatgcttgatttcctgaacttgtagtaagaagaaggaaaacacagca

SEQ ID NO: 20621 - DNA, 125 bp, Homo sapiens
ggctacgcagcttgctcctggcacrggcaccttgaatctcctcctcacacagatggagaccatgcttgatttcctgaacttgtagtaagaagaaggaaaacacagcacgctggagccaacagagt

SEQ ID NO: 20622 - DNA, 201 bp, Homo sapiens
ccgagttatcactgtgcatcagatctctccagaagaaatgcacagaatctggaatgacatgtcaagcaagaaacatctcagatgttaggatttttaccaaygtaaatatgtttcttttctttttttaagaaatgggacctaaggtgttggtattttccaggtgtcgggggaaatgaactggtgaaggggttttgtaaagtt

SEQ ID NO: 20623 - DNA, 201 bp, Homo sapiens
ttctttttttaagaaatgggacctaaggtgttggtattttccaggtgtcgggggaaatgaactggtgaaggggttttgtaaagtttttgcttcctgctatmagttcttttcttggattaccaatttatgaatgttagactctggtcatagaaacaataaatgagttagaagggccagatttcattctcagtcccagagcat

SEQ ID NO: 20624 - DNA, 201 bp, Homo sapiens
caacagagttaagaggaagatttatgagtcatggaaccctccatcagatttggaagaaagtagaatgagcgcagaggtgacagacagccactgaggcccayggacaatctccacctcacgcttctctatcaaacttgaagatttattagtaatatgctgcctttggaagatgaaaacaaactagtgccaaggaggcgtatt

SEQ ID NO: 20625 - DNA, 201 bp, Homo sapiens
atgagcgcagaggtgacagacagccactgaggcccatggacaatctccacctcacgcttctctatcaaacttgaagatttattagtaatatgctgcctttsgaagatgaaaacaaactagtgccaaggaggcgtattcttcaatatttggaatagacgtgttctcaagacaatggcttcaaaggtctcctgtttgtatgtt

SEQ ID NO: 20626 - DNA, 201 bp, Homo sapiens
cagacagcgacatttttgtaaacatggacaatcttatttataaattactgaaaccctccaccaagccacgaagaaggtattttactggctatgtcattaayggaggaccgattcgggatgtccgcagtaagtggtatatgcccagggatttgtacccagacagtaactacccacctttctgttcggggactggctacatct

SEQ ID NO: 20627 - DNA, 201 bp, Homo sapiens; identical to SEQ ID NO: 20618

SEQ ID NO: 20628 - DNA, 201 bp, Homo sapiens; identical to SEQ ID NO: 20619

SEQ ID NO: 20629 - DNA, 107 bp, Homo sapiens; identical to SEQ ID NO: 20620

SEQ ID NO: 20630 - DNA, 125 bp, Homo sapiens
ggctacgcagcttgctcctggcacrggcaccttgaatctcctcctcacacagatggagaccatgcttgatttcctgaacttgtagtaagaagaaggaaaacacagcacgctggagccaacagcag

SEQ ID NO: 20631 - DNA, 201 bp, Homo sapiens; identical to SEQ ID NO: 20622

SEQ ID NO: 20632 - DNA, 201 bp, Homo sapiens; identical to SEQ ID NO: 20623

SEQ ID NO: 20633 - DNA, 201 bp, Homo sapiens
cagcagagttaagaggaagatttatgagtcatggaaccctccatcagatttggaagaaagtagaatgagcgcagaggtgacagacagccactgaggcccayggacaatctccacctcacgcttctctatcaaacttgaagatttattagtaatatgctgcctttggaagatgaaaacaaactagtgccaaggaggcgtatt

SEQ ID NO: 20634 - DNA, 201 bp, Homo sapiens; identical to SEQ ID NO: 20625

SEQ ID NO: 20635 - DNA, 201 bp, Homo sapiens; identical to SEQ ID NO: 20626

SEQ ID NO: 20636 - DNA, 201 bp, Homo sapiens
acaaaagacatagaagcccagaagaattattttaggatgtggcaaaaagcccacttagcctggcttaaccaaggaaaagttctaccccagaacatgactaycacacacgctgtggctattttgttttacacattgaacagcaatgttcattctgactttactagagccatggcctctgttgccaggactccacagcagtat

SEQ ID NO: 20637 - DNA, 201 bp, Homo sapiens
gagaaactaactcaaggggattatttcacaaaagacatagaagcccagaagaattattttaggatgtggcaaaaagcccacttagcctggcttaaccaagkaaaagttctaccccagaacatgactaccacacacgctgtggctattttgttttacacattgaacagcaatgttcattctgactttactagagccatggcc

SEQ ID NO: 20638 - DNA, 201 bp, Homo sapiens
catgactaccacacacgctgtggctattttgttttacacattgaacagcaatgttcattctgactttactagagccatggcctctgttgccaggactccayagcagtatgaacgttcattccacttcaaatatttacactactacctcacctcagcaatccagctgctgaggaaagacagcatcatggagaatggcactct

SEQ ID NO: 20639 - DNA, 201 bp, Homo sapiens
ctgaggaaagacagcatcatggagaatggcactctgtgctatgaggtgcattataggacgaaggatgtccactttaatgcctacacaggggccaccattckatttggccaattcctctccacatccctcctgaaagaagaggcacaggagtttgggaaccagacactatttaccatattcacctgcctgggtgcacctgta

SEQ ID NO: 20640 - DNA, 201 bp, Homo sapiens
gttgcagttgaggtcaactgggaacctgagcacatataactgtcagctgctaaaagcttccagcaagaaatgcatccctgatcctatagctattgcatctstctcctttttgaccagtgtcatcatcttttccaaaagcagagtataaagaaatcttgtggctccttttatttaaaaaaaatatttaaataaaatcttttt

SEQ ID NO: 20641 - DNA, 201 bp, Homo sapiens
cctgggtgcacctgtacagtacttctccctcaagaaggaagtcttgatccctccctatgagctgtttaaagttataaatatgagctaccacccaagaggaractggttgcagttgaggtcaactgggaacctgagcacatataactgtcagctgctaaaagcttccagcaagaaatgcatccctgatcctatagctattgc

SEQ ID NO: 20642 - DNA, 201 bp, Homo sapiens
tcaaatatttacactactacctcacctcagcaatccagctgctgaggaaagacagcatcatggagaatggcactctgtgctatgaggtgcattataggacraaggatgtccactttaatgcctacacaggggccaccattcgatttggccaattcctctccacatccctcctgaaagaagaggcacaggagtttgggaacc

SEQ ID NO: 20643 - DNA, 201 bp, Homo sapiens
tcatggagaatggcactctgtgctatgaggtgcattataggacgaaggatgtccactttaatgcctacacaggggccaccattcgatttggccaattcctytccacatccctcctgaaagaagaggcacaggagtttgggaaccagacactatttaccatattcacctgcctgggtgcacctgtacagtacttctccctca

SEQ ID NO: 20644 - DNA, 201 bp, Homo sapiens
attttaggatgtggcaaaaagcccacttagcctggcttaaccaaggaaaagttctaccccagaacatgactaccacacacgctgtggctattttgttttayacattgaacagcaatgttcattctgactttactagagccatggcctctgttgccaggactccacagcagtatgaacgttcattccacttcaaatatttac

SEQ ID NO: 20645 - DNA, 201 bp, Homo sapiens
ttctatttcaacaaaaccaaggggttcccttgcctaaagaagccagaagacagcagtgccccgaggtgcttaggcaagagcaaaggtcggactcatcctckcattgacccagatgtcatccacagactgaggaaattctacaaacccttcaacttgatgttttaccaaatgactggtcaagattttcagtgggaacaggaa

SEQ ID NO: 20646 - DNA, 201 bp, Homo sapiens
catccacagactgaggaaattctacaaacccttcaacttgatgttttaccaaatgactggtcaagattttcagtgggaacaggaagagggtgataaatgargctagagaggcagaggaaggctagtcaataagctaaggaggctccttgcctgagtccttgaataccccagcttctgcagcttcacttgctggagtgccaa

SEQ ID NO: 20647 - DNA, 201 bp, Homo sapiens
ttgccctcagaaaagttatttatggatagaaatctcactaccacatcatgatagtaaaatcaggatggaaataagagggtgcctgataaatggagtcagtrtggaattgaataccatactatgcccaatactgtttaaactcagtcctcccatattttaaaaggtgtccaaaattccatacacaagggaaagtgatctagc

SEQ ID NO: 20648 - DNA, 201 bp, Homo sapiens
cagtatcatgaatggcctcctttttagttcaactgtttctttaaaatgcatttactgattaaaaataagaactgaccaatagctccaagtgtcacacaccagaacattaagcctaagtcctcaattcataagttatcattctagataagtttctttacaatggaatactttctatggaatcattataattctgttgtatgg

SEQ ID NO: 20649 - DNA, 201 bp, Homo sapiens
acagtatcatgaatggcctcctttttagttcaactgtttctttaaaatgcatttactgattaaaaataagaactgaccaatagctccaagtgtcacacaccagaacattaagcctaagtcctcaattcataagttatcattctagataagtttctttacaatggaatactttctatggaatcattataattctgttgtatg

SEQ ID NO: 20650 - DNA, 201 bp, Homo sapiens
aacagtatcatgaatggcctcctttttagttcaactgtttctttaaaatgcatttactgattaaaaataagaactgaccaatagctccaagtgtcacacaccagaacattaagcctaagtcctcaattcataagttatcattctagataagtttctttacaatggaatactttctatggaatcattataattctgttgtat

SEQ ID NO: 20651 - DNA, 201 bp, Homo sapiens
caaaacagtatcatgaatggcctcctttttagttcaactgtttctttaaaatgcatttactgattaaaaataagaactgaccaatagctccaagtgtcacacaccagaacattaagcctaagtcctcaattcataagttatcattctagataagtttctttacaatggaatactttctatggaatcattataattctgttg

SEQ ID NO: 20652 - DNA, 201 bp, Homo sapiens
gttatttatggatagaaatctcactaccacatcatgatagtaaaatcaggatggaaataagagggtgcctgataaatggagtcagtgtggaattgaatacyatactatgcccaatactgtttaaactcagtcctcccatattttaaaaggtgtccaaaattccatacacaagggaaagtgatctagcctttgatgttatta

SEQ ID NO: 20653 - DNA, 201 bp, Homo sapiens
acattggtttgctaataaatttgattctaaggtggaccctatcttgattaaatgcttggcagaaaagcttgaagaacagcagagagactggatcactttgycctcagaaaagttatttatggatagaaatctcactaccacatcatgatagtaaaatcaggatggaaataagagggtgcctgataaatggagtcagtgtgg

SEQ ID NO: 20654 - DNA, 201 bp, Homo sapiens
ggccctgttgatgacatccagttctctagacctctgcccaaaccagagcaatccctcctcaaatatgctaagcagaaatgcagacaatataagacacactmtatttatattttaggagtttacattaccttcccttctgtttggaaaccaacatctctcaaaattaggtatagttaacacagaataccccaaaataccacc

SEQ ID NO: 20655 - DNA, 201 bp, Homo sapiens
ctccaaggaagcacccccccataacattcagatatttgttggcagtgcttattttgttttaagtcaagcatttgttaaatatattttcaacaactccatcvttcaagacttttttgcctggtctaaagacacatactctcctgatgagcacttttgggctaccttgattcgggttccaggaatacctggggagatttccag

SEQ ID NO: 20656 - DNA, 162 bp, Homo sapiens
atggtgctctgtgcttgcggcgagagcagtgaagtggtgagaccagtttctgaatgtaaacwttttatgacaacggctgcgaagatgcccaaacacatggagagaaaccgtaaaggcagtcacatagtgaccagatcacacacagatcagaatggtcgtctt

SEQ ID NO: 20657 - DNA, 174 bp, Homo sapiens
atggtgctctgtgcttgcggcgagagcagtgaagtggtgagaccagtttctgaatgtaaactttttatgacaayggctgcgaagatgcccaaacacatggagagaaaccgtaaaggcagtcacatagtgaccagatcacacacagatcagaatggtcgtcttctaatcactatt

SEQ ID NO: 20658 - DNA, 201 bp, Homo sapiens
tgtgcttgcggcgagagcagtgaagtggtgagaccagtttctgaatgtaaactttttatgacaacggctgcgaagatgcccaaacacatggagagaaaccrtaaaggcagtcacatagtgaccagatcacacacagatcagaatggtcgtcttctaatcactatttggcatttgaacccaactgcatgcaacaaaggaaag

SEQ ID NO: 20659 - DNA, 201 bp, Homo sapiens
ttgctagtcagtctggggcaacattctttagcatctctgcttcatccttaacttctaaatgggtaggtgagggggagaaaatggtccgtgcattgtttgcygttgcaaggtgtcagcaaccagctgtgatatttattgacgaaattgattccttgttatctcaacggggagatggtgagcatgaatcttctagaaggataa

SEQ ID NO: 20660 - DNA, 201 bp, Homo sapiens
agtgccttctgatggccacataattcttaatgtcagctagtataatggtttacatttggacaaagtattgcttagtgttatttaagtagatttaagatctyaaagctaaagtgccaatttttactttcttcagccaatttgttacctcttttatggtttttaatttttatcaggactaacattttcagaaatagcaaggtg

SEQ ID NO: 20661 - DNA, 201 bp, Homo sapiens
attgtcaataaataatgttttcaaaatgagtagtgtacagaagatgatgcaagctggcaaaaaattcaaagactctctgttggaacctgctcttgcatcartggtaatccataaggaggccactgtctttgatcttcctaaatttagtgtttgtggtagttctcaagagagtgactcattacctaactcagctcatgatcg

SEQ ID NO: 20662 - DNA, 201 bp, Homo sapiens
cctagtgtttctccaaaagatttagagctttatgaaaactggaacaaaacttttggttgtggaaagtaagtgggatacttggaatcaaggcatctctgtaktacagtcttctttattttttagcatagaaagttggggatgtgttaattgtatttttaagaatatattctaaattctgtacttcaaataatagcacagatt

SEQ ID NO: 20663 - DNA, 201 bp, Homo sapiens
aggttaattaagaatgttggttattttcacgggagcgtgtgatatttaacattaatattttatttgacactacagcctgtaatactgctctctttcaaaarcaagttttcagatttttataacagacccattttgttttatgaaacatgttcattacagaaacatgagaaaatagagataagtaaaaagaataaaagtcac

SEQ ID NO: 20664 - DNA, 144 bp, Homo sapiens
cagcagcgcgcaggcgcacgtcagtccccgcgcttttcggaggytgccagcgtcccacaccagccgcaggtgaaaaccggcagaaagacattaagagattttcctgcagtcactgctggcagatgatagagccaggatttgaaa

SEQ ID NO: 20665 - DNA, 201 bp, Homo sapiens
ggatacttggaatcaaggcatctctgtattacagtcttctttattttttagcatagaaagttggggatgtgttaattgtatttttaagaatatattctaarttctgtacttcaaataatagcacagattttacatctgattgacatagtgtatgttaatgtaagttttgctttccagtgattacctgatacgtaagcctat

SEQ ID NO: 20666 - DNA, 201 bp, Homo sapiens
ataagtaaaaagaataaaagtcactattatcctaccactttgcgggacacactattaatatttaagcatagattcttccagatgttttgttttatacagcrgtaggattgtgtaatgtattctctcttgtagcctattcttcaaagcgtatcttcactttccatgttaacataaatgtccttttatgattgtctaggattc

SEQ ID NO: 20667 - DNA, 201 bp, Homo sapiens
cagatgatagagccaggatttgaaagcaggcagcctggctccagaccctgtgctcttaactcccgttttgcatcaagaacagaatcctatgaaaggcttgyacagtgcttggatagcagcatcaaggagcattgtgtacatgcagaagtgcacagtacctggagtgaaactgcttgtgttcgatttctgataccattcata

SEQ ID NO: 20668 - DNA, 201 bp, Homo sapiens
ttaatatttaagcatagattcttccagatgttttgttttatacagcagtaggattgtgtaatgtattctctcttgtagcctattcttcaaagcgtatcttmactttccatgttaacataaatgtccttttatgattgtctaggattccatggatggatggaatataattgagtcatctggtagagcgcatataggacagga

SEQ ID NO: 20669 - DNA, 201 bp, Homo sapiens
acttcgcaattacatctggcatatgtaccggaccgaaggcagatgcataccgtgcacagatattacgcattcagtatgcatgggcaaactctgagatttcmcaggtctgtgctaccaaactgttcaaaaaatatgcagagaaatattctgcaattattgattctgacaatgttgaatctgggttgaataattatgcagaaa

SEQ ID NO: 20670 - DNA, 201 bp, Homo sapiens
gaaactccttcagaatgcccagccacctatggtgactaacactgctaggacttgtcctacattctcagcacctgtaggtgagtcagctactgcaaaattcyatgtcacaccattgtttggaaatgtcaaaaaggaaaatcacagctctgcaaaagaaaacataggacttaatgtgttcttatctaaccagtcttgttttcc

SEQ ID NO: 20671 - DNA, 201 bp, Homo sapiens
gcccatttctctgaagaagccattggaattgaaacacttccgtgtattcctggagaactaccagatacttcaatatttcatcattcgaatgtttcaagttrtggagaagtccacgggaactagtcactctgtaaaacagttgcagttcaccaagtggccagaccatggcactcctgcctcagcagatagcttcataaaata

SEQ ID NO: 20672 - DNA, 191 bp, Homo sapiens
gattcaacacgcgttcctcttggaaaaagcaaggactacatcaatgctagttatattagaatagtcaattgtggagaagagtatttttatrtcgctactcaaggaccactgctgagcaccatagatgacttttggcaaatggtgttggaaaataattcgaatgttattgccatgataaccagagagataga

SEQ ID NO: 20673 - DNA, 201 bp, Homo sapiens
gacctgttggtctgggaagcatttcatggatagggagagctcctctcggtgaacagtccaaaactaaaatagatgtttatatagaaagcccaagaggagayttttgccatgcctgagttctttcctatcccaccctaacacttaacatattacttagtctgctttgttaaaagcaagtattacctttaacttgcctcttac

SEQ ID NO: 20674 - DNA, 201 bp, Homo sapiens
gaatagtcaattgtggagaagagtatttttatatcgctactcaaggaccactgctgagcaccatagatgacttttggcaaatggtgttggaaaataattcraatgttattgccatgataaccagagagatagaaggtggaattatcaaatgctaccattactggcccatttctctgaagaagccattggaattgaaacact

SEQ ID NO: 20675 - DNA, 201 bp, Homo sapiens
aagtaatgatgtatggcctgtaccggctcagggcatttggacactatttcaatgacacactcgttttcttgcctccagttggttcagaaaatgactgaggsctggagaataatagacctgtgctgtccaagagcacttgaaatgtggctagtccaaattctgatacagtgtaagtgtaaaatacgtacttcattcaataat

SEQ ID NO: 20676 - DNA, 201 bp, Homo sapiens
agctctacgatactaaaaatgataatttgttcaatatagaaagtaatgacaggtgggtacagatgaggaccgcttacaaatacgtctttgaaaagtatggygacaactacaactggttcttccttgcacttcccactacgtttgctgtcattgaaaatttaaagtaccttttgtttacaagggatgcatcccagcccttct

SEQ ID NO: 20677 - DNA, 201 bp, Homo sapiens
caaaaatctgtacacacatttgaaaaactcacaaaattgtcatctatgtatcacaagttgctagaccaaaatattaaaaatgggataaaattatacatttytcttctcagttcttttcaaaaggattaatatttttaaagcacatatatgctactttccattagcaagacccatgaagggactgagcagcccagccttcct

SEQ ID NO: 20678 - DNA, 201 bp, Homo sapiens
aggctcgggcggggccgacgaagttggggagggcgcgcgaacccactggcgcgccctgctgcgggccgagagccttgcgtatgcggacatcctgctctggsccttcgacgacaccttttttaacctaacgctcaaggagatccactttctagcctgggcctcagctttctgccccgacgtgcgcttcgtttttaagggcga

SEQ ID NO: 20679 - DNA, 201 bp, Homo sapiens
gccgcccggacctgcttattgctgtcaagtcggtggcagaggacttcgagcggcgccaagccgtgcgccagacgtggggcgcggagggtcgcgtgcagggrgcgctggtgcgccgcgtgttcttgctgggcgtgcccaggggcgcaggctcgggcggggccgacgaagttggggagggcgcgcgaacccactggcgcgccc

SEQ ID NO: 20680 - DNA, 201 bp, Homo sapiens
gaaatctcctggagttcctggcgccgcgggacccggcgcaagacctgcttgctggtgacgtaattgtgcatgcgcggcccatccgcacgcgggctagcaartactacatccccgaggccgtgtacggcctgcccgcctatccggcctacgcgggcggcggtggctttgtgctttccggggccacgctgcaccgcctggctg

SEQ ID NO: 20681 - DNA, 201 bp, Homo sapiens
taagtcacgcctcccaccttccccgaggccgcaggggcagcgctggatctggttcaacttggagccaccccctaactgccagcacctggaagccctggacrgatacttcaatctcaccatgtcctaccgcagcgactccgacatcttcacgccctacggctggctggagccgtggtccggccagcctgcccacccaccgct

SEQ ID NO: 20682 - DNA, 201 bp, Homo sapiens
cttaggtcttggcgtcgggatcccttttcgtcacactcaggtgacctacagggagctccgctcgacactgcaaggcttagaccagttcggtccaacagagraagcaggcaaccaccatgtcatttgaaaacagtttcatcgggatataattcgcaacccatacagtgaatccatttaagatactctgacccatggatcccc

SEQ ID NO: 20683 - DNA, 201 bp, Homo sapiens
cctgggacctcacacgctgggcttcacggctgccaggagcctctcccctccagaagacttgcctgctagggacctcgcctgctggggacctcgcctgttgrggacctcacctgctggggacctcacctgctggggaccttggctgctggaggctgcacctactgaggatgtcggcggtcggggactttacctgctgggacc

SEQ ID NO: 20684 - DNA, 201 bp, Homo sapiens
ggctggagccgtggtccggccagcctgcccacccaccgctcaacctctcggccaagaccgagctggtggcctgggcggtgtccaactggaagccggactcvgccagggtgcgctactaccagagcctgcaggctcatctcaaggtggacgtgtacggacgctcccacaagcccctgcccaaggggaccatgatggagacgc

SEQ ID NO: 20685 - DNA, 201 bp, Homo sapiens
gacatggcctttccacatccctgtggctctgtcccgctgttcagagatggtgcccggcacagccgactgccacatcactgccgaccgcaaggtgtacccamaggcagacacggtcatcgtgcaccactgggatatcatgtccaaccctaagtcacgcctcccaccttccccgaggccgcaggggcagcgctggatctggtt

SEQ ID NO: 20686 - DNA, 201 bp, Homo sapiens
ctggaaactgcagcaggaatccaggtaccagacggtgcgcagcatagcggcttggttcacctgagaggccggcatggtgcctgggctgccgggaacctcayctgcctggggcctcacctgctggagtcctttgtggccaaccctctctcttacctgggacctcacacgctgggcttcacggctgccaggagcctctcccct

SEQ ID NO: 20687 - DNA, 201 bp, Homo sapiens
gaggacttctggaacattccaaatattctggggttgagggaaattgctgctgtctacaaaatgccaagggtggacaggcgctgtggctcacgcctgtaatyccagcactttgggaggctgaggtaggaggattgattgaggccaagagttaaagaccagcctggtcaatatagcaagaccacgtctctaaataaaaaataa

SEQ ID NO: 20688 - DNA, 201 bp, Homo sapiens
tcttctcctacctgcgtgtgtcccgagacgatgccactggatcccctagggctcccagtgggtcctcccgacaggacaccactcccacccgccccaccctsctgatcctgctatggacatggcctttccacatccctgtggctctgtcccgctgttcagagatggtgcccggcacagccgactgccacatcactgccgacc

SEQ ID NO: 20689 - DNA, 201 bp, Homo sapiens
ccgactacatcaccgagaagctgtggaggaacgccctggaggcctgggccgtgcccgtggtgctgggccccagcagaagcaactacgagaggttcctgccrcccgacgccttcatccacgtggacgacttccagagccccaaggacctggcccggtacctgcaggagctggacaaggaccacgcccgctacctgagctact

SEQ ID NO: 20690 - DNA, 201 bp, Homo sapiens
gcgtgtgtcccgagacgatgccactggatcccctagggctcccagtgggtcctcccgacaggacaccactcccacccgccccaccctcctgatcctgctayggacatggcctttccacatccctgtggctctgtcccgctgttcagagatggtgcccggcacagccgactgccacatcactgccgaccgcaaggtgtaccc

SEQ ID NO: 20691 - DNA, 201 bp, Homo sapiens
acgtggacgacttccagagccccaaggacctggcccggtacctgcaggagctggacaaggaccacgcccgctacctgagctactttcgctggcgggagacrctgcggcctcgctccttcagctgggcactggatttctgcaaggcctgctggaaactgcagcaggaatccaggtaccagacggtgcgcagcatagcggctt

SEQ ID NO: 20692 - DNA, 201 bp, Homo sapiens
ttccacatccctgtggctctgtcccgctgttcagagatggtgcccggcacagccgactgccacatcactgccgaccgcaaggtgtacccacaggcagacayggtcatcgtgcaccactgggatatcatgtccaaccctaagtcacgcctcccaccttccccgaggccgcaggggcagcgctggatctggttcaacttggag

SEQ ID NO: 20693 - DNA, 201 bp, Homo sapiens
cgggagacgctgcggcctcgctccttcagctgggcactggatttctgcaaggcctgctggaaactgcagcaggaatccaggtaccagacggtgcgcagcawagcggcttggttcacctgagaggccggcatggtgcctgggctgccgggaacctcatctgcctggggcctcacctgctggagtcctttgtggccaaccctc

SEQ ID NO: 20694 - DNA, 201 bp, Homo sapiens
ttcgcaacccatacagtgaatccatttaagatactctgacccatggatcccctgggtgcagccaagccacaatggccatggcgccgctgtctggccgcackgctatttcagctgctggtggctgtgtgtttcttctcctacctgcgtgtgtcccgagacgatgccactggatcccctagggctcccagtgggtcctcccga

SEQ ID NO: 20695 - DNA, 201 bp, Homo sapiens
ccggcacagccgactgccacatcactgccgaccgcaaggtgtacccacaggcagacacggtcatcgtgcaccactgggatatcatgtccaaccctaagtcmcgcctcccaccttccccgaggccgcaggggcagcgctggatctggttcaacttggagccaccccctaactgccagcacctggaagccctggacagatact

SEQ ID NO: 20696 - DNA, 201 bp, Homo sapiens
ggcacagccgactgccacatcactgccgaccgcaaggtgtacccacaggcagacacggtcatcgtgcaccactgggatatcatgtccaaccctaagtcacrcctcccaccttccccgaggccgcaggggcagcgctggatctggttcaacttggagccaccccctaactgccagcacctggaagccctggacagatacttc

SEQ ID NO: 20697 - DNA, 201 bp, Homo sapiens
ccgactgccacatcactgccgaccgcaaggtgtacccacaggcagacacggtcatcgtgcaccactgggatatcatgtccaaccctaagtcacgcctcccrccttccccgaggccgcaggggcagcgctggatctggttcaacttggagccaccccctaactgccagcacctggaagccctggacagatacttcaatctca

SEQ ID NO: 20698 - DNA, 201 bp, Homo sapiens
actgccacatcactgccgaccgcaaggtgtacccacaggcagacacggtcatcgtgcaccactgggatatcatgtccaaccctaagtcacgcctcccaccytccccgaggccgcaggggcagcgctggatctggttcaacttggagccaccccctaactgccagcacctggaagccctggacagatacttcaatctcacca

SEQ ID NO: 20699 - DNA, 201 bp, Homo sapiens
ctgccacatcactgccgaccgcaaggtgtacccacaggcagacacggtcatcgtgcaccactgggatatcatgtccaaccctaagtcacgcctcccacctbccccgaggccgcaggggcagcgctggatctggttcaacttggagccaccccctaactgccagcacctggaagccctggacagatacttcaatctcaccat

SEQ ID NO: 20700 - DNA, 201 bp, Homo sapiens
acatcactgccgaccgcaaggtgtacccacaggcagacacggtcatcgtgcaccactgggatatcatgtccaaccctaagtcacgcctcccaccttccccsaggccgcaggggcagcgctggatctggttcaacttggagccaccccctaactgccagcacctggaagccctggacagatacttcaatctcaccatgtcct

SEQ ID NO: 20701 - DNA, 201 bp, Homo sapiens
gcagacacggtcatcgtgcaccactgggatatcatgtccaaccctaagtcacgcctcccaccttccccgaggccgcaggggcagcgctggatctggttcarcttggagccaccccctaactgccagcacctggaagccctggacagatacttcaatctcaccatgtcctaccgcagcgactccgacatcttcacgccctac

SEQ ID NO: 20702 - DNA, 201 bp, Homo sapiens
agacacggtcatcgtgcaccactgggatatcatgtccaaccctaagtcacgcctcccaccttccccgaggccgcaggggcagcgctggatctggttcaacwtggagccaccccctaactgccagcacctggaagccctggacagatacttcaatctcaccatgtcctaccgcagcgactccgacatcttcacgccctacgg

SEQ ID NO: 20703 - DNA, 201 bp, Homo sapiens
cttggagccaccccctaactgccagcacctggaagccctggacagatacttcaatctcaccatgtcctaccgcagcgactccgacatcttcacgccctacrgctggctggagccgtggtccggccagcctgcccacccaccgctcaacctctcggccaagaccgagctggtggcctgggcggtgtccaactggaagccgga

SEQ ID NO: 20704 - DNA, 201 bp, Homo sapiens
agagcctgcaggctcatctcaaggtggacgtgtacggacgctcccacaagcccctgcccaaggggaccatgatggagacgctgtcccggtacaagttctayctggccttcgagaactccttgcaccccgactacatcaccgagaagctgtggaggaacgccctggaggcctgggccgtgcccgtggtgctgggccccagca

SEQ ID NO: 20705 - DNA, 201 bp, Homo sapiens
ggtcatcgtgcaccactgggatatcatgtccaaccctaagtcacgcctcccaccttccccgaggccgcaggggcagcgctggatctggttcaacttggagycaccccctaactgccagcacctggaagccctggacagatacttcaatctcaccatgtcctaccgcagcgactccgacatcttcacgccctacggctggct

SEQ ID NO: 20706 - DNA, 201 bp, Homo sapiens
tgggatatcatgtccaaccctaagtcacgcctcccaccttccccgaggccgcaggggcagcgctggatctggttcaacttggagccaccccctaactgccrgcacctggaagccctggacagatacttcaatctcaccatgtcctaccgcagcgactccgacatcttcacgccctacggctggctggagccgtggtccggc

SEQ ID NO: 20707 - DNA, 201 bp, Homo sapiens
gacgctgtcccggtacaagttctacctggccttcgagaactccttgcaccccgactacatcaccgagaagctgtggaggaacgccctggaggcctgggccrtgcccgtggtgctgggccccagcagaagcaactacgagaggttcctgccacccgacgccttcatccacgtggacgacttccagagccccaaggacctggc

SEQ ID NO: 20708 - DNA, 201 bp, Homo sapiens
gaccgagctggtggcctgggcggtgtccaactggaagccggactcagccagggtgcgctactaccagagcctgcaggctcatctcaaggtggacgtgtacrgacgctcccacaagcccctgcccaaggggaccatgatggagacgctgtcccggtacaagttctacctggccttcgagaactccttgcaccccgactacat

SEQ ID NO: 20709 - DNA, 201 bp, Homo sapiens
gctgccaggagcctctcccctccagaagacttgcctgctagggacctcgcctgctggggacctcgcctgttggggacctcacctgctggggacctcacctrctggggaccttggctgctggaggctgcacctactgaggatgtcggcggtcggggactttacctgctgggacctgctcccagagaccttgccacactgaat

SEQ ID NO: 20710 - DNA, 201 bp, Homo sapiens
ggggcagcgctggatctggttcaacttggagccaccccctaactgccagcacctggaagccctggacagatacttcaatctcaccatgtcctaccgcagcractccgacatcttcacgccctacggctggctggagccgtggtccggccagcctgcccacccaccgctcaacctctcggccaagaccgagctggtggcctg

SEQ ID NO: 20711 - DNA, 201 bp, Homo sapiens
ttacctgggacctcacacgctgggcttcacggctgccaggagcctctcccctccagaagacttgcctgctagggacctcgcctgctggggacctcgcctgytggggacctcacctgctggggacctcacctgctggggaccttggctgctggaggctgcacctactgaggatgtcggcggtcggggactttacctgctggg

SEQ ID NO: 20712 - DNA, 201 bp, Homo sapiens
gccaaccctctctcttacctgggacctcacacgctgggcttcacggctgccaggagcctctcccctccagaagacttgcctgctagggacctcgcctgctrgggacctcgcctgttggggacctcacctgctggggacctcacctgctggggaccttggctgctggaggctgcacctactgaggatgtcggcggtcgggga

SEQ ID NO: 20713 - DNA, 201 bp, Homo sapiens
gagctggacaaggaccacgcccgctacctgagctactttcgctggcgggagacgctgcggcctcgctccttcagctgggcactggatttctgcaaggcctkctggaaactgcagcaggaatccaggtaccagacggtgcgcagcatagcggcttggttcacctgagaggccggcatggtgcctgggctgccgggaacctca

SEQ ID NO: 20714 - DNA, 201 bp, Homo sapiens
agcatagcggcttggttcacctgagaggccggcatggtgcctgggctgccgggaacctcatctgcctggggcctcacctgctggagtcctttgtggccaaycctctctcttacctgggacctcacacgctgggcttcacggctgccaggagcctctcccctccagaagacttgcctgctagggacctcgcctgctggggac

SEQ ID NO: 20715 - DNA, 201 bp, Homo sapiens
gctggagtcctttgtggccaaccctctctcttacctgggacctcacacgctgggcttcacggctgccaggagcctctcccctccagaagacttgcctgctrgggacctcgcctgctggggacctcgcctgttggggacctcacctgctggggacctcacctgctggggaccttggctgctggaggctgcacctactgagga

SEQ ID NO: 20716 - DNA, 111 bp, Homo sapiens
caaagtgctgggattacaagtgtgagccaccgtacctggcctgctattacctcttaattagaatttgagttgtattcagtcttttgtcactaaataaatgyttctataaac

SEQ ID NO: 20717 - DNA, 201 bp, Homo sapiens
gacttcctttatgaaattttccataacctcttcctggagtattacaagatctccaacatctcataaactaattgtgatattagtggaaccataagcaaatrtatatttttagtggaaatagattatgaatgaaagccaagcaccttactttaaagccaaaatatgagattttcattaaaaacattggtcataatagggaga

SEQ ID NO: 20718 - DNA, 201 bp, Homo sapiens
tggaccttgaaatcttcaaccttcctaatgtggagatcagcaaagatttgtctgcctctgctcattccaaggtggtgatcttcacagtcaactctttgggwagttctcagtcgtaccttgatgtggtacagagcaatgtggatatgttcagagcccttgtcccagctctgggacattatagtcaacacagtgtcctgctcg

SEQ ID NO: 20719 - DNA, 201 bp, Homo sapiens; identical to SEQ ID NO: 20717

SEQ ID NO: 20720 - DNA, 201 bp, Homo sapiens; identical to SEQ ID NO: 20718

SEQ ID NO: 20721 - DNA, 141 bp, Homo sapiens
agcagtggagccaactataggctcaaactagccatcaaagytgccatgatcacaggatctacaaacaggttcggcttcgccattgcccagcgtctggcccacgatagggcccacgtagtcatcagcagcgggaagcagcag

SEQ ID NO: 20722 - DNA, 201 bp, Homo sapiens
gtttgctatgagatctggaaatgcagaaggcgtatttggaccagttaaaaacccctggagttattcaaaacaatatagagaaaagaggaagcagaatctcyactttgagaatgaagattcagactggctgataactggaggaagctcaggtgggagtgcagttgccatatcggcattcacatgctatgcggctttaggatc

SEQ ID NO: 20723 - DNA, 201 bp, Homo sapiens
gtaatgctatagtagttccgaaattgttggattagggagctctactaatggaaaaacaaatttagatgagtttgctatgagatctggaaatgcagaaggcrtatttggaccagttaaaaacccctggagttattcaaaacaatatagagaaaagaggaagcagaatctccactttgagaatgaagattcagactggctgat

SEQ ID NO: 20724 - DNA, 201 bp, Homo sapiens
ggacttcactatggatcgggaagtgcacaaaatcaaccctgagtgtaaatctgtccaccattgcatcaccaagtcccaggagcaaatggaaggaaaagtgyaggtgcccatcttcaagggccaggtgcacatcctcagccaggagtctctactctctctctacaaggaggagctggtgagcgtcaacgtgcaggggaatta

SEQ ID NO: 20725 - DNA, 182 bp, Homo sapiens
aaaaaaggggtccccgtgaaagtgaccatcaagatggcaccacctcaccagacctccttggagctcttcgtgtacctgaacraagtcacgggcaagcacggcatgggctgtattgacattatggagaactgcttcattagaataaagtccagaggtatctacaagaccccagcaggcaccat

SEQ ID NO: 20726 - DNA, 201 bp, Homo sapiens
tgcatcaccaagtcccaggagcaaatggaaggaaaagtgcaggtgcccatcttcaagggccaggtgcacatcctcagccaggagtctctactctctctctrcaaggaggagctggtgagcgtcaacgtgcaggggaattatgagccaatcgatgccaccggtttcatcaacatcaattacctcagactgaaggaatatcat

SEQ ID NO: 20727 - DNA, 105 bp, Homo sapiens
aacgtgcaggggaattatgagccaatcgatgccaccggtttcatcaacatcaattacctcagactgaaggaatatcattatttccagagtaaggtcactgycaaa

SEQ ID NO: 20728 - DNA, 169 bp, Homo sapiens
ccaggtgcacatcctcagccaggagtctctactctctctctacaaggaggagctggtgagcgtcaacgtgcaggggaattatgagccaatcgatgccaccrgtttcatcaacatcaattacctcagactgaaggaatatcattatttccagagtaaggtcactgtcaaa

SEQ ID NO: 20729 - DNA, 201 bp, Homo sapiens
aaaattggcatggaaagccagtgccaaaagaaagagcagatgcaattgtcaaattaattgagagtcagatacagaccaatgagaatctcataccaaaatcrcctgtggaagactcacctcaaataagcatcacagatataaaaatgacctccccacctgcttacaaagttggtgacaagatagctactcagaaaacatatg

SEQ ID NO: 20730 - DNA, 201 bp, Homo sapiens
agccagtgccaaaagaaagagcagatgcaattgtcaaattaattgagagtcagatacagaccaatgagaatctcataccaaaatcgcctgtggaagactcmcctcaaataagcatcacagatataaaaatgacctccccacctgcttacaaagttggtgacaagatagctactcagaaaacatatggtttggctctggcta

SEQ ID NO: 20731 - DNA, 201 bp, Homo sapiens
gcggccgagttatcacagtggaggatcactacagggaaggtggcattggagaagctgtttgtgcagctgtctccagggagcctgatatccttgttcatcawctggcagtgtcaggagtgcctcaacgtgggaaaactagtgaattgctggatatgtttggaatcagtaccagacacattatagcagccgtaacacttactt

SEQ ID NO: 20732 - DNA, 201 bp, Homo sapiens
atttctcaagccaatatcaaccttattggttcccactgtggggtatccactggagaagatggagtctcccagatggccctggaggatctagccatgttccraagcattcccaattgtactgttttctatccaagtgatgccatctcgacagagcatgctatttatctagccgccaataccaagggaatgtgcttcattcga

SEQ ID NO: 20733 - DNA, 201 bp, Homo sapiens
ctatcctctatgctgcttgggtggaggtgggtgacatcagtgaatctgacttgctgaacctgaggaaacttcacagcgacttggagagacaccctaccccscgattgccgtttgttgacgtggcaacagggtccctaggtcagggattaggtactgcatgtggaatggcttatactggcaagtaccttgacaaggccagct

SEQ ID NO: 20734 - DNA, 201 bp, Homo sapiens
caacagggtccctaggtcagggattaggtactgcatgtggaatggcttatactggcaagtaccttgacaaggccagctaccgggtgttctgccttatgggrgatggcgaatcctcagaaggctctgtgtgggaggcttttgcttttgcctcccactacaacttggacaatctcgtggcggtcttcgacgtgaaccgcttgg

SEQ ID NO: 20735 - DNA, 201 bp, Homo sapiens
agtgtattattgctgaacaaaacatggtaagtgtggcactaggctgtgctacacgtggtcgaaccattgcttttgctggtgcttttgctgccttttttacyagagcattcgatcagctccgaatgggagccatttctcaagccaatatcaaccttattggttcccactgtggggtatccactggagaagatggagtctccc

SEQ ID NO: 20736 - DNA, 201 bp, Homo sapiens
actgagagcaaccatggaagctgatcctcttacaactgcgtgagaagttgccaaggaactcagcgttgagcattctagagtctttcagcatttgaagcaarttgggaaggtgaaaaagctggataagtggatgcctcatgagatgagtgaaaatttaaaaaaaaataaaataaaaaacaaaattgtcattttgaagtgtca

SEQ ID NO: 20737 - DNA, 201 bp, Homo sapiens
cttaatttcaaatctgtaattaccatacataaactgtctcattatacgtatgcatttttttagtttgtttttgtttggtataaattaatttgttaattaartatttcttaagtataaaccttatgaactacagtggagctacactcattgaaatgtaatttcagttctaaaaagatgtaataatcattttagaattaaaat

SEQ ID NO: 20738 - DNA, 163 bp, Homo sapiens
aatattaaaggtgaaaattgtataaattactttgattccattttaagtggagacatatttcagtgatttttagtaacctttaaaaatgtataatgacttttaaaatttgtagaattgaaaagacgctaataaaaatttattatttatttgtcatgactcaaaa

SEQ ID NO: 20739 - DNA, 168 bp, Homo sapiens
cccgcgctggaggcgggcgagggccgaggggcagctagggagcgcggcttgaggagggcggggccgcyccgcaggcccgccagtgtcctcagctgcctccgcgcgccaaagtcaaaccccgacacccgccggcgggccggtgagctcactagctgacccggcaggtca

SEQ ID NO: 20740 - DNA, 164 bp, Homo sapiens
gaatattaaaggtgaaaattgtataaattactttgattccattttaagtggagacatatttcagtgatttttagtaacctttaaaaatgtataatgacttttaaaatttgtagaattgaaaagacgctaataaaaatttattatttatttgtcatgactcaaaa

SEQ ID NO: 20741 - DNA, 201 bp, Homo sapiens
ttcatattaatataagtttctttagaaaacccaagtttttaatcgtttttgttttaaggaaaaaagatttttaaaatgaatcttatgcaaaactttttgaycagtttcttttcttttgttttttttttaaaaaagacatttaaagacaaagacattatttctcatagcaggaaatgtagaggtagatggttccagtatcag

SEQ ID NO: 20742 - DNA, 201 bp, Homo sapiens
ttctgggtggaaacatcttggtggccaccgatgcagctggagggctcaaccccaagtctgaggttggaaggatcatgcttctctgtgatcacatcaagctmcttggtttctgtgatcagaactctcccaaagggcccaatgatgaaaggtttggagttcattttcctgccacgtctgatgcctacaactggacaatgaagc

SEQ ID NO: 20743 - DNA, 201 bp, Homo sapiens
cccatccaaggagggtgacatcctaaagcctgaagaagaaacaatggagttcccggagggggacaaggtgaaagtgatcctgagcaaggaggactttgagrcatcactgaaggaggccggggagaggctggtggctgtggacttctcggccacgtggtgtgggccctgcaggaccatcagaccattcttccatgccctgtc

SEQ ID NO: 20744 - DNA, 190 bp, Homo sapiens
aggatgtggtgttcctggaggtggacgctgacaactgtgaggaggtggtgagagagtgcgccatcatgtgtgtcccaacctttcagttttataaaaaagargaaaaggtggatgaactttgcggcgcccttaaggaaaaacttgaagcagtcattgcagaattaaagtaaacatgtattctgaaaacatt

SEQ ID NO: 20745 - DNA, 201 bp, Homo sapiens
ggaccatcagaccattcttccatgccctgtctgtgaagcatgaggatgtggtgttcctggaggtggacgctgacaactgtgaggaggtggtgagagagtgygccatcatgtgtgtcccaacctttcagttttataaaaaagaagaaaaggtggatgaactttgcggcgcccttaaggaaaaacttgaagcagtcattgcag

SEQ ID NO: 20746 - DNA, 201 bp, Homo sapiens
tccaagtccccagaagaagccatccagcccaaggagggtgacctccccaagtccctagaggaagccatccagcccaaggagggtgacatccccaagtcccyagaggaagccatccagcctaaggagggtgacatccccaagtccccagaagaaaccatccagcccaagaagggtgacatccccaagtccccagaagaagcc

SEQ ID NO: 20747 - DNA, 201 bp, Homo sapiens
aaatgaagcccagccagcccaaggagggtgacatctccaagtccccagaagaagccatccagcccaaggagggtgacctccccaagtccctagaggaagcyatccagcccaaggagggtgacatccccaagtccctagaggaagccatccagcctaaggagggtgacatccccaagtccccagaagaaaccatccagccca

SEQ ID NO: 20748 - DNA, 201 bp, Homo sapiens
ctgagcaaggaggactttgaggcatcactgaaggaggccggggagaggctggtggctgtggacttctcggccacgtggtgtgggccctgcaggaccatcasaccattcttccatgccctgtctgtgaagcatgaggatgtggtgttcctggaggtggacgctgacaactgtgaggaggtggtgagagagtgcgccatcatg

SEQ ID NO: 20749 - DNA, 201 bp, Homo sapiens
ctcagcaaatgaagcccagccagcccaaggagggtgacatctccaagtccccagaagaagccatccagcccaaggagggtgacctccccaagtccctagargaagccatccagcccaaggagggtgacatccccaagtccctagaggaagccatccagcctaaggagggtgacatccccaagtccccagaagaaaccatcc

SEQ ID NO: 20750 - DNA, 201 bp, Homo sapiens
ccaagtcctcagaagaaaccatccagcccaaggagggtgacatccccaaggccccagaagaaaccatccaatccaagaaggaggacctccccaagtcctcrgaaaaagccatccagcccaaagagagtaacatccccaagtcctcagcaaaacccatccagcccaagctgggcaatattcccaaggcctcagtgaagccca

SEQ ID NO: 20751 - DNA, 201 bp, Homo sapiens
acatccccaagtccccagaagaagccatccagcccaaggagggtgacattcccaagtctccaaaacaagccatccagcccaaggagggtgacattcccaartccctagaggaagccatcccacccaaggagattgacatccccaagtccccagaagaaaccatccagcccaaggaggatgacagccccaagtccctagaag

SEQ ID NO: 20752 - DNA, 201 bp, Homo sapiens
cccaaggagggtgacatccccaagtccctagaggaagccatccagcctaaggagggtgacatccccaagtccccagaagaaaccatccagcccaagaaggrtgacatccccaagtccccagaagaagccatccagcccaaggagggtgacattcccaagtctccaaaacaagccatccagcccaaggagggtgacattccc

SEQ ID NO: 20753 - DNA, 201 bp, Homo sapiens
cctagaggaagccatccagcccaaggagggtgacatccccaagtccctagaggaagccatccagcctaaggagggtgacatccccaagtccccagaagaarccatccagcccaagaagggtgacatccccaagtccccagaagaagccatccagcccaaggagggtgacattcccaagtctccaaaacaagccatccagcc

SEQ ID NO: 20754 - DNA, 201 bp, Homo sapiens
tcctaaagcctgaagaagaaacaatggagttcccggagggggacaaggtgaaagtgatcctgagcaaggaggactttgaggcatcactgaaggaggccggrgagaggctggtggctgtggacttctcggccacgtggtgtgggccctgcaggaccatcagaccattcttccatgccctgtctgtgaagcatgaggatgtgg

SEQ ID NO: 20755 - DNA, 201 bp, Homo sapiens; identical to SEQ ID NO: 20743

SEQ ID NO: 20756 - DNA, 201 bp, Homo sapiens
aggatgtggtgttcctggaggtggacgctgacaactgtgaggaggtggtgagagagtgcgccatcatgtgtgtcccaacctttcagttttataaaaaagargaaaaggtggatgaactttgcggcgcccttaaggaaaaacttgaagcagtcattgcagaattaaagtaaacatgtattctgaaaacattgcagacagtca

SEQ ID NO: 20757 - DNA, 201 bp, Homo sapiens; identical to SEQ ID NO: 20745

SEQ ID NO: 20758 - DNA, 201 bp, Homo sapiens; identical to SEQ ID NO: 20746

SEQ ID NO: 20759 - DNA, 201 bp, Homo sapiens
cagtgaagcccagccagcccaaggagggtgacatctccaagtccccagaagaagccatccagcccaaggagggtgacctccccaagtccctagaggaagcyatccagcccaaggagggtgacatccccaagtccctagaggaagccatccagcctaaggagggtgacatccccaagtccccagaagaaaccatccagccca

SEQ ID NO: 20760 - DNA, 201 bp, Homo sapiens; identical to SEQ ID NO: 20748

SEQ ID NO: 20761 - DNA, 201 bp, Homo sapiens
aggcctcagtgaagcccagccagcccaaggagggtgacatctccaagtccccagaagaagccatccagcccaaggagggtgacctccccaagtccctagargaagccatccagcccaaggagggtgacatccccaagtccctagaggaagccatccagcctaaggagggtgacatccccaagtccccagaagaaaccatcc

SEQ ID NO: 20762 - DNA, 201 bp, Homo sapiens; identical to SEQ ID NO: 20750

SEQ ID NO: 20763 - DNA, 201 bp, Homo sapiens; identical to SEQ ID NO: 20752

SEQ ID NO: 20764 - DNA, 201 bp, Homo sapiens
cctctgacttttttacttaaatttgttcttattttcaatattgaacaagccagcctttaacatgactctaccagcttagacatataggcctagactttaaygaattaacctaatcacagtgctaccagagtcttgtttggacaacttagtgagccccagatgtctatgagcccaaagtcccaggtctgaaccatagacaga

SEQ ID NO: 20765 - DNA, 201 bp, Homo sapiens
aaagtcccaggtctgaaccatagacagaggcttagtccagagtgggtttttaaaaatgaataaaaccagcttcattaggtataattgatatacaaagaacwgcacatatttaatggagggagttggatgagtttggatgtgttgcatatgcccttgattgccatctccaccatcaaagtaattaacaccttcattgcctcc

SEQ ID NO: 20766 - DNA, 201 bp, Homo sapiens
ctgatttgttggtgacggaagtgagatcaaggccgcttccagatttcaagtccagggctctacctactataatctacgctcacaaaatctcagacaagagrtcggaacttcaggtttctcggaggttgaagtcctctggatctttgctgcctttatgacatcagtgccctgatggcagagttcctggttcgtctccctggt

SEQ ID NO: 20767 - DNA, 201 bp, Homo sapiens; identical to SEQ ID NO: 20751

SEQ ID NO: 20768 - DNA, 201 bp, Homo sapiens
agattcacatcttagctaacctccttcttgtgccggaagtgctacggaggccttgggaaattcagtgggttttccaagatctgatttgttggtgacggaartgagatcaaggccgcttccagatttcaagtccagggctctacctactataatctacgctcacaaaatctcagacaagagatcggaacttcaggtttctcg

SEQ ID NO: 20769 - DNA, 201 bp, Homo sapiens; identical to SEQ ID NO: 20753

SEQ ID NO: 20770 - DNA, 201 bp, Homo sapiens; identical to SEQ ID NO: 20754

SEQ ID NO: 20771 - DNA, 201 bp, Homo sapiens
cacccgcgacccaacgcggctacggcccgtgtacgcgcgcgccgggctgctgagccaggccaagggctcggcctacctggaggcgggaggcaccaaggtgstgtgtgccgtgtcgggcccgcgacaggccgagggcggcgagcgcggcggcggcccggccggagcaggcggcgaggccccggccgcgctgcgcggtcgcct

SEQ ID NO: 20772 - DNA, 201 bp, Homo sapiens
gcacccgcgacccaacgcggctacggcccgtgtacgcgcgcgccgggctgctgagccaggccaagggctcggcctacctggaggcgggaggcaccaaggtsctgtgtgccgtgtcgggcccgcgacaggccgagggcggcgagcgcggcggcggcccggccggagcaggcggcgaggccccggccgcgctgcgcggtcgcc

SEQ ID NO: 20773 - DNA, 201 bp, Homo sapiens
caagagctatttctgattatactcaggtgctagaggggaaggagaggaagaacaaaacttattacaagtttgagaagctggccatagaccctaatacatgygaagtgaacacaaaatacaaagcagtaagaaccagcatctacaccaaacatctggaaaggtggttgaaatactttccaattgagcaatttcatgtcgtcg

SEQ ID NO: 20774 - DNA, 201 bp, Homo sapiens
attatggtaagggcattgagtggtataggaaaaagatgcctttttcctaccctcagcaaatcacaattgaaaagagcccagcatattttatcacagaggargttccagaaaggatttacaaaatgaactcatccatcaagttgttgatcattgtcagggagccaaccacaagagctatttctgattatactcaggtgctag

SEQ ID NO: 20775 - DNA, 201 bp, Homo sapiens
gaaaaaaaaaaaattgctgtctgcatagtcgcatcttttaagctatttacaaaagagaagaggtggtggtattgggggaaagtgacttcagctattctcaragagttagtcttcctttgattcagaatttgtcacccgccattttcatagatttaagccaaaagataaatgtgtgaaaatgtaccaatggctgcgaagctt

SEQ ID NO: 20776 - DNA, 201 bp, Homo sapiens
cttcgcctcccgcctgtactaccactggtgcaagccccagcagaaggggctgcggcttctgtgtggatcccaggtcccggtggaggtcatgggcttcccaragtttgctgactgctgggaaaactttgtggaccacgagaaaccgctttccttcaacccctataagatgttagaggagctagataaaaacagtcgagccat

SEQ ID NO: 20777 - DNA, 201 bp, Homo sapiens
gcaagtctgctaaggaagctgtggccagaagcacagatcagaaacacgatggctctgttaacagccgaaacattccgcttacagtttaacaacaagcgcckcctcagaaggccttactacccgaggaaggccctcttgtgttaccagctgacgccgcagaatggctccacgcccaccagaggctactttgaaaacaagaaa

SEQ ID NO: 20778 - DNA, 201 bp, Homo sapiens
agccataaagcgacggcttgacaggataaagcagtcctgaagtgtggatgttttagagaatgacttaagaagtttgcagcttggacccgtatcccactcaytatcaagaagcaactcaagatgactttccctggggcatgtcagttgcctcatagcctgctggtcctgtaagcaagcactaagctccacagtgccagttcc

SEQ ID NO: 20779 - DNA, 201 bp, Homo sapiens
gcagtgctaccaagtcacctgttacctcacgtggagcccctgctcctcctgtgcctgggagctggttgacttcatcaaggctcacgaccatctgaacctgsgcatcttcgcctcccgcctgtactaccactggtgcaagccccagcagaaggggctgcggcttctgtgtggatcccaggtcccggtggaggtcatgggctt

SEQ ID NO: 20780 - DNA, 201 bp, Homo sapiens
gcttacagtttaacaacaagcgccgcctcagaaggccttactacccgaggaaggccctcttgtgttaccagctgacgccgcagaatggctccacgcccacsagaggctactttgaaaacaagaaaaagtgccatgcagaaatttgctttattaacgagatcaagtccatgggactggacgaaacgcagtgctaccaagtca

SEQ ID NO: 20781 - DNA, 201 bp, Homo sapiens
gtcagttgcctcatagcctgctggtcctgtaagcaagcactaagctccacagtgccagttccttgccccaacctggccccatccaagtacagaagaccttyctttcctcctttttccatattgctttctgttctaagtgggtgaataattttataattgaaaaaataaagataaagtctgtaaatccagccgggtacggtg

SEQ ID NO: 20782 - DNA, 201 bp, Homo sapiens
ctgtgcctgggagctggttgacttcatcaaggctcacgaccatctgaacctgggcatcttcgcctcccgcctgtactaccactggtgcaagccccagcagraggggctgcggcttctgtgtggatcccaggtcccggtggaggtcatgggcttcccagagtttgctgactgctgggaaaactttgtggaccacgagaaacc

SEQ ID NO: 20783 - DNA, 201 bp, Homo sapiens
gggaaaactttgtggaccacgagaaaccgctttccttcaacccctataagatgttagaggagctagataaaaacagtcgagccataaagcgacggcttgasaggataaagcagtcctgaagtgtggatgttttagagaatgacttaagaagtttgcagcttggacccgtatcccactcactatcaagaagcaactcaagat

SEQ ID NO: 20784 - DNA, 201 bp, Homo sapiens
gtgcctgggagctggttgacttcatcaaggctcacgaccatctgaacctgggcatcttcgcctcccgcctgtactaccactggtgcaagccccagcagaasgggctgcggcttctgtgtggatcccaggtcccggtggaggtcatgggcttcccagagtttgctgactgctgggaaaactttgtggaccacgagaaaccgc

SEQ ID NO: 20785 - DNA, 201 bp, Homo sapiens; identical to SEQ ID NO: 20776

SEQ ID NO: 20786 - DNA, 201 bp, Homo sapiens
cccctgccatccccactcccacccaggctctttgccctgctaaacacgatggctctgttaacagccgaaacattccgcttacagtttaacaacaagcgcckcctcagaaggccttactacccgaggaaggccctcttgtgttaccagctgacgccgcagaatggctccacgcccaccagaggctactttgaaaacaagaaa

SEQ ID NO: 20787 - DNA, 201 bp, Homo sapiens
acccaatctactggaacatagcacccaatagcagtcctgaagtgtggatgttttagagaatgacttaagaagtttgcagcttggacccgtatcccactcaytatcaagaagcaactcaagatgactttccctggggcatgtcagttgcctcatagcctgctggtcctgtaagcaagcactaagctccacagtgccagttcc

SEQ ID NO: 20788 - DNA, 201 bp, Homo sapiens; identical to SEQ ID NO: 20779

SEQ ID NO: 20789 - DNA, 201 bp, Homo sapiens; identical to SEQ ID NO: 20780

SEQ ID NO: 20790 - DNA, 133 bp, Homo sapiens
gtcagttgcctcatagcctgctggtcctgtaagcaagcactaagctccacagtgccagttccttgccccaacctggccccatccaagtacagaagaccttyctttcctcctttttccatattgctttctgttc

SEQ ID NO: 20791 - DNA, 201 bp, Homo sapiens; identical to SEQ ID NO: 20782

SEQ ID NO: 20792 - DNA, 201 bp, Homo sapiens
gggaaaactttgtggaccacgagaaaccgctttccttcaacccctataagatgttagaggagctagataaaaacagtcgagccataaagcgacggcttgasaggataaagattccaggggtacgtgcgcagggtcgttacatggatatattgtgtgatgctgaggtctgagtcacccaatctactggaacatagcacccaa

SEQ ID NO: 20793 - DNA, 201 bp, Homo sapiens; identical to SEQ ID NO: 20784

SEQ ID NO: 20794 - DNA, 164 bp, Homo sapiens
agtctgaggcccagaggacggggggcccagcggtaagggatgtcccgcactcccttagccattgccttggaccaaaccacgtggtttgcagcttttctacragccaggggggaggttcccttggattaaggttccaaataaagcacatggtttccagagcagcg

SEQ ID NO: 20795 - DNA, 201 bp, Homo sapiens
tctttgtccgcgagcccttcgagaggctggtgtccgccttccgcgacaagtttgagcaccccaacagctactatcacccggtcttcggcaaggccatcctkgcccggtaccgcgccaatgcctctcgggaggccctgcggaccggctctggggtgcgttttcccgagttcgtccagtacctgctggacgtgcaccggcccg

SEQ ID NO: 20796 - DNA, 201 bp, Homo sapiens
gctgctccaattggaagcgggtgctcatggtgctggccggcctggcctcgtccactgccgacatccagcacaacaccgtccactatggcagcgctctcaarcgcctggacaccttcgaccgccagggtatcttgcaccgtctcagcacctacaccaagatgctctttgtccgcgagcccttcgagaggctggtgtccgcct

SEQ ID NO: 20797 - DNA, 164 bp, Homo sapiens; identical to SEQ ID NO: 20794

SEQ ID NO: 20798 - DNA, 201 bp, Homo sapiens; identical to SEQ ID NO: 20795

SEQ ID NO: 20799 - DNA, 201 bp, Homo sapiens; identical to SEQ ID NO: 20796

SEQ ID NO: 20800 - DNA, 201 bp, Homo sapiens
ttttaatgagctgaaatcaagaagagccccatctcagaagtaagcgagagccgcgcgcagggaagaactagtctgacaaaacagaaggaggtggtgctctygggggactgggctgtaggctcccaccgatcgatcggcgacgagcagatgagttcccgaggccaggaggctgaggagggaagccagggctcagagaccagc

SEQ ID NO: 20801 - DNA, 164 bp, Homo sapiens; identical to SEQ ID NO: 20794

SEQ ID NO: 20802 - DNA, 201 bp, Homo sapiens; identical to SEQ ID NO: 20795

SEQ ID NO: 20803 - DNA, 201 bp, Homo sapiens; identical to SEQ ID NO: 20796

SEQ ID NO: 20804 - DNA, 201 bp, Homo sapiens
gtcctgctgggaggtcctgtggtgactgcccgcctacttgctggtatcctccaggtgctatgccctgggcactgtgggttatggagcggccacgttgcctratagcaaggacaccatacatgagctgcataatcagaaccaggagcccaaagctgactcagcccacagacaccctaccctcattcctgcgcagacagccct

SEQ ID NO: 20805 - DNA, 201 bp, Homo sapiens
tgcccttgtcctgctgggaggtcctgtggtgactgcccgcctacttgctggtatcctccaggtgctatgccctgggcactgtgggttatggagcggccackttgcctgatagcaaggacaccatacatgagctgcataatcagaaccaggagcccaaagctgactcagcccacagacaccctaccctcattcctgcgcaga

SEQ ID NO: 20806 - DNA, 201 bp, Homo sapiens
cagcccaagtgtgtgcaggccccagtccttgttccagcagtccccacccactggaagaagctggccccctgcctgtgggggcccaggccagtccctcatcracattgactttcacagggtccggcggaactctaccctagggcccttcatcttccgaggctatgactcagcacctccaggcccttggaccctggagaatga

SEQ ID NO: 20807 - DNA, 201 bp, Homo sapiens
acctggagatttgggaggctgggctgctgttgcctgtctaccgcgcactgcagctgcacttcaactgccggcggtgggggggcccgaggcgagcagactcrgagcacagcctggacaggcagcgccaggctatggaggtagactcgggaacaaggtggggtggccggagtgctcccacggaggtgagagagagcaagatgc

SEQ ID NO: 20808 - DNA, 201 bp, Homo sapiens
gatgcacgtggtccacagtaacacaaagtaccagagcatggaggaggcaccacgccacggtgatgggctcgagtgcaggccctgctgctggagaacccctygcacttggagcccctcccaggagcaggactgtagcaacaccaacttctgcgccatagtgtcgggcttgaggaaggtgcctgagccagtgaatctgatgtc

SEQ ID NO: 20809 - DNA, 201 bp, Homo sapiens
cagtagactgactgggcatcaggtgcaagtgcgtgactgtccccctgtgtgtgagtctgggcctgctgtgattgccggtcccgagtcagtcaaggctggtrtgcccgttactgtggccagcccaagtgtgtgcaggccccagtccttgttccagcagtccccacccactggaagaagctggccccctgcctgtgggggccc

SEQ ID NO: 20810 - DNA, 201 bp, Homo sapiens
gactgactgggcatcaggtgcaagtgcgtgactgtccccctgtgtgtgagtctgggcctgctgtgattgccggtcccgagtcagtcaaggctggtgtgccygttactgtggccagcccaagtgtgtgcaggccccagtccttgttccagcagtccccacccactggaagaagctggccccctgcctgtgggggcccaggcc

SEQ ID NO: 20811 - DNA, 108 bp, Homo sapiens
acggcagccccctgctcttcccccaccctagcagttgtgcactgcgctctgatgggcctggggctcagcctgtggttctgtcaaccgtgggcgaccctccrtgtgaaa

SEQ ID NO: 20812 - DNA, 196 bp, Homo sapiens
tttctgtctgtagtcgtctgccccagtagactgactgggcatcaggtgcaagtgcgtgactgtccccctgtgtgtgagtctgggcctgctgtgatygccggtcccgagtcagtcaaggctggtgtgcccgttactgtggccagcccaagtgtgtgcaggccccagtccttgttccagcagtccccacccactggaa

SEQ ID NO: 20813 - DNA, 155 bp, Homo sapiens
tttctgtctgtagtcgtctgccccagtagactgactgggcatcaggtgcaagtgygtgactgtccccctgtgtgtgagtctgggcctgctgtgattgccggtcccgagtcagtcaaggctggtgtgcccgttactgtggccagcccaagtgtgtg

SEQ ID NO: 20814 - DNA, 201 bp, Homo sapiens
cctcgcacttggagcccctcccaggagcaggactgtagcaacaccaacttctgcgccatagtgtcgggcttgaggaaggtgcctgagccagtgaatctgakgtccaccttcccgctggcgtcgatgcggcccaacacctcgagctactgtcgcttcgctgggtcgctgaccccgcctgactgcgagcccacggtgctctgg

SEQ ID NO: 20815 - DNA, 201 bp, Homo sapiens
agagcatggaggaggcaccacgccacggtgatgggctcgagtgcaggccctgctgctggagaacccctcgcacttggagcccctcccaggagcaggactgyagcaacaccaacttctgcgccatagtgtcgggcttgaggaaggtgcctgagccagtgaatctgatgtccaccttcccgctggcgtcgatgcggcccaaca

SEQ ID NO: 20816 - DNA, 201 bp, Homo sapiens
gctgggtcgctgaccccgcctgactgcgagcccacggtgctctggaccgtcttcgaggaccccatacccatccggtgggtgcagatgaccctgttctacascctgccccaggctggaccctcccactttcaccccataccgctcacggcagccccctgctcttcccccaccctagcagttgtgcactgcgctctgatgggc

SEQ ID NO: 20817 - DNA, 201 bp, Homo sapiens
ctgagccagtgaatctgatgtccaccttcccgctggcgtcgatgcggcccaacacctcgagctactgtcgcttcgctgggtcgctgaccccgcctgactgygagcccacggtgctctggaccgtcttcgaggaccccatacccatccggtgggtgcagatgaccctgttctacaccctgccccaggctggaccctcccact

SEQ ID NO: 20818 - DNA, 201 bp, Homo sapiens
gcaggccctgctgctggagaacccctcgcacttggagcccctcccaggagcaggactgtagcaacaccaacttctgcgccatagtgtcgggcttgaggaargtgcctgagccagtgaatctgatgtccaccttcccgctggcgtcgatgcggcccaacacctcgagctactgtcgcttcgctgggtcgctgaccccgcctg

SEQ ID NO: 20819 - DNA, 201 bp, Homo sapiens
gagagcaagatgcacgtggtccacagtaacacaaagtaccagagcatggaggaggcaccacgccacggtgatgggctcgagtgcaggccctgctgctggakaacccctcgcacttggagcccctcccaggagcaggactgtagcaacaccaacttctgcgccatagtgtcgggcttgaggaaggtgcctgagccagtgaat

SEQ ID NO: 20820 - DNA, 201 bp, Homo sapiens
cccccccccaccccaaaggccccagtccttgttccagcagtccccacccactggaagaagctggccccctgcctgtgggggcccaggccagtccctcatcracattgactttcacagggtccggcggaactctaccctagggcccttcatcttccgaggctatgactcagcacctccaggcccttggaccctggagaatga

SEQ ID NO: 20821 - DNA, 201 bp, Homo sapiens
agccacacaagtcagcaccctgtggagcaggactgtagcaacaccaacttctgcgccatagtgtcgggcttgaggaaggtgcctgagccagtgaatctgakgtccaccttcccgctggcgtcgatgcggcccaacacctcgagctactgtcgcttcgctgggtcgctgaccccgcctgactgcgagcccacggtgctctgg

SEQ ID NO: 20822 - DNA, 180 bp, Homo sapiens
ttcgctgggtcgctgaccccgcctgactgcgagcccacggtgctctggaccgtcttcgaggaccccatacccatccggtgggtgcaggtggagccaccgtyccccctcgccccccacacccctccccgggccttgcctggctcctcccgcaggcgctgcccctctcccaccccgttttga

SEQ ID NO: 20823 - DNA, 201 bp, Homo sapiens
tagggcccttcatcttccgaggctatgactcagcacctccaggcccttggaccctggagaatgacagccacacaagtcagcaccctgtggagcaggactgyagcaacaccaacttctgcgccatagtgtcgggcttgaggaaggtgcctgagccagtgaatctgatgtccaccttcccgctggcgtcgatgcggcccaaca

SEQ ID NO: 20824 - DNA, 201 bp, Homo sapiens
ctgagccagtgaatctgatgtccaccttcccgctggcgtcgatgcggcccaacacctcgagctactgtcgcttcgctgggtcgctgaccccgcctgactgygagcccacggtgctctggaccgtcttcgaggaccccatacccatccggtgggtgcaggtggagccaccgtcccccctcgccccccacacccctccccggg

SEQ ID NO: 20825 - DNA, 201 bp, Homo sapiens
gcccttggaccctggagaatgacagccacacaagtcagcaccctgtggagcaggactgtagcaacaccaacttctgcgccatagtgtcgggcttgaggaargtgcctgagccagtgaatctgatgtccaccttcccgctggcgtcgatgcggcccaacacctcgagctactgtcgcttcgctgggtcgctgaccccgcctg

SEQ ID NO: 20826 - DNA, 201 bp, Homo sapiens
gcagcgtgcatgccactcatgggcacctggctcttcacctccgtgagcaagatggcgactgtgaagagtgagcttattgagtgcttcacttccgaggagcyctttcatcacagaaaggtctccatcacaggaactggatcagtgggcatggcctgcgctaccagcatcttattaaaaggcttgagtgatgaacttgccttt

SEQ ID NO: 20827 - DNA, 201 bp, Homo sapiens
tgcgctaccagcatcttattaaaaggcttgagtgatgaacttgcctttgtggatcttgatgaaggcaaactgaaaggtgagacaatggatcttcaacatgrcagccctttcatgaaaatgtcaaatattgtttgtagcaaagattaccttgtcacagcaaacccccatctagtgattatcacagcaggtgcacgccgagaa

SEQ ID NO: 20828 - DNA, 201 bp, Homo sapiens
agcttggcctgcgctgcgctgcgatgttagaggagtcagccaggagcccggggaagggaagcacgcccctggggctggtcccagagggcctgatctgcatytgcagcatgaggttctgcccgtttgctgagaggacgcatctggttctgaaggccgagggaatcaggcatgaagtaatctatatcaacctgaaagataagc

SEQ ID NO: 20829 - DNA, 201 bp, Homo sapiens
ccctggggctggtcccagagggcctgatctgcatctgcagcatgaggttctgcccgtttgctgagaggacgcatctggttctgaaggccgagggaatcagkcatgaagtaatctatatcaacctgaaagataagcctgagtggttctttaagaaaaatccctttagtttggtgccagttctggaaaacagtcagggtcagc

SEQ ID NO: 20830 - DNA, 190 bp, Homo sapiens
tgactacgtcatctggccctcgtttgaacggctggaagcaatgaagttaaatgagtgtgtagaacacactccagaacttaaactgtggatggcagccatgrgggaagatcccacagtctcagccctgctcactggtgtgaaggactggcaaggtttcacagagctctacttacagcctggaggcctgtga

SEQ ID NO: 20831 - DNA, 201 bp, Homo sapiens
tggtgccagttctggaaaacagtcagggtcagctgatctacgagtctgccatcacctgtgagtacctggatgaagcatactcagggaagaagctgttgccrgatgacccctatgacaaagcttgccagaagatggtctttgagttgttttctaaggtgccatctttggtaggaagcttccttagaacccaaaataaggaag

SEQ ID NO: 20832 - DNA, 201 bp, Homo sapiens
ctgcccgtttgctgagaggacgcatctggttctgaaggccgagggaatcaggcatgaagtaatctatatcaacctgaaagataagcctgagtggttctttragaaaaatccctttagtttggtgccagttctggaaaacagtcagggtcagctgatctacgagtctgccatcacctgtgagtacctggatgaagcatactc

SEQ ID NO: 20833 - DNA, 201 bp, Homo sapiens
agacaaccttctttggtggcagttccatctctatgattgactacgtcatctggccctcgtttgaacggctggaagcaatgaagttaaatgagtgtgtagamcacactccagaacttaaactgtggatggcagccatgagggaagatcccacagtctcagccctgctcactggtgtgaaggactggcaaggtttcacagagc

SEQ ID NO: 20834 - DNA, 201 bp, Homo sapiens
ttatactaatgcctatgctgtgttctacaaggatgtcagggcttatcgacagctattggaagaatgtgatgtttttaactgggaccaagtttttcaaatamaagggctgcagagtgagttatatgatgtttccaaagcggttgacaattcaaagcagttgaatataaagctaacttccttcaaggctgttcatttttctcc

SEQ ID NO: 20835 - DNA, 201 bp, Homo sapiens
aacttccttcaaggctgttcatttttctcctgtttcatctctgccagataccagtttcctcaaggggccttccccacgactaacctacctgagtgttgccratgcggatctactcaaccggacttggtcccggggaggcaatgaacaatgtctccggtacatcgccaacctcatctcctgcttccctagtgtgtgtgtccg

SEQ ID NO: 20836 - DNA, 172 bp, Homo sapiens
atgttggtgctaaactgttctaccaaattactgatactggagaaaatgttgaagagttgctttcctgaatcwctcaaggtttacggagcggtgatgaacataaatcgtgggaacccctttcaaaaggaagtggtgttggattcatggccggatttcaaagctgttatcaccc

SEQ ID NO: 20837 - DNA, 201 bp, Homo sapiens
tatcgacagctattggaagaatgtgatgtttttaactgggaccaagtttttcaaatacaagggctgcagagtgagttatatgatgtttccaaagcggttgmcaattcaaagcagttgaatataaagctaacttccttcaaggctgttcatttttctcctgtttcatctctgccagataccagtttcctcaaggggccttcc

SEQ ID NO: 20838 - DNA, 147 bp, Homo sapiens
atgttggtgctaaactgttctaccaaattactgatactggagaaaaygttgaagagttgctttcctgaatctctcaaggtttacggagcggtgatgaacataaatcgtgggaacccctttcaaaaggaagtggtgttggattcatgg

SEQ ID NO: 20839 - DNA, 110 bp, Homo sapiens
cctccttcgggtcgccaggccctcgggtgattcagaaattcatcaaatccaaatggcagcgggctctctgtcaggcaggaaacaagccgcaccgaaggctmggcaggttc

SEQ ID NO: 20840 - DNA, 169 bp, Homo sapiens
tgttatctggcccggattccgcaggatggcgggtccaccccagcgcccccactccccgccctccttcgggtcgccaggccctcgggtgattcagaaattcrtcaaatccaaatggcagcgggctctctgtcaggcaggaaacaagccgcaccgaaggctcggcaggttc

SEQ ID NO: 20841 - DNA, 201 bp, Homo sapiens
tgagatgcacaataaaacacttagccagaggtttggcctgcttttggagtcctattgtcgtgcatgtgggatgtatttgaagcacctgaataggcaagtcraggcaatggaaaagctcattaacttaactgacattgtcaaacaggagaagaaggatgaaacacaaaagttgtgtgactctagtctgtgtttgagactctt

SEQ ID NO: 20842 - DNA, 115 bp, Homo sapiens
aaagctcattaacttaactgacattgtcaaacaggagaagaaggatgaaacacaaaagttgtgtgactctagtctgtgtttgagactcttttcactgcagkggggcagagttgtt

SEQ ID NO: 20843 - DNA, 201 bp, Homo sapiens; identical to SEQ ID NO: 20841

SEQ ID NO: 20844 - DNA, 115 bp, Homo sapiens; identical to SEQ ID NO: 20842

SEQ ID NO: 20845 - DNA, 201 bp, Homo sapiens
ggggcgacctaaaacacaaaatacactcatttgtgaaaaatgctctcagccttcaaattttctggatgactataacccccatgtaataatccaaaagcgamttagcaaccaaagtagagtcatttgtgaaaaaagctctccacctttaaatgttccggataactataactcccattcagtaattcaaaagcacaaagaaaa

SEQ ID NO: 20846 - DNA, 201 bp, Homo sapiens
ttcagtaattcaaaagcacaaagaaaagatggcaattgagcgcccctcttcagggagtgactggtctgatgtaggtggaaccacagtcatattctctgaaragaagccattctcactgtgtcttcctgtagtgtcagagcctccatactacgccactgactacaccacttttccacctcattatagtccttggcatgacta

SEQ ID NO: 20847 - DNA, 201 bp, Homo sapiens
cctcaaaaagagaaagagtcagccccagaaatgagcagctcctgtgacaagagggtgactgttaatcctcctgagaaattcagtgaggggcgacctaaaamacaaaatacactcatttgtgaaaaatgctctcagccttcaaattttctggatgactataacccccatgtaataatccaaaagcgacttagcaaccaaagt

SEQ ID NO: 20848 - DNA, 201 bp, Homo sapiens
cctccatactacgccactgactacaccacttttccacctcattatagtccttggcatgactacaccagctcttggttcagcagtaccaagtcttcttgctrtccctccttgggcagcagcagtaacacattgcaggctgggaagagcagctgtagcagcagcagcagaagcaacaacaacatattccagggtgagaggagc

SEQ ID NO: 20849 - DNA, 201 bp, Homo sapiens
agcagctgtagcagcagcagcagaagcaacaacaacatattccagggtgagaggagcagccaccagagcttcctgagtgattattccaccagttttccagygagctccgaaaacacatccagagatctgaagatgacagaggaaggcagatccaagaattcttccttattttactactccagaaatgtggaagcagaggcg

SEQ ID NO: 20850 - DNA, 201 bp, Homo sapiens
caaaagcgacttagcaaccaaagtagagtcatttgtgaaaaaagctctccacctttaaatgttccggataactataactcccattcagtaattcaaaagcrcaaagaaaagatggcaattgagcgcccctcttcagggagtgactggtctgatgtaggtggaaccacagtcatattctctgaagagaagccattctcactg

SEQ ID NO: 20851 - DNA, 201 bp, Homo sapiens
ggccagaagatcccatcctcggtgaagatgaggttgggggtaacaagatgctcagagcctcagctctctttcagagcaacaaagactatcttaggcttgascagacagatagagaatgcaatgatatgatggcacacaagatgaaggagcccagtcagagttgcatagcccagtatgcattcatccatgaggatctaaaca

SEQ ID NO: 20852 - DNA, 201 bp, Homo sapiens
tgaatctggtgcagatctttttcatgttgctgatgctgctgctgggcctggggatgggcctggggttgggacttcatatggctacagcagtcttggaggakagtgatcaaccgctcaatgaattttggtccagtgactcacaggacaaagctgaggccactgaggagggagacggcacccaaaccacagaaacgctggtgc

SEQ ID NO: 20853 - DNA, 191 bp, Homo sapiens
atgaagctgaatctggtgcagatctttttcatgttgctgatgctgctgctgggcctggggatgggcctggggttgggacttcatatggctrcagcagtcttggaggagagtgatcaaccgctcaatgaattttggtccagtgactcacaggacaaagctgaggccactgaggagggagacggcacccaaac

SEQ ID NO: 20854 - DNA, 201 bp, Homo sapiens
agagcctcagctctctttcagagcaacaaagactatcttaggcttgaccagacagatagagaatgcaatgatatgatggcacacaagatgaaggagcccartcagagttgcatagcccagtatgcattcatccatgaggatctaaacacagtcaaagctgtctgtaacagtcctgtcattgcctgtgagctcaagggggga

SEQ ID NO: 20855 - DNA, 201 bp, Homo sapiens
cctgggctcccccgtctacggcccgcaactggagccctttgaaaagttcccggagcgggccccggctcctcgtggggggttcgccgtgccgtcgggggagmctcccaaaggcgtggaccctggggccctggagctggtgacgagcaagatggtggactgcgggcccccggtgcagtgggcggatgtggcgggccagggcgc

SEQ ID NO: 20856 - DNA, 101 bp, Homo sapiens
ytctgttgaagatgcactggacaccagaacacgcccagcccctcaaccagtggccagagcagcacctggacgtctcctccaccaccccgtcgccggcccac

SEQ ID NO: 20857 - DNA, 201 bp, Homo sapiens
cgtgcgggggcccatcggcggcgcccgagtacgcggccggctacggcggggggtacctggcgccgggttagcccctgcccgcgccggcaccgcccaccgcmtatggcttccccacggccgcgccgggtgccgaatccgggctgtcgctgaagcgcaaggccgccgacgaggggcccgagggccgctaccgcaagtacgcgt

SEQ ID NO: 20858 - DNA, 201 bp, Homo sapiens
atccagtgaatcctttgggaagtacacatcgccagtaatgagtgagcatggggacgagcacaggcagctcctctctcacccaatgcaaggccctggactcygtgcagctacctcatccaaccactctgtggacgagcaactgaagaatactgacacgcacctcatcgacctggtaaccaatgagattatcacccaaggacc

SEQ ID NO: 20859 - DNA, 201 bp, Homo sapiens
aaaacattattgggcagatgcatcgctagtcagctgggggccacatttttcaaaattgccggttctggactagtcgccaagtggttaggagaagcagagaraattatccatgcctcttttcttgtggccaggtgtcgccagccctcggtgatttttgttagtgacattgacatgcttctctcctctcaagtgaatgaggaa

SEQ ID NO: 20860 - DNA, 201 bp, Homo sapiens
ccaggtgtcgccagccctcggtgatttttgttagtgacattgacatgcttctctcctctcaagtgaatgaggaacatagtccagtcagtcggatgagaacsgaatttctgatgcaactggacactgtactaacttcggctgaggaccaaatcgtagtaatttgtgccaccagtaaaccagaagaaatagatgaatcccttc

SEQ ID NO: 20861 - DNA, 201 bp, Homo sapiens
gactagatgtggctcatttgtgtcaggaagcagtggtgggccccctccatgccatgccagccacagacctttcagccattatgcccagccagttgaggccygttacatatcaagactttgaaaatgctttctgcaagattcagcctagcatatctcaaaaggagcttgatatgtatgttgaatggaacaaaatgtttggtt

SEQ ID NO: 20862 - DNA, 201 bp, Homo sapiens
actgcatccaacctactaaaaaaatatgcagagaagtattccggcattttggaaggtcctgtggaccgacccgtactcagcaactattcggacacaccatyaggactagtgaacggtcggaaaaatgaaagtgaaccctggcagccttccttgaattcagaagctgtttatcccatgaactgtgttccggatgttatcact

SEQ ID NO: 20863 - DNA, 201 bp, Homo sapiens
atcctcctcagactgctgtggggtctgggtacagccctgggggggcaccgcctccgccttcagcgtacctgccttcaggaattcctgctcccacccccctwccccccaccactgttcctggctacacctaccagggccatggtttgacacctattgcaccgtcggctctgacaaacagttcagcaagttctctcaaaagga

SEQ ID NO: 20864 - DNA, 201 bp, Homo sapiens
gctatcttcagcaacaggtctgagctgttccctctgagaactttagcatgcattgtggggaacacatggagtagggcttaaagtccatttttttttatcamgttataagaagacccccagggtgggtggtgtctctgggttgatcgatttctgtaaagggctctgaccacaactggctttgagaccacgatattggcaggg

SEQ ID NO: 20865 - DNA, 148 bp, Homo sapiens
atggacattacagtatattttgaaagaactggttataagaactctaggaacaaattaaacttggaaatattaactgctatcttcagcaacaggtctgagctgttccctctgagaactttagcatgcattgtggggaacacatggagta

SEQ ID NO: 20866 - DNA, 201 bp, Homo sapiens
agcctctggggtttatttctgggaaggatcagcctcaggtgtcactcattttctgcttgagagagagagtggattctgctacctggatcaccttagaagaygtcagcacatttcaaactaagattttcttaattctgatctccgggaagaaaagaaataacaaaaaaaaatctactcctttactcctgaatcctgaacaat

SEQ ID NO: 20867 - DNA, 201 bp, Homo sapiens
gtttgaggctacagtgagctatgatcgcaccactgcactccagcctgggccacagagccatatcccatcttaaaaaaatggtatgagtcaattgtgtttcwctgctgaagactacctcaactatgtcatctacatatatgattcctcccatgaaaagttcaacattattgtcaaggctaagaaatggaaacttgtctatat

SEQ ID NO: 20868 - DNA, 201 bp, Homo sapiens
aacaaagatgaaacttgaattaccatctcagaagtcaagctgatggagtatgtgataaagtgaatgtacatgtatatacacacacacctccatatatacaygtgtgtatcagtttggtaatatgcaggtaggcattacatgcatatgtatgtagacatatgcatgcatgtatatgtaaaatatatacttttccaagacaaa

SEQ ID NO: 20869 - DNA, 201 bp, Homo sapiens
agtgaaggagcactgcttcattgtggctcagcccttcctaggggcctctgccctttgatgtccttgagctactcttcagctctggaagttgtggacaaacygtaggaatgtatgtgtgcgtgtggtggagtgattgtctgtgaatgacaggccctggctattgattgatgttgcatcaatttagcaaattcatttcctcat

SEQ ID NO: 20870 - DNA, 201 bp, Homo sapiens
cagcttgttttcccacattgtgctgggagatgaccccgaagtgcagcatggcaagccagacccagacatcttcctagcttgtgccaagaggttctctcccsctcctgctatggagaagtgccttgtctttgaagatgctcccaatggggtggaggcggccctggcagctgggatgcaggtggtcatggttcctgacggaaa

SEQ ID NO: 20871 - DNA, 201 bp, Homo sapiens
atagaaatagaatttgatttcagaatgtatgcttggtgagtctcagtgcccaggaacacttttggaataatttatcagacattgaacttctgtgattaatygcttttatagatttactcagtctttaaaattcgtctctgatttgccagagaaaaacggtggtagccatggaaatcgggagtgaaggagcactgcttcatt

SEQ ID NO: 20872 - DNA, 201 bp, Homo sapiens
gccaaacgaagttaaaggaagtgttccccatggctgcgctcatgccaggggcggagaaactcatcatccacctgcggaaacatggcatcccctttgcactrgccaccagctcggggtccgcatcgttcgatatgaagacaagccgccacaaggagttcttcagcttgttttcccacattgtgctgggagatgaccccgaag

SEQ ID NO: 20873 - DNA, 201 bp, Homo sapiens
agtcctgtttttgatgagcactccttgttagctaacatttaaattctttttgtgacctcagaatgtctctggatctttcctcattgactgactctgtgccwcgtcatccatagtttattgttagtatgaacacaactgtaacatttacctggtatctacatccttacctgcattggaaaatgtttgctacctcacaacaac

SEQ ID NO: 20874 - DNA, 201 bp, Homo sapiens
cgttcgatatgaagacaagccgccacaaggagttcttcagcttgttttcccacattgtgctgggagatgaccccgaagtgcagcatggcaagccagacccrgacatcttcctagcttgtgccaagaggttctctccccctcctgctatggagaagtgccttgtctttgaagatgctcccaatggggtggaggcggccctgg

SEQ ID NO: 20875 - DNA, 201 bp, Homo sapiens
tgttccccatggctgcgctcatgccaggggcggagaaactcatcatccacctgcggaaacatggcatcccctttgcactagccaccagctcggggtccgcrtcgttcgatatgaagacaagccgccacaaggagttcttcagcttgttttcccacattgtgctgggagatgaccccgaagtgcagcatggcaagccagacc

SEQ ID NO: 20876 - DNA, 201 bp, Homo sapiens
ttagaggcggcacagattataatagacgtcttgcagctcccgatgtccaaagaggagctggtggaagaaagccaaacgaagttaaaggaagtgttccccayggctgcgctcatgccaggggcggagaaactcatcatccacctgcggaaacatggcatcccctttgcactagccaccagctcggggtccgcatcgttcgat

SEQ ID NO: 20877 - DNA, 201 bp, Homo sapiens
aacatcacttctctcttctagtttttctgaacactggctgggaaatgtaaactgtgtatgcatataagtatatgctttatgtatgcatatgtatgtagatrtgtttatatctatcgtctgcatcactctcctcagtgttgatgtcaacatgcaatgacaactgataaagcgagatggtagttctgcctggtttgcagtctg

SEQ ID NO: 20878 - DNA, 201 bp, Homo sapiens
tccacctgcggaaacatggcatcccctttgcactagccaccagctcggggtccgcatcgttcgatatgaagacaagccgccacaaggagttcttcagcttkttttcccacattgtgctgggagatgaccccgaagtgcagcatggcaagccagacccagacatcttcctagcttgtgccaagaggttctctccccctcctg

SEQ ID NO: 20879 - DNA, 201 bp, Homo sapiens
gagtatgtgataaagtgaatgtacatgtatatacacacacacctccatatatacatgtgtgtatcagtttggtaatatgcaggtaggcattacatgcatakgtatgtagacatatgcatgcatgtatatgtaaaatatatacttttccaagacaaaatggaacatcacttctctcttctagtttttctgaacactggctgg

SEQ ID NO: 20880 - DNA, 201 bp, Homo sapiens; identical to SEQ ID NO: 20868

SEQ ID NO: 20881 - DNA, 201 bp, Homo sapiens; identical to SEQ ID NO: 20869

SEQ ID NO: 20882 - DNA, 201 bp, Homo sapiens; identical to SEQ ID NO: 20870

SEQ ID NO: 20883 - DNA, 201 bp, Homo sapiens; identical to SEQ ID NO: 20871

SEQ ID NO: 20884 - DNA, 201 bp, Homo sapiens; identical to SEQ ID NO: 20872

SEQ ID NO: 20885 - DNA, 201 bp, Homo sapiens; identical to SEQ ID NO: 20873

SEQ ID NO: 20886 - DNA, 201 bp, Homo sapiens; identical to SEQ ID NO: 20874

SEQ ID NO: 20887 - DNA, 201 bp, Homo sapiens; identical to SEQ ID NO: 20875

SEQ ID NO: 20888 - DNA, 201 bp, Homo sapiens; identical to SEQ ID NO: 20876

SEQ ID NO: 20889 - DNA, 201 bp, Homo sapiens; identical to SEQ ID NO: 20877

SEQ ID NO: 20890 - DNA, 201 bp, Homo sapiens; identical to SEQ ID NO: 20878

SEQ ID NO: 20891 - DNA, 201 bp, Homo sapiens; identical to SEQ ID NO: 20879

SEQ ID NO: 20892 - DNA, 201 bp, Homo sapiens
gctacagcacccaggatgagcacttcctgggcatcgaaagcctgtggaaccacaagaactactggatcaacatgcaggattgctggaactgctgcaaggtscctagggagggggagctgggtgaccctgaggaacggctcgctcatttgtttggtggcttggactgtctgtccatctgcatggcggacgtagccagtctgc

SEQ ID NO: 20893 - DNA, 201 bp, Homo sapiens
atgggcagtgcccagatggtgcggggggtctcaggaccggagaggggcagcaagaagagaccacagctgactgtgtccacagcatttgagacccgctgccygaacgggaagaaggtgattcagtacaagagggcaaagctggagaagtgggccccgtacctcaatagcaatggccttgtgagccgcctcaccacctatgag

SEQ ID NO: 20894 - DNA, 201 bp, Homo sapiens
ctagagcaggctgtcctcggagggagacattccatctccagacacccagagacgctccagaatggaggtcctgagggagaaggtggaggaggaggaggagsccgagcgggaggaggcggccgagtgggctgaatgggcgaggatggagaaaatgatgaggccagttgaggtgcggaaggaggaaatcaccttaaagcagga

SEQ ID NO: 20895 - DNA, 201 bp, Homo sapiens
gcacttcctgggcatcgaaagcctgtggaaccacaagaactactggatcaacatgcaggattgctggaactgctgcaaggtgcctagggagggggagctgsgtgaccctgaggaacggctcgctcatttgtttggtggcttggactgtctgtccatctgcatggcggacgtagccagtctgctgctcctgaactcccgtct

SEQ ID NO: 20896 - DNA, 201 bp, Homo sapiens
acatgtgcatcagcttcgaggtggagcccatggagcacaccaagaagctgctctaccagtacgaggccatgatgcacctgaagagggaggagaagctgtcyagacatcaggtctgggagtcagagctggaggtgctggagattctgaagcttcgagaggaagaggaggcggcgcacacactgaccatctccatctatgaca

SEQ ID NO: 20897 - DNA, 201 bp, Homo sapiens
tgacagagtactatcaaggacgcccagacttcctctcctaccgccatgccagcttcggaccccgagtcaagaagctcactctgagcagtgcagagtcaaamccccggcccattgtgaaaatcacagagcggttcttccgcaacccagcgaagcccgcggaggaggacgtggcagagcgcgtgtttctggtcgcggaggagc

SEQ ID NO: 20898 - DNA, 201 bp, Homo sapiens
tctccaagctgcccatttcctacaaaaccaacacacccaaggaggaacacctgctgcaggtggcagacaacttctcccgccagtacagccatctgtgcccrgaccgcgtgcccctcttcctgcaccccctgaacgagtgtgaagtgcccaagttcgtgagcacaaccctccggcccacactgatgccctaccccgagctct

SEQ ID NO: 20899 - DNA, 201 bp, Homo sapiens
aagaagagaccacagctgactgtgtccacagcatttgagacccgctgcccgaacgggaagaaggtgattcagtacaagagggcaaagctggagaagtgggmcccgtacctcaatagcaatggccttgtgagccgcctcaccacctatgaggacttgcagtgtaccaatattttggagataaaggagtggtaccagaaccgg

SEQ ID NO: 20900 - DNA, 201 bp, Homo sapiens
ccactgtgctcaagtaccagaaggggaactgctttgacttcagtacgctgctctgctccatgcttatcggctctggctatgatgcttactgcgtcaacggytacggctcgctggacctgtgccacatggacctgacgcgggaggtgtgcccactcactgtgaagcccaaggaggaagcggagaaggcaaagccggatgccc

SEQ ID NO: 20901 - DNA, 201 bp, Homo sapiens
gtctccgacttcctcaccatggtgcccctgcctgaccctctcaagccgccctcgcacctgtactcctcgaccactgtgctcaagtaccagaaggggaactsctttgacttcagtacgctgctctgctccatgcttatcggctctggctatgatgcttactgcgtcaacggctacggctcgctggacctgtgccacatggac

SEQ ID NO: 20902 - DNA, 201 bp, Homo sapiens; identical to SEQ ID NO: 20892

SEQ ID NO: 20903 - DNA, 201 bp, Homo sapiens; identical to SEQ ID NO: 20893

SEQ ID NO: 20904 - DNA, 201 bp, Homo sapiens; identical to SEQ ID NO: 20894

SEQ ID NO: 20905 - DNA, 201 bp, Homo sapiens; identical to SEQ ID NO: 20895

SEQ ID NO: 20906 - DNA, 201 bp, Homo sapiens; identical to SEQ ID NO: 20896

SEQ ID NO: 20907 - DNA, 201 bp, Homo sapiens; identical to SEQ ID NO: 20897

SEQ ID NO: 20908 - DNA, 201 bp, Homo sapiens
ggccatggagcgcatgatgcacgaagagcacctgcggcaggtggagacccagctggactacctggccccattcctggcccagctcccgccaggagagaaaytaacatgctggcaggcggtgcgcctcaaggatgagtgcctcagcgacttcaagcagcggctcatcaacaaggccaacctcatccaggcccgctttgagaa

SEQ ID NO: 20909 - DNA, 201 bp, Homo sapiens; identical to SEQ ID NO: 20898

SEQ ID NO: 20910 - DNA, 201 bp, Homo sapiens; identical to SEQ ID NO: 20899

SEQ ID NO: 20911 - DNA, 201 bp, Homo sapiens; identical to SEQ ID NO: 20900

SEQ ID NO: 20912 - DNA, 201 bp, Homo sapiens; identical to SEQ ID NO: 20901

SEQ ID NO: 20913 - DNA, 201 bp, Homo sapiens
ggagcgcatgatgcacgaagagcacctgcggcaggtggagacccagctggactacctggccccattcctggcccagctcccgccaggagagaaactaacaygctggcaggcggtgcgcctcaaggatgagtgcctcagcgacttcaagcagcggctcatcaacaaggccaacctcatccaggcccgctttgagaaggagac

SEQ ID NO: 20914 - DNA, 201 bp, Homo sapiens; identical to SEQ ID NO: 20908

SEQ ID NO: 20915 - DNA, 201 bp, Homo sapiens; identical to SEQ ID NO: 20896

SEQ ID NO: 20916 - DNA, 201 bp, Homo sapiens; identical to SEQ ID NO: 20897

SEQ ID NO: 20917 - DNA, 201 bp, Homo sapiens; identical to SEQ ID NO: 20913

SEQ ID NO: 20918 - DNA, 201 bp, Homo sapiens
gaaaatctgggcaaggaggatgaggataagagcttcgacatgccccactcgtgggtggagcagattgagatctccccggaagcatttgagacccgctgccygaacgggaagaaggtgattcagtacaagagggcaaagctggagaagtgggccccgtacctcaatagcaatggccttgtgagccgcctcaccacctatgag

SEQ ID NO: 20919 - DNA, 201 bp, Homo sapiens
gttgatggtgcagtctacatcagaactcagctctcctgctggttccccagccccagggagatgtctgggcccctgacactcctcttccagccatctgactygtagtcacccacctttccttggcaggaagcggagaaggcaaagccggatgccctgcacggcctgcgggtgcactcctgggtccttgtgctatcggggaag

SEQ ID NO: 20920 - DNA, 201 bp, Homo sapiens
tatgatgcttactgcgtcaacggctacggctcgctggacctgtgccacatggacctgacgcgggaggtgtgcccactcactgtgaagcccaaggaggtatrtggttgggtgatgggaggggagatgggccgtcacactccggttgatggtgcagtctacatcagaactcagctctcctgctggttccccagccccagggag

SEQ ID NO: 20921 - DNA, 201 bp, Homo sapiens; identical to SEQ ID NO: 20894

SEQ ID NO: 20922 - DNA, 201 bp, Homo sapiens; identical to SEQ ID NO: 20896

SEQ ID NO: 20923 - DNA, 201 bp, Homo sapiens; identical to SEQ ID NO: 20897

SEQ ID NO: 20924 - DNA, 201 bp, Homo sapiens; identical to SEQ ID NO: 20898

SEQ ID NO: 20925 - DNA, 201 bp, Homo sapiens; identical to SEQ ID NO: 20908

SEQ ID NO: 20926 - DNA, 201 bp, Homo sapiens
tgggtggagcagattgagatctccccggaagcatttgagacccgctgcccgaacgggaagaaggtgattcagtacaagagggcaaagctggagaagtgggmcccgtacctcaatagcaatggccttgtgagccgcctcaccacctatgaggacttgcagtgtaccaatattttggagataaaggagtggtaccagaaccgg

SEQ ID NO: 20927 - DNA, 201 bp, Homo sapiens; identical to SEQ ID NO: 20901

SEQ ID NO: 20928 - DNA, 201 bp, Homo sapiens
ccactgtgctcaagtaccagaaggggaactgctttgacttcagtacgctgctctgctccatgcttatcggctctggctatgatgcttactgcgtcaacggytacggctcgctggacctgtgccacatggacctgacgcgggaggtgtgcccactcactgtgaagcccaaggaggtatgtggttgggtgatgggaggggaga

SEQ ID NO: 20929 - DNA, 201 bp, Homo sapiens
aggaggtatgtggttgggtgatgggaggggagatgggccgtcacactccggttgatggtgcagtctacatcagaactcagctctcctgctggttccccagycccagggagatgtctgggcccctgacactcctcttccagccatctgactcgtagtcacccacctttccttggcaggaagcggagaaggcaaagccggatg

SEQ ID NO: 20930 - DNA, 201 bp, Homo sapiens; identical to SEQ ID NO: 20913

SEQ ID NO: 20931 - DNA, 201 bp, Homo sapiens
tggttgggtgatgggaggggagatgggccgtcacactccggttgatggtgcagtctacatcagaactcagctctcctgctggttccccagccccagggagwtgtctgggcccctgacactcctcttccagccatctgactcgtagtcacccacctttccttggcaggaagcggagaaggcaaagccggatgccctgcacgg

SEQ ID NO: 20932 - DNA, 201 bp, Homo sapiens
tggtccagcacatcatccagcaaaaacatgtcccagagccaacatgatgtgggacagcatccaaacgtttctctagcagcggtccctgccatcaaaagtcrtgcaggaatgcctgaggaagccagcagctgcgaaagctggggtcgagatcaaggggatacgaagtgcacaaatggggccctggaggcccacagattccac

SEQ ID NO: 20933 - DNA, 201 bp, Homo sapiens
ctttaaatctacaagacagcagccttcccaaaatgtcactaaaaattattcagaggtgattgaggtagatgaatcagatatggaagaagacatttttcctrccacttcacagacacatcaaaagtggtccagcacatcatccagcaaaaacatgtcccagagccaacatgatgtgggacagcatccaaacgtttctctagc

SEQ ID NO: 20934 - DNA, 201 bp, Homo sapiens
atgggtgataggcctgtccagtttgaaattctcagtgatcaatcagtcaactttggttttagtaagtttccatgggtgaactatcaagatggcaatctcarcatttcaattccagtgtttagtattcatggtaatcatgacgaccccatgggggcagatgcacgctgtgccctggacattttaagttgtgttggatttgta

SEQ ID NO: 20935 - DNA, 201 bp, Homo sapiens
aagcttctgtttggcgaagattgaagaaatgcttgaaaatgctaaatgggaacatctaggtaattcttgccagccagagaagtctcttataccactgcgartggactatagtggaggttttgaacctttcaacgttcttcgctttagccagaaatttgtacatcgggtagctaatccaaaagacattatccattttttcag

SEQ ID NO: 20936 - DNA, 201 bp, Homo sapiens
gttatctggggccatgcacatgagtataatcctaaagtaaaccaagccatacaaagcttctgtttggcgaagattgaagaaatgcttgaaaatgctaaatrggaacatctaggtaattcttgccagccagagaagtctcttataccactgcgagtggactatagtggaggttttgaacctttcaacgttcttcgctttagc

SEQ ID NO: 20937 - DNA, 201 bp, Homo sapiens; identical to SEQ ID NO: 20934

SEQ ID NO: 20938 - DNA, 201 bp, Homo sapiens
ctttaaatctacaagacagcagccttcccaaaatgtcactaaaaattattcagaggtgattgaggtagatgaatcagatatggaagaagacatttttcctrccacttcacagacacatcaaaagtggtccagcacatcatccagcaaaaacatgtcccagagccaagtattgaaaggggttgattttgaatcagatgagga

SEQ ID NO: 20939 - DNA, 201 bp, Homo sapiens
gatcttgtaaaacagtattttcaaactgaagagaagaatgtgccactctcactgctaacagaaagagggatgggtgaagcagtacaagaatttgtggacarggaggagaaagatgccattgaggaattaatgaaatgccagttgtaaaaaacacagcaatttcgtctgggcgcggaggctcacatctctaatcccagcact

SEQ ID NO: 20940 - DNA, 201 bp, Homo sapiens; identical to SEQ ID NO: 20935

SEQ ID NO: 20941 - DNA, 201 bp, Homo sapiens
gctaatcatccattttttaacccagataatcctaaagtaaaccaagccatacaaagcttctgtttggcgaagattgaagaaatgcttgaaaatgctaaatrggaacatctaggtaattcttgccagccagagaagtctcttataccactgcgagtggactatagtggaggttttgaacctttcaacgttcttcgctttagc

SEQ ID NO: 20942 - DNA, 201 bp, Homo sapiens
ctggggaagattcgttgctttggcttcgacatggactacactctggctgcctacaagtccccagcttatgaggccctgaccttcgagctgctgctggagcrcctggtgtgcattgggtacccgcatgagatcctgcgctacacctacgaccccaccttccccaccaggcggctggtgttcgatgaactctatgggaacctg

SEQ ID NO: 20943 - DNA, 201 bp, Homo sapiens
ccccagcaagttcattcagagggacgacctgcagtgtttctacatactcaacatgctcttcaacctgcctgaaacctacctctatgcctgcttggtggacwtcttctctggctgctcccgttacactaattgtgacaccggctatcagcatgggaacctcttcatgtccttccgaagcctcttccaggatgtgactgatgc

SEQ ID NO: 20944 - DNA, 181 bp, Homo sapiens
cagcaccatgggcagcttgttccgctgcggtttccgccagacactcttctccagccagctgatgcgctatgccgacctctacactgccgcctgcctcgacytcctgtacttccgagtgagctcagctctctcgggcggccccggagttggtgggtccctgcggaatctccacggctgtttg

SEQ ID NO: 20945 - DNA, 201 bp, Homo sapiens
ccaaggagctggacctgtgctacagcaccatgggcagcttgttccgctgcggtttccgccagacactcttctccagccagctgatgcgctatgccgacctytacactgccgcctgcctcgacttcctgtacttccgagtgagctcagctctctcgggcggccccggagttggtgggtccctgcggaatctccacggctgtt

SEQ ID NO: 20946 - DNA, 201 bp, Homo sapiens
acgcagaagccccacttctttgcagaggggttggtcctgaggcaggtcaacacggtaatggcaggtgcagaggactcaggaaagctccacgtgggcacctmcacagggccccaccagcactgtgctgtctactctggaggctcttcggacatggtgtgcgagctgcttggggttcgggggatggacatcctgtacattggg

SEQ ID NO: 20947 - DNA, 201 bp, Homo sapiens
cctcttccaggatgtgactgatgccatgaataacatccaccagtcgggctgtctcaagaagaccctggaggacttggagaaatatgtgaagaaggatccaygcctccccatcctgctggggaagatgaaggaggttgggaaagtgtttctggccaccaacagcagctacaactacaccaatgccatcatgacctacctgtt

SEQ ID NO: 20948 - DNA, 201 bp, Homo sapiens; identical to SEQ ID NO: 20942

SEQ ID NO: 20949 - DNA, 201 bp, Homo sapiens; identical to SEQ ID NO: 20943

SEQ ID NO: 20950 - DNA, 107 bp, Homo sapiens
caagcaacagggaggggtggggcggggagccaagaccctcctacccccaccactgggctggtctcctggactccatttcttggcctttcaaggcctcagargaatga

SEQ ID NO: 20951 - DNA, 201 bp, Homo sapiens
tcctgctggggaagatgaaggaggttgggaaagtgtttctggccaccaacagcagctacaactacaccaatgtgagtatgtgtatggaggggtggaccgtyggcctccttcctggccccaggggacacagtggcactgcaagcaacagggaggggtggggcggggagccaagaccctcctacccccaccactgggctggtc

SEQ ID NO: 20952 - DNA, 201 bp, Homo sapiens
cctcttccaggatgtgactgatgccatgaataacatccaccagtcgggctgtctcaagaagaccctggaggacttggagaaatatgtgaagaaggatccaygcctccccatcctgctggggaagatgaaggaggttgggaaagtgtttctggccaccaacagcagctacaactacaccaatgtgagtatgtgtatggaggg

SEQ ID NO: 20953 - DNA, 201 bp, Homo sapiens
aagtgtttctggccaccaacagcagctacaactacaccaatgtgagtatgtgtatggaggggtggaccgtcggcctccttcctggccccaggggacacagwggcactgcaagcaacagggaggggtggggcggggagccaagaccctcctacccccaccactgggctggtctcctggactccatttcttggcctttcaagg

SEQ ID NO: 20954 - DNA, 201 bp, Homo sapiens
cttaaattacttagctggaatattttaaagtgtcagataatgtgatgtacaaagagagtatgccgatgcatttcattgtttttgcattatctgtatcagtrtttcccattgctagcccgaataatcaagaccagactgtttcttgtcactggattctggaagccttgccctttcaactggatttatgtttgtttctgctgc

SEQ ID NO: 20955 - DNA, 201 bp, Homo sapiens
tgagaaagatggctgcttccaccagggtggaggcttctaggtctgcatgatgatggggcccgtttctggccagagggtggctctgggagcagttgtgctgygggcttgctgggggagaactctaactgttgcagaaacagagcttcatggcttgcttaaattacttagctggaatattttaaagtgtcagataatgtgatg

SEQ ID NO: 20956 - DNA, 199 bp, Homo sapiens
aattagccgggtgtggtggcgtatgcctgtaatcccagctactcgggaggctgaggcaggagaatcgcttgaacctgggaggtggaggttgcatgagcrgagattgtgccactgcactccagccagagtgacagagcaagactccatctcaaaaaataataataaaaataaacaaatctgtttaaattactgttgcctt

SEQ ID NO: 20957 - DNA, 201 bp, Homo sapiens
cagagtgaataccttccaaataaaaagctaaatattcctccttgtcattttaatgtcattattgaaatacttttaattctaattttcaaaagaaagctaamtgctgattgtggtttaggatgttacagtactaataccatcatgttatttattctaatatagaggcattgagaggaggggagtgtatgtctagagttaccc

SEQ ID NO: 20958 - DNA, 201 bp, Homo sapiens
actgaatgaagtttgtgcttgaatgaagagtgtatcttaaaccccctttttttggacaggctgcacttggataaaataggcaccactgtgttgatatgtarttaaattcataactatttatgaatgtgaccattgttaaatttaattatagtgtatttctttcttgaatttcagtctgctgctttgtaaaaaataactgta

SEQ ID NO: 20959 - DNA, 201 bp, Homo sapiens; identical to SEQ ID NO: 20954

SEQ ID NO: 20960 - DNA, 201 bp, Homo sapiens
ttctctccagagaatcattcttagaaagccaggctaaatcagagtagtgctgtttttaaagcaagtatattggatgatggctatagggtaccttaatgctstgttgaaattggaagcagactgctcttcagcagcacatatactgcaactgaagttagagacagtactgaagacgagggagtagctaaatgctgtggatat

SEQ ID NO: 20961 - DNA, 201 bp, Homo sapiens
aaattagctgggcatggtggcatgtgcctgtaatcccagttactggggaggctgaggcaggagaatcacttgaacctgggagatggagattgcagtgagcrgagattgtgccactgcactccagccagagtgacagagcaagactccatctcaaaaaataataataaaaataaacaaatctgtttaaattactgttgcctt

SEQ ID NO: 20962 - DNA, 201 bp, Homo sapiens
gaatgaagagtgtatcttaaaccccctttttttggacaggctgcacttggataaaataggcaccactgtgttgatatgtagttaaattcataactatttatgaatgtgaccattgttaaatttaattatagtgtatttctttcttgaatttcagtctgctgctttgtaaaaaataactgtaattgatatttcatttttaaa

SEQ ID NO: 20963 - DNA, 201 bp, Homo sapiens
taccccaattctaaataggtaccaaaagagtattgattatgacctggagcctgagctttgggagaatatacaaaggaaaaagcaggcatagtttccacttyaaagggaagaagggactttaacatcctatgaatttgaaacatcctatgaatttgaaagtttcctaagtgttgttttcaaagaactggtttattttatagt

SEQ ID NO: 20964 - DNA, 201 bp, Homo sapiens
tgaatgaagagtgtatcttaaaccccctttttttggacaggctgcacttggataaaataggcaccactgtgttgatatgtagttaaattcataactatttatgaatgtgaccattgttaaatttaattatagtgtatttctttcttgaatttcagtctgctgctttgtaaaaaataactgtaattgatatttcatttttaa

SEQ ID NO: 20965 - DNA, 201 bp, Homo sapiens
ttgaatgaagagtgtatcttaaaccccctttttttggacaggctgcacttggataaaataggcaccactgtgttgatatgtagttaaattcataactatttatgaatgtgaccattgttaaatttaattatagtgtatttctttcttgaatttcagtctgctgctttgtaaaaaataactgtaattgatatttcattttta

SEQ ID NO: 20966 - DNA, 201 bp, Homo sapiens
cttgaatgaagagtgtatcttaaaccccctttttttggacaggctgcacttggataaaataggcaccactgtgttgatatgtagttaaattcataactatttatgaatgtgaccattgttaaatttaattatagtgtatttctttcttgaatttcagtctgctgctttgtaaaaaataactgtaattgatatttcattttt

SEQ ID NO: 20967 - DNA, 201 bp, Homo sapiens
tgtatacattaacaactgcttttactctggcccacatccattatggagtacgagtggtaaagcagctgagcagccattttcagatttaccccttctcattraggaaaccaaactcagattgactaggaatggaagaaaagaatattggcctgtaataatctttctttgggcacaaagaagtactgtaaataaatgcttgta

SEQ ID NO: 20968 - DNA, 201 bp, Homo sapiens
acagagagaagttctctcttctccagcttgtccatttccccacttgaagaaaacttttgatatatatgccttactgagtacatgccccctttaatgttaayatgacttggagtaatttctgaggtttactgacaaacataaaaatccctttaattgtagtgtagttgttctataaaccatattttttcatgatgtggatat

SEQ ID NO: 20969 - DNA, 201 bp, Homo sapiens; identical to SEQ ID NO: 20955

SEQ ID NO: 20970 - DNA, 201 bp, Homo sapiens
catgcttgctgttcattttgtctacagcgtggatcctttggtcaccttcagatattttagagctacatcctagagtattctactttatggttggaacagcytttgccaacagtacatgtcagctgattgtttgccaaatgagtagtacccggtgtccaactttgaattggttgctggttcctctcttcttggttgtcttag

SEQ ID NO: 20971 - DNA, 201 bp, Homo sapiens
cattaatatttagagtagcaaaagaagttttgccatttgtagctctctcacaggtagcttaagcgagggggttgtgttgcatgtgcttagaaaggccaggwtcccagaattggaaggtgccacatatacttttagaatattttaacaaaggcttgtctctaggaaaatccacttggactgcagcaggattgttctggtctt

SEQ ID NO: 20972 - DNA, 201 bp, Homo sapiens
  misc_feature (1)...(201): n = A,T,C or G
ggggttgtgttgcatgtgcttagaaaggccaggttcccagaattggaaggtgccacatatacttttagaatattttaacaaaggcttgtctctaggaaaanccacttggactgcagcaggattgttctggtcttccacagaccattcacatggtctttctctccagagaatcattcttagaaagccaggctaaatcagagt

SEQ ID NO: 20973 - DNA, 201 bp, Homo sapiens
ttgccaagctgctgcagcaccgtggctaccgcacgggactcataggcaaatggcacctgggtttgagctgcgcctctcggaatgatcactgttaccacccrctcaaccatggttttcactacttttacggggtgccttttggacttttaagcgactgccaggcatccaagacaccagaactgcaccgctggctcaggatca

SEQ ID NO: 20974 - DNA, 201 bp, Homo sapiens
cttctcattcccaagttcgcccgctggttctcagtgccatggaaggtcatctttgtctttgctctcctcgcctttctgtttttcacttcctggtactctarttatggatttactcgacgttggaattgcatccttatgaggaaccatgaaattatccagcagccaatgaaagaggagaaagtagcttccctcatgctgaag

SEQ ID NO: 20975 - DNA, 201 bp, Homo sapiens
gcctctcggaatgatcactgttaccacccgctcaaccatggttttcactacttttacggggtgccttttggacttttaagcgactgccaggcatccaagayaccagaactgcaccgctggctcaggatcaaactgtggatctccacggtagcccttgccctggttccttttctgcttctcattcccaagttcgcccgctgg

SEQ ID NO: 20976 - DNA, 201 bp, Homo sapiens
aggaggcacttgctttcattgaaaggtacaaaagggaaccttttctcctctttttttccttcctgcacgtacatactccactcatctccaaaaagaagttygttgggcgcagtaaatatggcaggtatggggacaatgtagaagaaatggattggatggtggcgatggtgtttcattttggaatacagtacttttcttctt

SEQ ID NO: 20977 - DNA, 201 bp, Homo sapiens
aagttcgcccgctggttctcagtgccatggaaggtcatctttgtctttgctctcctcgcctttctgtttttcacttcctggtactctagttatggatttaytcgacgttggaattgcatccttatgaggaaccatgaaattatccagcagccaatgaaagaggagaaagtagcttccctcatgctgaaggaggcacttgct

SEQ ID NO: 20978 - DNA, 201 bp, Homo sapiens
tgggagggagaacctttgtaaacctgaagacagttttactcatgagatatgccccacgcattgcacacaacattattgctgtggcgctgggggtggaaggygaagcgaaagccatactggccagaaaactgaagacagctccttcatacattaaagacgtgatcatttggggtaatatcagtggaaataattacgttgatc

SEQ ID NO: 20979 - DNA, 201 bp, Homo sapiens
ggagaacctttgtaaacctgaagacagttttactcatgagatatgccccacgcattgcacacaacattattgctgtggcgctgggggtggaaggtgaagcraaagccatactggccagaaaactgaagacagctccttcatacattaaagacgtgatcatttggggtaatatcagtggaaataattacgttgatctgagaa

SEQ ID NO: 20980 - DNA, 201 bp, Homo sapiens
gcattttcttagaactattttggtgtcaaatgctattttttatattacattaaaatagagttgtcagtcattgcatctgcccatacatcttctgagagaamctgcttccttccatcagccatacctaagacctgcacctaagtggccatgtttgctcaaatgtcctcatcaccttggcctcaactaattaggccaaacaga

SEQ ID NO: 20981 - DNA, 201 bp, Homo sapiens
tctagctatgtcagatgcagcagagtttccaaatcagattcctcaaaccacctttgaaaagccacagagtcttgagttcctaaatgaatttgaaggcaaarccgtggaatcctaacagatcaaattggatgaaatatataattacttgatagcacaataaacatagaaagaatttatatgaatgtctatatttaaggaaga

SEQ ID NO: 20982 - DNA, 201 bp, Homo sapiens
acaagaattcccctatcatctggagagagctgttggatcgtggaggaaagggtttgcttttgggaggatataatgagttcctggagcatgctcagctttaytatgatgtcacctctagcatgacgactgaactgatgatggtaattgctcaagagaacctgggggcacatatagaaaaagagcaggaggaagaagccctga

SEQ ID NO: 20983 - DNA, 201 bp, Homo sapiens
atgaagaaaaaaatctagctatgtcagatgcagcagagtttccaaatcagattcctcaaaccacctttgaaaagccacagagtcttgagttcctaaatgamtttgaaggcaaaaccgtggaatcctaacagatcaaattggatgaaatatataattacttgatagcacaataaacatagaaagaatttatatgaatgtcta

SEQ ID NO: 20984 - DNA, 201 bp, Homo sapiens
agaaaactgaagacagctccttcatacattaaagacgtgatcatttggggtaatatcagtggaaataattacgttgatctgagaaaaacaagggtgtacaratatgagagtgccatttggggacctcttcattattcacgccctgttttaaacttgatttttgacagtgagtgggtaaaaagagaatttgtggcaattctt

SEQ ID NO: 20985 - DNA, 201 bp, Homo sapiens
caccttcctgcacgagcctttctccagtgtggccgccacctgccagacccccaaaatagcctgcaagaatggcgataaaaactgccaccagagccacgggsccgtgtccctgaccatgtgtaagctcacctcagggaagtatccgaactgcaggtacaaagagaagcgacagaacaagtcttacgtagtggcctgtaagcc

SEQ ID NO: 20986 - DNA, 201 bp, Homo sapiens
ctgccagacccccaaaatagcctgcaagaatggcgataaaaactgccaccagagccacgggcccgtgtccctgaccatgtgtaagctcacctcagggaagyatccgaactgcaggtacaaagagaagcgacagaacaagtcttacgtagtggcctgtaagcctccccagaaaaaggactctcagcaattccacctggttcc

SEQ ID NO: 20987 - DNA, 107 bp, Homo sapiens
atggcaycggccagagcaggattctgcccccttctgctgcttctgctgctggggctgtgggtggcagagatcccagtcagtgccaagcccaagggcatgacctcatc

SEQ ID NO: 20988 - DNA, 201 bp, Homo sapiens
accatgtgtaagctcacctcagggaagtatccgaactgcaggtacaaagagaagcgacagaacaagtcttacgtagtggcctgtaagcctccccagaaaamggactctcagcaattccacctggttcctgtacacttggacagagtcctttaggtttccagactggcttgctctttggctgaccttcaattccctctccag

SEQ ID NO: 20989 - DNA, 201 bp, Homo sapiens; identical to SEQ ID NO: 20985

SEQ ID NO: 20990 - DNA, 201 bp, Homo sapiens; identical to SEQ ID NO: 20986

SEQ ID NO: 20991 - DNA, 201 bp, Homo sapiens
tacacccagagcattctcttcccctcatctcttggggctgttcctggttcagcctctgctgggaggctgaagctgacactctggtgagctgagctctagarggatggcttttcatctttttgttgctgttttcccagatgcttatccccaagaaacagcaagctcaggtctgtgggttccctggtctatgccattgcacat

SEQ ID NO: 20992 - DNA, 107 bp, Homo sapiens; identical to SEQ ID NO: 20987

SEQ ID NO: 20993 - DNA, 201 bp, Homo sapiens; identical to SEQ ID NO: 20988

SEQ ID NO: 20994 - DNA, 201 bp, Homo sapiens
gcaaatactttgaaaatatgccaaaataaaaaaaaggaatactcagcgttcagccagtggaccgaagcagcgtctgttgcacagtacttccagttttatgrctgcatttctcaacagcagaacatgatgcaagattttgtgaggacagccacttaccacagagccgtcctccagaatcacattgactttagagacaaggtg

SEQ ID NO: 20995 - DNA, 201 bp, Homo sapiens
tctgttgcacagtacttccagttttatggctgcatttctcaacagcagaacatgatgcaagattttgtgaggacagccacttaccacagagccgtcctccrgaatcacattgactttagagacaaggtggttctagatgttggttgtggatcaggaatcctgtcattttttgctgtacaggctggagctaggacagtttat

SEQ ID NO: 20996 - DNA, 145 bp, Homo sapiens
tggatctctggtaactgtttggctgtcaacagccccagctgagcctctgactcattggtaccaggtgcagtgcctcctgcagactcctctctttgccaagraagggaagacactgtcagggaaagtgctgtttgtagccaataaa

SEQ ID NO: 20997 - DNA, 201 bp, Homo sapiens
tccagtctccagggtgctacagtggatgaatacttcaggcagccaatagtagacacatttgatgttaggattttgatggctggaacagtcaaatacacagyaaactttatggatgcagaagaggaagatctacacagagtagaaattccctttgtgtttcagatggcagtctgggctcatccatggcctggcgttctggtt

SEQ ID NO: 20998 - DNA, 160 bp, Homo sapiens
tgatgtggcatttgttggatctctggtaactgtttggctgtcaacagccccagctgagcctctgactcattggtaccaggtgcagtgcctcctgcagactmctctctttgccaaggaagggaagacactgtcagggaaagtgctgtttgtagccaataaa

SEQ ID NO: 20999 - DNA, 201 bp, Homo sapiens
ttatctttttcagatgctagtgaaaaacaatcacctttcagacaagatcattgttttgccaggaaaaactgaagacgtctcacttcctgaggctgtagatrtgatcatttccgaaccaatgggatacatgctgttcaatgaacggatgctagagagttatcttcattccaaaaaatggctaaaatcaaatggaatgatgtt

SEQ ID NO: 21000 - DNA, 201 bp, Homo sapiens
gacttcatcagatttcagcatcagagagaatatggaaggacatcgaccctaacttcatccagtgaggatttccacacaccatacactctctgagagttctyttggctttgtgtgcacacctccagtgacagggagctcgctatgtcatgaggcagcctgctcccttgtggctatcactgaaccaactattaagccttctta

SEQ ID NO: 21001 - DNA, 201 bp, Homo sapiens
ttggtgtccatggattggcggggacagctctgcttaaggatgtagtagctctgcaggttggctagtttcctgttcttcccaacctgcgctatggacttcaycagatttcagcatcagagagaatatggaaggacatcgaccctaacttcatccagtgaggatttccacacaccatacactctctgagagttctcttggctt

SEQ ID NO: 21002 - DNA, 107 bp, Homo sapiens
gttcgasccgccctgcagcggtgtggagactccgaccagttggggcaggcggctcaggtcgcggccagccaggggttgggaaactagtttccatggccaaacctagc

SEQ ID NO: 21003 - DNA, 201 bp, Homo sapiens
ctgctctgtgacttccgccacgctcccacgggtggcggcgaggagcctgagccggcgatggtgctacaggaggcgctggagccggccatgtgcctggatcrctacccgcatgtgcagcttgaggcctcggagctgctgctggaagatggcggctcagccctggccactgagctcaacaccgccaagcttgccctggcctat

SEQ ID NO: 21004 - DNA, 201 bp, Homo sapiens
ccaactctaaaaaggggcctgctctgtgacttccgccacgctcccacgggtggcggcgaggagcctgagccggcgatggtgctacaggaggcgctggagcyggccatgtgcctggatcgctacccgcatgtgcagcttgaggcctcggagctgctgctggaagatggcggctcagccctggccactgagctcaacaccgcc

SEQ ID NO: 21005 - DNA, 201 bp, Homo sapiens
cagatgaacttctgtgactctcactgcggaaaactccagaggacttttgtctgtcctctgcccagatctgacacgggtaggagcacgatgcagctctcccyaggtgatcagctgtccccagaagacaatatggcaccagacggtctttctcgaatgcttggagaggcaaagcgatggccaagggtttccactgaagctgcc

SEQ ID NO: 21006 - DNA, 201 bp, Homo sapiens
gaatgacttggtggtgagctgcggcctgggcctcgcgccagggtccgtgcccacctggctgctggaccccatgcggctcgaggaggagcacaccgcccccrgtgtcaccttggcactcctgcccatgctgaatcaggatcttcgaggcagaagaatagccttgcaggaggagcagaaagcggaagatccttcagccctgtg

SEQ ID NO: 21007 - DNA, 201 bp, Homo sapiens
cggctcagccctggccactgagctcaacaccgccaagcttgccctggcctatgcaggcatggagatgaatgacttggtggtgagctgcggcctgggcctcrcgccagggtccgtgcccacctggctgctggaccccatgcggctcgaggaggagcacaccgcccccggtgtcaccttggcactcctgcccatgctgaatca

SEQ ID NO: 21008 - DNA, 201 bp, Homo sapiens
cgacaaagtgactcggaaacacgtggattgctgcattggccatctctagacacagtcacgaacagaagctctgagggacagggccctgtagaaaccaaccrgctgtcctccatgccaccaactctaaaaaggggcctgctctgtgacttccgccacgctcccacgggtggcggcgaggagcctgagccggcgatggtgcta

SEQ ID NO: 21009 - DNA, 201 bp, Homo sapiens; identical to SEQ ID NO: 21003

SEQ ID NO: 21010 - DNA, 192 bp, Homo sapiens
cggccaggcctgctctgtgacttccgccacgctcccacgggtggcggcgaggagcctgagccggcgatggtgctacaggaggcgctggagcyggccatgtgcctggatcgctacccgcatgtgcagcttgaggcctcggagctgctgctggaagatggcggctcagccctggccactgagctcaacaccgcc

SEQ ID NO: 21011 - DNA, 201 bp, Homo sapiens
gaatgacttggtggtgagctgcggcctgggcctcgcgccagggtccgtgcccacctggctgctggaccccatgcggctcgaggaggagcacaccgcccccrgtgtcaccttggcactcctgcccatgctgaatcaggtggcccggctgctggctgcagggagggcggcctgaccatgagctgggtggaggctgtaggcctg

SEQ ID NO: 21012 - DNA, 201 bp, Homo sapiens; identical to SEQ ID NO: 21007

SEQ ID NO: 21013 - DNA, 201 bp, Homo sapiens
cgggcatgttgataaacatccattcagatcatatcctaaggaatctcagaaaaccaggagatactggatacaaaataccaaggggaggcttatttgaataygtaactgcagccaactattttggagaaatcatggagtggtgtggctatgccctggccagctggtctgtccaaggcgcggcttttgctttcttcacgtttt

SEQ ID NO: 21014 - DNA, 201 bp, Homo sapiens
ccaactgcatcctcctggccatgttcctcgtccactacgggcatcggtgcttaatttacccatttctgatgcgaggaggaaagcctatgccactgttggcrtgtacaatggcgattatgttctgtacctgtaacggctatttgcaaagcagatacttgagccattgtgcagtgtatgctgatgactgggtaacagatcccc

SEQ ID NO: 21015 - DNA, 201 bp, Homo sapiens
acggctatttgcaaagcagatacttgagccattgtgcagtgtatgctgatgactgggtaacagatccccgttttctaataggttttggcttgtggttaacrggcatgttgataaacatccattcagatcatatcctaaggaatctcagaaaaccaggagatactggatacaaaataccaaggggaggcttatttgaatacg

SEQ ID NO: 21016 - DNA, 201 bp, Homo sapiens
agtacgccagcgagtccgccccgcgtctccgcagcgcgcccaactgcatcctcctggccatgttcctcgtccactacgggcatcggtgcttaatttacccrtttctgatgcgaggaggaaagcctatgccactgttggcgtgtacaatggcgattatgttctgtacctgtaacggctatttgcaaagcagatacttgagcc

SEQ ID NO: 21017 - DNA, 201 bp, Homo sapiens
ttgcaaagctttcccctcatagcctgtacctgttatcaatataaaataatcttcctgttgaatgcttcatgacttgaattctactttgataaaaacattgycatactgctttttatcttgatgaattcatctggcattgctttgccttatcatctcatctggagtttttaaatgccatttgtttcagttgtctttaacaac

SEQ ID NO: 21018 - DNA, 201 bp, Homo sapiens
tctatagccccctacagtgatctcttcaaggtcaactgcagtgttgcttccctccccctatagggctggaatctgtctaggagccctctctcggaggccayagaggctgggggtagccattgtgcagtcatggcccgggggaaacttgccaaccttcgtgtcaggtgctgtgtgtaagtggagaacttggggatagaggag

SEQ ID NO: 21019 - DNA, 201 bp, Homo sapiens
tgtagattttgagttttcccttgtagtgtaaagaatgatcactttctgtaacaataacaagaccactttttaagatttatcctgtttgttctttgttgatygaaacataataattgttaaaattctctacagccttctttttcttccatagctaatcttccttctaatagtttttgctttctgttttgctgttgttgcttt

SEQ ID NO: 21020 - DNA, 201 bp, Homo sapiens
tgtctaggagccctctctcggaggccatagaggctgggggtagccattgtgcagtcatggcccgggggaaacttgccaaccttcgtgtcaggtgctgtgtrtaagtggagaacttggggatagaggaggaagctcctcgtggcccttccaaggtgaggcaaaggcatctggacttgttccagcccagcccaccgggtgaca

SEQ ID NO: 21021 - DNA, 201 bp, Homo sapiens
ccccctacagtgatctcttcaaggtcaactgcagtgttgcttccctccccctatagggctggaatctgtctaggagccctctctcggaggccatagaggcygggggtagccattgtgcagtcatggcccgggggaaacttgccaaccttcgtgtcaggtgctgtgtgtaagtggagaacttggggatagaggaggaagctc

SEQ ID NO: 21022 - DNA, 201 bp, Homo sapiens
tgtcaggtgctgtgtgtaagtggagaacttggggatagaggaggaagctcctcgtggcccttccaaggtgaggcaaaggcatctggacttgttccagcccrgcccaccgggtgacatcaccgggcagggaggggtgctggtggtggttcatacggagtaagctgctctgcctgtgtgagtggctcctgggccctaaacagg

SEQ ID NO: 21023 - DNA, 201 bp, Homo sapiens
cagccctggcgatggcaacggcgacgggggtggcggaggagcgcctgctggccgcgctcgcctacctgcagtgcgccgtgggctgcgcggtcttcgcgcgsaatcgtcagacgaactcagtgtacggccgccacgcgctgcccagccacaggctccgagtgccggcgcgggccgcctgggtggtgcaggagctgccctcgc

SEQ ID NO: 21024 - DNA, 102 bp, Homo sapiens
cyggcgtgggtggggcgcttgcaggtccctccccgcgcaagtgctcgccccgcccccggggccgcacccacagccccggctaccccggagaagcctgacttg

SEQ ID NO: 21025 - DNA, 201 bp, Homo sapiens; identical to SEQ ID NO: 21013

SEQ ID NO: 21026 - DNA, 201 bp, Homo sapiens; identical to SEQ ID NO: 21014

SEQ ID NO: 21027 - DNA, 201 bp, Homo sapiens; identical to SEQ ID NO: 21015

SEQ ID NO: 21028 - DNA, 201 bp, Homo sapiens
ccgtgggctgcgcgtccgccccgcgtctccgcagcgcgcccaactgcatcctcctggccatgttcctcgtccactacgggcatcggtgcttaatttacccrtttctgatgcgaggaggaaagcctatgccactgttggcgtgtacaatggcgattatgttctgtacctgtaacggctatttgcaaagcagatacttgagcc

SEQ ID NO: 21029 - DNA, 201 bp, Homo sapiens; identical to SEQ ID NO: 21017

SEQ ID NO: 21030 - DNA, 201 bp, Homo sapiens; identical to SEQ ID NO: 21018

SEQ ID NO: 21031 - DNA, 201 bp, Homo sapiens; identical to SEQ ID NO: 21019

SEQ ID NO: 21032 - DNA, 201 bp, Homo sapiens; identical to SEQ ID NO: 21020

SEQ ID NO: 21033 - DNA, 201 bp, Homo sapiens; identical to SEQ ID NO: 21021

SEQ ID NO: 21034 - DNA, 201 bp, Homo sapiens; identical to SEQ ID NO: 21022

SEQ ID NO: 21035 - DNA, 150 bp, Homo sapiens
atggcttcaaaaaaggagccaaagaaagagctgggtcttcacagaggaaktcttcacttttatcctggttcagaccagccagatggtcggcattgccatagacatgaatatatattagcaccaggtgctcctgccacgtcttcctctgtg

SEQ ID NO: 21036 - DNA, 201 bp, Homo sapiens
caagtccaaaactcttcgcagaagaggagtttctgccattggatccaacccaggaactgatatttcctcctgagctaatgataatggctgagaaacagtcrcaaaggaccagggtgtttggcagtgagagaatgatgtggttttcccccgtgaccctgaaggaactgctggaatttaaattcaagtatccccaggctcctg

SEQ ID NO: 21037 - DNA, 115 bp, Homo sapiens
aatggaataggtgatgacttgcatgtgactcctacttggcttctatccaccaacagaaattataccatatagtgaaaggcaattttctaaataatttcatkactaatatgaactg

SEQ ID NO: 21038 - DNA, 194 bp, Homo sapiens
ttttcaatgttataaacactaattggtttcctctagggtgatatccgtcattactctgtctcttcaatccatccagctaaatggaataggtgatgacttgsatgtgactcctacttggcttctatccaccaacagaaattataccatatagtgaaaggcaattttctaaataatttcattactaatatgaactg

SEQ ID NO: 21039 - DNA, 201 bp, Homo sapiens
tggaatgtacccatctgaatcaaatgcaaacttctggaatgctagatctgaaagacagagtttccacagttcagaaatcatcccacagtgttgcttttctmtggagctgatttaaagtattccatttagatttgatagatatgcttaagcaatctataaatcattttcaatgttataaacactaattggtttcctctaggg

SEQ ID NO: 21040 - DNA, 201 bp, Homo sapiens
tactaacaattgaggaaagtatacaacacaactcctccttcaagccagaaaggaaactggaatatggaaatgttgacgaagcatttaaagtggttgatcarattcttgaaggtgaaatacatatgggaggtcaagaacatttttatatggaaacccaaagcatgcttgtcgttcccaagggagaggatcaagaaatggatg

SEQ ID NO: 21041 - DNA, 201 bp, Homo sapiens
tgatttaaagtattccatttagatttgatagatatgcttaagcaatctataaatcattttcaatgttataaacactaattggtttcctctagggtgatatycgtcattactctgtctcttcaatccatccagctaaatggaataggtgatgacttgcatgtgactcctacttggcttctatccaccaacagaaattatacc

SEQ ID NO: 21042 - DNA, 201 bp, Homo sapiens
tcatctaagggtctgggagagtcgggggtgttcctggggtgttccgtgtttttcgctatccatgacgcagtgagtgcagcacgacaggagagaggcctgcrtggacccttgacccttaatagtccactgaccccggagaagattaggatggcctgtgaagacaagttcacaaaaatgattccgagagatgaacctggatcc

SEQ ID NO: 21043 - DNA, 201 bp, Homo sapiens
gcctgtcaaactcttctaaaacgcctcgaacccatcatcagcaagaatcctaaaggaacttggaaagactgggcacagactgcttttgatgaaagcattarcctttcagctgttggatacttcagaggttatgagtcagacatgaactgggagaaaggcgaaggccagcccttcgaatactttgtttatggagctgcctgt

SEQ ID NO: 21044 - DNA, 201 bp, Homo sapiens; identical to SEQ ID NO: 21036

SEQ ID NO: 21045 - DNA, 201 bp, Homo sapiens
aatggaataggtgatgacttgcatgtgactcctacttggcttctatccaccaacagaaattataccatatagtgaaaggcaattttctaaataatttcatkactaatatgaactgtgaagttgtcattttttcatttgtccttttctgctatcaccttcctcttgtcagaatgaatatagacactgtatctaagtgggacc

SEQ ID NO: 21046 - DNA, 201 bp, Homo sapiens
ttttcaatgttataaacactaattggtttcctctagggtgatatccgtcattactctgtctcttcaatccatccagctaaatggaataggtgatgacttgsatgtgactcctacttggcttctatccaccaacagaaattataccatatagtgaaaggcaattttctaaataatttcattactaatatgaactgtgaagtt

SEQ ID NO: 21047 - DNA, 201 bp, Homo sapiens
ttcccagatggcaatctgtcctatctctgtgctggaagatgctagatctgaaagacagagtttccacagttcagaaatcatcccacagtgttgcttttctmtggagctgatttaaagtattccatttagatttgatagatatgcttaagcaatctataaatcattttcaatgttataaacactaattggtttcctctaggg

SEQ ID NO: 21048 - DNA, 201 bp, Homo sapiens; identical to SEQ ID NO: 21040

SEQ ID NO: 21049 - DNA, 201 bp, Homo sapiens; identical to SEQ ID NO: 21041

SEQ ID NO: 21050 - DNA, 201 bp, Homo sapiens; identical to SEQ ID NO: 21042

SEQ ID NO: 21051 - DNA, 201 bp, Homo sapiens
tatcaccttcctcttgtcagaatgaatatagacactgtatctaagtgggaccaaagaaaaaatagcgaactttcaccaaagttttcatgaaaacccaaaarctttaaaagttactatcaagaaattgaaaggaaacccacagaataggataaaatatttgtaaatcatatttgataaaagtcttgtaaccagatacataaa

SEQ ID NO: 21052 - DNA, 201 bp, Homo sapiens; identical to SEQ ID NO: 21043

SEQ ID NO: 21053 - DNA, 201 bp, Homo sapiens
tgaaatacaccgtatttggaaaggtaatagatggtctggaaactctagatgagttggagaagttgccagtaaatgagaagacataccgacctcttaatgakgtacacattaaggacataactattcatgccaacccatttgctcagtagctatgatagacctggacaaataacttgacaaattgctggaacacacttattg

SEQ ID NO: 21054 - DNA, 201 bp, Homo sapiens
tagaggtgttgtatctatggctaataatggcccgaacaccaatggatctcagttcttcatcacctatggcaaacagccacatttggacatgaaatacaccrtatttggaaaggtaatagatggtctggaaactctagatgagttggagaagttgccagtaaatgagaagacataccgacctcttaatgatgtacacattaa

SEQ ID NO: 21055 - DNA, 201 bp, Homo sapiens
tggagaagttgccagtaaatgagaagacataccgacctcttaatgatgtacacattaaggacataactattcatgccaacccatttgctcagtagctatgrtagacctggacaaataacttgacaaattgctggaacacacttattgtggtttacccggttttaattatgtcagagattgcatcatccttctgcttgttta

SEQ ID NO: 21056 - DNA, 201 bp, Homo sapiens
gaggtgttgtatctatggctaataatggcccgaacaccaatggatctcagttcttcatcacctatggcaaacagccacatttggacatgaaatacaccgtrtttggaaaggtaatagatggtctggaaactctagatgagttggagaagttgccagtaaatgagaagacataccgacctcttaatgatgtacacattaagg

SEQ ID NO: 21057 - DNA, 201 bp, Homo sapiens; identical to SEQ ID NO: 21053

SEQ ID NO: 21058 - DNA, 201 bp, Homo sapiens; identical to SEQ ID NO: 21054

SEQ ID NO: 21059 - DNA, 201 bp, Homo sapiens; identical to SEQ ID NO: 21055

SEQ ID NO: 21060 - DNA, 201 bp, Homo sapiens; identical to SEQ ID NO: 21056

SEQ ID NO: 21061 - DNA, 201 bp, Homo sapiens; identical to SEQ ID NO: 21053

SEQ ID NO: 21062 - DNA, 201 bp, Homo sapiens; identical to SEQ ID NO: 21054

SEQ ID NO: 21063 - DNA, 201 bp, Homo sapiens; identical to SEQ ID NO: 21055

SEQ ID NO: 21064 - DNA, 201 bp, Homo sapiens; identical to SEQ ID NO: 21056

SEQ ID NO: 21065 - DNA, 197 bp, Homo sapiens
tgagcaggaagctaaaaacattcatgcctccattttgtctacaaggtaaaaacaagttcacggatatgtcctatgaggagaaatggggaaagctcaccttygtggattttcccatctatgacgtcctggatcaaaagtgcatgtttgagcccaagtgcctggatgagttcccacatcttaaggctttcatgtgccgt

SEQ ID NO: 21066 - DNA, 145 bp, Homo sapiens
atgagtgttgggttagcaattgcaggttttcattcgacatacatytgtacgttgctaccctgtgccaaacaacaagggacacaaaggcaagtacaactgacagaggaggaagacaacatgtggacaaacatgagcaggaagctaa

SEQ ID NO: 21067 - DNA, 201 bp, Homo sapiens
aactgaaacctcagtacttggaacagctacctgaacaactgaaacaattctccatgttcctgggagaaattctcatggtttgcaggggaaagctcaccttygtggattttcccatctatgacgtcctggatcaaaagtgcatgtttgagcccaagtgcctggatgagttcccacatcttaaggctttcatgtgccgttgag

SEQ ID NO: 21068 - DNA, 147 bp, Homo sapiens
tcttgaagatgcctatcaacaacaagatggcccagtggggcaacaagcttttatgctgagctagaggcagacttgcactgctagttttgtttcatccgtcmctagggggcctccacacttttttgttcttttaaataaacagcactt

SEQ ID NO: 21069 - DNA, 131 bp, Homo sapiens
caacaacaagatggcccagtggggcaacaagcttttatgctgagctagaggcagacttgcactgctagttttgtttcatccgtccctagggggcctccacwcttttttgttcttttaaataaacagcactt

SEQ ID NO: 21070 - DNA, 201 bp, Homo sapiens
cggacgcaggggcagcgtggaggctactgctccggagtgtgtacaactgctccggggaggcctgcaggggccacaatcgtagcccgctggtcaggcggccrtccctacagatgaataccagcatctggtacaaccgatctgatgtgtttgaggcctggcggctgctgctcacatctgctccctccctggccaccagccccg

SEQ ID NO: 21071 - DNA, 201 bp, Homo sapiens
gtgcggtcacgagacgcccccaagggagtatcctggtacccggaagccgcgactcctggccctgagcccgggcttagccttcgggtccacgtggccggagsccggcagctgattggacgcgggccgccccaccccctggccgtcgcgggacccgcaggactgagaccatggaggcggtggcggtggccgcggcggtggggg

SEQ ID NO: 21072 - DNA, 201 bp, Homo sapiens
tctggctccggaagaccccatattccccatcatcgggagcctcttcctgcgagagctgatcaaagagtttggcacagaccacatctatggggccgacactytcaatgagatgcagccaccttcctcagagccctcctaccttgccgcagccaccactgccgtctatgaggccatgactgcagtggatactgaggctgtgtg

SEQ ID NO: 21073 - DNA, 201 bp, Homo sapiens
ggccgacttctccgtgtcggtggagcgcgctctggctgccaagccgggcttggacacctacagcctgggcggcggcggcgcggcgcgcgtgcgggtgcgckgctccacgggcgtggcggccgccgcggggctgcaccgctacctgcgcgacttctgtggctgccacgtggcctggtccggctctcagctgcgcctgccgcg

SEQ ID NO: 21074 - DNA, 201 bp, Homo sapiens
tggtgcatgctgcacaactttgggggaaaccatggtctttttggagccctagaggctgtgaacggaggcccagaagctgcccgcctcttccccaactccaycatggtaggcacgggcatggcccccgagggcatcagccagaacgaagtggtctattccctcatggctgagctgggctggcgaaaggacccagtgccagat

SEQ ID NO: 21075 - DNA, 201 bp, Homo sapiens
actggagcaggccttcgttctcagcaagcagaggtaccccagccagccgcgaggagacactgtggacctggccaagaagatcttcctcaaatattaccccsgctgggtggccggctcttggtgatagattcgccaccactgggccttgttttccgctaattccagggcagattccagggcccagagctggacagacatcac

SEQ ID NO: 21076 - DNA, 201 bp, Homo sapiens
tgcgcctgccgcggccactgccagccgtgccgggggagctgaccgaggccacgcccaacaggtaccgctattaccagaatgtgtgcacgcaaagctactcyttcgtgtggtgggactgggcccgctgggagcgagagatagactggatggcgctgaatggcatcaacctggcactggcctggagcggccaggaggccatct

SEQ ID NO: 21077 - DNA, 201 bp, Homo sapiens
cgcctcctggttctggacctgtttgctgagagccagcctgtgtatacccgcactgcctccttccagggccagcccttcatctggtgcatgctgcacaactytgggggaaaccatggtctttttggagccctagaggctgtgaacggaggcccagaagctgcccgcctcttccccaactccaccatggtaggcacgggcatg

SEQ ID NO: 21078 - DNA, 201 bp, Homo sapiens
ccacccggacgcaggggcagcgtggaggctactgctccggagtgtgtacaactgctccggggaggcctgcaggggccacaatcgtagcccgctggtcaggyggccgtccctacagatgaataccagcatctggtacaaccgatctgatgtgtttgaggcctggcggctgctgctcacatctgctccctccctggccaccag

SEQ ID NO: 21079 - DNA, 201 bp, Homo sapiens
ggagctgtgccccgtggccgcctcctggttctggacctgtttgctgagagccagcctgtgtatacccgcactgcctccttccagggccagcccttcatctrgtgcatgctgcacaactttgggggaaaccatggtctttttggagccctagaggctgtgaacggaggcccagaagctgcccgcctcttccccaactccacc

SEQ ID NO: 21080 - DNA, 201 bp, Homo sapiens
agacatcacaggataacccaggcctgggaggaggccccacggcctgctggtggggtctgacctggggggattggagggaaatgacctgccctccaccaccmcccaaagtgtgggattaaagtactgttttctttccacttaaactgatgagtcccctgggtctgtcaaaatgagaaggtcactgctgccacgcttgggagg

SEQ ID NO: 21081 - DNA, 201 bp, Homo sapiens
tcctaccttgccgcagccaccactgccgtctatgaggccatgactgcagtggatactgaggctgtgtggctgctccaaggctggctcttccagcaccagcygcagttctgggggcccgcccagatcagggctgtgctgggagctgtgccccgtggccgcctcctggttctggacctgtttgctgagagccagcctgtgtat

SEQ ID NO: 21082 - DNA, 201 bp, Homo sapiens
gtgtacaactgctccggggaggcctgcaggggccacaatcgtagcccgctggtcaggcggccgtccctacagatgaataccagcatctggtacaaccgatmtgatgtgtttgaggcctggcggctgctgctcacatctgctccctccctggccaccagccccgccttccgctacgacctgctggacctcactcggcaggca

SEQ ID NO: 21083 - DNA, 201 bp, Homo sapiens
ctggacagacatcacaggataacccaggcctgggaggaggccccacggcctgctggtggggtctgacctggggggattggagggaaatgacctgccctccmccaccacccaaagtgtgggattaaagtactgttttctttccacttaaactgatgagtcccctgggtctgtcaaaatgagaaggtcactgctgccacgctt

SEQ ID NO: 21084 - DNA, 201 bp, Homo sapiens
cgccaccactgggccttgttttccgctaattccagggcagattccagggcccagagctggacagacatcacaggataacccaggcctgggaggaggccccmcggcctgctggtggggtctgacctggggggattggagggaaatgacctgccctccaccaccacccaaagtgtgggattaaagtactgttttctttccact

SEQ ID NO: 21085 - DNA, 201 bp, Homo sapiens
tcaggtcaatgtcacgaagatgggcagttggggccactttaactgttcctactcctgctccttccttctggctccggaagaccccatattccccatcatcrggagcctcttcctgcgagagctgatcaaagagtttggcacagaccacatctatggggccgacactttcaatgagatgcagccaccttcctcagagccctc

SEQ ID NO: 21086 - DNA, 201 bp, Homo sapiens
gggcatgttcccgaggctgtcaccagggtgttccctcaggtcaatgtcacgaagatgggcagttggggccactttaactgttcctactcctgctccttccytctggctccggaagaccccatattccccatcatcgggagcctcttcctgcgagagctgatcaaagagtttggcacagaccacatctatggggccgacact

SEQ ID NO: 21087 - DNA, 201 bp, Homo sapiens
gcattcgcggggcatgttcccgaggctgtcaccagggtgttccctcaggtcaatgtcacgaagatgggcagttggggccactttaactgttcctactcctkctccttccttctggctccggaagaccccatattccccatcatcgggagcctcttcctgcgagagctgatcaaagagtttggcacagaccacatctatggg

SEQ ID NO: 21088 - DNA, 201 bp, Homo sapiens
gacagacatcacaggataacccaggcctgggaggaggccccacggcctgctggtggggtctgacctggggggattggagggaaatgacctgccctccaccmccacccaaagtgtgggattaaagtactgttttctttccacttaaactgatgagtcccctgggtctgtcaaaatgagaaggtcactgctgccacgcttggg

SEQ ID NO: 21089 - DNA, 201 bp, Homo sapiens
gaagatgggcagttggggccactttaactgttcctactcctgctccttccttctggctccggaagaccccatattccccatcatcgggagcctcttcctgygagagctgatcaaagagtttggcacagaccacatctatggggccgacactttcaatgagatgcagccaccttcctcagagccctcctaccttgccgcagc

SEQ ID NO: 21090 - DNA, 201 bp, Homo sapiens
cccgaaggcgctctgtgagggccagcgggtccccttcggccctggagccggggtcacacgctccccaccgcgtgcggtcacgagacgcccccaagggagtrtcctggtacccggaagccgcgactcctggccctgagcccgggcttagccttcgggtccacgtggccggaggccggcagctgattggacgcgggccgcccc

SEQ ID NO: 21091 - DNA, 201 bp, Homo sapiens
cggccaggaggccatctggcagcgggtgtacctggccttgggcctgacccaggcagagatcaatgagttctttactggtcctgccttcctggcctgggggygaatgggcaacctgcacacctgggatggccccctgcccccctcctggcacatcaagcagctttacctgcagcaccgggtcctggaccagatgcgctcctt

SEQ ID NO: 21092 - DNA, 201 bp, Homo sapiens
ggagctgaccgaggccacgcccaacaggtaccgctattaccagaatgtgtgcacgcaaagctactccttcgtgtggtgggactgggcccgctgggagcgaragatagactggatggcgctgaatggcatcaacctggcactggcctggagcggccaggaggccatctggcagcgggtgtacctggccttgggcctgaccca

SEQ ID NO: 21093 - DNA, 201 bp, Homo sapiens
gggcgtggcggccgccgcggggctgcaccgctacctgcgcgacttctgtggctgccacgtggcctggtccggctctcagctgcgcctgccgcggccactgycagccgtgccgggggagctgaccgaggccacgcccaacaggtaccgctattaccagaatgtgtgcacgcaaagctactccttcgtgtggtgggactgggc

SEQ ID NO: 21094 - DNA, 201 bp, Homo sapiens
ctgggcggcggcggcgcggcgcgcgtgcgggtgcgcggctccacgggcgtggcggccgccgcggggctgcaccgctacctgcgcgacttctgtggctgccrcgtggcctggtccggctctcagctgcgcctgccgcggccactgccagccgtgccgggggagctgaccgaggccacgcccaacaggtaccgctattaccag

SEQ ID NO: 21095 - DNA, 201 bp, Homo sapiens
caagccgggcttggacacctacagcctgggcggcggcggcgcggcgcgcgtgcgggtgcgcggctccacgggcgtggcggccgccgcggggctgcaccgcyacctgcgcgacttctgtggctgccacgtggcctggtccggctctcagctgcgcctgccgcggccactgccagccgtgccgggggagctgaccgaggccac

SEQ ID NO: 21096 - DNA, 201 bp, Homo sapiens
ccctcgctggcggcttttcctggaggcgctggttgacagtgtggcccagggcatccctttccaacagcaccagtttgacaaaaatgtcttccaactggagyaggccttcgttctcagcaagcagaggtaccccagccagccgcgaggagacactgtggacctggccaagaagatcttcctcaaatattaccccggctgggt

SEQ ID NO: 21097 - DNA, 201 bp, Homo sapiens
tggccggggccgggggcgcggcaggcgacgaggcccgggaggcggcggccgtgcgggcgctcgtggcccggctgctggggccaggccccgcggccgacttmtccgtgtcggtggagcgcgctctggctgccaagccgggcttggacacctacagcctgggcggcggcggcgcggcgcgcgtgcgggtgcgcggctccacgg

SEQ ID NO: 21098 - DNA, 201 bp, Homo sapiens
ctggctagtgacagccgcttcttgctgggcagctggctagagcaggcccgagcagcggcagtcagtgaggccgaggccgatttctacgagcagaacagccrctaccagctgaccttgtgggggccagaaggcaacatcctggactatgccaacaagcagctggcggggttggtggccaactactacacccctcgctggcgg

SEQ ID NO: 21099 - DNA, 201 bp, Homo sapiens
cacccctcgctggcggcttttcctggaggcgctggttgacagtgtggcccagggcatccctttccaacagcaccagtttgacaaaaatgtcttccaactgragcaggccttcgttctcagcaagcagaggtaccccagccagccgcgaggagacactgtggacctggccaagaagatcttcctcaaatattaccccggctg

SEQ ID NO: 21100 - DNA, 201 bp, Homo sapiens
tgggggccagaaggcaacatcctggactatgccaacaagcagctggcggggttggtggccaactactacacccctcgctggcggcttttcctggaggcgckggttgacagtgtggcccagggcatccctttccaacagcaccagtttgacaaaaatgtcttccaactggagcaggccttcgttctcagcaagcagaggtac

SEQ ID NO: 21101 - DNA, 201 bp, Homo sapiens
cgctaccagctgaccttgtgggggccagaaggcaacatcctggactatgccaacaagcagctggcggggttggtggccaactactacacccctcgctggcsgcttttcctggaggcgctggttgacagtgtggcccagggcatccctttccaacagcaccagtttgacaaaaatgtcttccaactggagcaggccttcgtt

SEQ ID NO: 21102 - DNA, 201 bp, Homo sapiens
agccgctaccagctgaccttgtgggggccagaaggcaacatcctggactatgccaacaagcagctggcggggttggtggccaactactacacccctcgctrgcggcttttcctggaggcgctggttgacagtgtggcccagggcatccctttccaacagcaccagtttgacaaaaatgtcttccaactggagcaggccttc

SEQ ID NO: 21103 - DNA, 201 bp, Homo sapiens
tcttgctgggcagctggctagagcaggcccgagcagcggcagtcagtgaggccgaggccgatttctacgagcagaacagccgctaccagctgaccttgtgsgggccagaaggcaacatcctggactatgccaacaagcagctggcggggttggtggccaactactacacccctcgctggcggcttttcctggaggcgctgg

SEQ ID NO: 21104 - DNA, 201 bp, Homo sapiens
ccacggcctgctggtggggtctgacctggggggattggagggaaatgacctgccctccaccaccacccaaagtgtgggattaaagtactgttttctttccmcttaaactgatgagtcccctgggtctgtcaaaatgagaaggtcactgctgccacgcttgggaggactcagggctatagcatggccctggggtgggacctg

SEQ ID NO: 21105 - DNA, 201 bp, Homo sapiens
cagctgcgcctgccgcggccactgccagccgtgccgggggagctgaccgaggccacgcccaacaggtaccgctattaccagaatgtgtgcacgcaaagctrctccttcgtgtggtgggactgggcccgctgggagcgagagatagactggatggcgctgaatggcatcaacctggcactggcctggagcggccaggaggcc

SEQ ID NO: 21106 - DNA, 201 bp, Homo sapiens
actggtcctgccttcctggcctgggggcgaatgggcaacctgcacacctgggatggccccctgcccccctcctggcacatcaagcagctttacctgcagcmccgggtcctggaccagatgcgctccttcggcatgaccccagtgctgcctgcattcgcggggcatgttcccgaggctgtcaccagggtgttccctcaggtc

SEQ ID NO: 21107 - DNA, 201 bp, Homo sapiens
ctggccggggccgggggcgcggcaggcgacgaggcccgggaggcggcggccgtgcgggcgctcgtggcccggctgctggggccaggccccgcggccgactkctccgtgtcggtggagcgcgctctggctgccaagccgggcttggacacctacagcctgggcggcggcggcgcggcgcgcgtgcgggtgcgcggctccacg

SEQ ID NO: 21108 - DNA, 201 bp, Homo sapiens
tgggatggccccctgcccccctcctggcacatcaagcagctttacctgcagcaccgggtcctggaccagatgcgctccttcggcatgaccccagtgctgcytgcattcgcggggcatgttcccgaggctgtcaccagggtgttccctcaggtcaatgtcacgaagatgggcagttggggccactttaactgttcctactcc

SEQ ID NO: 21109 - DNA, 201 bp, Homo sapiens
cccccctcctggcacatcaagcagctttacctgcagcaccgggtcctggaccagatgcgctccttcggcatgaccccagtgctgcctgcattcgcggggcrtgttcccgaggctgtcaccagggtgttccctcaggtcaatgtcacgaagatgggcagttggggccactttaactgttcctactcctgctccttccttctg

SEQ ID NO: 21110 - DNA, 201 bp, Homo sapiens
cacgggcatggcccccgagggcatcagccagaacgaagtggtctattccctcatggctgagctgggctggcgaaaggacccagtgccagatttggcagcckgggtgaccagctttgccgcccggcggtatggggtctcccacccggacgcaggggcagcgtggaggctactgctccggagtgtgtacaactgctccgggga

SEQ ID NO: 21111 - DNA, 201 bp, Homo sapiens
gaacagccgctaccagctgaccttgtgggggccagaaggcaacatcctggactatgccaacaagcagctggcggggttggtggccaactactacacccctygctggcggcttttcctggaggcgctggttgacagtgtggcccagggcatccctttccaacagcaccagtttgacaaaaatgtcttccaactggagcaggc

SEQ ID NO: 21112 - DNA, 201 bp, Homo sapiens
agtgaggccgaggccgatttctacgagcagaacagccgctaccagctgaccttgtgggggccagaaggcaacatcctggactatgccaacaagcagctggyggggttggtggccaactactacacccctcgctggcggcttttcctggaggcgctggttgacagtgtggcccagggcatccctttccaacagcaccagttt

SEQ ID NO: 21113 - DNA, 201 bp, Homo sapiens
ttgctgggcagctggctagagcaggcccgagcagcggcagtcagtgaggccgaggccgatttctacgagcagaacagccgctaccagctgaccttgtgggrgccagaaggcaacatcctggactatgccaacaagcagctggcggggttggtggccaactactacacccctcgctggcggcttttcctggaggcgctggtt

SEQ ID NO: 21114 - DNA, 201 bp, Homo sapiens
gctggctagtgacagccgcttcttgctgggcagctggctagagcaggcccgagcagcggcagtcagtgaggccgaggccgatttctacgagcagaacagcygctaccagctgaccttgtgggggccagaaggcaacatcctggactatgccaacaagcagctggcggggttggtggccaactactacacccctcgctggcg

SEQ ID NO: 21115 - DNA, 201 bp, Homo sapiens
tgagcaaggagctggcctccctgttgagggctggaggcgtcctggcctatgagctgctgccggcactggacgaggtgctggctagtgacagccgcttcttsctgggcagctggctagagcaggcccgagcagcggcagtcagtgaggccgaggccgatttctacgagcagaacagccgctaccagctgaccttgtgggggc

SEQ ID NO: 21116 - DNA, 201 bp, Homo sapiens
ggcaagaagcgcctacctgagcaaggagctggcctccctgttgagggctggaggcgtcctggcctatgagctgctgccggcactggacgaggtgctggctrgtgacagccgcttcttgctgggcagctggctagagcaggcccgagcagcggcagtcagtgaggccgaggccgatttctacgagcagaacagccgctacca

SEQ ID NO: 21117 - DNA, 201 bp, Homo sapiens
tacgacctgctggacctcactcggcaggcagtgcaggagctggtcagcttgtactatgaggaggcaagaagcgcctacctgagcaaggagctggcctcccygttgagggctggaggcgtcctggcctatgagctgctgccggcactggacgaggtgctggctagtgacagccgcttcttgctgggcagctggctagagcag

SEQ ID NO: 21118 - DNA, 201 bp, Homo sapiens
ggaggcggtggcggtggccgcggcggtgggggtccttctcctggccggggccgggggcgcggcaggcgacgaggcccgggaggcggcggccgtgcgggcgytcgtggcccggctgctggggccaggccccgcggccgacttctccgtgtcggtggagcgcgctctggctgccaagccgggcttggacacctacagcctggg

SEQ ID NO: 21119 - DNA, 201 bp, Homo sapiens
aacagccgctaccagctgaccttgtgggggccagaaggcaacatcctggactatgccaacaagcagctggcggggttggtggccaactactacacccctcrctggcggcttttcctggaggcgctggttgacagtgtggcccagggcatccctttccaacagcaccagtttgacaaaaatgtcttccaactggagcaggcc

SEQ ID NO: 21120 - DNA, 201 bp, Homo sapiens
ctccaaatgtgtatttattagatggttggatggaagttatttgcgtgtgaaagcgcgttttacccgaaggcgctctgtgagggccagcgggtccccttcgsccctggagccggggtcacacgctccccaccgcgtgcggtcacgagacgcccccaagggagtatcctggtacccggaagccgcgactcctggccctgagcc

SEQ ID NO: 21121 - DNA, 201 bp, Homo sapiens
tccgtgtcggtggagcgcgctctggctgccaagccgggcttggacacctacagcctgggcggcggcggcgcggcgcgcgtgcgggtgcgcggctccacggrcgtggcggccgccgcggggctgcaccgctacctgcgcgacttctgtggctgccacgtggcctggtccggctctcagctgcgcctgccgcggccactgcca

SEQ ID NO: 21122 - DNA, 201 bp, Homo sapiens
gctgcgcctgccgcggccactgccagccgtgccgggggagctgaccgaggccacgcccaacaggtaccgctattaccagaatgtgtgcacgcaaagctacwccttcgtgtggtgggactgggcccgctgggagcgagagatagactggatggcgctgaatggcatcaacctggcactggcctggagcggccaggaggccat

SEQ ID NO: 21123 - DNA, 201 bp, Homo sapiens
caaagagtttggcacagaccacatctatggggccgacactttcaatgagatgcagccaccttcctcagagccctcctaccttgccgcagccaccactgccktctatgaggccatgactgcagtggatactgaggctgtgtggctgctccaaggctggctcttccagcaccagccgcagttctgggggcccgcccagatcag

SEQ ID NO: 21124 - DNA, 201 bp, Homo sapiens
gtttggcacagaccacatctatggggccgacactttcaatgagatgcagccaccttcctcagagccctcctaccttgccgcagccaccactgccgtctatkaggccatgactgcagtggatactgaggctgtgtggctgctccaaggctggctcttccagcaccagccgcagttctgggggcccgcccagatcagggctgt

SEQ ID NO: 21125 - DNA, 201 bp, Homo sapiens
aaccgatctgatgtgtttgaggcctggcggctgctgctcacatctgctccctccctggccaccagccccgccttccgctacgacctgctggacctcactcvgcaggcagtgcaggagctggtcagcttgtactatgaggaggcaagaagcgcctacctgagcaaggagctggcctccctgttgagggctggaggcgtcctg

SEQ ID NO: 21126 - DNA, 201 bp, Homo sapiens
caaccgatctgatgtgtttgaggcctggcggctgctgctcacatctgctccctccctggccaccagccccgccttccgctacgacctgctggacctcactyggcaggcagtgcaggagctggtcagcttgtactatgaggaggcaagaagcgcctacctgagcaaggagctggcctccctgttgagggctggaggcgtcct

SEQ ID NO: 21127 - DNA, 201 bp, Homo sapiens
agcatctggtacaaccgatctgatgtgtttgaggcctggcggctgctgctcacatctgctccctccctggccaccagccccgccttccgctacgacctgckggacctcactcggcaggcagtgcaggagctggtcagcttgtactatgaggaggcaagaagcgcctacctgagcaaggagctggcctccctgttgagggct

SEQ ID NO: 21128 - DNA, 201 bp, Homo sapiens
accagcatctggtacaaccgatctgatgtgtttgaggcctggcggctgctgctcacatctgctccctccctggccaccagccccgccttccgctacgaccygctggacctcactcggcaggcagtgcaggagctggtcagcttgtactatgaggaggcaagaagcgcctacctgagcaaggagctggcctccctgttgagg

SEQ ID NO: 21129 - DNA, 201 bp, Homo sapiens
ctgaccgaggccacgcccaacaggtaccgctattaccagaatgtgtgcacgcaaagctactccttcgtgtggtgggactgggcccgctgggagcgagagakagactggatggcgctgaatggcatcaacctggcactggcctggagcggccaggaggccatctggcagcgggtgtacctggccttgggcctgacccaggca

SEQ ID NO: 21130 - DNA, 201 bp, Homo sapiens
ccggacgcaggggcagcgtggaggctactgctccggagtgtgtacaactgctccggggaggcctgcaggggccacaatcgtagcccgctggtcaggcggcygtccctacagatgaataccagcatctggtacaaccgatctgatgtgtttgaggcctggcggctgctgctcacatctgctccctccctggccaccagcccc

SEQ ID NO: 21131 - DNA, 201 bp, Homo sapiens
cgtggcccggctgctggggccaggccccgcggccgacttctccgtgtcggtggagcgcgctctggctgccaagccgggcttggacacctacagcctgggcrgcggcggcgcggcgcgcgtgcgggtgcgcggctccacgggcgtggcggccgccgcggggctgcaccgctacctgcgcgacttctgtggctgccacgtggc

SEQ ID NO: 21132 - DNA, 201 bp, Homo sapiens
tgggctggcgaaaggacccagtgccagatttggcagcctgggtgaccagctttgccgcccggcggtatggggtctcccacccggacgcaggggcagcgtgraggctactgctccggagtgtgtacaactgctccggggaggcctgcaggggccacaatcgtagcccgctggtcaggcggccgtccctacagatgaatacca

SEQ ID NO: 21133 - DNA, 201 bp, Homo sapiens
cagccagaacgaagtggtctattccctcatggctgagctgggctggcgaaaggacccagtgccagatttggcagcctgggtgaccagctttgccgcccggyggtatggggtctcccacccggacgcaggggcagcgtggaggctactgctccggagtgtgtacaactgctccggggaggcctgcaggggccacaatcgtag

SEQ ID NO: 21134 - DNA, 201 bp, Homo sapiens
gctgtgaacggaggcccagaagctgcccgcctcttccccaactccaccatggtaggcacgggcatggcccccgagggcatcagccagaacgaagtggtctrttccctcatggctgagctgggctggcgaaaggacccagtgccagatttggcagcctgggtgaccagctttgccgcccggcggtatggggtctcccacccg

SEQ ID NO: 21135 - DNA, 201 bp, Homo sapiens
agccctagaggctgtgaacggaggcccagaagctgcccgcctcttccccaactccaccatggtaggcacgggcatggcccccgagggcatcagccagaacraagtggtctattccctcatggctgagctgggctggcgaaaggacccagtgccagatttggcagcctgggtgaccagctttgccgcccggcggtatggggt

SEQ ID NO: 21136 - DNA, 201 bp, Homo sapiens
ctggacctgtttgctgagagccagcctgtgtatacccgcactgcctccttccagggccagcccttcatctggtgcatgctgcacaactttgggggaaaccrtggtctttttggagccctagaggctgtgaacggaggcccagaagctgcccgcctcttccccaactccaccatggtaggcacgggcatggcccccgagggc

SEQ ID NO: 21137 - DNA, 201 bp, Homo sapiens
gtgccagatttggcagcctgggtgaccagctttgccgcccggcggtatggggtctcccacccggacgcaggggcagcgtggaggctactgctccggagtgkgtacaactgctccggggaggcctgcaggggccacaatcgtagcccgctggtcaggcggccgtccctacagatgaataccagcatctggtacaaccgatct

SEQ ID NO: 21138 - DNA, 201 bp, Homo sapiens
gcccgagcagcggcagtcagtgaggccgaggccgatttctacgagcagaacagccgctaccagctgaccttgtgggggccagaaggcaacatcctggactwtgccaacaagcagctggcggggttggtggccaactactacacccctcgctggcggcttttcctggaggcgctggttgacagtgtggcccagggcatccct

SEQ ID NO: 21139 - DNA, 201 bp, Homo sapiens
gagggctggaggcgtcctggcctatgagctgctgccggcactggacgaggtgctggctagtgacagccgcttcttgctgggcagctggctagagcaggccygagcagcggcagtcagtgaggccgaggccgatttctacgagcagaacagccgctaccagctgaccttgtgggggccagaaggcaacatcctggactatgc

SEQ ID NO: 21140 - DNA, 201 bp, Homo sapiens
tcctgctccttccttctggctccggaagaccccatattccccatcatcgggagcctcttcctgcgagagctgatcaaagagtttggcacagaccacatctrtggggccgacactttcaatgagatgcagccaccttcctcagagccctcctaccttgccgcagccaccactgccgtctatgaggccatgactgcagtggat

SEQ ID NO: 21141 - DNA, 201 bp, Homo sapiens
ctggttctggacctgtttgctgagagccagcctgtgtatacccgcactgcctccttccagggccagcccttcatctggtgcatgctgcacaactttggggraaaccatggtctttttggagccctagaggctgtgaacggaggcccagaagctgcccgcctcttccccaactccaccatggtaggcacgggcatggccccc

SEQ ID NO: 21142 - DNA, 201 bp, Homo sapiens
aggccacgcccaacaggtaccgctattaccagaatgtgtgcacgcaaagctactccttcgtgtggtgggactgggcccgctgggagcgagagatagactgkatggcgctgaatggcatcaacctggcactggcctggagcggccaggaggccatctggcagcgggtgtacctggccttgggcctgacccaggcagagatca

SEQ ID NO: 21143 - DNA, 201 bp, Homo sapiens; identical to SEQ ID NO: 21070

SEQ ID NO: 21144 - DNA, 201 bp, Homo sapiens
gatttgttccagggccgtggaccctccagggtgggatgcgcccctgctcatgacactgcccgcaggtaccgctattaccagaatgtgtgcacgcaaagctrctccttcgtgtggtgggactgggcccgctgggagcgagagatagactggatggcgctgaatggcatcaacctggcactggcctggagcggccaggaggcc

SEQ ID NO: 21145 - DNA, 201 bp, Homo sapiens; identical to SEQ ID NO: 21106

SEQ ID NO: 21146 - DNA, 201 bp, Homo sapiens; identical to SEQ ID NO: 21108

SEQ ID NO: 21147 - DNA, 201 bp, Homo sapiens; identical to SEQ ID NO: 21109

SEQ ID NO: 21148 - DNA, 201 bp, Homo sapiens; identical to SEQ ID NO: 21110

SEQ ID NO: 21149 - DNA, 201 bp, Homo sapiens; identical to SEQ ID NO: 21072

SEQ ID NO: 21150 - DNA, 201 bp, Homo sapiens; identical to SEQ ID NO: 21074

SEQ ID NO: 21151 - DNA, 201 bp, Homo sapiens; identical to SEQ ID NO: 21075

SEQ ID NO: 21152 - DNA, 201 bp, Homo sapiens; identical to SEQ ID NO: 21111

SEQ ID NO: 21153 - DNA, 201 bp, Homo sapiens; identical to SEQ ID NO: 21112

SEQ ID NO: 21154 - DNA, 201 bp, Homo sapiens; identical to SEQ ID NO: 21113

SEQ ID NO: 21155 - DNA, 201 bp, Homo sapiens
tgttccagggccgtggaccctccagggtgggatgcgcccctgctcatgacactgcccgcaggtaccgctattaccagaatgtgtgcacgcaaagctactcyttcgtgtggtgggactgggcccgctgggagcgagagatagactggatggcgctgaatggcatcaacctggcactggcctggagcggccaggaggccatct

SEQ ID NO: 21156 - DNA, 201 bp, Homo sapiens; identical to SEQ ID NO: 21077

SEQ ID NO: 21157 - DNA, 201 bp, Homo sapiens; identical to SEQ ID NO: 21080

SEQ ID NO: 21158 - DNA, 201 bp, Homo sapiens; identical to SEQ ID NO: 21079

SEQ ID NO: 21159 - DNA, 201 bp, Homo sapiens; identical to SEQ ID NO: 21078

SEQ ID NO: 21160 - DNA, 201 bp, Homo sapiens; identical to SEQ ID NO: 21114

SEQ ID NO: 21161 - DNA, 201 bp, Homo sapiens; identical to SEQ ID NO: 21083

SEQ ID NO: 21162 - DNA, 201 bp, Homo sapiens; identical to SEQ ID NO: 21082

SEQ ID NO: 21163 - DNA, 201 bp, Homo sapiens; identical to SEQ ID NO: 21081

SEQ ID NO: 21164 - DNA, 201 bp, Homo sapiens; identical to SEQ ID NO: 21115

SEQ ID NO: 21165 - DNA, 201 bp, Homo sapiens; identical to SEQ ID NO: 21084

SEQ ID NO: 21166 - DNA, 201 bp, Homo sapiens; identical to SEQ ID NO: 21116

SEQ ID NO: 21167 - DNA, 201 bp, Homo sapiens; identical to SEQ ID NO: 21117

SEQ ID NO: 21168 - DNA, 201 bp, Homo sapiens; identical to SEQ ID NO: 21085

SEQ ID NO: 21169 - DNA, 201 bp, Homo sapiens; identical to SEQ ID NO: 21086

SEQ ID NO: 21170 - DNA, 201 bp, Homo sapiens; identical to SEQ ID NO: 21087

SEQ ID NO: 21171 - DNA, 201 bp, Homo sapiens; identical to SEQ ID NO: 21119

SEQ ID NO: 21172 - DNA, 201 bp, Homo sapiens; identical to SEQ ID NO: 21088

SEQ ID NO: 21173 - DNA, 201 bp, Homo sapiens
tttgttccagggccgtggaccctccagggtgggatgcgcccctgctcatgacactgcccgcaggtaccgctattaccagaatgtgtgcacgcaaagctacwccttcgtgtggtgggactgggcccgctgggagcgagagatagactggatggcgctgaatggcatcaacctggcactggcctggagcggccaggaggccat

SEQ ID NO: 21174 - DNA, 201 bp, Homo sapiens; identical to SEQ ID NO: 21123

SEQ ID NO: 21175 - DNA, 201 bp, Homo sapiens; identical to SEQ ID NO: 21089

SEQ ID NO: 21176 - DNA, 201 bp, Homo sapiens; identical to SEQ ID NO: 21124

SEQ ID NO: 21177 - DNA, 201 bp, Homo sapiens; identical to SEQ ID NO: 21091

SEQ ID NO: 21178 - DNA, 201 bp, Homo sapiens
cgcccctgctcatgacactgcccgcaggtaccgctattaccagaatgtgtgcacgcaaagctactccttcgtgtggtgggactgggcccgctgggagcgaragatagactggatggcgctgaatggcatcaacctggcactggcctggagcggccaggaggccatctggcagcgggtgtacctggccttgggcctgaccca

SEQ ID NO: 21179 - DNA, 201 bp, Homo sapiens; identical to SEQ ID NO: 21125

SEQ ID NO: 21180 - DNA, 201 bp, Homo sapiens; identical to SEQ ID NO: 21098

SEQ ID NO: 21181 - DNA, 201 bp, Homo sapiens; identical to SEQ ID NO: 21126

SEQ ID NO: 21182 - DNA, 201 bp, Homo sapiens; identical to SEQ ID NO: 21096

SEQ ID NO: 21183 - DNA, 201 bp, Homo sapiens; identical to SEQ ID NO: 21099

SEQ ID NO: 21184 - DNA, 201 bp, Homo sapiens; identical to SEQ ID NO: 21127

SEQ ID NO: 21185 - DNA, 201 bp, Homo sapiens; identical to SEQ ID NO: 21100

SEQ ID NO: 21186 - DNA, 201 bp, Homo sapiens; identical to SEQ ID NO: 21128

SEQ ID NO: 21187 - DNA, 201 bp, Homo sapiens
cctgctcatgacactgcccgcaggtaccgctattaccagaatgtgtgcacgcaaagctactccttcgtgtggtgggactgggcccgctgggagcgagagakagactggatggcgctgaatggcatcaacctggcactggcctggagcggccaggaggccatctggcagcgggtgtacctggccttgggcctgacccaggca

SEQ ID NO: 21188 - DNA, 201 bp, Homo sapiens; identical to SEQ ID NO: 21130

SEQ ID NO: 21189 - DNA, 201 bp, Homo sapiens; identical to SEQ ID NO: 21101

SEQ ID NO: 21190 - DNA, 201 bp, Homo sapiens; identical to SEQ ID NO: 21102

SEQ ID NO: 21191 - DNA, 201 bp, Homo sapiens; identical to SEQ ID NO: 21132

SEQ ID NO: 21192 - DNA, 201 bp, Homo sapiens; identical to SEQ ID NO: 21133

SEQ ID NO: 21193 - DNA, 201 bp, Homo sapiens; identical to SEQ ID NO: 21134

SEQ ID NO: 21194 - DNA, 201 bp, Homo sapiens; identical to SEQ ID NO: 21135

SEQ ID NO: 21195 - DNA, 201 bp, Homo sapiens; identical to SEQ ID NO: 21138

SEQ ID NO: 21196 - DNA, 201 bp, Homo sapiens; identical to SEQ ID NO: 21137

SEQ ID NO: 21197 - DNA, 201 bp, Homo sapiens; identical to SEQ ID NO: 21136

SEQ ID NO: 21198 - DNA, 201 bp, Homo sapiens; identical to SEQ ID NO: 21103

SEQ ID NO: 21199 - DNA, 201 bp, Homo sapiens; identical to SEQ ID NO: 21104

SEQ ID NO: 21200 - DNA, 201 bp, Homo sapiens; identical to SEQ ID NO: 21140

SEQ ID NO: 21201 - DNA, 201 bp, Homo sapiens; identical to SEQ ID NO: 21139

SEQ ID NO: 21202 - DNA, 201 bp, Homo sapiens; identical to SEQ ID NO: 21141

SEQ ID NO: 21203 - DNA, 201 bp, Homo sapiens
atgacactgcccgcaggtaccgctattaccagaatgtgtgcacgcaaagctactccttcgtgtggtgggactgggcccgctgggagcgagagatagactgkatggcgctgaatggcatcaacctggcactggcctggagcggccaggaggccatctggcagcgggtgtacctggccttgggcctgacccaggcagagatca

SEQ ID NO: 21204 - DNA, 201 bp, Homo sapiens
ccagaataaattctacagcgggaccggtttcaagttcttacccttctccttcgagcatattcgggaagggaagtttgaagagtgagtccctgtgagggccrtgtgccccatgctaccctccccgcctccctccacagtgatcagctgtgcctctctgcctgttggttgtgatctgtgggcaccagctcattcgtgtcaccc

SEQ ID NO: 21205 - DNA, 201 bp, Homo sapiens
tggcgtggcagccctggctaagttaatccccaccgctttcagtggtagaaagaattccctgagtgggccaggctggtgccctcctcctaccctggcttttytgagtgagctgcctggagccctcatcccctctcccaggctgggctggccctgggcggggccactgtgtgctggcccactgtgacctgacccgaccttgtg

SEQ ID NO: 21206 - DNA, 201 bp, Homo sapiens
gcaggggtgggtccaggaagatgatatttgcgtcttttgcccacccccctggcattcagctggacccaactaggccatcatgagtggcttctccctgtcayccccaggggtcataggatatctacaccgcctttctgaccccaccctgcactcccatcctttcctctctccccgttcatgccctgcactacatagcacagc

SEQ ID NO: 21207 - DNA, 201 bp, Homo sapiens
atcagctgaaaaacagagtcaagaaaatctgtgaagggttccgagcctcactctatccctgtcctgagacaccacaggagaggaaggaaatggcttctggrgtgaataccaggattgatgatctccaaatggttctgaatcaaacggaggatcaccgccagagggttctgcaggcagctgctaagaacatccgtgtctggt

SEQ ID NO: 21208 - DNA, 166 bp, Homo sapiens
ctgacccgaccttgtgcagcccccctgccctggtgtcctgggttttcgtgatgatctttgctctgtttccagtggggtttgaagcagagttcagggaaccmtgcccaaggtcctcctgttcagacattcctatgttgaataaagtatgtttgacttccccggagaa

SEQ ID NO: 21209 - DNA, 201 bp, Homo sapiens
ccagctgcatcctcctggccatgttcctcgtccactactggcatcggtgcttaatttacccatttctgatgcgaggaggaaagcctgtgccactgttggcrtgcacaatggcgattatgttctgtacctgtaatggctatttgcaaagcagatacttgagccattgtgcagtgtatgctgatgactgagtaaaagatcccc

SEQ ID NO: 21210 - DNA, 201 bp, Homo sapiens; identical to SEQ ID NO: 21209

SEQ ID NO: 21211 - DNA, 201 bp, Homo sapiens
accaggattgaagaagatagaaagaaaaaaatcttggacaaattaattgcaggaagaaatgatcaaattttggcttacatattttgcaacagtggtataayacaaagaagtaagcaaatatggcagaagtgtggtggctttggcgtctacttttgaccatagtggtggccctgttattcgtggctcccggggttcctacac

SEQ ID NO: 21212 - DNA, 201 bp, Homo sapiens
cagttcatctggaaaaaacatttgtttgaagattctcagaataagttgggagcagaaatggtgataaatacatctgggaaatatggatataaatctacctwctgtagccaagacattatgggacctaatattctccagaacctgaaaccatgctaatctcagatacagtcttgatggatttctttagtaggagcaatgaag

SEQ ID NO: 21213 - DNA, 201 bp, Homo sapiens
gatttcacttcaaaaatatgaagactaatggatcacattattttttaaacacagggtccctttccccatttgcccgttggaggcacaaattgtctgttaarctcagtggaagcgaagtcactcaaggaactgtctttcttcgtgtaggcggggcaattgggaaaactggggagtttgccattgtcagtggaaaacttgagc

SEQ ID NO: 21214 - DNA, 201 bp, Homo sapiens
tccatgctgtaaacaatctccgtgttgttggtgctgaggtggcttattttattgatgttctcatgaaaaaatttgaatattccccttctaaagtgcacttrattggccacagcttgggagcacacctggctggggaagctgggtcaaggataccaggccttggaagaataactgggttggacccagctgggccatttttcc

SEQ ID NO: 21215 - DNA, 201 bp, Homo sapiens
actaatggatcacattattttttaaacacagggtccctttccccatttgcccgttggaggcacaaattgtctgttaaactcagtggaagcgaagtcactcraggaactgtctttcttcgtgtaggcggggcaattgggaaaactggggagtttgccattgtcagtggaaaacttgagccaggcatgacttacacaaaatta

SEQ ID NO: 21216 - DNA, 201 bp, Homo sapiens
cacagggtccctttccccatttgcccgttggaggcacaaattgtctgttaaactcagtggaagcgaagtcactcaaggaactgtctttcttcgtgtaggcrgggcaattgggaaaactggggagtttgccattgtcagtggaaaacttgagccaggcatgacttacacaaaattaatcgatgcagatgttaacgttggaaa

SEQ ID NO: 21217 - DNA, 201 bp, Homo sapiens
agggtccctttccccatttgcccgttggaggcacaaattgtctgttaaactcagtggaagcgaagtcactcaaggaactgtctttcttcgtgtaggcgggrcaattgggaaaactggggagtttgccattgtcagtggaaaacttgagccaggcatgacttacacaaaattaatcgatgcagatgttaacgttggaaacat

SEQ ID NO: 21218 - DNA, 201 bp, Homo sapiens
aacggttcacgggaatacatccatgctgtaaacaatctccgtgttgttggtgctgaggtggcttattttattgatgttctcatgaaaaaatttgaatattycccttctaaagtgcacttgattggccacagcttgggagcacacctggctggggaagctgggtcaaggataccaggccttggaagaataactgggttggac

SEQ ID NO: 21219 - DNA, 201 bp, Homo sapiens
gtccctttccccatttgcccgttggaggcacaaattgtctgttaaactcagtggaagcgaagtcactcaaggaactgtctttcttcgtgtaggcggggcarttgggaaaactggggagtttgccattgtcagtggaaaacttgagccaggcatgacttacacaaaattaatcgatgcagatgttaacgttggaaacattac

SEQ ID NO: 21220 - DNA, 201 bp, Homo sapiens
cctttccccatttgcccgttggaggcacaaattgtctgttaaactcagtggaagcgaagtcactcaaggaactgtctttcttcgtgtaggcggggcaattrggaaaactggggagtttgccattgtcagtggaaaacttgagccaggcatgacttacacaaaattaatcgatgcagatgttaacgttggaaacattacaag

SEQ ID NO: 21221 - DNA, 201 bp, Homo sapiens
gtgtaggcggggcaattgggaaaactggggagtttgccattgtcagtggaaaacttgagccaggcatgacttacacaaaattaatcgatgcagatgttaaygttggaaacattacaagtgttcagttcatctggaaaaaacatttgtttgaagattctcagaataagttgggagcagaaatggtgataaatacatctggga

SEQ ID NO: 21222 - DNA, 201 bp, Homo sapiens
aggttgttttctgcatggaccgtgccctagaatttgcccctgcctgccatcgcttcaaaatcctcaaggcagaatgtttagcaatgctgggtcgttatccrgaagcacagtctgtggctagtgacattctacgaatggattccaccaatgcagatgctctgtatgtacgaggtctttgcctttattacgaagattgtattg

SEQ ID NO: 21223 - DNA, 201 bp, Homo sapiens
ggcatctgcattgtctccagtctgtgagccagagctgagcccgacctggacttggggtgcagcaagctgctgcatgcgggctgtgggcacccagcctagtkgcaggtggggcactctgcctctcccagacctgtccagcatgtgagtgctaggcaggccccggctgtgcctctgggcccagcctaacatcagtcacagaga

SEQ ID NO: 21224 - DNA, 201 bp, Homo sapiens
tcattacccggcctcagaaacaggagatgaaagatgaccaggatcattataccaacacttaccacatcttcaccaaagctcctgacaaattagaggaagtyctgtcatactccaatgtaatcagctgggagcaaactttgcagatccaaggttgccaagagggcttggatgaagcaataagaaaggttgcaacttcaaaat

SEQ ID NO: 21225 - DNA, 133 bp, Homo sapiens
tacagaaacctttccattgccatactgagaaastgcagcaggcagtgtgcctacaggtctacaaagaaacttcagatcatcttcttgagggaaagaagctgaagtgctacataagatgcttgtgcttcataac

SEQ ID NO: 21226 - DNA, 201 bp, Homo sapiens
taaaaaaacattaattcaaacacaagcattgtgatctacattagcacaaaatgcaactgattatctaggatctgtgtattacttaagctcacccttaacarttttaccttccttctcctctgtattcttacagaaaattagaagctcaattttatggtctcataatttcctttatgacagacatctcagaattaaaatcac

SEQ ID NO: 21227 - DNA, 201 bp, Homo sapiens
ttcaaatctttcttatcagtaaaaaaacattaattcaaacacaagcattgtgatctacattagcacaaaatgcaactgattatctaggatctgtgtattayttaagctcacccttaacagttttaccttccttctcctctgtattcttacagaaaattagaagctcaattttatggtctcataatttcctttatgacagac

SEQ ID NO: 21228 - DNA, 201 bp, Homo sapiens
tcttcaccaaagctcctgacaaattagaggaagtcctgtcatactccaatgtaatcagctgggagcaaactttgcagatccaaggttgccaagagggcttrgatgaagcaataagaaaggttgcaacttcaaaatcagtgcaggtagattacatgaaaaccatcctctttataccggaattaccaaagaaacacaagacct

SEQ ID NO: 21229 - DNA, 201 bp, Homo sapiens
atgataacaaggaaggaaacttttcaaacatgttcttagatgcttcacatgcaggtcttgtgaatgaacactgggcctttgggaaaaatgagaggagcttkaaatatattgaacgctgcctccaggattttctaggatttggtgtgctgggtccagagggccagcttgtctcttggattgtgatggaacagtcctgtgagt

SEQ ID NO: 21230 - DNA, 201 bp, Homo sapiens
ttacatgaaaaccatcctctttataccggaattaccaaagaaacacaagacctcaagtaatgacaagatggagttatttgaagtggatgatgataacaagraaggaaacttttcaaacatgttcttagatgcttcacatgcaggtcttgtgaatgaacactgggcctttgggaaaaatgagaggagcttgaaatatattga

SEQ ID NO: 21231 - DNA, 201 bp, Homo sapiens
tcttcctgcatattaacttgtttgtaagaaaggaaatctgtgctgcttcagtaagacttaattgtaaaaccatataacttgagatttaagtctttgggttktgttttaataaaacagcatgttttcaggtagagcttaaactaaatgatgtgtttacttagtgcagtttctggttatgaatattatattgctatgtgtata

SEQ ID NO: 21232 - DNA, 201 bp, Homo sapiens
tttgtctgcactcagtttattccctactcaaatctcagccccatgttgttctttgttattgtcagaacctggtgagttgttttgaacagaactgttttttycccttcctgtaagacgatgtgactgcacaagagcactgcagtgtttttcataataaacttgtgaactaagaactgagaaggtcaaattttaattgtatca

SEQ ID NO: 21233 - DNA, 201 bp, Homo sapiens
cggccgagtactgcggtgagagccagcgggccagcgccagcctcaacagccgccagaagtacacgaggaaccggcggcggcgtgtgcgtgtaggcccgtgygcgggcggcggcgcgggaggagcgcggagcggcagccggctggggcgggtggcatcatggacgagaaggtgttcaccaaggagctggaccagtggatcga

SEQ ID NO: 21234 - DNA, 201 bp, Homo sapiens
agccagcgggccagcgccagcctcaacagccgccagaagtacacgaggaaccggcggcggcgtgtgcgtgtaggcccgtgtgcgggcggcggcgcgggagsagcgcggagcggcagccggctggggcgggtggcatcatggacgagaaggtgttcaccaaggagctggaccagtggatcgagcagctgaacgagtgcaagc

SEQ ID NO: 21235 - DNA, 201 bp, Homo sapiens
atcatgccaatggcctcacgttggtgtctagagctcaccagctagtgatggagggatataactggtgccatgaccggaatgtagtaacgattttcagtgcyccaaactattgttatcgttgtggtaaccaagctgcaatcatggaacttgacgatactctaaaatactctttcttgcagtttgacccagcacctcgtagag

SEQ ID NO: 21236 - DNA, 201 bp, Homo sapiens
tatatgatttgtctgcactcagtttattccctactcaaatctcagccccatgttgttctttgttattgtcagaacctggtgagttgttttgaacagaactkttttttccccttcctgtaagacgatgtgactgcacaagagcactgcagtgtttttcataataaacttgtgaactaagaactgagaaggtcaaattttaat

SEQ ID NO: 21237 - DNA, 201 bp, Homo sapiens
cggggagggctctgcagttgcgcagcttgctccccggcccttttcccctccgctccccgccgcctcctgacgccgggcgtgacgtcaccacgcccggcggscgccattacagagagccgagctctggagcctcagcgagcggaggaggaggcgcagcggccgacggccgagtactgcggtgagagccagcgggccagcgcc

SEQ ID NO: 21238 - DNA, 201 bp, Homo sapiens
ggtgagttgttttgaacagaactgttttttccccttcctgtaagacgatgtgactgcacaagagcactgcagtgtttttcataataaacttgtgaactaaraactgagaaggtcaaattttaattgtatcaatgggcaagactggtgctgtttattaaaaaagttaaatcaattgagtaaattttagaatttgtagacttg

SEQ ID NO: 21239 - DNA, 201 bp, Homo sapiens; identical to SEQ ID NO: 21231

SEQ ID NO: 21240 - DNA, 201 bp, Homo sapiens; identical to SEQ ID NO: 21232

SEQ ID NO: 21241 - DNA, 201 bp, Homo sapiens; identical to SEQ ID NO: 21233

SEQ ID NO: 21242 - DNA, 201 bp, Homo sapiens; identical to SEQ ID NO: 21234

SEQ ID NO: 21243 - DNA, 201 bp, Homo sapiens; identical to SEQ ID NO: 21235

SEQ ID NO: 21244 - DNA, 201 bp, Homo sapiens; identical to SEQ ID NO: 21236

SEQ ID NO: 21245 - DNA, 201 bp, Homo sapiens; identical to SEQ ID NO: 21237

SEQ ID NO: 21246 - DNA, 201 bp, Homo sapiens; identical to SEQ ID NO: 21238

SEQ ID NO: 21247 - DNA, 196 bp, Homo sapiens
gggaagcgccggcggaactgggcgcggagggcggtggcgcgtccccgcgcatcctgcggctcgagctcctccgaaggcgggggcgcggggcccctyccgcagtcctggggacgacaaaagtctcctggcactgggggcaagagaccagaaaaaggagtgatgggaattcgaggctctccccggccttggaaaaccc

SEQ ID NO: 21248 - DNA, 201 bp, Homo sapiens
cttttcttttgtgtgaggagcacccacgacgccccgaccatgggcgcaggggcagaggcgaaggtcgtcgctccgtccgctaccccgtcccccagccgcargcgccgaggagccggaagagaggcggaaagggcagcaggctccttacccagaccagcgaggggaggtcagctcgtcgcggggtgtggctcccgtccgggg

SEQ ID NO: 21249 - DNA, 201 bp, Homo sapiens
tcattacgggtggccgtgtgtagccaagttcaagctctccctccgggaatgcctgccgcggcggcggaatacggcttcttcaggacattcagcaaagcggrgaggcggggacctgcgggcggaggagcgacgccccagctgggaacgcggcggacgggcgagcggggggtgcgccctgggcgcgccaggccgcagaggctc

SEQ ID NO: 21250 - DNA, 201 bp, Homo sapiens
atgggcgcaggggcagaggcgaaggtcgtcgctccgtccgctaccccgtcccccagccgcaagcgccgaggagccggaagagaggcggaaagggcagcagkctccttacccagaccagcgaggggaggtcagctcgtcgcggggtgtggctcccgtccggggactcccgagctcattacgggtggccgtgtgtagccaagt

SEQ ID NO: 21251 - DNA, 201 bp, Homo sapiens
agagctttggcatcagacgtagttttgagttgactattctactgcttgttagctgggtagccaaagctcaaaaaaaattgcttaaaacctaggacgttagyccttaaaacaaaaccaggcttccgtagcacagtagaaatgaaatgaacaattggcgacttttgatggagtttcctctcatagtgatttgccacaaaggac

SEQ ID NO: 21252 - DNA, 201 bp, Homo sapiens
cgcccaagccgcggggcagtccagcgctcgctgcgtccttcccccgagagacctggaggctgggtggggagaagaggacgcggtgctgctcggaccccacsgttcggcggtcccaatcccacgccctccgcgcggtcggccgcgtccaggactgaggggcacaatagctctgaagctgcagtgacccctggtgggtcccga

SEQ ID NO: 21253 - DNA, 201 bp, Homo sapiens
cggcttcttcaggacattcagcaaagcggggaggcggggacctgcgggcggaggagcgacgccccagctgggaacgcggcggacgggcgagcggggggtgygccctgggcgcgccaggccgcagaggctccggggaaagttctcttggccgcgcgagtggtggcgccccgggcgggagcagcccaggtgcatgtgggcccg

SEQ ID NO: 21254 - DNA, 201 bp, Homo sapiens
gacgcccccgccgaccccggagcttgccctcagccccttcatctgccgaggcatacccttgctgcccatcccacccagggatcgccacctctgccctctaycaggctccgggcccggtgccgaggactggccgccaagggttgcggactatggccctaaagctcatccacaaggagttcctcgaactggcccgcgaccccc

SEQ ID NO: 21255 - DNA, 133 bp, Homo sapiens
ggccgcgctgggatggccgccacagctgtaggkgctgctagtgtttagcgctggtctttgccgggcgttgagggcagctcagcctccttgtttgtccggttcgcctgtgcgtggtactcaagggcaccagtat

SEQ ID NO: 21256 - DNA, 201 bp, Homo sapiens
aggtgctgaaattattgtttgcacacctggtcgaatgattgacatgttagccgctaacagtggtcgggtcacaaatcttcgaagagtgacatatgttgttytagatgaagcagacagaatgtttgacatgggttttgaaccccaggtcatgcgcatcgtggataatgttcgtcctgatcgacagacggttatgttttcagc

SEQ ID NO: 21257 - DNA, 201 bp, Homo sapiens
agtgtttagcgctggtctttgccgggcgttgagggcagctcagcctccttgtttgtccggttcgcctgtgcgtggtactcaagggcaccagtattcccgcsgtcggcagcatgggtcgggagtcacgccactatcgaaaacgatcggcatcccggggtcgctctggaagtcggtctagaagtcgctcaccctcagacaaaa

SEQ ID NO: 21258 - DNA, 133 bp, Homo sapiens; identical to SEQ ID NO: 21255

SEQ ID NO: 21259 - DNA, 201 bp, Homo sapiens; identical to SEQ ID NO: 21256

SEQ ID NO: 21260 - DNA, 201 bp, Homo sapiens; identical to SEQ ID NO: 21257

SEQ ID NO: 21261 - DNA, 133 bp, Homo sapiens; identical to SEQ ID NO: 21255

SEQ ID NO: 21262 - DNA, 201 bp, Homo sapiens; identical to SEQ ID NO: 21256

SEQ ID NO: 21263 - DNA, 201 bp, Homo sapiens; identical to SEQ ID NO: 21257

SEQ ID NO: 21264 - DNA, 201 bp, Homo sapiens
aggtggtcacagccagtgttatactgggccgagcagttgccactgagtctctacttgtgaaaggtttgctaaaacccacgtgcagatacctaaaagttcartataatgagtttctagctgctatgtatgtaatcaacttactaacttgttatatctttaacaaaattgcagttgaggcttcgtcagattccaaagatacgt

SEQ ID NO: 21265 - DNA, 201 bp, Homo sapiens
atacaactaagatgaagagtttaaggaaggtggtcacagccagtgttatactgggccgagcagttgccactgagtctctacttgtgaaaggtttgctaaarcccacgtgcagatacctaaaagttcagtataatgagtttctagctgctatgtatgtaatcaacttactaacttgttatatctttaacaaaattgcagttg

SEQ ID NO: 21266 - DNA, 201 bp, Homo sapiens
cacaccgctttcccaggcagcagccagcattgataacagagtccctaccccctcctcggtggccagcgcagaaaccaattcccagcagccaggacctgacrtacctgtgctggaaatgaagacggagacccaagcagaggacactgagcccgatcctggtgaatccaaaggggagcccaggtctgagatgatggaggagga

SEQ ID NO: 21267 - DNA, 201 bp, Homo sapiens
gagtgcgctgtccagcgaactgtccctggtcggggacaccacgggggacacgctagagaagtttgtggagggcttgtagcattgtgagagcatcacctttyccctttcatgttcttggaccttttgtactgaaaatccaggcatctaggttctttttattcctagatggaactgcgacttccgagccatggaagggtggat

SEQ ID NO: 21268 - DNA, 201 bp, Homo sapiens
ccttgaacatcatgaacccaggacacaaccccaacatggcgagtatgaatccacagtaccgagaaatgttacggaggcagctgctgcagcagcagcagcarcagcagcagcaacaacagcagcaacagcagcagcagcaagggagtgccggcatggctgggggcatggcggggcacggccagttccagcagcctcaaggac

SEQ ID NO: 21269 - DNA, 201 bp, Homo sapiens
gcgctgtccagcgaactgtccctggtcggggacaccacgggggacacgctagagaagtttgtggagggcttgtagcattgtgagagcatcaccttttcccyttcatgttcttggaccttttgtactgaaaatccaggcatctaggttctttttattcctagatggaactgcgacttccgagccatggaagggtggattgat

SEQ ID NO: 21270 - DNA, 201 bp, Homo sapiens
cttcgccacaccacgtctcaccccagactggttccccccaccccggactcgcagtcaccatggccagctccatagatcagggacacttggggaaccccgarcagagtgcaatgctcccccagctgaacacccccagcaggagtgcgctgtccagcgaactgtccctggtcggggacaccacgggggacacgctagagaagt

SEQ ID NO: 21271 - DNA, 201 bp, Homo sapiens
tggtgcacgcgtgccagtgccgcaacgccaactgctcgctgccatcctgccagaagatgaagcgggtggtgcagcacaccaagggctgcaaacgcaagacsaacgggggctgcccggtgtgcaagcagctcatcgccctctgctgctaccacgccaagcactgccaagaaaacaaatgccccgtgcccttctgcctcaaca

SEQ ID NO: 21272 - DNA, 201 bp, Homo sapiens
agcagcagcaacaacagcagcaacagcagcagcagcaagggagtgccggcatggctgggggcatggcggggcacggccagttccagcagcctcaaggaccyggaggctacccaccggccatgcagcagcagcagcgcatgcagcagcatctccccctccagggcagctccatgggccagatggcggctcagatgggacagc

SEQ ID NO: 21273 - DNA, 201 bp, Homo sapiens
cctggtgaatccaaaggggagcccaggtctgagatgatggaggaggatttgcaaggagcttcccaagttaaagaagaaacagacatagcagagcagaaatyagaaccaatggaagtggatgaaaagaaacctgaagtgaaagtagaagttaaagaggaagaagagagtagcagtaacggcacagcctctcagtcaacatct

SEQ ID NO: 21274 - DNA, 201 bp, Homo sapiens
cgggcccgtcatgcccagcatgcctcccgggcagtggcagcaggcgccccttccccagcagcagcccatgccaggcttgcccaggcctgtgatatccatgyaggcccaggcggccgtggctgggccccggatgcccagcgtgcagccacccaggagcatctcacccagcgctctgcaagacctgctgcggaccctgaagtc

SEQ ID NO: 21275 - DNA, 201 bp, Homo sapiens
acagtaccgagaaatgttacggaggcagctgctgcagcagcagcagcaacagcagcagcaacaacagcagcaacagcagcagcagcaagggagtgccggcmtggctgggggcatggcggggcacggccagttccagcagcctcaaggacccggaggctacccaccggccatgcagcagcagcagcgcatgcagcagcatct

SEQ ID NO: 21276 - DNA, 201 bp, Homo sapiens
cagcaacagcagcagcagcaagggagtgccggcatggctgggggcatggcggggcacggccagttccagcagcctcaaggacccggaggctacccaccggycatgcagcagcagcagcgcatgcagcagcatctccccctccagggcagctccatgggccagatggcggctcagatgggacagcttggccagatggggcag

SEQ ID NO: 21277 - DNA, 201 bp, Homo sapiens
ccgcagctctaaaggatcgccgcatggaaaacctggtagcctatgctaagaaagtggaaggggacatgtacgagtctgccaacagcagggatgaatattaycacttattagcagagaaaatctacaagatacaaaaagaactagaagaaaaacggaggtcgcgtttacataaacaaggcatcttggggaaccagccagcct

SEQ ID NO: 21278 - DNA, 201 bp, Homo sapiens
tttcttatctggatagtattcatttcttccggccacgttgcctccgcacagccgtttaccatgagatccttattggatatttagagtatgtgaagaaattrgggtatgtgacagggcacatctgggcctgtcctccaagtgaaggagatgattacatcttccattgccacccacctgatcaaaaaatacccaagccaaaac

SEQ ID NO: 21279 - DNA, 201 bp, Homo sapiens
aaatgtctgaatctttcccatatcgaaccaaagctctgtttgcttttgaggaaattgacggcgtggatgtctgcttttttggaatgcacgtccaagaatayggctctgattgcccccctccaaacacgaggcgtgtgtacatttcttatctggatagtattcatttcttccggccacgttgcctccgcacagccgtttacc

SEQ ID NO: 21280 - DNA, 201 bp, Homo sapiens
ctttcccatatcgaaccaaagctctgtttgcttttgaggaaattgacggcgtggatgtctgcttttttggaatgcacgtccaagaatacggctctgattgyccccctccaaacacgaggcgtgtgtacatttcttatctggatagtattcatttcttccggccacgttgcctccgcacagccgtttaccatgagatcctta

SEQ ID NO: 21281 - DNA, 201 bp, Homo sapiens
ccccctgctcagctgtgacctcatggatgggcgcgacgccttcctcaccctcgccagagacaagcactgggagttctcctccttgcgccgctccaagtggwccacgctctgcatgctggtggagctgcacacccagggccaggaccgctttgtctacacctgcaacgagtgcaagcaccacgtggagacgcgctggcactg

SEQ ID NO: 21282 - DNA, 201 bp, Homo sapiens
acaagcaactgaagacaggctcaccagtgccaaggaactgccctattttgaaggtgatttctggcccaatgtgttagaagagagcattaaggaactagaayaagaagaagaggagaggaaaaaggaagagagcactgcagccagtgaaaccactgagggcagtcagggcgacagcaagaatgccaagaagaagaacaacaa

SEQ ID NO: 21283 - DNA, 201 bp, Homo sapiens
ttgaaaagaagaaaaatgataccttagaccccgaacctttcgttgattgcaaggagtgtggccggaagatgcatcagatttgcgttctgcactatgacathatttggccttcaggttttgtgtgcgacaactgcttgaagaaaactggcagacctcgaaaagaaaacaaattcagtgctaagaggctgcagaccacaagac

SEQ ID NO: 21284 - DNA, 201 bp, Homo sapiens
ggctcaagggcagccgaacagtgctaacatggccagcctcagtgccatgggcaagagccctctgagccagggagattcttcagcccccagcctgcctaaayaggcagccagcacctctgggcccacccccgctgcctcccaagcactgaatccgcaagcacaaaagcaagtggggctggcgactagcagccctgccacgtc

SEQ ID NO: 21285 - DNA, 201 bp, Homo sapiens
accccgaccccctgctcagctgtgacctcatggatgggcgcgacgccttcctcaccctcgccagagacaagcactgggagttctcctccttgcgccgctcyaagtggtccacgctctgcatgctggtggagctgcacacccagggccaggaccgctttgtctacacctgcaacgagtgcaagcaccacgtggagacgcgct

SEQ ID NO: 21286 - DNA, 201 bp, Homo sapiens
tttttgcggcgccagaatcaccctgaagccggggaggtttttgtccgagtggtggccagctcagacaagacggtggaggtcaagcccgggatgaagtcacsgtttgtggattctggggaaatgtctgaatctttcccatatcgaaccaaagctctgtttgcttttgaggaaattgacggcgtggatgtctgcttttttgga

SEQ ID NO: 21287 - DNA, 201 bp, Homo sapiens
aaatatgtctcagatgcaaacatcagtgggaattgtacccacacaagcaattgcaacaggccccactgcagatcctgaaaaacgcaaactgatacagcagyagctggttctactgcttcatgctcataagtgtcagagacgagagcaagcaaacggagaggttcgggcctgctcgctcccgcattgtcgaaccatgaaaaa

SEQ ID NO: 21288 - DNA, 201 bp, Homo sapiens
ccgggcagactcccaccccgactcctggctcagtgcccagtgctacccaaacccagagcacccctacagtccaggcagcagcccaggcccaggtgaccccrcagcctcaaaccccagttcagcccccgtctgtggctacccctcagtcatcgcagcaacagccgacgcctgtgcacgcccagcctcctggcacaccgcttt

SEQ ID NO: 21289 - DNA, 201 bp, Homo sapiens
ttgataacagagtccctaccccctcctcggtggccagcgcagaaaccaattcccagcagccaggacctgacgtacctgtgctggaaatgaagacggagacscaagcagaggacactgagcccgatcctggtgaatccaaaggggagcccaggtctgagatgatggaggaggatttgcaaggagcttcccaagttaaagaag

SEQ ID NO: 21290 - DNA, 201 bp, Homo sapiens
cgcgagcaggtgaaaatggctgagaacttgctggacggaccgcccaaccccaaaagagccaaactcagctcgcccggtttctcggcgaatgacagcacagrttttggatcattgtttgacttggaaaatgatcttcctgatgagctgatacccaatggaggagaattaggccttttaaacagtgggaaccttgttccagat

SEQ ID NO: 21291 - DNA, 201 bp, Homo sapiens
cacacaagcaattgcaacaggccccactgcagatcctgaaaaacgcaaactgatacagcagcagctggttctactgcttcatgctcataagtgtcagagaygagagcaagcaaacggagaggttcgggcctgctcgctcccgcattgtcgaaccatgaaaaacgttttgaatcacatgacgcattgtcaggctgggaaagc

SEQ ID NO: 21292 - DNA, 201 bp, Homo sapiens
ctgctcgctcccgcattgtcgaaccatgaaaaacgttttgaatcacatgacgcattgtcaggctgggaaagcctgccaagttgcccattgtgcatcttcaygacaaatcatctctcattggaagaactgcacacgacatgactgtcctgtttgcctccctttgaaaaatgccagtgacaagcgaaaccaacaaaccatcct

SEQ ID NO: 21293 - DNA, 201 bp, Homo sapiens
agagccctctgagccagggagattcttcagcccccagcctgcctaaacaggcagccagcacctctgggcccacccccgctgcctcccaagcactgaatccrcaagcacaaaagcaagtggggctggcgactagcagccctgccacgtcacagactggacctggtatctgcatgaatgctaactttaaccagacccacccag

SEQ ID NO: 21294 - DNA, 201 bp, Homo sapiens
acagccgacgcctgtgcacgcccagcctcctggcacaccgctttcccaggcagcagccagcattgataacagagtccctaccccctcctcggtggccagcrcagaaaccaattcccagcagccaggacctgacgtacctgtgctggaaatgaagacggagacccaagcagaggacactgagcccgatcctggtgaatccaa

SEQ ID NO: 21295 - DNA, 201 bp, Homo sapiens
ctggacacagggcaataccaagagccctggcagtacgtggacgacgtctggctcatgttcaacaatgcctggctctataatcgcaagacatcccgagtctrtaagttttgcagtaagcttgcagaggtctttgagcaggaaattgaccctgtcatgcagtcccttggatattgctgtggacgcaagtatgagttttcccca

SEQ ID NO: 21296 - DNA, 201 bp, Homo sapiens
atctggatagtattcatttcttccggccacgttgcctccgcacagccgtttaccatgagatccttattggatatttagagtatgtgaagaaattagggtawgtgacagggcacatctgggcctgtcctccaagtgaaggagatgattacatcttccattgccacccacctgatcaaaaaatacccaagccaaaacgactgc

SEQ ID NO: 21297 - DNA, 201 bp, Homo sapiens
agggtatgtgacagggcacatctgggcctgtcctccaagtgaaggagatgattacatcttccattgccacccacctgatcaaaaaatacccaagccaaaaygactgcaggagtggtacaaaaagatgctggacaaggcgtttgcagagcggatcatccatgactacaaggatattttcaaacaagcaactgaagacaggct

SEQ ID NO: 21298 - DNA, 201 bp, Homo sapiens
cccccacccccggcccagccccctcctgcagcggtggaagcggctcggcagatcgagcgtgaggcccagcagcagcagcacctgtaccgggtgaacatcarcaacagcatgcccccaggacgcacgggcatggggaccccggggagccagatggcccccgtgagcctgaatgtgccccgacccaaccaggtgagcgggccc

SEQ ID NO: 21299 - DNA, 201 bp, Homo sapiens
accgagtgaacaaatttttgcggcgccagaatcaccctgaagccggggaggtttttgtccgagtggtggccagctcagacaagacggtggaggtcaagccygggatgaagtcacggtttgtggattctggggaaatgtctgaatctttcccatatcgaaccaaagctctgtttgcttttgaggaaattgacggcgtggatg

SEQ ID NO: 21300 - DNA, 201 bp, Homo sapiens
ggattctggggaaatgtctgaatctttcccatatcgaaccaaagctctgtttgcttttgaggaaattgacggcgtggatgtctgcttttttggaatgcacrtccaagaatacggctctgattgcccccctccaaacacgaggcgtgtgtacatttcttatctggatagtattcatttcttccggccacgttgcctccgcac

SEQ ID NO: 21301 - DNA, 201 bp, Homo sapiens
gtcttcttcgtgatccacctgcacgctgggcctgtcatcaacaccctgccccccatcgtcgaccccgaccccctgctcagctgtgacctcatggatgggcrcgacgccttcctcaccctcgccagagacaagcactgggagttctcctccttgcgccgctccaagtggtccacgctctgcatgctggtggagctgcacacc

SEQ ID NO: 21302 - DNA, 201 bp, Homo sapiens
ttagtcaagctggagggcagccaatgggagccactggagtgaacccccagttagccagcaaacagagcatggtcaacagtttgcccaccttccctacagayatcaagaatacttcagtcaccaacgtgccaaatatgtctcagatgcaaacatcagtgggaattgtacccacacaagcaattgcaacaggccccactgcag

SEQ ID NO: 21303 - DNA, 201 bp, Homo sapiens; identical to SEQ ID NO: 21266

SEQ ID NO: 21304 - DNA, 201 bp, Homo sapiens; identical to SEQ ID NO: 21267

SEQ ID NO: 21305 - DNA, 201 bp, Homo sapiens; identical to SEQ ID NO: 21268

SEQ ID NO: 21306 - DNA, 201 bp, Homo sapiens; identical to SEQ ID NO: 21269

SEQ ID NO: 21307 - DNA, 201 bp, Homo sapiens; identical to SEQ ID NO: 21270

SEQ ID NO: 21308 - DNA, 201 bp, Homo sapiens; identical to SEQ ID NO: 21271

SEQ ID NO: 21309 - DNA, 201 bp, Homo sapiens; identical to SEQ ID NO: 21272

SEQ ID NO: 21310 - DNA, 201 bp, Homo sapiens; identical to SEQ ID NO: 21273

SEQ ID NO: 21311 - DNA, 201 bp, Homo sapiens; identical to SEQ ID NO: 21274

SEQ ID NO: 21312 - DNA, 201 bp, Homo sapiens; identical to SEQ ID NO: 21275

SEQ ID NO: 21313 - DNA, 201 bp, Homo sapiens; identical to SEQ ID NO: 21276

SEQ ID NO: 21314 - DNA, 201 bp, Homo sapiens; identical to SEQ ID NO: 21277

SEQ ID NO: 21315 - DNA, 201 bp, Homo sapiens; identical to SEQ ID NO: 21278

SEQ ID NO: 21316 - DNA, 201 bp, Homo sapiens; identical to SEQ ID NO: 21279

SEQ ID NO: 21317 - DNA, 201 bp, Homo sapiens; identical to SEQ ID NO: 21280

SEQ ID NO: 21318 - DNA, 201 bp, Homo sapiens; identical to SEQ ID NO: 21281

SEQ ID NO: 21319 - DNA, 201 bp, Homo sapiens
acaagcaactgaagacaggctcaccagtgccaaggaactgccctattttgaaggtgatttctggcccaatgtgttagaagagagcattaaggaactagaayaagaagaagaggagaggaaaaaggaagagagcactgcagccagtgaaaccactgaggtcttcttcgtgatccacctgcacgctgggcctgtcatcaacac

SEQ ID NO: 21320 - DNA, 201 bp, Homo sapiens; identical to SEQ ID NO: 21283

SEQ ID NO: 21321 - DNA, 201 bp, Homo sapiens; identical to SEQ ID NO: 21284

SEQ ID NO: 21322 - DNA, 201 bp, Homo sapiens; identical to SEQ ID NO: 21285

SEQ ID NO: 21323 - DNA, 201 bp, Homo sapiens; identical to SEQ ID NO: 21286

SEQ ID NO: 21324 - DNA, 201 bp, Homo sapiens; identical to SEQ ID NO: 21287

SEQ ID NO: 21325 - DNA, 201 bp, Homo sapiens; identical to SEQ ID NO: 21288

SEQ ID NO: 21326 - DNA, 201 bp, Homo sapiens; identical to SEQ ID NO: 21289

SEQ ID NO: 21327 - DNA, 201 bp, Homo sapiens; identical to SEQ ID NO: 21290

SEQ ID NO: 21328 - DNA, 201 bp, Homo sapiens; identical to SEQ ID NO: 21291

SEQ ID NO: 21329 - DNA, 201 bp, Homo sapiens; identical to SEQ ID NO: 21292

SEQ ID NO: 21330 - DNA, 201 bp, Homo sapiens; identical to SEQ ID NO: 21293

SEQ ID NO: 21331 - DNA, 201 bp, Homo sapiens; identical to SEQ ID NO: 21294

SEQ ID NO: 21332 - DNA, 201 bp, Homo sapiens
ctggacacagggcaataccaagagccctggcagtacgtggacgacgtctggctcatgttcaacaatgcctggctctataatcgcaagacatcccgagtctrtaagttttgcagtaagcttgcagaggatcagtttgaaaagaagaaaaatgataccttagaccccgaacctttcgttgattgcaaggagtgtggccggaag

SEQ ID NO: 21333 - DNA, 201 bp, Homo sapiens; identical to SEQ ID NO: 21296

SEQ ID NO: 21334 - DNA, 201 bp, Homo sapiens; identical to SEQ ID NO: 21297

SEQ ID NO: 21335 - DNA, 201 bp, Homo sapiens; identical to SEQ ID NO: 21298

SEQ ID NO: 21336 - DNA, 201 bp, Homo sapiens; identical to SEQ ID NO: 21299

SEQ ID NO: 21337 - DNA, 201 bp, Homo sapiens; identical to SEQ ID NO: 21300

SEQ ID NO: 21338 - DNA, 201 bp, Homo sapiens; identical to SEQ ID NO: 21301

SEQ ID NO: 21339 - DNA, 201 bp, Homo sapiens; identical to SEQ ID NO: 21302

SEQ ID NO: 21340 - DNA, 201 bp, Homo sapiens; identical to SEQ ID NO: 21266

SEQ ID NO: 21341 - DNA, 201 bp, Homo sapiens; identical to SEQ ID NO: 21267

SEQ ID NO: 21342 - DNA, 201 bp, Homo sapiens; identical to SEQ ID NO: 21268

SEQ ID NO: 21343 - DNA, 201 bp, Homo sapiens; identical to SEQ ID NO: 21269

SEQ ID NO: 21344 - DNA, 201 bp, Homo sapiens; identical to SEQ ID NO: 21270

SEQ ID NO: 21345 - DNA, 201 bp, Homo sapiens; identical to SEQ ID NO: 21271

SEQ ID NO: 21346 - DNA, 201 bp, Homo sapiens; identical to SEQ ID NO: 21272

SEQ ID NO: 21347 - DNA, 201 bp, Homo sapiens; identical to SEQ ID NO: 21273

SEQ ID NO: 21348 - DNA, 201 bp, Homo sapiens
gttggtctgaaactgcatttggcccactcctccatcctccctgtccgtcgtagctgccacccccagaggcggcgcttcttcccgtgttcaggcggctcccmccccccgtacacgactcccagaatctgaggcagagagtgctccaggctcgcgaggtgctttctgacttccccccaaatcctgccgctgccgcgcagcatg

SEQ ID NO: 21349 - DNA, 201 bp, Homo sapiens; identical to SEQ ID NO: 21274

SEQ ID NO: 21350 - DNA, 201 bp, Homo sapiens; identical to SEQ ID NO: 21275

SEQ ID NO: 21351 - DNA, 201 bp, Homo sapiens; identical to SEQ ID NO: 21276

SEQ ID NO: 21352 - DNA, 201 bp, Homo sapiens; identical to SEQ ID NO: 21277

SEQ ID NO: 21353 - DNA, 201 bp, Homo sapiens; identical to SEQ ID NO: 21278

SEQ ID NO: 21354 - DNA, 201 bp, Homo sapiens; identical to SEQ ID NO: 21279

SEQ ID NO: 21355 - DNA, 201 bp, Homo sapiens; identical to SEQ ID NO: 21280

SEQ ID NO: 21356 - DNA, 201 bp, Homo sapiens
tcttcccgtgttcaggcggctccccccccccgtacacgactcccagaatctgaggcagagagtgctccaggctcgcgaggtgctttctgacttccccccamatcctgccgctgccgcgcagcatgtcccgtgtggcgtttgaggaaatgctgagggacagacaccttggagcaccagctccggtccctgttacagtgagaa

SEQ ID NO: 21357 - DNA, 201 bp, Homo sapiens; identical to SEQ ID NO: 21281

SEQ ID NO: 21358 - DNA, 201 bp, Homo sapiens
cgttggccccacacattcgaggctcacaggtgattgtcgctcacacagttagggtcgtcagttggtctgaaactgcatttggcccactcctccatcctccytgtccgtcgtagctgccacccccagaggcggcgcttcttcccgtgttcaggcggctccccccccccgtacacgactcccagaatctgaggcagagagtgc

SEQ ID NO: 21359 - DNA, 201 bp, Homo sapiens; identical to SEQ ID NO: 21282

SEQ ID NO: 21360 - DNA, 201 bp, Homo sapiens; identical to SEQ ID NO: 21283

SEQ ID NO: 21361 - DNA, 201 bp, Homo sapiens
gctgcggttgtggttgtggcggcgtgggtggtggctgggaactgtggcccaggcttagcggccgcccggaggcttttcttcccggagactgaggtgggcgrctcagcgttggccccacacattcgaggctcacaggtgattgtcgctcacacagttagggtcgtcagttggtctgaaactgcatttggcccactcctccat

SEQ ID NO: 21362 - DNA, 201 bp, Homo sapiens; identical to SEQ ID NO: 21284

SEQ ID NO: 21363 - DNA, 201 bp, Homo sapiens; identical to SEQ ID NO: 21285

SEQ ID NO: 21364 - DNA, 201 bp, Homo sapiens; identical to SEQ ID NO: 21286

SEQ ID NO: 21365 - DNA, 201 bp, Homo sapiens; identical to SEQ ID NO: 21287

SEQ ID NO: 21366 - DNA, 201 bp, Homo sapiens; identical to SEQ ID NO: 21288

SEQ ID NO: 21367 - DNA, 201 bp, Homo sapiens; identical to SEQ ID NO: 21289

SEQ ID NO: 21368 - DNA, 201 bp, Homo sapiens; identical to SEQ ID NO: 21290

SEQ ID NO: 21369 - DNA, 201 bp, Homo sapiens; identical to SEQ ID NO: 21291

SEQ ID NO: 21370 - DNA, 201 bp, Homo sapiens; identical to SEQ ID NO: 21292

SEQ ID NO: 21371 - DNA, 201 bp, Homo sapiens; identical to SEQ ID NO: 21294

SEQ ID NO: 21372 - DNA, 201 bp, Homo sapiens; identical to SEQ ID NO: 21293

SEQ ID NO: 21373 - DNA, 201 bp, Homo sapiens; identical to SEQ ID NO: 21295

SEQ ID NO: 21374 - DNA, 201 bp, Homo sapiens; identical to SEQ ID NO: 21296

SEQ ID NO: 21375 - DNA, 201 bp, Homo sapiens; identical to SEQ ID NO: 21297

SEQ ID NO: 21376 - DNA, 201 bp, Homo sapiens; identical to SEQ ID NO: 21298

SEQ ID NO: 21377 - DNA, 201 bp, Homo sapiens; identical to SEQ ID NO: 21299

SEQ ID NO: 21378 - DNA, 201 bp, Homo sapiens; identical to SEQ ID NO: 21300

SEQ ID NO: 21379 - DNA, 201 bp, Homo sapiens; identical to SEQ ID NO: 21301

SEQ ID NO: 21380 - DNA, 201 bp, Homo sapiens; identical to SEQ ID NO: 21302

SEQ ID NO: 21381 - DNA, 200 bp, Homo sapiens
gtcccgccccttcccatcgtgtacggtcccgcgtggctgcgcgcggcgctctgggagtacgacatggcgcgcgagctgcgggcgctgctgctgtggggcygccgcctgcggcctttgctgcgggcgccggcgctggcggccgtgccgggaggctcccgtagggccattgaaatgtgaagaatccttcgtctatgaagtgt

SEQ ID NO: 21382 - DNA, 201 bp, Homo sapiens
atgaggagttctaccgctacgtcgcgcaggctcacgacaagccccgctacaccctgcactataagacggacgcaccgctcaacatccgcagcatcttctaygtgcccgacatgaaaccgtccatgtttgatgtgagccgggagctgggctccagcgttgcactgtacagccgcaaagtcctcatccagaccaaggccacgg

SEQ ID NO: 21383 - DNA, 201 bp, Homo sapiens
tcaagaagctgaatcagctgcgcgcaagcgagcctggcctggctcagctgctggtggatcagatatacgagaacgccatgattgctgctggacttgttgaygaccctagggccatggtgggccgcttgaatgagctgcttgtcaaggccctggagcgacactgacagccagggggccagaaggactgacaccacagatgac

SEQ ID NO: 21384 - DNA, 201 bp, Homo sapiens
gcaagcgagcctggcctggctcagctgctggtggatcagatatacgagaacgccatgattgctgctggacttgttgacgaccctagggccatggtgggccrcttgaatgagctgcttgtcaaggccctggagcgacactgacagccagggggccagaaggactgacaccacagatgacagccccacctccttgagctttat

SEQ ID NO: 21385 - DNA, 201 bp, Homo sapiens
ggtaacgaagtacagcaacttcgtcagcttccccttgtacttgaatggaaggcggatgaacaccttgcaggccatctggatgatggaccccaaggatgtcsgtgagtggcaacatgaggagttctaccgctacgtcgcgcaggctcacgacaagccccgctacaccctgcactataagacggacgcaccgctcaacatccg

SEQ ID NO: 21386 - DNA, 201 bp, Homo sapiens
gcgttgcactgtacagccgcaaagtcctcatccagaccaaggccacggacatcctgcccaagtggctgcgcttcatccgaggtgtggtggacagtgaggasattcccctgaacctcagccgggagctgctgcaggagagcgcactcatcaggaaactccgggacgttttacagcagaggctgatcaaattcttcattgacc

SEQ ID NO: 21387 - DNA, 201 bp, Homo sapiens
aagaagcttttggacattgttgcccggtccctgtactcagaaaaagaggtgtttatacgggagctgatctccaatgccagcgatgccttggaaaaactgcrtcacaaactggtgtctgacggccaagcactgccagaaatggagattcacttgcagaccaatgccgagaaaggcaccatcaccatccaggatactggtatc

SEQ ID NO: 21388 - DNA, 201 bp, Homo sapiens
atttacctaaatttaaaggtatttcttaacccgagtgtgtgttgggctttttttctgggtcctgtggcaggatgggtcctctcttcctgcagttcaactgstgtggggaggggctgctcacttcagcatcacctccactggatagtggtcactgatggcttgggcctgcaggcaagtgggcacagggtctgggctgagcct

SEQ ID NO: 21389 - DNA, 200 bp, Homo sapiens
gtcccgccccttcccatcgtgtacggtcccgcgtggctgcgcgcggcgctctgggagtacgacatggcgcgcgagctgcgggcgctgctgctgtggggcygccgcctgcggcctttgctgcgggcgccggcgctggcggccgtgccgggaggaaaaccaattctgtgtcctcggaggaccacagcccagttgggccccag

SEQ ID NO: 21390 - DNA, 201 bp, Homo sapiens; identical to SEQ ID NO: 21382

SEQ ID NO: 21391 - DNA, 201 bp, Homo sapiens; identical to SEQ ID NO: 21383

SEQ ID NO: 21392 - DNA, 201 bp, Homo sapiens; identical to SEQ ID NO: 21384

SEQ ID NO: 21393 - DNA, 201 bp, Homo sapiens; identical to SEQ ID NO: 21385

SEQ ID NO: 21394 - DNA, 201 bp, Homo sapiens; identical to SEQ ID NO: 21386

SEQ ID NO: 21395 - DNA, 201 bp, Homo sapiens; identical to SEQ ID NO: 21387

SEQ ID NO: 21396 - DNA, 201 bp, Homo sapiens; identical to SEQ ID NO: 21388

SEQ ID NO: 21397 - DNA, 201 bp, Homo sapiens; identical to SEQ ID NO: 21382

SEQ ID NO: 21398 - DNA, 201 bp, Homo sapiens
agtactcggtgtggctgttttcaggatgaaggggtcttagcggtgctcgcagaagagccacggtgttgggagtgtctgctctctggaggggaggctgcctyactaactggcctctgccccacaggccttcctggatgctctgcagaaccaggctgaggccagcagcaagatcatcggccagtttggagtgggtttctactc

SEQ ID NO: 21399 - DNA, 201 bp, Homo sapiens; identical to SEQ ID NO: 21383

SEQ ID NO: 21400 - DNA, 201 bp, Homo sapiens; identical to SEQ ID NO: 21384

SEQ ID NO: 21401 - DNA, 201 bp, Homo sapiens
aagggaaagagcttattcaagctgctctttccccacccccaggtgtgacccacaggcctccacctgtctgggacaggcaggactgtgagctttgggaatcwaatggaaaacacacttgtcccactgctgccagctggttgtcctagggctaatgtgtcacctctctgtgacttagctcttcacgtgtagaatggggtggaa

SEQ ID NO: 21402 - DNA, 201 bp, Homo sapiens; identical to SEQ ID NO: 21385

SEQ ID NO: 21403 - DNA, 201 bp, Homo sapiens; identical to SEQ ID NO: 21386

SEQ ID NO: 21404 - DNA, 201 bp, Homo sapiens; identical to SEQ ID NO: 21388

SEQ ID NO: 21405 - DNA, 201 bp, Homo sapiens
catgttgatgggcgacttcaatgcgggctgcagctatgtgagaccctcccagtggtcatccatccgcctgtggacaagccccaccttccagtggctgatcyccgacagcgctgacaccacagctacacccacgcactgtgcctatgacaggatcgtggttgcagggatgctgctccgaggcgccgttgttcccgactcggc

SEQ ID NO: 21406 - DNA, 201 bp, Homo sapiens
ggggcatgaagctgctgggggcgctgctggcactggcggccctactgcagggggccgtgtccctgaagatcgcagccttcaacatccagacatttggggasaccaagatgtccaatgccaccctcgtcagctacattgtgcagatcctgagccgctatgacatcgccctggtccaggaggtcagagacagccacctgactg

SEQ ID NO: 21407 - DNA, 201 bp, Homo sapiens
gggacgcagtagccgagatcgacgctctctatgacgtctacctggatgtccaagagaaatggggcttggaggacgtcatgttgatgggcgacttcaatgcrggctgcagctatgtgagaccctcccagtggtcatccatccgcctgtggacaagccccaccttccagtggctgatccccgacagcgctgacaccacagcta

SEQ ID NO: 21408 - DNA, 201 bp, Homo sapiens
ttaagcagcaaaaggagaaaattgtcatcaaaggatattccagattcttgacagcattctcgtcatctctgaggacatcaccatcatctcaggatgagggrcatgaagctgctgggggcgctgctggcactggcggccctactgcagggggccgtgtccctgaagatcgcagccttcaacatccagacatttggggagacc

SEQ ID NO: 21409 - DNA, 201 bp, Homo sapiens
gctggacaacctcaatcaggatgcaccagacacctatcactacgtggtcagtgagccactgggacggaacagctataaggagcgctacctgttcgtgtacrggcctgaccaggtgtctgcggtggacagctactactacgatgatggctgcgagccctgcgggaacgacaccttcaaccgagagccagccattgtcaggtt

SEQ ID NO: 21410 - DNA, 201 bp, Homo sapiens
atgtccaagagaaatggggcttggaggacgtcatgttgatgggcgacttcaatgcgggctgcagctatgtgagaccctcccagtggtcatccatccgcctrtggacaagccccaccttccagtggctgatccccgacagcgctgacaccacagctacacccacgcactgtgcctatgacaggatcgtggttgcagggatgc

SEQ ID NO: 21411 - DNA, 201 bp, Homo sapiens
cagcaaaaggagaaaattgtcatcaaaggatattccagattcttgacagcattctcgtcatctctgaggacatcaccatcatctcaggatgaggggcatgwagctgctgggggcgctgctggcactggcggccctactgcagggggccgtgtccctgaagatcgcagccttcaacatccagacatttggggagaccaagat

SEQ ID NO: 21412 - DNA, 201 bp, Homo sapiens
ctgtaatcccagctactcgggaggctgaggcaggagaatggcttgaacccgagaggtggaggttgcagtgagccgagatagtattactgcactccaggctrggcagcagagcaagattccgcctcaaaaaaaaaaaaaaaaaaaaaaaaaaaaaaaaactgagcatggtagcatgcacctgtggtcctggctacgccggag

SEQ ID NO: 21413 - DNA, 201 bp, Homo sapiens
ttcttcagagacctttcttcatagactacttttttttctttaagcagcaaaaggagaaaattgtcatcaaaggatattccagattcttgacagcattctcrtcatctctgaggacatcaccatcatctcaggatgaggggcatgaagctgctgggggcgctgctggcactggcggccctactgcagggggccgtgtccctg

SEQ ID NO: 21414 - DNA, 201 bp, Homo sapiens
aacttccaggctgcctatggcctgagtgaccaactggcccaagccatcagtgaccactatccagtggaggtgatgctgaagtgagcagcccctccccacascagttgaactgcaggaagagaggacccatcctgccacaggacccagaaaaaaagcccaacacacactcgggttaagaaatacctttaaatttaggtaaat

SEQ ID NO: 21415 - DNA, 201 bp, Homo sapiens
acctatcactacgtggtcagtgagccactgggacggaacagctataaggagcgctacctgttcgtgtacaggcctgaccaggtgtctgcggtggacagctmctactacgatgatggctgcgagccctgcgggaacgacaccttcaaccgagagccagccattgtcaggttcttctcccggttcacagaggtcagggagttt

SEQ ID NO: 21416 - DNA, 201 bp, Homo sapiens
tgatggctgcgagccctgcgggaacgacaccttcaaccgagagccagccattgtcaggttcttctcccggttcacagaggtcagggagtttgccattgttsccctgcatgcggccccgggggacgcagtagccgagatcgacgctctctatgacgtctacctggatgtccaagagaaatggggcttggaggacgtcatgtt

SEQ ID NO: 21417 - DNA, 201 bp, Homo sapiens
agccccaccttccagtggctgatccccgacagcgctgacaccacagctacacccacgcactgtgcctatgacaggatcgtggttgcagggatgctgctccraggcgccgttgttcccgactcggctcttccctttaacttccaggctgcctatggcctgagtgaccaactggcccaagccatcagtgaccactatccagtg

SEQ ID NO: 21418 - DNA, 201 bp, Homo sapiens; identical to SEQ ID NO: 21405

SEQ ID NO: 21419 - DNA, 201 bp, Homo sapiens
ggggcatgaagctgctgggggcgctgctggcactggcggccctactgcagggggccgtgtccctgaagatcgcagccttcaacatccagacatttggggasaccaagatgtccaatgccaccctcgtcagctacattgtgggatgcaccagacacctatcactacgtggtcagtgagccactgggacggaacagctataag

SEQ ID NO: 21420 - DNA, 201 bp, Homo sapiens; identical to SEQ ID NO: 21407

SEQ ID NO: 21421 - DNA, 108 bp, Homo sapiens
atgagggrcatgaagctgctgggggcgctgctggcactggcggccctactgcagggggccgtgtccctgaagatcgcagccttcaacatccagacatttggggagacc

SEQ ID NO: 21422 - DNA, 201 bp, Homo sapiens
ctcgtcagctacattgtgggatgcaccagacacctatcactacgtggtcagtgagccactgggacggaacagctataaggagcgctacctgttcgtgtacrggcctgaccaggtgtctgcggtggacagctactactacgatgatggctgcgagccctgcgggaacgacaccttcaaccgagagccagccattgtcaggtt

SEQ ID NO: 21423 - DNA, 201 bp, Homo sapiens; identical to SEQ ID NO: 21410

SEQ ID NO: 21424 - DNA, 113 bp, Homo sapiens
atgaggggcatgwagctgctgggggcgctgctggcactggcggccctactgcagggggccgtgtccctgaagatcgcagccttcaacatccagacatttggggagaccaagat

SEQ ID NO: 21425 - DNA, 201 bp, Homo sapiens; identical to SEQ ID NO: 21414

SEQ ID NO: 21426 - DNA, 201 bp, Homo sapiens; identical to SEQ ID NO: 21415

SEQ ID NO: 21427 - DNA, 201 bp, Homo sapiens; identical to SEQ ID NO: 21416

SEQ ID NO: 21428 - DNA, 201 bp, Homo sapiens; identical to SEQ ID NO: 21417

SEQ ID NO: 21429 - DNA, 201 bp, Homo sapiens; identical to SEQ ID NO: 21405

SEQ ID NO: 21430 - DNA, 201 bp, Homo sapiens; identical to SEQ ID NO: 21406

SEQ ID NO: 21431 - DNA, 201 bp, Homo sapiens; identical to SEQ ID NO: 21407

SEQ ID NO: 21432 - DNA, 201 bp, Homo sapiens; identical to SEQ ID NO: 21408

SEQ ID NO: 21433 - DNA, 201 bp, Homo sapiens; identical to SEQ ID NO: 21409

SEQ ID NO: 21434 - DNA, 201 bp, Homo sapiens; identical to SEQ ID NO: 21410

SEQ ID NO: 21435 - DNA, 201 bp, Homo sapiens; identical to SEQ ID NO: 21411

SEQ ID NO: 21436 - DNA, 124 bp, Homo sapiens
atagtattactgcactccaggctrggcagcagagcaagattccgcctcaaaaaaaaaaaaaaaaaaaaaaaaaaaaaaaaactgagcatggtagcatgcacctgtggtcctggctacgccggag

SEQ ID NO: 21437 - DNA, 201 bp, Homo sapiens; identical to SEQ ID NO: 21413

SEQ ID NO: 21438 - DNA, 201 bp, Homo sapiens; identical to SEQ ID NO: 21414

SEQ ID NO: 21439 - DNA, 201 bp, Homo sapiens; identical to SEQ ID NO: 21415

SEQ ID NO: 21440 - DNA, 201 bp, Homo sapiens; identical to SEQ ID NO: 21416

SEQ ID NO: 21441 - DNA, 201 bp, Homo sapiens; identical to SEQ ID NO: 21417

SEQ ID NO: 21442 - DNA, 201 bp, Homo sapiens
gtgggctgtgggtgagccgcgctccctgcactgagcgggtttaggggctcgcccacatgcatgcaggccaagacagcaaatgccagccgggcacgacgccygtgtgcccaggcctcgggggtctcagagccgcctctcacccccgaccctccacccaggggtctccccgtcgggagtggaggtgttggtcctggaagctga

SEQ ID NO: 21443 - DNA, 201 bp, Homo sapiens
caagacagcaaatgccagccgggcacgacgcccgtgtgcccaggcctcgggggtctcagagccgcctctcacccccgaccctccacccaggggtctccccrtcgggagtggaggtgttggtcctggaagctgactcatcggagagggaaataccaaataaacatccgaggttgcatttatttatttatttatttacccgga

SEQ ID NO: 21444 - DNA, 201 bp, Homo sapiens
agctccgtccgggcagttggctgctggtcctgtctgattatgttttgccatattgagtctgaagtttgtgtggaagtgagctcgcccgagttgtccggtcsgagttgtagccagtctttcaggggaccccgggacgctgatgaggcccagggtgcactccttgtcagtcttgcccgttgtccctgtgcattttgctttccg

SEQ ID NO: 21445 - DNA, 201 bp, Homo sapiens
ccagccgggcacgacgcccgtgtgcccaggcctcgggggtctcagagccgcctctcacccccgaccctccacccaggggtctccccgtcgggagtggaggygttggtcctggaagctgactcatcggagagggaaataccaaataaacatccgaggttgcatttatttatttatttatttacccggaagcatgtgcgctcc

SEQ ID NO: 21446 - DNA, 201 bp, Homo sapiens
gggccatcctggtgtcgcttcccgcactggccgtctactcccatgtcacctccgaatatgagaccaacatacacttcccagtgttcacaggctcggccgcrctgattgccgtcgtgcactactgtaacttctgccagctcagctcctggatgaggtcctccctcgccaccgtcgtgggggccgggccgctgctcctgctct

SEQ ID NO: 21447 - DNA, 201 bp, Homo sapiens
cgacagctccaaccttacggccacagcccggcccacagatacttgcttatctcaagtggggagcttctccatgtgcatcgaagtgctctttttgctctatrccgtcatgcacttacctttgtacctgagtttgtgtctgggggtggcctactctgtccttttcgagacctttggctaccatttccgggatgaagcctgctt

SEQ ID NO: 21448 - DNA, 201 bp, Homo sapiens
agctgctgtacgacatctggggagacaccgtcaacatcgccagcaggatggacaccaccggcgtggagtgccgcatccaggtgagcgaagagagctaccgygtcttgagcaagatgggctatgacttcgactacagagggaccgtgaatgtcaaggggaaaggccagatgaagacctacctgtacccaaagtgcacggatc

SEQ ID NO: 21449 - DNA, 201 bp, Homo sapiens
aggccaagacagcaaatgccagccgggcacgacgcccgtgtgcccaggcctcgggggtctcagagccgcctctcacccccgaccctccacccaggggtctycccgtcgggagtggaggtgttggtcctggaagctgactcatcggagagggaaataccaaataaacatccgaggttgcatttatttatttatttatttacc

SEQ ID NO: 21450 - DNA, 201 bp, Homo sapiens
tccagagcatgcgggaccaggcagactggctgctgaggaacatcatcccctaccacgtggctgagcagctgaaggtgtcccagacctactccaagaaccaygacagcggaggggtgatcttcgccagcatcgtcaacttcagcgagttctacgaggagaactacgagggcggcaaggagtgctaccgggtcctcaacgagc

SEQ ID NO: 21451 - DNA, 201 bp, Homo sapiens
caacagccaccccaagcactgcaaatacagcatctcctctagctgcagcagctctggggactccgggggcgtcccccggcgagtgggcggcggaggccggmtgcgcaggcagaagaagctgccccagctgttcgagagggcctccagccgctggtgggaccccaagttcgactcggtgaacctggaggaggcctgcctgga

SEQ ID NO: 21452 - DNA, 201 bp, Homo sapiens
gctcttctacatcggcttcgcctgccttctgtggagcatctattttgcggtccacatgagatccagactgatcgtcatggtcgcccccgcgctgtgcttcytcctggtgtgtgtgggcttctttctgtttaccttcaccaagctgtacgcccggcattacgcgtggacctcgctggctctcaccctgctggtgttcgccct

SEQ ID NO: 21453 - DNA, 201 bp, Homo sapiens
tgagctgcgactccagcggggacagcaacagcgtgcgcgtcaagatcaaccccaagcagctgtcctccaacagccaccccaagcactgcaaatacagcatmtcctctagctgcagcagctctggggactccgggggcgtcccccggcgagtgggcggcggaggccggctgcgcaggcagaagaagctgccccagctgttcg

SEQ ID NO: 21454 - DNA, 201 bp, Homo sapiens
atacagattgccctccccggcatgaagaagtcacaattctgacccgccacctctccaggggcggtgcctgggatggccacccatcaggacagccagagccrgggtcccggcgtcctgagagtccagggcacctccccccattagctgtaaggtttcctgtcaggtgtgactgtcagtttgctggtcttccaataccgaaga

SEQ ID NO: 21455 - DNA, 201 bp, Homo sapiens
tttttattgctttttcccacgtcccacgagacactattttcggttctctggctaataccctgtttttgagtttattttgtttctgtctatgtcacagtgtycccctacgacccgacctctctatgtaagcacacatgcgcacacacacttgcattcatgaatctgatataaagtgccagtaatccgccaagagggggtgcg

SEQ ID NO: 21456 - DNA, 201 bp, Homo sapiens
ttattgctttttcccacgtcccacgagacactattttcggttctctggctaataccctgtttttgagtttattttgtttctgtctatgtcacagtgtcccyctacgacccgacctctctatgtaagcacacatgcgcacacacacttgcattcatgaatctgatataaagtgccagtaatccgccaagagggggtgcgaag

SEQ ID NO: 21457 - DNA, 201 bp, Homo sapiens
ggagcatctattttgcggtccacatgagatccagactgatcgtcatggtcgcccccgcgctgtgcttcctcctggtgtgtgtgggcttctttctgtttacyttcaccaagctgtacgcccggcattacgcgtggacctcgctggctctcaccctgctggtgttcgccctgaccctggctgcgcagttccaggtcttgacgc

SEQ ID NO: 21458 - DNA, 155 bp, Homo sapiens
gtactggtgaccccggccggggcaggccccgggactcgacaacatggcttccccrccccaccagcagctgctgcatcaccacagcaccgaggtgagctgcgactccagcggggacagcaacagcgtgcgcgtcaagatcaaccccaagcagctgt

SEQ ID NO: 21459 - DNA, 201 bp, Homo sapiens
gggacagcaacagcgtgcgcgtcaagatcaaccccaagcagctgtcctccaacagccaccccaagcactgcaaatacagcatctcctctagctgcagcagmtctggggactccgggggcgtcccccggcgagtgggcggcggaggccggctgcgcaggcagaagaagctgccccagctgttcgagagggcctccagccgct

SEQ ID NO: 21460 - DNA, 201 bp, Homo sapiens
atgtcaaggggaaaggccagatgaagacctacctgtacccaaagtgcacggatcacagggtcatcccacagcaccagctgtccatctccccagacatccgygtccaggtggatggcagcatcggacggtctcccacagacgagattgccaacctggtgccttctgtccagtatgtggacaagacatctctgggttctgaca

SEQ ID NO: 21461 - DNA, 201 bp, Homo sapiens
tgctcctgctctacgtctccctgtgcccagacagttctgtattaacttcgccccttgacgcagtacagaatttcagttccgagaggaacccgtgcaatagytcggtgccgcgtgacctccggcggcccgccagcctcatcggccaggaggtggttctcgtcttctttctcctgctcttgttggtctggttcctgaatcgcg

SEQ ID NO: 21462 - DNA, 201 bp, Homo sapiens
aacaccgcgcaggcccaggacggcagccacccgcaggagcacctgcagatcctgttcgagttcgccaaggagatgatgcgcgtggtggacgacttcaacarcaacatgctgtggttcaacttcaagctccgcgtcggcttcaaccatgggcccctcacggccggggtcatcggcaccaccaagctgctgtacgacatctgg

SEQ ID NO: 21463 - DNA, 201 bp, Homo sapiens
gaggcccagggtgcactccttgtcagtcttgcccgttgtccctgtgcattttgctttccgctgtcaaatctcactgtctcgttttcacaccgcatcagtcyccatcatcactactcctccccaaagacatacagattgccctccccggcatgaagaagtcacaattctgacccgccacctctccaggggcggtgcctggga

SEQ ID NO: 21464 - DNA, 201 bp, Homo sapiens
tgagctcgcccgagttgtccggtcggagttgtagccagtctttcaggggaccccgggacgctgatgaggcccagggtgcactccttgtcagtcttgcccgwtgtccctgtgcattttgctttccgctgtcaaatctcactgtctcgttttcacaccgcatcagtccccatcatcactactcctccccaaagacatacagat

SEQ ID NO: 21465 - DNA, 201 bp, Homo sapiens
ggatgaggtcctccctcgccaccgtcgtgggggccgggccgctgctcctgctctacgtctccctgtgcccagacagttctgtattaacttcgccccttgaygcagtacagaatttcagttccgagaggaacccgtgcaatagttcggtgccgcgtgacctccggcggcccgccagcctcatcggccaggaggtggttctcg

SEQ ID NO: 21466 - DNA, 201 bp, Homo sapiens
cagttggctgctggtcctgtctgattatgttttgccatattgagtctgaagtttgtgtggaagtgagctcgcccgagttgtccggtcggagttgtagccastctttcaggggaccccgggacgctgatgaggcccagggtgcactccttgtcagtcttgcccgttgtccctgtgcattttgctttccgctgtcaaatctca

SEQ ID NO: 21467 - DNA, 201 bp, Homo sapiens
tggtgtcgcttcccgcactggccgtctactcccatgtcacctccgaatatgagaccaacatacacttcccagtgttcacaggctcggccgcgctgattgcygtcgtgcactactgtaacttctgccagctcagctcctggatgaggtcctccctcgccaccgtcgtgggggccgggccgctgctcctgctctacgtctccc

SEQ ID NO: 21468 - DNA, 201 bp, Homo sapiens
aagccctcaaagagaggatgattcattccgtgatgccaagaatcatagccgatgacttaatgaagcagggagatgaggagagtgagaattctgtcaagagrcatgccacctcgagccccaagaacaggaagaaaaagtcttccatccaaaaagctcctatagccttccgcccttttaagatgcagcagatcgaagaagtca

SEQ ID NO: 21469 - DNA, 201 bp, Homo sapiens
ggaatagaagaagccaacgaactcaccaagctcaacgtttcaaagagtgtgtgaggcggcgcccacccgctgcccgaggtgctctgtttgtcgaaacacartaatatttgtatttggctgttgtgctttccaagcgccacagttgccctccccggacgtggtgttatgtggtcatttcagccctaacttctgtgtggatca

SEQ ID NO: 21470 - DNA, 201 bp, Homo sapiens
ccgtgatgccaagaatcatagccgatgacttaatgaagcagggagatgaggagagtgagaattctgtcaagaggcatgccacctcgagccccaagaacagraagaaaaagtcttccatccaaaaagctcctatagccttccgcccttttaagatgcagcagatcgaagaagtcagtattttatttgcagatatcgtgggct

SEQ ID NO: 21471 - DNA, 201 bp, Homo sapiens
aagattacttttttaagccgcccattaatcagttcagcctgaacttcctggatcaggagctggagcgatcctacaggaccagctatcaggaagaggtcatraagaactcccccgtgaagacgtttgctagtcccaccttcagctccctcctggatgtgtttctgtcgaccacagtgtttctgacgctgtccaccacctgct

SEQ ID NO: 21472 - DNA, 201 bp, Homo sapiens
cagtcttgcccgttgtccctgtgcattttgctttccgctgtcaaatctcactgtctcgttttcacaccgcatcagtccccatcatcactactcctccccaragacatacagattgccctccccggcatgaagaagtcacaattctgacccgccacctctccaggggcggtgcctgggatggccacccatcaggacagccag

SEQ ID NO: 21473 - DNA, 201 bp, Homo sapiens
ttatgttttgccatattgagtctgaagtttgtgtggaagtgagctcgcccgagttgtccggtcggagttgtagccagtctttcaggggaccccgggacgcygatgaggcccagggtgcactccttgtcagtcttgcccgttgtccctgtgcattttgctttccgctgtcaaatctcactgtctcgttttcacaccgcatca

SEQ ID NO: 21474 - DNA, 201 bp, Homo sapiens; identical to SEQ ID NO: 21442

SEQ ID NO: 21475 - DNA, 201 bp, Homo sapiens; identical to SEQ ID NO: 21443

SEQ ID NO: 21476 - DNA, 201 bp, Homo sapiens; identical to SEQ ID NO: 21444

SEQ ID NO: 21477 - DNA, 201 bp, Homo sapiens; identical to SEQ ID NO: 21445

SEQ ID NO: 21478 - DNA, 201 bp, Homo sapiens; identical to SEQ ID NO: 21446

SEQ ID NO: 21479 - DNA, 201 bp, Homo sapiens; identical to SEQ ID NO: 21447

SEQ ID NO: 21480 - DNA, 201 bp, Homo sapiens; identical to SEQ ID NO: 21449

SEQ ID NO: 21481 - DNA, 201 bp, Homo sapiens; identical to SEQ ID NO: 21448

SEQ ID NO: 21482 - DNA, 201 bp, Homo sapiens; identical to SEQ ID NO: 21450

SEQ ID NO: 21483 - DNA, 201 bp, Homo sapiens; identical to SEQ ID NO: 21451

SEQ ID NO: 21484 - DNA, 201 bp, Homo sapiens; identical to SEQ ID NO: 21452

SEQ ID NO: 21485 - DNA, 201 bp, Homo sapiens; identical to SEQ ID NO: 21454

SEQ ID NO: 21486 - DNA, 201 bp, Homo sapiens; identical to SEQ ID NO: 21453

SEQ ID NO: 21487 - DNA, 201 bp, Homo sapiens; identical to SEQ ID NO: 21455

SEQ ID NO: 21488 - DNA, 155 bp, Homo sapiens; identical to SEQ ID NO: 21458

SEQ ID NO: 21489 - DNA, 201 bp, Homo sapiens; identical to SEQ ID NO: 21457

SEQ ID NO: 21490 - DNA, 201 bp, Homo sapiens; identical to SEQ ID NO: 21456

SEQ ID NO: 21491 - DNA, 201 bp, Homo sapiens; identical to SEQ ID NO: 21459

SEQ ID NO: 21492 - DNA, 201 bp, Homo sapiens
aagttctccgcacacacttcttccccatcaagcccatttccttccccaaccacaaaggtgtttgtgattcctcaccccgggaaaccaaggagctgcaaagkggagtctggttcagccccgtgcagactcacccagagcttaacgttgtctttcaaacaccctgagccttcctaaacagccagtgcagacattctctctggg

SEQ ID NO: 21493 - DNA, 201 bp, Homo sapiens; identical to SEQ ID NO: 21460

SEQ ID NO: 21494 - DNA, 201 bp, Homo sapiens; identical to SEQ ID NO: 21461

SEQ ID NO: 21495 - DNA, 201 bp, Homo sapiens; identical to SEQ ID NO: 21462

SEQ ID NO: 21496 - DNA, 201 bp, Homo sapiens; identical to SEQ ID NO: 21463

SEQ ID NO: 21497 - DNA, 201 bp, Homo sapiens; identical to SEQ ID NO: 21465

SEQ ID NO: 21498 - DNA, 201 bp, Homo sapiens; identical to SEQ ID NO: 21464

SEQ ID NO: 21499 - DNA, 201 bp, Homo sapiens; identical to SEQ ID NO: 21467

SEQ ID NO: 21500 - DNA, 201 bp, Homo sapiens; identical to SEQ ID NO: 21466

SEQ ID NO: 21501 - DNA, 201 bp, Homo sapiens; identical to SEQ ID NO: 21468

SEQ ID NO: 21502 - DNA, 201 bp, Homo sapiens; identical to SEQ ID NO: 21470

SEQ ID NO: 21503 - DNA, 201 bp, Homo sapiens; identical to SEQ ID NO: 21469

SEQ ID NO: 21504 - DNA, 201 bp, Homo sapiens; identical to SEQ ID NO: 21471

SEQ ID NO: 21505 - DNA, 201 bp, Homo sapiens
gagctgcaaagtggagtctggttcagccccgtgcagactcacccagagcttaacgttgtctttcaaacaccctgagccttcctaaacagccagtgcagacrttctctctgggccacgaagcccctcgggtcctccccgtcccctgctccgatgcatacctcagtgcagaaccacagaatctctgcagcggaaacgccgtgc

SEQ ID NO: 21506 - DNA, 201 bp, Homo sapiens; identical to SEQ ID NO: 21472

SEQ ID NO: 21507 - DNA, 201 bp, Homo sapiens; identical to SEQ ID NO: 21473

SEQ ID NO: 21508 - DNA, 201 bp, Homo sapiens
cccgattttaaaaaaatgaaaagcatgaaattagaaaagacattggcattacttcgaccaaatctctttcatgaaaggaaagatgatgttttgcgtattaytaaagatgaagacttcaaaatactggagcaaagacaagtagtattatcggaaaaagaagcacaagcactgtgcaaggaatatgaaaatgaagactatttt

SEQ ID NO: 21509 - DNA, 201 bp, Homo sapiens
catgcaacaagtgaacaaagagagcagatcctgaagatagttaaggaggctggatttgatctgacacaggtgaagaaaatgttcctaactcctgagcaaayagagaaaatttatccaaaagtaacaggaaaagacttttataaagatttattggaaatgttatctgtgggtccatctatggtcatgattctgaccaagtgg

SEQ ID NO: 21510 - DNA, 201 bp, Homo sapiens
gaccttgcaaagcaatgcaacctttattcagaaaattgaaaaatgaactgaacgaagacgaaattctgcattttgctgtcgcagaagctgacaacattgtractttgcagccatttagagataaatgtgaacctgtttttctctttagtgttaatggcaaaattatcgaaaagattcagggtgcaaatgcaccgcttgtta

SEQ ID NO: 21511 - DNA, 201 bp, Homo sapiens
aagaaaaattaccaaagctggatttattatagaagcagagcataagacagtgctcactgaagaacaagttgtcaacttctatagtcgaatagcagaccagygtgacttcgaagagtttgtctcttttatgacaagtggcttaagctatattctagttgtatctcaaggaagtaaacacaatcctccctctgaagaaaccga

SEQ ID NO: 21512 - DNA, 201 bp, Homo sapiens
aaagcccagcaggatgcctgctagcctcagcctcgggccctaccagggtcctaggtactggaatggaacttcgccgaggtcaccgctcaaacggccacaaygagggagccgatttagatcctctgggcctgttccttccttttctttaaacgtcccagtctagcttagaggaggacctgttttgttagataaatggcaagc

SEQ ID NO: 21513 - DNA, 201 bp, Homo sapiens
  misc_feature (1)...(201): n = A,T,C or G
ttacagacagtcatcaataatcaaagcctgtgggatgagatgttgcagaacaaaggcttaacagtgattgatgtttaccaagcctggtgtggaccttgcanagcaatgcaacctttattcagaaaattgaaaaatgaactgaacgaagacgaaattctgcattttgctgtcgcagaagctgacaacattgtgactttgcag

SEQ ID NO: 21514 - DNA, 201 bp, Homo sapiens
atgcaacaagtgaacaaagagagcagatcctgaagatagttaaggaggctggatttgatctgacacaggtgaagaaaatgttcctaactcctgagcaaatwgagaaaatttatccaaaagtaacaggaaaagacttttataaagatttattggaaatgttatctgtgggtccatctatggtcatgattctgaccaagtgga

SEQ ID NO: 21515 - DNA, 201 bp, Homo sapiens
caaccatttggcacagcttcctgggaggaataataagaaaaacatgctttggaggaaaactcaagatacaaaaatgaatggctatgcataataacaataaraatgtattccccaaacaaatcttaatgtttatttttaactgatcttccggaaaagatttaaggtatataaatgcacacaatctacaacaagataattgag

SEQ ID NO: 21516 - DNA, 201 bp, Homo sapiens
ttatttttaactgatcttccggaaaagatttaaggtatataaatgcacacaatctacaacaagataattgagggaggaacacggaatgtggggaagaagasagtaggagagatcaaataaagccaggagtggagttaaatacaaatgcatactgcctaatgtatattgaaaattggtcaaagttttgactctaaattttct

SEQ ID NO: 21517 - DNA, 201 bp, Homo sapiens
aacctaacgaacgatctgaggatcaacctgaggtcgaagcccaggttacacctggaatgatgaagaacaaacaagacagtttacaagaatatctggaaagrcaacatttagctcagctctgtgacattgaagaggatgcagctaatgttgctaagttcatggatgctttcttccccgattttaaaaaaatgaaaagcatga

SEQ ID NO: 21518 - DNA, 201 bp, Homo sapiens
ttcttccccgattttaaaaaaatgaaaagcatgaaattagaaaagacattggcattacttcgaccaaatctctttcatgaaaggaaagatgatgttttgcrtattattaaagatgaagacttcaaaatactggagcaaagacaagtagtattatcggaaaaagaagcacaagcactgtgcaaggaatatgaaaatgaagac

SEQ ID NO: 21519 - DNA, 201 bp, Homo sapiens
acaaaggcttaacagtgattgatgtttaccaagcctggtgtggaccttgcaaagcaatgcaacctttattcagaaaattgaaaaatgaactgaacgaagaygaaattctgcattttgctgtcgcagaagctgacaacattgtgactttgcagccatttagagataaatgtgaacctgtttttctctttagtgttaatggca

SEQ ID NO: 21520 - DNA, 201 bp, Homo sapiens
aggaaaagacttttataaagatttattggaaatgttatctgtgggtccatctatggtcatgattctgaccaagtggaatgctgttgcagaatggagacgaytgatgggcccaacagacccagaagaagcaaaattactttcccctgactccatccgagcccagtttggaataagtaaattgaaaaacattgtccatggagc

SEQ ID NO: 21521 - DNA, 163 bp, Homo sapiens
acaggcagggaatccctcttcttccttttgctgaatcagctggagaagaaagcccagcaggakgcctgctagcctcagcctcgggccctaccagggtcctaggtactggaatggaacttcgccgaggtcaccgctcaaacggccacaacgagggagccgattt

SEQ ID NO: 21522 - DNA, 201 bp, Homo sapiens
ggtactggaatggaacttcgccgaggtcaccgctcaaacggccacaacgagggagccgatttagatcctctgggcctgttccttccttttctttaaacgtyccagtctagcttagaggaggacctgttttgttagataaatggcaagcaaaaaacgagaagtccagttacagacagtcatcaataatcaaagcctgtggga

SEQ ID NO: 21523 - DNA, 201 bp, Homo sapiens; identical to SEQ ID NO: 21508

SEQ ID NO: 21524 - DNA, 201 bp, Homo sapiens; identical to SEQ ID NO: 21509

SEQ ID NO: 21525 - DNA, 201 bp, Homo sapiens; identical to SEQ ID NO: 21510

SEQ ID NO: 21526 - DNA, 201 bp, Homo sapiens; identical to SEQ ID NO: 21511

SEQ ID NO: 21527 - DNA, 201 bp, Homo sapiens; identical to SEQ ID NO: 21512

SEQ ID NO: 21528 - DNA, 201 bp, Homo sapiens; identical to SEQ ID NO: 21513
  misc_feature (1)...(201): n = A,T,C or G

SEQ ID NO: 21529 - DNA, 201 bp, Homo sapiens; identical to SEQ ID NO: 21514

SEQ ID NO: 21530 - DNA, 201 bp, Homo sapiens; identical to SEQ ID NO: 21515

SEQ ID NO: 21531 - DNA, 201 bp, Homo sapiens; identical to SEQ ID NO: 21516

SEQ ID NO: 21532 - DNA, 201 bp, Homo sapiens; identical to SEQ ID NO: 21517

SEQ ID NO: 21533 - DNA, 201 bp, Homo sapiens; identical to SEQ ID NO: 21518

SEQ ID NO: 21534 - DNA, 201 bp, Homo sapiens; identical to SEQ ID NO: 21519

SEQ ID NO: 21535 - DNA, 201 bp, Homo sapiens; identical to SEQ ID NO: 21520

SEQ ID NO: 21536 - DNA, 201 bp, Homo sapiens
gattttaggcgccacctggtcttgtccccactgcccagacaggcagggaatccctcttcttccttttgctgaatcagctggagaagaaagcccagcaggakgcctgctagcctcagcctcgggccctaccagggtcctaggtactggaatggaacttcgccgaggtcaccgctcaaacggccacaacgagggagccgattt

SEQ ID NO: 21537 - DNA, 201 bp, Homo sapiens; identical to SEQ ID NO: 21522

SEQ ID NO: 21538 - DNA, 201 bp, Homo sapiens
cgaatgccacgtgccctcacccagcccggcccccaccctgtccagacccctacagctgtgtctaagctcaggaggaaagggaccctcccatcattcatggrgggctgctacctgacccttggggcctgagaaggccttgcgggggtggggtttgtccacagagctgctggagcagcaccaagagccagtcttgaccgggat

SEQ ID NO: 21539 - DNA, 201 bp, Homo sapiens
caagattccggaaagcgtacaagccagagcaacccctggtgcgactgagaggcggtgcctacatcggggagggccgcgtggaggtgctcaaaaatggagartgggggaccgtctgcgacgacaagtgggacctggtgtcggccagtgtggtctgcagagagctgggctttgggagtgccaaagaggcagtcactggctccc

SEQ ID NO: 21540 - DNA, 201 bp, Homo sapiens
acgtcgtctgccgggagctgggctacgtggaggccaagtcctggactgccagctcctcctacggcaagggagaagggcccatctggttagacaatctccaytgtactggcaacgaggcgacccttgcagcatgcacctccaatggctggggcgtcactgactgcaagcacacggaggatgtcggtgtggtgtgcagcgaca

SEQ ID NO: 21541 - DNA, 201 bp, Homo sapiens
gtccagacccctacagctgtgtctaagctcaggaggaaagggaccctcccatcattcatggggggctgctacctgacccttggggcctgagaaggccttgsgggggtggggtttgtccacagagctgctggagcagcaccaagagccagtcttgaccgggatgaggcccacagacaggttgtcatcagcttgtcccattca

SEQ ID NO: 21542 - DNA, 201 bp, Homo sapiens
cccacctctgcagctgcctggctatgctggccctcctgtcccccctgagcctggcacagtatgacagctggccccattaccccgagtacttccagcaaccrgctcctgagtatcaccagccccaggcccccgccaacgtggccaagattcagctgcgcctggctgggcagaagaggaagcacagcgagggccgggtggagg

SEQ ID NO: 21543 - DNA, 201 bp, Homo sapiens
cgtggaggccatggtggtctgccgccagctgggcctgggattcgccagcaacgccttccaggagacctggtattggcacggagatgtcaacagcaacaaaktggtcatgagtggagtgaagtgctcgggaacggagctgtccctggcgcactgccgccacgacggggaggacgtggcctgcccccagggcggagtgcagta

SEQ ID NO: 21544 - DNA, 201 bp, Homo sapiens
tgagtggagtgaagtgctcgggaacggagctgtccctggcgcactgccgccacgacggggaggacgtggcctgcccccagggcggagtgcagtacggggcyggagttgcctgctcagaaaccgcccctgacctggtcctcaatgcggagatggtgcagcagaccacctacctggaggaccggcccatgttcctgctgcagt

SEQ ID NO: 21545 - DNA, 201 bp, Homo sapiens
ctcttccaatgaaaccctccagtctattatagtcacatagataatggtgccacgtgttttctgatttggtgagctcagacttggtgcttccctatccacarcccccaccccttgtttttcaagatactattattatattttcacagacttttgaagcacaaatttattggcatttaatattggacatctgggcccttggaa

SEQ ID NO: 21546 - DNA, 201 bp, Homo sapiens
gcaagctgggcccccaggtgtcactggaccccatgaagaatgtcacctgcgagaatgggctaccggccgtggtgagttgtgtgcctgggcaggtcttcagscctgacggaccctcaagattccggaaagcgtacaagccagagcaacccctggtgcgactgagaggcggtgcctacatcggggagggccgcgtggaggtgc

SEQ ID NO: 21547 - DNA, 201 bp, Homo sapiens
cccccaccccttgtttttcaagatactattattatattttcacagacttttgaagcacaaatttattggcatttaatattggacatctgggcccttggaartacaaatctaaggaaaaaccaacccactgtgtaagtgactcatcttcctgttgttccaattctgtgggtttttgattcaacggtgctataaccagggtcc

SEQ ID NO: 21548 - DNA, 201 bp, Homo sapiens
ggcttgcagaagaagctgcgcctgaacggcggccgcaatccctacgagggccgagtggaggtgctggtggagagaaacgggtcccttgtgtgggggatggwgtgtggccaaaactggggcatcgtggaggccatggtggtctgccgccagctgggcctgggattcgccagcaacgccttccaggagacctggtattggcac

SEQ ID NO: 21549 - DNA, 201 bp, Homo sapiens
gcaacacccctgccatgggcttgcagaagaagctgcgcctgaacggcggccgcaatccctacgagggccgagtggaggtgctggtggagagaaacgggtcycttgtgtgggggatggtgtgtggccaaaactggggcatcgtggaggccatggtggtctgccgccagctgggcctgggattcgccagcaacgccttccagg

SEQ ID NO: 21550 - DNA, 201 bp, Homo sapiens
ggtcttcagccctgacggaccctcaagattccggaaagcgtacaagccagagcaacccctggtgcgactgagaggcggtgcctacatcggggagggccgcrtggaggtgctcaaaaatggagaatgggggaccgtctgcgacgacaagtgggacctggtgtcggccagtgtggtctgcagagagctgggctttgggagtgc

SEQ ID NO: 21551 - DNA, 201 bp, Homo sapiens
gtacggggccggagttgcctgctcagaaaccgcccctgacctggtcctcaatgcggagatggtgcagcagaccacctacctggaggaccggcccatgttcmtgctgcagtgtgccatggaggagaactgcctctcggcctcagccgcgcagaccgaccccaccacgggctaccgccggctcctgcgcttctcctcccagat

SEQ ID NO: 21552 - DNA, 201 bp, Homo sapiens
tagacctctcttccaatgaaaccctccagtctattatagtcacatagataatggtgccacgtgttttctgatttggtgagctcagacttggtgcttccctmtccacagcccccaccccttgtttttcaagatactattattatattttcacagacttttgaagcacaaatttattggcatttaatattggacatctgggcc

SEQ ID NO: 21553 - DNA, 201 bp, Homo sapiens
ctatgctggccctcctgtcccccctgagcctggcacagtatgacagctggccccattaccccgagtacttccagcaaccggctcctgagtatcaccagccmcaggcccccgccaacgtggccaagattcagctgcgcctggctgggcagaagaggaagcacagcgagggccgggtggaggtgtactatgatggccagtggg

SEQ ID NO: 21554 - DNA, 201 bp, Homo sapiens
ctgaaaccaaaaagctcctgctgcttctgtaccccgcctgtccctcccagctgcgcagggccccttcgtgggatcatcagcccgaagacagggatggagargcctctgtgctcccacctctgcagctgcctggctatgctggccctcctgtcccccctgagcctggcacagtatgacagctggccccattaccccgagtac

SEQ ID NO: 21555 - DNA, 201 bp, Homo sapiens
gcgcggtcccagcccggccactgcggatccctgaaaccaaaaagctcctgctgcttctgtaccccgcctgtccctcccagctgcgcagggccccttcgtgrgatcatcagcccgaagacagggatggagaggcctctgtgctcccacctctgcagctgcctggctatgctggccctcctgtcccccctgagcctggcacag

SEQ ID NO: 21556 - DNA, 201 bp, Homo sapiens
ccttgtgtcaacagcatgctagggcccagcaaactagagggtaggtaggaccaccttggcaccaactccactcaaaccacaattgaatgagggcgtcggcrcgcattcagatctcacctcttgcctttgtttacatttattttgcaggaactggcactgactgacaggtaagaccaggaccagcccaggggtcccagaact

SEQ ID NO: 21557 - DNA, 201 bp, Homo sapiens
tgtcacctgcgagaatgggctaccggccgtggtgagttgtgtgcctgggcaggtcttcagccctgacggaccctcaagattccggaaagcgtacaagccaragcaacccctggtgcgactgagaggcggtgcctacatcggggagggccgcgtggaggtgctcaaaaatggagaatgggggaccgtctgcgacgacaagtg

SEQ ID NO: 21558 - DNA, 201 bp, Homo sapiens
ccatgaagaatgtcacctgcgagaatgggctaccggccgtggtgagttgtgtgcctgggcaggtcttcagccctgacggaccctcaagattccggaaagcrtacaagccagagcaacccctggtgcgactgagaggcggtgcctacatcggggagggccgcgtggaggtgctcaaaaatggagaatgggggaccgtctgcg

SEQ ID NO: 21559 - DNA, 201 bp, Homo sapiens
acagcaacaaagtggtcatgagtggagtgaagtgctcgggaacggagctgtccctggcgcactgccgccacgacggggaggacgtggcctgcccccagggyggagtgcagtacggggccggagttgcctgctcagaaaccgcccctgacctggtcctcaatgcggagatggtgcagcagaccacctacctggaggaccggc

SEQ ID NO: 21560 - DNA, 201 bp, Homo sapiens
ccatggactgcaccggcacagaggcccacatctccagctgcaagctgggcccccaggtgtcactggaccccatgaagaatgtcacctgcgagaatgggctrccggccgtggtgagttgtgtgcctgggcaggtcttcagccctgacggaccctcaagattccggaaagcgtacaagccagagcaacccctggtgcgactga

SEQ ID NO: 21561 - DNA, 201 bp, Homo sapiens
aggccaagtcctggactgccagctcctcctacggcaagggagaagggcccatctggttagacaatctccactgtactggcaacgaggcgacccttgcagcmtgcacctccaatggctggggcgtcactgactgcaagcacacggaggatgtcggtgtggtgtgcagcgacaaaaggattcctgggttcaaatttgacaatt

SEQ ID NO: 21562 - DNA, 201 bp, Homo sapiens
ccactgtactggcaacgaggcgacccttgcagcatgcacctccaatggctggggcgtcactgactgcaagcacacggaggatgtcggtgtggtgtgcagcracaaaaggattcctgggttcaaatttgacaattcgttgatcaaccagatagagaacctgaatatccaggtggaggacattcggattcgagccatcctctc

SEQ ID NO: 21563 - DNA, 201 bp, Homo sapiens
aggtgtcactggaccccatgaagaatgtcacctgcgagaatgggctaccggccgtggtgagttgtgtgcctgggcaggtcttcagccctgacggaccctcragattccggaaagcgtacaagccagagcaacccctggtgcgactgagaggcggtgcctacatcggggagggccgcgtggaggtgctcaaaaatggagaat

SEQ ID NO: 21564 - DNA, 201 bp, Homo sapiens
cgagctcaccacagacacagtggagccgcgctcttctccagtgacacgtggacaaatgcgggctcatcagcccccccagagagggtcaggccgaaccccakttctcctcctcttaggtcattttcagcaaacttgaatatctagacctctcttccaatgaaaccctccagtctattatagtcacatagataatggtgccac

SEQ ID NO: 21565 - DNA, 201 bp, Homo sapiens
cggagatggtgcagcagaccacctacctggaggaccggcccatgttcctgctgcagtgtgccatggaggagaactgcctctcggcctcagccgcgcagacygaccccaccacgggctaccgccggctcctgcgcttctcctcccagatccacaacaatggccagtccgacttccggcccaagaacggccgccacgcgtgga

SEQ ID NO: 21566 - DNA, 201 bp, Homo sapiens
agggccgggtggaggtgtactatgatggccagtggggcaccgtgtgcgatgacgacttctccatccacgctgcccacgtcgtctgccgggagctgggctaygtggaggccaagtcctggactgccagctcctcctacggcaagggagaagggcccatctggttagacaatctccactgtactggcaacgaggcgacccttg

SEQ ID NO: 21567 - DNA, 201 bp, Homo sapiens
tgccctcacccagcccggcccccaccctgtccagacccctacagctgtgtctaagctcaggaggaaagggaccctcccatcattcatggggggctgctacytgacccttggggcctgagaaggccttgcgggggtggggtttgtccacagagctgctggagcagcaccaagagccagtcttgaccgggatgaggcccacag

SEQ ID NO: 21568 - DNA, 201 bp, Homo sapiens
tgtacaactgccacataggtggttccttcagcgaagagacggaaaaaaagtttgagcacttcagcgggctcttaaacaaccagctgtccccgcagtaaagmagcctgcgtggtcaactcctgtcttcaggccacaccacatcttccatgggacttccccccaacaactgagtctgaacgaatgccacgtgccctcacccag

SEQ ID NO: 21569 - DNA, 109 bp, Homo sapiens
tccggggargggtttgccatcctcctctagttaaaagtaagggggaaaagagtaaacgcgcgactccagcgcgcggctacctacgcttggtgcttgctttctccagcca

SEQ ID NO: 21570 - DNA, 201 bp, Homo sapiens
accacatcttccatgggacttccccccaacaactgagtctgaacgaatgccacgtgccctcacccagcccggcccccaccctgtccagacccctacagctstgtctaagctcaggaggaaagggaccctcccatcattcatggggggctgctacctgacccttggggcctgagaaggccttgcgggggtggggtttgtcca

SEQ ID NO: 21571 - DNA, 201 bp, Homo sapiens; identical to SEQ ID NO: 21538

SEQ ID NO: 21572 - DNA, 201 bp, Homo sapiens
acggaccctcaagattccggaaagcgtacaagccagaggtgcgactgagaggcggtgcctacatcggggagggccgcgtggaggtgctcaaaaatggagartgggggaccgtctgcgacgacaagtgggacctggtgtcggccagtgtggtctgcagagagctgggctttgggagtgccaaagaggcagtcactggctccc

SEQ ID NO: 21573 - DNA, 201 bp, Homo sapiens; identical to SEQ ID NO: 21540

SEQ ID NO: 21574 - DNA, 201 bp, Homo sapiens; identical to SEQ ID NO: 21541

SEQ ID NO: 21575 - DNA, 201 bp, Homo sapiens; identical to SEQ ID NO: 21542

SEQ ID NO: 21576 - DNA, 201 bp, Homo sapiens; identical to SEQ ID NO: 21543

SEQ ID NO: 21577 - DNA, 201 bp, Homo sapiens; identical to SEQ ID NO: 21544

SEQ ID NO: 21578 - DNA, 201 bp, Homo sapiens; identical to SEQ ID NO: 21545

SEQ ID NO: 21579 - DNA, 201 bp, Homo sapiens
gcaagctgggcccccaggtgtcactggaccccatgaagaatgtcacctgcgagaatgggctaccggccgtggtgagttgtgtgcctgggcaggtcttcagscctgacggaccctcaagattccggaaagcgtacaagccagaggtgcgactgagaggcggtgcctacatcggggagggccgcgtggaggtgctcaaaaatg

SEQ ID NO: 21580 - DNA, 201 bp, Homo sapiens; identical to SEQ ID NO: 21547

SEQ ID NO: 21581 - DNA, 201 bp, Homo sapiens; identical to SEQ ID NO: 21548

SEQ ID NO: 21582 - DNA, 201 bp, Homo sapiens; identical to SEQ ID NO: 21549

SEQ ID NO: 21583 - DNA, 201 bp, Homo sapiens
gcctgggcaggtcttcagccctgacggaccctcaagattccggaaagcgtacaagccagaggtgcgactgagaggcggtgcctacatcggggagggccgcrtggaggtgctcaaaaatggagaatgggggaccgtctgcgacgacaagtgggacctggtgtcggccagtgtggtctgcagagagctgggctttgggagtgc

SEQ ID NO: 21584 - DNA, 201 bp, Homo sapiens; identical to SEQ ID NO: 21551

SEQ ID NO: 21585 - DNA, 201 bp, Homo sapiens; identical to SEQ ID NO: 21552

SEQ ID NO: 21586 - DNA, 201 bp, Homo sapiens; identical to SEQ ID NO: 21553

SEQ ID NO: 21587 - DNA, 201 bp, Homo sapiens; identical to SEQ ID NO: 21554

SEQ ID NO: 21588 - DNA, 201 bp, Homo sapiens; identical to SEQ ID NO: 21555

SEQ ID NO: 21589 - DNA, 201 bp, Homo sapiens; identical to SEQ ID NO: 21556

SEQ ID NO: 21590 - DNA, 201 bp, Homo sapiens
tgtcacctgcgagaatgggctaccggccgtggtgagttgtgtgcctgggcaggtcttcagccctgacggaccctcaagattccggaaagcgtacaagccaraggtgcgactgagaggcggtgcctacatcggggagggccgcgtggaggtgctcaaaaatggagaatgggggaccgtctgcgacgacaagtgggacctggt

SEQ ID NO: 21591 - DNA, 201 bp, Homo sapiens
ccatgaagaatgtcacctgcgagaatgggctaccggccgtggtgagttgtgtgcctgggcaggtcttcagccctgacggaccctcaagattccggaaagcrtacaagccagaggtgcgactgagaggcggtgcctacatcggggagggccgcgtggaggtgctcaaaaatggagaatgggggaccgtctgcgacgacaagt

SEQ ID NO: 21592 - DNA, 201 bp, Homo sapiens; identical to SEQ ID NO: 21559

SEQ ID NO: 21593 - DNA, 201 bp, Homo sapiens
ccatggactgcaccggcacagaggcccacatctccagctgcaagctgggcccccaggtgtcactggaccccatgaagaatgtcacctgcgagaatgggctrccggccgtggtgagttgtgtgcctgggcaggtcttcagccctgacggaccctcaagattccggaaagcgtacaagccagaggtgcgactgagaggcggtg

SEQ ID NO: 21594 - DNA, 201 bp, Homo sapiens; identical to SEQ ID NO: 21561

SEQ ID NO: 21595 - DNA, 201 bp, Homo sapiens
ccactgtactggcaacgaggcgacccttgcagcatgcacctccaatggctggggcgtcactgactgcaagcacacggaggatgtcggtgtggtgtgcagcracaaaaggattcctgggttcaaatttgacaattcgttgatcaaccagatagaggcaagtcataacctgaatatccaggtggaggacattcggattcgagc

SEQ ID NO: 21596 - DNA, 163 bp, Homo sapiens
gcagtgatgcggggcctggacttcaatattgctggtggtggtgcaaactgcaatgcgtacccsagaagggaagctggcagcttaaaagttagcagcgtgtgtgccctttgattcagagagccacttgcgcgtggctctccggagagatttctacctgggtcca

SEQ ID NO: 21597 - DNA, 201 bp, Homo sapiens
aggtgtcactggaccccatgaagaatgtcacctgcgagaatgggctaccggccgtggtgagttgtgtgcctgggcaggtcttcagccctgacggaccctcragattccggaaagcgtacaagccagaggtgcgactgagaggcggtgcctacatcggggagggccgcgtggaggtgctcaaaaatggagaatgggggaccg

SEQ ID NO: 21598 - DNA, 201 bp, Homo sapiens; identical to SEQ ID NO: 21564

SEQ ID NO: 21599 - DNA, 201 bp, Homo sapiens; identical to SEQ ID NO: 21565

SEQ ID NO: 21600 - DNA, 201 bp, Homo sapiens; identical to SEQ ID NO: 21566

SEQ ID NO: 21601 - DNA, 201 bp, Homo sapiens; identical to SEQ ID NO: 21567

SEQ ID NO: 21602 - DNA, 201 bp, Homo sapiens; identical to SEQ ID NO: 21568

SEQ ID NO: 21603 - DNA, 201 bp, Homo sapiens; identical to SEQ ID NO: 21570

SEQ ID NO: 21604 - DNA, 201 bp, Homo sapiens; identical to SEQ ID NO: 21539

SEQ ID NO: 21605 - DNA, 201 bp, Homo sapiens; identical to SEQ ID NO: 21540

SEQ ID NO: 21606 - DNA, 201 bp, Homo sapiens; identical to SEQ ID NO: 21538

SEQ ID NO: 21607 - DNA, 201 bp, Homo sapiens
gtccagacccctacagctgtgtctaagctcaggaggaaagggaccctcccatcattcatggggggctgctacctgacccttggggcctgagaaggccttgsgggggtggggtttgtccacagagctgctggagcagcaccaagagccagtcttgaccgggatgaggctcttctccagtgacacgtggacaaatgcgggctc

SEQ ID NO: 21608 - DNA, 201 bp, Homo sapiens; identical to SEQ ID NO: 21542

SEQ ID NO: 21609 - DNA, 201 bp, Homo sapiens; identical to SEQ ID NO: 21544

SEQ ID NO: 21610 - DNA, 201 bp, Homo sapiens; identical to SEQ ID NO: 21543

SEQ ID NO: 21611 - DNA, 201 bp, Homo sapiens; identical to SEQ ID NO: 21546

SEQ ID NO: 21612 - DNA, 201 bp, Homo sapiens; identical to SEQ ID NO: 21548

SEQ ID NO: 21613 - DNA, 201 bp, Homo sapiens; identical to SEQ ID NO: 21549

SEQ ID NO: 21614 - DNA, 201 bp, Homo sapiens; identical to SEQ ID NO: 21550

SEQ ID NO: 21615 - DNA, 201 bp, Homo sapiens; identical to SEQ ID NO: 21551

SEQ ID NO: 21616 - DNA, 201 bp, Homo sapiens; identical to SEQ ID NO: 21553

SEQ ID NO: 21617 - DNA, 201 bp, Homo sapiens; identical to SEQ ID NO: 21554

SEQ ID NO: 21618 - DNA, 201 bp, Homo sapiens; identical to SEQ ID NO: 21555

SEQ ID NO: 21619 - DNA, 201 bp, Homo sapiens; identical to SEQ ID NO: 21557

SEQ ID NO: 21620 - DNA, 201 bp, Homo sapiens; identical to SEQ ID NO: 21559

SEQ ID NO: 21621 - DNA, 201 bp, Homo sapiens; identical to SEQ ID NO: 21558

SEQ ID NO: 21622 - DNA, 201 bp, Homo sapiens; identical to SEQ ID NO: 21560

SEQ ID NO: 21623 - DNA, 201 bp, Homo sapiens; identical to SEQ ID NO: 21561

SEQ ID NO: 21624 - DNA, 201 bp, Homo sapiens; identical to SEQ ID NO: 21562

SEQ ID NO: 21625 - DNA, 163 bp, Homo sapiens; identical to SEQ ID NO: 21596

SEQ ID NO: 21626 - DNA, 201 bp, Homo sapiens; identical to SEQ ID NO: 21563

SEQ ID NO: 21627 - DNA, 201 bp, Homo sapiens; identical to SEQ ID NO: 21565

SEQ ID NO: 21628 - DNA, 201 bp, Homo sapiens; identical to SEQ ID NO: 21566

SEQ ID NO: 21629 - DNA, 201 bp, Homo sapiens
tgccctcacccagcccggcccccaccctgtccagacccctacagctgtgtctaagctcaggaggaaagggaccctcccatcattcatggggggctgctacytgacccttggggcctgagaaggccttgcgggggtggggtttgtccacagagctgctggagcagcaccaagagccagtcttgaccgggatgaggctcttct

SEQ ID NO: 21630 - DNA, 201 bp, Homo sapiens; identical to SEQ ID NO: 21568

SEQ ID NO: 21631 - DNA, 201 bp, Homo sapiens; identical to SEQ ID NO: 21570

SEQ ID NO: 21632 - DNA, 201 bp, Homo sapiens
tgctgaacacatcagttctaagggatggcacgctgtgcttgagaccaacctgacgggtaccttctacatgtgcaaagcagtttacagctcctggatgaaaragcatggaggatctatcgtcaatatcattgtccctactaaagctggatttccattagctgtgcattctggagctgcaagagcaggtgtttacaacctcac

SEQ ID NO: 21633 - DNA, 201 bp, Homo sapiens
gagctgagatcatgctactgcagtccagcctgggctacagagtgagactgcatctcaaaaaaaacccaaaaaacaaaaacaaacaacaacaacaaaattawaaaggtagaaaataaacctaaattgtgtcgtaattaagattattaaaattagaattatacaatgacttatttttggtggcaaatactttaggagcaataa

SEQ ID NO: 21634 - DNA, 201 bp, Homo sapiens
gaggaaacaaggtgtcctccatcccccagtgccttcacatcttgaggatatgcttctgtactttttaaaagcttatagttggtatggaaaacatttttctkatttttaagtgttattaattatatctatggaaaaactattcctgaaatatatacagtcttatgtcccaatcagagtcttttaacctatgatttaaaaatg

SEQ ID NO: 21635 - DNA, 201 bp, Homo sapiens
aggaaacaaggtgtcctccatcccccagtgccttcacatcttgaggatatgcttctgtactttttaaaagcttatagttggtatggaaaacatttttcttwtttttaagtgttattaattatatctatggaaaaactattcctgaaatatatacagtcttatgtcccaatcagagtcttttaacctatgatttaaaaatgt

SEQ ID NO: 21636 - DNA, 201 bp, Homo sapiens
ctttctgttgtcaaaaagatgaaggagacctttaaggagaaagctaagctctgagctgaggaaacaaggtgtcctccatcccccagtgccttcacatcttraggatatgcttctgtactttttaaaagcttatagttggtatggaaaacatttttcttatttttaagtgttattaattatatctatggaaaaactattcct

SEQ ID NO: 21637 - DNA, 201 bp, Homo sapiens
ctgaggaaacaaggtgtcctccatcccccagtgccttcacatcttgaggatatgcttctgtactttttaaaagcttatagttggtatggaaaacatttttyttatttttaagtgttattaattatatctatggaaaaactattcctgaaatatatacagtcttatgtcccaatcagagtcttttaacctatgatttaaaaa

SEQ ID NO: 21638 - DNA, 201 bp, Homo sapiens
ttcagaaaatccccgctaaacgaattggtgttcctgaggaggtctcctctgtggtctgcttcctactgtctcctgcagcttccttcatcactggacagtcrgtggatgtggatgggggccggagtctctatactcactcgtatgaggtaccagatcatgacaactggcccaagggagcaggggacctttctgttgtcaaaa

SEQ ID NO: 21639 - DNA, 201 bp, Homo sapiens
tatcattgtccctactaaagctggatttccattagctgtgcattctggagctgcaagagcaggtgtttacaacctcaccaaatctttagctttggaatggscctgcagtggaatacggatcaattgtgttgcccctggagttatttattcccagactgctgtggagaactatggttcctggggacaaagcttctttgaagg

SEQ ID NO: 21640 - DNA, 201 bp, Homo sapiens
cttctacatgtgcaaagcagtttacagctcctggatgaaagagcatggaggatctatcgtcaatatcattgtccctactaaagctggatttccattagctstgcattctggagctgcaagagcaggtgtttacaacctcaccaaatctttagctttggaatgggcctgcagtggaatacggatcaattgtgttgcccctgg

SEQ ID NO: 21641 - DNA, 201 bp, Homo sapiens
gccggagtctctatactcactcgtatgaggtaccagatcatgacaactggcccaagggagcaggggacctttctgttgtcaaaaagatgaaggagaccttwaaggagaaagctaagctctgagctgaggaaacaaggtgtcctccatcccccagtgccttcacatcttgaggatatgcttctgtactttttaaaagcttat

SEQ ID NO: 21642 - DNA, 201 bp, Homo sapiens
cgggcatcggaaaagccatcgtgaaggagctcctggagctggggagtaatgtggtcattgcatcccgtaagttggagagattgaagtctgcggcagatgarctgcaggccaacctacctcccacaaagcaggcacgagtcattcccatacaatgcaacatccggaatgaggaggaggtgaataatttggtcaaatctacct

SEQ ID NO: 21643 - DNA, 201 bp, Homo sapiens
acacatcagttctaagggatggcacgctgtgcttgagaccaacctgacgggtaccttctacatgtgcaaagcaggcaagtaccatcactcctggatgaaaragcatggaggatctatcgtcaatatcattgtccctactaaagctggatttccattagctgtgcattctggagctgcaagagcaggtgtttacaacctcac

SEQ ID NO: 21644 - DNA, 201 bp, Homo sapiens; identical to SEQ ID NO: 21633

SEQ ID NO: 21645 - DNA, 201 bp, Homo sapiens; identical to SEQ ID NO: 21634

SEQ ID NO: 21646 - DNA, 201 bp, Homo sapiens; identical to SEQ ID NO: 21635

SEQ ID NO: 21647 - DNA, 201 bp, Homo sapiens; identical to SEQ ID NO: 21636

SEQ ID NO: 21648 - DNA, 201 bp, Homo sapiens; identical to SEQ ID NO: 21637

SEQ ID NO: 21649 - DNA, 201 bp, Homo sapiens; identical to SEQ ID NO: 21638

SEQ ID NO: 21650 - DNA, 201 bp, Homo sapiens
tatcattgtccctactaaagctggatttccattagctgtgcattctggagctgcaagagcaggtgtttacaacctcaccaaatctttagctttggaatggscctgcagtggaatacggatcaattgtgttgcccctgtagttatttattcccagactgctgtggagaactatggttcctggggacaaagcttctttgaagg

SEQ ID NO: 21651 - DNA, 201 bp, Homo sapiens
catgtgcaaagcaggcaagtaccatcactcctggatgaaagagcatggaggatctatcgtcaatatcattgtccctactaaagctggatttccattagctstgcattctggagctgcaagagcaggtgtttacaacctcaccaaatctttagctttggaatgggcctgcagtggaatacggatcaattgtgttgcccctgt

SEQ ID NO: 21652 - DNA, 201 bp, Homo sapiens; identical to SEQ ID NO: 21641

SEQ ID NO: 21653 - DNA, 201 bp, Homo sapiens; identical to SEQ ID NO: 21642

SEQ ID NO: 21654 - DNA, 201 bp, Homo sapiens
ccttggagactagacgccagttagccttgaaggcattcactcatacggcacaatatgatgaagcaatttcagattatttcaggaaacagtacagcaaaggygtatctcagatgcccttgagatatggaatgaacccacatcagacccctgcccagctgtacacactgcagcccaagcttcccatcacagttctaaatggag

SEQ ID NO: 21655 - DNA, 201 bp, Homo sapiens
gctaaaaggagtggtgtggcgtacattgcggctccctccggttctgctgctgacaaagttgtgattgaggcctgcgacgaactgggaatcatcctcgctcrtacgaaccttcggctcttccaccactgattttaccacacactgttttttggcttgcttatgtgtaggtgaacagtcacgcctgaaactttgaggataact

SEQ ID NO: 21656 - DNA, 201 bp, Homo sapiens
gaagataatgctgacatggccagacttgatttcaatcttataagagttgttgcctgcaatctctatccctttgtaaagacagtggcttctccaggtgtaastgttgaggaggctgtggagcaaattgacattggtggagtaaccttactgagagctgcagccaaaaaccacgctcgagtgacagtggtgtgtgaaccagag

SEQ ID NO: 21657 - DNA, 201 bp, Homo sapiens
cggcacaatatgatgaagcaatttcagattatttcaggaaacagtacagcaaaggcgtatctcagatgcccttgagatatggaatgaacccacatcagacscctgcccagctgtacacactgcagcccaagcttcccatcacagttctaaatggagcccctggatttataaacttgtgcgatgctttgaacgcctggcagc

SEQ ID NO: 21658 - DNA, 201 bp, Homo sapiens
cttagacaccatccacaagtgctttcgatgaagtttaaaacaggagtgaagagagcagaaatctccaatgccatcgatcaatatgtgactggaaccattgrcgaggatgaagatttgataaagtggaaggcactgtttgaggaagtccctgagttactcactgaggcagagaagaaggaatgggttgagaaactgactgaa

SEQ ID NO: 21659 - DNA, 201 bp, Homo sapiens
gaacgggcaggttatcggcattggagcaggacagcagtctcgtatacactgcactcgccttgcaggagataaggcaaactattggtggcttagacaccatycacaagtgctttcgatgaagtttaaaacaggagtgaagagagcagaaatctccaatgccatcgatcaatatgtgactggaaccattggcgaggatgaaga

SEQ ID NO: 21660 - DNA, 201 bp, Homo sapiens; identical to SEQ ID NO: 21655

SEQ ID NO: 21661 - DNA, 201 bp, Homo sapiens
taagcccggaaacagctccgccccctcgcttcctgagccgccacatcccggcagccctcctaccggcgcacgtggtgccgccgctgctgcctcccgctcgycctgaacccagtgcctgcagccatggctcccggccagctcgccttatttagtgtctctgacaaaaccggccttgtggaatttgcaagaaacctgaccgct

SEQ ID NO: 21662 - DNA, 201 bp, Homo sapiens
tggcctcactttggggtcgtgggcagatcgctggctcccacgcctggacttcgggatcgcaggcaggatcccttccagcccaagcactccgcccaggcgcrccaggcagagccccgccccatcccgccgttcccttcagccccggggcgcggatcttgcatctgaaactgagcagagcagggcgccgggcagggccggcgg

SEQ ID NO: 21663 - DNA, 201 bp, Homo sapiens
cgcggatcttgcatctgaaactgagcagagcagggcgccgggcagggccggcgggccacgtgataagcccggaaacagctccgccccctcgcttcctgagycgccacatcccggcagccctcctaccggcgcacgtggtgccgccgctgctgcctcccgctcgccctgaacccagtgcctgcagccatggctcccggccag

SEQ ID NO: 21664 - DNA, 201 bp, Homo sapiens
gagcagggcgccgggcagggccggcgggccacgtgataagcccggaaacagctccgccccctcgcttcctgagccgccacatcccggcagccctcctacckgcgcacgtggtgccgccgctgctgcctcccgctcgccctgaacccagtgcctgcagccatggctcccggccagctcgccttatttagtgtctctgacaaa

SEQ ID NO: 21665 - DNA, 201 bp, Homo sapiens
gaaacagctccgccccctcgcttcctgagccgccacatcccggcagccctcctaccggcgcacgtggtgccgccgctgctgcctcccgctcgccctgaacycagtgcctgcagccatggctcccggccagctcgccttatttagtgtctctgacaaaaccggccttgtggaatttgcaagaaacctgaccgctcttggttt

SEQ ID NO: 21666 - DNA, 201 bp, Homo sapiens
gtcgtgggcagatcgctggctcccacgcctggacttcgggatcgcaggcaggatcccttccagcccaagcactccgcccaggcgcgccaggcagagccccrccccatcccgccgttcccttcagccccggggcgcggatcttgcatctgaaactgagcagagcagggcgccgggcagggccggcgggccacgtgataagcc

SEQ ID NO: 21667 - DNA, 201 bp, Homo sapiens; identical to SEQ ID NO: 21656

SEQ ID NO: 21668 - DNA, 201 bp, Homo sapiens; identical to SEQ ID NO: 21654

SEQ ID NO: 21669 - DNA, 201 bp, Homo sapiens
gggccggcgggccacgtgataagcccggaaacagctccgccccctcgcttcctgagccgccacatcccggcagccctcctaccggcgcacgtggtgccgcygctgctgcctcccgctcgccctgaacccagtgcctgcagccatggctcccggccagctcgccttatttagtgtctctgacaaaaccggccttgtggaatt

SEQ ID NO: 21670 - DNA, 201 bp, Homo sapiens; identical to SEQ ID NO: 21658

SEQ ID NO: 21671 - DNA, 201 bp, Homo sapiens; identical to SEQ ID NO: 21657

SEQ ID NO: 21672 - DNA, 201 bp, Homo sapiens; identical to SEQ ID NO: 21659

SEQ ID NO: 21673 - DNA, 201 bp, Homo sapiens
cagagcagggcgccgggcagggccggcgggccacgtgataagcccggaaacagctccgccccctcgcttcctgagccgccacatcccggcagccctcctaycggcgcacgtggtgccgccgctgctgcctcccgctcgccctgaacccagtgcctgcagccatggctcccggccagctcgccttatttagtgtctctgaca

SEQ ID NO: 21674 - DNA, 201 bp, Homo sapiens; identical to SEQ ID NO: 21661

SEQ ID NO: 21675 - DNA, 201 bp, Homo sapiens; identical to SEQ ID NO: 21655

SEQ ID NO: 21676 - DNA, 201 bp, Homo sapiens; identical to SEQ ID NO: 21662

SEQ ID NO: 21677 - DNA, 201 bp, Homo sapiens; identical to SEQ ID NO: 21663

SEQ ID NO: 21678 - DNA, 201 bp, Homo sapiens; identical to SEQ ID NO: 21664

SEQ ID NO: 21679 - DNA, 201 bp, Homo sapiens; identical to SEQ ID NO: 21665

SEQ ID NO: 21680 - DNA, 201 bp, Homo sapiens; identical to SEQ ID NO: 21666

SEQ ID NO: 21681 - DNA, 201 bp, Homo sapiens
gagtggactttttaatgacagccagattcgtctttgttttatagagttgttgcctgcaatctctatccctttgtaaagacagtggcttctccaggtgtaastgttgaggaggctgtggagcaaattgacattggtggagtaaccttactgagagctgcagccaaaaaccacgctcgagtgacagtggtgtgtgaaccagag

SEQ ID NO: 21682 - DNA, 201 bp, Homo sapiens; identical to SEQ ID NO: 21654

SEQ ID NO: 21683 - DNA, 201 bp, Homo sapiens
ccatgctggaatcctagctcgtaatattccagaagataatgctgacatggccagacttgatttcaatcttataagatagctgtaaaccacatgagtggackttttaatgacagccagattcgtctttgttttatagagttgttgcctgcaatctctatccctttgtaaagacagtggcttctccaggtgtaagtgttgagg

SEQ ID NO: 21684 - DNA, 201 bp, Homo sapiens; identical to SEQ ID NO: 21669

SEQ ID NO: 21685 - DNA, 201 bp, Homo sapiens; identical to SEQ ID NO: 21657

SEQ ID NO: 21686 - DNA, 201 bp, Homo sapiens; identical to SEQ ID NO: 21658

SEQ ID NO: 21687 - DNA, 201 bp, Homo sapiens; identical to SEQ ID NO: 21673

SEQ ID NO: 21688 - DNA, 201 bp, Homo sapiens; identical to SEQ ID NO: 21659

SEQ ID NO: 21689 - DNA, 201 bp, Homo sapiens; identical to SEQ ID NO: 21655

SEQ ID NO: 21690 - DNA, 130 bp, Homo sapiens
gtggtgccgccgctgctgcctcccgctcgycctgaacccagtgcctgcagccatggctcccggccagctcggtgaggccctagcggagcggcgcggtctgcgtcctcgcctgcggccccccacgctcccg

SEQ ID NO: 21691 - DNA, 138 bp, Homo sapiens
gtggtgccgccgctgctgcctcccgctcgccctgaacycagtgcctgcagccatggctcccggccagctcggtgaggccctagcggagcggcgcggtctgcgtcctcgcctgcggccccccacgctcccgccttggcg

SEQ ID NO: 21692 - DNA, 201 bp, Homo sapiens; identical to SEQ ID NO: 21656

SEQ ID NO: 21693 - DNA, 201 bp, Homo sapiens; identical to SEQ ID NO: 21654

SEQ ID NO: 21694 - DNA, 111 bp, Homo sapiens
gtggtgccgcygctgctgcctcccgctcgccctgaacccagtgcctgcagccatggctcccggccagctcggtgaggccctagcggagcggcgcggtctgcgtcctcgcct

SEQ ID NO: 21695 - DNA, 201 bp, Homo sapiens; identical to SEQ ID NO: 21657

SEQ ID NO: 21696 - DNA, 201 bp, Homo sapiens; identical to SEQ ID NO: 21658

SEQ ID NO: 21697 - DNA, 201 bp, Homo sapiens; identical to SEQ ID NO: 21659

SEQ ID NO: 21698 - DNA, 201 bp, Homo sapiens
caagtattacaatgagctaagcaaaagcattgaaatccatacctacgggcaagcatttggagaatatgtcaatgataaaaatttgattcctaccatatctrcttgtaaattttatctttcctttgaaaattcaatccacaaggattacatcacggaaaagctatacaatgcttttctggctggctctgtacctgttgttct

SEQ ID NO: 21699 - DNA, 201 bp, Homo sapiens
catttaagagagcctaaataaaattatcatcaaggtattaaatataagacgttaaatataataaagtggggatatatagaaaacacacagtgttagcacasagtaagatctcaatgcacatttgttggatgaataaataaatgcaattgaattcccagaaaaatgattgtttcaaggaagtgacagttctactttagaagt

SEQ ID NO: 21700 - DNA, 201 bp, Homo sapiens
agcatgagcaatcattccattcggttttaaattatcctgtatatacctaattatgtgcactggagagtaatttattcttcattatcatttgtaaacattgytttttcacatttttgtagttgtccataatgtaagcttgtggtttgattattgtttccacactgatcagctgtttaatctatttgggaaatgaagatgcac

SEQ ID NO: 21701 - DNA, 201 bp, Homo sapiens; identical to SEQ ID NO: 21698

SEQ ID NO: 21702 - DNA, 201 bp, Homo sapiens; identical to SEQ ID NO: 21699

SEQ ID NO: 21703 - DNA, 201 bp, Homo sapiens; identical to SEQ ID NO: 21700

SEQ ID NO: 21704 - DNA, 201 bp, Homo sapiens; identical to SEQ ID NO: 21698

SEQ ID NO: 21705 - DNA, 201 bp, Homo sapiens; identical to SEQ ID NO: 21699

SEQ ID NO: 21706 - DNA, 201 bp, Homo sapiens; identical to SEQ ID NO: 21700

SEQ ID NO: 21707 - DNA, 201 bp, Homo sapiens
acaacatgtcccttgatgagattgagaagctcacatacattgacaagtggtttttgtataagatgcgtgatattttaaacatggaaaagacactgaaaggsctcaacagtgagtccatgacagaagaaaccctgaaaagggcaaaggagattgggttctcagataagcagatttcaaaatgccttgggctcactgaggccc

SEQ ID NO: 21708 - DNA, 201 bp, Homo sapiens
gctctgctctggcctcaaaagccactggctacccattggcattcattgctgcaaagattgccctaggaatcccacttccagaaattaagaacgtcgtatcygggaagacatcagcctgttttgaacctagcctggattacatggtcaccaagattccccgctgggatcttgaccgttttcatggaacatctagccgaattg

SEQ ID NO: 21709 - DNA, 201 bp, Homo sapiens
tgaatatcacaaacaaacaggctttcattactgctcagaatcatggctatgccttggacaacaccctccctgctggctggaaaccactttttgtgaatgtsaacgatcaaacaaatgaggggattatgcatgagagcaaacccttcttcgctgtgcagttccacccagaggtcaccccggggccaatagacactgagtacc

SEQ ID NO: 21710 - DNA, 201 bp, Homo sapiens
cagacagctctgaactgtggagtggaactattcaagagaggtgtgctcaaggaatatggtgtgaaagtcctgggaacttcagttgagtccattatggctayggaagacaggcagctgttttcagataaactaaatgagatcaatgaaaagattgctccaagttttgcagtggaatcgattgaggatgcactgaaggcagca

SEQ ID NO: 21711 - DNA, 201 bp, Homo sapiens
gcttttgccatctctggtccattcaacgtccaatttcttgtcaaaggaaatgatgtcttggtgattgagtgtaacttgagagcttctcgatccttcccctytgtttccaagactcttggggttgacttcattgatgtggccaccaaggtgatgattggagagaatgttgatgagaaacatcttccaacattggaccatccc

SEQ ID NO: 21712 - DNA, 201 bp, Homo sapiens
tgatggagaaactgacacgttatgagtatttcctgccctacatggattttgaacttgaattcccagcctcgcttgcatctagacacagccacaaatcatcwaaatgacgaggattttgacagctttcaaagtggtgaggacactgaagactggttttggctttaccaatgtgactgcacaccaaaaatggaaattttcaag

SEQ ID NO: 21713 - DNA, 201 bp, Homo sapiens
tgctaggctgtggtccatatcacattggcagcagtgtggaatttgattggtgtgctgtctctagtatccgcacactgcgtcaacttggcaagaagacggtsgtggtgaattgcaatcctgagactgtgagcacagactttgatgagtgtgacaaactgtactttgaagagttgtccttggagagaatcctagacatctacc

SEQ ID NO: 21714 - DNA, 201 bp, Homo sapiens
tgtccatggccaacagagggcagaatcagcctgttttgaatatcacaaacaaacaggctttcattactgctcagaatcatggctatgccttggacaacacyctccctgctggctggaaaccactttttgtgaatgtcaacgatcaaacaaatgaggggattatgcatgagagcaaacccttcttcgctgtgcagttccacc

SEQ ID NO: 21715 - DNA, 201 bp, Homo sapiens
agattccttggtgtggctgaacaattacacaatgaaggtttcaagctgtttgccacggaagccacatcagactggctcaacgccaacaatgtccctgccamcccagtggcatggccgtctcaagaaggacagaatcccagcctctcttccatcagaaaattgattagagatggcagcattgacctagtgattaaccttccc

SEQ ID NO: 21716 - DNA, 201 bp, Homo sapiens
gatgtccatggccaacagagggcagaatcagcctgttttgaatatcacaaacaaacaggctttcattactgctcagaatcatggctatgccttggacaacdccctccctgctggctggaaaccactttttgtgaatgtcaacgatcaaacaaatgaggggattatgcatgagagcaaacccttcttcgctgtgcagttcca

SEQ ID NO: 21717 - DNA, 201 bp, Homo sapiens
tgatgtcttggtgattgagtgtaacttgagagcttctcgatccttcccctttgtttccaagactcttggggttgacttcattgatgtggccaccaaggtgwtgattggagagaatgttgatgagaaacatcttccaacattggaccatcccataattcctgctgactatgttgcaattaaggctcccatgttttcctggcc

SEQ ID NO: 21718 - DNA, 201 bp, Homo sapiens
ttctcacccatttggctaatccaggaatattgttatcccttcccattatattgaagttgagaaatgtgacagaggcatttagagtatggacttttcttttytttttctttttctttttttctttttgagatggagtcacactctccaggctggagtgcagtggcacaatctcggctcactgcaatttccgtctcccaagtt

SEQ ID NO: 21719 - DNA, 201 bp, Homo sapiens
ttcctaagttactcttcatgaggatactctatttttaaaacactatctgcaaactcaggacactttaacagggcagaatactctaaaaacttgataaaatkaaatatagatttaatttatgaaccttccatcatgatgtttgtgtattgcttctttttggatcctcattctcacccatttggctaatccaggaatattgtt

SEQ ID NO: 21720 - DNA, 201 bp, Homo sapiens
ggacttttcttttctttttctttttctttttttctttttgagatggagtcacactctccaggctggagtgcagtggcacaatctcggctcactgcaatttscgtctcccaagttcaagcgattctcctgctttagactatggatttctttaaggaatactggtttgcagttttgttttctggactatatcagcagatggta

SEQ ID NO: 21721 - DNA, 201 bp, Homo sapiens
tgggttaaacagattgatacactggctgcagaatacccatcagtaacaaactatctctatgttacctacaatggtcaggagcatgatgtcaattttgatgwccatggaatgatggtgctaggctgtggtccatatcacattggcagcagtgtggaatttgattggtgtgctgtctctagtatccgcacactgcgtcaactt

SEQ ID NO: 21722 - DNA, 201 bp, Homo sapiens
atgatggagaaactgacacgttatgagtatttcctgccctacatggattttgaacttgaattcccagcctcgcttgcatctagacacagccacaaatcatyaaaatgacgaggattttgacagctttcaaagtggtgaggacactgaagactggttttggctttaccaatgtgactgcacaccaaaaatggaaattttcaa

SEQ ID NO: 21723 - DNA, 201 bp, Homo sapiens
gctggtgccaaaacctacaagatgtccatggccaacagagggcagaatcagcctgttttgaatatcacaaacaaacaggctttcattactgctcagaatcrtggctatgccttggacaacaccctccctgctggctggaaaccactttttgtgaatgtcaacgatcaaacaaatgaggggattatgcatgagagcaaaccc

SEQ ID NO: 21724 - DNA, 201 bp, Homo sapiens
gcctggattacatggtcaccaagattccccgctgggatcttgaccgttttcatggaacatctagccgaattggtagctctatgaaaagtgtaggagaggtmatggctattggtcgtacctttgaggagagtttccagaaagctttacggatgtgccacccatctatagaaggtttcactccccgtctcccaatgaacaaag

SEQ ID NO: 21725 - DNA, 201 bp, Homo sapiens; identical to SEQ ID NO: 21707

SEQ ID NO: 21726 - DNA, 201 bp, Homo sapiens; identical to SEQ ID NO: 21708

SEQ ID NO: 21727 - DNA, 201 bp, Homo sapiens; identical to SEQ ID NO: 21709

SEQ ID NO: 21728 - DNA, 201 bp, Homo sapiens; identical to SEQ ID NO: 21710

SEQ ID NO: 21729 - DNA, 201 bp, Homo sapiens; identical to SEQ ID NO: 21711

SEQ ID NO: 21730 - DNA, 201 bp, Homo sapiens
actgcacccctcccagatttcttttacattaactaaaaagtcttatcacacaatctcataaaatttatgtaatttcatttaattttagccacaaatcatcwaaatgacgaggattttgacagctttcaaagtggtgaggacactgaagactggttttggctttaccaatgtgactgcacaccaaaaatggaaattttcaag

SEQ ID NO: 21731 - DNA, 201 bp, Homo sapiens; identical to SEQ ID NO: 21713

SEQ ID NO: 21732 - DNA, 201 bp, Homo sapiens; identical to SEQ ID NO: 21714

SEQ ID NO: 21733 - DNA, 201 bp, Homo sapiens; identical to SEQ ID NO: 21715

SEQ ID NO: 21734 - DNA, 201 bp, Homo sapiens; identical to SEQ ID NO: 21716

SEQ ID NO: 21735 - DNA, 201 bp, Homo sapiens
actaggcttgcctatgtgcttatgtgtagctttttactttttatggtgctgattaatggtgatcaaggtaggaaaagttgctgttctattttctgaactcyttctatactttaagatactctatttttaaaacactatctgcaaactcaggacactttaacagggcagaatactctaaaaacttgataaaattaaatatag

SEQ ID NO: 21736 - DNA, 201 bp, Homo sapiens; identical to SEQ ID NO: 21717

SEQ ID NO: 21737 - DNA, 201 bp, Homo sapiens; identical to SEQ ID NO: 21718

SEQ ID NO: 21738 - DNA, 201 bp, Homo sapiens
ctgaactctttctatactttaagatactctatttttaaaacactatctgcaaactcaggacactttaacagggcagaatactctaaaaacttgataaaatkaaatatagatttaatttatgaaccttccatcatgatgtttgtgtattgcttctttttggatcctcattctcacccatttggctaatccaggaatattgtt

SEQ ID NO: 21739 - DNA, 201 bp, Homo sapiens; identical to SEQ ID NO: 21720

SEQ ID NO: 21740 - DNA, 201 bp, Homo sapiens; identical to SEQ ID NO: 21721

SEQ ID NO: 21741 - DNA, 201 bp, Homo sapiens
gactgcacccctcccagatttcttttacattaactaaaaagtcttatcacacaatctcataaaatttatgtaatttcatttaattttagccacaaatcatyaaaatgacgaggattttgacagctttcaaagtggtgaggacactgaagactggttttggctttaccaatgtgactgcacaccaaaaatggaaattttcaa

SEQ ID NO: 21742 - DNA, 201 bp, Homo sapiens; identical to SEQ ID NO: 21723

SEQ ID NO: 21743 - DNA, 201 bp, Homo sapiens; identical to SEQ ID NO: 21724

SEQ ID NO: 21744 - DNA, 201 bp, Homo sapiens; identical to SEQ ID NO: 21707

SEQ ID NO: 21745 - DNA, 201 bp, Homo sapiens; identical to SEQ ID NO: 21708

SEQ ID NO: 21746 - DNA, 201 bp, Homo sapiens; identical to SEQ ID NO: 21709

SEQ ID NO: 21747 - DNA, 201 bp, Homo sapiens; identical to SEQ ID NO: 21710

SEQ ID NO: 21748 - DNA, 201 bp, Homo sapiens; identical to SEQ ID NO: 21711

SEQ ID NO: 21749 - DNA, 201 bp, Homo sapiens; identical to SEQ ID NO: 21730

SEQ ID NO: 21750 - DNA, 201 bp, Homo sapiens; identical to SEQ ID NO: 21713

SEQ ID NO: 21751 - DNA, 201 bp, Homo sapiens; identical to SEQ ID NO: 21714

SEQ ID NO: 21752 - DNA, 201 bp, Homo sapiens; identical to SEQ ID NO: 21715

SEQ ID NO: 21753 - DNA, 201 bp, Homo sapiens; identical to SEQ ID NO: 21716

SEQ ID NO: 21754 - DNA, 201 bp, Homo sapiens; identical to SEQ ID NO: 21735

SEQ ID NO: 21755 - DNA, 201 bp, Homo sapiens; identical to SEQ ID NO: 21717

SEQ ID NO: 21756 - DNA, 201 bp, Homo sapiens; identical to SEQ ID NO: 21718

SEQ ID NO: 21757 - DNA, 201 bp, Homo sapiens; identical to SEQ ID NO: 21738

SEQ ID NO: 21758 - DNA, 201 bp, Homo sapiens; identical to SEQ ID NO: 21720

SEQ ID NO: 21759 - DNA, 201 bp, Homo sapiens; identical to SEQ ID NO: 21721

SEQ ID NO: 21760 - DNA, 201 bp, Homo sapiens; identical to SEQ ID NO: 21741

SEQ ID NO: 21761 - DNA, 201 bp, Homo sapiens; identical to SEQ ID NO: 21723

SEQ ID NO: 21762 - DNA, 201 bp, Homo sapiens; identical to SEQ ID NO: 21724

SEQ ID NO: 21763 - DNA, 201 bp, Homo sapiens
gtatcttatccgatggaaaggctacgggagcaccgaggacacgtgggagccggagcaccacctcttgcactgtgaggagtttattgatgaattcaatgggytgcacatgtccaaggacaagaggatcaagtcagggaagcagtccagtacctccaagctgctgcgtgacagtcgaggcccgtcggttgagaaactgtccca

SEQ ID NO: 21764 - DNA, 201 bp, Homo sapiens
gcgaccggcgaaaggagagcactcggattgcagaagccatcagggactttgtgaaggcctttatccagtttaagaagcctatcgtggtggccatcaatggkccggccctgggcctgggtgcctccatcctgcccctctgtgacatcgtgtgggccagtgagaaggcctggttccagacgccctacgccaccatccgcctca

SEQ ID NO: 21765 - DNA, 201 bp, Homo sapiens
cttctggggacctttacgaggttgaaaggattgtagacaagaggaagaacaagaaaggaaaatgggagtatcttatccgatggaaaggctacgggagcacygaggacacgtgggagccggagcaccacctcttgcactgtgaggagtttattgatgaattcaatgggttgcacatgtccaaggacaagaggatcaagtcag

SEQ ID NO: 21766 - DNA, 201 bp, Homo sapiens
tgaagaggaagctggaagcggagaaggactacgtctttgacaaaaggctcagatacagtgtccgccagaatgaaagcaactgtcggtttcgagacatcgtygtgcggaaggaagaagggttcacgcacatcctgctgtccagtcagacctcggataacaatgccctgacacctgagatcatgaaagaagtccggcgagcgc

SEQ ID NO: 21767 - DNA, 201 bp, Homo sapiens
tgggccggccctgggcctgggtgcctccatcctgcccctctgtgacatcgtgtgggccagtgagaaggcctggttccagacgccctacgccaccatccgcytcacgcctgctggctgctcctcctacaccttcccccagatcctgggcgtcgcgctggccaatgagatgctgttctgtgggcggaagctcaccgcccagga

SEQ ID NO: 21768 - DNA, 201 bp, Homo sapiens
ggaagaccactttcacattcttctgactcaggctgtgtctacacagtgcctctgacttggagacttggccatcatggctctctctggttgtatttagatckggtgtcagaggacgaccaatcttagggaatttccagaccaatgagcaaaatgattgtgcacacctggcctcagtctcctttccgacgcaaatctgtgtga

SEQ ID NO: 21769 - DNA, 201 bp, Homo sapiens
aggactacgtctttgacaaaaggctcagatacagtgtccgccagaatgaaagcaactgtcggtttcgagacatcgttgtgcggaaggaagaagggttcacrcacatcctgctgtccagtcagacctcggataacaatgccctgacacctgagatcatgaaagaagtccggcgagcgctctgcaacgcagccacagacgaca

SEQ ID NO: 21770 - DNA, 201 bp, Homo sapiens
gagagcaagatatgggtgaatgtgacgtgaatcacgctacactggcggagaacgggctcggctctgctctgaccaacgggggattgaacctgcacagtccrgtgaagaggaagctggaagcggagaaggactacgtctttgacaaaaggctcagatacagtgtccgccagaatgaaagcaactgtcggtttcgagacatcg

SEQ ID NO: 21771 - DNA, 201 bp, Homo sapiens
tccctgcccttcctggccagagagctgtccaaggctgtatcttcccagggctccgccaagcaccgctgtcctttccccacttgctgaaatgcaccatgacrgtccaggaaggggaagaccactttcacattcttctgactcaggctgtgtctacacagtgcctctgacttggagacttggccatcatggctctctctggtt

SEQ ID NO: 21772 - DNA, 201 bp, Homo sapiens
ggacctcccataaacggaagcgaattaaccctcccctggccaagccaaaaaaagggtattcaggcaagccctcttcaggaggtgacagggccaccaagacrgtgtcttacaggactacccccagtggtttgcaaataatgcccctgaaaaagtctcagaacgggatggaaaatggggacgccggctctgagaaggatgaga

SEQ ID NO: 21773 - DNA, 136 bp, Homo sapiens
ttgtgcacacctggcctcagtctcctttccgacgcaaatctgtgtgactattagggcttggtcttaaaacccaattgagtgatttgcaaacccagatattstacatttagaaatgttttgttaaatatatattttt

SEQ ID NO: 21774 - DNA, 201 bp, Homo sapiens
tggtggccatcaatgggccggccctgggcctgggtgcctccatcctgcccctctgtgacatcgtgtgggccagtgagaaggcctggttccagacgccctaygccaccatccgcctcacgcctgctggctgctcctcctacaccttcccccagatcctgggcgtcgcgctggccaatgagatgctgttctgtgggcggaagc

SEQ ID NO: 21775 - DNA, 201 bp, Homo sapiens
ctcccctggccaagccaaaaaaagggtattcaggcaagccctcttcaggaggtgacagggccaccaagacggtgtcttacaggactacccccagtggtttrcaaataatgcccctgaaaaagtctcagaacgggatggaaaatggggacgccggctctgagaaggatgagaggcactttggaaatgggtcccatcagcctg

SEQ ID NO: 21776 - DNA, 201 bp, Homo sapiens
gctgctcctcctacaccttcccccagatcctgggcgtcgcgctggccaatgagatgctgttctgtgggcggaagctcaccgcccaggaggcctgcagcagrgggctggtgtcgcaggtcttctggcccaccacgttcagccaggaggtcatgctgcgggtcaaggagatggcatcctgcagtgccgtggtgttagaggagt

SEQ ID NO: 21777 - DNA, 201 bp, Homo sapiens
taatgtgaatgctgaaatttctgtctttgaagtaaatatacgctttgttggtggactactctcagcctactatctgtctggagaagagatttttcgaaagraagcagtggaacttggggtaaaattgctacctgcatttcatactccctctggaataccttgggcattgctgaatatgaaaagtggtattggaaggaactg

SEQ ID NO: 21778 - DNA, 201 bp, Homo sapiens
accacaagcccgggcccggggcgcgcgccgaggacgcggccgaggggcgagcccggcgccgcgaggagggggcacccggggacccggaggccgccctggargacaacttggccaggatccgcgaaaaccacgagcgggctctcagggaagccaaggagaccctgcagaagctgcccgaggagatccaaagagacatcctac

SEQ ID NO: 21779 - DNA, 201 bp, Homo sapiens
agactcatttgatccgcaagtctagcagcggactaacttatatcgcagagtggaaagggggcctcctggagcacaagatgggccacctgacctgcttcgckgggggcatgttcgcactcggggctgatgcagctcccgaaggcatggcccaacactaccttgaactcggggctgaaattgcccgtacttgtcatgaatcat

SEQ ID NO: 21780 - DNA, 201 bp, Homo sapiens
tacattggcccactatatatacatatatatttatgtagatatacttccatgaaagggctaatacgatgcatatactgaagggcaaggactttgaccatgtsaattttcagccgagaatggtcagaaagatcagtacaaccccatggattaggctgaaacatatgaaattgctgcatttgtagtttaaaaactgtcagcagt

SEQ ID NO: 21781 - DNA, 201 bp, Homo sapiens
ccttatcatatcctttattaattcagccagtgtatccaccagttttttgtttatgtttttaagtaacctattatctctggatttcatgaaggtgtaatatygtttttgttaaactgaatagaattgtatagcgatgacctcttaattataatttgatttgactgcaaaactttttcctcctctaagaggagatgatgtctg

SEQ ID NO: 21782 - DNA, 201 bp, Homo sapiens
gataaaaaggaagttgaaatcagagaggaataaaaagacattttatattttattctgctccattcccttcactgtataccttaataattccttttctggtratcaggcacatgatgaactttgattagtaggtctgtgattaagttcttaaattgttttgcagtcttttatgtttattatcataggtataggtggacctaa

SEQ ID NO: 21783 - DNA, 201 bp, Homo sapiens
ccagttttttgtttatgtttttaagtaacctattatctctggatttcatgaaggtgtaatatcgtttttgttaaactgaatagaattgtatagcgatgacytcttaattataatttgatttgactgcaaaactttttcctcctctaagaggagatgatgtctgctttaagctgtaatgttttgccatgttgcaaaaagcca

SEQ ID NO: 21784 - DNA, 201 bp, Homo sapiens
attagaaagtcattccaaaaggatcatgtcatgttgacctcatttcatcggaactgcagtatatttttgttggttaattatattagtgttttctattttgwaaatgtgtcctttaattttactttaaatgccctgtgtcatttctggattatatactagttaatttcttccattccccactacacagagaggtgagctttc

SEQ ID NO: 21785 - DNA, 201 bp, Homo sapiens
ttatattagtgttttctattttgtaaatgtgtcctttaattttactttaaatgccctgtgtcatttctggattatatactagttaatttcttccattcccyactacacagagaggtgagctttcaaattttgcagagctctgctatcactgaattacatttatctgaagaaaatagtacaacttaatggattagcttttgg

SEQ ID NO: 21786 - DNA, 201 bp, Homo sapiens
gtttatgtttttaagtaacctattatctctggatttcatgaaggtgtaatatcgtttttgttaaactgaatagaattgtatagcgatgacctcttaattayaatttgatttgactgcaaaactttttcctcctctaagaggagatgatgtctgctttaagctgtaatgttttgccatgttgcaaaaagccataataataag

SEQ ID NO: 21787 - DNA, 201 bp, Homo sapiens
attttctgacgacgatcttcttccactggagcattggatcttcaatagcgaggcacatcttctccctatcctccctaaagataaaaaggaagttgaaatcrgagaggaataaaaagacattttatattttattctgctccattcccttcactgtataccttaataattccttttctggtaatcaggcacatgatgaacttt

SEQ ID NO: 21788 - DNA, 201 bp, Homo sapiens
tcctttaattttactttaaatgccctgtgtcatttctggattatatactagttaatttcttccattccccactacacagagaggtgagctttcaaattttkcagagctctgctatcactgaattacatttatctgaagaaaatagtacaacttaatggattagcttttgggtttaactgaatatatgaagaaattgggtct

SEQ ID NO: 21789 - DNA, 176 bp, Homo sapiens
cgcggcggagtgtaccgtgctgctctactcgctgccattcgcccgcaggtcggcgcgctcgcccacctgagccgckccggggctgcgggaccgtgggacagcgcgctcagcccagcctaggaaagaggcagcagtctcagcgcggagatggggagcgggcgaagttgacgagtctc

SEQ ID NO: 21790 - DNA, 201 bp, Homo sapiens
cgagactcatttgatccgcaagtctagcagcggactaacttatatcgcagagtggaaagggggcctcctggagcacaagatgggccacctgacctgcttcrctgggggcatgttcgcactcggggctgatgcagctcccgaaggcatggcccaacactaccttgaactcggggctgaaattgcccgtacttgtcatgaatc

SEQ ID NO: 21791 - DNA, 201 bp, Homo sapiens; identical to SEQ ID NO: 21777

SEQ ID NO: 21792 - DNA, 201 bp, Homo sapiens; identical to SEQ ID NO: 21778

SEQ ID NO: 21793 - DNA, 201 bp, Homo sapiens; identical to SEQ ID NO: 21779

SEQ ID NO: 21794 - DNA, 201 bp, Homo sapiens; identical to SEQ ID NO: 21781

SEQ ID NO: 21795 - DNA, 201 bp, Homo sapiens
ctggagcattggatcttcaatagcgaggcacatcttctccctatcctccctaaagataaaaaggaagttgaaatcagagaggaataattccttttctggtratcaggcacatgatgaactttgattagtaggtctgtgattaagttcttaaattgttttgcagtcttttatgtttattatcataggtataggtggacctaa

SEQ ID NO: 21796 - DNA, 201 bp, Homo sapiens; identical to SEQ ID NO: 21783

SEQ ID NO: 21797 - DNA, 201 bp, Homo sapiens; identical to SEQ ID NO: 21785

SEQ ID NO: 21798 - DNA, 201 bp, Homo sapiens; identical to SEQ ID NO: 21784

SEQ ID NO: 21799 - DNA, 201 bp, Homo sapiens; identical to SEQ ID NO: 21788

SEQ ID NO: 21800 - DNA, 201 bp, Homo sapiens
attttctgacgacgatcttcttccactggagcattggatcttcaatagcgaggcacatcttctccctatcctccctaaagataaaaaggaagttgaaatcrgagaggaataattccttttctggtaatcaggcacatgatgaactttgattagtaggtctgtgattaagttcttaaattgttttgcagtcttttatgttta

SEQ ID NO: 21801 - DNA, 201 bp, Homo sapiens; identical to SEQ ID NO: 21786

SEQ ID NO: 21802 - DNA, 176 bp, Homo sapiens; identical to SEQ ID NO: 21789

SEQ ID NO: 21803 - DNA, 201 bp, Homo sapiens; identical to SEQ ID NO: 21790

SEQ ID NO: 21804 - DNA, 201 bp, Homo sapiens
tgaacctgtgtgtcactgcagagacccatgaggtctctgctctctggttcctgtggtatgtgaagcagtgtggaggcacaacaagaatcatctcgacaacraatggaggacaggagaggaaatttgtgggcggatctggtcaagtgagtgagcggataatggacctccttggagaccgagtgaagctggagaggcctgtga

SEQ ID NO: 21805 - DNA, 201 bp, Homo sapiens
tccgggctcccggggctggtaatatagcggctcgccgaggcgctggtgcacgggggcagcgcgcagcaggccggcgggcaggcgggcgggctggctggcasgcaggactgggatcgaggcccagaaaacggagcagcgggcaccagggaggcctggaacggggcgagcgccatgagcaacaaatgcgacgtggtcgtggtg

SEQ ID NO: 21806 - DNA, 201 bp, Homo sapiens
tcactccctgtcatagttaccgatggtgtcccgttgtgtgggtttactctgtgctaagttgtcttacacttctcaaatgctactcagtatatagccttaastcttactgttttgtgcggtgtgtctccagctgattttaacttttttgatggtagaaattttatctcttcttccttttgtatcctccattgtatcttcata

SEQ ID NO: 21807 - DNA, 201 bp, Homo sapiens
cacaaggaatgaattttttcctaccattatggctttgtgcttgttcttcctcttacctgtaatagcctcaccttccctagttctttgcattcgtccttagratactgtattgttacagctgaaagacagtaaagaccatttagtcctcaccttctgttttagagttgagcaaactgaagcccacagaggtggaacttaatt

SEQ ID NO: 21808 - DNA, 201 bp, Homo sapiens
gagccagtgcattatgaagaaaagaactggtgtgaggagcagtactctgggggctgctacacaacttatttcccccctgggatcctgactcaatatggaakggttctacgccagccagtggacaggatttactttgcaggcaccgagactgccacacactggagcggctacatggagggggctgtagaggccggggagaga

SEQ ID NO: 21809 - DNA, 201 bp, Homo sapiens
ctctgactgtaaaatacatggtatctctttctccgttgtggcccctgcttagtgtcccttacctggcttagcgttctgtttcaccagtttccaagtttatygccctcaaaatctttagaatagttaaattggcttgtttaaggttcttgctgccccacaacacaccttgcccatgcacaaggaatgaattttttcctacca

SEQ ID NO: 21810 - DNA, 201 bp, Homo sapiens
tggggaagattccagaggatgaaatctggcagtcagaaccagagtctgtggatgtccctgcacagcccatcaccaccacctttttggagagacatttgccytccgtgccaggcctgctcaggctgattggattgaccaccatcttttcagcaacggctcttggcttcctggcccacaaaagggggctacttgtgagagtct

SEQ ID NO: 21811 - DNA, 201 bp, Homo sapiens
tgaagataaatccaactctgactgtaaaatacatggtatctctttctccgttgtggcccctgcttagtgtcccttacctggcttagcgttctgtttcaccrgtttccaagtttattgccctcaaaatctttagaatagttaaattggcttgtttaaggttcttgctgccccacaacacaccttgcccatgcacaaggaatg

SEQ ID NO: 21812 - DNA, 201 bp, Homo sapiens
cccacctctttggatgttttccccaattatcctccttcactccctgtcatagttaccgatggtgtcccgttgtgtgggtttactctgtgctaagttgtctwacacttctcaaatgctactcagtatatagccttaagtcttactgttttgtgcggtgtgtctccagctgattttaacttttttgatggtagaaattttatc

SEQ ID NO: 21813 - DNA, 201 bp, Homo sapiens
gttttagagttgagcaaactgaagcccacagaggtggaacttaattacctaagagccacaataagccactggtatctgggggactagaacacaaatccaaygcttttcccacctctttggatgttttccccaattatcctccttcactccctgtcatagttaccgatggtgtcccgttgtgtgggtttactctgtgctaag

SEQ ID NO: 21814 - DNA, 201 bp, Homo sapiens
ccccacaacacaccttgcccatgcacaaggaatgaattttttcctaccattatggctttgtgcttgttcttcctcttacctgtaatagcctcaccttcccwagttctttgcattcgtccttagaatactgtattgttacagctgaaagacagtaaagaccatttagtcctcaccttctgttttagagttgagcaaactgaa

SEQ ID NO: 21815 - DNA, 201 bp, Homo sapiens
ggaacggggcgagcgccatgagcaacaaatgcgacgtggtcgtggtggggggcggcatctcaggtatggcagcagccaaacttctgcatgactctggactkaatgtggttgttctggaagcccgggaccgtgtgggaggcaggacttacactcttaggaaccaaaaggttaaatatgtggaccttggaggatcctatgttg

SEQ ID NO: 21816 - DNA, 201 bp, Homo sapiens
aaactgaagcccacagaggtggaacttaattacctaagagccacaataagccactggtatctgggggactagaacacaaatccaacgcttttcccacctcyttggatgttttccccaattatcctccttcactccctgtcatagttaccgatggtgtcccgttgtgtgggtttactctgtgctaagttgtcttacacttct

SEQ ID NO: 21817 - DNA, 201 bp, Homo sapiens
cactggtatctgggggactagaacacaaatccaacgcttttcccacctctttggatgttttccccaattatcctccttcactccctgtcatagttaccgayggtgtcccgttgtgtgggtttactctgtgctaagttgtcttacacttctcaaatgctactcagtatatagccttaagtcttactgttttgtgcggtgtgt

SEQ ID NO: 21818 - DNA, 201 bp, Homo sapiens
gtggagtgaggcggggagcatgaagataaatccaactctgactgtaaaatacatggtatctctttctccttgtgtgggtttactctgtgctaagttgtctwacacttctcaaatgctactcagtatatagccttaagtcttactgttttgtgcggtgtgtctccagctgattttaacttttttgatggtagaaattttatc

SEQ ID NO: 21819 - DNA, 201 bp, Homo sapiens; identical to SEQ ID NO: 21804

SEQ ID NO: 21820 - DNA, 201 bp, Homo sapiens; identical to SEQ ID NO: 21805

SEQ ID NO: 21821 - DNA, 201 bp, Homo sapiens
tctgactgtaaaatacatggtatctctttctccttgtgtgggtttactctgtgctaagttgtcttacacttctcaaatgctactcagtatatagccttaastcttactgttttgtgcggtgtgtctccagctgattttaacttttttgatggtagaaattttatctcttcttccttttgtatcctccattgtatcttcata

SEQ ID NO: 21822 - DNA, 201 bp, Homo sapiens; identical to SEQ ID NO: 21808

SEQ ID NO: 21823 - DNA, 201 bp, Homo sapiens; identical to SEQ ID NO: 21815

SEQ ID NO: 21824 - DNA, 201 bp, Homo sapiens; identical to SEQ ID NO: 21810

SEQ ID NO: 21825 - DNA, 169 bp, Homo sapiens
cgccgaggcgctggtgcacgggggcagcgcgcagcaggccggcgggcaggcgggcgggctggctggcasgcaggactgggatcgaggcccagaaaacggagcagcgggcaccagggaggcctggaacggggcgagcgccatgagcaacaaatgcgacgtggtcgtggtg

SEQ ID NO: 21826 - DNA, 201 bp, Homo sapiens
gaacggggcgagcgccatgagcaacaaatgcgacgtggtcgtggtggggggcggcatctcaggttagtcgcggctccaaacttctgcatgactctggactkaatgtggttgttctggaagcccgggaccgtgtgggaggcaggacttacactcttagggctaaatatgtgattagtgctattcctcctactctgggcatga

SEQ ID NO: 21827 - DNA, 201 bp, Homo sapiens
acattatgagtgcaaatacgtaattaatgcgatccctccgaccttgactgccaagattcacttcagaccagagcttccagcagagagaaaccagttaattyagcgtcttccaatgggagctgtcattaagtgcatgatgtattacaaggaggccttctggaagaagaaggattactgtggctgcatgatcattgaagatga

SEQ ID NO: 21828 - DNA, 201 bp, Homo sapiens
attacaaggaggccttctggaagaagaaggattactgtggctgcatgatcattgaagatgaagatgctccaatttcaataaccttggatgacaccaagccwgatgggtcactgcctgccatcatgggcttcattcttgcccggaaagctgatcgacttgctaagctacataaggaaataaggaagaagaaaatctgtgagc

SEQ ID NO: 21829 - DNA, 201 bp, Homo sapiens
acccacaccttctgggaaaggaacctgccctctgtttctggcctgctgaagatcattggattttccacatcagtaactgccctggggtttgtgctgtacaratacaagctcctgccacggtcttgaagttctgttcttatgctctctgctcactggttttcaataccaccaagaggaaaatattgacaagtttaaaggctg

SEQ ID NO: 21830 - DNA, 201 bp, Homo sapiens
ccaactgatgcaccctgggaggctcaacatgctgacaaatgggacaaaatgaccatgaaagagctcattgacaaaatctgctggacaaagactgctaggcrgtttgcttatctttttgtgaatatcaatgtgacctctgagcctcacgaagtgtctgccctgtggttcttgtggtatgtgaagcagtgcgggggcaccact

SEQ ID NO: 21831 - DNA, 201 bp, Homo sapiens
ctgccacaaagtggagcggctacatggaaggggcagttgaggctggagaacgagcagctagggaggtcttaaatggtctcgggaaggtgaccgagaaagayatctgggtacaagaacctgaatcaaaggacgttccagcggtagaaatcacccacaccttctgggaaaggaacctgccctctgtttctggcctgctgaaga

SEQ ID NO: 21832 - DNA, 201 bp, Homo sapiens
gattcacttcagaccagagcttccagcagagagaaaccagttaattcagcgtcttccaatgggagctgtcattaagtgcatgatgtattacaaggaggccktctggaagaagaaggattactgtggctgcatgatcattgaagatgaagatgctccaatttcaataaccttggatgacaccaagccagatgggtcactgcc

SEQ ID NO: 21833 - DNA, 201 bp, Homo sapiens
  misc_feature (1)...(201): n = A,T,C or G
atgagtgcaaatacgtaattaatgcgatccctccgaccttgactgccaagattcacttcagaccagagcttccagcagagagaaaccagttaattcagcgncttccaatgggagctgtcattaagtgcatgatgtattacaaggaggccttctggaagaagaaggattactgtggctgcatgatcattgaagatgaagatg

SEQ ID NO: 21834 - DNA, 201 bp, Homo sapiens
ctcctgggatcatgactcaatatggaagggtgattcgtcaacccgtgggcaggattttctttgcgggcacagagactgccacaaagtggagcggctacatkgaaggggcagttgaggctggagaacgagcagctagggaggtcttaaatggtctcgggaaggtgaccgagaaagatatctgggtacaagaacctgaatcaa

SEQ ID NO: 21835 - DNA, 201 bp, Homo sapiens
gcgtctcgttcaatatgtcaaggggaaaacatatccatttcggggcgcctttccaccagtatggaatcccattgcatatttggattacaataatctgtggmggacaatagataacatggggaaggagattccaactgatgcaccctgggaggctcaacatgctgacaaatgggacaaaatgaccatgaaagagctcattga

SEQ ID NO: 21836 - DNA, 201 bp, Homo sapiens
gagtgcaaatacgtaattaatgcgatccctccgaccttgactgccaagattcacttcagaccagagcttccagcagagagaaaccagttaattcagcgtcytccaatgggagctgtcattaagtgcatgatgtattacaaggaggccttctggaagaagaaggattactgtggctgcatgatcattgaagatgaagatgct

SEQ ID NO: 21837 - DNA, 201 bp, Homo sapiens
ccatcatgggcttcattcttgcccggaaagctgatcgacttgctaagctacataaggaaataaggaagaagaaaatctgtgagctctatgccaaagtgctkggatcccaagaagctttacatccagtgcattatgaagagaagaactggtgtgaggagcagtactctgggggctgctacacggcctacttccctcctggga

SEQ ID NO: 21838 - DNA, 201 bp, Homo sapiens; identical to SEQ ID NO: 21827

SEQ ID NO: 21839 - DNA, 201 bp, Homo sapiens; identical to SEQ ID NO: 21828

SEQ ID NO: 21840 - DNA, 201 bp, Homo sapiens; identical to SEQ ID NO: 21829

SEQ ID NO: 21841 - DNA, 201 bp, Homo sapiens; identical to SEQ ID NO: 21830

SEQ ID NO: 21842 - DNA, 201 bp, Homo sapiens; identical to SEQ ID NO: 21831

SEQ ID NO: 21843 - DNA, 201 bp, Homo sapiens; identical to SEQ ID NO: 21832

SEQ ID NO: 21844 - DNA, 201 bp, Homo sapiens; identical to SEQ ID NO: 21833
  misc_feature (1)...(201): n = A,T,C or G

SEQ ID NO: 21845 - DNA, 201 bp, Homo sapiens; identical to SEQ ID NO: 21834

SEQ ID NO: 21846 - DNA, 201 bp, Homo sapiens; identical to SEQ ID NO: 21835

SEQ ID NO: 21847 - DNA, 201 bp, Homo sapiens
ccagccaacccaagtttattatatcattaaccttatcataaattcaaacctaagttgctggaccctggtgtgaggacataaatcttccaaagttttgcctrtcctaagagctgcatttttctactgctctttaccttgcattttagctaatttaggagttttgagaatgtattggatacgctccagtacataaggagttgc

SEQ ID NO: 21848 - DNA, 201 bp, Homo sapiens
aacatggttacctctgcataaatattagcaaagcatgccaatttctcttaagtactgaaatacatatgataaatttgactgttatttgttgagactatcaracagaaaagaaattagggctctaatttccttaaagcaagctcacttgctttagttgttaagttttataaaagacatgaaattgagtcattttatatatga

SEQ ID NO: 21849 - DNA, 201 bp, Homo sapiens; identical to SEQ ID NO: 21836

SEQ ID NO: 21850 - DNA, 201 bp, Homo sapiens; identical to SEQ ID NO: 21837

SEQ ID NO: 21851 - DNA, 201 bp, Homo sapiens; identical to SEQ ID NO: 21827

SEQ ID NO: 21852 - DNA, 201 bp, Homo sapiens; identical to SEQ ID NO: 21828

SEQ ID NO: 21853 - DNA, 201 bp, Homo sapiens; identical to SEQ ID NO: 21829

SEQ ID NO: 21854 - DNA, 201 bp, Homo sapiens; identical to SEQ ID NO: 21830

SEQ ID NO: 21855 - DNA, 201 bp, Homo sapiens; identical to SEQ ID NO: 21831

SEQ ID NO: 21856 - DNA, 201 bp, Homo sapiens; identical to SEQ ID NO: 21832

SEQ ID NO: 21857 - DNA, 201 bp, Homo sapiens; identical to SEQ ID NO: 21833
  misc_feature (1)...(201): n = A,T,C or G

SEQ ID NO: 21858 - DNA, 201 bp, Homo sapiens; identical to SEQ ID NO: 21834

SEQ ID NO: 21859 - DNA, 201 bp, Homo sapiens; identical to SEQ ID NO: 21835

SEQ ID NO: 21860 - DNA, 201 bp, Homo sapiens; identical to SEQ ID NO: 21847

SEQ ID NO: 21861 - DNA, 201 bp, Homo sapiens; identical to SEQ ID NO: 21848

SEQ ID NO: 21862 - DNA, 201 bp, Homo sapiens; identical to SEQ ID NO: 21836

SEQ ID NO: 21863 - DNA, 201 bp, Homo sapiens; identical to SEQ ID NO: 21837

SEQ ID NO: 21864 - DNA, 153 bp, Homo sapiens
agagccctttgctcctccctcagaatgaatggagaccagaaatcagatgtttrtgcccaagaaaagcaggatttcgttcagcacttcccccagatcattagggtgctgagtgaggatgagatggggcactcagagacaggagatgctgttgac

SEQ ID NO: 21865 - DNA, 201 bp, Homo sapiens
tgctgatagtctccagcaggccctgaccgtgggctggtgtgtggaactgctgcaagctttcttcctggtggcagatgacatcatggattcatccgtctccygccggggacagatctggtggtatcagaagccgggcatgggtttggatgccatcaatgatgctatgcttctggaactgcagccatgtacagcaggaattga

SEQ ID NO: 21866 - DNA, 201 bp, Homo sapiens
tgagaaagccgagttaaatcttaaaatttttactataaggatagagatgatacaagtgaactctgcaaaatagttttgtgaaattaaacaaaaaaatctaytcttaatgtatatttcatatttgtttaacaaaagcagcttgatgcctttgttctggattatacattaagaacaagcattattttaaacactcttctatta

SEQ ID NO: 21867 - DNA, 201 bp, Homo sapiens
gtattatattgacttaaacatagtagctaataaaactagtttatgacatctattgaaattctcagtctgacagttttaaaatagcttaaaactaagcaccrggtatatgaaaaaggaactggaaattttaattgtccagaaatcataggaatactgggaacctgtagttatgggaaatggctgtttttctgaagttgaaac

SEQ ID NO: 21868 - DNA, 201 bp, Homo sapiens
ccaaaggggagctatgaatagagggtcacatgagccagattctttactgttcataaaacccagagagtagttgtgaaagatcctaatacaattgtgaaaakctctgtaaacatgaaatctaaaacaaatgtagattttcacaatatgcttattaataaatgaagtctatggaataagttttagagataatttacttcagtc

SEQ ID NO: 21869 - DNA, 201 bp, Homo sapiens
atttgtgtttatttcaaagggaagaggaaggatggagaactgttacaattgaccttgcaaaggatatttaaaaaaaaggtagtttttgagattaaccaactttcaaagggcaataaagacatgtgaatttgctcattttaaagcacaacagatgattagcttcaaatttattatttgcattggatgggtactgtctttgga

SEQ ID NO: 21870 - DNA, 201 bp, Homo sapiens
cgagttaaatcttaaaatttttactataaggatagagatgatacaagtgaactctgcaaaatagttttgtgaaattaaacaaaaaaatctactcttaatgwatatttcatatttgtttaacaaaagcagcttgatgcctttgttctggattatacattaagaacaagcattattttaaacactcttctattaagttaggta

SEQ ID NO: 21871 - DNA, 201 bp, Homo sapiens
agttaaatcttaaaatttttactataaggatagagatgatacaagtgaactctgcaaaatagttttgtgaaattaaacaaaaaaatctactcttaatgtatatttcatatttgtttaacaaaagcagcttgatgcctttgttctggattatacattaagaacaagcattattttaaacactcttctattaagttaggtatt

SEQ ID NO: 21872 - DNA, 201 bp, Homo sapiens
actcctagagacagctgtgctcaccttttcctgctttgtgccttgattaaggctactgaccctaaatttctgaagcacagccaagaaaaattacattcctwgtcattgtaaattacctttgtgtgtacatttttactgtatttgagacattttttgtgtgtgactagttaattttgcaggatgtgccatatcattgaacgg

SEQ ID NO: 21873 - DNA, 201 bp, Homo sapiens
tttacttcagtcacctttgttttggaaaggactcaggttttcttgcagctgtaagatatattctatttgtgtttatttcaaagggaagaggaaggatggasaactgttacaattgaccttgcaaaggatatttaaaaaaaaggtagtttttgagattaaccaactttcaaagggcaataaagacatgtgaatttgctcatt

SEQ ID NO: 21874 - DNA, 201 bp, Homo sapiens
cagtccttcagctttacagatagtgaaaactgaaggccagaaaaggaactaaaactcagcagttcataggggtagagggaaataacctgagaaagccgagwtaaatcttaaaatttttactataaggatagagatgatacaagtgaactctgcaaaatagttttgtgaaattaaacaaaaaaatctactcttaatgtatat

SEQ ID NO: 21875 - DNA, 201 bp, Homo sapiens
tatgcaaatagggtcaaagaattgactgtagatccaactgctgctggtgatgttcgtccaataatgcaccatccaccaaaccagattgatgacttagagasacagtggggtgtggggagttcccctcagagagatgatctaaaacttctttgtgaacaaaatgaagaagaagtctctccacagttgtttactttccacgaa

SEQ ID NO: 21876 - DNA, 201 bp, Homo sapiens
cagttttaaaatagcttaaaactaagcaccaggtatatgaaaaaggaactggaaattttaattgtccagaaatcataggaatactgggaacctgtagttaygggaaatggctgtttttctgaagttgaaaccagtttcaattacaaaaccctctgaaattttgctaagcctatagttatctccctaagaaccataaaaaaa

SEQ ID NO: 21877 - DNA, 201 bp, Homo sapiens
aaatggctgtttttctgaagttgaaaccagtttcaattacaaaaccctctgaaattttgctaagcctatagttatctccctaagaaccataaaaaaagatmattttattgttaatttcattccagtttagcttcctcattttacatgttgggagtcatgccctttaatatgcctggcactgcacggtggcagtagcagact

SEQ ID NO: 21878 - DNA, 201 bp, Homo sapiens
tgagaaagccgagttaaatcttaaaatttttactataaggatagagatgatacaagtgaactctgcaaaatagttttgtgaaattaaacaaaaaaatctaytcttaatgtatatttcatatttgtttaacaaaagcagcttgatgcctttgttctggattatacattaagaacaagcattattttaattatgtagtaacat

SEQ ID NO: 21879 - DNA, 201 bp, Homo sapiens; identical to SEQ ID NO: 21867

SEQ ID NO: 21880 - DNA, 201 bp, Homo sapiens; identical to SEQ ID NO: 21868

SEQ ID NO: 21881 - DNA, 201 bp, Homo sapiens; identical to SEQ ID NO: 21869

SEQ ID NO: 21882 - DNA, 201 bp, Homo sapiens
cgagttaaatcttaaaatttttactataaggatagagatgatacaagtgaactctgcaaaatagttttgtgaaattaaacaaaaaaatctactcttaatgwatatttcatatttgtttaacaaaagcagcttgatgcctttgttctggattatacattaagaacaagcattattttaattatgtagtaacatttactatga

SEQ ID NO: 21883 - DNA, 201 bp, Homo sapiens
agttaaatcttaaaatttttactataaggatagagatgatacaagtgaactctgcaaaatagttttgtgaaattaaacaaaaaaatctactcttaatgtatatttcatatttgtttaacaaaagcagcttgatgcctttgttctggattatacattaagaacaagcattattttaattatgtagtaacatttactatgact

SEQ ID NO: 21884 - DNA, 201 bp, Homo sapiens; identical to SEQ ID NO: 21872

SEQ ID NO: 21885 - DNA, 201 bp, Homo sapiens; identical to SEQ ID NO: 21873

SEQ ID NO: 21886 - DNA, 201 bp, Homo sapiens; identical to SEQ ID NO: 21874

SEQ ID NO: 21887 - DNA, 201 bp, Homo sapiens; identical to SEQ ID NO: 21875

SEQ ID NO: 21888 - DNA, 201 bp, Homo sapiens; identical to SEQ ID NO: 21876

SEQ ID NO: 21889 - DNA, 201 bp, Homo sapiens; identical to SEQ ID NO: 21877

SEQ ID NO: 21890 - DNA, 201 bp, Homo sapiens; identical to SEQ ID NO: 21866

SEQ ID NO: 21891 - DNA, 201 bp, Homo sapiens; identical to SEQ ID NO: 21867

SEQ ID NO: 21892 - DNA, 201 bp, Homo sapiens; identical to SEQ ID NO: 21868

SEQ ID NO: 21893 - DNA, 201 bp, Homo sapiens; identical to SEQ ID NO: 21869

SEQ ID NO: 21894 - DNA, 201 bp, Homo sapiens; identical to SEQ ID NO: 21870

SEQ ID NO: 21895 - DNA, 201 bp, Homo sapiens; identical to SEQ ID NO: 21871

SEQ ID NO: 21896 - DNA, 201 bp, Homo sapiens; identical to SEQ ID NO: 21872

SEQ ID NO: 21897 - DNA, 201 bp, Homo sapiens; identical to SEQ ID NO: 21873

SEQ ID NO: 21898 - DNA, 201 bp, Homo sapiens; identical to SEQ ID NO: 21874

SEQ ID NO: 21899 - DNA, 201 bp, Homo sapiens; identical to SEQ ID NO: 21875

SEQ ID NO: 21900 - DNA, 201 bp, Homo sapiens; identical to SEQ ID NO: 21876

SEQ ID NO: 21901 - DNA, 201 bp, Homo sapiens; identical to SEQ ID NO: 21877

SEQ ID NO: 21902 - DNA, 201 bp, Homo sapiens; identical to SEQ ID NO: 21866

SEQ ID NO: 21903 - DNA, 201 bp, Homo sapiens; identical to SEQ ID NO: 21867

SEQ ID NO: 21904 - DNA, 201 bp, Homo sapiens; identical to SEQ ID NO: 21868

SEQ ID NO: 21905 - DNA, 201 bp, Homo sapiens; identical to SEQ ID NO: 21869

SEQ ID NO: 21906 - DNA, 201 bp, Homo sapiens; identical to SEQ ID NO: 21870

SEQ ID NO: 21907 - DNA, 201 bp, Homo sapiens; identical to SEQ ID NO: 21871

SEQ ID NO: 21908 - DNA, 201 bp, Homo sapiens; identical to SEQ ID NO: 21872

SEQ ID NO: 21909 - DNA, 201 bp, Homo sapiens; identical to SEQ ID NO: 21873

SEQ ID NO: 21910 - DNA, 201 bp, Homo sapiens; identical to SEQ ID NO: 21874

SEQ ID NO: 21911 - DNA, 201 bp, Homo sapiens; identical to SEQ ID NO: 21875

SEQ ID NO: 21912 - DNA, 201 bp, Homo sapiens; identical to SEQ ID NO: 21876

SEQ ID NO: 21913 - DNA, 201 bp, Homo sapiens; identical to SEQ ID NO: 21877

SEQ ID NO: 21914 - DNA, 201 bp, Homo sapiens; identical to SEQ ID NO: 21878

SEQ ID NO: 21915 - DNA, 201 bp, Homo sapiens; identical to SEQ ID NO: 21867

SEQ ID NO: 21916 - DNA, 201 bp, Homo sapiens; identical to SEQ ID NO: 21868

SEQ ID NO: 21917 - DNA, 201 bp, Homo sapiens; identical to SEQ ID NO: 21869

SEQ ID NO: 21918 - DNA, 201 bp, Homo sapiens; identical to SEQ ID NO: 21882

SEQ ID NO: 21919 - DNA, 201 bp, Homo sapiens; identical to SEQ ID NO: 21883

SEQ ID NO: 21920 - DNA, 201 bp, Homo sapiens; identical to SEQ ID NO: 21872

SEQ ID NO: 21921 - DNA, 201 bp, Homo sapiens; identical to SEQ ID NO: 21873

SEQ ID NO: 21922 - DNA, 201 bp, Homo sapiens; identical to SEQ ID NO: 21874

SEQ ID NO: 21923 - DNA, 201 bp, Homo sapiens; identical to SEQ ID NO: 21875

SEQ ID NO: 21924 - DNA, 201 bp, Homo sapiens; identical to SEQ ID NO: 21876

SEQ ID NO: 21925 - DNA, 201 bp, Homo sapiens; identical to SEQ ID NO: 21877

SEQ ID NO: 21926 - DNA, 201 bp, Homo sapiens; identical to SEQ ID NO: 21878

SEQ ID NO: 21927 - DNA, 201 bp, Homo sapiens; identical to SEQ ID NO: 21867

SEQ ID NO: 21928 - DNA, 201 bp, Homo sapiens; identical to SEQ ID NO: 21868

SEQ ID NO: 21929 - DNA, 201 bp, Homo sapiens; identical to SEQ ID NO: 21869

SEQ ID NO: 21930 - DNA, 201 bp, Homo sapiens; identical to SEQ ID NO: 21882

SEQ ID NO: 21931 - DNA, 201 bp, Homo sapiens; identical to SEQ ID NO: 21883

SEQ ID NO: 21932 - DNA, 201 bp, Homo sapiens; identical to SEQ ID NO: 21872

SEQ ID NO: 21933 - DNA, 201 bp, Homo sapiens; identical to SEQ ID NO: 21873

SEQ ID NO: 21934 - DNA, 201 bp, Homo sapiens; identical to SEQ ID NO: 21874

SEQ ID NO: 21935 - DNA, 201 bp, Homo sapiens; identical to SEQ ID NO: 21875

SEQ ID NO: 21936 - DNA, 201 bp, Homo sapiens; identical to SEQ ID NO: 21876

SEQ ID NO: 21937 - DNA, 201 bp, Homo sapiens; identical to SEQ ID NO: 21877

SEQ ID NO: 21938 - DNA, 201 bp, Homo sapiens
gacgagaaattcctggagaccctaatcaaaggcctcagagactggagtacagagctcatgatggtttaggtgtgggatttgatggaggcaatgataaagaytgggaagccaatgcctgcaaaatccagcttattaagaagaaaggaaaagttaaggcactggatgaagaagttcacaagcaacaagatatggatttggata

SEQ ID NO: 21939 - DNA, 164 bp, Homo sapiens
acagcctgggcaacatggtgagacctggtctttacaaaaatttttttggccggacgcagtggctcacacctgtaatcccagcactttgggaggccgaggcrggttgatcatgaggtcaagagatcgagaccatcctggccaacatggtgaaaccccgtctttac

SEQ ID NO: 21940 - DNA, 123 bp, Homo sapiens
ttttttggccggacgcagtggctcacacctgtaatcccagcactttgggaggccgaggcaggttgatcatgaggtcaagagatcgagaccatcctggccarcatggtgaaaccccgtctttac

SEQ ID NO: 21941 - DNA, 201 bp, Homo sapiens
ttgccaagttttaagagaagatgtgatttattttgaaatttgtttctgttttgtttttaaatcaaactgtaaaacttaaaactgaaaaattttattggtakgatttatatctaagtttggttagccttagtttctcagacttgttgtctattatctgtaggtggaagaaatttaggaagcgaaatattacagtagtgcatt

SEQ ID NO: 21942 - DNA, 201 bp, Homo sapiens
  misc_feature (1)...(201): n = A,T,C or G
caagctgctttggacaactgacaatatgattttaaatttgaagatgggatgtgtacatgttgggtatcctactactttgtgttttcatctcctaaaagtgntttttatttccttgtatctgtagtcttttattttttaaatgactgctgaatgacatattttatcttgttctttaaaatcacaacacagagctgctattaa

SEQ ID NO: 21943 - DNA, 201 bp, Homo sapiens
atttcactctaagtatatgtggtaggctaagctcagaaaaaggtatgtatgctttacactgataggcaccaaatttagtattgtatcctaagtatttttcmtcttctgtattttctgtgctctacccctgaaatatatttaggaataaagaagatataaataaagtgatattggggtatgttcagcttgtaagtgtcagaa

SEQ ID NO: 21944 - DNA, 201 bp, Homo sapiens
ggccgggcgtggtgactcacgcctgtaatcccagcactttgggaggctgaggtggatggatcacttgaggtgtgggatttgatggaggcaatgataaagaytgggaagccaatgcctgcaaaatccagcttattaagaagaaaggaaaagttaaggcactggatgaagaagttcacaagcaacaagatatggatttggata

SEQ ID NO: 21945 - DNA, 201 bp, Homo sapiens; identical to SEQ ID NO: 21938

SEQ ID NO: 21946 - DNA, 201 bp, Homo sapiens
catgagtcaccgtgtcctgcccagacatatcaaatttgacaggtattgtataccctttggatctttaggaattaatttttgcctctgtcactcagctttgyatattttgaaatggagataagtatagggaggtcttggaaggaaaattgccagaattcccaaaccatgtaacactcattgagaattccagatccattatat

SEQ ID NO: 21947 - DNA, 201 bp, Homo sapiens; identical to SEQ ID NO: 21941

SEQ ID NO: 21948 - DNA, 201 bp, Homo sapiens
ctctaaacgtctgcaaaggtctagatgttatcagtatcactagtttttatttctgccagtagctcccttttaggttacattgttgtcctctttccagtgtsgcatctgtcattggtttttcactatggcaagttcattaaaaagcttgctccattgttatcttcaagtaatgcccataaggagatggaagatatctgagac

SEQ ID NO: 21949 - DNA, 201 bp, Homo sapiens; identical to SEQ ID NO: 21942
  misc_feature (1)...(201): n = A,T,C or G

SEQ ID NO: 21950 - DNA, 201 bp, Homo sapiens; identical to SEQ ID NO: 21943

SEQ ID NO: 21951 - DNA, 201 bp, Homo sapiens; identical to SEQ ID NO: 21944

SEQ ID NO: 21952 - DNA, 201 bp, Homo sapiens
catttcccactggctgaaagagctaacagaggatttggaatcgttttcagcaatggaaagagatggaaggagatccggcgtttctccctcatgacgctgcrgaattttgggatggggaagaggagcattgaggaccgtgttcaagaggaagcccgctgccttgtggaggagttgagaaaaaccaaggcttcaccctgtgat

SEQ ID NO: 21953 - DNA, 201 bp, Homo sapiens
ggaatcgttttcagcaatggaaagagatggaaggagatccggcgtttctccctcatgacgctgcggaattttgggatggggaagaggagcattgaggaccrtgttcaagaggaagcccgctgccttgtggaggagttgagaaaaaccaaggcttcaccctgtgatcccactttcatcctgggctgtgctccctgcaatgtg

SEQ ID NO: 21954 - DNA, 201 bp, Homo sapiens
ttcttaacttgatggaaaaattgaatgaaaacatcaggattgtaagcaccccctggatccagatatgcaataattttcccactatcattgattatttcccrggaacccataacaaattacttaaaaaccttgcttttatggaaagtgatattttggagaaagtaaaagaacaccaagaatcgatggacatcaacaaccctc

SEQ ID NO: 21955 - DNA, 201 bp, Homo sapiens
aaatctatggccctgtgttcactctgtattttggcctggaacgcatggtggtgctgcatggatatgaagtggtgaaggaagccctgattgatcttggagasgagttttctggaagaggccatttcccactggctgaaagagctaacagaggatttggaatcgttttcagcaatggaaagagatggaaggagatccggcgtt

SEQ ID NO: 21956 - DNA, 201 bp, Homo sapiens
gctccattattttccagaaacgtttcgattataaagatcagcaatttcttaacttgatggaaaaattgaatgaaaacatcaggattgtaagcaccccctgratccagatatgcaataattttcccactatcattgattatttcccaggaacccataacaaattacttaaaaaccttgcttttatggaaagtgatattttgg

SEQ ID NO: 21957 - DNA, 201 bp, Homo sapiens
agaatttcccaacccagagatgtttgaccctcgtcactttctggatgaaggtggaaattttaagaaaagtaactacttcatgcctttctcagcaggaaaayggatttgtgtgggagagggcctggcccgcatggagctgtttttattcctgaccttcattttacagaactttaacctgaaatctctgattgacccaaagga

SEQ ID NO: 21958 - DNA, 201 bp, Homo sapiens
gaccgtgttcaagaggaagcccgctgccttgtggaggagttgagaaaaaccaaggcttcaccctgtgatcccactttcatcctgggctgtgctccctgcartgtgatctgctccattattttccagaaacgtttcgattataaagatcagcaatttcttaacttgatggaaaaattgaatgaaaacatcaggattgtaagc

SEQ ID NO: 21959 - DNA, 201 bp, Homo sapiens
ctgggacagagacaacaagcacaaccctgagatatgctctccttctcctgctgaagcacccagaggtcacagctaaagtccaggaagagattgaacgtgtygttggcagaaaccggagcccctgcatgcaggacaggggccacatgccctacacagatgctgtggtgcacgaggtccagagatacatcgacctcatcccca

SEQ ID NO: 21960 - DNA, 201 bp, Homo sapiens
agaccatgcgtatgtcccgaggcggctgctccggtctcttgcggtgtggaaagggaacgacctacgagggcggtgtccgagagcctgccttggccttctgrccaggtcatatcgctcccggcgtgacccacgagctggccagctccctggacctgctgcctaccctggcagccctggctggggccccactgcccaatgtca

SEQ ID NO: 21961 - DNA, 201 bp, Homo sapiens
ttctacgtgcctgtgtctctgtgcacaccctctagggccgccctcctgaccggccggctcccggttcggatgggcatgtaccctggcgtcctggtgcccarctcccgggggggcctgcccctggaggaggtgaccgtggccgaagtcctggctgcccgaggctacctcacaggaatggccggcaagtggcaccttggggtg

SEQ ID NO: 21962 - DNA, 201 bp, Homo sapiens
tacgtgcctgtgtctctgtgcacaccctctagggccgccctcctgaccggccggctcccggttcggatgggcatgtaccctggcgtcctggtgcccagctyccgggggggcctgcccctggaggaggtgaccgtggccgaagtcctggctgcccgaggctacctcacaggaatggccggcaagtggcaccttggggtgggg

SEQ ID NO: 21963 - DNA, 201 bp, Homo sapiens
ctggaggaggtgaccgtggccgaagtcctggctgcccgaggctacctcacaggaatggccggcaagtggcaccttggggtggggcctgagggggccttccygcccccccatcagggcttccatcgatttctaggcatcccgtactcccacgaccagggcccctgccagaacctgacctgcttcccgccggccactccttgc

SEQ ID NO: 21964 - DNA, 201 bp, Homo sapiens
ggctacctcacaggaatggccggcaagtggcaccttggggtggggcctgagggggccttcctgcccccccatcagggcttccatcgatttctaggcatccygtactcccacgaccagggcccctgccagaacctgacctgcttcccgccggccactccttgcgacggtggctgtgaccagggcctggtccccatcccactg

SEQ ID NO: 21965 - DNA, 201 bp, Homo sapiens
aggaatggccggcaagtggcaccttggggtggggcctgagggggccttcctgcccccccatcagggcttccatcgatttctaggcatcccgtactcccackaccagggcccctgccagaacctgacctgcttcccgccggccactccttgcgacggtggctgtgaccagggcctggtccccatcccactgttggccaacct

SEQ ID NO: 21966 - DNA, 201 bp, Homo sapiens
tggccggcaagtggcaccttggggtggggcctgagggggccttcctgcccccccatcagggcttccatcgatttctaggcatcccgtactcccacgaccasggcccctgccagaacctgacctgcttcccgccggccactccttgcgacggtggctgtgaccagggcctggtccccatcccactgttggccaacctgtccg

SEQ ID NO: 21967 - DNA, 201 bp, Homo sapiens
gccggcaagtggcaccttggggtggggcctgagggggccttcctgcccccccatcagggcttccatcgatttctaggcatcccgtactcccacgaccaggrcccctgccagaacctgacctgcttcccgccggccactccttgcgacggtggctgtgaccagggcctggtccccatcccactgttggccaacctgtccgtg

SEQ ID NO: 21968 - DNA, 201 bp, Homo sapiens
ggcaagtggcaccttggggtggggcctgagggggccttcctgcccccccatcagggcttccatcgatttctaggcatcccgtactcccacgaccagggccsctgccagaacctgacctgcttcccgccggccactccttgcgacggtggctgtgaccagggcctggtccccatcccactgttggccaacctgtccgtggag

SEQ ID NO: 21969 - DNA, 201 bp, Homo sapiens
cctgcttcccgccggccactccttgcgacggtggctgtgaccagggcctggtccccatcccactgttggccaacctgtccgtggaggcgcagcccccctgdctgcccggactagaggcccgctacatggctttcgcccatgacctcatggccgacgcccagcgccaggatcgccccttcttcctgtactatgcctctcacc

SEQ ID NO: 21970 - DNA, 201 bp, Homo sapiens
agaacctgacctgcttcccgccggccactccttgcgacggtggctgtgaccagggcctggtccccatcccactgttggccaacctgtccgtggaggcgcascccccctggctgcccggactagaggcccgctacatggctttcgcccatgacctcatggccgacgcccagcgccaggatcgccccttcttcctgtactatg

SEQ ID NO: 21971 - DNA, 201 bp, Homo sapiens
cccccctggctgcccggactagaggcccgctacatggctttcgcccatgacctcatggccgacgcccagcgccaggatcgccccttcttcctgtactatgyctctcaccacacccactaccctcagttcagtgggcagagctttgcagagcgttcaggccgcgggccatttggggactccctgatggagctggatgcagct

SEQ ID NO: 21972 - DNA, 201 bp, Homo sapiens
cttctgtctcctgccttcaccttttgacccactactaacgattctccacccagcagacaaagtgatctcttaaaaatatctgttgtgctgggattacaggkgtgaaccaccacacctggccaacaatatttgttttaattagccaggcgtggtagcatttgtcctagcaatttgggaggttgaggtgggagaatcacttca

SEQ ID NO: 21973 - DNA, 201 bp, Homo sapiens
tgcgacggtggctgtgaccagggcctggtccccatcccactgttggccaacctgtccgtggaggcgcagcccccctggctgcccggactagaggcccgctrcatggctttcgcccatgacctcatggccgacgcccagcgccaggatcgccccttcttcctgtactatgcctctcaccacacccactaccctcagttcagt

SEQ ID NO: 21974 - DNA, 201 bp, Homo sapiens
ttcactgcagacaatggacctgagaccatgcgtatgtcccgaggcggctgctccggtctcttgcggtgtggaaagggaacgacctacgagggcggtgtccragagcctgccttggccttctggccaggtcatatcgctcccggcgtgacccacgagctggccagctccctggacctgctgcctaccctggcagccctggct

SEQ ID NO: 21975 - DNA, 201 bp, Homo sapiens
ttcctgcccccccatcagggcttccatcgatttctaggcatcccgtactcccacgaccagggcccctgccagaacctgacctgcttcccgccggccactcsttgcgacggtggctgtgaccagggcctggtccccatcccactgttggccaacctgtccgtggaggcgcagcccccctggctgcccggactagaggcccgc

SEQ ID NO: 21976 - DNA, 201 bp, Homo sapiens
ctggtcatcttcactgcagacaatggacctgagaccatgcgtatgtcccgaggcggctgctccggtctcttgcggtgtggaaagggaacgacctacgaggdcggtgtccgagagcctgccttggccttctggccaggtcatatcgctcccggcgtgacccacgagctggccagctccctggacctgctgcctaccctggca

SEQ ID NO: 21977 - DNA, 201 bp, Homo sapiens
ataggggacctggggctgcttgaagagacgctggtcatcttcactgcagacaatggacctgagaccatgcgtatgtcccgaggcggctgctccggtctctygcggtgtggaaagggaacgacctacgagggcggtgtccgagagcctgccttggccttctggccaggtcatatcgctcccggcgtgacccacgagctggcc

SEQ ID NO: 21978 - DNA, 201 bp, Homo sapiens
atcccactgttggccaacctgtccgtggaggcgcagcccccctggctgcccggactagaggcccgctacatggctttcgcccatgacctcatggccgacgyccagcgccaggatcgccccttcttcctgtactatgcctctcaccacacccactaccctcagttcagtgggcagagctttgcagagcgttcaggccgcggg

SEQ ID NO: 21979 - DNA, 201 bp, Homo sapiens
gctgcccggactagaggcccgctacatggctttcgcccatgacctcatggccgacgcccagcgccaggatcgccccttcttcctgtactatgcctctcacyacacccactaccctcagttcagtgggcagagctttgcagagcgttcaggccgcgggccatttggggactccctgatggagctggatgcagctgtggggac

SEQ ID NO: 21980 - DNA, 201 bp, Homo sapiens
agaggcccgctacatggctttcgcccatgacctcatggccgacgcccagcgccaggatcgccccttcttcctgtactatgcctctcaccacacccactacmctcagttcagtgggcagagctttgcagagcgttcaggccgcgggccatttggggactccctgatggagctggatgcagctgtggggaccctgatgacagc

SEQ ID NO: 21981 - DNA, 201 bp, Homo sapiens
tggggactccctgatggagctggatgcagctgtggggaccctgatgacagccataggggacctggggctgcttgaagagacgctggtcatcttcactgcakacaatggacctgagaccatgcgtatgtcccgaggcggctgctccggtctcttgcggtgtggaaagggaacgacctacgagggcggtgtccgagagcctgc

SEQ ID NO: 21982 - DNA, 201 bp, Homo sapiens
ggatgcagctgtggggaccctgatgacagccataggggacctggggctgcttgaagagacgctggtcatcttcactgcagacaatggacctgagaccatgygtatgtcccgaggcggctgctccggtctcttgcggtgtggaaagggaacgacctacgagggcggtgtccgagagcctgccttggccttctggccaggtca

SEQ ID NO: 21983 - DNA, 201 bp, Homo sapiens
gtgtctctgtgcacaccctctagggccgccctcctgaccggccggctcccggttcggatgggcatgtaccctggcgtcctggtgcccagctcccggggggdcctgcccctggaggaggtgaccgtggccgaagtcctggctgcccgaggctacctcacaggaatggccggcaagtggcaccttggggtggggcctgagggg

SEQ ID NO: 21984 - DNA, 201 bp, Homo sapiens
gatgcagctgtggggaccctgatgacagccataggggacctggggctgcttgaagagacgctggtcatcttcactgcagacaatggacctgagaccatgcrtatgtcccgaggcggctgctccggtctcttgcggtgtggaaagggaacgacctacgagggcggtgtccgagagcctgccttggccttctggccaggtcat

SEQ ID NO: 21985 - DNA, 201 bp, Homo sapiens
ccctggcgtcctggtgcccagctcccgggggggcctgcccctggaggaggtgaccgtggccgaagtcctggctgcccgaggctacctcacaggaatggccrgcaagtggcaccttggggtggggcctgagggggccttcctgcccccccatcagggcttccatcgatttctaggcatcccgtactcccacgaccagggccc

SEQ ID NO: 21986 - DNA, 201 bp, Homo sapiens
cgccccttcttcctgtactatgcctctcaccacacccactaccctcagttcagtgggcagagctttgcagagcgttcaggccgcgggccatttggggactmcctgatggagctggatgcagctgtggggaccctgatgacagccataggggacctggggctgcttgaagagacgctggtcatcttcactgcagacaatgga

SEQ ID NO: 21987 - DNA, 201 bp, Homo sapiens
tgctccggtctcttgcggtgtggaaagggaacgacctacgagggcggtgtccgagagcctgccttggccttctggccaggtcatatcgctcccggcgtgayccacgagctggccagctccctggacctgctgcctaccctggcagccctggctggggccccactgcccaatgtcaccttggatggctttgacctcagcccc

SEQ ID NO: 21988 - DNA, 201 bp, Homo sapiens
tggacctgctgcctaccctggcagccctggctggggccccactgcccaatgtcaccttggatggctttgacctcagccccctgctgctgggcacaggcaasagccctcggcagtctctcttcttctacccgtcctacccagacgaggtccgtggggtttttgctgtgcggagtggaaagtacaaggctcacttcttcaccc

SEQ ID NO: 21989 - DNA, 201 bp, Homo sapiens
ggaggaggtgaccgtggccgaagtcctggctgcccgaggctacctcacaggaatggccggcaagtggcaccttggggtggggcctgagggggccttcctgyccccccatcagggcttccatcgatttctaggcatcccgtactcccacgaccagggcccctgccagaacctgacctgcttcccgccggccactccttgcga

SEQ ID NO: 21990 - DNA, 201 bp, Homo sapiens
ctgcctaccctggcagccctggctggggccccactgcccaatgtcaccttggatggctttgacctcagccccctgctgctgggcacaggcaagagccctcrgcagtctctcttcttctacccgtcctacccagacgaggtccgtggggtttttgctgtgcggagtggaaagtacaaggctcacttcttcacccagggctct

SEQ ID NO: 21991 - DNA, 201 bp, Homo sapiens
gctgcctaccctggcagccctggctggggccccactgcccaatgtcaccttggatggctttgacctcagccccctgctgctgggcacaggcaagagccctyggcagtctctcttcttctacccgtcctacccagacgaggtccgtggggtttttgctgtgcggagtggaaagtacaaggctcacttcttcacccagggctc

SEQ ID NO: 21992 - DNA, 201 bp, Homo sapiens
gggcacaggcaagagccctcggcagtctctcttcttctacccgtcctacccagacgaggtccgtggggtttttgctgtgcggagtggaaagtacaaggctyacttcttcacccagggctctgcccacagtgataccactgcagaccctgcctgccacgcctccagctctctgactgctcatgagcccccgctgctctatga

SEQ ID NO: 21993 - DNA, 201 bp, Homo sapiens
agacttctacgtgcctgtgtctctgtgcacaccctctagggccgccctcctgaccggccggctcccggttcggatgggcatgtaccctggcgtcctggtgsccagctcccgggggggcctgcccctggaggaggtgaccgtggccgaagtcctggctgcccgaggctacctcacaggaatggccggcaagtggcaccttgg

SEQ ID NO: 21994 - DNA, 201 bp, Homo sapiens
gacgcccagcgccaggatcgccccttcttcctgtactatgcctctcaccacacccactaccctcagttcagtgggcagagctttgcagagcgttcaggccrcgggccatttggggactccctgatggagctggatgcagctgtggggaccctgatgacagccataggggacctggggctgcttgaagagacgctggtcatc

SEQ ID NO: 21995 - DNA, 201 bp, Homo sapiens
aaggctcacttcttcacccagggctctgcccacagtgataccactgcagaccctgcctgccacgcctccagctctctgactgctcatgagcccccgctgcyctatgacctgtccaaggaccctggtgagaactacaacctgctggggggtgtggccggggccaccccagaggtgctgcaagccctgaaacagcttcagctg

SEQ ID NO: 21996 - DNA, 201 bp, Homo sapiens
gcccaatgtcaccttggatggctttgacctcagccccctgctgctgggcacaggcaagagccctcggcagtctctcttcttctacccgtcctacccagacraggtccgtggggtttttgctgtgcggagtggaaagtacaaggctcacttcttcacccagggctctgcccacagtgataccactgcagaccctgcctgcca

SEQ ID NO: 21997 - DNA, 201 bp, Homo sapiens
catgtccatgggggcaccgcggtccctcctcctggccctggctgctggcctggccgttgcccgtccgcccaacatcgtgctgatctttgccgacgacctcrgctatggggacctgggctgctatgggcaccccagctctaccactcccaacctggaccagctggcggcgggagggctgcggttcacagacttctacgtgcc

SEQ ID NO: 21998 - DNA, 201 bp, Homo sapiens
tggaaagtacaaggctcacttcttcacccagggctctgcccacagtgataccactgcagaccctgcctgccacgcctccagctctctgactgctcatgagmccccgctgctctatgacctgtccaaggaccctggtgagaactacaacctgctggggggtgtggccggggccaccccagaggtgctgcaagccctgaaaca

SEQ ID NO: 21999 - DNA, 201 bp, Homo sapiens
aagtacaaggctcacttcttcacccagggctctgcccacagtgataccactgcagaccctgcctgccacgcctccagctctctgactgctcatgagccccygctgctctatgacctgtccaaggaccctggtgagaactacaacctgctggggggtgtggccggggccaccccagaggtgctgcaagccctgaaacagctt

SEQ ID NO: 22000 - DNA, 201 bp, Homo sapiens
gcccccccatcagggcttccatcgatttctaggcatcccgtactcccacgaccagggcccctgccagaacctgacctgcttcccgccggccactccttgcracggtggctgtgaccagggcctggtccccatcccactgttggccaacctgtccgtggaggcgcagcccccctggctgcccggactagaggcccgctacat

SEQ ID NO: 22001 - DNA, 201 bp, Homo sapiens
ctgtccaaggaccctggtgagaactacaacctgctggggggtgtggccggggccaccccagaggtgctgcaagccctgaaacagcttcagctgctcaaggyccagttagacgcagctgtgaccttcggccccagccaggtggcccggggcgaggaccccgccctgcagatctgctgtcatcctggctgcaccccccgccca

SEQ ID NO: 22002 - DNA, 201 bp, Homo sapiens
gctgcaagccctgaaacagcttcagctgctcaaggcccagttagacgcagctgtgaccttcggccccagccaggtggcccggggcgaggaccccgccctgyagatctgctgtcatcctggctgcaccccccgcccagcttgctgccattgcccagatccccatgcctgagggcccctcggctggcctgggcatgtgatggc

SEQ ID NO: 22003 - DNA, 201 bp, Homo sapiens
ggcatcccgtactcccacgaccagggcccctgccagaacctgacctgcttcccgccggccactccttgcgacggtggctgtgaccagggcctggtccccakcccactgttggccaacctgtccgtggaggcgcagcccccctggctgcccggactagaggcccgctacatggctttcgcccatgacctcatggccgacgcc

SEQ ID NO: 22004 - DNA, 201 bp, Homo sapiens
ttctacccgtcctacccagacgaggtccgtggggtttttgctgtgcggagtggaaagtacaaggctcacttcttcacccagggctctgcccacagtgataycactgcagaccctgcctgccacgcctccagctctctgactgctcatgagcccccgctgctctatgacctgtccaaggaccctggtgagaactacaacctg

SEQ ID NO: 22005 - DNA, 201 bp, Homo sapiens
tacccgtcctacccagacgaggtccgtggggtttttgctgtgcggagtggaaagtacaaggctcacttcttcacccagggctctgcccacagtgataccaytgcagaccctgcctgccacgcctccagctctctgactgctcatgagcccccgctgctctatgacctgtccaaggaccctggtgagaactacaacctgctg

SEQ ID NO: 22006 - DNA, 201 bp, Homo sapiens
  misc_feature (1)...(201): n = A,T,C or G
ttctggccaggtcatatcgctcccggcgtgacccacgagctggccagctccctggacctgctgcctaccctggcagccctggctggggccccactgcccantgtcaccttggatggctttgacctcagccccctgctgctgggcacaggcaagagccctcggcagtctctcttcttctacccgtcctacccagacgaggtc

SEQ ID NO: 22007 - DNA, 201 bp, Homo sapiens
cagggcttccatcgatttctaggcatcccgtactcccacgaccagggcccctgccagaacctgacctgcttcccgccggccactccttgcgacggtggctrtgaccagggcctggtccccatcccactgttggccaacctgtccgtggaggcgcagcccccctggctgcccggactagaggcccgctacatggctttcgcc

SEQ ID NO: 22008 - DNA, 201 bp, Homo sapiens
gaacctgacctgcttcccgccggccactccttgcgacggtggctgtgaccagggcctggtccccatcccactgttggccaacctgtccgtggaggcgcagmccccctggctgcccggactagaggcccgctacatggctttcgcccatgacctcatggccgacgcccagcgccaggatcgccccttcttcctgtactatgc

SEQ ID NO: 22009 - DNA, 201 bp, Homo sapiens
gaggaggtgaccgtggccgaagtcctggctgcccgaggctacctcacaggaatggccggcaagtggcaccttggggtggggcctgagggggccttcctgcycccccatcagggcttccatcgatttctaggcatcccgtactcccacgaccagggcccctgccagaacctgacctgcttcccgccggccactccttgcgac

SEQ ID NO: 22010 - DNA, 169 bp, Homo sapiens
cggaagcgcccgcagcccggtaccggctcctcctgggctccctctagcgccttccccccggcccgactscgctggtcagcgccaagtgacttacgcccccgaccctgagcccggaccgctaggcgaggaggatcagatctccgctcgagaatctgaaggtgccctggtc

SEQ ID NO: 22011 - DNA, 201 bp, Homo sapiens
cgcccagcgccaggatcgccccttcttcctgtactatgcctctcaccacacccactaccctcagttcagtgggcagagctttgcagagcgttcaggccgcrggccatttggggactccctgatggagctggatgcagctgtggggaccctgatgacagccataggggacctggggctgcttgaagagacgctggtcatctt

SEQ ID NO: 22012 - DNA, 201 bp, Homo sapiens
ggtcatcttcactgcagacaatggacctgagaccatgcgtatgtcccgaggcggctgctccggtctcttgcggtgtggaaagggaacgacctacgagggcrgtgtccgagagcctgccttggccttctggccaggtcatatcgctcccggcgtgacccacgagctggccagctccctggacctgctgcctaccctggcagc

SEQ ID NO: 22013 - DNA, 201 bp, Homo sapiens
cgacgcccagcgccaggatcgccccttcttcctgtactatgcctctcaccacacccactaccctcagttcagtgggcagagctttgcagagcgttcaggcygcgggccatttggggactccctgatggagctggatgcagctgtggggaccctgatgacagccataggggacctggggctgcttgaagagacgctggtcat

SEQ ID NO: 22014 - DNA, 201 bp, Homo sapiens
gtactatgcctctcaccacacccactaccctcagttcagtgggcagagctttgcagagcgttcaggccgcgggccatttggggactccctgatggagctgsatgcagctgtggggaccctgatgacagccataggggacctggggctgcttgaagagacgctggtcatcttcactgcagacaatggacctgagaccatgcg

SEQ ID NO: 22015 - DNA, 201 bp, Homo sapiens
ctcagccccctgctgctgggcacaggcaagagccctcggcagtctctcttcttctacccgtcctacccagacgaggtccgtggggtttttgctgtgcggastggaaagtacaaggctcacttcttcacccagggctctgcccacagtgataccactgcagaccctgcctgccacgcctccagctctctgactgctcatgag

SEQ ID NO: 22016 - DNA, 201 bp, Homo sapiens
cttcaccttttgacccactactaacgattctccacccagcagacaaagtgatctcttaaaaatatctgttgtgctgggattacaggtgtgaaccaccacamctggccaacaatatttgttttaattagccaggcgtggtagcatttgtcctagcaatttgggaggttgaggtgggagaatcacttcagcccactaggtcga

SEQ ID NO: 22017 - DNA, 201 bp, Homo sapiens
ggagctggatgcagctgtggggaccctgatgacagccataggggacctggggctgcttgaagagacgctggtcatcttcactgcagacaatggacctgagmccatgcgtatgtcccgaggcggctgctccggtctcttgcggtgtggaaagggaacgacctacgagggcggtgtccgagagcctgccttggccttctggcc

SEQ ID NO: 22018 - DNA, 201 bp, Homo sapiens
gacctgggctgctatgggcaccccagctctaccactcccaacctggaccagctggcggcgggagggctgcggttcacagacttctacgtgcctgtgtctcygtgcacaccctctagggccgccctcctgaccggccggctcccggttcggatgggcatgtaccctggcgtcctggtgcccagctcccgggggggcctgccc

SEQ ID NO: 22019 - DNA, 201 bp, Homo sapiens
gggcatgtaccctggcgtcctggtgcccagctcccgggggggcctgcccctggaggaggtgaccgtggccgaagtcctggctgcccgaggctacctcacargaatggccggcaagtggcaccttggggtggggcctgagggggccttcctgcccccccatcagggcttccatcgatttctaggcatcccgtactcccacga

SEQ ID NO: 22020 - DNA, 201 bp, Homo sapiens
tgtcaccttggatggctttgacctcagccccctgctgctgggcacaggcaagagccctcggcagtctctcttcttctacccgtcctacccagacgaggtcygtggggtttttgctgtgcggagtggaaagtacaaggctcacttcttcacccagggctctgcccacagtgataccactgcagaccctgcctgccacgcctc

SEQ ID NO: 22021 - DNA, 201 bp, Homo sapiens
ctgtgaccagggcctggtccccatcccactgttggccaacctgtccgtggaggcgcagcccccctggctgcccggactagaggcccgctacatggctttcrcccatgacctcatggccgacgcccagcgccaggatcgccccttcttcctgtactatgcctctcaccacacccactaccctcagttcagtgggcagagctt

SEQ ID NO: 22022 - DNA, 201 bp, Homo sapiens
tcccgccggccactccttgcgacggtggctgtgaccagggcctggtccccatcccactgttggccaacctgtccgtggaggcgcagcccccctggctgccyggactagaggcccgctacatggctttcgcccatgacctcatggccgacgcccagcgccaggatcgccccttcttcctgtactatgcctctcaccacaccc

SEQ ID NO: 22023 - DNA, 201 bp, Homo sapiens
gacctggggctgcttgaagagacgctggtcatcttcactgcagacaatggacctgagaccatgcgtatgtcccgaggcggctgctccggtctcttgcggtktggaaagggaacgacctacgagggcggtgtccgagagcctgccttggccttctggccaggtcatatcgctcccggcgtgacccacgagctggccagctcc

SEQ ID NO: 22024 - DNA, 201 bp, Homo sapiens; identical to SEQ ID NO: 21960

SEQ ID NO: 22025 - DNA, 201 bp, Homo sapiens; identical to SEQ ID NO: 21961

SEQ ID NO: 22026 - DNA, 201 bp, Homo sapiens; identical to SEQ ID NO: 21962

SEQ ID NO: 22027 - DNA, 201 bp, Homo sapiens; identical to SEQ ID NO: 21963

SEQ ID NO: 22028 - DNA, 201 bp, Homo sapiens; identical to SEQ ID NO: 21964

SEQ ID NO: 22029 - DNA, 201 bp, Homo sapiens; identical to SEQ ID NO: 21965

SEQ ID NO: 22030 - DNA, 201 bp, Homo sapiens; identical to SEQ ID NO: 21966

SEQ ID NO: 22031 - DNA, 201 bp, Homo sapiens; identical to SEQ ID NO: 21967

SEQ ID NO: 22032 - DNA, 201 bp, Homo sapiens; identical to SEQ ID NO: 21968

SEQ ID NO: 22033 - DNA, 201 bp, Homo sapiens; identical to SEQ ID NO: 21969

SEQ ID NO: 22034 - DNA, 201 bp, Homo sapiens; identical to SEQ ID NO: 21970

SEQ ID NO: 22035 - DNA, 201 bp, Homo sapiens; identical to SEQ ID NO: 21971

SEQ ID NO: 22036 - DNA, 201 bp, Homo sapiens; identical to SEQ ID NO: 21972

SEQ ID NO: 22037 - DNA, 201 bp, Homo sapiens; identical to SEQ ID NO: 21973

SEQ ID NO: 22038 - DNA, 201 bp, Homo sapiens; identical to SEQ ID NO: 21974

SEQ ID NO: 22039 - DNA, 201 bp, Homo sapiens; identical to SEQ ID NO: 21975

SEQ ID NO: 22040 - DNA, 201 bp, Homo sapiens; identical to SEQ ID NO: 21976

SEQ ID NO: 22041 - DNA, 201 bp, Homo sapiens; identical to SEQ ID NO: 21977

SEQ ID NO: 22042 - DNA, 201 bp, Homo sapiens; identical to SEQ ID NO: 21978

SEQ ID NO: 22043 - DNA, 201 bp, Homo sapiens; identical to SEQ ID NO: 21979

SEQ ID NO: 22044 - DNA, 201 bp, Homo sapiens; identical to SEQ ID NO: 21980

SEQ ID NO: 22045 - DNA, 201 bp, Homo sapiens; identical to SEQ ID NO: 21981

SEQ ID NO: 22046 - DNA, 201 bp, Homo sapiens; identical to SEQ ID NO: 21982

SEQ ID NO: 22047 - DNA, 201 bp, Homo sapiens; identical to SEQ ID NO: 21983

SEQ ID NO: 22048 - DNA, 201 bp, Homo sapiens; identical to SEQ ID NO: 21984

SEQ ID NO: 22049 - DNA, 201 bp, Homo sapiens; identical to SEQ ID NO: 21985

SEQ ID NO: 22050 - DNA, 201 bp, Homo sapiens; identical to SEQ ID NO: 21986

SEQ ID NO: 22051 - DNA, 201 bp, Homo sapiens; identical to SEQ ID NO: 21987

SEQ ID NO: 22052 - DNA, 201 bp, Homo sapiens; identical to SEQ ID NO: 21988

SEQ ID NO: 22053 - DNA, 201 bp, Homo sapiens; identical to SEQ ID NO: 21989

SEQ ID NO: 22054 - DNA, 201 bp, Homo sapiens; identical to SEQ ID NO: 21990

SEQ ID NO: 22055 - DNA, 201 bp, Homo sapiens; identical to SEQ ID NO: 21991

SEQ ID NO: 22056 - DNA, 201 bp, Homo sapiens; identical to SEQ ID NO: 21992

SEQ ID NO: 22057 - DNA, 201 bp, Homo sapiens; identical to SEQ ID NO: 21993

SEQ ID NO: 22058 - DNA, 201 bp, Homo sapiens; identical to SEQ ID NO: 21994

SEQ ID NO: 22059 - DNA, 201 bp, Homo sapiens; identical to SEQ ID NO: 21995

SEQ ID NO: 22060 - DNA, 201 bp, Homo sapiens; identical to SEQ ID NO: 21996

SEQ ID NO: 22061 - DNA, 201 bp, Homo sapiens; identical to SEQ ID NO: 21997

SEQ ID NO: 22062 - DNA, 201 bp, Homo sapiens; identical to SEQ ID NO: 21998

SEQ ID NO: 22063 - DNA, 201 bp, Homo sapiens; identical to SEQ ID NO: 21999

SEQ ID NO: 22064 - DNA, 201 bp, Homo sapiens; identical to SEQ ID NO: 22000

SEQ ID NO: 22065 - DNA, 201 bp, Homo sapiens; identical to SEQ ID NO: 22001

SEQ ID NO: 22066 - DNA, 201 bp, Homo sapiens; identical to SEQ ID NO: 22002

SEQ ID NO: 22067 - DNA, 201 bp, Homo sapiens; identical to SEQ ID NO: 22003

SEQ ID NO: 22068 - DNA, 201 bp, Homo sapiens; identical to SEQ ID NO: 22004

SEQ ID NO: 22069 - DNA, 201 bp, Homo sapiens; identical to SEQ ID NO: 22005

SEQ ID NO: 22070 - DNA, 201 bp, Homo sapiens; identical to SEQ ID NO: 22006
  misc_feature (1)...(201): n = A,T,C or G

SEQ ID NO: 22071 - DNA, 201 bp, Homo sapiens; identical to SEQ ID NO: 22007

SEQ ID NO: 22072 - DNA, 201 bp, Homo sapiens; identical to SEQ ID NO: 22008

SEQ ID NO: 22073 - DNA, 201 bp, Homo sapiens; identical to SEQ ID NO: 22009

SEQ ID NO: 22074 - DNA, 180 bp, Homo sapiens
cggggccgaggcggaagcgcccgcagcccggtaccggctcctcctgggctccctctagcgccttccccccggcccgactscgctggtcagcgccaagtgacttacgcccccgaccctgagcccggaccgctaggcgaggaggatcagatctccgctcgagaatctgaagacccctcggtc

SEQ ID NO: 22075 - DNA, 201 bp, Homo sapiens; identical to SEQ ID NO: 22011

SEQ ID NO: 22076 - DNA, 201 bp, Homo sapiens; identical to SEQ ID NO: 22012

SEQ ID NO: 22077 - DNA, 201 bp, Homo sapiens; identical to SEQ ID NO: 22013

SEQ ID NO: 22078 - DNA, 201 bp, Homo sapiens; identical to SEQ ID NO: 22014

SEQ ID NO: 22079 - DNA, 201 bp, Homo sapiens; identical to SEQ ID NO: 22015

SEQ ID NO: 22080 - DNA, 201 bp, Homo sapiens; identical to SEQ ID NO: 22016

SEQ ID NO: 22081 - DNA, 201 bp, Homo sapiens; identical to SEQ ID NO: 22017

SEQ ID NO: 22082 - DNA, 201 bp, Homo sapiens; identical to SEQ ID NO: 22018

SEQ ID NO: 22083 - DNA, 201 bp, Homo sapiens; identical to SEQ ID NO: 22019

SEQ ID NO: 22084 - DNA, 201 bp, Homo sapiens; identical to SEQ ID NO: 22020

SEQ ID NO: 22085 - DNA, 201 bp, Homo sapiens; identical to SEQ ID NO: 22021

SEQ ID NO: 22086 - DNA, 201 bp, Homo sapiens; identical to SEQ ID NO: 22022

SEQ ID NO: 22087 - DNA, 201 bp, Homo sapiens; identical to SEQ ID NO: 22023

SEQ ID NO: 22088 - DNA, 201 bp, Homo sapiens; identical to SEQ ID NO: 21960

SEQ ID NO: 22089 - DNA, 201 bp, Homo sapiens; identical to SEQ ID NO: 22003

SEQ ID NO: 22090 - DNA, 201 bp, Homo sapiens; identical to SEQ ID NO: 21961

SEQ ID NO: 22091 - DNA, 201 bp, Homo sapiens; identical to SEQ ID NO: 21962

SEQ ID NO: 22092 - DNA, 201 bp, Homo sapiens; identical to SEQ ID NO: 21963

SEQ ID NO: 22093 - DNA, 201 bp, Homo sapiens; identical to SEQ ID NO: 21964

SEQ ID NO: 22094 - DNA, 201 bp, Homo sapiens; identical to SEQ ID NO: 22004

SEQ ID NO: 22095 - DNA, 201 bp, Homo sapiens; identical to SEQ ID NO: 21965

SEQ ID NO: 22096 - DNA, 201 bp, Homo sapiens; identical to SEQ ID NO: 22005

SEQ ID NO: 22097 - DNA, 201 bp, Homo sapiens; identical to SEQ ID NO: 21966

SEQ ID NO: 22098 - DNA, 201 bp, Homo sapiens; identical to SEQ ID NO: 21967

SEQ ID NO: 22099 - DNA, 201 bp, Homo sapiens; identical to SEQ ID NO: 21968

SEQ ID NO: 22100 - DNA, 201 bp, Homo sapiens; identical to SEQ ID NO: 22006
  misc_feature (1)...(201): n = A,T,C or G

SEQ ID NO: 22101 - DNA, 201 bp, Homo sapiens; identical to SEQ ID NO: 21969

SEQ ID NO: 22102 - DNA, 201 bp, Homo sapiens; identical to SEQ ID NO: 21970

SEQ ID NO: 22103 - DNA, 201 bp, Homo sapiens; identical to SEQ ID NO: 21971

SEQ ID NO: 22104 - DNA, 201 bp, Homo sapiens; identical to SEQ ID NO: 21973

SEQ ID NO: 22105 - DNA, 201 bp, Homo sapiens; identical to SEQ ID NO: 21974

SEQ ID NO: 22106 - DNA, 201 bp, Homo sapiens; identical to SEQ ID NO: 22009

SEQ ID NO: 22107 - DNA, 201 bp, Homo sapiens; identical to SEQ ID NO: 22008

SEQ ID NO: 22108 - DNA, 201 bp, Homo sapiens; identical to SEQ ID NO: 22007

SEQ ID NO: 22109 - DNA, 201 bp, Homo sapiens; identical to SEQ ID NO: 21975

SEQ ID NO: 22110 - DNA, 201 bp, Homo sapiens; identical to SEQ ID NO: 21976

SEQ ID NO: 22111 - DNA, 169 bp, Homo sapiens; identical to SEQ ID NO: 22010

SEQ ID NO: 22112 - DNA, 201 bp, Homo sapiens; identical to SEQ ID NO: 22011

SEQ ID NO: 22113 - DNA, 201 bp, Homo sapiens; identical to SEQ ID NO: 22012

SEQ ID NO: 22114 - DNA, 201 bp, Homo sapiens; identical to SEQ ID NO: 21977

SEQ ID NO: 22115 - DNA, 201 bp, Homo sapiens; identical to SEQ ID NO: 22013

SEQ ID NO: 22116 - DNA, 201 bp, Homo sapiens; identical to SEQ ID NO: 22014

SEQ ID NO: 22117 - DNA, 201 bp, Homo sapiens; identical to SEQ ID NO: 21978

SEQ ID NO: 22118 - DNA, 201 bp, Homo sapiens; identical to SEQ ID NO: 21979

SEQ ID NO: 22119 - DNA, 201 bp, Homo sapiens; identical to SEQ ID NO: 21980

SEQ ID NO: 22120 - DNA, 201 bp, Homo sapiens; identical to SEQ ID NO: 21981

SEQ ID NO: 22121 - DNA, 201 bp, Homo sapiens; identical to SEQ ID NO: 22015

SEQ ID NO: 22122 - DNA, 201 bp, Homo sapiens; identical to SEQ ID NO: 21982

SEQ ID NO: 22123 - DNA, 201 bp, Homo sapiens; identical to SEQ ID NO: 21983

SEQ ID NO: 22124 - DNA, 201 bp, Homo sapiens; identical to SEQ ID NO: 21984

SEQ ID NO: 22125 - DNA, 201 bp, Homo sapiens; identical to SEQ ID NO: 21985

SEQ ID NO: 22126 - DNA, 201 bp, Homo sapiens; identical to SEQ ID NO: 21986

SEQ ID NO: 22127 - DNA, 201 bp, Homo sapiens; identical to SEQ ID NO: 21987

SEQ ID NO: 22128 - DNA, 201 bp, Homo sapiens; identical to SEQ ID NO: 22018

SEQ ID NO: 22129 - DNA, 201 bp, Homo sapiens; identical to SEQ ID NO: 22017

SEQ ID NO: 22130 - DNA, 201 bp, Homo sapiens; identical to SEQ ID NO: 21988

SEQ ID NO: 22131 - DNA, 201 bp, Homo sapiens; identical to SEQ ID NO: 21989

SEQ ID NO: 22132 - DNA, 201 bp, Homo sapiens; identical to SEQ ID NO: 21990

SEQ ID NO: 22133 - DNA, 201 bp, Homo sapiens; identical to SEQ ID NO: 21991

SEQ ID NO: 22134 - DNA, 201 bp, Homo sapiens; identical to SEQ ID NO: 21992

SEQ ID NO: 22135 - DNA, 201 bp, Homo sapiens; identical to SEQ ID NO: 21993

SEQ ID NO: 22136 - DNA, 201 bp, Homo sapiens; identical to SEQ ID NO: 22019

SEQ ID NO: 22137 - DNA, 201 bp, Homo sapiens; identical to SEQ ID NO: 22020

SEQ ID NO: 22138 - DNA, 201 bp, Homo sapiens; identical to SEQ ID NO: 22021

SEQ ID NO: 22139 - DNA, 201 bp, Homo sapiens; identical to SEQ ID NO: 21994

SEQ ID NO: 22140 - DNA, 201 bp, Homo sapiens; identical to SEQ ID NO: 21995

SEQ ID NO: 22141 - DNA, 201 bp, Homo sapiens; identical to SEQ ID NO: 21996

SEQ ID NO: 22142 - DNA, 201 bp, Homo sapiens; identical to SEQ ID NO: 22022

SEQ ID NO: 22143 - DNA, 201 bp, Homo sapiens; identical to SEQ ID NO: 21997

SEQ ID NO: 22144 - DNA, 201 bp, Homo sapiens; identical to SEQ ID NO: 21998

SEQ ID NO: 22145 - DNA, 201 bp, Homo sapiens; identical to SEQ ID NO: 21999

SEQ ID NO: 22146 - DNA, 201 bp, Homo sapiens; identical to SEQ ID NO: 22000

SEQ ID NO: 22147 - DNA, 201 bp, Homo sapiens; identical to SEQ ID NO: 22023

SEQ ID NO: 22148 - DNA, 201 bp, Homo sapiens; identical to SEQ ID NO: 22001

SEQ ID NO: 22149 - DNA, 201 bp, Homo sapiens; identical to SEQ ID NO: 22002

SEQ ID NO: 22150 - DNA, 201 bp, Homo sapiens
gaagccccccctgtggagggtgactcagaagcaggcgccatgtggacggcagtgtttgatgagccagcgaactcaacgcccacagccccaggagtggtgarggacgtgggttccagtgtgtgggcagctggcacctcagctccagaggagaaaggctgggccaagttcactgacttccaacctttctgctgctccgagtca

SEQ ID NO: 22151 - DNA, 201 bp, Homo sapiens
atggcccagagcgtggaggccaggatgggaaggcgagcttggaagcacacagagatgcacctggggcaggtgccccaccggcccccgggaagaaggaagcsccccctgtggagggtgactcagaagcaggcgccatgtggacggcagtgtttgatgagccagcgaactcaacgcccacagccccaggagtggtgaaggacg

SEQ ID NO: 22152 - DNA, 201 bp, Homo sapiens
gcttcagagagttgctcaaagaatggcccagagcgtggaggccaggatgggaaggcgagcttggaagcacacagagatgcacctggggcaggtgccccacyggcccccgggaagaaggaagccccccctgtggagggtgactcagaagcaggcgccatgtggacggcagtgtttgatgagccagcgaactcaacgcccaca

SEQ ID NO: 22153 - DNA, 201 bp, Homo sapiens
cttactgctggacttgttctttaagtacacctggaataactttttgcacttccaagtggaactatgcatagccgctattctctcccacgctgcccgtgagsagaggacagaagccagcggatccgagagcagggtggagcctccgcatgagaacgggaaccggagcctggagactccccagccggccgccagcctccctga

SEQ ID NO: 22154 - DNA, 201 bp, Homo sapiens
gtgggggtgggggtggggggggcaggaccctgagatgccaccaggacctgatgggccaggaagggcgtggacatggaggctgtttttacagtttttttttkttgttgttttgtttttaaagaatacagaaggagccaagcttttttgcactttgtatccagctgcaagctcagggcagagtcaagggcctgggttggaaaa

SEQ ID NO: 22155 - DNA, 201 bp, Homo sapiens
tgggggtgggggtggggggggcaggaccctgagatgccaccaggacctgatgggccaggaagggcgtggacatggaggctgtttttacagttttttttttktgttgttttgtttttaaagaatacagaaggagccaagcttttttgcactttgtatccagctgcaagctcagggcagagtcaagggcctgggttggaaaaa

SEQ ID NO: 22156 - DNA, 201 bp, Homo sapiens
cctttcatttagccttgggcttccaccttctctgtggctagaaacaggaccgtccagaagtcacctgtaactgccctatcttgcaagttctgattttggcaaaaaaaaaaaaaaaagccttgacaaggttggattcacttctttccctggattgtgtgtcatccaactctgcggccgtcacgatgttctggaagtttgact

SEQ ID NO: 22157 - DNA, 201 bp, Homo sapiens
aaggccctctaggcctggcagggatgtccctgtgcccagcacagggtgcctggcagggggagaccacaggtatgcaggtggggggacatggtgtggcactrggggctcgaagactggtttctagcactaccggtcacggccatgtcgtcctagaagggtccagaagattattttacgttgagtccatttttaatgttctga

SEQ ID NO: 22158 - DNA, 201 bp, Homo sapiens
gggcagagtcaagggcctgggttggaaaaacctgactcacaggaatgcataattgacccttgcagctacccaatagcccttggagctggcactgaaccagkctgcaagatttgactgccttaaaaacacaaggccctctaggcctggcagggatgtccctgtgcccagcacagggtgcctggcagggggagaccacaggta

SEQ ID NO: 22159 - DNA, 201 bp, Homo sapiens
gtaatgggtggaggcggaacaggccacatcacggcatcaggtctctacagcttagcaaatactgacatttttccgtttgggggatggggggaaccacttcrcctaacgctcaaacacatcaaccccaggacttccttttgtgccagctccccctcccagaagcctgggccccaccttgtcctcagtggctgagtgggaggg

SEQ ID NO: 22160 - DNA, 201 bp, Homo sapiens
ccacgctgcccgtgaggagaggacagaagccagcggatccgagagcagggtggagcctccgcatgagaacgggaaccggagcctggagactccccagccgkccgccagcctccctgacaacacaatggtgacccacctgttccagaagtgctgcctggtgcagaggatcctggaggcctgggaagccaacgaccacacgca

SEQ ID NO: 22161 - DNA, 201 bp, Homo sapiens
aggatggcgaccagaaggcagcgagtgccatggatgcggtgagcaggggtcccggccgggaggcccccccgctgcccacagtggccaggacagaggaggckgtcggcagggtcgggtgtgctgacagccggctgttaagccctgcctgccccgcgccaaaggaagtgactgctgccccagccgtggctgtgccccccgagg

SEQ ID NO: 22162 - DNA, 201 bp, Homo sapiens
gcgagcttgtctttccaccacggttgggggtggagggaacccgctcagctccccagaggccgagtctctgccccagctacacattgagtgccttgttctcrccgcctaccctgtgcctggcatttgtcctctccccccacagacgtggaacagggagggcagggtcctttctccccttactctgacctgtgggttttccag

SEQ ID NO: 22163 - DNA, 201 bp, Homo sapiens
gcctggcatttgtcctctccccccacagacgtggaacagggagggcagggtcctttctccccttactctgacctgtgggttttccaggtgccaggaacttyggtcaggcgccatctgtccggcctgagggaagacctggctggtttcagtggctcaagtgagcccaccctcacatctcgcccaggtgtcccaacaccacct

SEQ ID NO: 22164 - DNA, 201 bp, Homo sapiens
tcgcagagatcaacttcaacatcgacgctgacgaggacagtcccagcgcagctctgtttgaggcctgctgcagtgaccgcatccagccctttgatgatgakgaggacgaggacatctgggaggacagtgacactcgctgtgctgcccgggtgatggccagacccaggtttggagccccccatgcttcagagagttgctcaa

SEQ ID NO: 22165 - DNA, 201 bp, Homo sapiens; identical to SEQ ID NO: 22150

SEQ ID NO: 22166 - DNA, 201 bp, Homo sapiens; identical to SEQ ID NO: 22151

SEQ ID NO: 22167 - DNA, 201 bp, Homo sapiens; identical to SEQ ID NO: 22152

SEQ ID NO: 22168 - DNA, 201 bp, Homo sapiens; identical to SEQ ID NO: 22153

SEQ ID NO: 22169 - DNA, 201 bp, Homo sapiens; identical to SEQ ID NO: 22154

SEQ ID NO: 22170 - DNA, 201 bp, Homo sapiens; identical to SEQ ID NO: 22155

SEQ ID NO: 22171 - DNA, 201 bp, Homo sapiens; identical to SEQ ID NO: 22157

SEQ ID NO: 22172 - DNA, 201 bp, Homo sapiens; identical to SEQ ID NO: 22158

SEQ ID NO: 22173 - DNA, 201 bp, Homo sapiens; identical to SEQ ID NO: 22159

SEQ ID NO: 22174 - DNA, 201 bp, Homo sapiens; identical to SEQ ID NO: 22160

SEQ ID NO: 22175 - DNA, 201 bp, Homo sapiens; identical to SEQ ID NO: 22161

SEQ ID NO: 22176 - DNA, 201 bp, Homo sapiens; identical to SEQ ID NO: 22162

SEQ ID NO: 22177 - DNA, 201 bp, Homo sapiens; identical to SEQ ID NO: 22163

SEQ ID NO: 22178 - DNA, 201 bp, Homo sapiens; identical to SEQ ID NO: 22164

SEQ ID NO: 22179 - DNA, 201 bp, Homo sapiens; identical to SEQ ID NO: 22150

SEQ ID NO: 22180 - DNA, 201 bp, Homo sapiens; identical to SEQ ID NO: 22151

SEQ ID NO: 22181 - DNA, 201 bp, Homo sapiens; identical to SEQ ID NO: 22152

SEQ ID NO: 22182 - DNA, 201 bp, Homo sapiens; identical to SEQ ID NO: 22153

SEQ ID NO: 22183 - DNA, 201 bp, Homo sapiens; identical to SEQ ID NO: 22154

SEQ ID NO: 22184 - DNA, 201 bp, Homo sapiens; identical to SEQ ID NO: 22155

SEQ ID NO: 22185 - DNA, 201 bp, Homo sapiens; identical to SEQ ID NO: 22157

SEQ ID NO: 22186 - DNA, 201 bp, Homo sapiens; identical to SEQ ID NO: 22158

SEQ ID NO: 22187 - DNA, 201 bp, Homo sapiens; identical to SEQ ID NO: 22159

SEQ ID NO: 22188 - DNA, 201 bp, Homo sapiens; identical to SEQ ID NO: 22160

SEQ ID NO: 22189 - DNA, 201 bp, Homo sapiens; identical to SEQ ID NO: 22161

SEQ ID NO: 22190 - DNA, 201 bp, Homo sapiens; identical to SEQ ID NO: 22162

SEQ ID NO: 22191 - DNA, 201 bp, Homo sapiens; identical to SEQ ID NO: 22163

SEQ ID NO: 22192 - DNA, 201 bp, Homo sapiens
tcctgaaaaaggaaagaagctgaacttcaagttcctttcatttagccttggatggacttccaggacttgggtctagtgttgctgagggtggatctgcagarctctgcggccgtcacgatgttctggaagtttgacttgaacaccacgtcccatgttgacaagctgctggacaaggagcatgtgacgctgcaggagttaatg

SEQ ID NO: 22193 - DNA, 201 bp, Homo sapiens; identical to SEQ ID NO: 22164

SEQ ID NO: 22194 - DNA, 201 bp, Homo sapiens; identical to SEQ ID NO: 22150

SEQ ID NO: 22195 - DNA, 201 bp, Homo sapiens; identical to SEQ ID NO: 22151

SEQ ID NO: 22196 - DNA, 201 bp, Homo sapiens; identical to SEQ ID NO: 22152

SEQ ID NO: 22197 - DNA, 201 bp, Homo sapiens; identical to SEQ ID NO: 22153

SEQ ID NO: 22198 - DNA, 201 bp, Homo sapiens; identical to SEQ ID NO: 22154

SEQ ID NO: 22199 - DNA, 201 bp, Homo sapiens; identical to SEQ ID NO: 22155

SEQ ID NO: 22200 - DNA, 201 bp, Homo sapiens; identical to SEQ ID NO: 22157

SEQ ID NO: 22201 - DNA, 201 bp, Homo sapiens; identical to SEQ ID NO: 22158

SEQ ID NO: 22202 - DNA, 201 bp, Homo sapiens; identical to SEQ ID NO: 22159

SEQ ID NO: 22203 - DNA, 201 bp, Homo sapiens; identical to SEQ ID NO: 22160

SEQ ID NO: 22204 - DNA, 201 bp, Homo sapiens; identical to SEQ ID NO: 22161

SEQ ID NO: 22205 - DNA, 201 bp, Homo sapiens; identical to SEQ ID NO: 22162

SEQ ID NO: 22206 - DNA, 201 bp, Homo sapiens; identical to SEQ ID NO: 22163

SEQ ID NO: 22207 - DNA, 201 bp, Homo sapiens; identical to SEQ ID NO: 22164

SEQ ID NO: 22208 - DNA, 201 bp, Homo sapiens
gatctcttccagaaggctgctaagaagcaccagaatatgtaccgcctggccatgaccggggcagggatcgacaggcacctcttctgcctttacttggtctmcaagtacctaggagtcagctctcctttccttgctgaggtgctctcggaaccctggcgtctctccaccagccagatcccccaatcccagatccgcatgttc

SEQ ID NO: 22209 - DNA, 201 bp, Homo sapiens
cattgctgatcttttccaagttcccaaggcctacagctgaagcccttaggtacctgtgttttgtttgggaactcggaggccctccccctcccccagctcaraccacagaggtggcaagagaagggctgaagctggaagactgttcatgagggacttgtgtgacctgctttgaaatgtgtgactctgctgagtgacgtaggc

SEQ ID NO: 22210 - DNA, 201 bp, Homo sapiens
  misc_feature (1)...(201): n = A,T,C or G
ctacacggagaccgggcactgcctgggcaaaccgaaccctgcgctcgcacctcctacacggctgcagtgggacattccaaaacagtgccaggcggtcatcnagagttcctaccaggtggccaaggcgttggcagacgacgtggagttgtactgcttccagttcctgccctttggcaaaggcctcatcaagaagtgccggac

SEQ ID NO: 22211 - DNA, 201 bp, Homo sapiens
gcgctttggaaaccacatccgcaaagccctgctggacattgctgatcttttccaagttcccaaggcctacagctgaagcccttaggtacctgtgttttgtytgggaactcggaggccctccccctcccccagctcagaccacagaggtggcaagagaagggctgaagctggaagactgttcatgagggacttgtgtgacct

SEQ ID NO: 22212 - DNA, 201 bp, Homo sapiens
gagatgtacagcctgaaggatgagatgggcaacctcaggaagttactagagtctaccccatcgccagtcgtcttctgccacaatgacatccaggaagggamcatcttgctgctctcagagccagaaaatgctgacagcctcatgctggtggacttcgagtacagcagttataactataggggctttgacattgggaaccat

SEQ ID NO: 22213 - DNA, 201 bp, Homo sapiens
gctcttccgctgctcgctcccggaccacctgcccagcgttggcgaggagccccgggaggtgcttctgcggctgtacggagccatcttgcaggtgagggggktgtgagcgccgcagcaccagtggctttagggcctgtcgcttacgcgatgcgggtagtattgttcccgttgcgcagttgaggacaccgaggttcacggtct

SEQ ID NO: 22214 - DNA, 201 bp, Homo sapiens
caggcacgccaggccttctttagctctggaaagaataaggctgccttggaggccatcgagcgtgccgctttcttcgtggccctggatgaggaatcctactsctatgaccccgaagatgaggccagcctcagcctctatggcaaggccctgctacatggcaactgctacaacaggtggtttgacaaatccttcactctcatt

SEQ ID NO: 22215 - DNA, 201 bp, Homo sapiens
ctggacattgctgatcttttccaagttcccaaggcctacagctgaagcccttaggtacctgtgttttgtttgggaactcggaggccctccccctcccccakctcagaccacagaggtggcaagagaagggctgaagctggaagactgttcatgagggacttgtgtgacctgctttgaaatgtgtgactctgctgagtgacg

SEQ ID NO: 22216 - DNA, 201 bp, Homo sapiens
gaaagaataaggctgccttggaggccatcgagcgtgccgctttcttcgtggccctggatgaggaatcctactcctatgaccccgaagatgaggccagcctyagcctctatggcaaggccctgctacatggcaactgctacaacaggtggtttgacaaatccttcactctcatttccttcaagaatggccagttgggtctca

SEQ ID NO: 22217 - DNA, 201 bp, Homo sapiens
tggagggaggaacaacgagcagaaggccctggcgactgggctgagcccccaagtgaaactgaggttcaggagaccggcctgttcctgagtttgactctaawgccaccatcctcacgagactctggggccccccaggctcccagacctttgagcaaccttcaccgcacagaaacccagccgcgccctgcaattcccaccgcg

SEQ ID NO: 22218 - DNA, 201 bp, Homo sapiens
  misc_feature (1)...(201): n = A,T,C or G
cctgtctgggatcaactcctggaagaaacgcctgatccgcatcaagaatggcatcctcaggggcgtgtaccctggcagccccaccagctggctggtcgtcntcatggcaacagtgggttcctccttctgcaacgtggacatctccttggggctggtcagttgcatccagagatgcctccctcaggggtgtggcccctacca

SEQ ID NO: 22219 - DNA, 127 bp, Homo sapiens
caccagtatgaggagctgagagtaacytggtggtctttgcagattcaggctcagcagaggtatccttcctgcaaccagcaggagtgccctcgtggaagcgttcctacctgggaaacaggctctaatc

SEQ ID NO: 22220 - DNA, 201 bp, Homo sapiens
gcctccagggcaggaccttggagggaggaacaacgagcagaaggccctggcgactgggctgagcccccaagtgaaactgaggttcaggagaccggcctgtycctgagtttgactctaaagccaccatcctcacgagactctggggccccccaggctcccagacctttgagcaaccttcaccgcacagaaacccagccgcgc

SEQ ID NO: 22221 - DNA, 201 bp, Homo sapiens
  misc_feature (1)...(201): n = A,T,C or G
aaactggaccgtgaagaaatcaagcctgtgatggcactgggcatagtgcctatgtgctcctaccagatggagaggatgttcaacaccactcggatcccggncaaggacacagatgtgctacagcacctctcagacagccggcacgtggctgtctaccacaagggacgcttcttcaagctgtggctctatgagggcgcccgt

SEQ ID NO: 22222 - DNA, 201 bp, Homo sapiens; identical to SEQ ID NO: 22208

SEQ ID NO: 22223 - DNA, 201 bp, Homo sapiens; identical to SEQ ID NO: 22209

SEQ ID NO: 22224 - DNA, 201 bp, Homo sapiens; identical to SEQ ID NO: 22210
  misc_feature (1)...(201): n = A,T,C or G

SEQ ID NO: 22225 - DNA, 201 bp, Homo sapiens; identical to SEQ ID NO: 22211

SEQ ID NO: 22226 - DNA, 201 bp, Homo sapiens; identical to SEQ ID NO: 22214

SEQ ID NO: 22227 - DNA, 201 bp, Homo sapiens; identical to SEQ ID NO: 22215

SEQ ID NO: 22228 - DNA, 201 bp, Homo sapiens; identical to SEQ ID NO: 22216

SEQ ID NO: 22229 - DNA, 201 bp, Homo sapiens; identical to SEQ ID NO: 22218
  misc_feature (1)...(201): n = A,T,C or G

SEQ ID NO: 22230 - DNA, 201 bp, Homo sapiens; identical to SEQ ID NO: 22221
  misc_feature (1)...(201): n = A,T,C or G

SEQ ID NO: 22231 - DNA, 201 bp, Homo sapiens; identical to SEQ ID NO: 22208

SEQ ID NO: 22232 - DNA, 201 bp, Homo sapiens
gatagatactaataaaaataaggctgtgtaattttctctcagcccttaggtacctgtgttttgtttgggaactcggaggccctccccctcccccagctcaraccacagaggtggcaagagaagggctgaagctggaagactgttcatgagggacttgtgtgacctgctttgaaatgtgtgactctgctgagtgacgtaggc

SEQ ID NO: 22233 - DNA, 201 bp, Homo sapiens; identical to SEQ ID NO: 22210
  misc_feature (1)...(201): n = A,T,C or G

SEQ ID NO: 22234 - DNA, 201 bp, Homo sapiens
tggagcaggaagggaattttgatttttttttttcttgatagatactaataaaaataaggctgtgtaattttctctcagcccttaggtacctgtgttttgtytgggaactcggaggccctccccctcccccagctcagaccacagaggtggcaagagaagggctgaagctggaagactgttcatgagggacttgtgtgacct

SEQ ID NO: 22235 - DNA, 201 bp, Homo sapiens
tttccaagttcccaaggcctacagctgaaggttggagaaatgccagctgccctttcgtccccacactgtggaggaagggacctgtggcagctcacaggcakgaggggtggccgtgcacaggtgcccaggctccaaggacagctccggcagcaggtcctcgctgggcagatgctgctccctgagggcccaggtggtggaggt

SEQ ID NO: 22236 - DNA, 201 bp, Homo sapiens; identical to SEQ ID NO: 22214

SEQ ID NO: 22237 - DNA, 201 bp, Homo sapiens
ttcttgatagatactaataaaaataaggctgtgtaattttctctcagcccttaggtacctgtgttttgtttgggaactcggaggccctccccctcccccakctcagaccacagaggtggcaagagaagggctgaagctggaagactgttcatgagggacttgtgtgacctgctttgaaatgtgtgactctgctgagtgacg

SEQ ID NO: 22238 - DNA, 201 bp, Homo sapiens; identical to SEQ ID NO: 22216

SEQ ID NO: 22239 - DNA, 201 bp, Homo sapiens; identical to SEQ ID NO: 22218
  misc_feature (1)...(201): n = A,T,C or G

SEQ ID NO: 22240 - DNA, 201 bp, Homo sapiens; identical to SEQ ID NO: 22221
  misc_feature (1)...(201): n = A,T,C or G

SEQ ID NO: 22241 - DNA, 201 bp, Homo sapiens; identical to SEQ ID NO: 22208

SEQ ID NO: 22242 - DNA, 201 bp, Homo sapiens
ccagtcctaccctctcctccccaaggcacctccaccccctaaccctaccccagtgcccaatgtctgcctccacatccctcaccccaagtagggaatttccsccaaaaccctgacttcccctcattgccccagcccttcccactcctgccccagccccatcaccaccctgatagcttcctgggtgcagagtcggccattgaa

SEQ ID NO: 22243 - DNA, 201 bp, Homo sapiens
cgtgcacaggtgcccaggctccaaggacagctccggcagcagcccttaggtacctgtgttttgtttgggaactcggaggccctccccctcccccagctcaraccacagaggtggcaagagaagggctgaagctggaagactgttcatgagggacttgtgtgacctgctttgaaatgtgtgactctgctgagtgacgtaggc

SEQ ID NO: 22244 - DNA, 201 bp, Homo sapiens; identical to SEQ ID NO: 22210
  misc_feature (1)...(201): n = A,T,C or G

SEQ ID NO: 22245 - DNA, 201 bp, Homo sapiens
agggacctgtggcagctcacaggcatgaggggtggccgtgcacaggtgcccaggctccaaggacagctccggcagcagcccttaggtacctgtgttttgtytgggaactcggaggccctccccctcccccagctcagaccacagaggtggcaagagaagggctgaagctggaagactgttcatgagggacttgtgtgacct

SEQ ID NO: 22246 - DNA, 201 bp, Homo sapiens
tttccaagttcccaaggcctacagctgaaggttggagaaatgccagctgccctttcgtccccacactgtggaggaagggacctgtggcagctcacaggcakgaggggtggccgtgcacaggtgcccaggctccaaggacagctccggcagcagcccttaggtacctgtgttttgtttgggaactcggaggccctccccctc

SEQ ID NO: 22247 - DNA, 201 bp, Homo sapiens; identical to SEQ ID NO: 22212

SEQ ID NO: 22248 - DNA, 201 bp, Homo sapiens; identical to SEQ ID NO: 22213

SEQ ID NO: 22249 - DNA, 201 bp, Homo sapiens; identical to SEQ ID NO: 22214

SEQ ID NO: 22250 - DNA, 201 bp, Homo sapiens; identical to SEQ ID NO: 22216

SEQ ID NO: 22251 - DNA, 201 bp, Homo sapiens
gtggccgtgcacaggtgcccaggctccaaggacagctccggcagcagcccttaggtacctgtgttttgtttgggaactcggaggccctccccctcccccakctcagaccacagaggtggcaagagaagggctgaagctggaagactgttcatgagggacttgtgtgacctgctttgaaatgtgtgactctgctgagtgacg

SEQ ID NO: 22252 - DNA, 201 bp, Homo sapiens; identical to SEQ ID NO: 22218
  misc_feature (1)...(201): n = A,T,C or G

SEQ ID NO: 22253 - DNA, 127 bp, Homo sapiens; identical to SEQ ID NO: 22219

SEQ ID NO: 22254 - DNA, 201 bp, Homo sapiens
gcctccagggcaggaccttggagggaggaacaacgagcagaaggccctggcgactgggctgagcccccaagtgaaactgaggttcaggagaccggcctgtycctgagtttgagtgccgaccaacccccaggatggcggaagctcaccaggccgtggccttccagttcacggtgaccccagacggggtcgacttccggctca

SEQ ID NO: 22255 - DNA, 201 bp, Homo sapiens; identical to SEQ ID NO: 22221
  misc_feature (1)...(201): n = A,T,C or G

SEQ ID NO: 22256 - DNA, 201 bp, Homo sapiens; identical to SEQ ID NO: 22208

SEQ ID NO: 22257 - DNA, 201 bp, Homo sapiens; identical to SEQ ID NO: 22232

SEQ ID NO: 22258 - DNA, 201 bp, Homo sapiens; identical to SEQ ID NO: 22210
  misc_feature (1)...(201): n = A,T,C or G

SEQ ID NO: 22259 - DNA, 201 bp, Homo sapiens; identical to SEQ ID NO: 22234

SEQ ID NO: 22260 - DNA, 201 bp, Homo sapiens; identical to SEQ ID NO: 22235

SEQ ID NO: 22261 - DNA, 201 bp, Homo sapiens; identical to SEQ ID NO: 22214

SEQ ID NO: 22262 - DNA, 201 bp, Homo sapiens; identical to SEQ ID NO: 22237

SEQ ID NO: 22263 - DNA, 118 bp, Homo sapiens
gctatttttagctctaawgccaccatcctcacgagactctggggccccccaggctcccagacctttgagcaaccttcaccgcacagaaacccagccgcgccctgcaattcccaccgcg

SEQ ID NO: 22264 - DNA, 201 bp, Homo sapiens; identical to SEQ ID NO: 22216

SEQ ID NO: 22265 - DNA, 201 bp, Homo sapiens; identical to SEQ ID NO: 22218
  misc_feature (1)...(201): n = A,T,C or G

SEQ ID NO: 22266 - DNA, 201 bp, Homo sapiens; identical to SEQ ID NO: 22221
  misc_feature (1)...(201): n = A,T,C or G

SEQ ID NO: 22267 - DNA, 130 bp, Homo sapiens
gagcccccaagtgaaactgaggttcaggagaccggcctgttcctgagtttgagtaggtccccatggctggcaggccagagccccgtgctgtgtatgtaacmcaataaacaagcttcttcttcccaccctg

SEQ ID NO: 22268 - DNA, 108 bp, Homo sapiens
ttcaggagaccggcctgttcctgagtttgagtaggtccccatggctggcaggccagagccccgtgctgtgtatgtaacacaataaacaagcttcttcttcscaccctg

SEQ ID NO: 22269 - DNA, 107 bp, Homo sapiens
tcaggagaccggcctgttcctgagtttgagtaggtccccatggctggcaggccagagccccgtgctgtgtatgtaacacaataaacaagcttcttcttccmaccctg

SEQ ID NO: 22270 - DNA, 201 bp, Homo sapiens; identical to SEQ ID NO: 22212

SEQ ID NO: 22271 - DNA, 153 bp, Homo sapiens
cagaaggccctggcgactgggctgagcccccaagtgaaactgaggttcaggagaccggcctgttcctgagtttgagtaggtccccatggctggcaggccaragccccgtgctgtgtatgtaacacaataaacaagcttcttcttcccaccctg

SEQ ID NO: 22272 - DNA, 190 bp, Homo sapiens
gcctccagggcaggaccttggagggaggaacaacgagcagaaggccctggcgactgggctgagcccccaagtgaaactgaggttcaggagaccggcctgtycctgagtttgagtaggtccccatggctggcaggccagagccccgtgctgtgtatgtaacacaataaacaagcttcttcttcccaccctg

SEQ ID NO: 22273 - DNA, 201 bp, Homo sapiens; identical to SEQ ID NO: 22208

SEQ ID NO: 22274 - DNA, 201 bp, Homo sapiens; identical to SEQ ID NO: 22243

SEQ ID NO: 22275 - DNA, 201 bp, Homo sapiens; identical to SEQ ID NO: 22210
  misc_feature (1)...(201): n = A,T,C or G

SEQ ID NO: 22276 - DNA, 201 bp, Homo sapiens; identical to SEQ ID NO: 22245

SEQ ID NO: 22277 - DNA, 201 bp, Homo sapiens; identical to SEQ ID NO: 22246

SEQ ID NO: 22278 - DNA, 201 bp, Homo sapiens; identical to SEQ ID NO: 22212

SEQ ID NO: 22279 - DNA, 201 bp, Homo sapiens; identical to SEQ ID NO: 22214

SEQ ID NO: 22280 - DNA, 201 bp, Homo sapiens; identical to SEQ ID NO: 22251

SEQ ID NO: 22281 - DNA, 201 bp, Homo sapiens; identical to SEQ ID NO: 22216

SEQ ID NO: 22282 - DNA, 201 bp, Homo sapiens; identical to SEQ ID NO: 22217

SEQ ID NO: 22283 - DNA, 201 bp, Homo sapiens; identical to SEQ ID NO: 22218
  misc_feature (1)...(201): n = A,T,C or G

SEQ ID NO: 22284 - DNA, 201 bp, Homo sapiens; identical to SEQ ID NO: 22220

SEQ ID NO: 22285 - DNA, 201 bp, Homo sapiens; identical to SEQ ID NO: 22221
  misc_feature (1)...(201): n = A,T,C or G

SEQ ID NO: 22286 - DNA, 201 bp, Homo sapiens; identical to SEQ ID NO: 22242

SEQ ID NO: 22287 - DNA, 201 bp, Homo sapiens; identical to SEQ ID NO: 22208

SEQ ID NO: 22288 - DNA, 201 bp, Homo sapiens; identical to SEQ ID NO: 22243

SEQ ID NO: 22289 - DNA, 201 bp, Homo sapiens; identical to SEQ ID NO: 22210
  misc_feature (1)...(201): n = A,T,C or G

SEQ ID NO: 22290 - DNA, 201 bp, Homo sapiens; identical to SEQ ID NO: 22245

SEQ ID NO: 22291 - DNA, 201 bp, Homo sapiens; identical to SEQ ID NO: 22246

SEQ ID NO: 22292 - DNA, 201 bp, Homo sapiens; identical to SEQ ID NO: 22212

SEQ ID NO: 22293 - DNA, 201 bp, Homo sapiens; identical to SEQ ID NO: 22213

SEQ ID NO: 22294 - DNA, 201 bp, Homo sapiens; identical to SEQ ID NO: 22214

SEQ ID NO: 22295 - DNA, 201 bp, Homo sapiens; identical to SEQ ID NO: 22251

SEQ ID NO: 22296 - DNA, 201 bp, Homo sapiens; identical to SEQ ID NO: 22216

SEQ ID NO: 22297 - DNA, 201 bp, Homo sapiens; identical to SEQ ID NO: 22217

SEQ ID NO: 22298 - DNA, 201 bp, Homo sapiens; identical to SEQ ID NO: 22218
  misc_feature (1)...(201): n = A,T,C or G

SEQ ID NO: 22299 - DNA, 127 bp, Homo sapiens; identical to SEQ ID NO: 22219

SEQ ID NO: 22300 - DNA, 201 bp, Homo sapiens; identical to SEQ ID NO: 22220

SEQ ID NO: 22301 - DNA, 201 bp, Homo sapiens; identical to SEQ ID NO: 22221
  misc_feature (1)...(201): n = A,T,C or G

SEQ ID NO: 22302 - DNA, 201 bp, Homo sapiens
caaggtctgcacggagagtggggtcaccagcgaccacctcaaggggctgcatgtcatggtgccagacattgtccagatgcacatcgagaccctggaggccrtgcagcgggagagccggaggctgccgcccatccagaagcccaagctgctgcggccgcgcctgctgccgggtgaggagtgtgtgctggacggcctgcgcgt

SEQ ID NO: 22303 - DNA, 201 bp, Homo sapiens
ccctgagcagcagcctgagccgggccaagtctgagcccttccgcatttctccggtcaaccgcatgtatgccatctgccgcagctacccagggctgctgatygtgccccagagtgtccaggacaacgccctgcagcgcgtgtcccgctgctaccgccagaaccgcttccccgtggtctgctggcgcagcgggcggtccaagg

SEQ ID NO: 22304 - DNA, 130 bp, Homo sapiens
agcggctgcaggcgagtttctagaaccagagtctatataaagagagaactaacgccacgctcctgtgcctgccttccccactccccggctgcctgctctcrgcctacccagagggtcccatctgccccta

SEQ ID NO: 22305 - DNA, 201 bp, Homo sapiens
ccagagctgcctgtcggacgcctgagcctcccagccctgcccggctgctctgcttccggtcgttaccgaccactaggggtgggcagggccgccccggccaygtttacagccccggccctcgacagtattgaggccccgagcccccagcacttgtgtgtacagcccccgtccccgccccgccccgcccggccggccctaact

SEQ ID NO: 22306 - DNA, 201 bp, Homo sapiens
tgtgtacctgcaggaggggcccgtgggctccaccctgagcctcagcctggacagcgaccagagtagtggctcaaccacatccggctcccgtcaggctgccygccgcagcaccagcaccctgtacagccagttccagacagcagagagtgagaacaggtcctacgagggcactctgtacaagaagggggccttcatgaagcc

SEQ ID NO: 22307 - DNA, 201 bp, Homo sapiens
tgatgaactgctgcctgcaggactgcacttctctggacgagcatggcattgcggcggctctgctgcctctggtcacagccttctgccggaagctgagcccrggggtgacgcagtttgcatacagctgtgtgcaggagcacgtggtgtggagcacgccacagttctgggaggccatgttctatggggatgtgcagactcaca

SEQ ID NO: 22308 - DNA, 201 bp, Homo sapiens
  misc_feature (1)...(201): n = A,T,C or G
actacgaccaccgtgtggacacagagtgcaagggtgtcatcgacttggcggaggtggaggctgtggcacctggcacgcccactatgggtgcccctaagacngtggacgagaaggccttctttgacgtgaagacaacgcgtcgcgtttacaacttctgtgcccaggacgtgccctcggcccagcagtgggtggaccggatcc

SEQ ID NO: 22309 - DNA, 201 bp, Homo sapiens
ttgcggcggctctgctgcctctggtcacagccttctgccggaagctgagcccgggggtgacgcagtttgcatacagctgtgtgcaggagcacgtggtgtgragcacgccacagttctgggaggccatgttctatggggatgtgcagactcacatccgggccctctacctggagcccacggaggacctggcccccgcccagg

SEQ ID NO: 22310 - DNA, 201 bp, Homo sapiens
acattccacccttgccagagccactgcagagtcagacgcacagtgtgctgagcatggtcctggacccggagctggagttggctgacctcgccttccctccrcccacgacatccacctcctccctgaagatgcaggacaaggagctgcgcgcggtcttcctgcggctgttcgctcagctgctgcagggctatcgctggtgcc

SEQ ID NO: 22311 - DNA, 201 bp, Homo sapiens
ccctgaaggggcgagctgcccgccgctgcctcgcccaggagctgcacctgcatgtgcagcagaaccgtgcggtcctggaccaccagcagtttgactttgtygtccgtatgatgaactgctgcctgcaggactgcacttctctggacgagcatggcattgcggcggctctgctgcctctggtcacagccttctgccggaagc

SEQ ID NO: 22312 - DNA, 201 bp, Homo sapiens
cggtcaaccgcatgtatgccatctgccgcagctacccagggctgctgatcgtgccccagagtgtccaggacaacgccctgcagcgcgtgtcccgctgctaycgccagaaccgcttccccgtggtctgctggcgcagcgggcggtccaaggcggtgctgctgcgctctggaggcctgcatggcaaaggtgtcgtcggcctct

SEQ ID NO: 22313 - DNA, 201 bp, Homo sapiens
agatgcagggtgcacccccagctgtgaaggccgagaggaggaccaccgtgccctcagggccccccatgactgccatactggagcggtgcagtgggctgcaygtcaacagcgcccggcggctggaggttgtgcgcaactgcatctcctacgtgtttgaggggaaaatgcttgaggccaagaagctgctcccagccgtgttga

SEQ ID NO: 22314 - DNA, 201 bp, Homo sapiens
cagcacgctgaccccgtcctcagccctgaagccctccgaccgcatgaccatgagcagcctggtggaaagggcttgctgtcgcgactaccagcgcctcggtytgggcaccctgagcagcagcctgagccgggccaagtctgagcccttccgcatttctccggtcaaccgcatgtatgccatctgccgcagctacccagggct

SEQ ID NO: 22315 - DNA, 201 bp, Homo sapiens
cgcccatccagaagcccaagctgctgcggccgcgcctgctgccgggtgaggagtgtgtgctggacggcctgcgcgtctacctgctgccggatgggcgtgargagggcgcggggggcagtgctgggggaccagcattgctcccagctgagggcgccgtcttcctcaccacgtaccgggtcatcttcacggggatgcccacgg

SEQ ID NO: 22316 - DNA, 201 bp, Homo sapiens
gtgccagacattgtccagatgcacatcgagaccctggaggccgtgcagcgggagagccggaggctgccgcccatccagaagcccaagctgctgcggccgcrcctgctgccgggtgaggagtgtgtgctggacggcctgcgcgtctacctgctgccggatgggcgtgaggagggcgcggggggcagtgctgggggaccagca

SEQ ID NO: 22317 - DNA, 201 bp, Homo sapiens
cccacatgggcagtcacggtaagtggggcagtgtccggaccagtggacgcagcagtggccttggcaccgatgtgggctcccggctagctggcagagacgcrctggccccaccccaggccaacgggggccctcccgacccgggcttcctgcgtccgcagcgagcagccctctatatccttggggacaaagcccagctcaagg

SEQ ID NO: 22318 - DNA, 201 bp, Homo sapiens
tggaccaccagcagtttgactttgtcgtccgtatgatgaactgctgcctgcaggactgcacttctctggacgagcatggcattgcggcggctctgctgccwctggtcacagccttctgccggaagctgagcccgggggtgacgcagtttgcatacagctgtgtgcaggagcacgtggtgtggagcacgccacagttctggg

SEQ ID NO: 22319 - DNA, 201 bp, Homo sapiens; identical to SEQ ID NO: 22302

SEQ ID NO: 22320 - DNA, 201 bp, Homo sapiens; identical to SEQ ID NO: 22303

SEQ ID NO: 22321 - DNA, 201 bp, Homo sapiens; identical to SEQ ID NO: 22306

SEQ ID NO: 22322 - DNA, 201 bp, Homo sapiens; identical to SEQ ID NO: 22307

SEQ ID NO: 22323 - DNA, 201 bp, Homo sapiens; identical to SEQ ID NO: 22308
  misc_feature (1)...(201): n = A,T,C or G

SEQ ID NO: 22324 - DNA, 201 bp, Homo sapiens; identical to SEQ ID NO: 22309

SEQ ID NO: 22325 - DNA, 201 bp, Homo sapiens; identical to SEQ ID NO: 22310

SEQ ID NO: 22326 - DNA, 201 bp, Homo sapiens; identical to SEQ ID NO: 22311

SEQ ID NO: 22327 - DNA, 201 bp, Homo sapiens; identical to SEQ ID NO: 22312

SEQ ID NO: 22328 - DNA, 201 bp, Homo sapiens; identical to SEQ ID NO: 22313

SEQ ID NO: 22329 - DNA, 201 bp, Homo sapiens; identical to SEQ ID NO: 22314

SEQ ID NO: 22330 - DNA, 201 bp, Homo sapiens; identical to SEQ ID NO: 22315

SEQ ID NO: 22331 - DNA, 201 bp, Homo sapiens; identical to SEQ ID NO: 22316

SEQ ID NO: 22332 - DNA, 201 bp, Homo sapiens
gggtggtgttgggacacctgggcgagatgtgagggtgggctcacttgagccactgaaaccagccaggtcttccctcaggccggacagatggcgcctgaccraagttcctggcacctggaaaacccacagcagggcacgagtgacctgagaggcccactcaggcagaagagacgcaagctgggccgtccaactggtttcaac

SEQ ID NO: 22333 - DNA, 201 bp, Homo sapiens
gacggaccgcaccccgaggtaagtggggcagtgtccggaccagtggacgcagcagtggccttggcaccgatgtgggctcccggctagctggcagagacgcrctggccccaccccaggccaacgggggccctcccgacccgggcttcctgcgtccgcagcgagcagccctctatatccttggggacaaagcccagctcaagg

SEQ ID NO: 22334 - DNA, 201 bp, Homo sapiens; identical to SEQ ID NO: 22318

SEQ ID NO: 22335 - DNA, 201 bp, Homo sapiens; identical to SEQ ID NO: 22302

SEQ ID NO: 22336 - DNA, 201 bp, Homo sapiens; identical to SEQ ID NO: 22303

SEQ ID NO: 22337 - DNA, 130 bp, Homo sapiens; identical to SEQ ID NO: 22304

SEQ ID NO: 22338 - DNA, 201 bp, Homo sapiens; identical to SEQ ID NO: 22305

SEQ ID NO: 22339 - DNA, 201 bp, Homo sapiens; identical to SEQ ID NO: 22306

SEQ ID NO: 22340 - DNA, 201 bp, Homo sapiens; identical to SEQ ID NO: 22307

SEQ ID NO: 22341 - DNA, 201 bp, Homo sapiens; identical to SEQ ID NO: 22308
  misc_feature (1)...(201): n = A,T,C or G

SEQ ID NO: 22342 - DNA, 201 bp, Homo sapiens; identical to SEQ ID NO: 22309

SEQ ID NO: 22343 - DNA, 201 bp, Homo sapiens; identical to SEQ ID NO: 22310

SEQ ID NO: 22344 - DNA, 201 bp, Homo sapiens; identical to SEQ ID NO: 22311

SEQ ID NO: 22345 - DNA, 201 bp, Homo sapiens; identical to SEQ ID NO: 22312

SEQ ID NO: 22346 - DNA, 201 bp, Homo sapiens; identical to SEQ ID NO: 22313

SEQ ID NO: 22347 - DNA, 201 bp, Homo sapiens; identical to SEQ ID NO: 22314

SEQ ID NO: 22348 - DNA, 201 bp, Homo sapiens; identical to SEQ ID NO: 22315

SEQ ID NO: 22349 - DNA, 201 bp, Homo sapiens; identical to SEQ ID NO: 22316

SEQ ID NO: 22350 - DNA, 201 bp, Homo sapiens; identical to SEQ ID NO: 22333

SEQ ID NO: 22351 - DNA, 201 bp, Homo sapiens; identical to SEQ ID NO: 22318

SEQ ID NO: 22352 - DNA, 201 bp, Homo sapiens
tccgcgacctcaccaagaactgggaggtggacgtggcggcccagctggctggatcagatctgcatttcttttgacgaaggcaagaccacaatgaacttcaytgaggcagcgttgttgatccagggctctgcctgcgtctacagtaagaaggtggaatacctctactcactcgtctaccaggcccttgatttcatctctgga

SEQ ID NO: 22353 - DNA, 201 bp, Homo sapiens
agccagagggcatgtcccccatggaaccagcgggcgtttcccccatgccagggacccagaaggacaccgggaggactgaggagcagccaatggaagtttcygtgtgcaggagccctgtcccagcactcggcttctcccaggagccaggcccctctccagaaggcccgatgcccctgggtgggggcgaggacgaggatgcag

SEQ ID NO: 22354 - DNA, 201 bp, Homo sapiens
aggagcccgcagcagagtgctgccctgcccaggaggtacatgctgcgggagcgggagggggccccagagcctgcatcctgcgtgaaggagactccagaccyctggcagagcctggacccctttgactccttggagtctaagcccttcaagaaaggtaggccttactctgtgcccccctgtgtggaggaggctctgggacag

SEQ ID NO: 22355 - DNA, 201 bp, Homo sapiens
tcctcatcatccccctcctgcccatggccctggtggcccctgatgaaatggagaagaacaacaatcccctgtacagaggggccttcatgttggagccagarggcatgtcccccatggaaccagcgggcgtttcccccatgccagggacccagaaggacaccgggaggactgaggagcagccaatggaagtttccgtgtgca

SEQ ID NO: 22356 - DNA, 126 bp, Homo sapiens
agcaaaatggcgccagaactagtggygggctgaggacgccgtacccctcggaaggcagccctgcggtccctttgccgcccgttccctcccggacatggaggacgtggaggcgcgcttcgcccacct

SEQ ID NO: 22357 - DNA, 201 bp, Homo sapiens
agaacaacaatcccctgtacagaggggccttcatgttggagccagagggcatgtcccccatggaaccagcgggcgtttcccccatgccagggacccagaakgacaccgggaggactgaggagcagccaatggaagtttccgtgtgcaggagccctgtcccagcactcggcttctcccaggagccaggcccctctccagaag

SEQ ID NO: 22358 - DNA, 201 bp, Homo sapiens
ggacaccgggaggactgaggagcagccaatggaagtttccgtgtgcaggagccctgtcccagcactcggcttctcccaggagccaggcccctctccagaasgcccgatgcccctgggtgggggcgaggacgaggatgcagaggaggcagtagagcttcctgaggcctcggcccccaaggccgctctggagcccaaggagtc

SEQ ID NO: 22359 - DNA, 201 bp, Homo sapiens
ctgtgactagcctgggcaacctgtttggtggagccggtcagacccaacagtcttgggtggaagtcctggacgtagcgggccatggcttcaacgtcgtcccrctcggggtccacagtgatgaagacaggctgcactggaggcaaaccaggctctgcttccagctgccgcaccacctgcaccagcttctccagctcgtctggg

SEQ ID NO: 22360 - DNA, 201 bp, Homo sapiens
tgctccggccgtagtaatccgtgaagaggccgtcagggttgagcaggtagatggcaatggagtggtccacgatgtagtcctggtcctcatccttggggcckgcattgtagtacacgcggtaactgtgactagcctgggcaacctgtttggtggagccggtcagacccaacagtcttgggtggaagtcctggacgtagcggg

SEQ ID NO: 22361 - DNA, 201 bp, Homo sapiens
acccagaaggacaccgggaggactgaggagcagccaatggaagtttccgtgtgcaggagccctgtcccagcactcggcttctcccaggagccaggcccctstccagaaggcccgatgcccctgggtgggggcgaggacgaggatgcagaggaggcagtagagcttcctgaggcctcggcccccaaggccgctctggagccc

SEQ ID NO: 22362 - DNA, 201 bp, Homo sapiens
gcgcacaagcgcttccagacctacgctgccccctccatggcccagccctgagtggggagcaccgaggcaggggtgggggaatgtgtactgaggagccgtgygtctgctcctggctggcccggcctaataaagcagtgttgccatctcatcttccccctaaaaacccttttatgtacacctgcgcagagaagagggctgcct

SEQ ID NO: 22363 - DNA, 201 bp, Homo sapiens
cttcggcgaaagggtccgtcctttgcagacatggaggtcctgtactggacacacgtgaaggagcagttggaaactctccggaagctgcagaggagggaggyaaatgctttctctggacaggtggctgagcagtggctgcggcctgcagaggaggaccacctggaggattccctggaagacctgggggcagcagatgacttt

SEQ ID NO: 22364 - DNA, 201 bp, Homo sapiens
tggcaatggagtggtccacgatgtagtcctggtcctcatccttggggcctgcattgtagtacacgcggtaactgtgactagcctgggcaacctgtttggtrgagccggtcagacccaacagtcttgggtggaagtcctggacgtagcgggccatggcttcaacgtcgtcccgctcggggtccacagtgatgaagacaggct

SEQ ID NO: 22365 - DNA, 128 bp, Homo sapiens
tcgtcccgctcggggtccacagtgatgaagacaggctgcactggaggcaaaccaggctctgcttccagctgccgcaccacctgcaccagcttctccagctygtctgggcagatgtcagggcagtgagt

SEQ ID NO: 22366 - DNA, 201 bp, Homo sapiens
ggcccgatgcccctgggtgggggcgaggacgaggatgcagaggaggcagtagagcttcctgaggcctcggcccccaaggccgctctggagcccaaggagtycaggagcccgcagcagagtgctgccctgcccaggaggtacatgctgcgggagcgggagggggccccagagcctgcatcctgcgtgaaggagactccagac

SEQ ID NO: 22367 - DNA, 201 bp, Homo sapiens
catgtgccgccgcacactgtctgagatctgctcagccgatctgctccggccgtagtaatccgtgaagaggccgtcagggttgagcaggtagatggcaatgragtggtccacgatgtagtcctggtcctcatccttggggcctgcattgtagtacacgcggtaactgtgactagcctgggcaacctgtttggtggagccggt

SEQ ID NO: 22368 - DNA, 201 bp, Homo sapiens
aactgggaggtggacgtggcggcccagctgggcgagtatctggaggagctggatcagatctgcatttcttttgacgaaggcaagaccacaatgaacttcaytgaggcagcgttgttgatccagggctctgcctgcgtctacagtaagaaggtggaatacctctactcactcgtctaccaggcccttgatttcatctctgga

SEQ ID NO: 22369 - DNA, 201 bp, Homo sapiens; identical to SEQ ID NO: 22353

SEQ ID NO: 22370 - DNA, 201 bp, Homo sapiens; identical to SEQ ID NO: 22354

SEQ ID NO: 22371 - DNA, 201 bp, Homo sapiens
ccctgtacagccgtcagggtgaggtcctggccagccggaaggatttcaggatgaacacgtgcgttccccaccccagaggggccttcatgttggagccagarggcatgtcccccatggaaccagcgggcgtttcccccatgccagggacccagaaggacaccgggaggactgaggagcagccaatggaagtttccgtgtgca

SEQ ID NO: 22372 - DNA, 201 bp, Homo sapiens
ctctctggcttttgcccacgttacgtcatagacatgcgcgcgacgccgcgcctacgcattttcctgggcgggaacagcaaaatggcgccagaactagtggygggctgaggacgccgtacccctcggaaggcagccctgcggtccctttgccgcccgttccctcccggacatggaggacgtggaggcgcgcttcgcccacct

SEQ ID NO: 22373 - DNA, 201 bp, Homo sapiens
acacgtgcgttccccaccccagaggggccttcatgttggagccagagggcatgtcccccatggaaccagcgggcgtttcccccatgccagggacccagaakgacaccgggaggactgaggagcagccaatggaagtttccgtgtgcaggagccctgtcccagcactcggcttctcccaggagccaggcccctctccagaag

SEQ ID NO: 22374 - DNA, 201 bp, Homo sapiens; identical to SEQ ID NO: 22358

SEQ ID NO: 22375 - DNA, 201 bp, Homo sapiens; identical to SEQ ID NO: 22359

SEQ ID NO: 22376 - DNA, 201 bp, Homo sapiens; identical to SEQ ID NO: 22360

SEQ ID NO: 22377 - DNA, 201 bp, Homo sapiens; identical to SEQ ID NO: 22361

SEQ ID NO: 22378 - DNA, 201 bp, Homo sapiens; identical to SEQ ID NO: 22362

SEQ ID NO: 22379 - DNA, 201 bp, Homo sapiens
cttcggcgaaagggtccgtcctttgcagacatggaggtcctgtactggacacacgtgaaggagcagttggaaactctccggaagctgcagaggagggaggyaagtggctgagcagtggctgcggcctgcagaggaggaccacctggaggattccctggaagacctgggggcagcagatgactttctagagcctgaggagta

SEQ ID NO: 22380 - DNA, 201 bp, Homo sapiens; identical to SEQ ID NO: 22364

SEQ ID NO: 22381 - DNA, 128 bp, Homo sapiens; identical to SEQ ID NO: 22365

SEQ ID NO: 22382 - DNA, 201 bp, Homo sapiens; identical to SEQ ID NO: 22366

SEQ ID NO: 22383 - DNA, 201 bp, Homo sapiens; identical to SEQ ID NO: 22367

SEQ ID NO: 22384 - DNA, 201 bp, Homo sapiens; identical to SEQ ID NO: 22368

SEQ ID NO: 22385 - DNA, 201 bp, Homo sapiens; identical to SEQ ID NO: 22353

SEQ ID NO: 22386 - DNA, 201 bp, Homo sapiens; identical to SEQ ID NO: 22354

SEQ ID NO: 22387 - DNA, 201 bp, Homo sapiens; identical to SEQ ID NO: 22371

SEQ ID NO: 22388 - DNA, 201 bp, Homo sapiens; identical to SEQ ID NO: 22372

SEQ ID NO: 22389 - DNA, 201 bp, Homo sapiens; identical to SEQ ID NO: 22373

SEQ ID NO: 22390 - DNA, 201 bp, Homo sapiens; identical to SEQ ID NO: 22358

SEQ ID NO: 22391 - DNA, 201 bp, Homo sapiens; identical to SEQ ID NO: 22359

SEQ ID NO: 22392 - DNA, 201 bp, Homo sapiens; identical to SEQ ID NO: 22360

SEQ ID NO: 22393 - DNA, 201 bp, Homo sapiens; identical to SEQ ID NO: 22361

SEQ ID NO: 22394 - DNA, 201 bp, Homo sapiens; identical to SEQ ID NO: 22362

SEQ ID NO: 22395 - DNA, 201 bp, Homo sapiens
ggcttcggcgaaagggtccgtcctttgcagacatggaggtcctgtactggacacacgtgaaggagcagttggaaactctccggaagctgcagaggagggaygtggctgagcagtggctgcggcctgcagaggaggaccacctggaggattccctggaagacctgggggcagcagatgactttctagagcctgaggagtaca

SEQ ID NO: 22396 - DNA, 201 bp, Homo sapiens; identical to SEQ ID NO: 22364

SEQ ID NO: 22397 - DNA, 128 bp, Homo sapiens; identical to SEQ ID NO: 22365

SEQ ID NO: 22398 - DNA, 201 bp, Homo sapiens; identical to SEQ ID NO: 22366

SEQ ID NO: 22399 - DNA, 201 bp, Homo sapiens; identical to SEQ ID NO: 22367

SEQ ID NO: 22400 - DNA, 201 bp, Homo sapiens; identical to SEQ ID NO: 22352

SEQ ID NO: 22401 - DNA, 201 bp, Homo sapiens; identical to SEQ ID NO: 22353

SEQ ID NO: 22402 - DNA, 201 bp, Homo sapiens; identical to SEQ ID NO: 22354

SEQ ID NO: 22403 - DNA, 201 bp, Homo sapiens; identical to SEQ ID NO: 22371

SEQ ID NO: 22404 - DNA, 126 bp, Homo sapiens; identical to SEQ ID NO: 22356

SEQ ID NO: 22405 - DNA, 201 bp, Homo sapiens; identical to SEQ ID NO: 22373

SEQ ID NO: 22406 - DNA, 201 bp, Homo sapiens; identical to SEQ ID NO: 22358

SEQ ID NO: 22407 - DNA, 201 bp, Homo sapiens; identical to SEQ ID NO: 22359

SEQ ID NO: 22408 - DNA, 201 bp, Homo sapiens; identical to SEQ ID NO: 22360

SEQ ID NO: 22409 - DNA, 201 bp, Homo sapiens; identical to SEQ ID NO: 22361

SEQ ID NO: 22410 - DNA, 201 bp, Homo sapiens; identical to SEQ ID NO: 22362

SEQ ID NO: 22411 - DNA, 201 bp, Homo sapiens; identical to SEQ ID NO: 22363

SEQ ID NO: 22412 - DNA, 201 bp, Homo sapiens; identical to SEQ ID NO: 22364

SEQ ID NO: 22413 - DNA, 128 bp, Homo sapiens; identical to SEQ ID NO: 22365

SEQ ID NO: 22414 - DNA, 201 bp, Homo sapiens; identical to SEQ ID NO: 22366

SEQ ID NO: 22415 - DNA, 201 bp, Homo sapiens; identical to SEQ ID NO: 22367

SEQ ID NO: 22416 - DNA, 201 bp, Homo sapiens; identical to SEQ ID NO: 22352

SEQ ID NO: 22417 - DNA, 201 bp, Homo sapiens; identical to SEQ ID NO: 22353

SEQ ID NO: 22418 - DNA, 201 bp, Homo sapiens; identical to SEQ ID NO: 22354

SEQ ID NO: 22419 - DNA, 201 bp, Homo sapiens; identical to SEQ ID NO: 22371

SEQ ID NO: 22420 - DNA, 126 bp, Homo sapiens; identical to SEQ ID NO: 22356

SEQ ID NO: 22421 - DNA, 201 bp, Homo sapiens; identical to SEQ ID NO: 22373

SEQ ID NO: 22422 - DNA, 201 bp, Homo sapiens; identical to SEQ ID NO: 22358

SEQ ID NO: 22423 - DNA, 201 bp, Homo sapiens; identical to SEQ ID NO: 22359

SEQ ID NO: 22424 - DNA, 201 bp, Homo sapiens; identical to SEQ ID NO: 22360

SEQ ID NO: 22425 - DNA, 201 bp, Homo sapiens; identical to SEQ ID NO: 22361

SEQ ID NO: 22426 - DNA, 201 bp, Homo sapiens; identical to SEQ ID NO: 22362

SEQ ID NO: 22427 - DNA, 201 bp, Homo sapiens; identical to SEQ ID NO: 22363

SEQ ID NO: 22428 - DNA, 201 bp, Homo sapiens; identical to SEQ ID NO: 22364

SEQ ID NO: 22429 - DNA, 128 bp, Homo sapiens; identical to SEQ ID NO: 22365

SEQ ID NO: 22430 - DNA, 201 bp, Homo sapiens; identical to SEQ ID NO: 22366

SEQ ID NO: 22431 - DNA, 201 bp, Homo sapiens; identical to SEQ ID NO: 22367

SEQ ID NO: 22432 - DNA, 201 bp, Homo sapiens
tcgtgggcaccctccacctgctgctgctggtggccgccctgccctgggcatccaggggggtcagtccgagtgcctcagcctggccagaggagaagaattaycaccagccagccattttgaattcatcggctcttcggcaaattgcagaaggcaccagtatctctgaaatgtggcaaaatgacttacagccattgctgatag

SEQ ID NO: 22433 - DNA, 201 bp, Homo sapiens
gaagtctggcacaccatggatgacaatgaagaaaatttggatgaatcaaccattgacaatctaaacaaaatcctacaagtctttgtgttggaatatcttcmtttgtaatactctgatttagtttaggataattggttctagaattgaattcaaaagtcaaggcatcatttaaaataatctgatttcagacaaatgctgtgt

SEQ ID NO: 22434 - DNA, 201 bp, Homo sapiens
tttccagaattacagttatggaggtgtgattcaggatgaccatattccatttttaagaagaggtgttccagttctgcatctgataccgtctcctttccctraagtctggcacaccatggatgacaatgaagaaaatttggatgaatcaaccattgacaatctaaacaaaatcctacaagtctttgtgttggaatatcttca

SEQ ID NO: 22435 - DNA, 201 bp, Homo sapiens
atgaagaaaatttggatgaatcaaccattgacaatctaaacaaaatcctacaagtctttgtgttggaatatcttcatttgtaatactctgatttagtttakgataattggttctagaattgaattcaaaagtcaaggcatcatttaaaataatctgatttcagacaaatgctgtgtggaaacatctatcctatagatcatc

SEQ ID NO: 22436 - DNA, 201 bp, Homo sapiens
caagcacctaggacggtgcctggtgccgtgttcagcagacgtcgattccctgtccaccccttctttaggagctgtgggaaacacttcataactccccaggrtctggtgaacccttcctcccttttctgttccctgttttggcattggagatcataaaaaggctcttccatgtctcttgcttccttcctttcatcttctcca

SEQ ID NO: 22437 - DNA, 201 bp, Homo sapiens
cgccctgccctgggcatccaggggggtcagtccgagtgcctcagcctggccagaggagaagaattaccaccagccagccattttgaattcatcggctcttyggcaaattgcagaaggcaccagtatctctgaaatgtggcaaaatgacttacagccattgctgatagagcgatacccgggatcccctggaagctatgctgc

SEQ ID NO: 22438 - DNA, 201 bp, Homo sapiens
tctttctcaaatatcatcagcaccctcaatcccactgctaaacgacatttggtcctcgcctgccactatgactccaagtatttttcccactggaacaacasagtgtttgtaggagccactgattcagccgtgccatgtgcaatgatgttggaacttgctcgtgccttagacaagaaactcctttccttaaagactgtttca

SEQ ID NO: 22439 - DNA, 201 bp, Homo sapiens
catgtctcttgcttccttcctttcatcttctccaagagaaggaagtggccgcctttgttagcttgggttcagaagcttgtgtctgtcacccagggccgccyagccccggggtttgcgaaggtccggggtaggagggctgcagcctgcgcgacgcggcgggaggctacccggaggcgatgggaaggcgggcgcagtcgaccc

SEQ ID NO: 22440 - DNA, 201 bp, Homo sapiens
ttgctcattaatttttatttacagattgaaaaagagggaccgtgtaaagaaaatggaaaataaatatctttcaaagttcattcattcaacgatagtttctmaacagtacttaaatagcggttggaaaacgtagccttcattttatgattttttcatatgtggaaatctattacatgtaatacaaaacaaacatgtagtttg

SEQ ID NO: 22441 - DNA, 201 bp, Homo sapiens; identical to SEQ ID NO: 22432

SEQ ID NO: 22442 - DNA, 201 bp, Homo sapiens; identical to SEQ ID NO: 22433

SEQ ID NO: 22443 - DNA, 201 bp, Homo sapiens; identical to SEQ ID NO: 22434

SEQ ID NO: 22444 - DNA, 201 bp, Homo sapiens; identical to SEQ ID NO: 22435

SEQ ID NO: 22445 - DNA, 201 bp, Homo sapiens; identical to SEQ ID NO: 22436

SEQ ID NO: 22446 - DNA, 201 bp, Homo sapiens; identical to SEQ ID NO: 22438

SEQ ID NO: 22447 - DNA, 201 bp, Homo sapiens; identical to SEQ ID NO: 22437

SEQ ID NO: 22448 - DNA, 201 bp, Homo sapiens; identical to SEQ ID NO: 22439

SEQ ID NO: 22449 - DNA, 201 bp, Homo sapiens
gggaccgtgtaaagaaaatggaaaataaatatctttcaaagactcttttagataaacacgatgaggcaaaatcaggttcattcattcaacgatagtttctmaacagtacttaaatagcggttggaaaacgtagccttcattttatgattttttcatatgtggaaatctattacatgtaatacaaaacaaacatgtagtttg

SEQ ID NO: 22450 - DNA, 201 bp, Homo sapiens; identical to SEQ ID NO: 22432

SEQ ID NO: 22451 - DNA, 201 bp, Homo sapiens; identical to SEQ ID NO: 22433

SEQ ID NO: 22452 - DNA, 201 bp, Homo sapiens; identical to SEQ ID NO: 22434

SEQ ID NO: 22453 - DNA, 201 bp, Homo sapiens; identical to SEQ ID NO: 22435

SEQ ID NO: 22454 - DNA, 201 bp, Homo sapiens; identical to SEQ ID NO: 22436

SEQ ID NO: 22455 - DNA, 201 bp, Homo sapiens; identical to SEQ ID NO: 22437

SEQ ID NO: 22456 - DNA, 201 bp, Homo sapiens; identical to SEQ ID NO: 22438

SEQ ID NO: 22457 - DNA, 201 bp, Homo sapiens; identical to SEQ ID NO: 22439

SEQ ID NO: 22458 - DNA, 201 bp, Homo sapiens; identical to SEQ ID NO: 22449

SEQ ID NO: 22459 - DNA, 201 bp, Homo sapiens; identical to SEQ ID NO: 22433

SEQ ID NO: 22460 - DNA, 201 bp, Homo sapiens; identical to SEQ ID NO: 22434

SEQ ID NO: 22461 - DNA, 201 bp, Homo sapiens; identical to SEQ ID NO: 22435

SEQ ID NO: 22462 - DNA, 201 bp, Homo sapiens; identical to SEQ ID NO: 22438

SEQ ID NO: 22463 - DNA, 140 bp, Homo sapiens
cttgggttcagaagcttgtgtctgtcacccagggccgccyagccccggggtttgcgaaggtccggggtaggagggctgcagcctgcgcgacgcggcgggaggctacccggaggcgatgggaaggcgggcgcagtcgaccc

SEQ ID NO: 22464 - DNA, 201 bp, Homo sapiens; identical to SEQ ID NO: 22449

SEQ ID NO: 22465 - DNA, 201 bp, Homo sapiens
tccatggaggtgcagagataaggccccagacattttggcccagtatgggacaactttgaccgtctttttcagcttcaggactcccatggagttggaattaycaccagccagccattttgaattcatcggctcttcggcaaattgcagaaggcaccagtatctctgaaatgtggcaaaatgacttacagccattgctgatag

SEQ ID NO: 22466 - DNA, 201 bp, Homo sapiens; identical to SEQ ID NO: 22433

SEQ ID NO: 22467 - DNA, 201 bp, Homo sapiens; identical to SEQ ID NO: 22434

SEQ ID NO: 22468 - DNA, 201 bp, Homo sapiens; identical to SEQ ID NO: 22435

SEQ ID NO: 22469 - DNA, 163 bp, Homo sapiens
cactccatggaggtgcagagataaggccccagacattttggcccagtatgggacaactttgaycgtctttttcagcttcaggactcccatggagttggaattaccaccagccagccattttgaattcatcggctcttcggcaaattgcagaaggcaccagtat

SEQ ID NO: 22470 - DNA, 201 bp, Homo sapiens; identical to SEQ ID NO: 22438

SEQ ID NO: 22471 - DNA, 201 bp, Homo sapiens
ttggcccagtatgggacaactttgaccgtctttttcagcttcaggactcccatggagttggaattaccaccagccagccattttgaattcatcggctcttyggcaaattgcagaaggcaccagtatctctgaaatgtggcaaaatgacttacagccattgctgatagagcgatacccgggatcccctggaagctatgctgc

SEQ ID NO: 22472 - DNA, 201 bp, Homo sapiens; identical to SEQ ID NO: 22449

SEQ ID NO: 22473 - DNA, 201 bp, Homo sapiens; identical to SEQ ID NO: 22432

SEQ ID NO: 22474 - DNA, 201 bp, Homo sapiens; identical to SEQ ID NO: 22433

SEQ ID NO: 22475 - DNA, 201 bp, Homo sapiens; identical to SEQ ID NO: 22434

SEQ ID NO: 22476 - DNA, 201 bp, Homo sapiens; identical to SEQ ID NO: 22435

SEQ ID NO: 22477 - DNA, 201 bp, Homo sapiens; identical to SEQ ID NO: 22436

SEQ ID NO: 22478 - DNA, 201 bp, Homo sapiens; identical to SEQ ID NO: 22437

SEQ ID NO: 22479 - DNA, 201 bp, Homo sapiens; identical to SEQ ID NO: 22438

SEQ ID NO: 22480 - DNA, 201 bp, Homo sapiens; identical to SEQ ID NO: 22439

SEQ ID NO: 22481 - DNA, 201 bp, Homo sapiens
gctcattaatttttatttacagattgaaaaagagggaccgtgtaaagaaaatggaaaataaatatctttcaaagagttcattcattcaacgatagtttctmaacagtacttaaatagcggttggaaaacgtagccttcattttatgattttttcatatgtggaaatctattacatgtaatacaaaacaaacatgtagtttg

SEQ ID NO: 22482 - DNA, 201 bp, Homo sapiens
catttctttttaaataaagcaggatacctctatatgtcagccttgccttgttcagatgccaggagccggcagacctgtcacccgcaggtggggtgagtctyggagctgccagaggggctcaccgaaatcggggttccatcacaagctatgtttaaaaagaaaattggtgtttggcaaacggaacagaacctttgatgagag

SEQ ID NO: 22483 - DNA, 201 bp, Homo sapiens
tttggacccagattcgttccagcatctcccgaagctcgagaggctatttttgcataacaaccggattacacatttagttccagggacatttaatcacttgraatctatgaagagattgcgactggactcaaacacacttcactgcgactgtgaaatcctgtggttggcggatttgctgaaaacctacgcggagtcggggaa

SEQ ID NO: 22484 - DNA, 201 bp, Homo sapiens
tatcatttccgaggcagacggtctcttgagttcagctaccaggaggacaagccgaccaagaaaacaagaccacggaaaatacccagtgttgggagacaggrggaacatctcagcaacagcacctcagccttcagcacacgctcagatgcatctgggacaaatgacttcagagagtttgttctggaaatgcagaagaccatc

SEQ ID NO: 22485 - DNA, 201 bp, Homo sapiens
gctccttccacacctgattagaacattcataagccacatttagaaacagatttgctttcagctgtcacttgcacacatactgcctagttgtgaaccaaatsgtgtgtgttgacaacgccgctcccagccggccctggttgcgtccacgtcctgaacaagagccgcttccggatggctcttcccaagggaggaggagctcaa

SEQ ID NO: 22486 - DNA, 201 bp, Homo sapiens
tgaccatcaatgacgttggccctgcagacgcaggtcgctatgagtgtgtggcccggaacaccattgggtcggcctcggtgagcatggtgctcagtgtgaaygttcctgacgtcagtcgaaatggagatccgtttgtagctacctccatcgtggaagcgattgcgactgttgacagagctataaactcaacccgaacacatt

SEQ ID NO: 22487 - DNA, 201 bp, Homo sapiens
cctgccacctgtgctgtccccgtgaacatcccaggggcctgctgtccagtctgcttacagaagagggcggaggaaaagccctaggctcctgggaggctcckcagagtttgtctgctgtgccatcgtgagatcgggtggccgatggcagggagctgcggactgcagaccaggaaacacccagaactcgtgacatttcatgac

SEQ ID NO: 22488 - DNA, 201 bp, Homo sapiens
accccccctgcttctctgtcatgatcccccccaatgactcccgggccaggagcggggcccgctgcatgttcttcgtgcgctccagccctgtgtgcggcagyggcatgacttcgctgctcatgaactccgtgtacccgcgggagcagatcaaccagctcacctcctacatcgacgcatccaacgtgtacgggagcacggagc

SEQ ID NO: 22489 - DNA, 201 bp, Homo sapiens
gggtctactgcaatctatcggcggcacacacgttcgaggacctgaaaaatgagattaaaaaccctgagatccgggagaaactgaaaaggttgtatggctckacactcaacatcgacctgtttccggcgctcgtggtggaggacctggtgcctggcagccggctgggccccaccctgatgtgtcttctcagcacacagttca

SEQ ID NO: 22490 - DNA, 201 bp, Homo sapiens
cttcacgttagacttctcaggtttttatttaattcttttaaaatgaaaaattggtgctactattaaattgcacagttgaatcatttaggcgcctaaattgrttttgcctcccaacaccatttctttttaaataaagcaggatacctctatatgtcagccttgccttgttcagatgccaggagccggcagacctgtcacccg

SEQ ID NO: 22491 - DNA, 201 bp, Homo sapiens
tcttttgaaatagcaagtcaaatgtagtgaccaaattgtggaagagatttcaaaaaaaattctgtaattcaaaccaaaatgtctgcggaatcaccagtttratactctctgtaatcagaacagtgggcagtgcctgggtgaacgtgtctagcagccactgtgcgggatcgctgtaacaggagtggaatgtacatatttatt

SEQ ID NO: 22492 - DNA, 201 bp, Homo sapiens
acctcagaacacagataaagaaacttgaatcacggctcagtaccacagagtgcgtggatgccgggggcgaatctcacgccaacaacaccaagtggaaaaargatgcatgcaccatttgtgaatgcaaagacgggcaggtcacctgcttcgtggaagcttgcccccctgccacctgtgctgtccccgtgaacatcccagggg

SEQ ID NO: 22493 - DNA, 201 bp, Homo sapiens
catttcaccacacgtcagcatctaatcccaagacaaacattcccgctgctcgaagcagctgtatagcctgtgactctccgtgtgtcagctccttccacacytgattagaacattcataagccacatttagaaacagatttgctttcagctgtcacttgcacacatactgcctagttgtgaaccaaatggtgtgtgttgaca

SEQ ID NO: 22494 - DNA, 201 bp, Homo sapiens
gccaccgcggcctgctgcggcagggcatcgtgcagcggtccgggaagccgctgctccccttcgccaccgggccgcccacggagtgcatgcgggacgagaaygagagccccatcccctgcttcctggccggggaccaccgcgccaacgagcagctgggcctgaccagcatgcacacgctgtggttccgcgagcacaaccgca

SEQ ID NO: 22495 - DNA, 201 bp, Homo sapiens
ctcttcctcagttcactgtgacgcctcaggacagagtcgttattgagggccagaccgtggatttccagtgtgaagccaagggcaacccgccgcccgtcatygcctggaccaagggagggagccagctctccgtggaccggcggcacctggtcctgtcatcgggaacacttagaatctctggtgttgccctccacgaccagg

SEQ ID NO: 22496 - DNA, 201 bp, Homo sapiens
taccaggaggacaagccgaccaagaaaacaagaccacggaaaatacccagtgttgggagacagggggaacatctcagcaacagcacctcagccttcagcayacgctcagatgcatctgggacaaatgacttcagagagtttgttctggaaatgcagaagaccatcacagacctcagaacacagataaagaaacttgaatca

SEQ ID NO: 22497 - DNA, 201 bp, Homo sapiens
acattcccgctgctcgaagcagctgtatagcctgtgactctccgtgtgtcagctccttccacacctgattagaacattcataagccacatttagaaacagrtttgctttcagctgtcacttgcacacatactgcctagttgtgaaccaaatggtgtgtgttgacaacgccgctcccagccggccctggttgcgtccacgtc

SEQ ID NO: 22498 - DNA, 201 bp, Homo sapiens
tcttcgtgcgctccagccctgtgtgcggcagcggcatgacttcgctgctcatgaactccgtgtacccgcgggagcagatcaaccagctcacctcctacatmgacgcatccaacgtgtacgggagcacggagcatgaggcccgcagcatccgcgacctggccagccaccgcggcctgctgcggcagggcatcgtgcagcggt

SEQ ID NO: 22499 - DNA, 201 bp, Homo sapiens
gtccacgtcctgaacaagagccgcttccggatggctcttcccaagggaggaggagctcaagtgtcgggaactgtctaacttcaggttgtgtgagtgcgttaaaaaaaaaaaaaaaaaaagaatccctatacctcatttgtatttttaaaatgcgtgatgttttatgaaattgtgtccattttttaggtattagatatggca

SEQ ID NO: 22500 - DNA, 201 bp, Homo sapiens
ctactatgagaccaggaagatcgtgggtgcggagatccagcacatcacctaccagcactggctcccgaagatcctgggggaggtgggcatgaggacgctgrgagagtaccacggctacgaccccggcatcaatgctggcatcttcaacgccttcgccaccgcggccttcaggtttggccacacgcttgtcaacccactgct

SEQ ID NO: 22501 - DNA, 201 bp, Homo sapiens
ttgccacggagctgctcaagctgaacccgcactgggacggcgacaccatctactatgagaccaggaagatcgtgggtgcggagatccagcacatcacctaycagcactggctcccgaagatcctgggggaggtgggcatgaggacgctgggagagtaccacggctacgaccccggcatcaatgctggcatcttcaacgcct

SEQ ID NO: 22502 - DNA, 201 bp, Homo sapiens
cagattcccgcctaaacttgctggacgatgggaccctgatgatccagaacacacaggagacagaccagggtatctaccagtgcatggcaaagaacgtggcyggagaggtgaagacgcaagaggtgaccctcaggtacttcgggtctccagctcgacccacttttgtaatccagccacagaatacagaggtgctggttgggg

SEQ ID NO: 22503 - DNA, 201 bp, Homo sapiens; identical to SEQ ID NO: 22482

SEQ ID NO: 22504 - DNA, 201 bp, Homo sapiens; identical to SEQ ID NO: 22483

SEQ ID NO: 22505 - DNA, 201 bp, Homo sapiens; identical to SEQ ID NO: 22484

SEQ ID NO: 22506 - DNA, 201 bp, Homo sapiens
gctttcagctgtcacttgcacacatactgcctagttgtgaaccaaatgtgaaaaaacctccttcatcccattgtgtatctgatacctgccgagggccaagsgtgtgtgttgacaacgccgctcccagccggccctggttgcgtccacgtcctgaacaagagccgcttccggatggctcttcccaagggaggaggagctcaa

SEQ ID NO: 22507 - DNA, 201 bp, Homo sapiens; identical to SEQ ID NO: 22486

SEQ ID NO: 22508 - DNA, 201 bp, Homo sapiens; identical to SEQ ID NO: 22487

SEQ ID NO: 22509 - DNA, 201 bp, Homo sapiens; identical to SEQ ID NO: 22488

SEQ ID NO: 22510 - DNA, 201 bp, Homo sapiens; identical to SEQ ID NO: 22489

SEQ ID NO: 22511 - DNA, 201 bp, Homo sapiens; identical to SEQ ID NO: 22490

SEQ ID NO: 22512 - DNA, 201 bp, Homo sapiens
acaaggaattgtgttgtctaagccaaagggggaagctgactgtgatttaccaaaaaaaattctgtaattcaaaccaaaatgtctgcggaatcaccagtttratactctctgtaatcagaacagtgggcagtgcctgggtgaacgtgtctagcagccactgtgcgggatcgctgtaacaggagtggaatgtacatatttatt

SEQ ID NO: 22513 - DNA, 201 bp, Homo sapiens; identical to SEQ ID NO: 22492

SEQ ID NO: 22514 - DNA, 201 bp, Homo sapiens
catttcaccacacgtcagcatctaatcccaagacaaacattcccgctgctcgaagcagctgtatagcctgtgactctccgtgtgtcagctccttccacacytgattagaacattcataagccacatttagaaacagatttgctttcagctgtcacttgcacacatactgcctagttgtgaaccaaatgtgaaaaaacctcc

SEQ ID NO: 22515 - DNA, 201 bp, Homo sapiens; identical to SEQ ID NO: 22494

SEQ ID NO: 22516 - DNA, 201 bp, Homo sapiens; identical to SEQ ID NO: 22495

SEQ ID NO: 22517 - DNA, 201 bp, Homo sapiens; identical to SEQ ID NO: 22496

SEQ ID NO: 22518 - DNA, 201 bp, Homo sapiens
acattcccgctgctcgaagcagctgtatagcctgtgactctccgtgtgtcagctccttccacacctgattagaacattcataagccacatttagaaacagrtttgctttcagctgtcacttgcacacatactgcctagttgtgaaccaaatgtgaaaaaacctccttcatcccattgtgtatctgatacctgccgagggcc

SEQ ID NO: 22519 - DNA, 201 bp, Homo sapiens; identical to SEQ ID NO: 22498

SEQ ID NO: 22520 - DNA, 201 bp, Homo sapiens; identical to SEQ ID NO: 22499

SEQ ID NO: 22521 - DNA, 201 bp, Homo sapiens; identical to SEQ ID NO: 22500

SEQ ID NO: 22522 - DNA, 201 bp, Homo sapiens; identical to SEQ ID NO: 22501

SEQ ID NO: 22523 - DNA, 201 bp, Homo sapiens; identical to SEQ ID NO: 22502

SEQ ID NO: 22524 - DNA, 201 bp, Homo sapiens
ccattgcagttcagaaactggagagcttggaggacgatgatgttctgcattaccttctacaattggtccaggctgtgaaatttgaaccataccatgatagygcccttgccagatttctgctgaagcgtggtttaagaaacaaaagaattggtcactttttgttttggttcttgagaagtgagatagcccagtccagacact

SEQ ID NO: 22525 - DNA, 201 bp, Homo sapiens
tctcaattttggttatctttgtgttcctcaagctctttaaagaaaaagatgtaatcgttgtaacctttgtctcattccttaaatgatgcttccaaacatckccttagtgtctgcaggtgttagtggtgtgctaaaagcaaggaaagcgagttagtcttttcagtgtcttttgcaattcaattcttttgtcatgtataactg

SEQ ID NO: 22526 - DNA, 201 bp, Homo sapiens
agctttctccagcatggcagcaggaagtaactacagggcctcttttatgcctgacatttcttcccttcctttttccctgcctccctttttcatcaattgcratgctcccacaactctttacagacttgtgaaatcttcaagaacacctttactctataactcaaaaattagttgaaaaataattacttctcaaggattatt

SEQ ID NO: 22527 - DNA, 201 bp, Homo sapiens
ttccttaaatgatgcttccaaacatctccttagtgtctgcaggtgttagtggtgtgctaaaagcaaggaaagcgagttagtcttttcagtgtcttttgcarttcaattcttttgtcatgtataactgagacacacaaacacagcaggagaaatctaaaccgttgtgccttgaccttcctctgctggtcttgttccagggtt

SEQ ID NO: 22528 - DNA, 201 bp, Homo sapiens
cttaaaaatattccaagttaggaagaacactacttgccttatccatttcccatttaaaggacttttaaactttgacacatccttcagatttcctgaaaatmattgaaatatcttactttaaaaatattttcatctctgaaatatctcgttatttattggaggtattgtttaaccttagagagaccattaaattatttataa

SEQ ID NO: 22529 - DNA, 201 bp, Homo sapiens
cttatcagcctgggcaacacagtgagactccatctcttaaaaaaaaaattagctgggtatagtggtatgtgcctgtagtcccaggtactcaggaggctgasgcaggaggattgcctgagcccaggaggtggaaactgcagagagtcatgatcatgtccttacactccagcctggataacagagcgagaccctgtctcaaaa

SEQ ID NO: 22530 - DNA, 201 bp, Homo sapiens
agtgggtgaggcactgcctcaagaacggagaagagattcacgtggtactggacacgcctccagacccggccctagacgaggtgaggaaggaagagtggccrctggtggacgactgcacgggagtcaccggctaccatgagcagcttaccatccacggcaaggaccacgagagtgtgttcaccgtgtccctgtgggactgcg

SEQ ID NO: 22531 - DNA, 201 bp, Homo sapiens
ttaaaaatattccaagttaggaagaacactacttgccttatccatttcccatttaaaggacttttaaactttgacacatccttcagatttcctgaaaatamttgaaatatcttactttaaaaatattttcatctctgaaatatctcgttatttattggaggtattgtttaaccttagagagaccattaaattatttataaa

SEQ ID NO: 22532 - DNA, 201 bp, Homo sapiens
ggcactgcctcaagaacggagaagagattcacgtggtactggacacgcctccagacccggccctagacgaggtgaggaaggaagagtggccgctggtggaygactgcacgggagtcaccggctaccatgagcagcttaccatccacggcaaggaccacgagagtgtgttcaccgtgtccctgtgggactgcgaccgcaagt

SEQ ID NO: 22533 - DNA, 201 bp, Homo sapiens
tccttcagatttcctgaaaataattgaaatatcttactttaaaaatattttcatctctgaaatatctcgttatttattggaggtattgtttaaccttagakagaccattaaattatttataaaatattttgtaattacctgtagctaatacattacatagaaaaaaactatgttaacagtgtctctgtttaagtataatca

SEQ ID NO: 22534 - DNA, 201 bp, Homo sapiens
tatgttaacagtgtctctgtttaagtataatcagatataaatatatacttaattttttaattttaaaaatagatacctgtttgactttgaggtagtccagrccttttctttttttttttttttttaatgtgtgcaaaagcccaaaggttcctaagcctggctgcaaagaagaatcaacagggacactttttaaaaacactc

SEQ ID NO: 22535 - DNA, 201 bp, Homo sapiens
agtgtctctgtttaagtataatcagatataaatatatacttaattttttaattttaaaaatagatacctgtttgactttgaggtagtccagaccttttctytttttttttttttttaatgtgtgcaaaagcccaaaggttcctaagcctggctgcaaagaagaatcaacagggacactttttaaaaacactcttatcagcc

SEQ ID NO: 22536 - DNA, 201 bp, Homo sapiens
ctgtggaatgtgtggcttgagttcagtatcaaaatcaaagacttgcccaaaggggctctactgaacctccagatctactgcggtaaagctccagcactgtmcagcaaggcctctgcagagtcccccagttctgagtccaagggcaaagttcagcttctctattatgtgaacctgctgctgatagaccaccgtttcctcctg

SEQ ID NO: 22537 - DNA, 201 bp, Homo sapiens
ctcaagaacggagaagagattcacgtggtactggacacgcctccagacccggccctagacgaggtgaggaaggaagagtggccgctggtggacgactgcaygggagtcaccggctaccatgagcagcttaccatccacggcaaggaccacgagagtgtgttcaccgtgtccctgtgggactgcgaccgcaagttcagggtc

SEQ ID NO: 22538 - DNA, 201 bp, Homo sapiens
atcagatataaatatatacttaattttttaattttaaaaatagatacctgtttgactttgaggtagtccagaccttttctttttttttttttttttaatgkgtgcaaaagcccaaaggttcctaagcctggctgcaaagaagaatcaacagggacactttttaaaaacactcttatcagcctgggcaacacagtgagactc

SEQ ID NO: 22539 - DNA, 201 bp, Homo sapiens
attgttggccagaagggaagtctgggatcaaagtgctttggatgttgggttaacaatgcagctcctggactgcaacttctcagatgaaaatgtaagagccrttgcagttcagaaactggagagcttggaggacgatgatgttctgcattaccttctacaattggtccaggctgtgaaatttgaaccataccatgatagcgc

SEQ ID NO: 22540 - DNA, 201 bp, Homo sapiens
gggaagggagaagaccaaggaagcttcaatgctgacaaactcacgtctgcaactaacccagacaaggagaactcaatgtccatctccattcttctggacarttactgccacccgatagccctgcctaagcatcagcccacccctgacccggaaggggaccgggttcgagcagaaatgcccaaccagcttcgcaagcaattg

SEQ ID NO: 22541 - DNA, 201 bp, Homo sapiens
atgatccttcagcatcatcgcctccgctgctttatcaggtcgcatagggcatggagctggagaactataaacagcccgtggtgctgagagaggacaactgycgaaggcgccggaggatgaagccgcgcagtgctgcggccagcctgtcctccatggagctcatccccatcgagttcgtgctgcccaccagccagcgcaaat

SEQ ID NO: 22542 - DNA, 201 bp, Homo sapiens
gctggtggacgactgcacgggagtcaccggctaccatgagcagcttaccatccacggcaaggaccacgagagtgtgttcaccgtgtccctgtgggactgckaccgcaagttcagggtcaagatcagaggcattgatatccccgtcctgcctcggaacaccgacctcacagtttttgtagaggcaaacatccagcatgggca

SEQ ID NO: 22543 - DNA, 201 bp, Homo sapiens
gcagtttaattggtttctacatcttgttcttggcatcaaacaaggagagaaacattcagcctaatactttaggctagaatcaaaaacaagttagtgttctrtggtttaaattagcatagcaatcatcgaacttggatttcaaatgcaatagacattgtgaaagctggcatttcagaagtatagctcttttcctacctgaac

SEQ ID NO: 22544 - DNA, 201 bp, Homo sapiens
atgttggcattgctgattgtttggttaagcaatgtccagtgctaggattatttgcaggtttggttttttctcatttgtctgtggcattggagaatattctyggtttaaacagactaatgacttccttattgtccctgatattttgactatcttactattgagtgcttctggaaattctttggaataattgatgacatctat

SEQ ID NO: 22545 - DNA, 201 bp, Homo sapiens
cagtgtctctgtttaagtataatcagatataaatatatacttaattttttaattttaaaaatagatacctgtttgactttgaggtagtccagaccttttctttttttttttttttttaatgtgtgcaaaagcccaaaggttcctaagcctggctgcaaagaagaatcaacagggacactttttaaaaacactcttatcagc

SEQ ID NO: 22546 - DNA, 201 bp, Homo sapiens
gacaaaggatggactgtgcagtttaattggtttctacatcttgttcttggcatcaaacaaggagagaaacattcagcctaatactttaggctagaatcaaraacaagttagtgttctatggtttaaattagcatagcaatcatcgaacttggatttcaaatgcaatagacattgtgaaagctggcatttcagaagtatagc

SEQ ID NO: 22547 - DNA, 201 bp, Homo sapiens; identical to SEQ ID NO: 22524

SEQ ID NO: 22548 - DNA, 201 bp, Homo sapiens; identical to SEQ ID NO: 22525

SEQ ID NO: 22549 - DNA, 201 bp, Homo sapiens; identical to SEQ ID NO: 22526

SEQ ID NO: 22550 - DNA, 201 bp, Homo sapiens; identical to SEQ ID NO: 22527

SEQ ID NO: 22551 - DNA, 201 bp, Homo sapiens; identical to SEQ ID NO: 22528

SEQ ID NO: 22552 - DNA, 201 bp, Homo sapiens; identical to SEQ ID NO: 22529

SEQ ID NO: 22553 - DNA, 201 bp, Homo sapiens; identical to SEQ ID NO: 22530

SEQ ID NO: 22554 - DNA, 201 bp, Homo sapiens; identical to SEQ ID NO: 22531

SEQ ID NO: 22555 - DNA, 201 bp, Homo sapiens; identical to SEQ ID NO: 22532

SEQ ID NO: 22556 - DNA, 201 bp, Homo sapiens; identical to SEQ ID NO: 22533

SEQ ID NO: 22557 - DNA, 201 bp, Homo sapiens; identical to SEQ ID NO: 22534

SEQ ID NO: 22558 - DNA, 201 bp, Homo sapiens; identical to SEQ ID NO: 22535

SEQ ID NO: 22559 - DNA, 201 bp, Homo sapiens; identical to SEQ ID NO: 22536

SEQ ID NO: 22560 - DNA, 201 bp, Homo sapiens; identical to SEQ ID NO: 22537

SEQ ID NO: 22561 - DNA, 201 bp, Homo sapiens; identical to SEQ ID NO: 22538

SEQ ID NO: 22562 - DNA, 201 bp, Homo sapiens; identical to SEQ ID NO: 22539

SEQ ID NO: 22563 - DNA, 201 bp, Homo sapiens; identical to SEQ ID NO: 22540

SEQ ID NO: 22564 - DNA, 201 bp, Homo sapiens
aggggaaagcttcatagcctcaaccatgaaggaaaccagtcgcatagggcatggagctggagaactataaacagcccgtggtgctgagagaggacaactgycgaaggcgccggaggatgaagccgcgcagtgctgcggccagcctgtcctccatggagctcatccccatcgagttcgtgctgcccaccagccagcgcaaat

SEQ ID NO: 22565 - DNA, 201 bp, Homo sapiens; identical to SEQ ID NO: 22542

SEQ ID NO: 22566 - DNA, 201 bp, Homo sapiens; identical to SEQ ID NO: 22543

SEQ ID NO: 22567 - DNA, 201 bp, Homo sapiens; identical to SEQ ID NO: 22544

SEQ ID NO: 22568 - DNA, 201 bp, Homo sapiens; identical to SEQ ID NO: 22545

SEQ ID NO: 22569 - DNA, 201 bp, Homo sapiens; identical to SEQ ID NO: 22546

SEQ ID NO: 22570 - DNA, 201 bp, Homo sapiens
atagaaagaaatttcttcatagacgtggtgatatatcatttgttggacctgctaatagtaggtcaaaggggagcactccttgccccctgttcctgggtttrtgcagttttctttttagagtttatatagggcaagtggttctttttctctgaattacaggatggaaaaaggtcatatcctttgtcaggaaatataaacttg

SEQ ID NO: 22571 - DNA, 201 bp, Homo sapiens
ttatgagtttctcatcaagatgaaagccctaatatgtaaagtcaaatccgatttaaattttgtgcttttatagaaagaaatttcttcatagacgtggtgayatatcatttgttggacctgctaatagtaggtcaaaggggagcactccttgccccctgttcctgggtttatgcagttttctttttagagtttatatagggc

SEQ ID NO: 22572 - DNA, 201 bp, Homo sapiens
acctcatgggcagaatattataaaaagagtgtcatattccagcatttgaattggaaagagaagagtgaagatccaagttgcattattaatctgccctgtgwtttttccttttaacaatcagtttgagctgctgctgttatgagtttctcatcaagatgaaagccctaatatgtaaagtcaaatccgatttaaattttgtgc

SEQ ID NO: 22573 - DNA, 201 bp, Homo sapiens
agccaggcaggccattagagttacttggggtgaaaaaaagtcttggtggggatatgaggttcttacatttttcttattaggccaagaggctgaaaaggaaracaaaatgttggcattgtccttagaggatgaacaccttctttatggtgacataatccgacaagattttttagacacatataataacctgaccttgaaaac

SEQ ID NO: 22574 - DNA, 201 bp, Homo sapiens
ttcttagctccctggacccggttgacctgttggctcttcccgctggctgctctatcacgtggtgctctccgactactcaccccgagtgtaaagaaccttcrgctcgcgtgcttctgagctgctgtggatggcctcggctctctggactgtccttccgagtaggatgtcactgagatccctcaaatggagcctcctgctgct

SEQ ID NO: 22575 - DNA, 122 bp, Homo sapiens
atagaaagaaatttcttcatagacgtggtgatatatcatttgttggacctgctaatagtaggtcaaaggggagcactccttgccccctgttcctgggtttrtgcagttttctttttagagtt

SEQ ID NO: 22576 - DNA, 191 bp, Homo sapiens
ttatgagtttctcatcaagatgaaagccctaatatgtaaagtcaaatccgatttaaattttgtgcttttatagaaagaaatttcttcatagacgtggtgayatatcatttgttggacctgctaatagtaggtcaaaggggagcactccttgccccctgttcctgggtttatgcagttttctttttagagtt

SEQ ID NO: 22577 - DNA, 201 bp, Homo sapiens; identical to SEQ ID NO: 22572

SEQ ID NO: 22578 - DNA, 182 bp, Homo sapiens
gtagatagtcagatgtcttttgaaaatgtgttttcggtgtggaatattaacccaatctttgataactcttccagaaccttcrgctcgcgtgcttctgagctgctgtggatggcctcggctctctggactgtccttccgagtaggatgtcactgagatccctcaaatggagcctcctgctgct

SEQ ID NO: 22579 - DNA, 201 bp, Homo sapiens; identical to SEQ ID NO: 22573

SEQ ID NO: 22580 - DNA, 201 bp, Homo sapiens; identical to SEQ ID NO: 22570

SEQ ID NO: 22581 - DNA, 201 bp, Homo sapiens; identical to SEQ ID NO: 22571

SEQ ID NO: 22582 - DNA, 201 bp, Homo sapiens; identical to SEQ ID NO: 22572

SEQ ID NO: 22583 - DNA, 102 bp, Homo sapiens
arggagagaacgccggccaccttcccgcttccgagctgggtgcgcgccgagcacaggagggtgcaatacctgccttgcgtcgcccgtgccgctccagccacc

SEQ ID NO: 22584 - DNA, 201 bp, Homo sapiens; identical to SEQ ID NO: 22573

SEQ ID NO: 22585 - DNA, 201 bp, Homo sapiens
agtacagtggcaggatctcagctcactgcaatctccgtctctcaggtttaagcagttctcctgcctcagcctcccaagtaggtgggactacagaaccttcrgctcgcgtgcttctgagctgctgtggatggcctcggctctctggactgtccttccgagtaggatgtcactgagatccctcaaatggagcctcctgctgct

SEQ ID NO: 22586 - DNA, 201 bp, Homo sapiens; identical to SEQ ID NO: 22570

SEQ ID NO: 22587 - DNA, 201 bp, Homo sapiens; identical to SEQ ID NO: 22571

SEQ ID NO: 22588 - DNA, 201 bp, Homo sapiens; identical to SEQ ID NO: 22572

SEQ ID NO: 22589 - DNA, 135 bp, Homo sapiens
gcgtgcggatgcggggaggctgcgtgtgtgcgcarggagagaacgccggccaccttcccgcttccgagctgggtgcgcgccgagcacaggagattgcctgcgtttaggaggtggctgcgttgtgggaaaagctat

SEQ ID NO: 22590 - DNA, 201 bp, Homo sapiens; identical to SEQ ID NO: 22573

SEQ ID NO: 22591 - DNA, 201 bp, Homo sapiens; identical to SEQ ID NO: 22574

SEQ ID NO: 22592 - DNA, 201 bp, Homo sapiens; identical to SEQ ID NO: 22570

SEQ ID NO: 22593 - DNA, 201 bp, Homo sapiens; identical to SEQ ID NO: 22571

SEQ ID NO: 22594 - DNA, 201 bp, Homo sapiens; identical to SEQ ID NO: 22572

SEQ ID NO: 22595 - DNA, 102 bp, Homo sapiens; identical to SEQ ID NO: 22583

SEQ ID NO: 22596 - DNA, 201 bp, Homo sapiens; identical to SEQ ID NO: 22573

SEQ ID NO: 22597 - DNA, 201 bp, Homo sapiens; identical to SEQ ID NO: 22574

SEQ ID NO: 22598 - DNA, 201 bp, Homo sapiens; identical to SEQ ID NO: 22570

SEQ ID NO: 22599 - DNA, 201 bp, Homo sapiens; identical to SEQ ID NO: 22571

SEQ ID NO: 22600 - DNA, 201 bp, Homo sapiens; identical to SEQ ID NO: 22572

SEQ ID NO: 22601 - DNA, 135 bp, Homo sapiens; identical to SEQ ID NO: 22589

SEQ ID NO: 22602 - DNA, 201 bp, Homo sapiens; identical to SEQ ID NO: 22573

SEQ ID NO: 22603 - DNA, 201 bp, Homo sapiens; identical to SEQ ID NO: 22574

SEQ ID NO: 22604 - DNA, 201 bp, Homo sapiens
cgttgcctcccagccctctgtatccacctggttttgttctttccctgtgagcatttgtggttatagcttcccatatgccacattcaccggccacctcctcrccgtggaaccctgccctctcccctcctgctgctgtagagttttcccaaagcagtgtccaggagagaatttgagagagtgaagaaattgccttgtagatgt

SEQ ID NO: 22605 - DNA, 201 bp, Homo sapiens
ctcccctcctgctgctgtagagttttcccaaagcagtgtccaggagagaatttgagagagtgaagaaattgccttgtagatgtggagggctgcaatctgtyttgatttctccaagcacttaactttctttgactgcactgagaattgctaatgatttcccatgagatttgcttacttttgtatactgtattttccagcatt

SEQ ID NO: 22606 - DNA, 201 bp, Homo sapiens
tccaaaatatataagtaaatagctgtagagtcacatatatgaagtgaatagcatatgtgtcatttagtctccctgaagattcttttcaagatcctgttcasggtcctccaggcatcagctgttgtgtcctctctttgtaacagtggacaggacagaccacccagtgctgcaggagacaggccactgcgtcacctgtgagtg

SEQ ID NO: 22607 - DNA, 201 bp, Homo sapiens
accctctgccaagagacagagctgtcctgagaatgctttgtccttctgagcccatgttttctgctcagtagcagcttggaagcagatttggaatggtttaytattttggctgctcttggggactgcgagaagcagagagaatgagagaccagtggcaactgcctgcacagcagagataaccctcttcccttgcttccttta

SEQ ID NO: 22608 - DNA, 201 bp, Homo sapiens
gagagtgaagaaattgccttgtagatgtggagggctgcaatctgtcttgatttctccaagcacttaactttctttgactgcactgagaattgctaatgatytcccatgagatttgcttacttttgtatactgtattttccagcattacagaaccttggttattgttttttagccatagaatcttctagtaaaaaatatctg

SEQ ID NO: 22609 - DNA, 201 bp, Homo sapiens
aggagagaatttgagagagtgaagaaattgccttgtagatgtggagggctgcaatctgtcttgatttctccaagcacttaactttctttgactgcactgakaattgctaatgatttcccatgagatttgcttacttttgtatactgtattttccagcattacagaaccttggttattgttttttagccatagaatcttcta

SEQ ID NO: 22610 - DNA, 201 bp, Homo sapiens
tcgttagatgaatggctagttttaatagccacagaattgatgaaaaacaaaagagactcaacagagatcacttctattttactgaaacaaaaaggccaagrtcaagatgctgcttccattcctccatttgaacctccaggacctgggagctatgaaaatctgtccactggcacaagggaatctaaaccagatgctcttgca

SEQ ID NO: 22611 - DNA, 201 bp, Homo sapiens
ttcctgtaaattaccaagatgtggcatccattgatccagaatatgcgaaaaatttgcaatggattttagataatgatataagtgatctgggtctagaactractttttctgttgagactgatgtgtttggagcaatggaagaggtgcctttgaaacctgggggtgggagtattcttgtgacacaaaataataaagagctac

SEQ ID NO: 22612 - DNA, 201 bp, Homo sapiens; identical to SEQ ID NO: 22610

SEQ ID NO: 22613 - DNA, 201 bp, Homo sapiens
ttcctgtaaattaccaagatgtggcatccattgatccagaatatgcgaaaaatttgcaatggattttagataatgatataagtgatctgggtctagaactractttttctgttgagactgatgtgtttggagcaatggaagaggtgcctttgaaacctgggggtgggagtattcttgtgacacaaaataataaagcggagt

SEQ ID NO: 22614 - DNA, 201 bp, Homo sapiens
ctgatgtgtttggagcaatggaagaggtgcctttgaaacctgggggtgggagtattcttgtgacacaaaataataaagcggagtacgtccagcttgttacwgaacttcgaatgacaagagccattcagcctcagatcaatgcttttttacagggctttcatatgttcattccaccctccctcatacagctttttgatgaat

SEQ ID NO: 22615 - DNA, 201 bp, Homo sapiens
ttgtgacacaaaataataaagcggagtacgtccagcttgttactgaacttcgaatgacaagagccattcagcctcagatcaatgcttttttacagggcttycatatgttcattccaccctccctcatacagctttttgatgaatatgaattggagctactgctttctggcatgccagaaattgatgtgagtgattggataa

SEQ ID NO: 22616 - DNA, 201 bp, Homo sapiens; identical to SEQ ID NO: 22610

SEQ ID NO: 22617 - DNA, 201 bp, Homo sapiens; identical to SEQ ID NO: 22611

SEQ ID NO: 22618 - DNA, 201 bp, Homo sapiens
agccaggagatgaaatataccctagagatgagaatggcaaatggttatatcacaagtcaaatctgtgtgccacttgggaggcgatggaagcttgcaaagaygctggcttggtgaaatccctgggagtgtccaattttaaccgcaggcagctggagctcatcctgaacaagccaggactcaaacacaagccagtcagcaacc

SEQ ID NO: 22619 - DNA, 201 bp, Homo sapiens
gtatgtacaatttaaagagtgaataagattattagaattcagcaatagagatatatctattttcaattcaactacagaaatatattttattggccgggtgyggtggctcatgcctataatcccagcactttgggaggccaaggtgggcagatcaggaggtcaggagatcgagaccatcttggctaacaaggtgaaaccccg

SEQ ID NO: 22620 - DNA, 201 bp, Homo sapiens
ctgtatgtacaatttaaagagtgaataagattattagaattcagcaatagagatatatctattttcaattcaactacagaaatatattttattggccgggygcggtggctcatgcctataatcccagcactttgggaggccaaggtgggcagatcaggaggtcaggagatcgagaccatcttggctaacaaggtgaaaccc

SEQ ID NO: 22621 - DNA, 201 bp, Homo sapiens
gaggctttggaccattggttacaaaacagacacagccaagataagatccacacacacattattaacaaggaagtgatttgctgcaccttgagttgagaggrctacatgtagaaaagtcttaaaatagagctaaacaccacagtggtcaacaaagccatcataatgttggtgtttgtttccctccaatgtatgtatgtttag

SEQ ID NO: 22622 - DNA, 201 bp, Homo sapiens
gctcatgtggcgcgatcatcctgaatacccatttcatgatgaatactgactgccgggagttcctgaacagatttttcactcccatgagtgccaagacggtrcaatgggtagtcccctagatgtgaaaatgaagagagagggttttaccatcctgagaagaaataatgatggaaacatgtttaatgtttgtgcagtgtaaat

SEQ ID NO: 22623 - DNA, 201 bp, Homo sapiens
atgaaggacattgaagccttgaataaaaatgtccgctttgtagaattgctcatgtggcgcgatcatcctgaatacccatttcatgatgaatactgactgcmgggagttcctgaacagatttttcactcccatgagtgccaagacggtgcaatgggtagtcccctagatgtgaaaatgaagagagagggttttaccatcctg

SEQ ID NO: 22624 - DNA, 201 bp, Homo sapiens
ggtgaaaccccgtctctactaaaaatacaaaaaattagccaggcgcggtggcgggggcctgtaatcccagctactcaggaggctgaggcagaagaatggcrtgaacccgggaggaggagcttgcagtgagccgagatagcgccactgcagtccggcctgggtgaaagagcgagactccgtctcaaaaacaaaaaaaaaaga

SEQ ID NO: 22625 - DNA, 201 bp, Homo sapiens; identical to SEQ ID NO: 22618

SEQ ID NO: 22626 - DNA, 201 bp, Homo sapiens
aatatattttattggccgggtgcggtggctcatgcctataatcccagcactttgggaggccaaggtgggcagatcaggaggtcaggagatcgagaccatcytggctaacaaggtgaaaccccgtctctactaaaaatacaaaaaattagccaggcgcggtggcgggggcctgtaatcccagctactcaggaggctgaggca

SEQ ID NO: 22627 - DNA, 201 bp, Homo sapiens
gtggcgcgatcatcctgaatacccatttcatgatgaatactgactgccgggagttcctgaacagatttttcactcccatgagtgccaagacggtgcaatgsgtagtcccctagatgtgaaaatgaagagagagggttttaccatcctgagaagaaataatgatggaaacatgtttaatgtttgtgcagtgtaaatgacttt

SEQ ID NO: 22628 - DNA, 201 bp, Homo sapiens
aaaaaattacacttcagaaaagacatcaaaggcaacatatgacaacaagtaatttatgaatctgggtagtagcgttggtaatctgagttctttaagggttmacaggacaacgaagtgcatgtggcagtgtgctggcagtggccttgaggctttggaccattggttacaaaacagacacagccaagataagatccacacaca

SEQ ID NO: 22629 - DNA, 201 bp, Homo sapiens
tccgctttgtagaattgctcatgtggcgcgatcatcctgaatacccatttcatgatgaatactgactgccgggagttcctgaacagatttttcactcccaygagtgccaagacggtgcaatgggtagtcccctagatgtgaaaatgaagagagagggttttaccatcctgagaagaaataatgatggaaacatgtttaatg

SEQ ID NO: 22630 - DNA, 201 bp, Homo sapiens
aatttaaagagtgaataagattattagaattcagcaatagagatatatctattttcaattcaactacagaaatatattttattggccgggtgcggtggctsatgcctataatcccagcactttgggaggccaaggtgggcagatcaggaggtcaggagatcgagaccatcttggctaacaaggtgaaaccccgtctctact

SEQ ID NO: 22631 - DNA, 201 bp, Homo sapiens
gggagacacaacaaggggtgggggcccgcaggcggggcggggcgaagcaggtgatatcaagcccagagccccagcctctccccacagtctcaccatggccygcaccgtggtgctcatcaccggctgttcctcgggcatcggcctgcacttggccgtacgtctggcttcagatccatcccagagcttcaaagtgtatgccac

SEQ ID NO: 22632 - DNA, 201 bp, Homo sapiens
cagggcggtctggaagggtccagagcaggagcttctatctccatagagttggggttacgtcaccctctgggcacattctgtcagcctccacacgttcagcyctcagaagctcccgaaccctgtcctttgggccttttatggagaactccattggctgtccatgactgaagcatggacaactgtgataatgtgattgggcaa

SEQ ID NO: 22633 - DNA, 201 bp, Homo sapiens
gcttcagatccatcccagagcttcaaagtgtatgccacgttgagggacctgaaaacacagggccggctgtgggaggcggcccgggccctggcatgccctcmgggatccctggagacgttgcagctggacgtaagggactcaaaatccgtggccgctgcccgggaacgcgtgactgagggccgcgtggacgtgctggtgtgt

SEQ ID NO: 22634 - DNA, 201 bp, Homo sapiens
catgcaccgggaagtgttcggcgacgttccggcaaaggccgaggctggggccgaggctgggggcggggccgggcctggggcagaggacgaggccgggcgcrgtgcggtgggggaccctgagctcggcgatcctccggccgccccgcagtaaaggcttcctcagccgctgtctcccgcgcccttctttgtcccctgggtctg

SEQ ID NO: 22635 - DNA, 201 bp, Homo sapiens
cagagcttcaaagtgtatgccacgttgagggacctgaaaacacagggccggctgtgggaggcggcccgggccctggcatgccctccgggatccctggagasgttgcagctggacgtaagggactcaaaatccgtggccgctgcccgggaacgcgtgactgagggccgcgtggacgtgctggtgtgtaacgcaggcctgggc

SEQ ID NO: 22636 - DNA, 201 bp, Homo sapiens
cgaaaggctgttttttgaggcctgaggcaccccaacatgacaacgtaagactgtaaccatggtcatgtgagttatgagctaggaaccctggacgaaaccarcacatatacaatcatctcccacctcccaacgcctttactttcacagcctctgcagcaaactgcggtcactataatcgctcctgtggcacagaggcatacc

SEQ ID NO: 22637 - DNA, 201 bp, Homo sapiens
tcgctcctgtggcacagaggcatacccaggggaatctgcccagggggccactctgtgcccacgtgggaacccacacctgcttgtaaagcctcccctccctytgaccagcaaccaggacagtttgttgttccaagcagtgggctcatgtctgttttggctcagaacagggtggggagagcgggccagggacccgcaggaagg

SEQ ID NO: 22638 - DNA, 201 bp, Homo sapiens
ggcgatcctccggccgccccgcagtaaaggcttcctcagccgctgtctcccgcgcccttctttgtcccctgggtctgtgtggtccctggggatggggcggyggtagcagctgtgggtggctaattaagatagatcgcgttagccagttttaccagcgcagctaggcgcgatggctgtcgcctgtaatgccagcgctttggg

SEQ ID NO: 22639 - DNA, 201 bp, Homo sapiens
ttatgagctaggaaccctggacgaaaccaacacatatacaatcatctcccacctcccaacgcctttactttcacagcctctgcagcaaactgcggtcactrtaatcgctcctgtggcacagaggcatacccaggggaatctgcccagggggccactctgtgcccacgtgggaacccacacctgcttgtaaagcctcccctc

SEQ ID NO: 22640 - DNA, 125 bp, Homo sapiens
gggcctcccaaagtgctgggattasaggcatgagccaccgtgcccagcctcaaagcatattttaaaggatagaaataaacagccatatgaagagatacagacagggcggtctggaagggtccaga

SEQ ID NO: 22641 - DNA, 201 bp, Homo sapiens
cccatgttgttccaagagtacctggacatagaccagatgatcttcgacagagagctgccccaggcttctgggcttctccatcactgttgcttctacaagcrccggggacggaacctggtgacaatgaccacggctccccgtggtctgcaatcaggggaccgggccacctagtttggcctctactacaacatctcgggcgct

SEQ ID NO: 22642 - DNA, 201 bp, Homo sapiens
taggcggtcctgggatggggcatgtggccaagggctccagggccagggtgtgagggatggggagcagctgggcactgggccggcagcctggttccctcttycctgtgccaggactctctttcttccactaccctccctcgcatccgcctctgagccaggagcctcctgaccctgtgatgcctgacacaggggacactgaac

SEQ ID NO: 22643 - DNA, 201 bp, Homo sapiens
gggcttctccatcactgttgcttctacaagcgccggggacggaacctggtgacaatgaccacggctccccgtggtctgcaatcaggggaccgggccacctrgtttggcctctactacaacatctcgggcgctgggttcttcctgcaccacgtgggcttggagctgctagtgaaccacaaggcccttgaccctgcccgctgg

SEQ ID NO: 22644 - DNA, 201 bp, Homo sapiens
ttgaggccggcctggtgaatgtggtgctgatcccagacaatggcacaggtgggtcctggtccctgaagtcccctgtgcccccgggtccagctccccctctrcagttctatccccaaggcccccgcttcagtgtccagggaagtcgagtggcctcctcactgtggactttctcctttggcctcggagcattcagtggcccaa

SEQ ID NO: 22645 - DNA, 201 bp, Homo sapiens
cggcctggtgaatgtggtgctgatcccagacaatggcacaggtgggtcctggtccctgaagtcccctgtgcccccgggtccagctccccctctacagttcyatccccaaggcccccgcttcagtgtccagggaagtcgagtggcctcctcactgtggactttctcctttggcctcggagcattcagtggcccaaggatctt

SEQ ID NO: 22646 - DNA, 201 bp, Homo sapiens
tctcccagtgcccagccttggacacaccctggccagagccagctgtttgcagacctgagccgagaggagctgacggctgtgatgcgctttctgacccagcrgctggggccagggctggtggatgcagcccaggcccggccctcggacaactgtgtcttctcagtggagttgcagctgcctcccaaggctgcagccctggct

SEQ ID NO: 22647 - DNA, 201 bp, Homo sapiens
acttcaaggtggatctggatgtagcaggactggagaactgggtctgggccgaggatatggtctttgtccccatggctgtgccctggagccctgagcaccarctgcagaggctgcaggtgacccggaagctgctggagatggaggagcaggccgccttcctcgtgggaagcgccacccctcgctacctgtacctggccagca

SEQ ID NO: 22648 - DNA, 201 bp, Homo sapiens
aagtacaccacgcccctgacccgtggggtggactgcccctacttggccacctacgtggactggcacttccttttggagtcccaggcccccaagacaatacrtgatgccttttgtgtgtttgaacagaaccagggcctccccctgcggcgacaccactcagatctctactcgcactactttgggggtcttgcggaaacggtg

SEQ ID NO: 22649 - DNA, 201 bp, Homo sapiens
tgagaccattgctggaaaggatttggtggcctgggtgacagctggttttctgcatatcccacatgcagaggacattcctaacacagtgactgtggggaacrgcgtgggcttcttcctccgaccctataacttctttgacgaagacccctccttctactctgccgactccatctacttccgaggggaccaggatgctggggc

SEQ ID NO: 22650 - DNA, 201 bp, Homo sapiens
ggccacctacgtggactggcacttccttttggagtcccaggcccccaagacaatacgtgatgccttttgtgtgtttgaacagaaccagggcctccccctgyggcgacaccactcagatctctactcgcactactttgggggtcttgcggaaacggtgctggtcgtcagatctatgtccaccttgctcaactatgactatgt

SEQ ID NO: 22651 - DNA, 201 bp, Homo sapiens
tggcctgggtgacagctggttttctgcatatcccacatgcagaggacattcctaacacagtgactgtggggaacggcgtgggcttcttcctccgaccctayaacttctttgacgaagacccctccttctactctgccgactccatctacttccgaggggaccaggatgctggggcctgcgaggtcaaccccctagcttgcc

SEQ ID NO: 22652 - DNA, 201 bp, Homo sapiens
acaggtgggtcctggtccctgaagtcccctgtgcccccgggtccagctccccctctacagttctatccccaaggcccccgcttcagtgtccagggaagtcragtggcctcctcactgtggactttctcctttggcctcggagcattcagtggcccaaggatctttgacgttcgcttccaaggagaaagactagtttatgag

SEQ ID NO: 22653 - DNA, 201 bp, Homo sapiens
ggatctttgacgttcgcttccaaggagaaagactagtttatgagataagcctccaagaggccttggccatctatggtggaaattccccagcagcaatgacracccgctatgtggatggaggctttggcatgggcaagtacaccacgcccctgacccgtggggtggactgcccctacttggccacctacgtggactggcact

SEQ ID NO: 22654 - DNA, 201 bp, Homo sapiens
tggtggaaattccccagcagcaatgacgacccgctatgtggatggaggctttggcatgggcaagtacaccacgcccctgacccgtggggtggactgccccwacttggccacctacgtggactggcacttccttttggagtcccaggcccccaagacaatacgtgatgccttttgtgtgtttgaacagaaccagggcctccc

SEQ ID NO: 22655 - DNA, 201 bp, Homo sapiens
gtgacttcatcaacaatgagaccattgctggaaaggatttggtggcctgggtgacagctggttttctgcatatcccacatgcagaggacattcctaacacrgtgactgtggggaacggcgtgggcttcttcctccgaccctataacttctttgacgaagacccctccttctactctgccgactccatctacttccgagggg

SEQ ID NO: 22656 - DNA, 201 bp, Homo sapiens
tatatactaatatgtaataatcttcaggtgaaaaaggcaagccacagaaatgtgtatagcgcacttcccatttgtgtttcagaaaggagtagaatataaayacataattgcttatgtatgcctattcagaataaatgggtaacactgattacttttgggaggggaaccagtaggttgaggacaggagagggaagggtctta

SEQ ID NO: 22657 - DNA, 201 bp, Homo sapiens
agccagctgtttgcagacctgagccgagaggagctgacggctgtgatgcgctttctgacccagcggctggggccagggctggtggatgcagcccaggcccrgccctcggacaactgtgtcttctcagtggagttgcagctgcctcccaaggctgcagccctggctcacttggacagggggagccccccacctgcccgggag

SEQ ID NO: 22658 - DNA, 201 bp, Homo sapiens
ccctgccctatcaccgacgccccatgttgttccaagagtacctggacatagaccagatgatcttcgacagagagctgccccaggcttctgggcttctccaycactgttgcttctacaagcgccggggacggaacctggtgacaatgaccacggctccccgtggtctgcaatcaggggaccgggccacctagtttggcctct

SEQ ID NO: 22659 - DNA, 201 bp, Homo sapiens
atgaatgttctccatgactttgggatccagtcaacacattacctccaggtgaattaccaagactcccaggactggttcatcttggtgtccgtgatcgcagwcctcaggaatgccttctacgtcctcttccccatctggttccatcttcaggaagctgtgggcattaaactcctttgggtagctgtgattggagactggctc

SEQ ID NO: 22660 - DNA, 201 bp, Homo sapiens
cctcatcaagttgttgctggagtcctgtcaggcattgctgttgcagaaactttcagccacatccacagcatctataatgccagcctcaagaaatattttcycattaccttcttcctgttcagcttcgccatcggattttatctgctgctcaagggactgggtgtagacctcctgtggactctggagaaagcccagaggtgg

SEQ ID NO: 22661 - DNA, 201 bp, Homo sapiens
tctactctttccatctttcagggaaagataaagccgacctacagatttcggtgcttgaatgtcattttgtggttgggattctgggctgtgcagctgaatgbctgtctgtcacgaatctaccttgctgctcattttcctcatcaagttgttgctggagtcctgtcaggcattgctgttgcagaaactttcagccacatccac

SEQ ID NO: 22662 - DNA, 201 bp, Homo sapiens
tcatcttggtgtccgtgatcgcagacctcaggaatgccttctacgtcctcttccccatctggttccatcttcaggaagctgtgggcattaaactcctttgrgtagctgtgattggagactggctcaacctcgtctttaagtggattctctttggacagcgtccatactggtgggttttggatactgactactacagcaaca

SEQ ID NO: 22663 - DNA, 201 bp, Homo sapiens
cctgggcacgctctttggcctggggctggctctcaactccagcatgtacagggagagctgcaaggggaaactcagcaagtggctcccattccgcctcagcyctattgtagcctccctcgtcctcctgcacgtctttgactccttgaaacccccatcccaagtcgagctggtcttctacgtcttgtccttctgcaagagtgc

SEQ ID NO: 22664 - DNA, 201 bp, Homo sapiens
atctttcagggaaagataaagccgacctacagatttcggtgcttgaatgtcattttgtggttgggattctgggctgtgcagctgaatgtctgtctgtcacraatctaccttgctgctcattttcctcatcaagttgttgctggagtcctgtcaggcattgctgttgcagaaactttcagccacatccacagcatctataat

SEQ ID NO: 22665 - DNA, 201 bp, Homo sapiens
gacatcttcctgaggtgccaaggaaatgaggatggaggaaggaatgaatgttctccatgactttgggatccagtcaacacattacctccaggtgaattacyaagactcccaggactggttcatcttggtgtccgtgatcgcagacctcaggaatgccttctacgtcctcttccccatctggttccatcttcaggaagctgt

SEQ ID NO: 22666 - DNA, 201 bp, Homo sapiens
atattttctcattaccttcttcctgttcagcttcgccatcggattttatctgctgctcaagggactgggtgtagacctcctgtggactctggagaaagccyagaggtggtgcgagcagccagaatgggtccacattgacaccacaccctttgccagcctcctcaagaacctgggcacgctctttggcctggggctggctct

SEQ ID NO: 22667 - DNA, 201 bp, Homo sapiens
gttcatcttggtgtccgtgatcgcagacctcaggaatgccttctacgtcctcttccccatctggttccatcttcaggaagctgtgggcattaaactccttygggtagctgtgattggagactggctcaacctcgtctttaagtggattctctttggacagcgtccatactggtgggttttggatactgactactacagcaa

SEQ ID NO: 22668 - DNA, 201 bp, Homo sapiens
gtgcccctggcatccgtcagtgtcatcccctactgcctcgcccaggtcctgggccagccgcacaagaagtcgttgtaagagatgtggagtcttcggtgttyaaagtcaacaaccatgccagggattgaggaggactactatttgaagcaatgggcactggtatttggagcaagtgacatgccatccattctgccgtcgtgg

SEQ ID NO: 22669 - DNA, 201 bp, Homo sapiens
gaaatattttctcattaccttcttcctgttcagcttcgccatcggattttatctgctgctcaagggactgggtgtagacctcctgtggactctggagaaarcccagaggtggtgcgagcagccagaatgggtccacattgacaccacaccctttgccagcctcctcaagaacctgggcacgctctttggcctggggctggc

SEQ ID NO: 22670 - DNA, 201 bp, Homo sapiens
agggaaagataaagccgacctacagatttcggtgcttgaatgtcattttgtggttgggattctgggctgtgcagctgaatgtctgtctgtcacgaatctamcttgctgctcattttcctcatcaagttgttgctggagtcctgtcaggcattgctgttgcagaaactttcagccacatccacagcatctataatgccagcc

SEQ ID NO: 22671 - DNA, 201 bp, Homo sapiens
attctctttggacagcgtccatactggtgggttttggatactgactactacagcaacacttccgtgcccctgataaagcagttccctgtaacctgtgagaytggaccagggagcccctctggccatgccatgggcacagcaggtgtatactacgtgatggtcacatctactctttccatctttcagggaaagataaagccg

SEQ ID NO: 22672 - DNA, 201 bp, Homo sapiens
cagcaagtggctcccattccgcctcagctctattgtagcctccctcgtcctcctgcacgtctttgactccttgaaacccccatcccaagtcgagctggtcytctacgtcttgtccttctgcaagagtgcggtagtgcccctggcatccgtcagtgtcatcccctactgcctcgcccaggtcctgggccagccgcacaagaa

SEQ ID NO: 22673 - DNA, 201 bp, Homo sapiens
tttggacagcgtccatactggtgggttttggatactgactactacagcaacacttccgtgcccctgataaagcagttccctgtaacctgtgagactggacyagggagcccctctggccatgccatgggcacagcaggtgtatactacgtgatggtcacatctactctttccatctttcagggaaagataaagccgacctac

SEQ ID NO: 22674 - DNA, 201 bp, Homo sapiens
ggattttatctgctgctcaagggactgggtgtagacctcctgtggactctggagaaagcccagaggtggtgcgagcagccagaatgggtccacattgacaycacaccctttgccagcctcctcaagaacctgggcacgctctttggcctggggctggctctcaactccagcatgtacagggagagctgcaaggggaaactc

SEQ ID NO: 22675 - DNA, 201 bp, Homo sapiens
atactggtgggttttggatactgactactacagcaacacttccgtgcccctgataaagcagttccctgtaacctgtgagactggaccagggagcccctctsgccatgccatgggcacagcaggtgtatactacgtgatggtcacatctactctttccatctttcagggaaagataaagccgacctacagatttcggtgctt

SEQ ID NO: 22676 - DNA, 201 bp, Homo sapiens
gtgaattaccaagactcccaggactggttcatcttggtgtccgtgatcgcagacctcaggaatgccttctacgtcctcttccccatctggttccatcttcmggaagctgtgggcattaaactcctttgggtagctgtgattggagactggctcaacctcgtctttaagtggattctctttggacagcgtccatactggtgg

SEQ ID NO: 22677 - DNA, 201 bp, Homo sapiens
gtctttgactccttgaaacccccatcccaagtcgagctggtcttctacgtcttgtccttctgcaagagtgcggtagtgcccctggcatccgtcagtgtcawcccctactgcctcgcccaggtcctgggccagccgcacaagaagtcgttgtaagagatgtggagtcttcggtgtttaaagtcaacaaccatgccagggatt

SEQ ID NO: 22678 - DNA, 201 bp, Homo sapiens
tggtgggttttggatactgactactacagcaacacttccgtgcccctgataaagcagttccctgtaacctgtgagactggaccagggagcccctctggccwtgccatgggcacagcaggtgtatactacgtgatggtcacatctactctttccatctttcagggaaagataaagccgacctacagatttcggtgcttgaat

SEQ ID NO: 22679 - DNA, 201 bp, Homo sapiens
tatctgctgctcaagggactgggtgtagacctcctgtggactctggagaaagcccagaggtggtgcgagcagccagaatgggtccacattgacaccacacyctttgccagcctcctcaagaacctgggcacgctctttggcctggggctggctctcaactccagcatgtacagggagagctgcaaggggaaactcagcaag

SEQ ID NO: 22680 - DNA, 201 bp, Homo sapiens
acagcaggtgtatactacgtgatggtcacatctactctttccatctttcagggaaagataaagccgacctacagatttcggtgcttgaatgtcattttgtkgttgggattctgggctgtgcagctgaatgtctgtctgtcacgaatctaccttgctgctcattttcctcatcaagttgttgctggagtcctgtcaggcatt

SEQ ID NO: 22681 - DNA, 201 bp, Homo sapiens
tttgtggttgggattctgggctgtgcagctgaatgtctgtctgtcacgaatctaccttgctgctcattttcctcatcaagttgttgctggagtcctgtcavgcattgctgttgcagaaactttcagccacatccacagcatctataatgccagcctcaagaaatattttctcattaccttcttcctgttcagcttcgccat

SEQ ID NO: 22682 - DNA, 201 bp, Homo sapiens
ctggaccagggagcccctctggccatgccatgggcacagcaggtgtatactacgtgatggtcacatctactctttccatctttcagggaaagataaagccracctacagatttcggtgcttgaatgtcattttgtggttgggattctgggctgtgcagctgaatgtctgtctgtcacgaatctaccttgctgctcattttc

SEQ ID NO: 22683 - DNA, 201 bp, Homo sapiens
agggctctgctgacatcttcctgaggtgccaaggaaatgaggatggaggaaggaatgaatgttctccatgactttgggatccagtcaacacattacctccrggtgaattaccaagactcccaggactggttcatcttggtgtccgtgatcgcagacctcaggaatgccttctacgtcctcttccccatctggttccatctt

SEQ ID NO: 22684 - DNA, 201 bp, Homo sapiens
attctgggctgtgcagctgaatgtctgtctgtcacgaatctaccttgctgctcattttcctcatcaagttgttgctggagtcctgtcaggcattgctgttrcagaaactttcagccacatccacagcatctataatgccagcctcaagaaatattttctcattaccttcttcctgttcagcttcgccatcggattttatct

SEQ ID NO: 22685 - DNA, 201 bp, Homo sapiens
gtgtagacctcctgtggactctggagaaagcccagaggtggtgcgagcagccagaatgggtccacattgacaccacaccctttgccagcctcctcaagaamctgggcacgctctttggcctggggctggctctcaactccagcatgtacagggagagctgcaaggggaaactcagcaagtggctcccattccgcctcagct

SEQ ID NO: 22686 - DNA, 201 bp, Homo sapiens
taatgccagcctcaagaaatattttctcattaccttcttcctgttcagcttcgccatcggattttatctgctgctcaagggactgggtgtagacctcctgwggactctggagaaagcccagaggtggtgcgagcagccagaatgggtccacattgacaccacaccctttgccagcctcctcaagaacctgggcacgctctt

SEQ ID NO: 22687 - DNA, 201 bp, Homo sapiens
cctcaagaacctgggcacgctctttggcctggggctggctctcaactccagcatgtacagggagagctgcaaggggaaactcagcaagtggctcccattcygcctcagctctattgtagcctccctcgtcctcctgcacgtctttgactccttgaaacccccatcccaagtcgagctggtcttctacgtcttgtccttctg

SEQ ID NO: 22688 - DNA, 201 bp, Homo sapiens
actctggagaaagcccagaggtggtgcgagcagccagaatgggtccacattgacaccacaccctttgccagcctcctcaagaacctgggcacgctctttgkcctggggctggctctcaactccagcatgtacagggagagctgcaaggggaaactcagcaagtggctcccattccgcctcagctctattgtagcctccctc

SEQ ID NO: 22689 - DNA, 201 bp, Homo sapiens
cattacctccaggtgaattaccaagactcccaggactggttcatcttggtgtccgtgatcgcagacctcaggaatgccttctacgtcctcttccccatctrgttccatcttcaggaagctgtgggcattaaactcctttgggtagctgtgattggagactggctcaacctcgtctttaagtggattctctttggacagcgt

SEQ ID NO: 22690 - DNA, 201 bp, Homo sapiens
tggaataactgcaagggctctgctgacatcttcctgaggtgccaaggaaatgaggatggaggaaggaatgaatgttctccatgactttgggatccagtcarcacattacctccaggtgaattaccaagactcccaggactggttcatcttggtgtccgtgatcgcagacctcaggaatgccttctacgtcctcttccccat

SEQ ID NO: 22691 - DNA, 201 bp, Homo sapiens
gacctcctgtggactctggagaaagcccagaggtggtgcgagcagccagaatgggtccacattgacaccacaccctttgccagcctcctcaagaacctggkcacgctctttggcctggggctggctctcaactccagcatgtacagggagagctgcaaggggaaactcagcaagtggctcccattccgcctcagctctatt

SEQ ID NO: 22692 - DNA, 201 bp, Homo sapiens
acccccatcccaagtcgagctggtcttctacgtcttgtccttctgcaagagtgcggtagtgcccctggcatccgtcagtgtcatcccctactgcctcgccyaggtcctgggccagccgcacaagaagtcgttgtaagagatgtggagtcttcggtgtttaaagtcaacaaccatgccagggattgaggaggactactattt

SEQ ID NO: 22693 - DNA, 201 bp, Homo sapiens
cctaaacaaataatttggtttctctgtgcctgcattttccctttggagaagaaaagtgctctctcttgagttgaccgagagtcccattagggatagggagwcttaaatgcatccacaggggcacaggcagagttgagcacataaacggaggcccaaaatcagcatagaaccagaaagattcagagttggccaagaatgaac

SEQ ID NO: 22694 - DNA, 201 bp, Homo sapiens
gtagacctcctgtggactctggagaaagcccagaggtggtgcgagcagccagaatgggtccacattgacaccacaccctttgccagcctcctcaagaaccygggcacgctctttggcctggggctggctctcaactccagcatgtacagggagagctgcaaggggaaactcagcaagtggctcccattccgcctcagctct

SEQ ID NO: 22695 - DNA, 201 bp, Homo sapiens
aaataatttggtttctctgtgcctgcattttccctttggagaagaaaagtgctctctcttgagttgaccgagagtcccattagggatagggagacttaaawgcatccacaggggcacaggcagagttgagcacataaacggaggcccaaaatcagcatagaaccagaaagattcagagttggccaagaatgaacattggct

SEQ ID NO: 22696 - DNA, 103 bp, Homo sapiens
tarcagagcaatcaccaccaagcctggaataactgcaagggctctgctgacatcttcctgaggtgccaaggaaatgaggatggaggaaggaatgaatgttctc

SEQ ID NO: 22697 - DNA, 193 bp, Homo sapiens
tagcagagcaatcaccaccaagcctggaataactgcaagggctctgctgacatcttcctgaggtgccaaggaaatgaggatggaggaaggaakgaatgttctccatgactttgggatccagtcaacacattacctccaggtgaattaccaagactcccaggactggttcatcttggtgtccgtgatcgcagac

SEQ ID NO: 22698 - DNA, 201 bp, Homo sapiens
gcagacctcaggaatgccttctacgtcctcttccccatctggttccatcttcaggaagctgtgggcattaaactcctttgggtagctgtgattggagactrgctcaacctcgtctttaagtggattctctttggacagcgtccatactggtgggttttggatactgactactacagcaacacttccgtgcccctgataaag

SEQ ID NO: 22699 - DNA, 201 bp, Homo sapiens
cagacctcaggaatgccttctacgtcctcttccccatctggttccatcttcaggaagctgtgggcattaaactcctttgggtagctgtgattggagactgrctcaacctcgtctttaagtggattctctttggacagcgtccatactggtgggttttggatactgactactacagcaacacttccgtgcccctgataaagc

SEQ ID NO: 22700 - DNA, 201 bp, Homo sapiens
tctacgtcctcttccccatctggttccatcttcaggaagctgtgggcattaaactcctttgggtagctgtgattggagactggctcaacctcgtctttaastggattctctttggacagcgtccatactggtgggttttggatactgactactacagcaacacttccgtgcccctgataaagcagttccctgtaacctgtg

SEQ ID NO: 22701 - DNA, 201 bp, Homo sapiens
ctacgtcctcttccccatctggttccatcttcaggaagctgtgggcattaaactcctttgggtagctgtgattggagactggctcaacctcgtctttaagyggattctctttggacagcgtccatactggtgggttttggatactgactactacagcaacacttccgtgcccctgataaagcagttccctgtaacctgtga

SEQ ID NO: 22702 - DNA, 201 bp, Homo sapiens
ccccatctggttccatcttcaggaagctgtgggcattaaactcctttgggtagctgtgattggagactggctcaacctcgtctttaagtggattctctttrgacagcgtccatactggtgggttttggatactgactactacagcaacacttccgtgcccctgataaagcagttccctgtaacctgtgagactggaccagg

SEQ ID NO: 22703 - DNA, 201 bp, Homo sapiens
ctggttccatcttcaggaagctgtgggcattaaactcctttgggtagctgtgattggagactggctcaacctcgtctttaagtggattctctttggacagygtccatactggtgggttttggatactgactactacagcaacacttccgtgcccctgataaagcagttccctgtaacctgtgagactggaccagggagccc

SEQ ID NO: 22704 - DNA, 201 bp, Homo sapiens
tggttccatcttcaggaagctgtgggcattaaactcctttgggtagctgtgattggagactggctcaacctcgtctttaagtggattctctttggacagcrtccatactggtgggttttggatactgactactacagcaacacttccgtgcccctgataaagcagttccctgtaacctgtgagactggaccagggagcccc

SEQ ID NO: 22705 - DNA, 201 bp, Homo sapiens
catctttcagggaaagataaagccgacctacagatttcggtgcttgaatgtcattttgtggttgggattctgggctgtgcagctgaatgtctgtctgtcaygaatctaccttgctgctcattttcctcatcaagttgttgctggagtcctgtcaggcattgctgttgcagaaactttcagccacatccacagcatctataa

SEQ ID NO: 22706 - DNA, 201 bp, Homo sapiens
tttaagtggattctctttggacagcgtccatactggtgggttttggatactgactactacagcaacacttccgtgcccctgataaagcagttccctgtaayctgtgagactggaccagggagcccctctggccatgccatgggcacagcaggtgtatactacgtgatggtcacatctactctttccatctttcagggaaag

SEQ ID NO: 22707 - DNA, 201 bp, Homo sapiens
cctcctgcacgtctttgactccttgaaacccccatcccaagtcgagctggtcttctacgtcttgtccttctgcaagagtgcggtagtgcccctggcatccktcagtgtcatcccctactgcctcgcccaggtcctgggccagccgcacaagaagtcgttgtaagagatgtggagtcttcggtgtttaaagtcaacaaccat

SEQ ID NO: 22708 - DNA, 201 bp, Homo sapiens
gtggattctctttggacagcgtccatactggtgggttttggatactgactactacagcaacacttccgtgcccctgataaagcagttccctgtaacctgtvagactggaccagggagcccctctggccatgccatgggcacagcaggtgtatactacgtgatggtcacatctactctttccatctttcagggaaagataaa

SEQ ID NO: 22709 - DNA, 201 bp, Homo sapiens
ccagtgttacttttaattcctagagggtaaatatgactcctttctctatcccaagccaaccaagagcacattcttaaaggaaaagtcaacatcttctctctttttttttttttttgagacagggtctcactatgttgcccaggctgctcttgaattcctgggctcaagcagtcctcccaccctaccacagcgtcccgcgta

SEQ ID NO: 22710 - DNA, 201 bp, Homo sapiens
gactctggagaaagcccagaggtggtgcgagcagccagaatgggtccacattgacaccacaccctttgccagcctcctcaagaacctgggcacgctctttsgcctggggctggctctcaactccagcatgtacagggagagctgcaaggggaaactcagcaagtggctcccattccgcctcagctctattgtagcctccct

SEQ ID NO: 22711 - DNA, 201 bp, Homo sapiens
aaagtcaacatcttctctctttttttttttttttgagacagggtctcactatgttgcccaggctgctcttgaattcctgggctcaagcagtcctcccaccmtaccacagcgtcccgcgtagctgggactacaggtgcaagccactatgtccagctagccaactcctccttgcctgcttttctttttttttctttttttgag

SEQ ID NO: 22712 - DNA, 201 bp, Homo sapiens
cattgctgttgcagaaactttcagccacatccacagcatctataatgccagcctcaagaaatattttctcattaccttcttcctgttcagcttcgccatcvgattttatctgctgctcaagggactgggtgtagacctcctgtggactctggagaaagcccagaggtggtgcgagcagccagaatgggtccacattgacac

SEQ ID NO: 22713 - DNA, 201 bp, Homo sapiens; identical to SEQ ID NO: 22659

SEQ ID NO: 22714 - DNA, 201 bp, Homo sapiens; identical to SEQ ID NO: 22660

SEQ ID NO: 22715 - DNA, 201 bp, Homo sapiens; identical to SEQ ID NO: 22661

SEQ ID NO: 22716 - DNA, 201 bp, Homo sapiens; identical to SEQ ID NO: 22662

SEQ ID NO: 22717 - DNA, 201 bp, Homo sapiens; identical to SEQ ID NO: 22663

SEQ ID NO: 22718 - DNA, 201 bp, Homo sapiens; identical to SEQ ID NO: 22664

SEQ ID NO: 22719 - DNA, 201 bp, Homo sapiens; identical to SEQ ID NO: 22665

SEQ ID NO: 22720 - DNA, 201 bp, Homo sapiens; identical to SEQ ID NO: 22666

SEQ ID NO: 22721 - DNA, 201 bp, Homo sapiens; identical to SEQ ID NO: 22667

SEQ ID NO: 22722 - DNA, 201 bp, Homo sapiens; identical to SEQ ID NO: 22668

SEQ ID NO: 22723 - DNA, 201 bp, Homo sapiens; identical to SEQ ID NO: 22669

SEQ ID NO: 22724 - DNA, 201 bp, Homo sapiens; identical to SEQ ID NO: 22670

SEQ ID NO: 22725 - DNA, 201 bp, Homo sapiens; identical to SEQ ID NO: 22671

SEQ ID NO: 22726 - DNA, 201 bp, Homo sapiens; identical to SEQ ID NO: 22672

SEQ ID NO: 22727 - DNA, 201 bp, Homo sapiens; identical to SEQ ID NO: 22673

SEQ ID NO: 22728 - DNA, 201 bp, Homo sapiens; identical to SEQ ID NO: 22674

SEQ ID NO: 22729 - DNA, 201 bp, Homo sapiens; identical to SEQ ID NO: 22675

SEQ ID NO: 22730 - DNA, 201 bp, Homo sapiens; identical to SEQ ID NO: 22676

SEQ ID NO: 22731 - DNA, 201 bp, Homo sapiens; identical to SEQ ID NO: 22677

SEQ ID NO: 22732 - DNA, 201 bp, Homo sapiens; identical to SEQ ID NO: 22678

SEQ ID NO: 22733 - DNA, 201 bp, Homo sapiens; identical to SEQ ID NO: 22679

SEQ ID NO: 22734 - DNA, 201 bp, Homo sapiens; identical to SEQ ID NO: 22680

SEQ ID NO: 22735 - DNA, 201 bp, Homo sapiens; identical to SEQ ID NO: 22681

SEQ ID NO: 22736 - DNA, 201 bp, Homo sapiens; identical to SEQ ID NO: 22682

SEQ ID NO: 22737 - DNA, 201 bp, Homo sapiens; identical to SEQ ID NO: 22683

SEQ ID NO: 22738 - DNA, 201 bp, Homo sapiens; identical to SEQ ID NO: 22684

SEQ ID NO: 22739 - DNA, 201 bp, Homo sapiens; identical to SEQ ID NO: 22685

SEQ ID NO: 22740 - DNA, 201 bp, Homo sapiens; identical to SEQ ID NO: 22686

SEQ ID NO: 22741 - DNA, 201 bp, Homo sapiens; identical to SEQ ID NO: 22687

SEQ ID NO: 22742 - DNA, 201 bp, Homo sapiens; identical to SEQ ID NO: 22688

SEQ ID NO: 22743 - DNA, 201 bp, Homo sapiens; identical to SEQ ID NO: 22689

SEQ ID NO: 22744 - DNA, 201 bp, Homo sapiens; identical to SEQ ID NO: 22690

SEQ ID NO: 22745 - DNA, 201 bp, Homo sapiens; identical to SEQ ID NO: 22691

SEQ ID NO: 22746 - DNA, 201 bp, Homo sapiens; identical to SEQ ID NO: 22692

SEQ ID NO: 22747 - DNA, 201 bp, Homo sapiens
cctaaacaaataatttggtttctctgtgcctgcattttccctttggagaagaaaagtgctctctcttgagttgaccgagagtcccattagggatagggagwcttaaatgcatccacaggggcacaggcagagttgagcacataaacggaggcccaaacagaccacaagtcagcatgagttgctctatggcatcaaattgca

SEQ ID NO: 22748 - DNA, 201 bp, Homo sapiens; identical to SEQ ID NO: 22694

SEQ ID NO: 22749 - DNA, 201 bp, Homo sapiens
aaataatttggtttctctgtgcctgcattttccctttggagaagaaaagtgctctctcttgagttgaccgagagtcccattagggatagggagacttaaawgcatccacaggggcacaggcagagttgagcacataaacggaggcccaaacagaccacaagtcagcatgagttgctctatggcatcaaattgcaacttgag

SEQ ID NO: 22750 - DNA, 103 bp, Homo sapiens; identical to SEQ ID NO: 22696

SEQ ID NO: 22751 - DNA, 193 bp, Homo sapiens; identical to SEQ ID NO: 22697

SEQ ID NO: 22752 - DNA, 201 bp, Homo sapiens; identical to SEQ ID NO: 22698

SEQ ID NO: 22753 - DNA, 201 bp, Homo sapiens; identical to SEQ ID NO: 22699

SEQ ID NO: 22754 - DNA, 201 bp, Homo sapiens; identical to SEQ ID NO: 22700

SEQ ID NO: 22755 - DNA, 201 bp, Homo sapiens; identical to SEQ ID NO: 22701

SEQ ID NO: 22756 - DNA, 201 bp, Homo sapiens; identical to SEQ ID NO: 22702

SEQ ID NO: 22757 - DNA, 201 bp, Homo sapiens; identical to SEQ ID NO: 22703

SEQ ID NO: 22758 - DNA, 201 bp, Homo sapiens; identical to SEQ ID NO: 22704

SEQ ID NO: 22759 - DNA, 201 bp, Homo sapiens; identical to SEQ ID NO: 22705

SEQ ID NO: 22760 - DNA, 201 bp, Homo sapiens; identical to SEQ ID NO: 22706

SEQ ID NO: 22761 - DNA, 201 bp, Homo sapiens; identical to SEQ ID NO: 22707

SEQ ID NO: 22762 - DNA, 201 bp, Homo sapiens; identical to SEQ ID NO: 22708

SEQ ID NO: 22763 - DNA, 201 bp, Homo sapiens; identical to SEQ ID NO: 22709

SEQ ID NO: 22764 - DNA, 201 bp, Homo sapiens; identical to SEQ ID NO: 22710

SEQ ID NO: 22765 - DNA, 201 bp, Homo sapiens; identical to SEQ ID NO: 22711

SEQ ID NO: 22766 - DNA, 201 bp, Homo sapiens; identical to SEQ ID NO: 22712

SEQ ID NO: 22767 - DNA, 201 bp, Homo sapiens
ttcatcaacaatgaaaccctcttaggagaggatctggtggcttgggtcacagccagcttcctgcacattccccatgccgaggacatcccaaacacagtgaytctggggaacagagttggcttcttgctccgaccctataacttctttgatgaggacccctccatcttctcccctggcagtgtctactttgagaagggccag

SEQ ID NO: 22768 - DNA, 201 bp, Homo sapiens
cccctatcaagccacgatggtggacatccatatattagtgggcaaaggggcagtccagctgcttccaggggctgtgtgtgtatttgaggaagcccagggaytgccccttcgaaggcaccacaattaccttcaaaatcatttctatggtggtttggccagctcagcccttgtggtcaggtctgtgtcatctgtgggcaacta

SEQ ID NO: 22769 - DNA, 109 bp, Homo sapiens
tgttagaaytctgatttcagctctcagcatccaccatgcatctcaagatagtcctggcgttcctggcactgtccctcattaccatctttgccctggcctatgttttgct

SEQ ID NO: 22770 - DNA, 201 bp, Homo sapiens
ctgacttcatcaacaatgaaaccctcttaggagaggatctggtggcttgggtcacagccagcttcctgcacattccccatgccgaggacatcccaaacacrgtgactctggggaacagagttggcttcttgctccgaccctataacttctttgatgaggacccctccatcttctcccctggcagtgtctactttgagaagg

SEQ ID NO: 22771 - DNA, 201 bp, Homo sapiens
tctgacccagcggctggggccagggctggtggacgcagcccaggctcagccctcggacaactgcatcttctcagtggagctgcagctgccccccaaggctrcagccctggcccacctggacagggggagccccccacctgcccgggaggcactggccatcgtcctctttggtggacaaccccaacccaatgtgagtgagct

SEQ ID NO: 22772 - DNA, 201 bp, Homo sapiens; identical to SEQ ID NO: 22767

SEQ ID NO: 22773 - DNA, 201 bp, Homo sapiens; identical to SEQ ID NO: 22768

SEQ ID NO: 22774 - DNA, 109 bp, Homo sapiens; identical to SEQ ID NO: 22769

SEQ ID NO: 22775 - DNA, 201 bp, Homo sapiens; identical to SEQ ID NO: 22770

SEQ ID NO: 22776 - DNA, 201 bp, Homo sapiens; identical to SEQ ID NO: 22771

SEQ ID NO: 22777 - DNA, 201 bp, Homo sapiens
cgaccggggaagacgcctcttcgccgcctccgaaaaccgaggcagcgagcgacccccagcatcccgcggcctccgaaggggccgccgccgccgccgcctcrccgccactgctgcgctgcctagtgctcaccggctttggaggctacgacaaggtgaagctgcagagccggccggcagcgcccccggcccctgggcccggcc

SEQ ID NO: 22778 - DNA, 201 bp, Homo sapiens
ggccgccgccgccgccgcctcgccgccactgctgcgctgcctagtgctcaccggctttggaggctacgacaaggtgaagctgcagagccggccggcagcgsccccggcccctgggcccggccagctgacgctgcgtctgcgggcctgcgggctcaacttcgcagacctcatggctaggcaggggctgtacgaccgtctccc

SEQ ID NO: 22779 - DNA, 201 bp, Homo sapiens
tggatggtgaggtggagctggtcagtggtgtggtggcccgcctcctggctctgtacaaccagggccacatcaagccccacattgactcagtctggcccttygagaaggtggctgatgccatgaaacagatgcaggagaagaagaatgtgggcaaggtcctcctggttccagggccagagaaggagaactagggcaagtggc

SEQ ID NO: 22780 - DNA, 201 bp, Homo sapiens
cccgcccctcccgctggatcccgcagccgcggctcttcccgacgcgttccgccttccccagctgtgcactctccatccagctgtgcgctctcgtcgggagkcccagccatgtccgacgagagagaggtagccgaggcagcgaccggggaagacgcctcttcgccgcctccgaaaaccgaggcagcgagcgacccccagcat

SEQ ID NO: 22781 - DNA, 201 bp, Homo sapiens
gccggctgcttcctgcccccaccctttccccgggcctgctgtgctgcttttgtgccaaggttagccagtcccccctgttgtgttccatgtgctttcacctstgcctcatctttcctcccgtccctgccccgccacctccccaaagaattgaaacgtcagctcaggatatggggccaatctctgtgagtccagcatgtacct

SEQ ID NO: 22782 - DNA, 201 bp, Homo sapiens
ggggagatggagcagggaagtacagagtgggatggtcaggacctgggccattgcaaccaaaatggggacttcctgggtagggaggtcactccctctactcmctgagctaggattagggagggttattgccccaaccattgcaatgggaggtggagggacaggctcagcctcctcattgtctaaatgaggcctaaatgtgtg

SEQ ID NO: 22783 - DNA, 201 bp, Homo sapiens
cggcccctgggcccggccagctgacgctgcgtctgcgggcctgcgggctcaacttcgcagacctcatggctaggcaggggctgtacgaccgtctcccgcckctgcctgtcactccgggcatggagggcgcgggtgttgtgatcgcagtgggcgagggagtcagcgaccgcaaggcaggagaccgggtgatggtgttgaacc

SEQ ID NO: 22784 - DNA, 201 bp, Homo sapiens
ttgggcttcttccatctccaggttttctgccattcttaaccaaggctgcctcttccaacagggcgggaatcagacctactcccctaggtcacaactctgggaaggatacagagcccccacccttcactgagttctctggatttgttctcagtgccttagcaacgaaaacctgtgcttgtgtgtgtgtggcggcggggaggg

SEQ ID NO: 22785 - DNA, 191 bp, Homo sapiens
tcactgagctaggattagggagggttattgccccaaccattgcaatgggaggtggagggacaggctcagcctcctcattgtctaaatgaggcctaaatgtktgaagtgcgatttctgcttttgtgtaccccaccaccccattaccacagctgcctttgtgtgtttgtgtcaataaaaagccaaaccctggg

SEQ ID NO: 22786 - DNA, 201 bp, Homo sapiens
tgaaaggcagtgctgtctgtttcttgtactgggaccaaagtaaaaatccaagcacattccccttgcagttaggggaggccctactgccttctcaaagcagrgaggcagcttatcaaactcagcccaaaactctgtttacatgggtggggagatggagcagggaagtacagagtgggatggtcaggacctgggccattgcaa

SEQ ID NO: 22787 - DNA, 201 bp, Homo sapiens
gggaggtcactccctctactcactgagctaggattagggagggttattgccccaaccattgcaatgggaggtggagggacaggctcagcctcctcattgtytaaatgaggcctaaatgtgtgaagtgcgatttctgcttttgtgtaccccaccaccccattaccacagctgcctttgtgtgtttgtgtcaataaaaagcca

SEQ ID NO: 22788 - DNA, 177 bp, Homo sapiens
ttagggagggttattgccccaaccattgcaatgggaggtggagggacaggctcagcctcctcattgtctaaatgaggcctaaatgtgtgaagtgcgatttytgcttttgtgtaccccaccaccccattaccacagctgcctttgtgtgtttgtgtcaataaaaagccaaaccctggg

SEQ ID NO: 22789 - DNA, 201 bp, Homo sapiens
ggggaggcagggcaaaaacaggtgccctcatcgtggtctgtgccatgtcccgtctctatggtggttgaggagaaaggcggggaagcttcctcagccttgcrgatatgtgtggcatttactagccagagctctgaaaggcagtgctgtctgtttcttgtactgggaccaaagtaaaaatccaagcacattccccttgcagtt

SEQ ID NO: 22790 - DNA, 101 bp, Homo sapiens
gcctaaatgtgtgaagtgcgatttctgcttttgtgtaccccaccaccccattaccacagctgcctttgtgtgtttgtgtcaataaaaagccaaaccctggr

SEQ ID NO: 22791 - DNA, 201 bp, Homo sapiens
tgactcagtctggcccttcgagaaggtggctgatgccatgaaacagatgcaggagaagaagaatgtgggcaaggtcctcctggttccagggccagagaagsagaactagggcaagtggctgtgagaccctagagaccagcgaagggagaagttgggaagctacgttctgttggccaccagacttgcatttcagcctctgtc

SEQ ID NO: 22792 - DNA, 201 bp, Homo sapiens
tagagaccagcgaagggagaagttgggaagctacgttctgttggccaccagacttgcatttcagcctctgtcataatgctctgccctccctcccccgaagktctctgtggtgatgaccgctctcccctgcccctccccgcttcctgacctctgaagaggttgggaagtgaccatttggatgtctgggccctgccaaggcga

SEQ ID NO: 22793 - DNA, 102 bp, Homo sapiens
ggcctaaatgtgtgaagtgcgatttctgcttttgtgtaccccaccaccccattaccacagctgcctttgtgtgtttgtgtcaataaaaagccaaaccctgrg

SEQ ID NO: 22794 - DNA, 201 bp, Homo sapiens; identical to SEQ ID NO: 22783

SEQ ID NO: 22795 - DNA, 201 bp, Homo sapiens; identical to SEQ ID NO: 22777

SEQ ID NO: 22796 - DNA, 201 bp, Homo sapiens; identical to SEQ ID NO: 22778

SEQ ID NO: 22797 - DNA, 201 bp, Homo sapiens; identical to SEQ ID NO: 22779

SEQ ID NO: 22798 - DNA, 190 bp, Homo sapiens
tcactgagctaggattagggagggttattgccccaaccattgcaatgggaggtggagggacaggctcagcctcctcattgtctaaatgaggcctaaatgtktgaagtgcgatttctgcttttgtgtaccccaccaccccattaccacagctgcctttgtgtgtttgtgtcaataaaaagccaaaccctgg

SEQ ID NO: 22799 - DNA, 201 bp, Homo sapiens; identical to SEQ ID NO: 22787

SEQ ID NO: 22800 - DNA, 176 bp, Homo sapiens
ttagggagggttattgccccaaccattgcaatgggaggtggagggacaggctcagcctcctcattgtctaaatgaggcctaaatgtgtgaagtgcgatttytgcttttgtgtaccccaccaccccattaccacagctgcctttgtgtgtttgtgtcaataaaaagccaaaccctgg

SEQ ID NO: 22801 - DNA, 201 bp, Homo sapiens; identical to SEQ ID NO: 22780

SEQ ID NO: 22802 - DNA, 201 bp, Homo sapiens; identical to SEQ ID NO: 22791

SEQ ID NO: 22803 - DNA, 201 bp, Homo sapiens
tctgccctccctcccccgaatacagagtgggatggtcaggacctgggccattgcaaccaaaatggggacttcctgggtagggaggtcactccctctactcmctgagctaggattagggagggttattgccccaaccattgcaatgggaggtggagggacaggctcagcctcctcattgtctaaatgaggcctaaatgtgtg

SEQ ID NO: 22804 - DNA, 101 bp, Homo sapiens
ggcctaaatgtgtgaagtgcgatttctgcttttgtgtaccccaccaccccattaccacagctgcctttgtgtgtttgtgtcaataaaaagccaaaccctgr

SEQ ID NO: 22805 - DNA, 201 bp, Homo sapiens
cagtctggcccttcgagaaggtggctgatgccatgaaacagatgcaggagaagaagaatgtgggcaaggtcctcctggttccagggccagagaaggagaaktagggcaagtggctgtgagaccctagagaccagcgaagggagaagttgggaagctacgttctgttggccaccagacttgcatttcagcctctgtcataat

SEQ ID NO: 22806 - DNA, 201 bp, Homo sapiens
tccttatgcaactaatgaaattggcaaagtcactggtttaaatagaagagaacttgggcatggtgctcttgctgagaaagctttgtatcctgttattcccmgagattttcctttcaccataagagttacatctgaagtcctagagtcaaatgggtcatcttctatggcatctgcatgtggcggaagtttagcattaatgga

SEQ ID NO: 22807 - DNA, 201 bp, Homo sapiens
tgatggagaatatgttgttaacccaacaagaaaagaaatgtcttctagtactttaaatttagtggttgctggagcacctaaaagtcagattgtcatgttgsaagcctctgcagagaacattttacagcaggacttttgccatgctatcaaagtgggagtgaaatatacccaacaaataattcagggcattcagcagttggt

SEQ ID NO: 22808 - DNA, 201 bp, Homo sapiens
atttcacagtcatcatctaattctcagtgatttttttttttaaagagaattctagaattctattttgtctagggtgatgtgctgtagagcaacattttagyagtatcttccattgtgtagatttctatataatataaatacattttaattatttgtactaaaatgctcatttacatgtgccatttttttaattcgagtaac

SEQ ID NO: 22809 - DNA, 201 bp, Homo sapiens
gagattgtgaaatatactcataaacttgctatggagagactctatgcagtttttacagattacgagcatgacaaagtttccagagatgaagctgttaacaraataagattagatacggaggaacaactaaaagaaaaatttccagaagccgatccatatgaaataatagaatccttcaatgttgttgcaaaggaagttttt

SEQ ID NO: 22810 - DNA, 201 bp, Homo sapiens
tgctcgtgcctccggctccggcccctgagcgatggtcctttccttctgccacggcgggatcgggcactcacccagttgcaagtgcgagcactatggagtascgcagggtctcgagctgtggccgtggacttaggcaacaggaaattagaaatatcttctggaaagctggccagatttgcagatggctctgctgtagtacag

SEQ ID NO: 22811 - DNA, 201 bp, Homo sapiens
ttaaattacgatagtacacacacaaaaaccttatttatctaattgcctttcgttggcacataaagacaaagatcgtttgcaacataatcgcgttctgatasgtttgaccctctctagtcttcgtagaaggtggccaaggtttccgttaccccggcgtccctcgggcaccgcggaaacgaaactccatcaggctccgcccca

SEQ ID NO: 22812 - DNA, 201 bp, Homo sapiens
taattcgagtaacccatatttgtttaattgtatttacattataaatcaagaaatatttattattaaaagtaagtcatttatacatcttagaaaaaattacwgttttgtttttacaattctgaaatatatgaaaaacttagaatatgtcatatgttattataacagatctcttcctacatcttatttttcttctttgtatac

SEQ ID NO: 22813 - DNA, 201 bp, Homo sapiens
gcttcagtcgccagctacaaccgtggtcagaactttgaatgacagaagtagtattgtaatgggagaacctatttcacagtcatcatctaattctcagtgatttttttttttaaagagaattctagaattctattttgtctagggtgatgtgctgtagagcaacattttagtagtatcttccattgtgtagatttctatata

SEQ ID NO: 22814 - DNA, 201 bp, Homo sapiens
aacaaaaccttccccttcccagtttatgcctttggtggttgactacagacaaaaagctgctgcagcaggtagaattcccacaaactatctgagaagagagrttggtacttctgataaagaaattctaacaagtcgaataatagatcgttcaattagaccgctctttccagctggctacttctatgatacacaggttctgtg

SEQ ID NO: 22815 - DNA, 201 bp, Homo sapiens
agatatagtgagttgagggagctaatctgatacacttttgataatataatgcctttcaaattagttaccaaatcataaacagagtggaataaatataaatkagattctaactaggatgaatgtggtagtaatgatgtatatttttcaaatttacctaaacagaaagattattggctaaggcaggcggatcatgagatcagg

SEQ ID NO: 22816 - DNA, 201 bp, Homo sapiens; identical to SEQ ID NO: 22806

SEQ ID NO: 22817 - DNA, 201 bp, Homo sapiens; identical to SEQ ID NO: 22807

SEQ ID NO: 22818 - DNA, 201 bp, Homo sapiens; identical to SEQ ID NO: 22808

SEQ ID NO: 22819 - DNA, 201 bp, Homo sapiens; identical to SEQ ID NO: 22809

SEQ ID NO: 22820 - DNA, 201 bp, Homo sapiens; identical to SEQ ID NO: 22810

SEQ ID NO: 22821 - DNA, 201 bp, Homo sapiens; identical to SEQ ID NO: 22811

SEQ ID NO: 22822 - DNA, 201 bp, Homo sapiens; identical to SEQ ID NO: 22812

SEQ ID NO: 22823 - DNA, 201 bp, Homo sapiens; identical to SEQ ID NO: 22813

SEQ ID NO: 22824 - DNA, 201 bp, Homo sapiens; identical to SEQ ID NO: 22814

SEQ ID NO: 22825 - DNA, 201 bp, Homo sapiens; identical to SEQ ID NO: 22815

SEQ ID NO: 22826 - DNA, 201 bp, Homo sapiens
agccaaccagcagtatgtgccggaaccaaatcctgtcagcattgctgattctgaggccagccctttgttagcagtcaggattttacagttggcgtgtggcraggagcacactctggcattgtcaataagcagagagatttgggcatggggtaccggttgtcagttgggtctcattaccactgccttcccagtgacaaagcc

SEQ ID NO: 22827 - DNA, 201 bp, Homo sapiens
aaacataccatcataccctgacacccaagcagtcaatgaatacctacggaaactgtcagatcattcagtaagagaggactcagagcatggtgaaaagccartgccatctcaggtacctgctcaattttataaaataaaagtgtgtctagagttgaactgtatgggcttttctttagaaactttaaaatgagtaaggcttgg

SEQ ID NO: 22828 - DNA, 201 bp, Homo sapiens
agctcggattccaagagccgcccgcgccctcgtttaccttcgctagtcgccctgcagccccgccctgtccggaggccccgccctccatgaatcagctgatyccgcggacccactgggttgccaagctcgcgccggatgcggagcgcggtgctgccggtggagcttcaggtcttgatagactttctgtaaagaaggaatgat

SEQ ID NO: 22829 - DNA, 201 bp, Homo sapiens
ttgtccaagtagccccattctagaaaatgccctggttgggcaatatgttattactgtggcaacaggaagcttccatagtggagcagtgacagacaatggtrtcgcgtacatgtggggagagaattctgctggccagtgtgcagtagccaaccagcagtatgtgccggaaccaaatcctgtcagcattgctgattctgaggc

SEQ ID NO: 22830 - DNA, 201 bp, Homo sapiens
aggccagccctttgttagcagtcaggattttacagttggcgtgtggcgaggagcacactctggcattgtcaataagcagagagatttgggcatggggtacyggttgtcagttgggtctcattaccactgccttcccagtgacaaagccgcaaaaggtagaacatcttgctgggcgagtggtgcttcaagttgcctgtggtg

SEQ ID NO: 22831 - DNA, 201 bp, Homo sapiens
cctacttcaaacctagtctatatgagagtgataaagacagacctaaagttttcaggaagctaggaaacctggcagtgccagctgatgagaagtggaaagcrgtgtttgacgaatgttggcgccaactgggctgtgagggcccaggccaaggggaagtttggaaagcatgggacaatattgctgtggccttgaccaccagtc

SEQ ID NO: 22832 - DNA, 201 bp, Homo sapiens
taaaggaagccaggagtttggtcatcctgaagcattcaagtctcttcttggatagttatacagagcaagtatccagtcccgtgtattgcacatctattacmaatttcctggttatgggaggattccagcttcttgctaagcctgccattgatttcctaaataaaaaccaagagctgttgcaagatttgtcagaagtaaatg

SEQ ID NO: 22833 - DNA, 201 bp, Homo sapiens
ttacaaatttcctggttatgggaggattccagcttcttgctaagcctgccattgatttcctaaataaaaaccaagagctgttgcaagatttgtcagaagtraatgacgaaaacactcagttgatggaaatactgaatactttgtttttcttgccaatcagacgacttcataattacgcaaaagttttgctaaagcttgcta

SEQ ID NO: 22834 - DNA, 201 bp, Homo sapiens
cagtagaatgtctgcagcagatcagcacaacatttaccccatcagacaaacttaaggtcatccagcagacttttgaggagatctctcagagtgtcctggcrtcactccacgaagacttcttgtggtccatggatgacttgtttcctgttttcttatatgtggtgctacgggccaggattaggaatttaggctctgaggtac

SEQ ID NO: 22835 - DNA, 201 bp, Homo sapiens
tcttccctatacttcacactgaactcaggatgggaagaaaaaggaaacaagctttggctttttccatctcaaaagtattgtggcacctcaacatttcagtrttttgctttttaaaaaatgccctattgtaagttgttggtttatactgtataagtaacactagtagctgttttgaataacataggtgctcttcctcatctc

SEQ ID NO: 22836 - DNA, 201 bp, Homo sapiens
aaacataccatcataccctgacacccaagcagtcaatgaatacctacggaaactgtcagatcattcagtaagagaggactcagagcatggtgaaaagccartgccatctcagcctcttttagaagaagcaattcctaatctccacagcccgcctaccacaagcacctcagccctaaacagcctggtggtctcttgtgcatc

SEQ ID NO: 22837 - DNA, 201 bp, Homo sapiens; identical to SEQ ID NO: 22826

SEQ ID NO: 22838 - DNA, 201 bp, Homo sapiens
ctgtgagggcccaggccaaggggaagtttggaaagcatgggacaatattgctgtggccttgaccaccagtcggcgccagcacagagacagtccagaaataytgagtcgttcacagactcagacactagagagtttggaattcattccacagcatgttggtgccttctctgtggagaaatatgatgacatcaggaaatattt

SEQ ID NO: 22839 - DNA, 201 bp, Homo sapiens
gtggagaagcagatgcgctcctgccttctctgagaacagaagtgtggacctgggggaaagggaaggaagggcagctggggcacggcgatgttctgcctagrcttcaaccgttgtgtgtaaaatgtctggatggcaaagaagtaatccatctggaggcaggtggttaccattctcttgcacttactgcgaaatcccaggttt

SEQ ID NO: 22840 - DNA, 201 bp, Homo sapiens; identical to SEQ ID NO: 22828

SEQ ID NO: 22841 - DNA, 201 bp, Homo sapiens; identical to SEQ ID NO: 22829

SEQ ID NO: 22842 - DNA, 201 bp, Homo sapiens; identical to SEQ ID NO: 22830

SEQ ID NO: 22843 - DNA, 201 bp, Homo sapiens; identical to SEQ ID NO: 22831

SEQ ID NO: 22844 - DNA, 201 bp, Homo sapiens
gcagcttccttcatggggtaaaggaagccaggagtttggtcatcctgaagcattcaagtctcttcttggatagttatacagagtattgcacatctattacmaatttcctggttatgggaggattccagcttcttgctaagcctgccattgatttcctaaataaaaaccaagagctgttgcaagatttgtcagaagtaaatg

SEQ ID NO: 22845 - DNA, 201 bp, Homo sapiens; identical to SEQ ID NO: 22833

SEQ ID NO: 22846 - DNA, 201 bp, Homo sapiens; identical to SEQ ID NO: 22834

SEQ ID NO: 22847 - DNA, 201 bp, Homo sapiens; identical to SEQ ID NO: 22835

SEQ ID NO: 22848 - DNA, 201 bp, Homo sapiens; identical to SEQ ID NO: 22836

SEQ ID NO: 22849 - DNA, 201 bp, Homo sapiens; identical to SEQ ID NO: 22826

SEQ ID NO: 22850 - DNA, 201 bp, Homo sapiens; identical to SEQ ID NO: 22838

SEQ ID NO: 22851 - DNA, 201 bp, Homo sapiens; identical to SEQ ID NO: 22839

SEQ ID NO: 22852 - DNA, 201 bp, Homo sapiens; identical to SEQ ID NO: 22828

SEQ ID NO: 22853 - DNA, 201 bp, Homo sapiens; identical to SEQ ID NO: 22829

SEQ ID NO: 22854 - DNA, 201 bp, Homo sapiens; identical to SEQ ID NO: 22830

SEQ ID NO: 22855 - DNA, 201 bp, Homo sapiens
atcctttttcaggggttatttaaaaatctgccttagattctatagtgaagacaagcatttcaagaaagagttacctggatcagccatgctcagctgtgacrcctgaataactgtctactttatcttcactgaaccactcactctgtgtaaaggccaacagatttttaatgtggttttcatatcaaaagatcatgttgggat

SEQ ID NO: 22856 - DNA, 201 bp, Homo sapiens
ttcaagaaagagttacctggatcagccatgctcagctgtgacgcctgaataactgtctactttatcttcactgaaccactcactctgtgtaaaggccaacrgatttttaatgtggttttcatatcaaaagatcatgttgggattaacttgcctttttccccaaaaaataaactctcaggcaagcatttctttaaagctatt

SEQ ID NO: 22857 - DNA, 201 bp, Homo sapiens
taagcaaatgttcttataatgctacctgatttctatgaaatgtgtttgacaagccaaaattctaggatgtagaaatctggaaagttcatttcctgggattmacttctccagggattttttaaagttaatttgggaaattaacagcagttcactttattgtgagtctttgccacatttgactgaattgagctgtcatttgta

SEQ ID NO: 22858 - DNA, 201 bp, Homo sapiens
gaattgagctgtcatttgtacatttaaagcagctgttttggggtctgtgagagtacatgtattatatacaagcacaacagggcttgcactaaagaattgtmattgtaataacactacttggtagcctaacttcatatatgtattcttaattgcacaaaaagtcaataatttgtcaccttggggttttgaatgtttgcttta

SEQ ID NO: 22859 - DNA, 201 bp, Homo sapiens
ccccggtgtctgccactgtgctgacgttcctcagagcagccctgggctgtcagttttatgaaggatacggacagacagagtgcactgccgggtgctgcctraccatgcctggagactggaccgcaggccatgttggggccccgatgccgtgcaatttgataaaacttgttgatgtggaagaaatgaattacatggctgccg

SEQ ID NO: 22860 - DNA, 201 bp, Homo sapiens
tccagaagggcttcaagactgccccagatcagttcattggcatctttgctcaaaatagacctgagtgggtgattattgaacaaggatgctttgcttattcratggtgatcgttccactttatgatacccttggaaatgaagccatcacgtacatagtcaacaaagctgaactctctctggtttttgttgacaagccagaga

SEQ ID NO: 22861 - DNA, 201 bp, Homo sapiens
gcggaagagtccggctgatggtgacaggagccgccccggtgtctgccactgtgctgacgttcctcagagcagccctgggctgtcagttttatgaaggatayggacagacagagtgcactgccgggtgctgcctgaccatgcctggagactggaccgcaggccatgttggggccccgatgccgtgcaatttgataaaacttg

SEQ ID NO: 22862 - DNA, 201 bp, Homo sapiens
aacccactgtcttccccgtggttccaagactgctgaaccggatgtttgaccgaattttcggacaagcaaacaccacgctgaagcgatggctcttggacttygcctccaagaggaaagaagcagagcttcgcagcggcatcatcagaaacaacagcctgtgggaccggctgatcttccacaaagtacagtcgagcctgggcg

SEQ ID NO: 22863 - DNA, 201 bp, Homo sapiens
ttgttaattttgaatacagcaagtgtagggaaggaagcgttcgtgtttgacttgtccattcggggttcttctcataggaatgctagaggaaacagaacacygccttacagtcacctcatgttgcagaccatgtttatggtaatacacactttccaaaatgagccttaaaaattgtaaaggggatactataaatgtgctaag

SEQ ID NO: 22864 - DNA, 201 bp, Homo sapiens
gtgaagaagaaagctcagaggaaatggcacagttccacaatctcttctcctgctgatggccttcatgttgttaattttgaatacagcaagtgtagggaagraagcgttcgtgtttgacttgtccattcggggttcttctcataggaatgctagaggaaacagaacactgccttacagtcacctcatgttgcagaccatgtt

SEQ ID NO: 22865 - DNA, 201 bp, Homo sapiens
atggcccttgtttaggctctcggaaaccagaccaaccctatgaatggctttcatataaacaggttgcagaattgtcggagtgcataggctcagcactgatmcagaagggcttcaagactgccccagatcagttcattggcatctttgctcaaaatagacctgagtgggtgattattgaacaaggatgctttgcttattcga

SEQ ID NO: 22866 - DNA, 201 bp, Homo sapiens
ccttcatgttgttaattttgaatacagcaagtgtagggaaggaagcgttcgtgtttgacttgtccattcggggttcttctcataggaatgctagaggaaasagaacactgccttacagtcacctcatgttgcagaccatgtttatggtaatacacactttccaaaatgagccttaaaaattgtaaaggggatactataaat

SEQ ID NO: 22867 - DNA, 201 bp, Homo sapiens
tgagccttaaaaattgtaaaggggatactataaatgtgctaagttatttgagacttcctcagtttaaaaagtgggttttaaatcttctgtctccctgtttytctaatcaaggggttaggactttgctatctctgagatgtctgctacttgctgcaaattctgcagctgtctgctgctctaaagagtacagtgcactagagg

SEQ ID NO: 22868 - DNA, 201 bp, Homo sapiens; identical to SEQ ID NO: 22855

SEQ ID NO: 22869 - DNA, 201 bp, Homo sapiens; identical to SEQ ID NO: 22856

SEQ ID NO: 22870 - DNA, 201 bp, Homo sapiens; identical to SEQ ID NO: 22857

SEQ ID NO: 22871 - DNA, 201 bp, Homo sapiens; identical to SEQ ID NO: 22858

SEQ ID NO: 22872 - DNA, 201 bp, Homo sapiens; identical to SEQ ID NO: 22859

SEQ ID NO: 22873 - DNA, 201 bp, Homo sapiens; identical to SEQ ID NO: 22860

SEQ ID NO: 22874 - DNA, 201 bp, Homo sapiens; identical to SEQ ID NO: 22861

SEQ ID NO: 22875 - DNA, 201 bp, Homo sapiens; identical to SEQ ID NO: 22862

SEQ ID NO: 22876 - DNA, 201 bp, Homo sapiens; identical to SEQ ID NO: 22863

SEQ ID NO: 22877 - DNA, 201 bp, Homo sapiens; identical to SEQ ID NO: 22864

SEQ ID NO: 22878 - DNA, 201 bp, Homo sapiens; identical to SEQ ID NO: 22865

SEQ ID NO: 22879 - DNA, 201 bp, Homo sapiens; identical to SEQ ID NO: 22866

SEQ ID NO: 22880 - DNA, 201 bp, Homo sapiens; identical to SEQ ID NO: 22867

SEQ ID NO: 22881 - DNA, 201 bp, Homo sapiens; identical to SEQ ID NO: 22855

SEQ ID NO: 22882 - DNA, 201 bp, Homo sapiens; identical to SEQ ID NO: 22856

SEQ ID NO: 22883 - DNA, 201 bp, Homo sapiens; identical to SEQ ID NO: 22857

SEQ ID NO: 22884 - DNA, 201 bp, Homo sapiens; identical to SEQ ID NO: 22858

SEQ ID NO: 22885 - DNA, 201 bp, Homo sapiens; identical to SEQ ID NO: 22859

SEQ ID NO: 22886 - DNA, 201 bp, Homo sapiens; identical to SEQ ID NO: 22860

SEQ ID NO: 22887 - DNA, 201 bp, Homo sapiens; identical to SEQ ID NO: 22861

SEQ ID NO: 22888 - DNA, 201 bp, Homo sapiens; identical to SEQ ID NO: 22862

SEQ ID NO: 22889 - DNA, 201 bp, Homo sapiens; identical to SEQ ID NO: 22863

SEQ ID NO: 22890 - DNA, 201 bp, Homo sapiens; identical to SEQ ID NO: 22864

SEQ ID NO: 22891 - DNA, 201 bp, Homo sapiens; identical to SEQ ID NO: 22865

SEQ ID NO: 22892 - DNA, 201 bp, Homo sapiens; identical to SEQ ID NO: 22866

SEQ ID NO: 22893 - DNA, 201 bp, Homo sapiens; identical to SEQ ID NO: 22867

SEQ ID NO: 22894 - DNA, 201 bp, Homo sapiens; identical to SEQ ID NO: 22855

SEQ ID NO: 22895 - DNA, 201 bp, Homo sapiens; identical to SEQ ID NO: 22856

SEQ ID NO: 22896 - DNA, 201 bp, Homo sapiens; identical to SEQ ID NO: 22857

SEQ ID NO: 22897 - DNA, 201 bp, Homo sapiens; identical to SEQ ID NO: 22859

SEQ ID NO: 22898 - DNA, 201 bp, Homo sapiens; identical to SEQ ID NO: 22860

SEQ ID NO: 22899 - DNA, 201 bp, Homo sapiens; identical to SEQ ID NO: 22861

SEQ ID NO: 22900 - DNA, 201 bp, Homo sapiens; identical to SEQ ID NO: 22862

SEQ ID NO: 22901 - DNA, 201 bp, Homo sapiens; identical to SEQ ID NO: 22863

SEQ ID NO: 22902 - DNA, 201 bp, Homo sapiens; identical to SEQ ID NO: 22864

SEQ ID NO: 22903 - DNA, 201 bp, Homo sapiens; identical to SEQ ID NO: 22865

SEQ ID NO: 22904 - DNA, 201 bp, Homo sapiens; identical to SEQ ID NO: 22866

SEQ ID NO: 22905 - DNA, 201 bp, Homo sapiens
aacaagtctcttccctaagactcattatgccgctggaaaagatgccaaaattttctggatacctctgtctcacatgccagcagctttgcaagactttttaytgttgaaacagaaagcagagctggctaatcccaaggcagtgtgactcagctaaccacaaatgtctcctccaggctatgaaattggccgatttcaagaaca

SEQ ID NO: 22906 - DNA, 201 bp, Homo sapiens
caataaatcctatgtgaacatggacctctctccggtggtagagtgcatggaccacgctctaacaagtctcttccctaagactcattatgccgctggaaaasatgccaaaattttctggatacctctgtctcacatgccagcagctttgcaagactttttattgttgaaacagaaagcagagctggctaatcccaaggcagt

SEQ ID NO: 22907 - DNA, 201 bp, Homo sapiens
aaactcgccatttgggagcagctgtctccagacatcaaacaacaatatggagaaggttacattgaaaaaagtctagacaaactgaaaggcaataaatcctrtgtgaacatggacctctctccggtggtagagtgcatggaccacgctctaacaagtctcttccctaagactcattatgccgctggaaaagatgccaaaatt

SEQ ID NO: 22908 - DNA, 201 bp, Homo sapiens
cctctgtctcacatgccagcagctttgcaagactttttattgttgaaacagaaagcagagctggctaatcccaaggcagtgtgactcagctaaccacaaaygtctcctccaggctatgaaattggccgatttcaagaacacatctccttttcaaccccattccttatctgctccaacctggactcatttagatcgtgctta

SEQ ID NO: 22909 - DNA, 201 bp, Homo sapiens
ggcagccagaacttttgataaaaagggatttcatgtaatcgctgcctgtctgactgaatcaggatcaacagctttaaaggcagaaacctcagagagacttygtactgtgcttctggatgtgaccgacccagagaatgtcaagaggactgcccagtgggtgaagaaccaagttggggagaaaggtctctggggtctgatcaa

SEQ ID NO: 22910 - DNA, 201 bp, Homo sapiens
taggcctcctaatcctctgtggttttctgtggactcgtaaaggaaaactaaagattgaagacatcactgataagtacatttttatcactggatgtgactcrggctttggaaacttggcagccagaacttttgataaaaagggatttcatgtaatcgctgcctgtctgactgaatcaggatcaacagctttaaaggcagaaa

SEQ ID NO: 22911 - DNA, 201 bp, Homo sapiens
ggtatcccagggtccctgctcaagttttctttgaaaaggagggctggaatggtacatcacataggcaagtcctgccctgtatttaggctttgcctgcttgstgtgatgtaagggaaattgaaagacttgcccattcaaaatgatctttaccgtggcctgccccatgcttatggtccccagcatttacagtaacttgtgaat

SEQ ID NO: 22912 - DNA, 201 bp, Homo sapiens; identical to SEQ ID NO: 22905

SEQ ID NO: 22913 - DNA, 201 bp, Homo sapiens; identical to SEQ ID NO: 22906

SEQ ID NO: 22914 - DNA, 201 bp, Homo sapiens; identical to SEQ ID NO: 22907

SEQ ID NO: 22915 - DNA, 201 bp, Homo sapiens; identical to SEQ ID NO: 22908

SEQ ID NO: 22916 - DNA, 201 bp, Homo sapiens; identical to SEQ ID NO: 22909

SEQ ID NO: 22917 - DNA, 201 bp, Homo sapiens; identical to SEQ ID NO: 22910

SEQ ID NO: 22918 - DNA, 201 bp, Homo sapiens; identical to SEQ ID NO: 22911

SEQ ID NO: 22919 - DNA, 142 bp, Homo sapiens
aacaagtctcttccctaagactcattatgccgctggaaaagatgccaaaattttctggatacctctgtctcacatgccagcagctttgcaagactttttaytgttgaaacagaaagcagagctggctaatcccaaggcagtg

SEQ ID NO: 22920 - DNA, 201 bp, Homo sapiens; identical to SEQ ID NO: 22906

SEQ ID NO: 22921 - DNA, 201 bp, Homo sapiens
gtggaaggtttcaatgacagcttaagacgggacatgaaagcttttggtgtgcacgtctcatgcattgaacgtctagacaaactgaaaggcaataaatcctrtgtgaacatggacctctctccggtggtagagtgcatggaccacgctctaacaagtctcttccctaagactcattatgccgctggaaaagatgccaaaatt

SEQ ID NO: 22922 - DNA, 201 bp, Homo sapiens; identical to SEQ ID NO: 22909

SEQ ID NO: 22923 - DNA, 201 bp, Homo sapiens; identical to SEQ ID NO: 22910

SEQ ID NO: 22924 - DNA, 201 bp, Homo sapiens; identical to SEQ ID NO: 22905

SEQ ID NO: 22925 - DNA, 201 bp, Homo sapiens; identical to SEQ ID NO: 22906

SEQ ID NO: 22926 - DNA, 201 bp, Homo sapiens; identical to SEQ ID NO: 22907

SEQ ID NO: 22927 - DNA, 201 bp, Homo sapiens; identical to SEQ ID NO: 22908

SEQ ID NO: 22928 - DNA, 201 bp, Homo sapiens; identical to SEQ ID NO: 22909

SEQ ID NO: 22929 - DNA, 201 bp, Homo sapiens; identical to SEQ ID NO: 22910

SEQ ID NO: 22930 - DNA, 201 bp, Homo sapiens; identical to SEQ ID NO: 22911

SEQ ID NO: 22931 - DNA, 201 bp, Homo sapiens; identical to SEQ ID NO: 22905

SEQ ID NO: 22932 - DNA, 201 bp, Homo sapiens; identical to SEQ ID NO: 22906

SEQ ID NO: 22933 - DNA, 201 bp, Homo sapiens; identical to SEQ ID NO: 22907

SEQ ID NO: 22934 - DNA, 201 bp, Homo sapiens; identical to SEQ ID NO: 22908

SEQ ID NO: 22935 - DNA, 201 bp, Homo sapiens; identical to SEQ ID NO: 22909

SEQ ID NO: 22936 - DNA, 201 bp, Homo sapiens; identical to SEQ ID NO: 22910

SEQ ID NO: 22937 - DNA, 201 bp, Homo sapiens; identical to SEQ ID NO: 22911

SEQ ID NO: 22938 - DNA, 201 bp, Homo sapiens
tgaaactgaccacccaggcctactgcaagatggtgctgcacggcgccaagtacccgcactgcgccgtcaacgggctcctggtggccgagaagcagaagccrcgtaaggagcacctccccctgggcggccccggcgcccaccacaccctcttcgtggactgcatccccctcttccacggcaccctggccctcgcccccatgc

SEQ ID NO: 22939 - DNA, 201 bp, Homo sapiens
gcctcgctcctggacagccggtcctacgagacgctcgtggatttcgataaccacctggatgacattcggaatgactggacaaacccagagatcaataaagytgtcctacacttgtgctaggcaggcaccgctgtgactgggctccgggcctttccactacgttgaagaagaaaacctatttttaaatttcaatcaaatgcc

SEQ ID NO: 22940 - DNA, 201 bp, Homo sapiens
ggcgagaagcgcgactggagtctggggctgcggcttcccagaggcgcgagtcgcttttccaggagccgaggcccaaacggggccgggcctgaagggtcccmcgccagcccgcggccgcgccatcaatcgccgccgcctcgtcccgcttctcggctgaggcgccgcgcggccaggcagcgggtccaggcctcagccgcgcgc

SEQ ID NO: 22941 - DNA, 135 bp, Homo sapiens
ggatcgaggaagactccgcccgcacccggccgcamggaggtcaccgtggagcggaaaagggtagcgctgcgaacgtcgtaaaatgccgggccgggctgctttccggcaggcgttggagaggctgctttccggcgg

SEQ ID NO: 22942 - DNA, 201 bp, Homo sapiens
tgattgattcatggtgcaaagatcatagctacgtgattgctggttattatcaagctaatgagcgagtaaaggatgccagtccaaaccaggttgcagagaakgtggcctccagaatcgccgagggcttcagcgacactgcgctcatcatggtagacaacaccaagtttacgatggactgcgtagcgcctacgatccacgtgt

SEQ ID NO: 22943 - DNA, 201 bp, Homo sapiens; identical to SEQ ID NO: 22938

SEQ ID NO: 22944 - DNA, 201 bp, Homo sapiens
gcctcgctcctggacagccggtcctacgagacgctcgtggatttcgataaccacctggatgacattcggaatgactggacaaacccagagatcaataaagytgtcctacacttgtgctaggcaggcaccgctgtgactgggctccgggcctttccactacgttgaagaagaaaacctatttttaaatgtaaataaaatatc

SEQ ID NO: 22945 - DNA, 201 bp, Homo sapiens; identical to SEQ ID NO: 22940

SEQ ID NO: 22946 - DNA, 135 bp, Homo sapiens; identical to SEQ ID NO: 22941

SEQ ID NO: 22947 - DNA, 201 bp, Homo sapiens
gtcctacacttgtgctaggcaggcaccgctgtgactgggctccgggcctttccactacgttgaagaagaaaacctatttttaaatgtaaataaaatatctkgtagcctgtgtggaaagctgaccgttttaagaagtggcatgtgccttgaaagggggcagaatgttcagtcggtcgtgtttttaacacagagtctctagaa

SEQ ID NO: 22948 - DNA, 201 bp, Homo sapiens; identical to SEQ ID NO: 22942

SEQ ID NO: 22949 - DNA, 118 bp, Homo sapiens
tgctctcttccggtcgckggacaccgggtgtagagggcggtcgcggcgggcagtggcggcaggtgtacatttttatctttcagaatgttggctaccagggtatttagcctagttggca

SEQ ID NO: 22950 - DNA, 201 bp, Homo sapiens
gagtgggtggccaagcagaccaagaggatgctggacatgaaggtgaaccccatccagggcttagcctccaagtgggactacgaaaagaacgagtggaagargtgagagatgctggcctgcgcctgcacctgcgcctggctctgtcaccgccatgcaactccatgcctatttactggaaacctgttatgccaaacagttgta

SEQ ID NO: 22951 - DNA, 201 bp, Homo sapiens
agagtgggtggccaagcagaccaagaggatgctggacatgaaggtgaaccccatccagggcttagcctccaagtgggactacgaaaagaacgagtggaagragtgagagatgctggcctgcgcctgcacctgcgcctggctctgtcaccgccatgcaactccatgcctatttactggaaacctgttatgccaaacagttgt

SEQ ID NO: 22952 - DNA, 201 bp, Homo sapiens
accaccccttgccggaggtggcccatgtcaagcacctgtctgccagccagaaggcactgaaggagaaggagaaggcctcctggagcagcctctccatggaygagaaagtcgagttgtatcgcattaagttcaaggagagctttgctgagatgaacaggggctcgaacgagtggaagacggttgtgggcggtgccatgttct

SEQ ID NO: 22953 - DNA, 201 bp, Homo sapiens
attaagttcaaggagagctttgctgagatgaacaggggctcgaacgagtggaagacggttgtgggcggtgccatgttcttcatcggtttcaccgcgctcgytatcatgtggcagaagcactatgtgtacggccccctcccgcaaagctttgacaaagagtgggtggccaagcagaccaagaggatgctggacatgaaggtg

SEQ ID NO: 22954 - DNA, 201 bp, Homo sapiens
ggtttcaccgcgctcgttatcatgtggcagaagcactatgtgtacggccccctcccgcaaagctttgacaaagagtgggtggccaagcagaccaagaggaygctggacatgaaggtgaaccccatccagggcttagcctccaagtgggactacgaaaagaacgagtggaagaagtgagagatgctggcctgcgcctgcacc

SEQ ID NO: 22955 - DNA, 191 bp, Homo sapiens
tgctctcttccggtcgcgggacaccgggtgtagagggcggtcgcggcgggcagtggcggcaggtgtacatttttatctttcagaatgttgrctaccagggtatttagcctagttggcaagcgagcaatttccacctctgtgtgtgtacgagctcatgaaagtgttgtgaagagcgaagacttttcgctccc

SEQ ID NO: 22956 - DNA, 201 bp, Homo sapiens
gaagagcgaagacttttcgctcccagcttatatggatcggcgtgaccaccccttgccggaggtggcccatgtcaagcacctgtctgccagccagaaggcaytgaaggagaaggagaaggcctcctggagcagcctctccatggatgagaaagtcgagttgtatcgcattaagttcaaggagagctttgctgagatgaacag

SEQ ID NO: 22957 - DNA, 201 bp, Homo sapiens
ccttttccgctccacggtgacctccgtgcggccgggtgcgggcggagtcttcctcgatcccgtggtgctccgcggcgcggccttgctctcttccggtcgckggacaccgggtgtagagggcggtcgcggcgggcagtggcggcagaatgttggctaccagggtatttagcctagttggcaagcgagcaatttccacctctg

SEQ ID NO: 22958 - DNA, 201 bp, Homo sapiens; identical to SEQ ID NO: 22950

SEQ ID NO: 22959 - DNA, 201 bp, Homo sapiens; identical to SEQ ID NO: 22951

SEQ ID NO: 22960 - DNA, 201 bp, Homo sapiens; identical to SEQ ID NO: 22952

SEQ ID NO: 22961 - DNA, 144 bp, Homo sapiens
cgacgttcgcagcgctacccttttccgctccacggtgacctccktgcggccgggtgcgggcggagtcttcctcgatcccgtggtgctccgcggcgcggccttgctctcttccggtcgcgggacaccgggtgtagagggcggtcg

SEQ ID NO: 22962 - DNA, 182 bp, Homo sapiens
cgacgttcgcagcgctacccttttccgctccacggtgacctccgtgcggccgggtgcgggcggagtcttcctcgatcccgtrgtgctccgcggcgcggccttgctctcttccggtcgcgggacaccgggtgtagagggcggtcgcggcgggcagtggcggcagaatgttggctaccagggta

SEQ ID NO: 22963 - DNA, 201 bp, Homo sapiens; identical to SEQ ID NO: 22953

SEQ ID NO: 22964 - DNA, 201 bp, Homo sapiens; identical to SEQ ID NO: 22954

SEQ ID NO: 22965 - DNA, 201 bp, Homo sapiens
ctcgatcccgtggtgctccgcggcgcggccttgctctcttccggtcgcgggacaccgggtgtagagggcggtcgcggcgggcagtggcggcagaatgttgrctaccagggtatttagcctagttggcaagcgagcaatttccacctctgtgtgtgtacgagctcatgaaagtgttgtgaagagcgaagacttttcgctccc

SEQ ID NO: 22966 - DNA, 201 bp, Homo sapiens; identical to SEQ ID NO: 22956

SEQ ID NO: 22967 - DNA, 200 bp, Homo sapiens
cgacgttcgcagcgctacccttttccgctccacggtgacctccgtgcggccgggtgcgggcggagtcttcctcgatcccgtggtgctccgcggcgcggcsttgctctcttccggtcgcgggacaccgggtgtagagggcggtcgcggcgggcagtggcggcagaatgttggctaccagggtatttagcctagttggcaag

SEQ ID NO: 22968 - DNA, 201 bp, Homo sapiens
tatggcaaaagtaggcatctaaagaatataaagcctcaaatcttccttactgtctctcttgtcacatggaatctacatgtgtttgaactattgctttaggrtttaaaataggggagcctgtggtggcctggtgcacagggctagaacgagagtgcctccccttcttgtgtcctggctggctgggatgctggtggctcttca

SEQ ID NO: 22969 - DNA, 201 bp, Homo sapiens
ggagacagcttactgcagcactgttggtgttcggagctcttctgtgccctggctccatgctttcacctacacaagcatcaccttcctaatcaccgcggggyggggagcgtgtggctgtgccccttctctttaatctcatttaatttttattaaacatgctcagtacctgtgttgagaaaaggctttctttatcctaaagat

SEQ ID NO: 22970 - DNA, 201 bp, Homo sapiens
ggtacaatgggatgccaaatgggtgcagtgatgacgtgttgccttggagaaggacagcagagaataagctggacaccaaatacccgtacgtgtgccatgcsgagctgaatgccatcatgaacaaaaattcgaccgatgtgaaaggctgtagtatgtatgttgccttgttcccttgtaatgaatgcgctaagctcatcatcc

SEQ ID NO: 22971 - DNA, 201 bp, Homo sapiens
tgtctctcttgtcacatggaatctacatgtgtttgaactattgctttaggatttaaaataggggagcctgtggtggcctggtgcacagggctagaacgagrgtgcctccccttcttgtgtcctggctggctgggatgctggtggctcttcagaggagcatcagctgtctgtcatctgctgcgatccggcagcctctcttca

SEQ ID NO: 22972 - DNA, 201 bp, Homo sapiens
gccccgggaggtggtgctgggcgtctgaacaccacatcccttcctgcgcccgtgtgtgggttgggaatgccgggtgtaggccctggatcagagctgacggrgttgcgagcggcgtggggtgtgcctgggacggtgaccggatgtgtcttcctgaatcgttgtattcgagctccagttctctctgtttctacagctgggcct

SEQ ID NO: 22973 - DNA, 201 bp, Homo sapiens
agcactgttggtgttcggagctcttctgtgccctggctccatgctttcacctacacaagcatcaccttcctaatcaccgcggggcggggagcgtgtggctstgccccttctctttaatctcatttaatttttattaaacatgctcagtacctgtgttgagaaaaggctttctttatcctaaagattattacctttttaaag

SEQ ID NO: 22974 - DNA, 201 bp, Homo sapiens
cctgcaagaaacgggacgactatttggaatggccagagtattttatggctgtggccttcttatcagcacagagaagcaaagatccaaattcccaggtcggygcctgcatcgtgaattcagaaaacaagattgtcgggattgggtacaatgggatgccaaatgggtgcagtgatgacgtgttgccttggagaaggacagcag

SEQ ID NO: 22975 - DNA, 201 bp, Homo sapiens
cttatcagcacagagaagcaaagatccaaattcccaggtcggcgcctgcatcgtgaattcagaaaacaagattgtcgggattgggtacaatgggatgccaratgggtgcagtgatgacgtgttgccttggagaaggacagcagagaataagctggacaccaaatacccgtacgtgtgccatgcggagctgaatgccatcat

SEQ ID NO: 22976 - DNA, 201 bp, Homo sapiens
tggattgtgagaaattccacccacgtggagacagcttactgcagcactgttggtgttcggagctcttctgtgccctggctccatgctttcacctacacaarcatcaccttcctaatcaccgcggggcggggagcgtgtggctgtgccccttctctttaatctcatttaatttttattaaacatgctcagtacctgtgttga

SEQ ID NO: 22977 - DNA, 201 bp, Homo sapiens
ggcagctggggctgtggatgggaggggtccccaacatggatgtgttgcccctcctccgcatgccaacgcagttcatgtacaaggcccctctgcaactggakagaaaattaattcctatcccgtgagtggattgtgagaaattccacccacgtggagacagcttactgcagcactgttggtgttcggagctcttctgtgccc

SEQ ID NO: 22978 - DNA, 201 bp, Homo sapiens
gttgcccccaaagcccatgccctgccgtggtggcagctggggctgtggatgggaggggtccccaacatggatgtgttgcccctcctccgcatgccaacgcrgttcatgtacaaggcccctctgcaactggagagaaaattaattcctatcccgtgagtggattgtgagaaattccacccacgtggagacagcttactgcag

SEQ ID NO: 22979 - DNA, 201 bp, Homo sapiens
ctctccttgttgcccccaaagcccatgccctgccgtggtggcagctggggctgtggatgggaggggtccccaacatggatgtgttgcccctcctccgcatrccaacgcagttcatgtacaaggcccctctgcaactggagagaaaattaattcctatcccgtgagtggattgtgagaaattccacccacgtggagacagct

SEQ ID NO: 22980 - DNA, 201 bp, Homo sapiens
gacgagcagacacactgatctgaacatctggcccaagtgaagcatggcatatagtgcccttggaagaaaattaggcctcaaatgacagtagcattgaagtrtttgctgcagagttgagggaaacccccagccaccctcccggaatccgagatagggtggcacatctgtcctgacagacgaggagtgtaactgaaccaggaa

SEQ ID NO: 22981 - DNA, 201 bp, Homo sapiens
agaataagctggacaccaaatacccgtacgtgtgccatgcggagctgaatgccatcatgaacaaaaattcgaccgatgtgaaaggctgtagtatgtatgtygccttgttcccttgtaatgaatgcgctaagctcatcatccaggcaggtataaaagaagtgattttcatgtctgataaataccatgatagtgacgaggcaa

SEQ ID NO: 22982 - DNA, 201 bp, Homo sapiens
catggaatctacatgtgtttgaactattgctttaggatttaaaataggggagcctgtggtggcctggtgcacagggctagaacgagagtgcctccccttcytgtgtcctggctggctgggatgctggtggctcttcagaggagcatcagctgtctgtcatctgctgcgatccggcagcctctcttcactgctacatgtgct

SEQ ID NO: 22983 - DNA, 201 bp, Homo sapiens
atcagctgtctgtcatctgctgcgatccggcagcctctcttcactgctacatgtgctggaaggacaaataaataattgtggttgtgttcttaatggggacragcagacacactgatctgaacatctggcccaagtgaagcatggcatatagtgcccttggaagaaaattaggcctcaaatgacagtagcattgaagtgttt

SEQ ID NO: 22984 - DNA, 201 bp, Homo sapiens; identical to SEQ ID NO: 22968

SEQ ID NO: 22985 - DNA, 201 bp, Homo sapiens; identical to SEQ ID NO: 22969

SEQ ID NO: 22986 - DNA, 201 bp, Homo sapiens; identical to SEQ ID NO: 22970

SEQ ID NO: 22987 - DNA, 201 bp, Homo sapiens; identical to SEQ ID NO: 22975

SEQ ID NO: 22988 - DNA, 201 bp, Homo sapiens; identical to SEQ ID NO: 22976

SEQ ID NO: 22989 - DNA, 201 bp, Homo sapiens; identical to SEQ ID NO: 22977

SEQ ID NO: 22990 - DNA, 201 bp, Homo sapiens; identical to SEQ ID NO: 22978

SEQ ID NO: 22991 - DNA, 201 bp, Homo sapiens; identical to SEQ ID NO: 22979

SEQ ID NO: 22992 - DNA, 201 bp, Homo sapiens; identical to SEQ ID NO: 22980

SEQ ID NO: 22993 - DNA, 201 bp, Homo sapiens; identical to SEQ ID NO: 22971

SEQ ID NO: 22994 - DNA, 201 bp, Homo sapiens; identical to SEQ ID NO: 22981

SEQ ID NO: 22995 - DNA, 201 bp, Homo sapiens; identical to SEQ ID NO: 22973

SEQ ID NO: 22996 - DNA, 201 bp, Homo sapiens; identical to SEQ ID NO: 22982

SEQ ID NO: 22997 - DNA, 201 bp, Homo sapiens; identical to SEQ ID NO: 22974

SEQ ID NO: 22998 - DNA, 201 bp, Homo sapiens; identical to SEQ ID NO: 22983

SEQ ID NO: 22999 - DNA, 201 bp, Homo sapiens; identical to SEQ ID NO: 22968

SEQ ID NO: 23000 - DNA, 201 bp, Homo sapiens; identical to SEQ ID NO: 22969

SEQ ID NO: 23001 - DNA, 201 bp, Homo sapiens
aagaaacgggacgactatttggaatggccagagtattttatggctgtggccttcttatcagcacagagaagcaaagatccaaattcccagtgtgccatgcsgagctgaatgccatcatgaacaaaaattcgaccgatgtgaaaggctgtagtatgtatgttgccttgttcccttgtaatgaatgcgctaagctcatcatcc

SEQ ID NO: 23002 - DNA, 201 bp, Homo sapiens; identical to SEQ ID NO: 22976

SEQ ID NO: 23003 - DNA, 201 bp, Homo sapiens; identical to SEQ ID NO: 22977

SEQ ID NO: 23004 - DNA, 201 bp, Homo sapiens; identical to SEQ ID NO: 22979

SEQ ID NO: 23005 - DNA, 201 bp, Homo sapiens; identical to SEQ ID NO: 22978

SEQ ID NO: 23006 - DNA, 201 bp, Homo sapiens; identical to SEQ ID NO: 22980

SEQ ID NO: 23007 - DNA, 201 bp, Homo sapiens; identical to SEQ ID NO: 22971

SEQ ID NO: 23008 - DNA, 201 bp, Homo sapiens
gcacagagaagcaaagatccaaattcccagtgtgccatgcggagctgaatgccatcatgaacaaaaattcgaccgatgtgaaaggctgtagtatgtatgtygccttgttcccttgtaatgaatgcgctaagctcatcatccaggcaggtataaaagaagtgattttcatgtctgataaataccatgatagtgacgaggcaa

SEQ ID NO: 23009 - DNA, 201 bp, Homo sapiens; identical to SEQ ID NO: 22973

SEQ ID NO: 23010 - DNA, 201 bp, Homo sapiens; identical to SEQ ID NO: 22982

SEQ ID NO: 23011 - DNA, 201 bp, Homo sapiens; identical to SEQ ID NO: 22983

SEQ ID NO: 23012 - DNA, 201 bp, Homo sapiens; identical to SEQ ID NO: 22968

SEQ ID NO: 23013 - DNA, 201 bp, Homo sapiens; identical to SEQ ID NO: 22969

SEQ ID NO: 23014 - DNA, 201 bp, Homo sapiens; identical to SEQ ID NO: 22970

SEQ ID NO: 23015 - DNA, 201 bp, Homo sapiens; identical to SEQ ID NO: 22975

SEQ ID NO: 23016 - DNA, 201 bp, Homo sapiens; identical to SEQ ID NO: 22976

SEQ ID NO: 23017 - DNA, 201 bp, Homo sapiens; identical to SEQ ID NO: 22977

SEQ ID NO: 23018 - DNA, 201 bp, Homo sapiens; identical to SEQ ID NO: 22978

SEQ ID NO: 23019 - DNA, 201 bp, Homo sapiens; identical to SEQ ID NO: 22979

SEQ ID NO: 23020 - DNA, 201 bp, Homo sapiens; identical to SEQ ID NO: 22980

SEQ ID NO: 23021 - DNA, 201 bp, Homo sapiens; identical to SEQ ID NO: 22971

SEQ ID NO: 23022 - DNA, 201 bp, Homo sapiens; identical to SEQ ID NO: 22981

SEQ ID NO: 23023 - DNA, 201 bp, Homo sapiens; identical to SEQ ID NO: 22973

SEQ ID NO: 23024 - DNA, 201 bp, Homo sapiens; identical to SEQ ID NO: 22982

SEQ ID NO: 23025 - DNA, 201 bp, Homo sapiens; identical to SEQ ID NO: 22974

SEQ ID NO: 23026 - DNA, 201 bp, Homo sapiens; identical to SEQ ID NO: 22983

SEQ ID NO: 23027 - DNA, 201 bp, Homo sapiens
ggttgctaatgcctttcatcttgaagttacacataacttcttactagccagtatggcaaaatcacatggaatctacatgtgtttgaactattgctttaggrtttaaaataggggagcctgtggtggcctggtgcacagggctagaacgagagtgcctccccttcttgtgtcctggctggctgggatgctggtggctcttca

SEQ ID NO: 23028 - DNA, 201 bp, Homo sapiens; identical to SEQ ID NO: 22969

SEQ ID NO: 23029 - DNA, 201 bp, Homo sapiens; identical to SEQ ID NO: 22970

SEQ ID NO: 23030 - DNA, 201 bp, Homo sapiens; identical to SEQ ID NO: 22975

SEQ ID NO: 23031 - DNA, 201 bp, Homo sapiens; identical to SEQ ID NO: 22976

SEQ ID NO: 23032 - DNA, 201 bp, Homo sapiens
catgccctgccgtggtggcagctggggctgtggatgggaggggtccccaacatggatgtgttgcccctcctccgcatgccaacgcagttcatgtactggakagaaaattaattcctatcccgtgagtggattgtgagaaattccacccacgtggagacagcttactgcagcactgttggtgttcggagctcttctgtgccc

SEQ ID NO: 23033 - DNA, 201 bp, Homo sapiens
gttgcccccaaagcccatgccctgccgtggtggcagctggggctgtggatgggaggggtccccaacatggatgtgttgcccctcctccgcatgccaacgcrgttcatgtactggagagaaaattaattcctatcccgtgagtggattgtgagaaattccacccacgtggagacagcttactgcagcactgttggtgttcgg

SEQ ID NO: 23034 - DNA, 201 bp, Homo sapiens
ctctccttgttgcccccaaagcccatgccctgccgtggtggcagctggggctgtggatgggaggggtccccaacatggatgtgttgcccctcctccgcatrccaacgcagttcatgtactggagagaaaattaattcctatcccgtgagtggattgtgagaaattccacccacgtggagacagcttactgcagcactgttg

SEQ ID NO: 23035 - DNA, 201 bp, Homo sapiens; identical to SEQ ID NO: 22980

SEQ ID NO: 23036 - DNA, 201 bp, Homo sapiens
gtatggcaaaatcacatggaatctacatgtgtttgaactattgctttaggatttaaaataggggagcctgtggtggcctggtgcacagggctagaacgagrgtgcctccccttcttgtgtcctggctggctgggatgctggtggctcttcagaggagcatcagctgtctgtcatctgctgcgatccggcagcctctcttca

SEQ ID NO: 23037 - DNA, 201 bp, Homo sapiens; identical to SEQ ID NO: 22981

SEQ ID NO: 23038 - DNA, 201 bp, Homo sapiens; identical to SEQ ID NO: 22973

SEQ ID NO: 23039 - DNA, 201 bp, Homo sapiens; identical to SEQ ID NO: 22982

SEQ ID NO: 23040 - DNA, 201 bp, Homo sapiens; identical to SEQ ID NO: 22974

SEQ ID NO: 23041 - DNA, 201 bp, Homo sapiens; identical to SEQ ID NO: 22983

SEQ ID NO: 23042 - DNA, 201 bp, Homo sapiens; identical to SEQ ID NO: 22968

SEQ ID NO: 23043 - DNA, 201 bp, Homo sapiens; identical to SEQ ID NO: 22969

SEQ ID NO: 23044 - DNA, 201 bp, Homo sapiens; identical to SEQ ID NO: 22970

SEQ ID NO: 23045 - DNA, 201 bp, Homo sapiens; identical to SEQ ID NO: 22975

SEQ ID NO: 23046 - DNA, 201 bp, Homo sapiens; identical to SEQ ID NO: 22976

SEQ ID NO: 23047 - DNA, 201 bp, Homo sapiens; identical to SEQ ID NO: 22977

SEQ ID NO: 23048 - DNA, 201 bp, Homo sapiens; identical to SEQ ID NO: 22978

SEQ ID NO: 23049 - DNA, 201 bp, Homo sapiens; identical to SEQ ID NO: 22979

SEQ ID NO: 23050 - DNA, 201 bp, Homo sapiens; identical to SEQ ID NO: 22980

SEQ ID NO: 23051 - DNA, 201 bp, Homo sapiens; identical to SEQ ID NO: 22971

SEQ ID NO: 23052 - DNA, 201 bp, Homo sapiens; identical to SEQ ID NO: 22981

SEQ ID NO: 23053 - DNA, 201 bp, Homo sapiens; identical to SEQ ID NO: 22973

SEQ ID NO: 23054 - DNA, 201 bp, Homo sapiens; identical to SEQ ID NO: 22982

SEQ ID NO: 23055 - DNA, 201 bp, Homo sapiens; identical to SEQ ID NO: 22974

SEQ ID NO: 23056 - DNA, 201 bp, Homo sapiens; identical to SEQ ID NO: 22983

SEQ ID NO: 23057 - DNA, 201 bp, Homo sapiens
ctcagctctatgtgccagcatccagacatgtgtggaggttccggcggatggggaggataggcccgctgcagtccaccctggacgtgggtttggagtccccrccgctgtctgtgtctgaggaaagacagcttgctgtcctgacagagttgccttttgtggttccatttgaggaacgagtaaagatctttcagaggttgattt

SEQ ID NO: 23058 - DNA, 201 bp, Homo sapiens
catcaagtattgaatattctgatttatctcgagttcctatagcaaaaattttgctagagaatgttctaaaaccattgcactttacttacaactcctgtccrgaaggtgcgaggcaacaagtttttacagccttcacagaggagtttctggcagcaccttttacagatcagatttttcatttcatcattccggcgcttgcag

SEQ ID NO: 23059 - DNA, 201 bp, Homo sapiens
aggaatgcctgaagaagctggacacaaagcagcagaccaacaccctgctcaacctggtgtggagggactctgcgagcgaggaggtcttcaccaccatggcytccgtctgccacacgctgatggtgcagcaccgcatgatggtacccaaagtcaggcttctctacagtttagcctttaatgccaggtttctgagacatcttt

SEQ ID NO: 23060 - DNA, 201 bp, Homo sapiens
ggaggatggcagactgtcagtatcatacataacagaggaatgcctgaagaagctggacacaaagcagcagaccaacaccctgctcaacctggtgtggaggractctgcgagcgaggaggtcttcaccaccatggcctccgtctgccacacgctgatggtgcagcaccgcatgatggtacccaaagtcaggcttctctacag

SEQ ID NO: 23061 - DNA, 201 bp, Homo sapiens
cagcgcgagctgtcacgactcagccagtgactctgaggaggagagtgaagaagccgacaagccctcaagcccggaggatggcagactgtcagtatcatacrtaacagaggaatgcctgaagaagctggacacaaagcagcagaccaacaccctgctcaacctggtgtggagggactctgcgagcgaggaggtcttcaccac

SEQ ID NO: 23062 - DNA, 201 bp, Homo sapiens
atatttgggggtgactcgccatgcttggcaccctctgcttcctggtgctgctctgactcgaagacgggacagtccctggtgcacatccagggaagaggagygtcggtagttcttgcagtaggcactttatcaggacctgacctgttgctgggtgattttagtctctacaaacagaaagcgtttcaaagcgtcagctgtggg

SEQ ID NO: 23063 - DNA, 201 bp, Homo sapiens
ttcattcattgtcctatttctatctccactttgtgcctggagagctttcaggggaggtggaggaggagggtctgccaagctactgcaacatctgtcacccmctatacccagttacttgggggaggacagacactgtggtgtcattaaagttgtttgaaccaaagtggcggctgcatctttgtcccgatgctagccgtgccg

SEQ ID NO: 23064 - DNA, 201 bp, Homo sapiens
acccaaagtcaggcttctctacagtttagcctttaatgccaggtttctgagacatctttggtttctaatatcttccatgtcaacacggatgatcacagggkctatggtaccgttgcttcaggtgatatccaggggttctcctatgtcttttgaagattctagtcgaatcatcccactcttttatctttttagctccttgtt

SEQ ID NO: 23065 - DNA, 201 bp, Homo sapiens
cacggatgatcacagggtctatggtaccgttgcttcaggtgatatccaggggttctcctatgtcttttgaagattctagtcgaatcatcccactcttttayctttttagctccttgtttagtcattcactaatttccatacatgataacgaattcttcggtgatcccatagaagttgtaggtcaaagacaatcatcaatga

SEQ ID NO: 23066 - DNA, 201 bp, Homo sapiens
aaacagaaagcgtttcaaagcgtcagctgtgggagcagagtgaccctttgctgatgctggggggaggggatctaaatcctcatttatctcttctatgtctmgtattttactgtcactggaggctctgtgggctgtcatagttaattgaccataattagcaatatacttttaaagtgggaaagctgaatgacacttttaaga

SEQ ID NO: 23067 - DNA, 201 bp, Homo sapiens
tgaagattctagtcgaatcatcccactcttttatctttttagctccttgtttagtcattcactaatttccatacatgataacgaattcttcggtgatcccrtagaagttgtaggtcaaagacaatcatcaatgatgccttttactttagaagagctgataatgttgtctcgatgccttcgagatgcatgcctggggatcat

SEQ ID NO: 23068 - DNA, 201 bp, Homo sapiens
cgctggctttgagctgagctgaagctgatgctggggtcagacccctacagagaaccagtgcttccttcgtcagcagcgcctccccagacccacgaggataytcacactgcacgcctgaggctctcctaagctccttctttcattctgccattcctccctcccttccttttttaaatgatttttattacggtgtggtcactt

SEQ ID NO: 23069 - DNA, 201 bp, Homo sapiens
aggaatgcctgaagaagctggacacaaagcagcagaccaacaccctgctcaacctggtgtggagggactctgcgagcgaggaggtcttcaccaccatggcytccgtctgccacacgctgatggtgcagcaccgcatgatggtacccaaagtcaggcaagtgcttctctacagtttagcctttaatgccaggtttctgagac

SEQ ID NO: 23070 - DNA, 201 bp, Homo sapiens
ggaggatggcagactgtcagtatcatacataacagaggaatgcctgaagaagctggacacaaagcagcagaccaacaccctgctcaacctggtgtggaggractctgcgagcgaggaggtcttcaccaccatggcctccgtctgccacacgctgatggtgcagcaccgcatgatggtacccaaagtcaggcaagtgcttct

SEQ ID NO: 23071 - DNA, 201 bp, Homo sapiens; identical to SEQ ID NO: 23058

SEQ ID NO: 23072 - DNA, 201 bp, Homo sapiens; identical to SEQ ID NO: 23061

SEQ ID NO: 23073 - DNA, 201 bp, Homo sapiens; identical to SEQ ID NO: 23065

SEQ ID NO: 23074 - DNA, 201 bp, Homo sapiens
agtcaggcaagtgcttctctacagtttagcctttaatgccaggtttctgagacatctttggtttctaatatcttccatgtcaacacggatgatcacagggkctatggtaccgttgcttcaggtgatatccaggggttctcctatgtcttttgaagattctagtcgaatcatcccactcttttatctttttagctccttgtt

SEQ ID NO: 23075 - DNA, 201 bp, Homo sapiens; identical to SEQ ID NO: 23067

SEQ ID NO: 23076 - DNA, 201 bp, Homo sapiens; identical to SEQ ID NO: 23057

SEQ ID NO: 23077 - DNA, 201 bp, Homo sapiens; identical to SEQ ID NO: 23058

SEQ ID NO: 23078 - DNA, 201 bp, Homo sapiens; identical to SEQ ID NO: 23059

SEQ ID NO: 23079 - DNA, 201 bp, Homo sapiens; identical to SEQ ID NO: 23060

SEQ ID NO: 23080 - DNA, 201 bp, Homo sapiens; identical to SEQ ID NO: 23061

SEQ ID NO: 23081 - DNA, 201 bp, Homo sapiens; identical to SEQ ID NO: 23062

SEQ ID NO: 23082 - DNA, 201 bp, Homo sapiens; identical to SEQ ID NO: 23063

SEQ ID NO: 23083 - DNA, 201 bp, Homo sapiens; identical to SEQ ID NO: 23064

SEQ ID NO: 23084 - DNA, 201 bp, Homo sapiens; identical to SEQ ID NO: 23065

SEQ ID NO: 23085 - DNA, 201 bp, Homo sapiens; identical to SEQ ID NO: 23066

SEQ ID NO: 23086 - DNA, 201 bp, Homo sapiens; identical to SEQ ID NO: 23067

SEQ ID NO: 23087 - DNA, 201 bp, Homo sapiens; identical to SEQ ID NO: 23068

SEQ ID NO: 23088 - DNA, 201 bp, Homo sapiens; identical to SEQ ID NO: 23057

SEQ ID NO: 23089 - DNA, 201 bp, Homo sapiens; identical to SEQ ID NO: 23058

SEQ ID NO: 23090 - DNA, 201 bp, Homo sapiens; identical to SEQ ID NO: 23059

SEQ ID NO: 23091 - DNA, 201 bp, Homo sapiens; identical to SEQ ID NO: 23060

SEQ ID NO: 23092 - DNA, 201 bp, Homo sapiens; identical to SEQ ID NO: 23061

SEQ ID NO: 23093 - DNA, 201 bp, Homo sapiens; identical to SEQ ID NO: 23062

SEQ ID NO: 23094 - DNA, 201 bp, Homo sapiens; identical to SEQ ID NO: 23063

SEQ ID NO: 23095 - DNA, 201 bp, Homo sapiens; identical to SEQ ID NO: 23064

SEQ ID NO: 23096 - DNA, 201 bp, Homo sapiens; identical to SEQ ID NO: 23065

SEQ ID NO: 23097 - DNA, 201 bp, Homo sapiens; identical to SEQ ID NO: 23066

SEQ ID NO: 23098 - DNA, 201 bp, Homo sapiens; identical to SEQ ID NO: 23067

SEQ ID NO: 23099 - DNA, 201 bp, Homo sapiens; identical to SEQ ID NO: 23068

SEQ ID NO: 23100 - DNA, 201 bp, Homo sapiens; identical to SEQ ID NO: 23057

SEQ ID NO: 23101 - DNA, 201 bp, Homo sapiens; identical to SEQ ID NO: 23058

SEQ ID NO: 23102 - DNA, 201 bp, Homo sapiens; identical to SEQ ID NO: 23069

SEQ ID NO: 23103 - DNA, 201 bp, Homo sapiens; identical to SEQ ID NO: 23070

SEQ ID NO: 23104 - DNA, 201 bp, Homo sapiens; identical to SEQ ID NO: 23061

SEQ ID NO: 23105 - DNA, 201 bp, Homo sapiens; identical to SEQ ID NO: 23062

SEQ ID NO: 23106 - DNA, 201 bp, Homo sapiens; identical to SEQ ID NO: 23063

SEQ ID NO: 23107 - DNA, 201 bp, Homo sapiens; identical to SEQ ID NO: 23074

SEQ ID NO: 23108 - DNA, 201 bp, Homo sapiens; identical to SEQ ID NO: 23065

SEQ ID NO: 23109 - DNA, 201 bp, Homo sapiens; identical to SEQ ID NO: 23066

SEQ ID NO: 23110 - DNA, 201 bp, Homo sapiens; identical to SEQ ID NO: 23067

SEQ ID NO: 23111 - DNA, 201 bp, Homo sapiens; identical to SEQ ID NO: 23068

SEQ ID NO: 23112 - DNA, 201 bp, Homo sapiens
caatccaacagcctcactgaatcactgctgtgcagggcaggaaagctccatgcacatagcccagcaaagagcaacacagagctgaaaggaagactcagagsagagagataagtaaggaaagtagtgatggctctcatcccagacttggccatggaaacctggcttctcctggctgtcagcctggtgctcctctatctatat

SEQ ID NO: 23113 - DNA, 201 bp, Homo sapiens
ttacgatcattgctgtctccaaccttcaccagtggaaaactcaaggagatggtccctatcattgcccagtatggagatgtgttggtgagaaatctgaggcrggaagcagagacaggcaagcctgtcaccttgaaagacgtctttggggcctacagcatggatgtgatcactagcacatcatttggagtgaacatcgactct

SEQ ID NO: 23114 - DNA, 201 bp, Homo sapiens
gagaagttcctccctgaaagattcagcaagaagaacaaggacaacatagatccttacatatacacaccctttggaagtggacccagaaactgcattggcaygaggtttgctctcatgaacatgaaacttgctctaatcagagtccttcagaacttctccttcaaaccttgtaaagaaacacagatccccctgaaattaagc

SEQ ID NO: 23115 - DNA, 201 bp, Homo sapiens
accctttggaagtggacccagaaactgcattggcatgaggtttgctctcatgaacatgaaacttgctctaatcagagtccttcagaacttctccttcaaaycttgtaaagaaacacagatccccctgaaattaagcttaggaggacttcttcaaccagaaaaacccgttgttctaaaggttgagtcaagggatggcaccgt

SEQ ID NO: 23116 - DNA, 201 bp, Homo sapiens
ctgtacatgcattgagctctctcattgtctgtgtagagtgttatacttgggaatataaaggaggtgaccaaatcagtgtgaggaggtagatttggctcctytgcttctcacgggactatttccaccacccccagttagcaccattaactcctcctgagctctgataagagaatcaacatttctcaataatttcctccacaa

SEQ ID NO: 23117 - DNA, 201 bp, Homo sapiens
ttggtgagaaatctgaggcgggaagcagagacaggcaagcctgtcaccttgaaagacgtctttggggcctacagcatggatgtgatcactagcacatcatytggagtgaacatcgactctctcaacaatccacaagacccctttgtggaaaacaccaagaagcttttaagatttgattttttggatccattctttctctca

SEQ ID NO: 23118 - DNA, 201 bp, Homo sapiens
cgcctcgaagatacacaaaagcaccgagtggatttccttcagctgatgattgactctcagaattcaaaagaaactgagtcccacaaagctctgtccgatcyggagctcgtggcccaatcaattatctttatttttgctggctatgaaaccacgagcagtgttctctccttcattatgtatgaactggccactcaccctgat

SEQ ID NO: 23119 - DNA, 201 bp, Homo sapiens
tccattctttctctcaataatctttccattcctcatcccaattcttgaagtattaaatatctgtgtgtttccaagagaagttacaaattttttaagaaaakctgtaaaaaggatgaaagaaagtcgcctcgaagatacacaaaagcaccgagtggatttccttcagctgatgattgactctcagaattcaaaagaaactga

SEQ ID NO: 23120 - DNA, 201 bp, Homo sapiens; identical to SEQ ID NO: 23112

SEQ ID NO: 23121 - DNA, 201 bp, Homo sapiens; identical to SEQ ID NO: 23113

SEQ ID NO: 23122 - DNA, 201 bp, Homo sapiens; identical to SEQ ID NO: 23114

SEQ ID NO: 23123 - DNA, 201 bp, Homo sapiens; identical to SEQ ID NO: 23115

SEQ ID NO: 23124 - DNA, 201 bp, Homo sapiens; identical to SEQ ID NO: 23116

SEQ ID NO: 23125 - DNA, 201 bp, Homo sapiens; identical to SEQ ID NO: 23117

SEQ ID NO: 23126 - DNA, 201 bp, Homo sapiens; identical to SEQ ID NO: 23118

SEQ ID NO: 23127 - DNA, 201 bp, Homo sapiens
attctttctctcaataacagtctttccattcctcatcccaattcttgaagtattaaatatctgtgtgtttccaagagaagttacaaattttttaagaaaakctgtaaaaaggatgaaagaaagtcgcctcgaagatacacaaaagcaccgagtggatttccttcagctgatgattgactctcagaattcaaaagaaactga

SEQ ID NO: 23128 - DNA, 201 bp, Homo sapiens
aggcggatctacgctgcatggccgtgccgcccaagtatcgtcacatgcaaaccttctacaggtattactctggagagaaaaaggctccagttctcacgctyttcattgggggaaaccatgaagcctcaaatcatttgcaagagttaccctatggtggctgggtggcaccaaacatttattatttaggtttggctggtgtgg

SEQ ID NO: 23129 - DNA, 201 bp, Homo sapiens
agcaattctcctgcctcagcctcccaagtaggtgggactacaggtgcccgccaccacacccggctaatttttgcatttttagtaatgacagggtttcaccrtgttggccaggctggtctccaactcctgacctcaggcgatccacctgtcttggccttctaaagtgctgggattacaggcgtgagccactgtgcctggccg

SEQ ID NO: 23130 - DNA, 201 bp, Homo sapiens
tgccattgaagaggctgagtgatgaacatgaacctgaacaaagaaagaaaattaagaggaggaatcaagccatttacgctgcagtggatgatgatgatgaygatgcagcttaagatgatttacttgttttgtttttgtgtttgttttgtttttttgagatggagtttcactcttgtcacctagactggagtgcaatggcgt

SEQ ID NO: 23131 - DNA, 201 bp, Homo sapiens
tgaatatgaagaacaggatgatgtggagagtaatgactctggagaagaccagagtgaatataatacagacacatctgctctgtcttctattaatccagatsaaataatgttagatgaagaagaagatgaagatagtattgtaagtgcacatagtggcatgaatacaccatcggtagaaccttctgatcaagcttctgagtt

SEQ ID NO: 23132 - DNA, 201 bp, Homo sapiens
agtaagacaaggatttttgcctccaaggacttgttatcactgtaaacattttgatgtatacaatatggctatattatattttgttttataaaatcaagtcwttgtatatattatgatgtatgctttcttttcatttattataaatatttttcctgatcagcttttaatatctgtcaaataaaaattgaaattgaagatggt

SEQ ID NO: 23133 - DNA, 201 bp, Homo sapiens
acacccaggcggtggctatacttattaaagttggcgggagctgagcgatcagtcggtcctgggctggctgtggtgtagggcgttgcaggcagcgctcaccycctcaggccggcagaatgcgggtggctgtggctggctgctgccacggcgagctggataagatctatgagacgctggcgctggcagagcggcgcggcccgg

SEQ ID NO: 23134 - DNA, 201 bp, Homo sapiens
atctcaaggttccatgtaactttagtgtaacagctgcttgttatgatcctagcaagccacagacacaaatgcagctgattcataggatcaatcctcagacwactgaattttgtgcccaacttggcatcatagacatcaatgttaggcttcagaagtccaaggaagaacatcatgtgtgtggtgaatatgaagaacaggatg

SEQ ID NO: 23135 - DNA, 150 bp, Homo sapiens
gagatctggaaaccggaagtgaattattttgcaggagtctacacccaggmggtggctatacttattaaagttggcgggagctgagcgatcagtcggtcctgggctggctgtggtgtagggcgttgcaggcagcgctcacctcctcaggcc

SEQ ID NO: 23136 - DNA, 201 bp, Homo sapiens
gaatataatacagacacatctgctctgtcttctattaatccagatgaaataatgttagatgaagaagaagatgaagatagtattgtaagtgcacatagtgrcatgaatacaccatcggtagaaccttctgatcaagcttctgagttttctgcaagtttctctgatgtcaggatcttgccaggctctatgattgtatcttct

SEQ ID NO: 23137 - DNA, 201 bp, Homo sapiens
tctctgatgtcaggatcttgccaggctctatgattgtatcttctgatgatacggtggattccacaattgatagagaggggaaacctggtgggactgtggartcagggaatggagaggacttaaccaaggtgccattgaagaggctgagtgatgaacatgaacctgaacaaagaaagaaaattaagaggaggaatcaagcca

SEQ ID NO: 23138 - DNA, 201 bp, Homo sapiens
ggaaaccggaagtgaattattttgcaggagtctacacccaggcggtggctatacttattaaagttggcgggagctgagcgatcagtcggtcctgggctggytgtggtgtagggcgttgcaggcagcgctcacctcctcaggccggcagaatgcgggtggctgtggctggctgctgccacggcgagctggataagatctatg

SEQ ID NO: 23139 - DNA, 201 bp, Homo sapiens
tcatcatcctttcatctattttagatacacctactaaatgtttaatatatacttttggagaagtacaacataagggagtctttaatctgtgttttccttgkctgggttaatgactgtttatttaaagagtgctgtaaaattggatgtgtggtgtttaaaatggccatgtcctgaggaaacttaagtaacaaagtactaaat

SEQ ID NO: 23140 - DNA, 201 bp, Homo sapiens
aatgaagctgctcttgctttggaatatggagcatcctgtgaagatatagctagagtctgtcatgcacatccgaccttatcagaagcttttagagaagcaamtcttgctgcgtcatttggcaaatcaatcaacttttgaattagaagattatatatatttttttctgaaatttcctgggagcttttgtagaagtcacattcc

SEQ ID NO: 23141 - DNA, 201 bp, Homo sapiens
tactaaatgtttaatatatacttttggagaagtacaacataagggagtctttaatctgtgttttccttgtctgggttaatgactgtttatttaaagagtgytgtaaaattggatgtgtggtgtttaaaatggccatgtcctgaggaaacttaagtaacaaagtactaaatgctaagtaggcttttgcatattgtaactaaa

SEQ ID NO: 23142 - DNA, 201 bp, Homo sapiens
tagaattgggttcagtttggcaaagacttggtgcagatgtgacagcagttgaatttttaggtcatgtaggtggagttggaattgatatggagatatctaaraactttcaacgcatccttcaaaaacaggggtttaaatttaaattgaatacaaaggttactggtgctaccaagaagtcagatggaaaaattgatgtttcta

SEQ ID NO: 23143 - DNA, 201 bp, Homo sapiens
tggacaaaatggaatactcttatatctatattttacataaatttagtattttgtttcagtgcactaatgtgtaagacaaaaagctacttattgtagcatcmtggaatatctccgtcaactcatattttcatgctgttcatgaaagattcaatgcccctgaatttaaatagcttttttctctgatacagaaaagttgaattt

SEQ ID NO: 23144 - DNA, 201 bp, Homo sapiens
ccagagtttgggcagaaggaagtctgccccttctgtgcctcctgttttttgggggtttcccctttatgttccagctgttgtggttgccccatattctgccytctgatccttaaccaataaaacttggcttttgtttccccctcaagtgagaacccgttaaaaatgagacattgagccagtgctgttcactttttaagtgcc

SEQ ID NO: 23145 - DNA, 201 bp, Homo sapiens
aagctgaagttatcacttgtgatgtactcttggtttgcattggccgacgaccctttactaagaatttgggactagaagagctgggaattgaactagatccyagaggtagaattccagtcaataccagatttcaaactaaaattccaaatatctatgccattggtgatgtagttgctggtccaatgctggctcacaaagcag

SEQ ID NO: 23146 - DNA, 201 bp, Homo sapiens
tctgtcatgcacatccgaccttatcagaagcttttagagaagcaaatcttgctgcgtcatttggcaaatcaatcaacttttgaattagaagattatatatdtttttttctgaaatttcctgggagcttttgtagaagtcacattcctgaacaggatattctcacagctccaagaatttctaggactgaattatgaaacttt

SEQ ID NO: 23147 - DNA, 201 bp, Homo sapiens
cacagtgatcaagttatttttaatttggttttcacattggaaacaagtcagtcattcagatatgattcaaatgtctataaaccgaactgatgtaagtaaayggtctctcacttgttttatttaacctctaaattctttcattttaggggtagcatttgtgttgaagaggttttaaagcttccattgttgtctgcaactctg

SEQ ID NO: 23148 - DNA, 201 bp, Homo sapiens
gtcagtcattcagatatgattcaaatgtctataaaccgaactgatgtaagtaaatggtctctcacttgttttatttaacctctaaattctttcattttagkggtagcatttgtgttgaagaggttttaaagcttccattgttgtctgcaactctgaagggtaattatatagttacccaaattaagagagtctatttacgga

SEQ ID NO: 23149 - DNA, 201 bp, Homo sapiens
ttatgaaacttttggaaggtatttaataggtttggacaaaatggaatactcttatatctatattttacataaatttagtattttgtttcagtgcactaatrtgtaagacaaaaagctacttattgtagcatcctggaatatctccgtcaactcatattttcatgctgttcatgaaagattcaatgcccctgaatttaaata

SEQ ID NO: 23150 - DNA, 201 bp, Homo sapiens
acatccgaccttatcagaagcttttagagaagcaaatcttgctgcgtcatttggcaaatcaatcaacttttgaattagaagattatatatatttttttctkaaatttcctgggagcttttgtagaagtcacattcctgaacaggatattctcacagctccaagaatttctaggactgaattatgaaacttttggaaggtat

SEQ ID NO: 23151 - DNA, 201 bp, Homo sapiens
tccttgggcagaaatcgacagacagagtactgggagcacatattcttggaccaggtgctggagaaatggtaaatgaagctgctcttgctttggaatatggmgcatcctgtgaagatatagctagagtctgtcatgcacatccgaccttatcagaagcttttagagaagcaaatcttgctgcgtcatttggcaaatcaatca

SEQ ID NO: 23152 - DNA, 201 bp, Homo sapiens
gccgattgatgctgatgtaacagttataggttctggtcctggaggatatgttgctgctattaaagctgcccagttaggcttcaagacagtctgcattgagraaaatgaaacacttggtggaacatgcttgaatgttggttgtattccttctaaggctttattgaacaactctcattattaccatatggcccatggaaaaga

SEQ ID NO: 23153 - DNA, 201 bp, Homo sapiens
attcttggaccaggtgctggagaaatggtaaatgaagctgctcttgctttggaatatggagcatcctgtgaagatatagctagagtctgtcatgcacatcygaccttatcagaagcttttagagaagcaaatcttgctgcgtcatttggcaaatcaatcaacttttgaattagaagattatatatatttttttctgaaatt

SEQ ID NO: 23154 - DNA, 201 bp, Homo sapiens
agaaatggtaaatgaagctgctcttgctttggaatatggagcatcctgtgaagatatagctagagtctgtcatgcacatccgaccttatcagaagcttttrgagaagcaaatcttgctgcgtcatttggcaaatcaatcaacttttgaattagaagattatatatatttttttctgaaatttcctgggagcttttgtagaa

SEQ ID NO: 23155 - DNA, 201 bp, Homo sapiens
ggttttcacattggaaacaagtcagtcattcagatatgattcaaatgtctataaaccgaactgatgtaagtaaatggtctctcacttgttttatttaaccyctaaattctttcattttaggggtagcatttgtgttgaagaggttttaaagcttccattgttgtctgcaactctgaagggtaattatatagttacccaaat

SEQ ID NO: 23156 - DNA, 201 bp, Homo sapiens
ttcatgtcaatggatatggaaagataactggcaaaaatcaagtcactgctacgaaagctgatggcggcactcaggttattgatacaaagaacattcttatwgccacgggttcagaagttactccttttcctggaatcacgatagatgaagatacaatagtgtcatctacaggtgctttatctttaaaaaaagttccagaaa

SEQ ID NO: 23157 - DNA, 201 bp, Homo sapiens
tggttgtattccttctaaggctttattgaacaactctcattattaccatatggcccatggaaaagattttgcatctagaggaattgaaatgtccgaagttygcttgaatttagacaagatgatggagcagaagagtactgcagtaaaagctttaacaggtggaattgcccacttattcaaacagaataaggttgttcatgt

SEQ ID NO: 23158 - DNA, 201 bp, Homo sapiens
tggtggtaaagctgaagttatcacttgtgatgtactcttggtttgcattggccgacgaccctttactaagaatttgggactagaagagctgggaattgaastagatcccagaggtagaattccagtcaataccagatttcaaactaaaattccaaatatctatgccattggtgatgtagttgctggtccaatgctggctca

SEQ ID NO: 23159 - DNA, 201 bp, Homo sapiens
gtttgaagcacagtgatcaagttatttttaatttggttttcacattggaaacaagtcagtcattcagatatgattcaaatgtctataaaccgaactgatgyaagtaaatggtctctcacttgttttatttaacctctaaattctttcattttaggggtagcatttgtgttgaagaggttttaaagcttccattgttgtctg

SEQ ID NO: 23160 - DNA, 201 bp, Homo sapiens
aaggtatttaataggtttggacaaaatggaatactcttatatctatattttacataaatttagtattttgtttcagtgcactaatgtgtaagacaaaaagrtacttattgtagcatcctggaatatctccgtcaactcatattttcatgctgttcatgaaagattcaatgcccctgaatttaaatagcttttttctctgat

SEQ ID NO: 23161 - DNA, 201 bp, Homo sapiens
gaaggtatttaataggtttggacaaaatggaatactcttatatctatattttacataaatttagtattttgtttcagtgcactaatgtgtaagacaaaaarctacttattgtagcatcctggaatatctccgtcaactcatattttcatgctgttcatgaaagattcaatgcccctgaatttaaatagcttttttctctga

SEQ ID NO: 23162 - DNA, 201 bp, Homo sapiens
ccagtgcctttagttttttctaaaatatatttgttcagagtttgcagttgctatcagcaggagggttggtctgatatctgtgtgctactttgccattattrgaagtgaactctgcatctttttaaaaatttgaaatcccggtatcatgtgaagtgctgtttatgtaaatctcaacatatcccttactcagggaaaaaaaag

SEQ ID NO: 23163 - DNA, 201 bp, Homo sapiens
agttgggaaattcccatttgctgctaacagcagagctaagacaaatgctgacacagatggcatggtgaagatccttgggcagaaatcgacagacagagtaytgggagcacatattcttggaccaggtgctggagaaatggtaaatgaagctgctcttgctttggaatatggagcatcctgtgaagatatagctagagtctg

SEQ ID NO: 23164 - DNA, 201 bp, Homo sapiens
cagatttcaaactaaaattccaaatatctatgccattggtgatgtagttgctggtccaatgctggctcacaaagcagaggatgaaggcattatctgtgttraaggaatggctggtggtgctgtgcacattgactacaattgtgtgccatcagtgatttacacacaccctgaagttgcttgggttggcaaatcagaagagca

SEQ ID NO: 23165 - DNA, 201 bp, Homo sapiens
atattcatttactggttatcatgagtacgtgttgagatggtcatagttttttttatgactacttctagtgtatattctaatttcttttctaggcctgaatktatctttattttcatgttataggacaatattaaggcattttaaaggtcatcatcctttcatctattttagatacacctactaaatgtttaatatatactt

SEQ ID NO: 23166 - DNA, 201 bp, Homo sapiens; identical to SEQ ID NO: 23139

SEQ ID NO: 23167 - DNA, 201 bp, Homo sapiens; identical to SEQ ID NO: 23140

SEQ ID NO: 23168 - DNA, 201 bp, Homo sapiens; identical to SEQ ID NO: 23141

SEQ ID NO: 23169 - DNA, 201 bp, Homo sapiens; identical to SEQ ID NO: 23142

SEQ ID NO: 23170 - DNA, 201 bp, Homo sapiens; identical to SEQ ID NO: 23143

SEQ ID NO: 23171 - DNA, 117 bp, Homo sapiens
ccagagtttgggcagaaggaagtctgccccttctgtgcctcctgttttttgggggtttcccctttatgttccagctgttgtggttgccccatattctgccytctgatccttaaccaa

SEQ ID NO: 23172 - DNA, 201 bp, Homo sapiens; identical to SEQ ID NO: 23145

SEQ ID NO: 23173 - DNA, 201 bp, Homo sapiens; identical to SEQ ID NO: 23146

SEQ ID NO: 23174 - DNA, 201 bp, Homo sapiens; identical to SEQ ID NO: 23147

SEQ ID NO: 23175 - DNA, 201 bp, Homo sapiens; identical to SEQ ID NO: 23148

SEQ ID NO: 23176 - DNA, 201 bp, Homo sapiens; identical to SEQ ID NO: 23149

SEQ ID NO: 23177 - DNA, 201 bp, Homo sapiens; identical to SEQ ID NO: 23150

SEQ ID NO: 23178 - DNA, 201 bp, Homo sapiens; identical to SEQ ID NO: 23151

SEQ ID NO: 23179 - DNA, 201 bp, Homo sapiens; identical to SEQ ID NO: 23152

SEQ ID NO: 23180 - DNA, 201 bp, Homo sapiens; identical to SEQ ID NO: 23153

SEQ ID NO: 23181 - DNA, 201 bp, Homo sapiens; identical to SEQ ID NO: 23154

SEQ ID NO: 23182 - DNA, 201 bp, Homo sapiens; identical to SEQ ID NO: 23155

SEQ ID NO: 23183 - DNA, 201 bp, Homo sapiens; identical to SEQ ID NO: 23156

SEQ ID NO: 23184 - DNA, 201 bp, Homo sapiens; identical to SEQ ID NO: 23157

SEQ ID NO: 23185 - DNA, 201 bp, Homo sapiens; identical to SEQ ID NO: 23158

SEQ ID NO: 23186 - DNA, 201 bp, Homo sapiens; identical to SEQ ID NO: 23159

SEQ ID NO: 23187 - DNA, 201 bp, Homo sapiens; identical to SEQ ID NO: 23160

SEQ ID NO: 23188 - DNA, 201 bp, Homo sapiens; identical to SEQ ID NO: 23161

SEQ ID NO: 23189 - DNA, 201 bp, Homo sapiens; identical to SEQ ID NO: 23163

SEQ ID NO: 23190 - DNA, 201 bp, Homo sapiens; identical to SEQ ID NO: 23164

SEQ ID NO: 23191 - DNA, 201 bp, Homo sapiens; identical to SEQ ID NO: 23165

SEQ ID NO: 23192 - DNA, 201 bp, Homo sapiens
gcatcctggcttataagccaggctcagaatctgtacatacggtggacaagcctacaagtccttctgcgatacctgatgttcttcaagtttcaactaaacaragtattgctaactttctttctcgtcccacggaaggtgtacaagctttagtaggtggttatattggtggacttgtccccaaattaaagtatgattcaaaga

SEQ ID NO: 23193 - DNA, 201 bp, Homo sapiens
aatctgtacatacggtggacaagcctacaagtccttctgcgatacctgatgttcttcaagtttcaactaaacaaagtattgctaactttctttctcgtccyacggaaggtgtacaagctttagtaggtggttatattggtggacttgtccccaaattaaagtatgattcaaagagtcagtcagaagaacaggaagagcctg

SEQ ID NO: 23194 - DNA, 201 bp, Homo sapiens
ctgtacatacggtggacaagcctacaagtccttctgcgatacctgatgttcttcaagtttcaactaaacaaagtattgctaactttctttctcgtcccacrgaaggtgtacaagctttagtaggtggttatattggtggacttgtccccaaattaaagtatgattcaaagagtcagtcagaagaacaggaagagcctgcta

SEQ ID NO: 23195 - DNA, 201 bp, Homo sapiens
ttatcgaaaattaggatcagatgtattttcacaaaatgtcattgttggaacagtaaaaatgagttggagccatgcattttatgacagtcaaacatgggaaracattcttaaggataggatgggatctgcactgatgattgaaacagcaagaaaccccacatgtcctaaggtagctgctgtaagtaccatagtaaatagagg

SEQ ID NO: 23196 - DNA, 201 bp, Homo sapiens
ataggtaaacgcagtctttttcattacacaagttctataaccacaaaatttggagactcattctactttttatcaaatcatattaattcatatttcaaacstaaggaaaaaatgtctcaacaaaaggaaaatgaacatttccgggacaaatcagaacttgaagataaaaaggtagaagaggggaaattaagatctccagat

SEQ ID NO: 23197 - DNA, 201 bp, Homo sapiens
gccctagtgactgcggcctgcatcccgattgtcttctcctccaaggtctacatgattacctgaagtttaataagtaagaccatgaattatggcatttcttwaatgaagcgttcaagaagtgagagaatgtcatagaaaataaatgatttttaagttatgtctattaatctgactgtagatatatatatttacctccttagt

SEQ ID NO: 23198 - DNA, 201 bp, Homo sapiens
gtcccaccgctctcacacccggcaaccaaccaaggcacagcacgccccaccggcaagccacgcctcgcgcatcacgcacgcacgcacgcacgcacacacgyctgtcgcggcttcccgccttgcgctccgtcatgctctattgcgcatatctcggggcgggggaggaacggagattgacaaggaggcagaggcctgagcgag

SEQ ID NO: 23199 - DNA, 201 bp, Homo sapiens
agcaaaccaggacactgctccgaggtcccgcccaggaaggcaaaacgaagtcccaccgctctcacacccggcaaccaaccaaggcacagcacgccccaccrgcaagccacgcctcgcgcatcacgcacgcacgcacgcacgcacacacgcctgtcgcggcttcccgccttgcgctccgtcatgctctattgcgcatatctc

SEQ ID NO: 23200 - DNA, 201 bp, Homo sapiens
cattagctatgcatgagtgtaaatgtctttggccagatgtgccgttagagtgcatagtatccctgggcactggacgttatgagagtgatgtgagaaacacrgtaacatacacaagcttgaaaactaaactttctaatgttatcaacagtgctacagatacagaagaagtccatataatgcttgatggcctgttacctcctg

SEQ ID NO: 23201 - DNA, 174 bp, Homo sapiens
ccaggcacttccggcggcgcgctgcaggcgcggggaacaccaatggcggggtacttgaagctggtgtgtgtttyctttcagcgtcaagggttccacactgttgggagtcgctgcaagaatcggacaggcgctgagcacctgtggctgacccgacatctcagggacccatttgtg

SEQ ID NO: 23202 - DNA, 201 bp, Homo sapiens
ttcgggtgttagactgtggggcagctcctggggcctggagtcaggtggcggtgcagaaggtcaacgccgcaggcacagatcccagctctcctgttggcttygtgcttggggtagatcttcttcacatattccccctggaaggagcaacttttctgtgccctgctgacgtgactgacccgagaacctcacagagaatcctcg

SEQ ID NO: 23203 - DNA, 174 bp, Homo sapiens; identical to SEQ ID NO: 23201

SEQ ID NO: 23204 - DNA, 201 bp, Homo sapiens; identical to SEQ ID NO: 23202

SEQ ID NO: 23205 - DNA, 115 bp, Homo sapiens
ccaattgcagtttgaggctataagtgatgaagagaagactcttcgagaacaggagattgttgcctcatcaccaagtttaagtggacttaagttggggttcragtccatttataag

SEQ ID NO: 23206 - DNA, 115 bp, Homo sapiens; identical to SEQ ID NO: 23205

SEQ ID NO: 23207 - DNA, 201 bp, Homo sapiens
ccacaattatgggacctaatgacagcccatatcaaagcggtgtattctttttggcaattcattttcctacagactgctccttcaaaccacctaaggttgcrtgtacaacaaggatttgtcatccaaatattaacagtaatggcagcatttgtctcgatattctaagatcacagtggttgcctgctttaaaactatttctaa

SEQ ID NO: 23208 - DNA, 113 bp, Homo sapiens
gagcacataccgrgagagtgaggagccagatgacaagcacatactatggcactaagacagattaataaggaacttagtgatttggcccatgaccctccagcacaatgttctgc

SEQ ID NO: 23209 - DNA, 201 bp, Homo sapiens
ttcctgagcctgggacaagcctgctcgctgcctttgaccagtggagggaatgggccgacagcaagtcctgctgtgactactctctgcatgtggacatcagygagtggcataagggcatccaggaggagatggaagcgcttgtgaaggatcacggggtaaattccttcctcgtgtacatggctttcaaagatcgcttccagc

SEQ ID NO: 23210 - DNA, 201 bp, Homo sapiens
acggggtaaattccttcctcgtgtacatggctttcaaagatcgcttccagctaacggattgccagatttatgaagtactgagtgtgatccgggatattggygccatagcccaagtccacgcagaaaatggcgacatcattgcagaggagcagcagaggatcctggatctgggcatcacgggccccgagggacatgtgctga

SEQ ID NO: 23211 - DNA, 201 bp, Homo sapiens
gactggtgctaaccacctgccatcatgaggatgtgtgctagagtgtgggaccctggccaagtgcaggaatgggccatgccgtctcacccacagtatcacaygtggaaccgcagacagggcccagaagctttagaggtatgaggctgcagaaccggagagattttcctctgtgcagtgctctctggctaaagtcacggtcaa

SEQ ID NO: 23212 - DNA, 201 bp, Homo sapiens
ttctttcttccttcctttttttttttttgtttttttttttaagagcctgtgatagttactgtggagcagccagttcatggggtcccccttggggccccacmccccgtctctcaccaagagttactgattttgctcatccacttccctacacatctatgggtatcacacccaagactacccaccaagctcatacagggaacc

SEQ ID NO: 23213 - DNA, 201 bp, Homo sapiens
gtctgctgatgatttcttccaaggaaccaaggcggccctggctgggggaaccactatgatcattgaccacgttgttcctgagcctgggacaagcctgctcrctgcctttgaccagtggagggaatgggccgacagcaagtcctgctgtgactactctctgcatgtggacatcagcgagtggcataagggcatccaggagga

SEQ ID NO: 23214 - DNA, 201 bp, Homo sapiens
agcagaggatcctggatctgggcatcacgggccccgagggacatgtgctgagccgacctgaggaggtcgaggccgaagccgtgaatcgtgccatcaccatygccaaccagaccaactgcccgctgtatatcaccaaggtgatgagcaaaagctctgctgaggtcatcgcccaggcacggaagaagggaactgtggtgtatg

SEQ ID NO: 23215 - DNA, 201 bp, Homo sapiens
tgaaatttcctaatagcaagaccagcgaagcggttgcacccttttcaatcttgcaaaggaaaaaaacaaaacaaaacaaaaaaaacccaagtccccttccyggcagtttttgccttaaagctgccctcttgaaattaattttttcccaggagagagatgtcttatcaggggaagaaaaatattccacgcatcacgagcgat

SEQ ID NO: 23216 - DNA, 201 bp, Homo sapiens
aatgtcatatgtaaatgctaaaataaatcgacagtgtctcagaactgaataactgcagtgacttgatgctctaaaacagtgtaggacttaagaatagatgrtttttaatcctggaaattgtgattgtgacccatgagtggaggaactttcagttctaaagctgataaagtgtgtagccagaagagtacttttttttttgta

SEQ ID NO: 23217 - DNA, 197 bp, Homo sapiens
tgacccatgagtggaggaactttcagttctaaagctgataaagtgtgtagccagaagagtacttttttttttgtaaccactgtcttgatggcaaaataatwatggtaaaaaacaagtctcgtgtttattattccttaagaactctgtgttatattaccatggaacgcctaataaagcaaaatgtggttgtttcaggg

SEQ ID NO: 23218 - DNA, 201 bp, Homo sapiens
caagaggagaaatgtgttttatgaacgatagatcacatcagaactcctgtggggaggaaaccttataaattaaacacatggcccccttagagaccacaggygatgtctgtctccatccttccctctccttttctgtcacctttccccctagctggctcctttggacctacccctgtccttgctgacttgtgttgcattgta

SEQ ID NO: 23219 - DNA, 201 bp, Homo sapiens
ttaatcctggaaattgtgattgtgacccatgagtggaggaactttcagttctaaagctgataaagtgtgtagccagaagagtacttttttttttgtaaccmctgtcttgatggcaaaataattatggtaaaaaacaagtctcgtgtttattattccttaagaactctgtgttatattaccatggaacgcctaataaagcaa

SEQ ID NO: 23220 - DNA, 201 bp, Homo sapiens
ggagtctgacccgagggcctgctgcttcctggttaagtatcttttgagattctagaacacatgggagctttttattttcggggaaaaaccgtatttttttyttgtccaattatttctaaagacacactacatagaaagaggccctataaactcaaaaagtcattgggaaacttaaagtctattctactttgcaagaggaga

SEQ ID NO: 23221 - DNA, 201 bp, Homo sapiens
agagctgcctttttcttttctttttaaaaattttaagaagttttctttgtggggctggggaggggccggggtcagggagagtcttttttttttttttttttaaatactaaattggaacatttaattccatattaatacaaggggtttgaactggacatcctaatgatgcaattacgtcatcacccagctgattccgggtgg

SEQ ID NO: 23222 - DNA, 201 bp, Homo sapiens
cagagctgcctttttcttttctttttaaaaattttaagaagttttctttgtggggctggggaggggccggggtcagggagagtcttttttttttttttttttaaatactaaattggaacatttaattccatattaatacaaggggtttgaactggacatcctaatgatgcaattacgtcatcacccagctgattccgggtg

SEQ ID NO: 23223 - DNA, 201 bp, Homo sapiens
gtgtctgttagcatcttccttttcatggggggagggaagataaagtgaattgcccagagctgcctttttcttttctttttaaaaattttaagaagttttcyttgtggggctggggaggggccggggtcagggagagtcttttttttttttttttttaaatactaaattggaacatttaattccatattaatacaaggggtt

SEQ ID NO: 23224 - DNA, 132 bp, Homo sapiens
tttttttgtaaccactgtcttgatggcaaaataattatggtaaaaaacaagtctcgtgtttattattccttaagaactctgtgttatattaccatggaacrcctaataaagcaaaatgtggttgtttcaggg

SEQ ID NO: 23225 - DNA, 201 bp, Homo sapiens
ggaaatttgaacaagttggaaaaaaacaatttttgtttcaattctaagaaacacttgcagctctagtattcacttgagtcttcctgtttttcctgtaccgrgtcatggtaatttttggttgttttggttgttttcttaaaaaacaagttaaaacctgacgatttctgcaggctgtgtaagcatgtttacctgttggcttgc

SEQ ID NO: 23226 - DNA, 201 bp, Homo sapiens
ctgtgtcatcctggtccatgtaggactggtgctaaccacctgccatcatgaggatgtgtgctagagtgtgggaccctggccaagtgcaggaatgggccatrccgtctcacccacagtatcacacgtggaaccgcagacagggcccagaagctttagaggtatgaggctgcagaaccggagagattttcctctgtgcagtgc

SEQ ID NO: 23227 - DNA, 201 bp, Homo sapiens
tggtgatccccggaggaattgacgtccacactcgtttccagatgcctgatcagggaatgacgtctgctgatgatttcttccaaggaaccaaggcggccctrgctgggggaaccactatgatcattgaccacgttgttcctgagcctgggacaagcctgctcgctgcctttgaccagtggagggaatgggccgacagcaagt

SEQ ID NO: 23228 - DNA, 201 bp, Homo sapiens
gtgtctgttaaatgaatgtcatatgtaaatgctaaaataaatcgacagtgtctcagaactgaataactgcagtgacttgatgctctaaaacagtgtaggayttaagaatagatggtttttaatcctggaaattgtgattgtgacccatgagtggaggaactttcagttctaaagctgataaagtgtgtagccagaagagta

SEQ ID NO: 23229 - DNA, 201 bp, Homo sapiens
ttccccggaagcccttccctgattttgtttacaagcgtatcaaggcaaggagcaggctggctgagctgagaggggttcctcgtggcctgtatgacggaccygtgtgtgaagtgtctgtgacgcccaagacagtcactccagcctcctcggccaagacgtctcctgccaagcagcaggccccacctgtccggaacctgcacc

SEQ ID NO: 23230 - DNA, 201 bp, Homo sapiens; identical to SEQ ID NO: 23209

SEQ ID NO: 23231 - DNA, 201 bp, Homo sapiens; identical to SEQ ID NO: 23210

SEQ ID NO: 23232 - DNA, 201 bp, Homo sapiens; identical to SEQ ID NO: 23211

SEQ ID NO: 23233 - DNA, 201 bp, Homo sapiens; identical to SEQ ID NO: 23212

SEQ ID NO: 23234 - DNA, 201 bp, Homo sapiens; identical to SEQ ID NO: 23213

SEQ ID NO: 23235 - DNA, 201 bp, Homo sapiens; identical to SEQ ID NO: 23214

SEQ ID NO: 23236 - DNA, 201 bp, Homo sapiens; identical to SEQ ID NO: 23215

SEQ ID NO: 23237 - DNA, 201 bp, Homo sapiens; identical to SEQ ID NO: 23216

SEQ ID NO: 23238 - DNA, 197 bp, Homo sapiens; identical to SEQ ID NO: 23217

SEQ ID NO: 23239 - DNA, 201 bp, Homo sapiens
caagaggagaaatgtgttttatgaacgatagatcacatcagaactcctgtggggaggaaaccttataaattaaacacatggcccccttagagaccacaggygatgtctgtctccatccttccctctccttttctgtcacctttccccctagctggctgaataccaaatctgctttttgtaaagcgtaaaaacatcacaaag

SEQ ID NO: 23240 - DNA, 201 bp, Homo sapiens; identical to SEQ ID NO: 23219

SEQ ID NO: 23241 - DNA, 201 bp, Homo sapiens; identical to SEQ ID NO: 23220

SEQ ID NO: 23242 - DNA, 201 bp, Homo sapiens
agagctgcctttttcttttctttttaaaaattttaagaagttttctttgtggggctggggaggggccggggtcagggagagtcttttttttttttttttttaaatactaaatgcccacccgcatcgccattctgtagtcttcagggtcagctgttgataaaggggcaggcttgcgttattggcctagattttgctgcagat

SEQ ID NO: 23243 - DNA, 201 bp, Homo sapiens
cagagctgcctttttcttttctttttaaaaattttaagaagttttctttgtggggctggggaggggccggggtcagggagagtcttttttttttttttttttaaatactaaatgcccacccgcatcgccattctgtagtcttcagggtcagctgttgataaaggggcaggcttgcgttattggcctagattttgctgcaga

SEQ ID NO: 23244 - DNA, 201 bp, Homo sapiens
gtgtctgttagcatcttccttttcatggggggagggaagataaagtgaattgcccagagctgcctttttcttttctttttaaaaattttaagaagttttcyttgtggggctggggaggggccggggtcagggagagtcttttttttttttttttttaaatactaaatgcccacccgcatcgccattctgtagtcttcaggg

SEQ ID NO: 23245 - DNA, 132 bp, Homo sapiens; identical to SEQ ID NO: 23224

SEQ ID NO: 23246 - DNA, 201 bp, Homo sapiens; identical to SEQ ID NO: 23225

SEQ ID NO: 23247 - DNA, 201 bp, Homo sapiens; identical to SEQ ID NO: 23226

SEQ ID NO: 23248 - DNA, 201 bp, Homo sapiens; identical to SEQ ID NO: 23227

SEQ ID NO: 23249 - DNA, 201 bp, Homo sapiens; identical to SEQ ID NO: 23228

SEQ ID NO: 23250 - DNA, 201 bp, Homo sapiens; identical to SEQ ID NO: 23229

SEQ ID NO: 23251 - DNA, 201 bp, Homo sapiens
tactgtggcttgtagcattcctcctcttctggcctcctggactgctccccttcatctcttacccttgccccctccacccggtcttggtggtggtatattamaaaaagaaagaatgaaagcacacaaaatgagtcagtttggggtcagtggtataaagggggtatatgttgcaaacaaatgttttagtaacagttggctgta

SEQ ID NO: 23252 - DNA, 201 bp, Homo sapiens
tgtctgctagccatttaggtaagggtagggcacttttaatttaaatgacttcttgcaccatcttgcctaatggactagattggactgtatcaacattgatwtactccactttttatgccttccattgtgatgacgtcaaacacagtgaaagccttcagtcatgctatgggatttaattgtgtatcctcattactgtatcat

SEQ ID NO: 23253 - DNA, 201 bp, Homo sapiens
ctaaattgtttgaagaacctgaagatcccagtaacaggtcatttttttccgaaatcatctcctctatttcggatgtaaaattcagccatagtggtcgatayatgatgactagagactatttgtcagtcaaaatttgggacttaaatatggaaaacaggcctgtggaaacataccaggtgcatgaatacctcagaagtaaac

SEQ ID NO: 23254 - DNA, 201 bp, Homo sapiens
agtctcatagcagaggagaatataatgtttacagcaccttccagagccatgaaccagagtttgactacttgaaaagtttagaaatagaagaaaagatcaayaaaattaggtggttaccccagaaaaatgctgctcagtttttattgtctaccaatgataaaacaataaaattatggaaaatcagtgaaagggacaaaagac

SEQ ID NO: 23255 - DNA, 201 bp, Homo sapiens
tgatgactagagactatttgtcagtcaaaatttgggacttaaatatggaaaacaggcctgtggaaacataccaggtgcatgaatacctcagaagtaaactytgttcactgtatgaaaatgactgcatatttgacaaatttgaatgttgttggaatggatctgacagtgttgtcatgactggatcttacaataatttcttca

SEQ ID NO: 23256 - DNA, 201 bp, Homo sapiens; identical to SEQ ID NO: 23251

SEQ ID NO: 23257 - DNA, 201 bp, Homo sapiens; identical to SEQ ID NO: 23252

SEQ ID NO: 23258 - DNA, 201 bp, Homo sapiens; identical to SEQ ID NO: 23253

SEQ ID NO: 23259 - DNA, 201 bp, Homo sapiens; identical to SEQ ID NO: 23254

SEQ ID NO: 23260 - DNA, 201 bp, Homo sapiens; identical to SEQ ID NO: 23255

SEQ ID NO: 23261 - DNA, 201 bp, Homo sapiens; identical to SEQ ID NO: 23251

SEQ ID NO: 23262 - DNA, 201 bp, Homo sapiens; identical to SEQ ID NO: 23252

SEQ ID NO: 23263 - DNA, 201 bp, Homo sapiens; identical to SEQ ID NO: 23254

SEQ ID NO: 23264 - DNA, 201 bp, Homo sapiens
atacagcagcagtaaaggaactattcggctatgtgacatgagggcatctgccctctgtgatagacattctaaatgtgcatgaatacctcagaagtaaactytgttcactgtatgaaaatgactgcatatttgacaaatttgaatgttgttggaatggatctgacagtgttgtcatgactggatcttacaataatttcttca

SEQ ID NO: 23265 - DNA, 201 bp, Homo sapiens; identical to SEQ ID NO: 23251

SEQ ID NO: 23266 - DNA, 201 bp, Homo sapiens; identical to SEQ ID NO: 23252

SEQ ID NO: 23267 - DNA, 201 bp, Homo sapiens; identical to SEQ ID NO: 23253

SEQ ID NO: 23268 - DNA, 201 bp, Homo sapiens; identical to SEQ ID NO: 23254

SEQ ID NO: 23269 - DNA, 201 bp, Homo sapiens; identical to SEQ ID NO: 23255

SEQ ID NO: 23270 - DNA, 201 bp, Homo sapiens
ccccctcctgcctctcggctgccagcagcatagacaacctcactggccctttagcagagttggccgtaggaggagcctccaatgcaggggatggcgccgcrggaacagaaaggaaggaaggagaagttgctggtcttgacatgaatatcagccaatttctaaaaagccttggccttgaacaccttcgggatatctttgaaa

SEQ ID NO: 23271 - DNA, 201 bp, Homo sapiens
ctacttcatctgccgctggggtcgctcccaacccagccggcagtggcagtaacaattcaccgtcgtcctcttcttccccgacttcttcctcatcttcctcyccatcctcccctggatcgagcttggcggagagccccgaggcggccggagttagcagcacagcaccactggggcctggggcagcaggacctgggacagggg

SEQ ID NO: 23272 - DNA, 201 bp, Homo sapiens
taaattcagagaagtcaaagccggtgaaggccacttgctctttccaacacaagcctgccacagaggtcttcgggacagtactggagatgcaggttgacacrggcttgagttccaaggtgaaaaaactggggaggctgtgaaggaagagctgcattaaggagggtgaggagcgtgtggttctgtatcatggcagccccaatg

SEQ ID NO: 23273 - DNA, 201 bp, Homo sapiens
catatataaacaacaaatggcagagctggaacgccaatcctagcaatctgaaccagcatttaaaaacgaggaattaaagcacatagggtgagaaaaattayagggaagggacaagagctcaaggggacacctggaaaagaaatactataatttaaaaaattaccaacgggctaattatacttgtgttttactggcagagcg

SEQ ID NO: 23274 - DNA, 201 bp, Homo sapiens
agcatggagcttgtgttaatgccatggatctctggcagtttactccactgcacgaggctgcttccaagaaccgtgtagaagtctgctctttgttacttagycatggcgctgatcctacgttagtcaactgccatggcaaaagtgctgtggatatggctccaactccggagcttagggagagattgacttatgaatttaaag

SEQ ID NO: 23275 - DNA, 201 bp, Homo sapiens
atgccatggatctctggcagtttactccactgcacgaggctgcttccaagaaccgtgtagaagtctgctctttgttacttagccatggcgctgatcctacrttagtcaactgccatggcaaaagtgctgtggatatggctccaactccggagcttagggagagattgacttatgaatttaaaggtcattctttactacaag

SEQ ID NO: 23276 - DNA, 201 bp, Homo sapiens
tgctgaatatgtcatctacagaggagaacaggcatacccagagtatcttatcacttaccagatcatgaagccagaagccccttcccagaccgcaacagccrcagagcagaagacctagtgaatgcctgctggtgaaggccagatcagatttcaacctgggactggattacagaggattgtttctaataacaacatcaatat

SEQ ID NO: 23277 - DNA, 201 bp, Homo sapiens
cccataatgatgtcatggaagttctgcataagcatggcgccaagatgaatgcactggacacccttggtcagactgctttgcatagagccgccctagcaggycacctgcagacctgccgcctcctgctgagttacggctctgacccctccatcatctccttacaaggcttcacagcagcacagatgggcaatgaagcagtgc

SEQ ID NO: 23278 - DNA, 201 bp, Homo sapiens
agtgcagaagctctgtaccccagagaatatcaactgcagagacacccagggcagaaattcaacccctctgcacctggcagcaggctataataacctggaartagctgaatatcttctagagcatggagctgatgttaatgcccaggacaagggtggtttaattcctcttcataatgcggcatcttatgggcatgttgacat

SEQ ID NO: 23279 - DNA, 201 bp, Homo sapiens
cccctctccatgaagcagcagctaaaggaaagtatgaaatctgcaagctccttttaaaacatggagcagatccaactaaaaagaacagagatggaaatacmcctttggatttggtaaaggaaggagacacagatattcaggacttactgagaggggatgctgctttgttggatgctgccaagaagggctgcctggcaagag

SEQ ID NO: 23280 - DNA, 201 bp, Homo sapiens
tgacagaattgttacttagaaaaggagcaaatgttaatgaaaaaaataaagatttcatgactcccctgcatgttgcagccgaaagagcccataatgatgtmatggaagttctgcataagcatggcgccaagatgaatgcactggacacccttggtcagactgctttgcatagagccgccctagcaggccacctgcagacct

SEQ ID NO: 23281 - DNA, 201 bp, Homo sapiens
gcttttagtaaggcatggggcttctgtcaatgtggcggacttatggaaatttacccctctccatgaagcagcagctaaaggaaagtatgaaatctgcaagmtccttttaaaacatggagcagatccaactaaaaagaacagagatggaaatacacctttggatttggtaaaggaaggagacacagatattcaggacttact

SEQ ID NO: 23282 - DNA, 201 bp, Homo sapiens
agaaccgtgtagaagtctgctctttgttacttagccatggcgctgatcctacgttagtcaactgccatggcaaaagtgctgtggatatggctccaactccrgagcttagggagagattgacttatgaatttaaaggtcattctttactacaagcagccagagaagcagacttagctaaagttaaaaaaacactcgctctgg

SEQ ID NO: 23283 - DNA, 201 bp, Homo sapiens
ctggggcagcaggacctgggacaggggtcccagcagtgagcggggccctacgggaactgctggaggcctgtcgcaatggggacgtgtcccgggtaaagagrctggtggacgcggcaaacgtaaatgcaaaggacatggccggccggaagtcttctcccctgcacttcgctgcaggttttggaaggaaggatgttgtagaac

SEQ ID NO: 23284 - DNA, 201 bp, Homo sapiens
gggtcgctcccaacccagccggcagtggcagtaacaattcaccgtcgtcctcttcttccccgacttcttcctcatcttcctctccatcctcccctggatcragcttggcggagagccccgaggcggccggagttagcagcacagcaccactggggcctggggcagcaggacctgggacaggggtcccagcagtgagcgggg

SEQ ID NO: 23285 - DNA, 201 bp, Homo sapiens; identical to SEQ ID NO: 23271

SEQ ID NO: 23286 - DNA, 201 bp, Homo sapiens; identical to SEQ ID NO: 23270

SEQ ID NO: 23287 - DNA, 201 bp, Homo sapiens; identical to SEQ ID NO: 23272

SEQ ID NO: 23288 - DNA, 201 bp, Homo sapiens; identical to SEQ ID NO: 23273

SEQ ID NO: 23289 - DNA, 201 bp, Homo sapiens; identical to SEQ ID NO: 23274

SEQ ID NO: 23290 - DNA, 201 bp, Homo sapiens; identical to SEQ ID NO: 23275

SEQ ID NO: 23291 - DNA, 201 bp, Homo sapiens; identical to SEQ ID NO: 23276

SEQ ID NO: 23292 - DNA, 201 bp, Homo sapiens; identical to SEQ ID NO: 23277

SEQ ID NO: 23293 - DNA, 201 bp, Homo sapiens; identical to SEQ ID NO: 23278

SEQ ID NO: 23294 - DNA, 201 bp, Homo sapiens; identical to SEQ ID NO: 23280

SEQ ID NO: 23295 - DNA, 201 bp, Homo sapiens; identical to SEQ ID NO: 23279

SEQ ID NO: 23296 - DNA, 201 bp, Homo sapiens; identical to SEQ ID NO: 23281

SEQ ID NO: 23297 - DNA, 201 bp, Homo sapiens; identical to SEQ ID NO: 23282

SEQ ID NO: 23298 - DNA, 201 bp, Homo sapiens; identical to SEQ ID NO: 23283

SEQ ID NO: 23299 - DNA, 201 bp, Homo sapiens; identical to SEQ ID NO: 23284

SEQ ID NO: 23300 - DNA, 201 bp, Homo sapiens
ttgaggatgttgctcagcttcaggcgctgcttcagatttggcctaaactgcccccccgggaggccctagagcttctggatttcaactatccagaccagtaygttcgagaatatgctgtaggctgcctgcgacagatgagtgatgaagaactttctcaatatcttttacaactggtgcaagtgttaaaatatgagccttttc

SEQ ID NO: 23301 - DNA, 201 bp, Homo sapiens
tttgactttaaaggacaattgagaactggagacataatattacacagctggtcttcatttcctgatgaactcgaagaaatgttgaatccaatgggaactgktcaaacaaatccatatactgaaaatgcaacagctttgcatgttaaatttccagagaataaaaaacaaccttattattaccctcccttcgataagattatt

SEQ ID NO: 23302 - DNA, 201 bp, Homo sapiens
catatccaccagagcatgaaccatccatccctgaaaacttagaagataaactttatgggggaaagctcatcgtagctgttcattttgaaaactgccaggaygtgtttagctttcaagtgtctcctaatatgaatcctatcaaagtaaatgaattggcaatccaaaaacgtttgactattcatgggaaggaagatgaagtta

SEQ ID NO: 23303 - DNA, 201 bp, Homo sapiens
atttcaactatccagaccagtacgttcgagaatatgctgtaggctgcctgcgacagatgagtgatgaagaactttctcaatatcttttacaactggtgcargtgttaaaatatgagccttttcttgattgtgccctctctagattcctattagaaagagcacttggtaatcggaggatagggcagtttctattttggcatc

SEQ ID NO: 23304 - DNA, 201 bp, Homo sapiens; identical to SEQ ID NO: 23300

SEQ ID NO: 23305 - DNA, 201 bp, Homo sapiens; identical to SEQ ID NO: 23301

SEQ ID NO: 23306 - DNA, 201 bp, Homo sapiens; identical to SEQ ID NO: 23302

SEQ ID NO: 23307 - DNA, 201 bp, Homo sapiens; identical to SEQ ID NO: 23303

SEQ ID NO: 23308 - DNA, 201 bp, Homo sapiens; identical to SEQ ID NO: 23300

SEQ ID NO: 23309 - DNA, 201 bp, Homo sapiens; identical to SEQ ID NO: 23301

SEQ ID NO: 23310 - DNA, 201 bp, Homo sapiens; identical to SEQ ID NO: 23302

SEQ ID NO: 23311 - DNA, 201 bp, Homo sapiens; identical to SEQ ID NO: 23303

SEQ ID NO: 23312 - DNA, 201 bp, Homo sapiens
ttatccaatcaagagtatgatgggtgcccccattgtttaccggatgttgctacagcaggatctttccagttacaagttcccccatctacagaactgcgtcrctgtaggggagtcccttcttccagaaactctggagaactggagggcccagacaggactggacatccgagaatcctatggccagacagaaacgggattgac

SEQ ID NO: 23313 - DNA, 117 bp, Homo sapiens
caggctggcaagcgacycccaagcccagccctgtggtgggtgaatgggaaggggaagaaattaatgtggaatttcagagaactgagtgaaaacagccagcaggcagccaacgtcctc

SEQ ID NO: 23314 - DNA, 201 bp, Homo sapiens
ccaatcaagagtatgatgggtgcccccattgtttaccggatgttgctacagcaggatctttccagttacaagttcccccatctacagaactgcgtcactgkaggggagtcccttcttccagaaactctggagaactggagggcccagacaggactggacatccgagaatcctatggccagacagaaacgggattgacttgc

SEQ ID NO: 23315 - DNA, 158 bp, Homo sapiens
caggctggcaagcgactcccaagcccagccctgtggtgggtgaatgggaaggggaagraattaatgtggaatttcagagaactgagtgaaaacagccagcaggcagccaacgtcctctcgggagcctgtggcctgcagcgtggggatcgtgtggcagt

SEQ ID NO: 23316 - DNA, 201 bp, Homo sapiens
taggagcatgcacatttgttcatctcttgccaaagtttgacccactggttattctaaagacactctccagttatccaatcaagagtatgatgggtgccccyattgtttaccggatgttgctacagcaggatctttccagttacaagttcccccatctacagaactgcgtcactgtaggggagtcccttcttccagaaactc

SEQ ID NO: 23317 - DNA, 201 bp, Homo sapiens
tcactgtaggggagtcccttcttccagaaactctggagaactggagggcccagacaggactggacatccgagaatcctatggccagacagaaacgggattracttgcatggtttccaagacaatgaaaatcaaaccaggatacatgggaacggctgcttcctgttatgatgtacagatcatagatgataagggcaacgtcc

SEQ ID NO: 23318 - DNA, 201 bp, Homo sapiens
cagttatccaatcaagagtatgatgggtgcccccattgtttaccggatgttgctacagcaggatctttccagttacaagttcccccatctacagaactgcstcactgtaggggagtcccttcttccagaaactctggagaactggagggcccagacaggactggacatccgagaatcctatggccagacagaaacgggatt

SEQ ID NO: 23319 - DNA, 201 bp, Homo sapiens
ggccaagctggtgcggggcgcatacctggcccaggagcgagcccgtgcggcagagatcggctatgaggaccccatcaaccccacgtacgaggccaccaacrccatgtaccacaggtgcctggactacgtgttggaggagctgaagcacaacgccaaggccaaggtgatggtggcctcccacaatgaggacacagtgcgctt

SEQ ID NO: 23320 - DNA, 201 bp, Homo sapiens
tggactggagcagcctcatcgacagcaggaccaagctgtccaagcacttggtagtccccaacgcacagacaggacagctggagcccctgctgtcccggttyactgaggaggaggagctacagatgaccaggatgctacagcggatggatgtcctggccaagaaagccacagagatgggcgtgcggctgatggtggatgccg

SEQ ID NO: 23321 - DNA, 201 bp, Homo sapiens
acaatgtgaccctggacgtggagctggctcgccgtgagggctggtgttttggggccaagctggtgcggggcgcatacctggcccaggagcgagcccgtgcrgcagagatcggctatgaggaccccatcaaccccacgtacgaggccaccaacgccatgtaccacaggtgcctggactacgtgttggaggagctgaagcaca

SEQ ID NO: 23322 - DNA, 201 bp, Homo sapiens
ggactggagcagcctcatcgacagcaggaccaagctgtccaagcacttggtagtccccaacgcacagacaggacagctggagcccctgctgtcccggttcrctgaggaggaggagctacagatgaccaggatgctacagcggatggatgtcctggccaagaaagccacagagatgggcgtgcggctgatggtggatgccga

SEQ ID NO: 23323 - DNA, 201 bp, Homo sapiens
ggaccaagctgtccaagcacttggtagtccccaacgcacagacaggacagctggagcccctgctgtcccggttcactgaggaggaggagctacagatgacsaggatgctacagcggatggatgtcctggccaagaaagccacagagatgggcgtgcggctgatggtggatgccgagcagacctacttccagccggccatca

SEQ ID NO: 23324 - DNA, 201 bp, Homo sapiens
ccccaacgcacagacaggacagctggagcccctgctgtcccggttcactgaggaggaggagctacagatgaccaggatgctacagcggatggatgtcctgsccaagaaagccacagagatgggcgtgcggctgatggtggatgccgagcagacctacttccagccggccatcagccgcctgacgctggagatgcagcggaa

SEQ ID NO: 23325 - DNA, 201 bp, Homo sapiens
ccatgtaccacaggtgcctggactacgtgttggaggagctgaagcacaacgccaaggccaaggtgatggtggcctcccacaatgaggacacagtgcgcttygcactgcgcaggatggaggagctgggcctgcatcctgctgaccaccaggtgtactttggacagctgctaggcatgtgtgaccagatcagcttcccgctgg

SEQ ID NO: 23326 - DNA, 201 bp, Homo sapiens
acgcacagacaggacagctggagcccctgctgtcccggttcactgaggaggaggagctacagatgaccaggatgctacagcggatggatgtcctggccaayaaagccacagagatgggcgtgcggctgatggtggatgccgagcagacctacttccagccggccatcagccgcctgacgctggagatgcagcggaagttca

SEQ ID NO: 23327 - DNA, 201 bp, Homo sapiens
atcttcaacacataccagtgctacctcaaggatgcctatgacaatgtgaccctggacgtggagctggctcgccgtgagggctggtgttttggggccaagcyggtgcggggcgcatacctggcccaggagcgagcccgtgcggcagagatcggctatgaggaccccatcaaccccacgtacgaggccaccaacgccatgtac

SEQ ID NO: 23328 - DNA, 201 bp, Homo sapiens
tggacgtggagctggctcgccgtgagggctggtgttttggggccaagctggtgcggggcgcatacctggcccaggagcgagcccgtgcggcagagatcggmtatgaggaccccatcaaccccacgtacgaggccaccaacgccatgtaccacaggtgcctggactacgtgttggaggagctgaagcacaacgccaaggcca

SEQ ID NO: 23329 - DNA, 201 bp, Homo sapiens
caatgtgaccctggacgtggagctggctcgccgtgagggctggtgttttggggccaagctggtgcggggcgcatacctggcccaggagcgagcccgtgcgkcagagatcggctatgaggaccccatcaaccccacgtacgaggccaccaacgccatgtaccacaggtgcctggactacgtgttggaggagctgaagcacaa

SEQ ID NO: 23330 - DNA, 201 bp, Homo sapiens
gagggctggtgttttggggccaagctggtgcggggcgcatacctggcccaggagcgagcccgtgcggcagagatcggctatgaggaccccatcaaccccaygtacgaggccaccaacgccatgtaccacaggtgcctggactacgtgttggaggagctgaagcacaacgccaaggccaaggtgatggtggcctcccacaat

SEQ ID NO: 23331 - DNA, 201 bp, Homo sapiens
ataggcgcacacttaagcggcccgggcgggtaccgccgtcccgccatggctctgaggcgcgccctgcccgcgctgcgcccctgcattccccgcttcgtccmgctgtccacggcgccggcctcccgcgagcagcccgcagcgggcccagcggccgtgccaggaggtgggtcggccacggcagtgcggccgccggtgcccgcc

SEQ ID NO: 23332 - DNA, 201 bp, Homo sapiens
tgcggccgccggtgcccgccgtggacttcggcaacgcgcaggaggcgtaccgcagccggcgaacctgggagctggcgcggagcctgctggtgctgcgcttstgcgcctggcccgcgctgctggcgcgccacgagcagctgctgtatgtttccaggaaacttctaggacagaggctattcaacaagctcatgaagatgacct

SEQ ID NO: 23333 - DNA, 201 bp, Homo sapiens
ccgccgtcccgccatggctctgaggcgcgccctgcccgcgctgcgcccctgcattccccgcttcgtccagctgtccacggcgccggcctcccgcgagcagyccgcagcgggcccagcggccgtgccaggaggtgggtcggccacggcagtgcggccgccggtgcccgccgtggacttcggcaacgcgcaggaggcgtaccg

SEQ ID NO: 23334 - DNA, 201 bp, Homo sapiens
gaggtgggtcggccacggcagtgcggccgccggtgcccgccgtggacttcggcaacgcgcaggaggcgtaccgcagccggcgaacctgggagctggcgcgsagcctgctggtgctgcgcttgtgcgcctggcccgcgctgctggcgcgccacgagcagctgctgtatgtttccaggaaacttctaggacagaggctattca

SEQ ID NO: 23335 - DNA, 201 bp, Homo sapiens
cacccatcgggagcggcagttgctgtggctggagctcttgaggcggctccgaactggcaacctcttccatcgccctgcctagcacccgccagcacaccctyagcctccagcaccccccgcccccgcccaggccatcaccacagctgcagccaaccccatcctcacacagattcaccttttttcaccccacacttgcagagc

SEQ ID NO: 23336 - DNA, 201 bp, Homo sapiens
aacgccaaggccaaggtgatggtggcctcccacaatgaggacacagtgcgcttcgcactgcgcaggatggaggagctgggcctgcatcctgctgaccaccrggtgtactttggacagctgctaggcatgtgtgaccagatcagcttcccgctgggccaggccggctaccccgtgtacaagtacgtgccctatggccccgtg

SEQ ID NO: 23337 - DNA, 201 bp, Homo sapiens
gcaggatggaggagctgggcctgcatcctgctgaccaccaggtgtactttggacagctgctaggcatgtgtgaccagatcagcttcccgctgggccaggcyggctaccccgtgtacaagtacgtgccctatggccccgtgatggaggtgctgccctacttgtcccgccgtgccctggagaacagcagcctcatgaagggca

SEQ ID NO: 23338 - DNA, 201 bp, Homo sapiens
cccgaggaggcagagcacaaggagatggagtcctgcacctcagctgcggagagggatggcagtggcacgaataagcgggacaagcaataccaggcccactrggccttcggggaccgcaggaatggtgtcatcagtgcccgcacctacttctacgccaatgaggccaagtgcgacagccacatggagacattcttgcgctgc

SEQ ID NO: 23339 - DNA, 201 bp, Homo sapiens
ccccgaggaggcagagcacaaggagatggagtcctgcacctcagctgcggagagggatggcagtggcacgaataagcgggacaagcaataccaggcccacygggccttcggggaccgcaggaatggtgtcatcagtgcccgcacctacttctacgccaatgaggccaagtgcgacagccacatggagacattcttgcgctg

SEQ ID NO: 23340 - DNA, 201 bp, Homo sapiens
gtacgtgccctatggccccgtgatggaggtgctgccctacttgtcccgccgtgccctggagaacagcagcctcatgaagggcacccatcgggagcggcagytgctgtggctggagctcttgaggcggctccgaactggcaacctcttccatcgccctgcctagcacccgccagcacaccctcagcctccagcaccccccgc

SEQ ID NO: 23341 - DNA, 201 bp, Homo sapiens
cagcggaagttcaatgtggagaagccgctcatcttcaacacataccagtgctacctcaaggatgcctatgacaatgtgaccctggacgtggagctggctcrccgtgagggctggtgttttggggccaagctggtgcggggcgcatacctggcccaggagcgagcccgtgcggcagagatcggctatgaggaccccatcaac

SEQ ID NO: 23342 - DNA, 201 bp, Homo sapiens
tgaggactggttcacggcagagaccctgggagtgtctggcaccatggacctgctggactggagcagcctcatcgacagcaggaccaagctgtccaagcacytggtagtccccaacgcacagacaggacagctggagcccctgctgtcccggttcactgaggaggaggagctacagatgaccaggatgctacagcggatgga

SEQ ID NO: 23343 - DNA, 124 bp, Homo sapiens
agtgtcagtggcaaccttttcatttagagaagtttttcttgttccaggcccttcaggacaggatctgactgcaagactccccaaaatgggtacccatcttytaagttcccttttgtagctactg

SEQ ID NO: 23344 - DNA, 201 bp, Homo sapiens
tcaagtcctataagtcctacgacttctttcggcatgacaatgaggaggccatgaagatccgcaaacagtgtgctctggtggcgctggaagatgttaaggcrtatctcactgaggagaatggtcagattgcggtgtttgatgccaccaatacaacccgggagaggagggacatgattttgaactttgctgaacagaattcct

SEQ ID NO: 23345 - DNA, 201 bp, Homo sapiens
ccattaatcttaacacagaacatgaggttatgtttagcaaattgagtcttttaggacagattctcagatgggatgatctggaggaggaggaaaaagatacrctcccttggggctgagcatgccccacactcttggatcttctctctgttccctggtgtcttcactaatgtcctcatgttggtgaagtgttgggggatggag

SEQ ID NO: 23346 - DNA, 201 bp, Homo sapiens
ctgtgtgtttccctccagccctggcctcctgcccttgtcactaatcaccaaggagtcattaacttcctccctctatgcccacccctgacacttcaccattwatcttaacacagaacatgaggttatgtttagcaaattgagtcttttaggacagattctcagatgggatgatctggaggaggaggaaaaagatacactccc

SEQ ID NO: 23347 - DNA, 201 bp, Homo sapiens
tggtgtaactgtgtgtttccctccagccctggcctcctgcccttgtcactaatcaccaaggagtcattaacttcctccctctatgcccacccctgacacttcaccattaatcttaacacagaacatgaggttatgtttagcaaattgagtcttttaggacagattctcagatgggatgatctggaggaggaggaaaaagat

SEQ ID NO: 23348 - DNA, 201 bp, Homo sapiens; identical to SEQ ID NO: 23344

SEQ ID NO: 23349 - DNA, 201 bp, Homo sapiens
gccgtcctgcatctcctgctctcggtgcccgccggcttcctgctggccaccatccttgggaccgcctgcctggccattgcgagcggcatctacctactggyggctgtgcgtggcgagcagtggacgcccatcgagcccaagccccgggagcggccgcagatcggaggcaccatcaagcagccgcccagcaaccccccgccg

SEQ ID NO: 23350 - DNA, 201 bp, Homo sapiens
ctggcggctgtgcgtggcgagcagtggacgcccatcgagcccaagccccgggagcggccgcagatcggaggcaccatcaagcagccgcccagcaacccccmgccgcggcccccggccgaggcccgcaagaagcccagcgaggaggaggctgcggcggcggcggggggacccccgggaggtccccaggtcaaccccatcccg

SEQ ID NO: 23351 - DNA, 201 bp, Homo sapiens
ggctgggggcggggcctgggcggggcggggttcggccgggagcgcaggggcggcagtgcgcgcctagcagtgtcccagccgggttcgtgtcgccatggggyagatcgagtgggccatgtgggccaacgaacaggcgctggcgtccggcctgatcctcatcaccgggggcatcgtggccacagctgggcgcttcacccagtg

SEQ ID NO: 23352 - DNA, 201 bp, Homo sapiens
gggaagaggaagaagggctccaccatggagcgctggggacagaagtacatgaccgccgtggtgaagctgttcgggccctttaccaggaattactatgttcrggccgtcctgcatctcctgctctcggtgcccgccggcttcctgctggccaccatccttgggaccgcctgcctggccattgcgagcggcatctacctactg

SEQ ID NO: 23353 - DNA, 201 bp, Homo sapiens
aagggctccaccatggagcgctggggacagaagtacatgaccgccgtggtgaagctgttcgggccctttaccaggaattactatgttcgggccgtcctgcrtctcctgctctcggtgcccgccggcttcctgctggccaccatccttgggaccgcctgcctggccattgcgagcggcatctacctactggcggctgtgcgt

SEQ ID NO: 23354 - DNA, 201 bp, Homo sapiens
ggaattactatgttcgggccgtcctgcatctcctgctctcggtgcccgccggcttcctgctggccaccatccttgggaccgcctgcctggccattgcgagmggcatctacctactggcggctgtgcgtggcgagcagtggacgcccatcgagcccaagccccgggagcggccgcagatcggaggcaccatcaagcagccgc

SEQ ID NO: 23355 - DNA, 201 bp, Homo sapiens
ggggaagaggaagaagggctccaccatggagcgctggggacagaagtacatgaccgccgtggtgaagctgttcgggccctttaccaggaattactatgttygggccgtcctgcatctcctgctctcggtgcccgccggcttcctgctggccaccatccttgggaccgcctgcctggccattgcgagcggcatctacctact

SEQ ID NO: 23356 - DNA, 201 bp, Homo sapiens
tggtgcctactccattgtggcgggcgtgtttgtgtgcctgctggagtacccccgggggaagaggaagaagggctccaccatggagcgctggggacagaagyacatgaccgccgtggtgaagctgttcgggccctttaccaggaattactatgttcgggccgtcctgcatctcctgctctcggtgcccgccggcttcctgct

SEQ ID NO: 23357 - DNA, 201 bp, Homo sapiens
gtggccacagctgggcgcttcacccagtggtactttggtgcctactccattgtggcgggcgtgtttgtgtgcctgctggagtacccccgggggaagaggamgaagggctccaccatggagcgctggggacagaagtacatgaccgccgtggtgaagctgttcgggccctttaccaggaattactatgttcgggccgtcctg

SEQ ID NO: 23358 - DNA, 201 bp, Homo sapiens
cggccgcagatcggaggcaccatcaagcagccgcccagcaaccccccgccgcggcccccggccgaggcccgcaagaagcccagcgaggaggaggctgcggyggcggcggggggacccccgggaggtccccaggtcaaccccatcccggtgaccgacgaggtcgtgtgacctcgccccggacctgccctcccgccaggtgca

SEQ ID NO: 23359 - DNA, 201 bp, Homo sapiens
ccgggttcgtgtcgccatggggcagatcgagtgggccatgtgggccaacgaacaggcgctggcgtccggcctgatcctcatcaccgggggcatcgtggccrcagctgggcgcttcacccagtggtactttggtgcctactccattgtggcgggcgtgtttgtgtgcctgctggagtacccccgggggaagaggaagaaggg

SEQ ID NO: 23360 - DNA, 201 bp, Homo sapiens
gcgtgtttgtgtgcctgctggagtacccccgggggaagaggaagaagggctccaccatggagcgctggggacagaagtacatgaccgccgtggtgaagctsttcgggccctttaccaggaattactatgttcgggccgtcctgcatctcctgctctcggtgcccgccggcttcctgctggccaccatccttgggaccgcct

SEQ ID NO: 23361 - DNA, 201 bp, Homo sapiens
agttgcaggaagtccacatatattttagctatttagcctttgtaacctttaaacactggggatgccttcatgctttctggtgagggtctgttaacttggcscgtggagtccttcactgcacggaagagcagaggtttccctgttcacctgctctatggtctgtgctttgtgaaaacacctttccctggccctgggtcctgc

SEQ ID NO: 23362 - DNA, 201 bp, Homo sapiens
gggattacaggcgtgagccaccgcgcccggcctgattgtctttttcttaagttgcaggaagtccacatatattttagctatttagcctttgtaacctttaracactggggatgccttcatgctttctggtgagggtctgttaacttggcgcgtggagtccttcactgcacggaagagcagaggtttccctgttcacctgct

SEQ ID NO: 23363 - DNA, 149 bp, Homo sapiens
agcctgtcccagggcccctagcggggtgggcctccggggagggagggagggagggagggcgggcgctggggcgcggctcaacccttcagtgccccgcaggyggctgtgcgtggcgagcagtggacgcccatcgagcccaagccccggga

SEQ ID NO: 23364 - DNA, 201 bp, Homo sapiens
gctgcaggccacctctcactgcgggggtctctgggtggacagagccctcagactttgcttatttaaatccttttgtccatagagccaagtccctcctgccmgcagaggcaactgccctccccttgctgtgcgtcttctagtgtgtgtgcgtgggaaaggtgcagcactttctgtgtacgccttccgcgtatggaagtggag

SEQ ID NO: 23365 - DNA, 201 bp, Homo sapiens; identical to SEQ ID NO: 23351

SEQ ID NO: 23366 - DNA, 201 bp, Homo sapiens; identical to SEQ ID NO: 23352

SEQ ID NO: 23367 - DNA, 201 bp, Homo sapiens
aagggctccaccatggagcgctggggacagaagtacatgaccgccgtggtgaagctgttcgggccctttaccaggaattactatgttcgggccgtcctgcrtctcctgctctcggtgcccgccggcttcctgctggccaccatccttgggaccgcctgcctggccattgcgagcggcatctacctactggtgagtggcgcc

SEQ ID NO: 23368 - DNA, 201 bp, Homo sapiens
ggaattactatgttcgggccgtcctgcatctcctgctctcggtgcccgccggcttcctgctggccaccatccttgggaccgcctgcctggccattgcgagmggcatctacctactggtgagtggcgccctctgaggtcggccccggccacccccatccccagcccctgccctgacaccctcggacacgcatggcccttgaa

SEQ ID NO: 23369 - DNA, 201 bp, Homo sapiens; identical to SEQ ID NO: 23355

SEQ ID NO: 23370 - DNA, 201 bp, Homo sapiens; identical to SEQ ID NO: 23356

SEQ ID NO: 23371 - DNA, 201 bp, Homo sapiens; identical to SEQ ID NO: 23357

SEQ ID NO: 23372 - DNA, 201 bp, Homo sapiens
agtgctgggattacaggcgtgagccaccgcgcccggcctgattgtctttttcttaagttgcaggaagtccacatatattttagctatttagcctttgtaamctttaaacactggggatgccttcatgctttctggtgagggtctgttaacttggcgcgtggagtccttcactgcacggaagagcagaggtttccctgttca

SEQ ID NO: 23373 - DNA, 201 bp, Homo sapiens; identical to SEQ ID NO: 23360

SEQ ID NO: 23374 - DNA, 201 bp, Homo sapiens; identical to SEQ ID NO: 23359

SEQ ID NO: 23375 - DNA, 149 bp, Homo sapiens; identical to SEQ ID NO: 23363

SEQ ID NO: 23376 - DNA, 201 bp, Homo sapiens; identical to SEQ ID NO: 23351

SEQ ID NO: 23377 - DNA, 201 bp, Homo sapiens
ccagccgcgccgtctcgccttcctccctcccccaggggacagaagtacatgaccgccgtggtgaagctgttcgggccctttaccaggaattactatgttcrggccgtcctgcatctcctgtgagtccccgtcccgcaccccctctagggctcaggagggcttggagccgaccctccccactgtcccaccggccgggctgcc

SEQ ID NO: 23378 - DNA, 201 bp, Homo sapiens
tctcgccttcctccctcccccaggggacagaagtacatgaccgccgtggtgaagctgttcgggccctttaccaggaattactatgttcgggccgtcctgcrtctcctgtgagtccccgtcccgcaccccctctagggctcaggagggcttggagccgaccctccccactgtcccaccggccgggctgcctggacaggagcc

SEQ ID NO: 23379 - DNA, 201 bp, Homo sapiens
tctgtgtccctgcctctcacccgctgtcccccaggctctcggtgcccgccggcttcctgctggccaccatccttgggaccgcctgcctggccattgcgagmggcatctacctactggtgagtggcgccctctgaggtcggccccggccacccccatccccagcccctgccctgacaccctcggacacgcatggcccttgaa

SEQ ID NO: 23380 - DNA, 201 bp, Homo sapiens
cccagccgcgccgtctcgccttcctccctcccccaggggacagaagtacatgaccgccgtggtgaagctgttcgggccctttaccaggaattactatgttygggccgtcctgcatctcctgtgagtccccgtcccgcaccccctctagggctcaggagggcttggagccgaccctccccactgtcccaccggccgggctgc

SEQ ID NO: 23381 - DNA, 201 bp, Homo sapiens
acacccacacgtggctgcttcctccgagcaagtgcaccagagccgctagtgtccacatcaaggctgagaacacccaggaccgaaacaagccccggtccgcrcacgtcccctgggtctgcagtctgccttgtcctgagactttgtggccttggcccccagacctggggctccgttcccctttctgagtgcccttctgtgtcc

SEQ ID NO: 23382 - DNA, 201 bp, Homo sapiens
ctgtgtgtctgctggttactgccggctgaggccaggacacccacacgtggctgcttcctccgagcaagtgcaccagagccgctagtgtccacatcaaggcygagaacacccaggaccgaaacaagccccggtccgcgcacgtcccctgggtctgcagtctgccttgtcctgagactttgtggccttggcccccagacctgg

SEQ ID NO: 23383 - DNA, 201 bp, Homo sapiens
ggagggttccgtgctgtgtgtctgctggttactgccggctgaggccaggacacccacacgtggctgcttcctccgagcaagtgcaccagagccgctagtgkccacatcaaggctgagaacacccaggaccgaaacaagccccggtccgcgcacgtcccctgggtctgcagtctgccttgtcctgagactttgtggccttgg

SEQ ID NO: 23384 - DNA, 201 bp, Homo sapiens
gccgggctgcctggacaggagccacccccacttacctcagtgtttttccaaacaaaaattcgggtccctggctctggcagggcctgtgtctgctgtctagygtgcaggatttgtaaggatccactccaaatccgaggagctccgatccgtcgccagggtctggggtcagcatgcactgctggggggtcttgcctgggcttc

SEQ ID NO: 23385 - DNA, 201 bp, Homo sapiens
cattgtggcgggcgtgtttgtgtgcctgctggagtacccccgggggaagaggaagaagggctccaccatggagcgctggtgagtctcctcctgctctgggktctctccgggggttgcggggcccaggcagggctcacagggttgggtggagcttggtttctcacttggaggctccggaaccaaccctttggtgcttgtggg

SEQ ID NO: 23386 - DNA, 201 bp, Homo sapiens
ctgggtgccctggggtggtcagcagggcagcaaaggagtcccgagtgggagaggcccagccgcgccgtctcgccttcctccctcccccaggggacagaagyacatgaccgccgtggtgaagctgttcgggccctttaccaggaattactatgttcgggccgtcctgcatctcctgtgagtccccgtcccgcaccccctcta

SEQ ID NO: 23387 - DNA, 201 bp, Homo sapiens
gtggagggttccgtgctgtgtgtctgctggttactgccggctgaggccaggacacccacacgtggctgcttcctccgagcaagtgcaccagagccgctagygtccacatcaaggctgagaacacccaggaccgaaacaagccccggtccgcgcacgtcccctgggtctgcagtctgccttgtcctgagactttgtggcctt

SEQ ID NO: 23388 - DNA, 201 bp, Homo sapiens
gtggccacagctgggcgcttcacccagtggtactttggtgcctactccattgtggcgggcgtgtttgtgtgcctgctggagtacccccgggggaagaggamgaagggctccaccatggagcgctggtgagtctcctcctgctctggggtctctccgggggttgcggggcccaggcagggctcacagggttgggtggagctt

SEQ ID NO: 23389 - DNA, 201 bp, Homo sapiens
ggtcttgcctgggcttcctggtagggtggagggttccgtgctgtgtgtctgctggttactgccggctgaggccaggacacccacacgtggctgcttcctcygagcaagtgcaccagagccgctagtgtccacatcaaggctgagaacacccaggaccgaaacaagccccggtccgcgcacgtcccctgggtctgcagtctg

SEQ ID NO: 23390 - DNA, 201 bp, Homo sapiens
gtgtttgtgtgcctgctggagtacccccgggggaagaggaagaagggctccaccatggagcgctggtgagtctcctcctgctctggggtctctccgggggytgcggggcccaggcagggctcacagggttgggtggagcttggtttctcacttggaggctccggaaccaaccctttggtgcttgtgggtaaaccaaggccg

SEQ ID NO: 23391 - DNA, 201 bp, Homo sapiens
ctttggtgcctactccattgtggcgggcgtgtttgtgtgcctgctggagtacccccgggggaagaggaagaagggctccaccatggagcgctggtgagtcycctcctgctctggggtctctccgggggttgcggggcccaggcagggctcacagggttgggtggagcttggtttctcacttggaggctccggaaccaaccc

SEQ ID NO: 23392 - DNA, 201 bp, Homo sapiens
agggcagcaaaggagtcccgagtgggagaggcccagccgcgccgtctcgccttcctccctcccccaggggacagaagtacatgaccgccgtggtgaagctsttcgggccctttaccaggaattactatgttcgggccgtcctgcatctcctgtgagtccccgtcccgcaccccctctagggctcaggagggcttggagccg

SEQ ID NO: 23393 - DNA, 201 bp, Homo sapiens; identical to SEQ ID NO: 23359

SEQ ID NO: 23394 - DNA, 166 bp, Homo sapiens
cccctcggggcagagtttgcacaaagtcccccccataatacagggggagccacttgggcaggaggcagggaggggtccattccccctggtggggctggtgrggagctgtagttgccccctacctctcccacctcttgctcttcaataaaatgatcttaaactgctg

SEQ ID NO: 23395 - DNA, 201 bp, Homo sapiens
cagctctccaaggggcgtgagagtgttctgatcatctccacagacccagcacacaacatctcagatgcttttgaccagaagttctcaaaggtgcctaccamggtcaaaggctatgacaacctctttgctatggagattgaccccagcctgggcgtggcggagctgcctgacgagttcttcgaggaggacaacatgctgagc

SEQ ID NO: 23396 - DNA, 201 bp, Homo sapiens
gctctccaaggggcgtgagagtgttctgatcatctccacagacccagcacacaacatctcagatgcttttgaccagaagttctcaaaggtgcctaccaagktcaaaggctatgacaacctctttgctatggagattgaccccagcctgggcgtggcggagctgcctgacgagttcttcgaggaggacaacatgctgagcat

SEQ ID NO: 23397 - DNA, 192 bp, Homo sapiens
gttcttcgtatggtgcgctccgctggatcacgtgagccagttccaaaatggcggcaggggtggccgggtggggggttgaggcagaggagttygaagatgctcctgatgtggagccgctggagcctacacttagcaacatcatcgagcagcgcagcctgaagtggatcttcgtcgggggcaagggtggtgtgg

SEQ ID NO: 23398 - DNA, 201 bp, Homo sapiens
agacagagaggctgatccaggagctggccaagtgcaagattgacacacacaatataattgtcaaccagctcgtcttccccgaccccgagaagccctgcaaratgtgtgaggcccgtcacaagatccaggccaagtatctggaccagatggaggacctgtatgaagacttccacatcgtgaagctgccgctgttaccccatg

SEQ ID NO: 23399 - DNA, 201 bp, Homo sapiens
aaggtcaacaccttctcggccctcctcctggagccctacaagccccccagtgcccagtagcacagctgccagccccaaccgctgccatttcacactcaccytccaccctccccaccccctcggggcagagtttgcacaaagtcccccccataatacagggggagccacttgggcaggaggcagggaggggtccattccccc

SEQ ID NO: 23400 - DNA, 142 bp, Homo sapiens
agtcccccccataatacagggggagccacttgggcaggaggcagggaggggtccattccccctggtggggctggtggggagctgtagttgccccctacctmtcccacctcttgctcttcaataaaatgatcttaaactgctg

SEQ ID NO: 23401 - DNA, 166 bp, Homo sapiens; identical to SEQ ID NO: 23394

SEQ ID NO: 23402 - DNA, 201 bp, Homo sapiens; identical to SEQ ID NO: 23395

SEQ ID NO: 23403 - DNA, 201 bp, Homo sapiens; identical to SEQ ID NO: 23396

SEQ ID NO: 23404 - DNA, 201 bp, Homo sapiens
gttgctaaggttcttcgtatggtgcgctccgctggatcacgtgagccagttccaaaatggcggcaggggtggccgggtggggggttgaggcagaggagttygaagatgctcctgatgtggagccgctggagcctacacttagcaacatcatcgagcagcgcagcctgaagtggatcttcgtcgggggcaagggtggtgtgg

SEQ ID NO: 23405 - DNA, 201 bp, Homo sapiens; identical to SEQ ID NO: 23398

SEQ ID NO: 23406 - DNA, 201 bp, Homo sapiens; identical to SEQ ID NO: 23399

SEQ ID NO: 23407 - DNA, 142 bp, Homo sapiens; identical to SEQ ID NO: 23400

SEQ ID NO: 23408 - DNA, 201 bp, Homo sapiens
ctgctgaagaggaataactgtgggaaagccctggacatcgcccgccaggcccgagacatgctgggggggaatgggatttctgacgagtatcacgtgatccrgcacgccatgaacctggaggccgtgaacacctacgaaggtacacatgacattcacgccctgatccttgggagagctatcacgggaatccaggcgttcacg

SEQ ID NO: 23409 - DNA, 201 bp, Homo sapiens
ctggggggtcccttcggctgcctgaacaacgcccggtacggcatcgcgtggggcgtgcttggagcttcggagttctgcttgcacacagcccggcagtacgmcctcgacaggatgcagtttggtgtcccactggccaggaaccagctgattcagaagaagctggcagacatgctcactgagattaccctgggccttcacgcc

SEQ ID NO: 23410 - DNA, 201 bp, Homo sapiens
gaggaacagcggcagaagtacctgccccagctggccaagggggagctcctgggctgcttcgggctcacagagcccaacagcggaagtgaccccagcagcayggagaccagagcccactacaactcatccaacaagagctacaccctcaatgggaccaagacctggatcacgaactcgcctatggccgatctgtttgtagtg

SEQ ID NO: 23411 - DNA, 201 bp, Homo sapiens
tctgctgaagaggaataactgtgggaaagccctggacatcgcccgccaggcccgagacatgctgggggggaatgggatttctgacgagtatcacgtgatcyggcacgccatgaacctggaggccgtgaacacctacgaaggtacacatgacattcacgccctgatccttgggagagctatcacgggaatccaggcgttcac

SEQ ID NO: 23412 - DNA, 201 bp, Homo sapiens
gtttggtgtcccactggccaggaaccagctgattcagaagaagctggcagacatgctcactgagattaccctgggccttcacgcctgcctgcagctcggcygcttgaaggaccaggacaaggctgcccccgagatggtttctctgctgaagaggaataactgtgggaaagccctggacatcgcccgccaggcccgagacat

SEQ ID NO: 23413 - DNA, 201 bp, Homo sapiens
gcagaagtacctgccccagctggccaagggggagctcctgggctgcttcgggctcacagagcccaacagcggaagtgaccccagcagcatggagaccagarcccactacaactcatccaacaagagctacaccctcaatgggaccaagacctggatcacgaactcgcctatggccgatctgtttgtagtgtgggctcggtg

SEQ ID NO: 23414 - DNA, 201 bp, Homo sapiens
ggtttctctgctgaagaggaataactgtgggaaagccctggacatcgcccgccaggcccgagacatgctgggggggaatgggatttctgacgagtatcacrtgatccggcacgccatgaacctggaggccgtgaacacctacgaaggtacacatgacattcacgccctgatccttgggagagctatcacgggaatccaggc

SEQ ID NO: 23415 - DNA, 201 bp, Homo sapiens
tttggtgtcccactggccaggaaccagctgattcagaagaagctggcagacatgctcactgagattaccctgggccttcacgcctgcctgcagctcggccrcttgaaggaccaggacaaggctgcccccgagatggtttctctgctgaagaggaataactgtgggaaagccctggacatcgcccgccaggcccgagacatg

SEQ ID NO: 23416 - DNA, 201 bp, Homo sapiens
gattcagaagaagctggcagacatgctcactgagattaccctgggccttcacgcctgcctgcagctcggccgcttgaaggaccaggacaaggctgcccccragatggtttctctgctgaagaggaataactgtgggaaagccctggacatcgcccgccaggcccgagacatgctgggggggaatgggatttctgacgagta

SEQ ID NO: 23417 - DNA, 201 bp, Homo sapiens
agagcccactacaactcatccaacaagagctacaccctcaatgggaccaagacctggatcacgaactcgcctatggccgatctgtttgtagtgtgggctcsgtgtgaagatggctgcattcggggcttcctgctggagaaggggatgcggggtctctcggcccccaggatccagggcaagttctcgctgcgggcctcagcc

SEQ ID NO: 23418 - DNA, 201 bp, Homo sapiens
acatcgcccgccaggcccgagacatgctgggggggaatgggatttctgacgagtatcacgtgatccggcacgccatgaacctggaggccgtgaacacctamgaaggtacacatgacattcacgccctgatccttgggagagctatcacgggaatccaggcgttcacggccagcaagtgagccgctccatcaggggcccgaa

SEQ ID NO: 23419 - DNA, 201 bp, Homo sapiens
gagctacaccctcaatgggaccaagacctggatcacgaactcgcctatggccgatctgtttgtagtgtgggctcggtgtgaagatggctgcattcggggcytcctgctggagaaggggatgcggggtctctcggcccccaggatccagggcaagttctcgctgcgggcctcagccacaggcatgatcatcatggacggtgt

SEQ ID NO: 23420 - DNA, 201 bp, Homo sapiens
catcgcccgccaggcccgagacatgctgggggggaatgggatttctgacgagtatcacgtgatccggcacgccatgaacctggaggccgtgaacacctacraaggtacacatgacattcacgccctgatccttgggagagctatcacgggaatccaggcgttcacggccagcaagtgagccgctccatcaggggcccgaaa

SEQ ID NO: 23421 - DNA, 201 bp, Homo sapiens
aactcgcctatggccgatctgtttgtagtgtgggctcggtgtgaagatggctgcattcggggcttcctgctggagaaggggatgcggggtctctcggcccycaggatccagggcaagttctcgctgcgggcctcagccacaggcatgatcatcatggacggtgtggaggtgccagaggagaatgtgctccctggtgcatcc

SEQ ID NO: 23422 - DNA, 201 bp, Homo sapiens
cgccaggcccgagacatgctgggggggaatgggatttctgacgagtatcacgtgatccggcacgccatgaacctggaggccgtgaacacctacgaaggtayacatgacattcacgccctgatccttgggagagctatcacgggaatccaggcgttcacggccagcaagtgagccgctccatcaggggcccgaaactctcaa

SEQ ID NO: 23423 - DNA, 201 bp, Homo sapiens
catgctgggggggaatgggatttctgacgagtatcacgtgatccggcacgccatgaacctggaggccgtgaacacctacgaaggtacacatgacattcacrccctgatccttgggagagctatcacgggaatccaggcgttcacggccagcaagtgagccgctccatcaggggcccgaaactctcaagcccctttctggag

SEQ ID NO: 23424 - DNA, 201 bp, Homo sapiens
atgctgggggggaatgggatttctgacgagtatcacgtgatccggcacgccatgaacctggaggccgtgaacacctacgaaggtacacatgacattcacgycctgatccttgggagagctatcacgggaatccaggcgttcacggccagcaagtgagccgctccatcaggggcccgaaactctcaagcccctttctggaga

SEQ ID NO: 23425 - DNA, 201 bp, Homo sapiens
accctcaatgggaccaagacctggatcacgaactcgcctatggccgatctgtttgtagtgtgggctcggtgtgaagatggctgcattcggggcttcctgcyggagaaggggatgcggggtctctcggcccccaggatccagggcaagttctcgctgcgggcctcagccacaggcatgatcatcatggacggtgtggaggtg

SEQ ID NO: 23426 - DNA, 201 bp, Homo sapiens
agtgtgggctcggtgtgaagatggctgcattcggggcttcctgctggagaaggggatgcggggtctctcggcccccaggatccagggcaagttctcgctgygggcctcagccacaggcatgatcatcatggacggtgtggaggtgccagaggagaatgtgctccctggtgcatccagcctggggggtcccttcggctgcct

SEQ ID NO: 23427 - DNA, 201 bp, Homo sapiens
gtgtgggctcggtgtgaagatggctgcattcggggcttcctgctggagaaggggatgcggggtctctcggcccccaggatccagggcaagttctcgctgcrggcctcagccacaggcatgatcatcatggacggtgtggaggtgccagaggagaatgtgctccctggtgcatccagcctggggggtcccttcggctgcctg

SEQ ID NO: 23428 - DNA, 201 bp, Homo sapiens
ggctcggtgtgaagatggctgcattcggggcttcctgctggagaaggggatgcggggtctctcggcccccaggatccagggcaagttctcgctgcgggccycagccacaggcatgatcatcatggacggtgtggaggtgccagaggagaatgtgctccctggtgcatccagcctggggggtcccttcggctgcctgaacaa

SEQ ID NO: 23429 - DNA, 201 bp, Homo sapiens
cattcggggcttcctgctggagaaggggatgcggggtctctcggcccccaggatccagggcaagttctcgctgcgggcctcagccacaggcatgatcatcrtggacggtgtggaggtgccagaggagaatgtgctccctggtgcatccagcctggggggtcccttcggctgcctgaacaacgcccggtacggcatcgcgtg

SEQ ID NO: 23430 - DNA, 201 bp, Homo sapiens
ggagcgctgtgctctgagcttagaaagggaggtggcggatggagtgggaagtgagagacactgatttttaaatatcaaaatttcccttctgaagtcgttcrgatgtgttccttaaaaagaagatggaattctctgtagagcgtctcaatccacttttaaccatggatgagagcagactccatttaccctgaaatagcagct

SEQ ID NO: 23431 - DNA, 201 bp, Homo sapiens
agccaactggctaagtcctcgcgtcccgagtttgactggcaggacccgctggtgctggaggagcagctgaccacagatgagatcctcatcagggacacctyccgcacctactgccaggagagactcatgcctcgcatcctgttggccaatcgcaacgaagtttttcatcgggagatcatttcggagatgggggagttgggt

SEQ ID NO: 23432 - DNA, 201 bp, Homo sapiens
ggagttctgcttgcacacagcccggcagtacgccctcgacaggatgcagtttggtgtcccactggccaggaaccagctgattcagaagaagctggcagacrtgctcactgagattaccctgggccttcacgcctgcctgcagctcggccgcttgaaggaccaggacaaggctgcccccgagatggtttctctgctgaagag

SEQ ID NO: 23433 - DNA, 201 bp, Homo sapiens
gggcgtgcttggagcttcggagttctgcttgcacacagcccggcagtacgccctcgacaggatgcagtttggtgtcccactggccaggaaccagctgattsagaagaagctggcagacatgctcactgagattaccctgggccttcacgcctgcctgcagctcggccgcttgaaggaccaggacaaggctgcccccgagat

SEQ ID NO: 23434 - DNA, 201 bp, Homo sapiens
ggtgctggaggagcagctgaccacagatgagatcctcatcagggacaccttccgcacctactgccaggagagactcatgcctcgcatcctgttggccaatygcaacgaagtttttcatcgggagatcatttcggagatgggggagttgggtgtgctgggccccaccatcaaaggatatggctgtgctggggtttcgtctgt

SEQ ID NO: 23435 - DNA, 201 bp, Homo sapiens
ggaggagcagctgaccacagatgagatcctcatcagggacaccttccgcacctactgccaggagagactcatgcctcgcatcctgttggccaatcgcaacraagtttttcatcgggagatcatttcggagatgggggagttgggtgtgctgggccccaccatcaaaggatatggctgtgctggggtttcgtctgtggccta

SEQ ID NO: 23436 - DNA, 201 bp, Homo sapiens
accacagatgagatcctcatcagggacaccttccgcacctactgccaggagagactcatgcctcgcatcctgttggccaatcgcaacgaagtttttcatckggagatcatttcggagatgggggagttgggtgtgctgggccccaccatcaaaggatatggctgtgctggggtttcgtctgtggcctatgggctcctggcc

SEQ ID NO: 23437 - DNA, 201 bp, Homo sapiens
gtcctcgcgtcccgagtttgactggcaggacccgctggtgctggaggagcagctgaccacagatgagatcctcatcagggacaccttccgcacctactgcyaggagagactcatgcctcgcatcctgttggccaatcgcaacgaagtttttcatcgggagatcatttcggagatgggggagttgggtgtgctgggccccac

SEQ ID NO: 23438 - DNA, 201 bp, Homo sapiens
gagatcatttcggagatgggggagttgggtgtgctgggccccaccatcaaaggatatggctgtgctggggtttcgtctgtggcctatgggctcctggcccragagctggagcgggtggacagtggctacaggtcggcgatgagtgtccagtcctccctcgtcatgcaccctatctatgcctatggcagcgaggaacagcgg

SEQ ID NO: 23439 - DNA, 201 bp, Homo sapiens
ggcctatgggctcctggcccgagagctggagcgggtggacagtggctacaggtcggcgatgagtgtccagtcctccctcgtcatgcaccctatctatgccyatggcagcgaggaacagcggcagaagtacctgccccagctggccaagggggagctcctgggctgcttcgggctcacagagcccaacagcggaagtgaccc

SEQ ID NO: 23440 - DNA, 201 bp, Homo sapiens
ccagaggagaatgtgctccctggtgcatccagcctggggggtcccttcggctgcctgaacaacgcccggtacggcatcgcgtggggcgtgcttggagcttyggagttctgcttgcacacagcccggcagtacgccctcgacaggatgcagtttggtgtcccactggccaggaaccagctgattcagaagaagctggcagac

SEQ ID NO: 23441 - DNA, 201 bp, Homo sapiens
ggcagtgaaccgggaggtactaccaggtcgccgtcgttgctccgctcgctctgagagagcatggccctgagaggcgtctccgtgcggctgctgagccgcgracccggcctgcacgtccttcgcacgtgggtctcgtcggcggcgcagaccgagaaaggcgggagaacacagagccaactggctaagtcctcgcgtcccgag

SEQ ID NO: 23442 - DNA, 201 bp, Homo sapiens
gagatgggggagttgggtgtgctgggccccaccatcaaaggatatggctgtgctggggtttcgtctgtggcctatgggctcctggcccgagagctggagcrggtggacagtggctacaggtcggcgatgagtgtccagtcctccctcgtcatgcaccctatctatgcctatggcagcgaggaacagcggcagaagtacctg

SEQ ID NO: 23443 - DNA, 201 bp, Homo sapiens
catgcctcgcatcctgttggccaatcgcaacgaagtttttcatcgggagatcatttcggagatgggggagttgggtgtgctgggccccaccatcaaaggayatggctgtgctggggtttcgtctgtggcctatgggctcctggcccgagagctggagcgggtggacagtggctacaggtcggcgatgagtgtccagtcctc

SEQ ID NO: 23444 - DNA, 201 bp, Homo sapiens
gatgggggagttgggtgtgctgggccccaccatcaaaggatatggctgtgctggggtttcgtctgtggcctatgggctcctggcccgagagctggagcggrtggacagtggctacaggtcggcgatgagtgtccagtcctccctcgtcatgcaccctatctatgcctatggcagcgaggaacagcggcagaagtacctgcc

SEQ ID NO: 23445 - DNA, 201 bp, Homo sapiens
cgcatcctgttggccaatcgcaacgaagtttttcatcgggagatcatttcggagatgggggagttgggtgtgctgggccccaccatcaaaggatatggctrtgctggggtttcgtctgtggcctatgggctcctggcccgagagctggagcgggtggacagtggctacaggtcggcgatgagtgtccagtcctccctcgtc

SEQ ID NO: 23446 - DNA, 201 bp, Homo sapiens
tgtgctgggccccaccatcaaaggatatggctgtgctggggtttcgtctgtggcctatgggctcctggcccgagagctggagcgggtggacagtggctacrggtcggcgatgagtgtccagtcctccctcgtcatgcaccctatctatgcctatggcagcgaggaacagcggcagaagtacctgccccagctggccaaggg

SEQ ID NO: 23447 - DNA, 201 bp, Homo sapiens
gccaatcgcaacgaagtttttcatcgggagatcatttcggagatgggggagttgggtgtgctgggccccaccatcaaaggatatggctgtgctggggtttygtctgtggcctatgggctcctggcccgagagctggagcgggtggacagtggctacaggtcggcgatgagtgtccagtcctccctcgtcatgcaccctatc

SEQ ID NO: 23448 - DNA, 201 bp, Homo sapiens
gtgctgggccccaccatcaaaggatatggctgtgctggggtttcgtctgtggcctatgggctcctggcccgagagctggagcgggtggacagtggctacargtcggcgatgagtgtccagtcctccctcgtcatgcaccctatctatgcctatggcagcgaggaacagcggcagaagtacctgccccagctggccaagggg

SEQ ID NO: 23449 - DNA, 201 bp, Homo sapiens
tgtccagtcctccctcgtcatgcaccctatctatgcctatggcagcgaggaacagcggcagaagtacctgccccagctggccaagggggagctcctgggcygcttcgggctcacagagcccaacagcggaagtgaccccagcagcatggagaccagagcccactacaactcatccaacaagagctacaccctcaatgggac

SEQ ID NO: 23450 - DNA, 201 bp, Homo sapiens
ggagatcatttcggagatgggggagttgggtgtgctgggccccaccatcaaaggatatggctgtgctggggtttcgtctgtggcctatgggctcctggccbgagagctggagcgggtggacagtggctacaggtcggcgatgagtgtccagtcctccctcgtcatgcaccctatctatgcctatggcagcgaggaacagcg

SEQ ID NO: 23451 - DNA, 201 bp, Homo sapiens
ctgggccccaccatcaaaggatatggctgtgctggggtttcgtctgtggcctatgggctcctggcccgagagctggagcgggtggacagtggctacaggtyggcgatgagtgtccagtcctccctcgtcatgcaccctatctatgcctatggcagcgaggaacagcggcagaagtacctgccccagctggccaagggggag

SEQ ID NO: 23452 - DNA, 201 bp, Homo sapiens
agcggaagtgaccccagcagcatggagaccagagcccactacaactcatccaacaagagctacaccctcaatgggaccaagacctggatcacgaactcgcytatggccgatctgtttgtagtgtgggctcggtgtgaagatggctgcattcggggcttcctgctggagaaggggatgcggggtctctcggcccccaggatc

SEQ ID NO: 23453 - DNA, 201 bp, Homo sapiens
cgcctgcctgcagctcggccgcttgaaggaccaggacaaggctgcccccgagatggtttctctgctgaagaggaataactgtgggaaagccctggacatcrcccgccaggcccgagacatgctgggggggaatgggatttctgacgagtatcacgtgatccggcacgccatgaacctggaggccgtgaacacctacgaagg

SEQ ID NO: 23454 - DNA, 201 bp, Homo sapiens
ctgtgctggggtttcgtctgtggcctatgggctcctggcccgagagctggagcgggtggacagtggctacaggtcggcgatgagtgtccagtcctccctcrtcatgcaccctatctatgcctatggcagcgaggaacagcggcagaagtacctgccccagctggccaagggggagctcctgggctgcttcgggctcacaga

SEQ ID NO: 23455 - DNA, 201 bp, Homo sapiens
aagtgaccccagcagcatggagaccagagcccactacaactcatccaacaagagctacaccctcaatgggaccaagacctggatcacgaactcgcctatgrccgatctgtttgtagtgtgggctcggtgtgaagatggctgcattcggggcttcctgctggagaaggggatgcggggtctctcggcccccaggatccaggg

SEQ ID NO: 23456 - DNA, 201 bp, Homo sapiens
ctgcctgcagctcggccgcttgaaggaccaggacaaggctgcccccgagatggtttctctgctgaagaggaataactgtgggaaagccctggacatcgccygccaggcccgagacatgctgggggggaatgggatttctgacgagtatcacgtgatccggcacgccatgaacctggaggccgtgaacacctacgaaggtac

SEQ ID NO: 23457 - DNA, 201 bp, Homo sapiens
tctctcggcccccaggatccagggcaagttctcgctgcgggcctcagccacaggcatgatcatcatggacggtgtggaggtgccagaggagaatgtgctcyctggtgcatccagcctggggggtcccttcggctgcctgaacaacgcccggtacggcatcgcgtggggcgtgcttggagcttcggagttctgcttgcacac

SEQ ID NO: 23458 - DNA, 201 bp, Homo sapiens
tgcctgcagctcggccgcttgaaggaccaggacaaggctgcccccgagatggtttctctgctgaagaggaataactgtgggaaagccctggacatcgcccrccaggcccgagacatgctgggggggaatgggatttctgacgagtatcacgtgatccggcacgccatgaacctggaggccgtgaacacctacgaaggtaca

SEQ ID NO: 23459 - DNA, 201 bp, Homo sapiens
atccagggcaagttctcgctgcgggcctcagccacaggcatgatcatcatggacggtgtggaggtgccagaggagaatgtgctccctggtgcatccagccyggggggtcccttcggctgcctgaacaacgcccggtacggcatcgcgtggggcgtgcttggagcttcggagttctgcttgcacacagcccggcagtacgcc

SEQ ID NO: 23460 - DNA, 201 bp, Homo sapiens
cagctcggccgcttgaaggaccaggacaaggctgcccccgagatggtttctctgctgaagaggaataactgtgggaaagccctggacatcgcccgccaggyccgagacatgctgggggggaatgggatttctgacgagtatcacgtgatccggcacgccatgaacctggaggccgtgaacacctacgaaggtacacatgac

SEQ ID NO: 23461 - DNA, 201 bp, Homo sapiens
gcatccagcctggggggtcccttcggctgcctgaacaacgcccggtacggcatcgcgtggggcgtgcttggagcttcggagttctgcttgcacacagcccrgcagtacgccctcgacaggatgcagtttggtgtcccactggccaggaaccagctgattcagaagaagctggcagacatgctcactgagattaccctgggc

SEQ ID NO: 23462 - DNA, 201 bp, Homo sapiens
tgcatccagcctggggggtcccttcggctgcctgaacaacgcccggtacggcatcgcgtggggcgtgcttggagcttcggagttctgcttgcacacagccyggcagtacgccctcgacaggatgcagtttggtgtcccactggccaggaaccagctgattcagaagaagctggcagacatgctcactgagattaccctggg

SEQ ID NO: 23463 - DNA, 201 bp, Homo sapiens
gctcggccgcttgaaggaccaggacaaggctgcccccgagatggtttctctgctgaagaggaataactgtgggaaagccctggacatcgcccgccaggccbgagacatgctgggggggaatgggatttctgacgagtatcacgtgatccggcacgccatgaacctggaggccgtgaacacctacgaaggtacacatgacat

SEQ ID NO: 23464 - DNA, 201 bp, Homo sapiens
ctcggccgcttgaaggaccaggacaaggctgcccccgagatggtttctctgctgaagaggaataactgtgggaaagccctggacatcgcccgccaggcccragacatgctgggggggaatgggatttctgacgagtatcacgtgatccggcacgccatgaacctggaggccgtgaacacctacgaaggtacacatgacatt

SEQ ID NO: 23465 - DNA, 201 bp, Homo sapiens
gaaggaccaggacaaggctgcccccgagatggtttctctgctgaagaggaataactgtgggaaagccctggacatcgcccgccaggcccgagacatgctgsgggggaatgggatttctgacgagtatcacgtgatccggcacgccatgaacctggaggccgtgaacacctacgaaggtacacatgacattcacgccctgat

SEQ ID NO: 23466 - DNA, 201 bp, Homo sapiens
atctatgcctatggcagcgaggaacagcggcagaagtacctgccccagctggccaagggggagctcctgggctgcttcgggctcacagagcccaacagcgsaagtgaccccagcagcatggagaccagagcccactacaactcatccaacaagagctacaccctcaatgggaccaagacctggatcacgaactcgcctatg

SEQ ID NO: 23467 - DNA, 201 bp, Homo sapiens
aaggaccaggacaaggctgcccccgagatggtttctctgctgaagaggaataactgtgggaaagccctggacatcgcccgccaggcccgagacatgctggbggggaatgggatttctgacgagtatcacgtgatccggcacgccatgaacctggaggccgtgaacacctacgaaggtacacatgacattcacgccctgatc

SEQ ID NO: 23468 - DNA, 201 bp, Homo sapiens
ccaggacaaggctgcccccgagatggtttctctgctgaagaggaataactgtgggaaagccctggacatcgcccgccaggcccgagacatgctgggggggratgggatttctgacgagtatcacgtgatccggcacgccatgaacctggaggccgtgaacacctacgaaggtacacatgacattcacgccctgatccttgg

SEQ ID NO: 23469 - DNA, 201 bp, Homo sapiens
tttgtagtgtgggctcggtgtgaagatggctgcattcggggcttcctgctggagaaggggatgcggggtctctcggcccccaggatccagggcaagttctygctgcgggcctcagccacaggcatgatcatcatggacggtgtggaggtgccagaggagaatgtgctccctggtgcatccagcctggggggtcccttcggc

SEQ ID NO: 23470 - DNA, 201 bp, Homo sapiens
ggtgccagaggagaatgtgctccctggtgcatccagcctggggggtcccttcggctgcctgaacaacgcccggtacggcatcgcgtggggcgtgcttggarcttcggagttctgcttgcacacagcccggcagtacgccctcgacaggatgcagtttggtgtcccactggccaggaaccagctgattcagaagaagctggc

SEQ ID NO: 23471 - DNA, 201 bp, Homo sapiens
gtgatccggcacgccatgaacctggaggccgtgaacacctacgaaggtacacatgacattcacgccctgatccttgggagagctatcacgggaatccagghgttcacggccagcaagtgagccgctccatcaggggcccgaaactctcaagcccctttctggagagatgcctggctggaccgtaggagcgctgtgctctga

SEQ ID NO: 23472 - DNA, 201 bp, Homo sapiens
gacgagtatcacgtgatccggcacgccatgaacctggaggccgtgaacacctacgaaggtacacatgacattcacgccctgatccttgggagagctatcaygggaatccaggcgttcacggccagcaagtgagccgctccatcaggggcccgaaactctcaagcccctttctggagagatgcctggctggaccgtaggagc

SEQ ID NO: 23473 - DNA, 201 bp, Homo sapiens
accaggacaaggctgcccccgagatggtttctctgctgaagaggaataactgtgggaaagccctggacatcgcccgccaggcccgagacatgctggggggkaatgggatttctgacgagtatcacgtgatccggcacgccatgaacctggaggccgtgaacacctacgaaggtacacatgacattcacgccctgatccttg

SEQ ID NO: 23474 - DNA, 201 bp, Homo sapiens
tggaattctctgtagagcgtctcaatccacttttaaccatggatgagagcagactccatttaccctgaaatagcagcttctcttgagaggagagtgacatkgaagcaactccgtctgctgcagctgaccccctcacactgagttcacagtgcgccctccctccctcccatctgggggtagtgccttatgctgggtgttgga

SEQ ID NO: 23475 - DNA, 201 bp, Homo sapiens; identical to SEQ ID NO: 23408

SEQ ID NO: 23476 - DNA, 201 bp, Homo sapiens; identical to SEQ ID NO: 23409

SEQ ID NO: 23477 - DNA, 201 bp, Homo sapiens; identical to SEQ ID NO: 23410

SEQ ID NO: 23478 - DNA, 201 bp, Homo sapiens; identical to SEQ ID NO: 23411

SEQ ID NO: 23479 - DNA, 201 bp, Homo sapiens; identical to SEQ ID NO: 23412

SEQ ID NO: 23480 - DNA, 201 bp, Homo sapiens; identical to SEQ ID NO: 23413

SEQ ID NO: 23481 - DNA, 201 bp, Homo sapiens; identical to SEQ ID NO: 23414

SEQ ID NO: 23482 - DNA, 201 bp, Homo sapiens; identical to SEQ ID NO: 23415

SEQ ID NO: 23483 - DNA, 201 bp, Homo sapiens; identical to SEQ ID NO: 23416

SEQ ID NO: 23484 - DNA, 201 bp, Homo sapiens; identical to SEQ ID NO: 23417

SEQ ID NO: 23485 - DNA, 201 bp, Homo sapiens; identical to SEQ ID NO: 23418

SEQ ID NO: 23486 - DNA, 201 bp, Homo sapiens; identical to SEQ ID NO: 23419

SEQ ID NO: 23487 - DNA, 201 bp, Homo sapiens; identical to SEQ ID NO: 23420

SEQ ID NO: 23488 - DNA, 201 bp, Homo sapiens; identical to SEQ ID NO: 23421

SEQ ID NO: 23489 - DNA, 201 bp, Homo sapiens; identical to SEQ ID NO: 23422

SEQ ID NO: 23490 - DNA, 201 bp, Homo sapiens; identical to SEQ ID NO: 23423

SEQ ID NO: 23491 - DNA, 201 bp, Homo sapiens; identical to SEQ ID NO: 23424

SEQ ID NO: 23492 - DNA, 201 bp, Homo sapiens; identical to SEQ ID NO: 23425

SEQ ID NO: 23493 - DNA, 201 bp, Homo sapiens; identical to SEQ ID NO: 23426

SEQ ID NO: 23494 - DNA, 201 bp, Homo sapiens; identical to SEQ ID NO: 23427

SEQ ID NO: 23495 - DNA, 201 bp, Homo sapiens; identical to SEQ ID NO: 23428

SEQ ID NO: 23496 - DNA, 201 bp, Homo sapiens; identical to SEQ ID NO: 23429

SEQ ID NO: 23497 - DNA, 201 bp, Homo sapiens; identical to SEQ ID NO: 23430

SEQ ID NO: 23498 - DNA, 201 bp, Homo sapiens; identical to SEQ ID NO: 23431

SEQ ID NO: 23499 - DNA, 201 bp, Homo sapiens; identical to SEQ ID NO: 23432

SEQ ID NO: 23500 - DNA, 201 bp, Homo sapiens; identical to SEQ ID NO: 23433

SEQ ID NO: 23501 - DNA, 201 bp, Homo sapiens; identical to SEQ ID NO: 23434

SEQ ID NO: 23502 - DNA, 201 bp, Homo sapiens; identical to SEQ ID NO: 23435

SEQ ID NO: 23503 - DNA, 201 bp, Homo sapiens; identical to SEQ ID NO: 23436

SEQ ID NO: 23504 - DNA, 201 bp, Homo sapiens; identical to SEQ ID NO: 23437

SEQ ID NO: 23505 - DNA, 201 bp, Homo sapiens; identical to SEQ ID NO: 23438

SEQ ID NO: 23506 - DNA, 201 bp, Homo sapiens; identical to SEQ ID NO: 23439

SEQ ID NO: 23507 - DNA, 201 bp, Homo sapiens; identical to SEQ ID NO: 23440

SEQ ID NO: 23508 - DNA, 201 bp, Homo sapiens
ccgctctgacacccccgctcctgtaggtcgccgtcgttgctccgctcgctctgagagagcatggccctgagaggcgtctccgtgcggctgctgagccgcgracccggcctgcacgtccttcgcacgtgggtctcgtcggcggcgcagaccgagaaaggcgggagaacacagagccaactggctaagtcctcgcgtcccgag

SEQ ID NO: 23509 - DNA, 201 bp, Homo sapiens; identical to SEQ ID NO: 23442

SEQ ID NO: 23510 - DNA, 201 bp, Homo sapiens; identical to SEQ ID NO: 23443

SEQ ID NO: 23511 - DNA, 201 bp, Homo sapiens; identical to SEQ ID NO: 23444

SEQ ID NO: 23512 - DNA, 201 bp, Homo sapiens; identical to SEQ ID NO: 23445

SEQ ID NO: 23513 - DNA, 201 bp, Homo sapiens; identical to SEQ ID NO: 23446

SEQ ID NO: 23514 - DNA, 201 bp, Homo sapiens; identical to SEQ ID NO: 23447

SEQ ID NO: 23515 - DNA, 201 bp, Homo sapiens; identical to SEQ ID NO: 23448

SEQ ID NO: 23516 - DNA, 201 bp, Homo sapiens; identical to SEQ ID NO: 23449

SEQ ID NO: 23517 - DNA, 201 bp, Homo sapiens; identical to SEQ ID NO: 23450

SEQ ID NO: 23518 - DNA, 201 bp, Homo sapiens; identical to SEQ ID NO: 23451

SEQ ID NO: 23519 - DNA, 201 bp, Homo sapiens; identical to SEQ ID NO: 23452

SEQ ID NO: 23520 - DNA, 201 bp, Homo sapiens; identical to SEQ ID NO: 23453

SEQ ID NO: 23521 - DNA, 201 bp, Homo sapiens; identical to SEQ ID NO: 23454

SEQ ID NO: 23522 - DNA, 201 bp, Homo sapiens; identical to SEQ ID NO: 23455

SEQ ID NO: 23523 - DNA, 201 bp, Homo sapiens; identical to SEQ ID NO: 23456

SEQ ID NO: 23524 - DNA, 201 bp, Homo sapiens; identical to SEQ ID NO: 23457

SEQ ID NO: 23525 - DNA, 201 bp, Homo sapiens; identical to SEQ ID NO: 23458

SEQ ID NO: 23526 - DNA, 201 bp, Homo sapiens; identical to SEQ ID NO: 23459

SEQ ID NO: 23527 - DNA, 201 bp, Homo sapiens; identical to SEQ ID NO: 23460

SEQ ID NO: 23528 - DNA, 201 bp, Homo sapiens; identical to SEQ ID NO: 23461

SEQ ID NO: 23529 - DNA, 201 bp, Homo sapiens; identical to SEQ ID NO: 23462

SEQ ID NO: 23530 - DNA, 201 bp, Homo sapiens; identical to SEQ ID NO: 23463

SEQ ID NO: 23531 - DNA, 201 bp, Homo sapiens; identical to SEQ ID NO: 23464

SEQ ID NO: 23532 - DNA, 201 bp, Homo sapiens; identical to SEQ ID NO: 23465

SEQ ID NO: 23533 - DNA, 139 bp, Homo sapiens
gtgaaccgggaggtactaccaggtaaggaaggtgcggtrgccccagccgtgggtgagaggagctccgctctgacacccccgctcctgtaggtcgccgtcgttgctccgctcgctctgagagagcatggccctgagaggc

SEQ ID NO: 23534 - DNA, 201 bp, Homo sapiens; identical to SEQ ID NO: 23466

SEQ ID NO: 23535 - DNA, 201 bp, Homo sapiens; identical to SEQ ID NO: 23467

SEQ ID NO: 23536 - DNA, 201 bp, Homo sapiens; identical to SEQ ID NO: 23468

SEQ ID NO: 23537 - DNA, 201 bp, Homo sapiens; identical to SEQ ID NO: 23469

SEQ ID NO: 23538 - DNA, 201 bp, Homo sapiens; identical to SEQ ID NO: 23470

SEQ ID NO: 23539 - DNA, 201 bp, Homo sapiens; identical to SEQ ID NO: 23471

SEQ ID NO: 23540 - DNA, 201 bp, Homo sapiens; identical to SEQ ID NO: 23472

SEQ ID NO: 23541 - DNA, 201 bp, Homo sapiens; identical to SEQ ID NO: 23473

SEQ ID NO: 23542 - DNA, 201 bp, Homo sapiens; identical to SEQ ID NO: 23474

SEQ ID NO: 23543 - DNA, 180 bp, Homo sapiens
ctgctgaagaggaataactgtgggaaagccctggacatcgcccgccaggcccgagacatgctgggggggaatgggatttctgacgagtatcacgtgatccrgcacgccatgaacctggaggccgtgaacacctacgaagtcgttcggatgtgttccttaaaaagaagatggaattctctg

SEQ ID NO: 23544 - DNA, 201 bp, Homo sapiens; identical to SEQ ID NO: 23409

SEQ ID NO: 23545 - DNA, 201 bp, Homo sapiens; identical to SEQ ID NO: 23410

SEQ ID NO: 23546 - DNA, 181 bp, Homo sapiens
tctgctgaagaggaataactgtgggaaagccctggacatcgcccgccaggcccgagacatgctgggggggaatgggatttctgacgagtatcacgtgatcyggcacgccatgaacctggaggccgtgaacacctacgaagtcgttcggatgtgttccttaaaaagaagatggaattctctg

SEQ ID NO: 23547 - DNA, 201 bp, Homo sapiens; identical to SEQ ID NO: 23412

SEQ ID NO: 23548 - DNA, 201 bp, Homo sapiens; identical to SEQ ID NO: 23413

SEQ ID NO: 23549 - DNA, 187 bp, Homo sapiens
ggtttctctgctgaagaggaataactgtgggaaagccctggacatcgcccgccaggcccgagacatgctgggggggaatgggatttctgacgagtatcacrtgatccggcacgccatgaacctggaggccgtgaacacctacgaagtcgttcggatgtgttccttaaaaagaagatggaattctctg

SEQ ID NO: 23550 - DNA, 201 bp, Homo sapiens; identical to SEQ ID NO: 23415

SEQ ID NO: 23551 - DNA, 201 bp, Homo sapiens; identical to SEQ ID NO: 23434

SEQ ID NO: 23552 - DNA, 201 bp, Homo sapiens; identical to SEQ ID NO: 23416

SEQ ID NO: 23553 - DNA, 201 bp, Homo sapiens; identical to SEQ ID NO: 23417

SEQ ID NO: 23554 - DNA, 201 bp, Homo sapiens; identical to SEQ ID NO: 23435

SEQ ID NO: 23555 - DNA, 146 bp, Homo sapiens
acatcgcccgccaggcccgagacatgctgggggggaatgggatttctgacgagtatcacgtgatccggcacgccatgaacctggaggccgtgaacacctamgaagtcgttcggatgtgttccttaaaaagaagatggaattctctg

SEQ ID NO: 23556 - DNA, 201 bp, Homo sapiens; identical to SEQ ID NO: 23419

SEQ ID NO: 23557 - DNA, 201 bp, Homo sapiens; identical to SEQ ID NO: 23436

SEQ ID NO: 23558 - DNA, 145 bp, Homo sapiens
catcgcccgccaggcccgagacatgctgggggggaatgggatttctgacgagtatcacgtgatccggcacgccatgaacctggaggccgtgaacacctacraagtcgttcggatgtgttccttaaaaagaagatggaattctctg

SEQ ID NO: 23559 - DNA, 201 bp, Homo sapiens; identical to SEQ ID NO: 23421

SEQ ID NO: 23560 - DNA, 201 bp, Homo sapiens; identical to SEQ ID NO: 23437

SEQ ID NO: 23561 - DNA, 201 bp, Homo sapiens; identical to SEQ ID NO: 23438

SEQ ID NO: 23562 - DNA, 201 bp, Homo sapiens; identical to SEQ ID NO: 23439

SEQ ID NO: 23563 - DNA, 201 bp, Homo sapiens; identical to SEQ ID NO: 23425

SEQ ID NO: 23564 - DNA, 201 bp, Homo sapiens; identical to SEQ ID NO: 23440

SEQ ID NO: 23565 - DNA, 201 bp, Homo sapiens; identical to SEQ ID NO: 23508

SEQ ID NO: 23566 - DNA, 201 bp, Homo sapiens; identical to SEQ ID NO: 23442

SEQ ID NO: 23567 - DNA, 201 bp, Homo sapiens; identical to SEQ ID NO: 23443

SEQ ID NO: 23568 - DNA, 201 bp, Homo sapiens; identical to SEQ ID NO: 23445

SEQ ID NO: 23569 - DNA, 201 bp, Homo sapiens; identical to SEQ ID NO: 23444

SEQ ID NO: 23570 - DNA, 201 bp, Homo sapiens; identical to SEQ ID NO: 23426

SEQ ID NO: 23571 - DNA, 201 bp, Homo sapiens; identical to SEQ ID NO: 23447

SEQ ID NO: 23572 - DNA, 201 bp, Homo sapiens; identical to SEQ ID NO: 23446

SEQ ID NO: 23573 - DNA, 201 bp, Homo sapiens; identical to SEQ ID NO: 23427

SEQ ID NO: 23574 - DNA, 201 bp, Homo sapiens; identical to SEQ ID NO: 23450

SEQ ID NO: 23575 - DNA, 201 bp, Homo sapiens; identical to SEQ ID NO: 23449

SEQ ID NO: 23576 - DNA, 201 bp, Homo sapiens; identical to SEQ ID NO: 23448

SEQ ID NO: 23577 - DNA, 201 bp, Homo sapiens; identical to SEQ ID NO: 23428

SEQ ID NO: 23578 - DNA, 201 bp, Homo sapiens; identical to SEQ ID NO: 23452

SEQ ID NO: 23579 - DNA, 201 bp, Homo sapiens; identical to SEQ ID NO: 23451

SEQ ID NO: 23580 - DNA, 201 bp, Homo sapiens; identical to SEQ ID NO: 23429

SEQ ID NO: 23581 - DNA, 201 bp, Homo sapiens; identical to SEQ ID NO: 23455

SEQ ID NO: 23582 - DNA, 201 bp, Homo sapiens; identical to SEQ ID NO: 23454

SEQ ID NO: 23583 - DNA, 201 bp, Homo sapiens
cgcctgcctgcagctcggccgcttgaaggaccaggacaaggctgcccccgagatggtttctctgctgaagaggaataactgtgggaaagccctggacatcrcccgccaggcccgagacatgctgggggggaatgggatttctgacgagtatcacgtgatccggcacgccatgaacctggaggccgtgaacacctacgaagt

SEQ ID NO: 23584 - DNA, 201 bp, Homo sapiens; identical to SEQ ID NO: 23457

SEQ ID NO: 23585 - DNA, 201 bp, Homo sapiens
ctgcctgcagctcggccgcttgaaggaccaggacaaggctgcccccgagatggtttctctgctgaagaggaataactgtgggaaagccctggacatcgccygccaggcccgagacatgctgggggggaatgggatttctgacgagtatcacgtgatccggcacgccatgaacctggaggccgtgaacacctacgaagtcgt

SEQ ID NO: 23586 - DNA, 201 bp, Homo sapiens; identical to SEQ ID NO: 23459

SEQ ID NO: 23587 - DNA, 201 bp, Homo sapiens
tgcctgcagctcggccgcttgaaggaccaggacaaggctgcccccgagatggtttctctgctgaagaggaataactgtgggaaagccctggacatcgcccrccaggcccgagacatgctgggggggaatgggatttctgacgagtatcacgtgatccggcacgccatgaacctggaggccgtgaacacctacgaagtcgtt

SEQ ID NO: 23588 - DNA, 201 bp, Homo sapiens; identical to SEQ ID NO: 23461

SEQ ID NO: 23589 - DNA, 201 bp, Homo sapiens
cagctcggccgcttgaaggaccaggacaaggctgcccccgagatggtttctctgctgaagaggaataactgtgggaaagccctggacatcgcccgccaggyccgagacatgctgggggggaatgggatttctgacgagtatcacgtgatccggcacgccatgaacctggaggccgtgaacacctacgaagtcgttcggatg

SEQ ID NO: 23590 - DNA, 201 bp, Homo sapiens; identical to SEQ ID NO: 23462

SEQ ID NO: 23591 - DNA, 201 bp, Homo sapiens
gctcggccgcttgaaggaccaggacaaggctgcccccgagatggtttctctgctgaagaggaataactgtgggaaagccctggacatcgcccgccaggccbgagacatgctgggggggaatgggatttctgacgagtatcacgtgatccggcacgccatgaacctggaggccgtgaacacctacgaagtcgttcggatgtg

SEQ ID NO: 23592 - DNA, 201 bp, Homo sapiens
ctcggccgcttgaaggaccaggacaaggctgcccccgagatggtttctctgctgaagaggaataactgtgggaaagccctggacatcgcccgccaggcccragacatgctgggggggaatgggatttctgacgagtatcacgtgatccggcacgccatgaacctggaggccgtgaacacctacgaagtcgttcggatgtgt

SEQ ID NO: 23593 - DNA, 201 bp, Homo sapiens
gaaggaccaggacaaggctgcccccgagatggtttctctgctgaagaggaataactgtgggaaagccctggacatcgcccgccaggcccgagacatgctgsgggggaatgggatttctgacgagtatcacgtgatccggcacgccatgaacctggaggccgtgaacacctacgaagtcgttcggatgtgttccttaaaaag

SEQ ID NO: 23594 - DNA, 139 bp, Homo sapiens; identical to SEQ ID NO: 23533

SEQ ID NO: 23595 - DNA, 201 bp, Homo sapiens; identical to SEQ ID NO: 23466

SEQ ID NO: 23596 - DNA, 201 bp, Homo sapiens
aaggaccaggacaaggctgcccccgagatggtttctctgctgaagaggaataactgtgggaaagccctggacatcgcccgccaggcccgagacatgctggbggggaatgggatttctgacgagtatcacgtgatccggcacgccatgaacctggaggccgtgaacacctacgaagtcgttcggatgtgttccttaaaaaga

SEQ ID NO: 23597 - DNA, 201 bp, Homo sapiens
ccaggacaaggctgcccccgagatggtttctctgctgaagaggaataactgtgggaaagccctggacatcgcccgccaggcccgagacatgctgggggggratgggatttctgacgagtatcacgtgatccggcacgccatgaacctggaggccgtgaacacctacgaagtcgttcggatgtgttccttaaaaagaagatg

SEQ ID NO: 23598 - DNA, 201 bp, Homo sapiens; identical to SEQ ID NO: 23469

SEQ ID NO: 23599 - DNA, 201 bp, Homo sapiens; identical to SEQ ID NO: 23470

SEQ ID NO: 23600 - DNA, 135 bp, Homo sapiens
caggcccgagacatgctgggggggaatgggatttctgacgagtatcacgtgatccggcacgccatgaacctggaggccgtgaacacctacgaagtcgttcrgatgtgttccttaaaaagaagatggaattctctg

SEQ ID NO: 23601 - DNA, 201 bp, Homo sapiens; identical to SEQ ID NO: 23431

SEQ ID NO: 23602 - DNA, 201 bp, Homo sapiens
accaggacaaggctgcccccgagatggtttctctgctgaagaggaataactgtgggaaagccctggacatcgcccgccaggcccgagacatgctggggggkaatgggatttctgacgagtatcacgtgatccggcacgccatgaacctggaggccgtgaacacctacgaagtcgttcggatgtgttccttaaaaagaagat

SEQ ID NO: 23603 - DNA, 201 bp, Homo sapiens; identical to SEQ ID NO: 23432

SEQ ID NO: 23604 - DNA, 201 bp, Homo sapiens; identical to SEQ ID NO: 23433

SEQ ID NO: 23605 - DNA, 201 bp, Homo sapiens
caggggtacaagtataactggaagctggacgaggcccggaaaaacctactgcgaacccacaccacatcagccagcgcccgtgcgctctaccgccttgcccrgaagaagcccttcactccggtcaagtacttctccatcgaccgcgtattccggaatgagaccctggacgccacgcacctggctgagttccaccagatcgag

SEQ ID NO: 23606 - DNA, 145 bp, Homo sapiens
cactccggttccggttccggtggctcagctccccccgcccaccckggcccggacacgctgagcacactggaaggagtcatggcggatggtcaggtggcggaactgctgctccggcggctggaggcgtctgatggcggcctggaca

SEQ ID NO: 23607 - DNA, 201 bp, Homo sapiens
tgtgccgcctggatgccgagccgaggccccctcccacacaggaggctgcgtgacatgggccactctaggacaggtcatcctccccgagtccctgctgctgygctcctttgcatccctggccagtgaccttgtatttatgaggcctctgtgaggccagcccccaccttcctctttcccacctgtcccaggaccagaatccca

SEQ ID NO: 23608 - DNA, 201 bp, Homo sapiens
gcatggaggtgttcagctaccaccaaggcctgaagaagtgggtggaggtcggaaactcgggggtcttccgtccagagatgctgctgcccatggggcttccygagaacgtgtcggtcattgcctggggcctctccctggagcgcccaacgatgatcaaatatggcatcaacaatatccgggagctggtgggccacaaggtga

SEQ ID NO: 23609 - DNA, 201 bp, Homo sapiens
ggcccagagcgagcttatgcgactgcccagtggcaaagtgggcttcagcaaggccatgtccaacaagtggattcgggtggacagcatggaggatgaggtgmagcggcggctccagctggtccgggggggacaggctgagaagctgggggagaaggagaggagcgagctgaggaagaggaagctgttggctgaagtgactct

SEQ ID NO: 23610 - DNA, 201 bp, Homo sapiens
tggacagcatggaggatgaggtgcagcggcggctccagctggtccgggggggacaggctgagaagctgggggagaaggagaggagcgagctgaggaagagraagctgttggctgaagtgactctgaagacctactgggtgagcaaaggcagtgcctttagtaccagcatctccaagcaagagacagagctgagcccagaga

SEQ ID NO: 23611 - DNA, 201 bp, Homo sapiens
tccaccaagcactgggagcttactgcggagggcgaggagattgcccgggagggcagccatgaggcccgtgtgtttcgaagcattcccccagagggcctggyccagagcgagcttatgcgactgcccagtggcaaagtgggcttcagcaaggccatgtccaacaagtggattcgggtggacagcatggaggatgaggtgcag

SEQ ID NO: 23612 - DNA, 201 bp, Homo sapiens; identical to SEQ ID NO: 23605

SEQ ID NO: 23613 - DNA, 145 bp, Homo sapiens; identical to SEQ ID NO: 23606

SEQ ID NO: 23614 - DNA, 201 bp, Homo sapiens; identical to SEQ ID NO: 23607

SEQ ID NO: 23615 - DNA, 201 bp, Homo sapiens; identical to SEQ ID NO: 23608

SEQ ID NO: 23616 - DNA, 201 bp, Homo sapiens
cttcagcaaggccatgtccaacaagtggattcgggtggacaagagtgcggctgacgggccccgggtgttccgagtggtggacagcatggaggatgaggtgmagcggcggctccagctggtccgggggggacaggctgagaagctgggggagaaggagaggagcgagctgaggaagaggaagctgttggctgaagtgactct

SEQ ID NO: 23617 - DNA, 201 bp, Homo sapiens; identical to SEQ ID NO: 23610

SEQ ID NO: 23618 - DNA, 201 bp, Homo sapiens
tccaccaagcactgggagcttactgcggagggcgaggagattgcccgggagggcagccatgaggcccgtgtgtttcgaagcattcccccagagggcctggyccagagcgagcttatgcgactgcccagtggcaaagtgggcttcagcaaggccatgtccaacaagtggattcgggtggacaagagtgcggctgacgggccc

SEQ ID NO: 23619 - DNA, 128 bp, Homo sapiens
atggccaggaagcccagcagagcttataagatctaacccttatggccagtgcagtggctcacatctgtaaccccagcactttgggaggctgagatgggcakatcacttgaggtcaggagttcgagacc

SEQ ID NO: 23620 - DNA, 201 bp, Homo sapiens
gccctggacctgcgtgggtgacatgaatcggaaccagggagaggagcaacggggtgggggcacactgtgtgcccagctgccagccctctggaaagccttcyagccgctggtgaagaactaccagccctgtaatggcatggccaggaagcccagcagagcttataagatctaacccttatggccagtgcagtggctcacatc

SEQ ID NO: 23621 - DNA, 156 bp, Homo sapiens
tgatgtccccgccccggttcccaggcaagtttagggaagtgaaaggcgccaggtgmcagtcctggcctctgatgtaacccagcgccccgcagtcccgacacagattcctggatctcagccccatagcagctatgatcccgctgctgctggcagcgc

SEQ ID NO: 23622 - DNA, 201 bp, Homo sapiens
ttccctggaccagccggcccaagcttcaacagcacagaggaccactccaaatggtgcgtgtccccaaaagggccctggacctgcgtgggtgacatgaatckgaaccagggagaggagcaacggggtgggggcacactgtgtgcccagctgccagccctctggaaagccttccagccgctggtgaagaactaccagccctgt

SEQ ID NO: 23623 - DNA, 201 bp, Homo sapiens
ctggcagcgctgctgtgcgtccccgccggggccctgacctgctacggggactccgggcagcctgtagactggttcgtggtctacaagctgccagctcttakagggtccggggaggcggcgcagagagggctgcagtacaagtatctggacgagagctccggaggctggcgggacggcagggcactcatcaacagcccggag

SEQ ID NO: 23624 - DNA, 201 bp, Homo sapiens
ggcacacgaagggtgtcctgctccttgaccacgatgggggcttctggctggtccacagtgtacctaacttccctccaccggcctcctctgctgcatacagytggcctcatagcgcctgtacctacgggcagaccctgctctgcaagcagctgacctacacctacccctgggtctataactaccagctggaagggatctttg

SEQ ID NO: 23625 - DNA, 201 bp, Homo sapiens
ctgctcggatatctggcaggttctgaatgtgaaccagatagctttccctggaccagccggcccaagcttcaacagcacagaggaccactccaaatggtgcrtgtccccaaaagggccctggacctgcgtgggtgacatgaatcggaaccagggagaggagcaacggggtgggggcacactgtgtgcccagctgccagccct

SEQ ID NO: 23626 - DNA, 156 bp, Homo sapiens; identical to SEQ ID NO: 23621

SEQ ID NO: 23627 - DNA, 201 bp, Homo sapiens
gaagccagaggatcgattgaaccagggagatcatggtcacagtgaactatgattacgccaacctgggtcacatagcaagactctgtttcaaaaaaaaaggkggggcgggggacgggtgggtgcagtggctcacatctgtaaccccagcactttgggaggctgagatgggcagatcacttgaggtcaggagttcgagaccag

SEQ ID NO: 23628 - DNA, 201 bp, Homo sapiens; identical to SEQ ID NO: 23623

SEQ ID NO: 23629 - DNA, 201 bp, Homo sapiens
atagcaagactctgtttcaaaaaaaaagggggggcgggggacgggtgggtgcagtggctcacatctgtaaccccagcactttgggaggctgagatgggcakatcacttgaggtcaggagttcgagaccagcctggccaacatggtgaaaccccatatccattaaaaatatttaaaaattagccagacatggtggcacgcgt

SEQ ID NO: 23630 - DNA, 201 bp, Homo sapiens
gtggctcacgtatgtaatcccagcactttgggaagccaaggagggaggatcacttgaactcaggaattcgagaccagcctgggctacatagtgagaccacrtctctactagaacttaaaaaaagttagccaggcacggtgataaatgcctgtagtcccagccactgaagccagaggatcgattgaaccagggagatcatgg

SEQ ID NO: 23631 - DNA, 201 bp, Homo sapiens
gccctggacctgcgtgggtgacatgaatcggaaccagggagaggagcaacggggtgggggcacactgtgtgcccagctgccagccctctggaaagccttcyagccgctggtgaagaactaccagccctgtaatggcatggccaggaagcccagcagagcttataagatctaacccttatggccaggtgcagtggctcacgt

SEQ ID NO: 23632 - DNA, 201 bp, Homo sapiens; identical to SEQ ID NO: 23622

SEQ ID NO: 23633 - DNA, 201 bp, Homo sapiens; identical to SEQ ID NO: 23625

SEQ ID NO: 23634 - DNA, 201 bp, Homo sapiens
ggcacacgaagggtgtcctgctccttgaccacgatgggggcttctggctggtccacagtgtacctaacttccctccaccggcctcctctgctgcatacagytggcctcatagcgcctgtacctacgggcagaccctgctctgtgtgtcttttcccttcgctcagttctcgaagatgggcaagcagctgacctacacctacc

SEQ ID NO: 23635 - DNA, 128 bp, Homo sapiens; identical to SEQ ID NO: 23619

SEQ ID NO: 23636 - DNA, 201 bp, Homo sapiens; identical to SEQ ID NO: 23620

SEQ ID NO: 23637 - DNA, 156 bp, Homo sapiens; identical to SEQ ID NO: 23621

SEQ ID NO: 23638 - DNA, 201 bp, Homo sapiens; identical to SEQ ID NO: 23622

SEQ ID NO: 23639 - DNA, 201 bp, Homo sapiens; identical to SEQ ID NO: 23623

SEQ ID NO: 23640 - DNA, 201 bp, Homo sapiens; identical to SEQ ID NO: 23634

SEQ ID NO: 23641 - DNA, 201 bp, Homo sapiens; identical to SEQ ID NO: 23625

SEQ ID NO: 23642 - DNA, 201 bp, Homo sapiens
atatttctccaaacacaattaggctggctaacggatagtgagcttgtgcccctgcctaggtgcctgtgctgggtgtccacctgtgcccccacctgggtgcyctatgctgacccaggaaaggccagacctgcccctccaaactccacagtatgggaccctggagggctaggccaaggccttctcatgcctccacctagaagc

SEQ ID NO: 23643 - DNA, 191 bp, Homo sapiens
cctgggtgccctatgctgacccaggaaaggccagacctgcccctccaaactccacagtatgggaccctggagggctaggccaaggccttctcatgcctccmcctagaagctgaatagtgacgccctcccccaagcccacccagccgcacacaggcctagaggtaaccaataaagtattagggaaaggtgtg

SEQ ID NO: 23644 - DNA, 201 bp, Homo sapiens
cagggtgaggaccctgctgtgccaggcatcctgaggccccaactctgtctcccctactcccaggatcaacaccccccggaaagagggaggcttgggccccytgaacatccccctgcttgctgacgtgaccagacgcttgtctgaggattacggcgtgctgaaaacagatgagggcattgcctacaggggcctctttatcat

SEQ ID NO: 23645 - DNA, 201 bp, Homo sapiens
ccagttcaccgaagtgaagggctgtaccccatgacacagctagaggaggatggggactcttaacacaggctctctgctgggtgatgctgcaagttacaagyacatgtgaagccacttagctggagctgtgcctctcaaactcagtcttcccagccatggggatacagtccttgcacccaacccagggtggggtgggtgagg

SEQ ID NO: 23646 - DNA, 201 bp, Homo sapiens
ccacgcgtgtgatcgtccgtgcgtctagcctttgcccacgcagctttcagtcatggcctccggtaacgcgcgcatcggaaagccagcccctgacttcaagkccacagcggtggttgatggcgccttcaaagaggtgaagctgtcggactacaaagggaagtacgtggtcctctttttctaccctctggacttcacttttgt

SEQ ID NO: 23647 - DNA, 201 bp, Homo sapiens
ctgtgcccccacctgggtgccctatgctgacccaggaaaggccagacctgcccctccaaactccacagtatgggaccctggagggctaggccaaggccttytcatgcctccacctagaagctgaatagtgacgccctcccccaagcccacccagccgcacacaggcctagaggtaaccaataaagtattagggaaaggtgt

SEQ ID NO: 23648 - DNA, 201 bp, Homo sapiens
aataatggaaacattgccgcccaagtctttaaggatgatgacagtaattagcatttgacaactagttgcctggtatatagagttgcagatgcaactcagakgcaactctatctactctatgtacttagttcccaggagggaggctgtgctgccctatttcatgaagatggaaactccagttcaccgaagtgaagggctgta

SEQ ID NO: 23649 - DNA, 201 bp, Homo sapiens
gtgctgggtgtccacctgtgcccccacctgggtgccctatgctgacccaggaaaggccagacctgcccctccaaactccacagtatgggaccctggagggstaggccaaggccttctcatgcctccacctagaagctgaatagtgacgccctcccccaagcccacccagccgcacacaggcctagaggtaaccaataaagt

SEQ ID NO: 23650 - DNA, 111 bp, Homo sapiens
cacgctccccygcacctgcgggcgcagtggacccgaccgctccgctcgtccgctccctcccccgcgccgtgcacgtcttggttcgggccgggcataaaaggcttcgcggcc

SEQ ID NO: 23651 - DNA, 201 bp, Homo sapiens; identical to SEQ ID NO: 23646

SEQ ID NO: 23652 - DNA, 201 bp, Homo sapiens; identical to SEQ ID NO: 23642

SEQ ID NO: 23653 - DNA, 191 bp, Homo sapiens; identical to SEQ ID NO: 23643

SEQ ID NO: 23654 - DNA, 201 bp, Homo sapiens; identical to SEQ ID NO: 23647

SEQ ID NO: 23655 - DNA, 201 bp, Homo sapiens; identical to SEQ ID NO: 23649

SEQ ID NO: 23656 - DNA, 111 bp, Homo sapiens; identical to SEQ ID NO: 23650

SEQ ID NO: 23657 - DNA, 201 bp, Homo sapiens
ccgcaagctgggctgtgaagtgctgggcgtctcggtggactctcagttcacccacctggcttggatcaacaccccccggaaagagggaggcttgggccccytgaacatccccctgcttgctgacgtgaccagacgcttgtctgaggattacggcgtgctgaaaacagatgagggcattgcctacaggggcctctttatcat

SEQ ID NO: 23658 - DNA, 201 bp, Homo sapiens
gatgccctctacccggtggttagtgctgccagcatctgtgccaaggtggcccgggaccaggccgtgaagaaatggcagttcgtggagaaactgcaggactyggatactgattatggctcaggctaccccaatgatcccaagacaaaagcgtggttgaaggagcacgtggagcctgtgttcggcttcccccagtttgtccgg

SEQ ID NO: 23659 - DNA, 201 bp, Homo sapiens
acccggtggttagtgctgccagcatctgtgccaaggtggcccgggaccaggccgtgaagaaatggcagttcgtggagaaactgcaggacttggatactgawtatggctcaggctaccccaatgatcccaagacaaaagcgtggttgaaggagcacgtggagcctgtgttcggcttcccccagtttgtccggttcagctggc

SEQ ID NO: 23660 - DNA, 201 bp, Homo sapiens
ttgcgaaaatggaggacacggactttgtcggctgggcgctggatgtgctgtctccaaacctcatctctaccagcatgcttgggcgggtcaaatacaacctkaactccctgtcacatgatacagccactgggcttatacagtatgcattggaccagggcgtgaacgtcacccaggtattcgtggacaccgtagggatgccag

SEQ ID NO: 23661 - DNA, 201 bp, Homo sapiens
gaaaacgcgcgccgagacccgctcctgcagtattagttcttgcagctggtggtggcggctgaggcggcatggatctcagcgagctggagagagacaatacrggccgctgtcgcctgagttcgcctgtgcccgcggtgtgccgcaaggagccttgcgtcctgggcgtcgatgaggcgggcaggggccccgtgctgggcccca

SEQ ID NO: 23662 - DNA, 201 bp, Homo sapiens
ccactgggcttatacagtatgcattggaccagggcgtgaacgtcacccaggtattcgtggacaccgtagggatgccagagacataccaggcgcggctgcarcaaagttttcccgggattgaggtgacggtcaaggccaaagcagatgccctctacccggtggttagtgctgccagcatctgtgccaaggtggcccgggacc

SEQ ID NO: 23663 - DNA, 192 bp, Homo sapiens
gcggattggccggaagcaggcgccgcttcgaggcccgcggaaaacgcgcgccgagacccgctcctgcagtattagttcttgcagctggtggyggcggctgaggcggcatggatctcagcgagctggagagagacaatacaggccgctgtcgcctgagttcgcctgtgcccgcggtgtgccgcaaggagcctt

SEQ ID NO: 23664 - DNA, 201 bp, Homo sapiens
aagccgcggcctccagagctgccgcagaaacggttgaagacgctggactgcgggcagggggcagtgcgagccgtacgatttaatgtggatggcaattactscctgacgtgcggcagtgacaagacgctgaagctgtggaacccgcttcgggggacgctgctgcggacgtacagcggccacggctacgaggtgctggatgcg

SEQ ID NO: 23665 - DNA, 201 bp, Homo sapiens
ctggccctgcctgtgggttccggtgtggtgcagtcgctggcctaccacccaacagagccctgcctgctgaccgccatgggaggcagcgtccagtgctggcragaggaggcctatgaggcagaggatggagcaggctgaagccaggggacccaccaacaggaccaaggaccgagacacagacatggaaggacttcagatacc

SEQ ID NO: 23666 - DNA, 201 bp, Homo sapiens
aaagccgcggcctccagagctgccgcagaaacggttgaagacgctggactgcgggcagggggcagtgcgagccgtacgatttaatgtggatggcaattacygcctgacgtgcggcagtgacaagacgctgaagctgtggaacccgcttcgggggacgctgctgcggacgtacagcggccacggctacgaggtgctggatgc

SEQ ID NO: 23667 - DNA, 143 bp, Homo sapiens
aacaggaccaaggaccgagacacagacatggaaggacttcagataccatcttattctagagacgtagctgaccaaaaagtaggggaggggctgggtctgcmaattaataaatagaagagggggtaagaccttcctgggaccgc

SEQ ID NO: 23668 - DNA, 201 bp, Homo sapiens
cgagcgtgacacacatgtggtcagctgttctgaggacgggaaggtgttcttctgggacctggtggagggtgcgctggctctggccctgcctgtgggttccrgtgtggtgcagtcgctggcctaccacccaacagagccctgcctgctgaccgccatgggaggcagcgtccagtgctggcgagaggaggcctatgaggcaga

SEQ ID NO: 23669 - DNA, 201 bp, Homo sapiens; identical to SEQ ID NO: 23664

SEQ ID NO: 23670 - DNA, 201 bp, Homo sapiens; identical to SEQ ID NO: 23665

SEQ ID NO: 23671 - DNA, 201 bp, Homo sapiens; identical to SEQ ID NO: 23666

SEQ ID NO: 23672 - DNA, 143 bp, Homo sapiens; identical to SEQ ID NO: 23667

SEQ ID NO: 23673 - DNA, 201 bp, Homo sapiens
tggcgtgtccagtgtgaaggtgtcagaccacgagatcctggcaggcagggcgtggtggtgcatgcctgtattcccatctactcgggaggctgaggaaggasaatctcttgaacccgggaggcagaggttccgctccgtggatggccgcgtgagacgctatgacctaaggatggggcagctcttctcagactacgtgggcag

SEQ ID NO: 23674 - DNA, 201 bp, Homo sapiens; identical to SEQ ID NO: 23668

SEQ ID NO: 23675 - DNA, 201 bp, Homo sapiens
aagccgcggcctccagagctgccgcagaaacggttgaagacgctggactgcgggcagggggcagtgcgagccgtacgatttaatgtggatggcaattactscctgacgtgcggcagtgacaagacgctgaagctgtggaacccgcttcgggggacgctgctgcggacgtacagcggccacggctacgagctcctttgacaa

SEQ ID NO: 23676 - DNA, 201 bp, Homo sapiens; identical to SEQ ID NO: 23665

SEQ ID NO: 23677 - DNA, 201 bp, Homo sapiens
aaagccgcggcctccagagctgccgcagaaacggttgaagacgctggactgcgggcagggggcagtgcgagccgtacgatttaatgtggatggcaattacygcctgacgtgcggcagtgacaagacgctgaagctgtggaacccgcttcgggggacgctgctgcggacgtacagcggccacggctacgagctcctttgaca

SEQ ID NO: 23678 - DNA, 143 bp, Homo sapiens; identical to SEQ ID NO: 23667

SEQ ID NO: 23679 - DNA, 201 bp, Homo sapiens; identical to SEQ ID NO: 23668

SEQ ID NO: 23680 - DNA, 201 bp, Homo sapiens
tgatcctttacaggtttatttctttgtaaaaaaaaataataataatttgaatcatgtaatatttaaggttatactatgcctatttgaaaatgatattagtyatcaactttgcagtttgaaaaacatgtattgtgtgtaaaggttaaataacaaaactatgcagatgctcttaaaagcattgataacctttgtgacgaacat

SEQ ID NO: 23681 - DNA, 201 bp, Homo sapiens
ttgcctatgatgggctaaaacgtcaaagacttaccgagccaatggtcagaaatgaaaaagggcttttaacctatacttcttgggaggatgcgctctctcgygtagctggaatgttgcagagttttcaaggcaaagatgtggcagcaattgcaggtggcttggtggatgctgaagccctggtagctctcaaagatttgctta

SEQ ID NO: 23682 - DNA, 201 bp, Homo sapiens
gctgtcacagagggtgcccaggcagtagaggaaccatccatatgctgaagcttctactaggatcccagttttgccgcagataattaatggacaactgtagkgcagtgatcctttacaggtttatttctttgtaaaaaaaaataataataatttgaatcatgtaatatttaaggttatactatgcctatttgaaaatgatat

SEQ ID NO: 23683 - DNA, 201 bp, Homo sapiens
aaaccagatttgcctatgatgggctaaaacgtcaaagacttaccgagccaatggtcagaaatgaaaaagggcttttaacctatacttcttgggaggatgckctctctcgcgtagctggaatgttgcagagttttcaaggcaaagatgtggcagcaattgcaggtggcttggtggatgctgaagccctggtagctctcaaag

SEQ ID NO: 23684 - DNA, 201 bp, Homo sapiens
actcagaaaaatccaaaaaagccagggaaggtgtgatggagttcttattagcaaatcacccattggactgtcctatttgtgaccagggaggtgaatgtgayctgcaggaccagtccatgatgtttggaaatgataggagccgatttttagaggggaagcgtgctgtggaagacaagaacattgggccattggtaaagacca

SEQ ID NO: 23685 - DNA, 120 bp, Homo sapiens
ttctagtgctaaagaaaagatttaagcaccttgtcaagctgggtaaataggaaaaatacataatcatgctcagatatgtatctaggataattataattaawaataatcatagtaacaatg

SEQ ID NO: 23686 - DNA, 121 bp, Homo sapiens
gcctcccgccccgccgcctcrgaagcccctgagagccggcagatggggggcttttagccacggtctctggtctgatgaagcagaaaagaagatgaggatcagggggtcctcgggaacgctg

SEQ ID NO: 23687 - DNA, 201 bp, Homo sapiens
cacatacattgaaaagatgttcatgtctgaactgtctgggaatatcattgatatctgccctgtaggtgccctaacctctaagccctatgcctttactgccyggccttgggaaacaagaaagacagaatccattgatgtaatggatgcggttggaagtaatattgtggttagcacaagaactggagaagtgatgaggatttt

SEQ ID NO: 23688 - DNA, 201 bp, Homo sapiens
tctgggaatatcattgatatctgccctgtaggtgccctaacctctaagccctatgcctttactgcccggccttgggaaacaagaaagacagaatccattgrtgtaatggatgcggttggaagtaatattgtggttagcacaagaactggagaagtgatgaggattttgccacgtatgcatgaggacatcaatgaagagtgg

SEQ ID NO: 23689 - DNA, 201 bp, Homo sapiens
ttgataacctttgtgacgaacataaagagatccttaaattatgagttgttggcttatcttcataaataatttgtctgtaaaatggatgaaatgaaaagagkttcaattaaaacctacttttttctagtgctaaagaaaagatttaagcaccttgtcaagctgggtaaataggaaaaatacataatcatgctcagatatgta

SEQ ID NO: 23690 - DNA, 201 bp, Homo sapiens
ggcaagagaagactggaaaattataagagcactctctgagattgctggaatgactcttccatatgatactctggatcaagtaaggaacagattggaagaaktctctcctaatcttgttcgatatgatgatattgaaggggctaattacttccagcaagcaaatgagctctcaaagctagtgaaccagcagcttcttgctga

SEQ ID NO: 23691 - DNA, 201 bp, Homo sapiens
attatcttcttaatactacaattgctggtgtggaagaggcagatgttgttcttctggttggtacaaacccacgttttgaggcaccactgtttaatgctagrattcgaaagagctggctgcataatgacttaaaagtggcccttataggcagtccagtggacctcacttacacatatgaccacctgggagactcccccaaaa

SEQ ID NO: 23692 - DNA, 188 bp, Homo sapiens
ctttccgttctccaggcccggctgacagagttagccgaggccgccatattgaataagcgacccggcctcctagggggtcgtcgtggtscagacagtttagcagaacagcctccgcggctccggggagaagcaatatgttaaggatacctgtaagaaaggccttagtaggcctttctaagtctcctaaa

SEQ ID NO: 23693 - DNA, 201 bp, Homo sapiens; identical to SEQ ID NO: 23680

SEQ ID NO: 23694 - DNA, 201 bp, Homo sapiens; identical to SEQ ID NO: 23681

SEQ ID NO: 23695 - DNA, 201 bp, Homo sapiens; identical to SEQ ID NO: 23682

SEQ ID NO: 23696 - DNA, 201 bp, Homo sapiens; identical to SEQ ID NO: 23683

SEQ ID NO: 23697 - DNA, 201 bp, Homo sapiens; identical to SEQ ID NO: 23684

SEQ ID NO: 23698 - DNA, 120 bp, Homo sapiens; identical to SEQ ID NO: 23685

SEQ ID NO: 23699 - DNA, 201 bp, Homo sapiens; identical to SEQ ID NO: 23687

SEQ ID NO: 23700 - DNA, 201 bp, Homo sapiens; identical to SEQ ID NO: 23688

SEQ ID NO: 23701 - DNA, 201 bp, Homo sapiens; identical to SEQ ID NO: 23689

SEQ ID NO: 23702 - DNA, 201 bp, Homo sapiens; identical to SEQ ID NO: 23690

SEQ ID NO: 23703 - DNA, 201 bp, Homo sapiens; identical to SEQ ID NO: 23691

SEQ ID NO: 23704 - DNA, 201 bp, Homo sapiens
cccaggtgaatgactggcaggaggactgggtcgtgttctatgcccggcagcgcattcagccccagatggacatggtggagaaggagtctggggacagggargccctccagctttggtctgctctgcagttaaagatccctgacctgttccgtgacctggagatcatcccagccttactccacggggacctctggggtggaa

SEQ ID NO: 23705 - DNA, 201 bp, Homo sapiens
ttcgtgaaagtgaaccccaaggcggaggccagaagaatgtttgaaggtgagatggcaagtttaactgccatcctgaaaacaaacacggtgaaagtgcccawgcccatcaaggttctggatgccccaggcggcgggagcgtgctggtgatggagcacatggacatgaggcatctgagcagtcatgctgcaaagcttggagcc

SEQ ID NO: 23706 - DNA, 149 bp, Homo sapiens
gccagatccggggcgggtccgcggccgcggcgggaacatggaggagctsctgaggcgcgagctgggctgcagctctgtcagggccacgggccactcggggggcgggtgcatcagccagggccggagctacgacacggatcaaggacgag

SEQ ID NO: 23707 - DNA, 201 bp, Homo sapiens
gatttttgacccagcttctttctacggccactcggaatatgagctggcaatagctggcatgtttgggggctttagcagctccttttactccgcctaccackgcaaaatccccaaggccccaggattcgagaagcgccttcagttgtatcagctctttcactacttgaaccactggaatcattttggatcggggtacagagg

SEQ ID NO: 23708 - DNA, 201 bp, Homo sapiens
ttactccacggggacctctggggtggaaacgtagcagaggattcctctgggccggtgatttttgacccagcttctttctacggccactcggaatatgagcyggcaatagctggcatgtttgggggctttagcagctccttttactccgcctaccacggcaaaatccccaaggccccaggattcgagaagcgccttcagttg

SEQ ID NO: 23709 - DNA, 201 bp, Homo sapiens
tgcatcagccagggccggagctacgacacggatcaaggacgagtgttcgtgaaagtgaaccccaaggcggaggccagaagaatgtttgaaggtgagatggyaagtttaactgccatcctgaaaacaaacacggtgaaagtgcccaagcccatcaaggttctggatgccccaggcggcgggagcgtgctggtgatggagcac

SEQ ID NO: 23710 - DNA, 201 bp, Homo sapiens
tgatttttgacccagcttctttctacggccactcggaatatgagctggcaatagctggcatgtttgggggctttagcagctccttttactccgcctaccayggcaaaatccccaaggccccaggattcgagaagcgccttcagttgtatcagctctttcactacttgaaccactggaatcattttggatcggggtacagag

SEQ ID NO: 23711 - DNA, 201 bp, Homo sapiens; identical to SEQ ID NO: 23704

SEQ ID NO: 23712 - DNA, 149 bp, Homo sapiens; identical to SEQ ID NO: 23706

SEQ ID NO: 23713 - DNA, 201 bp, Homo sapiens; identical to SEQ ID NO: 23707

SEQ ID NO: 23714 - DNA, 174 bp, Homo sapiens
tccttcactgttgtagtaaagagacatatttcatgaatggcattgatgctaataaatcctttgcacaaaaatttgaataaacttccagtggtttcgataaygtacaagattgtatatttccctcatttattgtaattcaatatcttagttgtttgctgaaaaacttgtaatatt

SEQ ID NO: 23715 - DNA, 201 bp, Homo sapiens
gggaaactgtaagtgaacccctgtgggtgcgggggagggtatccggtgcgcagggaggtggccagcgcccccgggcactgctgctcataggtacctttccrctgcctcctccctgctctcctgtgcaggaatgtctctgagctgttcacgttgatgcttcttggttggcaagacttgggtgtagacatgaaaccatcttac

SEQ ID NO: 23716 - DNA, 201 bp, Homo sapiens; identical to SEQ ID NO: 23708

SEQ ID NO: 23717 - DNA, 201 bp, Homo sapiens
gaatcaagcgtattccgttttcttcctgcatgatccctgggccctcccgcaggctgagcaagtctgtaaactgattctgggagaaaccaagctgctggccrtagggtgtccttgggtacatccaggagtcttcattgcttctgttattaccccgtctcctctgccattttctacagcttgctgagttgtcattcctttgca

SEQ ID NO: 23718 - DNA, 201 bp, Homo sapiens
cctccctgctctcctgtgcaggaatgtctctgagctgttcacgttgatgcttcttggttggcaagacttgggtgtagacatgaaaccatcttactaaaagygtcttaaaatgaccaattccagaatcaagcgtattccgttttcttcctgcatgatccctgggccctcccgcaggctgagcaagtctgtaaactgattctg

SEQ ID NO: 23719 - DNA, 201 bp, Homo sapiens
catgaggaatctggtcaagtgagcgggccttactctggaaggaggcctcagaggtttctccacagtcctcttctgggcaaattcttgtttcttcacatgcyggactagcttaagaccaatgcagtagcttatttccaagccttgcaaagtatataatatctaagaggaaaggttttgtcatcccagcgttgtccactttgt

SEQ ID NO: 23720 - DNA, 201 bp, Homo sapiens; identical to SEQ ID NO: 23709

SEQ ID NO: 23721 - DNA, 201 bp, Homo sapiens; identical to SEQ ID NO: 23705

SEQ ID NO: 23722 - DNA, 201 bp, Homo sapiens
cataggtacctttccgctgcctcctccctgctctcctgtgcaggaatgtctctgagctgttcacgttgatgcttcttggttggcaagacttgggtgtagayatgaaaccatcttactaaaagcgtcttaaaatgaccaattccagaatcaagcgtattccgttttcttcctgcatgatccctgggccctcccgcaggctga

SEQ ID NO: 23723 - DNA, 201 bp, Homo sapiens
ttgatgcttcttggttggcaagacttgggtgtagacatgaaaccatcttactaaaagcgtcttaaaatgaccaattccagaatcaagcgtattccgttttmttcctgcatgatccctgggccctcccgcaggctgagcaagtctgtaaactgattctgggagaaaccaagctgctggccgtagggtgtccttgggtacatc

SEQ ID NO: 23724 - DNA, 201 bp, Homo sapiens
ttgggtacatccaggagtcttcattgcttctgttattaccccgtctcctctgccattttctacagcttgctgagttgtcattcctttgcaacattaaaatrcatgctgaactcatatttttccttccttcactgttgtagtaaagagacatatttcatgaatggcattgatgctaataaatcctttgcacaaaaatttgaa

SEQ ID NO: 23725 - DNA, 201 bp, Homo sapiens; identical to SEQ ID NO: 23710

SEQ ID NO: 23726 - DNA, 201 bp, Homo sapiens
aagcgtattccgttttcttcctgcatgatccctgggccctcccgcaggctgagcaagtctgtaaactgattctgggagaaaccaagctgctggccgtaggrtgtccttgggtacatccaggagtcttcattgcttctgttattaccccgtctcctctgccattttctacagcttgctgagttgtcattcctttgcaacatt

SEQ ID NO: 23727 - DNA, 201 bp, Homo sapiens
ttttacctgcagcttcggaaagatatcctggaggagaggctgtactgcaatgaagagatactgctgcagctgggggtccttgccttgcaggctgagtttgrcaattaccctaaggaggtggagagtaagccatactttcacgttgaagattacatcccagcgagtctgatcgagaggatgaccgctctacgggtccaggtt

SEQ ID NO: 23728 - DNA, 201 bp, Homo sapiens
tggccagcgccctacaggtcaggggtgaagctctgtctgaggaggaaatctggtccctcctgttcctggccgctgagcagctcctggaagacctccgcaaygattcctcggactatgtggtttgcccctggtcagccctgctttctgcagctggaagcctttctttccaaggccgtgtttctcatatagaggctgctcctt

SEQ ID NO: 23729 - DNA, 201 bp, Homo sapiens
tgtctacccagcccctgctggtctccacatcagaaggctggttggcttggttctgggtaccatttctgaggtcagtagagaaccgtgcttttcaaccaaaraagggaaatcctatttggctctcagggacctctgtgtggtcctgctgaacgggcagcacctggaggtaaaatgtgatgttgaatcaacagtgggagctgt

SEQ ID NO: 23730 - DNA, 127 bp, Homo sapiens
gtgacgctggccagcgccctacaggtmaggggtgaagctctgtctgaggaggaaatctggtccctcctgttcctggccgctgagcagctcctggaagacctccgcaacgattcctcggactatgtgg

SEQ ID NO: 23731 - DNA, 201 bp, Homo sapiens
gccctgaatcacatcagtctggagggcttcacattcaacatggctgttaggatgatccagaattcccctgacaacatagaattaattatttctcagtcaaratcttcttgtcctccatcacctccagaaatcagtgctggtgaaatctactttgtggaactggttaaagaagatgggacacttggattcagcgtaactggt

SEQ ID NO: 23732 - DNA, 201 bp, Homo sapiens
ggtttgtcattaatgagggagagtattcaggccaagctgaccctggcatttttatatcttctattatacctggaggaccagcagaaaaagcaaaaacgatyaaaccaggagggcagatactagccctgaatcacatcagtctggagggcttcacattcaacatggctgttaggatgatccagaattcccctgacaacatag

SEQ ID NO: 23733 - DNA, 201 bp, Homo sapiens
ggtttgggattcagtttcgtgcagatggagaaagagagctgcagccatctcaaaagtgatcttgtgaggattaagaggctctttccggggcagccagctgmggagaatggggccattgcagctggtgacattatcctggccgtgaatggaaggtccacggaaggcctcatcttccaggaggtgctgcatttactgagaggg

SEQ ID NO: 23734 - DNA, 201 bp, Homo sapiens
gcctgaagggtcctgggcaggtgagtggactgttgctgaccagcttcccctccttccggaactttcctgaacaacatcagaagctgaaatcgcctctgggkgggagggaggcaggcaagaaacaagactttttctttgttagtcctaagtttgaagtcaaactaaaaaagaatgccaatggtttgggattcagtttcgtgc

SEQ ID NO: 23735 - DNA, 201 bp, Homo sapiens
atcttctattatacctggaggaccagcagaaaaagcaaaaacgatcaaaccaggagggcagatactagccctgaatcacatcagtctggagggcttcacaytcaacatggctgttaggatgatccagaattcccctgacaacatagaattaattatttctcagtcaaaatcttcttgtcctccatcacctccagaaatcag

SEQ ID NO: 23736 - DNA, 201 bp, Homo sapiens
tgccatatggtggtatctatgtgaaatccattgttcctggaggaccagctgccaaggaagggcagatcctacagggtgaccgactcctgcaggtggatggrgtgattctgtgcggcctcacccacaagcaggctgtgcagtgcctgaagggtcctgggcaggtgagtggactgttgctgaccagcttcccctccttccgga

SEQ ID NO: 23737 - DNA, 201 bp, Homo sapiens
atgaaatacagaagggaggaaaatgcagaaatttatctgtaagaggaattacaaatttaggaaatacttgcttttttaatgcagtcatgcagaacttggcrcagacttatactcttactgatctgatgaatgagatcaaagaaagtagtacaaaactcaagatttttccttcctcagactctcagctggacccattggtgg

SEQ ID NO: 23738 - DNA, 201 bp, Homo sapiens
tgtaggtttaacttgccaacatgtaagtcatgctatcagcgtgaatcatgtaaagagagcaatagctgagaatctgtggtcagtttgctcagaatgtttaraagaaagaagattctatgatgggcagctagtacttacttctgatatttggttgtgcctcaagtgtggcttccagggatgtggtaaaaactcagaaagcca

SEQ ID NO: 23739 - DNA, 201 bp, Homo sapiens
tttggttgtgcctcaagtgtggcttccagggatgtggtaaaaactcagaaagccaacattcattgaagcactttaagagttccagaacagagccccattgkattataattaatctgagcacatggattatatggtgttatgaatgtgatgaaaaattatcaacgcattgtaataagaaggttttggctcagatagttgatt

SEQ ID NO: 23740 - DNA, 201 bp, Homo sapiens
ctccatccaccgcttactggctttgggacctctgcaagtcacttcacttctctttctcagtttcaagtgtaaaatgcggaaaataatagcaacttatctcstaagtaaataacagatgcgggtgaaagatccaactaaagctttacctgagaaagccaaaagaagtaaaaggcctactgtacctcatgatgaagactcttc

SEQ ID NO: 23741 - DNA, 201 bp, Homo sapiens
cagaaagccaacattcattgaagcactttaagagttccagaacagagccccattgtattataattaatctgagcacatggattatatggtgttatgaatgygatgaaaaattatcaacgcattgtaataagaaggttttggctcagatagttgattttctccagaaacatgcttctaaaacacaaacaagtgcattttcta

SEQ ID NO: 23742 - DNA, 201 bp, Homo sapiens
tctcagtttcaagtgtaaaatgcggaaaataatagcaacttatctcctaagtaaataacagatgcgggtgaaagatccaactaaagctttacctgagaaarccaaaagaagtaaaaggcctactgtacctcatgatgaagactcttcagatgatattgctgtaggtttaacttgccaacatgtaagtcatgctatcagcgt

SEQ ID NO: 23743 - DNA, 201 bp, Homo sapiens
accactgacctcagccttgttcctgtttcttcacagcatgaaggagactgaaaaaggaccactttctcctaaagttctttttaatcagctttgtcagaagygggtgcatctacatttaatataaataattatgagttacaaaatactaatgtattcatcatttaacatgaatagtcgtttttactgtaactttgctcttat

SEQ ID NO: 23744 - DNA, 201 bp, Homo sapiens; identical to SEQ ID NO: 23737

SEQ ID NO: 23745 - DNA, 201 bp, Homo sapiens; identical to SEQ ID NO: 23738

SEQ ID NO: 23746 - DNA, 201 bp, Homo sapiens; identical to SEQ ID NO: 23739

SEQ ID NO: 23747 - DNA, 201 bp, Homo sapiens; identical to SEQ ID NO: 23741

SEQ ID NO: 23748 - DNA, 191 bp, Homo sapiens
agtctccccaggttgtagacgctgcggcccggcccggcgggtaaataacagatgcgggtgaaagatccaactaaagctttacctgagaaarccaaaagaagtaaaaggcctactgtacctcatgatgaagactcttcagatgatattgctgtaggtttaacttgccaacatgtaagtcatgctatcagcgt

SEQ ID NO: 23749 - DNA, 201 bp, Homo sapiens
ggaccactgacctcagccttgttcctgtttcttcacagcatgaaggagactgaaaaaggaccactttctcctaaagttctttttaatcagctttgtcagayggcacctcgatttaaagatttccagcaacaggacagtcaggagcttcttcattatcttctggatgcagtgaggacagaagaaacaaagcgaatacaagct

SEQ ID NO: 23750 - DNA, 201 bp, Homo sapiens; identical to SEQ ID NO: 23737

SEQ ID NO: 23751 - DNA, 201 bp, Homo sapiens; identical to SEQ ID NO: 23738

SEQ ID NO: 23752 - DNA, 201 bp, Homo sapiens; identical to SEQ ID NO: 23739

SEQ ID NO: 23753 - DNA, 201 bp, Homo sapiens; identical to SEQ ID NO: 23741

SEQ ID NO: 23754 - DNA, 191 bp, Homo sapiens; identical to SEQ ID NO: 23748

SEQ ID NO: 23755 - DNA, 201 bp, Homo sapiens; identical to SEQ ID NO: 23743

SEQ ID NO: 23756 - DNA, 201 bp, Homo sapiens; identical to SEQ ID NO: 23737

SEQ ID NO: 23757 - DNA, 201 bp, Homo sapiens; identical to SEQ ID NO: 23740

SEQ ID NO: 23758 - DNA, 201 bp, Homo sapiens
tctcagtttcaagtgtaaaatgcggaaaataatagcaacttatctcctaagtaaataacagatgcgggtgaaagatccaactaaagctttacctgagaaarccaaaagaagtaaaaggcctactgtacctcatgatgaagactcttcagatgatattgctggtgcattttctagaatcatgaaactttgtgaagaaaaatg

SEQ ID NO: 23759 - DNA, 201 bp, Homo sapiens; identical to SEQ ID NO: 23743

SEQ ID NO: 23760 - DNA, 139 bp, Homo sapiens
tttcattgcagggctgtgaccatctatgacaagccggcrtctttctttaaagagacacctctggacctgcagcaccggctcttcatgaagctgggcggcacgcactctccgttcagggcccgttcagaacctgaggaac

SEQ ID NO: 23761 - DNA, 115 bp, Homo sapiens
ccgtgttcctaacattttgattcctgtcttgaaaaaagcacctgctgcactgtaagcccagggatgtggcagctgcagtgggcttggctttgtgaagaacygagtgtgtccacgg

SEQ ID NO: 23762 - DNA, 201 bp, Homo sapiens
ccgttcagggcccgttcagaacctgaggaaccagccacagagccgtcggccttcatggagtgggatgctgggagcgggctggtgatgcttctccgcgagcwgccagccctgctggtcagcagcacaggctggacaggtctgcaagacccctggaacacttgggcttgaggatgaagacttctccatcctgctggcagcttt

SEQ ID NO: 23763 - DNA, 201 bp, Homo sapiens
tggacacataactcctgggccagaggctaaaaccccgggacccctgctgtccttcccgcagcttcttctcggagtctcagggcaaaccctttcgagcagcrcctcccagtggccagaaggtgaaatgacggcagtggtgccgcctggtaaatgaattggttctgtgacccgggaagctgtgcttggctctgatttcttttc

SEQ ID NO: 23764 - DNA, 165 bp, Homo sapiens
ctctgcagtactcctcatcctgcgtttgctctccaggtgtcatctttccgccgtgttcctaacattttgattcctgtcttgaaaaaagcacctgctgcacygtaagcccagggatgtggcagctgcagtgggcttggctttgtgaagaaccgagtgtgtccacgg

SEQ ID NO: 23765 - DNA, 139 bp, Homo sapiens; identical to SEQ ID NO: 23760

SEQ ID NO: 23766 - DNA, 115 bp, Homo sapiens; identical to SEQ ID NO: 23761

SEQ ID NO: 23767 - DNA, 201 bp, Homo sapiens
ccgttcagggcccgttcagaacctgaggaaccagccacagagccgtcggccttcatggagtgggatgctgggagcgggctggtgatgcttctccgcgagcwgccagccctgctggtcagcagcacaggctggacagaggatgaagacttctccatcctgctggcagctttagaaaagtttgagcagctgactgttgatgga

SEQ ID NO: 23768 - DNA, 201 bp, Homo sapiens; identical to SEQ ID NO: 23763

SEQ ID NO: 23769 - DNA, 165 bp, Homo sapiens; identical to SEQ ID NO: 23764

SEQ ID NO: 23770 - DNA, 180 bp, Homo sapiens
cggtgcgcatgcgcgagcgcctagctgcgcgcagccacccacgcgaccccagtctgaggtgcggggtcctggggcccggygcgggtggccgccgcggcccctcgggctgcgtggggagggggcttccgcccctgttgtcattgctcctgcagccttttcgctgggactgcgcgacaccgc

SEQ ID NO: 23771 - DNA, 201 bp, Homo sapiens
gcgcgacaccgccccccgaccgggtgcccgctgtgtgccaggccgggtgctgggcacggtcccgcgagtgccctataaggactgccaggcaataatgaagkttcttttactgaaggatgcgaaggaagatgactgtggccaggatccgtatatcagggaattaggattatatggacttgaagccactttgatccctgtttt

SEQ ID NO: 23772 - DNA, 201 bp, Homo sapiens
cgacaccgccccccgaccgggtgcccgctgtgtgccaggccgggtgctgggcacggtcccgcgagtgccctataaggactgccaggcaataatgaaggttyttttactgaaggatgcgaaggaagatgactgtggccaggatccgtatatcagggaattaggattatatggacttgaagccactttgatccctgttttatc

SEQ ID NO: 23773 - DNA, 201 bp, Homo sapiens
ctgggcacggtcccgcgagtgccctataaggactgccaggcaataatgaaggttcttttactgaaggatgcgaaggaagatgactgtggccaggatccgtrtatcagggaattaggattatatggacttgaagccactttgatccctgttttatcgtttgagtttttgtctcttcccagtttctctgagaagctttctcat

SEQ ID NO: 23774 - DNA, 201 bp, Homo sapiens
atcagggaattaggattatatggacttgaagccactttgatccctgttttatcgtttgagtttttgtctcttcccagtttctctgagaagctttctcatcytgaagattacgggggactcatttttaccagccccagagcagtggaagcagcagagttatgtttggagcaaaacaataaaactgaagtctgggaaaggtct

SEQ ID NO: 23775 - DNA, 201 bp, Homo sapiens
gaagctttctcatcctgaagattacgggggactcatttttaccagccccagagcagtggaagcagcagagttatgtttggagcaaaacaataaaactgaaktctgggaaaggtctctgaaagaaaaatggaatgccaagtcagtgtatgtggttggaaatgctactgcttctctagtgagtaaaattggcctggatacaga

SEQ ID NO: 23776 - DNA, 201 bp, Homo sapiens
gagttatgtttggagcaaaacaataaaactgaagtctgggaaaggtctctgaaagaaaaatggaatgccaagtcagtgtatgtggttggaaatgctactgyttctctagtgagtaaaattggcctggatacagaaggagaaacctgtggaaatgcagaaaagcttgcagaatatatttgttccagtgaagaagtcaaagga

SEQ ID NO: 23777 - DNA, 119 bp, Homo sapiens
cggtgcgcatgcgcgagcscctagctgcgcgcagccacccacgcgaccccagtctgaggtgcggggtcctggggcccggcgcgggtggccgccgcggcccctcgggctgcgtggggagg

SEQ ID NO: 23778 - DNA, 190 bp, Homo sapiens
cggtgcgcatgcgcgagcgcctagctgcgcgcagccacccacgcgaccccagtctgaggtgcggggtcctggggcccggcgcgggtggcygccgcggcccctcgggctgcgtggggagggggcttccgcccctgttgtcattgctcctgcagccttttcgctgggactgcgcgacaccgccccccgaccg

SEQ ID NO: 23779 - DNA, 178 bp, Homo sapiens
cggtgcgcatgcgcgagcgcctagctgcgcgcagccacccacgcgaccccagtctgaggtgcggggtcctggggcccrgcgcgggtggccgccgcggcccctcgggctgcgtggggagggggcttccgcccctgttgtcattgctcctgcagccttttcgctgggactgcgcgacacc

SEQ ID NO: 23780 - DNA, 201 bp, Homo sapiens
atccctgttttatcgtttgagtttttgtctcttcccagtttctctgagaagctttctcatcctgaagattacgggggactcatttttaccagccccagagyagtggaagcagcagagttatgtttggagcaaaacaataaaactgaagtctgggaaaggtctctgaaagaaaaatggaatgccaagtcagtgtatgtggtt

SEQ ID NO: 23781 - DNA, 144 bp, Homo sapiens
cggtgcgcatgcgcgagcgcctagctgcgcgcagccacccacgmgaccccagtctgaggtgcggggtcctggggcccggcgcgggtggccgccgcggcccctcgggctgcgtggggagggggcttccgcccctgttgtcattgc

SEQ ID NO: 23782 - DNA, 201 bp, Homo sapiens
agccagcactgtgagacattttcaagctaaaaacatacagttcaggagactgtaatctgtggtagaaagtgttcaccatttgctgctagtaaagacggttrgccctgtgcttctctggccacttgtgccacatggtgttctcggaagaggcctctccatgcaccagtgtggagaagccctctggaggccaattcaaagagc

SEQ ID NO: 23783 - DNA, 201 bp, Homo sapiens; identical to SEQ ID NO: 23771

SEQ ID NO: 23784 - DNA, 201 bp, Homo sapiens; identical to SEQ ID NO: 23772

SEQ ID NO: 23785 - DNA, 201 bp, Homo sapiens; identical to SEQ ID NO: 23773

SEQ ID NO: 23786 - DNA, 201 bp, Homo sapiens; identical to SEQ ID NO: 23774

SEQ ID NO: 23787 - DNA, 201 bp, Homo sapiens; identical to SEQ ID NO: 23775

SEQ ID NO: 23788 - DNA, 201 bp, Homo sapiens
tatcgatcaaattaagtttgcagccatcggccccactacggctcgcgcgctggccgcccagggccttcctgtaagctgcactgcagagagccccacgccayaagccctggccactggcatcaggaaggctctccagccccatggctgctgctgagtcagccacctagcgctggccccatgcagcctccctgggctgggctg

SEQ ID NO: 23789 - DNA, 201 bp, Homo sapiens; identical to SEQ ID NO: 23776

SEQ ID NO: 23790 - DNA, 190 bp, Homo sapiens; identical to SEQ ID NO: 23778

SEQ ID NO: 23791 - DNA, 201 bp, Homo sapiens
gcgctcaaggacaaagggattgccatggaaagcataactgtgtatcagacagttgcacacccaggaatccaagggaacctgaacagctactattcccagcmgggggttccagccagcatcacattttttagtccctctggcctcacatacagtctcaagcacattcaggagttatctggtgacaatatcgatcaaattaag

SEQ ID NO: 23792 - DNA, 201 bp, Homo sapiens
aatatcgatcaaattaagtttgcagccatcggccccactacggctcgcgcgctggccgcccagggccttcctgtaagctgcactgcagagagccccacgcmacaagccctggccactggcatcaggaaggctctccagccccatggctgctgctgagtcagccacctagcgctggccccatgcagcctccctgggctgggc

SEQ ID NO: 23793 - DNA, 201 bp, Homo sapiens
gctcaaggacaaagggattgccatggaaagcataactgtgtatcagacagttgcacacccaggaatccaagggaacctgaacagctactattcccagcagdgggttccagccagcatcacattttttagtccctctggcctcacatacagtctcaagcacattcaggagttatctggtgacaatatcgatcaaattaagtt

SEQ ID NO: 23794 - DNA, 180 bp, Homo sapiens; identical to SEQ ID NO: 23770

SEQ ID NO: 23795 - DNA, 201 bp, Homo sapiens
aggctctccagccccatggctgctgctgagtcagccacctagcgctggccccatgcagcctccctgggctgggctggctctggatggagccaggcatcggyaagggctctcgggagctgctgccgtcagactcctgcctcaagcctgagtggaagcacctgaggaccggggatcgggacctgacctggggctggcctcagg

SEQ ID NO: 23796 - DNA, 119 bp, Homo sapiens; identical to SEQ ID NO: 23777

SEQ ID NO: 23797 - DNA, 178 bp, Homo sapiens; identical to SEQ ID NO: 23779

SEQ ID NO: 23798 - DNA, 144 bp, Homo sapiens; identical to SEQ ID NO: 23781

SEQ ID NO: 23799 - DNA, 201 bp, Homo sapiens; identical to SEQ ID NO: 23780

SEQ ID NO: 23800 - DNA, 201 bp, Homo sapiens; identical to SEQ ID NO: 23771

SEQ ID NO: 23801 - DNA, 201 bp, Homo sapiens; identical to SEQ ID NO: 23772

SEQ ID NO: 23802 - DNA, 201 bp, Homo sapiens; identical to SEQ ID NO: 23773

SEQ ID NO: 23803 - DNA, 201 bp, Homo sapiens; identical to SEQ ID NO: 23774

SEQ ID NO: 23804 - DNA, 201 bp, Homo sapiens; identical to SEQ ID NO: 23775

SEQ ID NO: 23805 - DNA, 201 bp, Homo sapiens; identical to SEQ ID NO: 23788

SEQ ID NO: 23806 - DNA, 201 bp, Homo sapiens
gagttatgtttggagcaaaacaataaaactgaagtctgggaaaggtctctgaaagaaaaatggaatgccaagtcagtgtatgtggttggaaatgctactgyttctctagtgagtaaaattggcctggatacagaaggagaaacctgtggaaatgcagaaaagcttgcagaatatatttgttccagggagtcctcagcactg

SEQ ID NO: 23807 - DNA, 201 bp, Homo sapiens; identical to SEQ ID NO: 23791

SEQ ID NO: 23808 - DNA, 190 bp, Homo sapiens; identical to SEQ ID NO: 23778

SEQ ID NO: 23809 - DNA, 201 bp, Homo sapiens; identical to SEQ ID NO: 23792

SEQ ID NO: 23810 - DNA, 201 bp, Homo sapiens; identical to SEQ ID NO: 23793

SEQ ID NO: 23811 - DNA, 180 bp, Homo sapiens; identical to SEQ ID NO: 23770

SEQ ID NO: 23812 - DNA, 201 bp, Homo sapiens; identical to SEQ ID NO: 23795

SEQ ID NO: 23813 - DNA, 119 bp, Homo sapiens; identical to SEQ ID NO: 23777

SEQ ID NO: 23814 - DNA, 178 bp, Homo sapiens; identical to SEQ ID NO: 23779

SEQ ID NO: 23815 - DNA, 144 bp, Homo sapiens; identical to SEQ ID NO: 23781

SEQ ID NO: 23816 - DNA, 201 bp, Homo sapiens; identical to SEQ ID NO: 23780

SEQ ID NO: 23817 - DNA, 201 bp, Homo sapiens; identical to SEQ ID NO: 23771

SEQ ID NO: 23818 - DNA, 201 bp, Homo sapiens; identical to SEQ ID NO: 23772

SEQ ID NO: 23819 - DNA, 201 bp, Homo sapiens; identical to SEQ ID NO: 23773

SEQ ID NO: 23820 - DNA, 201 bp, Homo sapiens; identical to SEQ ID NO: 23774

SEQ ID NO: 23821 - DNA, 201 bp, Homo sapiens; identical to SEQ ID NO: 23775

SEQ ID NO: 23822 - DNA, 201 bp, Homo sapiens
cactgcaaagcagtagtttgcagccatcggccccactacggctcgcgcgctggccgcccagggccttcctgtaagctgcactgcagagagccccacgccayaagccctggccactggcatcaggaaggctctccagccccatggctgctgctgagtcagccacctagcgctggccccatgcagcctccctgggctgggctg

SEQ ID NO: 23823 - DNA, 201 bp, Homo sapiens
gagttatgtttggagcaaaacaataaaactgaagtctgggaaaggtctctgaaagaaaaatggaatgccaagtcagtgtatgtggttggaaatgctactgyttctctagtgagtaaaattggcctggatacagaaggagaaacctgtggaaatgcagaaaagcttgcagaatatatttgttccaacctcaaaagagaaatc

SEQ ID NO: 23824 - DNA, 201 bp, Homo sapiens; identical to SEQ ID NO: 23791

SEQ ID NO: 23825 - DNA, 190 bp, Homo sapiens; identical to SEQ ID NO: 23778

SEQ ID NO: 23826 - DNA, 201 bp, Homo sapiens
gtcactgcaaagcagtagtttgcagccatcggccccactacggctcgcgcgctggccgcccagggccttcctgtaagctgcactgcagagagccccacgcmacaagccctggccactggcatcaggaaggctctccagccccatggctgctgctgagtcagccacctagcgctggccccatgcagcctccctgggctgggc

SEQ ID NO: 23827 - DNA, 201 bp, Homo sapiens
gctcaaggacaaagggattgccatggaaagcataactgtgtatcagacagttgcacacccaggaatccaagggaacctgaacagctactattcccagcagdgggttccagccagcatcacattttttagtccctctggcctcacatacagtctcaagcacattcaggagttatctggtgacaatatcgatcaaattaagaa

SEQ ID NO: 23828 - DNA, 180 bp, Homo sapiens; identical to SEQ ID NO: 23770

SEQ ID NO: 23829 - DNA, 201 bp, Homo sapiens; identical to SEQ ID NO: 23795

SEQ ID NO: 23830 - DNA, 201 bp, Homo sapiens
ccagccagcatcacattttttagtccctctggcctcacatacagtctcaagcacattcaggagttatctggtgacaatatcgatcaaattaagaaacaccyttgaactggctccagagggactgaggagagggtgcaggatgtgacccagagcccaaggacagacactgccactcactgcagtcaggaagagcaaaaggct

SEQ ID NO: 23831 - DNA, 119 bp, Homo sapiens; identical to SEQ ID NO: 23777

SEQ ID NO: 23832 - DNA, 178 bp, Homo sapiens; identical to SEQ ID NO: 23779

SEQ ID NO: 23833 - DNA, 144 bp, Homo sapiens; identical to SEQ ID NO: 23781

SEQ ID NO: 23834 - DNA, 201 bp, Homo sapiens; identical to SEQ ID NO: 23780

SEQ ID NO: 23835 - DNA, 201 bp, Homo sapiens; identical to SEQ ID NO: 23771

SEQ ID NO: 23836 - DNA, 201 bp, Homo sapiens; identical to SEQ ID NO: 23772

SEQ ID NO: 23837 - DNA, 201 bp, Homo sapiens; identical to SEQ ID NO: 23773

SEQ ID NO: 23838 - DNA, 201 bp, Homo sapiens; identical to SEQ ID NO: 23774

SEQ ID NO: 23839 - DNA, 201 bp, Homo sapiens; identical to SEQ ID NO: 23775

SEQ ID NO: 23840 - DNA, 201 bp, Homo sapiens
tgacacagccgtgatgtttgcagccatcggccccactacggctcgcgcgctggccgcccagggccttcctgtaagctgcactgcagagagccccacgccayaagccctggccactggcatcaggaaggctctccagccccatggctgctgctgagtcagccacctagcgctggccccatgcagcctccctgggctgggctg

SEQ ID NO: 23841 - DNA, 201 bp, Homo sapiens; identical to SEQ ID NO: 23806

SEQ ID NO: 23842 - DNA, 201 bp, Homo sapiens; identical to SEQ ID NO: 23791

SEQ ID NO: 23843 - DNA, 190 bp, Homo sapiens; identical to SEQ ID NO: 23778

SEQ ID NO: 23844 - DNA, 201 bp, Homo sapiens
actgacacagccgtgatgtttgcagccatcggccccactacggctcgcgcgctggccgcccagggccttcctgtaagctgcactgcagagagccccacgcmacaagccctggccactggcatcaggaaggctctccagccccatggctgctgctgagtcagccacctagcgctggccccatgcagcctccctgggctgggc

SEQ ID NO: 23845 - DNA, 201 bp, Homo sapiens
gctcaaggacaaagggattgccatggaaagcataactgtgtatcagacagttgcacacccaggaatccaagggaacctgaacagctactattcccagcagdgggttccagccagcatcacattttttagtccctctggcctcacatacagtctcaagcacattcaggagttatctggtgacaatatcgatcaaattaagat

SEQ ID NO: 23846 - DNA, 180 bp, Homo sapiens; identical to SEQ ID NO: 23770

SEQ ID NO: 23847 - DNA, 201 bp, Homo sapiens; identical to SEQ ID NO: 23795

SEQ ID NO: 23848 - DNA, 201 bp, Homo sapiens
ctctggcctcacatacagtctcaagcacattcaggagttatctggtgacaatatcgatcaaattaagatgaggagatggaggccagagaggatgggccacsggccaaggtcattgtcctgtggagctgggatttaaatcccaaccctgtgcccacagagccctgaccttgatggctctactttcttggggattcagtcact

SEQ ID NO: 23849 - DNA, 119 bp, Homo sapiens; identical to SEQ ID NO: 23777

SEQ ID NO: 23850 - DNA, 178 bp, Homo sapiens; identical to SEQ ID NO: 23779

SEQ ID NO: 23851 - DNA, 144 bp, Homo sapiens; identical to SEQ ID NO: 23781

SEQ ID NO: 23852 - DNA, 201 bp, Homo sapiens; identical to SEQ ID NO: 23780

SEQ ID NO: 23853 - DNA, 201 bp, Homo sapiens
cccatcggaaattgcttaggaagagtctttgagatctaattaagatctgtttccttgctctgtcgcagtgccctataaggactgccaggcaataatgaagkttcttttactgaaggatgcgaaggaagatgactgtggccaggatccgtatatcagggaattaggattatatggacttgaagccactttgatccctgtttt

SEQ ID NO: 23854 - DNA, 201 bp, Homo sapiens; identical to SEQ ID NO: 23795

SEQ ID NO: 23855 - DNA, 201 bp, Homo sapiens
atcggaaattgcttaggaagagtctttgagatctaattaagatctgtttccttgctctgtcgcagtgccctataaggactgccaggcaataatgaaggttyttttactgaaggatgcgaaggaagatgactgtggccaggatccgtatatcagggaattaggattatatggacttgaagccactttgatccctgttttatc

SEQ ID NO: 23856 - DNA, 201 bp, Homo sapiens
tttccttgctctgtcgcagtgccctataaggactgccaggcaataatgaaggttcttttactgaaggatgcgaaggaagatgactgtggccaggatccgtrtatcagggaattaggattatatggacttgaagccactttgatccctgttttatcgtttgagtttttgtctcttcccagtttctctgagaagctttctcat

SEQ ID NO: 23857 - DNA, 201 bp, Homo sapiens; identical to SEQ ID NO: 23774

SEQ ID NO: 23858 - DNA, 201 bp, Homo sapiens; identical to SEQ ID NO: 23775

SEQ ID NO: 23859 - DNA, 201 bp, Homo sapiens; identical to SEQ ID NO: 23788

SEQ ID NO: 23860 - DNA, 201 bp, Homo sapiens; identical to SEQ ID NO: 23806

SEQ ID NO: 23861 - DNA, 201 bp, Homo sapiens; identical to SEQ ID NO: 23791

SEQ ID NO: 23862 - DNA, 201 bp, Homo sapiens; identical to SEQ ID NO: 23792

SEQ ID NO: 23863 - DNA, 201 bp, Homo sapiens; identical to SEQ ID NO: 23780

SEQ ID NO: 23864 - DNA, 201 bp, Homo sapiens; identical to SEQ ID NO: 23793

SEQ ID NO: 23865 - DNA, 201 bp, Homo sapiens; identical to SEQ ID NO: 23771

SEQ ID NO: 23866 - DNA, 201 bp, Homo sapiens; identical to SEQ ID NO: 23772

SEQ ID NO: 23867 - DNA, 201 bp, Homo sapiens; identical to SEQ ID NO: 23773

SEQ ID NO: 23868 - DNA, 201 bp, Homo sapiens; identical to SEQ ID NO: 23774

SEQ ID NO: 23869 - DNA, 201 bp, Homo sapiens; identical to SEQ ID NO: 23775

SEQ ID NO: 23870 - DNA, 201 bp, Homo sapiens; identical to SEQ ID NO: 23806

SEQ ID NO: 23871 - DNA, 201 bp, Homo sapiens; identical to SEQ ID NO: 23791

SEQ ID NO: 23872 - DNA, 190 bp, Homo sapiens; identical to SEQ ID NO: 23778

SEQ ID NO: 23873 - DNA, 201 bp, Homo sapiens; identical to SEQ ID NO: 23827

SEQ ID NO: 23874 - DNA, 180 bp, Homo sapiens; identical to SEQ ID NO: 23770

SEQ ID NO: 23875 - DNA, 201 bp, Homo sapiens; identical to SEQ ID NO: 23830

SEQ ID NO: 23876 - DNA, 201 bp, Homo sapiens
gctagagaggtgaaacaacttgccaaagtcatgttttgagttcctagaaggcccaggactcacacaggtcaccgaggaagaaaaacaatatctgaatcttrtggttagaaagattagagagaggccgggcgctgtggctcccacctggaatcccagcactttgggaggcctcaggcggatcacctgaggtcaggtgttcca

SEQ ID NO: 23877 - DNA, 119 bp, Homo sapiens; identical to SEQ ID NO: 23777

SEQ ID NO: 23878 - DNA, 178 bp, Homo sapiens; identical to SEQ ID NO: 23779

SEQ ID NO: 23879 - DNA, 144 bp, Homo sapiens; identical to SEQ ID NO: 23781

SEQ ID NO: 23880 - DNA, 201 bp, Homo sapiens; identical to SEQ ID NO: 23780

SEQ ID NO: 23881 - DNA, 201 bp, Homo sapiens; identical to SEQ ID NO: 23771

SEQ ID NO: 23882 - DNA, 201 bp, Homo sapiens; identical to SEQ ID NO: 23772

SEQ ID NO: 23883 - DNA, 201 bp, Homo sapiens; identical to SEQ ID NO: 23773

SEQ ID NO: 23884 - DNA, 201 bp, Homo sapiens; identical to SEQ ID NO: 23774

SEQ ID NO: 23885 - DNA, 201 bp, Homo sapiens; identical to SEQ ID NO: 23775

SEQ ID NO: 23886 - DNA, 201 bp, Homo sapiens
cttggcctcccaaaattttgcagccatcggccccactacggctcgcgcgctggccgcccagggccttcctgtaagctgcactgcagagagccccacgccayaagccctggccactggcatcaggaaggctctccagccccatggctgctgctgagtcagccacctagcgctggccccatgcagcctccctgggctgggctg

SEQ ID NO: 23887 - DNA, 201 bp, Homo sapiens; identical to SEQ ID NO: 23806

SEQ ID NO: 23888 - DNA, 201 bp, Homo sapiens; identical to SEQ ID NO: 23791

SEQ ID NO: 23889 - DNA, 190 bp, Homo sapiens; identical to SEQ ID NO: 23778

SEQ ID NO: 23890 - DNA, 201 bp, Homo sapiens
accttggcctcccaaaattttgcagccatcggccccactacggctcgcgcgctggccgcccagggccttcctgtaagctgcactgcagagagccccacgcmacaagccctggccactggcatcaggaaggctctccagccccatggctgctgctgagtcagccacctagcgctggccccatgcagcctccctgggctgggc

SEQ ID NO: 23891 - DNA, 201 bp, Homo sapiens
gctcaaggacaaagggattgccatggaaagcataactgtgtatcagacagttgcacacccaggaatccaagggaacctgaacagctactattcccagcagdgggttccagccagcatcacattttttagtccctctggcctcacatacagtctcaagcacattcaggagttatctggtgacaatatcgatcaaattaagag

SEQ ID NO: 23892 - DNA, 180 bp, Homo sapiens; identical to SEQ ID NO: 23770

SEQ ID NO: 23893 - DNA, 201 bp, Homo sapiens; identical to SEQ ID NO: 23795

SEQ ID NO: 23894 - DNA, 119 bp, Homo sapiens; identical to SEQ ID NO: 23777

SEQ ID NO: 23895 - DNA, 178 bp, Homo sapiens; identical to SEQ ID NO: 23779

SEQ ID NO: 23896 - DNA, 144 bp, Homo sapiens; identical to SEQ ID NO: 23781

SEQ ID NO: 23897 - DNA, 201 bp, Homo sapiens; identical to SEQ ID NO: 23780

SEQ ID NO: 23898 - DNA, 201 bp, Homo sapiens
ggtgcccagggcagagcaggctttgttcgcacctcatctgctgcagaaccacatcctgaggagtctcagcttatcctggagggaattgggaacagtgtcamtgggaagtgaaggcctagccctgtggcttccaccagtctcctcctgcagtgccacgtggtggcatttctcgcctcacaccaagaagcagcaagtggaaaa

SEQ ID NO: 23899 - DNA, 201 bp, Homo sapiens
gtgccacgtggtggcatttctcgcctcacaccaagaagcagcaagtggaaaatttcaggatacaaagcacataacaccccataagagatgattatgttttyagaagcaagagcaaaattatgaaacctctagagatttgggtcatgttactccatttgatgaagattctcactaccgcccgctcctcccataggagcctac

SEQ ID NO: 23900 - DNA, 201 bp, Homo sapiens
cctgtcggtgatgacttgttccactggcaggccaccatcatgggcccgaatgacagtccttaccaaggaggtgttttcttcctgaccatccactttcctayagattacccgttcaagcccccaaaggttgctttcacaaccaaaatttatcaccctaatatcaacagcaatggcagcatctgccttgatatcctgcggtct

SEQ ID NO: 23901 - DNA, 201 bp, Homo sapiens
caagagaagctggcagagaggtcttcccttaaaactttgggctgttggctgagccattcaaagagcatcatctgttcttcaaacaaatgttggtcacccastctctccagctgcagcatgttggtgccattttcagcaattacggctttgacagtgccacctctttgatgccaaatcagcaaccattgttgttatgatctg

SEQ ID NO: 23902 - DNA, 201 bp, Homo sapiens
agagggatcctcctgcccagtgttctgcaggacctgtcggtgatgactaatgacagtccttaccaaggaggtgttttcttcctgaccatccactttcctayagattacccgttcaagcccccaaagagtttcgctcttgttgcccaggatggagtgcaatggcgtgatctcggctcaccgcaacatccacctcccaggttc

SEQ ID NO: 23903 - DNA, 201 bp, Homo sapiens
gcgtgtgaacgtatgcacagacatctacatggaaatggctgtaacgcatccagccataaggcgtacgagggtatatatacttacagagttaagaaccactrttctcaggagttatatgacagcctgggaagacgcccaggatgtaggaacagggagcaggcgagcgtgtggcaccttgagggtgctccgcgcgtctccgta

SEQ ID NO: 23904 - DNA, 201 bp, Homo sapiens; identical to SEQ ID NO: 23898

SEQ ID NO: 23905 - DNA, 201 bp, Homo sapiens; identical to SEQ ID NO: 23899

SEQ ID NO: 23906 - DNA, 201 bp, Homo sapiens
agagggatcctcctgcccagtgttctgcaggacctgtcggtgatgactaatgacagtccttaccaaggaggtgttttcttcctgaccatccactttcctayagattacccgttcaagcccccaaaggttgctttcacaaccaaaatttatcaccctaatatcaacagcaatggcagcatctgccttgatatcctgcggtct

SEQ ID NO: 23907 - DNA, 201 bp, Homo sapiens; identical to SEQ ID NO: 23903

SEQ ID NO: 23908 - DNA, 201 bp, Homo sapiens; identical to SEQ ID NO: 23901

SEQ ID NO: 23909 - DNA, 185 bp, Homo sapiens
ttgttcgcacctcatctgctgcagaaccacatcctgaggagtctcagcttatctcgtcatgctgccggctcttggactggtcgggctgcagccggaaccarccctcctcctgctgcgccacccgcagtctctggacatcgatcaccactttgcccaggaagtcgtttcggctgacaaggtcccag

SEQ ID NO: 23910 - DNA, 201 bp, Homo sapiens; identical to SEQ ID NO: 23900

SEQ ID NO: 23911 - DNA, 201 bp, Homo sapiens; identical to SEQ ID NO: 23903

SEQ ID NO: 23912 - DNA, 170 bp, Homo sapiens
ctgctgcagaaccacatcctgaggagtctcagcttatctcgtcatgctgccggctcttggactggtcgggctgcagccggaaccagccctcctcctgctgygccacccgcagtctctggacatcgatcaccactttgcccaggaagtcgtttcggctgacaaggtcccag

SEQ ID NO: 23913 - DNA, 201 bp, Homo sapiens; identical to SEQ ID NO: 23901

SEQ ID NO: 23914 - DNA, 201 bp, Homo sapiens; identical to SEQ ID NO: 23898

SEQ ID NO: 23915 - DNA, 201 bp, Homo sapiens; identical to SEQ ID NO: 23899

SEQ ID NO: 23916 - DNA, 201 bp, Homo sapiens
cctgtcggtgatgacttgttccactggcaggccaccatcatgggcccgaatgacagtccttaccaaggaggtgttttcttcctgaccatccactttcctayagattacccgttcaagcccccaaagagtttcgctcttgttgcccaggatggagtgcaatggcgtgatctcggctcaccgcaacatccacctcccaggttg

SEQ ID NO: 23917 - DNA, 201 bp, Homo sapiens; identical to SEQ ID NO: 23903

SEQ ID NO: 23918 - DNA, 201 bp, Homo sapiens; identical to SEQ ID NO: 23901

SEQ ID NO: 23919 - DNA, 201 bp, Homo sapiens; identical to SEQ ID NO: 23898

SEQ ID NO: 23920 - DNA, 201 bp, Homo sapiens; identical to SEQ ID NO: 23899

SEQ ID NO: 23921 - DNA, 201 bp, Homo sapiens; identical to SEQ ID NO: 23903

SEQ ID NO: 23922 - DNA, 201 bp, Homo sapiens; identical to SEQ ID NO: 23901

SEQ ID NO: 23923 - DNA, 201 bp, Homo sapiens; identical to SEQ ID NO: 23898

SEQ ID NO: 23924 - DNA, 201 bp, Homo sapiens; identical to SEQ ID NO: 23899

SEQ ID NO: 23925 - DNA, 201 bp, Homo sapiens; identical to SEQ ID NO: 23900

SEQ ID NO: 23926 - DNA, 201 bp, Homo sapiens; identical to SEQ ID NO: 23903

SEQ ID NO: 23927 - DNA, 201 bp, Homo sapiens; identical to SEQ ID NO: 23901

SEQ ID NO: 23928 - DNA, 201 bp, Homo sapiens
gattttctttacataaagtgaatcaaatttgacattattttagatcccagagaaatcaggtgtgattagttctccaggcatgaatgcatcgtccctttatytgtaagaacccttagtgtcctgtagggggacagaatggggtggccaggtggtgatttctctttgaccaatgcatagtttggcagaaaaatcagccgttca

SEQ ID NO: 23929 - DNA, 201 bp, Homo sapiens
cagtatttgattaccagctctacttccaagaaccaggagtggctgaggctgaactggaacagaacctgagtcggactttcaaaagcctcttcagagcaagygatgagagtgttttatccatgcataaagtctgtgaagcgggaggactttttgtaaatagcccagaagagcccagcctcagcaggatggtcactgaggagg

SEQ ID NO: 23930 - DNA, 201 bp, Homo sapiens
agatgtagaacgcagcgtgtgcccacgctcagcaggtgtgccatccttccacctgctggggcaccattcttagtatacagaggtggccttacacacatctygcatggatggcagcattgttctgaaggggtttgcagaaaaaaaagattttctttacataaagtgaatcaaatttgacattattttagatcccagagaaat

SEQ ID NO: 23931 - DNA, 201 bp, Homo sapiens
agatctacaagtttctgctggacaccctgaaggccagccccagtgaggtcgtttttttggatgacatcggggctaatctgaagccagcccgtgacttgggmatggtcaccatcctggtccaggacactgacacggccctgaaagaactggagaaagtgaccggaatccagaaatagaagaatattgcatggaagtgttatg

SEQ ID NO: 23932 - DNA, 201 bp, Homo sapiens
aatcagatcctcattaagtggctggattctgatgcccggaacccaccggtggtctcaaagatgtagaacgcagcgtgtgcccacgctcagcaggtgtgccrtccttccacctgctggggcaccattcttagtatacagaggtggccttacacacatcttgcatggatggcagcattgttctgaaggggtttgcagaaaaaa

SEQ ID NO: 23933 - DNA, 201 bp, Homo sapiens
agctgcgtgtccgggtgctaggctgcagacccgccgccatgacgctgcgcgcggccgtcttcgaccttgacggggtgctggcgctgccagcggtgttcggmgtcctcggccgcacggaggaggccctggcgctgcccagaggacttctgaatgatgctttccagaaagggggaccagagggtgccactacccggcttatga

SEQ ID NO: 23934 - DNA, 201 bp, Homo sapiens
gccactcatgtcactcacctctgccttcgagttggctgggtaggtgcagacaagtgtgaatggctatttttttcttttacttctccctttcccccaggccmaccgaggtgaatcagatcctcattaagtggctggattctgatgcccggaacccaccggtggtctcaaagatgtagaacgcagcgtgtgcccacgctcagc

SEQ ID NO: 23935 - DNA, 201 bp, Homo sapiens
tggctgaggctgaactggaacagaacctgagtcggactttcaaaagcctcttcagagcaagcgatgagagtgttttatccatgcataaagtctgtgaagcrggaggactttttgtaaatagcccagaagagcccagcctcagcaggatggtcactgaggaggaaatccagttctatgtgcagcagttcaagaagtctggtt

SEQ ID NO: 23936 - DNA, 201 bp, Homo sapiens
gcacatggaggactggattccccacctgaaaaggggacacattgaggactgtgggcactggacacagatggacaagtaaggaggttgggggctcctggggwcggggagagcagggccccccgttcaccttccataaaagctttcctggtttcattgtgctggctttggcctggcttagccactcatgtcactcacctctgc

SEQ ID NO: 23937 - DNA, 201 bp, Homo sapiens; identical to SEQ ID NO: 23928

SEQ ID NO: 23938 - DNA, 201 bp, Homo sapiens; identical to SEQ ID NO: 23929

SEQ ID NO: 23939 - DNA, 201 bp, Homo sapiens; identical to SEQ ID NO: 23930

SEQ ID NO: 23940 - DNA, 201 bp, Homo sapiens
agatctacaagtttctgctggacaccctgaaggccagccccagtgaggtcgtttttttggatgacatcggggctaatctgaagccagcccgtgacttgggmatggtcaccatcctggtccaggacactgacacggccctgaaagaactggagaaagtgaccggaatccagcttctcaataccccggcccctctgccgacct

SEQ ID NO: 23941 - DNA, 201 bp, Homo sapiens; identical to SEQ ID NO: 23932

SEQ ID NO: 23942 - DNA, 201 bp, Homo sapiens
tgctcgttcctcagatgtcccagcacatggaggactggattccccacctgaaaaggggacacattgaggactgtgggcactggacacagatggacaagccmaccgaggtgaatcagatcctcattaagtggctggattctgatgcccggaacccaccggtggtctcaaagatgtagaacgcagcgtgtgcccacgctcagc

SEQ ID NO: 23943 - DNA, 201 bp, Homo sapiens
agctgcgtgtccgggtgctaggctgcagacccgccgccatgacgctgcgcgcggccgtcttcgaccttgacggggtgctggcgctgccagcggtgttcggmgtcctcggccgcacggaggaggccctggcgctgcccagctctggaggctggaagtccaagatcaagatgtcagcaggaggacttctgaatgatgctttcc

SEQ ID NO: 23944 - DNA, 201 bp, Homo sapiens; identical to SEQ ID NO: 23935

SEQ ID NO: 23945 - DNA, 201 bp, Homo sapiens
tgagccatgggtacgtgacagtaaagcccagggtccgtctgcattttgtggagctgggctccggccctgctgtgtgcctctgccatggatttcccgagagktggtattcttggaggtaccagatccctgctctggcccaggcaggttaccgggtcctagctatggacatgaaaggctatggagagtcatctgctcctcccg

SEQ ID NO: 23946 - DNA, 201 bp, Homo sapiens
gagctgggctccggccctgctgtgtgcctctgccatggatttcccgagagttggtattcttggaggtaccagatccctgctctggcccaggcaggttaccrggtcctagctatggacatgaaaggctatggagagtcatctgctcctcccgaaatagaagaatattgcatggaagtgttatgtaaggagatggtaaccttc

SEQ ID NO: 23947 - DNA, 201 bp, Homo sapiens; identical to SEQ ID NO: 23928

SEQ ID NO: 23948 - DNA, 201 bp, Homo sapiens; identical to SEQ ID NO: 23929

SEQ ID NO: 23949 - DNA, 201 bp, Homo sapiens; identical to SEQ ID NO: 23930

SEQ ID NO: 23950 - DNA, 201 bp, Homo sapiens; identical to SEQ ID NO: 23940

SEQ ID NO: 23951 - DNA, 201 bp, Homo sapiens; identical to SEQ ID NO: 23932

SEQ ID NO: 23952 - DNA, 201 bp, Homo sapiens; identical to SEQ ID NO: 23942

SEQ ID NO: 23953 - DNA, 201 bp, Homo sapiens; identical to SEQ ID NO: 23933

SEQ ID NO: 23954 - DNA, 201 bp, Homo sapiens; identical to SEQ ID NO: 23935

SEQ ID NO: 23955 - DNA, 201 bp, Homo sapiens; identical to SEQ ID NO: 23945

SEQ ID NO: 23956 - DNA, 201 bp, Homo sapiens; identical to SEQ ID NO: 23946

SEQ ID NO: 23957 - DNA, 201 bp, Homo sapiens
taaagcatattggtgctagaaaaggcagctaaaggaagtgaatctgtattggggtacaggaatgaaccttctgcaacatcttaagatccacaaatgaaggratataaaaataatgtcatagataagaaacacagcaacaatgacttaaccatataaatgtggaggctatcaacaaagaatgggcttgaaacattataaaaa

SEQ ID NO: 23958 - DNA, 201 bp, Homo sapiens
aaagcataaaaaccattacaagatacacaatctttgtgctgaaagacattatgacaccgccaaatctaattacagagttgcgcaatatccttttgaagacyataacccaccacagctagaacttatcaaacccttttgtgaagatcttgaccaatggctaagtgaagatgacaatcatgttgcagcaattcactgtaaagc

SEQ ID NO: 23959 - DNA, 201 bp, Homo sapiens
ccattacaagatacacaatctttgtgctgaaagacattatgacaccgccaaatctaattacagagttgcgcaatatccttttgaagaccataacccaccayagctagaacttatcaaacccttttgtgaagatcttgaccaatggctaagtgaagatgacaatcatgttgcagcaattcactgtaaagctggaaagggacg

SEQ ID NO: 23960 - DNA, 201 bp, Homo sapiens
atagctacctggtaaagaatcatgtggattatagaccagtggcactgttgtttcacaagatgatgtttgaaactattccaatgttcagtggcggaacttgmaatcctcagtttgtggtctgccagctaaaggtgaagatgtattcctccaattcaggacccacacgatgggaggacaagttcatgtattttgagttccctc

SEQ ID NO: 23961 - DNA, 201 bp, Homo sapiens
ttttaaaggcacaagaggccctagatttctatggggaagtaaggaccagagacaaaaagggagtaactattcccagtcagaggcgctatgtgtattactakagctacctggtaaagaatcatgtggattatagaccagtggcactgttgtttcacaagatgatgtttgaaactattccaatgttcagtggcggaacttgca

SEQ ID NO: 23962 - DNA, 201 bp, Homo sapiens
agtaaggtttttggattcaaagcataaaaaccattacaagatacacaatctttgtgctgaaagacattatgacaccgccaaatctaattacagagttgcgyaatatccttttgaagaccataacccaccacagctagaacttatcaaacccttttgtgaagatcttgaccaatggctaagtgaagatgacaatcatgttgc

SEQ ID NO: 23963 - DNA, 201 bp, Homo sapiens
ctcctttttcttcagccacaggctcccagacaggacagccatcatcaaagagatcgttagcagaaacaaaaggagatatcaagaggatggattcgacttakacttgacctatatttatctaaacattattgctatgggatttcctgcagaaagacttgaaggcgtatacaggaacaatattgatgatgtagtaaggttttt

SEQ ID NO: 23964 - DNA, 201 bp, Homo sapiens
tatttatctaaacattattgctatgggatttcctgcagaaagacttgaaggcgtatacaggaacaatattgatgatgtagtaaggtttttggattcaaagsataaaaaccattacaagatacacaatctttgtgctgaaagacattatgacaccgccaaatctaattacagagttgcgcaatatccttttgaagaccataa

SEQ ID NO: 23965 - DNA, 201 bp, Homo sapiens
ggtataatgatttatgcatatttattacatcggggcaaatttttaaaggcacaagaggccctagatttctatggggaagtaaggaccagagacaaaaaggdagtaactattcccagtcagaggcgctatgtgtattactatagctacctggtaaagaatcatgtggattatagaccagtggcactgttgtttcacaagatg

SEQ ID NO: 23966 - DNA, 201 bp, Homo sapiens
agccatcatcaaagagatcgttagcagaaacaaaaggagatatcaagaggatggattcgacttagacttgacctatatttatctaaacattattgctatgrgatttcctgcagaaagacttgaaggcgtatacaggaacaatattgatgatgtagtaaggtttttggattcaaagcataaaaaccattacaagatacacaa

SEQ ID NO: 23967 - DNA, 201 bp, Homo sapiens
taaagctggaaagggacgaactggtataatgatttatgcatatttattacatcggggcaaatttttaaaggcacaagaggccctagatttctatggggaartaaggaccagagacaaaaagggagtaactattcccagtcagaggcgctatgtgtattactatagctacctggtaaagaatcatgtggattatagaccagt

SEQ ID NO: 23968 - DNA, 201 bp, Homo sapiens
tagcatttgcagtatagagcgtgcagataatgacaaggagtatctagtacttactttaacaaaaaatgatcttgacaaagcaaataaagacaaagccaacygatacttttctccaaattttaaggtgaagctgtacttcacaaaaacagtagaggagccgtcaaatccagaggctagcagttcaacttctgtaacaccaga

SEQ ID NO: 23969 - DNA, 201 bp, Homo sapiens
aaccattacaagatacacaatctttgtgctgaaagacattatgacaccgccaaatctaattacagagttgcgcaatatccttttgaagaccataacccacmacagctagaacttatcaaacccttttgtgaagatcttgaccaatggctaagtgaagatgacaatcatgttgcagcaattcactgtaaagctggaaaggga

SEQ ID NO: 23970 - DNA, 201 bp, Homo sapiens
atacaggaacaatattgatgatgtagtaaggtttttggattcaaagcataaaaaccattacaagatacacaatctttgtgctgaaagacattatgacaccrccaaatctaattacagagttgcgcaatatccttttgaagaccataacccaccacagctagaacttatcaaacccttttgtgaagatcttgaccaatggct

SEQ ID NO: 23971 - DNA, 201 bp, Homo sapiens
aatattgatgatgtagtaaggtttttggattcaaagcataaaaaccattacaagatacacaatctttgtgctgaaagacattatgacaccgccaaatctamttacagagttgcgcaatatccttttgaagaccataacccaccacagctagaacttatcaaacccttttgtgaagatcttgaccaatggctaagtgaagat

SEQ ID NO: 23972 - DNA, 201 bp, Homo sapiens
gctgcagccgtgatggaagtttgaatgttgagccgctgtgaggcgaggccgggctcaggcgagggagatgagagacagagacggcggcggcggcggcggcycggcccggcccggcctgaagcccctctcagcaacccgtgagcatccgcgggggcggcgccggcagcggcggcgtttctcgcttcttcttcgtcttttcta

SEQ ID NO: 23973 - DNA, 201 bp, Homo sapiens
gcggcggcgcccccggtggccccggcggctgcagctccagggagggggtctgagtcgcctgtcaccatttccagggctgggaacgccggagagttggtctytccccttctactgcctccaacacggcggcggcggcggcggcggcggcggcacatggagggacccgggccggttttaaacctctcgtccgccgccgccgca

SEQ ID NO: 23974 - DNA, 201 bp, Homo sapiens
atatttattacatcggggcaaatttttaaaggcacaagaggccctagatttctatggggaagtaaggaccagagacaaaaagggagtaactattcccagtyagaggcgctatgtgtattactatagctacctggtaaagaatcatgtggattatagaccagtggcactgttgtttcacaagatgatgtttgaaactattcc

SEQ ID NO: 23975 - DNA, 201 bp, Homo sapiens
aggcacaagaggccctagatttctatggggaagtaaggaccagagacaaaaagggagtaactattcccagtcagaggcgctatgtgtattactatagctamctggtaaagaatcatgtggattatagaccagtggcactgttgtttcacaagatgatgtttgaaactattccaatgttcagtggcggaacttgcaatcctc

SEQ ID NO: 23976 - DNA, 201 bp, Homo sapiens
agatttctatggggaagtaaggaccagagacaaaaagggagtaactattcccagtcagaggcgctatgtgtattactatagctacctggtaaagaatcatstggattatagaccagtggcactgttgtttcacaagatgatgtttgaaactattccaatgttcagtggcggaacttgcaatcctcagtttgtggtctgcca

SEQ ID NO: 23977 - DNA, 201 bp, Homo sapiens
tcctcctttttcttcagccacaggctcccagacaggacagccatcatcaaagagatcgttagcagaaacaaaaggagatatcaagaggatggattcgactwagacttgacctatatttatctaaacattattgctatgggatttcctgcagaaagacttgaaggcgtatacaggaacaatattgatgatgtagtaaggttt

SEQ ID NO: 23978 - DNA, 201 bp, Homo sapiens
gcgtgcagataatgacaaggagtatctagtacttactttaacaaaaaatgatcttgacaaagcaaataaagacaaagccaaccgatacttttctccaaatkttaaggtgaagctgtacttcacaaaaacagtagaggagccgtcaaatccagaggctagcagttcaacttctgtaacaccagatgttagtgacaatgaacc

SEQ ID NO: 23979 - DNA, 201 bp, Homo sapiens
aaagtggagacagactggtgtgtatacgtaggaattttttccttttgtgttctgtcaccaactgaagtggctaaagagctttgtgatatactggttcacakcatacccctttgcacttgtggcaacagataagtttgcagttagctaagagaagtttctgaagggttttgctgcattcttgcatgtatttgggttagggga

SEQ ID NO: 23980 - DNA, 201 bp, Homo sapiens
tatgggatttcctgcagaaagacttgaaggcgtatacaggaacaatattgatgatgtagtaaggtttttggattcaaagcataaaaaccattacaagatayacaatctttgtgctgaaagacattatgacaccgccaaatctaattacagagttgcgcaatatccttttgaagaccataacccaccacagctagaacttat

SEQ ID NO: 23981 - DNA, 201 bp, Homo sapiens
gaagatgtattcctccaattcaggacccacacgatgggaggacaagttcatgtattttgagttccctcagccgttacctgtgtgtggtgatatcaaagtakagttcttccacaaacagaacaagatgctaaaaaaggacaaaatgtttcacttttgggtaaatacattcttcataccaggaccagaggaaacctcagaaaa

SEQ ID NO: 23982 - DNA, 201 bp, Homo sapiens
acagccatcatcaaagagatcgttagcagaaacaaaaggagatatcaagaggatggattcgacttagacttgacctatatttatctaaacattattgctabgggatttcctgcagaaagacttgaaggcgtatacaggaacaatattgatgatgtagtaaggtttttggattcaaagcataaaaaccattacaagatacac

SEQ ID NO: 23983 - DNA, 201 bp, Homo sapiens
ctgtaaagctggaaagggacgaactggtataatgatttatgcatatttattacatcggggcaaatttttaaaggcacaagaggccctagatttctatgggkaagtaaggaccagagacaaaaagggagtaactattcccagtcagaggcgctatgtgtattactatagctacctggtaaagaatcatgtggattatagacc

SEQ ID NO: 23984 - DNA, 201 bp, Homo sapiens
gataatgacaaggagtatctagtacttactttaacaaaaaatgatcttgacaaagcaaataaagacaaagccaaccgatacttttctccaaattttaaggwgaagctgtacttcacaaaaacagtagaggagccgtcaaatccagaggctagcagttcaacttctgtaacaccagatgttagtgacaatgaacctgatcat

SEQ ID NO: 23985 - DNA, 201 bp, Homo sapiens
aggacagccatcatcaaagagatcgttagcagaaacaaaaggagatatcaagaggatggattcgacttagacttgacctatatttatctaaacattattgmtatgggatttcctgcagaaagacttgaaggcgtatacaggaacaatattgatgatgtagtaaggtttttggattcaaagcataaaaaccattacaagata

SEQ ID NO: 23986 - DNA, 201 bp, Homo sapiens
catatttattacatcggggcaaatttttaaaggcacaagaggccctagatttctatggggaagtaaggaccagagacaaaaagggagtaactattcccagwcagaggcgctatgtgtattactatagctacctggtaaagaatcatgtggattatagaccagtggcactgttgtttcacaagatgatgtttgaaactattc

SEQ ID NO: 23987 - DNA, 201 bp, Homo sapiens
tgaagtggctaaagagctttgtgatatactggttcacatcatacccctttgcacttgtggcaacagataagtttgcagttagctaagagaagtttctgaarggttttgctgcattcttgcatgtatttgggttaggggaatggagggaatgctcagaaaggaaataattttatgctggactctggaccatataccatctcc

SEQ ID NO: 23988 - DNA, 201 bp, Homo sapiens
ggagtatctagtacttactttaacaaaaaatgatcttgacaaagcaaataaagacaaagccaaccgatacttttctccaaattttaaggtgaagctgtacytcacaaaaacagtagaggagccgtcaaatccagaggctagcagttcaacttctgtaacaccagatgttagtgacaatgaacctgatcattatagatattc

SEQ ID NO: 23989 - DNA, 201 bp, Homo sapiens
gctatgggatttcctgcagaaagacttgaaggcgtatacaggaacaatattgatgatgtagtaaggtttttggattcaaagcataaaaaccattacaagakacacaatctttgtgctgaaagacattatgacaccgccaaatctaattacagagttgcgcaatatccttttgaagaccataacccaccacagctagaactt

SEQ ID NO: 23990 - DNA, 201 bp, Homo sapiens
catataccatctccagctatttacacacacctttctttagcatgctacagttattaatctggacattcgaggaattggctgctgtcactgcttgttgtttkcgcattttttttaaagcatattggtgctagaaaaggcagctaaaggaagtgaatctgtattggggtacaggaatgaaccttctgcaacatcttaagatcc

SEQ ID NO: 23991 - DNA, 201 bp, Homo sapiens
tgacaccgccaaatctaattacagagttgcgcaatatccttttgaagaccataacccaccacagctagaacttatcaaacccttttgtgaagatcttgacyaatggctaagtgaagatgacaatcatgttgcagcaattcactgtaaagctggaaagggacgaactggtataatgatttatgcatatttattacatcgggg

SEQ ID NO: 23992 - DNA, 201 bp, Homo sapiens
ccagctatttacacacacctttctttagcatgctacagttattaatctggacattcgaggaattggctgctgtcactgcttgttgttttcgcatttttttwaaagcatattggtgctagaaaaggcagctaaaggaagtgaatctgtattggggtacaggaatgaaccttctgcaacatcttaagatccacaaatgaaggg

SEQ ID NO: 23993 - DNA, 201 bp, Homo sapiens
gtgtattactatagctacctggtaaagaatcatgtggattatagaccagtggcactgttgtttcacaagatgatgtttgaaactattccaatgttcagtgkcggaacttgcaatcctcagtttgtggtctgccagctaaaggtgaagatgtattcctccaattcaggacccacacgatgggaggacaagttcatgtatttt

SEQ ID NO: 23994 - DNA, 201 bp, Homo sapiens
cctggtaaagaatcatgtggattatagaccagtggcactgttgtttcacaagatgatgtttgaaactattccaatgttcagtggcggaacttgcaatcctyagtttgtggtctgccagctaaaggtgaagatgtattcctccaattcaggacccacacgatgggaggacaagttcatgtattttgagttccctcagccgtt

SEQ ID NO: 23995 - DNA, 201 bp, Homo sapiens
gcaaatttttaaaggcacaagaggccctagatttctatggggaagtaaggaccagagacaaaaagggagtaactattcccagtcagaggcgctatgtgtaktactatagctacctggtaaagaatcatgtggattatagaccagtggcactgttgtttcacaagatgatgtttgaaactattccaatgttcagtggcggaa

SEQ ID NO: 23996 - DNA, 201 bp, Homo sapiens
gcatgctacagttattaatctggacattcgaggaattggctgctgtcactgcttgttgttttcgcattttttttaaagcatattggtgctagaaaaggcarctaaaggaagtgaatctgtattggggtacaggaatgaaccttctgcaacatcttaagatccacaaatgaagggatataaaaataatgtcatagataagaa

SEQ ID NO: 23997 - DNA, 201 bp, Homo sapiens
cctaaatgccgggattacaggcatgagccaccgctcccagcctttgattttttaaggtggattttggttgttataaatggagaaaggtaagagttcaagtwcaacccgtgtgtgaaagcaaaacaatggaaaacaggattggcttcttcaaaggctcctcttgtagaactgcctctttgaaatttcgaggtaatctacttt

SEQ ID NO: 23998 - DNA, 201 bp, Homo sapiens
ttggaatccaagaaattcatcacaaagtacggccataccaggttgaattggtaaggagagattatgttgcaaatggtggctgggaaacattcttgtcataygaagacccagatcaagacattttgattggcctcctacgattacgcaagtgaagcagaaagaatagctagagaagaacatgggtctgggaaaatcgctgtg

SEQ ID NO: 23999 - DNA, 201 bp, Homo sapiens
tgactataggagatgttattaaacaactgattgaagcccacgagcaggggaaagacatcgatctaaataaggtgaaaaccaagacagctgccaaatatggmctttctgcccagccccgcctggtggatatcattgctgccgtccctcctcagtatcgcaaggtcttgatgcccaagttaaaggcgaaacccatcagaactg

SEQ ID NO: 24000 - DNA, 144 bp, Homo sapiens
acattttacgacaggcgggattgttttgtggctgtcagctttcyccgtggtctgagtttgtggctgcatttttatctctggtggctctgctacggcggcgcagaaatgaggcagaagcggaaaggagatctcagccctgctgag

SEQ ID NO: 24001 - DNA, 201 bp, Homo sapiens
gaggctgagcagagcaaatggggggcttcaccctcatcccgcagctgcagagactggaaactgccttcaaggccacggctggtcatctgctgaccacaccscagatccgccctctcctgcgtgcaccccaaaaaatcacttgcgtttttgaggcttaaatcatctatccagtttctacattttgcatgaggcctgcaggtg

SEQ ID NO: 24002 - DNA, 201 bp, Homo sapiens
ttccacagaagccattacttgcaattttttttttttttctgagaaagtctcgctgtgtcacccaggctggagtgcagtggcgcaatctcactgcatcctcygcctcccgggttcaagcgattctcccgcctcagcctcctgagtagctgggattacaggcacccgccgctgctaatttttgtatttttagtagagatgggg

SEQ ID NO: 24003 - DNA, 201 bp, Homo sapiens; identical to SEQ ID NO: 23997

SEQ ID NO: 24004 - DNA, 201 bp, Homo sapiens
ttggaatccaagaaattcatcacaaagtacggccataccaggttgaattggtaaggagagattatgttgcaaatggtggctgggaaacattcttgtcataygaagacccagatcaagacattttgattggcctcctacgattacgcaagtgttcagaagaaactttccgtttcgaattgggtggaggtgtctccatagtac

SEQ ID NO: 24005 - DNA, 201 bp, Homo sapiens; identical to SEQ ID NO: 23999

SEQ ID NO: 24006 - DNA, 144 bp, Homo sapiens; identical to SEQ ID NO: 24000

SEQ ID NO: 24007 - DNA, 201 bp, Homo sapiens; identical to SEQ ID NO: 24001

SEQ ID NO: 24008 - DNA, 201 bp, Homo sapiens; identical to SEQ ID NO: 24002

SEQ ID NO: 24009 - DNA, 201 bp, Homo sapiens
ggtctcaaggtctgaagcatcccacagaatgatcctactgaataactcccataagctgctggccctatacaaatccttggccaggagcatccctgagtccytgaaggtgtatggctctgtgtatcacatcaatcacgggaaccccttcaacatggaggtgctggtggattcctggcctgaatatcagatggttattatccg

SEQ ID NO: 24010 - DNA, 201 bp, Homo sapiens
taaacctaatctgtatggatactttatcaaaaatgaatgtccctgctatttctggatttatgaggcaatggtacactaaagaatggaatcagttcagtgartagaaaggtatccaaggtgaagcctgagacgaatggctttcccaggctaccttccatcactgttgtacagaaaagaaatccagagaatcaaatggactgg

SEQ ID NO: 24011 - DNA, 201 bp, Homo sapiens
tagagagtgagtagaagtgagccagacaaaaaaagcagaaaatgcagatgatggaaaggacatgtgccatgcactatcataagaacttcctaactgaacaytgatactacaattctgaatccctgatcttaaaaaataattatacttcaccaacaaaacttggcctcttttggttccactctgccaccctgccattggaac

SEQ ID NO: 24012 - DNA, 201 bp, Homo sapiens
acaactggaagcgagggaagaatgagaggagcctgcattacatcaagcgctgcatagaagacctgccagcagcctgtatgctcggcccagagggagtcccrgtctcatgggtaaccatggacccttcttgtgaagtaggaatggcctacagcatggaaaaataccgaaggacaggcaacatggcacgagtgatggtgcgat

SEQ ID NO: 24013 - DNA, 201 bp, Homo sapiens
cctggcctgaatatcagatggttattatccggcctcaaaagcaggagatgactgatgacatggattcatacacaaacgtatatcgtatgttctccaaagascctcaaaaatcagaagaagttttgaaaaattgtgagatcgtaaactggaaacagagactccaaatccaaggtcttcaagaaagtttaggtgaggggataa

SEQ ID NO: 24014 - DNA, 201 bp, Homo sapiens
aagaaatccagagaatcaaatggactggccttgggggtctctgctatggaaatgccattttttgtgtctcctttctcctactctttctcacatcctcttcrtgattgaagcatggcacaaggcaaggtgttgcctgcgagtctggttgtaagttcagcctttggtgtttgcactactgctatcataaggggtcagggacat

SEQ ID NO: 24015 - DNA, 201 bp, Homo sapiens; identical to SEQ ID NO: 24010

SEQ ID NO: 24016 - DNA, 201 bp, Homo sapiens; identical to SEQ ID NO: 24011

SEQ ID NO: 24017 - DNA, 201 bp, Homo sapiens; identical to SEQ ID NO: 24012

SEQ ID NO: 24018 - DNA, 201 bp, Homo sapiens; identical to SEQ ID NO: 24009

SEQ ID NO: 24019 - DNA, 180 bp, Homo sapiens
ctggcaccattctgagtgaatcccaacatttccccgtttttgttttcggtatcatgtctttttgatttcagattgcagawatgtacagccataggattgtcagatggtgtcacaagaaggatctgaagtggagcttctagtatccccaggagcgcgaagtgaacacggaaggtacctgca

SEQ ID NO: 24020 - DNA, 138 bp, Homo sapiens
ctggcaccattctgagtgaatcccaacatttccccgtytttgttttcggtatcatgtctttttgatttcagattgcagatatgtacagccataggattgtcagatggtgtcacaagaaggatctgaagtggagcttct

SEQ ID NO: 24021 - DNA, 201 bp, Homo sapiens; identical to SEQ ID NO: 24013

SEQ ID NO: 24022 - DNA, 201 bp, Homo sapiens; identical to SEQ ID NO: 24014

SEQ ID NO: 24023 - DNA, 201 bp, Homo sapiens
gatcccgagaactgtcaagaatgccttgacatgtcaggtatcatcaactggaaacaacatttgcagatccaaagctcacagtccagactgaatgaggtaawacaaagtcttgtagctgctaaattggtcaaagtcaaaagatcacaatgccagctttatgaaatgcctgagacagcaaagaaactggttccctttctgcta

SEQ ID NO: 24024 - DNA, 167 bp, Homo sapiens
aaacaggagatgacagatgactttgatcactacaccaacagctaccatatctattctaaagatcccragaactgtcaagaatgccttgacatgtcaggtatcatcaactggaaacaacatttgcagatccaaagctcacagtccagactgaatgaggtaatacaaag

SEQ ID NO: 24025 - DNA, 201 bp, Homo sapiens
tccctgaaggtgaaggaacagtgggaggtgtatggctctctgtttcacatcaatcacgggaaccccttcaacatggaggtgttggtggactcctggcccgrgtatcagatggttattatccgacctcaaaaacaggagatgactgatgacatggattcatacactaatgtatatcgtatattctccaaagaccctcaaaaa

SEQ ID NO: 24026 - DNA, 201 bp, Homo sapiens
ctcatcccgccaccgtcgcccaccccgcagctgcagaatggcagcaactgccacacacctaagcaacttggctggctattcgccctgcagctcccgccagygcgctgcccaagctggcaatcaaaagtctgggaaagcgcgaaagcgccacgtgcctcgcactccgcccagctgccgcgcagctcctccctggcttccact

SEQ ID NO: 24027 - DNA, 201 bp, Homo sapiens
ccagaaagaggcaaatttgacttctctgggaacctggacctggaggccttcgtcctgatggccgcagagatcgggctgtgggtgattctgcgtccaggccsctacatctgcagtgagatggacctcgggggcttgcccagctggctcctgcaagacccccggttactgttgaggacaaccaacaagagcttcattgaagca

SEQ ID NO: 24028 - DNA, 201 bp, Homo sapiens
ggaagcccgaggtcggggcgttaccccaagggccctcccgcttcccctccgagggcagagaggcgtccgcgcccggacgcactgcgggaacacctggagcsccggcggagctcggctgtccccgcgggagggagcccgacgcgcatccttgggacccggacccggcgcccgcgcctcgggacggatttctgcctcggctgc

SEQ ID NO: 24029 - DNA, 201 bp, Homo sapiens
ttgagaagtattttgaccacctgattcccagagtgattcctctccagtaccgccaggcaggccctgtcatcgcggtgcaagtggagaatgagtatggctcrttcaataaggataaaacatacatgccgtatctccacaaggccctgctgagaagagggattgtggagcttctcttgacctctgatggtgagaaacatgtgc

SEQ ID NO: 24030 - DNA, 201 bp, Homo sapiens
tggcaaaggcagatattatgctattaactatctgctcctagatgggattgatgatgagtcctatgaggccattttcaaactggtcatgtccaaagtaataragatgttcctgtctagtgtggtgatcttacagcatggctcagatgccttgtctaggggtcacttagattgctttaatctgatcatcaaagggcatgccaa

SEQ ID NO: 24031 - DNA, 201 bp, Homo sapiens
ggacaagcccacccaaggaatcctcactgaatctgcgtgactcataatttgctgctcaactatggtttctactgaaaaatggaaacccatcaccctcacaragccaatgctgaggagatgaccaagtaccacagtgatgactacattaaattcttgtgctccatctatccagattacgtgtctgagcacagcaagcggatg

SEQ ID NO: 24032 - DNA, 124 bp, Homo sapiens
taagtaacatcagccatttttagattggttccattctcataccttctcactggcctcaagtgagccaaaaaactcacactgcctgccatctgtcttccccmagttctgcaggtggaggatggta

SEQ ID NO: 24033 - DNA, 201 bp, Homo sapiens
tctttagatgacgtgatcaaaagagcaaacaatactttctatggcttatcagcaggagtgtttaccaaagacattgataaagccataacaatctcctctgmtctgcaggcaggaacagtgtgggtgaattgctatggcgtggtaagtgcccagtgcccctttggtggattcaagatgtctggaaatggaagagaactggga

SEQ ID NO: 24034 - DNA, 201 bp, Homo sapiens
gaggaggcccgtgggggaataaaggctactttgtccagcccacagtgttctctaatgttacagatgagatgcgcattgccaaagaggagatttttggaccrgtgcagcaaatcatgaagtttaaatctttagatgacgtgatcaaaagagcaaacaatactttctatggcttatcagcaggagtgtttaccaaagacattg

SEQ ID NO: 24035 - DNA, 201 bp, Homo sapiens
ctattatacaagttggctgatttaatcgaaagagatcgtctgctgctggcgacaatggagtcaatgaatggtggaaaactctattccaatgcatatctgartgatttagcaggctgcatcaaaacattgcgctactgtgcaggttgggctgacaagatccagggccgtacaataccaattgatggaaatttttttacatat

SEQ ID NO: 24036 - DNA, 201 bp, Homo sapiens
gtatgatctctctagctttgtcatagttatgtgattttcctttgtagctacttttgcaggataataattttatagaaaaggaacagttgcatttagcttcyttcccttagtgactcttgaagtacttaacatacacgttaactgcagagtaaattgctctgttcccagtagttataaagtccttggactgttttgaaaagt

SEQ ID NO: 24037 - DNA, 201 bp, Homo sapiens
atcctgcaactgaggaggagctctgccaggtagaagaaggagataaggaggatgttgacaaggcagtgaaggccgcaagacaggcttttcagattggatcyccgtggcgtactatggatgcttccgagagggggcgactattatacaagttggctgatttaatcgaaagagatcgtctgctgctggcgacaatggagtcaa

SEQ ID NO: 24038 - DNA, 201 bp, Homo sapiens; identical to SEQ ID NO: 24033

SEQ ID NO: 24039 - DNA, 201 bp, Homo sapiens; identical to SEQ ID NO: 24034

SEQ ID NO: 24040 - DNA, 201 bp, Homo sapiens; identical to SEQ ID NO: 24035

SEQ ID NO: 24041 - DNA, 201 bp, Homo sapiens; identical to SEQ ID NO: 24036

SEQ ID NO: 24042 - DNA, 201 bp, Homo sapiens; identical to SEQ ID NO: 24037

SEQ ID NO: 24043 - DNA, 201 bp, Homo sapiens; identical to SEQ ID NO: 24033

SEQ ID NO: 24044 - DNA, 201 bp, Homo sapiens; identical to SEQ ID NO: 24034

SEQ ID NO: 24045 - DNA, 201 bp, Homo sapiens; identical to SEQ ID NO: 24035

SEQ ID NO: 24046 - DNA, 201 bp, Homo sapiens; identical to SEQ ID NO: 24036

SEQ ID NO: 24047 - DNA, 201 bp, Homo sapiens; identical to SEQ ID NO: 24037

SEQ ID NO: 24048 - DNA, 201 bp, Homo sapiens; identical to SEQ ID NO: 24033

SEQ ID NO: 24049 - DNA, 201 bp, Homo sapiens; identical to SEQ ID NO: 24034

SEQ ID NO: 24050 - DNA, 201 bp, Homo sapiens; identical to SEQ ID NO: 24035

SEQ ID NO: 24051 - DNA, 201 bp, Homo sapiens; identical to SEQ ID NO: 24037

SEQ ID NO: 24052 - DNA, 201 bp, Homo sapiens
gtgggattgttccagattccctaagagacatactttccagatggaaaccagaagatgcaaagaatccccagaaaaacacccccaaatttctttatactgtyccaaatggcaacaaccctactggaaactcattaaccagtgaacgcaaaaaggaaatctatgagcttgcaagaaaatatgatttcctcataatagaagatg

SEQ ID NO: 24053 - DNA, 200 bp, Homo sapiens
tttgagattttaaagaagtaattaagtgcaaaatggtatataatgtgtactttttctacttttaggaaaatttaatgagagcttattgcaaaaattgttataatttggtcattataagtgacttttagtaaaagtaccataaaccttatgttatgccacagaaattcctttaaaataaaattcttaaactaaacatacct

SEQ ID NO: 24054 - DNA, 201 bp, Homo sapiens; identical to SEQ ID NO: 24052

SEQ ID NO: 24055 - DNA, 200 bp, Homo sapiens; identical to SEQ ID NO: 24053

SEQ ID NO: 24056 - DNA, 201 bp, Homo sapiens
aatcaaaatcaatccagaaaaacttatagatgtccagaaaaaattggaatctattttagctcaagatcaagatttaaaagaaagagctcaaaggtgtttcrtctcctatgtacgatctgtatatctgatgaaggataaagaagtatttgatgtgagcaagttacctatacctgaatatgccctgtctcttggtcttgctgt

SEQ ID NO: 24057 - DNA, 201 bp, Homo sapiens
ttgagccaagggctccctccctcaccaatgacgaagtggaagaatttagagcctacttcaatgagaaaatgtccatccttcaaaaaggtggaaaaagactygaagggacagagcacagacaggataatgatactggtaatgaagaacaggaagaagaagaagacgatgaagaagaaatggaagagaaactggcaaaagcaa

SEQ ID NO: 24058 - DNA, 201 bp, Homo sapiens
caatgacgaagtggaagaatttagagcctacttcaatgagaaaatgtccatccttcaaaaaggtggaaaaagactcgaagggacagagcacagacaggatratgatactggtaatgaagaacaggaagaagaagaagacgatgaagaagaaatggaagagaaactggcaaaagcaaaaggatctcaagccccatctcttcc

SEQ ID NO: 24059 - DNA, 201 bp, Homo sapiens
ggattggctttgcaaggtaaagatgtacttggagcggccaaaactggatctggcaagactctggcttttcttgttccagtgctggaagccttatatcgtckgcaatggacttcaacagatgggctgggggttctcataatatcacctacgagagaactggcctatcagacctttgaggttctccgaaaagtaggaaagaat

SEQ ID NO: 24060 - DNA, 175 bp, Homo sapiens
tgtgcgtttgtcccatgctggttccgtgagtctggccttaggtgtctcgtgtctggggttgatccgagctgtcgycgccgccgccgcaatgggcaaaacggccaactctccgggttcgggagcccgacccgacccggtgcggagcttcaatcgctggaagaaaaaacacagccat

SEQ ID NO: 24061 - DNA, 201 bp, Homo sapiens
gtctttagcagaggatgaagagctggtgttacatctgctaagaagtcaaagctaaatacttcctgcgcctgccttctccttgaaaccttggttatgactgygtaggcaagaagttgaaaaacagttgatttgggggcacttaggtaccatatgccccattcccaaagggcacatttctggatagaagcgatcgtatctcca

SEQ ID NO: 24062 - DNA, 180 bp, Homo sapiens
cggtggcgggctgagcggtttcgagccggcgtcggggagcggcggtaccgggcggctgcggggctggctcgacccagctkgaggtctcggcgtccgcgtcctgcggtgccctggggtctcccgaggaccttgtacccgcgcggtttccttgggctggctttggacgacgctttcgccttc

SEQ ID NO: 24063 - DNA, 105 bp, Homo sapiens
cggtkgcgggctgagcggtttcgagccggcgtcggggagcggcggtaccgggcggctgcggggctggctcgacccagcttgaggtctcggcgtccgcgtcctgcg

SEQ ID NO: 24064 - DNA, 201 bp, Homo sapiens
accctgtccagtgctttgagattcttcccacctccccatcctcaccagccggatcgggcgctgtgcagtgtggtcagcatggtgaagaaagtcatttcctyggtgggcagtattcctctttatctctcattacactggaaatgttatttctgctgtatcatccgtgctcaacgttttagtctgtcaggctcaccttctctc

SEQ ID NO: 24065 - DNA, 201 bp, Homo sapiens
cacttgttttgttgccttaataagcatctgaatgtttggttgtggggcgggttctgaagcaatgagagaaatgcccgtattaggaggattacttgagcccwggaggtcaaagctgaggtgagccatgattactccactgcactccagcctgggcaacagagccaggccctgtatcaaaaaaaaaagaaaagggaaaaaaga

SEQ ID NO: 24066 - DNA, 201 bp, Homo sapiens
cctgtccagtgctttgagattcttcccacctccccatcctcaccagccggatcgggcgctgtgcagtgtggtcagcatggtgaagaaagtcatttcctcgktgggcagtattcctctttatctctcattacactggaaatgttatttctgctgtatcatccgtgctcaacgttttagtctgtcaggctcaccttctctctg

SEQ ID NO: 24067 - DNA, 201 bp, Homo sapiens
ggtaccgggcggctgcggggctggctcgacccagcttgaggtctcggcgtccgcgtcctgcggtgccctggggtctcccgaggaccttgtacccgcgcggyttccttgggctggctttggacgacgctttcgccttcctgctgcctaggatccgccgacatgaatcccatcgtagtggtccacggcggcggagccggtccc

SEQ ID NO: 24068 - DNA, 201 bp, Homo sapiens
ccgcgtcctgcggtgccctggggtctcccgaggaccttgtacccgcgcggtttccttgggctggctttggacgacgctttcgccttcctgctgcctaggayccgccgacatgaatcccatcgtagtggtccacggcggcggagccggtcccatctccaaggatcggaaggagcgagtgcaccagggcatggtcagagccgc

SEQ ID NO: 24069 - DNA, 201 bp, Homo sapiens
tccagtgctttgagattcttcccacctccccatcctcaccagccggatcgggcgctgtgcagtgtggtcagcatggtgaagaaagtcatttcctcggtggrcagtattcctctttatctctcattacactggaaatgttatttctgctgtatcatccgtgctcaacgttttagtctgtcaggctcaccttctctctggaaa

SEQ ID NO: 24070 - DNA, 201 bp, Homo sapiens
gcagaaccgttgtgaccagagcggtggcgggctgagcggtttcgagccggcgtcggggagcggcggtaccgggcggctgcggggctggctcgacccagctkgaggtctcggcgtccgcgtcctgcggtgccctgggatccgccgacatgaatcccatcgtagtggtccacggcggcggagccggtcccatctccaaggatc

SEQ ID NO: 24071 - DNA, 201 bp, Homo sapiens
tgtcacatccgaatctccacctgtgaacactcctcacgtggcaaaagggactttgcagatgagaatagaaattgcgcagaaccgttgtgaccagagcggtkgcgggctgagcggtttcgagccggcgtcggggagcggcggtaccgggcggctgcggggctggctcgacccagcttgaggtctcggcgtccgcgtcctgcg

SEQ ID NO: 24072 - DNA, 201 bp, Homo sapiens
accctgtccagtgctttgagattcttcccacctccccatcctcaccagccggatcgggcgctgtgcagtgtggtcagcatggtgaagaaagtcatttcctyggtgggcagtattcctctttatctctcattacactggtcaccttctctctggaaagaatttgcttaacttgacattccatgtgccgctaataaaatatat

SEQ ID NO: 24073 - DNA, 166 bp, Homo sapiens
tgggagacagaataacggccctcaaaggtgtcacatccgaatctccacctgtgaacactcctcacrtggcaaaagggactttgcagatgagaatagaaattgcgcagaaccgttgtgaccagagcggtggcgggctgagcggtttcgagccggcgtcggggagcgg

SEQ ID NO: 24074 - DNA, 201 bp, Homo sapiens; identical to SEQ ID NO: 24065

SEQ ID NO: 24075 - DNA, 201 bp, Homo sapiens
cctgtccagtgctttgagattcttcccacctccccatcctcaccagccggatcgggcgctgtgcagtgtggtcagcatggtgaagaaagtcatttcctcgktgggcagtattcctctttatctctcattacactggtcaccttctctctggaaagaatttgcttaacttgacattccatgtgccgctaataaaatatattt

SEQ ID NO: 24076 - DNA, 201 bp, Homo sapiens
ggtttcgagccggcgtcggggagcggcggtaccgggcggctgcggggctggctcgacccagcttgaggtctcggcgtccgcgtcctgcggtgccctgggayccgccgacatgaatcccatcgtagtggtccacggcggcggagccggtcccatctccaaggatcggaaggagcgagtgcaccagggcatggtcagagccgc

SEQ ID NO: 24077 - DNA, 200 bp, Homo sapiens
tccagtgctttgagattcttcccacctccccatcctcaccagccggatcgggcgctgtgcagtgtggtcagcatggtgaagaaagtcatttcctcggtggrcagtattcctctttatctctcattacactggtcaccttctctctggaaagaatttgcttaacttgacattccatgtgccgctaataaaatatattttga

SEQ ID NO: 24078 - DNA, 201 bp, Homo sapiens; identical to SEQ ID NO: 24064

SEQ ID NO: 24079 - DNA, 171 bp, Homo sapiens
gcctcagcctcccaagtagctaggcctttgggtgtgtgctactatgcccagctaatttttttttaagagakggggtcttgctgtgttgtccaggttggtcttgaactaggcctcaagagatcctcttgcctcggcctcccaaagtgctgggattacaggcgtgagccacgg

SEQ ID NO: 24080 - DNA, 201 bp, Homo sapiens; identical to SEQ ID NO: 24065

SEQ ID NO: 24081 - DNA, 201 bp, Homo sapiens; identical to SEQ ID NO: 24066

SEQ ID NO: 24082 - DNA, 201 bp, Homo sapiens; identical to SEQ ID NO: 24069

SEQ ID NO: 24083 - DNA, 201 bp, Homo sapiens; identical to SEQ ID NO: 24064

SEQ ID NO: 24084 - DNA, 197 bp, Homo sapiens
ccgggggcggagaggaacgcgggagggcgccgggcccctgggcttttcgtaccaagctcgaccgagccgcccctacccacccccagctgcgaacccrgccgttcagaacagagactgggcattgtccccacagggtctcccgaggaccttgtacccgcgcggtttccttgggctggctttggacgacgctttcgcct

SEQ ID NO: 24085 - DNA, 201 bp, Homo sapiens; identical to SEQ ID NO: 24065

SEQ ID NO: 24086 - DNA, 201 bp, Homo sapiens; identical to SEQ ID NO: 24066

SEQ ID NO: 24087 - DNA, 135 bp, Homo sapiens
ccgggggcggagaggaacgcgggagggcgccgggyccctgggcttttcgtaccaagctcgaccgagccgcccctacccacccccagctgcgaacccagccgttcagaacagagactgggcattgtccccacaggg

SEQ ID NO: 24088 - DNA, 201 bp, Homo sapiens
cgagccgcccctacccacccccagctgcgaacccagccgttcagaacagagactgggcattgtccccacagggtctcccgaggaccttgtacccgcgcggyttccttgggctggctttggacgacgctttcgccttcctgctgcctaggatccgccgacatgaatcccatcgtagtggtccacggcggcggagccggtccc

SEQ ID NO: 24089 - DNA, 201 bp, Homo sapiens
gactgggcattgtccccacagggtctcccgaggaccttgtacccgcgcggtttccttgggctggctttggacgacgctttcgccttcctgctgcctaggayccgccgacatgaatcccatcgtagtggtccacggcggcggagccggtcccatctccaaggatcggaaggagcgagtgcaccagggcatggtcagagccgc

SEQ ID NO: 24090 - DNA, 201 bp, Homo sapiens; identical to SEQ ID NO: 24069

SEQ ID NO: 24091 - DNA, 201 bp, Homo sapiens
ggggatgaagtcatcataacagggtactgccagggggatggttaccgcatcggctttggccagtgtgctggaaaagtgctgcctgctctcctgccatcatragattttctctgctcttctggaaacaaagggctcaagcacccctttcaaccctgtgactggggtcctccctcgggctgtaggcctggtccgccattcagt

SEQ ID NO: 24092 - DNA, 201 bp, Homo sapiens
acctctttactggtcctgtcctctccaaacaccaggatgtcttcaatcagcctacactcaacagcttcatgggcctgggtcaggctgcctggaaggaggcragagtgttcttgcagaacttgctgtctgtgagccaagccaggctcagagatgacaccgaacttcggaagtgtgcattcatctcccaggcttctgccacga

SEQ ID NO: 24093 - DNA, 201 bp, Homo sapiens
ccaaacaccaggatgtcttcaatcagcctacactcaacagcttcatgggcctgggtcaggctgcctggaaggaggcgagagtgttcttgcagaacttgctstctgtgagccaagccaggctcagagatgacaccgaacttcggaagtgtgcattcatctcccaggcttctgccacgatgcaccttccagccaccataggag

SEQ ID NO: 24094 - DNA, 201 bp, Homo sapiens
ggttaccgcatcggctttggccagtgtgctggaaaagtgctgcctgctctcctgccatcatgagattttctctgctcttctggaaacaaagggctcaagcmcccctttcaaccctgtgactggggtcctccctcgggctgtaggcctggtccgccattcagtgacaaataaagccattgtgctctgaggcctgcactgccg

SEQ ID NO: 24095 - DNA, 166 bp, Homo sapiens
atcatgagattttctctgctcttctggaaacaaagggctcaagcacccctttcaaccctgtgactggggtcctccctcgggctgtaggcctggtccgccaytcagtgacaaataaagccattgtgctctgaggcctgcactgccgcagatgcagctgtgtccactt

SEQ ID NO: 24096 - DNA, 201 bp, Homo sapiens
ttaccgcatcggctttggccagtgtgctggaaaagtgctgcctgctctcctgccatcatgagattttctctgctcttctggaaacaaagggctcaagcacycctttcaaccctgtgactggggtcctccctcgggctgtaggcctggtccgccattcagtgacaaataaagccattgtgctctgaggcctgcactgccgca

SEQ ID NO: 24097 - DNA, 201 bp, Homo sapiens
actctgtcaacggctgcaacctgcggccgggggacctcctggcttctgggaccatcagcgggccggagccagaaaacttcggctccatgttggaactgtcrtggaagggaacgaagcccatagacctggggaatggtcagaccaggaagtttctgctggacggggatgaagtcatcataacagggtactgccagggggatg

SEQ ID NO: 24098 - DNA, 201 bp, Homo sapiens
agaccgaggataggtgtggccattggcgaccagatcctggacctcagcatcatcaagcacctctttactggtcctgtcctctccaaacaccaggatgtctkcaatcagcctacactcaacagcttcatgggcctgggtcaggctgcctggaaggaggcgagagtgttcttgcagaacttgctgtctgtgagccaagccagg

SEQ ID NO: 24099 - DNA, 201 bp, Homo sapiens
ggataggtgtggccattggcgaccagatcctggacctcagcatcatcaagcacctctttactggtcctgtcctctccaaacaccaggatgtcttcaatcakcctacactcaacagcttcatgggcctgggtcaggctgcctggaaggaggcgagagtgttcttgcagaacttgctgtctgtgagccaagccaggctcagag

SEQ ID NO: 24100 - DNA, 201 bp, Homo sapiens
ttaagtacatgtactggacgatgctgcagcagctcactcaccactctgtcaacggctgcaacctgcggccgggggacctcctggcttctgggaccatcagygggccggagccagaaaacttcggctccatgttggaactgtcgtggaagggaacgaagcccatagacctggggaatggtcagaccaggaagtttctgctgg

SEQ ID NO: 24101 - DNA, 201 bp, Homo sapiens
gaaaggagaaggaatgagccaggcggctaccatatgcaagtccaattttaagtacatgtactggacgatgctgcagcagctcactcaccactctgtcaacrgctgcaacctgcggccgggggacctcctggcttctgggaccatcagcgggccggagccagaaaacttcggctccatgttggaactgtcgtggaagggaac

SEQ ID NO: 24102 - DNA, 201 bp, Homo sapiens
cgaaggcccatgggacagatgaaacctgatgactctaagcctcccgtatatggtgcctgcaagctcttggacatggagctggaaatggctttttttgtagrccctggaaacagattgggagagccgatccccatttccaaggcccatgagcacatttttggaatggtccttatgaacgactggagtgcacgagacattcag

SEQ ID NO: 24103 - DNA, 201 bp, Homo sapiens
aatgagccaggcggctaccatatgcaagtccaattttaagtacatgtactggacgatgctgcagcagctcactcaccactctgtcaacggctgcaacctgyggccgggggacctcctggcttctgggaccatcagcgggccggagccagaaaacttcggctccatgttggaactgtcgtggaagggaacgaagcccataga

SEQ ID NO: 24104 - DNA, 201 bp, Homo sapiens
atggtccttatgaacgactggagtgcacgagacattcagaagtgggagtatgtccctctcgggccattccttgggaagagttttgggaccactgtctctcygtgggtggtgcccatggatgctctcatgccctttgctgtgcccaacccgaagcaggaccccaggcccctgccgtatctgtgccatgacgagccctacaca

SEQ ID NO: 24105 - DNA, 201 bp, Homo sapiens
ctggaaatggctttttttgtaggccctggaaacagattgggagagccgatccccatttccaaggcccatgagcacatttttggaatggtccttatgaacgwctggagtgcacgagacattcagaagtgggagtatgtccctctcgggccattccttgggaagagttttgggaccactgtctctccgtgggtggtgcccatg

SEQ ID NO: 24106 - DNA, 201 bp, Homo sapiens
ggaaatggctttttttgtaggccctggaaacagattgggagagccgatccccatttccaaggcccatgagcacatttttggaatggtccttatgaacgackggagtgcacgagacattcagaagtgggagtatgtccctctcgggccattccttgggaagagttttgggaccactgtctctccgtgggtggtgcccatgga

SEQ ID NO: 24107 - DNA, 201 bp, Homo sapiens
tccttatgaacgactggagtgcacgagacattcagaagtgggagtatgtccctctcgggccattccttgggaagagttttgggaccactgtctctccgtgrgtggtgcccatggatgctctcatgccctttgctgtgcccaacccgaagcaggaccccaggcccctgccgtatctgtgccatgacgagccctacacatttg

SEQ ID NO: 24108 - DNA, 201 bp, Homo sapiens
tttttttgtaggccctggaaacagattgggagagccgatccccatttccaaggcccatgagcacatttttggaatggtccttatgaacgactggagtgcaygagacattcagaagtgggagtatgtccctctcgggccattccttgggaagagttttgggaccactgtctctccgtgggtggtgcccatggatgctctcat

SEQ ID NO: 24109 - DNA, 201 bp, Homo sapiens
catgctaccaacgtcggaatcatgttcagggacaaggagaatgcgttgatgccaaattggctgcacttaccagtgggctaccatggccgtgcctcctctgkcgtggtgtctggcaccccaatccgaaggcccatgggacagatgaaacctgatgactctaagcctcccgtatatggtgcctgcaagctcttggacatggag

SEQ ID NO: 24110 - DNA, 201 bp, Homo sapiens
ctggacgatgctgcagcagctcactcaccactctgtcaacggctgcaacctgcggccgggggacctcctggcttctgggaccatcagcgggccggagccakaaaacttcggctccatgttggaactgtcgtggaagggaacgaagcccatagacctggggaatggtcagaccaggaagtttctgctggacggggatgaagt

SEQ ID NO: 24111 - DNA, 201 bp, Homo sapiens
catccacaacctgccctacggcgtcttctcgaccagaggcgacccaagaccgaggataggtgtggccattggcgaccagatcctggacctcagcatcatcragcacctctttactggtcctgtcctctccaaacaccaggatgtcttcaatcagcctacactcaacagcttcatgggcctgggtcaggctgcctggaagga

SEQ ID NO: 24112 - DNA, 201 bp, Homo sapiens
tctcgaccagaggcgacccaagaccgaggataggtgtggccattggcgaccagatcctggacctcagcatcatcaagcacctctttactggtcctgtcctytccaaacaccaggatgtcttcaatcagcctacactcaacagcttcatgggcctgggtcaggctgcctggaaggaggcgagagtgttcttgcagaacttgc

SEQ ID NO: 24113 - DNA, 201 bp, Homo sapiens
ttctgggaccatcagcgggccggagccagaaaacttcggctccatgttggaactgtcgtggaagggaacgaagcccatagacctggggaatggtcagaccrggaagtttctgctggacggggatgaagtcatcataacagggtactgccagggggatggttaccgcatcggctttggccagtgtgctggaaaagtgctgcc

SEQ ID NO: 24114 - DNA, 201 bp, Homo sapiens
aacggctgcaacctgcggccgggggacctcctggcttctgggaccatcagcgggccggagccagaaaacttcggctccatgttggaactgtcgtggaaggkaacgaagcccatagacctggggaatggtcagaccaggaagtttctgctggacggggatgaagtcatcataacagggtactgccagggggatggttaccgc

SEQ ID NO: 24115 - DNA, 201 bp, Homo sapiens
agtcatcataacagggtactgccagggggatggttaccgcatcggctttggccagtgtgctggaaaagtgctgcctgctctcctgccatcatgagattttytctgctcttctggaaacaaagggctcaagcacccctttcaaccctgtgactggggtcctccctcgggctgtaggcctggtccgccattcagtgacaaata

SEQ ID NO: 24116 - DNA, 201 bp, Homo sapiens
acagggtactgccagggggatggttaccgcatcggctttggccagtgtgctggaaaagtgctgcctgctctcctgccatcatgagattttctctgctcttytggaaacaaagggctcaagcacccctttcaaccctgtgactggggtcctccctcgggctgtaggcctggtccgccattcagtgacaaataaagccattgt

SEQ ID NO: 24117 - DNA, 201 bp, Homo sapiens
ataacagggtactgccagggggatggttaccgcatcggctttggccagtgtgctggaaaagtgctgcctgctctcctgccatcatgagattttctctgctyttctggaaacaaagggctcaagcacccctttcaaccctgtgactggggtcctccctcgggctgtaggcctggtccgccattcagtgacaaataaagccat

SEQ ID NO: 24118 - DNA, 201 bp, Homo sapiens; identical to SEQ ID NO: 24091

SEQ ID NO: 24119 - DNA, 201 bp, Homo sapiens; identical to SEQ ID NO: 24092

SEQ ID NO: 24120 - DNA, 201 bp, Homo sapiens; identical to SEQ ID NO: 24093

SEQ ID NO: 24121 - DNA, 201 bp, Homo sapiens; identical to SEQ ID NO: 24094

SEQ ID NO: 24122 - DNA, 166 bp, Homo sapiens; identical to SEQ ID NO: 24095

SEQ ID NO: 24123 - DNA, 201 bp, Homo sapiens; identical to SEQ ID NO: 24096

SEQ ID NO: 24124 - DNA, 201 bp, Homo sapiens; identical to SEQ ID NO: 24097

SEQ ID NO: 24125 - DNA, 201 bp, Homo sapiens; identical to SEQ ID NO: 24098

SEQ ID NO: 24126 - DNA, 201 bp, Homo sapiens; identical to SEQ ID NO: 24099

SEQ ID NO: 24127 - DNA, 201 bp, Homo sapiens; identical to SEQ ID NO: 24100

SEQ ID NO: 24128 - DNA, 201 bp, Homo sapiens; identical to SEQ ID NO: 24101

SEQ ID NO: 24129 - DNA, 201 bp, Homo sapiens; identical to SEQ ID NO: 24102

SEQ ID NO: 24130 - DNA, 201 bp, Homo sapiens; identical to SEQ ID NO: 24103

SEQ ID NO: 24131 - DNA, 201 bp, Homo sapiens; identical to SEQ ID NO: 24104

SEQ ID NO: 24132 - DNA, 201 bp, Homo sapiens; identical to SEQ ID NO: 24105

SEQ ID NO: 24133 - DNA, 201 bp, Homo sapiens; identical to SEQ ID NO: 24106

SEQ ID NO: 24134 - DNA, 201 bp, Homo sapiens; identical to SEQ ID NO: 24107

SEQ ID NO: 24135 - DNA, 201 bp, Homo sapiens; identical to SEQ ID NO: 24108

SEQ ID NO: 24136 - DNA, 201 bp, Homo sapiens; identical to SEQ ID NO: 24109

SEQ ID NO: 24137 - DNA, 201 bp, Homo sapiens; identical to SEQ ID NO: 24110

SEQ ID NO: 24138 - DNA, 201 bp, Homo sapiens; identical to SEQ ID NO: 24111

SEQ ID NO: 24139 - DNA, 201 bp, Homo sapiens; identical to SEQ ID NO: 24112

SEQ ID NO: 24140 - DNA, 201 bp, Homo sapiens; identical to SEQ ID NO: 24113

SEQ ID NO: 24141 - DNA, 201 bp, Homo sapiens; identical to SEQ ID NO: 24114

SEQ ID NO: 24142 - DNA, 201 bp, Homo sapiens; identical to SEQ ID NO: 24115

SEQ ID NO: 24143 - DNA, 201 bp, Homo sapiens; identical to SEQ ID NO: 24116

SEQ ID NO: 24144 - DNA, 201 bp, Homo sapiens; identical to SEQ ID NO: 24117

SEQ ID NO: 24145 - DNA, 201 bp, Homo sapiens; identical to SEQ ID NO: 24091

SEQ ID NO: 24146 - DNA, 201 bp, Homo sapiens; identical to SEQ ID NO: 24092

SEQ ID NO: 24147 - DNA, 201 bp, Homo sapiens; identical to SEQ ID NO: 24093

SEQ ID NO: 24148 - DNA, 201 bp, Homo sapiens; identical to SEQ ID NO: 24094

SEQ ID NO: 24149 - DNA, 166 bp, Homo sapiens; identical to SEQ ID NO: 24095

SEQ ID NO: 24150 - DNA, 201 bp, Homo sapiens; identical to SEQ ID NO: 24096

SEQ ID NO: 24151 - DNA, 201 bp, Homo sapiens; identical to SEQ ID NO: 24097

SEQ ID NO: 24152 - DNA, 201 bp, Homo sapiens; identical to SEQ ID NO: 24098

SEQ ID NO: 24153 - DNA, 201 bp, Homo sapiens; identical to SEQ ID NO: 24099

SEQ ID NO: 24154 - DNA, 201 bp, Homo sapiens; identical to SEQ ID NO: 24100

SEQ ID NO: 24155 - DNA, 201 bp, Homo sapiens; identical to SEQ ID NO: 24101

SEQ ID NO: 24156 - DNA, 201 bp, Homo sapiens; identical to SEQ ID NO: 24102

SEQ ID NO: 24157 - DNA, 201 bp, Homo sapiens; identical to SEQ ID NO: 24103

SEQ ID NO: 24158 - DNA, 201 bp, Homo sapiens; identical to SEQ ID NO: 24104

SEQ ID NO: 24159 - DNA, 201 bp, Homo sapiens; identical to SEQ ID NO: 24105

SEQ ID NO: 24160 - DNA, 201 bp, Homo sapiens; identical to SEQ ID NO: 24106

SEQ ID NO: 24161 - DNA, 201 bp, Homo sapiens; identical to SEQ ID NO: 24107

SEQ ID NO: 24162 - DNA, 201 bp, Homo sapiens; identical to SEQ ID NO: 24108

SEQ ID NO: 24163 - DNA, 201 bp, Homo sapiens; identical to SEQ ID NO: 24109

SEQ ID NO: 24164 - DNA, 201 bp, Homo sapiens; identical to SEQ ID NO: 24110

SEQ ID NO: 24165 - DNA, 201 bp, Homo sapiens; identical to SEQ ID NO: 24111

SEQ ID NO: 24166 - DNA, 201 bp, Homo sapiens; identical to SEQ ID NO: 24112

SEQ ID NO: 24167 - DNA, 201 bp, Homo sapiens; identical to SEQ ID NO: 24113

SEQ ID NO: 24168 - DNA, 201 bp, Homo sapiens; identical to SEQ ID NO: 24114

SEQ ID NO: 24169 - DNA, 201 bp, Homo sapiens; identical to SEQ ID NO: 24115

SEQ ID NO: 24170 - DNA, 201 bp, Homo sapiens; identical to SEQ ID NO: 24116

SEQ ID NO: 24171 - DNA, 201 bp, Homo sapiens; identical to SEQ ID NO: 24117

SEQ ID NO: 24172 - DNA, 201 bp, Homo sapiens
gaagacctaaggctgaagttgctgcagaatttctaaatgacagagttcctaattgcaatgtagttccacatttcaacaagattcaagattttaacgacacyttctatcgacaatttcatattattgtatgtggactggactctatcatcgccagaagatggataaatggcatgctgatatctcttctaaattatgaagatg

SEQ ID NO: 24173 - DNA, 201 bp, Homo sapiens; identical to SEQ ID NO: 24172

SEQ ID NO: 24174 - DNA, 201 bp, Homo sapiens
gcgagccatgatgatccaaacacctagtcaatacagatttgtatgtgaagctattttgaaagtttatgaagaaggctttgttaaacccttaacaacatcawcaaataaataagaaagcaaaaagatctgggatatgtgttggaaaactgctttcccttatgttcactgtgccataatgctgctcgcaggaaatggcatttt

SEQ ID NO: 24175 - DNA, 201 bp, Homo sapiens
ctgatgattccacagataacccaaggtggctggatccaaacaaaccaataaggaagcagctaaagagaggatctccttacagtttgaactttagagtcaarttttttgtaagtgaccccaacaagttacaagaagaatatacaaggtaccagtattttttgcaaattaaacaagacattcttactggaagattaccctgtc

SEQ ID NO: 24176 - DNA, 201 bp, Homo sapiens
tgcccaggattacccgccagctcacgccgcgcagtgcgcttttccgctcctcgcgccccaccaccaacattgttctctcaggactcctgggtcccaggggycggaattgggcctgagcgggagaggaaagagacttggctttggccgcggggtcggaggattggggccaggccccctcccccacgcacttttgggggtgtg

SEQ ID NO: 24177 - DNA, 201 bp, Homo sapiens; identical to SEQ ID NO: 24174

SEQ ID NO: 24178 - DNA, 201 bp, Homo sapiens; identical to SEQ ID NO: 24175

SEQ ID NO: 24179 - DNA, 201 bp, Homo sapiens; identical to SEQ ID NO: 24176

SEQ ID NO: 24180 - DNA, 201 bp, Homo sapiens
tccgccatggcgaccgggccccgctggcctcctaccccatggacccacacaaggaggtggcctccaccctgtggccacgaggcctgggccagctgaccacrgagggggtccgccagcagctggagctgggccgcttcctgaggagccgctacgaggccttcctgagtccggagtaccggcgggaggaggtgtacatccgca

SEQ ID NO: 24181 - DNA, 201 bp, Homo sapiens
tccgccatggcgaccgggccccgctggcctcctaccccatggacccacacaaggaggtggcctccaccctgtggccacgaggcctgggccagctgaccacrgagggggtccgccagcagctggagctgggccgcttcctgaggagccgctacgagggcttcctgagtcgcctggagaacttcacgggactgtcgctggttg

SEQ ID NO: 24182 - DNA, 201 bp, Homo sapiens
tccgccatggcgaccgggccccgctggcctcctaccccatggacccacacaaggaggtggcctccaccctgtggccacgaggcctgggccagctgaccacrgagggggtccgccagcagctggagctgggccgcttcctgaggagccgctacgaggccttcctgaccccgcgcatccagggcttcctgagtcgcctggaga

SEQ ID NO: 24183 - DNA, 201 bp, Homo sapiens; identical to SEQ ID NO: 24180

SEQ ID NO: 24184 - DNA, 201 bp, Homo sapiens; identical to SEQ ID NO: 24180

SEQ ID NO: 24185 - DNA, 201 bp, Homo sapiens
ccatgctggcagcactgaccccttcgagattagctgtggctttccaagctatgggtgccatgaagcttgggttgacgatagccattcgctatagccacagscggaggcagtttgggcccaaaaccaaggaagaggtgaagatcattgagcaccaaacacagaccctgcggctgatgccccacctggccacagccttggccc

SEQ ID NO: 24186 - DNA, 119 bp, Homo sapiens
tttctattcttgccaggtmtgcatggtgtggacaatgggatattaatatttgacaaggttcggatacccagggagaacctgctggataagtttggttccgtggctccagatggacagta

SEQ ID NO: 24187 - DNA, 201 bp, Homo sapiens
ccctgaccttcgtcagcaggtatgctggggccctcctggatgaggatgtcttccagggaaaggagctggtcaacagtcgctcgctgcaggctctggtggcrgggctgaaggcctacagcacctgggagaacatccgctgcctgcaggactgccgcgagtgcactggaggcatgggttacatgatggaaaatcgaatctcag

SEQ ID NO: 24188 - DNA, 201 bp, Homo sapiens; identical to SEQ ID NO: 24185

SEQ ID NO: 24189 - DNA, 201 bp, Homo sapiens
aggaacaagagtgcaagattcaatgccatgctggcagcactgaccccttcgagattagctgtggctttccaagctatgggtgccatgaagcttgggttgaygatagccattcgctatagccacagccggaggcagtttgggcccaaaaccaaggaagaggtgaagatcattgagcaccaaacacagaccctgcggctgatg

SEQ ID NO: 24190 - DNA, 201 bp, Homo sapiens
catgctggcagcactgaccccttcgagattagctgtggctttccaagctatgggtgccatgaagcttgggttgacgatagccattcgctatagccacagcyggaggcagtttgggcccaaaaccaaggaagaggtgaagatcattgagcaccaaacacagaccctgcggctgatgccccacctggccacagccttggccct

SEQ ID NO: 24191 - DNA, 201 bp, Homo sapiens
aagatctcaagggccccactgtttcatcgttcctgtccgggatgaaaacggaagcttgtacccaggagtcacagctattgatatgatgtacaaggagggtmtgcatggtgtggacaatgggatattaatatttgacaaggttcggatacccagggagaacctgctggataagtttggttccgtggctccagatggacagta

SEQ ID NO: 24192 - DNA, 174 bp, Homo sapiens
aggaacaagagtgcaagattcaatgccatgctggcagcactgaccccttcgagattagctgtggctttccaagctatgggtgccatgaagcttgggttgaygatagccattcgctatagccacaggtccagaatcatctcccagaactgctgttcagctccagctggtctttat

SEQ ID NO: 24193 - DNA, 201 bp, Homo sapiens; identical to SEQ ID NO: 24185

SEQ ID NO: 24194 - DNA, 190 bp, Homo sapiens
ggccccactgtttcatcgttcctgtccgggatgaaaacggaagcttgtacccaggagtcacagctattgatatgatgtacaaggagggtmtgcatggtgtggacaatgggatattaatatttgacaaggttcggatacccagggagaacctgctggataagtttggttccgtggctccagatggacagta

SEQ ID NO: 24195 - DNA, 201 bp, Homo sapiens; identical to SEQ ID NO: 24187

SEQ ID NO: 24196 - DNA, 201 bp, Homo sapiens; identical to SEQ ID NO: 24185

SEQ ID NO: 24197 - DNA, 201 bp, Homo sapiens; identical to SEQ ID NO: 24189

SEQ ID NO: 24198 - DNA, 201 bp, Homo sapiens; identical to SEQ ID NO: 24190

SEQ ID NO: 24199 - DNA, 201 bp, Homo sapiens; identical to SEQ ID NO: 24185

SEQ ID NO: 24200 - DNA, 201 bp, Homo sapiens; identical to SEQ ID NO: 24191

SEQ ID NO: 24201 - DNA, 201 bp, Homo sapiens; identical to SEQ ID NO: 24187

SEQ ID NO: 24202 - DNA, 201 bp, Homo sapiens; identical to SEQ ID NO: 24185

SEQ ID NO: 24203 - DNA, 201 bp, Homo sapiens; identical to SEQ ID NO: 24189

SEQ ID NO: 24204 - DNA, 201 bp, Homo sapiens; identical to SEQ ID NO: 24190

SEQ ID NO: 24205 - DNA, 166 bp, Homo sapiens
atggacccctttgcctggggtccctgtcacctggctgccctgggttggagtggagcacacggcagscggaggcagtttgggcccaaaaccaaggaagaggtgaagatcattgagcaccaaacacagaccctgcggctgatgccccacctggccacagccttggccc

SEQ ID NO: 24206 - DNA, 201 bp, Homo sapiens
ccctgaccttcgtcagcaggtatgctggggccctcctggatgaggatgtcttccagggaaaggagctggtcaacagtcgctcgctgcaggctctggtggcrgggctgaaggcctacagcacctgggagaacatccgctgcctgcaggactgccgcgagtgcactggaggcatgtgcgttccagaatttcacaaagaagaac

SEQ ID NO: 24207 - DNA, 166 bp, Homo sapiens; identical to SEQ ID NO: 24205

SEQ ID NO: 24208 - DNA, 167 bp, Homo sapiens
atggacccctttgcctggggtccctgtcacctggctgccctgggttggagtggagcacacggcagcyggaggcagtttgggcccaaaaccaaggaagaggtgaagatcattgagcaccaaacacagaccctgcggctgatgccccacctggccacagccttggccct

SEQ ID NO: 24209 - DNA, 201 bp, Homo sapiens
ttttactgatagtgacagtgatgacttcaaagagaccgagggccagtactccaggctcagccagcagtcacactgcccagatttctttcttttcctctgcygcctgctcagcccgctgctcaaggcctttgcacaggctgccgccttcctccgccagggccagctgcccgatactgagtcgggctacacagaccagctgtt

SEQ ID NO: 24210 - DNA, 201 bp, Homo sapiens
ctgctactgtcaggaggtgctggacaggctcatccaatgcgggctcctggttgctgaggagctccgggtccggccagcctgtgacacagggcaacggcgaytgagcagaaagctgctgtggaaaccgagtggggattttactgatagtgacagtgatgacttcaaagagaccgagggccagtactccaggctcagccagca

SEQ ID NO: 24211 - DNA, 201 bp, Homo sapiens
agtgtgcggacccaaagcttgccatcagtgctatctggaccttcagagacctaggggttctgcagcagacgccgagccctgcaggccccaggctccacctrtcccctacttttgccagccaggacaatcaggaaaaactagaacagttcatccggcagttcatttgtagctagaactgtgaggaggagcctgtgctgagac

SEQ ID NO: 24212 - DNA, 201 bp, Homo sapiens
tcttcctactgctactgtcaggaggtgctggacaggctcatccaatgcgggctcctggttgctgaggagctccgggtccggccagcctgtgacacagggcracggcgactgagcagaaagctgctgtggaaaccgagtggggattttactgatagtgacagtgatgacttcaaagagaccgagggccagtactccaggctc

SEQ ID NO: 24213 - DNA, 201 bp, Homo sapiens
gtaccgccagatcctgctgctgatgcacctgctgccgcaagacctgctgctgctaaagccctgccagtcttcctactgctactgtcaggaggtgctggacmggctcatccaatgcgggctcctggttgctgaggagctccgggtccggccagcctgtgacacagggcaacggcgactgagcagaaagctgctgtggaaacc

SEQ ID NO: 24214 - DNA, 201 bp, Homo sapiens
gccatcagtgctatctggaccttcagagacctaggggttctgcagcagacgccgagccctgcaggccccaggctccacctatcccctacttttgccagccwggacaatcaggaaaaactagaacagttcatccggcagttcatttgtagctagaactgtgaggaggagcctgtgctgagacttctcagccccagaacacag

SEQ ID NO: 24215 - DNA, 160 bp, Homo sapiens
ctagagccagaagatggagaggaggctgcaaacccttagctgctctataaatataatcattgaggcttgattgtcccttgccatctcttgctttttccctyctttgatgtgataaacaaggggacgagacgagttgtcttttccccagcccagcagcatc

SEQ ID NO: 24216 - DNA, 201 bp, Homo sapiens
cctggacggatacttcaatctcaccatgtcctaccgcagcgactccgacatcttcacgccctacggctggctggagccgtggtccggccagcctgcccacycaccgctcaacctctcggccaagaccgagctggtggcctgggcggtgtccaactggaagccggactcggccagggtgcgctactaccagagcctgcaggc

SEQ ID NO: 24217 - DNA, 201 bp, Homo sapiens
aatgggtcccgctgccaggacagcatggcgacccctgcccaccccaccctactgatcctgctgtggacgtggccttttaacacacccgtggctctgccccrctgctcagagatggtgcccggcgcggccgactgcaacatcactgccgactccagtgtgtacccacaggcagacgcggtcatcgtgcaccactgggatatc

SEQ ID NO: 24218 - DNA, 201 bp, Homo sapiens
gcaaggcctgctggaagctgcagcaggaatccaggtaccagacggtgcgcagcatagcggcttggttcacctgagaggccggcatggggcctgggctgccrggacctcactttcccagggcctcacctacctagggtctcactagtcgggggatttacctacctggggcctcggctgcctggggcctcggctgcctggggt

SEQ ID NO: 24219 - DNA, 201 bp, Homo sapiens
gacgccttcatccacgtggatgacttccagagccccaaggacctggcccggtacctgcaggagctggacaaggaccacgcccgctacctgagctactttcrctggcgggagacgctgcggcctcgctccttcagctgggcactggctttctgcaaggcctgctggaagctgcagcaggaatccaggtaccagacggtgcgc

SEQ ID NO: 24220 - DNA, 201 bp, Homo sapiens
tgctggtggctgtgtgtttcttctcctacctgcgtgtgtcccgagacgatgccactggatcccctaggccagggcttatggcagtggaacctgtcaccggrgctcccaatgggtcccgctgccaggacagcatggcgacccctgcccaccccaccctactgatcctgctgtggacgtggccttttaacacacccgtggctc

SEQ ID NO: 24221 - DNA, 201 bp, Homo sapiens
agcaactgccggcacctggaagccctggacggatacttcaatctcaccatgtcctaccgcagcgactccgacatcttcacgccctacggctggctggagcygtggtccggccagcctgcccacccaccgctcaacctctcggccaagaccgagctggtggcctgggcggtgtccaactggaagccggactcggccagggtg

SEQ ID NO: 24222 - DNA, 201 bp, Homo sapiens
acaaggaccacgcccgctacctgagctactttcgctggcgggagacgctgcggcctcgctccttcagctgggcactggctttctgcaaggcctgctggaarctgcagcaggaatccaggtaccagacggtgcgcagcatagcggcttggttcacctgagaggccggcatggggcctgggctgccaggacctcactttccca

SEQ ID NO: 24223 - DNA, 201 bp, Homo sapiens
accagacggtgcgcagcatagcggcttggttcacctgagaggccggcatggggcctgggctgccaggacctcactttcccagggcctcacctacctagggyctcactagtcgggggatttacctacctggggcctcggctgcctggggcctcggctgcctggggtctcacctgcctggggcctcacctgctggagtctttg

SEQ ID NO: 24224 - DNA, 201 bp, Homo sapiens
ccgactacatcaccgagaagctgtggaggaacgccctggaggcctgggccgtgcccgtggtgctgggccccagcagaagcaactacgagaggttcctgccrcccgacgccttcatccacgtggatgacttccagagccccaaggacctggcccggtacctgcaggagctggacaaggaccacgcccgctacctgagctact

SEQ ID NO: 24225 - DNA, 201 bp, Homo sapiens
gcatggagtcccccagcaactgccggcacctggaagccctggacggatacttcaatctcaccatgtcctaccgcagcgactccgacatcttcacgccctayggctggctggagccgtggtccggccagcctgcccacccaccgctcaacctctcggccaagaccgagctggtggcctgggcggtgtccaactggaagccgg

SEQ ID NO: 24226 - DNA, 201 bp, Homo sapiens
aggcctgctggaagctgcagcaggaatccaggtaccagacggtgcgcagcatagcggcttggttcacctgagaggccggcatggggcctgggctgccaggrcctcactttcccagggcctcacctacctagggtctcactagtcgggggatttacctacctggggcctcggctgcctggggcctcggctgcctggggtctc

SEQ ID NO: 24227 - DNA, 201 bp, Homo sapiens
gcgctggatctggttcagcatggagtcccccagcaactgccggcacctggaagccctggacggatacttcaatctcaccatgtcctaccgcagcgactccracatcttcacgccctacggctggctggagccgtggtccggccagcctgcccacccaccgctcaacctctcggccaagaccgagctggtggcctgggcggt

SEQ ID NO: 24228 - DNA, 201 bp, Homo sapiens
aggacctcactttcccagggcctcacctacctagggtctcactagtcgggggatttacctacctggggcctcggctgcctggggcctcggctgcctggggyctcacctgcctggggcctcacctgctggagtctttggtggccaggcatgtgacttacctgggatttcacttgccgggcttcactgccaggagcctcccct

SEQ ID NO: 24229 - DNA, 201 bp, Homo sapiens
gagggcgaagggtatgtgtgtgaccatcagcagtggtgtgcacatggctgggggacactcggtttgaccgccagcggatgggtgtcacaaatgcatcactrtgggtgtgacctcggcgtgactctgatagtgcctgtggatgtgttgcgatgcctcaccctggagggcactgggccctgagaacgggtgcccttgaggccc

SEQ ID NO: 24230 - DNA, 201 bp, Homo sapiens
ggaggaacgccctggaggcctgggccgtgcccgtggtgctgggccccagcagaagcaactacgagaggttcctgccgcccgacgccttcatccacgtggaygacttccagagccccaaggacctggcccggtacctgcaggagctggacaaggaccacgcccgctacctgagctactttcgctggcgggagacgctgcggc

SEQ ID NO: 24231 - DNA, 201 bp, Homo sapiens
tggggcctgggctgccaggacctcactttcccagggcctcacctacctagggtctcactagtcgggggatttacctacctggggcctcggctgcctggggyctcggctgcctggggtctcacctgcctggggcctcacctgctggagtctttggtggccaggcatgtgacttacctgggatttcacttgccgggcttcact

SEQ ID NO: 24232 - DNA, 177 bp, Homo sapiens
gattacagacatgagccacctcgcccagccttttcatggctgagtgatattccattgtgtggatggatcacactagmtactctgacccatggatcccctgggcccagccaagccacagtggctgtggcgccgctgtctggccgggctgctgtttcagctgctggtggctgtgtgttt

SEQ ID NO: 24233 - DNA, 201 bp, Homo sapiens
gctacctgagctactttcgctggcgggagacgctgcggcctcgctccttcagctgggcactggctttctgcaaggcctgctggaagctgcagcaggaatcyaggtaccagacggtgcgcagcatagcggcttggttcacctgagaggccggcatggggcctgggctgccaggacctcactttcccagggcctcacctacct

SEQ ID NO: 24234 - DNA, 201 bp, Homo sapiens
ctacctggggcctcggctgcctggggcctcggctgcctggggtctcacctgcctggggcctcacctgctggagtctttggtggccaggcatgtgacttacmtgggatttcacttgccgggcttcactgccaggagcctcccctgctggggaccttgccagctggggctggggatggtgcctactggggaccttgctttctg

SEQ ID NO: 24235 - DNA, 201 bp, Homo sapiens
ggttcagcatggagtcccccagcaactgccggcacctggaagccctggacggatacttcaatctcaccatgtcctaccgcagcgactccgacatcttcacrccctacggctggctggagccgtggtccggccagcctgcccacccaccgctcaacctctcggccaagaccgagctggtggcctgggcggtgtccaactgga

SEQ ID NO: 24236 - DNA, 201 bp, Homo sapiens
caccgctcaacctctcggccaagaccgagctggtggcctgggcggtgtccaactggaagccggactcggccagggtgcgctactaccagagcctgcaggcycatctcaaggtggacgtgtacggacgctcccacaagcccctgcccaaggggaccatgatggagacgctgtcccggtacaagttctatctggccttcgaga

SEQ ID NO: 24237 - DNA, 201 bp, Homo sapiens
actggaagccggactcggccagggtgcgctactaccagagcctgcaggctcatctcaaggtggacgtgtacggacgctcccacaagcccctgcccaagggraccatgatggagacgctgtcccggtacaagttctatctggccttcgagaactccttgcaccccgactacatcaccgagaagctgtggaggaacgccctgg

SEQ ID NO: 24238 - DNA, 201 bp, Homo sapiens
gtccaactggaagccggactcggccagggtgcgctactaccagagcctgcaggctcatctcaaggtggacgtgtacggacgctcccacaagcccctgcccmaggggaccatgatggagacgctgtcccggtacaagttctatctggccttcgagaactccttgcaccccgactacatcaccgagaagctgtggaggaacgc

SEQ ID NO: 24239 - DNA, 201 bp, Homo sapiens
ccgactccagtgtgtacccacaggcagacgcggtcatcgtgcaccactgggatatcatgtacaaccccagtgccaacctcccgccccccaccaggccgcargggcagcgctggatctggttcagcatggagtcccccagcaactgccggcacctggaagccctggacggatacttcaatctcaccatgtcctaccgcagcg

SEQ ID NO: 24240 - DNA, 201 bp, Homo sapiens
cacgtggatgacttccagagccccaaggacctggcccggtacctgcaggagctggacaaggaccacgcccgctacctgagctactttcgctggcgggagaygctgcggcctcgctccttcagctgggcactggctttctgcaaggcctgctggaagctgcagcaggaatccaggtaccagacggtgcgcagcatagcggct

SEQ ID NO: 24241 - DNA, 201 bp, Homo sapiens
attgggtcttggcttcaatgccacccttttgggaagccctaaaccaagtgaggtgttcttttcccttgcttcccatatttgtcccagttgcagccctgttsttatgtatttactcttcaatttcttatctatacctctcactcaattgttaattctttgggttcagtctcatgccatatttactcctagtacctaatgcag

SEQ ID NO: 24242 - DNA, 201 bp, Homo sapiens
tccttcagtcccagccagaagaatctctgaaagcatattgtgaatgtatacaatgtagtacaaacaatctctgtgatgattaacagtatgtcaccacttcwttttttaaaaaggatcacgtctaatgcccattttcccaactattctttccaaagtaagatataaggtagcttaataaactaagtaaaacgtatgacttga

SEQ ID NO: 24243 - DNA, 201 bp, Homo sapiens
ttctttccaaagtaagatataaggtagcttaataaactaagtaaaacgtatgacttgagtacaaaaggattgttttaatccccattattctggaaagtgcrtcctagtctcccagtctataacatcataataccttgagtataagtccaaatattaggttatatctatattaaaaacaaaatttctgtcatctgtcctggc

SEQ ID NO: 24244 - DNA, 201 bp, Homo sapiens
ggaaaaagccaaagcaatgccctctccacggatactaaagactcacctttccactcagctgctgccaccgtctttctgggaaaacaactgcaagttccttyatgtagctcgaaatgccaaagactgtatggtttcctactaccatttccaaaggatgaaccacatgcttcctgaccctggtacctgggaagagtattttga

SEQ ID NO: 24245 - DNA, 201 bp, Homo sapiens
tcaccacttcattttttaaaaaggatcacgtctaatgcccattttcccaactattctttccaaagtaagatataaggtagcttaataaactaagtaaaacrtatgacttgagtacaaaaggattgttttaatccccattattctggaaagtgcatcctagtctcccagtctataacatcataataccttgagtataagtcc

SEQ ID NO: 24246 - DNA, 201 bp, Homo sapiens
gtaattgggtcttggcttcaatgccacccttttgggaagccctaaaccaagtgaggtgttcttttcccttgcttcccatatttgtcccagttgcagccctsttgttatgtatttactcttcaatttcttatctatacctctcactcaattgttaattctttgggttcagtctcatgccatatttactcctagtacctaatg

SEQ ID NO: 24247 - DNA, 201 bp, Homo sapiens
aaaaaggatcacgtctaatgcccattttcccaactattctttccaaagtaagatataaggtagcttaataaactaagtaaaacgtatgacttgagtacaawaggattgttttaatccccattattctggaaagtgcatcctagtctcccagtctataacatcataataccttgagtataagtccaaatattaggttatatc

SEQ ID NO: 24248 - DNA, 201 bp, Homo sapiens
agaggagatgtcagaagaccaaaacttggtgaatagtcccagtgctaggtcatataggaaacagaaagcatgacagtggccttttgggaacccaagttacrtcctggtgaaagcagaaaggaggagacaggatggctgtcaacaacgtcagcatgggcatggctcccaggcatggaggtaattgggtcttggcttcaatgc

SEQ ID NO: 24249 - DNA, 201 bp, Homo sapiens
agataaaattgtccaggagacgtcatttgagaaaatgaaagaaaatcccatgacaaatcgttctacagtttccaaatctatcttggaccagtcaatttcckccttcatgagaaaaggaactgtgggggattggaaaaaccacttcactgttgcccagaatgagaggtttgatgaaatctatagaagaaagatggaaggaac

SEQ ID NO: 24250 - DNA, 201 bp, Homo sapiens
tgagcaagatgtaaataaaattaaaaggtggatggcaagagtgcaaatactatcttcaatccttcagtcccagccagaagaatctctgaaagcatattgtkaatgtatacaatgtagtacaaacaatctctgtgatgattaacagtatgtcaccacttcattttttaaaaaggatcacgtctaatgcccattttcccaact

SEQ ID NO: 24251 - DNA, 201 bp, Homo sapiens
gccctaaaccaagtgaggtgttcttttcccttgcttcccatatttgtcccagttgcagccctgttgttatgtatttactcttcaatttcttatctatacctctcactcaattgttaattctttgggttcagtctcatgccatatttactcctagtacctaatgcagtgcctggcacacagcaagtgcccttgagaacttgt

SEQ ID NO: 24252 - DNA, 201 bp, Homo sapiens
ttgggaagccctaaaccaagtgaggtgttcttttcccttgcttcccatatttgtcccagttgcagccctgttgttatgtatttactcttcaatttcttatytatacctctcactcaattgttaattctttgggttcagtctcatgccatatttactcctagtacctaatgcagtgcctggcacacagcaagtgcccttgag

SEQ ID NO: 24253 - DNA, 201 bp, Homo sapiens; identical to SEQ ID NO: 24241

SEQ ID NO: 24254 - DNA, 201 bp, Homo sapiens; identical to SEQ ID NO: 24242

SEQ ID NO: 24255 - DNA, 201 bp, Homo sapiens; identical to SEQ ID NO: 24243

SEQ ID NO: 24256 - DNA, 201 bp, Homo sapiens
actcctgagctcaagcaatccacctgcctcaacctcccaaagtgccaagattacagacctgctgccaccgtctttctgggaaaacaactgcaagttccttyatgtagctcgaaatgccaaagactgtatggtttcctactaccatttccaaaggatgaaccacatgcttcctgaccctggtacctgggaagagtattttga

SEQ ID NO: 24257 - DNA, 201 bp, Homo sapiens; identical to SEQ ID NO: 24245

SEQ ID NO: 24258 - DNA, 201 bp, Homo sapiens; identical to SEQ ID NO: 24246

SEQ ID NO: 24259 - DNA, 201 bp, Homo sapiens; identical to SEQ ID NO: 24247

SEQ ID NO: 24260 - DNA, 201 bp, Homo sapiens; identical to SEQ ID NO: 24248

SEQ ID NO: 24261 - DNA, 201 bp, Homo sapiens; identical to SEQ ID NO: 24249

SEQ ID NO: 24262 - DNA, 201 bp, Homo sapiens; identical to SEQ ID NO: 24250

SEQ ID NO: 24263 - DNA, 201 bp, Homo sapiens; identical to SEQ ID NO: 24251

SEQ ID NO: 24264 - DNA, 201 bp, Homo sapiens; identical to SEQ ID NO: 24252

SEQ ID NO: 24265 - DNA, 201 bp, Homo sapiens
tctactttggctccaaggtgcgctccccagtcagcgggatcctgctcaataatgaaatggatgacttcagctctaccagcatcaccaacgagtttggggtrcccccctcacctgccaatttcatccagccagggaagcagccgctctcgtccatgtgcccgacgatcatggtgggccaggacggccaggtccggatggtgg

SEQ ID NO: 24266 - DNA, 201 bp, Homo sapiens
actgctcacctgtctgtggtcgcagaggacggcagtgctgtgtccgccaccagcaccatcaacctctactttggctccaaggtgcgctccccagtcagcgrgatcctgctcaataatgaaatggatgacttcagctctaccagcatcaccaacgagtttggggtacccccctcacctgccaatttcatccagccagggaag

SEQ ID NO: 24267 - DNA, 201 bp, Homo sapiens
ccgccaactcggccaaaggcgaagccagcagtttcttctgctgccgggcaacgcgccttttaaacctgagggagtgggcgcgtgagcacttaatggcgccsgtgacagagtgagcttaacggattaataagcgcagccaggccagctctggggtctcggcaggtggtccgcgacatgacctccgagttcttctctgcccag

SEQ ID NO: 24268 - DNA, 201 bp, Homo sapiens
ggccaggacggccaggtccggatggtggtgggagctgccgggggcacgcagatcaccatggccactgcactggtatgtgtcacaccttttctccctggccrtgcccaccctgcacagcccccaagccatgctgatcacactcccatgccccaggccatcatctacaacctctggttcggctatgacgtgaagtgggccgtg

SEQ ID NO: 24269 - DNA, 201 bp, Homo sapiens
ccctggccgtgcccaccctgcacagcccccaagccatgctgatcacactcccatgccccaggccatcatctacaacctctggttcggctatgacgtgaagygggccgtggaggagccccggctgcacaaccagcttctgcccaacgtcacgacagtggagagaaacattgaccaggaagtgactgcagccctggagacccg

SEQ ID NO: 24270 - DNA, 201 bp, Homo sapiens
atggtggtgggagctgccgggggcacgcagatcaccatggccactgcactggtatgtgtcacaccttttctccctggccgtgcccaccctgcacagccccyaagccatgctgatcacactcccatgccccaggccatcatctacaacctctggttcggctatgacgtgaagtgggccgtggaggagccccggctgcacaac

SEQ ID NO: 24271 - DNA, 201 bp, Homo sapiens
aggacggcagtgctgtgtccgccaccagcaccatcaacctctactttggctccaaggtgcgctccccagtcagcgggatcctgctcaataatgaaatggaygacttcagctctaccagcatcaccaacgagtttggggtacccccctcacctgccaatttcatccagccagggaagcagccgctctcgtccatgtgcccga

SEQ ID NO: 24272 - DNA, 201 bp, Homo sapiens
agacccggcaccatcacacccagatcacgtccaccttcattgctgtggtgcaagccatcgtccgcatggctggtggctgggcagctgcctcggactccagraaaggtggggaacctgctggctactgattgctccaggcggacaaggctgacaagcaatccaggaacaaaatactcaccaggacgaggaagaggactttgg

SEQ ID NO: 24273 - DNA, 201 bp, Homo sapiens; identical to SEQ ID NO: 24265

SEQ ID NO: 24274 - DNA, 201 bp, Homo sapiens; identical to SEQ ID NO: 24266

SEQ ID NO: 24275 - DNA, 201 bp, Homo sapiens; identical to SEQ ID NO: 24268

SEQ ID NO: 24276 - DNA, 201 bp, Homo sapiens; identical to SEQ ID NO: 24269

SEQ ID NO: 24277 - DNA, 122 bp, Homo sapiens
atactcaccaggacgaggaagaggactttgggggacaggcttctcctgtgagcagcagagcagcacaataaatgaggccactgtgccaggctccagcagtscccccatctcagtctcccaaa

SEQ ID NO: 24278 - DNA, 201 bp, Homo sapiens; identical to SEQ ID NO: 24270

SEQ ID NO: 24279 - DNA, 201 bp, Homo sapiens; identical to SEQ ID NO: 24271

SEQ ID NO: 24280 - DNA, 201 bp, Homo sapiens; identical to SEQ ID NO: 24272

SEQ ID NO: 24281 - DNA, 201 bp, Homo sapiens; identical to SEQ ID NO: 24265

SEQ ID NO: 24282 - DNA, 201 bp, Homo sapiens; identical to SEQ ID NO: 24266

SEQ ID NO: 24283 - DNA, 201 bp, Homo sapiens; identical to SEQ ID NO: 24267

SEQ ID NO: 24284 - DNA, 201 bp, Homo sapiens
ccaggtccggatggtggtgggagctgccgggggcacgcagatcaccatggccactgcactggccatcatctacaacctctggttcggctatgacgtgaagygggccgtggaggagccccggctgcacaaccagcttctgcccaacgtcacgacagtggagagaaacattgaccaggaagtgactgcagccctggagacccg

SEQ ID NO: 24285 - DNA, 201 bp, Homo sapiens; identical to SEQ ID NO: 24271

SEQ ID NO: 24286 - DNA, 201 bp, Homo sapiens; identical to SEQ ID NO: 24272

SEQ ID NO: 24287 - DNA, 201 bp, Homo sapiens; identical to SEQ ID NO: 24265

SEQ ID NO: 24288 - DNA, 201 bp, Homo sapiens; identical to SEQ ID NO: 24266

SEQ ID NO: 24289 - DNA, 201 bp, Homo sapiens; identical to SEQ ID NO: 24267

SEQ ID NO: 24290 - DNA, 201 bp, Homo sapiens; identical to SEQ ID NO: 24284

SEQ ID NO: 24291 - DNA, 122 bp, Homo sapiens; identical to SEQ ID NO: 24277

SEQ ID NO: 24292 - DNA, 201 bp, Homo sapiens; identical to SEQ ID NO: 24271

SEQ ID NO: 24293 - DNA, 201 bp, Homo sapiens; identical to SEQ ID NO: 24272

SEQ ID NO: 24294 - DNA, 201 bp, Homo sapiens; identical to SEQ ID NO: 24265

SEQ ID NO: 24295 - DNA, 201 bp, Homo sapiens; identical to SEQ ID NO: 24266

SEQ ID NO: 24296 - DNA, 201 bp, Homo sapiens; identical to SEQ ID NO: 24284

SEQ ID NO: 24297 - DNA, 201 bp, Homo sapiens; identical to SEQ ID NO: 24271

SEQ ID NO: 24298 - DNA, 201 bp, Homo sapiens; identical to SEQ ID NO: 24272

SEQ ID NO: 24299 - DNA, 201 bp, Homo sapiens; identical to SEQ ID NO: 24266

SEQ ID NO: 24300 - DNA, 201 bp, Homo sapiens; identical to SEQ ID NO: 24268

SEQ ID NO: 24301 - DNA, 201 bp, Homo sapiens; identical to SEQ ID NO: 24269

SEQ ID NO: 24302 - DNA, 122 bp, Homo sapiens; identical to SEQ ID NO: 24277

SEQ ID NO: 24303 - DNA, 201 bp, Homo sapiens; identical to SEQ ID NO: 24270

SEQ ID NO: 24304 - DNA, 201 bp, Homo sapiens; identical to SEQ ID NO: 24265

SEQ ID NO: 24305 - DNA, 201 bp, Homo sapiens; identical to SEQ ID NO: 24267

SEQ ID NO: 24306 - DNA, 201 bp, Homo sapiens; identical to SEQ ID NO: 24271

SEQ ID NO: 24307 - DNA, 201 bp, Homo sapiens; identical to SEQ ID NO: 24272

SEQ ID NO: 24308 - DNA, 201 bp, Homo sapiens; identical to SEQ ID NO: 24265

SEQ ID NO: 24309 - DNA, 201 bp, Homo sapiens; identical to SEQ ID NO: 24266

SEQ ID NO: 24310 - DNA, 201 bp, Homo sapiens; identical to SEQ ID NO: 24284

SEQ ID NO: 24311 - DNA, 201 bp, Homo sapiens; identical to SEQ ID NO: 24271

SEQ ID NO: 24312 - DNA, 201 bp, Homo sapiens; identical to SEQ ID NO: 24272

SEQ ID NO: 24313 - DNA, 201 bp, Homo sapiens
agtgtgatggctgcagggctctctagaacatcattcctgccaagcctgtgggcaaagtcatccccgagctgaatgggaagctcactggcgtggccttccaygtccccaccaccaacatgttggtcatggacctgacctgccatctggagaaacctgccaaatacagtgacatcaagaggatggtgaagcaggcattgaggg

SEQ ID NO: 24314 - DNA, 201 bp, Homo sapiens
tgtttctggccgtgtttgtggaacagcctactccgtttctgccccgcttcctgcagcggctgctactcctggactatccccccgacagggtcacccttttyctgcacaacaacgaggtcttccatgaaccccacatcgctgactcctggccgcagctccaggaccacttctcagctgtgaagctcgtggggccggaggagg

SEQ ID NO: 24315 - DNA, 201 bp, Homo sapiens
ccatggaaacggtcccactaagctgcagctcaactacctgggaaactacgtccccaatggctggactcctgagggaggctgtggcttctgcaaccaggacyggaggacactcccgggggggcagcctcccccccgggtgtttctggccgtgtttgtggaacagcctactccgtttctgccccgcttcctgcagcggctgct

SEQ ID NO: 24316 - DNA, 201 bp, Homo sapiens
gcttctgcaaccaggaccggaggacactcccgggggggcagcctcccccccgggtgtttctggccgtgtttgtggaacagcctactccgtttctgccccgyttcctgcagcggctgctactcctggactatccccccgacagggtcacccttttcctgcacaacaacgaggtcttccatgaaccccacatcgctgactcct

SEQ ID NO: 24317 - DNA, 201 bp, Homo sapiens
tgggcacggggaagcgcttcctcaattctggtggattcatcggttttgccaccaccatccaccaaatcgtgcgccagtggaagtacaaggatgatgacgaygaccagctgttctacacacggctctacctggacccaggactgagggagaaactcagccttaatctggatcataagtctcggatctttcagaacctcaacg

SEQ ID NO: 24318 - DNA, 201 bp, Homo sapiens
ctggccggcagccccacagagctgctgaagaagttcgtccagagtggcagccgcctgctcttctctgcagagagcttctgctggcccgagtgggggctggyggagcagtaccctgaggtgggcacggggaagcgcttcctcaattctggtggattcatcggttttgccaccaccatccaccaaatcgtgcgccagtggaag

SEQ ID NO: 24319 - DNA, 201 bp, Homo sapiens
gcccgagtgggggctggcggagcagtaccctgaggtgggcacggggaagcgcttcctcaattctggtggattcatcggttttgccaccaccatccaccaartcgtgcgccagtggaagtacaaggatgatgacgacgaccagctgttctacacacggctctacctggacccaggactgagggagaaactcagccttaatct

SEQ ID NO: 24320 - DNA, 201 bp, Homo sapiens
gccccagagggatgtgttctcgggcagtgacacagacccggacatggccttctgtaagagctttcgagacaagggcatcttcctccatctgagcaatcagyatgaatttggccggctcctggccacttccagatacgacacggagcacctgcaccccgacctctggcagatcttcgacaaccccgtcgactggaaggagca

SEQ ID NO: 24321 - DNA, 201 bp, Homo sapiens
gagctttctgtagcctccggatacgcctttttttcagggcgtagccccagccaagctgctccccgcggcggccgcacagcagcccgagcgccccctttccrgagctcccctccggagctgggatccaggcgcgtagcggagatcccaggatcctgggtgctgtctgggcccgctccccaccatgacctcctcggggcctgg

SEQ ID NO: 24322 - DNA, 201 bp, Homo sapiens; identical to SEQ ID NO: 24314

SEQ ID NO: 24323 - DNA, 201 bp, Homo sapiens; identical to SEQ ID NO: 24315

SEQ ID NO: 24324 - DNA, 201 bp, Homo sapiens; identical to SEQ ID NO: 24316

SEQ ID NO: 24325 - DNA, 201 bp, Homo sapiens; identical to SEQ ID NO: 24317

SEQ ID NO: 24326 - DNA, 201 bp, Homo sapiens; identical to SEQ ID NO: 24318

SEQ ID NO: 24327 - DNA, 201 bp, Homo sapiens; identical to SEQ ID NO: 24319

SEQ ID NO: 24328 - DNA, 201 bp, Homo sapiens; identical to SEQ ID NO: 24320

SEQ ID NO: 24329 - DNA, 138 bp, Homo sapiens
atgggtcattttaaagatgtggtcacggtgttcttacragaaatcttattttcctttggtccttgtgaagatgctgtgatcacaaaggcagcccctggagcttctccgggcagaagaggaggtgggctggactgtcaa

SEQ ID NO: 24330 - DNA, 201 bp, Homo sapiens; identical to SEQ ID NO: 24321

SEQ ID NO: 24331 - DNA, 201 bp, Homo sapiens
actttcaggccctgttggaggagcagaacttgagtgtggccgagggccctaactacctgacggcctgtgcgggacccccatcgcggccccagcgccccttytgtgctgtctgtggcttcccatccccctacacctgtgtcagctgcggtgcccggtactgcactgtgcgctgtctggggacccaccaggagaccaggtgtc

SEQ ID NO: 24332 - DNA, 158 bp, Homo sapiens
cagggggagctcttcctggaccaagggaggagccgctcattcacccaacaaaactgtgtcttatctgccaggaaagaccagcctcactcctgggaactgtytggcaggtaggctgggccccccagtgctgttagaataaaaagcctcgtgccggaagc

SEQ ID NO: 24333 - DNA, 194 bp, Homo sapiens
ccggccttcagaaagacagaatttcatcacccaatgcagggggagctcttcctggaccaagggaggagccgctcattcacccaacaaaactgtgtcttatytgccaggaaagaccagcctcactcctgggaactgtctggcaggtaggctgggccccccagtgctgttagaataaaaagcctcgtgccggaagc

SEQ ID NO: 24334 - DNA, 201 bp, Homo sapiens
gcatcaaccggcagctggaggccctggagaatgacaacttccaggatgacccccacgcgggactccctcagctcggcaagagactgcctcagtttgatgaygatgcggacactggaaagaaaaagaagaaaacccgaggtgatcattttaaacttcgcttccgaaaaaactttcaggccctgttggaggagcagaacttga

SEQ ID NO: 24335 - DNA, 201 bp, Homo sapiens
ttgacagtccagcccacctcctcttctgcccggagaagctccaggggctgcctttgtgatcacagcatcttcacaaggaccaaaggaaaataagatttctygtaagaacaccgtgaccacatctttaaaatgacccatttcgtggctcccacaagatttacacctccacactgaggccggaagtggttttgcccctataaa

SEQ ID NO: 24336 - DNA, 199 bp, Homo sapiens
actgcccggccttcagaaagacagaatttcatcacccaatgcagggggagctcttcctggaccaagggaggagccgctcattcacccaacaaaactgtgtyttatctgccaggaaagaccagcctcactcctgggaactgtctggcaggtaggctgggccccccagtgctgttagaataaaaagcctcgtgccggaagc

SEQ ID NO: 24337 - DNA, 201 bp, Homo sapiens
ctggggacccaccaggagaccaggtgtctgaagtggactgtgtgagcctgggcattcccagagaggaagggccgctgtgcactgcccggccttcagaaagrcagaatttcatcacccaatgcagggggagctcttcctggaccaagggaggagccgctcattcacccaacaaaactgtgtcttatctgccaggaaagacca

SEQ ID NO: 24338 - DNA, 201 bp, Homo sapiens; identical to SEQ ID NO: 24331

SEQ ID NO: 24339 - DNA, 158 bp, Homo sapiens; identical to SEQ ID NO: 24332

SEQ ID NO: 24340 - DNA, 201 bp, Homo sapiens
acgcgcagaagtacaagctaccggaagtgatggcgcccctactaaagccttggggttagtacgcgtgcgcagcagtttcttccgacagttgtgttgtgccratggtggagaagaaaacttcggttcgctcccaggaccccgggcagcggcgggtgctggaccgggctgcccggcagcgtcgcatcaaccggcagctggagg

SEQ ID NO: 24341 - DNA, 194 bp, Homo sapiens; identical to SEQ ID NO: 24333

SEQ ID NO: 24342 - DNA, 201 bp, Homo sapiens; identical to SEQ ID NO: 24334

SEQ ID NO: 24343 - DNA, 201 bp, Homo sapiens; identical to SEQ ID NO: 24335

SEQ ID NO: 24344 - DNA, 201 bp, Homo sapiens
cgtaatgagtcaaagctgtggcgcacgcgcagaagtacaagctaccggaagtgatggcgcccctactaaagccttggggttagtacgcgtgcgcagcagtytcttccgacagttgtgttgtgccaatggtggagaagaaaacttcggttcgctcccaggaccccgggcagcggcgggtgctggaccgggctgcccggcagc

SEQ ID NO: 24345 - DNA, 201 bp, Homo sapiens
cacgcgcagaagtacaagctaccggaagtgatggcgcccctactaaagccttggggttagtacgcgtgcgcagcagtttcttccgacagttgtgttgtgcyaatggtggagaagaaaacttcggttcgctcccaggaccccgggcagcggcgggtgctggaccgggctgcccggcagcgtcgcatcaaccggcagctggag

SEQ ID NO: 24346 - DNA, 199 bp, Homo sapiens; identical to SEQ ID NO: 24336

SEQ ID NO: 24347 - DNA, 201 bp, Homo sapiens; identical to SEQ ID NO: 24337

SEQ ID NO: 24348 - DNA, 151 bp, Homo sapiens
tttaacagtgacacccacccttccagctttgatgttagagctggcattgctctcaaagaccactttgtcaagctcattacctggtaatggcaatgaagttkgttgtagcaacagggtattggacctgacgggccacatggccaccaaggaa

SEQ ID NO: 24349 - DNA, 201 bp, Homo sapiens
agttggtgaagcaggcattggggcacttcctcaggtgcatcctggcctacactgaacaccaggttttcccctccgattttaacagtgacacccacccttcyagctttgatgttagagctggcattgctctcaaagaccactttgtcaagctcattacctggtaatggcaatgaagttggttgtagcaacagggtattggac

SEQ ID NO: 24350 - DNA, 150 bp, Homo sapiens
tttagtggtgttgatgtccggtcaccagggttgcttttaactccagtaamgtggatattgtcaccattaatgacactttcattgacctcagttacatgatttccacgttcctgtgtgatttcacccacggcaagtttcagggcattgtca

SEQ ID NO: 24351 - DNA, 201 bp, Homo sapiens
gttggtgaagcaggcattggggcacttcctcaggtgcatcctggcctacactgaacaccaggttttcccctccgattttaacagtgacacccacccttccrgctttgatgttagagctggcattgctctcaaagaccactttgtcaagctcattacctggtaatggcaatgaagttggttgtagcaacagggtattggacc

SEQ ID NO: 24352 - DNA, 201 bp, Homo sapiens
tgactatgttgttgaatacactggtgtctttactatcttggagaaggcttgggctcacttagaaggtagaactaaaagggtcattatctctgaccctttcrccaattctcctacgtttgtgatgtgtgaaccataattggtatgaaaacaaccatatgattttcagctgtgcctctggcatcaccaactgcttagtcccct

SEQ ID NO: 24353 - DNA, 201 bp, Homo sapiens
tctatgcaaccaggctccacataaacacggtttccttgaaggccgccatgcagagctgtgcttcctggacgtgattcccttttggaagctggacctggacsaggactacagggttacctgcttcacctcctggagcccctgcttcagctgtgcccaggaaatggctaaattcatttcaaaaaacaaacacgtgagcctgtg

SEQ ID NO: 24354 - DNA, 109 bp, Homo sapiens
cccacctcscgggcgctggctgcaatgactttctctttccctttgcaattgccttgggtcctgccgcacagagcggcctgtctttatcagaggtccctctgccaggggg

SEQ ID NO: 24355 - DNA, 198 bp, Homo sapiens
agcaatgcactcctgaccaagtagattcttttaaaaattagagtgcattactttgaatcaaaaatttatttatatttcaagaataaagtactaagattgtrctcaatacacagaaaagtttcaaacctactaatccagcgacaatttgaatcggttttgtaggtagaggaataaaatgaaatactaaatctttctgta

SEQ ID NO: 24356 - DNA, 201 bp, Homo sapiens
aattatgacgaatttcagcactgttggagcaagttcgtgtacagccaaagagagctatttgagccttggaataatctgcctaaatattatatattactgcrcatcatgctgggggagattctcagacactcgatggatccacccacattcactttcaactttaacaatgaaccttgggtcagaggacggcatgagacttac

SEQ ID NO: 24357 - DNA, 201 bp, Homo sapiens
aatgacatacagtgaatttaagcactgctgggacacctttgtggaccaccagggatgtcccttccagccctgggatggactagatgagcacagccaagacytgagtgggaggctgcgggccattctccagaatcaggaaaactgaaggatgggcctcagtctctaaggaaggcagagacctgggttgagcctcagaataaa

SEQ ID NO: 24358 - DNA, 201 bp, Homo sapiens
aattcgatgaaaattatgcattcctgcaccgcacgctaaaggagattctcagatacctgatggatccagacacattcactttcaactttaataatgacccyttggtccttcgacggcgccagacctacttgtgctatgaggtggagcgcctggacaatggcacctgggtcctgatggaccagcacatgggctttctatgca

SEQ ID NO: 24359 - DNA, 201 bp, Homo sapiens
tccagatcacctggtttgtatcctggaccccctgcccggactgtgtggcgaagctggccgaattcctgtctgagcaccccaatgtcaccctgaccatctcygccgcccgcctctactactactgggaaagagattaccgaagggcgctctgcaggctgagtcaggcaggagcccgcgtgaagatcatggactatgaagaat

SEQ ID NO: 24360 - DNA, 201 bp, Homo sapiens
ggacagggacaagcgtatctaagaggctgaacatgaatccacagatcagaaatccgatggagcggatgtatcgagacacattctacgacaactttgaaaaygaacccatcctctatggtcggagctacacttggctgtgctatgaagtgaaaataaagaggggccgctcaaatctcctttgggacacaggggtctttcgag

SEQ ID NO: 24361 - DNA, 201 bp, Homo sapiens
tggtcggagctacacttggctgtgctatgaagtgaaaataaagaggggccgctcaaatctcctttgggacacaggggtctttcgaggccaggtgtatttcragcctcagtaccacgcagaaatgtgcttcctctcttggttctgtggcaaccagctgcctgcttacaagtgtttccagatcacctggtttgtatcctggac

SEQ ID NO: 24362 - DNA, 201 bp, Homo sapiens
ggaaaactttgtgtacaatgaaggtcagcaattcatgccttggtacaaattcgatgaaaattatgcattcctgcaccgcacgctaaaggagattctcagayacctgatggatccagacacattcactttcaactttaataatgaccctttggtccttcgacggcgccagacctacttgtgctatgaggtggagcgcctgga

SEQ ID NO: 24363 - DNA, 185 bp, Homo sapiens
aaaaatcagagtcaattaattttaattgaaaatttctcttatgttccaagtgtacaagagtaagattatgctcaatattcccagaatagttttcaatgtaytaatgaagtgattaattggctccatatttagactaataaaacattaagaatcttccataattgtttccacaaacactagcaaat

SEQ ID NO: 24364 - DNA, 201 bp, Homo sapiens
aatgtcaccctgaccatctccgccgcccgcctctactactactgggaaagagattaccgaagggcgctctgcaggctgagtcaggcaggagcccgcgtgamgatcatggactatgaagaatttgcatactgctgggaaaactttgtgtacaatgaaggtcagcaattcatgccttggtacaaattcgatgaaaattatgca

SEQ ID NO: 24365 - DNA, 201 bp, Homo sapiens; identical to SEQ ID NO: 24358

SEQ ID NO: 24366 - DNA, 201 bp, Homo sapiens; identical to SEQ ID NO: 24359

SEQ ID NO: 24367 - DNA, 201 bp, Homo sapiens; identical to SEQ ID NO: 24362

SEQ ID NO: 24368 - DNA, 201 bp, Homo sapiens
gaggagcacagccaagccctgagtgggaggctgcgggccattctccaggtgagggcttcctccctctgcctggtgccccatcggcctccccctcctccccrctcccctgtgccttgccttcccctctgctcagagcctcctctgggttccctgctccccacagggcgcccagctccgtccctccctttccttctcacagcc

SEQ ID NO: 24369 - DNA, 201 bp, Homo sapiens
agccaagccctgagtgggaggctgcgggccattctccaggtgagggcttcctccctctgcctggtgccccatcggcctccccctcctccccgctcccctgkgccttgccttcccctctgctcagagcctcctctgggttccctgctccccacagggcgcccagctccgtccctccctttccttctcacagcctccttctct

SEQ ID NO: 24370 - DNA, 201 bp, Homo sapiens; identical to SEQ ID NO: 24360

SEQ ID NO: 24371 - DNA, 201 bp, Homo sapiens; identical to SEQ ID NO: 24361

SEQ ID NO: 24372 - DNA, 169 bp, Homo sapiens
aaaaatcagagtcaattaattttaattgaaaatttctcttatgttccaagtgtacaagagtaagattatgctcaatattcccagaatagttttcaatgtaytaatgaagtgattaattggctccatatttagactaataaaacattaagaatcttccataattgtttcc

SEQ ID NO: 24373 - DNA, 201 bp, Homo sapiens; identical to SEQ ID NO: 24364

SEQ ID NO: 24374 - DNA, 201 bp, Homo sapiens; identical to SEQ ID NO: 24358

SEQ ID NO: 24375 - DNA, 201 bp, Homo sapiens; identical to SEQ ID NO: 24359

SEQ ID NO: 24376 - DNA, 201 bp, Homo sapiens; identical to SEQ ID NO: 24360

SEQ ID NO: 24377 - DNA, 201 bp, Homo sapiens
cacttggctgtgctatgaagtgaaaataaagaggggccgctcaaatctcctttgggacacaggggtctttcgaggccagctcctctcccaggtgtatttcragcctcagtaccacgcagaaatgtgcttcctctcttggttctgtggcaaccagctgcctgcttacaagtgtttccagatcacctggtttgtatcctggac

SEQ ID NO: 24378 - DNA, 201 bp, Homo sapiens; identical to SEQ ID NO: 24362

SEQ ID NO: 24379 - DNA, 185 bp, Homo sapiens; identical to SEQ ID NO: 24363

SEQ ID NO: 24380 - DNA, 201 bp, Homo sapiens; identical to SEQ ID NO: 24364

SEQ ID NO: 24381 - DNA, 201 bp, Homo sapiens
cgcccagaactttggcttccaggatttctccagtgggcacttcttgtgggagaacatcaaggccaaaaccgaagttggtgagatggcaaaacagtatataragaaaagtcttttgcttccagaccatgtgatcacacgcctaatgatgtctgagttggagaatagccgtggccagcactggctcctcgatggttttcctag

SEQ ID NO: 24382 - DNA, 201 bp, Homo sapiens
gatgacgtcactggtgaaccattagtccagcaggaggatgataaacctgaagcagttgctgccaggctgagacagtacaaggatatggcaaagccagtcaytgaattatactagagccgaggagttctccaattttctgggacagagacgaacaaaatctggccctatgtttacacacttttctcgaacatgatcacatct

SEQ ID NO: 24383 - DNA, 201 bp, Homo sapiens
accactgcgctccagcctgggcaacagagcctccaaaaaaataaataaaaataaaaatcatttatctctcttttcttacttcttaggatgctttcattggmtttggaggaaatgtgatcaggcaacaagtcaaggataacgccaaatggtatatcactgattttgtagagctgctgggagaaccggaagaataacatccat

SEQ ID NO: 24384 - DNA, 201 bp, Homo sapiens
ggtacagatgatctgcactgtcaagtaaactacagttaggaatcctcaaagattggtttgtttgtttttaactgtagttccagtattatatgatcactatygatttcctggagagttttgtaatctgaattctttatgtatattcctagctatatttcatacaaagtgttttaagagtggagagtcaattaaacaccttta

SEQ ID NO: 24385 - DNA, 133 bp, Homo sapiens
tacaaagtgttttaagagtggagagtcaattaaacacctttactcttaggaatatagattcggcagccttcagtgaatattggtttttttccctttggtakgtcaataaaagtttatccatgtgtcagaacag

SEQ ID NO: 24386 - DNA, 166 bp, Homo sapiens
atgctgtgtgttttgatgttgacagcacggtcatcagtgaagaaggaatcggatgctttcattggmtttggaggaaatgtgatcaggcaacaagtcaaggataacgccaaatggtatatcactgattttgtagagctgctgggagaaccggaagaataacatccat

SEQ ID NO: 24387 - DNA, 201 bp, Homo sapiens; identical to SEQ ID NO: 24384

SEQ ID NO: 24388 - DNA, 134 bp, Homo sapiens
tacaaagtgttttaagagtggagagtcaattaaacacctttactcttaggaatatagattcggcagccttcagtgaatattggtttttttccctttggtakgtcaataaaagtttatccatgtgtcagaacaga

SEQ ID NO: 24389 - DNA, 201 bp, Homo sapiens
ggagatgggaaagacattcccggtcaggcatctctggtgtttgatgttgcattattggacctccataaccccaaggacagcatttccattgagaacaaggyagtacctgaaaactgtgagcggttaagtcaaagtggggactttctcaggtatcattacaatggcacgcttctggatggcaccctctttgattccagctac

SEQ ID NO: 24390 - DNA, 201 bp, Homo sapiens
tcaggcatctctggtgtttgatgttgcattattggacctccataaccccaaggacagcatttccattgagaacaaggcagtacctgaaaactgtgagcggwtaagtcaaagtggggactttctcaggtatcattacaatggcacgcttctggatggcaccctctttgattccagctactctcggaaccgcacgtttgacac

SEQ ID NO: 24391 - DNA, 201 bp, Homo sapiens
gcaccgtgcgcagcggcgacttcgtgcgctaccactacgtggggacgttccccgacggccagaagttcgactccagctatgacagagactccactttcaaygtgtttgtgggaaaaggacagctgatcacagggatggaccaggctcttgttgggatgtgcgtaaacgagagacatttcgtgaagattcccccaaagcttg

SEQ ID NO: 24392 - DNA, 201 bp, Homo sapiens
accccaaggacagcatttccattgagaacaaggcagtacctgaaaactgtgagcggttaagtcaaagtggggactttctcaggtatcattacaatggcacrcttctggatggcaccctctttgattccagctactctcggaaccgcacgtttgacacgtacattgggcagggctacgtgattcctgggatggatgaaggtc

SEQ ID NO: 24393 - DNA, 201 bp, Homo sapiens
gcagtgccgtattagtgtttgacattgagctgctggagctggtggctggccttcctgaggggtacatgttcatatggaatggtgaggtgtcacccaacctytttgaagaaattgacaaggatggcaacggagaagtcctcctggaagagttctcagagtacattcacgcccaggtggcatctggcaaagggaaactcgctc

SEQ ID NO: 24394 - DNA, 201 bp, Homo sapiens
gggctgatcgccagtgatagtaaacaaaatctgtgcagagggccttagcatgggatgtgtccagtattgaaaaggctgcactgccaaccatgatttgtgarccttctgggaaattttgttattaaaagaatatatagtgtcagacggaagttataatcatcttggaggaaccataagaaaaagtgtccagggtatctatat

SEQ ID NO: 24395 - DNA, 201 bp, Homo sapiens
tagcatgggatgtgtccagtattgaaaaggctgcactgccaaccatgatttgtgagccttctgggaaattttgttattaaaagaatatatagtgtcagacrgaagttataatcatcttggaggaaccataagaaaaagtgtccagggtatctatataaagagggttaaatttttttttaacttgctggttaaaacatttta

SEQ ID NO: 24396 - DNA, 201 bp, Homo sapiens
tggcacgcttctggatggcaccctctttgattccagctactctcggaaccgcacgtttgacacgtacattgggcagggctacgtgattcctgggatggatraaggtctacttggtgtttgcattggagaaaagcgaaggattgtggtcccgcctcacctggggtatggagaggaaggaagagggaatatccccggctcggc

SEQ ID NO: 24397 - DNA, 201 bp, Homo sapiens
tgccaaccatgatttgtgagccttctgggaaattttgttattaaaagaatatatagtgtcagacggaagttataatcatcttggaggaaccataagaaaargtgtccagggtatctatataaagagggttaaatttttttttaacttgctggttaaaacattttagaaatattcttgagatgggcaggagagtcaaagggc

SEQ ID NO: 24398 - DNA, 201 bp, Homo sapiens
gtcccaatagatgagctgctgagcatcaacaaggtgacatttttctgctgcccatttgtgtcctggagacggtggtaccctgaaggcagaggccagctgcygcaagacagcaatgacagtccacctgccgacctgattcctgcatcatggaataaccacatggctaccttctatcctctgttcccaaatggtggtggcact

SEQ ID NO: 24399 - DNA, 201 bp, Homo sapiens
tcatcttggaggaaccataagaaaaagtgtccagggtatctatataaagagggttaaatttttttttaacttgctggttaaaacattttagaaatattctwgagatgggcaggagagtcaaagggcttgcttgccccagcagagttcccagcagacagccatggctcttcccagcagcctgtgcaaattctgatgatggcc

SEQ ID NO: 24400 - DNA, 201 bp, Homo sapiens
tgacagtccacctgccgacctgattcctgcatcatggaataaccacatggctaccttctatcctctgttcccaaatggtggtggcacttatcctgaagtcrtcaatgatttccctttgaaactactttattttactaatttaaactattttgtactgatgtagccctgaggtagttcatgaaaatgctgtgcactcattcc

SEQ ID NO: 24401 - DNA, 201 bp, Homo sapiens
ggggtttcactgtgttggccaggatggtctcaatctcgacctcgtgatccgcccacctcggcctcccaaagtgttgggattacaggcatgaatcaccatgsctagccacttagttttttgtcattcccacctttctatcccatagaacactcttttttatcttccctgaaccatattgatgagataaatagggctgggggc

SEQ ID NO: 24402 - DNA, 201 bp, Homo sapiens
ggtctcaatctcgacctcgtgatccgcccacctcggcctcccaaagtgttgggattacaggcatgaatcaccatgcctagccacttagttttttgtcattyccacctttctatcccatagaacactcttttttatcttccctgaaccatattgatgagataaatagggctgggggctgggccccgctggtcactcaacaga

SEQ ID NO: 24403 - DNA, 201 bp, Homo sapiens
cagccgaggaatttaaactcaaagaccaggaagccaaacaggatgaactctaaacctggcacgaaccagatggtgccagggagtacgtgacaccaagccamctgtgtggcaagacgtgcagtgagggtgcaagggtctctcagaagttgcatcattagccagtagtaggtgggtcacatagtacctggtgtacacatcggg

SEQ ID NO: 24404 - DNA, 201 bp, Homo sapiens
ggtttcactgtgttggccaggatggtctcaatctcgacctcgtgatccgcccacctcggcctcccaaagtgttgggattacaggcatgaatcaccatgccyagccacttagttttttgtcattcccacctttctatcccatagaacactcttttttatcttccctgaaccatattgatgagataaatagggctgggggctg

SEQ ID NO: 24405 - DNA, 201 bp, Homo sapiens
gtgttgggattacaggcatgaatcaccatgcctagccacttagttttttgtcattcccacctttctatcccatagaacactcttttttatcttccctgaaycatattgatgagataaatagggctgggggctgggccccgctggtcactcaacagagtatttcccttggccgagatggaagttttgtcccaatagatgagc

SEQ ID NO: 24406 - DNA, 201 bp, Homo sapiens
caggatgaactctaaacctggcacgaaccagatggtgccagggagtacgtgacaccaagccaactgtgtggcaagacgtgcagtgagggtgcaagggtctytcagaagttgcatcattagccagtagtaggtgggtcacatagtacctggtgtacacatcggggtgggttgatatatggggtgagaagtttgggctgatcg

SEQ ID NO: 24407 - DNA, 201 bp, Homo sapiens
atgagataaatagggctgggggctgggccccgctggtcactcaacagagtatttcccttggccgagatggaagttttgtcccaatagatgagctgctgagyatcaacaaggtgacatttttctgctgcccatttgtgtcctggagacggtggtaccctgaaggcagaggccagctgctgcaagacagcaatgacagtccac

SEQ ID NO: 24408 - DNA, 201 bp, Homo sapiens
caagggtctctcagaagttgcatcattagccagtagtaggtgggtcacatagtacctggtgtacacatcggggtgggttgatatatggggtgagaagtttrggctgatcgccagtgatagtaaacaaaatctgtgcagagggccttagcatgggatgtgtccagtattgaaaaggctgcactgccaaccatgatttgtgag

SEQ ID NO: 24409 - DNA, 201 bp, Homo sapiens
aaggtgacatttttctgctgcccatttgtgtcctggagacggtggtaccctgaaggcagaggccagctgctgcaagacagcaatgacagtccacctgccgrcctgattcctgcatcatggaataaccacatggctaccttctatcctctgttcccaaatggtggtggcacttatcctgaagtcgtcaatgatttccctttg

SEQ ID NO: 24410 - DNA, 201 bp, Homo sapiens
gtgctgagtaagaagggagattacctcaaatatcactacaatgcctcacttctggatgggaccctgctggactccacgtggaatttaggcaaaacttacartattgttctgggatctgggcaagttgtgttggggatggacatgggtctcagagagatgtgcgttggcgagaaacggacagtgatcattccgcctcacctg

SEQ ID NO: 24411 - DNA, 201 bp, Homo sapiens
aaatctgtgcagagggccttagcatgggatgtgtccagtattgaaaaggctgcactgccaaccatgatttgtgagccttctgggaaattttgttattaaargaatatatagtgtcagacggaagttataatcatcttggaggaaccataagaaaaagtgtccagggtatctatataaagagggttaaatttttttttaact

SEQ ID NO: 24412 - DNA, 107 bp, Homo sapiens
tgtactgatgtagccctgaggtagttcatgaaaatgctgtgcactcattccatggaataaatgttggaaagctgatcttttctgatataaaatgttgaatkatatta

SEQ ID NO: 24413 - DNA, 201 bp, Homo sapiens
agctatgacagagactccactttcaacgtgtttgtgggaaaaggacagctgatcacagggatggaccaggctcttgttgggatgtgcgtaaacgagagacrtttcgtgaagattcccccaaagcttgcctacggaagtgaaggagtttctggtgtgatcccccccaattcagtgcttcattttgatgtacttctgatggat

SEQ ID NO: 24414 - DNA, 201 bp, Homo sapiens
ctggtgtgatcccccccaattcagtgcttcattttgatgtacttctgatggatatttggaattctgaagaccgggttcagattcacacctatttcaagccsctgagttgccctcagaccatccaggtgtctgattttgtgaggtaccactacaacgggacgttcctggacggaactctgtttgattcgagtcacaatcgca

SEQ ID NO: 24415 - DNA, 201 bp, Homo sapiens
ctcacctgggctatggggaagctggcgtggatggagaagtgcccggcagtgccgtattagtgtttgacattgagctgctggagctggtggctggccttccygaggggtacatgttcatatggaatggtgaggtgtcacccaacctctttgaagaaattgacaaggatggcaacggagaagtcctcctggaagagttctcag

SEQ ID NO: 24416 - DNA, 201 bp, Homo sapiens
ggaaaaggacagctgatcacagggatggaccaggctcttgttgggatgtgcgtaaacgagagacatttcgtgaagattcccccaaagcttgcctacggaartgaaggagtttctggtgtgatcccccccaattcagtgcttcattttgatgtacttctgatggatatttggaattctgaagaccgggttcagattcacacc

SEQ ID NO: 24417 - DNA, 201 bp, Homo sapiens
attcatccctgccagccggacgcccctgaaacaggtcatctgcctgcatcaagcctgacaatccatttgcttgcgaagtcaccgctgctcaagtccacatmcaggtctcttccgctatactttattaggaatataaaacctaatctatgtacaggacacgtcggtgtcagggtgaggggtggccacaaggcgggccatggc

SEQ ID NO: 24418 - DNA, 201 bp, Homo sapiens
ccggctcagcacagcccccgcagcagcccctggaccccggatctttggtccagaatgaattcatccctgccagccggacgcccctgaaacaggtcatctgyctgcatcaagcctgacaatccatttgcttgcgaagtcaccgctgctcaagtccacatccaggtctcttccgctatactttattaggaatataaaacctaa

SEQ ID NO: 24419 - DNA, 195 bp, Homo sapiens
gccagccggacgcccctgaaacaggtcatctgcctgcatcaagcctgacaatccatttgcttgcgaagtcaccgctgctcaagtccacatccaggtctctyccgctatactttattaggaatataaaacctaatctatgtacaggacacgtcggtgtcagggtgaggggtggccacaaggcgggccatggctggg

SEQ ID NO: 24420 - DNA, 201 bp, Homo sapiens
tgctaatgcagcgcgggcgccccaagagcgaccggctggggaagatccggagtctggacctgtcaggattggagctgctttccgagcacctggaccccaarctcctgtgccgcctgacgcagctgcaggagcttgacctgtctaacaaccacctggagacgctgccggacaacctgggcctgtcccacctgcgtgtcctcc

SEQ ID NO: 24421 - DNA, 201 bp, Homo sapiens
aagaagtgttcctgctttgactgacaggcaggcccaggagttgaggcttctagagcagagactcttgggagctcatgggtttgcacacttctctccggctsagcacagcccccgcagcagcccctggaccccggatctttggtccagaatgaattcatccctgccagccggacgcccctgaaacaggtcatctgcctgcat

SEQ ID NO: 24422 - DNA, 201 bp, Homo sapiens
actttgtgaagtcggctgtcagggatgtccgctacgggcccgagtccctcagcgagttcacccagtggcgggtgcggatgatctctgaggagctggtggcsgccagtaggacccaggtgcaaaaggctaacagcccagagaagcccccagaagctggagctgcccacaagcccagggccagactggcggccttgaaacggc

SEQ ID NO: 24423 - DNA, 201 bp, Homo sapiens
ttgtgaatgaggacatcgtggcctccaaggggagcggcctgggcaccatctgcctgtggagctggaggcagacgtgggggggccggggcagccagtccacrgtggcagtggtggtcctggcgcggctgcaatggtcgtccaccgagttggcctacttctcgctcagcgcctgccctgataaggggattgtgctctgtgggg

SEQ ID NO: 24424 - DNA, 201 bp, Homo sapiens
cgggtgcggatgatctctgaggagctggtggccgccagtaggacccaggtgcaaaaggctaacagcccagagaagcccccagaagctggagctgcccacargcccagggccagactggcggccttgaaacggccagacgacgtcccactcagcctctctcccagcaagcgggcgtgtgcctccccgtcggcccaggtggag

SEQ ID NO: 24425 - DNA, 201 bp, Homo sapiens
tggggaagtaaggaccagagacaaaaagggagtaactattcccagtcagaggcgctatgtgtattattatagctacctgttaaagaatcatctggattatwgaccagtggcactgttgtttcacaagatgatgtttgaaactattccaatgttcagtggcggaacttgcaatcctcagtttgtggtctgccagctaaaggt

SEQ ID NO: 24426 - DNA, 201 bp, Homo sapiens
gtgctgcctgcaagcttcttttttctcattaaatataaaatattttgtaatgctgcacagaaattttcaatttgagattctacagtaagcgttttttttcyttgaagatttatgatgcacttattcaatagctgtcagccgttccacccttttgaccttacacattctattacaatgaattttgcagttttgcacattttt

SEQ ID NO: 24427 - DNA, 201 bp, Homo sapiens
attataaaaattgacaatgatttattaaatatgttttctcaattgtaacgacttctccatctcctgtgtaatcaaggccagtgctaaaattcagatgctgktagtacctacatcagtcaacaacttacacttattttactagttttcaatcataatacctgctgtggatgcttcatgtgctgcctgcaagcttcttttttc

SEQ ID NO: 24428 - DNA, 201 bp, Homo sapiens
gaagatcttgaccaatggctaagtgaagatgacaatcatgttgcagcaattcactgtaaagctggaaagggacgaactggtgtaatgatatgtgcatattkattacatcggggcaaatttttaaaggcacaagaggccctagatttctatggggaagtaaggaccagagacaaaaagggagtaactattcccagtcagagg

SEQ ID NO: 24429 - DNA, 201 bp, Homo sapiens
acctttttgtgtcaaaaggacatttaaaattcaattaggattaataaagatggcactttcccgttttattccagttttataaaaagtggagacagactgakgtgtatacgtaggaattttttccttttgtgttctgtcaccaactgaagtggctaaagagctttgtgatatactggttcacatcctacccctttgcacttg

SEQ ID NO: 24430 - DNA, 201 bp, Homo sapiens
ccacagctagaacttatcaaacccttttgtgaagatcttgaccaatggctaagtgaagatgacaatcatgttgcagcaattcactgtaaagctggaaaggracgaactggtgtaatgatatgtgcatatttattacatcggggcaaatttttaaaggcacaagaggccctagatttctatggggaagtaaggaccagagac

SEQ ID NO: 24431 - DNA, 201 bp, Homo sapiens
ttttcctgaccaatcttgttttaccctatacatccacagggttttgacacttgttgtccagttgaaaaaaggttgtgtagctgtgtcatgtatataccttkttgtgtcaaaaggacatttaaaattcaattaggattaataaagatggcactttcccgttttattccagttttataaaaagtggagacagactgatgtgta

SEQ ID NO: 24432 - DNA, 201 bp, Homo sapiens
gatgaagatcagcatacacaaattacaaaagtctgaatttttttttatcaagagggataaaacaccatgaaaataaacttgaataaactgaaaatggaccyttttttttttaatggcaataggacattgtgtcagattaccagttataggaacaattctcttttcctgaccaatcttgttttaccctatacatccacaggg

SEQ ID NO: 24433 - DNA, 201 bp, Homo sapiens
tgcacaatatccttttgaagaccataacccaccacagctagaacttatcaaacccttttgtgaagatcttgaccaatggctaagtgaagatgacaatcatrttgcagcaattcactgtaaagctggaaagggacgaactggtgtaatgatatgtgcatatttattacatcggggcaaatttttaaaggcacaagaggccct

SEQ ID NO: 24434 - DNA, 201 bp, Homo sapiens
gcctctcgctcgcctcccgcctcccctcggtcttccgaggcgcccgggctcccggcgcggcggcggagggggcgggcaggccggcgggcggtgatgtggcrggactctttatgcgctgcggcaggatacgcgctcggcgctgggacgcgactgcgctcagttctctcctctcggaagctgcagccatgatggaagtttgag

SEQ ID NO: 24435 - DNA, 201 bp, Homo sapiens
cctacccctttgcacttgtggcaacagataagtttgcagttggctaagagaggtttccgaagggttttgctacattctaatgcatgtattcgggttagggsaatggagggaatgctcagaaaggaaataattttatgctggactctggaccatataccatctccagctatttacacacacctttctttagcatgctacagt

SEQ ID NO: 24436 - DNA, 201 bp, Homo sapiens
taggattaataaagatggcactttcccgttttattccagttttataaaaagtggagacagactgatgtgtatacgtaggaattttttccttttgtgttctrtcaccaactgaagtggctaaagagctttgtgatatactggttcacatcctacccctttgcacttgtggcaacagataagtttgcagttggctaagagagg

SEQ ID NO: 24437 - DNA, 201 bp, Homo sapiens
gctgaaagacattatgacaccgccaaatttaattgcagagttgcacaatatccttttgaagaccataacccaccacagctagaacttatcaaacccttttrtgaagatcttgaccaatggctaagtgaagatgacaatcatgttgcagcaattcactgtaaagctggaaagggacgaactggtgtaatgatatgtgcatat

SEQ ID NO: 24438 - DNA, 201 bp, Homo sapiens
tcagaaaaagtagaaaatggaagtctatgtgatcaagaaatcgatagcatttgcagtatagagcgtgcagataatgacaaggaatatctagtacttacttwaacaaaaaatgatcttgacaaagcaaataaagacaaagccaaccgatacttttctccaaattttaaggtgaagctgtacttcacaaaaacagtagaggag

SEQ ID NO: 24439 - DNA, 201 bp, Homo sapiens
cccttttgtgaagatcttgaccaatggctaagtgaagatgacaatcatgttgcagcaattcactgtaaagctggaaagggacgaactggtgtaatgatatrtgcatatttattacatcggggcaaatttttaaaggcacaagaggccctagatttctatggggaagtaaggaccagagacaaaaagggagtaactattccc

SEQ ID NO: 24440 - DNA, 201 bp, Homo sapiens
gaccagaggaaacctcagaaaaagtagaaaatggaagtctatgtgatcaagaaatcgatagcatttgcagtatagagcgtgcagataatgacaaggaatakctagtacttactttaacaaaaaatgatcttgacaaagcaaataaagacaaagccaaccgatacttttctccaaattttaaggtgaagctgtacttcacaa

SEQ ID NO: 24441 - DNA, 201 bp, Homo sapiens
acccttttgtgaagatcttgaccaatggctaagtgaagatgacaatcatgttgcagcaattcactgtaaagctggaaagggacgaactggtgtaatgataygtgcatatttattacatcggggcaaatttttaaaggcacaagaggccctagatttctatggggaagtaaggaccagagacaaaaagggagtaactattcc

SEQ ID NO: 24442 - DNA, 201 bp, Homo sapiens
acagctagaacttatcaaacccttttgtgaagatcttgaccaatggctaagtgaagatgacaatcatgttgcagcaattcactgtaaagctggaaagggaygaactggtgtaatgatatgtgcatatttattacatcggggcaaatttttaaaggcacaagaggccctagatttctatggggaagtaaggaccagagacaa

SEQ ID NO: 24443 - DNA, 201 bp, Homo sapiens
caaacccttttgtgaagatcttgaccaatggctaagtgaagatgacaatcatgttgcagcaattcactgtaaagctggaaagggacgaactggtgtaatgrtatgtgcatatttattacatcggggcaaatttttaaaggcacaagaggccctagatttctatggggaagtaaggaccagagacaaaaagggagtaactat

SEQ ID NO: 24444 - DNA, 201 bp, Homo sapiens
gtttgaaactattccaatgttcagtggcggaacttgcaatcctcagtttgtggtctgccagctaaaggtgaagatatattcctccaattcaggacccacaygacgggaagacaagttcatgtactttgagttccctcagccgttacctgtgtgtggtgatatcaaagtagagttcttccacaaacagaacaagatgctaaa

SEQ ID NO: 24445 - DNA, 201 bp, Homo sapiens
cctcagtttgtggtctgccagctaaaggtgaagatatattcctccaattcaggacccacacgacgggaagacaagttcatgtactttgagttccctcagcygttacctgtgtgtggtgatatcaaagtagagttcttccacaaacagaacaagatgctaaaaaaggacaaaatgtttcacttttgggtaaatacattcttc

SEQ ID NO: 24446 - DNA, 201 bp, Homo sapiens
caatcctcagtttgtggtctgccagctaaaggtgaagatatattcctccaattcaggacccacacgacgggaagacaagttcatgtactttgagttccctyagccgttacctgtgtgtggtgatatcaaagtagagttcttccacaaacagaacaagatgctaaaaaaggacaaaatgtttcacttttgggtaaatacatt

SEQ ID NO: 24447 - DNA, 201 bp, Homo sapiens
gggaacgccggagagttggtctctccccttctactgcctccaacacggcggcggcggcggcggcacatccagggacccgggccggttttaaacctcccgtscgccgccgccgcaccccccgtggcccgggctccggaggccgccggcggaggcagccgttcggaggattattcgtcttctccccattccgctgccgccgct

SEQ ID NO: 24448 - DNA, 201 bp, Homo sapiens
tttgaagaccataacccaccacagctagaacttatcaaacccttttgtgaagatcttgaccaatggctaagtgaagatgacaatcatgttgcagcaattcrctgtaaagctggaaagggacgaactggtgtaatgatatgtgcatatttattacatcggggcaaatttttaaaggcacaagaggccctagatttctatggg

SEQ ID NO: 24449 - DNA, 201 bp, Homo sapiens
cagctagaacttatcaaacccttttgtgaagatcttgaccaatggctaagtgaagatgacaatcatgttgcagcaattcactgtaaagctggaaagggacdaactggtgtaatgatatgtgcatatttattacatcggggcaaatttttaaaggcacaagaggccctagatttctatggggaagtaaggaccagagacaaa

SEQ ID NO: 24450 - DNA, 201 bp, Homo sapiens
ttttgaagaccataacccaccacagctagaacttatcaaacccttttgtgaagatcttgaccaatggctaagtgaagatgacaatcatgttgcagcaattsactgtaaagctggaaagggacgaactggtgtaatgatatgtgcatatttattacatcggggcaaatttttaaaggcacaagaggccctagatttctatgg

SEQ ID NO: 24451 - DNA, 201 bp, Homo sapiens
tgaagaccataacccaccacagctagaacttatcaaacccttttgtgaagatcttgaccaatggctaagtgaagatgacaatcatgttgcagcaattcacygtaaagctggaaagggacgaactggtgtaatgatatgtgcatatttattacatcggggcaaatttttaaaggcacaagaggccctagatttctatgggga

SEQ ID NO: 24452 - DNA, 201 bp, Homo sapiens; identical to SEQ ID NO: 24425

SEQ ID NO: 24453 - DNA, 201 bp, Homo sapiens; identical to SEQ ID NO: 24426

SEQ ID NO: 24454 - DNA, 201 bp, Homo sapiens; identical to SEQ ID NO: 24427

SEQ ID NO: 24455 - DNA, 201 bp, Homo sapiens; identical to SEQ ID NO: 24428

SEQ ID NO: 24456 - DNA, 201 bp, Homo sapiens; identical to SEQ ID NO: 24429

SEQ ID NO: 24457 - DNA, 201 bp, Homo sapiens; identical to SEQ ID NO: 24430

SEQ ID NO: 24458 - DNA, 201 bp, Homo sapiens; identical to SEQ ID NO: 24431

SEQ ID NO: 24459 - DNA, 201 bp, Homo sapiens; identical to SEQ ID NO: 24432

SEQ ID NO: 24460 - DNA, 201 bp, Homo sapiens; identical to SEQ ID NO: 24433

SEQ ID NO: 24461 - DNA, 201 bp, Homo sapiens; identical to SEQ ID NO: 24435

SEQ ID NO: 24462 - DNA, 201 bp, Homo sapiens; identical to SEQ ID NO: 24436

SEQ ID NO: 24463 - DNA, 201 bp, Homo sapiens; identical to SEQ ID NO: 24437

SEQ ID NO: 24464 - DNA, 201 bp, Homo sapiens; identical to SEQ ID NO: 24438

SEQ ID NO: 24465 - DNA, 201 bp, Homo sapiens; identical to SEQ ID NO: 24439

SEQ ID NO: 24466 - DNA, 201 bp, Homo sapiens; identical to SEQ ID NO: 24441

SEQ ID NO: 24467 - DNA, 201 bp, Homo sapiens; identical to SEQ ID NO: 24440

SEQ ID NO: 24468 - DNA, 201 bp, Homo sapiens; identical to SEQ ID NO: 24443

SEQ ID NO: 24469 - DNA, 201 bp, Homo sapiens; identical to SEQ ID NO: 24442

SEQ ID NO: 24470 - DNA, 201 bp, Homo sapiens; identical to SEQ ID NO: 24444

SEQ ID NO: 24471 - DNA, 201 bp, Homo sapiens; identical to SEQ ID NO: 24445

SEQ ID NO: 24472 - DNA, 201 bp, Homo sapiens; identical to SEQ ID NO: 24446

SEQ ID NO: 24473 - DNA, 201 bp, Homo sapiens; identical to SEQ ID NO: 24448

SEQ ID NO: 24474 - DNA, 201 bp, Homo sapiens; identical to SEQ ID NO: 24449

SEQ ID NO: 24475 - DNA, 201 bp, Homo sapiens; identical to SEQ ID NO: 24450

SEQ ID NO: 24476 - DNA, 201 bp, Homo sapiens; identical to SEQ ID NO: 24451

SEQ ID NO: 24477 - DNA, 201 bp, Homo sapiens; identical to SEQ ID NO: 24425

SEQ ID NO: 24478 - DNA, 201 bp, Homo sapiens; identical to SEQ ID NO: 24426

SEQ ID NO: 24479 - DNA, 201 bp, Homo sapiens; identical to SEQ ID NO: 24427

SEQ ID NO: 24480 - DNA, 201 bp, Homo sapiens; identical to SEQ ID NO: 24428

SEQ ID NO: 24481 - DNA, 201 bp, Homo sapiens; identical to SEQ ID NO: 24429

SEQ ID NO: 24482 - DNA, 201 bp, Homo sapiens; identical to SEQ ID NO: 24430

SEQ ID NO: 24483 - DNA, 201 bp, Homo sapiens; identical to SEQ ID NO: 24431

SEQ ID NO: 24484 - DNA, 201 bp, Homo sapiens; identical to SEQ ID NO: 24432

SEQ ID NO: 24485 - DNA, 201 bp, Homo sapiens; identical to SEQ ID NO: 24433

SEQ ID NO: 24486 - DNA, 201 bp, Homo sapiens; identical to SEQ ID NO: 24435

SEQ ID NO: 24487 - DNA, 201 bp, Homo sapiens; identical to SEQ ID NO: 24436

SEQ ID NO: 24488 - DNA, 201 bp, Homo sapiens; identical to SEQ ID NO: 24437

SEQ ID NO: 24489 - DNA, 201 bp, Homo sapiens; identical to SEQ ID NO: 24438

SEQ ID NO: 24490 - DNA, 201 bp, Homo sapiens; identical to SEQ ID NO: 24439

SEQ ID NO: 24491 - DNA, 201 bp, Homo sapiens; identical to SEQ ID NO: 24441

SEQ ID NO: 24492 - DNA, 201 bp, Homo sapiens; identical to SEQ ID NO: 24440

SEQ ID NO: 24493 - DNA, 201 bp, Homo sapiens; identical to SEQ ID NO: 24443

SEQ ID NO: 24494 - DNA, 201 bp, Homo sapiens; identical to SEQ ID NO: 24442

SEQ ID NO: 24495 - DNA, 201 bp, Homo sapiens; identical to SEQ ID NO: 24444

SEQ ID NO: 24496 - DNA, 201 bp, Homo sapiens; identical to SEQ ID NO: 24445

SEQ ID NO: 24497 - DNA, 201 bp, Homo sapiens; identical to SEQ ID NO: 24446

SEQ ID NO: 24498 - DNA, 201 bp, Homo sapiens; identical to SEQ ID NO: 24447

SEQ ID NO: 24499 - DNA, 201 bp, Homo sapiens; identical to SEQ ID NO: 24448

SEQ ID NO: 24500 - DNA, 201 bp, Homo sapiens; identical to SEQ ID NO: 24449

SEQ ID NO: 24501 - DNA, 201 bp, Homo sapiens; identical to SEQ ID NO: 24450

SEQ ID NO: 24502 - DNA, 201 bp, Homo sapiens; identical to SEQ ID NO: 24451

SEQ ID NO: 24503 - DNA, 201 bp, Homo sapiens
attatatgaccagcagcaacaccagcccaacgacaccatccaccaatgccacttaccagcttcaagaaccgccatctggcatcaccagccaagcagttacrgatcccacagcagagtacagcacaatccacagcccatcaacacccattaaagattcagattctgatcgattgcgtcgaggttcagatgggaaatcacgtg

SEQ ID NO: 24504 - DNA, 201 bp, Homo sapiens
atgataacggacaggacctaagcacatataactttggaacagatggctttcctgctgcagcaaccagtgctaacttatgtttggcaactggtgtacggggyggtgtggactggatgagaaagttggccttccgctacagacgggtaaaagagatctacaacacctacaaaaataatgttggaggtctgcttggtccagcta

SEQ ID NO: 24505 - DNA, 201 bp, Homo sapiens
ggacaggacctaagcacatataactttggaacagatggctttcctgctgcagcaaccagtgctaacttatgtttggcaactggtgtacggggcggtgtggrctggatgagaaagttggccttccgctacagacgggtaaaagagatctacaacacctacaaaaataatgttggaggtctgcttggtccagctaagagggaa

SEQ ID NO: 24506 - DNA, 201 bp, Homo sapiens
tggcatcaccagccaagcagttacagatcccacagcagagtacagcacaatccacagcccatcaacacccattaaagattcagattctgatcgattgcgtygaggttcagatgggaaatcacgtggacggggccgaagaaacaataatccttcacctcccccagattctgatcttgagagagtgttcatctgggacttgga

SEQ ID NO: 24507 - DNA, 201 bp, Homo sapiens
gctgtatgggttaggaattgtatttccaatagaaaatatttacagtgcaactaaaataggaaaagaaagctgttttgagagaataattcaaaggtttggargaaaagtggtgtatgttgttataggagatggtgtagaagaagaacaaggagcaaaaaagcacgcgatgcccttctggaggatctccagccactcggacct

SEQ ID NO: 24508 - DNA, 201 bp, Homo sapiens
caggaatatatacaggaaataattcactcacaaattcctctggatttaatagttcacagcaggactatccgtcttatcccagttttggccagggtcagtasgcacagtattataacagctcaccgtatccagcacattatatgaccagcagcaacaccagcccaacgacaccatccaccaatgccacttaccagcttcaag

SEQ ID NO: 24509 - DNA, 201 bp, Homo sapiens
ttgttataggagatggtgtagaagaagaacaaggagcaaaaaagcacgcgatgcccttctggaggatctccagccactcggacctcatggccctgcaccaygccttggaactggagtacctgtaacagcgctcggcactttgacagcgcacagctgctctgtgaccagggacagatccagcaggccccagtctcgcatcag

SEQ ID NO: 24510 - DNA, 201 bp, Homo sapiens
agatgataacggacaggacctaagcacatataactttggaacagatggctttcctgctgcagcaaccagtgctaacttatgtttggcaactggtgtacggrgcggtgtggactggatgagaaagttggccttccgctacagacgggtaaaagagatctacaacacctacaaaaataatgttggaggtctgcttggtccagc

SEQ ID NO: 24511 - DNA, 201 bp, Homo sapiens
agcagagtacagcacaatccacagcccatcaacacccattaaagattcagattctgatcgattgcgtcgaggttcagatgggaaatcacgtggacggggcygaagaaacaataatccttcacctcccccagattctgatcttgagagagtgttcatctgggacttggatgagacaatcattgttttccactccttgcttac

SEQ ID NO: 24512 - DNA, 184 bp, Homo sapiens
ttgaagcaaacagttgacaatttttaaccttttcattttatgtttttgtactctgcagactgaaaagacaaagtttatcttggccttactgtataaaggtrtgctgtgtccaccgttgtgtacagaatttttcttcattaattttgtgtttaagttaataaaatttatttgtgatgtactgtaa

SEQ ID NO: 24513 - DNA, 201 bp, Homo sapiens
atccgtcttatcccagttttggccagggtcagtacgcacagtattataacagctcaccgtatccagcacattatatgaccagcagcaacaccagcccaacracaccatccaccaatgccacttaccagcttcaagaaccgccatctggcatcaccagccaagcagttacagatcccacagcagagtacagcacaatccaca

SEQ ID NO: 24514 - DNA, 201 bp, Homo sapiens
aggtctgcttggtccagctaagagggaagcctggctgcagttgagggccgaaattgaagccctgaccgactcctggttgacactggccctgaaagcactcycgctcattcactcccggacaaactgtgtgaatattttagtaacaactactcagctcatcccagcattggcgaaagtcctgctgtatgggttaggaattgt

SEQ ID NO: 24515 - DNA, 201 bp, Homo sapiens
gatggctttcctgctgcagcaaccagtgctaacttatgtttggcaactggtgtacggggcggtgtggactggatgagaaagttggccttccgctacagacrggtaaaagagatctacaacacctacaaaaataatgttggaggtctgcttggtccagctaagagggaagcctggctgcagttgagggccgaaattgaagcc

SEQ ID NO: 24516 - DNA, 201 bp, Homo sapiens
accgccatctggcatcaccagccaagcagttacagatcccacagcagagtacagcacaatccacagcccatcaacacccattaaagattcagattctgatygattgcgtcgaggttcagatgggaaatcacgtggacggggccgaagaaacaataatccttcacctcccccagattctgatcttgagagagtgttcatctg

SEQ ID NO: 24517 - DNA, 201 bp, Homo sapiens
gtgtatgttgttataggagatggtgtagaagaagaacaaggagcaaaaaagcacgcgatgcccttctggaggatctccagccactcggacctcatggcccygcaccatgccttggaactggagtacctgtaacagcgctcggcactttgacagcgcacagctgctctgtgaccagggacagatccagcaggccccagtctc

SEQ ID NO: 24518 - DNA, 201 bp, Homo sapiens
tcaagccagttcagatgttgctgtttcctcaagttgcaggtctatggaaatgcaggatctaaccagcccgcatagccgtctgagtggtagtagtgaatccsccagtggccccaaactcggtaactctcatataaatagtaattccatgactcccaatggcaccgaagttaaaacagagccaatgagcagcagtgaaacagc

SEQ ID NO: 24519 - DNA, 201 bp, Homo sapiens; identical to SEQ ID NO: 24503

SEQ ID NO: 24520 - DNA, 201 bp, Homo sapiens; identical to SEQ ID NO: 24506

SEQ ID NO: 24521 - DNA, 201 bp, Homo sapiens; identical to SEQ ID NO: 24507

SEQ ID NO: 24522 - DNA, 201 bp, Homo sapiens; identical to SEQ ID NO: 24509

SEQ ID NO: 24523 - DNA, 184 bp, Homo sapiens; identical to SEQ ID NO: 24512

SEQ ID NO: 24524 - DNA, 201 bp, Homo sapiens; identical to SEQ ID NO: 24514

SEQ ID NO: 24525 - DNA, 201 bp, Homo sapiens; identical to SEQ ID NO: 24513

SEQ ID NO: 24526 - DNA, 201 bp, Homo sapiens; identical to SEQ ID NO: 24517

SEQ ID NO: 24527 - DNA, 201 bp, Homo sapiens
atgataacggacaggacctaagcacatataactttggaacagatggctttcctgctgcagcaaccagtgctaacttatgtttggcaactggtgtacggggyggtgtggactggatgagaaagttggccttccgctacagacgggtaaaagagatctacaacacctacaaaaataatgttggaggcaattcatcatgtgctt

SEQ ID NO: 24528 - DNA, 201 bp, Homo sapiens
ggacaggacctaagcacatataactttggaacagatggctttcctgctgcagcaaccagtgctaacttatgtttggcaactggtgtacggggcggtgtggrctggatgagaaagttggccttccgctacagacgggtaaaagagatctacaacacctacaaaaataatgttggaggcaattcatcatgtgcttttaaatcc

SEQ ID NO: 24529 - DNA, 201 bp, Homo sapiens; identical to SEQ ID NO: 24508

SEQ ID NO: 24530 - DNA, 201 bp, Homo sapiens
agatgataacggacaggacctaagcacatataactttggaacagatggctttcctgctgcagcaaccagtgctaacttatgtttggcaactggtgtacggrgcggtgtggactggatgagaaagttggccttccgctacagacgggtaaaagagatctacaacacctacaaaaataatgttggaggcaattcatcatgtgc

SEQ ID NO: 24531 - DNA, 201 bp, Homo sapiens; identical to SEQ ID NO: 24511

SEQ ID NO: 24532 - DNA, 201 bp, Homo sapiens
gatggctttcctgctgcagcaaccagtgctaacttatgtttggcaactggtgtacggggcggtgtggactggatgagaaagttggccttccgctacagacrggtaaaagagatctacaacacctacaaaaataatgttggaggcaattcatcatgtgcttttaaatcctcaggtctgcttggtccagctaagagggaagcc

SEQ ID NO: 24533 - DNA, 201 bp, Homo sapiens; identical to SEQ ID NO: 24516

SEQ ID NO: 24534 - DNA, 201 bp, Homo sapiens; identical to SEQ ID NO: 24518

SEQ ID NO: 24535 - DNA, 201 bp, Homo sapiens; identical to SEQ ID NO: 24503

SEQ ID NO: 24536 - DNA, 201 bp, Homo sapiens; identical to SEQ ID NO: 24506

SEQ ID NO: 24537 - DNA, 201 bp, Homo sapiens; identical to SEQ ID NO: 24507

SEQ ID NO: 24538 - DNA, 201 bp, Homo sapiens; identical to SEQ ID NO: 24509

SEQ ID NO: 24539 - DNA, 184 bp, Homo sapiens; identical to SEQ ID NO: 24512

SEQ ID NO: 24540 - DNA, 201 bp, Homo sapiens; identical to SEQ ID NO: 24514

SEQ ID NO: 24541 - DNA, 201 bp, Homo sapiens; identical to SEQ ID NO: 24513

SEQ ID NO: 24542 - DNA, 201 bp, Homo sapiens; identical to SEQ ID NO: 24517

SEQ ID NO: 24543 - DNA, 201 bp, Homo sapiens; identical to SEQ ID NO: 24504

SEQ ID NO: 24544 - DNA, 201 bp, Homo sapiens; identical to SEQ ID NO: 24505

SEQ ID NO: 24545 - DNA, 201 bp, Homo sapiens; identical to SEQ ID NO: 24508

SEQ ID NO: 24546 - DNA, 201 bp, Homo sapiens; identical to SEQ ID NO: 24510

SEQ ID NO: 24547 - DNA, 201 bp, Homo sapiens; identical to SEQ ID NO: 24511

SEQ ID NO: 24548 - DNA, 201 bp, Homo sapiens; identical to SEQ ID NO: 24515

SEQ ID NO: 24549 - DNA, 201 bp, Homo sapiens; identical to SEQ ID NO: 24516

SEQ ID NO: 24550 - DNA, 201 bp, Homo sapiens; identical to SEQ ID NO: 24518

SEQ ID NO: 24551 - DNA, 201 bp, Homo sapiens; identical to SEQ ID NO: 24503

SEQ ID NO: 24552 - DNA, 201 bp, Homo sapiens; identical to SEQ ID NO: 24506

SEQ ID NO: 24553 - DNA, 201 bp, Homo sapiens; identical to SEQ ID NO: 24507

SEQ ID NO: 24554 - DNA, 201 bp, Homo sapiens; identical to SEQ ID NO: 24509

SEQ ID NO: 24555 - DNA, 184 bp, Homo sapiens; identical to SEQ ID NO: 24512

SEQ ID NO: 24556 - DNA, 201 bp, Homo sapiens; identical to SEQ ID NO: 24514

SEQ ID NO: 24557 - DNA, 201 bp, Homo sapiens; identical to SEQ ID NO: 24513

SEQ ID NO: 24558 - DNA, 201 bp, Homo sapiens; identical to SEQ ID NO: 24517

SEQ ID NO: 24559 - DNA, 201 bp, Homo sapiens; identical to SEQ ID NO: 24527

SEQ ID NO: 24560 - DNA, 201 bp, Homo sapiens; identical to SEQ ID NO: 24528

SEQ ID NO: 24561 - DNA, 201 bp, Homo sapiens; identical to SEQ ID NO: 24508

SEQ ID NO: 24562 - DNA, 201 bp, Homo sapiens; identical to SEQ ID NO: 24530

SEQ ID NO: 24563 - DNA, 201 bp, Homo sapiens; identical to SEQ ID NO: 24511

SEQ ID NO: 24564 - DNA, 201 bp, Homo sapiens; identical to SEQ ID NO: 24532

SEQ ID NO: 24565 - DNA, 201 bp, Homo sapiens; identical to SEQ ID NO: 24516

SEQ ID NO: 24566 - DNA, 154 bp, Homo sapiens
gagaggcctctctggaagttgtcccgggtgttcgccgctggagcccgggtcgasaggacgaggtgccgctgcctggagaatcctccgctgccgtcggctcccggagcccagccctttcctaacccaacccaacctagcccagtcccagccgcca

SEQ ID NO: 24567 - DNA, 152 bp, Homo sapiens
gagaggcctctctggaagttgtcccgggtgttcgccgctggagcccgggtckagaggacgaggtgccgctgcctggagaatcctccgctgccgtcggctcccggagcccagccctttcctaacccaacccaacctagcccagtcccagccgc

SEQ ID NO: 24568 - DNA, 201 bp, Homo sapiens
ttaaaaatacacatggaaaaaaaaccctatatgcttacagtgcacctagagcttttttataacaacttctttttgtttgttttggattctttaaatatatmttattctcatttagtgcactctttagccagaatctcattactacttcatttttgtaataacatttaatttagatagtgttcacatattggccctgctgaa

SEQ ID NO: 24569 - DNA, 201 bp, Homo sapiens
aactcctttttacactttatggtaagtagcagggggaaaatgcatttatagatcatttctaggcaaaattgtgaagctaatgaccaacctgtttctacctwtatgcagtctcttaattttactagaaatgggaatcacggcctcttgaagagaaaaaagtcaccattctgcatttagctgtaatcatatattgcatttctg

SEQ ID NO: 24570 - DNA, 201 bp, Homo sapiens
gagggcggccggaagtggcgttggccgccattggcctgccggccagccaccttgctgtcctccgccgccttccgggtgttacgtgcagccgggctcggccyctccccctggccggatggatccgtcggcgccacagccccgcgcggaaacctcaggcaaagacatatggcatccaggagaaagatgtcttgccccttctcc

SEQ ID NO: 24571 - DNA, 201 bp, Homo sapiens
cttatttcccaaaccgaaaatttccatcatcttctgttgcttttaaattatctgacaatggagactctattccttataccatcaataggtatttgagagastaccaaagagaaggaacccggtttctttatggacactacatccatggaggagggtgcattctgggtgatgacatgggacttggaaaaacagtacaggtta

SEQ ID NO: 24572 - DNA, 201 bp, Homo sapiens
gggcttgattaccgacgacttgatggaagtacaaaatcagaggaaagactcaagattgtaaaagagttcaacagtacacaagatgttaacatttgccttgyctctacaatggctggtggactaggcctcaattttgtcggtgccaatgttgttgtattatttgatcctacttggaatccagccaatgatcttcaagccatt

SEQ ID NO: 24573 - DNA, 201 bp, Homo sapiens
gccgaagagcgatgctcggagggcggccggaagtggcgttggccgccattggcctgccggccagccaccttgctgtcctccgccgccttccgggtgttacrtgcagccgggctcggcccctccccctggccggatggatccgtcggcgccacagccccgcgcggaaacctcaggcaaagacatatggcatccaggagaaag

SEQ ID NO: 24574 - DNA, 161 bp, Homo sapiens
attgtaggagagaaagggatgctgagcccctctcctctgctcctgggttgcagaatggaagtgagaatgcagtaccttacccctggtggtgctgtgtcacrggagcctccatttcctgctggagatgtgagatttgcaggatccaagatgtcctcgagtaa

SEQ ID NO: 24575 - DNA, 201 bp, Homo sapiens
tctgttgcttttaaattatctgacaatggagactctattccttataccatcaataggtatttgagagactaccaaagagaaggaacccggtttctttatgracactacatccatggaggagggtgcattctgggtgatgacatgggacttggaaaaacagtacaggttatttcatttctggctgcagttttgcataaaaag

SEQ ID NO: 24576 - DNA, 201 bp, Homo sapiens
cataaaaagggaactcgtgaggatattgaaaataacatgccagagtttttactaagaagtatgaaaaaggaacccctttcttctacagcaaaaaagatgtycttaatagttgctcctctttctgtcctctacaactggaaggatgaattggacacctggggatatttcagagtcactgttttacatggaaacagaaaagat

SEQ ID NO: 24577 - DNA, 201 bp, Homo sapiens
gtattatttgatcctacttggaatccagccaatgatcttcaagccattgacagaacccaaacacattgtaggagagaaagggatgctgagcccctctcctytgctcctgggttgcagaatggaagtgagaatgcagtaccttacccctggtggtgctgtgtcacaggagcctccatttcctgctggagatgtgagatttgc

SEQ ID NO: 24578 - DNA, 201 bp, Homo sapiens
tgaattggacacctggggatatttcagagtcactgttttacatggaaacagaaaagataatgaattaattcgtgtaaagcagaggaaatgtgaaattgctytaacaacttatgaaacactacgcttatgcctggatgaacttaacagtttggaatggtcagctgtcattgtggatgaagctcatagaatcaagaatccaaa

SEQ ID NO: 24579 - DNA, 201 bp, Homo sapiens; identical to SEQ ID NO: 24575

SEQ ID NO: 24580 - DNA, 201 bp, Homo sapiens; identical to SEQ ID NO: 24576

SEQ ID NO: 24581 - DNA, 201 bp, Homo sapiens; identical to SEQ ID NO: 24570

SEQ ID NO: 24582 - DNA, 201 bp, Homo sapiens; identical to SEQ ID NO: 24571

SEQ ID NO: 24583 - DNA, 201 bp, Homo sapiens; identical to SEQ ID NO: 24572

SEQ ID NO: 24584 - DNA, 201 bp, Homo sapiens; identical to SEQ ID NO: 24573

SEQ ID NO: 24585 - DNA, 201 bp, Homo sapiens; identical to SEQ ID NO: 24578

SEQ ID NO: 24586 - DNA, 201 bp, Homo sapiens
tccatgggaagagcctaatggacagtgatgatgatgccctcctcaagtcccaacacatcaacaccctgggccagttctggaccaccaaggccttcctgccrcgtatgctggagctgcagaatggccacatcgtgtgcctcaactccgtgctggcactgtctgccatccccggtgccatcgactactgcacatccaaagcgt

SEQ ID NO: 24587 - DNA, 201 bp, Homo sapiens
gttcgcggagcgcggcgccagaaagattgttctctggggccggactgagaaatgcctgaaggagacgacggaggagatccggcagatgggcactgagtgcmattacttcatctgtgatgtgggcaaccgggaggaggtgtaccagacggccaaggccgtccgggagaaggtgggtgacatcaccatcctggtgaacaatgc

SEQ ID NO: 24588 - DNA, 201 bp, Homo sapiens
atttccagttctgtagagtttattgtcaattgcttctcaagtctaaccagcctcagcagtgtgcatagaccatttccaggagggtctgtccccagatgctytgcctcccgttccaaaacccactcatcctcagcttgcacaaactggttgaacggcaggaatgaaaaataaagagagatggcttttgtgatttcctttgtt

SEQ ID NO: 24589 - DNA, 201 bp, Homo sapiens
tattcggtttactatttattgttcggggtgttttttaattcctgtattgctcggcccggggagtttcgccccctgcccggctccgcggcgcggaggatggygtggaaacggctgggcgcgctggtgatgttccctctacagatgatctatctggtggtgaaagcagccgtcggactggtgctgcccgccaagctgcgggac

SEQ ID NO: 24590 - DNA, 201 bp, Homo sapiens
tgggtataactgacccccacagggaggcaggaaaacagccagaagccaccttgacacttttgaacatttccagttctgtagagtttattgtcaattgcttytcaagtctaaccagcctcagcagtgtgcatagaccatttccaggagggtctgtccccagatgctctgcctcccgttccaaaacccactcatcctcagctt

SEQ ID NO: 24591 - DNA, 201 bp, Homo sapiens
tgctggagctgcagaatggccacatcgtgtgcctcaactccgtgctggcactgtctgccatccccggtgccatcgactactgcacatccaaagcgtcagcyttcgccttcatggagagcctgaccctggggctgctggactgtccgggagtcagcgccaccacagtgctgcccttccacaccagcaccgagatgttccagg

SEQ ID NO: 24592 - DNA, 201 bp, Homo sapiens
ggagaggcatcgggcgtcagctcgcccgcgagttcgcggagcgcggcgccagaaagattgttctctggggccggactgagaaatgcctgaaggagacgacrgaggagatccggcagatgggcactgagtgccattacttcatctgtgatgtgggcaaccgggaggaggtgtaccagacggccaaggccgtccgggagaagg

SEQ ID NO: 24593 - DNA, 201 bp, Homo sapiens
gggcaaccgggaggaggtgtaccagacggccaaggccgtccgggagaaggtgggtgacatcaccatcctggtgaacaatgccgccgtggtccatgggaagrgcctaatggacagtgatgatgatgccctcctcaagtcccaacacatcaacaccctgggccagttctggaccaccaaggccttcctgccgcgtatgctgga

SEQ ID NO: 24594 - DNA, 201 bp, Homo sapiens
tggcatgcttctgctgggtgagcaggacagctcctgtccccagcgaagaatccggctgcccctgggccagtcccaggacctttgcacaggactgatgggtrtaactgacccccacagggaggcaggaaaacagccagaagccaccttgacacttttgaacatttccagttctgtagagtttattgtcaattgcttctcaag

SEQ ID NO: 24595 - DNA, 201 bp, Homo sapiens
gatacttctccggtgagcaggcgggagaagtgttggagagcgccgtcctggctttgtgttcccagctgaaagacgatgcagttgccctggtagacgtgatygctcctcctgactttgttctggactcaccgattggcagagccgacggcgagctctacaaaaacctctggggcgctgtcctgcaggaaagcaaggtgttgg

SEQ ID NO: 24596 - DNA, 201 bp, Homo sapiens
gcggacgggagggaggcacccggccggctggactaatctgggatcgcggtgatttgcagcgtggaaaagaaatgcagatgatcatgtctacctgatgcgcygtgggttttttgataattagaatttcgcacattcagttttcagggttcagctcctttctctaaagtaaacagcccattgtcagggatcttctggtcagac

SEQ ID NO: 24597 - DNA, 126 bp, Homo sapiens
cttttgtggaactggaaatttccatcgaggaaatgtttttttaaaaagtctaatgatttgaatgggcaattcagtctccaaccgcccccctccccctgccrccagttatatacaaatcactttatt

SEQ ID NO: 24598 - DNA, 201 bp, Homo sapiens
aactgctgattggcctcaactgcccaggcggacgggagggaggcacccggccggctggactaatctgggatcgcggtgatttgcagcgtggaaaagaaatkcagatgatcatgtctacctgatgcgccgtgggttttttgataattagaatttcgcacattcagttttcagggttcagctcctttctctaaagtaaacagc

SEQ ID NO: 24599 - DNA, 201 bp, Homo sapiens
caggctcttatcacgcgatggcatccactgtggaaggaggcgacacagctctgctcccagaattccccagggggcccctcgatgcctaccgagcaagagcrtccttcagctggaaggagctggcgctgttcacggaaggggagggcatgctccgctttaagaaaaccatcttctcagctcttgagaatgaccctcttttcg

SEQ ID NO: 24600 - DNA, 201 bp, Homo sapiens
ctatttgctgggtctcctggcacaccaggtccacgatggagcttgcttccgcagtccgctgaagtcagtggactttctggacgcctatcccggcatccttraccagaagtttgaggtctccagtgttgccgactgcttggactctgcagtcgccctggcagcatacaagtggctggtttgctacctgctccgagagactta

SEQ ID NO: 24601 - DNA, 201 bp, Homo sapiens
gcagcgccagacaggcagagcttggacgtgagatccacgccctggcatcggccagcaagcccctggcctcgtggaccacccagcaaggaattcaggaatgycgggaggcgtgtggaggacacggctatctggccatgaaccggttgggtgtccttagagatgacaacgatcccaactgcacatacgaaggtgacaacaaca

SEQ ID NO: 24602 - DNA, 201 bp, Homo sapiens
cgccctcgctgcgggccgtgctggggcggctcagtgctctgtacgccctgtggtccctgagccgccacgcggccctgctctaccgaggaggatacttctcyggtgagcaggcgggagaagtgttggagagcgccgtcctggctttgtgttcccagctgaaagacgatgcagttgccctggtagacgtgatcgctcctcctg

SEQ ID NO: 24603 - DNA, 201 bp, Homo sapiens
atggcatccactgtggaaggaggcgacacagctctgctcccagaattccccagggggcccctcgatgcctaccgagcaagagcgtccttcagctggaaggmgctggcgctgttcacggaaggggagggcatgctccgctttaagaaaaccatcttctcagctcttgagaatgaccctcttttcgctcgttcccctggagcc

SEQ ID NO: 24604 - DNA, 201 bp, Homo sapiens
accaaggccattcgcacaactgcccactacgatcctgccactgaggaattcatcatacattcccctgatttcgaagctgccaagttttgggttggcaacaygggcaagacagccactcacgcggtggtgtttgctaagctgtgtgtgccaggggaccagtgccatgggctgcatccctttatcgtgcagatccgggacccg

SEQ ID NO: 24605 - DNA, 201 bp, Homo sapiens
tgaaatcgaagctctagtgggactggcacacattcagccaagtctaatgaaacgaagggaactaatcagacgtggacctcaacttctgattccagaacacrccggagattgctgctgctttctgagcccgcacctgtgcgcctaaactgctgattggcctcaactgcccaggcggacgggagggaggcacccggccggctg

SEQ ID NO: 24606 - DNA, 201 bp, Homo sapiens
ggggcggctcagtgctctgtacgccctgtggtccctgagccgccacgcggccctgctctaccgagctgaaagacgatgcagttgccctggtagacgtgatygctcctcctgactttgttctggactcaccgattggcagagccgacggcgagctctacaaaaacctctggggcgctgtcctgcaggaaagcaaggtgttgg

SEQ ID NO: 24607 - DNA, 201 bp, Homo sapiens; identical to SEQ ID NO: 24596

SEQ ID NO: 24608 - DNA, 126 bp, Homo sapiens; identical to SEQ ID NO: 24597

SEQ ID NO: 24609 - DNA, 201 bp, Homo sapiens; identical to SEQ ID NO: 24598

SEQ ID NO: 24610 - DNA, 201 bp, Homo sapiens; identical to SEQ ID NO: 24599

SEQ ID NO: 24611 - DNA, 201 bp, Homo sapiens; identical to SEQ ID NO: 24600

SEQ ID NO: 24612 - DNA, 201 bp, Homo sapiens; identical to SEQ ID NO: 24601

SEQ ID NO: 24613 - DNA, 201 bp, Homo sapiens; identical to SEQ ID NO: 24604

SEQ ID NO: 24614 - DNA, 201 bp, Homo sapiens; identical to SEQ ID NO: 24603

SEQ ID NO: 24615 - DNA, 201 bp, Homo sapiens; identical to SEQ ID NO: 24605

SEQ ID NO: 24616 - DNA, 201 bp, Homo sapiens; identical to SEQ ID NO: 24595

SEQ ID NO: 24617 - DNA, 201 bp, Homo sapiens; identical to SEQ ID NO: 24596

SEQ ID NO: 24618 - DNA, 126 bp, Homo sapiens; identical to SEQ ID NO: 24597

SEQ ID NO: 24619 - DNA, 201 bp, Homo sapiens; identical to SEQ ID NO: 24598

SEQ ID NO: 24620 - DNA, 201 bp, Homo sapiens
tgggctcttatcacgcgatggcatccactgtggaaggaggcgacacagctctgctcccagaattccccagggggcccctcgatgcctaccgagcaagagcrtccttcagctggaaggagctggcgctgttcacggaaggggagggcatgctccgctttaagaaaaccatcttctcagctcttgagaatgaccctcttttcg

SEQ ID NO: 24621 - DNA, 201 bp, Homo sapiens; identical to SEQ ID NO: 24600

SEQ ID NO: 24622 - DNA, 201 bp, Homo sapiens; identical to SEQ ID NO: 24601

SEQ ID NO: 24623 - DNA, 201 bp, Homo sapiens; identical to SEQ ID NO: 24602

SEQ ID NO: 24624 - DNA, 201 bp, Homo sapiens; identical to SEQ ID NO: 24603

SEQ ID NO: 24625 - DNA, 201 bp, Homo sapiens; identical to SEQ ID NO: 24604

SEQ ID NO: 24626 - DNA, 201 bp, Homo sapiens; identical to SEQ ID NO: 24605

SEQ ID NO: 24627 - DNA, 201 bp, Homo sapiens
ctcttaccatgaagaccctcctactgttggcagtgatcatgatctttggcctactgcaggcccatgggaatttggtgaatttccacagaatgatcaagttsacgacaggaaaggaagccgcactcagttatggcttctacggctgccactgtggcgtgggtggcagaggatcccccaaggatgcaacggatcgctgctgtg

SEQ ID NO: 24628 - DNA, 201 bp, Homo sapiens
gaagtcaactgtgtgagtgtgataaggctgctgccacctgttttgctagaaacaagacgacctacaataaaaagtaccagtactattccaataaacactgyagagggagcacccctcgttgctgagtcccctcttccctggaaaccttccacccagtgctgaatttccctctctcataccctccctccctaccctaaccaa

SEQ ID NO: 24629 - DNA, 101 bp, Homo sapiens
atttccagccttctactgctctcctccacctcaactccgtgcttaaccaaagaagctgtactccggggggtctcttctgaataaagcaattagcaaatcaw

SEQ ID NO: 24630 - DNA, 138 bp, Homo sapiens
gcccttctatacccacccagaatgagacatccagcagatttccagccttctactgctctcctccacctcaactccgtgcttaaccaaagaagctgtactcyggggggtctcttctgaataaagcaattagcaaatcat

SEQ ID NO: 24631 - DNA, 201 bp, Homo sapiens
tgatctttggcctactgcaggcccatgggaatttggtgaatttccacagaatgatcaagttgacgacaggaaaggaagccgcactcagttatggcttctayggctgccactgtggcgtgggtggcagaggatcccccaaggatgcaacggatcgctgctgtgtcactcatgactgttgctacaaacgtctggagaaacgtg

SEQ ID NO: 24632 - DNA, 201 bp, Homo sapiens
agagggagcacccctcgttgctgagtcccctcttccctggaaaccttccacccagtgctgaatttccctctctcataccctccctccctaccctaaccaakttccttggccatgcagaaagcatccctcacccatcctagaggccaggcaggagcccttctatacccacccagaatgagacatccagcagatttccagcct

SEQ ID NO: 24633 - DNA, 201 bp, Homo sapiens
ttaccatgaagaccctcctactgttggcagtgatcatgatctttggcctactgcaggcccatgggaatttggtgaatttccacagaatgatcaagttgacsacaggaaaggaagccgcactcagttatggcttctacggctgccactgtggcgtgggtggcagaggatcccccaaggatgcaacggatcgctgctgtgtca

SEQ ID NO: 24634 - DNA, 201 bp, Homo sapiens; identical to SEQ ID NO: 24627

SEQ ID NO: 24635 - DNA, 201 bp, Homo sapiens; identical to SEQ ID NO: 24628

SEQ ID NO: 24636 - DNA, 101 bp, Homo sapiens; identical to SEQ ID NO: 24629

SEQ ID NO: 24637 - DNA, 138 bp, Homo sapiens; identical to SEQ ID NO: 24630

SEQ ID NO: 24638 - DNA, 201 bp, Homo sapiens; identical to SEQ ID NO: 24631

SEQ ID NO: 24639 - DNA, 201 bp, Homo sapiens; identical to SEQ ID NO: 24632

SEQ ID NO: 24640 - DNA, 201 bp, Homo sapiens; identical to SEQ ID NO: 24633

SEQ ID NO: 24641 - DNA, 201 bp, Homo sapiens; identical to SEQ ID NO: 24627

SEQ ID NO: 24642 - DNA, 138 bp, Homo sapiens; identical to SEQ ID NO: 24630

SEQ ID NO: 24643 - DNA, 201 bp, Homo sapiens; identical to SEQ ID NO: 24631

SEQ ID NO: 24644 - DNA, 201 bp, Homo sapiens
caacagatccagggagcattcacctgccctgtctccaaacagccttgtgcctcacctacccccaacctcccagagggagcagctatttaaggggagcaggwgtgcagaacaaacaagacggcctggggatacaactctggagtcctctgagagagccaccaaggaggagcaggggagcgacggccggggcagaagttgaga

SEQ ID NO: 24645 - DNA, 201 bp, Homo sapiens; identical to SEQ ID NO: 24633

SEQ ID NO: 24646 - DNA, 201 bp, Homo sapiens; identical to SEQ ID NO: 24628

SEQ ID NO: 24647 - DNA, 101 bp, Homo sapiens; identical to SEQ ID NO: 24629

SEQ ID NO: 24648 - DNA, 201 bp, Homo sapiens; identical to SEQ ID NO: 24632

SEQ ID NO: 24649 - DNA, 201 bp, Homo sapiens; identical to SEQ ID NO: 24627

SEQ ID NO: 24650 - DNA, 201 bp, Homo sapiens; identical to SEQ ID NO: 24631

SEQ ID NO: 24651 - DNA, 117 bp, Homo sapiens
gaaacaagacgacctacaataaaaatcccctcttccctggaaaccttccacccagtgctgaatttccctctctcataccctccctccctaccctaaccaakttccttggccatgcag

SEQ ID NO: 24652 - DNA, 201 bp, Homo sapiens; identical to SEQ ID NO: 24633

SEQ ID NO: 24653 - DNA, 162 bp, Homo sapiens
ttggctgtgcttgaaggcgaaaccctgccatatccccagtgccagtcccctcagcctgtggtggccttgcatcctgactggatgttctcagccccttgttytgggcaagaacccagagctccccagtgtggatactaataaacctcttggagcacactctca

SEQ ID NO: 24654 - DNA, 201 bp, Homo sapiens
cagacagggggggtctagattctgagggggttggtggatattgggcaaggcaggaaacctctggagacctcattttctccatggggaagacagccatgctyttcaggaggagactccaagggcaaaggagggtgtcttggctgtgcttgaaggcgaaaccctgccatatccccagtgccagtcccctcagcctgtggtggc

SEQ ID NO: 24655 - DNA, 201 bp, Homo sapiens
gtctcacccttttctccccatatctgtttggacatgagctgagggcacggtcgcgggcggtcagccctgttcgcagctacggcgaggaggggcgcgattgytccttgttgccgctccgcttagtggccgcgtccattccgcgcggtgtcccgattttaggggtagggagaagtgtcagcttcaggcatcgcgaggcgtggc

SEQ ID NO: 24656 - DNA, 154 bp, Homo sapiens
gcttgaaggcgaaaccctgccatatccccagtgccagtcccctcagcctgtggtggccttgcatcctgactggatgttctcagccccttgttctgggcaaraacccagagctccccagtgtggatactaataaacctcttggagcacactctca

SEQ ID NO: 24657 - DNA, 201 bp, Homo sapiens
gcaagaggaaatccgggaaggacttcgtgaccgaggcgctgcagagcagacttggagctgatgtctgtgctgtcctccggctctctggtccactcaaggarcagtatgctcaggagcatggcttgaacttccagagactcctggacaccagcacctacaaggaggcctttcggaaggacatgatccgctggggagaggaga

SEQ ID NO: 24658 - DNA, 176 bp, Homo sapiens
caaaggagggtgtcttggctgtgcttgaaggcgaaaccctgccatatccccagtgccagtcccctcagcctgtggtggccttgcatcctgactggatgttytcagccccttgttctgggcaagaacccagagctccccagtgtggatactaataaacctcttggagcacactctca

SEQ ID NO: 24659 - DNA, 113 bp, Homo sapiens
gttctaggagtgagctggggcctgagggggttggtggatattgggcaaggcaggaaacctctggagacctcattttctccatggggaagacagccatgctyttcaggaggaga

SEQ ID NO: 24660 - DNA, 201 bp, Homo sapiens; identical to SEQ ID NO: 24655

SEQ ID NO: 24661 - DNA, 201 bp, Homo sapiens; identical to SEQ ID NO: 24657

SEQ ID NO: 24662 - DNA, 201 bp, Homo sapiens
agtggcattggtccatctgctgcaaggaagtttgtagatgaaggaattaaaacactagaagatctcagaaaaaatgaagataaattgaaccatcatcagcraattgggctgaaatattttggggactttgaaaaaagaattcctcgtgaagagatgttacaaatgcaagatattgtactaaatgaagttaaaaaagtggat

SEQ ID NO: 24663 - DNA, 201 bp, Homo sapiens
ccgtgcgccccgccccccatcgggggcaaccattgttccgccggtcgcgccggagctgggttgctcctgctcccgtctccaagtcctggtacctccttcargctgggagagggctctagtccctggttctgaacactctggggttctcgggtgcaggccgccatgagcaaacggaaggcgccgcaggagactctcaacggg

SEQ ID NO: 24664 - DNA, 201 bp, Homo sapiens
cttccaagtgctgtccctgttgctcgtgcttcagcctccgccacactgagtccctggggctggggttttgtttgtagaaggctctggggactcctaatttytgcttccccagcctaaagcagggatcagtcttttcttgtggaataaatccttggatcgggaaccctgctgctcagtccccttagggcccatcctcacgct

SEQ ID NO: 24665 - DNA, 201 bp, Homo sapiens
aagctcaccttttctcccttccaagtgctgtccctgttgctcgtgcttcagcctccgccacactgagtccctggggctggggttttgtttgtagaaggctytggggactcctaatttctgcttccccagcctaaagcagggatcagtcttttcttgtggaataaatccttggatcgggaaccctgctgctcagtcccctta

SEQ ID NO: 24666 - DNA, 201 bp, Homo sapiens
tggcttcccaggtatttggtgggtaggggcaagatcctaaggtacctgtgcgtgcagggtctgggttgcagcccccacaggagagactggggacctcgagscaccaaaagccagtgaagagaccatgagttgagaagcccctcccctgtgccagcaggtaaagggcctgggcctggggctggggaggggccgaagggtggg

SEQ ID NO: 24667 - DNA, 201 bp, Homo sapiens
cctaaacttccccctgttggctctgccagcccccagcccagcgcccgccacctcctggagtgcgttttccgtgtcttcacccgcggtcgtattggagaccrtcaagcaggcggagagcagcccccagcgccgctcgctggtcctgaggctgtatgaggcccacggcagccacgtggactgctggctgcacttgtcgctgcc

SEQ ID NO: 24668 - DNA, 201 bp, Homo sapiens
ggatgctggcgttatccaagctgcctacagcctaaacttccccctgttggctctgccagcccccagcccagcgcccgccacctcctggagtgcgttttccrtgtcttcacccgcggtcgtattggagaccgtcaagcaggcggagagcagcccccagcgccgctcgctggtcctgaggctgtatgaggcccacggcagcca

SEQ ID NO: 24669 - DNA, 201 bp, Homo sapiens
ccgcctgaagctcaccttttctcccttccaagtgctgtccctgttgctcgtgcttcagcctccgccacactgagtccctggggctggggttttgtttgtaraaggctctggggactcctaatttctgcttccccagcctaaagcagggatcagtcttttcttgtggaataaatccttggatcgggaaccctgctgctcagt

SEQ ID NO: 24670 - DNA, 201 bp, Homo sapiens
tcgctgccggttcaggaggccatcctctgcgatctcttggagcgaccagaccctgctggccacttgacccttcgggacaaccgcctgaagctcaccttttytcccttccaagtgctgtccctgttgctcgtgcttcagcctccgccacactgagtccctggggctggggttttgtttgtagaaggctctggggactcctaa

SEQ ID NO: 24671 - DNA, 201 bp, Homo sapiens
ggaccctggcagtgggcaccgagggcggcctgcggggcagcgcctggttcttgctacagatcagccccaacagtcggcttagccaggaggttgtgctggaygttggctgcccctatgtccgcttccacaccgaggtacactggcatgaggcccacaagttcctgaaggtggagttccctgctcgcgtgcggagttcccagg

SEQ ID NO: 24672 - DNA, 201 bp, Homo sapiens
caggaggttgtgctggacgttggctgcccctatgtccgcttccacaccgaggtacactggcatgaggcccacaagttcctgaaggtggagttccctgctcrcgtgcggagttcccaggccacctatgagatccagtttgggcacctgcagcgacctacccactacaatacctcttgggactgggctcgatttgaggtgtgg

SEQ ID NO: 24673 - DNA, 201 bp, Homo sapiens; identical to SEQ ID NO: 24664

SEQ ID NO: 24674 - DNA, 201 bp, Homo sapiens; identical to SEQ ID NO: 24665

SEQ ID NO: 24675 - DNA, 201 bp, Homo sapiens; identical to SEQ ID NO: 24666

SEQ ID NO: 24676 - DNA, 201 bp, Homo sapiens
cctaaacttccccctgttggctctgccagcccccagcccagcgcccgccacctcctggagtgcgttttccgtgtcttcacccgcggtcgtattggagaccrtcaagcaggcaaggggtgggaccccccagcgccgctcgctggtcctgaggctgtatgaggcccacggcagccacgtggactgctggctgcacttgtcgct

SEQ ID NO: 24677 - DNA, 201 bp, Homo sapiens
ggatgctggcgttatccaagctgcctacagcctaaacttccccctgttggctctgccagcccccagcccagcgcccgccacctcctggagtgcgttttccrtgtcttcacccgcggtcgtattggagaccgtcaagcaggcaaggggtgggaccccccagcgccgctcgctggtcctgaggctgtatgaggcccacggcag

SEQ ID NO: 24678 - DNA, 201 bp, Homo sapiens; identical to SEQ ID NO: 24669

SEQ ID NO: 24679 - DNA, 201 bp, Homo sapiens; identical to SEQ ID NO: 24670

SEQ ID NO: 24680 - DNA, 201 bp, Homo sapiens; identical to SEQ ID NO: 24671

SEQ ID NO: 24681 - DNA, 201 bp, Homo sapiens; identical to SEQ ID NO: 24672

SEQ ID NO: 24682 - DNA, 201 bp, Homo sapiens
cccacccttcggcccctccccagccccaggcccaggccctttacctgctggcacaggggaggggcttctcaactcatggtctcttcactggcttttggtgsctcgaggtccccagtctctcctgtgggggctgcaacccagaccctgcacgcacaggtaccttaggatcttgcccctacccaccaaatacctgggaagcca

SEQ ID NO: 24683 - DNA, 201 bp, Homo sapiens
cagaccccggaaggtcaaggctgacatcccatccttggaaccagaggggacctcagcctcttagcaggaggctctccttgcttgcactcaccctttcttaktgtcttgccctgcatctgggggtctgaatttttgggagcaggcaatatctgaaggtgcaaacaggccctacggctgttccctgcacaactctcatggttt

SEQ ID NO: 24684 - DNA, 201 bp, Homo sapiens; identical to SEQ ID NO: 24682

SEQ ID NO: 24685 - DNA, 201 bp, Homo sapiens; identical to SEQ ID NO: 24683

SEQ ID NO: 24686 - DNA, 201 bp, Homo sapiens; identical to SEQ ID NO: 24682

SEQ ID NO: 24687 - DNA, 201 bp, Homo sapiens; identical to SEQ ID NO: 24683

SEQ ID NO: 24688 - DNA, 201 bp, Homo sapiens; identical to SEQ ID NO: 24682

SEQ ID NO: 24689 - DNA, 201 bp, Homo sapiens; identical to SEQ ID NO: 24683

SEQ ID NO: 24690 - DNA, 201 bp, Homo sapiens
tttctattatgcttcatgaactcatcaaattactccaccatgcacggtgctgcgatgtcaccattattagaatcggtacatcagggggaatagggattgcmccagggactgttgtaataacggatatagctgtagactccttctttaagccccggtttgaacaggtcattttggacaacattgtcacccgaagtactgaac

SEQ ID NO: 24691 - DNA, 201 bp, Homo sapiens
ctgtctgaagaactgttcaactgtagcaaagaaatccccaacttcccaaccctcgttggacatacaatgtgtacctatgatttttatgaaggccaaggcckactagatggagcactgtgctccttttccagagaaaaaaagttagactacttgaagagagcatttaaagctggtgtcaggaatattgaaatggaatctaca

SEQ ID NO: 24692 - DNA, 201 bp, Homo sapiens
atttaataacaagtcacaatatctctctttcttgacatcaatttaaggtgacttttcacatagtagagagaatggcttcagttatacctgcctccaatagktccatgagatctgacaggaatacatatgttggaaaaaggtttgttcacgttaaaaatccttacttggatttgatggatgaagacattctctatcacttgg

SEQ ID NO: 24693 - DNA, 143 bp, Homo sapiens
aaaatttaaaatgctaaaggaaaaattttcttagcaatttcasaggaaaacctaagttttaagagaggttatcattctgactgggaactgaactattatgactaggtctataatttaataacaagtcacaatatctctctttc

SEQ ID NO: 24694 - DNA, 179 bp, Homo sapiens
aaaatttaaaatgctaaaggaaaaattttcttagcaatttcacaggaaaacctaagttttaagagaggttatcattctractgggaactgaactattatgactaggtctataatttaataacaagtcacaatatctctctttcttgacatcaatttaaggtgacttttcacatagtaga

SEQ ID NO: 24695 - DNA, 201 bp, Homo sapiens
ctttgaggtacaagggctgcagcctaatggtgaggagatgaccctcaaacagttcctcgactattttaagacagagcacaaattagagatcaccatgctgmcccagggcgtgtccatgctctattccttcttcatgccagctgccaagctcaaggaacggttggatcagccgatgacagagattgtgagccgtgtgtcgaa

SEQ ID NO: 24696 - DNA, 201 bp, Homo sapiens
gaccctcaaacagttcctcgactattttaagacagagcacaaattagagatcaccatgctgtcccagggcgtgtccatgctctattccttcttcatgccakctgccaagctcaaggaacggttggatcagccgatgacagagattgtgagccgtgtgtcgaagcgaaagctgggccgccacgtgcgggcgctggtgcttga

SEQ ID NO: 24697 - DNA, 201 bp, Homo sapiens
tgggatcgctttgaggtacaagggctgcagcctaatggtgaggagatgaccctcaaacagttcctcgactattttaagacagagcacaaattagagatcamcatgctgtcccagggcgtgtccatgctctattccttcttcatgccagctgccaagctcaaggaacggttggatcagccgatgacagagattgtgagccgt

SEQ ID NO: 24698 - DNA, 201 bp, Homo sapiens
acattggcttccaggccctgcaccagttctgtgctcagcatggccggccacctcggccccgcaatgaggaggatgcagcagaactggtagccttagcacargctgtgaatgctcgagccctgccagcagtgcagcaaaataacctggacgaggacctcatccggaagctggcatatgtggctgctggggatctggcaccca

SEQ ID NO: 24699 - DNA, 201 bp, Homo sapiens
tgggagattattagtaactacacaataatggcagccaaaatttattggacgcttcctacacttaagtgctttgcttgcttcattaatgaattcactcaaayatttattgagcaccttttgtgtgcagggactcttctaagttatgttcctcaagtagattatataaataacctattaaatgattttggaatcaaaaaagga

SEQ ID NO: 24700 - DNA, 201 bp, Homo sapiens
gaaccgtgtgggtcctgacacggagcgcatctatgatgacgattttttccaaaacctagatggcgtggccaatgccctggacaacgtggatgcccgtgagsttggaggcgggtgaggtggtcacgggcaaagttgtgtgtgtttcggtgtgtatataccaagaggggtgtccgtctttctgtcctctcctgatgtttcttt

SEQ ID NO: 24701 - DNA, 201 bp, Homo sapiens
agaactggtagccttagcacaggctgtgaatgctcgagccctgccagcagtgcaggatctggcacccataaacgccttcattgggggcctggctgcccagraagtcatgaaggcctgctccgggaagttcatgcccatcatgcagtggctatactttgatgcccttgagtgtctccctgaggacaaagaggtcctcacaga

SEQ ID NO: 24702 - DNA, 201 bp, Homo sapiens
gcagctgtgcgccaaatgaatccacatatccgggtgacaagccaccagaaccgtgtgggtcctgacacggagcgcatctatgatgacgattttttccaaaycctagatggcgtggccaatgccctggacaacgtggatgcccgtgagtttggaggcgggtgaggtggtcacgggcaaagttgtgtgtgtttcggtgtgtat

SEQ ID NO: 24703 - DNA, 201 bp, Homo sapiens
gccaccagaaccgtgtgggtcctgacacggagcgcatctatgatgacgattttttccaaaacctagatggcgtggccaatgccctggacaacgtggatgcrcgtgagtttggaggcgggtgaggtggtcacgggcaaagttgtgtgtgtttcggtgtgtatataccaagaggggtgtccgtctttctgtcctctcctgatg

SEQ ID NO: 24704 - DNA, 201 bp, Homo sapiens
atgccagctgccaagctcaaggaacggttggatcagccgatgacagagattgtgagccgtgtgtcgaagcgaaagctgggccgccacgtgcgggcgctggmgcttgagctgtgctgtaacgacgagagcggcgaggatgtcgaggttccctatgtccgatacaccatccgctgaccccgtctgctcctctaggctggcccc

SEQ ID NO: 24705 - DNA, 201 bp, Homo sapiens
atgacagagattgtgagccgtgtgtcgaagcgaaagctgggccgccacgtgcgggcgctggtgcttgagctgtgctgtaacgacgagagcggcgaggatgkcgaggttccctatgtccgatacaccatccgctgaccccgtctgctcctctaggctggccccttgtccacccctctccacaccccttccagcccagggttc

SEQ ID NO: 24706 - DNA, 201 bp, Homo sapiens
ccttcttcatgccagctgccaagctcaaggaacggttggatcagccgatgacagagattgtgagccgtgtgtcgaagcgaaagctgggccgccacgtgcgmgcgctggtgcttgagctgtgctgtaacgacgagagcggcgaggatgtcgaggttccctatgtccgatacaccatccgctgaccccgtctgctcctctagg

SEQ ID NO: 24707 - DNA, 201 bp, Homo sapiens
gcaaaataacctggacgaggacctcatccggaagctggcatatgtggctgctggggatctggcacccataaacgccttcattgggggcctggctgcccagraagtcatgaaggcctgctccgggaagttcatgcccatcatgcagtggctatactttgatgcccttgagtgtctccctgaggacaaagaggtcctcacaga

SEQ ID NO: 24708 - DNA, 201 bp, Homo sapiens
catccaacctccgggcagaaaactatgacattccttctgcagaccggcacaagagcaagctgattgcagggaagatcatcccagccattgccacgaccacmgcagccgtggttggccttgtgtgtctggagctgtacaaggttgtgcaggggcaccgacagcttgactcctacaagaatggtttcctcaacttggccctgc

SEQ ID NO: 24709 - DNA, 201 bp, Homo sapiens
cagaccggcacaagagcaagctgattgcagggaagatcatcccagccattgccacgaccacagcagccgtggttggccttgtgtgtctggagctgtacaakgttgtgcaggggcaccgacagcttgactcctacaagaatggtttcctcaacttggccctgcctttctttggtttctctgaaccccttgccgcaccacgtc

SEQ ID NO: 24710 - DNA, 201 bp, Homo sapiens
cgtggctgcatccaacctccgggcagaaaactatgacattccttctgcagaccggcacaagagcaagctgattgcagggaagatcatcccagccattgccmcgaccacagcagccgtggttggccttgtgtgtctggagctgtacaaggttgtgcaggggcaccgacagcttgactcctacaagaatggtttcctcaactt

SEQ ID NO: 24711 - DNA, 201 bp, Homo sapiens
gcccgacacgggtttgagagcggggactttgtctccttttcagaagtacagggcatggttgaactcaacggaaatcagcccatggagatcaaagtcctggrtccttatacctttagcatctgtgacacctccaacttctccgactacatccgtggaggcatcgtcagtcaggtcaaagtacctaagaagattagctttaaa

SEQ ID NO: 24712 - DNA, 201 bp, Homo sapiens
ggaagaaagccgtctcaatttggtccagcgtaacgtgaacatctttaagttcatcattcttaatgttgtaaaatacagcccgaactgcaagttgcttattrtttcaaatccagtggatatcttgacctacgtggcttggaagataagtggttttcccaaaaaccatgttattggaagtggttgcaatctggattcagccca

SEQ ID NO: 24713 - DNA, 201 bp, Homo sapiens
cgttacctgatgggggaaaggctgggagttcacccattaagctgtcatgggtgggtccttggggaacatggagattccagtgcacctgtatggagtggaawgaatgttgctggtgtctccctgaagactccgcacccagatttagagactgataaacataaggaacagtggaaagaggttcacaaactggtggttgagagt

SEQ ID NO: 24714 - DNA, 201 bp, Homo sapiens
gcccgaactgcaagttgcttattgtttcaaatccagtggatatcttgacctacgtggcttggaagataagtggttttcccaaaaaccatgttattggaagyggttgcaatctggattcagcccaattccgttacctgatgggggaaaggctgggagttcacccattaagctgtcatgggtgggtccttggggaacatggag

SEQ ID NO: 24715 - DNA, 201 bp, Homo sapiens
tggatatcttgacctacgtggcttggaagataagtggttttcccaaaaaccatgttattggaagtggttgcaatctggattcagcccaattccgttacctratgggggaaaggctgggagttcacccattaagctgtcatgggtgggtccttggggaacatggagattccagtgcacctgtatggagtggaatgaatgttg

SEQ ID NO: 24716 - DNA, 201 bp, Homo sapiens
ctttgaggccatttccctgatgcagaaggccacacaggccgtgtatggtgtcagtgcccccagcatgaccttggccacccaccctctgctgcagggtgccmacagagacgtggtcatcctgggcatgtccagcctggagaagctggagcagaacttggcagtgatggaggaagggcccatggacccggctgtcatggacac

SEQ ID NO: 24717 - DNA, 201 bp, Homo sapiens
cattttgaatgatgatgagatgacttacgataacaagtctgacttcaaagtgggaaaatcactaaagcctgacagtgtctggtcccagctagagacgtcaytgaagaggctgcagtgtccccgattggacctcttctacctacatgcacctgaccacggcaccccagtggaagagacgctgtgtgcttgccaccagcgaca

SEQ ID NO: 24718 - DNA, 201 bp, Homo sapiens
ctccaactatgccggctgggaagtggaaatggagctcttcccctgccttgggcactttggactgaggttctatgcctacaaccctctggctgggggtctgytgaccggcaagtacaagtatgaggacaagggcaggaaacagtctgggggccacttctttgggaatagctgggctgagatccacaggaatcgcttctggaa

SEQ ID NO: 24719 - DNA, 185 bp, Homo sapiens
ccttggccacccaccctctgctgcagggtgcccacagagacgtggtcatcctgggcatgtccagcctggagaagctggagcagaacttggcagtgatggakgaagggcccatggacccggctgtcatggacacttttaatcaaacctggcattttgttgcccacgaatgtcccaactacttccgc

SEQ ID NO: 24720 - DNA, 201 bp, Homo sapiens
aaccctctggctgggggtctgctgaccggcaagtacaagtatgaggacaagggcaggaaacagtctgggggccacttctttgggaatagctgggctgagayccacaggaatcgcttctggaaggagcaccactttgaggccatttccctgatgcagaaggccacacaggccgtgtatggtgtcagtgcccccagcatgacc

SEQ ID NO: 24721 - DNA, 201 bp, Homo sapiens
ggaatagctgggctgagatccacaggaatcgcttctggaaggagcaccactttgaggccatttccctgatgcagaaggccacacaggccgtgtatggtgtsagtgcccccagcatgaccttggccacccaccctctgctgcagggtgcccacagagacgtggtcatcctgggcatgtccagcctggagaagctggagcaga

SEQ ID NO: 24722 - DNA, 201 bp, Homo sapiens
gcacgctttcctggagcgtggccacaccgagctggacatggccttcatgtacagcgatggccagtccaaaatcatcctgggcggcctgaggctggggctgggcggcggcggcgactgctgagtgaaattggccaccaaggccaacccttgagagggaaaatcactaaagcctgacagtgtctggtcccagctagagacgtc

SEQ ID NO: 24723 - DNA, 201 bp, Homo sapiens
cacgctttcctggagcgtggccacaccgagctggacatggccttcatgtacagcgatggccagtccaaaatcatcctgggcggcctgaggctggggctgggcggcggcggcgactgctgagtgaaattggccaccaaggccaacccttgagagggaaaatcactaaagcctgacagtgtctggtcccagctagagacgtca

SEQ ID NO: 24724 - DNA, 201 bp, Homo sapiens
gtacaatgccaccacccggcaggtggaaatggagctcttcccctgccttgggcactttggactgaggttctatgcctacaaccctctggctgggggtctgytgaccggcaagtacaagtatgaggacaagggcaggaaacagtctgggggccacttctttgggaatagctgggctgagatccacaggaatcgcttctggaa

SEQ ID NO: 24725 - DNA, 201 bp, Homo sapiens
ggatgtaccaccactcacagctgcagggtgcccacagagacgtggtcatcctgggcatgtccagcctggagaagctggagcagaacttggcagtgatggakgaagggcccatggacccggctgtcatggacacttttaatcaaacctggcattttgttgcccacgaatgtcccaactacttccgctaggcccatcatggcc

SEQ ID NO: 24726 - DNA, 201 bp, Homo sapiens
acgctttcctggagcgtggccacaccgagctggacatggccttcatgtacagcgatggccagtccaaaatcatcctgggcggcctgaggctggggctgggcggcggcggcgactgctgagtgaaattggccaccaaggccaacccttgagagggaaaatcactaaagcctgacagtgtctggtcccagctagagacgtcat

SEQ ID NO: 24727 - DNA, 201 bp, Homo sapiens
cggcggcggcgactgctgagtgaaattggccaccaaggccaacccttgagagggaaaatcactaaagcctgacagtgtctggtcccagctagagacgtcaytgaagaggctgcagtgtccccgattggacctcttctacctacatgcacctgaccacggcaccccagtggaagagacgctgtgtgcttgccaccagcgaca

SEQ ID NO: 24728 - DNA, 201 bp, Homo sapiens; identical to SEQ ID NO: 24720

SEQ ID NO: 24729 - DNA, 201 bp, Homo sapiens
ggaatagctgggctgagatccacaggaatcgcttctggaaggagcaccactttgaggccatttccctgatgcagaaggccacacaggccgtgtatggtgtsagtgcccccagcatgaccttggccacccaccctctggtggatgtaccaccactcacagctgcagggtgcccacagagacgtggtcatcctgggcatgtcc

SEQ ID NO: 24730 - DNA, 201 bp, Homo sapiens
cagaaggccacacaggccgtgtatggtgtcagtgcccccagcatgaccttggccacccaccctctggtggatgtaccaccactcacagctgcagggtgccmacagagacgtggtcatcctgggcatgtccagcctggagaagctggagcagaacttggcagtgatggaggaagggcccatggacccggctgtcatggacac

SEQ ID NO: 24731 - DNA, 201 bp, Homo sapiens
agggcccgctcaagggcatcctgggctacactgagcaccaggttgtctcctccgaattcaacagcaacacccactcttctgctttcaatgtcaatgagggyaatgacattgccctcaacaaccactttgtcaagcttatttcctggtatgacaatgaatttggcaacagcaacagggtgatagacctcatggtccacttga

SEQ ID NO: 24732 - DNA, 123 bp, Homo sapiens
atggtgaaggtgaaggccagagycaacggattggactatattgggcacccggtcactagggctgcttttaattctggtaaagtggatattgtcaccatcaatgaccccttcattgacctcaac

SEQ ID NO: 24733 - DNA, 115 bp, Homo sapiens
atggtgaaggtgaakgccagagtcaacggattggactatattgggcacccggtcactagggctgcttttaattctggtaaagtggatattgtcaccatcaatgaccccttcattg

SEQ ID NO: 24734 - DNA, 201 bp, Homo sapiens; identical to SEQ ID NO: 24731

SEQ ID NO: 24735 - DNA, 201 bp, Homo sapiens
gcactttaagggctgccctgcggacctagtggtgtgtgacggggctcctgatgtaaccggtctccatgatgttgatgagtatatgcaggcccagctcctcytagctgctctgaacattgctacacatgtcctgaagccagggggctgctttgtggccaagatattccgaggccgggatgtgacgctcctctacagccagct

SEQ ID NO: 24736 - DNA, 201 bp, Homo sapiens
aggcccagctcctcctagctgctctgaacattgctacacatgtcctgaagccagggggctgctttgtggccaagatattccgaggccgggatgtgacgctyctctacagccagctgcaggtcttcttctccagcgtgctgtgtgccaagcccaggagcagccggaactctagcatcgaggccttcgctgtctgtcagggct

SEQ ID NO: 24737 - DNA, 201 bp, Homo sapiens
gtaaccatgaacttgatggaagaaaatgttacatctttattttcagcaatgaaactgaaatttagccttactcccaagttataaatgctggcaacaaatcmcagtagtaaaagcagtacctgggattttcccaccaatacaaaccagttacagcaactgtaatgtaacataaaaagggcatcttgaagtattgttcatatt

SEQ ID NO: 24738 - DNA, 201 bp, Homo sapiens; identical to SEQ ID NO: 24735

SEQ ID NO: 24739 - DNA, 201 bp, Homo sapiens; identical to SEQ ID NO: 24736

SEQ ID NO: 24740 - DNA, 201 bp, Homo sapiens; identical to SEQ ID NO: 24737

SEQ ID NO: 24741 - DNA, 201 bp, Homo sapiens
ggactacgaacacaaactgaagccctaggacttgtcgcccgtttgcgctctcgccgaggcacaggctgctcgcggaccaccctgctccgaaaactaagagrtaggtggtagcccattcatctggttactgatactggccggcatcagtggactgtcggcaggtccttgagcaactggtgtgtgaaatgggacggacgtcaa

SEQ ID NO: 24742 - DNA, 201 bp, Homo sapiens
agtgatttgccttcaaggaaactggggagtcagaaaattgggaactcatatcaacatggcaaacctattgaaaacagtggtgactggctgctcgtgtcctytacttagcaatttggggtcctgtaagggtctacgtgtgaagaaggattttttacgaacattttatactcaccaagaactgtggtgtaaagcgcctgtaaa

SEQ ID NO: 24743 - DNA, 201 bp, Homo sapiens
aaggattttttacgaacattttatactcaccaagaactgtggtgtaaagcgcctgtaaaaccaggaattccatataagcaactgactgttggagtccccaragagatattccaaaatgagaagcgagtggcattgtctcctgctggtgttcagaacttggtcaagcagggttttaatgttgtcgtggaatcgggtgcgggc

SEQ ID NO: 24744 - DNA, 201 bp, Homo sapiens
ttagtttggtactaagtttctcaaaaaattattaacacatgaaagacaatctctaaaccagaaaaagaagtagtacaaattttgttactgtaatgctcgcrtttagtgagtttaaaacacacagtatcttttggttttataatcagtttctattttgctgtgcctgagattaagatctgtgtatgtgtgtgtgtgtgtgtg

SEQ ID NO: 24745 - DNA, 201 bp, Homo sapiens
aaaacatgtgacgcgctccaggcgaaagttagagaatcctatcagaagtaaatattaaggatcaagctgttagctaataatgccacctctgcagttttggraacaggcaaataaagtatcagtatacatggtgatgtacatctgtagcaaagctcttggagaaaatgaagactgaagaaagcaaagcaaaaactgtataga

SEQ ID NO: 24746 - DNA, 201 bp, Homo sapiens
aacaaaaatgatttttatacattctatttcattattcctctttttccaataagtcatacaattggtagatatgacttattttatttttgtattattcactrtatctttatgatatttaagtataaataattaaaaaaatttattgtaccttatagtctgtcaccaaaaaaaaaaaattatctgtaggtagtgaaatgctaa

SEQ ID NO: 24747 - DNA, 201 bp, Homo sapiens
tttgttaattgatcttagatcactagtaaactcagggctgaattataccatgtatattctattagaagaaagtaaacaccatctttattcctgcccttttycttctctcaaagtagttgtagttatatctagaaagaagcaattttgatttcttgaaaaggtagttcctgcactcagtttaaactaaaaataatcatactt

SEQ ID NO: 24748 - DNA, 201 bp, Homo sapiens
ttaatctgtcttcactgtttataatacggatggattttttttcaaatcagtgtgtgttttgaggtcttatgtaattgatgacatttgagagaaatggtggytttttttagctacctctttgttcatttaagcaccagtaaagatcatgtctttttatagaagtgtagattttctttgtgactttgctatcgtgcctaaagc

SEQ ID NO: 24749 - DNA, 201 bp, Homo sapiens
aaattgggaactcatatcaacatggcaaacctattgaaaacagtggtgactggctgctcgtgtcctctacttagcaatttggggtcctgtaagggtctacrtgtgaagaaggattttttacgaacattttatactcaccaagaactgtggtgtaaagcgcctgtaaaaccaggaattccatataagcaactgactgttgga

SEQ ID NO: 24750 - DNA, 201 bp, Homo sapiens
atggtctctgtgcagccaaagctcaataccccattgctgatttggtaaagatgctcactgagcaaggcaaaaaagtcaggtttggaattcacccagttgcrggccgaatgcctggtcagcttaatgtgctgctggctgaggctggtgtgccatatgacattgtgttggaaatggatgagatcaaccatgattttccagata

SEQ ID NO: 24751 - DNA, 201 bp, Homo sapiens
ctttgggtggtaccattggattgacaattgccaaacgcatccagatttctgatttacctcaattagttgctgcttttcacagtttagtgggtttggcagcygtacttacttgcatagctgagtacattatagaatatccacattttgctacggatgcagcagcaaatctcaccaagattgtggcctacctcggcacttaca

SEQ ID NO: 24752 - DNA, 201 bp, Homo sapiens
gctttgtaactggttcttcaaggggagaagcaaatgtgtccctgaaaacttcagctgccgcgtttggcaccagtgatttgccttcaaggaaactggggagycagaaaattgggaactcatatcaacatggcaaacctattgaaaacagtggtgactggctgctcgtgtcctctacttagcaatttggggtcctgtaagggt

SEQ ID NO: 24753 - DNA, 201 bp, Homo sapiens
tattgcaggcatgccagtccttgaggtctggaaatcaaagcaggtgattgttatgaagaggtctttgggtgttggctatgctgcagtggacaatccaatcwtctacaaacctaacacggccatgcttctaggtgatgccaagaaaacatgtgacgcgctccaggcgaaagttagagaatcctatcagaagtaaatattaag

SEQ ID NO: 24754 - DNA, 199 bp, Homo sapiens
tgatttgccttcaaggaaactggggagtcagaaaattgggaactcatatcaacatggcaaacctattgaaaacagtggtgactggctgctcgtgtcctytacttagcaatttggggtcctgtaagggtctacgtgtgaagaaggattttttacgaacattttatactcaccaagaactgtggtgtaaagcgcctgtaaa

SEQ ID NO: 24755 - DNA, 201 bp, Homo sapiens; identical to SEQ ID NO: 24743

SEQ ID NO: 24756 - DNA, 201 bp, Homo sapiens; identical to SEQ ID NO: 24744

SEQ ID NO: 24757 - DNA, 201 bp, Homo sapiens; identical to SEQ ID NO: 24745

SEQ ID NO: 24758 - DNA, 201 bp, Homo sapiens; identical to SEQ ID NO: 24746

SEQ ID NO: 24759 - DNA, 201 bp, Homo sapiens; identical to SEQ ID NO: 24747

SEQ ID NO: 24760 - DNA, 201 bp, Homo sapiens; identical to SEQ ID NO: 24748

SEQ ID NO: 24761 - DNA, 201 bp, Homo sapiens; identical to SEQ ID NO: 24749

SEQ ID NO: 24762 - DNA, 201 bp, Homo sapiens; identical to SEQ ID NO: 24750

SEQ ID NO: 24763 - DNA, 201 bp, Homo sapiens; identical to SEQ ID NO: 24751

SEQ ID NO: 24764 - DNA, 128 bp, Homo sapiens
tgatttgccttcaaggaaactggggagycagaaaattgggaactcatatcaacatggcaaacctattgaaaacagtggtgactggctgctcgtgtcctctacttagcaatttggggtcctgtaagggt

SEQ ID NO: 24765 - DNA, 201 bp, Homo sapiens; identical to SEQ ID NO: 24753

SEQ ID NO: 24766 - DNA, 201 bp, Homo sapiens; identical to SEQ ID NO: 24742

SEQ ID NO: 24767 - DNA, 201 bp, Homo sapiens; identical to SEQ ID NO: 24743

SEQ ID NO: 24768 - DNA, 201 bp, Homo sapiens; identical to SEQ ID NO: 24744

SEQ ID NO: 24769 - DNA, 201 bp, Homo sapiens; identical to SEQ ID NO: 24745

SEQ ID NO: 24770 - DNA, 201 bp, Homo sapiens; identical to SEQ ID NO: 24746

SEQ ID NO: 24771 - DNA, 201 bp, Homo sapiens; identical to SEQ ID NO: 24747

SEQ ID NO: 24772 - DNA, 201 bp, Homo sapiens; identical to SEQ ID NO: 24748

SEQ ID NO: 24773 - DNA, 201 bp, Homo sapiens; identical to SEQ ID NO: 24749

SEQ ID NO: 24774 - DNA, 201 bp, Homo sapiens; identical to SEQ ID NO: 24750

SEQ ID NO: 24775 - DNA, 201 bp, Homo sapiens; identical to SEQ ID NO: 24751

SEQ ID NO: 24776 - DNA, 201 bp, Homo sapiens
cccgggtctgccagcgcgacgtcctctcgcggccctcagggcacagcccaaggctgtcagcctcccggcccagtgatttgccttcaaggaaactggggagycagaaaattgggaactcatatcaacatggcaaacctattgaaaacagtggtgactggctgctcgtgtcctctacttagcaatttggggtcctgtaagggt

SEQ ID NO: 24777 - DNA, 201 bp, Homo sapiens; identical to SEQ ID NO: 24753

SEQ ID NO: 24778 - DNA, 201 bp, Homo sapiens
gtctgcaaaaaagatgttgaaatcaatgggatgtttattcccaaaggggtggtggtgatgattccaagctatgttcttcatcatgacccaaagtactggasagagcctgagaagttcctccctgaaaggttcagtaaaaagaacaaggacaacatagatccttacatatacacaccctttggaagtggacccagaaactgc

SEQ ID NO: 24779 - DNA, 201 bp, Homo sapiens
gactctcagaattcaaaagactctgagacccacaaagctctgtctgatctggagctcatggcccaatcaattatctttatttttgctggctatgaaaccamgagcagtgttctctccttcattatatatgaactggccactcaccctgatgtccagcagaaagtgcagaaggaaattgatacagttttacccaataaggca

SEQ ID NO: 24780 - DNA, 201 bp, Homo sapiens
taagaaagctgtgccccagaacaccagagacctcaaattactttacaaatagaaccctgaaatgaagacgggcttcatccaatgtgctgcataaataatcrgggattctgtacgtgcattgtgctctctcatggtctgtatagagtgttatacttggtaatatagaggagatgaccaaatcagtgctggggaagtagattt

SEQ ID NO: 24781 - DNA, 201 bp, Homo sapiens; identical to SEQ ID NO: 24778

SEQ ID NO: 24782 - DNA, 201 bp, Homo sapiens
ggacttcttctaacagaaaaacccattgttctaaaggctgagtcaagggatgagaccgtaagtggagcctgatttccctaaggacttctggtttgctcttyaagaaagctgtgccccagaacaccagagacctcaaattactttacaaatagaaccctgaaatgaagacgggcttcatccaatgtgctgcataaataatca

SEQ ID NO: 24783 - DNA, 201 bp, Homo sapiens; identical to SEQ ID NO: 24779

SEQ ID NO: 24784 - DNA, 161 bp, Homo sapiens
atgaccccgtacgactctcgctgtcccccaaagctgcaaatatctgcacctgcacagctgycgcctcattccctgccctcttcggggacccagttcccaaatccaccagcccactcccttcgacatcgccccagcaggagacgagaaagggacaccaagag

SEQ ID NO: 24785 - DNA, 177 bp, Homo sapiens
ctagtttctcaggatcatgtctgtaagccaggattcctgatccagagacaatggccccgatgggatggagcccgaakgcgtcatcgagagtaactggaatgagattgttgacagctttgatgacatgaacctctcggagtcccttctccgtgacatctatgcctatggttttgagaa

SEQ ID NO: 24786 - DNA, 125 bp, Homo sapiens
ctagtttctcaggatcatgtctgtragccaggattcctgatccagagacaatggccccgatgggatggagcccgaaggcgtcatcgagagtaactggaatgagattgttgacagctttgatgaca

SEQ ID NO: 24787 - DNA, 201 bp, Homo sapiens
ctccgccatgcatggagatatggaccaaaaggagcgagacgtgatcacgagggagtttcgttctggctctagcagagttttgattaccactgacctgctgsccagaggcattgatgtgcagcaggtttctttagtcatcaactatgaccttcccaccaacagggaaaactatatccacagaatcagtcgaggtggacagtt

SEQ ID NO: 24788 - DNA, 201 bp, Homo sapiens
aaaatggccacatttgccatatcgattctgcagcagattgcattagatctaaaagccacccaggccttggtcctagcacccactcgagaattggctcagcrgatacagaaggtggtcatggcactagtagactacatgggtgcctcctgtcatgcctgtatcaggggcaccaatgtgcgtgctgaggtgcagaaactgcag

SEQ ID NO: 24789 - DNA, 201 bp, Homo sapiens
aggatcagtacaaccaaccaggtgtggtatttctgtttgggaaagtttggattgaatcagccgagacccatgtgagctgttgtgtcatggtgaaaaatatygagcgaacgctttacttccttccccgtgaaatgaaaattgatctaaatacggggaaagaaacaggaactccaatttcaatgaaggatgtttatgaggaat

SEQ ID NO: 24790 - DNA, 201 bp, Homo sapiens
gctactcactggcccccccccagataaaggtcattgctccctggaggatgcccgagttctacaactggttcaaggccttcaatgacctgatggaagaatayacaaaagcaacacgggattcccatcctggtcacttccaagaagccatggagcatggaacagaacctcatgcacatcagctgtgaggctggaatcctggag

SEQ ID NO: 24791 - DNA, 201 bp, Homo sapiens
atgaagtcccaaggtatctaggataccccagcaggcaccatcctttaccacgctcatttagacatcaaggccttcaccatggacctggaagtgcgcaaaaycaaacaaggcctgggcttggaatttgctgagctggtgtataccggtttctggcacagaccagagtgtgaatttgtccgccactgcattgccaagttccag

SEQ ID NO: 24792 - DNA, 124 bp, Homo sapiens
ccagttgctggtgagcatgaaagtgcaggatgattatgagccaattgatgccatcaggttcatcaacatcaattccctcacgctgagggaatatcatcgtytccagagcaaggtcactgccaaa

SEQ ID NO: 24793 - DNA, 201 bp, Homo sapiens
aactggtgcttccaatcctagacgctatgtccagcaaagactccatggttctggcctacagtggggcctggacacctcctgcatcctcatgtggccgaagraacaaggctatgacataattgcctacctagccaacattggccagaaggaagacttcgaggaagccaggaagaaggcactgaagcttggggccaaaaaggt

SEQ ID NO: 24794 - DNA, 201 bp, Homo sapiens
tggtgcttccaatcctagacgctatgtccagcaaagactccatggttctggcctacagtggggcctggacacctcctgcatcctcatgtggccgaaggaamaaggctatgacataattgcctacctagccaacattggccagaaggaagacttcgaggaagccaggaagaaggcactgaagcttggggccaaaaaggtgtt

SEQ ID NO: 24795 - DNA, 201 bp, Homo sapiens
tgtccagcaggagggggccaagtatgtgtcccacggtgccacgggaaaggggaccgatcagttctgatttgaactcacctgctactcactggccccccccsagataaaggtcattgctccctggaggatgcccgagttctacaactggttcaaggccttcaatgacctgatggaagaatacacaaaagcaacacgggattc

SEQ ID NO: 24796 - DNA, 201 bp, Homo sapiens
ctggtctcactgtccccgccgtcagccaccggttccttatccgtctcattccccattgtggcttggctgagccggtcgccaggcctcgctgtcctcctttrccttcctctctcctcagcggccgtactttgcgccgtacctcacctggcctgcaggatgaagaaccccatgctggaggtggtgtctttactactggagaag

SEQ ID NO: 24797 - DNA, 201 bp, Homo sapiens
gatgcctcctaagtctgaagtctcctcagatgaagacatccagttccgcctgctgacaagatttgtgaatgaggcagtcacgtgcccgcaagaggggatcytggccacacctgcagagggagacattggagccgtcttcgggctcagcttcccaccttgtcttggagggcctttctgctttgtggatctgtatgaagccca

SEQ ID NO: 24798 - DNA, 201 bp, Homo sapiens
tatatacgccgcaattttacagggtcctttgctttgctgaccagaacccatattaactatggagtcaaaggggatgtgatagttatttaaattaactctcyccattcaaagataaatacgctgaataaacaaacagctgcattcagagttcacggaagttatgaatgaaatctgggctagtgatcaaatcagaagtgccat

SEQ ID NO: 24799 - DNA, 114 bp, Homo sapiens
atggtggtctaccsggcgattggcagcctcagccacttctctgccttcaggatcctccgctcccaaggttatatacgccgcaattttacagggtcctttgctttgctgaccaga

SEQ ID NO: 24800 - DNA, 201 bp, Homo sapiens
tgtgaagaataagaatttgaattctgacatgaacggtattttagcaagtctgaagatgcctcctaagtctgaagtctcctcagatgaagacatccagttcygcctgctgacaagatttgtgaatgaggcagtcacgtgcccgcaagaggggatcttggccacacctgcagagggagacattggagccgtcttcgggctcag

SEQ ID NO: 24801 - DNA, 113 bp, Homo sapiens
atggtggtctacygggcgattggcagcctcagccacttctctgccttcaggatcctccgctcccaaggttatatacgccgcaattttacagggtcctttgctttgctgaccag

SEQ ID NO: 24802 - DNA, 201 bp, Homo sapiens
catccgtgcagacagggcaaagaaaatgggactggttgaccaattggtggaatctctgcgaccaggactaaaacttccagaggaatggacaatcaaatacytagaagaagttgcaattactttcccaaaggactagctgataagaagatctctccaaagagagacaagggattagtggaaaaattaacagcgtatgccatg

SEQ ID NO: 24803 - DNA, 201 bp, Homo sapiens
aagacagaaaaacagtattcggtgctcctgaagtcttgctggggatcttaccaggagcaggaggcacacaaaggctgcccaaaatggtgggtgtgcctgckgcttttgacatgatgctgactggcagaaacatccgtgcagacagggcaaagaaaatgggactggttgaccaattggtggaatctctgcgaccaggactaa

SEQ ID NO: 24804 - DNA, 196 bp, Homo sapiens
agagggagacattggagccgtcttcgggctcagcttcccaccttgtcttggagggcctttctgctttgtggatctgtatgaagcccagaagatagtggacsggctcaagaagtatgaggctgcctatggaaaagagttcaccccaagccagctgctagctgaccacactaacagccctaacaagaagtttcatcag

SEQ ID NO: 24805 - DNA, 201 bp, Homo sapiens
ctcctgaagtcttgctggggatcttaccaggagcaggaggcacacaaaggctgcccaaaatggtgggtgtgcctgctgcttttgacatgatgctgactggyagaaacatccgtgcagacagggcaaagaaaatgggactggttgaccaattggtggaatctctgcgaccaggactaaaacttccagaggaatggacaatca

SEQ ID NO: 24806 - DNA, 201 bp, Homo sapiens
agcaatcggtctcaagcaggggaaggtcatcattgtggttaaggatggacctggcttctataccaccaggtgtcttgcacccatgatgtctgaagtcatcygaatcctccaggaaggagttgacccaaagaagctggattccctgaccacaagccttggccttcctgtgggtgccgccacactggtggatgaagttggcgt

SEQ ID NO: 24807 - DNA, 201 bp, Homo sapiens
ccaagaagacttccaaagacaccagtgcttcaactgtagcaatcggtctcaagcaggggaaggtcatcattgtggttaaggatggacctggcttctatacyaccaggtgtcttgcacccatgatgtctgaagtcatctgaatcctccaggaaggagttgacccaaagaagctggattccctgaccacaagccttggccttc

SEQ ID NO: 24808 - DNA, 201 bp, Homo sapiens
ttgcacccatgatgtctgaagtcatctgaatcctccaggaaggagttgacccaaagaagctggattccctgaccacaagccttggccttcctgtgggtgcygccacactggtggatgaagttggcgtggatgtagcgaaacatgtggccaaagatctgggcaaagcctttggggagcagtttggaggtggaaacccagaac

SEQ ID NO: 24809 - DNA, 201 bp, Homo sapiens
acttgaaaagtccataaagcctgttgtgactgccatcagtggatcctgccattttatgccaatataaaatagcaacaaaagacagaaaaacagtattcggygctcctgaagtcttgctggggatcttaccaggagcaggaggcacacaaaggctgcccaaaatggtgggtgtgcctgctgcttttgacatgatgctgactg

SEQ ID NO: 24810 - DNA, 201 bp, Homo sapiens
tgccaccgctctcacggcaggtggcacgggcgccaaggtgcccagtcccctggaaggcagtgaaggggacggagacactgactgaggcgatgggagctgcycaccagagtgcctctgagcagctcacagtgtgtgcccagatgtgccacccctgtgggcagcaagaagctgggatcgctgcagcccttgtaggaacagcct

SEQ ID NO: 24811 - DNA, 201 bp, Homo sapiens
gaggaaaatgtccttccagcgctgcgcccggacagacaagggtgtgtccgcagccggccaggtggtatccctgaaggtgtggctgattgacgacattctaraaaagatcaacagccaccttccctctcacattcggattctgggactgaagcgggtcacgggcgggtttaactccaagaacagatgtgatgccaggaccta

SEQ ID NO: 24812 - DNA, 201 bp, Homo sapiens
cagccttcaaggaggagcacatctaccccaccatcatcggcaccgagcgggacgaacgctccatggcccagtggctgagcaccttgcccatccacaacttyagtgccaccgctctcacggcaggtggcacgggcgccaaggtgcccagtcccctggaaggcagtgaaggggacggagacactgactgaggcgatgggagct

SEQ ID NO: 24813 - DNA, 201 bp, Homo sapiens
tgccaccgctctcacggcaggtggcacgggcgccaaggtgcccagtcccctggaaggcagtgaaggggacggagacactgactgaggcgatgggagctgcycaccagagtgcctctgagcagctcacagtgtgtgcccagatgtgccacccctgtgggcagcaagaagctgggatcgctgcagccatgttttcccggccat

SEQ ID NO: 24814 - DNA, 201 bp, Homo sapiens; identical to SEQ ID NO: 24811

SEQ ID NO: 24815 - DNA, 201 bp, Homo sapiens; identical to SEQ ID NO: 24812

SEQ ID NO: 24816 - DNA, 201 bp, Homo sapiens; identical to SEQ ID NO: 24813

SEQ ID NO: 24817 - DNA, 201 bp, Homo sapiens
gaggaaaatgtccttccagcgctgcgcccggacagacaagggtgtgtccgcagccggccaggtggtatccctgaaggtgtggctgattgacgacattctaraaaagatcaacagccaccttccctctcacattcggattctgggtaagccttgcacgggtcacgggcgggtttaactccaagaacagatgtgatgccagga

SEQ ID NO: 24818 - DNA, 201 bp, Homo sapiens; identical to SEQ ID NO: 24812

SEQ ID NO: 24819 - DNA, 201 bp, Homo sapiens; identical to SEQ ID NO: 24813

SEQ ID NO: 24820 - DNA, 201 bp, Homo sapiens; identical to SEQ ID NO: 24811

SEQ ID NO: 24821 - DNA, 201 bp, Homo sapiens; identical to SEQ ID NO: 24812

SEQ ID NO: 24822 - DNA, 201 bp, Homo sapiens; identical to SEQ ID NO: 24813

SEQ ID NO: 24823 - DNA, 201 bp, Homo sapiens; identical to SEQ ID NO: 24811

SEQ ID NO: 24824 - DNA, 201 bp, Homo sapiens; identical to SEQ ID NO: 24812

SEQ ID NO: 24825 - DNA, 201 bp, Homo sapiens
cccaccacatagcatgcttcctttctctcctggcttggggtaagaagtggctgtggtgtttggcaatgctaattcaatgccgcaacatatagtttaggccraggataaagaagagacactttaagtttgtagtaaaagtggtctctgctggggaagggttttcttttctttttttctttaataacaaggagatttcttagt

SEQ ID NO: 24826 - DNA, 201 bp, Homo sapiens
ccgcggctcagcgcgcaccggcgggcttcgaaatcgcagtcctccggcgaccccgaactccgccccggagcctcagcccctggaaagtgatcctggcatcsgagagccaagatgccggcccacttgctgcaggacgatatctctagctcctataccaccaccaccaccaccattacagcgcctccttccagggtcccgcag

SEQ ID NO: 24827 - DNA, 201 bp, Homo sapiens
cgaagcaagaggaacctcttgccatgatcagacatgcagctgcctacctagtgaggacttcaagccccaccacatagcatgcttcctttctctcctggctyggggtaagaagtggctgtggtgtttggcaatgctaattcaatgccgcaacatatagtttaggccaaggataaagaagagacactttaagtttgtagtaaa

SEQ ID NO: 24828 - DNA, 201 bp, Homo sapiens
ttggcggggtggggggctctgttaacatctagcctaagtatagaactgcctggggggcagggttaggaatctcttcactaccctgattcttgattcctggytctaccctgtctgtcccttttcttttactagatctttctcttccctgaacgttttcttctttccctggacaggcagcctcctttgggtgtattcagaggc

SEQ ID NO: 24829 - DNA, 201 bp, Homo sapiens
tctcttccctgaacgttttcttctttccctggacaggcagcctcctttgggtgtattcagaggcagtgatgacttgctgtccaggcagctccctcctgcasacagaatgctcagggtcactgaaccactgcttctcttccgaaagtagagctagctgccactttcgcatggcctccggagtgtctccacctacacctctgt

SEQ ID NO: 24830 - DNA, 201 bp, Homo sapiens
tagcctaagtatagaactgcctggggggcagggttaggaatctcttcactaccctgattcttgattcctggttctaccctgtctgtcccttttcttttacyagatctttctcttccctgaacgttttcttctttccctggacaggcagcctcctttgggtgtattcagaggcagtgatgacttgctgtccaggcagctccc

SEQ ID NO: 24831 - DNA, 201 bp, Homo sapiens
tcaagccccaccacatagcatgcttcctttctctcctggcttggggtaagaagtggctgtggtgtttggcaatgctaattcaatgccgcaacatatagttkaggccaaggataaagaagagacactttaagtttgtagtaaaagtggtctctgctggggaagggttttcttttctttttttctttaataacaaggagattt

SEQ ID NO: 24832 - DNA, 201 bp, Homo sapiens
ttcttgattcctggttctaccctgtctgtcccttttcttttactagatctttctcttccctgaacgttttcttctttccctggacaggcagcctcctttgkgtgtattcagaggcagtgatgacttgctgtccaggcagctccctcctgcagacagaatgctcagggtcactgaaccactgcttctcttccgaaagtagag

SEQ ID NO: 24833 - DNA, 201 bp, Homo sapiens
ccatgagctgctcatcacagttctttcctctttctgctctgccatcttcaggatattggttgttcccctcatagtaataagatggctgtggcatttccaamcatccaaaaaaagggaaggattttaggaggtggagtcgggtcaaacaagaaatatatatatacatatatacattgcttagaacgttaaactattagagta

SEQ ID NO: 24834 - DNA, 201 bp, Homo sapiens
aggatattggttgttcccctcatagtaataagatggctgtggcatttccaaccatccaaaaaaagggaaggattttaggaggtggagtcgggtcaaacaakaaatatatatatacatatatacattgcttagaacgttaaactattagagtatttccctcccaaagagggatgtttgaaaaaactctgaaggagaggagga

SEQ ID NO: 24835 - DNA, 201 bp, Homo sapiens
gagtatttccctcccaaagagggatgtttgaaaaaactctgaaggagaggaggaattagttgggatgccaatttcctctccactgctgtacatgagatggrgaggttgagggacaggatctataggcagcttctaagagcaaacttcacacaggaagggatctgagaacacattgccgggggcttgagaaggttactgagt

SEQ ID NO: 24836 - DNA, 201 bp, Homo sapiens
gaaggagaggaggaattagttgggatgccaatttcctctccactgctgtacatgagatggggaggttgagggacaggatctataggcagcttctaagagcraacttcacacaggaagggatctgagaacacattgccgggggcttgagaaggttactgagtgagttattgggagtcttaataaaataaactagatattagg

SEQ ID NO: 24837 - DNA, 201 bp, Homo sapiens
gatattaggtccattcattaattagttccagtttctccttgaaatgagtaaaaactagaaggcttctccccacagtgttgtgccccttcactcattttttwttggcggggtggggggctctgttaacatctagcctaagtatagaactgcctggggggcagggttaggaatctcttcactaccctgattcttgattcctgg

SEQ ID NO: 24838 - DNA, 201 bp, Homo sapiens
ggtccattcattaattagttccagtttctccttgaaatgagtaaaaactagaaggcttctccccacagtgttgtgccccttcactcattttttattggcgrggtggggggctctgttaacatctagcctaagtatagaactgcctggggggcagggttaggaatctcttcactaccctgattcttgattcctggttctacc

SEQ ID NO: 24839 - DNA, 201 bp, Homo sapiens
tccattcattaattagttccagtttctccttgaaatgagtaaaaactagaaggcttctccccacagtgttgtgccccttcactcattttttattggcgggrtggggggctctgttaacatctagcctaagtatagaactgcctggggggcagggttaggaatctcttcactaccctgattcttgattcctggttctaccct

SEQ ID NO: 24840 - DNA, 201 bp, Homo sapiens
ccattcattaattagttccagtttctccttgaaatgagtaaaaactagaaggcttctccccacagtgttgtgccccttcactcattttttattggcggggwggggggctctgttaacatctagcctaagtatagaactgcctggggggcagggttaggaatctcttcactaccctgattcttgattcctggttctaccctg

SEQ ID NO: 24841 - DNA, 201 bp, Homo sapiens
atgagtaaaaactagaaggcttctccccacagtgttgtgccccttcactcattttttattggcggggtggggggctctgttaacatctagcctaagtatasaactgcctggggggcagggttaggaatctcttcactaccctgattcttgattcctggttctaccctgtctgtcccttttcttttactagatctttctctt

SEQ ID NO: 24842 - DNA, 201 bp, Homo sapiens
atctagcctaagtatagaactgcctggggggcagggttaggaatctcttcactaccctgattcttgattcctggttctaccctgtctgtcccttttctttkactagatctttctcttccctgaacgttttcttctttccctggacaggcagcctcctttgggtgtattcagaggcagtgatgacttgctgtccaggcagct

SEQ ID NO: 24843 - DNA, 201 bp, Homo sapiens
cagggcctctcctaccactgtgccactgacttgctatgtcaccctgggcaagtcacttaactataaggtgcctcagttttccttctgttaaaatggggatrataatactgacctacctcaaagggcagttttgaggcgtgactaatgctttttagaaagcattttgggatccttcagcacagggattctcaagacctgagt

SEQ ID NO: 24844 - DNA, 201 bp, Homo sapiens
taggtccattcattaattagttccagtttctccttgaaatgagtaaaaactagaaggcttctccccacagtgttgtgccccttcactcattttttattggsggggtggggggctctgttaacatctagcctaagtatagaactgcctggggggcagggttaggaatctcttcactaccctgattcttgattcctggttcta

SEQ ID NO: 24845 - DNA, 201 bp, Homo sapiens
gtgcttaatgccacgtggctggtgaacagtgctgcccacctcttcagatatcgtccttatgacaagaacattagcctccgggagaatatcctggtttcacytggagctgtgggtgagggctttcacaactaccaccactcctttccctatgactactctgccagtgagtaccgctggcacatcaacttcaccacattcttc

SEQ ID NO: 24846 - DNA, 201 bp, Homo sapiens
atttcttagttcatgtatcaagaattcttgaagttgggtgtttccataattggtaaaaacagcagctcacagaattttgagtattccatgagctgctcatyacagttctttcctctttctgctctgccatcttcaggatattggttgttcccctcatagtaataagatggctgtggcatttccaaccatccaaaaaaaggg

SEQ ID NO: 24847 - DNA, 201 bp, Homo sapiens
taattggtaaaaacagcagctcacagaattttgagtattccatgagctgctcatcacagttctttcctctttctgctctgccatcttcaggatattggttsttcccctcatagtaataagatggctgtggcatttccaaccatccaaaaaaagggaaggattttaggaggtggagtcgggtcaaacaagaaatatatatat

SEQ ID NO: 24848 - DNA, 201 bp, Homo sapiens
ctccactgctgtacatgagatggggaggttgagggacaggatctataggcagcttctaagagcaaacttcacacaggaagggatctgagaacacattgccrggggcttgagaaggttactgagtgagttattgggagtcttaataaaataaactagatattaggtccattcattaattagttccagtttctccttgaaatg

SEQ ID NO: 24849 - DNA, 201 bp, Homo sapiens
ttaggtccattcattaattagttccagtttctccttgaaatgagtaaaaactagaaggcttctccccacagtgttgtgccccttcactcattttttattgrcggggtggggggctctgttaacatctagcctaagtatagaactgcctggggggcagggttaggaatctcttcactaccctgattcttgattcctggttct

SEQ ID NO: 24850 - DNA, 201 bp, Homo sapiens; identical to SEQ ID NO: 24825

SEQ ID NO: 24851 - DNA, 201 bp, Homo sapiens; identical to SEQ ID NO: 24826

SEQ ID NO: 24852 - DNA, 201 bp, Homo sapiens; identical to SEQ ID NO: 24827

SEQ ID NO: 24853 - DNA, 201 bp, Homo sapiens; identical to SEQ ID NO: 24828

SEQ ID NO: 24854 - DNA, 201 bp, Homo sapiens; identical to SEQ ID NO: 24829

SEQ ID NO: 24855 - DNA, 201 bp, Homo sapiens; identical to SEQ ID NO: 24830

SEQ ID NO: 24856 - DNA, 201 bp, Homo sapiens; identical to SEQ ID NO: 24831

SEQ ID NO: 24857 - DNA, 201 bp, Homo sapiens; identical to SEQ ID NO: 24832

SEQ ID NO: 24858 - DNA, 201 bp, Homo sapiens; identical to SEQ ID NO: 24833

SEQ ID NO: 24859 - DNA, 201 bp, Homo sapiens; identical to SEQ ID NO: 24834

SEQ ID NO: 24860 - DNA, 201 bp, Homo sapiens; identical to SEQ ID NO: 24835

SEQ ID NO: 24861 - DNA, 201 bp, Homo sapiens; identical to SEQ ID NO: 24836

SEQ ID NO: 24862 - DNA, 201 bp, Homo sapiens; identical to SEQ ID NO: 24837

SEQ ID NO: 24863 - DNA, 201 bp, Homo sapiens; identical to SEQ ID NO: 24838

SEQ ID NO: 24864 - DNA, 201 bp, Homo sapiens; identical to SEQ ID NO: 24839

SEQ ID NO: 24865 - DNA, 201 bp, Homo sapiens; identical to SEQ ID NO: 24840

SEQ ID NO: 24866 - DNA, 201 bp, Homo sapiens; identical to SEQ ID NO: 24841

SEQ ID NO: 24867 - DNA, 201 bp, Homo sapiens; identical to SEQ ID NO: 24842

SEQ ID NO: 24868 - DNA, 201 bp, Homo sapiens; identical to SEQ ID NO: 24843

SEQ ID NO: 24869 - DNA, 201 bp, Homo sapiens; identical to SEQ ID NO: 24844

SEQ ID NO: 24870 - DNA, 201 bp, Homo sapiens; identical to SEQ ID NO: 24845

SEQ ID NO: 24871 - DNA, 201 bp, Homo sapiens; identical to SEQ ID NO: 24846

SEQ ID NO: 24872 - DNA, 201 bp, Homo sapiens; identical to SEQ ID NO: 24847

SEQ ID NO: 24873 - DNA, 201 bp, Homo sapiens; identical to SEQ ID NO: 24848

SEQ ID NO: 24874 - DNA, 201 bp, Homo sapiens; identical to SEQ ID NO: 24849

SEQ ID NO: 24875 - DNA, 201 bp, Homo sapiens
cctctccctggacctgggtggcactaacttcagggtgatgctggtgaaggtgggagaaggtgaggaggggcagtggagcgtgaagaccaaacaccagatgyactccatccccgaggacgccatgaccggcactgctgagatgctcttcgactacatctctgagtgcatctccgacttcctggacaagcatcagatgaaaca

SEQ ID NO: 24876 - DNA, 201 bp, Homo sapiens
gtaatgcgcatcactgtgggcgtggatggctccgtgtacaagctgcaccccagcttcaaggagcggttccatgccagcgtgcgcaggctgacgcccagctrcgagatcaccttcatcgagtcggaggagggcagtggccggggcgcggccctggtctcggcggtggcctgtaagaaggcctgtatgctgggccagtgagag

SEQ ID NO: 24877 - DNA, 201 bp, Homo sapiens
acaaggagccaggcccagacagccttgactctggtagagcagatcctggcagagttccagctgcaggaggaggacctgaagaaggtgatgagacggatgcmgaaggagatggaccgcggcctgaggctggagacccatgaagaggccagtgtgaagatgctgcccacctacgtgcgctccaccccagaaggctcagaagtc

SEQ ID NO: 24878 - DNA, 201 bp, Homo sapiens
catcctgagcacgctggggctgcgaccctcgaccaccgactgcgacatcgtgcgccgcgcctgcgagagcgtgtctacgcgcgctgcgcacatgtgctcgrcggggctggcgggcgtcatcaaccgcatgcgcgagagccgcagcgaggacgtaatgcgcatcactgtgggcgtggatggctccgtgtacaagctgcaccc

SEQ ID NO: 24879 - DNA, 201 bp, Homo sapiens
gcggttccatgccagcgtgcgcaggctgacgcccagctgcgagatcaccttcatcgagtcggaggagggcagtggccggggcgcggccctggtctcggcgrtggcctgtaagaaggcctgtatgctgggccagtgagagcagtggccgcaagcgcagggaggatgccacagccccacagcacccaggctccatggggaagt

SEQ ID NO: 24880 - DNA, 201 bp, Homo sapiens
cagacagccttgactctggtagagcagatcctggcagagttccagctgcaggaggaggacctgaagaaggtgatgagacggatgcagaaggagatggaccrcggcctgaggctggagacccatgaagaggccagtgtgaagatgctgcccacctacgtgcgctccaccccagaaggctcagaagtcggggacttcctctcc

SEQ ID NO: 24881 - DNA, 201 bp, Homo sapiens
gacagccttgactctggtagagcagatcctggcagagttccagctgcaggaggaggacctgaagaaggtgatgagacggatgcagaaggagatggaccgcrgcctgaggctggagacccatgaagaggccagtgtgaagatgctgcccacctacgtgcgctccaccccagaaggctcagaagtcggggacttcctctccct

SEQ ID NO: 24882 - DNA, 201 bp, Homo sapiens
ccatcagtgcgaggtcggcatgatcgtgggcacgggctgcaatgcctgctacatggaggagatgcagaatgtggagctggtggagggggacgagggccgcrtgtgcgtcaataccgagtggggcgccttcggggactccggcgagctggacgagttcctgctggagtatgaccgcctggtggacgagagctctgcaaaccc

SEQ ID NO: 24883 - DNA, 201 bp, Homo sapiens
tgcctgctacatggaggagatgcagaatgtggagctggtggagggggacgagggccgcatgtgcgtcaataccgagtggggcgccttcggggactccggckagctggacgagttcctgctggagtatgaccgcctggtggacgagagctctgcaaaccccggtcagcagctgtatgagaagctcataggtggcaagtacat

SEQ ID NO: 24884 - DNA, 201 bp, Homo sapiens
catgatcgtgggcacgggctgcaatgcctgctacatggaggagatgcagaatgtggagctggtggagggggacgagggccgcatgtgcgtcaataccgagyggggcgccttcggggactccggcgagctggacgagttcctgctggagtatgaccgcctggtggacgagagctctgcaaaccccggtcagcagctgtatga

SEQ ID NO: 24885 - DNA, 169 bp, Homo sapiens
gggccagccctacatcttcagctcccatagcgctggctcaggaagaaaccccaagcagcattcagcacaccccaagggacaaccccatcatatgacatgcyaccctctccatgcccaacctaagattgtgtgggttttttaattaaaaatgttaaaagttttaaacatg

SEQ ID NO: 24886 - DNA, 201 bp, Homo sapiens
cggcatgatcgtgggcacgggctgcaatgcctgctacatggaggagatgcagaatgtggagctggtggagggggacgagggccgcatgtgcgtcaataccragtggggcgccttcggggactccggcgagctggacgagttcctgctggagtatgaccgcctggtggacgagagctctgcaaaccccggtcagcagctgta

SEQ ID NO: 24887 - DNA, 201 bp, Homo sapiens
ctacgaagaccatcagtgcgaggtcggcatgatcgtgggcacgggctgcaatgcctgctacatggaggagatgcagaatgtggagctggtggagggggackagggccgcatgtgcgtcaataccgagtggggcgccttcggggactccggcgagctggacgagttcctgctggagtatgaccgcctggtggacgagagctc

SEQ ID NO: 24888 - DNA, 201 bp, Homo sapiens
ctgcaatgcctgctacatggaggagatgcagaatgtggagctggtggagggggacgagggccgcatgtgcgtcaataccgagtggggcgccttcggggacyccggcgagctggacgagttcctgctggagtatgaccgcctggtggacgagagctctgcaaaccccggtcagcagctgtatgagaagctcataggtggcaa

SEQ ID NO: 24889 - DNA, 201 bp, Homo sapiens
cagtgcgaggtcggcatgatcgtgggcacgggctgcaatgcctgctacatggaggagatgcagaatgtggagctggtggagggggacgagggccgcatgtrcgtcaataccgagtggggcgccttcggggactccggcgagctggacgagttcctgctggagtatgaccgcctggtggacgagagctctgcaaaccccggt

SEQ ID NO: 24890 - DNA, 201 bp, Homo sapiens
cctgctggagtatgaccgcctggtggacgagagctctgcaaaccccggtcagcagctgtatgagaagctcataggtggcaagtacatgggcgagctggtgyggcttgtgctgctcaggctcgtggacgaaaacctgctcttccacggggaggcctccgagcagctgcgcacacgcggagccttcgagacgcgcttcgtgtc

SEQ ID NO: 24891 - DNA, 201 bp, Homo sapiens
tacaacatcctgagcacgctggggctgcgaccctcgaccaccgactgcgacatcgtgcgccgcgcctgcgagagcgtgtctacgcgcgctgcgcacatgtrctcggcggggctggcgggcgtcatcaaccgcatgcgcgagagccgcagcgaggacgtaatgcgcatcactgtgggcgtggatggctccgtgtacaagctg

SEQ ID NO: 24892 - DNA, 201 bp, Homo sapiens
tcgcaggtggagagcgacacgggcgaccgcaagcagatctacaacatcctgagcacgctggggctgcgaccctcgaccaccgactgcgacatcgtgcgccscgcctgcgagagcgtgtctacgcgcgctgcgcacatgtgctcggcggggctggcgggcgtcatcaaccgcatgcgcgagagccgcagcgaggacgtaatg

SEQ ID NO: 24893 - DNA, 201 bp, Homo sapiens
accctcgaccaccgactgcgacatcgtgcgccgcgcctgcgagagcgtgtctacgcgcgctgcgcacatgtgctcggcggggctggcgggcgtcatcaacygcatgcgcgagagccgcagcgaggacgtaatgcgcatcactgtgggcgtggatggctccgtgtacaagctgcaccccagcttcaaggagcggttccatgc

SEQ ID NO: 24894 - DNA, 201 bp, Homo sapiens
tttgaaatggatgtggtggcaatggtgaatgacacggtggccacgatgatctcctgctactacgaagaccatcagtgcgaggtcggcatgatcgtgggcaygggctgcaatgcctgctacatggaggagatgcagaatgtggagctggtggagggggacgagggccgcatgtgcgtcaataccgagtggggcgccttcggg

SEQ ID NO: 24895 - DNA, 201 bp, Homo sapiens
cggcttgtgctgctcaggctcgtggacgaaaacctgctcttccacggggaggcctccgagcagctgcgcacacgcggagccttcgagacgcgcttcgtgtygcaggtggagagcgacacgggcgaccgcaagcagatctacaacatcctgagcacgctggggctgcgaccctcgaccaccgactgcgacatcgtgcgccgc

SEQ ID NO: 24896 - DNA, 201 bp, Homo sapiens
cgcggagccttcgagacgcgcttcgtgtcgcaggtggagagcgacacgggcgaccgcaagcagatctacaacatcctgagcacgctggggctgcgaccctmgaccaccgactgcgacatcgtgcgccgcgcctgcgagagcgtgtctacgcgcgctgcgcacatgtgctcggcggggctggcgggcgtcatcaaccgcatg

SEQ ID NO: 24897 - DNA, 201 bp, Homo sapiens
acgggctgcaatgcctgctacatggaggagatgcagaatgtggagctggtggagggggacgagggccgcatgtgcgtcaataccgagtggggcgccttcgrggactccggcgagctggacgagttcctgctggagtatgaccgcctggtggacgagagctctgcaaaccccggtcagcagctgtatgagaagctcataggt

SEQ ID NO: 24898 - DNA, 201 bp, Homo sapiens
cttcgtgtcgcaggtggagagcgacacgggcgaccgcaagcagatctacaacatcctgagcacgctggggctgcgaccctcgaccaccgactgcgacatcrtgcgccgcgcctgcgagagcgtgtctacgcgcgctgcgcacatgtgctcggcggggctggcgggcgtcatcaaccgcatgcgcgagagccgcagcgagga

SEQ ID NO: 24899 - DNA, 201 bp, Homo sapiens
catgtgctcggcggggctggcgggcgtcatcaaccgcatgcgcgagagccgcagcgaggacgtaatgcgcatcactgtgggcgtggatggctccgtgtacragctgcaccccagcttcaaggagcggttccatgccagcgtgcgcaggctgacgcccagctgcgagatcaccttcatcgagtcggaggagggcagtggccg

SEQ ID NO: 24900 - DNA, 201 bp, Homo sapiens
gtgctcggcggggctggcgggcgtcatcaaccgcatgcgcgagagccgcagcgaggacgtaatgcgcatcactgtgggcgtggatggctccgtgtacaagstgcaccccagcttcaaggagcggttccatgccagcgtgcgcaggctgacgcccagctgcgagatcaccttcatcgagtcggaggagggcagtggccgggg

SEQ ID NO: 24901 - DNA, 201 bp, Homo sapiens
agagcagatcctggcagagttccagctgcaggaggaggacctgaagaaggtgatgagacggatgcagaaggagatggaccgcggcctgaggctggagaccyatgaagaggccagtgtgaagatgctgcccacctacgtgcgctccaccccagaaggctcagaagtcggggacttcctctccctggacctgggtggcactaa

SEQ ID NO: 24902 - DNA, 201 bp, Homo sapiens
gagcagatcctggcagagttccagctgcaggaggaggacctgaagaaggtgatgagacggatgcagaaggagatggaccgcggcctgaggctggagacccrtgaagaggccagtgtgaagatgctgcccacctacgtgcgctccaccccagaaggctcagaagtcggggacttcctctccctggacctgggtggcactaac

SEQ ID NO: 24903 - DNA, 201 bp, Homo sapiens
gaagtcggggacttcctctccctggacctgggtggcactaacttcagggtgatgctggtgaaggtgggagaaggtgaggaggggcagtggagcgtgaagamcaaacaccagatgtactccatccccgaggacgccatgaccggcactgctgagatgctcttcgactacatctctgagtgcatctccgacttcctggacaag

SEQ ID NO: 24904 - DNA, 201 bp, Homo sapiens
caccagatgtactccatccccgaggacgccatgaccggcactgctgagatgctcttcgactacatctctgagtgcatctccgacttcctggacaagcatcmgatgaaacacaagaagctgcccctgggcttcaccttctcctttcctgtgaggcacgaagacatcgataagggcatccttctcaactggaccaagggcttc

SEQ ID NO: 24905 - DNA, 201 bp, Homo sapiens
aagaagctgcccctgggcttcaccttctcctttcctgtgaggcacgaagacatcgataagggcatccttctcaactggaccaagggcttcaaggcctcagragcagaagggaacaatgtcgtggggcttctgcgagacgctatcaaacggagaggggactttgaaatggatgtggtggcaatggtgaatgacacggtggcc

SEQ ID NO: 24906 - DNA, 201 bp, Homo sapiens
ctgagcacgctggggctgcgaccctcgaccaccgactgcgacatcgtgcgccgcgcctgcgagagcgtgtctacgcgcgctgcgcacatgtgctcggcggkgctggcgggcgtcatcaaccgcatgcgcgagagccgcagcgaggacgtaatgcgcatcactgtgggcgtggatggctccgtgtacaagctgcaccccagc

SEQ ID NO: 24907 - DNA, 201 bp, Homo sapiens
gcagaagggaacaatgtcgtggggcttctgcgagacgctatcaaacggagaggggactttgaaatggatgtggtggcaatggtgaatgacacggtggccaygatgatctcctgctactacgaagaccatcagtgcgaggtcggcatgatcgtgggcacgggctgcaatgcctgctacatggaggagatgcagaatgtggag

SEQ ID NO: 24908 - DNA, 201 bp, Homo sapiens
gaagctgcccctgggcttcaccttctcctttcctgtgaggcacgaagacatcgataagggcatccttctcaactggaccaagggcttcaaggcctcaggakcagaagggaacaatgtcgtggggcttctgcgagacgctatcaaacggagaggggactttgaaatggatgtggtggcaatggtgaatgacacggtggccac

SEQ ID NO: 24909 - DNA, 201 bp, Homo sapiens
cgtgggcacgggctgcaatgcctgctacatggaggagatgcagaatgtggagctggtggagggggacgagggccgcatgtgcgtcaataccgagtggggcrccttcggggactccggcgagctggacgagttcctgctggagtatgaccgcctggtggacgagagctctgcaaaccccggtcagcagctgtatgagaagct

SEQ ID NO: 24910 - DNA, 201 bp, Homo sapiens
gcccctgggcttcaccttctcctttcctgtgaggcacgaagacatcgataagggcatccttctcaactggaccaagggcttcaaggcctcaggagcagaasggaacaatgtcgtggggcttctgcgagacgctatcaaacggagaggggactttgaaatggatgtggtggcaatggtgaatgacacggtggccacgatgat

SEQ ID NO: 24911 - DNA, 201 bp, Homo sapiens
gatgcagaaggagatggaccgcggcctgaggctggagacccatgaagaggccagtgtgaagatgctgcccacctacgtgcgctccaccccagaaggctcaraagtcggggacttcctctccctggacctgggtggcactaacttcagggtgatgctggtgaaggtgggagaaggtgaggaggggcagtggagcgtgaagac

SEQ ID NO: 24912 - DNA, 201 bp, Homo sapiens
caatgtcgtggggcttctgcgagacgctatcaaacggagaggggactttgaaatggatgtggtggcaatggtgaatgacacggtggccacgatgatctccygctactacgaagaccatcagtgcgaggtcggcatgatcgtgggcacgggctgcaatgcctgctacatggaggagatgcagaatgtggagctggtggaggg

SEQ ID NO: 24913 - DNA, 201 bp, Homo sapiens
gaagggaacaatgtcgtggggcttctgcgagacgctatcaaacggagaggggactttgaaatggatgtggtggcaatggtgaatgacacggtggccacgahgatctcctgctactacgaagaccatcagtgcgaggtcggcatgatcgtgggcacgggctgcaatgcctgctacatggaggagatgcagaatgtggagctg

SEQ ID NO: 24914 - DNA, 201 bp, Homo sapiens
gcgcacacgcggagccttcgagacgcgcttcgtgtcgcaggtggagagcgacacgggcgaccgcaagcagatctacaacatcctgagcacgctggggctgygaccctcgaccaccgactgcgacatcgtgcgccgcgcctgcgagagcgtgtctacgcgcgctgcgcacatgtgctcggcggggctggcgggcgtcatcaa

SEQ ID NO: 24915 - DNA, 201 bp, Homo sapiens
gagccaggcccagacagccttgactctggtagagcagatcctggcagagttccagctgcaggaggaggacctgaagaaggtgatgagacggatgcagaagragatggaccgcggcctgaggctggagacccatgaagaggccagtgtgaagatgctgcccacctacgtgcgctccaccccagaaggctcagaagtcgggga

SEQ ID NO: 24916 - DNA, 201 bp, Homo sapiens
cacgggctgcaatgcctgctacatggaggagatgcagaatgtggagctggtggagggggacgagggccgcatgtgcgtcaataccgagtggggcgccttcrgggactccggcgagctggacgagttcctgctggagtatgaccgcctggtggacgagagctctgcaaaccccggtcagcagctgtatgagaagctcatagg

SEQ ID NO: 24917 - DNA, 201 bp, Homo sapiens
gctgcgcacatgtgctcggcggggctggcgggcgtcatcaaccgcatgcgcgagagccgcagcgaggacgtaatgcgcatcactgtgggcgtggatggctycgtgtacaagctgcaccccagcttcaaggagcggttccatgccagcgtgcgcaggctgacgcccagctgcgagatcaccttcatcgagtcggaggagggc

SEQ ID NO: 24918 - DNA, 201 bp, Homo sapiens
caagaagctgcccctgggcttcaccttctcctttcctgtgaggcacgaagacatcgataagggcatccttctcaactggaccaagggcttcaaggcctcargagcagaagggaacaatgtcgtggggcttctgcgagacgctatcaaacggagaggggactttgaaatggatgtggtggcaatggtgaatgacacggtggc

SEQ ID NO: 24919 - DNA, 201 bp, Homo sapiens
atcagtgcgaggtcggcatgatcgtgggcacgggctgcaatgcctgctacatggaggagatgcagaatgtggagctggtggagggggacgagggccgcatrtgcgtcaataccgagtggggcgccttcggggactccggcgagctggacgagttcctgctggagtatgaccgcctggtggacgagagctctgcaaaccccg

SEQ ID NO: 24920 - DNA, 201 bp, Homo sapiens
caatgcctgctacatggaggagatgcagaatgtggagctggtggagggggacgagggccgcatgtgcgtcaataccgagtggggcgccttcggggactccrgcgagctggacgagttcctgctggagtatgaccgcctggtggacgagagctctgcaaaccccggtcagcagctgtatgagaagctcataggtggcaagta

SEQ ID NO: 24921 - DNA, 201 bp, Homo sapiens
ctggagtatgaccgcctggtggacgagagctctgcaaaccccggtcagcagctgtatgagaagctcataggtggcaagtacatgggcgagctggtgcggcytgtgctgctcaggctcgtggacgaaaacctgctcttccacggggaggcctccgagcagctgcgcacacgcggagccttcgagacgcgcttcgtgtcgcag

SEQ ID NO: 24922 - DNA, 201 bp, Homo sapiens
aacatcctgagcacgctggggctgcgaccctcgaccaccgactgcgacatcgtgcgccgcgcctgcgagagcgtgtctacgcgcgctgcgcacatgtgctyggcggggctggcgggcgtcatcaaccgcatgcgcgagagccgcagcgaggacgtaatgcgcatcactgtgggcgtggatggctccgtgtacaagctgcac

SEQ ID NO: 24923 - DNA, 201 bp, Homo sapiens
gtggatggctccgtgtacaagctgcaccccagcttcaaggagcggttccatgccagcgtgcgcaggctgacgcccagctgcgagatcaccttcatcgagtsggaggagggcagtggccggggcgcggccctggtctcggcggtggcctgtaagaaggcctgtatgctgggccagtgagagcagtggccgcaagcgcaggga

SEQ ID NO: 24924 - DNA, 201 bp, Homo sapiens
gagatggaccgcggcctgaggctggagacccatgaagaggccagtgtgaagatgctgcccacctacgtgcgctccaccccagaaggctcagaagtcggggrcttcctctccctggacctgggtggcactaacttcagggtgatgctggtgaaggtgggagaaggtgaggaggggcagtggagcgtgaagaccaaacaccag

SEQ ID NO: 24925 - DNA, 201 bp, Homo sapiens
gtgatgctggtgaaggtgggagaaggtgaggaggggcagtggagcgtgaagaccaaacaccagatgtactccatccccgaggacgccatgaccggcactgmtgagatgctcttcgactacatctctgagtgcatctccgacttcctggacaagcatcagatgaaacacaagaagctgcccctgggcttcaccttctccttt

SEQ ID NO: 24926 - DNA, 201 bp, Homo sapiens
ggtgaaggtgggagaaggtgaggaggggcagtggagcgtgaagaccaaacaccagatgtactccatccccgaggacgccatgaccggcactgctgagatgstcttcgactacatctctgagtgcatctccgacttcctggacaagcatcagatgaaacacaagaagctgcccctgggcttcaccttctcctttcctgtgag

SEQ ID NO: 24927 - DNA, 201 bp, Homo sapiens
cgactacatctctgagtgcatctccgacttcctggacaagcatcagatgaaacacaagaagctgcccctgggcttcaccttctcctttcctgtgaggcacraagacatcgataagggcatccttctcaactggaccaagggcttcaaggcctcaggagcagaagggaacaatgtcgtggggcttctgcgagacgctatcaa

SEQ ID NO: 24928 - DNA, 201 bp, Homo sapiens
tacatctctgagtgcatctccgacttcctggacaagcatcagatgaaacacaagaagctgcccctgggcttcaccttctcctttcctgtgaggcacgaagmcatcgataagggcatccttctcaactggaccaagggcttcaaggcctcaggagcagaagggaacaatgtcgtggggcttctgcgagacgctatcaaacgg

SEQ ID NO: 24929 - DNA, 201 bp, Homo sapiens
tccgacttcctggacaagcatcagatgaaacacaagaagctgcccctgggcttcaccttctcctttcctgtgaggcacgaagacatcgataagggcatccytctcaactggaccaagggcttcaaggcctcaggagcagaagggaacaatgtcgtggggcttctgcgagacgctatcaaacggagaggggactttgaaatg

SEQ ID NO: 24930 - DNA, 201 bp, Homo sapiens
ggacaagcatcagatgaaacacaagaagctgcccctgggcttcaccttctcctttcctgtgaggcacgaagacatcgataagggcatccttctcaactggmccaagggcttcaaggcctcaggagcagaagggaacaatgtcgtggggcttctgcgagacgctatcaaacggagaggggactttgaaatggatgtggtggc

SEQ ID NO: 24931 - DNA, 201 bp, Homo sapiens
gaggcacgaagacatcgataagggcatccttctcaactggaccaagggcttcaaggcctcaggagcagaagggaacaatgtcgtggggcttctgcgagacrctatcaaacggagaggggactttgaaatggatgtggtggcaatggtgaatgacacggtggccacgatgatctcctgctactacgaagaccatcagtgcga

SEQ ID NO: 24932 - DNA, 201 bp, Homo sapiens
gacatcgataagggcatccttctcaactggaccaagggcttcaaggcctcaggagcagaagggaacaatgtcgtggggcttctgcgagacgctatcaaacrgagaggggactttgaaatggatgtggtggcaatggtgaatgacacggtggccacgatgatctcctgctactacgaagaccatcagtgcgaggtcggcatg

SEQ ID NO: 24933 - DNA, 201 bp, Homo sapiens
agacatcgataagggcatccttctcaactggaccaagggcttcaaggcctcaggagcagaagggaacaatgtcgtggggcttctgcgagacgctatcaaayggagaggggactttgaaatggatgtggtggcaatggtgaatgacacggtggccacgatgatctcctgctactacgaagaccatcagtgcgaggtcggcat

SEQ ID NO: 24934 - DNA, 201 bp, Homo sapiens
ctggtggacgagagctctgcaaaccccggtcagcagctgtatgagaagctcataggtggcaagtacatgggcgagctggtgcggcttgtgctgctcaggcycgtggacgaaaacctgctcttccacggggaggcctccgagcagctgcgcacacgcggagccttcgagacgcgcttcgtgtcgcaggtggagagcgacacg

SEQ ID NO: 24935 - DNA, 201 bp, Homo sapiens
caccccagaaggctcagaagtcggggacttcctctccctggacctgggtggcactaacttcagggtgatgctggtgaaggtgggagaaggtgaggaggggyagtggagcgtgaagaccaaacaccagatgtactccatccccgaggacgccatgaccggcactgctgagatgctcttcgactacatctctgagtgcatctc

SEQ ID NO: 24936 - DNA, 201 bp, Homo sapiens
cctggcagagttccagctgcaggaggaggacctgaagaaggtgatgagacggatgcagaaggagatggaccgcggcctgaggctggagacccatgaagagkccagtgtgaagatgctgcccacctacgtgcgctccaccccagaaggctcagaagtcggggacttcctctccctggacctgggtggcactaacttcagggt

SEQ ID NO: 24937 - DNA, 201 bp, Homo sapiens
ggatgtcacaaggagccaggcccagacagccttgactctggtagagcagatcctggcagagttccagctgcaggaggaggacctgaagaaggtgatgagayggatgcagaaggagatggaccgcggcctgaggctggagacccatgaagaggccagtgtgaagatgctgcccacctacgtgcgctccaccccagaaggctc

SEQ ID NO: 24938 - DNA, 201 bp, Homo sapiens
aaacaccagatgtactccatccccgaggacgccatgaccggcactgctgagatgctcttcgactacatctctgagtgcatctccgacttcctggacaagcrtcagatgaaacacaagaagctgcccctgggcttcaccttctcctttcctgtgaggcacgaagacatcgataagggcatccttctcaactggaccaagggc

SEQ ID NO: 24939 - DNA, 201 bp, Homo sapiens
tggcctcacttccctgggaactcatcctgtgtggggaggcagctccaacagcttgaccagacctagacctgggccaaaagggcagccaggggctgctcatyacccagtcctggccattttcttgcctgaggctcaagaggcccagggagcaatgggagggggctccatggaggaggtgtcccaagctttgaatacccccag

SEQ ID NO: 24940 - DNA, 201 bp, Homo sapiens
cgataagggcatccttctcaactggaccaagggcttcaaggcctcaggagcagaagggaacaatgtcgtggggcttctgcgagacgctatcaaacggagargggactttgaaatggatgtggtggcaatggtgaatgacacggtggccacgatgatctcctgctactacgaagaccatcagtgcgaggtcggcatgatcgt

SEQ ID NO: 24941 - DNA, 201 bp, Homo sapiens
acctgggtggcactaacttcagggtgatgctggtgaaggtgggagaaggtgaggaggggcagtggagcgtgaagaccaaacaccagatgtactccatcccygaggacgccatgaccggcactgctgagatgctcttcgactacatctctgagtgcatctccgacttcctggacaagcatcagatgaaacacaagaagctgc

SEQ ID NO: 24942 - DNA, 201 bp, Homo sapiens
tggggcttctgcgagacgctatcaaacggagaggggactttgaaatggatgtggtggcaatggtgaatgacacggtggccacgatgatctcctgctactasgaagaccatcagtgcgaggtcggcatgatcgtgggcacgggctgcaatgcctgctacatggaggagatgcagaatgtggagctggtggagggggacgagg

SEQ ID NO: 24943 - DNA, 201 bp, Homo sapiens
acgctatcaaacggagaggggactttgaaatggatgtggtggcaatggtgaatgacacggtggccacgatgatctcctgctactacgaagaccatcagtgmgaggtcggcatgatcgtgggcacgggctgcaatgcctgctacatggaggagatgcagaatgtggagctggtggagggggacgagggccgcatgtgcgtca

SEQ ID NO: 24944 - DNA, 201 bp, Homo sapiens
cgctatcaaacggagaggggactttgaaatggatgtggtggcaatggtgaatgacacggtggccacgatgatctcctgctactacgaagaccatcagtgcraggtcggcatgatcgtgggcacgggctgcaatgcctgctacatggaggagatgcagaatgtggagctggtggagggggacgagggccgcatgtgcgtcaa

SEQ ID NO: 24945 - DNA, 201 bp, Homo sapiens
caaacggagaggggactttgaaatggatgtggtggcaatggtgaatgacacggtggccacgatgatctcctgctactacgaagaccatcagtgcgaggtcrgcatgatcgtgggcacgggctgcaatgcctgctacatggaggagatgcagaatgtggagctggtggagggggacgagggccgcatgtgcgtcaataccga

SEQ ID NO: 24946 - DNA, 201 bp, Homo sapiens
cggagaggggactttgaaatggatgtggtggcaatggtgaatgacacggtggccacgatgatctcctgctactacgaagaccatcagtgcgaggtcggcaygatcgtgggcacgggctgcaatgcctgctacatggaggagatgcagaatgtggagctggtggagggggacgagggccgcatgtgcgtcaataccgagtgg

SEQ ID NO: 24947 - DNA, 201 bp, Homo sapiens
gaggggactttgaaatggatgtggtggcaatggtgaatgacacggtggccacgatgatctcctgctactacgaagaccatcagtgcgaggtcggcatgatsgtgggcacgggctgcaatgcctgctacatggaggagatgcagaatgtggagctggtggagggggacgagggccgcatgtgcgtcaataccgagtggggcg

SEQ ID NO: 24948 - DNA, 201 bp, Homo sapiens
acagccttgactctggtagagcagatcctggcagagttccagctgcaggaggaggacctgaagaaggtgatgagacggatgcagaaggagatggaccgcgrcctgaggctggagacccatgaagaggccagtgtgaagatgctgcccacctacgtgcgctccaccccagaaggctcagaagtcggggacttcctctccctg

SEQ ID NO: 24949 - DNA, 201 bp, Homo sapiens
gagaggggactttgaaatggatgtggtggcaatggtgaatgacacggtggccacgatgatctcctgctactacgaagaccatcagtgcgaggtcggcatgwtcgtgggcacgggctgcaatgcctgctacatggaggagatgcagaatgtggagctggtggagggggacgagggccgcatgtgcgtcaataccgagtgggg

SEQ ID NO: 24950 - DNA, 201 bp, Homo sapiens
tcagtgcgaggtcggcatgatcgtgggcacgggctgcaatgcctgctacatggaggagatgcagaatgtggagctggtggagggggacgagggccgcatgygcgtcaataccgagtggggcgccttcggggactccggcgagctggacgagttcctgctggagtatgaccgcctggtggacgagagctctgcaaaccccgg

SEQ ID NO: 24951 - DNA, 201 bp, Homo sapiens
aggggactttgaaatggatgtggtggcaatggtgaatgacacggtggccacgatgatctcctgctactacgaagaccatcagtgcgaggtcggcatgatcrtgggcacgggctgcaatgcctgctacatggaggagatgcagaatgtggagctggtggagggggacgagggccgcatgtgcgtcaataccgagtggggcgc

SEQ ID NO: 24952 - DNA, 201 bp, Homo sapiens
catggaggagatgcagaatgtggagctggtggagggggacgagggccgcatgtgcgtcaataccgagtggggcgccttcggggactccggcgagctggackagttcctgctggagtatgaccgcctggtggacgagagctctgcaaaccccggtcagcagctgtatgagaagctcataggtggcaagtacatgggcgagct

SEQ ID NO: 24953 - DNA, 201 bp, Homo sapiens
ggactttgaaatggatgtggtggcaatggtgaatgacacggtggccacgatgatctcctgctactacgaagaccatcagtgcgaggtcggcatgatcgtgkgcacgggctgcaatgcctgctacatggaggagatgcagaatgtggagctggtggagggggacgagggccgcatgtgcgtcaataccgagtggggcgcctt

SEQ ID NO: 24954 - DNA, 201 bp, Homo sapiens
cggtcagcagctgtatgagaagctcataggtggcaagtacatgggcgagctggtgcggcttgtgctgctcaggctcgtggacgaaaacctgctcttccacrgggaggcctccgagcagctgcgcacacgcggagccttcgagacgcgcttcgtgtcgcaggtggagagcgacacgggcgaccgcaagcagatctacaacat

SEQ ID NO: 24955 - DNA, 201 bp, Homo sapiens; identical to SEQ ID NO: 24875

SEQ ID NO: 24956 - DNA, 201 bp, Homo sapiens; identical to SEQ ID NO: 24876

SEQ ID NO: 24957 - DNA, 201 bp, Homo sapiens
agagccaggatggaggccgccaagaaggagaaggtagagcagatcctggcagagttccagctgcaggaggaggacctgaagaaggtgatgagacggatgcmgaaggagatggaccgcggcctgaggctggagacccatgaagaggccagtgtgaagatgctgcccacctacgtgcgctccaccccagaaggctcagaagtc

SEQ ID NO: 24958 - DNA, 201 bp, Homo sapiens; identical to SEQ ID NO: 24878

SEQ ID NO: 24959 - DNA, 201 bp, Homo sapiens; identical to SEQ ID NO: 24879

SEQ ID NO: 24960 - DNA, 201 bp, Homo sapiens
gccgccaagaaggagaaggtagagcagatcctggcagagttccagctgcaggaggaggacctgaagaaggtgatgagacggatgcagaaggagatggaccrcggcctgaggctggagacccatgaagaggccagtgtgaagatgctgcccacctacgtgcgctccaccccagaaggctcagaagtcggggacttcctctcc

SEQ ID NO: 24961 - DNA, 201 bp, Homo sapiens
cgccaagaaggagaaggtagagcagatcctggcagagttccagctgcaggaggaggacctgaagaaggtgatgagacggatgcagaaggagatggaccgcrgcctgaggctggagacccatgaagaggccagtgtgaagatgctgcccacctacgtgcgctccaccccagaaggctcagaagtcggggacttcctctccct

SEQ ID NO: 24962 - DNA, 201 bp, Homo sapiens; identical to SEQ ID NO: 24882

SEQ ID NO: 24963 - DNA, 201 bp, Homo sapiens; identical to SEQ ID NO: 24883

SEQ ID NO: 24964 - DNA, 201 bp, Homo sapiens; identical to SEQ ID NO: 24884

SEQ ID NO: 24965 - DNA, 169 bp, Homo sapiens; identical to SEQ ID NO: 24885

SEQ ID NO: 24966 - DNA, 201 bp, Homo sapiens; identical to SEQ ID NO: 24886

SEQ ID NO: 24967 - DNA, 201 bp, Homo sapiens; identical to SEQ ID NO: 24887

SEQ ID NO: 24968 - DNA, 201 bp, Homo sapiens; identical to SEQ ID NO: 24888

SEQ ID NO: 24969 - DNA, 201 bp, Homo sapiens; identical to SEQ ID NO: 24889

SEQ ID NO: 24970 - DNA, 201 bp, Homo sapiens; identical to SEQ ID NO: 24890

SEQ ID NO: 24971 - DNA, 201 bp, Homo sapiens; identical to SEQ ID NO: 24891

SEQ ID NO: 24972 - DNA, 201 bp, Homo sapiens; identical to SEQ ID NO: 24892

SEQ ID NO: 24973 - DNA, 201 bp, Homo sapiens; identical to SEQ ID NO: 24893

SEQ ID NO: 24974 - DNA, 201 bp, Homo sapiens; identical to SEQ ID NO: 24894

SEQ ID NO: 24975 - DNA, 201 bp, Homo sapiens; identical to SEQ ID NO: 24895

SEQ ID NO: 24976 - DNA, 201 bp, Homo sapiens; identical to SEQ ID NO: 24896

SEQ ID NO: 24977 - DNA, 201 bp, Homo sapiens; identical to SEQ ID NO: 24897

SEQ ID NO: 24978 - DNA, 201 bp, Homo sapiens; identical to SEQ ID NO: 24898

SEQ ID NO: 24979 - DNA, 201 bp, Homo sapiens; identical to SEQ ID NO: 24899

SEQ ID NO: 24980 - DNA, 201 bp, Homo sapiens
caatgaaaaggaggaaactgtgactgaacctcaaaccccaaaccagcccgaggagaaccacattctcccagggacccagggcgggccgtgacccctgcggsggagaagccttggatatttccacttcagaagcctactggggaaggctgaggggtcccagctccccacgctggctgctgtgcagatgctggacgacagagc

SEQ ID NO: 24981 - DNA, 201 bp, Homo sapiens; identical to SEQ ID NO: 24900

SEQ ID NO: 24982 - DNA, 201 bp, Homo sapiens; identical to SEQ ID NO: 24901

SEQ ID NO: 24983 - DNA, 201 bp, Homo sapiens; identical to SEQ ID NO: 24902

SEQ ID NO: 24984 - DNA, 201 bp, Homo sapiens; identical to SEQ ID NO: 24903

SEQ ID NO: 24985 - DNA, 201 bp, Homo sapiens; identical to SEQ ID NO: 24904

SEQ ID NO: 24986 - DNA, 201 bp, Homo sapiens; identical to SEQ ID NO: 24905

SEQ ID NO: 24987 - DNA, 201 bp, Homo sapiens; identical to SEQ ID NO: 24906

SEQ ID NO: 24988 - DNA, 201 bp, Homo sapiens; identical to SEQ ID NO: 24907

SEQ ID NO: 24989 - DNA, 201 bp, Homo sapiens; identical to SEQ ID NO: 24908

SEQ ID NO: 24990 - DNA, 201 bp, Homo sapiens; identical to SEQ ID NO: 24909

SEQ ID NO: 24991 - DNA, 201 bp, Homo sapiens; identical to SEQ ID NO: 24910

SEQ ID NO: 24992 - DNA, 201 bp, Homo sapiens; identical to SEQ ID NO: 24911

SEQ ID NO: 24993 - DNA, 201 bp, Homo sapiens; identical to SEQ ID NO: 24912

SEQ ID NO: 24994 - DNA, 201 bp, Homo sapiens; identical to SEQ ID NO: 24913

SEQ ID NO: 24995 - DNA, 201 bp, Homo sapiens; identical to SEQ ID NO: 24914

SEQ ID NO: 24996 - DNA, 201 bp, Homo sapiens
caggatggaggccgccaagaaggagaaggtagagcagatcctggcagagttccagctgcaggaggaggacctgaagaaggtgatgagacggatgcagaagragatggaccgcggcctgaggctggagacccatgaagaggccagtgtgaagatgctgcccacctacgtgcgctccaccccagaaggctcagaagtcgggga

SEQ ID NO: 24997 - DNA, 201 bp, Homo sapiens; identical to SEQ ID NO: 24916

SEQ ID NO: 24998 - DNA, 201 bp, Homo sapiens; identical to SEQ ID NO: 24917

SEQ ID NO: 24999 - DNA, 201 bp, Homo sapiens; identical to SEQ ID NO: 24918

SEQ ID NO: 25000 - DNA, 201 bp, Homo sapiens; identical to SEQ ID NO: 24919

SEQ ID NO: 25001 - DNA, 201 bp, Homo sapiens; identical to SEQ ID NO: 24920

SEQ ID NO: 25002 - DNA, 201 bp, Homo sapiens; identical to SEQ ID NO: 24921

SEQ ID NO: 25003 - DNA, 201 bp, Homo sapiens; identical to SEQ ID NO: 24922

SEQ ID NO: 25004 - DNA, 201 bp, Homo sapiens; identical to SEQ ID NO: 24923

SEQ ID NO: 25005 - DNA, 201 bp, Homo sapiens; identical to SEQ ID NO: 24924

SEQ ID NO: 25006 - DNA, 201 bp, Homo sapiens; identical to SEQ ID NO: 24925

SEQ ID NO: 25007 - DNA, 201 bp, Homo sapiens; identical to SEQ ID NO: 24926

SEQ ID NO: 25008 - DNA, 201 bp, Homo sapiens; identical to SEQ ID NO: 24927

SEQ ID NO: 25009 - DNA, 201 bp, Homo sapiens; identical to SEQ ID NO: 24928

SEQ ID NO: 25010 - DNA, 201 bp, Homo sapiens; identical to SEQ ID NO: 24929

SEQ ID NO: 25011 - DNA, 201 bp, Homo sapiens; identical to SEQ ID NO: 24930

SEQ ID NO: 25012 - DNA, 201 bp, Homo sapiens; identical to SEQ ID NO: 24931

SEQ ID NO: 25013 - DNA, 201 bp, Homo sapiens; identical to SEQ ID NO: 24932

SEQ ID NO: 25014 - DNA, 201 bp, Homo sapiens; identical to SEQ ID NO: 24933

SEQ ID NO: 25015 - DNA, 201 bp, Homo sapiens; identical to SEQ ID NO: 24934

SEQ ID NO: 25016 - DNA, 201 bp, Homo sapiens; identical to SEQ ID NO: 24935

SEQ ID NO: 25017 - DNA, 201 bp, Homo sapiens; identical to SEQ ID NO: 24936

SEQ ID NO: 25018 - DNA, 201 bp, Homo sapiens
ggacgacagagccaggatggaggccgccaagaaggagaaggtagagcagatcctggcagagttccagctgcaggaggaggacctgaagaaggtgatgagayggatgcagaaggagatggaccgcggcctgaggctggagacccatgaagaggccagtgtgaagatgctgcccacctacgtgcgctccaccccagaaggctc

SEQ ID NO: 25019 - DNA, 201 bp, Homo sapiens; identical to SEQ ID NO: 24938

SEQ ID NO: 25020 - DNA, 201 bp, Homo sapiens; identical to SEQ ID NO: 24939

SEQ ID NO: 25021 - DNA, 201 bp, Homo sapiens; identical to SEQ ID NO: 24940

SEQ ID NO: 25022 - DNA, 201 bp, Homo sapiens; identical to SEQ ID NO: 24941

SEQ ID NO: 25023 - DNA, 201 bp, Homo sapiens; identical to SEQ ID NO: 24942

SEQ ID NO: 25024 - DNA, 201 bp, Homo sapiens; identical to SEQ ID NO: 24943

SEQ ID NO: 25025 - DNA, 201 bp, Homo sapiens; identical to SEQ ID NO: 24944

SEQ ID NO: 25026 - DNA, 201 bp, Homo sapiens; identical to SEQ ID NO: 24945

SEQ ID NO: 25027 - DNA, 201 bp, Homo sapiens; identical to SEQ ID NO: 24946

SEQ ID NO: 25028 - DNA, 201 bp, Homo sapiens; identical to SEQ ID NO: 24947

SEQ ID NO: 25029 - DNA, 201 bp, Homo sapiens
gccaagaaggagaaggtagagcagatcctggcagagttccagctgcaggaggaggacctgaagaaggtgatgagacggatgcagaaggagatggaccgcgrcctgaggctggagacccatgaagaggccagtgtgaagatgctgcccacctacgtgcgctccaccccagaaggctcagaagtcggggacttcctctccctg

SEQ ID NO: 25030 - DNA, 201 bp, Homo sapiens; identical to SEQ ID NO: 24949

SEQ ID NO: 25031 - DNA, 201 bp, Homo sapiens; identical to SEQ ID NO: 24950

SEQ ID NO: 25032 - DNA, 201 bp, Homo sapiens; identical to SEQ ID NO: 24951

SEQ ID NO: 25033 - DNA, 201 bp, Homo sapiens; identical to SEQ ID NO: 24952

SEQ ID NO: 25034 - DNA, 201 bp, Homo sapiens; identical to SEQ ID NO: 24953

SEQ ID NO: 25035 - DNA, 201 bp, Homo sapiens; identical to SEQ ID NO: 24954

SEQ ID NO: 25036 - DNA, 201 bp, Homo sapiens; identical to SEQ ID NO: 24875

SEQ ID NO: 25037 - DNA, 201 bp, Homo sapiens; identical to SEQ ID NO: 24876

SEQ ID NO: 25038 - DNA, 201 bp, Homo sapiens
ccaagatcccaactcccacaacccaactcccaggtagagcagatcctggcagagttccagctgcaggaggaggacctgaagaaggtgatgagacggatgcmgaaggagatggaccgcggcctgaggctggagacccatgaagaggccagtgtgaagatgctgcccacctacgtgcgctccaccccagaaggctcagaagtc

SEQ ID NO: 25039 - DNA, 201 bp, Homo sapiens; identical to SEQ ID NO: 24878

SEQ ID NO: 25040 - DNA, 201 bp, Homo sapiens; identical to SEQ ID NO: 24879

SEQ ID NO: 25041 - DNA, 201 bp, Homo sapiens
ccacaacccaactcccaggtagagcagatcctggcagagttccagctgcaggaggaggacctgaagaaggtgatgagacggatgcagaaggagatggaccrcggcctgaggctggagacccatgaagaggccagtgtgaagatgctgcccacctacgtgcgctccaccccagaaggctcagaagtcggggacttcctctcc

SEQ ID NO: 25042 - DNA, 201 bp, Homo sapiens
acaacccaactcccaggtagagcagatcctggcagagttccagctgcaggaggaggacctgaagaaggtgatgagacggatgcagaaggagatggaccgcrgcctgaggctggagacccatgaagaggccagtgtgaagatgctgcccacctacgtgcgctccaccccagaaggctcagaagtcggggacttcctctccct

SEQ ID NO: 25043 - DNA, 201 bp, Homo sapiens; identical to SEQ ID NO: 24882

SEQ ID NO: 25044 - DNA, 201 bp, Homo sapiens; identical to SEQ ID NO: 24883

SEQ ID NO: 25045 - DNA, 201 bp, Homo sapiens; identical to SEQ ID NO: 24884

SEQ ID NO: 25046 - DNA, 169 bp, Homo sapiens; identical to SEQ ID NO: 24885

SEQ ID NO: 25047 - DNA, 201 bp, Homo sapiens; identical to SEQ ID NO: 24886

SEQ ID NO: 25048 - DNA, 201 bp, Homo sapiens; identical to SEQ ID NO: 24887

SEQ ID NO: 25049 - DNA, 201 bp, Homo sapiens; identical to SEQ ID NO: 24888

SEQ ID NO: 25050 - DNA, 201 bp, Homo sapiens; identical to SEQ ID NO: 24889

SEQ ID NO: 25051 - DNA, 201 bp, Homo sapiens; identical to SEQ ID NO: 24890

SEQ ID NO: 25052 - DNA, 201 bp, Homo sapiens; identical to SEQ ID NO: 24891

SEQ ID NO: 25053 - DNA, 201 bp, Homo sapiens; identical to SEQ ID NO: 24892

SEQ ID NO: 25054 - DNA, 201 bp, Homo sapiens; identical to SEQ ID NO: 24893

SEQ ID NO: 25055 - DNA, 201 bp, Homo sapiens; identical to SEQ ID NO: 24894

SEQ ID NO: 25056 - DNA, 201 bp, Homo sapiens; identical to SEQ ID NO: 24895

SEQ ID NO: 25057 - DNA, 201 bp, Homo sapiens; identical to SEQ ID NO: 24896

SEQ ID NO: 25058 - DNA, 201 bp, Homo sapiens; identical to SEQ ID NO: 24897

SEQ ID NO: 25059 - DNA, 201 bp, Homo sapiens; identical to SEQ ID NO: 24898

SEQ ID NO: 25060 - DNA, 201 bp, Homo sapiens; identical to SEQ ID NO: 24899

SEQ ID NO: 25061 - DNA, 201 bp, Homo sapiens; identical to SEQ ID NO: 24900

SEQ ID NO: 25062 - DNA, 201 bp, Homo sapiens; identical to SEQ ID NO: 24901

SEQ ID NO: 25063 - DNA, 201 bp, Homo sapiens; identical to SEQ ID NO: 24902

SEQ ID NO: 25064 - DNA, 201 bp, Homo sapiens; identical to SEQ ID NO: 24903

SEQ ID NO: 25065 - DNA, 201 bp, Homo sapiens; identical to SEQ ID NO: 24904

SEQ ID NO: 25066 - DNA, 201 bp, Homo sapiens; identical to SEQ ID NO: 24905

SEQ ID NO: 25067 - DNA, 201 bp, Homo sapiens; identical to SEQ ID NO: 24906

SEQ ID NO: 25068 - DNA, 201 bp, Homo sapiens; identical to SEQ ID NO: 24907

SEQ ID NO: 25069 - DNA, 201 bp, Homo sapiens; identical to SEQ ID NO: 24908

SEQ ID NO: 25070 - DNA, 201 bp, Homo sapiens; identical to SEQ ID NO: 24909

SEQ ID NO: 25071 - DNA, 201 bp, Homo sapiens; identical to SEQ ID NO: 24910

SEQ ID NO: 25072 - DNA, 201 bp, Homo sapiens; identical to SEQ ID NO: 24911

SEQ ID NO: 25073 - DNA, 201 bp, Homo sapiens; identical to SEQ ID NO: 24912

SEQ ID NO: 25074 - DNA, 201 bp, Homo sapiens; identical to SEQ ID NO: 24913

SEQ ID NO: 25075 - DNA, 201 bp, Homo sapiens; identical to SEQ ID NO: 24914

SEQ ID NO: 25076 - DNA, 201 bp, Homo sapiens
atcccaactcccacaacccaactcccaggtagagcagatcctggcagagttccagctgcaggaggaggacctgaagaaggtgatgagacggatgcagaagragatggaccgcggcctgaggctggagacccatgaagaggccagtgtgaagatgctgcccacctacgtgcgctccaccccagaaggctcagaagtcgggga

SEQ ID NO: 25077 - DNA, 201 bp, Homo sapiens; identical to SEQ ID NO: 24916

SEQ ID NO: 25078 - DNA, 201 bp, Homo sapiens; identical to SEQ ID NO: 24917

SEQ ID NO: 25079 - DNA, 201 bp, Homo sapiens; identical to SEQ ID NO: 24918

SEQ ID NO: 25080 - DNA, 201 bp, Homo sapiens; identical to SEQ ID NO: 24919

SEQ ID NO: 25081 - DNA, 201 bp, Homo sapiens; identical to SEQ ID NO: 24920

SEQ ID NO: 25082 - DNA, 201 bp, Homo sapiens; identical to SEQ ID NO: 24921

SEQ ID NO: 25083 - DNA, 201 bp, Homo sapiens; identical to SEQ ID NO: 24922

SEQ ID NO: 25084 - DNA, 201 bp, Homo sapiens; identical to SEQ ID NO: 24923

SEQ ID NO: 25085 - DNA, 201 bp, Homo sapiens; identical to SEQ ID NO: 24924

SEQ ID NO: 25086 - DNA, 201 bp, Homo sapiens; identical to SEQ ID NO: 24925

SEQ ID NO: 25087 - DNA, 201 bp, Homo sapiens; identical to SEQ ID NO: 24926

SEQ ID NO: 25088 - DNA, 201 bp, Homo sapiens; identical to SEQ ID NO: 24927

SEQ ID NO: 25089 - DNA, 201 bp, Homo sapiens; identical to SEQ ID NO: 24928

SEQ ID NO: 25090 - DNA, 201 bp, Homo sapiens; identical to SEQ ID NO: 24929

SEQ ID NO: 25091 - DNA, 201 bp, Homo sapiens; identical to SEQ ID NO: 24930

SEQ ID NO: 25092 - DNA, 201 bp, Homo sapiens; identical to SEQ ID NO: 24931

SEQ ID NO: 25093 - DNA, 201 bp, Homo sapiens; identical to SEQ ID NO: 24932

SEQ ID NO: 25094 - DNA, 201 bp, Homo sapiens; identical to SEQ ID NO: 24933

SEQ ID NO: 25095 - DNA, 201 bp, Homo sapiens; identical to SEQ ID NO: 24934

SEQ ID NO: 25096 - DNA, 201 bp, Homo sapiens; identical to SEQ ID NO: 24935

SEQ ID NO: 25097 - DNA, 201 bp, Homo sapiens; identical to SEQ ID NO: 24936

SEQ ID NO: 25098 - DNA, 201 bp, Homo sapiens
gcccagaccaagatcccaactcccacaacccaactcccaggtagagcagatcctggcagagttccagctgcaggaggaggacctgaagaaggtgatgagayggatgcagaaggagatggaccgcggcctgaggctggagacccatgaagaggccagtgtgaagatgctgcccacctacgtgcgctccaccccagaaggctc

SEQ ID NO: 25099 - DNA, 201 bp, Homo sapiens; identical to SEQ ID NO: 24938

SEQ ID NO: 25100 - DNA, 201 bp, Homo sapiens; identical to SEQ ID NO: 24939

SEQ ID NO: 25101 - DNA, 201 bp, Homo sapiens; identical to SEQ ID NO: 24940

SEQ ID NO: 25102 - DNA, 201 bp, Homo sapiens; identical to SEQ ID NO: 24941

SEQ ID NO: 25103 - DNA, 201 bp, Homo sapiens; identical to SEQ ID NO: 24942

SEQ ID NO: 25104 - DNA, 201 bp, Homo sapiens; identical to SEQ ID NO: 24943

SEQ ID NO: 25105 - DNA, 201 bp, Homo sapiens; identical to SEQ ID NO: 24944

SEQ ID NO: 25106 - DNA, 201 bp, Homo sapiens; identical to SEQ ID NO: 24945

SEQ ID NO: 25107 - DNA, 201 bp, Homo sapiens; identical to SEQ ID NO: 24946

SEQ ID NO: 25108 - DNA, 201 bp, Homo sapiens; identical to SEQ ID NO: 24947

SEQ ID NO: 25109 - DNA, 201 bp, Homo sapiens
caacccaactcccaggtagagcagatcctggcagagttccagctgcaggaggaggacctgaagaaggtgatgagacggatgcagaaggagatggaccgcgrcctgaggctggagacccatgaagaggccagtgtgaagatgctgcccacctacgtgcgctccaccccagaaggctcagaagtcggggacttcctctccctg

SEQ ID NO: 25110 - DNA, 201 bp, Homo sapiens; identical to SEQ ID NO: 24949

SEQ ID NO: 25111 - DNA, 201 bp, Homo sapiens; identical to SEQ ID NO: 24950

SEQ ID NO: 25112 - DNA, 201 bp, Homo sapiens; identical to SEQ ID NO: 24951

SEQ ID NO: 25113 - DNA, 201 bp, Homo sapiens; identical to SEQ ID NO: 24952

SEQ ID NO: 25114 - DNA, 201 bp, Homo sapiens; identical to SEQ ID NO: 24953

SEQ ID NO: 25115 - DNA, 201 bp, Homo sapiens; identical to SEQ ID NO: 24954

SEQ ID NO: 25116 - DNA, 201 bp, Homo sapiens
aaggcccttcccagccctgtcacaaccctgagccagctgcaggggcttccccactttggagaacactcctctagggttgtccaggagctgctggagcatgsagtgtgtgaggaggtggagagagttcggcgctcagagagctcttcacccagatcttcggggtcggtgtgaagactgctgaccggtggtaccgggaaggac

SEQ ID NO: 25117 - DNA, 201 bp, Homo sapiens
tgctccccaaacggcggcgagcgcgggtcgggtcccctagcggcgatgccgcttcctccacgccgccctcgacgcgcttcccgggagtcgccatctacctkgtcgagcctcgcatgggtcgcagccgccgggccttcctcacaggcctggcgcgctccaaaggcttccgcgtccttgacgcctgcagctccgaagcgacac

SEQ ID NO: 25118 - DNA, 201 bp, Homo sapiens
aaggcccttcccagccctgtcacaaccctgagccagctgcaggggcttccccactttggagaacactcctctagggttgtccaggagctgctggagcatgsagtgtgtgaggaggtggagagagttcggcgctcagagaggtaccagaccatgaagctcttcacccagatcttcggggtcggtgtgaagactgctgaccgg

SEQ ID NO: 25119 - DNA, 201 bp, Homo sapiens; identical to SEQ ID NO: 25117

SEQ ID NO: 25120 - DNA, 201 bp, Homo sapiens
acatttttccaagcggcttcagaggaagacatcttcagacacctgggccttgagtaccttcctccagagcagagaaacgcctgagcctgcctgtgtccccmacttccactcaggaaattgggctgcccccaacctggccactgaatgtctccaggcagatatgctgcccctgaggtgggctggacatgggtgccctccacg

SEQ ID NO: 25121 - DNA, 201 bp, Homo sapiens; identical to SEQ ID NO: 25118

SEQ ID NO: 25122 - DNA, 201 bp, Homo sapiens
atgaggtgggagccctcagtgccagcctcatcactgtgtgaccctgggtctgctcttagcctccccatggctcacgttcctgccctggatgggatgtgagyggggcccacatcgtggagctgtggtggggcctgcagtcatgaatggcaagtggtccctgatgtgcagtgtctcattagttgcactgcagttaactgtggc

SEQ ID NO: 25123 - DNA, 201 bp, Homo sapiens
accttcacccctccccgccaaggcctggctcttccggaggtcaattgtgcctgcaggatcagttgagcccctgctggtgtgctgcagggtgtgatgaggtrggagccctcagtgccagcctcatcactgtgtgaccctgggtctgctcttagcctccccatggctcacgttcctgccctggatgggatgtgagtggggccc

SEQ ID NO: 25124 - DNA, 201 bp, Homo sapiens; identical to SEQ ID NO: 25117

SEQ ID NO: 25125 - DNA, 201 bp, Homo sapiens
acatttttccaagcggcttcagaggaagacatcttcagacacctgggccttgagtaccttcctccagagcagagaaacgcctgagcctgcctgtgtccccmacttccactcaggaaattgggctgcccccaacctggccactgaatgtctccaggcagatatgctgccccctgacccccaccttcacccctccccgccaag

SEQ ID NO: 25126 - DNA, 201 bp, Homo sapiens
atccgcaccctctgggccatcctggacggcacggaccagatgtggctgcctgtggtgcgcacttggcgcctcaatgagcggcattacgggggcctcacagrcctcaacaaggcagaaacggccgccaagcacggggaggagcaggtgaagatctggaggcgctccttcgacatcccgccgcccccgatggacgagaagcac

SEQ ID NO: 25127 - DNA, 201 bp, Homo sapiens
catctgctacacgtcagtgctgaagcgggccatccgcaccctctgggccatcctggacggcacggaccagatgtggctgcctgtggtgcgcacttggcgcytcaatgagcggcattacgggggcctcacaggcctcaacaaggcagaaacggccgccaagcacggggaggagcaggtgaagatctggaggcgctccttcga

SEQ ID NO: 25128 - DNA, 201 bp, Homo sapiens
tacacgtcagtgctgaagcgggccatccgcaccctctgggccatcctggacggcacggaccagatgtggctgcctgtggtgcgcacttggcgcctcaatgmgcggcattacgggggcctcacaggcctcaacaaggcagaaacggccgccaagcacggggaggagcaggtgaagatctggaggcgctccttcgacatcccg

SEQ ID NO: 25129 - DNA, 201 bp, Homo sapiens
ccgcaccctctgggccatcctggacggcacggaccagatgtggctgcctgtggtgcgcacttggcgcctcaatgagcggcattacgggggcctcacaggcytcaacaaggcagaaacggccgccaagcacggggaggagcaggtgaagatctggaggcgctccttcgacatcccgccgcccccgatggacgagaagcaccc

SEQ ID NO: 25130 - DNA, 201 bp, Homo sapiens
cacgtcagtgctgaagcgggccatccgcaccctctgggccatcctggacggcacggaccagatgtggctgcctgtggtgcgcacttggcgcctcaatgagyggcattacgggggcctcacaggcctcaacaaggcagaaacggccgccaagcacggggaggagcaggtgaagatctggaggcgctccttcgacatcccgcc

SEQ ID NO: 25131 - DNA, 201 bp, Homo sapiens
tgtcaagcacctggaagggatgtcagaccaggcgatcatggagctgaacctgcccacggggatccccattgtgtatgagctgaacaaggagctgaagcccmccaagcccatgcagttcctgggtgatgaggaaacggtgcggaaggccatggaggctgtggctgcccagggcaaggccaagtgaggggtgggcttgggcaa

SEQ ID NO: 25132 - DNA, 201 bp, Homo sapiens
atcaaggatgccaagatggagtttgacatctgctacacgtcagtgctgaagcgggccatccgcaccctctgggccatcctggacggcacggaccagatgtrgctgcctgtggtgcgcacttggcgcctcaatgagcggcattacgggggcctcacaggcctcaacaaggcagaaacggccgccaagcacggggaggagcag

SEQ ID NO: 25133 - DNA, 201 bp, Homo sapiens
atgctgagcagcttgagcggaagcagctggagtgcgagcaggtgctgcagaaacttgccaaggaaatcgggagcaccaaccgtgccttgctgccctggctrctcgagcagaggcacaagcacaacaaggcctgctgcccgctggagggggtcaggccatcaccccagcagactgagtatcgtaataagtgtgagtttctgg

SEQ ID NO: 25134 - DNA, 201 bp, Homo sapiens
tggcagtggacctgttcccgcagaccccgcactgtgagatgctcatcctgtttgagagggtggagcaccccaatggcacaggggtcttggggccccacagscctccagctcaacccacaccaggacccccagataacaccctacaagaaactgggaccttcccctcatcctaggcccaggacccattatggggacaggagc

SEQ ID NO: 25135 - DNA, 201 bp, Homo sapiens
cggcagccctggaggaggtggagaaagagggcgctggggcggctacagggccggggcctcagcccgggctctacagctacatcagggatgacttgtttacytctgagatctttaaactggagctgcagaacgtgcctcgccacgccagcttcagcgacgtccggcgcttcctgggccgctttggtctgcagccccacaaaa

SEQ ID NO: 25136 - DNA, 201 bp, Homo sapiens
gcttcagcgacgtccggcgcttcctgggccgctttggtctgcagccccacaaaaccaaactctttgggcaaccaccctgcgcctttgtgacattccgcagygctgcagagagggacaaggccctgcgcgttttgcatggtgccctctggaaaggccgcccactcagtgtgcgcctggcccggcccaaggccgaccccatgg

SEQ ID NO: 25137 - DNA, 201 bp, Homo sapiens
cccccatggcgtccctggtctaggcggagaaccgcctgggcgatgagtgagaacctcgacaacgagggcccgaagcccatggagagctgtggccaggagarcagcagtgccctgagctgccctaccgtctcggtgccccctgcagccccggcagccctggaggaggtggagaaagagggcgctggggcggctacagggccg

SEQ ID NO: 25138 - DNA, 201 bp, Homo sapiens
gcagccaaagggcacagaaccctgtgccccaccaggattggcctgctgctaggggccaggggccctgaccaggaagacaggtgggttcctgtagcctgttscccatccccagggcctttgtggactagccaaggctgtgagggccagaataaacaactgctcaacaaagggtgtttctgtgatgagagccaggggtctgaa

SEQ ID NO: 25139 - DNA, 201 bp, Homo sapiens
cctctcaccctcagaataaagacatcagccattcccttctggacagtttgctttatgtgttcagacaatcaaggctcgccttccaggcacagcccagtgcyctggatggcatcagcacaggctcccctgccccggccttgaagcatggctgtgtgcacgattcatacccatgcttggcagacgggtggggggggggggggg

SEQ ID NO: 25140 - DNA, 115 bp, Homo sapiens
gcacagcccagtgccctggatggcatcagcacaggctcccctgccccggccttgaagcatggctgtgtgcacgattcatacccatgcttggcagacgggtkgggggggggggggg

SEQ ID NO: 25141 - DNA, 201 bp, Homo sapiens
agcagctgactgtgcgcaccagccgccgccaccaggccatggccattgcctacttccacccccagaagctgagccctgaggagctggcagagctgaagacytccctagcgcagcacttcacagcagggccaggcagggccagtggagtgacctgcctctacttcgtggaggagggacagcgaaagactcctagccaggagg

SEQ ID NO: 25142 - DNA, 114 bp, Homo sapiens
cacagcccagtgccctggatggcatcagcacaggctcccctgccccggccttgaagcatggctgtgtgcacgattcatacccatgcttggcagacgggtggggggggggggggg

SEQ ID NO: 25143 - DNA, 201 bp, Homo sapiens; identical to SEQ ID NO: 25133

SEQ ID NO: 25144 - DNA, 201 bp, Homo sapiens; identical to SEQ ID NO: 25134

SEQ ID NO: 25145 - DNA, 201 bp, Homo sapiens; identical to SEQ ID NO: 25135

SEQ ID NO: 25146 - DNA, 201 bp, Homo sapiens; identical to SEQ ID NO: 25136

SEQ ID NO: 25147 - DNA, 201 bp, Homo sapiens; identical to SEQ ID NO: 25137

SEQ ID NO: 25148 - DNA, 201 bp, Homo sapiens; identical to SEQ ID NO: 25138

SEQ ID NO: 25149 - DNA, 201 bp, Homo sapiens; identical to SEQ ID NO: 25139

SEQ ID NO: 25150 - DNA, 115 bp, Homo sapiens; identical to SEQ ID NO: 25140

SEQ ID NO: 25151 - DNA, 201 bp, Homo sapiens; identical to SEQ ID NO: 25141

SEQ ID NO: 25152 - DNA, 114 bp, Homo sapiens; identical to SEQ ID NO: 25142

SEQ ID NO: 25153 - DNA, 201 bp, Homo sapiens; identical to SEQ ID NO: 25133

SEQ ID NO: 25154 - DNA, 201 bp, Homo sapiens; identical to SEQ ID NO: 25134

SEQ ID NO: 25155 - DNA, 201 bp, Homo sapiens; identical to SEQ ID NO: 25135

SEQ ID NO: 25156 - DNA, 201 bp, Homo sapiens; identical to SEQ ID NO: 25136

SEQ ID NO: 25157 - DNA, 201 bp, Homo sapiens
ttcttttttaaaggtcaacagaagccaaccttggtcacacaggtagtgagggaaggatatgttgtgggcggcccacaggccaacattgttttcctgacagaaaaaaaaaaaaaagcgccatcagtaccgcctgtagggggcatggtgggggacagacacggcagaacgctggactcttgcttcagatggcgcaccacaagc

SEQ ID NO: 25158 - DNA, 201 bp, Homo sapiens; identical to SEQ ID NO: 25137

SEQ ID NO: 25159 - DNA, 201 bp, Homo sapiens; identical to SEQ ID NO: 25138

SEQ ID NO: 25160 - DNA, 201 bp, Homo sapiens; identical to SEQ ID NO: 25139

SEQ ID NO: 25161 - DNA, 201 bp, Homo sapiens
gcacagcccagtgccctggatggcatcagcacaggctcccctgccccggccttgaagcatggctgtgtgcacgattcatacccatgcttggcagacgggtkggggggggggggggcgaggctccccaacctttaggggaacacatgtgcacgaagctttggttcacaggcgcatctggctggctaagggcaacagtcacag

SEQ ID NO: 25162 - DNA, 201 bp, Homo sapiens; identical to SEQ ID NO: 25141

SEQ ID NO: 25163 - DNA, 201 bp, Homo sapiens
agaagccaaccttggtcacacaggtagtgagggaaggatatgttgtgggcggcccacaggccaacattgttttcctgacagaaaaaaaaaaaaaagcgccrtcagtaccgcctgtagggggcatggtgggggacagacacggcagaacgctggactcttgcttcagatggcgcaccacaagcacacggcactctgcacagg

SEQ ID NO: 25164 - DNA, 201 bp, Homo sapiens
gctaagggcaacagtcacagtcaaatgactattcacagctgcagacaggaggcaagacagaagcaagtgtctaattatagcaatttgagttgagggtttcwtttttaaaggtcaacagaagccaaccttggtcacacaggtagtgagggaaggatatgttgtgggcggcccacaggccaacattgttttcctgacagaaaa

SEQ ID NO: 25165 - DNA, 201 bp, Homo sapiens
cacagcccagtgccctggatggcatcagcacaggctcccctgccccggccttgaagcatggctgtgtgcacgattcatacccatgcttggcagacgggtgggggggggggggggcgaggctccccaacctttaggggaacacatgtgcacgaagctttggttcacaggcgcatctggctggctaagggcaacagtcacagt

SEQ ID NO: 25166 - DNA, 201 bp, Homo sapiens
acggcactctgcacaggtgccagtccaccaccagggccagcctttgagcacaccctggtgcctcagactccggcaggaacacatttccatcgcacacccacccataggggccaccagtcgagaagcaagctgggcaccaggcagctgcctttgacatccagagaaaccgctgtcacaggcaacagctctggatcaagaatg

SEQ ID NO: 25167 - DNA, 201 bp, Homo sapiens; identical to SEQ ID NO: 25133

SEQ ID NO: 25168 - DNA, 201 bp, Homo sapiens; identical to SEQ ID NO: 25134

SEQ ID NO: 25169 - DNA, 201 bp, Homo sapiens; identical to SEQ ID NO: 25135

SEQ ID NO: 25170 - DNA, 201 bp, Homo sapiens; identical to SEQ ID NO: 25136

SEQ ID NO: 25171 - DNA, 201 bp, Homo sapiens; identical to SEQ ID NO: 25157

SEQ ID NO: 25172 - DNA, 201 bp, Homo sapiens; identical to SEQ ID NO: 25137

SEQ ID NO: 25173 - DNA, 201 bp, Homo sapiens; identical to SEQ ID NO: 25138

SEQ ID NO: 25174 - DNA, 201 bp, Homo sapiens; identical to SEQ ID NO: 25139

SEQ ID NO: 25175 - DNA, 201 bp, Homo sapiens; identical to SEQ ID NO: 25161

SEQ ID NO: 25176 - DNA, 201 bp, Homo sapiens; identical to SEQ ID NO: 25141

SEQ ID NO: 25177 - DNA, 201 bp, Homo sapiens; identical to SEQ ID NO: 25163

SEQ ID NO: 25178 - DNA, 201 bp, Homo sapiens; identical to SEQ ID NO: 25164

SEQ ID NO: 25179 - DNA, 201 bp, Homo sapiens; identical to SEQ ID NO: 25165

SEQ ID NO: 25180 - DNA, 201 bp, Homo sapiens; identical to SEQ ID NO: 25166

SEQ ID NO: 25181 - DNA, 201 bp, Homo sapiens
ggtggctgagctttttcccagcaggaatgggtcctcgaatcatcgtgcctctttcacagaaaggacgttgtggtggcctcaccccaggcatgcccaacagkaactgtcagcataaacctgggggccctcaggactaggacagggtgagccagtgctccctcctttcatgtacttggcctgagactgacctctccctaggtc

SEQ ID NO: 25182 - DNA, 201 bp, Homo sapiens
tcctgcgcgtgcgcgcttggcctccctagtgcgggctggcagtgcgggcagagcccggctgagaggggcggccctggaggagacggaggccgcgggtgggmccgaggcgcaagaggaagatgaggacgaagaagaggcgctgccgcactccgaggccatggacgtgttccaggagggtctggctatggtggtgcaggaccc

SEQ ID NO: 25183 - DNA, 201 bp, Homo sapiens
gggccgcagttcctgcgcgtgcgcgcttggcctccctagtgcgggctggcagtgcgggcagagcccggctgagaggggcggccctggaggagacggaggcsgcgggtgggcccgaggcgcaagaggaagatgaggacgaagaagaggcgctgccgcactccgaggccatggacgtgttccaggagggtctggctatggtgg

SEQ ID NO: 25184 - DNA, 201 bp, Homo sapiens
ggaagacagaaagaagctccgagactacggcatccggaatcgagacgaggtttccttcatcaaaaagctgaggcaaaagtgagcctccagacaggacaacsctcttcatcactggtggctgagctttttcccagcaggaatgggtcctcgaatcatcgtgcctctttcacagaaaggacgttgtggtggcctcaccccagg

SEQ ID NO: 25185 - DNA, 201 bp, Homo sapiens
gaggacgcggaaggcctgcgagagtcgcccgcggcccagcgccggccttcgggtcccaccttgcgggtgatgttgtgcacgtaggggcacgtgttgcaggmgaagcggtggcagcgttgtccctcctccacgatcagcccgttcccgcagccggggcagaacagcagcatggtctcgaactccgcaggctccaactcccgg

SEQ ID NO: 25186 - DNA, 201 bp, Homo sapiens
agtagagcccacagatctgctgcagaccagaaaggggcgcgagaaagagcggacagaggcagacgccggggctggcggcgatggagcagcagtcggaggamgcggaaggcctgcgagagtcgcccgcggcccagcgccggccttcgggtcccaccttgcgggtgatgttgtgcacgtaggggcacgtgttgcaggcgaagc

SEQ ID NO: 25187 - DNA, 102 bp, Homo sapiens
gwgcacgatgagagatcgtccaggaggcggtgttgatgcggcaaagggcaacaggaagggcattaggacttgaaatcggagacgcacgcaggggagggagtc

SEQ ID NO: 25188 - DNA, 201 bp, Homo sapiens
gggcgcgagaaagagcggacagaggcagacgccggggctggcggcgatggagcagcagtcggaggacgcggaaggcctgcgagagtcgcccgcggcccagygccggccttcgggtcccaccttgcgggtgatgttgtgcacgtaggggcacgtgttgcaggcgaagcggtggcagcgttgtccctcctccacgatcagccc

SEQ ID NO: 25189 - DNA, 201 bp, Homo sapiens
tttccgggtcagaggattgtcaacctcttggtgaaggagaaggagctaaaggagatcagggccttggacaaggccttcagatcaggattgagggagaaatkttctaagctccagaacaagaccaagatgacagtgctagaaggagacattctggatcagtcatgcctgaagagagcctgccaggacatctcggtagtcatc

SEQ ID NO: 25190 - DNA, 201 bp, Homo sapiens
gcctgaagagagcctgccaggacatctcggtagtcatccacaccgcctctatcattgacatcttcggtgtcactcacagagagtctatcatgaacttcaaygtgaaaggtacccaacagctgttggaggcctgtgtccaagctagtgtgctagtcttcatccataccagcagcatacaggtagcctggcccaactcctaca

SEQ ID NO: 25191 - DNA, 201 bp, Homo sapiens
atggaatcctgtcaagtttcagcaagttctccagagtcaacccagtctatgttggcaacatagcctgggcccacattctggccttgagggccctgcgggarcccaagaaggccccaagtgtccgaggacagttctactatatctcagatgacacgcctcaccaaagctatgataaccttagttacaccttgagcaaagagt

SEQ ID NO: 25192 - DNA, 201 bp, Homo sapiens
tggaatcctgtcaagtttcagcaagttctccagagtcaacccagtctatgttggcaacatagcctgggcccacattctggccttgagggccctgcgggagyccaagaaggccccaagtgtccgaggacagttctactatatctcagatgacacgcctcaccaaagctatgataaccttagttacaccttgagcaaagagtt

SEQ ID NO: 25193 - DNA, 201 bp, Homo sapiens
ccggcaagtataagacctggaagaagtggctggacgacgagggccaggacggcctgagggaagaggaggtgcagcggctgcggggcaactgcgagagcatscgcctgtccgcggagctggggctgcggcagcccgcctggctgcggggccgctacatgctggtgcgctacgaggacgtggcacgcgggccgctgcagaagg

SEQ ID NO: 25194 - DNA, 201 bp, Homo sapiens
ggctcccctgctccctcccaggtcctgcacactgtctttttgccaacacctcagccctgtttgctatttcatgtctgcatggtacgagacaccccttcacrgcatacactgccatggtatgtacatatgcatccacgtgtgtgtatgtgtagcatgtagctcattctgctcagcctctggcgccgttccacattgctccca

SEQ ID NO: 25195 - DNA, 201 bp, Homo sapiens
tgtctcaagagctccaagatcctttggtctcgtgtcctttggcaccccgtaactggactggggacaaatttgttacgtgtttccaaggctacagacatggygccatcctcacaggcctagctcatgtcatggatcaggtgctttgctggggggatacaatgacccatgtggtctgcgtcttctgccattggcttgaactgg

SEQ ID NO: 25196 - DNA, 201 bp, Homo sapiens
tcctaaatgcagccgcatcacctgtcaactcgctgcagtttcagagacagtggaagctgctctttacctcaaaagcacaaagcagaattggcaacttcacwtgtctcaagagctccaagatcctttggtctcgtgtcctttggcaccccgtaactggactggggacaaatttgttacgtgtttccaaggctacagacatgg

SEQ ID NO: 25197 - DNA, 201 bp, Homo sapiens
ttacctcaaaagcacaaagcagaattggcaacttcacatgtctcaagagctccaagatcctttggtctcgtgtcctttggcaccccgtaactggactgggracaaatttgttacgtgtttccaaggctacagacatggtgccatcctcacaggcctagctcatgtcatggatcaggtgctttgctggggggatacaatgac

SEQ ID NO: 25198 - DNA, 201 bp, Homo sapiens
ggtccagggcttcctaaatgcagccgcatcacctgtcaactcgctgcagtttcagagacagtggaagctgctctttacctcaaaagcacaaagcagaattsgcaacttcacatgtctcaagagctccaagatcctttggtctcgtgtcctttggcaccccgtaactggactggggacaaatttgttacgtgtttccaaggc

SEQ ID NO: 25199 - DNA, 201 bp, Homo sapiens
ccaaaccccacagaacagagggcaccaggcatcacacgacatctttccctcccatctctgccatctgtctgtctggcaatggaaggagcttcagcaggagrtccttcccagaaggttgattcttggcctgggtggtagaggagatatcctgaccctaaagtcttccagccccgggtcatcctctcctatactagggcctat

SEQ ID NO: 25200 - DNA, 201 bp, Homo sapiens
ttgactgtagggcttgtcccttgctaagacaggagcagaagactggatggctgtgtcctcaaggcagtcccctcccatccccattcccaaagtcagaaagygaagccagatctcaagggctgatacctgaggcaaggagagctaaggggagagaaattggggctgagtggaagcagatgcctgcacaagccaagtgtgtct

SEQ ID NO: 25201 - DNA, 201 bp, Homo sapiens
cagtatccagagcttacaaggagctgcaagggtttgccgagggctgcccagctctgtttctggtttcctggacaatttctctgtcagatacggcccattgyaaacccagagggctgcattttgggttgagtaatatggacaccatggaagtacaggatctgagtccaacattgccatgggggagggaagagtgtgtcctgg

SEQ ID NO: 25202 - DNA, 201 bp, Homo sapiens
tagaaggccttccccactcccacctcaaacccaggagcagaactcagtatccagagcttacaaggagctgcaagggtttgccgagggctgcccagctctgyttctggtttcctggacaatttctctgtcagatacggcccattgcaaacccagagggctgcattttgggttgagtaatatggacaccatggaagtacagga

SEQ ID NO: 25203 - DNA, 201 bp, Homo sapiens
tggctggacgacgagggccaggacggcctgagggaagaggaggtgcagcggctgcggggcaactgcgagagcatccgcctgtccgcggagctggggctgcrgcagcccgcctggctgcggggccgctacatgctggtgcgctacgaggacgtggcacgcgggccgctgcagaaggcccgcgagatgtaccgcttcgccggc

SEQ ID NO: 25204 - DNA, 201 bp, Homo sapiens
ctcctctgttccccatgtggaggtcgggggggctgggactggggagggggcagccacctccatccaaggctcttcctaggggccctgctaatgtggacagyagactttatccctccttcttactctgggccaagacctcccactccgccctctgaggatggtaccaagaatgggcctttgggacttctcaggacattgaca

SEQ ID NO: 25205 - DNA, 201 bp, Homo sapiens
gctgtggggccagagccgtgccctctatcccagcatctacatgcccgcagtgctggagggcacagggaagtcacagatgtatgtgcaacaccgtgtggccraggcattccgtgtggctgtggctgctggtgaccccaatctgccggtgctgccctatgtccagatcttctatgacacgacaaaccactttctgcccctgga

SEQ ID NO: 25206 - DNA, 201 bp, Homo sapiens
tggacttattcattcctcacaatgaggctatgaggaaactgagtcactcacattgagagtaagcacgttgcccaaggttgcacagcaagaaaagggagaakttgagattcaaacccaggctgtctagctccgggggtacagcccttgcactcctactgagtttgtggtaaccagccctgcacgacccctgaatctgctgag

SEQ ID NO: 25207 - DNA, 201 bp, Homo sapiens
gcagtgctggagggcacagggaagtcacagatgtatgtgcaacaccgtgtggccgaggcattccgtgtggctgtggctgctggtgaccccaatctgccggygctgccctatgtccagatcttctatgacacgacaaaccactttctgcccctggatgagctggagcacagcctgggggagagtgcggcccagggggcagct

SEQ ID NO: 25208 - DNA, 201 bp, Homo sapiens
agcctgggggctgagggcctggctgtcagccactcttcccagaacatatgtcatggcctcagtggctcatggggaagcaggggtgggcgagcttaggctaraactttgcaacctgttctcagctctgcctcccctggccaggttgtcctcgaccagtcccgtgccatggcagcccacctgcttcccatctgcgccctcttc

SEQ ID NO: 25209 - DNA, 201 bp, Homo sapiens
caggagggctgggttgacctgtccttggtcactgaggccattggatcttcctccagtggctgccaggatttctggtggaagagacaggaaggcctcccccmcttggtcgggtcagcctgggggctgagggcctggctgtcagccactcttcccagaacatatgtcatggcctcagtggctcatggggaagcaggggtgggc

SEQ ID NO: 25210 - DNA, 201 bp, Homo sapiens
ctgagtcactcacattgagagtaagcacgttgcccaaggttgcacagcaagaaaagggagaagttgagattcaaacccaggctgtctagctccgggggtayagcccttgcactcctactgagtttgtggtaaccagccctgcacgacccctgaatctgctgagaggcaccagtccagcaaataaagcagtcatgatttact

SEQ ID NO: 25211 - DNA, 201 bp, Homo sapiens; identical to SEQ ID NO: 25205

SEQ ID NO: 25212 - DNA, 201 bp, Homo sapiens; identical to SEQ ID NO: 25206

SEQ ID NO: 25213 - DNA, 201 bp, Homo sapiens; identical to SEQ ID NO: 25207

SEQ ID NO: 25214 - DNA, 201 bp, Homo sapiens
agcctgggggctgagggcctggctgtcagccactcttcccagaacatatgtcatggcctcagtggctcatggggaagcaggggtgggcgagcttaggctaragcaagtcctgtgggagatggcagaggcctggtctgagaggcaactcggatgtgccctccagtggccatgctcccctccatgcgtctcccctgccctcct

SEQ ID NO: 25215 - DNA, 201 bp, Homo sapiens; identical to SEQ ID NO: 25209

SEQ ID NO: 25216 - DNA, 201 bp, Homo sapiens; identical to SEQ ID NO: 25210

SEQ ID NO: 25217 - DNA, 201 bp, Homo sapiens; identical to SEQ ID NO: 25205

SEQ ID NO: 25218 - DNA, 201 bp, Homo sapiens; identical to SEQ ID NO: 25206

SEQ ID NO: 25219 - DNA, 201 bp, Homo sapiens; identical to SEQ ID NO: 25207

SEQ ID NO: 25220 - DNA, 201 bp, Homo sapiens; identical to SEQ ID NO: 25210

SEQ ID NO: 25221 - DNA, 201 bp, Homo sapiens
cctggaactggcaggaactgtgggttgtgttggtccccgaacccccatcgcctatatgaaatatggttgcttttgtggcttgggaggccatggccagcccygcgatgccattgactggtgctgccatggccacgactgttgttacactcgagctgaggaggccggctgcagccccaagacagagcgctactcctggcagtg

SEQ ID NO: 25222 - DNA, 201 bp, Homo sapiens
tccggcgaggcctccaggatattacgtgtgcaccggcgtgggatcctggaactggcaggaactgtgggttgtgttggtccccgaacccccatcgcctataygaaatatggttgcttttgtggcttgggaggccatggccagccccgcgatgccattgactggtgctgccatggccacgactgttgttacactcgagctgag

SEQ ID NO: 25223 - DNA, 201 bp, Homo sapiens
tccaggatattacgtgtgcaccggcgtgggatcctggaactggcaggaactgtgggttgtgttggtccccgaacccccatcgcctatatgaaatatggttscttttgtggcttgggaggccatggccagccccgcgatgccattgactggtgctgccatggccacgactgttgttacactcgagctgaggaggccggctgc

SEQ ID NO: 25224 - DNA, 201 bp, Homo sapiens
ggagccaatggcatctacgaggcaatctaccatgggatccctatggtggggattccattgtttgccgatcaacctgataacattgctcacatgaaggccargggagcagctgttagagtggacttcaacacaatgtcgagtacagacttgctgaatgcattgaagagagtaattaatgatccttcatataaagagaatgtt

SEQ ID NO: 25225 - DNA, 201 bp, Homo sapiens
ccttaggtctcaatactcggctgtacaagtggataccccagaatgaccttctaggtcatccaaagaccagagcttttataactcatggtggagccaatggmatctacgaggcaatctaccatgggatccctatggtggggattccattgtttgccgatcaacctgataacattgctcacatgaaggccaggggagcagctg

SEQ ID NO: 25226 - DNA, 201 bp, Homo sapiens
gataccttaggtctcaatactcggctgtacaagtggataccccagaatgaccttctaggtcatccaaagaccagagcttttataactcatggtggagccartggcatctacgaggcaatctaccatgggatccctatggtggggattccattgtttgccgatcaacctgataacattgctcacatgaaggccaggggagca

SEQ ID NO: 25227 - DNA, 201 bp, Homo sapiens
ccaacgtaattgcatcagccctggcccagatcccacaaaaggttctgtggagatttgatgggaataaaccagataccttaggtctcaatactcggctgtayaagtggataccccagaatgaccttctaggtcatccaaagaccagagcttttataactcatggtggagccaatggcatctacgaggcaatctaccatggga

SEQ ID NO: 25228 - DNA, 201 bp, Homo sapiens
agaatgaccttctaggtcatccaaagaccagagcttttataactcatggtggagccaatggcatctacgaggcaatctaccatgggatccctatggtgggsattccattgtttgccgatcaacctgataacattgctcacatgaaggccaggggagcagctgttagagtggacttcaacacaatgtcgagtacagacttgc

SEQ ID NO: 25229 - DNA, 201 bp, Homo sapiens
gagcttttataactcatggtggagccaatggcatctacgaggcaatctaccatgggatccctatggtggggattccattgtttgccgatcaacctgataayattgctcacatgaaggccaggggagcagctgttagagtggacttcaacacaatgtcgagtacagacttgctgaatgcattgaagagagtaattaatgatc

SEQ ID NO: 25230 - DNA, 201 bp, Homo sapiens
tttcctcatccactcttaccaaatgttgattttgttggaggactccactgcaaacctgccaaacccctgcctaaggaaatggaagactttgtacagagctytggagaaaatggtgttgtggtgttttctctggggtcaatggtcagtaacatgacagaagaaagggccaacgtaattgcatcagccctggcccagatccca

SEQ ID NO: 25231 - DNA, 201 bp, Homo sapiens
gggccaacgtaattgcatcagccctggcccagatcccacaaaaggttctgtggagatttgatgggaataaaccagataccttaggtctcaatactcggctstacaagtggataccccagaatgaccttctaggtcatccaaagaccagagcttttataactcatggtggagccaatggcatctacgaggcaatctaccatg

SEQ ID NO: 25232 - DNA, 201 bp, Homo sapiens
gcaggtagcaggccctcgcagaggattaacacagtggctgaacaccaggaaggaactggcacttggagtccagacatctaaaatttggaagacccactacrttatctgagacaatggggaaagctgacgtatggcttattcgaaactcctggaattttcagtttcctcatccactcttaccaaatgttgattttgttggag

SEQ ID NO: 25233 - DNA, 201 bp, Homo sapiens
agtccagacatctaaaatttggaagacccactacattatctgagacaatggggaaagctgacgtatggcttattcgaaactcctggaattttcagtttccwcatccactcttaccaaatgttgattttgttggaggactccactgcaaacctgccaaacccctgcctaaggaaatggaagactttgtacagagctctggag

SEQ ID NO: 25234 - DNA, 201 bp, Homo sapiens
aagctgacgtatggcttattcgaaactcctggaattttcagtttcctcatccactcttaccaaatgttgattttgttggaggactccactgcaaacctgcmaaacccctgcctaaggaaatggaagactttgtacagagctctggagaaaatggtgttgtggtgttttctctggggtcaatggtcagtaacatgacagaag

SEQ ID NO: 25235 - DNA, 201 bp, Homo sapiens
tgccgatcaacctgataacattgctcacatgaaggccaggggagcagctgttagagtggacttcaacacaatgtcgagtacagacttgctgaatgcattgmagagagtaattaatgatccttcatataaagagaatgttatgaaattatcaagaattcaacatgatcaaccagtgaagcccctggatcgagcagtcttctg

SEQ ID NO: 25236 - DNA, 174 bp, Homo sapiens
gcagtagcttgctgatgctcccagctgaataagtcccttctttctacaactcggtgtcttgagttttgtctgcrgctcctcctgttacatttcttggctccctgaccgggaagcaacgtgactgacagacagctgaggcagccccttaggcaacttaagcctgccttgtggagt

SEQ ID NO: 25237 - DNA, 201 bp, Homo sapiens
gtccagacatctaaaatttggaagacccactacattatctgagacaatggggaaagctgacgtatggcttattcgaaactcctggaattttcagtttcctyatccactcttaccaaatgttgattttgttggaggactccactgcaaacctgccaaacccctgcctaaggaaatggaagactttgtacagagctctggaga

SEQ ID NO: 25238 - DNA, 201 bp, Homo sapiens
gcttgctgatgctcccagctgaataagtcccttctttctacaactcggtgtcttgagttttgtctgcggctcctcctgttacatttcttggctccctgacygggaagcaacgtgactgacagacagctgaggcagccccttaggcaacttaagcctgccttgtggagtgcccctgtgggggactccagccagcctgagtga

SEQ ID NO: 25239 - DNA, 201 bp, Homo sapiens
gtcatccaaagaccagagcttttataactcatggtggagccaatggcatctacgaggcaatctaccatgggatccctatggtggggattccattgtttgcygatcaacctgataacattgctcacatgaaggccaggggagcagctgttagagtggacttcaacacaatgtcgagtacagacttgctgaatgcattgaaga

SEQ ID NO: 25240 - DNA, 201 bp, Homo sapiens; identical to SEQ ID NO: 25224

SEQ ID NO: 25241 - DNA, 201 bp, Homo sapiens; identical to SEQ ID NO: 25225

SEQ ID NO: 25242 - DNA, 201 bp, Homo sapiens; identical to SEQ ID NO: 25226

SEQ ID NO: 25243 - DNA, 201 bp, Homo sapiens; identical to SEQ ID NO: 25229

SEQ ID NO: 25244 - DNA, 201 bp, Homo sapiens; identical to SEQ ID NO: 25228

SEQ ID NO: 25245 - DNA, 201 bp, Homo sapiens; identical to SEQ ID NO: 25227

SEQ ID NO: 25246 - DNA, 201 bp, Homo sapiens; identical to SEQ ID NO: 25231

SEQ ID NO: 25247 - DNA, 201 bp, Homo sapiens; identical to SEQ ID NO: 25230

SEQ ID NO: 25248 - DNA, 201 bp, Homo sapiens
gtgttttctctggggccagttgtgcaaaaccttatagaagagaaggctgatctcattgcttcagacttggcccagattccacagaaggaagacccactacrttatctgagacaatggggaaagctgacgtatggcttattcgaaactcctggaattttcagtttcctcatccactcttaccaaatgttgattttgttggag

SEQ ID NO: 25249 - DNA, 124 bp, Homo sapiens
tattttgtggcaatgaagaaaacactacggaaaataaaaaataagataaagccttatgagctcgtattgaaatttgttgaacttatattgaaatttgttgytctaattcacagtatactcacaa

SEQ ID NO: 25250 - DNA, 201 bp, Homo sapiens; identical to SEQ ID NO: 25234

SEQ ID NO: 25251 - DNA, 201 bp, Homo sapiens
ttggcccagattccacagaaggaagacccactacattatctgagacaatggggaaagctgacgtatggcttattcgaaactcctggaattttcagtttccwcatccactcttaccaaatgttgattttgttggaggactccactgcaaacctgccaaacccctgcctaaggaaatggaagactttgtacagagctctggag

SEQ ID NO: 25252 - DNA, 201 bp, Homo sapiens; identical to SEQ ID NO: 25235

SEQ ID NO: 25253 - DNA, 201 bp, Homo sapiens
tggcccagattccacagaaggaagacccactacattatctgagacaatggggaaagctgacgtatggcttattcgaaactcctggaattttcagtttcctyatccactcttaccaaatgttgattttgttggaggactccactgcaaacctgccaaacccctgcctaaggaaatggaagactttgtacagagctctggaga

SEQ ID NO: 25254 - DNA, 201 bp, Homo sapiens; identical to SEQ ID NO: 25239

SEQ ID NO: 25255 - DNA, 201 bp, Homo sapiens; identical to SEQ ID NO: 25224

SEQ ID NO: 25256 - DNA, 201 bp, Homo sapiens; identical to SEQ ID NO: 25225

SEQ ID NO: 25257 - DNA, 201 bp, Homo sapiens; identical to SEQ ID NO: 25226

SEQ ID NO: 25258 - DNA, 201 bp, Homo sapiens; identical to SEQ ID NO: 25229

SEQ ID NO: 25259 - DNA, 201 bp, Homo sapiens; identical to SEQ ID NO: 25228

SEQ ID NO: 25260 - DNA, 201 bp, Homo sapiens; identical to SEQ ID NO: 25227

SEQ ID NO: 25261 - DNA, 201 bp, Homo sapiens; identical to SEQ ID NO: 25231

SEQ ID NO: 25262 - DNA, 201 bp, Homo sapiens; identical to SEQ ID NO: 25230

SEQ ID NO: 25263 - DNA, 201 bp, Homo sapiens
aaaatatgatctatgtgctttactttgacttttggttcgaaatatttgacatgaagaagtgggatcagttttatagtgaagttctaggaagacccactacrttatctgagacaatggggaaagctgacgtatggcttattcgaaactcctggaattttcagtttcctcatccactcttaccaaatgttgattttgttggag

SEQ ID NO: 25264 - DNA, 201 bp, Homo sapiens; identical to SEQ ID NO: 25234

SEQ ID NO: 25265 - DNA, 201 bp, Homo sapiens
agttttatagtgaagttctaggaagacccactacattatctgagacaatggggaaagctgacgtatggcttattcgaaactcctggaattttcagtttccwcatccactcttaccaaatgttgattttgttggaggactccactgcaaacctgccaaacccctgcctaaggaaatggaagactttgtacagagctctggag

SEQ ID NO: 25266 - DNA, 201 bp, Homo sapiens; identical to SEQ ID NO: 25235

SEQ ID NO: 25267 - DNA, 201 bp, Homo sapiens
gttttatagtgaagttctaggaagacccactacattatctgagacaatggggaaagctgacgtatggcttattcgaaactcctggaattttcagtttcctyatccactcttaccaaatgttgattttgttggaggactccactgcaaacctgccaaacccctgcctaaggaaatggaagactttgtacagagctctggaga

SEQ ID NO: 25268 - DNA, 201 bp, Homo sapiens; identical to SEQ ID NO: 25239

SEQ ID NO: 25269 - DNA, 201 bp, Homo sapiens; identical to SEQ ID NO: 25225

SEQ ID NO: 25270 - DNA, 201 bp, Homo sapiens; identical to SEQ ID NO: 25263

SEQ ID NO: 25271 - DNA, 201 bp, Homo sapiens; identical to SEQ ID NO: 25265

SEQ ID NO: 25272 - DNA, 201 bp, Homo sapiens
gctctggaagttgtggaaaggtgctggtgtggcccacagcattcagccattggatgaatgtaaagacaatcctggatgagcttgtccagagggcgcatgargtgcctgtactggcattttcagcttccatttgtttgatcccaacagcctacctactcttaaacttaagtttatcctgcatctttaactaaaactgagttg

SEQ ID NO: 25273 - DNA, 201 bp, Homo sapiens; identical to SEQ ID NO: 25239

SEQ ID NO: 25274 - DNA, 201 bp, Homo sapiens; identical to SEQ ID NO: 25224

SEQ ID NO: 25275 - DNA, 201 bp, Homo sapiens; identical to SEQ ID NO: 25226

SEQ ID NO: 25276 - DNA, 201 bp, Homo sapiens; identical to SEQ ID NO: 25227

SEQ ID NO: 25277 - DNA, 201 bp, Homo sapiens; identical to SEQ ID NO: 25228

SEQ ID NO: 25278 - DNA, 201 bp, Homo sapiens; identical to SEQ ID NO: 25229

SEQ ID NO: 25279 - DNA, 201 bp, Homo sapiens; identical to SEQ ID NO: 25230

SEQ ID NO: 25280 - DNA, 201 bp, Homo sapiens; identical to SEQ ID NO: 25231

SEQ ID NO: 25281 - DNA, 201 bp, Homo sapiens; identical to SEQ ID NO: 25234

SEQ ID NO: 25282 - DNA, 110 bp, Homo sapiens
acagaaagamacagcaaatggaaaaaagcattgcattgcaccaggatgtgtatgaaatggacttcaattttgctgctgatacagctgagctgttacattagctctggaag

SEQ ID NO: 25283 - DNA, 201 bp, Homo sapiens; identical to SEQ ID NO: 25235

SEQ ID NO: 25284 - DNA, 201 bp, Homo sapiens; identical to SEQ ID NO: 25267

SEQ ID NO: 25285 - DNA, 201 bp, Homo sapiens; identical to SEQ ID NO: 25224

SEQ ID NO: 25286 - DNA, 201 bp, Homo sapiens; identical to SEQ ID NO: 25225

SEQ ID NO: 25287 - DNA, 201 bp, Homo sapiens; identical to SEQ ID NO: 25226

SEQ ID NO: 25288 - DNA, 201 bp, Homo sapiens; identical to SEQ ID NO: 25229

SEQ ID NO: 25289 - DNA, 201 bp, Homo sapiens; identical to SEQ ID NO: 25228

SEQ ID NO: 25290 - DNA, 201 bp, Homo sapiens; identical to SEQ ID NO: 25227

SEQ ID NO: 25291 - DNA, 201 bp, Homo sapiens; identical to SEQ ID NO: 25231

SEQ ID NO: 25292 - DNA, 201 bp, Homo sapiens; identical to SEQ ID NO: 25230

SEQ ID NO: 25293 - DNA, 201 bp, Homo sapiens; identical to SEQ ID NO: 25248

SEQ ID NO: 25294 - DNA, 201 bp, Homo sapiens; identical to SEQ ID NO: 25234

SEQ ID NO: 25295 - DNA, 201 bp, Homo sapiens; identical to SEQ ID NO: 25251

SEQ ID NO: 25296 - DNA, 201 bp, Homo sapiens; identical to SEQ ID NO: 25235

SEQ ID NO: 25297 - DNA, 201 bp, Homo sapiens; identical to SEQ ID NO: 25253

SEQ ID NO: 25298 - DNA, 201 bp, Homo sapiens
ccctcgcagaggattaacacagtggctgaacaccaggaaggaactggcacttggagtccagacatctaaaatttggtcatagaaaagctccgtatgagtawctgggaattataaaaatacctgccaaagattcaggccttcctttggattttggcccctgcagtgttatggaactggtcagactcctcagcgtggcattcc

SEQ ID NO: 25299 - DNA, 201 bp, Homo sapiens; identical to SEQ ID NO: 25239

SEQ ID NO: 25300 - DNA, 201 bp, Homo sapiens
cttatgatgaaactacaagagtcaaagtttgatgtcattctggcagatgcccttaatccctgtggtgagctactggctgaactatttaacataccctttcygtacagtcttcgattctctgttggctacacatttgagaagaatggtggaggatttctgttccctccttcctatgtacctgttgttatgtcagaattaagt

SEQ ID NO: 25301 - DNA, 201 bp, Homo sapiens
cattcctgctggcctgcgtggcaactgtgatatttatcatcacaaaattttgcctgttttgtttccgaaagcttgccaaaaaaggaaagaagaagaaaagrgattagttatatcaaaagcctgaagtggaatgactgaaagatgggactcctcctttatttcagcatggagggttttaaatggaggatttcctttttcctg

SEQ ID NO: 25302 - DNA, 201 bp, Homo sapiens
aactacaagagtcaaagtttgatgtcattctggcagatgcccttaatccctgtggtgagctactggctgaactatttaacataccctttctgtacagtctycgattctctgttggctacacatttgagaagaatggtggaggatttctgttccctccttcctatgtacctgttgttatgtcagaattaagtgatcaaatga

SEQ ID NO: 25303 - DNA, 201 bp, Homo sapiens
atactcgactgtacaagtggttaccccagaatgaccttcttggtcatcccaaaaccaaagcttttataactcatggtggaaccaatggcatctatgaggcratctaccatgggatccctatggtgggcattcccttgtttgcggatcaacatgataacattgctcacatgaaagccaagggagcagccctcagtgtggaca

SEQ ID NO: 25304 - DNA, 201 bp, Homo sapiens
ggggaaggatagcatttggagatatacctaatgttaaatgacgagttactggatgcagcacgccaacatggcacatgtatacatatgtagctaacctgcaygttgtgcacatgtaccctaaaacttaaagtataatttaaaaaaagcaaaaaaaaaaaaatacaactcttttttttaaaccaggaaggaaaatgtgaacat

SEQ ID NO: 25305 - DNA, 201 bp, Homo sapiens
agacaaaatttattttccagggatttaatacgtactttagctggaattattctatgtcaatgatttttaagctatgaaaaatacaatggggggaaggatakcatttggagatatacctaatgttaaatgacgagttactggatgcagcacgccaacatggcacatgtatacatatgtagctaacctgcacgttgtgcacat

SEQ ID NO: 25306 - DNA, 201 bp, Homo sapiens
tgaggtgactgtgttgacatcttcggcttctactcttgtcaatgccagtaaatcatctgctattaaattagaagtttatcctacatctttaactaaaaatkatttggaagattctcttctgaaaattctcgatagatggatatatggtgtttcaaaaaatacattttggtcatatttttcacaattacaagaattgtgttg

SEQ ID NO: 25307 - DNA, 201 bp, Homo sapiens
acgccaacatggcacatgtatacatatgtagctaacctgcacgttgtgcacatgtaccctaaaacttaaagtataatttaaaaaaagcaaaaaaaaaaaaatacaactcttttttttaaaccaggaaggaaaatgtgaacatggaaacaacttctagtattggatctgaaaataaagtgtcatccaagccataaaaaaaaa

SEQ ID NO: 25308 - DNA, 201 bp, Homo sapiens
tttaaatggaggatttcctttttcctgtgacaaaacatcttttcacaacttaccttgttaagacaaaatttattttccagggatttaatacgtactttagytggaattattctatgtcaatgatttttaagctatgaaaaatacaatggggggaaggatagcatttggagatatacctaatgttaaatgacgagttactgg

SEQ ID NO: 25309 - DNA, 201 bp, Homo sapiens
cactctttggatgtgatagcattcctgctggcctgcgtggcaactgtgatatttatcatcacaaaattttgcctgttttgtttccgaaagcttgccaaaamaggaaagaagaagaaaagagattagttatatcaaaagcctgaagtggaatgactgaaagatgggactcctcctttatttcagcatggagggttttaaatg

SEQ ID NO: 25310 - DNA, 201 bp, Homo sapiens
atgcagttttgaataagaaacttatgatgaaactacaagagtcaaagtttgatgtcattctggcagatgcccttaatccctgtggtgagctactggctgarctatttaacataccctttctgtacagtcttcgattctctgttggctacacatttgagaagaatggtggaggatttctgttccctccttcctatgtacctg

SEQ ID NO: 25311 - DNA, 201 bp, Homo sapiens
gtttgtcatgcgccacaaaggagccaagcaccttcgagtcgcagctcacaacctcacctggatccagtaccactctttggatgtgatagcattcctgctgrcctgcgtggcaactgtgatatttatcatcacaaaattttgcctgttttgtttccgaaagcttgccaaaaaaggaaagaagaagaaaagagattagttata

SEQ ID NO: 25312 - DNA, 201 bp, Homo sapiens
cttctactcttgtcaatgccagtaaatcatctgctattaaattagaagtttatcctacatctttaactaaaaattatttggaagattctcttctgaaaatkctcgatagatggatatatggtgtttcaaaaaatacattttggtcatatttttcacaattacaagaattgtgttgggaatattatgactacagtaacaagc

SEQ ID NO: 25313 - DNA, 201 bp, Homo sapiens
atctttaactaaaaattatttggaagattctcttctgaaaattctcgatagatggatatatggtgtttcaaaaaatacattttggtcatatttttcacaaytacaagaattgtgttgggaatattatgactacagtaacaagctctgtaaagatgcagttttgaataagaaacttatgatgaaactacaagagtcaaagtt

SEQ ID NO: 25314 - DNA, 201 bp, Homo sapiens
ctgaaaattctcgatagatggatatatggtgtttcaaaaaatacattttggtcatatttttcacaattacaagaattgtgttgggaatattatgactacartaacaagctctgtaaagatgcagttttgaataagaaacttatgatgaaactacaagagtcaaagtttgatgtcattctggcagatgcccttaatccctgt

SEQ ID NO: 25315 - DNA, 201 bp, Homo sapiens
aaaattctcgatagatggatatatggtgtttcaaaaaatacattttggtcatatttttcacaattacaagaattgtgttgggaatattatgactacagtawcaagctctgtaaagatgcagttttgaataagaaacttatgatgaaactacaagagtcaaagtttgatgtcattctggcagatgcccttaatccctgtggt

SEQ ID NO: 25316 - DNA, 201 bp, Homo sapiens
aattacaagaattgtgttgggaatattatgactacagtaacaagctctgtaaagatgcagttttgaataagaaacttatgatgaaactacaagagtcaaartttgatgtcattctggcagatgcccttaatccctgtggtgagctactggctgaactatttaacataccctttctgtacagtcttcgattctctgttggct

SEQ ID NO: 25317 - DNA, 201 bp, Homo sapiens; identical to SEQ ID NO: 25309

SEQ ID NO: 25318 - DNA, 201 bp, Homo sapiens; identical to SEQ ID NO: 25300

SEQ ID NO: 25319 - DNA, 201 bp, Homo sapiens; identical to SEQ ID NO: 25301

SEQ ID NO: 25320 - DNA, 201 bp, Homo sapiens; identical to SEQ ID NO: 25302

SEQ ID NO: 25321 - DNA, 201 bp, Homo sapiens; identical to SEQ ID NO: 25310

SEQ ID NO: 25322 - DNA, 201 bp, Homo sapiens; identical to SEQ ID NO: 25303

SEQ ID NO: 25323 - DNA, 201 bp, Homo sapiens; identical to SEQ ID NO: 25311

SEQ ID NO: 25324 - DNA, 201 bp, Homo sapiens; identical to SEQ ID NO: 25312

SEQ ID NO: 25325 - DNA, 201 bp, Homo sapiens; identical to SEQ ID NO: 25313

SEQ ID NO: 25326 - DNA, 201 bp, Homo sapiens; identical to SEQ ID NO: 25314

SEQ ID NO: 25327 - DNA, 189 bp, Homo sapiens
ttattctaatccaaaagttacacacgaaagttactgagcttcattatgtttcacacattgtatttgaacacaacaacattaagaactccactcatagtatsaacattgttttgcaaatactcaaaatattttggcttcattttgagcagaatttttgttttactttagccaatgaaatcttcaagaatt

SEQ ID NO: 25328 - DNA, 201 bp, Homo sapiens; identical to SEQ ID NO: 25315

SEQ ID NO: 25329 - DNA, 201 bp, Homo sapiens; identical to SEQ ID NO: 25306

SEQ ID NO: 25330 - DNA, 201 bp, Homo sapiens
tttaaatggaggatttcctttttcctgtgacaaaacatcttttcacaacttaccttgttaagacaaaatttattttccagggatttaatacgtactttagytggaattattctatgtcaatgatttttaagctatgaaaaatacataatataaaaccttatgggcttatattgatatttattattctaatccaaaagttac

SEQ ID NO: 25331 - DNA, 201 bp, Homo sapiens; identical to SEQ ID NO: 25316

SEQ ID NO: 25332 - DNA, 201 bp, Homo sapiens
caatactcgactgtacaagtggataccccagaatgaccttctaggtcatccaaaaaccagagcttttataactcatggtggagccaatggcatctatgagrcaatctaccatgggatccctatggtgggcattccattgttttttgatcaacctgataatattgctcacatgaaggccaagggagcagctgttagagtgga

SEQ ID NO: 25333 - DNA, 201 bp, Homo sapiens
gaggaaagctgacatatggcttatgcgaaactcctggaattttaaatttcctcatccattcttaccaaatgttgattttgttggaggactccactgcaaasctgccaaacccctacctaaggaaatggaggagtttgtacagagctctggagaaaatggtgttgtggtgttttctctggggtcaatggtcagtaacatgac

SEQ ID NO: 25334 - DNA, 201 bp, Homo sapiens; identical to SEQ ID NO: 25332

SEQ ID NO: 25335 - DNA, 201 bp, Homo sapiens
aatggactacagttctgctgatacaactcagtttttactttagctctgggagttgtggaaaggtgctggtatgggccgcagaatacagcctttggatgaayatgaagacaatcctgaaagaacttgttcagagaggtcatgaggtgactgtactggcatcttcagcttccattctttttgatcccaacgactcatccactc

SEQ ID NO: 25336 - DNA, 201 bp, Homo sapiens
gagtcaagatttgacatcgtttttgcagatgcttatttaccctgtggtgagctgctggctgagctatttaacataccctttgtgtacagtcacagcttcastcctggctactcatttgaaaggcacagtggaggatttattttccctccttcctacgtacctgttgttatgtcaaaattaagtgatcaaatgactttcatg

SEQ ID NO: 25337 - DNA, 201 bp, Homo sapiens
cctttggatgaatatgaagacaatcctgaaagaacttgttcagagaggtcatgaggtgactgtactggcatcttcagcttccattctttttgatcccaackactcatccactcttaaacttgaagtttatcctacatctttaactaaaactgaatttgagaatatcatcatgcaattggttaagagattgtcagaaattca

SEQ ID NO: 25338 - DNA, 201 bp, Homo sapiens
tatgcgaaactcctggaattttaaatttcctcatccattcttaccaaatgttgattttgttggaggactccactgcaaacctgccaaacccctacctaagmaaatggaggagtttgtacagagctctggagaaaatggtgttgtggtgttttctctggggtcaatggtcagtaacatgacagaagaaagggccaacgtaat

SEQ ID NO: 25339 - DNA, 201 bp, Homo sapiens
tttttactttagctctgggagttgtggaaaggtgctggtatgggccgcagaatacagcctttggatgaatatgaagacaatcctgaaagaacttgttcagmgaggtcatgaggtgactgtactggcatcttcagcttccattctttttgatcccaacgactcatccactcttaaacttgaagtttatcctacatctttaac

SEQ ID NO: 25340 - DNA, 201 bp, Homo sapiens; identical to SEQ ID NO: 25333

SEQ ID NO: 25341 - DNA, 201 bp, Homo sapiens; identical to SEQ ID NO: 25332

SEQ ID NO: 25342 - DNA, 201 bp, Homo sapiens
aatggactacagttctgctgatacaactcagtttttactttagctctgggagttgtggaaaggtgctggtatgggccgcagaatacagcctttggatgaayatgaagacaatcctgaaagaacttgttcagagaggtcatgaggaagacccactacattatctgagacaatgaggaaagctgacatatggcttatgcgaaa

SEQ ID NO: 25343 - DNA, 201 bp, Homo sapiens; identical to SEQ ID NO: 25338

SEQ ID NO: 25344 - DNA, 201 bp, Homo sapiens
tttttactttagctctgggagttgtggaaaggtgctggtatgggccgcagaatacagcctttggatgaatatgaagacaatcctgaaagaacttgttcagmgaggtcatgaggaagacccactacattatctgagacaatgaggaaagctgacatatggcttatgcgaaactcctggaattttaaatttcctcatccattc

SEQ ID NO: 25345 - DNA, 201 bp, Homo sapiens
aggatgtgcaggaatatctcacctgtgtgcagaaaaatcaggcaggcagctagcgagtttgaccccacatgccctcttctgtttgtcttgcaccttgtctraggaccctaaatgaacgataaacagagatggtagctatgagtatacaaaaggtaaatccacttaatcacatacagaagagcaacaacaaactgcttacga

SEQ ID NO: 25346 - DNA, 201 bp, Homo sapiens
cggtctggcccacctgtatggaatcgcaggaagcgttaacgtgacgggagatgaggtgaagaaactggatgtgctatccaattccctggtgatcaacatgstccaatcctcctatagtacctgcgtcctggtctcagaagagaataaggacgccatcatcaccgccaaggagaagcgggggaaatacgtggtctgctttga

SEQ ID NO: 25347 - DNA, 201 bp, Homo sapiens
atccaattccctggtgatcaacatgctccaatcctcctatagtacctgcgtcctggtctcagaagagaataaggacgccatcatcaccgccaaggagaagmgggggaaatacgtggtctgctttgacccactggatggatcttccaatattgactgcctggcctccatcggaaccatctttgccatctatagaaagacctc

SEQ ID NO: 25348 - DNA, 201 bp, Homo sapiens
gcagctagcgagtttgaccccacatgccctcttctgtttgtcttgcaccttgtctaaggaccctaaatgaacgataaacagagatggtagctatgagtatrcaaaaggtaaatccacttaatcacatacagaagagcaacaacaaactgcttacgacaggtttggaagccacaggcgattctatggtcaatgtgaaggact

SEQ ID NO: 25349 - DNA, 201 bp, Homo sapiens
gaaattggtctctactgccaacctgggatagacttaccctcttggattttaggaattctccaagtcccggctgcttatgtacctatcgagccagattcacsaccgtcattatcaactcattttatgaaaaaatgtaatctaaagtatatccttgttgaaaaaaaacaaattaatgtaagtctggatgtttcaattgttttt

SEQ ID NO: 25350 - DNA, 201 bp, Homo sapiens
ccagcttccagtttactacacctacaagactgtggttaatgctgcttctgaattatcaaattttctgctgttacactgtgactttcaaggaattcgggaarttggtctctactgccaacctgggatagacttaccctcttggattttaggaattctccaagtcccggctgcttatgtacctatcgagccagattcaccacc

SEQ ID NO: 25351 - DNA, 201 bp, Homo sapiens
gaaattggtctctactgccaacctgggatagacttaccctcttggattttaggaattctccaagtcccggctgcttatgtacctatcgagccagattcacsaccgtcattatcaactcattttatgaaaaaatgtaatctaaagtatatccttgttgaaaaaaaacaaattaataaatttaaatcttttcatgaaacatta

SEQ ID NO: 25352 - DNA, 201 bp, Homo sapiens; identical to SEQ ID NO: 25350

SEQ ID NO: 25353 - DNA, 201 bp, Homo sapiens; identical to SEQ ID NO: 25351

SEQ ID NO: 25354 - DNA, 201 bp, Homo sapiens; identical to SEQ ID NO: 25350

SEQ ID NO: 25355 - DNA, 167 bp, Homo sapiens
atgttttgtttctggcttcacctctgaccttcgatccttctgttgtggaaatatttcttgctctatcaagtggtgcctctctgcttattgtaccaacttcygtcaagttgctcccatcaaaattagccagcgttctcttttcccatcatagagtgactgttttgcag

SEQ ID NO: 25356 - DNA, 201 bp, Homo sapiens
gcacctgcgagcaaggtccttccatagtgacgccccccaaggacatctggaatgtcactggtgcccaggtgtacttgagctgtgaggtcatcggaatcccracacctgtcctcatctggaacaaggtaaaaaggggtcactatggagttcaaaggacagaactcctgcctggtgaccgggacaacctggccattcagaccc

SEQ ID NO: 25357 - DNA, 201 bp, Homo sapiens
gagcgcgcgcgcatgccccgcgccgtgcgggggtggcggcgccggcagggggtactgcgcgccgggcatggaagtgcgtgaagagccgcaagtaggcggargggtaaagccggggcagcagccggcggtccgggtgtaagcggcgtgtgcgtgtgcaagagccgctacccggtgtgcggcagcgacggcaccacctacccg

SEQ ID NO: 25358 - DNA, 112 bp, Homo sapiens
agcactcaggtrtctcaggcccacggaggatttaatagatgaaaccctggatcgtctcgaagccgtggttgttaagaagtttaaatatattgaccggaaacggggagaaacc

SEQ ID NO: 25359 - DNA, 201 bp, Homo sapiens
cctggtgaccgggacaacctggccattcagacccggggtggcccagaaaagcatgaagtaactggctgggtgctggtatctcctctaagtaaggaagatgytggagaatatgagtgccatgcatccaattcccaaggacaggcttcagcatcagcaaaaattacagtggttgatgccttacatgaaataccagtgaaaaaa

SEQ ID NO: 25360 - DNA, 149 bp, Homo sapiens
acaatagaaacaagacaccaagatatttaattatcttgttgactcctgtaaaatagctaaacactcatcattcgcggtgcaatactcatagacataagttyctgaaacaatagtttgcatgcgtaaggcattcgcaccaaagaaatctg

SEQ ID NO: 25361 - DNA, 201 bp, Homo sapiens; identical to SEQ ID NO: 25356

SEQ ID NO: 25362 - DNA, 201 bp, Homo sapiens; identical to SEQ ID NO: 25357

SEQ ID NO: 25363 - DNA, 112 bp, Homo sapiens; identical to SEQ ID NO: 25358

SEQ ID NO: 25364 - DNA, 201 bp, Homo sapiens; identical to SEQ ID NO: 25359

SEQ ID NO: 25365 - DNA, 149 bp, Homo sapiens; identical to SEQ ID NO: 25360

SEQ ID NO: 25366 - DNA, 201 bp, Homo sapiens
ggagcggcctcaggaccgggacaacatggtgctcattgacagtgacgacgagagcgactccggcatggcctcccaggccgaccagaaggaggaggagctgmtgctcttctggacgtacatccaggccatgctgaccaacctggagagcctctcactggatcgtatctacaacatgctccgcatgtttgtggtgactgggcc

SEQ ID NO: 25367 - DNA, 201 bp, Homo sapiens
ccccatgtctcaccacgatgatggagctacagtgggacttggaatccagatgtgtgaaggatggagggttgaaggacaaggagtacgtgggttttgctgcyctccccaaccagctgcaccgcaagtctgtcaagaaggggtttgacttcacgctaatggtggcaggggagtcaggcctagggaaatccaccctcatcaaca

SEQ ID NO: 25368 - DNA, 201 bp, Homo sapiens
ctcaccaacctctatgaggatcgccaggtgccagaggccagtgctcgcttgacacagaccctggccattgagcgccggggcgtagagattgaggaaggggktgtgaaagtgaagctgacccttgtggacacacctggctttggggactcagtggactgctctgactgctggcttccggtggtgaaattcatcgaggagcaa

SEQ ID NO: 25369 - DNA, 201 bp, Homo sapiens
cgccttcagtcggcctcttgtccaatccccgcgccccacactgcccagcgccccccgggacctccgcgggtgccgccctcgcgcgggctagggggaggttytcccagcctgagtccgtagccccgccccggcgctggtcccgcccacccagacaccgcccacttcccggcccggggcctgcacaatctccgaccgcatcac

SEQ ID NO: 25370 - DNA, 201 bp, Homo sapiens
tcaagaaggggtttgacttcacgctaatggtggcaggggagtcaggcctagggaaatccaccctcatcaacagcctcttcctcaccaacctctatgaggaycgccaggtgccagaggccagtgctcgcttgacacagaccctggccattgagcgccggggcgtagagattgaggaagggggtgtgaaagtgaagctgaccc

SEQ ID NO: 25371 - DNA, 201 bp, Homo sapiens; identical to SEQ ID NO: 25368

SEQ ID NO: 25372 - DNA, 127 bp, Homo sapiens
gacaaggagtacgtgggttttgctgcyctccccaaccagctgcaccgcaagtctgtcaagaaggggtttgacttcacgctaatggtggcaggggagtcaggcctagggaaatccaccctcatcaaca

SEQ ID NO: 25373 - DNA, 201 bp, Homo sapiens; identical to SEQ ID NO: 25369

SEQ ID NO: 25374 - DNA, 201 bp, Homo sapiens; identical to SEQ ID NO: 25370

SEQ ID NO: 25375 - DNA, 201 bp, Homo sapiens; identical to SEQ ID NO: 25367

SEQ ID NO: 25376 - DNA, 201 bp, Homo sapiens; identical to SEQ ID NO: 25368

SEQ ID NO: 25377 - DNA, 201 bp, Homo sapiens; identical to SEQ ID NO: 25369

SEQ ID NO: 25378 - DNA, 201 bp, Homo sapiens; identical to SEQ ID NO: 25370

SEQ ID NO: 25379 - DNA, 201 bp, Homo sapiens
catctaaagcagtctttatatgcattccgaggccagagtaacattttgaactttggggggatatttgttcatcacttgggtagaagaggagcaaaaatacytctgttttctcttgccaaagtaagatgaagctattccaggttgagggatttttctttgcacggggttgattaatttctgcacagggagtgagattattaa

SEQ ID NO: 25380 - DNA, 201 bp, Homo sapiens
gttcataatgccggacagcgccgtcgttggggacgtgctggtgttaaccaaaccgttaggaacccaggttgctgtcaatgcccaccaatggctggataatsctgaaagatggaataaagtaaagatggtggtctccagagaagaggtggagctggcctatcaggaagccatgttcaatatggctaccctcaacagaactgc

SEQ ID NO: 25381 - DNA, 201 bp, Homo sapiens
ggaagcagctggtggcccccagctggccctggccctgctgccagcctcaggacagattgcgctgcttgagatggatgcccggctgcacgaggaccacctgragcgggtgttggaggctgctgcccaggctgcccgagatgtgcacaccctcttagatcgagtggtccggcagcatgtgcgtgaggcctctatcttgctggg

SEQ ID NO: 25382 - DNA, 201 bp, Homo sapiens
ggaggaagcagctggtggcccccagctggccctggccctgctgccagcctcaggacagattgcgctgcttgagatggatgcccggctgcacgaggaccacmtggagcgggtgttggaggctgctgcccaggctgcccgagatgtgcacaccctcttagatcgagtggtccggcagcatgtgcgtgaggcctctatcttgct

SEQ ID NO: 25383 - DNA, 201 bp, Homo sapiens
gggccgcggagagctgtagttccccggaaccggaagtgatggcggacctccggaaaccgtagattccgggcggtcggagccgccgggagctgtagttctcycgcggctcagagaagtaggcagagagcggacctggcggccgggcagcatggcggggctggagctcttgtcggaccagggctaccgggtggacgggcggcg

SEQ ID NO: 25384 - DNA, 201 bp, Homo sapiens
tcaccaggacaggaagtgacagcggaacgccggaaaccgcagatccacggaggtcagggccgcggagagctgtagttccccggaaccggaagtgatggcgsacctccggaaaccgtagattccgggcggtcggagccgccgggagctgtagttctcccgcggctcagagaagtaggcagagagcggacctggcggccgggc

SEQ ID NO: 25385 - DNA, 201 bp, Homo sapiens
tgtggaggaagcagctggtggcccccagctggccctggccctgctgccagcctcaggacagattgcgctgcttgagatggatgcccggctgcacgaggacsacctggagcgggtgttggaggctgctgcccaggctgcccgagatgtgcacaccctcttagatcgagtggtccggcagcatgtgcgtgaggcctctatctt

SEQ ID NO: 25386 - DNA, 201 bp, Homo sapiens
ctgtagttctcccgcggctcagagaagtaggcagagagcggacctggcggccgggcagcatggcggggctggagctcttgtcggaccagggctaccgggtrgacgggcggcgcgccggggagctgcgcaagatccaggcgcggatgggcgtgttcgcgcaggctgacggctcggcctacattgagcagggcaacaccaagg

SEQ ID NO: 25387 - DNA, 201 bp, Homo sapiens
gccatgtggaggaagcagctggtggcccccagctggccctggccctgctgccagcctcaggacagattgcgctgcttgagatggatgcccggctgcacgargaccacctggagcgggtgttggaggctgctgcccaggctgcccgagatgtgcacaccctcttagatcgagtggtccggcagcatgtgcgtgaggcctcta

SEQ ID NO: 25388 - DNA, 201 bp, Homo sapiens
agcagctggtggcccccagctggccctggccctgctgccagcctcaggacagattgcgctgcttgagatggatgcccggctgcacgaggaccacctggagsgggtgttggaggctgctgcccaggctgcccgagatgtgcacaccctcttagatcgagtggtccggcagcatgtgcgtgaggcctctatcttgctggggga

SEQ ID NO: 25389 - DNA, 201 bp, Homo sapiens
tagagagaagagcaggatccctgggtcttcccagttgagactgctggagctgagacacagtactctcaaagaaggtggggagctgcccagggcagaacccrctggtgttgatgactacccctggctcctctcaccttgtccctccactcccaacagaaaacaaagcagctgactgaggtggtcaaaggacttcggaccata

SEQ ID NO: 25390 - DNA, 201 bp, Homo sapiens
gagcaggatccctgggtcttcccagttgagactgctggagctgagacacagtactctcaaagaaggtggggagctgcccagggcagaacccgctggtgttsatgactacccctggctcctctcaccttgtccctccactcccaacagaaaacaaagcagctgactgaggtggtcaaaggacttcggaccataggggatctt

SEQ ID NO: 25391 - DNA, 201 bp, Homo sapiens; identical to SEQ ID NO: 25389

SEQ ID NO: 25392 - DNA, 201 bp, Homo sapiens; identical to SEQ ID NO: 25390

SEQ ID NO: 25393 - DNA, 201 bp, Homo sapiens; identical to SEQ ID NO: 25389

SEQ ID NO: 25394 - DNA, 201 bp, Homo sapiens; identical to SEQ ID NO: 25390

SEQ ID NO: 25395 - DNA, 201 bp, Homo sapiens
ttcggggttatatgcaccttattgggagcccagcacaagagggataatctgtggactcactcagttcaccaataaatgccatattgcttttgctgcattagaagctgtttgtttccaaactcgagagattttggatgccatgaatcgagactgtggaattccactcagtcatttgcaggtagatggaggaatgaccagcaa

SEQ ID NO: 25396 - DNA, 201 bp, Homo sapiens
gattttatttataagccacttgctgcatgaccctccaagtagacctgtggcttaaaataaagaaaatgcagcaaaaagaatgctatagaaatatttggtgttttttttttttttaaacatccacagttaaggttgggccagctacctttggggctgaccccctccattgccataacatcctgctccattccctctaagatg

SEQ ID NO: 25397 - DNA, 201 bp, Homo sapiens
aatcctgcttcttaacgtcaatttttaaaaatatcttaaaattactttgttttgcagtaaacagtgaagaaaagattgcctcctaattatttttttcaacragtgctgaataggaaaacatttatatcttactataaaaggttctgttttgtttggaattaatggtagctttattgactgttctgattgtgctgtttctga

SEQ ID NO: 25398 - DNA, 201 bp, Homo sapiens
aaatacgtatggaacaggatgtttcttactgtgtaatacaggccataagtgtgtattttctgatcatggccttctcaccacagtggcttacaaacttggcwgagacaaaccagtatattatgctttggaaggttctgtagctatagctggtgctgttattcgctggctaagagacaatcttggaattataaagacctcaga

SEQ ID NO: 25399 - DNA, 201 bp, Homo sapiens
ttaacgtcaatttttaaaaatatcttaaaattactttgttttgcagtaaacagtgaagaaaagattgcctcctaattatttttttcaacaagtgctgaatrggaaaacatttatatcttactataaaaggttctgttttgtttggaattaatggtagctttattgactgttctgattgtgctgtttctgaattattgaatc

SEQ ID NO: 25400 - DNA, 201 bp, Homo sapiens
ttttggaattccaatggaaattcttccaaatgtccggagttcttctgagatctatggcctaatgaaagctggggccttggaaggtgtgccaatatctgggygtttaggggaccagtctgctgcattggtgggacaaatgtgcttccagattggacaagccaaaaatacgtatggaacaggatgtttcttactgtgtaatac

SEQ ID NO: 25401 - DNA, 201 bp, Homo sapiens
cgagagattttggatgccatgaatcgagactgtggaattccactcagtcatttgcaggtagatggaggaatgaccagcaacaaaattcttatgcagctacragcagacattctgtatataccagtagtgaagccctcaatgcccgaaaccactgcactgggtgctgctatggaggcaggggctgcagaaggagtcggcgta

SEQ ID NO: 25402 - DNA, 201 bp, Homo sapiens
accttattgggagcccagcacaagagggataatctgtggactcactcagttcaccaataaatgccatattgcttttgctgcattagaagctgtttgtttcyaaactcgagagattttggatgccatgaatcgagactgtggaattccactcagtcatttgcaggtagatggaggaatgaccagcaacaaaattcttatgca

SEQ ID NO: 25403 - DNA, 201 bp, Homo sapiens
aatctgtggactcactcagttcaccaataaatgccatattgcttttgctgcattagaagctgtttgtttccaaactcgagagattttggatgccatgaatygagactgtggaattccactcagtcatttgcaggtagatggaggaatgaccagcaacaaaattcttatgcagctacaagcagacattctgtatataccagt

SEQ ID NO: 25404 - DNA, 201 bp, Homo sapiens
cgccgccgtcacccaggaaaccggccgcaatcgccggccgacctgaagctggtttcgtggcagcctcaaagaaggcagttttggggccattggtgggggcrgtggaccagggcaccagttcgacgagctttttggttttcaattcaaaaacagctgaactacttagtcatcatcaagtagaaataaaacaagagtccccaa

SEQ ID NO: 25405 - DNA, 201 bp, Homo sapiens
caggaggagtcaatggaggtgtccactgtacagatgtaacaaatgcaagtaggactatgcttttcaacattcattctttggaatgggataaacaactctgygaattttttggaattccaatggaaattcttccaaatgtccggagttcttctgagatctatggcctaatgaaagctggggccttggaaggtgtgccaatat

SEQ ID NO: 25406 - DNA, 201 bp, Homo sapiens
ccaagagaaggatgggtggaacaggaccctaaggaaattctacattctgtctatgagtgtatagagaaaacatgtgagaaacttggacagctcaatattgrtatttccaacataaaagctattggtgtcagcaaccagagggaaaccactgtagtctgggacaagataactggagagcctctctacaatgctgtggtgtgg

SEQ ID NO: 25407 - DNA, 201 bp, Homo sapiens
gctggtttcgtggcagcctcaaagaaggcagttttggggccattggtgggggcggtggaccagggcaccagttcgacgagctttttggttttcaattcaaraacagctgaactacttagtcatcatcaagtagaaataaaacaagagtccccaagagaaggatgggtggaacaggaccctaaggaaattctacattctgtc

SEQ ID NO: 25408 - DNA, 201 bp, Homo sapiens
attttggatgccatgaatcgagactgtggaattccactcagtcatttgcaggtagatggaggaatgaccagcaacaaaattcttatgcagctacaagcagwcattctgtatataccagtagtgaagccctcaatgcccgaaaccactgcactgggtgctgctatggaggcaggggctgcagaaggagtcggcgtatggagt

SEQ ID NO: 25409 - DNA, 201 bp, Homo sapiens
gcgcggcctcgatctctggactcgtcacctgcccctccccctcccgccgccgtcacccaggaaaccggccgcaatcgccggccgacctgaagctggtttcrtggcagcctcaaagaaggcagttttggggccattggtgggggcggtggaccagggcaccagttcgacgagctttttggttttcaattcaaaaacagctga

SEQ ID NO: 25410 - DNA, 201 bp, Homo sapiens
cggccgcaatcgccggccgacctgaagctggtttcgtggcagcctcaaagaaggcagttttggggccattggtgggggcggtggaccagggcaccagttcsacgagctttttggttttcaattcaaaaacagctgaactacttagtcatcatcaagtagaaataaaacaagagtccccaagagaaggatgggtggaacagg

SEQ ID NO: 25411 - DNA, 201 bp, Homo sapiens
ttttggggccattggtgggggcggtggaccagggcaccagttcgacgagctttttggttttcaattcaaaaacagctgaactacttagtcatcatcaagtrgaaataaaacaagagtccccaagagaaggatgggtggaacaggaccctaaggaaattctacattctgtctatgagtgtatagagaaaacatgtgagaaac

SEQ ID NO: 25412 - DNA, 201 bp, Homo sapiens
gctacaagcagacattctgtatataccagtagtgaagccctcaatgcccgaaaccactgcactgggtgctgctatggaggcaggggctgcagaaggagtcrgcgtatggagtctcgaacccgaggatttgtctgccgtcacgatggagcggtttgaacctcagattaatgctgaggaaagtgaaattcgttattctacatg

SEQ ID NO: 25413 - DNA, 201 bp, Homo sapiens
tgtaacaaatgcaagtaggactatgcttttcaacattcattctttggaatgggataaacaactctgcgaattttttggaattccaatggaaattcttccamatgtccggagttcttctgagatctatggcctaatgaaagctggggccttggaaggtgtgccaatatctgggtgtttaggggaccagtctgctgcattggt

SEQ ID NO: 25414 - DNA, 201 bp, Homo sapiens
attggacaagccaaaaatacgtatggaacaggatgtttcttactgtgtaatacaggccataagtgtgtattttctgatcatggccttctcaccacagtggyttacaaacttggcagagacaaaccagtatattatgctttggaaggttctgtagctatagctggtgctgttattcgctggctaagagacaatcttggaatt

SEQ ID NO: 25415 - DNA, 201 bp, Homo sapiens
tcggcgtatggagtctcgaacccgaggatttgtctgccgtcacgatggagcggtttgaacctcagattaatgctgaggaaagtgaaattcgttattctacrtggaagaaagctgtgatgaagtcaatgggttgggttacaactcaatctccagaaagtggtattccataaaacctaccaaatcatggattcccaagatgtg

SEQ ID NO: 25416 - DNA, 201 bp, Homo sapiens
atgaaagggtatgatgtgattgctcaagctcagtcaggtactggcaagacagccacatttgctatttccatcctgcaactggcccccaccagagaactggytccacagatccaaaaggtaattctggcacttggagactatatgggagcaacttgtcatgcctgcattggtggaacaaatgttcaaactgaaatgcaaaaa

SEQ ID NO: 25417 - DNA, 201 bp, Homo sapiens
ggtatgatgtgattgctcaagctcagtcaggtactggcaagacagccacatttgctatttccatcctgcaactggcccccaccagagaactggctccacakatccaaaaggtaattctggcacttggagactatatgggagcaacttgtcatgcctgcattggtggaacaaatgttcaaactgaaatgcaaaaactgcagg

SEQ ID NO: 25418 - DNA, 201 bp, Homo sapiens
tctatgcttacgattttgagaagtcttctgctattcagcagagagctattattacctgtatgaaaggatccaaaaggtaattctggcacttggagactatktgggagcaacttgtcatgcctgcattggtggaacaaatgttcaaactgaaatgcaaaaactgcaggctgaagcaccacatattgttgttggtacacttgg

SEQ ID NO: 25419 - DNA, 201 bp, Homo sapiens
tatgatgtgattgctcaagctcagtcaggtactggcaagacagccacatttgctatttccatcctgcaacagttggagatggcccccaccagagaactggytccacagatccaaaaggtaattctggcacttggagactatatgggagcaacttgtcatgcctgcattggtggaacaaatgttcaaactgaaatgcaaaaa

SEQ ID NO: 25420 - DNA, 201 bp, Homo sapiens
tgattgctcaagctcagtcaggtactggcaagacagccacatttgctatttccatcctgcaacagttggagatggcccccaccagagaactggctccacakatccaaaaggtaattctggcacttggagactatatgggagcaacttgtcatgcctgcattggtggaacaaatgttcaaactgaaatgcaaaaactgcagg

SEQ ID NO: 25421 - DNA, 201 bp, Homo sapiens
gccccgggtcggccgctgccctgggccctgcctgccctgctgggccccatgctggcctgcctgctggccggcttcctgcgatgatggctcacttctgcacrcagcctctctgttgcctcagctctccaagttccaggcttccggtccttagccttcccaggtgggactttaggcatgattaaaatatggacatatttttgg

SEQ ID NO: 25422 - DNA, 199 bp, Homo sapiens
ctgtcggggctccctcccgtcgcggctccgctataaaacccaggccggcaggatcgctgcacccgcggcggcctcctcggtgcgcgacccccggctcasaggactctttgctgtcccgcaagatgcggatgctgctggcgctcctggccctctccgcggcgcggccatcggccagtgcagagtcacactggtgctacga

SEQ ID NO: 25423 - DNA, 201 bp, Homo sapiens
cctgcttggtgccagtcaagtggggtggaaactgccagaaggaccgccagtcccccatcaacatcgtcaccaccaaggcaaaggtggacaaaaaactgggrcgcttcttcttctctggctacgataagaagcaaacgtggactgtccaaaataacgggcactcagtgatgatgttgctggagaacaaggccagcatttctg

SEQ ID NO: 25424 - DNA, 201 bp, Homo sapiens
tccggggccccgggtcggccgctgccctgggccctgcctgccctgctgggccccatgctggcctgcctgctggccggcttcctgcgatgatggctcacttmtgcacgcagcctctctgttgcctcagctctccaagttccaggcttccggtccttagccttcccaggtgggactttaggcatgattaaaatatggacatat

SEQ ID NO: 25425 - DNA, 201 bp, Homo sapiens; identical to SEQ ID NO: 25421

SEQ ID NO: 25426 - DNA, 201 bp, Homo sapiens
ccagtgcagtgccagtcaagtggggtggaaactgccagaaggaccgccagtcccccatcaacatcgtcaccaccaaggcaaaggtggacaaaaaactgggrcgcttcttcttctctggctacgataagaagcaaacgtggactgtccaaaataacgggcactcagtgatgatgttgctggagaacaaggccagcatttctg

SEQ ID NO: 25427 - DNA, 201 bp, Homo sapiens; identical to SEQ ID NO: 25424

SEQ ID NO: 25428 - DNA, 201 bp, Homo sapiens
ctgaagggcgacggcccagtgcagggcatcatcaatttcgagcagaaggaaagtaatggaccagtgaaggtgtggggaagcattaaaggactgactgaagrcctgcatggattccatgttcatgagtttggagataatacagcaggctgtaccagtgcaggtcctcactttaatcctctatccagaaaacacggtgggcca

SEQ ID NO: 25429 - DNA, 201 bp, Homo sapiens
ctttaatcctctatccagaaaacacggtgggccaaaggatgaagagaggcatgttggagacttgggcaatgtgactgctgacaaagatggtgtggccgatrtgtctattgaagattctgtgatctcactctcaggagaccattgcatcattggccgcacactggtggtccatgaaaaagcagatgacttgggcaaaggtgg

SEQ ID NO: 25430 - DNA, 201 bp, Homo sapiens
acactggtggtccatgaaaaagcagatgacttgggcaaaggtggaaatgaagaaagtacaaagacaggaaacgctggaagtcgtttggcttgtggtgtaaytgggatcgcccaataaacattcccttggatgtagtctgaggccccttaactcatctgttatcctgctagctgtagaaatagttgctttaaagtacctgta

SEQ ID NO: 25431 - DNA, 201 bp, Homo sapiens
ccgcacactggtggtccatgaaaaagcagatgacttgggcaaaggtggaaatgaagaaagtacaaagacaggaaacgctggaagtcgtttggcttgtggtrtaattgggatcgcccaataaacattcccttggatgtagtctgaggccccttaactcatctgttatcctgctagctgtagaaatagttgctttaaagtacc

SEQ ID NO: 25432 - DNA, 201 bp, Homo sapiens
cattggccgcacactggtggtccatgaaaaagcagatgacttgggcaaaggtggaaatgaagaaagtacaaagacaggaaacgctggaagtcgtttggctygtggtgtaattgggatcgcccaataaacattcccttggatgtagtctgaggccccttaactcatctgttatcctgctagctgtagaaatagttgctttaa

SEQ ID NO: 25433 - DNA, 201 bp, Homo sapiens
catcattggccgcacactggtggtccatgaaaaagcagatgacttgggcaaaggtggaaatgaagaaagtacaaagacaggaaacgctggaagtcgtttgrcttgtggtgtaattgggatcgcccaataaacattcccttggatgtagtctgaggccccttaactcatctgttatcctgctagctgtagaaatagttgctt

SEQ ID NO: 25434 - DNA, 201 bp, Homo sapiens
  misc_feature (1)...(201): n = A,T,C or G
tgcaggtcctcactttaatcctctatccagaaaacacggtgggccaaaggatgaagagaggcatgttggagacttgggcaatgtgactgctgacaaagatngtgtggccgatgtgtctattgaagattctgtgatctcactctcaggagaccattgcatcattggccgcacactggtggtccatgaaaaagcagatgactt

SEQ ID NO: 25435 - DNA, 201 bp, Homo sapiens
  misc_feature (1)...(201): n = A,T,C or G
gcaggtcctcactttaatcctctatccagaaaacacggtgggccaaaggatgaagagaggcatgttggagacttgggcaatgtgactgctgacaaagatgntgtggccgatgtgtctattgaagattctgtgatctcactctcaggagaccattgcatcattggccgcacactggtggtccatgaaaaagcagatgacttg

SEQ ID NO: 25436 - DNA, 201 bp, Homo sapiens
tcaggagaccattgcatcattggccgcacactggtggtccatgaaaaagcagatgacttgggcaaaggtggaaatgaagaaagtacaaagacaggaaacgstggaagtcgtttggcttgtggtgtaattgggatcgcccaataaacattcccttggatgtagtctgaggccccttaactcatctgttatcctgctagctgt

SEQ ID NO: 25437 - DNA, 201 bp, Homo sapiens
tggagacttgggcaatgtgactgctgacaaagatggtgtggccgatgtgtctattgaagattctgtgatctcactctcaggagaccattgcatcattggcsgcacactggtggtccatgaaaaagcagatgacttgggcaaaggtggaaatgaagaaagtacaaagacaggaaacgctggaagtcgtttggcttgtggtgt

SEQ ID NO: 25438 - DNA, 201 bp, Homo sapiens
ggtttgcgtcgtagtctcctgcagcgtctggggtttccgttgcagtcctcggaaccaggacctcggcgtggcctagcgagttatggcgacgaaggccgtgkgcgtgctgaagggcgacggcccagtgcagggcatcatcaatttcgagcagaaggaaagtaatggaccagtgaaggtgtggggaagcattaaaggactgac

SEQ ID NO: 25439 - DNA, 201 bp, Homo sapiens
tgggccaaaggatgaagagaggcatgttggagacttgggcaatgtgactgctgacaaagatggtgtggccgatgtgtctattgaagattctgtgatctcastctcaggagaccattgcatcattggccgcacactggtggtccatgaaaaagcagatgacttgggcaaaggtggaaatgaagaaagtacaaagacaggaaa

SEQ ID NO: 25440 - DNA, 201 bp, Homo sapiens
atccagaaaacacggtgggccaaaggatgaagagaggcatgttggagacttgggcaatgtgactgctgacaaagatggtgtggccgatgtgtctattgaarattctgtgatctcactctcaggagaccattgcatcattggccgcacactggtggtccatgaaaaagcagatgacttgggcaaaggtggaaatgaagaaag

SEQ ID NO: 25441 - DNA, 201 bp, Homo sapiens
aaagatggtgtggccgatgtgtctattgaagattctgtgatctcactctcaggagaccattgcatcattggccgcacactggtggtccatgaaaaagcagwtgacttgggcaaaggtggaaatgaagaaagtacaaagacaggaaacgctggaagtcgtttggcttgtggtgtaattgggatcgcccaataaacattccct

SEQ ID NO: 25442 - DNA, 201 bp, Homo sapiens
ggtttccgttgcagtcctcggaaccaggacctcggcgtggcctagcgagttatggcgacgaaggccgtgtgcgtgctgaagggcgacggcccagtgcaggscatcatcaatttcgagcagaaggaaagtaatggaccagtgaaggtgtggggaagcattaaaggactgactgaaggcctgcatggattccatgttcatgag

SEQ ID NO: 25443 - DNA, 201 bp, Homo sapiens
tccagaaaacacggtgggccaaaggatgaagagaggcatgttggagacttgggcaatgtgactgctgacaaagatggtgtggccgatgtgtctattgaagrttctgtgatctcactctcaggagaccattgcatcattggccgcacactggtggtccatgaaaaagcagatgacttgggcaaaggtggaaatgaagaaagt

SEQ ID NO: 25444 - DNA, 201 bp, Homo sapiens
agatggtgtggccgatgtgtctattgaagattctgtgatctcactctcaggagaccattgcatcattggccgcacactggtggtccatgaaaaagcagatsacttgggcaaaggtggaaatgaagaaagtacaaagacaggaaacgctggaagtcgtttggcttgtggtgtaattgggatcgcccaataaacattcccttg

SEQ ID NO: 25445 - DNA, 201 bp, Homo sapiens
gggtttccgttgcagtcctcggaaccaggacctcggcgtggcctagcgagttatggcgacgaaggccgtgtgcgtgctgaagggcgacggcccagtgcagrgcatcatcaatttcgagcagaaggaaagtaatggaccagtgaaggtgtggggaagcattaaaggactgactgaaggcctgcatggattccatgttcatga

SEQ ID NO: 25446 - DNA, 201 bp, Homo sapiens
acacggtgggccaaaggatgaagagaggcatgttggagacttgggcaatgtgactgctgacaaagatggtgtggccgatgtgtctattgaagattctgtgwtctcactctcaggagaccattgcatcattggccgcacactggtggtccatgaaaaagcagatgacttgggcaaaggtggaaatgaagaaagtacaaagac

SEQ ID NO: 25447 - DNA, 201 bp, Homo sapiens
cctcggaaccaggacctcggcgtggcctagcgagttatggcgacgaaggccgtgtgcgtgctgaagggcgacggcccagtgcagggcatcatcaatttcgrgcagaaggaaagtaatggaccagtgaaggtgtggggaagcattaaaggactgactgaaggcctgcatggattccatgttcatgagtttggagataataca

SEQ ID NO: 25448 - DNA, 201 bp, Homo sapiens
ggtgtggccgatgtgtctattgaagattctgtgatctcactctcaggagaccattgcatcattggccgcacactggtggtccatgaaaaagcagatgacthgggcaaaggtggaaatgaagaaagtacaaagacaggaaacgctggaagtcgtttggcttgtggtgtaattgggatcgcccaataaacattcccttggatg

SEQ ID NO: 25449 - DNA, 201 bp, Homo sapiens
gtggtccatgaaaaagcagatgacttgggcaaaggtggaaatgaagaaagtacaaagacaggaaacgctggaagtcgtttggcttgtggtgtaattgggaycgcccaataaacattcccttggatgtagtctgaggccccttaactcatctgttatcctgctagctgtagaaatagttgctttaaagtacctgtagtgaga

SEQ ID NO: 25450 - DNA, 201 bp, Homo sapiens
tcctcggaaccaggacctcggcgtggcctagcgagttatggcgacgaaggccgtgtgcgtgctgaagggcgacggcccagtgcagggcatcatcaatttcragcagaaggaaagtaatggaccagtgaaggtgtggggaagcattaaaggactgactgaaggcctgcatggattccatgttcatgagtttggagataatac

SEQ ID NO: 25451 - DNA, 201 bp, Homo sapiens
gttcatgagtttggagataatacagcaggctgtaccagtgcaggtcctcactttaatcctctatccagaaaacacggtgggccaaaggatgaagagaggcrtgttggagacttgggcaatgtgactgctgacaaagatggtgtggccgatgtgtctattgaagattctgtgatctcactctcaggagaccattgcatcatt

SEQ ID NO: 25452 - DNA, 201 bp, Homo sapiens
agggcatcatcaatttcgagcagaaggaaagtaatggaccagtgaaggtgtggggaagcattaaaggactgactgaaggcctgcatggattccatgttcakgagtttggagataatacagcaggctgtaccagtgcaggtcctcactttaatcctctatccagaaaacacggtgggccaaaggatgaagagaggcatgttg

SEQ ID NO: 25453 - DNA, 201 bp, Homo sapiens
aaagcagatgacttgggcaaaggtggaaatgaagaaagtacaaagacaggaaacgctggaagtcgtttggcttgtggtgtaattgggatcgcccaataaayattcccttggatgtagtctgaggccccttaactcatctgttatcctgctagctgtagaaatagttgctttaaagtacctgtagtgagaaactgatttatg

SEQ ID NO: 25454 - DNA, 201 bp, Homo sapiens
gtgtgcgtgctgaagggcgacggcccagtgcagggcatcatcaatttcgagcagaaggaaagtaatggaccagtgaaggtgtggggaagcattaaaggackgactgaaggcctgcatggattccatgttcatgagtttggagataatacagcaggctgtaccagtgcaggtcctcactttaatcctctatccagaaaacac

SEQ ID NO: 25455 - DNA, 201 bp, Homo sapiens
gtcgtagtctcctgcagcgtctggggtttccgttgcagtcctcggaaccaggacctcggcgtggcctagcgagttatggcgacgaaggccgtgtgcgtgcwgaagggcgacggcccagtgcagggcatcatcaatttcgagcagaaggaaagtaatggaccagtgaaggtgtggggaagcattaaaggactgactgaaggc

SEQ ID NO: 25456 - DNA, 201 bp, Homo sapiens
tgcatcattggccgcacactggtggtccatgaaaaagcagatgacttgggcaaaggtggaaatgaagaaagtacaaagacaggaaacgctggaagtcgttyggcttgtggtgtaattgggatcgcccaataaacattcccttggatgtagtctgaggccccttaactcatctgttatcctgctagctgtagaaatagttgc

SEQ ID NO: 25457 - DNA, 201 bp, Homo sapiens
tctcaggagaccattgcatcattggccgcacactggtggtccatgaaaaagcagatgacttgggcaaaggtggaaatgaagaaagtacaaagacaggaaahgctggaagtcgtttggcttgtggtgtaattgggatcgcccaataaacattcccttggatgtagtctgaggccccttaactcatctgttatcctgctagct

SEQ ID NO: 25458 - DNA, 201 bp, Homo sapiens
gattctgtgatctcactctcaggagaccattgcatcattggccgcacactggtggtccatgaaaaagcagatgacttgggcaaaggtggaaatgaagaaartacaaagacaggaaacgctggaagtcgtttggcttgtggtgtaattgggatcgcccaataaacattcccttggatgtagtctgaggccccttaactcatc

SEQ ID NO: 25459 - DNA, 201 bp, Homo sapiens
ggccgtgtgcgtgctgaagggcgacggcccagtgcagggcatcatcaatttcgagcagaaggaaagtaatggaccagtgaaggtgtggggaagcattaaargactgactgaaggcctgcatggattccatgttcatgagtttggagataatacagcaggctgtaccagtgcaggtcctcactttaatcctctatccagaaa

SEQ ID NO: 25460 - DNA, 201 bp, Homo sapiens
cgtgtgcgtgctgaagggcgacggcccagtgcagggcatcatcaatttcgagcagaaggaaagtaatggaccagtgaaggtgtggggaagcattaaaggastgactgaaggcctgcatggattccatgttcatgagtttggagataatacagcaggctgtaccagtgcaggtcctcactttaatcctctatccagaaaaca

SEQ ID NO: 25461 - DNA, 201 bp, Homo sapiens
gcatcattggccgcacactggtggtccatgaaaaagcagatgacttgggcaaaggtggaaatgaagaaagtacaaagacaggaaacgctggaagtcgtttsgcttgtggtgtaattgggatcgcccaataaacattcccttggatgtagtctgaggccccttaactcatctgttatcctgctagctgtagaaatagttgct

SEQ ID NO: 25462 - DNA, 201 bp, Homo sapiens
cgcacactggtggtccatgaaaaagcagatgacttgggcaaaggtggaaatgaagaaagtacaaagacaggaaacgctggaagtcgtttggcttgtggtgkaattgggatcgcccaataaacattcccttggatgtagtctgaggccccttaactcatctgttatcctgctagctgtagaaatagttgctttaaagtacct

SEQ ID NO: 25463 - DNA, 201 bp, Homo sapiens
gggcatcatcaatttcgagcagaaggaaagtaatggaccagtgaaggtgtggggaagcattaaaggactgactgaaggcctgcatggattccatgttcatragtttggagataatacagcaggctgtaccagtgcaggtcctcactttaatcctctatccagaaaacacggtgggccaaaggatgaagagaggcatgttgg

SEQ ID NO: 25464 - DNA, 201 bp, Homo sapiens
tctatccagaaaacacggtgggccaaaggatgaagagaggcatgttggagacttgggcaatgtgactgctgacaaagatggtgtggccgatgtgtctattraagattctgtgatctcactctcaggagaccattgcatcattggccgcacactggtggtccatgaaaaagcagatgacttgggcaaaggtggaaatgaaga

SEQ ID NO: 25465 - DNA, 201 bp, Homo sapiens
gactgaaggcctgcatggattccatgttcatgagtttggagataatacagcaggctgtaccagtgcaggtcctcactttaatcctctatccagaaaacacrgtgggccaaaggatgaagagaggcatgttggagacttgggcaatgtgactgctgacaaagatggtgtggccgatgtgtctattgaagattctgtgatctc

SEQ ID NO: 25466 - DNA, 201 bp, Homo sapiens
gcatggattccatgttcatgagtttggagataatacagcaggctgtaccagtgcaggtcctcactttaatcctctatccagaaaacacggtgggccaaagkatgaagagaggcatgttggagacttgggcaatgtgactgctgacaaagatggtgtggccgatgtgtctattgaagattctgtgatctcactctcaggaga

SEQ ID NO: 25467 - DNA, 201 bp, Homo sapiens
gctgaagggcgacggcccagtgcagggcatcatcaatttcgagcagaaggaaagtaatggaccagtgaaggtgtggggaagcattaaaggactgactgaargcctgcatggattccatgttcatgagtttggagataatacagcaggctgtaccagtgcaggtcctcactttaatcctctatccagaaaacacggtgggcc

SEQ ID NO: 25468 - DNA, 201 bp, Homo sapiens
gagataatacagcaggctgtaccagtgcaggtcctcactttaatcctctatccagaaaacacggtgggccaaaggatgaagagaggcatgttggagacttsggcaatgtgactgctgacaaagatggtgtggccgatgtgtctattgaagattctgtgatctcactctcaggagaccattgcatcattggccgcacactgg

SEQ ID NO: 25469 - DNA, 201 bp, Homo sapiens
ctatccagaaaacacggtgggccaaaggatgaagagaggcatgttggagacttgggcaatgtgactgctgacaaagatggtgtggccgatgtgtctattgragattctgtgatctcactctcaggagaccattgcatcattggccgcacactggtggtccatgaaaaagcagatgacttgggcaaaggtggaaatgaagaa

SEQ ID NO: 25470 - DNA, 201 bp, Homo sapiens
tggagataatacagcaggctgtaccagtgcaggtcctcactttaatcctctatccagaaaacacggtgggccaaaggatgaagagaggcatgttggagacktgggcaatgtgactgctgacaaagatggtgtggccgatgtgtctattgaagattctgtgatctcactctcaggagaccattgcatcattggccgcacact

SEQ ID NO: 25471 - DNA, 201 bp, Homo sapiens
agataatacagcaggctgtaccagtgcaggtcctcactttaatcctctatccagaaaacacggtgggccaaaggatgaagagaggcatgttggagacttgsgcaatgtgactgctgacaaagatggtgtggccgatgtgtctattgaagattctgtgatctcactctcaggagaccattgcatcattggccgcacactggt

SEQ ID NO: 25472 - DNA, 201 bp, Homo sapiens
aatacagcaggctgtaccagtgcaggtcctcactttaatcctctatccagaaaacacggtgggccaaaggatgaagagaggcatgttggagacttgggcartgtgactgctgacaaagatggtgtggccgatgtgtctattgaagattctgtgatctcactctcaggagaccattgcatcattggccgcacactggtggtc

SEQ ID NO: 25473 - DNA, 201 bp, Homo sapiens
aagaaagtacaaagacaggaaacgctggaagtcgtttggcttgtggtgtaattgggatcgcccaataaacattcccttggatgtagtctgaggccccttarctcatctgttatcctgctagctgtagaaatagttgctttaaagtacctgtagtgagaaactgatttatgatcacttggaagatttgtatagttttataaa

SEQ ID NO: 25474 - DNA, 201 bp, Homo sapiens
ggcatgttggagacttgggcaatgtgactgctgacaaagatggtgtggccgatgtgtctattgaagattctgtgatctcactctcaggagaccattgcatsattggccgcacactggtggtccatgaaaaagcagatgacttgggcaaaggtggaaatgaagaaagtacaaagacaggaaacgctggaagtcgtttggctt

SEQ ID NO: 25475 - DNA, 201 bp, Homo sapiens
tcactttaatcctctatccagaaaacacggtgggccaaaggatgaagagaggcatgttggagacttgggcaatgtgactgctgacaaagatggtgtggccratgtgtctattgaagattctgtgatctcactctcaggagaccattgcatcattggccgcacactggtggtccatgaaaaagcagatgacttgggcaaagg

SEQ ID NO: 25476 - DNA, 201 bp, Homo sapiens
ggtgctggtttgcgtcgtagtctcctgcagcgtctggggtttccgttgcagtcctcggaaccaggacctcggcgtggcctagcgagttatggcgacgaagdccgtgtgcgtgctgaagggcgacggcccagtgcagggcatcatcaatttcgagcagaaggaaagtaatggaccagtgaaggtgtggggaagcattaaagg

SEQ ID NO: 25477 - DNA, 201 bp, Homo sapiens
tgcgtgctgaagggcgacggcccagtgcagggcatcatcaatttcgagcagaaggaaagtaatggaccagtgaaggtgtggggaagcattaaaggactgaytgaaggcctgcatggattccatgttcatgagtttggagataatacagcaggctgtaccagtgcaggtcctcactttaatcctctatccagaaaacacggt

SEQ ID NO: 25478 - DNA, 201 bp, Homo sapiens
aggcatgttggagacttgggcaatgtgactgctgacaaagatggtgtggccgatgtgtctattgaagattctgtgatctcactctcaggagaccattgcaycattggccgcacactggtggtccatgaaaaagcagatgacttgggcaaaggtggaaatgaagaaagtacaaagacaggaaacgctggaagtcgtttggct

SEQ ID NO: 25479 - DNA, 201 bp, Homo sapiens
gtgctggtttgcgtcgtagtctcctgcagcgtctggggtttccgttgcagtcctcggaaccaggacctcggcgtggcctagcgagttatggcgacgaaggycgtgtgcgtgctgaagggcgacggcccagtgcagggcatcatcaatttcgagcagaaggaaagtaatggaccagtgaaggtgtggggaagcattaaagga

SEQ ID NO: 25480 - DNA, 201 bp, Homo sapiens
catgttggagacttgggcaatgtgactgctgacaaagatggtgtggccgatgtgtctattgaagattctgtgatctcactctcaggagaccattgcatcaytggccgcacactggtggtccatgaaaaagcagatgacttgggcaaaggtggaaatgaagaaagtacaaagacaggaaacgctggaagtcgtttggcttgt

SEQ ID NO: 25481 - DNA, 201 bp, Homo sapiens
tgcgtcgtagtctcctgcagcgtctggggtttccgttgcagtcctcggaaccaggacctcggcgtggcctagcgagttatggcgacgaaggccgtgtgcgwgctgaagggcgacggcccagtgcagggcatcatcaatttcgagcagaaggaaagtaatggaccagtgaaggtgtggggaagcattaaaggactgactgaa

SEQ ID NO: 25482 - DNA, 201 bp, Homo sapiens; identical to SEQ ID NO: 25428

SEQ ID NO: 25483 - DNA, 201 bp, Homo sapiens
ctgaggccccttaactcatctgttatcctgctagctgtagaaatgtatcctgataaacattaaacactgtaatcttaaaagtgtaattgtgtgactttttmagagttgctttaaagtacctgtagtgagaaactgatttatgatcacttggaagatttgtatagttttataaaactcagttaaaatgtctgtttcaatgac

SEQ ID NO: 25484 - DNA, 201 bp, Homo sapiens
ggcttgtggtgtaattgggatcgcccaataaacattcccttggatgtagtctgaggccccttaactcatctgttatcctgctagctgtagaaatgtatcckgataaacattaaacactgtaatcttaaaagtgtaattgtgtgactttttcagagttgctttaaagtacctgtagtgagaaactgatttatgatcacttgg

SEQ ID NO: 25485 - DNA, 201 bp, Homo sapiens; identical to SEQ ID NO: 25429

SEQ ID NO: 25486 - DNA, 201 bp, Homo sapiens
acactggtggtccatgaaaaagcagatgacttgggcaaaggtggaaatgaagaaagtacaaagacaggaaacgctggaagtcgtttggcttgtggtgtaaytgggatcgcccaataaacattcccttggatgtagtctgaggccccttaactcatctgttatcctgctagctgtagaaatgtatcctgataaacattaaac

SEQ ID NO: 25487 - DNA, 201 bp, Homo sapiens
ccgcacactggtggtccatgaaaaagcagatgacttgggcaaaggtggaaatgaagaaagtacaaagacaggaaacgctggaagtcgtttggcttgtggtrtaattgggatcgcccaataaacattcccttggatgtagtctgaggccccttaactcatctgttatcctgctagctgtagaaatgtatcctgataaacatt

SEQ ID NO: 25488 - DNA, 201 bp, Homo sapiens
cattggccgcacactggtggtccatgaaaaagcagatgacttgggcaaaggtggaaatgaagaaagtacaaagacaggaaacgctggaagtcgtttggctygtggtgtaattgggatcgcccaataaacattcccttggatgtagtctgaggccccttaactcatctgttatcctgctagctgtagaaatgtatcctgata

SEQ ID NO: 25489 - DNA, 201 bp, Homo sapiens
catcattggccgcacactggtggtccatgaaaaagcagatgacttgggcaaaggtggaaatgaagaaagtacaaagacaggaaacgctggaagtcgtttgrcttgtggtgtaattgggatcgcccaataaacattcccttggatgtagtctgaggccccttaactcatctgttatcctgctagctgtagaaatgtatcctg

SEQ ID NO: 25490 - DNA, 201 bp, Homo sapiens; identical to SEQ ID NO: 25434
  misc_feature (1)...(201): n = A,T,C or G

SEQ ID NO: 25491 - DNA, 201 bp, Homo sapiens; identical to SEQ ID NO: 25435
  misc_feature (1)...(201): n = A,T,C or G

SEQ ID NO: 25492 - DNA, 201 bp, Homo sapiens; identical to SEQ ID NO: 25436

SEQ ID NO: 25493 - DNA, 201 bp, Homo sapiens; identical to SEQ ID NO: 25437

SEQ ID NO: 25494 - DNA, 201 bp, Homo sapiens; identical to SEQ ID NO: 25438

SEQ ID NO: 25495 - DNA, 201 bp, Homo sapiens; identical to SEQ ID NO: 25439

SEQ ID NO: 25496 - DNA, 201 bp, Homo sapiens; identical to SEQ ID NO: 25440

SEQ ID NO: 25497 - DNA, 201 bp, Homo sapiens; identical to SEQ ID NO: 25443

SEQ ID NO: 25498 - DNA, 201 bp, Homo sapiens; identical to SEQ ID NO: 25442

SEQ ID NO: 25499 - DNA, 201 bp, Homo sapiens; identical to SEQ ID NO: 25441

SEQ ID NO: 25500 - DNA, 201 bp, Homo sapiens; identical to SEQ ID NO: 25446

SEQ ID NO: 25501 - DNA, 201 bp, Homo sapiens; identical to SEQ ID NO: 25445

SEQ ID NO: 25502 - DNA, 201 bp, Homo sapiens; identical to SEQ ID NO: 25444

SEQ ID NO: 25503 - DNA, 201 bp, Homo sapiens; identical to SEQ ID NO: 25447

SEQ ID NO: 25504 - DNA, 201 bp, Homo sapiens; identical to SEQ ID NO: 25448

SEQ ID NO: 25505 - DNA, 201 bp, Homo sapiens
gtggtccatgaaaaagcagatgacttgggcaaaggtggaaatgaagaaagtacaaagacaggaaacgctggaagtcgtttggcttgtggtgtaattgggaycgcccaataaacattcccttggatgtagtctgaggccccttaactcatctgttatcctgctagctgtagaaatgtatcctgataaacattaaacactgta

SEQ ID NO: 25506 - DNA, 201 bp, Homo sapiens; identical to SEQ ID NO: 25450

SEQ ID NO: 25507 - DNA, 201 bp, Homo sapiens; identical to SEQ ID NO: 25451

SEQ ID NO: 25508 - DNA, 201 bp, Homo sapiens; identical to SEQ ID NO: 25452

SEQ ID NO: 25509 - DNA, 201 bp, Homo sapiens
tgggatcgcccaataaacattcccttggatgtagtctgaggccccttaactcatctgttatcctgctagctgtagaaatgtatcctgataaacattaaacmctgtaatcttaaaagtgtaattgtgtgactttttcagagttgctttaaagtacctgtagtgagaaactgatttatgatcacttggaagatttgtatagtt

SEQ ID NO: 25510 - DNA, 201 bp, Homo sapiens
aaagcagatgacttgggcaaaggtggaaatgaagaaagtacaaagacaggaaacgctggaagtcgtttggcttgtggtgtaattgggatcgcccaataaayattcccttggatgtagtctgaggccccttaactcatctgttatcctgctagctgtagaaatgtatcctgataaacattaaacactgtaatcttaaaagtg

SEQ ID NO: 25511 - DNA, 201 bp, Homo sapiens; identical to SEQ ID NO: 25454

SEQ ID NO: 25512 - DNA, 201 bp, Homo sapiens; identical to SEQ ID NO: 25455

SEQ ID NO: 25513 - DNA, 201 bp, Homo sapiens
tgcatcattggccgcacactggtggtccatgaaaaagcagatgacttgggcaaaggtggaaatgaagaaagtacaaagacaggaaacgctggaagtcgttyggcttgtggtgtaattgggatcgcccaataaacattcccttggatgtagtctgaggccccttaactcatctgttatcctgctagctgtagaaatgtatcc

SEQ ID NO: 25514 - DNA, 201 bp, Homo sapiens; identical to SEQ ID NO: 25457

SEQ ID NO: 25515 - DNA, 201 bp, Homo sapiens; identical to SEQ ID NO: 25458

SEQ ID NO: 25516 - DNA, 201 bp, Homo sapiens; identical to SEQ ID NO: 25459

SEQ ID NO: 25517 - DNA, 201 bp, Homo sapiens; identical to SEQ ID NO: 25460

SEQ ID NO: 25518 - DNA, 201 bp, Homo sapiens
gcatcattggccgcacactggtggtccatgaaaaagcagatgacttgggcaaaggtggaaatgaagaaagtacaaagacaggaaacgctggaagtcgtttsgcttgtggtgtaattgggatcgcccaataaacattcccttggatgtagtctgaggccccttaactcatctgttatcctgctagctgtagaaatgtatcct

SEQ ID NO: 25519 - DNA, 201 bp, Homo sapiens
cgcacactggtggtccatgaaaaagcagatgacttgggcaaaggtggaaatgaagaaagtacaaagacaggaaacgctggaagtcgtttggcttgtggtgkaattgggatcgcccaataaacattcccttggatgtagtctgaggccccttaactcatctgttatcctgctagctgtagaaatgtatcctgataaacatta

SEQ ID NO: 25520 - DNA, 201 bp, Homo sapiens; identical to SEQ ID NO: 25463

SEQ ID NO: 25521 - DNA, 201 bp, Homo sapiens; identical to SEQ ID NO: 25464

SEQ ID NO: 25522 - DNA, 201 bp, Homo sapiens; identical to SEQ ID NO: 25465

SEQ ID NO: 25523 - DNA, 201 bp, Homo sapiens; identical to SEQ ID NO: 25466

SEQ ID NO: 25524 - DNA, 201 bp, Homo sapiens; identical to SEQ ID NO: 25467

SEQ ID NO: 25525 - DNA, 201 bp, Homo sapiens; identical to SEQ ID NO: 25468

SEQ ID NO: 25526 - DNA, 201 bp, Homo sapiens; identical to SEQ ID NO: 25469

SEQ ID NO: 25527 - DNA, 201 bp, Homo sapiens; identical to SEQ ID NO: 25470

SEQ ID NO: 25528 - DNA, 201 bp, Homo sapiens; identical to SEQ ID NO: 25471

SEQ ID NO: 25529 - DNA, 201 bp, Homo sapiens; identical to SEQ ID NO: 25472

SEQ ID NO: 25530 - DNA, 201 bp, Homo sapiens
aagaaagtacaaagacaggaaacgctggaagtcgtttggcttgtggtgtaattgggatcgcccaataaacattcccttggatgtagtctgaggccccttarctcatctgttatcctgctagctgtagaaatgtatcctgataaacattaaacactgtaatcttaaaagtgtaattgtgtgactttttcagagttgctttaa

SEQ ID NO: 25531 - DNA, 201 bp, Homo sapiens; identical to SEQ ID NO: 25474

SEQ ID NO: 25532 - DNA, 201 bp, Homo sapiens; identical to SEQ ID NO: 25475

SEQ ID NO: 25533 - DNA, 201 bp, Homo sapiens; identical to SEQ ID NO: 25476

SEQ ID NO: 25534 - DNA, 201 bp, Homo sapiens; identical to SEQ ID NO: 25477

SEQ ID NO: 25535 - DNA, 201 bp, Homo sapiens; identical to SEQ ID NO: 25478

SEQ ID NO: 25536 - DNA, 201 bp, Homo sapiens
attcccttggatgtagtctgaggccccttaactcatctgttatcctgctagctgtagaaatgtatcctgataaacattaaacactgtaatcttaaaagtgwaattgtgtgactttttcagagttgctttaaagtacctgtagtgagaaactgatttatgatcacttggaagatttgtatagttttataaaactcagttaaa

SEQ ID NO: 25537 - DNA, 201 bp, Homo sapiens; identical to SEQ ID NO: 25479

SEQ ID NO: 25538 - DNA, 201 bp, Homo sapiens; identical to SEQ ID NO: 25480

SEQ ID NO: 25539 - DNA, 201 bp, Homo sapiens; identical to SEQ ID NO: 25481

SEQ ID NO: 25540 - DNA, 159 bp, Homo sapiens
cttccagattggagcagacaccaatgcctatcatatttggaagcgggacagtggtgacwgtattgcagcaactggcaaatgagtttcccttccctgtcaatataatcctgagcaacccatggctatttgaaccacttataagcaggtttatggagagaa

SEQ ID NO: 25541 - DNA, 201 bp, Homo sapiens
gtcaagttcaatgtcatccccccagtggcccaggccacagtcaacttccggattcaccctggacagacagtccaagaggtcctagaactcacgaagaacaytgtggctgataacagagtccagttccatgtgttgagtgcctttgaccccctccccgtcagcccttctgatgacaaggccttgggctaccagctgctccgc

SEQ ID NO: 25542 - DNA, 201 bp, Homo sapiens
cccatggctatttgaaccacttataagcaggtttatggagagaaatcccttaaccaatgcaataatcaggaccaccacggcactcaccatattcaaagcargggtcaagttcaatgtcatccccccagtggcccaggccacagtcaacttccggattcaccctggacagacagtccaagaggtcctagaactcacgaagaa

SEQ ID NO: 25543 - DNA, 201 bp, Homo sapiens
caggggtcaagttcaatgtcatccccccagtggcccaggccacagtcaacttccggattcaccctggacagacagtccaagaggtcctagaactcacgaaraacattgtggctgataacagagtccagttccatgtgttgagtgcctttgaccccctccccgtcagcccttctgatgacaaggccttgggctaccagctgc

SEQ ID NO: 25544 - DNA, 201 bp, Homo sapiens
gcccctttctccctggtgttgcaactggagaggagtcggttcctgaagaacagatgggagagtgctggggccaggtaccctgggagagaggagggaaatgmaatccggcacaggggctgcggggataggggcagtcaggaggcggcagtgcggtgcaagggcccccccacgcggccagctgtggaacttccaccacgactc

SEQ ID NO: 25545 - DNA, 201 bp, Homo sapiens
ggagaggagtcggttcctgaagaacagatgggagagtgctggggccaggtaccctgggagagaggagggaaatgaaatccggcacaggggctgcggggatmggggcagtcaggaggcggcagtgcggtgcaagggcccccccacgcggccagctgtggaacttccaccacgactccctgtcctctcctgagcccgcccatc

SEQ ID NO: 25546 - DNA, 185 bp, Homo sapiens
gagatagggtctcactctgttttccaggctagagagcaatagtgcaatcacaccttactgcagcctcagtctcctgggctcaggygatcctcccacctcagactcccgagtagctgggaccacaggagggcaccaccatacctggttttaaaactttttgtagagatggggtctcactatgttgc

SEQ ID NO: 25547 - DNA, 201 bp, Homo sapiens
cccacctcagactcccgagtagctgggaccacaggagggcaccaccatacctggttttaaaactttttgtagagatggggtctcactatgttgcccaggcyggtttcaaccttctgggctcaagtgatcctctcacctcagcctcccatagtgctgggattacaggcatgagccacacctagcccaatttagtgaatttta

SEQ ID NO: 25548 - DNA, 156 bp, Homo sapiens
gagatagggtctcactctgttttccaggctagagagcaatagtgcaatcacacctyactgcagcctcagtctcctgggctcaggtgatcctcccacctcagactcccgagtagctgggaccacaggagggcaccaccatacctggttttaaaactt

SEQ ID NO: 25549 - DNA, 201 bp, Homo sapiens
gccaggtaccctgggagagaggagggaaatgaaatccggcacaggggctgcggggataggggcagtcaggaggcggcagtgcggtgcaagggcccccccamgcggccagctgtggaacttccaccacgactccctgtcctctcctgagcccgcccatcacgtgtagaagctcagatgctgggcgccaggagggcggcttcc

SEQ ID NO: 25550 - DNA, 155 bp, Homo sapiens
gagatagggtctcactctgttttccaggctagagagcaatagtgcaatcacaccytactgcagcctcagtctcctgggctcaggtgatcctcccacctcagactcccgagtagctgggaccacaggagggcaccaccatacctggttttaaaact

SEQ ID NO: 25551 - DNA, 201 bp, Homo sapiens
aggtaccctgggagagaggagggaaatgaaatccggcacaggggctgcggggataggggcagtcaggaggcggcagtgcggtgcaagggcccccccacgcrgccagctgtggaacttccaccacgactccctgtcctctcctgagcccgcccatcacgtgtagaagctcagatgctgggcgccaggagggcggcttcctgg

SEQ ID NO: 25552 - DNA, 201 bp, Homo sapiens
cagatgggagagtgctggggccaggtaccctgggagagaggagggaaatgaaatccggcacaggggctgcggggataggggcagtcaggaggcggcagtgyggtgcaagggcccccccacgcggccagctgtggaacttccaccacgactccctgtcctctcctgagcccgcccatcacgtgtagaagctcagatgctggg

SEQ ID NO: 25553 - DNA, 201 bp, Homo sapiens
cctcagactcccgagtagctgggaccacaggagggcaccaccatacctggttttaaaactttttgtagagatggggtctcactatgttgcccaggctggtytcaaccttctgggctcaagtgatcctctcacctcagcctcccatagtgctgggattacaggcatgagccacacctagcccaatttagtgaattttaagaa

SEQ ID NO: 25554 - DNA, 201 bp, Homo sapiens
gctcaggtgatcctcccacctcagactcccgagtagctgggaccacaggagggcaccaccatacctggttttaaaactttttgtagagatggggtctcacyatgttgcccaggctggtttcaaccttctgggctcaagtgatcctctcacctcagcctcccatagtgctgggattacaggcatgagccacacctagcccaa

SEQ ID NO: 25555 - DNA, 187 bp, Homo sapiens
gagatagggtctcactctgttttccaggctagagagcaatagtgcaatcacaccttactgcagcctcagtctcctgggctcaggtgrtcctcccacctcagactcccgagtagctgggaccacaggagggcaccaccatacctggttttaaaactttttgtagagatggggtctcactatgttgccc

SEQ ID NO: 25556 - DNA, 201 bp, Homo sapiens
gattacaggcatgagccacacctagcccaatttagtgaattttaagaagcattttaaaaaaatgaaaactaaaacatagaggatatccgaggttctaaggktaagaatttctttatgaaacctgcttggaacacagttgtaaacaaatggactgatttatgatggaaggcacgtttcttgctgcagatcatggtctgaagt

SEQ ID NO: 25557 - DNA, 201 bp, Homo sapiens
gaaacctgcttggaacacagttgtaaacaaatggactgatttatgatggaaggcacgtttcttgctgcagatcatggtctgaagtttgaaagccaccagcytagagggttctgaaaacttctccttcctaacacagctgaaggaaaaggggtgggtaggggcggaggcacagggacatctccaggtttggacttttccaac

SEQ ID NO: 25558 - DNA, 201 bp, Homo sapiens
gggtacttgggcatgtggaggcccctttctccctggtgttgcaactggagaggagtcggttcctgaagaacagatgggagagtgctggggccaggtaccckgggagagaggagggaaatgaaatccggcacaggggctgcggggataggggcagtcaggaggcggcagtgcggtgcaagggcccccccacgcggccagctg

SEQ ID NO: 25559 - DNA, 201 bp, Homo sapiens
tggtcaaggccctggcccttggagcctccacagtgctggcccttggagcctccacagtgatgacgggctccttgctggccgctaccacggaggcctctggygagtacttcttctcagacagggtgtggctcaggaagtaccggggcatgggctcgctggatgccatggagaagagcagcagcacccagaaatgatacttca

SEQ ID NO: 25560 - DNA, 201 bp, Homo sapiens
ttcgggcgctggctgatcgagggaggccctctggtggtgctcctggacgtgggtgcctcagcttgggccctggagcgctggaagggagagctctgggatayctgcaacatcggagtgccgtggtacgaccgcgaggccaacgacgctgtcctctttggctttctgaccacctggttcctgggtgagttcctggcacagagt

SEQ ID NO: 25561 - DNA, 201 bp, Homo sapiens
gtgccggtgccgtggacttctacaacaacctggagaacttcaacgtggacaaggaagcaggggagaggcagatctaccaccgatactgcatggaaagggcrgcagcccactgcgctcacgtcttcactactgtgtcccagatcaccgccatcgaggcacagcacttgctcaagaggaaaccagatattgtgacccccaatg

SEQ ID NO: 25562 - DNA, 201 bp, Homo sapiens
ggagcgagatgttctggctcctctaggctagctggttcttcaaagatctcgatggttcctcataaatatgtaaatattgtgggggcgtggcgggactttakgccccgccctcccaccgaggctgcgctggaagacgggcgtccggaactcctgggtccattcccaatgtctcctggctcctcctccttttgctcagcccca

SEQ ID NO: 25563 - DNA, 201 bp, Homo sapiens
ccctacactttggccaagcaagaggtggtagaaccacttggctgctcattccttctggaggacacacagtctcagtccagatgccttcctgtctttctggycctttctggaccagatcctactcttcctttctaaatctgagatctccctccagggaatccgcctgcagaggacagagctggctgtcttcccccaccccta

SEQ ID NO: 25564 - DNA, 201 bp, Homo sapiens
ctaagtccgccccaccacactccccgcctgtcctgcctctctgctccagagagaggatgcagaggggtgctgctcctaaacccccgctccagatctgcackgggtgtggccccgcagtgcccccacccagtccgccaaacactccaccccctccagctccagtttccaagttcctgcactccagaatccacaaagccgtgc

SEQ ID NO: 25565 - DNA, 201 bp, Homo sapiens
ccgccccaccacactccccgcctgtcctgcctctctgctccagagagaggatgcagaggggtgctgctcctaaacccccgctccagatctgcactgggtgyggccccgcagtgcccccacccagtccgccaaacactccaccccctccagctccagtttccaagttcctgcactccagaatccacaaagccgtgcctttct

SEQ ID NO: 25566 - DNA, 166 bp, Homo sapiens
caaactgtgccctgccttcagctttggtgaaagggagggcccctcatgtgtgctgtgctgtgtctgcaccgcttggtttgcagttgagaggggagggcagraggggtgtgattggagtgtgtccggagatgagatgaaaaaaatacatctatatttaagaatccca

SEQ ID NO: 25567 - DNA, 201 bp, Homo sapiens
ccaagctgtgcgcaaacagctttgggacacggccaacacggtgaaggaaaagttcgggaggaagctttatgaatccttactggttgggagccttcccgacrtgaacaagatgctggataaggaagacttcactatgatgaagagagccatctttgcaacgcagcggcagtctttcccccctgtgtgcacccacaatatgct

SEQ ID NO: 25568 - DNA, 201 bp, Homo sapiens
ttctttatcgccggccgctatgagttctccaacaagggtgctgacgtcttcctggaggcattggctcggctcaactatctgctcagagtgaacggcagcgrgcagacagtggttgccttcttcatcatgccagcgcggaccaacaatttcaacgtggaaaccctcaaaggccaagctgtgcgcaaacagctttgggacacg

SEQ ID NO: 25569 - DNA, 201 bp, Homo sapiens
tgaggacgaggaggatccccggaacgggccgctggaggaagacggcgagcgctacgatgaggacgaggaggccgccaaggaccggcgcaacatccgtgcascagagtggccgcgccgagcgtcctgcacctcctccaccagcggcagcaagcgcaactctgtggacacggccacctccagctcactcagcaccccgagcga

SEQ ID NO: 25570 - DNA, 201 bp, Homo sapiens
cactgcgctcacgtcttcactactgtgtcccagatcaccgccatcgaggcacagcacttgctcaagaggaaaccagatattgtgacccccaatgggctgartgtgaagaagttttctgccatgcatgagttccagaacctccatgctcagagcaaggctcgaatccaggagtttgtgcggggccatttttatgggcatctg

SEQ ID NO: 25571 - DNA, 201 bp, Homo sapiens
tcttgcaagcttcccgtcgggcaccagctactcggccccgcaccctacctggtgcattccctagacacctccggggtccctacctggagatccccggagcmccccttcctgcgccagccatgcctttaaaccgcactttgtccatgtcctcactgccaggactggaggactgggaggatgaattcgacctggagaacgcag

SEQ ID NO: 25572 - DNA, 127 bp, Homo sapiens
agtcctagcggaaacggaaacgcgcgrggagcgagatgttctggctcctctaggctagctggttcttcaaagatctcgatggttcctcataaatatgtaaatattgtgggggcgtggcgggacttta

SEQ ID NO: 25573 - DNA, 201 bp, Homo sapiens
gtttcactgcaggggcgccagtgggctcagtgacgctgcggcctccttctgcctaggtcccaacgcttcggggcaggggtgcggtcttgcaataggaagcygagcgtcttgcaagcttcccgtcgggcaccagctactcggccccgcaccctacctggtgcattccctagacacctccggggtccctacctggagatcccc

SEQ ID NO: 25574 - DNA, 201 bp, Homo sapiens
gcgtgggccaatggcgctggctggggggggcggccaccgcctcctggcggctgcgaggtttcactgcaggggcgccagtgggctcagtgacgctgcggcckccttctgcctaggtcccaacgcttcggggcaggggtgcggtcttgcaataggaagccgagcgtcttgcaagcttcccgtcgggcaccagctactcggccc

SEQ ID NO: 25575 - DNA, 201 bp, Homo sapiens
cgagcgctacgatgaggacgaggaggccgccaaggaccggcgcaacatccgtgcaccagagtggccgcgccgagcgtcctgcacctcctccaccagcggcmgcaagcgcaactctgtggacacggccacctccagctcactcagcaccccgagcgagcccctcagccccaccagctccctgggcgaggagcgtaactaagt

SEQ ID NO: 25576 - DNA, 201 bp, Homo sapiens
ggcgaggagcgtaactaagtccgccccaccacactccccgcctgtcctgcctctctgctccagagagaggatgcagaggggtgctgctcctaaacccccgmtccagatctgcactgggtgtggccccgcagtgcccccacccagtccgccaaacactccaccccctccagctccagtttccaagttcctgcactccagaat

SEQ ID NO: 25577 - DNA, 201 bp, Homo sapiens
tgggtggcatctacacggtgctgcagacgaaggcgaaggtgacaggggacgaatggggcgacaactacttcctggtggggccgtacacggagcagggcgtsaggacccaggtggaactgctggaggcccccaccccggccctgaagaggacactggattccatgaacagcaagggctgcaaggtgtatttcgggcgctggc

SEQ ID NO: 25578 - DNA, 201 bp, Homo sapiens
cggccgaggcggggccgggacacagcgactccaacccgttccaccaatgaggacacgcggaaatccccgcccccgggcgtgggccaatggcgctggctggkgggggcggccaccgcctcctggcggctgcgaggtttcactgcaggggcgccagtgggctcagtgacgctgcggcctccttctgcctaggtcccaacgctt

SEQ ID NO: 25579 - DNA, 201 bp, Homo sapiens
ccactcgtttccgtaaagcgcagcggcaagctccgccccctggaggtctcacggccgaggcggggccgggacacagcgactccaacccgttccaccaatgrggacacgcggaaatccccgcccccgggcgtgggccaatggcgctggctggggggggcggccaccgcctcctggcggctgcgaggtttcactgcaggggcg

SEQ ID NO: 25580 - DNA, 201 bp, Homo sapiens
ggccagcctcggtgccaccgtcgccctcgctgtcacgacactccagcccgcaccagagtgaggacgaggaggatccccggaacgggccgctggaggaagayggcgagcgctacgatgaggacgaggaggccgccaaggaccggcgcaacatccgtgcaccagagtggccgcgccgagcgtcctgcacctcctccaccagcg

SEQ ID NO: 25581 - DNA, 201 bp, Homo sapiens
gccacatggcgctgtccaaggcctttccagagcacttcacctacgagcccaacgaggcggatgcggcccaggggtaccgctacccacggccagcctcggtrccaccgtcgccctcgctgtcacgacactccagcccgcaccagagtgaggacgaggaggatccccggaacgggccgctggaggaagacggcgagcgctacg

SEQ ID NO: 25582 - DNA, 201 bp, Homo sapiens
gctgttctttgagtaaccacacgtcctccacgctcctttcctctttatcccaccctcctcctcctccccactttgaggcctccagctccagattgacagarctgaaggccactcgtttccgtaaagcgcagcggcaagctccgccccctggaggtctcacggccgaggcggggccgggacacagcgactccaacccgttcc

SEQ ID NO: 25583 - DNA, 201 bp, Homo sapiens
gcggaaccgcacggagcgcctctccgaccttctggactggaaatacctaggccggtactatatgtctgcgcgccacatggcgctgtccaaggcctttccasagcacttcacctacgagcccaacgaggcggatgcggcccaggggtaccgctacccacggccagcctcggtgccaccgtcgccctcgctgtcacgacactc

SEQ ID NO: 25584 - DNA, 201 bp, Homo sapiens
tagcaaccatcttcaccacccatgccacgctgctggggcgctacctgtgtgccggtgccgtggacttctacaacaacctggagaacttcaacgtggacaargaagcaggggagaggcagatctaccaccgatactgcatggaaagggcggcagcccactgcgctcacgtcttcactactgtgtcccagatcaccgccatcg

SEQ ID NO: 25585 - DNA, 201 bp, Homo sapiens
ggggccatttttatgggcatctggacttcaacttggacaagaccttatacttctttatcgccggccgctatgagttctccaacaagggtgctgacgtcttyctggaggcattggctcggctcaactatctgctcagagtgaacggcagcgagcagacagtggttgccttcttcatcatgccagcgcggaccaacaatttca

SEQ ID NO: 25586 - DNA, 201 bp, Homo sapiens
tctcctccacaagccccctgctccctgtggactatgaggagtttgtccgtggctgtcaccttggagtcttcccctcctactatgagccttggggctacacrccggctgagtgcacggttatgggaatccccagtatctccaccaatctctccggcttcggctgcttcatggaggaacacatcgcagacccctcagcttacg

SEQ ID NO: 25587 - DNA, 201 bp, Homo sapiens
tgatcgagggaggccctctggtggtgctcctggacgtgggtgcctcagcttgggccctggagcgctggaagggagagctctgggatacctgcaacatcggrgtgccgtggtacgaccgcgaggccaacgacgctgtcctctttggctttctgaccacctggttcctgggtgagttcctggcacagagtgaggagaagccac

SEQ ID NO: 25588 - DNA, 201 bp, Homo sapiens
atttcgggcgctggctgatcgagggaggccctctggtggtgctcctggacgtgggtgcctcagcttgggccctggagcgctggaagggagagctctgggayacctgcaacatcggagtgccgtggtacgaccgcgaggccaacgacgctgtcctctttggctttctgaccacctggttcctgggtgagttcctggcacaga

SEQ ID NO: 25589 - DNA, 201 bp, Homo sapiens
gccccccgtgtggcttacaaattctacagcatacagagcaggccacgctcaggcccggcatgcgggccaccaagttctggaaaccacgtggtgtccctgcraatggggcgatcaagtccagagccggggcactttcagagtttgaaggtaactgagagcagatggtcctccatttcaactccagaagtggggctctgggag

SEQ ID NO: 25590 - DNA, 201 bp, Homo sapiens
caagggctgcaaggtgtatttcgggcgctggctgatcgagggaggccctctggtggtgctcctggacgtgggtgcctcagcttgggccctggagcgctggragggagagctctgggatacctgcaacatcggagtgccgtggtacgaccgcgaggccaacgacgctgtcctctttggctttctgaccacctggttcctggg

SEQ ID NO: 25591 - DNA, 201 bp, Homo sapiens
cccaggtggaactgctggaggcccccaccccggccctgaagaggacactggattccatgaacagcaagggctgcaaggtgtatttcgggcgctggctgatsgagggaggccctctggtggtgctcctggacgtgggtgcctcagcttgggccctggagcgctggaagggagagctctgggatacctgcaacatcggagtgc

SEQ ID NO: 25592 - DNA, 201 bp, Homo sapiens
tcctctttggctttctgaccacctggttcctgggtgagttcctggcacagagtgaggagaagccacatgtggttgctcacttccatgagtggttggcaggygttggactctgcctgtgtcgtgcccggcgactgcctgtagcaaccatcttcaccacccatgccacgctgctggggcgctacctgtgtgccggtgccgtgg

SEQ ID NO: 25593 - DNA, 201 bp, Homo sapiens; identical to SEQ ID NO: 25571

SEQ ID NO: 25594 - DNA, 127 bp, Homo sapiens; identical to SEQ ID NO: 25572

SEQ ID NO: 25595 - DNA, 201 bp, Homo sapiens; identical to SEQ ID NO: 25573

SEQ ID NO: 25596 - DNA, 201 bp, Homo sapiens; identical to SEQ ID NO: 25574

SEQ ID NO: 25597 - DNA, 201 bp, Homo sapiens; identical to SEQ ID NO: 25575

SEQ ID NO: 25598 - DNA, 201 bp, Homo sapiens; identical to SEQ ID NO: 25576

SEQ ID NO: 25599 - DNA, 201 bp, Homo sapiens; identical to SEQ ID NO: 25561

SEQ ID NO: 25600 - DNA, 201 bp, Homo sapiens
tgggtggcatctacacggtgctgcagacgaaggcgaaggtgacaggggacgaatggggcgacaactacttcctggtggggccgtacacggagcagggcgtsaggacccaggtggaactgctggaggcccccaccccggccctgaagaggacactggattccatgaacagcaagggctgcaagttcctggcacagagtgagg

SEQ ID NO: 25601 - DNA, 201 bp, Homo sapiens; identical to SEQ ID NO: 25578

SEQ ID NO: 25602 - DNA, 201 bp, Homo sapiens; identical to SEQ ID NO: 25579

SEQ ID NO: 25603 - DNA, 201 bp, Homo sapiens; identical to SEQ ID NO: 25562

SEQ ID NO: 25604 - DNA, 201 bp, Homo sapiens; identical to SEQ ID NO: 25563

SEQ ID NO: 25605 - DNA, 201 bp, Homo sapiens; identical to SEQ ID NO: 25580

SEQ ID NO: 25606 - DNA, 201 bp, Homo sapiens; identical to SEQ ID NO: 25582

SEQ ID NO: 25607 - DNA, 201 bp, Homo sapiens; identical to SEQ ID NO: 25581

SEQ ID NO: 25608 - DNA, 201 bp, Homo sapiens; identical to SEQ ID NO: 25583

SEQ ID NO: 25609 - DNA, 201 bp, Homo sapiens; identical to SEQ ID NO: 25564

SEQ ID NO: 25610 - DNA, 201 bp, Homo sapiens; identical to SEQ ID NO: 25565

SEQ ID NO: 25611 - DNA, 201 bp, Homo sapiens; identical to SEQ ID NO: 25584

SEQ ID NO: 25612 - DNA, 201 bp, Homo sapiens; identical to SEQ ID NO: 25567

SEQ ID NO: 25613 - DNA, 166 bp, Homo sapiens; identical to SEQ ID NO: 25566

SEQ ID NO: 25614 - DNA, 201 bp, Homo sapiens; identical to SEQ ID NO: 25585

SEQ ID NO: 25615 - DNA, 201 bp, Homo sapiens; identical to SEQ ID NO: 25568

SEQ ID NO: 25616 - DNA, 201 bp, Homo sapiens; identical to SEQ ID NO: 25569

SEQ ID NO: 25617 - DNA, 201 bp, Homo sapiens; identical to SEQ ID NO: 25586

SEQ ID NO: 25618 - DNA, 201 bp, Homo sapiens; identical to SEQ ID NO: 25589

SEQ ID NO: 25619 - DNA, 201 bp, Homo sapiens; identical to SEQ ID NO: 25570

SEQ ID NO: 25620 - DNA, 201 bp, Homo sapiens
agaggacactggattccatgaacagcaagggctgcaagttcctggcacagagtgaggagaagccacatgtggttgctcacttccatgagtggttggcaggygttggactctgcctgtgtcgtgcccggcgactgcctgtagcaaccatcttcaccacccatgccacgctgctggggcgctacctgtgtgccggtgccgtgg

SEQ ID NO: 25621 - DNA, 201 bp, Homo sapiens
aatttttatgttgtcaccctgaaagaggaacttggaaactgggcacagtgggtggttgttatgcacccatccaaagttttggaattgcagatgaacaagcrtggcttcagcatggaagtggggcagtatatctttgttaattgcccctcaatctctctcctggaatggcatccttttactttgacctctgctccagaggaa

SEQ ID NO: 25622 - DNA, 201 bp, Homo sapiens
caccacctttttatcttctatatccttggcttagggattcacggcattggtggaattgtccggggtcaaacagaggagagcatgaatgagagtcatcctcrcaagtgtgcagagtcttttgagatgtgggatgatcgtgactcccactgtaggcgccctaagtttgaagggcatccccctgagtcttggaagtggatcctt

SEQ ID NO: 25623 - DNA, 201 bp, Homo sapiens
gcattggtggaattgtccggggtcaaacagaggagagcatgaatgagagtcatcctcgcaagtgtgcagagtcttttgagatgtgggatgatcgtgactcycactgtaggcgccctaagtttgaagggcatccccctgagtcttggaagtggatccttgcaccggtcattctttatatctgtgaaaggatcctccggtttt

SEQ ID NO: 25624 - DNA, 201 bp, Homo sapiens
tgttaattgcccctcaatctctctcctggaatggcatccttttactttgacctctgctccagaggaagatttcttctccattcatatccgagcagcagggractggacagaaaatctcataagggctttcgaacaacaatattcaccaattcccaggattgaagtggatggtccctttggcacagccagtgaggatgtttt

SEQ ID NO: 25625 - DNA, 201 bp, Homo sapiens
ccatctcctgagttttggtttgtaatcttttgtccctcccacccccacagaagatttctaagtagggtgactttttaaataaaaatttattgaataattartgataaaacataataataaacataaataataaacaaaattaccgagaaccccatccccatataacaccaacagtgtacatgtttactgtcacttttgata

SEQ ID NO: 25626 - DNA, 201 bp, Homo sapiens
tgtgaaaggatcctccggttttaccgctcccagcagaaggttgtgattaccaaggttgttatgcacccatccaaagttttggaattgcagatgaacaagcrtggcttcagcatggaagtggggcagtatatctttgttaattgcccctcaatctctctcctggaatggcatccttttactttgacctctgctccagaggaa

SEQ ID NO: 25627 - DNA, 201 bp, Homo sapiens; identical to SEQ ID NO: 25622

SEQ ID NO: 25628 - DNA, 201 bp, Homo sapiens; identical to SEQ ID NO: 25623

SEQ ID NO: 25629 - DNA, 201 bp, Homo sapiens; identical to SEQ ID NO: 25624

SEQ ID NO: 25630 - DNA, 201 bp, Homo sapiens; identical to SEQ ID NO: 25625

SEQ ID NO: 25631 - DNA, 201 bp, Homo sapiens; identical to SEQ ID NO: 25626

SEQ ID NO: 25632 - DNA, 201 bp, Homo sapiens; identical to SEQ ID NO: 25622

SEQ ID NO: 25633 - DNA, 201 bp, Homo sapiens; identical to SEQ ID NO: 25623

SEQ ID NO: 25634 - DNA, 201 bp, Homo sapiens; identical to SEQ ID NO: 25624

SEQ ID NO: 25635 - DNA, 201 bp, Homo sapiens; identical to SEQ ID NO: 25625

SEQ ID NO: 25636 - DNA, 201 bp, Homo sapiens
tggccactcaccggatctgtcagatcgtgtccacacactccgccagcctgtgcacagccaccctggcccccgtgctgcagcgcatcaaggagaacaaaggygaggagcagcttcgctctactattggggtcgacggttccgtctacaagaaacacccccattttgccaagcgtctacataagaccgtgtggcggctggtgc

SEQ ID NO: 25637 - DNA, 201 bp, Homo sapiens
ctttagggggaagctcagcccagagcttctcaacaccggtcactttgagaccaaagacatctcagacactgaaggggagaaggatggcatccggaaggccygtgaggtcctgatgcggttgggcatggacccgactcaggaggactgcgtggccactcaccggatctgtcagatcgtgtccacacactccgccagcctgtg

SEQ ID NO: 25638 - DNA, 201 bp, Homo sapiens
agaccaaagacatctcagacactgaaggggagaaggatggcatccggaaggcccgtgaggtcctgatgcggttgggcatggacccgactcaggaggactgygtggccactcaccggatctgtcagatcgtgtccacacactccgccagcctgtgcacagccaccctggcccccgtgctgcagcgcatcaaggagaacaaag

SEQ ID NO: 25639 - DNA, 201 bp, Homo sapiens
tgaggtcctgatgcggttgggcatggacccgactcaggaggactgcgtggccactcaccggatctgtcagatcgtgtccacacactccgccagcctgtgckcagccaccctggcccccgtgctgcagcgcatcaaggagaacaaaggcgaggagcagcttcgctctactattggggtcgacggttccgtctacaagaaaca

SEQ ID NO: 25640 - DNA, 201 bp, Homo sapiens
gccgatcaacaccgtgcccgccagaagacactagagcctctgcagctgagccatgaccagctgttggaggtcaagaggaggatgaaggtagaaatggagcraggtctgagcaaggagactcacgccagtgcccccgtcaagatgcttcccacctacgtgtgtgccacccctgacggcacagagaaaggggacttcttggcc

SEQ ID NO: 25641 - DNA, 201 bp, Homo sapiens
acttagggcttgagagcacctgtgacgacagcatcattgttaaggaggtgtgcaccgtggtggcccggcgggcagcccagctctgtggtgcaggcatggcygctgtggtggacaagatacgagaaaaccgtgggctggacgctctcaaagtgacagtgggtgtggatgggaccctctacaagctacatcctcactttgcca

SEQ ID NO: 25642 - DNA, 201 bp, Homo sapiens
catgttatccaccagcaatggacctttggggaggggggagtttttagtttgttttacaaatttttcctgcaaaagtggaaacactgtattttcattttaayttatatttgaaattttatttagttcttgaagtagatctgcttcttcatcttgacgtgtaatggtcagttgtacgtaatgtatttatatgttaatttgtta

SEQ ID NO: 25643 - DNA, 201 bp, Homo sapiens
tgtgtgtgaacatggaatggggggcctttggagacaatggatgcctagatgacttccacacagaatttgatgtggctgtggatgagctttcactcaacccsggcaagcagaggttcgagaaaatgatcaatggaatgtacctgggtgagattgtcggtaacattctcatcgatttcaccaagcgtgggctgctcttctgag

SEQ ID NO: 25644 - DNA, 201 bp, Homo sapiens
gttatgacgaccacaactgtgagattggtctcattgtgggcactggcagcaacgcctgctacatggaagagatgcgccacatcgagatggtagaaggcgaygaggggcagatgtgtatcaatatggagtggggggccttcggggacgatggctcgctcaatgacattcgcactgagtttgaccaggagattgacatgggct

SEQ ID NO: 25645 - DNA, 201 bp, Homo sapiens
tttagggggaagctcagcccagagcttctcaacaccggtcactttgagaccaaagacatctcagacactgaaggggagaaggatggcatccggaaggcccrtgaggtcctgatgcggttgggcatggacccgactcaggaggactgcgtggccactcaccggatctgtcagatcgtgtccacacactccgccagcctgtgc

SEQ ID NO: 25646 - DNA, 201 bp, Homo sapiens
accagatctatgccatccccgaggacatcatgtgaggcagtgacaccgagctgtttgaccacattgtcgaatggctggctaacttcatggataagctacawatcaaagacaagaagctcccattgggttttaccttctcgttcccctgccgccagactaaactagacgagagtttcctggtctcatggaccaagggattca

SEQ ID NO: 25647 - DNA, 201 bp, Homo sapiens
gaacaaaggcgaggagcagcttcgctctactattggggtcgacggttccgtctacaagaaacacccccattttgccaagcgtctacataagaccgtgtggmggctggtgcccgactgctatgtctgcttcctccgctccgaggatggcagtggcaaaggtgcagccatggtgacagcagtggcttaccggctggccgatca

SEQ ID NO: 25648 - DNA, 201 bp, Homo sapiens
cagaactatgatgacctgtggctttgaagaccctcactgtgaagttggcctcatcggttggcatgggcagcaatgtctgctacatggaagagatgagcaaygtggaactggtggaaggagaagaggggcggatgtgtgtgaacatggaatggggggcctttggagacaatggatgcctagatgacttccacacagaatttg

SEQ ID NO: 25649 - DNA, 201 bp, Homo sapiens
aacaaaggcgaggagcagcttcgctctactattggggtcgacggttccgtctacaagaaacacccccattttgccaagcgtctacataagaccgtgtggcsgctggtgcccgactgctatgtctgcttcctccgctccgaggatggcagtggcaaaggtgcagccatggtgacagcagtggcttaccggctggccgatcaa

SEQ ID NO: 25650 - DNA, 201 bp, Homo sapiens; identical to SEQ ID NO: 25636

SEQ ID NO: 25651 - DNA, 201 bp, Homo sapiens; identical to SEQ ID NO: 25637

SEQ ID NO: 25652 - DNA, 201 bp, Homo sapiens; identical to SEQ ID NO: 25638

SEQ ID NO: 25653 - DNA, 201 bp, Homo sapiens; identical to SEQ ID NO: 25639

SEQ ID NO: 25654 - DNA, 201 bp, Homo sapiens; identical to SEQ ID NO: 25640

SEQ ID NO: 25655 - DNA, 201 bp, Homo sapiens; identical to SEQ ID NO: 25641

SEQ ID NO: 25656 - DNA, 201 bp, Homo sapiens; identical to SEQ ID NO: 25642

SEQ ID NO: 25657 - DNA, 201 bp, Homo sapiens; identical to SEQ ID NO: 25643

SEQ ID NO: 25658 - DNA, 201 bp, Homo sapiens; identical to SEQ ID NO: 25644

SEQ ID NO: 25659 - DNA, 201 bp, Homo sapiens; identical to SEQ ID NO: 25645

SEQ ID NO: 25660 - DNA, 201 bp, Homo sapiens; identical to SEQ ID NO: 25646

SEQ ID NO: 25661 - DNA, 201 bp, Homo sapiens; identical to SEQ ID NO: 25647

SEQ ID NO: 25662 - DNA, 201 bp, Homo sapiens; identical to SEQ ID NO: 25648

SEQ ID NO: 25663 - DNA, 201 bp, Homo sapiens; identical to SEQ ID NO: 25649

SEQ ID NO: 25664 - DNA, 201 bp, Homo sapiens; identical to SEQ ID NO: 25636

SEQ ID NO: 25665 - DNA, 201 bp, Homo sapiens; identical to SEQ ID NO: 25637

SEQ ID NO: 25666 - DNA, 201 bp, Homo sapiens; identical to SEQ ID NO: 25638

SEQ ID NO: 25667 - DNA, 201 bp, Homo sapiens; identical to SEQ ID NO: 25639

SEQ ID NO: 25668 - DNA, 201 bp, Homo sapiens; identical to SEQ ID NO: 25640

SEQ ID NO: 25669 - DNA, 201 bp, Homo sapiens; identical to SEQ ID NO: 25641

SEQ ID NO: 25670 - DNA, 201 bp, Homo sapiens; identical to SEQ ID NO: 25642

SEQ ID NO: 25671 - DNA, 201 bp, Homo sapiens; identical to SEQ ID NO: 25643

SEQ ID NO: 25672 - DNA, 201 bp, Homo sapiens; identical to SEQ ID NO: 25644

SEQ ID NO: 25673 - DNA, 201 bp, Homo sapiens; identical to SEQ ID NO: 25645

SEQ ID NO: 25674 - DNA, 201 bp, Homo sapiens; identical to SEQ ID NO: 25646

SEQ ID NO: 25675 - DNA, 201 bp, Homo sapiens; identical to SEQ ID NO: 25647

SEQ ID NO: 25676 - DNA, 201 bp, Homo sapiens; identical to SEQ ID NO: 25648

SEQ ID NO: 25677 - DNA, 201 bp, Homo sapiens; identical to SEQ ID NO: 25649

SEQ ID NO: 25678 - DNA, 201 bp, Homo sapiens
caccgtctctccctgggaccaggtatcgttcttcctcttcatcatcttcgtggtgtacaccatgctgcccttcaacatgcgagacgccatcattgccagcrtcctcacctcctcctcccacaccatcgtgcttagcgtctgcctgtctgcaacaccgggaggcaaggagcacctggtctggcagatcctggccaatgtgat

SEQ ID NO: 25679 - DNA, 201 bp, Homo sapiens
caagttggaatttgaaaaacgtcaacaggcaaaagaatcagcacatatcagtgcatgtcatgttataaccatattccagggaagaactgctatccagagcwtgagagtttcaaggttgggcagtttaactacaagcacaatcctcattataaatatggaaaaagcaaaaaggctaggagcttctcctccagggcaggaacc

SEQ ID NO: 25680 - DNA, 201 bp, Homo sapiens
atggatatgccttgttgccatgggatacctgttcatgtgttttggaggcaccgtctctccctgggaccaggtatcgttcttcctcttcatcatcttcgtgktgtacaccatgctgcccttcaacatgcgagacgccatcattgccagcgtcctcacctcctcctcccacaccatcgtgcttagcgtctgcctgtctgcaac

SEQ ID NO: 25681 - DNA, 201 bp, Homo sapiens
ccgcgtgctgctggagaacgtgcttcccgcgcacgtggctgagcacttcctggccaggagcctgaagaatgaggagctataccaccagtcctatgactgcrtctgcgtcatgtttgcctccattccggatttcaaagaattttatacagaatccgacgtgaacaaggagggcttggaatgccttcggctcctgaacgagat

SEQ ID NO: 25682 - DNA, 201 bp, Homo sapiens
ttctgggactgatatcctgttccgtgttcctgcgggtaaactatgagctgaagatgttgatcatgatggtggccttggtgggctacaacaccatcctactscacacccacgcccacgtcctgggcgactacagccaggtcttatttgagagaccaggcatttggaaagacctgaagaccatgggctctgtgtctctctcta

SEQ ID NO: 25683 - DNA, 201 bp, Homo sapiens
tgctgctggagaacgtgcttcccgcgcacgtggctgagcacttcctggccaggagcctgaagaatgaggagctataccaccagtcctatgactgcgtctgygtcatgtttgcctccattccggatttcaaagaattttatacagaatccgacgtgaacaaggagggcttggaatgccttcggctcctgaacgagatcatcg

SEQ ID NO: 25684 - DNA, 201 bp, Homo sapiens; identical to SEQ ID NO: 25678

SEQ ID NO: 25685 - DNA, 201 bp, Homo sapiens
ggatcaagttggaatttgaaaaacgtcaacaggagcggcttctgctctccctgctgccggcccacatcgccatggagatgaaagcggagatcatccagagrctgcagggccccaaggcgggccagatggagaacacaaataacttccacaacctgtatgtgaagcggcatacaaacgtgagcatcttatacgctgacatcg

SEQ ID NO: 25686 - DNA, 201 bp, Homo sapiens
ggagcctgaagaatgaggagctataccaccagtcctatgactgcgtctgcgtcatgtttgcctccattccggatttcaaagaattttatacagaatccgaygtgaacaaggagggcttggaatgccttcggctcctgaacgagatcatcgctgactttgatgatcttctttccaagccaaaattcagtggagttgaaaaga

SEQ ID NO: 25687 - DNA, 201 bp, Homo sapiens
gacgtgttcacatttcttctgtcaccctggagcacttgaatggcgcttataaagtggaggagggagatggtgacattagggacccatatttaaaacagcayctggtgaaaacctactttgtgatcaaccccaagggagaacgacggagcccccagcatctcttcagacctcgccacacccttgatggagccaaaatgaggg

SEQ ID NO: 25688 - DNA, 201 bp, Homo sapiens; identical to SEQ ID NO: 25680

SEQ ID NO: 25689 - DNA, 201 bp, Homo sapiens
ctaaccatgccaagaactgtgtgaaaatggggctggacatgtgtgaagccataaagaaagtgagggatgctactggagttgatatcaacatgcgcgtgggygtgcattctgggaatgtcctgtgtggcgtgattggtctgcagaagtggcaatatgatgtgtggtcacatgatgtgaccttggccaaccacatggaagctg

SEQ ID NO: 25690 - DNA, 201 bp, Homo sapiens
aatgtttttagagatgcatttggtatcgttcttcctcttcatcatcttcgtggtgtacaccatgctgcccttcaacatgcgagacgccatcattgccagcrtcctcacctcctcctcccacaccatcgtgcttagcgtctgcctgtctgcaacaccgggaggcaaggagcacctggtctggcagactttccctgctgaaga

SEQ ID NO: 25691 - DNA, 107 bp, Homo sapiens
atggggtggaagtcctatattgcagacatgggggtgcccccagtggaacacatttccaccctcagaccaatcgtgtagggcagatttggccattacagtaytggaga

SEQ ID NO: 25692 - DNA, 200 bp, Homo sapiens
atgtctatagctaatggcgagtccagttggaacaaggaggatgttggaatgtttttagagatgcatttggtatcgttcttcctcttcatcatcttcgtgktgtacaccatgctgcccttcaacatgcgagacgccatcattgccagcgtcctcacctcctcctcccacaccatcgtgcttagcgtctgcctgtctgcaac

SEQ ID NO: 25693 - DNA, 101 bp, Homo sapiens
gtaacagcaacagccaagctacaaagaaagcaatgggggatgacttaggggacaggtcctatgttctccattttggctgctgtgttttggtgcatcttatr

SEQ ID NO: 25694 - DNA, 201 bp, Homo sapiens
ctgattttccctccacatggtcacaagctattgaaggggtggcttcggatacctgctgaaaaacccacattcattcattttgcaccttttgaggctctggrcctcaggaaaacctcatcaggtgcaaagggcactggaagggcattcactaggatgccacacagggttcaatccagccactcgccagcttctccctgtgcg

SEQ ID NO: 25695 - DNA, 201 bp, Homo sapiens
acgcccatacatggaccaagtcgcgccgccccatcatccggcccaacaacggcttttgggaacagctcatcaattacgaattcaagctgtttaataacaayaccgtgcgcatgatcaactcgccggtaggtaacatccctgacatctatgagaaggacctacgtatgatgatatcaatgtaagccatcccggccagcccct

SEQ ID NO: 25696 - DNA, 201 bp, Homo sapiens
ctcatcaattacgaattcaagctgtttaataacaacaccgtgcgcatgatcaactcgccggtaggtaacatccctgacatctatgagaaggacctacgtaygatgatatcaatgtaagccatcccggccagcccctgacatctgccatcgatcttgcaccaagactgaacttgaacactgacattttgttagtaaagaaaa

SEQ ID NO: 25697 - DNA, 201 bp, Homo sapiens
gagtatcagaggatgggagtggtgtcaagtccaaaagagaattcttttaccttaaatgctgacttctaaatgaactgaagatgtgcccttattttgctgatttttttccatctcataaaaaaaatcagctgaagtattatcaactagccacaccatgaattgtccataatgttcattaacagcatctttaaaactgtgtag

SEQ ID NO: 25698 - DNA, 201 bp, Homo sapiens
gcaaaacggatcggtggagaggcgccgccgccgccgggccgggcgtcgcgcgccgaggctcggggggagtcgtcgcagccgccgccaccgctaccgcagccgccgccgccgccgccgcccaggtgactgaggagagaggcacctcctcgctcccgccgccgccggacttcaatgcccagtccccagctcgccagcgttttt

SEQ ID NO: 25699 - DNA, 201 bp, Homo sapiens
actcacaggcacgctcacactttttatttgccgtaatgaaccgtctagcccctgtggagatctcctatgagaacatgtgttttctgataactcacaacccwaccaatgctactctcaacaagttcacagaggaacttaagaagtatggagtgacgacttcggtttgagtttgtgatgctacatatgataaagctccagttg

SEQ ID NO: 25700 - DNA, 201 bp, Homo sapiens
ttataagacaaaaaagaaggggagtgttaaattccaaacagctgctttacttaagatgcgattacgcttcagagataccaatgggcattgctgtgttcagyagaaagaaatgtaaatgaaggctgacttgattgtggcatttagagggaactcctggtacctggaaatgtgaatctggactcttacctgtgtcatcaaagt

SEQ ID NO: 25701 - DNA, 178 bp, Homo sapiens
ggagcggcagcggcggccaggcacggcgcgaggcgacgccacaggacagcggcggcagcaggaaatgcagcggcggcmgcagcagcagcaaaacggatcggtggagaggcgccgccgccgccgggccgggcgtcgcgcgccgaggctcggggggagtcgtcgcagccgccgccaccgc

SEQ ID NO: 25702 - DNA, 201 bp, Homo sapiens
cagcaaaacggatcggtggagaggcgccgccgccgccgggccgggcgtcgcgcgccgaggctcggggggagtcgtcgcagccgccgccaccgctaccgcagccgccgccgccgccgccgcccaggtgactgaggagagaggcacctcctcgctcccgccgccgccggacttcaatgcccagtccccagctcgccagcgttt

SEQ ID NO: 25703 - DNA, 201 bp, Homo sapiens
ccacaggacagcggcggcagcaggaaatgcagcggcggccgcagcagcagcaaaacggatcggtggagaggcgccgccgccgccgggccgggcgtcgcgcrccgaggctcggggggagtcgtcgcagccgccgccaccgctaccgcagccgccgccgccgccgccgcccaggtgactgaggagagaggcacctcctcgctc

SEQ ID NO: 25704 - DNA, 201 bp, Homo sapiens
agcaaaacggatcggtggagaggcgccgccgccgccgggccgggcgtcgcgcgccgaggctcggggggagtcgtcgcagccgccgccaccgctaccgcagccgccgccgccgccgccgcccaggtgactgaggagagaggcacctcctcgctcccgccgccgccggacttcaatgcccagtccccagctcgccagcgtttt

SEQ ID NO: 25705 - DNA, 134 bp, Homo sapiens
ggagcggcagcggcggccaggcacggcgcgagccgccgccgccgccgccgcccaggtgactgaggagagaggcacctcctcgctcccgccgccgccggacttcaatgcccagtccccagctcgccagcgttttt

SEQ ID NO: 25706 - DNA, 201 bp, Homo sapiens; identical to SEQ ID NO: 25699

SEQ ID NO: 25707 - DNA, 201 bp, Homo sapiens; identical to SEQ ID NO: 25700

SEQ ID NO: 25708 - DNA, 201 bp, Homo sapiens
caaatttcgtgaagagccaggttgctgtgttgcagtgcattgcgttgtggaattgggaagggcacctgtgctggttgcacttgctttgattgaatgtggagtgaagtacgtagatgcagttcagtttataagacaaaaaagaaggggagtgttaaattccaaacagctgctttacttaagatgcgattacgcttcagagat

SEQ ID NO: 25709 - DNA, 133 bp, Homo sapiens
ggagcggcagcggcggccaggcacggcgcgagccgccgccgccgccgccgcccaggtgactgaggagagaggcacctcctcgctcccgccgccgccggacttcaatgcccagtccccagctcgccagcgtttt

SEQ ID NO: 25710 - DNA, 201 bp, Homo sapiens; identical to SEQ ID NO: 25699

SEQ ID NO: 25711 - DNA, 178 bp, Homo sapiens; identical to SEQ ID NO: 25701

SEQ ID NO: 25712 - DNA, 201 bp, Homo sapiens
atccacgttaaaaaagaaggggagtgttaaattccaaacagctgctttacttaagatgcgattacgcttcagagataccaatgggcattgctgtgttcagyagaaagaaatgtaaatgaaggctgacttgattgtggcatttagagggaactcctggtacctggaaatgtgaatctggactcttacctgtgtcatcaaagt

SEQ ID NO: 25713 - DNA, 201 bp, Homo sapiens; identical to SEQ ID NO: 25703

SEQ ID NO: 25714 - DNA, 201 bp, Homo sapiens
gacgaggaggcctcgccccaacacagtgtgtcaagctggctggtgccacccactacccgctagaccggtgctgctatgggaaattcctgctgacgtcccayaggctggacccctggaagatgcaggaagcctggaagctggtgggtggctctgacggggaaaggactgcgcccttttgctcctggttccagggagtcctgg

SEQ ID NO: 25715 - DNA, 201 bp, Homo sapiens
acccgctagaccggtgctgctatgggaaattcctgctgacgtcccacaggctggacccctggaagatgcaggaagcctggaagctggtgggtggctctgayggggaaaggactgcgcccttttgctcctggttccagggagtcctgggcatcctgcggtgtcgagcaatagcctggcttcagagctgagagtgcctggggc

SEQ ID NO: 25716 - DNA, 201 bp, Homo sapiens
agaggctgagcaggaaggaggccaggttttgcacagcgaggaagtgcctcttctgtacttgggccgggtgcactggcgcgtgaacccctctcggacaccgsggggcaggcaccgcgtatcagaggagcagtggcctcacacctggggcccctttccaccctatgcctcaggcacggggtatgtgctgtcagcgtctgctgt

SEQ ID NO: 25717 - DNA, 201 bp, Homo sapiens
ggaccctcttcgggccttcggggttgggggaggagctgctgagcctctcactagcctccctgctcccagcccccgcctcaccggggccgcccctggccctkccccgcctcttgatccccaaccaggaagcttgcagtggtcccggggcccctcccttcctgctcatcctggtgtgcacggctccggagaacctgaaccaga

SEQ ID NO: 25718 - DNA, 201 bp, Homo sapiens
tgcgagggggccgttgggggcaatgggagagaagcacggaaccccagagagaggctgagcaggaaggaggccaggttttgcacagcgaggaagtgcctctwctgtacttgggccgggtgcactggcgcgtgaacccctctcggacaccggggggcaggcaccgcgtatcagaggagcagtggcctcacacctggggcccct

SEQ ID NO: 25719 - DNA, 201 bp, Homo sapiens
ctggaccctcttcgggccttcggggttgggggaggagctgctgagcctctcactagcctccctgctcccagcccccgcctcaccggggccgcccctggccstgccccgcctcttgatccccaaccaggaagcttgcagtggtcccggggcccctcccttcctgctcatcctggtgtgcacggctccggagaacctgaacca

SEQ ID NO: 25720 - DNA, 201 bp, Homo sapiens
ctcccaggcccaacgcaggggccctcactggctgcagctgatctgtttccttataccagatcctcagtctcactaaagacagcgatatgggagacacccargggcctggcccgccagcccaaaagatggtcatcgggaagagaaaaagaaaaaaatgctgcagttgttctctcaagctagggcagaagaggggtgtcaagc

SEQ ID NO: 25721 - DNA, 201 bp, Homo sapiens
tctgtttccttataccagatcctcagtctcactaaagacagcgatatgggagacacccaggggcctggcccgccagcccaaaagatggtcatcgggaagaraaaaagaaaaaaatgctgcagttgttctctcaagctagggcagaagaggggtgtcaagctcctcaataaacttgtctccacttcttcgagtgcagtgtgg

SEQ ID NO: 25722 - DNA, 201 bp, Homo sapiens
ggaacaggaccttctctctcccaggcccaacgcaggggccctcactggctgcagctgatctgtttccttataccagatcctcagtctcactaaagacagcratatgggagacacccaggggcctggcccgccagcccaaaagatggtcatcgggaagagaaaaagaaaaaaatgctgcagttgttctctcaagctagggca

SEQ ID NO: 25723 - DNA, 201 bp, Homo sapiens
ggcccttggaaaaccactacagactgaagcaatttcacttccactggggagcagtgaacgaggggggctcagagcacacagtggacggccacgcgtacccygcagagctgcatttagttcactggaattctgtgaaataccaaaattacaaggaagctgtcgtgggagagaatggtttggctgtgataggcgtgtttttaa

SEQ ID NO: 25724 - DNA, 201 bp, Homo sapiens; identical to SEQ ID NO: 25723

SEQ ID NO: 25725 - DNA, 201 bp, Homo sapiens
gtaccaaaggagaatttggagagctggctaaattatttgaagaaagaattgccaacagtggtgttcagagcctcaacaaaaccaaaggataaagggaagawaaccaagcgtgtgaaggcaaagaagaatgctgctccattcagaagtgaagtctgctttgggaaagagggcctttggaaacttcttggaggttttcaggaa

SEQ ID NO: 25726 - DNA, 201 bp, Homo sapiens
catcctttcccaggctgatgctcgacaggtagtactgaaatatactgtcccaggctacaggaattctctggaattttttactatgcttgctcagagaagasgtatgcaccaaaaaggtggaatcccaaatgttgaaggtgctgccaaactgctgtggtctgagtggacaggtgcctcattagcttactattgccatccccc

SEQ ID NO: 25727 - DNA, 201 bp, Homo sapiens
aggatgacaaagacagtgaccaggaaactgttgatgaagaagttgatgaaaacagctcaggcatgtttgctgcagaagagacaggggaggcactgtctgargagactacagcaggtgaacagtctacaaggtcttttatcttggataaaatcattgaagaggatgatgcttatgacttcagtacagattatgtgtaacaga

SEQ ID NO: 25728 - DNA, 201 bp, Homo sapiens
ccaggtttgaggcccaatattttctttccgtggccacgtgcagactggcccaggtgagagctgagaatcgcctcccagactcagtgttcctctcctgcctwatgattcgtgctgtttgacacgaagtggttgtcgttttgtgtctcatacgctgttgtgtatgatcccattctaatattgtgagggtaagtgcagggaatt

SEQ ID NO: 25729 - DNA, 201 bp, Homo sapiens
gatggaggctgccagtgccatcctttcccaggctgatgctcgacaggtagtactgaaatatactgtcccaggctacaggaattctctggaattttttactrtgcttgctcagagaagaggtatgcaccaaaaaggtggaatcccaaatgttgaaggtgctgccaaactgctgtggtctgagtggacaggtgcctcattagc

SEQ ID NO: 25730 - DNA, 201 bp, Homo sapiens
agtattgtggtagacatgaaaagcggcttcaatctggaagaactggaaaagaacaatgcacagagcataagagccatcaagggccctcatttggccaatascatccttttccagtcttccggtctgacaaatggaataatagaagaaaaggacatacatgaagaattgccaaaacggaaagaaaggaagcaggaggagagg

SEQ ID NO: 25731 - DNA, 201 bp, Homo sapiens
actgccagacagggcagtttgtcatctttacctagctgacacatctttttccatggcttgctaccgataggcattgaagcctagcaactgttacttcccaygcatgctatcttccaggacttcctgagaaatgcttgcttacagttcaaattctgtttcactttatgtttgagatctcggtatatcttcggattaggttga

SEQ ID NO: 25732 - DNA, 201 bp, Homo sapiens
acagtctacaaggtcttttatcttggataaaatcattgaagaggatgatgcttatgacttcagtacagattatgtgtaacagaacaatggctttttatgattttttttttaacattttaagcagactgctaaactgttctctgtataagttatggtatgcatgagctgtgtaaattttgtgaatatgtattatattaaaac

SEQ ID NO: 25733 - DNA, 201 bp, Homo sapiens
ctgagtggacaggtgcctcattagcttactattgccatccccctacatcttggactcctcctccatattttaatgagagtattgtggtagacatgaaaagyggcttcaatctggaagaactggaaaagaacaatgcacagagcataagagccatcaagggccctcatttggccaatagcatccttttccagtcttccggtc

SEQ ID NO: 25734 - DNA, 201 bp, Homo sapiens
ttaaagaaagcaagtaaacgcatgacctgccataagcggtataaaatccaaaaaaaggttcgagaacatcatcgaaaattaagaaaggaggctaaaaagcrgggtcacaagaagcctaggaaagacccaggagttccaaacagtgctccctttaaggaggctcttcttagggaagctgagctaaggaaacagaggcttgaa

SEQ ID NO: 25735 - DNA, 201 bp, Homo sapiens
agagcataagagccatcaagggccctcatttggccaatagcatccttttccagtcttccggtctgacaaatggaataatagaagaaaaggacatacatgargaattgccaaaacggaaagaaaggaagcaggaggagagggaggatgacaaagacagtgaccaggaaactgttgatgaagaagttgatgaaaacagctcag

SEQ ID NO: 25736 - DNA, 201 bp, Homo sapiens; identical to SEQ ID NO: 25725

SEQ ID NO: 25737 - DNA, 201 bp, Homo sapiens; identical to SEQ ID NO: 25726

SEQ ID NO: 25738 - DNA, 201 bp, Homo sapiens; identical to SEQ ID NO: 25727

SEQ ID NO: 25739 - DNA, 201 bp, Homo sapiens; identical to SEQ ID NO: 25729

SEQ ID NO: 25740 - DNA, 201 bp, Homo sapiens; identical to SEQ ID NO: 25730

SEQ ID NO: 25741 - DNA, 201 bp, Homo sapiens; identical to SEQ ID NO: 25731

SEQ ID NO: 25742 - DNA, 201 bp, Homo sapiens; identical to SEQ ID NO: 25732

SEQ ID NO: 25743 - DNA, 201 bp, Homo sapiens
cgcacgcagagaggcggtgacgcactttacggcggcagcgtaagtgcgtgacgctcgtcagtggcttcagttcacacgtggcgccagcggaggcaggttgmtgtgtttgtgcttccttctacagccaatatgaaaaggcctaagttaaagaaagcaagtaaacgcatgacctgccataagcggtataaaatccaaaaaaag

SEQ ID NO: 25744 - DNA, 201 bp, Homo sapiens; identical to SEQ ID NO: 25734

SEQ ID NO: 25745 - DNA, 201 bp, Homo sapiens; identical to SEQ ID NO: 25733

SEQ ID NO: 25746 - DNA, 201 bp, Homo sapiens; identical to SEQ ID NO: 25735

SEQ ID NO: 25747 - DNA, 201 bp, Homo sapiens
gcgtgcccgcgcacgcagagaggcggtgacgcactttacggcggcagcgtaagtgcgtgacgctcgtcagtggcttcagttcacacgtggcgccagcggargcaggttgctgtgtttgtgcttccttctacagccaatatgaaaaggcctaagttaaagaaagcaagtaaacgcatgacctgccataagcggtataaaatc

SEQ ID NO: 25748 - DNA, 201 bp, Homo sapiens
ggcctgcggcgcgggcgctgagctggcagggcgggtcggggcgcgggctgcatccgcatctcctccatcgcctgcaggttaaaaactaatatttatatgayagaagaaaaagatgtcattccgtaaagtaaacatcatcatcttggtcctggctgttgctctcttcttactggttttgcaccataacttcctcagcttgag

SEQ ID NO: 25749 - DNA, 201 bp, Homo sapiens
tcaacctaatccgaagatataccgagatctcaaacataaagtgaaacagaatttgaactgtaagcaagcatttctcaggaagtcctggaagatagcatgcrtgggaagtaacagttgctaggcttcaatgcctatcggtagcaagccatggaaaaagatgtgtcagctaggtaaagatgacaaactgccctgtctggcagt

SEQ ID NO: 25750 - DNA, 201 bp, Homo sapiens
caaggtgatattcttgccctttacaatacagcactgaagccaggacatgcagctgcattttcagaagattgtgattcagcctctactaaagttgtcatccrtggagcaggaaaccagtacaattacattggctatcttgactataaaaaggaaagaattcgtaagctttccatgaaagccagcacttgctcatttaatcct

SEQ ID NO: 25751 - DNA, 201 bp, Homo sapiens
tcttggtcctggctgttgctctcttcttactggttttgcaccataacttcctcagcttgagcagtttgttaaggaatgaggttacagattcaggaattgtrgggcctcaacctatagactttgtcccaaatgctctccgacatgcagtagatgggagacaagaggagattcctgtggtcatcgctgcatctgaagacaggc

SEQ ID NO: 25752 - DNA, 175 bp, Homo sapiens
gctcggcccagcgtgcagggaacgcgggcggccagacaacgggctgggctccggggcctgcggcgcgggcgctgmgctggcagggcgggtcggggcgcgggctgcatccgcatctcctccatcgcctgcaggttaaaaactaatatttatatgacagaagaaaaagatgtcattc

SEQ ID NO: 25753 - DNA, 201 bp, Homo sapiens
ggagccctaaccaggggtatctctgagcctggtgggatccccggagcgtcacatcactttccgatcacttcaaagtggttaaaaactaatatttatatgayagaagaaaaagatgtcattccgtaaagtaaacatcatcatcttggtcctggctgttgctctcttcttactggttttgcaccataacttcctcagcttgag

SEQ ID NO: 25754 - DNA, 201 bp, Homo sapiens; identical to SEQ ID NO: 25749

SEQ ID NO: 25755 - DNA, 201 bp, Homo sapiens
cggggcgcgggctgcatccgcatctcctccatcgcctgcagtaagggcggccgcggcgagcctttgaggggaacgacttgtcggagccctaaccaggggtrtctctgagcctggtgggatccccggagcgtcacatcactttccgatcacttcaaagtggttaaaaactaatatttatatgacagaagaaaaagatgtcat

SEQ ID NO: 25756 - DNA, 201 bp, Homo sapiens; identical to SEQ ID NO: 25750

SEQ ID NO: 25757 - DNA, 201 bp, Homo sapiens; identical to SEQ ID NO: 25751

SEQ ID NO: 25758 - DNA, 201 bp, Homo sapiens
ctgccacggagctagagggcaagtgtgctcggcccagcgtgcagggaacgcgggcggccagacaacgggctgggctccggggcctgcggcgcgggcgctgmgctggcagggcgggtcggggcgcgggctgcatccgcatctcctccatcgcctgcagtaagggcggccgcggcgagcctttgaggggaacgacttgtcgga

SEQ ID NO: 25759 - DNA, 201 bp, Homo sapiens
gatggagctgcagacttaccgttaccacggacacagtatgagtgaccctggagtcagttaccgtacacgagaagaaattcaggaagtaagaagtaagagtraccctattatgcttctcaaggacaggatggtgaacagcaatcttgccagtgtggaagaactaaaggaaattgatgtggaagtgaggaaggagattgagga

SEQ ID NO: 25760 - DNA, 201 bp, Homo sapiens
gtgctgtctggcgcttctcagaagccggcaagcagagtgctggtagcatcccgtaattttgcaaatgatgctacatttgaaattaagaaatgtgaccttcrccggctggaagaaggccctcctgtcacaacagtgctcaccagggaggatgggctcaaatactacaggatgatgcagactgtacgccgaatggagttgaaa

SEQ ID NO: 25761 - DNA, 201 bp, Homo sapiens
atcaaccccacagaccatctcatcacagcctaccgggctcacggctttactttcacccggggcctttccgtccgagaaattctcgcagagcttacaggacdaaaaggaggttgtgctaaagggaaaggaggatcgatgcacatgtatgccaagaacttctacgggggcaatggcatcgtgggagcgcaggtgcccctgggc

SEQ ID NO: 25762 - DNA, 201 bp, Homo sapiens
gtccgagaaattctcgcagagcttacaggacgaaaaggaggttgtgctaaagggaaaggaggatcgatgcacatgtatgccaagaacttctacgggggcartggcatcgtgggagcgcaggtgcccctgggcgctgggattgctctagcctgtaagtataatggaaaagatgaggtctgcctgactttatatggcgatggt

SEQ ID NO: 25763 - DNA, 201 bp, Homo sapiens
aattctcgcagagcttacaggacgaaaaggaggttgtgctaaagggaaaggaggatcgatgcacatgtatgccaagaacttctacgggggcaatggcatcrtgggagcgcaggtgcccctgggcgctgggattgctctagcctgtaagtataatggaaaagatgaggtctgcctgactttatatggcgatggtgctgctaa

SEQ ID NO: 25764 - DNA, 201 bp, Homo sapiens
aaaaggaggttgtgctaaagggaaaggaggatcgatgcacatgtatgccaagaacttctacgggggcaatggcatcgtgggagcgcaggtgcccctgggcsctgggattgctctagcctgtaagtataatggaaaagatgaggtctgcctgactttatatggcgatggtgctgctaaccagggccagatattcgaagctta

SEQ ID NO: 25765 - DNA, 201 bp, Homo sapiens
catcgtgggagcgcaggtgcccctgggcgctgggattgctctagcctgtaagtataatggaaaagatgaggtctgcctgactttatatggcgatggtgctrctaaccagggccagatattcgaagcttacaacatggcagctttgtggaaattaccttgtattttcatctgtgagaataatcgctatggaatgggaacgtc

SEQ ID NO: 25766 - DNA, 201 bp, Homo sapiens
ccctgggcgctgggattgctctagcctgtaagtataatggaaaagatgaggtctgcctgactttatatggcgatggtgctgctaaccagggccagatattmgaagcttacaacatggcagctttgtggaaattaccttgtattttcatctgtgagaataatcgctatggaatgggaacgtctgttgagagagcggcagcca

SEQ ID NO: 25767 - DNA, 201 bp, Homo sapiens
gctgctaaccagggccagatattcgaagcttacaacatggcagctttgtggaaattaccttgtattttcatctgtgagaataatcgctatggaatgggaamgtctgttgagagagcggcagccagcactgattactacaagagaggcgatttcattcctgggctgagagtggatggaatggatatcctgtgcgtccgagag

SEQ ID NO: 25768 - DNA, 201 bp, Homo sapiens
gccgatcctgagccacctttggaagagctgggctaccacatctactccagcgacccaccttttgaagttcgtggtgccaatcagtggatcaagtttaagtmagtcagttaaggggaggagaaggagaggttataccttcagggggctaccagacagtgttctcaacttggttaaggaggaagaaaacccagtcaatgaaat

SEQ ID NO: 25769 - DNA, 201 bp, Homo sapiens
attaagaaatgtgaccttcaccggctggaagaaggccctcctgtcacaacagtgctcaccagggaggatgggctcaaatactacaggatgatgcagactgyacgccgaatggagttgaaagcagatcagctgtataaacagaaaattattcgtggtttctgtcacttgtgtgatggtcaggaagcttgctgtgtgggcctg

SEQ ID NO: 25770 - DNA, 201 bp, Homo sapiens
gagctgcagacttaccgttaccacggacacagtatgagtgaccctggagtcagttaccgtacacgagaagaaattcaggaagtaagaagtaagagtgaccytattatgcttctcaaggacaggatggtgaacagcaatcttgccagtgtggaagaactaaaggaaattgatgtggaagtgaggaaggagattgaggatgct

SEQ ID NO: 25771 - DNA, 201 bp, Homo sapiens
ttgagagagcggcagccagcactgattactacaagagaggcgatttcattcctgggctgagagtggatggaatggatatcctgtgcgtccgagaggcaacraggtttgctgctgcctattgtagatctgggaaggggcccatcctgatggagctgcagacttaccgttaccacggacacagtatgagtgaccctggagtca

SEQ ID NO: 25772 - DNA, 201 bp, Homo sapiens
tctcaaggacaggatggtgaacagcaatcttgccagtgtggaagaactaaaggaaattgatgtggaagtgaggaaggagattgaggatgctgcccagtttsccacggccgatcctgagccacctttggaagagctgggctaccacatctactccagcgacccaccttttgaagttcgtggtgccaatcagtggatcaagtt

SEQ ID NO: 25773 - DNA, 201 bp, Homo sapiens
ctgttgagagagcggcagccagcactgattactacaagagaggcgatttcattcctgggctgagagtggatggaatggatatcctgtgcgtccgagaggcracaaggtttgctgctgcctattgtagatctgggaaggggcccatcctgatggagctgcagacttaccgttaccacggacacagtatgagtgaccctggag

SEQ ID NO: 25774 - DNA, 201 bp, Homo sapiens
cattcctgggctgagagtggatggaatggatatcctgtgcgtccgagaggcaacaaggtttgctgctgcctattgtagatctgggaaggggcccatcctgmtggagctgcagacttaccgttaccacggacacagtatgagtgaccctggagtcagttaccgtacacgagaagaaattcaggaagtaagaagtaagagtga

SEQ ID NO: 25775 - DNA, 201 bp, Homo sapiens
aaggagaggttataccttcagggggctaccagacagtgttctcaacttggttaaggaggaagaaaacccagtcaatgaaattcaatgaaattcttggaaayttccattaagtgtgtagattgagcaggtagtaattgcatgcagtttgtacattagtgcattaaaagatgaattattgagtgcttaaagattatttttgac

SEQ ID NO: 25776 - DNA, 201 bp, Homo sapiens
tcagctgtataaacagaaaattattcgtggtttctgtcacttgtgtgatggtcaggaagcttgctgtgtgggcctggaggccggcatcaaccccacagacsatctcatcacagcctaccgggctcacggctttactttcacccggggcctttccgtccgagaaattctcgcagagcttacaggacgaaaaggaggttgtgc

SEQ ID NO: 25777 - DNA, 201 bp, Homo sapiens
tactttgaacaaatactctaattatgaaaaggaagaacaattccttgtatgcctgtttcccctgcccccagccacctttttgggaggagaccattatggcrgggccccatcacagcaattctaccaaccatagcacccaccccgagcagcgctggtgctgcagcctgttcgcgctgaccatttctctacaagatacaatat

SEQ ID NO: 25778 - DNA, 201 bp, Homo sapiens
gtatactttgaacaaatactctaattatgaaaaggaagaacaattccttgtatgcctgtttcccctgcccccagccacctttttgggaggagaccattatkgcggggccccatcacagcaattctaccaaccatagcacccaccccgagcagcgctggtgctgcagcctgttcgcgctgaccatttctctacaagatacaa

SEQ ID NO: 25779 - DNA, 201 bp, Homo sapiens
ggctggagtgcagtggtgtgatcatggctcactgcagcctccacacctcctgggctcaagcaatcctcccacctcagcctcctgcatagctgggactacargtgaatttcctaatattccgggaggtcaaaaccaaggctcactgttttcacaatacacacagttctatgtttataaataacaggtttcaaaagaaactca

SEQ ID NO: 25780 - DNA, 201 bp, Homo sapiens
gttctgaggcagtgtcccagcttccatgtttgttaaataccccttgtttgtttcaccattccagcaagtgctgaagggtgtactttttttgagacagggtygggctctgttgcccaggctggagtgcagtggtgtgatcatggctcactgcagcctccacacctcctgggctcaagcaatcctcccacctcagcctcctgc

SEQ ID NO: 25781 - DNA, 201 bp, Homo sapiens
acagaagctttaacaaaacatgtagcgtggtgggacactctgccacagcttagctgattggtatcaagccttgtctttggtttctgaggcctcctgagccyttctgtactgggagaccgcactccagagtctgcagaggagaccacccctgggaaacaaacacagctgtcttcagagtcagtgcttcaagccaacagagct

SEQ ID NO: 25782 - DNA, 201 bp, Homo sapiens
aatcgctatggaatgggaacgtctgttgagagagcggcagccagcactgattactacaagagaggcgatttcattcctgggctgagagtggatggaatggmtatcctgtgcgtccgagaggcaacaaggtttgctgctgcctattgtagatctgggaaggggcccatcctgatggagctgcagacttaccgttaccacgga

SEQ ID NO: 25783 - DNA, 201 bp, Homo sapiens
tgctgctgcctattgtagatctgggaaggggcccatcctgatggagctgcagacttaccgttaccacggacacagtatgagtgaccctggagtcagttacygtacacgagaagaaattcaggaagtaagaagtaagagtgaccctattatgcttctcaaggacaggatggtgaacagcaatcttgccagtgtggaagaact

SEQ ID NO: 25784 - DNA, 201 bp, Homo sapiens
aattcataattctgagattcactttctagaaagcctcctcatctaggataccttcagttagtttggaatttgacatgttaggtctaccactttaaatgctyatccccacatctttcaaatgcctttccttaggaatcacatccctaactgcactggaaatcctacaaggaaataggttttagtgttgaggtcagagcttat

SEQ ID NO: 25785 - DNA, 201 bp, Homo sapiens
aatggaaaagatgaggtctgcctgactttatatggcgatggtgctgctaaccagggccagatattcgaagcttacaacatggcagctttgtggaaattacyttgtattttcatctgtgagaataatcgctatggaatgggaacgtctgttgagagagcggcagccagcactgattactacaagagaggcgatttcattcct

SEQ ID NO: 25786 - DNA, 201 bp, Homo sapiens
gctgctgcctattgtagatctgggaaggggcccatcctgatggagctgcagacttaccgttaccacggacacagtatgagtgaccctggagtcagttaccdtacacgagaagaaattcaggaagtaagaagtaagagtgaccctattatgcttctcaaggacaggatggtgaacagcaatcttgccagtgtggaagaacta

SEQ ID NO: 25787 - DNA, 201 bp, Homo sapiens
gaccctggagtcagttaccgtacacgagaagaaattcaggaagtaagaagtaagagtgaccctattatgcttctcaaggacaggatggtgaacagcaatcktgccagtgtggaagaactaaaggaaattgatgtggaagtgaggaaggagattgaggatgctgcccagtttgccacggccgatcctgagccacctttggaa

SEQ ID NO: 25788 - DNA, 201 bp, Homo sapiens
ctccagagtttggggggaggcccagccctttgttttctgctcttgaagcatattcacacataaaaagttgtattctcttatacaaactgttttgaggctcytaccgtagtcgaaggtatcttagatcttccttagtgatctcattaagaatatccgaaagtgtataaccctcttcaacaatctgaaacaaagatcagatcc

SEQ ID NO: 25789 - DNA, 201 bp, Homo sapiens
ggagattgaggatgctgcccagtttgccacggccgatcctgagccacctttggaagagctgggctaccacatctactccagcgacccaccttttgaagttygtggtgccaatcagtggatcaagtttaagtcagtcagttaaggggaggagaaggagaggttataccttcagggggctaccagacagtgttctcaacttgg

SEQ ID NO: 25790 - DNA, 201 bp, Homo sapiens
gagattgaggatgctgcccagtttgccacggccgatcctgagccacctttggaagagctgggctaccacatctactccagcgacccaccttttgaagttcrtggtgccaatcagtggatcaagtttaagtcagtcagttaaggggaggagaaggagaggttataccttcagggggctaccagacagtgttctcaacttggt

SEQ ID NO: 25791 - DNA, 201 bp, Homo sapiens
gtttataaataacaggtttcaaaagaaactcaggacagtatttaaaacaagttcttaaactattaattgaacaatggcatttttaaatatgtaaacacagmggaattcgtgtatacactaacagaagctttaacaaaacatgtagcgtggtgggacactctgccacagcttagctgattggtatcaagccttgtctttggt

SEQ ID NO: 25792 - DNA, 201 bp, Homo sapiens
acaagttcttaaactattaattgaacaatggcatttttaaatatgtaaacacagcggaattcgtgtatacactaacagaagctttaacaaaacatgtagcrtggtgggacactctgccacagcttagctgattggtatcaagccttgtctttggtttctgaggcctcctgagcccttctgtactgggagaccgcactccag

SEQ ID NO: 25793 - DNA, 201 bp, Homo sapiens
taagaaatgtgaccttcaccggctggaagaaggccctcctgtcacaacagtgctcaccagggaggatgggctcaaatactacaggatgatgcagactgtaygccgaatggagttgaaagcagatcagctgtataaacagaaaattattcgtggtttctgtcacttgtgtgatggtcaggaagcttgctgtgtgggcctgga

SEQ ID NO: 25794 - DNA, 201 bp, Homo sapiens
tgctgctaaccagggccagatattcgaagcttacaacatggcagctttgtggaaattaccttgtattttcatctgtgagaataatcgctatggaatgggarcgtctgttgagagagcggcagccagcactgattactacaagagaggcgatttcattcctgggctgagagtggatggaatggatatcctgtgcgtccgaga

SEQ ID NO: 25795 - DNA, 201 bp, Homo sapiens
caaagatcagatccttaagagctgagcagctgtgtaacaacagcataagaatttctttgttgtaaatttaccttttcaattgtctttgcatcagctccttscagccgcaaccagtctataagctctttatctgttctctgcccgtaggggcctgctgggttctctgtaatacctgtaacgattggcaatttgttatatatt

SEQ ID NO: 25796 - DNA, 201 bp, Homo sapiens
gtgtgatggtcaggaagcttgctgtgtgggcctggaggccggcatcaaccccacagaccatctcatcacagcctaccgggctcacggctttactttcaccyggggcctttccgtccgagaaattctcgcagagcttacaggacgaaaaggaggttgtgctaaagggaaaggaggatcgatgcacatgtatgccaagaactt

SEQ ID NO: 25797 - DNA, 201 bp, Homo sapiens
ataatggaaaagatgaggtctgcctgactttatatggcgatggtgctgctaaccagggccagatattcgaagcttacaacatggcagctttgtggaaattmccttgtattttcatctgtgagaataatcgctatggaatgggaacgtctgttgagagagcggcagccagcactgattactacaagagaggcgatttcattc

SEQ ID NO: 25798 - DNA, 201 bp, Homo sapiens; identical to SEQ ID NO: 25759

SEQ ID NO: 25799 - DNA, 201 bp, Homo sapiens; identical to SEQ ID NO: 25760

SEQ ID NO: 25800 - DNA, 201 bp, Homo sapiens; identical to SEQ ID NO: 25761

SEQ ID NO: 25801 - DNA, 201 bp, Homo sapiens; identical to SEQ ID NO: 25762

SEQ ID NO: 25802 - DNA, 201 bp, Homo sapiens; identical to SEQ ID NO: 25763

SEQ ID NO: 25803 - DNA, 201 bp, Homo sapiens; identical to SEQ ID NO: 25764

SEQ ID NO: 25804 - DNA, 201 bp, Homo sapiens; identical to SEQ ID NO: 25765

SEQ ID NO: 25805 - DNA, 201 bp, Homo sapiens; identical to SEQ ID NO: 25766

SEQ ID NO: 25806 - DNA, 201 bp, Homo sapiens; identical to SEQ ID NO: 25767

SEQ ID NO: 25807 - DNA, 201 bp, Homo sapiens; identical to SEQ ID NO: 25768

SEQ ID NO: 25808 - DNA, 201 bp, Homo sapiens; identical to SEQ ID NO: 25769

SEQ ID NO: 25809 - DNA, 201 bp, Homo sapiens; identical to SEQ ID NO: 25770

SEQ ID NO: 25810 - DNA, 201 bp, Homo sapiens; identical to SEQ ID NO: 25771

SEQ ID NO: 25811 - DNA, 201 bp, Homo sapiens; identical to SEQ ID NO: 25772

SEQ ID NO: 25812 - DNA, 201 bp, Homo sapiens; identical to SEQ ID NO: 25773

SEQ ID NO: 25813 - DNA, 201 bp, Homo sapiens; identical to SEQ ID NO: 25774

SEQ ID NO: 25814 - DNA, 201 bp, Homo sapiens; identical to SEQ ID NO: 25775

SEQ ID NO: 25815 - DNA, 201 bp, Homo sapiens; identical to SEQ ID NO: 25776

SEQ ID NO: 25816 - DNA, 201 bp, Homo sapiens; identical to SEQ ID NO: 25777

SEQ ID NO: 25817 - DNA, 201 bp, Homo sapiens; identical to SEQ ID NO: 25778

SEQ ID NO: 25818 - DNA, 201 bp, Homo sapiens; identical to SEQ ID NO: 25779

SEQ ID NO: 25819 - DNA, 201 bp, Homo sapiens; identical to SEQ ID NO: 25780

SEQ ID NO: 25820 - DNA, 201 bp, Homo sapiens; identical to SEQ ID NO: 25781

SEQ ID NO: 25821 - DNA, 201 bp, Homo sapiens; identical to SEQ ID NO: 25782

SEQ ID NO: 25822 - DNA, 201 bp, Homo sapiens; identical to SEQ ID NO: 25783

SEQ ID NO: 25823 - DNA, 201 bp, Homo sapiens; identical to SEQ ID NO: 25785

SEQ ID NO: 25824 - DNA, 201 bp, Homo sapiens; identical to SEQ ID NO: 25786

SEQ ID NO: 25825 - DNA, 201 bp, Homo sapiens; identical to SEQ ID NO: 25787

SEQ ID NO: 25826 - DNA, 201 bp, Homo sapiens; identical to SEQ ID NO: 25788

SEQ ID NO: 25827 - DNA, 201 bp, Homo sapiens; identical to SEQ ID NO: 25789

SEQ ID NO: 25828 - DNA, 201 bp, Homo sapiens; identical to SEQ ID NO: 25790

SEQ ID NO: 25829 - DNA, 201 bp, Homo sapiens; identical to SEQ ID NO: 25791

SEQ ID NO: 25830 - DNA, 201 bp, Homo sapiens; identical to SEQ ID NO: 25792

SEQ ID NO: 25831 - DNA, 201 bp, Homo sapiens; identical to SEQ ID NO: 25793

SEQ ID NO: 25832 - DNA, 201 bp, Homo sapiens; identical to SEQ ID NO: 25794

SEQ ID NO: 25833 - DNA, 201 bp, Homo sapiens; identical to SEQ ID NO: 25795

SEQ ID NO: 25834 - DNA, 201 bp, Homo sapiens; identical to SEQ ID NO: 25796

SEQ ID NO: 25835 - DNA, 201 bp, Homo sapiens; identical to SEQ ID NO: 25797

SEQ ID NO: 25836 - DNA, 201 bp, Homo sapiens
tccagtacctaccttacagggattataattactccttggtgatgggagcttgttgtgagaatgttattggatatatgcccatccctgttggagtggcaggrcccctttgcttagatgaaaaagaatttcaggttccaatggcaacaacagaaggttgtcttgtggccagcaccaatagaggctgcagagcaataggtcttg

SEQ ID NO: 25837 - DNA, 201 bp, Homo sapiens
gcaccaagaagacagcctgaatagcccgacagttctgaactggaacatgggcattgggttctaaaggactaacataaaatctgtgaattaaaaaagctcartgcattgtcttgtggaggatgaatagatgtgatcactgagacagccacttggtttttggctctttcagagaggtctcaggttctttccatgcagactcct

SEQ ID NO: 25838 - DNA, 201 bp, Homo sapiens
gcaggacatcttgtcaaaagtcacatgattcacaacaggtcgaagatcaatttacaagacctccaaggagcttgcaccaagaagacagcctgaatagcccracagttctgaactggaacatgggcattgggttctaaaggactaacataaaatctgtgaattaaaaaagctcaatgcattgtcttgtggaggatgaataga

SEQ ID NO: 25839 - DNA, 201 bp, Homo sapiens
ccaacctactacctcagcaagcctgtttgcagatgctaggtgttcaaggagcatgcaaagataatcctggggaaaatgcccggcagcttgcccgaattgtrtgtgggaccgtaatggctggggaattgtcacttatggcagcattggcagcaggacatcttgtcaaaagtcacatgattcacaacaggtcgaagatcaatt

SEQ ID NO: 25840 - DNA, 201 bp, Homo sapiens
atctacagctcacctctgaaggcaaatataagctgggaaaaaagttttgatgaaattcttgaagttcatggtgatcagtgcaattgaccttctccctcacycctgccagttgaaaatggatttttaaattatactgtagctgatgaaactcctgattttgtagttaatttattaagtctgggatgtagaacttcaagaagt

SEQ ID NO: 25841 - DNA, 201 bp, Homo sapiens
ttggtggaggtgccagcagccgagtccttgcagatgggatgactcgtggcccagttgtgcgtcttccacgtgcttgtgactctgcagaagtgaaagcctgsctcgaaacatctgaagggttcgcagtgataaaggaggcatttgacagcactagcagatttgcacgtctacagaaacttcatacaagtatagctggacgca

SEQ ID NO: 25842 - DNA, 201 bp, Homo sapiens
agtgaaagcctggctcgaaacatctgaagggttcgcagtgataaaggaggcatttgacagcactagcagatttgcacgtctacagaaacttcatacaagtrtagctggacgcaacctttatatccgtttccagtccaggtcaggggatgccatggggatgaacatgatttcaaagggtacagagaaagcactttcaaaact

SEQ ID NO: 25843 - DNA, 201 bp, Homo sapiens
cgacagttctgaactggaacatgggcattgggttctaaaggactaacataaaatctgtgaattaaaaaagctcaatgcattgtcttgtggaggatgaataratgtgatcactgagacagccacttggtttttggctctttcagagaggtctcaggttctttccatgcagactcctcagatctgaacacagtttagtgcttt

SEQ ID NO: 25844 - DNA, 201 bp, Homo sapiens
gaaaaatctagttttttttgtaaactgtatcaaatctgtatatgttgtaataaaacttatgctagtttattggaagtgttcaagaaataatgttctttaawgttgtccaggaaaccctggcttgcttgccgagcctaatgaaagggaaagtcagctttcagagccagtgaaggagccacgtgaatggccctagaactgtgc

SEQ ID NO: 25845 - DNA, 201 bp, Homo sapiens
gtcttggtggaggtgccagcagccgagtccttgcagatgggatgactcgtggcccagttgtgcgtcttccacgtgcttgtgactctgcagaagtgaaagcstggctcgaaacatctgaagggttcgcagtgataaaggaggcatttgacagcactagcagatttgcacgtctacagaaacttcatacaagtatagctggac

SEQ ID NO: 25846 - DNA, 201 bp, Homo sapiens; identical to SEQ ID NO: 25836

SEQ ID NO: 25847 - DNA, 201 bp, Homo sapiens
cacgtgaatggccctagaactgtgcctagttcctgtggccaggaggttggtgactgaaacattcacacagggctctttgatggacccacgaacgctcttakctttctcagggggtcagcagagttattgaatcttaattttttttaatgtacaagttttgtataaataataaagaactccttattttgtattacatctaat

SEQ ID NO: 25848 - DNA, 201 bp, Homo sapiens; identical to SEQ ID NO: 25837

SEQ ID NO: 25849 - DNA, 201 bp, Homo sapiens; identical to SEQ ID NO: 25838

SEQ ID NO: 25850 - DNA, 201 bp, Homo sapiens; identical to SEQ ID NO: 25839

SEQ ID NO: 25851 - DNA, 201 bp, Homo sapiens; identical to SEQ ID NO: 25840

SEQ ID NO: 25852 - DNA, 201 bp, Homo sapiens; identical to SEQ ID NO: 25841

SEQ ID NO: 25853 - DNA, 201 bp, Homo sapiens; identical to SEQ ID NO: 25842

SEQ ID NO: 25854 - DNA, 201 bp, Homo sapiens; identical to SEQ ID NO: 25843

SEQ ID NO: 25855 - DNA, 201 bp, Homo sapiens
aaaacttatgctagtttattggaagtgttcaagaaataaaaatcaacttgtgtactgataaaatactctagcctgggccagagaagataatgttctttaawgttgtccaggaaaccctggcttgcttgccgagcctaatgaaagggaaagtcagctttcagagccagtgaaggagccacgtgaatggccctagaactgtgc

SEQ ID NO: 25856 - DNA, 201 bp, Homo sapiens; identical to SEQ ID NO: 25845

SEQ ID NO: 25857 - DNA, 114 bp, Homo sapiens
ataaaagggggccsccgcattggccagtgggacaggaaaaacatcaagaagggggagaagaacacaattgtcacctcctacaacaggaacttcacgggccgcaatgacacaaac

SEQ ID NO: 25858 - DNA, 114 bp, Homo sapiens; identical to SEQ ID NO: 25857

SEQ ID NO: 25859 - DNA, 201 bp, Homo sapiens
tttttagctgtaggtattcagcaatgataggttaatcactggcaaaagcatcagatctttgtatatgctaagatttattgtttccccttctaaagctcaakatcatttctttccagtttttggggaaatggtggtggttatttggtctttaagtgaactgtcttaaatgagaaacgtttttgtcattttgacttttaacag

SEQ ID NO: 25860 - DNA, 201 bp, Homo sapiens
gttgcctccgccacctcctccgccgccgcgcgcccctcggagttccgcgccccaccatgcccaacatcgtgctgttcagcggcagctcgcatcaggacctrtcccagcgcgtggccgaccgcctgggcctggagctgggcaaggtggtcacgaagaagttcagcaaccaggagaccagcgtggagattggtgaaagcgtga

SEQ ID NO: 25861 - DNA, 201 bp, Homo sapiens
cctttgttctttcagtactttgaggcgacaactttcaagtatataatttcattgtggaagtcatagtttatatatttcgaggttgccaaaggtgacttcasattaaagccttctgtgtaaatatatactgataatgcctatggacatttgggtaaaaccctgtatagaattaattatccttttactttggagtgaaccttg

SEQ ID NO: 25862 - DNA, 201 bp, Homo sapiens
ttgttaggaggttcatttcacttatcattacttacaacttcatactcaaagcactgagaatttcaagtggagtatattgaagtagacttcagtttctttgsatcatttctgtattcaatttttttaattatttcataaccctattgagtgttttttaactaaattaacatggctcgaatgaaccgcccagctcctgtggaa

SEQ ID NO: 25863 - DNA, 201 bp, Homo sapiens
caatatacgtcaggtttgcttaaccattgatttttttttttttttaccaagtcttacagtgattattttacgtgtttccatgtatctcactttgtgctgtrttaaaaaaacctccattttgaaaatctacgttgtacagaagcacatgtctttaatgtcttcagacaaaaaagccttacattaatttaatgtttgcactct

SEQ ID NO: 25864 - DNA, 201 bp, Homo sapiens
tatactttttaaaggtctagataattttgaaccaatttattattgtgtactgaggagaaataatgtatagtagaggacagccttggtttgtaaagctcagytccactagttcatggttttgtgcaacttctgagcctcagttttctcctttgcaaattaataattacatacctttatagattttgaaattaatttaaatat

SEQ ID NO: 25865 - DNA, 201 bp, Homo sapiens
ttgtagaagacaaaatgaattgcacttcacttaatgtgtgtcctcatctttttacaaataaatgaaggattataaatgatgtcagcattttagtaaacttwtagacaaaatttgttagggtcattcatgaaaactttaatactaaaagcactttccattatatactttttaaaggtctagataattttgaaccaatttatt

SEQ ID NO: 25866 - DNA, 201 bp, Homo sapiens
acttgttgccctagcattaattgaaggtggaatgaaatacgaagatgcagtacaattcataagacaaaagcggcgtggagcttttaacagcaagcaacttytgtatttggagaagtatcgtcctaaaatgcggctgcgtttcaaagattccaacggtcatagaaacaactgttgcattcaataaaattggggtgcctaatg

SEQ ID NO: 25867 - DNA, 201 bp, Homo sapiens
gcgttgcaggccttgggagagctccagtacttgttgccctagcattaattgaaggtggaatgaaatacgaagatgcagtacaattcataagacaaaagcgkcgtggagcttttaacagcaagcaacttctgtatttggagaagtatcgtcctaaaatgcggctgcgtttcaaagattccaacggtcatagaaacaactgtt

SEQ ID NO: 25868 - DNA, 201 bp, Homo sapiens
gatagtaatcacaaatttttggctaatttttaacctgaggttttgttttttttttaaaggaaatgcagcctagtcttgagaacataattttatataatcarttactaaatgttaaactattaccacacagcccataaaacagcatttgcgtttattgagagagaggatgtgccatcatgattaatgaaaactatcttttga

SEQ ID NO: 25869 - DNA, 201 bp, Homo sapiens
ttgtgcaacttctgagcctcagttttctcctttgcaaattaataattacatacctttatagattttgaaattaatttaaatattagtatttggtacatgawggcttaatgttaagtttcctttaatgatccacaataatccctttgatcacgttaatctaaatctagatgtctttgtctaattttttttgaatagcagtta

SEQ ID NO: 25870 - DNA, 201 bp, Homo sapiens
agttcatggttttgtgcaacttctgagcctcagttttctcctttgcaaattaataattacatacctttatagattttgaaattaatttaaatattagtatytggtacatgaaggcttaatgttaagtttcctttaatgatccacaataatccctttgatcacgttaatctaaatctagatgtctttgtctaattttttttg

SEQ ID NO: 25871 - DNA, 201 bp, Homo sapiens
gacctggatggggtaaacctcagtgcacttcttttctgttggcctcagtattactggattgaagaattgctgcttcttgttaggaggttcatttcacttaycattacttacaacttcatactcaaagcactgagaatttcaagtggagtatattgaagtagacttcagtttctttgcatcatttctgtattcaattttttt

SEQ ID NO: 25872 - DNA, 201 bp, Homo sapiens
agctcagttccactagttcatggttttgtgcaacttctgagcctcagttttctcctttgcaaattaataattacatacctttatagattttgaaattaatytaaatattagtatttggtacatgaaggcttaatgttaagtttcctttaatgatccacaataatccctttgatcacgttaatctaaatctagatgtctttg

SEQ ID NO: 25873 - DNA, 201 bp, Homo sapiens
gctctgctccgagccgctcactgcatggtagagtctggtgcccccgccgccgcctgcatcgccgccaccgccgctccgccacgaccaccgccgcctcctgycctgcagccaccgccaccgcctgtgtcgccgccgcctcgggaccggctgtatgattaggccacaatcttcaatgagtaaacatattcctcaattctgtgg

SEQ ID NO: 25874 - DNA, 201 bp, Homo sapiens
tggtttgtaaagctcagttccactagttcatggttttgtgcaacttctgagcctcagttttctcctttgcaaattaataattacatacctttatagatttygaaattaatttaaatattagtatttggtacatgaaggcttaatgttaagtttcctttaatgatccacaataatccctttgatcacgttaatctaaatcta

SEQ ID NO: 25875 - DNA, 150 bp, Homo sapiens
aagggcgcctcggcgcgtgtattggctccttcggctgcgggccggctcgsctacgcgctctgctccgagccgctcactgcatggtagagtctggtgcccccgccgccgcctgcatcgccgccaccgccgctccgccacgaccaccgccgc

SEQ ID NO: 25876 - DNA, 201 bp, Homo sapiens
ggacagccttggtttgtaaagctcagttccactagttcatggttttgtgcaacttctgagcctcagttttctcctttgcaaattaataattacataccttyatagattttgaaattaatttaaatattagtatttggtacatgaaggcttaatgttaagtttcctttaatgatccacaataatccctttgatcacgttaat

SEQ ID NO: 25877 - DNA, 201 bp, Homo sapiens
ttgtgtactgaggagaaataatgtatagtagaggacagccttggtttgtaaagctcagttccactagttcatggttttgtgcaacttctgagcctcagttytctcctttgcaaattaataattacatacctttatagattttgaaattaatttaaatattagtatttggtacatgaaggcttaatgttaagtttcctttaa

SEQ ID NO: 25878 - DNA, 201 bp, Homo sapiens
ccacaatagtaagagtatgtgaagcaacttatgacactactcttgtggagaaagaaggtatccatgttcttgattggccttttgatgatggtgcaccaccrtccaaccagattgttgatgactggttaagtcttgtgaaaattaagtttcgtgaagaacctggttgttgtattgctgttcattgcgttgcaggccttggga

SEQ ID NO: 25879 - DNA, 201 bp, Homo sapiens
gtgaatgatatttttcttttacatgtaaacaatgaagttatttcaaagttaagttttaaacaaaatacatgaagtagtgtctgccatacatgttaatattytacattcttgcttccttaaattaatatgtttgtgtgtatatatgtgcctcacacctgaattgaaaattaaagactggtttaaaagtggtttaaaagtgac

SEQ ID NO: 25880 - DNA, 201 bp, Homo sapiens
tgccaaaatacccagcacaatacttgtatatttttagtaccatacagaagtaaaatcccaggaactatgaacactagaccttatgtggtttattccttcartcatttcaaacattgaaagtagggcctacatggttatttgcctgctcactttatgtttacatctcccacattcataccaatatacgtcaggtttgcttaa

SEQ ID NO: 25881 - DNA, 201 bp, Homo sapiens
atacagaagtaaaatcccaggaactatgaacactagaccttatgtggtttattccttcaatcatttcaaacattgaaagtagggcctacatggttatttgsctgctcactttatgtttacatctcccacattcataccaatatacgtcaggtttgcttaaccattgatttttttttttttttaccaagtcttacagtgatt

SEQ ID NO: 25882 - DNA, 201 bp, Homo sapiens
ttcaatcatttcaaacattgaaagtagggcctacatggttatttgcctgctcactttatgtttacatctcccacattcataccaatatacgtcaggtttgsttaaccattgatttttttttttttttaccaagtcttacagtgattattttacgtgtttccatgtatctcactttgtgctgtattaaaaaaacctccattt

SEQ ID NO: 25883 - DNA, 201 bp, Homo sapiens
ttttaaaaggtagagatgctttgttattgtaatcataaacttcctgaaattcttgtaatttttttcccatacttatcagaagtgtgtttaccaacttattyttgtttgaaagtgtgattttttttttccttcccaacctctcttgcaaaaaaagaaatgggtttctgctaatgaattgagcagacatctaatattttatat

SEQ ID NO: 25884 - DNA, 201 bp, Homo sapiens; identical to SEQ ID NO: 25862

SEQ ID NO: 25885 - DNA, 201 bp, Homo sapiens; identical to SEQ ID NO: 25863

SEQ ID NO: 25886 - DNA, 201 bp, Homo sapiens; identical to SEQ ID NO: 25864

SEQ ID NO: 25887 - DNA, 201 bp, Homo sapiens; identical to SEQ ID NO: 25865

SEQ ID NO: 25888 - DNA, 201 bp, Homo sapiens; identical to SEQ ID NO: 25866

SEQ ID NO: 25889 - DNA, 201 bp, Homo sapiens; identical to SEQ ID NO: 25867

SEQ ID NO: 25890 - DNA, 201 bp, Homo sapiens; identical to SEQ ID NO: 25868

SEQ ID NO: 25891 - DNA, 201 bp, Homo sapiens
ttgtgcaacttctgagcctcagttttctcctttgcaaattaataattacatacctttatagattttgaaattaatttaaatattagtatttggtacatgawaattttttttgaatagcagttataaatgtaaaggactcaaagtttaagtaaaaagtgatactccaccttgtgtttcaaagaatttagttccacctcttca

SEQ ID NO: 25892 - DNA, 201 bp, Homo sapiens
agttcatggttttgtgcaacttctgagcctcagttttctcctttgcaaattaataattacatacctttatagattttgaaattaatttaaatattagtatytggtacatgaaaattttttttgaatagcagttataaatgtaaaggactcaaagtttaagtaaaaagtgatactccaccttgtgtttcaaagaatttagtt

SEQ ID NO: 25893 - DNA, 201 bp, Homo sapiens; identical to SEQ ID NO: 25871

SEQ ID NO: 25894 - DNA, 201 bp, Homo sapiens
agctcagttccactagttcatggttttgtgcaacttctgagcctcagttttctcctttgcaaattaataattacatacctttatagattttgaaattaatytaaatattagtatttggtacatgaaaattttttttgaatagcagttataaatgtaaaggactcaaagtttaagtaaaaagtgatactccaccttgtgttt

SEQ ID NO: 25895 - DNA, 201 bp, Homo sapiens
cttaaacagagacttgcttcaacaccaggaagaacatgaaagggtgactcataattcccagcagcagtgccagttcatgtgctgggattctgaccacaagyctaacaatcaggtcagggagtcagatttctgttggatttagaaaagcatctatgtgtttatgaaagaaacccactggatttttaatagttctgcagctct

SEQ ID NO: 25896 - DNA, 201 bp, Homo sapiens
tggtttgtaaagctcagttccactagttcatggttttgtgcaacttctgagcctcagttttctcctttgcaaattaataattacatacctttatagatttygaaattaatttaaatattagtatttggtacatgaaaattttttttgaatagcagttataaatgtaaaggactcaaagtttaagtaaaaagtgatactcca

SEQ ID NO: 25897 - DNA, 201 bp, Homo sapiens
ggacagccttggtttgtaaagctcagttccactagttcatggttttgtgcaacttctgagcctcagttttctcctttgcaaattaataattacataccttyatagattttgaaattaatttaaatattagtatttggtacatgaaaattttttttgaatagcagttataaatgtaaaggactcaaagtttaagtaaaaagt

SEQ ID NO: 25898 - DNA, 201 bp, Homo sapiens; identical to SEQ ID NO: 25878

SEQ ID NO: 25899 - DNA, 201 bp, Homo sapiens
ttgtgtactgaggagaaataatgtatagtagaggacagccttggtttgtaaagctcagttccactagttcatggttttgtgcaacttctgagcctcagttytctcctttgcaaattaataattacatacctttatagattttgaaattaatttaaatattagtatttggtacatgaaaattttttttgaatagcagttata

SEQ ID NO: 25900 - DNA, 201 bp, Homo sapiens; identical to SEQ ID NO: 25880

SEQ ID NO: 25901 - DNA, 201 bp, Homo sapiens; identical to SEQ ID NO: 25881

SEQ ID NO: 25902 - DNA, 201 bp, Homo sapiens; identical to SEQ ID NO: 25882

SEQ ID NO: 25903 - DNA, 201 bp, Homo sapiens; identical to SEQ ID NO: 25883

SEQ ID NO: 25904 - DNA, 201 bp, Homo sapiens
gtggcaggcaggtgctgtgagaagccggctgagtttgacatctgcttcacctcagtgcagaagagagtgatccagaccctctggacagtgctagatgccaytgatcagacgtggctgccagtagtgaggattggtgcctcaatgagcagcactctgggggtctgatcggtctcaataaagcagaaactgctgcaaagcatg

SEQ ID NO: 25905 - DNA, 201 bp, Homo sapiens
tggcatcatcgccatctatggcctggtggagctgcctccagctagcgccggcctgagcgtgggcctgagcggcctggcagccggctttgccatagacatcktgggggacgccggtgtgcgagccacggcccagcagccccgactattcatgggcatgatcctgatcctcatcttccccgaggtgctcggcctgtacggtct

SEQ ID NO: 25906 - DNA, 201 bp, Homo sapiens
actatataatatataataatgaaatgactaagttatgtgaggaaaaaaacagaagacattgctaaaagagttaaaagtcattgctctggagaattaggagkgatggggcaggggactgttaggatgcattataaactgaaaagcctttttaaaattttatgtattaatatatgcattcacttgaaaaactaaaaaaaaaca

SEQ ID NO: 25907 - DNA, 201 bp, Homo sapiens
gatcacttgagaccagcttgggcaacatggcaaagccccatctctacaaaaaacacaaaaattagctgggcattgtggcgcacacctgtattcccatctastcaggaagctgagatggaagaattaattgagcccacgagttcaaggctgcagtgagtcgtgattgtgccactgcactccagccggggtgacagaagagac

SEQ ID NO: 25908 - DNA, 201 bp, Homo sapiens
ccaaagggttgcatgtagtaagaaattgtgatttaagatatattttaaagttataagtagcaggatattctgatggagtttgactttggttttgggcccasggagtttcagatgcctttgagaaatgaatgaagtagagagaaaataaaagaaaaactagccaggcacagtggctcacacctgtaatcccagcgctttggg

SEQ ID NO: 25909 - DNA, 201 bp, Homo sapiens
tagcaggatattctgatggagtttgactttggttttgggcccagggagtttcagatgcctttgagaaatgaatgaagtagagagaaaataaaagaaaaacyagccaggcacagtggctcacacctgtaatcccagcgctttgggaggctaaggcaggcagatcacttgagaccagcttgggcaacatggcaaagccccatc

SEQ ID NO: 25910 - DNA, 136 bp, Homo sapiens
cgatggccctgcccagtcccagacagaacctactaygtgcggcggcagctggggcgggaaggcgggcgctgggggcgctgcggccgctgcagcgccagggtccacctggtcggctgcacctgtggaggaggaggtg

SEQ ID NO: 25911 - DNA, 201 bp, Homo sapiens
cccttcaactgagcagtttcactagtggaaataccaaaagcttcctacgtgtatatccagaggtttgtagataaatgttgccaccttgtttgtaacagtgraaaattgaaaacaacctggaagtccagtgatgggaaaatgagtatgtttctgtcttagattggggaacccaaagcagattgcaagactgaaatttcagtg

SEQ ID NO: 25912 - DNA, 201 bp, Homo sapiens
cttgacattgtcgggcttttcacatgttggtaatatttattaaagatgaagatccacatacccttcaactgagcagtttcactagtggaaataccaaaagmttcctacgtgtatatccagaggtttgtagataaatgttgccaccttgtttgtaacagtgaaaaattgaaaacaacctggaagtccagtgatgggaaaatg

SEQ ID NO: 25913 - DNA, 201 bp, Homo sapiens
gtgagtcgtgattgtgccactgcactccagccggggtgacagaagagaccttgtctcgaaaaggaatctgaaaacaatggaaccatgccttcataattctrgaaagttattttcaactgataaatctatattcacccaaataatcaagggtgaaggtaaaataatacatttttagacaagcaaagactcaggggttacctc

SEQ ID NO: 25914 - DNA, 201 bp, Homo sapiens
ttccccactactcttgtctctatcagataccatttatgagacattcttgctataactaagtgcttctccaagaccccaactgagtccccagcacctgctayagtgagctgccattccacacccatcacatgtggcactcttgccagtccttgacattgtcgggcttttcacatgttggtaatatttattaaagatgaagat

SEQ ID NO: 25915 - DNA, 201 bp, Homo sapiens
atttttagtagagatggggtttcaccatgttggtcaggctagtctcgaactcgtgaccgcaagcgattcacccacctcagcctcccaaagtgctgggattrccggcttgagccaccacacccggcacatcttcattctttttatgtagtaaaaagtataaggccacacatggtttatttgaagtattttataatttaaaaa

SEQ ID NO: 25916 - DNA, 166 bp, Homo sapiens
cgatggccctgcccagtcccagacagaacctactacgtgcggcggcagctggggcgggaaggcggscgctgggggcgctgcggccgctgcagcgccagggtccacctggtcggctgcacctgtggaggaggaggtggatttcaggcttcccgtagactggaagaat

SEQ ID NO: 25917 - DNA, 201 bp, Homo sapiens
ctagtttaagttgttccccctccctctgaaaaaagtatgtatttttacattagaaaaggttttttgttgactttagatctataattatttctaagcaactwgtttttattccccactactcttgtctctatcagataccatttatgagacattcttgctataactaagtgcttctccaagaccccaactgagtccccagca

SEQ ID NO: 25918 - DNA, 175 bp, Homo sapiens
cgatggccctgcccagtcccagacagaacctactacgtgcggcggcagctggggcgggaaggcgggcgctggggscgctgcggccgctgcagcgccagggtccacctggtcggctgcacctgtggaggaggaggtggatttcaggcttcccgtagactggaagaatcggctcaaa

SEQ ID NO: 25919 - DNA, 182 bp, Homo sapiens
cgatggccctgcccagtcccagacagaacctactacgtgcggcggcagctggggcgggaaggcgggcgctgggggcgctgcrgccgctgcagcgccagggtccacctggtcggctgcacctgtggaggaggaggtggatttcaggcttcccgtagactggaagaatcggctcaaaaccgctt

SEQ ID NO: 25920 - DNA, 201 bp, Homo sapiens
gcgcgaacccgcggccgcagttcccaggcgtctgcgggcgcgagcacgccgcgaccctgcgtgcgccggggcgggggggcggggcctcgcctgcacaaatrgggacgagggggcggggcggccacaatttcgcgccaaacttgaccgcgcgttctgctgtaacgagcgggctcggaggtcctcccgctgctgtcatggttg

SEQ ID NO: 25921 - DNA, 172 bp, Homo sapiens
cgatggccctgcccagtcccagacagaacctactacgtgcggcggcagctggggcgggaaggcgggcgctgsgggcgctgcggccgctgcagcgccagggtccacctggtcggctgcacctgtggaggaggaggtggatttcaggcttcccgtagactggaagaatcggctc

SEQ ID NO: 25922 - DNA, 201 bp, Homo sapiens
aaaagcaatttaaagtcagcgagcaggttctcattgataacaagctccatactgctgagatacagggaaatggaggggggaaagctggagtattgatcccrcccccctccttggttgtcagctccctgtcctgtgtgtgggcggaacatagtccagctgctctatagcaagtctcaggtgtttgcagtaagaagctgctgg

SEQ ID NO: 25923 - DNA, 201 bp, Homo sapiens
gtcctgtgtgtgggcggaacatagtccagctgctctatagcaagtctcaggtgtttgcagtaagaagctgctggcatgcacgggaacagtgaatgccaaasacttaaagcaattcgatgtttaagtatgtaagttcttttttttttagacagcgtttcgctcttgttgcccaggctagcatgcaatggtgtgacctcggct

SEQ ID NO: 25924 - DNA, 201 bp, Homo sapiens
cgattctcctgcctcaggctcccaagtagctaggaccaggtgcgcgccaccacgcccggctaatttttgtattttgtatttttagtagagatggggtttcrccatgttggtcaggctagtctcgaactcgtgaccgcaagcgattcacccacctcagcctcccaaagtgctgggattaccggcttgagccaccacacccgg

SEQ ID NO: 25925 - DNA, 201 bp, Homo sapiens
ggagctagctttaaaaaggaacagtaaaaatattaatcggttagctgggtggaatggcccatgcctgtagtcccagctactcaggaggctcagcagcaggrcgacttgagcccaagagttccagaccagcctggccaccttagtgagatcccttctcttaaaaataataacttattgccagatttggggcatttggaaaga

SEQ ID NO: 25926 - DNA, 201 bp, Homo sapiens
gacgacttgagcccaagagttccagaccagcctggccaccttagtgagatcccttctcttaaaaataataacttattgccagatttggggcatttggaaakaagttcattgaagataaagcaaaagtaaaaaaaaaaaaaaaaaaacaaggggaaagggttggttaggcaatcattctagggcagaaagaagtacaggata

SEQ ID NO: 25927 - DNA, 201 bp, Homo sapiens
cggttagctgggtggaatggcccatgcctgtagtcccagctactcaggaggctcagcagcaggacgacttgagcccaagagttccagaccagcctggccaycttagtgagatcccttctcttaaaaataataacttattgccagatttggggcatttggaaagaagttcattgaagataaagcaaaagtaaaaaaaaaaaa

SEQ ID NO: 25928 - DNA, 201 bp, Homo sapiens
cttgggcaacatggcaaagccccatctctacaaaaaacacaaaaattagctgggcattgtggcgcacacctgtattcccatctactcaggaagctgagatkgaagaattaattgagcccacgagttcaaggctgcagtgagtcgtgattgtgccactgcactccagccggggtgacagaagagaccttgtctcgaaaagga

SEQ ID NO: 25929 - DNA, 144 bp, Homo sapiens
gtatttgcctctggaaagaacaactggcaggactgttgttttcattgtaagacttttggagccatttaattgtacttaaccattttcatctatttctttartaagaacaattccatcttaataaagagttacacttgttaataa

SEQ ID NO: 25930 - DNA, 201 bp, Homo sapiens
gctcccaagtagctaggaccaggtgcgcgccaccacgcccggctaatttttgtattttgtatttttagtagagatggggtttcaccatgttggtcaggctrgtctcgaactcgtgaccgcaagcgattcacccacctcagcctcccaaagtgctgggattaccggcttgagccaccacacccggcacatcttcattctttt

SEQ ID NO: 25931 - DNA, 201 bp, Homo sapiens
ggagaaactgaactgagaaggtaagaaaagcaatttaaagtcagcgagcaggttctcattgataacaagctccatactgctgagatacagggaaatggagrggggaaagctggagtattgatcccgcccccctccttggttgtcagctccctgtcctgtgtgtgggcggaacatagtccagctgctctatagcaagtctca

SEQ ID NO: 25932 - DNA, 201 bp, Homo sapiens
cgcttgcctcgcaggggctgagctggaggcagcgaggccgcccgacgcaggcttccggcgagacatggcagggcaaggatggcagcccggcggcagggccyggcgaggagcgcgaacccgcggccgcagttcccaggcgtctgcgggcgcgagcacgccgcgaccctgcgtgcgccggggcgggggggcggggcctcgcct

SEQ ID NO: 25933 - DNA, 201 bp, Homo sapiens
ttctgtcttagattggggaacccaaagcagattgcaagactgaaatttcagtgaaagcagtgtatttgctaggtcataccagaaatcatcaattgaggtayggagaaactgaactgagaaggtaagaaaagcaatttaaagtcagcgagcaggttctcattgataacaagctccatactgctgagatacagggaaatggag

SEQ ID NO: 25934 - DNA, 201 bp, Homo sapiens
acctccgccttcccagattcaagcgattctcctgcctcaggctcccaagtagctaggaccaggtgcgcgccaccacgcccggctaatttttgtattttgtrtttttagtagagatggggtttcaccatgttggtcaggctagtctcgaactcgtgaccgcaagcgattcacccacctcagcctcccaaagtgctgggatta

SEQ ID NO: 25935 - DNA, 201 bp, Homo sapiens
tatggtaactactctgggacaatatgggaggaaaagtgaagattgtgatggtgtaagagctaaatcctcatctgtcatatccagaaatcactatataatayataataatgaaatgactaagttatgtgaggaaaaaaacagaagacattgctaaaagagttaaaagtcattgctctggagaattaggagggatggggcagg

SEQ ID NO: 25936 - DNA, 201 bp, Homo sapiens
ggctgagctggaggcagcgaggccgcccgacgcaggcttccggcgagacatggcagggcaaggatggcagcccggcggcagggcccggcgaggagcgcgarcccgcggccgcagttcccaggcgtctgcgggcgcgagcacgccgcgaccctgcgtgcgccggggcgggggggcggggcctcgcctgcacaaatagggacg

SEQ ID NO: 25937 - DNA, 201 bp, Homo sapiens
ccggctaatttttgtattttgtatttttagtagagatggggtttcaccatgttggtcaggctagtctcgaactcgtgaccgcaagcgattcacccacctcrgcctcccaaagtgctgggattaccggcttgagccaccacacccggcacatcttcattctttttatgtagtaaaaagtataaggccacacatggtttattt

SEQ ID NO: 25938 - DNA, 108 bp, Homo sapiens
actatataatatataataatgaaatgactaagttatgtgaggaaaaaaacagaagacattgctaaaagagttaaaagtcattgctctggagaattaggagkgatgggg

SEQ ID NO: 25939 - DNA, 201 bp, Homo sapiens; identical to SEQ ID NO: 25907

SEQ ID NO: 25940 - DNA, 136 bp, Homo sapiens; identical to SEQ ID NO: 25910

SEQ ID NO: 25941 - DNA, 201 bp, Homo sapiens; identical to SEQ ID NO: 25911

SEQ ID NO: 25942 - DNA, 201 bp, Homo sapiens; identical to SEQ ID NO: 25912

SEQ ID NO: 25943 - DNA, 201 bp, Homo sapiens; identical to SEQ ID NO: 25914

SEQ ID NO: 25944 - DNA, 201 bp, Homo sapiens; identical to SEQ ID NO: 25913

SEQ ID NO: 25945 - DNA, 166 bp, Homo sapiens; identical to SEQ ID NO: 25916

SEQ ID NO: 25946 - DNA, 201 bp, Homo sapiens; identical to SEQ ID NO: 25917

SEQ ID NO: 25947 - DNA, 175 bp, Homo sapiens; identical to SEQ ID NO: 25918

SEQ ID NO: 25948 - DNA, 182 bp, Homo sapiens; identical to SEQ ID NO: 25919

SEQ ID NO: 25949 - DNA, 201 bp, Homo sapiens; identical to SEQ ID NO: 25920

SEQ ID NO: 25950 - DNA, 172 bp, Homo sapiens; identical to SEQ ID NO: 25921

SEQ ID NO: 25951 - DNA, 201 bp, Homo sapiens; identical to SEQ ID NO: 25922

SEQ ID NO: 25952 - DNA, 201 bp, Homo sapiens
cgattctcctgcctcaggctcccaagtagctaggaccaggtgcgcgccaccacgcccggctaatttttgtattttgtatttttagtagagatggggtttcrccatgttggtcaggctagtctcgaactcgtgaccgcaagcgattcacccacctgtaatcccagcgctttgggaggctaaggcaggcagatcacttgagac

SEQ ID NO: 25953 - DNA, 201 bp, Homo sapiens; identical to SEQ ID NO: 25923

SEQ ID NO: 25954 - DNA, 201 bp, Homo sapiens; identical to SEQ ID NO: 25925

SEQ ID NO: 25955 - DNA, 201 bp, Homo sapiens; identical to SEQ ID NO: 25926

SEQ ID NO: 25956 - DNA, 201 bp, Homo sapiens; identical to SEQ ID NO: 25927

SEQ ID NO: 25957 - DNA, 201 bp, Homo sapiens; identical to SEQ ID NO: 25928

SEQ ID NO: 25958 - DNA, 201 bp, Homo sapiens
gctcccaagtagctaggaccaggtgcgcgccaccacgcccggctaatttttgtattttgtatttttagtagagatggggtttcaccatgttggtcaggctrgtctcgaactcgtgaccgcaagcgattcacccacctgtaatcccagcgctttgggaggctaaggcaggcagatcacttgagaccagcttgggcaacatgg

SEQ ID NO: 25959 - DNA, 201 bp, Homo sapiens; identical to SEQ ID NO: 25931

SEQ ID NO: 25960 - DNA, 201 bp, Homo sapiens; identical to SEQ ID NO: 25932

SEQ ID NO: 25961 - DNA, 201 bp, Homo sapiens; identical to SEQ ID NO: 25933

SEQ ID NO: 25962 - DNA, 201 bp, Homo sapiens
acctccgccttcccagattcaagcgattctcctgcctcaggctcccaagtagctaggaccaggtgcgcgccaccacgcccggctaatttttgtattttgtrtttttagtagagatggggtttcaccatgttggtcaggctagtctcgaactcgtgaccgcaagcgattcacccacctgtaatcccagcgctttgggaggct

SEQ ID NO: 25963 - DNA, 201 bp, Homo sapiens; identical to SEQ ID NO: 25936

SEQ ID NO: 25964 - DNA, 197 bp, Homo sapiens
gggcagaaagaagtacaggataggaagagcataatacactgtttttctcggtgtaagagctaaatcctcatctgtcatatccagaaatcactatataatayataataatgaaatgactaagttatgtgaggaaaaaaacagaagacattgctaaaagagttaaaagtcattgctctggagaattaggagggatgggg

SEQ ID NO: 25965 - DNA, 136 bp, Homo sapiens
cattatttataagtagatgcaacacctcatttatayctccttatctcatacagaagagctaagattggcagaaatgatttcacagaagccacttgcttggagcagactaccatgacaagccagtctcaggggatcc

SEQ ID NO: 25966 - DNA, 201 bp, Homo sapiens
agaaatccatgtgaactacagagccaccaactaaatgtacatcacagttttcaagaaaaaaaaaggtgtgtgagtgccacctggttgcttatggcttcgtrtttttatgttgagaaatttgaaatgagaaccttaaatttacatttacaggaaatgtgacataactcatacatcggcactgaattaaacaaaacaaaatac

SEQ ID NO: 25967 - DNA, 201 bp, Homo sapiens
agccagtctcaggggatccaccagcttcttcaggcagaaaaacgggccaaggacaagctagaggaagccaagaagattctgcatctacttttcctaaaacraagagactgggactgcttctggaaaaggaaagcgattgaagcaagccaaggaggaagcaatggtagaaattgaccagtacagaatgcagagagataaaga

SEQ ID NO: 25968 - DNA, 136 bp, Homo sapiens; identical to SEQ ID NO: 25965

SEQ ID NO: 25969 - DNA, 201 bp, Homo sapiens; identical to SEQ ID NO: 25966

SEQ ID NO: 25970 - DNA, 201 bp, Homo sapiens
caagcagtcaagagaagccttggctccctgtgaaggattaacttacagagaagcaggcaagatgaccttgctgcctggggcctgctctctcccaggaattytcatgtgggattccccttgccaggccggcctttggatctctcttccaagcctttcctgacttcctcttagatcatagattggacctggttttgttttcct

SEQ ID NO: 25971 - DNA, 118 bp, Homo sapiens
gctgtcgaaacctcagtrgataaaagacctagagaatgtgtatcccagaagaagctggccaaggatatgggagcaaccaccatggaccagaagtctctctgggcaggtgtagtggtct

SEQ ID NO: 25972 - DNA, 201 bp, Homo sapiens
ccctgcctctggccctggagctgctggacccatcacagagtcttcaggcttcctggcctattatgagatctgccagttcctgaaaggagccaagatcacghggctccaggatcagcaggttccctacgcagtcaaggggaaccagtgggtgggctatgatgatgtgaagagtatggagaccaaggttcagttcttaaagaa

SEQ ID NO: 25973 - DNA, 201 bp, Homo sapiens
ccctgtgaaggattaacttacagagaagcaggcaagatgaccttgctgcctggggcctgctctctcccaggaattctcatgtgggattccccttgccaggmcggcctttggatctctcttccaagcctttcctgacttcctcttagatcatagattggacctggttttgttttcctgcagctgttgacttgttgccctgaa

SEQ ID NO: 25974 - DNA, 201 bp, Homo sapiens
cccctgcctctggccctggagctgctggacccatcacagagtcttcaggcttcctggcctattatgagatctgccagttcctgaaaggagccaagatcacrcggctccaggatcagcaggttccctacgcagtcaaggggaaccagtgggtgggctatgatgatgtgaagagtatggagaccaaggttcagttcttaaaga

SEQ ID NO: 25975 - DNA, 201 bp, Homo sapiens
agaaaacactcatttcactgtgctgattcatgagttagcagaagcctttcagaaggacttcacaaaatccaccaaggaaaggcttctcttgactgcgggcrtatctgcagggaggcaaatgattgataacagctatcaagttgagaaactggcaaaagatctggatttcatcaacctcctgtcctttgacttccatgggtc

SEQ ID NO: 25976 - DNA, 201 bp, Homo sapiens
tcccaaactgaaaattctcttgtccattggagggtacctgtttggttccaaagggttccaccctatggtggattcttctacatcacgcttggaattcattractccataatcctgtttctgaggaaccataactttgatggactggatgtaagctggatctacccagatcagaaagaaaacactcatttcactgtgctgat

SEQ ID NO: 25977 - DNA, 201 bp, Homo sapiens
cctgtgaaggattaacttacagagaagcaggcaagatgaccttgctgcctggggcctgctctctcccaggaattctcatgtgggattccccttgccaggcyggcctttggatctctcttccaagcctttcctgacttcctcttagatcatagattggacctggttttgttttcctgcagctgttgacttgttgccctgaag

SEQ ID NO: 25978 - DNA, 151 bp, Homo sapiens
ggattccccttgccaggccggcctttggatctctcttccaagcctttcctgacttcctcttagatcatagattggacctggttttgttttcctgcagctgwtgacttgttgccctgaagtacaataaaaaaaattcattttgctccagtaa

SEQ ID NO: 25979 - DNA, 201 bp, Homo sapiens
ctggagctgctggacccatcacagagtcttcaggcttcctggcctattatgagatctgccagttcctgaaaggagccaagatcacgcggctccaggatcarcaggttccctacgcagtcaaggggaaccagtgggtgggctatgatgatgtgaagagtatggagaccaaggttcagttcttaaagaatttaaacctgggag

SEQ ID NO: 25980 - DNA, 201 bp, Homo sapiens
cagaaagaaaacactcatttcactgtgctgattcatgagttagcagaagcctttcagaaggacttcacaaaatccaccaaggaaaggcttctcttgactgygggcgtatctgcagggaggcaaatgattgataacagctatcaagttgagaaactggcaaaagatctggatttcatcaacctcctgtcctttgacttccat

SEQ ID NO: 25981 - DNA, 201 bp, Homo sapiens; identical to SEQ ID NO: 25970

SEQ ID NO: 25982 - DNA, 201 bp, Homo sapiens; identical to SEQ ID NO: 25972

SEQ ID NO: 25983 - DNA, 201 bp, Homo sapiens; identical to SEQ ID NO: 25974

SEQ ID NO: 25984 - DNA, 201 bp, Homo sapiens; identical to SEQ ID NO: 25975

SEQ ID NO: 25985 - DNA, 201 bp, Homo sapiens; identical to SEQ ID NO: 25973

SEQ ID NO: 25986 - DNA, 201 bp, Homo sapiens; identical to SEQ ID NO: 25979

SEQ ID NO: 25987 - DNA, 201 bp, Homo sapiens; identical to SEQ ID NO: 25976

SEQ ID NO: 25988 - DNA, 201 bp, Homo sapiens; identical to SEQ ID NO: 25980

SEQ ID NO: 25989 - DNA, 201 bp, Homo sapiens; identical to SEQ ID NO: 25977

SEQ ID NO: 25990 - DNA, 151 bp, Homo sapiens; identical to SEQ ID NO: 25978

SEQ ID NO: 25991 - DNA, 201 bp, Homo sapiens; identical to SEQ ID NO: 25970

SEQ ID NO: 25992 - DNA, 201 bp, Homo sapiens; identical to SEQ ID NO: 25972

SEQ ID NO: 25993 - DNA, 201 bp, Homo sapiens
cccacacatcccagagaggggattcattctaggagttctggcagaagatggagtctcgctctgtcacccaggctggaccatgagtgcttttttaaacctcrttttaaatctgaaagaagaatgaatacattgttgggaggctgggaagtttaaaatcaagctgcacacagatgaggtgtctggtgatggccctcttcctga

SEQ ID NO: 25994 - DNA, 201 bp, Homo sapiens; identical to SEQ ID NO: 25974

SEQ ID NO: 25995 - DNA, 201 bp, Homo sapiens; identical to SEQ ID NO: 25975

SEQ ID NO: 25996 - DNA, 201 bp, Homo sapiens; identical to SEQ ID NO: 25979

SEQ ID NO: 25997 - DNA, 201 bp, Homo sapiens; identical to SEQ ID NO: 25980

SEQ ID NO: 25998 - DNA, 201 bp, Homo sapiens
tcaagctgcacacagatgaggtgtctggtgatggccctcttcctgatctgctgaaagccacctacttgctgcatattcccatggctgtcgaaacctcagtrgataaaagacctagagaatgtgtatcccagaagaagctggccaaggatatgggagcaaccaccatggaccagaagtctctctgggcaggtgtagtggtct

SEQ ID NO: 25999 - DNA, 195 bp, Homo sapiens
ctgcccaccagttacaaggctgccccactctttccttcccacacatcccagagaggggattcattctaggagttctggcagaagatggagtctcrctctgtcacccaggctggaccatgagtgcttttttaaacctcattttaaatctgaaagaagaatgaatacattgttgggaggctgggaagtttaaaatca

SEQ ID NO: 26000 - DNA, 201 bp, Homo sapiens; identical to SEQ ID NO: 25973

SEQ ID NO: 26001 - DNA, 201 bp, Homo sapiens; identical to SEQ ID NO: 25976

SEQ ID NO: 26002 - DNA, 201 bp, Homo sapiens; identical to SEQ ID NO: 25977

SEQ ID NO: 26003 - DNA, 151 bp, Homo sapiens; identical to SEQ ID NO: 25978

SEQ ID NO: 26004 - DNA, 201 bp, Homo sapiens
ccatgtcatgacctatgacctccatggctcctgggagggctacactggagagaacagccccctctacaaatacccgactgacaccggcagcaacgcctacstcaatgtggattatgtcatgaactactggaaggacaacagggccccagctgagaagctcatgttggattcccagcctatggacactccttccttctgagc

SEQ ID NO: 26005 - DNA, 201 bp, Homo sapiens
gctattggtggctggaactttggcactgctcctttcactgccatggtttccactcctgagaaccaccagactttcatcaactcagtcatcaaattcctgcrccagtatgagtttgacgggctggactttgactgggagtaccccggctctcgtgtgagccctcctcaggacaagcatctcttcactgtcctggtgcaggaa

SEQ ID NO: 26006 - DNA, 201 bp, Homo sapiens
ctgggcctgcagagtacaagttgcaaagctccagcccaacccattgctcccattgccgaggcaaacatcacatgcggtgtcagccacagtggtagctctgrgggccgctctggcaggagctctgggggcagccccagaggtagtggattctgtgctgacagggccagtggcctgtaccctgaccccactgacaagaatgcc

SEQ ID NO: 26007 - DNA, 201 bp, Homo sapiens
ccattgacctggatgatttcacaggcactttctgcaaccaaggaaaattccctctgatcaccaccctgaaggatgctctgggcctgcagagtacaagttgyaaagctccagcccaacccattgctcccattgccgaggcaaacatcacatgcggtgtcagccacagtggtagctctgggggccgctctggcaggagctctg

SEQ ID NO: 26008 - DNA, 201 bp, Homo sapiens
tgaaaaacaaaaatagtcaactgaaaactctcttggctattggtggctggaactttggcactgctcctttcactgccatggtttccactcctgagaaccaycagactttcatcaactcagtcatcaaattcctgcgccagtatgagtttgacgggctggactttgactgggagtaccccggctctcgtgtgagccctcctc

SEQ ID NO: 26009 - DNA, 201 bp, Homo sapiens
gaaggatgctctgggcctgcagagtacaagttgcaaagctccagcccaacccattgctcccattgccgaggcaaacatcacatgcggtgtcagccacagtsgtagctctgggggccgctctggcaggagctctgggggcagccccagaggtagtggattctgtgctgacagggccagtggcctgtaccctgaccccactga

SEQ ID NO: 26010 - DNA, 201 bp, Homo sapiens
agatctgtaccttcctgaagaatggagctactgaagtatgggaggcttctgaggatgttccctatgcctacaaaggaaatgagtggcttggatacgataayaccaagagtttccaaatcaaggtagactattggctaaagaagaacaactttggaggtgccatggtctgggccattgacctggatgatttcacaggcactt

SEQ ID NO: 26011 - DNA, 201 bp, Homo sapiens
tgcgccagtatgagtttgacgggctggactttgactgggagtaccccggctctcgtgtgagccctcctcaggacaagcatctcttcactgtcctggtgcargaaatgcgtgaagcttttgagcaggaggccaagcacattaataagcccaggctgatggtcactgctgcagtagctgctggcatctccaacatccagtctg

SEQ ID NO: 26012 - DNA, 174 bp, Homo sapiens
gggagcttgtctctcaccttctttctctgggtaacaggctctgcctaccagctgacatgttacttcaccaactrggcccagaaccagccaggcctggggtgcttcaagcctgatgacatcgacccctgcctctgtacccacttgatctacgcctttgctggaatgcagaacaac

SEQ ID NO: 26013 - DNA, 201 bp, Homo sapiens
cctgcagagtacaagttgcaaagctccagcccaacccattgctcccattgccgaggcaaacatcacatgcggtgtcagccacagtggtagctctgggggcygctctggcaggagctctgggggcagccccagaggtagtggattctgtgctgacagggccagtggcctgtaccctgaccccactgacaagaatgcctccta

SEQ ID NO: 26014 - DNA, 201 bp, Homo sapiens
actttctgcaaccaaggaaaattccctctgatcaccaccctgaaggatgctctgggcctgcagagtacaagttgcaaagctccagcccaacccattgctcycattgccgaggcaaacatcacatgcggtgtcagccacagtggtagctctgggggccgctctggcaggagctctgggggcagccccagaggtagtggattc

SEQ ID NO: 26015 - DNA, 201 bp, Homo sapiens
gtgaagcttttgagcaggaggccaagcacattaataagcccaggctgatggtcactgctgcagtagctgctggcatctccaacatccagtctggctatgasatcccccaactgtcacagtacccggactacatccatgtcatgacctatgacctccatggctcctgggagggctacactggagagaacagccccctctaca

SEQ ID NO: 26016 - DNA, 201 bp, Homo sapiens
agtacccggactacatccatgtcatgacctatgacctccatggctcctgggagggctacactggagagaacagccccctctacaaatacccgactgacacyggcagcaacgcctacctcaatgtggattatgtcatgaactactggaaggacaacagggccccagctgagaagctcatgttggattcccagcctatggaca

SEQ ID NO: 26017 - DNA, 201 bp, Homo sapiens
tctttctctgggtaacaggctctgcctaccagctgacatgttacttcaccaactgggcccagaaccagccaggcctggggtgcttcaagcctgatgacatygacccctgcctctgtacccacttgatctacgcctttgctggaatgcagaacaacgagatcaccaccatcgaatgggatgacatgactctctaccaagctt

SEQ ID NO: 26018 - DNA, 201 bp, Homo sapiens
ctgaggatgttccctatgcctacaaaggaaatgagtggcttggatacgataacaccaagagtttccaaatcaaggtagactattggctaaagaagaacaastttggaggtgccatggtctgggccattgacctggatgatttcacaggcactttctgcaaccaaggaaaattccctctgatcaccaccctgaaggatgctc

SEQ ID NO: 26019 - DNA, 201 bp, Homo sapiens
ccaaacagtactaaatccctggattgtcctgggaggagtcactaccactgtcttccagcccaatgaatttatcatgccagacaatgcagtgccaggggacrtgctggtgttgacaaaacccctggggacacaggtggcagtggctgtgcaccagtggctggatattccttagaaatggaataagattaagctagtggtcac

SEQ ID NO: 26020 - DNA, 201 bp, Homo sapiens
attgctggaatctttacaggagaaccacttccaagaagatgagcagtttctgggagccgttatgccaaggcttcgcattggaatggatacttgtgccattyctttgaggcatggtgggctttccttggttcaaaccacagattacatttacccgatcgtagacgacccttacatgatgggcaggatagcatgtgccaatgt

SEQ ID NO: 26021 - DNA, 201 bp, Homo sapiens
gtcagtaataaaatgaccgacagggaaagggataaagtgatgcctctgattatccaaagttttaaagatgcagctgaggaagcaggaatgtctgtaatggkcagccaaacagtactaaatccctggattgtcctgggaggagtcactaccactgtcttccagcccaatgaatttatcatgccagacaatgcagtgccaggg

SEQ ID NO: 26022 - DNA, 190 bp, Homo sapiens
gccaccaggcgtggcatttttattcaggcgacgcttaagggagtccggccgtgcccggtgcattgtgggagcggcccgcagcccgttttygggaggaggcggagggtgcaaagccagccggtggatccataaagaacccagccaacccacagagggaggggaggggctgagctgtgaggagagcggggcc

SEQ ID NO: 26023 - DNA, 201 bp, Homo sapiens
cagggaaagggataaagtgatgcctctgattatccaaagttttaaagatgcagctgaggaagcaggaatgtctgtaatggtcagccaaacagtactaaatycctggattgtcctgggaggagtcactaccactgtcttccagcccaatgaatttatcatgccagacaatgcagtgccaggggacgtgctggtgttgacaaa

SEQ ID NO: 26024 - DNA, 130 bp, Homo sapiens
gccaccaggcgtggcatttttattcaggcracgcttaagggagtccggccgtgcccggtgcattgtgggagcggcccgcagcccgtttttgggaggaggcggagggtgcaaagccagccggtggatccat

SEQ ID NO: 26025 - DNA, 201 bp, Homo sapiens; identical to SEQ ID NO: 26019

SEQ ID NO: 26026 - DNA, 201 bp, Homo sapiens; identical to SEQ ID NO: 26020

SEQ ID NO: 26027 - DNA, 201 bp, Homo sapiens; identical to SEQ ID NO: 26021

SEQ ID NO: 26028 - DNA, 183 bp, Homo sapiens
ggcgtggcatttttattcaggcgacgcttaagggagtccggccgtgcccggtgcattgtgggagcggcccgcagcccgttttygggaggaggcggagggtgcaaagccagccggtggatccataaagaacccagccaacccacagagggaggggaggggctgagctgtgaggagagcggggcc

SEQ ID NO: 26029 - DNA, 201 bp, Homo sapiens; identical to SEQ ID NO: 26023

SEQ ID NO: 26030 - DNA, 123 bp, Homo sapiens
ggcgtggcatttttattcaggcracgcttaagggagtccggccgtgcccggtgcattgtgggagcggcccgcagcccgtttttgggaggaggcggagggtgcaaagccagccggtggatccat

SEQ ID NO: 26031 - DNA, 201 bp, Homo sapiens
gagttagcagtcacgacctccagcacaggatgtggtaccacagattgtcccacctacacagcaggcttcaggacttgctgaagggaggagtcatatatccrgcccttccacagcccaacttcaaaagcttacttcctttagctgtccattggcaccatacagcctccaagtctctgacttgtgcttggcagcaacatgaag

SEQ ID NO: 26032 - DNA, 201 bp, Homo sapiens
aaatagacagtttccttccaattctaaggatgtggtaccacagattgtcccacctacacagcaggcttcaggacttgctgaagggaggagtcatatatccrgcccttccacagcccaacttcaaaagcttacttcctttagctgtccattggcaccatacagcctccaagtctctgacttgtgcttggcagcaacatgaag

SEQ ID NO: 26033 - DNA, 201 bp, Homo sapiens
ggggtctgggccagtggccatagtgaagcctgggaatgagtgctggcaacctgcctcccattgcccaagagagagggcagggaacaggctactgtccttcyctgtggaattgccgagaaatctagcaccttgcatgctggatctgggctgcggggaggctctttttctccctggcctccagtgcccaccaggaggatctgc

SEQ ID NO: 26034 - DNA, 201 bp, Homo sapiens
ctggcaacctgcctcccattgcccaagagagagggcagggaacaggctactgtccttccctgtggaattgccgagaaatctagcaccttgcatgctggatytgggctgcggggaggctctttttctccctggcctccagtgcccaccaggaggatctgcgcacggtgcacagcccaccagagcactacagccttttattga

SEQ ID NO: 26035 - DNA, 201 bp, Homo sapiens
ctgaggccttggagcgctggcccgtgtccatgtttgagaagctgctgccgcggcacctggagataatctatgccatcaaccagcggcacctggaccacgtrgccgcgctgtttcccggcgatgtggaccgcctgcgcaggatgtctgtgatcgaggagggggactgcaagcggatcaacatggcccacctgtgtgtgattg

SEQ ID NO: 26036 - DNA, 201 bp, Homo sapiens
ccgataccatcgtggagaaaattggggaggagttcctgactgacctgagccagctgaagaagctgctgccgctggtcagtgacgaggtgttcatcagggaygtggccaaggtcaaacaggagaacaagctcaagttctcggccttcctggagaaggagtacaaggtgaagatcaacccctcctccatgttcgacgtgcatg

SEQ ID NO: 26037 - DNA, 201 bp, Homo sapiens
ccggaacttggctgagaacatctccagggtcctgtatccaaatgataacttctttgaggggaaggagctgcggctgaagcaggagtacttcgtggtggcckccacgctccaggacatcatccgccgcttcaagtcgtccaagttcggctgccgggaccctgtgagaacctgtttcgagacgttcccagacaaggtggccat

SEQ ID NO: 26038 - DNA, 149 bp, Homo sapiens
agcatcttccccaggcagcggctctgtggaggaggccatactcccctagttggccactggggccaccaccctgaccaccactgtgcccctcattgttactrccttgtgagataaaaactgattaaacctttgtggctgtggttggctga

SEQ ID NO: 26039 - DNA, 201 bp, Homo sapiens
tcagggacgtggccaaggtcaaacaggagaacaagctcaagttctcggccttcctggagaaggagtacaaggtgaagatcaacccctcctccatgttcgaygtgcatgtgaagaggatccacgagtacaagcggcagctgctcaactgcctgcacgtcgtcaccctgtacaatcgaatcaagagagacccggccaaggctt

SEQ ID NO: 26040 - DNA, 201 bp, Homo sapiens
ctttaaggatttttatgaactggagccagagaagttccagaataagaccaatggcatcaccccccgccggtggctgctgctgtgcaacccggggctggccrataccatcgtggagaaaattggggaggagttcctgactgacctgagccagctgaagaagctgctgccgctggtcagtgacgaggtgttcatcagggacgt

SEQ ID NO: 26041 - DNA, 201 bp, Homo sapiens
caatggctaccttgggcctggcagcatacggctatggaatccgctatgaatttgggatttttaaccagaagattgtcaatggctggcaggtggaggaggcygatgactggctgcgctacggcaacccctgggagaaagcgcggcctgagtatatgcttcccgtgcacttctacggacgcgtggagcacacccccgacggcg

SEQ ID NO: 26042 - DNA, 201 bp, Homo sapiens
cccaccccgccctctccatccctgagctcatgcggatcctggtggacgtggagaaggtggactgggacaaggcctgggaaatcacgaagaagacctgtgcrtacaccaaccacactgtgctgcctgaggccttggagcgctggcccgtgtccatgtttgagaagctgctgccgcggcacctggagataatctatgccatca

SEQ ID NO: 26043 - DNA, 101 bp, Homo sapiens
gttggccactggggccaccaccctgaccaccactgtgcccctcattgttactaccttgtgagataaaaactgattaaacctttgtggctgtggttggctgr

SEQ ID NO: 26044 - DNA, 201 bp, Homo sapiens
gctatgtattagccgatgtctttagtgttgagcctctggattctggggtctgggccagtggccatagtgaagcctgggaatgagtgctggcaacctgcctyccattgcccaagagagagggcagggaacaggctactgtccttccctgtggaattgccgagaaatctagcaccttgcatgctggatctgggctgcggggag

SEQ ID NO: 26045 - DNA, 201 bp, Homo sapiens
tgcggggaggctctttttctccctggcctccagtgcccaccaggaggatctgcgcacggtgcacagcccaccagagcactacagccttttattgagtgggkcaagtgctgggctgtggtcgtgccctgacagcatcttccccaggcagcggctctgtggaggaggccatactcccctagttggccactggggccaccaccc

SEQ ID NO: 26046 - DNA, 201 bp, Homo sapiens
ccgatgtctttagtgttgagcctctggattctggggtctgggccagtggccatagtgaagcctgggaatgagtgctggcaacctgcctcccattgcccaaragagagggcagggaacaggctactgtccttccctgtggaattgccgagaaatctagcaccttgcatgctggatctgggctgcggggaggctctttttctc

SEQ ID NO: 26047 - DNA, 201 bp, Homo sapiens
actgcttcaaggacatcgtgaacatgctgatgcaccatgacaggttcaaggtgtttgcagactatgaagcctacatgcagtgccaggcacaggtggaccarctgtaccggaaccccaaggagtggaccaagaaggtcatcaggaacatcgcctgctcgggcaagttctccagtgaccggaccatcacggagtatgcacggg

SEQ ID NO: 26048 - DNA, 201 bp, Homo sapiens; identical to SEQ ID NO: 26037

SEQ ID NO: 26049 - DNA, 149 bp, Homo sapiens; identical to SEQ ID NO: 26038

SEQ ID NO: 26050 - DNA, 201 bp, Homo sapiens; identical to SEQ ID NO: 26039

SEQ ID NO: 26051 - DNA, 201 bp, Homo sapiens; identical to SEQ ID NO: 26040

SEQ ID NO: 26052 - DNA, 201 bp, Homo sapiens
atcccccgggactaggcacaccctgccttggcgggaccagcgggcatttgttttcttgctgactttgcacctccttttttccccaaacactttgccagccrctggtggtccctgcttttctgagtaccatgtttccaggaggggccatgggggtcagggtggttttgagagagcagggtaaggaaggaatgtgctagaagt

SEQ ID NO: 26053 - DNA, 201 bp, Homo sapiens
ggatgaagttggctgacacagcttagcttggttttgcttattcaaaagagaaaataactacacatggaaatgaaactagctgaagccttttcttgttttakcaactgaaaattgtacttggtcacttttgtgcttgaggaggcccattttctgcctggcagggggcaggtctgtgccctcccgctgactcctgctgtgtcc

SEQ ID NO: 26054 - DNA, 201 bp, Homo sapiens
aggaccaggggtcccggaggaacccatttgtgctctgcttggacagcaggcctggcactgggaggtgggggtgagcccctcacagccttgcccctccccarggctggcaacctgcctcccattgcccaagagagagggcagggaacaggctactgtccttccctgtggaattgccgagaaatctagcaccttgcatgctgg

SEQ ID NO: 26055 - DNA, 201 bp, Homo sapiens; identical to SEQ ID NO: 26042

SEQ ID NO: 26056 - DNA, 201 bp, Homo sapiens
aggaacccatttgtgctctgcttggacagcaggcctggcactgggaggtgggggtgagcccctcacagccttgcccctccccaaggctggcaacctgcctyccattgcccaagagagagggcagggaacaggctactgtccttccctgtggaattgccgagaaatctagcaccttgcatgctggatctgggctgcggggag

SEQ ID NO: 26057 - DNA, 201 bp, Homo sapiens; identical to SEQ ID NO: 26047

SEQ ID NO: 26058 - DNA, 201 bp, Homo sapiens
gaggtgggggtgagcccctcacagccttgcccctccccaaggctggcaacctgcctcccattgcccaagagagagggcagggaacaggctactgtccttcyctgtggaattgccgagaaatctagcaccttgcatgctggatctgggctgcggggaggctctttttctccctggcctccagtgcccaccaggaggatctgc

SEQ ID NO: 26059 - DNA, 201 bp, Homo sapiens; identical to SEQ ID NO: 26034

SEQ ID NO: 26060 - DNA, 201 bp, Homo sapiens; identical to SEQ ID NO: 26035

SEQ ID NO: 26061 - DNA, 201 bp, Homo sapiens; identical to SEQ ID NO: 26036

SEQ ID NO: 26062 - DNA, 201 bp, Homo sapiens
caatggctaccttgggcctggcagcatacggctatggaatccgctatgaatttgggatttttaaccagaagattgtcaatggctggcaggtagaggaggcygatgactggctgcgctacggcaacccctgggagaaagcgcggcctgagtatatgcttcccgtgcacttctacggacgcgtggagcacacccccgacggcg

SEQ ID NO: 26063 - DNA, 201 bp, Homo sapiens; identical to SEQ ID NO: 26045

SEQ ID NO: 26064 - DNA, 201 bp, Homo sapiens
gtgctctgcttggacagcaggcctggcactgggaggtgggggtgagcccctcacagccttgcccctccccaaggctggcaacctgcctcccattgcccaaragagagggcagggaacaggctactgtccttccctgtggaattgccgagaaatctagcaccttgcatgctggatctgggctgcggggaggctctttttctc

SEQ ID NO: 26065 - DNA, 201 bp, Homo sapiens; identical to SEQ ID NO: 26037

SEQ ID NO: 26066 - DNA, 155 bp, Homo sapiens
agcatcttccccaggcagcggctctgtggaggaggccatactcccctagttggccactggggccaccaccctgaccaccactgtgcccctcattgttactrccttgtgagataaaaactgattaaacctttgtggctgtggttggctgacatggg

SEQ ID NO: 26067 - DNA, 201 bp, Homo sapiens; identical to SEQ ID NO: 26039

SEQ ID NO: 26068 - DNA, 201 bp, Homo sapiens; identical to SEQ ID NO: 26040

SEQ ID NO: 26069 - DNA, 201 bp, Homo sapiens; identical to SEQ ID NO: 26052

SEQ ID NO: 26070 - DNA, 201 bp, Homo sapiens; identical to SEQ ID NO: 26042

SEQ ID NO: 26071 - DNA, 201 bp, Homo sapiens
aacccgggatgactgaggggaacccatttgtgctctgcttggacagcaggcctggcactgggaggtgggggtgagcccctcacagccttgcccctccccarggctggcaacctgcctcccattgcccaagagagagggcagggaacaggctactgtccttccctgtggaattgccgagaaatctagcaccttgcatgctgg

SEQ ID NO: 26072 - DNA, 201 bp, Homo sapiens
gggaacccatttgtgctctgcttggacagcaggcctggcactgggaggtgggggtgagcccctcacagccttgcccctccccaaggctggcaacctgcctyccattgcccaagagagagggcagggaacaggctactgtccttccctgtggaattgccgagaaatctagcaccttgcatgctggatctgggctgcggggag

SEQ ID NO: 26073 - DNA, 201 bp, Homo sapiens; identical to SEQ ID NO: 26047

SEQ ID NO: 26074 - DNA, 201 bp, Homo sapiens; identical to SEQ ID NO: 26058

SEQ ID NO: 26075 - DNA, 201 bp, Homo sapiens; identical to SEQ ID NO: 26034

SEQ ID NO: 26076 - DNA, 201 bp, Homo sapiens; identical to SEQ ID NO: 26035

SEQ ID NO: 26077 - DNA, 201 bp, Homo sapiens; identical to SEQ ID NO: 26036

SEQ ID NO: 26078 - DNA, 201 bp, Homo sapiens; identical to SEQ ID NO: 26041

SEQ ID NO: 26079 - DNA, 201 bp, Homo sapiens; identical to SEQ ID NO: 26064

SEQ ID NO: 26080 - DNA, 201 bp, Homo sapiens; identical to SEQ ID NO: 26045

SEQ ID NO: 26081 - DNA, 201 bp, Homo sapiens
cccagagaaactcccacgttaacccacgaaaccttcaaagcactgaagccaggtctttctgcctatgctgatgatgttgaaaagagcgctcagggaatccrggaactactggatgttgctaaacaggacattccgttcgacttctggaaggccatttttcattacatcgactccctgaacagacagaagagtccagcctca

SEQ ID NO: 26082 - DNA, 201 bp, Homo sapiens
ggtgtctcgggccaccatccgcccacctcgggctgaccccacctcctccatggacagtgtgagccccgggccgtgcatcctgctcagtgtggcgtcagtgkcggggctgagccccttgagctgcttcagtgaatgtacagtgcccggcacgagctgaacctcatgtgttccactcccaataaaaggttgacaggggcttct

SEQ ID NO: 26083 - DNA, 201 bp, Homo sapiens
cgtccgcggggctgtggctgctgctgtgcatgtccctgcgatgggagtcttgtctcccagcctgtcagtttcctccccagggcagagctccccttcctgcragagtctgggaggcggtgcaggctgtcctggctgctctggggaagccgagggacagccataacacccccgggacagtaggtctgggcggcaccactggga

SEQ ID NO: 26084 - DNA, 201 bp, Homo sapiens
tcaaagcactgaagccaggtctttctgcctatgctgatgatgttgaaaagagcgctcagggaatccgggaactactggatgttgctaaacaggacattccrttcgacttctggaaggccatttttcattacatcgactccctgaacagacagaagagtccagcctcatagtggccgagccatccctgtccccgtcagcagt

SEQ ID NO: 26085 - DNA, 201 bp, Homo sapiens
tctctgtcgtgtgggtgccaagtgcttgtgtagaaactgtgttctgagcccccttttctggacaccaactgtgtcctgtgaatgtatcgctactgtgagcygttcccgcctagccagggccatgtcttaggtgcagctgtgccacgggtcagctgagccacagtcccagaaccaagctctcggtgtctcgggccaccatcc

SEQ ID NO: 26086 - DNA, 201 bp, Homo sapiens
gcggatgccgggcatgagctgctgtaaactatttgtggctgtgctgcttgagtgacgtctctgtcgtgtgggtgccaagtgcttgtgtagaaactgtgttytgagcccccttttctggacaccaactgtgtcctgtgaatgtatcgctactgtgagctgttcccgcctagccagggccatgtcttaggtgcagctgtgcca

SEQ ID NO: 26087 - DNA, 201 bp, Homo sapiens
tgcgggtggcgaaggtggcataccccctggggctgtgtgtgggcgtgttcatctatgttgcctacatcaagtggcaccgggccaccgccacccaggccttyttcagcatcaccagggcagccccgggggcccggtggggtcagcaggcccacagccccctggggacagctgcagacgggcacgaggtcttctacgggatca

SEQ ID NO: 26088 - DNA, 201 bp, Homo sapiens
tgtttgcctcttccttgggtatgaatgtgtgagttcacccagaggcctgctctcctcacacattgtgtggtttggggttaatgatggagggagacacctcytcatagacggcaggtgcccacctttcagggagtctcccagcatgggcggatgccgggcatgagctgctgtaaactatttgtggctgtgctgcttgagtga

SEQ ID NO: 26089 - DNA, 201 bp, Homo sapiens
tagcagtttctgggaaacaggaatgggctatgtgaatgaaaaaaggtatccgttatgaaacttccagaaaaacgagctacatttttcagcagccgcagcayggtccttggcaaacaaggatgagaaaaatatccaaccacgggagcctgcgggtggcgaaggtggcataccccctggggctgtgtgtgggcgtgttcatct

SEQ ID NO: 26090 - DNA, 201 bp, Homo sapiens
atgagcccggcggggaagcttcgcgtagcagtttctgggaaacaggaatgggctatgtgaatgaaaaaaggtatccgttatgaaacttccagaaaaacgarctacatttttcagcagccgcagcacggtccttggcaaacaaggatgagaaaaatatccaaccacgggagcctgcgggtggcgaaggtggcataccccctg

SEQ ID NO: 26091 - DNA, 201 bp, Homo sapiens
ctgtgtgtgggcgtgttcatctatgttgcctacatcaagtggcaccgggccaccgccacccaggccttcttcagcatcaccagggcagccccgggggcccrgtggggtcagcaggcccacagccccctggggacagctgcagacgggcacgaggtcttctacgggatcatgtttgatgcaggaagcactggcacccgagta

SEQ ID NO: 26092 - DNA, 201 bp, Homo sapiens
cccagagaaactcccacgttaacccacgaaaccttcaaagcactgaagccaggtctttctgcctatgctgatgatgttgaaaagagcgctcagggaatccrggaactactggatgttgctaaacaggacattccgttcgacttctggaaggccacccctctggtcctcaaggccacagctggcttacgcctgttacctgga

SEQ ID NO: 26093 - DNA, 201 bp, Homo sapiens; identical to SEQ ID NO: 26082

SEQ ID NO: 26094 - DNA, 201 bp, Homo sapiens; identical to SEQ ID NO: 26083

SEQ ID NO: 26095 - DNA, 201 bp, Homo sapiens
tcaaagcactgaagccaggtctttctgcctatgctgatgatgttgaaaagagcgctcagggaatccgggaactactggatgttgctaaacaggacattccrttcgacttctggaaggccacccctctggtcctcaaggccacagctggcttacgcctgttacctggagaaaaggcccagaagttactgcagaaggtgaaag

SEQ ID NO: 26096 - DNA, 201 bp, Homo sapiens; identical to SEQ ID NO: 26085

SEQ ID NO: 26097 - DNA, 201 bp, Homo sapiens
ccacccctctggtcctcaaggccacagctggcttacgcctgttacctggagaaaaggcccagaagttactgcagaaggtgaaagaagtatttaaagcatcrcctttccttgtaggggatgactgtgtttccatcatgaacggaacagatgaaggcgtttcggcgtggatcaccatcaacttcctgacaggcagcttgaaaa

SEQ ID NO: 26098 - DNA, 201 bp, Homo sapiens
cctggtggtgggggacttcgagatcgcagccaagtacgtgtgtcggaccctggagacacagccgcagagcagccccttctcatgcatggacctcacctacrtcagcctgctactccaggagttcggctttcccaggagcaaagtgctgaagctcactcggaaaattgacaatgttgagaccagctgggctctgggggccat

SEQ ID NO: 26099 - DNA, 201 bp, Homo sapiens; identical to SEQ ID NO: 26086

SEQ ID NO: 26100 - DNA, 201 bp, Homo sapiens; identical to SEQ ID NO: 26087

SEQ ID NO: 26101 - DNA, 201 bp, Homo sapiens; identical to SEQ ID NO: 26088

SEQ ID NO: 26102 - DNA, 201 bp, Homo sapiens
ggcggagcgcgcggtgcatggaatgggctatgtgaatgaaaaaaggtatccgttatgaaacttccagaaaaacgagctacatttttcagcagccgcagcayggtccttggcaaacaaggatgagaaaaatatccaaccacgggagcctgcgggtggcgaaggtggcataccccctggggctgtgtgtgggcgtgttcatct

SEQ ID NO: 26103 - DNA, 201 bp, Homo sapiens
aaagggcactcgtctccgtgggtgtggcggagcgcgcggtgcatggaatgggctatgtgaatgaaaaaaggtatccgttatgaaacttccagaaaaacgarctacatttttcagcagccgcagcacggtccttggcaaacaaggatgagaaaaatatccaaccacgggagcctgcgggtggcgaaggtggcataccccctg

SEQ ID NO: 26104 - DNA, 201 bp, Homo sapiens; identical to SEQ ID NO: 26091

SEQ ID NO: 26105 - DNA, 201 bp, Homo sapiens
ttcaaaacagagtgcacaggacggaggaagtgaagcatgtggacttctatgctttctcctactattacgaccttgcagctggtgtgggcctcatagatgcrgagaagggaggcagcctggtggtgggggacttcgagatcgcagccaagtacgtgtgtcggaccctggagacacagccgcagagcagccccttctcatgca

SEQ ID NO: 26106 - DNA, 201 bp, Homo sapiens; identical to SEQ ID NO: 26092

SEQ ID NO: 26107 - DNA, 201 bp, Homo sapiens; identical to SEQ ID NO: 26083

SEQ ID NO: 26108 - DNA, 201 bp, Homo sapiens; identical to SEQ ID NO: 26095

SEQ ID NO: 26109 - DNA, 201 bp, Homo sapiens
tctctgtcgtgtgggtgccaagtgcttgtgtagaaactgtgttctgagcccccttttctggacaccaactgtgtcctgtgaatgtatcgctactgtgagcygttcccgcctagccagggccatgtcttaggtgcagctgtgccacgggtcagctgagccacaccccttgagctgcttcagtgaatgtacagtgcccggcac

SEQ ID NO: 26110 - DNA, 201 bp, Homo sapiens; identical to SEQ ID NO: 26097

SEQ ID NO: 26111 - DNA, 201 bp, Homo sapiens; identical to SEQ ID NO: 26098

SEQ ID NO: 26112 - DNA, 201 bp, Homo sapiens; identical to SEQ ID NO: 26086

SEQ ID NO: 26113 - DNA, 201 bp, Homo sapiens; identical to SEQ ID NO: 26087

SEQ ID NO: 26114 - DNA, 201 bp, Homo sapiens; identical to SEQ ID NO: 26088

SEQ ID NO: 26115 - DNA, 201 bp, Homo sapiens
tgtggcggagcgcgcggtgcatggaatgggctatgtgaatgaaaaaaggtatccgttatgaaacttccagaaaaacgagctacatttttcagccgcagcayggtccttggcaaacaaggatgagaaaaatatccaaccacgggagcctgcgggtggcgaaggtggcataccccctggggctgtgtgtgggcgtgttcatct

SEQ ID NO: 26116 - DNA, 201 bp, Homo sapiens
aaagggcactcgtctccgtgggtgtggcggagcgcgcggtgcatggaatgggctatgtgaatgaaaaaaggtatccgttatgaaacttccagaaaaacgarctacatttttcagccgcagcacggtccttggcaaacaaggatgagaaaaatatccaaccacgggagcctgcgggtggcgaaggtggcataccccctgggg

SEQ ID NO: 26117 - DNA, 201 bp, Homo sapiens; identical to SEQ ID NO: 26091

SEQ ID NO: 26118 - DNA, 201 bp, Homo sapiens; identical to SEQ ID NO: 26105

SEQ ID NO: 26119 - DNA, 201 bp, Homo sapiens
ctcccctcttcctaagcggccccccctctcccgggcagcagaagaaggggtgggacccgggcgggctccgggagggggccctggaggaatggatggtggcsgaagggcggagcaggggcggggcccgcggagactccacggggcgccccgggcgtgaggcacccactctgggagcacagagagctcaggtagcctgcctag

SEQ ID NO: 26120 - DNA, 201 bp, Homo sapiens
atggtgccaccagcgtcctttttgagagcaccccagtttatcccaatgctggtcggtactgggagacagtagagaggttgaagatcaatcagttctatggygccccaacggctgtccggctgttgctgaaatacggtgatgcctgggtgaagaagtatgatcgctcctccctgcggaccctggggtcagtgggagagccca

SEQ ID NO: 26121 - DNA, 201 bp, Homo sapiens
agagaggttgaagatcaatcagttctatggcgccccaacggctgtccggctgttgctgaaatacggtgatgcctgggtgaagaagtatgatcgctcctccytgcggaccctggggtcagtgggagagcccatcaactgtgaggcctgggagtggcttcacagggtggtgggggacagcaggtgcacgctggtggacacctg

SEQ ID NO: 26122 - DNA, 201 bp, Homo sapiens
ttgccatctacatgcccgtgtccccattggctgtggcagcaatgctggcctgtgccaggatcggagctgtccacacagtcatctttgctggcttcagtgcrgagtccttggctgggaggatcaatgatgccaagtgcaaggtggttatcaccttcaaccaaggactccggggtgggcgcgtggtggagctgaagaaaatag

SEQ ID NO: 26123 - DNA, 201 bp, Homo sapiens
aggcccttctttggcatcgtccccgtcctcatggatgagaagggcagcgtcgtggagggcagcaacgtctccggggccctgtgcatctcccaggcctggcygggcatggccaggaccatctatggcgaccaccagcgatttgtggacgcctacttcaaggcctacccaggctattacttcactggagacggggcttaccga

SEQ ID NO: 26124 - DNA, 201 bp, Homo sapiens
cctgcgtcctggggtcctgggccgcacgtgcctctggcagctcgaagaagctgtcggggcttgcaggagagcgtgcaaactgaaaccaaaacaggccgackcgaggaacatccgggtgggaccgcagactcaccggagcgcagcgcctgggccagggcctgggaccctgctccgccccgcgctcccctgcaccccttcccc

SEQ ID NO: 26125 - DNA, 201 bp, Homo sapiens
ccgaactgagggcggctattaccagatcacagggcggatggatgatgtcatcaacatcagtggccaccggctggggaccgcagagattgaggacgccatcsccgaccaccctgcagtaccagaaagtgctgtcattggctacccccacgacatcaaaggagaagctgcctttgccttcattgtggtgaaagatagtgcggg

SEQ ID NO: 26126 - DNA, 193 bp, Homo sapiens
actgagtggtggtcttttgttacaggcttagcaacaaagctgtgccctgggcatggggggctgtagtgtagctacagttgtgcgtttgtgaaatggcttarctttccatgttgctgagaggaacctggacatggtcccgggcatctgaatgatctgtaggggagggagttcaaataaagctttattttgttca

SEQ ID NO: 26127 - DNA, 201 bp, Homo sapiens
ctccctcccggctcctccccatcccagagggtcccctcgccccaggccctgagcctgcgtcctggggtcctgggccgcacgtgcctctggcagctcgaagragctgtcggggcttgcaggagagcgtgcaaactgaaaccaaaacaggccgactcgaggaacatccgggtgggaccgcagactcaccggagcgcagcgcct

SEQ ID NO: 26128 - DNA, 201 bp, Homo sapiens
accacggccctcggaagaaggggcggaaatcctccctgccatggcgatgaggcccttctttggcatcgtccccgtcctcatggatgagaagggcagcgtcrtggagggcagcaacgtctccggggccctgtgcatctcccaggcctggccgggcatggccaggaccatctatggcgaccaccagcgatttgtggacgccta

SEQ ID NO: 26129 - DNA, 201 bp, Homo sapiens
aagaaggggcggaaatcctccctgccatggcgatgaggcccttctttggcatcgtccccgtcctcatggatgagaagggcagcgtcgtggagggcagcaaygtctccggggccctgtgcatctcccaggcctggccgggcatggccaggaccatctatggcgaccaccagcgatttgtggacgcctacttcaaggcctacc

SEQ ID NO: 26130 - DNA, 201 bp, Homo sapiens
ccgtgcagcatgtcctggtggctcacaggacagacaacaaggtccacatgggggatctggacgtcccgctggagcaggaaatggccaaggaggaccctgtktgcgccccagagagcatgggcagtgaggacatgctcttcatgctgtacacctcagggagcaccggaatgcccaagggcatcgtccatacccaggcaggct

SEQ ID NO: 26131 - DNA, 201 bp, Homo sapiens
tcgcaccacggccctcggaagaaggggcggaaatcctccctgccatggcgatgaggcccttctttggcatcgtccccgtcctcatggatgagaagggcagygtcgtggagggcagcaacgtctccggggccctgtgcatctcccaggcctggccgggcatggccaggaccatctatggcgaccaccagcgatttgtggacg

SEQ ID NO: 26132 - DNA, 201 bp, Homo sapiens
catcaacatcagtggccaccggctggggaccgcagagattgaggacgccatcgccgaccaccctgcagtaccagaaagtgctgtcattggctacccccacracatcaaaggagaagctgcctttgccttcattgtggtgaaagatagtgcgggtgactcagatgtggtggtgcaggagctcaagtccatggtggccaccaa

SEQ ID NO: 26133 - DNA, 201 bp, Homo sapiens
ttcagcctctgagatgcggaactgaccgacctattgtcttgggacccaccagtgcgcttgggtgcaccagcccccttaacgttggtgccggctccctcccrgctcctccccatcccagagggtcccctcgccccaggccctgagcctgcgtcctggggtcctgggccgcacgtgcctctggcagctcgaagaagctgtcgg

SEQ ID NO: 26134 - DNA, 201 bp, Homo sapiens; identical to SEQ ID NO: 26119

SEQ ID NO: 26135 - DNA, 201 bp, Homo sapiens; identical to SEQ ID NO: 26121

SEQ ID NO: 26136 - DNA, 201 bp, Homo sapiens; identical to SEQ ID NO: 26122

SEQ ID NO: 26137 - DNA, 201 bp, Homo sapiens
ggcagccgtccccgggcagcgcggatcgcagccctgcaggggcccctcctccggtattccgtccgccccgcccgctctaagcagtggctccacgtcacccmgtccctcatcccatcgggccccagatccacgtgcccagctcgggccggcgcccgcggggacccggcggccgcttgggacgccccgctgctggccttgctc

SEQ ID NO: 26138 - DNA, 201 bp, Homo sapiens; identical to SEQ ID NO: 26123

SEQ ID NO: 26139 - DNA, 201 bp, Homo sapiens; identical to SEQ ID NO: 26124

SEQ ID NO: 26140 - DNA, 201 bp, Homo sapiens; identical to SEQ ID NO: 26125

SEQ ID NO: 26141 - DNA, 201 bp, Homo sapiens; identical to SEQ ID NO: 26127

SEQ ID NO: 26142 - DNA, 201 bp, Homo sapiens; identical to SEQ ID NO: 26129

SEQ ID NO: 26143 - DNA, 201 bp, Homo sapiens; identical to SEQ ID NO: 26120

SEQ ID NO: 26144 - DNA, 191 bp, Homo sapiens
actgagtggtggtcttttgttacaggcttagcaacaaagctgtgccctgggcatggggggctgtagtgtagctacagttgtgcgtttgtgaaatggcttarctttccatgttgctgagaggaacctggacatggtcccgggcatctgaatgatctgtaggggagggagttcaaataaagctttattttgtt

SEQ ID NO: 26145 - DNA, 201 bp, Homo sapiens; identical to SEQ ID NO: 26128

SEQ ID NO: 26146 - DNA, 201 bp, Homo sapiens; identical to SEQ ID NO: 26130

SEQ ID NO: 26147 - DNA, 201 bp, Homo sapiens; identical to SEQ ID NO: 26132

SEQ ID NO: 26148 - DNA, 201 bp, Homo sapiens; identical to SEQ ID NO: 26131

SEQ ID NO: 26149 - DNA, 139 bp, Homo sapiens
tgcaccagcccccttaacgttggtgccggctccctcccrgctcctccccatcccagagggtcccctcgccccaggccctgagcctgcgtcctggggtcctgggccgcacgtgcctctggcagctcgaagaagctgtcgg

SEQ ID NO: 26150 - DNA, 201 bp, Homo sapiens; identical to SEQ ID NO: 26119

SEQ ID NO: 26151 - DNA, 201 bp, Homo sapiens; identical to SEQ ID NO: 26120

SEQ ID NO: 26152 - DNA, 201 bp, Homo sapiens; identical to SEQ ID NO: 26121

SEQ ID NO: 26153 - DNA, 201 bp, Homo sapiens; identical to SEQ ID NO: 26122

SEQ ID NO: 26154 - DNA, 201 bp, Homo sapiens; identical to SEQ ID NO: 26123

SEQ ID NO: 26155 - DNA, 201 bp, Homo sapiens; identical to SEQ ID NO: 26124

SEQ ID NO: 26156 - DNA, 201 bp, Homo sapiens; identical to SEQ ID NO: 26125

SEQ ID NO: 26157 - DNA, 191 bp, Homo sapiens; identical to SEQ ID NO: 26144

SEQ ID NO: 26158 - DNA, 201 bp, Homo sapiens; identical to SEQ ID NO: 26127

SEQ ID NO: 26159 - DNA, 201 bp, Homo sapiens; identical to SEQ ID NO: 26128

SEQ ID NO: 26160 - DNA, 201 bp, Homo sapiens; identical to SEQ ID NO: 26129

SEQ ID NO: 26161 - DNA, 201 bp, Homo sapiens; identical to SEQ ID NO: 26130

SEQ ID NO: 26162 - DNA, 201 bp, Homo sapiens; identical to SEQ ID NO: 26131

SEQ ID NO: 26163 - DNA, 201 bp, Homo sapiens; identical to SEQ ID NO: 26132

SEQ ID NO: 26164 - DNA, 201 bp, Homo sapiens; identical to SEQ ID NO: 26133

SEQ ID NO: 26165 - DNA, 201 bp, Homo sapiens
cccggttcgcgcgggcgtcgtgcacgcggttgtagctgcccggcggcggcagaagcggcgctcgcgccaagggacgtgtttctgcgctcgcgtggtcatgkaggcgctgccgctgctagccgcgacaactccggaccacggccgccaccgaaggctgcttctgctgccgctactgctgttcctgctgccggctggagctgt

SEQ ID NO: 26166 - DNA, 153 bp, Homo sapiens
tctgccctgctggctggaaacctggtagtgaaacaataatcccagatccagctggaaagctgaagtatttcgataaactgaattgagaaatacttcttcargttatgatgcttgaaagttctcaataaagttcacggtttcattaccacattg

SEQ ID NO: 26167 - DNA, 201 bp, Homo sapiens
gacaatgctgcccgagtcctccccatcatgttccctgcactctacaggaactccaagagccactggaacaagacaatccatggactgatctataatgcccygaagttgtttatggaaatgaatcagaagctgtttgatgactgcacacaacaatacaaggcagagaagcagaagggccggttccgaatgaaggaaagggaa

SEQ ID NO: 26168 - DNA, 201 bp, Homo sapiens
gtgctatgctgggcaggccttctcttgtcccttataggtaccttggaggggccaggggctgaggaaggccggacccaggttccaggggcgcaggcagtgckgcttttggctgtgtacatagggtgctttattctccacagagtgatacatgctaaggtgggttgggcttggaccgatgtccccatatgtacagaactgaat

SEQ ID NO: 26169 - DNA, 201 bp, Homo sapiens
gccaacacctatttatttccttgtttgtgctatgctgggcaggccttctcttgtcccttataggtaccttggaggggccaggggctgaggaaggccggacycaggttccaggggcgcaggcagtgcggcttttggctgtgtacatagggtgctttattctccacagagtgatacatgctaaggtgggttgggcttggaccg

SEQ ID NO: 26170 - DNA, 167 bp, Homo sapiens
ggtaccttggaggggccaggggctgaggaaggccggacccaggttccaggggcgcaggcagtgcggcttttggctgtgtacatagggtgctttattctccmcagagtgatacatgctaaggtgggttgggcttggaccgatgtccccatatgtacagaactgaataa

SEQ ID NO: 26171 - DNA, 201 bp, Homo sapiens
gaagggaccaccctggggctgactgcttttctgtgctgttggttcccaaaactagaaagaaggaagcagggagcggtgccccaagcatggctcctgccaamacctatttatttccttgtttgtgctatgctgggcaggccttctcttgtcccttataggtaccttggaggggccaggggctgaggaaggccggacccaggt

SEQ ID NO: 26172 - DNA, 201 bp, Homo sapiens
ctaccccgtgccctgtctttggtgagcagcagccctggggtcacagacatggaagggaccaccctggggctgactgcttttctgtgctgttggttcccaamactagaaagaaggaagcagggagcggtgccccaagcatggctcctgccaacacctatttatttccttgtttgtgctatgctgggcaggccttctcttgtc

SEQ ID NO: 26173 - DNA, 201 bp, Homo sapiens; identical to SEQ ID NO: 26167

SEQ ID NO: 26174 - DNA, 201 bp, Homo sapiens; identical to SEQ ID NO: 26168

SEQ ID NO: 26175 - DNA, 201 bp, Homo sapiens; identical to SEQ ID NO: 26169

SEQ ID NO: 26176 - DNA, 201 bp, Homo sapiens
ggtaccttggaggggccaggggctgaggaaggccggacccaggttccaggggcgcaggcagtgcggcttttggctgtgtacatagggtgctttattctccmcagagtgatacatgctaaggtgggttgggcttggaccgatgtccccatatgtacagaactgaataaagtgggtctctgagaagtctgatgtgccttgatg

SEQ ID NO: 26177 - DNA, 201 bp, Homo sapiens; identical to SEQ ID NO: 26171

SEQ ID NO: 26178 - DNA, 201 bp, Homo sapiens; identical to SEQ ID NO: 26172

SEQ ID NO: 26179 - DNA, 201 bp, Homo sapiens; identical to SEQ ID NO: 26167

SEQ ID NO: 26180 - DNA, 201 bp, Homo sapiens; identical to SEQ ID NO: 26168

SEQ ID NO: 26181 - DNA, 201 bp, Homo sapiens; identical to SEQ ID NO: 26169

SEQ ID NO: 26182 - DNA, 167 bp, Homo sapiens; identical to SEQ ID NO: 26170

SEQ ID NO: 26183 - DNA, 201 bp, Homo sapiens; identical to SEQ ID NO: 26171

SEQ ID NO: 26184 - DNA, 201 bp, Homo sapiens; identical to SEQ ID NO: 26172

SEQ ID NO: 26185 - DNA, 201 bp, Homo sapiens; identical to SEQ ID NO: 26167

SEQ ID NO: 26186 - DNA, 201 bp, Homo sapiens; identical to SEQ ID NO: 26168

SEQ ID NO: 26187 - DNA, 201 bp, Homo sapiens; identical to SEQ ID NO: 26169

SEQ ID NO: 26188 - DNA, 201 bp, Homo sapiens; identical to SEQ ID NO: 26176

SEQ ID NO: 26189 - DNA, 201 bp, Homo sapiens; identical to SEQ ID NO: 26171

SEQ ID NO: 26190 - DNA, 201 bp, Homo sapiens; identical to SEQ ID NO: 26172

SEQ ID NO: 26191 - DNA, 201 bp, Homo sapiens
aggcgcccctgcccggatggcaacagtagttctaggaggagacaccatgggccctgagcgtatcttccccaatcagactgaggaactgggacatcagggcycttcagaaggcactggggattggagcagtgaggagcctgaggaagagcaggaggaaacggggtcgggcccagctggctactcctaccagcccctgaacca

SEQ ID NO: 26192 - DNA, 201 bp, Homo sapiens
attcagttctgtacatatggggacatcggtccaagcccaacccaccttagcatgtatcactctgtggagaataaagcaccctatgtacacagccaaaagcmgcactgcctgcgcccctggaacctgggtccggccttcctcagcccctggcccctccaaggtacctataagggacaagagaaggcctgcccagcatagcac

SEQ ID NO: 26193 - DNA, 201 bp, Homo sapiens
ctgcctgcgccaggggttcctgcctgggctcgggagatatcggatgcccagtgggaagatgtggtacagaaagccctccaagcccggcaggcatcccctgmctggaagtgaccacagtgagagctgccttatattcctacattccaggccagaaccagcacaggactgaacacatccctggttgtaatgtccatttccatc

SEQ ID NO: 26194 - DNA, 201 bp, Homo sapiens
cggtccaagcccaacccaccttagcatgtatcactctgtggagaataaagcaccctatgtacacagccaaaagccgcactgcctgcgcccctggaacctgrgtccggccttcctcagcccctggcccctccaaggtacctataagggacaagagaaggcctgcccagcatagcacaaacaaggaaataaataggtgttggc

SEQ ID NO: 26195 - DNA, 201 bp, Homo sapiens
catcaaggcacatcagacttctcagagacccactttattcagttctgtacatatggggacatcggtccaagcccaacccaccttagcatgtatcactctgkggagaataaagcaccctatgtacacagccaaaagccgcactgcctgcgcccctggaacctgggtccggccttcctcagcccctggcccctccaaggtacc

SEQ ID NO: 26196 - DNA, 201 bp, Homo sapiens
acctgggtccggccttcctcagcccctggcccctccaaggtacctataagggacaagagaaggcctgcccagcatagcacaaacaaggaaataaataggtkttggcaggagccatgcttggggcaccgctccctgcttccttctttctagttttgggaaccaacagcacagaaaagcagtcagccccagggtggtcccttc

SEQ ID NO: 26197 - DNA, 201 bp, Homo sapiens
gacaagagaaggcctgcccagcatagcacaaacaaggaaataaataggtgttggcaggagccatgcttggggcaccgctccctgcttccttctttctagtkttgggaaccaacagcacagaaaagcagtcagccccagggtggtcccttccatgtctgtgaccccagggctgctgctcaccaaagacagggcacggggtag

SEQ ID NO: 26198 - DNA, 201 bp, Homo sapiens
ggcctgaaaggcatctgtcaggcgcccctgcccggatggcaacagtagttctaggaggagacaccatgggccctgagcgtatcttccccaatcagactgasgaactgggacatcagggcccttcagaaggcactggggattggagcagtgaggagcctgaggaagagcaggaggaaacggggtcgggcccagctggctact

SEQ ID NO: 26199 - DNA, 201 bp, Homo sapiens
gctttattttcagccacagaactagccctctcagggcccaatccccagaacccaaggccctggccctcttcctgagtagatgggcctttctcttagagccrgcctggaaggaggggcaagtaggcaggagatatctcttgagctgttgctgctgtctcaatgccactttgcaccctgggatctcctggagggaggtggcct

SEQ ID NO: 26200 - DNA, 201 bp, Homo sapiens
gggctcccggaccagtacgcggacggggaggcggcgcgcgtgtggcagctgtatatcggagacacccgcagccgcaccgccgagtacaaggcatggctgcytgggctgctgcgccagcacggctgccagcgggtgctcgacgtagcctgtggcactggggtggactccattatgctggtggaagagggcttcagtgtgacg

SEQ ID NO: 26201 - DNA, 201 bp, Homo sapiens
gacatgctttattttcagccacagaactagccctctcagggcccaatccccagaacccaaggccctggccctcttcctgagtagatgggcctttctcttaragccggcctggaaggaggggcaagtaggcaggagatatctcttgagctgttgctgctgtctcaatgccactttgcaccctgggatctcctggagggaggt

SEQ ID NO: 26202 - DNA, 201 bp, Homo sapiens
cgctcacttgccagactgcaaaggggaccagagtgagcaccggctggcgctgaaaaacattgcgagcatggtgcgggcagggggcctactggtcattgatmatcgcaactacgaccacatcctcagtacaggctgtgcacccccagggaagaacatctactataagagtgacttgaccaaggacgtcacaacatcagtgct

SEQ ID NO: 26203 - DNA, 201 bp, Homo sapiens
gctctttctcactccaacctttcatgccacaacaccagtagggggcgggacatgctttattttcagccacagaactagccctctcagggcccaatccccaraacccaaggccctggccctcttcctgagtagatgggcctttctcttagagccggcctggaaggaggggcaagtaggcaggagatatctcttgagctgttg

SEQ ID NO: 26204 - DNA, 201 bp, Homo sapiens
cccatgctgcccacccccccaccctctcccagggcttactcctcccacaaccctgctctttctcactccaacctttcatgccacaacaccagtagggggcrggacatgctttattttcagccacagaactagccctctcagggcccaatccccagaacccaaggccctggccctcttcctgagtagatgggcctttctctt

SEQ ID NO: 26205 - DNA, 111 bp, Homo sapiens
gcgcttgtaccggagcagctcctgctcactgactgagggttgcagccgggcggcagcctgcagcaagtcctccatggtgagcatcagtgctgagctacctkgctccagccc

SEQ ID NO: 26206 - DNA, 197 bp, Homo sapiens
agactcgggcgcccggcccaaagcccggcaggggcgtgtccgcgcgctcacctgctattggccaggtggggctgtcggctgccagcagtgcttatgytttaagtgcggagcgggtggctgcggagccaggcgcggcgcaggatggtggacagcgtgtaccggacccgctccctgggggtggcggccgaagggctccc

SEQ ID NO: 26207 - DNA, 201 bp, Homo sapiens
gccagcctctagagcagactacagctggggtgcagggatgtgggttccacagacggaagggtaaacaatatagtctttttcagttcctgcatgcattgtgwttatgtcagaaggatcaggctcccatgctgcccacccccccaccctctcccagggcttactcctcccacaaccctgctctttctcactccaacctttcat

SEQ ID NO: 26208 - DNA, 109 bp, Homo sapiens
gcttgtaccggagcagctcctgctcactgactgagggttgcagccgggcggcagcctgcagcaagtcctccatggtgagcatcagtgctgagctacctggytccagccc

SEQ ID NO: 26209 - DNA, 201 bp, Homo sapiens
gcctccaggtgggttggcagcagcctgaggaggagcccttccttcccagatctctctgtgggctatcaaggtacctgcagccatgctgagcggggtcccaraccctggggggctcctagcaggcagcaaacttgcgctggatgcgcttgtaccggagcagctcctgctcactgactgagggttgcagccgggcggcagcct

SEQ ID NO: 26210 - DNA, 201 bp, Homo sapiens; identical to SEQ ID NO: 26199

SEQ ID NO: 26211 - DNA, 201 bp, Homo sapiens; identical to SEQ ID NO: 26200

SEQ ID NO: 26212 - DNA, 201 bp, Homo sapiens; identical to SEQ ID NO: 26201

SEQ ID NO: 26213 - DNA, 201 bp, Homo sapiens
cgctcacttgccagactgcaaaggggaccagagtgagcaccggctggcgctgaaaaacattgcgagcatggtgcgggcagggggcctactggtcattgatmatcgcaactacgaccacatcctcagtacaggctgtgcacccccagggaagaacatctactataaggtgggtgacttgaccaaggacgtcacaacatcagt

SEQ ID NO: 26214 - DNA, 201 bp, Homo sapiens; identical to SEQ ID NO: 26203

SEQ ID NO: 26215 - DNA, 201 bp, Homo sapiens; identical to SEQ ID NO: 26204

SEQ ID NO: 26216 - DNA, 111 bp, Homo sapiens; identical to SEQ ID NO: 26205

SEQ ID NO: 26217 - DNA, 197 bp, Homo sapiens; identical to SEQ ID NO: 26206

SEQ ID NO: 26218 - DNA, 201 bp, Homo sapiens; identical to SEQ ID NO: 26207

SEQ ID NO: 26219 - DNA, 109 bp, Homo sapiens; identical to SEQ ID NO: 26208

SEQ ID NO: 26220 - DNA, 201 bp, Homo sapiens; identical to SEQ ID NO: 26209

SEQ ID NO: 26221 - DNA, 201 bp, Homo sapiens
tgttgctcacagctgtggaccttctgggccgggaccgtgatgggctgggtgaggatgcccgtgtgatggctgtgctgcgtcacctcctcctcaatgaggamcccctcaacagctgccctcccctcatggttgtggccaccacaagccgggcccaggacctgcctgctgatgtgcagacagcatttcctcatgagctcgagg

SEQ ID NO: 26222 - DNA, 201 bp, Homo sapiens
caacagaccagatctcctggaccctgcccttctgcggcctggcagatttgacaagctggtgtttgtgggggcaaatgaggaccgggcctcccagctacgcrttctaagtgccatcacacgcaaattcaagctagagccatctgtgagcctggtaaacgtgctagattgctgccctccccagctgacgggcgcggacctcta

SEQ ID NO: 26223 - DNA, 201 bp, Homo sapiens
atggttgtggccaccacaagccgggcccaggacctgcctgctgatgtgcagacagcatttcctcatgagctcgaggtgcctgctctgtcagaggggcagcrgctcagcatcctgcgggccctcactgcccaccttcccctgggccaggaggtgaacttggcacagctagcacggcggtgtgcaggctttgtggtaggggat

SEQ ID NO: 26224 - DNA, 201 bp, Homo sapiens
aggcagtagccactgagtgcagccttaccttcctcagcgtgaaggggccagagctcattaacatgtatgtgggccaaagtgaggagaatgtgcgggaagtrtttgccagggccagggctgcagctccatgcattatcttctttgatgaactggactctttggccccaagccgggggcgaagtggagattctggaggagtga

SEQ ID NO: 26225 - DNA, 201 bp, Homo sapiens
cctccccagctgacgggcgcggacctctactctctctgctctgatgctatgacagctgccctcaaacgcagggttcatgacctggaggaagggctggagcmaggtagctcagcactgatgctcaccatggaggacttgctgcaggctgccgcccggctgcaaccctcagtcagtgagcaggagctgctccggtacaagcgc

SEQ ID NO: 26226 - DNA, 201 bp, Homo sapiens
gagctgtctccgtggccttggcctcttccagggcgaatgggtgtgggtggcccaggccagagagtcatcgaacacttcacagccgcacttggctagggtgyaggtcctagaacctcgctgggacctctctgatagactgggacccggctctggaccgctgggagagcccctcgctgacggactggcgcttgtccctgccac

SEQ ID NO: 26227 - DNA, 201 bp, Homo sapiens
acttggctagggtgcaggtcctagaacctcgctgggacctctctgatagactgggacccggctctggaccgctgggagagcccctcgctgacggactggckcttgtccctgccactttggcttttaatcttggctgtgaccccctggaaatgggagagctcagaattcagaggtacttggaaggctccatcgcccctgaag

SEQ ID NO: 26228 - DNA, 201 bp, Homo sapiens
atgtatgtgggccaaagtgaggagaatgtgcgggaagtgtttgccagggccagggctgcagctccatgcattatcttctttgatgaactggactctttggycccaagccgggggcgaagtggagattctggaggagtgatggacagggtggtgtctcagctccttgccgagctagatgggctgcacagcactcaggatgtg

SEQ ID NO: 26229 - DNA, 201 bp, Homo sapiens
gggccaaagtgaggagaatgtgcgggaagtgtttgccagggccagggctgcagctccatgcattatcttctttgatgaactggactctttggccccaagcygggggcgaagtggagattctggaggagtgatggacagggtggtgtctcagctccttgccgagctagatgggctgcacagcactcaggatgtgtttgtgat

SEQ ID NO: 26230 - DNA, 201 bp, Homo sapiens
gccaaagtgaggagaatgtgcgggaagtgtttgccagggccagggctgcagctccatgcattatcttctttgatgaactggactctttggccccaagccgrgggcgaagtggagattctggaggagtgatggacagggtggtgtctcagctccttgccgagctagatgggctgcacagcactcaggatgtgtttgtgattg

SEQ ID NO: 26231 - DNA, 201 bp, Homo sapiens
gccctccccagctgacgggcgcggacctctactctctctgctctgatgctatgacagctgccctcaaacgcagggttcatgacctggaggaagggctggarccaggtagctcagcactgatgctcaccatggaggacttgctgcaggctgccgcccggctgcaaccctcagtcagtgagcaggagctgctccggtacaagc

SEQ ID NO: 26232 - DNA, 201 bp, Homo sapiens
aggctgccgcccggctgcaaccctcagtcagtgagcaggagctgctccggtacaagcgcatccagcgcaagtttgctgcctgctaggagccccccagggtytgggaccccgctcagcatggctgcaggaaaacacaacactccacccccgcccccacttaaaggagccccaggcagaatgaacagtgttcctggtgactgg

SEQ ID NO: 26233 - DNA, 201 bp, Homo sapiens
caagctagagccatctgtgagcctggtaaacgtgctagattgctgccctccccagctgacgggcgcggacctctactctctctgctctgatgctatgacakctgccctcaaacgcagggttcatgacctggaggaagggctggagccaggtagctcagcactgatgctcaccatggaggacttgctgcaggctgccgcccg

SEQ ID NO: 26234 - DNA, 201 bp, Homo sapiens; identical to SEQ ID NO: 26221

SEQ ID NO: 26235 - DNA, 201 bp, Homo sapiens; identical to SEQ ID NO: 26222

SEQ ID NO: 26236 - DNA, 201 bp, Homo sapiens; identical to SEQ ID NO: 26223

SEQ ID NO: 26237 - DNA, 201 bp, Homo sapiens; identical to SEQ ID NO: 26224

SEQ ID NO: 26238 - DNA, 201 bp, Homo sapiens; identical to SEQ ID NO: 26228

SEQ ID NO: 26239 - DNA, 201 bp, Homo sapiens; identical to SEQ ID NO: 26229

SEQ ID NO: 26240 - DNA, 201 bp, Homo sapiens; identical to SEQ ID NO: 26230

SEQ ID NO: 26241 - DNA, 201 bp, Homo sapiens; identical to SEQ ID NO: 26233

SEQ ID NO: 26242 - DNA, 201 bp, Homo sapiens
aggccacctccctccaggagatcccagggtgcaaagtggcattgagacagcagcaacagctcaagagatatctcctgcctacttgcccctccttccaggcyggctctaagagaaaggcccatctactcaggaagagggccagggccttgggttctggggattgggccctgagagggctagttctgtggctgaaaataaagc

SEQ ID NO: 26243 - DNA, 201 bp, Homo sapiens
acctccctccaggagatcccagggtgcaaagtggcattgagacagcagcaacagctcaagagatatctcctgcctacttgcccctccttccaggccggctytaagagaaaggcccatctactcaggaagagggccagggccttgggttctggggattgggccctgagagggctagttctgtggctgaaaataaagcatgtc

SEQ ID NO: 26244 - DNA, 201 bp, Homo sapiens
caacagctcaagagatatctcctgcctacttgcccctccttccaggccggctctaagagaaaggcccatctactcaggaagagggccagggccttgggttytggggattgggccctgagagggctagttctgtggctgaaaataaagcatgtcccgccccctactggtgttgtggcatgaaaggttggagtgagaaagagc

SEQ ID NO: 26245 - DNA, 201 bp, Homo sapiens; identical to SEQ ID NO: 26225

SEQ ID NO: 26246 - DNA, 201 bp, Homo sapiens
aagagaaaggcccatctactcaggaagagggccagggccttgggttctggggattgggccctgagagggctagttctgtggctgaaaataaagcatgtccygccccctactggtgttgtggcatgaaaggttggagtgagaaagagcagggttgtgggaggagtaagccctgggagagggtgggggggtgggcagcatggg

SEQ ID NO: 26247 - DNA, 201 bp, Homo sapiens; identical to SEQ ID NO: 26227

SEQ ID NO: 26248 - DNA, 201 bp, Homo sapiens; identical to SEQ ID NO: 26226

SEQ ID NO: 26249 - DNA, 126 bp, Homo sapiens
atgaaaggttggagtgagaaagagcagggttgtgggaggagtaagccctgggagagggtgggggggtgggcagcatgggagcctgatccttctgacataawcacaatgcatgcaggaactgaaaaa

SEQ ID NO: 26250 - DNA, 201 bp, Homo sapiens; identical to SEQ ID NO: 26231

SEQ ID NO: 26251 - DNA, 201 bp, Homo sapiens
aggctgccgcccggctgcaaccctcagtcagtgagcaggagctgctccggtacaagcgcatccagcgcaagtttgctgcctgctaggagccccccagggtytgggaccccgctcagcatggctgcaggtaccttgatagcccacagagagatctgggaaggaagggctcctcctcaggctgctgccaacccacctggaggc

SEQ ID NO: 26252 - DNA, 201 bp, Homo sapiens; identical to SEQ ID NO: 26221

SEQ ID NO: 26253 - DNA, 201 bp, Homo sapiens; identical to SEQ ID NO: 26222

SEQ ID NO: 26254 - DNA, 201 bp, Homo sapiens; identical to SEQ ID NO: 26223

SEQ ID NO: 26255 - DNA, 201 bp, Homo sapiens; identical to SEQ ID NO: 26224

SEQ ID NO: 26256 - DNA, 201 bp, Homo sapiens; identical to SEQ ID NO: 26225

SEQ ID NO: 26257 - DNA, 201 bp, Homo sapiens; identical to SEQ ID NO: 26228

SEQ ID NO: 26258 - DNA, 201 bp, Homo sapiens; identical to SEQ ID NO: 26229

SEQ ID NO: 26259 - DNA, 201 bp, Homo sapiens; identical to SEQ ID NO: 26230

SEQ ID NO: 26260 - DNA, 201 bp, Homo sapiens; identical to SEQ ID NO: 26231

SEQ ID NO: 26261 - DNA, 201 bp, Homo sapiens; identical to SEQ ID NO: 26232

SEQ ID NO: 26262 - DNA, 201 bp, Homo sapiens; identical to SEQ ID NO: 26233

SEQ ID NO: 26263 - DNA, 201 bp, Homo sapiens
aatacaccaaagctgttgaatgctgtgacaaggcccttggactggacagtgccaatgagaaaggcttgtataggaggggtgaagcccagctgctcatgaaygagtttgagtcagccaagggtgactttgagaaagtgctggaagtaaacccccagaataaggctgcaagactgcagatctccatgtgccagaaaaaggcca

SEQ ID NO: 26264 - DNA, 201 bp, Homo sapiens
tgctcatgaacgagtttgagtcagccaagggtgactttgagaaagtgctggaagtaaacccccagaataaggctgcaagactgcagatctccatgtgccaraaaaaggccaaggagcacaacgagcgggaccgcaggatatacgccaacatgttcaagaagtttgcagagcaggatgccaaggaagaggccaataaagcaa

SEQ ID NO: 26265 - DNA, 201 bp, Homo sapiens
atgtatactggtttatggaactttatttacactcctctatcatgcaaaaaaattttgactttttagtactaagcttaatttttaaaaacaaaatctgtagkgttgacaaataaatagttgctcttctacactaggggtttcacctgcaggtttgacacgcagttgctcgcttttcctgccctgtcaagcttctctgttctg

SEQ ID NO: 26266 - DNA, 166 bp, Homo sapiens
taaacaatttgtgtagaagtccacagacatctttcaaccaccttttaggctgcatatggattgccaagtcagcatatgaggaattaaagacattgtttttwaaaaaaaaaaatcatttagatgcacttttttgtgtgttctttaaataaatccaaaaaaaatgtga

SEQ ID NO: 26267 - DNA, 201 bp, Homo sapiens; identical to SEQ ID NO: 26263

SEQ ID NO: 26268 - DNA, 201 bp, Homo sapiens; identical to SEQ ID NO: 26264

SEQ ID NO: 26269 - DNA, 201 bp, Homo sapiens; identical to SEQ ID NO: 26265

SEQ ID NO: 26270 - DNA, 166 bp, Homo sapiens; identical to SEQ ID NO: 26266

SEQ ID NO: 26271 - DNA, 201 bp, Homo sapiens
gttattggctttggaaattccagagctgatttggccattgagctcagccatgtagctgcacagctggaggagccaacactagctttcactggcatccttcraacagtgggagccaccatttcctcttcagaggtccagagctgttgggctgtatgtgtatttaaagtgtactatgtagattacatggatgaaactgcctct

SEQ ID NO: 26272 - DNA, 201 bp, Homo sapiens
tcagaggtccagagctgttgggctgtatgtgtatttaaagtgtactatgtagattacatggatgaaactgcctctgaaattggagcgaaacccaacctccyctcactcttcctgtgggatccaaagctagctatggaagttttctttggaccatgcacaccttaccagtactgccttcagaggccagggaagtgggctgga

SEQ ID NO: 26273 - DNA, 201 bp, Homo sapiens
catagccatcccgtattaccactccaggactttccaaggatcaagaggttcaaaggccaatatattcacagttgggaatacaagaggccagataaatttckggagaagaaaattgttgttattggctttggaaattccagagctgatttggccattgagctcagccatgtagctgcacagctggaggagccaacactagct

SEQ ID NO: 26274 - DNA, 130 bp, Homo sapiens
atgccaggaaaaagaattgcagtgattggygctgaagtcagtggattaaacgctattaagagctgtctggaagagggactggagcccacctgttttgaaggaggcagtgacattggaggagtatggagat

SEQ ID NO: 26275 - DNA, 201 bp, Homo sapiens
tggccattgagctcagccatgtagctgcacagctggaggagccaacactagctttcactggcatccttcgaacagtgggagccaccatttcctcttcagargtccagagctgttgggctgtatgtgtatttaaagtgtactatgtagattacatggatgaaactgcctctgaaattggagcgaaacccaacctcctctcac

SEQ ID NO: 26276 - DNA, 201 bp, Homo sapiens
caaaggaaatatcagcctatagtgattaccctttcccttcccatcttcccaactatttgcacaattccaaattgatggagtacctcagaatgtacatcaawcactttcatcttctgaagcacatacagtttatgtcaaaggtgtgcagtgtgaagaagtgctgcaacttctcatgcacaaggcaatgggatgttgtggtcg

SEQ ID NO: 26277 - DNA, 201 bp, Homo sapiens
tggagcgaaacccaacctcctctcactcttcctgtgggatccaaagctagctatggaagttttctttggaccatgcacaccttaccagtactgccttcagrggccagggaagtgggctggaggccaggaagccatcctgacccagagagagagaattatcaagcccctgaggactcgtatccttactcgtgaccagccttc

SEQ ID NO: 26278 - DNA, 201 bp, Homo sapiens
acattggaggagtatggagatatgaggagaaggctgaaggtggcagggcaatcatctataaatgtgtcaccagcaatacttcaaaggaaatatcagcctakagtgattaccctttcccttcccatcttcccaactatttgcacaattccaaattgatggagtacctcagaatgtacatcaaacactttcatcttctgaagc

SEQ ID NO: 26279 - DNA, 201 bp, Homo sapiens
tcgctgttccaccagcccatccgtgcacacttagtttcccctaaagcagtttccgcatgggccggaccgtggtcgtgctgggcggaggcatcagcggcttsgccgccagttaccacctgagccgggccccctgcccccctaaggtggtcctagtggagagcagtgagcgtctgggaggctggattcgctccgttcgaggcc

SEQ ID NO: 26280 - DNA, 201 bp, Homo sapiens
gtggtgaatctgcagtaccaaggagcccatctgcctgtccagggatttggacatttggtgccatcttcagaagatccaggagtcctgggaatcgtgtatgmctcagttgctttccctgagcaggacgggagcccccctggcctcagagtgactgtgatgctgggaggttcctggttacagacactggaggctagtggctgt

SEQ ID NO: 26281 - DNA, 201 bp, Homo sapiens
acacaagaactgcattccccagtatacactaggtcactggcaaaaactagagtcagctaggcaattcctgactgctcacaggttgcccctgactctggctrgagcctcctatgagggagttgctgttaatgactgtatagagagtgggcgccaggcagcagtcagtgtcctgggcacagaacctaacagctgatccccaac

SEQ ID NO: 26282 - DNA, 201 bp, Homo sapiens
tctctaagggacagcagtctggaggctgaccacgttattagtgccattccagcttcagtgctcagtgagctgctccctgctgaggctgcccctctggctcrtgccctgagtgccatcactgcagtgtctgtagctgtggtgaatctgcagtaccaaggagcccatctgcctgtccagggatttggacatttggtgccatct

SEQ ID NO: 26283 - DNA, 181 bp, Homo sapiens
tcctggcccctggacggggacctcgctgttccaccagcccatccgtgcacacttagtttcccctaaagcagtttccgcatsggccggaccgtggtcgtgctgggcggaggcatcagcggcttggccgccagttaccacctgagccgggccccctgcccccctaaggtggtcctagtggaga

SEQ ID NO: 26284 - DNA, 180 bp, Homo sapiens
tcctggcccctggacggggacctcgctgttccaccagcccatccgtgcacacttagtttcccctaaagcagtttccgcaygggccggaccgtggtcgtgctgggcggaggcatcagcggcttggccgccagttaccacctgagccgggccccctgcccccctaaggtggtcctagtggag

SEQ ID NO: 26285 - DNA, 201 bp, Homo sapiens
tgctgggaggttcctggttacagacactggaggctagtggctgtgtcttatctcaggagctgtttcaacagcgggcccaggaagcagctgctacacaattmggactgaaggagatgccgagccactgcttggtccatctacacaagaactgcattccccagtatacactaggtcactggcaaaaactagagtcagctaggc

SEQ ID NO: 26286 - DNA, 201 bp, Homo sapiens
gacggggacctcgctgttccaccagcccatccgtgcacacttagtttcccctaaagcagtttccgcatgggccggaccgtggtcgtgctgggcggaggcaycagcggcttggccgccagttaccacctgagccgggccccctgcccccctaaggtggtcctagtggagagcagtgagcgtctgggaggctggattcgctcc

SEQ ID NO: 26287 - DNA, 201 bp, Homo sapiens
ggtggcgtctctagccatggacagtctctgccgtggagtgtttgcaggcaacagccgtgagctcagcatcaggtcctgctttcccagtctcttccaagctkagcaaacccatcgttccatattactgggcctgctgctgggggcagggcggaccccacagccagactcagcactcattcgccaggccttggctgagcgctg

SEQ ID NO: 26288 - DNA, 201 bp, Homo sapiens
ggaggctggattcgctccgttcgaggccctaatggtgctatctttgagcttggacctcggggaattaggccagcgggagccctaggggcccggaccttgcycctggtttctgagcttggcttggattcagaagtgctgcctgtccggggagaccacccagctgcccagaacaggttcctctacgtgggcggtgccctgcat

SEQ ID NO: 26289 - DNA, 201 bp, Homo sapiens
ctcctggtttctgagcttggcttggattcagaagtgctgcctgtccggggagaccacccagctgcccagaacaggttcctctacgtgggcggtgccctgcmtgccctacccactggcctcagggggctactccgcccttcaccccccttctccaaacctctgttttgggctgggctgagggagctgaccaagccccggggc

SEQ ID NO: 26290 - DNA, 201 bp, Homo sapiens
ctacgtgggcggtgccctgcatgccctacccactggcctcagggggctactccgcccttcaccccccttctccaaacctctgttttgggctgggctgaggkagctgaccaagccccggggcaaagagcctgatgagactgtgcacagttttgcccagcgccgccttggacctgagtcctagtctcacccttaaggtggcgt

SEQ ID NO: 26291 - DNA, 201 bp, Homo sapiens
ttcaccccccttctccaaacctctgttttgggctgggctgagggagctgaccaagccccggggcaaagagcctgatgagactgtgcacagttttgcccagygccgccttggacctgagtcctagtctcacccttaaggtggcgtctctagccatggacagtctctgccgtggagtgtttgcaggcaacagccgtgagctca

SEQ ID NO: 26292 - DNA, 201 bp, Homo sapiens
cccttctccaaacctctgttttgggctgggctgagggagctgaccaagccccggggcaaagagcctgatgagactgtgcacagttttgcccagcgccgccytggacctgagtcctagtctcacccttaaggtggcgtctctagccatggacagtctctgccgtggagtgtttgcaggcaacagccgtgagctcagcatcag

SEQ ID NO: 26293 - DNA, 201 bp, Homo sapiens
ctgagggagctgaccaagccccggggcaaagagcctgatgagactgtgcacagttttgcccagcgccgccttggacctgagtcctagtctcacccttaagrtggcgtctctagccatggacagtctctgccgtggagtgtttgcaggcaacagccgtgagctcagcatcaggtcctgctttcccagtctcttccaagctga

SEQ ID NO: 26294 - DNA, 201 bp, Homo sapiens
ctgcatgccctacccactggcctcagggggctactccgcccttcaccccccttctccaaacctctgttttgggctgggctgagggagctgaccaagccccsgggcaaagagcctgatgagactgtgcacagttttgcccagcgccgccttggacctgagtcctagtctcacccttaaggtggcgtctctagccatggacag

SEQ ID NO: 26295 - DNA, 201 bp, Homo sapiens
gctgtggtgaatctgcagtaccaaggagcccatctgcctgtccagggatttggacatttggtgccatcttcagaagatccaggagtcctgggaatcgtgtrtgactcagttgctttccctgagcaggacgggagcccccctggcctcagagtgactgtgatgctgggaggttcctggttacagacactggaggctagtggc

SEQ ID NO: 26296 - DNA, 201 bp, Homo sapiens
actggcctcagggggctactccgcccttcaccccccttctccaaacctctgttttgggctgggctgagggagctgaccaagccccggggcaaagagcctgwtgagactgtgcacagttttgcccagcgccgccttggacctgagtcctagtctcacccttaaggtggcgtctctagccatggacagtctctgccgtggagt

SEQ ID NO: 26297 - DNA, 201 bp, Homo sapiens
ggtgaatctgcagtaccaaggagcccatctgcctgtccagggatttggacatttggtgccatcttcagaagatccaggagtcctgggaatcgtgtatgacycagttgctttccctgagcaggacgggagcccccctggcctcagagtgactgtgatgctgggaggttcctggttacagacactggaggctagtggctgtgt

SEQ ID NO: 26298 - DNA, 201 bp, Homo sapiens
cgctggagccagtggtcacttcgtggaggtctagagatgttgcctcaggcccttgaaacccacctgactagtaggggggtcagtgttctcagaggccagcsggtctgtgggctcagcctccaggcagaagggcgctggaaggtatctctaagggacagcagtctggaggctgaccacgttattagtgccattccagcttca

SEQ ID NO: 26299 - DNA, 201 bp, Homo sapiens
cagcgccgccttggacctgagtcctagtctcacccttaaggtggcgtctctagccatggacagtctctgccgtggagtgtttgcaggcaacagccgtgagstcagcatcaggtcctgctttcccagtctcttccaagctgagcaaacccatcgttccatattactgggcctgctgctgggggcagggcggaccccacagcc

SEQ ID NO: 26300 - DNA, 201 bp, Homo sapiens
agtctctgccgtggagtgtttgcaggcaacagccgtgagctcagcatcaggtcctgctttcccagtctcttccaagctgagcaaacccatcgttccatatkactgggcctgctgctgggggcagggcggaccccacagccagactcagcactcattcgccaggccttggctgagcgctggagccagtggtcacttcgtgga

SEQ ID NO: 26301 - DNA, 201 bp, Homo sapiens
cctggacggggacctcgctgttccaccagcccatccgtgcacacttagtttcccctaaagcagtttccgcatgggccggaccgtggtcgtgctgggcggargcatcagcggcttggccgccagttaccacctgagccgggccccctgcccccctaaggtggtcctagtggagagcagtgagcgtctgggaggctggattcg

SEQ ID NO: 26302 - DNA, 201 bp, Homo sapiens
atgttgcctcaggcccttgaaacccacctgactagtaggggggtcagtgttctcagaggccagccggtctgtgggctcagcctccaggcagaagggcgctrgaaggtatctctaagggacagcagtctggaggctgaccacgttattagtgccattccagcttcagtgctcagtgagctgctccctgctgaggctgcccct

SEQ ID NO: 26303 - DNA, 201 bp, Homo sapiens
ggtctgtgggctcagcctccaggcagaagggcgctggaaggtatctctaagggacagcagtctggaggctgaccacgttattagtgccattccagcttcartgctcagtgagctgctccctgctgaggctgcccctctggctcgtgccctgagtgccatcactgcagtgtctgtagctgtggtgaatctgcagtaccaagg

SEQ ID NO: 26304 - DNA, 201 bp, Homo sapiens
ctccaggcagaagggcgctggaaggtatctctaagggacagcagtctggaggctgaccacgttattagtgccattccagcttcagtgctcagtgagctgcyccctgctgaggctgcccctctggctcgtgccctgagtgccatcactgcagtgtctgtagctgtggtgaatctgcagtaccaaggagcccatctgcctgtc

SEQ ID NO: 26305 - DNA, 201 bp, Homo sapiens
ctgcccccctaaggtggtcctagtggagagcagtgagcgtctgggaggctggattcgctccgttcgaggccctaatggtgctatctttgagcttggacctyggggaattaggccagcgggagccctaggggcccggaccttgctcctggtttctgagcttggcttggattcagaagtgctgcctgtccggggagaccaccc

SEQ ID NO: 26306 - DNA, 201 bp, Homo sapiens
ctggctcgtgccctgagtgccatcactgcagtgtctgtagctgtggtgaatctgcagtaccaaggagcccatctgcctgtccagggatttggacatttggkgccatcttcagaagatccaggagtcctgggaatcgtgtatgactcagttgctttccctgagcaggacgggagcccccctggcctcagagtgactgtgatg

SEQ ID NO: 26307 - DNA, 201 bp, Homo sapiens
atccaggagtcctgggaatcgtgtatgactcagttgctttccctgagcaggacgggagcccccctggcctcagagtgactgtgatgctgggaggttcctgrttacagacactggaggctagtggctgtgtcttatctcaggagctgtttcaacagcgggcccaggaagcagctgctacacaattaggactgaaggagatgc

SEQ ID NO: 26308 - DNA, 201 bp, Homo sapiens
aggagtcctgggaatcgtgtatgactcagttgctttccctgagcaggacgggagcccccctggcctcagagtgactgtgatgctgggaggttcctggttayagacactggaggctagtggctgtgtcttatctcaggagctgtttcaacagcgggcccaggaagcagctgctacacaattaggactgaaggagatgccgag

SEQ ID NO: 26309 - DNA, 201 bp, Homo sapiens
acaattaggactgaaggagatgccgagccactgcttggtccatctacacaagaactgcattccccagtatacactaggtcactggcaaaaactagagtcasctaggcaattcctgactgctcacaggttgcccctgactctggctggagcctcctatgagggagttgctgttaatgactgtatagagagtgggcgccaggc

SEQ ID NO: 26310 - DNA, 201 bp, Homo sapiens
aggactgaaggagatgccgagccactgcttggtccatctacacaagaactgcattccccagtatacactaggtcactggcaaaaactagagtcagctaggyaattcctgactgctcacaggttgcccctgactctggctggagcctcctatgagggagttgctgttaatgactgtatagagagtgggcgccaggcagcagt

SEQ ID NO: 26311 - DNA, 201 bp, Homo sapiens
actgggcctgctgctgggggcagggcggaccccacagccagactcagcactcattcgccaggccttggctgagcgctggagccagtggtcacttcgtggasgtctagagatgttgcctcaggcccttgaaacccacctgactagtaggggggtcagtgttctcagaggccagccggtctgtgggctcagcctccaggcaga

SEQ ID NO: 26312 - DNA, 201 bp, Homo sapiens
gaactgcattccccagtatacactaggtcactggcaaaaactagagtcagctaggcaattcctgactgctcacaggttgcccctgactctggctggagccycctatgagggagttgctgttaatgactgtatagagagtgggcgccaggcagcagtcagtgtcctgggcacagaacctaacagctgatccccaactctcat

SEQ ID NO: 26313 - DNA, 201 bp, Homo sapiens
ctgtgcacagttttgcccagcgccgccttggacctgagtcctagtctcacccttaaggtggcgtctctagccatggacagtctctgccgtggagtgtttgyaggcaacagccgtgagctcagcatcaggtcctgctttcccagtctcttccaagctgagcaaacccatcgttccatattactgggcctgctgctgggggca

SEQ ID NO: 26314 - DNA, 201 bp, Homo sapiens
ccttaaggtggcgtctctagccatggacagtctctgccgtggagtgtttgcaggcaacagccgtgagctcagcatcaggtcctgctttcccagtctcttcyaagctgagcaaacccatcgttccatattactgggcctgctgctgggggcagggcggaccccacagccagactcagcactcattcgccaggccttggctga

SEQ ID NO: 26315 - DNA, 201 bp, Homo sapiens
ccccagtatacactaggtcactggcaaaaactagagtcagctaggcaattcctgactgctcacaggttgcccctgactctggctggagcctcctatgaggkagttgctgttaatgactgtatagagagtgggcgccaggcagcagtcagtgtcctgggcacagaacctaacagctgatccccaactctcattcatgaaaat

SEQ ID NO: 26316 - DNA, 201 bp, Homo sapiens
tccccagtatacactaggtcactggcaaaaactagagtcagctaggcaattcctgactgctcacaggttgcccctgactctggctggagcctcctatgagrgagttgctgttaatgactgtatagagagtgggcgccaggcagcagtcagtgtcctgggcacagaacctaacagctgatccccaactctcattcatgaaaa

SEQ ID NO: 26317 - DNA, 201 bp, Homo sapiens
agcaaacccatcgttccatattactgggcctgctgctgggggcagggcggaccccacagccagactcagcactcattcgccaggccttggctgagcgctgragccagtggtcacttcgtggaggtctagagatgttgcctcaggcccttgaaacccacctgactagtaggggggtcagtgttctcagaggccagccggtct

SEQ ID NO: 26318 - DNA, 201 bp, Homo sapiens
ttggtccatctacacaagaactgcattccccagtatacactaggtcactggcaaaaactagagtcagctaggcaattcctgactgctcacaggttgccccygactctggctggagcctcctatgagggagttgctgttaatgactgtatagagagtgggcgccaggcagcagtcagtgtcctgggcacagaacctaacagc

SEQ ID NO: 26319 - DNA, 134 bp, Homo sapiens
taggcgcgtgccgcgagaacagagtggacggagmgtaggagagaccgaaaaggctgggggtgggagtagcggatttgaagcacttgttggcctacagaggtgtggcaagcagagcacctcagaactcaggcgta

SEQ ID NO: 26320 - DNA, 201 bp, Homo sapiens
acctcgatctccttctccctcattttctctcatccctacctattgtgggtttccgcatgggccggaccgtggtcgtgctgggcggaggcatcagcggcttsgccgccagttaccacctgagccgggccccctgcccccctaaggtggtcctagtggagagcagtgagcgtctgggaggctggattcgctccgttcgaggcc

SEQ ID NO: 26321 - DNA, 201 bp, Homo sapiens; identical to SEQ ID NO: 26280

SEQ ID NO: 26322 - DNA, 201 bp, Homo sapiens
aaggacatcagacccccagctaaaacattcctttcatcctttccttccagagtcagctaggcaattcctgactgctcacaggttgcccctgactctggctrgagcctcctatgagggagttgctgttaatgactgtatagagagtgggcgccaggcagcagtcagtgtcctgggcacagaacctaacagctgatccccaac

SEQ ID NO: 26323 - DNA, 201 bp, Homo sapiens; identical to SEQ ID NO: 26282

SEQ ID NO: 26324 - DNA, 201 bp, Homo sapiens
ttatctgcacccagcagagcgccggcggggtacggtcttaggacctcgatctccttctccctcattttctctcatccctacctattgtgggtttccgcatsggccggaccgtggtcgtgctgggcggaggcatcagcggcttggccgccagttaccacctgagccgggccccctgcccccctaaggtggtcctagtggaga

SEQ ID NO: 26325 - DNA, 201 bp, Homo sapiens
cttatctgcacccagcagagcgccggcggggtacggtcttaggacctcgatctccttctccctcattttctctcatccctacctattgtgggtttccgcaygggccggaccgtggtcgtgctgggcggaggcatcagcggcttggccgccagttaccacctgagccgggccccctgcccccctaaggtggtcctagtggag

SEQ ID NO: 26326 - DNA, 201 bp, Homo sapiens
tgctgggaggttcctggttacagacactggaggctagtggctgtgtcttatctcaggagctgtttcaacagcgggcccaggaagcagctgctacacaattmggactgaaggagatgccgagccactgcttggtccatctacacaagaactgcattccccagtatacactaggtcactggcaaaaactaggtaagttgggaa

SEQ ID NO: 26327 - DNA, 201 bp, Homo sapiens
cggtcttaggacctcgatctccttctccctcattttctctcatccctacctattgtgggtttccgcatgggccggaccgtggtcgtgctgggcggaggcaycagcggcttggccgccagttaccacctgagccgggccccctgcccccctaaggtggtcctagtggagagcagtgagcgtctgggaggctggattcgctcc

SEQ ID NO: 26328 - DNA, 201 bp, Homo sapiens; identical to SEQ ID NO: 26287

SEQ ID NO: 26329 - DNA, 201 bp, Homo sapiens; identical to SEQ ID NO: 26288

SEQ ID NO: 26330 - DNA, 201 bp, Homo sapiens
ctacgtgggcggtgccctgcatgccctacccactggcctcagggggctactccgcccttcaccccccttctccaaacctctgttttgggctgggctgaggkagctgaccaagccccggggcaaagagcctgatgagactgtgcacagttttgcccagcgccgccttggacctgaggtggcgtctctagccatggacagtct

SEQ ID NO: 26331 - DNA, 201 bp, Homo sapiens; identical to SEQ ID NO: 26289

SEQ ID NO: 26332 - DNA, 201 bp, Homo sapiens
ttcaccccccttctccaaacctctgttttgggctgggctgagggagctgaccaagccccggggcaaagagcctgatgagactgtgcacagttttgcccagygccgccttggacctgaggtggcgtctctagccatggacagtctctgccgtggagtgtttgcaggcaacagccgtgagctcagcatcaggtcctgctttcc

SEQ ID NO: 26333 - DNA, 201 bp, Homo sapiens
cccttctccaaacctctgttttgggctgggctgagggagctgaccaagccccggggcaaagagcctgatgagactgtgcacagttttgcccagcgccgccytggacctgaggtggcgtctctagccatggacagtctctgccgtggagtgtttgcaggcaacagccgtgagctcagcatcaggtcctgctttcccagtctc

SEQ ID NO: 26334 - DNA, 201 bp, Homo sapiens
acctctgttttgggctgggctgagggagctgaccaagccccggggcaaagagcctgatgagactgtgcacagttttgcccagcgccgccttggacctgagrtggcgtctctagccatggacagtctctgccgtggagtgtttgcaggcaacagccgtgagctcagcatcaggtcctgctttcccagtctcttccaagctga

SEQ ID NO: 26335 - DNA, 201 bp, Homo sapiens
ctgcatgccctacccactggcctcagggggctactccgcccttcaccccccttctccaaacctctgttttgggctgggctgagggagctgaccaagccccsgggcaaagagcctgatgagactgtgcacagttttgcccagcgccgccttggacctgaggtggcgtctctagccatggacagtctctgccgtggagtgttt

SEQ ID NO: 26336 - DNA, 201 bp, Homo sapiens; identical to SEQ ID NO: 26295

SEQ ID NO: 26337 - DNA, 201 bp, Homo sapiens
actggcctcagggggctactccgcccttcaccccccttctccaaacctctgttttgggctgggctgagggagctgaccaagccccggggcaaagagcctgwtgagactgtgcacagttttgcccagcgccgccttggacctgaggtggcgtctctagccatggacagtctctgccgtggagtgtttgcaggcaacagccgt

SEQ ID NO: 26338 - DNA, 201 bp, Homo sapiens; identical to SEQ ID NO: 26297

SEQ ID NO: 26339 - DNA, 201 bp, Homo sapiens; identical to SEQ ID NO: 26298

SEQ ID NO: 26340 - DNA, 201 bp, Homo sapiens
gactgtgcacagttttgcccagcgccgccttggacctgaggtggcgtctctagccatggacagtctctgccgtggagtgtttgcaggcaacagccgtgagstcagcatcaggtcctgctttcccagtctcttccaagctgagcaaacccatcgttccatattactgggcctgctgctgggggcagggcggaccccacagcc

SEQ ID NO: 26341 - DNA, 201 bp, Homo sapiens
gctgggggtgggagtagcggatttgaagcacttgttggcctacagaggtgtggcaagcagagcacctcagaactcaggcgtactgcccgccgcccgagccstgcgagggccgatagcgagggtgtggcccttatctgcacccagcagagcgccggcggggtacggtcttaggacctcgatctccttctccctcattttctc

SEQ ID NO: 26342 - DNA, 201 bp, Homo sapiens; identical to SEQ ID NO: 26300

SEQ ID NO: 26343 - DNA, 201 bp, Homo sapiens
ggtacggtcttaggacctcgatctccttctccctcattttctctcatccctacctattgtgggtttccgcatgggccggaccgtggtcgtgctgggcggargcatcagcggcttggccgccagttaccacctgagccgggccccctgcccccctaaggtggtcctagtggagagcagtgagcgtctgggaggctggattcg

SEQ ID NO: 26344 - DNA, 201 bp, Homo sapiens; identical to SEQ ID NO: 26302

SEQ ID NO: 26345 - DNA, 201 bp, Homo sapiens; identical to SEQ ID NO: 26303

SEQ ID NO: 26346 - DNA, 201 bp, Homo sapiens; identical to SEQ ID NO: 26304

SEQ ID NO: 26347 - DNA, 201 bp, Homo sapiens; identical to SEQ ID NO: 26305

SEQ ID NO: 26348 - DNA, 201 bp, Homo sapiens; identical to SEQ ID NO: 26306

SEQ ID NO: 26349 - DNA, 201 bp, Homo sapiens; identical to SEQ ID NO: 26307

SEQ ID NO: 26350 - DNA, 201 bp, Homo sapiens; identical to SEQ ID NO: 26308

SEQ ID NO: 26351 - DNA, 201 bp, Homo sapiens
gcaaaaactaggtaagttgggaaaacagctgggctgaggagggccaaggacatcagacccccagctaaaacattcctttcatcctttccttccagagtcasctaggcaattcctgactgctcacaggttgcccctgactctggctggagcctcctatgagggagttgctgttaatgactgtatagagagtgggcgccaggc

SEQ ID NO: 26352 - DNA, 201 bp, Homo sapiens
actaggtaagttgggaaaacagctgggctgaggagggccaaggacatcagacccccagctaaaacattcctttcatcctttccttccagagtcagctaggyaattcctgactgctcacaggttgcccctgactctggctggagcctcctatgagggagttgctgttaatgactgtatagagagtgggcgccaggcagcagt

SEQ ID NO: 26353 - DNA, 201 bp, Homo sapiens; identical to SEQ ID NO: 26311

SEQ ID NO: 26354 - DNA, 201 bp, Homo sapiens
atcagacccccagctaaaacattcctttcatcctttccttccagagtcagctaggcaattcctgactgctcacaggttgcccctgactctggctggagccycctatgagggagttgctgttaatgactgtatagagagtgggcgccaggcagcagtcagtgtcctgggcacagaacctaacagctgatccccaactctcat

SEQ ID NO: 26355 - DNA, 201 bp, Homo sapiens
ggcaaagagcctgatgagactgtgcacagttttgcccagcgccgccttggacctgaggtggcgtctctagccatggacagtctctgccgtggagtgtttgyaggcaacagccgtgagctcagcatcaggtcctgctttcccagtctcttccaagctgagcaaacccatcgttccatattactgggcctgctgctgggggca

SEQ ID NO: 26356 - DNA, 201 bp, Homo sapiens
cagctaaaacattcctttcatcctttccttccagagtcagctaggcaattcctgactgctcacaggttgcccctgactctggctggagcctcctatgaggkagttgctgttaatgactgtatagagagtgggcgccaggcagcagtcagtgtcctgggcacagaacctaacagctgatccccaactctcattcatgaaaat

SEQ ID NO: 26357 - DNA, 201 bp, Homo sapiens
acctgaggtggcgtctctagccatggacagtctctgccgtggagtgtttgcaggcaacagccgtgagctcagcatcaggtcctgctttcccagtctcttcyaagctgagcaaacccatcgttccatattactgggcctgctgctgggggcagggcggaccccacagccagactcagcactcattcgccaggccttggctga

SEQ ID NO: 26358 - DNA, 201 bp, Homo sapiens
ccagctaaaacattcctttcatcctttccttccagagtcagctaggcaattcctgactgctcacaggttgcccctgactctggctggagcctcctatgagrgagttgctgttaatgactgtatagagagtgggcgccaggcagcagtcagtgtcctgggcacagaacctaacagctgatccccaactctcattcatgaaaa

SEQ ID NO: 26359 - DNA, 201 bp, Homo sapiens; identical to SEQ ID NO: 26317

SEQ ID NO: 26360 - DNA, 201 bp, Homo sapiens
tgaggagggccaaggacatcagacccccagctaaaacattcctttcatcctttccttccagagtcagctaggcaattcctgactgctcacaggttgccccygactctggctggagcctcctatgagggagttgctgttaatgactgtatagagagtgggcgccaggcagcagtcagtgtcctgggcacagaacctaacagc

SEQ ID NO: 26361 - DNA, 134 bp, Homo sapiens; identical to SEQ ID NO: 26319

SEQ ID NO: 26362 - DNA, 201 bp, Homo sapiens; identical to SEQ ID NO: 26320

SEQ ID NO: 26363 - DNA, 201 bp, Homo sapiens; identical to SEQ ID NO: 26280

SEQ ID NO: 26364 - DNA, 201 bp, Homo sapiens; identical to SEQ ID NO: 26281

SEQ ID NO: 26365 - DNA, 201 bp, Homo sapiens; identical to SEQ ID NO: 26282

SEQ ID NO: 26366 - DNA, 201 bp, Homo sapiens; identical to SEQ ID NO: 26324

SEQ ID NO: 26367 - DNA, 201 bp, Homo sapiens; identical to SEQ ID NO: 26325

SEQ ID NO: 26368 - DNA, 201 bp, Homo sapiens; identical to SEQ ID NO: 26327

SEQ ID NO: 26369 - DNA, 201 bp, Homo sapiens; identical to SEQ ID NO: 26285

SEQ ID NO: 26370 - DNA, 201 bp, Homo sapiens; identical to SEQ ID NO: 26287

SEQ ID NO: 26371 - DNA, 201 bp, Homo sapiens
ggaggctggattcgctccgttcgaggccctaatggtgctatctttgagcttggacctcggggaattaggccagcgggagccctaggggcccggaccttgcycctgggggctactccgcccttcaccccccttctccaaacctctgttttgggctgggctgagggagctgaccaagccccggggcaaagagcctgatgagac

SEQ ID NO: 26372 - DNA, 201 bp, Homo sapiens
attaggccagcgggagccctaggggcccggaccttgctcctgggggctactccgcccttcaccccccttctccaaacctctgttttgggctgggctgaggkagctgaccaagccccggggcaaagagcctgatgagactgtgcacagttttgcccagcgccgccttggacctgaggtggcgtctctagccatggacagtct

SEQ ID NO: 26373 - DNA, 201 bp, Homo sapiens; identical to SEQ ID NO: 26332

SEQ ID NO: 26374 - DNA, 201 bp, Homo sapiens; identical to SEQ ID NO: 26333

SEQ ID NO: 26375 - DNA, 201 bp, Homo sapiens; identical to SEQ ID NO: 26334

SEQ ID NO: 26376 - DNA, 201 bp, Homo sapiens
ccctaggggcccggaccttgctcctgggggctactccgcccttcaccccccttctccaaacctctgttttgggctgggctgagggagctgaccaagccccsgggcaaagagcctgatgagactgtgcacagttttgcccagcgccgccttggacctgaggtggcgtctctagccatggacagtctctgccgtggagtgttt

SEQ ID NO: 26377 - DNA, 201 bp, Homo sapiens; identical to SEQ ID NO: 26295

SEQ ID NO: 26378 - DNA, 201 bp, Homo sapiens
ccttgctcctgggggctactccgcccttcaccccccttctccaaacctctgttttgggctgggctgagggagctgaccaagccccggggcaaagagcctgwtgagactgtgcacagttttgcccagcgccgccttggacctgaggtggcgtctctagccatggacagtctctgccgtggagtgtttgcaggcaacagccgt

SEQ ID NO: 26379 - DNA, 201 bp, Homo sapiens; identical to SEQ ID NO: 26297

SEQ ID NO: 26380 - DNA, 201 bp, Homo sapiens; identical to SEQ ID NO: 26298

SEQ ID NO: 26381 - DNA, 201 bp, Homo sapiens; identical to SEQ ID NO: 26341

SEQ ID NO: 26382 - DNA, 201 bp, Homo sapiens; identical to SEQ ID NO: 26340

SEQ ID NO: 26383 - DNA, 201 bp, Homo sapiens; identical to SEQ ID NO: 26300

SEQ ID NO: 26384 - DNA, 201 bp, Homo sapiens; identical to SEQ ID NO: 26302

SEQ ID NO: 26385 - DNA, 201 bp, Homo sapiens; identical to SEQ ID NO: 26343

SEQ ID NO: 26386 - DNA, 201 bp, Homo sapiens; identical to SEQ ID NO: 26303

SEQ ID NO: 26387 - DNA, 201 bp, Homo sapiens; identical to SEQ ID NO: 26304

SEQ ID NO: 26388 - DNA, 201 bp, Homo sapiens; identical to SEQ ID NO: 26306

SEQ ID NO: 26389 - DNA, 201 bp, Homo sapiens
ctgcccccctaaggtggtcctagtggagagcagtgagcgtctgggaggctggattcgctccgttcgaggccctaatggtgctatctttgagcttggacctyggggaattaggccagcgggagccctaggggcccggaccttgctcctgggggctactccgcccttcaccccccttctccaaacctctgttttgggctgggc

SEQ ID NO: 26390 - DNA, 201 bp, Homo sapiens; identical to SEQ ID NO: 26307

SEQ ID NO: 26391 - DNA, 201 bp, Homo sapiens; identical to SEQ ID NO: 26308

SEQ ID NO: 26392 - DNA, 201 bp, Homo sapiens; identical to SEQ ID NO: 26309

SEQ ID NO: 26393 - DNA, 201 bp, Homo sapiens; identical to SEQ ID NO: 26310

SEQ ID NO: 26394 - DNA, 201 bp, Homo sapiens; identical to SEQ ID NO: 26311

SEQ ID NO: 26395 - DNA, 201 bp, Homo sapiens; identical to SEQ ID NO: 26312

SEQ ID NO: 26396 - DNA, 201 bp, Homo sapiens; identical to SEQ ID NO: 26355

SEQ ID NO: 26397 - DNA, 201 bp, Homo sapiens; identical to SEQ ID NO: 26315

SEQ ID NO: 26398 - DNA, 201 bp, Homo sapiens; identical to SEQ ID NO: 26357

SEQ ID NO: 26399 - DNA, 201 bp, Homo sapiens; identical to SEQ ID NO: 26316

SEQ ID NO: 26400 - DNA, 201 bp, Homo sapiens; identical to SEQ ID NO: 26317

SEQ ID NO: 26401 - DNA, 201 bp, Homo sapiens; identical to SEQ ID NO: 26318

SEQ ID NO: 26402 - DNA, 134 bp, Homo sapiens; identical to SEQ ID NO: 26319

SEQ ID NO: 26403 - DNA, 201 bp, Homo sapiens; identical to SEQ ID NO: 26320

SEQ ID NO: 26404 - DNA, 201 bp, Homo sapiens; identical to SEQ ID NO: 26280

SEQ ID NO: 26405 - DNA, 201 bp, Homo sapiens; identical to SEQ ID NO: 26281

SEQ ID NO: 26406 - DNA, 201 bp, Homo sapiens; identical to SEQ ID NO: 26282

SEQ ID NO: 26407 - DNA, 201 bp, Homo sapiens; identical to SEQ ID NO: 26324

SEQ ID NO: 26408 - DNA, 201 bp, Homo sapiens; identical to SEQ ID NO: 26325

SEQ ID NO: 26409 - DNA, 201 bp, Homo sapiens; identical to SEQ ID NO: 26285

SEQ ID NO: 26410 - DNA, 201 bp, Homo sapiens; identical to SEQ ID NO: 26327

SEQ ID NO: 26411 - DNA, 201 bp, Homo sapiens; identical to SEQ ID NO: 26287

SEQ ID NO: 26412 - DNA, 201 bp, Homo sapiens; identical to SEQ ID NO: 26288

SEQ ID NO: 26413 - DNA, 201 bp, Homo sapiens; identical to SEQ ID NO: 26330

SEQ ID NO: 26414 - DNA, 201 bp, Homo sapiens; identical to SEQ ID NO: 26289

SEQ ID NO: 26415 - DNA, 201 bp, Homo sapiens; identical to SEQ ID NO: 26332

SEQ ID NO: 26416 - DNA, 201 bp, Homo sapiens; identical to SEQ ID NO: 26333

SEQ ID NO: 26417 - DNA, 201 bp, Homo sapiens; identical to SEQ ID NO: 26334

SEQ ID NO: 26418 - DNA, 201 bp, Homo sapiens; identical to SEQ ID NO: 26335

SEQ ID NO: 26419 - DNA, 201 bp, Homo sapiens; identical to SEQ ID NO: 26295

SEQ ID NO: 26420 - DNA, 201 bp, Homo sapiens; identical to SEQ ID NO: 26337

SEQ ID NO: 26421 - DNA, 201 bp, Homo sapiens; identical to SEQ ID NO: 26297

SEQ ID NO: 26422 - DNA, 201 bp, Homo sapiens; identical to SEQ ID NO: 26298

SEQ ID NO: 26423 - DNA, 201 bp, Homo sapiens; identical to SEQ ID NO: 26341

SEQ ID NO: 26424 - DNA, 201 bp, Homo sapiens; identical to SEQ ID NO: 26340

SEQ ID NO: 26425 - DNA, 201 bp, Homo sapiens; identical to SEQ ID NO: 26300

SEQ ID NO: 26426 - DNA, 201 bp, Homo sapiens; identical to SEQ ID NO: 26302

SEQ ID NO: 26427 - DNA, 201 bp, Homo sapiens; identical to SEQ ID NO: 26343

SEQ ID NO: 26428 - DNA, 201 bp, Homo sapiens; identical to SEQ ID NO: 26303

SEQ ID NO: 26429 - DNA, 201 bp, Homo sapiens; identical to SEQ ID NO: 26304

SEQ ID NO: 26430 - DNA, 201 bp, Homo sapiens; identical to SEQ ID NO: 26305

SEQ ID NO: 26431 - DNA, 201 bp, Homo sapiens; identical to SEQ ID NO: 26306

SEQ ID NO: 26432 - DNA, 201 bp, Homo sapiens; identical to SEQ ID NO: 26307

SEQ ID NO: 26433 - DNA, 201 bp, Homo sapiens; identical to SEQ ID NO: 26308

SEQ ID NO: 26434 - DNA, 201 bp, Homo sapiens; identical to SEQ ID NO: 26309

SEQ ID NO: 26435 - DNA, 201 bp, Homo sapiens; identical to SEQ ID NO: 26310

SEQ ID NO: 26436 - DNA, 201 bp, Homo sapiens; identical to SEQ ID NO: 26312

SEQ ID NO: 26437 - DNA, 201 bp, Homo sapiens; identical to SEQ ID NO: 26311

SEQ ID NO: 26438 - DNA, 201 bp, Homo sapiens; identical to SEQ ID NO: 26355

SEQ ID NO: 26439 - DNA, 201 bp, Homo sapiens; identical to SEQ ID NO: 26315

SEQ ID NO: 26440 - DNA, 201 bp, Homo sapiens; identical to SEQ ID NO: 26357

SEQ ID NO: 26441 - DNA, 201 bp, Homo sapiens; identical to SEQ ID NO: 26316

SEQ ID NO: 26442 - DNA, 201 bp, Homo sapiens; identical to SEQ ID NO: 26317

SEQ ID NO: 26443 - DNA, 201 bp, Homo sapiens; identical to SEQ ID NO: 26318

SEQ ID NO: 26444 - DNA, 134 bp, Homo sapiens; identical to SEQ ID NO: 26319

SEQ ID NO: 26445 - DNA, 201 bp, Homo sapiens; identical to SEQ ID NO: 26320

SEQ ID NO: 26446 - DNA, 201 bp, Homo sapiens; identical to SEQ ID NO: 26280

SEQ ID NO: 26447 - DNA, 201 bp, Homo sapiens; identical to SEQ ID NO: 26281

SEQ ID NO: 26448 - DNA, 201 bp, Homo sapiens; identical to SEQ ID NO: 26282

SEQ ID NO: 26449 - DNA, 201 bp, Homo sapiens; identical to SEQ ID NO: 26324

SEQ ID NO: 26450 - DNA, 201 bp, Homo sapiens; identical to SEQ ID NO: 26325

SEQ ID NO: 26451 - DNA, 201 bp, Homo sapiens; identical to SEQ ID NO: 26327

SEQ ID NO: 26452 - DNA, 201 bp, Homo sapiens; identical to SEQ ID NO: 26285

SEQ ID NO: 26453 - DNA, 201 bp, Homo sapiens; identical to SEQ ID NO: 26287

SEQ ID NO: 26454 - DNA, 201 bp, Homo sapiens; identical to SEQ ID NO: 26288

SEQ ID NO: 26455 - DNA, 201 bp, Homo sapiens; identical to SEQ ID NO: 26289

SEQ ID NO: 26456 - DNA, 201 bp, Homo sapiens; identical to SEQ ID NO: 26290

SEQ ID NO: 26457 - DNA, 201 bp, Homo sapiens; identical to SEQ ID NO: 26291

SEQ ID NO: 26458 - DNA, 201 bp, Homo sapiens; identical to SEQ ID NO: 26292

SEQ ID NO: 26459 - DNA, 201 bp, Homo sapiens; identical to SEQ ID NO: 26293

SEQ ID NO: 26460 - DNA, 201 bp, Homo sapiens; identical to SEQ ID NO: 26294

SEQ ID NO: 26461 - DNA, 201 bp, Homo sapiens; identical to SEQ ID NO: 26295

SEQ ID NO: 26462 - DNA, 201 bp, Homo sapiens; identical to SEQ ID NO: 26296

SEQ ID NO: 26463 - DNA, 201 bp, Homo sapiens; identical to SEQ ID NO: 26297

SEQ ID NO: 26464 - DNA, 201 bp, Homo sapiens; identical to SEQ ID NO: 26298

SEQ ID NO: 26465 - DNA, 201 bp, Homo sapiens; identical to SEQ ID NO: 26341

SEQ ID NO: 26466 - DNA, 201 bp, Homo sapiens; identical to SEQ ID NO: 26299

SEQ ID NO: 26467 - DNA, 201 bp, Homo sapiens; identical to SEQ ID NO: 26300

SEQ ID NO: 26468 - DNA, 201 bp, Homo sapiens; identical to SEQ ID NO: 26302

SEQ ID NO: 26469 - DNA, 201 bp, Homo sapiens; identical to SEQ ID NO: 26343

SEQ ID NO: 26470 - DNA, 201 bp, Homo sapiens; identical to SEQ ID NO: 26303

SEQ ID NO: 26471 - DNA, 201 bp, Homo sapiens; identical to SEQ ID NO: 26304

SEQ ID NO: 26472 - DNA, 201 bp, Homo sapiens; identical to SEQ ID NO: 26306

SEQ ID NO: 26473 - DNA, 201 bp, Homo sapiens; identical to SEQ ID NO: 26305

SEQ ID NO: 26474 - DNA, 201 bp, Homo sapiens; identical to SEQ ID NO: 26307

SEQ ID NO: 26475 - DNA, 201 bp, Homo sapiens; identical to SEQ ID NO: 26308

SEQ ID NO: 26476 - DNA, 201 bp, Homo sapiens; identical to SEQ ID NO: 26309

SEQ ID NO: 26477 - DNA, 201 bp, Homo sapiens; identical to SEQ ID NO: 26310

SEQ ID NO: 26478 - DNA, 201 bp, Homo sapiens; identical to SEQ ID NO: 26311

SEQ ID NO: 26479 - DNA, 201 bp, Homo sapiens; identical to SEQ ID NO: 26312

SEQ ID NO: 26480 - DNA, 201 bp, Homo sapiens; identical to SEQ ID NO: 26313

SEQ ID NO: 26481 - DNA, 201 bp, Homo sapiens; identical to SEQ ID NO: 26314

SEQ ID NO: 26482 - DNA, 201 bp, Homo sapiens; identical to SEQ ID NO: 26315

SEQ ID NO: 26483 - DNA, 201 bp, Homo sapiens; identical to SEQ ID NO: 26316

SEQ ID NO: 26484 - DNA, 201 bp, Homo sapiens; identical to SEQ ID NO: 26317

SEQ ID NO: 26485 - DNA, 201 bp, Homo sapiens; identical to SEQ ID NO: 26318

SEQ ID NO: 26486 - DNA, 201 bp, Homo sapiens; identical to SEQ ID NO: 26279

SEQ ID NO: 26487 - DNA, 201 bp, Homo sapiens; identical to SEQ ID NO: 26280

SEQ ID NO: 26488 - DNA, 201 bp, Homo sapiens; identical to SEQ ID NO: 26281

SEQ ID NO: 26489 - DNA, 201 bp, Homo sapiens; identical to SEQ ID NO: 26282

SEQ ID NO: 26490 - DNA, 181 bp, Homo sapiens; identical to SEQ ID NO: 26283

SEQ ID NO: 26491 - DNA, 180 bp, Homo sapiens; identical to SEQ ID NO: 26284

SEQ ID NO: 26492 - DNA, 201 bp, Homo sapiens; identical to SEQ ID NO: 26286

SEQ ID NO: 26493 - DNA, 201 bp, Homo sapiens; identical to SEQ ID NO: 26285

SEQ ID NO: 26494 - DNA, 201 bp, Homo sapiens; identical to SEQ ID NO: 26287

SEQ ID NO: 26495 - DNA, 201 bp, Homo sapiens; identical to SEQ ID NO: 26288

SEQ ID NO: 26496 - DNA, 201 bp, Homo sapiens; identical to SEQ ID NO: 26330

SEQ ID NO: 26497 - DNA, 201 bp, Homo sapiens; identical to SEQ ID NO: 26289

SEQ ID NO: 26498 - DNA, 201 bp, Homo sapiens; identical to SEQ ID NO: 26332

SEQ ID NO: 26499 - DNA, 201 bp, Homo sapiens; identical to SEQ ID NO: 26333

SEQ ID NO: 26500 - DNA, 201 bp, Homo sapiens; identical to SEQ ID NO: 26334

SEQ ID NO: 26501 - DNA, 201 bp, Homo sapiens; identical to SEQ ID NO: 26335

SEQ ID NO: 26502 - DNA, 201 bp, Homo sapiens; identical to SEQ ID NO: 26295

SEQ ID NO: 26503 - DNA, 201 bp, Homo sapiens; identical to SEQ ID NO: 26337

SEQ ID NO: 26504 - DNA, 201 bp, Homo sapiens; identical to SEQ ID NO: 26297

SEQ ID NO: 26505 - DNA, 201 bp, Homo sapiens; identical to SEQ ID NO: 26298

SEQ ID NO: 26506 - DNA, 201 bp, Homo sapiens; identical to SEQ ID NO: 26340

SEQ ID NO: 26507 - DNA, 201 bp, Homo sapiens; identical to SEQ ID NO: 26300

SEQ ID NO: 26508 - DNA, 201 bp, Homo sapiens; identical to SEQ ID NO: 26302

SEQ ID NO: 26509 - DNA, 201 bp, Homo sapiens; identical to SEQ ID NO: 26301

SEQ ID NO: 26510 - DNA, 201 bp, Homo sapiens; identical to SEQ ID NO: 26303

SEQ ID NO: 26511 - DNA, 201 bp, Homo sapiens; identical to SEQ ID NO: 26304

SEQ ID NO: 26512 - DNA, 201 bp, Homo sapiens; identical to SEQ ID NO: 26305

SEQ ID NO: 26513 - DNA, 201 bp, Homo sapiens; identical to SEQ ID NO: 26306

SEQ ID NO: 26514 - DNA, 201 bp, Homo sapiens; identical to SEQ ID NO: 26307

SEQ ID NO: 26515 - DNA, 201 bp, Homo sapiens; identical to SEQ ID NO: 26308

SEQ ID NO: 26516 - DNA, 201 bp, Homo sapiens; identical to SEQ ID NO: 26309

SEQ ID NO: 26517 - DNA, 201 bp, Homo sapiens; identical to SEQ ID NO: 26310

SEQ ID NO: 26518 - DNA, 201 bp, Homo sapiens; identical to SEQ ID NO: 26312

SEQ ID NO: 26519 - DNA, 201 bp, Homo sapiens; identical to SEQ ID NO: 26311

SEQ ID NO: 26520 - DNA, 201 bp, Homo sapiens; identical to SEQ ID NO: 26355

SEQ ID NO: 26521 - DNA, 201 bp, Homo sapiens; identical to SEQ ID NO: 26315

SEQ ID NO: 26522 - DNA, 201 bp, Homo sapiens; identical to SEQ ID NO: 26357

SEQ ID NO: 26523 - DNA, 201 bp, Homo sapiens; identical to SEQ ID NO: 26316

SEQ ID NO: 26524 - DNA, 201 bp, Homo sapiens; identical to SEQ ID NO: 26317

SEQ ID NO: 26525 - DNA, 201 bp, Homo sapiens; identical to SEQ ID NO: 26318

SEQ ID NO: 26526 - DNA, 201 bp, Homo sapiens
ctagggggtaggggcctctccctcactgctggactggagctgggctcctgtagacctgaggggtccctctctctagggtctcctgtagggcttatgactgygaatccttgatgtcatgattttatgtgacgattcctaggagtccctgcccctagagtaggagcagggctggaccccaagcccctccctcttccatggaga

SEQ ID NO: 26527 - DNA, 201 bp, Homo sapiens
ctgttctcagagggatgtgagggaactgaactctggtgccgtgctagggggtaggggcctctccctcactgctggactggagctgggctcctgtagacctsaggggtccctctctctagggtctcctgtagggcttatgactgtgaatccttgatgtcatgattttatgtgacgattcctaggagtccctgcccctagagt

SEQ ID NO: 26528 - DNA, 201 bp, Homo sapiens
accacctgcaccccttcttgcagcgccagcagcttgcttatggcatctatgtcatccaccaggctggaaatggaacatttaacagggcaaaactgttgaaygttggggtgcgagaggccctgcgtgatgaagagtgggactgcctgttcttgcacgatgtggacctcttgccagaaaatgaccacaatctgtatgtgtgtg

SEQ ID NO: 26529 - DNA, 201 bp, Homo sapiens
gtaacctcagtcacctgcctggggccccagggggtcctccagctcctcaaggtctgccctactgtccagaacgatctcctctcttagtgggtcctgtgtcrgtgtcctttagcccagtgccatcactggcagagattgtggagcggaatccccgggtagaaccagggggccggtaccgccctgcaggttgtgagccccgct

SEQ ID NO: 26530 - DNA, 131 bp, Homo sapiens
caatgtttcattgttttattaactaatcgcyttttatttccaggcctgcgggatacaacgggaatacaaaaatgcgctagagcggtccgcaacgctgtagcctgcgtaaggaacaattgatactaagtggc

SEQ ID NO: 26531 - DNA, 201 bp, Homo sapiens; identical to SEQ ID NO: 26526

SEQ ID NO: 26532 - DNA, 201 bp, Homo sapiens; identical to SEQ ID NO: 26527

SEQ ID NO: 26533 - DNA, 201 bp, Homo sapiens; identical to SEQ ID NO: 26528

SEQ ID NO: 26534 - DNA, 201 bp, Homo sapiens; identical to SEQ ID NO: 26529

SEQ ID NO: 26535 - DNA, 201 bp, Homo sapiens; identical to SEQ ID NO: 26526

SEQ ID NO: 26536 - DNA, 201 bp, Homo sapiens; identical to SEQ ID NO: 26527

SEQ ID NO: 26537 - DNA, 201 bp, Homo sapiens; identical to SEQ ID NO: 26528

SEQ ID NO: 26538 - DNA, 201 bp, Homo sapiens; identical to SEQ ID NO: 26529

SEQ ID NO: 26539 - DNA, 201 bp, Homo sapiens; identical to SEQ ID NO: 26526

SEQ ID NO: 26540 - DNA, 201 bp, Homo sapiens; identical to SEQ ID NO: 26527

SEQ ID NO: 26541 - DNA, 201 bp, Homo sapiens; identical to SEQ ID NO: 26528

SEQ ID NO: 26542 - DNA, 201 bp, Homo sapiens; identical to SEQ ID NO: 26529

SEQ ID NO: 26543 - DNA, 201 bp, Homo sapiens
atatacaccacagcaagctccaggaatatataaagacatatgctcaaaagaaggatcttttaagatacatataaattataaatggaaaaataaattttctrgttttcttaaagaccctggtttccggtataaagaaatgtcccagcttcttagtcacgggccaatgggttgttgttactgaaaaggatgggaaacaggaat

SEQ ID NO: 26544 - DNA, 201 bp, Homo sapiens
gaaaaataaattttctagttttcttaaagaccctggtttccggtataaagaaatgtcccagcttcttagtcacgggccaatgggttgttgttactgaaaargatgggaaacaggaatctactatttttgatgctgtaatgatttgttcaggacatcacgtataccccaatctgccaacggattcctttcctggcctggacc

SEQ ID NO: 26545 - DNA, 201 bp, Homo sapiens
aatgggttgttgttactgaaaaggatgggaaacaggaatctactatttttgatgctgtaatgatttgttcaggacatcacgtataccccaatctgccaackgattcctttcctggcctggaccagtttcgaggcaactacctccatagccgggattataagaatccagaagccttcaaggggaagagggtcctcgtgattg

SEQ ID NO: 26546 - DNA, 201 bp, Homo sapiens
cttcccttatccggatgattacccaaactatatacaccacagcaagctccaggaatatataaagacatatgctcaaaagaaggatcttttaagatacatayaaattataaatggaaaaataaattttctagttttcttaaagaccctggtttccggtataaagaaatgtcccagcttcttagtcacgggccaatgggttgt

SEQ ID NO: 26547 - DNA, 201 bp, Homo sapiens
ggtctgggatgatggctatccttgggatatgatgtatgttacccgctttgcatcctttctccggaatgtccttccttcattcatctctgactggttatatrtccagaagatgaacacgtggtttaagcatgagaactatggcctgatgcctttaaatggttccctgagaaaagagcctgtgttcaatgatgagctcccatc

SEQ ID NO: 26548 - DNA, 201 bp, Homo sapiens
ctttcattcccattactccttctggctgttacacttacattttattaatgagaaagtctttgaggtctcaaaattcagcatagaagtgtaatcacacaatacaacacacacacacacacacatacacacacacaatcacaacatagttcctctctcctttcctgaagatatgaaaatcagtcttggcccatttgaattaaa

SEQ ID NO: 26549 - DNA, 201 bp, Homo sapiens
ataaattataaatggaaaaataaattttctagttttcttaaagaccctggtttccggtataaagaaatgtcccagcttcttagtcacgggccaatgggttrttgttactgaaaaggatgggaaacaggaatctactatttttgatgctgtaatgatttgttcaggacatcacgtataccccaatctgccaacggattcctt

SEQ ID NO: 26550 - DNA, 201 bp, Homo sapiens
tttcattcccattactccttctggctgttacacttacattttattaatgagaaagtctttgaggtctcaaaattcagcatagaagtgtaatcacacaatacaacacacacacacacacacatacacacacacaatcacaacatagttcctctctcctttcctgaagatatgaaaatcagtcttggcccatttgaattaaag

SEQ ID NO: 26551 - DNA, 201 bp, Homo sapiens
ttcattcccattactccttctggctgttacacttacattttattaatgagaaagtctttgaggtctcaaaattcagcatagaagtgtaatcacacaatacaacacacacacacacacacatacacacacacaatcacaacatagttcctctctcctttcctgaagatatgaaaatcagtcttggcccatttgaattaaagt

SEQ ID NO: 26552 - DNA, 201 bp, Homo sapiens
caatgatgagctcccatcccgcatcctgtgtggcactctgtccatcaagcccagtgtgaaggagttcacggaaacctcagctgtgtttgaggatgggaccrtgtttgaggctatcgactctgtcatctttgcaacaggctatgattattcctaccccttccttgatgagaccatcatgaaaagcagaaacaatgaggttac

SEQ ID NO: 26553 - DNA, 201 bp, Homo sapiens
ttcccattactccttctggctgttacacttacattttattaatgagaaagtctttgaggtctcaaaattcagcatagaagtgtaatcacacaatacaacacacacacacacacacatacacacacacaatcacaacatagttcctctctcctttcctgaagatatgaaaatcagtcttggcccatttgaattaaagtataa

SEQ ID NO: 26554 - DNA, 201 bp, Homo sapiens
ctccttctggctgttacacttacattttattaatgagaaagtctttgaggtctcaaaattcagcatagaagtgtaatcacacaatacaacacacacacacacacacatacacacacacaatcacaacatagttcctctctcctttcctgaagatatgaaaatcagtcttggcccatttgaattaaagtataagtaaaatgg

SEQ ID NO: 26555 - DNA, 201 bp, Homo sapiens
ggaccatgtttgaggctatcgactctgtcatctttgcaacaggctatgattattcctaccccttccttgatgagaccatcatgaaaagcagaaacaatgargttaccttgtttaaaggcatcttccccccactaatggagaagccaaccttggctgtgattggcttggttcagtcccttggagctgccatccccacagcag

SEQ ID NO: 26556 - DNA, 201 bp, Homo sapiens
cactctgtccatcaagcccagtgtgaaggagttcacggaaacctcagctgtgtttgaggatgggaccatgtttgaggctatcgactctgtcatctttgcawcaggctatgattattcctaccccttccttgatgagaccatcatgaaaagcagaaacaatgaggttaccttgtttaaaggcatcttccccccactaatgga

SEQ ID NO: 26557 - DNA, 201 bp, Homo sapiens
ctggaaccgcttttggaaaggattgggagagatgaaacagcagttgtgtgtcctgttatagacacaattgattggaatacttttgaattctatatgcagayaggggagcccatgattggtgggtttgactggcgtttaacatttcagtggcattctgtccccaaacaggaaagggacaggcggatatcaagaattgacccc

SEQ ID NO: 26558 - DNA, 201 bp, Homo sapiens
tggaagagggcatttgtttgagtgtgagtttggaggcctttttaacatgcagacatacccatatttaaatgaaatggggagatatttacattccgtacttygtaaacttgagctattggacttcactgatgtatatattaatacctcagattcctctgattttgtaagctgtcttctctgtgaacgtgtttgtgtgtgtag

SEQ ID NO: 26559 - DNA, 201 bp, Homo sapiens
atgggttccctgtaccagcaaacattatttggcattttaaagaagatggaactatttttcacccacactcaggactgtgtcttagtgcttatcggacaccrgagggccgacctgatgtacaaatgagaacttgtgatgctctagataaaaatcaaatttggagttttgagaaatagagcacaacagcactttcgtcatgag

SEQ ID NO: 26560 - DNA, 201 bp, Homo sapiens
gaaaccctccagcaagaaaagaagcttatggtgatatttctgaaagaaaattactacgagagcggttgagatgcaagagctttgactggtatttgaaaaaygtttttcctaatttacatgttccagaggatagaccaggctggcatggggctattcgcagtagagggatctcgtctgaatgtttagattataattctcctg

SEQ ID NO: 26561 - DNA, 201 bp, Homo sapiens
ttcactgtttggatgccatggtcaaggaggcaatcaattctttgaatatacttcaaacaaagaaataaggtttaattctgtgacagagttatgtgcagagrtacctgagcaaaaaaattatgtgggaatgcaaaattgtcccaaagatgggttccctgtaccagcaaacattatttggcattttaaagaagatggaactat

SEQ ID NO: 26562 - DNA, 201 bp, Homo sapiens
atctacaggaaaacagtcaagaagttgggacctacatgttactaaagtttgctaagctgcgggatgaatttgaaattgttggagacgtccgaggcaaaggyctcatgataggcatagaaatggtgcaggataagataagctgtcggcctcttccccgtgaagaagtaaatcagatccatgaggactgcaagcacatgggac

SEQ ID NO: 26563 - DNA, 201 bp, Homo sapiens
agtagaagtatttcgttctgccttaacccaacacatggaaagaagagctaagtaacattgtcagaaataaataaaaccacaagtctcaagaatttgccacktatgttcaagggtgaatttgaagaatttcagaaccactggtatccagagaaagcctgcagctctccacaggagctgtaaaagtcatggttgactgcctac

SEQ ID NO: 26564 - DNA, 201 bp, Homo sapiens
cagatccatgaggactgcaagcacatgggactcctcgttggcagaggcagcattttttctcagacatttcgcattgcgccctcaatgtgcatcactaaacsagaagttgattttgcagtagaagtatttcgttctgccttaacccaacacatggaaagaagagctaagtaacattgtcagaaataaataaaaccacaagtc

SEQ ID NO: 26565 - DNA, 201 bp, Homo sapiens
tgctgaaggaaacagatacctggatttcttttccgggattgttactgtcagtgttggccattgccacccaaaggtgaatgcagtggcacaaaagcagctcsgccgcctgtggcatacaagcaccatcttcttccaccctccaatgcatgaatatgcagagaagcttgccgcacttcttcctgagcctcttaaggtcatttt

SEQ ID NO: 26566 - DNA, 201 bp, Homo sapiens
atccacaaggaacatctttctcctgtggtgacggcatatttccagaaacccctgctgctccaccaggggcacatggagtggctctttgatgctgaaggaarcagatacctggatttcttttccgggattgttactgtcagtgttggccattgccacccaaaggtgaatgcagtggcacaaaagcagctcggccgcctgtgg

SEQ ID NO: 26567 - DNA, 201 bp, Homo sapiens
ctgatggccagggcgcactcaaacaacatagacatcatttctttcagaggagcctaccatggatgcagtccttacacacttggcttgacaaacgtagggayctacaagatggaactccctggtgggacaggttgccaaccaacaatgtgtccagatgtttttcgtggcccttggggaggaagccactgtcgagattctcca

SEQ ID NO: 26568 - DNA, 201 bp, Homo sapiens
gaaggaaacagatacctggatttcttttccgggattgttactgtcagtgttggccattgccacccaaaggtgaatgcagtggcacaaaagcagctcggccrcctgtggcatacaagcaccatcttcttccaccctccaatgcatgaatatgcagagaagcttgccgcacttcttcctgagcctcttaaggtcattttcttg

SEQ ID NO: 26569 - DNA, 201 bp, Homo sapiens
caagcacatgggactcctcgttggcagaggcagcattttttctcagacatttcgcattgcgccctcaatgtgcatcactaaaccagaagttgattttgcaktagaagtatttcgttctgccttaacccaacacatggaaagaagagctaagtaacattgtcagaaataaataaaaccacaagtctcaagaatttgccacgt

SEQ ID NO: 26570 - DNA, 201 bp, Homo sapiens
tttcttttccgggattgttactgtcagtgttggccattgccacccaaaggtgaatgcagtggcacaaaagcagctcggccgcctgtggcatacaagcaccrtcttcttccaccctccaatgcatgaatatgcagagaagcttgccgcacttcttcctgagcctcttaaggtcattttcttggtgaacagtggctcagaagc

SEQ ID NO: 26571 - DNA, 201 bp, Homo sapiens
ccctgctgctccaccaggggcacatggagtggctctttgatgctgaaggaaacagatacctggatttcttttccgggattgttactgtcagtgttggccaytgccacccaaaggtgaatgcagtggcacaaaagcagctcggccgcctgtggcatacaagcaccatcttcttccaccctccaatgcatgaatatgcagaga

SEQ ID NO: 26572 - DNA, 201 bp, Homo sapiens
aaggtgtgaatggagttgtccagtacccaaaggggtttctaaaggaagcctttgagctggtgcgagcaaggggaggcgtgtgcattgcagatgaagtgcaracaggatttggaaggttgggctctcacttctggggcttccaaacccacgatgtcctgcctgacattgtcaccatggctaaagggattgggaatggctttc

SEQ ID NO: 26573 - DNA, 201 bp, Homo sapiens
ctgatggagaatggcaccctatccagggaaggaggcctccgagctcagatggatcaagtaaaaagccagggtgcagacctccaccataactgttgtgagaytgtgggcagccttagggccataaatatctctggggatgtgggcatctctgaggccatgggcatctctggagacatgtgcacctttgaggctacgggcttc

SEQ ID NO: 26574 - DNA, 201 bp, Homo sapiens
actgccagaaggatcgggaagatctaagagtctatgagaaaacacattctgtgtggcctttcttggttcagaggaaaccagacttcaggaaccctctctayaaaggcttcactatgtatggggtactcaatcctagtactgtgccctacaacattcagttctggtgtgggatgtataaccgctttgacaaagggctgcagc

SEQ ID NO: 26575 - DNA, 201 bp, Homo sapiens
gtgagattgtgggcagccttagggccataaatatctctggggatgtgggcatctctgaggccatgggcatctctggagacatgtgcacctttgaggctacrggcttctccaaagacttaggaatctgtggggccatggacatctctgaggccactggcatctctggaaacttgggtatttctgaggccaggggtttctctg

SEQ ID NO: 26576 - DNA, 201 bp, Homo sapiens; identical to SEQ ID NO: 26573

SEQ ID NO: 26577 - DNA, 201 bp, Homo sapiens; identical to SEQ ID NO: 26574

SEQ ID NO: 26578 - DNA, 201 bp, Homo sapiens; identical to SEQ ID NO: 26575

SEQ ID NO: 26579 - DNA, 201 bp, Homo sapiens; identical to SEQ ID NO: 26573

SEQ ID NO: 26580 - DNA, 201 bp, Homo sapiens; identical to SEQ ID NO: 26574

SEQ ID NO: 26581 - DNA, 201 bp, Homo sapiens; identical to SEQ ID NO: 26575

SEQ ID NO: 26582 - DNA, 201 bp, Homo sapiens; identical to SEQ ID NO: 26573

SEQ ID NO: 26583 - DNA, 201 bp, Homo sapiens; identical to SEQ ID NO: 26574

SEQ ID NO: 26584 - DNA, 201 bp, Homo sapiens; identical to SEQ ID NO: 26575

SEQ ID NO: 26585 - DNA, 201 bp, Homo sapiens
tcacgtcccactgttctgcaaacccaatccgggaggtatgacctggctgggacagtttaggaagatggccacgaaggcacctgggggagtagatatatgtwtttgagaatgagaggagtaaatcgctggacgaccatgagcaggaagaaaattaggcctccacctcccaaccagtggccctgagttggcaacttagacagc

SEQ ID NO: 26586 - DNA, 201 bp, Homo sapiens
ttataatggtggcccacctagccatcaatgtttccaaggcccgcaagaagtacaaagtggagtggacacttccattaagattctcacacactcaatttctrttcttctattaagggaaatcttaaaaggatgtggtatttgatgactcttaggaaggctctatttccctacagtatctttgtaatgcatctgaaatccacc

SEQ ID NO: 26587 - DNA, 201 bp, Homo sapiens
acaccgcgctgcgcagttttgttctgctccagctgttcgaaggtgatccagacgcaagatggctgtcctctctaaggaatatggttttgtgcttctaactkgtgctgccagctttataatggtggcccacctagccatcaatgtttccaaggcccgcaagaagtacaaagtggagtggacacttccattaagattctcaca

SEQ ID NO: 26588 - DNA, 201 bp, Homo sapiens
ccagacgcaagatggctgtcctctctaaggaatatggttttgtgcttctaactggtgctgccagctttataatggtggcccacctagccatcaatgtttcyaaggcccgcaagaagtacaaagtggagtggacacttccattaagattctcacacactcaatttctgttcttctattaagggaaatcttaaaaggatgtgg

SEQ ID NO: 26589 - DNA, 201 bp, Homo sapiens
ctgcttctggcctcatctagccccgccccaggcgagggcgccgcacccacaccgcgctgcgcagttttgttctgctccagctgttcgaaggtgatccagaygcaagatggctgtcctctctaaggaatatggttttgtgcttctaactggtgctgccagctttataatggtggcccacctagccatcaatgtttccaaggc

SEQ ID NO: 26590 - DNA, 201 bp, Homo sapiens
acaccgcgctgcgcagttttgttctgctccagctgttcgaaggtgatccagacgcaagatggctgtcctctctaaggaatatggttttgtgcttctaactkgtgctgccagctttataatggtggcccacctagccatcaatgtttccaaggcccgcaagaagtacaaagtggagtatcctatcatgtacagcacggaccc

SEQ ID NO: 26591 - DNA, 201 bp, Homo sapiens
ccagacgcaagatggctgtcctctctaaggaatatggttttgtgcttctaactggtgctgccagctttataatggtggcccacctagccatcaatgtttcyaaggcccgcaagaagtacaaagtggagtatcctatcatgtacagcacggaccctgaaaatgggcacatcttcaactgcattcagcgagcccaccagaaca

SEQ ID NO: 26592 - DNA, 201 bp, Homo sapiens
tggtgctgccagctttataatggtggcccacctagccatcaatgtttccaaggcccgcaagaagtacaaagtggagtatcctatcatgtacagcacggacyctgaaaatgggcacatcttcaactgcattcagcgagcccaccagaacacgttggaagtgtatcctcccttcttattttttctagctgttggaggtgttta

SEQ ID NO: 26593 - DNA, 201 bp, Homo sapiens; identical to SEQ ID NO: 26589

SEQ ID NO: 26594 - DNA, 201 bp, Homo sapiens
tgggcagtggacccaaatgctgccattaaagaattataggggtttaaaaactctcattcattttaaatgacttacctttatttccagttacattttttttytaaatataataaaaacttacctggcatcagcctcatacctaaaactcctgactcttaccactcatttccgtttgagtctgtatctgaaatcagtagccta

SEQ ID NO: 26595 - DNA, 201 bp, Homo sapiens; identical to SEQ ID NO: 26585

SEQ ID NO: 26596 - DNA, 201 bp, Homo sapiens
ggttaaaagtggcttgggcagtggacccaaatgctgccattaaagaattataggggtttaaaaactctcattcattttaaatgacttacctttatttccakttacattttttttctaaatataataaaaacttacctggcatcagcctcatacctaaaactcctgactcttaccactcatttccgtttgagtctgtatctg

SEQ ID NO: 26597 - DNA, 201 bp, Homo sapiens
agcctgggcaacatagcaaaaccccatctctacaaaaaaatatacaacagttagccaggcatgatggcacatgtctgcagtcccagctacttgggaggctraggtgggaggatcacttgagcccaggatgtcaaggctgcagtgagttatgatcacactgctgcactccagcgtgggtgacagagcaagaccctgtctcaa

SEQ ID NO: 26598 - DNA, 201 bp, Homo sapiens
caaatattccaccagcaacattgatgaatattgaagactatggactgtgagacgcaagatggctgtcctctctaaggaatatggttttgtgcttctaactkgtgctgccagctttataatggtggcccacctagccatcaatgtttccaaggcccgcaagaagtacaaagtggagtatcctatcatgtacagcacggaccc

SEQ ID NO: 26599 - DNA, 201 bp, Homo sapiens
tgagacgcaagatggctgtcctctctaaggaatatggttttgtgcttctaactggtgctgccagctttataatggtggcccacctagccatcaatgtttcyaaggcccgcaagaagtacaaagtggagtatcctatcatgtacagcacggaccctgaaaatgggcacatcttcaactgcattcagcgagcccaccagaaca

SEQ ID NO: 26600 - DNA, 201 bp, Homo sapiens; identical to SEQ ID NO: 26592

SEQ ID NO: 26601 - DNA, 201 bp, Homo sapiens
cagggacagatcttccatcctcctaacatatagttagcttccactctccaaatattccaccagcaacattgatgaatattgaagactatggactgtgagaygcaagatggctgtcctctctaaggaatatggttttgtgcttctaactggtgctgccagctttataatggtggcccacctagccatcaatgtttccaaggc

SEQ ID NO: 26602 - DNA, 201 bp, Homo sapiens; identical to SEQ ID NO: 26594

SEQ ID NO: 26603 - DNA, 201 bp, Homo sapiens
cccaggcgagggcgccgcacccacaccgcgctgcgcagttttgttctgctccagctgttcgaaggtgatccagggacagatcttccatcctcctaacatayagttagcttccactctccaaatattccaccagcaacattgatgaatattgaagactatggactgtgagacgcaagatggctgtcctctctaaggaatatg

SEQ ID NO: 26604 - DNA, 201 bp, Homo sapiens; identical to SEQ ID NO: 26585

SEQ ID NO: 26605 - DNA, 201 bp, Homo sapiens; identical to SEQ ID NO: 26596

SEQ ID NO: 26606 - DNA, 201 bp, Homo sapiens; identical to SEQ ID NO: 26597

SEQ ID NO: 26607 - DNA, 201 bp, Homo sapiens
tgaaatagccacagtgctgggggccgtcccaacgtgttctttcttccacagacgcaagatggctgtcctctctaaggaatatggttttgtgcttctaactkgtgctgccagctttataatggtggcccacctagccatcaatgtttccaaggcccgcaagaagtacaaagtggagtatcctatcatgtacagcacggaccc

SEQ ID NO: 26608 - DNA, 201 bp, Homo sapiens
acagacgcaagatggctgtcctctctaaggaatatggttttgtgcttctaactggtgctgccagctttataatggtggcccacctagccatcaatgtttcyaaggcccgcaagaagtacaaagtggagtatcctatcatgtacagcacggaccctgaaaatgggcacatcttcaactgcattcagcgagcccaccagaaca

SEQ ID NO: 26609 - DNA, 201 bp, Homo sapiens; identical to SEQ ID NO: 26592

SEQ ID NO: 26610 - DNA, 201 bp, Homo sapiens
gaaggtgatccagtaataaagcatcttgctccctaaggcttcacaccatgaaatagccacagtgctgggggccgtcccaacgtgttctttcttccacagaygcaagatggctgtcctctctaaggaatatggttttgtgcttctaactggtgctgccagctttataatggtggcccacctagccatcaatgtttccaaggc

SEQ ID NO: 26611 - DNA, 201 bp, Homo sapiens; identical to SEQ ID NO: 26594

SEQ ID NO: 26612 - DNA, 201 bp, Homo sapiens; identical to SEQ ID NO: 26585

SEQ ID NO: 26613 - DNA, 201 bp, Homo sapiens; identical to SEQ ID NO: 26596

SEQ ID NO: 26614 - DNA, 201 bp, Homo sapiens; identical to SEQ ID NO: 26597

SEQ ID NO: 26615 - DNA, 201 bp, Homo sapiens; identical to SEQ ID NO: 26590

SEQ ID NO: 26616 - DNA, 201 bp, Homo sapiens; identical to SEQ ID NO: 26591

SEQ ID NO: 26617 - DNA, 201 bp, Homo sapiens; identical to SEQ ID NO: 26592

SEQ ID NO: 26618 - DNA, 201 bp, Homo sapiens; identical to SEQ ID NO: 26589

SEQ ID NO: 26619 - DNA, 201 bp, Homo sapiens; identical to SEQ ID NO: 26594

SEQ ID NO: 26620 - DNA, 201 bp, Homo sapiens; identical to SEQ ID NO: 26585

SEQ ID NO: 26621 - DNA, 201 bp, Homo sapiens; identical to SEQ ID NO: 26596

SEQ ID NO: 26622 - DNA, 201 bp, Homo sapiens; identical to SEQ ID NO: 26597

SEQ ID NO: 26623 - DNA, 201 bp, Homo sapiens
tcctgtgaccccgcccggcccctgccccctccaacccttctggccctcgcaccactgtgactctgccatcttcctcagacggaggctgggcgtggggggggctgtcctggctctgctgtcccccaagagggtgcttcgagggtgaggacttctctggagaggcctggagacctagctccatgttcctcctcctctctcccc

SEQ ID NO: 26624 - DNA, 201 bp, Homo sapiens
ggaggtggctgatgccacacgattcaggcaagaggtgccaggagtgtgctgggcagtggttgtgaggatggcaggctggcgggcacgaggaggtcagagarggatgtgtggagagaccgtctaggcgccagccctggcttggtggccacccccaggttcgctatcctgatcgcatcacactgatccggggcaaccatgaga

SEQ ID NO: 26625 - DNA, 201 bp, Homo sapiens
cgtgagcccccgaggagccggctacctatttggcagtgacgtggtggcccagttcaacgcagccaatgacattgacatgatctgccgtgcccaccaactgktgatggaaggttacaagtggcacttcaatgagacggtgctcactgtgtggtcggcacccaactactgctaccggtgagccggctgggccgggctgggatg

SEQ ID NO: 26626 - DNA, 201 bp, Homo sapiens
tccctgagaccaactacctcttcatgggggactttgtggaccgtggcttctatagcgtcgaaacgttcctcctgctgctggcacttaaggtggcagtcccyggcttctgcacccccaacctgggcgacctcgggccgggcctgtcttagtccgttccgccctcatctcctatcgtgaccagccccaccttggagctgtgtc

SEQ ID NO: 26627 - DNA, 201 bp, Homo sapiens
tttgaggctgctccccaagagacacggggcatcccctccaagaagcccgtggccgactacttcctgtgaccccgcccggcccctgccccctccaacccttytggccctcgcaccactgtgactctgccatcttcctcagacggaggctgggcgtggggggggctgtcctggctctgctgtcccccaagagggtgcttcgag

SEQ ID NO: 26628 - DNA, 201 bp, Homo sapiens
ctgtcctggctctgctgtcccccaagagggtgcttcgagggtgaggacttctctggagaggcctggagacctagctccatgttcctcctcctctctccccmcttgaaccatgaagtttccaataatttttttttctttttttccttcttttttctgtttgtttttagataaaaattttgagaaaaaaaatgaaaaaattct

SEQ ID NO: 26629 - DNA, 201 bp, Homo sapiens
tagcgtcgaaacgttcctcctgctgctggcacttaaggtggcagtccccggcttctgcacccccaacctgggcgacctcgggccgggcctgtcttagtccrttccgccctcatctcctatcgtgaccagccccaccttggagctgtgtcactggtgatggaccgattctgcttttgggggtggtcagagacttgatggggg

SEQ ID NO: 26630 - DNA, 201 bp, Homo sapiens; identical to SEQ ID NO: 26623

SEQ ID NO: 26631 - DNA, 201 bp, Homo sapiens
cgtgagcccccgaggagccggctacctatttggcagtgacgtggtggcccagttcaacgcagccaatgacattgacatgatctgccgtgcccaccaactgktgatggaaggttacaagtggcacttcaatgagacggtgctcactgtgtggtcggcacccaactactgctaccgctgtgggaatgtggcagccatcttgga

SEQ ID NO: 26632 - DNA, 201 bp, Homo sapiens; identical to SEQ ID NO: 26627

SEQ ID NO: 26633 - DNA, 201 bp, Homo sapiens; identical to SEQ ID NO: 26628

SEQ ID NO: 26634 - DNA, 201 bp, Homo sapiens
ccccaagagacacggggccccctgccccctccaacccttctggccctcgcaccactgtgactctgccatcttcctcagacggaggctgggcgtggggggggctgtcctggctctgctgtcccccaagagggtgcttcgagggtgaggacttctctggagaggcctggagacctagctccatgttcctcctcctctctcccc

SEQ ID NO: 26635 - DNA, 201 bp, Homo sapiens; identical to SEQ ID NO: 26631

SEQ ID NO: 26636 - DNA, 201 bp, Homo sapiens
ggcagccatcttggagctggacgagcatctccagaaagatttcatcatctttgaggctgctccccaagagacacggggccccctgccccctccaacccttytggccctcgcaccactgtgactctgccatcttcctcagacggaggctgggcgtggggggggctgtcctggctctgctgtcccccaagagggtgcttcgag

SEQ ID NO: 26637 - DNA, 201 bp, Homo sapiens; identical to SEQ ID NO: 26628

SEQ ID NO: 26638 - DNA, 201 bp, Homo sapiens; identical to SEQ ID NO: 26623

SEQ ID NO: 26639 - DNA, 201 bp, Homo sapiens; identical to SEQ ID NO: 26631

SEQ ID NO: 26640 - DNA, 201 bp, Homo sapiens; identical to SEQ ID NO: 26627

SEQ ID NO: 26641 - DNA, 201 bp, Homo sapiens; identical to SEQ ID NO: 26628

SEQ ID NO: 26642 - DNA, 201 bp, Homo sapiens; identical to SEQ ID NO: 26623

SEQ ID NO: 26643 - DNA, 201 bp, Homo sapiens; identical to SEQ ID NO: 26631

SEQ ID NO: 26644 - DNA, 201 bp, Homo sapiens; identical to SEQ ID NO: 26627

SEQ ID NO: 26645 - DNA, 201 bp, Homo sapiens; identical to SEQ ID NO: 26628

SEQ ID NO: 26646 - DNA, 201 bp, Homo sapiens
tcaagggcatggaccaggggctgctgggcatgtgtcctggagagagaaggaagattatcatccctccattcctggcctatggcgagaaaggctatgggacrgtgatccccccacaggcctcgctggtctttcacgtcctcctgattgacgtgcacaacccgaaggacgctgtccagctagagacgctggagctcccccccg

SEQ ID NO: 26647 - DNA, 201 bp, Homo sapiens
catacctcccctccacatcactgacacagctgagcttgttatccatctccccaaactttctctttctttgtacttcttgtcatccccactcccagcccctwttcctctatgtgtgagggaagctgcttgggtgggtgttagggctatgaaatcttggatttggggctgaggggtgggagggagggcagagctctgcacact

SEQ ID NO: 26648 - DNA, 201 bp, Homo sapiens
ccgccccactgcccccgcatggtccaggacggcgactttgtccgctaccactacaatggcaccctgctggacggcacctccttcgacaccagctacagtargggcggcacttatgacacctacgtcggctctggttggctgatcaagggcatggaccaggggctgctgggcatgtgtcctggagagagaaggaagattatc

SEQ ID NO: 26649 - DNA, 201 bp, Homo sapiens; identical to SEQ ID NO: 26646

SEQ ID NO: 26650 - DNA, 201 bp, Homo sapiens; identical to SEQ ID NO: 26647

SEQ ID NO: 26651 - DNA, 201 bp, Homo sapiens; identical to SEQ ID NO: 26648

SEQ ID NO: 26652 - DNA, 201 bp, Homo sapiens
ccctttgccctcctccctcgcctccagtggaggctgagctgaccctgggctgctggaggccagactgggctgtagttagcttttcatccctaaagaaggcyttccctaaggaaccatagaagagaggaagaaaacaaagggcatgtgtgagggaagctgcttgggtgggtgttagggctatgaaatcttggatttggggct

SEQ ID NO: 26653 - DNA, 201 bp, Homo sapiens; identical to SEQ ID NO: 26646

SEQ ID NO: 26654 - DNA, 201 bp, Homo sapiens
actgacacagctgagcttgttatccatctccccaaactttctctttctttgtacttcttgtcatccccactcccagccccttttcctctatgtgacagctscctaggacccctctgccttcctccccaatcctgactggctcctagggaaggggaaggctcctggagggcagccctacctctcccatgccctttgccctcc

SEQ ID NO: 26655 - DNA, 201 bp, Homo sapiens
ctgacacagctgagcttgttatccatctccccaaactttctctttctttgtacttcttgtcatccccactcccagccccttttcctctatgtgacagctcsctaggacccctctgccttcctccccaatcctgactggctcctagggaaggggaaggctcctggagggcagccctacctctcccatgccctttgccctcct

SEQ ID NO: 26656 - DNA, 201 bp, Homo sapiens
catacctcccctccacatcactgacacagctgagcttgttatccatctccccaaactttctctttctttgtacttcttgtcatccccactcccagcccctwttcctctatgtgacagctccctaggacccctctgccttcctccccaatcctgactggctcctagggaaggggaaggctcctggagggcagccctacctct

SEQ ID NO: 26657 - DNA, 201 bp, Homo sapiens; identical to SEQ ID NO: 26648

SEQ ID NO: 26658 - DNA, 201 bp, Homo sapiens
acaaaagcctctcatcccccattaaccagggcaccaagcccacaggtgtccccagcccactggatcagaaagagttcagtaagaccggaagctcctggtaygggtttctcccagttctctagggaaggccacctgcaggtcactgaaacttcaagcaccagggaagatctaacatttgagtcccttccaggccatcagagg

SEQ ID NO: 26659 - DNA, 201 bp, Homo sapiens
ctgaagaagctgaagcctgggctggagaaggacttcctgccgctctacttcggctggttcctgaccaagaagagctctgagaccctccgcaaagccggccrggtcttcctggaagagctggggaaccacaaggccttcaagaaggagctgcgacaattcgtccctggggatgagcccagggagaagatggacttggtcacc

SEQ ID NO: 26660 - DNA, 201 bp, Homo sapiens
ggatgctgaccctggccaagaacatggaggtcagggccatcttcacggggtactacgggaaaggcaaacctgtgcccacgcaaggtagccggaaggggggygccttgcagtcctgcaccatcatatgagtgttctcaccaccacttatgcccctagaagggaaggggagagggaaacgtgccctctgtttgatccttgttt

SEQ ID NO: 26661 - DNA, 201 bp, Homo sapiens
gcagggaggcaccattcaggaacctggaccaaagctgacgaggctgggccaagccagggatggggccacagccagaaccccgagccctacttccaggttcyggttagctcagccccagcccagcccagctgctctgcccagagctgggtgagtggggagacacctcagagccccgcaaaacccactgaccggaggcaaaag

SEQ ID NO: 26662 - DNA, 201 bp, Homo sapiens
gtgacacccaagacgactggggcccgggtggagttaagcgagcagcaactgcagttgtggccgagtgatgtggacaagctgtcacccactgacaacctgcygcgggggagccgcgcccacatcaccctcggctgtgcagctgacgtagaggccgtgcagacgggccttgacctcttagagattctgcggcaggagaagggg

SEQ ID NO: 26663 - DNA, 201 bp, Homo sapiens
acccctggctggtaagggccaagtcccaccggttgcttctgggaaggggtttctaacactagtctgtgtgctgtggttcctggggtgccctccactgcccyctgttcagtaacagggccttgctaatcgggttgtcactcaacaaaagtgctttggatttaagttactatcctggctttgcccaacctcagcaacctgtaa

SEQ ID NO: 26664 - DNA, 201 bp, Homo sapiens
ccctcggctgtgcagctgacgtagaggccgtgcagacgggccttgacctcttagagattctgcggcaggagaaggggggcagccgaggcgaggaggtgggygagctaagccggggcaagctctattccttgggcaatgggcgctggatgctgaccctggccaagaacatggaggtcagggccatcttcacggggtactacg

SEQ ID NO: 26665 - DNA, 201 bp, Homo sapiens
tctctgtgactgatgttaggctgggcccagaggcacagccggggcctgcctagcactcacatgctggacaggtctgggagaggcagagtgccccacctgcmactaggctgggtgcccacagcccgcatgcagcagcttgctgcaccccaagtccaggtcgggctcagctctggctcacagactggagacaatgcagatgcc

SEQ ID NO: 26666 - DNA, 201 bp, Homo sapiens
acgggaaaggcaaacctgtgcccacgcaaggtagccggaaggggggcgccttgcagtcctgcaccatcatatgagtgttctcaccaccacttatgcccctrgaagggaaggggagagggaaacgtgccctctgtttgatccttgttttgtgacattttttttttttttttttttactcaaagttaacctacctgtaacttt

SEQ ID NO: 26667 - DNA, 201 bp, Homo sapiens
aggtgggcgagctaagccggggcaagctctattccttgggcaatgggcgctggatgctgaccctggccaagaacatggaggtcagggccatcttcacgggrtactacgggaaaggcaaacctgtgcccacgcaaggtagccggaaggggggcgccttgcagtcctgcaccatcatatgagtgttctcaccaccacttatgc

SEQ ID NO: 26668 - DNA, 159 bp, Homo sapiens
cagcccgcccgggtgcccgctccgccccccgggctatgtaaagcggccgggctcgggtygtgccaccgctggactcccgtgtccctccgcgcaggcgggcggccccggagcgctggtgccggcagaggcggcgacggtggcgcccctcctcatcatgag

SEQ ID NO: 26669 - DNA, 201 bp, Homo sapiens
ttttttttttactcaaagttaacctacctgtaactttttaaaaacttgtaaaataactgaccctcccttcctgtccgccctcttcccctctaatgctcacrctcccaacacaaggtgggcagggaggcaccattcaggaacctggaccaaagctgacgaggctgggccaagccagggatggggccacagccagaaccccga

SEQ ID NO: 26670 - DNA, 201 bp, Homo sapiens
aactgaccctcccttcctgtccgccctcttcccctctaatgctcacgctcccaacacaaggtgggcagggaggcaccattcaggaacctggaccaaagctracgaggctgggccaagccagggatggggccacagccagaaccccgagccctacttccaggttctggttagctcagccccagcccagcccagctgctctgc

SEQ ID NO: 26671 - DNA, 201 bp, Homo sapiens; identical to SEQ ID NO: 26658

SEQ ID NO: 26672 - DNA, 201 bp, Homo sapiens; identical to SEQ ID NO: 26659

SEQ ID NO: 26673 - DNA, 201 bp, Homo sapiens; identical to SEQ ID NO: 26660

SEQ ID NO: 26674 - DNA, 201 bp, Homo sapiens; identical to SEQ ID NO: 26661

SEQ ID NO: 26675 - DNA, 201 bp, Homo sapiens; identical to SEQ ID NO: 26662

SEQ ID NO: 26676 - DNA, 201 bp, Homo sapiens; identical to SEQ ID NO: 26663

SEQ ID NO: 26677 - DNA, 201 bp, Homo sapiens; identical to SEQ ID NO: 26664

SEQ ID NO: 26678 - DNA, 201 bp, Homo sapiens; identical to SEQ ID NO: 26665

SEQ ID NO: 26679 - DNA, 201 bp, Homo sapiens; identical to SEQ ID NO: 26666

SEQ ID NO: 26680 - DNA, 201 bp, Homo sapiens; identical to SEQ ID NO: 26667

SEQ ID NO: 26681 - DNA, 167 bp, Homo sapiens
cccgcccccagcccgcccgggtgcccgctccgccccccgggctatgtaaagcggccgggctcgggtygtgccaccgctggactcccgtgtccctccgcgcaggcgggcggccccggagcgctggtgccggcagaggcggcgacggtggcgcccctcctcatcatgaa

SEQ ID NO: 26682 - DNA, 201 bp, Homo sapiens; identical to SEQ ID NO: 26669

SEQ ID NO: 26683 - DNA, 201 bp, Homo sapiens; identical to SEQ ID NO: 26670

SEQ ID NO: 26684 - DNA, 201 bp, Homo sapiens
ggatgtcttccaacaagacgttgcggactctcacttcagagagagcagagcaactctccaacacactgaaaaaaattgcagccagtgagaaatttacaaayttcaatcttttctacatggattttgccttccatgaaatcatacaggagtggcagaagagaggcggacagccctggcagctcatcgagcccgtggatggat

SEQ ID NO: 26685 - DNA, 201 bp, Homo sapiens
atttggggtgtcgatccaaaagatggagttccatatgagaagaaattctgtgaaggttcacagcccaggggaatcattttgctgggagactcagctggggstcattttcacatctctcctgaatggatcacagcgtcgcagatgtctttgaactctttcatcaatctaccaacagcccttaccaacgagcttgactggccc

SEQ ID NO: 26686 - DNA, 200 bp, Homo sapiens
ctcttcttcagcagcatctttgcaaaatgtctttctctcaatgaagagcatatctggacgactgtgcaatgctgtgtgctcccgggatcagtaacccttcygctgttcctgaaataacctttcataaagtgctttgggtgccattccaaacaagagagtatctgtgccctttacagctaattgttctaaaaggagtttct

SEQ ID NO: 26687 - DNA, 201 bp, Homo sapiens
atgagaagaaattctgtgaaggttcacagcccaggggaatcattttgctgggagactcagctggggctcattttcacatctctcctgaatggatcacagcrtcgcagatgtctttgaactctttcatcaatctaccaacagcccttaccaacgagcttgactggccccaactctctggtgctacaggatttctggactcca

SEQ ID NO: 26688 - DNA, 201 bp, Homo sapiens
gggttttctttatcctgcagtctttacctcagcagaaccgcacaccacagactccctccagctctttgtgtgtggctctctcagggtccaacaagagcaarctgtgggtctgtgagtgtttatgtgtgcttttattcacttcacacttattgaaaagtgtgtatgtgagagggtggggtgtgtgtgtcaaagagagtgagg

SEQ ID NO: 26689 - DNA, 201 bp, Homo sapiens
atggaaatttacactacagaaggcaagacaaattgtcaagaagtccccgattctgaaatattctagaagtggttctgacatttgttcactcccggttttgrccaagatctgccagaaaattaaattagctatggaacagtctgtgccattcaaagatgtggattcagacaaatacagcgttttcccaacactgcggggcta

SEQ ID NO: 26690 - DNA, 201 bp, Homo sapiens
caaccattgtgtcatctctaccctcttcccaaggagacatggaaatttacactacagaaggcaagacaaattgtcaagaagtccccgattctgaaatattmtagaagtggttctgacatttgttcactcccggttttggccaagatctgccagaaaattaaattagctatggaacagtctgtgccattcaaagatgtggat

SEQ ID NO: 26691 - DNA, 201 bp, Homo sapiens
actgtaatgacagcgacgagtcagtgtacccaggtagaaggccgaacaactgggatgtccatcaggattcaaactgtaatggcatttggggtgtcgatccwaaagatggagttccatatgagaagaaattctgtgaaggttcacagcccaggggaatcattttgctgggagactcagctggggctcattttcacatctctc

SEQ ID NO: 26692 - DNA, 122 bp, Homo sapiens
ttccggcaagcctcgaggctcrcggggtttatgcacactaacttcactgagccagggagcacggaagttgtgccactgtgcaacttgggttttctttatcctgcagtctttacctcagcaga

SEQ ID NO: 26693 - DNA, 201 bp, Homo sapiens
ccccctggaaaatccttacggtggcgcctctattcttgctcctgtctcttcagtcctcggcctctccagccaacaatgaccagtccaggcccagcctctcraatgggcacacctgtgtagggtgtgtgctggtggtgtctgtaatagaacagcttgctcaagttcacaactcgacggtccaggcctcgatggagagactgt

SEQ ID NO: 26694 - DNA, 103 bp, Homo sapiens
ttycggcaagcctcgaggctcacggggtttatgcacactaacttcactgagccagggagcacggaagttgtgccactgtgcaacttgggttttctttatcctg

SEQ ID NO: 26695 - DNA, 201 bp, Homo sapiens
cagcgtcgcagatgtctttgaactctttcatcaatctaccaacagcccttaccaacgagcttgactggccccaactctctggtgctacaggatttctggaytccactgttggaattaaagaaaaatctatttaccttcgcttatggaaaagaaaccactgtaatcacagggactaccagaatatttcaagaaatggtgcat

SEQ ID NO: 26696 - DNA, 201 bp, Homo sapiens
tggggtgcatagctcggagatgcagtccccctggaaaatccttacggtggcgcctctattcttgctcctgtctcttcagtcctcggcctctccagccaacratgaccagtccaggcccagcctctcgaatgggcacacctgtgtagggtgtgtgctggtggtgtctgtaatagaacagcttgctcaagttcacaactcgac

SEQ ID NO: 26697 - DNA, 201 bp, Homo sapiens
gtgtgcttttattcacttcacacttattgaaaagtgtgtatgtgagagggtggggtgtgtgtgtcaaagagagtgaggaagagaaggagagagagatcaaytgattctgcagcctcagctccagcatccctcagttgggagcttccaaagccgggtgatcacttggggtgcatagctcggagatgcagtccccctggaaaa

SEQ ID NO: 26698 - DNA, 201 bp, Homo sapiens
aagccgggtgatcacttggggtgcatagctcggagatgcagtccccctggaaaatccttacggtggcgcctctattcttgctcctgtctcttcagtcctcrgcctctccagccaacaatgaccagtccaggcccagcctctcgaatgggcacacctgtgtagggtgtgtgctggtggtgtctgtaatagaacagcttgctc

SEQ ID NO: 26699 - DNA, 201 bp, Homo sapiens
caagcacgaggatgcggacctgcgtttgtgctcctgggtcctcgttggggctgcttctggtcaccttccacttttgccttccatcctagggaagggcttcractggctgctgctggtgaaggacttcaacctgcttcactggcttggtgccaacgccttctgcaccagccactacccctacgcgggggaagtgctgcagat

SEQ ID NO: 26700 - DNA, 201 bp, Homo sapiens
ttggtgccaacgccttctgcaccagccactacccctacgcgggggaagtgctgcagatgtgtgaccgctatgggattgtggtcattgatgagtgtcccgcygtgggcctggtgctggtgcagcttttcaacaatgtgtctgtgcatcaacacatgtgggtgatggaggaactggtgtgcagggacaagaaccaccccgccg

SEQ ID NO: 26701 - DNA, 201 bp, Homo sapiens
ggctgtcactgagagccagttcttcatcaacgggaaacctttttatttccacagcatcaacaagcacgaggatgcggacctgcgtttgtgctcctgggtcstcgttggggctgcttctggtcaccttccacttttgccttccatcctagggaagggcttcgactggctgctgctggtgaaggacttcaacctgcttcactg

SEQ ID NO: 26702 - DNA, 166 bp, Homo sapiens
aaatccttccttccccggggtagaagtccagggtgagaaattggttccgaactcaaaggaacccartgccgggccacagccgggtcacgtggccggcggccccccatgacgtgctggctgcggggcgtcacggcgacgttcgggcgacctgccgagtggccaggct

SEQ ID NO: 26703 - DNA, 201 bp, Homo sapiens
ctggatccctccctcccaggtctgggctgtgcagttcctccccctgccttaaaacaccccactatctctgtaaagtctctctctctcttttttttttttttacttaatctagctagaatctatttctgttgattacaacttaactaactcatttacggataggacttttttttttctttttttcttttttcttttcttttt

SEQ ID NO: 26704 - DNA, 201 bp, Homo sapiens
ttgtcttctactgggagccacttaaccgtcaggtgcgtgtggaaggccctgtgaagaaactgcctgaggaggaggctgagtgctacttccactcccgcccsaagagcagccagattggggctgtggtcagccaccagagttctgtgatccctgatcgggagtatctgagaaagaaaaatgaggaactggaacagctctacc

SEQ ID NO: 26705 - DNA, 201 bp, Homo sapiens
tcagtcacctgtgtggtcgcagtgctgccatggacctgggacccatgcgcaagagttaccgcggggaccgagaggcatttgaggagactcatctgacctcycttgacccagtgaaacagtttgctgcctggtttgaggaggctgttcagtgtcctgacataggggaagccaatgccatgtgtctggctacctgcaccagag

SEQ ID NO: 26706 - DNA, 201 bp, Homo sapiens
ctggctacctgcaccagagatggaaaaccctctgctcgcatgttgctgctgaagggcttcgggaaagatggcttccgcttcttcactaacttcgagagtcraaaaggaaaagagctggactctaatccctttgcttcccttgtcttctactgggagccacttaaccgtcaggtgcgtgtggaaggccctgtgaagaaactg

SEQ ID NO: 26707 - DNA, 201 bp, Homo sapiens
tggtgtgatcttggctcactgaaacctctgcctcccaggttcaagcaattctcctgcctcagcctcccaagtagctgggactacaggcacacgccaccacrcccaactaatttttgtatttttagtagagatggggtttcaccatgttggccaggattgtctccatctcttgaccttgtgatccacccacctcagcctccc

SEQ ID NO: 26708 - DNA, 201 bp, Homo sapiens
taaaccaagacctcccaccctcacagtctatgatcctttagtgaccctcagctgagtcctgtgctgaactgtgtttgttctccttgagcacatgcccgctraccagggacagactggatgagcaagcaacctgctggctatggagaagagccaggctgggtaaatgtttgctgtgactaagccaggatcaaagaactgcct

SEQ ID NO: 26709 - DNA, 201 bp, Homo sapiens
tttttttctttttttcttttttcttttcttttttttttttgagatggagtctcactctgtcacccaggctggagtgcagtggtgtgatcttggctcactgmaacctctgcctcccaggttcaagcaattctcctgcctcagcctcccaagtagctgggactacaggcacacgccaccacgcccaactaatttttgtatttt

SEQ ID NO: 26710 - DNA, 201 bp, Homo sapiens
ggtccacaagccaggagcatcagcatcacttggcagcgccttagagattcagaccccagacccactgaatctgaccctgcattttcactagaccccaggtsatcagctgcactagactcaacctctaaaccaagacctcccaccctcacagtctatgatcctttagtgaccctcagctgagtcctgtgctgaactgtgttt

SEQ ID NO: 26711 - DNA, 201 bp, Homo sapiens
aggaggaggctgagtgctacttccactcccgccccaagagcagccagattggggctgtggtcagccaccagagttctgtgatccctgatcgggagtatctragaaagaaaaatgaggaactggaacagctctaccaggatcaagaggtgcccaagccaaaatcctggggtggctatgtcctgtaccctcaggtgatggagt

SEQ ID NO: 26712 - DNA, 166 bp, Homo sapiens; identical to SEQ ID NO: 26702

SEQ ID NO: 26713 - DNA, 201 bp, Homo sapiens; identical to SEQ ID NO: 26703

SEQ ID NO: 26714 - DNA, 201 bp, Homo sapiens; identical to SEQ ID NO: 26704

SEQ ID NO: 26715 - DNA, 201 bp, Homo sapiens; identical to SEQ ID NO: 26705

SEQ ID NO: 26716 - DNA, 201 bp, Homo sapiens; identical to SEQ ID NO: 26711

SEQ ID NO: 26717 - DNA, 201 bp, Homo sapiens; identical to SEQ ID NO: 26706

SEQ ID NO: 26718 - DNA, 201 bp, Homo sapiens
cattattctggaggatgggggtgaccttgccaacctcttccacaccaagtactcacagctcttgctgggcatctgaggcacctccaaggagaccatgacgkgtccacaacccacacaggatgatggtcaatgggatcctgaaggtgcctgccatcaatgtcaatgactccctcaccaagagtgagttcaacaagctctatg

SEQ ID NO: 26719 - DNA, 201 bp, Homo sapiens
agtactcacagctcttgctgggcatctgaggcacctccaaggagaccatgacgggtccacaacccacacaggatgatggtcaatgggatcctgaaggtgcytgccatcaatgtcaatgactccctcaccaagagtgagttcaacaagctctatggctgctgggagtccctcatagatggcatcaagtgggccacagtggtg

SEQ ID NO: 26720 - DNA, 201 bp, Homo sapiens
cacagtgccagctgcctgcacatgaccatggagatggccatccacattgggtccctcatcaccctgggtgccccagcagcaacatcttcctcaccctggaycatgtgttggctgccattgccaaggctggcattccagtttacacctggaagggcaaaagaacgcagagtacccatggtgcatcgagcagtcactgtaatt

SEQ ID NO: 26721 - DNA, 201 bp, Homo sapiens
agtacctggggcatctcccctgattgccccttcaaggctgatcactaccgctactgagagccaggcctgcatttcaccttccagctgctgttcttgcccasgccctgcctctccttcttaagagcgaatggcaccaactttgtgattggtttgtcagcatcccccatggactccccagggccgttcactcagtttttggct

SEQ ID NO: 26722 - DNA, 201 bp, Homo sapiens
tttcggggcccacgtcatcatcaccaagatcgaccccatcaatgcactgcaggctgccatggagggctatgaggtgaccaccatggatgaagcctgtcagragggcaacatctttatcaccaccacagcctgtgtcaacatcatccttggccggcactttgaacagatgaaggatgatgccattgtatgtaacactggaca

SEQ ID NO: 26723 - DNA, 201 bp, Homo sapiens
caccaactttgtgattggtttgtcagcatcccccatggactccccagggccgttcactcagtttttggcttctgctgcacccctcatactattccaagtgwgtcaggggaactgagagtcccctcctcaagcctggtcatggtggaagtatgagggagacagccacagggaactgtgagctcaatggtcttggaactgctc

SEQ ID NO: 26724 - DNA, 201 bp, Homo sapiens
tatcaccaccacagcctgtgtcaacatcatccttggccggcactttgaacagatgaaggatgatgccattgtatgtaacactggacactttgaggtggagrtcaatgtcaagtggctcagtgagaacccttggagaaggtggccatcaagccccaggtggccgggtactggatgaagaatgggcgccacaccatcctgctg

SEQ ID NO: 26725 - DNA, 201 bp, Homo sapiens
gccgcctggggatgcaaggccctgaacattgtagagaatgagatgccaggcctgatgcacatgtgggagctgtactcggcctccaagccactagagggcamccacagtgccagctgcctgcacatgaccatggagatggccatccacattgggtccctcatcaccctgggtgccccagcagcaacatcttcctcaccctgg

SEQ ID NO: 26726 - DNA, 201 bp, Homo sapiens
cctgggtgccccagcagcaacatcttcctcaccctggaccatgtgttggctgccattgccaaggctggcattccagtttacacctggaagggcaaaagaaygcagagtacccatggtgcatcgagcagtcactgtaattcagggatgggctctcaacattattctggaggatgggggtgaccttgccaacctcttccacac

SEQ ID NO: 26727 - DNA, 201 bp, Homo sapiens
tgtaaatctaacctccaatcaccttttatatcattactggattgctgtaagccataaggcctcagcattcctggatgatatctacctcaggatgactggargaagcccaaggatgatgaaaacaataattcatcttcacaaagctgtgatgttacttgagtatttcacaagtaattcttgggtttggaatacggacaatgt

SEQ ID NO: 26728 - DNA, 145 bp, Homo sapiens
aattcatcttcacaaagctgtgatgttacttgagtatttcacaagtaattcttgggtttggaatacggacaatgtcaatatgttaatgaatcaactaaacyttgaagataaaaagactttcaatattgatgtacggcagttacat

SEQ ID NO: 26729 - DNA, 201 bp, Homo sapiens
tctactaaaaatacacaaaattagccgggcgtggtggtgggcacctgtagtcccagctactcgggaggctgaggcaggagaatggtgtgaacctgggaggyggagcttgcagtgaaccgagatcgctccactgcactccagcctgggtgacagatccagactctgtctcaaaaaaaaaaaaaaaaaaatacttctggcaga

SEQ ID NO: 26730 - DNA, 201 bp, Homo sapiens
aagacatagcaaaggacatggaagcctggaaagatgtaaccagtggaaatgctaaaatttaccagcttccagggggtcacttttatcttctggatcctgcraacgagaaattaatcaagaactacataatcaagtgtctagaagtatcatcgatatccaatttttagatattttccctttcacttttaaaataatcaaagt

SEQ ID NO: 26731 - DNA, 201 bp, Homo sapiens
aagttgtttgtgctctgcagccagtcatccaggataaaccatttgcattttttggccacagtatgggatcctacattgcttttaggactgcactaggtctraaagaaaacaatcaaccagaaccattgcatttatttttgtcaagtgcaactcctgtacattcaaaggcctggcatcgcattcccaaagatgatgaattgt

SEQ ID NO: 26732 - DNA, 201 bp, Homo sapiens
acatagcaaaggacatggaagcctggaaagatgtaaccagtggaaatgctaaaatttaccagcttccagggggtcacttttatcttctggatcctgcgaaygagaaattaatcaagaactacataatcaagtgtctagaagtatcatcgatatccaatttttagatattttccctttcacttttaaaataatcaaagtaat

SEQ ID NO: 26733 - DNA, 201 bp, Homo sapiens
cactgcactccagcctgggtgacagatccagactctgtctcaaaaaaaaaaaaaaaaaaatacttctggcagagtcttttatcttcctattaaaatctcasttgattctcctttatgggaagtttgtcgacaaaattcatgattagtaaattatccattttttccttcagttagtttaatggtgaagatgattaacagggg

SEQ ID NO: 26734 - DNA, 201 bp, Homo sapiens
ccaagatactcatgatttgctggaagagacagcatctcaccatgttgccaaggctggtctcaaactccggcgctcaagtgatcctcctgcttcagcctacycatgtgctggcgtgagccaccgtaggcgtgagccaccgtgcctggccaaaattcttggtctattctggattctaattttttttatgcactccttaaggct

SEQ ID NO: 26735 - DNA, 105 bp, Homo sapiens
ttccygcccttgaacatcagactccaatttcttcagttctgggactctgactggcttccttgctcctcagcctgcagatggcctattgtgagacctcacgttgtc

SEQ ID NO: 26736 - DNA, 201 bp, Homo sapiens
gtgaacctgggaggtggagcttgcagtgaaccgagatcgctccactgcactccagcctgggtgacagatccagactctgtctcaaaaaaaaaaaaaaaaaaatacttctggcagagtcttttatcttcctattaaaatctcacttgattctcctttatgggaagtttgtcgacaaaattcatgattagtaaattatccatt

SEQ ID NO: 26737 - DNA, 201 bp, Homo sapiens
tttgggaggccaaggcgggcggatcacgaggtcaggagatcgagaccgtcctggctaacaccgtgaaaccccatctctactaaaaatacacaaaattagcygggcgtggtggtgggcacctgtagtcccagctactcgggaggctgaggcaggagaatggtgtgaacctgggaggtggagcttgcagtgaaccgagatcgc

SEQ ID NO: 26738 - DNA, 201 bp, Homo sapiens; identical to SEQ ID NO: 26729

SEQ ID NO: 26739 - DNA, 201 bp, Homo sapiens; identical to SEQ ID NO: 26730

SEQ ID NO: 26740 - DNA, 201 bp, Homo sapiens; identical to SEQ ID NO: 26731

SEQ ID NO: 26741 - DNA, 201 bp, Homo sapiens; identical to SEQ ID NO: 26732

SEQ ID NO: 26742 - DNA, 201 bp, Homo sapiens; identical to SEQ ID NO: 26733

SEQ ID NO: 26743 - DNA, 105 bp, Homo sapiens; identical to SEQ ID NO: 26735

SEQ ID NO: 26744 - DNA, 201 bp, Homo sapiens; identical to SEQ ID NO: 26736

SEQ ID NO: 26745 - DNA, 201 bp, Homo sapiens; identical to SEQ ID NO: 26737

SEQ ID NO: 26746 - DNA, 201 bp, Homo sapiens; identical to SEQ ID NO: 26729

SEQ ID NO: 26747 - DNA, 201 bp, Homo sapiens; identical to SEQ ID NO: 26730

SEQ ID NO: 26748 - DNA, 201 bp, Homo sapiens; identical to SEQ ID NO: 26731

SEQ ID NO: 26749 - DNA, 201 bp, Homo sapiens; identical to SEQ ID NO: 26732

SEQ ID NO: 26750 - DNA, 201 bp, Homo sapiens; identical to SEQ ID NO: 26733

SEQ ID NO: 26751 - DNA, 201 bp, Homo sapiens; identical to SEQ ID NO: 26734

SEQ ID NO: 26752 - DNA, 201 bp, Homo sapiens; identical to SEQ ID NO: 26736

SEQ ID NO: 26753 - DNA, 201 bp, Homo sapiens; identical to SEQ ID NO: 26737

SEQ ID NO: 26754 - DNA, 201 bp, Homo sapiens
cagtctgtccactgcctcccagcaacgtgctttgagtacccgaatttcatccgagtggtcatcacagtccccgaggtgatgatgctggaggcgtgcagccrgatccaggagttctgtgagcagcactaccattgtgctgaaggcagccaggaggagtgtgataaataggcctgcatccattctcctgaggatgtgtcccat

SEQ ID NO: 26755 - DNA, 201 bp, Homo sapiens
aaacctgcctacagaccctgaagttacccaggcaatgaaagatgccctggactcgggcaaatataatggctatgccccatccatcggcttcctatccagtygggaggagattgcttcttattaccactgtcctgaggcacccctagaagctaaggacgtcattctgacaagtggctgcagccaagctattgacctttgttt

SEQ ID NO: 26756 - DNA, 201 bp, Homo sapiens
aattgagatggaacatttcccagaatttgagaacgatgtggagttcacggagcggttagttgctgagcagtctgtccactgcctcccagcaacgtgctttkagtacccgaatttcatccgagtggtcatcacagtccccgaggtgatgatgctggaggcgtgcagccggatccaggagttctgtgagcagcactaccattg

SEQ ID NO: 26757 - DNA, 173 bp, Homo sapiens
ggtcccaagttactacccttgcctatatccactaaccactcactaggtcacaaagttgatggctctggcttgacccagtgaatgagaagtgtcctagatgtttttttttttgaggaacttcaggtctcaaccctgccagtcacacccaattaatgtccttcacaaaaataaac

SEQ ID NO: 26758 - DNA, 169 bp, Homo sapiens
ccaagttactacccttgcctatatccactaaccactcactaggtcacaaagttgatggctctggcttgacccagtgaatgagaagtgtcctagatgttttkttttttgaggaacttcaggtctcaaccctgccagtcacacccaattaatgtccttcacaaaaataaac

SEQ ID NO: 26759 - DNA, 163 bp, Homo sapiens
tactacccttgcctatatccactaaccactcactaggtcacaaagttgatggctctggcttgacccagtgaatgagaagtgtcctagatgttttttttttwgaggaacttcaggtctcaaccctgccagtcacacccaattaatgtccttcacaaaaataaac

SEQ ID NO: 26760 - DNA, 201 bp, Homo sapiens
tggcttcctacttaccaagaggcagtaagttataacctctggcctttgtctttacattttcaactttctggatccctaacctctggtcccaagttactacscttgcctatatccactaaccactcactaggtcacaaagttgatggctctggcttgacccagtgaatgagaagtgtcctagatgtttttttttttgaggaa

SEQ ID NO: 26761 - DNA, 201 bp, Homo sapiens
cgttggtgggagaagctctgtgccgggaaaaatgaaaggcagaaaggccaggtggtctgtgaggccctcagacatggccaagaaaactttcaaccccatcygagccattgtggacaacatgaaggtgaaaccaaatccaaacaaaaccatgatttccctgtccattggggaccctactgtgtttggaaacctgcctacaga

SEQ ID NO: 26762 - DNA, 201 bp, Homo sapiens
gcagtctgtccactgcctcccagcaacgtgctttgagtacccgaatttcatccgagtggtcatcacagtccccgaggtgatgatgctggaggcgtgcagcyggatccaggagttctgtgagcagcactaccattgtgctgaaggcagccaggaggagtgtgataaataggcctgcatccattctcctgaggatgtgtccca

SEQ ID NO: 26763 - DNA, 201 bp, Homo sapiens
acttttggagttacttaagaaccacagttcctaaaacattttatttgggagctcaacttctggcttcctacttaccaagaggcagtaagttataacctctkgcctttgtctttacattttcaactttctggatccctaacctctggtcccaagttactacccttgcctatatccactaaccactcactaggtcacaaagtt

SEQ ID NO: 26764 - DNA, 201 bp, Homo sapiens; identical to SEQ ID NO: 26754

SEQ ID NO: 26765 - DNA, 201 bp, Homo sapiens; identical to SEQ ID NO: 26755

SEQ ID NO: 26766 - DNA, 201 bp, Homo sapiens; identical to SEQ ID NO: 26756

SEQ ID NO: 26767 - DNA, 201 bp, Homo sapiens; identical to SEQ ID NO: 26761

SEQ ID NO: 26768 - DNA, 201 bp, Homo sapiens; identical to SEQ ID NO: 26762

SEQ ID NO: 26769 - DNA, 201 bp, Homo sapiens; identical to SEQ ID NO: 26754

SEQ ID NO: 26770 - DNA, 201 bp, Homo sapiens; identical to SEQ ID NO: 26755

SEQ ID NO: 26771 - DNA, 201 bp, Homo sapiens; identical to SEQ ID NO: 26756

SEQ ID NO: 26772 - DNA, 131 bp, Homo sapiens
ggtcccaagttactacccttgcctatatccactaaccactcactaggtcacaaagttgatggctctggcttgacccagtgaatgagaagtgtcctagatgtttttttttttttttttttttcgcaaatctt

SEQ ID NO: 26773 - DNA, 127 bp, Homo sapiens
ccaagttactacccttgcctatatccactaaccactcactaggtcacaaagttgatggctctggcttgacccagtgaatgagaagtgtcctagatgttttkttttttttttttttttcgcaaatctt

SEQ ID NO: 26774 - DNA, 121 bp, Homo sapiens
tactacccttgcctatatccactaaccactcactaggtcacaaagttgatggctctggcttgacccagtgaatgagaagtgtcctagatgttttttttttwttttttttttcgcaaatctt

SEQ ID NO: 26775 - DNA, 201 bp, Homo sapiens
tggcttcctacttaccaagaggcagtaagttataacctctggcctttgtctttacattttcaactttctggatccctaacctctggtcccaagttactacscttgcctatatccactaaccactcactaggtcacaaagttgatggctctggcttgacccagtgaatgagaagtgtcctagatgttttttttttttttttt

SEQ ID NO: 26776 - DNA, 201 bp, Homo sapiens; identical to SEQ ID NO: 26761

SEQ ID NO: 26777 - DNA, 201 bp, Homo sapiens; identical to SEQ ID NO: 26762

SEQ ID NO: 26778 - DNA, 201 bp, Homo sapiens; identical to SEQ ID NO: 26763

SEQ ID NO: 26779 - DNA, 201 bp, Homo sapiens
gaatccggcacaaggcactgggctacgtgctggacagaatcattgatcagcgattcgagaaggtttcctactttgtatttggtgatttcaacttccggctrgattccaagtccgtcgtggagacgctctgcacaaaagccaccatgcagacggtccgggccgccgacaccaatgaagtggtgaagctcatatttcgtgagt

SEQ ID NO: 26780 - DNA, 201 bp, Homo sapiens
aactcttcgactacttcaaccaggaggttttccgagacaacaacggcaccgcgctcttggagtttgacaaggagttgtctgtctttaaggacagactgtaygaactggacatctcgttccctcccagctacccgtacagtgaggacgcccgccagggtgagcagtacatgaacacccggtgcccagcctggtgtgaccgca

SEQ ID NO: 26781 - DNA, 201 bp, Homo sapiens
aggcactgggctacgtgctggacagaatcattgatcagcgattcgagaaggtttcctactttgtatttggtgatttcaacttccggctggattccaagtcygtcgtggagacgctctgcacaaaagccaccatgcagacggtccgggccgccgacaccaatgaagtggtgaagctcatatttcgtgagtcggacaacgacc

SEQ ID NO: 26782 - DNA, 201 bp, Homo sapiens
ttttccatgatgcttccaatctggtcgcctgggaaacaagcccttccgtgtactcgggaatccggcacaaggcactgggctacgtgctggacagaatcatygatcagcgattcgagaaggtttcctactttgtatttggtgatttcaacttccggctggattccaagtccgtcgtggagacgctctgcacaaaagccacca

SEQ ID NO: 26783 - DNA, 201 bp, Homo sapiens
gtgctgctggtcacggccaacgtgggctcgctcttcgacgacccagaaaacctgcagaagaactggcttcgggaattttaccaggtcgtgcacacacacargccgcacttcatggccttgcactgtcaggagtttggagggaagaactacgaggcctccatgtcccacgtggacaagttcgtcaaagaactattgtcgagt

SEQ ID NO: 26784 - DNA, 201 bp, Homo sapiens
acgcactcttgaaagctgcatcgagaacccgcccaagcgccacctgctagacggccagccccacacttcgcttcagcctccggaccattccggagcagccycacatacctcactgtctcgtctgtctatgtgacattaagtagaaatattggtttttttttttttttttaaataagtcacagtcctgtttttttaatgatt

SEQ ID NO: 26785 - DNA, 201 bp, Homo sapiens; identical to SEQ ID NO: 26779

SEQ ID NO: 26786 - DNA, 201 bp, Homo sapiens; identical to SEQ ID NO: 26780

SEQ ID NO: 26787 - DNA, 201 bp, Homo sapiens; identical to SEQ ID NO: 26781

SEQ ID NO: 26788 - DNA, 201 bp, Homo sapiens; identical to SEQ ID NO: 26782

SEQ ID NO: 26789 - DNA, 159 bp, Homo sapiens
ccagaaaacctgcagaagaactggcttcgggaattttaccaggtcgtgcacacacacargccgcacttcatggccttgcactgtcaggagtttggagggaagaactacgaggcctccatgtcccacgtggacaagttcgtcaaagaactattgtcgagt

SEQ ID NO: 26790 - DNA, 201 bp, Homo sapiens
acgcactcttgaaagctgcatcgagaacccgcccaagcgccacctgctagacggccagccccacacttcgcttcagcctccggaccattccggagcagccycacatacctcactgtctcgtctgtctatgtgacattaagtagaaatattggtttttttttttttttttaaataagtcacagtcctgttgtcaaaactcta

SEQ ID NO: 26791 - DNA, 201 bp, Homo sapiens
tcattgctccgctacagacaacccatgtcataaccttgttgcaaatatttttctcctatagcagtaagtacagcattagaaggtgattagagagtctgttkatgaaacacaaatgtatgttttattgattttactttagaacactacagagttcctggaccgggtgaaggcattagctgggtgtttgtgtgggataaatac

SEQ ID NO: 26792 - DNA, 201 bp, Homo sapiens; identical to SEQ ID NO: 26779

SEQ ID NO: 26793 - DNA, 201 bp, Homo sapiens; identical to SEQ ID NO: 26780

SEQ ID NO: 26794 - DNA, 201 bp, Homo sapiens; identical to SEQ ID NO: 26781

SEQ ID NO: 26795 - DNA, 201 bp, Homo sapiens; identical to SEQ ID NO: 26782

SEQ ID NO: 26796 - DNA, 201 bp, Homo sapiens; identical to SEQ ID NO: 26783

SEQ ID NO: 26797 - DNA, 201 bp, Homo sapiens; identical to SEQ ID NO: 26790

SEQ ID NO: 26798 - DNA, 201 bp, Homo sapiens; identical to SEQ ID NO: 26791

SEQ ID NO: 26799 - DNA, 201 bp, Homo sapiens; identical to SEQ ID NO: 26779

SEQ ID NO: 26800 - DNA, 201 bp, Homo sapiens; identical to SEQ ID NO: 26780

SEQ ID NO: 26801 - DNA, 201 bp, Homo sapiens; identical to SEQ ID NO: 26781

SEQ ID NO: 26802 - DNA, 201 bp, Homo sapiens; identical to SEQ ID NO: 26782

SEQ ID NO: 26803 - DNA, 201 bp, Homo sapiens; identical to SEQ ID NO: 26783

SEQ ID NO: 26804 - DNA, 201 bp, Homo sapiens; identical to SEQ ID NO: 26784

SEQ ID NO: 26805 - DNA, 117 bp, Homo sapiens
gcagaagtacaaatcatatgtacaagtatttatatcaatgaaaatttccattggtgattttttggcagaatattggtcttgactctgtggaataaatgacracgtaaacgtagctgc

SEQ ID NO: 26806 - DNA, 201 bp, Homo sapiens
ttttaactcccctaaatgacatttagagaactcgtgttatgcctaattcttcttcctcctcgtgttgtttctgctgttggctctgctttgagctcaagataaatatttaggatcagtgtaaagacttggtgttgccgctagattttagcagccctactatactgattctggcctgtaacccctgagaaagccgattttaca

SEQ ID NO: 26807 - DNA, 201 bp, Homo sapiens
ccagcgcccaccgcggtgcagtgcttcgtgtacagcagggccaccttcccgccggagtgggcccagctcccgcaccatgacagctacgactccgaggggcygcacgggctgcgctacaacccccgggagaacagataagggggacgggcagggtgggcctaggtttgagagccctggggctccaagatgcgcccagcccat

SEQ ID NO: 26808 - DNA, 182 bp, Homo sapiens
gcaaactaatatttagacaaatgctcagttttattgatttaattttgacactagggaatctcacagcagaagtacaaatcatatgtacaagtatttatatyaatgaaaatttccattggtgattttttggcagaatattggtcttgactctgtggaataaatgacgacgtaaacgtagctgc

SEQ ID NO: 26809 - DNA, 201 bp, Homo sapiens
gtacacccacatagagacacagcaggaaagggattgccaaaatctgcatttgcagtctctggtccttaggaagttttgaaaatcagcaccaggagtgagggcctcacttctagaagtagtaaggcaatcagatgaaaaaatggcaagtgctaatttaataaagcaaggcagagaactgactgacatttatatcaatctctt

SEQ ID NO: 26810 - DNA, 201 bp, Homo sapiens
cttttattagtgacgctgatcttcattagtcaagttttagttattttgttggcttttccatgtagaattccaagtgacattaacatactttgattaattaaagaaaatttggagactgtttaagatatatgtctagatatcaatgtaaactataagctttaggaacttacatctagaagaaagcctggaatctagaataat

SEQ ID NO: 26811 - DNA, 201 bp, Homo sapiens
acttttattagtgacgctgatcttcattagtcaagttttagttattttgttggcttttccatgtagaattccaagtgacattaacatactttgattaattaaagaaaatttggagactgtttaagatatatgtctagatatcaatgtaaactataagctttaggaacttacatctagaagaaagcctggaatctagaataa

SEQ ID NO: 26812 - DNA, 201 bp, Homo sapiens
ccgcgcgtccgctcggcgggatgacaaagaccgcctcgggtggggtggtgagcagtaccggcctcctccagcagggggcgctgtgggatccgccgctgtcygggacgaaccagcaagccgctctcggtccacacacgctctgtctgcctgccccgagtcccccgggaggccgcggggtttggggaagtgtttctaggagac

SEQ ID NO: 26813 - DNA, 201 bp, Homo sapiens
gagacggcgctcaccggctgcacctgcgccgttgacgccaccggggccggcagacagacccgcggcgctggctggtggagggagttcccgcttgctctctstcgctgtcaccgccctgtttctgtagccgtatggtacgcctgtgagaccggctgccggctgacgtctccttgcgatggagcatatccggacgaccaaggt

SEQ ID NO: 26814 - DNA, 201 bp, Homo sapiens
ggtgctgtccagtggtatggcgatggacttcagaacatcctccactcttgccctcaccccacaagaaccctttactcgggatccattctcacgcagtcttyctccccgaccgccccgcgcgtccgctcggcgggatgacaaagaccgcctcgggtggggtggtgagcagtaccggcctcctccagcagggggcgctgtggg

SEQ ID NO: 26815 - DNA, 201 bp, Homo sapiens
cttctggatgcccccttgtgatacagtgcaagaacttcagaactgtgcatttcattgttcccagagaaagagattgccatgatatttacaactctttgctwcaactgtcaaaacaagcaaaatatgaagatctctatgcattttcttataatcccaaacaaaatgattcagaacgactacaaggctggcagctcattgatc

SEQ ID NO: 26816 - DNA, 201 bp, Homo sapiens
aacttccctgtgttttaaagagcagactctgctacccgtaaatgatgctcttcgaactatagagggcagcagcccggcagataatcgttatagtgaatatrcagaagagttttctaaatcagaacctgctgtggtcagcttagagtatggtgtggcaagaatgacttgttagactcatagagttttttctgcaatgattgc

SEQ ID NO: 26817 - DNA, 201 bp, Homo sapiens
gctgtgggatccgccgctgtccgggacgaaccagcaagccgctctcggtccacacacgctctgtctgcctgccccgagtcccccgggaggccgcggggttyggggaagtgtttctaggagacggcgctcaccggctgcacctgcgccgttgacgccaccggggccggcagacagacccgcggcgctggctggtggagggag

SEQ ID NO: 26818 - DNA, 201 bp, Homo sapiens
ctaacctcaaaacttccctgtgttttaaagagcagactctgctacccgtaaatgatgctcttcgaactatagagggcagcagcccggcagataatcgttayagtgaatatgcagaagagttttctaaatcagaacctgctgtggtcagcttagagtatggtgtggcaagaatgacttgttagactcatagagttttttctg

SEQ ID NO: 26819 - DNA, 201 bp, Homo sapiens
ttattgtgaggatggtctgtaagcataaccaaaaggaatttgtctaataacaattttagggtttaacagtaggctaatagttgaaggaaggataataactrcccttgtgagagaaatatgtcattttaattgcatttccagcaaggaatgacattcagttctgtaagaaatgagtggtatttgatgtatttactcaaaaca

SEQ ID NO: 26820 - DNA, 201 bp, Homo sapiens
gtaagcataaccaaaaggaatttgtctaataacaattttagggtttaacagtaggctaatagttgaaggaaggataataactacccttgtgagagaaatawgtcattttaattgcatttccagcaaggaatgacattcagttctgtaagaaatgagtggtatttgatgtatttactcaaaacacaatttgcactgtacact

SEQ ID NO: 26821 - DNA, 201 bp, Homo sapiens
acttaaatcctctctacagttccgaatctcacagatttacagttttggagccaaatacagtatctttcaattttaagttttggaggaacatgtaccatcartttgatcgaacactgcatcctaggcagtctgtatttaatataattatgaatatgaatgagcaaaataaacaattagagaaagatattaaagacctagaat

SEQ ID NO: 26822 - DNA, 201 bp, Homo sapiens
actgtcaaaacaagcaaaatatgaagatctctatgcattttcttataatcccaaacaaaatgattcagaacgactacaaggctggcagctcattgatctcrctgaggaatataagaggatgggagtgccaaactcacactggcagttgtctgatgccaaccgggactacaagatttgtgaaacttaccccagagaacttta

SEQ ID NO: 26823 - DNA, 201 bp, Homo sapiens
agtatctaactttcagtttactcaaaaacttttgggtaaataaaaaagggaagtacagatagtttaggttgtgcatggttgcatgaattttgaagtcattyctatgtggagcattatttttcttcttgttaaatatagaaaaaaaaagagattctagtacaaagttactgtttaacaaaagcaacataaactctgggaaag

SEQ ID NO: 26824 - DNA, 201 bp, Homo sapiens
ccttggtgttccagtcactgattgtggttttagaatcttctgtggctgacttcttgtattcaactctggtttattatcttaatcttcaacttcagacatayatttgtgtgtttatatgctcacaggtggactgagaaatcagttacatcttaagtgacctacagggtatatgttggcaaaagcagactgtgtatatgtctt

SEQ ID NO: 26825 - DNA, 201 bp, Homo sapiens
gacttttattagtgacgctgatcttcattagtcaagttttagttattttgttggcttttccatgtagaattccaagtgacattaacatactttgattaattaaagaaaatttggagactgtttaagatatatgtctagatatcaatgtaaactataagctttaggaacttacatctagaagaaagcctggaatctagaata

SEQ ID NO: 26826 - DNA, 201 bp, Homo sapiens
agacttttattagtgacgctgatcttcattagtcaagttttagttattttgttggcttttccatgtagaattccaagtgacattaacatactttgattaattaaagaaaatttggagactgtttaagatatatgtctagatatcaatgtaaactataagctttaggaacttacatctagaagaaagcctggaatctagaat

SEQ ID NO: 26827 - DNA, 201 bp, Homo sapiens
ggaagtcaatggcactaaagggctttctgtcaatgatttctactccggtttggagagctcgggatggcttcgccatatcaaagctgttatggatgctgcartcttcttggccaaagcaataacagttgaaaatgcaagtgtgttggtgcattgttccgatggttgggataggacttcccaggtttgttccctgggttctct

SEQ ID NO: 26828 - DNA, 201 bp, Homo sapiens; identical to SEQ ID NO: 26818

SEQ ID NO: 26829 - DNA, 201 bp, Homo sapiens; identical to SEQ ID NO: 26810

SEQ ID NO: 26830 - DNA, 201 bp, Homo sapiens; identical to SEQ ID NO: 26819

SEQ ID NO: 26831 - DNA, 201 bp, Homo sapiens; identical to SEQ ID NO: 26811

SEQ ID NO: 26832 - DNA, 201 bp, Homo sapiens; identical to SEQ ID NO: 26820

SEQ ID NO: 26833 - DNA, 201 bp, Homo sapiens; identical to SEQ ID NO: 26821

SEQ ID NO: 26834 - DNA, 201 bp, Homo sapiens; identical to SEQ ID NO: 26823

SEQ ID NO: 26835 - DNA, 201 bp, Homo sapiens; identical to SEQ ID NO: 26824

SEQ ID NO: 26836 - DNA, 201 bp, Homo sapiens; identical to SEQ ID NO: 26825

SEQ ID NO: 26837 - DNA, 201 bp, Homo sapiens; identical to SEQ ID NO: 26826

SEQ ID NO: 26838 - DNA, 201 bp, Homo sapiens; identical to SEQ ID NO: 26816

SEQ ID NO: 26839 - DNA, 201 bp, Homo sapiens
aactgctcctcccgccagccgctgctttaagaggctgctccgcggtagcgagcggggccggagccgcagcccgaacgagcggaccgagccgaccgggcagstgcacggctgcggggacggcagcggcatgaccggccaccacggctggggctacggccaggacgacggcccctcgcattggcacaagctgtatcccattgc

SEQ ID NO: 26840 - DNA, 201 bp, Homo sapiens; identical to SEQ ID NO: 26839

SEQ ID NO: 26841 - DNA, 201 bp, Homo sapiens
ctgctctttaaaggccctctctccatcccagaaccaaagccgagcgcccccagcgctcgctgcggtctcgcgcccgggtaacggccgatggccgcccccgycccagccgcagccggggaggaaatcccgcgcctcggaagaggcgcttcgggctcgggcgggttccggaagccgaggggccgggagtaggtgggcgcatag

SEQ ID NO: 26842 - DNA, 201 bp, Homo sapiens
ctcccgcgacttcccggcccaaagcagcgcagcgcccgggcggcccagccccgcagcggccacagcagcatagccgggcgagcggatccagaggcccgggsttccttcttgtgcgagtcggcgcggacgactgctagtccagccgttgggcgccgcctggatcccggcgcctggcccttaaagagacccggtcgcatttca

SEQ ID NO: 26843 - DNA, 201 bp, Homo sapiens
acttcccggcccaaagcagcgcagcgcccgggcggcccagccccgcagcggccacagcagcatagccgggcgagcggatccagaggcccggggttccttcytgtgcgagtcggcgcggacgactgctagtccagccgttgggcgccgcctggatcccggcgcctggcccttaaagagacccggtcgcatttcatctcagca

SEQ ID NO: 26844 - DNA, 201 bp, Homo sapiens
gactgctgagcctgaggtcacataccacaggctgaggccccaggataagttccttgtgctggcctcagatggcctgtgggacatgctgagcaatgaggacrtggtaaggctggtggtggggcacctggctgaggcagattggcacaagacagacctggcccagagacccgccaacttggggctcatgcagagcctgctgct

SEQ ID NO: 26845 - DNA, 201 bp, Homo sapiens
cattctagttctgttttcgtttattttaaaactgaatccttaaacttgcaaacacgcctactgtaagcatgcttggaatgacttgttttggttttcagctrataggatctatgcctctggaccagctgaacttactggtgcagctttttgtgccctctactgagtcccattccagaaactttgagccatgctaggaggtaa

SEQ ID NO: 26846 - DNA, 201 bp, Homo sapiens
gagttctacaacctggtgcgcttccggatcgggggcaagcggaaggtgatgcccaagatggaccaggactcgctcagcagcagcctgaaaacttgctacargtatctcaatcagaccagtcgcagtttcgcagctgttatccaggcgctggatggggaaatgcgcaacgcagtgtgcatattttatctggttctccgagct

SEQ ID NO: 26847 - DNA, 201 bp, Homo sapiens
ttccacaggtgatggccattgccactttggctgcctgttataataaccagcaggtgttcaaaggggcagtgaagattcggaaagggcaagcagtgaccctbatgatggatgccaccaatatgccagctgtcaaagccatcatatatcagtatatggaagagatttatcatagaatccccgactcagacccatcttctagca

SEQ ID NO: 26848 - DNA, 201 bp, Homo sapiens
ttttatctggttctccgagctctggacacactggaagatgacatgaccatcagtgtggaaaagaaggtcccgctgttacacaactttcactctttcctttmccaaccagactggcggttcatggagagcaaggagaaggatcgccaggtgctggaggacttcccaacgatctcccttgagtttagaaatctggctgagaaa

SEQ ID NO: 26849 - DNA, 201 bp, Homo sapiens
catattttatctggttctccgagctctggacacactggaagatgacatgaccatcagtgtggaaaagaaggtcccgctgttacacaactttcactctttcytttaccaaccagactggcggttcatggagagcaaggagaaggatcgccaggtgctggaggacttcccaacgatctcccttgagtttagaaatctggctga

SEQ ID NO: 26850 - DNA, 201 bp, Homo sapiens
tctaaggtccagccggccggtgagcgcctggggaccgcagaggtgagagtcgcgcccgggagtccgccgcctgcgccaggatggagttcgtgaaatgcctyggccaccccgaagagttctacaacctggtgcgcttccggatcgggggcaagcggaaggtgatgcccaagatggaccaggactcgctcagcagcagcctga

SEQ ID NO: 26851 - DNA, 201 bp, Homo sapiens
gctggtcggaattggcctttcccgtcttttctcagcctcagagtttgaagaccccttagttggtgaagatacagaacgtgccaactctatgggcctgtttytgcagaaaacaaacatcatccgtgactatctggaagaccagcaaggaggaagagagttctggcctcaagaggtttggagcaggtatgttaagaagttagg

SEQ ID NO: 26852 - DNA, 201 bp, Homo sapiens
aagactatgttcagactggagaacactgatcccaaatttgtccatagggtgcctcatcccagcaacctgtccttgtgggtgatgatcactgtgctgcttgyggctcatggcagagcattcagtgccacggtttaggtgaagtcgctgcatatgtgactgtcatgagatcctacttagtatgatcctggctagaatgataat

SEQ ID NO: 26853 - DNA, 201 bp, Homo sapiens
gtcgctgcatatgtgactgtcatgagatcctacttagtatgatcctggctagaatgataattaaaagtatttaatttgaagcaccatttgaatgttcgtamtagtagaaaatgatgtgaattttctttctgttcggctcctatttttctcatcattttgttttctttaattgggttgaatggagtagatagaaatatttat

SEQ ID NO: 26854 - DNA, 201 bp, Homo sapiens
agatagaaatatttatggtttaggtaacagttagatgtttcctaagaatgcaaactgccttttccacacaaaggctgggaataaaattctgggtattctcstattctcatttaaaggagtttagctttcagagagaaacagcaggattgcttttgaccttttagaagattggtctccagtaaaggtggacatttttgagat

SEQ ID NO: 26855 - DNA, 201 bp, Homo sapiens
aacactcacggggtaggtttgcagcttcactcctgaagccagtaagacaacgaacccactgggagaaacaaacaactccagacgcgccgacttaagagctrtaatactcgctgtgacggtctgcagcttcactcctgagccagcgagaccacgaacccaccagaaggaagaaactccgaacacatctgaacatcagaagga

SEQ ID NO: 26856 - DNA, 201 bp, Homo sapiens
gtaacagaagactatgttcagactggagaacactgatcccaaatttgtccatagggtgcctcatcccagcaacctgtccttgtgggtgatgatcactgtgmtgcttgtggctcatggcagagcattcagtgccacggtttaggtgaagtcgctgcatatgtgactgtcatgagatcctacttagtatgatcctggctagaa

SEQ ID NO: 26857 - DNA, 201 bp, Homo sapiens
actcgctcagcagcagcctgaaaacttgctacaagtatctcaatcagaccagtcgcagtttcgcagctgttatccaggcgctggatggggaaatgcgcaaygcagtgtgcatattttatctggttctccgagctctggacacactggaagatgacatgaccatcagtgtggaaaagaaggtcccgctgttacacaactttc

SEQ ID NO: 26858 - DNA, 201 bp, Homo sapiens
acaaggcagatcatctccaccatccggacgcagaatcttcccaactgtcagctgatttcccgaagccactactcccccatctacctgtcgtttgtcatgcytttggctgccctgagctggcagtacctgaccactctctcccaggtaacagaagactatgttcagactggagaacactgatcccaaatttgtccatagggt

SEQ ID NO: 26859 - DNA, 201 bp, Homo sapiens
tgatcccaaatttgtccatagggtgcctcatcccagcaacctgtccttgtgggtgatgatcactgtgctgcttgtggctcatggcagagcattcagtgccmcggtttaggtgaagtcgctgcatatgtgactgtcatgagatcctacttagtatgatcctggctagaatgataattaaaagtatttaatttgaagcaccat

SEQ ID NO: 26860 - DNA, 173 bp, Homo sapiens
aaaaacggtggcaacacgctgggtttgctttacaacgcctgggaagctttgttgtttgcaataaattttaatwcttgtctgtttcggtctgcactgcctttatgagctgtaacactcacggggtaggtttgcagcttcactcctgaagccagtaagacaacgaacccactggg

SEQ ID NO: 26861 - DNA, 201 bp, Homo sapiens
tcactcctgaagccagtaagacaacgaacccactgggagaaacaaacaactccagacgcgccgacttaagagctgtaatactcgctgtgacggtctgcagsttcactcctgagccagcgagaccacgaacccaccagaaggaagaaactccgaacacatctgaacatcagaaggaacagactccggacacgccgcctttaa

SEQ ID NO: 26862 - DNA, 153 bp, Homo sapiens
aaaaacggtggcaacacgctgggtttgctttacaacgcctgggaagctttgtygtttgcaataaattttaatacttgtctgtttcggtctgcactgcctttatgagctgtaacactcacggggtaggtttgcagcttcactcctgaagccagt

SEQ ID NO: 26863 - DNA, 201 bp, Homo sapiens; identical to SEQ ID NO: 26846

SEQ ID NO: 26864 - DNA, 201 bp, Homo sapiens; identical to SEQ ID NO: 26847

SEQ ID NO: 26865 - DNA, 201 bp, Homo sapiens; identical to SEQ ID NO: 26848

SEQ ID NO: 26866 - DNA, 201 bp, Homo sapiens; identical to SEQ ID NO: 26849

SEQ ID NO: 26867 - DNA, 201 bp, Homo sapiens; identical to SEQ ID NO: 26850

SEQ ID NO: 26868 - DNA, 201 bp, Homo sapiens; identical to SEQ ID NO: 26851

SEQ ID NO: 26869 - DNA, 201 bp, Homo sapiens
taggaaagtgaaatgcaggtgagaagaacctaaacatgaaaggaaagggtgcctcatcccagcaacctgtccttgtgggtgatgatcactgtgctgcttgyggctcatggcagagcattcagtgccacggtttaggtgaagtcgctgcatatgtgactgtcatgagatcctacttagtatgatcctggctagaatgataat

SEQ ID NO: 26870 - DNA, 201 bp, Homo sapiens; identical to SEQ ID NO: 26853

SEQ ID NO: 26871 - DNA, 201 bp, Homo sapiens; identical to SEQ ID NO: 26854

SEQ ID NO: 26872 - DNA, 201 bp, Homo sapiens; identical to SEQ ID NO: 26855

SEQ ID NO: 26873 - DNA, 201 bp, Homo sapiens
ggacctttaggaaagtgaaatgcaggtgagaagaacctaaacatgaaaggaaagggtgcctcatcccagcaacctgtccttgtgggtgatgatcactgtgmtgcttgtggctcatggcagagcattcagtgccacggtttaggtgaagtcgctgcatatgtgactgtcatgagatcctacttagtatgatcctggctagaa

SEQ ID NO: 26874 - DNA, 201 bp, Homo sapiens; identical to SEQ ID NO: 26857

SEQ ID NO: 26875 - DNA, 201 bp, Homo sapiens
aagtggatttactttttttctttaaggatggatgttgtgttctctttatttttttcctactactttaatccctaaaagaacgctgtgtggctgggaccttwaggaaagtgaaatgcaggtgagaagaacctaaacatgaaaggaaagggtgcctcatcccagcaacctgtccttgtgggtgatgatcactgtgctgcttgt

SEQ ID NO: 26876 - DNA, 201 bp, Homo sapiens
acaaggcagatcatctccaccatccggacgcagaatcttcccaactgtcagctgatttcccgaagccactactcccccatctacctgtcgtttgtcatgcytttggctgccctgagctggcagtacctgaccactctctcccaggtaacagaagactatgttcagactggagaacactgatcccaaatttgtccatagctg

SEQ ID NO: 26877 - DNA, 201 bp, Homo sapiens
aacctaaacatgaaaggaaagggtgcctcatcccagcaacctgtccttgtgggtgatgatcactgtgctgcttgtggctcatggcagagcattcagtgccmcggtttaggtgaagtcgctgcatatgtgactgtcatgagatcctacttagtatgatcctggctagaatgataattaaaagtatttaatttgaagcaccat

SEQ ID NO: 26878 - DNA, 173 bp, Homo sapiens; identical to SEQ ID NO: 26860

SEQ ID NO: 26879 - DNA, 201 bp, Homo sapiens; identical to SEQ ID NO: 26861

SEQ ID NO: 26880 - DNA, 153 bp, Homo sapiens; identical to SEQ ID NO: 26862

SEQ ID NO: 26881 - DNA, 201 bp, Homo sapiens; identical to SEQ ID NO: 26851

SEQ ID NO: 26882 - DNA, 201 bp, Homo sapiens; identical to SEQ ID NO: 26869

SEQ ID NO: 26883 - DNA, 201 bp, Homo sapiens; identical to SEQ ID NO: 26853

SEQ ID NO: 26884 - DNA, 201 bp, Homo sapiens; identical to SEQ ID NO: 26854

SEQ ID NO: 26885 - DNA, 201 bp, Homo sapiens; identical to SEQ ID NO: 26873

SEQ ID NO: 26886 - DNA, 201 bp, Homo sapiens; identical to SEQ ID NO: 26857

SEQ ID NO: 26887 - DNA, 201 bp, Homo sapiens; identical to SEQ ID NO: 26875

SEQ ID NO: 26888 - DNA, 201 bp, Homo sapiens; identical to SEQ ID NO: 26876

SEQ ID NO: 26889 - DNA, 201 bp, Homo sapiens; identical to SEQ ID NO: 26846

SEQ ID NO: 26890 - DNA, 201 bp, Homo sapiens; identical to SEQ ID NO: 26877

SEQ ID NO: 26891 - DNA, 201 bp, Homo sapiens; identical to SEQ ID NO: 26847

SEQ ID NO: 26892 - DNA, 201 bp, Homo sapiens; identical to SEQ ID NO: 26848

SEQ ID NO: 26893 - DNA, 201 bp, Homo sapiens; identical to SEQ ID NO: 26849

SEQ ID NO: 26894 - DNA, 195 bp, Homo sapiens
gtccagccggccggtgagcgcctggggaccgcagaggtgagagtcgcgcccgggagtccgccgcctgcgccaggatggagttcgtgaaatgcctyggccaccccgaagagttctacaacctggtgcgcttccggatcgggggcaagcggaaggtgatgcccaagatggaccaggactcgctcagcagcagcctga

SEQ ID NO: 26895 - DNA, 201 bp, Homo sapiens; identical to SEQ ID NO: 26851

SEQ ID NO: 26896 - DNA, 201 bp, Homo sapiens; identical to SEQ ID NO: 26869

SEQ ID NO: 26897 - DNA, 201 bp, Homo sapiens; identical to SEQ ID NO: 26853

SEQ ID NO: 26898 - DNA, 201 bp, Homo sapiens; identical to SEQ ID NO: 26854

SEQ ID NO: 26899 - DNA, 201 bp, Homo sapiens; identical to SEQ ID NO: 26873

SEQ ID NO: 26900 - DNA, 201 bp, Homo sapiens; identical to SEQ ID NO: 26857

SEQ ID NO: 26901 - DNA, 201 bp, Homo sapiens; identical to SEQ ID NO: 26875

SEQ ID NO: 26902 - DNA, 142 bp, Homo sapiens
aggcctgccccctgtccggccagcccctcgaagcacctactscacaggtccagccggccggtgagcgcctggggaccgcagaggtgagagtcgcgcccgggagtccgccgcctgcgccaggatggagttcgtgaaatgcctt

SEQ ID NO: 26903 - DNA, 201 bp, Homo sapiens; identical to SEQ ID NO: 26876

SEQ ID NO: 26904 - DNA, 201 bp, Homo sapiens; identical to SEQ ID NO: 26846

SEQ ID NO: 26905 - DNA, 201 bp, Homo sapiens; identical to SEQ ID NO: 26877

SEQ ID NO: 26906 - DNA, 201 bp, Homo sapiens; identical to SEQ ID NO: 26847

SEQ ID NO: 26907 - DNA, 201 bp, Homo sapiens; identical to SEQ ID NO: 26848

SEQ ID NO: 26908 - DNA, 201 bp, Homo sapiens; identical to SEQ ID NO: 26849

SEQ ID NO: 26909 - DNA, 201 bp, Homo sapiens
ccacaggtccagccggccggtgagcgcctggggaccgcagaggtgagagtcgcgcccgggagtccgccgcctgcgccaggatggagttcgtgaaatgcctyggccaccccgaagagttctacaacctggtgcgcttccggatcgggggcaagcggaaggtgatgcccaagatggaccaggactcgctcagcagcagcctga

SEQ ID NO: 26910 - DNA, 201 bp, Homo sapiens
cctgaggtgaaggactgatgctttgccacccaagtgtactgcaagtggcgctaccaccagtgcagggatgtggacttcaaggctacctgggacaccattcrggaccttgtcatggagaaatctgctgggccctatgacaaaggtgaatacttgacctctgtgcagaagaccctctgtgatatccaggtgctctccctgagc

SEQ ID NO: 26911 - DNA, 201 bp, Homo sapiens
cctggggggtggagcctcggctcgagatcggtggacgtgctcgcctccactcggggccaggtctatgtcccggtttcccgcagtcgcgggcagggcgccamggcggcaggaggagggtgagcggtcaagagacctccaggaagagcggctctcggctgtttgcatcgccgatagaggtgcggtccgcgggacggtacggaa

SEQ ID NO: 26912 - DNA, 201 bp, Homo sapiens
taccaaattcagtgtcattattttggatgaagcccatgaaagaactctaactacagatatcttatttggtttattgaagaagctatttcaggagaagtctsctaataggaaggagcatttaaaagtggtggtaatgtcagcaactatggaattagccaagctctctgcattctttggaaattgtccaatatttgatatacc

SEQ ID NO: 26913 - DNA, 201 bp, Homo sapiens
gttttgatgattgcagttctaaggagacagcaatcaaatatatgactgatggatgtttactgaaacatattctgggagacccaaatcttaccaaattcagwgtcattattttggatgaagcccatgaaagaactctaactacagatatcttatttggtttattgaagaagctatttcaggagaagtctcctaataggaagg

SEQ ID NO: 26914 - DNA, 201 bp, Homo sapiens
tcgtctttcccctcccatctcctcagatcggtggacgtgctcgcctccactcggggccaggtctatgtcccggtttcccgcagtcgcgggcagggcgccamggcggcaggaggagggtgagcggtcaagagacctccaggaagagcggctctcggctgtttgcatcgccgatagagaagagaaaggatgcacgtcccagga

SEQ ID NO: 26915 - DNA, 201 bp, Homo sapiens; identical to SEQ ID NO: 26912

SEQ ID NO: 26916 - DNA, 201 bp, Homo sapiens; identical to SEQ ID NO: 26913

SEQ ID NO: 26917 - DNA, 201 bp, Homo sapiens
ttggtttttctgactggccagtttgaaatagaaaaaagttgtgagttactttttcagatggcagagtctgttgattatgattatgatgttcaagataccaycctcgatggcttgttaatattgccgtgttatggatcaatgacaactgatcaacagaggaggatatttttgccaccaccacctggaattagaaaatgtgtc

SEQ ID NO: 26918 - DNA, 201 bp, Homo sapiens; identical to SEQ ID NO: 26914

SEQ ID NO: 26919 - DNA, 201 bp, Homo sapiens; identical to SEQ ID NO: 26912

SEQ ID NO: 26920 - DNA, 201 bp, Homo sapiens
cccaaaatatctatatgaagcaggagacagcaatcaaatatatgactgatggatgtttactgaaacatattctgggagacccaaatcttaccaaattcagwgtcattattttggatgaagcccatgaaagaactctaactacagatatcttatttggtttattgaagaagctatttcaggagaagtctcctaataggaagg

SEQ ID NO: 26921 - DNA, 201 bp, Homo sapiens; identical to SEQ ID NO: 26911

SEQ ID NO: 26922 - DNA, 201 bp, Homo sapiens; identical to SEQ ID NO: 26912

SEQ ID NO: 26923 - DNA, 201 bp, Homo sapiens; identical to SEQ ID NO: 26913

SEQ ID NO: 26924 - DNA, 201 bp, Homo sapiens; identical to SEQ ID NO: 26917

SEQ ID NO: 26925 - DNA, 201 bp, Homo sapiens; identical to SEQ ID NO: 26914

SEQ ID NO: 26926 - DNA, 201 bp, Homo sapiens
gtagctatagccattaaccaaaggacagatgatatatatatatatgatatatatatatatataagttcttttttagctgtacctacgtacttatatcagcmccatgtatgtaggtgtgatagtactttcaaacagcgcctccacctggcctactctgttatttccacctgtttgggtagggccatttaacttccattatgc

SEQ ID NO: 26927 - DNA, 201 bp, Homo sapiens; identical to SEQ ID NO: 26912

SEQ ID NO: 26928 - DNA, 201 bp, Homo sapiens; identical to SEQ ID NO: 26913

SEQ ID NO: 26929 - DNA, 201 bp, Homo sapiens; identical to SEQ ID NO: 26917

SEQ ID NO: 26930 - DNA, 201 bp, Homo sapiens
tgctgatgcggagctgtctccagtggccactttccgtagctgcatggaggtgaatttctttggcgcgctcgagctgaccaagggcctcctgcccctgctgygcagctcaaggggccgcatcgtgactgtggggagcccagcgggggacatgccatatccgtgcttgggggcctatggaacctccaaagcggccgtggcgct

SEQ ID NO: 26931 - DNA, 201 bp, Homo sapiens
tacggcaaggactacatcgagcacttgcatgggcagttcctgcactcgctacgcctggccatgtccgacctcaccccagttgtagatgccatcacagatgygctgctggcagctcggccccgccgccgctattaccccggccagggcctggggctcatgtacttcatccactactacctgcctgaaggcctgcggcgccgc

SEQ ID NO: 26932 - DNA, 201 bp, Homo sapiens
gctgatgcggagctgtctccagtggccactttccgtagctgcatggaggtgaatttctttggcgcgctcgagctgaccaagggcctcctgcccctgctgcrcagctcaaggggccgcatcgtgactgtggggagcccagcgggggacatgccatatccgtgcttgggggcctatggaacctccaaagcggccgtggcgcta

SEQ ID NO: 26933 - DNA, 201 bp, Homo sapiens
agttgaacagccccggtgccatcgagctgcgtacctgctgctcccctcgcctaaggctgctgcagatggacctgaccaaaccaggagacattagccgcgtkctagagttcaccaaggcccacaccaccagcaccggcctgtggggcctcgtcaacaacgcaggccacaatgaagtagttgctgatgcggagctgtctccag

SEQ ID NO: 26934 - DNA, 201 bp, Homo sapiens
cgcgtgctagagttcaccaaggcccacaccaccagcaccggcctgtggggcctcgtcaacaacgcaggccacaatgaagtagttgctgatgcggagctgtytccagtggccactttccgtagctgcatggaggtgaatttctttggcgcgctcgagctgaccaagggcctcctgcccctgctgcgcagctcaaggggccgc

SEQ ID NO: 26935 - DNA, 201 bp, Homo sapiens
caaggcccacaccaccagcaccggcctgtggggcctcgtcaacaacgcaggccacaatgaagtagttgctgatgcggagctgtctccagtggccactttcygtagctgcatggaggtgaatttctttggcgcgctcgagctgaccaagggcctcctgcccctgctgcgcagctcaaggggccgcatcgtgactgtggggag

SEQ ID NO: 26936 - DNA, 201 bp, Homo sapiens
ctgcccctgctgcgcagctcaaggggccgcatcgtgactgtggggagcccagcgggggacatgccatatccgtgcttgggggcctatggaacctccaaagyggccgtggcgctactcatggacacattcagctgtgaactccttccctggggggtcaaggtcagcatcatccagcctggctgcttcaagacagagtcagtg

SEQ ID NO: 26937 - DNA, 201 bp, Homo sapiens
gcatgggcagttcctgcactcgctacgcctggccatgtccgacctcaccccagttgtagatgccatcacagatgcgctgctggcagctcggccccgccgcygctattaccccggccagggcctggggctcatgtacttcatccactactacctgcctgaaggcctgcggcgccgcttcctgcaggccttcttcatcagtca

SEQ ID NO: 26938 - DNA, 201 bp, Homo sapiens
ttcctgcaggccttcttcatcagtcactgtctgcctcgagcactgcagcctggccagcctggcactaccccaccacaggacgcagcccaggacccaaaccygagccccggcccttccccagcagtggctcggtgagccatgtgcacctatggcccagccactgcagcacaggaggctccgtgagcccttggttcctccccg

SEQ ID NO: 26939 - DNA, 201 bp, Homo sapiens
ttagccgcgtgctagagttcaccaaggcccacaccaccagcaccggcctgtggggcctcgtcaacaacgcaggccacaatgaagtagttgctgatgcggarctgtctccagtggccactttccgtagctgcatggaggtgaatttctttggcgcgctcgagctgaccaagggcctcctgcccctgctgcgcagctcaaggg

SEQ ID NO: 26940 - DNA, 201 bp, Homo sapiens
aaggggccgcatcgtgactgtggggagcccagcgggggacatgccatatccgtgcttgggggcctatggaacctccaaagcggccgtggcgctactcatgracacattcagctgtgaactccttccctggggggtcaaggtcagcatcatccagcctggctgcttcaagacagagtcagtgagaaacgtgggtcagtggga

SEQ ID NO: 26941 - DNA, 201 bp, Homo sapiens
gtggggagcccagcgggggacatgccatatccgtgcttgggggcctatggaacctccaaagcggccgtggcgctactcatggacacattcagctgtgaackccttccctggggggtcaaggtcagcatcatccagcctggctgcttcaagacagagtcagtgagaaacgtgggtcagtgggaaaagcgcaagcaattgctg

SEQ ID NO: 26942 - DNA, 201 bp, Homo sapiens
aattgagggctaaatcccaagtgtctcttgactggctcaagaattagggccccaactacacacccccaagccacagggaagcatgtactgtacttcccaawtgccacattttaaataaagacaaatttttatttcttctaaaatgcggcaggtgctgtttggagggggtcactgactggctggctgagtgacacagtgtgg

SEQ ID NO: 26943 - DNA, 201 bp, Homo sapiens
tttggcgcgctcgagctgaccaagggcctcctgcccctgctgcgcagctcaaggggccgcatcgtgactgtggggagcccagcgggggacatgccatatcygtgcttgggggcctatggaacctccaaagcggccgtggcgctactcatggacacattcagctgtgaactccttccctggggggtcaaggtcagcatcatc

SEQ ID NO: 26944 - DNA, 201 bp, Homo sapiens
cggccagggcctggggctcatgtacttcatccactactacctgcctgaaggcctgcggcgccgcttcctgcaggccttcttcatcagtcactgtctgcctygagcactgcagcctggccagcctggcactaccccaccacaggacgcagcccaggacccaaacctgagccccggcccttccccagcagtggctcggtgagc

SEQ ID NO: 26945 - DNA, 201 bp, Homo sapiens
gcctcgtcaacaacgcaggccacaatgaagtagttgctgatgcggagctgtctccagtggccactttccgtagctgcatggaggtgaatttctttggcgcrctcgagctgaccaagggcctcctgcccctgctgcgcagctcaaggggccgcatcgtgactgtggggagcccagcgggggacatgccatatccgtgcttgg

SEQ ID NO: 26946 - DNA, 201 bp, Homo sapiens
agctgcgtacctgctgctcccctcgcctaaggctgctgcagatggacctgaccaaaccaggagacattagccgcgtgctagagttcaccaaggcccacacmaccagcaccggcctgtggggcctcgtcaacaacgcaggccacaatgaagtagttgctgatgcggagctgtctccagtggccactttccgtagctgcatgg

SEQ ID NO: 26947 - DNA, 201 bp, Homo sapiens
cccggcccttccccagcagtggctcggtgagccatgtgcacctatggcccagccactgcagcacaggaggctccgtgagcccttggttcctccccgaaaayccccagcattacgatcccccaagtgtcctggaccctggcctaaagaatcccacccccacttcatgcccactgccgatgcccaatccaggcccggtgaggc

SEQ ID NO: 26948 - DNA, 201 bp, Homo sapiens
ggagttgaacagccccggtgccatcgagctgcgtacctgctgctcccctcgcctaaggctgctgcagatggacctgaccaaaccaggagacattagccgcktgctagagttcaccaaggcccacaccaccagcaccggcctgtggggcctcgtcaacaacgcaggccacaatgaagtagttgctgatgcggagctgtctcc

SEQ ID NO: 26949 - DNA, 201 bp, Homo sapiens
agccgcgtgctagagttcaccaaggcccacaccaccagcaccggcctgtggggcctcgtcaacaacgcaggccacaatgaagtagttgctgatgcggagckgtctccagtggccactttccgtagctgcatggaggtgaatttctttggcgcgctcgagctgaccaagggcctcctgcccctgctgcgcagctcaaggggc

SEQ ID NO: 26950 - DNA, 201 bp, Homo sapiens
tcaacaaccatgagttcagctggctcatccccaggggctggggtctcctggatacaatggagcagatgagccgggaggacatgctggccatctcaacaccygtcttgaccagtctggatgtgccccctgagatgatgcccaccgtcatagatgaatacctaggaagcaactcggacgcacaagccaaatgccaggcgttcc

SEQ ID NO: 26951 - DNA, 201 bp, Homo sapiens
acggaaaacagcagatcttctccgtttcagaggactgcctggtcctcaacgtctatagcccagctgaggtccccgcagggtccggtaggccggtcatggtrtgggtccatggaggcgctctgataactggcgctgccacctcctacgatggatcagctctggctgcctatggggatgtggtcgtggttacagtccagtacc

SEQ ID NO: 26952 - DNA, 201 bp, Homo sapiens
aatgtgcctacaagacgtggagagcatgaacagcagcagatttgtcctcaacggaaaacagcagatcttctccgtttcagaggactgcctggtcctcaacrtctatagcccagctgaggtccccgcagggtccggtaggccggtcatggtatgggtccatggaggcgctctgataactggcgctgccacctcctacgatgg

SEQ ID NO: 26953 - DNA, 201 bp, Homo sapiens
ccaggcggaacaatatctggagatcaacccagtgccacgggccggacagaagttcagggaggcctggatgcagttctggtcagagacgctccccagcaagrtacaacagtggcaccagaagcagaagaacaggaaggcccaggaggacctctgaggccaggcctgaaccttcttggctggggcaaaccactcttcaagtgg

SEQ ID NO: 26954 - DNA, 201 bp, Homo sapiens
cccactttgcccggacaggggaccccaatagcaaggctctgcctccttggccccaattcaaccaggcggaacaatatctggagatcaacccagtgccacgrgccggacagaagttcagggaggcctggatgcagttctggtcagagacgctccccagcaagatacaacagtggcaccagaagcagaagaacaggaaggccc

SEQ ID NO: 26955 - DNA, 201 bp, Homo sapiens
cttccactctgtgcccttcctcatgggtgtcaacaaccatgagttcagctggctcatccccaggggctggggtctcctggatacaatggagcagatgagcygggaggacatgctggccatctcaacacccgtcttgaccagtctggatgtgccccctgagatgatgcccaccgtcatagatgaatacctaggaagcaactc

SEQ ID NO: 26956 - DNA, 201 bp, Homo sapiens
cacctcctacgatggatcagctctggctgcctatggggatgtggtcgtggttacagtccagtaccgccttggggtccttggcttcttcagcactggagatragcatgcacctggcaaccagggcttcctagatgtggtagctgctttgcgctgggtgcaagaaaacatcgcccccttcgggggtgacctcaactgtgtcac

SEQ ID NO: 26957 - DNA, 201 bp, Homo sapiens
gcagcagcgccatcatgactctctactgcctcaacggctggggtctcctggatacaatggagcagatgagccgggaggacatgctggccatctcaacaccygtcttgaccagtctggatgtgccccctgagatgatgcccaccgtcatagatgaatacctaggaagcaactcggacgcacaagccaaatgccaggcgttcc

SEQ ID NO: 26958 - DNA, 201 bp, Homo sapiens; identical to SEQ ID NO: 26951

SEQ ID NO: 26959 - DNA, 201 bp, Homo sapiens; identical to SEQ ID NO: 26952

SEQ ID NO: 26960 - DNA, 201 bp, Homo sapiens; identical to SEQ ID NO: 26953

SEQ ID NO: 26961 - DNA, 201 bp, Homo sapiens; identical to SEQ ID NO: 26954

SEQ ID NO: 26962 - DNA, 201 bp, Homo sapiens
gagcctcgatccatcatccaggctgcagtgcagcagcgccatcatgactctctactgcctcaacggctggggtctcctggatacaatggagcagatgagcygggaggacatgctggccatctcaacacccgtcttgaccagtctggatgtgccccctgagatgatgcccaccgtcatagatgaatacctaggaagcaactc

SEQ ID NO: 26963 - DNA, 201 bp, Homo sapiens; identical to SEQ ID NO: 26956

SEQ ID NO: 26964 - DNA, 201 bp, Homo sapiens; identical to SEQ ID NO: 26953

SEQ ID NO: 26965 - DNA, 201 bp, Homo sapiens; identical to SEQ ID NO: 26954

SEQ ID NO: 26966 - DNA, 201 bp, Homo sapiens; identical to SEQ ID NO: 26955

SEQ ID NO: 26967 - DNA, 201 bp, Homo sapiens; identical to SEQ ID NO: 26951

SEQ ID NO: 26968 - DNA, 201 bp, Homo sapiens; identical to SEQ ID NO: 26952

SEQ ID NO: 26969 - DNA, 201 bp, Homo sapiens; identical to SEQ ID NO: 26950

SEQ ID NO: 26970 - DNA, 201 bp, Homo sapiens
ctgcagctccagctccccggctgagatggtgcagtgccttcagcagaaagaaggagaagagctggtccttagcaagaagctggtatggccacccttttggrgatggtgccgggcaatggcacagagggggttctatccatcccctgcaggagcagaggggcagtctacccccaggtggggctggggacagcagctcatgag

SEQ ID NO: 26971 - DNA, 201 bp, Homo sapiens; identical to SEQ ID NO: 26956

SEQ ID NO: 26972 - DNA, 201 bp, Homo sapiens
caaggcctacctggagtccttctacaagttctgcaccctactgggcgggactacggctgatgccatgtgccccatcctggagtttgaagcagaccgccgcrccttcatcatcaccatcaattctttcggcacagagctgtccaaagaggaccgtgccaagctctttccacactgtgggcggctctaccctgagggcctggc

SEQ ID NO: 26973 - DNA, 201 bp, Homo sapiens
agttccactttggtgtcttctatgccttcgtgaagctcaaggagcaggagtgtcgcaacatcgtgtggatcgctgaatgtatcgcccagcgccaccgcgcmaaaatcgacaactacatccctatcttctagcgtcctggcccaaggctctcaattgcactctttgtgtgtgtgtgtgtgtgtgtgcgcgtgtgtgtgcgtg

SEQ ID NO: 26974 - DNA, 166 bp, Homo sapiens
gggggcagtttgagcctcctctcccttctgtgggtcgctcccagagccatggcccatgggaaggacagagtgtgtgtgtccttggggcctggggggatgtygctcctcagctccctccctcagccctgcccctctgagacaataaaactgccctctctaaggccaa

SEQ ID NO: 26975 - DNA, 199 bp, Homo sapiens
ccctaactccctgacctgagaaccctggggcctgggggcagtttgagcctcctctcccttctgtgggtcgctcccagagccatggcccatgggaaggacaragtgtgtgtgtccttggggcctggggggatgttgctcctcagctccctccctcagccctgcccctctgagacaataaaactgccctctctaaggccaa

SEQ ID NO: 26976 - DNA, 105 bp, Homo sapiens
aggacagagtgtgtgtgtccttggggcctggggggatgttgctcctcagctccctccctcagccctgcccctctgagacaataaaactgccctctctaagsccaa

SEQ ID NO: 26977 - DNA, 201 bp, Homo sapiens
aaacagatgcatgtggggaagacacccatccaagtctttttaggagtccccttctccagacctcctctaggtatcctcaggtttgcacctccagaaccccyggagccctggaaaggaatcagagatgctaccacctacccgcctgggtgcctgcaggagtcctggggccagctggcctcgatgtacgtcagcacgcgggaa

SEQ ID NO: 26978 - DNA, 201 bp, Homo sapiens
catagttcaagatgccactttcgtgtatgccacactgcagactgctcactaccaccgagatgccggcctccctgtctacctgtatgaatttgagcaccacrctcgtggaataatcgtcaaaccccgcactgatggggcagaccatggggatgagatgtacttcctctttgggggccccttcgccacaggcctttccatggg

SEQ ID NO: 26979 - DNA, 201 bp, Homo sapiens
catgagcatctcaggactgatgatgtcacccctagcctcgggtctcttccatcgggccatttcccagagtggcaccgcgttattcagacttttcatcactmgtaacccactgaaagtggccaagaaggttgcccacctggctggatgcaaccacaacagcacacagatcctggtaaactgcctgagggcactatcagggac

SEQ ID NO: 26980 - DNA, 201 bp, Homo sapiens
tcggccagtcggcgggggccatgagcatctcaggactgatgatgtcacccctagcctcgggtctcttccatcgggccatttcccagagtggcaccgcgttrttcagacttttcatcactagtaacccactgaaagtggccaagaaggttgcccacctggctggatgcaaccacaacagcacacagatcctggtaaactgcc

SEQ ID NO: 26981 - DNA, 201 bp, Homo sapiens
tgacactcatctggccctttgcagtttgccagccatattcccatgtgatttcccactggatccaggcccccatccggctggcaggagggggctctgacgtrcaggttggaaatcagaagtctgtgagagcgcgggagtgcatggcagctctgggtcccagacctggcccgacccctctgcttcacctccagctctgctgct

SEQ ID NO: 26982 - DNA, 201 bp, Homo sapiens
caaaagggcccctccttgccaggggagagacagccacggtcctctttggccgatgctgtattctcattttggcccttgttcttaggcccgtctgcccgccytcctccatctaacctttcctgttttatccgcagcccttttcttctttgagttagtaaagatttattctgtaacctgacactcatctggccctttgcagtt

SEQ ID NO: 26983 - DNA, 201 bp, Homo sapiens
agcaagtgatgcccccagcgcccccagcccagcccactccccgcatggggaggccgccaccaccaacacctcatcatccttctcatcgctaacaccaccamctccatcggcacccaagcgggcatcatccccccacactgctcaggggaggggagggatcaggcgatgagactgtgaggccaaaagaagggggcctgttgg

SEQ ID NO: 26984 - DNA, 201 bp, Homo sapiens
aggtcacatgctctccttgcacatctggcctggttgtacccactggcctctgcctctgccctgggccaaaagggcccctccttgccaggggagagacagcyacggtcctctttggccgatgctgtattctcattttggcccttgttcttaggcccgtctgcccgccttcctccatctaacctttcctgttttatccgcagc

SEQ ID NO: 26985 - DNA, 201 bp, Homo sapiens
acaactacagctacctcatcatcgacacccaggcccagctggctgtggctgtggacccttcagaccctcgggctgtgcaggcttccattgaaaaggaaggrgtcaccttggtcgccattctgtgtactcacaagcactgggaccacagtggagggaaccgtgacctcagccggcggcaccgggactgtcgggtgtacggga

SEQ ID NO: 26986 - DNA, 201 bp, Homo sapiens
cagccggcggcaccgggactgtcgggtgtacgggagccctcaggacggcatcccctacctcacccatcccctgtgtcatcaagatgtggtcagcgtgggamggcttcagatccgggccctggctacacctggccacacacaaggccatctggtctacctactggatggggagccctacaagggtccctcctgcctcttctc

SEQ ID NO: 26987 - DNA, 201 bp, Homo sapiens
gtgctggggctaggggatgacacccttctgtggcctggtcatgagtatgcagaggagaacctgggctttgcaggtgtggtggagcccgagaacctggcccrggagaggaagatgcagtgggtgcagcggcagcggctggagcgcaagggcacgtgcccatctaccctgggagaggagcgctcctacaacccgttcctgaga

SEQ ID NO: 26988 - DNA, 201 bp, Homo sapiens
ctcctgccttgtctgcctggcaagttcatctctcacgatcccctcaaaggccccctcctccaggaaggcaacccctgtgcccctcccctccaggctacctytgcactttgtcaatgcttctcttgtggcacttatcacactgtattttacttgtttacatgtttgtctccccttctagactgtgaatccttaagggcatgg

SEQ ID NO: 26989 - DNA, 201 bp, Homo sapiens
acaactacagctacctcatcatcgacacccaggcccagctggctgtggctgtggacccttcagaccctcgggctgtgcaggcttccattgaaaaggaaggrgtcaccttggtcgccattctgtgtactcacaagcactgtcccctgtgtcatcaagatgtggtcagcgtgggacggcttcagatccgggccctggctacac

SEQ ID NO: 26990 - DNA, 201 bp, Homo sapiens
tgtgcaggcttccattgaaaaggaaggggtcaccttggtcgccattctgtgtactcacaagcactgtcccctgtgtcatcaagatgtggtcagcgtgggamggcttcagatccgggccctggctacacctggccacacacaaggccatctggtctacctactggatggggagccctacaagggtccctcctgcctcttctc

SEQ ID NO: 26991 - DNA, 201 bp, Homo sapiens; identical to SEQ ID NO: 26987

SEQ ID NO: 26992 - DNA, 201 bp, Homo sapiens
agcaagtgatgcccccagcgcccccagcccagcccactccccgcatggggaggccgccaccaccaacacctcatcatccttctcatcgctaacaccaccamctccatcggcacccaagcgggcatcatccccccacactgctcaggggaggggagggatcaggcgatgagactgtgaggccccctcctccaggaaggcaac

SEQ ID NO: 26993 - DNA, 201 bp, Homo sapiens
cccccacactgctcaggggaggggagggatcaggcgatgagactgtgaggccccctcctccaggaaggcaacccctgtgcccctcccctccaggctacctytgcactttgtcaatgcttctcttgtggcacttatcacactgtattttacttgtttacatgtttgtctccccttctagactgtgaatccttaagggcatgg

SEQ ID NO: 26994 - DNA, 201 bp, Homo sapiens
agctggaatacattcccagaaagaggggcaagaaccccatgaaagctgtgggactggcctgggccatcggcttcccttgtggtatcctcctcttcatcctmaccaagcgggaagtggacaaggaccgtgtgaagcagatgaaggctcggcagaacatgcggttgtccaacacgggcgagtatgagagccagaggttcaggg

SEQ ID NO: 26995 - DNA, 201 bp, Homo sapiens
ctgatgttgggtctggggtgcagacctgaggagcgctgcgaccctcctaggctattgactgttaagtcctcaggtttggcccagattccagttcgtgcctytgaggtccaccagagggcgcatgaagcccaggctgttgccaaaccctaccctgccccacaccaaggagccagccaaaggcaaataaagttattgagtgtt

SEQ ID NO: 26996 - DNA, 200 bp, Homo sapiens
tgcagacctgaggagcgctgcgaccctcctaggctattgactgttaagtcctcaggtttggcccagattccagttcgtgcctctgaggtccaccagagggsgcatgaagcccaggctgttgccaaaccctaccctgccccacaccaaggagccagccaaaggcaaataaagttattgagtgtttagtagaaaggaaccag

SEQ ID NO: 26997 - DNA, 181 bp, Homo sapiens
gcgaccctcctaggctattgactgttaagtcctcaggtttggcccagattccagttcgtgcctctgaggtccaccagagggcgcatgaagcccaggctgtwgccaaaccctaccctgccccacaccaaggagccagccaaaggcaaataaagttattgagtgtttagtagaaaggaaccag

SEQ ID NO: 26998 - DNA, 201 bp, Homo sapiens; identical to SEQ ID NO: 26985

SEQ ID NO: 26999 - DNA, 201 bp, Homo sapiens; identical to SEQ ID NO: 26986

SEQ ID NO: 27000 - DNA, 201 bp, Homo sapiens; identical to SEQ ID NO: 26987

SEQ ID NO: 27001 - DNA, 201 bp, Homo sapiens; identical to SEQ ID NO: 26992

SEQ ID NO: 27002 - DNA, 201 bp, Homo sapiens; identical to SEQ ID NO: 26993

SEQ ID NO: 27003 - DNA, 201 bp, Homo sapiens; identical to SEQ ID NO: 26985

SEQ ID NO: 27004 - DNA, 195 bp, Homo sapiens
ttcggggtgcttgcccggctggaggtggtgagggggcgggtccaaaggagaggtcaatgggcggggcggggccacaacgcccccacgtccagagycggcaggcaggttccccgcggggggccggggccgggccgttgcctagcaacgccgagccccgcccggccggcgcgtgcctgcccccagcatggcttggca

SEQ ID NO: 27005 - DNA, 201 bp, Homo sapiens; identical to SEQ ID NO: 26986

SEQ ID NO: 27006 - DNA, 201 bp, Homo sapiens; identical to SEQ ID NO: 26987

SEQ ID NO: 27007 - DNA, 201 bp, Homo sapiens; identical to SEQ ID NO: 26992

SEQ ID NO: 27008 - DNA, 201 bp, Homo sapiens; identical to SEQ ID NO: 26993

SEQ ID NO: 27009 - DNA, 201 bp, Homo sapiens
tgggagccgtgaggtggtggccatggactgcgagatggtgggggctggggccccaccgggagagtggcctggctcgttgcagcctcgtgaacgtccacggygctgtgctgtacgacaagttcatccggcctgagggagagatcaccgattacagaacccgggtcagcggggtcacccctcagcacatggtgggggccacac

SEQ ID NO: 27010 - DNA, 201 bp, Homo sapiens
gagcatggctgggagccgtgaggtggtggccatggactgcgagatggtgggggctggggccccaccgggagagtggcctggctcgttgcagcctcgtgaaygtccacggtgctgtgctgtacgacaagttcatccggcctgagggagagatcaccgattacagaacccgggtcagcggggtcacccctcagcacatggtgg

SEQ ID NO: 27011 - DNA, 201 bp, Homo sapiens
acacaatctacgacacgtccactgacaggctgttgtggcgtgaggccaagctggaccactgcaggcgtgtctccctgcgggtgctgagtgagcgcctcctrcacaagagcatccagaacagcctgcttggacacagctcggtggaagatgcgagggcaacgatggagctctatcaaatctcccagagaatccgagcccgcc

SEQ ID NO: 27012 - DNA, 201 bp, Homo sapiens
caccgctgagagcagctgcagtagctgagcagtggcagcagagaggcagacgtgagctgagggcgcagaggcaggcagcatctctgagggtccccaaggarcatggctgggagccgtgaggtggtggccatggactgcgagatggtgggggctggggccccaccgggagagtggcctggctcgttgcagcctcgtgaacgt

SEQ ID NO: 27013 - DNA, 201 bp, Homo sapiens; identical to SEQ ID NO: 27009

SEQ ID NO: 27014 - DNA, 201 bp, Homo sapiens; identical to SEQ ID NO: 27010

SEQ ID NO: 27015 - DNA, 201 bp, Homo sapiens; identical to SEQ ID NO: 27012

SEQ ID NO: 27016 - DNA, 201 bp, Homo sapiens; identical to SEQ ID NO: 27009

SEQ ID NO: 27017 - DNA, 201 bp, Homo sapiens; identical to SEQ ID NO: 27010

SEQ ID NO: 27018 - DNA, 201 bp, Homo sapiens; identical to SEQ ID NO: 27011

SEQ ID NO: 27019 - DNA, 201 bp, Homo sapiens
agagatgagtcaccgctgagagcagctgcagtagctgagcagtggcagcagagaggcagacgtgagctgagggcgcagaggcaggcagggtccccaaggarcatggctgggagccgtgaggtggtggccatggactgcgagatggtgggggctggggccccaccgggagagtggcctggctcgttgcagcctcgtgaacgt

SEQ ID NO: 27020 - DNA, 201 bp, Homo sapiens; identical to SEQ ID NO: 27009

SEQ ID NO: 27021 - DNA, 201 bp, Homo sapiens; identical to SEQ ID NO: 27010

SEQ ID NO: 27022 - DNA, 201 bp, Homo sapiens; identical to SEQ ID NO: 27011

SEQ ID NO: 27023 - DNA, 201 bp, Homo sapiens; identical to SEQ ID NO: 27012

SEQ ID NO: 27024 - DNA, 201 bp, Homo sapiens
gaatatttgttttgggtgatcagaactgagactcctattgtggattagtaacatgcctcctcctagaacaagggagggcagggatcgccgagaccaccacygggctcccagcgaggaagaggccttggagaaatgggactggaattgtccagagacgcgtcgcctcttggaagatgccttcttccgtgaagaggattacat

SEQ ID NO: 27025 - DNA, 201 bp, Homo sapiens
cagagcagcggaagggccgggcgggccgcacgggccccggagtctgcttccgcctctatgccgaatcggactatgatgccttcgccccctaccccgtcccrgaaattcggagggtggccctggactcgttggtgctgcagatgaagagcatgagtgtgggggacccccgaaccttccccttcatcgagcccccaccaccag

SEQ ID NO: 27026 - DNA, 201 bp, Homo sapiens
ttgtgtccatcccagagatcactgcagatgtcatgaggtaccctttgtgtcaccagctcaagcaggcctctggccactttatcatctgtggtggtcctgtsccgtgaccaggaggaaaaattagctctttgaagagaaagtagttctctattgcaggcactggcctcttaaattgttgcaggtggggaatggatgagaata

SEQ ID NO: 27027 - DNA, 201 bp, Homo sapiens
cacgttcggcggccaccaagattgtattcctgacagtggggctgctcctgcgacaaatccagcgggaacccagcctgccccagtatgaggtcctgattgtrgatgaagtccatgagcggcatctccacaacgatttcctcctgggcgtcctccagcgcctgttgcccacgcggcctgacctcaaggtcatcctcatgtcgg

SEQ ID NO: 27028 - DNA, 169 bp, Homo sapiens
gttcagcctggtggagcctgtgctcaccatcgcagccgcacttagcgtccagtcgcccttcacccgcagcgcccagagcagcccagagtgcgcggcagcayggcggccgctggagagcgaccagggtgaccccttcacgctcttcaacgtcttcaacgcctgggtgcag

SEQ ID NO: 27029 - DNA, 201 bp, Homo sapiens
ggacagcccaagcacagcatcccagcgctggccgacctacctcgcacttacgacccacgttaccgcatcaacctctctgttcttggccctgccacgcgggrctctcagggactgggcaggcacttgcccgcggagagagtggctgagttccgccgagccctgttgcactacctggactttggccagaagcaggcatttggg

SEQ ID NO: 27030 - DNA, 201 bp, Homo sapiens
gaacccagcctgccccagtatgaggtcctgattgtggatgaagtccatgagcggcatctccacaacgatttcctcctgggcgtcctccagcgcctgttgcscacgcggcctgacctcaaggtcatcctcatgtcggccaccatcaacatctcgctcttctccagctatttcagcaatgcccctgtggtacaggtgcctggg

SEQ ID NO: 27031 - DNA, 201 bp, Homo sapiens
catccagaaagcagcagctgccttgttagtcctccccagggtctagctttccttcttcctgctgcagggtgctgcctgaggggtcctgggtaggaggggckttagagccagcagggacctcccatgtctccagattccaggtgcaggttcttagcacctccgcagccgctctctcttgagtccatcctcagtctctcctac

SEQ ID NO: 27032 - DNA, 201 bp, Homo sapiens; identical to SEQ ID NO: 27027

SEQ ID NO: 27033 - DNA, 201 bp, Homo sapiens
gaaggacttcctctttacacccacagaggtgctgcgccaccggaagcagcacgtgtgagctgggccaggagccctgcccacctccgtgcagctgacctgcyctccagcccaggactaggggcaggactcttgcctgaacccccagcctgggcttagccctgtggtcctgtcccagtgcagagggcctggagcacggattgt

SEQ ID NO: 27034 - DNA, 201 bp, Homo sapiens
cgttagagccagcagggacctcccatgtctccagattccaggtgcaggttcttagcacctccgcagccgctctctcttgagtccatcctcagtctctcctwccccttgaagtagggggaccctgaatttgcccatccacctgggtcactttgagagttgtgcaggggggctgggagcactggtgttcacgtgggaccacag

SEQ ID NO: 27035 - DNA, 201 bp, Homo sapiens; identical to SEQ ID NO: 27030

SEQ ID NO: 27036 - DNA, 201 bp, Homo sapiens
ggtctttggacaccaatggtgactgctcccgcctggtggccgatggctggctggagctgcagctagcagacagtgaaagtgccatccgactcctggcggcktccctgcggctccgtgcccgctgggaaagtgccctggaccggcagctggcgcaccaggcccagcagcagctggaggaggaggaggaggatacgccagtca

SEQ ID NO: 27037 - DNA, 201 bp, Homo sapiens; identical to SEQ ID NO: 27024

SEQ ID NO: 27038 - DNA, 201 bp, Homo sapiens; identical to SEQ ID NO: 27026

SEQ ID NO: 27039 - DNA, 201 bp, Homo sapiens; identical to SEQ ID NO: 27025

SEQ ID NO: 27040 - DNA, 201 bp, Homo sapiens
ggagccctgcccacctccgtgcagctgacctgccctccagcccaggactaggggcaggactcttgcctgaacccccagcctgggcttagccctgtggtccygtcccagtgcagagggcctggagcacggattgtgaataaagcctcacatgctgatacacactgttaggcctgcacctgcccatccagaaagcagcagctg

SEQ ID NO: 27041 - DNA, 201 bp, Homo sapiens
ggactaggggcaggactcttgcctgaacccccagcctgggcttagccctgtggtcctgtcccagtgcagagggcctggagcacggattgtgaataaagcckcacatgctgatacacactgttaggcctgcacctgcccatccagaaagcagcagctgccttgttagtcctccccagggtctagctttccttcttcctgctg

SEQ ID NO: 27042 - DNA, 201 bp, Homo sapiens; identical to SEQ ID NO: 27029

SEQ ID NO: 27043 - DNA, 201 bp, Homo sapiens
cggccgtgaccaacattcttaatctgtcctctagtgctggccactctaaaacttcacaagaatgtgctgtctgtgtctagcttcttttacccaacatgagsttgcatgggcttggttcattcattctgttccatgaattcatcacaatatatccattcttttgtccagggacatttggcttccagaaacctacccctaaca

SEQ ID NO: 27044 - DNA, 201 bp, Homo sapiens
gcagaacaaaggccccatcagaggggacgtgctgggtgtcagcgtcagcttctgggaggaggaaggtcagagctaaggcctgaaggatgatgaggtatcargtgggtggaggggagacgctcaggaggtgggaaaggcggaggtgcacaggcttggttccaggtacaaataacgttactaggagcacacagtacctggatt

SEQ ID NO: 27045 - DNA, 201 bp, Homo sapiens; identical to SEQ ID NO: 27031

SEQ ID NO: 27046 - DNA, 201 bp, Homo sapiens; identical to SEQ ID NO: 27027

SEQ ID NO: 27047 - DNA, 201 bp, Homo sapiens; identical to SEQ ID NO: 27033

SEQ ID NO: 27048 - DNA, 201 bp, Homo sapiens; identical to SEQ ID NO: 27034

SEQ ID NO: 27049 - DNA, 201 bp, Homo sapiens; identical to SEQ ID NO: 27030

SEQ ID NO: 27050 - DNA, 201 bp, Homo sapiens; identical to SEQ ID NO: 27036

SEQ ID NO: 27051 - DNA, 201 bp, Homo sapiens; identical to SEQ ID NO: 27024

SEQ ID NO: 27052 - DNA, 201 bp, Homo sapiens; identical to SEQ ID NO: 27026

SEQ ID NO: 27053 - DNA, 201 bp, Homo sapiens; identical to SEQ ID NO: 27025

SEQ ID NO: 27054 - DNA, 201 bp, Homo sapiens; identical to SEQ ID NO: 27040

SEQ ID NO: 27055 - DNA, 201 bp, Homo sapiens; identical to SEQ ID NO: 27041

SEQ ID NO: 27056 - DNA, 201 bp, Homo sapiens; identical to SEQ ID NO: 27029

SEQ ID NO: 27057 - DNA, 201 bp, Homo sapiens; identical to SEQ ID NO: 27043

SEQ ID NO: 27058 - DNA, 201 bp, Homo sapiens; identical to SEQ ID NO: 27044

SEQ ID NO: 27059 - DNA, 201 bp, Homo sapiens; identical to SEQ ID NO: 27031

SEQ ID NO: 27060 - DNA, 201 bp, Homo sapiens; identical to SEQ ID NO: 27027

SEQ ID NO: 27061 - DNA, 201 bp, Homo sapiens; identical to SEQ ID NO: 27033

SEQ ID NO: 27062 - DNA, 201 bp, Homo sapiens; identical to SEQ ID NO: 27034

SEQ ID NO: 27063 - DNA, 201 bp, Homo sapiens; identical to SEQ ID NO: 27030

SEQ ID NO: 27064 - DNA, 201 bp, Homo sapiens; identical to SEQ ID NO: 27036

SEQ ID NO: 27065 - DNA, 201 bp, Homo sapiens; identical to SEQ ID NO: 27024

SEQ ID NO: 27066 - DNA, 201 bp, Homo sapiens; identical to SEQ ID NO: 27026

SEQ ID NO: 27067 - DNA, 201 bp, Homo sapiens; identical to SEQ ID NO: 27025

SEQ ID NO: 27068 - DNA, 201 bp, Homo sapiens; identical to SEQ ID NO: 27040

SEQ ID NO: 27069 - DNA, 201 bp, Homo sapiens; identical to SEQ ID NO: 27041

SEQ ID NO: 27070 - DNA, 201 bp, Homo sapiens; identical to SEQ ID NO: 27029

SEQ ID NO: 27071 - DNA, 201 bp, Homo sapiens; identical to SEQ ID NO: 27043

SEQ ID NO: 27072 - DNA, 201 bp, Homo sapiens; identical to SEQ ID NO: 27044

SEQ ID NO: 27073 - DNA, 201 bp, Homo sapiens
acggtaagcatgaaccctccttccctgaaggtgggatttcaggaagaccccaccaccccgtttcaccttagtccagggacatagttcccaagtggggcccrtggccctgagggcttctgggaagggtcccgggggggcacttgggtggtgggtggcacttggcgggggcccagccctgacagctggcctgccacagaatga

SEQ ID NO: 27074 - DNA, 201 bp, Homo sapiens; identical to SEQ ID NO: 27031

SEQ ID NO: 27075 - DNA, 201 bp, Homo sapiens; identical to SEQ ID NO: 27033

SEQ ID NO: 27076 - DNA, 201 bp, Homo sapiens; identical to SEQ ID NO: 27034

SEQ ID NO: 27077 - DNA, 201 bp, Homo sapiens; identical to SEQ ID NO: 27036

SEQ ID NO: 27078 - DNA, 201 bp, Homo sapiens
aggatgtgaagttcaagcttcggcatgacctggcgcagctgcaggccgctgccagctcagcccaggacctgagccgcgagcagctggctctgctgaagctrgtgctgggccggggcctgtacccacagctggccgtccccgacgccttcaacagcagccgaaaggactcagaccagattttccacacgcaggccaagcagg

SEQ ID NO: 27079 - DNA, 201 bp, Homo sapiens; identical to SEQ ID NO: 27040

SEQ ID NO: 27080 - DNA, 201 bp, Homo sapiens; identical to SEQ ID NO: 27041

SEQ ID NO: 27081 - DNA, 201 bp, Homo sapiens; identical to SEQ ID NO: 27044

SEQ ID NO: 27082 - DNA, 201 bp, Homo sapiens; identical to SEQ ID NO: 27043

SEQ ID NO: 27083 - DNA, 201 bp, Homo sapiens; identical to SEQ ID NO: 27073

SEQ ID NO: 27084 - DNA, 201 bp, Homo sapiens; identical to SEQ ID NO: 27024

SEQ ID NO: 27085 - DNA, 201 bp, Homo sapiens; identical to SEQ ID NO: 27026

SEQ ID NO: 27086 - DNA, 201 bp, Homo sapiens; identical to SEQ ID NO: 27027

SEQ ID NO: 27087 - DNA, 201 bp, Homo sapiens; identical to SEQ ID NO: 27029

SEQ ID NO: 27088 - DNA, 201 bp, Homo sapiens; identical to SEQ ID NO: 27030

SEQ ID NO: 27089 - DNA, 201 bp, Homo sapiens
gtctctgacggaagccggggcggacggtcggagtccggaagaaaaacagtccgcgacagctaggcgcgtgagaccggccgcccgcagggctgctctggcckggacccgctggccgggagacgcgaacctgccggaccaccgcgcggggacgacggcggccatgagctcgcggaagctgagcgggccgaaaggcaggaggct

SEQ ID NO: 27090 - DNA, 201 bp, Homo sapiens
ggacgacggcggccatgagctcgcggaagctgagcgggccgaaaggcaggaggctcagcatacacgtcgtgacttggaacgtggcttcggcagcgccccckctagatctcagtgacctgcttcagctgaacaaccggaacctcaatcttgacatatatgttattggtttgcaggaattgaactctgggatcataagcctcc

SEQ ID NO: 27091 - DNA, 201 bp, Homo sapiens
gggacagcaaggtctcctgcagcgacaacctgaaccaggtttacatcgacatcagcaatatccctaccactgaagatgagtttctcctctgttactacagmaacagtctgcgttctgtggtggggataagcagacccttccagatcccgcctggctccttgagggaggacccactgggtgaagcacagccacagatctgag

SEQ ID NO: 27092 - DNA, 201 bp, Homo sapiens
cctggaccacgacctcattatctggtttggagacatgaactttcggatcgaggactttgggttgcactttgttcgggaatccattaaaaatcggtgctacsgtggcctgtgggagaaggaccagctcagcattgccaagaaacatgacccgctgctccgggagttccaggagggccgcctactcttcccgcccacctacaa

SEQ ID NO: 27093 - DNA, 201 bp, Homo sapiens
atcggtgctacggtggcctgtgggagaaggaccagctcagcattgccaagaaacatgacccgctgctccgggagttccaggagggccgcctactcttcccscccacctacaagtttgataggaactccaacgactatgacaccagtgagaaaaaacgcaagcctgcatggaccgatcgcatcctgtggaggctgaagcggc

SEQ ID NO: 27094 - DNA, 201 bp, Homo sapiens
ggagacatgaactttcggatcgaggactttgggttgcactttgttcgggaatccattaaaaatcggtgctacggtggcctgtgggagaaggaccagctcarcattgccaagaaacatgacccgctgctccgggagttccaggagggccgcctactcttcccgcccacctacaagtttgataggaactccaacgactatgac

SEQ ID NO: 27095 - DNA, 201 bp, Homo sapiens
tagcttgagtcccatgcctccaccctgccatctgaggaaggggtgacaagtggtcaaggagctgtggccacagacttttccagggtggtccttggcaggtkaggtgcgtctgtgccacccttgtcaggagccattgacgacgggccccccctggaccccccgggacctcagagtgggggcaggcagaagggagaaccagct

SEQ ID NO: 27096 - DNA, 201 bp, Homo sapiens
tctgaggaaggggtgacaagtggtcaaggagctgtggccacagacttttccagggtggtccttggcaggtgaggtgcgtctgtgccacccttgtcaggagycattgacgacgggccccccctggaccccccgggacctcagagtgggggcaggcagaagggagaaccagctcaagacattttggaggatctggccctgggg

SEQ ID NO: 27097 - DNA, 201 bp, Homo sapiens
gctgtggccacagacttttccagggtggtccttggcaggtgaggtgcgtctgtgccacccttgtcaggagccattgacgacgggccccccctggacccccygggacctcagagtgggggcaggcagaagggagaaccagctcaagacattttggaggatctggccctggggttcttcagagaacaccctctaggggctttg

SEQ ID NO: 27098 - DNA, 201 bp, Homo sapiens; identical to SEQ ID NO: 27089

SEQ ID NO: 27099 - DNA, 201 bp, Homo sapiens
cgtgggactggattggactgtacaaggtggggctgcgggacgttaatgactacgtgtcctatgcctgggtcggggacagcaaggtctcctgcagcgacaayctgaaccaggtttacatcgacatcagcaatatccctaccactgaagatgagtttctcctctgttactacagcaacagtctgcgttctgtggtggggataa

SEQ ID NO: 27100 - DNA, 201 bp, Homo sapiens
agcggcagccctgtgctggccccgacactcccataccgccggcgtcacacttctccttgtctctgaggggctacagcagccacatgacgtacggcatcagygaccacaagcctgtctccggcacgttcgacttggagctgaagccattggtgtctgctccgctgatcgtcctgatgcccgaggacctgtggaccgtggaaa

SEQ ID NO: 27101 - DNA, 201 bp, Homo sapiens
ggctgaagcggcagccctgtgctggccccgacactcccataccgccggcgtcacacttctccttgtctctgaggggctacagcagccacatgacgtacggyatcagcgaccacaagcctgtctccggcacgttcgacttggagctgaagccattggtgtctgctccgctgatcgtcctgatgcccgaggacctgtggaccg

SEQ ID NO: 27102 - DNA, 201 bp, Homo sapiens
tatgacaccagtgagaaaaaacgcaagcctgcatggaccgatcgcatcctgtggaggctgaagcggcagccctgtgctggccccgacactcccataccgcyggcgtcacacttctccttgtctctgaggggctacagcagccacatgacgtacggcatcagcgaccacaagcctgtctccggcacgttcgacttggagctg

SEQ ID NO: 27103 - DNA, 201 bp, Homo sapiens
ctccaacgactatgacaccagtgagaaaaaacgcaagcctgcatggaccgatcgcatcctgtggaggctgaagcggcagccctgtgctggccccgacactsccataccgccggcgtcacacttctccttgtctctgaggggctacagcagccacatgacgtacggcatcagcgaccacaagcctgtctccggcacgttcga

SEQ ID NO: 27104 - DNA, 201 bp, Homo sapiens
ggcagccctgtgctggccccgacactcccataccgccggcgtcacacttctccttgtctctgaggggctacagcagccacatgacgtacggcatcagcgaycacaagcctgtctccggcacgttcgacttggagctgaagccattggtgtctgctccgctgatcgtcctgatgcccgaggacctgtggaccgtggaaaatg

SEQ ID NO: 27105 - DNA, 201 bp, Homo sapiens
tgtctgctccgctgatcgtcctgatgcccgaggacctgtggaccgtggaaaatgacatgatggtcagctactcttcaacctcggacttccccagcagcccrtgggactggattggactgtacaaggtggggctgcgggacgttaatgactacgtgtcctatgcctgggtcggggacagcaaggtctcctgcagcgacaacc

SEQ ID NO: 27106 - DNA, 201 bp, Homo sapiens
gccccctgaagagacagccaagtgtcgtccacatactcctcccagagtgagctctaaccaggctcatttgctctctccactactcatctctggaattagcygcttaaatacaggtttttgttgctgagatgtgagtgaaaccagctagtgtgtcaacagtgaagacctggggacagttctgcgtctcatttctggattcct

SEQ ID NO: 27107 - DNA, 201 bp, Homo sapiens
cgacggcggccatgagctcgcggaagctgagcgggccgaaaggcaggaggctcagcagcatacacgtcgtgacttggaacgtggcttcggcagcgccccckctagatctcagtgacctgcttcagctgaacaaccggaacctcaatcttgacatatatgttattggtttgcaggaattgaactctgggatcataagcctcc

SEQ ID NO: 27108 - DNA, 201 bp, Homo sapiens; identical to SEQ ID NO: 27091

SEQ ID NO: 27109 - DNA, 201 bp, Homo sapiens; identical to SEQ ID NO: 27092

SEQ ID NO: 27110 - DNA, 201 bp, Homo sapiens; identical to SEQ ID NO: 27093

SEQ ID NO: 27111 - DNA, 201 bp, Homo sapiens; identical to SEQ ID NO: 27094

SEQ ID NO: 27112 - DNA, 201 bp, Homo sapiens; identical to SEQ ID NO: 27095

SEQ ID NO: 27113 - DNA, 201 bp, Homo sapiens; identical to SEQ ID NO: 27096

SEQ ID NO: 27114 - DNA, 201 bp, Homo sapiens; identical to SEQ ID NO: 27097

SEQ ID NO: 27115 - DNA, 201 bp, Homo sapiens; identical to SEQ ID NO: 27089

SEQ ID NO: 27116 - DNA, 201 bp, Homo sapiens; identical to SEQ ID NO: 27099

SEQ ID NO: 27117 - DNA, 201 bp, Homo sapiens; identical to SEQ ID NO: 27100

SEQ ID NO: 27118 - DNA, 201 bp, Homo sapiens; identical to SEQ ID NO: 27101

SEQ ID NO: 27119 - DNA, 201 bp, Homo sapiens; identical to SEQ ID NO: 27102

SEQ ID NO: 27120 - DNA, 201 bp, Homo sapiens; identical to SEQ ID NO: 27103

SEQ ID NO: 27121 - DNA, 201 bp, Homo sapiens; identical to SEQ ID NO: 27104

SEQ ID NO: 27122 - DNA, 201 bp, Homo sapiens; identical to SEQ ID NO: 27105

SEQ ID NO: 27123 - DNA, 201 bp, Homo sapiens; identical to SEQ ID NO: 27106

SEQ ID NO: 27124 - DNA, 201 bp, Homo sapiens; identical to SEQ ID NO: 27090

SEQ ID NO: 27125 - DNA, 201 bp, Homo sapiens; identical to SEQ ID NO: 27100

SEQ ID NO: 27126 - DNA, 201 bp, Homo sapiens; identical to SEQ ID NO: 27091

SEQ ID NO: 27127 - DNA, 201 bp, Homo sapiens; identical to SEQ ID NO: 27101

SEQ ID NO: 27128 - DNA, 201 bp, Homo sapiens; identical to SEQ ID NO: 27102

SEQ ID NO: 27129 - DNA, 201 bp, Homo sapiens; identical to SEQ ID NO: 27092

SEQ ID NO: 27130 - DNA, 201 bp, Homo sapiens; identical to SEQ ID NO: 27093

SEQ ID NO: 27131 - DNA, 201 bp, Homo sapiens; identical to SEQ ID NO: 27103

SEQ ID NO: 27132 - DNA, 201 bp, Homo sapiens; identical to SEQ ID NO: 27094

SEQ ID NO: 27133 - DNA, 201 bp, Homo sapiens; identical to SEQ ID NO: 27104

SEQ ID NO: 27134 - DNA, 201 bp, Homo sapiens; identical to SEQ ID NO: 27105

SEQ ID NO: 27135 - DNA, 201 bp, Homo sapiens; identical to SEQ ID NO: 27089

SEQ ID NO: 27136 - DNA, 201 bp, Homo sapiens
gccccctgaagagacagccaagtgtcgtccacatactcctcccagagtgagctctaaccaggctcatttgctctctccactactcatctctggaattagcygcttaaatacaggtttttgttgctgagatgtgagtgaaaccagctagcttccagcaggccatggctggctgttttgtgactgttacattgtgcaggggta

SEQ ID NO: 27137 - DNA, 201 bp, Homo sapiens; identical to SEQ ID NO: 27099

SEQ ID NO: 27138 - DNA, 201 bp, Homo sapiens; identical to SEQ ID NO: 27090

SEQ ID NO: 27139 - DNA, 201 bp, Homo sapiens; identical to SEQ ID NO: 27091

SEQ ID NO: 27140 - DNA, 201 bp, Homo sapiens; identical to SEQ ID NO: 27092

SEQ ID NO: 27141 - DNA, 201 bp, Homo sapiens; identical to SEQ ID NO: 27093

SEQ ID NO: 27142 - DNA, 201 bp, Homo sapiens; identical to SEQ ID NO: 27094

SEQ ID NO: 27143 - DNA, 201 bp, Homo sapiens; identical to SEQ ID NO: 27095

SEQ ID NO: 27144 - DNA, 201 bp, Homo sapiens; identical to SEQ ID NO: 27096

SEQ ID NO: 27145 - DNA, 201 bp, Homo sapiens; identical to SEQ ID NO: 27097

SEQ ID NO: 27146 - DNA, 201 bp, Homo sapiens; identical to SEQ ID NO: 27089

SEQ ID NO: 27147 - DNA, 201 bp, Homo sapiens; identical to SEQ ID NO: 27099

SEQ ID NO: 27148 - DNA, 201 bp, Homo sapiens; identical to SEQ ID NO: 27100

SEQ ID NO: 27149 - DNA, 201 bp, Homo sapiens; identical to SEQ ID NO: 27101

SEQ ID NO: 27150 - DNA, 201 bp, Homo sapiens; identical to SEQ ID NO: 27102

SEQ ID NO: 27151 - DNA, 201 bp, Homo sapiens; identical to SEQ ID NO: 27103

SEQ ID NO: 27152 - DNA, 201 bp, Homo sapiens; identical to SEQ ID NO: 27104

SEQ ID NO: 27153 - DNA, 201 bp, Homo sapiens; identical to SEQ ID NO: 27105

SEQ ID NO: 27154 - DNA, 201 bp, Homo sapiens; identical to SEQ ID NO: 27106

SEQ ID NO: 27155 - DNA, 201 bp, Homo sapiens
tcgtcggatttgagagtgggaacaagaaatccggacttttgctctccatcctcttagacatacacgtcgtgacttggaacgtggcttcggcagcgccccckctagatctcagtgacctgcttcagctgaacaaccggaacctcaatcttgacatatatgttattggtttgcaggaattgaactctgggatcataagcctcc

SEQ ID NO: 27156 - DNA, 201 bp, Homo sapiens
gggagacagctgttgcaatcccttaagcatgggtgctattaaaaaaatggtggagaagaaaatacctggaatttacgtcttatctttagagattgggaagmccctgatggaggacgtggagaacagcttcttcttgaatgtcaattcccaagtaacaacagtgtgtcaggcacttgctaaggatcctaaattgcagcaagg

SEQ ID NO: 27157 - DNA, 201 bp, Homo sapiens
cttacaggagacctccctgtacacacaggaccgcctggggctaaaggaaatggacaatgcaggacagctagtgtttctggctacagaaggggaccatcttyagttgtctgaagaatggttttatgcccacatcataccattccttggatgaaacccgtatagttcacaatagagctcagggagcccctaactcttccaaac

SEQ ID NO: 27158 - DNA, 201 bp, Homo sapiens
aactaatccttctatcatctaacatgccctacttggaaagatctaagatctgaatcttatcctttttcagttttagaaaagggagtctgttccagatcagkgccagaactgtgcccaggcccaaaggagacaactaactaaagtagtgagatagattctaagggcaaacatttttccaagtcttgccatatttcaagcaaa

SEQ ID NO: 27159 - DNA, 201 bp, Homo sapiens
tgcaatcccttaagcatgggtgctattaaaaaaatggtggagaagaaaatacctggaatttacgtcttatctttagagattgggaagaccctgatggaggrcgtggagaacagcttcttcttgaatgtcaattcccaagtaacaacagtgtgtcaggcacttgctaaggatcctaaattgcagcaaggctacaatgctatg

SEQ ID NO: 27160 - DNA, 201 bp, Homo sapiens
ttcttgaatgtcaattcccaagtaacaacagtgtgtcaggcacttgctaaggatcctaaattgcagcaaggctacaatgctatgggattctcccagggagrccaatttctgagggcagtggctcagagatgcccttcacctcccatgatcaatctgatctcggttgggggacaacatcaaggtgtttttggactccctcga

SEQ ID NO: 27161 - DNA, 201 bp, Homo sapiens
caattcccaagtaacaacagtgtgtcaggcacttgctaaggatcctaaattgcagcaaggctacaatgctatgggattctcccagggaggccaatttctgwgggcagtggctcagagatgcccttcacctcccatgatcaatctgatctcggttgggggacaacatcaaggtgtttttggactccctcgatgcccaggaga

SEQ ID NO: 27162 - DNA, 201 bp, Homo sapiens
aggccaatttctgagggcagtggctcagagatgcccttcacctcccatgatcaatctgatctcggttgggggacaacatcaaggtgtttttggactccctygatgcccaggagagagctctcacatctgtgacttcatccgaaaaacactgaatgctggggcgtactccaaagttgttcaggaacgcctcgtgcaagccga

SEQ ID NO: 27163 - DNA, 201 bp, Homo sapiens
aatttctgagggcagtggctcagagatgcccttcacctcccatgatcaatctgatctcggttgggggacaacatcaaggtgtttttggactccctcgatgmccaggagagagctctcacatctgtgacttcatccgaaaaacactgaatgctggggcgtactccaaagttgttcaggaacgcctcgtgcaagccgaatact

SEQ ID NO: 27164 - DNA, 201 bp, Homo sapiens
gtcctacaagaaaaacctgatggccctgaagaagtttgtgatggtgaaattcctcaatgattccattgtggaccctgtagattcggagtggtttggatttyacagaagtggccaagccaaggaaaccattcccttacaggagacctccctgtacacacaggaccgcctggggctaaaggaaatggacaatgcaggacagct

SEQ ID NO: 27165 - DNA, 201 bp, Homo sapiens
agagattgggaagaccctgatggaggacgtggagaacagcttcttcttgaatgtcaattcccaagtaacaacagtgtgtcaggcacttgctaaggatcctwaattgcagcaaggctacaatgctatgggattctcccagggaggccaatttctgagggcagtggctcagagatgcccttcacctcccatgatcaatctgat

SEQ ID NO: 27166 - DNA, 201 bp, Homo sapiens
aaggatcctaaattgcagcaaggctacaatgctatgggattctcccagggaggccaatttctgagggcagtggctcagagatgcccttcacctcccatgaycaatctgatctcggttgggggacaacatcaaggtgtttttggactccctcgatgcccaggagagagctctcacatctgtgacttcatccgaaaaacactg

SEQ ID NO: 27167 - DNA, 201 bp, Homo sapiens
cctggaatttacgtcttatctttagagattgggaagaccctgatggaggacgtggagaacagcttcttcttgaatgtcaattcccaagtaacaacagtgtrtcaggcacttgctaaggatcctaaattgcagcaaggctacaatgctatgggattctcccagggaggccaatttctgagggcagtggctcagagatgccct

SEQ ID NO: 27168 - DNA, 201 bp, Homo sapiens
gaggatgtgtatcgcaaccacagcatcttcttggcagatataaatcaggagcggggtatcaatgagtcctacaagaaaaacctgatggccctgaagaagtytgtgatggtgaaattcctcaatgattccattgtggaccctgtagattcggagtggtttggattttacagaagtggccaagccaaggaaaccattccctta

SEQ ID NO: 27169 - DNA, 167 bp, Homo sapiens
ccggagtctcgcgcccgcggtcatgtgacacagcgaagatggcgtcgcccggctgcctgtggctctwggctgtggctctcctgccatggacctgcgcttctcgggcgctgcagcatctggacccgccggcgccgctgccgttggtgatctggcatgggatgggagac

SEQ ID NO: 27170 - DNA, 201 bp, Homo sapiens
tctcgcgcccgcggtcatgtgacacagcgaagatggcgtcgcccggctgcctgtggctcttggctgtggctctcctgccatggacctgcgcttctcgggcrctgcagcatctggacccgccggcgccgctgccgttggtgatctggcatgggatgggagacagctgttgcaatcccttaagcatgggtgctattaaaaaaa

SEQ ID NO: 27171 - DNA, 201 bp, Homo sapiens
tactcacataaatgctttgttttgctggtgatttaaccagtgcttggaaaaatcttgcttggctatttctgcatcatttcttaaggctgccttcctctctsagtacgttgccctctgtgctatcatcttatcatcaattattagacaaatcccactggcctacagtcttgcttctgcagcacccactttgtctcctcaggt

SEQ ID NO: 27172 - DNA, 201 bp, Homo sapiens
cactggcctacagtcttgcttctgcagcacccactttgtctcctcaggtagtgatgaattagttgctgtcacaaaaggagggaagtagcacccaaattaarttgcttaagagaggaaatgtacatcttgtataacttagggagcgaagaaaatgtaggcgcgaaagtgaaaagtgaggcagctagttcttcctattccatt

SEQ ID NO: 27173 - DNA, 141 bp, Homo sapiens
ccggagtctcgcgcccgcggtcatgtgacacagcgaagatrgcgtcgcccggctgcctgtggctcttggctgtggctctcctgccatggacctgcgcttctcgggcgctgcagcatctggacccgccggcgccgctgccgt

SEQ ID NO: 27174 - DNA, 201 bp, Homo sapiens
acctcccatgatcaatctgatctcggttgggggacaacatcaaggtgtttttggactccctcgatgcccaggagagagctctcacatctgtgacttcatcygaaaaacactgaatgctggggcgtactccaaagttgttcaggaacgcctcgtgcaagccgaatactggcatgaccccataaaggaggatgtgtatcgcaa

SEQ ID NO: 27175 - DNA, 201 bp, Homo sapiens
gaccctgatggaggacgtggagaacagcttcttcttgaatgtcaattcccaagtaacaacagtgtgtcaggcacttgctaaggatcctaaattgcagcaasgctacaatgctatgggattctcccagggaggccaatttctgagggcagtggctcagagatgcccttcacctcccatgatcaatctgatctcggttggggg

SEQ ID NO: 27176 - DNA, 201 bp, Homo sapiens
gcctgtggctcttggctgtggctctcctgccatggacctgcgcttctcgggcgctgcagcatctggacccgccggcgccgctgccgttggtgatctggcawgggatgggagacagctgttgcaatcccttaagcatgggtgctattaaaaaaatggtggagaagaaaatacctggaatttacgtcttatctttagagattg

SEQ ID NO: 27177 - DNA, 201 bp, Homo sapiens
tgtacacacaggaccgcctggggctaaaggaaatggacaatgcaggacagctagtgtttctggctacagaaggggaccatcttcagttgtctgaagaatgrttttatgcccacatcataccattccttggatgaaacccgtatagttcacaatagagctcagggagcccctaactcttccaaaccacatgggagacagttt

SEQ ID NO: 27178 - DNA, 201 bp, Homo sapiens
ctcttggctgtggctctcctgccatggacctgcgcttctcgggcgctgcagcatctggacccgccggcgccgctgccgttggtgatctggcatgggatggragacagctgttgcaatcccttaagcatgggtgctattaaaaaaatggtggagaagaaaatacctggaatttacgtcttatctttagagattgggaagacc

SEQ ID NO: 27179 - DNA, 201 bp, Homo sapiens; identical to SEQ ID NO: 27156

SEQ ID NO: 27180 - DNA, 201 bp, Homo sapiens; identical to SEQ ID NO: 27157

SEQ ID NO: 27181 - DNA, 201 bp, Homo sapiens
atatggtgttgaatgcaagtttaattaccatggagattgttttacaaacttttgatgtggtcaagttcagttttagaaaagggagtctgttccagatcagkgccagaactgtgcccaggcccaaaggagacaactaactaaagtagtgagatagattctaagggcaaacatttttccaagtcttgccatatttcaagcaaa

SEQ ID NO: 27182 - DNA, 201 bp, Homo sapiens; identical to SEQ ID NO: 27159

SEQ ID NO: 27183 - DNA, 201 bp, Homo sapiens; identical to SEQ ID NO: 27160

SEQ ID NO: 27184 - DNA, 201 bp, Homo sapiens; identical to SEQ ID NO: 27161

SEQ ID NO: 27185 - DNA, 201 bp, Homo sapiens; identical to SEQ ID NO: 27162

SEQ ID NO: 27186 - DNA, 201 bp, Homo sapiens; identical to SEQ ID NO: 27163

SEQ ID NO: 27187 - DNA, 201 bp, Homo sapiens; identical to SEQ ID NO: 27164

SEQ ID NO: 27188 - DNA, 201 bp, Homo sapiens; identical to SEQ ID NO: 27165

SEQ ID NO: 27189 - DNA, 201 bp, Homo sapiens; identical to SEQ ID NO: 27166

SEQ ID NO: 27190 - DNA, 201 bp, Homo sapiens; identical to SEQ ID NO: 27167

SEQ ID NO: 27191 - DNA, 201 bp, Homo sapiens; identical to SEQ ID NO: 27168

SEQ ID NO: 27192 - DNA, 167 bp, Homo sapiens; identical to SEQ ID NO: 27169

SEQ ID NO: 27193 - DNA, 201 bp, Homo sapiens; identical to SEQ ID NO: 27170

SEQ ID NO: 27194 - DNA, 201 bp, Homo sapiens; identical to SEQ ID NO: 27171

SEQ ID NO: 27195 - DNA, 201 bp, Homo sapiens; identical to SEQ ID NO: 27172

SEQ ID NO: 27196 - DNA, 141 bp, Homo sapiens; identical to SEQ ID NO: 27173

SEQ ID NO: 27197 - DNA, 201 bp, Homo sapiens; identical to SEQ ID NO: 27174

SEQ ID NO: 27198 - DNA, 201 bp, Homo sapiens; identical to SEQ ID NO: 27175

SEQ ID NO: 27199 - DNA, 201 bp, Homo sapiens; identical to SEQ ID NO: 27176

SEQ ID NO: 27200 - DNA, 201 bp, Homo sapiens; identical to SEQ ID NO: 27177

SEQ ID NO: 27201 - DNA, 201 bp, Homo sapiens; identical to SEQ ID NO: 27178

SEQ ID NO: 27202 - DNA, 201 bp, Homo sapiens
tccctggacaatggtacatttgcagagtggagtagggtgcagctgaagctaggggcctgcatgtagcagcattctggctgaatctggtacactgcacatggagttcatccacctcagctacttgacagaagacctggtttactacaacaaggtcatgtacatgcggaaactgcttcagaaaatggattgtccaaacggtct

SEQ ID NO: 27203 - DNA, 201 bp, Homo sapiens
tctggcctgctttgctggggtaatgtttgcactaggagaagatggttccagaacagataagtctgtcattatttagagctggggtggaaattgcatatacrtgtcatgagtcatatgacagactgcattaaagctaggtcctgagtcagtcaagtttgatggtgcagtggaggttgtggctgtcaggctgaaaagtattat

SEQ ID NO: 27204 - DNA, 201 bp, Homo sapiens
tggacaatggtacatttgcagagtggagtagggtgcagctgaagctaggggcctgcatgtagcagcattctggctgaatctggtacactgcacatggagtwcatccacctcagctacttgacagaagacctggtttactacaacaaggtcatgtacatgcggaaactgcttcagaaaatggattgtccaaacggtctttat

SEQ ID NO: 27205 - DNA, 201 bp, Homo sapiens
cctggacaatggtacatttgcagagtggagtagggtgcagctgaagctaggggcctgcatgtagcagcattctggctgaatctggtacactgcacatggagttcatccacctcagctacttgacagaagacctggtttactacaacaaggtcatgtacatgcggaaactgcttcagaaaatggattgtccaaacggtcttt

SEQ ID NO: 27206 - DNA, 201 bp, Homo sapiens
catgacaagtccctggaagagacaaaagaaaaattgagaaaaaaagaaaagtcaagcaaggaaatccaagcagaaattcagatagagaaaaatagggtccragaaatgaagacagagaacaagccactgccaccagtccttattccaaactttgtaggcatgaatggtggagacctggaagacaacataaaaaagaaaagg

SEQ ID NO: 27207 - DNA, 201 bp, Homo sapiens
gtcaaagatgtacatttctctactcctacacatggtgatgtagagcagggtgtctttcttgctgaaacacttaaaatatttgtatgtgctgttctccagtsgtgaccttttacctttagactactaggtgtttaatacagaggctcaccctctgcctgtgttacatttagccaacaccacactttcaggtaattctgctgt

SEQ ID NO: 27208 - DNA, 201 bp, Homo sapiens
tcctcaccctcgtgaagctcatggcctgcacaggggcagaggtgccccgagtggcagcacatatgcttgcggctcttgcatcctgcacaacacaggcaccrggctgggttggcagctatcattccacagagccagccccgtccctgatgtcacggagctctgggtctcctgtgccagccaataccgagcagcccaagcttc

SEQ ID NO: 27209 - DNA, 201 bp, Homo sapiens
cctgcacaacacaggcaccaggctgggttggcagctatcattccacagagccagccccgtccctgatgtcacggagctctgggtctcctgtgccagccaayaccgagcagcccaagcttctcgggggccgcggaggaggaggaaggtgcgtccggacaggcgagtgcggcggcgacagcgacagcggctggccgggctcag

SEQ ID NO: 27210 - DNA, 183 bp, Homo sapiens
atgcagggcaaggctgtgaacagacacacctgcgccttcttcctcaccctcgtgaagctcatggcctgcacaggggcagaggkgccccgagtggcagcacatatgcttgcggctcttgcatcctgcacaacacaggcaccaggctgggttggcagctatcattccacagagccagccccgtcc

SEQ ID NO: 27211 - DNA, 201 bp, Homo sapiens
gtgaacagacacacctgcgccttcttcctcaccctcgtgaagctcatggcctgcacaggggcagaggtgccccgagtggcagcacatatgcttgcggctcytgcatcctgcacaacacaggcaccaggctgggttggcagctatcattccacagagccagccccgtccctgatgtcacggagctctgggtctcctgtgcca

SEQ ID NO: 27212 - DNA, 137 bp, Homo sapiens
cggggcaaacttggagaggcgctgcgtcgggggacgrggctacaagccgtcgctgggggcggggcttgcggcccacctgtaggtcccggtgccacctcgtcagtgtcccgagagatccccagaagaacgagagggct

SEQ ID NO: 27213 - DNA, 111 bp, Homo sapiens
cggggcaaacytggagaggcgctgcgtcgggggacggggctacaagccgtcgctgggggcggggcttgcggcccacctgtaggtcccggtgccacctcgtcagtgtcccga

SEQ ID NO: 27214 - DNA, 201 bp, Homo sapiens
cggaggactctgtgaggatgcaggtagaagagggaagcccaccagagccctcttctctctggggaggagctggctccctgaatctccaagacaaacccagmcagccctggggaccttgaatgtgagcaaggggagcagaaaggaggctccagcccacccagggcccctgcagggtctgcacacacaattacaggtcctcat

SEQ ID NO: 27215 - DNA, 152 bp, Homo sapiens
cggggcaaacttggagaggcgctgcgtcgggggacggggctacaagccgtcrctgggggcggggcttgcggcccacctgtaggtcccggtgccacctcgtcagtgtcccgagagatccccagaagaacgagagggctgaacaggggacccca

SEQ ID NO: 27216 - DNA, 201 bp, Homo sapiens
tgccatcatggtgaagaagatgagggagtttggcatcgctgaccctgatgaaattatgtggtttaaaaaactacatttggtcaattttgtggaacctgtgrgcctcaattactccatgtttattcctaccttgctgaatcagggcaccactgctcagaaagagaaatggctgctttcatccaaaggactccagataattgg

SEQ ID NO: 27217 - DNA, 201 bp, Homo sapiens
gatttcacatattctgtcatcttggcataagccattaaaagcttggagattactgtatttggcattaaaaaaaaatgtcacttaggtcagcactcccagaygtagcacagaaaaaccctttgacacaaaccatgtgttctgatttttggttcagaaaatattgaaactgtgagttgttttttttttaacaactgggaaaaa

SEQ ID NO: 27218 - DNA, 201 bp, Homo sapiens
tgtttgtcaggtccttccttgtgggagaagctgctcgggctctgtctaaggcgtgcaccattgccatccgatacagcgctgtgaggcaccagtctgaaatsaagccaggtgaaccagaaccacagattttggattttcaaacccagcagtataaactctttccactcctggccactgcctatgccttccagtttgtgggcg

SEQ ID NO: 27219 - DNA, 201 bp, Homo sapiens
actattcatgctagcatttttccaacgagggaacttattccgcacgggcctactgtaggaccattgtctcgtgtaattaggaattttccatttgaaggatygctaaattgtcacagtagtaggaagtatagggaaacctctcagctgtggcactgttgtagctttggagtgcagagtgtaactctgggacaatcagatttc

SEQ ID NO: 27220 - DNA, 201 bp, Homo sapiens
cgcgggggatttccttcaggggagcatcatgacagagcctcagattacacaagtaaaccagcgtgtaaaggagttactcactctgattcgctcagatgctrttgctttggttgatgcatttgattttcaggatgtgacacttggctctgtgcttggccgctatgatgggaatgtgtatgaaaacttgtttgagtgggctaa

SEQ ID NO: 27221 - DNA, 201 bp, Homo sapiens
tttgctgatggattgcatttatcaaactattcatgctagcatttttccaacgagggaacttattccgcacgggcctactgtaggaccattgtctcgtgtarttaggaattttccatttgaaggattgctaaattgtcacagtagtaggaagtatagggaaacctctcagctgtggcactgttgtagctttggagtgcagag

SEQ ID NO: 27222 - DNA, 201 bp, Homo sapiens
tttatgtctgctgtattctctgtatggaatcagtcagaacgcgggggatttccttcaggggagcatcatgacagagcctcagattacacaagtaaaccagygtgtaaaggagttactcactctgattcgctcagatgctgttgctttggttgatgcatttgattttcaggatgtgacacttggctctgtgcttggccgcta

SEQ ID NO: 27223 - DNA, 201 bp, Homo sapiens; identical to SEQ ID NO: 27218

SEQ ID NO: 27224 - DNA, 201 bp, Homo sapiens; identical to SEQ ID NO: 27220

SEQ ID NO: 27225 - DNA, 201 bp, Homo sapiens; identical to SEQ ID NO: 27222

SEQ ID NO: 27226 - DNA, 201 bp, Homo sapiens; identical to SEQ ID NO: 27216

SEQ ID NO: 27227 - DNA, 201 bp, Homo sapiens; identical to SEQ ID NO: 27218

SEQ ID NO: 27228 - DNA, 201 bp, Homo sapiens; identical to SEQ ID NO: 27220

SEQ ID NO: 27229 - DNA, 201 bp, Homo sapiens; identical to SEQ ID NO: 27222

SEQ ID NO: 27230 - DNA, 201 bp, Homo sapiens; identical to SEQ ID NO: 27217

SEQ ID NO: 27231 - DNA, 201 bp, Homo sapiens; identical to SEQ ID NO: 27218

SEQ ID NO: 27232 - DNA, 201 bp, Homo sapiens; identical to SEQ ID NO: 27219

SEQ ID NO: 27233 - DNA, 201 bp, Homo sapiens; identical to SEQ ID NO: 27220

SEQ ID NO: 27234 - DNA, 201 bp, Homo sapiens; identical to SEQ ID NO: 27221

SEQ ID NO: 27235 - DNA, 201 bp, Homo sapiens; identical to SEQ ID NO: 27222

SEQ ID NO: 27236 - DNA, 201 bp, Homo sapiens
gatgtgccgcaggacgtgtacagcagcgtggccgcgcaggtggaggtgttccgtaggcaggacgcccagcggggcatgcgggtggcacaggtgctggaagscttcatcacccgcaaggtggtgaagcagacggtgatgaccgtggtgtacggggtcacccgctacggtgggcgcctgcagattgagaagcgcctccgggag

SEQ ID NO: 27237 - DNA, 201 bp, Homo sapiens
gccctgtataatggatcattatgctgccctgggccgcgacagcgtgggcgccgcctcggtcaacctggagccctcggatgtgccgcaggacgtgtacagcrgcgtggccgcgcaggtggaggtgttccgtaggcaggacgcccagcggggcatgcgggtggcacaggtgctggaaggcttcatcacccgcaaggtggtgaa

SEQ ID NO: 27238 - DNA, 201 bp, Homo sapiens
aactggaaaatgtgacccataaatttaataagccctgtataatggatcattatgctgccctgggccgcgacagcgtgggcgccgcctcggtcaacctggarccctcggatgtgccgcaggacgtgtacagcagcgtggccgcgcaggtggaggtgttccgtaggcaggacgcccagcggggcatgcgggtggcacaggtgc

SEQ ID NO: 27239 - DNA, 201 bp, Homo sapiens
cggggtcacccgctacggtgggcgcctgcagattgagaagcgcctccgggagctgaacgactttccccaggagttcgtgtgggaggcctcccactacctcktacgccaggtcttcaggagtctacaggagatgttctcggggacccgggccatccagcactggctgatcgagagcgcccacctcgtctcccacacgggctc

SEQ ID NO: 27240 - DNA, 201 bp, Homo sapiens
atttatacctaaaactggaaaatgtgacccataaatttaataagccctgtataatggatcattatgctgccctgggccgcgacagcgtgggcgccgcctcrgtcaacctggagccctcggatgtgccgcaggacgtgtacagcagcgtggccgcgcaggtggaggtgttccgtaggcaggacgcccagcggggcatgcggg

SEQ ID NO: 27241 - DNA, 201 bp, Homo sapiens
caggagttcgtgtgggaggcctcccactacctcgtacgccaggtcttcaggagtctacaggagatgttctcggggacccgggccatccagcactggctgaycgagagcgcccacctcgtctcccacacgggctctgtggtggagtgggtcacccccctgggcgtccccatcatccagccgtatcgcctggagtccaaggtc

SEQ ID NO: 27242 - DNA, 201 bp, Homo sapiens
tccggcctgtgtgcaggaagttcatgcaggatgtgagtagggcgagagtggcagctttggccttccccaggggcctggagcctggggccccaggacacccrcacggcccacatggcacggaggatgctgggatgctgggagccggcggagcctcctttcctcccctcggtcttgtcaaactgggagtcaagcttggtccac

SEQ ID NO: 27243 - DNA, 201 bp, Homo sapiens
tgtcaacggacaggtgacggtcctggtcatgtgccacacgagggagctggccttccagatcagcaaggaatatgagcgcttttccaagtacatgcccagcrtcaaggtgtctgtgttcttcggtggtctctccatcaagaaggatgaagaagtgttgaagaagaactgtccccatgtcgtggtggggaccccgggccgcat

SEQ ID NO: 27244 - DNA, 201 bp, Homo sapiens
atcctcaatgacgtccaggaccggtttgaagttaatgtggcagaacttccagaggaaatcgacatctccacatacatcgagcagagccggtaaccaccacrtgccagagccgcccacccggagccgcccgcatgcagcttcacctcccctttccaggcgccactgttgagaagctagagattgtatgagaataaacttgtt

SEQ ID NO: 27245 - DNA, 201 bp, Homo sapiens
gatgctgggagccggcggagcctcctttcctcccctcggtcttgtcaaactgggagtcaagcttggtccacacctgagtcgggccagagcttacatccagyttttgagcgatgtttactgaggtctggtgcagcaggtcctctgggaagtgtcgcacaaaggagtcgcccactggaaggttctgggcaggcgagatgccca

SEQ ID NO: 27246 - DNA, 201 bp, Homo sapiens
tccaccggggcatggcccaggaggagcgcctgtcacgctatcagcagttcaaggatttccagcggcggatcctggtggccaccaatctgtttggccggggratggacatcgagcgagtcaacatcgtctttaactacgacatgcctgaggactcggacacctacctgcaccgggtggcccgggcgggtcgctttggcacca

SEQ ID NO: 27247 - DNA, 201 bp, Homo sapiens
tgaagaagaactgtccccatgtcgtggtggggaccccgggccgcatcctggcgctcgtgcggaataggagcttcagcctaaagaatgtgaagcactttgtkctggacgagtgtgacaagatgctggagcagctggacatgcggcgggatgtgcaggagatcttccgcctgacaccacacgagaagcagtgcatgatgttca

SEQ ID NO: 27248 - DNA, 201 bp, Homo sapiens; identical to SEQ ID NO: 27243

SEQ ID NO: 27249 - DNA, 201 bp, Homo sapiens; identical to SEQ ID NO: 27244

SEQ ID NO: 27250 - DNA, 201 bp, Homo sapiens; identical to SEQ ID NO: 27246

SEQ ID NO: 27251 - DNA, 201 bp, Homo sapiens; identical to SEQ ID NO: 27247

SEQ ID NO: 27252 - DNA, 201 bp, Homo sapiens
agatgctggagcagctgggtgagtcctctgcccttgcagccccagctgagagtcagtgactaggcgggccccatagcaggcggaaggctcttgagtgggtyacatgggcggccggcaggcggggctcctgtggtgatcttggggaaagctctgctgctggcagagggatgtgctgtttctgagcccgagccgaatgggacc

SEQ ID NO: 27253 - DNA, 201 bp, Homo sapiens; identical to SEQ ID NO: 27245

SEQ ID NO: 27254 - DNA, 201 bp, Homo sapiens
tcagtgcagcgctgcatggccctggcccagctcctcgtggagcagaacttcccggccatcgccatccaccggggcatggcccaggaggagcggtgagtgcragccgcccgccaaggctgcagggagcaccaccaggagcccagtgtctgacggcctccacttgtttctcctgcaccccagcctgtcacgctatcagcagtt

SEQ ID NO: 27255 - DNA, 201 bp, Homo sapiens
gcctccacttgtttctcctgcaccccagcctgtcacgctatcagcagttcaaggatttccagcggcggatcctggtggccaccaatctgtttggccggggratggacatcgagcgagtcaacatcgtctttaactacgacatgcctgaggactcggacacctacctgcaccgggtggcccgggcgggtcgctttggcacca

SEQ ID NO: 27256 - DNA, 201 bp, Homo sapiens; identical to SEQ ID NO: 27242

SEQ ID NO: 27257 - DNA, 201 bp, Homo sapiens
tgtcaacggacaggtgacggtcctggtcatgtgccacacgagggagctggccttccagatcagcaaggaatatgagcgcttttccaagtacatgcccagcrtcaaggtgagtccctcgggccagactggaccaggcgccacttggtttctgcagctttgttagcctcggctctggcccagccagcatttaccaagcttggc

SEQ ID NO: 27258 - DNA, 201 bp, Homo sapiens; identical to SEQ ID NO: 27244

SEQ ID NO: 27259 - DNA, 201 bp, Homo sapiens
gcagcgctgcatggccctggcccagctcctcgtggagcagaacttcccggccatcgccatccaccggggcatggcccaggaggagcggtgagtgcgagccrcccgccaaggctgcagggagcaccaccaggagcccagtgtctgacggcctccacttgtttctcctgcaccccagcctgtcacgctatcagcagttcaagg

SEQ ID NO: 27260 - DNA, 201 bp, Homo sapiens
tgaagaagaactgtccccatgtcgtggtggggaccccgggccgcatcctggcgctcgtgcggaataggagcttcagcctaaagaatgtgaagcactttgtkctggacgagtgtgacaagatgctggagcagctgggtgagtcctctgcccttgcagccccagctgagagtcagtgactaggcgggccccatagcaggcgga

SEQ ID NO: 27261 - DNA, 201 bp, Homo sapiens
ctgaattgacttctatagccatcttttcccttttttggagagtagactagcaaaactcccttttttctcttgccttttttatgcataaatggaggtcaatytgattgtcctgacctactgtataagtaaatttcaaatgtcattactttctctttgttattataatgtgtgattaaatgcttttttaaattgctaagggaa

SEQ ID NO: 27262 - DNA, 201 bp, Homo sapiens
cagttcatgagttgcattgtagcagacaatggacaactgtagtttctgaattgacttctatagccatcttttcccttttttggagagtagactagcaaaaytcccttttttctcttgccttttttatgcataaatggaggtcaatttgattgtcctgacctactgtataagtaaatttcaaatgtcattactttctctttg

SEQ ID NO: 27263 - DNA, 201 bp, Homo sapiens; identical to SEQ ID NO: 27261

SEQ ID NO: 27264 - DNA, 201 bp, Homo sapiens; identical to SEQ ID NO: 27262

SEQ ID NO: 27265 - DNA, 159 bp, Homo sapiens
ttgcttctgttgtccactgattaatcagcctatgtgcctgacactggtcttgcagtacaactggaagccaaaacaaggtggaagatgtcctgaattaagaygttttcaccacattgtattacagagacagccaataaatctactatttgatttcaatat

SEQ ID NO: 27266 - DNA, 201 bp, Homo sapiens
atgtaaaattggcatcatgcctggccatattcacaaaaaaggaaggattggcattgtgtccagatctggcaccctgacttatgaagcagttcaccaaacarcgcaagttggattggggcagtctttgtgcgttggcattggaggtgatccttttaatggaacagattttattgactgcctcgaaatctttttgaacgattc

SEQ ID NO: 27267 - DNA, 201 bp, Homo sapiens
ctggcaaacagggcacctttcacagccagcaggcattggaatatggcaccaaactcgttggaggaaccactccagggaaaggaggccagacacatctgggyttacctgtctttaatactgtgaaggaggccaaagaacagacaggagcaacggcttctgtcatttatgttcctccgccttttgctgctgctgccattaatg

SEQ ID NO: 27268 - DNA, 150 bp, Homo sapiens
gagccgagttattatctgcctctccgataggatgcctctttgtcttcacytgccattcccgctgtttcgtgaagaatcctctgtaaagggaaatttgttcaggcgactgctgtggccaccctctgcctcctccggcctctgcccctggga

SEQ ID NO: 27269 - DNA, 201 bp, Homo sapiens
tccctggggctcctgcttccccatcccggagttcccctgctccccacctccagtcgtcctgccggacctccacctggagctgtcacccccggagtcgccayacagacgtcctgccatggaaccttcccctcccggtgcaccctggggaccgagcccttgacaccacgccctttgctttatcttgctcttgaaattttggcc

SEQ ID NO: 27270 - DNA, 201 bp, Homo sapiens
tgctggcagggaccttgctgctgctggggacggccactgctccctgagtgtcccgtccctggggctcctgcttccccatcccggagttcccctgctccccrcctccagtcgtcctgccggacctccacctggagctgtcacccccggagtcgccacacagacgtcctgccatggaaccttcccctcccggtgcaccctggg

SEQ ID NO: 27271 - DNA, 176 bp, Homo sapiens
catactccatacctgggatttccgcctcgccgctctccgactgcttccagacatgcaggggccctgggtgctgctyctgctgggcctgaggctacagctctccctgggcatcatcccagttgaggaggagaacccggacttctggaaccgccaggcagccgaggccctgggtgccg

SEQ ID NO: 27272 - DNA, 201 bp, Homo sapiens
cggccactgctccctgagtgtcccgtccctggggctcctgcttccccatcccggagttcccctgctccccacctccagtcgtcctgccggacctccacctsgagctgtcacccccggagtcgccacacagacgtcctgccatggaaccttcccctcccggtgcaccctggggaccgagcccttgacaccacgccctttgct

SEQ ID NO: 27273 - DNA, 201 bp, Homo sapiens
cctcgccagccggcgcctacgcccacacggtgaaccgcaactggtactcggatgccgacgtgcctgcctcggcccgccaggaggggtgccaggacatcgcyacgcagctcatctccaacatggacattgatgtgatcctaggtggaggccgaaagtacatgtttcccatggggaccccagaccctgagtacccagatgact

SEQ ID NO: 27274 - DNA, 201 bp, Homo sapiens
cagggaccttgctgctgctggggacggccactgctccctgagtgtcccgtccctggggctcctgcttccccatcccggagttcccctgctccccacctccwgtcgtcctgccggacctccacctggagctgtcacccccggagtcgccacacagacgtcctgccatggaaccttcccctcccggtgcaccctggggaccga

SEQ ID NO: 27275 - DNA, 201 bp, Homo sapiens
tgggcatcatcccagttgaggaggagaacccggacttctggaaccgccaggcagccgaggccctgggtgccgccaagaagctgcagcctgcacagacagcygccaagaacctcatcatcttcctggggatgggggtgtctacggtgacagctgccaggatcctaaaagggcagaagaaggacaaactggggcctgagacct

SEQ ID NO: 27276 - DNA, 201 bp, Homo sapiens
gcgcacctggttcacggcgtgcaggagcagaccttcatagcgcacgtcatggccttcgccgcctgcctggagccctacaccgcctgcgacctggcgccccscgccggcaccaccgacgccgcgcacccggggccgtccgtggtccccgcgttgcttcctctgctggcagggaccttgctgctgctggggacggccactgct

SEQ ID NO: 27277 - DNA, 201 bp, Homo sapiens
gggctcctgcttccccatcccggagttcccctgctccccacctccagtcgtcctgccggacctccacctggagctgtcacccccggagtcgccacacagasgtcctgccatggaaccttcccctcccggtgcaccctggggaccgagcccttgacaccacgccctttgctttatcttgctcttgaaattttggccccaact

SEQ ID NO: 27278 - DNA, 201 bp, Homo sapiens
tggcccctggcaaggcccgggacaggaaggcctacacggtcctcctatacggaaacggtccaggctatgtgctcaaggacggcgcccggccggatgttacsgagagcgagagcgggagccccgagtatcggcagcagtcagcagtgcccctggacggagagacccacgcaggcgaggacgtggcggtgttcgcgcgcggcc

SEQ ID NO: 27279 - DNA, 201 bp, Homo sapiens
tccctgagtgtcccgtccctggggctcctgcttccccatcccggagttcccctgctccccacctccagtcgtcctgccggacctccacctggagctgtcayccccggagtcgccacacagacgtcctgccatggaaccttcccctcccggtgcaccctggggaccgagcccttgacaccacgccctttgctttatcttgct

SEQ ID NO: 27280 - DNA, 201 bp, Homo sapiens
ttcatagcgcacgtcatggccttcgccgcctgcctggagccctacaccgcctgcgacctggcgccccgcgccggcaccaccgacgccgcgcacccggggcsgtccgtggtccccgcgttgcttcctctgctggcagggaccttgctgctgctggggacggccactgctccctgagtgtcccgtccctggggctcctgcttc

SEQ ID NO: 27281 - DNA, 201 bp, Homo sapiens
ggcgcacctggttcacggcgtgcaggagcagaccttcatagcgcacgtcatggccttcgccgcctgcctggagccctacaccgcctgcgacctggcgcccmgcgccggcaccaccgacgccgcgcacccggggccgtccgtggtccccgcgttgcttcctctgctggcagggaccttgctgctgctggggacggccactgc

SEQ ID NO: 27282 - DNA, 201 bp, Homo sapiens
tggagccctacaccgcctgcgacctggcgccccgcgccggcaccaccgacgccgcgcacccggggccgtccgtggtccccgcgttgcttcctctgctggcmgggaccttgctgctgctggggacggccactgctccctgagtgtcccgtccctggggctcctgcttccccatcccggagttcccctgctccccacctccag

SEQ ID NO: 27283 - DNA, 201 bp, Homo sapiens
gggcaacttccagaccattggcttgagtgcagccgcccgctttaaccagtgcaacacgacacgcggcaacgaggtcatctccgtgatgaatcgggccaagmaagcaggaaagtcagtgggagtggtaaccaccacacgggtgcagcatgcctcgccagccggcgcctacgcccacacggtgaaccgcaactggtactcgga

SEQ ID NO: 27284 - DNA, 201 bp, Homo sapiens
ctacaccgcctgcgacctggcgccccgcgccggcaccaccgacgccgcgcacccggggccgtccgtggtccccgcgttgcttcctctgctggcagggaccytgctgctgctggggacggccactgctccctgagtgtcccgtccctggggctcctgcttccccatcccggagttcccctgctccccacctccagtcgtcct

SEQ ID NO: 27285 - DNA, 201 bp, Homo sapiens
gaaattttggccccaactccagggactggggatttgtgcctggcagctgcctgcatttcaggaaaagaggaggctcagaccatccagcccccgcccatatsctgaggtggatcaggcaggctctctccccggggacatgaggcacccatacctaggaccccctgcgccttttttagcttcagtcatggcagcacctgaggg

SEQ ID NO: 27286 - DNA, 201 bp, Homo sapiens
gacctggcgccccgcgccggcaccaccgacgccgcgcacccggggccgtccgtggtccccgcgttgcttcctctgctggcagggaccttgctgctgctggrgacggccactgctccctgagtgtcccgtccctggggctcctgcttccccatcccggagttcccctgctccccacctccagtcgtcctgccggacctccac

SEQ ID NO: 27287 - DNA, 123 bp, Homo sapiens
catactccatacctgggatttcygcctcgccgctctccgactgcttccagacatgcaggggccctgggtgctgctcctgctgggcctgaggctacagctctccctgggcatcatcccagttga

SEQ ID NO: 27288 - DNA, 157 bp, Homo sapiens
catactccatacctgggatttccgcctcgccgctctccgactgcttccagacatgcwggggccctgggtgctgctcctgctgggcctgaggctacagctctccctgggcatcatcccagttgaggaggagaacccggacttctggaaccgccaggca

SEQ ID NO: 27289 - DNA, 201 bp, Homo sapiens
gttgcttcctctgctggcagggaccttgctgctgctggggacggccactgctccctgagtgtcccgtccctggggctcctgcttccccatcccggagttcycctgctccccacctccagtcgtcctgccggacctccacctggagctgtcacccccggagtcgccacacagacgtcctgccatggaaccttcccctcccgg

SEQ ID NO: 27290 - DNA, 201 bp, Homo sapiens; identical to SEQ ID NO: 27269

SEQ ID NO: 27291 - DNA, 201 bp, Homo sapiens; identical to SEQ ID NO: 27270

SEQ ID NO: 27292 - DNA, 176 bp, Homo sapiens; identical to SEQ ID NO: 27271

SEQ ID NO: 27293 - DNA, 201 bp, Homo sapiens; identical to SEQ ID NO: 27272

SEQ ID NO: 27294 - DNA, 201 bp, Homo sapiens; identical to SEQ ID NO: 27273

SEQ ID NO: 27295 - DNA, 201 bp, Homo sapiens; identical to SEQ ID NO: 27274

SEQ ID NO: 27296 - DNA, 201 bp, Homo sapiens
tgggcatcatcccagttgaggaggagaacccggacttctggaaccgccaggcagccgaggccctgggtgccgccaagaagctgcagcctgcacagacagcygccaagaacctcatcatcttcctgggtgacgggatgggggtgtctacggtgacagctgccaggatcctaaaagggcagaagaaggacaaactggggcctg

SEQ ID NO: 27297 - DNA, 201 bp, Homo sapiens; identical to SEQ ID NO: 27276

SEQ ID NO: 27298 - DNA, 201 bp, Homo sapiens; identical to SEQ ID NO: 27277

SEQ ID NO: 27299 - DNA, 201 bp, Homo sapiens; identical to SEQ ID NO: 27278

SEQ ID NO: 27300 - DNA, 201 bp, Homo sapiens; identical to SEQ ID NO: 27279

SEQ ID NO: 27301 - DNA, 201 bp, Homo sapiens; identical to SEQ ID NO: 27280

SEQ ID NO: 27302 - DNA, 201 bp, Homo sapiens; identical to SEQ ID NO: 27281

SEQ ID NO: 27303 - DNA, 201 bp, Homo sapiens; identical to SEQ ID NO: 27282

SEQ ID NO: 27304 - DNA, 201 bp, Homo sapiens; identical to SEQ ID NO: 27283

SEQ ID NO: 27305 - DNA, 201 bp, Homo sapiens; identical to SEQ ID NO: 27284

SEQ ID NO: 27306 - DNA, 201 bp, Homo sapiens; identical to SEQ ID NO: 27285

SEQ ID NO: 27307 - DNA, 201 bp, Homo sapiens; identical to SEQ ID NO: 27286

SEQ ID NO: 27308 - DNA, 123 bp, Homo sapiens; identical to SEQ ID NO: 27287

SEQ ID NO: 27309 - DNA, 157 bp, Homo sapiens; identical to SEQ ID NO: 27288

SEQ ID NO: 27310 - DNA, 201 bp, Homo sapiens; identical to SEQ ID NO: 27289

SEQ ID NO: 27311 - DNA, 176 bp, Homo sapiens; identical to SEQ ID NO: 27271

SEQ ID NO: 27312 - DNA, 201 bp, Homo sapiens
cccgctttaaccagtgcaacacgacacgcggcaacgaggtcatctccgtgatgaatcgggccaagaaagcaggtgagctggggcccgctgtggggtcaggrccaggtgacagacctctatcgcatatcctgacctctatcaccctcaggaaagtcagtgggagtggtaaccaccacacgggtgcagcatgcctcgccagcc

SEQ ID NO: 27313 - DNA, 201 bp, Homo sapiens; identical to SEQ ID NO: 27296

SEQ ID NO: 27314 - DNA, 201 bp, Homo sapiens
gggcaacttccagaccattggcttgagtgcagccgcccgctttaaccagtgcaacacgacacgcggcaacgaggtcatctccgtgatgaatcgggccaagmaagcaggtgagctggggcccgctgtggggtcagggccaggtgacagacctctatcgcatatcctgacctctatcaccctcaggaaagtcagtgggagtgg

SEQ ID NO: 27315 - DNA, 201 bp, Homo sapiens
cgacacgcggcaacgaggtcatctccgtgatgaatcgggccaagaaagcaggtgagctggggcccgctgtggggtcagggccaggtgacagacctctatckcatatcctgacctctatcaccctcaggaaagtcagtgggagtggtaaccaccacacgggtgcagcatgcctcgccagccggcgcctacgcccacacggtg

SEQ ID NO: 27316 - DNA, 157 bp, Homo sapiens; identical to SEQ ID NO: 27288

SEQ ID NO: 27317 - DNA, 123 bp, Homo sapiens; identical to SEQ ID NO: 27287

SEQ ID NO: 27318 - DNA, 201 bp, Homo sapiens
agccagagagtattatgagggaggccgaggacttcatgctccggacagagaaacggcgctgggattagggattgccacttctgagaggatgctgggaatckgcagggggagacggaaattcttggctgcctcgttgagtcttctctgcatcccagccatcacctggatttacctgttttctgggagcttcgaagatggaaa

SEQ ID NO: 27319 - DNA, 201 bp, Homo sapiens
ttgggggacccggaccctcgccgcggcatttggagccgggggcagtcccgaactctgtgcttggcaccgccgctccgagtagggcagcgcctgccgggacyctgacccggaccccctgcgcctcgtaggcggcggcgccgccgcgccaccctgttcttccgtgtctccctctgcctggcggcagtcacggccaagaaccta

SEQ ID NO: 27320 - DNA, 201 bp, Homo sapiens
gccagagagtattatgagggaggccgaggacttcatgctccggacagagaaacggcgctgggattagggattgccacttctgagaggatgctgggaatctscagggggagacggaaattcttggctgcctcgttgagtcttctctgcatcccagccatcacctggatttacctgttttctgggagcttcgaagatggaaag

SEQ ID NO: 27321 - DNA, 201 bp, Homo sapiens
ccagagagtattatgagggaggccgaggacttcatgctccggacagagaaacggcgctgggattagggattgccacttctgagaggatgctgggaatctgsagggggagacggaaattcttggctgcctcgttgagtcttctctgcatcccagccatcacctggatttacctgttttctgggagcttcgaagatggaaagc

SEQ ID NO: 27322 - DNA, 201 bp, Homo sapiens
cttcagtgcacacacaaggtacgaacctctcaggcctttcgaagaactttcataattcatgaaagcccagttctgaagattcacgtatccatctggagacrtacaggaagaaagtgattgggttcctctggttcttgcctgcttcactgtggatgggaagaggtgacaacctcagtctccctttgggacctgtccaagggt

SEQ ID NO: 27323 - DNA, 201 bp, Homo sapiens
acgagggctggctgttttacaccggtcacattttctattggcagtgactgattcatgggaaagggctttgaaggaactacttcagtgcacacacaaggtamgaacctctcaggcctttcgaagaactttcataattcatgaaagcccagttctgaagattcacgtatccatctggagacctacaggaagaaagtgattggg

SEQ ID NO: 27324 - DNA, 201 bp, Homo sapiens
attcagatgcatcagccgtttgtaaagcacctgtcgtgagccagagagtattatgagggaggccgaggacttcatgctccggacagagaaacggcgctggrattagggattgccacttctgagaggatgctgggaatctgcagggggagacggaaattcttggctgcctcgttgagtcttctctgcatcccagccatcacc

SEQ ID NO: 27325 - DNA, 201 bp, Homo sapiens
cagtgaggctgatgtcaacagtgaaaacctccagaagcagctgtctgagctggacgaggacgacctgtgctatgagttccggcgagagcgcttcactgtcyaccgcacccacctgtacttcctgcactacgagtatgagcctgcagcagacagcacggacgtcaccctggtcgctcagctgtccatggacaggctccagat

SEQ ID NO: 27326 - DNA, 201 bp, Homo sapiens
tcgaagatggaaagcccgtgtctctgtcaccgctggagtcccaggcacacagccccaggtacacggcctccagccagcgggagcgcgagagcctggaggtkcgcatgcgcgaggtggaggaggagaaccgcgccctccgcaggcagctcagcctggcccagggccgagccccatcccatcgccgaggcaaccactccaaga

SEQ ID NO: 27327 - DNA, 201 bp, Homo sapiens; identical to SEQ ID NO: 27319

SEQ ID NO: 27328 - DNA, 201 bp, Homo sapiens
cgaagatggaaagcccgtgtctctgtcaccgctggagtcccaggcacacagccccaggtacacggcctccagccagcgggagcgcgagagcctggaggtgsgcatgcgcgaggtggaggaggagaaccgcgccctccgcaggcagctcagcctggcccagggccgagccccatcccatcgccgaggcaaccactccaagac

SEQ ID NO: 27329 - DNA, 201 bp, Homo sapiens
gaagatggaaagcccgtgtctctgtcaccgctggagtcccaggcacacagccccaggtacacggcctccagccagcgggagcgcgagagcctggaggtgcscatgcgcgaggtggaggaggagaaccgcgccctccgcaggcagctcagcctggcccagggccgagccccatcccatcgccgaggcaaccactccaagacc

SEQ ID NO: 27330 - DNA, 201 bp, Homo sapiens
agaaccttcgggctggcatcgtggcaggcaacagctccgagtgtgggcagcagccggtcgtggagaaatgcgagacaatccacgttgctattgtctgcgcyggatacaatgccagccgggatgtcgtcaccctggtcaaatccgtcctgttccatagacggaaccctctgcacttccaccttattgctgactccattgcgg

SEQ ID NO: 27331 - DNA, 201 bp, Homo sapiens
cctgtccaagggtaggcaaccaccttcaccttcacacagattgaggagacactggactttttacccattttctttaatcttcaatattaatattgtgtttrcattgatgagaacaagagttaatgccctaccctctgctgggctgtttgtattgagttgcaatgtgaccagcgaaagctgcatttaataaatgaaagtaca

SEQ ID NO: 27332 - DNA, 201 bp, Homo sapiens
gcctggccctctacctgtcagacgccgaggcccagcagttcctccgctacgcacagggctctgaggtgcttatgagccgccacaacgtgggctaccacatygtgtacaaggagggccagttctaccccgtgaacctgctgcgcaacgtggccatgaagcacatcagcactccctacatgttcctgtctgacattgacttcc

SEQ ID NO: 27333 - DNA, 201 bp, Homo sapiens
gaaagtgattgggttcctctggttcttgcctgcttcactgtggatgggaagaggtgacaacctcagtctccctttgggacctgtccaagggtaggcaaccmccttcaccttcacacagattgaggagacactggactttttacccattttctttaatcttcaatattaatattgtgtttacattgatgagaacaagagtta

SEQ ID NO: 27334 - DNA, 201 bp, Homo sapiens
aaaggccacgcacccacaaacttcgccaagtggcggaccgccaccacgccttaccgggttgagtgggaggccgattttgagccgtatgttgttgtgagacrtgactgcccggagtacgaccggaggtttgtaggctttggctggaacaaagtggctcatatcatggagctggatgtgcaggagtatgagttcattgtgctg

SEQ ID NO: 27335 - DNA, 201 bp, Homo sapiens
cccagccatcacctggatttacctgttttctgggagcttcgaagatggaaagcccgtgtctctgtcaccgctggagtcccaggcacacagccccaggtacrcggcctccagccagcgggagcgcgagagcctggaggtgcgcatgcgcgaggtggaggaggagaaccgcgccctccgcaggcagctcagcctggcccaggg

SEQ ID NO: 27336 - DNA, 201 bp, Homo sapiens
gcagggggagacggaaattcttggctgcctcgttgagtcttctctgcatcccagccatcacctggatttacctgttttctgggagcttcgaagatggaaarcccgtgtctctgtcaccgctggagtcccaggcacacagccccaggtacacggcctccagccagcgggagcgcgagagcctggaggtgcgcatgcgcgagg

SEQ ID NO: 27337 - DNA, 201 bp, Homo sapiens
acaggctccagatgctggaggccatctgcaagcactgggaggggcccatcagcctggccctctacctgtcagacgccgaggcccagcagttcctccgctaygcacagggctctgaggtgcttatgagccgccacaacgtgggctaccacatcgtgtacaaggagggccagttctaccccgtgaacctgctgcgcaacgtgg

SEQ ID NO: 27338 - DNA, 201 bp, Homo sapiens
ccgtcctgttccatagacggaaccctctgcacttccaccttattgctgactccattgcggagcagatcctggccacgctcttccagacctggatggtgccygctgtgcgtgtggacttctacaatgcagacgagctcaagtctgaagtttcctggatccccaataaacattactctgggatttatggtctgatgaagcttg

SEQ ID NO: 27339 - DNA, 201 bp, Homo sapiens
cagccatcacctggatttacctgttttctgggagcttcgaagatggaaagcccgtgtctctgtcaccgctggagtcccaggcacacagccccaggtacacsgcctccagccagcgggagcgcgagagcctggaggtgcgcatgcgcgaggtggaggaggagaaccgcgccctccgcaggcagctcagcctggcccagggcc

SEQ ID NO: 27340 - DNA, 201 bp, Homo sapiens
tcaggaagtctgtcatccagctcgatcttgccaacaccaagaaagcaatgattgtccccgcgttcgagacactgcgctaccggctgtccttccccaagtcraaagcggagttgctgtcaatgctggacatggggaccctcttcacattcaggtaccacgtctggacgaaaggccacgcacccacaaacttcgccaagtggc

SEQ ID NO: 27341 - DNA, 201 bp, Homo sapiens
gcttcctaaaccaggagagctcaggtataccctcctcactggagacccgggaagccctggtgcagtatgtcaccatggtgatattcacctgctcagccaarcatgcggctgtcagtgcagggcaggtgaggaaaggccagcgcccgaggtggcaggctggaggtgacccagctcctcagcctcattctgccctctcggcct

SEQ ID NO: 27342 - DNA, 201 bp, Homo sapiens
agcagctgaactattctctcctgtgtctgcctgaggatatccggacccgaggagttgaagacatcccaggctactactaccgtgatgatgggatgcagatytggggtgcagtggaacgctttgtctctgaaatcatcggtatctactacccaagtgatgagtctgtccaagatgacagagagctccaggcctgggtcagag

SEQ ID NO: 27343 - DNA, 201 bp, Homo sapiens
gatgtcatccttgctctctggttgctgagcaaggagcctggagaccaaaggcccctgggcacctatccggatgagcacttcacagaggaggcccctcggcrgagcatcgccaccttccagagccgcctggcccagatctcgaggggcatccaggagcggaaccggggcctggtgctgccctacacctacctagaccctccc

SEQ ID NO: 27344 - DNA, 201 bp, Homo sapiens
ccgcctggcccagatctcgaggggcatccaggagcggaaccggggcctggtgctgccctacacctacctagaccctcccctcatcgagaacagcgtctccrtctaaatcccaggggaacacaggcccagatgacatccctttgaccacatcgctctaggataactggcacccagagaaaaggactcctcagaaaaaacagg

SEQ ID NO: 27345 - DNA, 201 bp, Homo sapiens
ccaagggcttcctaaaccaggagagctcaggtataccctcctcactggagacccgggaagccctggtgcagtatgtcaccatggtgatattcacctgctcmgccaagcatgcggctgtcagtgcagggcaggtgaggaaaggccagcgcccgaggtggcaggctggaggtgacccagctcctcagcctcattctgccctct

SEQ ID NO: 27346 - DNA, 201 bp, Homo sapiens
ctcctgtgtctgcctgaggatatccggacccgaggagttgaagacatcccaggctactactaccgtgatgatgggatgcagatttggggtgcagtggaacrctttgtctctgaaatcatcggtatctactacccaagtgatgagtctgtccaagatgacagagagctccaggcctgggtcagagagatcttctccaagggc

SEQ ID NO: 27347 - DNA, 201 bp, Homo sapiens
tatccggatgagcacttcacagaggaggcccctcggcggagcatcgccaccttccagagccgcctggcccagatctcgaggggcatccaggagcggaaccrgggcctggtgctgccctacacctacctagaccctcccctcatcgagaacagcgtctccatctaaatcccaggggaacacaggcccagatgacatcccttt

SEQ ID NO: 27348 - DNA, 201 bp, Homo sapiens
cttcaccctggctaccctgcgtcagctgccccactgccaccctctcttcaagctgctgatcccgcacacccgatacaccctgcacatcaacacactcgccmgggagctgcttatcgtgccagggcaggtggtggacaggtccacaggcatcggcattgaaggcttctctgagttgatacagaggaacatgaagcagctgaa

SEQ ID NO: 27349 - DNA, 201 bp, Homo sapiens
ctctgtaactcacccccaccaccatacacacacacaaaaacagaaacaaaatcaaaacagagaaagcagaaaatctaccaagaacagagtctcaggacagwaccactgagtcttttggaggctccaagcctcaaagtgcccgcagagcccaccttgagggttttgctagttggttttgttttgccccaactcaaggacagc

SEQ ID NO: 27350 - DNA, 201 bp, Homo sapiens
accgcaaggggctctggaggagtctgaatgagatgaaaaggatcttcaacttccggaggaccccagcagctgagcacgcatttgagcactggcaggaggaygccttcttcgcctcccagttcctgaatggtctcaaccctgtcctgatccgccgctgtcactacctcccaaagaacttccccgtcactgatgccatggtgg

SEQ ID NO: 27351 - DNA, 201 bp, Homo sapiens
agatgacatccctttgaccacatcgctctaggataactggcacccagagaaaaggactcctcagaaaaaacaggcccccatgtgcctctcctgggacaacmagactctgtaactcacccccaccaccatacacacacacaaaaacagaaacaaaatcaaaacagagaaagcagaaaatctaccaagaacagagtctcagga

SEQ ID NO: 27352 - DNA, 201 bp, Homo sapiens
ctctcggccttcagtttgactcctgtgcttggatgcccaacctgccacccagcatgcagctgccaccacccacctccaaaggcctggcaacatgcgagggyttcatagccaccctcccacctgtcaatgccacatgtgatgtcatccttgctctctggttgctgagcaaggagcctggagaccaaaggcccctgggcacct

SEQ ID NO: 27353 - DNA, 201 bp, Homo sapiens
gtgatgatgggatgcagatttggggtataccctcctcactggagacccgggaagccctggtgcagtatgtcaccatggtgatattcacctgctcagccaarcatgcggctgtcagtgcagggcagtttgactcctgtgcttggatgcccaacctgccacccagcatgcagctgccaccacccacctccaaaggcctggcaa

SEQ ID NO: 27354 - DNA, 201 bp, Homo sapiens
agcagctgaactattctctcctgtgtctgcctgaggatatccggacccgaggagttgaagacatcccaggctactactaccgtgatgatgggatgcagatytggggtataccctcctcactggagacccgggaagccctggtgcagtatgtcaccatggtgatattcacctgctcagccaagcatgcggctgtcagtgcag

SEQ ID NO: 27355 - DNA, 201 bp, Homo sapiens; identical to SEQ ID NO: 27343

SEQ ID NO: 27356 - DNA, 201 bp, Homo sapiens; identical to SEQ ID NO: 27344

SEQ ID NO: 27357 - DNA, 201 bp, Homo sapiens
actaccgtgatgatgggatgcagatttggggtataccctcctcactggagacccgggaagccctggtgcagtatgtcaccatggtgatattcacctgctcmgccaagcatgcggctgtcagtgcagggcagtttgactcctgtgcttggatgcccaacctgccacccagcatgcagctgccaccacccacctccaaaggcc

SEQ ID NO: 27358 - DNA, 201 bp, Homo sapiens; identical to SEQ ID NO: 27347

SEQ ID NO: 27359 - DNA, 201 bp, Homo sapiens; identical to SEQ ID NO: 27349

SEQ ID NO: 27360 - DNA, 201 bp, Homo sapiens; identical to SEQ ID NO: 27350

SEQ ID NO: 27361 - DNA, 201 bp, Homo sapiens; identical to SEQ ID NO: 27351

SEQ ID NO: 27362 - DNA, 201 bp, Homo sapiens
tcagtgcagggcagtttgactcctgtgcttggatgcccaacctgccacccagcatgcagctgccaccacccacctccaaaggcctggcaacatgcgagggyttcatagccaccctcccacctgtcaatgccacatgtgatgtcatccttgctctctggttgctgagcaaggagcctggagaccaaaggcccctgggcacct

SEQ ID NO: 27363 - DNA, 201 bp, Homo sapiens
gcttcctaaaccaggagagctcaggtataccctcctcactggagacccgggaagccctggtgcagtatgtcaccatggtgatattcacctgctcagccaarcatgcggctgtcagtgcagggcagtttgactcctgtgcttggatgcccaacctgccacccagcatgcagctgccaccacccacctccaaaggcctggcaa

SEQ ID NO: 27364 - DNA, 201 bp, Homo sapiens; identical to SEQ ID NO: 27342

SEQ ID NO: 27365 - DNA, 201 bp, Homo sapiens; identical to SEQ ID NO: 27343

SEQ ID NO: 27366 - DNA, 201 bp, Homo sapiens; identical to SEQ ID NO: 27344

SEQ ID NO: 27367 - DNA, 201 bp, Homo sapiens
ccaagggcttcctaaaccaggagagctcaggtataccctcctcactggagacccgggaagccctggtgcagtatgtcaccatggtgatattcacctgctcmgccaagcatgcggctgtcagtgcagggcagtttgactcctgtgcttggatgcccaacctgccacccagcatgcagctgccaccacccacctccaaaggcc

SEQ ID NO: 27368 - DNA, 201 bp, Homo sapiens; identical to SEQ ID NO: 27347

SEQ ID NO: 27369 - DNA, 201 bp, Homo sapiens; identical to SEQ ID NO: 27346

SEQ ID NO: 27370 - DNA, 201 bp, Homo sapiens; identical to SEQ ID NO: 27348

SEQ ID NO: 27371 - DNA, 201 bp, Homo sapiens
ctctgtaactcacccccaccaccatacacacacacaaaaacagaaacaaaatcaaaacagagaaagcagaaaatctaccaagaacagagtctcaggacagwaccactgagtcttttggaggctccaagcctcaaagtgcccgcagagcccaccttgagggttttgctagttggttttgttttgcgttttacagccgtgggg

SEQ ID NO: 27372 - DNA, 201 bp, Homo sapiens; identical to SEQ ID NO: 27350

SEQ ID NO: 27373 - DNA, 201 bp, Homo sapiens
tccaagcctcaaagtgcccgcagagcccaccttgagggttttgctagttggttttgttttgcgttttacagccgtggggggaagcacataatcccgccccrgggcccactagcatccactgattggaccttatggtcacccaactcaaggacagccaccaagaagtggctgccaaagagactgggcgcagtggctcatgcc

SEQ ID NO: 27374 - DNA, 201 bp, Homo sapiens; identical to SEQ ID NO: 27351

SEQ ID NO: 27375 - DNA, 201 bp, Homo sapiens; identical to SEQ ID NO: 27362

SEQ ID NO: 27376 - DNA, 201 bp, Homo sapiens; identical to SEQ ID NO: 27363

SEQ ID NO: 27377 - DNA, 201 bp, Homo sapiens; identical to SEQ ID NO: 27342

SEQ ID NO: 27378 - DNA, 201 bp, Homo sapiens; identical to SEQ ID NO: 27343

SEQ ID NO: 27379 - DNA, 201 bp, Homo sapiens; identical to SEQ ID NO: 27344

SEQ ID NO: 27380 - DNA, 201 bp, Homo sapiens; identical to SEQ ID NO: 27367

SEQ ID NO: 27381 - DNA, 201 bp, Homo sapiens; identical to SEQ ID NO: 27347

SEQ ID NO: 27382 - DNA, 201 bp, Homo sapiens; identical to SEQ ID NO: 27346

SEQ ID NO: 27383 - DNA, 201 bp, Homo sapiens; identical to SEQ ID NO: 27349

SEQ ID NO: 27384 - DNA, 201 bp, Homo sapiens; identical to SEQ ID NO: 27350

SEQ ID NO: 27385 - DNA, 201 bp, Homo sapiens; identical to SEQ ID NO: 27351

SEQ ID NO: 27386 - DNA, 201 bp, Homo sapiens; identical to SEQ ID NO: 27362

SEQ ID NO: 27387 - DNA, 201 bp, Homo sapiens; identical to SEQ ID NO: 27363

SEQ ID NO: 27388 - DNA, 201 bp, Homo sapiens; identical to SEQ ID NO: 27342

SEQ ID NO: 27389 - DNA, 201 bp, Homo sapiens; identical to SEQ ID NO: 27343

SEQ ID NO: 27390 - DNA, 201 bp, Homo sapiens; identical to SEQ ID NO: 27344

SEQ ID NO: 27391 - DNA, 201 bp, Homo sapiens; identical to SEQ ID NO: 27367

SEQ ID NO: 27392 - DNA, 201 bp, Homo sapiens; identical to SEQ ID NO: 27347

SEQ ID NO: 27393 - DNA, 201 bp, Homo sapiens; identical to SEQ ID NO: 27346

SEQ ID NO: 27394 - DNA, 201 bp, Homo sapiens; identical to SEQ ID NO: 27348

SEQ ID NO: 27395 - DNA, 201 bp, Homo sapiens; identical to SEQ ID NO: 27349

SEQ ID NO: 27396 - DNA, 201 bp, Homo sapiens; identical to SEQ ID NO: 27350

SEQ ID NO: 27397 - DNA, 201 bp, Homo sapiens; identical to SEQ ID NO: 27351

SEQ ID NO: 27398 - DNA, 201 bp, Homo sapiens; identical to SEQ ID NO: 27362

SEQ ID NO: 27399 - DNA, 201 bp, Homo sapiens
ctatggccctctaccagagcatgggcttcaagaagacgggccagtccttcttctgtgtgtgggccaggctagtggctcttcatacagttcatttcatctaycacctcccttcttctaaggtagggagtctgtgatctctttctgtgtgtattggtcagaatagaatccattcagctgtagcagcaagcaatccccaacctt

SEQ ID NO: 27400 - DNA, 201 bp, Homo sapiens
agaagacgggccagtccttcttctgtgtgtgggccaggctagtggctcttcatacagttcatttcatctaccacctcccttcttctaaggtagggagtctrtgatctctttctgtgtgtattggtcagaatagaatccattcagctgtagcagcaagcaatccccaacctttcactgcaatgacctttcaatgcaataaaa

SEQ ID NO: 27401 - DNA, 201 bp, Homo sapiens
gacaccggcaccatccagctctctgctatggccctctaccagagcatgggcttcaagaagacgggccagtccttcttctgtgtgtgggccaggctagtggmtcttcatacagttcatttcatctaccacctcccttcttctaaggtagggagtctgtgatctctttctgtgtgtattggtcagaatagaatccattcagct

SEQ ID NO: 27402 - DNA, 201 bp, Homo sapiens
cttcaagaagacgggccagtccttcttctgtgtgtgggccaggctagtggctcttcatacagttcatttcatctaccacctcccttcttctaaggtagggmgtctgtgatctctttctgtgtgtattggtcagaatagaatccattcagctgtagcagcaagcaatccccaacctttcactgcaatgacctttcaatgcaa

SEQ ID NO: 27403 - DNA, 201 bp, Homo sapiens
atgacattgtgcacagacatgtctgacattaccaaatcctacctgagtgagcgtggctcctgcttctgggtggctgagtctgaagagaaggtggtgggcayggtaggagctctgcctgttgatgatcccaccttgagggagaagcggttgcagctgtttcatctctttgtggacagtgagcaccgtcgtcaggggatagca

SEQ ID NO: 27404 - DNA, 201 bp, Homo sapiens
tcctggacaccggcaccatccagctctctgctatggccctctaccagagcatgggcttcaagaagacgggccagtccttcttctgtgtgtgggccaggctrgtggctcttcatacagttcatttcatctaccacctcccttcttctaaggtagggagtctgtgatctctttctgtgtgtattggtcagaatagaatccatt

SEQ ID NO: 27405 - DNA, 201 bp, Homo sapiens
atgggcttcaagaagacgggccagtccttcttctgtgtgtgggccaggctagtggctcttcatacagttcatttcatctaccacctcccttcttctaaggyagggagtctgtgatctctttctgtgtgtattggtcagaatagaatccattcagctgtagcagcaagcaatccccaacctttcactgcaatgacctttcaa

SEQ ID NO: 27406 - DNA, 201 bp, Homo sapiens
tggctcttcatacagttcatttcatctaccacctcccttcttctaaggtagggagtctgtgatctctttctgtgtgtattggtcagaatagaatccattcrgctgtagcagcaagcaatccccaacctttcactgcaatgacctttcaatgcaataaaagcttattgtccattcacatctgagtcccatgtgattgcttgt

SEQ ID NO: 27407 - DNA, 201 bp, Homo sapiens
gagcatgggcttcaagaagacgggccagtccttcttctgtgtgtgggccaggctagtggctcttcatacagttcatttcatctaccacctcccttcttctmaggtagggagtctgtgatctctttctgtgtgtattggtcagaatagaatccattcagctgtagcagcaagcaatccccaacctttcactgcaatgacctt

SEQ ID NO: 27408 - DNA, 201 bp, Homo sapiens
ccttcttctgtgtgtgggccaggctagtggctcttcatacagttcatttcatctaccacctcccttcttctaaggtagggagtctgtgatctctttctgtstgtattggtcagaatagaatccattcagctgtagcagcaagcaatccccaacctttcactgcaatgacctttcaatgcaataaaagcttattgtccattc

SEQ ID NO: 27409 - DNA, 201 bp, Homo sapiens
ccagagcatgggcttcaagaagacgggccagtccttcttctgtgtgtgggccaggctagtggctcttcatacagttcatttcatctaccacctcccttctkctaaggtagggagtctgtgatctctttctgtgtgtattggtcagaatagaatccattcagctgtagcagcaagcaatccccaacctttcactgcaatgac

SEQ ID NO: 27410 - DNA, 201 bp, Homo sapiens
ggacagtgagcaccgtcgtcaggggatagcaaaagccctggtcaggactgtcctccagtttgcccgggaccagggctacagtgaagttatcctggacaccrgcaccatccagctctctgctatggccctctaccagagcatgggcttcaagaagacgggccagtccttcttctgtgtgtgggccaggctagtggctcttca

SEQ ID NO: 27411 - DNA, 201 bp, Homo sapiens
agtgagcaccgtcgtcaggggatagcaaaagccctggtcaggactgtcctccagtttgcccgggaccagggctacagtgaagttatcctggacaccggcamcatccagctctctgctatggccctctaccagagcatgggcttcaagaagacgggccagtccttcttctgtgtgtgggccaggctagtggctcttcataca

SEQ ID NO: 27412 - DNA, 201 bp, Homo sapiens
cttccctgccctgtggttccttgccaaaaaaccctggacggagtatgtggacatgacattgtgcacagacatgtctgacattaccaaatcctacctgagtragcgtggctcctgcttctgggtggctgagtctgaagagaaggtggtgggcatggtaggagctctgcctgttgatgatcccaccttgagggagaagcggtt

SEQ ID NO: 27413 - DNA, 201 bp, Homo sapiens
atagcaaaagccctggtcaggactgtcctccagtttgcccgggaccagggctacagtgaagttatcctggacaccggcaccatccagctctctgctatggscctctaccagagcatgggcttcaagaagacgggccagtccttcttctgtgtgtgggccaggctagtggctcttcatacagttcatttcatctaccacctc

SEQ ID NO: 27414 - DNA, 201 bp, Homo sapiens
ggtcaggactgtcctccagtttgcccgggaccagggctacagtgaagttatcctggacaccggcaccatccagctctctgctatggccctctaccagagcwtgggcttcaagaagacgggccagtccttcttctgtgtgtgggccaggctagtggctcttcatacagttcatttcatctaccacctcccttcttctaaggt

SEQ ID NO: 27415 - DNA, 201 bp, Homo sapiens
tagaatccattcagctgtagcagcaagcaatccccaacctttcactgcaatgacctttcaatgcaataaaagcttattgtccattcacatctgagtcccaygtgattgcttgtggggtagcttctgggtttctgcttcattcagtcttcttgattcccatctgtttcatttttctagtgccagcataatgttgcataagaa

SEQ ID NO: 27416 - DNA, 201 bp, Homo sapiens
ggctacagtgaagttatcctggacaccggcaccatccagctctctgctatggccctctaccagagcatgggcttcaagaagacgggccagtccttcttctrtgtgtgggccaggctagtggctcttcatacagttcatttcatctaccacctcccttcttctaaggtagggagtctgtgatctctttctgtgtgtattggt

SEQ ID NO: 27417 - DNA, 201 bp, Homo sapiens
ccacctcccttcttctaaggtagggagtctgtgatctctttctgtgtgtattggtcagaatagaatccattcagctgtagcagcaagcaatccccaacctytcactgcaatgacctttcaatgcaataaaagcttattgtccattcacatctgagtcccatgtgattgcttgtggggtagcttctgggtttctgcttcatt

SEQ ID NO: 27418 - DNA, 201 bp, Homo sapiens
acctcccttcttctaaggtagggagtctgtgatctctttctgtgtgtattggtcagaatagaatccattcagctgtagcagcaagcaatccccaacctttsactgcaatgacctttcaatgcaataaaagcttattgtccattcacatctgagtcccatgtgattgcttgtggggtagcttctgggtttctgcttcattca

SEQ ID NO: 27419 - DNA, 201 bp, Homo sapiens
ccaggagagcgaccgccagtgggttgtgggcttgctctcccgggggatggccgagcatgccccagccaccttccggcaattgctgaagctgcctcgaaccstcatactcttacttggggggcccctcgccctactcctggtctctggatcctggcttctagccctcgtgttcagcatcagcctcttccctgccctgtggtt

SEQ ID NO: 27420 - DNA, 162 bp, Homo sapiens
aatgacctttcaatgcaataaaagcttattgtccattcacatctgagtcccatgtgattgcttgtggggtagcttctgggtttctgcttcattcagtcttyttgattcccatctgtttcatttttctagtgccagcataatgttgcataagaacaaccacca

SEQ ID NO: 27421 - DNA, 201 bp, Homo sapiens
tgggtggctgagtctgaagagaaggtggtgggcatggtaggagctctgcctgttgatgatcccaccttgagggagaagcggttgcagctgtttcatctctytgtggacagtgagcaccgtcgtcaggggatagcaaaagccctggtcaggactgtcctccagtttgcccgggaccagggctacagtgaagttatcctggac

SEQ ID NO: 27422 - DNA, 201 bp, Homo sapiens
acgggccagtccttcttctgtgtgtgggccaggctagtggctcttcatacagttcatttcatctaccacctcccttcttctaaggtagggagtctgtgatytctttctgtgtgtattggtcagaatagaatccattcagctgtagcagcaagcaatccccaacctttcactgcaatgacctttcaatgcaataaaagctta

SEQ ID NO: 27423 - DNA, 201 bp, Homo sapiens
tgggtgggtgaatctgaagagaaggtggtgggcacagtaggagctctgcccgttgatgatcccaccttgagggagaagcggttgcagctgtttcatctctstgtggacaatgagcaccgtggtcaggggatagcaaaagccctggtcaggactgtcctccagtttgcccgggactagggctacagtgaagttgtcctggac

SEQ ID NO: 27424 - DNA, 201 bp, Homo sapiens
tggactcagtgacttcagacacagaagtctgtccatggctccttatcacatccgcaaataccaggagagcgaccgcaagtaggtcgtgggcttgctctccsgggggatggccgaacacgccccagccaccttccggcgattactgaagctgcctcgaaccctcatactcttacttgggggggcccttgccctactcctggt

SEQ ID NO: 27425 - DNA, 201 bp, Homo sapiens
gcttgggcttcaagaagacgggccagtccttcttccacgtgtgggccaggctggtggatcttcatacagttcatttcatctatcacctcccttctgctcargcagggcgtctatgatttctttccttctgtattggtcagaatagaatccattcggctgtagcagcaagcaatccccaacctctgactgcaatgacctttc

SEQ ID NO: 27426 - DNA, 201 bp, Homo sapiens
aaccctggacgcggtatgtagacatagcattgcgcacagacatgtctgacatcaccaaatcctacctgagtgagtgtggctcctgcttctgggtgggtgartctgaagagaaggtggtgggcacagtaggagctctgcccgttgatgatcccaccttgagggagaagcggttgcagctgtttcatctctctgtggacaatg

SEQ ID NO: 27427 - DNA, 201 bp, Homo sapiens
gaagcggttgcagctgtttcatctctctgtggacaatgagcaccgtggtcaggggatagcaaaagccctggtcaggactgtcctccagtttgcccgggacyagggctacagtgaagttgtcctggacaccagcaacatccagctctctgccatgggcctctaccagagcttgggcttcaagaagacgggccagtccttctt

SEQ ID NO: 27428 - DNA, 201 bp, Homo sapiens
aaaaaaccctggacgcggtatgtagacatagcattgcgcacagacatgtctgacatcaccaaatcctacctgagtgagtgtggctcctgcttctgggtggstgaatctgaagagaaggtggtgggcacagtaggagctctgcccgttgatgatcccaccttgagggagaagcggttgcagctgtttcatctctctgtggac

SEQ ID NO: 27429 - DNA, 201 bp, Homo sapiens
tgtagacatagcattgcgcacagacatgtctgacatcaccaaatcctacctgagtgagtgtggctcctgcttctgggtgggtgaatctgaagagaaggtgktgggcacagtaggagctctgcccgttgatgatcccaccttgagggagaagcggttgcagctgtttcatctctctgtggacaatgagcaccgtggtcaggg

SEQ ID NO: 27430 - DNA, 201 bp, Homo sapiens
catgtctgacatcaccaaatcctacctgagtgagtgtggctcctgcttctgggtgggtgaatctgaagagaaggtggtgggcacagtaggagctctgcccrttgatgatcccaccttgagggagaagcggttgcagctgtttcatctctctgtggacaatgagcaccgtggtcaggggatagcaaaagccctggtcaggac

SEQ ID NO: 27431 - DNA, 160 bp, Homo sapiens
ctggactcagtgacttcagacacagaagtctgtccatggctccttatcacatccgcaaayaccaggagagcgaccgcaagtaggtcgtgggcttgctctcccgggggatggccgaacacgccccagccaccttccggcgattactgaagctgcctcgaac

SEQ ID NO: 27432 - DNA, 201 bp, Homo sapiens
gtccaggacaacttcactgtagccctagtcccgggcaaactggaggacagtcctgaccagggcttttgctatcccctgaccacggtgctcattgtccacasagagatgaaacagctgcaaccgcttctccctcaaggtgggatcatcaacgggcagagctcctactgtgcccaccaccttctcttcagattcacccaccca

SEQ ID NO: 27433 - DNA, 201 bp, Homo sapiens
aaaaagaaggaaaacatgctcaagactcatgaccctggcatctcccggttggaaccagtaaccaagaccaagccgtggagggagccactgtgggagcggarctggcaggggcagcacctggacagtcggggctacctggcaggcccaggcagagaggatggcagaaacccactgaagctgtttgtgagagcaaccctgcag

SEQ ID NO: 27434 - DNA, 201 bp, Homo sapiens
ggacagtgatgtgacttcttggtcagaagaaaaacatgaagagaaaatgctctttaccagttatcctgaggacagaaagttaaaaaagaacaagaagaatkcccatgaaggagtttcctggtttgttcctttggaaaatgtggagtctagataaaaagaaggaaaacatgctcaagactcatgaccctggcatctcccggt

SEQ ID NO: 27435 - DNA, 201 bp, Homo sapiens
gaaaggtcattgcagtcagaggttggggattgcttgctgctacagccgaatggattctattctgaccaatacagaaggaaagaaatcatagacgccctgcytgagcagaagggaggtgatagatgaaatgaactgtatgaagatccaccagcctggcccacacgtggaagaaggactggcccgtcttcttgaagcccaagc

SEQ ID NO: 27436 - DNA, 201 bp, Homo sapiens
aagaaggactggcccgtcttcttgaagcccaagctctggtagaggcccatggcagagagctggatgttgctggtgtccaggacaacttcactgtagccctrgtcccgggcaaactggaggacagtcctgaccagggcttttgctatcccctgaccacggtgctcattgtccacagagagatgaaacagctgcaaccgcttc

SEQ ID NO: 27437 - DNA, 193 bp, Homo sapiens
cattgtccacagagagatgaaacagctgcaaccgcttctccctcaaggtgggatcatcaacgggcagagctcctactgtgcccaccaccttctcttcagaytcacccacccagaagcaggagccacactcactcaggtaggatttggtgatgtcagacatgtctgtgcgcaatgctatgtctacataccgcgt

SEQ ID NO: 27438 - DNA, 189 bp, Homo sapiens
gtccacagagagatgaaacagctgcaaccgcttctccctcaaggtgggatcatcaacgggcagagctcctactgtgcccaccaccttctcttcagattcasccacccagaagcaggagccacactcactcaggtaggatttggtgatgtcagacatgtctgtgcgcaatgctatgtctacataccgcgt

SEQ ID NO: 27439 - DNA, 201 bp, Homo sapiens
ccctgaccacggtgctcattgtccacagagagatgaaacagctgcaaccgcttctccctcaaggtgggatcatcaacgggcagagctcctactgtgcccamcaccttctcttcagattcacccacccagaagcaggagccacactcactcaggtaggatttggtgatgtcagacatgtctgtgcgcaatgctatgtctaca

SEQ ID NO: 27440 - DNA, 201 bp, Homo sapiens
gtcctgaccagggcttttgctatcccctgaccacggtgctcattgtccacagagagatgaaacagctgcaaccgcttctccctcaaggtgggatcatcaaygggcagagctcctactgtgcccaccaccttctcttcagattcacccacccagaagcaggagccacactcactcaggtaggatttggtgatgtcagacatg

SEQ ID NO: 27441 - DNA, 201 bp, Homo sapiens
ccagcaggagggactgaggccctctaggaggaaagcccagagggagggggccctcattccttcagacccagttttcccccaccctccttaccccgctgggstaggtctccgccagggctggcctcagtttctcctcaacaggcctgggggcagcccttcccctgcctagtccccgcctgagtgccagccccccaccccgcc

SEQ ID NO: 27442 - DNA, 201 bp, Homo sapiens
ccgccttgtaccggaaaatgctgggcaaccccagccggctgcctgctaagtgccctggcaagggtgcctggtccatcccatggaagtggctgtttggggcractgctgttgccttggggggtgtggcactctctgtggtcatcgctgccaggaactgaccacctaggtggctgccaccccctctgcacaccatggaccctg

SEQ ID NO: 27443 - DNA, 201 bp, Homo sapiens
agtactgctacggcccccaaggcagcaggagcccatacatccccccgcacgcggccctgtgcctggaggtgaccctgaagacggctgtggacgggcctgayctggagatgctcacggggcaggagcgcgtggccctggccaaccggaagcgggagtgcggcaacgcccactaccagcgggcggacttcgtcctggccgcca

SEQ ID NO: 27444 - DNA, 201 bp, Homo sapiens
agctcgaccactaccgcgcagccctgcgctcctgcagccttgtgctggagcaccagccagacaacatcaaggctctcttccgcaagggcaaggtgctggcycagcagggggagtacagtgaggccatccccatcctgagggcagccctgaagctggaaccttccaacaagacgatccacgcagagctctcaaagctggtga

SEQ ID NO: 27445 - DNA, 201 bp, Homo sapiens
agggtgaggaggaagaggaggaggaagaggaggaagaggatgacctgagtgagctgccaccgctggaggacatgggacaacccccggcggaggaggctgarcagcctggggccctggcccgagagttccttgctgccatggagcccgagcccgccccagccccggccccagaagagtggctggacattctggggaacgggc

SEQ ID NO: 27446 - DNA, 201 bp, Homo sapiens
actgaggccctctaggaggaaagcccagagggagggggccctcattccttcagacccagttttcccccaccctccttaccccgctgggctaggtctccgcyagggctggcctcagtttctcctcaacaggcctgggggcagcccttcccctgcctagtccccgcctgagtgccagccccccaccccgcctgccgccccctg

SEQ ID NO: 27447 - DNA, 108 bp, Homo sapiens
gcccttcccctgcctagtccccgcctgagtgccagccccccaccccgcctgccgccccctgtccaggttccctccccgccacagtgaaataaagcatcccmccctgca

SEQ ID NO: 27448 - DNA, 201 bp, Homo sapiens
ctgctacggcccccaaggcagcaggagcccatacatccccccgcacgcggccctgtgcctggaggtgaccctgaagacggctgtggacgggcctgacctgsagatgctcacggggcaggagcgcgtggccctggccaaccggaagcgggagtgcggcaacgcccactaccagcgggcggacttcgtcctggccgccaactc

SEQ ID NO: 27449 - DNA, 201 bp, Homo sapiens
ccgctggaggacatgggacaacccccggcggaggaggctgagcagcctggggccctggcccgagagttccttgctgccatggagcccgagcccgccccagycccggccccagaagagtggctggacattctggggaacgggctgttgaggaagaagacgctggtcccagggccgccaggttcgagccgcccggtcaagggc

SEQ ID NO: 27450 - DNA, 201 bp, Homo sapiens
gaactgaccacctaggtggctgccaccccctctgcacaccatggaccctgccctgcgctccccaactcccccaggctccctgtccactgccctccctggtytggccccctcctccgggttaggggagcaaggattgggggtcgtgcagcccagccagcaggagggactgaggccctctaggaggaaagcccagagggaggg

SEQ ID NO: 27451 - DNA, 201 bp, Homo sapiens
gaaagcccagagggagggggccctcattccttcagacccagttttcccccaccctccttaccccgctgggctaggtctccgccagggctggcctcagtttytcctcaacaggcctgggggcagcccttcccctgcctagtccccgcctgagtgccagccccccaccccgcctgccgccccctgtccaggttccctccccgc

SEQ ID NO: 27452 - DNA, 201 bp, Homo sapiens; identical to SEQ ID NO: 27441

SEQ ID NO: 27453 - DNA, 201 bp, Homo sapiens; identical to SEQ ID NO: 27442

SEQ ID NO: 27454 - DNA, 201 bp, Homo sapiens; identical to SEQ ID NO: 27443

SEQ ID NO: 27455 - DNA, 201 bp, Homo sapiens; identical to SEQ ID NO: 27444

SEQ ID NO: 27456 - DNA, 201 bp, Homo sapiens; identical to SEQ ID NO: 27445

SEQ ID NO: 27457 - DNA, 201 bp, Homo sapiens; identical to SEQ ID NO: 27446

SEQ ID NO: 27458 - DNA, 108 bp, Homo sapiens; identical to SEQ ID NO: 27447

SEQ ID NO: 27459 - DNA, 201 bp, Homo sapiens; identical to SEQ ID NO: 27448

SEQ ID NO: 27460 - DNA, 201 bp, Homo sapiens; identical to SEQ ID NO: 27449

SEQ ID NO: 27461 - DNA, 201 bp, Homo sapiens; identical to SEQ ID NO: 27450

SEQ ID NO: 27462 - DNA, 201 bp, Homo sapiens; identical to SEQ ID NO: 27451

SEQ ID NO: 27463 - DNA, 201 bp, Homo sapiens; identical to SEQ ID NO: 27445

SEQ ID NO: 27464 - DNA, 201 bp, Homo sapiens; identical to SEQ ID NO: 27442

SEQ ID NO: 27465 - DNA, 201 bp, Homo sapiens
ccaagtactgctacggcccccaaggcaggagcccatacatccccccgcacgcggccctgtgcctggaggtgaccctgaagacggctgtggacgggcctgayctggagatgctcacggggcaggagcgcgtggccctggccaaccggaagcgggagtgcggcaacgcccactaccagcgggcggacttcgtcctggccgcca

SEQ ID NO: 27466 - DNA, 201 bp, Homo sapiens; identical to SEQ ID NO: 27444

SEQ ID NO: 27467 - DNA, 201 bp, Homo sapiens
gtactgctacggcccccaaggcaggagcccatacatccccccgcacgcggccctgtgcctggaggtgaccctgaagacggctgtggacgggcctgacctgsagatgctcacggggcaggagcgcgtggccctggccaaccggaagcgggagtgcggcaacgcccactaccagcgggcggacttcgtcctggccgccaactc

SEQ ID NO: 27468 - DNA, 201 bp, Homo sapiens; identical to SEQ ID NO: 27449

SEQ ID NO: 27469 - DNA, 201 bp, Homo sapiens; identical to SEQ ID NO: 27450

SEQ ID NO: 27470 - DNA, 201 bp, Homo sapiens; identical to SEQ ID NO: 27441

SEQ ID NO: 27471 - DNA, 201 bp, Homo sapiens; identical to SEQ ID NO: 27442

SEQ ID NO: 27472 - DNA, 201 bp, Homo sapiens; identical to SEQ ID NO: 27465

SEQ ID NO: 27473 - DNA, 201 bp, Homo sapiens; identical to SEQ ID NO: 27444

SEQ ID NO: 27474 - DNA, 201 bp, Homo sapiens; identical to SEQ ID NO: 27445

SEQ ID NO: 27475 - DNA, 201 bp, Homo sapiens; identical to SEQ ID NO: 27446

SEQ ID NO: 27476 - DNA, 108 bp, Homo sapiens; identical to SEQ ID NO: 27447

SEQ ID NO: 27477 - DNA, 201 bp, Homo sapiens; identical to SEQ ID NO: 27467

SEQ ID NO: 27478 - DNA, 201 bp, Homo sapiens; identical to SEQ ID NO: 27449

SEQ ID NO: 27479 - DNA, 201 bp, Homo sapiens; identical to SEQ ID NO: 27450

SEQ ID NO: 27480 - DNA, 201 bp, Homo sapiens; identical to SEQ ID NO: 27451

SEQ ID NO: 27481 - DNA, 201 bp, Homo sapiens
cagctctgtatcagaaattggtctcttcccatggcgatgtccatctgccaccgtggcactggtattgctttgagtgcaggggtctctctttttggcatgtyggccgtgttactccctgggaactttgagtcttatttggaacttgtgaagtccctgtgtctggggccagcactgatccacacagctaagtttgcactcgtc

SEQ ID NO: 27482 - DNA, 201 bp, Homo sapiens
tttggaacttgtgaagtccctgtgtctggggccagcactgatccacacagctaagtttgcactcgtcttccctctcatgtatcatacctggaatgggatcygacacttgatgtgggacctaggaaaaggcctgaagattccccagctataccagtctggagtggttgtcctggttcttactgtgttgtcctctatggggct

SEQ ID NO: 27483 - DNA, 118 bp, Homo sapiens
agaccagaacccaagatrgctgcgctgttgctgagacacgttggtcgtcattgcctccgagcccactttagccctcagctctgtatcagaaattggtctcttcccatggcgatgtcca

SEQ ID NO: 27484 - DNA, 201 bp, Homo sapiens
tgcttcaagtgatggccggtgagctgcggagagctcatggaaggcgagtgggaacccggctgcctgcctttttttctgatccagaccctcggcacctgctrcttaccaactggaaaattttatgcatcccatgaagcccagatacacaaaattccaccccatgatcaagaatcctgctccactaagaatggtgctaaagta

SEQ ID NO: 27485 - DNA, 201 bp, Homo sapiens
tgaccctctactatgaagcactgtgcggtggctgccgagccttcctgatccgggagctcttcccaacatggctgttggtcatggagatcctcaatgtcacsctggtgccctacggaaacgcacaggaacaaaatgtcagtggcaggtgggagttcaagtgccagcatggagaagaggagtgcaaattcaacaaggtggagg

SEQ ID NO: 27486 - DNA, 201 bp, Homo sapiens
tggccggtgagctgcggagagctcatggaaggcgagtgggaacccggctgcctgcctttttttctgatccagaccctcggcacctgctacttaccaactgraaaattttatgcatcccatgaagcccagatacacaaaattccaccccatgatcaagaatcctgctccactaagaatggtgctaaagtaaaactagtttaa

SEQ ID NO: 27487 - DNA, 201 bp, Homo sapiens
ccagggcaagaagccggatgtctgcccttcctcaaccagctccctcaggagtgtttgcttcaagtgatggccggtgagctgcggagagctcatggaaggckagtgggaacccggctgcctgcctttttttctgatccagaccctcggcacctgctacttaccaactggaaaattttatgcatcccatgaagcccagataca

SEQ ID NO: 27488 - DNA, 201 bp, Homo sapiens
cagggctgtcgccagacactatcatggagtgtgcaatgggggaccgcggcatgcagctcatgcacgccaacgcccagcggacagatgctctccagccaccrcacgagtatgtgccctgggtcaccgtcaatgggaaacccttggaagatcagacccagctccttacccttgtctgccagttgtaccagggcaagaagccgg

SEQ ID NO: 27489 - DNA, 201 bp, Homo sapiens
agctcatgcacgccaacgcccagcggacagatgctctccagccaccacacgagtatgtgccctgggtcaccgtcaatgggaaacccttggaagatcagacycagctccttacccttgtctgccagttgtaccagggcaagaagccggatgtctgcccttcctcaaccagctccctcaggagtgtttgcttcaagtgatggc

SEQ ID NO: 27490 - DNA, 201 bp, Homo sapiens
gggagttcaagtgccagcatggagaagaggagtgcaaattcaacaaggtggaggcctgcgtgttggatgaacttgacatggagctagccttcctgaccatkgtctgcatggaagagtttgaggacatggagagaagtctgccactatgcctgcagctctacgccccagggctgtcgccagacactatcatggagtgtgcaa

SEQ ID NO: 27491 - DNA, 201 bp, Homo sapiens
tacaagacaggcaatctatacctgcgggggcccctgaagaagtccaatgcaccgcttgtcaatgtgaccctctactatgaagcactgtgcggtggctgccragccttcctgatccgggagctcttcccaacatggctgttggtcatggagatcctcaatgtcacgctggtgccctacggaaacgcacaggaacaaaatgtc

SEQ ID NO: 27492 - DNA, 201 bp, Homo sapiens
tccctgcgccagcttctgctttccggcgtggctgtggtcaagcctgagtcagtcccacgggaccacgccgctgcagtcgccacacctttgcccctgctgckatgaccctgtcgccacttctgctgttcctgccaccgctgctgctgctgctggacgtccccacggcggcggtgcaggcgtcccctctgcaagcgttagact

SEQ ID NO: 27493 - DNA, 201 bp, Homo sapiens
cagctcatgcacgccaacgcccagcggacagatgctctccagccaccacacgagtatgtgccctgggtcaccgtcaatgggaaacccttggaagatcagasccagctccttacccttgtctgccagttgtaccagggcaagaagccggatgtctgcccttcctcaaccagctccctcaggagtgtttgcttcaagtgatgg

SEQ ID NO: 27494 - DNA, 201 bp, Homo sapiens
tgtctgcatggaagagtttgaggacatggagagaagtctgccactatgcctgcagctctacgccccagggctgtcgccagacactatcatggagtgtgcartgggggaccgcggcatgcagctcatgcacgccaacgcccagcggacagatgctctccagccaccacacgagtatgtgccctgggtcaccgtcaatgggaa

SEQ ID NO: 27495 - DNA, 167 bp, Homo sapiens
ccggctgcctgcctttttttctgatccagaccctcggcacctgctacttaccaactggaaaattttatgcatcccatgaagcccagatacacaaaattccmccccatgatcaagaatcctgctccactaagaatggtgctaaagtaaaactagtttaataagccctt

SEQ ID NO: 27496 - DNA, 134 bp, Homo sapiens
tcggcacctgctacttaccaactggaaaattttatgcatcccatgaagcccagatacacaaaattccaccccatgatcaagaatcctgctccactaagaayggtgctaaagtaaaactagtttaataagccctt

SEQ ID NO: 27497 - DNA, 201 bp, Homo sapiens; identical to SEQ ID NO: 27485

SEQ ID NO: 27498 - DNA, 183 bp, Homo sapiens
ccagggcaagaagccggatgtctgcccttcctcaaccagctccctcaggagtgtttgcttcaagtgatggccggtgagctgcggagagctcatggaaggckagtgggaacccggctgcctgcctttttttctgatccaaatcctgctccactaagaatggtgctaaagtaaaactagtttaat

SEQ ID NO: 27499 - DNA, 201 bp, Homo sapiens; identical to SEQ ID NO: 27488

SEQ ID NO: 27500 - DNA, 201 bp, Homo sapiens; identical to SEQ ID NO: 27489

SEQ ID NO: 27501 - DNA, 201 bp, Homo sapiens; identical to SEQ ID NO: 27490

SEQ ID NO: 27502 - DNA, 201 bp, Homo sapiens; identical to SEQ ID NO: 27491

SEQ ID NO: 27503 - DNA, 201 bp, Homo sapiens; identical to SEQ ID NO: 27492

SEQ ID NO: 27504 - DNA, 201 bp, Homo sapiens; identical to SEQ ID NO: 27493

SEQ ID NO: 27505 - DNA, 201 bp, Homo sapiens; identical to SEQ ID NO: 27494

SEQ ID NO: 27506 - DNA, 126 bp, Homo sapiens
cttcaagtgatggccggtgagctgcggagagctcatggaaggcgagtgggaacccggctgcctgcctttttttctgatccaaatcctgctccactaagaayggtgctaaagtaaaactagtttaat

SEQ ID NO: 27507 - DNA, 201 bp, Homo sapiens; identical to SEQ ID NO: 27484

SEQ ID NO: 27508 - DNA, 201 bp, Homo sapiens; identical to SEQ ID NO: 27485

SEQ ID NO: 27509 - DNA, 201 bp, Homo sapiens; identical to SEQ ID NO: 27486

SEQ ID NO: 27510 - DNA, 201 bp, Homo sapiens; identical to SEQ ID NO: 27487

SEQ ID NO: 27511 - DNA, 201 bp, Homo sapiens; identical to SEQ ID NO: 27488

SEQ ID NO: 27512 - DNA, 201 bp, Homo sapiens; identical to SEQ ID NO: 27489

SEQ ID NO: 27513 - DNA, 201 bp, Homo sapiens; identical to SEQ ID NO: 27490

SEQ ID NO: 27514 - DNA, 201 bp, Homo sapiens; identical to SEQ ID NO: 27491

SEQ ID NO: 27515 - DNA, 134 bp, Homo sapiens
ccgctgcagtcgccacacctttgcccctgctgckatgaccctgtcgccacttctgctgttcctgccaccgctgctgctgctgctggacgtccccacggcggcggtgcaggcgtcccctctgcaagcgttagact

SEQ ID NO: 27516 - DNA, 201 bp, Homo sapiens; identical to SEQ ID NO: 27493

SEQ ID NO: 27517 - DNA, 201 bp, Homo sapiens; identical to SEQ ID NO: 27494

SEQ ID NO: 27518 - DNA, 167 bp, Homo sapiens; identical to SEQ ID NO: 27495

SEQ ID NO: 27519 - DNA, 134 bp, Homo sapiens; identical to SEQ ID NO: 27496

SEQ ID NO: 27520 - DNA, 201 bp, Homo sapiens
ccaagccctgagaaaactctttacgtggattatctcgtttaatttcacaacatccttttaagttttccatggacacagcctagcagaaagacgcagccttsgtgcttcgctgactgctgaccactgacccaccgccttgatgacagcaccctcgtgtgccttcccagttcagttccggcagccctcagtcagcggcctctc

SEQ ID NO: 27521 - DNA, 201 bp, Homo sapiens
tctctgaagacccggcacaggctattcctttctgcgacgagcccattgctatggaaaccaaagcgttaggccagcggggattgaggctgcgggatcatgaygggtctctctcccgaagaaccttgcctaaggcttccccaagcggctacttcctgagcgaacccgcccacccgcctgaaggagagagagccctgcatttta

SEQ ID NO: 27522 - DNA, 201 bp, Homo sapiens
taatttcacaacatccttttaagttttccatggacacagcctagcagaaagacgcagccttcgtgcttcgctgactgctgaccactgacccaccgccttgrtgacagcaccctcgtgtgccttcccagttcagttccggcagccctcagtcagcggcctctcgcagataaccaaaagcctgtatatcagcaatggtgtggc

SEQ ID NO: 27523 - DNA, 201 bp, Homo sapiens
gaacattctacttttgttgatacagaaaaaaacagatgatgccttttatgagcacaaaaaagagttgctgtagcttttaactttataatccattttttttmagattaaactaattgtgagatggtgaagataaattttctgccctgtgagtgacactggccaggggataggttgaggcagatggtgcccagaagaaagagg

SEQ ID NO: 27524 - DNA, 201 bp, Homo sapiens; identical to SEQ ID NO: 27520

SEQ ID NO: 27525 - DNA, 201 bp, Homo sapiens; identical to SEQ ID NO: 27521

SEQ ID NO: 27526 - DNA, 201 bp, Homo sapiens; identical to SEQ ID NO: 27522

SEQ ID NO: 27527 - DNA, 201 bp, Homo sapiens
ccaccatactttccctcactgtcttcgccatctggaacagcctggggtcccccaacagcgtttgacttgttaaaaagcatctggctggtagccacgccacyccctcctcggccctggggggttggcctccctcagcccctgcctcagccttcatcacccctgttgccccgaacctctgtcctggactggagccccagcccc

SEQ ID NO: 27528 - DNA, 201 bp, Homo sapiens
cagggaccagtctcccagccttttcagcagcctgagaaacctggtcgtgtccgtcgtcggaagactaggcgggaacgtaacaaggccctggtgggcagccycggccattagcccaccacgatcctcctgtggccattcgggatccacctgtggtccctactgcctccaagctcgtggtcataacccagggccggctgagcc

SEQ ID NO: 27529 - DNA, 201 bp, Homo sapiens
ccctcctcggccctggggggttggcctccctcagcccctgcctcagccttcatcacccctgttgccccgaacctctgtcctggactggagccccagccccscttccccactgcccagcctctcctgggtagtagcccagagcagtccggaagcctggtcttttccacccatgagactgtactgaggagaggctgaggctag

SEQ ID NO: 27530 - DNA, 201 bp, Homo sapiens
accggcgtgggcttgctggctgggttctcctctccactcatcttggcgccgcagctcctgcaggatgagcgagtcgggtcggcccgggagtgttccgaacsgagctggctccgccacgcccactcctacccctcgcggcaacaaaggaccgtcccaacgctagcacacccgcggaggacgaaggccgatacagggcgccgc

SEQ ID NO: 27531 - DNA, 201 bp, Homo sapiens
tgtctggcgtggggcagctgctggcagagctgcagtgtcagctgagtttgccacaggccttcccccggaggaacctgattcaggatgccagggatgccatmgtgcacaccttgcaggcctgtcatggttgtgtgcctgaccttgccctggtgcttcggggctgccagccacccttgccaggtgagcgtccctcctgcccct

SEQ ID NO: 27532 - DNA, 161 bp, Homo sapiens
ttgctgaagaagagcaggtgaccctaggcgcagcctgtcccgcagggcctggctggcttagcaatctgagccaccttccttaaaggaaatgttaaaaaaawaaaacaaaaaaacaaaaaaacaactgttctttgcctaataaagaactggaacaaccatca

SEQ ID NO: 27533 - DNA, 201 bp, Homo sapiens
ttcctggaggcccacaagctcatactccagcctctgaaccacagtgaggctcggcaggacccccagctggcccagaagcaggcccaggtctgtggctggcyagctgcagctgtggggcctggcatgtgtctcaacatggccctggagctctacatggacctgctgtcagcaccctgccgtgccgtctacatcttctcgaag

SEQ ID NO: 27534 - DNA, 171 bp, Homo sapiens
tatttctgagttgctgaagaagagcaggtgaccctaggcgcagcctgtcccgcagggcctggctggcttagcaatctgagccaccttccttaaaggaaatrttaaaaaaaaaaaacaaaaaaacaaaaaaacaactgttctttgcctaataaagaactggaacaaccatca

SEQ ID NO: 27535 - DNA, 201 bp, Homo sapiens
agctgagtggcgtatgcaggtggagctgaatattggctctggcctctttagggaggcccatgatcgactaatgcagttggccgactgggacttttcaacaytggattcaatggtcaaggagaatatttctgagttgctgaagaagagcaggtgaccctaggcgcagcctgtcccgcagggcctggctggcttagcaatctg

SEQ ID NO: 27536 - DNA, 137 bp, Homo sapiens
taggcgcagcctgtcccgcagggcctggctggcttagcaatctgagccaccttccttaaaggaaatgttaaaaaaaaaaaacaaaaaaacaaaaaaacaactgttctttgcctaataaagaactggaacaaccatca

SEQ ID NO: 27537 - DNA, 138 bp, Homo sapiens
ctaggcgcagcctgtcccgcagggcctggctggcttagcaatctgagccaccttccttaaaggaaatgttaaaaaaaaaaaacaaaaaaacaaaaaaacaactgttctttgcctaataaagaactggaacaaccatca

SEQ ID NO: 27538 - DNA, 201 bp, Homo sapiens
cgaagaagcatgacatccagttcaactttcagtttgtggatctgctgaaaggtcaccaccacagcaaagaatacattgacatcaaccccctcaggaagctkcccagcctcaaagatgggaaatttatcttaagtgaaagttgctgatcccaaagataacaggggaggaagtttcagctgagaagatggagcatgcagtgga

SEQ ID NO: 27539 - DNA, 139 bp, Homo sapiens
cctaggcgcagcctgtcccgcagggcctggctggcttagcaatctgagccaccttccttaaaggaaatgttaaaaaaaaaaaacaaaaaaacaaaaaaacaactgttctttgcctaataaagaactggaacaaccatca

SEQ ID NO: 27540 - DNA, 149 bp, Homo sapiens
agcaggtgaccctaggcgcagcctgtcccgcagggcctggctggcttagcaatctgagccaccttccttaaaggaaatgttaaaaaaaaaaaacaaaaaaacaaaaaaacaactgttctttgcctaataaagaactggaacaaccatca

SEQ ID NO: 27541 - DNA, 150 bp, Homo sapiens
gagcaggtgaccctaggcgcagcctgtcccgcagggcctggctggcttagcaatctgagccaccttccttaaaggaaatgttaaaaaaaaaaaacaaaaamacaaaaaaacaactgttctttgcctaataaagaactggaacaaccatca

SEQ ID NO: 27542 - DNA, 201 bp, Homo sapiens
gcaaagaatacattgacatcaaccccctcaggaagctgcccagcctcaaagatgggaaatttatcttaagtgaaagttgctgatcccaaagataacagggraggaagtttcagctgagaagatggagcatgcagtggaagaggtgaagaacagcctgcagctctttgaggagtattttctgcaggataagatgttcatcac

SEQ ID NO: 27543 - DNA, 162 bp, Homo sapiens
gttgctgaagaagagcaggtgaccctaggcgcagcctgtcccgcagggcctggctggcttagcaatctgagccaccttccttaaaggaaatgttaaaaaamaaaaacaaaaaaacaaaaaaacaactgttctttgcctaataaagaactggaacaaccatca

SEQ ID NO: 27544 - DNA, 170 bp, Homo sapiens
atttctgagttgctgaagaagagcaggtgaccctaggcgcagcctgtcccgcagggcctggctggcttagcaatctgagccaccttccttaaaggaaatgytaaaaaaaaaaaacaaaaaaacaaaaaaacaactgttctttgcctaataaagaactggaacaaccatca

SEQ ID NO: 27545 - DNA, 201 bp, Homo sapiens
ctgccaccaatgtctacctgtgcaagcctgcagatgctgcacagctggagcggctgttggggaggctgacgccagccctgcagcacctggatgggggggtsctggtggccaggcccttcctggcaatggagcagatctccctggaagacttggtgctgacggaggtgatgcaggcccatatgaaggctgcccttggtactg

SEQ ID NO: 27546 - DNA, 201 bp, Homo sapiens
ccagctgcctgccaccaatgtctacctgtgcaagcctgcagatgctgcacagctggagcggctgttggggaggctgacgccagccctgcagcacctggatkggggggtcctggtggccaggcccttcctggcaatggagcagatctccctggaagacttggtgctgacggaggtgatgcaggcccatatgaaggctgccct

SEQ ID NO: 27547 - DNA, 201 bp, Homo sapiens
ttggcgtggaagcatgtcaccatccagctgcctgccaccaatgtctacctgtgcaagcctgcagatgctgcacagctggagcggctgttggggaggctgaygccagccctgcagcacctggatgggggggtcctggtggccaggcccttcctggcaatggagcagatctccctggaagacttggtgctgacggaggtgatg

SEQ ID NO: 27548 - DNA, 201 bp, Homo sapiens; identical to SEQ ID NO: 27545

SEQ ID NO: 27549 - DNA, 201 bp, Homo sapiens; identical to SEQ ID NO: 27546

SEQ ID NO: 27550 - DNA, 201 bp, Homo sapiens; identical to SEQ ID NO: 27547

SEQ ID NO: 27551 - DNA, 171 bp, Homo sapiens; identical to SEQ ID NO: 27534

SEQ ID NO: 27552 - DNA, 201 bp, Homo sapiens; identical to SEQ ID NO: 27535

SEQ ID NO: 27553 - DNA, 137 bp, Homo sapiens; identical to SEQ ID NO: 27536

SEQ ID NO: 27554 - DNA, 201 bp, Homo sapiens; identical to SEQ ID NO: 27538

SEQ ID NO: 27555 - DNA, 138 bp, Homo sapiens; identical to SEQ ID NO: 27537

SEQ ID NO: 27556 - DNA, 139 bp, Homo sapiens; identical to SEQ ID NO: 27539

SEQ ID NO: 27557 - DNA, 149 bp, Homo sapiens; identical to SEQ ID NO: 27540

SEQ ID NO: 27558 - DNA, 150 bp, Homo sapiens; identical to SEQ ID NO: 27541

SEQ ID NO: 27559 - DNA, 201 bp, Homo sapiens; identical to SEQ ID NO: 27542

SEQ ID NO: 27560 - DNA, 162 bp, Homo sapiens; identical to SEQ ID NO: 27543

SEQ ID NO: 27561 - DNA, 170 bp, Homo sapiens; identical to SEQ ID NO: 27544

SEQ ID NO: 27562 - DNA, 161 bp, Homo sapiens; identical to SEQ ID NO: 27532

SEQ ID NO: 27563 - DNA, 120 bp, Homo sapiens
gcccaggtctgtggctggcyagctgcagctgtggggcctggcatgtgtctcaacatggccctggagctctacatggacctgctgtcagcaccctgccgtgccgtctacatcttctcgaag

SEQ ID NO: 27564 - DNA, 201 bp, Homo sapiens
agatggccgaataggaacagctctggtctacagctcccagcgtgagcgacgcagaagatgggtgatttctgcattttcgtctgaggtactgggttcatctyactagggagtgccagacagtgggcgcaagtcaatgggtgcgcgcaccatgcacgagccgaagcagggcgaggcattgcctcactcgggaagcgcaaagag

SEQ ID NO: 27565 - DNA, 201 bp, Homo sapiens
aggtgtgtgagtggggtaattttggatttcagccccaaatgagtgtgcagaaaactgcttctgcatgaatggcctatgtgagatcagcagaaaagccagcyagctgagccttgctcagattgtaaaatcataagcagatacacagtcatgttaagccattaaatttgggagtgttttgttttgtagaaatagatatctgaa

SEQ ID NO: 27566 - DNA, 201 bp, Homo sapiens
gtaaacagagcagccgggaagctccaactgggtggagcccaccacagctcaaggaggcctgcctgcctctggaggctccacctctgggggcagggcacacacaaacaaaaagaccgcagtaacctctgcagacttaaatgtccctgtctgacagctttgaagagagcagtgtttctcccagcacgcagctggagatctgag

SEQ ID NO: 27567 - DNA, 201 bp, Homo sapiens
gacatctacagaactctccaccccatatcaacagaatatacatttttttcagcaccacaccacacctattccaaaattgaccacatacttggaagtaaagstctcctcagcaaatgtaaaagaacagaaattataacaaactgtctctcagaccacagtgcaatcaaactagaactcaggatgaagaaactcactcaaaac

SEQ ID NO: 27568 - DNA, 201 bp, Homo sapiens
ttcataaggcaagtcctgagcgacctacaaagagacttagactcccacacaataataatgggagactttaacaccccactgtcaacattagacagatcaaygagacagaaagttagcaaggatatccaggagttggactcagctctgcaccaagcggacctaatagacatctacagaactctccaccccatatcaacagaa

SEQ ID NO: 27569 - DNA, 201 bp, Homo sapiens
gtctacagctcccagcgtgagcgacgcagaagatgggtgatttctgcattttcgtctgaggtactgggttcatctcactagggagtgccagacagtgggcrcaagtcaatgggtgcgcgcaccatgcacgagccgaagcagggcgaggcattgcctcactcgggaagcgcaaagagtcagggagttccctttcctagtcaa

SEQ ID NO: 27570 - DNA, 201 bp, Homo sapiens
agagctaactatcctaaatatatatgcacccaaaataggagcacccagattcataaggcaagtcctgagcgacctacaaagagacttagactcccacacawtaataatgggagactttaacaccccactgtcaacattagacagatcaacgagacagaaagttagcaaggatatccaggagttggactcagctctgcacca

SEQ ID NO: 27571 - DNA, 201 bp, Homo sapiens
accaaaaacccatctgtatatcaccatcatcaaagaccaaaagtagataaaaccaccaagatggggaaaaaacagagcagaaaaactggaaactctaaaamgcagagcgcctctcctcctccaaaggaacataattcatcaccagcaacggaacaaagctggacggagaatgactttgacgagctgagagaagaaggcttc

SEQ ID NO: 27572 - DNA, 201 bp, Homo sapiens
gtcctgtcagatagaaggaaaactaaaacagaaaggacatccacaccaaaaacccatctgtatatcaccatcatcaaagaccaaaagtagataaaaccacmaagatggggaaaaaacagagcagaaaaactggaaactctaaaacgcagagcgcctctcctcctccaaaggaacataattcatcaccagcaacggaacaaa

SEQ ID NO: 27573 - DNA, 201 bp, Homo sapiens
aagagctaactatcctaaatatatatgcacccaaaataggagcacccagattcataaggcaagtcctgagcgacctacaaagagacttagactcccacacrataataatgggagactttaacaccccactgtcaacattagacagatcaacgagacagaaagttagcaaggatatccaggagttggactcagctctgcacc

SEQ ID NO: 27574 - DNA, 201 bp, Homo sapiens
gagaatccacatatgaataaatatatttaacttcagtgtgatgaagctttctttacaggtgcttcacaaaggggctttggctttccaccttgttgagataygtgactgttgtggaggtgtgcttcttggtcttccttcaagaaagagcttgttcttcagctatgaggaatacagatagatgacaggtcttggctcccaaac

SEQ ID NO: 27575 - DNA, 201 bp, Homo sapiens
aattttggatttcagccccaaatgagtgtgcagaaaactgcttctgcatgaatggcctatgtgagatcagcagaaaagccagccagctgagccttgctcarattgtaaaatcataagcagatacacagtcatgttaagccattaaatttgggagtgttttgttttgtagaaatagatatctgaaatacccagtgacttaca

SEQ ID NO: 27576 - DNA, 201 bp, Homo sapiens
agagctgaggccaaaccagaggacactgttgctgtttaccaatgaggctggaggcaccttagatgacttgattgtgaccagcacttctgaggggcacctayatgtgatgtccaacactggctgctgggaaaaagacttggccttcatgcaggacaaggtcagagaactttagaggcagggcagagatgtgggcctggaggt

SEQ ID NO: 27577 - DNA, 201 bp, Homo sapiens
tggaggtgtttgacgtgtctggccgccaccttacacactgtggctgcacaggagagaatggtgtggacatcttggtgccagcagcgggggcagttcacccsgcatcagctcttctggaaaacccagaggcaaagctggcagtgctggcagcttgcgcctggaggcaggcctccggctgtacaggagtgacactgatgaaca

SEQ ID NO: 27578 - DNA, 201 bp, Homo sapiens
gattgtgaccagcacttctgaggggcacctacatgtgatgtccaacactggctgctgggaaaaagacttggccttcatgcaggacaaggtcagagaacttyagaggcagggcagagatgtgggcctggaggtagtggatactgccctgctagccctgaaagggccccctgtggcccaggtgctacaggccagcacggcagc

SEQ ID NO: 27579 - DNA, 201 bp, Homo sapiens
ggcacctacatgtgatgtccaacactggctgctgggaaaaagacttggccttcatgcaggacaaggtcagagaactttagaggcagggcagagatgtgggyctggaggtagtggatactgccctgctagccctgaaagggccccctgtggcccaggtgctacaggccagcacggcagctgacctgaggaaactgccttcat

SEQ ID NO: 27580 - DNA, 201 bp, Homo sapiens
caagaagatcaccattgctgactgtggacagctctactaagtttgacttgtgttttctcttaaccaccagaccattccttctgtagctcaggagactaccyctccaccccatttgctcgcagtatcctagaatctttgtattgtcgctgcaattccctttgggttccatgttttccttgttccctagctggattgcagagt

SEQ ID NO: 27581 - DNA, 201 bp, Homo sapiens
gacccaacacaaatggttcccagtttttcatgtgccctgccaagactcagtggttggatggcaagcatgtggtctttggcatggtgaaggcatgaatatcrtggaggccatggaacactttgggtccaggaatgataaggccagcaagaagatcaccattgctgactgtggacagctctactaagtttgacttgtgttttc

SEQ ID NO: 27582 - DNA, 105 bp, Homo sapiens
aggaytttgacaaggactccgtcgtcccggatgatagtgctcaggttaatgccagtgggagggcggcgcccaatagtaacttcctttggaggttgtagtaccgcc

SEQ ID NO: 27583 - DNA, 201 bp, Homo sapiens
ggggcggcctatgtcgagtggcgcccatggcgaagagggctcagctcgcatgtggaagactctcaccttcttcgtcgcgctccccggggtggcagtcagcrtgctgaatgtgtacctgaagtcgcaccacggagagcacgagagacccgagttcatcgcctacccccatctccgcatcaggaccaagccgtttccctgggg

SEQ ID NO: 27584 - DNA, 120 bp, Homo sapiens
aggattttgacaaggactcygtcgtcccggatgatagtgctcaggttaatgccagtgggagggcggcgcccaatagtaacttcctttggaggttgtagtaccgcccccagagccaatttt

SEQ ID NO: 27585 - DNA, 105 bp, Homo sapiens; identical to SEQ ID NO: 27582

SEQ ID NO: 27586 - DNA, 201 bp, Homo sapiens; identical to SEQ ID NO: 27583

SEQ ID NO: 27587 - DNA, 115 bp, Homo sapiens
ccttaagctcaccttctttacttgtatcaaatgatgactggtatactggtctcccatccctttgcttgtggcaggagatggcttaaataaataacttaaayttagattggtcatg

SEQ ID NO: 27588 - DNA, 120 bp, Homo sapiens; identical to SEQ ID NO: 27584

SEQ ID NO: 27589 - DNA, 155 bp, Homo sapiens
atggaggccgccgtccaattcttggtccagagccgggacgtggtctttggcctcraggccatcgaggctcagtacaagtaccagacaacgcgcgtcagaagcaagggcggcgtcctcgaggtgcacctcaagtccacgcacttcaccttccggac

SEQ ID NO: 27590 - DNA, 201 bp, Homo sapiens
tactgcctggagaagggagagattcaggtcctccagcagcctccctcacccagtatgttttacagattacggggggaccgggtgagccagtgaccccctgyagcccccagcttcaggcctcagtgtctgccagtcaagcttcacaggcattgtgatggggcagccttggggaatataaaattttgtgaagacttggagatc

SEQ ID NO: 27591 - DNA, 201 bp, Homo sapiens
gcgcgcagccggtcttcctgctgctggtgatcaagtcctcccctagcaactatgtgcgccgcgagctgctgcggcgcacgtggggccgcgagcgcaaggtwcggggtttgcagctgcgcctcctcttcctggtgggcacagcctccaacccgcacgaggcccgcaaggtcaaccggctgctggagctggaggcacagactc

SEQ ID NO: 27592 - DNA, 201 bp, Homo sapiens
attgatgatgtcttcctgggtatgtgtctggagcttgagggactgaagcctgcctcccacagcggcatccgcacgtctggcgtgcgggctccatcgcaacrcctgtcctcctttgacccctgcttctaccgagacctgctgctggtgcaccgcttcctaccttatgagatgctgctcatgtgggatgcgctgaaccagccc

SEQ ID NO: 27593 - DNA, 201 bp, Homo sapiens
agtgaatattctggctggcgaactcctacacatccttcaaaacccacctggtactgttccagcatcttccctggatggctggaggaactccagaaaatatscatcttctttttgtggctgctaatggcagaagtgcctgtgctagagttccaactgtggatgcatccgtcccgtttgagtcaaagtcttacttccctgctc

SEQ ID NO: 27594 - DNA, 201 bp, Homo sapiens
gctcactcttcccagaccaccccctcctacaggagcgggagaagattgtggctcccatcagtgactccccgaagccaccgccacagcgtgtgaccctcacrctacctgtcctgaatgcagcacgaactgtcatctttgtggcaactggagaaggcaaggcagctgttctgaagcgcattttggaggaccaggaggaaaacc

SEQ ID NO: 27595 - DNA, 201 bp, Homo sapiens; identical to SEQ ID NO: 27594

SEQ ID NO: 27596 - DNA, 201 bp, Homo sapiens
aggtcaccccaggctctacctgtgctgtgtttggcctgggaggggtcggcctatctgctattatgggctgtaaagcagctggggcagccagaatcattgcrgtggacatcaacaaggacaaatttgcaaaggccaaagagttgggtgccactgaatgcatcaaccctcaagactacaagaaacccatccaggaggtgctaa

SEQ ID NO: 27597 - DNA, 201 bp, Homo sapiens
ggaggggtcggcctatctgctattatgggctgtaaagcagctggggcagccagaatcattgcggtggacatcaacaaggacaaatttgcaaaggccaaagwgttgggtgccactgaatgcatcaaccctcaagactacaagaaacccatccaggaggtgctaaaggaaatgactgatggaggtgtggatttttcatttgaa

SEQ ID NO: 27598 - DNA, 201 bp, Homo sapiens
gagaaggggtgactacagtcaaaccaggtgataaagtcatcccactcgctattcctcagtgtggaaaatgcagaatttgtaaaaacccggagagcaactaytgcttgaaaaacgatgtaagcaatcctcaggggaccctgcaggatggcaccagcaggttcacctgcaggaggaagcccatccaccacttccttggcatca

SEQ ID NO: 27599 - DNA, 201 bp, Homo sapiens
ctgcagtcaatgttgccaaggtcaccccaggctctacctgtgctgtgtttggcctgggaggggtcggcctatctgctattatgggctgtaaagcagctggrgcagccagaatcattgcggtggacatcaacaaggacaaatttgcaaaggccaaagagttgggtgccactgaatgcatcaaccctcaagactacaagaaac

SEQ ID NO: 27600 - DNA, 201 bp, Homo sapiens
gctgtaggaatctgtggcacagatgaccacgtggttagtggtaccatggtgaccccacttcctgtgattttaggccatgaggcagccggcatcgtggagartgttggagaaggggtgactacagtcaaaccaggtgataaagtcatcccactcgctattcctcagtgtggaaaatgcagaatttgtaaaaacccggagagc

SEQ ID NO: 27601 - DNA, 201 bp, Homo sapiens
tgtggattttcaactggttatgggtctgcagtcaatgttgccaaggtcaccccaggctctacctgtgctgtgtttggcctgggaggggtcggcctatctgytattatgggctgtaaagcagctggggcagccagaatcattgcggtggacatcaacaaggacaaatttgcaaaggccaaagagttgggtgccactgaatgc

SEQ ID NO: 27602 - DNA, 201 bp, Homo sapiens
actgaatgcatcaaccctcaagactacaagaaacccatccaggaggtgctaaaggaaatgactgatggaggtgtggatttttcatttgaagtcatcggtcrgcttgacaccatgatggcttccctgttatgttgtcatgaggcatgtggcacaagtgtcatcgtaggggtacctcctgattcccaaaacctctcaatgaac

SEQ ID NO: 27603 - DNA, 201 bp, Homo sapiens; identical to SEQ ID NO: 27596

SEQ ID NO: 27604 - DNA, 201 bp, Homo sapiens; identical to SEQ ID NO: 27597

SEQ ID NO: 27605 - DNA, 201 bp, Homo sapiens; identical to SEQ ID NO: 27598

SEQ ID NO: 27606 - DNA, 201 bp, Homo sapiens; identical to SEQ ID NO: 27600

SEQ ID NO: 27607 - DNA, 201 bp, Homo sapiens
gttggatctcttgcagggatgctggtctgtccttctccaggctttggagtcacatcttcgcactgctcatcattacctctgttgcaaacatggccatctargatctgcgggtaggcacatctccgtctttgatctcagcctggaaaagctatgcaatacacctgctttatgcacttgagcagggaagaaatccacaaggac

SEQ ID NO: 27608 - DNA, 201 bp, Homo sapiens; identical to SEQ ID NO: 27599

SEQ ID NO: 27609 - DNA, 201 bp, Homo sapiens; identical to SEQ ID NO: 27601

SEQ ID NO: 27610 - DNA, 201 bp, Homo sapiens; identical to SEQ ID NO: 27602

SEQ ID NO: 27611 - DNA, 201 bp, Homo sapiens; identical to SEQ ID NO: 27596

SEQ ID NO: 27612 - DNA, 201 bp, Homo sapiens; identical to SEQ ID NO: 27597

SEQ ID NO: 27613 - DNA, 201 bp, Homo sapiens; identical to SEQ ID NO: 27598

SEQ ID NO: 27614 - DNA, 201 bp, Homo sapiens; identical to SEQ ID NO: 27600

SEQ ID NO: 27615 - DNA, 201 bp, Homo sapiens; identical to SEQ ID NO: 27607

SEQ ID NO: 27616 - DNA, 201 bp, Homo sapiens; identical to SEQ ID NO: 27599

SEQ ID NO: 27617 - DNA, 201 bp, Homo sapiens
tccaggaggtgctaaaggaaatgactgatggaggtgtggatttttcatttgaagtcatcggtcggcttgacaccatggtatgtaccatgacatgccctgaratttctatggcttccctgttatgttgtcatgaggcatgtggcacaagtgtcatcgtaggggtacctcctgattcccaaaacctctcaatgaaccctatgc

SEQ ID NO: 27618 - DNA, 201 bp, Homo sapiens; identical to SEQ ID NO: 27601

SEQ ID NO: 27619 - DNA, 201 bp, Homo sapiens
actgaatgcatcaaccctcaagactacaagaaacccatccaggaggtgctaaaggaaatgactgatggaggtgtggatttttcatttgaagtcatcggtcrgcttgacaccatggtatgtaccatgacatgccctgagatttctatggcttccctgttatgttgtcatgaggcatgtggcacaagtgtcatcgtaggggta

SEQ ID NO: 27620 - DNA, 201 bp, Homo sapiens
ctgactggacgcacgtggaaaggagctatttttggaggctttaagagtaaagaatctgtccccaaacttgtggctgactttatggctaagaagttttcacrggatgcattaataacaaatattttaccttttgaaaaaataaatgaaggatttgacctgcttcgctctggaaagagtatccgtaccgtcctgacgttttga

SEQ ID NO: 27621 - DNA, 201 bp, Homo sapiens
caaagcagctgtgctatgggagttaaagaaacccttttccattgaggaggtagaggttgcacctcctaaggctcatgaagttcgcattaagatggtggctkcaggaatctgtcgttcagatgagcatgtggttagtggcaacctggtgaccccccttcctgtgattttaggccatgaggcagccggcatcgtggaaagtgt

SEQ ID NO: 27622 - DNA, 140 bp, Homo sapiens
atgcactcaagcagagaagaaatccacaagtactcaccarcctcctggtctgcagagaagacagaatcaatatgagcacagcaggaaaaatggagtatctttctattgcccaggttggagtgcaatggtgatctcggctc

SEQ ID NO: 27623 - DNA, 201 bp, Homo sapiens
ttgtcatgaggcatgtggcacaagtgtcattgtaggggtacctcctgattcccagaacctctcaataaaccctatgctgctactgactggacgcacgtggdaaggagctatttttggaggctttaagagtaaagaatctgtccccaaacttgtggctgactttatggctaagaagttttcactggatgcattaataacaaa

SEQ ID NO: 27624 - DNA, 201 bp, Homo sapiens
tcccgctctttactcctcagtgtggaaaatgcagaatttgtaaaaacccagaaagcaactactgcttgaaaaatgatctaggcaatcctcgggggaccctrcaggatggcaccaggaggttcacctgcagcgggaagcccatccaccacttcgtcggcgtcagcaccttctcccagtacacagtggtggatgagaatgcag

SEQ ID NO: 27625 - DNA, 201 bp, Homo sapiens
tcaaaccaggtgataaagtcatcccgctctttactcctcagtgtggaaaatgcagaatttgtaaaaacccagaaagcaactactgcttgaaaaatgatctrggcaatcctcgggggaccctgcaggatggcaccaggaggttcacctgcagcgggaagcccatccaccacttcgtcggcgtcagcaccttctcccagtaca

SEQ ID NO: 27626 - DNA, 201 bp, Homo sapiens
ccggcatcgtggaaagtgttggagaaggggtgactacagtcaaaccaggtgataaagtcatcccgctctttactcctcagtgtggaaaatgcagaatttgyaaaaacccagaaagcaactactgcttgaaaaatgatctaggcaatcctcgggggaccctgcaggatggcaccaggaggttcacctgcagcgggaagccca

SEQ ID NO: 27627 - DNA, 201 bp, Homo sapiens
gatgcattaataacaaatattttaccttttgaaaaaataaatgaaggatttgacctgcttcgctctggaaagagtatccgtaccgtcctgacgttttgaarcaatacagatgccttcccttgtagcagttttcagcctcctctaccctacatgatctggagcaacagctaggaaatatcattaattctgctcttcagagat

SEQ ID NO: 27628 - DNA, 201 bp, Homo sapiens
aggagctatttttggaggctttaagagtaaagaatctgtccccaaacttgtggctgactttatggctaagaagttttcactggatgcattaataacaaatdttttaccttttgaaaaaataaatgaaggatttgacctgcttcgctctggaaagagtatccgtaccgtcctgacgttttgaaacaatacagatgccttccc

SEQ ID NO: 27629 - DNA, 201 bp, Homo sapiens
ctgattcccagaacctctcaataaaccctatgctgctactgactggacgcacgtggaaaggagctatttttggaggctttaagagtaaagaatctgtcccsaaacttgtggctgactttatggctaagaagttttcactggatgcattaataacaaatattttaccttttgaaaaaataaatgaaggatttgacctgcttc

SEQ ID NO: 27630 - DNA, 201 bp, Homo sapiens
actgaatgcatcaaccctcaagactacaagaaacccattcaggaagtgctaaaggaaatgactgatggaggtgtggatttttcgtttgaagtcatcggtcrgcttgacaccatgatggcttccctgttatgttgtcatgaggcatgtggcacaagtgtcattgtaggggtacctcctgattcccagaacctctcaataaac

SEQ ID NO: 27631 - DNA, 201 bp, Homo sapiens
ggtctacctgtgctgtgtttggcctgggaggggtcggcctatctgttgttatgggctgtaaagcagctggagcagccagaatcattgctgtggacatcaayaaggacaaatttgcaaaggctaaagagttgggtgccactgaatgcatcaaccctcaagactacaagaaacccattcaggaagtgctaaaggaaatgactg

SEQ ID NO: 27632 - DNA, 140 bp, Homo sapiens
atgcactcaagcagagaagaaatccacaagtactcaccarcctcctggtctgcagagaagacagaatcaatatgagcacagcaggaaaagtaatcaaatgcaaagcagctgtgctatgggagttaaagaaacccttttcc

SEQ ID NO: 27633 - DNA, 201 bp, Homo sapiens
aggaatctgtcgttcagatgagcatgtggttagtggcaacctggtgaccccccttcctgtgattttaggccatgaggcagccggcatcgtggaaagtgttkgagaaggggtgactacagtcaaaccaggtgataaagtcatcccgctctttactcctcagtgtggaaaatgcagaatttgtaaaaacccagaaagcaacta

SEQ ID NO: 27634 - DNA, 201 bp, Homo sapiens
aggatggcaccaggaggttcacctgcagcgggaagcccatccaccacttcgtcggcgtcagcaccttctcccagtacacagtggtggatgagaatgcagtrgccaaaattgatgcagcctcgcccctggagaaagtctgcctcattggctgtggattttcgactggttatgggtctgcagtcaaagttgccaaggtcaccc

SEQ ID NO: 27635 - DNA, 201 bp, Homo sapiens
gcaatcctcgggggaccctgcaggatggcaccaggaggttcacctgcagcgggaagcccatccaccacttcgtcggcgtcagcaccttctcccagtacacrgtggtggatgagaatgcagtggccaaaattgatgcagcctcgcccctggagaaagtctgcctcattggctgtggattttcgactggttatgggtctgcag

SEQ ID NO: 27636 - DNA, 176 bp, Homo sapiens
ctatggatccagagtctagaacgttcctctctaattactaccgagatcataatgtggaactatccaaactgctacacagactgggacagcctctgccatcrtggctgagacaggaactgcagaaagtgagatagcactggagacaagaactaagcctctcaagatacttttagtgt

SEQ ID NO: 27637 - DNA, 201 bp, Homo sapiens
atattaccaaagcccccaaggttgagaaaggccctcttcctggggaagactggactattttccaatataatcattcaacctaccagcctgtacttttaackgagttacagacagaaaaatccctgtcatccttgtctagcaaaacactctttgcaacggtgattcaggatctggggcttcatgatggaattcagagagtac

SEQ ID NO: 27638 - DNA, 201 bp, Homo sapiens
tagaaaaatactgtgtggaatacagtgttagtataatcggttttcataaagccaatgagaacagcttaccaagtacacaattaaaaggctttccgttaaaycttttcaataatctagctctaaaggactgttttgttaaccctcaatctcctttgctgcatattaccaaagcccccaaggttgagaaaggccctcttcctg

SEQ ID NO: 27639 - DNA, 201 bp, Homo sapiens
ctttattcactatggcactttaggaaacgaaattgggaaaaagcttccaaaacattattctaaaaaatgaatcttattgtgaaacttcggagaagttttcraacattgattgttctcttagctaccttttgcttggtgagcattgtcatttctgcctattttctctactctggctacaaacaggaaatgacacttattgaa

SEQ ID NO: 27640 - DNA, 201 bp, Homo sapiens
gatggttacatgaactctggggaagtgatatttgcaacatctcatactttattcactatggcactttaggaaacgaaattgggaaaaagcttccaaaacaytattctaaaaaatgaatcttattgtgaaacttcggagaagttttcgaacattgattgttctcttagctaccttttgcttggtgagcattgtcatttctgc

SEQ ID NO: 27641 - DNA, 201 bp, Homo sapiens
atattgaaatgcttctctagattatgcttagaggattctgcagcaattctcagtattggacatattcaaaatctcctcaacgtatatccttcccatctatygccttccagctttaactcagttgtgctcccttcaaacattttacatgatttgcgatggttacatgaactctggggaagtgatatttgcaacatctcatac

SEQ ID NO: 27642 - DNA, 201 bp, Homo sapiens
ctaattacttccattcggaagaagctccaagacgagccgcatctcttgtccccaaagccaagatcatcaccatcctcattgacccctcagacagggcataytcttggtaccagcaccaacgatcacatgaagatccagctgctctgaggttcaatttctatgaagttatttcaacaggacattgggctccatctgacttaa

SEQ ID NO: 27643 - DNA, 176 bp, Homo sapiens; identical to SEQ ID NO: 27636

SEQ ID NO: 27644 - DNA, 201 bp, Homo sapiens; identical to SEQ ID NO: 27637

SEQ ID NO: 27645 - DNA, 201 bp, Homo sapiens; identical to SEQ ID NO: 27638

SEQ ID NO: 27646 - DNA, 201 bp, Homo sapiens; identical to SEQ ID NO: 27639

SEQ ID NO: 27647 - DNA, 201 bp, Homo sapiens; identical to SEQ ID NO: 27640

SEQ ID NO: 27648 - DNA, 201 bp, Homo sapiens; identical to SEQ ID NO: 27641

SEQ ID NO: 27649 - DNA, 201 bp, Homo sapiens; identical to SEQ ID NO: 27642

SEQ ID NO: 27650 - DNA, 150 bp, Homo sapiens
agccccgggacgcacaggcccaggagccccgggacgcacgggaagccccyatcgcggcggaaactgcggccagcggtgccggggccggtggagggacggccagagcagcggagaacgagcggagccgattctcccgcaacagtggacgcg

SEQ ID NO: 27651 - DNA, 201 bp, Homo sapiens
tgggcctgaagcgctactgctgccgccggatgctgctggcccacgtggacctgatcgagaagctgctcaattatgcacccctggagaagtgaccacgctgraacccacccacccgctgtgctgaccatgggccctgagcgtcctaccccgaattcacgaggctgaggcatccgggagctggcgtaatgcctggccgcagtg

SEQ ID NO: 27652 - DNA, 201 bp, Homo sapiens
ccgctgtgctgaccatgggccctgagcgtcctaccccgaattcacgaggctgaggcatccgggagctggcgtaatgcctggccgcagtgtgtgtgtatccsataccccactctggaaggaaccatccagtaaaggtctttcagaaccactaaggtcccagccctcactaggatgtcaggagccaggtctaggcccagcttt

SEQ ID NO: 27653 - DNA, 201 bp, Homo sapiens
gtggacctgatcgagaagctgctcaattatgcacccctggagaagtgaccacgctggaacccacccacccgctgtgctgaccatgggccctgagcgtcctrccccgaattcacgaggctgaggcatccgggagctggcgtaatgcctggccgcagtgtgtgtgtatcccataccccactctggaaggaaccatccagtaaa

SEQ ID NO: 27654 - DNA, 201 bp, Homo sapiens
tgccctgggcctgaagcgctactgctgccgccggatgctgctggcccacgtggacctgatcgagaagctgctcaattatgcacccctggagaagtgaccamgctggaacccacccacccgctgtgctgaccatgggccctgagcgtcctaccccgaattcacgaggctgaggcatccgggagctggcgtaatgcctggccg

SEQ ID NO: 27655 - DNA, 201 bp, Homo sapiens
gccctgggcctgaagcgctactgctgccgccggatgctgctggcccacgtggacctgatcgagaagctgctcaattatgcacccctggagaagtgaccackctggaacccacccacccgctgtgctgaccatgggccctgagcgtcctaccccgaattcacgaggctgaggcatccgggagctggcgtaatgcctggccgc

SEQ ID NO: 27656 - DNA, 201 bp, Homo sapiens
gctactgctgccgccggatgctgctggcccacgtggacctgatcgagaagctgctcaattatgcacccctggagaagtgaccacgctggaacccacccacmcgctgtgctgaccatgggccctgagcgtcctaccccgaattcacgaggctgaggcatccgggagctggcgtaatgcctggccgcagtgtgtgtgtatccc

SEQ ID NO: 27657 - DNA, 201 bp, Homo sapiens
ccatgatcatccctgtacgctgcttcacttgtggcaagatcgtcggcaacaagtgggaggcttacctggggctgctgcaggccgagtacaccgagggggaygcgctggatgccctgggcctgaagcgctactgctgccgccggatgctgctggcccacgtggacctgatcgagaagctgctcaattatgcacccctggaga

SEQ ID NO: 27658 - DNA, 201 bp, Homo sapiens
ccgggacgcacaggcccaggagccccgggacgcacgggaagcccccatcgcggcggaaactgcggccagcggtgccggggccggtggagggacggccagarcagcggagaacgagcggagccgattctcccgcaacagtggacgcgcccggggcggggcctgggggggttcttcgcgtgcggcccggccgggccgggcagt

SEQ ID NO: 27659 - DNA, 201 bp, Homo sapiens
agtgaagcagactgggccatgaactctcctagccctggggccagcctgttccacaggcacccctgcaggaggcgctgccaggagagccttccatctcgggkctctttgaggttccctccttctgggtgttcttcaggctgagcagagaggctcctgtaccctctctctcggaatctgaagagccagatttaggccgggcaa

SEQ ID NO: 27660 - DNA, 201 bp, Homo sapiens
gccccgggacgcacaggcccaggagccccgggacgcacgggaagcccccatcgcggcggaaactgcggccagcggtgccggggccggtggagggacggccrgagcagcggagaacgagcggagccgattctcccgcaacagtggacgcgcccggggcggggcctgggggggttcttcgcgtgcggcccggccgggccgggc

SEQ ID NO: 27661 - DNA, 201 bp, Homo sapiens
cacctacgcccacctcacccggggtctgcagtgtgcgggagcagcaggaggagatcacgttcaaggggtgcatggcgaacgtgacggtaacccgctgtgarggcgcctgcatttccgctgccagcttcaacatcatcacccagcaggtggatgcccgctgcagctgctgccgccccctccactcctatgagcagcagctgg

SEQ ID NO: 27662 - DNA, 201 bp, Homo sapiens
cctgaccagctccctcactgcccatggaagcacccctgcttctgccccggtatcttctctcgggacacctacgcccacctcacccggggtctgcagtgtgygggagcagcaggaggagatcacgttcaaggggtgcatggcgaacgtgacggtaacccgctgtgagggcgcctgcatttccgctgccagcttcaacatcat

SEQ ID NO: 27663 - DNA, 201 bp, Homo sapiens
ccacactcctgcagaccctgagccagcagagagggactgaggcggacagtggtcacggacctcccaggcacacagggcactcccgaccacccctgcccacygtccaacacctcccagcccctgaacttggccccagccctgctgggcccagaaccctgcagatgaagccacagagcaggcgctcgaccagacccatcaggg

SEQ ID NO: 27664 - DNA, 178 bp, Homo sapiens
atgtggctctacctggcggtcctcctgggcctatactaccttctgcactggtactgggagaggcaggtggtgagtcasctgagagacaagtacgtgttcatcatgagctgtgactcacgcttcaggaagctactggccagacaactgaatgcacaggcttgcgggagctgcatgtagg

SEQ ID NO: 27665 - DNA, 133 bp, Homo sapiens
atgtggctctacctggcggtcctcctgggcctrtactaccttctgcactggtactgggagaggcaggtggtgagtcacctgagagacaagtacgtgttcatcatgagctgtgactcacgcttcaggaagctac

SEQ ID NO: 27666 - DNA, 126 bp, Homo sapiens
atgtggctctacctggcggtcctccwgggcctatactaccttctgcactggtactgggagaggcaggtggtgagtcacctgagagacaagtacgtgttcatcatgagctgtgactcacgcttcagg

SEQ ID NO: 27667 - DNA, 117 bp, Homo sapiens
atgtggctctacctggyggtcctcctgggcctatactaccttctgcactggtactgggagaggcaggtggtgagtcacctgagagacaagtacgtgttcatcatgagctgtgactca

SEQ ID NO: 27668 - DNA, 201 bp, Homo sapiens
ggacatgaacctgttggggatgattgatgtgactctgatcctgctgccctaatgaggaaggccaggggctgcatggtcaacctctccagcatcgcaggccrggtttcactttttggtgcaggctactgcatctccaagtacagcgtggaggccttctccgactccctctggagggagctctcccactttggagtgaaggtg

SEQ ID NO: 27669 - DNA, 201 bp, Homo sapiens
gtgcgggccctgctctgcaccctgcacgccgtcccgtcacccgccgcgccctgcccgccaaggccctggcagctgggtgtggacgccgtccgtacgctgcrcactggacccgctctgctctgggtgcgtaaattcacagagaaacatgaatgcgtaacaacagaaaatggcattggaacagtgggaatcagcaatttggca

SEQ ID NO: 27670 - DNA, 201 bp, Homo sapiens
actagatgaacttatgagtgaagaagcttatgagaaatacataaaatctattgaggagtgaaaatggaactcctaaataaactagtatgaaataacgcaasccagcagagttgtcttaaattagtggtggatagacttacaatagcaacttttagcattaccgatggggaagaaaaaactactgttaacactgctaatgaa

SEQ ID NO: 27671 - DNA, 166 bp, Homo sapiens
acagcagcgaacatggcgctgtgagtggtgcggagcgtgcgggccctgctctgcaccctgcacgcsgtcccgtcacccgccgcgccctgcccgccaaggccctggcagctgggtgtggacgccgtccgtacgctgcgcactggacccgctctgctctgggtgcgta

SEQ ID NO: 27672 - DNA, 201 bp, Homo sapiens
atctattgaggagtgaaaatggaactcctaaataaactagtatgaaataacgcaacccagcagagttgtcttaaattagtggtggatagacttacaatagmaacttttagcattaccgatggggaagaaaaaactactgttaacactgctaatgaaagaaaatgccctttaactttctaatgattatagataaatagaata

SEQ ID NO: 27673 - DNA, 201 bp, Homo sapiens
ggagtgaaaatggaactcctaaataaactagtatgaaataacgcaacccagcagagttgtcttaaattagtggtggatagacttacaatagcaacttttarcattaccgatggggaagaaaaaactactgttaacactgctaatgaaagaaaatgccctttaactttctaatgattatagataaatagaatatgcgtcttt

SEQ ID NO: 27674 - DNA, 201 bp, Homo sapiens
ttggtgctttggaaagtgtgaaagctgctagtgaactctgttctcctttatcaggagaagtaactgaaattaatgaagctcttgcagaaaatccaggactygtaaacaaatcttgttatgaagatggttggcagatcaagatgacactgagtaacccttcagaactagatgaacttatgagtgaagaagcttatgagaaat

SEQ ID NO: 27675 - DNA, 201 bp, Homo sapiens; identical to SEQ ID NO: 27669

SEQ ID NO: 27676 - DNA, 201 bp, Homo sapiens; identical to SEQ ID NO: 27670

SEQ ID NO: 27677 - DNA, 166 bp, Homo sapiens; identical to SEQ ID NO: 27671

SEQ ID NO: 27678 - DNA, 201 bp, Homo sapiens; identical to SEQ ID NO: 27672

SEQ ID NO: 27679 - DNA, 201 bp, Homo sapiens; identical to SEQ ID NO: 27673

SEQ ID NO: 27680 - DNA, 201 bp, Homo sapiens
acggcgatgcaaaaaccaaaatactttccttcttacaacttttgctaacgtagttaatgtttgtggtaacccaaatatgacctgtcctagtaacaaaactmgcaaaaattgtcaccacagtggaagccaggtgcctttaatccactgtaacctcacaactccaagtccacagaatatttcaaactgcaggtatgcgcagac

SEQ ID NO: 27681 - DNA, 191 bp, Homo sapiens
aatcatctaagctcctgtatcagcactcctcatcatcactcatctgccaagctcctcaatcatagccaagatcccatctctccatatactttgggtatcarcatctgtcctcatcagtctccataccccttcagctttcctgagctgaagtgccttgtgaaccctgcaataaactgctttgcaaattcatc

SEQ ID NO: 27682 - DNA, 201 bp, Homo sapiens
tcacaactccaagtccacagaatatttcaaactgcaggtatgcgcagacaccagcaaacatgttctatatagttgcatgtgacaacagagatcaacgacgrgaccctccacagtatccggtggttccagttcacctggatagaatcatctaagctcctgtatcagcactcctcatcatcactcatctgccaagctcctcaa

SEQ ID NO: 27683 - DNA, 201 bp, Homo sapiens
gcaaaaaccaaaatactttccttcttacaacttttgctaacgtagttaatgtttgtggtaacccaaatatgacctgtcctagtaacaaaactcgcaaaaaytgtcaccacagtggaagccaggtgcctttaatccactgtaacctcacaactccaagtccacagaatatttcaaactgcaggtatgcgcagacaccagcaa

SEQ ID NO: 27684 - DNA, 158 bp, Homo sapiens
gctgcccctgaaccccagaacaaccagctggatcagttctcacaggagctacagcgckgagactgggaaacatggttccaaaactgttcacttcccaaatttgtctgcttcttctgttggggcttctggctgtggagggctcactccatgtcaaacct

SEQ ID NO: 27685 - DNA, 201 bp, Homo sapiens
agctaagctgtttccagggtgacagagtggcgacctcggtggtcgattgagcaggtctgagaattgttcccaaagggttgtgcgtcaccgagtcgttggcrctgtcatggcgggtgtgctgaagaagaccactggccttgtgggattggctgtgtgcaatactcctcacgaggctaagaatattgtacacaaagattcttg

SEQ ID NO: 27686 - DNA, 201 bp, Homo sapiens
gcctttaattttcttaatcaacctaattacatcaggatagaggtagagtttctgtaaaagaagagacattaagagttcctgaaatttatatctggcatacsgataggcttatattcaaaacatcttagtcatacgaccataaattaaaagtggagtcactaaatagtttgcagtacgtttctaatataagtgtaggtgggt

SEQ ID NO: 27687 - DNA, 201 bp, Homo sapiens
gaaaaccttcaaattagaatacattgtacagttaaagaaattgacttggtacttaaaagaaagatttcccattgcatacaggttattggagaaattttccytttgttgcatttgtggaagttagttttctggcccgtggcctttaattttcttaatcaacctaattacatcaggatagaggtagagtttctgtaaaagaag

SEQ ID NO: 27688 - DNA, 201 bp, Homo sapiens
taattacatcaggatagaggtagagtttctgtaaaagaagagacattaagagttcctgaaatttatatctggcatacggataggcttatattcaaaacatyttagtcatacgaccataaattaaaagtggagtcactaaatagtttgcagtacgtttctaatataagtgtaggtgggtatcaaaacaagacaaatgctgtt

SEQ ID NO: 27689 - DNA, 201 bp, Homo sapiens
acaaatgagaagctggctatggttaaagcggaaccagatgttaaaaaattagaagaccaacttcaaggcggtcaattagaagaggtgattcttcaggctgracatgaactaaatctggcaagaaaaatgagggaatggaaactatgggagccattagtggaagagcctcctgccgatcagtggaaatggccaatataatta

SEQ ID NO: 27690 - DNA, 196 bp, Homo sapiens
gcatacggataggcttatattcaaaacatcttagtcatacgaccataaattaaaagtggagtcactaaatagtttgcagtacgtttctaatataagtgtasgtgggtatcaaaacaagacaaatgctgttcagggaaagaagttggcaagcttaaggttaaacaaaaataaaattacatgtgttttcgccttccta

SEQ ID NO: 27691 - DNA, 201 bp, Homo sapiens
gaaatttatatctggcatacggataggcttatattcaaaacatcttagtcatacgaccataaattaaaagtggagtcactaaatagtttgcagtacgtttytaatataagtgtaggtgggtatcaaaacaagacaaatgctgttcagggaaagaagttggcaagcttaaggttaaacaaaaataaaattacatgtgttttc

SEQ ID NO: 27692 - DNA, 201 bp, Homo sapiens; identical to SEQ ID NO: 27686

SEQ ID NO: 27693 - DNA, 201 bp, Homo sapiens
agctaagctgtttccagggtgacagagtggcgacctcggtggtcgattgagcaggtctgagaattgttcccaaagggttgtgcgtcaccgagtcgttggcrctgtcatggcgggtgtgctgaagaagaccactggccttgtgggattggctgtgtgcaatactcctcacgagaaattcaaataagaaaaattaaaaaaaaa

SEQ ID NO: 27694 - DNA, 201 bp, Homo sapiens; identical to SEQ ID NO: 27687

SEQ ID NO: 27695 - DNA, 201 bp, Homo sapiens; identical to SEQ ID NO: 27688

SEQ ID NO: 27696 - DNA, 201 bp, Homo sapiens; identical to SEQ ID NO: 27689

SEQ ID NO: 27697 - DNA, 196 bp, Homo sapiens; identical to SEQ ID NO: 27690

SEQ ID NO: 27698 - DNA, 201 bp, Homo sapiens; identical to SEQ ID NO: 27691

SEQ ID NO: 27699 - DNA, 201 bp, Homo sapiens; identical to SEQ ID NO: 27686

SEQ ID NO: 27700 - DNA, 201 bp, Homo sapiens; identical to SEQ ID NO: 27687

SEQ ID NO: 27701 - DNA, 201 bp, Homo sapiens; identical to SEQ ID NO: 27688

SEQ ID NO: 27702 - DNA, 201 bp, Homo sapiens; identical to SEQ ID NO: 27689

SEQ ID NO: 27703 - DNA, 193 bp, Homo sapiens
gcatacggataggcttatattcaaaacatcttagtcatacgaccataaattaaaagtggagtcactaaatagtttgcagtacgtttctaatataagtgtasgtgggtatcaaaacaagacaaatgctgttcagggaaagaagttggcaagcttaaggttaaacaaaaataaaattacatgtgttttcgccttc

SEQ ID NO: 27704 - DNA, 201 bp, Homo sapiens; identical to SEQ ID NO: 27691

SEQ ID NO: 27705 - DNA, 201 bp, Homo sapiens
agctaagctgtttccagggtgacagagtggcgacctcggtggtcgattgagcaggtctgagaattgttcccaaagggttgtgcgtcaccgagtcgttggcrctgtcatggcgggtgtgctgaagaagaccactggccttgtgggattggctgtgtgcaatactcctcacgagaggctaagaatattgtacacaaagattct

SEQ ID NO: 27706 - DNA, 201 bp, Homo sapiens; identical to SEQ ID NO: 27686

SEQ ID NO: 27707 - DNA, 201 bp, Homo sapiens; identical to SEQ ID NO: 27687

SEQ ID NO: 27708 - DNA, 201 bp, Homo sapiens; identical to SEQ ID NO: 27688

SEQ ID NO: 27709 - DNA, 201 bp, Homo sapiens; identical to SEQ ID NO: 27689

SEQ ID NO: 27710 - DNA, 196 bp, Homo sapiens; identical to SEQ ID NO: 27690

SEQ ID NO: 27711 - DNA, 201 bp, Homo sapiens; identical to SEQ ID NO: 27691

SEQ ID NO: 27712 - DNA, 201 bp, Homo sapiens; identical to SEQ ID NO: 27705

SEQ ID NO: 27713 - DNA, 201 bp, Homo sapiens; identical to SEQ ID NO: 27686

SEQ ID NO: 27714 - DNA, 201 bp, Homo sapiens; identical to SEQ ID NO: 27687

SEQ ID NO: 27715 - DNA, 201 bp, Homo sapiens; identical to SEQ ID NO: 27688

SEQ ID NO: 27716 - DNA, 201 bp, Homo sapiens; identical to SEQ ID NO: 27689

SEQ ID NO: 27717 - DNA, 195 bp, Homo sapiens
gcatacggataggcttatattcaaaacatcttagtcatacgaccataaattaaaagtggagtcactaaatagtttgcagtacgtttctaatataagtgtasgtgggtatcaaaacaagacaaatgctgttcagggaaagaagttggcaagcttaaggttaaacaaaaataaaattacatgtgttttcgccttcct

SEQ ID NO: 27718 - DNA, 201 bp, Homo sapiens; identical to SEQ ID NO: 27691

SEQ ID NO: 27719 - DNA, 201 bp, Homo sapiens; identical to SEQ ID NO: 27686

SEQ ID NO: 27720 - DNA, 201 bp, Homo sapiens; identical to SEQ ID NO: 27687

SEQ ID NO: 27721 - DNA, 201 bp, Homo sapiens; identical to SEQ ID NO: 27688

SEQ ID NO: 27722 - DNA, 201 bp, Homo sapiens
acagaacagattacaaatgagaagctggctatggttaaagcggaaccagatgttaaaaaattagaagaccaacttcaaggcggtcaattagaagaggctgracatgaactaaatctggcaagaaaaatgagggaatggaaactatgggagccattagtggaagagcctcctgccgatcagtggaaatggccaatataatta

SEQ ID NO: 27723 - DNA, 195 bp, Homo sapiens; identical to SEQ ID NO: 27717

SEQ ID NO: 27724 - DNA, 201 bp, Homo sapiens; identical to SEQ ID NO: 27691

SEQ ID NO: 27725 - DNA, 201 bp, Homo sapiens; identical to SEQ ID NO: 27686

SEQ ID NO: 27726 - DNA, 201 bp, Homo sapiens; identical to SEQ ID NO: 27687

SEQ ID NO: 27727 - DNA, 201 bp, Homo sapiens; identical to SEQ ID NO: 27688

SEQ ID NO: 27728 - DNA, 201 bp, Homo sapiens; identical to SEQ ID NO: 27722

SEQ ID NO: 27729 - DNA, 196 bp, Homo sapiens; identical to SEQ ID NO: 27690

SEQ ID NO: 27730 - DNA, 201 bp, Homo sapiens; identical to SEQ ID NO: 27691

SEQ ID NO: 27731 - DNA, 201 bp, Homo sapiens
cttccagaatcataggtattgacatcaacagtgagaagtttgtgaaggctaaagccctgggagccactgactgcctcaatcctagagacttacataaacckatccaggaagttatcattgaattgaccaagggaggtgtggattttgcccttgactgtgcaggtggatctgaaaccatgaaagcagccctggactgtacaa

SEQ ID NO: 27732 - DNA, 201 bp, Homo sapiens
attcatctttatatgtttaatgggcttttctctattattttatatttttcaataaaagaaaaaagaatttaaaaaatcttggagctcactgggagcaatgdggtttgcagctgaagtccaatagtacaaatgatgtggtaagaggccggcagggctgtgaattacagcaacaaaggagaaaaggaagtgattggagaatta

SEQ ID NO: 27733 - DNA, 201 bp, Homo sapiens
ttggatagagaagcttaaataggtagtaaaccactaaatatgcaaggaagtgattatcagggttgtgaaggagaagaacaggtaagttaaatgggcgattstgaggagtagaaatttcctttacttcataattatttgttaattcatctttatatgtttaatgggcttttctctattattttatatttttcaataaaagaa

SEQ ID NO: 27734 - DNA, 201 bp, Homo sapiens
catttgacctaatgaaccaaggaaaaagcatccgaacaatcctcatcttttgaagatgccaggagcaattcggaatactatctgattgaatgtgaacctgyctggttaatttattacctgatttgatgaaccaaggaaagccatgcgtttaaacaaatatttacatttaatatgggaacataaaagagctttaaatattat

SEQ ID NO: 27735 - DNA, 201 bp, Homo sapiens
aagccatgcgtttaaacaaatatttacatttaatatgggaacataaaagagctttaaatattatagactttgtacctgttatatatatgaatattccctaygttaaataataataataactagtgtttatgaatagaatcatatcatctttagaaattgtttaaaattagttctgggaagttgaaagtggggaatgaagag

SEQ ID NO: 27736 - DNA, 201 bp, Homo sapiens
gtttcattatacttttctctccacttttgtctatgttgaaaattttctgggagctaaatgatgagaacacatggacacatgatggggaacaacacacactrgggcctgttgagggcagggagtcggcagagagagagcatcaggaagaatagctaatggatgctgggcttcatacctgggtgatgagatgatctgtgcagc

SEQ ID NO: 27737 - DNA, 201 bp, Homo sapiens
tccctgtgccatactgatgccactgttatcgattctaaatttgagggcctagctttcccagtgatcgttggccatgaggctgcaggtattgtggaaagtaytgggccaggagtgaccaacgtcaaaccaggtgacaaagtaattccactttatgcacctctatgtagaaaatgcaagttttgtctgagtccactcacaaat

SEQ ID NO: 27738 - DNA, 201 bp, Homo sapiens
gccatatgtttataatttttttagattgggtaatgaatacatggagtttcattatacttttctctccacttttgtctatgttgaaaattttctgggagctraatgatgagaacacatggacacatgatggggaacaacacacactggggcctgttgagggcagggagtcggcagagagagagcatcaggaagaatagctaa

SEQ ID NO: 27739 - DNA, 201 bp, Homo sapiens
cagccatcgcctgggaagcaggcaagcccctttgcattgaagaggttgaagtagctccccccaaggctcatgaagttcgcattcagatcattgctacctcyctgtgccatactgatgccactgttatcgattctaaatttgagggcctagctttcccagtgatcgttggccatgaggctgcaggtattgtggaaagtattg

SEQ ID NO: 27740 - DNA, 105 bp, Homo sapiens
aaagrctttgctagattaaactattggatagagaagcttaaataggtagtaaaccactaaatatgcaaggaagtgattatcagggttgtgaaggagaagaacagg

SEQ ID NO: 27741 - DNA, 201 bp, Homo sapiens
atcgcctgggaagcaggcaagcccctttgcattgaagaggttgaagtagctccccccaaggctcatgaagttcgcattcagatcattgctacctccctgtrccatactgatgccactgttatcgattctaaatttgagggcctagctttcccagtgatcgttggccatgaggctgcaggtattgtggaaagtattgggcca

SEQ ID NO: 27742 - DNA, 201 bp, Homo sapiens
ctcactgggagcaatggggtttgcagctgaagtccaatagtacaaatgatgtggtaagaggccggcagggctgtgaattacagcaacaaaggagaaaaggmagtgattggagaattaagcaacatgaatggtatttattcaaagacagctcattataggacacggaactccctgggtaggagtttgaagctttcttaactc

SEQ ID NO: 27743 - DNA, 201 bp, Homo sapiens
tcttttgaagatgccaggagcaattcggaatactatctgattgaatgtgaacctgcctggttaatttattacctgatttgatgaaccaaggaaagccatgmgtttaaacaaatatttacatttaatatgggaacataaaagagctttaaatattatagactttgtacctgttatatatatgaatattccctatgttaaata

SEQ ID NO: 27744 - DNA, 201 bp, Homo sapiens
ccgtactataaatggaacattctttggtggttggaaaagtgtagattctatcccaaagctggtcactgactataagaataagaaattcaatctggatgcaytggtgacccataccctgccttttgacaaaatcagtgaggcatttgacctaatgaaccaaggaaaaagcatccgaacaatcctcatcttttgaagatgcca

SEQ ID NO: 27745 - DNA, 201 bp, Homo sapiens
taccctgccttttgacaaaatcagtgaggcatttgacctaatgaaccaaggaaaaagcatccgaacaatcctcatcttttgaagatgccaggagcaattcrgaatactatctgattgaatgtgaacctgcctggttaatttattacctgatttgatgaaccaaggaaagccatgcgtttaaacaaatatttacatttaata

SEQ ID NO: 27746 - DNA, 201 bp, Homo sapiens
ctataagaataagaaattcaatctggatgcactggtgacccataccctgccttttgacaaaatcagtgaggcatttgacctaatgaaccaaggaaaaagcrtccgaacaatcctcatcttttgaagatgccaggagcaattcggaatactatctgattgaatgtgaacctgcctggttaatttattacctgatttgatgaa

SEQ ID NO: 27747 - DNA, 201 bp, Homo sapiens
aggtggatctgaaaccatgaaagcagccctggactgtacaaccgcaggctggggatcatgtactttcattggagtagctgctggtagcaaaggattgactrtttttccagaggagctaataatcggccgtactataaatggaacattctttggtggttggaaaagtgtagattctatcccaaagctggtcactgactataa

SEQ ID NO: 27748 - DNA, 201 bp, Homo sapiens
tagaaatttcctttacttcataattatttgttaattcatctttatatgtttaatgggcttttctctattattttatatttttcaataaaagaaaaaagaawttaaaaaatcttggagctcactgggagcaatggggtttgcagctgaagtccaatagtacaaatgatgtggtaagaggccggcagggctgtgaattacagc

SEQ ID NO: 27749 - DNA, 201 bp, Homo sapiens; identical to SEQ ID NO: 27731

SEQ ID NO: 27750 - DNA, 201 bp, Homo sapiens; identical to SEQ ID NO: 27732

SEQ ID NO: 27751 - DNA, 106 bp, Homo sapiens
tacacctaatacccacaaaacttaaaatataaaatgttttaaataaaaataaagaaaagatttcccacaataaaaagatttttactggaaaaaaatcactrtattt

SEQ ID NO: 27752 - DNA, 201 bp, Homo sapiens; identical to SEQ ID NO: 27736

SEQ ID NO: 27753 - DNA, 201 bp, Homo sapiens; identical to SEQ ID NO: 27738

SEQ ID NO: 27754 - DNA, 201 bp, Homo sapiens; identical to SEQ ID NO: 27739

SEQ ID NO: 27755 - DNA, 201 bp, Homo sapiens
gcacaacagggagactatagtcaacagcaatttaattgtatattttaatatgactaaaagagtataatggattgtttgtaacacaaataaatgcttgaggrgatggacaccccatattacatgatgtgattattacacattgcatgcctatatcaaaacatctcatgtaccccataaatatatacacctaatacccacaaa

SEQ ID NO: 27756 - DNA, 201 bp, Homo sapiens; identical to SEQ ID NO: 27748

SEQ ID NO: 27757 - DNA, 201 bp, Homo sapiens; identical to SEQ ID NO: 27733

SEQ ID NO: 27758 - DNA, 201 bp, Homo sapiens; identical to SEQ ID NO: 27734

SEQ ID NO: 27759 - DNA, 201 bp, Homo sapiens; identical to SEQ ID NO: 27735

SEQ ID NO: 27760 - DNA, 201 bp, Homo sapiens; identical to SEQ ID NO: 27737

SEQ ID NO: 27761 - DNA, 201 bp, Homo sapiens; identical to SEQ ID NO: 27742

SEQ ID NO: 27762 - DNA, 201 bp, Homo sapiens; identical to SEQ ID NO: 27741

SEQ ID NO: 27763 - DNA, 105 bp, Homo sapiens; identical to SEQ ID NO: 27740

SEQ ID NO: 27764 - DNA, 201 bp, Homo sapiens; identical to SEQ ID NO: 27743

SEQ ID NO: 27765 - DNA, 201 bp, Homo sapiens; identical to SEQ ID NO: 27744

SEQ ID NO: 27766 - DNA, 201 bp, Homo sapiens; identical to SEQ ID NO: 27745

SEQ ID NO: 27767 - DNA, 201 bp, Homo sapiens; identical to SEQ ID NO: 27746

SEQ ID NO: 27768 - DNA, 201 bp, Homo sapiens; identical to SEQ ID NO: 27747

SEQ ID NO: 27769 - DNA, 201 bp, Homo sapiens
attgatatgtatatagaaggtatagcagatttgggtgaaatgatccttcttctgccctttagtcaacctgaggaacaagatgccaagcttgccttgatccmagagaaaacaaaaaatcgctacttccctgcctttgaaaaagtcttaaagagccacggacaagactaccttgttggcaacaagctgagccgggctgacatt

SEQ ID NO: 27770 - DNA, 201 bp, Homo sapiens
tagttaaaattgatttcttctcattaggatctgatgtgaattcagttttccaatctcctcctagccaacaattttcttggaattacaaattcagtaaaaawggaaactataaattatgtggtttgtttgacttttccaagaattgccctgtaacatacaatttgtcatacaatctattaaaatgccaatgtaaaaatgcac

SEQ ID NO: 27771 - DNA, 201 bp, Homo sapiens
tgatccttcttctgccctttagtcaacctgaggaacaagatgccaagcttgccttgatccaagagaaaacaaaaaatcgctacttccctgcctttgaaaakgtcttaaagagccacggacaagactaccttgttggcaacaagctgagccgggctgacattcacctggtggaacttctctactacgtggaagagcttgact

SEQ ID NO: 27772 - DNA, 201 bp, Homo sapiens
tagagtttgaagagaaatttataaaatctgcagaagatttggacaagttaagaaatgatggatatttgatgttccagcaagtgccaatggttgagattgaygggatgaagctggtgcagaccagagccattctcaactacattgccagcaaatacaacctctatgggaaagacataaaggagaaagccctgattgatatgt

SEQ ID NO: 27773 - DNA, 201 bp, Homo sapiens
tgagaggaacaaagagcttataaatacattaggacctggaattcggttgtccagccacaaaggtgacagcatttaacaaagcttagagaaacctccaggasactgctaccatggcagagaagcccaagctccactactccaatatacggggcagaatggagtccatccggtggctcctggctgcagctggagtagagtttg

SEQ ID NO: 27774 - DNA, 201 bp, Homo sapiens
tacaacctctatgggaaagacataaaggagaaagccctgattgatatgtatatagaaggtatagcagatttgggtgaaatgatccttcttctgccctttastcaacctgaggaacaagatgccaagcttgccttgatccaagagaaaacaaaaaatcgctacttccctgcctttgaaaaagtcttaaagagccacggacaa

SEQ ID NO: 27775 - DNA, 201 bp, Homo sapiens
cagcaaatacaacctctatgggaaagacataaaggagaaagccctgattgatatgtatatagaaggtatagcagatttgggtgaaatgatccttcttctgycctttagtcaacctgaggaacaagatgccaagcttgccttgatccaagagaaaacaaaaaatcgctacttccctgcctttgaaaaagtcttaaagagcca

SEQ ID NO: 27776 - DNA, 201 bp, Homo sapiens
agcttccctctgctgaaggccctgaaaaccagaatcagtaacctgcccacagtgaagaagtttctacagcctggcagcccaaggaagcctcccatggatgmgaaatctttagaagaatcaaggaagattttcaggttttaataaaccagccatagaggtcaagaacatgcaagaccagtattctaaagttttgcaacaatt

SEQ ID NO: 27777 - DNA, 201 bp, Homo sapiens
tttgcaacaattaagtgctttacctaagtgttgattgtgcctgttgtgaagctaatgaactctttcaaattatatgctaattaaataatacaactcctatwcacccacttagttaaaattgatttcttctcattaggatctgatgtgaattcagttttccaatctcctcctagccaacaattttcttggaattacaaattc

SEQ ID NO: 27778 - DNA, 201 bp, Homo sapiens
gaacatgcaagaccagtattctaaagttttgcaacaattaagtgctttacctaagtgttgattgtgcctgttgtgaagctaatgaactctttcaaattatwtgctaattaaataatacaactcctattcacccacttagttaaaattgatttcttctcattaggatctgatgtgaattcagttttccaatctcctcctagc

SEQ ID NO: 27779 - DNA, 201 bp, Homo sapiens
tctacagcctggcagcccaaggaagcctcccatggatgagaaatctttagaagaatcaaggaagattttcaggttttaataaaccagccatagaggtcaaraacatgcaagaccagtattctaaagttttgcaacaattaagtgctttacctaagtgttgattgtgcctgttgtgaagctaatgaactctttcaaattata

SEQ ID NO: 27780 - DNA, 201 bp, Homo sapiens
gaacaagatgccaagcttgccttgatccaagagaaaacaaaaaatcgctacttccctgcctttgaaaaagtcttaaagagccacggacaagactaccttgytggcaacaagctgagccgggctgacattcacctggtggaacttctctactacgtggaagagcttgactctagccttatttccagcttccctctgctgaag

SEQ ID NO: 27781 - DNA, 201 bp, Homo sapiens
gatgagaaatctttagaagaatcaaggaagattttcaggttttaataaaccagccatagaggtcaagaacatgcaagaccagtattctaaagttttgcaamaattaagtgctttacctaagtgttgattgtgcctgttgtgaagctaatgaactctttcaaattatatgctaattaaataatacaactcctattcacccac

SEQ ID NO: 27782 - DNA, 201 bp, Homo sapiens
cctttagtcaacctgaggaacaagatgccaagcttgccttgatccaagagaaaacaaaaaatcgctacttccctgcctttgaaaaagtcttaaagagccayggacaagactaccttgttggcaacaagctgagccgggctgacattcacctggtggaacttctctactacgtggaagagcttgactctagccttatttcca

SEQ ID NO: 27783 - DNA, 201 bp, Homo sapiens
ttctctactacgtggaagagcttgactctagccttatttccagcttccctctgctgaaggccctgaaaaccagaatcagtaacctgcccacagtgaagaaktttctacagcctggcagcccaaggaagcctcccatggatgagaaatctttagaagaatcaaggaagattttcaggttttaataaaccagccatagaggtc

SEQ ID NO: 27784 - DNA, 201 bp, Homo sapiens
gctcctggctgcagctggagtagagttggaagagaaatttctagaatctgcagaagatttggacaagttaagaaatgatgggagtttgctgttccagcaartaccaatggttgagattgacgggatgaagctggtgcagaccagagccattcttaactacattgccagcaaatacaacctttatgggaaagacatgaagga

SEQ ID NO: 27785 - DNA, 201 bp, Homo sapiens
ttgagattgacgggatgaagctggtgcagaccagagccattcttaactacattgccagcaaatacaacctttatgggaaagacatgaaggagagagccctrattgatatgtacacagaaggtatagtagatttgactgaaatgatccttcttctgctcatatgtcaaccagaggaaagagatgccaagactgccttggtca

SEQ ID NO: 27786 - DNA, 201 bp, Homo sapiens
taccaatggttgagattgacgggatgaagctggtgcagaccagagccattcttaactacattgccagcaaatacaacctttatgggaaagacatgaaggaragagccctgattgatatgtacacagaaggtatagtagatttgactgaaatgatccttcttctgctcatatgtcaaccagaggaaagagatgccaagactg

SEQ ID NO: 27787 - DNA, 201 bp, Homo sapiens
gaagaagcaaggaagattttcaggttttaataaagcagctatggaggccaagaacatgccagaccaatattctacagtttgcaacaatgaagtgctttacytaagtgtggattgtgcctcttgtaaagctaataaactctttccaattacatgctaattaaataataaataactcttatctgtcaacttagctaaaattga

SEQ ID NO: 27788 - DNA, 201 bp, Homo sapiens
gaaggtatagtagatttgactgaaatgatccttcttctgctcatatgtcaaccagaggaaagagatgccaagactgccttggtcaaagagaaaataaaaartcgctacttccctgcctttgaaaaagtcttaaagagccacagacaagactaccttgttggcaacaagctgagctgggctgacattcacctggtggaactt

SEQ ID NO: 27789 - DNA, 201 bp, Homo sapiens; identical to SEQ ID NO: 27784

SEQ ID NO: 27790 - DNA, 201 bp, Homo sapiens; identical to SEQ ID NO: 27785

SEQ ID NO: 27791 - DNA, 201 bp, Homo sapiens; identical to SEQ ID NO: 27786

SEQ ID NO: 27792 - DNA, 201 bp, Homo sapiens; identical to SEQ ID NO: 27788

SEQ ID NO: 27793 - DNA, 201 bp, Homo sapiens
acgtcttaaagagcaatggacaagactaccttgttggcaacaagctgagctgggctgacattcacttggtggaacttctctactacatggaagagcttgamtctagccttatcttcagcttccctctgctgaaggccctgaaaaccagaatcagcaacctgcccatggtgaagaaatttctacagcctggcagcccaagga

SEQ ID NO: 27794 - DNA, 201 bp, Homo sapiens
tggtagtccagaggtagaaaccagagccttcctaagatacatagctgcaaaatatgacttgtatggaaggaacatgaaggaacaagcctggattcacatgyatgtagaaggcttgaaggacctgagtgacatgattatgttccagccactctctctgcctgaagagaagatgaatcttgcatacatccttgaaagagccac

SEQ ID NO: 27795 - DNA, 155 bp, Homo sapiens
cagatttggtctgtgtgtccatgtactggagagtcagtgggcgctcatttctcaragttatgatgtccttggcctggcctgcttttactctgcttgcttagatctgctgctctatggaaaaggattgctgtgtcggccctttagtgagtgtctgc

SEQ ID NO: 27796 - DNA, 155 bp, Homo sapiens; identical to SEQ ID NO: 27795

SEQ ID NO: 27797 - DNA, 201 bp, Homo sapiens
aggaggaagagccccagttgcgctgtggccctgtgtgctatagcccagagggaggtgtccactatgtagctggaacaggaggcctaggaccagcctgatgmaggtctatgaagaccagtggtagtgcccagacttctcctagacatctagtctaaaacattctcctaggaccagggaagcctggcttacagtgccatttct

SEQ ID NO: 27798 - DNA, 201 bp, Homo sapiens
taggaccagcctgatgcaggtctatgaagaccagtggtagtgcccagacttctcctagacatctagtctaaaacattctcctaggaccagggaagcctggsttacagtgccatttctgctgggcaccaccacctgcctgagggcctagctcaccacagcacatcctccaggatctagccttctatctacctcttctctgga

SEQ ID NO: 27799 - DNA, 201 bp, Homo sapiens
cctccgcgtacttttgacaaatactgggcatcaaccatgttccaggaactaccctgggcaaagaaaataactgggcaaggtttccatcggtgtctctgctrgcgggcatcgcccccgccgggccgccaccctgaacgagcccgtccggtcctctgggttccgccaccctgcgtagcgctgcgccagcacccggcccagcac

SEQ ID NO: 27800 - DNA, 201 bp, Homo sapiens
cgcttaagttctttgccctccgcgtacttttgacaaatactgggcatcaaccatgttccaggaactaccctgggcaaagaaaataactgggcaaggtttcyatcggtgtctctgctggcgggcatcgcccccgccgggccgccaccctgaacgagcccgtccggtcctctgggttccgccaccctgcgtagcgctgcgcca

SEQ ID NO: 27801 - DNA, 201 bp, Homo sapiens
cgcccaggccggcttccgaggggcggttcccacaagcgagttccggcgcccagaacggcttcatcctctcgtcccgtccgcggcaaatgcatgcgcctggmaaacccgccaccctccagggcaactcacacctcacctcacgccgcggcgcaaccggactaggaccccgagcagggctgcccagggagcgcctgaaggacc

SEQ ID NO: 27802 - DNA, 201 bp, Homo sapiens
ctcacacctcacctcacgccgcggcgcaaccggactaggaccccgagcagggctgcccagggagcgcctgaaggaccctgcgagggccgcaggctatccarcgtggcgcctggtggccgggccctgtgccggaggacaaggtgaacccgcagccggacttctgctgcactggggctccgaatgacccagaatctggggagt

SEQ ID NO: 27803 - DNA, 201 bp, Homo sapiens
ctcagagctcaaaagactttgaagggcctgtgccttcgctatcgagcgcttaagttctttgccctccgcgtacttttgacaaatactgggcatcaaccatsttccaggaactaccctgggcaaagaaaataactgggcaaggtttccatcggtgtctctgctggcgggcatcgcccccgccgggccgccaccctgaacgag

SEQ ID NO: 27804 - DNA, 201 bp, Homo sapiens
tttgaagggcctgtgccttcgctatcgagcgcttaagttctttgccctccgcgtacttttgacaaatactgggcatcaaccatgttccaggaactaccctrggcaaagaaaataactgggcaaggtttccatcggtgtctctgctggcgggcatcgcccccgccgggccgccaccctgaacgagcccgtccggtcctctgg

SEQ ID NO: 27805 - DNA, 201 bp, Homo sapiens
agctatgattcagtgaaaacaggagagaaggttgtaaagacagcactggatgcttttggaatagatgttgtggtcaacaatgctggaattctgagggaccrttcttttgctaggataacatgggatcacatgaagatgcagaaatatggaaggatcattatcacttcatcagcttcaggaatatatggcagctttggccag

SEQ ID NO: 27806 - DNA, 201 bp, Homo sapiens
agctatgattcagtgaaaacaggagagaaggttgtaaagacagcactggatgcttttggaatagatgttgtggtcaacaatgctggaattctgagggaccrttcttttgctaggataagtgatgaagactgggatatcatccacagagttcaattgcggggctcattccaagtgaccctggaaagcatgggatcacatgaa

SEQ ID NO: 27807 - DNA, 111 bp, Homo sapiens
ggaggactgcrcccagtctatgccctggctttcgtagaaaaaggagcactaattgttgtgaattatttaagaggaagttggtaaagcatccttagttgctgataaggttgt

SEQ ID NO: 27808 - DNA, 201 bp, Homo sapiens
ccgcaagctgggctgcgaagtgctgggcatctcagtggactctcagttcacccacctggcttggatcaacaacccccagagggagggagacttgggccccytgaacatccccctgcttgctgagatcactgttaatgatttgcctgtgggacgctccgtggatgaggctctgcggctggtccaggccttccagtacgcaga

SEQ ID NO: 27809 - DNA, 201 bp, Homo sapiens
ccgcaagctgggctgcgaagtgctgggcatctcagtggactctcagttcacccacctggcttggatcaacaacccccagagggagggagacttgggccccytgaacatccccctgcttgctgaggtggccagtggcttgtctgaggattacgccgtgctgaaaacagatgcgggcattgcctacaggggccgctttatcag

SEQ ID NO: 27810 - DNA, 201 bp, Homo sapiens
agtgaagctgtaggactacaaagagaaatacgtggtcctctttttctaccctctgcacttcacttttgtgtgccccacggagatcatcgcgttcagcgaccatgccgaggacttccgcaagctgggctgcgaagtgctgggcatctcagtggactctcagttcacccacctggcttggatcaacaacccccagagggaggg

SEQ ID NO: 27811 - DNA, 201 bp, Homo sapiens
ccccctgaacatccccctgcttgctgaggtggccagtggcttgtctgaggattacgccgtgctgaaaacagatgcgggcattgcctacaggggccgctttrtcagtgatggcaagggtgtcctttccagatcactgttaatgatttgcctgtgggacgctccgtggatgaggctctgcggctggtccaggccttccagtac

SEQ ID NO: 27812 - DNA, 201 bp, Homo sapiens
acaccatgaaccccgagaatgagcagcacaggctggggagcggcctgcagggggaagtgaagtgggcgctggagcatcaggaggcccggcagcaggcactrgtgacgcgtgtgtgagtggccatctcacctggggccccatcctggagcagagagaacccctgatcgtgggcctgctgagcctcacccccgtgtcttcagg

SEQ ID NO: 27813 - DNA, 201 bp, Homo sapiens
ccaaggccagctccgtcaggcagaggctgaaaatgcccggctgcagctgcagctcaagaaactgaaggatgagtacgtcctacggctgcaacactgcgccyggcaggcagtggagcacgcagatggtgcaggccaagcgccagccaccacggccctccggacattcctggaggcgactctggaggacatccgggcagcgca

SEQ ID NO: 27814 - DNA, 201 bp, Homo sapiens
agcgccagccaccacggccctccggacattcctggaggcgactctggaggacatccgggcagcgcaccgcagccgtgagcagcagctggcccgggctgccygcagctaccacaagaggctggtggatctgagccgcaggcatgaagagctactggttgcctacaggggcctggacgctgcatcctgggcccagatccacca

SEQ ID NO: 27815 - DNA, 201 bp, Homo sapiens
tcctcccaggccccgcccctcggccccccgccctgccgccgcaagacccctgacccgggacagccgcgttcccccgccgcccgcctcaccggcacggctgygctgaggacccgaaggacagactgacggaggcggggcctcggccgccggtcacggggtccggactgagcgcggcgctgggctcgggagccgccaaccgcc

SEQ ID NO: 27816 - DNA, 201 bp, Homo sapiens
ggacatccgggcagcgcaccgcagccgtgagcagcagctggcccgggctgcccgcagctaccacaagaggctggtggatctgagccgcaggcatgaagagytactggttgcctacaggggcctggacgctgcatcctgggcccagatccaccagaagctccgggacttctcccgcagcacccaggcagagctggaacggga

SEQ ID NO: 27817 - DNA, 201 bp, Homo sapiens
ggccccgcccctcggccccccgccctgccgccgcaagacccctgacccgggacagccgcgttcccccgccgcccgcctcaccggcacggctgtgctgaggrcccgaaggacagactgacggaggcggggcctcggccgccggtcacggggtccggactgagcgcggcgctgggctcgggagccgccaaccgcccccctccg

SEQ ID NO: 27818 - DNA, 201 bp, Homo sapiens
ttaatgtctcccaggcttggcgctggtctttgccctatgaaaaggtttctcgacttcagaaagcctgtggcgatgccatgaatttgctgggctaccgccamgtcagatctgaacaagaacagagaaacctgttgctggatcttctgtctacctggactgtccctgagcaaatccactaagagggttgagaaggctttgctg

SEQ ID NO: 27819 - DNA, 193 bp, Homo sapiens
gccaggatgcctccagtctgggggaaaatgcttcctcatttgcttctcccagcccacctcaagcagtctccccaccccttgagtctcagcagygttaaagctgttactttcacagcttcctgggagcgagtgctttctcaagcccgtcttgcaaggtcttccacttcagcacaatgctactgcctaaaaaaat

SEQ ID NO: 27820 - DNA, 201 bp, Homo sapiens
tcacattaaatacagtgtttgtcctggcagtgaaactgaagtggttttattattccacacgatatgtttatcttttggtgaggcacatgtatcgaatttayggattacagttattgatggaggacacatggaagaggattcgtttcccagacatactacgagtcttttggctaacaagagttacagctcaggctacagtgt

SEQ ID NO: 27821 - DNA, 201 bp, Homo sapiens
gcagtgaaactgaagtggttttattattccacacgatatgtttatcttttggtgaggcacatgtatcgaatttatggattacagttattgatggaggacaratggaagaggattcgtttcccagacatactacgagtcttttggctaacaagagttacagctcaggctacagtgttaatgtacatcttaaggatggcaaat

SEQ ID NO: 27822 - DNA, 201 bp, Homo sapiens
cttcagtgtgtaaccaagcacaaaaacagtatcaatgttgaatctgtgaatggttttccgtttactgtgatgtgctactgtaaatatacctctttaattayttctggtctctttggtgacctgtttaaatttgtgtacattattgtacatagaataaaatgttttcacatttttatgacaaaatttgaacaaatagctttt

SEQ ID NO: 27823 - DNA, 201 bp, Homo sapiens
acacgtacagctcagcctttctgttagctgcaacttcagtgttggtgaattattatgcttctttgcacattgacttctatggtgcctacaacacgtcagcytttggaattgagctgcttcctcgaaaaggtccctcgctgtggatggcacttatcgttctacagctaacatttggaattggatacgttacactactccaga

SEQ ID NO: 27824 - DNA, 201 bp, Homo sapiens
ttctttggcatcactatgcactaaatacatggttgtttgcagttacagcattttgtgtggaactgtgcttaaaagtaattgtttctctcactgtttatacrttattcatgattgatggctactataatgtcctctgggaaaagcttgacgattatgtctactacgttcgttcaacaggcagtattattgaatttatatttg

SEQ ID NO: 27825 - DNA, 201 bp, Homo sapiens
catcttttcgtagacattttcctgtgctgtttgtctctgcttgcctgtttattcttcctgtcttactcagttatgttctttggcatcactatgcactaaamacatggttgtttgcagttacagcattttgtgtggaactgtgcttaaaagtaattgtttctctcactgtttatacgttattcatgattgatggctactata

SEQ ID NO: 27826 - DNA, 201 bp, Homo sapiens
acgattatgtctactacgttcgttcaacaggcagtattattgaatttatatttggagttgtaatgtttggaaatggggcttacactatgatgtttgagtcrggaagtaaaattcgggcttttatgatgtgcctacatgcatattttaacatctacttacaagccaaaaatggctggaagacatttatgaatcgtaggactg

SEQ ID NO: 27827 - DNA, 112 bp, Homo sapiens
tgccggcggccrcttccgcttccgctggggaggtcctccatgcgcagtcatgagtcgcttcaagtttatcgatattggtatcaacttgactgaccctatgttcagaggaatt

SEQ ID NO: 27828 - DNA, 201 bp, Homo sapiens
gatgtggtgaatttgaaaagaataaccctgatctttacttaaaggagttgctaaatcttgctgaaaacaataaagggaaagttgtggcaataggagaatgyggacttgattttgaccgactgcagttttgtcccaaagatactcaactcaaatattttgaaaaacagtttgaactgtcagaacaaacaaaattaccaatgt

SEQ ID NO: 27829 - DNA, 125 bp, Homo sapiens
tgccggcggccacttccgcttccgytggggaggtcctccatgcgcagtcatgagtcgcttcaagtttatcgatattggtatcaacttgactgaccctatgttcagaggaatttataggggggttc

SEQ ID NO: 27830 - DNA, 163 bp, Homo sapiens
tgccggcggccacttccgcttccgctggggaggtcctccatgcgcagtcatgagtcgcttcargtttatcgatattggtatcaacttgactgaccctatgttcagaggaatttataggggggttcaaaagcatcaagatgacttacaggatgtaatagggaga

SEQ ID NO: 27831 - DNA, 112 bp, Homo sapiens; identical to SEQ ID NO: 27827

SEQ ID NO: 27832 - DNA, 201 bp, Homo sapiens; identical to SEQ ID NO: 27828

SEQ ID NO: 27833 - DNA, 181 bp, Homo sapiens
aaaagctatttgttcaaattttgtcataaaaatgtgaaaacattttattctatgtacaataatgtacacaaatttaaacaggtcaccaaagagaccagaartaattaaagaggtatatttacagtagcacatcacagtaaacggaaaaccattcacagattcaacattgatactgtttttg

SEQ ID NO: 27834 - DNA, 125 bp, Homo sapiens; identical to SEQ ID NO: 27829

SEQ ID NO: 27835 - DNA, 201 bp, Homo sapiens
aacaatttaaaaaaaactatttttgttttgtaatatcttcaaaagaatgaaaggacaattttatgacaatactgcagacacagaatggctaacaaatatayaattttacataaaaaacatttagcacattctggtttatatcaaagtttagttgatacagtttatttgtcaaccctcagtctctctctgaatcaggacttt

SEQ ID NO: 27836 - DNA, 163 bp, Homo sapiens; identical to SEQ ID NO: 27830

SEQ ID NO: 27837 - DNA, 201 bp, Homo sapiens
tttttgttttgtaatatcttcaaaagaatgaaaggacaattttatgacaatactgcagacacagaatggctaacaaatatacaattttacataaaaaacayttagcacattctggtttatatcaaagtttagttgatacagtttatttgtcaaccctcagtctctctctgaatcaggactttcaaactcagctcaattaca

SEQ ID NO: 27838 - DNA, 201 bp, Homo sapiens
tgtgccgggcacgccagagagtggagcaggaacagctcttagcctcagggagcctgtcgggcagtcctgacgtggaggagtgtgctcccaacactggacastgccacctgtgcctgcctccctcggagccctgggaccagaccctgggagtggtcaacttccccagaaaggccagccgcaagccccccagggaggagagct

SEQ ID NO: 27839 - DNA, 201 bp, Homo sapiens
agccgcaagccccccagggaggagagctctgccacctgtgttctggaacagcctggggcccttggggcccaaattctgctggtgcagaggcccaactcagrtctgctggcaggactgtgggagttcccgtccgtgacctgggagccctcagagcagcttcagcgcaaggccctgctgcaggaactacagcgttgggctggg

SEQ ID NO: 27840 - DNA, 201 bp, Homo sapiens
caggcagccggaagaggtggtattgcaggcctctgtctcctcataccatctattcagagacgtagctgaagtcacagccttccgagggagcctgctaagcyggtacgaccaagagaaacgggacctaccatggagaagacgggcagaagatgagatggacctggacaggcgggcatatgctgtgtgggtctcagaggtcat

SEQ ID NO: 27841 - DNA, 201 bp, Homo sapiens
gccgctcaccgtcggaagctgcgggagctgaaactgcgccatcgtcactgtcggcggccatgacaccgctcgtctcccgcctgagtcgtctgtgggccatyatgaggaagccacgagcagccgtgggaagtggtcacaggaagcaggcagccagccaggaagggaggcagaagcatgctaagaacaacagtcaggccaagc

SEQ ID NO: 27842 - DNA, 201 bp, Homo sapiens
gggagctgaaactgcgccatcgtcactgtcggcggccatgacaccgctcgtctcccgcctgagtcgtctgtgggccatcatgaggaagccacgagcagccrtgggaagtggtcacaggaagcaggcagccagccaggaagggaggcagaagcatgctaagaacaacagtcaggccaagccttctgcctgtgatgggatgat

SEQ ID NO: 27843 - DNA, 201 bp, Homo sapiens
ggccccagcaggcctggccaggcagccggaagaggtggtattgcaggcctctgtctcctcataccatctattcagagacgtagctgaagtcacagccttcygagggagcctgctaagctggtacgaccaagagaaacgggacctaccatggagaagacgggcagaagatgagatggacctggacaggcgggcatatgctgt

SEQ ID NO: 27844 - DNA, 201 bp, Homo sapiens; identical to SEQ ID NO: 27838

SEQ ID NO: 27845 - DNA, 201 bp, Homo sapiens; identical to SEQ ID NO: 27839

SEQ ID NO: 27846 - DNA, 201 bp, Homo sapiens; identical to SEQ ID NO: 27840

SEQ ID NO: 27847 - DNA, 201 bp, Homo sapiens
ctgcgggagctgaaactgcgccatcgtcactgtcggcggccatgacaccgctcgtctcccgcctgagtcgtctgccatcatgaggaagccacgagcagccrtgggaagtggtcacaggaagcaggcagccagccaggaagggaggcagaagcatgctaagaacaacagtcaggccaagccttctgcctgtgatgggatgat

SEQ ID NO: 27848 - DNA, 201 bp, Homo sapiens
ggaagccgctcaccgtcggaagctgcgggagctgaaactgcgccatcgtcactgtcggcggccatgacaccgctcgtctcccgcctgagtcgtctgccatyatgaggaagccacgagcagccgtgggaagtggtcacaggaagcaggcagccagccaggaagggaggcagaagcatgctaagaacaacagtcaggccaagc

SEQ ID NO: 27849 - DNA, 201 bp, Homo sapiens; identical to SEQ ID NO: 27843

SEQ ID NO: 27850 - DNA, 201 bp, Homo sapiens
agcttttgattttaagaggaatttactccttgctttccctgttttggggaaaatgaggagagctgcctccaaatcagggaattatattgacacaggtagayatagggaatggaactgaatgaacccaaggtgttacattttgtttcactacacatgagggagaagaataagccctgctatagtgttggccagagcactgcg

SEQ ID NO: 27851 - DNA, 201 bp, Homo sapiens
tgaatgaacccaaggtgttacattttgtttcactacacatgagggagaagaataagccctgctatagtgttggccagagcactgcgactgacgccacaggstgggttaccagttaaagtctcagtgtgactacttggacacctatttttgtttagacacactattcaaagggctgcatgggaaccagaagcttggcctctt

SEQ ID NO: 27852 - DNA, 201 bp, Homo sapiens
atgtaaaagagctggaggtttctgttctttttgaactgacagaggaaagaggaagacaaggctggtggccttgggtagggctttcagtagttgcacagtaytgggcaattcttagccttcccttggttctagccttgattagagatagtcttttttagtgtcattatgttgcccagagtggttctgaattccttgcctcag

SEQ ID NO: 27853 - DNA, 201 bp, Homo sapiens
gccatgagaacaaaacctcttctgtattttttttttccattagtaaaacacaagacttcagattcagccgaattgtggtgtcttacaaggcaggcctttcytacagggggtggaatgtattagtagagcaacccattaatcttttgtagtttgtattaaacttgaactgagaccttgatgagtctttattttaggaagcat

SEQ ID NO: 27854 - DNA, 117 bp, Homo sapiens
gggcaattcttagccttcccttggttctagccttgattagagatagtcttttttagtgtcattatgttgcccagagtggttctgaattccttgcctcaggyggtcctccgcctcagc

SEQ ID NO: 27855 - DNA, 190 bp, Homo sapiens
tttgaactgacagaggaaagaggaagacaaggctggtggccttgggtagggctttcagtagttgcacagtactgggcaattcttagccttcccttggttcyagccttgattagagatagtcttttttagtgtcattatgttgcccagagtggttctgaattccttgcctcaggtggtcctccgcctcagc

SEQ ID NO: 27856 - DNA, 201 bp, Homo sapiens
tgcctggtacctgctatgtaaaagagctggaggtttctgttctttttgaactgacagaggaaagaggaagacaaggctggtggccttgggtagggctttcagtagttgcacagtactgggcaattcttagccttcccttggttctagccttgattagagatagtcttttttagtgtcattatgttgcccagagtggttctg

SEQ ID NO: 27857 - DNA, 201 bp, Homo sapiens; identical to SEQ ID NO: 27850

SEQ ID NO: 27858 - DNA, 201 bp, Homo sapiens; identical to SEQ ID NO: 27851

SEQ ID NO: 27859 - DNA, 201 bp, Homo sapiens; identical to SEQ ID NO: 27852

SEQ ID NO: 27860 - DNA, 201 bp, Homo sapiens
gccatgagaacaaaacctcttctgtattttttttttccattagtaaaacacaagacttcagattcagccgaattgtggtgtcttacaaggcaggcctttcytacagggggtggagagaccagcctttcttcctttggtaggaatggcctgagttggcgttgtgggcaggctactggtttgtatgatgtattagtagagcaa

SEQ ID NO: 27861 - DNA, 117 bp, Homo sapiens; identical to SEQ ID NO: 27854

SEQ ID NO: 27862 - DNA, 190 bp, Homo sapiens; identical to SEQ ID NO: 27855

SEQ ID NO: 27863 - DNA, 201 bp, Homo sapiens; identical to SEQ ID NO: 27856

SEQ ID NO: 27864 - DNA, 201 bp, Homo sapiens; identical to SEQ ID NO: 27850

SEQ ID NO: 27865 - DNA, 201 bp, Homo sapiens; identical to SEQ ID NO: 27851

SEQ ID NO: 27866 - DNA, 201 bp, Homo sapiens; identical to SEQ ID NO: 27852

SEQ ID NO: 27867 - DNA, 201 bp, Homo sapiens; identical to SEQ ID NO: 27860

SEQ ID NO: 27868 - DNA, 117 bp, Homo sapiens; identical to SEQ ID NO: 27854

SEQ ID NO: 27869 - DNA, 190 bp, Homo sapiens; identical to SEQ ID NO: 27855

SEQ ID NO: 27870 - DNA, 201 bp, Homo sapiens; identical to SEQ ID NO: 27856

SEQ ID NO: 27871 - DNA, 201 bp, Homo sapiens; identical to SEQ ID NO: 27850

SEQ ID NO: 27872 - DNA, 201 bp, Homo sapiens; identical to SEQ ID NO: 27851

SEQ ID NO: 27873 - DNA, 201 bp, Homo sapiens; identical to SEQ ID NO: 27852

SEQ ID NO: 27874 - DNA, 201 bp, Homo sapiens; identical to SEQ ID NO: 27853

SEQ ID NO: 27875 - DNA, 117 bp, Homo sapiens; identical to SEQ ID NO: 27854

SEQ ID NO: 27876 - DNA, 190 bp, Homo sapiens; identical to SEQ ID NO: 27855

SEQ ID NO: 27877 - DNA, 201 bp, Homo sapiens; identical to SEQ ID NO: 27856

SEQ ID NO: 27878 - DNA, 201 bp, Homo sapiens; identical to SEQ ID NO: 27850

SEQ ID NO: 27879 - DNA, 201 bp, Homo sapiens; identical to SEQ ID NO: 27851

SEQ ID NO: 27880 - DNA, 201 bp, Homo sapiens; identical to SEQ ID NO: 27852

SEQ ID NO: 27881 - DNA, 201 bp, Homo sapiens; identical to SEQ ID NO: 27860

SEQ ID NO: 27882 - DNA, 117 bp, Homo sapiens; identical to SEQ ID NO: 27854

SEQ ID NO: 27883 - DNA, 190 bp, Homo sapiens; identical to SEQ ID NO: 27855

SEQ ID NO: 27884 - DNA, 201 bp, Homo sapiens; identical to SEQ ID NO: 27856

SEQ ID NO: 27885 - DNA, 201 bp, Homo sapiens; identical to SEQ ID NO: 27850

SEQ ID NO: 27886 - DNA, 201 bp, Homo sapiens; identical to SEQ ID NO: 27851

SEQ ID NO: 27887 - DNA, 201 bp, Homo sapiens; identical to SEQ ID NO: 27852

SEQ ID NO: 27888 - DNA, 201 bp, Homo sapiens; identical to SEQ ID NO: 27860

SEQ ID NO: 27889 - DNA, 117 bp, Homo sapiens; identical to SEQ ID NO: 27854

SEQ ID NO: 27890 - DNA, 190 bp, Homo sapiens; identical to SEQ ID NO: 27855

SEQ ID NO: 27891 - DNA, 201 bp, Homo sapiens; identical to SEQ ID NO: 27856

SEQ ID NO: 27892 - DNA, 201 bp, Homo sapiens
gtgtgtctctgtgagagccttcatataaataaattcatgcatctaaagagtccctggtcaggccgcatgctgatattcaatttggggaatggtgatgccaycacatgcatctgggggaggcagcagggaggcgtagggactttgtgtggcctgctctatcacagctcctgggagaattacagatctgagcccagggcatct

SEQ ID NO: 27893 - DNA, 201 bp, Homo sapiens
ttagtaacacttcaaaggtttttttttgtttgttttctagacttaataaaagcttaggattaattagaagaagcaatctagttaaatttcccatttgtatwttattttcttgaatacttttttcatagttatttgtttaaaaagatttaaaaatcattgcactttggtcagaaaaataataaatatatcttataaatgttt

SEQ ID NO: 27894 - DNA, 201 bp, Homo sapiens
gcaaggggacccagtgcgcccgcatcgtcgagaaatatggctacacacacctttctgcaggagagctgcttcgtgatgaaaggaagaacccagattcacaktatggtgaacttattgaaaagtacattaaagaaggaaagattgtaccagttgagataaccatcagtttattaaagagggaaatggatcagacaatggctg

SEQ ID NO: 27895 - DNA, 147 bp, Homo sapiens
gatacagtcaccaagaatgttttgagttttttgaaagaccccaatttaagccttgcttatttttaaattatttccattcagtgatgttggatgtatatcarttatttagtaaataatctcaataaattttgtgctgtggcctttgct

SEQ ID NO: 27896 - DNA, 201 bp, Homo sapiens
gaaatcaagacaaccttcaaggatggaacaagaccatggatgggaaggcagatgtatctttcgttctcttttttgactgtaataatgagatttgtattgarcgatgtcttgagaggggaaagagtagtggtaggagtgatgacaacagagagagcttggaaaagagaattcagacctaccttcagtcaacaaagccaatta

SEQ ID NO: 27897 - DNA, 201 bp, Homo sapiens
tatgttcttttttttggtcacaggagtagacagtgaattcaggtttaacttcaccttagttatggtgctcaccaaacgaagggtatcagctattttttttwaaattcaaaaagaatatcccttttatagtttgtgccttctgtgagcaaaactttttagtacgcgtatatatccctctagtaatcacaacattttaggatt

SEQ ID NO: 27898 - DNA, 201 bp, Homo sapiens
ttggccactaaaattcatattgagattatcttggtttcttggaagagataggaatgagttcttatctagtgttgcaggccagcaaatacagaggtggtttratcaaacagctctagtatgaagcaagagtaaagactaaggtttcgagagcattcctactcacataagtgaagaaatctgtcagataggaatctaaatatt

SEQ ID NO: 27899 - DNA, 201 bp, Homo sapiens
agaatatcccttttatagtttgtgccttctgtgagcaaaactttttagtacgcgtatatatccctctagtaatcacaacattttaggatttagggataccygcttcctctttttcttgcaagttttaaatttccaaccttaagtgaatttgtggaccaaatttcaaaggaactttttgtgtagtcagttcttgcacaatgt

SEQ ID NO: 27900 - DNA, 201 bp, Homo sapiens; identical to SEQ ID NO: 27893

SEQ ID NO: 27901 - DNA, 201 bp, Homo sapiens; identical to SEQ ID NO: 27894

SEQ ID NO: 27902 - DNA, 201 bp, Homo sapiens; identical to SEQ ID NO: 27896

SEQ ID NO: 27903 - DNA, 201 bp, Homo sapiens; identical to SEQ ID NO: 27897

SEQ ID NO: 27904 - DNA, 190 bp, Homo sapiens
cttaatgataaatttttcaacatacttgccattagaaaacaaagtattgctaagtactataacatattggccactaaaattcatattgcagaggtggtttratcaaacagctctagtatgaagcaagagtaaagactaaggtttcgagagcattcctactcacataagtgaagaaatctgtcagatagga

SEQ ID NO: 27905 - DNA, 201 bp, Homo sapiens; identical to SEQ ID NO: 27899

SEQ ID NO: 27906 - DNA, 183 bp, Homo sapiens
ctatgacatcctgaagccctatgtggggctcatggcagactctgtacgagtgatgctggacaaatgggaagagctccttggccaggattcccctctggagktctttcagcacgtctccttgatgaccctggacaccatcatgaagagtgccttcagccatcagggcagcatccaggtggacag

SEQ ID NO: 27907 - DNA, 201 bp, Homo sapiens
cctgtcctcattggctatggggaggcaaagttcgtgtccagctctatgaccctgactatatgaaggtgattctggggagatcagacccgaaatcccatggwtcctacagattcctggctccatggattgggtacggcttgctcctgttgaatgggcagacatggttccagcatcgacggatgctgaccccagccttccact

SEQ ID NO: 27908 - DNA, 201 bp, Homo sapiens
cattggctatggggaggcaaagttcgtgtccagctctatgaccctgactatatgaaggtgattctggggagatcagacccgaaatcccatggttcctacarattcctggctccatggattgggtacggcttgctcctgttgaatgggcagacatggttccagcatcgacggatgctgaccccagccttccactatgacatc

SEQ ID NO: 27909 - DNA, 201 bp, Homo sapiens
tccctcccactggctcttcgggcacatccaggagctccaacaggaccaggagctacaacggattcagaaatgggtggagacattcccaagtgcctgtcctyattggctatggggaggcaaagttcgtgtccagctctatgaccctgactatatgaaggtgattctggggagatcagacccgaaatcccatggttcctacag

SEQ ID NO: 27910 - DNA, 201 bp, Homo sapiens
aggcaaagttcgtgtccagctctatgaccctgactatatgaaggtgattctggggagatcagacccgaaatcccatggttcctacagattcctggctccayggattgggtacggcttgctcctgttgaatgggcagacatggttccagcatcgacggatgctgaccccagccttccactatgacatcctgaagccctatgt

SEQ ID NO: 27911 - DNA, 201 bp, Homo sapiens
ttcctacagattcctggctccatggattgggtacggcttgctcctgttgaatgggcagacatggttccagcatcgacggatgctgaccccagccttccacwatgacatcctgaagccctatgtggggctcatggcagactctgtacgagtgatgctggacaaatgggaagagctccttggccaggattcccctctggaggt

SEQ ID NO: 27912 - DNA, 201 bp, Homo sapiens
gctaccctgacgcaccataatctaagcccggggcataaaacccctcgtggcttggatagaatccagggctcgtggctctggaatgtgtctggacttgctgsctcctcgctccttgctctcccaggatcaattgtatcttgagttaaaagaacctgctctccattatctcaagtaacagagcagatgctaaaccgtcacagc

SEQ ID NO: 27913 - DNA, 201 bp, Homo sapiens
ctccttgctctcccaggatcaattgtatcttgagttaaaagaacctgctctccattatctcaagtaacagagcagatgctaaaccgtcacagctgtaaatyatgtgcttaatgcaacatgccctttcgacccaccccccattctcaccacctgtttctttgtttgatcaccaataaataatctgcacttccagagctcggg

SEQ ID NO: 27914 - DNA, 201 bp, Homo sapiens
tccttgctctcccaggatcaattgtatcttgagttaaaagaacctgctctccattatctcaagtaacagagcagatgctaaaccgtcacagctgtaaatcrtgtgcttaatgcaacatgccctttcgacccaccccccattctcaccacctgtttctttgtttgatcaccaataaataatctgcacttccagagctcgggg

SEQ ID NO: 27915 - DNA, 201 bp, Homo sapiens
tcccacctgcctgctgtcccccagtctgcctgcccttctctctctcacctttctccaagctccctacctgcttgtctacctgtctcctacccacctgtatmtcttgttgggagaaaagctgagtgttgggagaagctgaggccgagcttgcatgtctgacataatgtaaaagagtcttgaatcatgtccaggatccagggt

SEQ ID NO: 27916 - DNA, 201 bp, Homo sapiens
ctgacgcaccataatctaagcccggggcataaaacccctcgtggcttggatagaatccagggctcgtggctctggaatgtgtctggacttgctggctcctygctccttgctctcccaggatcaattgtatcttgagttaaaagaacctgctctccattatctcaagtaacagagcagatgctaaaccgtcacagctgtaaa

SEQ ID NO: 27917 - DNA, 201 bp, Homo sapiens
tgtctgcctctgtcctgctttctgtctgcccaccttcccttcttcccacctgcctgctgtcccccagtctgcctgcccttctctctctcacctttctccargctccctacctgcttgtctacctgtctcctacccacctgtatatcttgttgggagaaaagctgagtgttgggagaagctgaggccgagcttgcatgtctg

SEQ ID NO: 27918 - DNA, 201 bp, Homo sapiens
acgacttgtgttgaaatccaaaaatggaatccacctgcgtctcaggaggctccctaacccttgtgaagacaaggaccagctttgagggcctccacctgccrtcctgtcttcctgacccccactcctatctcctgcctgtctgcctctgtcctgctttctgtctgcccaccttcccttcttcccacctgcctgctgtccccc

SEQ ID NO: 27919 - DNA, 201 bp, Homo sapiens
  misc_feature (1)...(201): n = A,T,C or G
gtttgagggccatgacaccacagccagtgggatctcctggatcctctatgctctggccacacaccccaagcatcaggagaggtgccgggaggagatccatngcctcctgggtgatggagcctccatcacctggaaccacctggaccagatgccctacaccaccatgtgcattaaggaggcactgaggctctacccaccggt

SEQ ID NO: 27920 - DNA, 201 bp, Homo sapiens
actcccgtcaccttccctgatgggcgctccttgcccaaaggtatcatggtcctcctctccatttatggccttcaccacaacccaaaagtgtggcccaaccyagaggtgtttgacccttcccgttttgcaccgggttctgctcaacacagccacgctttcctgcccttctcaggaggatcaaggaactgcatcgggaaacaa

SEQ ID NO: 27921 - DNA, 201 bp, Homo sapiens; identical to SEQ ID NO: 27911

SEQ ID NO: 27922 - DNA, 201 bp, Homo sapiens
  misc_feature (1)...(201): n = A,T,C or G
attttctggacatcctcctcttggccaaaatggagaatgggagcatcttgtcagacaaggacctccgtgctgaggtggacacgttcatgtttgagggccangacaccacagccagtgggatctcctggatcctctatgctctggccacacaccccaagcatcaggagaggtgccgggaggagatccatggcctcctgggtg

SEQ ID NO: 27923 - DNA, 201 bp, Homo sapiens
catgaagagtgccttcagccatcagggcagcatccaggtggacaggaattctcagtcctacatccaggccattagtgacctgaacagcctggttttttgcygtatgaggaatgcctttcatgagaatgacaccatctacagcctgacctctgctggccgctggacacaccgcgcctgccagctggcccatcagcacacaga

SEQ ID NO: 27924 - DNA, 201 bp, Homo sapiens
tgtttgagggccatgacaccacagccagtgggatctcctggatcctctatgctctggccacacaccccaagcatcaggagaggtgccgggaggagatccayggcctcctgggtgatggagcctccatcacctggaaccacctggaccagatgccctacaccaccatgtgcattaaggaggcactgaggctctacccaccgg

SEQ ID NO: 27925 - DNA, 201 bp, Homo sapiens; identical to SEQ ID NO: 27910

SEQ ID NO: 27926 - DNA, 201 bp, Homo sapiens
gctccgctttgagctgctgcctgatcccaccaggatccccatccccatggcacgacttgtgttgaaatccaaaaatggaatccacctgcgtctcaggaggytccctaacccttgtgaagacaaggaccagctttgagggcctccacctgccatcctgtcttcctgacccccactcctatctcctgcctgtctgcctctgtc

SEQ ID NO: 27927 - DNA, 201 bp, Homo sapiens
catggcctcctgggtgatggagcctccatcacctggaaccacctggaccagatgccctacaccaccatgtgcattaaggaggcactgaggctctacccacyggtgccaggcattggaagagagctcagcactcccgtcaccttccctgatgggcgctccttgcccaaaggtatcatggtcctcctctccatttatggcctt

SEQ ID NO: 27928 - DNA, 201 bp, Homo sapiens
cctgaccctgctccgctttgagctgctgcctgatcccaccaggatccccatccccatggcacgacttgtgttgaaatccaaaaatggaatccacctgcgtytcaggaggctccctaacccttgtgaagacaaggaccagctttgagggcctccacctgccatcctgtcttcctgacccccactcctatctcctgcctgtct

SEQ ID NO: 27929 - DNA, 201 bp, Homo sapiens
atgaaagtgttcatctgtctacccttgttgacagctccaacaggaccaggagctacaacggattcagaaatgggtggagacattcccaagtgcctgtcctyattggctatggggaggcaaagttcgtgtccagctctatgaccctgactatatgaaggtgattctggggagatcagacccgaaatcccatggttcctacag

SEQ ID NO: 27930 - DNA, 201 bp, Homo sapiens
ctcacctttctccaagctccctacctgcttgtctacctgtctcctacccacctgtatatcttgttgggagaaaagctgagtgttgggagaagctgaggccragcttgcatgtctgacataatgtaaaagagtcttgaatcatgtccaggatccagggtctaaaaccccttgtggcctttggaacaccaagctctgtgctga

SEQ ID NO: 27931 - DNA, 201 bp, Homo sapiens
tttctgtctgcccaccttcccttcttcccacctgcctgctgtcccccagtctgcctgcccttctctctctcacctttctccaagctccctacctgcttgtmtacctgtctcctacccacctgtatatcttgttgggagaaaagctgagtgttgggagaagctgaggccgagcttgcatgtctgacataatgtaaaagagtc

SEQ ID NO: 27932 - DNA, 201 bp, Homo sapiens
ctatgacatcctgaagccctatgtggggctcatggcagactctgtacgagtgatgctggacaaatgggaagagctccttggccaggattcccctctggagktctttcagcacgtctccttgatgaccctggacaccatcatgaagagtgccttcagccatcagggcagcatccaggtggacaggaattctcagtcctacat

SEQ ID NO: 27933 - DNA, 201 bp, Homo sapiens; identical to SEQ ID NO: 27907

SEQ ID NO: 27934 - DNA, 201 bp, Homo sapiens
atggagcctccatcacctggaaccacctggaccagatgccctacaccaccatgtgcattaaggaggcactgaggctctacccaccggtgccaggcattggmagagagctcagcactcccgtcaccttccctgatgggcgctccttgcccaaaggtatcatggtcctcctctccatttatggccttcaccacaacccaaaag

SEQ ID NO: 27935 - DNA, 201 bp, Homo sapiens; identical to SEQ ID NO: 27908

SEQ ID NO: 27936 - DNA, 201 bp, Homo sapiens
ctgtctcctacccacctgtatatcttgttgggagaaaagctgagtgttgggagaagctgaggccgagcttgcatgtctgacataatgtaaaagagtcttgratcatgtccaggatccagggtctaaaaccccttgtggcctttggaacaccaagctctgtgctgaagggtggaaggctaccctgacgcaccataatctaag

SEQ ID NO: 27937 - DNA, 201 bp, Homo sapiens
tcgggaaacaatttgccatgaaccagctgaaggtggccagggccctgaccctgctccgctttgagctgctgcctgatcccaccaggatccccatccccatkgcacgacttgtgttgaaatccaaaaatggaatccacctgcgtctcaggaggctccctaacccttgtgaagacaaggaccagctttgagggcctccacctg

SEQ ID NO: 27938 - DNA, 145 bp, Homo sapiens
ctccacccacctcccaaactcctgcctgccctccagactgtctgcccatacacctgtctccttcttcctgcctgcttgtctgttcctatattagtttcctrttactgctgtaataaactatcacaatctcagtgattttaaataa

SEQ ID NO: 27939 - DNA, 201 bp, Homo sapiens
ggcccaacctagaggtgtttgacccttcccgttttgcaccgggttctgctcaacacagccacgctttcctgcccttctcaggaggatcaaggaactgcatygggaaacaatttgccatgaaccagctgaaggtggccagggccctgaccctgctccgctttgagctgctgcctgatcccaccaggatccccatccccatgg

SEQ ID NO: 27940 - DNA, 201 bp, Homo sapiens; identical to SEQ ID NO: 27912

SEQ ID NO: 27941 - DNA, 201 bp, Homo sapiens; identical to SEQ ID NO: 27913

SEQ ID NO: 27942 - DNA, 201 bp, Homo sapiens; identical to SEQ ID NO: 27914

SEQ ID NO: 27943 - DNA, 201 bp, Homo sapiens; identical to SEQ ID NO: 27915

SEQ ID NO: 27944 - DNA, 201 bp, Homo sapiens; identical to SEQ ID NO: 27916

SEQ ID NO: 27945 - DNA, 201 bp, Homo sapiens; identical to SEQ ID NO: 27917

SEQ ID NO: 27946 - DNA, 201 bp, Homo sapiens; identical to SEQ ID NO: 27918

SEQ ID NO: 27947 - DNA, 201 bp, Homo sapiens; identical to SEQ ID NO: 27919
  misc_feature (1)...(201): n = A,T,C or G

SEQ ID NO: 27948 - DNA, 201 bp, Homo sapiens; identical to SEQ ID NO: 27920

SEQ ID NO: 27949 - DNA, 201 bp, Homo sapiens; identical to SEQ ID NO: 27911

SEQ ID NO: 27950 - DNA, 201 bp, Homo sapiens; identical to SEQ ID NO: 27922
  misc_feature (1)...(201): n = A,T,C or G

SEQ ID NO: 27951 - DNA, 201 bp, Homo sapiens; identical to SEQ ID NO: 27923

SEQ ID NO: 27952 - DNA, 201 bp, Homo sapiens; identical to SEQ ID NO: 27924

SEQ ID NO: 27953 - DNA, 201 bp, Homo sapiens; identical to SEQ ID NO: 27910

SEQ ID NO: 27954 - DNA, 201 bp, Homo sapiens; identical to SEQ ID NO: 27926

SEQ ID NO: 27955 - DNA, 201 bp, Homo sapiens; identical to SEQ ID NO: 27927

SEQ ID NO: 27956 - DNA, 201 bp, Homo sapiens; identical to SEQ ID NO: 27928

SEQ ID NO: 27957 - DNA, 201 bp, Homo sapiens; identical to SEQ ID NO: 27909

SEQ ID NO: 27958 - DNA, 201 bp, Homo sapiens; identical to SEQ ID NO: 27930

SEQ ID NO: 27959 - DNA, 201 bp, Homo sapiens; identical to SEQ ID NO: 27931

SEQ ID NO: 27960 - DNA, 201 bp, Homo sapiens; identical to SEQ ID NO: 27932

SEQ ID NO: 27961 - DNA, 201 bp, Homo sapiens; identical to SEQ ID NO: 27907

SEQ ID NO: 27962 - DNA, 201 bp, Homo sapiens; identical to SEQ ID NO: 27934

SEQ ID NO: 27963 - DNA, 201 bp, Homo sapiens; identical to SEQ ID NO: 27908

SEQ ID NO: 27964 - DNA, 201 bp, Homo sapiens; identical to SEQ ID NO: 27936

SEQ ID NO: 27965 - DNA, 201 bp, Homo sapiens; identical to SEQ ID NO: 27937

SEQ ID NO: 27966 - DNA, 145 bp, Homo sapiens; identical to SEQ ID NO: 27938

SEQ ID NO: 27967 - DNA, 201 bp, Homo sapiens; identical to SEQ ID NO: 27939

SEQ ID NO: 27968 - DNA, 109 bp, Homo sapiens
ataattttwaaaaaaaagtaaaagagaaaaaaaaaaagacagaatcttcgctcatgcacttacctgctttttcttctgtttactcaggaataactgtgtttatcaatat

SEQ ID NO: 27969 - DNA, 201 bp, Homo sapiens
cactcaaggcctccccagcctgttcgtcaagttgtcctcaagtccaagaatggaatccatgtgtttgcaaaaaaagtttgctaattttaagtcctttcgtrtaagaattaatgagacaattttcctaccaaaacttaggatacttctgactggttttgacatccattaacagtaattttaatttctttgctgtatctggtg

SEQ ID NO: 27970 - DNA, 201 bp, Homo sapiens
cacagtatcattttcagtactgacaaggtgttttattttatatggttgtcataataaggcaaattcattttgtacactttatattttcaaaccccagcaarctctaaaagggacataaaataacttagaaattgggaaaagatgggcatgtgtatgatcatgatattcatcccctgccccagaacaaatgggaggaacaca

SEQ ID NO: 27971 - DNA, 201 bp, Homo sapiens
acaaagtcacaaatagcatctaaggcacagtatcattttcagtactgacaaggtgttttattttatatggttgtcataataaggcaaattcattttgtacrctttatattttcaaaccccagcaaactctaaaagggacataaaataacttagaaattgggaaaagatgggcatgtgtatgatcatgatattcatcccctg

SEQ ID NO: 27972 - DNA, 201 bp, Homo sapiens
gaaacttgaaaaagagggaaaaatagctatttccccacccttacaaagtcacaaatagcatctaaggcacagtatcattttcagtactgacaaggtgtttyattttatatggttgtcataataaggcaaattcattttgtacactttatattttcaaaccccagcaaactctaaaagggacataaaataacttagaaattg

SEQ ID NO: 27973 - DNA, 201 bp, Homo sapiens
ctccgcctctacgcaccggtagtaaacatatcccgttatttatccttagactctgtggaacctagggccattcttatttcccagagagggagaaagaggakagagctctcaggactatccaaacaggcacaggattatcaaggtgcaaagctgctgcgggtaactttctgggcttcagacaatgctgttgagatccgcatg

SEQ ID NO: 27974 - DNA, 201 bp, Homo sapiens
atgccttacaccacgatgtgcatcaaggaatgcctccgcctctacgcaccggtagtaaacatatcccgttatttatccttagactctgtggaacctagggycattcttatttcccagagagggagaaagaggatagagctctcaggactatccaaacaggcacaggattatcaaggtgcaaagctgctgcgggtaactttc

SEQ ID NO: 27975 - DNA, 201 bp, Homo sapiens
gaggatagagctctcaggactatccaaacaggcacaggattatcaaggtgcaaagctgctgcgggtaactttctgggcttcagacaatgctgttgagatcygcatggatgttggaataactgtgtttatcaatatttgggctcttcaccacaacccctatttctgggaagaccctcaggtctttaaccccttgagattctc

SEQ ID NO: 27976 - DNA, 201 bp, Homo sapiens
gagagggagaaagaggatagagctctcaggactatccaaacaggcacaggattatcaaggtgcaaagctgctgcgggtaactttctgggcttcagacaatkctgttgagatccgcatggatgttggaataactgtgtttatcaatatttgggctcttcaccacaacccctatttctgggaagaccctcaggtctttaaccc

SEQ ID NO: 27977 - DNA, 201 bp, Homo sapiens; identical to SEQ ID NO: 27969

SEQ ID NO: 27978 - DNA, 201 bp, Homo sapiens
atcgactcctttctcatccacatgcaggaggaggagaagaaccccaacacggagttctacttgaagaacctgatgatgagcacgttgaacctcttcattgsaggcaccgagacggtcagcaccaccctgcgctatggcttcttgctgctcatgaagcacccagaggtggaggccaaggtccatgaggagattgacagagtg

SEQ ID NO: 27979 - DNA, 201 bp, Homo sapiens
cgatcccacgaaactacaccatgagcttcctgccccgctgagcgagggctgtgccggtgcaggtctggtgggcggggccagggaaaggcggggtcagggcsgggttcgcggaagaggcgggtataagaatggggggaagatgcgggaaaggaaggggcgtggtggctagagggaagagaagaaacagaagcggctcagttc

SEQ ID NO: 27980 - DNA, 201 bp, Homo sapiens
tgagcttcctgccccgctgagcgagggctgtgccggtgcaggtctggtgggcggggccagggaaaggcggggtcagggcggggttcgcggaagaggcgggyataagaatggggggaagatgcgggaaaggaaggggcgtggtggctagagggaagagaagaaacagaagcggctcagttcaccttgataaggtgcttccga

SEQ ID NO: 27981 - DNA, 201 bp, Homo sapiens
tccacaactttggggtgcattctcactctcagaccccaaatccaaagcccaagtgctcccctatgcaaatattccaaactcttcagttctacagtttatckgttgccccctcctaaatccacagccctgcggcacccctcctgaagtaccacagatttagtctggaggccccctctctgttcagctgccctggggtcccct

SEQ ID NO: 27982 - DNA, 201 bp, Homo sapiens
cctgccccgctgagcgagggctgtgccggtgcaggtctggtgggcggggccagggaaaggcggggtcagggcggggttcgcggaagaggcgggtataagamtggggggaagatgcgggaaaggaaggggcgtggtggctagagggaagagaagaaacagaagcggctcagttcaccttgataaggtgcttccgagctggga

SEQ ID NO: 27983 - DNA, 201 bp, Homo sapiens
ggtctttgccacgatcccacgaaactacaccatgagcttcctgccccgctgagcgagggctgtgccggtgcaggtctggtgggcggggccagggaaaggcrgggtcagggcggggttcgcggaagaggcgggtataagaatggggggaagatgcgggaaaggaaggggcgtggtggctagagggaagagaagaaacagaag

SEQ ID NO: 27984 - DNA, 201 bp, Homo sapiens
cgctgagcgagggctgtgccggtgcaggtctggtgggcggggccagggaaaggcggggtcagggcggggttcgcggaagaggcgggtataagaatgggggsaagatgcgggaaaggaaggggcgtggtggctagagggaagagaagaaacagaagcggctcagttcaccttgataaggtgcttccgagctgggatgagagg

SEQ ID NO: 27985 - DNA, 201 bp, Homo sapiens
tttgccacgatcccacgaaactacaccatgagcttcctgccccgctgagcgagggctgtgccggtgcaggtctggtgggcggggccagggaaaggcggggycagggcggggttcgcggaagaggcgggtataagaatggggggaagatgcgggaaaggaaggggcgtggtggctagagggaagagaagaaacagaagcggc

SEQ ID NO: 27986 - DNA, 201 bp, Homo sapiens
cccaaatccacaactttggggtgcattctcactctcagaccccaaatccaaagcccaagtgctcccctatgcaaatattccaaactcttcagttctacagyttatcggttgccccctcctaaatccacagccctgcggcacccctcctgaagtaccacagatttagtctggaggccccctctctgttcagctgccctgggg

SEQ ID NO: 27987 - DNA, 201 bp, Homo sapiens
ctgagcgagggctgtgccggtgcaggtctggtgggcggggccagggaaaggcggggtcagggcggggttcgcggaagaggcgggtataagaatggggggargatgcgggaaaggaaggggcgtggtggctagagggaagagaagaaacagaagcggctcagttcaccttgataaggtgcttccgagctgggatgagaggaa

SEQ ID NO: 27988 - DNA, 201 bp, Homo sapiens
gccacgatcccacgaaactacaccatgagcttcctgccccgctgagcgagggctgtgccggtgcaggtctggtgggcggggccagggaaaggcggggtcarggcggggttcgcggaagaggcgggtataagaatggggggaagatgcgggaaaggaaggggcgtggtggctagagggaagagaagaaacagaagcggctca

SEQ ID NO: 27989 - DNA, 201 bp, Homo sapiens
agttcagcgggcgaggcgagcaagccaccttcgactgggtcttcaaaggctatggcgtggcgttcagcaacggggagcgcgccaagcagctcctgcgcttygccatcgccaccctgagggacttcggggtgggcaagcgaggcatcgaggagcgcatccaggaggagtcgggcttcctcatcgaggccatccggagcacgc

SEQ ID NO: 27990 - DNA, 201 bp, Homo sapiens
atcggcaagaaccggcagcccaagtttgaggaccggaccaagatgccctacatggaggcagtgatccacgagatccaaagatttggagacgtgatccccaygagtttggcccgcagggttaaaaaggacaccaagtttcgggattttttcctccctaagggcaccgaagtgttccctatgctgggctccgtgctgagagac

SEQ ID NO: 27991 - DNA, 201 bp, Homo sapiens
catgatgccgtcagggaggctctggtggaccaggctgaggagttcagcgggcgaggcgagcaagccaccttcgactgggtcttcaaaggctatggcgtggygttcagcaacggggagcgcgccaagcagctcctgcgctttgccatcgccaccctgagggacttcggggtgggcaagcgaggcatcgaggagcgcatccag

SEQ ID NO: 27992 - DNA, 163 bp, Homo sapiens
ccctgggtcttcctagccccgagactttcaagtccatatgcctggagtcccccctcctgagamccttaaccctgcatcctccgcaacagaagacccccagatgcacagccacacttccatctcaccctaataaaacccagacctttggattcctctcccttgg

SEQ ID NO: 27993 - DNA, 201 bp, Homo sapiens
gggtcagggcggggttcgcggaagaggcgggtataagaatggggggaagatgcgggaaaggaaggggcgtggtggctagagggaagagaagaaacagaagsggctcagttcaccttgataaggtgcttccgagctgggatgagaggaagggaaaccttacattatgctatgaagagtagtaataatagcagctcttatttc

SEQ ID NO: 27994 - DNA, 201 bp, Homo sapiens
taaggacattgacgtgtcccccaaacacgtggtctttgccacgatcccacgaaactacaccatgagcttcctgccccgctgagcgagggctgtgccggtgmaggtctggtgggcggggccagggaaaggcggggtcagggcggggttcgcggaagaggcgggtataagaatggggggaagatgcgggaaaggaaggggcgt

SEQ ID NO: 27995 - DNA, 201 bp, Homo sapiens
caagtcctcccagtcacctaaggacattgacgtgtcccccaaacacgtggtctttgccacgatcccacgaaactacaccatgagcttcctgccccgctgakcgagggctgtgccggtgcaggtctggtgggcggggccagggaaaggcggggtcagggcggggttcgcggaagaggcgggtataagaatggggggaagatg

SEQ ID NO: 27996 - DNA, 201 bp, Homo sapiens
cttctccaaccctcaggacttcaatccccagcatttcctggatgacaaggggcagtttaagaagagtgatgcttttgtgcccttttccatcggaaagcggwactgtttcggagaaggcctggccagaatggagctctttctcttcttcaccaccgtcatgcagaacttccgcctcaagtcctcccagtcacctaaggacat

SEQ ID NO: 27997 - DNA, 201 bp, Homo sapiens
agaatggagctctttctcttcttcaccaccgtcatgcagaacttccgcctcaagtcctcccagtcacctaaggacattgacgtgtcccccaaacacgtggkctttgccacgatcccacgaaactacaccatgagcttcctgccccgctgagcgagggctgtgccggtgcaggtctggtgggcggggccagggaaaggcggg

SEQ ID NO: 27998 - DNA, 201 bp, Homo sapiens
atcggaaagcggaactgtttcggagaaggcctggccagaatggagctctttctcttcttcaccaccgtcatgcagaacttccgcctcaagtcctcccagtmacctaaggacattgacgtgtcccccaaacacgtggtctttgccacgatcccacgaaactacaccatgagcttcctgccccgctgagcgagggctgtgccg

SEQ ID NO: 27999 - DNA, 201 bp, Homo sapiens
catgcaggaggaggagaagaaccccaacacggagttctacttgaagaacctgatgatgagcacgttgaacctcttcattgcaggcaccgagacggtcagcrccaccctgcgctatggcttcttgctgctcatgaagcacccagaggtggaggccaaggtccatgaggagattgacagagtgatcggcaagaaccggcagcc

SEQ ID NO: 28000 - DNA, 201 bp, Homo sapiens
gctgaggagttcagcgggcgaggcgagcaagccaccttcgactgggtcttcaaaggctatggcgtggcgttcagcaacggggagcgcgccaagcagctcckgcgctttgccatcgccaccctgagggacttcggggtgggcaagcgaggcatcgaggagcgcatccaggaggagtcgggcttcctcatcgaggccatccgg

SEQ ID NO: 28001 - DNA, 183 bp, Homo sapiens
ccctgggtcttcctagccccgagactttcaagtccatatgcctggagtcccccctcctgagacccttaaccctgcatcctccrcaacagaagacccccagatgcacagccacacttccatctcaccctaataaaacccagacctttggattcctctcccttggaatgcccaaatccacaactt

SEQ ID NO: 28002 - DNA, 201 bp, Homo sapiens
gggacttcggggtgggcaagcgaggcatcgaggagcgcatccaggaggagtcgggcttcctcatcgaggccatccggagcacgcacggcgccaatatcgakcccaccttcttcctgagccgcacagtctccaatgtcatcagctccattgtctttggggaccgctttgactatgaggacaaagagttcctgtcactgctga

SEQ ID NO: 28003 - DNA, 201 bp, Homo sapiens
ctgcaagggctggaggacttcatagccaagaaggtggagcacaaccagcgcacgctggatcccaattccccacaggacttcatcgactcctttctcatccrcatgcaggaggaggagaagaaccccaacacggagttctacttgaagaacctgatgatgagcacgttgaacctcttcattgcaggcaccgagacggtcagc

SEQ ID NO: 28004 - DNA, 201 bp, Homo sapiens
ggaggagaagaaccccaacacggagttctacttgaagaacctgatgatgagcacgttgaacctcttcattgcaggcaccgagacggtcagcaccaccctgygctatggcttcttgctgctcatgaagcacccagaggtggaggccaaggtccatgaggagattgacagagtgatcggcaagaaccggcagcccaagtttga

SEQ ID NO: 28005 - DNA, 201 bp, Homo sapiens
caacggggagcgcgccaagcagctcctgcgctttgccatcgccaccctgagggacttcggggtgggcaagcgaggcatcgaggagcgcatccaggaggagbcgggcttcctcatcgaggccatccggagcacgcacggcgccaatatcgagcccaccttcttcctgagccgcacagtctccaatgtcatcagctccattgt

SEQ ID NO: 28006 - DNA, 201 bp, Homo sapiens
tcgactcctttctcatccacatgcaggaggaggagaagaaccccaacacggagttctacttgaagaacctgatgatgagcacgttgaacctcttcattgcrggcaccgagacggtcagcaccaccctgcgctatggcttcttgctgctcatgaagcacccagaggtggaggccaaggtccatgaggagattgacagagtga

SEQ ID NO: 28007 - DNA, 196 bp, Homo sapiens
ccctgggtcttcctagccccgagactttcaagtccatatgcctggagtcccccctcctgagacccttaaccctgcatcctccgcaacagaagaccyccagatgcacagccacacttccatctcaccctaataaaacccagacctttggattcctctcccttggaatgcccaaatccacaactttggggtgcattct

SEQ ID NO: 28008 - DNA, 201 bp, Homo sapiens
cacgatcccacgaaactacaccatgagcttcctgccccgctgagcgagggctgtgccggtgcaggtctggtgggcggggccagggaaaggcggggtcaggrcggggttcgcggaagaggcgggtataagaatggggggaagatgcgggaaaggaaggggcgtggtggctagagggaagagaagaaacagaagcggctcagt

SEQ ID NO: 28009 - DNA, 201 bp, Homo sapiens; identical to SEQ ID NO: 27978

SEQ ID NO: 28010 - DNA, 201 bp, Homo sapiens; identical to SEQ ID NO: 27979

SEQ ID NO: 28011 - DNA, 201 bp, Homo sapiens; identical to SEQ ID NO: 27980

SEQ ID NO: 28012 - DNA, 201 bp, Homo sapiens; identical to SEQ ID NO: 27981

SEQ ID NO: 28013 - DNA, 201 bp, Homo sapiens; identical to SEQ ID NO: 27982

SEQ ID NO: 28014 - DNA, 201 bp, Homo sapiens; identical to SEQ ID NO: 27983

SEQ ID NO: 28015 - DNA, 201 bp, Homo sapiens; identical to SEQ ID NO: 27984

SEQ ID NO: 28016 - DNA, 201 bp, Homo sapiens; identical to SEQ ID NO: 27985

SEQ ID NO: 28017 - DNA, 201 bp, Homo sapiens; identical to SEQ ID NO: 27986

SEQ ID NO: 28018 - DNA, 201 bp, Homo sapiens; identical to SEQ ID NO: 27987

SEQ ID NO: 28019 - DNA, 201 bp, Homo sapiens; identical to SEQ ID NO: 27988

SEQ ID NO: 28020 - DNA, 201 bp, Homo sapiens
acctccagctgaacacagagcacatatgtgactccatcatgaaggtgtcccaaggcgtggcgttcagcaacggggagcgcgccaagcagctcctgcgcttygccatcgccaccctgagggacttcggggtgggcaagcgaggcatcgaggagcgcatccaggaggagtcgggcttcctcatcgaggccatccggagcacgc

SEQ ID NO: 28021 - DNA, 201 bp, Homo sapiens; identical to SEQ ID NO: 27990

SEQ ID NO: 28022 - DNA, 201 bp, Homo sapiens
ctgcctccgggacccaccccactgcccttcattggaaactacctccagctgaacacagagcacatatgtgactccatcatgaaggtgtcccaaggcgtggygttcagcaacggggagcgcgccaagcagctcctgcgctttgccatcgccaccctgagggacttcggggtgggcaagcgaggcatcgaggagcgcatccag

SEQ ID NO: 28023 - DNA, 163 bp, Homo sapiens; identical to SEQ ID NO: 27992

SEQ ID NO: 28024 - DNA, 201 bp, Homo sapiens; identical to SEQ ID NO: 27993

SEQ ID NO: 28025 - DNA, 201 bp, Homo sapiens; identical to SEQ ID NO: 27994

SEQ ID NO: 28026 - DNA, 201 bp, Homo sapiens; identical to SEQ ID NO: 27995

SEQ ID NO: 28027 - DNA, 201 bp, Homo sapiens; identical to SEQ ID NO: 27996

SEQ ID NO: 28028 - DNA, 201 bp, Homo sapiens; identical to SEQ ID NO: 27997

SEQ ID NO: 28029 - DNA, 201 bp, Homo sapiens; identical to SEQ ID NO: 27998

SEQ ID NO: 28030 - DNA, 201 bp, Homo sapiens; identical to SEQ ID NO: 27999

SEQ ID NO: 28031 - DNA, 201 bp, Homo sapiens
ggaaactacctccagctgaacacagagcacatatgtgactccatcatgaaggtgtcccaaggcgtggcgttcagcaacggggagcgcgccaagcagctcckgcgctttgccatcgccaccctgagggacttcggggtgggcaagcgaggcatcgaggagcgcatccaggaggagtcgggcttcctcatcgaggccatccgg

SEQ ID NO: 28032 - DNA, 183 bp, Homo sapiens; identical to SEQ ID NO: 28001

SEQ ID NO: 28033 - DNA, 201 bp, Homo sapiens; identical to SEQ ID NO: 28002

SEQ ID NO: 28034 - DNA, 201 bp, Homo sapiens; identical to SEQ ID NO: 28003

SEQ ID NO: 28035 - DNA, 201 bp, Homo sapiens; identical to SEQ ID NO: 28004

SEQ ID NO: 28036 - DNA, 201 bp, Homo sapiens; identical to SEQ ID NO: 28005

SEQ ID NO: 28037 - DNA, 201 bp, Homo sapiens; identical to SEQ ID NO: 28006

SEQ ID NO: 28038 - DNA, 196 bp, Homo sapiens; identical to SEQ ID NO: 28007

SEQ ID NO: 28039 - DNA, 201 bp, Homo sapiens; identical to SEQ ID NO: 28008

SEQ ID NO: 28040 - DNA, 201 bp, Homo sapiens
cactgttgcgcatgatgctaggaatcttccagttcacgtcaacctccacggggcagctctatgagatgttctcttcggtgatgaaacacctgccaggaccrcagcaacaggcctttcagttgctgcaagggctggaggacttcatagccaagaaggtggagcacaaccagcgcacgctggatcccaattccccacgggact

SEQ ID NO: 28041 - DNA, 163 bp, Homo sapiens
cccactaccaccatgctggcctcagggatgcttctggtggccttgctggtctgcctgactgtratggtcttgatgtctgtttggcagcagaggaagagcaaggggaagctgcctccgggacccaccccattgcccttcattggaaactacctgcagctgaaca

SEQ ID NO: 28042 - DNA, 201 bp, Homo sapiens
tcatccgcatgcaggaggaggagaagaaccccaacacggagttctacttgaaaaacctggtgatgaccacgttgaacctcttcattgggggcaccgagacsgtcagcaccaccctgcgctatggcttcttgctgctcatgaagcacccagaggtggaggccaaggtccatgaggagattgacagagtgatcggcaagaacc

SEQ ID NO: 28043 - DNA, 201 bp, Homo sapiens
ctccggcgcttctccatcgccaccctgcgggacttcggggtgggcaagcgaggcatcgaggagcgcatccaggaggaggcgggcttcctcatcgacgcccwccggggcactggcggcgccaatatcgatcccaccttcttcctgagccgcacagtctccaatgtcatcagctccattgtctttggggaccgctttgactat

SEQ ID NO: 28044 - DNA, 201 bp, Homo sapiens
gctggatcccaattccccacgggacttcattgactcctttctcatccgcatgcaggaggaggagaagaaccccaacacggagttctacttgaaaaacctgrtgatgaccacgttgaacctcttcattgggggcaccgagaccgtcagcaccaccctgcgctatggcttcttgctgctcatgaagcacccagaggtggaggc

SEQ ID NO: 28045 - DNA, 201 bp, Homo sapiens
agcgcacgctggatcccaattccccacgggacttcattgactcctttctcatccgcatgcaggaggaggagaagaaccccaacacggagttctacttgaaraacctggtgatgaccacgttgaacctcttcattgggggcaccgagaccgtcagcaccaccctgcgctatggcttcttgctgctcatgaagcacccagagg

SEQ ID NO: 28046 - DNA, 201 bp, Homo sapiens
atttcttcctccctaagggcaccgaagtgtaccctatgctgggctctgtgctgagagaccccagtttcttctccaacccccaggacttcaatccccagcayttcctgaatgagaaggggcagtttaagaagagtgatgcttttgtgcccttttccatcggaaagcggaactgtttcggagaaggcctggccagaatggagc

SEQ ID NO: 28047 - DNA, 201 bp, Homo sapiens
cttcggtgatgaaacacctgccaggaccacagcaacaggcctttcagttgctgcaagggctggaggacttcatagccaagaaggtggagcacaaccagcgyacgctggatcccaattccccacgggacttcattgactcctttctcatccgcatgcaggaggaggagaagaaccccaacacggagttctacttgaaaaacc

SEQ ID NO: 28048 - DNA, 201 bp, Homo sapiens
atccaaagatttggagacgtgatccccatgagtttggcccgcagagtcaaaaaggacaccaagtttcgggatttcttcctccctaagggcaccgaagtgtwccctatgctgggctctgtgctgagagaccccagtttcttctccaacccccaggacttcaatccccagcacttcctgaatgagaaggggcagtttaagaag

SEQ ID NO: 28049 - DNA, 174 bp, Homo sapiens
taagactgggggcaggatggcggaaaggaaggggcgtggtggctagagggaagagaagaaacagaagcggctcagttcaccttgataaggtgcttccgagstgggatgagaggaaggaaacccttacattatgctatgaagagtagtaataatagcagctcttatttcctgagc

SEQ ID NO: 28050 - DNA, 176 bp, Homo sapiens
gctaagactgggggcaggatggcggaaaggaaggggcgtggtggctagagggaagagaagaaacagaagcggctcagttcaccttgataaggtgcttccgwgctgggatgagaggaaggaaacccttacattatgctatgaagagtagtaataatagcagctcttatttcctgagc

SEQ ID NO: 28051 - DNA, 201 bp, Homo sapiens
gtgctcggcctctacggtctcatcgtcgccctcatcctctccacaaagtagaccctctccgagcccaccagccacagaatattatgtaaagaccacccctmctcattccagaacgaacagcctgacacatacgcacggggccgccgcccccagtagttggtcttgtacatgcgcagtgtcctagtgcccatcgtctgtttc

SEQ ID NO: 28052 - DNA, 201 bp, Homo sapiens
tggggcaggccaggcccaaaggctggcccagggctcaccagctctggactgggcgtcccgtctgaggtggggatgaccaacatgccagctctgggttttasctgaggatgggcacatcaagcactgacagccagcaagctgggcacaggcgatgctcaacctctaacacatcggctgagaacctcacctgcctctccctgc

SEQ ID NO: 28053 - DNA, 201 bp, Homo sapiens
aaaccaaccaagagtgcttcccccacacctcaaaatcatcctgcagcagctccctggcccagctctctctcaccctgaccctgggcccctctcccaccacscagggctagccctgtggaccaaccatctctgccagcccctccccgaccctccagccagggaggtggggcgctggccggtgaatggggcaggccaggccca

SEQ ID NO: 28054 - DNA, 201 bp, Homo sapiens
gctggtctcaactcctgggctcaagcgatcctcctgcctcagtctctcaaagtgctgggattacaggtgtgagccactgtgcccagcctaattgcagtaaracaaaaattctagggcaccaagaggctaaagtcagcacagcttttcttgtgtcctgtattctctgtctaatgtgttgcccaaataatatctaattgttag

SEQ ID NO: 28055 - DNA, 201 bp, Homo sapiens
tatacagctttgccattggctacagttatctgttcaaccaatcaaattccaatgcttattagaaggaaagaaacaaaggattatggaactaagcgtcttgkagaaggaactattaatccaggagaaacctgtttaatcattgaagatgttgtcaccagtggatctagtgttttggaaactgttgaggttcttcagaaggag

SEQ ID NO: 28056 - DNA, 201 bp, Homo sapiens
atttgttgttggttttatttctggctcccgagtaagcatgaaaccagaatttcttcacttgactccaggagttcagttggaagcaggaggagataatcttsgccaacagtacaatagcccacaagaagttattggcaaacgaggttccgatatcatcattgtaggtcgtggcataatctcagcagctgatcgtctggaagc

SEQ ID NO: 28057 - DNA, 179 bp, Homo sapiens
ctgcagacgaggcaggcggaagaggcgggacttcgcgggtgacgtcatcggggcgccggaggcccggggcgcctgggartttgaagcaaacaggcagcgcgcgacaatggcggtcgctcgtgcagctttggggccattggtgacgggtctgtacgacgtgcaggctttcaagtttgggg

SEQ ID NO: 28058 - DNA, 140 bp, Homo sapiens
ctgcagacgaggcaggcggaagaggcgggacttcgcgggygacgtcatcggggcgccggaggcccggggcgcctgggaatttgaagcaaacaggcagcgcgcgacaatggcggtcgctcgtgcagctttggggccattgg

SEQ ID NO: 28059 - DNA, 201 bp, Homo sapiens
agaaaagctgcttgggaagcgtatttgagtagacttggtgtttgagtgcttcagatacatttttcagatacaatgtgaagacattgaagatatgtggtcctcctgaaagtcactggctggaaataatccaattattcctgcttggattcttccacagggcctgtgtaagaatgggttctggagttctcatggtctttagga

SEQ ID NO: 28060 - DNA, 201 bp, Homo sapiens
ctgttatttcaacaaccggagttggggtttgggctcattttttcccctagccagcaattatggaccagtagtaacacaagtgacagcttcctgtgactgayttcacaattaggaggtctaagattccatttgggtatttgcttaaggatcccacataattgtcccaacggtcattagtagaggggaggtaagccttcatta

SEQ ID NO: 28061 - DNA, 153 bp, Homo sapiens
tagtaacacaagtgacagcttcctgtgactgacttcacaattaggaggtctaagattccatttgggtatttgcttaaggatcccacataattgtcccaackgtcattagtagaggggaggtaagccttcattaataataaagagaaagcccac

SEQ ID NO: 28062 - DNA, 201 bp, Homo sapiens
tgatcgtctggaagcagcagagatgtacagaaaagctgcttgggaagcgtatttgagtagacttggtgtttgagtgcttcagatacatttttcagatacartgtgaagacattgaagatatgtggtcctcctgaaagtcactggctggaaataatccaattattcctgcttggattcttccacagggcctgtgtaagaatg

SEQ ID NO: 28063 - DNA, 201 bp, Homo sapiens
ctggagattctcgagcagcagaaaaaagttgatgctgagacagttgggagagtgaagaggtttattcaggagaatgtctttgtggcagcgaatcataatgsttctcccctttctataaaggaagcacccaaagaactcagcttcggtgcacgtgcagagctgcccaggatccacccagttgcatcgaagcttctcaggctt

SEQ ID NO: 28064 - DNA, 201 bp, Homo sapiens
aattgcagtaagacaaaaattctagggcaccaagaggctaaagtcagcacagcttttcttgtgtcctgtattctctgtctaatgtgttgcccaaataatayctaattgttagccattcccctccatctctggcctaaaagtgatagtccaggtatccacatgggctggttcccagaactgccattgctcactctccaaaga

SEQ ID NO: 28065 - DNA, 201 bp, Homo sapiens
gcatgaaaccagaatttcttcacttgactccaggagttcagttggaagcaggaggagataatcttggccaacagtacaatagcccacaagaagttattggyaaacgaggttccgatatcatcattgtaggtcgtggcataatctcagcagctgatcgtctggaagcagcagagatgtacagaaaagctgcttgggaagcgt

SEQ ID NO: 28066 - DNA, 201 bp, Homo sapiens
taattgcagtaagacaaaaattctagggcaccaagaggctaaagtcagcacagcttttcttgtgtcctgtattctctgtctaatgtgttgcccaaataatwtctaattgttagccattcccctccatctctggcctaaaagtgatagtccaggtatccacatgggctggttcccagaactgccattgctcactctccaaag

SEQ ID NO: 28067 - DNA, 201 bp, Homo sapiens
gtgatcctcccacctcagcttccagattagctggtgctataggcatgcaccaccacgtccatctaaatttctttattatttgtagagatgaggtcttgccrtgttacccaggctggtctcaactcctgggctcaagcgatcctcctgcctcagtctctcaaagtgctgggattacaggtgtgagccactgtgcccagccta

SEQ ID NO: 28068 - DNA, 201 bp, Homo sapiens
atataggaaacacagtgaaaaagcagtatgaaggaggtatctttaaaatagcttcctgggcagatctagtaaatgctcacgtggtgccaggctcaggagtwgtgaaaggcctgcaagaagtgggcctgcctttgcatcgggggtgcctccttattgcggaaatgagctccaccggctccctggccactggggactacacta

SEQ ID NO: 28069 - DNA, 201 bp, Homo sapiens
tcttcacttgactccaggagttcagttggaagcaggaggagataatcttggccaacagtacaatagcccacaagaagttattggcaaacgaggttccgatrtcatcattgtaggtcgtggcataatctcagcagctgatcgtctggaagcagcagagatgtacagaaaagctgcttgggaagcgtatttgagtagacttgg

SEQ ID NO: 28070 - DNA, 161 bp, Homo sapiens
ggctgaagctgggatcccggccagccaggtgacccccacgctctggatgtctctgctctgttccttccccgagcccctgccccggctccccgccaaagcamccctgcccactcgggcttcatcctgcacaataaactccggaagcaagtcagtagagctgg

SEQ ID NO: 28071 - DNA, 201 bp, Homo sapiens
tgccctccgctcctcctgcacacctccctcgctctcccacaccactggcaccaggccccggacacccgctctgctgcaggagaatggctactcatcacacrctgtggatgggactggccctgctgggggtgctgggcgacctgcaggcagcaccggaggcccaggtctccgtgcagcccaacttccagcaggacaagttcc

SEQ ID NO: 28072 - DNA, 148 bp, Homo sapiens
atcccggccagccaggtgacccccacgctctggatgtctctgctctgttccttccccgagcccctgccccggctccccgccaaagcacccctgcccactcrggcttcatcctgcacaataaactccggaagcaagtcagtagagctgg

SEQ ID NO: 28073 - DNA, 201 bp, Homo sapiens
gagcatcccgggccagccgaggggctgagtgcccccaaagcccacaggtgcaccccttccctgaagcagaggtgaggtttggggggctgagtccccgacasggttgtctcttgggttcccagactggggcagcacctactccgtgtcagtggtggagaccgactacgaccagtacgcgctgctgtacagccagggcagcaa

SEQ ID NO: 28074 - DNA, 201 bp, Homo sapiens; identical to SEQ ID NO: 28071

SEQ ID NO: 28075 - DNA, 161 bp, Homo sapiens; identical to SEQ ID NO: 28070

SEQ ID NO: 28076 - DNA, 201 bp, Homo sapiens; identical to SEQ ID NO: 28071

SEQ ID NO: 28077 - DNA, 148 bp, Homo sapiens; identical to SEQ ID NO: 28072

SEQ ID NO: 28078 - DNA, 201 bp, Homo sapiens
tgttgacatgttttgttcaagtcagcaagctctatgtgagtctcaggaagtgaattaaatttggaccttatgttttactcttgtttttttttttttttttraatgttacttaatgactctctcctgactcaggagagaaaccccttgtggaaggacagcatggtgatcaggcaatttctctgggttcccaaagaatgacat

SEQ ID NO: 28079 - DNA, 201 bp, Homo sapiens
tagtcattgtggatgatgatacattaataagtatctccaggctccagcacttgcttagctgttatgactccggcaagcctgtgtttctgggagagcgctayggctacggcctgggcactggtggctacagctacatcacgggaggaggaggaatggtcttcagcagagaagccgtcaggagacttctcgccagtaaatgtc

SEQ ID NO: 28080 - DNA, 201 bp, Homo sapiens
gagcagaaaacaataatagcatgctaaatcacaaatgatgctatgtatgggtatgtaaatatcagtgctgtctgcatttctgggtttattgaagacctctygttgtatatatcctcaaaaattaatgtaattgacatcttcaagaatgtttctattgtcttccattcataatcagagatgtaatttgtatggactaaataa

SEQ ID NO: 28081 - DNA, 201 bp, Homo sapiens
tcgtagccaggacaaaacagcatggttagtcattgtggatgatgatacattaataagtatctccaggctccagcacttgcttagctgttatgactccggcragcctgtgtttctgggagagcgctacggctacggcctgggcactggtggctacagctacatcacgggaggaggaggaatggtcttcagcagagaagccgt

SEQ ID NO: 28082 - DNA, 201 bp, Homo sapiens
ccgtggtagtcaccttcatgtcatctataatagtactcctggagagccctggctgcctacaccagtggaaaagagtctccagttctgctctggcctactawctgttaccactgagagaacaacatgttcatttgacatgattgaagctggcatccgtatatgaagatccttgtcaagctttcttctgtggtctgattagtg

SEQ ID NO: 28083 - DNA, 201 bp, Homo sapiens
ataaagtttataaagccattgtgttttgttgtataacaaatcagatatgttattttagaatcgattcccatctaaagaactcaattttgagtctgacattyccaggaccagatattgtcttactcacatttcctttgctttgaaatagggctttccttccaaatggctatttttaggctagggatgttaacatcagggatt

SEQ ID NO: 28084 - DNA, 201 bp, Homo sapiens
tttgtgtgtggaataactggaatgtcatttttgcttttaagccatttctgatgatatagccaaagcaggttgtctgactatgtaggatttttacatcttgmaactaaatcagaaatccagacatgaaaataacctttctagaatgcctaggagcagaaaacaataatagcatgctaaatcacaaatgatgctatgtatggg

SEQ ID NO: 28085 - DNA, 201 bp, Homo sapiens
tcaagcctatactgatggccttagctttgttcagtcattgtaactgggattgttgtcattgctaccgtggtagtcaccttcatgtcatctataatagtacycctggagagccctggctgcctacaccagtggaaaagagtctccagttctgctctggcctactaactgttaccactgagagaacaacatgttcatttgaca

SEQ ID NO: 28086 - DNA, 201 bp, Homo sapiens
catccaagggatgtatcagggatgatcagctgatgagaggctccagaaggatttctagatcgcttcaagcctatactgatggccttagctttgttcagtcrttgtaactgggattgttgtcattgctaccgtggtagtcaccttcatgtcatctataatagtactcctggagagccctggctgcctacaccagtggaaaag

SEQ ID NO: 28087 - DNA, 201 bp, Homo sapiens
attacttcagagctacccttttaagagaaaaccatcagaaattgataatgtttatataaagtttataaagccattgtgttttgttgtataacaaatcagakatgttattttagaatcgattcccatctaaagaactcaattttgagtctgacattcccaggaccagatattgtcttactcacatttcctttgctttgaaat

SEQ ID NO: 28088 - DNA, 201 bp, Homo sapiens
tttaaagagagaataattacttcagagctacccttttaagagaaaaccatcagaaattgataatgtttatataaagtttataaagccattgtgttttgttrtataacaaatcagatatgttattttagaatcgattcccatctaaagaactcaattttgagtctgacattcccaggaccagatattgtcttactcacattt

SEQ ID NO: 28089 - DNA, 201 bp, Homo sapiens
agcaggctgcagatcttacacaggagctccccagtgtcctcctccttcatcagctggctaaacaagaaggtgcatggaccatacttccgttgttaccgcayttttctgtaacatatagcagaaattcatcttggattttcttctgtgaagaagagacaagaatacagattccaaaactcttggaaaccctcagaagatatg

SEQ ID NO: 28090 - DNA, 201 bp, Homo sapiens
catccgtatatgaagatccttgtcaagctttcttctgtggtctgattagtgttgataccggggcacctcctctggtacttttaagtgttttgttaattatrtttactttttggaatggtgtaagcctaaccacaaataaaagatctttgcctaagtttttgatttctcaaatattgtgttcattagtctagactgggaatg

SEQ ID NO: 28091 - DNA, 201 bp, Homo sapiens
acatggttggcacccagtgacgaagacaaagccaggcaggagacacagaaaggttttcgagaggagttataaatcagggtgacctgtgcgcctagcctgckcagggaatgaactggagactgtggcctcatcccactgtgctgtgctcacaacacttgtgtctgccacatggcattgggtgcttcctgactttagggggag

SEQ ID NO: 28092 - DNA, 201 bp, Homo sapiens
gaatcgtagccaggacaaaacagcatggttagtcattgtggatgatgatacattaataagtatctccaggctccagcacttgcttagctgttatgactccrgcaagcctgtgtttctgggagagcgctacggctacggcctgggcactggtggctacagctacatcacgggaggaggaggaatggtcttcagcagagaagc

SEQ ID NO: 28093 - DNA, 201 bp, Homo sapiens
tgtggtctgattagtgttgataccggggcacctcctctggtacttttaagtgttttgttaattatgtttactttttggaatggtgtaagcctaaccacaartaaaagatctttgcctaagtttttgatttctcaaatattgtgttcattagtctagactgggaatggggaggggaaatggggaaaatgaatgaatgaaatc

SEQ ID NO: 28094 - DNA, 201 bp, Homo sapiens
cgactttacaatagatttaaaacatgagattgccctctacatctgggacaaaggcggaggacctcccctgaccccagtgcctgagttttgtaccaatgacrtggacttctactgtgctaccacattccattcttttctaccgctttgtagaaagccagtgaagaagaaggatatttttgttgcagtaaaaacatgcaagaa

SEQ ID NO: 28095 - DNA, 201 bp, Homo sapiens
ccttaagtattccacttgtaaacaagcttaccaagagactaaagagtgaatccttgaaatccgactttacaatagatttaaaacatgagattgccctctayatctgggacaaaggcggaggacctcccctgaccccagtgcctgagttttgtaccaatgacgtggacttctactgtgctaccacattccattcttttctac

SEQ ID NO: 28096 - DNA, 201 bp, Homo sapiens
tggcacccagtgacgaagacaaagccaggcaggagacacagaaaggttttcgagaggagttataaatcagggtgacctgtgcgcctagcctgctcagggartgaactggagactgtggcctcatcccactgtgctgtgctcacaacacttgtgtctgccacatggcattgggtgcttcctgactttagggggagattttat

SEQ ID NO: 28097 - DNA, 201 bp, Homo sapiens
tgagagtaaatctcaagcatttaatatgaagcaagaccacacaacacagaggtgttggatgaaaacagcaagcccttttcaatgcagcagtccatagaatrcctctgtcagaatcaaagactaagcttaagagttcctcgcatatatcgttgtgcacaggatcaacatgatggtgactgggaaaaaattacttcaagtaac

SEQ ID NO: 28098 - DNA, 201 bp, Homo sapiens
agacattgctgtctcttcctgtggattttaatttagaaaatatattaggtgactattttagagctgatgaatttgcagatcaatctcctggaaacctcagytcttcatccctcagaagaaagctgtttttagatgggaacggaagcatctccgactccttaccttcggcttctcccggaagtcctcacagtggtgttcaaa

SEQ ID NO: 28099 - DNA, 201 bp, Homo sapiens
gatgaatttgcagatcaatctcctggaaacctcagttcttcatccctcagaagaaagctgtttttagatgggaacggaagcatctccgactccttaccttyggcttctcccggaagtcctcacagtggtgttcaaacatcactagagatgttttattcaatagatttgtctcctgtaaagtgtaggagccccttgcagaca

SEQ ID NO: 28100 - DNA, 201 bp, Homo sapiens
cccactttctcaccaattgaatttcagataggagagactccactctcagaacaaaggaagtttactgttcattctcctgatgcttcatctggaacaaattytaatgggataactaatccgtgtatcagaagtccttatatagatggctgctcgccaattaaaaattggtctcctatgagacttcagatgtatagtggtggt

SEQ ID NO: 28101 - DNA, 169 bp, Homo sapiens
tgaggctgcgttgatttgaatttggagccacgttcctctgcgcggaacgtggagcgaggagttgccatwcgaatttcctacgcggcctccgtgcgattggctggttcgcggatggcgggacgacacgattggctagtcgctcacaagccccgtgccctggttggcccaa

SEQ ID NO: 28102 - DNA, 201 bp, Homo sapiens; identical to SEQ ID NO: 28097

SEQ ID NO: 28103 - DNA, 201 bp, Homo sapiens; identical to SEQ ID NO: 28098

SEQ ID NO: 28104 - DNA, 201 bp, Homo sapiens
cctacgcggcctccgtgcgattggctggttcgcggatggcgggacgacacgattggctagtcgctcacaagccccgtgccctggttggcccaagacagcgyggaagcggggagttaaagagtctatgcctgtcgtggaagctggcctggcccccggagctccctggagtcggtactgggggcttcgttttgtacgcaccgt

SEQ ID NO: 28105 - DNA, 201 bp, Homo sapiens; identical to SEQ ID NO: 28099

SEQ ID NO: 28106 - DNA, 201 bp, Homo sapiens; identical to SEQ ID NO: 28100

SEQ ID NO: 28107 - DNA, 101 bp, Homo sapiens
wgaggctgcgttgatttgaatttggagccacgttcctctgcgcggaacgtggagcgaggagttgccattcgaatttcctacgcggcctccgtgcgattggc

SEQ ID NO: 28108 - DNA, 169 bp, Homo sapiens; identical to SEQ ID NO: 28101

SEQ ID NO: 28109 - DNA, 201 bp, Homo sapiens; identical to SEQ ID NO: 28097

SEQ ID NO: 28110 - DNA, 201 bp, Homo sapiens; identical to SEQ ID NO: 28098

SEQ ID NO: 28111 - DNA, 201 bp, Homo sapiens; identical to SEQ ID NO: 28099

SEQ ID NO: 28112 - DNA, 201 bp, Homo sapiens; identical to SEQ ID NO: 28104

SEQ ID NO: 28113 - DNA, 201 bp, Homo sapiens; identical to SEQ ID NO: 28100

SEQ ID NO: 28114 - DNA, 101 bp, Homo sapiens; identical to SEQ ID NO: 28107

SEQ ID NO: 28115 - DNA, 201 bp, Homo sapiens
gtccaaaaggctcttaagcctcctccagtaaagctctatcaggaaacaaatgaaccagtgaaaaccaagaccccggacatttaacacaaatacatgcagtktgcttctgcctagtgataccaagaggtctcagatctttggaagtcatcagattatactggaaaaagaggaaacagaagagctaaaatggtttaatgatcc

SEQ ID NO: 28116 - DNA, 201 bp, Homo sapiens
tgaagaaaacccccatggcaatgacagtgccaaagccagccaggccaggactgaagccggtgatctccaagatacaggcatcttccttgacttgatgcacmtgaagaaacctgggggctttgacctatccttgttctatagagataccatcaacatagccgaggatgaggacctcagggttcactttgaggaatccagcaa

SEQ ID NO: 28117 - DNA, 201 bp, Homo sapiens
gtcagggtgggagttgtattacaaaatcgagggcgatgaagaagcagaagaagaagaagaagagaaccttgaagcaagtggagactataaatattcaggargacatagtttgatttttttggttgatgcctccagggctatgtttgaatctcagagtgaagttttgattccttttgacatgagcatccagtgtatccaaag

SEQ ID NO: 28118 - DNA, 201 bp, Homo sapiens
tttccagctggtctttttaccctttgctgatgataaaatgaaggtgtccctttactgaaaaggtcatggcaactccagagtagatggacaagatgaaggckatcattcagaagctccgcttcacatacagaagtgacagctttgagaatcccgtgctgcagcagtaagtacttcaggaacctggaggccttggccttggat

SEQ ID NO: 28119 - DNA, 201 bp, Homo sapiens
gggaaagttaccaagagaaagcacaataacgaaggttctgggagcaaaaggcccaaggtggagtattgagaagagaagctgaagacccacatcagcaaggkcatgctgggcaagttcactgtgcccatgctgaaagaggcctgccgggtggatgggctgaagagtgtgctaaagaagcaggacctgctgaaagccctcacc

SEQ ID NO: 28120 - DNA, 201 bp, Homo sapiens
gtgaattttaaaaatatttacgtcttacaggagttggataatccaagtgcaaaacaaattctagagcttgaccagtttaaggggcagcagggacaaaaacrtttccaagacctgatgggccacggatctgactactcgctcagtgaagtgctgtgggtctgtgccagcctctttagtgatgtctggttgaagatgagtcat

SEQ ID NO: 28121 - DNA, 201 bp, Homo sapiens
aagggaaagttaccaagagaaagcacaataacgaaggttctgggagcaaaaggcccaaggtggagtattgagaagagaagctgaagacccacatcagcaasgtcatgctgggcaagttcactgtgcccatgctgaaagaggcctgccgggtggatgggctgaagagtgtgctaaagaagcaggacctgctgaaagccctca

SEQ ID NO: 28122 - DNA, 201 bp, Homo sapiens
gcagcagggacaaaaacgtttccaagacctgatgggccacggatctgactactcgctcagtgaagtgctgtgggtctgtgccagcctctttagtgatgtcyggttgaagatgagtcatacgaggatcatgctgttgaccagtgaagaaaacccccatggcaatgacagtgccaaagccagccaggccaggactgaagccgg

SEQ ID NO: 28123 - DNA, 201 bp, Homo sapiens
tagagataccatcaacatagccgaggatgaggacctcagggttcactttgaggaatccagcaagctagaagacctgttgccgaaggttcacgccaaggacrccaggaagcaagcactcagcaggttaaagctgaagctcaacaaagatatagtgatctctgtgggcatttgtaatctggtccaaaaggctcttaagcctcc

SEQ ID NO: 28124 - DNA, 201 bp, Homo sapiens
tgaagttttgattccttttgacatgagcatccagtgtatccaaagtgtgtacatcagtaagatcataagcagtgattgagatctcttggcagtggtgttcyatggtaccgagaaagacaaaaattcagtgaattttaaaaatatttacgtcttacaggagttggataatccaagtgcaaaacaaattctagagcttgacca

SEQ ID NO: 28125 - DNA, 201 bp, Homo sapiens
ctaataaaatgcactccatgaatggattcatgtatgggaatcagccgggtctcactatgtgcaaaggagattcggtcgtgtggtacttattcagcgccggmaatgaggccgatgtacatggaatatacttttcaggaaacacatatctgtggagaggagaacggagagacacagcaaacctcttccctcaaacaagtctta

SEQ ID NO: 28126 - DNA, 201 bp, Homo sapiens
caagtcttacgctccacatgtggcctgacacagaggggacttttaatgttgaatgccttacaactgatcattacacaggcggcatgaagcaaaaatatacygtgaaccaatgcaggcggcagtctgaggattccaccttctacctgggagagaggacatactatatcgcagcagtggaggtggaatgggattattccccac

SEQ ID NO: 28127 - DNA, 201 bp, Homo sapiens
attcaactgtggatcaagttaaggacctctacagtggattaattggccccctgattgtttgtcgaagaccttacttgaaagtattcaatcccagaaggaarctggaatttgcccttctgtttctagtttttgatgagaatgaatcttggtacttagatgacaacatcaaaacatactctgatcaccccgagaaagtaaaca

SEQ ID NO: 28128 - DNA, 201 bp, Homo sapiens
gaatgtttggaaacctacaaggcctcacaatgcacgtgggagatgaagtcaactggtatctgatgggaatgggcaatgaaatagacttacacactgtacaytttcacggccatagcttccaatacaagcacaggggagtttatagttctgatgtctttgacattttccctggaacataccaaaccctagaaatgtttccaa

SEQ ID NO: 28129 - DNA, 201 bp, Homo sapiens
aaacaagtcttacgctccacatgtggcctgacacagaggggacttttaatgttgaatgccttacaactgatcattacacaggcggcatgaagcaaaaatawactgtgaaccaatgcaggcggcagtctgaggattccaccttctacctgggagagaggacatactatatcgcagcagtggaggtggaatgggattattccc

SEQ ID NO: 28130 - DNA, 201 bp, Homo sapiens
atggatgctcagctgtcagaatctaaaccatctgaaagccggtttgcaagcctttttccaggtccaggagtgtaacaagtcttcatcaaaggataatatcygtgggaagcatgttagacactactacattgccgctgaggaaatcatctggaactatgctccctctggtatagacatcttcactaaagaaaacttaacagc

SEQ ID NO: 28131 - DNA, 201 bp, Homo sapiens
ccacagaaacattcacctatgaatggactgtccccaaagaagtaggacccactaatgcagatcctgtgtgtctagctaagatgtattattctgctgtggawcccactaaagatatattcactgggcttattgggccaatgaaaatatgcaagaaaggaagtttacatgcaaatgggagacagaaagatgtagacaaggaat

SEQ ID NO: 28132 - DNA, 201 bp, Homo sapiens
ttacatgcaaatgggagacagaaagatgtagacaaggaattctatttgtttcctacagtatttgatgagaatgagagtttactcctggaagataatattaraatgtttacaactgcacctgatcaggtggataaggaagatgaagactttcaggaatctaataaaatgcactccatgaatggattcatgtatgggaatcag

SEQ ID NO: 28133 - DNA, 201 bp, Homo sapiens
gtagacaaggaattctatttgtttcctacagtatttgatgagaatgagagtttactcctggaagataatattagaatgtttacaactgcacctgatcaggkggataaggaagatgaagactttcaggaatctaataaaatgcactccatgaatggattcatgtatgggaatcagccgggtctcactatgtgcaaaggagat

SEQ ID NO: 28134 - DNA, 201 bp, Homo sapiens
ctccaagaaggggaaaaaaatgaagattttgatacttggtatttttctgtttttatgtagtaccccagcctgggcgaaagaaaagcattattacattggawttattgaaacgacttgggattatgcctctgaccatggggaaaagaaacttatttctgttgacacggaacattccaatatctatcttcaaaatggcccaga

SEQ ID NO: 28135 - DNA, 201 bp, Homo sapiens
gaatggactgtccccaaagaagtaggacccactaatgcagatcctgtgtgtctagctaagatgtattattctgctgtggatcccactaaagatatattcaytgggcttattgggccaatgaaaatatgcaagaaaggaagtttacatgcaaatgggagacagaaagatgtagacaaggaattctatttgtttcctacagta

SEQ ID NO: 28136 - DNA, 201 bp, Homo sapiens
gagcatcttggcatcctgggtcctgtcatttgggcagaggtgggagacaccatcagagtaaccttccataacaaaggagcatatcccctcagtattgagcygattggggtgagattcaataagaacaacgagggcacatactattccccaaattacaacccccagagcagaagtgtgcctccttcagcctcccatgtggca

SEQ ID NO: 28137 - DNA, 201 bp, Homo sapiens
aaccaatgattcataacaatgtatgtgaaagtgtaaaatagaatgttactttggaatgactataaacattaaaagaagactggaagcatacaactttgtayatttgtgggggaaaactattaattttttgcaaatggaaagatcaacagactatataatgatacatgactgacacttgtacactaggtaataaaactgatt

SEQ ID NO: 28138 - DNA, 201 bp, Homo sapiens
ttgacaaatcatgttaatagctagacaagaagaaagttagctttgtaaacttctacttcatttgattcagagaaacagagcatgagttttcttaaaagtamcaagaaaaggaacaaaaaaaatgaggtttgaaatcttttaccatggcaaaacattaacatctttctcaaaaacatagagaaatctggaaaaatcaagaag

SEQ ID NO: 28139 - DNA, 201 bp, Homo sapiens
tcttcactaaagaaaacttaacagcacctggaagtgactcagcggtgttttttgaacaaggtaccacaagaattggaggctcttataaaaagctggtttaycgtgagtacacagatgcctccttcacaaatcgaaaggagagaggccctgaagaagagcatcttggcatcctgggtcctgtcatttgggcagaggtgggag

SEQ ID NO: 28140 - DNA, 174 bp, Homo sapiens
ttaagaagtgaatagttaccactacacggtaaggtaagcagcctgaaagcatttgtatcatatatgtgtgtgtgtgtgtgtgtgtgtgtgtgtgtgtgtgwatatataaaataaaaaactcctctacttgtactttggcattcaatttttagaaattcagtctcaaatgccatt

SEQ ID NO: 28141 - DNA, 201 bp, Homo sapiens; identical to SEQ ID NO: 28125

SEQ ID NO: 28142 - DNA, 201 bp, Homo sapiens; identical to SEQ ID NO: 28126

SEQ ID NO: 28143 - DNA, 201 bp, Homo sapiens; identical to SEQ ID NO: 28127

SEQ ID NO: 28144 - DNA, 201 bp, Homo sapiens; identical to SEQ ID NO: 28128

SEQ ID NO: 28145 - DNA, 201 bp, Homo sapiens; identical to SEQ ID NO: 28129

SEQ ID NO: 28146 - DNA, 201 bp, Homo sapiens; identical to SEQ ID NO: 28130

SEQ ID NO: 28147 - DNA, 201 bp, Homo sapiens; identical to SEQ ID NO: 28131

SEQ ID NO: 28148 - DNA, 201 bp, Homo sapiens; identical to SEQ ID NO: 28132

SEQ ID NO: 28149 - DNA, 201 bp, Homo sapiens; identical to SEQ ID NO: 28133

SEQ ID NO: 28150 - DNA, 201 bp, Homo sapiens; identical to SEQ ID NO: 28134

SEQ ID NO: 28151 - DNA, 201 bp, Homo sapiens; identical to SEQ ID NO: 28135

SEQ ID NO: 28152 - DNA, 201 bp, Homo sapiens; identical to SEQ ID NO: 28136

SEQ ID NO: 28153 - DNA, 201 bp, Homo sapiens; identical to SEQ ID NO: 28139

SEQ ID NO: 28154 - DNA, 201 bp, Homo sapiens
agatttttgataagatttgcctcaatatcttgtttatgatgtttggatatgacccaaaaaacttaaatatgagtcgtttggatgtgtatttttcacacaasccagcaggaacatctgttcaaaatatgcttcattggagtcagcttttaaattctactcatttgaaagcttatgactggggcagtcctgatctgaacttgg

SEQ ID NO: 28155 - DNA, 201 bp, Homo sapiens
gttatgatgtgtggatgggaaatagcagaggaaatacctggtccaggaaacacttgtacctagaaacgagttccaaagaattctgggctttcagttttgaygagatggcaaaatatgaccttccagcctctattgatttcactgtgaagcaaaccagacaagaggaaatattttatgtaggccattcacagggtactacta

SEQ ID NO: 28156 - DNA, 143 bp, Homo sapiens
actctttgtttggattagatgtctatgatcaagtttaccatgaaatcattgatattatccaagacaatctataaagaaccatggcgctgtgtgtttaaagwtctacatcattcctaatgaaatccaattcttattttttttta

SEQ ID NO: 28157 - DNA, 201 bp, Homo sapiens
atgctggttatgatgtgtggatgggaaatagcagaggaaatacctggtccaggaaacacttgtacctagaaacgagttccaaagaattctgggctttcagstttgatgagatggcaaaatatgaccttccagcctctattgatttcactgtgaagcaaaccagacaagaggaaatattttatgtaggccattcacagggta

SEQ ID NO: 28158 - DNA, 201 bp, Homo sapiens
gtttgcttacatctgccagcagctggatttccaatcttcccaacaatagtctgggcttcattctggcagatgctggttatgatgtgtggatgggaaatagyagaggaaatacctggtccaggaaacacttgtacctagaaacgagttccaaagaattctgggctttcagttttgatgagatggcaaaatatgaccttccag

SEQ ID NO: 28159 - DNA, 201 bp, Homo sapiens
ttctactatatcaaagatagctgaaagaatcaaaatattttttgctttagcaccagttttttccacaaagtacttaaaaagtcctttaattaaaaaattcrttggttcaaagctgtgtccactacagatttttgataagatttgcctcaatatcttgtttatgatgtttggatatgacccaaaaaacttaaatatgagtcg

SEQ ID NO: 28160 - DNA, 201 bp, Homo sapiens
agactgtcctattgcatctcaagccgaggatcccactggaagacatccctgaagacgatgacgagtgctcggcctggctgcacaagctctaccaggagaakgatgcctttcaggaggagtactacaggacgggcaccttcccagagacgcccatggtgcccccccggcggccctggaccctcgtgaactggctgttttggg

SEQ ID NO: 28161 - DNA, 201 bp, Homo sapiens
tgttttgggcctcgctggtgctctaccctttcttccagttcctggtcagcatgatcaggagcgggtcttccctgacgctggccagcttcatcctcgtcttytttgtggcctccgtgggagttcgatggatgattggtgtgacggaaattgacaagggctctgcctacggcaactctgacagcaagcagaaactgaatgact

SEQ ID NO: 28162 - DNA, 201 bp, Homo sapiens
gtcctggatctttcttccttctggaaatctttgactgtgggtagttatttatttctgaataagagcgtccacgcatcatggacctcgcgggactgctgaartctcagttcctgtgccacctggtcttctgctacgtctttattgcctcagggctaatcatcaacaccattcagctcttcactctcctcctctggcccatta

SEQ ID NO: 28163 - DNA, 201 bp, Homo sapiens
cgctggtgctctaccctttcttccagttcctggtcagcatgatcaggagcgggtcttccctgacgctggccagcttcatcctcgtcttctttgtggcctcygtgggagttcgatggatgattggtgtgacggaaattgacaagggctctgcctacggcaactctgacagcaagcagaaactgaatgactgactcagggagg

SEQ ID NO: 28164 - DNA, 201 bp, Homo sapiens
ctcctctggcccattaacaagcagctcttccggaagatcaactgcagactgtcctattgcatctcaagccgaggatcccactggaagacatccctgaagaygatgacgagtgctcggcctggctgcacaagctctaccaggagaaggatgcctttcaggaggagtactacaggacgggcaccttcccagagacgcccatgg

SEQ ID NO: 28165 - DNA, 201 bp, Homo sapiens
agacggttgccaccagtttgcagcacctccgggactaccccgagaagtattttgtatgtaggcaccagagcagctgtgtcccaagggctcctgcaggactktgaccgtgggacccccatgtgacttccacaggacacgtgactgtgtggtcctgtgcgactccagggctgtgtgtgaccatagggctgtgtataacctcag

SEQ ID NO: 28166 - DNA, 201 bp, Homo sapiens
ggggccgtgtgtgatcatgtggccatatgtgaccctggggctatgtgtgaccccagggctgtgtgtgaccccagggctatgtgtgacctcagggctgtatrtaaccatggggccctgtgtgatcgtgtggccatatgtgaccctggggctgtgtgtgaccccagggccaggcatgacaccagggctgtgtgtgaccccagg

SEQ ID NO: 28167 - DNA, 201 bp, Homo sapiens; identical to SEQ ID NO: 28161

SEQ ID NO: 28168 - DNA, 201 bp, Homo sapiens; identical to SEQ ID NO: 28162

SEQ ID NO: 28169 - DNA, 201 bp, Homo sapiens; identical to SEQ ID NO: 28163

SEQ ID NO: 28170 - DNA, 201 bp, Homo sapiens
gctatgtgtgaccccagggctgtgtgtgaccccagggctatgtgtgacctcagggctgtatgtaaccatggggccctgtgtgatcgtgtggccatatgtgmccctggggctgtgtgtgaccccagggccaggcatgacaccagggctgtgtgtgaccccagggctgtatgtgaccccagggctgtgtgtgacctcagggct

SEQ ID NO: 28171 - DNA, 201 bp, Homo sapiens
gaaataatgaaaatccaacactgctgggagtcctaaacggaaagaaataccatgcagatttgtatgttaggaggatcccactggaagacatccctgaagaygatgacgagtgctcggcctggctgcacaagctctaccaggagaaggatgcctttcaggaggagtactacaggacgggcaccttcccagagacgcccatgg

SEQ ID NO: 28172 - DNA, 201 bp, Homo sapiens
gtgtgtgaccatagggctgtgtataacctcagggatgtatgtgaccatggggccgtgtgtgaccgtggggccacgtatgactgtggggccgtgtatgaccrtggggccgtgtgtgaccccagggctgtgtgtgaccccagggctgtgtgtgaccatggggccgtgtgtgatcatgtggccatatgtgaccctggggctatg

SEQ ID NO: 28173 - DNA, 201 bp, Homo sapiens
cttctgttcgcgcaagtgggagcaggatcgcaagacggttgccaccagtttgcagcacctccgggactaccccgagaagtattttgtatgtaggcaccagmgcagctgtgtcccaagggctcctgcaggactgtgaccgtgggacccccatgtgacttccacaggacacgtgactgtgtggtcctgtgcgactccagggct

SEQ ID NO: 28174 - DNA, 201 bp, Homo sapiens
aataccatgcagatttgtatgttaggaggatcccactggaagacatccctgaagacgatgacgagtgctcggcctggctgcacaagctctaccaggagaakgatgcctttcaggaggagtactacaggacgggcaccttcccagagacgcccatggtgcccccccggcggccctggaccctcgtgaactggctgttttggg

SEQ ID NO: 28175 - DNA, 201 bp, Homo sapiens; identical to SEQ ID NO: 28161

SEQ ID NO: 28176 - DNA, 201 bp, Homo sapiens; identical to SEQ ID NO: 28162

SEQ ID NO: 28177 - DNA, 201 bp, Homo sapiens; identical to SEQ ID NO: 28163

SEQ ID NO: 28178 - DNA, 201 bp, Homo sapiens; identical to SEQ ID NO: 28171

SEQ ID NO: 28179 - DNA, 201 bp, Homo sapiens; identical to SEQ ID NO: 28174

SEQ ID NO: 28180 - DNA, 201 bp, Homo sapiens; identical to SEQ ID NO: 28161

SEQ ID NO: 28181 - DNA, 201 bp, Homo sapiens; identical to SEQ ID NO: 28162

SEQ ID NO: 28182 - DNA, 201 bp, Homo sapiens; identical to SEQ ID NO: 28163

SEQ ID NO: 28183 - DNA, 201 bp, Homo sapiens; identical to SEQ ID NO: 28171

SEQ ID NO: 28184 - DNA, 201 bp, Homo sapiens; identical to SEQ ID NO: 28174

SEQ ID NO: 28185 - DNA, 201 bp, Homo sapiens; identical to SEQ ID NO: 28161

SEQ ID NO: 28186 - DNA, 201 bp, Homo sapiens; identical to SEQ ID NO: 28162

SEQ ID NO: 28187 - DNA, 201 bp, Homo sapiens; identical to SEQ ID NO: 28163

SEQ ID NO: 28188 - DNA, 201 bp, Homo sapiens; identical to SEQ ID NO: 28171

SEQ ID NO: 28189 - DNA, 201 bp, Homo sapiens
tagggaaaacaaaaatgatataaagccatatgaggttatattgaaatgtattgagcttatattgaaatttattgttccaattcacaggttacatgaaaaamaatttactaagcttaactacatgtcacacattgtacatggaaacaagaacattaagaagtccactgacagtatcagtactgttttgcaaatactcagcat

SEQ ID NO: 28190 - DNA, 201 bp, Homo sapiens
ttgtcaagtcaaaatttgttttagtacctgtttaaccattagaaatatttcatgtcaaggaggaaaacattagggaaaacaaaaatgatataaagccataygaggttatattgaaatgtattgagcttatattgaaatttattgttccaattcacaggttacatgaaaaaaaatttactaagcttaactacatgtcacaca

SEQ ID NO: 28191 - DNA, 127 bp, Homo sapiens
taagaagtccactgacagtatcagtactgttttgcaaatactcagcatactttggatccatttcatgcaggattgtgttgttttaactgttgttgaggaarctaataaataattaaattgtatagaa

SEQ ID NO: 28192 - DNA, 201 bp, Homo sapiens
aacctgccaaacccctaccgaaggaaatggaagagtttgtccagagctctggagaaaatggtgttgtggtgttttctctggggtcgatggtcagtaacacrtcagaagaaagggccaatgtaattgcatcagcccttgccaagatcccacaaaaggttctgtggagatttgatgggaataaaccagatactttaggactca

SEQ ID NO: 28193 - DNA, 201 bp, Homo sapiens; identical to SEQ ID NO: 28189

SEQ ID NO: 28194 - DNA, 201 bp, Homo sapiens; identical to SEQ ID NO: 28190

SEQ ID NO: 28195 - DNA, 112 bp, Homo sapiens
taagaagtccactgacagtatcagtactgttttgcaaatactcagcatactttggatccatttcatgcaggattgtgttgttttaactgttgttgaggaarctaataaataa

SEQ ID NO: 28196 - DNA, 201 bp, Homo sapiens; identical to SEQ ID NO: 28192

SEQ ID NO: 28197 - DNA, 201 bp, Homo sapiens
gagctcattaaaaaggagcataatgtgactgtcctagttgcctctggtgcacttttcatcacaccaacctctaacccatctctgacatttgaaatatatarggtgccctttggcaaagaaagaatagaaggagtaattaaggacttcgttttgacatggctggaaaatagaccatctccttcaaccatttggagattctat

SEQ ID NO: 28198 - DNA, 201 bp, Homo sapiens
gaatgatcttcttggacatcccaaaaccaaagcttttatcactcatggtggaactaatgggatctacgaagctatttaccacggagtccctatggtgggarttcccatgtttgctgatcagcctgataacattgctcacatgaaggccaaaggagcagctgtggaagtgaacctaaacacaatgacaagtgtggatttgct

SEQ ID NO: 28199 - DNA, 201 bp, Homo sapiens
  misc_feature (1)...(201): n = A,T,C or G
tgttggaggattgcactgcaaacctgccaaacctttacctaaggaaatggaagaatttatccagagctcaggtaaaaatggtgttgtggtgttttctctgngatcaatggtcaaaaaccttacagaagaaaaggccaatcttattgcctcagcccttgcccagattccacagaaggttttatggagatacaaaggaaagaa

SEQ ID NO: 28200 - DNA, 201 bp, Homo sapiens
tggctgtagcattcgtgctatccctgggggttgcagctttgtataagtttcgtgtggctgatcaaagaaagaaggcatacgcagatttctacagaaactaygatgtcatgaaagattttgaggagatgaggaaggctggtatctttcagagtgtaaagtaatcttggaatataaagggtctccctctgtcacccaggccgt

SEQ ID NO: 28201 - DNA, 201 bp, Homo sapiens
gtctccgccgtggtgcagcttcaggcctctcccgcatctactctctcacgcttccgctgcggcctgagggagggcggcgggcggaccacggaccggggttrgcatacgtatcaaggacagtaactaccatggctcccgaagttttgccaaaacctcggatgcgtggccttctggccaggcgtctgcgaaatcatatggctg

SEQ ID NO: 28202 - DNA, 201 bp, Homo sapiens
tggctgtagcattcgtgctatccctgggggttgcagctttgtataagtttcgtgtggctgatcaaagaaagaaggcatacgcagatttctacagaaactaygatgtcatgaaagattttgaggagatgaggaaggctggtatctttcagagtgtaaagtaatcttggaatataaagaatttcttcaggttgaattacctag

SEQ ID NO: 28203 - DNA, 104 bp, Homo sapiens
actatttggtagctgtgccaccaccacatagttgaaataggtaattcaaatgtagggtttcttactcagtattgctttattaataacaagctaacagtatktaa

SEQ ID NO: 28204 - DNA, 201 bp, Homo sapiens; identical to SEQ ID NO: 28201

SEQ ID NO: 28205 - DNA, 201 bp, Homo sapiens; identical to SEQ ID NO: 28202

SEQ ID NO: 28206 - DNA, 104 bp, Homo sapiens; identical to SEQ ID NO: 28203

SEQ ID NO: 28207 - DNA, 201 bp, Homo sapiens
cgtcgccgcgttctcgctgtgcactcttattctgcgcctgcgcgcggctacagcacggttcgtttttcctttagtcaggaaggacgttggtgttgaggttrgcatacgtatcaaggacagtaactaccatggctcccgaagttttgccaaaacctcggatgcgtggccttctggccaggcgtctgcgaaatcatatggctg

SEQ ID NO: 28208 - DNA, 201 bp, Homo sapiens
tcacacaggaaagaagcagaccacgaaatgaacttcggctgtcacctgcggtgggcgcactagaggtcttttgaactccttcggctaccgtcgccgcgttytcgctgtgcactcttattctgcgcctgcgcgcggctacagcacggttcgtttttcctttagtcaggaaggacgttggtgttgaggttggcatacgtatca

SEQ ID NO: 28209 - DNA, 201 bp, Homo sapiens
cctttcagaggctggagcaggtagtgactcatttgctttgaagaccagagctgataaagagggagattattatgtcctcaatggatcaaagatgtggatcrgcagtgctgagcacgcagggctctttctggtgatggcaaatgtagaccctaccattggatataagggaattacctccttcttagtagatcgtgatactcc

SEQ ID NO: 28210 - DNA, 201 bp, Homo sapiens
agagatggggttttaccatattgcccaggctggtcttctggcttctggatatcgcccaccttggcctcccaaagtgctgggattacagggatgagccaccrtgcctggctgggtatttatattatcattctagtttcagagtatacagaagtttcatcccatcatttggaaaaataaaggcatctgaagtacaatattact

SEQ ID NO: 28211 - DNA, 201 bp, Homo sapiens
aaatgtagaccctaccattggatataagggaattacctccttcttagtagatcgtgatactccgggccttcatatagggaaacctgaaaacaaattggggytcagagcttcttccacctgcccgttaacattcgaaaatgtcaaggttccagaagccaatatcttgggacaaattggacatggctataagtatgccatagg

SEQ ID NO: 28212 - DNA, 201 bp, Homo sapiens
tgtcttcttggaagattcctcctcatgtctcaaaatcttcccagtcagaagctctactcaatataacaaataatggaatacactttgctcccctgcaaacrtttacagatgaggaaatgatgataaagagttcagttaaaaaatttgctcaggaacaaattgcacctttggtttcaaccatggatgaaaattcgaaaatgg

SEQ ID NO: 28213 - DNA, 201 bp, Homo sapiens
ggagtgggacccctccctggtgtcactgctgtaaaattttaaacggttgtgtcttgttgggagtaagtgccttgcgtgggaataaacttccacagcattcraatattttaatgaagcccttagtcagggtcctggtgttggcctttttggttttctcttttcaggctgtttaacttaggcacaggagatccacttttaaac

SEQ ID NO: 28214 - DNA, 201 bp, Homo sapiens
aagattggtacgatatatgaaggagcttccaacatccagttgaacaccattgcaaagcatatcgatgcagaatactgacgtctataggagtgggacccctycctggtgtcactgctgtaaaattttaaacggttgtgtcttgttgggagtaagtgccttgcgtgggaataaacttccacagcattcgaatattttaatgaa

SEQ ID NO: 28215 - DNA, 201 bp, Homo sapiens
cgcaaggatgttttgactacactattccatatattaaagaaaggatacaatttggcaaaagactatttgattttcagggcctccaacaccaagtggctcaygtggccacccagctggaagctgcaagattactaacatacaatgctgctaggcttttagaagctggaaagccattcataaaagaagcgtcaatggccaaat

SEQ ID NO: 28216 - DNA, 201 bp, Homo sapiens
tggatattctgtcatgcactatttttcagttgacaatttctgtattttaattgaatactgtttcttcagtcatggttattgcactttatcctgaataatarttcagaaattgggttttggttcagtgattctcaagaaaaagatctcttgcccattaagaagtgtatcaaaatctcataaggaatgagggagagaaggggg

SEQ ID NO: 28217 - DNA, 201 bp, Homo sapiens
ctataagtatgccatagggagtctcaatgaaggtagaataggaattgctgcacagatgctgggactggcgcaaggatgttttgactacactattccatatrttaaagaaaggatacaatttggcaaaagactatttgattttcagggcctccaacaccaagtggctcacgtggccacccagctggaagctgcaagattact

SEQ ID NO: 28218 - DNA, 201 bp, Homo sapiens
gagcaggtagtgactcatttgctttgaagaccagagctgataaagagggagattattatgtcctcaatggatcaaagatgtggatcagcagtgctgagcaygcagggctctttctggtgatggcaaatgtagaccctaccattggatataagggaattacctccttcttagtagatcgtgatactccgggccttcatatag

SEQ ID NO: 28219 - DNA, 201 bp, Homo sapiens
aaattgggttttggttcagtgattctcaagaaaaagatctcttgcccattaagaagtgtatcaaaatctcataaggaatgagggagagaagggggctgtasagtttgaaaaagcatattcaatattaaaatagttttatatttgggaaggcaaaaatgaatctattgttttgcaatataggttataaacaggcaaaatgca

SEQ ID NO: 28220 - DNA, 201 bp, Homo sapiens
gccatgccaggcccggccaccgacgcggggaagatccctttctgcgacgccaaggaagaaatccgtgccgggctcgaaagctctgagggcggcggcggccyggagaggccaggcgcgcgcgggcagcggcagaacatcgtctggaggaatgtcgtcctgatgagcttgctccacttgggggccgtgtactccctggtgctc

SEQ ID NO: 28221 - DNA, 201 bp, Homo sapiens
acgccagcaacagacgccggccgccaagatctgcatccctaggccacgctaagaccctggggaagagcgcaggagcccgggagaagggctggaaggagggractggacgtgcggagaattcccccctaaaaggcagaagcccccgcccccaccctcgagctccgctcgggcagagcgcctgcctgcctgccgctgctgcgg

SEQ ID NO: 28222 - DNA, 116 bp, Homo sapiens
ggccccgttccatttycacagctcctcctccccggccgcgcgcccctcccgccccgcgcgcgcctcctctttctcgcggccgagttcagcccgggcagccatatgggggatacgcc

SEQ ID NO: 28223 - DNA, 201 bp, Homo sapiens
tctgcgacgccaaggaagaaatccgtgccgggctcgaaagctctgagggcggcggcggcccggagaggccaggcgcgcgcgggcagcggcagaacatcgtytggaggaatgtcgtcctgatgagcttgctccacttgggggccgtgtactccctggtgctcatccccaaagccaagccactcactctgctctgggcctact

SEQ ID NO: 28224 - DNA, 201 bp, Homo sapiens; identical to SEQ ID NO: 28220

SEQ ID NO: 28225 - DNA, 201 bp, Homo sapiens
tgagaaccaacagttatctagaattccgtgtctactaatgtttcacctgcatgcagccttcattaattttgtagcaaaatataaagtgatcattatgtagyttctggattaaaaaaatttgtgtgtgaagttgctttgtaaagtgcatgtggaattaatgggacagtgtgccctttgtgttagatgttagagcaaaagaaa

SEQ ID NO: 28226 - DNA, 201 bp, Homo sapiens
aaatgtttaagcacctaatttatattctaattgatcccagccactgatgcatgtactttagctacttctgctaaataagcatattaattttccacatcagrccatcagatcttgagaaccaacagttatctagaattccgtgtctactaatgtttcacctgcatgcagccttcattaattttgtagcaaaatataaagtga

SEQ ID NO: 28227 - DNA, 201 bp, Homo sapiens
ttgattttgttctgtttgctattgttatcttaaaggtgtataactctgacatgccagacatcaaattaagctcaaattaagctctcgtttaaatgtttaarcacctaatttatattctaattgatcccagccactgatgcatgtactttagctacttctgctaaataagcatattaattttccacatcagaccatcagatc

SEQ ID NO: 28228 - DNA, 201 bp, Homo sapiens
ttatttttttgctgtgtttacagcttgttaatgctctactgtctttgtttcaagagagatttgttcactgcccagctcgttttgtgtcctgagccctatgsccagcccaccttataaatcatgcctgtttagatgtttgattttgttctgtttgctattgttatcttaaaggtgtataactctgacatgccagacatcaaa

SEQ ID NO: 28229 - DNA, 201 bp, Homo sapiens; identical to SEQ ID NO: 28223

SEQ ID NO: 28230 - DNA, 201 bp, Homo sapiens
tgagccaccgcaccctgccgaaaaaaacttttttttttttgagacggaggctcgctctgtcccccaggctggagtgcagtggcgagatctcagctcactgyaagctccgcctcccgggttcacgccattctcctgcctcagcctcccgagtagctgggagccagcgcgcccagcctaaaaaacttttcaagtcaatattac

SEQ ID NO: 28231 - DNA, 201 bp, Homo sapiens
ggattacaggcgtgagccaccgcaccctgccgaaaaaaacttttttttttttgagacggaggctcgctctgtcccccaggctggagtgcagtggcgagatytcagctcactgcaagctccgcctcccgggttcacgccattctcctgcctcagcctcccgagtagctgggagccagcgcgcccagcctaaaaaacttttca

SEQ ID NO: 28232 - DNA, 201 bp, Homo sapiens; identical to SEQ ID NO: 28221

SEQ ID NO: 28233 - DNA, 116 bp, Homo sapiens; identical to SEQ ID NO: 28222

SEQ ID NO: 28234 - DNA, 201 bp, Homo sapiens
cggaaggccaggactggagacagcagtgcttgaacttggaacagccatcccacatgtctgccgttgcaacctcggttcatggctttggttacaatagctckcttgtacattggatcgtgggagggggcagagggtggggaaggaacgagtcaatgtggtttgggaatgtttttgtttatctcaaaataatgttgaaataca

SEQ ID NO: 28235 - DNA, 201 bp, Homo sapiens; identical to SEQ ID NO: 28220

SEQ ID NO: 28236 - DNA, 201 bp, Homo sapiens; identical to SEQ ID NO: 28221

SEQ ID NO: 28237 - DNA, 201 bp, Homo sapiens
tctgcgacgccaaggaagaaatccgtgccgggctcgaaagctctgagggcggcggcggcccggagaggccaggcgcgcgcgggcagcggcagaacatcgtytggaggaatgtcgtcctgatgagcttgctccacttgggggccgtgtactccctggtgctcatccccaaagccaagccactcactctgctctggggtaacc

SEQ ID NO: 28238 - DNA, 201 bp, Homo sapiens
atggcatcaagggcatatattgaaagtcacccttcccggattacacattttagctttgttacatactcattgtaaccactccgaaaagtgctgcttgatgmtgcgtgctctttctgtgtccctggaggtattctgaaggtcagaagagagatatacaacagcgaggcttggtgataacgtatagaataacagacggggact

SEQ ID NO: 28239 - DNA, 201 bp, Homo sapiens
gcatcgagatgttattgagaaggggagaaagcttgacgtcactgacctgcttgctgatcctgtggtccggatccagagaaatacacagcacatccagaaasaaggaagagctctcaatcaagaggcagcgtgtgagatgcttcgtgaatggcatcaagggcatatattgaaagtcacccttcccggattacacattttagc

SEQ ID NO: 28240 - DNA, 201 bp, Homo sapiens; identical to SEQ ID NO: 28220

SEQ ID NO: 28241 - DNA, 201 bp, Homo sapiens
taaaatatggtcctaaaatcaaaaagatttcagttttgtcattctgtctctgagattctatttccacatctagagcagggtaataatgatacctaccttayaaaattattgggagaatacattagttaatatatgtgaaagtatggaggagatgtgcaataaatatttgtgttattaactacacatacagcactctatagg

SEQ ID NO: 28242 - DNA, 201 bp, Homo sapiens
aagaacttgctttatgaatctgggtgctcctgtattaggtgcatacatatttaggatagttagctcttcttgctgcattgatcccattaccattatataakgcccttctttgtcttttttgatctttgttggtttaaagtctgttttattagagactaggattgcaacccctgctattttttttttttttttgcttgataa

SEQ ID NO: 28243 - DNA, 201 bp, Homo sapiens; identical to SEQ ID NO: 28223

SEQ ID NO: 28244 - DNA, 201 bp, Homo sapiens; identical to SEQ ID NO: 28221

SEQ ID NO: 28245 - DNA, 116 bp, Homo sapiens; identical to SEQ ID NO: 28222

SEQ ID NO: 28246 - DNA, 201 bp, Homo sapiens
cgtgtgagatgcttcgtgaatggcatcaagggcatatattgaaagtcacccttcccggattacacattttagctttgttacatactcattgtaaccactcygaaaagtgctgcttgatgctgcgtgctctttctgtgtccctggaggtattctgaaggtcagaagagagatatacaacagcgaggcttggtgataacgtat

SEQ ID NO: 28247 - DNA, 201 bp, Homo sapiens
aaagtatggaggagatgtgcaataaatatttgtgttattaactacacatacagcactctataggagatattccatttataaaaactttaggttctaaaaasctgtacacgttgattatttttgtaagtcaaaagtgattaagaggagtttaagctatcatttccagatgtatttctataaataaaaacataagtatattca

SEQ ID NO: 28248 - DNA, 201 bp, Homo sapiens
ggagacttcacactttccgttagaagaaatggagctgtcacccacatcaagattcagaacactggtgattactatgacctgtatggaggggagaaatttgscactttggctgagttggtccagtattacatggaacatcacgggcaattaaaagagaagaatggagatgtcattgagcttaaatatcctctgaactgtgca

SEQ ID NO: 28249 - DNA, 201 bp, Homo sapiens
tttttcctcattgttggggatgatgagaagaaatgatttgggaaaattaagtaacaacgacctagaaaagtgagaacaatctcatttaccatcatgtatcsagtagtggataattcattttgatggcttctatttttggccaaatgagaattaagccagtgcctgagactgtcagaagttgacctttgcactggcattaaa

SEQ ID NO: 28250 - DNA, 201 bp, Homo sapiens
tggagacttcacactttccgttagaagaaatggagctgtcacccacatcaagattcagaacactggtgattactatgacctgtatggaggggagaaatttkccactttggctgagttggtccagtattacatggaacatcacgggcaattaaaagagaagaatggagatgtcattgagcttaaatatcctctgaactgtgc

SEQ ID NO: 28251 - DNA, 201 bp, Homo sapiens
cattgttggggatgatgagaagaaatgatttgggaaaattaagtaacaacgacctagaaaagtgagaacaatctcatttaccatcatgtatccagtagtgkataattcattttgatggcttctatttttggccaaatgagaattaagccagtgcctgagactgtcagaagttgacctttgcactggcattaaagagtcata

SEQ ID NO: 28252 - DNA, 201 bp, Homo sapiens
atcctacctctgaaaggtggtttcatggacatctctctgggaaagaagcagagaaattattaactgaaaaaggaaaacatggtagttttcttgtacgagabagccagagccaccctggagattttgttctttctgtgcgcactggtgatgacaaaggggagagcaatgacggcaagtctaaagtgacccatgttatgattc

SEQ ID NO: 28253 - DNA, 201 bp, Homo sapiens
acgttcattgtgattgatattcttattgacatcatcagagagaaaggtgttgactgcgatattgacgttcccaaaaccatccagatggtgcggtctcagargtcagggatggtccagacagaagcacagtaccgatttatctatatggcggtccagcattatattgaaacactacagcgcaggattgaagaagagcagaaa

SEQ ID NO: 28254 - DNA, 201 bp, Homo sapiens
gttcattgtgattgatattcttattgacatcatcagagagaaaggtgttgactgcgatattgacgttcccaaaaccatccagatggtgcggtctcagaggwcagggatggtccagacagaagcacagtaccgatttatctatatggcggtccagcattatattgaaacactacagcgcaggattgaagaagagcagaaaag

SEQ ID NO: 28255 - DNA, 201 bp, Homo sapiens
tgtgattgatattcttattgacatcatcagagagaaaggtgttgactgcgatattgacgttcccaaaaccatccagatggtgcggtctcagaggtcagggrtggtccagacagaagcacagtaccgatttatctatatggcggtccagcattatattgaaacactacagcgcaggattgaagaagagcagaaaagcaagag

SEQ ID NO: 28256 - DNA, 201 bp, Homo sapiens
cccacatcaagattcagaacactggtgattactatgacctgtatggaggggagaaatttgccactttggctgagttggtccagtattacatggaacatcaygggcaattaaaagagaagaatggagatgtcattgagcttaaatatcctctgaactgtgcagatcctacctctgaaaggtggtttcatggacatctctctg

SEQ ID NO: 28257 - DNA, 201 bp, Homo sapiens
ttggcaaggcctagtaaaagtaaccctggagacttcacactttccgttagaagaaatggagctgtcacccacatcaagattcagaacactggtgattactrtgacctgtatggaggggagaaatttgccactttggctgagttggtccagtattacatggaacatcacgggcaattaaaagagaagaatggagatgtcatt

SEQ ID NO: 28258 - DNA, 201 bp, Homo sapiens
gcaagaaagtttatgtgaagacagaatttggatttggaaggcttgcaatgtggttgactaccttttgataagcaaaatttgaaaccatttaaagaccactktattttaactcaacaatacctgcttcccaattactcatttcctcagataagaagaaatcatctctacaatgtagacaacattatattttatagaatttgt

SEQ ID NO: 28259 - DNA, 201 bp, Homo sapiens
tcctcgctccattctgtccacatttgtgtgagcacatctggacactcctgggaaagcctgactcaattatgaatgcttcatggcctgtggcaggtcctgtkaatgaagttttaatacactcctcacagtatcttatggaagtaacacatgaccttagactacgactcaagaactatatgatgccagctaaagggaagaaga

SEQ ID NO: 28260 - DNA, 201 bp, Homo sapiens
tgcagaagccctcacattgcaccatctatgtggcaaagaactatccaccttggcaacataccaccctgtctgttctacgtaaacactttgaggccaataayggaaaactgcctgacaacaaagtcattgctagtgaactaggcagtatgccagaactgaagaaatacatgaagaaagtcatgccatttgttgccatgatta

SEQ ID NO: 28261 - DNA, 201 bp, Homo sapiens
gctactaggatgctcttggccaattactcggagctgcagttcttcatctataaaatggaactaatactggtaccttgtaggcttattgtgagacgtttagrtgaactgatctaggaaaatcataacacagtgcctggcaagtagtaagtctttagtgaatgttaccattgaagaagaagaagatgatggataccaaggtat

SEQ ID NO: 28262 - DNA, 201 bp, Homo sapiens
cctggaaacattctgtgaggagaccaggaggaattttgaagccaccttaggttggctacaagaacatgcttgctcaagaacttatggtctaggcactcacytgccttgggatgagcagtggctgattgaatcactttctgactccactatttacatggcattttacacagttgcacacctattgcaggggggtaacttgca

SEQ ID NO: 28263 - DNA, 201 bp, Homo sapiens
cctcgctccattctgtccacatttgtgtgagcacatctggacactcctgggaaagcctgactcaattatgaatgcttcatggcctgtggcaggtcctgttratgaagttttaatacactcctcacagtatcttatggaagtaacacatgaccttagactacgactcaagaactatatgatgccagctaaagggaagaagac

SEQ ID NO: 28264 - DNA, 201 bp, Homo sapiens
gggaaaccacttaatgtttttagaatagaacctggtgtgtccgtttctctggtgaatccccagccatccaatggccacttctcaaccaaaattgaaatcargcaaggagataactgtgattccataatcaggcgtttaatgaaaatgaatcgaggaattaaagacctttccaaagtgaaactgatgagatttgatgatcca

SEQ ID NO: 28265 - DNA, 201 bp, Homo sapiens
tctttttgctactaggatgctcttggccaattactcggagctgcagttcttcatctataaaatggaactaatactggtaccttgtaggcttattgtgagaygtttaggtgaactgatctaggaaaatcataacacagtgcctggcaagtagtaagtctttagtgaatgttaccattgaagaagaagaagatgatggatacc

SEQ ID NO: 28266 - DNA, 201 bp, Homo sapiens
gttgccatgattaaggaaaatctggagaagatggggcctcgtattctggatttgcaattagaatttgatgaaaaggctgtgcttatggagaatatagtctrtctgactaattcgcttgagctagaacacatagaagtcaagtttgcctccgaagcagaagataaaatcagggaagactgctgtcctgggaaaccacttaat

SEQ ID NO: 28267 - DNA, 201 bp, Homo sapiens
gtaaacactttgaggccaataacggaaaactgcctgacaacaaagtcattgctagtgaactaggcagtatgccagaactgaagaaatacatgaagaaagtyatgccatttgttgccatgattaaggaaaatctggagaagatggggcctcgtattctggatttgcaattagaatttgatgaaaaggctgtgcttatggaga

SEQ ID NO: 28268 - DNA, 201 bp, Homo sapiens
gcttcttttatgaggtgtactttatactttgatgaaggctaaggtgtacctaacagctttttatagtatattcatttatggagttagctgtattttttttwaaaaaagaaaagtagtaaattagcagcttttttttttaaatgaagagaacttcatgatgatttaaaagaactaatgagaatattttgacttgacttcaat

SEQ ID NO: 28269 - DNA, 201 bp, Homo sapiens
actctgattgtgtctactgattggctatcagaaccttaggctggacctaaatagattgatttcatttctaaccatccaattctgcatgtattcataattckatcaagtcatctttgattcctggacctaataaattttttttccctttctttgggtgtccaagagaaatggtttttgccaaactctttttaaaaaacaaat

SEQ ID NO: 28270 - DNA, 201 bp, Homo sapiens
gaagccaatcataggatgttagaattagaaatcatcaagtgcaaataatcacttatctactagggacaggcactatagcatagtggggtaagagcgcatgytctgaaatcagactagctaggttagatttccagttcttctttttgctactaggatgctcttggccaattactcggagctgcagttcttcatctataaaat

SEQ ID NO: 28271 - DNA, 201 bp, Homo sapiens
atttcccgccactggctattcaggatttaaaaagaatgggtttgaaggtagactggcgtcgttccttcatcaccactgatgttaatccttactatgattcmtttgtcagatggcaatttttaacattaagagaaagaaacaaaattaaatttgggaagcggtatacaatttactctccgaaagatggacagccttgcatgg

SEQ ID NO: 28272 - DNA, 201 bp, Homo sapiens
aagatataataattaaggataaagctaaaggaaaaaagagtaaagctgctgctaaagctggatcttctaaataccagtggggcattatgaaatcccttggyctgtctgatgaagagatagtaaaattttctgaagcagaacattggcttgattatttcccgccactggctattcaggatttaaaaagaatgggtttgaagg

SEQ ID NO: 28273 - DNA, 201 bp, Homo sapiens
atgaagttttaatacactcctcacagtatcttatggaagtaacacatgaccttagactacgactcaagaactatatgatgccagctaaagggaagaagacygacaaacaacccctgcagaagccctcacattgcaccatctatgtggcaaagaactatccaccttggcaacataccaccctgtctgttctacgtaaacact

SEQ ID NO: 28274 - DNA, 200 bp, Homo sapiens
aagatataataattaaggataaagctaaaggaaaaaagagtaaagctgctgctaaagctggatcttctaaataccagtggggcattatgaaatcccttggyctgtctgatgaagagatagtaaaattttctgaagcagaacattggcttgattatttcccgccactggctattcaggatttaaaaagaatgggtttgaag

SEQ ID NO: 28275 - DNA, 200 bp, Homo sapiens; identical to SEQ ID NO: 28274

SEQ ID NO: 28276 - DNA, 201 bp, Homo sapiens; identical to SEQ ID NO: 28259

SEQ ID NO: 28277 - DNA, 201 bp, Homo sapiens; identical to SEQ ID NO: 28260

SEQ ID NO: 28278 - DNA, 201 bp, Homo sapiens; identical to SEQ ID NO: 28261

SEQ ID NO: 28279 - DNA, 201 bp, Homo sapiens; identical to SEQ ID NO: 28262

SEQ ID NO: 28280 - DNA, 201 bp, Homo sapiens; identical to SEQ ID NO: 28263

SEQ ID NO: 28281 - DNA, 201 bp, Homo sapiens; identical to SEQ ID NO: 28264

SEQ ID NO: 28282 - DNA, 201 bp, Homo sapiens; identical to SEQ ID NO: 28265

SEQ ID NO: 28283 - DNA, 201 bp, Homo sapiens; identical to SEQ ID NO: 28266

SEQ ID NO: 28284 - DNA, 201 bp, Homo sapiens; identical to SEQ ID NO: 28267

SEQ ID NO: 28285 - DNA, 201 bp, Homo sapiens; identical to SEQ ID NO: 28268

SEQ ID NO: 28286 - DNA, 201 bp, Homo sapiens; identical to SEQ ID NO: 28269

SEQ ID NO: 28287 - DNA, 201 bp, Homo sapiens; identical to SEQ ID NO: 28270

SEQ ID NO: 28288 - DNA, 201 bp, Homo sapiens; identical to SEQ ID NO: 28271

SEQ ID NO: 28289 - DNA, 201 bp, Homo sapiens; identical to SEQ ID NO: 28272

SEQ ID NO: 28290 - DNA, 201 bp, Homo sapiens; identical to SEQ ID NO: 28273

SEQ ID NO: 28291 - DNA, 201 bp, Homo sapiens; identical to SEQ ID NO: 28259

SEQ ID NO: 28292 - DNA, 201 bp, Homo sapiens; identical to SEQ ID NO: 28260

SEQ ID NO: 28293 - DNA, 201 bp, Homo sapiens; identical to SEQ ID NO: 28261

SEQ ID NO: 28294 - DNA, 201 bp, Homo sapiens; identical to SEQ ID NO: 28263

SEQ ID NO: 28295 - DNA, 201 bp, Homo sapiens; identical to SEQ ID NO: 28264

SEQ ID NO: 28296 - DNA, 201 bp, Homo sapiens; identical to SEQ ID NO: 28265

SEQ ID NO: 28297 - DNA, 201 bp, Homo sapiens; identical to SEQ ID NO: 28266

SEQ ID NO: 28298 - DNA, 201 bp, Homo sapiens; identical to SEQ ID NO: 28267

SEQ ID NO: 28299 - DNA, 201 bp, Homo sapiens; identical to SEQ ID NO: 28268

SEQ ID NO: 28300 - DNA, 201 bp, Homo sapiens; identical to SEQ ID NO: 28269

SEQ ID NO: 28301 - DNA, 201 bp, Homo sapiens; identical to SEQ ID NO: 28270

SEQ ID NO: 28302 - DNA, 201 bp, Homo sapiens; identical to SEQ ID NO: 28273

SEQ ID NO: 28303 - DNA, 201 bp, Homo sapiens; identical to SEQ ID NO: 28259

SEQ ID NO: 28304 - DNA, 201 bp, Homo sapiens; identical to SEQ ID NO: 28260

SEQ ID NO: 28305 - DNA, 201 bp, Homo sapiens; identical to SEQ ID NO: 28261

SEQ ID NO: 28306 - DNA, 201 bp, Homo sapiens; identical to SEQ ID NO: 28263

SEQ ID NO: 28307 - DNA, 201 bp, Homo sapiens; identical to SEQ ID NO: 28264

SEQ ID NO: 28308 - DNA, 201 bp, Homo sapiens; identical to SEQ ID NO: 28265

SEQ ID NO: 28309 - DNA, 201 bp, Homo sapiens; identical to SEQ ID NO: 28266

SEQ ID NO: 28310 - DNA, 201 bp, Homo sapiens; identical to SEQ ID NO: 28267

SEQ ID NO: 28311 - DNA, 201 bp, Homo sapiens; identical to SEQ ID NO: 28268

SEQ ID NO: 28312 - DNA, 201 bp, Homo sapiens; identical to SEQ ID NO: 28269

SEQ ID NO: 28313 - DNA, 201 bp, Homo sapiens; identical to SEQ ID NO: 28270

SEQ ID NO: 28314 - DNA, 201 bp, Homo sapiens
atttcccgccactggctattcaggatttaaaaagaatgggtttgaaggtagactggcgtcgttccttcatcaccactgatgttaatccttactatgattcmtttgtcagatggcaatttttaacattaatggcctgaaaggtaaaaatattttcttggtggctgctactctcagacctgagaccatgtttgggcagacaaa

SEQ ID NO: 28315 - DNA, 201 bp, Homo sapiens; identical to SEQ ID NO: 28272

SEQ ID NO: 28316 - DNA, 201 bp, Homo sapiens; identical to SEQ ID NO: 28273

SEQ ID NO: 28317 - DNA, 201 bp, Homo sapiens
aaaggttactttccgcaccagaatcgatcactgcaacatcaacagtcagggagtcatctgtctggacatccttaaagacaactggagtcccgctttgactrtttcaaaggttttgctgtctatttgttcccttttaatggactgcaaccctgtggatcctctggttggaagcatagccactcagtatttgaccaacagagc

SEQ ID NO: 28318 - DNA, 201 bp, Homo sapiens
ccccctcccctcccccaacagctgcgtccatttccttaaggaagggtttttttttctctctccctccctcacaccgtagcggcgcgcgagcgggccgggckggtggccggccgagttttccaagagttagcttcaccaagatgtccagtgataggcaaaggtccgatgatgagagccccagcaccagcagtggcagttcag

SEQ ID NO: 28319 - DNA, 201 bp, Homo sapiens
accctggtgctggtgaacgctgctgtgacttactcaaagccttgattggccacattttggtactacgccaagtttgagctggttcctcccacccctgctgwgatccctagagctattcagagtctgaaaaaaatagtcaatagtgctcagactggtagcttcaaacaactcacagttaaggaagctgtgctgaatggtttg

SEQ ID NO: 28320 - DNA, 188 bp, Homo sapiens
ggcattcagggcgacagactttccatcccagaaccattggcccaatttttccgtaaccttgtggaaaagaccctggtgctggtgaacrctgctgtgacttactcaaagccttgattggccacattttggtactacgccaagtttgagctggttcctcccacccctgctgagatccctagagctattca

SEQ ID NO: 28321 - DNA, 112 bp, Homo sapiens
ggcattcagggygacagactttccatcccagaaccattggcccaatttttccgtaaccttgtggaaaagaccctggtgctggtgaacgctgctgtgacttactcaaagcctt

SEQ ID NO: 28322 - DNA, 201 bp, Homo sapiens
caggaaggggagcggcagctgcgggagcagattgcccttctggtgaaggacatgagcccatgataacattccagccactggctgctaacaagtcaccaaargacactgcagaaaccctgagcagaaagaggccttctggatggccaaacccaagattattaaaagatgtctctgcaaaccaacaggctaccaacttgtatc

SEQ ID NO: 28323 - DNA, 161 bp, Homo sapiens
ctgccctccaccacctaccgcggttcctccagctcccagggccgcggccggagcagctctsagcgctcggttcgccccacggtgcccttaaaaggcgctggcgcgaaccaacgagtccctgaggagagtagggggacagctccggctcgcagaatcccccc

SEQ ID NO: 28324 - DNA, 132 bp, Homo sapiens
ctgccctccaccacctaccgcggttcctccarctcccagggccgcggccggagcagctctgagcgctcggttcgccccacggtgcccttaaaaggcgctggcgcgaaccaacgagtccctgaggagagtagg

SEQ ID NO: 28325 - DNA, 201 bp, Homo sapiens
cggttcgccccacggtgcccttaaaaggcgctggcgcgaaccaacgagtccctgaggagagtagggggacagctccggctcgcagaatccccccaagccayccatggagggcgcagctccgtgtcgtgtctctctcaaagtgtctctcggacagcgctgttgggaacgagcctggcgctttgatttagggatgggggtggt

SEQ ID NO: 28326 - DNA, 201 bp, Homo sapiens
aacaagtcaccaaaagacactgcagaaaccctgagcagaaagaggccttctggatggccaaacccaagattattaaaagatgtctctgcaaaccaacaggytaccaacttgtatccaggcctgggaatggattaggtttcagcagagctgaaagctggtggcagagtcctggagctggctctataaggcagccttgagttg

SEQ ID NO: 28327 - DNA, 201 bp, Homo sapiens
cacttcctttaccgtctgtccagatgtccctagaactccagtgggcaaatttcttggtgattctgcaaacctaagcattttgtctggaggaaccccaaaaygttgcctcgatctttcgaatcttagcagtggggagataactgccactcagcttaccacttctgcagaccttgatgaaactggtcacctggattcttcagg

SEQ ID NO: 28328 - DNA, 201 bp, Homo sapiens; identical to SEQ ID NO: 28322

SEQ ID NO: 28329 - DNA, 105 bp, Homo sapiens
ggtcracgcctgcggctgttgatattcttgctcagaggccgtaactttggccttctgctcagggaagactctgagtccgacgttggcctacccagtcggaaggca

SEQ ID NO: 28330 - DNA, 201 bp, Homo sapiens; identical to SEQ ID NO: 28326

SEQ ID NO: 28331 - DNA, 201 bp, Homo sapiens
tgagtccgacgttggcctacccagtcggaaggcagagctgcaatctagttaactacctcctttcccctagatttcctttcattctgctcaagtcttcgcckgtgtccgatccctatctactttctctcctcttgtaggcaagcctcagactccaggcttgagctaggttttgtttttctcctggtgagaattcgaagacca

SEQ ID NO: 28332 - DNA, 201 bp, Homo sapiens; identical to SEQ ID NO: 28327

SEQ ID NO: 28333 - DNA, 201 bp, Homo sapiens; identical to SEQ ID NO: 28322

SEQ ID NO: 28334 - DNA, 105 bp, Homo sapiens; identical to SEQ ID NO: 28329

SEQ ID NO: 28335 - DNA, 201 bp, Homo sapiens; identical to SEQ ID NO: 28326

SEQ ID NO: 28336 - DNA, 201 bp, Homo sapiens; identical to SEQ ID NO: 28331

SEQ ID NO: 28337 - DNA, 105 bp, Homo sapiens; identical to SEQ ID NO: 28329

SEQ ID NO: 28338 - DNA, 201 bp, Homo sapiens; identical to SEQ ID NO: 28331

SEQ ID NO: 28339 - DNA, 201 bp, Homo sapiens
gctaagcctgtaatttacctgctggaatagacagagtccagctgcccaaaccgtgtcattaaaagcagatcctgcgcccgccccatccacaggcacagccyggcagagtggttccacctccccatgggcccaaggatgcgcctctctggagttcacgtgctgcacccccagggaggggcctggggaaagctggtccagcag

SEQ ID NO: 28340 - DNA, 201 bp, Homo sapiens
ccacaggcacagcccggcagagtggttccacctccccatgggcccaaggatgcgcctctctggagttcacgtgctgcacccccagggaggggcctggggaragctggtccagcagcaggggtggaggctggggccacactgcgggacagcagcccctccacctggaccagggagggcctccatgtgcaagcgcagaggaag

SEQ ID NO: 28341 - DNA, 201 bp, Homo sapiens
tcccaacagcctttcgtggtcactttcttcagggccagtccgagtcccatccgcacccctcgggcagtgaggccactgaggaggaggcagccgaagaaaascaacgagctgccgcaggccaaccgactcccagggatctttgatgacgtccacggctcccacggccggcaggtctgccgtcggcacgagctctacgtcagc

SEQ ID NO: 28342 - DNA, 201 bp, Homo sapiens
cgcaggccaaccgactcccagggatctttgatgacgtccacggctcccacggccggcaggtctgccgtcggcacgagctctacgtcagcttccaggacctyggctggctggactgggtcatcgctccccaaggctactcggcctattactgtgagggggagtgctccttcccactggactcctgcatgaatgccaccaacc

SEQ ID NO: 28343 - DNA, 201 bp, Homo sapiens
atgtcatcctgcgcaagcaccgcaacatggtggtcaaggcctgcggctgccactgagtccacccgcccggcccagctgcagccacccttctcatctggatygggcccctcagaagcaggaaaccctcaaacccagccagaccccaggccggggcattgccagggaggaccctcacaaccacgtacatgaccctttctcctt

SEQ ID NO: 28344 - DNA, 201 bp, Homo sapiens
agccggactggcgggtacggcggcgacagacggattggccgagagtcccagtccgcagagtagccccggcctcgaggcggtggcgtccgcgtcctctcgtscaggagccaggacaggtgtcgcgcggcgggcgctccagggaccgcgctgaggccgcggtcgccgcccgtcccgccccgccccgccgcccgccgcccgccg

SEQ ID NO: 28345 - DNA, 201 bp, Homo sapiens
gtggctcacacctataaccccagcactttgggaggccaaggcaggcagatcacctgaagtcaggagttcaagaccatcctggccaacacagtgaaaccccrtctgtactaaaaatacaagattacctgggcatggtggtgcatgcctataatcccagctactcaggaggctgaggcagaattgcttgaacctgggaggtgg

SEQ ID NO: 28346 - DNA, 201 bp, Homo sapiens
cgcacccctcgggcagtgaggccactgaggaggaggcagccgaagaaaagcaacgagctgccgcaggccaaccgactcccagggatctttgatgacgtccrcggctcccacggccggcaggtctgccgtcggcacgagctctacgtcagcttccaggacctcggctggctggactgggtcatcgctccccaaggctactcg

SEQ ID NO: 28347 - DNA, 112 bp, Homo sapiens
actcgcgggaaycgcaccaagcgggtggctgcaggagctcgcccatcgcccctgcgctgctcggaccgcggccacagccggactggcgggtacggcggcgacagacggattg

SEQ ID NO: 28348 - DNA, 201 bp, Homo sapiens
agaggcacctggagcccactgttggccaccttgagctcttcaccatccatcacagggtgtggtgtgtgtagtcagggtctggttggctccccattgcctgsccgaggtgcaaggtggggtataaaactggataacccctgaagtattgtatattcatggatctgaagcactgatccactggtcacaggtagacatgtggag

SEQ ID NO: 28349 - DNA, 201 bp, Homo sapiens
ctgagggagctctgggagggcctgacggtggacgacatcaaaaagagcacggggtgtgcctttgctgtgtccccgaacctcaggcccatgcagcaggtggyaccctgacgggacctggatctgggcggggtggtgcgctcctcagggcggatgccaccgggttccccaggggaatacatgtccccagctctgggaggggtt

SEQ ID NO: 28350 - DNA, 201 bp, Homo sapiens
gcggtgcgtggaccgcatcatcaccgagaaggccgtgtttgacgtgcacaggaagaaagagctgacgctgagggagctctgggagggcctgacggtggacracatcaaaaagagcacggggtgtgcctttgctgtgtccccgaacctcaggcccatgcagcaggtggcaccctgacgggacctggatctgggcggggtggt

SEQ ID NO: 28351 - DNA, 201 bp, Homo sapiens
gggggcttccccccagaagacatccacgttcctaacatttatgtaggtcgcgtgataaaggggcagaaatacgagaaacgaattgagcgcttaacgatcckgaaagaggaagatggagacgctggaaaggaagaggacgccaggacgcgcatcatcagacgcgcagctctggaatttgaggacggcatgtacgccaatctg

SEQ ID NO: 28352 - DNA, 201 bp, Homo sapiens
ccccaagatcatggagaaatgcaccatgccgctgaccgggaagcggtgcgtggaccgcatcatcaccgagaaggccgtgtttgacgtgcacaggaagaaaragctgacgctgagggagctctgggagggcctgacggtggacgacatcaaaaagagcacggggtgtgcctttgctgtgtccccgaacctcaggcccatgca

SEQ ID NO: 28353 - DNA, 201 bp, Homo sapiens
ccgcaatttcaacgtgcccatgtgcaaagctgcagacgtcacggcggtggaggtgggggcttccccccagaagacatccacgttcctaacatttatgtagrtcgcgtgataaaggggcagaaatacgagaaacgaattgagcgcttaacgatccggaaagaggaagatggagacgctggaaaggaagaggacgccaggacg

SEQ ID NO: 28354 - DNA, 166 bp, Homo sapiens
cagggcgcgggcgcccgccctgctctgtgacgcgcggcccgaggcgcacgcagggctcacaccacytgtcctggcctccgacccgggccgactatggcggcgctgcggctcctggcgtcagtgctcgggcgcggggtccccgccggcggctcagggctcgcgctgt

SEQ ID NO: 28355 - DNA, 148 bp, Homo sapiens
cagggcgcgggcgcccgccctgctctgtgacgcgcggcccgaggcgcwcgcagggctcacaccacctgtcctggcctccgacccgggccgactatggcggcgctgcggctcctggcgtcagtgctcgggcgcggggtccccgccggcg

SEQ ID NO: 28356 - DNA, 201 bp, Homo sapiens
cgcaggccaaccgactcccagggatctttgatgacgtccacggctcccacggccggcaggtctgccgtcggcacgagctctacgtcagcttccaggacctyggctggctggactgggtcatcgccccccaaggctactcagcctattactgtgagggggagtgctccttcccgctggactcctgcatgaacgccaccaacc

SEQ ID NO: 28357 - DNA, 120 bp, Homo sapiens
tactgcagccacccttctcatctggatcgggccctgcagaggcagaaaacccttaaatgctgtcacagctcaagcaggagtgtcaggggccctcactctckgtgcctacttcctgtcagg

SEQ ID NO: 28358 - DNA, 201 bp, Homo sapiens
gggccccacgctcccaacagcctttcgtggtcactttcttcagggccagtccgagtcccatccgcacccctcgggcagtgaggccactgaggaggaggcarccgaagaaaagcaacgagctgccgcaggccaaccgactcccagggatctttgatgacgtccacggctcccacggccggcaggtctgccgtcggcacgagc

SEQ ID NO: 28359 - DNA, 201 bp, Homo sapiens
gcggccccggcctgcgacccccgcccggctgtccccagcgacgtctgggcgcgcgcgagcgccgggacgtgcagcgcgagatcctggcggtgctcgggctrcccgggcggccccggccccgcgcgccacccgccgcctcccggctgcccgcgtccgcgccgctcttcatgctggacctgtaccacgccatggctggcgacg

SEQ ID NO: 28360 - DNA, 201 bp, Homo sapiens
acggctcccacggccggcaggtctgccgtcggcacgagctctacgtcagcttccaggaccttggctggctggactgggtcatcgccccccaaggctactcrgcctattactgtgagggggagtgctccttcccgctggactcctgcatgaacgccaccaaccacgccatcctgcagtccctggtgcacctgatgaagccaa

SEQ ID NO: 28361 - DNA, 201 bp, Homo sapiens
cgtcggggcgtccccgggcccaggggcggcggcggagctgatgtgcgcccgctgagcgcccccggcccgccatggccgcgcgccccggaccgctctggctyctgggcctgacgttgtgcgcgctgggcgggggcggccccggcctgcgacccccgcccggctgtccccagcgacgtctgggcgcgcgcgagcgccgggacg

SEQ ID NO: 28362 - DNA, 201 bp, Homo sapiens
ctccccgttcgccgtcggggcgtccccgggcccaggggcggcggcggagctgatgtgcgcccgctgagcgcccccggcccgccatggccgcgcgccccggmccgctctggcttctgggcctgacgttgtgcgcgctgggcgggggcggccccggcctgcgacccccgcccggctgtccccagcgacgtctgggcgcgcgcg

SEQ ID NO: 28363 - DNA, 201 bp, Homo sapiens
gctgagcgccacctctgtgctctactatgacagcagcaacaacgtcatcctgcgcaagcaccgcaacatggtggtcaaggcctgcggctgccactgagtcmgcccgcccagccctactgcagccacccttctcatctggatcgggccctgcagaggcagaaaacccttaaatgctgtcacagctcaagcaggagtgtcagg

SEQ ID NO: 28364 - DNA, 201 bp, Homo sapiens
cacctctgtgctctactatgacagcagcaacaacgtcatcctgcgcaagcaccgcaacatggtggtcaaggcctgcggctgccactgagtcagcccgcccrgccctactgcagccacccttctcatctggatcgggccctgcagaggcagaaaacccttaaatgctgtcacagctcaagcaggagtgtcaggggccctcac

SEQ ID NO: 28365 - DNA, 201 bp, Homo sapiens
ctgagcgccacctctgtgctctactatgacagcagcaacaacgtcatcctgcgcaagcaccgcaacatggtggtcaaggcctgcggctgccactgagtcarcccgcccagccctactgcagccacccttctcatctggatcgggccctgcagaggcagaaaacccttaaatgctgtcacagctcaagcaggagtgtcaggg

SEQ ID NO: 28366 - DNA, 201 bp, Homo sapiens
tccaggaccttggctggctggactgggtcatcgccccccaaggctactcagcctattactgtgagggggagtgctccttcccgctggactcctgcatgaaygccaccaaccacgccatcctgcagtccctggtgcacctgatgaagccaaacgcagtccccaaggcgtgctgtgcacccaccaagctgagcgccacctctg

SEQ ID NO: 28367 - DNA, 201 bp, Homo sapiens
ctgtgctctactatgacagcagcaacaacgtcatcctgcgcaagcaccgcaacatggtggtcaaggcctgcggctgccactgagtcagcccgcccagcccwactgcagccacccttctcatctggatcgggccctgcagaggcagaaaacccttaaatgctgtcacagctcaagcaggagtgtcaggggccctcactctcg

SEQ ID NO: 28368 - DNA, 201 bp, Homo sapiens
acgagctctacgtcagcttccaggaccttggctggctggactgggtcatcgccccccaaggctactcagcctattactgtgagggggagtgctccttcccrctggactcctgcatgaacgccaccaaccacgccatcctgcagtccctggtgcacctgatgaagccaaacgcagtccccaaggcgtgctgtgcacccacca

SEQ ID NO: 28369 - DNA, 201 bp, Homo sapiens
cgcacccctcgggcagtgaggccactgaggaggaggcagccgaagaaaagcaacgagctgccgcaggccaaccgactcccagggatctttgatgacgtccrcggctcccacggccggcaggtctgccgtcggcacgagctctacgtcagcttccaggaccttggctggctggactgggtcatcgccccccaaggctactca

SEQ ID NO: 28370 - DNA, 201 bp, Homo sapiens
ggacgccaggacgcgcatcatcagacgcgcagctctggaatttgaggacggcatgtacgccaatctgggcataggcatccccctgctggccagcaacttcrtcagtcccagcatgactgtccatcttcacagtgagaacgggatcctgggcctgggcccgtttcccacggaagatgaggtggatgccgacctcatcaatgc

SEQ ID NO: 28371 - DNA, 201 bp, Homo sapiens
cgactccttcgccatgatccgagggggacacatccaactaaccatgcttggagccatgcaggtttccaaatacggcgacctggcgaactggatgatccctrgcaagaaggtgaaaggcatgggcggtgccatggacttggtgtccagtcagaagaccagagtggtggtcaccatgcagcactgcacaaaggacaacacccc

SEQ ID NO: 28372 - DNA, 201 bp, Homo sapiens; identical to SEQ ID NO: 28352

SEQ ID NO: 28373 - DNA, 201 bp, Homo sapiens
tacgtgggcgagaacaccctgtgcgagagccagtacctggcaggagagctggagctggagctcacgccccagggcaccctggccgagcgcatccgcgcggrgggcgccggggtgcccgccttctacacccccacgggctacgggaccctggtccaggaagggggcgcccccatccgctacaccccggacggccacctggcg

SEQ ID NO: 28374 - DNA, 180 bp, Homo sapiens
ctgacgggacctggatctgggcggggtggtgcgctcctcagggcggatgccaccgggttccccaggggaatacatgtccccagctctgggaggggtttgcyactggcctcctactttcctccctaggtggacagtgctcctctagagagctgcgactttaattaaaaacaacaggaaaac

SEQ ID NO: 28375 - DNA, 201 bp, Homo sapiens
ggggtgtgcctttgctgtgtccccgaacctcaggcccatgcagcaggtggcaccctgacgggacctggatctgggcggggtggtgcgctcctcagggcggrtgccaccgggttccccaggggaatacatgtccccagctctgggaggggtttgctactggcctcctactttcctccctaggtggacagtgctcctctagag

SEQ ID NO: 28376 - DNA, 201 bp, Homo sapiens
gtccgcgtcgctagctagtcgttctgaagcggcggccagagaagagtcaagggcacgagcatcgggtagccatgcctttcttggacatccagaaaaggttyggccttaacatagatcgatggttgacaatccagagtggtgaacagccctacaagatggctggtcgatgccatgcttttgaaaaagaatggatagaatgtg

SEQ ID NO: 28377 - DNA, 201 bp, Homo sapiens
ggaagcagcgggataagctgataaaggaaggaaagtacacccctccacctcaccacattggcaagggggagcctcggccctgaacagagcagctgctgatrtctggaggctgattttcctgttctctgttctccactggaaaggttgtttacgacaaacctccttgtcaaagtgtgtaaaaataaaggattgctccatcct

SEQ ID NO: 28378 - DNA, 201 bp, Homo sapiens
atttcgtagagtgtttgcttcggcagaaaacgatgagacgtgcaggtaccatcaggaagcagcgggataagctgataaaggaaggaaagtacacccctccmcctcaccacattggcaagggggagcctcggccctgaacagagcagctgctgatgtctggaggctgattttcctgttctctgttctccactggaaaggttg

SEQ ID NO: 28379 - DNA, 201 bp, Homo sapiens; identical to SEQ ID NO: 28376

SEQ ID NO: 28380 - DNA, 201 bp, Homo sapiens
ggaagcagcgggataagctgataaaggaaggaaagtacacccctccacctcaccacattggcaagggggagcctcggccctgaacagagcagctgctgatrtctggaggctgattttcctgttctctgttctccactggaaaggttgtttacgacaaacctccttgtcaaagctggagtgcgacggcatgatctcagctta

SEQ ID NO: 28381 - DNA, 185 bp, Homo sapiens
acagagcagctgctgatgtctggaggctgattttcctgttctctgttctccactggaaaggttgtttacgacaaacctccttgtcaaagctggagtgcgayggcatgatctcagcttaccgcaacctccgcctcccgggttgaagcgattctcctgcctcagctgctgagtagctgggattacag

SEQ ID NO: 28382 - DNA, 201 bp, Homo sapiens; identical to SEQ ID NO: 28378

SEQ ID NO: 28383 - DNA, 201 bp, Homo sapiens
aggttagacagtgctgaggtctcccgtcactgggcatccagctgggtgctacggccgtggctcctgccttctgcagccctgtcagggcccaaggccttccycatcagcacttgctccagcctactcactggagttgtgttctgggtgggtgtgtagaatactcgcactcctacttggggcatcagggagctctctagcaat

SEQ ID NO: 28384 - DNA, 201 bp, Homo sapiens
gggaaaaagccaaaaggttgagagccacaccatctagaagcttcctgcctgtggtgcggcacaggtggaaacaaggagagtcagcaattaccagccagccraggtcctggaagctgacgtagagctcgtgccgacggcagacctgccggccgtgggagccgtggacgtcatctgcagggacagaaggggcaaggtcttttc

SEQ ID NO: 28385 - DNA, 201 bp, Homo sapiens
tctgagggtgagtctgatgagataacatgcctgtgtgtgggcctcaggttagacagtgctgaggtctcccgtcactgggcatccagctgggtgctacggcmgtggctcctgccttctgcagccctgtcagggcccaaggccttccccatcagcacttgctccagcctactcactggagttgtgttctgggtgggtgtgtag

SEQ ID NO: 28386 - DNA, 101 bp, Homo sapiens
ygacagagcaagactccctttccaaaaacaagcaaatgaaaaaatagagttttctctatcacacaaatgggaaggtttgtattgaatgttatatttatcct

SEQ ID NO: 28387 - DNA, 201 bp, Homo sapiens
gttgaacctcctaagaggaaaacataaggctgtgcaataccaggaactgggattctaggttgccccagacaccaaggcatcaaaagccaggggatccagaraaaacacagacagccaagagagaaactgcgggaaaaagccaaaaggttgagagccacaccatctagaagcttcctgcctgtggtgcggcacaggtggaaa

SEQ ID NO: 28388 - DNA, 201 bp, Homo sapiens
caggtggaaacaaggagagtcagcaattaccagccagccaaggtcctggaagctgacgtagagctcgtgccgacggcagacctgccggccgtgggagccgyggacgtcatctgcagggacagaaggggcaaggtcttttctggggttcctactgtgtgcagctactatggggtaccagggtgggggatgccctgatgagca

SEQ ID NO: 28389 - DNA, 177 bp, Homo sapiens
agctgacgtagagctcgtgccgacggcagacctgccggccgtgggagccgtggacgtcatctgcagggacagaaggggcaaggtcttttctggggttcctrctgtgtgcagctactatggggtaccagggtgggggatgccctgatgagcacatttgtcaaataaatgaatgacagg

SEQ ID NO: 28390 - DNA, 201 bp, Homo sapiens
ctgccttctgcagccctgtcagggcccaaggccttccccatcagcacttgctccagcctactcactggagttgtgttctgggtgggtgtgtagaatactcrcactcctacttggggcatcagggagctctctagcaatttcttctgcacctagggagagcccactgctaaaaaaggcctagtcaaatcctcaggtgtacat

SEQ ID NO: 28391 - DNA, 201 bp, Homo sapiens
cacagacagccaagagagaaactgcgggaaaaagccaaaaggttgagagccacaccatctagaagcttcctgcctgtggtgcggcacaggtggaaacaagragagtcagcaattaccagccagccaaggtcctggaagctgacgtagagctcgtgccgacggcagacctgccggccgtgggagccgtggacgtcatctgca

SEQ ID NO: 28392 - DNA, 201 bp, Homo sapiens
ccctcatggaggcctcaaaagggcaggaccagcaccctcttctacggaggaaggaacgggcacagcagaaacaaggagagtcagcaattaccagccagccraggtcctggaagctgacgtagagctcgtgccgacggcagacctgccggccgtgggagccgtggacgtcatctgcagggacagaaggggcaaggtcttttc

SEQ ID NO: 28393 - DNA, 201 bp, Homo sapiens
acagcagaaacaaggagagtcagcaattaccagccagccaaggtcctggaagctgacgtagagctcgtgccgacggcagacctgccggccgtgggagccgyggacgtcatctgcagggacagaaggggcaaggtcttttctggggttcctactgtgtgcagctactatggggtaccagggtgggggatgccctgatgagca

SEQ ID NO: 28394 - DNA, 184 bp, Homo sapiens
agctgacgtagagctcgtgccgacggcagacctgccggccgtgggagccgtggacgtcatctgcagggacagaaggggcaaggtcttttctggggttcctrctgtgtgcagctactatggggtaccagggtgggggatgccctgatgagcacatttgtcaaataaatgaatgacaggaaaccat

SEQ ID NO: 28395 - DNA, 201 bp, Homo sapiens
actaagtgtcccatggcacatttggccctcatggaggcctcaaaagggcaggaccagcaccctcttctacggaggaaggaacgggcacagcagaaacaagragagtcagcaattaccagccagccaaggtcctggaagctgacgtagagctcgtgccgacggcagacctgccggccgtgggagccgtggacgtcatctgca

SEQ ID NO: 28396 - DNA, 201 bp, Homo sapiens
ggacccagcctgagatggtcccatctgcagggccccgcaccagttggagcagatgcctccccaccaccaattgccaaaggtccaataaaatgcctcaaccmcggagtctgcgtgtgtcagtgatgcctagccccgccttccccagcagaccaatgtagggatggaaaagggagaaaaacagtaaacttgtgaccctgaggt

SEQ ID NO: 28397 - DNA, 201 bp, Homo sapiens
ccgcattggggactatgtccagcaacatggtggggtatccctggtggaacagctgctccaggatcctaaactatcccaaaacaagcaggccttggagggcytgggagacctgaagttgctctttgagtacctgaccctatttggcattgatgacaaaatctcctttgacctgagccttgctcgagggctggattactacac

SEQ ID NO: 28398 - DNA, 201 bp, Homo sapiens
gccacggtgcagaagtcattgatacacctgtatttgaactaaaggaaacactgatgggaaagtatggggaagactccaagcttatctatgacctgaaggaycagggcggggagctcctgtcccttcgctatgacctcactgttccttttgctcggtatttggcaatgaataaactgaccaacattaaacgctaccacatag

SEQ ID NO: 28399 - DNA, 201 bp, Homo sapiens
gcctgatgatgaccttcagcggcctgaaccgcggcttcgcctatgcccgctacagctcgaggcgcggcgcgcaggccgccatcgccacgctgcacaaccayccgctgcggccgtcctgcccgctgctcgtgtgccgcagcaccgagaagtgtgagctgagcgttgacggcctgccgccgaatctgacccgcagcgcgctgc

SEQ ID NO: 28400 - DNA, 201 bp, Homo sapiens
ctagtgggcatgttcgaccccaaagggcgcaaggtgccatgtgtggggctcagcattggggtggagcggattttctccatcgtggaacagagactagaggytttggaggagaagatacggaccacggagacacaggtgcttgtggcatctgcacagaagaagctgctagaggaaagactaaagcttgtctcagaactgtgg

SEQ ID NO: 28401 - DNA, 201 bp, Homo sapiens
caaaaacggccaggtacaacacctttttcatacaaggcccaggaggcttagtccagtctgtgctcctgggctacaaggacccagcctgagatggtcccatytgcagggccccgcaccagttggagcagatgcctccccaccaccaattgccaaaggtccaataaaatgcctcaaccacggagtctgcgtgtgtcagtgatg

SEQ ID NO: 28402 - DNA, 201 bp, Homo sapiens
agcagaccaatgtagggatggaaaagggagaaaaacagtaaacttgtgaccctgaggttcttgtctccagcgtccaccctgcggcttgggagctcctcctsgggaggcagcccccgtacatacgcacccgcgactttgcagctttcacctgaaggtctgagcgaagcccgggcggcgcacgtgcagtggatacctccaccc

SEQ ID NO: 28403 - DNA, 201 bp, Homo sapiens
gcggattttctccatcgtggaacagagactagaggctttggaggagaagatacggaccacggagacacaggtgcttgtggcatctgcacagaagaagctgstagaggaaagactaaagcttgtctcagaactgtgggatgctgggatcaaggctgagctgctgtacaagaagaacccaaagctactgaaccagttacagta

SEQ ID NO: 28404 - DNA, 201 bp, Homo sapiens
tgacccgtggccgataccgggaattctaccagtgtgattttgacattgctgggaactttgatcccatgatccctgatgcagagtgcctgaagatcatgtgygagatcctgagttcacttcagataggcgacttcctggtcaaggtaaacgatcgacgcattctagatgggatgtttgctatctgtggtgtttctgacagca

SEQ ID NO: 28405 - DNA, 201 bp, Homo sapiens
acagcaagttccgtaccatctgctcctcagtagacaagctggacaaggtgtcctgggaagaggtgaagaatgagatggtgggagagaagggccttgcaccwgaggtggctgaccgcattggggactatgtccagcaacatggtggggtatccctggtggaacagctgctccaggatcctaaactatcccaaaacaagcagg

SEQ ID NO: 28406 - DNA, 201 bp, Homo sapiens
tgtgcgagatcctgagttcacttcagataggcgacttcctggtcaaggtaaacgatcgacgcattctagatgggatgtttgctatctgtggtgtttctgayagcaagttccgtaccatctgctcctcagtagacaagctggacaaggtgtcctgggaagaggtgaagaatgagatggtgggagagaagggccttgcacctg

SEQ ID NO: 28407 - DNA, 201 bp, Homo sapiens
ccaggaggcttagtccagtctgtgctcctgggctacaaggacccagcctgagatggtcccatctgcagggccccgcaccagttggagcagatgcctccccmccaccaattgccaaaggtccaataaaatgcctcaaccacggagtctgcgtgtgtcagtgatgcctagccccgccttccccagcagaccaatgtagggatg

SEQ ID NO: 28408 - DNA, 201 bp, Homo sapiens; identical to SEQ ID NO: 28396

SEQ ID NO: 28409 - DNA, 201 bp, Homo sapiens; identical to SEQ ID NO: 28397

SEQ ID NO: 28410 - DNA, 201 bp, Homo sapiens; identical to SEQ ID NO: 28398

SEQ ID NO: 28411 - DNA, 201 bp, Homo sapiens; identical to SEQ ID NO: 28399

SEQ ID NO: 28412 - DNA, 201 bp, Homo sapiens; identical to SEQ ID NO: 28400

SEQ ID NO: 28413 - DNA, 201 bp, Homo sapiens; identical to SEQ ID NO: 28401

SEQ ID NO: 28414 - DNA, 201 bp, Homo sapiens; identical to SEQ ID NO: 28402

SEQ ID NO: 28415 - DNA, 201 bp, Homo sapiens; identical to SEQ ID NO: 28403

SEQ ID NO: 28416 - DNA, 201 bp, Homo sapiens; identical to SEQ ID NO: 28404

SEQ ID NO: 28417 - DNA, 201 bp, Homo sapiens; identical to SEQ ID NO: 28405

SEQ ID NO: 28418 - DNA, 201 bp, Homo sapiens; identical to SEQ ID NO: 28406

SEQ ID NO: 28419 - DNA, 201 bp, Homo sapiens; identical to SEQ ID NO: 28407

SEQ ID NO: 28420 - DNA, 201 bp, Homo sapiens
acctcagggtcacaagtttactgtttttctcccttttccatccctacattggtctgctggggaaggcggggctaggcatcactgacacacgcagactccgkggttgaggcattttattggacctttggcaattggtggtggggaggcatctgctccaactggtgcggggccctgcagatgggaccatctcaggctgggtcc

SEQ ID NO: 28421 - DNA, 201 bp, Homo sapiens
gcagcgcgctgcgggtcagattcggcggcaggccgtcaacgctcagctcacacttctcggtgctgcggcacacgagcagcgggcaggacggccgcagcggrtggttgtgcagcgtggcgatggcggcctgcgcgccgcgcctcgagctgtagcgggcataggcgaagccgcggttcaggccgctgaaggtcatcatcaggc

SEQ ID NO: 28422 - DNA, 201 bp, Homo sapiens
actggaaagacgtgtttccaaggctcatggtgcccccatcaatagtcttctgctggtggatgagaatgttctggccactggggatgacacaggtggtatcygtctctgggaccagcggaaggagggccccttaatggatatgaggcaacatgaagagtacatcgcagacatggctctggatccagccaaaaagctgctgct

SEQ ID NO: 28423 - DNA, 201 bp, Homo sapiens
catcactgacacacgcagactccgtggttgaggcattttattggacctttggcaattggtggtggggaggcatctgctccaactggtgcggggccctgcaratgggaccatctcaggctgggtccttgtagcccaggagcacagactggactaagcctcctgggccttgtatgaaaaaggtgttgtacctggccgtttttg

SEQ ID NO: 28424 - DNA, 201 bp, Homo sapiens
tgaagggcaccggatgcccaggaatcaccacctggtaccagaagcggtgccagccagcaggtcctatgcccaaacacttgctatgctcagtataaagtgcygggcagaacgcgtttggccccaaccagcacccccgccccagcctaccttccaccagggcctttttggccatggcagcggcccggtgcgagctgaatttga

SEQ ID NO: 28425 - DNA, 201 bp, Homo sapiens
agctcattactgtctccaaggacaaagccatccatgttctagatgtggagcagggccaactggaaagacgtgtttccaaggctcatggtgcccccatcaayagtcttctgctggtggatgagaatgttctggccactggggatgacacaggtggtatccgtctctgggaccagcggaaggagggccccttaatggatatga

SEQ ID NO: 28426 - DNA, 201 bp, Homo sapiens
gtgaaggtaccatctacctcttcaattggaatggctttggggccacaagtgaccgctttgccctgagagctgaatctatcgactgcatggttccagtcacmgagagtctgctgtgtactggctccactgatggagtcatcagggctgtgaacatcctaccgaaccgagtggtgggcagtgtgggccagcacactggggagc

SEQ ID NO: 28427 - DNA, 201 bp, Homo sapiens
ttcgcaggactgagggaagagggagaagactccatggctcaggaagaaaaggaggagactggggatgacagtgactgaaggaatgaattgaatcttgagaygggtcctcaccagccccagcagaccacaggaggttggccccagactcactgagtgcctgcagcagccgtacagacacagcatccttggccacctcatgcc

SEQ ID NO: 28428 - DNA, 201 bp, Homo sapiens
tttgagctgctctcagaacctcagtctggggacctgacctctgtcactctcatgaaatgggggaagaaggtagcctgtggctccagtgaaggtaccatctrcctcttcaattggaatggctttggggccacaagtgaccgctttgccctgagagctgaatctatcgactgcatggttccagtcaccgagagtctgctgtgt

SEQ ID NO: 28429 - DNA, 201 bp, Homo sapiens
gggtggaggtatccactgcacgtgcgccgcccgggcttcgctcagaccttcaggtgaaagctgcaaagtcgcgggtgcgtatgtacgggggctgcctcccsaggaggagctcccaagccgcagggtggacgctggagacaagaacctcagggtcacaagtttactgtttttctcccttttccatccctacattggtctgct

SEQ ID NO: 28430 - DNA, 201 bp, Homo sapiens
gatccagccaaaaagctgctgctgacagccagcggggatggctgccttggcatcttcaacattaagaggcgtcggtttgagctgctctcagaacctcagtytggggacctgacctctgtcactctcatgaaatgggggaagaaggtagcctgtggctccagtgaaggtaccatctacctcttcaattggaatggctttggg

SEQ ID NO: 28431 - DNA, 201 bp, Homo sapiens
cccagctgcgagctgtggtggtggatgactaccgtcggcgcaaaaaaaagggaggaccactgcgggctctgagcagcaagacttggagcaccgatgacttyttcgcaggactgagggaagagggagaagactccatggctcaggaagaaaaggaggagactggggatgacagtgactgaaggaatgaattgaatcttgaga

SEQ ID NO: 28432 - DNA, 157 bp, Homo sapiens
cggagtgccaggctactcctcccgcagtgtgggtggttccgaggctgactaccctgmggcggcgcggctcgcagtccttctcagcatggaccgcacttgtgaggagaggcccgctgaggatgggagcgacgaggaggacccagactccatggaagcc

SEQ ID NO: 28433 - DNA, 201 bp, Homo sapiens
tggtggtggatgactaccgtcggcgcaaaaaaaagggaggaccactgcgggctctgagcagcaagacttggagcaccgatgacttcttcgcaggactgagrgaagagggagaagactccatggctcaggaagaaaaggaggagactggggatgacagtgactgaaggaatgaattgaatcttgagacgggtcctcaccagc

SEQ ID NO: 28434 - DNA, 201 bp, Homo sapiens
ggaggacccagactccatggaagccccaacccggatccgggacactccggaagacatcgtgctggaagctccggctagtgggctggcgttccatccggccygtgacctactggctgcaggggacgtggacggggacgtgttcgtcttttcctactcttgccaagagggagaaaccaaggagctctggtcatcaggtcacca

SEQ ID NO: 28435 - DNA, 201 bp, Homo sapiens
catccctacattggtctgctggggaaggcggggctaggcatcactgacacacgcagactccgtggttgaggcattttattggacctttggcaattggtggkggggaggcatctgctccaactggtgcggggccctgcagatgggaccatctcaggctgggtccttgtagcccaggagcacagactggactaagcctcctgg

SEQ ID NO: 28436 - DNA, 168 bp, Homo sapiens
cggagtgccaggctactcctcccgcagtgtgggtggttccgaggctgactaccctgcggcggcgcggytcgcagtccttctcagcatggaccgcacttgtgaggagaggcccgctgaggatgggagcgacgaggaggacccagactccatggaagccccaacccggat

SEQ ID NO: 28437 - DNA, 201 bp, Homo sapiens; identical to SEQ ID NO: 28420

SEQ ID NO: 28438 - DNA, 201 bp, Homo sapiens; identical to SEQ ID NO: 28428

SEQ ID NO: 28439 - DNA, 201 bp, Homo sapiens; identical to SEQ ID NO: 28421

SEQ ID NO: 28440 - DNA, 201 bp, Homo sapiens; identical to SEQ ID NO: 28422

SEQ ID NO: 28441 - DNA, 201 bp, Homo sapiens; identical to SEQ ID NO: 28423

SEQ ID NO: 28442 - DNA, 201 bp, Homo sapiens; identical to SEQ ID NO: 28429

SEQ ID NO: 28443 - DNA, 201 bp, Homo sapiens; identical to SEQ ID NO: 28424

SEQ ID NO: 28444 - DNA, 201 bp, Homo sapiens; identical to SEQ ID NO: 28426

SEQ ID NO: 28445 - DNA, 201 bp, Homo sapiens; identical to SEQ ID NO: 28425

SEQ ID NO: 28446 - DNA, 201 bp, Homo sapiens; identical to SEQ ID NO: 28430

SEQ ID NO: 28447 - DNA, 201 bp, Homo sapiens; identical to SEQ ID NO: 28431

SEQ ID NO: 28448 - DNA, 201 bp, Homo sapiens; identical to SEQ ID NO: 28433

SEQ ID NO: 28449 - DNA, 201 bp, Homo sapiens; identical to SEQ ID NO: 28427

SEQ ID NO: 28450 - DNA, 201 bp, Homo sapiens; identical to SEQ ID NO: 28435

SEQ ID NO: 28451 - DNA, 201 bp, Homo sapiens; identical to SEQ ID NO: 28420

SEQ ID NO: 28452 - DNA, 201 bp, Homo sapiens; identical to SEQ ID NO: 28428

SEQ ID NO: 28453 - DNA, 201 bp, Homo sapiens; identical to SEQ ID NO: 28421

SEQ ID NO: 28454 - DNA, 201 bp, Homo sapiens; identical to SEQ ID NO: 28422

SEQ ID NO: 28455 - DNA, 201 bp, Homo sapiens; identical to SEQ ID NO: 28423

SEQ ID NO: 28456 - DNA, 201 bp, Homo sapiens; identical to SEQ ID NO: 28429

SEQ ID NO: 28457 - DNA, 201 bp, Homo sapiens; identical to SEQ ID NO: 28424

SEQ ID NO: 28458 - DNA, 201 bp, Homo sapiens; identical to SEQ ID NO: 28425

SEQ ID NO: 28459 - DNA, 201 bp, Homo sapiens; identical to SEQ ID NO: 28426

SEQ ID NO: 28460 - DNA, 201 bp, Homo sapiens; identical to SEQ ID NO: 28430

SEQ ID NO: 28461 - DNA, 201 bp, Homo sapiens; identical to SEQ ID NO: 28431

SEQ ID NO: 28462 - DNA, 201 bp, Homo sapiens; identical to SEQ ID NO: 28433

SEQ ID NO: 28463 - DNA, 201 bp, Homo sapiens; identical to SEQ ID NO: 28427

SEQ ID NO: 28464 - DNA, 201 bp, Homo sapiens
ggaggacccagactccatggaagccccaacccggatccgggacactccggaagacatcgtgctggaagctccggctagtgggctggcgttccatccggccygtgacctactggctgcaggggacgtggacggggacgtcttttcctactcttgccaagagggagaaaccaaggagctctggtcatcaggtcaccatctcaa

SEQ ID NO: 28465 - DNA, 201 bp, Homo sapiens; identical to SEQ ID NO: 28435

SEQ ID NO: 28466 - DNA, 183 bp, Homo sapiens
cgttcgcagcctttccgcttcctgtttttccctccgaccaaccccgagcgcaaagaaattgacctcgcagcggtcctacaatrcttttatatcattggccaagctttaccccgcccctgcctcatgcagcctatgggctaggctttagggtccgcggttggtcagaccggagcacttggcctg

SEQ ID NO: 28467 - DNA, 201 bp, Homo sapiens
ttggtcagaccggagcacttggcctgaagacctggaattggcgacttcgatattaacaaggatggcggcggccgcagcaagtcgaggagtcggggcaaagstgggcctgcgtgagattcgcatccacttatgtcagcgctcgcccggcagccagggcgtcagggacttcattgagaaacgctacgtggagctgaagaaggc

SEQ ID NO: 28468 - DNA, 201 bp, Homo sapiens
cggtcctacaatacttttatatcattggccaagctttaccccgcccctgcctcatgcagcctatgggctaggctttagggtccgcggttggtcagaccggrgcacttggcctgaagacctggaattggcgacttcgatattaacaaggatggcggcggccgcagcaagtcgaggagtcggggcaaagctgggcctgcgtga

SEQ ID NO: 28469 - DNA, 183 bp, Homo sapiens; identical to SEQ ID NO: 28466

SEQ ID NO: 28470 - DNA, 201 bp, Homo sapiens; identical to SEQ ID NO: 28467

SEQ ID NO: 28471 - DNA, 201 bp, Homo sapiens; identical to SEQ ID NO: 28468

SEQ ID NO: 28472 - DNA, 201 bp, Homo sapiens
ttgagatagagtctcactcttgcccagtgagctgaaattgtgccactgcactccagcctgggtgacagagtgagacaccatctcaaaaaaaaaaaaaaaaagaaaatgtagttatccctaggagcaatagcaccaattaactctcacccgtggaggaagaattggttattggagagaccctaagggaaaggagattttcag

SEQ ID NO: 28473 - DNA, 201 bp, Homo sapiens
accaatctttggtttgtgaataggaagaatctattaggcctctggtctgaggcagattttttttttgagatagagtctcactcttgcccagtgagctgaawttgtgccactgcactccagcctgggtgacagagtgagacaccatctcaaaaaaaaaaaaaaaaagaaaatgtagttatccctaggagcaatagcaccaat

SEQ ID NO: 28474 - DNA, 201 bp, Homo sapiens
aaccaatctttggtttgtgaataggaagaatctattaggcctctggtctgaggcagattttttttttgagatagagtctcactcttgcccagtgagctgarattgtgccactgcactccagcctgggtgacagagtgagacaccatctcaaaaaaaaaaaaaaaaagaaaatgtagttatccctaggagcaatagcaccaa

SEQ ID NO: 28475 - DNA, 201 bp, Homo sapiens
ctacatctttgaagaacttctgagcttgaagatccgcatctctccagatgcctttttccagattaacacagctggtgcagagatgctgtatcggactgtgrgggagctgactggagtgaactctgacaccatccttcttgacatctgctgtggaactggcaagtgtgattggcctctctctggctcagcatacatctcggg

SEQ ID NO: 28476 - DNA, 201 bp, Homo sapiens
tgcagtctaatcatctgaaaaacatccctgagaaacacagtcaagtggcgcagtactatgaagtattccttcgacagtctccattggagccctgccttgtrtttcatgaaggtggatactggcgtgagctcacagtccgcaccaatagccaagggcacacaatggctatcatcactttccatccccagaaattaagtcagg

SEQ ID NO: 28477 - DNA, 201 bp, Homo sapiens
cctttgtcctgcagcaagctgtacctgtggatttgttccctcacaccccacattgtgagctggtgctcctctttactcgataagcagcctcctagaagacwgcaggctatttgttaaggctgaagtttcagaaactttcaggtttggcatattgctacattgcagaccctgggagcattacagtggaaaccaatctttggt

SEQ ID NO: 28478 - DNA, 201 bp, Homo sapiens; identical to SEQ ID NO: 28472

SEQ ID NO: 28479 - DNA, 201 bp, Homo sapiens; identical to SEQ ID NO: 28473

SEQ ID NO: 28480 - DNA, 201 bp, Homo sapiens; identical to SEQ ID NO: 28474

SEQ ID NO: 28481 - DNA, 201 bp, Homo sapiens; identical to SEQ ID NO: 28475

SEQ ID NO: 28482 - DNA, 201 bp, Homo sapiens; identical to SEQ ID NO: 28476

SEQ ID NO: 28483 - DNA, 201 bp, Homo sapiens; identical to SEQ ID NO: 28477

SEQ ID NO: 28484 - DNA, 201 bp, Homo sapiens
cttgaacctgggaggtggaggttgcagtgagctgaaattgtgccactgcactccagcctgggtgacagagtgagacaccatctcaaaaaaaaaaaaaaaaagaaaatgtagttatccctaggagcaatagcaccaattaactctcacccgtggaggaagaattggttattggagagaccctaagggaaaggagattttcag

SEQ ID NO: 28485 - DNA, 201 bp, Homo sapiens
tagttttccctggtggtgggcacctgtaatcccagctactcgggaggctgaggcaggataattgcttgaacctgggaggtggaggttgcagtgagctgaawttgtgccactgcactccagcctgggtgacagagtgagacaccatctcaaaaaaaaaaaaaaaaagaaaatgtagttatccctaggagcaatagcaccaat

SEQ ID NO: 28486 - DNA, 201 bp, Homo sapiens
gtagttttccctggtggtgggcacctgtaatcccagctactcgggaggctgaggcaggataattgcttgaacctgggaggtggaggttgcagtgagctgarattgtgccactgcactccagcctgggtgacagagtgagacaccatctcaaaaaaaaaaaaaaaaagaaaatgtagttatccctaggagcaatagcaccaa

SEQ ID NO: 28487 - DNA, 201 bp, Homo sapiens
ctacatctttgaagaacttctgagcttgaagatccgcatctctccagatgcctttttccagattaacacagctggtgcagagatgctgtatcggactgtgrgggagctgactggagtgaactctgacaccatccttcttgacatctgctgtggaactggtgtgattggcctctctctggctcagcatacatctcgggtcct

SEQ ID NO: 28488 - DNA, 201 bp, Homo sapiens; identical to SEQ ID NO: 28477

SEQ ID NO: 28489 - DNA, 201 bp, Homo sapiens; identical to SEQ ID NO: 28476

SEQ ID NO: 28490 - DNA, 201 bp, Homo sapiens
tctgaggcagattttttttttgagatagagtctcactcttgcccaggctggagtgtcgtggcgtgatctcagctcactgcaacctccgcctcccgggttcragtgattctcgtgcctcagcttccccagtagctaggattaaaggtgcgtgccaccatgcccggctaatttttgtatttttggtagagacagggtttcacc

SEQ ID NO: 28491 - DNA, 201 bp, Homo sapiens
agaatctattaggcctctggtctgaggcagattttttttttgagatagagtctcactcttgcccaggctggagtgtcgtggcgtgatctcagctcactgcracctccgcctcccgggttcaagtgattctcgtgcctcagcttccccagtagctaggattaaaggtgcgtgccaccatgcccggctaatttttgtattttt

SEQ ID NO: 28492 - DNA, 201 bp, Homo sapiens; identical to SEQ ID NO: 28472

SEQ ID NO: 28493 - DNA, 201 bp, Homo sapiens; identical to SEQ ID NO: 28473

SEQ ID NO: 28494 - DNA, 201 bp, Homo sapiens; identical to SEQ ID NO: 28474

SEQ ID NO: 28495 - DNA, 201 bp, Homo sapiens
ctacatctttgaagaacttctgagcttgaagatccgcatctctccagatgcctttttccagattaacacagctggtgcagagatgctgtatcggactgtgrgggagctgactggagtgaactctgacaccatccttcttgacatctgctgtggaactggcaagtggaagcccagggcagaatctgcatgctgctcagctcc

SEQ ID NO: 28496 - DNA, 201 bp, Homo sapiens; identical to SEQ ID NO: 28476

SEQ ID NO: 28497 - DNA, 201 bp, Homo sapiens; identical to SEQ ID NO: 28477

SEQ ID NO: 28498 - DNA, 125 bp, Homo sapiens
atcaaaatgttggaaagtgcacaaggcgccgtgtgccaggtacggtctgtccaccaactgttgcatggggcaggaggccacggccaggccacagctttgcsgcgcgcagctgcagaaggggcaag

SEQ ID NO: 28499 - DNA, 201 bp, Homo sapiens
ggacgcggatgcgggcggggaccatctctctctggatgcagatgcgggtgtagtcccagctgggaggagtggtgcggaggggccggatgcggacccagtgyttcctgtggaagtaggtgaccttgcagttctcctggacctgggagctgaggaagggcctggactgcagaacccagtgcttttgggcggggcgcagctttc

SEQ ID NO: 28500 - DNA, 201 bp, Homo sapiens
ctctctggcggggcgattttcacggtcaccaggctgcggacaggctgtgggggtggcgggcggtccaaagccaccgcttcacgtaggccaggggagccttsgagaaatcaggcctgatgttgctcagcagcggcagcctgttgggaaagcacctccaggcctcggggaccatctctctcaggacgcggatgcgggcgggga

SEQ ID NO: 28501 - DNA, 121 bp, Homo sapiens
aaatgttggaaagtgcacaaggcgccgtgtgccaggtacggtctgtccaccaactgttgcatggggcaggaggccacggccaggccacagctttgccgcgygcagctgcagaaggggcaag

SEQ ID NO: 28502 - DNA, 201 bp, Homo sapiens
gatgtggtggctcagagcacccgtatccatttatggaggctctgtgatgggggcaacctgcaaggagctggccagccagcctgaagtggatggcttcctcrtgggtgatgcttccctcaagccctaattcgtggacatcatcaatgccaaacaatgagccccatccatcttccctacccttcctgccaagccagggactaa

SEQ ID NO: 28503 - DNA, 201 bp, Homo sapiens
cactctccccactgcctatatcgactttgccccagaagctagagcccaagattgctgtggctgcgcagaactgctacaaagtaactaacggggcctttacytgggagatcagccctggcatgatcaaagactgcaaagccaatcgagggtcctggggcactcagagagtaggcatgtctttggggagtcagataagctgat

SEQ ID NO: 28504 - DNA, 201 bp, Homo sapiens
ccgttgagagtcttagtaaaagaattccaggaaataataactttgtcaagtccaagacaggccttccacttagcacttacttcagtgcagtgaaacttcgytggctcctcgacaatgtgagaaaagttcaaaaggccgttgaagaaaaacgagctctttttgggactattgattcatggcttatttggagtttgacaggag

SEQ ID NO: 28505 - DNA, 201 bp, Homo sapiens
ggctcctcgacaatgtgagaaaagttcaaaaggccgttgaagaaaaacgagctctttttgggactattgattcatggcttatttggagtttgacaggaggmgtcaatggaggtgtccactgtacagatgtaacaaatgcaagtaggactatgcttttcaacattcattctttggaatgggataaacaactctgtgaatttt

SEQ ID NO: 28506 - DNA, 201 bp, Homo sapiens
tgggtgtttaggggaccagtctgctgcactggtgggacaaatgtgcttccagattggacaagccaaaaatacgtatggaacaggatgtttcttactatgtratacaggccataagtgtgtattttctgatcatggccttctcaccacagtggcttacaaacttggcagagacaaaccggtatattacgctttggaaggttc

SEQ ID NO: 28507 - DNA, 201 bp, Homo sapiens
caggaggcgtcaatggaggtgtccactgtacagatgtaacaaatgcaagtaggactatgcttttcaacattcattctttggaatgggataaacaactctgygaattttttggaattccaatggaaattcttccacatgttcggagttcttctgagatctatggcctaatgaaagcgggggccttggaaggtgtgccaatat

SEQ ID NO: 28508 - DNA, 201 bp, Homo sapiens
tccacatgttcggagttcttctgagatctatggcctaatgaaagcgggggccttggaaggtgtgccaatatctgggtgtttaggggaccagtctgctgcaytggtgggacaaatgtgcttccagattggacaagccaaaaatacgtatggaacaggatgtttcttactatgtaatacaggccataagtgtgtattttctga

SEQ ID NO: 28509 - DNA, 201 bp, Homo sapiens
aaatgcagcaaaaagaatgctatagaaatatttggttgtgtgtgtgtgtttttaacatccacagttaaggttgggccagctacctttggggctgacccccyccattgccataacatcctgctccattccctctaagatgtacgaagaattcagatcctcaccattggaatcttccatcaaacatactcaaacactactgga

SEQ ID NO: 28510 - DNA, 201 bp, Homo sapiens
agaagtgaggctagttcagcggactcgcgcggcctcgctctttggactcgtcaccctcccctccccctcccgccgccgtcacccaggaaaccggccgcaawcgcgggcggacctgaagctggtttcatggcagcctcaaagaaggcagttttggggccattggtgggggcagtggaccaaggcaccagttccacgcgcttt

SEQ ID NO: 28511 - DNA, 201 bp, Homo sapiens
gtgaggctagttcagcggactcgcgcggcctcgctctttggactcgtcaccctcccctccccctcccgccgccgtcacccaggaaaccggccgcaaacgcsggcggacctgaagctggtttcatggcagcctcaaagaaggcagttttggggccattggtgggggcagtggaccaaggcaccagttccacgcgctttttgg

SEQ ID NO: 28512 - DNA, 201 bp, Homo sapiens
ggaattccaatggaaattcttccacatgttcggagttcttctgagatctatggcctaatgaaagcgggggccttggaaggtgtgccaatatctgggtgttyaggggaccagtctgctgcactggtgggacaaatgtgcttccagattggacaagccaaaaatacgtatggaacaggatgtttcttactatgtaatacaggc

SEQ ID NO: 28513 - DNA, 201 bp, Homo sapiens
ttcggggttatatgcaccttattgggagcccagcgcaagagggataatctgtggactcactcaattcacgaataaatgccatattgcttttgctgcattaraagctgtttgtttccaaactcgagagattttggatgccatgaatcgagactgtggaattccactcagtcatttgcaggttgatggaggaatgaccagcaa

SEQ ID NO: 28514 - DNA, 201 bp, Homo sapiens
gctggtttcatggcagcctcaaagaaggcagttttggggccattggtgggggcagtggaccaaggcaccagttccacgcgctttttggttttcaattcaaraacagctgaactacttagtcatcatcaagtggaaataaaacaagagttcccaagagaaggatgggtggaacaggaccctaaggaaattctacattctgtc

SEQ ID NO: 28515 - DNA, 201 bp, Homo sapiens
aaataaagaaaatgcagcaaaaagaatgctatagaaatatttggttgtgtgtgtgtgtttttaacatccacagttaaggttgggccagctacctttggggstgaccccctccattgccataacatcctgctccattccctctaagatgtacgaagaattcagatcctcaccattggaatcttccatcaaacatactcaaac

SEQ ID NO: 28516 - DNA, 201 bp, Homo sapiens
cgccgccgtcacccaggaaaccggccgcaaacgcgggcggacctgaagctggtttcatggcagcctcaaagaaggcagttttggggccattggtgggggcrgtggaccaaggcaccagttccacgcgctttttggttttcaattcaagaacagctgaactacttagtcatcatcaagtggaaataaaacaagagttcccaa

SEQ ID NO: 28517 - DNA, 201 bp, Homo sapiens
aactctgtgaattttttggaattccaatggaaattcttccacatgttcggagttcttctgagatctatggcctaatgaaagcgggggccttggaaggtgtrccaatatctgggtgtttaggggaccagtctgctgcactggtgggacaaatgtgcttccagattggacaagccaaaaatacgtatggaacaggatgtttct

SEQ ID NO: 28518 - DNA, 201 bp, Homo sapiens
cggccgcaaacgcgggcggacctgaagctggtttcatggcagcctcaaagaaggcagttttggggccattggtgggggcagtggaccaaggcaccagttcsacgcgctttttggttttcaattcaagaacagctgaactacttagtcatcatcaagtggaaataaaacaagagttcccaagagaaggatgggtggaacagg

SEQ ID NO: 28519 - DNA, 201 bp, Homo sapiens
gggataatctgtggactcactcaattcacgaataaatgccatattgcttttgctgcattagaagctgtttgtttccaaactcgagagattttggatgccaygaatcgagactgtggaattccactcagtcatttgcaggttgatggaggaatgaccagcaacaaaattcttatgcagctacaagcagacattctgtatatt

SEQ ID NO: 28520 - DNA, 201 bp, Homo sapiens
ttttggggccattggtgggggcagtggaccaaggcaccagttccacgcgctttttggttttcaattcaagaacagctgaactacttagtcatcatcaagtrgaaataaaacaagagttcccaagagaaggatgggtggaacaggaccctaaggaaattctacattctgtctatgagtgtatagagaaaacatgtgagaaac

SEQ ID NO: 28521 - DNA, 201 bp, Homo sapiens
aagctattggtgtcagcaaccagagggaaaccaccgtagtctgggacaagataactggagagcctctctacaatgctgtggtgtggcttgatctaagaacmcagtctaccgttgagagtcttagtaaaagaattccaggaaataataactttgtcaagtccaagacaggccttccacttagcacttacttcagtgcagtga

SEQ ID NO: 28522 - DNA, 201 bp, Homo sapiens; identical to SEQ ID NO: 28504

SEQ ID NO: 28523 - DNA, 201 bp, Homo sapiens; identical to SEQ ID NO: 28505

SEQ ID NO: 28524 - DNA, 201 bp, Homo sapiens; identical to SEQ ID NO: 28506

SEQ ID NO: 28525 - DNA, 201 bp, Homo sapiens; identical to SEQ ID NO: 28507

SEQ ID NO: 28526 - DNA, 201 bp, Homo sapiens; identical to SEQ ID NO: 28508

SEQ ID NO: 28527 - DNA, 201 bp, Homo sapiens
agaaatatttggtgtgtgtgtgtgtgtgtgtgtgtgtgtgtgtgtgtgtttttaacatccacagttaaggttgggccagctacctttggggctgacccccyccattgccataacatcctgctccattccctctaagatgtacgaagaattcagatcctcaccattggaatcttccatcaaacatactcaaacactactgga

SEQ ID NO: 28528 - DNA, 201 bp, Homo sapiens
atacatttttgggcaatggttatgcataatatctaccagaatttttttcttaaacagccaacatttaaaatttatgttttatgtccataaaagaaaatatrctttattgtgacttcaactatatttcttatcccttacatttttatttaattgtcttagcctaaaaaaagaagaaactgtggaatactacagtaaatactg

SEQ ID NO: 28529 - DNA, 201 bp, Homo sapiens
tttatgtccataaaagaaaatatactttattgtgacttcaactatatttcttatcccttacatttttatttaattgtcttagcctaaaaaaagaagaaactgtggaatactacagtaaatactgttttcaaacacaagcaataattcaaatagttttcttttgaattaattttagacatattttggatcctattgagggga

SEQ ID NO: 28530 - DNA, 201 bp, Homo sapiens
ttatgtccataaaagaaaatatactttattgtgacttcaactatatttcttatcccttacatttttatttaattgtcttagcctaaaaaaagaagaaactgtggaatactacagtaaatactgttttcaaacacaagcaataattcaaatagttttcttttgaattaattttagacatattttggatcctattgaggggat

SEQ ID NO: 28531 - DNA, 201 bp, Homo sapiens; identical to SEQ ID NO: 28510

SEQ ID NO: 28532 - DNA, 201 bp, Homo sapiens; identical to SEQ ID NO: 28511

SEQ ID NO: 28533 - DNA, 201 bp, Homo sapiens; identical to SEQ ID NO: 28512

SEQ ID NO: 28534 - DNA, 201 bp, Homo sapiens
atatattttatacactgagggtagcccatttataaattaagagcacattatattcagaaggttctaacagggctggtcttaagtgaaccactatgtatatmaatatgttggaaaacagctgtatacatttttgggcaatggttatgcataatatctaccagaatttttttcttaaacagccaacatttaaaatttatgttt

SEQ ID NO: 28535 - DNA, 201 bp, Homo sapiens; identical to SEQ ID NO: 28513

SEQ ID NO: 28536 - DNA, 201 bp, Homo sapiens; identical to SEQ ID NO: 28514

SEQ ID NO: 28537 - DNA, 201 bp, Homo sapiens
gaatgctatagaaatatttggtgtgtgtgtgtgtgtgtgtgtgtgtgtgtgtgtgtgtttttaacatccacagttaaggttgggccagctacctttggggstgaccccctccattgccataacatcctgctccattccctctaagatgtacgaagaattcagatcctcaccattggaatcttccatcaaacatactcaaac

SEQ ID NO: 28538 - DNA, 201 bp, Homo sapiens; identical to SEQ ID NO: 28516

SEQ ID NO: 28539 - DNA, 201 bp, Homo sapiens; identical to SEQ ID NO: 28517

SEQ ID NO: 28540 - DNA, 201 bp, Homo sapiens; identical to SEQ ID NO: 28518

SEQ ID NO: 28541 - DNA, 201 bp, Homo sapiens; identical to SEQ ID NO: 28519

SEQ ID NO: 28542 - DNA, 201 bp, Homo sapiens; identical to SEQ ID NO: 28520

SEQ ID NO: 28543 - DNA, 201 bp, Homo sapiens; identical to SEQ ID NO: 28521

SEQ ID NO: 28544 - DNA, 201 bp, Homo sapiens
gggatttggagcagacattggaatagaaaagtttcttaacatcaaatcccagtattccggtctccaccctcacgtggtggtgcttgttgccactgtcagcrctctaaagatgcacaggggtggccctatggtcactgctggaatgcctcttcccaaggcttacatagaggagaacctggagctggttgaaaaaggcttcag

SEQ ID NO: 28545 - DNA, 201 bp, Homo sapiens
ctggagctggttgaaaaaggcttcagtaacttgaagaaacaaactgaaaatgccagaatgtttggaattccagtagtagtggccgtgaatgcattcaagayagatacagagactgagctggacctcatcggctgcctttccagagaacagagggcttttgatgccgtgaagtgcactcactggcagaagggggcaaggctc

SEQ ID NO: 28546 - DNA, 201 bp, Homo sapiens
gattgggatgaaagccactgacattaagttaccaagaacaaccacagaatctgaggtgatcaagtacatcatatctttgaatgaagactctactgtacacrgacaatacactgaaggagtgatcaatgctattgcacctgaaaaggatgtggatggattgactagcatcagtgctgggaaacttgctagaggtgacctaaa

SEQ ID NO: 28547 - DNA, 201 bp, Homo sapiens
gtcagcgctctaaagatgcacaggggtggccctatggtcactgctggaatgcctcttcccaaggcttacatagaggagaacctggagctggttgaaaaagkcttcagtaacttgaagaaacaaactgaaaatgccagaatgtttggaattccagtagtagtggccgtgaatgcattcaagacagatacagagactgagctg

SEQ ID NO: 28548 - DNA, 201 bp, Homo sapiens
cccatctgcatggccaaaacacacttgtccttgtctcacaacccagagcgaaaaggtgtccctacaggattcattctgcccattcgcaacatccatgccarcatcggggctggttttctgtaccctttagtaggaacgatgagcacaatggactccccacccagccctgtttttatgatactgatttggaccctgaaacag

SEQ ID NO: 28549 - DNA, 201 bp, Homo sapiens
cttgctagaggtgacctaaatgactgtttcattccttgtatgcctaaaggatgcttggaactcatgaaagagacagggagcactgtagagagtgccaagcrtttcctggagaaatttaagccaggaaagtggatgattcagtataacaaccttaacctcaagacacctgttccaaaggtagaattatatggtgaaacaaag

SEQ ID NO: 28550 - DNA, 201 bp, Homo sapiens; identical to SEQ ID NO: 28544

SEQ ID NO: 28551 - DNA, 201 bp, Homo sapiens
gcctaaaggatgcttggaactcatgaaagagacaggggtgcagattgccagaaggcatgctgtggtggttgggtgcagtaaaatagtcagggccctgatgygtgacttgcttctgtggaacaatgccacagtgaccacctgccactccaagactgccaatctggatgaggaggtaaataaaggcgacatcctggtggttgc

SEQ ID NO: 28552 - DNA, 201 bp, Homo sapiens
gcttctgtggaacaatgccacagtgaccacctgccactccaagactgccaatctggatgaggaggtaaataaaggcgacatcctggtggttgcaactggtyggcctgaaatggttaaaggggaatggatcaaacctagcaatagtcatcaactgtggaatcaattatgtcccagatgataaaaaaaacaaatgggagaaaa

SEQ ID NO: 28553 - DNA, 201 bp, Homo sapiens
aagttgtgggtgatgtggcatacgacgaggcccgttcctggtggcttagggctcatgacggttgcaatgctcatgcagagcactgtagagagtgccaagcrtttcctggagaaatttaagccaggaaagtggatgattcagtataacaaccttaacctcaagacacctgttccaagtgacattgatatatcacgatcttgt

SEQ ID NO: 28554 - DNA, 201 bp, Homo sapiens; identical to SEQ ID NO: 28548

SEQ ID NO: 28555 - DNA, 201 bp, Homo sapiens
ctggagctggttgaaaaaggcttcagtaacttgaagaaacaaactgaaaatgccagaatgtttggaattccagtagtagtggccgtgaatgcattcaagayagatacagagactgagctggacctcatcggctgcctttccagagaacagagggcttttgatgccgtgaagtgcactcactggcagaagggggcaagggta

SEQ ID NO: 28556 - DNA, 201 bp, Homo sapiens
gattgggatgaaagccactgacattaagttaccaagaacaaccacagaatctgaggtgatcaagtacatcatatctttgaatgaagactctactgtacacrggttcgtagtgcagctatctctagactcagacaatacactgaaggagtgatcaatgctattgcacctgaaaaggatgtggatggattgactagcatcagt

SEQ ID NO: 28557 - DNA, 201 bp, Homo sapiens; identical to SEQ ID NO: 28547

SEQ ID NO: 28558 - DNA, 201 bp, Homo sapiens
agtggtgcattgatagtgcttatgaaggacacaatcaagcccaatctcatgcagagattggagggcactccagtgtttgtccatgcaggcccatttgccawcatcgcacacggcaattcctctatcattgcagaccggatcacactctagcttgttggcccagaagggtttgtagtgacggaggcgggatttggagcagac

SEQ ID NO: 28559 - DNA, 201 bp, Homo sapiens
agctatttttgtcttgtactactttgacccacccctgaataaacctcaattgctggagtggggtgtagttattaaagggatgctttttaccttttgctgtytgctgtggcagattccccagataaccaaggaaaaggggccacccatacctggaaataggccatagggcccctactactgccaacaagccatggcctacct

SEQ ID NO: 28560 - DNA, 201 bp, Homo sapiens
tggcagattccccagataaccaaggaaaaggggccacccatacctggaaataggccatagggcccctactactgccaacaagccatggcctaccttgacamttgtttgatcttaaaattgtgtcttggtaacaaaagatttggacaggcatatctgtagctttcaagttaattaattgcaatatttttttcttcaggattt

SEQ ID NO: 28561 - DNA, 191 bp, Homo sapiens
aacattattattctttaattcctacaaggtactcgaaaaccttaagtgaaaaagatttctatctttttatcttagcgcatttatggaaaaaatattaactrtcctgaatattttataattttgtaggaaaaatatgcatctattttttcttgacttcttttatatagtaataaaagttattttggaagctc

SEQ ID NO: 28562 - DNA, 201 bp, Homo sapiens
attttgaacttgggttctcagtagtgaattgagacttggaggtgacttttcatgtttggagtatcatctctgtctgggatctgggctgacaaattaaaacytagagtagtgcttatgctgaaatgatacttttcattttttggttgatttttttgccttcccttcaattttaaactgaagcattttaatgtgggtagaaac

SEQ ID NO: 28563 - DNA, 201 bp, Homo sapiens
gtgtctactagtagttaattggataaactggcagcatccctggcctgttgtcatgcagtcatttcctgttaattctgggagacaatgatttcacaactagmgggaagcagtcctaaaagtttaaaatccgataaggaatatctgggacagggtttagatcatgactctacacagataccatgatgagagtatattaaagaa

SEQ ID NO: 28564 - DNA, 201 bp, Homo sapiens
gtctttaggaaaatgtagaagaaagaacattattattctttaattcctacaaggtactcgaaaaccttaagtgaaaaagatttctatctttttatcttagygcatttatggaaaaaatattaactatcctgaatattttataattttgtaggaaaaatatgcatctattttttcttgacttcttttatatagtaataaaag

SEQ ID NO: 28565 - DNA, 201 bp, Homo sapiens
gtccttttttagataactccagcaggaaactgtaactgctatgtctttaggaaaatgtagaagaaagaacattattattctttaattcctacaaggtactygaaaaccttaagtgaaaaagatttctatctttttatcttagcgcatttatggaaaaaatattaactatcctgaatattttataattttgtaggaaaaata

SEQ ID NO: 28566 - DNA, 201 bp, Homo sapiens
tgctgcaacactgttctcttcttctctactaaattctatttccaaaattggtaatagagccagaaggatccccagtacccagccctctgcctggcacaaastggtagcacaattaaattcagtatgggtggagcatggtacagtcttggtgccatagaaggagtagttgcatagtcacacatcatttgataagttggatgt

SEQ ID NO: 28567 - DNA, 201 bp, Homo sapiens
aaattgtccctggagactagggtttatgttagggtattgatagattagagcaggtggttgaagagatcttctctggtcagacttggaagaatttccaaaastgaagttagccccaagacttccctagggttgatgtactttatgatccagatgctaaacttcttagaatgaaaatatgcttcaacacttaagtagcataca

SEQ ID NO: 28568 - DNA, 201 bp, Homo sapiens
tttttatggaattttaggggatattttgaacttgggttctcagtagtgaattgagacttggaggtgacttttcatgtttggagtatcatctctgtctgggmtctgggctgacaaattaaaacctagagtagtgcttatgctgaaatgatacttttcattttttggttgatttttttgccttcccttcaattttaaactgaa

SEQ ID NO: 28569 - DNA, 201 bp, Homo sapiens
caaattaaaacctagagtagtgcttatgctgaaatgatacttttcattttttggttgatttttttgccttcccttcaattttaaactgaagcattttaatrtgggtagaaactctacaccaaatacactaaacattttggtgcttagtggatttctttttaggtaactggtacttacttccaaagactgaatacaagccac

SEQ ID NO: 28570 - DNA, 201 bp, Homo sapiens
gatataaattgtggttatgttacctttatcttgttgaggaccacaacattagcacggtgccttgtgcagaatagatactcaatatgtgaatatgtgtctaytagtagttaattggataaactggcagcatccctggcctgttgtcatgcagtcatttcctgttaattctgggagacaatgatttcacaactagagggaagc

SEQ ID NO: 28571 - DNA, 201 bp, Homo sapiens
atgatagaaaatttatcttggtatgtccttttttagataactccagcaggaaactgtaactgctatgtctttaggaaaatgtagaagaaagaacattattrttctttaattcctacaaggtactcgaaaaccttaagtgaaaaagatttctatctttttatcttagcgcatttatggaaaaaatattaactatcctgaata

SEQ ID NO: 28572 - DNA, 201 bp, Homo sapiens
gaaaagttaattatggctttggcactagaatagcactgttgcaaagtatttaagcaccccccatctcagccctttattttatctttcatgtgggctaatgrgaggataatcttacagatattataggaatttcttttctatctttatgaaaacaacgtatataaaatatatctagaaaacctttgtttgagactcttattt

SEQ ID NO: 28573 - DNA, 201 bp, Homo sapiens
accattcttcatccaaatggaggcactgaacagggagcaagaggttccatgccagcctactctggcaacaacatggacaaatcagattcagagttaaacartgaagtagcagcaaggaaaagaaacttagctctggatgaggctgggcagagatctaccatgtaaaatgttgtagagatagagccatataacgtcacgttt

SEQ ID NO: 28574 - DNA, 201 bp, Homo sapiens
atctgtgccaagaaaattgttaaagagacacaaggaatgaactattggcaaggctggaagaaacactgtgaggggagagacctgtccgactggaaaaaagrctgtgaggtttcctaaactggaactggacccaggatgctttgcagcaacgccctagggtttgcagtgaatgtccaaatgcctgtgtcatcttgtcccgtt

SEQ ID NO: 28575 - DNA, 201 bp, Homo sapiens
acaaccactgccacgtcgcctgctcagccttggtcactgatgacctcacagatgcgattatctgtgccaagaaaattgttaaagagacacaaggaatgaaytattggcaaggctggaagaaacactgtgaggggagagacctgtccgactggaaaaaagactgtgaggtttcctaaactggaactggacccaggatgcttt

SEQ ID NO: 28576 - DNA, 201 bp, Homo sapiens
cagatgcgattatctgtgccaagaaaattgttaaagagacacaaggaatgaactattggcaaggctggaagaaacactgtgaggggagagacctgtccgastggaaaaaagactgtgaggtttcctaaactggaactggacccaggatgctttgcagcaacgccctagggtttgcagtgaatgtccaaatgcctgtgtcat

SEQ ID NO: 28577 - DNA, 201 bp, Homo sapiens
gaaaggattactcgagccttgttagaatcagacatggcttcaggggatgcaggacgctcccctgagctgcctgtcaccgactaagtggagcagtgtttctyccgcagactcaactgagaagtcagcctctgcggcaggcaccaggaatctgccttttcagttctgtctccggcaggctttgaggatgaaggctgcgggcat

SEQ ID NO: 28578 - DNA, 201 bp, Homo sapiens
agaaaaatggaataattgtatacctggatgtacctctactagatctaatttgtcgtctaaaattaatgaagacagataggattgtaggtcagaattctggracatctatgaaagacttacttaaatttagaagacagtattataagaagtggtatgatgctcgtgttttctgtgaaagtggggcttccccagaggaggtag

SEQ ID NO: 28579 - DNA, 201 bp, Homo sapiens
aacttctctgcatctggaagtgtgatttcccttactgggtccaatccaatgcatgatgctagcatgtggcatctgaagaaaaatggaataattgtataccyggatgtacctctactagatctaatttgtcgtctaaaattaatgaagacagataggattgtaggtcagaattctggaacatctatgaaagacttacttaaa

SEQ ID NO: 28580 - DNA, 201 bp, Homo sapiens
gaatatgagtgtgtctgaaaaattacaggatgttggtaatgagcaatttttagaagaggaaggaaaagctgtgttaaacttctctgcatctggaagtgtgmtttcccttactgggtccaatccaatgcatgatgctagcatgtggcatctgaagaaaaatggaataattgtatacctggatgtacctctactagatctaat

SEQ ID NO: 28581 - DNA, 201 bp, Homo sapiens
aaagtgctgaatgcaattaaaagataccaagatgtggactcggaaacattcatttcaacaagacacgtttggcctgaagactgtgaacagaaggtttcagmaaaattctttagtgaagctgtaattgaggggttggcttctgatggtggcctctttgttcctgcaaaggagtttccaaaattaagctgcggggagtggaaa

SEQ ID NO: 28582 - DNA, 201 bp, Homo sapiens
caaacactgatttggagtacagtagcattttgtcttttatgtaaatatctctatatctgtttggaatttcaaaagtctgatctctagggctgacatgagamctccatgtcacctcctcagatctttaatctggaagtgacaaaaggtaacacagtgcacggacctttgagctatcatacttttgccttctgctcatgaggg

SEQ ID NO: 28583 - DNA, 201 bp, Homo sapiens
atatgatacttgtagctacttcaggagacacagggagtgcagtcttaaatggttttagtcgtctaaataagaatgataagcaaaggatagctgtggttgcrttttttcctgagaatggagtaagtgattttcaaaaagcacaaataattggcagtcagagagaaaatggatgggcagtgggtgttgagtcagattttgatt

SEQ ID NO: 28584 - DNA, 201 bp, Homo sapiens
gatgggaatcccgattcgaaaatttatctgtgcctctaatcagaaccatgttttgactgattttataaaaacaggacattatgatctaagggaaagaaaaytagcacaaaccttttcaccgtcaatagatattctcaaatcttcaaacctagaacgacatttacacttgatggctaataaagatggacagctaatgacaga

SEQ ID NO: 28585 - DNA, 201 bp, Homo sapiens; identical to SEQ ID NO: 28578

SEQ ID NO: 28586 - DNA, 201 bp, Homo sapiens; identical to SEQ ID NO: 28579

SEQ ID NO: 28587 - DNA, 201 bp, Homo sapiens; identical to SEQ ID NO: 28580

SEQ ID NO: 28588 - DNA, 201 bp, Homo sapiens; identical to SEQ ID NO: 28582

SEQ ID NO: 28589 - DNA, 201 bp, Homo sapiens; identical to SEQ ID NO: 28583

SEQ ID NO: 28590 - DNA, 201 bp, Homo sapiens
tggccgccgcaggcacaggcgcagagtccactgcgcgggggcgggaccggggagctagctgcagactccacgttttgcaaagatcggttttgcctcagagycaacaaactcttcagattggttccggtgtgtcctatgtttacaagtcagtggaaattaagcacaacacatataaattgaaaagtcaaataaggaaatgaa

SEQ ID NO: 28591 - DNA, 201 bp, Homo sapiens; identical to SEQ ID NO: 28581

SEQ ID NO: 28592 - DNA, 201 bp, Homo sapiens; identical to SEQ ID NO: 28584

SEQ ID NO: 28593 - DNA, 201 bp, Homo sapiens; identical to SEQ ID NO: 28578

SEQ ID NO: 28594 - DNA, 201 bp, Homo sapiens; identical to SEQ ID NO: 28579

SEQ ID NO: 28595 - DNA, 201 bp, Homo sapiens; identical to SEQ ID NO: 28580

SEQ ID NO: 28596 - DNA, 201 bp, Homo sapiens; identical to SEQ ID NO: 28582

SEQ ID NO: 28597 - DNA, 201 bp, Homo sapiens; identical to SEQ ID NO: 28583

SEQ ID NO: 28598 - DNA, 197 bp, Homo sapiens
cgtggacactgctcccccatttcctttcatttcccccgtcttctcagtgagatttccttgactccacgttttgcaaagatcggttttgcctcagagycaacaaactcttcagattggttccggtgtgtcctatgtttacaagtcagtggaaattaagcacaacacatataaattgaaaagtcaaataaggaaatgaa

SEQ ID NO: 28599 - DNA, 201 bp, Homo sapiens; identical to SEQ ID NO: 28581

SEQ ID NO: 28600 - DNA, 201 bp, Homo sapiens; identical to SEQ ID NO: 28584

SEQ ID NO: 28601 - DNA, 201 bp, Homo sapiens
aaatcaacacagatgtacaactagattctcaagagaaaattggagttaaaggtgagctgtttcaagaggatgaccatgaagaatcgcattctgattttccrtatggatcatttccctatgttgctagaccagtacactggcaacctggtcatacagcttttcttgtcaagttgaggaaggtcaaaccacaacttaactgag

SEQ ID NO: 28602 - DNA, 201 bp, Homo sapiens
agaccagtacactggcaacctggtcatacagcttttcttgtcaagttgaggaaggtcaaaccacaacttaactgagtactccagatgacagtaactgactwgaagatggaaaaatatcaaaatagaactttatattgaaaatcactgcttccatagattggcatttttagctattactatgacttatataacttatacata

SEQ ID NO: 28603 - DNA, 201 bp, Homo sapiens
cttcgatgctctcgcaggcccagtccgctaccgaggtcgaagagcgtcacgtctccccttcttgttcaacttccagagagagaccctttcaggctggggarctgattttagctgagactggggagggagaaacaaaatttaagaaattatttaggttgaacaacttcggactcttaaatagtaactggggggcagtcccgt

SEQ ID NO: 28604 - DNA, 201 bp, Homo sapiens
tgagcttatttttatccaaagcagttggatcacaaggacgagtcataagttttgaggtacgaaaagaccaccatgatctggctaagaagaattacaaacaytggcgtgattcatggaaattaagtcatgtagaagagtggccagacaatgtggattttattcataaggacatttcaggagcaaccgaagacataaaatctt

SEQ ID NO: 28605 - DNA, 201 bp, Homo sapiens
agtcttgcccatctctccctctgagcatctcggacattgggactggatgtctttcgtcactggaaaacctcagactgccgacgctgcgggaagagtcatcmcctcgagagctcgaggactcgagcggagaccagggccggtgcggtcccacacaccagggatccgaggatccttcgatgctctcgcaggcccagtccgcta

SEQ ID NO: 28606 - DNA, 201 bp, Homo sapiens; identical to SEQ ID NO: 28601

SEQ ID NO: 28607 - DNA, 201 bp, Homo sapiens; identical to SEQ ID NO: 28602

SEQ ID NO: 28608 - DNA, 201 bp, Homo sapiens
aaagccccaggagcagagcccagtccgctaccgaggtcgaagagcgtcacgtctccccttcttgttcaacttccagagagagaccctttcaggctggggarctgattttagctgagactggggagggagaaacaaaatttaagaaattatttaggttgaacaacttcggactcttaaatagtaactggggggcagtcccgt

SEQ ID NO: 28609 - DNA, 201 bp, Homo sapiens; identical to SEQ ID NO: 28604

SEQ ID NO: 28610 - DNA, 201 bp, Homo sapiens
gttttttctttatttatttccttgcatatgttttagagctactctgccagttattatacagaaactatttgtcaatgattatgtaataaacatatgatttyataaccaaatggataagcctatatcataaatcaactgatacttgaaaacttgttcatggcctaaataatgtgtatatatgacaaagacctaaactcagtt

SEQ ID NO: 28611 - DNA, 201 bp, Homo sapiens
gtctagcaacatagggaaatgatccatatggaaaatcagaatgcgattcttctgttgtaaaaaaatatatgtactataagctacataaaatattttctatytttttcacaaaactgttaaaatatgagttactctctttattgtaagttttttctttatttatttccttgcatatgttttagagctactctgccagttatt

SEQ ID NO: 28612 - DNA, 201 bp, Homo sapiens
taaaagaaaaaacaccatttaatatgttctgaaaacattactcacctgtatgaccaggttgccagtgtactggtctagcaacatagggaaatgatccatayggaaaatcagaatgcgattcttctgttgtaaaaaaatatatgtactataagctacataaaatattttctatttttttcacaaaactgttaaaatatgagt

SEQ ID NO: 28613 - DNA, 201 bp, Homo sapiens
tatgtataagttatataagtcatagtaatagctaaaaatgccaatctatggaagcagtgattttcaatataaagttctattttgatatttttccatcttcwagtcagttactgtcatctggagtactcagttaagttgtggtttgaccttcctcaacttgacaagaaaagctaatttaagagaagaaaaacataaagtcat

SEQ ID NO: 28614 - DNA, 201 bp, Homo sapiens
gcagaacaaccaagaaaccccaaacctaaagttgagcccctgtgccaaggtcaaaggcgaagatgcaaagtcccaggtatgggccttcacatacacccagmagatcctccaggaggagctgtgcctgtcagtcatcaccttgttccctggcgccccagtggttcttgtcctttgcaagaatggagatgaccgacagcaatg

SEQ ID NO: 28615 - DNA, 201 bp, Homo sapiens
atctgagtgtattaaaccgcacccctacgcatctgatccgggaaatcatattagtggatgacttcagcaatgaccctgatgactgtaaacagctcatcaarttgcccaaggtgaaatgcttgcgcaataatgaacggcaaggtctggtccggtcccggattcggggcgctgacatcgcccagggcaccactctgactttcc

SEQ ID NO: 28616 - DNA, 201 bp, Homo sapiens
acatggacatctggggtggggagaactttgaaatctccttccgagtgtggatgtgcgggggcagcctagagatcgtcccctgcagccgagtggggcacgtsttccggaagaagcacccctacgttttccctgatggaaatgccaacacgtatataaagaacaccaagcggacagctgaagtgtggatggatgaatacaagc

SEQ ID NO: 28617 - DNA, 201 bp, Homo sapiens
cgtatataaagaacaccaagcggacagctgaagtgtggatggatgaatacaagcaatactattacgctgcccggccattcgccctggagaggcccttcggraatgttgagagcagattggacctgaggaagaatctgcgctgccagagcttcaagtggtacctggagaatatctaccctgaactcagcatccccaaggagt

SEQ ID NO: 28618 - DNA, 201 bp, Homo sapiens
tctgcgctgccagagcttcaagtggtacctggagaatatctaccctgaactcagcatccccaaggagtcctccatccagaagggcaatatccgacagagayagaagtgcctggaatctcaaaggcagaacaaccaagaaaccccaaacctaaagttgagcccctgtgccaaggtcaaaggcgaagatgcaaagtcccaggt

SEQ ID NO: 28619 - DNA, 201 bp, Homo sapiens
cgagtgcaccgctcccgccccgccccgccttgccccaacccacgatggtctgggagctgcgcccagggcttggcgctggcggccccgcaacagcaccgagygtttcggtcggcgggcggcggtagcgccccctctcagagccccgctcactcccacctgggctcgctccgagtcggcctgtctgtcgggcccgccctcccc

SEQ ID NO: 28620 - DNA, 201 bp, Homo sapiens
atgttcggtgatggcaccgagaacggcaaggaaatcgtcgtcaacccatgtgagtcctcactcatgagccagcactgggacatggtgagctcttgaggacmcctgccagaagcagcaagggccatggggtggtgcttccctggaccagaacagactggaaactgggcagcaagcagcctgcaaccacctcagacatcctgg

SEQ ID NO: 28621 - DNA, 201 bp, Homo sapiens
aatgttgagagcagattggacctgaggaagaatctgcgctgccagagcttcaagtggtacctggagaatatctaccctgaactcagcatccccaaggagtyctccatccagaagggcaatatccgacagagacagaagtgcctggaatctcaaaggcagaacaaccaagaaaccccaaacctaaagttgagcccctgtgcc

SEQ ID NO: 28622 - DNA, 201 bp, Homo sapiens
cacgtttcgggtcgccctgcaccccccacccaggctcgcttctcttcgaagcgggaagggcgccttgcaggatcctgccgcccctccaaccggatcctggktctagagctccccagagcgaggcgctcgccaggactcctgccccgccaaccctgaccgccggggggtgcccccgggacgtagcgccgcggagaggaagcg

SEQ ID NO: 28623 - DNA, 201 bp, Homo sapiens
atacacccagcagatcctccaggaggagctgtgcctgtcagtcatcaccttgttccctggcgccccagtggttcttgtcctttgcaagaatggagatgacmgacagcaatggaccaaaactggttcccacatcgagcacatagcatcccacctctgcctcgatacagatatgttcggtgatggcaccgagaacggcaagga

SEQ ID NO: 28624 - DNA, 201 bp, Homo sapiens; identical to SEQ ID NO: 28614

SEQ ID NO: 28625 - DNA, 201 bp, Homo sapiens
tccgcagtgtattaaaccgcacccctacgcatctgatccgggaaatcatattagtggatgacttcagcaatgaccctgatgactgtaaacagctcatcaarttgcccaaggtgaaatgcttgcgcaataatgaacggcaaggtctggtccggtcccggattcggggcgctgacatcgcccagggcaccactctgactttcc

SEQ ID NO: 28626 - DNA, 201 bp, Homo sapiens; identical to SEQ ID NO: 28616

SEQ ID NO: 28627 - DNA, 201 bp, Homo sapiens; identical to SEQ ID NO: 28617

SEQ ID NO: 28628 - DNA, 201 bp, Homo sapiens; identical to SEQ ID NO: 28618

SEQ ID NO: 28629 - DNA, 201 bp, Homo sapiens; identical to SEQ ID NO: 28619

SEQ ID NO: 28630 - DNA, 201 bp, Homo sapiens; identical to SEQ ID NO: 28620

SEQ ID NO: 28631 - DNA, 201 bp, Homo sapiens; identical to SEQ ID NO: 28621

SEQ ID NO: 28632 - DNA, 201 bp, Homo sapiens
ttgctgtatgtcatttcccatgtctcttgcaagaagctcagttccatttgcagactcaggtctttcttcaagtcagatgcacactgctggtgtattgcacrgaccttccacccactagcatcatcatcaccttccacaacgaggcccgctccacgctgctcaggaccatccgcagtgtattaaaccgcacccctacgcatc

SEQ ID NO: 28633 - DNA, 201 bp, Homo sapiens; identical to SEQ ID NO: 28622

SEQ ID NO: 28634 - DNA, 201 bp, Homo sapiens; identical to SEQ ID NO: 28623

SEQ ID NO: 28635 - DNA, 201 bp, Homo sapiens; identical to SEQ ID NO: 28614

SEQ ID NO: 28636 - DNA, 201 bp, Homo sapiens; identical to SEQ ID NO: 28625

SEQ ID NO: 28637 - DNA, 201 bp, Homo sapiens; identical to SEQ ID NO: 28616

SEQ ID NO: 28638 - DNA, 201 bp, Homo sapiens; identical to SEQ ID NO: 28617

SEQ ID NO: 28639 - DNA, 201 bp, Homo sapiens; identical to SEQ ID NO: 28618

SEQ ID NO: 28640 - DNA, 201 bp, Homo sapiens; identical to SEQ ID NO: 28619

SEQ ID NO: 28641 - DNA, 201 bp, Homo sapiens; identical to SEQ ID NO: 28620

SEQ ID NO: 28642 - DNA, 201 bp, Homo sapiens; identical to SEQ ID NO: 28621

SEQ ID NO: 28643 - DNA, 201 bp, Homo sapiens
agctgtatgctttcaaccagcgggagagtgagcggatctccagcaatcgggccatcccggacactcgccatctgagatgcacactgctggtgtattgcacrgaccttccacccactagcatcatcatcaccttccacaacgaggcccgctccacgctgctcaggaccatccgcagtgtattaaaccgcacccctacgcatc

SEQ ID NO: 28644 - DNA, 201 bp, Homo sapiens; identical to SEQ ID NO: 28622

SEQ ID NO: 28645 - DNA, 201 bp, Homo sapiens; identical to SEQ ID NO: 28623

SEQ ID NO: 28646 - DNA, 201 bp, Homo sapiens
aagggagtctttggatcctgtccaggagcctgggggccaggcagaggctgatggagatgttccagggcccagaggggaagctgagggccaggcagaggctraaggagatgcccctgggcccagaggggaagctgggggccaggcagaggctgaaggagatgcccccgggcccagaggggaagctgggggccaggcagaggc

SEQ ID NO: 28647 - DNA, 201 bp, Homo sapiens
ggccaggcagaggctgatggagatgttccagggcccagaggggaagctgagggccaggcagaggctaaaggagatgcccctgggcccagaggggaagctgrgggccaggcagaggctgaaggagatgcccccgggcccagaggggaagctgggggccaggcagaggccagggagaatggagaggaggccaaggaacttcca

SEQ ID NO: 28648 - DNA, 201 bp, Homo sapiens
atggcctggagctgctgtccatgttgacagctgctctggcccctggagctgccaactctcctaccaccaacccggtgatattgatagtggacaaagtgctygagacgcaggacctgaatggggatgggctcatgacccctgctgagctcatcaacttcccgggagtagccctcaggcacgtggagcccggagagccccttg

SEQ ID NO: 28649 - DNA, 201 bp, Homo sapiens
gtggacagctggatggcctggagctgctgtccatgttgacagctgctctggcccctggagctgccaactctcctaccaccaacccggtgatattgatagtrgacaaagtgctcgagacgcaggacctgaatggggatgggctcatgacccctgctgagctcatcaacttcccgggagtagccctcaggcacgtggagcccg

SEQ ID NO: 28650 - DNA, 201 bp, Homo sapiens
taccaccaacccggtgatattgatagtggacaaagtgctcgagacgcaggacctgaatggggatgggctcatgacccctgctgagctcatcaacttcccgrgagtagccctcaggcacgtggagcccggagagccccttgctccatctcctcaggagccacaagctgttggaaggcagtccctattagctaaaagcccatt

SEQ ID NO: 28651 - DNA, 201 bp, Homo sapiens
tggagatgttccagggcccagaggggaagctgagggccaggcagaggctaaaggagatgcccctgggcccagaggggaagctgggggccaggcagaggctraaggagatgcccccgggcccagaggggaagctgggggccaggcagaggccagggagaatggagaggaggccaaggaacttccaggggaaacactggagtc

SEQ ID NO: 28652 - DNA, 201 bp, Homo sapiens
ggcccagaggggaagctgagggccaggcagaggctaaaggagatgcccctgggcccagaggggaagctgggggccaggcagaggctgaaggagatgccccygggcccagaggggaagctgggggccaggcagaggccagggagaatggagaggaggccaaggaacttccaggggaaacactggagtctaagaacacccaaa

SEQ ID NO: 28653 - DNA, 201 bp, Homo sapiens
tgcctggtcccagtaggtatcaggtctttctgtgcagctcagggagaccctaagttaaggggcagattaccaataaagaactgaatgaattcatccccccggccacctctctacccgtccagcctgcccagaccctctcagaggaacggggttggggaccgaaaggacagggatgccgcctgcccagtgtttctgggcctc

SEQ ID NO: 28654 - DNA, 201 bp, Homo sapiens
  misc_feature (1)...(201): n = A,T,C or G
atgaccagagtggacagctggatggcctggagctgctgtccatgttgacagctgctctggcccctggagctgccaactctcctaccaccaacccggtgatnttgatagtggacaaagtgctcgagacgcaggacctgaatggggatgggctcatgacccctgctgagctcatcaacttcccgggagtagccctcaggcacg

SEQ ID NO: 28655 - DNA, 201 bp, Homo sapiens
ccaagcagaattggttccatttgacagatgaagaaattgaggcagattgcgttaagtgctgtaccctaaggtgatatgcagctaattaaatggcagatttkaatccaggtctgtctcactctaaagccctttacattatatgctctttacattataaggccttacccaccctatattggagttagccccaattccaatatg

SEQ ID NO: 28656 - DNA, 201 bp, Homo sapiens
gaagatacaggtaccccacgaagtctcagtgccagaacataagccctgaagtgggcaggggaaatgtacgctgggacaaggaccatctctgtgccccctgyctggtcccagtaggtatcaggtctttctgtgcagctcagggagaccctaagttaaggggcagattaccaataaagaactgaatgaattcatccccccggc

SEQ ID NO: 28657 - DNA, 182 bp, Homo sapiens
aattaaatggcagatttgaatccaggtctgtctcactctaaagccctttacattatatgctctttacattataaggccttacccaccctatattggagttrgccccaattccaatatgtgttccagatcggacctccctgaggacagcaacactctgtatcctgggtcacatttgtggctga

SEQ ID NO: 28658 - DNA, 201 bp, Homo sapiens
tggagctgctgtccatgttgacagctgctctggcccctggagctgccaactctcctaccaccaacccggtgatattgatagtggacaaagtgctcgagacscaggacctgaatggggatgggctcatgacccctgctgagctcatcaacttcccgggagtagccctcaggcacgtggagcccggagagccccttgctccat

SEQ ID NO: 28659 - DNA, 201 bp, Homo sapiens
tgccagaacataagccctgaagtgggcaggggaaatgtacgctgggacaaggaccatctctgtgccccctgcctggtcccagtaggtatcaggtctttctrtgcagctcagggagaccctaagttaaggggcagattaccaataaagaactgaatgaattcatccccccggccacctctctacccgtccagcctgcccaga

SEQ ID NO: 28660 - DNA, 201 bp, Homo sapiens; identical to SEQ ID NO: 28646

SEQ ID NO: 28661 - DNA, 201 bp, Homo sapiens; identical to SEQ ID NO: 28647

SEQ ID NO: 28662 - DNA, 201 bp, Homo sapiens; identical to SEQ ID NO: 28648

SEQ ID NO: 28663 - DNA, 201 bp, Homo sapiens; identical to SEQ ID NO: 28649

SEQ ID NO: 28664 - DNA, 201 bp, Homo sapiens; identical to SEQ ID NO: 28650

SEQ ID NO: 28665 - DNA, 201 bp, Homo sapiens; identical to SEQ ID NO: 28651

SEQ ID NO: 28666 - DNA, 201 bp, Homo sapiens; identical to SEQ ID NO: 28652

SEQ ID NO: 28667 - DNA, 201 bp, Homo sapiens; identical to SEQ ID NO: 28653

SEQ ID NO: 28668 - DNA, 201 bp, Homo sapiens; identical to SEQ ID NO: 28654
  misc_feature (1)...(201): n = A,T,C or G

SEQ ID NO: 28669 - DNA, 201 bp, Homo sapiens; identical to SEQ ID NO: 28655

SEQ ID NO: 28670 - DNA, 201 bp, Homo sapiens; identical to SEQ ID NO: 28656

SEQ ID NO: 28671 - DNA, 201 bp, Homo sapiens
aattaaatggcagatttgaatccaggtctgtctcactctaaagccctttacattatatgctctttacattataaggccttacccaccctatattggagttrgccccaattccaatatgtgttccagatcggacctccctgaggacagcaacactctgtatcctgggtcacatttgtggctgacggtgtggactcccagctt

SEQ ID NO: 28672 - DNA, 201 bp, Homo sapiens; identical to SEQ ID NO: 28658

SEQ ID NO: 28673 - DNA, 201 bp, Homo sapiens; identical to SEQ ID NO: 28659

SEQ ID NO: 28674 - DNA, 201 bp, Homo sapiens
cagccaattatgttaaactagcatatctaaagcatttgaatgcattttgtttggtattgtatttattcaataaagtatttaattagtgctaagtgtgaacwggaccctgttgctaagccccagcaagcaatcctaggtagggtttaatccccagtaaaattgccatattgcacatgtcttaatgaagtttgaatgttaaat

SEQ ID NO: 28675 - DNA, 201 bp, Homo sapiens
aacagttttatattaatgttgagagagaggaatggaagttggatacactttgtgacttgtacgagacactgaccattacacaggctgttatttttctcaawacgaggcgcaaggtggactggctgactgagaagatgcatgccagagacttcacagtttctgctctgcatggtgacatggaccagaaggagagagatgtta

SEQ ID NO: 28676 - DNA, 201 bp, Homo sapiens
ttaaactagcatatctaaagcatttgaatgcattttgtttggtattgtatttattcaataaagtatttaattagtgctaagtgtgaactggaccctgttgytaagccccagcaagcaatcctaggtagggtttaatccccagtaaaattgccatattgcacatgtcttaatgaagtttgaatgttaaataaattgtatatt

SEQ ID NO: 28677 - DNA, 201 bp, Homo sapiens
agtagaaaggcctttaaaatttttttagaaagcatttgaatgcattttgtttggtattgtatttattcaataaagtatttaattagtgctaagtgtgaacwggaccctgttgctaagccccagcaagcaatcctaggtagggtttaatccccagtaaaattgccatattgcacatgtcttaatgaagtttgaatgttaaat

SEQ ID NO: 28678 - DNA, 201 bp, Homo sapiens; identical to SEQ ID NO: 28675

SEQ ID NO: 28679 - DNA, 201 bp, Homo sapiens
tttaaaatttttttagaaagcatttgaatgcattttgtttggtattgtatttattcaataaagtatttaattagtgctaagtgtgaactggaccctgttgytaagccccagcaagcaatcctaggtagggtttaatccccagtaaaattgccatattgcacatgtcttaatgaagtttgaatgttaaataaattgtatatt

SEQ ID NO: 28680 - DNA, 201 bp, Homo sapiens; identical to SEQ ID NO: 28677

SEQ ID NO: 28681 - DNA, 201 bp, Homo sapiens; identical to SEQ ID NO: 28675

SEQ ID NO: 28682 - DNA, 201 bp, Homo sapiens; identical to SEQ ID NO: 28679

SEQ ID NO: 28683 - DNA, 201 bp, Homo sapiens
tgtgcaacaagtgtctttggttataaattatgatctacctaccaatcgtgaaaactatattcacaggtgagaagccagcatcttggctgtattgaaaaaamttcatacgtttttctactgtgatttgtatgaaaggtaacatcaaatcaaggaatagattcagtaaagtcagtagtgttcagtaagatgatgtaattaaat

SEQ ID NO: 28684 - DNA, 201 bp, Homo sapiens; identical to SEQ ID NO: 28674

SEQ ID NO: 28685 - DNA, 201 bp, Homo sapiens; identical to SEQ ID NO: 28675

SEQ ID NO: 28686 - DNA, 201 bp, Homo sapiens; identical to SEQ ID NO: 28676

SEQ ID NO: 28687 - DNA, 201 bp, Homo sapiens
attaaatttgtactagggaaggttgatgagaacaaagtgggaaaacttgtaaacattgcccagattgtggacatagggtttttttccacaattgttggtcktaccttatgcttgagcttttagtgatgttcttgtgtccatgtgtttttcttggtgattttttctatagttgggattttcttggtgtcgcctggtagcaat

SEQ ID NO: 28688 - DNA, 201 bp, Homo sapiens; identical to SEQ ID NO: 28674

SEQ ID NO: 28689 - DNA, 201 bp, Homo sapiens; identical to SEQ ID NO: 28675

SEQ ID NO: 28690 - DNA, 201 bp, Homo sapiens; identical to SEQ ID NO: 28676

SEQ ID NO: 28691 - DNA, 201 bp, Homo sapiens; identical to SEQ ID NO: 28677

SEQ ID NO: 28692 - DNA, 201 bp, Homo sapiens; identical to SEQ ID NO: 28675

SEQ ID NO: 28693 - DNA, 201 bp, Homo sapiens; identical to SEQ ID NO: 28679

SEQ ID NO: 28694 - DNA, 201 bp, Homo sapiens; identical to SEQ ID NO: 28677

SEQ ID NO: 28695 - DNA, 201 bp, Homo sapiens; identical to SEQ ID NO: 28675

SEQ ID NO: 28696 - DNA, 201 bp, Homo sapiens; identical to SEQ ID NO: 28679

SEQ ID NO: 28697 - DNA, 201 bp, Homo sapiens
ttgggcagctgaagccctgccattctgcatgagctgatcagcctgtgccacacttcgctcttgaggagctcaacggtctggcagggcagcaggaggctttytgggctctggactccacggatgcgtgggcagaggaatgtgggctatgtagtcataataaattaggacacagagcctggttcctgctggtactttgtacca

SEQ ID NO: 28698 - DNA, 201 bp, Homo sapiens
catgctttgcaagatgggctttgcggtactactagtttgcagtggaacaggtgctccaggaggaacactttgatgcaagccatgtggcccttatgggtggwtcccatggtggcttcatttcctgccacttgattggtcagtacccagagacctacagggcctgcgtggcccggaaccccgtgatcaacatcgcctccatgt

SEQ ID NO: 28699 - DNA, 201 bp, Homo sapiens
agtattaccgtgccctcaagacccggaatgtgcctgttcggctcctgctctatcccaaaagcacccacgcattatcagaggtggaggtggagtcagacagyttcatgaatgctgtgctctggctacgcacacacttgggcagctgaagccctgccattctgcatgagctgatcagcctgtgccacacttcgctcttgagga

SEQ ID NO: 28700 - DNA, 201 bp, Homo sapiens
gaggcggcggctctgtatcggggccttagccgccagcccgcgctgagcgccgcctgcctgggcccggaggtcaccacgcagtacggcggccaataccggayggtgcacactgactgctgagcagagagtctccttcaggcaccatgaaagctgtgctgcgcaaggctggaggcacgggccctggggaagagaagcagttcc

SEQ ID NO: 28701 - DNA, 201 bp, Homo sapiens
ctgcatgagctgatcagcctgtgccacacttcgctcttgaggagctcaacggtctggcagggcagcaggaggctttctgggctctggactccacggatgcrtgggcagaggaatgtgggctatgtagtcataataaattaggacacagagcctggttcctgctggtactttgtaccaaaccatccccaaccccacctccca

SEQ ID NO: 28702 - DNA, 201 bp, Homo sapiens
gggcccctggagatgctggtgtggtgtttgtgggctggtggcatgagcccttccggttgggcatccgcttttgcaccaatcgcaggtcagccctgtattaygtggacctcatcggggggaagtgtgagctcctctcggatgactccctggctgtctcttctccccggctgagcccagaccaatgtcgcattgtctacctgc

SEQ ID NO: 28703 - DNA, 201 bp, Homo sapiens
gcaatgtgggccaccaggatgtgaaggatgtccagtttgcagtggaacaggtgctccaggaggaacactttgatgcaagccatgtggcccttatgggtggwtcccatggtggcttcatttcctgccacttgattggtcagtacccagagacctacagggcctgcgtggcccggaaccccgtgatcaacatcgcctccatgt

SEQ ID NO: 28704 - DNA, 201 bp, Homo sapiens; identical to SEQ ID NO: 28699

SEQ ID NO: 28705 - DNA, 201 bp, Homo sapiens; identical to SEQ ID NO: 28697

SEQ ID NO: 28706 - DNA, 201 bp, Homo sapiens; identical to SEQ ID NO: 28700

SEQ ID NO: 28707 - DNA, 201 bp, Homo sapiens
ggggggccccattcatcctttgtcactgcctggatgctgttcccagccatgctttgcaagatgggctttgcggtactactagtgaactatcgtggctccaygggctttggccaggacagcatcctctccctcccaggcaatgtgggccaccaggatgtgaaggatgtccagtttgcagtggaacaggtgctccaggaggaa

SEQ ID NO: 28708 - DNA, 201 bp, Homo sapiens; identical to SEQ ID NO: 28701

SEQ ID NO: 28709 - DNA, 201 bp, Homo sapiens; identical to SEQ ID NO: 28702

SEQ ID NO: 28710 - DNA, 201 bp, Homo sapiens; identical to SEQ ID NO: 28703

SEQ ID NO: 28711 - DNA, 201 bp, Homo sapiens; identical to SEQ ID NO: 28699

SEQ ID NO: 28712 - DNA, 201 bp, Homo sapiens; identical to SEQ ID NO: 28697

SEQ ID NO: 28713 - DNA, 201 bp, Homo sapiens
gaggcggcggctctgtatcggggccttagccgccagcccgcgctgagcgccgcctgcctgggcccggaggtcaccacgcagtacggcggccaataccggayggtgcacactgagtggacccagagggacctggaacgcatggagaacattcgattctgccgccaatacctggtgttccatgacggggactcagtggtgttt

SEQ ID NO: 28714 - DNA, 201 bp, Homo sapiens; identical to SEQ ID NO: 28707

SEQ ID NO: 28715 - DNA, 201 bp, Homo sapiens; identical to SEQ ID NO: 28701

SEQ ID NO: 28716 - DNA, 201 bp, Homo sapiens; identical to SEQ ID NO: 28702

SEQ ID NO: 28717 - DNA, 201 bp, Homo sapiens
ctcatgaccttgtgaatccagtccacaaacacagagacacgcgtgaagacagctggccagcgggaccttgcgcatactcggttggggattataattccttycaggacccagcagttgtgggtaaagcaggcaagtgggcccccgtagtcaccctggcaggcccccacaggggccaacagtccctcagtgcacatctcactc

SEQ ID NO: 28718 - DNA, 201 bp, Homo sapiens
caaggctgggcctaacccagtctcatgaccttgtgaatccagtccacaaacacagagacacgcgtgaagacagctggccagcgggaccttgcgcatactcrgttggggattataattccttccaggacccagcagttgtgggtaaagcaggcaagtgggcccccgtagtcaccctggcaggcccccacaggggccaacagt

SEQ ID NO: 28719 - DNA, 166 bp, Homo sapiens
ggacccagcagttgtgggtaaagcaggcaagtgggcccccgtagtcaccctggcaggcccccacaggggccaacagtccctcagtgcacatctcactctcmcgcacacgtcctcggtgcttgatgttacactcctggttggagatgacattcagcaaggccacatt

SEQ ID NO: 28720 - DNA, 118 bp, Homo sapiens
cctggcaggcccccacaggggccaacagtccctcagtgcacatctcactctcccgcacacgtcctcggtgcttgatgttacactcctggttggagatgacrttcagcaaggccacatt

SEQ ID NO: 28721 - DNA, 201 bp, Homo sapiens
ctgttcggcatatggcatcaaggctgggcctaacccagtctcatgaccttgtgaatccagtccacaaacacagagacacgcgtgaagacagctggccagcrggaccttgcgcatactcggttggggattataattccttccaggacccagcagttgtgggtaaagcaggcaagtgggcccccgtagtcaccctggcaggcc

SEQ ID NO: 28722 - DNA, 201 bp, Homo sapiens
gacacgcgtgaagacagctggccagcgggaccttgcgcatactcggttggggattataattccttccaggacccagcagttgtgggtaaagcaggcaagtrggcccccgtagtcaccctggcaggcccccacaggggccaacagtccctcagtgcacatctcactctcccgcacacgtcctcggtgcttgatgttacactc

SEQ ID NO: 28723 - DNA, 201 bp, Homo sapiens
gctggccagcgggaccttgcgcatactcggttggggattataattccttccaggacccagcagttgtgggtaaagcaggcaagtgggcccccgtagtcacyctggcaggcccccacaggggccaacagtccctcagtgcacatctcactctcccgcacacgtcctcggtgcttgatgttacactcctggttggagatgaca

SEQ ID NO: 28724 - DNA, 201 bp, Homo sapiens
tactgatgttgggccaggaggaccggcgtgtgcccttcaagcagggcatggagtattaccgtgccctcaagacccggaatgtgcctgttcggcatatggcrtcaaggctgggcctaacccagtctcatgaccttgtgaatccagtccacaaacacagagacacgcgtgaagacagctggccagcgggaccttgcgcatact

SEQ ID NO: 28725 - DNA, 201 bp, Homo sapiens
tatggcatcaaggctgggcctaacccagtctcatgaccttgtgaatccagtccacaaacacagagacacgcgtgaagacagctggccagcgggaccttgcrcatactcggttggggattataattccttccaggacccagcagttgtgggtaaagcaggcaagtgggcccccgtagtcaccctggcaggcccccacagggg

SEQ ID NO: 28726 - DNA, 201 bp, Homo sapiens; identical to SEQ ID NO: 28702

SEQ ID NO: 28727 - DNA, 201 bp, Homo sapiens
atatggcatcaaggctgggcctaacccagtctcatgaccttgtgaatccagtccacaaacacagagacacgcgtgaagacagctggccagcgggaccttgygcatactcggttggggattataattccttccaggacccagcagttgtgggtaaagcaggcaagtgggcccccgtagtcaccctggcaggcccccacaggg

SEQ ID NO: 28728 - DNA, 201 bp, Homo sapiens
cgggaccttgcgcatactcggttggggattataattccttccaggacccagcagttgtgggtaaagcaggcaagtgggcccccgtagtcaccctggcaggsccccacaggggccaacagtccctcagtgcacatctcactctcccgcacacgtcctcggtgcttgatgttacactcctggttggagatgacattcagcaag

SEQ ID NO: 28729 - DNA, 201 bp, Homo sapiens; identical to SEQ ID NO: 28703

SEQ ID NO: 28730 - DNA, 201 bp, Homo sapiens
gccctcaagacccggaatgtgcctgttcggcatatggcatcaaggctgggcctaacccagtctcatgaccttgtgaatccagtccacaaacacagagacamgcgtgaagacagctggccagcgggaccttgcgcatactcggttggggattataattccttccaggacccagcagttgtgggtaaagcaggcaagtgggcc

SEQ ID NO: 28731 - DNA, 201 bp, Homo sapiens
cctcaagacccggaatgtgcctgttcggcatatggcatcaaggctgggcctaacccagtctcatgaccttgtgaatccagtccacaaacacagagacacgygtgaagacagctggccagcgggaccttgcgcatactcggttggggattataattccttccaggacccagcagttgtgggtaaagcaggcaagtgggcccc

SEQ ID NO: 28732 - DNA, 201 bp, Homo sapiens
ctaacccagtctcatgaccttgtgaatccagtccacaaacacagagacacgcgtgaagacagctggccagcgggaccttgcgcatactcggttggggattmtaattccttccaggacccagcagttgtgggtaaagcaggcaagtgggcccccgtagtcaccctggcaggcccccacaggggccaacagtccctcagtgca

SEQ ID NO: 28733 - DNA, 201 bp, Homo sapiens; identical to SEQ ID NO: 28707

SEQ ID NO: 28734 - DNA, 201 bp, Homo sapiens; identical to SEQ ID NO: 28703

SEQ ID NO: 28735 - DNA, 201 bp, Homo sapiens; identical to SEQ ID NO: 28699

SEQ ID NO: 28736 - DNA, 201 bp, Homo sapiens; identical to SEQ ID NO: 28697

SEQ ID NO: 28737 - DNA, 201 bp, Homo sapiens; identical to SEQ ID NO: 28713

SEQ ID NO: 28738 - DNA, 201 bp, Homo sapiens; identical to SEQ ID NO: 28707

SEQ ID NO: 28739 - DNA, 201 bp, Homo sapiens; identical to SEQ ID NO: 28701

SEQ ID NO: 28740 - DNA, 201 bp, Homo sapiens; identical to SEQ ID NO: 28702

SEQ ID NO: 28741 - DNA, 201 bp, Homo sapiens
tgctgggtgcagtagctgcccaggaagtgctgaaggcaatctccaggaagttcatgcctctggaccagtggctttactttgatgccctcgattgtcttccrgaagatggggagctccttcccagtcctgaggactgtgccctgagaggcagccgctatgatgggcaaattgcagtgtttggggctggttttcaggagaaac

SEQ ID NO: 28742 - DNA, 201 bp, Homo sapiens
gcagctgcccggggcctgaacccagacttacaggtgatcccgctcacctacccactggatcccaccacagagcacatctatggggataactttttctcccrtgtggatggtgtggctgctgccctggacagtttccaggcccggcgctatgtggctgctcgttgcacccactatctgaagccactgctggaggcaggcaca

SEQ ID NO: 28743 - DNA, 201 bp, Homo sapiens
aggagccaggaagagagctgtgaccagcagcgtcccttattcgcttggccttggttcctgtttgcactggctacagcagggcactggcccctactgtcacygccacctacacaaagaccctatctctgagcgctgcagcctactgttcagccccaggtttgaggatggatgccctggacgcttcgaagctactggatgagg

SEQ ID NO: 28744 - DNA, 201 bp, Homo sapiens
tgctagtaatctagagctggcttcggcttctgctgagtttggccctgagcagcagaaggaactgaacaaagccctggaagtctggagtgtgggccctcccstgaagcctctgatgtttgagaaggatgatgacagcaacttccatgtggactttgtggtagcggcagctagcctgagatgtcagaactacgggattccacc

SEQ ID NO: 28745 - DNA, 201 bp, Homo sapiens
cctgagcagcagaaggaactgaacaaagccctggaagtctggagtgtgggccctcccctgaagcctctgatgtttgagaaggatgatgacagcaacttccrtgtggactttgtggtagcggcagctagcctgagatgtcagaactacgggattccaccggtcaaccgtgcccagagcaagcgaattgtgggccagattatc

SEQ ID NO: 28746 - DNA, 201 bp, Homo sapiens
cttggaaaggagcagagccgaggcctctcaagagctcttggctcagctcaacagagctgtccaggtcgtcgtgcacacgggtgacatcactgaggacctgytgttggacttccaggtggtggtgctgactgctgcaaagctggaggagcagctgaaggtgggcaccttgtgtcataagcatggagtttgctttctggcggc

SEQ ID NO: 28747 - DNA, 201 bp, Homo sapiens
ggttcagcagctgacaggccaggcacctgctcctgggcagcgggtgttggtgctagagctgagctgtgagggtgacgacgaggacactgccttcccacctytgcactatgagctgtgacaaggcagccaccctgtcacctagctcaatggagccccggatcccaagccctgcattgtaagcccacagtaggcactcaataa

SEQ ID NO: 28748 - DNA, 201 bp, Homo sapiens
acctgcccctcagggtgacagaactggttcagcagctgacaggccaggcacctgctcctgggcagcgggtgttggtgctagagctgagctgtgagggtgaygacgaggacactgccttcccacctctgcactatgagctgtgacaaggcagccaccctgtcacctagctcaatggagccccggatcccaagccctgcattg

SEQ ID NO: 28749 - DNA, 201 bp, Homo sapiens
tgaggagctgtattcaagacagctgtatgtgctgggctcacctgccatgcagaggattcagggagccagggtcctggtgtcaggcctgcagggcctggggrccgaggtggccaagaacttggttctgatgggtgtgggcagcctcactctgcatgatccccaccccacctgctggtccgacctggctgcccagtttctcct

SEQ ID NO: 28750 - DNA, 201 bp, Homo sapiens
ccatgtggtggcccagagctcccaggaagttcaccatgcccactgcctgcatcaggccttctgtgcactgcacaagttccagcacctccatggccggccascccagccctgggatcctgttgatgcagagactgtggtgggcctggcccgggacctggaaccactgaagcggacagaggaagagccactggaagagccact

SEQ ID NO: 28751 - DNA, 201 bp, Homo sapiens
ggtgcagtagctgcccaggaagtgctgaaggtgggcagaggcataggaagttcatgcctctggaccagtggctttactttgatgccctcgattgtcttccrgaagatggggagctccttcccagtcctgaggactgtgccctgagaggcagccgctatgatgggcaaattgcagtgtttggggctggttttcaggagaaac

SEQ ID NO: 28752 - DNA, 201 bp, Homo sapiens; identical to SEQ ID NO: 28742

SEQ ID NO: 28753 - DNA, 201 bp, Homo sapiens; identical to SEQ ID NO: 28743

SEQ ID NO: 28754 - DNA, 201 bp, Homo sapiens; identical to SEQ ID NO: 28744

SEQ ID NO: 28755 - DNA, 201 bp, Homo sapiens; identical to SEQ ID NO: 28745

SEQ ID NO: 28756 - DNA, 201 bp, Homo sapiens; identical to SEQ ID NO: 28746

SEQ ID NO: 28757 - DNA, 201 bp, Homo sapiens; identical to SEQ ID NO: 28747

SEQ ID NO: 28758 - DNA, 201 bp, Homo sapiens; identical to SEQ ID NO: 28748

SEQ ID NO: 28759 - DNA, 201 bp, Homo sapiens; identical to SEQ ID NO: 28749

SEQ ID NO: 28760 - DNA, 201 bp, Homo sapiens; identical to SEQ ID NO: 28750

SEQ ID NO: 28761 - DNA, 201 bp, Homo sapiens
ggggaagtttcctccgaagctgcgctcctggaacagcagcacctgcaagcgcccggcagcggcccgcgaggttactttatggaattgggctcttagagaayaagaaaagactgaagttttacgggaaaacaaatcatgtggtcttcagattctgaaataaggagaaatgcagccatctgaaatggtcatgaaccccaaaca

SEQ ID NO: 28762 - DNA, 201 bp, Homo sapiens
tctttccttcaggagttttgcaagaaatacggtggggtgagtcatcatcagtcacatctttttcatacagtatccagaatctatgtagaagataaacacamaatcttatattgtgaggtacctaaggctggctgttccaattggaaaagaattctgatggtactaaatggattggcttcctctgcatacaacatctcccac

SEQ ID NO: 28763 - DNA, 201 bp, Homo sapiens
caccaaccagaaccccaagtttcacatgcctgaggatgtacgagaaaaaaaggaaaatcttctactcaattctgagagatctactaggctcttaacaaagmccagtcattcacaaggaggggatcaagctttaagtaagtccacagggtcaccaacagagaagttgattgaaaaacgtcaaggagctaagactgtttttaa

SEQ ID NO: 28764 - DNA, 201 bp, Homo sapiens
ctgtgctgatatttggagtagctgggctactcctcttcatgtatttgcaagtctggattgaagaacaacatacagggagagtggagaagagaagagaacamaaagtaacttcaggatggggaccagtgaagtacttgcggcctgtacccagaatcatgagtacagaaaaaatccaggaacatatcaccaaccagaacccca

SEQ ID NO: 28765 - DNA, 201 bp, Homo sapiens
gatgtacgagaaaaaaaggaaaatcttctactcaattctgagagatctactaggctcttaacaaagaccagtcattcacaaggaggggatcaagctttaartaagtccacagggtcaccaacagagaagttgattgaaaaacgtcaaggagctaagactgtttttaacaagttcagcaacatgaattggccagtggacatt

SEQ ID NO: 28766 - DNA, 201 bp, Homo sapiens; identical to SEQ ID NO: 28762

SEQ ID NO: 28767 - DNA, 196 bp, Homo sapiens
aacagaaccccaagtttcacatgcctgaggatgtacgagaaaaaaaggaaaatcttctactcaattctgagagatctactaggctcttaacaaagmccagtcattcacaaggaggggatcaagctttaagtaagtccacagggtcaccaacagagaagttgattgaaaaacgtcaaggagctaagactgtttttaa

SEQ ID NO: 28768 - DNA, 201 bp, Homo sapiens; identical to SEQ ID NO: 28765

SEQ ID NO: 28769 - DNA, 201 bp, Homo sapiens
aggcagcgagggctgagccccgggacgcgcggaccggctggcccgaggagccggccccggagacgcagttcaagcgccgcagctgccagatggagttcgargagggcatggtggaggggcgcgcgcgcggcgaggagctggccgccctgggcaagcaggcgagcttctcgggcagcgtggaggtcatcgaggtgtcctgac

SEQ ID NO: 28770 - DNA, 201 bp, Homo sapiens
gccccaccatggctggggaccggctcccgaggaaggtgatggatgccaagaagctggccagcctgctgcggggcgggcctggggggccgctggtcatcgayagccgctccttcgtggagtacaacagctggcatgtgctcagctccgtcaacatctgctgctccaagctggtgaagcggcggctgcagcagggcaaggtga

SEQ ID NO: 28771 - DNA, 201 bp, Homo sapiens
cactgtgggaagaggccaggggcttggccggagaggcagcccagggcaggacccagtcctgagtcctggagcagggccagggaggcgcccatcccgccccrgccagccgccctctctgctgtttcttctatttgttcttcttttcacccacagctctgtgttcctgtcatccctcctttcagcaaaagtcctgttcccgtt

SEQ ID NO: 28772 - DNA, 201 bp, Homo sapiens
gcggaccggctggcccgaggagccggccccggagacgcagttcaagcgccgcagctgccagatggagttcgaggagggcatggtggaggggcgcgcgcgcrgcgaggagctggccgccctgggcaagcaggcgagcttctcgggcagcgtggaggtcatcgaggtgtcctgacccctccgctgccctcggccccgccgccc

SEQ ID NO: 28773 - DNA, 201 bp, Homo sapiens
tgggacccctgcccttcagatgtcctagggtctaggagtggggccagtcactgtgggaagaggccaggggcttggccggagaggcagcccagggcaggacycagtcctgagtcctggagcagggccagggaggcgcccatcccgccccggccagccgccctctctgctgtttcttctatttgttcttcttttcacccacag

SEQ ID NO: 28774 - DNA, 201 bp, Homo sapiens
cctttcccagggtgctctctctctaggtggcatgccagcccccaaacacaagtggcttttgggcccaggtgggtcagcctgctgcccctgccccatacccsctcgggccattgggacccctgcccttcagatgtcctagggtctaggagtggggccagtcactgtgggaagaggccaggggcttggccggagaggcagccc

SEQ ID NO: 28775 - DNA, 201 bp, Homo sapiens
ggcattgggcttcatggtgccagggtgttcagaggggctgagaaatagaacagtgtgtgtaggggcttcgggcagggggttctggaacgtcagatgaggtrcagcccaggggaggacagaggtgttagtgcccccaactcctgccagagccccagtccagccacagagtggctcagaaaggccattcctagagggctgcgg

SEQ ID NO: 28776 - DNA, 201 bp, Homo sapiens
ttttttatttatttaagctgttcattctggcaatgatttggcaacagtgcgggtggtcctcgagctctatttttactgtctggtatttaaactgaaacatrcgtttctaagcaatacgaggccaccttcagtcgcaagctgggtgccaggcctggggcccctcccagttcccccgccccaggaaacactgctgacctttgc

SEQ ID NO: 28777 - DNA, 201 bp, Homo sapiens
agccagcaggggggcgaaggtcctgtgttggccactgcctcctccagtgctgcaggaggcgggctgaggccccacctggtggctttcacctgacccagccmtgagtcctctccaagcctctctccggcccctcccacctggccactgcctcctccagtgctgcgggaggcgggccagggccccacctggtggctttcacct

SEQ ID NO: 28778 - DNA, 201 bp, Homo sapiens
ccggccagccgccctctctgctgtttcttctatttgttcttcttttcacccacagctctgtgttcctgtcatccctcctttcagcaaaagtcctgttcccrttccctctgtccccacccactcctgttcccccaagaaaataagctatcgttgtatttgcaatctatggattagaggtttaagtatttattattattggtt

SEQ ID NO: 28779 - DNA, 201 bp, Homo sapiens
tgtgttcctgtcatccctcctttcagcaaaagtcctgttcccgttccctctgtccccacccactcctgttcccccaagaaaataagctatcgttgtatttrcaatctatggattagaggtttaagtatttattattattggttaattattattaattatgtaaatttgcctcccatatgtctgttgcgttgggtttctgag

SEQ ID NO: 28780 - DNA, 201 bp, Homo sapiens; identical to SEQ ID NO: 28769

SEQ ID NO: 28781 - DNA, 201 bp, Homo sapiens; identical to SEQ ID NO: 28770

SEQ ID NO: 28782 - DNA, 201 bp, Homo sapiens; identical to SEQ ID NO: 28771

SEQ ID NO: 28783 - DNA, 201 bp, Homo sapiens; identical to SEQ ID NO: 28772

SEQ ID NO: 28784 - DNA, 201 bp, Homo sapiens; identical to SEQ ID NO: 28773

SEQ ID NO: 28785 - DNA, 201 bp, Homo sapiens; identical to SEQ ID NO: 28774

SEQ ID NO: 28786 - DNA, 201 bp, Homo sapiens; identical to SEQ ID NO: 28775

SEQ ID NO: 28787 - DNA, 201 bp, Homo sapiens; identical to SEQ ID NO: 28776

SEQ ID NO: 28788 - DNA, 201 bp, Homo sapiens; identical to SEQ ID NO: 28777

SEQ ID NO: 28789 - DNA, 201 bp, Homo sapiens; identical to SEQ ID NO: 28778

SEQ ID NO: 28790 - DNA, 201 bp, Homo sapiens; identical to SEQ ID NO: 28779

SEQ ID NO: 28791 - DNA, 201 bp, Homo sapiens; identical to SEQ ID NO: 28769

SEQ ID NO: 28792 - DNA, 201 bp, Homo sapiens; identical to SEQ ID NO: 28770

SEQ ID NO: 28793 - DNA, 201 bp, Homo sapiens; identical to SEQ ID NO: 28771

SEQ ID NO: 28794 - DNA, 201 bp, Homo sapiens; identical to SEQ ID NO: 28772

SEQ ID NO: 28795 - DNA, 201 bp, Homo sapiens; identical to SEQ ID NO: 28773

SEQ ID NO: 28796 - DNA, 201 bp, Homo sapiens; identical to SEQ ID NO: 28774

SEQ ID NO: 28797 - DNA, 201 bp, Homo sapiens; identical to SEQ ID NO: 28775

SEQ ID NO: 28798 - DNA, 201 bp, Homo sapiens; identical to SEQ ID NO: 28776

SEQ ID NO: 28799 - DNA, 201 bp, Homo sapiens; identical to SEQ ID NO: 28777

SEQ ID NO: 28800 - DNA, 201 bp, Homo sapiens; identical to SEQ ID NO: 28778

SEQ ID NO: 28801 - DNA, 201 bp, Homo sapiens; identical to SEQ ID NO: 28779

SEQ ID NO: 28802 - DNA, 201 bp, Homo sapiens
aaatgtctgttgattacatttctttctcagctcacacggattaccagcaaaccagtgaatttattcgtgctttgaaaccgcctcatgtgattttagtccayggagaacagaatgaaatggccagattgaaagcagcactgattcgagaatatgaagataacgatgaagttcacatagaggttcataatcctcggaatacag

SEQ ID NO: 28803 - DNA, 201 bp, Homo sapiens
tgccataccaacattagcaccaaggccatgcgggagaatggtctgaaatacattgaggaggccatcaagaaactaagcaagcaacagcagtaccacatccrcattcccatgaaacttctaacatcaacgacttttctgctcttatagcccatcatagtgccagcatacacattccccagactgttggccaggagaagaagg

SEQ ID NO: 28804 - DNA, 201 bp, Homo sapiens
tgagaaagtccaggccatgtatatctgaatcgatggtactcaagcaagactgcgctgcaagtgaacccaagcgtgtggaagagttacctgagtagaatttyggtggctctagtactttgaaggttccaacagtgacatgtatctcatgcctgctgccatgttttgggaccccttccacaaggacctccacaagctggtgtt

SEQ ID NO: 28805 - DNA, 201 bp, Homo sapiens
ggcccctcaggggcaaggacggcagggattggaacgagggctctggaaggactgttcagccctatgcctaagacccctatgctggggacactacaggcacrcagaggaatagcagggccaccctcagagctcacacatccacgaacaaatgaaggctgaggaggtttctaaacctaaagtccatgagtgtgcacttcaatc

SEQ ID NO: 28806 - DNA, 201 bp, Homo sapiens
tcaagatgatcaggaacaccaggacgagggccgtctcacctcactcggaccacatggagacctcccttcaaaatgggagccatgtcctgccccaccaagcsctgtctgaagtggagcttccccgcctgtgctccctccacagtcccggaaagcccagcggcaaaggcagctttgtcccagctctgccaccctcctgctcac

SEQ ID NO: 28807 - DNA, 201 bp, Homo sapiens
ccctcaggggcaaggacggcagggattggaacgagggctctggaaggactgttcagccctatgcctaagacccctatgctggggacactacaggcacacasaggaatagcagggccaccctcagagctcacacatccacgaacaaatgaaggctgaggaggtttctaaacctaaagtccatgagtgtgcacttcaatccag

SEQ ID NO: 28808 - DNA, 201 bp, Homo sapiens
tgaccagccgaggagtttgtgtctgcatcagtactgcttttgaggggaacctattggattcctattttgtggaccttgtcatacagaaaccactccggatwcatcaccattcagtcccagtcttcattcccctggaagagatagctgcaaaatatttacagaccaacatccagcacttcctgttcagtctctgcgagtacc

SEQ ID NO: 28809 - DNA, 201 bp, Homo sapiens
ttggttttgaagacgtggatggcgggaattctcgcttctggcctgggtgttttagctcacttggaaaggctagagacccaagtgagcagatcccgtaaacrgtctgaagagctgcagagcgtgcaggcccaggaaggtgctcttggaaccaagattcataaactaaggcgtctgcgagatgagctgagggctgtggtgcgg

SEQ ID NO: 28810 - DNA, 201 bp, Homo sapiens
acttcatgggaggagcaacgagcatctcatgaaactctgttctgtacgaagcccttgcatcaagtgtttgcctcatttacaagaaaaggagaaaagttggwtatgagtctggtctcctaatagattgttttcactgcactgggagcacatcagagaaataaatcccccctcccctgccaggtgaaaggaaatattgcactt

SEQ ID NO: 28811 - DNA, 201 bp, Homo sapiens
aggcgtctgcgagatgagctgagggctgtggtgcggcaccggcgagccagcgtgaaagcatgtattgccaatgtagaacccaaccaaacagtggagatcartgagcaagaagcattggaagagaaattggaaaatgtgaaagccattctgcaggcatatcattttacaggcctcagtggtaaactgaccagccgaggagtt

SEQ ID NO: 28812 - DNA, 201 bp, Homo sapiens
gtgactttgcagccctcctgactgggcccttgcagagaaacccactgtgtaacttgctgtcatttacttacaaactggatccagggggtcagtccttcccrttctgtgctagattgctgtataaggacctcacagcaactcttcccactgacgtcaccgtgacatgtcaaggagtggaagtattatccacttcatgggagg

SEQ ID NO: 28813 - DNA, 201 bp, Homo sapiens; identical to SEQ ID NO: 28805

SEQ ID NO: 28814 - DNA, 201 bp, Homo sapiens; identical to SEQ ID NO: 28806

SEQ ID NO: 28815 - DNA, 201 bp, Homo sapiens; identical to SEQ ID NO: 28807

SEQ ID NO: 28816 - DNA, 201 bp, Homo sapiens; identical to SEQ ID NO: 28808

SEQ ID NO: 28817 - DNA, 201 bp, Homo sapiens
atggagcaggcgaaccctttacgtccagatggcgagtccaaaggaggtgttttagctcacttggaaaggctagagacccaagtgagcagatcccgtaaacrgtctgaagagctgcagagcgtgcaggcccaggaaggtgctcttggaaccaagattcataaactaaggcgtctgcgagatgagctgagggctgtggtgcgg

SEQ ID NO: 28818 - DNA, 201 bp, Homo sapiens; identical to SEQ ID NO: 28810

SEQ ID NO: 28819 - DNA, 201 bp, Homo sapiens; identical to SEQ ID NO: 28811

SEQ ID NO: 28820 - DNA, 201 bp, Homo sapiens; identical to SEQ ID NO: 28812

SEQ ID NO: 28821 - DNA, 201 bp, Homo sapiens; identical to SEQ ID NO: 28805

SEQ ID NO: 28822 - DNA, 201 bp, Homo sapiens; identical to SEQ ID NO: 28806

SEQ ID NO: 28823 - DNA, 201 bp, Homo sapiens; identical to SEQ ID NO: 28807

SEQ ID NO: 28824 - DNA, 201 bp, Homo sapiens; identical to SEQ ID NO: 28808

SEQ ID NO: 28825 - DNA, 201 bp, Homo sapiens; identical to SEQ ID NO: 28817

SEQ ID NO: 28826 - DNA, 201 bp, Homo sapiens; identical to SEQ ID NO: 28810

SEQ ID NO: 28827 - DNA, 201 bp, Homo sapiens; identical to SEQ ID NO: 28811

SEQ ID NO: 28828 - DNA, 201 bp, Homo sapiens; identical to SEQ ID NO: 28812

SEQ ID NO: 28829 - DNA, 201 bp, Homo sapiens
gtggtagcctctgagctaggctatgtgttccaagccatcacccttacccgacaacgactggctggacgtgtgccgctgattggctttgctggtgccccatrgaccctgatgacatacatggttgagggtggtggctcaagcaccatggctcaggccaagcgctggctctatcagagacctcaggctagtcaccagctgctt

SEQ ID NO: 28830 - DNA, 201 bp, Homo sapiens
gcctctgagctaggctatgtgttccaagccatcacccttacccgacaacgactggctggacgtgtgccgctgattggctttgctggtgccccatggacccwgatgacatacatggttgagggtggtggctcaagcaccatggctcaggccaagcgctggctctatcagagacctcaggctagtcaccagctgcttcgcatc

SEQ ID NO: 28831 - DNA, 201 bp, Homo sapiens
ctgatgctctggtcccatatctggtaggacaagtggtggctggtgcccaggcattgcagctgtttgagtcccatgcagggcatcttggcccacagctcttmaacaagtttgcactgccttacatccgtgatgtggccaagcaagtgaaggccaggttgcgggaggcaggcctggcaccagtgcccatgatcatctttgcta

SEQ ID NO: 28832 - DNA, 201 bp, Homo sapiens
ccattaagagaagagcaggacctagaacgcctacgggatccagaagtggtagcctctgagctaggctatgtgttccaagccatcacccttacccgacaacsactggctggacgtgtgccgctgattggctttgctggtgccccatggaccctgatgacatacatggttgagggtggtggctcaagcaccatggctcaggcc

SEQ ID NO: 28833 - DNA, 201 bp, Homo sapiens
ggctatgtgttccaagccatcacccttacccgacaacgactggctggacgtgtgccgctgattggctttgctggtgccccatggaccctgatgacatacakggttgagggtggtggctcaagcaccatggctcaggccaagcgctggctctatcagagacctcaggctagtcaccagctgcttcgcatcctcactgatgct

SEQ ID NO: 28834 - DNA, 201 bp, Homo sapiens
accctgatgacatacatggttgagggtggtggctcaagcaccatggctcaggccaagcgctggctctatcagagacctcaggctagtcaccagctgcttcscatcctcactgatgctctggtcccatatctggtaggacaagtggtggctggtgcccaggcattgcagctgtttgagtcccatgcagggcatcttggccca

SEQ ID NO: 28835 - DNA, 201 bp, Homo sapiens
caccatggctcaggccaagcgctggctctatcagagacctcaggctagtcaccagctgcttcgcatcctcactgatgctctggtcccatatctggtaggayaagtggtggctggtgcccaggcattgcagctgtttgagtcccatgcagggcatcttggcccacagctcttcaacaagtttgcactgccttacatccgtga

SEQ ID NO: 28836 - DNA, 201 bp, Homo sapiens
tctggtcccatatctggtaggacaagtggtggctggtgcccaggcattgcagctgtttgagtcccatgcagggcatcttggcccacagctcttcaacaagyttgcactgccttacatccgtgatgtggccaagcaagtgaaggccaggttgcgggaggcaggcctggcaccagtgcccatgatcatctttgctaaggatgg

SEQ ID NO: 28837 - DNA, 201 bp, Homo sapiens
cagagacctcaggctagtcaccagctgcttcgcatcctcactgatgctctggtcccatatctggtaggacaagtggtggctggtgcccaggcattgcagcwgtttgagtcccatgcagggcatcttggcccacagctcttcaacaagtttgcactgccttacatccgtgatgtggccaagcaagtgaaggccaggttgcgg

SEQ ID NO: 28838 - DNA, 201 bp, Homo sapiens
acctcaggctagtcaccagctgcttcgcatcctcactgatgctctggtcccatatctggtaggacaagtggtggctggtgcccaggcattgcagctgtttragtcccatgcagggcatcttggcccacagctcttcaacaagtttgcactgccttacatccgtgatgtggccaagcaagtgaaggccaggttgcgggaggc

SEQ ID NO: 28839 - DNA, 201 bp, Homo sapiens
cagctcttcaacaagtttgcactgccttacatccgtgatgtggccaagcaagtgaaggccaggttgcgggaggcaggcctggcaccagtgcccatgatcayctttgctaaggatgggcattttgccctggaggagctggcccaagctggctatgaggtggttgggcttgactggacagtggccccaaagaaagcccgggag

SEQ ID NO: 28840 - DNA, 201 bp, Homo sapiens
tggattgagctcgcagttacagacagctgaccatggaagcgaatgggttgggacctcagggttttccggagctgaagaatgacacattcctgcgagcagcytggggagaggaaacagactacactcccgtttggtgcatgcgccaggcaggccgttacttaccagagtttagggaaacccgggctgcccaggactttttca

SEQ ID NO: 28841 - DNA, 201 bp, Homo sapiens
gatcatctttgctaaggatgggcattttgccctggaggagctggcccaagctggctatgaggtggttgggcttgactggacagtggccccaaagaaagccsgggagtgtgtggggaagacggtgacattgcagggcaacctggacccctgtgccttgtatgcatctgaggaggagatcgggcagttggtgaagcagatgct

SEQ ID NO: 28842 - DNA, 201 bp, Homo sapiens
gaggtggttgggcttgactggacagtggccccaaagaaagcccgggagtgtgtggggaagacggtgacattgcagggcaacctggacccctgtgccttgtrtgcatctgaggaggagatcgggcagttggtgaagcagatgctggatgactttggaccacatcgctacattgccaacctgggccatgggctttatcctgac

SEQ ID NO: 28843 - DNA, 201 bp, Homo sapiens
caggctagtcaccagctgcttcgcatcctcactgatgctctggtcccatatctggtaggacaagtggtggctggtgcccaggcattgcagctgtttgagtyccatgcagggcatcttggcccacagctcttcaacaagtttgcactgccttacatccgtgatgtggccaagcaagtgaaggccaggttgcgggaggcaggc

SEQ ID NO: 28844 - DNA, 201 bp, Homo sapiens
taaacactcacgtctgcttcgacagaactgagtgtatacctttaccctcaagtaccactaacacagatgattgatcgtttccaggacaataaaagtttcgragttgaactattgtgtagttttgtttgtgaaagattgtgcccatatcctcagttcttcttagcctctgctccttccctgggaaccctctctatatcctct

SEQ ID NO: 28845 - DNA, 201 bp, Homo sapiens
acctagaacgcctacgggatccagaagtggtagcctctgagctaggctatgtgttccaagccatcacccttacccgacaacgactggctggacgtgtgccrctgattggctttgctggtgccccatggaccctgatgacatacatggttgagggtggtggctcaagcaccatggctcaggccaagcgctggctctatcaga

SEQ ID NO: 28846 - DNA, 201 bp, Homo sapiens
gtgacattgcagggcaacctggacccctgtgccttgtatgcatctgaggaggagatcgggcagttggtgaagcagatgctggatgactttggaccacatcrctacattgccaacctgggccatgggctttatcctgacatggacccagaacatgtgggcgcctttgtggatgctgtgcataaacactcacgtctgcttcga

SEQ ID NO: 28847 - DNA, 201 bp, Homo sapiens
ttgcagggcaacctggacccctgtgccttgtatgcatctgaggaggagatcgggcagttggtgaagcagatgctggatgactttggaccacatcgctacaytgccaacctgggccatgggctttatcctgacatggacccagaacatgtgggcgcctttgtggatgctgtgcataaacactcacgtctgcttcgacagaac

SEQ ID NO: 28848 - DNA, 201 bp, Homo sapiens
gggcgcctttgtggatgctgtgcataaacactcacgtctgcttcgacagaactgagtgtatacctttaccctcaagtaccactaacacagatgattgatcktttccaggacaataaaagtttcggagttgaactattgtgtagttttgtttgtgaaagattgtgcccatatcctcagttcttcttagcctctgctccttcc

SEQ ID NO: 28849 - DNA, 201 bp, Homo sapiens
gggccatgggctttatcctgacatggacccagaacatgtgggcgcctttgtggatgctgtgcataaacactcacgtctgcttcgacagaactgagtgtatmcctttaccctcaagtaccactaacacagatgattgatcgtttccaggacaataaaagtttcggagttgaactattgtgtagttttgtttgtgaaagattg

SEQ ID NO: 28850 - DNA, 201 bp, Homo sapiens
ggcagttggtgaagcagatgctggatgactttggaccacatcgctacattgccaacctgggccatgggctttatcctgacatggacccagaacatgtgggsgcctttgtggatgctgtgcataaacactcacgtctgcttcgacagaactgagtgtatacctttaccctcaagtaccactaacacagatgattgatcgttt

SEQ ID NO: 28851 - DNA, 201 bp, Homo sapiens
gacagtggccccaaagaaagcccgggagtgtgtggggaagacggtgacattgcagggcaacctggacccctgtgccttgtatgcatctgaggaggagatcrggcagttggtgaagcagatgctggatgactttggaccacatcgctacattgccaacctgggccatgggctttatcctgacatggacccagaacatgtggg

SEQ ID NO: 28852 - DNA, 201 bp, Homo sapiens
gtggtggctcaagcaccatggctcaggccaagcgctggctctatcagagacctcaggctagtcaccagctgcttcgcatcctcactgatgctctggtcccrtatctggtaggacaagtggtggctggtgcccaggcattgcagctgtttgagtcccatgcagggcatcttggcccacagctcttcaacaagtttgcactgc

SEQ ID NO: 28853 - DNA, 201 bp, Homo sapiens
cccagagccattaagagaagagcaggacctagaacgcctacgggatccagaagtggtagcctctgagctaggctatgtgttccaagccatcacccttaccygacaacgactggctggacgtgtgccgctgattggctttgctggtgccccatggaccctgatgacatacatggttgagggtggtggctcaagcaccatggc

SEQ ID NO: 28854 - DNA, 201 bp, Homo sapiens
aacctgggccatgggctttatcctgacatggacccagaacatgtgggcgcctttgtggatgctgtgcataaacactcacgtctgcttcgacagaactgagygtatacctttaccctcaagtaccactaacacagatgattgatcgtttccaggacaataaaagtttcggagttgaactattgtgtagttttgtttgtgaaa

SEQ ID NO: 28855 - DNA, 201 bp, Homo sapiens
caacctgggccatgggctttatcctgacatggacccagaacatgtgggcgcctttgtggatgctgtgcataaacactcacgtctgcttcgacagaactgastgtatacctttaccctcaagtaccactaacacagatgattgatcgtttccaggacaataaaagtttcggagttgaactattgtgtagttttgtttgtgaa

SEQ ID NO: 28856 - DNA, 201 bp, Homo sapiens
caacctggacccctgtgccttgtatgcatctgaggaggagatcgggcagttggtgaagcagatgctggatgactttggaccacatcgctacattgccaacytgggccatgggctttatcctgacatggacccagaacatgtgggcgcctttgtggatgctgtgcataaacactcacgtctgcttcgacagaactgagtgta

SEQ ID NO: 28857 - DNA, 201 bp, Homo sapiens
gggttgggacctcagggttttccggagctgaagaatgacacattcctgcgagcagcctggggagaggaaacagactacactcccgtttggtgcatgcgccrggcaggccgttacttaccagagtttagggaaacccgggctgcccaggactttttcagcacgtgtcgctctcctgaggcctgctgtgaactgactctgcag

SEQ ID NO: 28858 - DNA, 201 bp, Homo sapiens
atatctggtaggacaagtggtggctggtgcccaggcattgcagctgtttgagtcccatgcagggcatcttggcccacagctcttcaacaagtttgcactgycttacatccgtgatgtggccaagcaagtgaaggccaggttgcgggaggcaggcctggcaccagtgcccatgatcatctttgctaaggatgggcattttgc

SEQ ID NO: 28859 - DNA, 201 bp, Homo sapiens
tgagctcgcagttacagacagctgaccatggaagcgaatgggttgggacctcagggttttccggagctgaagaatgacacattcctgcgagcagcctgggragaggaaacagactacactcccgtttggtgcatgcgccaggcaggccgttacttaccagagtttagggaaacccgggctgcccaggactttttcagcacg

SEQ ID NO: 28860 - DNA, 201 bp, Homo sapiens
ccagagccattaagagaagagcaggacctagaacgcctacgggatccagaagtggtagcctctgagctaggctatgtgttccaagccatcacccttacccracaacgactggctggacgtgtgccgctgattggctttgctggtgccccatggaccctgatgacatacatggttgagggtggtggctcaagcaccatggct

SEQ ID NO: 28861 - DNA, 201 bp, Homo sapiens
gatgacatacatggttgagggtggtggctcaagcaccatggctcaggccaagcgctggctctatcagagacctcaggctagtcaccagctgcttcgcatcytcactgatgctctggtcccatatctggtaggacaagtggtggctggtgcccaggcattgcagctgtttgagtcccatgcagggcatcttggcccacagct

SEQ ID NO: 28862 - DNA, 201 bp, Homo sapiens
catgcagggcatcttggcccacagctcttcaacaagtttgcactgccttacatccgtgatgtggccaagcaagtgaaggccaggttgcgggaggcaggccwggcaccagtgcccatgatcatctttgctaaggatgggcattttgccctggaggagctggcccaagctggctatgaggtggttgggcttgactggacagtg

SEQ ID NO: 28863 - DNA, 201 bp, Homo sapiens
tgccttacatccgtgatgtggccaagcaagtgaaggccaggttgcgggaggcaggcctggcaccagtgcccatgatcatctttgctaaggatgggcatttwgccctggaggagctggcccaagctggctatgaggtggttgggcttgactggacagtggccccaaagaaagcccgggagtgtgtggggaagacggtgacat

SEQ ID NO: 28864 - DNA, 201 bp, Homo sapiens
gatccagaagtggtagcctctgagctaggctatgtgttccaagccatcacccttacccgacaacgactggctggacgtgtgccgctgattggctttgctgrtgccccatggaccctgatgacatacatggttgagggtggtggctcaagcaccatggctcaggccaagcgctggctctatcagagacctcaggctagtcac

SEQ ID NO: 28865 - DNA, 201 bp, Homo sapiens
ctctagtcatgctgaagctgcagtctgttgggaaactcttgcccatggtcatccaggtgagaggacttgagatttctgctcccagatcccagccacttccscttttcttgcccatggatcctgcaatggtctggcttctggccaaatgctgggtccatagctctgacttccagctccgtgagctgcagcctcatcctctga

SEQ ID NO: 28866 - DNA, 201 bp, Homo sapiens
ccaatctagtgattatcacagcaggtgcacgccagaaaaaaggagaaacacgccttgatttagtccagcgaaatgtatccatctttaaattaatgattccsaatattacccagtacagtcctcactgcaaactgcttattgttactaatccagtggatatcttaacttatgtagcctggaagttgagtggatttcccaaaa

SEQ ID NO: 28867 - DNA, 201 bp, Homo sapiens
aatacttcatgatttttgtcgagtttacttcatgaggaggtcagcccattggctcccatctgaaccactttgcctctgaaacttaattacatccagaaagraggacacttgtatgctagtctatggtcagttgaggaatatgactgtttttatatgcacatgtaacccaaatgtccaatataaattggcttattttttaaa

SEQ ID NO: 28868 - DNA, 201 bp, Homo sapiens
tgggaatgactctgactttgagacggtgtaccagcagtgtgtcaggtgctgcagagcgttcttggagaaggcccactgaggcaggttcgtgccctgctgcrgccagcctgactagaccccaccctgaggtcctgcatttctcagtcggtgtgtaatcacgttccagggcccaaagcccagctctttgttcagttgacttac

SEQ ID NO: 28869 - DNA, 201 bp, Homo sapiens
agatccctattatgggaatgactctgactttgagacggtgtaccagcagtgtgtcaggtgctgcagagcgttcttggagaaggcccactgaggcaggttcrtgccctgctgcggccagcctgactagaccccaccctgaggtcctgcatttctcagtcggtgtgtaatcacgttccagggcccaaagcccagctctttgtt

SEQ ID NO: 28870 - DNA, 201 bp, Homo sapiens
agtaatcaagttaaaacctgcaaagctaaaattgaactacttgggagctatgatccacaaaaacaacttattattgaagatccctattatgggaatgactytgactttgagacggtgtaccagcagtgtgtcaggtgctgcagagcgttcttggagaaggcccactgaggcaggttcgtgccctgctgcggccagcctgac

SEQ ID NO: 28871 - DNA, 201 bp, Homo sapiens
atagaaaaagtaatcaagttaaaacctgcaaagctaaaattgaactacttgggagctatgatccacaaaaacaacttattattgaagatccctattatggraatgactctgactttgagacggtgtaccagcagtgtgtcaggtgctgcagagcgttcttggagaaggcccactgaggcaggttcgtgccctgctgcggcc

SEQ ID NO: 28872 - DNA, 201 bp, Homo sapiens
ttcatgatttttgtcgagtttacttcatgaggaggtcagcccattggctcccatctgaaccactttgcctctgaaacttaattacatccagaaagaaggamacttgtatgctagtctatggtcagttgaggaatatgactgtttttatatgcacatgtaacccaaatgtccaatataaattggcttattttttaaaataat

SEQ ID NO: 28873 - DNA, 201 bp, Homo sapiens
taccgtcataggaccgcctccgcaggcgcactggagccgattgcgcaggcgtggctctcacacgcgctgccctgttggcgttggtgcgggactgcgcaggmgcgcggggcaagaggctggcagtgcgcctgcgccgcgtcggcgtgcggaacgccgcggtgtctcggcgcctctgcgcgcgggaagatggcggaacaggct

SEQ ID NO: 28874 - DNA, 201 bp, Homo sapiens
tagggaagagagaaacatttatggaatcagtcgttggcaccttcaatacttcatgatttttgtcgagtttacttcatgaggaggtcagcccattggctccmatctgaaccactttgcctctgaaacttaattacatccagaaagaaggacacttgtatgctagtctatggtcagttgaggaatatgactgtttttatatgc

SEQ ID NO: 28875 - DNA, 201 bp, Homo sapiens
ccctgttggcgttggtgcgggactgcgcaggcgcgcggggcaagaggctggcagtgcgcctgcgccgcgtcggcgtgcggaacgccgcggtgtctcggcgyctctgcgcgcgggaagatggcggaacaggctaccaagtccgtgctgtttgtgtgtctgggtaacatttgtcgatcacccattgcagaagcagttttcagg

SEQ ID NO: 28876 - DNA, 201 bp, Homo sapiens
gggcaagaggctggcagtgcgcctgcgccgcgtcggcgtgcggaacgccgcggtgtctcggcgcctctgcgcgcgggaagatggcggaacaggctaccaaktccgtgctgtttgtgtgtctgggtaacatttgtcgatcacccattgcagaagcagttttcaggaaacttgtaaccgatcaaaacatctcagagaattggg

SEQ ID NO: 28877 - DNA, 201 bp, Homo sapiens
ccaaagcccagctctttgttcagttgacttactgtttcttaccttaaaaagtaattgtagatggaaatcagttgtgtttggcaggagaatcaataaaaatstttgattcagacagcttatggggtattttaagcattcttagactagttgaacatctcactttgccccagttacaaaaatagtagaacaagcaacataaaa

SEQ ID NO: 28878 - DNA, 201 bp, Homo sapiens
cctccgcaggcgcactggagccgattgcgcaggcgtggctctcacacgcgctgccctgttggcgttggtgcgggactgcgcaggcgcgcggggcaagaggstggcagtgcgcctgcgccgcgtcggcgtgcggaacgccgcggtgtctcggcgcctctgcgcgcgggaagatggcggaacaggctaccaagtccgtgctgt

SEQ ID NO: 28879 - DNA, 201 bp, Homo sapiens
cataaagcaagacagattaccaaagaagattttgccacatttgattatatactatgtatggatgaaagcaatctgagagatttgaatagaaaaagtaatcragttaaaacctgcaaagctaaaattgaactacttgggagctatgatccacaaaaacaacttattattgaagatccctattatgggaatgactctgacttt

SEQ ID NO: 28880 - DNA, 201 bp, Homo sapiens
tgtttgtgtgtctgggtaacatttgtcgatcacccattgcagaagcagttttcaggaaacttgtaaccgatcaaaacatctcagagaattgggtcattgayagcggtgctgtttctgactggaacgtgggccggtccccagacccaagagctgtgagctgcctaagaaatcatggcattcacacagcccataaagcaagac

SEQ ID NO: 28881 - DNA, 201 bp, Homo sapiens
cagaagcagttttcaggaaacttgtaaccgatcaaaacatctcagagaattggagggtagacagcgcggcaacttccgggtatgagatagggaaccccccwgactaccgagggcagagctgcatgaagaggcacggcattcccatgagccacgttgcccggcagattaccaaagaagattttgccacatttgattatatac

SEQ ID NO: 28882 - DNA, 201 bp, Homo sapiens
gttttcaggaaacttgtaaccgatcaaaacatctcagagaattggagggtagacagcgcggcaacttccgggtatgagatagggaacccccctgactaccragggcagagctgcatgaagaggcacggcattcccatgagccacgttgcccggcagattaccaaagaagattttgccacatttgattatatactatgtatg

SEQ ID NO: 28883 - DNA, 201 bp, Homo sapiens
ttcaggaaacttgtaaccgatcaaaacatctcagagaattggagggtagacagcgcggcaacttccgggtatgagatagggaacccccctgactaccgagrgcagagctgcatgaagaggcacggcattcccatgagccacgttgcccggcagattaccaaagaagattttgccacatttgattatatactatgtatggat

SEQ ID NO: 28884 - DNA, 201 bp, Homo sapiens; identical to SEQ ID NO: 28868

SEQ ID NO: 28885 - DNA, 201 bp, Homo sapiens
aggaaacttgtaaccgatcaaaacatctcagagaattggagggtagacagcgcggcaacttccgggtatgagatagggaacccccctgactaccgagggcwgagctgcatgaagaggcacggcattcccatgagccacgttgcccggcagattaccaaagaagattttgccacatttgattatatactatgtatggatgaa

SEQ ID NO: 28886 - DNA, 201 bp, Homo sapiens
tgtaaccgatcaaaacatctcagagaattggagggtagacagcgcggcaacttccgggtatgagatagggaacccccctgactaccgagggcagagctgcmtgaagaggcacggcattcccatgagccacgttgcccggcagattaccaaagaagattttgccacatttgattatatactatgtatggatgaaagcaatct

SEQ ID NO: 28887 - DNA, 201 bp, Homo sapiens; identical to SEQ ID NO: 28869

SEQ ID NO: 28888 - DNA, 201 bp, Homo sapiens; identical to SEQ ID NO: 28870

SEQ ID NO: 28889 - DNA, 201 bp, Homo sapiens; identical to SEQ ID NO: 28871

SEQ ID NO: 28890 - DNA, 201 bp, Homo sapiens; identical to SEQ ID NO: 28873

SEQ ID NO: 28891 - DNA, 201 bp, Homo sapiens; identical to SEQ ID NO: 28875

SEQ ID NO: 28892 - DNA, 201 bp, Homo sapiens; identical to SEQ ID NO: 28878

SEQ ID NO: 28893 - DNA, 201 bp, Homo sapiens
cacgttgcccggcagattaccaaagaagattttgccacatttgattatatactatgtatggatgaaagcaatctgagagatttgaatagaaaaagtaatcragttaaaacctgcaaagctaaaattgaactacttgggagctatgatccacaaaaacaacttattattgaagatccctattatgggaatgactctgacttt

SEQ ID NO: 28894 - DNA, 201 bp, Homo sapiens
ttgtgtgtctgggtaacatttgtcgatcacccattgcagaagcagttttcaggaaacttgtaaccgatcaaaacatctcagagaattggagggtagacagygcggcaacttccgggtatgagatagggaacccccctgactaccgagggcagagctgcatgaagaggcacggcattcccatgagccacgttgcccggcaga

SEQ ID NO: 28895 - DNA, 201 bp, Homo sapiens; identical to SEQ ID NO: 28867

SEQ ID NO: 28896 - DNA, 201 bp, Homo sapiens; identical to SEQ ID NO: 28872

SEQ ID NO: 28897 - DNA, 201 bp, Homo sapiens; identical to SEQ ID NO: 28874

SEQ ID NO: 28898 - DNA, 201 bp, Homo sapiens
gggcaagaggctggcagtgcgcctgcgccgcgtcggcgtgcggaacgccgcggtgtctcggcgcctctgcgcgcgggaagatggcggaacaggctaccaaktccgtgctgtttgtgtgtctgggtaacatttgtcgatcacccattgcagaagcagttttcaggaaacttgtaaccgatcaaaacatctcagagaattgga

SEQ ID NO: 28899 - DNA, 201 bp, Homo sapiens; identical to SEQ ID NO: 28877

SEQ ID NO: 28900 - DNA, 201 bp, Homo sapiens; identical to SEQ ID NO: 28867

SEQ ID NO: 28901 - DNA, 201 bp, Homo sapiens; identical to SEQ ID NO: 28868

SEQ ID NO: 28902 - DNA, 201 bp, Homo sapiens; identical to SEQ ID NO: 28869

SEQ ID NO: 28903 - DNA, 201 bp, Homo sapiens; identical to SEQ ID NO: 28870

SEQ ID NO: 28904 - DNA, 201 bp, Homo sapiens; identical to SEQ ID NO: 28871

SEQ ID NO: 28905 - DNA, 201 bp, Homo sapiens; identical to SEQ ID NO: 28873

SEQ ID NO: 28906 - DNA, 201 bp, Homo sapiens; identical to SEQ ID NO: 28872

SEQ ID NO: 28907 - DNA, 201 bp, Homo sapiens; identical to SEQ ID NO: 28874

SEQ ID NO: 28908 - DNA, 201 bp, Homo sapiens; identical to SEQ ID NO: 28877

SEQ ID NO: 28909 - DNA, 201 bp, Homo sapiens; identical to SEQ ID NO: 28875

SEQ ID NO: 28910 - DNA, 201 bp, Homo sapiens; identical to SEQ ID NO: 28876

SEQ ID NO: 28911 - DNA, 201 bp, Homo sapiens; identical to SEQ ID NO: 28878

SEQ ID NO: 28912 - DNA, 201 bp, Homo sapiens
tgggccggtccccagacccaagagctgtgagctgcctaagaaatcatggcattcacacagcccataaagcaagacagagatttgaatagaaaaagtaatcragttaaaacctgcaaagctaaaattgaactacttgggagctatgatccacaaaaacaacttattattgaagatccctattatgggaatgactctgacttt

SEQ ID NO: 28913 - DNA, 201 bp, Homo sapiens; identical to SEQ ID NO: 28880

SEQ ID NO: 28914 - DNA, 201 bp, Homo sapiens
cagaagcagttttcaggaaacttgtaaccgatcaaaacatctcagagaattggagggtagacagcgcggcaacttccgggtatgagatagggaaccccccwgactaccgagggcagagctgcatgaagaggcacggcattcccatgagccacgttgcccggcagagatttgaatagaaaaagtaatcaagttaaaacctgc

SEQ ID NO: 28915 - DNA, 201 bp, Homo sapiens
gttttcaggaaacttgtaaccgatcaaaacatctcagagaattggagggtagacagcgcggcaacttccgggtatgagatagggaacccccctgactaccragggcagagctgcatgaagaggcacggcattcccatgagccacgttgcccggcagagatttgaatagaaaaagtaatcaagttaaaacctgcaaagctaa

SEQ ID NO: 28916 - DNA, 201 bp, Homo sapiens
ttcaggaaacttgtaaccgatcaaaacatctcagagaattggagggtagacagcgcggcaacttccgggtatgagatagggaacccccctgactaccgagrgcagagctgcatgaagaggcacggcattcccatgagccacgttgcccggcagagatttgaatagaaaaagtaatcaagttaaaacctgcaaagctaaaat

SEQ ID NO: 28917 - DNA, 201 bp, Homo sapiens; identical to SEQ ID NO: 28868

SEQ ID NO: 28918 - DNA, 201 bp, Homo sapiens
aggaaacttgtaaccgatcaaaacatctcagagaattggagggtagacagcgcggcaacttccgggtatgagatagggaacccccctgactaccgagggcwgagctgcatgaagaggcacggcattcccatgagccacgttgcccggcagagatttgaatagaaaaagtaatcaagttaaaacctgcaaagctaaaattga

SEQ ID NO: 28919 - DNA, 201 bp, Homo sapiens
tgtaaccgatcaaaacatctcagagaattggagggtagacagcgcggcaacttccgggtatgagatagggaacccccctgactaccgagggcagagctgcmtgaagaggcacggcattcccatgagccacgttgcccggcagagatttgaatagaaaaagtaatcaagttaaaacctgcaaagctaaaattgaactacttg

SEQ ID NO: 28920 - DNA, 201 bp, Homo sapiens; identical to SEQ ID NO: 28869

SEQ ID NO: 28921 - DNA, 201 bp, Homo sapiens; identical to SEQ ID NO: 28870

SEQ ID NO: 28922 - DNA, 201 bp, Homo sapiens; identical to SEQ ID NO: 28871

SEQ ID NO: 28923 - DNA, 201 bp, Homo sapiens; identical to SEQ ID NO: 28873

SEQ ID NO: 28924 - DNA, 201 bp, Homo sapiens; identical to SEQ ID NO: 28875

SEQ ID NO: 28925 - DNA, 201 bp, Homo sapiens; identical to SEQ ID NO: 28878

SEQ ID NO: 28926 - DNA, 201 bp, Homo sapiens
tagggaacccccctgactaccgagggcagagctgcatgaagaggcacggcattcccatgagccacgttgcccggcagagatttgaatagaaaaagtaatcragttaaaacctgcaaagctaaaattgaactacttgggagctatgatccacaaaaacaacttattattgaagatccctattatgggaatgactctgacttt

SEQ ID NO: 28927 - DNA, 201 bp, Homo sapiens; identical to SEQ ID NO: 28894

SEQ ID NO: 28928 - DNA, 201 bp, Homo sapiens; identical to SEQ ID NO: 28867

SEQ ID NO: 28929 - DNA, 201 bp, Homo sapiens; identical to SEQ ID NO: 28872

SEQ ID NO: 28930 - DNA, 201 bp, Homo sapiens; identical to SEQ ID NO: 28874

SEQ ID NO: 28931 - DNA, 201 bp, Homo sapiens; identical to SEQ ID NO: 28877

SEQ ID NO: 28932 - DNA, 201 bp, Homo sapiens; identical to SEQ ID NO: 28898

SEQ ID NO: 28933 - DNA, 201 bp, Homo sapiens; identical to SEQ ID NO: 28867

SEQ ID NO: 28934 - DNA, 201 bp, Homo sapiens; identical to SEQ ID NO: 28868

SEQ ID NO: 28935 - DNA, 201 bp, Homo sapiens; identical to SEQ ID NO: 28869

SEQ ID NO: 28936 - DNA, 201 bp, Homo sapiens; identical to SEQ ID NO: 28870

SEQ ID NO: 28937 - DNA, 201 bp, Homo sapiens; identical to SEQ ID NO: 28871

SEQ ID NO: 28938 - DNA, 201 bp, Homo sapiens; identical to SEQ ID NO: 28873

SEQ ID NO: 28939 - DNA, 201 bp, Homo sapiens; identical to SEQ ID NO: 28872

SEQ ID NO: 28940 - DNA, 201 bp, Homo sapiens; identical to SEQ ID NO: 28874

SEQ ID NO: 28941 - DNA, 201 bp, Homo sapiens; identical to SEQ ID NO: 28877

SEQ ID NO: 28942 - DNA, 201 bp, Homo sapiens; identical to SEQ ID NO: 28898

SEQ ID NO: 28943 - DNA, 201 bp, Homo sapiens; identical to SEQ ID NO: 28875

SEQ ID NO: 28944 - DNA, 201 bp, Homo sapiens; identical to SEQ ID NO: 28878

SEQ ID NO: 28945 - DNA, 201 bp, Homo sapiens; identical to SEQ ID NO: 28879

SEQ ID NO: 28946 - DNA, 201 bp, Homo sapiens
tcacccattgcagaagcagttttcaggaaacttgtaaccgatcaaaacatctcagagaattggagggtagacagcgcggcaacttccggtgggtcattgayagcggtgctgtttctgactggaacgtgggccggtccccagacccaagagctgtgagctgcctaagaaatcatggcattcacacagcccataaagcaagac

SEQ ID NO: 28947 - DNA, 201 bp, Homo sapiens
ttgtgtgtctgggtaacatttgtcgatcacccattgcagaagcagttttcaggaaacttgtaaccgatcaaaacatctcagagaattggagggtagacagygcggcaacttccggtgggtcattgacagcggtgctgtttctgactggaacgtgggccggtccccagacccaagagctgtgagctgcctaagaaatcatgg

SEQ ID NO: 28948 - DNA, 201 bp, Homo sapiens
ggagtgatgcttcggggctcaggcatccagtgggacctgcggaagacccagccctatgatgtttacgaccaggttgagtttgatgttcctgttggttctcraggggactgctatgataggtacctgtgccgggtggaggagatgcgccagtccctgagaattatcgcacagtgtctaaacaagatgcctcctggggagatc

SEQ ID NO: 28949 - DNA, 201 bp, Homo sapiens
ggcagatgtcgttgccatcataggtacccaagatattgtatttggagaagtagatcggtgagcaggggagcagcgtttgatcccccctgcctatcagcttyttctgtggagcctgttcctcactggaaattggcctctgtgtgtgtgtgtgtgtgtgtgtgtgtgtgtatgttcatgtacacttggctgtcaggctttctg

SEQ ID NO: 28950 - DNA, 201 bp, Homo sapiens
tggcagatgtcgttgccatcataggtacccaagatattgtatttggagaagtagatcggtgagcaggggagcagcgtttgatcccccctgcctatcagctycttctgtggagcctgttcctcactggaaattggcctctgtgtgtgtgtgtgtgtgtgtgtgtgtgtgtatgttcatgtacacttggctgtcaggctttct

SEQ ID NO: 28951 - DNA, 201 bp, Homo sapiens
atactgccattgaggctcccaagggagagtttggggtgtacctggtgtctgatggcagcagccgcccttatcgatgcaagatcaaggctcctggttttgcycatctggctggtttggacaagatgtctaagggacacatgttggcagatgtcgttgccatcataggtacccaagatattgtatttggagaagtagatcggt

SEQ ID NO: 28952 - DNA, 201 bp, Homo sapiens
tcctgttggttctcgaggggactgctatgataggtacctgtgccgggtggaggagatgcgccagtccctgagaattatcgcacagtgtctaaacaagatgsctcctggggagatcaaggttgatgatgccaaagtgtctccacctaagcgagcagagatgaagacttccatggagtcactgattcatcactttaagttgta

SEQ ID NO: 28953 - DNA, 201 bp, Homo sapiens
ggggccatgacccctttcttctggctgtttgaagaaagggagaagatgtttgagttctacgagcgagtgtctggagcccgaatgcatgctgcttatatccrgccaggaggagtgcaccaggacctaccccttgggcttatggatgacatttatcagttttctaagaacttctctcttcggcttgatgagttggaggagttg

SEQ ID NO: 28954 - DNA, 201 bp, Homo sapiens
gagcagcgtttgatcccccctgcctatcagcttcttctgtggagcctgttcctcactggaaattggcctctgtgtgtgtgtgtgtgtgtgtgtgtgtgtgkatgttcatgtacacttggctgtcaggctttctgtgcatgtactaaaaaaggagaaattataataaattagccgtcttgcggcccctaggcctaaacttct

SEQ ID NO: 28955 - DNA, 169 bp, Homo sapiens
gggacagagccccaggagaggcagagagtgagggaaagggcctggccggcatgcacagataggatcackgtcctgggagaattcctgctcttatagtctaacctaccatggcttctcttttctcaaggctccctcatgctgccctttggccctagtggctggtttccag

SEQ ID NO: 28956 - DNA, 201 bp, Homo sapiens
gccatgacccctttcttctggctgtttgaagaaagggagaagatgtttgagttctacgagcgagtgtctggagcccgaatgcatgctgcttatatccggcmaggaggagtgcaccaggacctaccccttgggcttatggatgacatttatcagttttctaagaacttctctcttcggcttgatgagttggaggagttgctg

SEQ ID NO: 28957 - DNA, 201 bp, Homo sapiens; identical to SEQ ID NO: 28948

SEQ ID NO: 28958 - DNA, 201 bp, Homo sapiens; identical to SEQ ID NO: 28949

SEQ ID NO: 28959 - DNA, 201 bp, Homo sapiens; identical to SEQ ID NO: 28950

SEQ ID NO: 28960 - DNA, 201 bp, Homo sapiens; identical to SEQ ID NO: 28951

SEQ ID NO: 28961 - DNA, 201 bp, Homo sapiens; identical to SEQ ID NO: 28952

SEQ ID NO: 28962 - DNA, 201 bp, Homo sapiens; identical to SEQ ID NO: 28953

SEQ ID NO: 28963 - DNA, 201 bp, Homo sapiens; identical to SEQ ID NO: 28954

SEQ ID NO: 28964 - DNA, 201 bp, Homo sapiens; identical to SEQ ID NO: 28956

SEQ ID NO: 28965 - DNA, 201 bp, Homo sapiens
cctggacccttcccagggatcattgacatctttggtattggagggggcctcttggaatatcgagccagcctccttgctggccatggctttgccacgttggmtctagcttattataactttgaagatctccccaataacatggacaacatatccctggagtacttcgaagaagccgtatgctacatgcttcaacatccccag

SEQ ID NO: 28966 - DNA, 201 bp, Homo sapiens
accccagcatgattccaatagagaaggcccaggggcccatcctgctcattgttggtcaggatgaccataactggagaagtgagttgtatgcccaaacagtytctgaacggttacaggcccatggaaaggaaaaaccccagatcatctgttaccctgggactgggcattacatcgagcctccttacttccccctgtgcccag

SEQ ID NO: 28967 - DNA, 201 bp, Homo sapiens
ccagcctccttgctggccatggctttgccacgttggctctagcttattataactttgaagatctccccaataacatggacaacatatccctggagtacttygaagaagccgtatgctacatgcttcaacatccccaggtaaaaggcccaggcattgggcttttgggcatttctctaggagctgatatttgtctctcaatgg

SEQ ID NO: 28968 - DNA, 201 bp, Homo sapiens
gatgtcagcaacgctgatcctggagcccccaggccgctgctgctggaacgagccgaagggcgcgctcttccgggcccacgcgcgctactgcgccgacgccygcggcgagctggacctggagcgcgcacccgcgctgggcggcagcttcgcgggactcgagcccatggggctgctctgggccctggaacccgagaagccttt

SEQ ID NO: 28969 - DNA, 201 bp, Homo sapiens
tcagtgggaacacagccatcaactataagcacagtagcattccaccattgggctatgacctgaggagaatcaaggtagctttctcaggcctcgtggacatygtggatataaggaatgctctcgtaggagggtacaagaaccccagcatgattccaatagagaaggcccaggggcccatcctgctcattgttggtcaggatg

SEQ ID NO: 28970 - DNA, 162 bp, Homo sapiens
tgcaaacacctgggaggtacccagaaaacagctgtccctaaattgtaatgcatttgtctgttgttgacatgagagattcaagatcagattctagtgttcartaaccctatgtgaatcagatgtctcctggataacattaaagccatgtctttgtcattaatg

SEQ ID NO: 28971 - DNA, 201 bp, Homo sapiens
cttacaacctgccttaaaaattaccgaaaaaccttaatacactgctatggaggacttgggagatcttgtcttgtagctgcttgtctcctactatacctgtytgacacaatatcaccagagcaagccatagacagcctgcgagacctaagaggatccggggcaatacagaccatcaagcaatacaattatcttcatgagttt

SEQ ID NO: 28972 - DNA, 195 bp, Homo sapiens
atgggaccatctttagacaagcaaagatggaagagcataatgcctgggggtggggtaattagttgcgatacgagctacgcagcatgcaaggttgrcgtattgaaatggaggatgcacatacggctgtgattgctttgccaagtggacttgaaaggtggtcattctttgctgtgtataacgggcatcctggttctc

SEQ ID NO: 28973 - DNA, 201 bp, Homo sapiens
gagcaccttctttggaaaatgtaaagaatggaatcagaacaggtttcctggagattgatgaacacgagagttatgtcagagaagaaacatggtgcagatakaagtgggtcaacagatgtaagcgtcttactttctccccaacataattatttcattaactatgaagactctagacgtttactttgtaggaacaggaaagtt

SEQ ID NO: 28974 - DNA, 201 bp, Homo sapiens
aaggtcctactgggcagcttgtctcaccagagcctgaagtccatgacactgaaagatctgaagaagatgatcacttcattatccttgcatgtgatagtatytgggatgttatgggaaatgaagagctctgtgattttgtaagatccaggcttgaagtcactgatgaccctgagaaagtttacaatgaaatagtcgacacct

SEQ ID NO: 28975 - DNA, 201 bp, Homo sapiens
atggtgcagatataagtgggtcaacagatgtaagcgtcttactttctccccaacataattatttcattaactatgaagactctagacgtttactttgtagraacaggaaagttcatttcttcacaaattgcaaatccgctagaaaaagaatgaattcagaatgcaggtggctctgtaatgctttagcatgtgaaagcctct

SEQ ID NO: 28976 - DNA, 114 bp, Homo sapiens
ccttttctgacgakgcgaacaacatggcggcggaaagtggtagcgattttcagcagagacgtagaaggcgccgggacccggaggaaccggaaaaaacagaactcagcgaaagag

SEQ ID NO: 28977 - DNA, 201 bp, Homo sapiens
ttcagactggagatccaacaggtactggtatgggaggagaaagcatatggggaggagaatttgaagatgaatttcattcaacattacgacatgacaggccrtacacactcagcatggctaacgcgggatcaaatactaatggatcccagtttttcataacggtagtaccaacgccttggcttgataataagcatacagtat

SEQ ID NO: 28978 - DNA, 137 bp, Homo sapiens
ccttttctgacgatgcgaacaacatggcggcggaaartggtagcgattttcagcagagacgtagaaggcgccgggacccggaggaaccggaaaaaacagaactcagcgaaagagagctggcagtagcagtggcggtg

SEQ ID NO: 28979 - DNA, 201 bp, Homo sapiens
caacgtcaaagtcaatcccaaaacagataagccctatgaggatgtcagcatcataaatattactgtcaagtaaaataagatttgttttaatgtacttgcamataaaaatacaatattaaacagattattttacattaggaagcttaggacttgctgaatatacagatcatgtttcaaagatacagtatttttgtatttttt

SEQ ID NO: 28980 - DNA, 201 bp, Homo sapiens
tgtggcagtgtcctctggcggggagctcttcctccgcttcatcagtcttgcctccctggaatactccgattactccaaatgtaaaaagatcatgattgagmggggagaactttttctcaggagaatatcactgtcaagaaacaaaattgcagatctgtgccatactttcatcaaagatggagcgacaatattgactcacgc

SEQ ID NO: 28981 - DNA, 201 bp, Homo sapiens
tacaagttagataattggctacttaactgatgaaagatgagcccaagtccacctgtcttcatcctcccctgcactccagactgatctgcctaaagcacgcragatgcaggcgaaaagcagccacacccctctgccacaaatgaccaacagctggtcaggacgttacacgcggtgccttgtaagaggcaagaaacacttgcc

SEQ ID NO: 28982 - DNA, 201 bp, Homo sapiens
gaatatgacttaatccctctgtttttcagctattcaccaataaaacaatactgtgactattaacacagaaaaaccccagcacattagccacccctgcaggrcatcaaaggataactgaagcccagggccaagcacattcaggaggtcaaatgcctgaagatactgaggaatggttttgaaaatcagaagtcaagaagactt

SEQ ID NO: 28983 - DNA, 201 bp, Homo sapiens
tgtcactgtggtgctagatgctgctgtcggctacatcatggagaaagcagatcttgtcatagttggtgctgaaggagttgttgaaaacggaggaattattwacaagattggaaccaaccagatggctgtgtgtgccaaagcacagaacaaacctttctatgtggttgcagaaagtttcaagtttgtccggctctttccact

SEQ ID NO: 28984 - DNA, 201 bp, Homo sapiens
taactgatgaaagatgagcccaagtccacctgtcttcatcctcccctgcactccagactgatctgcctaaagcacgcgagatgcaggcgaaaagcagccayacccctctgccacaaatgaccaacagctggtcaggacgttacacgcggtgccttgtaagaggcaagaaacacttgccgaatctgcatctggcttccagtg

SEQ ID NO: 28985 - DNA, 136 bp, Homo sapiens
atctgcggaagtggagtgcggggagtgcgccggaasaggggtacggaagtgcgccggaagtggggtgcggaggtgtgcagcgcgctgtcagactggctcgcaggcggcgcggccggcggacccgttcgagacagcg

SEQ ID NO: 28986 - DNA, 201 bp, Homo sapiens
gcccaagtccacctgtcttcatcctcccctgcactccagactgatctgcctaaagcacgcgagatgcaggcgaaaagcagccacacccctctgccacaaaygaccaacagctggtcaggacgttacacgcggtgccttgtaagaggcaagaaacacttgccgaatctgcatctggcttccagtggtaagcacattcctcag

SEQ ID NO: 28987 - DNA, 201 bp, Homo sapiens
gcgaaaagcagccacacccctctgccacaaatgaccaacagctggtcaggacgttacacgcggtgccttgtaagaggcaagaaacacttgccgaatctgcrtctggcttccagtggtaagcacattcctcagcaggatcaagccaaacagtaaaaactaccaagagaacacgaggaaggcagaaacgatgtttagcaacag

SEQ ID NO: 28988 - DNA, 201 bp, Homo sapiens
tattctgcatggttcactgcttaagaaaatgccttctggaatatttgtaaactgaaattctgtatgtgtaagagatgtttaaatatgtttgggtcctaaayagctttttaaaattatacttgggaataaattcagcatcttttcaaataaactctatgaaagacgctgatgtggtgttgcatcaatactgcaagctgacca

SEQ ID NO: 28989 - DNA, 201 bp, Homo sapiens
cagtttccagaaatacaagttagataattggctacttaactgatgaaagatgagcccaagtccacctgtcttcatcctcccctgcactccagactgatctrcctaaagcacgcgagatgcaggcgaaaagcagccacacccctctgccacaaatgaccaacagctggtcaggacgttacacgcggtgccttgtaagaggca

SEQ ID NO: 28990 - DNA, 201 bp, Homo sapiens
atcaaaggataactgaagcccagggccaagcacattcaggaggtcaaatgcctgaagatactgaggaatggttttgaaaatcagaagtcaagaagacttcwgtatctttatgtttaaaaataactataaaatagcctcagaaaaaagagcttatatatatatatatatatatatatatatatatatatatatatatataat

SEQ ID NO: 28991 - DNA, 201 bp, Homo sapiens; identical to SEQ ID NO: 28980

SEQ ID NO: 28992 - DNA, 201 bp, Homo sapiens; identical to SEQ ID NO: 28981

SEQ ID NO: 28993 - DNA, 201 bp, Homo sapiens; identical to SEQ ID NO: 28982

SEQ ID NO: 28994 - DNA, 201 bp, Homo sapiens; identical to SEQ ID NO: 28983

SEQ ID NO: 28995 - DNA, 201 bp, Homo sapiens; identical to SEQ ID NO: 28984

SEQ ID NO: 28996 - DNA, 136 bp, Homo sapiens; identical to SEQ ID NO: 28985

SEQ ID NO: 28997 - DNA, 201 bp, Homo sapiens
atgtctcctgaagttgtgattttcgttaaaagcaaactggagccatccaccaagttagggaacagctatgtccttgtgggttcatctgtggcactggaatyagcagtcatcttccaaatctgagatccctaaatccactgtcttgattgttcttttgccagttgtcaacaagcccttctcaaattcttcttcagttatttt

SEQ ID NO: 28998 - DNA, 201 bp, Homo sapiens; identical to SEQ ID NO: 28986

SEQ ID NO: 28999 - DNA, 201 bp, Homo sapiens; identical to SEQ ID NO: 28987

SEQ ID NO: 29000 - DNA, 201 bp, Homo sapiens; identical to SEQ ID NO: 28988

SEQ ID NO: 29001 - DNA, 201 bp, Homo sapiens; identical to SEQ ID NO: 28989

SEQ ID NO: 29002 - DNA, 201 bp, Homo sapiens; identical to SEQ ID NO: 28990

SEQ ID NO: 29003 - DNA, 201 bp, Homo sapiens; identical to SEQ ID NO: 28980

SEQ ID NO: 29004 - DNA, 201 bp, Homo sapiens; identical to SEQ ID NO: 28981

SEQ ID NO: 29005 - DNA, 201 bp, Homo sapiens; identical to SEQ ID NO: 28982

SEQ ID NO: 29006 - DNA, 201 bp, Homo sapiens; identical to SEQ ID NO: 28984

SEQ ID NO: 29007 - DNA, 201 bp, Homo sapiens; identical to SEQ ID NO: 28983

SEQ ID NO: 29008 - DNA, 201 bp, Homo sapiens; identical to SEQ ID NO: 28986

SEQ ID NO: 29009 - DNA, 201 bp, Homo sapiens; identical to SEQ ID NO: 28987

SEQ ID NO: 29010 - DNA, 201 bp, Homo sapiens; identical to SEQ ID NO: 28988

SEQ ID NO: 29011 - DNA, 201 bp, Homo sapiens; identical to SEQ ID NO: 28989

SEQ ID NO: 29012 - DNA, 201 bp, Homo sapiens; identical to SEQ ID NO: 28990

SEQ ID NO: 29013 - DNA, 201 bp, Homo sapiens
ggccaggccacaggaagagctcgaggcccgggccgcaccggctgagtgtgcgggcccgcgcggctcggagccgccgccgcccatcgagcccctccgggcgygggtcggcccgccatggggtccctgttccggagcgagaccatgtgcctggcgcagctcttcctgcagtcgggcacggcctacgagtgcctcagcgccctg

SEQ ID NO: 29014 - DNA, 201 bp, Homo sapiens
aactgatagagtacactcacatgctgagagtgacaaagacctttgtgaaacgcaatgttgagtttgaacccacttatgaagaattcccttccttagagagygattctttgttggattacagctgtatgcagaggctgggagcaaaactgggatttgtgtctggcctaattaaccaaggaaaagtggaagcatttgaaaaaa

SEQ ID NO: 29015 - DNA, 201 bp, Homo sapiens; identical to SEQ ID NO: 29013

SEQ ID NO: 29016 - DNA, 201 bp, Homo sapiens
ttaatgacccaagtaatccattccatcgagtactgtctgggatgcatctccaacaccgcctcctacctgaggctctgggcgcttagcctggctcacgcacrgttgtctgatgtcctgtgggccatgctgatgcgcgtgggcctccgcgttgacaccacctatggcgtcttgctactgctcccggttatcgcgctctttgca

SEQ ID NO: 29017 - DNA, 201 bp, Homo sapiens; identical to SEQ ID NO: 29014

SEQ ID NO: 29018 - DNA, 201 bp, Homo sapiens
ttgatcctatttggaacttggccacaaatcgcctcacttttctaaactctttcaaaatgaaaatgtccgtgattttaggaatcattcatatgacttttggrgtcattctgggaatatttaaccacttgcacttcaggaagaagttcaacatttacctggtttccatcccggaacttctcttcatgctctgtatctttggat

SEQ ID NO: 29019 - DNA, 201 bp, Homo sapiens
tttcaaagtcagtcaacctgttcggctctgggtggaacgtgtcggccatgtacagctccagccacccacccgcagagcataagaagatggtgctttggaaygacagcgtcgttagacacaacagcattttgcagctggatccaagcattcctggagtgttccgaggcccttatccccttggcattgatcctatttggaact

SEQ ID NO: 29020 - DNA, 201 bp, Homo sapiens
gagctggagaacgctggcgtggaggtgctgaagttctcccaggtcaaggaggttaaaaagactttgtcgggcttggaagtcagcatggttactgcagttcmcggtaggctaccagtcatgaccatgattccagatgttgactgcctgctctgggccattgggcgggtcccgaataccaaggacctgagtttaaacaaactg

SEQ ID NO: 29021 - DNA, 201 bp, Homo sapiens
ctctgaattcatgcatgatcatgctgattatggctttccaagttgtgagggtaaattcaattggcgtgttattaaggaaaagcgggatgcctatgtgagcygcctgaatgccatctatcaaaacaatctcaccaagtcccatatagaaatcatccgtggccatgcagccttcacgagtgatcccaagcccacaatagaggt

SEQ ID NO: 29022 - DNA, 201 bp, Homo sapiens
gcccgccgcccgctgctggcgccgtggcctcctatgactacctggtgatcgggggcggctcgggcgggctggccagcgcgcgcagggcggccgagctgggygccagggccgccgtggtggagagccacaagctgggtggcacttgcgtgaatgttggatgtgtacccaaaaaggtaatgtggaacacagctgtccactctg

SEQ ID NO: 29023 - DNA, 201 bp, Homo sapiens
cattgacttactgtttgagttttatgtatttctttattttaatcaggatcttctgatagtggaaatttttagtacataatagaacttatttatggagttasaaatttgtagtgttatccaggattgattttcatttgatcacatctcacagtaattaatattttcaagttttttttttattaacagctctgtgctagtttt

SEQ ID NO: 29024 - DNA, 201 bp, Homo sapiens
ctctgtgctagttttttttttctgttttagcctcatcccaaatataaagctttgtgaagtacaattaacttaatgtacttgaatgaatagaacttgctactttttttttttttttttttgagacagagttttgctctcattgcccaggctggagtgcggtggtgctatttcagctcaccacaacctctgcctcctgggttc

SEQ ID NO: 29025 - DNA, 201 bp, Homo sapiens
gatagtggaaatttttagtacataatagaacttatttatggagttagaaatttgtagtgttatccaggattgattttcatttgatcacatctcacagtaaytaatattttcaagttttttttttattaacagctctgtgctagttttttttttctgttttagcctcatcccaaatataaagctttgtgaagtacaattaac

SEQ ID NO: 29026 - DNA, 118 bp, Homo sapiens
acttgagcctacaagtttgaggccagcatgcacagcatagcaagactgcatctctacagagagtaaaaaaaattacccgagtgtggtgatgtgcatctgtratctcagctacttggga

SEQ ID NO: 29027 - DNA, 117 bp, Homo sapiens
cttgagcctacaagtttgaggccagcatgcacagcatagcaagactgcatctctacagagagtaaaaaaaattacccgagtgtggtgatgtgcatctgtartctcagctacttggga

SEQ ID NO: 29028 - DNA, 201 bp, Homo sapiens
gcaattcttcacatgtaaacagtgccagtgcacagaacctttatatattttttgaagccagtactgtgctctgcatataacaaagctgcttcaaggatgaracctttttctaaaagcatgtaatgtgagaagccggcctgccggaggccgaggcaggaggattacttgagcctacaagtttgaggccagcatgcacagcat

SEQ ID NO: 29029 - DNA, 198 bp, Homo sapiens
agctgcttcaaggatgagacctttttctaaaagcatgtaatgtgagaagccggcctgccggaggccgaggcaggaggattacttgagcctacaagtttgargccagcatgcacagcatagcaagactgcatctctacagagagtaaaaaaaattacccgagtgtggtgatgtgcatctgtaatctcagctacttggga

SEQ ID NO: 29030 - DNA, 201 bp, Homo sapiens
atccgcccacctcggcctcctgaggtgctgagattacaggcgtgagccactgtgccagcttgctaattttcacagaagttgatggcaattcttcacatgtwaacagtgccagtgcacagaacctttatatattttttgaagccagtactgtgctctgcatataacaaagctgcttcaaggatgagacctttttctaaaagc

SEQ ID NO: 29031 - DNA, 186 bp, Homo sapiens
tgcttagtcaccgtgaggctgcgcttgcccggggcccgcgcccccctaccccggggaccgcccccgggccgcccgccccacttggmgcgccacttccgcgtgcatggccctgctgccccgagccctgagcgccggcgcgggaccgagctggcggcgggcggcgcgcgccttccgaggcttcctgct

SEQ ID NO: 29032 - DNA, 161 bp, Homo sapiens
tgcttagtcaccgtgaggctgcgcttgcccggggcccgcgcccccctaccccggggaccgmccccgggccgcccgccccacttggcgcgccacttccgcgtgcatggccctgctgccccgagccctgagcgccggcgcgggaccgagctggcggcgggcgg

SEQ ID NO: 29033 - DNA, 201 bp, Homo sapiens
tgcccgagcccgcggccctcacgcgcgccctctcccgtgccatggcctgcaggcaggagccgcagccgcagggcccgccgcccgctgctggcgccgtggcytcctatgactacctggtgatcgggggcggctcgggcgggctggccagcgcgcgcagggcggccgagctgggtgccagggccgccgtggtggagagccaca

SEQ ID NO: 29034 - DNA, 140 bp, Homo sapiens
tgcttagtcaccgtgaggctgcgcttgcccggggcccgcrcccccctaccccggggaccgcccccgggccgcccgccccacttggcgcgccacttccgcgtgcatggccctgctgccccgagccctgagcgccggcgcgg

SEQ ID NO: 29035 - DNA, 201 bp, Homo sapiens
taaaaaaaattacccgagtgtggtgatgtgcatctgtaatctcagctacttgggaggctgaggtgagaggatcacttgagcttgggtgaggtgaggctgcrgtgagtcctgatcatgctgctgcactcaatcttggacaacagagcaagaccctgtctcaaaaaaaaaaaaatatatatatatatatatatattattttta

SEQ ID NO: 29036 - DNA, 201 bp, Homo sapiens; identical to SEQ ID NO: 29020

SEQ ID NO: 29037 - DNA, 201 bp, Homo sapiens; identical to SEQ ID NO: 29021

SEQ ID NO: 29038 - DNA, 201 bp, Homo sapiens
acttgggaggctgaggtgagaggatcacttgagcttgggtgaggtgaggctgcagtgagtcctgatcatgctgctgcactcaatcttggacaacagagcargaccctgtctcaaaaaaaaaaaaatatatatatatatatatatattatttttatgaggtgaagtgcatcaaacttgggaaagatttgaggaggctgggaa

SEQ ID NO: 29039 - DNA, 186 bp, Homo sapiens
ttagaagtgattcctgctttcagaaggaggtggattcaaatacatcaaaagtcccttcctctgctaagtgtttatagttcaatgaataatttcaatatttktatgtgttcttgtcattttatttttttctgaaaaacttccaaaaatttgaaaataaaattacagccttttcttcttataaaattt

SEQ ID NO: 29040 - DNA, 201 bp, Homo sapiens; identical to SEQ ID NO: 29023

SEQ ID NO: 29041 - DNA, 201 bp, Homo sapiens; identical to SEQ ID NO: 29025

SEQ ID NO: 29042 - DNA, 201 bp, Homo sapiens
atcacttgagcttgggtgaggtgaggctgcagtgagtcctgatcatgctgctgcactcaatcttggacaacagagcaagaccctgtctcaaaaaaaaaaawatatatatatatatatatatattatttttatgaggtgaagtgcatcaaacttgggaaagatttgaggaggctgggaacctcctggaaaaccactccttga

SEQ ID NO: 29043 - DNA, 186 bp, Homo sapiens; identical to SEQ ID NO: 29031

SEQ ID NO: 29044 - DNA, 161 bp, Homo sapiens; identical to SEQ ID NO: 29032

SEQ ID NO: 29045 - DNA, 140 bp, Homo sapiens; identical to SEQ ID NO: 29034

SEQ ID NO: 29046 - DNA, 201 bp, Homo sapiens; identical to SEQ ID NO: 29022

SEQ ID NO: 29047 - DNA, 201 bp, Homo sapiens; identical to SEQ ID NO: 29024

SEQ ID NO: 29048 - DNA, 201 bp, Homo sapiens
acttgagcctacaagtttgaggccagcatgcacagcatagcaagactgcatctctacagagagtaaaaaaaattacccgagtgtggtgatgtgcatctgtratctcagctacttgggaggctgaggtgagaggatcacttgagcttgggtgaggtgaggctgcagtgagtcctgatcatgctgctgcactcaatcttggac

SEQ ID NO: 29049 - DNA, 201 bp, Homo sapiens
cttgagcctacaagtttgaggccagcatgcacagcatagcaagactgcatctctacagagagtaaaaaaaattacccgagtgtggtgatgtgcatctgtartctcagctacttgggaggctgaggtgagaggatcacttgagcttgggtgaggtgaggctgcagtgagtcctgatcatgctgctgcactcaatcttggaca

SEQ ID NO: 29050 - DNA, 201 bp, Homo sapiens
atagcaagactgcatctctacagagagtaaaaaaaattacccgagtgtggtgatgtgcatctgtaatctcagctacttgggaggctgaggtgagaggatcrcttgagcttgggtgaggtgaggctgcagtgagtcctgatcatgctgctgcactcaatcttggacaacagagcaagaccctgtctcaaaaaaaaaaaaata

SEQ ID NO: 29051 - DNA, 201 bp, Homo sapiens
tgattaaaaatagtttgtggcaaggcacggtggctcaggcctgtaattctagcactttgggaggccgaggcaggaggattacttgagcctacaagtttgargccagcatgcacagcatagcaagactgcatctctacagagagtaaaaaaaattacccgagtgtggtgatgtgcatctgtaatctcagctacttgggaggc

SEQ ID NO: 29052 - DNA, 201 bp, Homo sapiens
gcaattcttcacatgtaaacagtgccagtgcacagaacctttatatattttttgaagccagtactgtgctctgcatataacaaagctgcttcaaggatgaracctttttctaaaagcatgtaatgtgagaagccggcctgccttattttcttttttcttttttaatgattaaaaatagtttgtggcaaggcacggtggctc

SEQ ID NO: 29053 - DNA, 201 bp, Homo sapiens
ctctgcatataacaaagctgcttcaaggatgagacctttttctaaaagcatgtaatgtgagaagccggcctgccttattttcttttttcttttttaatgawtaaaaatagtttgtggcaaggcacggtggctcaggcctgtaattctagcactttgggaggccgaggcaggaggattacttgagcctacaagtttgaggcc

SEQ ID NO: 29054 - DNA, 201 bp, Homo sapiens; identical to SEQ ID NO: 29030

SEQ ID NO: 29055 - DNA, 201 bp, Homo sapiens; identical to SEQ ID NO: 29033

SEQ ID NO: 29056 - DNA, 201 bp, Homo sapiens; identical to SEQ ID NO: 29020

SEQ ID NO: 29057 - DNA, 201 bp, Homo sapiens; identical to SEQ ID NO: 29021

SEQ ID NO: 29058 - DNA, 201 bp, Homo sapiens
gtgccagggccgccgtggtggagagccacaagctgggtggcacttgcggcctggggaacttgcggtcctgggttcctgctgagtgtactgattctgtgatragaataactaggttcttgtggttttggcgagtagtacttaccaatgagagttgggtagtgaatgttggatgtgtacccaaaaaggtaatgtggaacacag

SEQ ID NO: 29059 - DNA, 201 bp, Homo sapiens
gcccgccgcccgctgctggcgccgtggcctcctatgactacctggtgatcgggggcggctcgggcgggctggccagcgcgcgcagggcggccgagctgggygccagggccgccgtggtggagagccacaagctgggtggcacttgcggcctggggaacttgcggtcctgggttcctgctgagtgtactgattctgtgataa

SEQ ID NO: 29060 - DNA, 201 bp, Homo sapiens; identical to SEQ ID NO: 29023

SEQ ID NO: 29061 - DNA, 201 bp, Homo sapiens; identical to SEQ ID NO: 29024

SEQ ID NO: 29062 - DNA, 201 bp, Homo sapiens; identical to SEQ ID NO: 29025

SEQ ID NO: 29063 - DNA, 118 bp, Homo sapiens; identical to SEQ ID NO: 29026

SEQ ID NO: 29064 - DNA, 117 bp, Homo sapiens; identical to SEQ ID NO: 29027

SEQ ID NO: 29065 - DNA, 201 bp, Homo sapiens
ccgccgtggtggagagccacaagctgggtggcacttgcggcctggggaacttgcggtcctgggttcctgctgagtgtactgattctgtgataagaataacyaggttcttgtggttttggcgagtagtacttaccaatgagagttgggtagtgaatgttggatgtgtacccaaaaaggtaatgtggaacacagctgtccact

SEQ ID NO: 29066 - DNA, 201 bp, Homo sapiens; identical to SEQ ID NO: 29028

SEQ ID NO: 29067 - DNA, 198 bp, Homo sapiens; identical to SEQ ID NO: 29029

SEQ ID NO: 29068 - DNA, 201 bp, Homo sapiens
ggtggagagccacaagctgggtggcacttgcggcctggggaacttgcggtcctgggttcctgctgagtgtactgattctgtgataagaataactaggttcytgtggttttggcgagtagtacttaccaatgagagttgggtagtgaatgttggatgtgtacccaaaaaggtaatgtggaacacagctgtccactctgaatt

SEQ ID NO: 29069 - DNA, 201 bp, Homo sapiens; identical to SEQ ID NO: 29030

SEQ ID NO: 29070 - DNA, 201 bp, Homo sapiens; identical to SEQ ID NO: 29033

SEQ ID NO: 29071 - DNA, 201 bp, Homo sapiens; identical to SEQ ID NO: 29035

SEQ ID NO: 29072 - DNA, 201 bp, Homo sapiens; identical to SEQ ID NO: 29020

SEQ ID NO: 29073 - DNA, 201 bp, Homo sapiens; identical to SEQ ID NO: 29021

SEQ ID NO: 29074 - DNA, 201 bp, Homo sapiens; identical to SEQ ID NO: 29038

SEQ ID NO: 29075 - DNA, 186 bp, Homo sapiens; identical to SEQ ID NO: 29039

SEQ ID NO: 29076 - DNA, 201 bp, Homo sapiens; identical to SEQ ID NO: 29023

SEQ ID NO: 29077 - DNA, 201 bp, Homo sapiens; identical to SEQ ID NO: 29025

SEQ ID NO: 29078 - DNA, 201 bp, Homo sapiens; identical to SEQ ID NO: 29042

SEQ ID NO: 29079 - DNA, 186 bp, Homo sapiens; identical to SEQ ID NO: 29031

SEQ ID NO: 29080 - DNA, 161 bp, Homo sapiens; identical to SEQ ID NO: 29032

SEQ ID NO: 29081 - DNA, 140 bp, Homo sapiens; identical to SEQ ID NO: 29034

SEQ ID NO: 29082 - DNA, 201 bp, Homo sapiens; identical to SEQ ID NO: 29022

SEQ ID NO: 29083 - DNA, 201 bp, Homo sapiens; identical to SEQ ID NO: 29024

SEQ ID NO: 29084 - DNA, 201 bp, Homo sapiens; identical to SEQ ID NO: 29048

SEQ ID NO: 29085 - DNA, 201 bp, Homo sapiens; identical to SEQ ID NO: 29049

SEQ ID NO: 29086 - DNA, 201 bp, Homo sapiens; identical to SEQ ID NO: 29050

SEQ ID NO: 29087 - DNA, 201 bp, Homo sapiens; identical to SEQ ID NO: 29051

SEQ ID NO: 29088 - DNA, 201 bp, Homo sapiens; identical to SEQ ID NO: 29052

SEQ ID NO: 29089 - DNA, 201 bp, Homo sapiens; identical to SEQ ID NO: 29053

SEQ ID NO: 29090 - DNA, 201 bp, Homo sapiens; identical to SEQ ID NO: 29030

SEQ ID NO: 29091 - DNA, 201 bp, Homo sapiens; identical to SEQ ID NO: 29033

SEQ ID NO: 29092 - DNA, 201 bp, Homo sapiens
caagaacatagatgttttggagaaagcagttaagctggcagcgaagcagggtgcacatatcattgtgaccccagaagatggaatctatggttggatcttcrccagggagagcatttacccctatctagaggatataccagaccctggagtgaactggattccatgtagagacccctggagattcggcaacacaccagtgca

SEQ ID NO: 29093 - DNA, 201 bp, Homo sapiens
cctgcagctgttgactggcatgcgtatgccagcagtgtcaagccattttcctctgaacagtcagattttctggggatgatttattttgatgagtttacctycaccaagcttaagagaaatacaggaaattacacagcttgccagaaagatctgtgttgtcacttaacttacaagatgtctgagaagcgaacagacgagatc

SEQ ID NO: 29094 - DNA, 201 bp, Homo sapiens
gagtttaccttcaccaagcttaagagaaatacaggaaattacacagcttgccagaaagatctgtgttgtcacttaacttacaagatgtctgagaagcgaayagacgagatctatgccctaggtgcttttgatggactgcacacagtagaaggccaatattacttacagatatgtgcattactgaagtgtcaaaccactgac

SEQ ID NO: 29095 - DNA, 201 bp, Homo sapiens
gttatgattatatcacattttccaaaatgtgtggcagtttttgccctccttgctctgagtgttggtgcactggacacttttattgctgcagtatatgagcrtgcggtgatattaccaaacagaacagaaacacctgtttcaaaagaagaagctttgctcctgatgaacaagaacatagatgttttggagaaagcagttaag

SEQ ID NO: 29096 - DNA, 201 bp, Homo sapiens
agggagtggaatctacgccccagaagcagtcaaggtgtaccactatgacatggaaacagagagtggtcagctgttgctatcagaactgaagtctcggcccygccgtgagcccacctaccctgcagctgttgactggcatgcgtatgccagcagtgtcaagccattttcctctgaacagtcagattttctggggatgattta

SEQ ID NO: 29097 - DNA, 201 bp, Homo sapiens
aacttacaagatgtctgagaagcgaacagacgagatctatgccctaggtgcttttgatggactgcacacagtagaaggccaatattacttacagatatgtrcattactgaagtgtcaaaccactgacctggaaacgtgtggagaacctgtggggtcagcttttaccaagtttgaagacttctccctcagtggcacatttgg

SEQ ID NO: 29098 - DNA, 201 bp, Homo sapiens
gattcggcaacacaccagtgcaacaaagactcagctgcctggccaaggacaactctatctatgtcgtggctaatattggggacaagaagccatgcaatgcyagtgactctcagtgtccccctgatggccgttaccaatacaacactgatgtggtgtttgattctcagggaaaactgttggcacgctaccataagtacaatc

SEQ ID NO: 29099 - DNA, 201 bp, Homo sapiens
tttgatttccccaaggattcagaacttgtgacttttgacactccctttgggaagtttggcatttttacttgctttgacattttttctcatgacccagctgyggtggtggtggatgagtttcaattgacagcattctctaccccacagcatggtacaacacgctgcccctcctctcggctgttcccttccattcagcatggg

SEQ ID NO: 29100 - DNA, 201 bp, Homo sapiens
gagcccacctaccctgcagctgttgactggcatgcgtatgccagcagtgtcaagccattttcctctgaacagtcagattttctggggatgatttattttgmtgagtttaccttcaccaagcttaagagaaatacaggaaattacacagcttgccagaaagatctgtgttgtcacttaacttacaagatgtctgagaagcga

SEQ ID NO: 29101 - DNA, 133 bp, Homo sapiens
atttaatgtaaagtttttccagtgaaacaaaaygtaagaatctgagtttgtttttcaaagatcactaaattttagttatgattatatcacattttccaaaatgtgtggcagtttttgccctccttgctctgag

SEQ ID NO: 29102 - DNA, 201 bp, Homo sapiens
gatataccagaccctggagtgaactggattccatgtagagacccctggaggaagagtaaaaagatgaatgagcctgtttccaaagagctttgctatcactrtcattcagaatgcaatcaatatggccaatggaaattgtataggacttgaaaaaggaagccctacttctgggaccacattttacgaccacctagctgagtg

SEQ ID NO: 29103 - DNA, 201 bp, Homo sapiens
caagaacatagatgttttggagaaagcagttaagctggcagcgaagcagggtgcacatatcattgtgaccccagaagatggaatctatggttggatcttcrccagggagagcatttacccctatctagaggatataccagaccctggagtgaactggattccatgtagagacccctggaggaagagtaaaaagatgaatga

SEQ ID NO: 29104 - DNA, 194 bp, Homo sapiens
gattcggcaacacaccagtgcaacaaagactcagctgcctggccaaggacaactctatctatgtcgtggctaatattggggacaagaagccatgcaatgcyagtgactctcagtgtccccctgatggccgttaccaatacaacactgatgtggtgtttgattctcagggaaaactgttggcacgctaccataag

SEQ ID NO: 29105 - DNA, 201 bp, Homo sapiens; identical to SEQ ID NO: 29095

SEQ ID NO: 29106 - DNA, 133 bp, Homo sapiens; identical to SEQ ID NO: 29101

SEQ ID NO: 29107 - DNA, 182 bp, Homo sapiens
atgccagcactgtcatcgcagacttggctgcccaaccccgtcgtctacctgatgaaggccttcgacctcctagtggaccgaycggcgaccctcgtgagagtttatagagtggcagcacgcaaagaacaggtagaactgggccaaggaagtggagcattcacccaggtggccaaggcttacca

SEQ ID NO: 29108 - DNA, 201 bp, Homo sapiens
cacctgttctccagctccaagttcctgcttatggctcaggacagccatgtctccatgcactccttgatcacatgcaaggtcactattgcaaggtcactacmcaggcttcgacctcagcagctatggcaactgcctcaccaagtggaacaaggccatagaggtgatgtacacccagtgcatggaggtgggcaaggacaagtg

SEQ ID NO: 29109 - DNA, 201 bp, Homo sapiens
tggaatgtggaggcaaaggactgggccgaaaggggtttttcattgagcccacagtgttttccaacgtcactgatgatatgcggattgccaaggaggagatmtttggccctgttcaggaaattttgagatttaagacgatggatgaagttatcgaaagagccaataactcagactttggactcgtagcagctgtctttacta

SEQ ID NO: 29110 - DNA, 201 bp, Homo sapiens
tcatcccatggaacttccccctgctgatgtttgcctggaaaatagctccagctttgtgctgtggcaatacagtagttattaagccagcagagcaaacaccmctcagtgcactctacatgggagccctcatcaaggaggctggctttcctcccggggtcatcaatattttgccaggatatgggccaacggctggggcagcaa

SEQ ID NO: 29111 - DNA, 201 bp, Homo sapiens; identical to SEQ ID NO: 29109

SEQ ID NO: 29112 - DNA, 201 bp, Homo sapiens; identical to SEQ ID NO: 29110

SEQ ID NO: 29113 - DNA, 201 bp, Homo sapiens
atgagctggtgaaacatgaagaaaacagcttggtctttgaggactcagaggaactggcagctcagctgcagatgcttttctcaaactttcctgatcctgarggcaagctaaaccagttccggaagaacctgcgggagtcgcagcagctccgatgggatgagagctgggtgcagactgtgcttcctttggttatggacacat

SEQ ID NO: 29114 - DNA, 201 bp, Homo sapiens
ggtcggtggacctgggtgtctgtctgcacacgtcctccagtggcctggacctgcccatgaaggtggtggacatgttcgggtgctgtttgcctgtgtgtgcygtgaacttcaagtgtttacatgagctggtgaaacatgaagaaaacagcttggtctttgaggactcagaggaactggcagctcagctgcagatgcttttct

SEQ ID NO: 29115 - DNA, 201 bp, Homo sapiens
ccgaggactaccccctgcttctagggtcggtggacctgggtgtctgtctgcacacgtcctccagtggcctggacctgcccatgaaggtggtggacatgttygggtgctgtttgcctgtgtgtgctgtgaacttcaagtgtttacatgagctggtgaaacatgaagaaaacagcttggtctttgaggactcagaggaactgg

SEQ ID NO: 29116 - DNA, 201 bp, Homo sapiens; identical to SEQ ID NO: 29113

SEQ ID NO: 29117 - DNA, 201 bp, Homo sapiens; identical to SEQ ID NO: 29114

SEQ ID NO: 29118 - DNA, 201 bp, Homo sapiens; identical to SEQ ID NO: 29115

SEQ ID NO: 29119 - DNA, 201 bp, Homo sapiens
gccagaaccccctgcccatctacctcaccatcaatgtcaaggatgatgtaagcaaccaggacttcagagagtggttcgagttctccccctacgaggtgggyctgcagaagtatggggccttcatcccctccgagctcttcggctccgagttcttcatggggcggctggtgaagaggatcccggagtctcgaatctgctaca

SEQ ID NO: 29120 - DNA, 201 bp, Homo sapiens
tcatggccactgggggtggaacaagatccatgacctccatgtatggccacctgctggggctgcagaagctgaacctcctggactgtgccagctacatcacyggtctatcaggggccacctggaccatggctaccttgtaccgtgaccctgactggtcctccaaaaacttggagcctgctatctttgaggctcggagacatg

SEQ ID NO: 29121 - DNA, 201 bp, Homo sapiens
caggaggacgaggtgccgctgatagccatcatggccactgggggtggaacaagatccatgacctccatgtatggccacctgctggggctgcagaagctgarcctcctggactgtgccagctacatcactggtctatcaggggccacctggaccatggctaccttgtaccgtgaccctgactggtcctccaaaaacttggag

SEQ ID NO: 29122 - DNA, 201 bp, Homo sapiens
aggaatgtgactgtgatccccaagtctgtgacaccagcacgcattgttgagaacattcaggcctttgactttacattgaatgatgaggagatggcaaccayactcagcttcaacagaaactggagggcccgtaacatgttgcaatcctctcatttggaggactatcccttcgatgcagaatattgaggttgaatctcctgg

SEQ ID NO: 29123 - DNA, 201 bp, Homo sapiens
gattgtctaagaggcagcctcctgacaccacaccattgcgaacatcggaggatctgataaatgcctgtagtcattatggcttaatttatccatgggttcaygtcgtaatatcatctgattctttagctgataaaaattatacagaagatctttcaaaattacagtctcttatatgtggtccttcatttgacatagcttcca

SEQ ID NO: 29124 - DNA, 201 bp, Homo sapiens
ggcttctttcgagaaaagataccagtgttaaaatcaaaatacctcctgtagctgaggctgggtggaatttgtatattgtgaatacgatctcaccagtgcarctgtacaaagagatggtagactatagcaatacctataagactgtcaaaacccagagctgcattcaccttctcagtgaggctcatctgttagtgcgagctg

SEQ ID NO: 29125 - DNA, 201 bp, Homo sapiens
tgaaatttcacagcttgagtcagatgattttgtcatctgccagaagcccctggaacttcttggtgaaaaaagtgaacagtctggattatctgttacactgragtctacgggattagctgatgaaaaaagaaaatattcccactttcagcacctgctctatagacgttttgctcctgatatttcgtcctatgtcttgtctga

SEQ ID NO: 29126 - DNA, 201 bp, Homo sapiens
gcagcaggtggtgccctgcaagctggagccggaccggttctgtggcggggggcgtgacgcgcttttcgtggcggcgggctgcaaggtggaggcgttcgcgrtggccggccaggagctgtgccagccgcggtgcgccttctccacgctgggccgggtgttgcgcctggcctacagcgaggctggcatcagtaatgaaatttc

SEQ ID NO: 29127 - DNA, 201 bp, Homo sapiens
gacagtcacccaagaggcttctttcgagaaaagataccagtgttaaaatcaaaatacctcctgtagctgaggctgggtggaatttgtatattgtgaatacratctcaccagtgcagctgtacaaagagatggtagactatagcaatacctataagactgtcaaaacccagagctgcattcaccttctcagtgaggctcatc

SEQ ID NO: 29128 - DNA, 201 bp, Homo sapiens
atagacgttttgctcctgatatttcgtcctatgtcttgtctgatgacatcaagctacattccctccagctgctacccatttaccagaccggttctcttacrtctgatggaaaaaatttgtctcaggaaaaagaattgctgagtctcttttgctttttctccttacctcatgtgggctatctctacatggttgtcaaatctg

SEQ ID NO: 29129 - DNA, 201 bp, Homo sapiens
cttcttgatttttccagatttctctatgtttttgagaaagatgttaatgttttgccatggtaaaagatttcaaacctcattttttttgttccttttcttgktacttttaagaaaactcatgctctgtttctctgaatcaaatgaagtagaagtttacaaagctaactttcttcttgtctagctattaacatgatttgtcaa

SEQ ID NO: 29130 - DNA, 201 bp, Homo sapiens
ttaaaggtatcatttgaaaaataccataatggcatttgagactgaatttctaaaaattgaatgccaaagtacaagtagaggagttttttattttatatatwcacacacacacacacacacacacacacacacacacatatatgatacaaatgctttcaggctgcttaccttaccgtgtagtggtaactattcacttcttaa

SEQ ID NO: 29131 - DNA, 171 bp, Homo sapiens
ccgcgggcggggccggctggcgttcacgtgacccggcgtcattggctcgctcgcggaagtagtcctacatycgcggtcagcgcggggtctccgggcgccctgcagggcgggcaggctgtgccatcccgccggacgtcgggatggtgcagctgtacaacctgcacccgttcg

SEQ ID NO: 29132 - DNA, 201 bp, Homo sapiens; identical to SEQ ID NO: 29123

SEQ ID NO: 29133 - DNA, 201 bp, Homo sapiens; identical to SEQ ID NO: 29124

SEQ ID NO: 29134 - DNA, 201 bp, Homo sapiens; identical to SEQ ID NO: 29125

SEQ ID NO: 29135 - DNA, 201 bp, Homo sapiens
gcagcaggtggtgccctgcaagctggagccggaccggttctgtggcggggggcgtgacgcgcttttcgtggcggcgggctgcaaggtggaggcgttcgcgrtggccggccaggagctgtgccagccgcggtgcgccttctccacgctgggccgggtgttgcgcctggcctacagcgaggctggagattatttggtagcaat

SEQ ID NO: 29136 - DNA, 201 bp, Homo sapiens; identical to SEQ ID NO: 29127

SEQ ID NO: 29137 - DNA, 201 bp, Homo sapiens; identical to SEQ ID NO: 29128

SEQ ID NO: 29138 - DNA, 201 bp, Homo sapiens; identical to SEQ ID NO: 29129

SEQ ID NO: 29139 - DNA, 201 bp, Homo sapiens; identical to SEQ ID NO: 29130

SEQ ID NO: 29140 - DNA, 171 bp, Homo sapiens; identical to SEQ ID NO: 29131

SEQ ID NO: 29141 - DNA, 201 bp, Homo sapiens
aacctggcgatattgtcattattgatcagttcattgacaggaccagtatgagacctcagtccctctatgatggaagtcattgttgtgctagaggagtgtgycatattccaatgggggccaagcccccaaacgagagacgttcttatagagactgctaagaagctaggactctggtgacattcaaaggggacaatggtcaca

SEQ ID NO: 29142 - DNA, 118 bp, Homo sapiens
ggcggtgaggagaatagmaaacttgccctcacttaagatggccacatcctgcctttgtcctcattggtaaattggctctctcagcttccgtgacccgcctcccttcttcctcctgccc

SEQ ID NO: 29143 - DNA, 201 bp, Homo sapiens
tggttcagattgaggcttttgtttgaggagtttggcttccagtccccaaagaaggtttaaaatgtactaataaaaactggagaaataggaatttgtgaacycctaaaattgtagcaactttgaaaggttagtgttttatttacctgacaaatggaagttatagaagtctaataatgttaagcaccagtaattatagtattt

SEQ ID NO: 29144 - DNA, 201 bp, Homo sapiens
catggcggccatgagtttgttgcggcgggtttcggttactgcggtggcagctctgtctggccggccccttggcactcgcctcggatttgggggcttcctcmctcgtggctttccgaaggctgctgctcctgttcgacacagtggagaccatgggaaaagactatttgtcatcagaccttctagattctatgacaggcgttt

SEQ ID NO: 29145 - DNA, 201 bp, Homo sapiens
tccgtgacccgcctcccttcttcctcctgcccgtagtagccatggcggccatgagtttgttgcggcgggtttcggttactgcggtggcagctctgtctggscggccccttggcactcgcctcggatttgggggcttcctcactcgtggctttccgaaggctgctgctcctgttcgacacagtggagaccatgggaaaagac

SEQ ID NO: 29146 - DNA, 201 bp, Homo sapiens
gagaatagaaaacttgccctcacttaagatggccacatcctgcctttgtcctcattggtaaattggctctctcagcttccgtgacccgcctcccttcttcytcctgcccgtagtagccatggcggccatgagtttgttgcggcgggtttcggttactgcggtggcagctctgtctggccggccccttggcactcgcctcgg

SEQ ID NO: 29147 - DNA, 201 bp, Homo sapiens; identical to SEQ ID NO: 29143

SEQ ID NO: 29148 - DNA, 175 bp, Homo sapiens
gggtttcggttactgcggtggcagctctgtctggccggccccttggcactcgcctcggatttgggggcttcctcmctcgtggctttccgaaggctgctgggtaattcaatattcccagctcctgttcgacacagtggagaccatgggaaaagactatttgtcatcagaccttcta

SEQ ID NO: 29149 - DNA, 135 bp, Homo sapiens
gggtttcggttactgcggtggcagctctgtctggscggccccttggcactcgcctcggatttgggggcttcctcactcgtggctttccgaaggctgctgggtaattcaatattcccagctcctgttcgacacagt

SEQ ID NO: 29150 - DNA, 201 bp, Homo sapiens
ctctgacattactgtctctcagtgttggttcagattgaggcttttgtttgaggagtttaaaatgtactaataaaaactggagaaataggaatttgtgaacycctaaaattgtagcaactttgaaaggttagtgttttatttacctgacaaatggaagttatagaagtctaataatgttaagcaccagtaattatagtattt

SEQ ID NO: 29151 - DNA, 175 bp, Homo sapiens; identical to SEQ ID NO: 29148

SEQ ID NO: 29152 - DNA, 135 bp, Homo sapiens; identical to SEQ ID NO: 29149

SEQ ID NO: 29153 - DNA, 118 bp, Homo sapiens; identical to SEQ ID NO: 29142

SEQ ID NO: 29154 - DNA, 201 bp, Homo sapiens; identical to SEQ ID NO: 29143

SEQ ID NO: 29155 - DNA, 201 bp, Homo sapiens; identical to SEQ ID NO: 29144

SEQ ID NO: 29156 - DNA, 201 bp, Homo sapiens; identical to SEQ ID NO: 29145

SEQ ID NO: 29157 - DNA, 201 bp, Homo sapiens; identical to SEQ ID NO: 29146

SEQ ID NO: 29158 - DNA, 201 bp, Homo sapiens; identical to SEQ ID NO: 29143

SEQ ID NO: 29159 - DNA, 201 bp, Homo sapiens
catggcggccatgagtttgttgcggcgggtttcggttactgcggtggcagctctgtctggccggccccttggcactcgcctcggatttgggggcttcctcmctcgtggctttccgaaggctgctgagattctacattgcattgactgggattccagtagcaattttcataactctggtgaatgtattcattggtcaagctg

SEQ ID NO: 29160 - DNA, 170 bp, Homo sapiens
cgtagtagccatggcggccatgagtttgttgcggcgggtttcggttactgcggtggcagctctgtctggscggccccttggcactcgcctcggatttgggggcttcctcactcgtggctttccgaaggctgctgagattctacattgcattgactgggattccagtagca

SEQ ID NO: 29161 - DNA, 118 bp, Homo sapiens; identical to SEQ ID NO: 29142

SEQ ID NO: 29162 - DNA, 201 bp, Homo sapiens; identical to SEQ ID NO: 29143

SEQ ID NO: 29163 - DNA, 201 bp, Homo sapiens; identical to SEQ ID NO: 29144

SEQ ID NO: 29164 - DNA, 201 bp, Homo sapiens; identical to SEQ ID NO: 29145

SEQ ID NO: 29165 - DNA, 201 bp, Homo sapiens; identical to SEQ ID NO: 29146

SEQ ID NO: 29166 - DNA, 201 bp, Homo sapiens; identical to SEQ ID NO: 29143

SEQ ID NO: 29167 - DNA, 201 bp, Homo sapiens
catggcggccatgagtttgttgcggcgggtttcggttactgcggtggcagctctgtctggccggccccttggcactcgcctcggatttgggggcttcctcmctcgtggctttccgaaggctgctgagattctacattgcattgactgggattccagtagcaattttcataactctggtgaatgtattcattgcatcccata

SEQ ID NO: 29168 - DNA, 170 bp, Homo sapiens; identical to SEQ ID NO: 29160

SEQ ID NO: 29169 - DNA, 201 bp, Homo sapiens; identical to SEQ ID NO: 29143

SEQ ID NO: 29170 - DNA, 175 bp, Homo sapiens; identical to SEQ ID NO: 29148

SEQ ID NO: 29171 - DNA, 135 bp, Homo sapiens; identical to SEQ ID NO: 29149

SEQ ID NO: 29172 - DNA, 201 bp, Homo sapiens; identical to SEQ ID NO: 29143

SEQ ID NO: 29173 - DNA, 201 bp, Homo sapiens
catggcggccatgagtttgttgcggcgggtttcggttactgcggtggcagctctgtctggccggccccttggcactcgcctcggatttgggggcttcctcmctcgtggctttccgaaggctgctggtcaagctgaactagcagaaattccagaaggctatgtcccagaacactgggaatattataagcatcccatatcaag

SEQ ID NO: 29174 - DNA, 170 bp, Homo sapiens
cgtagtagccatggcggccatgagtttgttgcggcgggtttcggttactgcggtggcagctctgtctggscggccccttggcactcgcctcggatttgggggcttcctcactcgtggctttccgaaggctgctggtcaagctgaactagcagaaattccagaaggctatg

SEQ ID NO: 29175 - DNA, 201 bp, Homo sapiens
gggtctgctgcaggagcagcggcccgaacccgctccagcggcccgccgccgccagcggttcccgcgtcgcgtgtgtacccccgcgcactgaaggaggtccrccagccctcaccagcccccgcggaccgtgcaatggcccagcgtaagaatgccaagagcagcggcaacagcagcagcagcggctccggcagcggtagcacg

SEQ ID NO: 29176 - DNA, 169 bp, Homo sapiens
ccgcgcgctctcgccccgggagggagtcacaggttcgtacacgcgaggccgggcgcgcgcagccggcasgcgggtgaagtcttcccaggtgctgcaggcggtgctgaggcacagggtctgctgcaggagcagcggcccgaacccgctccagcggcccgccgccgccagc

SEQ ID NO: 29177 - DNA, 201 bp, Homo sapiens
cgaagatgaagcaaaagaacaaattcagtcccttctccatgaaatggtacacgcagaacatgttgagggagaagacttgcaacaagaagatggacccacargagaaccacaacaagaggatgatgagtttcttatggcgactgatgtagatgatagatttgagaccctggaacctgaagtatctcatgaagaaaccgagca

SEQ ID NO: 29178 - DNA, 201 bp, Homo sapiens
gggtgaagtcttcccaggtgctgcaggcggtgctgaggcacagggtctgctgcaggagcagcggcccgaacccgctccagcggcccgccgccgccagcggytcccgcgtcgcgtgtgtacccccgcgcactgaaggaggtccgccagccctcaccagcccccgcggaccgtgcaatggcccagcgtaagaatgccaagagc

SEQ ID NO: 29179 - DNA, 201 bp, Homo sapiens
ttataataaaactcttcattttgtgaattatagaagctactttttataaagccatatttttttagggaaactaaggagtgacatagaactgatgaatgagyaaaagtaagttttgctggatttttgtagaactctggacgttgaggattcattatgctgtggttaactttaaatatttttgaattccaaatatctgaatta

SEQ ID NO: 29180 - DNA, 121 bp, Homo sapiens
gcttgattttttaggggttggagttagctaggaccaactgggaaaagaatcccgtaagtgggagaaaggctgtggtgttgttagggagtgcacttcagcctaagtggtgattagcagcatt

SEQ ID NO: 29181 - DNA, 201 bp, Homo sapiens; identical to SEQ ID NO: 29175

SEQ ID NO: 29182 - DNA, 169 bp, Homo sapiens; identical to SEQ ID NO: 29176

SEQ ID NO: 29183 - DNA, 201 bp, Homo sapiens; identical to SEQ ID NO: 29177

SEQ ID NO: 29184 - DNA, 201 bp, Homo sapiens; identical to SEQ ID NO: 29178

SEQ ID NO: 29185 - DNA, 201 bp, Homo sapiens; identical to SEQ ID NO: 29179

SEQ ID NO: 29186 - DNA, 121 bp, Homo sapiens; identical to SEQ ID NO: 29180

SEQ ID NO: 29187 - DNA, 121 bp, Homo sapiens; identical to SEQ ID NO: 29180

SEQ ID NO: 29188 - DNA, 201 bp, Homo sapiens
gtaaaatcatattttactgcccattattaactaaaatatttttgtttgactttgagcaccaactggtaatactaataaatacccatgtcatgcagatggctgggcgaataagagatgtctaaaaatatgcactggtcttggaaaacatggcacaagtaaggatatcatatatgatgtctgtttattttatgtctgatttct

SEQ ID NO: 29189 - DNA, 201 bp, Homo sapiens; identical to SEQ ID NO: 29175

SEQ ID NO: 29190 - DNA, 201 bp, Homo sapiens
tggtaatactaataaatacccatgtcatgcagatggctgggcgaataagagatgtctaaaaatatgcactggtcttggaaaacatggcacaagtaaggatrtcatatatgatgtctgtttattttatgtctgatttcttttgaatgagtagttggggactccatttctaaggagactaggtaaataaaatgacctttgaca

SEQ ID NO: 29191 - DNA, 169 bp, Homo sapiens; identical to SEQ ID NO: 29176

SEQ ID NO: 29192 - DNA, 201 bp, Homo sapiens
tcatatgagaggttccctgcttaccctgcagagattagttcaactatttcccaatgatacttccttaaaaaatgaccttggcgtgggatacctcttgatargagataatgacaatgcaaagaaagtttatgaagaggtgctgagtgtgacacctaatgatggctttgctaaagtccattatggcttcatcctgaaggcaca

SEQ ID NO: 29193 - DNA, 201 bp, Homo sapiens
aaaaactccgtaaaaggggaaaaattgaggaagcagtgaatgcatttaaagaactagtacgcaaataccctcagagtccacgagcaagatatgggaaggcrcagtgtgaggatgatttggctgagaagaggagaagtaatgaggtgctacgtggagccatcgagacctaccaagaggtggccagcctacctgatgtccctg

SEQ ID NO: 29194 - DNA, 201 bp, Homo sapiens; identical to SEQ ID NO: 29177

SEQ ID NO: 29195 - DNA, 201 bp, Homo sapiens; identical to SEQ ID NO: 29178

SEQ ID NO: 29196 - DNA, 201 bp, Homo sapiens; identical to SEQ ID NO: 29177

SEQ ID NO: 29197 - DNA, 121 bp, Homo sapiens; identical to SEQ ID NO: 29180

SEQ ID NO: 29198 - DNA, 201 bp, Homo sapiens; identical to SEQ ID NO: 29179

SEQ ID NO: 29199 - DNA, 201 bp, Homo sapiens; identical to SEQ ID NO: 29175

SEQ ID NO: 29200 - DNA, 169 bp, Homo sapiens; identical to SEQ ID NO: 29176

SEQ ID NO: 29201 - DNA, 201 bp, Homo sapiens; identical to SEQ ID NO: 29178

SEQ ID NO: 29202 - DNA, 186 bp, Homo sapiens
tatatgttaaaactttttatataagagtctttagaaaaataatggatatggcatgatattatacactaagcttataaaataatgacccaaacaaattcttyttagttaacattgttttgtgtatatttattagatatgaaaacatggtaggatgccacatctgtaactagtgaaactgcttttagt

SEQ ID NO: 29203 - DNA, 189 bp, Homo sapiens
taatatatgttaaaactttttatataagagtctttagaaaaataatggatatggcatgatattatacactaagcttataaaataatgacccaaacaaattyttcttagttaacattgttttgtgtatatttattagatatgaaaacatggtaggatgccacatctgtaactagtgaaactgcttttagt

SEQ ID NO: 29204 - DNA, 121 bp, Homo sapiens; identical to SEQ ID NO: 29180

SEQ ID NO: 29205 - DNA, 201 bp, Homo sapiens
ccgggagttggagcctgcggagttcgagaccatgctgctgttctgccccggctgcgggaacgggctgatcgtggaggagggacaacgctgccaccgcttckcctgcaacacgtgcccctacgtgcacaacatcacccgcaaggtaacaaatcggaagtacccaaaactgaaagaagtggatgatgtgcttggtggagcagc

SEQ ID NO: 29206 - DNA, 148 bp, Homo sapiens
ttagtacatgtccctaaatatttaactgttacttgtaaacttgtgtaatttattatttattttaatcaaaattctgaatatttcatttaaatgaaagttgsaatattgccttctcagtgttttaaatagcttaagaggtagaaagcaa

SEQ ID NO: 29207 - DNA, 201 bp, Homo sapiens
tgagggtctttgctagtgtggtggaaagataaaccttttgaggtgaagagccagggggtcaggaaatatggcctatctgccaggcagggtggatgaagtcrtgaatgtctgggagtttttctgtgtggggaggagacagagacccataactaaatatgctctgtgtaaagtcctattctttcatcttccactttattggca

SEQ ID NO: 29208 - DNA, 201 bp, Homo sapiens
gtgtggacaccgctggagggattagggccaggatggcccagctgccctagtgtgtgcttgccttgtccctcggggtagatgcttagctggcagtatgagtygtgtgtcctgagggtctttgctagtgtggtggaaagataaaccttttgaggtgaagagccagggggtcaggaaatatggcctatctgccaggcagggtgg

SEQ ID NO: 29209 - DNA, 201 bp, Homo sapiens
ccttaaaggcaagagtggactgagggtattttttcctctttgcggaaaagcggttgagatgaaatggtatgagcagataaacattaacagaattatcttgycttaatgatgaattctttgggtgatttaacaggatgtgagttttaaaactccattttcaggaaatacacagaaattccttatttttctattagtgatggg

SEQ ID NO: 29210 - DNA, 201 bp, Homo sapiens
aacagaaacaggtatgaagtctttctggattgagttttgaaattaaaaaatcagtttggagccaatggggggagaaaaaacagccttcccttttacatttyctggatccttgtatgtggttcagtttttgtaggtggtttaggaatttagctaagttaatttttagatatttgaaatggtggtggacagagaaattcaaaa

SEQ ID NO: 29211 - DNA, 140 bp, Homo sapiens
acgtgcctgtaatcccagctacttgggaggctgaggcaggagaatcacttgaacctaggaggcggaggttgcagtgagctgagatcatgccactgcacgcmagcctgggcaacagagcaagactctgtctcaaaagaaag

SEQ ID NO: 29212 - DNA, 201 bp, Homo sapiens
aagaagtttcagtatctcctgtgtgttctttcttatgatccaactaaacatccaggtccaccattttatgttccacatgctgaaattgaaaggttgtttgrtaaaatatgcaatatacgttgtcttgagaaggttgatgcttttgaagaacgacataaaagttggggaattgactgtctttttgaaaagttatatctactt

SEQ ID NO: 29213 - DNA, 201 bp, Homo sapiens
cggggaacatttcattgtactgttgcagtatttttgatcttcccaggacaaatattggcaaatttgacatgatttgggatagaggagcattagttgccatyaatccaggtgatcgcaaatgctatgcagatacaatgttttccctcctgggaaagaagtttcagtatctcctgtgtgttctttcttatgatccaactaaac

SEQ ID NO: 29214 - DNA, 201 bp, Homo sapiens
tcaccggttgaatggacaactaacccgagctggaccaacacaattctctccagagacttttgattttacttttatgtagagacagggtctcactttgttgsccacgctgatgttgaacttgacgtgaggcctcaagcagtcctcctgtcttggccacccaaagtgctaggattacaggtatgagccattgcgctggccctc

SEQ ID NO: 29215 - DNA, 201 bp, Homo sapiens
gctgatctcgagctcctgacctcaggtgatctacccacctcggcctcccaaagtgctgggattacaggcgtgagccactgcacctggcctgacattctttwtgaaatttagaattgttgaagaactataacatttcagtagggttcaaggtggtcccaaaagttatataaaagattagtttttactataaacccttgtctt

SEQ ID NO: 29216 - DNA, 201 bp, Homo sapiens
ttgtttggtaaaatatgcaatatacgttgtcttgagaaggttgatgcttttgaagaacgacataaaagttggggaattgactgtctttttgaaaagttatrtctacttacagaaaagtaaatgagacatagataaaataaaatcacactgacatgtttttgaggaattgaaaattatgctaaagcctgaaaatgtaatgga

SEQ ID NO: 29217 - DNA, 201 bp, Homo sapiens
gtccaccattttatgttccacatgctgaaattgaaaggttgtttggtaaaatatgcaatatacgttgtcttgagaaggttgatgcttttgaagaacgacakaaaagttggggaattgactgtctttttgaaaagttatatctacttacagaaaagtaaatgagacatagataaaataaaatcacactgacatgtttttgag

SEQ ID NO: 29218 - DNA, 201 bp, Homo sapiens
ctattaaagaagcatttagatactttccttaaaggcaagagtggactgagggtattttttcctctttgttgcagtgagctgagatcatgccactgcacgcmagcctgggcaacagagcaagactctgtctcaaaagaaagaaaaagaaaagaaaaaaaagaaaggcaagttgactgctgaaaggggaatctgtgtacgcct

SEQ ID NO: 29219 - DNA, 201 bp, Homo sapiens; identical to SEQ ID NO: 29212

SEQ ID NO: 29220 - DNA, 201 bp, Homo sapiens; identical to SEQ ID NO: 29213

SEQ ID NO: 29221 - DNA, 201 bp, Homo sapiens; identical to SEQ ID NO: 29214

SEQ ID NO: 29222 - DNA, 201 bp, Homo sapiens
tcagctattaaagaagcatttagatactttccttaaaggcaagagtggactgagggtattttttcctctttgcggaaaagcggttgagatgaaatggtttscagaccggggacacagtgtagttggtgtggaaatcagtgaacttgggatacaagaattttttacagagcagaatctttcttactcagaagaaccaatcac

SEQ ID NO: 29223 - DNA, 201 bp, Homo sapiens; identical to SEQ ID NO: 29216

SEQ ID NO: 29224 - DNA, 201 bp, Homo sapiens; identical to SEQ ID NO: 29217

SEQ ID NO: 29225 - DNA, 201 bp, Homo sapiens
cagaccggggacacagtgtagttggtgtggaaatcagtgaacttgggatacaagaattttttacagagcagaatctttcttactcagaagaaccaatcacygaaattcctggaaccaaagtatttaagagttcttcggggaacatttcattgtactgttgcagtatttttgatcttcccaggacaaatattggcaaatttg

SEQ ID NO: 29226 - DNA, 140 bp, Homo sapiens; identical to SEQ ID NO: 29211

SEQ ID NO: 29227 - DNA, 201 bp, Homo sapiens; identical to SEQ ID NO: 29215

SEQ ID NO: 29228 - DNA, 201 bp, Homo sapiens
ggtattttttcctctttgcggaaaagcggttgagatgaaatggtttgcagaccggggacacagtgtagttggtgtggaaatcagtgaacttgggatacaakaattttttacagagcagaatctttcttactcagaagaaccaatcaccgaaattcctggaaccaaagtatttaagagttcttcggggaacatttcattgta

SEQ ID NO: 29229 - DNA, 201 bp, Homo sapiens; identical to SEQ ID NO: 29212

SEQ ID NO: 29230 - DNA, 201 bp, Homo sapiens; identical to SEQ ID NO: 29213

SEQ ID NO: 29231 - DNA, 201 bp, Homo sapiens; identical to SEQ ID NO: 29214

SEQ ID NO: 29232 - DNA, 201 bp, Homo sapiens; identical to SEQ ID NO: 29222

SEQ ID NO: 29233 - DNA, 201 bp, Homo sapiens; identical to SEQ ID NO: 29216

SEQ ID NO: 29234 - DNA, 201 bp, Homo sapiens; identical to SEQ ID NO: 29217

SEQ ID NO: 29235 - DNA, 201 bp, Homo sapiens; identical to SEQ ID NO: 29225

SEQ ID NO: 29236 - DNA, 201 bp, Homo sapiens
acgtgcctgtaatcccagctacttgggaggctgaggcaggagaatcacttgaacctaggaggcggaggttgcagtgagctgagatcatgccactgcacgcmagcctgggcaacagagcaagactctgtctcaaaagaaagaaaaagaaaagaaaaaaaagaaaggcaagttgactgctgaaaggggaatctgtgtacgcct

SEQ ID NO: 29237 - DNA, 201 bp, Homo sapiens; identical to SEQ ID NO: 29215

SEQ ID NO: 29238 - DNA, 201 bp, Homo sapiens; identical to SEQ ID NO: 29228

SEQ ID NO: 29239 - DNA, 201 bp, Homo sapiens; identical to SEQ ID NO: 29212

SEQ ID NO: 29240 - DNA, 201 bp, Homo sapiens; identical to SEQ ID NO: 29214

SEQ ID NO: 29241 - DNA, 201 bp, Homo sapiens; identical to SEQ ID NO: 29222

SEQ ID NO: 29242 - DNA, 201 bp, Homo sapiens; identical to SEQ ID NO: 29216

SEQ ID NO: 29243 - DNA, 201 bp, Homo sapiens; identical to SEQ ID NO: 29217

SEQ ID NO: 29244 - DNA, 201 bp, Homo sapiens; identical to SEQ ID NO: 29225

SEQ ID NO: 29245 - DNA, 140 bp, Homo sapiens; identical to SEQ ID NO: 29211

SEQ ID NO: 29246 - DNA, 201 bp, Homo sapiens; identical to SEQ ID NO: 29215

SEQ ID NO: 29247 - DNA, 201 bp, Homo sapiens; identical to SEQ ID NO: 29228

SEQ ID NO: 29248 - DNA, 101 bp, Homo sapiens
ccctgaagcccagctgcccagggtggggagaaacaccctgtgtccatgggatagagtcctttccgcttgcagttgtgcccaaagaatcttaaatacaaatr

SEQ ID NO: 29249 - DNA, 201 bp, Homo sapiens
cggggaacatttcattgtactgttgcagtatttttgatcttcccaggacaaatattggcaaatttgacatgatttgggatagaggagcattagttgccatyaatccaggtgatcgcaaatggtccaccattttatgttccacatgctgaaattgaaaggttgtttggtaaaatatgcaatatacgttgtcttgagaaggtt

SEQ ID NO: 29250 - DNA, 201 bp, Homo sapiens; identical to SEQ ID NO: 29214

SEQ ID NO: 29251 - DNA, 201 bp, Homo sapiens; identical to SEQ ID NO: 29222

SEQ ID NO: 29252 - DNA, 201 bp, Homo sapiens; identical to SEQ ID NO: 29216

SEQ ID NO: 29253 - DNA, 201 bp, Homo sapiens; identical to SEQ ID NO: 29217

SEQ ID NO: 29254 - DNA, 201 bp, Homo sapiens; identical to SEQ ID NO: 29225

SEQ ID NO: 29255 - DNA, 201 bp, Homo sapiens; identical to SEQ ID NO: 29236

SEQ ID NO: 29256 - DNA, 201 bp, Homo sapiens; identical to SEQ ID NO: 29215

SEQ ID NO: 29257 - DNA, 201 bp, Homo sapiens; identical to SEQ ID NO: 29228

SEQ ID NO: 29258 - DNA, 201 bp, Homo sapiens
taattaagtgtctgggtactctgccagtcaggagagatgttaccaaaggtacaggatttgagaagtattgtcagaagagccaagttcataatcaggcccayaggatcaataatttgggggagtgtttagagcagtttcaaagatgagagcagtagatcaaagtagaatttcaggactgagcacatgccaaggcaccctttt

SEQ ID NO: 29259 - DNA, 201 bp, Homo sapiens
ttcaagattgactataaatctcttagttacaactcacatcccctttccccagacaaaaccccacatagcccggtgtgtatttactgaaagcagtaagataytgctggggctttgggtgcaagatggagagtgctcagagataatgacaggggcctggtcctgcagggccttacgtagaaagtcaaggaatttattctctga

SEQ ID NO: 29260 - DNA, 201 bp, Homo sapiens
ggaaatcaaagaaacattctgacaatacagagattcatcaagcaatttgtctttgaaagttgattattcaaaaacagagcttgtagcaaaagaagcagaarttagatcccacagtcatcaagtttcagatcctaaggcttgcattcttacaccaatttcttctttgcttaaatcttaattttcatcagcattaattaagtg

SEQ ID NO: 29261 - DNA, 201 bp, Homo sapiens
aagatggagagtgctcagagataatgacaggggcctggtcctgcagggccttacgtagaaagtcaaggaatttattctctgagcaattgaaaatcatcccraaagatctgcattttagaaataccatgttgagtagttgcataagaaaccagttaggaggcccctttttattggaggtagagaataatgagagactgaact

SEQ ID NO: 29262 - DNA, 201 bp, Homo sapiens
aatatgagctcttcccttcaagattgactataaatctcttagttacaactcacatcccctttccccagacaaaaccccacatagcccggtgtgtatttacygaaagcagtaagatattgctggggctttgggtgcaagatggagagtgctcagagataatgacaggggcctggtcctgcagggccttacgtagaaagtcaa

SEQ ID NO: 29263 - DNA, 201 bp, Homo sapiens
cacaaatgtgatctacttatgactggaaaaaatgtgtactttcagagccagcttgaggcattccattgcctccaatatgagctcttcccttcaagattgastataaatctcttagttacaactcacatcccctttccccagacaaaaccccacatagcccggtgtgtatttactgaaagcagtaagatattgctggggctt

SEQ ID NO: 29264 - DNA, 130 bp, Homo sapiens
gcggattgtgccgggcgtcggcaactgctyggctcgccagactgttcacgggcccagtagagcagtaaataaccggccacccctgcggccgtgccggccgtgatggaactagacagctcacccgactcga

SEQ ID NO: 29265 - DNA, 201 bp, Homo sapiens
aaatacatgtaaagatcaggaaaatgaacttttaaaaataaagggctttcactgggcatgataacacatccctgtagtcccagctactcccagctattcakgaggctgaggcggcaggatcacttgaaccaaggagttcaagtttagcctgggcagtatagtgaaaccctttctcaaaaacaaataaagggctactgaaat

SEQ ID NO: 29266 - DNA, 145 bp, Homo sapiens
gcggattgtgccgggcgtcggcaactgctcggctcgccagactgytcacgggcccagtagagcagtaaataaccggccacccctgcggccgtgccggccgtgatggaactagacagctcacccgactcgagaagaacggggtggg

SEQ ID NO: 29267 - DNA, 138 bp, Homo sapiens
tattctgttatctggactagaattttcaatcaatgtgtttgaaaataatgttgctatcacctatttggttgagttttggttttttctttttcttttttttyccaaaaataaagacagcccatttttgtcatttccatt

SEQ ID NO: 29268 - DNA, 201 bp, Homo sapiens
acctgatgagagaaagaattgccaaaaaattaaaaaaggacacaagtgcgaatgttaaatcagctggagaaggagaagtggagaagaaatcagtcagccgyagtgaagagctcagaaaagaagcaagacaattaaaacgggaactcttagcagcaaaacaaaaaaaagtagaaaatgcagcaaaacaagcagaaaaaagaa

SEQ ID NO: 29269 - DNA, 201 bp, Homo sapiens
ggggtagtgtttggtgtccctgtcttgcgtgatattgacaaactgaagctttcctgcaccactggacttaaggaagagtgtactcgtaggcggacagcttyagtggccggccggccgctctcatcccccgtaaggagcagagtcctttgtactgaccaagatgagcaacatctacatccaggagcctcccacgaatgggaa

SEQ ID NO: 29270 - DNA, 201 bp, Homo sapiens
tcagagcatgaagggcaaaagcaaaagtagtcatgacttgcttaaggatgatccacatctcagttctgttccagttgtagaaagtgaaaaaggtgatgcascagatttagttgatgatggagaagatgaaagtgcagagcatgatgaatatattgatggtgatgaaaagaacctgatgagagaaagaattgccaaaaaatt

SEQ ID NO: 29271 - DNA, 201 bp, Homo sapiens
tgatattgacaaactgaagctttcctgcaccactggacttaaggaagagtgtactcgtaggcggacagctttagtggccggccggccgctctcatcccccrtaaggagcagagtcctttgtactgaccaagatgagcaacatctacatccaggagcctcccacgaatgggaaggttttattgaaaactacagctggagata

SEQ ID NO: 29272 - DNA, 201 bp, Homo sapiens
aaatgcagcaaaacaagcagaaaaaagaagtgaagaggaagaagcccctccagatggtgctgttgccgaatacagaagagaaaagcaaaagtatgaagctytgaggaagcaacagtcaaagaagggaacttcccgggaagatcagacccttgcactgctgaaccagtttaaatctaaactcactcaagcaattgctgaaac

SEQ ID NO: 29273 - DNA, 201 bp, Homo sapiens
tgaggaagcaacagtcaaagaagggaacttcccgggaagatcagacccttgcactgctgaaccagtttaaatctaaactcactcaagcaattgctgaaacrcctgaaaatgacattcctgaaacagaagtagaagatgatgaaggatggatgtcacatgtacttcagtttgaggataaaagcagaaaagtgaaagatgcaa

SEQ ID NO: 29274 - DNA, 201 bp, Homo sapiens
caaagtgaaagaaggcatgaatattgtggaggccatggagcgctttgggtccaggaatggcaagaccagcaagaagatcaccattgctgactgtggacaartcgaataagtttgacttgtgttttatcttaaccaccagatcattccttctgtagctcaggagagcacccctccaccccatttgcttgcagtatcccagta

SEQ ID NO: 29275 - DNA, 201 bp, Homo sapiens
ctgaaatcttgtccatggcaaatgctggacccaacacaaatggttcccagtttttcatctgcactgccaagactgagtggttggatggcaagcatgtggtstttggcaaagtgaaagaaggcatgaatattgtggaggccatggagcgctttgggtccaggaatggcaagaccagcaagaagatcaccattgctgactgtg

SEQ ID NO: 29276 - DNA, 201 bp, Homo sapiens
caagtcaccactgggagaaatttgaagatgagaacttcatcctaaagcatacaggtcctgaaatcttgtccatggcaaatgctggacccaacacaaatggwtcccagtttttcatctgcactgccaagactgagtggttggatggcaagcatgtggtctttggcaaagtgaaagaaggcatgaatattgtggaggccatgg

SEQ ID NO: 29277 - DNA, 201 bp, Homo sapiens
ctttgcagacgccgccgccgaggaaaaccgtgtgctattagccatggtcaaccccaccatgttcttcgacattgccgtcgacggtgagcccttgggccgcrtctcctttgagctgtttgcagacaaggtcccaaagacagcagaaaattttcgtgctctgagcactggagagaaaggatttggttataagggttcctgctt

SEQ ID NO: 29278 - DNA, 136 bp, Homo sapiens
ggctttgcagacgccgccgccgaggaaaaccgtgtrctattagccatggtcaaccccaccatgttcttcgacattgccgtcgacggtgagcccttgggccgcgtctcctttgagctgtttgcagacaaggtcccaa

SEQ ID NO: 29279 - DNA, 201 bp, Homo sapiens
caaagtgaaagaaggcatgaatattgtggaggccatggagcgctttgggtccaggaatggcaagaccagcaagaagatcaccattgctgactgtggacaartcgaataagtttgacttgtgttttatcttaaccaccagatcattccttctgtagctcaggagagcacccctcctttgggttccatgttttccttgttccc

SEQ ID NO: 29280 - DNA, 201 bp, Homo sapiens; identical to SEQ ID NO: 29275

SEQ ID NO: 29281 - DNA, 201 bp, Homo sapiens; identical to SEQ ID NO: 29276

SEQ ID NO: 29282 - DNA, 201 bp, Homo sapiens; identical to SEQ ID NO: 29277

SEQ ID NO: 29283 - DNA, 136 bp, Homo sapiens; identical to SEQ ID NO: 29278

SEQ ID NO: 29284 - DNA, 201 bp, Homo sapiens
tattagccatggtcaaccccaccatgttcttcgacattgccgtcgacggtgagcccttgggccgcgtctcctttgaggtaaggggcctggaaaccaagaastgactgctcatctaatccataaagctatgttaacagattggagctgtttgcagacaaggtcccaaagacagcagaaaattttcgtgctctgagcactgga

SEQ ID NO: 29285 - DNA, 201 bp, Homo sapiens; identical to SEQ ID NO: 29274

SEQ ID NO: 29286 - DNA, 201 bp, Homo sapiens; identical to SEQ ID NO: 29275

SEQ ID NO: 29287 - DNA, 201 bp, Homo sapiens; identical to SEQ ID NO: 29276

SEQ ID NO: 29288 - DNA, 201 bp, Homo sapiens
ctttgcagacgccgccgccgaggaaaaccgtgtgctattagccatggtcaaccccaccatgttcttcgacattgccgtcgacggtgagcccttgggccgcrtctcctttgaggtaaggggcctggaaaccaagaagtgactgctcatctaatccataaagctatgttaacagattggagctgtttgcagacaaggtcccaa

SEQ ID NO: 29289 - DNA, 135 bp, Homo sapiens
gctttgcagacgccgccgccgaggaaaaccgtgtrctattagccatggtcaaccccaccatgttcttcgacattgccgtcgacggtgagcccttgggccgcgtctcctttgaggtaaggggcctggaaaccaaga

SEQ ID NO: 29290 - DNA, 201 bp, Homo sapiens
gattcccatcccagtcactctgaagcacccatggaacatggacgagaacctcatgcacatcagccacgaggctggaatcttggagaaccccaagaaccaascaccttcaggtctctacatgaagattcaggacctggccaaagcccccaacacccccaacattttcaagactgagtaaaaaaggggtccctgtgaaggtga

SEQ ID NO: 29291 - DNA, 201 bp, Homo sapiens
caggaattgcacctccaatcccagatgctatgttcagcaaaggctccatggttctggcctacagtgccggcctggacacctcctgcatcctcgtgtggctraaggaacaaggctatgacattattgcctacctggccaatgttggccagaaggaagacttcaaggaagccaggaagaaggcactgaaccttgggtccaaaa

SEQ ID NO: 29292 - DNA, 201 bp, Homo sapiens
ggaacaggaagtgcgcaaaatcaaacaaggcctgggcttgaaatttgctgagttggtgtacaccggtttctggcacaaccctcagtgtgactttgcccacyactgcattgccaagtcccaggaccgagtggaagggaaagtgcaggtatccatcttcaagggccaggtgtacatcctctgccaggagcccccactgtctct

SEQ ID NO: 29293 - DNA, 201 bp, Homo sapiens
cttctatgtggagtctgtctgcatggccgctgtcaacatcattgccaagagggctgtgctggagcccggtgggtgggccaggatggcactgggtggggatrccactgtccaggtgtccccaggccctggaggagaggaagggcagagggttgggctctgtcccaggagctggggagccgcccctcttcccctgcaccctct

SEQ ID NO: 29294 - DNA, 201 bp, Homo sapiens
caggatggcactgggtggggatgccactgtccaggtgtccccaggccctggaggagaggaagggcagagggttgggctctgtcccaggagctggggagccrcccctcttcccctgcaccctctatgtcccatgtgcgatgcctttgacaggctcttcttggaggatgtgcggctgcccgagctggatgtaggcgattggct

SEQ ID NO: 29295 - DNA, 201 bp, Homo sapiens
ctatgtggagtctgtctgcatggccgctgtcaacatcattgccaagagggctgtgctggagcccggtgggtgggccaggatggcactgggtggggatgccmctgtccaggtgtccccaggccctggaggagaggaagggcagagggttgggctctgtcccaggagctggggagccgcccctcttcccctgcaccctctatg

SEQ ID NO: 29296 - DNA, 201 bp, Homo sapiens
gatacaactgcagctgcaataaactggtccttatacctgttgggttctaacccagaagtccagaaaaaagtggatcatgaattggatgacgtgtttggtcrtcttatctacttgctttcatcagggaagtctgaccgtcccgctacagtagaagacctgaagaaacttcggtatctggaatgtgttattaaggagaccctt

SEQ ID NO: 29297 - DNA, 201 bp, Homo sapiens
ctgtgagtggggcaggcatggagcaactgcccagggaggcgaagggaaggaagaacaggaacagggagtagaagtggaccgtacaagagaagaggaaacarctatggggaagaatattggtgctcaaagtaatgatgattccgagtatgtccgtgcagtttatagaatgagtgagatgatatttcgaagaataaagatgcc

SEQ ID NO: 29298 - DNA, 201 bp, Homo sapiens
tttcccggagtgcaccccgcggccgccagccggggcgatggcggggctctggctggggctcgtgtggcagaagctgctgctgtggggcgcggcgagtgccstttccctggccggcgccagtctggtcctgagcctgctgcagagggtggcgagctacgcgcggaaatggcagcagatgcggcccatccccacggtggcccg

SEQ ID NO: 29299 - DNA, 201 bp, Homo sapiens
gttaagaaacttgaaaaacacattaaccaagaagcatttaactgctttttttacatcactctttgtgccttagatatcatctgtggaaatcacactccacygggaaggcaaatggggggacgggaaagggtgacgggctcttcagcgcggttctacgaccgcactggccttctgaggagcagcagccacgcccagggctgt

SEQ ID NO: 29300 - DNA, 201 bp, Homo sapiens
tttcggctggggcgtggaggccgcggtgctgcgtaggccgggccgggcgcaggaacagccccgtggcgccctctctggccgccgcccgggcgggaaacgtygttccggggaccgggcgaccccgcagcggggagcgcgccaggtccgcgcggggaagtgggcggtgtgcggccggcaccgcctcgcaccacgcccccgcgg

SEQ ID NO: 29301 - DNA, 201 bp, Homo sapiens
cacaagggcgccatccatatgcctacgtgcccttctctgctggccccaggaactgtataggtcaaaagtttgctgtgatggaagaaaagaccattctttcrtgcatcctgaggcacttttggatagaatccaaccagaaaagagaagagcttggtctagaaggacagttgattcttcgtccaactgcaattgaagaagaga

SEQ ID NO: 29302 - DNA, 201 bp, Homo sapiens
aatgagtgagatgatatttcgaagaataaagatgccctggctttggcttgatctctggtaccttatgtttaaagaaggatgggaacacaaaaagagccttmagatcctacatacttttaccaacagtgtcatcgcggaacgggccaatgaaatgaacgccaatgaagactgtagaggtgatggcaggggctctgccccctc

SEQ ID NO: 29303 - DNA, 201 bp, Homo sapiens
tacagtagaagacctgaagaaacttcggtatctggaatgtgttattaaggagacccttcgcctttttccttctgttcctttatttgcccgtagtgttagtsaagattgtgaagtggcaggttacagagttctaaaaggcactgaagccgtcatcattccctatgcattgcacagagatccgagatacttccccaaccccga

SEQ ID NO: 29304 - DNA, 201 bp, Homo sapiens
aaactggtccttatacctgttgggttctaacccagaagtccagaaaaaagtggatcatgaattggatgacgtgtttggtcatcttatctacttgctttcawcagggaagtctgaccgtcccgctacagtagaagacctgaagaaacttcggtatctggaatgtgttattaaggagacccttcgcctttttccttctgttcc

SEQ ID NO: 29305 - DNA, 201 bp, Homo sapiens
tgcagctgcaataaactggtccttatacctgttgggttctaacccagaagtccagaaaaaagtggatcatgaattggatgacgtgtttggtcatcttatcwacttgctttcatcagggaagtctgaccgtcccgctacagtagaagacctgaagaaacttcggtatctggaatgtgttattaaggagacccttcgcctttt

SEQ ID NO: 29306 - DNA, 201 bp, Homo sapiens
ccactttccattttaccattctggaagatttcttagatatcatgaatgaacaagcaaatatattggttaagaaacttgaaaaacacattaaccaagaagcwtttaactgctttttttacatcactctttgtgccttagatatcatctgtggaaatcacactccaccgggaaggcaaatggggggacgggaaagggtgacgg

SEQ ID NO: 29307 - DNA, 201 bp, Homo sapiens
cctggctttggcttgatctctggtaccttatgtttaaagaaggatgggaacacaaaaagagccttaagatcctacatacttttaccaacagtgtcatcgckgaacgggccaatgaaatgaacgccaatgaagactgtagaggtgatggcaggggctctgccccctccaaaaataaacgcagggcctttcttgacttgcttt

SEQ ID NO: 29308 - DNA, 201 bp, Homo sapiens
tgatctctggtaccttatgtttaaagaaggatgggaacacaaaaagagccttaagatcctacatacttttaccaacagtgtcatcgcggaacgggccaatraaatgaacgccaatgaagactgtagaggtgatggcaggggctctgccccctccaaaaataaacgcagggcctttcttgacttgcttttaagtgtgactga

SEQ ID NO: 29309 - DNA, 201 bp, Homo sapiens
tttcgctttcggctggggcgtggaggccgcggtgctgcgtaggccgggccgggcgcaggaacagccccgtggcgccctctctggccgccgcccgggcgggraacgtcgttccggggaccgggcgaccccgcagcggggagcgcgccaggtccgcgcggggaagtgggcggtgtgcggccggcaccgcctcgcaccacgccc

SEQ ID NO: 29310 - DNA, 201 bp, Homo sapiens
aagaaggatgggaacacaaaaagagccttaagatcctacatacttttaccaacagtgtcatcgcggaacgggccaatgaaatgaacgccaatgaagactgyagaggtgatggcaggggctctgccccctccaaaaataaacgcagggcctttcttgacttgcttttaagtgtgactgatgacgaagggaacaggctaagtc

SEQ ID NO: 29311 - DNA, 201 bp, Homo sapiens
taacccagaagtccagaaaaaagtggatcatgaattggatgacgtgtttggtcatcttatctacttgctttcatcagggaagtctgaccgtcccgctacartagaagacctgaagaaacttcggtatctggaatgtgttattaaggagacccttcgcctttttccttctgttcctttatttgcccgtagtgttagtgaaga

SEQ ID NO: 29312 - DNA, 201 bp, Homo sapiens
ttgaggggcacgatacaactgcagctgcaataaactggtccttatacctgttgggttctaacccagaagtccagaaaaaagtggatcatgaattggatgaygtgtttggtcatcttatctacttgctttcatcagggaagtctgaccgtcccgctacagtagaagacctgaagaaacttcggtatctggaatgtgttatta

SEQ ID NO: 29313 - DNA, 201 bp, Homo sapiens
ttctaaaaggcactgaagccgtcatcattccctatgcattgcacagagatccgagatacttccccaaccccgaggagttccagcctgagcggttcttcccsgagaatgcacaagggcgccatccatatgcctacgtgcccttctctgctggccccaggaactgtataggtcaaaagtttgctgtgatggaagaaaagacca

SEQ ID NO: 29314 - DNA, 201 bp, Homo sapiens
gcccagggaggcgaagggaaggaagaacaggaacagggagtagaagtggaccgtacaagagaagaggaaacagctatggggaagaatattggtgctcaaartaatgatgattccgagtatgtccgtgcagtttatagaatgagtgagatgatatttcgaagaataaagatgccctggctttggcttgatctctggtacctt

SEQ ID NO: 29315 - DNA, 201 bp, Homo sapiens
tcatagggctgttgtgaggattaggatgaaatacctgtgaaagtgcctaggcagtgccagccaaataggaggcattcaatgaacattttttgcatataaamcaaaaaataacttgttatcaataaaaacttgcatccaacatgaatttccagccgatgataatccaggccaaaggtttagttgttgttatttcctctgtat

SEQ ID NO: 29316 - DNA, 201 bp, Homo sapiens
gagggagcctcactgaaacgaactccggtctcaggggacagaatcctgaaaccctggctctggggtccggggcaggggtgcgctgcctcaggacagacggkgaaactgaggtccagagccggacatccaccgcctgcggagggaacgagaacgcggcgcgtcctgccttgcgggccgagcggcgccagagccgcctcctcc

SEQ ID NO: 29317 - DNA, 201 bp, Homo sapiens
cggtgtccctggtggtgaatgtggccagcgagtgcggcttcacagaccagcactaccgagccctgcagcagctgcagcgagacctgggcccccaccacttyaacgtgctcgccttcccctgcaaccagtttggccaacaggagcctgacagcaacaaggagattgagagctttgcccgccgcacctacagtgtctcattcc

SEQ ID NO: 29318 - DNA, 201 bp, Homo sapiens
ttgaccagtgaatcaccagccgatacgaacgtcttgccaacaaaaatgtgtggcaaatagaagtatatcaagcaataatctcccacccaaggcttctgtaractgggaccaatgattacctcatagggctgttgtgaggattaggatgaaatacctgtgaaagtgcctaggcagtgccagccaaataggaggcattcaatg

SEQ ID NO: 29319 - DNA, 122 bp, Homo sapiens
aaatgcgcagctcttagtcgcrggccgactggtgtttatccgtcactcgccgaggttccttgggtcatggtgccagcctgactgagaagaggacgctcccgggagacgaatgaggaaccacc

SEQ ID NO: 29320 - DNA, 201 bp, Homo sapiens
atgaggtctgtttaaagtggcaatctcagatgcagtttggagagtcagatctttctccttgaatatctttcgataaacaacaaggtggtgtgatcttaatrtatttgaaaaaaacttcattctcgtgagtcatttaaatgtgtacaatgtacacactggtacttagagtttctgtttgattcttttttaataaactactct

SEQ ID NO: 29321 - DNA, 201 bp, Homo sapiens
ttccaaagctttattaccagtggcgttgttgcatgtttgaaatgaggtctgtttaaagtggcaatctcagatgcagtttggagagtcagatctttctcctygaatatctttcgataaacaacaaggtggtgtgatcttaatatatttgaaaaaaacttcattctcgtgagtcatttaaatgtgtacaatgtacacactggt

SEQ ID NO: 29322 - DNA, 201 bp, Homo sapiens
ttgcagaagtgccgaaagagcactggactccggaaggacacagcattgttggttttgccatgtactattttacctatgacccgtggattggcaagttattstatcttgaggacttcttcgtgatgagtgattatagaggctttggcataggatcagaaattctgaagaatctaagccaggttgcaatgaggtgtcgctgca

SEQ ID NO: 29323 - DNA, 126 bp, Homo sapiens
aaatgcgcagctcttagtcgcgggcygactggtgtttatccgtcactcgccgaggttccttgggtcatggtgccagcctgactgagaagaggacgctcccgggagacgaatgaggaaccacctcct

SEQ ID NO: 29324 - DNA, 201 bp, Homo sapiens
aagggaagaaaagcaaaagacgaaaatggctaaattcgtgatccgcccagccactgccgccgactgcagtgacatactgcggctgatcaaggagctggctraatatgaatacatggaagaacaagtaatcttaactgaaaaagatctgctagaagatggttttggagagcaccccttttaccactgcctggttgcagaagt

SEQ ID NO: 29325 - DNA, 201 bp, Homo sapiens
ggagtgctgctgtagatgacaacctccattctattttagaataaattcccaacttctcttgctttctatgctgtttgtagtgaaataatagaatgagcacycattccaaagctttattaccagtggcgttgttgcatgtttgaaatgaggtctgtttaaagtggcaatctcagatgcagtttggagagtcagatctttctc

SEQ ID NO: 29326 - DNA, 122 bp, Homo sapiens; identical to SEQ ID NO: 29319

SEQ ID NO: 29327 - DNA, 201 bp, Homo sapiens; identical to SEQ ID NO: 29320

SEQ ID NO: 29328 - DNA, 201 bp, Homo sapiens; identical to SEQ ID NO: 29321

SEQ ID NO: 29329 - DNA, 201 bp, Homo sapiens
ctttacacaataaagtagatgatcatgataaatgaggacacagcattgttggttttgccatgtactattttacctatgacccgtggattggcaagttattstatcttgaggacttcttcgtgatgagtgattatagaggctttggcataggatcagaaattctgaagaatctaagccaggttgcaatgaggtgtcgctgca

SEQ ID NO: 29330 - DNA, 126 bp, Homo sapiens; identical to SEQ ID NO: 29323

SEQ ID NO: 29331 - DNA, 201 bp, Homo sapiens; identical to SEQ ID NO: 29324

SEQ ID NO: 29332 - DNA, 201 bp, Homo sapiens; identical to SEQ ID NO: 29325

SEQ ID NO: 29333 - DNA, 201 bp, Homo sapiens
agaggtcacctctggcttttattcccttctcggcagggcccagaaactgcatcgggcaggcgttcgccatggctgagatgaaggtggtcctggcgctcacsctgctgcacttccgcatcctgccgacccacactgaaccccgcaggaaacccgagctgatattgcgcgcagagggtggactttggctgcgggtggagcccc

SEQ ID NO: 29334 - DNA, 201 bp, Homo sapiens
cgtcatccccaaaggcattgtctgcctcatcaatattatcgggatccattacaacccaactgtgtggccagaccctgaggtctacgaccccttccgtttcraccaagagaacatcaaggagaggtcacctctggcttttattcccttctcggcagggcccagaaactgcatcgggcaggcgttcgccatggctgagatgaa

SEQ ID NO: 29335 - DNA, 201 bp, Homo sapiens
cctagcagagggggagaggagggatgccgcagctgagcctgtcctggctgggcctcgggcccgtggcagcatccccgtggctgcttctgctgctggttggrggctcctggctcctggcccgcgtcctggcctggacctacaccttctatgacaactgccgccgcctccagtgttttcctcaacccccgaaacagaactggt

SEQ ID NO: 29336 - DNA, 117 bp, Homo sapiens
ggcttggaagacacacycagtccatggggattggctcgaccagcccagcccagcctcgcctcccacagccttccggaaatcaggggccagaggcaaagacctcctagcagaggggga

SEQ ID NO: 29337 - DNA, 201 bp, Homo sapiens
gacccacactgaaccccgcaggaaacccgagctgatattgcgcgcagagggtggactttggctgcgggtggagcccctgggtgcgaactcacagtgactgycctacccacccacccacctctgtagagtcccagaaacaaaactatgctgacacctctgcttgagcctcgttgacagccagcatggggctcctggggactg

SEQ ID NO: 29338 - DNA, 201 bp, Homo sapiens
caccgtcggatgttgacgcctgccttccatttcaacatcttgaagccttatatgaagattttcaacaagagtgtgaacatcatgcacgacaagtggcagcrcctggcctcagagggcagcgccagactggacatgtttgaacacatcagcctcatgaccttggacagtctgcagaaatgtgtcttcagctttgaaagcaat

SEQ ID NO: 29339 - DNA, 201 bp, Homo sapiens
gcatgaagacattgacccagctggtgaccacatatccccagggctttaagttgtggctgggtcctaccttccccctcctcattttatgccaccctgacatyatccggcctatcaccagtgcctcagctgctgtcgcacccaaggatatgattttctatggcttcctgaagccctggctgggggatgggctcctgctgagtg

SEQ ID NO: 29340 - DNA, 201 bp, Homo sapiens
cacggacttcctgtattatctcactcctgatgggcagcgcttccgcagggcctgccacctggtgcacgacttcacagatgccgtcatccaggagcggcgcygcaccctccccactcagggtattgatgatttcctcaagaacaaggcaaagtccaagactttagacttcattgatgtgcttctgctgagcaaggatgaaga

SEQ ID NO: 29341 - DNA, 201 bp, Homo sapiens
ctacccacccacccacctctgtagagtcccagaaacaaaactatgctgacacctctgcttgagcctcgttgacagccagcatggggctcctggggactggwgggatctaagaaagggaggtgagtgggtggaggcagggtgacgtctctgaacccaaaaccctgacggcctctctggctgagcacagggcatctaggccct

SEQ ID NO: 29342 - DNA, 201 bp, Homo sapiens
tgcctcagctgctgtcgcacccaaggatatgattttctatggcttcctgaagccctggctgggggatgggctcctgctgagtggtggtgacaagtggagcygccaccgtcggatgttgacgcctgccttccatttcaacatcttgaagccttatatgaagattttcaacaagagtgtgaacatcatgcacgacaagtggca

SEQ ID NO: 29343 - DNA, 201 bp, Homo sapiens; identical to SEQ ID NO: 29335

SEQ ID NO: 29344 - DNA, 117 bp, Homo sapiens; identical to SEQ ID NO: 29336

SEQ ID NO: 29345 - DNA, 201 bp, Homo sapiens; identical to SEQ ID NO: 29337

SEQ ID NO: 29346 - DNA, 201 bp, Homo sapiens; identical to SEQ ID NO: 29339

SEQ ID NO: 29347 - DNA, 201 bp, Homo sapiens; identical to SEQ ID NO: 29341

SEQ ID NO: 29348 - DNA, 201 bp, Homo sapiens
tgcctcagctgctgtcgcacccaaggatatgattttctatggcttcctgaagccctggctgggggatgggctcctgctgagtggtggtgacaagtggagcygccaccgtcggatgttgacgcctgccttccatttcaacatcttgaagccttatatgaagattttcaacaagagtgtgaacatcatgcacgtgagtccctt

SEQ ID NO: 29349 - DNA, 201 bp, Homo sapiens; identical to SEQ ID NO: 29333

SEQ ID NO: 29350 - DNA, 201 bp, Homo sapiens; identical to SEQ ID NO: 29334

SEQ ID NO: 29351 - DNA, 201 bp, Homo sapiens; identical to SEQ ID NO: 29340

SEQ ID NO: 29352 - DNA, 201 bp, Homo sapiens; identical to SEQ ID NO: 29333

SEQ ID NO: 29353 - DNA, 201 bp, Homo sapiens; identical to SEQ ID NO: 29334

SEQ ID NO: 29354 - DNA, 201 bp, Homo sapiens
ctccatcccgtctgccctgcaggatgccgcagctgagcctgtcctggctgggcctcgggcccgtggcagcatccccgtggctgcttctgctgctggttggrggctcctggctcctggcccgcgtcctggcctggacctacaccttctatgacaactgccgccgcctccagtgttttcctcaacccccgaaacagaactggt

SEQ ID NO: 29355 - DNA, 201 bp, Homo sapiens
ctggagggtcctggcctgggatggggaggggactgcccaaggttggggtgggtcaaggctgctggcctgggagactggtgatttcctggtaactggacccstggcaacctcccagtgattcaggctgggcctttttggattctaatcagcctctctctctctttccctttctgtgtaactggaggccacttggctgctggt

SEQ ID NO: 29356 - DNA, 201 bp, Homo sapiens; identical to SEQ ID NO: 29337

SEQ ID NO: 29357 - DNA, 201 bp, Homo sapiens; identical to SEQ ID NO: 29338

SEQ ID NO: 29358 - DNA, 201 bp, Homo sapiens; identical to SEQ ID NO: 29339

SEQ ID NO: 29359 - DNA, 201 bp, Homo sapiens; identical to SEQ ID NO: 29340

SEQ ID NO: 29360 - DNA, 201 bp, Homo sapiens; identical to SEQ ID NO: 29341

SEQ ID NO: 29361 - DNA, 201 bp, Homo sapiens; identical to SEQ ID NO: 29342

SEQ ID NO: 29362 - DNA, 201 bp, Homo sapiens
tggttttcattgggcatttctggactttagatctcagctcttgtttacccatctcagagccttccctgatctgcctccagcactgcccatccttgcccctytccactgtccttggagcttcctgggcccttccctgggcctcaggatcccaccctccatcccgtctgccctgcaggatgccgcagctgagcctgtcctggc

SEQ ID NO: 29363 - DNA, 201 bp, Homo sapiens
ctctttccttcatgtattcacgaaccccccatgtcagcgtctcctccctccactgccatctctctctgcctttgtgttctgggcaccactggggctccaaraagcctcaatttagggccctgtcctcgagaaagccccatgcttgaggaaatggatctggacagagacatctcaaacttcgtggagtcaggaattggcaag

SEQ ID NO: 29364 - DNA, 201 bp, Homo sapiens; identical to SEQ ID NO: 29335

SEQ ID NO: 29365 - DNA, 117 bp, Homo sapiens; identical to SEQ ID NO: 29336

SEQ ID NO: 29366 - DNA, 201 bp, Homo sapiens
gcatgaagacattgacccagctggtgaccacatatccccagggctttaagttgtggctgggtcctaccttccccctcctcattttatgccaccctgacatyatccggcctatcaccagtgcctcaggtacccgtgcagagcttgtggtagtgggggctgggaaacatcaaaggccttctagcctctcccctccccaagctt

SEQ ID NO: 29367 - DNA, 201 bp, Homo sapiens
gtctcctccctccactgccatctctctctgcctttgtgttctgggcaccactggggctccaagaagcctcaatttagggccctgtcctcgagaaagccccrtgcttgaggaaatggatctggacagagacatctcaaacttcgtggagtcaggaattggcaagaaggagatgggtgtgacaactgggagaacaaggtcttt

SEQ ID NO: 29368 - DNA, 201 bp, Homo sapiens
atcaaggagaggtcacctctggcttttattcccttctcggcagggcccaggaactgcatcgggcagacgttcgcgatggcggagatgaaggtggtcctggsgctcacgctgctgcgcttccgcgtcctgcctgaccacaccgagccccgcaggaagccggagctggtcctgcgcgcagagggcggactttggctgcgggtg

SEQ ID NO: 29369 - DNA, 201 bp, Homo sapiens
ccgccatgtcacccaggacattgtgctcccagacggccgggtcatccccaaaggcattatctgcctcatcagtgttttcggaacccatcacaacccagctrtgtggccggaccctgaggtctacgacccctttcgctttgacccagagaacatcaaggagaggtcacctctggcttttattcccttctcggcagggcccag

SEQ ID NO: 29370 - DNA, 184 bp, Homo sapiens
agcagacagagagaggaggttgtctgggacagactgctcctgacagaaggatgtcccagctgagcctgtcctggctgggcctckggccagtggcagcatccccttggctgctcctcctgctggtcggggcctcctggctcctggcccatgtcctggcctggacctacgccttctatgacaactg

SEQ ID NO: 29371 - DNA, 201 bp, Homo sapiens
cgcagagggcggactttggctgcgggtggagcccctgagctgagttctgcagagacccactctgaccccactaaaatgacccctgattcatcaaaagtgargcctagaattaccctaagaccctgttccacagtcctgtattccatcctagatatctactcaaaataattgagacaagtgttcaaacagaaagacgcttgt

SEQ ID NO: 29372 - DNA, 186 bp, Homo sapiens
agcagacagagagaggaggttgtctgggacagactgctcctgacagaaggatgtcccagctgagcctgtcctggctgggcctctgsccagtggcagcatccccttggctgctcctcctgctggtcggggcctcctggctcctggcccatgtcctggcctggacctacgccttctatgacaactgcc

SEQ ID NO: 29373 - DNA, 201 bp, Homo sapiens
ggtgtttcccacaacccccaagacggaactggttttggggacaccagggcatggtcaaccccacagaggagggcatgagagttctgactcagctggtggcyacctacccccagggctttaaggtctggatgggacccatctcccccctcctcagtttgtgccaccccgacatcatccggtctgtcatcaacgcctcagctg

SEQ ID NO: 29374 - DNA, 188 bp, Homo sapiens
agcagacagagagaggaggttgtctgggacagactgctcctgacagaaggatgtcccagctgagcctgtcctggctgggcctctggcsagtggcagcatccccttggctgctcctcctgctggtcggggcctcctggctcctggcccatgtcctggcctggacctacgccttctatgacaactgccgc

SEQ ID NO: 29375 - DNA, 201 bp, Homo sapiens
gcctcagctgccattgcaccaaaggacaagttcttctacagcttcctggagccctggctgggggatgggctcctgctgagtgctggtgacaagtggagccrccaccgtcggatgctgacgcctgccttccatttcaacatcctgaagccctatatgaagattttcaatgagagtgtgaacatcatgcacgccaagtggcag

SEQ ID NO: 29376 - DNA, 201 bp, Homo sapiens
acttcctgtattatctcacccctgatgggcagcgtttccgcagggcctgccgcctggtgcacgacttcacagatgccgtcatccaggagcggcgccgcacyctccctagccagggtgttgatgacttcctccaagccaaggccaaatccaagactttggacttcattgatgtactcctgctgagcaaggatgaagacggga

SEQ ID NO: 29377 - DNA, 201 bp, Homo sapiens
tggtggctttcagcagctgtggggaggtgggactgaggagcgactgctaatcagtatggggtttcctcccgggatggtgaaaatgttccggacctagatastgacgaaggtagcacgacactgtgagtgcactaaatgctattgaattggacactttgaaatggtgaatttcgtggtatgtgaattctacctcaatcaaaa

SEQ ID NO: 29378 - DNA, 201 bp, Homo sapiens
gaccctgttccacagtcctgtattccatcctagatatctactcaaaataattgagacaagtgttcaaacagaaagacgcttgtgcgtgaatgttcatggcrgccctattcacagtagccaaacgatgaaaacaaccccaagctatatattaccagatgaaaggataaacaaaatgtggtccatccatacaatggagtatta

SEQ ID NO: 29379 - DNA, 201 bp, Homo sapiens
acgcctgccttccatttcaacatcctgaagccctatatgaagattttcaatgagagtgtgaacatcatgcacgccaagtggcagctcctggcctcagaggdtagtgcctgtttggatatgtttgagcacatcagcctcatgaccttggacagtctacagaaatgtgtcttcagctttgacagccattgtcaggagaaaccc

SEQ ID NO: 29380 - DNA, 201 bp, Homo sapiens
tcctgctggtcggggcctcctggctcctggcccatgtcctggcctggacctacgccttctatgacaactgccgccgccttcggtgtttcccacaacccccragacggaactggttttggggacaccagggcatggtcaaccccacagaggagggcatgagagttctgactcagctggtggccacctacccccagggcttta

SEQ ID NO: 29381 - DNA, 201 bp, Homo sapiens
ggaagaagttatctgatgaggacataagagcagaagctgacacctttatgtttgagggccatgacaccacggccagtggtctctcctgggtcctgtaccaycttgcaaagcacccagaataccaggagcgctgccggcaggaggtgcaagaacttctgaaggaccgtgagcctaaagagattgaatgggacgacctggccc

SEQ ID NO: 29382 - DNA, 201 bp, Homo sapiens
tattgacttcctgtattatctcacccctgatgggcagcgtttccgcagggcctgccgcctggtgcacgacttcacagatgccgtcatccaggagcggcgcygcactctccctagccagggtgttgatgacttcctccaagccaaggccaaatccaagactttggacttcattgatgtactcctgctgagcaaggatgaaga

SEQ ID NO: 29383 - DNA, 201 bp, Homo sapiens; identical to SEQ ID NO: 29368

SEQ ID NO: 29384 - DNA, 201 bp, Homo sapiens; identical to SEQ ID NO: 29369

SEQ ID NO: 29385 - DNA, 188 bp, Homo sapiens
gagaggaggttgtctgggacagactgctcctgacagaaggtgccaggctgggggatgtcccagctgagcctgtcctggctgggcctckggccagtggcagcatccccttggctgctcctcctgctggtcggggcctcctggctcctggcccatgtcctggcctggacctacgccttctatgacaactg

SEQ ID NO: 29386 - DNA, 201 bp, Homo sapiens; identical to SEQ ID NO: 29371

SEQ ID NO: 29387 - DNA, 190 bp, Homo sapiens
gagaggaggttgtctgggacagactgctcctgacagaaggtgccaggctgggggatgtcccagctgagcctgtcctggctgggcctctgsccagtggcagcatccccttggctgctcctcctgctggtcggggcctcctggctcctggcccatgtcctggcctggacctacgccttctatgacaactgcc

SEQ ID NO: 29388 - DNA, 201 bp, Homo sapiens; identical to SEQ ID NO: 29373

SEQ ID NO: 29389 - DNA, 192 bp, Homo sapiens
gagaggaggttgtctgggacagactgctcctgacagaaggtgccaggctgggggatgtcccagctgagcctgtcctggctgggcctctggcsagtggcagcatccccttggctgctcctcctgctggtcggggcctcctggctcctggcccatgtcctggcctggacctacgccttctatgacaactgccgc

SEQ ID NO: 29390 - DNA, 201 bp, Homo sapiens; identical to SEQ ID NO: 29375

SEQ ID NO: 29391 - DNA, 201 bp, Homo sapiens; identical to SEQ ID NO: 29376

SEQ ID NO: 29392 - DNA, 201 bp, Homo sapiens; identical to SEQ ID NO: 29377

SEQ ID NO: 29393 - DNA, 201 bp, Homo sapiens; identical to SEQ ID NO: 29378

SEQ ID NO: 29394 - DNA, 201 bp, Homo sapiens; identical to SEQ ID NO: 29379

SEQ ID NO: 29395 - DNA, 201 bp, Homo sapiens; identical to SEQ ID NO: 29380

SEQ ID NO: 29396 - DNA, 201 bp, Homo sapiens; identical to SEQ ID NO: 29381

SEQ ID NO: 29397 - DNA, 201 bp, Homo sapiens; identical to SEQ ID NO: 29382

SEQ ID NO: 29398 - DNA, 201 bp, Homo sapiens; identical to SEQ ID NO: 29368

SEQ ID NO: 29399 - DNA, 201 bp, Homo sapiens
ccctggaggtccctgggccgttctctgggcctcaggatctcaccgtccatcccgtctgccctgcaggatgtcccagctgagcctgtcctggctgggcctckggccagtggcagcatccccttggctgctcctcctgctggtcggggcctcctggctcctggcccatgtcctggcctggacctacgccttctatgacaactg

SEQ ID NO: 29400 - DNA, 102 bp, Homo sapiens
cygcccgtccctgcctctccactgtccctggaggtccctgggccgttctctgggcctcaggatctcaccgtccatcccgtctgccctgcaggatgtcccagc

SEQ ID NO: 29401 - DNA, 201 bp, Homo sapiens
ctggaggtccctgggccgttctctgggcctcaggatctcaccgtccatcccgtctgccctgcaggatgtcccagctgagcctgtcctggctgggcctctgsccagtggcagcatccccttggctgctcctcctgctggtcggggcctcctggctcctggcccatgtcctggcctggacctacgccttctatgacaactgcc

SEQ ID NO: 29402 - DNA, 201 bp, Homo sapiens; identical to SEQ ID NO: 29373

SEQ ID NO: 29403 - DNA, 201 bp, Homo sapiens
ggaggtccctgggccgttctctgggcctcaggatctcaccgtccatcccgtctgccctgcaggatgtcccagctgagcctgtcctggctgggcctctggcsagtggcagcatccccttggctgctcctcctgctggtcggggcctcctggctcctggcccatgtcctggcctggacctacgccttctatgacaactgccgc

SEQ ID NO: 29404 - DNA, 201 bp, Homo sapiens; identical to SEQ ID NO: 29375

SEQ ID NO: 29405 - DNA, 201 bp, Homo sapiens; identical to SEQ ID NO: 29377

SEQ ID NO: 29406 - DNA, 201 bp, Homo sapiens; identical to SEQ ID NO: 29378

SEQ ID NO: 29407 - DNA, 201 bp, Homo sapiens; identical to SEQ ID NO: 29379

SEQ ID NO: 29408 - DNA, 201 bp, Homo sapiens; identical to SEQ ID NO: 29381

SEQ ID NO: 29409 - DNA, 201 bp, Homo sapiens; identical to SEQ ID NO: 29369

SEQ ID NO: 29410 - DNA, 201 bp, Homo sapiens; identical to SEQ ID NO: 29371

SEQ ID NO: 29411 - DNA, 201 bp, Homo sapiens; identical to SEQ ID NO: 29376

SEQ ID NO: 29412 - DNA, 201 bp, Homo sapiens; identical to SEQ ID NO: 29380

SEQ ID NO: 29413 - DNA, 201 bp, Homo sapiens; identical to SEQ ID NO: 29382

SEQ ID NO: 29414 - DNA, 201 bp, Homo sapiens
tgcggaggatgggaccatgacctctctctgcggggactggctgcaggtgggtcttcaccggtttgtggcccgggaaaagataatgtctgtgctgagtgaayggggcctgttccggggcctccagaaccaccccatggtactgcccatctgcagccgttctggggatgtgatagaatacctgctgaagaaccagtggtttgt

SEQ ID NO: 29415 - DNA, 201 bp, Homo sapiens
tctgggaaaagaggaggaggggtcctcgctggaggaagaggaactttctagtcatgggtagggtatgggcacagtggttccggttctacctactttctggactaactgacagtgccctggcttttgcaggctctttctcctccacttctcactaaatggaagcttccccgctccttggctgtatccctagaggtgctgaga

SEQ ID NO: 29416 - DNA, 201 bp, Homo sapiens
ctgggaaaagaggaggaggggtcctcgctggaggaagaggaactttctagtcatgggtagggtatgggcacagtggttccggttctacctactttctggactaactgacagtgccctggcttttgcaggctctttctcctccacttctcactaaatggaagcttccccgctccttggctgtatccctagaggtgctgagag

SEQ ID NO: 29417 - DNA, 201 bp, Homo sapiens
tgggaaaagaggaggaggggtcctcgctggaggaagaggaactttctagtcatgggtagggtatgggcacagtggttccggttctacctactttctggactaactgacagtgccctggcttttgcaggctctttctcctccacttctcactaaatggaagcttccccgctccttggctgtatccctagaggtgctgagaga

SEQ ID NO: 29418 - DNA, 201 bp, Homo sapiens
gcagagctcagagcctggggaccagggcctcttcgaggccttcttggagcccctgggcaccctgggctactgtggggctgtgggcctgttacccccaggcrcagcagctccctccggctgggcccaggctccactcagtgacacggctcaagtctacatggagctgcagggcctggtggacccgcagatccagctacctct

SEQ ID NO: 29419 - DNA, 201 bp, Homo sapiens
tcacagtcctgccgatgctgagatgggggcccgacatggcttgagccccttgaatgtcattgcggaggatgggaccatgacctctctctgcggggactggytgcaggtgggtcttcaccggtttgtggcccgggaaaagataatgtctgtgctgagtgaacggggcctgttccggggcctccagaaccaccccatggtact

SEQ ID NO: 29420 - DNA, 201 bp, Homo sapiens
atagaatacctgctgaagaaccagtggtttgtccgctgccaggaaatgggggcccgagctgccaaggctgtggagtcgggggccctggagctcagtccctycttccaccagaagaactggcagcactggttttcccatattggggactggtgtgtctcccggcagctgtggtggggccatcagattccagcctacctggtt

SEQ ID NO: 29421 - DNA, 201 bp, Homo sapiens
tcttcatcccatggttcgggacaggcagggccggaagatgagcaagtccctggggaatgtgctggacccaagagacatcatcagtggggtggagatgcagktgctgcaggaaaagctgagaagcggaaatttggaccctgcagagctggccattgtggctgcagcacagaaaaaggactttcctcacgggatccctgagtg

SEQ ID NO: 29422 - DNA, 201 bp, Homo sapiens
atgggaccatgacctctctctgcggggactggctgcaggtgggtcttcaccggtttgtggcccgggaaaagataatgtctgtgctgagtgaacggggcctrttccggggcctccagaaccaccccatggtactgcccatctgcagccgttctggggatgtgatagaatacctgctgaagaaccagtggtttgtccgctgcc

SEQ ID NO: 29423 - DNA, 201 bp, Homo sapiens
gggactggtgtgtctcccggcagctgtggtggggccatcagattccagcctacctggttgtagaggaccatgcgcagggagaagaggactgttgggtggtygggcggtcagaggctgaggccagagaggtagcagcggaactgacagggaggccaggggcagagctgaccctggagagggatcctgatgtcctagacacat

SEQ ID NO: 29424 - DNA, 201 bp, Homo sapiens
agctgtctccctcctccccgatggatgcctggatcctgagccgccttgccctggctgcccaggagtgtgagcggggcttcctcacccgagagctctcgctygtcactcatgccctgcaccacttctggcttcacaacctctgtgacgtctacctggaggctgtgaagcccgtgctgtggcactcgccccgccccctggggc

SEQ ID NO: 29425 - DNA, 201 bp, Homo sapiens
tggccccactgatgcccttcctggctgaagagctctggcagaggctgccccccaggcctggttgcccccctgcccccagcatctcggttgccccctacccyagcgcctgcagcttggagcactggcgccagccagagctggagcggcgcttctcccgggtccaagaggtcgtgcaggtgctaagggctctccgagccacgt

SEQ ID NO: 29426 - DNA, 105 bp, Homo sapiens
tttgrtggattcctcagtccctgccgccgcggggcgccctgggatagcggcggggcctcctgaacagatctcggcccctttccaaacactcctgatgcctcattt

SEQ ID NO: 29427 - DNA, 201 bp, Homo sapiens
tgaaggtgactccagctcacagtcctgccgatgctgagatgggggcccgacatggcttgagccccttgaatgtcattgcggaggatgggaccatgacctcyctctgcggggactggctgcaggtgggtcttcaccggtttgtggcccgggaaaagataatgtctgtgctgagtgaacggggcctgttccggggcctccaga

SEQ ID NO: 29428 - DNA, 201 bp, Homo sapiens
acacggctcaagtctacatggagctgcagggcctggtggacccgcagatccagctacctctgttagccgcccgaaggtacaagttgcagaagcagcttgayagcctcacagccaggaccccatcagaaggggaggcagggactcagaggcaacaaaagctttcttccctccagctggaattgtcaaaactggacaaggcag

SEQ ID NO: 29429 - DNA, 201 bp, Homo sapiens
acagtcggagccccatggatctcccatctcccggaggaaccgtgaagccaaacagaagcgcctgcgagagaagcaggcgactctggaggctgagatagcargggagagcaagtcacctgcagaatccattaaggcctggaggcctaaggagttagtattgtatgaaatccctacgaaacccggtgaaaagaaagatgtctc

SEQ ID NO: 29430 - DNA, 201 bp, Homo sapiens
agagcttggtctgggaaaagaggaggaggggtcctcgctggaggaagaggaactttctagtcatgggtagggtatgggcacagtggttccggttctacctmctttctggactaactgacagtgccctggcttttgcaggctctttctcctccacttctcactaaatggaagcttccccgctccttggctgtatccctagag

SEQ ID NO: 29431 - DNA, 201 bp, Homo sapiens
ccaggtttcactccgtttctacacagtcggagccccatggatctcccatctcccggaggaaccgtgaagccaaacagaagcgcctgcgagagaagcaggckactctggaggctgagatagcaggggagagcaagtcacctgcagaatccattaaggcctggaggcctaaggagttagtattgtatgaaatccctacgaaac

SEQ ID NO: 29432 - DNA, 201 bp, Homo sapiens
gtttatggctctttggtcccctttgctcccagtggtgacttttgtgcttctgagttgtcccctgagagcttggtctgggaaaagaggaggaggggtcctcrctggaggaagaggaactttctagtcatgggtagggtatgggcacagtggttccggttctacctactttctggactaactgacagtgccctggcttttgca

SEQ ID NO: 29433 - DNA, 201 bp, Homo sapiens
aggaccccatcagaaggggaggcagggactcagaggcaacaaaagctttcttccctccagctggaattgtcaaaactggacaaggcagcctctcacctccrgcagctgatggatgagcctccagccccagggagcccggagctctaactcatcatccccatcagttttcctccctctcagacctgtctttgaggacaaaca

SEQ ID NO: 29434 - DNA, 201 bp, Homo sapiens
cagtccctgccgccgcggggcgccctgggatagcggcggggcctcctgaacagatctcggcccctttccaaacactcctgatgcctcatttgcctctcgcytcttttcgaccaccattttgggggctgaggcactcacggggcctccccaggtttcactccgtttctacacagtcggagccccatggatctcccatctccc

SEQ ID NO: 29435 - DNA, 201 bp, Homo sapiens
ctcggcccctttccaaacactcctgatgcctcatttgcctctcgcctcttttcgaccaccattttgggggctgaggcactcacggggcctccccaggtttyactccgtttctacacagtcggagccccatggatctcccatctcccggaggaaccgtgaagccaaacagaagcgcctgcgagagaagcaggcgactctgga

SEQ ID NO: 29436 - DNA, 201 bp, Homo sapiens
ccctaccccagcgcctgcagcttggagcactggcgccagccagagctggagcggcgcttctcccgggtccaagaggtcgtgcaggtgctaagggctctccragccacgtaccagctcaccaaagcccggccccgagtgctgctgcagagctcagagcctggggaccagggcctcttcgaggccttcttggagcccctgggc

SEQ ID NO: 29437 - DNA, 201 bp, Homo sapiens
gggaaaagaggaggaggggtcctcgctggaggaagaggaactttctagtcatgggtagggtatgggcacagtggttccggttctacctactttctggactaactgacagtgccctggcttttgcaggctctttctcctccacttctcactaaatggaagcttccccgctccttggctgtatccctagaggtgctgagagaa

SEQ ID NO: 29438 - DNA, 201 bp, Homo sapiens
cattgcggaggatgggaccatgacctctctctgcggggactggctgcagggtcttcaccggtttgtggcccgggaaaagataatgtctgtgctgagtgaayggggcctgttccggggcctccagaaccaccccatggtactgcccatctgcagccgttctggggatgtgatagaatacctgctgaagaaccagtggtttgt

SEQ ID NO: 29439 - DNA, 201 bp, Homo sapiens; identical to SEQ ID NO: 29415

SEQ ID NO: 29440 - DNA, 201 bp, Homo sapiens; identical to SEQ ID NO: 29416

SEQ ID NO: 29441 - DNA, 201 bp, Homo sapiens; identical to SEQ ID NO: 29417

SEQ ID NO: 29442 - DNA, 201 bp, Homo sapiens; identical to SEQ ID NO: 29418

SEQ ID NO: 29443 - DNA, 201 bp, Homo sapiens
tcacagtcctgccgatgctgagatgggggcccgacatggcttgagccccttgaatgtcattgcggaggatgggaccatgacctctctctgcggggactggytgcagggtcttcaccggtttgtggcccgggaaaagataatgtctgtgctgagtgaacggggcctgttccggggcctccagaaccaccccatggtactgcc

SEQ ID NO: 29444 - DNA, 201 bp, Homo sapiens; identical to SEQ ID NO: 29420

SEQ ID NO: 29445 - DNA, 201 bp, Homo sapiens; identical to SEQ ID NO: 29421

SEQ ID NO: 29446 - DNA, 201 bp, Homo sapiens
aggatgggaccatgacctctctctgcggggactggctgcagggtcttcaccggtttgtggcccgggaaaagataatgtctgtgctgagtgaacggggcctrttccggggcctccagaaccaccccatggtactgcccatctgcagccgttctggggatgtgatagaatacctgctgaagaaccagtggtttgtccgctgcc

SEQ ID NO: 29447 - DNA, 201 bp, Homo sapiens; identical to SEQ ID NO: 29423

SEQ ID NO: 29448 - DNA, 201 bp, Homo sapiens; identical to SEQ ID NO: 29424

SEQ ID NO: 29449 - DNA, 201 bp, Homo sapiens; identical to SEQ ID NO: 29425

SEQ ID NO: 29450 - DNA, 201 bp, Homo sapiens
tgaaggtgactccagctcacagtcctgccgatgctgagatgggggcccgacatggcttgagccccttgaatgtcattgcggaggatgggaccatgacctcyctctgcggggactggctgcagggtcttcaccggtttgtggcccgggaaaagataatgtctgtgctgagtgaacggggcctgttccggggcctccagaacc

SEQ ID NO: 29451 - DNA, 201 bp, Homo sapiens; identical to SEQ ID NO: 29428

SEQ ID NO: 29452 - DNA, 201 bp, Homo sapiens; identical to SEQ ID NO: 29429

SEQ ID NO: 29453 - DNA, 201 bp, Homo sapiens; identical to SEQ ID NO: 29430

SEQ ID NO: 29454 - DNA, 201 bp, Homo sapiens; identical to SEQ ID NO: 29431

SEQ ID NO: 29455 - DNA, 105 bp, Homo sapiens
agacrggaaagatggaacaaggggagtgacccttctccacccccatatcctaatgtgctctctctctatccagaacagatctcggcccctttccaaacactcctg

SEQ ID NO: 29456 - DNA, 201 bp, Homo sapiens; identical to SEQ ID NO: 29432

SEQ ID NO: 29457 - DNA, 201 bp, Homo sapiens; identical to SEQ ID NO: 29433

SEQ ID NO: 29458 - DNA, 201 bp, Homo sapiens
gtgacccttctccacccccatatcctaatgtgctctctctctatccagaacagatctcggcccctttccaaacactcctgatgcctcatttgcctctcgcytcttttcgaccaccattttgggggctgaggcactcacggggcctccccaggtttcactccgtttctacacagtcggagccccatggatctcccatctccc

SEQ ID NO: 29459 - DNA, 201 bp, Homo sapiens; identical to SEQ ID NO: 29435

SEQ ID NO: 29460 - DNA, 201 bp, Homo sapiens; identical to SEQ ID NO: 29436

SEQ ID NO: 29461 - DNA, 201 bp, Homo sapiens; identical to SEQ ID NO: 29437

SEQ ID NO: 29462 - DNA, 201 bp, Homo sapiens
ccatggggtcggccttgggccgggccaggcgcacactgagtgggcggcctttccagagggcaccatgcaaaacgcgcagggccttgtccctctctgcagcrctgcggaatgtcacaaaggcgcagggtggttgcccaaagagtttggttttgtggggctgcagaccaaagcggcccaggaagcgccggacgtcgctgaagc

SEQ ID NO: 29463 - DNA, 201 bp, Homo sapiens
gcgcccaggctgggctcgggacgaggatcacgccgatgatggagctgaagcccaacgcaggtagcgaccgtgcctgggtctggaacacccacgctgacttygccgacgagtgccccaagccagagctgctggccatccgcttcctgaatgctgagaatgcacagaaattcaaaacaaagtttgaagaatgcaggaaagaga

SEQ ID NO: 29464 - DNA, 102 bp, Homo sapiens
akatcctgtgctgggcctcccaactggtgcatggacaggctgaggaagcacaggccgggcagagccctggccaagaggggcgtcttgcgcccacactcactt

SEQ ID NO: 29465 - DNA, 201 bp, Homo sapiens
ccctgaagatctgtgccaaccactacatcacgccgatgatggagctgaagcccaacgcaggtagcgaccgtgcctgggtctggaacacccacgctgacttygccgacgagtgccccaagccagagctgctggccatccgcttcctgaatgctgagaatgcacagaaattcaaaacaaagtttgaagaatgcaggaaagaga

SEQ ID NO: 29466 - DNA, 201 bp, Homo sapiens
ttttgtggggctgcagaccaaagcggcccaggaagcgccggacgtcgctgaagctggcgtggcgaggcacgttctgcagctccagtttaaagatctcagargacactcatgaggaccatgatacttccactgagaatacagacgagtccaaccatgaccctcagtttgagccaatagtttctcttcctgagcaagaaatta

SEQ ID NO: 29467 - DNA, 201 bp, Homo sapiens; identical to SEQ ID NO: 29462

SEQ ID NO: 29468 - DNA, 201 bp, Homo sapiens
gccccccactaggcccttttgcagatggtgccctggaccggcatttcctgctgcgtggtggtggcccagcggccacactctctcgagcctacctcagcagygggggtggctttcccgaaggccccgagccccgggacagccccagctatggcagcctgtcccgagggctgggcatgcggcccccacgtgctggcccccttg

SEQ ID NO: 29469 - DNA, 201 bp, Homo sapiens
gcatgggcagcctggaccggctggtgcggcgctcgccctcagtggatagcgcccgcaaggagccgcgctggcgggaccctgagctgcctgaggtgctggcyatgctgcggcaccccgtggaccccgtgaaggccaatgcggccgcctacctgcagcatctgtgctttgagaacgagggtgtcaagcggcgtgtacggcagt

SEQ ID NO: 29470 - DNA, 201 bp, Homo sapiens
ggcccagatggactccccctgctggatggcggccccccactaggcccttttgcagatggtgccctggaccggcatttcctgctgcgtggtggtggcccagyggccacactctctcgagcctacctcagcagcgggggtggctttcccgaaggccccgagccccgggacagccccagctatggcagcctgtcccgagggctg

SEQ ID NO: 29471 - DNA, 201 bp, Homo sapiens
ctctacctctccctcctcacggagagccggaacttcaacaccctggaggctgccgccggcgctctgcagaacctcagtgccggcaactggatgtgggccaygtacatccgcgccacagtgcgcaaagagcgcgggctgccggtgcttgtggaactgctgcagtctgagaccgacaaggtggtgcgcgccgtcgccatcgct

SEQ ID NO: 29472 - DNA, 201 bp, Homo sapiens
gcgccaggggcaggcagctaggcagggagggggctgggaaagaacttggacttctaaaggcggagggtctccctgggcaccctgcaggcaggcagaccacrgtgtggggggtgccccacaaggctcagccctgggcaaggaagctttggaagcagcaaggtgggggtcaggctacaggtgccccacctccccagagccctg

SEQ ID NO: 29473 - DNA, 201 bp, Homo sapiens
aagaaggccaaaggtggcacctttcccttccaggaaagaaggatggtgagatggaccggaactttgacacgctagacctgcccaagcgaactgaggccgcyaaaggctttgagctgctgtaccagcccgaggtggtacgtctctacctctccctcctcacggagagccggaacttcaacaccctggaggctgccgccggcg

SEQ ID NO: 29474 - DNA, 201 bp, Homo sapiens
tggaccagagggagcggaggccacggggcgccagctctgcaggagaggcctctgagaaggaacccttgaaactcgaccccagcaggaaggcccctcccccygggcccagcaggcccgcggtcaggctggtggacgccgtaggggacgctaagcctcagcccgttgattcctgggtctagcttgcatgcctgggcccaggcc

SEQ ID NO: 29475 - DNA, 201 bp, Homo sapiens
tggctttcccgaaggccccgagccccgggacagccccagctatggcagcctgtcccgagggctgggcatgcggcccccacgtgctggcccccttggcctargccctggtgatggctgcttcacactgcctggccaccgggaagccttcccggtgggtcctgagcctgggccaccaggtggccgctccctgcccgagcgctt

SEQ ID NO: 29476 - DNA, 160 bp, Homo sapiens
gattcctgtcctgggcctgggaactgggcccttggagcctctgaggtggctagcagtctgaccccttggaggagatggggacagctctaggtgtaggtggrcagaaaccagcactgcatcctcactcatgggccagggaggcaactacagggatgcggga

SEQ ID NO: 29477 - DNA, 201 bp, Homo sapiens
aggcctcactggccacgatgccggaggcacctgatgtgctggaggagaccgtgacggtggaggaggaccccggcacacccacttcccatgtgtctattgtmacatccgaagatggcacaacccggcgcaccgagaccaaggtcaccaagactgtcaagacggtgaccactcggacagtacgccaggtgcccgtgggcccag

SEQ ID NO: 29478 - DNA, 201 bp, Homo sapiens
ggccacggggcgccagctctgcaggagaggcctctgagaaggaacccttgaaactcgaccccagcaggaaggcccctccccccgggcccagcaggcccgcrgtcaggctggtggacgccgtaggggacgctaagcctcagcccgttgattcctgggtctagcttgcatgcctgggcccaggcccagcctcttgttcttagg

SEQ ID NO: 29479 - DNA, 201 bp, Homo sapiens
ctgccactggtggacaagagccttgagggcgagaaaactggcagccgggatgtgatccccatggatgcgctgggcccagacggatactccacggtggaccrgagggagcggaggccacggggcgccagctctgcaggagaggcctctgagaaggaacccttgaaactcgaccccagcaggaaggcccctccccccgggccc

SEQ ID NO: 29480 - DNA, 201 bp, Homo sapiens
tgcggcgctcgccctcagtggatagcgcccgcaaggagccgcgctggcgggaccctgagctgcctgaggtgctggccatgctgcggcaccccgtggacccygtgaaggccaatgcggccgcctacctgcagcatctgtgctttgagaacgagggtgtcaagcggcgtgtacggcagttgcgggggctgccgctgcttgtgg

SEQ ID NO: 29481 - DNA, 201 bp, Homo sapiens
aaggtgggggtcaggctacaggtgccccacctccccagagccctgcagtcacgtgaggcccctgtgcagtagagagcctttctccagcccatgctggctgkggccggggctgccgcatctgcctggagcctgggcagcacctccgggactgaccttcggcagtggctgggggactgctttcagtgcctgctgttcgtgact

SEQ ID NO: 29482 - DNA, 201 bp, Homo sapiens
gggagggggctgggaaagaacttggacttctaaaggcggagggtctccctgggcaccctgcaggcaggcagaccacagtgtggggggtgccccacaaggcycagccctgggcaaggaagctttggaagcagcaaggtgggggtcaggctacaggtgccccacctccccagagccctgcagtcacgtgaggcccctgtgcag

SEQ ID NO: 29483 - DNA, 201 bp, Homo sapiens
ggtggctttcccgaaggccccgagccccgggacagccccagctatggcagcctgtcccgagggctgggcatgcggcccccacgtgctggcccccttggccyaggccctggtgatggctgcttcacactgcctggccaccgggaagccttcccggtgggtcctgagcctgggccaccaggtggccgctccctgcccgagcgc

SEQ ID NO: 29484 - DNA, 201 bp, Homo sapiens; identical to SEQ ID NO: 29468

SEQ ID NO: 29485 - DNA, 201 bp, Homo sapiens; identical to SEQ ID NO: 29469

SEQ ID NO: 29486 - DNA, 201 bp, Homo sapiens; identical to SEQ ID NO: 29470

SEQ ID NO: 29487 - DNA, 201 bp, Homo sapiens; identical to SEQ ID NO: 29471

SEQ ID NO: 29488 - DNA, 201 bp, Homo sapiens; identical to SEQ ID NO: 29472

SEQ ID NO: 29489 - DNA, 201 bp, Homo sapiens
gcaagaaggccaaagaggagtggttccaccaaggaaagaaggatggtgagatggaccggaactttgacacgctagacctgcccaagcgaactgaggccgcyaaaggctttgagctgctgtaccagcccgaggtggtacgtctctacctctccctcctcacggagagccggaacttcaacaccctggaggctgccgccggcg

SEQ ID NO: 29490 - DNA, 201 bp, Homo sapiens; identical to SEQ ID NO: 29474

SEQ ID NO: 29491 - DNA, 201 bp, Homo sapiens; identical to SEQ ID NO: 29475

SEQ ID NO: 29492 - DNA, 160 bp, Homo sapiens; identical to SEQ ID NO: 29476

SEQ ID NO: 29493 - DNA, 201 bp, Homo sapiens; identical to SEQ ID NO: 29477

SEQ ID NO: 29494 - DNA, 201 bp, Homo sapiens; identical to SEQ ID NO: 29478

SEQ ID NO: 29495 - DNA, 201 bp, Homo sapiens; identical to SEQ ID NO: 29479

SEQ ID NO: 29496 - DNA, 201 bp, Homo sapiens; identical to SEQ ID NO: 29480

SEQ ID NO: 29497 - DNA, 201 bp, Homo sapiens; identical to SEQ ID NO: 29481

SEQ ID NO: 29498 - DNA, 201 bp, Homo sapiens; identical to SEQ ID NO: 29482

SEQ ID NO: 29499 - DNA, 201 bp, Homo sapiens; identical to SEQ ID NO: 29483

SEQ ID NO: 29500 - DNA, 201 bp, Homo sapiens; identical to SEQ ID NO: 29479

SEQ ID NO: 29501 - DNA, 201 bp, Homo sapiens; identical to SEQ ID NO: 29468

SEQ ID NO: 29502 - DNA, 201 bp, Homo sapiens; identical to SEQ ID NO: 29469

SEQ ID NO: 29503 - DNA, 201 bp, Homo sapiens; identical to SEQ ID NO: 29470

SEQ ID NO: 29504 - DNA, 201 bp, Homo sapiens; identical to SEQ ID NO: 29480

SEQ ID NO: 29505 - DNA, 201 bp, Homo sapiens; identical to SEQ ID NO: 29471

SEQ ID NO: 29506 - DNA, 201 bp, Homo sapiens; identical to SEQ ID NO: 29489

SEQ ID NO: 29507 - DNA, 201 bp, Homo sapiens; identical to SEQ ID NO: 29474

SEQ ID NO: 29508 - DNA, 201 bp, Homo sapiens; identical to SEQ ID NO: 29475

SEQ ID NO: 29509 - DNA, 160 bp, Homo sapiens; identical to SEQ ID NO: 29476

SEQ ID NO: 29510 - DNA, 201 bp, Homo sapiens; identical to SEQ ID NO: 29477

SEQ ID NO: 29511 - DNA, 201 bp, Homo sapiens; identical to SEQ ID NO: 29478

SEQ ID NO: 29512 - DNA, 201 bp, Homo sapiens; identical to SEQ ID NO: 29483

SEQ ID NO: 29513 - DNA, 201 bp, Homo sapiens
agagcacatggcatctcatggcacccggttcctgaggggctgtgccccctcgcgggtcaggaggctccctgatggccagctgcaggtcacctgggaggacmgcaccaccggcaaggaggacacgggcacctttgacaccgtcctgtgggccataggtcgagtcccagacaccagaagtctgaatttggagaaggctggggt

SEQ ID NO: 29514 - DNA, 201 bp, Homo sapiens
ccaccgtgtccagcttcaggacagaaaagtcaagtactttaacatcaaagccagctttgttgacgagcacacggtttgcggcgttgccaaaggtgggaaasagattctgctgtcagccgatcacatcatcattgctactggagggcggccgagataccccacgcacatcgaaggtgccttggaatatggaatcacaagtga

SEQ ID NO: 29515 - DNA, 201 bp, Homo sapiens
tgggctgcatccccaagaagctgatgcaccaggcggcactgctgggaggcctgatccaagatgcccccaactatggctgggaggtggcccagcccgtgccrcatgactggaggaagatggcagaagctgttcaaaatcacgtgaaatccttgaactggggccaccgtgtccagcttcaggacagaaaagtcaagtacttta

SEQ ID NO: 29516 - DNA, 201 bp, Homo sapiens
gagatggtcagcgtggagcgcaagtgctggacaggtggcccgtgtgccccacagggatggctcaggggactgtccacctcacccctgcacctctcagcctytgccgccgggcaccccccccaggctcctggtgccagatgatgacgacctgggtggaaacctaccctgtgggcacccatgtccgagccccctggcatttct

SEQ ID NO: 29517 - DNA, 201 bp, Homo sapiens
gccagcgctctcacctctcccgcgacggcccgcccgggactggacccgccccggtccggcgcaggcagcgcggcgggcagccctagctgccccagaagccscacgacgatggcggcaatggcggtggcgctgcggggattaggagggcgcttccggtggcggacgcaggccgtggcgggcggggtgcggggcgcggcgcgg

SEQ ID NO: 29518 - DNA, 201 bp, Homo sapiens
tactagccccgacactcagaagatcctggtggactcccgggaagccacctctgtgccccacatctacgccattggtgacgtggtggaggggcggcctgagytgacacccacagcgatcatggccgggaggctcctggtgcagcggctcttcggcgggtcctcagatctgatggactacgacaatgttcccacgaccgtctt

SEQ ID NO: 29519 - DNA, 201 bp, Homo sapiens
tggtgcagcggctcttcggcgggtcctcagatctgatggactacgacaatgttcccacgaccgtcttcaccccgctggagtatggctgtgtggggctgtcygaggaggaggcagtggctcgccacgggcaggagcatgttgaggtctatcacgcccattataaaccactggagttcacggtggctggacgagatgcatccc

SEQ ID NO: 29520 - DNA, 201 bp, Homo sapiens
gcgcctgtgagatggtcagcgtggagcgcaagtgctggacaggtggcccgtgtgccccacagggatggctcaggggactgtccacctcacccctgcacctytcagcctctgccgccgggcaccccccccaggctcctggtgccagatgatgacgacctgggtggaaacctaccctgtgggcacccatgtccgagccccctg

SEQ ID NO: 29521 - DNA, 186 bp, Homo sapiens
attccccacaccctatcccagtgttccaccctaggtctgaaggcccccgccccgaatccggccgcattcggccccggtctagccascgctctcacctctcccgcgacggcccgcccgggactggacccgccccggtccggcgcaggcagcgcggcgggcagccctagctgccccagaagccccacg

SEQ ID NO: 29522 - DNA, 201 bp, Homo sapiens
gagataccccacgcacatcgaaggtgccttggaatatggaatcacaagtgatgacatcttctggctgaaggaatcccctggaaaaacgtaaggcctgcgcrtgcccacagatgtggccctggagtgtgctggcttcctcaccgggattgggctggacaccaccatcatgatgcgcagcatccccctccgcggcttcgacca

SEQ ID NO: 29523 - DNA, 201 bp, Homo sapiens
  misc_feature (1)...(201): n = A,T,C or G
gacactcagaagatcctggtggactcccgggaagccacctctgtgccccacatctacgccattggtgacgtggtggaggggcggcctgagctgacacccanagcgatcatggccgggaggctcctggtgcagcggctcttcggcgggtcctcagatctgatggactacgacaatgttcccacgaccgtcttcaccccgctg

SEQ ID NO: 29524 - DNA, 201 bp, Homo sapiens
cggggcgcagcagcaggtcagcgggactatgatctcctggtggtcggcgggggatctggtggcctggcttgtgccaaggaggaggcacccggtggggcctyggcggcacctgcgtcaacgtgggctgcatccccaagaagctgatgcaccaggcggcactgctgggaggcctgatccaagatgcccccaactatggctggg

SEQ ID NO: 29525 - DNA, 201 bp, Homo sapiens
ccacagcgatcatggccgggaggctcctggtgcagcggctcttcggcgggtcctcagatctgatggactacgacaatgttcccacgaccgtcttcaccccrctggagtatggctgtgtggggctgtccgaggaggaggcagtggctcgccacgggcaggagcatgttgaggtctatcacgcccattataaaccactggagt

SEQ ID NO: 29526 - DNA, 201 bp, Homo sapiens
cctgtgggccataggtcgagtcccagacaccagaagtctgaatttggagaaggctggggtagatactagccccgacactcagaagatcctggtggactccygggaagccacctctgtgccccacatctacgccattggtgacgtggtggaggggcggcctgagctgacacccacagcgatcatggccgggaggctcctggt

SEQ ID NO: 29527 - DNA, 201 bp, Homo sapiens
tggcccgtgtgccccacagggatggctcaggggactgtccacctcacccctgcacctctcagcctctgccgccgggcaccccccccaggctcctggtgccrgatgatgacgacctgggtggaaacctaccctgtgggcacccatgtccgagccccctggcatttctgcaatgcaaataaagagggtactttttctgaagtg

SEQ ID NO: 29528 - DNA, 201 bp, Homo sapiens
tggcatctcatggcacccggttcctgaggggctgtgccccctcgcgggtcaggaggctccctgatggccagctgcaggtcacctgggaggacagcaccacmggcaaggaggacacgggcacctttgacaccgtcctgtgggccataggtcgagtcccagacaccagaagtctgaatttggagaaggctggggtagatacta

SEQ ID NO: 29529 - DNA, 201 bp, Homo sapiens; identical to SEQ ID NO: 29513

SEQ ID NO: 29530 - DNA, 201 bp, Homo sapiens; identical to SEQ ID NO: 29514

SEQ ID NO: 29531 - DNA, 201 bp, Homo sapiens; identical to SEQ ID NO: 29515

SEQ ID NO: 29532 - DNA, 201 bp, Homo sapiens; identical to SEQ ID NO: 29516

SEQ ID NO: 29533 - DNA, 201 bp, Homo sapiens; identical to SEQ ID NO: 29519

SEQ ID NO: 29534 - DNA, 201 bp, Homo sapiens; identical to SEQ ID NO: 29518

SEQ ID NO: 29535 - DNA, 201 bp, Homo sapiens; identical to SEQ ID NO: 29517

SEQ ID NO: 29536 - DNA, 201 bp, Homo sapiens; identical to SEQ ID NO: 29520

SEQ ID NO: 29537 - DNA, 186 bp, Homo sapiens; identical to SEQ ID NO: 29521

SEQ ID NO: 29538 - DNA, 201 bp, Homo sapiens; identical to SEQ ID NO: 29523
  misc_feature (1)...(201): n = A,T,C or G

SEQ ID NO: 29539 - DNA, 201 bp, Homo sapiens
cgcggggcgcagcagcaggtcagcgggactatgatctcctggtggtcggcgggggatctggtggcctggcttgtgccaaggagggcacccggtggggcctyggcggcacctgcgtcaacgtgggctgcatccccaagaagctgatgcaccaggcggcactgctgggaggcctgatccaagatgcccccaactatggctggg

SEQ ID NO: 29540 - DNA, 201 bp, Homo sapiens; identical to SEQ ID NO: 29525

SEQ ID NO: 29541 - DNA, 201 bp, Homo sapiens; identical to SEQ ID NO: 29526

SEQ ID NO: 29542 - DNA, 201 bp, Homo sapiens; identical to SEQ ID NO: 29528

SEQ ID NO: 29543 - DNA, 201 bp, Homo sapiens; identical to SEQ ID NO: 29527

SEQ ID NO: 29544 - DNA, 201 bp, Homo sapiens
tgggaaagttggaaaccccaatgggatagaaatcagggcagcagaataatatataaaaaccactctttagccttcactagaaaccatcatccttattggtyagaaatgaaagtggaaacagttgcccgagaggaatttgaaaatgctggaaaaaatttcatgaacattactctcacattggctttagaaatgagaccaaaa

SEQ ID NO: 29545 - DNA, 201 bp, Homo sapiens
aaataacatctgctttgctgccgagctcagaggagaccccagacccctcccgcagccagagggctggagcctgctcagaggtgctttgaagatgccggagsccccgcctctgctgttggcagctgtgttgctgggcctggtgctgctggtggtgctgctgctgcttctgaggcactggggctggggcctgtgccttatcgg

SEQ ID NO: 29546 - DNA, 201 bp, Homo sapiens
gctgcccttgacttgggcaccaaacattcaaagctccccttgacggacgctaacgctaagggcggggcccctagctggctgggttctgggtggcacgcctrgcccactggcctcccagccacagtggtgcagaggtcagccctcctgcagctaggccaggggcacctgttagccccatggggacgactgccagcctgggaa

SEQ ID NO: 29547 - DNA, 201 bp, Homo sapiens
caggcgctggggacaggtggaccccgcagcagcaccagcccctctgggccccatgtggcacagagtggaagcatctccttccctactccccactgggcctygcttacagaagaggcaatggctcagaccagctcccgcatccctgtagttgcctccctggcccatgagtgaggatgcagtgctggtttctgtccacctaca

SEQ ID NO: 29548 - DNA, 201 bp, Homo sapiens
taaattttcttacaaaaatttaggtgtttaccaatagtcttattttggcttatttttaatgctttttctcagtgtttttcttctgtttctgagtcacgaamagcaggcactgaaagcagtcccccagccactgccgaaggtcagtcccggaggtgctgcccaggctccaggcagatgcggcagccccggccacagccagca

SEQ ID NO: 29549 - DNA, 201 bp, Homo sapiens
gagatcaaccccgactgtgccgccatcacccagcggatggtggatttcgctggcatgaaggacaaggtcacccttgtggttggagcgtcccaggacatcaycccccagctgaagaagaagtatgatgtggacacactggacatggtcttcctcgaccactggaaggaccggtacctgccggacacgcttctcttggaggaa

SEQ ID NO: 29550 - DNA, 201 bp, Homo sapiens
ccgcgccgcgccccgcaccccgcccgccacggcctgcgtccgccaccggaagcgccctcctaatccccgcagcgccaccgccattgccgccatcgtcgtgsggcttctggggcagctagggctgcccgccgcgctgcctgcgccggaccggggcgggtccagtcccgggcgggccgtcgcgggagagaaataacatctgct

SEQ ID NO: 29551 - DNA, 201 bp, Homo sapiens
gcgaagcagggccctgactgccccccccggcccccctctcgggctctctcacccagcctggtactgaaggtgccagacgtgctcctgctgaccttctgcgyctccgggctgtgtcctaaatgcaaagcacacctcggccgaggcctgcgccctgacatgctaacctctctgaactgcaacactggattgttcttttttaag

SEQ ID NO: 29552 - DNA, 201 bp, Homo sapiens
acgtgatctgcccaggtgcgccagacttcctagcacacgtgcgcgggagcagctgctttgagtgcacacactaccaatcgttcctggaatacagggaggtwgtggacggcctggagaaggccatctacaagggcccaggcagcgaagcagggccctgactgccccccccggcccccctctcgggctctctcacccagcctg

SEQ ID NO: 29553 - DNA, 201 bp, Homo sapiens; identical to SEQ ID NO: 29545

SEQ ID NO: 29554 - DNA, 201 bp, Homo sapiens; identical to SEQ ID NO: 29546

SEQ ID NO: 29555 - DNA, 201 bp, Homo sapiens; identical to SEQ ID NO: 29547

SEQ ID NO: 29556 - DNA, 201 bp, Homo sapiens; identical to SEQ ID NO: 29548

SEQ ID NO: 29557 - DNA, 201 bp, Homo sapiens; identical to SEQ ID NO: 29549

SEQ ID NO: 29558 - DNA, 201 bp, Homo sapiens; identical to SEQ ID NO: 29550

SEQ ID NO: 29559 - DNA, 201 bp, Homo sapiens; identical to SEQ ID NO: 29551

SEQ ID NO: 29560 - DNA, 201 bp, Homo sapiens; identical to SEQ ID NO: 29552

SEQ ID NO: 29561 - DNA, 201 bp, Homo sapiens
agttcatcctgcagcccatccacaacctgctcatgggtgacaccaaggagcagcgcatcctgaaccatgtgctgcagcatgcggagcccgggaacgcacaragcgtgctggaggccattgacacctactgcgagcagaaggagtgggccatgaacgtgggcgacaagaaaggcaagatcgtggacgccgtgattcaggagc

SEQ ID NO: 29562 - DNA, 201 bp, Homo sapiens
ctggagctgggggcctactgtggctactcagctgtgcgcatggcccgcctgctgtcaccaggggcgaggctcatcaccatcgagatcaaccccgactgtgycgccatcacccagcggatggtggatttcgctggcatgaaggacaaggtcacccttgtggttggagcgtcccaggacatcatcccccagctgaagaagaag

SEQ ID NO: 29563 - DNA, 201 bp, Homo sapiens
tgcggagcccgggaacgcacagagcgtgctggaggccattgacacctactgcgagcagaaggagtgggccatgaacgtgggcgacaagaaaggcaagatcktggacgccgtgattcaggagcaccagccctccgtgctgctggagctgggggcctactgtggctactcagctgtgcgcatggcccgcctgctgtcaccagg

SEQ ID NO: 29564 - DNA, 201 bp, Homo sapiens
gaacgagttcatcctgcagcccatccacaacctgctcatgggtgacaccaaggagcagcgcatcctgaaccatgtgctgcagcatgcggagcccgggaackcacagagcgtgctggaggccattgacacctactgcgagcagaaggagtgggccatgaacgtgggcgacaagaaaggcaagatcgtggacgccgtgattca

SEQ ID NO: 29565 - DNA, 201 bp, Homo sapiens
aggacatcatcccccagctgaagaagaagtatgatgtggacacactggacatggtcttcctcgaccactggaaggaccggtacctgccggacacgcttctyttggaggaatgtggcctgctgcggaaggggacagtgctactggctgacaacgtgatctgcccaggtgcgccagacttcctagcacacgtgcgcgggagca

SEQ ID NO: 29566 - DNA, 201 bp, Homo sapiens
gaaggccatctacaagggcccaggcagcgaagcagggccctgactgccccccccggccccctgacatgctaacctctctgaactgcaacactggattgttyttttttaagactcaatcatgacttctttactaacactggctagctatattatcttatatactaatatcatgttttaaaaatataaaatagaaattaagaa

SEQ ID NO: 29567 - DNA, 201 bp, Homo sapiens
atgccggaggccccgcctctgctgttggcagctgtgttgctgggcctggtgctgctggtggtgctgctgctgcttctgaggcactggggctggggcctgtsccttatcggctggaacgagttcatcctgcagcccatccacaacctgctcatgggtgacaccaaggagcagcgcatcctgaaccatgtgctgcagcatgcg

SEQ ID NO: 29568 - DNA, 201 bp, Homo sapiens
ttggagcgtcccaggacatcatcccccagctgaagaagaagtatgatgtggacacactggacatggtcttcctcgaccactggaaggaccggtacctgccrgacacgcttctcttggaggaatgtggcctgctgcggaaggggacagtgctactggctgacaacgtgatctgcccaggtgcgccagacttcctagcacacg

SEQ ID NO: 29569 - DNA, 201 bp, Homo sapiens
ggcacgcctggcccactggcctcccagccacagtggtgcagaggtcagccctcctgcagctaggccaggggcacctgttagccccatggggacgactgccrgcctgggaaacgaagaggagtcagccagcattcacacctttctgaccaagcaggcgctggggacaggtggaccccgcagcagcaccagcccctctgggcc

SEQ ID NO: 29570 - DNA, 201 bp, Homo sapiens
tgattcaggagcaccagccctccgtgctgctggagctgggggcctactgtggctactcagctgtgcgcatggcccgcctgctgtcaccaggggcgaggctsatcaccatcgagatcaaccccgactgtgccgccatcacccagcggatggtggatttcgctggcatgaaggacaaggtcacccttgtggttggagcgtccc

SEQ ID NO: 29571 - DNA, 201 bp, Homo sapiens
actgggccttgcttacagaagaggcaatggctcagaccagctcccgcatccctgtagttgcctccctggcccatgagtgaggatgcagtgctggtttctgyccacctacacctagagctgtccccatctcctccaaggggtcagactgctagccacctcagaggctccaagggcccagttcccaggcccaggacaggaatc

SEQ ID NO: 29572 - DNA, 201 bp, Homo sapiens
gcgcatggcccgcctgctgtcaccaggggcgaggctcatcaccatcgagatcaaccccgactgtgccgccatcacccagcggatggtggatttcgctggcrtgaaggacaaggtcacccttgtggttggagcgtcccaggacatcatcccccagctgaagaagaagtatgatgtggacacactggacatggtcttcctcga

SEQ ID NO: 29573 - DNA, 201 bp, Homo sapiens
acgccgtgattcaggagcaccagccctccgtgctgctggagctgggggcctactgtggctactcagctgtgcgcatggcccgcctgctgtcaccaggggcraggctcatcaccatcgagatcaaccccgactgtgccgccatcacccagcggatggtggatttcgctggcatgaaggacaaggtcacccttgtggttggag

SEQ ID NO: 29574 - DNA, 201 bp, Homo sapiens
ggggctggggcctgtgccttatcggctggaacgagttcatcctgcagcccatccacaacctgctcatgggtgacaccaaggagcagcgcatcctgaaccaygtgctgcagcatgcggagcccgggaacgcacagagcgtgctggaggccattgacacctactgcgagcagaaggagtgggccatgaacgtgggcgacaaga

SEQ ID NO: 29575 - DNA, 201 bp, Homo sapiens
agtcacgaacagcaggcactgaaagcagtcccccagccactgccgaaggtcagtcccggaggtgctgcccaggctccaggcagatgcggcagccccggccmcagccagcatgggctggagaaaggctctctactgcacaggggcctcacgtgactgcagggctctggggaggtggggcacctgtagcctgacccccacctt

SEQ ID NO: 29576 - DNA, 201 bp, Homo sapiens
cagtggccgtggagaactggcttcaataaagcaaaacttccaaggtcatggtgtagctctggccaatggagaacgatggaggattctccgacgcttctccytgaccatccttcgggacttcgggatgggaaagcagagcattaaggagcgaattcaggaggaggccagctacctactggaggagttccagaagaccaagat

SEQ ID NO: 29577 - DNA, 196 bp, Homo sapiens
ccccatgacctgtgcaggaaagcgcatctgcttgggcgaggccatggcccgcatggaactctttctctacttcacctccacccttcagaacttctctctakgctcgctggtgccacttgtggacatcgatatcacccccaagctctcaggctttggcaacatcaccccgacctatgagctctgccttgtggcccgc

SEQ ID NO: 29578 - DNA, 201 bp, Homo sapiens
gtctttcatgaagggagaaatacagccctgtgttcactgtgtacatgggtcccggccagtggtggttttatgtggacacgaagcagtgaaggaagccttgrtagaccaagcggatgagttcagtggccgtggagaactggcttcaataaagcaaaacttccaaggtcatggtgtagctctggccaatggagaacgatggag

SEQ ID NO: 29579 - DNA, 201 bp, Homo sapiens
cagtgttgaaataataagattgggcaacagtttatatatcaactgggatcggaagatgttttatgcaccaaggaacacaccagcacaggtgatacttatgrcaaggatggacagagggtgacggtctctgagacagtttatgagacctggtttatcacatgctacagtctggtctacacttccctccctgtcctgtgcatg

SEQ ID NO: 29580 - DNA, 201 bp, Homo sapiens
tgggcaccaatttcttaaaccactattctggcctatcagcatggacaaagtttttgacagaattcaagagtgcaggagacttccacagcagtccccagtcyggaccaaactgaaacactcaagcactcgacgttctgcctatgcattctcccataaacaaggctttggggccctcatcacttctggcaagatagtgaagcc

SEQ ID NO: 29581 - DNA, 201 bp, Homo sapiens
tccccagatctcctccttgacatggtatacaactataacacccctgatggtggtgctgtccattaacagctgtgaaagatgccatcgatgacctgaaaagrcatcaaagtgacgatcgagtcaacaaccagcctgttctgctactggtgaatggcaagataaaggaggacaaatggatgaatgttcaagtgggagatataa

SEQ ID NO: 29582 - DNA, 201 bp, Homo sapiens
ggagacttccacagcagtccccagtctggaccaaactgaaacactcaagcactcgacgttctgcctatgcattctcccataaacaaggctttggggccctyatcacttctggcaagatagtgaagcccaggatgtccaagagaaacaccctttttttgaaaaagatagaggccctagggaaattccaaaggaggcagtcag

SEQ ID NO: 29583 - DNA, 201 bp, Homo sapiens
aaatcaaccatttaaaaaggtataatttagtgacaattacttcccatttataagcaagggatgcatgagtgctacccatagaccggatatgggccatgtckttagcgtttcttgatctcgttagataaattatctgaaattttgaggagacttcagcagaaagaagcaggggatatgctgtcaaatgcctgtggatttata

SEQ ID NO: 29584 - DNA, 201 bp, Homo sapiens
gtagtaatggtagaataagccaacctgcaacctctgaatctttaccagttcaatgcacagatggcagtgtcccagaagcccagtcaacattagactctacrtcttcatctatgcagccaagccctgtatcaaatcagtcacttttatcagaatctgtagcatcttctcaattggacagtacatctgtggacaagcagtacc

SEQ ID NO: 29585 - DNA, 201 bp, Homo sapiens
gtatcaaatcagtcacttttatcagaatctgtagcatcttctcaattggacagtacatctgtggacaagcagtacctgaaacagaagatctgcaggcttcrgtatcagacatggcacagcagccatctgaagagcaaagcaagtctcttgaaaaaccaaaacaaaaaaagaatctctgtttcatgtgcaggaagaaagtgg

SEQ ID NO: 29586 - DNA, 201 bp, Homo sapiens
ctgcggattttatggaaaccctcgtacaaatggcacgtgttcagtatgctataaagaacatcttcaaagactgaatagtagtaatggtagaataagccaamctgcaacctctgaatctttaccagttcaatgcacagatggcagtgtcccagaagcccagtcaacattagactctacatcttcatctatgcagccaagccc

SEQ ID NO: 29587 - DNA, 201 bp, Homo sapiens; identical to SEQ ID NO: 29581

SEQ ID NO: 29588 - DNA, 201 bp, Homo sapiens
ttgaaaaaccaaaacaaaaaaagaatctctgtttcatgtgcaggaagaaagtgggacttactaggtttgaatgcggtgtagaaatgtttactgtggtgtayactgttactcagatctacacaattgctcttaaaattacaaagctgatgccgctgagaaaatcagaaaagaaaatccagtagttgttggcgagaagatcca

SEQ ID NO: 29589 - DNA, 198 bp, Homo sapiens
aacaggaggaaggagcagcaccaaatccaagatggcggccagcaggaggctgatgaaggagcttgaagaaatccgcaaatgtgggatgaaaaacttcygtaacatccaggttgatgaagctaatttattgacttggcaagggcttattgttcctgacaaccctccatatgataagggggccttcagaatagaaatcaa

SEQ ID NO: 29590 - DNA, 201 bp, Homo sapiens
gggccttcagaatcgaaatcaactttccagcagagtacccattcaaaccaccgaggatcacatttaaaacaaagatctatcacccgaacatcgacgaaaargggcaggtctgtctgccagtaattagtgctgaaaactggaagccagcaaccaaaaccgaccaagtaatccagtccctcatagcactggtgaatgacccgc

SEQ ID NO: 29591 - DNA, 201 bp, Homo sapiens
cagagtacccattcaaaccaccgaggatcacatttaaaacaaagatctatcacccgaacatcgacgaaaaggggcaggtctgtctgccagtaattagtgcsgaaaactggaagccagcaaccaaaaccgaccaagtaatccagtccctcatagcactggtgaatgacccgcagcccgagcacccgcttcgggctgacctag

SEQ ID NO: 29592 - DNA, 181 bp, Homo sapiens
atggagtccatccccctggctgctggctgcagctggaggggaggctggttcctgactgggattgggaaggatgatggatgmttgcttttcggccaagtgtctttggttgaaatggatggaatggtgctgacgcagactagagccatcctcaactatcttgctgagaagtacaacttctatg

SEQ ID NO: 29593 - DNA, 201 bp, Homo sapiens
attgggaaggatgatggatgcttgcttttcggccaagtgtctttggttgaaatggatggaatggtgctgacgcagactagagccatcctcaactatcttgytgagaagtacaacttctatgggaaggacctgagggaaaaagtcagaggcaaccactatcagaaatttgatatcctggtagatgatctggttttctttatt

SEQ ID NO: 29594 - DNA, 198 bp, Homo sapiens
ttcagctgggcagacatacagctgttagaagctattttaatggtggaagaactcaaagcttctgttctttctgacttccctctgctaaaggcatttaaaayaagaatcagcaacatccctacaattaagaagttcctgcagcctgggagtcagaggaagccacccccgatacccactatgttgaacttgccaggaaga

SEQ ID NO: 29595 - DNA, 145 bp, Homo sapiens
atggcaaaagacatcaagaccaaaatcaagaactacaggactgcyccttttgacaggcgcttccccaaccagaaccagaccaggaatggctggcagaaatacctggacctccaccacttcaagaaggcaatgactgctaaaggag

SEQ ID NO: 29596 - DNA, 193 bp, Homo sapiens
gggagtaaaagaacctcacttagatcattgtgacaggcctgggaggttgttgcccaatatcctctctcactccttcttcccagtaaaagaatacataagtkttagctaaatacatatcagaaggaagactatgttttccagcctcccttgcagctaagtggggtcatgtgactagttcaagccaaaggacatg

SEQ ID NO: 29597 - DNA, 201 bp, Homo sapiens
gccagtgcgggtggctggctttgccattagcgggggcctttcctgaggacggcgtacggagtgtggggaatgaaggatggcagcatgccgtgcattaaaasctgttttggtagatctcagtggcacacttcacattgaagatgcagctgtgccaggcgcacaggaagctcttaaaaggttacgtggtgcttctgtaatcat

SEQ ID NO: 29598 - DNA, 122 bp, Homo sapiens
gcttccggcgcggccagggccyaacttccggcgtccgtcgggcagcagcggggctgtctatcccggctgaggacccgcggccagtgcgggtggctggctttgccattagcgggggcctttcc

SEQ ID NO: 29599 - DNA, 201 bp, Homo sapiens
aagctattgggacagattcaagcttttatgcacttggttactacagctgtaaaatgaaatctcgtcttgtagcatggattattcttctcatgttaaacccmccaaaataaaggggactaaataggtaatgattttcctagtgcatttgcatactgtgataatcctgggccttgcaatagttctacagggctcttgggcatt

SEQ ID NO: 29600 - DNA, 201 bp, Homo sapiens
ataacctattcattgcagatacctattatactgtgtaacagttgttttggaaattttatgtaaaattaaaactatcagtattttacagatgttttaattaracattgttattaacaggaacagtgcagaaactagaatcaagccttataatatcttatagaccatgcatttttgaagttagtgtccactagggtcctatta

SEQ ID NO: 29601 - DNA, 201 bp, Homo sapiens
ctggggcctggaccatttgtgactgctttagagtatgccacagataccaaagccacagtcgtggggaaaccagagaagacgttctttttggaagcattgcrgggcactggctgtgaacctgaggaggctgtcatgataggagatgattgcagggatgatgttggtggggctcaagatgtcggcatgctgggcatcttagta

SEQ ID NO: 29602 - DNA, 201 bp, Homo sapiens
tgttagaaaggttgagaaaattggaatttgatatctctgaagatgaaatattcacatctctgactgcagccagaagtttactagagcggaaacaagtcagrcccatgctgctagttgatgatcgggcactacctgatttcaaaggaatacaaacaagtgatcctaatgctgtggtcatgggattggcaccagaacattttc

SEQ ID NO: 29603 - DNA, 201 bp, Homo sapiens
agcaagcaagacctgttagaaaggttgagaaaattggaatttgatatctctgaagatgaaatattcacatctctgactgcagccagaagtttactagagcrgaaacaagtcagacccatgctgctagttgatgatcgggcactacctgatttcaaaggaatacaaacaagtgatcctaatgctgtggtcatgggattggca

SEQ ID NO: 29604 - DNA, 201 bp, Homo sapiens
gtaactgaagatgagacccaaagaaagggaaagctgagattttgtgccattccttttaaaatattcatcaggttaggtggggctgtgggggaaaagctacyacagggaagagtgttctctgctgtctcttcactggaaaacagggaggggggatttcagactgtgaagaaagttgaatggtggtttttaaattataaagta

SEQ ID NO: 29605 - DNA, 201 bp, Homo sapiens
cgagcatcagatgaagaaaaaattaatccacctccttacttaacttgtgagagtttccctcatgctgtggaccacattctgcagcacctattgtgaagcartgtgtgcatctgaagcaacttgaaatgcagcttcttattgtctggaatgaatcccttaccaactcagtgccagcatcggtagacaccagtcagtgctgat

SEQ ID NO: 29606 - DNA, 201 bp, Homo sapiens
gccgtgttattggaagtggctgcagtctggattcagcccaattccgttacctgatggaggaaaggctgggtgttcacccattaagctgtcataggtgagtycttggggaacatggatactctactgtgtctgtatggagtggagtgaacgttgctggtgtctccctgaggactctgcatccagatttagggactgatacag

SEQ ID NO: 29607 - DNA, 201 bp, Homo sapiens
ttggggaacatggatactctactgtgtctgtatggagtggagtgaacgttgctggtgtctccctgaggactctgcatccagatttagggactgatacagayaaggaatggtggaaagaggttcaaaagcaggtggtcaagaatgcttatgaggtgattaaactgaaaggctacacttcctgggcctttggactctctgtgg

SEQ ID NO: 29608 - DNA, 201 bp, Homo sapiens
ctataatgtaactgcaaattccaagctggtcattatcacagctggggcacatcagcaagaaggagaaagctctcttaattgggtccagtgtaatgtaaacrtctttaaattcatcatttctaatgttgtaaaatacagcccaactgcaagttgcttattgttttaaatccagtggatatcttgacctatgtggcttggaag

SEQ ID NO: 29609 - DNA, 201 bp, Homo sapiens
gtgtaatgtaaacgtctttaaattcatcatttctaatgttgtaaaatacagcccaactgcaagttgcttattgttttaaatccagtggatatcttgacctrtgtggcttggaagataagtggctttcccaaaagccgtgttattggaagtggctgcagtctggattcagcccaattccgttacctgatggaggaaaggctg

SEQ ID NO: 29610 - DNA, 201 bp, Homo sapiens
gttgaagaaacagttccctgttgaagaaagtagagcctgacactgctcccactttggagaccacattccctgcacacggtctttgagagagcagttgcacwctacaggcacacttctgaggtacggtatctctctccagccactctgataccaagtaattcaagctggcattccttctattagggaaattcattttaccca

SEQ ID NO: 29611 - DNA, 145 bp, Homo sapiens
gccgagatggggctgccccagccagggctgtggctgaagaggctytgggtgctcttggaggtggctgtgcatgtggtcgtgggtaaagtgcttctgatattgtttccagacagagtcaagcggaacatcctggccatgggcgaga

SEQ ID NO: 29612 - DNA, 201 bp, Homo sapiens
aagggtaaatctggcccttggaactacaacccagaggaagttcgtgctgttctggaaaagctccacagttaatctggacagatacctcaattctaggtgaycaacgggagggcttctcaaggcttagctctccctgagacccagctggcttttacccttgacctgtgtccctagctgaatcactagctcagatttttctga

SEQ ID NO: 29613 - DNA, 201 bp, Homo sapiens
caacctttttcagcacccagtatttctggttcgtcttgaaggtccgttggcagcgactagaggacacgactgagctagggggtctggccccaaactgcccrgtggtccgcctctcaggacagaggtgcaacatttgggagtttatgcaaggtaataggccactggtgctgaattttggaagttgtacctgaccttcattta

SEQ ID NO: 29614 - DNA, 201 bp, Homo sapiens; identical to SEQ ID NO: 29610

SEQ ID NO: 29615 - DNA, 163 bp, Homo sapiens
agagcttactctggctttgccgagatggggctgccccagccagggctgtggctgaagaggctytgggtgctcttggaggtggctgtgcatgtggtcgtgggtaaagtgcttctgatattgtttccagacagagtcaagcggaacatcctggccatgggcgaga

SEQ ID NO: 29616 - DNA, 201 bp, Homo sapiens; identical to SEQ ID NO: 29612

SEQ ID NO: 29617 - DNA, 201 bp, Homo sapiens; identical to SEQ ID NO: 29613

SEQ ID NO: 29618 - DNA, 201 bp, Homo sapiens; identical to SEQ ID NO: 29610

SEQ ID NO: 29619 - DNA, 163 bp, Homo sapiens; identical to SEQ ID NO: 29615

SEQ ID NO: 29620 - DNA, 122 bp, Homo sapiens
ttttcctggaatataattggtatatgtcttccactttccatcatgtatgtaaaatttcatagtaaaacttaccgatagtttcaataaagaaattatctgcaaaaaaaaaaaaaacccaaaca

SEQ ID NO: 29621 - DNA, 201 bp, Homo sapiens
ataaagggaaagttgtggcagtaggagaatgtggacttgattttgactgactgcacttttgtcccaaagatactcaactcaaatactgtgaaaaacagttwgaactgtcagaacaaacaaaattaccaatgtttcttcattgtcgaaactcacatgctgaatttttggacataattaaaagaaatagagatcggtgtgtag

SEQ ID NO: 29622 - DNA, 139 bp, Homo sapiens
aatactattaaagtattttttcctggaatataattggtatatgtcttccactttccatcatgtatgtaaaatttcatagtaaaacttaccgatagtttcartaaagaaattatctgcaaaaaaaaaaaaaacccaaaca

SEQ ID NO: 29623 - DNA, 201 bp, Homo sapiens
atctacaagacagtaaagatgcactgcatttggcacaaacaaatcatatgtttttcagtacagctggatgtcatcctacaagatgtggtaaatttgaaaakaataaccctgatctttacttaaaggagttgctaaatcttgatgaaaacaataaagggaaagttgtggcagtaggagaatgtggacttgattttgactgac

SEQ ID NO: 29624 - DNA, 158 bp, Homo sapiens
accctccacctcatttgctcacagtagcctctaatctttgtgctatctctcagttccctttgggttccatgtttgccttattctcctccatgcctagctgkatttcagagttaagtttatgattatgagataaaaactaaataacaattgcaaaaaaa

SEQ ID NO: 29625 - DNA, 201 bp, Homo sapiens
cagaacaatatgtaccttattctaccactagaaagaagattcaggagtggatcccaccttcaacaccttacaagtaaagacaatgaagaacagttgaaacrtgcaaaatatggagcttttcatgtaattactcttttactgtttaccattcactataattcacaattaaaattgtgtgactaaacaatgtctttcgtgcct

SEQ ID NO: 29626 - DNA, 201 bp, Homo sapiens; identical to SEQ ID NO: 29625

SEQ ID NO: 29627 - DNA, 201 bp, Homo sapiens
aaaagggacgaacacagctttgtgctttgttgctagcccatggagctgacccgactcttaaaaatcaggaaggacaaacacctttagatttagtttcagcrgatgatgtcagcgctcttctgacagcagccatgcccccatctgctctgccctcttgttacaagcctcaagtgctcaatggtgtgagaagcccaggagcca

SEQ ID NO: 29628 - DNA, 201 bp, Homo sapiens
gagaattaatggggtttatatttacattatctctcaactatgtagcccatattactcaccctatgagtgaatctggaattgcttttcatgtgaaatcattrtggtctatgagtttacaatactgcaaactgtgttattttatctaatccattgcttaatgagtgtgtttttccatgaatgaatataccgtggttcatatgt

SEQ ID NO: 29629 - DNA, 201 bp, Homo sapiens
aagtgcagtgaaacaggtgcttcttgctcctgggttttctctccatgatgttatgcccaattggaaatatgctgtcagtttgtgcaccatatggtgaccasgcctgtgctcagtttggcagctatagaaggaaatgctgtcccataaaatgccattcctattttctaatataaaactcttttccaggaagcatgcttaagc

SEQ ID NO: 29630 - DNA, 201 bp, Homo sapiens
tggagagtcccaagaagtacatccctagaataaaaatgatctttgccggcattaagaagaaggcagaaagggcagacttgttagcttgtcttaaaaaagcyactaaatgagtaataatttgccactgccttatttattacaaaacagaaatgtctcatgacttttttatgtataccatactttaatagatttcatacacca

SEQ ID NO: 29631 - DNA, 201 bp, Homo sapiens
tgtattcacttacacagatgccaataagaacaaaggcatcacctggggagaggatacactgatggagtatttggagagtcccaagaagtacatccctagartaaaaatgatctttgccggcattaagaagaaggcagaaagggcagacttgttagcttgtcttaaaaaagctactaaatgagtaataatttgccactgcct

SEQ ID NO: 29632 - DNA, 201 bp, Homo sapiens
aagcactgcttcccacaggcattttaaaaataaagttccagagaaacaaaaactgttccaggaggatgatggaattccactgtatctaaagggtgggatakctgatgccctccttcatagagccaccatgattcttacagttggtggaacagcatatgccatatatcagctggctgtggcttcatttcccaataaaggagt

SEQ ID NO: 29633 - DNA, 164 bp, Homo sapiens
gcttcatttcccaataaaggagtgacttcaatcatcccagcaatcacttggttcacattcattcagctctctatggaccagaaatctgataaatgagttcktctttggggatcaatatttattgacttgtagtaactgccgccaataaagcagtctttaccatg

SEQ ID NO: 29634 - DNA, 124 bp, Homo sapiens
caatcacttggttcacattcattcagctctctatggaccagaaatctgataaatgagttcttctttggggatcaatatttattgacttgtagtaactgccrccaataaagcagtctttaccatg

SEQ ID NO: 29635 - DNA, 161 bp, Homo sapiens
tcatttcccaataaaggagtgacttcaatcatcccagcaatcacttggttcacattcattcagctctctatggaccagaaatctgataaatgagttcttcyttggggatcaatatttattgacttgtagtaactgccgccaataaagcagtctttaccatg

SEQ ID NO: 29636 - DNA, 201 bp, Homo sapiens
ggtgggccaaacaaggggttcttttactcaatgctgtctcactattctggcccatcaagccagttctcataaggagagaggctgggagcaactcactgacrcagttgtgtcctggctaaatcagaactcgatctggcttgtcttcttgctctggggctcttatgctcagaaaaagggcagtgccatggataggaaacagca

SEQ ID NO: 29637 - DNA, 201 bp, Homo sapiens
aggagagaggctgggagcaactcactgacacagttgtgtcctggctaaatcagaactcgatctggcttgtcttcttgctctggggctcttatgctcagaaraagggcagtgccatggataggaaacagcaccacattctgcagctggctcatccctccctgttgtctgcatatagagacccgactgcatgtagacactttt

SEQ ID NO: 29638 - DNA, 186 bp, Homo sapiens
catacattttactgaaatgttgactccatcatatcaagacaaacatgttagataacaaaacacttcagctgtccaaaatttatttctttggagctatgtakatttaaaagaactattttaaatctcattctgaaagagggcataataaataccaaaagctgtagcaaatctcaggtaagaagagaa

SEQ ID NO: 29639 - DNA, 199 bp, Homo sapiens
aagtagaaagagcagaagggaaacatcatgggaagaaagactattttgtttctgattgcaggggtccttggggcatattatgtttatactcctctctcrgataatattgaggaactctggtgactggtgtggatagctacacctgtgaaaatggtaacaaatttggctttgttagttgaactcttgggaatcaatcatt

SEQ ID NO: 29640 - DNA, 201 bp, Homo sapiens
ttcatgaatactgcaacgttctttgtgagctttcaagaagtcccacctacatctgatgaaaatgtcaccatgatagagacaactttcagtaacattcctgyccgtgtatacatgccaacactaaagtcagagatactaagaacgggcttagtttatattcatggtggtggttggtgtatgggggatgctggtatgtgttcc

SEQ ID NO: 29641 - DNA, 201 bp, Homo sapiens
aactctggtgactggtgtggatagctacacctgtgaaaatggtaacaaatttgctttgtttaattatgactttctgtcaagatgaacagctgatagacttratgctgttgttgtatcaaccaactcatagaagacccagatgtcaagatcaaactcaagcttcagtctttaatatatcctgcccttcagacgcttgacatg

SEQ ID NO: 29642 - DNA, 127 bp, Homo sapiens
ttgctcactgagaagtttaagaaaggccacttttgttatattccaactcgtggtagttctgagctagctaaaaaatatccagggttcctagatgtgagggmagcccctttgttggccaatgacaagt

SEQ ID NO: 29643 - DNA, 201 bp, Homo sapiens
cttgaaaaagtcatgttcttcaacatgtaccaatggaatcaaaccatctgttcagatttgttaattggagttccttgctcactgagaagtttaagaaaggycacttttgttatattccaactcgtggtagttctgagctagctaaaaaatatccagggttcctagatgtgagggcagcccctttgttggccaatgacaagt

SEQ ID NO: 29644 - DNA, 192 bp, Homo sapiens
aagagcagaagggaaacatcatgggaagaaagactattttgtttctgattgcaggggtccttggggcatattatgtttatactcctctctcrgataatattgaggaactctggtgactggtgtggatagctacacctgtgaaaatggtaacaaatttgctttgtttaattatgactttctgtcaagatgaac

SEQ ID NO: 29645 - DNA, 184 bp, Homo sapiens
tgttggccaatgacaagttacatggtttacccctgtcctatatcatcacctgtcaatatgacatcttaagagatgatggactcatgtacatcacgcgactktagaactctggagttcaagtgacacataaccacagtgaagatggattccatggagcactttcctataatgggcttaaaattga

SEQ ID NO: 29646 - DNA, 201 bp, Homo sapiens
ttgctcactgagaagtttaagaaaggccacttttgttatattccaactcgtggtagttctgagctagctaaaaaatatccagggttcctagatgtgagggmagcccctttgttggccaatgacaagttacatggtttacccctgtcctatatcatcacctgtcaatatgacatcttaagagatgatggactcatgtacatc

SEQ ID NO: 29647 - DNA, 201 bp, Homo sapiens; identical to SEQ ID NO: 29643

SEQ ID NO: 29648 - DNA, 168 bp, Homo sapiens
gaagaaagactattttgtttctgattgcaggggtccttggggcatattatgtttatactcctctctcrgataatattgaggaactctggtgactggtgtggatagctacacctgtgaaaatggtaacaaatttgctcatagaagacccagatgtcaagatcaaactca

SEQ ID NO: 29649 - DNA, 201 bp, Homo sapiens
ggtacaggaatggcaagaccagcaagaagatcactattgctgactgtggacaattctaatgagtttgacttgtgttttattttaaccaccagacccattcmttctgtagctcaggagagcacccctccaccacatttgcttgcaatatcctagaatctttgtgctcttgctgcagttccctttgggttccatgtttccctt

SEQ ID NO: 29650 - DNA, 201 bp, Homo sapiens
caaatacattttgctaagtgaaagaagccagtctgaaaagggtacatactgtgatttcaactatatgacattctgcaaaaggccaaactataaagacagtraaaagatcagtggttatctttgcagacgccgccgtcgctgggagccctgtactatcagccatggtcaaacccatcgtgttttttgacatcgccgtcgacg

SEQ ID NO: 29651 - DNA, 201 bp, Homo sapiens
aagggtacatactgtgatttcaactatatgacattctgcaaaaggccaaactataaagacagtaaaaagatcagtggttatctttgcagacgccgccgtcrctgggagccctgtactatcagccatggtcaaacccatcgtgttttttgacatcgccgtcgacgccaagccctcgggccgcatctccatcaaactgtttgc

SEQ ID NO: 29652 - DNA, 201 bp, Homo sapiens
ctataaagacagtaaaaagatcagtggttatctttgcagacgccgccgtcgctgggagccctgtactatcagccatggtcaaacccatcgtgttttttgamatcgccgtcgacgccaagccctcgggccgcatctccatcaaactgtttgcagacaagattccaaagacagcagaaaagtttcatgctctgagcactggag

SEQ ID NO: 29653 - DNA, 201 bp, Homo sapiens
aaaaagatacagaaaaaacaaatacattttgctaagtgaaagaagccagtctgaaaagggtacatactgtgatttcaactatatgacattctgcaaaaggmcaaactataaagacagtaaaaagatcagtggttatctttgcagacgccgccgtcgctgggagccctgtactatcagccatggtcaaacccatcgtgtttt

SEQ ID NO: 29654 - DNA, 201 bp, Homo sapiens
ccagtctgaaaagggtacatactgtgatttcaactatatgacattctgcaaaaggccaaactataaagacagtaaaaagatcagtggttatctttgcagaygccgccgtcgctgggagccctgtactatcagccatggtcaaacccatcgtgttttttgacatcgccgtcgacgccaagccctcgggccgcatctccatca

SEQ ID NO: 29655 - DNA, 201 bp, Homo sapiens
atattgtggaagccatggagcactttgggtacaggaatggcaagaccagcaagaagatcactattgctgactgtggacaattctaatgagtttgacttgtrttttattttaaccaccagacccattccttctgtagctcaggagagcacccctccaccacatttgcttgcaatatcctagaatctttgtgctcttgctgca

SEQ ID NO: 29656 - DNA, 201 bp, Homo sapiens
gatggctgagcctgcaggaatgccagagcaagaaactgatgtctgataacagagtgacagttcaaagattctttgtagcagacactgcgaatgaagctctygaggccgctaagagactaaatgcaaaagaaattgttttaaaagcccagatcttagctggaggaagaggaaaaggtgtcttcaatagtggtttgaaaagag

SEQ ID NO: 29657 - DNA, 127 bp, Homo sapiens
gtgctaggtttcctgtttaagatagcrtcccccatggcagcgcaggcctggaagcttctgcaagccctagcgctgctgccccgcttcctggtggccaggtcccgggcagttcaattaacctccagaa

SEQ ID NO: 29658 - DNA, 201 bp, Homo sapiens
ctcatttttaaggagcaaattgacatttttgaaggaataaaggacagccaagctcagcggatggcagaaaatctaggcttcgttgggcctttgaaaagccrggttgaagccatccttgtcaatatttttggtggtatcgtcaactgtgccatcattgccaatgggatcaccaaagcctgccaggagctagaactcaaggtg

SEQ ID NO: 29659 - DNA, 201 bp, Homo sapiens
ccaagacattcaaacaaatagctattacacactgcagcagattttacaggtttctaattccaacatatgtttgaaaaatccatgagtgttccaaaatatayttaataatggaaggtctgcattaatataccatccatgtgtttttaccatttggtttaatattgaatatactgtttacctcacactaaaaataaaaccaga

SEQ ID NO: 29660 - DNA, 201 bp, Homo sapiens
gctactaaaaaggcactgccaagacattcaaacaaatagctattacacactgcagcagattttacaggtttctaattccaacatatgtttgaaaaatccaygagtgttccaaaatatacttaataatggaaggtctgcattaatataccatccatgtgtttttaccatttggtttaatattgaatatactgtttacctcac

SEQ ID NO: 29661 - DNA, 201 bp, Homo sapiens
cgaatgaagctcttgaggccgctaagagactaaatgcaaaagaaattgttttaaaagcccagatcttagctggaggaagaggaaaaggtgtcttcaatagyggtttgaaaagaggtgttcatttaacaaaagaccctaatgttgtgggacagctggctaaacagatgattgggtacaatctagcgacaaaacaaactccaa

SEQ ID NO: 29662 - DNA, 201 bp, Homo sapiens; identical to SEQ ID NO: 29656

SEQ ID NO: 29663 - DNA, 127 bp, Homo sapiens; identical to SEQ ID NO: 29657

SEQ ID NO: 29664 - DNA, 201 bp, Homo sapiens
ctcatttttaaggagcaaattgacatttttgaaggaataaaggacagccaagctcagcggatggcagaaaatctaggcttcgttgggcctttgaaaagccrggctgcagatcaaattacgaagctgtataatctcttcctgaaaattgatgctactcaggtggaagtgaatccctttggtgaaactccagaaggacaagtt

SEQ ID NO: 29665 - DNA, 201 bp, Homo sapiens; identical to SEQ ID NO: 29659

SEQ ID NO: 29666 - DNA, 201 bp, Homo sapiens; identical to SEQ ID NO: 29660

SEQ ID NO: 29667 - DNA, 201 bp, Homo sapiens; identical to SEQ ID NO: 29661

SEQ ID NO: 29668 - DNA, 201 bp, Homo sapiens
atggctacttgtgatatcattttccttaatggtaggaagccagccagcttcttggatcttggaggtggtgtaaaggaagctcaagtatatcaagcattcamattgcccacagctgatcctaaggttgaagccatccttgtcaatatttttggtggtatcgtcaactgtgccatcattgccaatgggatcaccaaagcctgc

SEQ ID NO: 29669 - DNA, 201 bp, Homo sapiens
catcgtggcactgggcaagggcatcctggctgcagatgagtccactgggagcattgccaagcggctgcagtcccttaacgccgagaacaccaaagagaacyggcgcttctactgtcagctgctgctgacagctgacgactgcgtgaacccctgcatcggggacgtcatcctcttccaccagacactctaccagaagaagga

SEQ ID NO: 29670 - DNA, 201 bp, Homo sapiens
tcctttgaagcactggaacttgccaccaccagcaccatgccctaccgatatccagcattgaccctggagcagaagaaggagctgtctgacatcgctcaccrcatcgtggcactgggcaagggcatcctggctgcagatgagtccactgggagcattgccaagcggctgcagtcccttaacgccgagaacaccaaagagaac

SEQ ID NO: 29671 - DNA, 201 bp, Homo sapiens
ttcctttgaagcactggaacttgccaccaccagcaccatgccctaccgatatccagcattgaccctggagcagaagaaggagctgtctgacatcgctcacygcatcgtggcactgggcaagggcatcctggctgcagatgagtccactgggagcattgccaagcggctgcagtcccttaacgccgagaacaccaaagagaa

SEQ ID NO: 29672 - DNA, 201 bp, Homo sapiens
gactctcagttattttaggagatccctggccaaagatttatttctgttgacaaccaagggcctccgtctggatttccaaggaagaaatttcctttgaagcwctggaacttgccaccaccagcaccatgccctaccgatatccagcattgaccctggagcagaagaaggagctgtctgacatcgctcaccgcatcgtggcac

SEQ ID NO: 29673 - DNA, 103 bp, Homo sapiens
acaaaaaaaagacaactacagggtatgcagaggtgccccaaccacactctgtccacagactctcagttattttaggagatccctggccaaagatttatttctg

SEQ ID NO: 29674 - DNA, 201 bp, Homo sapiens
tagttattttaataaccaggtttacattaacagtcacgtgatgaacttttttctttaatgtcagctaaactcaaaacacagttttgttcacggttcaaacmaaacagctcttcacgttccagagctgcctcacagctagcacagatcacaggagattactgtctgtccatacccaccagacacagaactgaacacccacac

SEQ ID NO: 29675 - DNA, 201 bp, Homo sapiens
atcacaggagattactgtctgtccatacccaccagacacagaactgaacacccacacaccagttttcaaagagggaacttacaatgaatgctggctgcccrgggcagcccatgagtgttctggtggaatggttcacttcggaagtcccaagggcagtgcggatgaccgatttggccatggaagacttatcttcatggcaca

SEQ ID NO: 29676 - DNA, 134 bp, Homo sapiens
tggccatggaagacttatcttcatggcacagagaggttgtgcagagatgagtcagactcaggggctgagtaacagcagagcagagagtgcagaagtggacsctcagaagcgagtttatgtgtgtcttttcctct

SEQ ID NO: 29677 - DNA, 201 bp, Homo sapiens
ctgtaatcccccagcaatttgggaggcaaaggtgggagaatcgcgtgagcccaggagttccagaccaggctgggtcacatgacaaagccccatctctacaaaaaaaaaaaaaaaaaaaaaaaaaagccagatgtggtggcatgcatctgtagtccaagctacttgggaggctgaagtgggaggattacttgagcccgagag

SEQ ID NO: 29678 - DNA, 201 bp, Homo sapiens
tttttttttttttttttttttttgagacagagtgttgctcctcttgtccaggctggaatgcaatggcacaatctggactcactgcaacctccgcctcccgrgtttaagcgattcttctgcttcagcctcccgagtaaaaggcatgcatcaccacacctggttaattttgtagttttagtagagatggggtctcaccatgtt

SEQ ID NO: 29679 - DNA, 201 bp, Homo sapiens
ttttttttttttttttttgagacagagtgttgctcctcttgtccaggctggaatgcaatggcacaatctggactcactgcaacctccgcctcccgagtttragcgattcttctgcttcagcctcccgagtaaaaggcatgcatcaccacacctggttaattttgtagttttagtagagatggggtctcaccatgttggcca

SEQ ID NO: 29680 - DNA, 201 bp, Homo sapiens
tttttttttttttttttgagacagagtgttgctcctcttgtccaggctggaatgcaatggcacaatctggactcactgcaacctccgcctcccgagtttargcgattcttctgcttcagcctcccgagtaaaaggcatgcatcaccacacctggttaattttgtagttttagtagagatggggtctcaccatgttggccag

SEQ ID NO: 29681 - DNA, 153 bp, Homo sapiens
ccaacctcttcagcataaagctcctgcccaaacccctcctgctcctaaatgtctgtctctggtgttaaccagaggctgctcttcccaggctgctggatggytaccttgcaggctgtcacccttaacaagaaataaagtgtcctttgcaaatgc

SEQ ID NO: 29682 - DNA, 201 bp, Homo sapiens
ggctatccatccacccccacagaccccgttcctccagcctgcgtgcccctaacctggcttttcccatctccccagcataaccaaatcttactaaactcatsctaggctgggcatggtgactcacgcctgtaatcccccagcaatttgggaggcaaaggtgggagaatcgcgtgagcccaggagttccagaccaggctgggt

SEQ ID NO: 29683 - DNA, 201 bp, Homo sapiens
ttaaaaaccaactttcgacttctgaaaagaaggctacgggagagtctccagtgaggggtctccctgggcctcatggtctgtctcctctagcctcctgctcrtgctgcacgggcctcccctccaccctggacccgctctgtttctgcctggtcatcctgagcccctcctggcctcagggccattccacagtgctcccctgcc

SEQ ID NO: 29684 - DNA, 201 bp, Homo sapiens
cctctgggatctctctgcctccaaatatcatcttttttttttttttttttttttttgagacagagtgttgctcctcttgtccaggctggaatgcaatggcrcaatctggactcactgcaacctccgcctcccgagtttaagcgattcttctgcttcagcctcccgagtaaaaggcatgcatcaccacacctggttaatttt

SEQ ID NO: 29685 - DNA, 201 bp, Homo sapiens
ctccccagcataaccaaatcttactaaactcatcctaggctgggcatggtgactcacgcctgtaatcccccagcaatttgggaggcaaaggtgggagaatygcgtgagcccaggagttccagaccaggctgggtcacatgacaaagccccatctctacaaaaaaaaaaaaaaaaaaaaaaaaaagccagatgtggtggcat

SEQ ID NO: 29686 - DNA, 201 bp, Homo sapiens
atgacaaagccccatctctacaaaaaaaaaaaaaaaaaaaaaaaaaagccagatgtggtggcatgcatctgtagtccaagctacttgggaggctgaagtgkgaggattacttgagcccgagaggtggaggctggagtgaacagagatcgcgccactgaactcgggtctgggcaacagatagagaccctgcctgaaaataaa

SEQ ID NO: 29687 - DNA, 153 bp, Homo sapiens
gcctgagtcaggaaggggtcgctgtggagatcatggactatgaagattttaaatattgttgggaaaactttgtgtacaatgataatgagctgctggatggytaccttgcaggctgtcacccttaacaagaaataaagtgtcctttgcaaatgc

SEQ ID NO: 29688 - DNA, 201 bp, Homo sapiens
gatgatgagaacttcatcctaaaacatacaggtcctggcatcttgtccacggcaaatgctggacccaacacaaattgttcctggtttttcatctccattgmgaagactgagagtttggatggccagcacgtggtctttggcaatatgaaagaaggcatgaatgttgtggaggccatggagccctttgggttcaggaatggc

SEQ ID NO: 29689 - DNA, 201 bp, Homo sapiens
gtccacagcacagacctagtggtagaggccattgtagaaaatctaaaggtgaaaatcaagctctccaagaggttggacaagtttgttgctgaacatacaastttgccagcagcacttcctctttgcaaattacaagcatagccaatgctaccaccaaacaagaccgatttgctggcctccatttactcaacccagtgcccc

SEQ ID NO: 29690 - DNA, 201 bp, Homo sapiens
aagcatagccaatgctaccaccaaacaagaccgatttgctggcctccatttactcaacccagtgcccctgatgaaatttgtagaggtctttaaaacaccartgaccacccgaaagacatttgaatctttggtaaacttgagcaaaaccctgggaaagcatcctgttccttgcaaggacactcctgggtttattgtcagctg

SEQ ID NO: 29691 - DNA, 201 bp, Homo sapiens
gaagaatgtggttgtgactggaaggtcaaaaattgttggaatgcccattgtaatgtcactgcacatacgtggggtgcatgaacgtcccagagatgatgccrccgttagaatatctcatggatatactcccaaagagcagttgaagaaacaaaatatttgcagatattgtaacatccgctgcacgaattctaaacctgttca

SEQ ID NO: 29692 - DNA, 201 bp, Homo sapiens
atgctccaggactgtttccacgatggggtatcaatgtcaacaaagaaatcaatcatttaccgcagagcccttttagcgttcatcctaaaacaggtcgcatmtctgtgcctactgatttgcagaaactggatcggtttgatccatttactgttccaaccataagcctcatctgccatgaactggatgccatttccactaatg

SEQ ID NO: 29693 - DNA, 201 bp, Homo sapiens
aaccagagtgatctggaaaaggagatgcagaaagtgaatccatacaagattgatataggtgcagtatattcccacagacccaatcaacacaatacagtgargctgggagctttccaggctcaggaaaaagaactggtgtttgacactgacatgacagacatgacaatgtgaggagatgctgtagttctgcagatacatgtt

SEQ ID NO: 29694 - DNA, 201 bp, Homo sapiens
tgatgagaacttcatcctgaagcgtatacgtcctggcatcttgtccatggcaaaagctggacccaacacgaatggctcccagtttttcatctgcactgccwagactgagtggttgattggcaagcatgtggtctttggcaaggtgaaagagggcatgaatattgtggaggccatggagccctttgggtccaggaatggcaa

SEQ ID NO: 29695 - DNA, 201 bp, Homo sapiens
ccaacctaaagaaggagggttctacccacatctggcaacacataactgacaaaattggcatgttttgtttcacagggctaaagcctgatcaggtggagcarctgaccaatgagttctccatctacatggtagaagatggccacatctctgtggcaggggtcaccttcagcaacatgggctaccttgcccatgcctttcatc

SEQ ID NO: 29696 - DNA, 201 bp, Homo sapiens; identical to SEQ ID NO: 29695

SEQ ID NO: 29697 - DNA, 201 bp, Homo sapiens
tcccctcaatggagcccagattgcttctaccattcttaacaccgaaatttgcaaaaacaatggttgcaagaagtgaaaagcatggccaaccacatcattarcatgcagactcagctggtctccaacctaaagaaggagggttctacccacatctggcaacacataactgacaaaattggcatgttttgtttcacagggcta

SEQ ID NO: 29698 - DNA, 201 bp, Homo sapiens
ccctctgcctgaagccttcctgccctctctcctggctccaagcatcctgtgggcttcccccagcgctggtgccagcaaagcccgatctcctctctcgaggycgcctgcactcccccttgcacagaagcgtgaagaagcggtggtcactggcacggagtcctccttgagagtccggccggggatccgtaccagtggtccctg

SEQ ID NO: 29699 - DNA, 201 bp, Homo sapiens
ttgagagtccggccggggatccgtaccagtggtccctgcccacctgggttaggaaaggctgactggcctggggaggctgtggacgacgtctgcggtgtcasggccggggcaccggtacaaagtcagggctcccggaacaagctgctcctggtgtccttcgacagcttccgctggaactacgagcaggacgtggacaccccc

SEQ ID NO: 29700 - DNA, 201 bp, Homo sapiens
agcatcctgtgggcttcccccagcgctggtgccagcaaagcccgatctcctctctcgaggtcgcctgcactcccccttgcacagaagcgtgaagaagcggkggtcactggcacggagtcctccttgagagtccggccggggatccgtaccagtggtccctgcccacctgggttaggaaaggctgactggcctggggaggct

SEQ ID NO: 29701 - DNA, 201 bp, Homo sapiens
ctacatgacccccgcctttgtcaccatgaccagcccctgccacttcaccctggtcaccgctctgggagaggagccccagcactgggattccgaggctttcyattcggtgatcagcactgaacacagaggactcaccatggagtttgagctcagctgggttttccttgttgctattttacaaggtgattcatggagaactaa

SEQ ID NO: 29702 - DNA, 201 bp, Homo sapiens
tgctggtgttacagcgtgaacgtgacctgaagacaaaaaggctgtacagaatcattgtcacttccacaggaggggtttcggcgacgcgtgtaagggaactytggcgacttagtgcgatcactgggagaattgtagagtccactggagagaaagaaaaatggtcaaaaagagcccagagagttcctgggggaaaacacaccg

SEQ ID NO: 29703 - DNA, 151 bp, Homo sapiens
ggctccagggccctgtccctttgatgttaagtggtggagggagttggcgggatttgcctctggcttgcggtatatccagtggattgtaacaaatccagaaytcaagttctttccatatctggaaaacaggcaggatttatcagaaccttta

SEQ ID NO: 29704 - DNA, 201 bp, Homo sapiens
gtagtttgctgtcagctacaatgctttcttatgtgcttgaggtgaccaagaagttcatgagggaccccatttggattctggtcaagaaggaagagttgatyctggagagtatccaccaattctgcatcaatgtggaacaagagaagtggaagctggacacactgcgtgacttgtatgaaactctgaccatcacccaggcaa

SEQ ID NO: 29705 - DNA, 201 bp, Homo sapiens
catacccctggatgcatgtttgatatggttcactggagatacctgtctcccaaatacatcaaaatgcttgtactggacaaagctgatgaaatgttaagccrtggattcaaggaccagatctatgtcatattccaaagtttaacagcaacacccaggtagtttgctgtcagctacaatgctttcttatgtgcttgaggtgac

SEQ ID NO: 29706 - DNA, 201 bp, Homo sapiens
caacctgggactggggaaatggccacacttgtcatatcgattctgccacagattgagttagatctaacagccacccaggccttggtcttagcacccactasagaactggctcagcagatacagaaggtggtcataacacctggagactacatgagtacctcttgtaatgcctgtattgggggcaccaatgtgtgtactgag

SEQ ID NO: 29707 - DNA, 201 bp, Homo sapiens
gcatggagcccaaaggcatcatcgagagtaactagaatgagatggttgacagctttgatgacatgaaactgtaggagtttcttctccgtggcatctatgcstatggttttgagaaaccctctgccatccagcagcgagccattctacctgtgtcaagggttatgatgtgatcactcaagcccaacctgggactggggaaat

SEQ ID NO: 29708 - DNA, 201 bp, Homo sapiens; identical to SEQ ID NO: 29704

SEQ ID NO: 29709 - DNA, 201 bp, Homo sapiens; identical to SEQ ID NO: 29705

SEQ ID NO: 29710 - DNA, 201 bp, Homo sapiens; identical to SEQ ID NO: 29706

SEQ ID NO: 29711 - DNA, 181 bp, Homo sapiens
atcgagagtaactagaatgagatggttgacagctttgatgacatgaaactgtaggagtttcttctccgtggcatctatgcstatggttttgagaaaccctctgccatccagcagcgagccattctacctgtgtcaagggttatgatgtgatcactcaagcccaacctgggactggggaaat

SEQ ID NO: 29712 - DNA, 201 bp, Homo sapiens
gatgggtggttggatttcaagaagttgattcaagttgcccctccaaagcagacctacatgaggaccaaaagccaagatccaatggccatattcttcaccargggtacaacaggagctcccaaaatggtcgagtattcccagtatggtttgggaatgggattcagccaggcttccagacggtggatggatctccagccaaca

SEQ ID NO: 29713 - DNA, 201 bp, Homo sapiens
ccaagctctctggggaagccattgccaccttatattgtccagattgtggatgaaaactcaaatctcctgcctccaggggaagaaggaaatattgcaatccrcataaaactaaaccaacctgcttctctgtactgtccacacatggtgagctgggaggaatatgcttcagcaagaggccacatgctttacctcacaggtgac

SEQ ID NO: 29714 - DNA, 201 bp, Homo sapiens
tactctgtgccacttccaaaacaataaaattgaagccaagctctctggggaagccattgccaccttatattgtccagattgtggatgaaaactcaaatctyctgcctccaggggaagaaggaaatattgcaatccgcataaaactaaaccaacctgcttctctgtactgtccacacatggtgagctgggaggaatatgctt

SEQ ID NO: 29715 - DNA, 136 bp, Homo sapiens
gacggactcagagggccttaccccgccctctggaasgttagtgccaaaggagaagaggacaaatggagctttgaaaggatgactcaactctccaagaaggccgccagcatcctctcagacacctgtgcccttagcc

SEQ ID NO: 29716 - DNA, 170 bp, Homo sapiens
tccggaagcacaaaggtcctggtatcttgtccatggcaaatgctggacccaacacaaaaggcttccagtttttcatgtgcaccaccaagactgagtggtcrgatggcaagcacgtggtctttgacaaggtgaaggacagcatggatatcatggatgccatggagcactct

SEQ ID NO: 29717 - DNA, 201 bp, Homo sapiens
catccactgagcccaggtacgagaatgagaatgagataggggtggccattcaggagaagctcagggggcagatggtgaagcgtgaggagctcttcatcatsagcaaactctggtgcacataccatgggaagggcctggtgaaaggagcctgtcagaagatgctcagtgaccttaagcagggctacctggactactaccttg

SEQ ID NO: 29718 - DNA, 171 bp, Homo sapiens
tgctggggaaagtacaacctgaatacccttttctgaccaaagggaagcaaaatctaccaggttaaagtagtgccactaacagttgagttttaactgcttgkaactgtaatcctttcagcaagacttctctttgcctcaaataaaaagtgcttttgtgaacttgaaaaaaaa

SEQ ID NO: 29719 - DNA, 201 bp, Homo sapiens
tggcttaaaggataagcctgcagttaaccagattgagtgtcacctgtacctcattcaggagaagttaagtccaaaggcattgtggtgactgcctacagccscctcggctctcccgacaggccctgggccaagcccgaggaccttgcctcctggaggatcccaggatcaaggtgatcacagccaagcacaataaaactacag

SEQ ID NO: 29720 - DNA, 201 bp, Homo sapiens
gagctgtgcctcccacaaggattaccccttccatgaagagttttgaagctgtggttgcctgcttgtccctaagtgacctatacctgtgtttcctgcctcatttttttcattgcaaatgtagtatagcctgtgtcactcagcagtgggacagcaaactgtagagtggccagcgagggtgtgtccagcttgatgttggatctg

SEQ ID NO: 29721 - DNA, 201 bp, Homo sapiens
ttcgtccagaagaggttgaaattttggtctgtggaagtcctgacctggatatgcatgctctgcagagaagtactcagtatgatggctatgcaaaaacggayttaactataaaatacttttgggatgttgtgcttggatttcctcttgatcttcaaaagaagttgctacattttactacagggagtgacagagtacctgtag

SEQ ID NO: 29722 - DNA, 201 bp, Homo sapiens
cttgagtaacctagaagacttgaaatataatcttttatatgtagcattcacttccctcttactgtgcctttagccttttcatgtttctgtctcaaaacackttgacaaagctcaccaactttaaaatattaagtttttaaaaaatcaaatatgaagtatgttcagcaaaggcataattttctaaaaacacacacagaaatc

SEQ ID NO: 29723 - DNA, 168 bp, Homo sapiens
tttggcgatggggcagcaggaggtggggaggctcatgtcgaggtttaatgcattcaaaaggattaatrccatactgcaccatttgagaatgtccaagcacacagatgcagcagaagacgtgctattggggggggggaaagaaacgtgtgcagatgtatccatggctag

SEQ ID NO: 29724 - DNA, 201 bp, Homo sapiens
tgtcgaggtttaatgcattcaaaaggattaataccatactgcaccatttgagaatgtccaagcacacagatgcagcagaagacgtgctattgggggggggraaagaaacgtgtgcagatgtatccatggctagagaagtgggaagaagatcctgaaactctcctgatcattataaagggagccggaggaaaggctttctgt

SEQ ID NO: 29725 - DNA, 201 bp, Homo sapiens
gaggtttaatgcattcaaaaggattaataccatactgcaccatttgagaatgtccaagcacacagatgcagcagaagacgtgctattggggggggggaaaraaacgtgtgcagatgtatccatggctagagaagtgggaagaagatcctgaaactctcctgatcattataaagggagccggaggaaaggctttctgtgatg

SEQ ID NO: 29726 - DNA, 201 bp, Homo sapiens
ggctagagaagtgggaagaagatcctgaaactctcctgatcattataaagggagccggaggaaaggctttctgtgatgggagtgatattagagtcatctcsgaggctgaaaaggcaaaacggaagatagcgccagttttcttcagagaagaatatatgctgaacaatgcttttggttcttgccagaaaccttatgttgcac

SEQ ID NO: 29727 - DNA, 201 bp, Homo sapiens
atgtcgaggtttaatgcattcaaaaggattaataccatactgcaccatttgagaatgtccaagcacacagatgcagcagaagacgtgctattggggggggrgaaagaaacgtgtgcagatgtatccatggctagagaagtgggaagaagatcctgaaactctcctgatcattataaagggagccggaggaaaggctttctg

SEQ ID NO: 29728 - DNA, 167 bp, Homo sapiens
aagagatctgtggtcttggtaaataacaatgaggaaatgtgaactgatgagggaagcttccagaaagagaccagagagggggtgattgccagtcagcccgwatcttcctcctgaaatgctaccctgatttaaaatcagctttacaataaagagtatgactccaccta

SEQ ID NO: 29729 - DNA, 184 bp, Homo sapiens
cacttcatggggggacatagggtgaactactacacttcaccaaccagccaggacacattccacacatcaagctctgagagggayggcagatggtcatcctccaggtccagagctatgcccactggcaggacatcaccaggcaccgcatggaggtgatcagcaacttttcccagcagcacttcct

SEQ ID NO: 29730 - DNA, 201 bp, Homo sapiens
atccagtggttccagttcacctgcataccatcatctaagctcctgtatcagcactcctcatcatcactcatctgccaagctcctcaatcatagccaagatyccatccctccatgtactctgggtgtcagcatctgtcctcttcagtctctataccccttccacttgcctgagctgaagtgccttgtgaagcctgcaataaa

SEQ ID NO: 29731 - DNA, 201 bp, Homo sapiens
ttacctgggctcaggggtttgacgtccatcagtaggaaccagctccaatgcaccaatgcaatgcgggtaattaacaattatcaacggcgatggaaaaaccraaatacttttcttcttgcaacttttgctaatgtagttaatgtttgtggtaacccaactataacctgccctcataacagaactctcaacaattgtcatcat

SEQ ID NO: 29732 - DNA, 165 bp, Homo sapiens
tcctcatcatcactcatctgccaagctcctcaatcatagccaagatcccatccctccatgtactctgggtgtcagcatctgtcctcttcagtctctatacyccttccacttgcctgagctgaagtgccttgtgaagcctgcaataaactgctttgcaaattcatc

SEQ ID NO: 29733 - DNA, 201 bp, Homo sapiens
tgcatgtgacaacagggatcaacgacgggaccctccacagtatccagtggttccagttcacctgcataccatcatctaagctcctgtatcagcactcctcrtcatcactcatctgccaagctcctcaatcatagccaagatcccatccctccatgtactctgggtgtcagcatctgtcctcttcagtctctataccccttc

SEQ ID NO: 29734 - DNA, 201 bp, Homo sapiens
gtatgcgcagacaccagcaaacatgttctatatagttgcatgtgacaacagggatcaacgacgggaccctccacagtatccagtggttccagttcacctgsataccatcatctaagctcctgtatcagcactcctcatcatcactcatctgccaagctcctcaatcatagccaagatcccatccctccatgtactctgggt

SEQ ID NO: 29735 - DNA, 118 bp, Homo sapiens
gtgagtcctgcaaatcamcgcatacctctaagtgatggaaacagcattcccatcatcagacttggtacctactcagagcctaaattgacccctaagggggccgatgacttactcaagg

SEQ ID NO: 29736 - DNA, 201 bp, Homo sapiens
gaaacagcattcccatcatcagacttggtacctactcagagcctaaattgacccctaagggggccgatgacttactcaaggccacacagcaagtaggtgcytacatataccaaaatgaagacacagctggggaggccatcagggggaaaatagcagaaggaaaggtgcagaggaaggatatcttctactgtggaaaactgt

SEQ ID NO: 29737 - DNA, 201 bp, Homo sapiens
gagtcctgcaaatcaccgcatacctctaagtgatggaaacagcattcccatcatcagacttggtacctactcagagcctaaattgacccctaagggggccratgacttactcaaggccacacagcaagtaggtgcctacatataccaaaatgaagacacagctggggaggccatcagggggaaaatagcagaaggaaaggt

SEQ ID NO: 29738 - DNA, 201 bp, Homo sapiens
tcctgcttgaagctttgttcctcactggggacccttacatgagagtggcagccaaaagactgaaggaaggtgatacaatgatggggcagcaagtggccagrtttgtggaaagtaaaaacgcagccttaccaacagaactattgtactggctccttcaggctggacagcacactccattgctcatggaaaagatctggaaaa

SEQ ID NO: 29739 - DNA, 201 bp, Homo sapiens
aagggctgcaaagtggttggagcagtagggtctgacgaaaagactgcctgccttaaaaagcttggatctgatgtctttaactacaagacagtagagtcttkgaagaaactttgaagaaagcctctcctgatggttacaattgttattttggtaatgtaagtggatggttttcaaacactgttatctcccagatgaagaaat

SEQ ID NO: 29740 - DNA, 201 bp, Homo sapiens
aagactgcctgccttaaaaagcttggatctgatgtctttaactacaagacagtagagtctttgaagaaactttgaagaaagcctctcctgatggttacaaytgttattttggtaatgtaagtggatggttttcaaacactgttatctcccagatgaagaaatttggaagaattgccacatgtggagctatcagcccacttc

SEQ ID NO: 29741 - DNA, 201 bp, Homo sapiens
tcactgcctactttggcctacttgacatctgtggtgtgaagggtggagaaacagtgatggttaatgcagcagctggagctgtgggctctgttttggggcarattacaaagctcaagggctgcaaagtggttggagcagtagggtctgacgaaaagactgcctgccttaaaaagcttggatctgatgtctttaactacaaga

SEQ ID NO: 29742 - DNA, 170 bp, Homo sapiens
atgctgagatggaccctgaagaagcactttgttggcaatcctactaatagtgactttgagttgaagacakctgagctcccacccttaaaaaatagagaggtcctgcttgaagctttgttcctcactggggacccttacatgagagtggcagccaaaagactgaaggaagg

SEQ ID NO: 29743 - DNA, 201 bp, Homo sapiens
gactttgagttgaagacagctgagctcccacccttaaaaaatagagaggtcctgcttgaagctttgttcctcactggggacccttacatgagagtggcagmcaaaagactgaaggaaggtgatacaatgatggggcagcaagtggccagatttgtggaaagtaaaaacgcagccttaccaacagaactattgtactggctc

SEQ ID NO: 29744 - DNA, 201 bp, Homo sapiens
aaacagtgatggttaatgcagcagctggagctgtgggctctgttttggggcagattacaaagctcaagggctgcaaagtggttggagcagtagggtctgaygaaaagactgcctgccttaaaaagcttggatctgatgtctttaactacaagacagtagagtctttgaagaaactttgaagaaagcctctcctgatggtta

SEQ ID NO: 29745 - DNA, 201 bp, Homo sapiens
tggggcagcaagtggccagatttgtggaaagtaaaaacgcagccttaccaacagaactattgtactggctccttcaggctggacagcacactccattgctsatggaaaagatctggaaaacctgccaacagaatggcctgacacagtaccactgtctctggctctggggacagttagcatgacaggcctcactgcctactt

SEQ ID NO: 29746 - DNA, 181 bp, Homo sapiens
ataataccagccatggtcaaccccaccattttcttcgacatcaccatgatagcgagcccttgggctgcgtctgttttgatytgtttgcagagtagtttccaaagacagcagaaaacttttgtgctctgagcacatgagagaaaagatatggttttaaggattcctgctttcacagaattat

SEQ ID NO: 29747 - DNA, 104 bp, Homo sapiens
tgaccgggtcatgggactgggctcatgagggtgaccgttactgctccatttgcaattttctgagtatcagaggagcaagatgctaggatgtgtgacccaawgga

SEQ ID NO: 29748 - DNA, 201 bp, Homo sapiens
acatgaacgaccaccaggagaagctggagcaggctgatgcacagaagggcggagaagagggacacgtgccagacaacagctgcagagggctccaggcagayggagttccagagcgaacggtcatacagataattcctatcccaaaaaataaggagaccaggggtcaggcgataagtaaggaaagccaaacaggcaacccca

SEQ ID NO: 29749 - DNA, 201 bp, Homo sapiens
gcaggctgatgcacagaagggcggagaagagggacacgtgccagacaacagctgcagagggctccaggcagacggagttccagagcgaacggtcatacagrtaattcctatcccaaaaaataaggagaccaggggtcaggcgataagtaaggaaagccaaacaggcaaccccagtagaaaactggggtctcccctgaccgg

SEQ ID NO: 29750 - DNA, 201 bp, Homo sapiens
aaaaatagctatcgcgtgcacgttcactattagcctcattcccacaacgtttatgtataccaacctagaagccatcacctcaaactgacattgaataacawttcaaacccttaaactctcattaagcttcaaactagactacttctccatgatatttattacagtagcactattcgtcacctgatctattatagaattctc

SEQ ID NO: 29751 - DNA, 201 bp, Homo sapiens
tctttgcagcctctggggttcccctcaggggctccagggcaatcgcacactcagccctggtctttgggctgccccctcaccaggtctgggctccttctttrttaggaagcttcagacaggctcaggcaggcaggacatttccactgttgccagccctgccccagtgtgatgctctggaacaagatgaccacacgcgcgagg

SEQ ID NO: 29752 - DNA, 201 bp, Homo sapiens
gctctgatgggggtgtgggaggaggaaatgaagtgggagcacagcccgcccccatcctctttgcagcctctggggttcccctcaggggctccagggcaatygcacactcagccctggtctttgggctgccccctcaccaggtctgggctccttctttgttaggaagcttcagacaggctcaggcaggcaggacatttccac

SEQ ID NO: 29753 - DNA, 201 bp, Homo sapiens
tggcccatttcctccttctcttctacaaggagaaaccccttgacagcctgatttctcatttccatacgctcctggtccaggaaagcccaatcctctgcagrcctttcctattctactgcagggtctcctacactgcctttgatcacaagcagaaggccacagcacttcagaaaaagaatgccgatggtcccaacaacccgc

SEQ ID NO: 29754 - DNA, 201 bp, Homo sapiens
cagggaggcattttgctttttgccttcttcctgctggaagataataaacctccttttcctagtgatgagaatcgtccagtagaaagggagaagtggatcaygcagaagagaaaggaagtggatcatgcagaagagaaagaggataactgcaggggtgaagaacttgggaaggcgagagggagtaggagtccgagcctaagc

SEQ ID NO: 29755 - DNA, 201 bp, Homo sapiens
aagcagaaggccacagcacttcagaaaaagaatgccgatggtcccaacaacccgcctggagctgtcttcactgatatgcaggtttccgatgtgcatttccyctgggaggcctacactctggatgagtcattcttttggacacacaacattagtataggaaaccacctgacagtgattctgaaccatccagcaaacctgagc

SEQ ID NO: 29756 - DNA, 201 bp, Homo sapiens
aaaaaatcagactccagatcagcaagacaggatagggtacagcgcagactgtaggcgaggaaccagactgaaagccgggcagaacttactgagagtctgcmctacagagaaaaagaaacagtcaaggtctcctgtcccatctatgcgttcttgggggtcagaaactgttggatttctaatagggaccgggtactttggagg

SEQ ID NO: 29757 - DNA, 201 bp, Homo sapiens
ttctttgttaggaagcttcagacaggctcaggcaggcaggacatttccactgttgccagccctgccccagtgtgatgctctggaacaagatgaccacacgygcgaggcactgccacagaaaatcctccatgggcctgtccactacttttctgacagcctggatgcagctcctcccagaataggcactcacaaccctttaag

SEQ ID NO: 29758 - DNA, 201 bp, Homo sapiens
tcttccacagcagggacctcccactcctggcccatttcctccttctcttctacaaggagaaaccccttgacagcctgatttctcatttccatacgctcctkgtccaggaaagcccaatcctctgcagacctttcctattctactgcagggtctcctacactgcctttgatcacaagcagaaggccacagcacttcagaaaa

SEQ ID NO: 29759 - DNA, 201 bp, Homo sapiens
tcttttttgcccccaactttgtcacccacattcattcaagggtgaccaccatgaagtccaactcgtgggtgctaatggagttctccaatatgggcttcctyggcaaactcttccacagcagggacctcccactcctggcccatttcctccttctcttctacaaggagaaaccccttgacagcctgatttctcatttccata

SEQ ID NO: 29760 - DNA, 201 bp, Homo sapiens
cagaaactgttggatttctaatagggaccgggtactttggaggtgccctgtcttctcttaggccacttccccttagttttcagttctgcatcaccaaagtmaccaccctctcctccaaggactccatggagccagctgagcatggggacctgggtcttcgggcagttataaatggaagccaatgggacctgcaggaagtca

SEQ ID NO: 29761 - DNA, 201 bp, Homo sapiens; identical to SEQ ID NO: 29758

SEQ ID NO: 29762 - DNA, 201 bp, Homo sapiens; identical to SEQ ID NO: 29759

SEQ ID NO: 29763 - DNA, 201 bp, Homo sapiens; identical to SEQ ID NO: 29753

SEQ ID NO: 29764 - DNA, 201 bp, Homo sapiens; identical to SEQ ID NO: 29755

SEQ ID NO: 29765 - DNA, 201 bp, Homo sapiens
tggtaccagcagatttacttgcaaaggaaagacaattttgcgttacatgggaaccagcacattttctgaatacacagttgtagctgatatctctgttgctwaaatagatcctttagcacctttggataaactctgccttctaggttgtggcatttcagctggtgatggtgctgctgtgaacactgccaaggtggaacctgg

SEQ ID NO: 29766 - DNA, 201 bp, Homo sapiens
gtcttttggtgaaattaacaaagcctttcaactgatgcattctggaaagagcattcgaactgttgtaaagatttaattcaaaagagaaaaataatgtccawcctgtcgtgatgtgatgggagcagcttaacaggcagggagaagcgcctccaaactcacagcctcgtagagcttcgcagctaccccagagaatagtgttat

SEQ ID NO: 29767 - DNA, 201 bp, Homo sapiens
aagcctttcaactgatgcattctggaaagagcattcgaactgttgtaaagatttaattcaaaagagaaaaataatgtccaacctgtcgtgatgtgatgggrgcagcttaacaggcagggagaagcgcctccaaactcacagcctcgtagagcttcgcagctaccccagagaatagtgttatgagtgtaattcatgaatctc

SEQ ID NO: 29768 - DNA, 201 bp, Homo sapiens
ataaagataaatttgcaagggccaaagagtttggagccactgaatgtattaaccctcagggttttagtaaacccatccaggaagggctcattgagatgacygatggaggagtggactattcctttgaatgtattggtaatgtgaaggtcatgagagcagcacttgaggcttatcacaagggctggggagtcagcgtggtgg

SEQ ID NO: 29769 - DNA, 201 bp, Homo sapiens
actcgtccattccagctggtaacaggtcgcacatggaaaggaactgcctttggaggatggaagagtgtagaaagtgtcccaaagttggtgtctgaatataygtccaaaaaaataaaagttgatgaatttgtgactcacaatctgtcttttggtgaaattaacaaagcctttcaactgatgcattctggaaagagcattcga

SEQ ID NO: 29770 - DNA, 201 bp, Homo sapiens
attggcagttatcacgggctgtaaagtggctggtgcatcccggatcattggtgtggacatcaataaagataaatttgcaagggccaaagagtttggagccrctgaatgtattaaccctcagggttttagtaaacccatccaggaagggctcattgagatgactgatggaggagtggactattcctttgaatgtattggtaa

SEQ ID NO: 29771 - DNA, 201 bp, Homo sapiens
cactgccaaggtggaacctggctctgtttgtgccgtctttggtctgggaggagttggattggcagttatcacgggctgtaaagtggctggtgcatcccggrtcattggtgtggacatcaataaagataaatttgcaagggccaaagagtttggagccactgaatgtattaaccctcagggttttagtaaacccatccagga

SEQ ID NO: 29772 - DNA, 201 bp, Homo sapiens
aaatgtgagtttttgtgaattacgtgagtgtagaatggtgttttattatgagtttagtttgcattttccacaattactcattaaatccttcattctaatgkacattttattgtgaagaacctgttcatatcctgtgcccaactttgtattgaattatttctttttctctgagtaatttttaggagttcttttattctagac

SEQ ID NO: 29773 - DNA, 201 bp, Homo sapiens
caaagttggtgtctgaatatatgtccaaaaaaataaaagttgatgaatttgtgactcacaatctgtcttttggtgaaattaacaaagcctttcaactgatrcattctggaaagagcattcgaactgttgtaaagatttaattcaaaagagaaaaataatgtccaacctgtcgtgatgtgatgggagcagcttaacaggcag

SEQ ID NO: 29774 - DNA, 201 bp, Homo sapiens
aaactctgccttctaggttgtggcatttcagctggtgatggtgctgctgtgaacactgccaaggtggaacctggctctgtttgtgccgtctttggtctggsaggagttggattggcagttatcacgggctgtaaagtggctggtgcatcccggatcattggtgtggacatcaataaagataaatttgcaagggccaaagag

SEQ ID NO: 29775 - DNA, 201 bp, Homo sapiens
  misc_feature (1)...(201): n = A,T,C or G
gaatacacagttgtagctgatatctctgttgctaaaatagatcctttagcacctttggataaactctgccttctaggttgtggcatttcagctggtgatgntgctgctgtgaacactgccaaggtggaacctggctctgtttgtgccgtctttggtctgggaggagttggattggcagttatcacgggctgtaaagtggct

SEQ ID NO: 29776 - DNA, 201 bp, Homo sapiens
gtcgcacatggaaaggaactgcctttggaggatggaagagtgtagaaagtgtcccaaagttggtgtctgaatatatgtccaaaaaaataaaagttgatgartttgtgactcacaatctgtcttttggtgaaattaacaaagcctttcaactgatgcattctggaaagagcattcgaactgttgtaaagatttaattcaaaa

SEQ ID NO: 29777 - DNA, 201 bp, Homo sapiens
aatcaagatcattgccactgcggtttgccacaccgacgcctataccctgaggggagctgatcctgagggttgttttccagtgatcttgggacatgaaggtrccggaattgaggaaagtgttggcgagggagttactaagctgaaggcgggtgacactgtcatcccactttacatcccacagtgtggagaatgcaaattttg

SEQ ID NO: 29778 - DNA, 201 bp, Homo sapiens
attagttacttaagatgtgtatcacagaataaacacatttagccttatagacattgccaaatttatcttcaaagtaaatgtgagtttttgtgaattacgtragtgtagaatggtgttttattatgagtttagtttgcattttccacaattactcattaaatccttcattctaatggacattttattgtgaagaacctgttc

SEQ ID NO: 29779 - DNA, 201 bp, Homo sapiens
  misc_feature (1)...(201): n = A,T,C or G
atttcagctggtgatggtgctgctgtgaacactgccaaggtggaacctggctctgtttgtgccgtctttggtctgggaggagttggattggcagttatcangggctgtaaagtggctggtgcatcccggatcattggtgtggacatcaataaagataaatttgcaagggccaaagagtttggagccactgaatgtattaac

SEQ ID NO: 29780 - DNA, 201 bp, Homo sapiens
ttatcacaagggctggggagtcagcgtggtggttggagtagctgcttcaggtgaagaaattgccactcgtccattccagctggtaacaggtcgcacatggraaggaactgcctttggaggatggaagagtgtagaaagtgtcccaaagttggtgtctgaatatatgtccaaaaaaataaaagttgatgaatttgtgactca

SEQ ID NO: 29781 - DNA, 201 bp, Homo sapiens
  misc_feature (1)...(201): n = A,T,C or G
gagttggattggcagttatcacgggctgtaaagtggctggtgcatcccggatcattggtgtggacatcaataaagataaatttgcaagggccaaagagttnggagccactgaatgtattaaccctcagggttttagtaaacccatccaggaagggctcattgagatgactgatggaggagtggactattcctttgaatgta

SEQ ID NO: 29782 - DNA, 201 bp, Homo sapiens
tgtgccttgttcgtgcctgtaccccaaattcctagtatggcatctgcccctcaggggacactaaaatgtattattgaaacagcattctggacttaaatagktgtatgtgtgtgttggttgtggctgtactatttctagtatagtgaattacatactgaatatccaagttctcagcacctacttttgtcaaatcttaacatt

SEQ ID NO: 29783 - DNA, 201 bp, Homo sapiens
atcaataaagataaatttgcaagggccaaagagtttggagccactgaatgtattaaccctcagggttttagtaaacccatccaggaagggctcattgagaygactgatggaggagtggactattcctttgaatgtattggtaatgtgaaggtcatgagagcagcacttgaggcttatcacaagggctggggagtcagcgtg

SEQ ID NO: 29784 - DNA, 201 bp, Homo sapiens
ttgctaaaatagatcctttagcacctttggataaactctgccttctaggttgtggcatttcagctggtgatggtgctgctgtgaacactgccaaggtggarcctggctctgtttgtgccgtctttggtctgggaggagttggattggcagttatcacgggctgtaaagtggctggtgcatcccggatcattggtgtggaca

SEQ ID NO: 29785 - DNA, 201 bp, Homo sapiens
gccagaagataagagtcactcaagggaaaggattaatgccagatggtaccagcagatttacttgcaaaggaaagacaattttgcgttacatgggaaccagyacattttctgaatacacagttgtagctgatatctctgttgctaaaatagatcctttagcacctttggataaactctgccttctaggttgtggcatttcag

SEQ ID NO: 29786 - DNA, 201 bp, Homo sapiens
tatcttaattcatctgttctccagttgaaggcatgaagttgttgccagtttctgtattacaacactgtagtggaacattcttctgcattgggctcactacrttagttacttaagatgtgtatcacagaataaacacatttagccttatagacattgccaaatttatcttcaaagtaaatgtgagtttttgtgaattacgtg

SEQ ID NO: 29787 - DNA, 201 bp, Homo sapiens
cttccacatcacattgccattcctcccctccagaggtaacaattatccaaaatttgatgtttgtcattcctgtgttgttgtactttcactgtgtataacckaaaccatctactctttagtactgttttatatatttttaagccttatacttgctcattctacagcttttctttttttcactcattattgtataattatatg

SEQ ID NO: 29788 - DNA, 201 bp, Homo sapiens
attttgccacttccacatcacattgccattcctcccctccagaggtaacaattatccaaaatttgatgtttgtcattcctgtgttgttgtactttcactgkgtataacctaaaccatctactctttagtactgttttatatatttttaagccttatacttgctcattctacagcttttctttttttcactcattattgtat

SEQ ID NO: 29789 - DNA, 201 bp, Homo sapiens
tgaagttttaagggtctcagtcccgttgattgaagaacagatcctagccatcagtgacaaagttaatcaggagccaagtctgcttctgtgatattatcttkaagggaggtactgtgccttgttcgtgcctgtaccccaaattcctagtatggcatctgcccctcaggggacactaaaatgtattattgaaacagcattctg

SEQ ID NO: 29790 - DNA, 201 bp, Homo sapiens
caaggataattcagtcatggacctgttttctggacgctcctccacataaataattgctagcttattaaggaatattttaacataataaaagtaatttctayatttgtgtagaaattgtctttgttttatgctgtaatcattgtcatggtttgtctgcccattatcttcattctgtaagggaaatgtaaaggaagcagggca

SEQ ID NO: 29791 - DNA, 201 bp, Homo sapiens
gcttatcacaagggctggggagtcagcgtggtggttggagtagctgcttcaggtgaagaaattgccactcgtccattccagctggtaacaggtcgcacatdgaaaggaactgcctttggaggatggaagagtgtagaaagtgtcccaaagttggtgtctgaatatatgtccaaaaaaataaaagttgatgaatttgtgact

SEQ ID NO: 29792 - DNA, 201 bp, Homo sapiens
catgagagcagcacttgaggcttatcacaagggctggggagtcagcgtggtggttggagtagctgcttcaggtgaagaaattgccactcgtccattccagmtggtaacaggtcgcacatggaaaggaactgcctttggaggatggaagagtgtagaaagtgtcccaaagttggtgtctgaatatatgtccaaaaaaataaa

SEQ ID NO: 29793 - DNA, 201 bp, Homo sapiens
gtgactcacaatctgtcttttggtgaaattaacaaagcctttcaactgatgcattctggaaagagcattcgaactgttgtaaagatttaattcaaaagagwaaaataatgtccaacctgtcgtgatgtgatgggagcagcttaacaggcagggagaagcgcctccaaactcacagcctcgtagagcttcgcagctacccca

SEQ ID NO: 29794 - DNA, 201 bp, Homo sapiens
ggaggatggaagagtgtagaaagtgtcccaaagttggtgtctgaatatatgtccaaaaaaataaaagttgatgaatttgtgactcacaatctgtcttttgrtgaaattaacaaagcctttcaactgatgcattctggaaagagcattcgaactgttgtaaagatttaattcaaaagagaaaaataatgtccaacctgtcgt

SEQ ID NO: 29795 - DNA, 201 bp, Homo sapiens
tcctttgtatattacttaatgttgggagttctttgagattatgttctgtgcctttaagttacacattctgcctgaacaatcttaagtaccttattattccrttgtcttaacactgactgacttctctatcttttcttgtgccttgacatctgtcttgagctctagatttttcattattaatctcttgagaaatgaaggtta

SEQ ID NO: 29796 - DNA, 201 bp, Homo sapiens
tgagctggctgtggcttcatttcccaagaagcaggagtgacttcagtcatcccagcaatcgcttggttcagtttcattcagctctctatggaccagtaatytgataaataaccgagctcttctttggggatcaatatttattgacttgtagtaactgccaccaataaagcagtctttaccatgctttgtctgattttatca

SEQ ID NO: 29797 - DNA, 136 bp, Homo sapiens
tccccttatctgttccttagtctcctttgtatattmcttaatgttgggagttctttgagattatgttctgtgcctttaagttacacattctgcctgaacaatcttaagtaccttattattccgttgtcttaacact

SEQ ID NO: 29798 - DNA, 201 bp, Homo sapiens
accatgattcttacagttggtggaacagcatatgccatatatgagctggctgtggcttcatttcccaagaagcaggagtgacttcagtcatcccagcaatygcttggttcagtttcattcagctctctatggaccagtaatctgataaataaccgagctcttctttggggatcaatatttattgacttgtagtaactgcca

SEQ ID NO: 29799 - DNA, 201 bp, Homo sapiens; identical to SEQ ID NO: 29796

SEQ ID NO: 29800 - DNA, 201 bp, Homo sapiens; identical to SEQ ID NO: 29798

SEQ ID NO: 29801 - DNA, 124 bp, Homo sapiens
ccccagccttagctccagggaccmgcctactgaacatcgaaaaggtcaggaacgagatcacgggactgagacggcgagccggctagagcggatagagccgtactgccgctctagtttttctttt

SEQ ID NO: 29802 - DNA, 118 bp, Homo sapiens
ccccagccttagctccakggaccagcctactgaacatcgaaaaggtcaggaacgagatcacgggactgagacggcgagccggctagagcggatagagccgtactgccgctctagtttt

SEQ ID NO: 29803 - DNA, 191 bp, Homo sapiens
caggacgcatccacatcaccaaggctacactcaactacctgaatggggactacgaggtggagccaggctgtgggggcgagcgcaacgcctacctcaaggascacagtatcgagaccttcctcatcctgcgctgcacccagaagcggaaagaagagaaggccatgatcgccaagatgaaccgccagagaacc

SEQ ID NO: 29804 - DNA, 201 bp, Homo sapiens
atgttactacataattaaaataatgcttgttcttaatgtataatccagaacaaaggcatcaagctgcttttgttaaacaaatatgaaatatacattaagartagatttttttgtttaatttcacaaaactattttgcagagttcacttgtatcatctctatccttatagtaaaaattttaagatttaactcggctttctca

SEQ ID NO: 29805 - DNA, 201 bp, Homo sapiens
gtttcaacttcagaaaaacagccatttcccataactacaggttcccagtattcctatgatttctggacaattaaaatttccagttcctttttcatataccyggtgcttagttttaagctattttaaaactgtcagactgagaatttcaatagatgtcataaactagttttattagctactatgtttaagtcaatataatac

SEQ ID NO: 29806 - DNA, 201 bp, Homo sapiens
tcatagtaaatgttactacataattaaaataatgcttgttcttaatgtataatccagaacaaaggcatcaagctgcttttgttaaacaaatatgaaatatwcattaagagtagatttttttgtttaatttcacaaaactattttgcagagttcacttgtatcatctctatccttatagtaaaaattttaagatttaactcg

SEQ ID NO: 29807 - DNA, 201 bp, Homo sapiens
agtcatagtaaatgttactacataattaaaataatgcttgttcttaatgtataatccagaacaaaggcatcaagctgcttttgttaaacaaatatgaaatatacattaagagtagatttttttgtttaatttcacaaaactattttgcagagttcacttgtatcatctctatccttatagtaaaaattttaagatttaact

SEQ ID NO: 29808 - DNA, 189 bp, Homo sapiens
atatacattaagagtagatttttttgtttaatttcacaaaactattttgcagagttcacttgtatcatctctatccttatagtaaaaattttaagatttawctcggctttctcaggttatttccctctacccctatgaactgctgagttttagttccttttctggccttcagttttcactatctgtaaa

SEQ ID NO: 29809 - DNA, 201 bp, Homo sapiens
ctgtggccagcaaacttcaagtactggtgggtgatgtgctgaaaacagatttgccattctttgatacttgtgtggcaaatttgccttatcagatctcttcrccttttgtcttcaagctgttgctacatcgaccttttttcaggtgtgctatacttatgtttcaaagagaatttgccctccgactggttgcaaaacctggag

SEQ ID NO: 29810 - DNA, 201 bp, Homo sapiens
gaccacgtcttgtttcttgctcacatagcagttacaaatatagttattactttctttgtatagaaattgaaataaagttcatatggctcaatagcagattyctggttgtgagcctcatgcgtatcatttgtgtaacagtgtgtgcgatgtgatgtttgctatctttttagcttccagtttaattagaacagagagagaaag

SEQ ID NO: 29811 - DNA, 201 bp, Homo sapiens
tttttttatggttcttagggagataactataggcttagcaaaatttcagagggttttgtaattgaaactggtttcaacttcagaaaaacagccatttcccrtaactacaggttcccagtattcctatgatttctggacaattaaaatttccagttcctttttcatatacctggtgcttagttttaagctattttaaaactg

SEQ ID NO: 29812 - DNA, 201 bp, Homo sapiens
agtctgctactgccaccgtgcagtgccaggcatattaaagggcatgactcccaacatgtaaaatgaggaagctaaactggaatgaaattaacaataaaatkatctttttttatggttcttagggagataactataggcttagcaaaatttcagagggttttgtaattgaaactggtttcaacttcagaaaaacagccattt

SEQ ID NO: 29813 - DNA, 201 bp, Homo sapiens; identical to SEQ ID NO: 29804

SEQ ID NO: 29814 - DNA, 201 bp, Homo sapiens; identical to SEQ ID NO: 29805

SEQ ID NO: 29815 - DNA, 201 bp, Homo sapiens; identical to SEQ ID NO: 29806

SEQ ID NO: 29816 - DNA, 201 bp, Homo sapiens; identical to SEQ ID NO: 29807

SEQ ID NO: 29817 - DNA, 189 bp, Homo sapiens; identical to SEQ ID NO: 29808

SEQ ID NO: 29818 - DNA, 201 bp, Homo sapiens; identical to SEQ ID NO: 29810

SEQ ID NO: 29819 - DNA, 201 bp, Homo sapiens; identical to SEQ ID NO: 29811

SEQ ID NO: 29820 - DNA, 201 bp, Homo sapiens; identical to SEQ ID NO: 29812

SEQ ID NO: 29821 - DNA, 201 bp, Homo sapiens; identical to SEQ ID NO: 29809

SEQ ID NO: 29822 - DNA, 201 bp, Homo sapiens; identical to SEQ ID NO: 29810

SEQ ID NO: 29823 - DNA, 201 bp, Homo sapiens; identical to SEQ ID NO: 29804

SEQ ID NO: 29824 - DNA, 201 bp, Homo sapiens; identical to SEQ ID NO: 29805

SEQ ID NO: 29825 - DNA, 201 bp, Homo sapiens; identical to SEQ ID NO: 29806

SEQ ID NO: 29826 - DNA, 201 bp, Homo sapiens; identical to SEQ ID NO: 29807

SEQ ID NO: 29827 - DNA, 189 bp, Homo sapiens; identical to SEQ ID NO: 29808

SEQ ID NO: 29828 - DNA, 201 bp, Homo sapiens; identical to SEQ ID NO: 29809

SEQ ID NO: 29829 - DNA, 201 bp, Homo sapiens; identical to SEQ ID NO: 29811

SEQ ID NO: 29830 - DNA, 201 bp, Homo sapiens; identical to SEQ ID NO: 29812

SEQ ID NO: 29831 - DNA, 201 bp, Homo sapiens
agattccacaaaaagttttatggagattcaaaggaaagaaaccaactacattaggtgccaatactcagctctatgtttggatatgccagagtgatcttcakgctataacaaaatacatcttttcacatccacgtacttctgtatctattgccaccttcaatggtcacatattattccatccaatggatgcaactgaaattt

SEQ ID NO: 29832 - DNA, 201 bp, Homo sapiens
ggagtcagctgtgcaaaaccttacagaagaaaaagctgatcttatcacttcggccctggctcagattccacaaaaagttttatggagattcaaaggaaagmaaccaactacattaggtgccaatactcagctctatgtttggatatgccagagtgatcttcatgctataacaaaatacatcttttcacatccacgtacttc

SEQ ID NO: 29833 - DNA, 201 bp, Homo sapiens
ggcatgaaggcagtactctcatgttctccatatgcccaacaagatcaaaaggacaagagtcatcctgcagtttctgcaaaacttgtagccaatgtgttttyagtagctgggagaagtgttggggtggataggatgtttctggttggtgatattaaagactgggtggctgtccttgtggatgacatacccaatgcatgtggc

SEQ ID NO: 29834 - DNA, 194 bp, Homo sapiens
tgggtagagttggagtttccaagttgcagcccgaggcagctgcagaattgaggaactgtctctacctgtggggatggacagcagcatctagcctagaggarccctctgaggtaggtcacactccagttggagttgggtgtgttgcactttggtggggatcctttcgacttggacaggccaccccccctgcccca

SEQ ID NO: 29835 - DNA, 201 bp, Homo sapiens
tagccaatgtgttttcagtagctgggagaagtgttggggtggataggatgtttctggttggtgatattaaagactgggtggctgtccttgtggatgacatmcccaatgcatgtggcacaacacatgactctgcagacaagctactgctagatgaagttagacgctttagtcctcacctcgtgggtagagttggagtttcca

SEQ ID NO: 29836 - DNA, 186 bp, Homo sapiens
gttggagtttccaagttgcagcccgaggcagctgcagaattgaggaactgtctctacctgtggggatggacagcagcatctagcctagaggaaccctctgrggtaggtcacactccagttggagttgggtgtgttgcactttggtggggatcctttcgacttggacaggccaccccccctgcccca

SEQ ID NO: 29837 - DNA, 201 bp, Homo sapiens
ggcatgaaggcagtactctcatgttctccatatgcccaacaagatcaaaaggacaagagtcatcctgcagtttctgcaaaacttgtagccaatgtgttttyagtagctgggttggagcatgtcagtactatggatctgcacactgctcaaatacagggattcttcagtactgctgtgaatgacttacatgtggagcctgca

SEQ ID NO: 29838 - DNA, 201 bp, Homo sapiens
atatgcccaacaagatcaaaaggacaagagtcatcctgcagtttctgcaaaacttgtagccaatgtgttttcagtagctgggttggagcatgtcagtactrtggatctgcacactgctcaaatacagggattcttcagtactgctgtgaatgacttacatgtggagcctgcagttctgtgatggacctgagagaatattgc

SEQ ID NO: 29839 - DNA, 201 bp, Homo sapiens
agacctaacatggcttgccttgcaggagaagtgttggggtggataggatgtttctggttggtgatattaaagactgggtggctgtccttgtggatgacatmcccaatgcatgtggcacaacacatgactctgcagacaagctactgtctgctggaaccactaaagtttataccacttcagctctgaggctgttattttaca

SEQ ID NO: 29840 - DNA, 201 bp, Homo sapiens
ggttggagcatgtcagtactatggatctgcacactgctcaaatacagggattcttcagtactgctgtgaatgacttacatgtggagcctgcagttctgtgrtggacctgagagaatattgcagactggaggaactgcagcattgtttcacccaaagcaggaggagccaaagagactccaccattcatggacagacctaaca

SEQ ID NO: 29841 - DNA, 201 bp, Homo sapiens
tgtagccaatgtgttttcagtagctgggttggagcatgtcagtactatggatctgcacactgctcaaatacagggattcttcagtactgctgtgaatgacktacatgtggagcctgcagttctgtgatggacctgagagaatattgcagactggaggaactgcagcattgtttcacccaaagcaggaggagccaaagagac

SEQ ID NO: 29842 - DNA, 178 bp, Homo sapiens
agaaagcacctggctgtcttcacctacgcgagaccttctctggaatgtgatttgctgcgactgcagacatctccatayggcataatgaactcccttgagtgtggctccatcgccagctccctgcagcctccaccaataatccatggctcctccaggaagtgtcgcaggcaggtggcca

SEQ ID NO: 29843 - DNA, 201 bp, Homo sapiens
ctacgcgagaccttctctggaatgtgatttgctgcgactgcagacatctccatacggcataatgaactcccttgagtgtggctccatcgccagctccctgmagcctccaccaataatccatggctcctccaggaagtgtcgcaggcaggtggccaagaccaacttattaggtagccagaagctcacccctttcttaacaac

SEQ ID NO: 29844 - DNA, 163 bp, Homo sapiens
ttatctgttatagcaacaaccccacttctgggtactaatctgctaccaactacaggaatttaactgttctggagttagggaacagcacacacagacactcrcacaaaacaaactccacctaaaaaaactgtacgagaattccccaaacttctcaactaaataa

SEQ ID NO: 29845 - DNA, 201 bp, Homo sapiens
tgaaatccaggtgagggagccatgcccccacagctcttgcctcaaggatcagatgcattttaccttccagagacgcaggttaagctgcacctgaggcagtytgagccacaactgggacagaattcccttggtcttctcttctgatccctcagcagaactgcccctaatgctcagttcatggcaatacaggccttttctctc

SEQ ID NO: 29846 - DNA, 201 bp, Homo sapiens
gctgctggtaacacgctttgaaatccaggtgagggagccatgcccccacagctcttgcctcaaggatcagatgcattttaccttccagagacgcaggttargctgcacctgaggcagtttgagccacaactgggacagaattcccttggtcttctcttctgatccctcagcagaactgcccctaatgctcagttcatggca

SEQ ID NO: 29847 - DNA, 201 bp, Homo sapiens
ttgagtgtggctccatcgccagctccctgcagcctccaccaataatccatggctcctccaggaagtgtcgcaggcaggtggccaagaccaacttattaggkagccagaagctcacccctttcttaacaactttgaccacgaagcgcaaatacgatgcaggtaaatccagaggcagagcctgggtccccaggctgctggtaa

SEQ ID NO: 29848 - DNA, 201 bp, Homo sapiens
aggaaagccgtgctttaccagaaggatgtcatcaggcagaaatatggcaaagattcctcctaaacactggagctgctatggaatgtgattagaaagcctgrctgtattataagtagtgaatggcatggacaatagcctctagttcttacagttcaggaaatatgaccttgatgttcaagcctccagatgtccttagcagtt

SEQ ID NO: 29849 - DNA, 201 bp, Homo sapiens
gaaatatgaccttgatgttcaagcctccagatgtccttagcagttacatcacttctgaccagctggtaggcaggtacaagtccttcatcaaggactactcrgtggtgtctactgaagatgccttggaccaggatgaccgagaaacttggcagaagctctctgctagtgcaggttatatccatgtgacagggaatcatctcc

SEQ ID NO: 29850 - DNA, 201 bp, Homo sapiens
gcggcggaaccacagccggagaggggcagcccgagccgggcgccgcagggtccccacccccacccggccggacagtgcccggtgttcccccgtgcgggggrcggcggcggcggctgacgggaccgccgggaccgcgggggtgttgccacctccaccgaggagccggcgcggccgcgggctcctcagagccggggccccggg

SEQ ID NO: 29851 - DNA, 201 bp, Homo sapiens
tctttttttgccgcagccaataagataatagcagaattagccaatcctaaaaccttctaaagacgatttttgagcatcccactgggattatttaatttttytttttgacgtgtgtttttagtttagaagtgctgtattccacaaggtttaagtcagtgaggttggaagataccctatcttttttattcaaaaagcacaatc

SEQ ID NO: 29852 - DNA, 201 bp, Homo sapiens
gcagcccgagccgggcgccgcagggtccccacccccacccggccggacagtgcccggtgttcccccgtgcggggggcggcggcggcggctgacgggaccgycgggaccgcgggggtgttgccacctccaccgaggagccggcgcggccgcgggctcctcagagccggggccccgggcccgtgacagacgggccgaggaagg

SEQ ID NO: 29853 - DNA, 201 bp, Homo sapiens
aaaaattgcttcttttattggtttccaaagaaacaaaccaaaccaaccagctcttggatgtgaagataaaatagtgcttttttgaaatggagaggaaaaasttggggaggaagaggcctgctgtgggggcatcggagccagccatgtaagaatcagagctgctccttcctgtgaatcctaggtggccctatgtcttctgtg

SEQ ID NO: 29854 - DNA, 201 bp, Homo sapiens
gtgcttagaaaggttgcagatttcatcttcacctaccaagaggcggccgcctccttggacaagccgctcatggaccattagacttgagaagacgacccacrtggtgactgcaaagccctgggtacttgccttcatgttctggtttggttttccctttttctgctgctcttggcagcagcctggtcatcatctgcttgtggg

SEQ ID NO: 29855 - DNA, 201 bp, Homo sapiens
gtttagcagatttgagtgtggctgcagagagagagagagtgtgtgtatgtgtgcacatgtgtgagagtgtgagcgagagtgtgtgtgtgtccatctaagtstgtgtgatgaaggtgggataaggctcctctgttagtgctggaagctcctgtaattgccgcatggatcccactgtgccctcttgttctgtgcaagtctgtc

SEQ ID NO: 29856 - DNA, 201 bp, Homo sapiens
tgctatgacatttattgtaggtgctatttagggtaggcttaaagtgctgggtggtgatttgagttcaaacaataaaaaattgtattttttcaatattgtawaaacaatagtgttctaattaccttaaaaaaaaataatgaccagttaagaattgcttttgatcttgtcaaaaaactgaatagaccccagtttcgggaaggt

SEQ ID NO: 29857 - DNA, 201 bp, Homo sapiens
gagccgggcgccgcagggtccccacccccacccggccggacagtgcccggtgttcccccgtgcggggggcggcggcggcggctgacgggaccgccgggacmgcgggggtgttgccacctccaccgaggagccggcgcggccgcgggctcctcagagccggggccccgggcccgtgacagacgggccgaggaagggagagag

SEQ ID NO: 29858 - DNA, 201 bp, Homo sapiens
cgggaccgccgggaccgcgggggtgttgccacctccaccgaggagccggcgcggccgcgggctcctcagagccggggccccgggcccgtgacagacgggcmgaggaagggagagaggcggcggcgacaccatgtcatctcccagtccgggcaagaggcggatggacacggacgtggtcaagctcatcgagagtaaacatga

SEQ ID NO: 29859 - DNA, 201 bp, Homo sapiens
ttatttcctaaccatgagaagcagactataatattcatatttaaacaaagcaattttttttattactaaacaaggtttttatgaataatagcattgatatrtatatattatatatcaccctttagatcttgatttcttggtcatttctcaacctgaggtgcatagcatattcccacattccatttggtagcaatatgcggt

SEQ ID NO: 29860 - DNA, 201 bp, Homo sapiens
cagaagaatacaagcagaaaattaaagagtacatccagaaatacgccacggaggaggcgctgaaagaacaggaagagggtaccggggacagctcatcggaragctctatgtctgacttttccgaagatgaggcccaggatatggagttgtagtagaaaaagcacctgcttttcagaaagactattatttcctaaccatgag

SEQ ID NO: 29861 - DNA, 201 bp, Homo sapiens
gtacagaaagatctggaagaaggcctggcagtgaatccaaggactctgggcccccaacaatagatggtagcgtaagtctggagcagcggtgtttcaccacmaaatgcctttccaggctgcccttccaacactcaggagagcatccagatccctgggcagaggctctacattcttggctttagaggtggtggcagcggcagc

SEQ ID NO: 29862 - DNA, 201 bp, Homo sapiens
catgcatgtttatgttctgggtggggctttgcctctccactgggaaactgacttttgctgggttgaacagagtcccttatgctttttgtcctctccctgcrcctgggagaggtgggagtaggagcccaaacacacaggtacagaaagatctggaagaaggcctggcagtgaatccaaggactctgggcccccaacaataga

SEQ ID NO: 29863 - DNA, 201 bp, Homo sapiens
ttgtgtgatacttgaaaagataaaagggactgccagcccctaactgaaatctgaagctttttatcgcttatttttcctcgccctgtctcctcccttccacytttctccttgcattgtgatgatctagtaggcacgtctgtcaacaggacacatgcctcctctgactataacctcttaatagttgtgtataatgaaaactgt

SEQ ID NO: 29864 - DNA, 201 bp, Homo sapiens
ttgatgaagcgtcaggaactgtgtgtctagatgtaattaatcaaacttggacagctctctatgatcttaccaatatatttgagtccttcctgcctcagttrttggcctatcctaaccccatagatcctctcaatggtgacgctgcagccatgtacctccaccgaccagaagaatacaagcagaaaattaaagagtacatcc

SEQ ID NO: 29865 - DNA, 201 bp, Homo sapiens
cgcaacgaactgcatttctttggacttctgaatccatgtttgtgctttctctggcccgtgaacacctcggcgattctgttagggatgggatgagtgggagraagccctttgagaagggggagccggccctgtcatgcgcaggttttccactcatctgaggaagagccagggctctgaatttagcctaacactcatcttggc

SEQ ID NO: 29866 - DNA, 201 bp, Homo sapiens
gaggcccaggatatggagttgtagtagaaaaagcacctgcttttcagaaagactattatttcctaaccatgagaagcagactataatattcatatttaaaraaagcaattttttttattactaaacaaggtttttatgaataatagcattgatatatatatattatatatcaccctttagatcttgatttcttggtcattt

SEQ ID NO: 29867 - DNA, 201 bp, Homo sapiens; identical to SEQ ID NO: 29859

SEQ ID NO: 29868 - DNA, 201 bp, Homo sapiens; identical to SEQ ID NO: 29860

SEQ ID NO: 29869 - DNA, 201 bp, Homo sapiens; identical to SEQ ID NO: 29861

SEQ ID NO: 29870 - DNA, 201 bp, Homo sapiens; identical to SEQ ID NO: 29851

SEQ ID NO: 29871 - DNA, 201 bp, Homo sapiens; identical to SEQ ID NO: 29862

SEQ ID NO: 29872 - DNA, 201 bp, Homo sapiens; identical to SEQ ID NO: 29853

SEQ ID NO: 29873 - DNA, 201 bp, Homo sapiens; identical to SEQ ID NO: 29863

SEQ ID NO: 29874 - DNA, 201 bp, Homo sapiens; identical to SEQ ID NO: 29854

SEQ ID NO: 29875 - DNA, 201 bp, Homo sapiens; identical to SEQ ID NO: 29855

SEQ ID NO: 29876 - DNA, 201 bp, Homo sapiens; identical to SEQ ID NO: 29856

SEQ ID NO: 29877 - DNA, 201 bp, Homo sapiens; identical to SEQ ID NO: 29864

SEQ ID NO: 29878 - DNA, 201 bp, Homo sapiens; identical to SEQ ID NO: 29865

SEQ ID NO: 29879 - DNA, 201 bp, Homo sapiens; identical to SEQ ID NO: 29866

SEQ ID NO: 29880 - DNA, 201 bp, Homo sapiens; identical to SEQ ID NO: 29850

SEQ ID NO: 29881 - DNA, 201 bp, Homo sapiens; identical to SEQ ID NO: 29851

SEQ ID NO: 29882 - DNA, 201 bp, Homo sapiens; identical to SEQ ID NO: 29852

SEQ ID NO: 29883 - DNA, 201 bp, Homo sapiens
caaaccagcttttttcagagagtgaccgaataggaagaagggattcagaaatatgatgtagtagaacatgccctgcaggaagaaaatgttttctctcctgygtatgttaagaggaaatcagtttaaaatgcctgctaatcaaatgtcgactcagctaaccatatgtccaggttgctgcagagtttctttcaaatctgagtg

SEQ ID NO: 29884 - DNA, 201 bp, Homo sapiens; identical to SEQ ID NO: 29853

SEQ ID NO: 29885 - DNA, 201 bp, Homo sapiens; identical to SEQ ID NO: 29854

SEQ ID NO: 29886 - DNA, 201 bp, Homo sapiens; identical to SEQ ID NO: 29855

SEQ ID NO: 29887 - DNA, 201 bp, Homo sapiens; identical to SEQ ID NO: 29856

SEQ ID NO: 29888 - DNA, 201 bp, Homo sapiens; identical to SEQ ID NO: 29857

SEQ ID NO: 29889 - DNA, 201 bp, Homo sapiens; identical to SEQ ID NO: 29858

SEQ ID NO: 29890 - DNA, 201 bp, Homo sapiens; identical to SEQ ID NO: 29859

SEQ ID NO: 29891 - DNA, 201 bp, Homo sapiens; identical to SEQ ID NO: 29860

SEQ ID NO: 29892 - DNA, 201 bp, Homo sapiens; identical to SEQ ID NO: 29861

SEQ ID NO: 29893 - DNA, 201 bp, Homo sapiens; identical to SEQ ID NO: 29862

SEQ ID NO: 29894 - DNA, 201 bp, Homo sapiens; identical to SEQ ID NO: 29863

SEQ ID NO: 29895 - DNA, 201 bp, Homo sapiens; identical to SEQ ID NO: 29864

SEQ ID NO: 29896 - DNA, 201 bp, Homo sapiens; identical to SEQ ID NO: 29865

SEQ ID NO: 29897 - DNA, 201 bp, Homo sapiens; identical to SEQ ID NO: 29866

SEQ ID NO: 29898 - DNA, 201 bp, Homo sapiens
tttccatctataagtatgtcagttctatatatagatacgatgttcaacggaacaggagtcttttgaaacggatgctgaaatgtttaatttttgaaggtctygtgaaacagatcaaaggccatggtttttctgggacttttacattgggaaagaattacaaggaagaggatatatgtgataaaacaaaaaagcaggcagtag

SEQ ID NO: 29899 - DNA, 201 bp, Homo sapiens
atattgaaccctgcccatgagcttcaggccatagggagggtgcaccgaattggacagacaaaacctactattgtacacagattcttaattaaagcaacaayagaagaaagaatgcaggcaatgctgaaaactgctgagagaaggttttttgaggaacaggcgttattttgttttcatgacatcaccccattctcccacccc

SEQ ID NO: 29900 - DNA, 201 bp, Homo sapiens
agggacaagacattgacgagctgtatcactttgtgaaacaaacacatcagcaagaaacgcagtccatccaagtggatgtccagcatcctgcattgatcccygtgttgagaccctaccaaagagaggctgtcaattggatgctacaacaagagtgtttcagaagcagtcctgctactgaaagtgccctgcacttcttatggc

SEQ ID NO: 29901 - DNA, 201 bp, Homo sapiens
ctacatcacagcttcagaaaaaacttgggcagcttctttacctaactaatttggagaagtctcaagataaaacatcgggaggtgttaatccagaaccttgyccaatctgtgctcgacagctaggaaaacagtgggcggtactgacctgtggtcactgtttctgtaatgaatgcatttctataattattgaacaatacagcg

SEQ ID NO: 29902 - DNA, 201 bp, Homo sapiens
tgtcacatttctggcctgctgtctgtcacttcctccttgaaacatcagcttattgtattctgagacttcacccctctcttgtgactctttgaaacttccayataaatgatcatattgcctattttggattagtatgtaaataaagatggctttgtgtaaataattaaggcattattttcaaattttagaaactactagttc

SEQ ID NO: 29903 - DNA, 201 bp, Homo sapiens
aaacagaattccacagttagaataagcattcatccattcattccacacatatatattggacacgtactagcacacaggcagtgtgctaggcctcatagacrcagcatacacataaataaaacagatatggttactacttttgtggagattggtgaaggagtttgagttggggcaggaagcacagatgttaataaataatgt

SEQ ID NO: 29904 - DNA, 201 bp, Homo sapiens
agatatggttactacttttgtggagattggtgaaggagtttgagttggggcaggaagcacagatgttaataaataatgtgttataattgtgataagcactrcaaaagaacaaagctggaggcatcatgctacctgatttcaaactatactacaaggctacagtaaccaaaacagaatggtaccaaaacagacatataggcg

SEQ ID NO: 29905 - DNA, 201 bp, Homo sapiens
acaaaagaacaaagctggaggcatcatgctacctgatttcaaactatactacaaggctacagtaaccaaaacagaatggtaccaaaacagacatataggcsaatggagcagaacagagacctcagaaataataccacacatctacaactgatctttgacagacccgacaaaaacaaacaatggggaaaggatcctattggg

SEQ ID NO: 29906 - DNA, 201 bp, Homo sapiens; identical to SEQ ID NO: 29900

SEQ ID NO: 29907 - DNA, 201 bp, Homo sapiens; identical to SEQ ID NO: 29901

SEQ ID NO: 29908 - DNA, 201 bp, Homo sapiens
tttcactgtatttatgtcaagattctcagacatagcaaaccatatatcgtacagaatgcttaatcatatagcttttttgtggataaaagatatttggaaakcataaaactattatttattagtagtagacatttttaagtagtatttcttggaaataagagattttacaatgtaaggaatgctgttgattgaccatagata

SEQ ID NO: 29909 - DNA, 201 bp, Homo sapiens; identical to SEQ ID NO: 29898

SEQ ID NO: 29910 - DNA, 201 bp, Homo sapiens
ggaacacatagaagcataggtaaggcaatataatataggaagcagtatctgattaagaaagcatgaacatcagaacaagcttgacagtgaataggtagackccactgttgtctgtagatacactgcctgaaagcctcagcttaaccatgtaatttttaattgtaggaggaacacagaacacttattcaaacatggttagcg

SEQ ID NO: 29911 - DNA, 150 bp, Homo sapiens
cctttctgagctatgttttagagaaaacaatttgatatgcttcaattttgtaaaatcaaattacatatatataaaaaaacctatctgtattagacaaaaaytgtttttatttatttctgtaagatatcaattaaataaatattttagtgg

SEQ ID NO: 29912 - DNA, 122 bp, Homo sapiens
aatttgatatgcttcaattttgtaaaatcaaattacatatatataaaaaaacctatctgtattagacaaaaactgtttttatttatttctgtaagatatcmattaaataaatattttagtgg

SEQ ID NO: 29913 - DNA, 201 bp, Homo sapiens
acgatgcaagggaattaagagaggtaatgtgtacttttcttatgataagatcactcataaaaacagttggaataagaaagtaaactagtctagttttataygacctggtatattgaacaaacatagatctcagttttggaagggccttcagtatctttagcacatgattcaccaatatcttgttagtaatattttaagtag

SEQ ID NO: 29914 - DNA, 201 bp, Homo sapiens
atattgaaccctgcccatgagcttcaggccatagggagggtgcaccgaattggacagacaaaacctactattgtacacagattcttaattaaagcaacaayagaagaaagaatgcaggcaatgctgaaaactgctgagagaagtatctatatctgacgatgcaagggaattaagagaggtaatgtgtacttttcttatgat

SEQ ID NO: 29915 - DNA, 201 bp, Homo sapiens; identical to SEQ ID NO: 29898

SEQ ID NO: 29916 - DNA, 201 bp, Homo sapiens; identical to SEQ ID NO: 29900

SEQ ID NO: 29917 - DNA, 201 bp, Homo sapiens
gacaaaacctactattgtacacagattcttaattaaagcaacaatagaagaaagaatgcaggcaatgctgaaaactgctgagagaagtatctatatctgaygatgcaagggaattaagagaggtaatgtgtacttttcttatgataagatcactcataaaaacagttggaataagaaagtaaactagtctagttttatacg

SEQ ID NO: 29918 - DNA, 201 bp, Homo sapiens; identical to SEQ ID NO: 29901

SEQ ID NO: 29919 - DNA, 150 bp, Homo sapiens; identical to SEQ ID NO: 29911

SEQ ID NO: 29920 - DNA, 122 bp, Homo sapiens; identical to SEQ ID NO: 29912

SEQ ID NO: 29921 - DNA, 201 bp, Homo sapiens; identical to SEQ ID NO: 29913

SEQ ID NO: 29922 - DNA, 201 bp, Homo sapiens
atattgaaccctgcccatgagcttcaggccatagggagggtgcaccgaattggacagacaaaacctactattgtacacagattcttaattaaagcaacaayagaagaaagaatgcaggcaatgctgaaaactgctgagagaagtcacacgaactcatcagcaaagcattcagaggcctctgtcttgactgtggctgacctg

SEQ ID NO: 29923 - DNA, 201 bp, Homo sapiens; identical to SEQ ID NO: 29898

SEQ ID NO: 29924 - DNA, 201 bp, Homo sapiens
agttttaaaaacccagtagataacagtaacactgttcctagttgaatgaatttgtttattgttctggttatacagtggcttagtacttattgagtcctttkcaatatactgtttccaaaagatctataaagattcttaattttacactcctaataaaacatttattttttgtcccaaatagtatctatatctgacgatgca

SEQ ID NO: 29925 - DNA, 201 bp, Homo sapiens; identical to SEQ ID NO: 29900

SEQ ID NO: 29926 - DNA, 201 bp, Homo sapiens
tcctttgcaatatactgtttccaaaagatctataaagattcttaattttacactcctaataaaacatttattttttgtcccaaatagtatctatatctgaygatgcaagggaattaagagaggtaatgtgtacttttcttatgataagatcactcataaaaacagttggaataagaaagtaaactagtctagttttatacg

SEQ ID NO: 29927 - DNA, 201 bp, Homo sapiens; identical to SEQ ID NO: 29901

SEQ ID NO: 29928 - DNA, 201 bp, Homo sapiens
aaactcttatcactactattgattctagttccagttggtggaccaactgggtgatccctgccatctctgcagtggccgtcgccttgatgtatcgcctatamatggcagaggactgaacacctcctcagaagtcagcgcaggaagagcctgctttggacacgggagaaaagaagccattgctaactacttcaactgacagaa

SEQ ID NO: 29929 - DNA, 201 bp, Homo sapiens
gagtcgcgcgctctgctccacccgacggggctgtgtgtgctgggcctggctcgcggcgaaccgagatggcagagcagtcggacgaggccgtgaagtactayaccctagaggagattcagaagcacaaccacagcaagagcacctggctgatcctgcaccacaaggtgtacgatttgaccaaatttctggaagagcatcctg

SEQ ID NO: 29930 - DNA, 201 bp, Homo sapiens
ttgaggatgtcgggcactctacagatgccagggaaatgtccaaaacattcatcattggggagctccatccagatgacagaccaaagttaaacaagcctccrgaaccttaaaggcggtgtttcaaggaaactcttatcactactattgattctagttccagttggtggaccaactgggtgatccctgccatctctgcagtgg

SEQ ID NO: 29931 - DNA, 182 bp, Homo sapiens
tatatctctttctttttcttccgacattagaaacaaaacaaaaagaactgtcctttctgcgctcaaatttttcgagtgtgcctttttattcatctactttwttttgatgtttccttaatgtgtaatttacttattataagcatgatcttttaaaaatatatttggcttttaaagtatgcacc

SEQ ID NO: 29932 - DNA, 201 bp, Homo sapiens
cttaaaggcggtgtttcaaggaaactcttatcactactattgattctagttccagttggtggaccaactgggtgatccctgccatctctgcagtggccgtygccttgatgtatcgcctatacatggcagaggactgaacacctcctcagaagtcagcgcaggaagagcctgctttggacacgggagaaaagaagccattgc

SEQ ID NO: 29933 - DNA, 201 bp, Homo sapiens; identical to SEQ ID NO: 29928

SEQ ID NO: 29934 - DNA, 201 bp, Homo sapiens; identical to SEQ ID NO: 29929

SEQ ID NO: 29935 - DNA, 201 bp, Homo sapiens
ttgaggatgtcgggcactctacagatgccagggaaatgtccaaaacattcatcattggggagctccatccagatgacagaccaaagttaaacaagcctccrgaaactcttatcactactattgattctagttccagttggtggaccaactgggtgatccctgccatctctgcagtggccgtcgccttgatgtatcgcctat

SEQ ID NO: 29936 - DNA, 182 bp, Homo sapiens; identical to SEQ ID NO: 29931

SEQ ID NO: 29937 - DNA, 201 bp, Homo sapiens
caaagttaaacaagcctccggaaactcttatcactactattgattctagttccagttggtggaccaactgggtgatccctgccatctctgcagtggccgtygccttgatgtatcgcctatacatggcagaggactgaacacctcctcagaagtcagcgcaggaagagcctgctttggacacgggagaaaagaagccattgc

SEQ ID NO: 29938 - DNA, 201 bp, Homo sapiens
catccagttggtggcagatggctgccgtaacctctagcagcaaattcagattgctcagctctttggggttcccattatggtgactctgaaggtcttcaagwtccacaccggtgctgagattgacttggtgtgtgagctcacaaaacgggctggtgcctttgatgcagtcccttgctatcactggtcagttggtagaaaacg

SEQ ID NO: 29939 - DNA, 119 bp, Homo sapiens
ttgtctgtgctagaaaggwtaaaggatcaagcagatggaaaatacatcttagtcactgggatcacgcccactcctctaggagaagggaagagcacagttatgactgggctgtgcaggct

SEQ ID NO: 29940 - DNA, 127 bp, Homo sapiens
atgaccctggcaccctctgaccaagayctttttgtctttaggtctggccctcctgctgcagctggattctctgatgtggcggccactgctgagaaccgccagaccttcatgcagtcagccatacagt

SEQ ID NO: 29941 - DNA, 201 bp, Homo sapiens
gtcgagttctactccttcccgaaaggagccacctaggtgtggaatgccccctgggaggtgccttatgtctacaaggggaaccagtggatcaggtacgacarctccaagagcttcaccctcaagcaccccatccatgacgccgcccctggctgcctggccgcccccgctgcgcccccggccctctctactgatggatggagc

SEQ ID NO: 29942 - DNA, 201 bp, Homo sapiens
ggccacttctactgaagccagttcacctcctccaactgctgaagttaccagcatgccaacctcaactcctggagaaagaagcactccattaacaagtatgyctgtcagacacacgccagtggccagttctgaggctagcaccctttcaacaactcccgttgacaccagcacacctgtgaccacttctgctgaaaccagttc

SEQ ID NO: 29943 - DNA, 201 bp, Homo sapiens
  misc_feature (1)...(201): n = A,T,C or G
aagtgaccacacagcaaataatgattaatgatatttgctcaggtgaactcnnctgtaacctcggcaagtgccagatgtctctaagtggacctcagtgcctktgcgtgaccacggaaactcactggtacagtggggagacctgtaaccagggcacccagaagagtctggtgtacggcctcgtgggggcaggggtcgtgctga

SEQ ID NO: 29944 - DNA, 201 bp, Homo sapiens
tttcaacaactcctgttgactccaacagtcctgtgaccacttctactgaagtcagttcatctcctacacctgctgaagcaactcctgttgacaccagcacmcctgtgaccacttctactgaagccacttcatctcctacaactgctgaaggtaccagcataccaacctcgactcctagtgaaggaacgactccattaacaa

SEQ ID NO: 29945 - DNA, 201 bp, Homo sapiens
tcctttgaccacttctactgaagccagttcatctcctcccactgctgaaggtaccagcatgccaacctcaactcctagtgaaggaagcactccattaacargtatgcctgtcagcaccacaacggtggccagttctgaaacgagcaccctttcaacaactcctgctgacaccagcacacctgtgaccacttattctcaagc

SEQ ID NO: 29946 - DNA, 201 bp, Homo sapiens
agtatgcctgtcagacacacgccagtggccagttctgaggctagcaccctttcaacaactcccgttgacaccagcacacctgtgaccacttctgctgaaaycagttcctctcctacaaccgctgaagccggttcatctcctacaactgctgacgatactagcatgccaacctcaacttatagtgaaggaagcactccacta

SEQ ID NO: 29947 - DNA, 201 bp, Homo sapiens
gctgaaggtaccagcatgccaacctcaactcctagtgaaggaagcactccattaacaagtatgcctgtcagcaccacaacggtggccagttctgaaacgarcaccctttcaacaactcctgctgacaccagcacacctgtgaccacttattctcaagccagttcatctcctccaattgctgacggtactagcatgccaacc

SEQ ID NO: 29948 - DNA, 201 bp, Homo sapiens
agtatgcctgtcagcaccacaacggtggccagttctgaaacgagcaccctttcaacaactcctgctgacaccagcacacctgtgaccacttattctcaagscagttcatctcctccaattgctgacggtactagcatgccaacctcaacttatagtgaaggaagcactccactaacaaatatgtctttcagcaccacgcca

SEQ ID NO: 29949 - DNA, 201 bp, Homo sapiens
ctgctgaagttaccagcatgccaacctcaactcctggagaaagaagcactccattaacaagtatgcctgtcagacacacgccagtggccagttctgaggcyagcaccctttcaacaactcccgttgacaccagcacacctgtgaccacttctgctgaaaccagttcctctcctacaaccgctgaagccggttcatctccta

SEQ ID NO: 29950 - DNA, 201 bp, Homo sapiens
caacctcaactcctggagaaagaagcactccattaacaagtatgcctgtcagacacacgccagtggccagttctgaggctagcaccctttcaacaactccygttgacaccagcacacctgtgaccacttctgctgaaaccagttcctctcctacaaccgctgaagccggttcatctcctacaactgctgacgatactagca

SEQ ID NO: 29951 - DNA, 201 bp, Homo sapiens
ccagttcatctcctacaactgctgaagatatcgtcgtgccaatctcaactgctagtgaaggaagtactctattaacaagtatacctgtcagcaccacgccrgtggccagtcctgaggctagcaccctttcaacaactcctgttgactccaacagtcctgtggtcacttctactgaaatcagttcatctgctacatccgctg

SEQ ID NO: 29952 - DNA, 201 bp, Homo sapiens
agaaagaagcactccattaacaagtatgcctgtcagacacacgccagtggccagttctgaggctagcaccctttcaacaactcccgttgacaccagcacasctgtgaccacttctgctgaaaccagttcctctcctacaaccgctgaagccggttcatctcctacaactgctgacgatactagcatgccaacctcaactta

SEQ ID NO: 29953 - DNA, 201 bp, Homo sapiens
aactcctggagaaagaagcactccattaacaagtatgcctgtcagacacacgccagtggccagttctgaggctagcaccctttcaacaactcccgttgacwccagcacacctgtgaccacttctgctgaaaccagttcctctcctacaaccgctgaagccggttcatctcctacaactgctgacgatactagcatgccaac

SEQ ID NO: 29954 - DNA, 201 bp, Homo sapiens
actcctggagaaagaagcactccattaacaagtatgcctgtcagacacacgccagtggccagttctgaggctagcaccctttcaacaactcccgttgacamcagcacacctgtgaccacttctgctgaaaccagttcctctcctacaaccgctgaagccggttcatctcctacaactgctgacgatactagcatgccaacc

SEQ ID NO: 29955 - DNA, 201 bp, Homo sapiens
gctgaagttaccagcatgccaacctcaactcctggagaaagaagcactccattaacaagtatgcctgtcagacacacgccagtggccagttctgaggctarcaccctttcaacaactcccgttgacaccagcacacctgtgaccacttctgctgaaaccagttcctctcctacaaccgctgaagccggttcatctcctaca

SEQ ID NO: 29956 - DNA, 201 bp, Homo sapiens
catgccaacctcaactcctggagaaagaagcactccattaacaagtatgcctgtcagacacacgccagtggccagttctgaggctagcaccctttcaacawctcccgttgacaccagcacacctgtgaccacttctgctgaaaccagttcctctcctacaaccgctgaagccggttcatctcctacaactgctgacgatac

SEQ ID NO: 29957 - DNA, 201 bp, Homo sapiens
aacctcaactcctggagaaagaagcactccattaacaagtatgcctgtcagacacacgccagtggccagttctgaggctagcaccctttcaacaactcccrttgacaccagcacacctgtgaccacttctgctgaaaccagttcctctcctacaaccgctgaagccggttcatctcctacaactgctgacgatactagcat

SEQ ID NO: 29958 - DNA, 201 bp, Homo sapiens
ctccgttccgagggaaagagctccagccaggaagccacattcagtcagataaagagatagatgcctttgtgcgggcaaaagccgacagcgcctaccacccstcgtgcacctgtaagatgggccagccctccgatcccactgccgtggtggatccgcagacaagggtcctcggggtggaaaacctcagggtcgtcgatgcct

SEQ ID NO: 29959 - DNA, 201 bp, Homo sapiens
agcaggccggctacccgctcaccgaggacatgaatggcttccagcaggagggcttcggctggatggacatgaccatccatgaaggcaaacggtggagcgcrgcctgtgcctacctgcacccagcactgagccgcaccaacctcaaggccgaggccgagacgcttgtgagcagggtgctatttgagggcacccgtgcagtgg

SEQ ID NO: 29960 - DNA, 201 bp, Homo sapiens
catctcattcccctccgtggatcagaggacttggactagatagaagcatgtggtgtctcctacgaggcctgggccggcctggagccctggcacggggagcyctggggcagcagcaatccctgggtgcccgggccctggccagcgcaggctctgagagccgggacgagtacagctatgtggtggtgggcgcgggctcggcgg

SEQ ID NO: 29961 - DNA, 201 bp, Homo sapiens
agatccacatgcccgcggccctggtggccaacctgtgcgacgacaggtacaactggtgctaccacacagaggtgcagcggggcctggacggccgcgtgctrtactggccacgcggccgcgtctggggtggctcctcatccctcaatgccatggtctacgtccgtgggcacgccgaggactacgagcgctggcagcgccagg

SEQ ID NO: 29962 - DNA, 201 bp, Homo sapiens
ggcctgggccggcctggagccctggcacggggagccctggggcagcagcaatccctgggtgcccgggccctggccagcgcaggctctgagagccgggacgmgtacagctatgtggtggtgggcgcgggctcggcgggctgcgtgctggctgggaggctcacggaggaccccgccgagcgcgtgctgctgctggaggccggg

SEQ ID NO: 29963 - DNA, 201 bp, Homo sapiens
gtggtgggcgcgggctcggcgggctgcgtgctggctgggaggctcacggaggaccccgccgagcgcgtgctgctgctggaggccgggcccaaggacgtgckcgcggggagcaagcggctctcgtggaagatccacatgcccgcggccctggtggccaacctgtgcgacgacaggtacaactggtgctaccacacagaggtg

SEQ ID NO: 29964 - DNA, 201 bp, Homo sapiens
ctttccctgtgggccatttggggaaggccagcattcagcctgagatgttcctccctgcctcctggagggacagaaggggaggatggttaactcctgccgcrtcctttttcttgtgttcacgtggcattctctaacccagggcagtggttccttcccaggccatgcacagaggctgggtgcctgccagacccacggagggtt

SEQ ID NO: 29965 - DNA, 201 bp, Homo sapiens
acatccagttccatttcctgccatcccaagtgattgaccacgggcgggtccccacccagcaggaggcttaccaggtacatgtggggcccatgcggggcacsagtgtgggctggctcaaactgagaagtgccaatccccaagaccaccctgtgatccagcccaactacttgtcaacagaaactgatattgaggatttccgtc

SEQ ID NO: 29966 - DNA, 201 bp, Homo sapiens
gcctttccctgtgggccatttggggaaggccagcattcagcctgagatgttcctccctgcctcctggagggacagaaggggaggatggttaactcctgccrcatcctttttcttgtgttcacgtggcattctctaacccagggcagtggttccttcccaggccatgcacagaggctgggtgcctgccagacccacggaggg

SEQ ID NO: 29967 - DNA, 201 bp, Homo sapiens
gcgtggagtatgtcaagaatggccagagccacagggcttatgccagcaaggaggtgattctgagtggaggtgccatcaactctccacagctgctcatgctstctggcatcgggaatgctgatgacctcaagaaactgggcatccctgtggtgtgccacctacctggggttggccagaacctgcaagaccacctggagatct

SEQ ID NO: 29968 - DNA, 201 bp, Homo sapiens
attgaccacgggcgggtccccacccagcaggaggcttaccaggtacatgtggggcccatgcggggcacgagtgtgggctggctcaaactgagaagtgccartccccaagaccaccctgtgatccagcccaactacttgtcaacagaaactgatattgaggatttccgtctgtgtgtgaagctcaccagagaaatttttgca

SEQ ID NO: 29969 - DNA, 201 bp, Homo sapiens
tcctggaggccacgcagcaggccggctacccgctcaccgaggacatgaatggcttccagcaggagggcttcggctggatggacatgaccatccatgaaggyaaacggtggagcgcagcctgtgcctacctgcacccagcactgagccgcaccaacctcaaggccgaggccgagacgcttgtgagcagggtgctatttgagg

SEQ ID NO: 29970 - DNA, 201 bp, Homo sapiens
cctgcactctgggacaaagatgtccctgtctacaagcccaggacgctggccacccagcgctaagacagttgctgctggaggatgaccagggaagccccctrataagccaagagggccagcacagcccttgctcccaggctcctgcctgaaactatctagcacactaggacccaggtggtaccctactcagtggctgagaat

SEQ ID NO: 29971 - DNA, 201 bp, Homo sapiens
gctggggcaggtcgcagcgccctcgcctgctggggctcggagggatgggccgtgtccgagcgctggcggagcacgggccgccgcggcgcgcgcctaccccmgcgcacacgtgcatgcagtgagccaggtgcatcagctgcacccgccctcgggcttcgcgcgcctccgctggagcccagctagcctcgcggctccggggcc

SEQ ID NO: 29972 - DNA, 201 bp, Homo sapiens
gagccctggcacggggagccctggggcagcagcaatccctgggtgcccgggccctggccagcgcaggctctgagagccgggacgagtacagctatgtggtrgtgggcgcgggctcggcgggctgcgtgctggctgggaggctcacggaggaccccgccgagcgcgtgctgctgctggaggccgggcccaaggacgtgcgcg

SEQ ID NO: 29973 - DNA, 201 bp, Homo sapiens; identical to SEQ ID NO: 29960

SEQ ID NO: 29974 - DNA, 201 bp, Homo sapiens; identical to SEQ ID NO: 29961

SEQ ID NO: 29975 - DNA, 201 bp, Homo sapiens; identical to SEQ ID NO: 29962

SEQ ID NO: 29976 - DNA, 201 bp, Homo sapiens; identical to SEQ ID NO: 29963

SEQ ID NO: 29977 - DNA, 201 bp, Homo sapiens; identical to SEQ ID NO: 29971

SEQ ID NO: 29978 - DNA, 201 bp, Homo sapiens; identical to SEQ ID NO: 29972

SEQ ID NO: 29979 - DNA, 201 bp, Homo sapiens; identical to SEQ ID NO: 29958

SEQ ID NO: 29980 - DNA, 201 bp, Homo sapiens; identical to SEQ ID NO: 29959

SEQ ID NO: 29981 - DNA, 201 bp, Homo sapiens; identical to SEQ ID NO: 29960

SEQ ID NO: 29982 - DNA, 201 bp, Homo sapiens; identical to SEQ ID NO: 29961

SEQ ID NO: 29983 - DNA, 201 bp, Homo sapiens; identical to SEQ ID NO: 29962

SEQ ID NO: 29984 - DNA, 201 bp, Homo sapiens; identical to SEQ ID NO: 29963

SEQ ID NO: 29985 - DNA, 201 bp, Homo sapiens; identical to SEQ ID NO: 29964

SEQ ID NO: 29986 - DNA, 201 bp, Homo sapiens; identical to SEQ ID NO: 29965

SEQ ID NO: 29987 - DNA, 201 bp, Homo sapiens; identical to SEQ ID NO: 29966

SEQ ID NO: 29988 - DNA, 201 bp, Homo sapiens; identical to SEQ ID NO: 29967

SEQ ID NO: 29989 - DNA, 201 bp, Homo sapiens; identical to SEQ ID NO: 29968

SEQ ID NO: 29990 - DNA, 201 bp, Homo sapiens; identical to SEQ ID NO: 29969

SEQ ID NO: 29991 - DNA, 201 bp, Homo sapiens; identical to SEQ ID NO: 29970

SEQ ID NO: 29992 - DNA, 201 bp, Homo sapiens; identical to SEQ ID NO: 29972

SEQ ID NO: 29993 - DNA, 123 bp, Homo sapiens
aattacaacgacctctcaggtgacctcaaggctggccgagggccatctcatcacccctgtcctgttggccccaggcagccaagaccgatggctttggcccrtccttcccagggcccctggcag

SEQ ID NO: 29994 - DNA, 201 bp, Homo sapiens
caaccctggctcctcctgcgacctgctgtcctcatccccaaaccctggctcctcctgcgacctgctgtcctcatccccaatccctggctcctcctgcgacmtgctgtcctcatccccaatccctggctcctcctgcgacatgctgtcctcatccccaaaccctggctcctcctgcgacctgctgtccttataccccaaccc

SEQ ID NO: 29995 - DNA, 201 bp, Homo sapiens
gtatccctggatatcgggctgaggaagcagtggaaatgttaaagaccttctacaaacaagaaaatccaaatgcaccaaaatcgaaagttcggaaaaaggawtgtcagaaatcttgaacatgttctgatgaaagaaccaagtgacccaaagtgacctggacaagattcatagactgaaagctgttgacatcgttgaatcata

SEQ ID NO: 29996 - DNA, 201 bp, Homo sapiens
gaagctgattcccattttaagatgggggaaaattaaggtttgaggttttagaaattagcaagtagtgcatacccttctagccacaagtgcccagtccaggmaagtgctgacttcttagagaatgtgtggccagacccagggacctggagtgtgtttggactgcagtttgccaccctgagaacaccttctccaggactggca

SEQ ID NO: 29997 - DNA, 201 bp, Homo sapiens
attggaggacaataagagttatggcaaaaagcaaaaggaacacagggtaaaggggataggtgccatttggtggtgagaatgctgactgaaaaatagaatgrtcaatttaatctgaaacaaatggttatttcttttataatccatataataaatttaaaatctaaaatgtaaaattttgaacacaacactggaaagggtatc

SEQ ID NO: 29998 - DNA, 128 bp, Homo sapiens
tggagaagatgaggaacttaattccatttgatcagacgaccactgaggacctgaatgaagctttcccagaaaccaaatgagacaagagaaagtatccctaytggcctcaccaaccaatcgagaattta

SEQ ID NO: 29999 - DNA, 201 bp, Homo sapiens
acagggatgccatcaggttcctcctgtgccttgtaggaacagccaccattgggatgatctatactctgtgtgtctatgtgcttagtggggaacctccagargaggtggtgaggaaagcccttgacgtcatcacaattgcggttcctccggctctacctgctgctctgaccacaggcattatctatgcccagaggaggctga

SEQ ID NO: 30000 - DNA, 201 bp, Homo sapiens
cagacctaaaggtgagatgcatcaaagtgcagaaaataagatatgtttggaactacttagaaggacagttccagaaaattggttctttggaagactggctyagttctgccaagatacatcaaaaatttggatcaggcttgacaagagaagaacaggagattaggaggttaatatgtgggcctaatactatcgatgttgaag

SEQ ID NO: 30001 - DNA, 201 bp, Homo sapiens
tgaattttcagttgtacagggatgccatcaggttcctcctgtgccttgtaggaacagccaccattgggatgatctatactctgtgtgtctatgtgcttagyggggaacctccagaggaggtggtgaggaaagcccttgacgtcatcacaattgcggttcctccggctctacctgctgctctgaccacaggcattatctatg

SEQ ID NO: 30002 - DNA, 201 bp, Homo sapiens
tgaagaagagaggcatcttctgcattagcccccagaggatcaacgtatgtggacagttaaaccttgtctgctttgacaagacaggcaccttaacaagggayggcttggacctctggggagtcgtgtcctgtgataggaatggctttcaggaagttcacagctttgcctcaggccaggctttgccatggggcccactgtgtg

SEQ ID NO: 30003 - DNA, 201 bp, Homo sapiens
agaaaattggttctttggaagactggcttagttctgccaagatacatcaaaaatttggatcaggcttgacaagagaagaacaggagattaggaggttaatrtgtgggcctaatactatcgatgttgaagttacaccaatttggaaactgctcatcaaggaggttctaaatccattttatatatttcaactcttcagtgtct

SEQ ID NO: 30004 - DNA, 201 bp, Homo sapiens
cccttgacgtcatcacaattgcggttcctccggctctacctgctgctctgaccacaggcattatctatgcccagaggaggctgaagaagagaggcatcttytgcattagcccccagaggatcaacgtatgtggacagttaaaccttgtctgctttgacaagacaggcaccttaacaagggacggcttggacctctggggag

SEQ ID NO: 30005 - DNA, 201 bp, Homo sapiens; identical to SEQ ID NO: 29999

SEQ ID NO: 30006 - DNA, 201 bp, Homo sapiens; identical to SEQ ID NO: 30000

SEQ ID NO: 30007 - DNA, 201 bp, Homo sapiens; identical to SEQ ID NO: 30001

SEQ ID NO: 30008 - DNA, 201 bp, Homo sapiens; identical to SEQ ID NO: 30002

SEQ ID NO: 30009 - DNA, 116 bp, Homo sapiens
tggcaaatgaccctagttggcccccgctaaaccaaacctcccactctgacatgccggagtgtggcagaggagtgtcttacagcaatccagtatttgagagyaatgaagaacaactc

SEQ ID NO: 30010 - DNA, 201 bp, Homo sapiens; identical to SEQ ID NO: 30003

SEQ ID NO: 30011 - DNA, 201 bp, Homo sapiens; identical to SEQ ID NO: 30004

SEQ ID NO: 30012 - DNA, 201 bp, Homo sapiens
aagagatgggaggtgaccgactggcattcatgaaaggtgcaccagagagggtggccagcttttgccaacctgagacagtacccactagttttgttagcgawcttcagatttacacgacacagggcttccgagtcatagcactggcctacaagaagctggaaaatgaccatcacgctactaccttgacgagggagacggtag

SEQ ID NO: 30013 - DNA, 201 bp, Homo sapiens; identical to SEQ ID NO: 30000

SEQ ID NO: 30014 - DNA, 201 bp, Homo sapiens
tggcaaatgaccctagttggcccccgctaaaccaaacctcccactctgacatgccggagtgtggcagaggagtgtcttacagcaatccagtatttgagagyaatgaagaacaactctgaaggacatgtgatatccaagttgatattacagagaaacaatgacaaaagggaccagtttcattgattttaagaaatgagactc

SEQ ID NO: 30015 - DNA, 201 bp, Homo sapiens; identical to SEQ ID NO: 30003

SEQ ID NO: 30016 - DNA, 201 bp, Homo sapiens; identical to SEQ ID NO: 30004

SEQ ID NO: 30017 - DNA, 201 bp, Homo sapiens; identical to SEQ ID NO: 29999

SEQ ID NO: 30018 - DNA, 201 bp, Homo sapiens; identical to SEQ ID NO: 30002

SEQ ID NO: 30019 - DNA, 201 bp, Homo sapiens; identical to SEQ ID NO: 30001

SEQ ID NO: 30020 - DNA, 201 bp, Homo sapiens
gcactcccgtcctgtggagggcctccattgtcatcatgctcagcttgaatttcattgtgtcccttgtggccgaggaggctgttattgaaaatcgagccctrtggatgatgattaaaagatgtttcggctatcagtcaaaaagccagtatcggatatggcagagggacttggcaaatgaccctagttggcccccgctaaacc

SEQ ID NO: 30021 - DNA, 201 bp, Homo sapiens; identical to SEQ ID NO: 30012

SEQ ID NO: 30022 - DNA, 201 bp, Homo sapiens
tatgaagatgtatagctttcccaagatgatggtaaaacccaggttagtcatcagtaaccttctctattattattattttttagaaacttggaatactgtcrtcatggctaagagaacaaatctgataaattgtgtaacctagtctcttctctacatggtgatgcatttcagcaattataaattaatataaatgaccaaaag

SEQ ID NO: 30023 - DNA, 201 bp, Homo sapiens
attttcataattggtggtcctggctctggcaaaggcacacagtgtgaaaagctggtggaaaaatatggatttacacatctctcaactggcgagctcctgcrtgaggaactggcatcagaatctgaaagaagcaaattgatcagagacattatggaacgtggagacctggtgccctcaggcatcgttttggagctcctgaag

SEQ ID NO: 30024 - DNA, 201 bp, Homo sapiens
ttgtcatacccatatgcaaaactgtgtttccttgcattaaaccagtgaagtttgggttctcttttgtgctatcaatcagttgtaaaatcagagctgcttayatattctactggaataactgcatcttccactcagtcactacaaaaaagcatagtttcagtttgcatgaatttttttttttttcttcaatggctgtgcaga

SEQ ID NO: 30025 - DNA, 201 bp, Homo sapiens
aaaccttgtcatacccatatgcaaaactgtgtttccttgcattaaaccagtgaagtttgggttctcttttgtgctatcaatcagttgtaaaatcagagctkcttatatattctactggaataactgcatcttccactcagtcactacaaaaaagcatagtttcagtttgcatgaatttttttttttttcttcaatggctgt

SEQ ID NO: 30026 - DNA, 201 bp, Homo sapiens
gaccaaaagtaacttaaaagcatgagatatttgctatttcattcattgggcacatatcaaattataattttgattttaaatggtcacccatgtatttatttgttgccaagcaagtaaaaaaataccctaacaaacctgatgtgggtgggaggggcatgtcagtaagtggtgtgttcaatgtgtttgtttcatatgggccct

SEQ ID NO: 30027 - DNA, 201 bp, Homo sapiens
gctgcttatatattctactggaataactgcatcttccactcagtcactacaaaaaagcatagtttcagtttgcatgaatttttttttttttcttcaatggytgtgcagataaggatccatttctgggatagaattgtattttttaagtcatttttttttcttgaaatggatatgtacaaataaaataaatggaagacagga

SEQ ID NO: 30028 - DNA, 201 bp, Homo sapiens
tgaccaaaagtaacttaaaagcatgagatatttgctatttcattcattgggcacatatcaaattataattttgattttaaatggtcacccatgtatttatttgttgccaagcaagtaaaaaaataccctaacaaacctgatgtgggtgggaggggcatgtcagtaagtggtgtgttcaatgtgtttgtttcatatgggccc

SEQ ID NO: 30029 - DNA, 201 bp, Homo sapiens
atgaccaaaagtaacttaaaagcatgagatatttgctatttcattcattgggcacatatcaaattataattttgattttaaatggtcacccatgtatttatttgttgccaagcaagtaaaaaaataccctaacaaacctgatgtgggtgggaggggcatgtcagtaagtggtgtgttcaatgtgtttgtttcatatgggcc

SEQ ID NO: 30030 - DNA, 201 bp, Homo sapiens
ggagacctggtgccctcaggcatcgttttggagctcctgaaggaggccatggtggccagcctcggggacaccaggggcttcctgattgacggctatcctcrggaggtgaagcaaggggaagagttcggacgcaggattggagacccacagttggtgatctgtatggactgctcggcagacaccatgaccaaccgccttctc

SEQ ID NO: 30031 - DNA, 201 bp, Homo sapiens
aatgaccaaaagtaacttaaaagcatgagatatttgctatttcattcattgggcacatatcaaattataattttgattttaaatggtcacccatgtatttatttgttgccaagcaagtaaaaaaataccctaacaaacctgatgtgggtgggaggggcatgtcagtaagtggtgtgttcaatgtgtttgtttcatatgggc

SEQ ID NO: 30032 - DNA, 201 bp, Homo sapiens
tgaagatgtatagctttcccaagatgatggtaaaacccaggttagtcatcagtaaccttctctattattattattttttagaaacttggaatactgtcgtyatggctaagagaacaaatctgataaattgtgtaacctagtctcttctctacatggtgatgcatttcagcaattataaattaatataaatgaccaaaagta

SEQ ID NO: 30033 - DNA, 201 bp, Homo sapiens
agatccacagtaccagcagcaataggaaatggagtcttattgccaagataattacaactggagaattggccccacaggaaacaacaattacagagataaarcaaaaattgatgcaaatacctgatgaagagggcattgttattgatggatttccaagagatgttgcccaggctctatcttttgaggaccaaatctgtaccc

SEQ ID NO: 30034 - DNA, 201 bp, Homo sapiens
taatgcctgaaaactcaaactttccatatcggcggtatgaccggctccctccaatccatcaattctccatagaaagtgacacggatctctctgagactgcrgagttgattgaggagtatgaggtttttgatcctaccagacctcgaccaaaaatcattcttgttataggtggtccaggaagtggaaagggtactcagagtt

SEQ ID NO: 30035 - DNA, 141 bp, Homo sapiens
acccctggcggccgcgctgcctggcagcccgggaagccgckgcacagctgctcggcgcctgcagctccggctcgggggctgaggcggagggggtccctggcctgggcggagaggctgagctgagtgcgcgtgagaaagagg

SEQ ID NO: 30036 - DNA, 201 bp, Homo sapiens; identical to SEQ ID NO: 30030

SEQ ID NO: 30037 - DNA, 201 bp, Homo sapiens; identical to SEQ ID NO: 30023

SEQ ID NO: 30038 - DNA, 201 bp, Homo sapiens; identical to SEQ ID NO: 30022

SEQ ID NO: 30039 - DNA, 201 bp, Homo sapiens; identical to SEQ ID NO: 30033

SEQ ID NO: 30040 - DNA, 201 bp, Homo sapiens; identical to SEQ ID NO: 30034

SEQ ID NO: 30041 - DNA, 201 bp, Homo sapiens
attttcataattggtggtcctggctctggcaaaggcacacagtgtgaaaagctggtggaaaaatatggatttacacatctctcaactggcgagctcctgcrtgaggaactggcatcagaatctgaaagaagcaaattgatcagagacattatggaacaccagaggacgtttttcttcaactctgcacagctattgactcta

SEQ ID NO: 30042 - DNA, 201 bp, Homo sapiens; identical to SEQ ID NO: 30024

SEQ ID NO: 30043 - DNA, 201 bp, Homo sapiens; identical to SEQ ID NO: 30025

SEQ ID NO: 30044 - DNA, 134 bp, Homo sapiens
gcggccgcgctgcctggcagcccgggaagccgckgcacagctgctcggcgcctgcagctccggctcgggggctggaaccgaagcgggggcggcgggagcgcggagaccacagcccccggggagaggcggagggg

SEQ ID NO: 30045 - DNA, 201 bp, Homo sapiens; identical to SEQ ID NO: 30026

SEQ ID NO: 30046 - DNA, 201 bp, Homo sapiens; identical to SEQ ID NO: 30028

SEQ ID NO: 30047 - DNA, 201 bp, Homo sapiens; identical to SEQ ID NO: 30027

SEQ ID NO: 30048 - DNA, 201 bp, Homo sapiens; identical to SEQ ID NO: 30029

SEQ ID NO: 30049 - DNA, 201 bp, Homo sapiens; identical to SEQ ID NO: 30031

SEQ ID NO: 30050 - DNA, 201 bp, Homo sapiens; identical to SEQ ID NO: 30032

SEQ ID NO: 30051 - DNA, 201 bp, Homo sapiens; identical to SEQ ID NO: 30022

SEQ ID NO: 30052 - DNA, 201 bp, Homo sapiens; identical to SEQ ID NO: 30033

SEQ ID NO: 30053 - DNA, 201 bp, Homo sapiens; identical to SEQ ID NO: 30034

SEQ ID NO: 30054 - DNA, 201 bp, Homo sapiens; identical to SEQ ID NO: 30023

SEQ ID NO: 30055 - DNA, 201 bp, Homo sapiens; identical to SEQ ID NO: 30024

SEQ ID NO: 30056 - DNA, 201 bp, Homo sapiens; identical to SEQ ID NO: 30025

SEQ ID NO: 30057 - DNA, 134 bp, Homo sapiens; identical to SEQ ID NO: 30044

SEQ ID NO: 30058 - DNA, 201 bp, Homo sapiens; identical to SEQ ID NO: 30026

SEQ ID NO: 30059 - DNA, 201 bp, Homo sapiens; identical to SEQ ID NO: 30028

SEQ ID NO: 30060 - DNA, 201 bp, Homo sapiens; identical to SEQ ID NO: 30027

SEQ ID NO: 30061 - DNA, 201 bp, Homo sapiens; identical to SEQ ID NO: 30029

SEQ ID NO: 30062 - DNA, 201 bp, Homo sapiens; identical to SEQ ID NO: 30030

SEQ ID NO: 30063 - DNA, 201 bp, Homo sapiens; identical to SEQ ID NO: 30031

SEQ ID NO: 30064 - DNA, 201 bp, Homo sapiens; identical to SEQ ID NO: 30032

SEQ ID NO: 30065 - DNA, 201 bp, Homo sapiens
tgccaccctgggcacgtcatccgcagcggcggccgcagccaaccgcaaacgcgcggcctactacagcgccgcggggcccaggccgggagccgaccggcacrgcagcccaccgcaggaacccggagccgggcgggtctggggtcgctaccggcgcgccccatctgttcgctgggagccgggagtccttggcgttctgagcgc

SEQ ID NO: 30066 - DNA, 201 bp, Homo sapiens
gactggaggaggccctggaggcgacgtgcgcgccccgcgagcccagggcgaggccactccagacgcagctctgctcagcacagctcccgagtctctgacgytggccctggaaacgaggacacgtcagccacgaggacctggctctgtctgtccagctccaggagatggctggctgtggactcggcaggacaagctggtcag

SEQ ID NO: 30067 - DNA, 201 bp, Homo sapiens
gctcccgagtctctgacgttggccctggaaacgaggacacgtcagccacgaggacctggctctgtctgtccagctccaggagatggctggctgtggactcrgcaggacaagctggtcaggagacggctggctgtggactcagcaggacaaattgagatctggtgcccacagggcaaaggagagcctgtgccttgtcaggcc

SEQ ID NO: 30068 - DNA, 201 bp, Homo sapiens
caagcctgtgtatggctggcaggaagggctgggcccttcggagctgcacactctggtccaggacatgggcattggaaggagctgtatgaagagattttccrtttctgtcattgttgagactgtggttgtgccaagaaagaaattcttaagcattaagtttaaggaggacttttcagcaggctgtgggcctagaggtggggg

SEQ ID NO: 30069 - DNA, 201 bp, Homo sapiens
caatggggagagtgtcttcctacggctggggcgtgtgggagtccaggcttcacgcactctttgctgttcaatgtaccagctggaggatgagtctgcgcatytggatgaaatgccactaatgatgtctgaagaaggctttgagaatgaggaaagtgattaccacaccttaccacgagccaggataatgcaaaggaaaagagg

SEQ ID NO: 30070 - DNA, 173 bp, Homo sapiens
gcggccgcagccaaccgcaaacgcgcggcctactacagcgccgcggggcccaggccgggagccgaccggcacrgcaggaacgagcatccggcacccttgtgcatgtaccctacaatgactgccaggcttggatggatgtccccactcctgacttggtctgccctgacaccacc

SEQ ID NO: 30071 - DNA, 201 bp, Homo sapiens
aaaggaaaagaggactggagtggtttgtctgtgatggctggaagttcctctgtaccagttgctgtggttggctgataaatatttgtcgaagaaagaaagarctgaaagctcgcacagtatggcttggatgtcctgaaaagtgtgaagaaaaacatcccaggaattctataaaaaatcaaaaatacaatgtgtttaccttta

SEQ ID NO: 30072 - DNA, 201 bp, Homo sapiens
ttaagcggctgcacctgggcaccgtgtcctatggcgccgacacgatggatgagatccagagccatgtcagggactcctactcacagatgcagtctcaagckggtggaaacaatactggttcaactccactaagaaaagcccaatcttcagctcccaaagttaggaaaagtgtcagtagtcgaatccatgaagccgtgaaag

SEQ ID NO: 30073 - DNA, 201 bp, Homo sapiens
aggaaccctcacccagaatgaaatgatatttaagcggctgcacctgggcaccgtgtcctatggcgccgacacgatggatgagatccagagccatgtcaggractcctactcacagatgcagtctcaagctggtggaaacaatactggttcaactccactaagaaaagcccaatcttcagctcccaaagttaggaaaagtgt

SEQ ID NO: 30074 - DNA, 201 bp, Homo sapiens
tggagtggtttgtctgtgatggctggaagttcctctgtaccagttgctgtggttggctgataaatatttgtcgaagaaagaaagaactgaaagctcgcacmgtatggcttggatgtcctgaaaagtgtgaagaaaaacatcccaggaattctataaaaaatcaaaaatacaatgtgtttacctttatacctggggttttgt

SEQ ID NO: 30075 - DNA, 201 bp, Homo sapiens
gcagtaccaggactttgagagccgatacactcaagccaagctgagcatgcacgacaggtccctcaaggtggccgcggtagtcgagagcctggagagggagwtggaactgctgtgcctcaccggcgtggaggaccagctgcaggcagacgtgcggcccacgctggagatgctgcgcaacgccgggatcaagatatggatgct

SEQ ID NO: 30076 - DNA, 201 bp, Homo sapiens
tgccaggcaagcccagggcacagatgccaggatggcttctccctctcagtgcgaggcttcacccctgccaggcaagcccagggcatagatgctgagacagsctctccctctcagtgcagggacgtcacccctgccaggcaagcccagggcacagaggccgggacggcctctccctctcagtgtgaggcttcacccatgcta

SEQ ID NO: 30077 - DNA, 201 bp, Homo sapiens
acagacaaaacaggaaccctcacccagaatgaaatgatatttaagcggctgcacctgggcaccgtgtcctatggcgccgacacgatggatgagatccagarccatgtcagggactcctactcacagatgcagtctcaagctggtggaaacaatactggttcaactccactaagaaaagcccaatcttcagctcccaaagtt

SEQ ID NO: 30078 - DNA, 201 bp, Homo sapiens
tgaacacatccaatccaaaaaataaggttggtttgttggaccttgaactcaatcggctgacgaaagcgctatttttggctttagttgctctttccattgtwatggtaaccttacaaggatttgtgggtccatggtaccgcaatctttttcggttccttctcctcttttcttacatcattcccataagtttgcgtgtgaact

SEQ ID NO: 30079 - DNA, 201 bp, Homo sapiens
tcttcagctcccaaagttaggaaaagtgtcagtagtcgaatccatgaagccgtgaaagccatcgtgctgtgtcacaacgtgacccccgtgtatgagtctcrggccggcgttactgaggagactgagttcgcagaggctgaccaagacttcagtgatgagaatcgcacctaccaggcttccagcccggatgaggtcgctctg

SEQ ID NO: 30080 - DNA, 201 bp, Homo sapiens
gtatttccatattgaagcagcttgagtttctactgaaaatgagcccgaattatttcactattactgtaaagggttcatcttactctggcattctgagaatyagactgaaagtttaatttctgcagttccctcatattcagattctttctttgatgttataacacaaagtcattcctactcaaatgtaataaaattgaggct

SEQ ID NO: 30081 - DNA, 201 bp, Homo sapiens
tcagtagtcgaatccatgaagccgtgaaagccatcgtgctgtgtcacaacgtgacccccgtgtatgagtctcgggccggcgttactgaggagactgagttygcagaggctgaccaagacttcagtgatgagaatcgcacctaccaggcttccagcccggatgaggtcgctctggtgcagtggacagagagtgtgggcctca

SEQ ID NO: 30082 - DNA, 201 bp, Homo sapiens
cagaggctgaccaagacttcagtgatgagaatcgcacctaccaggcttccagcccggatgaggtcgctctggtgcagtggacagagagtgtgggcctcacrctggtcagcagggacctcacctccatgcagctgaagacccccagtggccaggtcctcagcttctgcattctgcagctgtttcccttcacctccgagagca

SEQ ID NO: 30083 - DNA, 201 bp, Homo sapiens
cctcacgctggtcagcagggacctcacctccatgcagctgaagacccccagtggccaggtcctcagcttctgcattctgcagctgtttcccttcacctccsagagcaagcggatgggcgtcatcgtcagggatgaatccacggcagaaatcacattctacatgaagggcgctgacgtggccatgtctcctatcgtgcagta

SEQ ID NO: 30084 - DNA, 201 bp, Homo sapiens
tccatgaagccgtgaaagccatcgtgctgtgtcacaacgtgacccccgtgtatgagtctcgggccggcgttactgaggagactgagttcgcagaggctgaycaagacttcagtgatgagaatcgcacctaccaggcttccagcccggatgaggtcgctctggtgcagtggacagagagtgtgggcctcacgctggtcagca

SEQ ID NO: 30085 - DNA, 186 bp, Homo sapiens
tgaaaatgagcccgaattatttcactattactgtaaagggttcatcttactctggcattctgagaattagactgaaagtttaatttctgcagttccctcayattcagattctttctttgatgttataacacaaagtcattcctactcaaatgtaataaaattgaggctccacggaggcccgtgtcc

SEQ ID NO: 30086 - DNA, 201 bp, Homo sapiens
ggatggcttctccctctcagtgcgaggcttcacccctgccaggcaagcccagggcatagatgctgagacagcctctccctctcagtgcagggacgtcaccyctgccaggcaagcccagggcacagaggccgggacggcctctccctctcagtgtgaggcttcacccatgctaggcaagcccagggcacagatgccgggatg

SEQ ID NO: 30087 - DNA, 201 bp, Homo sapiens
gccaggataatgcaaaggaaaagaggactggagtggtttgtctgtgatggctggaagttcctctgtaccagttgctgtggttggctgataaatatttgtcraagaaagaaagaactgaaagctcgcacagtatggcttggatgtcctgaaaagtgtgaagaaaaacatcccaggaattctataaaaaatcaaaaatacaat

SEQ ID NO: 30088 - DNA, 201 bp, Homo sapiens
ccaggaattctataaaaaatcaaaaatacaatgtgtttacctttatacctggggttttgtatgaacaattcaagtttttcttgaatctctattttctagtratatcctgctcacagtttgtaccagcattgaaaataggctatctctacacctactgggctcctctgggatttgtcttggctgttactatgacacgggaag

SEQ ID NO: 30089 - DNA, 201 bp, Homo sapiens
agacccccagtggccaggtcctcagcttctgcattctgcagctgtttcccttcacctccgagagcaagcggatgggcgtcatcgtcagggatgaatccacrgcagaaatcacattctacatgaagggcgctgacgtggccatgtctcctatcgtgcagtataatgactggctggaagaggagtgcggaaacatggctcgcg

SEQ ID NO: 30090 - DNA, 201 bp, Homo sapiens
tttataccggaaaagagactcgaagtgtaatgaacacatccaatccaaaaaataaggttggtttgttggaccttgaactcaatcggctgacgaaagcgctrtttttggctttagttgctctttccattgttatggtaaccttacaaggatttgtgggtccatggtaccgcaatctttttcggttccttctcctcttttctt

SEQ ID NO: 30091 - DNA, 193 bp, Homo sapiens
ggcccaaatcctgcggaaggttttccgggagaatgggagagcccagggcgaggccactccagacgcagctctgctcagcacagctcccgagtctctgacgytggccctggaaacgaggacacgtcagccacgaggacctggctctgtctgtccagctccaggtagtttaattgccggagcaaaagccctcact

SEQ ID NO: 30092 - DNA, 201 bp, Homo sapiens
ctggagggaaggaggcatgtgagagtgttcgagatggacagtacaagcaagaggtaagttgctgtggttggctgataaatatttgtcgaagaaagaaagarctgaaagctcgcacagtatggcttggatgtcctgaaaagtgtgaagaaaaacatcccaggaattctataaaaaatcaaaaatacaatgtgtttaccttta

SEQ ID NO: 30093 - DNA, 201 bp, Homo sapiens
catgtgagagtgttcgagatggacagtacaagcaagaggtaagttgctgtggttggctgataaatatttgtcgaagaaagaaagaactgaaagctcgcacmgtatggcttggatgtcctgaaaagtgtgaagaaaaacatcccaggaattctataaaaaatcaaaaatacaatgtgtttacctttatacctggggttttgt

SEQ ID NO: 30094 - DNA, 201 bp, Homo sapiens; identical to SEQ ID NO: 30088

SEQ ID NO: 30095 - DNA, 201 bp, Homo sapiens
cacagcagggatgctggagggaaggaggcatgtgagagtgttcgagatggacagtacaagcaagaggtaagttgctgtggttggctgataaatatttgtcraagaaagaaagaactgaaagctcgcacagtatggcttggatgtcctgaaaagtgtgaagaaaaacatcccaggaattctataaaaaatcaaaaatacaat

SEQ ID NO: 30096 - DNA, 201 bp, Homo sapiens; identical to SEQ ID NO: 30069

SEQ ID NO: 30097 - DNA, 201 bp, Homo sapiens; identical to SEQ ID NO: 30083

SEQ ID NO: 30098 - DNA, 173 bp, Homo sapiens; identical to SEQ ID NO: 30070

SEQ ID NO: 30099 - DNA, 201 bp, Homo sapiens; identical to SEQ ID NO: 30071

SEQ ID NO: 30100 - DNA, 201 bp, Homo sapiens; identical to SEQ ID NO: 30072

SEQ ID NO: 30101 - DNA, 201 bp, Homo sapiens; identical to SEQ ID NO: 30073

SEQ ID NO: 30102 - DNA, 201 bp, Homo sapiens; identical to SEQ ID NO: 30074

SEQ ID NO: 30103 - DNA, 201 bp, Homo sapiens; identical to SEQ ID NO: 30084

SEQ ID NO: 30104 - DNA, 201 bp, Homo sapiens; identical to SEQ ID NO: 30077

SEQ ID NO: 30105 - DNA, 201 bp, Homo sapiens; identical to SEQ ID NO: 30078

SEQ ID NO: 30106 - DNA, 201 bp, Homo sapiens; identical to SEQ ID NO: 30079

SEQ ID NO: 30107 - DNA, 201 bp, Homo sapiens; identical to SEQ ID NO: 30088

SEQ ID NO: 30108 - DNA, 201 bp, Homo sapiens; identical to SEQ ID NO: 30087

SEQ ID NO: 30109 - DNA, 201 bp, Homo sapiens; identical to SEQ ID NO: 30090

SEQ ID NO: 30110 - DNA, 201 bp, Homo sapiens; identical to SEQ ID NO: 30081

SEQ ID NO: 30111 - DNA, 201 bp, Homo sapiens; identical to SEQ ID NO: 30082

SEQ ID NO: 30112 - DNA, 201 bp, Homo sapiens
agacccccagtggccaggtcctcagcttctgcattctgcagctgtttcccttcacctccgagagcaagcggatgggcgtcatcgtcagggatgaatccacrgcagaaatcacattctacatgaagggcgctgacgtggccatgtctcctatcgtgcagtataatgactggctggaagaggaggagacgggaagagacacag

SEQ ID NO: 30113 - DNA, 175 bp, Homo sapiens
ggaaaggggcggtcggaacatggcggaccagatcccgctttacccggtaccagctggaggatgagtctgcgcatytggatgaaatgccactaatgatgtctgaagaaggctttgagaatgaggaaagtgattaccacaccttaccacgagccaggataatgcaaaggaaaagagg

SEQ ID NO: 30114 - DNA, 201 bp, Homo sapiens; identical to SEQ ID NO: 30071

SEQ ID NO: 30115 - DNA, 201 bp, Homo sapiens; identical to SEQ ID NO: 30072

SEQ ID NO: 30116 - DNA, 201 bp, Homo sapiens; identical to SEQ ID NO: 30073

SEQ ID NO: 30117 - DNA, 201 bp, Homo sapiens; identical to SEQ ID NO: 30074

SEQ ID NO: 30118 - DNA, 201 bp, Homo sapiens; identical to SEQ ID NO: 30075

SEQ ID NO: 30119 - DNA, 201 bp, Homo sapiens; identical to SEQ ID NO: 30076

SEQ ID NO: 30120 - DNA, 201 bp, Homo sapiens; identical to SEQ ID NO: 30077

SEQ ID NO: 30121 - DNA, 201 bp, Homo sapiens; identical to SEQ ID NO: 30078

SEQ ID NO: 30122 - DNA, 201 bp, Homo sapiens; identical to SEQ ID NO: 30079

SEQ ID NO: 30123 - DNA, 201 bp, Homo sapiens; identical to SEQ ID NO: 30080

SEQ ID NO: 30124 - DNA, 201 bp, Homo sapiens; identical to SEQ ID NO: 30082

SEQ ID NO: 30125 - DNA, 201 bp, Homo sapiens; identical to SEQ ID NO: 30081

SEQ ID NO: 30126 - DNA, 201 bp, Homo sapiens; identical to SEQ ID NO: 30083

SEQ ID NO: 30127 - DNA, 186 bp, Homo sapiens; identical to SEQ ID NO: 30085

SEQ ID NO: 30128 - DNA, 201 bp, Homo sapiens; identical to SEQ ID NO: 30084

SEQ ID NO: 30129 - DNA, 201 bp, Homo sapiens; identical to SEQ ID NO: 30086

SEQ ID NO: 30130 - DNA, 201 bp, Homo sapiens; identical to SEQ ID NO: 30088

SEQ ID NO: 30131 - DNA, 201 bp, Homo sapiens; identical to SEQ ID NO: 30087

SEQ ID NO: 30132 - DNA, 201 bp, Homo sapiens; identical to SEQ ID NO: 30090

SEQ ID NO: 30133 - DNA, 201 bp, Homo sapiens; identical to SEQ ID NO: 30089

SEQ ID NO: 30134 - DNA, 201 bp, Homo sapiens
acaagaatatagtgctctatattatcgagatctggtttgcctttgttaatggcttttctggacagatcctctttgaaagatggtgtataggtctctataaygtgatgtttacagcaatgcctcctttaactcttggaatatttgagagatcatgcagaaaagagaacatgttgaagtaccctgaattatacaaaacatctc

SEQ ID NO: 30135 - DNA, 201 bp, Homo sapiens
gtcagagcagccaagcaattgaattttgttttcactggaagaacacccgactcggtgattatagattcactggggcaggaagaaagatatgaattgctcartgtcttggagtttaccagtgctaggaaaagaatgtcagtgattgttcgcactccatctggaaagttacgactctactgcaaaggagctgacactgtaatt

SEQ ID NO: 30136 - DNA, 201 bp, Homo sapiens
cgcgcgccgaaggttatgagaagacagatgatgtttcagagaagacctcactggctgaccaggaggaagtaaggactattttcatcaaccagccccagctracaaaattctgcaataaccatgtcagcactgcaaaatacaacataatcacattccttccaagatttctctactctcagttcagaagagctgctaattcat

SEQ ID NO: 30137 - DNA, 201 bp, Homo sapiens
ctcgaagagagttatgagttgattgaaaagaatcttcagctacttggagcaacagccattgaggataaattacaagatcaagtgcctgaaaccatagaaaygctaatgaaagcagacatcaaaatctggatccttacaggggacaagcaagaaactgccattaacatcggacactcctgcaaactgttgaagaagaacatg

SEQ ID NO: 30138 - DNA, 201 bp, Homo sapiens
tctgaatgaggaacttggccaggttaaatacatattttctgacaaaactggtactctgacatgcaatgtaatgcagtttaagaagtgcaccatagcgggarttgcttatggccatgtccctgaacctgaggattatggctgctctcctgatgaatggcagaactcacagtttggagatgaaaaaacatttagtgattcatc

SEQ ID NO: 30139 - DNA, 201 bp, Homo sapiens; identical to SEQ ID NO: 30134

SEQ ID NO: 30140 - DNA, 201 bp, Homo sapiens; identical to SEQ ID NO: 30135

SEQ ID NO: 30141 - DNA, 201 bp, Homo sapiens; identical to SEQ ID NO: 30136

SEQ ID NO: 30142 - DNA, 201 bp, Homo sapiens; identical to SEQ ID NO: 30137

SEQ ID NO: 30143 - DNA, 201 bp, Homo sapiens
tctgaatgaggaacttggccaggttaaatacatattttctgacaaaactggtactctgacatgcaatgtaatgcagtttaagaagtgcaccatagcgggarttgcttatgggcagaactcacagtttggagatgaaaaaacatttagtgattcatcattgctggaaaatctccaaaataatcatccaactgcacctataat

SEQ ID NO: 30144 - DNA, 201 bp, Homo sapiens; identical to SEQ ID NO: 30134

SEQ ID NO: 30145 - DNA, 201 bp, Homo sapiens; identical to SEQ ID NO: 30135

SEQ ID NO: 30146 - DNA, 201 bp, Homo sapiens; identical to SEQ ID NO: 30136

SEQ ID NO: 30147 - DNA, 201 bp, Homo sapiens; identical to SEQ ID NO: 30137

SEQ ID NO: 30148 - DNA, 201 bp, Homo sapiens; identical to SEQ ID NO: 30138

SEQ ID NO: 30149 - DNA, 201 bp, Homo sapiens
cagcctccaaggaagaaggcaagaaattgaagaagaggtatgctgtgttcaatgaagacggttctctggctgagctcaagggctttgaggtcaaacgccgyggggaactgcagctgattaagatcttccaatcctcggtgtttgaggccttcctcaagggcagcacgctggaagaggtgtatggctctgtagccaaggtgg

SEQ ID NO: 30150 - DNA, 201 bp, Homo sapiens
ctcaggattatgtcgcaaatgagctcactcagagcttcttcaccatcactcagaagattcagaagaaagtcacaggctctcggaactccactgagctctcrgagatgtttcctgtcctccccggttcccacttgctgctcaataaccctgccctggagttcatcaaatacgtgtgcaaggtgctgtccctggacaccaaca

SEQ ID NO: 30151 - DNA, 201 bp, Homo sapiens
gctatgtcatgcgcaagggggctcgctggtactccatggagatggctggcatcgtctgcttcacaggggccaacatcatcacccaggcacgggagctgatygagcagattgggaggcccttagagctggacacagatggtatatggtgcgtcctgcccaacagcttcccagaaaattttgtcttcaagacgaccaatgtga

SEQ ID NO: 30152 - DNA, 201 bp, Homo sapiens
ggttcccaaggccctggtggggctggagtctcacctgtttgcatggagaaatgggctggccccacagcctcacaggagcagtttgtgggctggtttccccrggaatccagaccctaacccgtgagaatctggattttggcttgtgagccctgcttatttggagccgggtctagagggaaccctctatcagcctcaggaaaa

SEQ ID NO: 30153 - DNA, 201 bp, Homo sapiens
cagcggaagatggcctggcagtggaggggcgagttcatgccagccagtcgcagcgaataccatcggatccagcaccagctggagtcagagaagttcccccscttgttcccagaggggccagctcgggcctttcatgaactgtcccgcgaggaacaggcgaaatacgagaagagaaggctggcggattactgccggaaagcc

SEQ ID NO: 30154 - DNA, 124 bp, Homo sapiens
ggggccccacaggctccccaggaggctcgtgtctttggcccagagccagccttagtttgtccctgccatctactgtctgaggccatcgctgctacactttktttttatttgtatttcatactga

SEQ ID NO: 30155 - DNA, 201 bp, Homo sapiens
gcaaggcagccaacatgcctgactctgagctattcgagctcatctctgagaaccgttccatgtctcggaagctggaagattacggggagcagaagtctacrtccatcagcacagcaaagcgcctggccgagttcctgggagaccagatggtcaaggatgcagggctgagttgccgctacatcatctcccgcaagcccgagg

SEQ ID NO: 30156 - DNA, 201 bp, Homo sapiens
aaactgccagcggaagatggcctggcagtggaggggcgagttcatgccagccagtcgcagcgaataccatcggatccagcaccagctggagtcagagaagwtcccccccttgttcccagaggggccagctcgggcctttcatgaactgtcccgcgaggaacaggcgaaatacgagaagagaaggctggcggattactgccg

SEQ ID NO: 30157 - DNA, 201 bp, Homo sapiens
gttccctaccacatccgcctctccattgacctgaagatccacgtggctcattggtacaatgtcagataccgaggaaatgcttttccggtagaaatcacccrccgagatgaccttgttgaacgacctgaccctgtggttttggcatttgacattgagacgaccaaactgcccctcaagtttcctgatgctgagacagaccag

SEQ ID NO: 30158 - DNA, 201 bp, Homo sapiens
gctacctggaaccagggagtatccgccatatctacctgtaccaccacgcacaggcccacaaagcgctcttcgggatcttcatcccctcacagcgcagggcrtccgtctttgtgctggacactgtgcgcagcaaccagatgcccagccttggcgccctgtactcagcagagcacggcctcctcctggagaaggtgggccctg

SEQ ID NO: 30159 - DNA, 201 bp, Homo sapiens
cctccacacaggaccagctggaagcagaaagaagaaaggccaatttcacagggcaccaaacaagtatgaaatgtaaatcagaaatgcagacaccccagacragagcctcacaggagggagggggccccacaggctccccaggaggctcgtgtctttggcccagagccagccttagtttgtccctgccatctactgtctgag

SEQ ID NO: 30160 - DNA, 201 bp, Homo sapiens
gagtcagagaagttcccccccttgttcccagaggggccagctcgggcctttcatgaactgtcccgcgaggaacaggcgaaatacgagaagagaaggctggyggattactgccggaaagcctacaagaagatccacatcaccaaggtggaagagcgtctcaccaccatctgccagcgggaaaactccttctacgtggacacc

SEQ ID NO: 30161 - DNA, 201 bp, Homo sapiens
tggctgactactggctggacgtgctgtacagcaaggcagccaacatgcctgactctgagctattcgagctcatctctgagaaccgttccatgtctcggaarctggaagattacggggagcagaagtctacgtccatcagcacagcaaagcgcctggccgagttcctgggagaccagatggtcaaggatgcagggctgagtt

SEQ ID NO: 30162 - DNA, 201 bp, Homo sapiens
gtggacatgcgcgagtacgatgttccctaccacatccgcctctccattgacctgaagatccacgtggctcattggtacaatgtcagataccgaggaaatgyttttccggtagaaatcacccgccgagatgaccttgttgaacgacctgaccctgtggttttggcatttgacattgagacgaccaaactgcccctcaagttt

SEQ ID NO: 30163 - DNA, 201 bp, Homo sapiens
gccaagtgctcctgacatggaggacttcggcctcgtaaagctgcctcacccagcagcccctgtcactgtgaagaggaagcgagttctttgggagagccagraggagtcccaggacctcacgccgactgtgccctggcaggaaatcttggggcagcctcccgccctgggaaccagccaggaggaatggcttgtctggctccg

SEQ ID NO: 30164 - DNA, 137 bp, Homo sapiens
tcactcagggatgatggcgccacttcctcagtttcgkcactcaagcgcctggaacggagtcagtggacggataagatggatttgcggtttggttttgagcggctgaaggagcctggtgagaagacaggctggctcat

SEQ ID NO: 30165 - DNA, 201 bp, Homo sapiens; identical to SEQ ID NO: 30149

SEQ ID NO: 30166 - DNA, 201 bp, Homo sapiens; identical to SEQ ID NO: 30150

SEQ ID NO: 30167 - DNA, 201 bp, Homo sapiens; identical to SEQ ID NO: 30151

SEQ ID NO: 30168 - DNA, 201 bp, Homo sapiens; identical to SEQ ID NO: 30153

SEQ ID NO: 30169 - DNA, 120 bp, Homo sapiens
ggggccccacaggctccccaggaggctcgtgtctttggcccagagccagccttagtttgtccctgccatctactgtctgaggccatcgctgctacactttktttttatttgtatttcata

SEQ ID NO: 30170 - DNA, 201 bp, Homo sapiens; identical to SEQ ID NO: 30155

SEQ ID NO: 30171 - DNA, 201 bp, Homo sapiens; identical to SEQ ID NO: 30156

SEQ ID NO: 30172 - DNA, 201 bp, Homo sapiens; identical to SEQ ID NO: 30157

SEQ ID NO: 30173 - DNA, 201 bp, Homo sapiens; identical to SEQ ID NO: 30158

SEQ ID NO: 30174 - DNA, 201 bp, Homo sapiens
agaagcaggccgaccagctggaagcagaaagaagaaaggccaatttcacagggcaccaaacaagtatgaaatgtaaatcagaaatgcagacaccccagacragagcctcacaggagggagggggccccacaggctccccaggaggctcgtgtctttggcccagagccagccttagtttgtccctgccatctactgtctgag

SEQ ID NO: 30175 - DNA, 201 bp, Homo sapiens; identical to SEQ ID NO: 30160

SEQ ID NO: 30176 - DNA, 201 bp, Homo sapiens; identical to SEQ ID NO: 30161

SEQ ID NO: 30177 - DNA, 201 bp, Homo sapiens; identical to SEQ ID NO: 30162

SEQ ID NO: 30178 - DNA, 201 bp, Homo sapiens; identical to SEQ ID NO: 30163

SEQ ID NO: 30179 - DNA, 131 bp, Homo sapiens
agggatgatggcgccacttcctcagtttcgkcactcaagcgcctggaacggagtcagtggacggataagatggatttgcggtttggttttgagcggctgaaggagcctggtgagaagacaggctggctcat

SEQ ID NO: 30180 - DNA, 201 bp, Homo sapiens; identical to SEQ ID NO: 30153

SEQ ID NO: 30181 - DNA, 120 bp, Homo sapiens; identical to SEQ ID NO: 30169

SEQ ID NO: 30182 - DNA, 201 bp, Homo sapiens; identical to SEQ ID NO: 30155

SEQ ID NO: 30183 - DNA, 201 bp, Homo sapiens; identical to SEQ ID NO: 30160

SEQ ID NO: 30184 - DNA, 201 bp, Homo sapiens; identical to SEQ ID NO: 30162

SEQ ID NO: 30185 - DNA, 201 bp, Homo sapiens
ctgctccaactgtcaggcgccctacgactcctctgccatcgagatgacgctggtggaagttctacagaagaagctgatggccttcaccctgcaggacctgraggaggcagacactcccaagtgtgaagagaaggaaaggaggaagagggagttgcgcagctcggccacaggaaggtcttgccgaggggcatctgagcagag

SEQ ID NO: 30186 - DNA, 201 bp, Homo sapiens; identical to SEQ ID NO: 30149

SEQ ID NO: 30187 - DNA, 201 bp, Homo sapiens; identical to SEQ ID NO: 30151

SEQ ID NO: 30188 - DNA, 201 bp, Homo sapiens; identical to SEQ ID NO: 30150

SEQ ID NO: 30189 - DNA, 201 bp, Homo sapiens; identical to SEQ ID NO: 30157

SEQ ID NO: 30190 - DNA, 201 bp, Homo sapiens; identical to SEQ ID NO: 30156

SEQ ID NO: 30191 - DNA, 201 bp, Homo sapiens; identical to SEQ ID NO: 30174

SEQ ID NO: 30192 - DNA, 201 bp, Homo sapiens
gctacctggaaccagggagtatccgccatatctacctgtaccaccacgcacaggcccacaaagcgctcttcgggatcttcatcccctcacagcgcagggcrtccgtctttgtgctggacactatgcccagccttggcgccctgtactcagcagagcacggcctcctcctggagaaggtgggccctgagctcctgccacccc

SEQ ID NO: 30193 - DNA, 201 bp, Homo sapiens
gaagttctacagaagaagctgatggccttcaccctgcaggacctgaaggaggcagacactcccaagtgtgaagagaaggaaaggaggaagagggagttgcrcagctcggccacaggaaggtcttgccgaggggcatctgagcagaggctgggggacgcgccaagctgccgtgtggtggtgcacggcgttcaggcctgcagg

SEQ ID NO: 30194 - DNA, 201 bp, Homo sapiens; identical to SEQ ID NO: 30161

SEQ ID NO: 30195 - DNA, 201 bp, Homo sapiens; identical to SEQ ID NO: 30163

SEQ ID NO: 30196 - DNA, 134 bp, Homo sapiens
ctcagggatgatggcgccacttcctcagtttcgkcactcaagcgcctggaacggagtcagtggacggataagatggatttgcggtttggttttgagcggctgaaggagcctggtgagaagacaggctggctcat

SEQ ID NO: 30197 - DNA, 201 bp, Homo sapiens; identical to SEQ ID NO: 30149

SEQ ID NO: 30198 - DNA, 201 bp, Homo sapiens; identical to SEQ ID NO: 30150

SEQ ID NO: 30199 - DNA, 201 bp, Homo sapiens; identical to SEQ ID NO: 30151

SEQ ID NO: 30200 - DNA, 201 bp, Homo sapiens; identical to SEQ ID NO: 30153

SEQ ID NO: 30201 - DNA, 120 bp, Homo sapiens; identical to SEQ ID NO: 30169

SEQ ID NO: 30202 - DNA, 201 bp, Homo sapiens; identical to SEQ ID NO: 30155

SEQ ID NO: 30203 - DNA, 201 bp, Homo sapiens; identical to SEQ ID NO: 30156

SEQ ID NO: 30204 - DNA, 201 bp, Homo sapiens; identical to SEQ ID NO: 30157

SEQ ID NO: 30205 - DNA, 201 bp, Homo sapiens; identical to SEQ ID NO: 30158

SEQ ID NO: 30206 - DNA, 201 bp, Homo sapiens; identical to SEQ ID NO: 30174

SEQ ID NO: 30207 - DNA, 201 bp, Homo sapiens; identical to SEQ ID NO: 30160

SEQ ID NO: 30208 - DNA, 201 bp, Homo sapiens; identical to SEQ ID NO: 30161

SEQ ID NO: 30209 - DNA, 201 bp, Homo sapiens; identical to SEQ ID NO: 30162

SEQ ID NO: 30210 - DNA, 201 bp, Homo sapiens; identical to SEQ ID NO: 30163

SEQ ID NO: 30211 - DNA, 134 bp, Homo sapiens; identical to SEQ ID NO: 30196

SEQ ID NO: 30212 - DNA, 201 bp, Homo sapiens
atttattttagaatacaatctatgcaatcctcgaactcagtgtgcttttccctgacaggatatataaaaaggtagattaggtcaaccctcctttaagcttmctctcccctcaccttttcttttcactgtatataaacggtactttctgtgattcataccaacagtcctaaactgtcattttctaaatctgggatttaaaat

SEQ ID NO: 30213 - DNA, 130 bp, Homo sapiens
gcgcttgggggcgtggccgaggagccaagmgagccgggggcggggccgcctgggggatgaagtgggggcgctcgcctttcctgcctcactcgcagctgccgggtgttggggaaagagtcgcctgcctccg

SEQ ID NO: 30214 - DNA, 201 bp, Homo sapiens
ccaactcacccgacaggaaatagttgctcttttaaatgcttttggaaggctttctacaagtataagagacttacagaattttaaagtcttattacaacacrgtaggtaataaaggcttttatgtgtctaactagagacataaagtgactgtggaaagccttttaattatggacattcatcagaaagacactaatctgactt

SEQ ID NO: 30215 - DNA, 201 bp, Homo sapiens
tcgtcgaggcgcaggtcactggagttctggatgattgcttgtgtgatattgacagcatcgataacttcaatacctacaaaatcttccccaaaataaaaaamttgcaagagagagactattttcgttattacaaggttaatctgaagcgaccttgtcctttctgggcagaagatggccactgttcaataaaagactgtcatg

SEQ ID NO: 30216 - DNA, 201 bp, Homo sapiens
catgtggagccctgtccagagagtaaaattccggttggaataaaagctgggcattctaataagtacttgaaaatggcaaacaataccaaagaattagaagwttgtgagcaagctaataaactgggagcaattaacagcacattaagtaatcaaagcaaagaagctttcattgactgggcaagatatgatgattcacgggat

SEQ ID NO: 30217 - DNA, 201 bp, Homo sapiens
attgccttcagctgaaaatttgggaacagttcacagtaaacctctcagtagtttgcaaactgaggtacctgcagaaaccatagctactcaccaaaatacacagattaggtgcatggtatcgtggaaattatttggtaaaaaaacacacacacaaatctatgtgtactgtattttaaggaatatctacaggtgcagctttga

SEQ ID NO: 30218 - DNA, 201 bp, Homo sapiens
agacattttggaaattgtcagttacttttagaaagaaaacactgcagaaatatttaacagattacttcttgataaaatttaaatgggattatatgaatttrtaatgccaattgaaaatattatatacacaaaatttgctattttcacttaaagtaagcatttttaaaggatttattttagaatacaatctatgcaatcctc

SEQ ID NO: 30219 - DNA, 201 bp, Homo sapiens
ccctcaccttttcttttcactgtatataaacggtactttctgtgattcataccaacagtcctaaactgtcattttctaaatctgggatttaaaatctttaracaatatttaaaatcttgattttttttaaatgtcagcagatacaatttggaagattgcatctgtgtagaagtaatgcaggtacaagatctagagtttttc

SEQ ID NO: 30220 - DNA, 201 bp, Homo sapiens
cgtggaaattatttggtaaaaaaacacacacacaaatctatgtgtactgtattttaaggaatatctacaggtgcagctttgattttgaacagaattccaartaatttactgttgtacccaccagaatctagaaaatgtgaattaaagtacatgtttctgcaatcttttctgtcttgtttttccccgctattttaagtgttt

SEQ ID NO: 30221 - DNA, 201 bp, Homo sapiens
attgtgaattattcgatatttgtaatctatgtatatgaaactctgccatgtttttcaactttgcctatgtgccactgtatataagaaaggacagctatttkgatcttcatcagcattgccttcagctgaaaatttgggaacagttcacagtaaacctctcagtagtttgcaaactgaggtacctgcagaaaccatagctac

SEQ ID NO: 30222 - DNA, 201 bp, Homo sapiens
ttatggaaaaggagaactagggaacaaatgttgctcagggctggtgtcagtgagaaaaatttatcaatgctttttaatgtgtttttacccttgcctcactstgtgtgtgtcactttctataatataaagaaatactataatatttctagaatctggaactgtcaccatgatgaatggccctttcaatgcatagttacagaa

SEQ ID NO: 30223 - DNA, 201 bp, Homo sapiens
tccaactcacccgacaggaaatagttgctcttttaaatgcttttggaaggctttctacaagtataagagacttacagaattttaaagtcttattacaacasagtaggtaataaaggcttttatgtgtctaactagagacataaagtgactgtggaaagccttttaattatggacattcatcagaaagacactaatctgact

SEQ ID NO: 30224 - DNA, 201 bp, Homo sapiens
taaaggcttccaactcacccgacaggaaatagttgctcttttaaatgcttttggaaggctttctacaagtataagagacttacagaattttaaagtcttaytacaacacagtaggtaataaaggcttttatgtgtctaactagagacataaagtgactgtggaaagccttttaattatggacattcatcagaaagacacta

SEQ ID NO: 30225 - DNA, 142 bp, Homo sapiens
atggcatgagaatttgattgtaacctgtggagaagggagaaaatgtatttataagtagtctgaggttgtttcttatcataatggcaagcattggctggcaytgtattaagggcttttacatgcatagtttggctttaaaaga

SEQ ID NO: 30226 - DNA, 201 bp, Homo sapiens
tttttgtgtatgtgtttttatttcttaaatgattgtgtgagcctggtgacattttatggttcttgtgatctaaactgtttttccaattcacatcttttgtygtgaagtgatattatactagagtactgtttgcattgtaaaaatgctttgctggtgctctggcattttgtctttatctcatcacctaatttaaaaacccag

SEQ ID NO: 30227 - DNA, 201 bp, Homo sapiens
ccgggggcggggccgcctgggggatgaagtgggggcgctcgcctttcctgcctcactcgcagctgccgggtgttggggaaagagtcgcctgcctccggacyggagtgcagacctctgaccctggagtcgctcggccgctgggaaccgtccccttgggtcgtcgcctgggccgcccgtcgttccccggccccgaggggtccg

SEQ ID NO: 30228 - DNA, 201 bp, Homo sapiens
attgtatggtgggggaggggggccttaaggcaaactgtctaaaaagtgactatccaattaatttaactagtaaattagtaagaattattcttagtattcaytcagagtttaagatgtgaaaaatctgcactttgtttatcactctaaatgtaaagaactttttgatagtgttatttcaccactccctcagttaaaggctat

SEQ ID NO: 30229 - DNA, 201 bp, Homo sapiens
aggatcagacagaataagactccacacttttgaaatttgataagtcaaaacgttttattttgacatttttaacattgtgaattattcgatatttgtaatcbatgtatatgaaactctgccatgtttttcaactttgcctatgtgccactgtatataagaaaggacagctatttggatcttcatcagcattgccttcagctg

SEQ ID NO: 30230 - DNA, 201 bp, Homo sapiens
tcctttaaatcctctggcgcctagccgaggtaggagaatcattctacacatggctagaaggtttgtgtctggagaaaagagtcttctataagcttatatcrggacttcatgctagcatcaatttacatctatgcgcaaattatcttttggaagaaacctggggtaagcccagttggggacctaatattaaagaattcaaac

SEQ ID NO: 30231 - DNA, 201 bp, Homo sapiens; identical to SEQ ID NO: 30212

SEQ ID NO: 30232 - DNA, 130 bp, Homo sapiens; identical to SEQ ID NO: 30213

SEQ ID NO: 30233 - DNA, 201 bp, Homo sapiens; identical to SEQ ID NO: 30214

SEQ ID NO: 30234 - DNA, 201 bp, Homo sapiens; identical to SEQ ID NO: 30215

SEQ ID NO: 30235 - DNA, 201 bp, Homo sapiens; identical to SEQ ID NO: 30217

SEQ ID NO: 30236 - DNA, 201 bp, Homo sapiens; identical to SEQ ID NO: 30218

SEQ ID NO: 30237 - DNA, 201 bp, Homo sapiens; identical to SEQ ID NO: 30219

SEQ ID NO: 30238 - DNA, 201 bp, Homo sapiens; identical to SEQ ID NO: 30222

SEQ ID NO: 30239 - DNA, 201 bp, Homo sapiens; identical to SEQ ID NO: 30220

SEQ ID NO: 30240 - DNA, 201 bp, Homo sapiens; identical to SEQ ID NO: 30221

SEQ ID NO: 30241 - DNA, 201 bp, Homo sapiens; identical to SEQ ID NO: 30223

SEQ ID NO: 30242 - DNA, 142 bp, Homo sapiens; identical to SEQ ID NO: 30225

SEQ ID NO: 30243 - DNA, 201 bp, Homo sapiens; identical to SEQ ID NO: 30224

SEQ ID NO: 30244 - DNA, 201 bp, Homo sapiens; identical to SEQ ID NO: 30226

SEQ ID NO: 30245 - DNA, 201 bp, Homo sapiens; identical to SEQ ID NO: 30227

SEQ ID NO: 30246 - DNA, 201 bp, Homo sapiens; identical to SEQ ID NO: 30228

SEQ ID NO: 30247 - DNA, 201 bp, Homo sapiens; identical to SEQ ID NO: 30229

SEQ ID NO: 30248 - DNA, 201 bp, Homo sapiens
atcgtcctttaaatcctctggcgcctagccgaggagaatcattctacacatggctagaaggtttgtgtctggagaaaagagtcttctataagcttatatcrggacttcatgctagcatcaatttacatctatgcgcaaattatcttttggaagaaacctggggtaagcccagttggggacctaatattaaagaattcaaac

SEQ ID NO: 30249 - DNA, 201 bp, Homo sapiens
acctagggtgccttaaaaataacaacaacaaaaaacctgtgtgcatctggctgacacttacctgcttctggttttcgaagactatttagtggaaccttgtrgaggagcagggtcttcctgcagtgcctggaaaacaggcgctgtttttttgggaccttgcgtgaagagcagtgagcagggttcctgtggtttccctggtcc

SEQ ID NO: 30250 - DNA, 201 bp, Homo sapiens
cactgaagccatttgccccagtgtggtcaagcagccatgctttctgggcattttcgtcctcccataatttcatatttccgtacccctgaggaaacaaaaargaaatgaggagagaaagttactgttaagggtggttaacattttttttgttttgttttgttttggtttttttttttttgagacagagtctggctctgtcgc

SEQ ID NO: 30251 - DNA, 201 bp, Homo sapiens
gatgaagacgaagaagcaagggaggaacaaatgaagaaccatctttgttcatgaataggaatattcaagattataaaggtatcaggtctcctaaaattgayctatggatttaataccattttcaatggaaattccaacagattttattgaatgaaacaagcaggtgtttatatggagtagcaaaggacttaaaattaccaa

SEQ ID NO: 30252 - DNA, 201 bp, Homo sapiens
gagtgcaggggcgcaatctcggctcatagcaagctccgcctcctgggttcatgccattctcctgcctcagcctccagagtagctgggactacaggtgcccrccaccacacccggctaattttttgtgtttttacaaaatacaaaaaagtagagacaggatttcactgtgttagccaggatggtcttgatctcccgacctcg

SEQ ID NO: 30253 - DNA, 201 bp, Homo sapiens
cataaagtcactcatttcttaccattttattcccctcaattctcaatatattcagtaatgaagaatggtgccaccactcaagcaacaagcctcaaactcamccatgtcatctttttcttggatgattgcagttatttcaaaaatttgcatgcaaaatatacactcatcctacttcaagatggtggtggcaatagtcaggag

SEQ ID NO: 30254 - DNA, 201 bp, Homo sapiens
tttttgccttttttattcttgatgatcctcaaggaaatacaacctagggtgccttaaaaataacaacaacaaaaaacctgtgtgcatctggctgacacttmcctgcttctggttttcgaagactatttagtggaaccttgtagaggagcagggtcttcctgcagtgcctggaaaacaggcgctgtttttttgggaccttgc

SEQ ID NO: 30255 - DNA, 201 bp, Homo sapiens
gtgtaagaatgttcatagttacatatttataatagttaataactggaaaaagtgaaatgtatgtctgtctacaggaaaataggtgaataattagatatatrtattcattctacgggatattattcagtagtggaaatgagtgaactacagctatacctcacaataagaatgaatctcagaaaatattaaggaaaaaagcaa

SEQ ID NO: 30256 - DNA, 201 bp, Homo sapiens
atctaggaggccacttagtcgtctttttttcctcttagaagaaaagcctgaaactgagttgaatagagaagtgtgaccctgtgacaaaatgatactgtgaraaatggggcattttaatctaagtggttataacagtggattctgacggggaaggtgtagctctgttctcttcggaagacctcgttttctaaaggctggact

SEQ ID NO: 30257 - DNA, 201 bp, Homo sapiens
tgctaggccgacaccaaggactggccgggtacccgggaagaaagcacgtgctccagcagttgccgcgcccagccccgagagaggccctagggcgctgcggrctttcggggtccgcagtccccccgcgacgcgagccaacgggaggcgtcaaaagacccgggccttgtgtggcaggctcgcctggcgctggctggcgtggcc

SEQ ID NO: 30258 - DNA, 201 bp, Homo sapiens
ccgcgcccagccccgagagaggccctagggcgctgcgggctttcggggtccgcagtccccccgcgacgcgagccaacgggaggcgtcaaaagacccgggcyttgtgtggcaggctcgcctggcgctggctggcgtggcccttggccgtcgtcacctgtggagagcacgtcttctctgccgcgccctctgcgcaaggaggag

SEQ ID NO: 30259 - DNA, 201 bp, Homo sapiens
gagctccatgaaagagttcgccgagaactgtgggcctactgtggcagtgagcagctggacgtcgcagacctgcgcaggctgcggtacaagggcatccgccyggctcctggctaccccagccagcccgaccacaccgagaagctcaccatgtggagactcgcagacatcgagcagtctacaggcattaggttaacagaatca

SEQ ID NO: 30260 - DNA, 201 bp, Homo sapiens
acgtcgcagacctgcgcaggctgcggtacaagggcatccgcccggctcctggctaccccagccagcccgaccacaccgagaagctcaccatgtggagactygcagacatcgagcagtctacaggcattaggttaacagaatcattagcaatggcacctgcttcagcagtctcaggcctctacttctccaatttgaagtcca

SEQ ID NO: 30261 - DNA, 201 bp, Homo sapiens
gcgtccaagagtgtggtggtgtgttcccagctgttagatgaaaatctaaaggatgaatactttgaggaaatcatggaagaatatgaagatattagacaggrccattatgagtctctcaaggagaggagatacttacccttaagtcaagccagaaaaagtggtttccaaatggattggctgtctgaacctcacccagtgaag

SEQ ID NO: 30262 - DNA, 201 bp, Homo sapiens
catctttttcttggatgattgcagttatttcaaaaatttgcatgcaaaatatacactcatcctacttcaagatggtggtggcaatagtcaggagaaggtarcattggagtcctggtttgattcgaaggatgaagacgaagaagcaagggaggaacaaatgaagaaccatctttgttcatgaataggaatattcaagattat

SEQ ID NO: 30263 - DNA, 201 bp, Homo sapiens
agtgaactacagctatacctcacaataagaatgaatctcagaaaatattaaggaaaaaagcaagtttgaagagaccacatggggcgtactatttttattgrgcccaaaaacaagcaaaaccaaagaatatgtagtctaagcatacgtatacaataaaactatgctattaaaaaaaaaaggtaactgataaaccaaaattga

SEQ ID NO: 30264 - DNA, 201 bp, Homo sapiens
accaaatgcttctaaatatgaaggagaggttggggacacgcaccctatgtgataccaagttttattgtcaagacagtgtcatggtgcagaggtaggcattytgagcaggggaacaaaataagggcctagaaactcacccgtgcatatgttgacctttgcaaaatgacctggtgacatggcaagtcagtggggacaggaagg

SEQ ID NO: 30265 - DNA, 201 bp, Homo sapiens
gtcctggtttgattcgaaggatgaagacgaagaagcaagggaggaacaaatgaagaaccatctttgttcatgaataggaatattcaagattataaaggtaycaggtctcctaaaattgatctatggatttaataccattttcaatggaaattccaacagattttattgaatgaaacaagcaggtgtttatatggagtagca

SEQ ID NO: 30266 - DNA, 201 bp, Homo sapiens
ttgttagatctgtagggacttgtacaacattgtggatgtgtaaacaggcaccactgctttaaaaaacaattatcccttacagacttgaacatttgcagacsttatgatcttgcttccaactcccacctgtatgtccagcaaactcttgcatgtggccactaggaggaatgtgtaagaatgttcatagttacatatttataa

SEQ ID NO: 30267 - DNA, 201 bp, Homo sapiens
gaagccattcgagaagcaatgcatggggttttcctttaccatgcaatcaagtctggcatggacatggggatagtgaatgctggaaacctccctgtgtatgrtgatatccataaggaacttctgcagctctgtgaagatctcatctggaataaagaccctgaggccactgagaagctcttacgttatgcccagactcaaggc

SEQ ID NO: 30268 - DNA, 201 bp, Homo sapiens
tatttttgatactgccaatgccaaggcagccttgtttgcactccaaaatctttttgaggagaaatatgctccccggcctatctttatttcagggacgatcrttgataaaagtgggcggactctttccggacagacaggagagggatttgtcatcagcgtgtctcatggagaaccactctgcattggattaaattgtgcttt

SEQ ID NO: 30269 - DNA, 201 bp, Homo sapiens
ggggtccgcagtccccccgcgacgcgagccaacgggaggcgtcaaaagacccgggccttgtgtggcaggctcgcctggcgctggctggcgtggcccttggycgtcgtcacctgtggagagcacgtcttctctgccgcgccctctgcgcaaggaggagactcgacaacatgtcacccgcgctccaagacctgtcgcaacccg

SEQ ID NO: 30270 - DNA, 201 bp, Homo sapiens
gtccaagagtgtggtggtgtgttcccagctgttagatgaaaatctaaaggatgaatactttgaggaaatcatggaagaatatgaagatattagacaggacsattatgagtctctcaaggagaggagatacttacccttaagtcaagccagaaaaagtggtttccaaatggattggctgtctgaacctcacccagtgaagcc

SEQ ID NO: 30271 - DNA, 201 bp, Homo sapiens
actccgcctctggccgcgcgtgtctggctgctaggccgacaccaaggactggccgggtacccgggaagaaagcacgtgctccagcagttgccgcgcccagscccgagagaggccctagggcgctgcgggctttcggggtccgcagtccccccgcgacgcgagccaacgggaggcgtcaaaagacccgggccttgtgtggca

SEQ ID NO: 30272 - DNA, 201 bp, Homo sapiens
gtgcaggtggaaatgggagcccaggtgttggatgtcaacatggatgatggcatgctagatggtccaagtgcaatgaccagattttgcaacttaattgcttmcgagccagacatcgcaaaggtacctttgtgcatcgactcctccaattttgctgtgattgaagctgggttaaagtgctgccaagggaagtgcattgtcaat

SEQ ID NO: 30273 - DNA, 201 bp, Homo sapiens
cttgtatgccattaattttatccatgcaacaaaagtcattaaagaaacattacctggagccagaataagtggaggtctttccaacttgtccttctccttcygaggaatggaagccattcgagaagcaatgcatggggttttcctttaccatgcaatcaagtctggcatggacatggggatagtgaatgctggaaacctccc

SEQ ID NO: 30274 - DNA, 201 bp, Homo sapiens
gaccggctggcagaggcctttgcagaagagctccatgaaagagttcgccgagaactgtgggcctactgtggcagtgagcagctggacgtcgcagacctgcrcaggctgcggtacaagggcatccgcccggctcctggctaccccagccagcccgaccacaccgagaagctcaccatgtggagactcgcagacatcgagcag

SEQ ID NO: 30275 - DNA, 201 bp, Homo sapiens
accggctggcagaggcctttgcagaagagctccatgaaagagttcgccgagaactgtgggcctactgtggcagtgagcagctggacgtcgcagacctgcgmaggctgcggtacaagggcatccgcccggctcctggctaccccagccagcccgaccacaccgagaagctcaccatgtggagactcgcagacatcgagcagt

SEQ ID NO: 30276 - DNA, 201 bp, Homo sapiens
ccgcccggctcctggctaccccagccagcccgaccacaccgagaagctcaccatgtggagactcgcagacatcgagcagtctacaggcattaggttaacakaatcattagcaatggcacctgcttcagcagtctcaggcctctacttctccaatttgaagtccaaatattttgctgtggggaagatttccaaggatcaggt

SEQ ID NO: 30277 - DNA, 201 bp, Homo sapiens
atatgctgaacacactgattagtcaaaagaaactccgggcccggggtgtggttgggttctggccagcacagagtatccaagacgacattcacctgtacgcrgaggctgctgtgccccaggctgcagagcccatagccaccttctatgggttaaggcaacaggctgagaaggactctgccagcacggagccatactactgcc

SEQ ID NO: 30278 - DNA, 201 bp, Homo sapiens
aggattatggtgctggatggagggatggggaccatgatccagcgggagaagctaaacgaagaacacttccgaggtcaggaatttaaagatcatgccaggcygctgaaaggcaacaatgacattttaagtataactcagcctgatgtcatttaccaaatccataaggaatacttgctggctggggcagatatcattgaaaca

SEQ ID NO: 30279 - DNA, 201 bp, Homo sapiens
atgtggagactcgcagacatcgagcagtctacaggcattaggttaacagaatcattagcaatggcacctgcttcagcagtctcaggcctctacttctccartttgaagtccaaatattttgctgtggggaagatttccaaggatcaggttgaggattatgcattgaggaagaacatatctgtggctgaggttgagaaatgg

SEQ ID NO: 30280 - DNA, 201 bp, Homo sapiens
ctctctgcccgccagtgccttacaatttgcaaacgtgtatagcctcagtgactcattcgctgaaatccttcgctttaccaaatctagacatacataagggrctttctctcccttttcagccctctctgtgcagagaaaagatgtgagtccgcttgatgaattctaatgctttgcttagagctatgagaaatgtttgtttta

SEQ ID NO: 30281 - DNA, 201 bp, Homo sapiens
ggcaatgcttgtgtgattcacaatcgtggcatttaaagtgcacaaagtacaaaggaatttatacagattgggtttaccgaagtataatctataggaggcgygatggcaagttgataaaatgtgacttatctcctaataagttatggtgggagtggagctgtgcggtttcctgtgtcttctggggtctgagtgaagatagca

SEQ ID NO: 30282 - DNA, 201 bp, Homo sapiens
gtttaccgaagtataatctataggaggcgcgatggcaagttgataaaatgtgacttatctcctaataagttatggtgggagtggagctgtgcggtttcctrtgtcttctggggtctgagtgaagatagcagggatgctgtgttcacccttcttggtagaagctaaggtgtgagctgggaggttgctggacaggatggggga

SEQ ID NO: 30283 - DNA, 201 bp, Homo sapiens
taaaatgtgacttatctcctaataagttatggtgggagtggagctgtgcggtttcctgtgtcttctggggtctgagtgaagatagcagggatgctgtgttyacccttcttggtagaagctaaggtgtgagctgggaggttgctggacaggatgggggaccccagaagtcctttatctgtgctctctgcccgccagtgcctt

SEQ ID NO: 30284 - DNA, 201 bp, Homo sapiens
agactttctactatgcggaagactaccaccagcagtacctgagcaagaaccccaatggctactgcggccttgggggcaccggcgtgtcctgcccagtgggyattaaaaaataattgctccccacatggtgggcctttgaggttccagtaaaaatgctttcaacaaattgggcaatgcttgtgtgattcacaatcgtggcat

SEQ ID NO: 30285 - DNA, 201 bp, Homo sapiens
tttatctgtgctctctgcccgccagtgccttacaatttgcaaacgtgtatagcctcagtgactcattcgctgaaatccttcgctttaccaaatctagacawacataaggggctttctctcccttttcagccctctctgtgcagagaaaagatgtgagtccgcttgatgaattctaatgctttgcttagagctatgagaaat

SEQ ID NO: 30286 - DNA, 201 bp, Homo sapiens
cggaagactaccaccagcagtacctgagcaagaaccccaatggctactgcggccttgggggcaccggcgtgtcctgcccagtgggtattaaaaaataattkctccccacatggtgggcctttgaggttccagtaaaaatgctttcaacaaattgggcaatgcttgtgtgattcacaatcgtggcatttaaagtgcacaaag

SEQ ID NO: 30287 - DNA, 201 bp, Homo sapiens
tcaaagcccgaccaccacgagaggagcacttagaactcctgggcccaatgattcatgctgaggtgggcaacaccgtcctgatcatatttaagaacaaagcyagtaggccctactccatctcagcccagggtgtggaggagatggatagtggaaagcaattccaagtgcccatgacaaaaccaggagaagtaaaaacttata

SEQ ID NO: 30288 - DNA, 201 bp, Homo sapiens
ccaggtcagcgaccacctacaagctggtatgctggggcaatacaatgttgataactgcaaaagtgatattttctaccccaagatgaagggtcaacagaggygctactttatagcagctgaaaaaattctttgggattatgctcctcaaggctataacaaattcagtggtcttcctctaaacgcctctggcagtgactctga

SEQ ID NO: 30289 - DNA, 201 bp, Homo sapiens
gacacggaatgatgtggatcgagagtttgttataatgtttactcttgtggatgagaatcaaagctggtacctcaatgaaaatatcaaacatttctgcaccraccctgattcagttgacaagaaagatgctgttttccagaggagtaacaaaatgcatgccctcaatggatacctcttcggaaacttcccggagcctgatat

SEQ ID NO: 30290 - DNA, 201 bp, Homo sapiens
aggcatctgatgcagccccaaacctagatggatttgtgaaaccaggggcgcatgttaaaccaggtgaaaccttcacatacaagtggacagtgcctgagagygtaagcccaactgctggtgatcctccctgtctgacctatctttacttctcagcagttgatccaattaaggacaccagctctggcctggtagggcctttgc

SEQ ID NO: 30291 - DNA, 201 bp, Homo sapiens
tgcaaaagtgatattttctaccccaagatgaagggtcaacagaggcgctactttatagcagctgaaaaaattctttgggattatgctcctcaaggctatarcaaattcagtggtcttcctctaaacgcctctggcagtgactctgatctctacttcacacaaggggacaacagaataggaggaaaatactggaaggttcgg

SEQ ID NO: 30292 - DNA, 201 bp, Homo sapiens
tctcggccaccatgacagacgaggtgaaagatctggcttctgtctccttgaagaatcctgtccggatatttgtgaacagcaacacagatgtggctcccttyctgcggcaggagttcatccggatccggcctaatcgtgaaggagaccgggaagccatcgtggcagctttgttgacgaggaccttcactgaccatgtgatgc

SEQ ID NO: 30293 - DNA, 201 bp, Homo sapiens
agaggagctggttccagaccaaagaagagaggaagaaggagaaaaaggaaaggtctcagtttgaaatcctcaaggcgcagatgtttgctgaacggctagcraagaggaatcgcagagccaagcgggcccgagcaatgcccgaggaggagccagtgagaggtcctgccaagaagcaaaagcaggggaagaaatctgtatttg

SEQ ID NO: 30294 - DNA, 201 bp, Homo sapiens
gaagcaggcccaccgcatgcacatcctcctggggctcatggggctgcaggtgggtgagctccatggcaacttgtcacagacgcagcggctggaggccctcyggcgttttaaggatgaacagattgacatcctcgtggccactgatgtggcagcccgtggacttgacattgagggggtcaaaacggtaatcaacttcacaat

SEQ ID NO: 30295 - DNA, 201 bp, Homo sapiens
gagaggagctggttccagaccaaagaagagaggaagaaggagaaaaaggaaaggtctcagtttgaaatcctcaaggcgcagatgtttgctgaacggctagygaagaggaatcgcagagccaagcgggcccgagcaatgcccgaggaggagccagtgagaggtcctgccaagaagcaaaagcaggggaagaaatctgtattt

SEQ ID NO: 30296 - DNA, 201 bp, Homo sapiens
agtgagaggtcctgccaagaagcaaaagcaggggaagaaatctgtatttgatgaagaactcaccaacacaagcaagaaggccctgaaacagtatcgagctrgcccttcctttgaagaaaggaaacagttgggcttgccccaccagagacgaggaggaaactttaaatctaaatccagatacaagaggaggaagtagctgtc

SEQ ID NO: 30297 - DNA, 201 bp, Homo sapiens
gcttcaagcagcccaccccgatccagaaggcgtgcatacctgtgggtctattggggaaggacatctgtgcctgtgcagccactgggacaggtaaaactgcygcctttgccctgcctgttttggagcgtctgatttataaaccccgccaggctccagtcacccgcgtgctggtgctagtgcccacccgagagctgggcatcc

SEQ ID NO: 30298 - DNA, 201 bp, Homo sapiens
actgactactcatcagctgatgagaacatcctcaccaaagcagatacactcaaagtaaaggatcggaagaagaagaagaagaaaggacaggaagcaggagkattttttgaagatgcatctcagtacgatgaaaacctctcgttccaggacatgaacctttcccgccctcttctgaaggccattacagccatgggcttcaag

SEQ ID NO: 30299 - DNA, 201 bp, Homo sapiens
agaagtttatgaaggatgccaaaaaaaagggggagatgacagcagaggaaaggtctcagtttgaaatcctcaaggcgcagatgtttgctgaacggctagcraagaggaatcgcagagccaagcgggcccgagcaatgcccgaggaggagccagtgagaggtcctgccaagaagcaaaagcaggggaagaaatctgtatttg

SEQ ID NO: 30300 - DNA, 201 bp, Homo sapiens
aaggaaaacagagcgcatgcacatcctcctggggctcatggggctgcaggtgggtgagctccatggcaacttgtcacagacgcagcggctggaggccctcyggcgttttaaggatgaacagattgacatcctcgtggccactgatgtggcagcccgtggacttgacattgagggggtcaaaacggtaatcaacttcacaat

SEQ ID NO: 30301 - DNA, 201 bp, Homo sapiens
aagaagtttatgaaggatgccaaaaaaaagggggagatgacagcagaggaaaggtctcagtttgaaatcctcaaggcgcagatgtttgctgaacggctagygaagaggaatcgcagagccaagcgggcccgagcaatgcccgaggaggagccagtgagaggtcctgccaagaagcaaaagcaggggaagaaatctgtattt

SEQ ID NO: 30302 - DNA, 201 bp, Homo sapiens; identical to SEQ ID NO: 30296

SEQ ID NO: 30303 - DNA, 201 bp, Homo sapiens; identical to SEQ ID NO: 30292

SEQ ID NO: 30304 - DNA, 201 bp, Homo sapiens; identical to SEQ ID NO: 30299

SEQ ID NO: 30305 - DNA, 201 bp, Homo sapiens; identical to SEQ ID NO: 30294

SEQ ID NO: 30306 - DNA, 201 bp, Homo sapiens; identical to SEQ ID NO: 30301

SEQ ID NO: 30307 - DNA, 201 bp, Homo sapiens; identical to SEQ ID NO: 30296

SEQ ID NO: 30308 - DNA, 201 bp, Homo sapiens; identical to SEQ ID NO: 30297

SEQ ID NO: 30309 - DNA, 201 bp, Homo sapiens; identical to SEQ ID NO: 30298

SEQ ID NO: 30310 - DNA, 201 bp, Homo sapiens
agcaaattaaaatatgctttgattcatacttaaacctgaaagcaggaatgcctacattaattcctacattaaaaacagccatctacccttgattatctagwaagacttggtaatgatggtcagttccttttagatttcagaaaatcaaatgatgacctaaatttcccttaatttgcaaatacagtagtaattaaggtacat

SEQ ID NO: 30311 - DNA, 201 bp, Homo sapiens
tgactgccattagaaatgctactggtcctcgtcctgctttatttgtgcctgaggtttcatttgagttactggtgaagcggcaaatcaaacgtctagaagakcccagcctccgctgtgtggaactggttcatgaggaaatgcaaaggatcattcagcactgtagcaattacagtacacaggaattgttacgatttcctaaac

SEQ ID NO: 30312 - DNA, 201 bp, Homo sapiens
tcataaacaagctccaggacgtcttcaacacggtgggcgccgacatcatccagctgcctcaaatcgtcgtagtgggaacgcagagcagcggaaagagctcmgtgctagaaagcctggtggggagggacctgcttcccagaggtactggaattgtcacccggagacctctcattctgcaactggtccatgtttcacaagaag

SEQ ID NO: 30313 - DNA, 201 bp, Homo sapiens
cttggtggccttaacactattgacattttgactgccattagaaatgctactggtcctcgtcctgctttatttgtgcctgaggtttcatttgagttactggkgaagcggcaaatcaaacgtctagaagagcccagcctccgctgtgtggaactggttcatgaggaaatgcaaaggatcattcagcactgtagcaattacagt

SEQ ID NO: 30314 - DNA, 201 bp, Homo sapiens
gaaagagctcagtgctagaaagcctggtggggagggacctgcttcccagaggtactggaattgtcacccggagacctctcattctgcaactggtccatgtktcacaagaagataaacggaaaacaacaggagaagaaaatggggtggaagcagaagaatggggtaaatttcttcacaccaaaaataagctttacacggatt

SEQ ID NO: 30315 - DNA, 201 bp, Homo sapiens
aagaagcagctgatatgctaaaggcattacaaggagccagtcaaattattgctgaaatccgggagactcatctttggtgaagagaactatgtaatactgasactttgttgactcaaaacttgctagttactgcctacctgagtagaatcttatttatgaactcctgtgtattgcaatggtatgaatctgctcatgtggaga

SEQ ID NO: 30316 - DNA, 201 bp, Homo sapiens
agaagcagctgatatgctaaaggcattacaaggagccagtcaaattattgctgaaatccgggagactcatctttggtgaagagaactatgtaatactgagwctttgttgactcaaaacttgctagttactgcctacctgagtagaatcttatttatgaactcctgtgtattgcaatggtatgaatctgctcatgtggagac

SEQ ID NO: 30317 - DNA, 201 bp, Homo sapiens
ttcccagaggtactggaattgtcacccggagacctctcattctgcaactggtccatgtttcacaagaagataaacggaaaacaacaggagaagaaaatggrgtggaagcagaagaatggggtaaatttcttcacaccaaaaataagctttacacggattttgatgaaattcgacaagaaattgaaaatgaaacagaaagaa

SEQ ID NO: 30318 - DNA, 201 bp, Homo sapiens
atccatctctggccaatagaaatggaacaaagtatcttgctaggactctaaacaggttactgatgcatcacatcagagattgtttaccagagttgaaaacragaataaatgttctagctgctcagtatcagtctcttctaaatagctacggtgaacccgtggatgataaaagtgctactttactccaacttattaccaaat

SEQ ID NO: 30319 - DNA, 201 bp, Homo sapiens
tttaatccaaataataaatggctgtttctaaagtttcccagtatatataaaatacatcaagtctgtcttgtgacagtttcatctgaacttaacttaaaaasaactgttaatgttctagttgtgcaaagcagtttgcctgtggataagatgacctgtgtaataatctttgttagtagtcttaaagctgctgccatagtcctc

SEQ ID NO: 30320 - DNA, 201 bp, Homo sapiens
atttagttttttctgagcttctttgcagcctttgatgtgtttttaagaaagctgaatgcacaagaggatctgtgacactgacatggctgtggtgtgcataytgtgtagttacatagcccttccaattctgggtccatttgcactagcaaattaaaatatgctttgattcatacttaaacctgaaagcaggaatgcctacat

SEQ ID NO: 30321 - DNA, 201 bp, Homo sapiens
attgctgaaatccgggagactcatctttggtgaagagaactatgtaatactgagactttgttgactcaaaacttgctagttactgcctacctgagtagaakcttatttatgaactcctgtgtattgcaatggtatgaatctgctcatgtggagactggctataaactgaaaagtgtattccaaattgcagaacacatcaca

SEQ ID NO: 30322 - DNA, 201 bp, Homo sapiens; identical to SEQ ID NO: 30310

SEQ ID NO: 30323 - DNA, 201 bp, Homo sapiens; identical to SEQ ID NO: 30311

SEQ ID NO: 30324 - DNA, 201 bp, Homo sapiens; identical to SEQ ID NO: 30312

SEQ ID NO: 30325 - DNA, 201 bp, Homo sapiens; identical to SEQ ID NO: 30313

SEQ ID NO: 30326 - DNA, 201 bp, Homo sapiens; identical to SEQ ID NO: 30314

SEQ ID NO: 30327 - DNA, 201 bp, Homo sapiens; identical to SEQ ID NO: 30315

SEQ ID NO: 30328 - DNA, 201 bp, Homo sapiens; identical to SEQ ID NO: 30316

SEQ ID NO: 30329 - DNA, 201 bp, Homo sapiens; identical to SEQ ID NO: 30317

SEQ ID NO: 30330 - DNA, 201 bp, Homo sapiens; identical to SEQ ID NO: 30318

SEQ ID NO: 30331 - DNA, 201 bp, Homo sapiens; identical to SEQ ID NO: 30319

SEQ ID NO: 30332 - DNA, 201 bp, Homo sapiens; identical to SEQ ID NO: 30320

SEQ ID NO: 30333 - DNA, 201 bp, Homo sapiens; identical to SEQ ID NO: 30321

SEQ ID NO: 30334 - DNA, 201 bp, Homo sapiens; identical to SEQ ID NO: 30310

SEQ ID NO: 30335 - DNA, 201 bp, Homo sapiens; identical to SEQ ID NO: 30311

SEQ ID NO: 30336 - DNA, 201 bp, Homo sapiens; identical to SEQ ID NO: 30312

SEQ ID NO: 30337 - DNA, 201 bp, Homo sapiens; identical to SEQ ID NO: 30313

SEQ ID NO: 30338 - DNA, 201 bp, Homo sapiens; identical to SEQ ID NO: 30314

SEQ ID NO: 30339 - DNA, 201 bp, Homo sapiens; identical to SEQ ID NO: 30315

SEQ ID NO: 30340 - DNA, 201 bp, Homo sapiens; identical to SEQ ID NO: 30316

SEQ ID NO: 30341 - DNA, 201 bp, Homo sapiens
acatactccttcagacttacagacctaagctgcatttatggggtagtgatgaggtttagaacatatacatattttgttaaaattccccagatgattcttgktatgaacgactatattataaattttaagatgtacttagaaatccttaagacatctagccccgtctctaatagacaacacatttatattgcagatattact

SEQ ID NO: 30342 - DNA, 201 bp, Homo sapiens; identical to SEQ ID NO: 30317

SEQ ID NO: 30343 - DNA, 201 bp, Homo sapiens; identical to SEQ ID NO: 30318

SEQ ID NO: 30344 - DNA, 201 bp, Homo sapiens; identical to SEQ ID NO: 30319

SEQ ID NO: 30345 - DNA, 201 bp, Homo sapiens; identical to SEQ ID NO: 30320

SEQ ID NO: 30346 - DNA, 201 bp, Homo sapiens; identical to SEQ ID NO: 30321

SEQ ID NO: 30347 - DNA, 201 bp, Homo sapiens; identical to SEQ ID NO: 30310

SEQ ID NO: 30348 - DNA, 201 bp, Homo sapiens; identical to SEQ ID NO: 30311

SEQ ID NO: 30349 - DNA, 201 bp, Homo sapiens; identical to SEQ ID NO: 30312

SEQ ID NO: 30350 - DNA, 201 bp, Homo sapiens; identical to SEQ ID NO: 30313

SEQ ID NO: 30351 - DNA, 201 bp, Homo sapiens; identical to SEQ ID NO: 30314

SEQ ID NO: 30352 - DNA, 201 bp, Homo sapiens; identical to SEQ ID NO: 30315

SEQ ID NO: 30353 - DNA, 201 bp, Homo sapiens; identical to SEQ ID NO: 30316

SEQ ID NO: 30354 - DNA, 201 bp, Homo sapiens; identical to SEQ ID NO: 30341

SEQ ID NO: 30355 - DNA, 201 bp, Homo sapiens; identical to SEQ ID NO: 30317

SEQ ID NO: 30356 - DNA, 201 bp, Homo sapiens; identical to SEQ ID NO: 30318

SEQ ID NO: 30357 - DNA, 201 bp, Homo sapiens; identical to SEQ ID NO: 30319

SEQ ID NO: 30358 - DNA, 201 bp, Homo sapiens; identical to SEQ ID NO: 30320

SEQ ID NO: 30359 - DNA, 201 bp, Homo sapiens; identical to SEQ ID NO: 30321

SEQ ID NO: 30360 - DNA, 201 bp, Homo sapiens; identical to SEQ ID NO: 30310

SEQ ID NO: 30361 - DNA, 201 bp, Homo sapiens; identical to SEQ ID NO: 30311

SEQ ID NO: 30362 - DNA, 201 bp, Homo sapiens; identical to SEQ ID NO: 30312

SEQ ID NO: 30363 - DNA, 201 bp, Homo sapiens; identical to SEQ ID NO: 30313

SEQ ID NO: 30364 - DNA, 201 bp, Homo sapiens; identical to SEQ ID NO: 30314

SEQ ID NO: 30365 - DNA, 201 bp, Homo sapiens; identical to SEQ ID NO: 30315

SEQ ID NO: 30366 - DNA, 201 bp, Homo sapiens; identical to SEQ ID NO: 30316

SEQ ID NO: 30367 - DNA, 201 bp, Homo sapiens; identical to SEQ ID NO: 30341

SEQ ID NO: 30368 - DNA, 201 bp, Homo sapiens; identical to SEQ ID NO: 30317

SEQ ID NO: 30369 - DNA, 201 bp, Homo sapiens; identical to SEQ ID NO: 30318

SEQ ID NO: 30370 - DNA, 201 bp, Homo sapiens; identical to SEQ ID NO: 30319

SEQ ID NO: 30371 - DNA, 201 bp, Homo sapiens; identical to SEQ ID NO: 30320

SEQ ID NO: 30372 - DNA, 201 bp, Homo sapiens; identical to SEQ ID NO: 30321

SEQ ID NO: 30373 - DNA, 201 bp, Homo sapiens; identical to SEQ ID NO: 30310

SEQ ID NO: 30374 - DNA, 201 bp, Homo sapiens; identical to SEQ ID NO: 30311

SEQ ID NO: 30375 - DNA, 201 bp, Homo sapiens; identical to SEQ ID NO: 30312

SEQ ID NO: 30376 - DNA, 201 bp, Homo sapiens; identical to SEQ ID NO: 30313

SEQ ID NO: 30377 - DNA, 201 bp, Homo sapiens; identical to SEQ ID NO: 30314

SEQ ID NO: 30378 - DNA, 201 bp, Homo sapiens; identical to SEQ ID NO: 30315

SEQ ID NO: 30379 - DNA, 201 bp, Homo sapiens; identical to SEQ ID NO: 30316

SEQ ID NO: 30380 - DNA, 201 bp, Homo sapiens; identical to SEQ ID NO: 30317

SEQ ID NO: 30381 - DNA, 201 bp, Homo sapiens; identical to SEQ ID NO: 30318

SEQ ID NO: 30382 - DNA, 201 bp, Homo sapiens; identical to SEQ ID NO: 30319

SEQ ID NO: 30383 - DNA, 201 bp, Homo sapiens; identical to SEQ ID NO: 30320

SEQ ID NO: 30384 - DNA, 201 bp, Homo sapiens; identical to SEQ ID NO: 30321

SEQ ID NO: 30385 - DNA, 201 bp, Homo sapiens; identical to SEQ ID NO: 30315

SEQ ID NO: 30386 - DNA, 201 bp, Homo sapiens; identical to SEQ ID NO: 30316

SEQ ID NO: 30387 - DNA, 201 bp, Homo sapiens; identical to SEQ ID NO: 30341

SEQ ID NO: 30388 - DNA, 201 bp, Homo sapiens; identical to SEQ ID NO: 30318

SEQ ID NO: 30389 - DNA, 201 bp, Homo sapiens; identical to SEQ ID NO: 30319

SEQ ID NO: 30390 - DNA, 201 bp, Homo sapiens; identical to SEQ ID NO: 30320

SEQ ID NO: 30391 - DNA, 201 bp, Homo sapiens; identical to SEQ ID NO: 30321

SEQ ID NO: 30392 - DNA, 201 bp, Homo sapiens; identical to SEQ ID NO: 30310

SEQ ID NO: 30393 - DNA, 201 bp, Homo sapiens; identical to SEQ ID NO: 30311

SEQ ID NO: 30394 - DNA, 201 bp, Homo sapiens; identical to SEQ ID NO: 30313

SEQ ID NO: 30395 - DNA, 102 bp, Homo sapiens
grgtggaagcagaagaatggggtaaatttcttcacaccaaaaataagctttacacggattttgatgaaattcgacaagaaattgaaaatgaaacagaaagaa

SEQ ID NO: 30396 - DNA, 201 bp, Homo sapiens; identical to SEQ ID NO: 30310

SEQ ID NO: 30397 - DNA, 201 bp, Homo sapiens; identical to SEQ ID NO: 30311

SEQ ID NO: 30398 - DNA, 201 bp, Homo sapiens; identical to SEQ ID NO: 30313

SEQ ID NO: 30399 - DNA, 201 bp, Homo sapiens; identical to SEQ ID NO: 30315

SEQ ID NO: 30400 - DNA, 201 bp, Homo sapiens; identical to SEQ ID NO: 30316

SEQ ID NO: 30401 - DNA, 142 bp, Homo sapiens
gaccctgctacatggaaaaactcaagacacctttctaaaggrgtggaagcagaagaatggggtaaatttcttcacaccaaaaataagctttacacggattttgatgaaattcgacaagaaattgaaaatgaaacagaaagaa

SEQ ID NO: 30402 - DNA, 201 bp, Homo sapiens; identical to SEQ ID NO: 30318

SEQ ID NO: 30403 - DNA, 201 bp, Homo sapiens; identical to SEQ ID NO: 30319

SEQ ID NO: 30404 - DNA, 201 bp, Homo sapiens; identical to SEQ ID NO: 30320

SEQ ID NO: 30405 - DNA, 201 bp, Homo sapiens; identical to SEQ ID NO: 30321

SEQ ID NO: 30406 - DNA, 201 bp, Homo sapiens; identical to SEQ ID NO: 30310

SEQ ID NO: 30407 - DNA, 201 bp, Homo sapiens; identical to SEQ ID NO: 30311

SEQ ID NO: 30408 - DNA, 201 bp, Homo sapiens; identical to SEQ ID NO: 30312

SEQ ID NO: 30409 - DNA, 201 bp, Homo sapiens; identical to SEQ ID NO: 30313

SEQ ID NO: 30410 - DNA, 201 bp, Homo sapiens; identical to SEQ ID NO: 30314

SEQ ID NO: 30411 - DNA, 201 bp, Homo sapiens; identical to SEQ ID NO: 30315

SEQ ID NO: 30412 - DNA, 201 bp, Homo sapiens; identical to SEQ ID NO: 30316

SEQ ID NO: 30413 - DNA, 201 bp, Homo sapiens; identical to SEQ ID NO: 30317

SEQ ID NO: 30414 - DNA, 201 bp, Homo sapiens; identical to SEQ ID NO: 30318

SEQ ID NO: 30415 - DNA, 201 bp, Homo sapiens; identical to SEQ ID NO: 30319

SEQ ID NO: 30416 - DNA, 201 bp, Homo sapiens; identical to SEQ ID NO: 30320

SEQ ID NO: 30417 - DNA, 201 bp, Homo sapiens; identical to SEQ ID NO: 30321

SEQ ID NO: 30418 - DNA, 201 bp, Homo sapiens; identical to SEQ ID NO: 30310

SEQ ID NO: 30419 - DNA, 201 bp, Homo sapiens; identical to SEQ ID NO: 30311

SEQ ID NO: 30420 - DNA, 201 bp, Homo sapiens; identical to SEQ ID NO: 30313

SEQ ID NO: 30421 - DNA, 201 bp, Homo sapiens; identical to SEQ ID NO: 30315

SEQ ID NO: 30422 - DNA, 201 bp, Homo sapiens; identical to SEQ ID NO: 30316

SEQ ID NO: 30423 - DNA, 142 bp, Homo sapiens; identical to SEQ ID NO: 30401

SEQ ID NO: 30424 - DNA, 201 bp, Homo sapiens; identical to SEQ ID NO: 30318

SEQ ID NO: 30425 - DNA, 201 bp, Homo sapiens; identical to SEQ ID NO: 30319

SEQ ID NO: 30426 - DNA, 201 bp, Homo sapiens; identical to SEQ ID NO: 30320

SEQ ID NO: 30427 - DNA, 201 bp, Homo sapiens; identical to SEQ ID NO: 30321

SEQ ID NO: 30428 - DNA, 134 bp, Homo sapiens
atgcacaccctgtggttccgggaacacaacaggrtggccacggagctgtccgccctgaacccccactgggagggaaacacggtttaccaggaagccaggaagatcgtgggcgcggagctgcagcacatcaccta

SEQ ID NO: 30429 - DNA, 201 bp, Homo sapiens
gtgagagtggccaggtcacctgtgtggtggagatttgtcccccggctccctgtcccagtcctgaattggtgaaaggaacctgctgtccagtttgcagagamcgaggaatgccaagtgattccccagagaagcgctaataaaagttttgtgctgttgagccccaaatgggaaatttctcaggaagagacatttaggacttca

SEQ ID NO: 30430 - DNA, 201 bp, Homo sapiens
gtgtggcaagactgctgtgcagactgtaggagtagaggacagttcagagcagtgacgcaagagtctcaaaagaaacgctcagctcaatacagctatcctgwtgataaggatatggagttaagtcatctaagaagtaggcaacaagataaaatatatgtgggtgaagatgctagaaatgtgacagttctggcaaaaacaaag

SEQ ID NO: 30431 - DNA, 201 bp, Homo sapiens
tgtgccgagactgtgaagtcaccaatgatggacataccattcaggttatcctgaagtcaaaatcagttctttcgggaggaccattgcctcaagggcatgartttgaactgtacgaagtgagatttcactggggaagagaaaaccagcgtggttctgagcacacggttaatttcaaagcttttcccatggaggtaagaataa

SEQ ID NO: 30432 - DNA, 201 bp, Homo sapiens
agactgtgaagtcaccaatgatggacataccattcaggttatcctgaagtcaaaatcagttctttcgggaggaccattgcctcaagggcatgaatttgaaytgtacgaagtgagatttcactggggaagagaaaaccagcgtggttctgagcacacggttaatttcaaagcttttcccatggaggtaagaataacaaatca

SEQ ID NO: 30433 - DNA, 201 bp, Homo sapiens
actgcggttcacacccggaggcgctctcgcactcacactgccgctcacgcgtgctcacactcccccacgcgcgctccgctccggctccagccccgcgcccmgcgaaggcgcaggcactgctgccgagagcgccgaggggccccgcggccttcccatggcggacctgagcttcatcgaagataccgtcgccttccccgagaa

SEQ ID NO: 30434 - DNA, 201 bp, Homo sapiens
tgtgccgagactgtgaagtcaccaatgatggacataccattcaggttatcctgaagtcaaaatcagttctttcgggaggaccattgcctcaagggcatgartttgaactgtacgaagtgagatttcactggggaagagaaaaccagcgtggttctgagcacacggttaatttcaaagcttttcccatggagctccatctga

SEQ ID NO: 30435 - DNA, 201 bp, Homo sapiens
agactgtgaagtcaccaatgatggacataccattcaggttatcctgaagtcaaaatcagttctttcgggaggaccattgcctcaagggcatgaatttgaaytgtacgaagtgagatttcactggggaagagaaaaccagcgtggttctgagcacacggttaatttcaaagcttttcccatggagctccatctgatccactg

SEQ ID NO: 30436 - DNA, 201 bp, Homo sapiens; identical to SEQ ID NO: 30433

SEQ ID NO: 30437 - DNA, 201 bp, Homo sapiens
agactcctgaatgatttagacaacttcaaaatacagaagaaaagcaaatgactagtaaacatgtgggaaaaaatattacattttaagggggaaaaaaaaamccaccattctcttctccccctattaaatttgcaacaataaagggtggagggtaatctctactttcctatactgccaaagaatgtgaggaagaaatgggac

SEQ ID NO: 30438 - DNA, 201 bp, Homo sapiens
tgggactctttggttatttattgatgcgactgtaaattggtacagtatttctggagggcaatttggtaaaatgcatcaaaagacttaaaaatacggacgtmctttgtgctgggaactctacatctagcaatttctctttaaaaccatatcagagatgcatacaaagaattatatataaagaagggtgtttaataatgatag

SEQ ID NO: 30439 - DNA, 201 bp, Homo sapiens
agactgctaagaagctaggactccggtgccactcaaaggggacaatggtcacaatcgagggacctcgttttagctcccgggcagaaagcttcatgttccgyacctggggggcggatgttatcaacatgaccacagttccagaggtggttcttgctaaggaggctggaatttgttacgcaagtatcgccatggcgacagatt

SEQ ID NO: 30440 - DNA, 201 bp, Homo sapiens
ggagttacatctttattctgctaaagaagaggatcattgatttctgtacagtcagaacagtacttgggtttgcaacagctttctgagaaaagctaggtgtwtaatagtttaactgaaagtttaactatttaaaagactaaatgcacattttatggtatctgatattttaaaaagtaatgtttgattctcctttttatgagt

SEQ ID NO: 30441 - DNA, 201 bp, Homo sapiens
ttgtatttgggggagggatactgggataatttttattttctttgaatctttctgtgtcttcacatttttctacagtgaatttaatcaaatagtaaagttgytgtaaaaataaaagtggatttagaaagatccagttcttgaaaacactgtttctggtaatgaagcagaatttaagttggtaatattaaggtgaatgtcatt

SEQ ID NO: 30442 - DNA, 201 bp, Homo sapiens
aaatatatataaccttgttattgtatttgggggagggatactgggataatttttattttctttgaatctttctgtgtcttcacatttttctacagtgaatwtaatcaaatagtaaagttgttgtaaaaataaaagtggatttagaaagatccagttcttgaaaacactgtttctggtaatgaagcagaatttaagttggta

SEQ ID NO: 30443 - DNA, 201 bp, Homo sapiens
ttctgagaaaagctaggtgtttaatagtttaactgaaagtttaactatttaaaagactaaatgcacattttatggtatctgatattttaaaaagtaatgtktgattctcctttttatgagttaaattattttatacgagttggtaatttttgctttttaataaagtggaagcttgcttttttaactctttttttattgtta

SEQ ID NO: 30444 - DNA, 201 bp, Homo sapiens
gttggtaatattaaggtgaatgtcatttaagggagttacatctttattctgctaaagaagaggatcattgatttctgtacagtcagaacagtacttgggtktgcaacagctttctgagaaaagctaggtgtttaatagtttaactgaaagtttaactatttaaaagactaaatgcacattttatggtatctgatattttaa

SEQ ID NO: 30445 - DNA, 201 bp, Homo sapiens
acttaaaaatacggacgtactttgtgctgggaactctacatctagcaatttctctttaaaaccatatcagagatgcatacaaagaattatatataaagaarggtgtttaataatgatagttataataataaataattgaaacaatctgaatcccttgcaattggaggtaaattatgtcttagttataattagattgtgaat

SEQ ID NO: 30446 - DNA, 201 bp, Homo sapiens
tgagaaaagctaggtgtttaatagtttaactgaaagtttaactatttaaaagactaaatgcacattttatggtatctgatattttaaaaagtaatgtttgmttctcctttttatgagttaaattattttatacgagttggtaatttttgctttttaataaagtggaagcttgcttttttaactctttttttattgttattt

SEQ ID NO: 30447 - DNA, 201 bp, Homo sapiens
tctgagaaaagctaggtgtttaatagtttaactgaaagtttaactatttaaaagactaaatgcacattttatggtatctgatattttaaaaagtaatgttwgattctcctttttatgagttaaattattttatacgagttggtaatttttgctttttaataaagtggaagcttgcttttttaactctttttttattgttat

SEQ ID NO: 30448 - DNA, 118 bp, Homo sapiens
gaaagcttcatgttccgyacctggggggcggatgttatcaacatgaccacagttccagaggtggttcttgctaaggaggctggaatttgttacgcaagtatcgccatggcgacagatt

SEQ ID NO: 30449 - DNA, 201 bp, Homo sapiens
cgttgcagctgagctgggaagcctatctgtgacagtgatgtggccagtgcagtactgaatggagccgactgcatcatgctgtctggagaaacagccaaagyggactatctggaggctgggcgcatgcagcacctgattgcccatgaggcagaggccaccatctaccacttgcaattatttgaggaactcccacccactggc

SEQ ID NO: 30450 - DNA, 196 bp, Homo sapiens
gtcagcactggaggacctcagcagccatgttgaagccccatagtgaagccgggactgccttcattcagacccagcagctacatgcagccacggctsacacattcctggagcacatgtgccacctggacattcacacaccacccatcccagcctggaacactggcatcatctgtaccattagcccagcttcccaatc

SEQ ID NO: 30451 - DNA, 201 bp, Homo sapiens
acagccacggaaagctttgctgctgaccccatcctctaccggcctgttgctttggctctggatactaaaggacctgagatccgaactgggctcatcaaggrcagcagcaccatggaggtggggctgaagatgggagccactctcaaaatcatgctggataacacctacatgaaaaagtgtgacgagaacatcctgtggctg

SEQ ID NO: 30452 - DNA, 201 bp, Homo sapiens
gtgcggtgatggaccccaaagcccctgctccagcgcctgtcccacctcctttccccgaaccatccattaggccaacaacgcttgggccttagggcacaggrcagttcttccatttaagtactctggcctgacccttacttgcttccccaaacccctgggcctccccaatttgcgcctgtccccaccctccactcagctgtc

SEQ ID NO: 30453 - DNA, 201 bp, Homo sapiens
agccaggcagctgtgtacagtgagaagggatccggatgggggagctctgtacagagggctggtgattgtaaaaatttcttttgtaaagtagaagttggggstggggtgggtgctggctgcaaaaatttctggcttctcttacccctattgcccccggcaataaattgtttctatatgccagagccatgcaaagttcttggt

SEQ ID NO: 30454 - DNA, 201 bp, Homo sapiens
atctcatcaactactacaagggccagtacatcctcacactgtcagaggacatcgtggatggccatgagcgggccatgctcaagcggctcctgcggatcgamtccaagtgtctgcacttcactcccaaggactggagcaagagggggaagtggtgaccagacactgcccactgcagtgccaagacggcagcaggactggggc

SEQ ID NO: 30455 - DNA, 201 bp, Homo sapiens; identical to SEQ ID NO: 30453

SEQ ID NO: 30456 - DNA, 201 bp, Homo sapiens; identical to SEQ ID NO: 30454

SEQ ID NO: 30457 - DNA, 201 bp, Homo sapiens; identical to SEQ ID NO: 30453

SEQ ID NO: 30458 - DNA, 201 bp, Homo sapiens; identical to SEQ ID NO: 30454

SEQ ID NO: 30459 - DNA, 201 bp, Homo sapiens
agacaaagtatgtgatttttaagatccctgccacagtaccagagggcaagaagcaggggaagagcccctggaagcacacagaggtgttctgctccatcccrtcccgctccctgctctccccaagctactaccacagctttggagtcaccgagaactatgtcatcttccttgagcagcctttcaggttggatattctcaaga

SEQ ID NO: 30460 - DNA, 201 bp, Homo sapiens
gccacagtaccagagggcaagaagcaggggaagagcccctggaagcacacagaggtgttctgctccatcccatcccgctccctgctctccccaagctactmccacagctttggagtcaccgagaactatgtcatcttccttgagcagcctttcaggttggatattctcaagatggcaaccgcatacatccggagtatgagc

SEQ ID NO: 30461 - DNA, 201 bp, Homo sapiens
atataatatttggcaggaataggaaagaacagctggagcctgtgagggccaaagtgacaggcaagattccagcatggctgcagggaaccctgctccgcaaygggcctgggatgcacacagttggggagtccagatacaaccattggttcgacggccttgccctgctccacagcttcaccatcagagacggtgaagtctatt

SEQ ID NO: 30462 - DNA, 201 bp, Homo sapiens
ttgtggtgtctgagtttggaacaatggcctatccggacccctgcaaaaacatattttccaaagctttctcctacttgtctcacaccatccccgatttcacmgacaactgcctgatcaacatcatgaagtgcggagaagacttctacgcgacctcagagaccaattacatcaggaaaatcaacccacagactctggaaaccc

SEQ ID NO: 30463 - DNA, 201 bp, Homo sapiens
tcacctcggtccccaccctcaggaggtttgccgtgcccctccacgtggacaaggtaatggcttccaaggaggtcccttttctttctagagagatatcggcycaggtgggaagttactttggcccttatttgattgacattgaaatccaaatgaactgttcttgaaaaaaaaaaaagttttcattgtttttcccaaagtagt

SEQ ID NO: 30464 - DNA, 201 bp, Homo sapiens
gctactaccacagctttggagtcaccgagaactatgtcatcttccttgagcagcctttcaggttggatattctcaagatggcaaccgcatacatccggagwatgagctgggcctcctgcctggctttccacagggaggagaagacttatatccacatcatcgaccaaaggaccaggcagcctgtgcagaccaagttttaca

SEQ ID NO: 30465 - DNA, 201 bp, Homo sapiens; identical to SEQ ID NO: 30459

SEQ ID NO: 30466 - DNA, 201 bp, Homo sapiens; identical to SEQ ID NO: 30460

SEQ ID NO: 30467 - DNA, 201 bp, Homo sapiens; identical to SEQ ID NO: 30461

SEQ ID NO: 30468 - DNA, 201 bp, Homo sapiens; identical to SEQ ID NO: 30462

SEQ ID NO: 30469 - DNA, 201 bp, Homo sapiens
gagaactccaggctcacctcggtccccaccctcaggaggtttgccgtgcccctccacgtggacaagaatgcagaagtgggcacaaatttaatcaaagtggyatctacaacagccacggccctgaaggaagaagatggccaagtctactgccagccggaatttctttatgaaggcttagagcttccacgggtcaattatgct

SEQ ID NO: 30470 - DNA, 201 bp, Homo sapiens
gaactccatggatatgtttctttggatggaggggagggcctttgttaccttttgcacttattctttctgtgggtgctttgacaagggcatggcaagagagmttgtcagtatcatttctttcattttattttggctgtaaaaattttgtttgaaagtcaaacatttgaacatcaaatatgtattgattagatccagtccttc

SEQ ID NO: 30471 - DNA, 201 bp, Homo sapiens
ccaccctcaggaggtttgccgtgcccctccacgtggacaagaatgcagaagtgggcacaaatttaatcaaagtggcatctacaacagccacggccctgaargaagaagatggccaagtctactgccagccggaatttctttatgaaggcttagagcttccacgggtcaattatgctcacaatggaaagcaataccgatatg

SEQ ID NO: 30472 - DNA, 201 bp, Homo sapiens; identical to SEQ ID NO: 30464

SEQ ID NO: 30473 - DNA, 201 bp, Homo sapiens
ggccgggatttcactggcaaagtggttgtggtcactggagctaattcaggaatagggttcgaaaccgccaagtcttttgccctccatggtgcacatgtgaycttggcctgcaggaacatggcaagggcgagtgaagcagtgtcacgcattttagaagaatggcataaagccaaggtagaaacaatgaccctggacctcgct

SEQ ID NO: 30474 - DNA, 201 bp, Homo sapiens
ccgctcagctcctgcccgtgtcattgtggtctcctcagagtcccatcgatttacagatattaacgactccttgggaaaactggacttcagtcgcctctctscaacaaaaaacgactattgggcgatgctggcttataacaggtccaagctctgcaacatcctcttctccaacgagctgcaccgtcgcctctccccacgcgg

SEQ ID NO: 30475 - DNA, 201 bp, Homo sapiens
tgttttgtgccgctcagctcctgcccgtgtcattgtggtctcctcagagtcccatcgatttacagatattaacgactccttgggaaaactggacttcagtygcctctctccaacaaaaaacgactattgggcgatgctggcttataacaggtccaagctctgcaacatcctcttctccaacgagctgcaccgtcgcctctc

SEQ ID NO: 30476 - DNA, 201 bp, Homo sapiens
gtcgggccccgacgcgcgcgggtctcgtttggagcgggagtgagttcctgagcgagtggacccggcagcgggcgataggggggccaggtgcctccacagtyagccatggcagcgctgcgctacgcggggctggacgacacggacagtgaggacgagctgcctccgggctgggaggagagaaccaccaaggacggctgggtt

SEQ ID NO: 30477 - DNA, 201 bp, Homo sapiens
gctcctccaggatgttttgtgccgctcagctcctgcccgtgtcattgtggtctcctcagagtcccatcgatttacagatattaacgactccttgggaaaastggacttcagtcgcctctctccaacaaaaaacgactattgggcgatgctggcttataacaggtccaagctctgcaacatcctcttctccaacgagctgca

SEQ ID NO: 30478 - DNA, 201 bp, Homo sapiens
cctacttggacccaagactggcgtttactgtggatgataatccgaccaagccaaccacccggcaaagatacgacggcagcaccactgccatggaaattctscagggccgggatttcactggcaaagtggttgtggtcactggagctaattcaggaatagggttcgaaaccgccaagtcttttgccctccatggtgcacatg

SEQ ID NO: 30479 - DNA, 201 bp, Homo sapiens
caagaaactgatgagaacggacaagtgttttttgttgaccatataaataaaagaaccacctacttggacccaagactggcgtttactgtggatgataatcygaccaagccaaccacccggcaaagatacgacggcagcaccactgccatggaaattctccagggccgggatttcactggcaaagtggttgtggtcactgga

SEQ ID NO: 30480 - DNA, 201 bp, Homo sapiens
ggacctcgctctgctccgtagcgtgcagcattttgctgaagcattcaaggccaagaatgtgcctcttcatgtgcttgtgtgcaacgcagcaacttttgctstaccctggagtctcaccaaagatggcctggagaccacctttcaagtgaatcatctggggcacttctaccttgtccagctcctccaggatgttttgtgccg

SEQ ID NO: 30481 - DNA, 201 bp, Homo sapiens
cctccatggtgcacatgtgatcttggcctgcaggaacatggcaagggcgagtgaagcagtgtcacgcattttagaagaatggcataaagccaaggtagaarcaatgaccctggacctcgctctgctccgtagcgtgcagcattttgctgaagcattcaaggccaagaatgtgcctcttcatgtgcttgtgtgcaacgcagc

SEQ ID NO: 30482 - DNA, 201 bp, Homo sapiens
atcgatttacagatattaacgactccttgggaaaactggacttcagtcgcctctctccaacaaaaaacgactattgggcgatgctggcttataacaggtcsaagctctgcaacatcctcttctccaacgagctgcaccgtcgcctctccccacgcggggtcacgtcgaacgcagtgcatcctggaaatatgatgtactcca

SEQ ID NO: 30483 - DNA, 201 bp, Homo sapiens
tctccaacaaaaaacgactattgggcgatgctggcttataacaggtccaagctctgcaacatcctcttctccaacgagctgcaccgtcgcctctccccacrcggggtcacgtcgaacgcagtgcatcctggaaatatgatgtactccaacattcatcgcagctggtgggtgtacacactgctgtttaccttggcgaggcct

SEQ ID NO: 30484 - DNA, 201 bp, Homo sapiens
tgccatacggatgggaacaagaaactgatgagaacggacaagtgttttttgttgaggttcgaaaccgccaagtcttttgccctccatggtgcacatgtgaycttggcctgcaggaacatggcaagggcgagtgaagcagtgtcacgcattttagaagaatggcataaagccaaggtagaaacaatgaccctggacctcgct

SEQ ID NO: 30485 - DNA, 201 bp, Homo sapiens; identical to SEQ ID NO: 30474

SEQ ID NO: 30486 - DNA, 201 bp, Homo sapiens; identical to SEQ ID NO: 30475

SEQ ID NO: 30487 - DNA, 201 bp, Homo sapiens; identical to SEQ ID NO: 30476

SEQ ID NO: 30488 - DNA, 201 bp, Homo sapiens; identical to SEQ ID NO: 30477

SEQ ID NO: 30489 - DNA, 201 bp, Homo sapiens; identical to SEQ ID NO: 30480

SEQ ID NO: 30490 - DNA, 201 bp, Homo sapiens; identical to SEQ ID NO: 30482

SEQ ID NO: 30491 - DNA, 201 bp, Homo sapiens; identical to SEQ ID NO: 30481

SEQ ID NO: 30492 - DNA, 201 bp, Homo sapiens; identical to SEQ ID NO: 30483

SEQ ID NO: 30493 - DNA, 201 bp, Homo sapiens
tgtatgttggaagaactcaagaagtggtactctgctcctccgatctggaggattccatgggaagggagtcgttggtcttttcaaatctcagaactcccctsaggccgctcctacctcctctttagaatcttccagtagcatagaacaagagaaatacttgcaagccttactgaatgctgtttctgtccatcagaaactcag

SEQ ID NO: 30494 - DNA, 201 bp, Homo sapiens
tgccaaaaaaggagtctgtatttgggaatgtattgacagaatgcacaagaggagtcccattttctttaattatttatattcaccattggaaatagaggctytaaagcccaatgtaaacgtctctagcctcaagaagtgggattactacatagaagagaccctgtccacaggcccttcctatgactggatgatgctaacccc

SEQ ID NO: 30495 - DNA, 201 bp, Homo sapiens
tctccaacatccttcattgatgttggcgcccggctggcaggcaaggatcactcggcctccttcagtaacagcagctacctacaaaaccagctcttgaaacrgcaagcagccctttacatatttggtgaaaagtcgcaactaaggaacttcaaggtagaatttgctttaaattgtgagtttgttcctgttgaatttcatgaa

SEQ ID NO: 30496 - DNA, 201 bp, Homo sapiens
cacctgctcactcaccaccagctgggctccgcctgggcctgcccggcacccaccccggccaccaagggcagcagcttttccagaatttggctggcaggccyagtcaccccacctcgccacctcaccactgcacctcggaggccagccctgtccactccactctgtgcctggcttctcttgcctgccttgggccttcgtgtg

SEQ ID NO: 30497 - DNA, 201 bp, Homo sapiens
cacgaggccatcgcccacctgctggagacacacctcattgctgaggccttctgcctggccttgctgaggaacctgcccatgtgccaccccctctacaagcycctcatcccccatacccgatacaccgtccagatcaacagcattggccgggccgttctcctcaatgagggggggctctctgccaagggcatgtccctgggc

SEQ ID NO: 30498 - DNA, 201 bp, Homo sapiens
gtgtggcccctccacggtgtctgggactgagtgcccctcttgcctcctgaagagcagccatggccacctacaaagtcagggtggccacaggcaccgacctyttgtcgggaacacgggactccatctcactgaccattgtggggacacaaggagagagccataagcagctgctgaaccactttgggagagactttgcaactg

SEQ ID NO: 30499 - DNA, 201 bp, Homo sapiens
tcctggggcgggagagctcaggcttccctaggtgcttgcgaaccgtgcctgagctgatccgatatgtcactatagtcatctacacctgctctgccaagcamgctgctgtcaacacaggccagatggagttcaccgcctggatgcccaacttcccagcgtccatgcggaatccaccgattcagactaaggggctgaccactc

SEQ ID NO: 30500 - DNA, 201 bp, Homo sapiens
cctgggtgagctcatcatcatccgcctgcacaaagagcggtacgccttcttccccaaggacccttggtactgcaactatgtgcagatctgtgcccccaacrgccgtatctaccacttccccgcctaccagtggatggatggctacgagaccctggcactccgggaggccacaggaaagacaacagcagatgactcgctccc

SEQ ID NO: 30501 - DNA, 201 bp, Homo sapiens
tgccaagaccccgattccggcgactcttgcggggaaccgaggggccaaggctgccccaagctcaggacttgggcgagtctaagacgatggtttcttaagcwcggacccgcgttccccttcccgctccctcgactggaggcagggatcctgcgcggggcccccgggattccgtttccccgcggagccccggccgctgcctcc

SEQ ID NO: 30502 - DNA, 201 bp, Homo sapiens
tcttgcggggaaccgaggggccaaggctgccccaagctcaggacttgggcgagtctaagacgatggtttcttaagcacggacccgcgttccccttcccgcyccctcgactggaggcagggatcctgcgcggggcccccgggattccgtttccccgcggagccccggccgctgcctcccgggacagttcgcacggccacagg

SEQ ID NO: 30503 - DNA, 201 bp, Homo sapiens
cgggcaaggggaccagagaaagccggggctggaagtcactgtcgctcgccactgtctggagcgcacggagcgcagaggcccggcagccgcgcgtgccctcmcggggaccgagccagtgatgcaggatcgctgagcggagatccgcgccgagaagtctctcggggccggggctgagacgcacgccttcgacaccgctgccaa

SEQ ID NO: 30504 - DNA, 201 bp, Homo sapiens; identical to SEQ ID NO: 30501

SEQ ID NO: 30505 - DNA, 201 bp, Homo sapiens
tcggactacacgcagacgctgtccaagcggcccgacatccccaccttcgagagcttgacgttcaaaaacaggacagcgggcctcatcgacacgtcgtggarcgccatccagatcggcatctacgccaagcacctggagcactggctgcgccacttccccatccgccagatgctcttcgtgagcggcgagcggctcatcagc

SEQ ID NO: 30506 - DNA, 201 bp, Homo sapiens; identical to SEQ ID NO: 30502

SEQ ID NO: 30507 - DNA, 201 bp, Homo sapiens
acttctacttcaacaagaccaagggcttcccctgcctgaagaaggcggagggcagcagccggccccattgcctgggcaagaccaagggcaggacccatccwgagatcgaccgcgaggtggtgcgcaggctgcgcgagttctaccggcctttcaacctcaagttctaccagatgaccgggcacgactttggctgggatggat

SEQ ID NO: 30508 - DNA, 201 bp, Homo sapiens
acaagggcctcgcctggtaccgggacctgatgcccagaaccctggacgggcagatcaccatggagaagacgcccagttacttcgtcacgcgggaggccccygcgcgcatctcggccatgtccaaggacaccaagctcatcgtggtggtgcgggacccggtgaccagggccatctcggactacacgcagacgctgtccaagc

SEQ ID NO: 30509 - DNA, 201 bp, Homo sapiens
ttgtgctgaaaatatgtttcagtatttttttcaatgaatgttaagagattgttctcactcccgccccatcttaatgtataaccaacaccaaacacgtggawcaacagaaaaggaaaatttcactcgtctaaacactttcaattttcagtttttattttatgttctatatacccagtcataaagtataagcatcagttgtca

SEQ ID NO: 30510 - DNA, 201 bp, Homo sapiens; identical to SEQ ID NO: 30503

SEQ ID NO: 30511 - DNA, 201 bp, Homo sapiens
ccaagctcatcgtggtggtgcgggacccggtgaccagggccatctcggactacacgcagacgctgtccaagcggcccgacatccccaccttcgagagcttracgttcaaaaacaggacagcgggcctcatcgacacgtcgtggagcgccatccagatcggcatctacgccaagcacctggagcactggctgcgccacttcc

SEQ ID NO: 30512 - DNA, 201 bp, Homo sapiens
agcaacagaaatcgtttgtgaaacttcaaaagaaacactacaaagaaatgaaagacctggttaagagacaccacaagaaaaccactgaccttatcaaagarcacactaccaagtataatgaaattcagaatgactacttgagaaggagagccgctttggaaaagtccgccaaaaaggacagtaagaaaaaatcggaaccca

SEQ ID NO: 30513 - DNA, 201 bp, Homo sapiens
attacttgaaatagactaagataaagaaaaggggtctgtatgatgtgcagttttgtgcctttatgtatttgccttgttctttgtcgaatgtgtgaaattcygtactgtggtttttcctataatagaaagtagagctgtgtattaaattagactgtgtctctctgatacctttacactactgagaatagcatggttttggcc

SEQ ID NO: 30514 - DNA, 201 bp, Homo sapiens
ggagatgattatattttgatctgaagggtttggggtgttcattagacacttaataaaacttaacttccaatgaaaaagaaatcttttgtaaatcattctayttttgcactttgaaagaaaggcgttaatcataaagaagcaagaatggtcaaaatcgaatgctgcatttttataaacaaaattacagactgtctgaaattg

SEQ ID NO: 30515 - DNA, 201 bp, Homo sapiens
acatctagtaagacgtaaggggaaaatcacatcctctttggagatgattatattttgatctgaagggtttggggtgttcattagacacttaataaaacttaacttccaatgaaaaagaaatcttttgtaaatcattctacttttgcactttgaaagaaaggcgttaatcataaagaagcaagaatggtcaaaatcgaatgc

SEQ ID NO: 30516 - DNA, 201 bp, Homo sapiens
ttgagaagtatgaacccaacaacagcctcgccagaaaaggacaaatatcagtggatgggttcatgcgctatctgagtggagaagaaaacggagtcgtttcrcctgagaaactggatttgaatgaagacatgtctcagcccctttctcactatttcattaattcctcgcacaacacctacctcacagctggccaactggctg

SEQ ID NO: 30517 - DNA, 201 bp, Homo sapiens
cacatctagtaagacgtaaggggaaaatcacatcctctttggagatgattatattttgatctgaagggtttggggtgttcattagacacttaataaaacttaacttccaatgaaaaagaaatcttttgtaaatcattctacttttgcactttgaaagaaaggcgttaatcataaagaagcaagaatggtcaaaatcgaatg

SEQ ID NO: 30518 - DNA, 201 bp, Homo sapiens
acacatctagtaagacgtaaggggaaaatcacatcctctttggagatgattatattttgatctgaagggtttggggtgttcattagacacttaataaaacttaacttccaatgaaaaagaaatcttttgtaaatcattctacttttgcactttgaaagaaaggcgttaatcataaagaagcaagaatggtcaaaatcgaat

SEQ ID NO: 30519 - DNA, 201 bp, Homo sapiens
aacacatctagtaagacgtaaggggaaaatcacatcctctttggagatgattatattttgatctgaagggtttggggtgttcattagacacttaataaaacttaacttccaatgaaaaagaaatcttttgtaaatcattctacttttgcactttgaaagaaaggcgttaatcataaagaagcaagaatggtcaaaatcgaa

SEQ ID NO: 30520 - DNA, 201 bp, Homo sapiens
gtgaatgctcctgccaggccttcagaaattgcatggccactccagcgtcatcggactctctcttattacaaagatcactgcccaggaccatcttcccgagragcatcccttagcctaaaatccacaccaaagggagagttccagaggaatccatgaagaattcccatgcccaggctccatgtgtcatgtggaaacctccac

SEQ ID NO: 30521 - DNA, 201 bp, Homo sapiens
agagagctaagcaattggctgctttgacactggaagatgaagaagaagtaaagaaagaggctgatcctggagaaacaccatcagaggctccaagtgaagcragaacgactccagcagaaaatggggtgaatcacactacaaccctgacacccaagccaccctcccaggctctccacagccagccagctccaggttctgtaa

SEQ ID NO: 30522 - DNA, 201 bp, Homo sapiens
gataacagaagctaaatccaaagacaaaagtcagatggaagaggagaagacagagatgatccggtcatatatccaggaagtggtgcagtatatcaagaggytagaagaagcgcaaagtaaacggcaagaaaaactcgtagagaaacacaaggaaatacgtcagcagatcctggatgaaaagcccaagggggaaggttcctc

SEQ ID NO: 30523 - DNA, 201 bp, Homo sapiens
acactttgtctgttaagattatttcaggtcagtttctttctgataagaaagttgggacttacgtggaagtagatatgtttggtttgcctgtggatacaagraggaaggcatttaagaccaaaacatcccaaggaaatgctgtgaatcctgtctgggaagaagaacctattgtgttcaaaaaggtggttcttcctactctgg

SEQ ID NO: 30524 - DNA, 201 bp, Homo sapiens
gagccgctttggaaaagtccgccaaaaaggacagtaagaaaaaatcggaacccagcagccctgatcatggttcatcaacgattgagcaagacctcgctgcyctggatgctgaaatgacccaaaagttaatagacttgaaggacaaacaacagcagcagctgcttaatcttcggcaagaacagtattatagtgaaaaatacc

SEQ ID NO: 30525 - DNA, 201 bp, Homo sapiens
attttgatccatttactgaaggcatcgtagatgggatagtggcaaacactttgtctgttaagattatttcaggtcagtttctttctgataagaaagttggracttacgtggaagtagatatgtttggtttgcctgtggatacaaggaggaaggcatttaagaccaaaacatcccaaggaaatgctgtgaatcctgtctggg

SEQ ID NO: 30526 - DNA, 201 bp, Homo sapiens
aacttagagagtaacacatgaacattgaagttaaaacccagaagccagatgctcacagttttattttactttaaaataaacctgtctgactgtagctttgygaaatatcttaaaacgcaaaaaccagttgtgtcctgaaaattgtttcaagaatttaatatttttatgaaaattattttatttaactttaagcaataacta

SEQ ID NO: 30527 - DNA, 201 bp, Homo sapiens
gaagttaaaacccagaagccagatgctcacagttttattttactttaaaataaacctgtctgactgtagctttgcgaaatatcttaaaacgcaaaaaccarttgtgtcctgaaaattgtttcaagaatttaatatttttatgaaaattattttatttaactttaagcaataactagagattacaattaaattttaatcaaa

SEQ ID NO: 30528 - DNA, 201 bp, Homo sapiens
tattaaactgcttattcaaaagttgacggatgtcgcagaagagtgtcagaacaatcagttaaagaagctcaaagaaatctgtgagaaagaaaagaaagaaytaaagaagaaaatggataaaaagaggcaggagaagataacagaagctaaatccaaagacaaaagtcagatggaagaggagaagacagagatgatccggtc

SEQ ID NO: 30529 - DNA, 201 bp, Homo sapiens; identical to SEQ ID NO: 30512

SEQ ID NO: 30530 - DNA, 201 bp, Homo sapiens; identical to SEQ ID NO: 30513

SEQ ID NO: 30531 - DNA, 201 bp, Homo sapiens; identical to SEQ ID NO: 30514

SEQ ID NO: 30532 - DNA, 201 bp, Homo sapiens; identical to SEQ ID NO: 30515

SEQ ID NO: 30533 - DNA, 201 bp, Homo sapiens; identical to SEQ ID NO: 30516

SEQ ID NO: 30534 - DNA, 201 bp, Homo sapiens; identical to SEQ ID NO: 30517

SEQ ID NO: 30535 - DNA, 201 bp, Homo sapiens; identical to SEQ ID NO: 30518

SEQ ID NO: 30536 - DNA, 201 bp, Homo sapiens; identical to SEQ ID NO: 30519

SEQ ID NO: 30537 - DNA, 201 bp, Homo sapiens; identical to SEQ ID NO: 30520

SEQ ID NO: 30538 - DNA, 201 bp, Homo sapiens; identical to SEQ ID NO: 30521

SEQ ID NO: 30539 - DNA, 201 bp, Homo sapiens
gataacagaagctaaatccaaagacaaaagtcagatggaagaggagaagacagagatgatccggtcatatatccaggaagtggtgcagtatatcaagaggytagaagaagcgcaaagtaaacggcaagaaaaactcgtagagaaacacaaggaaatacgtcagcagatcctggatgaaaagcccaagctgcaggtggagct

SEQ ID NO: 30540 - DNA, 201 bp, Homo sapiens; identical to SEQ ID NO: 30523

SEQ ID NO: 30541 - DNA, 201 bp, Homo sapiens; identical to SEQ ID NO: 30524

SEQ ID NO: 30542 - DNA, 201 bp, Homo sapiens; identical to SEQ ID NO: 30525

SEQ ID NO: 30543 - DNA, 201 bp, Homo sapiens; identical to SEQ ID NO: 30526

SEQ ID NO: 30544 - DNA, 201 bp, Homo sapiens; identical to SEQ ID NO: 30527

SEQ ID NO: 30545 - DNA, 201 bp, Homo sapiens; identical to SEQ ID NO: 30528

SEQ ID NO: 30546 - DNA, 201 bp, Homo sapiens; identical to SEQ ID NO: 30512

SEQ ID NO: 30547 - DNA, 201 bp, Homo sapiens; identical to SEQ ID NO: 30513

SEQ ID NO: 30548 - DNA, 201 bp, Homo sapiens; identical to SEQ ID NO: 30514

SEQ ID NO: 30549 - DNA, 201 bp, Homo sapiens; identical to SEQ ID NO: 30515

SEQ ID NO: 30550 - DNA, 201 bp, Homo sapiens; identical to SEQ ID NO: 30516

SEQ ID NO: 30551 - DNA, 201 bp, Homo sapiens; identical to SEQ ID NO: 30517

SEQ ID NO: 30552 - DNA, 201 bp, Homo sapiens; identical to SEQ ID NO: 30518

SEQ ID NO: 30553 - DNA, 201 bp, Homo sapiens; identical to SEQ ID NO: 30519

SEQ ID NO: 30554 - DNA, 201 bp, Homo sapiens; identical to SEQ ID NO: 30520

SEQ ID NO: 30555 - DNA, 201 bp, Homo sapiens; identical to SEQ ID NO: 30521

SEQ ID NO: 30556 - DNA, 201 bp, Homo sapiens; identical to SEQ ID NO: 30522

SEQ ID NO: 30557 - DNA, 201 bp, Homo sapiens; identical to SEQ ID NO: 30523

SEQ ID NO: 30558 - DNA, 201 bp, Homo sapiens; identical to SEQ ID NO: 30524

SEQ ID NO: 30559 - DNA, 201 bp, Homo sapiens; identical to SEQ ID NO: 30525

SEQ ID NO: 30560 - DNA, 201 bp, Homo sapiens; identical to SEQ ID NO: 30526

SEQ ID NO: 30561 - DNA, 201 bp, Homo sapiens; identical to SEQ ID NO: 30527

SEQ ID NO: 30562 - DNA, 201 bp, Homo sapiens; identical to SEQ ID NO: 30528

SEQ ID NO: 30563 - DNA, 201 bp, Homo sapiens; identical to SEQ ID NO: 30512

SEQ ID NO: 30564 - DNA, 201 bp, Homo sapiens; identical to SEQ ID NO: 30513

SEQ ID NO: 30565 - DNA, 201 bp, Homo sapiens; identical to SEQ ID NO: 30514

SEQ ID NO: 30566 - DNA, 201 bp, Homo sapiens; identical to SEQ ID NO: 30515

SEQ ID NO: 30567 - DNA, 201 bp, Homo sapiens; identical to SEQ ID NO: 30516

SEQ ID NO: 30568 - DNA, 201 bp, Homo sapiens; identical to SEQ ID NO: 30517

SEQ ID NO: 30569 - DNA, 201 bp, Homo sapiens; identical to SEQ ID NO: 30518

SEQ ID NO: 30570 - DNA, 201 bp, Homo sapiens; identical to SEQ ID NO: 30519

SEQ ID NO: 30571 - DNA, 201 bp, Homo sapiens; identical to SEQ ID NO: 30520

SEQ ID NO: 30572 - DNA, 201 bp, Homo sapiens; identical to SEQ ID NO: 30521

SEQ ID NO: 30573 - DNA, 201 bp, Homo sapiens; identical to SEQ ID NO: 30539

SEQ ID NO: 30574 - DNA, 201 bp, Homo sapiens; identical to SEQ ID NO: 30523

SEQ ID NO: 30575 - DNA, 201 bp, Homo sapiens; identical to SEQ ID NO: 30524

SEQ ID NO: 30576 - DNA, 201 bp, Homo sapiens; identical to SEQ ID NO: 30525

SEQ ID NO: 30577 - DNA, 201 bp, Homo sapiens; identical to SEQ ID NO: 30526

SEQ ID NO: 30578 - DNA, 201 bp, Homo sapiens; identical to SEQ ID NO: 30527

SEQ ID NO: 30579 - DNA, 201 bp, Homo sapiens; identical to SEQ ID NO: 30528

SEQ ID NO: 30580 - DNA, 201 bp, Homo sapiens
cctaggctttgagaaatccctcagacatagatgcagctggaagctgtccgttggcatacatgaaaacacatgggcaccaccagcagcaaccactctggtgrctttaatttctgaagatattggagtagctcagatgccactttgggagctcaaaggggaagctagccctgcagaagacaagccagtgaagaaccaagtcct

SEQ ID NO: 30581 - DNA, 201 bp, Homo sapiens; identical to SEQ ID NO: 30512

SEQ ID NO: 30582 - DNA, 201 bp, Homo sapiens; identical to SEQ ID NO: 30513

SEQ ID NO: 30583 - DNA, 201 bp, Homo sapiens; identical to SEQ ID NO: 30514

SEQ ID NO: 30584 - DNA, 201 bp, Homo sapiens; identical to SEQ ID NO: 30515

SEQ ID NO: 30585 - DNA, 201 bp, Homo sapiens; identical to SEQ ID NO: 30516

SEQ ID NO: 30586 - DNA, 201 bp, Homo sapiens; identical to SEQ ID NO: 30517

SEQ ID NO: 30587 - DNA, 201 bp, Homo sapiens; identical to SEQ ID NO: 30518

SEQ ID NO: 30588 - DNA, 201 bp, Homo sapiens; identical to SEQ ID NO: 30519

SEQ ID NO: 30589 - DNA, 201 bp, Homo sapiens; identical to SEQ ID NO: 30520

SEQ ID NO: 30590 - DNA, 201 bp, Homo sapiens; identical to SEQ ID NO: 30521

SEQ ID NO: 30591 - DNA, 201 bp, Homo sapiens; identical to SEQ ID NO: 30539

SEQ ID NO: 30592 - DNA, 201 bp, Homo sapiens; identical to SEQ ID NO: 30523

SEQ ID NO: 30593 - DNA, 201 bp, Homo sapiens; identical to SEQ ID NO: 30524

SEQ ID NO: 30594 - DNA, 201 bp, Homo sapiens; identical to SEQ ID NO: 30525

SEQ ID NO: 30595 - DNA, 201 bp, Homo sapiens; identical to SEQ ID NO: 30526

SEQ ID NO: 30596 - DNA, 201 bp, Homo sapiens; identical to SEQ ID NO: 30527

SEQ ID NO: 30597 - DNA, 201 bp, Homo sapiens; identical to SEQ ID NO: 30528

SEQ ID NO: 30598 - DNA, 201 bp, Homo sapiens
tctgtgttaccaaaacctcaaaatacgaataaagaatgctcctggggaagcataggaaaacatcatggtgctgatgattccagattcagtattttagctcyatcattcacaagtttggataaaattaatctagagaaagaattagaaaatgaaaatcataactaccatataggatttgaaagtagcattcctccaacaaat

SEQ ID NO: 30599 - DNA, 201 bp, Homo sapiens
aggttgttccattcagctagtggaagtacctcaaagcagcaatacgagtctggcctctttttgcaacaaagtaaaaaaaatcagagaaagatatcatgcasctgatgttaatttcaattctgggaagatctggagcactactacagcatttccgtatcagctcttttctaagaccaagtttaatatacatatttttattga

SEQ ID NO: 30600 - DNA, 201 bp, Homo sapiens
cttcttgcaggaggctaaatttctttctcagttaaatcctgttacattatacttcagctcttaccatggccttgtcattgggttgaactggagctgtattytagattttgccaacaataacaagcgctgccaagtacttcagctgagatcacccaaataatactctactagcaaaagctttgcgtggcgttctaaccatca

SEQ ID NO: 30601 - DNA, 201 bp, Homo sapiens
tcacttaccgcaccattgggggcattctcgacttctatgtgttcttgggaaacactccagagcaagttgttcaagaatatctagagctcattgggcggccmgcccttccctcctactgggcgcttggatttcacctcagtcgttacgaatatggaaccttagacaacatgagggaagtcgtggagagaaatcgcgcagcac

SEQ ID NO: 30602 - DNA, 201 bp, Homo sapiens
ttgacaatgttcttctcacagcagaatatcagacatctaatcgtttccactttaagttgactgaccaaaccaataacaggtttgaagtgccccacgaacaygtgcagtccttcagtggaaatgctgctgcttctttgacctaccaagttgaaatctccagacagccatttagcatcaaagtgaccagaagaagcaacaatc

SEQ ID NO: 30603 - DNA, 115 bp, Homo sapiens
actgggttaacactrggaaataaaaacttcccacccacttcttgcaggaggctaaatttctttctcagttaaatcctgttacattatacttcagctcttaccatggccttgtcat

SEQ ID NO: 30604 - DNA, 201 bp, Homo sapiens
cccttccctcctactgggcgcttggatttcacctcagtcgttacgaatatggaaccttagacaacatgagggaagtcgtggagagaaatcgcgcagcacakctcccttatgatgttcagcatgctgatattgattatatggatgagagaagggacttcacttatgattcagtggattttaaaggcttccctgaatttgtca

SEQ ID NO: 30605 - DNA, 201 bp, Homo sapiens
acgtgtatggcctgggagagcatgtgcaccagcagtatcggcatgatatgaattggaagacctggcccatatttaacagagacacaactcccaatggaaayggaactaatttgtatggtgcgcagacattcttcttgtgccttgaagatgctagtggattgtcctttggggtgtttctgatgaacagcaatgccatggagg

SEQ ID NO: 30606 - DNA, 201 bp, Homo sapiens
cgtggcgttctaaccatcagaaactgagatggcaagaaagaagctgaaaaaatttactactttggagattgtgctcagtgttcttctgcttgtgttgtttrtcatcagtattgttctaattgtgcttttagccaaagagtcactgaaatcaacagccccagatcctgggacaactggtaccccagatcctgggacaactgg

SEQ ID NO: 30607 - DNA, 201 bp, Homo sapiens; identical to SEQ ID NO: 30601

SEQ ID NO: 30608 - DNA, 201 bp, Homo sapiens; identical to SEQ ID NO: 30602

SEQ ID NO: 30609 - DNA, 201 bp, Homo sapiens
agtccctttttgctattttgtcaacgacctatactctgtcagtgatgttcagtataattcccatggggccacagctgacatctccttaaagtcttccgttyatgccaatgccttcccctccacacccgtgaacccccttcgcctggatgtcacttaccataagaatgaaatgctgcagttcaagatttatgatcccaacaa

SEQ ID NO: 30610 - DNA, 201 bp, Homo sapiens
ctgacatctccttaaagtcttccgtttatgccaatgccttcccctccacacccgtgaacccccttcgcctggatgtcacttaccataagaatgaaatgctrcagttcaagatttatgatcccaacaagaatcggtatgaagttccagtccctctgaacatacccagcatgccatccagcacccctgagggtcaactctatg

SEQ ID NO: 30611 - DNA, 201 bp, Homo sapiens; identical to SEQ ID NO: 30604

SEQ ID NO: 30612 - DNA, 201 bp, Homo sapiens; identical to SEQ ID NO: 30605

SEQ ID NO: 30613 - DNA, 201 bp, Homo sapiens
agggagcggctgcaagaggtaatgagagatggcaagaaagaagctgaaaaaatttactactttggagattgtgctcagtgttcttctgcttgtgttgtttrtcatcagtattgttctaattgtgcttttagccaaagagtcactgaaatcaacagccccagatcctgggacaactggtaccccagatcctgggacaactgg

SEQ ID NO: 30614 - DNA, 201 bp, Homo sapiens; identical to SEQ ID NO: 30601

SEQ ID NO: 30615 - DNA, 201 bp, Homo sapiens; identical to SEQ ID NO: 30602

SEQ ID NO: 30616 - DNA, 201 bp, Homo sapiens; identical to SEQ ID NO: 30600

SEQ ID NO: 30617 - DNA, 201 bp, Homo sapiens; identical to SEQ ID NO: 30609

SEQ ID NO: 30618 - DNA, 115 bp, Homo sapiens; identical to SEQ ID NO: 30603

SEQ ID NO: 30619 - DNA, 201 bp, Homo sapiens; identical to SEQ ID NO: 30610

SEQ ID NO: 30620 - DNA, 201 bp, Homo sapiens; identical to SEQ ID NO: 30604

SEQ ID NO: 30621 - DNA, 201 bp, Homo sapiens; identical to SEQ ID NO: 30606

SEQ ID NO: 30622 - DNA, 201 bp, Homo sapiens; identical to SEQ ID NO: 30605

SEQ ID NO: 30623 - DNA, 201 bp, Homo sapiens; identical to SEQ ID NO: 30609

SEQ ID NO: 30624 - DNA, 201 bp, Homo sapiens; identical to SEQ ID NO: 30610

SEQ ID NO: 30625 - DNA, 201 bp, Homo sapiens
acccagaagctatggcagcagtgcgtgacgaaattgaccgtttgctgcagtcaacaggtcaaaagaaagggtctggatttcccatccacctcaccagagamcaattggacagcctaatctgcctagaaagcagcatttttgaagctttacgactgtcctcatattcaaccaccattcgttttgttgaggaggatttgactc

SEQ ID NO: 30626 - DNA, 201 bp, Homo sapiens
tgggcctctgtggcaaacactattccaactatgttctgggcaatgtattatcttctgcggcacccagaagctatggcagcagtgcgtgacgaaattgaccrtttgctgcagtcaacaggtcaaaagaaagggtctggatttcccatccacctcaccagagaacaattggacagcctaatctgcctagaaagcagcattttt

SEQ ID NO: 30627 - DNA, 201 bp, Homo sapiens
cagcatttttgaagctttacgactgtcctcatattcaaccaccattcgttttgttgaggaggatttgactctcagttcagagaccggggactactgtgtgygaaagggagacttggtagccatctttcctccagtcctacatggtgaccctgaaatctttgaagctccagaggagtttagatatgatcgttttatagaaga

SEQ ID NO: 30628 - DNA, 201 bp, Homo sapiens
agcccatcataatataaaacaggatggtggcaggaaaatggacatcaaaatcaacttaagggtaggctcaaaacagggttgttgttgtttttttagtttctccttgttgtgattttcacctgttataataaatgtaccttcacaccaatagattgggcactgtggaatttaaatcactcaaattgttctctaatatgtaaa

SEQ ID NO: 30629 - DNA, 201 bp, Homo sapiens; identical to SEQ ID NO: 30625

SEQ ID NO: 30630 - DNA, 201 bp, Homo sapiens; identical to SEQ ID NO: 30626

SEQ ID NO: 30631 - DNA, 201 bp, Homo sapiens; identical to SEQ ID NO: 30627

SEQ ID NO: 30632 - DNA, 201 bp, Homo sapiens; identical to SEQ ID NO: 30628

SEQ ID NO: 30633 - DNA, 201 bp, Homo sapiens
gttctatcttagggttgaaatctggtcattattccctctacccttggaatcagagcaatgtgtcttctttcctccaacctcttaccttagatgcatcctgsttatctggaagcatgggaaagaaggctacttatctctttgtatgtggctccagtctgtgaggatacataacattttctctacaatgaatctgtgctaata

SEQ ID NO: 30634 - DNA, 201 bp, Homo sapiens
ctacctgttgcccaagaagatggatgagtatgtggccagcctacacctgcctacctttgatgcccacttgacagagctgacagatgaacaggccaagtatytgggactcaacaagaatgggcccttcaagcctaattactacaggtattaagttcctgtaactcaaaccagaatttttaaggaatagaactccaagccttt

SEQ ID NO: 30635 - DNA, 201 bp, Homo sapiens
agaaagaattcagcaagctgcttctccaatcaaagctgcctgccgtgctcaccctgtgtgttaggttatttatttattaaaatcaagaatcctgtgcctgyagtgttggcccagagtgtggttactgccctgagggccatgaaagccacagaggatgggctgaggaaggaaagaaatggggttactgctcccagtgcatca

SEQ ID NO: 30636 - DNA, 201 bp, Homo sapiens
ttgccatggatgaaaccgagatctgcagtctgatctgtggacttctctgctggcatatcttttatgatttaacctcttccatttgatgattctgtatttcrgagtcagtttcttgagtaactccagtgctacaaaaagaattagtaatgtggtgtgggcagcgtgacattttatgtcccacccaaaaattggattcctttt

SEQ ID NO: 30637 - DNA, 201 bp, Homo sapiens
tattcttagaccaaaaatcataacctgctgtttctcagcaaagccttgctctctggagcttactatgtgctggtacttaaagagtacattctgccttgctrtagtgaagagacccactccaaataaaaaaggggccacacggggcttctaagttaggttgccagtgttgctgcccatgatgagttatttgcctctgagttt

SEQ ID NO: 30638 - DNA, 201 bp, Homo sapiens
aacagatgagtgaagcagaggtgggggtgtttgtccagcgactccggggcctgatgaatgacatcgcttcctcggcagtcatgggactgattgagaccacrcgagggctcctcccgggggcaggagggactcagaggctgccccgttgtctgggggtggccctggcgaaggagctcatcttcacgggccgacgactgagtg

SEQ ID NO: 30639 - DNA, 201 bp, Homo sapiens
cggggtagtcactattatccccattttacaggattaaaacactgacgctgggaggttgacagagttacaccaaatcacacagaggagctgggcttccccckacctcctccgctcaagtctccctgtccccgggaggtgcggaaggaggcaacagacgcttggcccataggtggagcaattggcgaaggcttcgcccgacgc

SEQ ID NO: 30640 - DNA, 201 bp, Homo sapiens
ggaggcaacagacgcttggcccataggtggagcaattggcgaaggcttcgcccgacgccggaactgcgagctctcagcgggagccgagacggtgcagggcsggagaagcaccttcactcccagcctgcgccccgatgctgcgcgttctgtgcctcctgcgcccctggaggccccttcgggcccgcggctgcgcttccgacg

SEQ ID NO: 30641 - DNA, 124 bp, Homo sapiens
tgcaagcaaggttcacacaccccrtttaatcttcacaccaccacggggtagtcactattatccccattttacaggattaaaacactgacgctgggaggttgacagagttacaccaaatcacaca

SEQ ID NO: 30642 - DNA, 201 bp, Homo sapiens
ggtgctgatcctaccacctactgctaccttccttagcttcaccctggctagaaataatcacgagggttgggtttgctttggaaaatgcctgtctctctacytgaatgataaagaattaaattagatctctctgagtcttggtatcattggctctcagcccctgacctctctcagttatcaggcactcattagagatgtcag

SEQ ID NO: 30643 - DNA, 201 bp, Homo sapiens
tccaacccgggaccggctagagggcatggcagccttcagggagaagcggactcccaaatttgttggcaaatgacccccattttaaccttcagcatgggagmtgcatgccctgaagagcaggatccagaaggaagatttgtggccagattgccttcatcatttcacctctccagacttccatttcttcacaaggatgatgat

SEQ ID NO: 30644 - DNA, 201 bp, Homo sapiens; identical to SEQ ID NO: 30638

SEQ ID NO: 30645 - DNA, 201 bp, Homo sapiens; identical to SEQ ID NO: 30639

SEQ ID NO: 30646 - DNA, 201 bp, Homo sapiens; identical to SEQ ID NO: 30640

SEQ ID NO: 30647 - DNA, 124 bp, Homo sapiens; identical to SEQ ID NO: 30641

SEQ ID NO: 30648 - DNA, 201 bp, Homo sapiens; identical to SEQ ID NO: 30642

SEQ ID NO: 30649 - DNA, 201 bp, Homo sapiens; identical to SEQ ID NO: 30639

SEQ ID NO: 30650 - DNA, 201 bp, Homo sapiens
agcggctctctgaagcagacagaagagggccagccatctttcttccacctttgaggcttgggaaggcttcctcggcagtcatgggactgattgagaccacrcgagggctcctcccgggggcaggagggactcagaggctgccccgttgtctgggggtggccctggcgaaggagctcatcttcacgggccgacgactgagtg

SEQ ID NO: 30651 - DNA, 201 bp, Homo sapiens
gggtttttctctccattttatggttgggaaaattgaggcctgcctgagtgtgtgacttgtggcaagtcactctggtcatctagggcagaggctccccagakcccaggcctcctgcctccagtccccagcccgcagcccaggattaggcagagccagctgctttcccgtggctgccctgactccttacagggatcactgaga

SEQ ID NO: 30652 - DNA, 201 bp, Homo sapiens; identical to SEQ ID NO: 30640

SEQ ID NO: 30653 - DNA, 124 bp, Homo sapiens; identical to SEQ ID NO: 30641

SEQ ID NO: 30654 - DNA, 201 bp, Homo sapiens; identical to SEQ ID NO: 30642

SEQ ID NO: 30655 - DNA, 201 bp, Homo sapiens; identical to SEQ ID NO: 30643

SEQ ID NO: 30656 - DNA, 201 bp, Homo sapiens
gtattccatacatacaatgcctccatcacgctacagcagcagctagaagaactcacagccccggatgagaacatcccagcgaagatcctttcttataaccrtgccaatcgagctgttgcaattctttgtaaccatcagagggcaccaccaaaaacttttgagaagtctatgatgaacttgcaaactaagattgatgccaag

SEQ ID NO: 30657 - DNA, 201 bp, Homo sapiens
ttctgtgaaaaggaacagtgtggtttgggaaagatggataaactgagcctcgcttgccctcgtgcctgggtgagagaggcagcaagtcttaacaaaccaayatctttgcaaaaagctaaacctggagatattataagggacagctgagccagttgtcctacggacaacttatttaaaaatatttcagctatcaaaattcta

SEQ ID NO: 30658 - DNA, 201 bp, Homo sapiens
ctatgatgaacttgcaaactaagattgatgccaagaaggaacagctagcagatgcccggagaaacctgaaaagtgctaaggctgatgccaaggtcatgaargatgcaaagatgaagaaggtagtagagtcaaagaagaaggctgttcagagactggaggaacagttgatgaagctggaagttcaagccacagaccgagagg

SEQ ID NO: 30659 - DNA, 201 bp, Homo sapiens
ttgggaacctccaaactcaattatctggatgctaggatcactgtgccttggtgcaagaagtggggtgtcccaattgagaagatttacaacaaaacccagcragaaaagtttgcctgggccattgaaatcgctgatgaagactacgagttttagccagtctcaagaggcagggttctgtgaaaaggaacagtgtggtttggg

SEQ ID NO: 30660 - DNA, 201 bp, Homo sapiens
agatgcccggagaaacctgaaaagtgctaaggctgatgccaaggtcatgaaagatgcaaagatgaagaaggtagtagagtcaaagaagaaggctgttcagwgactggaggaacagttgatgaagctggaagttcaagccacagaccgagaggaaaataaacagatggccttgggaacctccaaactcaattatctggatgc

SEQ ID NO: 30661 - DNA, 201 bp, Homo sapiens
aaattcctaaactccctcccctctcccccatttcaggaatttaaaattaagtagaacaaaaaacccagtgcgcctgttagagtcgtcactgtctattgtcrtagggatcaattttcattaaacttgaagcagtcgtcgctttggcagtgttttggttcagacacctgttcacagaaaagcatgatgggaaaatatttcctg

SEQ ID NO: 30662 - DNA, 201 bp, Homo sapiens
atgctaggatcactgtgccttggtgcaagaagtggggtgtcccaattgagaagatttacaacaaaacccagcgagaaaagtttgcctgggccattgaaatsgctgatgaagactacgagttttagccagtctcaagaggcagggttctgtgaaaaggaacagtgtggtttgggaaagatggataaactgagcctcgcttgc

SEQ ID NO: 30663 - DNA, 201 bp, Homo sapiens
ctcgtcacaggcttgatgctggtactttcggaacaatgggagttggtttgggatttgctattgcagctgccgtggtggctaaagatagaagccctgggcartggatcatctgtgtggaaggagacagtgcatttgggttttctggcatggaggtagaaaccatctgcaggtacaacttgccaatcatactgttggtagtga

SEQ ID NO: 30664 - DNA, 201 bp, Homo sapiens
actcggagacaatggcgagaggcctcagagttcggcttcttacctgctttgcataggcagcaatctcctgctagtcccgcctccctctggcattctggcgsgcgaatggaggagccgagaagagagcgcagttctgattggagaacgcgcgtgtttacattctcacctctcccgggaagtggacgaatttagaccgcctct

SEQ ID NO: 30665 - DNA, 201 bp, Homo sapiens
agtggacgaatttagaccgcctcttccttcccgttgtttaaggcagttggttgccctcctgtccgtcagaggtgcagtaccagaggtggcgtgctgccgayttcgcgtttgccttgctggatgattccgcttgtttgccggctgcgtgagtgcttagagcttttcggtggaagatgccggacagtaacttcgcagagcgca

SEQ ID NO: 30666 - DNA, 201 bp, Homo sapiens
gctttgcataggcagcaatctcctgctagtcccgcctccctctggcattctggcgcgcgaatggaggagccgagaagagagcgcagttctgattggagaaygcgcgtgtttacattctcacctctcccgggaagtggacgaatttagaccgcctcttccttcccgttgtttaaggcagttggttgccctcctgtccgtcag

SEQ ID NO: 30667 - DNA, 201 bp, Homo sapiens
ccgttgtttaaggcagttggttgccctcctgtccgtcagaggtgcagtaccagaggtggcgtgctgccgacttcgcgtttgccttgctggatgattccgcwtgtttgccggctgcgtgagtgcttagagcttttcggtggaagatgccggacagtaacttcgcagagcgcagcgaggagcaggtgtctggtgctaaagtca

SEQ ID NO: 30668 - DNA, 201 bp, Homo sapiens
catggcagtatcctccagagagcaagtggtggaaaactctgagagaaaaaatgaagagcaatgaagctgcatccaaggaactagcttctaaaaaatccctrcctatgaattattacacagtattctaccatgttcaagaacaactacctagagactgtttcgtggtaagtgaaggagcaaatactatggacattggacgga

SEQ ID NO: 30669 - DNA, 201 bp, Homo sapiens
tttagaccgcctcttccttcccgttgtttaaggcagttggttgccctcctgtccgtcagaggtgcagtaccagaggtggcgtgctgccgacttcgcgtttsccttgctggatgattccgcttgtttgccggctgcgtgagtgcttagagcttttcggtggaagatgccggacagtaacttcgcagagcgcagcgaggagca

SEQ ID NO: 30670 - DNA, 113 bp, Homo sapiens
acgctccagctgrccgactcggagacaatggcgagaggcctcagagttcggcttcttacctgctttgcataggcagcaatctcctgctagtcccgcctccctctggcattctg

SEQ ID NO: 30671 - DNA, 201 bp, Homo sapiens
gggatttgacatctctgagcaggaggtgaccgccccggcaccagctgcctgccagatcctgaaggagcgaggcctgcgaccatacctgctcatccatgacrgagtccgctcagaatttgatcagatcgacacatccaacccaaactgtgtggtaattgcagacgcaggagaaagcttttcttatcaaaacatgaataacgc

SEQ ID NO: 30672 - DNA, 131 bp, Homo sapiens
ccggcgcaggcgtcggttgggacgcggagcygaggagcagggccgggcgccatggcaccgtggggcaagcggctggctggcgtgcgcggggtgctgcttgacatctcgggcgtgctgtacgacagcggcgc

SEQ ID NO: 30673 - DNA, 201 bp, Homo sapiens
agtggaagcccaccaggtaggccgtcatgattggggacgatatcgtgggcgacgtcggcggtgcccagcggtgtggaatgagagcgctgcaggtgcgcacygggaagttcaggcccagtgacgagcaccatccggaagtgaaggctgatgggtacgtggacaacctcgcagaggcagtggacctgctgctgcagcacgccg

SEQ ID NO: 30674 - DNA, 201 bp, Homo sapiens
tctgggaatctcccaaatcccagaactcaccactcaccatgggcctttaaatgcagtaaactccacctaaccagattcaggggcactatgcccactgcctmctcttcagactctttgcatttcagtgaagagcctggaagaaacccaggggcctcctatgcacagatcttgcagcccagaaccaagtcagcctccctgcga

SEQ ID NO: 30675 - DNA, 201 bp, Homo sapiens
ttttctatcctcccagtcacctttgcagacaaagaccaggggcagctcccgagggcactgtgaaggctcccatgccacacagtgagaactgtagcctctgygtccaaggcacacagggtactttctggacccactgctggacagacttgaaggtgtcatgcccggtgtgtgcaggaggaaactaacagttcagtaaactct

SEQ ID NO: 30676 - DNA, 201 bp, Homo sapiens
cgggcagagctggtggggcagcttcagaggctgggatttgacatctctgagcaggaggtgaccgccccggcaccagctgcctgccagatcctgaaggagcraggcctgcgaccatacctgctcatccatgacggagtccgctcagaatttgatcagatcgacacatccaacccaaactgtgtggtaattgcagacgcagga

SEQ ID NO: 30677 - DNA, 108 bp, Homo sapiens
ccggcgcmggcgtcggttgggacgcggagctgaggagcagggccgggcgccatggcaccgtggggcaagcggctggctggcgtgcgcggggtgctgcttgacatctcg

SEQ ID NO: 30678 - DNA, 201 bp, Homo sapiens; identical to SEQ ID NO: 30671

SEQ ID NO: 30679 - DNA, 131 bp, Homo sapiens; identical to SEQ ID NO: 30672

SEQ ID NO: 30680 - DNA, 201 bp, Homo sapiens
taggagtggaagcccaccaggccgtcatgattggggacgatatcgtgggcgacgtcggcggtgcccagcggtgtggaatgagagcgctgcaggtgcgcacygggaagttcaggcccagtgacgagcaccatccggaagtgaaggctgatgggtacgtggacaacctcgcagaggcagtggacctgctgctgcagcacgccg

SEQ ID NO: 30681 - DNA, 201 bp, Homo sapiens; identical to SEQ ID NO: 30674

SEQ ID NO: 30682 - DNA, 201 bp, Homo sapiens; identical to SEQ ID NO: 30675

SEQ ID NO: 30683 - DNA, 201 bp, Homo sapiens; identical to SEQ ID NO: 30676

SEQ ID NO: 30684 - DNA, 108 bp, Homo sapiens; identical to SEQ ID NO: 30677

SEQ ID NO: 30685 - DNA, 201 bp, Homo sapiens; identical to SEQ ID NO: 30674

SEQ ID NO: 30686 - DNA, 201 bp, Homo sapiens; identical to SEQ ID NO: 30675

SEQ ID NO: 30687 - DNA, 201 bp, Homo sapiens; identical to SEQ ID NO: 30671

SEQ ID NO: 30688 - DNA, 131 bp, Homo sapiens; identical to SEQ ID NO: 30672

SEQ ID NO: 30689 - DNA, 201 bp, Homo sapiens
taggagtggaagcccaccaggccgtcatgattggggacgatatcgtgggcgacgtcggcggtgcccagcggtgtggaatgagagcgctgcaggtgcgcacygggaagttcaggcccagtgacgagcaccatccggaagtgaaggctgatggactctttgcatttcagtgaagagcctggaagaaacccaggggcctcctat

SEQ ID NO: 30690 - DNA, 201 bp, Homo sapiens; identical to SEQ ID NO: 30675

SEQ ID NO: 30691 - DNA, 201 bp, Homo sapiens; identical to SEQ ID NO: 30676

SEQ ID NO: 30692 - DNA, 108 bp, Homo sapiens; identical to SEQ ID NO: 30677

SEQ ID NO: 30693 - DNA, 201 bp, Homo sapiens
cgggtaccccgcaaggagatgtttacagcttcgccattctgatgagggagctgatctaccattgggaccacgggccttttgatgacctccacgaggcaccrgatgaaatcatcaaccaaatcaaagaccctgcagcagcagtcccactgcaaccttccctgcccgaggagaagggcaatgaaaagatcgtggccatggtga

SEQ ID NO: 30694 - DNA, 201 bp, Homo sapiens
agctgctgcagttcccggagatgccctggtcgggtaccccgcaaggagatgtttacagcttcgccattctgatgagggagctgatctaccattgggaccaygggccttttgatgacctccacgaggcaccggatgaaatcatcaaccaaatcaaagaccctgcagcagcagtcccactgcaaccttccctgcccgaggaga

SEQ ID NO: 30695 - DNA, 201 bp, Homo sapiens
cctacagaaaaggccgtggagacgaaggcttttggaaacaagtctaccaaacaccgaggaggtcgcccttccgcagcaccatctcctgggaggagcaggtragcccttactctgcctaccttcacgacgccgtcctgctctatgctgagaccgtgaagcaggtggtaaaggctggaggcgacttccaggatgggtggcagc

SEQ ID NO: 30696 - DNA, 201 bp, Homo sapiens
gtccttcttcaagagcatctttggaggatatcatcaattgccagggttatcatcttaacgtgcagctcagaggatgcaaaaattattcttctggctgcagyaaacctgggactcaacactggagaatttgttttcatcattttgcagcagttggaggaccgtttttggaaggaagtactgacaaatcagaaaatgatgcac

SEQ ID NO: 30697 - DNA, 201 bp, Homo sapiens
actctgtctatgccctgcagaagtctgaaaatgggccccttttactttcttttcttcattatgacagttatcaaaggaatttctccaatatgacctggccscatggctcccttcctgaagacagacctggctgtggattttataatgagctctgtgaaactcagtctgcttttacgggcgtgactgctgtgcttctgacat

SEQ ID NO: 30698 - DNA, 201 bp, Homo sapiens
catctttggaggatatcatcaattgccagggttatcatcttaacgtgcagctcagaggatgcaaaaattattcttctggctgcagcaaacctgggactcarcactggagaatttgttttcatcattttgcagcagttggaggaccgtttttggaaggaagtactgacaaatcagaaaatgatgcacctccaaaaggtgtat

SEQ ID NO: 30699 - DNA, 201 bp, Homo sapiens
agaccattggagatgcatacatggtggctagtggactccctaccacaatggaagccagcatgtggctgagattgccaccatgtccctgcacttcctcagtkccaccatctgcttccaaattgggcacatgccccaggagaagctccagcttcgtattggcctctacacaggtcctgtggtggctggtgtgctggggattac

SEQ ID NO: 30700 - DNA, 201 bp, Homo sapiens
ggtctgattttaaggatgcagaggcaaaacaaagacatctggtggcaaatcaattttgatgatatcaccattcttccccagaacaagccatcccagagagscacacctgtgtcaaaaggcatcaacagtaactcatctagtgtgatgatttctgtggacctcagctcttttgtcaagagccagcagtgggaagagctcttc

SEQ ID NO: 30701 - DNA, 201 bp, Homo sapiens
tgaaactcagtctgcttttacgggcgtgactgctgtgcttctgacattgatgatcctcattcctgtcttgggagctgccatcataggtctgattttaaggmtgcagaggcaaaacaaagacatctggtggcaaatcaattttgatgatatcaccattcttccccagaacaagccatcccagagagccacacctgtgtcaaa

SEQ ID NO: 30702 - DNA, 201 bp, Homo sapiens
tttttggaaggaagtactgacaaatcagaaaatgatgcacctccaaaaggtgtatgggtcactgcttctcattgccctcagctcctacagaaaaggccgtsgagacgaaggcttttggaaacaagtctaccaaacaccgaggaggtcgcccttccgcagcaccatctcctgggaggagcaggtgagcccttactctgccta

SEQ ID NO: 30703 - DNA, 201 bp, Homo sapiens
ccgtttttggaaggaagtactgacaaatcagaaaatgatgcacctccaaaaggtgtatgggtcactgcttctcattgccctcagctcctacagaaaaggcygtggagacgaaggcttttggaaacaagtctaccaaacaccgaggaggtcgcccttccgcagcaccatctcctgggaggagcaggtgagcccttactctgc

SEQ ID NO: 30704 - DNA, 201 bp, Homo sapiens
ctgatgggtgaattaaggcacgagagcattgttcccttctttggtatttgcaccgaaccacctaacatctgcattgtcacccagtattgcaaaaaaggaawttttcaggatgttttgagaaactcggatcatgaaatggattggatattcaaactctcatttgcatacgacatagtcaatggcatgctgttcctccacagg

SEQ ID NO: 30705 - DNA, 201 bp, Homo sapiens
tgtggattttataatgagctctgtgaaactcagtctgcttttacgggcgtgactgctgtgcttctgacattgatgatcctcattcctgtcttgggagctgscatcataggtctgattttaaggatgcagaggcaaaacaaagacatctggtggcaaatcaattttgatgatatcaccattcttccccagaacaagccatcc

SEQ ID NO: 30706 - DNA, 201 bp, Homo sapiens
agatcgtggccatggtgagggtgtgttgggatgaatctctggagaaaagacccagtttctcttccatcaagaaaactttacgagaggccagtcccagaggycatgtgagcatactggccagtgtgatgagcaagctggaagtgtatgccaattacctggaggaagtggtgcaagagaggaccagccagctgactgcagaga

SEQ ID NO: 30707 - DNA, 201 bp, Homo sapiens
gccagcatgtggctgagattgccaccatgtccctgcacttcctcagtgccaccatctgcttccaaattgggcacatgccccaggagaagctccagcttcgkattggcctctacacaggtcctgtggtggctggtgtgctggggattaccatgtccagatactgtctatttggagacactgtcaacatggcatccagaatgg

SEQ ID NO: 30708 - DNA, 201 bp, Homo sapiens
ctaccttggaagtgcctaccatgcatccaagtgcgagttcctcgccaacctgcacatcacagccctgctgaatgtctcccgacggacctccgaggcctgcrtgacccacctacactacaaatggatccctgtggaagacagccacacggctgacattagctcccactttcaagaagcaatagacttcattgactgtgtcag

SEQ ID NO: 30709 - DNA, 201 bp, Homo sapiens
taccttggaagtgcctaccatgcatccaagtgcgagttcctcgccaacctgcacatcacagccctgctgaatgtctcccgacggacctccgaggcctgcaygacccacctacactacaaatggatccctgtggaagacagccacacggctgacattagctcccactttcaagaagcaatagacttcattgactgtgtcagg

SEQ ID NO: 30710 - DNA, 201 bp, Homo sapiens
ctacaggccagcttatgaccagggtggcccagttgaaatccttcccttcctctaccttggaagtgcctaccatgcatccaagtgcgagttcctcgccaacytgcacatcacagccctgctgaatgtctcccgacggacctccgaggcctgcatgacccacctacactacaaatggatccctgtggaagacagccacacggc

SEQ ID NO: 30711 - DNA, 115 bp, Homo sapiens
aggcaataattttctaagacccgtgtgaatgtgaagaaaagcagtatgttactggttgttgttgttgttcttgttttttatagtgtaaaataaaaatagtraaaggagaaaagca

SEQ ID NO: 30712 - DNA, 201 bp, Homo sapiens
gggtctacttcctcaaagggggatatgagactttctactcggaatatcctgagtgttgcgtggatgtaaaacccatttcacaagagaagattgagagtgasagagccctcatcagccagtgtggaaaaccagtggtaaatgtcagctacaggccagcttatgaccagggtggcccagttgaaatccttcccttcctctacc

SEQ ID NO: 30713 - DNA, 146 bp, Homo sapiens
ttttgtctgttagttatttctccaggggaaaaggcaataattttctaagacccgtgtgaatgtgaagaaaagcagtatgttactggttgttgttgttgttsttgttttttatagtgtaaaataaaaatagtaaaaggagaaaagca

SEQ ID NO: 30714 - DNA, 201 bp, Homo sapiens
gccttcgattacatcaagcagaggaggagcatggtctcgcccaactttggcttcatgggccagctcctgcagtacgaatctgagatcctgccctccacgcycaacccccagcctccctcctgccaaggggaggcagcaggctcttcactgataggccatttgcagacactgagccctgacatgcagggtgcctactgcaca

SEQ ID NO: 30715 - DNA, 201 bp, Homo sapiens
aggaagcacaatttccaccttattttttgaactttggcagtttcaatgtctgtctctgttgcttcggggcataagctgatcaccgtctagttgggaaagtmaccctacagggtttgtagggacatgatcagcatcctgatttgaaccctgaaatgttgtgtagacaccctcttgggtccaatgaggtagttggttgaagta

SEQ ID NO: 30716 - DNA, 158 bp, Homo sapiens
ctttttttttctttttgtctgttagttatttctccaggggaaaaggcaataattttctaagacccgtgtgaatgtgaagaaaagcagtatgttactggttrttgttgttgttcttgttttttatagtgtaaaataaaaatagtaaaaggagaaaagca

SEQ ID NO: 30717 - DNA, 201 bp, Homo sapiens; identical to SEQ ID NO: 30708

SEQ ID NO: 30718 - DNA, 201 bp, Homo sapiens; identical to SEQ ID NO: 30709

SEQ ID NO: 30719 - DNA, 201 bp, Homo sapiens; identical to SEQ ID NO: 30710

SEQ ID NO: 30720 - DNA, 115 bp, Homo sapiens; identical to SEQ ID NO: 30711

SEQ ID NO: 30721 - DNA, 201 bp, Homo sapiens; identical to SEQ ID NO: 30712

SEQ ID NO: 30722 - DNA, 146 bp, Homo sapiens; identical to SEQ ID NO: 30713

SEQ ID NO: 30723 - DNA, 201 bp, Homo sapiens; identical to SEQ ID NO: 30714

SEQ ID NO: 30724 - DNA, 201 bp, Homo sapiens; identical to SEQ ID NO: 30715

SEQ ID NO: 30725 - DNA, 158 bp, Homo sapiens; identical to SEQ ID NO: 30716

SEQ ID NO: 30726 - DNA, 105 bp, Homo sapiens
ttgatttaatatggtaatgcacaattccaactaacgtacattcaacagatcatgaaattgggttattaaaatgaatatttttgtcattaaataaaaattcygtcc

SEQ ID NO: 30727 - DNA, 201 bp, Homo sapiens
aaagcccaacaccttcccccactggattgactacagcaaagatgcccagtgttccactttcaagtgaccccttacctactcacaccactgcattctcaccsgcaagcacctttgaaagagaaaatgacttctcagagaccacaacttctcttagtccagacaatacttccacccaagtatccccggactctttggataatg

SEQ ID NO: 30728 - DNA, 201 bp, Homo sapiens
cacgagtggcactgaggggccagaacattctgtcaatggtcctgcaagtccagctttaaatcaaggttcataggaaaagacataaatgaggaaactccaamcctcctgttagctgttatttctatttttgtagaagtaggaagtgaaaataggtatacagtggattaattaaatgcagcgaaccaatatttgtagaagggt

SEQ ID NO: 30729 - DNA, 201 bp, Homo sapiens
cacagaagtatttgtgacagggcaaagcccaacaccttcccccactggattgactacagcaaagatgcccagtgttccactttcaagtgaccccttacctrctcacaccactgcattctcacccgcaagcacctttgaaagagaaaatgacttctcagagaccacaacttctcttagtccagacaatacttccacccaagt

SEQ ID NO: 30730 - DNA, 201 bp, Homo sapiens
tgatttgggaacagaaagccacagttattgtcatggtcactcgatgtgaagaaggaaacaggaacaagtgtgcagaatactggccgtcaatggaagagggyactcgggcttttggagatgttgttgtaaagatcaaccagcacaaaagatgtccagattacatcattcagaaattgaacattgtaaataaaaaagaaaaag

SEQ ID NO: 30731 - DNA, 201 bp, Homo sapiens
tttggataatgctagtgcttttaataccacaggtgtttcatcagtacagacgcctcaccttcccacgcacgcagactcgcagacgccctctgctggaactsacacgcagacattcagcggctccgccgccaatgcaaaactcaaccctaccccaggcagcaatgctatctcagatgtcccaggagagaggagtacagccag

SEQ ID NO: 30732 - DNA, 201 bp, Homo sapiens
tacagacccagtttccccattgacaaccaccctcagccttgcacaccacagctctgctgccttacctgcacgcacctccaacaccaccatcacagcgaacrcctcagatgcctaccttaatgcctctgaaacaaccactctgagcccttctggaagcgctgtcatttcaaccacaacaatagctactactccatctaagcc

SEQ ID NO: 30733 - DNA, 201 bp, Homo sapiens
caatacttgcacaaacaatgaggtgcataaccttacagaatgtaaaaatgcgtctgtttccatatctcataattcatgtactgctcctgataagacattamtattagatgtgccaccaggggttgaaaagtttcagttacatgattgtacacaagttgaaaaagcagatactactatttgtttaaaatggaaaaatattga

SEQ ID NO: 30734 - DNA, 201 bp, Homo sapiens
attgtacacaagttgaaaaagcagatactactatttgtttaaaatggaaaaatattgaaacctttacttgtgatacacagaatattacctacagatttcartgtggtaatatgatatttgataataaagaaattaaattagaaaaccttgaacccgaacatgagtataagtgtgactcagaaatactctataataaccaca

SEQ ID NO: 30735 - DNA, 112 bp, Homo sapiens
ggaaattgttcytcgtctgataagacaacagtggagaaaggacgcatgctgtttcttagggacacggctgacttccagatatgaccatgtatttgtggcttaaactcttggc

SEQ ID NO: 30736 - DNA, 201 bp, Homo sapiens
aatattagatgtgccaccaggggttgaaaagtttcagttacatgattgtacacaagttgaaaaagcagatactactatttgtttaaaatggaaaaatattraaacctttacttgtgatacacagaatattacctacagatttcagtgtggtaatatgatatttgataataaagaaattaaattagaaaaccttgaacccga

SEQ ID NO: 30737 - DNA, 201 bp, Homo sapiens
gggagtccaggagagcctcagattattttttgtagaagtgaagctgcacatcaaggagtaattacctggaatccccctcaaagatcatttcataattttaycctctgttatataaaagagacagaaaaagattgcctcaatctggataaaaacctgatcaaatatgatttgcaaaatttaaaaccttatacgaaatatgtt

SEQ ID NO: 30738 - DNA, 201 bp, Homo sapiens
agtggacaaagtaaagcaggatgctaattgtgttaatccacttggtgccccagaaaagctccctgaagcaaaggaacaggctgaaggttctgaacccacgmgtggcactgaggggccagaacattctgtcaatggtcctgcaagtccagctttaaatcaaggttcataggaaaagacataaatgaggaaactccaaacctc

SEQ ID NO: 30739 - DNA, 201 bp, Homo sapiens
gcacctaccctgctcagaatggacaagtaaagaaaaacaaccatcaagaagataaaattgaatttgataatgaagtggacaaagtaaagcaggatgctaaytgtgttaatccacttggtgccccagaaaagctccctgaagcaaaggaacaggctgaaggttctgaacccacgagtggcactgaggggccagaacattctg

SEQ ID NO: 30740 - DNA, 201 bp, Homo sapiens; identical to SEQ ID NO: 30727

SEQ ID NO: 30741 - DNA, 201 bp, Homo sapiens; identical to SEQ ID NO: 30728

SEQ ID NO: 30742 - DNA, 201 bp, Homo sapiens; identical to SEQ ID NO: 30729

SEQ ID NO: 30743 - DNA, 201 bp, Homo sapiens; identical to SEQ ID NO: 30730

SEQ ID NO: 30744 - DNA, 201 bp, Homo sapiens
tttggataatgctagtgcttttaataccacaggtgtttcatcagtacagacgcctcaccttcccacgcacgcagactcgcagacgccctctgctggaactsacacgcagacattcagcggctccgccgccaatgcaaaactcaaccctaccccaggcagcaatgctatctcagatgcctaccttaatgcctctgaaacaac

SEQ ID NO: 30745 - DNA, 201 bp, Homo sapiens; identical to SEQ ID NO: 30733

SEQ ID NO: 30746 - DNA, 201 bp, Homo sapiens; identical to SEQ ID NO: 30734

SEQ ID NO: 30747 - DNA, 112 bp, Homo sapiens; identical to SEQ ID NO: 30735

SEQ ID NO: 30748 - DNA, 201 bp, Homo sapiens; identical to SEQ ID NO: 30736

SEQ ID NO: 30749 - DNA, 201 bp, Homo sapiens; identical to SEQ ID NO: 30737

SEQ ID NO: 30750 - DNA, 201 bp, Homo sapiens; identical to SEQ ID NO: 30738

SEQ ID NO: 30751 - DNA, 201 bp, Homo sapiens; identical to SEQ ID NO: 30739

SEQ ID NO: 30752 - DNA, 201 bp, Homo sapiens; identical to SEQ ID NO: 30727

SEQ ID NO: 30753 - DNA, 201 bp, Homo sapiens; identical to SEQ ID NO: 30728

SEQ ID NO: 30754 - DNA, 181 bp, Homo sapiens
ggcaaagcccaacaccttcccccactggattgactacagcaaagatgcccagtgttccactttcaagtgaccccttacctrctcacaccactgcattctcacccgcaagcacctttgaaagagaaaatgacttctcagagaccacaacttctcttagtccagacaatacttccacccaagt

SEQ ID NO: 30755 - DNA, 201 bp, Homo sapiens; identical to SEQ ID NO: 30730

SEQ ID NO: 30756 - DNA, 201 bp, Homo sapiens; identical to SEQ ID NO: 30731

SEQ ID NO: 30757 - DNA, 201 bp, Homo sapiens; identical to SEQ ID NO: 30732

SEQ ID NO: 30758 - DNA, 201 bp, Homo sapiens; identical to SEQ ID NO: 30733

SEQ ID NO: 30759 - DNA, 201 bp, Homo sapiens; identical to SEQ ID NO: 30734

SEQ ID NO: 30760 - DNA, 201 bp, Homo sapiens; identical to SEQ ID NO: 30736

SEQ ID NO: 30761 - DNA, 201 bp, Homo sapiens; identical to SEQ ID NO: 30737

SEQ ID NO: 30762 - DNA, 201 bp, Homo sapiens; identical to SEQ ID NO: 30738

SEQ ID NO: 30763 - DNA, 201 bp, Homo sapiens; identical to SEQ ID NO: 30739

SEQ ID NO: 30764 - DNA, 201 bp, Homo sapiens; identical to SEQ ID NO: 30727

SEQ ID NO: 30765 - DNA, 201 bp, Homo sapiens; identical to SEQ ID NO: 30728

SEQ ID NO: 30766 - DNA, 181 bp, Homo sapiens; identical to SEQ ID NO: 30754

SEQ ID NO: 30767 - DNA, 201 bp, Homo sapiens; identical to SEQ ID NO: 30730

SEQ ID NO: 30768 - DNA, 201 bp, Homo sapiens; identical to SEQ ID NO: 30744

SEQ ID NO: 30769 - DNA, 201 bp, Homo sapiens; identical to SEQ ID NO: 30733

SEQ ID NO: 30770 - DNA, 201 bp, Homo sapiens; identical to SEQ ID NO: 30734

SEQ ID NO: 30771 - DNA, 201 bp, Homo sapiens; identical to SEQ ID NO: 30736

SEQ ID NO: 30772 - DNA, 201 bp, Homo sapiens; identical to SEQ ID NO: 30737

SEQ ID NO: 30773 - DNA, 201 bp, Homo sapiens; identical to SEQ ID NO: 30738

SEQ ID NO: 30774 - DNA, 201 bp, Homo sapiens; identical to SEQ ID NO: 30739

SEQ ID NO: 30775 - DNA, 201 bp, Homo sapiens; identical to SEQ ID NO: 30733

SEQ ID NO: 30776 - DNA, 201 bp, Homo sapiens; identical to SEQ ID NO: 30734

SEQ ID NO: 30777 - DNA, 201 bp, Homo sapiens; identical to SEQ ID NO: 30736

SEQ ID NO: 30778 - DNA, 201 bp, Homo sapiens; identical to SEQ ID NO: 30728

SEQ ID NO: 30779 - DNA, 201 bp, Homo sapiens; identical to SEQ ID NO: 30737

SEQ ID NO: 30780 - DNA, 201 bp, Homo sapiens; identical to SEQ ID NO: 30738

SEQ ID NO: 30781 - DNA, 201 bp, Homo sapiens; identical to SEQ ID NO: 30739

SEQ ID NO: 30782 - DNA, 201 bp, Homo sapiens; identical to SEQ ID NO: 30730

SEQ ID NO: 30783 - DNA, 201 bp, Homo sapiens
accctgatgagaatggtgattctgcagaaaactgcactgcccgtggctgtatctgggaggcatccaattcttctggagtccctttttgctattttgtcaaygacctatactctgtcagtgatgttcagtataactcccatggggccacagctgacatctccttaaagtcttctgttcatgccaatgccttcccttccacac

SEQ ID NO: 30784 - DNA, 201 bp, Homo sapiens
ctgtcctgcagaccagatacaccctgttgccatatctgtataccttgatgcataaggcccacacggagggcgtcactgttgtgcggcctctgctccatgartttgtgtcagaccaggtgacatgggacatagacagtcagttcctgctgggcccagccttcctggtcagccctgtcctggagcgtaatgccagaaatgtca

SEQ ID NO: 30785 - DNA, 201 bp, Homo sapiens
ttgtcaacgacctatactctgtcagtgatgttcagtataactcccatggggccacagctgacatctccttaaagtcttctgttcatgccaatgccttcccytccacacccgtgaacccccttcgcctggatgtcacttaccataagaatgaaatgctacagttcaagatttatgatcccaacaacaatcggtatgaagttc

SEQ ID NO: 30786 - DNA, 201 bp, Homo sapiens
atgatgagatggtggctgcccagatcccttatgatgtgcagtactcagacatcgactacatggagcggcagctggacttcaccctcagccccaagtttgcygggtttccagctctgatcaatcgcatgaaggctgatgggatgcgggtcatcctcattctggatccagccatttctggcaatgagacacagccttatcctg

SEQ ID NO: 30787 - DNA, 201 bp, Homo sapiens
cctgccttgacataccgtaccacagggggagttctggacttttatgtgttcttggggccaactccagagcttgtcacccagcagtacactgagttgattgsccggcctgtgatggtaccttactggtctttggggttccagctgtgtcgctatggctaccagaacgactctgagatctccagcttgtatgatgagatggtg

SEQ ID NO: 30788 - DNA, 201 bp, Homo sapiens
gaagtctatcattggctccttttatttcctcttgtttcagacgggagcagatatctgtgggttctttcaagacgctgagtacgagatgtgtgttcgctggwtgcagctgggggccttttaccccttctcaagaaaccacaataccattgggaccaggagacaagaccctgtgtcctgggatgctgcttttgtgaatatttc

SEQ ID NO: 30789 - DNA, 201 bp, Homo sapiens
actggtctttggggttccagctgtgtcgctatggctaccagaatgactctgagatcgccagcttgtatgatgagatggtggctgcccagatcccttatgaygtgcagtactcagacatcgactacatggagcggcagctggacttcaccctcagccccaagtttgccgggtttccagctctgatcaatcgcatgaaggctg

SEQ ID NO: 30790 - DNA, 201 bp, Homo sapiens
gcactgcccgtggctgtatctgggaggcatccaattcttctggagtccctttttgctattttgtcaacgacctatactctgtcagtgatgttcagtataaytcccatggggccacagctgacatctccttaaagtcttctgttcatgccaatgccttcccttccacacccgtgaacccccttcgcctggatgtcacttacc

SEQ ID NO: 30791 - DNA, 201 bp, Homo sapiens
ctggagtccctttttgctattttgtcaacgacctatactctgtcagtgatgttcagtataactcccatggggccacagctgacatctccttaaagtcttcygttcatgccaatgccttcccttccacacccgtgaacccccttcgcctggatgtcacttaccataagaatgaaatgctacagttcaagatttatgatccca

SEQ ID NO: 30792 - DNA, 201 bp, Homo sapiens
aagccgtgcaggaggtgacaggacagcgaggggtcgtcatcacccgctccacatttccctcttctggccgctgggcaggacattggctgggagacaacacrgccgcgtgggatcagctgaagaagtctatcattggcatgatggagttcagcctcttcggcatatcctatacgggagcagatatctgtgggttctttcaag

SEQ ID NO: 30793 - DNA, 201 bp, Homo sapiens
agtccctttttgctattttgtcaacgacctatactctgtcagtgatgttcagtataactcccatggggccacagctgacatctccttaaagtcttctgttyatgccaatgccttcccttccacacccgtgaacccccttcgcctggatgtcacttaccataagaatgaaatgctacagttcaagatttatgatcccaacaa

SEQ ID NO: 30794 - DNA, 201 bp, Homo sapiens
ccagcagtacactgagttgattggccggcctgtgatggtaccttactggtctttggggttccagctgtgtcgctatggctaccagaacgactctgagatckccagcttgtatgatgagatggtggctgcccagatcccttatgacgtgcagtactcagacatcgactacatggagcggcagctggacttcaccctcagccc

SEQ ID NO: 30795 - DNA, 201 bp, Homo sapiens
cactatgacagactcagaggagactgggcctgtggagaaactcaaaacggaggtgtgtctgaagaaacgatgggaggtggaaaggttaaaaaatcaaaacrttctgtgaatgtggggttatcagaagctcaagatggagatgtgtctcaagaaacagtggaaaatgtaaaagttcaaaaatctcctcagaaatccattgta

SEQ ID NO: 30796 - DNA, 201 bp, Homo sapiens
gaagtcgactggatcgttcagcatgaccctctggatgaccctaaggaatatattcatcgtgtaagcagaacagccagaggtctaaatgggagaggtcatgycttgctcattttgtgcccagaagaaatggggttccttcactacttgaaacaatccaagtttccattaagtgaatttgacttttcctggtctaaaatttct

SEQ ID NO: 30797 - DNA, 201 bp, Homo sapiens
aaacgttctgtgaatgtggggttatcagaagctcaagatggagatgtgtctcaagaaacagtggaaaatgtaaaagttcaaaaatctcctcagaaatccaytgtattaacaaacggagagacagcaatgcagtctcccaattcagaatcaaaaaagaaaaagaagaaaaagggaaaaatgaagccagataatgaggaagat

SEQ ID NO: 30798 - DNA, 201 bp, Homo sapiens
aatctcctcagaaatccattgtattaacaaacggagagacagcaatgcagtctcccaattcagaatcaaaaaagaaaaagaagaaaaagggaaaaatgaarccagataatgaggaagataaccgtgaggtgcccagcctgcgcctgagactgacaggagcttttgacgatacttcatttgcttctctatctaatcttgtca

SEQ ID NO: 30799 - DNA, 201 bp, Homo sapiens
ataagagcataactactgatgactggaaggatttcctgtattcctattttaaagataaggttgatgttctcaatcaagttgattggaatgcctggctctaytctcctggactgcctcccataaagcccaattatgatatgactctgacaaatgcttgtattgccttaagtcaaagatggattactgccaaagaagatgatt

SEQ ID NO: 30800 - DNA, 201 bp, Homo sapiens
ggctctactctcctggactgcctcccataaagcccaattatgatatgactctgacaaatgcttgtattgccttaagtcaaagatggattactgccaaagawgatgatttaaattcattcaatgccacagacctgaaggatctctcttctcatcaattgaatgagtttttagcacagacgctccagagggcacctcttccat

SEQ ID NO: 30801 - DNA, 156 bp, Homo sapiens
ttcctttcccggcgtgcaccgcgaatccctcctcctcttctttacctctctccctyctcctcaggttctctatcgacgagtctggtagctgagcgttgggctgtaggtcgctgtgctgtgtgatcccccagagccatgcccgagatagtggatacc

SEQ ID NO: 30802 - DNA, 201 bp, Homo sapiens
gtcgctgtgctgtgtgatcccccagagccatgcccgagatagtggatacctgttcgttggcctctccggcttccgtctgccggaccaagcacctgcacctkcgctgcagcgtcgactttactcgccggacgctgaccgggactgctgctctcacggtccagtctcaggaggacaatctgcgcagcctggttttggatacaa

SEQ ID NO: 30803 - DNA, 201 bp, Homo sapiens
ggggaaagacttaaaagtggattaaagacctgcgtattgatgattttagagatttctcttttttaaatggaattcgtaaagaaatataaaacttcagctcmcaattaaaactgtctttttagttttggctttttattgttttgttggtgattttactgaaataaagttgagctacttcttcttatagtggcatattctttg

SEQ ID NO: 30804 - DNA, 201 bp, Homo sapiens
tttacccggcccttattcaaggatcttgctgcctttgacaaatcccatgatcaagctgtccgaacctaccaagagcacaaagcaagcatgcatcccgtgastgcaatgctggtggggaaagacttaaaagtggattaaagacctgcgtattgatgattttagagatttctcttttttaaatggaattcgtaaagaaatata

SEQ ID NO: 30805 - DNA, 201 bp, Homo sapiens; identical to SEQ ID NO: 30799

SEQ ID NO: 30806 - DNA, 201 bp, Homo sapiens; identical to SEQ ID NO: 30800

SEQ ID NO: 30807 - DNA, 156 bp, Homo sapiens; identical to SEQ ID NO: 30801

SEQ ID NO: 30808 - DNA, 201 bp, Homo sapiens; identical to SEQ ID NO: 30802

SEQ ID NO: 30809 - DNA, 201 bp, Homo sapiens
ataagagcataactactgatgactggaaggatttcctgtattcctattttaaagataaggttgatgttctcaatcaagttgattggaatgcctggctctaytctcctggactgcctcccataaagcccaattatgatatgactctgacaaatgcttgtattgccttaagtcaaagatggattactgtaaaagatgatttaa

SEQ ID NO: 30810 - DNA, 201 bp, Homo sapiens
cctggctctactctcctggactgcctcccataaagcccaattatgatatgactctgacaaatgcttgtattgccttaagtcaaagatggattactgtaaawgatgatttaaattcattcaatgccacagacctgaaggatctctcttctcatcaattgaatgagtttttagcacagacgctccagagggcacctcttccat

SEQ ID NO: 30811 - DNA, 156 bp, Homo sapiens; identical to SEQ ID NO: 30801

SEQ ID NO: 30812 - DNA, 201 bp, Homo sapiens; identical to SEQ ID NO: 30802

SEQ ID NO: 30813 - DNA, 201 bp, Homo sapiens; identical to SEQ ID NO: 30803

SEQ ID NO: 30814 - DNA, 201 bp, Homo sapiens; identical to SEQ ID NO: 30804

SEQ ID NO: 30815 - DNA, 201 bp, Homo sapiens
ataagagcataactactgatgactggaaggatttcctgtattcctattttaaagataaggttgatgttctcaatcaagttgattggaatgcctggctctaytctcctggactgcctcccataaagcccaattatgatatgactctgacaaatgcttgtattgccttaagtcaaagatggattactgtaaataaaccaataa

SEQ ID NO: 30816 - DNA, 156 bp, Homo sapiens; identical to SEQ ID NO: 30801

SEQ ID NO: 30817 - DNA, 201 bp, Homo sapiens
tgccttaagtcaaagatggattactgtaaataaaccaataagtattattaaattgtacttgaacaaaaataactaggtaacatttatttcaggccaaagawgatgatttaaattcattcaatgccacagacctgaaggatctctcttctcatcaattgaatgagtttttagcacagacgctccagagggcacctcttccat

SEQ ID NO: 30818 - DNA, 201 bp, Homo sapiens
ctcccataaagcccaattatgatatgactctgacaaatgcttgtattgccttaagtcaaagatggattactgtaaataaaccaataagtattattaaattrtacttgaacaaaaataactaggtaacatttatttcaggccaaagaagatgatttaaattcattcaatgccacagacctgaaggatctctcttctcatcaa

SEQ ID NO: 30819 - DNA, 201 bp, Homo sapiens; identical to SEQ ID NO: 30802

SEQ ID NO: 30820 - DNA, 201 bp, Homo sapiens
aggaggagtatgtcaagcgagccctggccaacagccttgcctgtcaaggaaagtacactccgagcggtcaggctggggctgctgccagcgagtccctcttygtctctaaccacgcctattaagcggaggtgttcccaggctggcttgcccgcgctctttcttccctcgtgacagtggtgtgtggtgtcgtctgtgaatgct

SEQ ID NO: 30821 - DNA, 102 bp, Homo sapiens
gctctttcttccctcgtgacagtggtgtgtggtgtcgtctgtgaatgctaagtccatcaccctttccggcacactgccaaataaacagctatttaaggggra

SEQ ID NO: 30822 - DNA, 201 bp, Homo sapiens
tgaggagattgccatggcgaccgtcacagcgctgcgccgcacagtgccccccgctgtcactgggatcaccttcctgtctggaggccagagtgaggaggagkcgtccatcaacctcaatgccattaacaagtgccccctgctgaagccctgggccctgaccttctcctacggccgagccctgcaggcctctgccctgaaggc

SEQ ID NO: 30823 - DNA, 201 bp, Homo sapiens
caagttatcaaatccaagggcggtgttgtgggcatcaaggtagacaagggcgtggtccccctggcagggacaaatggcgagactaccacccaagggttggrtgggctgtctgagcgctgtgcccagtacaagaaggacggagctgacttcgccaagtggcgttgtgtgctgaagattggggaacacaccccctcagccctc

SEQ ID NO: 30824 - DNA, 178 bp, Homo sapiens
ggctgctgccagcgagtccctcttcgtctctaaccacgcctattaagcggaggtgttcccaggctggcttgcccgcgctctttcttccctcgtgacagtgktgtgtggtgtcgtctgtgaatgctaagtccatcaccctttccggcacactgccaaataaacagctatttaaggggga

SEQ ID NO: 30825 - DNA, 201 bp, Homo sapiens
ctgccagcaggtgggcctgcagaatggcattgtgcccatcgtggagcctgagatcctccctgatggggaccatgacttgaagcgctgccagtatgtgaccragaaggtgctggctgctgtctacaaggctctgagtgaccaccacatctacctggaaggcaccttgctgaagcccaacatggtcaccccaggccatgcttg

SEQ ID NO: 30826 - DNA, 201 bp, Homo sapiens
cgcaggaggagtatgtcaagcgagccctggccaacagccttgcctgtcaaggaaagtacactccgagcggtcaggctggggctgctgccagcgagtccctyttcgtctctaaccacgcctattaagcggaggtgttcccaggctggcttgcccgcgctctttcttccctcgtgacagtggtgtgtggtgtcgtctgtgaat

SEQ ID NO: 30827 - DNA, 133 bp, Homo sapiens
agcggaggtgttcccaggctggcttgcccgcgctctttcttccctcgtgacagtggtgtgtggtgtcgtctgtgaatgctaagtccatcaccctttccggsacactgccaaataaacagctatttaaggggga

SEQ ID NO: 30828 - DNA, 201 bp, Homo sapiens
tcaccttcctgtctggaggccagagtgaggaggaggcgtccatcaacctcaatgccattaacaagtgccccctgctgaagccctgggccctgaccttctcytacggccgagccctgcaggcctctgccctgaaggcctggggcgggaagaaggagaacctgaaggctgcgcaggaggagtatgtcaagcgagccctggcca

SEQ ID NO: 30829 - DNA, 201 bp, Homo sapiens
aatgccaatgttctggcccgttatgccagtatctgccagcaggtgggcctgcagaatggcattgtgcccatcgtggagcctgagatcctccctgatggggmccatgacttgaagcgctgccagtatgtgaccgagaaggtgctggctgctgtctacaaggctctgagtgaccaccacatctacctggaaggcaccttgctg

SEQ ID NO: 30830 - DNA, 201 bp, Homo sapiens
gcctgtcaaggaaagtacactccgagcggtcaggctggggctgctgccagcgagtccctcttcgtctctaaccacgcctattaagcggaggtgttcccagkctggcttgcccgcgctctttcttccctcgtgacagtggtgtgtggtgtcgtctgtgaatgctaagtccatcaccctttccggcacactgccaaataaaca

SEQ ID NO: 30831 - DNA, 201 bp, Homo sapiens
tttccaaggaagaatttcctctgaagcaccggtgagaacttgctactaccagcaccatgccctaccaatatccagcactgaccccggagcagaagaaggarctgtctgacatcgctcaccgcatcgtggcacctggcaagggcatcctggctgcagatgagtccactgggagcattgccaagcggctgcagtccattggca

SEQ ID NO: 30832 - DNA, 195 bp, Homo sapiens
ccgagcggtcaggctggggctgctgccagcgagtccctcttcgtctctaaccacgcctattaagcggaggtgttcccaggctggcttgcccgcgctctttyttccctcgtgacagtggtgtgtggtgtcgtctgtgaatgctaagtccatcaccctttccggcacactgccaaataaacagctatttaaggggga

SEQ ID NO: 30833 - DNA, 201 bp, Homo sapiens
cattgccaagcggctgcagtccattggcaccgagaacaccgaggagaaccggcgcttctaccgccagctgctgctgacagctgacgaccgcgtgaacccckgcattgggggtgtcatcctcttccatgagacactctaccagaaggcggatgatgggcgtcccttcccccaagttatcaaatccaagggcggtgttgtggg

SEQ ID NO: 30834 - DNA, 201 bp, Homo sapiens
gccttgcctgtcaaggaaagtacactccgagcggtcaggctggggctgctgccagcgagtccctcttcgtctctaaccacgcctattaagcggaggtgttmccaggctggcttgcccgcgctctttcttccctcgtgacagtggtgtgtggtgtcgtctgtgaatgctaagtccatcaccctttccggcacactgccaaat

SEQ ID NO: 30835 - DNA, 201 bp, Homo sapiens; identical to SEQ ID NO: 30820

SEQ ID NO: 30836 - DNA, 102 bp, Homo sapiens; identical to SEQ ID NO: 30821

SEQ ID NO: 30837 - DNA, 201 bp, Homo sapiens; identical to SEQ ID NO: 30822

SEQ ID NO: 30838 - DNA, 201 bp, Homo sapiens; identical to SEQ ID NO: 30823

SEQ ID NO: 30839 - DNA, 178 bp, Homo sapiens; identical to SEQ ID NO: 30824

SEQ ID NO: 30840 - DNA, 201 bp, Homo sapiens
ttatgccagtatctgccagcagaatggcattgtgcccatcgtggagcctgagatcctccctgatggggaccatgacttgaagcgctgccagtatgtgaccragaaggtgctggctgctgtctacaaggctctgagtgaccaccacatctacctggaaggcaccttgctgaagcccaacatggtcaccccaggccatgcttg

SEQ ID NO: 30841 - DNA, 201 bp, Homo sapiens; identical to SEQ ID NO: 30826

SEQ ID NO: 30842 - DNA, 133 bp, Homo sapiens; identical to SEQ ID NO: 30827

SEQ ID NO: 30843 - DNA, 201 bp, Homo sapiens; identical to SEQ ID NO: 30828

SEQ ID NO: 30844 - DNA, 201 bp, Homo sapiens
gccatcatggaaaatgccaatgttctggcccgttatgccagtatctgccagcagaatggcattgtgcccatcgtggagcctgagatcctccctgatggggmccatgacttgaagcgctgccagtatgtgaccgagaaggtgctggctgctgtctacaaggctctgagtgaccaccacatctacctggaaggcaccttgctg

SEQ ID NO: 30845 - DNA, 201 bp, Homo sapiens; identical to SEQ ID NO: 30830

SEQ ID NO: 30846 - DNA, 201 bp, Homo sapiens; identical to SEQ ID NO: 30831

SEQ ID NO: 30847 - DNA, 195 bp, Homo sapiens; identical to SEQ ID NO: 30832

SEQ ID NO: 30848 - DNA, 201 bp, Homo sapiens; identical to SEQ ID NO: 30833

SEQ ID NO: 30849 - DNA, 201 bp, Homo sapiens; identical to SEQ ID NO: 30834

SEQ ID NO: 30850 - DNA, 201 bp, Homo sapiens; identical to SEQ ID NO: 30823

SEQ ID NO: 30851 - DNA, 201 bp, Homo sapiens; identical to SEQ ID NO: 30840

SEQ ID NO: 30852 - DNA, 201 bp, Homo sapiens; identical to SEQ ID NO: 30828

SEQ ID NO: 30853 - DNA, 201 bp, Homo sapiens
accacgcctattaagcggaggtgttcccaggctgcccccaacactccaggccctgccccctcccactcttgaagaggaggccgcctcctcggggctccagkctggcttgcccgcgctctttcttccctcgtgacagtggtgtgtggtgtcgtctgtgaatgctaagtccatcaccctttccggcacactgccaaataaaca

SEQ ID NO: 30854 - DNA, 201 bp, Homo sapiens
tctctaaccacgcctattaagcggaggtgttcccaggctgcccccaacactccaggccctgccccctcccactcttgaagaggaggccgcctcctcggggstccaggctggcttgcccgcgctctttcttccctcgtgacagtggtgtgtggtgtcgtctgtgaatgctaagtccatcaccctttccggcacactgccaaa

SEQ ID NO: 30855 - DNA, 201 bp, Homo sapiens
tgttcccaggctgcccccaacactccaggccctgccccctcccactcttgaagaggaggccgcctcctcggggctccaggctggcttgcccgcgctctttyttccctcgtgacagtggtgtgtggtgtcgtctgtgaatgctaagtccatcaccctttccggcacactgccaaataaacagctatttaagggggagtcggc

SEQ ID NO: 30856 - DNA, 201 bp, Homo sapiens
tggatttccaaggaagaatttcctctgaagcaccggaacttgctactaccagcaccatgccctaccaatatccagcactgaccccggagcagaagaaggarctgtctgacatcgctcaccgcatcgtggcacctggcaagggcatcctggctgcagatgagtccactgggagcattgccaagcggctgcagtccattggca

SEQ ID NO: 30857 - DNA, 201 bp, Homo sapiens; identical to SEQ ID NO: 30833

SEQ ID NO: 30858 - DNA, 201 bp, Homo sapiens
tacactccgagcggtcaggctggggctgctgccagcgagtccctcttcgtctctaaccacgcctattaagcggaggtgttcccaggctgcccccaacactycaggccctgccccctcccactcttgaagaggaggccgcctcctcggggctccaggctggcttgcccgcgctctttcttccctcgtgacagtggtgtgtgg

SEQ ID NO: 30859 - DNA, 201 bp, Homo sapiens
gaaagtacactccgagcggtcaggctggggctgctgccagcgagtccctcttcgtctctaaccacgcctattaagcggaggtgttcccaggctgcccccamcactccaggccctgccccctcccactcttgaagaggaggccgcctcctcggggctccaggctggcttgcccgcgctctttcttccctcgtgacagtggtg

SEQ ID NO: 30860 - DNA, 201 bp, Homo sapiens
aggaggagtatgtcaagcgagccctggccaacagccttgcctgtcaaggaaagtacactccgagcggtcaggctggggctgctgccagcgagtccctcttygtctctaaccacgcctattaagcggaggtgttcccaggctgcccccaacactccaggccctgccccctcccactcttgaagaggaggccgcctcctcggg

SEQ ID NO: 30861 - DNA, 108 bp, Homo sapiens
gctctttcttccctcgtgacagtggtgtgtggtgtcgtctgtgaatgctaagtccatcaccctttccggcacactgccaaataaacagctatttaaggggragtcggc

SEQ ID NO: 30862 - DNA, 201 bp, Homo sapiens; identical to SEQ ID NO: 30822

SEQ ID NO: 30863 - DNA, 184 bp, Homo sapiens
caacactccaggccctgccccctcccactcttgaagaggaggccgcctcctcggggctccaggctggcttgcccgcgctctttcttccctcgtgacagtgktgtgtggtgtcgtctgtgaatgctaagtccatcaccctttccggcacactgccaaataaacagctatttaagggggagtcggc

SEQ ID NO: 30864 - DNA, 201 bp, Homo sapiens
cgcaggaggagtatgtcaagcgagccctggccaacagccttgcctgtcaaggaaagtacactccgagcggtcaggctggggctgctgccagcgagtccctyttcgtctctaaccacgcctattaagcggaggtgttcccaggctgcccccaacactccaggccctgccccctcccactcttgaagaggaggccgcctcctc

SEQ ID NO: 30865 - DNA, 139 bp, Homo sapiens
cctcctcggggctccaggctggcttgcccgcgctctttcttccctcgtgacagtggtgtgtggtgtcgtctgtgaatgctaagtccatcaccctttccggsacactgccaaataaacagctatttaagggggagtcggc

SEQ ID NO: 30866 - DNA, 201 bp, Homo sapiens; identical to SEQ ID NO: 30844

SEQ ID NO: 30867 - DNA, 201 bp, Homo sapiens
gccttgcctgtcaaggaaagtacactccgagcggtcaggctggggctgctgccagcgagtccctcttcgtctctaaccacgcctattaagcggaggtgttmccaggctgcccccaacactccaggccctgccccctcccactcttgaagaggaggccgcctcctcggggctccaggctggcttgcccgcgctctttcttcc

SEQ ID NO: 30868 - DNA, 201 bp, Homo sapiens; identical to SEQ ID NO: 30823

SEQ ID NO: 30869 - DNA, 201 bp, Homo sapiens; identical to SEQ ID NO: 30840

SEQ ID NO: 30870 - DNA, 201 bp, Homo sapiens; identical to SEQ ID NO: 30828

SEQ ID NO: 30871 - DNA, 201 bp, Homo sapiens; identical to SEQ ID NO: 30853

SEQ ID NO: 30872 - DNA, 201 bp, Homo sapiens; identical to SEQ ID NO: 30854

SEQ ID NO: 30873 - DNA, 201 bp, Homo sapiens; identical to SEQ ID NO: 30855

SEQ ID NO: 30874 - DNA, 201 bp, Homo sapiens; identical to SEQ ID NO: 30856

SEQ ID NO: 30875 - DNA, 201 bp, Homo sapiens; identical to SEQ ID NO: 30833

SEQ ID NO: 30876 - DNA, 201 bp, Homo sapiens; identical to SEQ ID NO: 30858

SEQ ID NO: 30877 - DNA, 201 bp, Homo sapiens; identical to SEQ ID NO: 30859

SEQ ID NO: 30878 - DNA, 201 bp, Homo sapiens; identical to SEQ ID NO: 30860

SEQ ID NO: 30879 - DNA, 108 bp, Homo sapiens; identical to SEQ ID NO: 30861

SEQ ID NO: 30880 - DNA, 201 bp, Homo sapiens; identical to SEQ ID NO: 30822

SEQ ID NO: 30881 - DNA, 184 bp, Homo sapiens; identical to SEQ ID NO: 30863

SEQ ID NO: 30882 - DNA, 201 bp, Homo sapiens; identical to SEQ ID NO: 30864

SEQ ID NO: 30883 - DNA, 139 bp, Homo sapiens; identical to SEQ ID NO: 30865

SEQ ID NO: 30884 - DNA, 201 bp, Homo sapiens; identical to SEQ ID NO: 30844

SEQ ID NO: 30885 - DNA, 201 bp, Homo sapiens; identical to SEQ ID NO: 30867

SEQ ID NO: 30886 - DNA, 201 bp, Homo sapiens; identical to SEQ ID NO: 30823

SEQ ID NO: 30887 - DNA, 201 bp, Homo sapiens; identical to SEQ ID NO: 30840

SEQ ID NO: 30888 - DNA, 201 bp, Homo sapiens; identical to SEQ ID NO: 30828

SEQ ID NO: 30889 - DNA, 201 bp, Homo sapiens; identical to SEQ ID NO: 30853

SEQ ID NO: 30890 - DNA, 201 bp, Homo sapiens; identical to SEQ ID NO: 30854

SEQ ID NO: 30891 - DNA, 201 bp, Homo sapiens; identical to SEQ ID NO: 30855

SEQ ID NO: 30892 - DNA, 201 bp, Homo sapiens; identical to SEQ ID NO: 30856

SEQ ID NO: 30893 - DNA, 201 bp, Homo sapiens; identical to SEQ ID NO: 30833

SEQ ID NO: 30894 - DNA, 201 bp, Homo sapiens; identical to SEQ ID NO: 30858

SEQ ID NO: 30895 - DNA, 201 bp, Homo sapiens; identical to SEQ ID NO: 30859

SEQ ID NO: 30896 - DNA, 201 bp, Homo sapiens; identical to SEQ ID NO: 30860

SEQ ID NO: 30897 - DNA, 108 bp, Homo sapiens; identical to SEQ ID NO: 30861

SEQ ID NO: 30898 - DNA, 201 bp, Homo sapiens; identical to SEQ ID NO: 30822

SEQ ID NO: 30899 - DNA, 184 bp, Homo sapiens; identical to SEQ ID NO: 30863

SEQ ID NO: 30900 - DNA, 201 bp, Homo sapiens; identical to SEQ ID NO: 30864

SEQ ID NO: 30901 - DNA, 139 bp, Homo sapiens; identical to SEQ ID NO: 30865

SEQ ID NO: 30902 - DNA, 201 bp, Homo sapiens; identical to SEQ ID NO: 30844

SEQ ID NO: 30903 - DNA, 201 bp, Homo sapiens; identical to SEQ ID NO: 30867

SEQ ID NO: 30904 - DNA, 178 bp, Homo sapiens
atgactgtaacttggaccacatgggtcccaacccgctctgaagtgcaattcgggttgcagccgtcggggcccctgccyctccgcgcccagggcaccttcgtcccctttgtggacgggggcattctccggcggaagctctacatacaccgagtcacgcttcgcaagctgctgccagggg

SEQ ID NO: 30905 - DNA, 166 bp, Homo sapiens
atgactgtaacttggaccacatgggtcccaacccgctctgaagtgcaattcgggttgcagccgtcrgggcccctgcccctccgcgcccagggcaccttcgtcccctttgtggacgggggcattctccggcggaagctctacatacaccgagtcacgcttcgcaagc

SEQ ID NO: 30906 - DNA, 201 bp, Homo sapiens
ttctccatgtgggagactttgcctacaacctggatcaggacaacgcccgtgttggggataggttcatgcggctcattgaacccgtggctgccagcctgccrtacatgacatgccctgggaatcatgaagaacgctacaacttctctaactacaaggctcgcttcagcatgccgggggataatgagggcctgtggtacagct

SEQ ID NO: 30907 - DNA, 201 bp, Homo sapiens
gagtggatctgcagctgtgggctcatgagcactcgtatgaacgactgtggccaatttacaactaccaggtatttaacggcagccgagagatgccctacacyaacccgcgagggcctgtccacatcatcacaggatctgctggctgtgaggagcggctgacgccctttgctgtcttcccgaggccctggagtgccgtgcgtg

SEQ ID NO: 30908 - DNA, 201 bp, Homo sapiens
atgtcatcagctccattgtctttggggaccgctttgactatgaggacaaaagttcctgtcactgctgtgcatgatgctggaaagcttccagttcacggcamcctccacggggcagctctatgagatgttctcttcggtgatgaaacacctgccaggaccacagcaacaggcctttaaggagctgcaagggctggaggactt

SEQ ID NO: 30909 - DNA, 201 bp, Homo sapiens
ggcttcctcatcaaggccgtctagggcacgcctccagcatctatcccaccttcttcctaagccgtaccacctccaatgtcatcagctccattgtctttggsgaccgctttgactatgaggacaaaagttcctgtcactgctgtgcatgatgctggaaagcttccagttcacggcaccctccacggggcagctctatgagat

SEQ ID NO: 30910 - DNA, 101 bp, Homo sapiens
tcaaatcgcggcagtcgcctaaggacattgttgtgtcccccaaacacgtgggctttgtcacaatcccacgaaactacaccaagtgctacttgccttgctgy

SEQ ID NO: 30911 - DNA, 201 bp, Homo sapiens
cgaggcgagcaggccaccttcgactggctcttcaaaggctatggagtgacctgccgcacctgggagcgcaccaagccgctcaggcgcttctccatcgccaycctgcgggacttcggggtgggcaagcgcggcatcaaggaggtatccaggagaaggcgggcttcctcatcaaggccgtctagggcacgcctccagcatcta

SEQ ID NO: 30912 - DNA, 200 bp, Homo sapiens
ccctgggtcttcctagccccaagactctcaagtccatatgcctggaatcccccctcctgagacccttaaccctgcatcctccacaacagaagacccccaratgcacagccacacttccatctcaccctaataaaacccagacctttgcattcttctcctcggaacccccaaatccacaattttggggtgcattctcactc

SEQ ID NO: 30913 - DNA, 201 bp, Homo sapiens
ataacaggaactggtatcagagcatgatacctcaaagtccctcaccaccactggacgagcagaacagggactgccagggtctgatggagaagtttcagttygaactgactctcgatgaggaagattctgaaggacctgagaaggagggagagggacacagctatttcagcagcacaaagacgctttgtgtgattgatccag

SEQ ID NO: 30914 - DNA, 201 bp, Homo sapiens
ggactgccagggtctgatggagaagtttcagtttgaactgactctcgatgaggaagattctgaaggacctgagaaggagggagagggacacagctatttcwgcagcacaaagacgctttgtgtgattgatccagaaaacagagattccctgggagagactgacatagacattgcaacagaagacaagtcccccgtggatac

SEQ ID NO: 30915 - DNA, 201 bp, Homo sapiens
cagacctgaagacaatggtagaaacgaagaaagttacaagttcaggcgttcttctcctagacaactataccgatcgcattcaggtccttcgcaacatggtmcactgtgcagacctgagcaaccccaccaagtccttggaattgtatcggcaatggacagaccgcatcatggaggaatttttccagcagggagacaaagagc

SEQ ID NO: 30916 - DNA, 201 bp, Homo sapiens
aagacacaaaactgagagatcattctgcactaagtttcgggaacttatccccgacagtgactgaactcactgactaataacttcatttatgaatcttctcmcttgtccctttgtctgccaacctgtgtgccttttttgtaaaacattttcatgtctttaaaatgcctgttgaatacctggagtttagtatcaacttctaca

SEQ ID NO: 30917 - DNA, 201 bp, Homo sapiens
acgtggcatatcacaacagcctgcacgctgctgatgtagcccagtcgacccatgttctcctttctacaccagcattagacgctgtcttcacagatttggaratcctggctgccatttttgcagctgccatccatgacgttgatcatcctggagtctccaatcagtttctcatcaacacaaattcagaacttgctttgatgt

SEQ ID NO: 30918 - DNA, 201 bp, Homo sapiens
ttctcacttgtccctttgtctgccaacctgtgtgccttttttgtaaaacattttcatgtctttaaaatgcctgttgaatacctggagtttagtatcaactyctacacagataagctttcaaagttgacaaacttttttgactctttctggaaaagggaaagaaaatagtcttccttctttcttgggcaatatccttcactt

SEQ ID NO: 30919 - DNA, 201 bp, Homo sapiens
cccgttaggctgttttcaatgtaatgctgccgtccttctcttgcactgccttctgcgctaacacctccattcctgtttataaccgtgtatttattacttartgtatataatgtaatgttttgtaagttattaatttatatatctaacattgcctgccaatggtggtgttaaatttgtgtagaaaactctgcctaagagtta

SEQ ID NO: 30920 - DNA, 201 bp, Homo sapiens
taacaggaactggtatcagagcatgatacctcaaagtccctcaccaccactggacgagcagaacagggactgccagggtctgatggagaagtttcagtttraactgactctcgatgaggaagattctgaaggacctgagaaggagggagagggacacagctatttcagcagcacaaagacgctttgtgtgattgatccaga

SEQ ID NO: 30921 - DNA, 201 bp, Homo sapiens
caggaactggtatcagagcatgatacctcaaagtccctcaccaccactggacgagcagaacagggactgccagggtctgatggagaagtttcagtttgaaytgactctcgatgaggaagattctgaaggacctgagaaggagggagagggacacagctatttcagcagcacaaagacgctttgtgtgattgatccagaaaa

SEQ ID NO: 30922 - DNA, 201 bp, Homo sapiens
ttccctgggagagactgacatagacattgcaacagaagacaagtcccccgtggatacataatccccctctccctgtggagatgaacattctatccttgatragcatgccagctatgtggtagggccagcccaccatgggggccaagacctgcacaggacaagggccacctggcctttcagttacttgagtttggagtcaga

SEQ ID NO: 30923 - DNA, 201 bp, Homo sapiens; identical to SEQ ID NO: 30913

SEQ ID NO: 30924 - DNA, 201 bp, Homo sapiens; identical to SEQ ID NO: 30914

SEQ ID NO: 30925 - DNA, 201 bp, Homo sapiens; identical to SEQ ID NO: 30915

SEQ ID NO: 30926 - DNA, 201 bp, Homo sapiens; identical to SEQ ID NO: 30916

SEQ ID NO: 30927 - DNA, 201 bp, Homo sapiens; identical to SEQ ID NO: 30917

SEQ ID NO: 30928 - DNA, 201 bp, Homo sapiens; identical to SEQ ID NO: 30918

SEQ ID NO: 30929 - DNA, 201 bp, Homo sapiens; identical to SEQ ID NO: 30919

SEQ ID NO: 30930 - DNA, 201 bp, Homo sapiens; identical to SEQ ID NO: 30920

SEQ ID NO: 30931 - DNA, 201 bp, Homo sapiens; identical to SEQ ID NO: 30921

SEQ ID NO: 30932 - DNA, 201 bp, Homo sapiens; identical to SEQ ID NO: 30922

SEQ ID NO: 30933 - DNA, 201 bp, Homo sapiens
cactacgggttctccagctcctttccaggcagagaggaggggaggtcctgaggggactgctgcccctcactcggcatcccctgcagagtcaggactgctcycggggccaggctgccctgggagcccccctccgagcccagccagccaggctctcaggccctgcgcctgcctcaggtctttcttgctgcagcctgctccagc

SEQ ID NO: 30934 - DNA, 201 bp, Homo sapiens
tctcaacgcctccactatcctgtctgtatgccctgtccattgggtggctggagccccatcagagttgggctggggggtatggcaccaggccctgcctccccaggaaggtttgagggtgttgaggtactgggggtggggtgggggtgtgctggtgcaggtgggccccatgtcaggaggtctcccaggcttcacctactgcaa

SEQ ID NO: 30935 - DNA, 201 bp, Homo sapiens
agaggaggggaggtcctgaggggactgctgcccctcactcggcatcccctgcagagtcaggactgctcccggggccaggctgccctgggagcccccctccragcccagccagccaggctctcaggccctgcgcctgcctcaggtctttcttgctgcagcctgctccagcctggcccccaccccaggggcaggcggcccctc

SEQ ID NO: 30936 - DNA, 201 bp, Homo sapiens
ctggccatgggtaggagactgccctggtcatggccgcctgcctgtcattcctgactcaccaccgtccccaggtgaaccattcctcccttctcctcagctgyagtcgaaggctttaactttgcacacttgggatcacagttgcgtcattgtgtattaaatacttggaataaatcaagcaggtctcaacgcctccactatcct

SEQ ID NO: 30937 - DNA, 201 bp, Homo sapiens
acccttgggtcctgctcctcaggccgctcccctgtccctggccatgggtaggagactgccctggtcatggccgcctgcctgtcattcctgactcaccaccrtccccaggtgaaccattcctcccttctcctcagctgcagtcgaaggctttaactttgcacacttgggatcacagttgcgtcattgtgtattaaatacttg

SEQ ID NO: 30938 - DNA, 201 bp, Homo sapiens
ccatggacactgtgacagaggctgacatggccattgccatggctctgatgggaggtattggtttcattcaccacaactgcaccccagagttccaggccaaygaggtgcggaaggtcaaggcaatttgaacagggcttcatcacggaccctgtggtgctgagcccctcgcacactgtgggcgatgtgctggaggccaagatg

SEQ ID NO: 30939 - DNA, 201 bp, Homo sapiens
caaatgagatcctgcagcgtagcaagaaagggaagctgcctatcgtcaatgattgcgatgagctggtggccatcatcgcccgcaccgacctgaagaagaaycgagactaccctctggcctccaaggattcccagaagcagctgctctgtggggcagctgtgggcacccgtgaggatgacaaataccgtctggacctgctca

SEQ ID NO: 30940 - DNA, 201 bp, Homo sapiens
tcgtcaatgattgcgatgagctggtggccatcatcgcccgcaccgacctgaagaagaaccgagactaccctctggcctccaaggattcccagaagcagctsctctgtggggcagctgtgggcacccgtgaggatgacaaataccgtctggacctgctcacccaggcgggcgtcgacgtcatagtcttggactcgtcccaag

SEQ ID NO: 30941 - DNA, 201 bp, Homo sapiens
tgctgcccctcactcggcatcccctgcagagtcaggactgctcccggggccaggctgccctgggagcccccctccgagcccagccagccaggctctcaggmcctgcgcctgcctcaggtctttcttgctgcagcctgctccagcctggcccccaccccaggggcaggcggcccctcctggcttctcctgtagggcacctcc

SEQ ID NO: 30942 - DNA, 201 bp, Homo sapiens
ggaggggaggtcctgaggggactgctgcccctcactcggcatcccctgcagagtcaggactgctcccggggccaggctgccctgggagcccccctccgagmccagccagccaggctctcaggccctgcgcctgcctcaggtctttcttgctgcagcctgctccagcctggcccccaccccaggggcaggcggcccctcctg

SEQ ID NO: 30943 - DNA, 201 bp, Homo sapiens
agagcgacttcctgattctcccaggattcatagacttcatagctgatgaggtggacctgacctcagccctgacccggaagatcacgctgaagacgccactsatctcctcccccatggacactgtgacagaggctgacatggccattgccatggctctgatgggaggtattggtttcattcaccacaactgcaccccagagt

SEQ ID NO: 30944 - DNA, 201 bp, Homo sapiens
ggctcaagaagtaccggggcatgggctcactggatgccatggagaagagcagcagcagccagaaacgatacttcagcgagggggataaagtgaagatcgcrcagggtgtctcgggctccatccaggacaaaggatccattcagaagttcgtgccctacctcatagcaggcatccaacacggctgccaggatatcggggccc

SEQ ID NO: 30945 - DNA, 201 bp, Homo sapiens; identical to SEQ ID NO: 30939

SEQ ID NO: 30946 - DNA, 201 bp, Homo sapiens; identical to SEQ ID NO: 30940

SEQ ID NO: 30947 - DNA, 201 bp, Homo sapiens; identical to SEQ ID NO: 30934

SEQ ID NO: 30948 - DNA, 201 bp, Homo sapiens
acaacgacttcctgattctcccaggattcatagacttcatagctgatgaggtggacctgacctcagccctgacccggaagatcacgctgaagacgccactsatctcctcccccatggacactgtgacagaggctgacatggccattgccatggctctgatgggaggtattggtttcattcaccacaactgcaccccagagt

SEQ ID NO: 30949 - DNA, 201 bp, Homo sapiens
aagcggctgtactgaggacagcggtggaggccgaggtggtggaggggatgcaccccagtgtccacttttgggcacaccattcctcccttctcctcagctgyagtcgaaggctttaactttgcacacttgggatcacagttgcgtcattgtgtattaaatacttggaataaatcaagcaggtctcaacgcctccactatcct

SEQ ID NO: 30950 - DNA, 201 bp, Homo sapiens
ccatggacactgtgacagaggctgacatggccattgccatggctctgatgggaggtattggtttcattcaccacaactgcaccccagagttccaggccaaygaggtgcggaagaagtttgaacagggcttcatcacggaccctgtggtgctgagcccctcgcacactgtgggcgatgtgctggaggccaagatgcggcatg

SEQ ID NO: 30951 - DNA, 201 bp, Homo sapiens; identical to SEQ ID NO: 30944

SEQ ID NO: 30952 - DNA, 201 bp, Homo sapiens; identical to SEQ ID NO: 30933

SEQ ID NO: 30953 - DNA, 201 bp, Homo sapiens; identical to SEQ ID NO: 30934

SEQ ID NO: 30954 - DNA, 201 bp, Homo sapiens; identical to SEQ ID NO: 30935

SEQ ID NO: 30955 - DNA, 201 bp, Homo sapiens; identical to SEQ ID NO: 30936

SEQ ID NO: 30956 - DNA, 201 bp, Homo sapiens; identical to SEQ ID NO: 30937

SEQ ID NO: 30957 - DNA, 201 bp, Homo sapiens
ccatggacactgtgacagaggctgacatggccattgccatggctctgatgggaggtattggtttcattcaccacaactgcaccccagagttccaggccaaygaggtgcggaaggtcaagaagtttgaacagggcttcatcacggaccctgtggtgctgagcccctcgcacactgtgggcgatgtgctggaggccaagatgc

SEQ ID NO: 30958 - DNA, 201 bp, Homo sapiens; identical to SEQ ID NO: 30939

SEQ ID NO: 30959 - DNA, 201 bp, Homo sapiens; identical to SEQ ID NO: 30940

SEQ ID NO: 30960 - DNA, 201 bp, Homo sapiens; identical to SEQ ID NO: 30941

SEQ ID NO: 30961 - DNA, 201 bp, Homo sapiens; identical to SEQ ID NO: 30942

SEQ ID NO: 30962 - DNA, 201 bp, Homo sapiens; identical to SEQ ID NO: 30948

SEQ ID NO: 30963 - DNA, 201 bp, Homo sapiens; identical to SEQ ID NO: 30944

SEQ ID NO: 30964 - DNA, 201 bp, Homo sapiens; identical to SEQ ID NO: 30933

SEQ ID NO: 30965 - DNA, 201 bp, Homo sapiens; identical to SEQ ID NO: 30934

SEQ ID NO: 30966 - DNA, 201 bp, Homo sapiens; identical to SEQ ID NO: 30935

SEQ ID NO: 30967 - DNA, 201 bp, Homo sapiens; identical to SEQ ID NO: 30936

SEQ ID NO: 30968 - DNA, 201 bp, Homo sapiens; identical to SEQ ID NO: 30937

SEQ ID NO: 30969 - DNA, 201 bp, Homo sapiens; identical to SEQ ID NO: 30938

SEQ ID NO: 30970 - DNA, 201 bp, Homo sapiens; identical to SEQ ID NO: 30939

SEQ ID NO: 30971 - DNA, 201 bp, Homo sapiens; identical to SEQ ID NO: 30940

SEQ ID NO: 30972 - DNA, 201 bp, Homo sapiens; identical to SEQ ID NO: 30941

SEQ ID NO: 30973 - DNA, 201 bp, Homo sapiens; identical to SEQ ID NO: 30942

SEQ ID NO: 30974 - DNA, 201 bp, Homo sapiens; identical to SEQ ID NO: 30948

SEQ ID NO: 30975 - DNA, 201 bp, Homo sapiens; identical to SEQ ID NO: 30944

SEQ ID NO: 30976 - DNA, 201 bp, Homo sapiens; identical to SEQ ID NO: 30939

SEQ ID NO: 30977 - DNA, 201 bp, Homo sapiens; identical to SEQ ID NO: 30940

SEQ ID NO: 30978 - DNA, 201 bp, Homo sapiens; identical to SEQ ID NO: 30934

SEQ ID NO: 30979 - DNA, 201 bp, Homo sapiens
acaacgacttcctgattctcccaggattcatagacttcatagctgatgaggtggacctgacctcagccctgacccggaagatcacgctgaagacgccactsatctcctcccccatggacactgtgacagaggctgacatggccattgccatggctaagtttgaacagggcttcatcacggaccctgtggtgctgagcccct

SEQ ID NO: 30980 - DNA, 201 bp, Homo sapiens; identical to SEQ ID NO: 30949

SEQ ID NO: 30981 - DNA, 201 bp, Homo sapiens; identical to SEQ ID NO: 30944

SEQ ID NO: 30982 - DNA, 201 bp, Homo sapiens
cacagtcgtgctgctagaacagtctcgtagctgcagttcagctgtgcttcctcagcctactatcataggcttcctcagccctctgtcatatggctgttttscaaacctgtggagtctgttactgttctttctgcaaggactcacctccttgagccttggtttttgttgtagggattaaatgagataatatgagtggcagct

SEQ ID NO: 30983 - DNA, 201 bp, Homo sapiens
tgggtattacctggagagtcttctttgcttggctccatttatgaagcacccgttaaaaatagttctacgaggagtgaccaatgatcaggttgacccttcarttgatgttcttaaggcaacagcactccctttgttgaaacaatttgggattgatggtgaatcatttgaactgaagattgtgcgacggggaatgcctcccgg

SEQ ID NO: 30984 - DNA, 201 bp, Homo sapiens
caaccttatattatcagcctggcctcctgtatggtggatctgtggaacatgactgtagcgtccttcgtggcattgggtattacctggagagtcttctttgsttggctccatttatgaagcacccgttaaaaatagttctacgaggagtgaccaatgatcaggttgacccttcagttgatgttcttaaggcaacagcactcc

SEQ ID NO: 30985 - DNA, 201 bp, Homo sapiens
gtgcccggctgctgctggaggaaatctacaggggtggatgcgtagactcgaccaaccaaagcctggcgctactactcatgacccttggacagcaggatgtytccaaagtcctgctaggccctctctctccctacacgatagaatttttgcggcatttgaagagctttttccagattatgtttaaaattgaaaccaagccat

SEQ ID NO: 30986 - DNA, 201 bp, Homo sapiens
actcaagggtggggataaagtgctgatgacctgtgttggcattggtttctccaaccttagcaagaccctcaagtgataaccatcacaagataaggccccartgcctacagacaaagcagaagctgccacggacaccaatgggaccaagtccaaatggattaatccaggacagaatagccacttgcttaattttctgtgaag

SEQ ID NO: 30987 - DNA, 201 bp, Homo sapiens
gccattgcccaggaggggcccagtcaccatgagagctcccttgccttacctggaggaagaatgtgccttcaggccacagtcgtgctgctagaacagtctcrtagctgcagttcagctgtgcttcctcagcctactatcataggcttcctcagccctctgtcatatggctgttttgcaaacctgtggagtctgttactgttc

SEQ ID NO: 30988 - DNA, 201 bp, Homo sapiens; identical to SEQ ID NO: 30982

SEQ ID NO: 30989 - DNA, 201 bp, Homo sapiens
ggatcttcatctggttcattgtatttatatgtgagggatggatggctgcggggctccaagtaagttattgggatgtttttatattccaggtgtgctgtacrttcttattttattttcacaatagctctgtgatgtaagtgctatctccatgagaaaattcataaagggtgttttgttcctttgaaatgtataatgtaaaga

SEQ ID NO: 30990 - DNA, 192 bp, Homo sapiens
atggatggctgcggggctccaagtaagttattgggatgtttttatattccaggtgtgctgtacattcttattttattttcacaatagctctgtgatgtaartgctatctccatgagaaaattcataaagggtgttttgttcctttgaaatgtataatgtaaagacattaaatctcctcatttaaggatctaa

SEQ ID NO: 30991 - DNA, 201 bp, Homo sapiens; identical to SEQ ID NO: 30985

SEQ ID NO: 30992 - DNA, 201 bp, Homo sapiens; identical to SEQ ID NO: 30983

SEQ ID NO: 30993 - DNA, 201 bp, Homo sapiens; identical to SEQ ID NO: 30984

SEQ ID NO: 30994 - DNA, 201 bp, Homo sapiens
tatttatatgtgagggatggatggctgcggggctccaagtaagttattgggatgtttttatattccaggtgtgctgtacattcttattttattttcacaayagctctgtgatgtaagtgctatctccatgagaaaattcataaagggtgttttgttcctttgaaatgtataatgtaaagacattaaatctcctcatttaag

SEQ ID NO: 30995 - DNA, 201 bp, Homo sapiens
tgctgtcatggacacggacacggatcttcatctggttcattgtatttatatgtgagggatggatggctgcggggctccaagtaagttattgggatgtttttatattccaggtgtgctgtacattcttattttattttcacaatagctctgtgatgtaagtgctatctccatgagaaaattcataaagggtgttttgttcct

SEQ ID NO: 30996 - DNA, 201 bp, Homo sapiens; identical to SEQ ID NO: 30986

SEQ ID NO: 30997 - DNA, 201 bp, Homo sapiens; identical to SEQ ID NO: 30987

SEQ ID NO: 30998 - DNA, 201 bp, Homo sapiens
aaaagcaggcactaataaggtggaagccatggaatgctttgggtccaggaatggcaagaccagcaagaagatcattgctgactgtggaaaacgctaataartttgaatcatgttttatgttaaccacaagagaattgcttctgtagctcaggagagcacccctccaacccatttgctcacagtatcctataatctttgtgc

SEQ ID NO: 30999 - DNA, 201 bp, Homo sapiens
caccagcaccactgcttcccttcccagtgagaacccgatcaagctttatcatgcagcccagaagggtgggggaaagaaaaagaattaggagaaaatgttgyaaaagtaatgagataatatgagaatgtgctttgggaactgcgaatctggagtcactggtccatgaggaatctaggataagaagaaggaagctgtgaagaa

SEQ ID NO: 31000 - DNA, 201 bp, Homo sapiens
agacaatagccttgaagataaggagcatagtggccggccatcagaagttgacaacgaccaattgagagcaatatttgaagctgatcctcttacaactacasgagaagttgccaaagaactcagtgtcgaccttcctatggttgttcggcatttgaagcaaattggaaaggtgagaaagctccatacatgggtgctgcatga

SEQ ID NO: 31001 - DNA, 150 bp, Homo sapiens
atgttcctcgtacactgcaccagcaccactgcttcccttcccagtgagawcccgatcaagctttatcatgcagcccagaagggtgggggaaagaaaaagaattaggagaaaatgttgtaaaagtaatgagataatatgagaatgtgcttt

SEQ ID NO: 31002 - DNA, 201 bp, Homo sapiens
cgtacactgcaccagcaccactgcttcccttcccagtgagaacccgatcaagctttatcatgcagcccagaagggtgggggaaagaaaaagaattaggagraaatgttgtaaaagtaatgagataatatgagaatgtgctttgggaactgcgaatctggagtcactggtccatgaggaatctaggataagaagaaggaagc

SEQ ID NO: 31003 - DNA, 201 bp, Homo sapiens
tgaagaatttcctttatgatatagctggatgcagtggaaccttcaccgtgcagaacagagaacttgagtgtattcgagagatcaaagagagagtaggcacrtcaaaagttttggttttactcagtggtggagtagactcaacagtttgtacagctttgctaaatcgtgctttgaaccaagaacaagtcattgctgtgcaca

SEQ ID NO: 31004 - DNA, 201 bp, Homo sapiens
gtgaagaaaacagaggctcttcggttgcagtatcgctacttagacttgcgtagtttccaaatgcagtataacctgcgactgaggtcccagatggtcatgaraatgcgggaatatctctgtaatctgcatgggtttgtggatatagaaacccccacattgtttaagaggaccccagggggtgccaaagagtttttagtacca

SEQ ID NO: 31005 - DNA, 201 bp, Homo sapiens
tgaggtcccagatggtcatgaaaatgcgggaatatctctgtaatctgcatgggtttgtggatatagaaacccccacattgtttaagaggaccccagggggkgccaaagagtttttagtaccatccagggaacctggaaagttttattctctccctcagagtcctcaacagtttaagcaacttctgatggttggcggtttag

SEQ ID NO: 31006 - DNA, 201 bp, Homo sapiens
tacatacttgccctggctacctcaccgggctgttattgctggaatcagaggagataacatatatggaagataaagtgaataaaagtactttgaaaaactawaaagcattccacaaatatgagatgatggtattatccatccataaataggtagatatatctctattttatagtttcagattaaacaaaactgatatcaata

SEQ ID NO: 31007 - DNA, 201 bp, Homo sapiens; identical to SEQ ID NO: 31004

SEQ ID NO: 31008 - DNA, 201 bp, Homo sapiens; identical to SEQ ID NO: 31005

SEQ ID NO: 31009 - DNA, 201 bp, Homo sapiens; identical to SEQ ID NO: 31006

SEQ ID NO: 31010 - DNA, 201 bp, Homo sapiens; identical to SEQ ID NO: 31004

SEQ ID NO: 31011 - DNA, 201 bp, Homo sapiens; identical to SEQ ID NO: 31005

SEQ ID NO: 31012 - DNA, 201 bp, Homo sapiens; identical to SEQ ID NO: 31006

SEQ ID NO: 31013 - DNA, 201 bp, Homo sapiens; identical to SEQ ID NO: 31004

SEQ ID NO: 31014 - DNA, 201 bp, Homo sapiens; identical to SEQ ID NO: 31005

SEQ ID NO: 31015 - DNA, 201 bp, Homo sapiens; identical to SEQ ID NO: 31006

SEQ ID NO: 31016 - DNA, 201 bp, Homo sapiens
ttcagtcatcacccaatttaattagccatttgcatgatgctttcacacacaattgattcaagcattatacaggaacacccctgtgcagctacgtttacgtygtcatttattccacagagtcaagaccaatattctgccaaaaaatcaccaatggaaattttcattgatataaatacttgtacatatgatttgtacttctgc

SEQ ID NO: 31017 - DNA, 201 bp, Homo sapiens
gtgcttaatggtgtcccgtaatcttggttcagtgggatatgatcctaatgaaaaaacttttgataaaattcttgttgctaatagaggagaaattgcatgtygggttattagaacttgcaagaagatgggcattaagacagttgccatccacagtgatgttgatgctagttctgttcatgtgaaaatggcggatgaggctgt

SEQ ID NO: 31018 - DNA, 201 bp, Homo sapiens
aatggcggatgaggctgtctgtgttggcccagctcccaccagtaaaagctacctcaacatggatgccatcatggaagccattaagaaaaccagggcccaarctgtacatccaggttatggattcctttcagaaaacaaagaatttgccagatgtttggcagcagaagatgtcgttttcattggacctgacacacatgctat

SEQ ID NO: 31019 - DNA, 201 bp, Homo sapiens
tatacaggaacacccctgtgcagctacgtttacgtcgtcatttattccacagagtcaagaccaatattctgccaaaaaatcaccaatggaaattttcattratataaatacttgtacatatgatttgtacttctgctgtgagattccctagtgtcaaaattaaatcaataaaactgagcatttgtctaaatattagtttgc

SEQ ID NO: 31020 - DNA, 201 bp, Homo sapiens
aagagattgatataaatgtcagtcagttctctgccttgctttattaaattagcacttgccattttttcatctgattgccttactacttctagaagtgaggccctcactcctggtgctgattttcaaaacttcctaaggaccagagactgcaaatgcagattttggcaatccctttcctgctgtgtctctatgtgggtgtac

SEQ ID NO: 31021 - DNA, 201 bp, Homo sapiens
acaagattgaaagcaaattattagctaagaaagcagaggttaatacaatccctggctttgatggagtagtcaaggatgcagaagaagctgtcagaattgcragggaaattggctaccctgtcatgatcaaggcctcagcaggtggtggtgggaaaggcatgcgcattgcttgggatgatgaagagaccagggatggtttta

SEQ ID NO: 31022 - DNA, 201 bp, Homo sapiens
caaggtgaatatcttaaccagacttgccgcagaattgaacaaatttatgctggaaaaagtgactgaggacacaagcagtgttctgcgttccccgatgcccrgagtggtggtggccgtctctgtcaagcctggagacgcggtagcagaaggtcaagaaatttgtgtgattgaagccatgaaaatgcagaatagtatgacagc

SEQ ID NO: 31023 - DNA, 201 bp, Homo sapiens
gtggagttccttgtggactctaagaagaatttttatttcttggaaatgaatacaagactccaggttgagcatcctgtcacagaatgcattactggcctggrcctagtccaggaaatgatccgtgttgctaagggctaccctctcaggcacaaacaagctgatattcgcatcaacggctgggcagttgaatgtcgggtttat

SEQ ID NO: 31024 - DNA, 201 bp, Homo sapiens
gcatcatcattgtttgtggcattccagttaagagcacaacattttcaagaaaattcaagaatgcctgttattaaaccagacatagccaactgggagctctsagtaaaattgcatgataaagttcataccgtagtagcatcaaacaatgggtcagtgttctcggtggaagttgatgggtcgaaactaaatgtgaccagcacg

SEQ ID NO: 31025 - DNA, 201 bp, Homo sapiens
gactctaagaagaatttttatttcttggaaatgaatacaagactccaggttgagcatcctgtcacagaatgcattactggcctggacctagtccaggaaawgatccgtgttgctaagggctaccctctcaggcacaaacaagctgatattcgcatcaacggctgggcagttgaatgtcgggtttatgctgaggacccctac

SEQ ID NO: 31026 - DNA, 201 bp, Homo sapiens; identical to SEQ ID NO: 31016

SEQ ID NO: 31027 - DNA, 201 bp, Homo sapiens
tatttcttggaaatgaatacaagactccaggttgagcatcctgtcacagaatgcattactggcctggacctagtccaggaaatgatccgtgttgctaaggkctaccctctcaggcacaaacaagctgatattcgcatcaacggctgggcagttgaatgtcgggtttatgctgaggacccctacaagtcttttggtttacca

SEQ ID NO: 31028 - DNA, 201 bp, Homo sapiens; identical to SEQ ID NO: 31017

SEQ ID NO: 31029 - DNA, 201 bp, Homo sapiens; identical to SEQ ID NO: 31018

SEQ ID NO: 31030 - DNA, 201 bp, Homo sapiens
aatattgcattacttcgagaggtgataatcaactcacgctttgtaaaaggagacatcagcactaaatttctctccgatgtgtatcctgatggcttcaaagracacatgctaaccaagagtgagaagaaccagttattggcaatagcatcatcattgtttgtggcattccagttaagagcacaacattttcaagaaaattca

SEQ ID NO: 31031 - DNA, 201 bp, Homo sapiens
ggcctggacctagtccaggaaatgatccgtgttgctaagggctaccctctcaggcacaaacaagctgatattcgcatcaacggctgggcagttgaatgtcrggtttatgctgaggacccctacaagtcttttggtttaccatctattgggagattgtctcagtaccaagaaccgttacatctacctggtgtccgagtggac

SEQ ID NO: 31032 - DNA, 201 bp, Homo sapiens
cgcatcaacggctgggcagttgaatgtcgggtttatgctgaggacccctacaagtcttttggtttaccatctattgggagattgtctcagtaccaagaacygttacatctacctggtgtccgagtggacagtggcatccaaccaggaagtgatattagcatttattatgatcctatgatttcaaaactaatcacatatggc

SEQ ID NO: 31033 - DNA, 201 bp, Homo sapiens
tagcatttattatgatcctatgatttcaaaactaatcacatatggctctgatagaactgaggcactgaagagaatggcagatgcactggataactatgttrttcgaggtgttacacataatattgcattacttcgagaggtgataatcaactcacgctttgtaaaaggagacatcagcactaaatttctctccgatgtgta

SEQ ID NO: 31034 - DNA, 201 bp, Homo sapiens; identical to SEQ ID NO: 31019

SEQ ID NO: 31035 - DNA, 201 bp, Homo sapiens; identical to SEQ ID NO: 31020

SEQ ID NO: 31036 - DNA, 201 bp, Homo sapiens; identical to SEQ ID NO: 31022

SEQ ID NO: 31037 - DNA, 201 bp, Homo sapiens; identical to SEQ ID NO: 31021

SEQ ID NO: 31038 - DNA, 201 bp, Homo sapiens; identical to SEQ ID NO: 31023

SEQ ID NO: 31039 - DNA, 201 bp, Homo sapiens; identical to SEQ ID NO: 31024

SEQ ID NO: 31040 - DNA, 201 bp, Homo sapiens; identical to SEQ ID NO: 31025

SEQ ID NO: 31041 - DNA, 201 bp, Homo sapiens; identical to SEQ ID NO: 31016

SEQ ID NO: 31042 - DNA, 201 bp, Homo sapiens; identical to SEQ ID NO: 31027

SEQ ID NO: 31043 - DNA, 201 bp, Homo sapiens; identical to SEQ ID NO: 31017

SEQ ID NO: 31044 - DNA, 201 bp, Homo sapiens; identical to SEQ ID NO: 31018

SEQ ID NO: 31045 - DNA, 201 bp, Homo sapiens; identical to SEQ ID NO: 31030

SEQ ID NO: 31046 - DNA, 201 bp, Homo sapiens; identical to SEQ ID NO: 31031

SEQ ID NO: 31047 - DNA, 201 bp, Homo sapiens; identical to SEQ ID NO: 31032

SEQ ID NO: 31048 - DNA, 201 bp, Homo sapiens; identical to SEQ ID NO: 31033

SEQ ID NO: 31049 - DNA, 201 bp, Homo sapiens; identical to SEQ ID NO: 31019

SEQ ID NO: 31050 - DNA, 201 bp, Homo sapiens; identical to SEQ ID NO: 31020

SEQ ID NO: 31051 - DNA, 201 bp, Homo sapiens; identical to SEQ ID NO: 31022

SEQ ID NO: 31052 - DNA, 201 bp, Homo sapiens; identical to SEQ ID NO: 31021

SEQ ID NO: 31053 - DNA, 201 bp, Homo sapiens
gcttaagtctcactttgctcttagtaataaatcagggttattcccttcctgctttctgacaggttaattctaaagaagagctcctgggaataagaaaataraaacaattcgaggttgtggattgttgcaataaattctgggatttaatttcttttcttaccaaattcaaaattgcattaggcttacctgaccactacgaag

SEQ ID NO: 31054 - DNA, 201 bp, Homo sapiens
gactgtaggcactgccatggcccctgtgctcagtaaggactcggcggacatcgagagtatcctggctttaaatcctcgaacacaaactcatgcaactctgygttccacttcggccaagaaattagacaagaaacattggaaaagaaatcctgataagaactgctttaattgtgagaagctggagaataattttgatgacat

SEQ ID NO: 31055 - DNA, 201 bp, Homo sapiens
gtccctctgggaactcttacttggttctaccactcattcccagagcagagtctatttaagacagagacatgtgccttcagaacagaatttattagaaactyactaaaatttgagagtggtcacacttaggtcttgccataagtatcacctaatgaagagttatgcatagattaggactgcagtagatgcattttaagtgaa

SEQ ID NO: 31056 - DNA, 201 bp, Homo sapiens
tccctgaggagatggaacttgctaaggaagaaaagtgtgaatttctgccattcctgtccccacggaaggttatagtaaaaggtgggagaattgttgctatrcagtttgttcggacagagcaagatgaaactggaaaatggaatgaagatgaagatcagatggtccatctgaaagccgatgtggtcatcagtgcctttggtt

SEQ ID NO: 31057 - DNA, 201 bp, Homo sapiens
ttgctaaggaagaaaagtgtgaatttctgccattcctgtccccacggaaggttatagtaaaaggtgggagaattgttgctatgcagtttgttcggacagarcaagatgaaactggaaaatggaatgaagatgaagatcagatggtccatctgaaagccgatgtggtcatcagtgcctttggttcagttctgagtgatccta

SEQ ID NO: 31058 - DNA, 201 bp, Homo sapiens
tgtatggccctggacaaagctcctttctgaatattgagctcatcagtgagaaaacggctgcatattggtgtcaaagtgtcactgaactaaaggctgacttyccagacaacattgtgattgctagcattatgtgcagttacaataaaaatgactggacggaacttgccaagaagtctgaggattctggagcagatgccctgg

SEQ ID NO: 31059 - DNA, 201 bp, Homo sapiens
tatcccacagatcagaaatccttcgctgcctcccccagaaaaaatgtctgaagcctattctgcaaagattgctctttttggtgctgggcctgcaagtatamgttgtgcttcctttttggctcgattggggtactctgacatcactatatttgaaaaacaagaatatgttggtggtttaagtacttctgaaattcctcagtt

SEQ ID NO: 31060 - DNA, 201 bp, Homo sapiens
gtgctccatatttgatttctaattgtaagtgaaattaagcattttgaaacaaagtactctttaacatacaagaaaatgtatccaaggaaacattttatcawtaaaaattacctttaattttaatgctgtttctaagaaaatgtagttagctccataaagtacaaatgaagaaagtcaaaaaattatttgctatggcaggat

SEQ ID NO: 31061 - DNA, 201 bp, Homo sapiens
gacctgtaatgattctggctaccaggctatacagtttgatccagaaacccacctgcccaccataaccgacacttgtacaggctgtactctgtgtctcagtktttgccctattgtcgactgcatcaaaatggtttccaggacaacaccttatgaaccaaagagaggcgtacccttatctgtgaatccggtgtgttaaggtga

SEQ ID NO: 31062 - DNA, 201 bp, Homo sapiens
gtagagcaagttgtggctatgattgatgaagaaatgtgtatcaactgtggtaaatgctacatgacctgtaatgattctggctaccaggctatacagtttgwtccagaaacccacctgcccaccataaccgacacttgtacaggctgtactctgtgtctcagtgtttgccctattgtcgactgcatcaaaatggtttccagg

SEQ ID NO: 31063 - DNA, 201 bp, Homo sapiens
aggcctattcctaccatcaaggatgtaataggaaaagcactgcagtaccttggaacatttggtgaattgagcaacgtagagcaagttgtggctatgattgwtgaagaaatgtgtatcaactgtggtaaatgctacatgacctgtaatgattctggctaccaggctatacagtttgatccagaaacccacctgcccaccata

SEQ ID NO: 31064 - DNA, 201 bp, Homo sapiens
cctattgatctggtggacattagtgtagaaatggccggattgaagtttataaatccttttggtcttgctagcgcaactccagccaccagcacatcaatgaktcgaagagcttttgaagctggatggggttttgccctcaccaaaactttctctcttgataaggacattgtgacaaatgtttcccccagaatcatccgggga

SEQ ID NO: 31065 - DNA, 201 bp, Homo sapiens
aaattaagcattttgaaacaaagtactctttaacatacaagaaaatgtatccaaggaaacattttatcattaaaaattacctttaattttaatgctgtttmtaagaaaatgtagttagctccataaagtacaaatgaagaaagtcaaaaaattatttgctatggcaggataagaaagcctaaaattgagtttgtagaactt

SEQ ID NO: 31066 - DNA, 201 bp, Homo sapiens
  misc_feature (1)...(201): n = A,T,C or G
acaatatggagcttccgtttctgccaagcctgaactacccctcttttacactcctattgatctggtggacattagtgtagaaatggccggattgaagtttntaaatccttttggtcttgctagcgcaactccagccaccagcacatcaatgattcgaagagcttttgaagctggatggggttttgccctcaccaaaacttt

SEQ ID NO: 31067 - DNA, 201 bp, Homo sapiens
agatgggtgtacaaactcatcctcttttaatggcatttctctttaaactatgttcctaacaaaatgagatgataggatagatcctggttaccactcttttrctgtgcacatatgggctctgactggttttaatagtcaccttcatgattatagcaactaatgtttgaacaaagctcaaagtatgcaatgcttcattattca

SEQ ID NO: 31068 - DNA, 201 bp, Homo sapiens
taggcaagctgttcagattcctttttttgccaagctgaccccaaatgtcactgatattgtgagcatcgcaagagctgcaaaggaaggtggtgccaatggcrttacagccaccaacactgtctcaggtctgatgggattaaaatctgatggcacaccttggccagcagtggggattgcaaagcgaactacatatggaggagt

SEQ ID NO: 31069 - DNA, 201 bp, Homo sapiens
atcagatggtccatctgaaagccgatgtggtcatcagtgcctttggttcagttctgagtgatcctaaagtaaaagaagccttgagccctataaaatttaayagatggggtctcccagaagtagatccagaaactatgcaaactagtgaagcatgggtatttgcaggtggtgatgtcgttggtttggctaacactacagtgg

SEQ ID NO: 31070 - DNA, 201 bp, Homo sapiens
ctctgatctttgtgtaggtggatgcaatttatatgccactgaagagggacccattaatattggtggattgcagcaatttgctactgaggtattcaaagcartgagtatcccacagatcagaaatccttcgctgcctcccccagaaaaaatgtctgaagcctattctgcaaagattgctctttttggtgctgggcctgcaag

SEQ ID NO: 31071 - DNA, 201 bp, Homo sapiens
aggcaagctgttcagattcctttttttgccaagctgaccccaaatgtcactgatattgtgagcatcgcaagagctgcaaaggaaggtggtgccaatggcgktacagccaccaacactgtctcaggtctgatgggattaaaatctgatggcacaccttggccagcagtggggattgcaaagcgaactacatatggaggagtg

SEQ ID NO: 31072 - DNA, 201 bp, Homo sapiens
ctgtttctaagaaaatgtagttagctccataaagtacaaatgaagaaagtcaaaaaattatttgctatggcaggataagaaagcctaaaattgagtttgtrgaactttattaagtaaaatccccttcgctgaaattgcttatttttggtgttggatagaggatagggagaatatttactaactaaataccattcactactc

SEQ ID NO: 31073 - DNA, 201 bp, Homo sapiens
tggtacattcacaaatacgtacagtcacaatatggagcttccgtttctgccaagcctgaactacccctcttttacactcctattgatctggtggacattartgtagaaatggccggattgaagtttataaatccttttggtcttgctagcgcaactccagccaccagcacatcaatgattcgaagagcttttgaagctgga

SEQ ID NO: 31074 - DNA, 201 bp, Homo sapiens
aaactcatcctcttttaatggcatttctctttaaactatgttcctaacaaaatgagatgataggatagatcctggttaccactcttttactgtgcacataygggctctgactggttttaatagtcaccttcatgattatagcaactaatgtttgaacaaagctcaaagtatgcaatgcttcattattcaagaatgaaaaat

SEQ ID NO: 31075 - DNA, 201 bp, Homo sapiens
aatgtagttagctccataaagtacaaatgaagaaagtcaaaaaattatttgctatggcaggataagaaagcctaaaattgagtttgtagaactttattaartaaaatccccttcgctgaaattgcttatttttggtgttggatagaggatagggagaatatttactaactaaataccattcactactcatgcgtgagatgg

SEQ ID NO: 31076 - DNA, 201 bp, Homo sapiens
gaagactactgcactggcctcaaagccctgctttatctgaaaagcattgaagaactacaagactgggatggacagagtccagctactgtgagtcaccagaragggaaaccagttccacgtatagctgaactcatggacaagaaactgccaagttttggaccttatctggaacagcgcaagaaaatcatagcagaaaacaag

SEQ ID NO: 31077 - DNA, 201 bp, Homo sapiens
ttgtgcttcctttttggctcgattggggtactctgacatcactatatttgaaaaacaagaatatgttggtggtttaagtacttctgaaattcctcagttcyggctgccgtatgatgtagtgaattttgagattgagctaatgaaggaccttggtgtaaagataatttgcggtaaaagcctttcagtgaatgaaatgactct

SEQ ID NO: 31078 - DNA, 201 bp, Homo sapiens
agtccagctactgtgagtcaccagaaagggaaaccagttccacgtatagctgaactcatggacaagaaactgccaagttttggaccttatctggaacagcrcaagaaaatcatagcagaaaacaagattagactgaaagaacaaaatgtagctttttcaccacttaagagaaactgttttatccccaaaaggcctattcct

SEQ ID NO: 31079 - DNA, 201 bp, Homo sapiens; identical to SEQ ID NO: 31054

SEQ ID NO: 31080 - DNA, 201 bp, Homo sapiens
ctgcccctcaggagccagacacgtttgaggacatcatcaacgacgttgagaagataatcatgcctggggtgacgcactggcacagcccctacttcttcgcytacttccccactgccagctcgtacccggccatgcttgcggacatgctgtgcggggccattggctgcatcggcttctcctgggcggcaagcccagcatgca

SEQ ID NO: 31081 - DNA, 201 bp, Homo sapiens
ggtggcttactcatccgatcaggcacactcctcagtggaaagagctgggttaattggtggagtgaaattaaaagccatcccctcagatggcaacttcgccrtgcgtgcgtctgccctgcaggaagccctggagagagacaaagcggctggcctgattcctttctttatggttgccaccctggggaccacaacatgctgctc

SEQ ID NO: 31082 - DNA, 201 bp, Homo sapiens
agtgccaaaaaaatccacttggttccatgtcacctcagggacaagtttgtcctgcgctttgccatctgttctcgcacggtggaatctgcccatgtgcagcrggcctgggaacacatcaaagagctggcggccgacgtgctgcgagcagagagggagtaggagtgaagccagctgcaggaatcaaaaattgaagagagatat

SEQ ID NO: 31083 - DNA, 201 bp, Homo sapiens
gtaaggaattcgaatttccagcatttttcacctctgacagagcccagacaccatgaacgcaagtgaattccgaaggagagggaaggagatggtggattacrtggccaactacatggaaggcattgagggacgccaggtctaccctgacgtggagcccgggtacctgcggccgctgatccctgccgctgcccctcaggagcc

SEQ ID NO: 31084 - DNA, 201 bp, Homo sapiens
ggtacctgcggccgctgatccctgccgctgcccctcaggagccagacacgtttgaggacatcatcaacgacgttgagaagataatcatgcctggggtgacrcactggcacagcccctacttcttcgcctacttccccactgccagctcgtacccggccatgcttgcggacatgctgtgcggggccattggctgcatcggct

SEQ ID NO: 31085 - DNA, 201 bp, Homo sapiens
gccgctatcatggagaagctggtggcttactcatccgatcaggcacactcctcagtggaaagagctgggttaattggtggagtgaaattaaaagccatccyctcagatggcaacttcgccatgcgtgcgtctgccctgcaggaagccctggagagagacaaagcggctggcctgattcctttctttatggttgccaccctg

SEQ ID NO: 31086 - DNA, 201 bp, Homo sapiens; identical to SEQ ID NO: 31080

SEQ ID NO: 31087 - DNA, 201 bp, Homo sapiens; identical to SEQ ID NO: 31081

SEQ ID NO: 31088 - DNA, 201 bp, Homo sapiens; identical to SEQ ID NO: 31082

SEQ ID NO: 31089 - DNA, 201 bp, Homo sapiens
gagtctcaggaatattgaatgcagttttcacctctgacagagcccagacaccatgaacgcaagtgaattccgaaggagagggaaggagatggtggattacrtggccaactacatggaaggcattgagggacgccaggtctaccctgacgtggagcccgggtacctgcggccgctgatccctgccgctgcccctcaggagcc

SEQ ID NO: 31090 - DNA, 201 bp, Homo sapiens; identical to SEQ ID NO: 31084

SEQ ID NO: 31091 - DNA, 201 bp, Homo sapiens; identical to SEQ ID NO: 31085

SEQ ID NO: 31092 - DNA, 201 bp, Homo sapiens
agccttgctccctgtgcttatctggatgcggtgtaggatgaagatgaccctatagaactctaccctggaagtcctggcaaagtggatatgtgacatttttkaaaccagggacatgttggtgctgcttaatatttaaatcataattttcagactcttaaaaattactaaataagtttgaagagacacagccatctgcctaca

SEQ ID NO: 31093 - DNA, 142 bp, Homo sapiens
gcaatccagtgtgtaggtccagggcgacaagcgctgctcccrtggctggggtaagtccctccagcattcagccttgctccctgtgcttatctggatgcggtgtaggatgaagatgaccctatagaactctaccctggaagtc

SEQ ID NO: 31094 - DNA, 201 bp, Homo sapiens; identical to SEQ ID NO: 31080

SEQ ID NO: 31095 - DNA, 201 bp, Homo sapiens; identical to SEQ ID NO: 31081

SEQ ID NO: 31096 - DNA, 201 bp, Homo sapiens; identical to SEQ ID NO: 31082

SEQ ID NO: 31097 - DNA, 201 bp, Homo sapiens
agagcaagtcactcccggctgcctttttcacctctgacagagcccagacaccatgaacgcaagtgaattccgaaggagagggaaggagatggtggattacrtggccaactacatggaaggcattgagggacgccaggtctaccctgacgtggagcccgggtacctgcggccgctgatccctgccgctgcccctcaggagcc

SEQ ID NO: 31098 - DNA, 201 bp, Homo sapiens; identical to SEQ ID NO: 31084

SEQ ID NO: 31099 - DNA, 201 bp, Homo sapiens; identical to SEQ ID NO: 31085

SEQ ID NO: 31100 - DNA, 201 bp, Homo sapiens
ctccgttagaataaacctgggccttcgggaaaagaggtggctctcattatttttcatgattctaaaagactatgcaattaaaaccgcatctgtagtattaytaattggaaggaattattacttgacccgtaatagggttgtggccgttttctgatgcctaagtattatacagagcccacaatggccagtttactaccagaa

SEQ ID NO: 31101 - DNA, 201 bp, Homo sapiens; identical to SEQ ID NO: 31100

SEQ ID NO: 31102 - DNA, 201 bp, Homo sapiens
agcatcagtgaacatccccagaaggcaaccaccgagctgcccttgctgcgggcggccctcaaggagaccttgcggctctaccctgtgggtctgtttttggwgcgagtggtgagctcagacttggtgcttcagaactaccacatcccagctgggacattggtacaggttttcctctactcgctgggtcgcaatgccgccttg

SEQ ID NO: 31103 - DNA, 201 bp, Homo sapiens
cagcctcatgccccaggcctcgtctttcatggaccaggtcttgttcaagcagcgagtgttgggtcctctgcttcctgagctgtcccctggagaaggtcccraggatgctgtcaggagatggaagagtcatgtggggtgggaacctggggtgtggttccagaaatgtttttggcaacaggagagacaggattgggccaacaa

SEQ ID NO: 31104 - DNA, 201 bp, Homo sapiens
aaccgattgcggctgaacccagatgtgctgtcgcccaaggccgtgcagaggttcctcccgatggtggatgcagtggccagggacttctcccaggccctgargaagaaggtgctgcagaacgcccgggggagcctgaccctggacgtccagcccagcatcttccactacaccatagaagccagcaacttagctctttttgga

SEQ ID NO: 31105 - DNA, 201 bp, Homo sapiens
gtgtgttccccagctgatcatgtcagcctcatgccccaggcctcgtctttcatggaccaggtcttgttcaagcagcgagtgttgggtcctctgcttcctgwgctgtcccctggagaaggtcccgaggatgctgtcaggagatggaagagtcatgtggggtgggaacctggggtgtggttccagaaatgtttttggcaacag

SEQ ID NO: 31106 - DNA, 201 bp, Homo sapiens
gcgcctggcagaggcagagatgctgctgctgctgcaccacgtgctgaagcacttcctggtggagacactaactcaagaggacataaagatggtctacagcktcatattgaggcctggcacgtcccccctcctcactttcagagcgattaactagtcttgcatctgcacccagggtcccagcctggccaccagcttccctct

SEQ ID NO: 31107 - DNA, 201 bp, Homo sapiens
tgacacattttcaagtgatacaactgagtctcgaggggcgtgtgttccccagctgatcatgtcagcctcatgccccaggcctcgtctttcatggaccaggycttgttcaagcagcgagtgttgggtcctctgcttcctgagctgtcccctggagaaggtcccgaggatgctgtcaggagatggaagagtcatgtggggtgg

SEQ ID NO: 31108 - DNA, 201 bp, Homo sapiens
cctgtggtcacttatcctgacacattttcaagtgatacaactgagtctcgaggggcgtgtgttccccagctgatcatgtcagcctcatgccccaggcctcrtctttcatggaccaggtcttgttcaagcagcgagtgttgggtcctctgcttcctgagctgtcccctggagaaggtcccgaggatgctgtcaggagatgga

SEQ ID NO: 31109 - DNA, 201 bp, Homo sapiens
ctttcagagcgattaactagtcttgcatctgcacccagggtcccagcctggccaccagcttccctctgcctgaccccaggccacctgtcttctctcccacrtgcacagcttcctgagtcacccctctgtccagccagctcctgcacaaatggaactccccagggcctccaggactggggcttgccaggcttgtcaaatagc

SEQ ID NO: 31110 - DNA, 201 bp, Homo sapiens
cgaggcctgagcggtataatccccagcgctggctagacatcaggggctccggcaggaacttccaccacgtgccctttggctttggcatgcgccagtgcctygggcggcgcctggcagaggcagagatgctgctgctgctgcaccacgtgctgaagcacttcctggtggagacactaactcaagaggacataaagatggtct

SEQ ID NO: 31111 - DNA, 201 bp, Homo sapiens
ggctgaggctgctgcagatctggagggagcagggttatgagcacctgcacctggagatgcaccagaccttccaggagctggggcccattttcaggtacaayttgggaggaccacgcatggtgtgtgtgatgctgccggaggatgtggagaagctgcaacaggtggacagcctgcatccctgcaggatgatcctggagccct

SEQ ID NO: 31112 - DNA, 201 bp, Homo sapiens
gggcaaaggcagaggtgtgcgtggcagcgccctggctgtccctgcaaagggcacgggcactgggcactagagccgctcgggcccctaggacggtgctgccrtttgaagccatgccccagcatccaggcaacaggtggctgaggctgctgcagatctggagggagcagggttatgagcacctgcacctggagatgcaccaga

SEQ ID NO: 31113 - DNA, 201 bp, Homo sapiens
gatcccagcatctcagagtccagtcaagttccctcctgcagcctgaccccaggcagctcgagcatgccctgagctctctgaaagttgtcaccctggaataygatcctgcagggtagactaaaaaggcccctgtggtcacttatcctgacacattttcaagtgatacaactgagtctcgaggggcgtgtgttccccagctga

SEQ ID NO: 31114 - DNA, 192 bp, Homo sapiens
ggaatggcactcagggcaaaggcagaggtgtgcgtggcagcgccctggctgtccctgcaaagggcacgggcactgggcactagagccgctcrggcccctaggacggtgctgccgtttgaagccatgccccagcatccaggcaacaggtggctgaggctgctgcagatctggagggagcagggttatgagcac

SEQ ID NO: 31115 - DNA, 188 bp, Homo sapiens
ggaatggcactcagggcaaaggcagaggtgtgcgtggcagcgccctggctgtccctgcaaagggcacgggcactgggcactagagccrctcgggcccctaggacggtgctgccgtttgaagccatgccccagcatccaggcaacaggtggctgaggctgctgcagatctggagggagcagggttatga

SEQ ID NO: 31116 - DNA, 201 bp, Homo sapiens
ctgatcatgtcagcctcatgccccaggcctcgtctttcatggaccaggtcttgttcaagcagcgagtgttgggtcctctgcttcctgagctgtcccctggrgaaggtcccgaggatgctgtcaggagatggaagagtcatgtggggtgggaacctggggtgtggttccagaaatgtttttggcaacaggagagacaggatt

SEQ ID NO: 31117 - DNA, 201 bp, Homo sapiens
attggtacaggttttcctctactcgctgggtcgcaatgccgccttgttcccgaggcctgagcggtataatccccagcgctggctagacatcaggggctccrgcaggaacttccaccacgtgccctttggctttggcatgcgccagtgcctcgggcggcgcctggcagaggcagagatgctgctgctgctgcaccacgtgct

SEQ ID NO: 31118 - DNA, 201 bp, Homo sapiens
acagacaacatcgtgggcacaaatgtggcgtgttcttgttgaatgggcctgaatggcgcttcaaccgattgcggctgaacccagatgtgctgtcgcccaasgccgtgcagaggttcctcccgatggtggatgcagtggccagggacttctcccaggccctgaagaagaaggtgctgcagaacgcccgggggagcctgaccc

SEQ ID NO: 31119 - DNA, 201 bp, Homo sapiens
agcgggatcccagcatctcagagtccagtcaagttccctcctgcagcctgaccccaggcagctcgagcatgccctgagctctctgaaagttgtcaccctgkaatacgatcctgcagggtagactaaaaaggcccctgtggtcacttatcctgacacattttcaagtgatacaactgagtctcgaggggcgtgtgttcccca

SEQ ID NO: 31120 - DNA, 201 bp, Homo sapiens
tggctagacatcaggggctccggcaggaacttccaccacgtgccctttggctttggcatgcgccagtgcctcgggcggcgcctggcagaggcagagatgcygctgctgctgcaccacgtgctgaagcacttcctggtggagacactaactcaagaggacataaagatggtctacagcttcatattgaggcctggcacgtcc

SEQ ID NO: 31121 - DNA, 201 bp, Homo sapiens
ggagcctgtctcgctggatcagccccaaggtgtggaaggagcactttgaggcctgggactgcatcttccagtacggtgacaactgtatccagaaaatctaycaggaactggccttcaaccgccctcaacactacacaggcatcgtggcagagctcctgttgaaggcggaactgtcactagaagccatcaaggccaactcta

SEQ ID NO: 31122 - DNA, 201 bp, Homo sapiens
atcagccccaaggtgtggaaggagcactttgaggcctgggactgcatcttccagtacggtgacaactgtatccagaaaatctaccaggaactggccttcarccgccctcaacactacacaggcatcgtggcagagctcctgttgaaggcggaactgtcactagaagccatcaaggccaactctatggaactcactgcaggg

SEQ ID NO: 31123 - DNA, 201 bp, Homo sapiens
aggcctgggactgcatcttccagtacggtgacaactgtatccagaaaatctaccaggaactggccttcaaccgccctcaacactacacaggcatcgtggcrgagctcctgttgaaggcggaactgtcactagaagccatcaaggccaactctatggaactcactgcagggagcgtggacacgacagcgtttcccttgctga

SEQ ID NO: 31124 - DNA, 201 bp, Homo sapiens
agccctgggtggcctacagacaacatcgtgggcacaaatgtggcgtgttcttgttgaatgggcctgaatggcgcttcaaccgattgcggctgaacccagawgtgctgtcgcccaaggccgtgcagaggttcctcccgatggtggatgcagtggccagggacttctcccaggccctgaagaagaaggtgctgcagaacgccc

SEQ ID NO: 31125 - DNA, 201 bp, Homo sapiens
gcgccaggagagcctggccgccgcagccagcatcagtgaacatccccagaaggcaaccaccgagctgcccttgctgcgggcggccctcaaggagaccttgmggctctaccctgtgggtctgtttttggagcgagtggtgagctcagacttggtgcttcagaactaccacatcccagctgggacattggtacaggttttcct

SEQ ID NO: 31126 - DNA, 201 bp, Homo sapiens
tccagtacggtgacaactgtatccagaaaatctaccaggaactggccttcaaccgccctcaacactacacaggcatcgtggcagagctcctgttgaaggcrgaactgtcactagaagccatcaaggccaactctatggaactcactgcagggagcgtggacacgacagcgtttcccttgctgatgacgctctttgagctgg

SEQ ID NO: 31127 - DNA, 201 bp, Homo sapiens
gccaactctatggaactcactgcagggagcgtggacacgacagcgtttcccttgctgatgacgctctttgagctggctcggaaccccgacgtgcagcagaycctgcgccaggagagcctggccgccgcagccagcatcagtgaacatccccagaaggcaaccaccgagctgcccttgctgcgggcggccctcaaggagacc

SEQ ID NO: 31128 - DNA, 201 bp, Homo sapiens
gaacttcctccatgccctggaggtcatgttcaaatccaccgtccagctcatgttcatgcccaggagcctgtctcgctggatcagccccaaggtgtggaagkagcactttgaggcctgggactgcatcttccagtacggtgacaactgtatccagaaaatctaccaggaactggccttcaaccgccctcaacactacacagg

SEQ ID NO: 31129 - DNA, 201 bp, Homo sapiens
tttatctcctgggattttcattagggcaaagatctcagcagccagctcctggtagctgatgaggatcagagcgtttgttcccccatgaaaggggaaatacytaggtaatcattccaggtgtgttcagtagttccaggactcagggactcaggccagtcaccctgtgaccgcaggttgctttcccaccctgggcaatgcagt

SEQ ID NO: 31130 - DNA, 201 bp, Homo sapiens
aaggagaccttgcggctctaccctgtgggtctgtttttggagcgagtggtgagctcagacttggtgcttcagaactaccacatcccagctgggacattggwacaggttttcctctactcgctgggtcgcaatgccgccttgttcccgaggcctgagcggtataatccccagcgctggctagacatcaggggctccggcagg

SEQ ID NO: 31131 - DNA, 201 bp, Homo sapiens
aggcaaccaccgagctgcccttgctgcgggcggccctcaaggagaccttgcggctctaccctgtgggtctgtttttggagcgagtggtgagctcagacttrgtgcttcagaactaccacatcccagctgggacattggtacaggttttcctctactcgctgggtcgcaatgccgccttgttcccgaggcctgagcggtata

SEQ ID NO: 31132 - DNA, 201 bp, Homo sapiens
ttcagctgccactggacacttcaattgtacgctgcgaccagttgccaggaaggagagggctggcaagagagccgcggcagccgtggcagggtgtaggggayggtggacggccagggcccccccctctctctctttctctctctctctcttgcttggtttctgtaatgaggaagttctccgcagctcagtttcctttccctc

SEQ ID NO: 31133 - DNA, 201 bp, Homo sapiens
gcatcttgtcgcccagcatcgtgctcaccaaagcccaggaggctgatcgcggcgaggggcccggcaagcaggtgcccgcgccccggctgcgctccttcacrtgctcatcctctgccgagggcagggcggccggcggggacaagagccaagggaagcccaagaccccggtcagctcccaggccccggtgccggccaagaggc

SEQ ID NO: 31134 - DNA, 163 bp, Homo sapiens
caccccgacgccgcggccgccgctgccagtcaagagcccggcggtgctgcacctccagcactccaagggccgcgactaccgcgacaacaccgagctcccgyatcacggcaagcaccggccggaggaggggccaccagggcctctaggcaggactgccatgcag

SEQ ID NO: 31135 - DNA, 201 bp, Homo sapiens
agcagctctccccgggcctccgtccacgtcctcaggttcctggtgaggccaatcccatcaacatggtgtccaagctcagccaactgacaagcctgttgtcrtccattgaagacaaggtcaaggccttgctgcacgagggtcctgagtctccgcaccggccctcccttatccctccagtcacctttgaggtgaaggcagagt

SEQ ID NO: 31136 - DNA, 201 bp, Homo sapiens
tgcagctcaaagtcgacgttgagtctgggaaactgatcattaagaagtccaaggatggttctgaggacaagttctacagccacaagaaaatcctgcagctsattaagtcacagaaatttctgaataagttggtgatcttggtggaaacagagaaggagaagatcctgcggaaggaatatgtttttgctgactccaaaaaga

SEQ ID NO: 31137 - DNA, 201 bp, Homo sapiens
ttgtacgctgcgaccagttgccaggaaggagagggctggcaagagagccgcggcagccgtggcagggtgtaggggacggtggacggccagggccccccccyctctctctttctctctctctctcttgcttggtttctgtaatgaggaagttctccgcagctcagtttcctttccctcactgagcgcctgaaacaggaagtc

SEQ ID NO: 31138 - DNA, 201 bp, Homo sapiens
cagcagccgaggccaccaagaggcaacgggcggcaggttgcagtggaggggcctccgctcccctcggtggtgtgtgggtcctgggggtgcctgccggcccrgccgaggaggcccacgcccaccatggtcccctgctggaaccatggcaacatcacccgctccaaggcggaggagctgctttccaggacaggcaaggacggg

SEQ ID NO: 31139 - DNA, 201 bp, Homo sapiens
atgggagtggggccctttgggccaccaatgcccctgcacgtgaagcagaccttgtcccctgaccagcagcccacagcctggagctacgaccagccgcccarggactccccgctggggccctgcaggggagaaagtcctccgacacctcccggccagccgcccatatcacccaagaagtttttaccctcaacagcaaaccgg

SEQ ID NO: 31140 - DNA, 201 bp, Homo sapiens
aagagccaagggaagcccaagaccccggtcagctcccaggccccggtgccggccaagaggcccatcaagccttccagatcggaaatcaaccagcagacccygcccaccccgacgccgcggccgccgctgccagtcaagagcccggcggtgctgcacctccagcactccaagggccgcgactaccgcgacaacaccgagctc

SEQ ID NO: 31141 - DNA, 201 bp, Homo sapiens
ccaaggatggttctgaggacaagttctacagccacaagaaaatcctgcagctcattaagtcacagaaatttctgaataagttggtgatcttggtggaaacrgagaaggagaagatcctgcggaaggaatatgtttttgctgactccaaaaagagagaaggcttctgccagctcctgcagcagatgaagaacaagcactcag

SEQ ID NO: 31142 - DNA, 201 bp, Homo sapiens; identical to SEQ ID NO: 31138

SEQ ID NO: 31143 - DNA, 201 bp, Homo sapiens; identical to SEQ ID NO: 31132

SEQ ID NO: 31144 - DNA, 201 bp, Homo sapiens
gacgtgaaggcctggctgagcctggcttcctcccaggtgtccatggggtggcttagctggtaaactggggccctccaagtgaccctgctctgtgacatgayggagttgcatgccacaggctatttgtggtccataggtgtgaagaggaaacgaaggtgaagcagactgtccagagatgaagggaaaggaggggctgtggct

SEQ ID NO: 31145 - DNA, 120 bp, Homo sapiens
tgtgggctctcgcagcagacagagtgaggaaatagtgtgtgcacatacactcattcatgcacctgtatttatctatatatcttttttttaaaaaataccgmatctcactctgttgcctag

SEQ ID NO: 31146 - DNA, 132 bp, Homo sapiens
ctgttggagtgttgtgggctctcgcagcagacagagtgaggaaatagtgtgtgcacatacactcattcatgcacctgtatttatctatatatctttttttwaaaaaataccgcatctcactctgttgcctag

SEQ ID NO: 31147 - DNA, 201 bp, Homo sapiens; identical to SEQ ID NO: 31137

SEQ ID NO: 31148 - DNA, 201 bp, Homo sapiens
aagcagactgtccagagatgaagggaaaggaggggctgtggcttggccgactgttgtcttcagtctctcaaaggagagagaggaagtggctcaggagggaragaagggaggtgaacttacaggagaacagaccgtacgggcaaatcatctgagtccaggagttttagaccagcctgggcaacatggcaaaattccgcctct

SEQ ID NO: 31149 - DNA, 201 bp, Homo sapiens
cgcgactaccgcgacaacaccgagctcccgcatcacggcaagcaccggccggaggaggggccaccagggcctctaggcaggactgccatgcagtgaagccytcagtgagctgccactgagtcgggagcccagaggaacggcgtgaagccactggaccctctcccgggacctcctgctggctcctcctgcccagcttcctat

SEQ ID NO: 31150 - DNA, 201 bp, Homo sapiens; identical to SEQ ID NO: 31133

SEQ ID NO: 31151 - DNA, 201 bp, Homo sapiens
caccccgacgccgcggccgccgctgccagtcaagagcccggcggtgctgcacctccagcactccaagggccgcgactaccgcgacaacaccgagctcccgyatcacggcaagcaccggccggaggaggggccaccagggcctctaggcaggactgccatgcagtgaagccctcagtgagctgccactgagtcgggagccca

SEQ ID NO: 31152 - DNA, 201 bp, Homo sapiens
gccattctgaagaaaggaactgcagcgccgatttgagggtggagatatagataataataatattaataataataatggccacatggatcgaacactcatgrtgtgccaagtgctgtgctaagtgctttacgaacattcgtcatatcaggatgacctcgagagctgaggctctagccacctaaaaccacgtgcccaaaccca

SEQ ID NO: 31153 - DNA, 201 bp, Homo sapiens; identical to SEQ ID NO: 31135

SEQ ID NO: 31154 - DNA, 201 bp, Homo sapiens; identical to SEQ ID NO: 31136

SEQ ID NO: 31155 - DNA, 201 bp, Homo sapiens
caagcaccggccggaggaggggccaccagggcctctaggcaggactgccatgcagtgaagccctcagtgagctgccactgagtcgggagcccagaggaacsgcgtgaagccactggaccctctcccgggacctcctgctggctcctcctgcccagcttcctatgcaaggctttgtgttttcaggaaagggcctagcttctg

SEQ ID NO: 31156 - DNA, 201 bp, Homo sapiens
ttagcaccaagtgctgaggctggaagaaaaacgcacaccagacgggcaacaaacagtctgggtccccagctcgctcttggtacttgggaccccagtgcctygttgagggcgccattctgaagaaaggaactgcagcgccgatttgagggtggagatatagataataataatattaataataataatggccacatggatcga

SEQ ID NO: 31157 - DNA, 201 bp, Homo sapiens; identical to SEQ ID NO: 31139

SEQ ID NO: 31158 - DNA, 201 bp, Homo sapiens; identical to SEQ ID NO: 31140

SEQ ID NO: 31159 - DNA, 201 bp, Homo sapiens; identical to SEQ ID NO: 31141

SEQ ID NO: 31160 - DNA, 201 bp, Homo sapiens
gttttcaggaaagggcctagcttctgtgtggcccacagagttcactgcctgtgagacttagcaccaagtgctgaggctggaagaaaaacgcacaccagacrggcaacaaacagtctgggtccccagctcgctcttggtacttgggaccccagtgcctcgttgagggcgccattctgaagaaaggaactgcagcgccgattt

SEQ ID NO: 31161 - DNA, 201 bp, Homo sapiens
tggcccacagagttcactgcctgtgagacttagcaccaagtgctgaggctggaagaaaaacgcacaccagacgggcaacaaacagtctgggtccccagctygctcttggtacttgggaccccagtgcctcgttgagggcgccattctgaagaaaggaactgcagcgccgatttgagggtggagatatagataataataata

SEQ ID NO: 31162 - DNA, 201 bp, Homo sapiens; identical to SEQ ID NO: 31132

SEQ ID NO: 31163 - DNA, 201 bp, Homo sapiens; identical to SEQ ID NO: 31133

SEQ ID NO: 31164 - DNA, 201 bp, Homo sapiens; identical to SEQ ID NO: 31151

SEQ ID NO: 31165 - DNA, 201 bp, Homo sapiens; identical to SEQ ID NO: 31152

SEQ ID NO: 31166 - DNA, 201 bp, Homo sapiens; identical to SEQ ID NO: 31156

SEQ ID NO: 31167 - DNA, 201 bp, Homo sapiens; identical to SEQ ID NO: 31139

SEQ ID NO: 31168 - DNA, 201 bp, Homo sapiens; identical to SEQ ID NO: 31140

SEQ ID NO: 31169 - DNA, 201 bp, Homo sapiens; identical to SEQ ID NO: 31160

SEQ ID NO: 31170 - DNA, 201 bp, Homo sapiens; identical to SEQ ID NO: 31161

SEQ ID NO: 31171 - DNA, 201 bp, Homo sapiens; identical to SEQ ID NO: 31149

SEQ ID NO: 31172 - DNA, 201 bp, Homo sapiens; identical to SEQ ID NO: 31135

SEQ ID NO: 31173 - DNA, 201 bp, Homo sapiens; identical to SEQ ID NO: 31136

SEQ ID NO: 31174 - DNA, 201 bp, Homo sapiens; identical to SEQ ID NO: 31137

SEQ ID NO: 31175 - DNA, 201 bp, Homo sapiens; identical to SEQ ID NO: 31138

SEQ ID NO: 31176 - DNA, 201 bp, Homo sapiens; identical to SEQ ID NO: 31155

SEQ ID NO: 31177 - DNA, 201 bp, Homo sapiens; identical to SEQ ID NO: 31141

SEQ ID NO: 31178 - DNA, 201 bp, Homo sapiens
ccaatagtaacactagtggatattcagagtcaaagaaggatgatgctcgagcacagcttatgaaagaggatccggaactggctaagtcttttattaagacrttatttggtgttctttatgaagtgtatagttcctcagcaggacctgcggtcagacataagtgccttagagcaattcttaggataatttattttgcggatg

SEQ ID NO: 31179 - DNA, 201 bp, Homo sapiens
aaagacactgatggaatgctgtaggcctgatcatggttatactcatgacagtcgggctgtgaagtttttgtttgagattctcagtagttttgataatgagyagcagaggttatttctccagtttgtgactggtagcccaagattgcctgttggaggattccggagtttgaatccacctttgacaattgtccgaaagacgtt

SEQ ID NO: 31180 - DNA, 201 bp, Homo sapiens
tgccggactattcaagcattgagataatgcgtgaaaaactgttgatagcagcaagagaagggcagcagtcgttccatctttcctgatcatagcaagaaatrcagtgtctgcctgttacagcaaaagaaacaaatcatgatttcttttctaatgttatcacctgagtcaaggaaacatgttacgccttcttgttgtaggaaa

SEQ ID NO: 31181 - DNA, 201 bp, Homo sapiens
cccctcacctatttggtcctcttggtcctcggatgtcacagcttttccatagaacaattggaagtggagctagttctaaggcccagcagctactacaaggwttgcaagccagtgatgaaagtcaacagcttcaggcagttattgagatgtgtcagttactggtcatgggaaatgaggagacactgggagggtttcctgtca

SEQ ID NO: 31182 - DNA, 201 bp, Homo sapiens
tgcgtgaaaaactgttgatagcagcaagagaagggcagcagtcgttccatctttcctgatcatagcaagaaatgcagtgtctgcctgttacagcaaaagamacaaatcatgatttcttttctaatgttatcacctgagtcaaggaaacatgttacgccttcttgttgtaggaaaaacggcttgcagattataaagagacat

SEQ ID NO: 31183 - DNA, 201 bp, Homo sapiens
aactatcttaagttgccggactattcaagcattgagataatgcgtgaaaaactgttgatagcagcaagagaagggcagcagtcgttccatctttcctgatyatagcaagaaatgcagtgtctgcctgttacagcaaaagaaacaaatcatgatttcttttctaatgttatcacctgagtcaaggaaacatgttacgccttc

SEQ ID NO: 31184 - DNA, 201 bp, Homo sapiens
ctaaagttagccttcctaaaacaaaactgtctcttccagggtcttctaagtcagagacatcaaaacctggaccttctggattacaggccaaattagcaagkttaagaaaatctacgaagaaacgcagtgagtctccacctgctgagctccccagtttgaggcggagcacacgccaaaagaccacgggctcctgtgctagta

SEQ ID NO: 31185 - DNA, 201 bp, Homo sapiens
atggatcagatgaggaaatagatgagtctctggctgctcagttcctaaattcaggaaatgtaagacacaggctgcagttttatattggagaacatttgctkccgtataacatgactgtgtatcaggcagtacggcagtttagtatacaggctgaagatgaaagagaatccacagatgatgagagcaatcctctaggcagag

SEQ ID NO: 31186 - DNA, 201 bp, Homo sapiens
gatctgcgaaacctaccaagctggcttcaaaatcagccacctcagccaaagctgggtgtagcaccatcactgattcttcttctgctgcctctacttcctcstcgtcttctgctgtagcctcggcctcctccactgtaccaccaggtgccagagtgaaacaaggaaaagatcagaacaaggccaggcgttcccgttcagcgt

SEQ ID NO: 31187 - DNA, 201 bp, Homo sapiens; identical to SEQ ID NO: 31178

SEQ ID NO: 31188 - DNA, 201 bp, Homo sapiens; identical to SEQ ID NO: 31179

SEQ ID NO: 31189 - DNA, 201 bp, Homo sapiens; identical to SEQ ID NO: 31180

SEQ ID NO: 31190 - DNA, 201 bp, Homo sapiens; identical to SEQ ID NO: 31181

SEQ ID NO: 31191 - DNA, 201 bp, Homo sapiens; identical to SEQ ID NO: 31182

SEQ ID NO: 31192 - DNA, 201 bp, Homo sapiens; identical to SEQ ID NO: 31183

SEQ ID NO: 31193 - DNA, 201 bp, Homo sapiens
gtcccagccccagaagaagtagcagggaaaaggaacagaggtcttctaagtcagagacatcaaaacctggaccttctggattacaggccaaattagcaagkttaagaaaatctacgaagaaacgcagtgagtctccacctgctgagctccccagtttgaggcggagcacacgccaaaagaccacgggctcctgtgctagta

SEQ ID NO: 31194 - DNA, 201 bp, Homo sapiens; identical to SEQ ID NO: 31185

SEQ ID NO: 31195 - DNA, 201 bp, Homo sapiens; identical to SEQ ID NO: 31186

SEQ ID NO: 31196 - DNA, 201 bp, Homo sapiens; identical to SEQ ID NO: 31178

SEQ ID NO: 31197 - DNA, 201 bp, Homo sapiens; identical to SEQ ID NO: 31179

SEQ ID NO: 31198 - DNA, 201 bp, Homo sapiens; identical to SEQ ID NO: 31180

SEQ ID NO: 31199 - DNA, 201 bp, Homo sapiens; identical to SEQ ID NO: 31181

SEQ ID NO: 31200 - DNA, 201 bp, Homo sapiens; identical to SEQ ID NO: 31182

SEQ ID NO: 31201 - DNA, 201 bp, Homo sapiens; identical to SEQ ID NO: 31183

SEQ ID NO: 31202 - DNA, 201 bp, Homo sapiens; identical to SEQ ID NO: 31184

SEQ ID NO: 31203 - DNA, 201 bp, Homo sapiens; identical to SEQ ID NO: 31185

SEQ ID NO: 31204 - DNA, 201 bp, Homo sapiens; identical to SEQ ID NO: 31186

SEQ ID NO: 31205 - DNA, 201 bp, Homo sapiens; identical to SEQ ID NO: 31178

SEQ ID NO: 31206 - DNA, 201 bp, Homo sapiens; identical to SEQ ID NO: 31179

SEQ ID NO: 31207 - DNA, 201 bp, Homo sapiens; identical to SEQ ID NO: 31180

SEQ ID NO: 31208 - DNA, 201 bp, Homo sapiens; identical to SEQ ID NO: 31181

SEQ ID NO: 31209 - DNA, 201 bp, Homo sapiens; identical to SEQ ID NO: 31182

SEQ ID NO: 31210 - DNA, 201 bp, Homo sapiens; identical to SEQ ID NO: 31183

SEQ ID NO: 31211 - DNA, 201 bp, Homo sapiens; identical to SEQ ID NO: 31193

SEQ ID NO: 31212 - DNA, 201 bp, Homo sapiens; identical to SEQ ID NO: 31185

SEQ ID NO: 31213 - DNA, 201 bp, Homo sapiens; identical to SEQ ID NO: 31186

SEQ ID NO: 31214 - DNA, 201 bp, Homo sapiens
gtgcggcagcttcaaatgctgcagatagtgcgaatgccagcctagtcaatggtaaaatgcaggatggcaatgtggacgccagccagagcaaagccaaacarcaggacggggcagccgccatggagatgcagcccctcaagagtgccgagggcggcgacgctgacgacaggaagaaggccagcatgcacaagaaggagaagt

SEQ ID NO: 31215 - DNA, 201 bp, Homo sapiens
cagtgtgattttaaaccaaattgtcttcctgtagtcacaatatatactgtagccttttaacagcaagtcttgctttcccaaacagaaagccattctgaaaycctacagtatcacaggtgagaaaaggtggttattttttccccaagacaacagcactagtaatcccacttaataagagcttatttaattggatgtcagcct

SEQ ID NO: 31216 - DNA, 201 bp, Homo sapiens
caaagtgtacaccttcaactccgtgcgcaagtccatgagcactgtcatcaagctgcccgacgagagcttccgcatgtacagcaagggggcttctgagatcrtgctcaagaagtgctgcaaaatcctcaatggggcgggagagcctcgtgtcttccggccccgcgaccgggacgagatggtaaagaaggtgattgagcccat

SEQ ID NO: 31217 - DNA, 201 bp, Homo sapiens
catgcaccccctcactctcacacttgcacacatacacacacacacacacgaaatggttggtttgtcaaaactcactgtagtacataaagcttgcactctgygtcctatatctagcagcatggggtacgtttggcagttcactccattagggggtaaataatttatgaccattcatctgtttttatgaatttttttatctag

SEQ ID NO: 31218 - DNA, 201 bp, Homo sapiens
ccagcagactcaagttcctcaaggaggcaggcaggctcacacagaaggaggagatcccggaggaggagctcaacgaggacgtggaggagatcgaccacgcrgagcgggagctgcggcggggccagatcctgtggttccgaggcctgaatcggatccagacacagatccgcgtcgtgaaggcgttccgtagctctctctatg

SEQ ID NO: 31219 - DNA, 201 bp, Homo sapiens
cagttttccatctccccacttctttgatcagtcatgtgtccgtgacctcgttccatgacatcaggatagctgtgtttgcacaccatgctccatgttcattyggagccaggaggggttctcagtggagcctggcttagggaacagggagcgatggaagaatgccaacattagcgttggtcttctcttgtcaggaatgaagga

SEQ ID NO: 31220 - DNA, 201 bp, Homo sapiens
ttcctttctcacagttttccatctccccacttctttgatcagtcatgtgtccgtgacctcgttccatgacatcaggatagctgtgtttgcacaccatgctscatgttcattcggagccaggaggggttctcagtggagcctggcttagggaacagggagcgatggaagaatgccaacattagcgttggtcttctcttgtca

SEQ ID NO: 31221 - DNA, 201 bp, Homo sapiens
aaccaaacactttccgcctctcttgcaaaatccattcctcatgctgaccctcctcacgatggctgtgtcagcccagccccttcccttctccaggcccagakaactcttccacaaacaagatgagagccactcgggaaaagagccatagtcaactgggagggcctacatctggatggcggtggaaaaacttgagggtttggg

SEQ ID NO: 31222 - DNA, 201 bp, Homo sapiens
tgggccatgctgtctaccagcttgccctcatcttcaccctgctctttgttggcgagaagatgttccagatcgacagcgggaggaacgcgcccctgcattcrccaccctcagaacattacaccatcatcttcaacaccttcgtcatgatgcagctcttcaacgagatcaacgcccgcaagatccacggcgagcgcaatgtct

SEQ ID NO: 31223 - DNA, 201 bp, Homo sapiens
gcgagaagatgttccagatcgacagcgggaggaacgcgcccctgcattcgccaccctcagaacattacaccatcatcttcaacaccttcgtcatgatgcarctcttcaacgagatcaacgcccgcaagatccacggcgagcgcaatgtctttgacggcatcttccggaaccccatcttctgcaccatcgtgctgggcacct

SEQ ID NO: 31224 - DNA, 201 bp, Homo sapiens
accagtgagggtgtgctgaggacagccacaagcagccatcacccggcagcctcttgtccagcgctgacccttgggcccagcccgagcaaggaccgcagcaracatgggtgacatgaccaacagcgacttttactccaaaaaccaaagaaatgagtcgagccatgggggcgagttcgggtgcacaatggaggagctccgctc

SEQ ID NO: 31225 - DNA, 201 bp, Homo sapiens
aggatgaaggagaggcagaggcaggttggatcgagggggccgccattctcctctcagttatctgtgtggtcctggtcacggccttcaatgactggagcaargagaaacagttccggggcctgcagagccgcatcgagcaggaacagaaatttaccgtggtccgggctggccaggtggtccagatccctgtggctgagatcg

SEQ ID NO: 31226 - DNA, 201 bp, Homo sapiens
ctccactgcagctggaccagtggatgtggtgcatattcattgggttaggagagctcgtttggggccaggtcatcgccaccatcccgaccagcagactcaarttcctcaaggaggcaggcaggctcacacagaaggaggagatcccggaggaggagctcaacgaggacgtggaggagatcgaccacgcggagcgggagctgc

SEQ ID NO: 31227 - DNA, 201 bp, Homo sapiens
ttgaaggtttgccgggcaccgctccagacctggaaaagagaaagcaaatttttgggcaaaactttatacctccaaagaagccaaaaaccttcctgcagctygtgtgggaggcgctgcaggacgtgacgctcatcatcctggagattgccgccatcatctccctggggctgtccttctaccacccgcccggcgagggcaacg

SEQ ID NO: 31228 - DNA, 201 bp, Homo sapiens
gtgggatcaacctgacgaccgacacaagcaaatcagctacctcttcaagtccagggagccccatccacagcctggagacgtcgctttagctgaggaccctstcgcctgcccgcccgccctcatggaccccgctgccacccgctttccgggcacccatccatccaggcacccaactcacccaagcagcaacgagcaacaatc

SEQ ID NO: 31229 - DNA, 201 bp, Homo sapiens
ggggccaggtcatcgccaccatcccgaccagcagactcaagttcctcaaggaggcaggcaggctcacacagaaggaggagatcccggaggaggagctcaaygaggacgtggaggagatcgaccacgcggagcgggagctgcggcggggccagatcctgtggttccgaggcctgaatcggatccagacacagatccgcgtcg

SEQ ID NO: 31230 - DNA, 201 bp, Homo sapiens
ttggcgtgacggtgctggtggtcgccgtgcccgaggggctccctctggccgtcaccatctcgttggcctattcggtgaagaaaatgatgaaggacaacaayctggtacgccacctggatgcctgtgagaccatgggcaatgccacagccatctgctcagacaagacaggcacgctgaccaccaatcgcatgacagtggtac

SEQ ID NO: 31231 - DNA, 201 bp, Homo sapiens
tctttaccctcctgggggctggtggtgaagaggaagagaagaaagacaaaaaaggtgtgaagaagggggatggccttcagctaccagcagcagacggtgcrgcagcttcaaatgctgcagatagtgcgaatgccagcctagtcaatggtaaaatgcaggatggcaatgtggacgccagccagagcaaagccaaacaacagg

SEQ ID NO: 31232 - DNA, 201 bp, Homo sapiens
tcaacaagaagccgtggctgcctgagtgcacgcccgtctacgtgcagtactttgtcaagttcttcatcattggcgtgacggtgctggtggtcgccgtgccmgaggggctccctctggccgtcaccatctcgttggcctattcggtgaagaaaatgatgaaggacaacaacctggtacgccacctggatgcctgtgagacca

SEQ ID NO: 31233 - DNA, 201 bp, Homo sapiens
tggatgcctgtgagaccatgggcaatgccacagccatctgctcagacaagacaggcacgctgaccaccaatcgcatgacagtggtacaggcctatgtcggygacgtccactataaagagatccccgaccccagctccatcaacaccaagaccatggagctgctgatcaatgccatcgccatcaacagcgcctacaccacca

SEQ ID NO: 31234 - DNA, 201 bp, Homo sapiens
tgacagtggtacaggcctatgtcggcgacgtccactataaagagatccccgaccccagctccatcaacaccaagaccatggagctgctgatcaatgccatygccatcaacagcgcctacaccaccaagattctgcccccagagaaggagggcgccctgcctcggcaggtgggcaacaagacggagtgcggcctgctgggct

SEQ ID NO: 31235 - DNA, 201 bp, Homo sapiens
cggccttcaatgactggagcaaagagaaacagttccggggcctgcagagccgcatcgagcaggaacagaaatttaccgtggtccgggctggccaggtggtscagatccctgtggctgagatcgtggttggggacatagcccaggtcaaatatggtgacctcctccctgccgacggcctcttcatccagggcaatgacctca

SEQ ID NO: 31236 - DNA, 201 bp, Homo sapiens
cagagattgaggtagtgttgaaatattataaatggtattgtgttgatttttttttttatttagtaacttacaggtttgtttccttattaatggcagcatcygagctgttggcatattggatgaggatcagtatggcttgctgcttttatttttatttttgaagaagaatagcctttttctctgcactatttagatccgaat

SEQ ID NO: 31237 - DNA, 201 bp, Homo sapiens; identical to SEQ ID NO: 31214

SEQ ID NO: 31238 - DNA, 201 bp, Homo sapiens; identical to SEQ ID NO: 31215

SEQ ID NO: 31239 - DNA, 201 bp, Homo sapiens; identical to SEQ ID NO: 31216

SEQ ID NO: 31240 - DNA, 201 bp, Homo sapiens; identical to SEQ ID NO: 31217

SEQ ID NO: 31241 - DNA, 201 bp, Homo sapiens; identical to SEQ ID NO: 31218

SEQ ID NO: 31242 - DNA, 201 bp, Homo sapiens; identical to SEQ ID NO: 31219

SEQ ID NO: 31243 - DNA, 201 bp, Homo sapiens; identical to SEQ ID NO: 31220

SEQ ID NO: 31244 - DNA, 201 bp, Homo sapiens; identical to SEQ ID NO: 31221

SEQ ID NO: 31245 - DNA, 201 bp, Homo sapiens; identical to SEQ ID NO: 31222

SEQ ID NO: 31246 - DNA, 201 bp, Homo sapiens; identical to SEQ ID NO: 31223

SEQ ID NO: 31247 - DNA, 201 bp, Homo sapiens; identical to SEQ ID NO: 31224

SEQ ID NO: 31248 - DNA, 201 bp, Homo sapiens; identical to SEQ ID NO: 31225

SEQ ID NO: 31249 - DNA, 201 bp, Homo sapiens; identical to SEQ ID NO: 31226

SEQ ID NO: 31250 - DNA, 201 bp, Homo sapiens; identical to SEQ ID NO: 31227

SEQ ID NO: 31251 - DNA, 201 bp, Homo sapiens; identical to SEQ ID NO: 31228

SEQ ID NO: 31252 - DNA, 201 bp, Homo sapiens; identical to SEQ ID NO: 31229

SEQ ID NO: 31253 - DNA, 201 bp, Homo sapiens; identical to SEQ ID NO: 31230

SEQ ID NO: 31254 - DNA, 201 bp, Homo sapiens; identical to SEQ ID NO: 31231

SEQ ID NO: 31255 - DNA, 201 bp, Homo sapiens; identical to SEQ ID NO: 31232

SEQ ID NO: 31256 - DNA, 201 bp, Homo sapiens; identical to SEQ ID NO: 31233

SEQ ID NO: 31257 - DNA, 201 bp, Homo sapiens; identical to SEQ ID NO: 31234

SEQ ID NO: 31258 - DNA, 201 bp, Homo sapiens; identical to SEQ ID NO: 31235

SEQ ID NO: 31259 - DNA, 201 bp, Homo sapiens; identical to SEQ ID NO: 31236

SEQ ID NO: 31260 - DNA, 201 bp, Homo sapiens
attcagctgctctccactgcagctggaccagtggatgtggtgcatattcattgggttaggagagctcgtttggggccaggtcatcgccaccatcccgaccrgcagactcaagttcctcaaggaggcaggcaggctcacacagaaggaggagatcccggaggaggagctcaacgaggacgtggaggagatcgaccacgcgga

SEQ ID NO: 31261 - DNA, 201 bp, Homo sapiens
aagccagcccactgctctcctacaaggaaggaaagatctgcacgtgtaaaacatggggcagccttggaacatggtgttttttggagtttcctttctcacayttttccatctccccacttctttgatcagtcatgtgtccgtgacctcgttccatgacatcaggatagctgtgtttgcacaccatgctccatgttcattcgg

SEQ ID NO: 31262 - DNA, 201 bp, Homo sapiens
aaacgccaccaaagccagcccactgctctcctacaaggaaggaaagatctgcacgtgtaaaacatggggcagccttggaacatggtgttttttggagtttsctttctcacagttttccatctccccacttctttgatcagtcatgtgtccgtgacctcgttccatgacatcaggatagctgtgtttgcacaccatgctcca

SEQ ID NO: 31263 - DNA, 201 bp, Homo sapiens
ggcactggccactgagccgcccacggagaccctgctgctgaggaagccgtacggccgcaacaagccgctcatctccaggaccatgatgaagaacatcctgrgccatgctgtctaccagcttgccctcatcttcaccctgctctttgttggcgagaagatgttccagatcgacagcgggaggaacgcgcccctgcattcgcc

SEQ ID NO: 31264 - DNA, 201 bp, Homo sapiens
tttgagacttttcagcatatgatcttttttccataaacttgtacagtgcaaaagacattttgaataccatgatcgatgatgtcccatgcttcgaggaaaakcaaacactttccgcctctcttgcaaaatccattcctcatgctgaccctcctcacgatggctgtgtcagcccagccccttcccttctccaggcccagagaa

SEQ ID NO: 31265 - DNA, 201 bp, Homo sapiens
cggccgcaacaagccgctcatctccaggaccatgatgaagaacatcctgggccatgctgtctaccagcttgccctcatcttcaccctgctctttgttggcragaagatgttccagatcgacagcgggaggaacgcgcccctgcattcgccaccctcagaacattacaccatcatcttcaacaccttcgtcatgatgcagct

SEQ ID NO: 31266 - DNA, 201 bp, Homo sapiens
catcctggagattgccgccatcatctccctggggctgtccttctaccacccgcccggcgagggcaacgaaggatgtgcgacggcccagggtggggcagagratgaaggagaggcagaggcaggttggatcgagggggccgccattctcctctcagttatctgtgtggtcctggtcacggccttcaatgactggagcaaaga

SEQ ID NO: 31267 - DNA, 201 bp, Homo sapiens
ctccctaactggagagtctgaccaggtgcgcaagtccgtggacaaggaccccatgctgctgtcaggaacccacgtgatggagggctcaggacggatgttgrtgactgctgtgggtgtgaactctcagactggcatcatctttaccctcctgggggctggtggtgaagaggaagagaagaaagacaaaaaagccaaacaaca

SEQ ID NO: 31268 - DNA, 201 bp, Homo sapiens
ccccctcattgatgacaccgacctggaagaagatgccgcgctcaagcagaactcgagcccgccgtcatccctcaacaagaacaacagcgccatcgacagtsggatcaacctgacgaccgacacaagcaaatcagctacctcttcaagtccagggagccccatccacagcctggagacgtcgctttagctgaggaccctctc

SEQ ID NO: 31269 - DNA, 201 bp, Homo sapiens
gcttgctgcttttatttttatttttgaagaagaatagcctttttctctgcactatttagatccgaatgaaccttatgatgtgtatattgagatgtactcaytgtgattttaaaccaaattgtcttcctgtagtcacaatatatactgtagccttttaacagcaagtcttgctttcccaaacagaaagccattctgaaaccc

SEQ ID NO: 31270 - DNA, 201 bp, Homo sapiens
gtgggcaacaagacggagtgcggcctgctgggcttcgtgctggacctgaagcaggactacgagcccgtgcgcagccagatgccagaggagaagttgtacaragtgtacaccttcaactccgtgcgcaagtccatgagcactgtcatcaagctgcccgacgagagcttccgcatgtacagcaagggggcttctgagatcgtg

SEQ ID NO: 31271 - DNA, 201 bp, Homo sapiens
ggttctcagtggagcctggcttagggaacagggagcgatggaagaatgccaacattagcgttggtcttctcttgtcaggaatgaaggatgcttgcacacaygcaccccctcactctcacacttgcacacatacacacacacacacacgaaatggttggtttgtcaaaactcactgtagtacataaagcttgcactctgcgt

SEQ ID NO: 31272 - DNA, 201 bp, Homo sapiens
caccaagctggctgtgcagatcgggaaggcgggcttggtgatgtcagccatcacggtgatcatcctggtgctctacttcactgtggacaccttcgtggtcmacaagaagccgtggctgcctgagtgcacgcccgtctacgtgcagtactttgtcaagttcttcatcattggcgtgacggtgctggtggtcgccgtgcccga

SEQ ID NO: 31273 - DNA, 201 bp, Homo sapiens
gacggcccagggtggggcagaggatgaaggagaggcagaggcaggttggatcgagggggccgccattctcctctcagttatctgtgtggtcctggtcacgsccttcaatgactggagcaaagagaaacagttccggggcctgcagagccgcatcgagcaggaacagaaatttaccgtggtccgggctggccaggtggtcca

SEQ ID NO: 31274 - DNA, 201 bp, Homo sapiens
gatctgcaaagcactgctcgaagacttttctctcaatgaaactcgcttgagtttactaagagcatttcaaaaataggttctctttggcactgtctgtacayagattgaggtagtgttgaaatattataaatggtattgtgttgatttttttttttatttagtaacttacaggtttgtttccttattaatggcagcatctga

SEQ ID NO: 31275 - DNA, 201 bp, Homo sapiens; identical to SEQ ID NO: 31214

SEQ ID NO: 31276 - DNA, 201 bp, Homo sapiens; identical to SEQ ID NO: 31215

SEQ ID NO: 31277 - DNA, 201 bp, Homo sapiens; identical to SEQ ID NO: 31216

SEQ ID NO: 31278 - DNA, 201 bp, Homo sapiens; identical to SEQ ID NO: 31217

SEQ ID NO: 31279 - DNA, 201 bp, Homo sapiens
ccagcagactcaagttcctcaaggaggcaggcaggctcacacagaaggaggagatcccggaggaggagctcaacgaggacgtggaggagatcgaccacgcrgagcgggagctgcggcggggccagatcctgtggttccgaggcctgaatcggatccagacacagattgaagtagtcaatactttcaagagcggggcctcct

SEQ ID NO: 31280 - DNA, 201 bp, Homo sapiens; identical to SEQ ID NO: 31219

SEQ ID NO: 31281 - DNA, 201 bp, Homo sapiens; identical to SEQ ID NO: 31220

SEQ ID NO: 31282 - DNA, 201 bp, Homo sapiens; identical to SEQ ID NO: 31221

SEQ ID NO: 31283 - DNA, 201 bp, Homo sapiens; identical to SEQ ID NO: 31222

SEQ ID NO: 31284 - DNA, 201 bp, Homo sapiens; identical to SEQ ID NO: 31223

SEQ ID NO: 31285 - DNA, 201 bp, Homo sapiens; identical to SEQ ID NO: 31224

SEQ ID NO: 31286 - DNA, 201 bp, Homo sapiens; identical to SEQ ID NO: 31225

SEQ ID NO: 31287 - DNA, 201 bp, Homo sapiens; identical to SEQ ID NO: 31226

SEQ ID NO: 31288 - DNA, 201 bp, Homo sapiens; identical to SEQ ID NO: 31227

SEQ ID NO: 31289 - DNA, 201 bp, Homo sapiens; identical to SEQ ID NO: 31228

SEQ ID NO: 31290 - DNA, 201 bp, Homo sapiens
ggggccaggtcatcgccaccatcccgaccagcagactcaagttcctcaaggaggcaggcaggctcacacagaaggaggagatcccggaggaggagctcaaygaggacgtggaggagatcgaccacgcggagcgggagctgcggcggggccagatcctgtggttccgaggcctgaatcggatccagacacagattgaagtag

SEQ ID NO: 31291 - DNA, 201 bp, Homo sapiens; identical to SEQ ID NO: 31230

SEQ ID NO: 31292 - DNA, 201 bp, Homo sapiens; identical to SEQ ID NO: 31231

SEQ ID NO: 31293 - DNA, 201 bp, Homo sapiens; identical to SEQ ID NO: 31232

SEQ ID NO: 31294 - DNA, 201 bp, Homo sapiens; identical to SEQ ID NO: 31233

SEQ ID NO: 31295 - DNA, 201 bp, Homo sapiens; identical to SEQ ID NO: 31234

SEQ ID NO: 31296 - DNA, 201 bp, Homo sapiens; identical to SEQ ID NO: 31235

SEQ ID NO: 31297 - DNA, 201 bp, Homo sapiens; identical to SEQ ID NO: 31236

SEQ ID NO: 31298 - DNA, 201 bp, Homo sapiens
tggtgactgctgtgggtgtgaactctcagactggcatcatctttaccctcctgggggctggtggtgaagaggaagagaagaaagacaaaaaagccaaacarcaggacggggcagccgccatggagatgcagcccctcaagagtgccgagggcggcgacgctgacgacaggaagaaggccagcatgcacaagaaggagaagt

SEQ ID NO: 31299 - DNA, 201 bp, Homo sapiens; identical to SEQ ID NO: 31215

SEQ ID NO: 31300 - DNA, 201 bp, Homo sapiens; identical to SEQ ID NO: 31216

SEQ ID NO: 31301 - DNA, 201 bp, Homo sapiens; identical to SEQ ID NO: 31217

SEQ ID NO: 31302 - DNA, 201 bp, Homo sapiens; identical to SEQ ID NO: 31218

SEQ ID NO: 31303 - DNA, 201 bp, Homo sapiens; identical to SEQ ID NO: 31219

SEQ ID NO: 31304 - DNA, 201 bp, Homo sapiens; identical to SEQ ID NO: 31220

SEQ ID NO: 31305 - DNA, 201 bp, Homo sapiens; identical to SEQ ID NO: 31221

SEQ ID NO: 31306 - DNA, 201 bp, Homo sapiens; identical to SEQ ID NO: 31222

SEQ ID NO: 31307 - DNA, 201 bp, Homo sapiens; identical to SEQ ID NO: 31223

SEQ ID NO: 31308 - DNA, 201 bp, Homo sapiens; identical to SEQ ID NO: 31224

SEQ ID NO: 31309 - DNA, 201 bp, Homo sapiens; identical to SEQ ID NO: 31225

SEQ ID NO: 31310 - DNA, 201 bp, Homo sapiens; identical to SEQ ID NO: 31226

SEQ ID NO: 31311 - DNA, 201 bp, Homo sapiens; identical to SEQ ID NO: 31227

SEQ ID NO: 31312 - DNA, 201 bp, Homo sapiens; identical to SEQ ID NO: 31228

SEQ ID NO: 31313 - DNA, 201 bp, Homo sapiens; identical to SEQ ID NO: 31229

SEQ ID NO: 31314 - DNA, 201 bp, Homo sapiens; identical to SEQ ID NO: 31230

SEQ ID NO: 31315 - DNA, 201 bp, Homo sapiens; identical to SEQ ID NO: 31232

SEQ ID NO: 31316 - DNA, 201 bp, Homo sapiens; identical to SEQ ID NO: 31233

SEQ ID NO: 31317 - DNA, 201 bp, Homo sapiens; identical to SEQ ID NO: 31234

SEQ ID NO: 31318 - DNA, 201 bp, Homo sapiens; identical to SEQ ID NO: 31235

SEQ ID NO: 31319 - DNA, 201 bp, Homo sapiens; identical to SEQ ID NO: 31236

SEQ ID NO: 31320 - DNA, 201 bp, Homo sapiens; identical to SEQ ID NO: 31214

SEQ ID NO: 31321 - DNA, 201 bp, Homo sapiens; identical to SEQ ID NO: 31215

SEQ ID NO: 31322 - DNA, 201 bp, Homo sapiens; identical to SEQ ID NO: 31216

SEQ ID NO: 31323 - DNA, 201 bp, Homo sapiens; identical to SEQ ID NO: 31217

SEQ ID NO: 31324 - DNA, 201 bp, Homo sapiens; identical to SEQ ID NO: 31218

SEQ ID NO: 31325 - DNA, 201 bp, Homo sapiens; identical to SEQ ID NO: 31219

SEQ ID NO: 31326 - DNA, 201 bp, Homo sapiens; identical to SEQ ID NO: 31220

SEQ ID NO: 31327 - DNA, 201 bp, Homo sapiens; identical to SEQ ID NO: 31222

SEQ ID NO: 31328 - DNA, 201 bp, Homo sapiens; identical to SEQ ID NO: 31221

SEQ ID NO: 31329 - DNA, 201 bp, Homo sapiens; identical to SEQ ID NO: 31223

SEQ ID NO: 31330 - DNA, 201 bp, Homo sapiens; identical to SEQ ID NO: 31224

SEQ ID NO: 31331 - DNA, 201 bp, Homo sapiens; identical to SEQ ID NO: 31225

SEQ ID NO: 31332 - DNA, 201 bp, Homo sapiens; identical to SEQ ID NO: 31226

SEQ ID NO: 31333 - DNA, 201 bp, Homo sapiens; identical to SEQ ID NO: 31227

SEQ ID NO: 31334 - DNA, 201 bp, Homo sapiens; identical to SEQ ID NO: 31229

SEQ ID NO: 31335 - DNA, 201 bp, Homo sapiens; identical to SEQ ID NO: 31228

SEQ ID NO: 31336 - DNA, 201 bp, Homo sapiens; identical to SEQ ID NO: 31230

SEQ ID NO: 31337 - DNA, 201 bp, Homo sapiens; identical to SEQ ID NO: 31231

SEQ ID NO: 31338 - DNA, 201 bp, Homo sapiens; identical to SEQ ID NO: 31232

SEQ ID NO: 31339 - DNA, 201 bp, Homo sapiens; identical to SEQ ID NO: 31233

SEQ ID NO: 31340 - DNA, 201 bp, Homo sapiens; identical to SEQ ID NO: 31234

SEQ ID NO: 31341 - DNA, 201 bp, Homo sapiens; identical to SEQ ID NO: 31235

SEQ ID NO: 31342 - DNA, 201 bp, Homo sapiens; identical to SEQ ID NO: 31236

SEQ ID NO: 31343 - DNA, 147 bp, Homo sapiens
atgtttgatggagaagtcccacactggtaccacttctcctgcttgcrgaaggtgggccactccatgcggcaccctgacgttgaggtggatggattctctgagctttggtgggatgaccagcagaaagtcaagaagacagctgacgct

SEQ ID NO: 31344 - DNA, 201 bp, Homo sapiens
tcccacactggtaccacttctcctgcttgcagaaggtgggccactccatgcggcaccctgacgttgaggtggatggattctctgagctttggtgggatgaycagcagaaagtcaagaagacagctgacgctggaggagtgacgggcaaaggccagaatggaattggtagcaaggcagagaagacgctgggctgctttgtca

SEQ ID NO: 31345 - DNA, 128 bp, Homo sapiens
agctctactgagtggagtacaccaagarcgggcgcacctcttgcaagaaatgcagcgagagcatccccaaggactcgctccggatggccatcatggtgcaatagtccatgtttgatggagaagtccca

SEQ ID NO: 31346 - DNA, 201 bp, Homo sapiens
agcgagagcatccccaaggactcgctccggatggccatcatggtgcaatagtccatgtttgatggagaagtcccacactggtaccacttctcctgcttgcrgaaggtgggccactccatgcggcaccctgacgttgaggtggatggattctctgagctttggtgggatgaccagcagaaagtcaagaagacagctgacgct

SEQ ID NO: 31347 - DNA, 201 bp, Homo sapiens
tcccacactggtaccacttctcctgcttgcagaaggtgggccactccatgcggcaccctgacgttgaggtggatggattctctgagctttggtgggatgaycagcagaaagtcaagaagacagctgacgctggaggagtgacgggcaaaggccagaatggaattggtagcaaggcagagaagacgctgggtgactttgcag

SEQ ID NO: 31348 - DNA, 201 bp, Homo sapiens
actaggaatgcttggcactccaaaaattcacaaagtatcccaaaaagttctaccccctggagattgactacggccaggacaaagaggcggtgaagaagccsacagtaaatcctggcaccaagtccatgctccccaagccagttcaggacctcatcaagatgatctttgatgtggaaagtatgagcaaagccatggtggggt

SEQ ID NO: 31349 - DNA, 201 bp, Homo sapiens
ccttggggaagctgagcaaaaggcaaatccaggccgcgtactccatcctcaggtccagcaggtggtgtcccagggcagcagcgactctcagatcctggatytctcaaatcgcttttacatcctgatcccccacgactttgggatgaaggatcctctgctcctgaacaatgcagacagtgtgcaggccaaggtagaaatgct

SEQ ID NO: 31350 - DNA, 201 bp, Homo sapiens
agatcaaccttcagatgcccttggggaagctgagcaaaaggcaaatccaggccgcgtactccatcctcaggtccagcaggtggtgtcccagggcagcagcractctcagatcctggatctctcaaatcgcttttacatcctgatcccccacgactttgggatgaaggatcctctgctcctgaacaatgcagacagtgtgca

SEQ ID NO: 31351 - DNA, 201 bp, Homo sapiens
atcctggatctctcaaatcgcttttacatcctgatcccccacgactttgggatgaaggatcctctgctcctgaacaatgcagacagtgtgcaggccaaggyagaaatgctggacaacctgctggacattgaggtagcctacggtctgctcaggggagggtctcacgatagcaggaaggactccatcgatgtcaactatgag

SEQ ID NO: 31352 - DNA, 201 bp, Homo sapiens
actaggaatgcttggcactccaaaaattcacaaagtatcccaaaaagttctaccccctggagattgactacggccaggacaaagaggcggtgaagaagccsacagtaaatcctggcaccaagtccatgctccccaagccagttcaggacctcatcaagatgatctttgatgtggaaagtatgagcaaagccatggtccagc

SEQ ID NO: 31353 - DNA, 201 bp, Homo sapiens
tcaggacctcatcaagatgatctttgatgtggaaagtatgagcaaagccatggtccagcaggtggtgtcccagggcagcagcgactctcagatcctggatytctcaaatcgcttttacatcctgatcccccacgactttgggatgaaggatcctctgctcctgaacaatgcagacagtgtgcaggccaaggtagaaatgct

SEQ ID NO: 31354 - DNA, 201 bp, Homo sapiens
catgctccccaagccagttcaggacctcatcaagatgatctttgatgtggaaagtatgagcaaagccatggtccagcaggtggtgtcccagggcagcagcractctcagatcctggatctctcaaatcgcttttacatcctgatcccccacgactttgggatgaaggatcctctgctcctgaacaatgcagacagtgtgca

SEQ ID NO: 31355 - DNA, 201 bp, Homo sapiens; identical to SEQ ID NO: 31351

SEQ ID NO: 31356 - DNA, 201 bp, Homo sapiens
caagtcgaagagttcaataagaagaattattggaagaagaaaggcattgctattattcccatgaagttttcagttggctttgctgcaacaagctaccatcrggcagctgcactggttcatatctacacagatgggtctgtgttggtcacacatggaagcaatgaactgggacaaggtattcacaccaaaatgctacaggtg

SEQ ID NO: 31357 - DNA, 201 bp, Homo sapiens
agatcatctgtgctgtggttgcagaaacagacgtacaggcaaaacgagcagctgaaaagataaagctcacctatgaagatctggaacctgtaatcttcacsatcaagccagtccacatcttactggcttttgaattctccaagacggtggctctccaagacggtggcttcccaccagcacacaccttaggagttgttctgt

SEQ ID NO: 31358 - DNA, 201 bp, Homo sapiens
ggatacttcaggggctacaaggccttcatggactgggagaagggggtgggggacccatttccttactatgtctgcagagctgcctgttctgaggttgaaaytgactgcctgacaggtgctcacaagaaaatcagaacggacatcatcatggatgcatgttgcagcctaaatccagccattgatattgggcagattgaaggt

SEQ ID NO: 31359 - DNA, 201 bp, Homo sapiens
caaggagccctagtaacagaatcttgcatcacagctgtggcagccaaatgtggccttccaccagaaaaggtaagatatgtagataaacatatctacagatrtgtagataaaaccatctacaaacaagcattcaaccctgagaccctgataagatgttggaatgagtgtctagacaagtcttcctttcacagcagaagaatg

SEQ ID NO: 31360 - DNA, 201 bp, Homo sapiens
cagatgtcaacggcagagctgtgcagaatgcttgtcagatccttctgaaacgccttgagcccatcattaagaaacatccggaaggtaaatgggaagactgratagaagctgcatttgaacaaagaatcagtctctcagccactggatacttcaggggctacaaggccttcatggactgggagaagggggtgggggacccat

SEQ ID NO: 31361 - DNA, 201 bp, Homo sapiens
acggcctttcgtggatttggcttcccacaaggagccctagtaacagaatcttgcatcacagctgtggcagccaaatgtggccttccaccagaaaaggtaakatatgtagataaacatatctacagatatgtagataaaaccatctacaaacaagcattcaaccctgagaccctgataagatgttggaatgagtgtctagac

SEQ ID NO: 31362 - DNA, 201 bp, Homo sapiens
ccagaggagaaaacacagacgtactgagccctcctgaagcacctgaggagtctggcaggccagcagatccggaatatggcgtccttaggggggcatgtgakaagccggcattgctattcggacctgaatccaattcttgctgtgggcaatgctaccctcaatctgatttcagcagaaggtacgcggcggattcctctaaat

SEQ ID NO: 31363 - DNA, 197 bp, Homo sapiens
tcctggggtcatctgtgttctttgccattgctgacgctgtggccgcagtgcgaagagaaagagacatagctgaggacttcacggtgaagagcccagcaacrccagaatgggttcgaatggcctgtgcagatcgattcacagaaatgatcccaagagatgaccctgagacatttaaaccttggtctatccctatagca

SEQ ID NO: 31364 - DNA, 201 bp, Homo sapiens
ctagacattgagtgctacattaacggaggatgcacgctggatgactctgagctggtaacagaatttctaatactaaagctggaaaatgcatataaaattcrcaacctgttcaggttccagggccgtgcatgcatgacaaatttaccatccaatacggcctttcgtggatttggcttcccacaaggagccctagtaacagaa

SEQ ID NO: 31365 - DNA, 201 bp, Homo sapiens
gagtccttctcaaagaaggcacagacagcattgaggacctgagcatcgcctatggaggggtgggggctgccaccatcagtgcacacagatcctgctagcarctccttgggaggtgctggaatgagctgttgctggatgaggcttgcaggctgcttctggatgaagtctcgctcccaggctcagccccgggtggccgggtgg

SEQ ID NO: 31366 - DNA, 201 bp, Homo sapiens
attccccagaaggtgtcctgtactctcggagcccagatgagtacaaaattccaaccatcactgatgtcccagaggagttcaatgtctccttgctgccatcmtcacaaaccccactaaccatctattcgtctaagggcctcggggagtctgggatgttcctggggtcatctgtgttctttgccattgctgacgctgtggccg

SEQ ID NO: 31367 - DNA, 201 bp, Homo sapiens
cgaagatttcccagtcacaataccccagggagtccaaacgtaccagagtgtggatcctcaccagcctctccaagacccagttggacaccctatcatgcacytgtcagctcttaaacatgccactggggaagccatgttttgtgatgacattcccatggtggataaagaacttttcatggctttggtgaccagtagcagggc

SEQ ID NO: 31368 - DNA, 201 bp, Homo sapiens
gaaaatgcatataaaattcgcaacctgttcaggttccagggccgtgcatgcatgacaaatttaccatccaatacggcctttcgtggatttggcttcccacraggagccctagtaacagaatcttgcatcacagctgtggcagccaaatgtggccttccaccagaaaaggtaagatatgtagataaacatatctacagatat

SEQ ID NO: 31369 - DNA, 173 bp, Homo sapiens
ccattgctgacgctgtggccgcagtgcgaagagaaagagacatagctgaggacttcacggtgaagagcccagcaacgccagaatgggttcgaatggcctgygcagatcgattcacagaaatgatcccaagagatgaccctgagacatttaaaccttggtctatccctatagca

SEQ ID NO: 31370 - DNA, 201 bp, Homo sapiens
ttattggaagaagaaaggcattgctattattcccatgaagttttcagttggctttgctgcaacaagctaccatcaggcagctgcactggttcatatctacrcagatgggtctgtgttggtcacacatggaagcaatgaactgggacaaggtattcacaccaaaatgctacaggtggccagccatgagctaaaaatacccat

SEQ ID NO: 31371 - DNA, 201 bp, Homo sapiens
gcttctggatgaagtctcgctcccaggctcagccccgggtggccgggtggaattcaagaggatgaggaccctagtcgtcagcttcctcttcaaattctacytagaggttctgcaggaactgaagaagctggacagccgtcatcattctgaaatttcagaccaattcctaagcgctctcgaagatttcccagtcacaatacc

SEQ ID NO: 31372 - DNA, 201 bp, Homo sapiens
taccagagtgtggatcctcaccagcctctccaagacccagttggacaccctatcatgcacctgtcagctcttaaacatgccactggggaagccatgttttstgatgacattcccatggtggataaagaacttttcatggctttggtgaccagtagcagggctcatgcaaaaatcatatcaattgatgtgtccaaggccctt

SEQ ID NO: 31373 - DNA, 201 bp, Homo sapiens
ctgctggaagcatgcgacaccctgcgccggggcctgactgcccacggcatcaacatcaaggacagaagcagtacaacatccacgtgggaactgctggatcmaaggacaaaagaccaaaaatcagcgggctgaggatggagcacagccatgaacctgctcacgacaagacgcacccatgcttctcagggtcaaggctttatg

SEQ ID NO: 31374 - DNA, 195 bp, Homo sapiens
cagtacaacatccacgtgggaactgctggatcaaaggacaaaagaccaaaaatcagcgggctgaggatggagcacagccatgaacctgctcacgacaagaygcacccatgcttctcagggtcaaggctttatgttaaagcttcctgtcggggctgctaggtcagcattaaagtaaggcaaccaacagtgtcccac

SEQ ID NO: 31375 - DNA, 178 bp, Homo sapiens
gggaactgctggatcaaaggacaaaagaccaaaaatcagcgggctgaggatggagcacagccatgaacctgctcacgacaagacgcacccatgcttctcasggtcaaggctttatgttaaagcttcctgtcggggctgctaggtcagcattaaagtaaggcaaccaacagtgtcccac

SEQ ID NO: 31376 - DNA, 201 bp, Homo sapiens
cgggctggcacatcgagtgctctgccatcgctagtatggtatttggaagtcaactggatatccattcaggtgggatagatttagcttttccacatcatgaraacgaaattgcacagtgcgaagtctttcatcagtgcgagcagtggggaaattattttctgcattctgggcatttgcacgccaaaggcaaagaagaaaaaa

SEQ ID NO: 31377 - DNA, 201 bp, Homo sapiens
acatgaaggggcagctggcctgcggctccgtcagggaagcgatgctgtgggagaggctctccagcaccaagagggccgtgaaggcggccttggcagatgaytttgacacacccagggtggttgatgccatcctgggccttgcacaccacgggaatggacagctcagggcgtccctgaaggaacctgaagggccgagaagtc

SEQ ID NO: 31378 - DNA, 201 bp, Homo sapiens
aggtttttggatgcagcatagtcatggtgatgggtattacagatgtagatgataaaatcatcaaaagagccaatgagatgaatatttcccccgcttccctygccagtctttatgaggaagacttcaagcaggacatggcagccctgaaggttctcccacccacggtgtacctgagggtaaccgaaaatattcctcagataa

SEQ ID NO: 31379 - DNA, 201 bp, Homo sapiens
gaaggcggccttggcagatgattttgacacacccagggtggttgatgccatcctgggccttgcacaccacgggaatggacagctcagggcgtccctgaagraacctgaagggccgagaagtcctgctgtgtttggtgccatcatctcttactttgaacagttttttgaaactgttggaatttctctggcaaatcaacagta

SEQ ID NO: 31380 - DNA, 201 bp, Homo sapiens
gagaagggcagccatgcagctggaatcatagaccaaccctggatcattgaggttgcccgagtagccactcaaaatgtgaatcccacacctggggccacttsttaatctagacagaaatagctttttggttttgttttaaaatagatctatttcctttatcatcgcttccattaaagactataaacaataaaaatctcattg

SEQ ID NO: 31381 - DNA, 201 bp, Homo sapiens
tgtgcacgactgtcactttggtcacccacgaagatgtagagttgacataccaagaagcaataatgaacatggtgaagttcaacaggaaagcttcatcatgyacacgttcagtgcccatgcagccacggacatcgtgggcattaggatttggggtcatacacagaacctgaccaagcagctgaggaatggttttttgcaatt

SEQ ID NO: 31382 - DNA, 201 bp, Homo sapiens
agatgcagccgaggaagcaggaatgtctgtaacttgtggccaaacagtgctaacctcctggattgttttgggaggagtcactacaactacaggccaatcartttatcatgccagacaatacagcgccaggggatgtgctggagtccacaaaacccctgggggcacaagtggagtggctgtgcacgactgtcactttggtca

SEQ ID NO: 31383 - DNA, 201 bp, Homo sapiens
ggttctgtgcagagataaactcccccaaatgtggtggaggccaccaagcatggattattgggattgcagagaagggcagccatgcagctggaatcatagascaaccctggatcattgaggttgcccgagtagccactcaaaatgtgaatcccacacctggggccacttcttaatctagacagaaatagctttttggttttg

SEQ ID NO: 31384 - DNA, 201 bp, Homo sapiens
tgcagagaagggcagccatgcagctggaatcatagaccaaccctggatcattgaggttgcccgagtagccactcaaaatgtgaatcccacacctggggccmcttcttaatctagacagaaatagctttttggttttgttttaaaatagatctatttcctttatcatcgcttccattaaagactataaacaataaaaatctc

SEQ ID NO: 31385 - DNA, 201 bp, Homo sapiens
gtgcacgactgtcactttggtcacccacgaagatgtagagttgacataccaagaagcaataatgaacatggtgaagttcaacaggaaagcttcatcatgtwcacgttcagtgcccatgcagccacggacatcgtgggcattaggatttggggtcatacacagaacctgaccaagcagctgaggaatggttttttgcaattc

SEQ ID NO: 31386 - DNA, 106 bp, Homo sapiens
ttctcyttcctttacagttttgatgtggacaatggcacatctgcgggacggagtcccttggatcccatgaccagcccaggatccgggctaattctccaagcaaatt

SEQ ID NO: 31387 - DNA, 201 bp, Homo sapiens
ccagggagcagcactgcatgtgtgatggttgtttgccatctgttgatcaggaactacttcagctacttgcatttgattatttcctttttttttttttttttaactcggaaacacaactggggaaatatattctttcccagtgattataaacaatctttttcttttttttaagtccttttggcttctagagctcataggaaa

SEQ ID NO: 31388 - DNA, 201 bp, Homo sapiens
gccagggagcagcactgcatgtgtgatggttgtttgccatctgttgatcaggaactacttcagctacttgcatttgattatttcctttttttttttttttttaactcggaaacacaactggggaaatatattctttcccagtgattataaacaatctttttcttttttttaagtccttttggcttctagagctcataggaa

SEQ ID NO: 31389 - DNA, 201 bp, Homo sapiens
ctggataaaaatctaatttatgaattttacttgcaccttatagttcatagcaattaactgatttgtagtgattcattgtttgttttatataccaatgacttcttccatattttaaaagagaaaaacaactttatgttgcaggaaaccctttttgtaagtctttctttattatttactttgcattttgtttcactctttcca

SEQ ID NO: 31390 - DNA, 201 bp, Homo sapiens
agcaccaggaactgtattacagttttagagattaattcctagtgtttacctgattatagcagttggcatcatggggcatttaattctgactttatccccaygtcagccttaataaagtcttctttaccttctctatgaagactttaaagcccaaataatcatttttcacattgatattcaagaattgagatagatagaagc

SEQ ID NO: 31391 - DNA, 201 bp, Homo sapiens
acaaagcagataaaatctactccaaattattttcaagagagtgtgactcatcaggcagcccaaaagtttattggacttggggtttctattcctttttatttgtttgcaatattttcagaagaaaggcattgcacagagtgaacttaatggacgaagcaacaaatatgtcaagaacaggacatagcacgaatctgttaccag

SEQ ID NO: 31392 - DNA, 201 bp, Homo sapiens
cagaggggaactacttctttaaacacatggagggaaagaagatgatgccactggcaccagagggttagtactgtgatgcatcctaaaatatttattatattggtaaaaattctggttaaataaaaaattagagatcactcttggctgatttcagcaccaggaactgtattacagttttagagattaattcctagtgtttac

SEQ ID NO: 31393 - DNA, 201 bp, Homo sapiens
atatcttgcagaggggaactacttctttaaacacatggagggaaagaagatgatgccactggcaccagagggttagtactgtgatgcatcctaaaatatttattatattggtaaaaattctggttaaataaaaaattagagatcactcttggctgatttcagcaccaggaactgtattacagttttagagattaattccta

SEQ ID NO: 31394 - DNA, 201 bp, Homo sapiens
gacaaagcagataaaatctactccaaattattttcaagagagtgtgactcatcaggcagcccaaaagtttattggacttggggtttctattcctttttatttgtttgcaatattttcagaagaaaggcattgcacagagtgaacttaatggacgaagcaacaaatatgtcaagaacaggacatagcacgaatctgttacca

SEQ ID NO: 31395 - DNA, 201 bp, Homo sapiens
tttttaatggtaccgtgttgtaaagatacccactaatggacaatcaaattgcagaaaaggctcaatatccaagagacagggactaatgcactgtacaatckgcttatccttgcccttctctcttgccaaagtgtgcttcagaaatatatactgctttaaaaaagaataaaagaatatccttttacaagtggctttacattt

SEQ ID NO: 31396 - DNA, 201 bp, Homo sapiens
tgcagaggggaactacttctttaaacacatggagggaaagaagatgatgccactggcaccagagggttagtactgtgatgcatcctaaaatatttattatattggtaaaaattctggttaaataaaaaattagagatcactcttggctgatttcagcaccaggaactgtattacagttttagagattaattcctagtgttt

SEQ ID NO: 31397 - DNA, 201 bp, Homo sapiens
tgacaaagcagataaaatctactccaaattattttcaagagagtgtgactcatcaggcagcccaaaagtttattggacttggggtttctattcctttttatttgtttgcaatattttcagaagaaaggcattgcacagagtgaacttaatggacgaagcaacaaatatgtcaagaacaggacatagcacgaatctgttacc

SEQ ID NO: 31398 - DNA, 201 bp, Homo sapiens
taaaagaatatccttttacaagtggctttacatttcctaaaatgccataagaaaatgcaatatctgggtactgtatggggaaaaaaatgtccaagtttgtrtaaaaccagtgcatttcagcttgcaagttactgaacacaataatgctgttttaattttgttttatatcagttaaaattcacaataatgtagatagaacaa

SEQ ID NO: 31399 - DNA, 201 bp, Homo sapiens
tcttgcagaggggaactacttctttaaacacatggagggaaagaagatgatgccactggcaccagagggttagtactgtgatgcatcctaaaatatttattatattggtaaaaattctggttaaataaaaaattagagatcactcttggctgatttcagcaccaggaactgtattacagttttagagattaattcctagtg

SEQ ID NO: 31400 - DNA, 201 bp, Homo sapiens
ctgacaaagcagataaaatctactccaaattattttcaagagagtgtgactcatcaggcagcccaaaagtttattggacttggggtttctattcctttttatttgtttgcaatattttcagaagaaaggcattgcacagagtgaacttaatggacgaagcaacaaatatgtcaagaacaggacatagcacgaatctgttac

SEQ ID NO: 31401 - DNA, 201 bp, Homo sapiens
tagtttcacaagaatatttgggaacttgtttcttttaattttatttgtccctgagtgaagtctagaaagaaaggtaaagagtctagagtttattcctcttyccaaaacattctcattcctctcctccctacacttagtatttcccccacagagtgcctagaatcttaataatgaataaaataaaaagcagcaatatgtcat

SEQ ID NO: 31402 - DNA, 201 bp, Homo sapiens
taagcatatcttgcagaggggaactacttctttaaacacatggagggaaagaagatgatgccactggcaccagagggttagtactgtgatgcatcctaaartatttattatattggtaaaaattctggttaaataaaaaattagagatcactcttggctgatttcagcaccaggaactgtattacagttttagagattaat

SEQ ID NO: 31403 - DNA, 201 bp, Homo sapiens
ttaatgatttcaccatgggattaagaactatatcaggaacatccctgagaaacggttttaagtgtagcaactactcttccttaatggacagccacataacrtgtaggaagtcctttatcacttatcctcgatccataagcatatcttgcagaggggaactacttctttaaacacatggagggaaagaagatgatgccactg

SEQ ID NO: 31404 - DNA, 201 bp, Homo sapiens
ccatttcagtcccctgagatctagctgatgcttagatcctttgaaataaaaattatgtctttataactctgatcttttacataaagcagaagaggaatcarctagttaattgcaaggtttctactctgtttcctctgtaaagatcagatggtaatctttcaaataagaaaaaaataaagacgtatgtttgaccaagtagtt

SEQ ID NO: 31405 - DNA, 201 bp, Homo sapiens
ggataaaaatctaatttatgaattttacttgcaccttatagttcatagcaattaactgatttgtagtgattcattgtttgttttatataccaatgacttcttccatattttaaaagagaaaaacaactttatgttgcaggaaaccctttttgtaagtctttctttattatttactttgcattttgtttcactctttccaga

SEQ ID NO: 31406 - DNA, 201 bp, Homo sapiens
tggataaaaatctaatttatgaattttacttgcaccttatagttcatagcaattaactgatttgtagtgattcattgtttgttttatataccaatgacttcttccatattttaaaagagaaaaacaactttatgttgcaggaaaccctttttgtaagtctttctttattatttactttgcattttgtttcactctttccag

SEQ ID NO: 31407 - DNA, 201 bp, Homo sapiens
agagagtccccatttcagtcccctgagatctagctgatgcttagatcctttgaaataaaaattatgtctttataactctgatcttttacataaagcagaakaggaatcaactagttaattgcaaggtttctactctgtttcctctgtaaagatcagatggtaatctttcaaataagaaaaaaataaagacgtatgtttgac

SEQ ID NO: 31408 - DNA, 201 bp, Homo sapiens
cttttaattttatttgtccctgagtgaagtctagaaagaaaggtaaagagtctagagtttattcctctttccaaaacattctcattcctctcctccctacwcttagtatttcccccacagagtgcctagaatcttaataatgaataaaataaaaagcagcaatatgtcattaacaaatccagacctgaaagggtaaagggt

SEQ ID NO: 31409 - DNA, 201 bp, Homo sapiens
gtgactccaagactctttgtactcaagactcagagtctactgaaattccccttgatgaacaggttgaagaggaggcagtaggggaagaagaggaaagccarcctgaagcctgtgtcatagatgatcgttctcctgacacgtaacagtgcaaaaactttcatgcctttttttttttaagtagaaaaattgtttccaaagtgc

SEQ ID NO: 31410 - DNA, 201 bp, Homo sapiens
gtttgaactaactttagaggaagatggtgagtcagacacggaaaaggacagtggcagtcaagtggaagaagacactagctgcagtgactccaagactcttygtactcaagactcagagtctactgaaattccccttgatgaacaggttgaagaggaggcagtaggggaagaagaggaaagccagcctgaagcctgtgtcat

SEQ ID NO: 31411 - DNA, 201 bp, Homo sapiens
ttaaagagaaaatactgttttttaatcctaaaatttttcttccactaagataaaccaaatgtccttacatatatgtaaacccatctatttaaacgcaaagktgggttgatgtcagtttacatagcagaaagcattcactatcctctaagatttgtttggccagcccctaaagcaggaaacatttataatggattatatgga

SEQ ID NO: 31412 - DNA, 201 bp, Homo sapiens
atctattcatcagcttcctgacatgttaagagaatacattaaagagaaaatactgttttttaatcctaaaatttttcttccactaagataaaccaaatgtscttacatatatgtaaacccatctatttaaacgcaaaggtgggttgatgtcagtttacatagcagaaagcattcactatcctctaagatttgtttggccag

SEQ ID NO: 31413 - DNA, 201 bp, Homo sapiens; identical to SEQ ID NO: 31387

SEQ ID NO: 31414 - DNA, 201 bp, Homo sapiens; identical to SEQ ID NO: 31388

SEQ ID NO: 31415 - DNA, 201 bp, Homo sapiens; identical to SEQ ID NO: 31389

SEQ ID NO: 31416 - DNA, 201 bp, Homo sapiens; identical to SEQ ID NO: 31390

SEQ ID NO: 31417 - DNA, 201 bp, Homo sapiens; identical to SEQ ID NO: 31391

SEQ ID NO: 31418 - DNA, 201 bp, Homo sapiens; identical to SEQ ID NO: 31392

SEQ ID NO: 31419 - DNA, 201 bp, Homo sapiens; identical to SEQ ID NO: 31393

SEQ ID NO: 31420 - DNA, 201 bp, Homo sapiens; identical to SEQ ID NO: 31394

SEQ ID NO: 31421 - DNA, 201 bp, Homo sapiens; identical to SEQ ID NO: 31395

SEQ ID NO: 31422 - DNA, 201 bp, Homo sapiens; identical to SEQ ID NO: 31396

SEQ ID NO: 31423 - DNA, 201 bp, Homo sapiens; identical to SEQ ID NO: 31397

SEQ ID NO: 31424 - DNA, 201 bp, Homo sapiens; identical to SEQ ID NO: 31398

SEQ ID NO: 31425 - DNA, 201 bp, Homo sapiens; identical to SEQ ID NO: 31399

SEQ ID NO: 31426 - DNA, 201 bp, Homo sapiens; identical to SEQ ID NO: 31400

SEQ ID NO: 31427 - DNA, 201 bp, Homo sapiens; identical to SEQ ID NO: 31401

SEQ ID NO: 31428 - DNA, 201 bp, Homo sapiens; identical to SEQ ID NO: 31402

SEQ ID NO: 31429 - DNA, 201 bp, Homo sapiens; identical to SEQ ID NO: 31403

SEQ ID NO: 31430 - DNA, 201 bp, Homo sapiens; identical to SEQ ID NO: 31404

SEQ ID NO: 31431 - DNA, 201 bp, Homo sapiens; identical to SEQ ID NO: 31405

SEQ ID NO: 31432 - DNA, 201 bp, Homo sapiens; identical to SEQ ID NO: 31406

SEQ ID NO: 31433 - DNA, 201 bp, Homo sapiens; identical to SEQ ID NO: 31407

SEQ ID NO: 31434 - DNA, 201 bp, Homo sapiens; identical to SEQ ID NO: 31408

SEQ ID NO: 31435 - DNA, 201 bp, Homo sapiens; identical to SEQ ID NO: 31409

SEQ ID NO: 31436 - DNA, 201 bp, Homo sapiens; identical to SEQ ID NO: 31410

SEQ ID NO: 31437 - DNA, 201 bp, Homo sapiens
ttaaagagaaaatactgttttttaatcctaaaatttttcttccactaagataaaccaaatgtccttacatatatgtaaacccatctatttaaacgcaaagktgggttgatgtcagtttacatagcagaaagcattcactatcctctaagatttgtttctgcaaaactttcattgctttagaattttaaaatttcaccttgt

SEQ ID NO: 31438 - DNA, 201 bp, Homo sapiens
atctattcatcagcttcctgacatgttaagagaatacattaaagagaaaatactgttttttaatcctaaaatttttcttccactaagataaaccaaatgtscttacatatatgtaaacccatctatttaaacgcaaaggtgggttgatgtcagtttacatagcagaaagcattcactatcctctaagatttgtttctgcaa

SEQ ID NO: 31439 - DNA, 201 bp, Homo sapiens
atgttgacagcacggtcatcagagaagaaggaatcgatgagctagccaaaatctgtggcgttgaggacgcggtgtcagaaatgacacggcgagccatgggyggggcagtgcctttcaaagctgctctcacagagcgcttagccctcatccagccctccagggagcaggtgcagagactcatagcagagcaacccccacacc

SEQ ID NO: 31440 - DNA, 201 bp, Homo sapiens
gttgcttcaaagctcaatatcccagcaaccaatgtatttgccaataggctgaaattctactttaacggtgaatatgcaggttttgatgagacgcagccaayagctgaatctggtggaaaaggaaaagtgattaaacttttaaaggaaaaatttcattttaagaaaataatcatgattggagatggtgccacagatatggaa

SEQ ID NO: 31441 - DNA, 201 bp, Homo sapiens
ggaggaaatgtgatcaggcaacaagtcaaggataacgccaaatggtatatcactgattttgtagagctgctgggagaactggaagaataacatccattgtygtacagctccaaacaacttcagatgaatttttacaagttatacagattgatactttttttttttttttaactgtagttccagtattatatgatgactatt

SEQ ID NO: 31442 - DNA, 201 bp, Homo sapiens
ggcgcggtctcggctcactgcaagctctgcctcccaggttcacgccattctcctgcctcagcctcccgagtagctgggactacaggcacccgccaccacayccggctaattttttgtatttttagtagagacggggtttgaccgtgttagccaggatggtcttgatctcctgaccttgtgatccgcctgcctcagcctccc

SEQ ID NO: 31443 - DNA, 201 bp, Homo sapiens; identical to SEQ ID NO: 31439

SEQ ID NO: 31444 - DNA, 201 bp, Homo sapiens; identical to SEQ ID NO: 31440

SEQ ID NO: 31445 - DNA, 201 bp, Homo sapiens
ggaggaaatgtgatcaggcaacaagtcaaggataacgccaaatggtatatcactgattttgtagagctgctgggagaactggaagaataacatccattgtygtacagctccaaacaacttcagatgaatttttacaagttatacagattgatactgtttgcttacagttgcctattacaacttgctatagaaagttggtac

SEQ ID NO: 31446 - DNA, 201 bp, Homo sapiens; identical to SEQ ID NO: 31442

SEQ ID NO: 31447 - DNA, 201 bp, Homo sapiens; identical to SEQ ID NO: 31439

SEQ ID NO: 31448 - DNA, 201 bp, Homo sapiens; identical to SEQ ID NO: 31440

SEQ ID NO: 31449 - DNA, 201 bp, Homo sapiens
gcaccctcccccggaatcatgcggtgctgtgaggcctagcgaagatgaagatagaatgcaaggtagaaagtgctggatacctttagaaagctgcaggactkgtgcgatgggagttgagacgtaagaacctgcccgtccgtagggctctggatgctgctgaggcccgaggcccctatggcagatttgaaaattcacccttgt

SEQ ID NO: 31450 - DNA, 201 bp, Homo sapiens
tccggcgttggagctctttggggcccagctttgcggacccgggagctcgggacgcaggcggggcttgtgctccgcgggggcagggcgtagggtgggcctcytacctcccctgatctcgcggtttgttccgtttcattggagcttcccggaccgtgtgctcgacggtgccctaggtgccgtggggccacacgcgagtctgat

SEQ ID NO: 31451 - DNA, 201 bp, Homo sapiens; identical to SEQ ID NO: 31445

SEQ ID NO: 31452 - DNA, 201 bp, Homo sapiens; identical to SEQ ID NO: 31442

SEQ ID NO: 31453 - DNA, 201 bp, Homo sapiens; identical to SEQ ID NO: 31439

SEQ ID NO: 31454 - DNA, 201 bp, Homo sapiens; identical to SEQ ID NO: 31440

SEQ ID NO: 31455 - DNA, 201 bp, Homo sapiens; identical to SEQ ID NO: 31445

SEQ ID NO: 31456 - DNA, 201 bp, Homo sapiens; identical to SEQ ID NO: 31442

SEQ ID NO: 31457 - DNA, 201 bp, Homo sapiens
cctttcaaaaccatcgagctacagatgaagaagaaggggttcaaaatggaagtgggacaatacatttttgtcaagtgcccaaaggtgtccaagctggagtrgcacccttttacactgacatccgcccctgaggaagacttctttagtatccatatccgcatcgttggggactggacagaggggctgttcaatgcttgtggc

SEQ ID NO: 31458 - DNA, 201 bp, Homo sapiens
aaaaccatcgagctacagatgaagaagaaggggttcaaaatggaagtgggacaatacatttttgtcaagtgcccaaaggtgtccaagctggagtggcaccmttttacactgacatccgcccctgaggaagacttctttagtatccatatccgcatcgttggggactggacagaggggctgttcaatgcttgtggctgtgat

SEQ ID NO: 31459 - DNA, 201 bp, Homo sapiens
ctacctaagatagcggttgatgggccctttggcactgccagtgaagatgtgttcagctatgaggtggtgatgttagtgggagcagggattggggtcacachcttcgcatccattctcaagtcagtctggtacaaatattgcaataacgccaccaatctgaagctcaaaaagatctacttctactggctgtgccgggacaca

SEQ ID NO: 31460 - DNA, 201 bp, Homo sapiens
caatctgaagctcaaaaagatctacttctactggctgtgccgggacacacatgcctttgagtggtttgcagatctgctgcaactgctggagagccagatgyaggaaaggaacaatgccggcttcctcagctacaacatctacctcactggctgggatgagtctcaggccaatcactttgctgtgcaccatgatgaggagaa

SEQ ID NO: 31461 - DNA, 201 bp, Homo sapiens
ttttgtcaagtgcccaaaggtgtccaagctggagtggcacccttttacactgacatccgcccctgaggaagacttctttagtatccatatccgcatcgttrgggactggacagaggggctgttcaatgcttgtggctgtgataagcaggagtttcaagatgcgtggaaactacctaagatagcggttgatgggccctttgg

SEQ ID NO: 31462 - DNA, 201 bp, Homo sapiens
gagtttcaagatgcgtggaaactacctaagatagcggttgatgggccctttggcactgccagtgaagatgtgttcagctatgaggtggtgatgttagtggragcagggattggggtcacacccttcgcatccattctcaagtcagtctggtacaaatattgcaataacgccaccaatctgaagctcaaaaagatctacttc

SEQ ID NO: 31463 - DNA, 201 bp, Homo sapiens
gcatcactggagttgtcatcacgctgtgcctcatattaattatcacttcctccaccaaaaccatccggaggtcttactttgaagtcttttggtacacacawcatctctttgtgatcttcttcattggccttgccatccatggagctgaacgaattgtacgtgggcagaccgcagagagtttggctgtgcataatataacag

SEQ ID NO: 31464 - DNA, 201 bp, Homo sapiens
gataagcaggagtttcaagatgcgtggaaactacctaagatagcggttgatgggccctttggcactgccagtgaagatgtgttcagctatgaggtggtgakgttagtgggagcagggattggggtcacacccttcgcatccattctcaagtcagtctggtacaaatattgcaataacgccaccaatctgaagctcaaaaag

SEQ ID NO: 31465 - DNA, 201 bp, Homo sapiens
tgggccctttggcactgccagtgaagatgtgttcagctatgaggtggtgatgttagtgggagcagggattggggtcacacccttcgcatccattctcaagycagtctggtacaaatattgcaataacgccaccaatctgaagctcaaaaagatctacttctactggctgtgccgggacacacatgcctttgagtggtttgc

SEQ ID NO: 31466 - DNA, 201 bp, Homo sapiens
ataatataacagtttgtgaacaaaaaatctcagaatggggaaaaataaaggaatgcccaatccctcagtttgctggaaaccctcctatgacttggaaatgratagtgggtcccatgtttctgtatctctgtgagaggttggtgcggttttggcgatctcaacagaaggtggtcatcaccaaggtggtcactcaccctttca

SEQ ID NO: 31467 - DNA, 201 bp, Homo sapiens
gtgggacaatacatttttgtcaagtgcccaaaggtgtccaagctggagtggcacccttttacactgacatccgcccctgaggaagacttctttagtatccrtatccgcatcgttggggactggacagaggggctgttcaatgcttgtggctgtgataagcaggagtttcaagatgcgtggaaactacctaagatagcggtt

SEQ ID NO: 31468 - DNA, 201 bp, Homo sapiens
cataatataacagtttgtgaacaaaaaatctcagaatggggaaaaataaaggaatgcccaatccctcagtttgctggaaaccctcctatgacttggaaatrgatagtgggtcccatgtttctgtatctctgtgagaggttggtgcggttttggcgatctcaacagaaggtggtcatcaccaaggtggtcactcaccctttc

SEQ ID NO: 31469 - DNA, 201 bp, Homo sapiens
gttgatgggccctttggcactgccagtgaagatgtgttcagctatgaggtggtgatgttagtgggagcagggattggggtcacacccttcgcatccattcycaagtcagtctggtacaaatattgcaataacgccaccaatctgaagctcaaaaagatctacttctactggctgtgccgggacacacatgcctttgagtgg

SEQ ID NO: 31470 - DNA, 201 bp, Homo sapiens
gatagtgggtcccatgtttctgtatctctgtgagaggttggtgcggttttggcgatctcaacagaaggtggtcatcaccaaggtggtcactcaccctttcwaaaccatcgagctacagatgaagaagaaggggttcaaaatggaagtgggacaatacatttttgtcaagtgcccaaaggtgtccaagctggagtggcaccc

SEQ ID NO: 31471 - DNA, 201 bp, Homo sapiens
cggcccaactgggataatgaattcaagacaattgcaagtcaacaccctaataccagaataggagttttcctctgtggacctgaagccttggctgaaacccygagtaaacaaagcatctccaactctgagtctggccctcggggagtgcatttcattttcaacaaggaaaacttctaacttgtctcttccatgaggaaataa

SEQ ID NO: 31472 - DNA, 201 bp, Homo sapiens
agtgggtcccatgtttctgtatctctgtgagaggttggtgcggttttggcgatctcaacagaaggtggtcatcaccaaggtggtcactcaccctttcaaamccatcgagctacagatgaagaagaaggggttcaaaatggaagtgggacaatacatttttgtcaagtgcccaaaggtgtccaagctggagtggcacccttt

SEQ ID NO: 31473 - DNA, 201 bp, Homo sapiens
gaggaagacttctttagtatccatatccgcatcgttggggactggacagaggggctgttcaatgcttgtggctgtgataagcaggagtttcaagatgcgtrgaaactacctaagatagcggttgatgggccctttggcactgccagtgaagatgtgttcagctatgaggtggtgatgttagtgggagcagggattggggtc

SEQ ID NO: 31474 - DNA, 201 bp, Homo sapiens
tcactcaccctttcaaaaccatcgagctacagatgaagaagaaggggttcaaaatggaagtgggacaatacatttttgtcaagtgcccaaaggtgtccaarctggagtggcacccttttacactgacatccgcccctgaggaagacttctttagtatccatatccgcatcgttggggactggacagaggggctgttcaatg

SEQ ID NO: 31475 - DNA, 201 bp, Homo sapiens
cgcatcgttggggactggacagaggggctgttcaatgcttgtggctgtgataagcaggagtttcaagatgcgtggaaactacctaagatagcggttgatgvgccctttggcactgccagtgaagatgtgttcagctatgaggtggtgatgttagtgggagcagggattggggtcacacccttcgcatccattctcaagtca

SEQ ID NO: 31476 - DNA, 201 bp, Homo sapiens
atcgttggggactggacagaggggctgttcaatgcttgtggctgtgataagcaggagtttcaagatgcgtggaaactacctaagatagcggttgatgggcyctttggcactgccagtgaagatgtgttcagctatgaggtggtgatgttagtgggagcagggattggggtcacacccttcgcatccattctcaagtcagtc

SEQ ID NO: 31477 - DNA, 201 bp, Homo sapiens
atctcaattttgctcgaaagagaataaagaaccctgaaggaggcctgtacctggctgtgaccctgttggcaggcatcactggagttgtcatcacgctgtgmctcatattaattatcacttcctccaccaaaaccatccggaggtcttactttgaagtcttttggtacacacatcatctctttgtgatcttcttcattggcc

SEQ ID NO: 31478 - DNA, 201 bp, Homo sapiens
ggtgatgttagtgggagcagggattggggtcacacccttcgcatccattctcaagtcagtctggtacaaatattgcaataacgccaccaatctgaagctcwaaaagatctacttctactggctgtgccgggacacacatgcctttgagtggtttgcagatctgctgcaactgctggagagccagatgcaggaaaggaacaa

SEQ ID NO: 31479 - DNA, 201 bp, Homo sapiens
tctctttgtgatcttcttcattggccttgccatccatggagctgaacgaattgtacgtgggcagaccgcagagagtttggctgtgcataatataacagttbgtgaacaaaaaatctcagaatggggaaaaataaaggaatgcccaatccctcagtttgctggaaaccctcctatgacttggaaatggatagtgggtcccat

SEQ ID NO: 31480 - DNA, 201 bp, Homo sapiens
tgggagcagggattggggtcacacccttcgcatccattctcaagtcagtctggtacaaatattgcaataacgccaccaatctgaagctcaaaaagatctamttctactggctgtgccgggacacacatgcctttgagtggtttgcagatctgctgcaactgctggagagccagatgcaggaaaggaacaatgccggcttcc

SEQ ID NO: 31481 - DNA, 201 bp, Homo sapiens
ggattggggtcacacccttcgcatccattctcaagtcagtctggtacaaatattgcaataacgccaccaatctgaagctcaaaaagatctacttctactgrctgtgccgggacacacatgcctttgagtggtttgcagatctgctgcaactgctggagagccagatgcaggaaaggaacaatgccggcttcctcagctaca

SEQ ID NO: 31482 - DNA, 201 bp, Homo sapiens
tgtgatcttcttcattggccttgccatccatggagctgaacgaattgtacgtgggcagaccgcagagagtttggctgtgcataatataacagtttgtgaayaaaaaatctcagaatggggaaaaataaaggaatgcccaatccctcagtttgctggaaaccctcctatgacttggaaatggatagtgggtcccatgtttct

SEQ ID NO: 31483 - DNA, 201 bp, Homo sapiens
atcgagctacagatgaagaagaaggggttcaaaatggaagtgggacaatacatttttgtcaagtgcccaaaggtgtccaagctggagtggcacccttttamactgacatccgcccctgaggaagacttctttagtatccatatccgcatcgttggggactggacagaggggctgttcaatgcttgtggctgtgataagcag

SEQ ID NO: 31484 - DNA, 201 bp, Homo sapiens
tggcgatctcaacagaaggtggtcatcaccaaggtggtcactcaccctttcaaaaccatcgagctacagatgaagaagaaggggttcaaaatggaagtggracaatacatttttgtcaagtgcccaaaggtgtccaagctggagtggcacccttttacactgacatccgcccctgaggaagacttctttagtatccatatc

SEQ ID NO: 31485 - DNA, 201 bp, Homo sapiens
ggcttcctcagctacaacatctacctcactggctgggatgagtctcaggccaatcactttgctgtgcaccatgatgaggagaaagatgtgatcacaggcckgaaacaaaagactttgtatggacggcccaactgggataatgaattcaagacaattgcaagtcaacaccctaataccagaataggagttttcctctgtgga

SEQ ID NO: 31486 - DNA, 201 bp, Homo sapiens
ggtggtcactcaccctttcaaaaccatcgagctacagatgaagaagaaggggttcaaaatggaagtgggacaatacatttttgtcaagtgcccaaaggtgyccaagctggagtggcacccttttacactgacatccgcccctgaggaagacttctttagtatccatatccgcatcgttggggactggacagaggggctgtt

SEQ ID NO: 31487 - DNA, 201 bp, Homo sapiens
ctcaagtcagtctggtacaaatattgcaataacgccaccaatctgaagctcaaaaagatctacttctactggctgtgccgggacacacatgcctttgagtrgtttgcagatctgctgcaactgctggagagccagatgcaggaaaggaacaatgccggcttcctcagctacaacatctacctcactggctgggatgagtct

SEQ ID NO: 31488 - DNA, 201 bp, Homo sapiens
cctcagctacaacatctacctcactggctgggatgagtctcaggccaatcactttgctgtgcaccatgatgaggagaaagatgtgatcacaggcctgaaayaaaagactttgtatggacggcccaactgggataatgaattcaagacaattgcaagtcaacaccctaataccagaataggagttttcctctgtggacctga

SEQ ID NO: 31489 - DNA, 201 bp, Homo sapiens
tctcaagtcagtctggtacaaatattgcaataacgccaccaatctgaagctcaaaaagatctacttctactggctgtgccgggacacacatgcctttgagyggtttgcagatctgctgcaactgctggagagccagatgcaggaaaggaacaatgccggcttcctcagctacaacatctacctcactggctgggatgagtc

SEQ ID NO: 31490 - DNA, 201 bp, Homo sapiens
ggagtttcaagatgcgtggaaactacctaagatagcggttgatgggccctttggcactgccagtgaagatgtgttcagctatgaggtggtgatgttagtgrgagcagggattggggtcacacccttcgcatccattctcaagtcagtctggtacaaatattgcaataacgccaccaatctgaagctcaaaaagatctactt

SEQ ID NO: 31491 - DNA, 201 bp, Homo sapiens
ataaagaaccctgaaggaggcctgtacctggctgtgaccctgttggcaggcatcactggagttgtcatcacgctgtgcctcatattaattatcacttcctycaccaaaaccatccggaggtcttactttgaagtcttttggtacacacatcatctctttgtgatcttcttcattggccttgccatccatggagctgaacga

SEQ ID NO: 31492 - DNA, 201 bp, Homo sapiens
cctttgagtggtttgcagatctgctgcaactgctggagagccagatgcaggaaaggaacaatgccggcttcctcagctacaacatctacctcactggctgrgatgagtctcaggccaatcactttgctgtgcaccatgatgaggagaaagatgtgatcacaggcctgaaacaaaagactttgtatggacggcccaactggg

SEQ ID NO: 31493 - DNA, 201 bp, Homo sapiens
gtgatcacaggcctgaaacaaaagactttgtatggacggcccaactgggataatgaattcaagacaattgcaagtcaacaccctaataccagaataggagwtttcctctgtggacctgaagccttggctgaaaccctgagtaaacaaagcatctccaactctgagtctggccctcggggagtgcatttcattttcaacaag

SEQ ID NO: 31494 - DNA, 201 bp, Homo sapiens
tttcctctgtggacctgaagccttggctgaaaccctgagtaaacaaagcatctccaactctgagtctggccctcggggagtgcatttcattttcaacaagraaaacttctaacttgtctcttccatgaggaaataaatgtgggttgtgctgccaaatgctcaaataatgctaattgataatataaataccccctgcttaaa

SEQ ID NO: 31495 - DNA, 201 bp, Homo sapiens
ctgggataatgaattcaagacaattgcaagtcaacaccctaataccagaataggagttttcctctgtggacctgaagccttggctgaaaccctgagtaaayaaagcatctccaactctgagtctggccctcggggagtgcatttcattttcaacaaggaaaacttctaacttgtctcttccatgaggaaataaatgtgggt

SEQ ID NO: 31496 - DNA, 201 bp, Homo sapiens
gaatctcacctttcataaaatggtggcatggatgattgcacttcactctgcgattcacaccattgcacatctatttaatgtggaatggtgtgtgaatgccygagtcaataattctgatccttattcagtagcactctctgaacttggagacaggcaaaatgaaagttatctcaattttgctcgaaagagaataaagaaccc

SEQ ID NO: 31497 - DNA, 201 bp, Homo sapiens
ggctgtgaccctgttggcaggcatcactggagttgtcatcacgctgtgcctcatattaattatcacttcctccaccaaaaccatccggaggtcttactttkaagtcttttggtacacacatcatctctttgtgatcttcttcattggccttgccatccatggagctgaacgaattgtacgtgggcagaccgcagagagttt

SEQ ID NO: 31498 - DNA, 201 bp, Homo sapiens
tttcaaaaccatcgagctacagatgaagaagaaggggttcaaaatggaagtgggacaatacatttttgtcaagtgcccaaaggtgtccaagctggagtggyacccttttacactgacatccgcccctgaggaagacttctttagtatccatatccgcatcgttggggactggacagaggggctgttcaatgcttgtggctg

SEQ ID NO: 31499 - DNA, 201 bp, Homo sapiens
ggagtggcacccttttacactgacatccgcccctgaggaagacttctttagtatccatatccgcatcgttggggactggacagaggggctgttcaatgctygtggctgtgataagcaggagtttcaagatgcgtggaaactacctaagatagcggttgatgggccctttggcactgccagtgaagatgtgttcagctatga

SEQ ID NO: 31500 - DNA, 201 bp, Homo sapiens
tcacaccattgcacatctatttaatgtggaatggtgtgtgaatgcccgagtcaataattctgatccttattcagtagcactctctgaacttggagacaggyaaaatgaaagttatctcaattttgctcgaaagagaataaagaaccctgaaggaggcctgtacctggctgtgaccctgttggcaggcatcactggagttgt

SEQ ID NO: 31501 - DNA, 201 bp, Homo sapiens
gcgatctcaacagaaggtggtcatcaccaaggtggtcactcaccctttcaaaaccatcgagctacagatgaagaagaaggggttcaaaatggaagtgggayaatacatttttgtcaagtgcccaaaggtgtccaagctggagtggcacccttttacactgacatccgcccctgaggaagacttctttagtatccatatccg

SEQ ID NO: 31502 - DNA, 201 bp, Homo sapiens
catagtatagaagaaaggcaaacacaacacattcaacctctgccaccatggggaactgggctgtgaatgaggggctctccatttttgtcattctggtttgsctggggttgaacgtcttcctctttgtctggtattaccgggtttatgatattccacctaagttcttttacacaagaaaacttcttgggtcagcactggcac

SEQ ID NO: 31503 - DNA, 201 bp, Homo sapiens
ccgggtttatgatattccacctaagttcttttacacaagaaaacttcttgggtcagcactggcactggccagggcccctgcagcctgcctgaatttcaacygcatgctgattctcttgccagtctgtcgaaatctgctgtccttcctcaggggttccagtgcgtgctgctcaacaagagttcgaagacaactggacaggaa

SEQ ID NO: 31504 - DNA, 201 bp, Homo sapiens
gtatagaagaaaggcaaacacaacacattcaacctctgccaccatggggaactgggctgtgaatgaggggctctccatttttgtcattctggtttggctgsggttgaacgtcttcctctttgtctggtattaccgggtttatgatattccacctaagttcttttacacaagaaaacttcttgggtcagcactggcactggc

SEQ ID NO: 31505 - DNA, 201 bp, Homo sapiens
gctctccatttttgtcattctggtttggctggggttgaacgtcttcctctttgtctggtattaccgggtttatgatattccacctaagttcttttacacawgaaaacttcttgggtcagcactggcactggccagggcccctgcagcctgcctgaatttcaactgcatgctgattctcttgccagtctgtcgaaatctgct

SEQ ID NO: 31506 - DNA, 201 bp, Homo sapiens
gggttgaacgtcttcctctttgtctggtattaccgggtttatgatattccacctaagttcttttacacaagaaaacttcttgggtcagcactggcactggmcagggcccctgcagcctgcctgaatttcaactgcatgctgattctcttgccagtctgtcgaaatctgctgtccttcctcaggggttccagtgcgtgctgc

SEQ ID NO: 31507 - DNA, 201 bp, Homo sapiens
ggcatcactggagttgtcatcacgctgtgcctcatattaattatcacttcctccaccaaaaccatccggaggtcttactttgaagtcttttggtacacacrtcatctctttgtgatcttcttcattggccttgccatccatggagctgaacgaattgtacgtgggcagaccgcagagagtttggctgtgcataatataaca

SEQ ID NO: 31508 - DNA, 201 bp, Homo sapiens
ttgaacgtcttcctctttgtctggtattaccgggtttatgatattccacctaagttcttttacacaagaaaacttcttgggtcagcactggcactggccakggcccctgcagcctgcctgaatttcaactgcatgctgattctcttgccagtctgtcgaaatctgctgtccttcctcaggggttccagtgcgtgctgctca

SEQ ID NO: 31509 - DNA, 201 bp, Homo sapiens
tgaacgtcttcctctttgtctggtattaccgggtttatgatattccacctaagttcttttacacaagaaaacttcttgggtcagcactggcactggccagsgcccctgcagcctgcctgaatttcaactgcatgctgattctcttgccagtctgtcgaaatctgctgtccttcctcaggggttccagtgcgtgctgctcaa

SEQ ID NO: 31510 - DNA, 201 bp, Homo sapiens
cattctcaagtcagtctggtacaaatattgcaataacgccaccaatctgaagctcaaaaagatctacttctactggctgtgccgggacacacatgcctttkagtggtttgcagatctgctgcaactgctggagagccagatgcaggaaaggaacaatgccggcttcctcagctacaacatctacctcactggctgggatga

SEQ ID NO: 31511 - DNA, 201 bp, Homo sapiens
gaaatctgctgtccttcctcaggggttccagtgcgtgctgctcaacaagagttcgaagacaactggacaggaatctcacctttcataaaatggtggcatgratgattgcacttcactctgcgattcacaccattgcacatctatttaatgtggaatggtgtgtgaatgcccgagtcaataattctgatccttattcagtag

SEQ ID NO: 31512 - DNA, 201 bp, Homo sapiens
aatctgctgtccttcctcaggggttccagtgcgtgctgctcaacaagagttcgaagacaactggacaggaatctcacctttcataaaatggtggcatggakgattgcacttcactctgcgattcacaccattgcacatctatttaatgtggaatggtgtgtgaatgcccgagtcaataattctgatccttattcagtagca

SEQ ID NO: 31513 - DNA, 201 bp, Homo sapiens
tgctcaacaagagttcgaagacaactggacaggaatctcacctttcataaaatggtggcatggatgattgcacttcactctgcgattcacaccattgcacrtctatttaatgtggaatggtgtgtgaatgcccgagtcaataattctgatccttattcagtagcactctctgaacttggagacaggcaaaatgaaagttat

SEQ ID NO: 31514 - DNA, 201 bp, Homo sapiens
cagatgaagaagaaggggttcaaaatggaagtgggacaatacatttttgtcaagtgcccaaaggtgtccaagctggagtggcacccttttacactgacatycgcccctgaggaagacttctttagtatccatatccgcatcgttggggactggacagaggggctgttcaatgcttgtggctgtgataagcaggagtttcaa

SEQ ID NO: 31515 - DNA, 201 bp, Homo sapiens
aggcatcactggagttgtcatcacgctgtgcctcatattaattatcacttcctccaccaaaaccatccggaggtcttactttgaagtcttttggtacacayatcatctctttgtgatcttcttcattggccttgccatccatggagctgaacgaattgtacgtgggcagaccgcagagagtttggctgtgcataatataac

SEQ ID NO: 31516 - DNA, 201 bp, Homo sapiens
ccatggggaactgggctgtgaatgaggggctctccatttttgtcattctggtttggctggggttgaacgtcttcctctttgtctggtattaccgggtttawgatattccacctaagttcttttacacaagaaaacttcttgggtcagcactggcactggccagggcccctgcagcctgcctgaatttcaactgcatgctga

SEQ ID NO: 31517 - DNA, 201 bp, Homo sapiens
gaccctgttggcaggcatcactggagttgtcatcacgctgtgcctcatattaattatcacttcctccaccaaaaccatccggaggtcttactttgaagtcwtttggtacacacatcatctctttgtgatcttcttcattggccttgccatccatggagctgaacgaattgtacgtgggcagaccgcagagagtttggctgt

SEQ ID NO: 31518 - DNA, 201 bp, Homo sapiens
ctctttgtgatcttcttcattggccttgccatccatggagctgaacgaattgtacgtgggcagaccgcagagagtttggctgtgcataatataacagtttvtgaacaaaaaatctcagaatggggaaaaataaaggaatgcccaatccctcagtttgctggaaaccctcctatgacttggaaatggatagtgggtcccatg

SEQ ID NO: 31519 - DNA, 201 bp, Homo sapiens
ggccttgccatccatggagctgaacgaattgtacgtgggcagaccgcagagagtttggctgtgcataatataacagtttgtgaacaaaaaatctcagaatrgggaaaaataaaggaatgcccaatccctcagtttgctggaaaccctcctatgacttggaaatggatagtgggtcccatgtttctgtatctctgtgagagg

SEQ ID NO: 31520 - DNA, 201 bp, Homo sapiens
gagctacagatgaagaagaaggggttcaaaatggaagtgggacaatacatttttgtcaagtgcccaaaggtgtccaagctggagtggcacccttttacacwgacatccgcccctgaggaagacttctttagtatccatatccgcatcgttggggactggacagaggggctgttcaatgcttgtggctgtgataagcaggag

SEQ ID NO: 31521 - DNA, 201 bp, Homo sapiens
tcaacagaaggtggtcatcaccaaggtggtcactcaccctttcaaaaccatcgagctacagatgaagaagaaggggttcaaaatggaagtgggacaatacwtttttgtcaagtgcccaaaggtgtccaagctggagtggcacccttttacactgacatccgcccctgaggaagacttctttagtatccatatccgcatcgt

SEQ ID NO: 31522 - DNA, 201 bp, Homo sapiens
tcaccctttcaaaaccatcgagctacagatgaagaagaaggggttcaaaatggaagtgggacaatacatttttgtcaagtgcccaaaggtgtccaagctgkagtggcacccttttacactgacatccgcccctgaggaagacttctttagtatccatatccgcatcgttggggactggacagaggggctgttcaatgcttg

SEQ ID NO: 31523 - DNA, 201 bp, Homo sapiens
caatacatttttgtcaagtgcccaaaggtgtccaagctggagtggcacccttttacactgacatccgcccctgaggaagacttctttagtatccatatccscatcgttggggactggacagaggggctgttcaatgcttgtggctgtgataagcaggagtttcaagatgcgtggaaactacctaagatagcggttgatggg

SEQ ID NO: 31524 - DNA, 201 bp, Homo sapiens
aaaggtgtccaagctggagtggcacccttttacactgacatccgcccctgaggaagacttctttagtatccatatccgcatcgttggggactggacagagsggctgttcaatgcttgtggctgtgataagcaggagtttcaagatgcgtggaaactacctaagatagcggttgatgggccctttggcactgccagtgaaga

SEQ ID NO: 31525 - DNA, 201 bp, Homo sapiens
tgtggaatggtgtgtgaatgcccgagtcaataattctgatccttattcagtagcactctctgaacttggagacaggcaaaatgaaagttatctcaattttrctcgaaagagaataaagaaccctgaaggaggcctgtacctggctgtgaccctgttggcaggcatcactggagttgtcatcacgctgtgcctcatattaat

SEQ ID NO: 31526 - DNA, 201 bp, Homo sapiens
ggaatggtgtgtgaatgcccgagtcaataattctgatccttattcagtagcactctctgaacttggagacaggcaaaatgaaagttatctcaattttgctygaaagagaataaagaaccctgaaggaggcctgtacctggctgtgaccctgttggcaggcatcactggagttgtcatcacgctgtgcctcatattaattat

SEQ ID NO: 31527 - DNA, 201 bp, Homo sapiens
aatgcccgagtcaataattctgatccttattcagtagcactctctgaacttggagacaggcaaaatgaaagttatctcaattttgctcgaaagagaataargaaccctgaaggaggcctgtacctggctgtgaccctgttggcaggcatcactggagttgtcatcacgctgtgcctcatattaattatcacttcctccacc

SEQ ID NO: 31528 - DNA, 201 bp, Homo sapiens
atgcccgagtcaataattctgatccttattcagtagcactctctgaacttggagacaggcaaaatgaaagttatctcaattttgctcgaaagagaataaakaaccctgaaggaggcctgtacctggctgtgaccctgttggcaggcatcactggagttgtcatcacgctgtgcctcatattaattatcacttcctccacca

SEQ ID NO: 31529 - DNA, 201 bp, Homo sapiens
attatcacttcctccaccaaaaccatccggaggtcttactttgaagtcttttggtacacacatcatctctttgtgatcttcttcattggccttgccatccrtggagctgaacgaattgtacgtgggcagaccgcagagagtttggctgtgcataatataacagtttgtgaacaaaaaatctcagaatggggaaaaataaag

SEQ ID NO: 31530 - DNA, 201 bp, Homo sapiens
aattatcacttcctccaccaaaaccatccggaggtcttactttgaagtcttttggtacacacatcatctctttgtgatcttcttcattggccttgccatchatggagctgaacgaattgtacgtgggcagaccgcagagagtttggctgtgcataatataacagtttgtgaacaaaaaatctcagaatggggaaaaataaa

SEQ ID NO: 31531 - DNA, 201 bp, Homo sapiens
acttcctccaccaaaaccatccggaggtcttactttgaagtcttttggtacacacatcatctctttgtgatcttcttcattggccttgccatccatggagstgaacgaattgtacgtgggcagaccgcagagagtttggctgtgcataatataacagtttgtgaacaaaaaatctcagaatggggaaaaataaaggaatgc

SEQ ID NO: 31532 - DNA, 201 bp, Homo sapiens
tcctccaccaaaaccatccggaggtcttactttgaagtcttttggtacacacatcatctctttgtgatcttcttcattggccttgccatccatggagctgwacgaattgtacgtgggcagaccgcagagagtttggctgtgcataatataacagtttgtgaacaaaaaatctcagaatggggaaaaataaaggaatgccca

SEQ ID NO: 31533 - DNA, 201 bp, Homo sapiens
ctccaccaaaaccatccggaggtcttactttgaagtcttttggtacacacatcatctctttgtgatcttcttcattggccttgccatccatggagctgaaygaattgtacgtgggcagaccgcagagagtttggctgtgcataatataacagtttgtgaacaaaaaatctcagaatggggaaaaataaaggaatgcccaat

SEQ ID NO: 31534 - DNA, 201 bp, Homo sapiens
ccggaggtcttactttgaagtcttttggtacacacatcatctctttgtgatcttcttcattggccttgccatccatggagctgaacgaattgtacgtgggyagaccgcagagagtttggctgtgcataatataacagtttgtgaacaaaaaatctcagaatggggaaaaataaaggaatgcccaatccctcagtttgctgg

SEQ ID NO: 31535 - DNA, 201 bp, Homo sapiens
caataacgccaccaatctgaagctcaaaaagatctacttctactggctgtgccgggacacacatgcctttgagtggtttgcagatctgctgcaactgctgkagagccagatgcaggaaaggaacaatgccggcttcctcagctacaacatctacctcactggctgggatgagtctcaggccaatcactttgctgtgcacca

SEQ ID NO: 31536 - DNA, 201 bp, Homo sapiens
ccacgttattgcttttccgaggagggaagaaagtcagtgagcacagtggaggcagagaccttgactcgttacaccgctttgtcctgagccaagcgaaagaygaactttaggaacacagttggaggtcacctctcctgcccagctcccgcaccctgcgtttaggagttcagtcccacagaggccactgggttcccagtggtg

SEQ ID NO: 31537 - DNA, 201 bp, Homo sapiens
aagacagatgtcagtgggctgctctggccctggtgtgcacggctgtggcagctgttgatgccagtgtcctctaactcatgctgtccttgtgattaaacacytctatctcccttgggaataagcacatacaggcttaagctctaagatagataggtgtttgtccttttaccatcgagctacttcccataataaccactttgc

SEQ ID NO: 31538 - DNA, 201 bp, Homo sapiens
gaataaccttcatcaagttttatgctccatggtgtggtcattgtaagactctggctcctacttgggaggaactctctaaaaaggaattccctggtctggcrggggtcaagatcgccgaagtagactgcactgctgaacggaatatctgcagcaagtattcggtacgaggctaccccacgttattgcttttccgaggaggga

SEQ ID NO: 31539 - DNA, 201 bp, Homo sapiens
atcttagaaacaagaccacttatactgtctgtctgaggcagaagataacagcagcatctcgaccagcctctgccttaaaggaaatctttattaatcacgtrtggttcacagataattctttttttaaaaaaacccaacctcctagagaagcacaactgtcaagagtcttgtacacacaacttcagctttgcatcacgagtc

SEQ ID NO: 31540 - DNA, 201 bp, Homo sapiens
tgccttaaaggaaatctttattaatcacgtatggttcacagataattctttttttaaaaaaacccaacctcctagagaagcacaactgtcaagagtcttgtacacacaacttcagctttgcatcacgagtcttgtattccaagaaaatcaaagtggtacaatttgtttgtttacactatgatactttctaaataaactctt

SEQ ID NO: 31541 - DNA, 201 bp, Homo sapiens
tccttagaaagggtaggcatggaaaattccacgaggctcattctcagtatctcattaactcattgaaagattccagttgtatttgtcacctggggtgacargaccagacaggctttcccaggcctgggtatccagggaggctctgcagccctgctgaagggccctaactagagttctagagtttctgattctgtttctcag

SEQ ID NO: 31542 - DNA, 201 bp, Homo sapiens
tctgccttaaaggaaatctttattaatcacgtatggttcacagataattctttttttaaaaaaacccaacctcctagagaagcacaactgtcaagagtcttgtacacacaacttcagctttgcatcacgagtcttgtattccaagaaaatcaaagtggtacaatttgtttgtttacactatgatactttctaaataaactc

SEQ ID NO: 31543 - DNA, 201 bp, Homo sapiens
cctctgccttaaaggaaatctttattaatcacgtatggttcacagataattctttttttaaaaaaacccaacctcctagagaagcacaactgtcaagagtcttgtacacacaacttcagctttgcatcacgagtcttgtattccaagaaaatcaaagtggtacaatttgtttgtttacactatgatactttctaaataaac

SEQ ID NO: 31544 - DNA, 201 bp, Homo sapiens
tgttgatgccagtgtcctctaactcatgctgtccttgtgattaaacacctctatctcccttgggaataagcacatacaggcttaagctctaagatagataggtgtttgtccttttaccatcgagctacttcccataataaccactttgcatccaacactcttcacccacctcccatacgcaaggggatgtggatacttggc

SEQ ID NO: 31545 - DNA, 201 bp, Homo sapiens
ctgttgatgccagtgtcctctaactcatgctgtccttgtgattaaacacctctatctcccttgggaataagcacatacaggcttaagctctaagatagataggtgtttgtccttttaccatcgagctacttcccataataaccactttgcatccaacactcttcacccacctcccatacgcaaggggatgtggatacttgg

SEQ ID NO: 31546 - DNA, 201 bp, Homo sapiens
gctgttgatgccagtgtcctctaactcatgctgtccttgtgattaaacacctctatctcccttgggaataagcacatacaggcttaagctctaagatagataggtgtttgtccttttaccatcgagctacttcccataataaccactttgcatccaacactcttcacccacctcccatacgcaaggggatgtggatacttg

SEQ ID NO: 31547 - DNA, 201 bp, Homo sapiens
tgtaactcatggtcactgtgtaaacattttcagtggcgatatatcccctttgaccttctcttgatgaaatttacatggtttcctttgagactaaaatagcrttgagggaaatgaaattgctggactatttgtggctcctgagttgagtgattttggtgaaagaaagcacatccaaagcatagtttacctgcccacgagttc

SEQ ID NO: 31548 - DNA, 201 bp, Homo sapiens
agctgttgatgccagtgtcctctaactcatgctgtccttgtgattaaacacctctatctcccttgggaataagcacatacaggcttaagctctaagatagataggtgtttgtccttttaccatcgagctacttcccataataaccactttgcatccaacactcttcacccacctcccatacgcaaggggatgtggatactt

SEQ ID NO: 31549 - DNA, 201 bp, Homo sapiens
gccttaaaggaaatctttattaatcacgtatggttcacagataattctttttttaaaaaaacccaacctcctagagaagcacaactgtcaagagtcttgtrcacacaacttcagctttgcatcacgagtcttgtattccaagaaaatcaaagtggtacaatttgtttgtttacactatgatactttctaaataaactcttt

SEQ ID NO: 31550 - DNA, 201 bp, Homo sapiens
ctctgccttaaaggaaatctttattaatcacgtatggttcacagataattctttttttaaaaaaacccaacctcctagagaagcacaactgtcaagagtcttgtacacacaacttcagctttgcatcacgagtcttgtattccaagaaaatcaaagtggtacaatttgtttgtttacactatgatactttctaaataaact

SEQ ID NO: 31551 - DNA, 201 bp, Homo sapiens
caccattgcagaaggaataaccttcatcaagttttatgctccatggtgtggtcattgtaagactctggctcctacttgggaggaactctctaaaaaggaaytccctggtctggcgggggtcaagatcgccgaagtagactgcactgctgaacggaatatctgcagcaagtattcggtacgaggctaccccacgttattgct

SEQ ID NO: 31552 - DNA, 201 bp, Homo sapiens; identical to SEQ ID NO: 31536

SEQ ID NO: 31553 - DNA, 201 bp, Homo sapiens; identical to SEQ ID NO: 31537

SEQ ID NO: 31554 - DNA, 201 bp, Homo sapiens; identical to SEQ ID NO: 31538

SEQ ID NO: 31555 - DNA, 201 bp, Homo sapiens; identical to SEQ ID NO: 31539

SEQ ID NO: 31556 - DNA, 201 bp, Homo sapiens; identical to SEQ ID NO: 31540

SEQ ID NO: 31557 - DNA, 201 bp, Homo sapiens; identical to SEQ ID NO: 31541

SEQ ID NO: 31558 - DNA, 201 bp, Homo sapiens; identical to SEQ ID NO: 31542

SEQ ID NO: 31559 - DNA, 201 bp, Homo sapiens; identical to SEQ ID NO: 31543

SEQ ID NO: 31560 - DNA, 201 bp, Homo sapiens; identical to SEQ ID NO: 31544

SEQ ID NO: 31561 - DNA, 201 bp, Homo sapiens; identical to SEQ ID NO: 31545

SEQ ID NO: 31562 - DNA, 201 bp, Homo sapiens; identical to SEQ ID NO: 31546

SEQ ID NO: 31563 - DNA, 201 bp, Homo sapiens; identical to SEQ ID NO: 31547

SEQ ID NO: 31564 - DNA, 201 bp, Homo sapiens; identical to SEQ ID NO: 31548

SEQ ID NO: 31565 - DNA, 201 bp, Homo sapiens; identical to SEQ ID NO: 31549

SEQ ID NO: 31566 - DNA, 201 bp, Homo sapiens; identical to SEQ ID NO: 31550

SEQ ID NO: 31567 - DNA, 201 bp, Homo sapiens; identical to SEQ ID NO: 31551

SEQ ID NO: 31568 - DNA, 201 bp, Homo sapiens; identical to SEQ ID NO: 31536

SEQ ID NO: 31569 - DNA, 201 bp, Homo sapiens; identical to SEQ ID NO: 31537

SEQ ID NO: 31570 - DNA, 201 bp, Homo sapiens; identical to SEQ ID NO: 31538

SEQ ID NO: 31571 - DNA, 201 bp, Homo sapiens; identical to SEQ ID NO: 31539

SEQ ID NO: 31572 - DNA, 201 bp, Homo sapiens; identical to SEQ ID NO: 31540

SEQ ID NO: 31573 - DNA, 201 bp, Homo sapiens; identical to SEQ ID NO: 31541

SEQ ID NO: 31574 - DNA, 201 bp, Homo sapiens; identical to SEQ ID NO: 31542

SEQ ID NO: 31575 - DNA, 201 bp, Homo sapiens; identical to SEQ ID NO: 31543

SEQ ID NO: 31576 - DNA, 201 bp, Homo sapiens; identical to SEQ ID NO: 31544

SEQ ID NO: 31577 - DNA, 201 bp, Homo sapiens; identical to SEQ ID NO: 31545

SEQ ID NO: 31578 - DNA, 201 bp, Homo sapiens; identical to SEQ ID NO: 31546

SEQ ID NO: 31579 - DNA, 201 bp, Homo sapiens; identical to SEQ ID NO: 31547

SEQ ID NO: 31580 - DNA, 201 bp, Homo sapiens; identical to SEQ ID NO: 31548

SEQ ID NO: 31581 - DNA, 201 bp, Homo sapiens; identical to SEQ ID NO: 31549

SEQ ID NO: 31582 - DNA, 201 bp, Homo sapiens; identical to SEQ ID NO: 31550

SEQ ID NO: 31583 - DNA, 201 bp, Homo sapiens; identical to SEQ ID NO: 31551

SEQ ID NO: 31584 - DNA, 201 bp, Homo sapiens; identical to SEQ ID NO: 31536

SEQ ID NO: 31585 - DNA, 201 bp, Homo sapiens; identical to SEQ ID NO: 31549

SEQ ID NO: 31586 - DNA, 201 bp, Homo sapiens; identical to SEQ ID NO: 31538

SEQ ID NO: 31587 - DNA, 201 bp, Homo sapiens; identical to SEQ ID NO: 31550

SEQ ID NO: 31588 - DNA, 201 bp, Homo sapiens; identical to SEQ ID NO: 31539

SEQ ID NO: 31589 - DNA, 201 bp, Homo sapiens; identical to SEQ ID NO: 31551

SEQ ID NO: 31590 - DNA, 201 bp, Homo sapiens; identical to SEQ ID NO: 31540

SEQ ID NO: 31591 - DNA, 201 bp, Homo sapiens; identical to SEQ ID NO: 31541

SEQ ID NO: 31592 - DNA, 201 bp, Homo sapiens; identical to SEQ ID NO: 31542

SEQ ID NO: 31593 - DNA, 201 bp, Homo sapiens; identical to SEQ ID NO: 31543

SEQ ID NO: 31594 - DNA, 201 bp, Homo sapiens
gaggtcgaccttctaatgtatgaagaatgggatgcatttgatctcaagaccaaagtcccttgggaataagcacatacaggcttaagctctaagatagataggtgtttgtccttttaccatcgagctacttcccataataaccactttgcatccaacactcttcacccacctcccatacgcaaggggatgtggatacttggc

SEQ ID NO: 31595 - DNA, 201 bp, Homo sapiens
ggaggtcgaccttctaatgtatgaagaatgggatgcatttgatctcaagaccaaagtcccttgggaataagcacatacaggcttaagctctaagatagataggtgtttgtccttttaccatcgagctacttcccataataaccactttgcatccaacactcttcacccacctcccatacgcaaggggatgtggatacttgg

SEQ ID NO: 31596 - DNA, 201 bp, Homo sapiens
aggaggtcgaccttctaatgtatgaagaatgggatgcatttgatctcaagaccaaagtcccttgggaataagcacatacaggcttaagctctaagatagataggtgtttgtccttttaccatcgagctacttcccataataaccactttgcatccaacactcttcacccacctcccatacgcaaggggatgtggatacttg

SEQ ID NO: 31597 - DNA, 201 bp, Homo sapiens; identical to SEQ ID NO: 31547

SEQ ID NO: 31598 - DNA, 201 bp, Homo sapiens
aaggaggtcgaccttctaatgtatgaagaatgggatgcatttgatctcaagaccaaagtcccttgggaataagcacatacaggcttaagctctaagatagataggtgtttgtccttttaccatcgagctacttcccataataaccactttgcatccaacactcttcacccacctcccatacgcaaggggatgtggatactt

SEQ ID NO: 31599 - DNA, 168 bp, Homo sapiens
tggaggagcaaagactggggtcttttgccaaagggattgcaggttcagaaggcatcttaccatggctggggaattgtctggtggtggggggtagggggcaraggtcatgaaggagcaagttttttatttgtgacctcagctttggcaataaaagatcttttgaaagcc

SEQ ID NO: 31600 - DNA, 201 bp, Homo sapiens
ggctgccgcactggccagagtacaaccaggaggaagggtacctgcagattggtgctaacacccaggcagcccagaagctgaaggacaaggaagtagctttytggaccaaactcttcgccaagaaggcagtggagaagccaccccagatagaacacattgcgctgtgaacggaaggtccatccagcctcgggaacctggagg

SEQ ID NO: 31601 - DNA, 201 bp, Homo sapiens
tcgcattcctaaggaattgattccagaagccattgagaagtacttaggaggaacagatgaccctgtcaagaagaaagacctgttcctggacttaatggggracgtactgttcggtgtcccatctgtgactgtggcccggaaccacagagatgctggagcacccacctacatgtatgagtttcagtaccgtccaagcttctc

SEQ ID NO: 31602 - DNA, 201 bp, Homo sapiens
gaaccacagagatgctggagcacccacctacatgtatgagtttcagtaccgtccaagcttctcatcagacatgaaacccaagacggtgataggagaccacrgggatgagctcttctccgtccttggggccccatctttaaaagagggtgcctcagaagaggagatcagacttagcaagatggtgatgaaattctgggccaa

SEQ ID NO: 31603 - DNA, 201 bp, Homo sapiens
cacccacggtgattgatggagtggtgctgccaaaaacacccgaggagcttcaagctgaaaggaagttccacactgtcccctacattgtcggatttaacagraaggaatttggctggtttcttccaacattgatgagctatctactctccgaagggaaactggaccagaagacagccatgtcactcttctggaagtcctatc

SEQ ID NO: 31604 - DNA, 160 bp, Homo sapiens
tgcacccaagatcccaaggtagggcagtttctctcagaactattgaccaaccgaaaggaraacattcctttcaagctttctgaagactgtctttacctcaatatttacactcctgctgacttgaccaagaaaaacaggctgctggtgatggtgtggatcc

SEQ ID NO: 31605 - DNA, 133 bp, Homo sapiens
attgcaggttcagaaggcatcttaccatggctggggaattgtctggtggtggggggtagggggcagaggtcatgaaggagcaagttttttatttgtgaccycagctttggcaataaaagatcttttgaaagcc

SEQ ID NO: 31606 - DNA, 201 bp, Homo sapiens
atcgcctgggcatctggggattcttcagcacaggggatgaacacagccgggggaactggggtcacctggaccaggtggctgccctgcgctgggtccaggamaacattgccagctttggagggaacccaggctctgtgaccatctttggagagtcagcgggaggagaaagtgtctctgttcttgttttgtctccattggcca

SEQ ID NO: 31607 - DNA, 201 bp, Homo sapiens
ggatttgcacagcctgtggccattttcctgggaatcccttttgccaagccgcctcttggacccctgaggtttactccaccgcagcctgcagaaccatggarctttgtgaagaatgccacctcgtaccctcctatgtgcacccaagatcccaaggcggggcagttactctcagagctatttacaaaccgaaaggagaacatt

SEQ ID NO: 31608 - DNA, 201 bp, Homo sapiens
aaccatggagctttgtgaagaatgccacctcgtaccctcctatgtgcacccaagatcccaaggcggggcagttactctcagagctatttacaaaccgaaargagaacattcctctcaagctttctgaagactgtctttacctcaatatttacactcctgctgacttgaccaagaaaaacaggctgccggtgatggtgtgga

SEQ ID NO: 31609 - DNA, 201 bp, Homo sapiens
ccttttgccaagccgcctcttggacccctgaggtttactccaccgcagcctgcagaaccatggagctttgtgaagaatgccacctcgtaccctcctatgtkcacccaagatcccaaggcggggcagttactctcagagctatttacaaaccgaaaggagaacattcctctcaagctttctgaagactgtctttacctcaat

SEQ ID NO: 31610 - DNA, 201 bp, Homo sapiens
gtgaccattcaatatcgcctgggcatctggggattcttcagcacaggggatgaacacagccgggggaactggggtcacctggaccaggtggctgccctgcrctgggtccaggacaacattgccagctttggagggaacccaggctctgtgaccatctttggagagtcagcgggaggagaaagtgtctctgttcttgttttg

SEQ ID NO: 31611 - DNA, 201 bp, Homo sapiens
ggcttgggggcatccgtcctcgccacctgtggtggacaccgtgcatggcaaagtgctggggaagttcgtcagcttagaaggatttgcacagcctgtggccrttttcctgggaatcccttttgccaagccgcctcttggacccctgaggtttactccaccgcagcctgcagaaccatggagctttgtgaagaatgccacctc

SEQ ID NO: 31612 - DNA, 201 bp, Homo sapiens
gatgtggctccctgctcttgtcctggccactctcgctgcttccgcggcttgggggcatccgtcctcgccacctgtggtggacaccgtgcatggcaaagtgytggggaagttcgtcagcttagaaggatttgcacagcctgtggccattttcctgggaatcccttttgccaagccgcctcttggacccctgaggtttactcc

SEQ ID NO: 31613 - DNA, 201 bp, Homo sapiens
gaggtttactccaccgcagcctgcagaaccatggagctttgtgaagaatgccacctcgtaccctcctatgtgcacccaagatcccaaggcggggcagttamtctcagagctatttacaaaccgaaaggagaacattcctctcaagctttctgaagactgtctttacctcaatatttacactcctgctgacttgaccaagaa

SEQ ID NO: 31614 - DNA, 201 bp, Homo sapiens
tgcagaaccatggagctttgtgaagaatgccacctcgtaccctcctatgtgcacccaagatcccaaggcggggcagttactctcagagctatttacaaacygaaaggagaacattcctctcaagctttctgaagactgtctttacctcaatatttacactcctgctgacttgaccaagaaaaacaggctgccggtgatggt

SEQ ID NO: 31615 - DNA, 201 bp, Homo sapiens
ccacctgtggtggacaccgtgcatggcaaagtgctggggaagttcgtcagcttagaaggatttgcacagcctgtggccattttcctgggaatcccttttgscaagccgcctcttggacccctgaggtttactccaccgcagcctgcagaaccatggagctttgtgaagaatgccacctcgtaccctcctatgtgcacccaa

SEQ ID NO: 31616 - DNA, 201 bp, Homo sapiens
agccccagggcatccgtcctcgccacctgtggtggacaccgtgcatggcaaagtgctggggaagttcgtcagcttagaaggatttgcacagcctgtggccrttttcctgggaatcccttttgccaagccgcctcttggacccctgaggtttactccaccgcagcctgcagaaccatggagctttgtgaagaatgccacctc

SEQ ID NO: 31617 - DNA, 201 bp, Homo sapiens
ttatgggtacctctcccaggacatggccacttccttcccagctgtagccccagggcatccgtcctcgccacctgtggtggacaccgtgcatggcaaagtgytggggaagttcgtcagcttagaaggatttgcacagcctgtggccattttcctgggaatcccttttgccaagccgcctcttggacccctgaggtttactcc

SEQ ID NO: 31618 - DNA, 135 bp, Homo sapiens
ggatttgcacagcctgtggccattttcctgggaatcccttttgccaagccgcctcttggacccctgaggtttactccaccgcagcctgcagaaccatggarctttgtgaagaatgccacctcgtaccctcctatg

SEQ ID NO: 31619 - DNA, 192 bp, Homo sapiens
ccacctgtggtggacaccgtgcatggcaaagtgctggggaagttcgtcagcttagaaggatttgcacagcctgtggccattttcctgggaatcccttttgscaagccgcctcttggacccctgaggtttactccaccgcagcctgcagaaccatggagctttgtgaagaatgccacctcgtaccctcctatg

SEQ ID NO: 31620 - DNA, 201 bp, Homo sapiens; identical to SEQ ID NO: 31606

SEQ ID NO: 31621 - DNA, 201 bp, Homo sapiens; identical to SEQ ID NO: 31607

SEQ ID NO: 31622 - DNA, 201 bp, Homo sapiens; identical to SEQ ID NO: 31608

SEQ ID NO: 31623 - DNA, 201 bp, Homo sapiens; identical to SEQ ID NO: 31609

SEQ ID NO: 31624 - DNA, 201 bp, Homo sapiens; identical to SEQ ID NO: 31610

SEQ ID NO: 31625 - DNA, 201 bp, Homo sapiens; identical to SEQ ID NO: 31611

SEQ ID NO: 31626 - DNA, 201 bp, Homo sapiens; identical to SEQ ID NO: 31612

SEQ ID NO: 31627 - DNA, 201 bp, Homo sapiens; identical to SEQ ID NO: 31613

SEQ ID NO: 31628 - DNA, 201 bp, Homo sapiens; identical to SEQ ID NO: 31614

SEQ ID NO: 31629 - DNA, 201 bp, Homo sapiens; identical to SEQ ID NO: 31615

SEQ ID NO: 31630 - DNA, 201 bp, Homo sapiens
gtggacgatggggaggacactggcttggagacaactatgcacgatgggacaacatggacaaatcaatcattggtatgatggaatttagtctgtttggaatrtcatatactggagcagacatctgtggttttttcaacaactcagaatatcatctctgtacccgctggatgcaacttggagcattttatccatactcaagga

SEQ ID NO: 31631 - DNA, 201 bp, Homo sapiens
gctgcagaaggactctgaggccatccgcagccagtacgctcactactttgacctctcactggtcaataatggtgttgatgaaacccttaagaaattacaasaagccttcgaccaagcgtgcagttctccacagtgggtgcctgtctcctgggtttactaagcttgtagaatgggggaacccactgtatgcccctctccagc

SEQ ID NO: 31632 - DNA, 201 bp, Homo sapiens
ctcctgccccaggtagccctgcccaggtcaagggacaggaggtgcggaaagtgcgactcatacagtttgagaaggtcacagaagagcccatgggaatcackctgaagctgaatgaaaaacagtcctgtacggtggccagaattcttcatggtggcatgatccatagacaaggctcccttcacgtgggggatgagatcctag

SEQ ID NO: 31633 - DNA, 201 bp, Homo sapiens
atcccttgcaaggaggcgggactgaagtttgctactggggacattatccagattatcaacaaggatgacagcaattggtggcagggacgggtggaaggctyctccaaggagtcagcaggattgatcccttcccctgagctgcaggaatggcgagtggcaagtatggctcagtcagctcctagcgaagccccgagctgcagt

SEQ ID NO: 31634 - DNA, 201 bp, Homo sapiens; identical to SEQ ID NO: 31631

SEQ ID NO: 31635 - DNA, 201 bp, Homo sapiens
attgggggtaagaagtactaccaaaatgtaactgctaatcaagggtgatgcacagcaaaagcaatggaccccatccctctaaagcctgccctcctttgccytcaactgtatatgctgggtatttcatttgtctttttattttggagaaagcgtttttaactgcaactttctataatgccaaaatgacacatctgtgcaata

SEQ ID NO: 31636 - DNA, 201 bp, Homo sapiens
gatttgaaaaggatttctagaaattgggggtaagaagtactaccaaaatgtaactgctaatcaagggtgatgcacagcaaaagcaatggaccccatccctytaaagcctgccctcctttgccttcaactgtatatgctgggtatttcatttgtctttttattttggagaaagcgtttttaactgcaactttctataatgcc

SEQ ID NO: 31637 - DNA, 201 bp, Homo sapiens; identical to SEQ ID NO: 31633

SEQ ID NO: 31638 - DNA, 201 bp, Homo sapiens
ccactgatctggatttgaaaaggatttctagaaattgggggtaagaagtactaccaaaatgtaactgctaatcaagggtgatgcacagcaaaagcaatggrccccatccctctaaagcctgccctcctttgccttcaactgtatatgctgggtatttcatttgtctttttattttggagaaagcgtttttaactgcaactt

SEQ ID NO: 31639 - DNA, 201 bp, Homo sapiens; identical to SEQ ID NO: 31631

SEQ ID NO: 31640 - DNA, 201 bp, Homo sapiens; identical to SEQ ID NO: 31635

SEQ ID NO: 31641 - DNA, 201 bp, Homo sapiens; identical to SEQ ID NO: 31636

SEQ ID NO: 31642 - DNA, 201 bp, Homo sapiens; identical to SEQ ID NO: 31632

SEQ ID NO: 31643 - DNA, 201 bp, Homo sapiens; identical to SEQ ID NO: 31633

SEQ ID NO: 31644 - DNA, 201 bp, Homo sapiens; identical to SEQ ID NO: 31638

SEQ ID NO: 31645 - DNA, 201 bp, Homo sapiens; identical to SEQ ID NO: 31631

SEQ ID NO: 31646 - DNA, 201 bp, Homo sapiens; identical to SEQ ID NO: 31635

SEQ ID NO: 31647 - DNA, 201 bp, Homo sapiens; identical to SEQ ID NO: 31636

SEQ ID NO: 31648 - DNA, 201 bp, Homo sapiens; identical to SEQ ID NO: 31632

SEQ ID NO: 31649 - DNA, 201 bp, Homo sapiens
cctgcactacaggaggcgggactgaagtttgctactggggacattatccagattatcaacaaggatgacagcaattggtggcagggacgggtggaaggctyctccaaggagtcagcaggattgatcccttcccctgagctgcaggaatggcgagtggcaagtatggctcagtcagctcctagcgaagccccgagctgcagt

SEQ ID NO: 31650 - DNA, 201 bp, Homo sapiens; identical to SEQ ID NO: 31638

SEQ ID NO: 31651 - DNA, 201 bp, Homo sapiens; identical to SEQ ID NO: 31631

SEQ ID NO: 31652 - DNA, 201 bp, Homo sapiens; identical to SEQ ID NO: 31635

SEQ ID NO: 31653 - DNA, 201 bp, Homo sapiens; identical to SEQ ID NO: 31636

SEQ ID NO: 31654 - DNA, 201 bp, Homo sapiens
ctgtatcgcatccattgaatactgtgaccgaggacatgtacaccaacgggtctcctgccccaggtagccctgcccaggtcaagggacaggagggaatcackctgaagctgaatgaaaaacagtcctgtacggtggccagaattcttcatggtggcatgatccatagacaaggctcccttcacgtgggggatgagatcctag

SEQ ID NO: 31655 - DNA, 201 bp, Homo sapiens; identical to SEQ ID NO: 31633

SEQ ID NO: 31656 - DNA, 201 bp, Homo sapiens; identical to SEQ ID NO: 31638

SEQ ID NO: 31657 - DNA, 201 bp, Homo sapiens; identical to SEQ ID NO: 31631

SEQ ID NO: 31658 - DNA, 201 bp, Homo sapiens; identical to SEQ ID NO: 31635

SEQ ID NO: 31659 - DNA, 201 bp, Homo sapiens; identical to SEQ ID NO: 31636

SEQ ID NO: 31660 - DNA, 201 bp, Homo sapiens; identical to SEQ ID NO: 31633

SEQ ID NO: 31661 - DNA, 201 bp, Homo sapiens; identical to SEQ ID NO: 31638

SEQ ID NO: 31662 - DNA, 201 bp, Homo sapiens
tgaagcgtggtccacgttgcttagaactgtccacagtgtgctctattcttcacctgcaatactgctgaaggaaatcattttggtggatgatgctagtgtaratgagtacttacatgataaactagatgaatatgtaaaacaattttctatagtaaaaatagtcagacaaagagaaagaaaaggtctgatcactgctcggtt

SEQ ID NO: 31663 - DNA, 201 bp, Homo sapiens
aagcacaataactagtaataccaaagactatttcaaaatgtccagatgtaggggaagagatgtttacagtatgatgaaaataattttccaagtaaagtgawgtttgtgtgttttgtacacttagggatatatatatatagctacattcacacactcacaatttaaaatatttcccctagttttttggggggataggaagaa

SEQ ID NO: 31664 - DNA, 201 bp, Homo sapiens
acagatccagaatttattagtttaaaatgcaggtgaacttttttttgcgtttggtttacttgtctgtcaaatgtttccttaaacatgaaactgaataaggrgaagagtatttttaacacttaaatttcttggcaaattttaaaacattttttagtctgtaatacactccacttgaagcacttaagtcttccttaaatgact

SEQ ID NO: 31665 - DNA, 201 bp, Homo sapiens; identical to SEQ ID NO: 31662

SEQ ID NO: 31666 - DNA, 201 bp, Homo sapiens; identical to SEQ ID NO: 31663

SEQ ID NO: 31667 - DNA, 201 bp, Homo sapiens; identical to SEQ ID NO: 31664

SEQ ID NO: 31668 - DNA, 201 bp, Homo sapiens
cgacctcctgagtatgttgaagaatatttattgtttattctttatcaccaggctttgcaggggagagaggggtgagctaaggaagttatctgttttttagytactctaaggcagaaaatcagcaaatactgtttatttaacctgttgtatttattttttgcttataatgattgaggctacatatccctatttatgcttggt

SEQ ID NO: 31669 - DNA, 201 bp, Homo sapiens; identical to SEQ ID NO: 31662

SEQ ID NO: 31670 - DNA, 201 bp, Homo sapiens; identical to SEQ ID NO: 31663

SEQ ID NO: 31671 - DNA, 201 bp, Homo sapiens; identical to SEQ ID NO: 31664

SEQ ID NO: 31672 - DNA, 201 bp, Homo sapiens
accactttaaactgtacagtggattctgtgctaaccatatcaaagtacagaaggttctggagcgagctaaaactgacaaagccttcaaggcttttctggaygcccggaaccccaccaagcagcattcctccacgctggagtcctacctcatcaagccggttcagagagtgctcaagtacccgctgctgctcaaggagctgg

SEQ ID NO: 31673 - DNA, 201 bp, Homo sapiens
ctctccggaaaaggacactgtcactgacccagcgagggagaaacaagaagggaatattttcttcgttaaaagggctggacacactggccagaaaaggcaargagaagagaccttctataactcagatatttgattcaagtggcagccatggattttctggaactcagctacctcaaaactccagtaactccagtgaggtcg

SEQ ID NO: 31674 - DNA, 201 bp, Homo sapiens
cagattttgctgacaatctcatcaaagagagtgacatcctgagcgatgaagatgatgaccaccgtcagactgtgaagcagggcagccctactaaagacatygaaattcagttccagagactgaggatttccgaggacccagacgttcaccccgaggctgagcagcagcctggcccggagtcgggtgagggtcagaaaggag

SEQ ID NO: 31675 - DNA, 201 bp, Homo sapiens
atgaccaccgtcagactgtgaagcagggcagccctactaaagacatcgaaattcagttccagagactgaggatttccgaggacccagacgttcaccccgargctgagcagcagcctggcccggagtcgggtgagggtcagaaaggaggagagcagcccaaactggtccgggggcacttctgccccattaaacgaaaagcca

SEQ ID NO: 31676 - DNA, 201 bp, Homo sapiens
gcaaggagaagagaccttctataactcagatatttgattcaagtggcagccatggattttctggaactcagctacctcaaaactccagtaactccagtgargtcgatgaacttctgcatatatatggttcaacagtagacggtgttccccgagacaatgcatgggaaatccagacttatgtccactttcaggacaatcacg

SEQ ID NO: 31677 - DNA, 201 bp, Homo sapiens
cagaaatagaaggacggccagaaaccatctttcagttgtgttgcagtgacagtgaaagcaaaaccaacattgttaaggtgattcgttctattctgagggaraacttcaggcgtcacataaagtgtgaattaccactggagaaaacgtgtaaggatcgcctggtacctcttaagaaccgagttcctgtttcggccaaattag

SEQ ID NO: 31678 - DNA, 201 bp, Homo sapiens
actgtcactgacccagcgagggagaaacaagaagggaatattttcttcgttaaaagggctggacacactggccagaaaaggcaaggagaagagaccttctrtaactcagatatttgattcaagtggcagccatggattttctggaactcagctacctcaaaactccagtaactccagtgaggtcgatgaacttctgcatat

SEQ ID NO: 31679 - DNA, 201 bp, Homo sapiens
gcggcacccagagcagcggctgccccacggctgagggcaggcaggactccaagagcacttctcccgggaaatacccacaccccggcttggcagattttgcygacaatctcatcaaagagagtgacatcctgagcgatgaagatgatgaccaccgtcagactgtgaagcagggcagccctactaaagacatcgaaattcagt

SEQ ID NO: 31680 - DNA, 201 bp, Homo sapiens
aggactccaagagcacttctcccgggaaatacccacaccccggcttggcagattttgctgacaatctcatcaaagagagtgacatcctgagcgatgaagawgatgaccaccgtcagactgtgaagcagggcagccctactaaagacatcgaaattcagttccagagactgaggatttccgaggacccagacgttcaccccg

SEQ ID NO: 31681 - DNA, 201 bp, Homo sapiens
tggggaagctgtgtctgatcttgaccttaagcagatggaggccctgttttctgagaagagcgtcggactcactctgattgcccggcctccggacacaaaarcaaccctgtgtacatcctggtcagacagtgacctgttctccagggaccagaagagtctgctgccccctcctaaccagtcccaactgctggaggaattcct

SEQ ID NO: 31682 - DNA, 201 bp, Homo sapiens
agcatatttaagttattttaatgtggtttaggggcaaaatgtgcagatacttcatttttgtaagattgtaatagatgctgtttatactaaacatgtcatawctatctatacagtatatattaaaagaaagcttgtactgtatcttatttgatgatatttattttctctgccaagctgtatagtaaaaggaaaataagtcac

SEQ ID NO: 31683 - DNA, 201 bp, Homo sapiens
ttcacaatggcttaaaaatcaatccaaatcagtaaagtcagtcagcagataatagatggcattagaatattttagtttttgaatgaggaaaaaaataagcygcagcagcagcttcaagacacagagagatggcagacaggcccccagggaccactcagtgctaaacttcccagatagagacaccacttattttcggtagac

SEQ ID NO: 31684 - DNA, 201 bp, Homo sapiens
atgatttaggatccttaaaattacattctaataattaagttatgtggaaaaagtaaggctggggaagtcgtgattaatagttttcaaagggccattttttwaaatcctctgggcattttctttcagctgtttgttagtttttgctttatttaaagcatatttaagttattttaatgtggtttaggggcaaaatgtgcagat

SEQ ID NO: 31685 - DNA, 201 bp, Homo sapiens
tcacgaagactgggagtgtgtgtgactttgggtttgcagttacagcgcaggtggatgagcgtcagcatctcagccggatatttataagcgacgttcttccygatggcctggcgtatggggaagggctgagaaagggcaatgagatcatgaccttaaatggggaagctgtgtctgatcttgaccttaagcagatggaggccc

SEQ ID NO: 31686 - DNA, 201 bp, Homo sapiens
ttttaacgacagtcaggccaacggcatggaaggaccgcgggagaatcaggatcctcctccgaggcctctggcccgccacctgtctgatgcagaccgcctcygcaaagtcatccaggagcttgtggacacagagaagtcctacgtgaaggatttgagctgcctctttgaattatacttggagccacttcagaatgagacctt

SEQ ID NO: 31687 - DNA, 201 bp, Homo sapiens
ggctgcacctgttctctaatgacatccaccagacctgtgcttgatggtcacttaattttaaaacacagtttcacaatggcttaaaaatcaatccaaatcaktaaagtcagtcagcagataatagatggcattagaatattttagtttttgaatgaggaaaaaaataagctgcagcagcagcttcaagacacagagagatgg

SEQ ID NO: 31688 - DNA, 201 bp, Homo sapiens
ttctggaactcagctacctcaaaactccagtaactccagtgaggtcgatgaacttctgcatatatatggttcaacagtagacggtgttccccgagacaatrcatgggaaatccagacttatgtccactttcaggacaatcacggagttactgtagggatcaagccagagcacagagtagaagatattttgactttggcatg

SEQ ID NO: 31689 - DNA, 201 bp, Homo sapiens
ccacgcccacgtccaccttcgttgtaagcaaacatattatcattctgtggcatgatatgtggcatagtgtgatcaatcaactcatccttgtaaaacaggargatgggctgtcaacagcctgttttcataaacagacctttccacgtacttcggtttcatctctaggcatggaagatggtacattctggattcgcaaatgac

SEQ ID NO: 31690 - DNA, 201 bp, Homo sapiens
aaagggccatttttttaaatcctctgggcattttctttcagctgtttgttagtttttgctttatttaaagcatatttaagttattttaatgtggtttaggrgcaaaatgtgcagatacttcatttttgtaagattgtaatagatgctgtttatactaaacatgtcatatctatctatacagtatatattaaaagaaagctt

SEQ ID NO: 31691 - DNA, 201 bp, Homo sapiens
ggccaaattagcttcatccaggtctttaaaagtcctgaagaattcctccagcaacgagtggaccggtgagactggcaagggaaccttgctggactctgacragggcagcttgagcagcggcacccagagcagcggctgccccacggctgagggcaggcaggactccaagagcacttctcccgggaaatacccacaccccgg

SEQ ID NO: 31692 - DNA, 193 bp, Homo sapiens
gccaccagccagacagatctagaaaactgggtcactgctgtacactctgcttgtgcatccctttttgcaaagaagcatgggaaagaggacacsctgcggctgctgaagaaccagaccaaaaacctgcttcagaagatagacatggacagcaagatgaagaagatggcagagctgcagctgtccgtggtgagcg

SEQ ID NO: 31693 - DNA, 201 bp, Homo sapiens
actttgggtttgcagttacagcgcaggtggatgagcgtcagcatctcagccggatatttataagcgacgttcttcccgatggcctggcgtatggggaaggkctgagaaagggcaatgagatcatgaccttaaatggggaagctgtgtctgatcttgaccttaagcagatggaggccctgttttctgagaagagcgtcggac

SEQ ID NO: 31694 - DNA, 201 bp, Homo sapiens
ttagcttcatccaggtctttaaaagtcctgaagaattcctccagcaacgagtggaccggtgagactggcaagggaaccttgctggactctgacgagggcascttgagcagcggcacccagagcagcggctgccccacggctgagggcaggcaggactccaagagcacttctcccgggaaatacccacaccccggcttggca

SEQ ID NO: 31695 - DNA, 201 bp, Homo sapiens
agcttcatccaggtctttaaaagtcctgaagaattcctccagcaacgagtggaccggtgagactggcaagggaaccttgctggactctgacgagggcagcytgagcagcggcacccagagcagcggctgccccacggctgagggcaggcaggactccaagagcacttctcccgggaaatacccacaccccggcttggcaga

SEQ ID NO: 31696 - DNA, 201 bp, Homo sapiens
agaagatagacatggacagcaagatgaagaagatggcagagctgcagctgtccgtggtgagcgacccaaagaacaggaaagccatagagaaccagatccarcaatgggagcagaatcttgagaaatttcacatggatctgttcaggatgcgctgctatctggccagcctacaaggtggggagttaccgaacccaaagagtc

SEQ ID NO: 31697 - DNA, 201 bp, Homo sapiens
caggagtgctgagcagatcactgcactgtgcaggagttttaacgacagtcaggccaacggcatggaaggaccgcgggagaatcaggatcctcctccgaggyctctggcccgccacctgtctgatgcagaccgcctccgcaaagtcatccaggagcttgtggacacagagaagtcctacgtgaaggatttgagctgcctctt

SEQ ID NO: 31698 - DNA, 201 bp, Homo sapiens; identical to SEQ ID NO: 31672

SEQ ID NO: 31699 - DNA, 201 bp, Homo sapiens; identical to SEQ ID NO: 31673

SEQ ID NO: 31700 - DNA, 201 bp, Homo sapiens; identical to SEQ ID NO: 31674

SEQ ID NO: 31701 - DNA, 201 bp, Homo sapiens; identical to SEQ ID NO: 31675

SEQ ID NO: 31702 - DNA, 201 bp, Homo sapiens; identical to SEQ ID NO: 31676

SEQ ID NO: 31703 - DNA, 201 bp, Homo sapiens; identical to SEQ ID NO: 31677

SEQ ID NO: 31704 - DNA, 201 bp, Homo sapiens
ctccgggaactgtacaaagatgccaacctggggagcctctccccctcaggtatccgcctttctgatgaatacatgggcacgcatgccagcctgagcaaccrtgtctcttttgcttccgacattgatgtgccctccagagtggcacacggggaccccatccagtacagttccttcactctcccctgtcggaagcccaaagcc

SEQ ID NO: 31705 - DNA, 201 bp, Homo sapiens; identical to SEQ ID NO: 31678

SEQ ID NO: 31706 - DNA, 201 bp, Homo sapiens; identical to SEQ ID NO: 31679

SEQ ID NO: 31707 - DNA, 201 bp, Homo sapiens; identical to SEQ ID NO: 31680

SEQ ID NO: 31708 - DNA, 201 bp, Homo sapiens; identical to SEQ ID NO: 31681

SEQ ID NO: 31709 - DNA, 201 bp, Homo sapiens; identical to SEQ ID NO: 31682

SEQ ID NO: 31710 - DNA, 201 bp, Homo sapiens; identical to SEQ ID NO: 31683

SEQ ID NO: 31711 - DNA, 201 bp, Homo sapiens; identical to SEQ ID NO: 31684

SEQ ID NO: 31712 - DNA, 201 bp, Homo sapiens; identical to SEQ ID NO: 31685

SEQ ID NO: 31713 - DNA, 201 bp, Homo sapiens; identical to SEQ ID NO: 31686

SEQ ID NO: 31714 - DNA, 201 bp, Homo sapiens; identical to SEQ ID NO: 31687

SEQ ID NO: 31715 - DNA, 201 bp, Homo sapiens; identical to SEQ ID NO: 31688

SEQ ID NO: 31716 - DNA, 201 bp, Homo sapiens; identical to SEQ ID NO: 31689

SEQ ID NO: 31717 - DNA, 201 bp, Homo sapiens; identical to SEQ ID NO: 31690

SEQ ID NO: 31718 - DNA, 201 bp, Homo sapiens; identical to SEQ ID NO: 31691

SEQ ID NO: 31719 - DNA, 201 bp, Homo sapiens
ttttccaggccaccagccagacagatctagaaaactgggtcactgctgtacactctgcttgtgcatccctttttgcaaagaagcatgggaaagaggacacsctgcggctgctgaagaaccagaccaaaaacctgcttcagaagatagacatggacagcaagatgaagaagatggcagagctgcagctgtccgtggtgagcg

SEQ ID NO: 31720 - DNA, 201 bp, Homo sapiens; identical to SEQ ID NO: 31693

SEQ ID NO: 31721 - DNA, 201 bp, Homo sapiens; identical to SEQ ID NO: 31694

SEQ ID NO: 31722 - DNA, 201 bp, Homo sapiens; identical to SEQ ID NO: 31695

SEQ ID NO: 31723 - DNA, 201 bp, Homo sapiens; identical to SEQ ID NO: 31696

SEQ ID NO: 31724 - DNA, 201 bp, Homo sapiens; identical to SEQ ID NO: 31697

SEQ ID NO: 31725 - DNA, 201 bp, Homo sapiens; identical to SEQ ID NO: 31672

SEQ ID NO: 31726 - DNA, 201 bp, Homo sapiens
ctctccggaaaaggacactgtcactgacccagcgagggagaaacaagaagggaatattttcttcgttaaaagggctggacacactggccagaaaaggcaargagaagagaccttctataactcaggtcgatgaacttctgcatatatatggttcaacagtagacggtgttccccgagacaatgcatgggaaatccagactt

SEQ ID NO: 31727 - DNA, 201 bp, Homo sapiens; identical to SEQ ID NO: 31674

SEQ ID NO: 31728 - DNA, 201 bp, Homo sapiens; identical to SEQ ID NO: 31675

SEQ ID NO: 31729 - DNA, 201 bp, Homo sapiens; identical to SEQ ID NO: 31677

SEQ ID NO: 31730 - DNA, 201 bp, Homo sapiens
actgtcactgacccagcgagggagaaacaagaagggaatattttcttcgttaaaagggctggacacactggccagaaaaggcaaggagaagagaccttctrtaactcaggtcgatgaacttctgcatatatatggttcaacagtagacggtgttccccgagacaatgcatgggaaatccagacttatgtccactttcagga

SEQ ID NO: 31731 - DNA, 201 bp, Homo sapiens; identical to SEQ ID NO: 31679

SEQ ID NO: 31732 - DNA, 201 bp, Homo sapiens; identical to SEQ ID NO: 31682

SEQ ID NO: 31733 - DNA, 201 bp, Homo sapiens; identical to SEQ ID NO: 31680

SEQ ID NO: 31734 - DNA, 201 bp, Homo sapiens; identical to SEQ ID NO: 31681

SEQ ID NO: 31735 - DNA, 201 bp, Homo sapiens; identical to SEQ ID NO: 31683

SEQ ID NO: 31736 - DNA, 201 bp, Homo sapiens; identical to SEQ ID NO: 31684

SEQ ID NO: 31737 - DNA, 201 bp, Homo sapiens; identical to SEQ ID NO: 31686

SEQ ID NO: 31738 - DNA, 201 bp, Homo sapiens; identical to SEQ ID NO: 31685

SEQ ID NO: 31739 - DNA, 201 bp, Homo sapiens; identical to SEQ ID NO: 31687

SEQ ID NO: 31740 - DNA, 201 bp, Homo sapiens
actggccagaaaaggcaaggagaagagaccttctataactcaggtcgatgaacttctgcatatatatggttcaacagtagacggtgttccccgagacaatrcatgggaaatccagacttatgtccactttcaggacaatcacggagttactgtagggatcaagccagagcacagagtagaagatattttgactttggcatg

SEQ ID NO: 31741 - DNA, 201 bp, Homo sapiens; identical to SEQ ID NO: 31689

SEQ ID NO: 31742 - DNA, 201 bp, Homo sapiens; identical to SEQ ID NO: 31690

SEQ ID NO: 31743 - DNA, 115 bp, Homo sapiens
agggccattcagagytctgcatggaggcagggtggccggccttcgtcccctcaggccagcagggcaaggcagctcccctcaatagagatccaacaatgggagcagaatcttgaga

SEQ ID NO: 31744 - DNA, 147 bp, Homo sapiens
agggccattcagagctctgcatggaggcagggtggccggccttcgtmccctcaggccagcagggcaaggcagctcccctcaatagagatccaacaatgggagcagaatcttgagaaatttcacatggatctgttcaggatgcgctgc

SEQ ID NO: 31745 - DNA, 201 bp, Homo sapiens; identical to SEQ ID NO: 31691

SEQ ID NO: 31746 - DNA, 201 bp, Homo sapiens; identical to SEQ ID NO: 31693

SEQ ID NO: 31747 - DNA, 201 bp, Homo sapiens; identical to SEQ ID NO: 31694

SEQ ID NO: 31748 - DNA, 201 bp, Homo sapiens; identical to SEQ ID NO: 31695

SEQ ID NO: 31749 - DNA, 193 bp, Homo sapiens
agggccattcagagctctgcatggaggcagggtggccggccttcgtcccctcaggccagcagggcaaggcagctcccctcaatagagatccarcaatgggagcagaatcttgagaaatttcacatggatctgttcaggatgcgctgctatctggccagcctacaaggtggggagttaccgaacccaaagagtc

SEQ ID NO: 31750 - DNA, 201 bp, Homo sapiens; identical to SEQ ID NO: 31697

SEQ ID NO: 31751 - DNA, 201 bp, Homo sapiens; identical to SEQ ID NO: 31672

SEQ ID NO: 31752 - DNA, 201 bp, Homo sapiens; identical to SEQ ID NO: 31673

SEQ ID NO: 31753 - DNA, 201 bp, Homo sapiens; identical to SEQ ID NO: 31674

SEQ ID NO: 31754 - DNA, 201 bp, Homo sapiens; identical to SEQ ID NO: 31675

SEQ ID NO: 31755 - DNA, 201 bp, Homo sapiens; identical to SEQ ID NO: 31676

SEQ ID NO: 31756 - DNA, 201 bp, Homo sapiens; identical to SEQ ID NO: 31677

SEQ ID NO: 31757 - DNA, 201 bp, Homo sapiens; identical to SEQ ID NO: 31678

SEQ ID NO: 31758 - DNA, 201 bp, Homo sapiens; identical to SEQ ID NO: 31679

SEQ ID NO: 31759 - DNA, 201 bp, Homo sapiens; identical to SEQ ID NO: 31680

SEQ ID NO: 31760 - DNA, 201 bp, Homo sapiens; identical to SEQ ID NO: 31681

SEQ ID NO: 31761 - DNA, 201 bp, Homo sapiens; identical to SEQ ID NO: 31682

SEQ ID NO: 31762 - DNA, 201 bp, Homo sapiens; identical to SEQ ID NO: 31683

SEQ ID NO: 31763 - DNA, 201 bp, Homo sapiens; identical to SEQ ID NO: 31684

SEQ ID NO: 31764 - DNA, 201 bp, Homo sapiens; identical to SEQ ID NO: 31685

SEQ ID NO: 31765 - DNA, 201 bp, Homo sapiens; identical to SEQ ID NO: 31686

SEQ ID NO: 31766 - DNA, 201 bp, Homo sapiens; identical to SEQ ID NO: 31687

SEQ ID NO: 31767 - DNA, 201 bp, Homo sapiens; identical to SEQ ID NO: 31688

SEQ ID NO: 31768 - DNA, 201 bp, Homo sapiens; identical to SEQ ID NO: 31689

SEQ ID NO: 31769 - DNA, 201 bp, Homo sapiens; identical to SEQ ID NO: 31690

SEQ ID NO: 31770 - DNA, 201 bp, Homo sapiens; identical to SEQ ID NO: 31691

SEQ ID NO: 31771 - DNA, 102 bp, Homo sapiens
csctgcggctgctgaagaaccagaccaaaaacctgcttcagaagatagacatggacagcaagatgaagaagatggcagagctgcagctgtccgtggtgagcg

SEQ ID NO: 31772 - DNA, 201 bp, Homo sapiens; identical to SEQ ID NO: 31693

SEQ ID NO: 31773 - DNA, 201 bp, Homo sapiens; identical to SEQ ID NO: 31694

SEQ ID NO: 31774 - DNA, 201 bp, Homo sapiens; identical to SEQ ID NO: 31695

SEQ ID NO: 31775 - DNA, 201 bp, Homo sapiens; identical to SEQ ID NO: 31696

SEQ ID NO: 31776 - DNA, 201 bp, Homo sapiens; identical to SEQ ID NO: 31697

SEQ ID NO: 31777 - DNA, 201 bp, Homo sapiens
tcagcctggaaagaactaccttgggtgatcctggagttctcccacctgagcatctctgggaaagttttctgcaccagtgacttctcccgcctgaacacttytttcctcctcttccataaggacactcctactcacttgcttctctctgaatttcgtcttctcttggcccagaatattcctattcatttcagtccctctgtc

SEQ ID NO: 31778 - DNA, 201 bp, Homo sapiens
agtatatcgtggtgctggtccacctgtcaggtcctgaccctgaatggcttggccaaacagctgccactatttcaggtctcttcacaccacagattagggcmgggaagctgctggtgatcaatcatagctcccctctcccaggagatctgagtgacgttaatcactcatcactctgtgaagccctctattccagacagaaag

SEQ ID NO: 31779 - DNA, 201 bp, Homo sapiens
ttagggccgggaagctgctggtgatcaatcatagctcccctctcccaggagatctgagtgacgttaatcactcatcactctgtgaagccctctattccagrcagaaagtagatcatgccctcctcatgaactttgctagcaacctctctgattactttcttttgttggaagatcatattcattgcacccccaaattcgctg

SEQ ID NO: 31780 - DNA, 201 bp, Homo sapiens
ctcccacctgagcatctctgggaaagttttctgcaccagtgacttctcccgcctgaacacttttttcctcctcttccataaggacactcctactcacttgyttctctctgaatttcgtcttctcttggcccagaatattcctattcatttcagtccctctgtcttccaccacacaggcaattattctgtgtttgatgacat

SEQ ID NO: 31781 - DNA, 201 bp, Homo sapiens
cctctcccaggagatctgagtgacgttaatcactcatcactctgtgaagccctctattccagacagaaagtagatcatgccctcctcatgaactttgctakcaacctctctgattactttcttttgttggaagatcatattcattgcacccccaaattcgctgctgccatctcttcggccttatcagcctggaaagaacta

SEQ ID NO: 31782 - DNA, 201 bp, Homo sapiens
tttcttttgttggaagatcatattcattgcacccccaaattcgctgctgccatctcttcggccttatcagcctggaaagaactaccttgggtgatcctggmgttctcccacctgagcatctctgggaaagttttctgcaccagtgacttctcccgcctgaacacttttttcctcctcttccataaggacactcctactcac

SEQ ID NO: 31783 - DNA, 201 bp, Homo sapiens
ccacaaaaaaacacccagatagcagtcgggaggtaccgactgcagcaggggcaagtggaaccgggctatgacccccaggaggatcccaaaagctgtgctcrctatgccctgctagggccactggtgggaggaaatttggaccaggtagtattttctgaagaagagtctgtggaacagttgaattgtatccggctgctggtg

SEQ ID NO: 31784 - DNA, 201 bp, Homo sapiens
aaatgtcgatgcaaaaattgcaaaactcatgggagagggttatgcctttgaagaggtgaagagagccttagagatagcccagaataatgtcgaagttgccyggagcatcctccgagaatttgccttccctcctccagtatccccacgtctaaatctatagcagccagaactgtagacaccaaaatggaaagcaatcgatgt

SEQ ID NO: 31785 - DNA, 201 bp, Homo sapiens
tcatgttcagatggttcacaggcaccagccagaccccctaaaccacgaccgcgcaggactgcaccagaaattcaccacagaaaaccccatgggcctgaggyggcattggaaaatgtcgatgcaaaaattgcaaaactcatgggagagggttatgcctttgaagaggtgaagagagccttagagatagcccagaataatgtc

SEQ ID NO: 31786 - DNA, 201 bp, Homo sapiens
tgcctcttgaagcatggtgccctcgggatgtgtttgggactaatcagcttgtgggatgtcgactcctaggggagggctctccaaaacctggaatcacagcragttcaaatgtcaatggaaggcacagtagagtgggctctgacccagtgcttatgcggaaacacagacgccatgatttgcctttagaaggagctaaggtct

SEQ ID NO: 31787 - DNA, 143 bp, Homo sapiens
ctgggtcctgtgtgtgccacaggggtggggtgtccagcgagcsgtctcctcctcctgctagtgctgctgcggcgtcccgcggcctccccgagtcgggcgggaggggagagcgggtgtggatttgtcttgacggtaattgttgc

SEQ ID NO: 31788 - DNA, 201 bp, Homo sapiens
ctcctggctccagtagccggccatcctcaggacaggatctttttcttcttccttcagatccctttgttgatctagcaagtggccaagttcctttgcctccygctagaaggttaccaggtgaaaatgtcaaaactaacagaacatcacaggactatgatcagcttccttcatgttcagatggttcacaggcaccagccagac

SEQ ID NO: 31789 - DNA, 201 bp, Homo sapiens
tgatgtgcacctcttgccttacggcatggcaggagtcggatggtcagggctgccctttctgtcgttgtgaaataaaaggaactgagcccataatcgtggayccctttgatccaagagatgaaggctccaggtgttgcagcatcattgacccctttggcatgccgatgctagacttggacgacgatgatgatcgtgaggagt

SEQ ID NO: 31790 - DNA, 201 bp, Homo sapiens
ctgacccactccagatcccacatctaagcctgccacccgtgcctcctcgcctggatctaattcagaaaggcatagttagatctccctgtggcagcccaacrggttcaccaaagtcttctccttgcatggtgagaaaacaagataaaccactcccagcaccacctcctcccttaagagatcctcctccaccgccacctgaaa

SEQ ID NO: 31791 - DNA, 201 bp, Homo sapiens
aaataaaaggaactgagcccataatcgtggacccctttgatccaagagatgaaggctccaggtgttgcagcatcattgacccctttggcatgccgatgctmgacttggacgacgatgatgatcgtgaggagtccttgatgatgaatcggttggcaaacgtccgaaagtgcactgacaggcagaactcaccagtcacatcac

SEQ ID NO: 31792 - DNA, 201 bp, Homo sapiens
ccaatggtcaccttggaagtgaagaatatgatgttcctccccggctttctcctcctcctccagttaccaccctcctccctagcataaagtgtactggtccrttagcaaattctctttcagagaaaacaagagacccagtagaggaagatgatgatgaatacaagattccttcatcccaccctgtttccctgaattcacaac

SEQ ID NO: 31793 - DNA, 201 bp, Homo sapiens
aagttacacaggaacaatatgaattatattgtgaaatgggctccacttttcagctctgtaagatttgtgcagagaatgacaaagatgtcaagattgagccytgtgggcatttgatgtgcacctcttgccttacggcatggcaggagtcggatggtcagggctgccctttctgtcgttgtgaaataaaaggaactgagccca

SEQ ID NO: 31794 - DNA, 201 bp, Homo sapiens
gaagaaatcaaacatccctgacttaagcatatatttaaagggagatgtttttgattcagcctctgatcccgtgccattaccacctgccaggcctccaactygggacaatccaaagcatggttcttcactcaacaggacgccctctgattatgatcttctcatccctccattaggtgaagatgcttttgatgccctccctcc

SEQ ID NO: 31795 - DNA, 201 bp, Homo sapiens
cctccatctctcccacctcccccacctcctgcaaggcatagtctcattgaacattcaaaacctcctggctccagtagccggccatcctcaggacaggatcyttttcttcttccttcagatccctttgttgatctagcaagtggccaagttcctttgcctcctgctagaaggttaccaggtgaaaatgtcaaaactaacaga

SEQ ID NO: 31796 - DNA, 201 bp, Homo sapiens
tgcggaattggaatttcttagctgtgacacatccaggttacatggcatttctcacatatgatgaagttaaagcacgactacagaaatatagcaccaaaccyggaagctatattttccggttaagttgcactcgattgggacagtgggccattggctatgtgactggggatgggaatatcttacagaccatacctcataaca

SEQ ID NO: 31797 - DNA, 201 bp, Homo sapiens
ggatctttttcttcttccttcagatccctttgttgatctagcaagtggccaagttcctttgcctcctgctagaaggttaccaggtgaaaatgtcaaaactracagaacatcacaggactatgatcagcttccttcatgttcagatggttcacaggcaccagccagaccccctaaaccacgaccgcgcaggactgcaccaga

SEQ ID NO: 31798 - DNA, 201 bp, Homo sapiens
gcggtctcctcctcctgctagtgctgctgcggcgtcccgcggcctccccgagtcgggcgggaggggagagcgggtgtggatttgtcttgacggtaattgtkgcgtttccacgtctcggaggcctgcgcgctgggttgctccttcttcgggagcgagctgttctcagcgatcccactcccagccggggctccccacacacac

SEQ ID NO: 31799 - DNA, 201 bp, Homo sapiens; identical to SEQ ID NO: 31785

SEQ ID NO: 31800 - DNA, 201 bp, Homo sapiens; identical to SEQ ID NO: 31788

SEQ ID NO: 31801 - DNA, 201 bp, Homo sapiens; identical to SEQ ID NO: 31790

SEQ ID NO: 31802 - DNA, 201 bp, Homo sapiens; identical to SEQ ID NO: 31793

SEQ ID NO: 31803 - DNA, 201 bp, Homo sapiens; identical to SEQ ID NO: 31792

SEQ ID NO: 31804 - DNA, 201 bp, Homo sapiens; identical to SEQ ID NO: 31795

SEQ ID NO: 31805 - DNA, 201 bp, Homo sapiens; identical to SEQ ID NO: 31794

SEQ ID NO: 31806 - DNA, 201 bp, Homo sapiens; identical to SEQ ID NO: 31797

SEQ ID NO: 31807 - DNA, 119 bp, Homo sapiens
tttttgtttaagttttgtaacctttaatcctccatattctcatgtctgtcatcccaggggtgtcacaactgtaaaaatctacaatattagaaagcagctaytacagatgtggaagagag

SEQ ID NO: 31808 - DNA, 201 bp, Homo sapiens; identical to SEQ ID NO: 31784

SEQ ID NO: 31809 - DNA, 201 bp, Homo sapiens; identical to SEQ ID NO: 31786

SEQ ID NO: 31810 - DNA, 201 bp, Homo sapiens
ctagccatatttttaaatcagggttgaactgacaaaaataatttaaagacgtttacttcccttgaactttgaacctgtgaaatgctttaccttgtttacartttggcaaagttgcagtttgttcttgtttttagtttagttttgttttggtgttttgatacctgtactgtgttcttcacagaccctttgtagcgtggtcag

SEQ ID NO: 31811 - DNA, 143 bp, Homo sapiens; identical to SEQ ID NO: 31787

SEQ ID NO: 31812 - DNA, 201 bp, Homo sapiens; identical to SEQ ID NO: 31789

SEQ ID NO: 31813 - DNA, 201 bp, Homo sapiens; identical to SEQ ID NO: 31791

SEQ ID NO: 31814 - DNA, 201 bp, Homo sapiens; identical to SEQ ID NO: 31796

SEQ ID NO: 31815 - DNA, 201 bp, Homo sapiens
tggatctctaccatccccatgccttgcccaggtccagttccatttctctcattcacaagatgctttgaaggttctgattttcaactgatcaaactaatgcaaaaaaaaaaaagtatgtattcttcactactgagtttcttctttggaaaccatcactattgagagatgggaaaaacctgaatgtataaagcatttatttgt

SEQ ID NO: 31816 - DNA, 201 bp, Homo sapiens; identical to SEQ ID NO: 31798

SEQ ID NO: 31817 - DNA, 201 bp, Homo sapiens; identical to SEQ ID NO: 31786

SEQ ID NO: 31818 - DNA, 143 bp, Homo sapiens; identical to SEQ ID NO: 31787

SEQ ID NO: 31819 - DNA, 201 bp, Homo sapiens; identical to SEQ ID NO: 31789

SEQ ID NO: 31820 - DNA, 201 bp, Homo sapiens; identical to SEQ ID NO: 31790

SEQ ID NO: 31821 - DNA, 201 bp, Homo sapiens; identical to SEQ ID NO: 31791

SEQ ID NO: 31822 - DNA, 201 bp, Homo sapiens; identical to SEQ ID NO: 31793

SEQ ID NO: 31823 - DNA, 201 bp, Homo sapiens; identical to SEQ ID NO: 31792

SEQ ID NO: 31824 - DNA, 201 bp, Homo sapiens
attgtactgaaaatacattaaggttttgtgttatcctctaggagatgtttttgattcagcctctgatcccgtgccattaccacctgccaggcctccaactygggacaatccaaagcatggttcttcactcaacaggacgccctctgattatgatcttctcatccctccattaggttgaaacctttaaaaaagttttgaaca

SEQ ID NO: 31825 - DNA, 201 bp, Homo sapiens; identical to SEQ ID NO: 31796

SEQ ID NO: 31826 - DNA, 201 bp, Homo sapiens; identical to SEQ ID NO: 31798

SEQ ID NO: 31827 - DNA, 201 bp, Homo sapiens
gtcgcctccaggcggttgcggcgggcgcgggctcctaaagggcgtcacacccggactccgccgactaggcaacctccattcatctttccactgcgcctccrgcgcccccgccttctccggtcccctcctcggagtcattttttcctgttccccctctgccgccctttcctcacgccccgggtgaggcaattctcttggaag

SEQ ID NO: 31828 - DNA, 201 bp, Homo sapiens
ctcgggcgggccgttttgtctttaggggccgccttggtggggcgaggtttccgtgacgaatctcctggggccgtccgtgccggctcgggccgtcgtggcgrctcgagctcctggaacttgctcaggctccggaggtccgaggccctcgaagttatgcgtcgcctccaggcggttgcggcgggcgcgggctcctaaagggcg

SEQ ID NO: 31829 - DNA, 201 bp, Homo sapiens
taggggccgccttggtggggcgaggtttccgtgacgaatctcctggggccgtccgtgccggctcgggccgtcgtggcgactcgagctcctggaacttgctyaggctccggaggtccgaggccctcgaagttatgcgtcgcctccaggcggttgcggcgggcgcgggctcctaaagggcgtcacacccggactccgccgact

SEQ ID NO: 31830 - DNA, 201 bp, Homo sapiens
ttttctatacagcagcaacaaataatccacgctttgataaaatggaaggaaaccctatctgtgttcagattccttgggataaaaatcctgaggctttagcmaaatgggcggaaggccggacaggctttccatggattgatgccatcatgacacagcttcgtcaggagggttggattcatcatctagccaggcatgcagttg

SEQ ID NO: 31831 - DNA, 201 bp, Homo sapiens
ttaaaaatattcttcattgatggaaagcagttacatattgaaatatgttgtttctaatgacatttctgtggtttttaactttttaatgaatttcacagagkacaattggtaatttgtatataaagaacttggcaagagaatttgcttaatgtaaatataaacagtcacaattagtatagacccatcgatatatttttgata

SEQ ID NO: 31832 - DNA, 201 bp, Homo sapiens
accctatctgtgttcagattccttgggataaaaatcctgaggctttagccaaatgggcggaaggccggacaggctttccatggattgatgccatcatgacrcagcttcgtcaggagggttggattcatcatctagccaggcatgcagttgcttgcttcctgacacgaggggacctgtggattagttgggaagaaggaatga

SEQ ID NO: 31833 - DNA, 201 bp, Homo sapiens
ttcgtggacaaccagcagatgtgtttcccaggcttttcaaggaatggaacattactaaactttcaattgagtatgattctgagccctttggaaaggaacgrgacgcagctattaagaaactggcaactgaagctggagtagaagtcattgtaagaatttcacatacattatatgacctagacaagatcatagaactcaatg

SEQ ID NO: 31834 - DNA, 201 bp, Homo sapiens
cccggactccgccgactaggcaacctccattcatctttccactgcgcctccagcgcccccgccttctccggtcccctcctcggagtcattttttcctgttycccctctgccgccctttcctcacgccccgggtgaggcaattctcttggaagcgaaggtgtcggctatgagccggagcctccttccttgaatttctccgtg

SEQ ID NO: 31835 - DNA, 201 bp, Homo sapiens; identical to SEQ ID NO: 31827

SEQ ID NO: 31836 - DNA, 201 bp, Homo sapiens
aaacgtcctagtcaggaagaggacacacagagtattggtcctaaagtccagagacagagcactaattaggtaaatattttagagctgtatttcttgctttrgaagagtatataattaacataaattaagataatttcaaaaatggagcaaatctctattttcaaaccagaaaatcttgaggcattaatttttaagcaattt

SEQ ID NO: 31837 - DNA, 201 bp, Homo sapiens; identical to SEQ ID NO: 31828

SEQ ID NO: 31838 - DNA, 201 bp, Homo sapiens; identical to SEQ ID NO: 31829

SEQ ID NO: 31839 - DNA, 201 bp, Homo sapiens; identical to SEQ ID NO: 31830

SEQ ID NO: 31840 - DNA, 201 bp, Homo sapiens; identical to SEQ ID NO: 31832

SEQ ID NO: 31841 - DNA, 201 bp, Homo sapiens; identical to SEQ ID NO: 31833

SEQ ID NO: 31842 - DNA, 201 bp, Homo sapiens; identical to SEQ ID NO: 31834

SEQ ID NO: 31843 - DNA, 201 bp, Homo sapiens; identical to SEQ ID NO: 31827

SEQ ID NO: 31844 - DNA, 201 bp, Homo sapiens; identical to SEQ ID NO: 31836

SEQ ID NO: 31845 - DNA, 201 bp, Homo sapiens; identical to SEQ ID NO: 31828

SEQ ID NO: 31846 - DNA, 201 bp, Homo sapiens; identical to SEQ ID NO: 31829

SEQ ID NO: 31847 - DNA, 201 bp, Homo sapiens; identical to SEQ ID NO: 31830

SEQ ID NO: 31848 - DNA, 201 bp, Homo sapiens; identical to SEQ ID NO: 31832

SEQ ID NO: 31849 - DNA, 201 bp, Homo sapiens
ggacaaccagcagatgtgtttcccaggcttttcaagtttaggaatggaacattactaaactttcaattgagtatgattctgagccctttggaaaggaacgrgacgcagctattaagaaactggcaactgaagctggagtagaagtcattgtaagaatttcacatacattatatgacctagacaagatcatagaactcaatg

SEQ ID NO: 31850 - DNA, 201 bp, Homo sapiens; identical to SEQ ID NO: 31834

SEQ ID NO: 31851 - DNA, 201 bp, Homo sapiens
ggatgttgccaggctggttgaagagatcagacagaaatgtggtgggcttcagttgcagaatgaagatgtctatatggccaccaagtttgaaggctttatcyaaaaggtcgtgaggaaactgagaggagaagatcaagaggtggagctggttgtagattatatttcaaaggaggtcaatgaaatcatggtaaaaatgccata

SEQ ID NO: 31852 - DNA, 201 bp, Homo sapiens
gctttccaaagggggtcatcaacatcattccaggctcaggtggcatagcaggacaacgtctgtctgaacatcctgacatccgcaaacttggtttcactggwtccactcctattggcaaacagatcatgaagagctgtgctgttagcaacttgaagaaagtttcccttgagcttggtggcaagtctccacttataatattta

SEQ ID NO: 31853 - DNA, 201 bp, Homo sapiens
ttattattccctggaactacccgctgatgatgctggcatggaagagtgctgcgtgtttggcagcaggcaataccttagtgctcaagccagcacaggtcacrcccttgactgctttgaagtttgcagaactgtctgtgaaagcaggctttccaaagggggtcatcaacatcattccaggctcaggtggcatagcaggacaac

SEQ ID NO: 31854 - DNA, 201 bp, Homo sapiens
caacaagtgaactttatgggaaagtgcaggaaataccccagaaggagaccacccctttctatccccggtcaccctatggggcagcaaaactctatgcctaytggattgtggtgaacttccgtgaggcgtataatctctttgcagtgaacggcattctcttcaatcatgagagtcccagaagaggagctaatttcgttactc

SEQ ID NO: 31855 - DNA, 201 bp, Homo sapiens
gacaactggaatgtttcagtttgggaaatctggatgccaaacgagattggggccatgccaaggactatgtggaggctatgtggttgatgttgcagaatgaygagccggaggacttcgttatagctactggggaggtccatagtgtccgggaatttgtcgagaaatcattcttgcacattggaaaaaccattgtgtgggaag

SEQ ID NO: 31856 - DNA, 201 bp, Homo sapiens
ccgccctccggctacaatccccgcagagtctccggtgcagacgcgctgcggggatggggagcggcgtgccaatctgcgggtcccctgcggcccctgctgcygctgcgctgtcccggccgcaagagcggggccgccccgccgaggtttgtagcagccgggatgtgaccctccagggtttgggtcgctttgcgtttgtcgaag

SEQ ID NO: 31857 - DNA, 201 bp, Homo sapiens
ggagttcaagaatatgtggaatttaaaataaacattccatttgatgaattaaagaattatttgtctgaagcaacaattggtctgcataccatgtggaacgrgcattttgggattggagttgtggagtgtatggcagctggcacaattatccttgcacacaattcggggggcccaaagcttgacattgtggttcctcacgaa

SEQ ID NO: 31858 - DNA, 201 bp, Homo sapiens
aatcaaaagtaaaaagtatcacaaagtcgtgaagaaaggaaaggccaagaaagccttaaaagagtttgagcagctacagaaggttaatccaactgtggcaytggaagaaatggaaaaaattgaaaatgccagaatgatggaaagaatgagccttaagcaccaaaacagtgggaaatgggccaagtcaaaggcaattatggc

SEQ ID NO: 31859 - DNA, 201 bp, Homo sapiens
tgatgctttataggtgtgtgtagggtggtagaggccaaggtgctgccagcaatcctttccatactaggtactggtgaaaattgtttttgtttatgctgtcrgcacatttgtgtgggtctctcattgtcccttaacagtgccgcatctcagcctggaagtcagctttaagtcattcaagagaacctcaggctgtttttctga

SEQ ID NO: 31860 - DNA, 201 bp, Homo sapiens
aatatttcagacataacaaaaaactgcagagcttcgtacacttgatttaaataattcttgagggattttataaggtcatcttatagacaaaattaagagamaccagtgtggttatcaatgctttcagaatacttgtgtttatgtaaatataccccagagtccaaaactctgatatattcatatatattcacaatgagagga

SEQ ID NO: 31861 - DNA, 201 bp, Homo sapiens
taatgaatatttcagacataacaaaaaactgcagagcttcgtacacttgatttaaataattcttgagggattttataaggtcatcttatagacaaaattawgagacaccagtgtggttatcaatgctttcagaatacttgtgtttatgtaaatataccccagagtccaaaactctgatatattcatatatattcacaatga

SEQ ID NO: 31862 - DNA, 201 bp, Homo sapiens
gagaagtgacagtcaggggccctgattccacttcctttggtccagttttactctgctacagggtggattccaaaactggctcagcacattgcatgtagttragccacattttttaaaaaaagaaaatggatgaccattaattgactagcattttagaattgatcagacattagaacacagaaaaattctagtacatttaaa

SEQ ID NO: 31863 - DNA, 201 bp, Homo sapiens
gcctctctccaagccatgagcctggaagaggcaaagatgcaccgagcagagcttcagagggctcgggctctgcagtcctactatgaggccaaggctcgaaragagaagaaaatcaaaagtaaaaagtatcacaaagtcgtgaagaaaggaaaggccaagaaagccttaaaagagtttgagcagctacagaaggttaatcca

SEQ ID NO: 31864 - DNA, 201 bp, Homo sapiens
gtaggttgtgtagctggagaagtgacagtcaggggccctgattccacttcctttggtccagttttactctgctacagggtggattccaaaactggctcagyacattgcatgtagttgagccacattttttaaaaaaagaaaatggatgaccattaattgactagcattttagaattgatcagacattagaacacagaaaaa

SEQ ID NO: 31865 - DNA, 201 bp, Homo sapiens
taaaaagtatcacaaagtcgtgaagaaaggaaaggccaagaaagccttaaaagagtttgagcagctacagaaggttaatccaactgtggcactggaagaamtggaaaaaattgaaaatgccagaatgatggaaagaatgagccttaagcaccaaaacagtgggaaatgggccaagtcaaaggcaattatggccaaatatga

SEQ ID NO: 31866 - DNA, 201 bp, Homo sapiens
attaagaagaggctgtcaggtttaataaactttttaatgaatatttcagacataacaaaaaactgcagagcttcgtacacttgatttaaataattcttgarggattttataaggtcatcttatagacaaaattaagagacaccagtgtggttatcaatgctttcagaatacttgtgtttatgtaaatataccccagagtcc

SEQ ID NO: 31867 - DNA, 201 bp, Homo sapiens
atttgtaaatattatttagatttgtatttagacatgatttatatctaatatagatacaaagtctgtgtctaaatattatttaaagaagtgatttttcattytcttggattctttccagtgtggtgccttttatatgcctcacatagtctccttgttctcctactaatattcccaagctccatatgccaattaaagaagaaa

SEQ ID NO: 31868 - DNA, 201 bp, Homo sapiens
tcaaaagtaaaaagtatcacaaagtcgtgaagaaaggaaaggccaagaaagccttaaaagagtttgagcagctacagaaggttaatccaactgtggcactrgaagaaatggaaaaaattgaaaatgccagaatgatggaaagaatgagccttaagcaccaaaacagtgggaaatgggccaagtcaaaggcaattatggcca

SEQ ID NO: 31869 - DNA, 201 bp, Homo sapiens
gtagctacactttgaagtaagattcaaactgttatccactcaattgccttattcctgaggatgtagtgaaggaagaaaaagttttctggaattccgtaaaytatattttaagcttatttcttcaaaattattttcatatatcacagatatatcattggaagatataatttgcatatatgttcattatcagtgttcctaatt

SEQ ID NO: 31870 - DNA, 201 bp, Homo sapiens
agagaagaaaatcaaaagtaaaaagtatcacaaagtcgtgaagaaaggaaaggccaagaaagccttaaaagagtttgagcagctacagaaggttaatccarctgtggcactggaagaaatggaaaaaattgaaaatgccagaatgatggaaagaatgagccttaagcaccaaaacagtgggaaatgggccaagtcaaaggc

SEQ ID NO: 31871 - DNA, 201 bp, Homo sapiens
ggctctgcagtcctactatgaggccaaggctcgaaaagagaagaaaatcaaaagtaaaaagtatcacaaagtcgtgaagaaaggaaaggccaagaaagccytaaaagagtttgagcagctacagaaggttaatccaactgtggcactggaagaaatggaaaaaattgaaaatgccagaatgatggaaagaatgagccttaa

SEQ ID NO: 31872 - DNA, 201 bp, Homo sapiens
cttgatggaaagaataggcggaaattggctgagaggtctgaggctagtctgaaagtgtcagagttcagtgtcagttctgaaggatcaggagaaaagctggkccttgcagatctgcttgagcccgttaaaacttcatcttctttggccactgtaaaaaagcaactgaatagagtcaaatcaaagaaggtggtggagttacct

SEQ ID NO: 31873 - DNA, 201 bp, Homo sapiens
tcattttactttagaaaacagacaaaatttccttttagaataaaaggaagtgttgaaaagaaaatggatgactagccttcggcttccattcttggtatacmtgagagaggctggctgctgagatgaatgtgaaccaggttgcagagaatctggctttgagccaccaggaagaactagtggatttgccaaaaaactacccct

SEQ ID NO: 31874 - DNA, 201 bp, Homo sapiens
gaaaatgccagaatgatggaaagaatgagccttaagcaccaaaacagtgggaaatgggccaagtcaaaggcaattatggccaaatatgacctggaggctcrccaagctatgcaggaacagttggccaagaacaaagaactgacacagaaactccaggtagcctctgagagtgaggaagaggagggaggcacagaagtggaa

SEQ ID NO: 31875 - DNA, 201 bp, Homo sapiens
tttatccaccttgtgatgtgcagacatttctggacattcccttacatgagaaaaagatgaccccaggacatttgctggtttctgttggccagtttaggccrgaaaagaatcatccattgcagatcagagcctttgctaaattgctgaataagaagatggttgagtcacctccttcgcttaaacttgtcctcattggaggtt

SEQ ID NO: 31876 - DNA, 201 bp, Homo sapiens
tttactttagaaaacagacaaaatttccttttagaataaaaggaagtgttgaaaagaaaatggatgactagccttcggcttccattcttggtatacatgaragaggctggctgctgagatgaatgtgaaccaggttgcagagaatctggctttgagccaccaggaagaactagtggatttgccaaaaaactaccccttgag

SEQ ID NO: 31877 - DNA, 201 bp, Homo sapiens
tggagcaggaaatttttaacctcctccataagaacaagcagccagtgacagatcctttactgactcccatggaaaaggcctctctccaagccatgagcctrgaagaggcaaagatgcaccgagcagagcttcagagggctcgggctctgcagtcctactatgaggccaaggctcgaaaagagaagaaaatcaaaagtaaaa

SEQ ID NO: 31878 - DNA, 201 bp, Homo sapiens
cggaaaagaatcatccattgcagatcagagcctttgctaaattgctgaataagaagatggttgagtcacctccttcgcttaaacttgtcctcattggaggktgtcgtaacaaagatgatgaacttagggtaaaccaactgagaaggctgtctgaggatttaggagttcaagaatatgtggaatttaaaataaacattccat

SEQ ID NO: 31879 - DNA, 201 bp, Homo sapiens
gcaagaactcccctggagcaggaaatttttaacctcctccataagaacaagcagccagtgacagatcctttactgactcccatggaaaaggcctctctccragccatgagcctggaagaggcaaagatgcaccgagcagagcttcagagggctcgggctctgcagtcctactatgaggccaaggctcgaaaagagaagaaa

SEQ ID NO: 31880 - DNA, 201 bp, Homo sapiens
gttttgtgtaataattatttgtaaatattatttagatttgtatttagacatgatttatatctaatatagatacaaagtctgtgtctaaatattatttaaaraagtgatttttcattctcttggattctttccagtgtggtgccttttatatgcctcacatagtctccttgttctcctactaatattcccaagctccatatg

SEQ ID NO: 31881 - DNA, 201 bp, Homo sapiens
gaggttgcagtgagccaagattgtgccactgcactctagcctgggcaataagcaaaactccatctcaaaaaagaaaaaaaggaaaaagaaaattatgagamttacttaaaggtaacatcacatactaaatgtcttctataatcctatatttattaatgcattacaactctgtagattgttagttactaggccagtagctag

SEQ ID NO: 31882 - DNA, 201 bp, Homo sapiens
ttgttgcccaggcaggagtgcagtgatgcagtctcggctctcagtctctcagggtatcctgaagcagtttatgttgtttataccggcgatgttaatgtcarcggtcaacagatactagaaggtgctttcagaagatttaacatcagattaattcacccagtgcagtttgtttttttaaggaaacgctatcttgtggaagat

SEQ ID NO: 31883 - DNA, 201 bp, Homo sapiens
tctgaaagtgtcagagttcagtgtcagttctgaaggatcaggagaaaagctgggccttgcagatctgcttgagcccgttaaaacttcatcttctttggccrctgtaaaaaagcaactgaatagagtcaaatcaaagaaggtggtggagttacctcttaacaaagaaaaaattgaacagatccacagagaagtagcattcag

SEQ ID NO: 31884 - DNA, 201 bp, Homo sapiens; identical to SEQ ID NO: 31857

SEQ ID NO: 31885 - DNA, 201 bp, Homo sapiens; identical to SEQ ID NO: 31858

SEQ ID NO: 31886 - DNA, 201 bp, Homo sapiens; identical to SEQ ID NO: 31859

SEQ ID NO: 31887 - DNA, 201 bp, Homo sapiens; identical to SEQ ID NO: 31860

SEQ ID NO: 31888 - DNA, 201 bp, Homo sapiens; identical to SEQ ID NO: 31861

SEQ ID NO: 31889 - DNA, 201 bp, Homo sapiens; identical to SEQ ID NO: 31862

SEQ ID NO: 31890 - DNA, 201 bp, Homo sapiens; identical to SEQ ID NO: 31863

SEQ ID NO: 31891 - DNA, 201 bp, Homo sapiens; identical to SEQ ID NO: 31864

SEQ ID NO: 31892 - DNA, 201 bp, Homo sapiens; identical to SEQ ID NO: 31865

SEQ ID NO: 31893 - DNA, 201 bp, Homo sapiens; identical to SEQ ID NO: 31866

SEQ ID NO: 31894 - DNA, 201 bp, Homo sapiens; identical to SEQ ID NO: 31867

SEQ ID NO: 31895 - DNA, 201 bp, Homo sapiens; identical to SEQ ID NO: 31868

SEQ ID NO: 31896 - DNA, 201 bp, Homo sapiens; identical to SEQ ID NO: 31869

SEQ ID NO: 31897 - DNA, 201 bp, Homo sapiens; identical to SEQ ID NO: 31870

SEQ ID NO: 31898 - DNA, 201 bp, Homo sapiens; identical to SEQ ID NO: 31871

SEQ ID NO: 31899 - DNA, 201 bp, Homo sapiens; identical to SEQ ID NO: 31872

SEQ ID NO: 31900 - DNA, 201 bp, Homo sapiens; identical to SEQ ID NO: 31873

SEQ ID NO: 31901 - DNA, 201 bp, Homo sapiens; identical to SEQ ID NO: 31874

SEQ ID NO: 31902 - DNA, 201 bp, Homo sapiens
gctttaagagccctgcagaaaaaacatttctggacattcccttacatgagaaaaagatgaccccaggacatttgctggtttctgttggccagtttaggccrgaaaagaatcatccattgcagatcagagcctttgctaaattgctgaataagaagatggttgagtcacctccttcgcttaaacttgtcctcattggaggtt

SEQ ID NO: 31903 - DNA, 201 bp, Homo sapiens; identical to SEQ ID NO: 31876

SEQ ID NO: 31904 - DNA, 201 bp, Homo sapiens; identical to SEQ ID NO: 31877

SEQ ID NO: 31905 - DNA, 201 bp, Homo sapiens; identical to SEQ ID NO: 31878

SEQ ID NO: 31906 - DNA, 201 bp, Homo sapiens; identical to SEQ ID NO: 31879

SEQ ID NO: 31907 - DNA, 201 bp, Homo sapiens; identical to SEQ ID NO: 31880

SEQ ID NO: 31908 - DNA, 201 bp, Homo sapiens; identical to SEQ ID NO: 31881

SEQ ID NO: 31909 - DNA, 201 bp, Homo sapiens; identical to SEQ ID NO: 31883

SEQ ID NO: 31910 - DNA, 201 bp, Homo sapiens; identical to SEQ ID NO: 31858

SEQ ID NO: 31911 - DNA, 201 bp, Homo sapiens; identical to SEQ ID NO: 31859

SEQ ID NO: 31912 - DNA, 201 bp, Homo sapiens; identical to SEQ ID NO: 31860

SEQ ID NO: 31913 - DNA, 201 bp, Homo sapiens; identical to SEQ ID NO: 31861

SEQ ID NO: 31914 - DNA, 201 bp, Homo sapiens; identical to SEQ ID NO: 31862

SEQ ID NO: 31915 - DNA, 201 bp, Homo sapiens; identical to SEQ ID NO: 31863

SEQ ID NO: 31916 - DNA, 201 bp, Homo sapiens; identical to SEQ ID NO: 31864

SEQ ID NO: 31917 - DNA, 201 bp, Homo sapiens; identical to SEQ ID NO: 31865

SEQ ID NO: 31918 - DNA, 201 bp, Homo sapiens; identical to SEQ ID NO: 31866

SEQ ID NO: 31919 - DNA, 201 bp, Homo sapiens; identical to SEQ ID NO: 31867

SEQ ID NO: 31920 - DNA, 201 bp, Homo sapiens; identical to SEQ ID NO: 31868

SEQ ID NO: 31921 - DNA, 201 bp, Homo sapiens; identical to SEQ ID NO: 31869

SEQ ID NO: 31922 - DNA, 201 bp, Homo sapiens; identical to SEQ ID NO: 31870

SEQ ID NO: 31923 - DNA, 201 bp, Homo sapiens; identical to SEQ ID NO: 31871

SEQ ID NO: 31924 - DNA, 201 bp, Homo sapiens; identical to SEQ ID NO: 31872

SEQ ID NO: 31925 - DNA, 201 bp, Homo sapiens; identical to SEQ ID NO: 31873

SEQ ID NO: 31926 - DNA, 201 bp, Homo sapiens; identical to SEQ ID NO: 31874

SEQ ID NO: 31927 - DNA, 201 bp, Homo sapiens; identical to SEQ ID NO: 31876

SEQ ID NO: 31928 - DNA, 201 bp, Homo sapiens; identical to SEQ ID NO: 31877

SEQ ID NO: 31929 - DNA, 201 bp, Homo sapiens; identical to SEQ ID NO: 31879

SEQ ID NO: 31930 - DNA, 201 bp, Homo sapiens; identical to SEQ ID NO: 31880

SEQ ID NO: 31931 - DNA, 201 bp, Homo sapiens; identical to SEQ ID NO: 31881

SEQ ID NO: 31932 - DNA, 201 bp, Homo sapiens; identical to SEQ ID NO: 31883

SEQ ID NO: 31933 - DNA, 201 bp, Homo sapiens; identical to SEQ ID NO: 31857

SEQ ID NO: 31934 - DNA, 201 bp, Homo sapiens; identical to SEQ ID NO: 31858

SEQ ID NO: 31935 - DNA, 201 bp, Homo sapiens; identical to SEQ ID NO: 31859

SEQ ID NO: 31936 - DNA, 201 bp, Homo sapiens; identical to SEQ ID NO: 31860

SEQ ID NO: 31937 - DNA, 201 bp, Homo sapiens; identical to SEQ ID NO: 31861

SEQ ID NO: 31938 - DNA, 201 bp, Homo sapiens; identical to SEQ ID NO: 31862

SEQ ID NO: 31939 - DNA, 201 bp, Homo sapiens; identical to SEQ ID NO: 31863

SEQ ID NO: 31940 - DNA, 201 bp, Homo sapiens; identical to SEQ ID NO: 31864

SEQ ID NO: 31941 - DNA, 201 bp, Homo sapiens; identical to SEQ ID NO: 31865

SEQ ID NO: 31942 - DNA, 201 bp, Homo sapiens; identical to SEQ ID NO: 31866

SEQ ID NO: 31943 - DNA, 201 bp, Homo sapiens; identical to SEQ ID NO: 31867

SEQ ID NO: 31944 - DNA, 201 bp, Homo sapiens; identical to SEQ ID NO: 31868

SEQ ID NO: 31945 - DNA, 201 bp, Homo sapiens; identical to SEQ ID NO: 31869

SEQ ID NO: 31946 - DNA, 201 bp, Homo sapiens; identical to SEQ ID NO: 31870

SEQ ID NO: 31947 - DNA, 201 bp, Homo sapiens; identical to SEQ ID NO: 31871

SEQ ID NO: 31948 - DNA, 201 bp, Homo sapiens; identical to SEQ ID NO: 31872

SEQ ID NO: 31949 - DNA, 201 bp, Homo sapiens; identical to SEQ ID NO: 31873

SEQ ID NO: 31950 - DNA, 201 bp, Homo sapiens; identical to SEQ ID NO: 31874

SEQ ID NO: 31951 - DNA, 201 bp, Homo sapiens; identical to SEQ ID NO: 31875

SEQ ID NO: 31952 - DNA, 201 bp, Homo sapiens; identical to SEQ ID NO: 31876

SEQ ID NO: 31953 - DNA, 201 bp, Homo sapiens; identical to SEQ ID NO: 31877

SEQ ID NO: 31954 - DNA, 201 bp, Homo sapiens; identical to SEQ ID NO: 31878

SEQ ID NO: 31955 - DNA, 201 bp, Homo sapiens; identical to SEQ ID NO: 31879

SEQ ID NO: 31956 - DNA, 201 bp, Homo sapiens; identical to SEQ ID NO: 31880

SEQ ID NO: 31957 - DNA, 201 bp, Homo sapiens; identical to SEQ ID NO: 31881

SEQ ID NO: 31958 - DNA, 201 bp, Homo sapiens
ggtggaggaggagaaagagttttatggtgtgctttaagagccctgcagaaaaagtatcctgaagcagtttatgttgtttataccggcgatgttaatgtcarcggtcaacagatactagaaggtgctttcagaagatttaacatcagattaattcacccagtgcagtttgtttttttaaggaaacgctatcttgtggaagat

SEQ ID NO: 31959 - DNA, 201 bp, Homo sapiens; identical to SEQ ID NO: 31883

SEQ ID NO: 31960 - DNA, 201 bp, Homo sapiens; identical to SEQ ID NO: 31858

SEQ ID NO: 31961 - DNA, 201 bp, Homo sapiens; identical to SEQ ID NO: 31859

SEQ ID NO: 31962 - DNA, 201 bp, Homo sapiens; identical to SEQ ID NO: 31860

SEQ ID NO: 31963 - DNA, 201 bp, Homo sapiens; identical to SEQ ID NO: 31861

SEQ ID NO: 31964 - DNA, 201 bp, Homo sapiens; identical to SEQ ID NO: 31862

SEQ ID NO: 31965 - DNA, 201 bp, Homo sapiens; identical to SEQ ID NO: 31863

SEQ ID NO: 31966 - DNA, 201 bp, Homo sapiens; identical to SEQ ID NO: 31864

SEQ ID NO: 31967 - DNA, 201 bp, Homo sapiens; identical to SEQ ID NO: 31865

SEQ ID NO: 31968 - DNA, 201 bp, Homo sapiens; identical to SEQ ID NO: 31866

SEQ ID NO: 31969 - DNA, 201 bp, Homo sapiens; identical to SEQ ID NO: 31867

SEQ ID NO: 31970 - DNA, 201 bp, Homo sapiens; identical to SEQ ID NO: 31868

SEQ ID NO: 31971 - DNA, 201 bp, Homo sapiens; identical to SEQ ID NO: 31869

SEQ ID NO: 31972 - DNA, 201 bp, Homo sapiens; identical to SEQ ID NO: 31870

SEQ ID NO: 31973 - DNA, 201 bp, Homo sapiens; identical to SEQ ID NO: 31871

SEQ ID NO: 31974 - DNA, 201 bp, Homo sapiens; identical to SEQ ID NO: 31872

SEQ ID NO: 31975 - DNA, 201 bp, Homo sapiens; identical to SEQ ID NO: 31873

SEQ ID NO: 31976 - DNA, 201 bp, Homo sapiens; identical to SEQ ID NO: 31874

SEQ ID NO: 31977 - DNA, 201 bp, Homo sapiens; identical to SEQ ID NO: 31876

SEQ ID NO: 31978 - DNA, 201 bp, Homo sapiens; identical to SEQ ID NO: 31877

SEQ ID NO: 31979 - DNA, 201 bp, Homo sapiens; identical to SEQ ID NO: 31879

SEQ ID NO: 31980 - DNA, 201 bp, Homo sapiens; identical to SEQ ID NO: 31880

SEQ ID NO: 31981 - DNA, 201 bp, Homo sapiens; identical to SEQ ID NO: 31881

SEQ ID NO: 31982 - DNA, 201 bp, Homo sapiens; identical to SEQ ID NO: 31883

SEQ ID NO: 31983 - DNA, 201 bp, Homo sapiens
tgcaccttcgaggaggcaagtgacccagcagtgccctgcgagtacagccaggcccagtacgatgacttccagtgggagcaagtgcgaatccaccctggcamccgggcacctgcggacctgccccacggctcctacttgatggtcaacacttcccagcatgccccaggccagcgagcccatgtcatcttccagagcctgagc

SEQ ID NO: 31984 - DNA, 201 bp, Homo sapiens
acgttcacgtgaggcttgtcctcactaaccctgaggggcgcaaagagggcaaggaggtcactttccagacggatgaggatgtgcccagtgggattgcagcygagtccctgaccttcactccactggaggacatgatcttcctcaagtgggaggagccccaggagcccaatggtctcatcacccagtatgagatcagctacc

SEQ ID NO: 31985 - DNA, 201 bp, Homo sapiens
gtaattcctcccagctgcgggaagagttccagacgctgaactcggtcaccccgccgctggacgtggaggagtgcagcatcgccctgttgccccggaaccgygacaagaaccgcagcatggacgtcctgccgcccgaccgctgcctgcccttcctcatctccactgatggggactccaacaactacattaatgcagccctga

SEQ ID NO: 31986 - DNA, 201 bp, Homo sapiens
accacacggggcagctgcaccctgcggtgcgtgtcgcagaccttctgcagcacatcaaccagatgaagacggccgagggttacggcttcaagcaggagtaygagagcttctttgaaggctgggacgccacaaagaagaaagacaaggtcaagggcagccggcaggagccaatgcctgcctatgatcggcaccgagtgaaac

SEQ ID NO: 31987 - DNA, 201 bp, Homo sapiens
accaagctggtcgaggtgggcagggtgaaatgctcacggtactggccggaggactcagacacctacggggacatcaagattatgctggtgaagacagagamcctggctgagtatgtcgtgcgcacttttgccctggagcggagaggctactctgcccggcacgaggtccgccagttccacttcacagcgtggccagagcat

SEQ ID NO: 31988 - DNA, 201 bp, Homo sapiens
tccctgtcagtgagttcaaggccacctacaaggagatgatccgcattgatcctcagagtaattcctcccagctgcgggaagagttccagacgctgaactckgtcaccccgccgctggacgtggaggagtgcagcatcgccctgttgccccggaaccgcgacaagaaccgcagcatggacgtcctgccgcccgaccgctgcc

SEQ ID NO: 31989 - DNA, 201 bp, Homo sapiens
tggactggcgaggaagatcagtgcctcctgctctgcccaaacacactcccatggggcaagcactggagtggatgctgggctatcttgctcccccttccacygtgggcagggcctttcgcttgtcccatgggcgggtggtgggccaaggaggagcttagcaagtctgcagcccagccccacctccatagggtcctgcaggcc

SEQ ID NO: 31990 - DNA, 201 bp, Homo sapiens
ccactcagcctgccccctctgcatgtgggtagaggatgtactgggacttggcatttaggattccatctggcccagcccctgaaggtcctggggaagcaggwctcaattctgaatagccagtggggcacactgactgtcctccccaggggaactgcagcgccctcctccccactgccccctgcagcccctgagatattttgc

SEQ ID NO: 31991 - DNA, 201 bp, Homo sapiens
acagcacccggggagaccagcgcagcggtggggtcactgaggccagcagcctcctggggggctccccgaggcgtccctgtggccggaagggctccccataycacacggggcagctgcaccctgcggtgcgtgtcgcagaccttctgcagcacatcaaccagatgaagacggccgagggttacggcttcaagcaggagtatg

SEQ ID NO: 31992 - DNA, 201 bp, Homo sapiens
tggtcaacacttcccagcatgccccaggccagcgagcccatgtcatcttccagagcctgagcgagaatgatacccactgtgtgcagttcagctacttcctrtacagccgggacgggcacagcccgggcaccctgggcgtctacgtgcgcgttaatgggggccccctgggcagtgctgtgtggaatatgactggatcccacg

SEQ ID NO: 31993 - DNA, 201 bp, Homo sapiens
atcaccgtgctgctgaggccggcacagggccgcggtgcgcccatcagtgtgtaccaggtgattgtggaggaggagcgggcgcggaggctgcggcgggagcsaggtggacaggactgcttcccagtgccattgaccttcgaggcggcgctggcccgaggcctggtgcactacttcggggccgaactggcggccagcagtcta

SEQ ID NO: 31994 - DNA, 201 bp, Homo sapiens
tgtgtgaagacagagcaaggtgtcagccgctacaccatcaagaacctgctgccctatcggaacgttcacgtgaggcttgtcctcactaaccctgaggggckcaaagagggcaaggaggtcactttccagacggatgaggatgtgcccagtgggattgcagccgagtccctgaccttcactccactggaggacatgatcttc

SEQ ID NO: 31995 - DNA, 201 bp, Homo sapiens
ctgatgccgggcccattgtcatccactgcagcgcgggcaccggccgcacaggttgctatatcgtcctggatgtgatgctggacatggcagagtgtgagggygtcgtggacatttacaactgtgtgaagactctctgctcccggcgtgtcaacatgatccagactgaggagcagtacatcttcattcatgatgcaatcctgg

SEQ ID NO: 31996 - DNA, 201 bp, Homo sapiens
gccacaaagaagaaagacaaggtcaagggcagccggcaggagccaatgcctgcctatgatcggcaccgagtgaaactgcacccgatgctgggagaccccartgccgactacattaatgccaactacatagatggttaccacaggtcaaaccacttcatagccactcaagggccgaagcctgagatggtctatgacttctgg

SEQ ID NO: 31997 - DNA, 201 bp, Homo sapiens
cttcacagaccagagcaccctgcaggaggacgagcggctgggcctgtccttcatggacacccatggctacagcacccggggagaccagcgcagcggtgggktcactgaggccagcagcctcctggggggctccccgaggcgtccctgtggccggaagggctccccataccacacggggcagctgcaccctgcggtgcgtgt

SEQ ID NO: 31998 - DNA, 201 bp, Homo sapiens; identical to SEQ ID NO: 31983

SEQ ID NO: 31999 - DNA, 201 bp, Homo sapiens; identical to SEQ ID NO: 31984

SEQ ID NO: 32000 - DNA, 201 bp, Homo sapiens; identical to SEQ ID NO: 31985

SEQ ID NO: 32001 - DNA, 201 bp, Homo sapiens; identical to SEQ ID NO: 31986

SEQ ID NO: 32002 - DNA, 201 bp, Homo sapiens; identical to SEQ ID NO: 31987

SEQ ID NO: 32003 - DNA, 201 bp, Homo sapiens; identical to SEQ ID NO: 31988

SEQ ID NO: 32004 - DNA, 201 bp, Homo sapiens; identical to SEQ ID NO: 31989

SEQ ID NO: 32005 - DNA, 201 bp, Homo sapiens; identical to SEQ ID NO: 31990

SEQ ID NO: 32006 - DNA, 201 bp, Homo sapiens; identical to SEQ ID NO: 31991

SEQ ID NO: 32007 - DNA, 201 bp, Homo sapiens; identical to SEQ ID NO: 31992

SEQ ID NO: 32008 - DNA, 201 bp, Homo sapiens; identical to SEQ ID NO: 31993

SEQ ID NO: 32009 - DNA, 201 bp, Homo sapiens; identical to SEQ ID NO: 31994

SEQ ID NO: 32010 - DNA, 201 bp, Homo sapiens; identical to SEQ ID NO: 31995

SEQ ID NO: 32011 - DNA, 201 bp, Homo sapiens; identical to SEQ ID NO: 31996

SEQ ID NO: 32012 - DNA, 201 bp, Homo sapiens; identical to SEQ ID NO: 31997

SEQ ID NO: 32013 - DNA, 201 bp, Homo sapiens; identical to SEQ ID NO: 31983

SEQ ID NO: 32014 - DNA, 201 bp, Homo sapiens; identical to SEQ ID NO: 31984

SEQ ID NO: 32015 - DNA, 201 bp, Homo sapiens; identical to SEQ ID NO: 31986

SEQ ID NO: 32016 - DNA, 201 bp, Homo sapiens; identical to SEQ ID NO: 31985

SEQ ID NO: 32017 - DNA, 201 bp, Homo sapiens; identical to SEQ ID NO: 31987

SEQ ID NO: 32018 - DNA, 201 bp, Homo sapiens; identical to SEQ ID NO: 31988

SEQ ID NO: 32019 - DNA, 201 bp, Homo sapiens; identical to SEQ ID NO: 31989

SEQ ID NO: 32020 - DNA, 201 bp, Homo sapiens; identical to SEQ ID NO: 31991

SEQ ID NO: 32021 - DNA, 201 bp, Homo sapiens; identical to SEQ ID NO: 31992

SEQ ID NO: 32022 - DNA, 201 bp, Homo sapiens; identical to SEQ ID NO: 31990

SEQ ID NO: 32023 - DNA, 201 bp, Homo sapiens; identical to SEQ ID NO: 31994

SEQ ID NO: 32024 - DNA, 201 bp, Homo sapiens; identical to SEQ ID NO: 31993

SEQ ID NO: 32025 - DNA, 201 bp, Homo sapiens; identical to SEQ ID NO: 31995

SEQ ID NO: 32026 - DNA, 201 bp, Homo sapiens; identical to SEQ ID NO: 31997

SEQ ID NO: 32027 - DNA, 201 bp, Homo sapiens
gccacaaagaagaaagacaaggtcaagggcagccggcaggagccaatgcctgcctatgatcggcaccgagtgaaactgcacccgatgctgggagaccccartgccgactacattaatgccaactacatagatgtgattccagggttaccacaggtcaaaccacttcatagccactcaagggccgaagcctgagatggtcta

SEQ ID NO: 32028 - DNA, 201 bp, Homo sapiens
gtggaggaggaaaaggaatgaggattgttagatcagaacaagaatttcaagaacagttagagtcagcacggagagaagctaagaagtctttcaatgatgaygctatgctgatcgagaagtttgtagacacaccgaggcatgtagaagtccaggtgtttggtgatcaccatggcaatgctgtgtacttgtttgaaagagact

SEQ ID NO: 32029 - DNA, 201 bp, Homo sapiens
gaactgacttggtggagtggcagcttagaattgcagcaggagagaagattcctttgagccaggaagaaataactctgcagggccatgccttcgaagctagmatatatgcagaagatcctagcaataacttcatgcctgtggcaggcccattagtgcacctctctactcctcgagcagacccttccaccaggattgaaactg

SEQ ID NO: 32030 - DNA, 201 bp, Homo sapiens
gcataccataaagtctccaaaggatggcacagtaaagaaagtgttctacagagaaggtgctcaggccaacagacacactcctttagtcgagtttgaggagraagaatcagacaaaagggaatcggaataaactccagcaaggaaatggccagttaagtagtgtcttctctctccaccaaaaagaggaagtgcctccagctt

SEQ ID NO: 32031 - DNA, 201 bp, Homo sapiens
gaccccatgattgcgaagctggtcgtgtgggcagcagatcgccaggcggcattgacaaaactgaggtacagccttcgtcagtacaatattgttggactgcmcaccaacattgacttcttactcaacctgtctggccacccagagtttgaagctgggaacgtgcacactgatttcatccctcaacaccacaaacagttgttg

SEQ ID NO: 32032 - DNA, 140 bp, Homo sapiens
ggatcagcccaaaggtaggctcaggctccgacggtggccsgcgggggtcacgaggcttcgtagtggaggaacgggtttggcgtgtgggacgcagctgcctctgtactggggagtcacggagtggccgggctccagggaca

SEQ ID NO: 32033 - DNA, 187 bp, Homo sapiens
ggatcagcccaaaggtaggctcaggctccgacggtggcccgcgggggtcacgaggcttcgtagtggaggaacgggtttggcgtgtgrgacgcagctgcctctgtactggggagtcacggagtggccgggctccagggacatggcggcggcctctgcggtgtcggtgctgctggtggcggcggagagg

SEQ ID NO: 32034 - DNA, 201 bp, Homo sapiens
cacctctctactcctcgagcagacccttccaccaggattgaaactggagtacggcaaggagacgaagtttccgtgcattatgaccccatgattgcgaagcyggtcgtgtgggcagcagatcgccaggcggcattgacaaaactgaggtacagccttcgtcagtacaatattgttggactgcccaccaacattgacttctta

SEQ ID NO: 32035 - DNA, 201 bp, Homo sapiens
gctgcagccaaagagtctttatgccaggcagccctgggtctcatcctcaaggagaaagccatgaccgacactttcactcttcaggcacatgatcaattctytccattttcgtctagcagtggaagaagactgaatatctcgtataccagaaacatgactcttaaagatggtaaaaacaatgtagccatagctgtaacgtat

SEQ ID NO: 32036 - DNA, 201 bp, Homo sapiens
gtaggctcaggctccgacggtggcccgcgggggtcacgaggcttcgtagtggaggaacgggtttggcgtgtgggacgcagctgcctctgtactggggagtmacggagtggccgggctccagggacatggcggcggcctctgcggtgtcggtgctgctggtggcggcggagaggaaccggtggcatcgtctcccgagcctgc

SEQ ID NO: 32037 - DNA, 201 bp, Homo sapiens
actcttcaggcacatgatcaattctctccattttcgtctagcagtggaagaagactgaatatctcgtataccagaaacatgactcttaaagatggtaaaamcaatgtagccatagctgtaacgtataaccatgatgggtcttatagcatgcagattgaagataaaactttccaagtccttggtaatctttacagcgaggga

SEQ ID NO: 32038 - DNA, 201 bp, Homo sapiens
aagagtctttatgccaggcagccctgggtctcatcctcaaggagaaagccatgaccgacactttcactcttcaggcacatgatcaattctctccattttcrtctagcagtggaagaagactgaatatctcgtataccagaaacatgactcttaaagatggtaaaaacaatgtagccatagctgtaacgtataaccatgatg

SEQ ID NO: 32039 - DNA, 196 bp, Homo sapiens
acagggccacatattaaattacttctgaatggtgaattcatcttacaaaatgttccaagttttggacaaggaaaaacattacattggatattgaattcatrgagcctttacagaagcatcacatttaaaccaatgtgaattcaaaaaagagaaggaaactttttaaattcaatttagagtacataaaaaaagaaat

SEQ ID NO: 32040 - DNA, 201 bp, Homo sapiens
cacatacatggaatgtatcctgctttcatcttggagttcacctgtgtggcttggatttatcacagtagcatttgtcttcaatctgtgtgttaactagaaaycaaggaaagacatgaggagatttgtctactgcaaggtggttctagccacttcgctgatgtgggttcttgttgatgtcttcttactgctgtacttcagtga

SEQ ID NO: 32041 - DNA, 201 bp, Homo sapiens
tttgtatctgatcaaagcacataagaatataaataatagcaaactactattaaacaacagaacaacttgtaaaacaaattgtgtttgctttaagaaaaatstttattgcactcatgtcatagggttaattggaggttattttatttttggttgtcatggtgattgaaagagataatgtaaatgccttataaaatcttcatt

SEQ ID NO: 32042 - DNA, 201 bp, Homo sapiens
tgtacttcagtgaatgtaacaaatgtgatgacaagaaggagagatctctgctgcctgcattgagggctgttatttcaagaaaccaagaagggccaggagawatgggaaaagctgtgttgattcctaaagatgaccaggagaaaatgaaagagctgtttaaaatcaatcagtttaaccttatggccagtgatttgattgccc

SEQ ID NO: 32043 - DNA, 201 bp, Homo sapiens
ttatctgaaaatacagttctttccctcatgcttatgtagatataaaaataaaattcataatgcaaagttcccaagtttatttttgcattatcctttataayaagcactagtatgcaaatttttcacttagagattttagtattttacattctcatgacaaaattaacagcaacctaaatctgacagtcttgagtgtcagat

SEQ ID NO: 32044 - DNA, 201 bp, Homo sapiens
caccgcctgggaggttactgtaaggcccgcagctcccgccagctcccgcggactgctgccgcctccttaccatgaagccagtaagtcgtcgcacgctggastggatttattcagtgttgctgcttgccatcgttttaatctcctggggctgcatcatctatgcttcgatggtgtctgcaagacgacagctaaggaagaaat

SEQ ID NO: 32045 - DNA, 201 bp, Homo sapiens
tttagtattttacattctcatgacaaaattaacagcaacctaaatctgacagtcttgagtgtcagatcatagttggaataagcttttcaatcaagtttctraattcttcaaaaatgattcggaaagctttttttttttttgagacggagtcttgctctgtcgcccaggctcagtggcactatctcggcttactgcaagctc

SEQ ID NO: 32046 - DNA, 201 bp, Homo sapiens
ccatcgttttaatctcctggggctgcatcatctatgcttcgatggtgtctgcaagacgacagctaaggaagaaatacccagacaaaatctttgggacgaawgaaaatttgtaactcttctggatttaattatctgaaaatacagttctttccctcatgcttatgtagatataaaaataaaattcataatgcaaagttccca

SEQ ID NO: 32047 - DNA, 201 bp, Homo sapiens; identical to SEQ ID NO: 32043

SEQ ID NO: 32048 - DNA, 201 bp, Homo sapiens
caccgcctgggaggttactgtaaggcccgcagctcccgccagctcccgcggactgctgccgcctccttaccatgaagccagtaagtcgtcgcacgctggastggatttattcagtggtaagtcccggggatcgcgggcccccaccgtgtcgactcactgggcccgcaggcggaaaggccctatttcttcagcacccagaaa

SEQ ID NO: 32049 - DNA, 201 bp, Homo sapiens; identical to SEQ ID NO: 32045

SEQ ID NO: 32050 - DNA, 201 bp, Homo sapiens
gccagctcccgcggactgctgccgcctccttaccatgaagccagtaagtcgtcgcacgctggactggatttattcagtggtaagtcccggggatcgcgggyccccaccgtgtcgactcactgggcccgcaggcggaaaggccctatttcttcagcacccagaaactccaaaatccattcctgaattaagcatttcactccc

SEQ ID NO: 32051 - DNA, 201 bp, Homo sapiens; identical to SEQ ID NO: 32046

SEQ ID NO: 32052 - DNA, 201 bp, Homo sapiens
atcttccgcttcttacgtaagggctgctgggtgtacccgccactggaaccccatttattcgactttgttactttaattcccaccttagcaatggcaacggyaacctgacgggggcgaggggaaatatcaggtagatttcacacctcctttgcgatttttggtttagttgctgcttgccatcgttttaatctcctggggctg

SEQ ID NO: 32053 - DNA, 201 bp, Homo sapiens
acaaagaaaaaatgatgaatgactctattttacgccttcagacatgggacgaagcagtatttagggaaaagattctgcatatacagactcatgaaaaattmatcagagatagtcaagaaaaaccaaaacctgtccctgataaggaaaataaaaaactgctctgcagaaagtgcaaagccttggcatgttacacagctgacg

SEQ ID NO: 32054 - DNA, 201 bp, Homo sapiens
tcacagcactgagtattttgtaggccaacagagctcatagtacttgggaaaaattaaaaagcctcatttctagccttctttttagagtcaactgccaacamacacacagtaatcactctgtacacactgggatagatgaatgaatggaatgttgggaatttttatctccctttgtctccttaacctactgtaaactggctt

SEQ ID NO: 32055 - DNA, 201 bp, Homo sapiens
gaatgccacaacactagtaaacaacacccgtacaatatgatcatgtttaattatctagatcagaaacttggaggatcttcaggcccactgccccaggtcaytgggctgactgcctcggttggtgttggggatgccaaaaacacagatgaagccttggattatatctgcaagctgtgtgcttctcttgatgcgtcagtgata

SEQ ID NO: 32056 - DNA, 201 bp, Homo sapiens
tggcttttgcccttaacaatctactgaaattgttcttttgaaggttaccagtgactctggttgccaaatccactgggcacttcttaaccttctatttgacytctgcgcatttggccctgttgagcactcttcttgaagctctccctgggcttctctctcttctagttctattctagtctttttttattgagtcctcctctt

SEQ ID NO: 32057 - DNA, 201 bp, Homo sapiens
gtctgactgtcctttctacttgaaagattagaatatgtatccaaatggcattcacgtgtcacttagcaaggtttgctgatgcttcaaagagcttagtttgyggtttcctggacgtggaaacaagtatctgagttccctggagatcaacgggatgaggtgttacagctgcctccctcttcatgcaatctggtgagcagtggt

SEQ ID NO: 32058 - DNA, 201 bp, Homo sapiens
gccacgccctcctgctacccggctttaaagctagtgaggcacagcctgcggggaacgtagctagctgcaagcagaggccggcatgaccaccgagcagcgaygcagcctgcaagccttccaggattatatccggaagaccctggaccctacctacatcctgagctacatggccccctggtttagggaggaagaggtgcagta

SEQ ID NO: 32059 - DNA, 165 bp, Homo sapiens
gcactttcgattttccctttagttattaaagttcctatgcagctccgcctcgcgtccggcctcakttcctcggaaaatccctgctttccccgctcgccacgccctcctgctacccggctttaaagctagtgaggcacagcctgcggggaacgtagctagctgcaa

SEQ ID NO: 32060 - DNA, 201 bp, Homo sapiens
gattttccctttagttattaaagttcctatgcagctccgcctcgcgtccggcctcatttcctcggaaaatccctgctttccccgctcgccacgccctcctsctacccggctttaaagctagtgaggcacagcctgcggggaacgtagctagctgcaagcagaggccggcatgaccaccgagcagcgacgcagcctgcaagc

SEQ ID NO: 32061 - DNA, 201 bp, Homo sapiens
gccatgactggggaatccatgtgaagtacaagacatttgagattccagttataaaaattgaaagttttgtggtggaggatattgcaactggagttcagacrctgtactcgaagtggaaggactttcattttgagaagataccatttgatccagcagaaatgtccaaatgatatcaggtcctcaatcttcagctacagggaa

SEQ ID NO: 32062 - DNA, 201 bp, Homo sapiens
tgtgattttttttaattgctatttgatatggtttggctatatgtccccacccaaatctcatcttgaattataatccccatgtgtcaagggagggacctgaygggaggtgattggatcacgggggcagttgtccccatgctgttcttgggatagtgagttagttctcatgagatctgatggttttataagtgtttgacaatt

SEQ ID NO: 32063 - DNA, 201 bp, Homo sapiens
tagttgcttgataatagttactagtagtagtattcttactaagacccaatacaaatggattatttaaaccaagtttatgagttggttttttttcattttcyatttgtattttattaagagtgtcttttcttatgtgattttttttaattgctatttgatatggtttggctatatgtccccacccaaatctcatcttgaatt

SEQ ID NO: 32064 - DNA, 201 bp, Homo sapiens
gccttcagacatgggacgaagcagtatttagggaaaagattctgcatatacagactcatgaaaaattcatcagagatagtcaagaaaaaccaaaacctgtmcctgataaggaaaataaaaaactgctctgcagaaagtgcaaagccttggcatgttacacagctgacgtaagagtgatagaggaatgccattacactgtgc

SEQ ID NO: 32065 - DNA, 201 bp, Homo sapiens
aatataatgatgccctcattatcagtgagcatgcacgaatgaaagatgctctggattacttgaaagacttcttcagcaatgtccgagcagcaggattcgawgagattgagcaagatcttactcagagatttgaagaaaagctgcaggaactagaaagtgtttccagggatcccagcaatgagaatcctaaacttgaagacc

SEQ ID NO: 32066 - DNA, 201 bp, Homo sapiens
ccatgtgtcaagggagggacctgacgggaggtgattggatcacgggggcagttgtccccatgctgttcttgggatagtgagttagttctcatgagatctgrtggttttataagtgtttgacaattcctcctttacacacactctctctctcatctgctgccatgtaagacttgcctgcttccccttctgccatgattgtaa

SEQ ID NO: 32067 - DNA, 201 bp, Homo sapiens
tgactgcctcggttggtgttggggatgccaaaaacacagatgaagccttggattatatctgcaagctgtgtgcttctcttgatgcgtcagtgatagcaacrgtcaaacacaatctggaggaactggagcaagttgtttataagccccagaagtttttcaggaaagtggaatcacggattagcgacaaatttaaatacatca

SEQ ID NO: 32068 - DNA, 201 bp, Homo sapiens
tttaattgctatttgatatggtttggctatatgtccccacccaaatctcatcttgaattataatccccatgtgtcaagggagggacctgacgggaggtgaytggatcacgggggcagttgtccccatgctgttcttgggatagtgagttagttctcatgagatctgatggttttataagtgtttgacaattcctcctttac

SEQ ID NO: 32069 - DNA, 201 bp, Homo sapiens
cagatgtcaccagctatggcaaggcccggtgtcttgcagactatgatgctgtgctgacagaagccggcgattacacggccaagtacatgaagcttcgagayttcttcggctccatctcaggcatccctctccctcccccacctgaccttcttcccaagatgccgtatgagcccttaacgccagtcttgtacctgtctctgt

SEQ ID NO: 32070 - DNA, 106 bp, Homo sapiens
cccagctcagtggcccccgccccccaccccccacgcccgaacagcaggggcagagcagccctccttcgaagtgtgtccaagtccgcatttgagccttgttytgggg

SEQ ID NO: 32071 - DNA, 201 bp, Homo sapiens
gggtggtgccactccagtacaagcgtgggggacctatcattgccgtgcaggtggagaatgaatatggttcctataataaagaccccgcatacatgccctaygtcaagaaggcactggaggaccgtggcattgtggaactgctcctgacttcagacaacaaggatgggctgagcaaggggattgtccagggagtcttggcca

SEQ ID NO: 32072 - DNA, 201 bp, Homo sapiens
actcgtggggaggccctcacaatatcttggattcttctgaggttttgaaaaccgtgtctgccattgtggacgccggctcctccatcaacctctacatgttycacggaggcaccaactttggcttcatgaatggagccatgcacttccatgactacaagtcagatgtcaccagctatggcaaggcccggtgtcttgcagact

SEQ ID NO: 32073 - DNA, 201 bp, Homo sapiens
gcagtggacctttattttgaccacctgatgtccagggtggtgccactccagtacaagcgtgggggacctatcattgccgtgcaggtggagaatgaatatgrttcctataataaagaccccgcatacatgccctacgtcaagaaggcactggaggaccgtggcattgtggaactgctcctgacttcagacaacaaggatggg

SEQ ID NO: 32074 - DNA, 201 bp, Homo sapiens
agagcttctttcagaggttcggcctggacaaatggagttccctcccagaaacacccacattacctgctttcttcttgggtagcttgtccatcagctccacsccttgtgacacctttctgaagctggagggctgggagaagggggttgtattcatcaatggccagaaccttggacgttactggaacattggaccccagaaga

SEQ ID NO: 32075 - DNA, 201 bp, Homo sapiens
caatcaagtctgaaaagcccatcaacatggagaacctgccagtcaatgggggaaatggacagtccttcgggtacattctctatgagaccagcatcacctcrtctggcatcctcagtggccacgtgcatgatcgggggcaggtgtttgtgaacacagtatccataggattcttggactacaagacaacgaagattgctgtcc

SEQ ID NO: 32076 - DNA, 201 bp, Homo sapiens
taacgccagtcttgtacctgtctctgtgggacgccctcaagtacctgggggagccaatcaagtctgaaaagcccatcaacatggagaacctgccagtcaaygggggaaatggacagtccttcgggtacattctctatgagaccagcatcacctcgtctggcatcctcagtggccacgtgcatgatcgggggcaggtgtttg

SEQ ID NO: 32077 - DNA, 201 bp, Homo sapiens
ccgcgcttagagaacacgcgatgaccacgtggagcctccggcggaggccggcccgcacgctgggactcctgctgctggtcgtcttgggcttcctggtgctycgcaggctggactggagcaccctggtccctctgcggctccgccatcgacagctggggctgcaggccaagggctggaacttcatgctggaggattccacct

SEQ ID NO: 32078 - DNA, 201 bp, Homo sapiens
agtcaacacacgagctgcagctactgaccacctttctcttcaacgtccaggggactcagcccaagatggtgatggagtactggacggggtggtttgactcrtggggaggccctcacaatatcttggattcttctgaggttttgaaaaccgtgtctgccattgtggacgccggctcctccatcaacctctacatgttccacg

SEQ ID NO: 32079 - DNA, 201 bp, Homo sapiens
ggacgttactggaacattggaccccagaagacgctttacctcccaggtccctggttgagcagcggaatcaaccaggtcatcgtttttgaggagacgatggmgggccctgcattacagttcacggaaaccccccacctgggcaggaaccagtacattaagtgagcggtggcaccccctcctgctggtgccagtgggagactg

SEQ ID NO: 32080 - DNA, 201 bp, Homo sapiens
ctttaactgctctcagcgagttgaatggccagccaaaatttctcaactgggtattgatatacaagctgtgaatgtggtaataaactttgacttttcaaagmtagaagagacctatctccgtcatattggaagaccaggtcactttggccattttggcttagccatcaacttgatcacatatggcgatcacttcaacctgaa

SEQ ID NO: 32081 - DNA, 201 bp, Homo sapiens
attatttctgaaatggcttattctcatttgcactgatctgtttacttgaggtattgatatacaagctgtgaatgtggtaataaactttgacttttcaaagmtagaagagacctatctccgtcatattggaagaccaggtcactttggccattttggcttagccatcaacttgatcacatatggcgatcacttcaacctgaa

SEQ ID NO: 32082 - DNA, 201 bp, Homo sapiens
ccaagccttttgggccccaaatcaaggggacctgctgcctggaagaaaagatttgctgcttgctggagcccctgggcttcaagtgcaccttcatcaatgaytttgactgttacctgacagaggtcggagacatctgtgcctgtgccaacatccgccgggtgccctttgccttcaaatggtggaagatggagttcgggacca

SEQ ID NO: 32083 - DNA, 201 bp, Homo sapiens
atgacaagaatgagggcaaaaagggcttcctgctgctcctggccagccccagtgcctgctataaactgttccgagagaaacagaaggaaggctatggcgaygctcttctgtttgatgagcttagagcagatcagctcctgtctaatggaagggaagccaaaaccatcgaccaacttctggctgatgaaagcctgaagaagc

SEQ ID NO: 32084 - DNA, 200 bp, Homo sapiens
gaatgtaagccagtaaggcttgttaattgattctttacaaaagaagaaaggaagaatctggatgctcaagtctttttcgcccagactggagtgcagtggygcgatctcagctccactgcagcctctgcctcctcctgagtagctgggattacaggcatgagccaccatgcctggctaactttttggttttgttttaagta

SEQ ID NO: 32085 - DNA, 139 bp, Homo sapiens
gaatgtaagccagtaaggcttgttaattgattctttacraaagaagaaaggaagaatctggatgctcaagtctttttcgcccagactggagtgcagtggtgcgatctcagctccactgcagcctctgcctcctcctgag

SEQ ID NO: 32086 - DNA, 128 bp, Homo sapiens
gaatgtaagccagtaaggcttgttaatkgattctttacaaaagaagaaaggaagaatctggatgctcaagtctttttcgcccagactggagtgcagtggtgcgatctcagctccactgcagcctctgc

SEQ ID NO: 32087 - DNA, 201 bp, Homo sapiens
aatcccagctactcaggaggctgaggcaggagaatcgcttgaacccaggaggcagaggttgcagtgagctgcgattatgccactgcactccagcctgggtraaactcagtctccaaaaagactgtcggagtggactgcaggagtcaggggcgagacacacgacactcaatttgcagcatgtgcccaatacacaacagccag

SEQ ID NO: 32088 - DNA, 201 bp, Homo sapiens
acaatctgtcttcctctccattccaggatgagatggccttctgctacacccaggctccccacaagacaacgtccttgatcctcgacacacctcaggccgcygatctcgatgagttccccatgaagtactcactggtccctggtattggctacatgatccaggacactgaggaccataaagtggccagcatggattccattg

SEQ ID NO: 32089 - DNA, 201 bp, Homo sapiens
atatctgagctgggtgttgagggttgagcaggagttggcaggaaggaagggggttcttaccgtaccttttccgtaaatggggtccggggagatgtgtgacyggcaaacaatctgtcttcctctccattccaggatgagatggccttctgctacacccaggctccccacaagacaacgtccttgatcctcgacacacctcag

SEQ ID NO: 32090 - DNA, 201 bp, Homo sapiens
gatctcagctccactgcagcctctgcctcctcctgagtagctgggattacaggcatgagccaccatgcctggctaactttttggttttgttttaagtagayggtctcaccatgtttcccaggctggtcttgaattcctaggctcaagtgatccacccaccttggccacccaaagtgctgggattgcaggcgtgagccacca

SEQ ID NO: 32091 - DNA, 201 bp, Homo sapiens
cctgaagagtaggggagagagggatcggagagccttcaagaaggggtgatatctgagctgggtgttgagggttgagcaggagttggcaggaaggaaggggrttcttaccgtaccttttccgtaaatggggtccggggagatgtgtgaccggcaaacaatctgtcttcctctccattccaggatgagatggccttctgctac

SEQ ID NO: 32092 - DNA, 201 bp, Homo sapiens
atctcagctccactgcagcctctgcctcctcctgagtagctgggattacaggcatgagccaccatgcctggctaactttttggttttgttttaagtagatkgtctcaccatgtttcccaggctggtcttgaattcctaggctcaagtgatccacccaccttggccacccaaagtgctgggattgcaggcgtgagccaccac

SEQ ID NO: 32093 - DNA, 201 bp, Homo sapiens
ccaccatgcctggctaactttttggttttgttttaagtagatggtctcaccatgtttcccaggctggtcttgaattcctaggctcaagtgatccacccacyttggccacccaaagtgctgggattgcaggcgtgagccaccacacctggccatggatgctcaagtcttaaacctgaagagtaggggagagagggatcggag

SEQ ID NO: 32094 - DNA, 201 bp, Homo sapiens
cctagctgggctggggccacacgactattatgttggccttgaacggggactgcagagccctcagtttgtctcccttgttcctctgtggctgaggtgggagsgggagggtggggtaggtcccccagcaagaaagagggacaggagcaccccaggcaggaccaaggagtcgggaggcccctgccttctgtcctccatggtgag

SEQ ID NO: 32095 - DNA, 201 bp, Homo sapiens
tctctgcagtcccttccccgcccgccctgccagaaggccgaggaggcacgtggagggcctccttcctgcaattcttccctctccagagtcagggagggctrcccagccctggcctcacagccgtcccagatgttaggtgagccactgagctctgtgttgaccttgaggggcctggctgggggcccccaggctccatgcctt

SEQ ID NO: 32096 - DNA, 162 bp, Homo sapiens
caccccaggcaggaccaaggagtcgggaggcccctgccttctgtcctccatggtgagggcacagatgtctccccagagcccagcgctggcagaatggattytgctcctggctttgcttctgcggcttcggtggagacagttatggaataaaatgttccttgc

SEQ ID NO: 32097 - DNA, 201 bp, Homo sapiens
ccatcaccatcgtggccagcatgacggtgcgggagctgtttgaggagctggacagaccagcggccagtgacgaggagctcaccaggctgaagagcaagcgkgcccgggtggcccagatgaagaggacctgggcagggcagggggcttctctgaagctcggcgacctcatggtgctgctgggcgccgtgggagcctgtgagt

SEQ ID NO: 32098 - DNA, 201 bp, Homo sapiens
gtattcatctgcggtttttggtgacttcgagcagtttcctcctccagaaatcacccggaggcctgttgaagacttaatccttcaaatgaaggcgctcaacrttgaaaaggtcagttgctgcccccagccccgctctcagccaccccaggtgaagcaactgcaggagaaccggctgagctgccccatcactgcgctgggccg

SEQ ID NO: 32099 - DNA, 201 bp, Homo sapiens
gggcccgggtggcccagatgaagaggacctgggcagggcagggggcttctctgaagctcggcgacctcatggtgctgctgggcgccgtgggagcctgtgartatgccagctgcacaccccagttttgcgaagccaacgggctgcggtacaaagccatgatggagatccggcgcctgcggggccagctgaccaccgcagtca

SEQ ID NO: 32100 - DNA, 201 bp, Homo sapiens
ggtggcccagatgaagaggacctgggcagggcagggggcttctctgaagctcggcgacctcatggtgctgctgggcgccgtgggagcctgtgagtatgccrgctgcacaccccagttttgcgaagccaacgggctgcggtacaaagccatgatggagatccggcgcctgcggggccagctgaccaccgcagtcaatgccgt

SEQ ID NO: 32101 - DNA, 201 bp, Homo sapiens
cagtcaatgccgtgtgccccgaggctgagctcttcgtggatcccaagatgcagccgcccaccgagagccaggtgacctacctgcgacagatcgtgacggcrggcctgggggaccacttggcccgcagggtccagagcgaggagatgctggaggacaagtggaggaacgcctacaagacccctctcctcgacgaccctgtct

SEQ ID NO: 32102 - DNA, 201 bp, Homo sapiens
gttgctgcccccagccccgctctcagccaccccaggtgaagcaactgcaggagaaccggctgagctgccccatcactgcgctgggccggacaatggccacrttccccgtggcaccccgctacgctaagatgctggcactgagccgacaacacggctgcctgccctatgccatcaccatcgtggccagcatgacggtgcggg

SEQ ID NO: 32103 - DNA, 201 bp, Homo sapiens
tgactctccgggctaaggtagcgcaggaggcgggtgctggggagccccgagccctaggccccccccagctctgcttcagacccacctgcggtcctggggcmacggtcactgagcctgtccttttgcagaggaacctgccactcaagctgctcatcatgtcggccacgctgcgggtggaggacttcacccagaacccacggc

SEQ ID NO: 32104 - DNA, 201 bp, Homo sapiens
agccccgctctcagccaccccaggtgaagcaactgcaggagaaccggctgagctgccccatcactgcgctgggccggacaatggccacattccccgtggcrccccgctacgctaagatgctggcactgagccgacaacacggctgcctgccctatgccatcaccatcgtggccagcatgacggtgcgggagctgtttgagg

SEQ ID NO: 32105 - DNA, 201 bp, Homo sapiens
actctccgggctaaggtagcgcaggaggcgggtgctggggagccccgagccctaggccccccccagctctgcttcagacccacctgcggtcctggggccayggtcactgagcctgtccttttgcagaggaacctgccactcaagctgctcatcatgtcggccacgctgcgggtggaggacttcacccagaacccacggctc

SEQ ID NO: 32106 - DNA, 201 bp, Homo sapiens
aagccgccgccggtcatcaaggtggaatccaggcagttcccagtgactgtgcatttcaacaagcggacaccgctggaagactacagtggcgagtgcttccrgaaggtctgcaagatccaccggatgctgcccgcaggtggcatcctggtgttcctgacggggcaggctgaggtgcatgcgctgtgccgcaggctcaggaag

SEQ ID NO: 32107 - DNA, 201 bp, Homo sapiens
tggccaccaatgtggccgagacgtcgcttaccatccctggcatcaagtacgtggtggactgtgggaaggtcaagaaacgctactacgaccgcgtcactggygtatcctccttccgtgtcacctgggtctcccaggcatcagctgaccagcgagcgggcagagcaggacggacggagcccggccactgctacaggctgtatt

SEQ ID NO: 32108 - DNA, 201 bp, Homo sapiens
agaaacgctactacgaccgcgtcactggcgtatcctccttccgtgtcacctgggtctcccaggcatcagctgaccagcgagcgggcagagcaggacggacrgagcccggccactgctacaggctgtattcatctgcggtttttggtgacttcgagcagtttcctcctccagaaatcacccggaggcctgttgaagacttaa

SEQ ID NO: 32109 - DNA, 201 bp, Homo sapiens
ccctgtcgaagaaggagaagaagcctctgaccaagaaggagaagaaagtgctgcagaaaatcttagaacagaaggagaaaaagagccagcgagcagagatrctacagaagctgagtgaagtccaggcttccgaagctgagatgagactcttttataccacttccaagctaggcactgggaaccgcatgtatcacaccaaag

SEQ ID NO: 32110 - DNA, 201 bp, Homo sapiens
cgatcccgtatgaagggtgctgccgcccgtgccatctggcccgggggtgactttttgaactgtttattatatggtggatgatgatttcatctcacgtgctrgacgctgttctgttcagtgtgctctttggactacattagtcccctgtggagcagcagggctggagatctctgcagtcccttccccgcccgccctgccaga

SEQ ID NO: 32111 - DNA, 201 bp, Homo sapiens
aagccatgatggagatccggcgcctgcggggccagctgaccaccgcagtcaatgccgtgtgccccgaggctgagctcttcgtggatcccaagatgcagcckcccaccgagagccaggtgacctacctgcgacagatcgtgacggcgggcctgggggaccacttggcccgcagggtccagagcgaggagatgctggaggaca

SEQ ID NO: 32112 - DNA, 201 bp, Homo sapiens
cgccgtcttcatccccgtgaaccgctccccggaaatgcaggaggaacggctgaagctcccaattctctccgaagaacaagtaatcatggaggctgtggccragcaccccatcgtcatcgtgtgtggtgagaccggcagcgggaagaccacacaggtgcctcagtttctctatgaagcaggcttcagcagtgaagacagcat

SEQ ID NO: 32113 - DNA, 201 bp, Homo sapiens
tgttctgttcagtgtgctctttggactacattagtcccctgtggagcagcagggctggagatctctgcagtcccttccccgcccgccctgccagaaggccraggaggcacgtggagggcctccttcctgcaattcttccctctccagagtcagggagggctgcccagccctggcctcacagccgtcccagatgttaggtga

SEQ ID NO: 32114 - DNA, 201 bp, Homo sapiens
tgctgtgtcaccgggccagcgtgttctatcgcgtgggctggccgctccccgccatcgaggtggattttccagaggggattgaccgctacaagcactttgcycggttcctgctggaagggcaggtcttccgcaagctggcctcataccagagctgtctgctgtccagccccggcaccatgctgaagacgtgggccaggctgc

SEQ ID NO: 32115 - DNA, 201 bp, Homo sapiens
gcacgtggagggcctccttcctgcaattcttccctctccagagtcagggagggctgcccagccctggcctcacagccgtcccagatgttaggtgagccacygagctctgtgttgaccttgaggggcctggctgggggcccccaggctccatgccttcttgggagggtggccgccaacgcctttcctgtgttatggcaacag

SEQ ID NO: 32116 - DNA, 201 bp, Homo sapiens
cccgccatcgaggtggattttccagaggggattgaccgctacaagcactttgcccggttcctgctggaagggcaggtcttccgcaagctggcctcataccrgagctgtctgctgtccagccccggcaccatgctgaagacgtgggccaggctgcagccccgtacggagagccttctgcgagccctggttgcagagaaggct

SEQ ID NO: 32117 - DNA, 201 bp, Homo sapiens
cgtcccagatgttaggtgagccactgagctctgtgttgaccttgaggggcctggctgggggcccccaggctccatgccttcttgggagggtggccgccaaygcctttcctgtgttatggcaacagggagtgggcatctcatctgcctgtggtcagctctcagacggcagggagcggagctgacgttggctgtgcttggtca

SEQ ID NO: 32118 - DNA, 201 bp, Homo sapiens; identical to SEQ ID NO: 32097

SEQ ID NO: 32119 - DNA, 201 bp, Homo sapiens
gtattcatctgcggtttttggtgacttcgagcagtttcctcctccagaaatcacccggaggcctgttgaagacttaatccttcaaatgaaggcgctcaacrttgaaaaggtcatcaacttccccttcccgacgcccccctccgtggaagcccttcttgccgccgaggagctgttgatcgcactgggtgccctgcaaccgcc

SEQ ID NO: 32120 - DNA, 201 bp, Homo sapiens
ccgtacggagagccttctgcgagccctggttgcagagaaggctgactgccatgaagccttgctggctgcttggaagaaaaaccccaaatgtgagtttgacyagggccagggggtgggagtagacaggatggggtcactgaggcaggggctttgtgctttgtgcacggtcagccctggcttggcagaaggatctggccccac

SEQ ID NO: 32121 - DNA, 201 bp, Homo sapiens; identical to SEQ ID NO: 32100

SEQ ID NO: 32122 - DNA, 201 bp, Homo sapiens; identical to SEQ ID NO: 32099

SEQ ID NO: 32123 - DNA, 201 bp, Homo sapiens; identical to SEQ ID NO: 32101

SEQ ID NO: 32124 - DNA, 201 bp, Homo sapiens
ctgcgagccctggttgcagagaaggctgactgccatgaagccttgctggctgcttggaagaaaaaccccaaatgtgagtttgaccagggccagggggtggragtagacaggatggggtcactgaggcaggggctttgtgctttgtgcacggtcagccctggcttggcagaaggatctggccccacggctgctggccagctt

SEQ ID NO: 32125 - DNA, 201 bp, Homo sapiens
tcctgacggggcaggctgaggtgcatgcgctgtgccgcaggctcaggaaggctttcccaccctccagagcccggccacaagaaaaggacgacgatcagaamgactcggtggaggaaatgcggaagtttaagaagtcaagggccagggccaagaaggcgcgggctgaggtgctgccccagatcaacttggatcattactcgg

SEQ ID NO: 32126 - DNA, 201 bp, Homo sapiens
tgggtgccctgcaaccgccccagaaagcagaaagggtgaagcaactgcaggagaaccggctgagctgccccatcactgcgctgggccggacaatggccacrttccccgtggcaccccgctacgctaagatgctggcactgagccgacaacacggctgcctgccctatgccatcaccatcgtggccagcatgacggtgcggg

SEQ ID NO: 32127 - DNA, 201 bp, Homo sapiens
aaccgccccagaaagcagaaagggtgaagcaactgcaggagaaccggctgagctgccccatcactgcgctgggccggacaatggccacattccccgtggcrccccgctacgctaagatgctggcactgagccgacaacacggctgcctgccctatgccatcaccatcgtggccagcatgacggtgcgggagctgtttgagg

SEQ ID NO: 32128 - DNA, 201 bp, Homo sapiens; identical to SEQ ID NO: 32106

SEQ ID NO: 32129 - DNA, 201 bp, Homo sapiens; identical to SEQ ID NO: 32107

SEQ ID NO: 32130 - DNA, 201 bp, Homo sapiens; identical to SEQ ID NO: 32108

SEQ ID NO: 32131 - DNA, 201 bp, Homo sapiens; identical to SEQ ID NO: 32109

SEQ ID NO: 32132 - DNA, 201 bp, Homo sapiens; identical to SEQ ID NO: 32112

SEQ ID NO: 32133 - DNA, 201 bp, Homo sapiens; identical to SEQ ID NO: 32111

SEQ ID NO: 32134 - DNA, 201 bp, Homo sapiens; identical to SEQ ID NO: 32114

SEQ ID NO: 32135 - DNA, 201 bp, Homo sapiens; identical to SEQ ID NO: 32116

SEQ ID NO: 32136 - DNA, 201 bp, Homo sapiens; identical to SEQ ID NO: 32094

SEQ ID NO: 32137 - DNA, 201 bp, Homo sapiens; identical to SEQ ID NO: 32095

SEQ ID NO: 32138 - DNA, 162 bp, Homo sapiens; identical to SEQ ID NO: 32096

SEQ ID NO: 32139 - DNA, 201 bp, Homo sapiens; identical to SEQ ID NO: 32110

SEQ ID NO: 32140 - DNA, 201 bp, Homo sapiens; identical to SEQ ID NO: 32113

SEQ ID NO: 32141 - DNA, 201 bp, Homo sapiens; identical to SEQ ID NO: 32115

SEQ ID NO: 32142 - DNA, 201 bp, Homo sapiens; identical to SEQ ID NO: 32117

SEQ ID NO: 32143 - DNA, 201 bp, Homo sapiens; identical to SEQ ID NO: 32094

SEQ ID NO: 32144 - DNA, 201 bp, Homo sapiens; identical to SEQ ID NO: 32095

SEQ ID NO: 32145 - DNA, 162 bp, Homo sapiens; identical to SEQ ID NO: 32096

SEQ ID NO: 32146 - DNA, 201 bp, Homo sapiens; identical to SEQ ID NO: 32097

SEQ ID NO: 32147 - DNA, 201 bp, Homo sapiens; identical to SEQ ID NO: 32119

SEQ ID NO: 32148 - DNA, 201 bp, Homo sapiens; identical to SEQ ID NO: 32099

SEQ ID NO: 32149 - DNA, 201 bp, Homo sapiens; identical to SEQ ID NO: 32100

SEQ ID NO: 32150 - DNA, 201 bp, Homo sapiens; identical to SEQ ID NO: 32101

SEQ ID NO: 32151 - DNA, 201 bp, Homo sapiens; identical to SEQ ID NO: 32125

SEQ ID NO: 32152 - DNA, 201 bp, Homo sapiens; identical to SEQ ID NO: 32126

SEQ ID NO: 32153 - DNA, 201 bp, Homo sapiens; identical to SEQ ID NO: 32127

SEQ ID NO: 32154 - DNA, 201 bp, Homo sapiens; identical to SEQ ID NO: 32106

SEQ ID NO: 32155 - DNA, 201 bp, Homo sapiens; identical to SEQ ID NO: 32107

SEQ ID NO: 32156 - DNA, 201 bp, Homo sapiens; identical to SEQ ID NO: 32108

SEQ ID NO: 32157 - DNA, 201 bp, Homo sapiens; identical to SEQ ID NO: 32109

SEQ ID NO: 32158 - DNA, 201 bp, Homo sapiens; identical to SEQ ID NO: 32110

SEQ ID NO: 32159 - DNA, 201 bp, Homo sapiens; identical to SEQ ID NO: 32111

SEQ ID NO: 32160 - DNA, 201 bp, Homo sapiens; identical to SEQ ID NO: 32112

SEQ ID NO: 32161 - DNA, 201 bp, Homo sapiens; identical to SEQ ID NO: 32113

SEQ ID NO: 32162 - DNA, 201 bp, Homo sapiens; identical to SEQ ID NO: 32114

SEQ ID NO: 32163 - DNA, 201 bp, Homo sapiens; identical to SEQ ID NO: 32115

SEQ ID NO: 32164 - DNA, 201 bp, Homo sapiens; identical to SEQ ID NO: 32116

SEQ ID NO: 32165 - DNA, 201 bp, Homo sapiens; identical to SEQ ID NO: 32117

SEQ ID NO: 32166 - DNA, 201 bp, Homo sapiens
gactggcaaaatttaaattgctattgacacaatcattatacactccaatgatctgatagaagaagccatattgtctctacattgcaacgagttaagagatsattttccagttggtgaagagacttacacatgtagatgtcatgaagtaagctattgtggttcagctgctatttctgatgttgccccacttcagtacctggc

SEQ ID NO: 32167 - DNA, 201 bp, Homo sapiens
atattgtctctacattgcaacgagttaagagatcattttccagttggtgaagagacttacacatgtagatgtcatgaagtaagctattgtggttcagctgytatttctgatgttgccccacttcagtacctggcttcttattctggctgttctatgggagaatattttagagataatggcaaatgtacatttgccatctat

SEQ ID NO: 32168 - DNA, 124 bp, Homo sapiens
gttgccatggctattgctggcacycttccttggtgagctggtctggtctccaaaaatgctctgggatcatctttcattgctgcaataaatgtccatggctctaacactcttcttcatgaatggc

SEQ ID NO: 32169 - DNA, 113 bp, Homo sapiens
gttgccatggctrttgctggcacccttccttggtgagctggtctggtctccaaaaatgctctgggatcatctttcattgctgcaataaatgtccatggctctaacactcttct

SEQ ID NO: 32170 - DNA, 201 bp, Homo sapiens
gctaacgttaaaatgtttagagattaacagatttcagaatgtctttctgcatattactgaacagaatagtcacaaaatgattatcaaataaaaattttatmctatatgtaagattgtcccataaagaaattacgggtattgcttttaaataacctttataagaatgcagcatcttcctacctcttcagttcttcagagatt

SEQ ID NO: 32171 - DNA, 201 bp, Homo sapiens
aacatggaaaggtttgcagaagaagcagatgttgtaatagttggtgcaggccctgcagggctctctgcagctgttcgtctaaaacagttggctgtggcacrtgaaaaggacatccgtgtgtgtctagtggagaaagctgcccagataggagctcatactctctcaggggcttgccttgatccaggtgcttttaaagaactc

SEQ ID NO: 32172 - DNA, 201 bp, Homo sapiens
actttgaacatgctggtgccgctagccaagctgtcctgcctggcatatcagtgctttcatgccttaaaaattaagaaaaattatctacctctatgtgctayaagatggtcttcaacttctactgtgcctcgaattactacccattatactatttatccccgggataaggacaagagatgggaaggagtgaacatggaaagg

SEQ ID NO: 32173 - DNA, 201 bp, Homo sapiens
tggaacgtcttcttgtcacatggggatcagcaaagacccgatttttgtaccaggcgtctgggggccttatttctcagccatggtacctgggttctggctgmatgaaggtggtcagagcgttactggaaaattgatagaccacatggtacaaggccatgctgcttttccagaactacaagtaaaggccacagccagatgcca

SEQ ID NO: 32174 - DNA, 201 bp, Homo sapiens
aagaatcccctttttgtgcaaatgcatgcggacattactggcatgcctgtggtcctgtcgcaagaggtggagtccgttcttgtgggtgctgctgttctggktgcctgtgcctcaggggatttcgcttctgtacaggaagcaatggcaaaaatgagcaaagttgggaaagttgtgttcccgagactacaggataaaaaatac

SEQ ID NO: 32175 - DNA, 201 bp, Homo sapiens
tgccctccaccatgattatgagacctcccagccgtgtggaactgagtgattggggcagatgtgagagggcacggcctcatctgtgaggggcagccagtgaygtcacggctggctgtcatctgtggaacgtcttcttgtcacatggggatcagcaaagacccgatttttgtaccaggcgtctgggggccttatttctcagcc

SEQ ID NO: 32176 - DNA, 201 bp, Homo sapiens; identical to SEQ ID NO: 32173

SEQ ID NO: 32177 - DNA, 201 bp, Homo sapiens; identical to SEQ ID NO: 32174

SEQ ID NO: 32178 - DNA, 158 bp, Homo sapiens
gagtgattggggcagatgtgagagggcacggcctcatctgtgaggggcagccagtgaygtcacggctggctgtcatctgtggaacgtcttcttgtcacatggggatcagcaaagacccgatttttgtaccaggcgtctgggggccttatttctcagcc

SEQ ID NO: 32179 - DNA, 201 bp, Homo sapiens
gagagagatttgctgggataaggcgggacatttctttgatctcccggacttcttatcgtggaaggcaacaggtgtcacagcacggtctctctgctccctgrtgtgtaagtggacatattcagcagagaaaggctgggacgacagtttctggaaaatgattggtttggaagactttgttgcagataattacagcaaaatagg

SEQ ID NO: 32180 - DNA, 201 bp, Homo sapiens
gggtgatgtctgtggaaatgcaggccccgaaacttctgtggctgaaagagaacttgagagagatttgctgggataaggcgggacatttctttgatctcccrgacttcttatcgtggaaggcaacaggtgtcacagcacggtctctctgctccctggtgtgtaagtggacatattcagcagagaaaggctgggacgacagtt

SEQ ID NO: 32181 - DNA, 201 bp, Homo sapiens; identical to SEQ ID NO: 32173

SEQ ID NO: 32182 - DNA, 201 bp, Homo sapiens; identical to SEQ ID NO: 32174

SEQ ID NO: 32183 - DNA, 201 bp, Homo sapiens
ggaagactttgttgcagataattacagcaaaataggaaaccaagtgctacctcctggagcttctcttggaaatgggctcacaccagaggcagcaagagacsttggccttctccctgggattgcggtcgcagcttcactcattgatgcccatgcaggaggactaggagtgattggggcagatgtgagagggcacggcctcat

SEQ ID NO: 32184 - DNA, 201 bp, Homo sapiens
gcggtcgcagcttcactcattgatgcccatgcaggaggactaggagtgattggggcagatgtgagagggcacggcctcatctgtgaggggcagccagtgaygtcacggctggctgtcatctgtggaacgtcttcttgtcacatggggatcagcaaagacccgatttttgtaccaggcgtctgggggccttatttctcagcc

SEQ ID NO: 32185 - DNA, 201 bp, Homo sapiens
ggtactatgtgggtgtggacgttggaacaggcagtgtccgtgcagctctggtggaccagagtggggtcctgttggcttttgcagaccagccaattaagaaktgggagccccagttcaaccaccatgagcagtcctccgaggacatctgggctgcgtgctgtgttgtcacaaagaaagttgtacaagggattgatttaaacc

SEQ ID NO: 32186 - DNA, 201 bp, Homo sapiens; identical to SEQ ID NO: 32179

SEQ ID NO: 32187 - DNA, 201 bp, Homo sapiens; identical to SEQ ID NO: 32180

SEQ ID NO: 32188 - DNA, 201 bp, Homo sapiens; identical to SEQ ID NO: 32173

SEQ ID NO: 32189 - DNA, 201 bp, Homo sapiens; identical to SEQ ID NO: 32174

SEQ ID NO: 32190 - DNA, 201 bp, Homo sapiens; identical to SEQ ID NO: 32183

SEQ ID NO: 32191 - DNA, 201 bp, Homo sapiens; identical to SEQ ID NO: 32184

SEQ ID NO: 32192 - DNA, 201 bp, Homo sapiens; identical to SEQ ID NO: 32179

SEQ ID NO: 32193 - DNA, 201 bp, Homo sapiens; identical to SEQ ID NO: 32180

SEQ ID NO: 32194 - DNA, 201 bp, Homo sapiens; identical to SEQ ID NO: 32173

SEQ ID NO: 32195 - DNA, 201 bp, Homo sapiens; identical to SEQ ID NO: 32174

SEQ ID NO: 32196 - DNA, 201 bp, Homo sapiens; identical to SEQ ID NO: 32183

SEQ ID NO: 32197 - DNA, 201 bp, Homo sapiens; identical to SEQ ID NO: 32184

SEQ ID NO: 32198 - DNA, 201 bp, Homo sapiens; identical to SEQ ID NO: 32185

SEQ ID NO: 32199 - DNA, 201 bp, Homo sapiens; identical to SEQ ID NO: 32179

SEQ ID NO: 32200 - DNA, 201 bp, Homo sapiens
atgagcagtcctccgaggacatctgggctgcgtgctgtgttgtcacaaagaacttgagagagatttgctgggataaggcgggacatttctttgatctcccrgacttcttatcgtggaaggcaacaggtgtcacagcacggtctctctgctccctggtgtgtaagtggacatattcagcagagaaaggctgggacgacagtt

SEQ ID NO: 32201 - DNA, 201 bp, Homo sapiens; identical to SEQ ID NO: 32173

SEQ ID NO: 32202 - DNA, 201 bp, Homo sapiens; identical to SEQ ID NO: 32174

SEQ ID NO: 32203 - DNA, 201 bp, Homo sapiens; identical to SEQ ID NO: 32183

SEQ ID NO: 32204 - DNA, 201 bp, Homo sapiens; identical to SEQ ID NO: 32184

SEQ ID NO: 32205 - DNA, 201 bp, Homo sapiens
ggtactatgtgggtgtggacgttggaacaggcagtgtccgtgcagctctggtggaccagagtggggtcctgttggcttttgcagaccagccaattaagaaktgggagccccagttcaaccaccatgagcagtcctccgaggacatctgggctgcgtgctgtgttgtcacaaagaacttgagagagatttgctgggataagg

SEQ ID NO: 32206 - DNA, 201 bp, Homo sapiens; identical to SEQ ID NO: 32179

SEQ ID NO: 32207 - DNA, 201 bp, Homo sapiens; identical to SEQ ID NO: 32180

SEQ ID NO: 32208 - DNA, 201 bp, Homo sapiens; identical to SEQ ID NO: 32173

SEQ ID NO: 32209 - DNA, 201 bp, Homo sapiens; identical to SEQ ID NO: 32174

SEQ ID NO: 32210 - DNA, 201 bp, Homo sapiens; identical to SEQ ID NO: 32183

SEQ ID NO: 32211 - DNA, 201 bp, Homo sapiens; identical to SEQ ID NO: 32184

SEQ ID NO: 32212 - DNA, 201 bp, Homo sapiens
tgtatgagtgcagctgccccgagctggatcagctggtggacatctgtcggaagtttggggctcaagggtcacgacttactggagcaggatggggaggctgyacagtatcaatggtacctgcggacaagctgcccagctttctagcaaatgtgcacaaagcttattaccagaggagtgatggaagcttagcaccggagaagc

SEQ ID NO: 32213 - DNA, 201 bp, Homo sapiens
taggttactgaagctaaaggagatgtttaactccaagtttggatctattcccaagttttatgttcgagcaccaggaagagtcaacataataggagagcatrtagattattgtggatattctgttcttcctatggctgtagaacaagatgtgctaatagctgtagaacctgtgaaaacgtacgctctccaactggccaatac

SEQ ID NO: 32214 - DNA, 201 bp, Homo sapiens
tgctttggtctgttgtgctggcttggtgacgctcacagtgctgggaaggaatctatccaaggtggaacttgcagaaatctgtgccaagagtgagcgttacrttggcactgaaggaggaggcatggaccagtctatatcatttcttgcagaagaaggaactgccaagttgatagaatttagtcctctgagggcaaccgatgt

SEQ ID NO: 32215 - DNA, 201 bp, Homo sapiens
tgcccagctttctagcaaatgtgcacaaagcttattaccagaggagtgatggaagcttagcaccggagaagcaaagtttgtttgctaccaaacctggaggyggggctttggttttgcttgaggcctgaaaaaatgtaaaaagtctgagagaaactacttagggcacttaggaattggcaggactttctgtgccacagtaaa

SEQ ID NO: 32216 - DNA, 201 bp, Homo sapiens; identical to SEQ ID NO: 32212

SEQ ID NO: 32217 - DNA, 201 bp, Homo sapiens; identical to SEQ ID NO: 32213

SEQ ID NO: 32218 - DNA, 201 bp, Homo sapiens; identical to SEQ ID NO: 32214

SEQ ID NO: 32219 - DNA, 201 bp, Homo sapiens
ttgccctcccttcccccatgctggagaagcagggcccgggcccggtgcgggaacggggaggagtggttggtgccttagcaactaaagctggcaactgggamatcgtccggtgctgcaggtctcagccgaagggcgtcggaaactgcgctcgcatcgagcagtttccagcctcctgggtaaaggagcagtctcctcccttgc

SEQ ID NO: 32220 - DNA, 201 bp, Homo sapiens; identical to SEQ ID NO: 32215

SEQ ID NO: 32221 - DNA, 201 bp, Homo sapiens
tccctgatggtctttttttggatgctgacatgtacaacgctctctgtaagaccctgcagcgtgactgtttggtgctgcagagcttcaagataatggattayagcctcttgatgtcaatccataatatagatcatgcacaacgagagcccttaagcagtgaaacacagtactcagttgatactcgaagaccggccccccaaa

SEQ ID NO: 32222 - DNA, 201 bp, Homo sapiens
caggcgttcaccttggtcgtcctgatgttttacctcagactccacctttggaggaaatcagtgagggctcgcctattcctgaccccagtttctcacctctrgttggagagactttgcaaatgctaactacaagtacaaccttggaaaagcttgaagttgcagagtcagagttcacccattaagcgcaaagcctcagaagac

SEQ ID NO: 32223 - DNA, 201 bp, Homo sapiens
atcttttaccaagatcggtaaaaatgcatatcaaatatgacctcaaaggctcaacctacaaacggcgggcttcccagaaagagcgagagaagcctcttccyacatttaaagacctagacttcttacaagacatccctgatggtctttttttggatgctgacatgtacaacgctctctgtaagaccctgcagcgtgactgtt

SEQ ID NO: 32224 - DNA, 201 bp, Homo sapiens
ctggaagaatactcctgtaatctctgtaaaggtttttgggggataagggtgtttaaccacctcccagctttcttcttctttttttttttctgaaaaaaggaaaaagcacacagcacacaatttcaagccattttcagatcagaactccagaagtgttgacaagatgcctattcgtagagttccctcagaagagccatggtg

SEQ ID NO: 32225 - DNA, 201 bp, Homo sapiens
agaatactcctgtaatctctgtaaaggtttttgggggataagggtgtttaaccacctcccagctttcttcttctttttttttttctgaaaaaaggaaaaagcacacagcacacaatttcaagccattttcagatcagaactccagaagtgttgacaagatgcctattcgtagagttccctcagaagagccatggtgtttat

SEQ ID NO: 32226 - DNA, 201 bp, Homo sapiens
ttcttaaactcatggggagacagcagattcttgccttggtgaggtcattgctgtgccatatgtcctacccccctgtcttcatgcagggaagttggaaatgsgggctacatatgccctctcctccccgtctacaagagttgtggttttccatctgatccttccactcttgtcaggggaagaagggggcctggtatctcaggc

SEQ ID NO: 32227 - DNA, 201 bp, Homo sapiens
gaagaagaaccttctctccttcctcttcctcatgaatgggccttagtgcctcagagagttgaggaccgcagcatcccctccactccagagttgggtggtayggattttcaactggccaaccctttgcctccactattgaatttttttcagacccccattcttcatgctggaaatgggattgctggacttggcagctttctt

SEQ ID NO: 32228 - DNA, 201 bp, Homo sapiens; identical to SEQ ID NO: 32221

SEQ ID NO: 32229 - DNA, 201 bp, Homo sapiens
cctgcgttcaccttggtcgtcctgatgttttacctcagactccacctttggaggaaatcagtgagggctcgcctattcctgaccccagtttctcacctctrgttggagagactttgcaaatgctaactacaagtacaaccttggaaaagcttgaagttgcagagtcagagttcacccattaagcgcaaagcctcagaagac

SEQ ID NO: 32230 - DNA, 201 bp, Homo sapiens; identical to SEQ ID NO: 32223

SEQ ID NO: 32231 - DNA, 201 bp, Homo sapiens; identical to SEQ ID NO: 32224

SEQ ID NO: 32232 - DNA, 201 bp, Homo sapiens; identical to SEQ ID NO: 32225

SEQ ID NO: 32233 - DNA, 201 bp, Homo sapiens; identical to SEQ ID NO: 32226

SEQ ID NO: 32234 - DNA, 201 bp, Homo sapiens; identical to SEQ ID NO: 32227

SEQ ID NO: 32235 - DNA, 201 bp, Homo sapiens; identical to SEQ ID NO: 32221

SEQ ID NO: 32236 - DNA, 201 bp, Homo sapiens; identical to SEQ ID NO: 32222

SEQ ID NO: 32237 - DNA, 201 bp, Homo sapiens; identical to SEQ ID NO: 32223

SEQ ID NO: 32238 - DNA, 201 bp, Homo sapiens; identical to SEQ ID NO: 32224

SEQ ID NO: 32239 - DNA, 201 bp, Homo sapiens; identical to SEQ ID NO: 32225

SEQ ID NO: 32240 - DNA, 201 bp, Homo sapiens; identical to SEQ ID NO: 32226

SEQ ID NO: 32241 - DNA, 201 bp, Homo sapiens; identical to SEQ ID NO: 32227

SEQ ID NO: 32242 - DNA, 201 bp, Homo sapiens
aaaacttatttaaagatgctttatatgtagaaattgtttcaaatcatactctaacccttagtgagggcaaagtgtagttggtagaagaaattgctaaatamctatctaatgtgctatgtttatcaaatcgtgtactaaaatggaaagctagttttgagaaattattcagaagccttgttattttaaaaatgaaatatttca

SEQ ID NO: 32243 - DNA, 201 bp, Homo sapiens
aggattaacagatgatgagaagacttactacagcctcatcacatccttcagtgaactatacctgccttcctcaacctagagaagggttgttaaggcagacygccctgttccccagagttgtccctgtagtgtctaggtttattctaatggtaaaagtaacttacttaaaaaacatatgtacacatatgtatgcaagtatgt

SEQ ID NO: 32244 - DNA, 201 bp, Homo sapiens
ctcgggctcctgccccgtcctgctcacgagttcagggctcctgggcggccgccttttccagttccaggtgtgcagaagtgtcctctccccacgcgcggcgkgctgcacttggtcgctggctccgagatcgcgcggggccgccggaagcccaagacggtaccgggggccgcagccgcagccggcgccgccctccgccctccc

SEQ ID NO: 32245 - DNA, 201 bp, Homo sapiens
cgccccttttcctgcccacgtggtctcgggctcctgccccgtcctgctcacgagttcagggctcctgggcggccgccttttccagttccaggtgtgcagargtgtcctctccccacgcgcggcgggctgcacttggtcgctggctccgagatcgcgcggggccgccggaagcccaagacggtaccgggggccgcagccgca

SEQ ID NO: 32246 - DNA, 201 bp, Homo sapiens
atacacggaaccactattctattacaggcatgagccaccgtgctcagccataagaccataaattctgtcagctccttccaccttcgaagctggctggcttygtgacttgctttggccaaaagaatgaggcggaacaaattgcgacctttctaggctaaaccttaaggggcttactccctgcgaacactgccaccttgtgga

SEQ ID NO: 32247 - DNA, 201 bp, Homo sapiens
ctatatccatacacggaaccactattctattacaggcatgagccaccgtgctcagccataagaccataaattctgtcagctccttccaccttcgaagctgrctggctttgtgacttgctttggccaaaagaatgaggcggaacaaattgcgacctttctaggctaaaccttaaggggcttactccctgcgaacactgccac

SEQ ID NO: 32248 - DNA, 201 bp, Homo sapiens
caaattgtgctatatccatacacggaaccactattctattacaggcatgagccaccgtgctcagccataagaccataaattctgtcagctccttccacctkcgaagctggctggctttgtgacttgctttggccaaaagaatgaggcggaacaaattgcgacctttctaggctaaaccttaaggggcttactccctgcgaa

SEQ ID NO: 32249 - DNA, 201 bp, Homo sapiens
gtaatgatgtgtccatattccaagacagctgatggctttgaaacccacctgggagtcaaccacctgggccacttcctcctcacctacctgctcctggagcrgctaaaggtgtctgcccctgcacgggtggttaatgtgtcctcggtggctcaccacattggcaagattcccttccacgacctccagagcgagaagcgctac

SEQ ID NO: 32250 - DNA, 201 bp, Homo sapiens
acggcacgggagggggcgcagaccagcctgcactgcgccctggctgagggcctggagcccctgagtggcaagtacttcagtgactgcaagaggacctgggkgtctccaagggcccgaaataacaaaacagctgagcgcctatggaatgtcagctgtgagcttctaggaatccggtgggagtagctggtggaagagctgcag

SEQ ID NO: 32251 - DNA, 201 bp, Homo sapiens
catcgtctagtgaggaaggcatgtgtgaatctctggacaaggcagcgctgagctgttgtggactagtggtgcaggcaagggattatttctgaccaaggatrgtgagaaggtttcccatacagactgacgtctggattgagctttgaagaagaaagccaggactggagcagacgacgaggagggaagagtttgaccagatat

SEQ ID NO: 32252 - DNA, 201 bp, Homo sapiens
tgtgctcagtgagctcatcgtctagtgaggaaggcatgtgtgaatctctggacaaggcagcgctgagctgttgtggactagtggtgcaggcaagggattayttctgaccaaggatggtgagaaggtttcccatacagactgacgtctggattgagctttgaagaagaaagccaggactggagcagacgacgaggagggaag

SEQ ID NO: 32253 - DNA, 201 bp, Homo sapiens
aagctgatgctggggtgggagcccgtggtcccgctggaggaaggtttaaacaaagcaattcactacttccgtaaagaactcgagtaccaggcaaataatcrgtacatccccaaaccaaagcctgccagaataaagaaaggacggactcgccacagctgaactcctcacttttaggacacaagactaccattgtacacttga

SEQ ID NO: 32254 - DNA, 201 bp, Homo sapiens
ggtgagacctgcagtgggctcaggagtctgcatttgtgggtgaccgagggggcctcccctccctctagagtccacactgtggagagcatcaggaagggaarggcctgcatcttgtgctcagtgagctcatcgtctagtgaggaaggcatgtgtgaatctctggacaaggcagcgctgagctgttgtggactagtggtgcag

SEQ ID NO: 32255 - DNA, 201 bp, Homo sapiens
attttgccttgcactttttgaatctctctttttatgtaaaatagcgtagatgcatctctgcgtattttcaagtttttttatcttgctgtgagagcatatgytgtgactgtcgttgacagttttatttactggtttctttgtgaagctgaaaaggaacattaagcgggacaaaaaatgccgattttatttataaaagtgggt

SEQ ID NO: 32256 - DNA, 201 bp, Homo sapiens
aatctctggacaaggcagcgctgagctgttgtggactagtggtgcaggcaagggattatttctgaccaaggatggtgagaaggtttcccatacagactgaygtctggattgagctttgaagaagaaagccaggactggagcagacgacgaggagggaagagtttgaccagatataccatctggcatctccagcctcccctc

SEQ ID NO: 32257 - DNA, 201 bp, Homo sapiens
cctagcagtattgtcaggtggtggtgcgccggcattgattttagggcagataaaagaattctgtgtgagagctttatgtttctcttttaattcagagtttytccaaggtctacttttgagttgcaaacttgactttgaaatattcctgttggtcatgatcaaggatatttgaaatcactactgtgttttgctgcgtatctg

SEQ ID NO: 32258 - DNA, 201 bp, Homo sapiens; identical to SEQ ID NO: 32253

SEQ ID NO: 32259 - DNA, 201 bp, Homo sapiens; identical to SEQ ID NO: 32255

SEQ ID NO: 32260 - DNA, 201 bp, Homo sapiens
ctgacaaactcatgatggacggccacgaggtgaccgtggtggacaatttcttcacgggcaggaagagaaacgtggagcactggatcggacatgagaacttygagttgattaaccacgacgtggtggagcccctctacatcgaggttgaccagatataccatctggcatctccagcctcccctccaaactacatgtataatc

SEQ ID NO: 32261 - DNA, 201 bp, Homo sapiens; identical to SEQ ID NO: 32257

SEQ ID NO: 32262 - DNA, 201 bp, Homo sapiens
gcaaaagacatgcaccggatcctctacctcttctacgaggatattaaaaaaaatccaaaacatgagatccacaaggtgttggaattcttggagaaaacttktcaggtgatgttataaacaagattgtccaccatacctcatttgatgtaatgaaggataatcccatggccaaccatactgcggtacctgctcacatattca

SEQ ID NO: 32263 - DNA, 201 bp, Homo sapiens
ggtgtcctactaccactttcacaggatggcttcctttatgcctgatcctcagaacttagaggaattttatgagaaattcatgtccggaaaagttgttggcrggtcctggtttgaccatgtgaaaggatggtgggctgcaaaagacatgcaccggatcctctacctcttctacgaggatattaaaaaaaatccaaaacatga

SEQ ID NO: 32264 - DNA, 185 bp, Homo sapiens
attcccaatggcgaagattgagaaaaacgctcccacgatggaaaaaaagccagaactgtttaacatcatggaagtagatggagtycctacgttgatattatcaaaagaatggtgggaaaaagtctgtaatttccaagccaagcctgatgatcttattctggcaacttacccaaagtcaggtacaa

SEQ ID NO: 32265 - DNA, 201 bp, Homo sapiens
gaattcttggagaaaacttgtcaggtgatgttataaacaagattgtccaccatacctcatttgatgtaatgaaggataatcccatggccaaccatactgcrgtacctgctcacatattcaatcactccatctcaaaatttatgaggaaagggatgcctggagactggaagaaccactttactgtggctatgaatgagaact

SEQ ID NO: 32266 - DNA, 201 bp, Homo sapiens
aaaacgctcccacgatggaaaaaaagccagaactgtttaacatcatggaagtagatggagtccctacgttgatattatcaaaagaatggtgggaaaaagtmtgtaatttccaagccaagcctgatgatcttattctggcaacttacccaaagtcaggtacaacatggatgcatgaaattttagacatgattctaaatgatg

SEQ ID NO: 32267 - DNA, 175 bp, Homo sapiens
caaccatactgcggtacctgctcacatattcaatcactccatctcaaaatttatgaggaaagggatgcctggagactggaagaaccactttactgtggctwtgaatgagaactttgataagcattatgaaaagaagatggcagggtccacactgaacttctgcctggagatctga

SEQ ID NO: 32268 - DNA, 201 bp, Homo sapiens
ccggatcctctacctcttctacgaggatattaaaaaaaatccaaaacatgagatccacaaggtgttggaattcttggagaaaacttgtcaggtgatgttataaacaagattgtccaccatacctcatttgatgtaatgaaggataatcccatggccaaccatactgcggtacctgctcacatattcaatcactccatctca

SEQ ID NO: 32269 - DNA, 201 bp, Homo sapiens
gaaattcatgtccggaaaagttgttggcaggtcctggtttgaccatgtgaaaggatggtgggctgcaaaagacatgcaccggatcctctacctcttctacraggatattaaaaaaaatccaaaacatgagatccacaaggtgttggaattcttggagaaaacttgtcaggtgatgttataaacaagattgtccaccatacc

SEQ ID NO: 32270 - DNA, 201 bp, Homo sapiens
cctcagaacttagaggaattttatgagaaattcatgtccggaaaagttgttggcaggtcctggtttgaccatgtgaaaggatggtgggctgcaaaagacaygcaccggatcctctacctcttctacgaggatattaaaaaaaatccaaaacatgagatccacaaggtgttggaattcttggagaaaacttgtcaggtgatg

SEQ ID NO: 32271 - DNA, 201 bp, Homo sapiens
cccaaagtcaggtacaacatggatgcatgaaattttagacatgattctaaatgatggtgatgtggagaaatgcaaaagagcccagactctagatagacacrctttccttgaactgaaatttccccataaagaaaaaccagatttggagttcgttcttgaaatgtcctcaccacaactgataaaaacacatctcccttcaca

SEQ ID NO: 32272 - DNA, 107 bp, Homo sapiens
attcccmatggcgaagattgagaaaaacgctcccacgatggaaaaaaagccagaactgtttaacatcatggaagtagatggagtccctacgttgatattatcaaaag

SEQ ID NO: 32273 - DNA, 201 bp, Homo sapiens
cccttattttcccacaacccaaccattctctaaagcagggcagtgaataggtcttaggccagtgcacacaggaagaaattgaggcttatggatggggatgrcttccctaagatcccatgggacaaggatgtggcaaggcttggatgagatggggcaccggtgcccaggaatttgaacattttcctttacccaggaaatctc

SEQ ID NO: 32274 - DNA, 201 bp, Homo sapiens
caggaaggggtgaaatagctggcagatacaaaagacagtggcttttatcattttaaatggtaggaatttaaagtgtgacttcagggagaaacaaacttgcaaaaaaaaaaaaaaaatctcaggccatgttggggtaacccagcaagggccagtgatgatttcccccagctcatccccttattttcccacaacccaaccatt

SEQ ID NO: 32275 - DNA, 201 bp, Homo sapiens
tgggccttctctatgatggtccaacaaactctcagtgtccaccctgtccctgtatctcccatggaagatgaataatgtcaggtgttctttgggtcaaaggycccagggcagtctggaggcttagagggcagagtggtgtcattccatgtaaagttaggcttctgaggggtcaggcagaatatggtgtccatatcttccata

SEQ ID NO: 32276 - DNA, 201 bp, Homo sapiens
ggaagagttttaggggcttgatcattatggggcttccttctatatctgagaactgctctgggtggtgagatgtggactctgatccttaattggaatgttcrgagaatgagtgtctggtggccttgaagtgttggacagaaaagtatcagtataaaagcctggagctcagggtaattaatgtagttcatggttccttagtga

SEQ ID NO: 32277 - DNA, 201 bp, Homo sapiens
aaaaatggtcaacccaactggagggtaggttagaagaaaaaaaacataaacgtggatagtcatgtcatctcaaatccctgacttggcttccccattacttracagtctgagctccttcttagcctgtgaccagcttcaaatcacagccaagtaaaacaaggaaataggaaaagtaaatccaactagaagagacaagctgag

SEQ ID NO: 32278 - DNA, 201 bp, Homo sapiens
ttgggacaaaatgaagaaagccacccttccttaggctgcagcttgccactcctgggctgggtaaacaggtcatcagcaccaggctcaaccaggagtaacaytctggaagacatgggtgagcccaagaggaagcatgaacaggacgctgttcctaagtcatgtcaacaggttgtgctgggccaggatccccagggaaaaaaa

SEQ ID NO: 32279 - DNA, 165 bp, Homo sapiens
gatatattttttgactgtacattacagtgaagtgtaatctttttacacctgcaagtccatcttatttattcttgtaaatgttccctgacaatgtttgtaayatggctgtgttaaaaaatctatacaataaagctgtgaccctgagattcatgttttcctaagata

SEQ ID NO: 32280 - DNA, 201 bp, Homo sapiens
ccagtgcacacaggaagaaattgaggcttatggatggggatgacttccctaagatcccatgggacaaggatgtggcaaggcttggatgagatggggcaccrgtgcccaggaatttgaacattttcctttacccaggaaatctccggagccaacaccaccacccccagggggtctccccaccccaccccatttacagggtga

SEQ ID NO: 32281 - DNA, 201 bp, Homo sapiens
acattgacggataccatcgacctcggcactacattgcgactcaaggtccgatgcaggagactgtaaaggacttttggagaatgatctggcaggagaactcygccagcatcgtcatggtcacaaacctggtggaagtgggcagggtgaaatgtgtgcgatactggccagatgacacggaggtctacggagacattaaagtca

SEQ ID NO: 32282 - DNA, 201 bp, Homo sapiens
  misc_feature (1)...(201): n = A,T,C or G
aaatctcaggccatgttggggtaacccagcaagggccagtgatgatttcccccagctcatccccttattttcccacaacccaaccattctctaaagcaggncagtgaataggtcttaggccagtgcacacaggaagaaattgaggcttatggatggggatgacttccctaagatcccatgggacaaggatgtggcaaggct

SEQ ID NO: 32283 - DNA, 201 bp, Homo sapiens
taacacaaatcctaagatttttttctgctcaggaaggggtgaaatagctggcagatacaaaagacagtggcttttatcattttaaatggtaggaatttaargtgtgacttcagggagaaacaaacttgcaaaaaaaaaaaaaaaatctcaggccatgttggggtaacccagcaagggccagtgatgatttcccccagctca

SEQ ID NO: 32284 - DNA, 201 bp, Homo sapiens
ggagcagcaagagatgagccagggtccaggagacagatgcccatcgcgagtacagactttgtcctattggcaacaaggagtccatggagctttagagagaygcactcagcttcgtgttggccaagactccttctgggccaatggggctgcctcttttcctttcatcagacactgtgaaaacattcccttaagcgtgcactt

SEQ ID NO: 32285 - DNA, 201 bp, Homo sapiens
agtcagtaaaaacaattccctgttccttcaggctatgaatggaccagccagggaaactctcgaccttgatctctagccagtgcttaggcccaatatctgayagcctcaggtgggctgggacctaggaagctccatcttgaaggctggtctagccccagacagggcatgaggggcagagaattcaagaaggtacagctttgg

SEQ ID NO: 32286 - DNA, 201 bp, Homo sapiens
aggaaggggtgaaatagctggcagatacaaaagacagtggcttttatcattttaaatggtaggaatttaaagtgtgacttcagggagaaacaaacttgcaaaaaaaaaaaaaaaatctcaggccatgttggggtaacccagcaagggccagtgatgatttcccccagctcatccccttattttcccacaacccaaccattc

SEQ ID NO: 32287 - DNA, 201 bp, Homo sapiens
tgatccagcagcaaaacatcattgacgtgttccacatcgtgaaaacactgcgtaacaacaaatccaacatggtggagaccctggaacagtataaatttgtrtacgaggtggcactggaatatttaagctccttttagctcaatgggatggggaacctgccggagtccagaggctgctgtgaccaagcccccttttgtgtga

SEQ ID NO: 32288 - DNA, 201 bp, Homo sapiens
atgaatttcagaccctcaacattgtgacaccccgtgtgcggcccgaggactgcagcattgggctcctgccccggaaccatgataagaatcgaagtatggaygtgctgcctctggaccgctgcctgcccttccttatctcagtggacggagaatccagcaattacatcaacgcagcactgatggatagccacaagcagcctg

SEQ ID NO: 32289 - DNA, 201 bp, Homo sapiens
gtgggcaagtctgaggacacacttcatgagcagctggggtctggaaggctcctcactttaccctagccacacataattactgggtgcctacagcacctagyaccttggagggggcactattaggaaatcgagattactatggcacaattaattcctgggtaaggcatggggttgtggtggacagagctcagtctttagttt

SEQ ID NO: 32290 - DNA, 201 bp, Homo sapiens
ccaaaggaagctggccaagaagcagaaggagacccagagtggagcccagagggagatggggcctgtggcctctgccgacaaacccaccaccaagctcagcrccagccgcaatgatgaaggcttctcttctagttctcaggacgtcaacggattcacagatggcagccgcggggagctttcccagcccaccctcacgatcca

SEQ ID NO: 32291 - DNA, 201 bp, Homo sapiens
tccttggtacctcactgccttgggacaaaatgaagaaagccacccttccttaggctgcagcttgccactcctgggctgggtaaacaggtcatcagcaccargctcaaccaggagtaacactctggaagacatgggtgagcccaagaggaagcatgaacaggacgctgttcctaagtcatgtcaacaggttgtgctgggcca

SEQ ID NO: 32292 - DNA, 201 bp, Homo sapiens
agtggtgtcattccatgtaaagttaggcttctgaggggtcaggcagaatatggtgtccatatcttccatagctctgcagattcttggatgaagtcaagcayagtttgctagacccaggtcactcctctgagtataactaggacccatgagtgaaacttaatagctgtaaggaagaacctgctgtctgccagagaggataag

SEQ ID NO: 32293 - DNA, 201 bp, Homo sapiens
ccaacaccgtggcagacttctggaggctggtgttcgattacaactgctcctctgtggtgatgctgaatgagatggacactgcccagttctgtatgcagtaytggcctgagaagacctccgggtgctatgggcccatccaggtggagttcgtctccgcagacatcgacgaggacatcatccacagaatattccgcatctgta

SEQ ID NO: 32294 - DNA, 201 bp, Homo sapiens
tcatcctgaaggaagtggaatatcgcaccaccacaggcacgtgggcagagacccacatagtcgactctcccaactataagctgtggcatctggaccccgaygttgagtatgagatccgagtgctcctcacacgaccaggtgaggggggtacgggaccgccagggcctcccctcaccaccaggaccaagtgtgcagatccgg

SEQ ID NO: 32295 - DNA, 201 bp, Homo sapiens
ttatagtgtggctctagggaccaatgggttcacctgggagcagattaacacatgggagaaaccaatgctggaccaggcagtgcccacaggatctttcatgrtggtgaacagctctgggagagcctctggccagaaggcccaccttctcctgccaaccctgaaggagaatgacacccactgcatcgacttccattactactt

SEQ ID NO: 32296 - DNA, 201 bp, Homo sapiens
gatatgggaacatcatatcctacgaccattcccgggtgaggctgctggtgctggatggagacccgcactctgactacatcaatgccaactacattgacggrtaccatcgacctcggcactacattgcgactcaaggtccgatgcaggagactgtaaaggacttttggagaatgatctggcaggagaactccgccagcatcg

SEQ ID NO: 32297 - DNA, 201 bp, Homo sapiens
cctctgtggtgatgctgaatgagatggacactgcccagttctgtatgcagtactggcctgagaagacctccgggtgctatgggcccatccaggtggagttygtctccgcagacatcgacgaggacatcatccacagaatattccgcatctgtaacatggcccggccacaggatggttatcgtatagtccagcacctccagt

SEQ ID NO: 32298 - DNA, 201 bp, Homo sapiens
ggaaggggtgaaatagctggcagatacaaaagacagtggcttttatcattttaaatggtaggaatttaaagtgtgacttcagggagaaacaaacttgcaaaaaaaaaaaaaaaatctcaggccatgttggggtaacccagcaagggccagtgatgatttcccccagctcatccccttattttcccacaacccaaccattct

SEQ ID NO: 32299 - DNA, 201 bp, Homo sapiens
taaagtgtgacttcagggagaaacaaacttgcaaaaaaaaaaaaaaaatctcaggccatgttggggtaacccagcaagggccagtgatgatttcccccagytcatccccttattttcccacaacccaaccattctctaaagcagggcagtgaataggtcttaggccagtgcacacaggaagaaattgaggcttatggatgg

SEQ ID NO: 32300 - DNA, 201 bp, Homo sapiens
gccatgagtgacagccagaaccagtgaaggtccaagtaggacacagagcagggcttttcttaccatacacattatctccagaggttatttctaccccactccctattcaaggcctgttggagcacactgcaaaagcaaaagcacagtaactcaatttacacatgattataatcatttccagtgcacacatttcatcaccag

SEQ ID NO: 32301 - DNA, 201 bp, Homo sapiens
aggtaatggcaatgagacttctccgtgctgttttcttcatcttctctaagccaagcaattattttatggagggaaaataaggccagaaacttctgagcagrtaactccacaaatggaaatttagtactttcttcctgatgccagttcttctgggaagcgcagaatttcagatatattttagtaacacattcccagctcccc

SEQ ID NO: 32302 - DNA, 201 bp, Homo sapiens
acaaacccaccaccaagctcagcgccagccgcaatgatgaaggcttctcttctagttctcaggacgtcaacggattcacagatggcagccgcggggagctytcccagcccaccctcacgatccagactcatccctaccgcacctgtgaccctgtggagatgagctacccccgggaccagttccaacccgccatccgggtgg

SEQ ID NO: 32303 - DNA, 201 bp, Homo sapiens
gaaggggtgaaatagctggcagatacaaaagacagtggcttttatcattttaaatggtaggaatttaaagtgtgacttcagggagaaacaaacttgcaaaaaaaaaaaaaaaatctcaggccatgttggggtaacccagcaagggccagtgatgatttcccccagctcatccccttattttcccacaacccaaccattctc

SEQ ID NO: 32304 - DNA, 201 bp, Homo sapiens
gaggctggtgttcgattacaactgctcctctgtggtgatgctgaatgagatggacactgcccagttctgtatgcagtactggcctgagaagacctccgggwgctatgggcccatccaggtggagttcgtctccgcagacatcgacgaggacatcatccacagaatattccgcatctgtaacatggcccggccacaggatgg

SEQ ID NO: 32305 - DNA, 201 bp, Homo sapiens
ttcattgccattgacaccatgcttgacatggccgagaatgaaggggtggtggacatcttcaactgcgtgcgtgagctccgggcccaaagggtcaacctggkacagacagaggagcaatatgtgtttgtgcacgatgccatcctggaagcgtgcctctgtggcaacactgccatccctgtgtgtgagttccgttctctctac

SEQ ID NO: 32306 - DNA, 201 bp, Homo sapiens
aaggtccaagtaggacacagagcagggcttttcttaccatacacattatctccagaggttatttctaccccactccctattcaaggcctgttggagcacaytgcaaaagcaaaagcacagtaactcaatttacacatgattataatcatttccagtgcacacatttcatcaccaggtggatcctgagctagcccatgtaaa

SEQ ID NO: 32307 - DNA, 201 bp, Homo sapiens
ccacatttcagtgcattgctggtgggaagtggtctcagcatgacaagctttggctccagcaatggaatggcagggacacggccctgatggtcacccgtgtrgtcaaccacaggcgcttctcagccacagtcagtgtggcagacactgcccagcggagcgtcagcaagtaccgctgtgtgatccgctctgatggtgggtctg

SEQ ID NO: 32308 - DNA, 201 bp, Homo sapiens
ttattttatggagggaaaataaggccagaaacttctgagcagataactccacaaatggaaatttagtactttcttcctgatgccagttcttctgggaagcrcagaatttcagatatattttagtaacacattcccagctccccaggaaagccagtctcatctaatttcttagtcagtaaaaacaattccctgttccttcag

SEQ ID NO: 32309 - DNA, 201 bp, Homo sapiens
tgacgtgttccacatcgtgaaaacactgcgtaacaacaaatccaacatggtggagaccctggaacagtataaatttgtatacgaggtggcactggaatatytaagctccttttagctcaatgggatggggaacctgccggagtccagaggctgctgtgaccaagcccccttttgtgtgaatggcagtaactgggctcagga

SEQ ID NO: 32310 - DNA, 201 bp, Homo sapiens
agagggggaaagtgttcaagctccggaatgaaacccaccacctctttgtgggtctgtacccagggaccacctattccttcaccatcaaggccagcacagcraagggctttgggccccctgtcaccactcggattgccaccaaaatttcagctccatccatgcctgagtacgacacagacaccccattgaatgagacagaca

SEQ ID NO: 32311 - DNA, 201 bp, Homo sapiens
acaaaatggattaaaaaaaaaatgcctatgcaacttcaaatagtctgatgcctgcttccccaggacgagtgactcttccacggtgtgctgctttccctccragcctgtggaaaggcagagcccttttgcagatacgaaagcaagcttttgccaatgatctttaatggagttaaaatgtttatggtaattgtaacctttcaa

SEQ ID NO: 32312 - DNA, 201 bp, Homo sapiens
tcgggtgtctcggaccccggtgtgcaccggaccacggggaggcggctccaaaggcgcggtgaacgttggtgagggagggcagctctgcgcagccccaagasatggctcacaacaagatcccgccgcggtggctgaactgtccccggcgcggccagccggtggcaggaagattcttacctctgaagacaatgttaggaccaa

SEQ ID NO: 32313 - DNA, 201 bp, Homo sapiens
ggacagaagcgaaaacatcatctggaccctgacacggagctcatgccaccaccacctcccaaaagaccacgccctttaacctaagacctgcctgtgacttsagggttaagaagaaagaggaatgaggaaaaaacgctgttgcccatttttgtagccagagaaattgaaaaacgactgtggcttgatgttgatacacatttg

SEQ ID NO: 32314 - DNA, 201 bp, Homo sapiens
tgatgttgatacacatttgaattttttttaaaaaaagaaagttatcgtagccagcctgtaaatacttgatgcattcgtttcctcagtgctgcaatacatcrtggacttaaacatcttatttatctgataaactcagccttaccttgtggaatctgaagattgaaatatccaaaggtttaaacaagatggaaatcaatgaaa

SEQ ID NO: 32315 - DNA, 201 bp, Homo sapiens
taaaggttaaaatgggcttgttggtggacctgacaaatacttcaaggttctatgaccgaaatgacatagaaaaagaaggaatcaaatatataaaacttcartgtaaaggacatggtgagtgccctaccactgagaatactgagacctttattcgtctgtgtgagcggtttaatgaaagaaatccacctgaacttataggtg

SEQ ID NO: 32316 - DNA, 201 bp, Homo sapiens
acttgagggttaagaagaaagaggaatgaggaaaaaacgctgttgcccatttttgtagccagagaaattgaaaaacgactgtggcttgatgttgatacacrtttgaattttttttaaaaaaagaaagttatcgtagccagcctgtaaatacttgatgcattcgtttcctcagtgctgcaatacatcatggacttaaacatc

SEQ ID NO: 32317 - DNA, 201 bp, Homo sapiens
tgatacacatttgaattttttttaaaaaaagaaagttatcgtagccagcctgtaaatacttgatgcattcgtttcctcagtgctgcaatacatcatggacktaaacatcttatttatctgataaactcagccttaccttgtggaatctgaagattgaaatatccaaaggtttaaacaagatggaaatcaatgaaaaagagg

SEQ ID NO: 32318 - DNA, 201 bp, Homo sapiens
cacctcccaaaagaccacgccctttaacctaagacctgcctgtgacttgagggttaagaagaaagaggaatgaggaaaaaacgctgttgcccatttttgtmgccagagaaattgaaaaacgactgtggcttgatgttgatacacatttgaattttttttaaaaaaagaaagttatcgtagccagcctgtaaatacttgatg

SEQ ID NO: 32319 - DNA, 201 bp, Homo sapiens
catacaccaccaggtcctttatgtgttgttctcctgggagacttctttttttaaatgccagggctacttctgctttacctcagtggtatcagcacattgtwaattacgttaaaacacacaactcactgtgatctatgggagtgatatcaaatacaaacgatgttgtgttccttctctcgaacaaaacagcaaagggaatgc

SEQ ID NO: 32320 - DNA, 201 bp, Homo sapiens
tggccttataagtagatcccatttagcccctgaacataataccatctgcagtattataaaagtcatttagaaggtcagggggataatctagaggcaggatyttggacattgtgaaggaaatgtgctccttctcagctcacttcaataactattttctgagactgaagttttttagacaagaataagaaaactttgctttct

SEQ ID NO: 32321 - DNA, 201 bp, Homo sapiens; identical to SEQ ID NO: 32312

SEQ ID NO: 32322 - DNA, 169 bp, Homo sapiens
tgttggcctcctgtatgttggaggttatgaaagaccctttgcacaaatcaaggtatgtttgttcattttcagtgtacttttcctggatgttctcttatctrgaatccatcaaaaccttgctaataataatcaacatataaaaatatcgtgttccagcactttgggaggc

SEQ ID NO: 32323 - DNA, 201 bp, Homo sapiens; identical to SEQ ID NO: 32315

SEQ ID NO: 32324 - DNA, 201 bp, Homo sapiens; identical to SEQ ID NO: 32312

SEQ ID NO: 32325 - DNA, 201 bp, Homo sapiens; identical to SEQ ID NO: 32313

SEQ ID NO: 32326 - DNA, 201 bp, Homo sapiens; identical to SEQ ID NO: 32315

SEQ ID NO: 32327 - DNA, 201 bp, Homo sapiens; identical to SEQ ID NO: 32314

SEQ ID NO: 32328 - DNA, 201 bp, Homo sapiens; identical to SEQ ID NO: 32318

SEQ ID NO: 32329 - DNA, 201 bp, Homo sapiens; identical to SEQ ID NO: 32317

SEQ ID NO: 32330 - DNA, 201 bp, Homo sapiens; identical to SEQ ID NO: 32316

SEQ ID NO: 32331 - DNA, 201 bp, Homo sapiens; identical to SEQ ID NO: 32312

SEQ ID NO: 32332 - DNA, 201 bp, Homo sapiens; identical to SEQ ID NO: 32313

SEQ ID NO: 32333 - DNA, 201 bp, Homo sapiens; identical to SEQ ID NO: 32315

SEQ ID NO: 32334 - DNA, 201 bp, Homo sapiens; identical to SEQ ID NO: 32314

SEQ ID NO: 32335 - DNA, 201 bp, Homo sapiens; identical to SEQ ID NO: 32318

SEQ ID NO: 32336 - DNA, 201 bp, Homo sapiens; identical to SEQ ID NO: 32317

SEQ ID NO: 32337 - DNA, 201 bp, Homo sapiens; identical to SEQ ID NO: 32316

SEQ ID NO: 32338 - DNA, 201 bp, Homo sapiens; identical to SEQ ID NO: 32311

SEQ ID NO: 32339 - DNA, 201 bp, Homo sapiens; identical to SEQ ID NO: 32312

SEQ ID NO: 32340 - DNA, 201 bp, Homo sapiens; identical to SEQ ID NO: 32313

SEQ ID NO: 32341 - DNA, 201 bp, Homo sapiens; identical to SEQ ID NO: 32314

SEQ ID NO: 32342 - DNA, 201 bp, Homo sapiens; identical to SEQ ID NO: 32315

SEQ ID NO: 32343 - DNA, 201 bp, Homo sapiens; identical to SEQ ID NO: 32316

SEQ ID NO: 32344 - DNA, 201 bp, Homo sapiens; identical to SEQ ID NO: 32317

SEQ ID NO: 32345 - DNA, 201 bp, Homo sapiens; identical to SEQ ID NO: 32318

SEQ ID NO: 32346 - DNA, 201 bp, Homo sapiens; identical to SEQ ID NO: 32319

SEQ ID NO: 32347 - DNA, 201 bp, Homo sapiens; identical to SEQ ID NO: 32320

SEQ ID NO: 32348 - DNA, 159 bp, Homo sapiens
aaaaaagtgaaaatggatttctgtcccataccatacataaaaatcaatttcaggtgtakcaggaaccaaaacagggaaaacaaaactttaaaacacttagagaaattcctcaaggatctagaactagaaataccatttgacccagcaatcccattactg

SEQ ID NO: 32349 - DNA, 201 bp, Homo sapiens
gagatgaaagggacatgcaactaatagcccttgaacagctatgcatgctgcttttgatgtctgacaacgtggatcgttgttttgaaacatgtcctcctcgyactttcttaccagccctttgcaaaatttttcttgatgaaagtgctccagacaatgtattagaggtgacagcccgtgccataacatactacctggatgtat

SEQ ID NO: 32350 - DNA, 201 bp, Homo sapiens
ttgtaatggaacacagtatagtttcaggagctgatgtccatgaaccaattgttgttctttcatctgctgaaaacgtccctcaaacagaagtagggtcatcytccagtgcaagcaccagcaccttaacagcggaaacgggaagtgaaaatgctgaaaggaagttaggccctgatagttctgttcgtactcctggggagtcta

SEQ ID NO: 32351 - DNA, 201 bp, Homo sapiens
tacagcaacaacagttttatcagttggtcaatctttaagtaacactttaaccaccagcctcacatcaacttccagtgagagtgacacaggtcaggaagcakaatattccttatatgatttccttgatagctgccgtgccagtactctattggctgagctcgatgatgatgaggacttacctgagccagatgaagaagatga

SEQ ID NO: 32352 - DNA, 196 bp, Homo sapiens
gtgtttgcagctcaaaaataaagatgtattaaggggggaaaacctggtctaagtgcaaggcacacttacagcgagttttactttcggttgtattttctttktatattataaacatttatttaacttgttgccgtttgaagtaaaaaatttccaaaatgtatgctcaacaataatcattaaaatgtttgcagcgtac

SEQ ID NO: 32353 - DNA, 201 bp, Homo sapiens
taataccatttgaaactagacagctttatttcacatgtacagcatttggcgcctcaagagcaatagtatggttacagaaccgacgtgaagccactgtggarcgaacgagaaccacaagcagtgttaggcgagatgaccctggagagtttcgagttggtcgtctcaagcatgaaagagtaaaagttccacgtggcgagtcac

SEQ ID NO: 32354 - DNA, 201 bp, Homo sapiens
gtccggaaggtggatctgacagttcagaaagccgaagtgaattcttagagaagttacaaagagctcgaggccaagtaaagccatctacttcaagtcaaccyatactgtcagcaccaggacccactaaacttactgtaggaaattggtcactgacatgtttgaaagaaggagaaattgctattcataattcagatggtcagc

SEQ ID NO: 32355 - DNA, 201 bp, Homo sapiens
tcttgtggagtagaagatgtccttcagcttctgcgtattctatatatagttgcaagtgacccttattcaagaatatcccaggaagatggtgatgaacagcytcagtttacttttccaccagatgaattcactagcaaaaaaattacaacaaaaatattacagcagattgaggaaccattggcactggcaagtggggctctg

SEQ ID NO: 32356 - DNA, 201 bp, Homo sapiens
aagtgtcaacgttggcaggtccttcctctgatgatgagaatgaagaggaatcaaaaccagaaaaagaagatgaaccacaggaagatgctaaagaattgcarcaaggtaaaccatatcattggagagactggtcaatcattaggggaagggactgcttatatatttggagtgatgcagcagccttggaattatctaatggca

SEQ ID NO: 32357 - DNA, 201 bp, Homo sapiens
aaacaaagatgaagaagaatgtaatgagcccaaaggagatccggaaatggcacccatatacttgaaaaggttattgccagtgtttgcacaaacatttcagsaaactatgctgccttcaataaggaaagcaagtcttgctctaattcgaaaaatgattcatttttgctctgaagcactgttaaaagaagtttgtgattctga

SEQ ID NO: 32358 - DNA, 201 bp, Homo sapiens
gagtatatttttatttcctaaatgccatactatgaagatcaaagtcttaagtgtgtttgcagctcaaaaataaagatgtattaaggggggaaaacctggtytaagtgcaaggcacacttacagcgagttttactttcggttgtattttctttgtatattataaacatttatttaacttgttgccgtttgaagtaaaaaatt

SEQ ID NO: 32359 - DNA, 164 bp, Homo sapiens
ggggggaaaacctggtctaagtgcaaggcacacttacagcgagttttactttcggttgtattttctttgtatattataaacatttatttaacttgttgccrtttgaagtaaaaaatttccaaaatgtatgctcaacaataatcattaaaatgtttgcagcgtac

SEQ ID NO: 32360 - DNA, 201 bp, Homo sapiens
gtgatattcttaatttaacaaaagaacaacctcaggccaaagcaggcaatggacagaactcttgtggagtagaagatgtccttcagcttctgcgtattctrtatatagttgcaagtgacccttattcaagaatatcccaggaagatggtgatgaacagcctcagtttacttttccaccagatgaattcactagcaaaaaaa

SEQ ID NO: 32361 - DNA, 201 bp, Homo sapiens
gggacatgcaactaatagcccttgaacagctatgcatgctgcttttgatgtctgacaacgtggatcgttgttttgaaacatgtcctcctcgcactttcttrccagccctttgcaaaatttttcttgatgaaagtgctccagacaatgtattagaggtgacagcccgtgccataacatactacctggatgtatctgcggaat

SEQ ID NO: 32362 - DNA, 201 bp, Homo sapiens
tatgtggcatgtcttctgatgaaaggaaagcattcttgcagtttaccactggttgttcaactctacccccaggtggactggctaacctgcatcccaggctyacggttgtacgcaaggttgatgctactgatgcaagctatccatcagtcaatacatgtgtgcattaccttaagttgcctgaatattcttccgaggagatca

SEQ ID NO: 32363 - DNA, 201 bp, Homo sapiens
aatgtacccgaaggattgttggggtagatggagctataaaagcactttgtaatcgtttggttgtagttgaacttaacaacaggactagcagagacttagcygaacagtgtgtaaaggtattagaactgatatgtactcgtgagtcaggagcagtctttgaggctggtggtttgaattgtgtgcttaccttcattcgtgaca

SEQ ID NO: 32364 - DNA, 201 bp, Homo sapiens
ccaatttcagatcaaccatcttttactatgtacaaaaattgcttcaattgtcctgtaatggcaatgtgaaatcagataaacttaggcgtatttgggagccmacatacacaatcatgtacagagaaatgaaggattctgataaagaaaaggaaaatggaaaaatgggttgctggtctatagagcatgtggagcagtaccttg

SEQ ID NO: 32365 - DNA, 201 bp, Homo sapiens
aatttcagatcaaccatcttttactatgtacaaaaattgcttcaattgtcctgtaatggcaatgtgaaatcagataaacttaggcgtatttgggagcccamatacacaatcatgtacagagaaatgaaggattctgataaagaaaaggaaaatggaaaaatgggttgctggtctatagagcatgtggagcagtaccttggc

SEQ ID NO: 32366 - DNA, 201 bp, Homo sapiens
ggaaggtggatctgacagttcagaaagccgaagtgaattcttagagaagttacaaagagctcgaggccaagtaaagccatctacttcaagtcaacctataytgtcagcaccaggacccactaaacttactgtaggaaattggtcactgacatgtttgaaagaaggagaaattgctattcataattcagatggtcagcaagc

SEQ ID NO: 32367 - DNA, 201 bp, Homo sapiens; identical to SEQ ID NO: 32361

SEQ ID NO: 32368 - DNA, 201 bp, Homo sapiens; identical to SEQ ID NO: 32363

SEQ ID NO: 32369 - DNA, 201 bp, Homo sapiens; identical to SEQ ID NO: 32349

SEQ ID NO: 32370 - DNA, 103 bp, Homo sapiens
acaaagtggcaccccttcgatattctcccctatccctgtgcataattatgtaattatcagcttggttcttggtgaaacctgaataaatgcttgttgaatgrgt

SEQ ID NO: 32371 - DNA, 201 bp, Homo sapiens; identical to SEQ ID NO: 32349

SEQ ID NO: 32372 - DNA, 201 bp, Homo sapiens; identical to SEQ ID NO: 32350

SEQ ID NO: 32373 - DNA, 201 bp, Homo sapiens; identical to SEQ ID NO: 32351

SEQ ID NO: 32374 - DNA, 198 bp, Homo sapiens
gtgtttgcagctcaaaaataaagatgtattaaggggggaaaacctggtctaagtgcaaggcacacttacagcgagttttactttcggttgtattttctttktatattataaacatttatttaacttgttgccgtttgaagtaaaaaatttccaaaatgtatgctcaacaataatcattaaaatgtttgcagcgtacag

SEQ ID NO: 32375 - DNA, 201 bp, Homo sapiens; identical to SEQ ID NO: 32353

SEQ ID NO: 32376 - DNA, 201 bp, Homo sapiens; identical to SEQ ID NO: 32354

SEQ ID NO: 32377 - DNA, 201 bp, Homo sapiens; identical to SEQ ID NO: 32355

SEQ ID NO: 32378 - DNA, 201 bp, Homo sapiens; identical to SEQ ID NO: 32356

SEQ ID NO: 32379 - DNA, 201 bp, Homo sapiens; identical to SEQ ID NO: 32357

SEQ ID NO: 32380 - DNA, 201 bp, Homo sapiens; identical to SEQ ID NO: 32358

SEQ ID NO: 32381 - DNA, 166 bp, Homo sapiens
ggggggaaaacctggtctaagtgcaaggcacacttacagcgagttttactttcggttgtattttctttgtatattataaacatttatttaacttgttgccrtttgaagtaaaaaatttccaaaatgtatgctcaacaataatcattaaaatgtttgcagcgtacag

SEQ ID NO: 32382 - DNA, 201 bp, Homo sapiens; identical to SEQ ID NO: 32360

SEQ ID NO: 32383 - DNA, 201 bp, Homo sapiens; identical to SEQ ID NO: 32361

SEQ ID NO: 32384 - DNA, 201 bp, Homo sapiens; identical to SEQ ID NO: 32362

SEQ ID NO: 32385 - DNA, 201 bp, Homo sapiens; identical to SEQ ID NO: 32363

SEQ ID NO: 32386 - DNA, 201 bp, Homo sapiens; identical to SEQ ID NO: 32364

SEQ ID NO: 32387 - DNA, 201 bp, Homo sapiens; identical to SEQ ID NO: 32365

SEQ ID NO: 32388 - DNA, 201 bp, Homo sapiens; identical to SEQ ID NO: 32366

SEQ ID NO: 32389 - DNA, 195 bp, Homo sapiens
ttaattttaattgtacacaaattcttcatgaagttagaaaaaagcaagacactattcaatccattttataaagaaagcacaactttgataacaamacctgacaaagttattccaataaaaggcaattataggccaatctttcacatgattgtagattcaaaattatgccatagaatgtggaagtcagtgtggcga

SEQ ID NO: 32390 - DNA, 201 bp, Homo sapiens
gattgtaaatcatgctgctataaagacacatgcacacatatgtttatagctgcactcttcacaatagcaaagacttggaaccaacccaaatgtccaacaaygatagactggattaagaaaatgtggcacatatacaccatggaatactatgcagccataaaaaatgatgaattcatgtcctttgtagggacatgaatgaaa

SEQ ID NO: 32391 - DNA, 201 bp, Homo sapiens
tccagaggccatcagcaccaggcctggggatcgaggcctcctgcagcagagtgtgccacccaaagagctccaggcagtgtggtggagctgctgggcaaatsctaccctcaggacgaccacagcaacctcacccggaaggtcctcaccagagttggcaggaacctgcacaaccagcagcatcaccctctgtggctgatcaag

SEQ ID NO: 32392 - DNA, 201 bp, Homo sapiens
cttaccaggctcatggcacatctttttggagatgagctggagataagatgggtagactgctacttcccttttacacatccttcctttgagatggagatcarctttcatggagaatggctggaagttcttggctgcggggtgatggaacaacaactggtcaattcagctggtgctcaagaccgaatcggctgggcttttggc

SEQ ID NO: 32393 - DNA, 145 bp, Homo sapiens
atgcctccgccccgccccgatcccgcccccgcccggaggctcggracccagcagccgctccacgcggcgggagggcggggaaataagaggactggccgcccgtgcatccagccaagctcctggcggacggatatcggaggcccag

SEQ ID NO: 32394 - DNA, 201 bp, Homo sapiens; identical to SEQ ID NO: 32391

SEQ ID NO: 32395 - DNA, 201 bp, Homo sapiens
caggcccgctttctgtcaaaatggcagcgcccagcgtgcgcgggtatctctgaagttggggtttaagattcttgcccgtgagagcgaacgagcctgccgtrcttctgattttgaaacacctgggtctgggcttcccgggcgagcggtggagatgagatttcactatgatgtccagggtggtctcaaactcctcagtgcctc

SEQ ID NO: 32396 - DNA, 201 bp, Homo sapiens; identical to SEQ ID NO: 32392

SEQ ID NO: 32397 - DNA, 201 bp, Homo sapiens
ggatttcaagggtgacttgactccgcccgatcctggtcggcagggtggggtttcttggcattcctcaggccgggggatgcgacgtctgggtgtggaggtgrtgagctaggggttctgtggcactccggctctgctcagggcgacctgcgtaggggcctctggggcaggcccgctttctgtcaaaatggcagcgcccagcgt

SEQ ID NO: 32398 - DNA, 201 bp, Homo sapiens
gatcccgcccccgcccggaggctcgggacccagcagccgctccacgcggcgggagggcggggaaataagaggactggccgcccgtgcatccagccaagctsctggcggacggatatcggaggcccaggcattcgagggacgtgcagttgcatcacggagagcctttgggaaccgtctggggtcttggcggagacatttgtg

SEQ ID NO: 32399 - DNA, 201 bp, Homo sapiens
aagaagaaggctcaagaatttattcaccagttcctctgcaacccactctgagcctatctctcctcctattttacttgaggctgccaattaccagccccacctgtttcagctcaagagatgccttaagataattatgtgaggccacttggtagcaagaatggcagctatttcctgagcctagtaccccaattaagcccacca

SEQ ID NO: 32400 - DNA, 201 bp, Homo sapiens
ccctgtggtgacagctcaggagggtgtgtgcgctcagcaggggccagcatggaccagtctgtggcaatccaggagacgctggctgagggggaatactgccygcaggcggtgcaaggtgtgctgtgtgagggggacagccggcagagccgcctcctgggactcgtgcgctaccgcctggagcacggcggccaggaacacgct

SEQ ID NO: 32401 - DNA, 201 bp, Homo sapiens
attacacctatatccagaacttcaggttttttgcgggaacatacaatgtaaatgggcagtcccccaaagaatgcctccggctgtggctgagcaatggtatmcaggccccagatgtctattgtgtagggttccaggagcttgatctgagtaaggaagcttttttctttcacgataccccaaaggaggaagagtggttcaaag

SEQ ID NO: 32402 - DNA, 201 bp, Homo sapiens
ctgcctgcctcggcctccccaagtgctaggattacaggtgtgagccaccacgcccggccttttttttttttttttcttttttgagatggagtttcactctygttgcccaggctggagtgcgttggctgacctatgaccacatcactgtacgccagcccgggtgagagagggagaccccgtctctaaaaataaaatgtaaaa

SEQ ID NO: 32403 - DNA, 201 bp, Homo sapiens
ttagtagagacggggtttcaccgtgttgcccaggctgttctaaaactcctgaactcaggtaatctgcctgcctcggcctccccaagtgctaggattacagrtgtgagccaccacgcccggccttttttttttttttttcttttttgagatggagtttcactctcgttgcccaggctggagtgcgttggctgacctatgacc

SEQ ID NO: 32404 - DNA, 187 bp, Homo sapiens
cactgtacgccagcccgggtgagagagggagaccccgtctctaaaaataaaatgtaaaatcactgaaaaaatgagtgttcggtgaaacaagtgggattttytgggccagcaagtcttccaaactgtatatgatgcatcctgtctccatgtgtaatatattttaatgataaatgtatttttaacagtg

SEQ ID NO: 32405 - DNA, 201 bp, Homo sapiens
tggcagcttattgcttcgaaacccagctggtcaccaaaagcttgatatgacagagaagaagaaggctcaagaatttattcaccagttcctctgcaacccamtctgagcctatctctcctcctattttacttgaggctgccaattaccagccccacctgtttcagctcaagagatgccttaagataattatgtgaggccact

SEQ ID NO: 32406 - DNA, 201 bp, Homo sapiens
ctgagggggaatactgcccgcaggcggtgcaaggtgtgctgtgtgagggggacagccggcagagccgcctcctgggactcgtgcgctaccgcctggagcayggcggccaggaacacgctctcttcctctatacgcaccggaggatggccattaccggggacgatgtctctctggaccagatagtgccagtctcgcgggatt

SEQ ID NO: 32407 - DNA, 201 bp, Homo sapiens
ttgcttcgaaacccagctggtcaccaaaagcttgatatgacagagaagaagaaggctcaagaatttattcaccagttcctctgcaacccactctgagcctmtctctcctcctattttacttgaggctgccaattaccagccccacctgtttcagctcaagagatgccttaagataattatgtgaggccacttggtagcaag

SEQ ID NO: 32408 - DNA, 201 bp, Homo sapiens
gagtcttactgtaagcagtggctgaatgccaaccccagcagaggcttcctcctgccagattctgatgttgagattgacttggagctcttcgtaaataagaygacagctacaaagctcaactcgggtgaagacaaaattgaggacattctggttctgcacttggacaggggaaaggattactttttgtctgtgtctgggaac

SEQ ID NO: 32409 - DNA, 201 bp, Homo sapiens
agaagaaggctcaagaatttattcaccagttcctctgcaacccactctgagcctatctctcctcctattttacttgaggctgccaattaccagccccacctgtttcagctcaagagatgccttaagataattatgtgaggccacttggtagcaagaatggcagctatttcctgagcctagtaccccaattaagcccaccat

SEQ ID NO: 32410 - DNA, 201 bp, Homo sapiens
acaggtcatttctactctccccatattccacaaaaatgtcttccactacttgatggcgtttttgcgagaactgctgaaaaattcagcaaaaaatcatttgsatgagaatattctagctagcatatttggcagcttattgcttcgaaacccagctggtcaccaaaagcttgatatgacagagaagaagaaggctcaagaatt

SEQ ID NO: 32411 - DNA, 201 bp, Homo sapiens
tgacattcaattttcaactttagttatttaacacagatttttttattttttatttttttttattttgagacggagttttgctctgtcgcgcagggtggagkgcggtggcacgatctcggctcactgcaacctctgcctcctgggtgcaagcaattatcctgcctcagcctcccgagtagctgggactacaggcacacactg

SEQ ID NO: 32412 - DNA, 201 bp, Homo sapiens
ttcctggagagccttccagagcctgtcatctgttacagcacctaccataactgcttggagtgttctggcaactacacagcaagcaaacaggtcatttctastctccccatattccacaaaaatgtcttccactacttgatggcgtttttgcgagaactgctgaaaaattcagcaaaaaatcatttggatgagaatattcta

SEQ ID NO: 32413 - DNA, 201 bp, Homo sapiens
taccagccccacctgtttcagctcaagagatgccttaagataattatgtgaggccacttggtagcaagaatggcagctatttcctgagcctagtaccccarttaagcccaccattggttagcacactcagcgctgtgagtcgtgaagacacgggagaaaatccaccataataaaactgacattcaattttcaactttagtt

SEQ ID NO: 32414 - DNA, 201 bp, Homo sapiens
cgcccggccttttttttttttttttcttttttgagatggagtttcactctcgttgcccaggctggagtgcgttggctgacctatgaccacatcactgtacrccagcccgggtgagagagggagaccccgtctctaaaaataaaatgtaaaatcactgaaaaaatgagtgttcggtgaaacaagtgggattttctgggccag

SEQ ID NO: 32415 - DNA, 201 bp, Homo sapiens
tgagggggaatactgcccgcaggcggtgcaaggtgtgctgtgtgagggggacagccggcagagccgcctcctgggactcgtgcgctaccgcctggagcacrgcggccaggaacacgctctcttcctctatacgcaccggaggatggccattaccggggacgatgtctctctggaccagatagtgccagtctcgcgggattt

SEQ ID NO: 32416 - DNA, 201 bp, Homo sapiens
ccatcagcaaccatgatgtgatcttgtggctgggggacctcaactacaggatagaagagctggatgtggaaaaagtgaaaaagctcatcgaagagaaggaytttcaaatgctgtatgcatatgatcagctgaaaattcaggtggccgcaaagactgtctttgaaggcttcacagagggtgagctcacattccagcctactt

SEQ ID NO: 32417 - DNA, 201 bp, Homo sapiens; identical to SEQ ID NO: 32399

SEQ ID NO: 32418 - DNA, 201 bp, Homo sapiens; identical to SEQ ID NO: 32401

SEQ ID NO: 32419 - DNA, 201 bp, Homo sapiens; identical to SEQ ID NO: 32402

SEQ ID NO: 32420 - DNA, 201 bp, Homo sapiens; identical to SEQ ID NO: 32403

SEQ ID NO: 32421 - DNA, 187 bp, Homo sapiens; identical to SEQ ID NO: 32404

SEQ ID NO: 32422 - DNA, 201 bp, Homo sapiens
ctgagggggaatactgcgtcatcgcggtgcaaggtgtgctgtgtgagggggacagccggcagagccgcctcctgggactcgtgcgctaccgcctggagcayggcggccaggaacacgctctcttcctctatacgcaccggaggatggccattaccggggacgatgtctctctggaccagatagtgccagtctcgcgggatt

SEQ ID NO: 32423 - DNA, 201 bp, Homo sapiens; identical to SEQ ID NO: 32405

SEQ ID NO: 32424 - DNA, 201 bp, Homo sapiens; identical to SEQ ID NO: 32407

SEQ ID NO: 32425 - DNA, 201 bp, Homo sapiens; identical to SEQ ID NO: 32408

SEQ ID NO: 32426 - DNA, 201 bp, Homo sapiens; identical to SEQ ID NO: 32409

SEQ ID NO: 32427 - DNA, 201 bp, Homo sapiens; identical to SEQ ID NO: 32410

SEQ ID NO: 32428 - DNA, 201 bp, Homo sapiens; identical to SEQ ID NO: 32411

SEQ ID NO: 32429 - DNA, 201 bp, Homo sapiens; identical to SEQ ID NO: 32412

SEQ ID NO: 32430 - DNA, 201 bp, Homo sapiens; identical to SEQ ID NO: 32413

SEQ ID NO: 32431 - DNA, 201 bp, Homo sapiens; identical to SEQ ID NO: 32414

SEQ ID NO: 32432 - DNA, 201 bp, Homo sapiens; identical to SEQ ID NO: 32416

SEQ ID NO: 32433 - DNA, 201 bp, Homo sapiens
tgagggggaatactgcgtcatcgcggtgcaaggtgtgctgtgtgagggggacagccggcagagccgcctcctgggactcgtgcgctaccgcctggagcacrgcggccaggaacacgctctcttcctctatacgcaccggaggatggccattaccggggacgatgtctctctggaccagatagtgccagtctcgcgggattt

SEQ ID NO: 32434 - DNA, 201 bp, Homo sapiens
aaaaagaatactttgaaagacaaagaacttagactaagcatgttaaaattattactttgttttccttgtgttttgtttcggtgcatttgctaataagataacgctgaccatagtaaaattgttagtaaatcattaggtaacatcttgtggtaggaaatcattaggtaacatcaatcctaactagaaatactaaaaatggct

SEQ ID NO: 32435 - DNA, 201 bp, Homo sapiens
agcaaatagcattgacacatttaaagcttttcatttaaagtagtggatgtttttgaagtatctaaaatagtagcagaatattttatacttggtccttgcawtggtgtgagttttaatgattgcattatcgtgattggtggttatgagtttcagaaatctatacttggcatccaactcatgagtggattttatataggatgg

SEQ ID NO: 32436 - DNA, 201 bp, Homo sapiens
aaaagaatactttgaaagacaaagaacttagactaagcatgttaaaattattactttgttttccttgtgttttgtttcggtgcatttgctaataagataacgctgaccatagtaaaattgttagtaaatcattaggtaacatcttgtggtaggaaatcattaggtaacatcaatcctaactagaaatactaaaaatggctt

SEQ ID NO: 32437 - DNA, 124 bp, Homo sapiens
gaaccctgattgctgtccttcaaygtgttcattatgaagttattagtaatacttttgttttctggacttataactggttttagaagtgactcttcctctagtttgccacctaagttactactag

SEQ ID NO: 32438 - DNA, 201 bp, Homo sapiens
taacatgctgctctattttctgggtgtagaaagtatttggctctaggaaacatttacttgtttgtgaaaacaataccccaaggtaataggaaaagtttgarttaagtgtttttaattcagtcagtgaattcagaataagtacattcatgtataacatagggacagttctgctgctgttatttatatgcaattcttctggta

SEQ ID NO: 32439 - DNA, 201 bp, Homo sapiens
tttggtggaatgaggcagtacctatttgggtgaccaatcagcttcaggaaaacagatcaagtgctgctgctatgtggcctggtactgatgtacccattcasgataccatctcttcctattttatgaattacaactcctcagtgtcatttgaggaaagactaaataatattactatgtggctaaacaattcgaacccaccag

SEQ ID NO: 32440 - DNA, 201 bp, Homo sapiens
atgtcctgtcagtatcttaaccctttcaacaagacatttacctatttgtctttccttacgttctcaaaatattaactcgaattgtaaattaagcaaaaatktaaaaagtatatgttgatgggacaagaagaatagtatttatttaataaaacatatattatattgaactatgtgttaattcatttgtatcttttaaaaaat

SEQ ID NO: 32441 - DNA, 201 bp, Homo sapiens
tagtactaattttgctttaaaaaaatttctaatttttttcacataaaacaattatcctaaaggttaatagttgatcgaaacagaataatagaaaaattctwctttaatttccattaaaaagcaaatagcattgacacatttaaagcttttcatttaaagtagtggatgtttttgaagtatctaaaatagtagcagaatatt

SEQ ID NO: 32442 - DNA, 201 bp, Homo sapiens
gaatacatccaaagaatagtgttgtaactatgaaaaagaatactttgaaagacaaagaacttagactaagcatgttaaaattattactttgttttccttgkgttttgtttcggtgcatttgctaataagataacgctgaccatagtaaaattgttagtaaatcattaggtaacatcttgtggtaggaaatcattaggtaac

SEQ ID NO: 32443 - DNA, 125 bp, Homo sapiens
gaaccctgattgctgtccttcaacrtgttcattatgaagttattagtaatacttttgttttctggacttataactggttttagaagtgactcttcctctagtttgccacctaagttactactagt

SEQ ID NO: 32444 - DNA, 156 bp, Homo sapiens
gaaccctgattgctgtccttcaacgtgttcattatgaagttattagtaatactttygttttctggacttataactggttttagaagtgactcttcctctagtttgccacctaagttactactagtatcctttgatggcttcagagctgattatctg

SEQ ID NO: 32445 - DNA, 201 bp, Homo sapiens
aattgttagtaaatcattaggtaacatcttgtggtaggaaatcattaggtaacatcaatcctaactagaaatactaaaaatggcttttgagaaaaatactwcctctgcttgtattttgcgatgaagatgtgatacatctttaaatgaaaatataccaaaatttagtaggcatgtttttctaataaatttatatatttgtaa

SEQ ID NO: 32446 - DNA, 201 bp, Homo sapiens
gttagtaaatcattaggtaacatcttgtggtaggaaatcattaggtaacatcaatcctaactagaaatactaaaaatggcttttgagaaaaatacttcctstgcttgtattttgcgatgaagatgtgatacatctttaaatgaaaatataccaaaatttagtaggcatgtttttctaataaatttatatatttgtaaagaa

SEQ ID NO: 32447 - DNA, 201 bp, Homo sapiens
gtaaatcattaggtaacatcttgtggtaggaaatcattaggtaacatcaatcctaactagaaatactaaaaatggcttttgagaaaaatacttcctctgcwtgtattttgcgatgaagatgtgatacatctttaaatgaaaatataccaaaatttagtaggcatgtttttctaataaatttatatatttgtaaagaaaaca

SEQ ID NO: 32448 - DNA, 201 bp, Homo sapiens
tgcacttcatatttgtttactttctcctaactcacaagttaaaatcataacttaatttcattaacttttatcatttaactctctcatgtttgttgtaaccygaggtatccaaatgctacagaaaaatttatgacccaaatacaaatctcaatttgactgggacagaatgaggaatggagatttttgtatttatctttggga

SEQ ID NO: 32449 - DNA, 201 bp, Homo sapiens
taatttcattaacttttatcatttaactctctcatgtttgttgtaacctgaggtatccaaatgctacagaaaaatttatgacccaaatacaaatctcaatwtgactgggacagaatgaggaatggagatttttgtatttatctttgggactttatgccttactttttaggctatagaatagttaagaaattttaaacaaaa

SEQ ID NO: 32450 - DNA, 201 bp, Homo sapiens
tactttctcctaactcacaagttaaaatcataacttaatttcattaacttttatcatttaactctctcatgtttgttgtaacctgaggtatccaaatgctrcagaaaaatttatgacccaaatacaaatctcaatttgactgggacagaatgaggaatggagatttttgtatttatctttgggactttatgccttactttt

SEQ ID NO: 32451 - DNA, 201 bp, Homo sapiens
ttgtgtataggttttatattattattccactaggaatggcataagaatttatagataaattcttgtaacattaaaggattaaaatgtttttacattgtttwtgggtgtctccttcttgtgcccatatctgataagctttatggattattgcatttaattccttttatttggagggttttacttccttgttaacatataaag

SEQ ID NO: 32452 - DNA, 201 bp, Homo sapiens
ccattcatcagtacgtgagacaagcagttaatagtatgatctttaaagttttgacaatataaaataaacttggtaactgttttacaaatataaaagtatartaaatatgcagcccagttaaatattgattatctgtgatggtaaagaacaacagtggtgccagtcatcaaacatacagtgcgtcctattgagtcactgcta

SEQ ID NO: 32453 - DNA, 201 bp, Homo sapiens; identical to SEQ ID NO: 32434

SEQ ID NO: 32454 - DNA, 201 bp, Homo sapiens; identical to SEQ ID NO: 32435

SEQ ID NO: 32455 - DNA, 201 bp, Homo sapiens; identical to SEQ ID NO: 32436

SEQ ID NO: 32456 - DNA, 201 bp, Homo sapiens
ccccgcaacttcccacgagtgccaggtgccgcgagcgccgagttccgcgcattggaaagaagcgaccgcggcggctggaaccctgattgctgtccttcaaygtgttcattatgaagttattagtaatacttttgttttctggacttataactggttttagaagtgactcttcctctagtttgccacctaagttactactag

SEQ ID NO: 32457 - DNA, 201 bp, Homo sapiens; identical to SEQ ID NO: 32438

SEQ ID NO: 32458 - DNA, 201 bp, Homo sapiens; identical to SEQ ID NO: 32439

SEQ ID NO: 32459 - DNA, 201 bp, Homo sapiens; identical to SEQ ID NO: 32440

SEQ ID NO: 32460 - DNA, 201 bp, Homo sapiens; identical to SEQ ID NO: 32441

SEQ ID NO: 32461 - DNA, 132 bp, Homo sapiens
ctcggagcgccccgagcggcgcagatagggasgttggggctgtgccccgcggcgcggcgcctgccactgcgcaggcgcctcaggaagagctcggcatcgcccctcttcctccaggtcccccttccccgcaac

SEQ ID NO: 32462 - DNA, 143 bp, Homo sapiens
ctcggagcgccccgagcggcgcagatagggacgttggggctgwgccccgcggcgcggcgcctgccactgcgcaggcgcctcaggaagagctcggcatcgcccctcttcctccaggtcccccttccccgcaacttcccacgagt

SEQ ID NO: 32463 - DNA, 201 bp, Homo sapiens; identical to SEQ ID NO: 32442

SEQ ID NO: 32464 - DNA, 201 bp, Homo sapiens
cccgcaacttcccacgagtgccaggtgccgcgagcgccgagttccgcgcattggaaagaagcgaccgcggcggctggaaccctgattgctgtccttcaacrtgttcattatgaagttattagtaatacttttgttttctggacttataactggttttagaagtgactcttcctctagtttgccacctaagttactactagt

SEQ ID NO: 32465 - DNA, 201 bp, Homo sapiens
gagcgccgagttccgcgcattggaaagaagcgaccgcggcggctggaaccctgattgctgtccttcaacgtgttcattatgaagttattagtaatactttygttttctggacttataactggttttagaagtgactcttcctctagtttgccacctaagttactactagtatcctttgatggcttcagagctgattatctg

SEQ ID NO: 32466 - DNA, 201 bp, Homo sapiens; identical to SEQ ID NO: 32445

SEQ ID NO: 32467 - DNA, 201 bp, Homo sapiens; identical to SEQ ID NO: 32446

SEQ ID NO: 32468 - DNA, 201 bp, Homo sapiens; identical to SEQ ID NO: 32447

SEQ ID NO: 32469 - DNA, 201 bp, Homo sapiens; identical to SEQ ID NO: 32448

SEQ ID NO: 32470 - DNA, 201 bp, Homo sapiens; identical to SEQ ID NO: 32449

SEQ ID NO: 32471 - DNA, 201 bp, Homo sapiens; identical to SEQ ID NO: 32450

SEQ ID NO: 32472 - DNA, 201 bp, Homo sapiens; identical to SEQ ID NO: 32451

SEQ ID NO: 32473 - DNA, 201 bp, Homo sapiens; identical to SEQ ID NO: 32452

SEQ ID NO: 32474 - DNA, 201 bp, Homo sapiens
tgtcgacctccctgacctagccagtgagagcgaagtgattatttgtcttgactgctccagttccatggagggtgtgacattcttgcaagccaagcaaatcrccttgcatgcgctgtccttggtgggtgagaagcagaaagtaaatattatccagttcggcacaggttacaaggagctattttcgtatcctaagcatatcac

SEQ ID NO: 32475 - DNA, 201 bp, Homo sapiens
ctgtccttggtgggtgagaagcagaaagtaaatattatccagttcggcacaggttacaaggagctattttcgtatcctaagcatatcacaagcaataccayggcagcagagttcatcatgtctgccacacctaccatggggaacacagacttctggaaaacactccgatatcttagcttattgtaccctgctcgagggtca

SEQ ID NO: 32476 - DNA, 201 bp, Homo sapiens
cagcttcatttctctcttcctacagaccctgatcccatcagaggttttgggtcttatcatccctctgcttactctccttttcattttcaaccttccgcagsctctttgactgccaaccttaggctgccaatggcctctgctttacctgaggctctttgcagtcagtcccggactaccccagtagatctctgtcttctagaa

SEQ ID NO: 32477 - DNA, 201 bp, Homo sapiens
gaattacgtttatccaaacgaaaacataggaaaattccattttccaaaagaaaaatggaattatctcagccagaagtttctgaagattttgaagaggatgscttaggtgtactaccagctttcacatcaaatttggaacgtggaggtgtggaaaagctattggatttaagttggacagagtcatgtaaaccaacagcaact

SEQ ID NO: 32478 - DNA, 201 bp, Homo sapiens
aagcatagttggagaaaacagatagaagaccaaatgaccaggctatgttctccgagttgccactctgtctccgtcaaatggcagcaactcaatccagatgygcccgaggccctgcaggccccagcccaggtgccgtccttgtttctcaatgatcgactccttgtctatggattcattcctcactgcacacaggcaactctg

SEQ ID NO: 32479 - DNA, 201 bp, Homo sapiens
ctttgaatgaaaaccttcaggatacagtagagaagatttgtataaaagaaataggaacaaagcaaagcttctctttgactatgtctattgagatgccgtaygtgattgaattcattttcagtgatacacatgaactgaaacaaaagcgcacagactgcaaagctgtcattagcaccatggaaggcagctccttagacagca

SEQ ID NO: 32480 - DNA, 201 bp, Homo sapiens
gctgtccttggtgggtgagaagcagaaagtaaatattatccagttcggcacaggttacaaggagctattttcgtatcctaagcatatcacaagcaataccrcggcagcagagttcatcatgtctgccacacctaccatggggaacacagacttctggaaaacactccgatatcttagcttattgtaccctgctcgagggtc

SEQ ID NO: 32481 - DNA, 201 bp, Homo sapiens
gtacttcaagacagctgctttttacaaataaaatgtgatacaaaagatgacagtatcccgtgctttctggaagtaaaagaagaggatgaaatagtgtgcayacaacactggcaggatgctgtgccttggacagaactcctcagtctacagacagaggatggcttctggaaacttacaccagaactgggacttatattaaat

SEQ ID NO: 32482 - DNA, 201 bp, Homo sapiens
tcttagataatgctgatgttctgagtcagtaccaactgaattctatccaaaagaaccacgttcatattgcaaacccagattttatatggaaatctatcagrgaaaagagactcttggatgtaaagaattatgatccttataagcccctggacatcacaccacctcctgatcagaaggcgagcagttctgaagtgaaaacag

SEQ ID NO: 32483 - DNA, 201 bp, Homo sapiens
cgatatcttagcttattgtaccctgctcgagggtcacggaacatcctcctggtgtctgatgggcacctccaggatgagagcctgacattacagctcgtgargaggagccgcccgcacaccaggttattcgcctgcggtatcggttctacagcaaatcgtcacgtcttaaggattttgtcccagtgtggtgccggagtattt

SEQ ID NO: 32484 - DNA, 201 bp, Homo sapiens
atccagatgtgcccgaggccctgcaggccccagcccaggtgccgtccttgtttctcaatgatcgactccttgtctatggattcattcctcactgcacacargcaactctgtgtgcactaattcaagagaaagaattttgtacaatggtgtcgactactgagcttcagaagacaactggaactatgatccacaagctggcag

SEQ ID NO: 32485 - DNA, 201 bp, Homo sapiens
tgaccaggctatgttctccgagttgccactctgtctccgtcaaatggcagcaactcaatccagatgtgcccgaggccctgcaggccccagcccaggtgccrtccttgtttctcaatgatcgactccttgtctatggattcattcctcactgcacacaggcaactctgtgtgcactaattcaagagaaagaattttgtacaa

SEQ ID NO: 32486 - DNA, 201 bp, Homo sapiens
caggatggtgatgggaatctttgcaaattgtatcttctgtttgaaagtgaagtacttacctcagcagcagaagaaaaagctacaaactgacattaaggaamatggcggaaagttttccttttcgttaaatcctcagtgcacacatataatcttagataatgctgatgttctgagtcagtaccaactgaattctatccaaaa

SEQ ID NO: 32487 - DNA, 201 bp, Homo sapiens
tgcatctcaattcagccaaggccctgtgcctggcacttgtgctgactggatcccacagtcggcgtcttgtcccacaggacctccccagaacccaccttctkcaccctattgtggcattgttttttcagggagctcattaagctctgcacagtctgctccactgcaacatcctggaggctttactaccaggccttctgctgg

SEQ ID NO: 32488 - DNA, 201 bp, Homo sapiens
cccccgactgcccgcgctcacagtcctgcttccttgtcttttgcctcatatcgtcaggtagctagtttcggttcagctgctcctcccagacagtttgatgmatctcaattcagccaaggccctgtgcctggcacttgtgctgactggatcccacagtcggcgtcttgtcccacaggacctccccagaacccaccttctgca

SEQ ID NO: 32489 - DNA, 201 bp, Homo sapiens
gctggcaccttccctgagctggattctccccagcttcatttctctcttcctacagaccctgatcccatcagaggttttgggtcttatcatccctctgcttmctctccttttcattttcaaccttccgcagcctctttgactgccaaccttaggctgccaatggcctctgctttacctgaggctctttgcagtcagtcccgg

SEQ ID NO: 32490 - DNA, 201 bp, Homo sapiens
tcatttgtgacgtagccctcggaaagtgtatggacttacatgagaaggacttttccttaactgaagcaccaccaggctacgacagtgtgcatggagtttcrcaaacagcctctgtcaccacagactttgaggatgatgaatttgttgtctataaaaccaatcaggttaaaatgaaatatattattaaattttccatgcctg

SEQ ID NO: 32491 - DNA, 201 bp, Homo sapiens
gcttttcaaagttctgacacagaaagtgatgagctatcagaagtacttcaagacagctgctttttacaaataaaatgtgatacaaaagatgacagtatccygtgctttctggaagtaaaagaagaggatgaaatagtgtgcacacaacactggcaggatgctgtgccttggacagaactcctcagtctacagacagaggat

SEQ ID NO: 32492 - DNA, 201 bp, Homo sapiens
tcatagacactgtagcccaggtcattgtttttcagacatacacaaataaaagtcacgtgcccattgaggcaaaatatatctttcctttggatgacaaggcygctgtgtgtggcttcgaagccttcatcaatgggaagcacatagttggagagattaaagagaaggaagaagcccagcaagagtacctagaagccgtgaccc

SEQ ID NO: 32493 - DNA, 201 bp, Homo sapiens
caaacttggtaatgtgaggcccttgttgcatggttctcctgtacaaaacatcgtgggaatcttgtgtcgagggttgcttttacccaaagtagtggaagatygtggtgtgcaaagaacagacgtcggaaaccttggaagtgggatttatttcagtgattcgctcagtacaagtatcaagtactcacacccgggagagacaga

SEQ ID NO: 32494 - DNA, 201 bp, Homo sapiens
tgtcctttcctgatatcctcacacttcctcctggatgatggcatggagactagaagacagtttgctataaagaaaacctctgaagatgcaagtgaatactwtgaaaattacattgaagaactgaagaaacaaggatttctactaagagaacatttcacacctgaagcaacccaattagcatctgaacaattgcaagcattg

SEQ ID NO: 32495 - DNA, 201 bp, Homo sapiens
gcacctccaggatgagagcctgacattacagctcgtgaagaggagccgcccgcacaccaggttattcgcctgcggtatcggttctacagcaaatcgtcacrtcttaaggattttgtcccagtgtggtgccggagtatttgaatattttaatgcaaaatccaagcatagttggagaaaacagatagaagaccaaatgaccag

SEQ ID NO: 32496 - DNA, 201 bp, Homo sapiens
tgttctccgagttgccactctgtctccgtcaaatggcagcaactcaatccagatgtgcccgaggccctgcaggccccagcccaggtgccgtccttgtttckcaatgatcgactccttgtctatggattcattcctcactgcacacaggcaactctgtgtgcactaattcaagagaaagaattttgtacaatggtgtcgact

SEQ ID NO: 32497 - DNA, 201 bp, Homo sapiens
gtagtggaagatcgtggtgtgcaaagaacagacgtcggaaaccttggaagtgggatttatttcagtgattcgctcagtacaagtatcaagtactcacaccygggagagacagatggcaccagactcctgctcatttgtgacgtagccctcggaaagtgtatggacttacatgagaaggacttttccttaactgaagcacca

SEQ ID NO: 32498 - DNA, 201 bp, Homo sapiens
aactgaaccactatttaagaaagtcagtccatgggaaacatctacttctagcttttttcctattttggctccggccgttggttcctatcttcccccgactrcccgcgctcacagtcctgcttccttgtcttttgcctcatatcgtcaggtagctagtttcggttcagctgctcctcccagacagtttgatgcatctcaatt

SEQ ID NO: 32499 - DNA, 201 bp, Homo sapiens
accaacagcaactgaaccactatttaagaaagtcagtccatgggaaacatctacttctagcttttttcctattttggctccggccgttggttcctatcttmccccgactgcccgcgctcacagtcctgcttccttgtcttttgcctcatatcgtcaggtagctagtttcggttcagctgctcctcccagacagtttgatgc

SEQ ID NO: 32500 - DNA, 201 bp, Homo sapiens
catcctctgagtggccagaattacgtttatccaaacgaaaacataggaaaattccattttccaaaagaaaaatggaattatctcagccagaagtttctgawgattttgaagaggatggcttaggtgtactaccagctttcacatcaaatttggaacgtggaggtgtggaaaagctattggatttaagttggacagagtcat

SEQ ID NO: 32501 - DNA, 201 bp, Homo sapiens
caaaagaaaaatggaattatctcagccagaagtttctgaagattttgaagaggatggcttaggtgtactaccagctttcacatcaaatttggaacgtggasgtgtggaaaagctattggatttaagttggacagagtcatgtaaaccaacagcaactgaaccactatttaagaaagtcagtccatgggaaacatctacttc

SEQ ID NO: 32502 - DNA, 201 bp, Homo sapiens
tagagaagatttgtataaaagaaataggaacaaagcaaagcttctctttgactatgtctattgagatgccgtatgtgattgaattcattttcagtgatacwcatgaactgaaacaaaagcgcacagactgcaaagctgtcattagcaccatggaaggcagctccttagacagcagtggattttctctccacatcggtttgt

SEQ ID NO: 32503 - DNA, 201 bp, Homo sapiens
ctcccaagaatgtgggttgaaaaacatccagaaaaagaaagcgaggcttgcatgcttgtctttcaacccgatctcgatgtcgacctccctgacctagccartgagagcgaagtgattatttgtcttgactgctccagttccatggagggtgtgacattcttgcaagccaagcaaatcgccttgcatgcgctgtccttggtg

SEQ ID NO: 32504 - DNA, 201 bp, Homo sapiens
gaagattgctggctcagaggctctatgcaggttccactgtcaagtgtgactatgaaaatgttccaaccactgtatttactcctttggaatatggtgcttgyggcctttctgaggagaaagctgtggagaagtttggggaagaaaatattgaggtttaccatagttacttttggccattggaatggacgattccgtcaagag

SEQ ID NO: 32505 - DNA, 201 bp, Homo sapiens
gatcttttctccttgccttactgcccgggtaagaccctggttgttggagcatcctatgtcgctttggagtgcgctggatttcttgctggtattggtttagrcgtcactgttatggttaggtccattcttcttagaggatttgaccaggacatggccaacaaaattggtgaacacatggaagaacatggcatcaagtttata

SEQ ID NO: 32506 - DNA, 201 bp, Homo sapiens
ttctcagttgcagcactgagtggtcaaaatacatttctgggccacctcagggaacccatgcatctgcctggcatttaggcagcagagcccctgaccgtccsccacagggctctgcctcacgtcctcatctcatttggctgtgtaaagaaatgggaaaagggaaaaggagagagcaattgaggcagttgaccatattcagtt

SEQ ID NO: 32507 - DNA, 201 bp, Homo sapiens
caggaggtctggcagctgctaaggaggcagcccaatatggcaagaaggtgatggtcctggactttgtcactcccacccctcttggaactagatggggtctyggaggaacatgtgtgaatgtgggttgcatacctaaaaaactgatgcatcaagcagctttgttaggacaagccctgcaagactctcgaaattatggatgga

SEQ ID NO: 32508 - DNA, 201 bp, Homo sapiens
aaccactggctcgtttccgtgcccaaatccaaggcgaagttttctagagggttcttgggctcttggcacctgcgtgtcctgtgcttaccaccgcccaaggyccccttggatctcttggataggagttggtgaatagaaggcaggcagcatcacactggggtcactgacagacttgaagctgacatttggcagggcatcgaa

SEQ ID NO: 32509 - DNA, 201 bp, Homo sapiens
ttatttatttttaatttgtttttttctccaagtccaccagtctctgaaattagaacagtaggcggtatgagataatcaggcctaatcatgttgtgattctyttttcttagtggagtggaatgttctatccccacaagaaggattatatcttatagacttgtcttgttcagattctgtatttacccattttattgaaacata

SEQ ID NO: 32510 - DNA, 201 bp, Homo sapiens
gccaagactgcaaaccactggctcgtttccgtgcccaaatccaaggcgaagttttctagagggttcttgggctcttggcacctgcgtgtcctgtgcttacyaccgcccaaggcccccttggatctcttggataggagttggtgaatagaaggcaggcagcatcacactggggtcactgacagacttgaagctgacatttgg

SEQ ID NO: 32511 - DNA, 201 bp, Homo sapiens
tatttttaatttgtttttttctccaagtccaccagtctctgaaattagaacagtaggcggtatgagataatcaggcctaatcatgttgtgattctcttttyttagtggagtggaatgttctatccccacaagaaggattatatcttatagacttgtcttgttcagattctgtatttacccattttattgaaacatatacta

SEQ ID NO: 32512 - DNA, 200 bp, Homo sapiens
tctcttttcttagtggagtggaatgttctatccccacaagaaggattatatcttatagacttgtcttgttcagattctgtatttacccattttattgaaayatatactaagttccatgtatttttgttacaaatcttctgaaaaaaaacaaaacaatgtgaaacattaaaattaaaaggcattaataatatccacgtgtg

SEQ ID NO: 32513 - DNA, 201 bp, Homo sapiens
ggatgctgttgccaagactgcaaaccactggctcgtttccgtgcccaaatccaaggcgaagttttctagagggttcttgggctcttggcacctgcgtgtcytgtgcttaccaccgcccaaggcccccttggatctcttggataggagttggtgaatagaaggcaggcagcatcacactggggtcactgacagacttgaagc

SEQ ID NO: 32514 - DNA, 198 bp, Homo sapiens
tcttttcttagtggagtggaatgttctatccccacaagaaggattatatcttatagacttgtcttgttcagattctgtatttacccattttattgaaacayatactaagttccatgtatttttgttacaaatcttctgaaaaaaaacaaaacaatgtgaaacattaaaattaaaaggcattaataatatccacgtgtg

SEQ ID NO: 32515 - DNA, 201 bp, Homo sapiens
tcttggcacctgcgtgtcctgtgcttaccaccgcccaaggcccccttggatctcttggataggagttggtgaatagaaggcaggcagcatcacactggggycactgacagacttgaagctgacatttggcagggcatcgaagggatgcatccatgaagtcaccagtctcaagcccatgtggtaggcggtgatggaacaact

SEQ ID NO: 32516 - DNA, 201 bp, Homo sapiens
aaaaagtcgtctatgagaatgcttatgggcaatttattggtcctcacaggattaaggcaacaaataataaaggcaaagaaaaaatttattcagcagagagwtttctcattgccactggtgaaagaccacgttacttgggcatccctggtgacaaagaatactgcatcagcagtgatgatcttttctccttgccttactgcc

SEQ ID NO: 32517 - DNA, 201 bp, Homo sapiens; identical to SEQ ID NO: 32504

SEQ ID NO: 32518 - DNA, 201 bp, Homo sapiens; identical to SEQ ID NO: 32505

SEQ ID NO: 32519 - DNA, 201 bp, Homo sapiens; identical to SEQ ID NO: 32506

SEQ ID NO: 32520 - DNA, 201 bp, Homo sapiens; identical to SEQ ID NO: 32507

SEQ ID NO: 32521 - DNA, 201 bp, Homo sapiens; identical to SEQ ID NO: 32508

SEQ ID NO: 32522 - DNA, 201 bp, Homo sapiens
taaggtctgtttaggaagggaaatggctacttggccagccattgcctggcatttggtagtatagtatgattctcaccattatttgtcatggaggcagacayacaccagaaatgggggagaaacagtacatatctttctgtctttagtttattgtgtgctggtctaagcaagctgagatcatttgcaatggaaaacacgtaa

SEQ ID NO: 32523 - DNA, 201 bp, Homo sapiens; identical to SEQ ID NO: 32509

SEQ ID NO: 32524 - DNA, 201 bp, Homo sapiens; identical to SEQ ID NO: 32510

SEQ ID NO: 32525 - DNA, 201 bp, Homo sapiens; identical to SEQ ID NO: 32511

SEQ ID NO: 32526 - DNA, 200 bp, Homo sapiens; identical to SEQ ID NO: 32512

SEQ ID NO: 32527 - DNA, 201 bp, Homo sapiens; identical to SEQ ID NO: 32513

SEQ ID NO: 32528 - DNA, 198 bp, Homo sapiens; identical to SEQ ID NO: 32514

SEQ ID NO: 32529 - DNA, 201 bp, Homo sapiens; identical to SEQ ID NO: 32515

SEQ ID NO: 32530 - DNA, 201 bp, Homo sapiens; identical to SEQ ID NO: 32516

SEQ ID NO: 32531 - DNA, 201 bp, Homo sapiens
gcctgtcttcatccttcacctttggtggctttcaggtgacaagcaagggtgcactgcacaagacagtccagaacttggttttctccaaggctgaccagagygaggtgaagctcagcgtcttgagcagtggctgcaggtaccaggaaggccccgtccggctcagccccggcaggctccagggccacctggagaatgaggaca

SEQ ID NO: 32532 - DNA, 201 bp, Homo sapiens
agactttctatgtggtttgggctccctcttatttttacaagtttcatttttaaaagtaggcaactactttgggttacagtatttttattcatatttaaacatatttttacaaaataaataaagtgttttacatagtaaggaatatgtacgtatttccaagtattaagaagccaagtgtttttttttttgacgtattattga

SEQ ID NO: 32533 - DNA, 201 bp, Homo sapiens
gtttcatcctacgtgtctgaagtagaaataaccccatcttgtatacctgtggtgaccaacatggaggccttctcatcagaacatttcaacttagagatctrtcgccaaaatctgcagaccaagcagttggggaaagtaattttgtttgccgaagtgacccccacaacgatgcgtctcctggatgggctgatgtttcagaca

SEQ ID NO: 32534 - DNA, 201 bp, Homo sapiens
cgtgtgtgcgcacatagctttaaaagaagacattcaaaatttgatgtgctacaagcctcatgaaagaacaaaagaaatgaagccttttgatatgcattcgytattcccagatgtacgccatgccttttccatgtccctcctatctctgttgaacttatgaatcatactcattacttttcagctttttaaaaggccaatttt

SEQ ID NO: 32535 - DNA, 201 bp, Homo sapiens
atacctgtggtgaccaacatggaggccttctcatcagaacatttcaacttagagatctatcgccaaaatctgcagaccaagcagttggggaaagtaatttygtttgccgaagtgacccccacaacgatgcgtctcctggatgggctgatgtttcagacaccgcaggaaatgggcttaatagtgatcgcggcccggcagacc

SEQ ID NO: 32536 - DNA, 201 bp, Homo sapiens
ggctgtcgtggaagcagtgaggtccattcccgagtatcaggatatcaacttacgagtgaagtggcccaacgatatttattacagtgacctcatgaagatcrgcggagttctggttaactcaacactcatgggagaaacattttatatacttattggctgtggatttaatgtgactaacagtaaccctaccatctgcatcaa

SEQ ID NO: 32537 - DNA, 201 bp, Homo sapiens
gacccccacaacgatgcgtctcctggatgggctgatgtttcagacaccgcaggaaatgggcttaatagtgatcgcggcccggcagaccgagggcaaaggayggggagggaatgtgtggctgagccctgtgggatgtgctctttctactctgctcatctccattccactgagatcccagctgggacagaggatcccgtttgt

SEQ ID NO: 32538 - DNA, 201 bp, Homo sapiens
ggcttcctgtccccacccccaccccagcagtgctctctggcactgggaactctgctagggagtggtggaagtaggaaggatttgtgtgcaaaggaaaatcrtggttgagtttcactgcagcaggctgacgttgcctgatgtgagagcaagtggccgactggggtgcgggtgcacaggtcgggggagcacaggccacagagc

SEQ ID NO: 32539 - DNA, 201 bp, Homo sapiens
ctttgccaggtgcacttagaactacctcccagctccaacatagtgcaaactccagaagattttaacttgctcaagtcaagcaattttagaagatacgaagwccttagagagattctgacaacccttggcctcagctgtgacatgaaacaagttcctgccttaactcctctttacttgctgtcagctgcggaggaaatcagg

SEQ ID NO: 32540 - DNA, 201 bp, Homo sapiens
ttttttggaaatgaaacattaaaagaacttaaaaagtaatttttggaaatgaggcttcaattagaattatttttctcaaaaaacaaacaaacaaaaaacamaaaaaaaaccactcttctccaaatgcccaagccttctttcaaaattagttagaaacttaagtaaaatacaagtccacaccatccccaaattacaaaatgg

SEQ ID NO: 32541 - DNA, 201 bp, Homo sapiens
agagaagggaggagagtcaacctcacgggaaaggcacccaacatcctcctctatgtgggctccgactcccaggaagccctcggccggttccacgaggtccsgtctgtgctggccgactgtgtggacattgacagttatattctctaccacctgctggaggacagtgctctcagagacccgtggacggacaactgtctgctg

SEQ ID NO: 32542 - DNA, 201 bp, Homo sapiens
tattttttggaaatgaaacattaaaagaacttaaaaagtaatttttggaaatgaggcttcaattagaattatttttctcaaaaaacaaacaaacaaaaaamacaaaaaaaaccactcttctccaaatgcccaagccttctttcaaaattagttagaaacttaagtaaaatacaagtccacaccatccccaaattacaaaat

SEQ ID NO: 32543 - DNA, 201 bp, Homo sapiens
aagctgttctttgccaggtgcacttagaactacctcccagctccaacatagtgcaaactccagaagattttaacttgctcaagtcaagcaattttagaagmtacgaagtccttagagagattctgacaacccttggcctcagctgtgacatgaaacaagttcctgccttaactcctctttacttgctgtcagctgcggagg

SEQ ID NO: 32544 - DNA, 201 bp, Homo sapiens
cgatgcgtctcctggatgggctgatgtttcagacaccgcaggaaatgggcttaatagtgatcgcggcccggcagaccgagggcaaaggacggggagggaawgtgtggctgagccctgtgggatgtgctctttctactctgctcatctccattccactgagatcccagctgggacagaggatcccgtttgtccagcatctga

SEQ ID NO: 32545 - DNA, 201 bp, Homo sapiens
gcacccggacggcaactccttcgacatgctgagaaacctcatcctccccaaacggcggtaatgccgggcgtccccgagacgcggctgcctgtccgtgcccrtgcatctggaaatctaatttagagttgtaggtgaattttcttttcctccaattcatttgttaagtctttgttctttttctgtgtttctgtttgtttttag

SEQ ID NO: 32546 - DNA, 201 bp, Homo sapiens
taccaggaaggccccgtccggctcagccccggcaggctccagggccacctggagaatgaggacaaggacaggatgattgtgcatgtgccttttggaactcrcgggggagaagctgttctttgccaggtgcacttagaactacctcccagctccaacatagtgcaaactccagaagattttaacttgctcaagtcaagcaat

SEQ ID NO: 32547 - DNA, 201 bp, Homo sapiens
atcccagctgggacagaggatcccgtttgtccagcatctgatgtccgtggctgtcgtggaagcagtgaggtccattcccgagtatcaggatatcaacttaygagtgaagtggcccaacgatatttattacagtgacctcatgaagatcggcggagttctggttaactcaacactcatgggagaaacattttatatacttat

SEQ ID NO: 32548 - DNA, 201 bp, Homo sapiens
tgtcgtggaagcagtgaggtccattcccgagtatcaggatatcaacttacgagtgaagtggcccaacgatatttattacagtgacctcatgaagatcggcrgagttctggttaactcaacactcatgggagaaacattttatatacttattggctgtggatttaatgtgactaacagtaaccctaccatctgcatcaacga

SEQ ID NO: 32549 - DNA, 201 bp, Homo sapiens
cagagatgacccaaaggctcttggtgaagaacccaaacaaaggagaggcagtgcctctgggagtgagcctgctggggacagtgacaggggagggggccccrttgagcattatcacctccatctgtctagttgccacgagtgtctggaacttgagaacagcaccattgagtcagtcaagtttgcgtctgccgagaacattcc

SEQ ID NO: 32550 - DNA, 201 bp, Homo sapiens
tggatttaatgtgactaacagtaaccctaccatctgcatcaacgacctcatcacagaatacaataaacaacacaaggcagaactgaagcccttaagagcckattatctcatcgccagagtcgtgactgtgctggagaaactgatcaaagagtttcaggacaaagggcccaacagcgtccttcccctttattaccgatactg

SEQ ID NO: 32551 - DNA, 201 bp, Homo sapiens
gtgggcttccgttctccagatctgtttgctcttaacaggcagaacatgggagaatccttattcctggttaatcactatgcatatttgaaataaaagaaagygtaagcctctgcaattttaacttctcaaaggatgtctctgaaaagaatcactttaaaccaatgcctataaaaagcaagtctaccaaaataaactaagact

SEQ ID NO: 32552 - DNA, 201 bp, Homo sapiens
gggcggcgaggttgtgactgtgcacccggacggcaactccttcgacatgctgagaaacctcatcctccccaaacggcggtaatgccgggcgtccccgagaygcggctgcctgtccgtgcccatgcatctggaaatctaatttagagttgtaggtgaattttcttttcctccaattcatttgttaagtctttgttctttttc

SEQ ID NO: 32553 - DNA, 201 bp, Homo sapiens
gtaaccctaccatctgcatcaacgacctcatcacagaatacaataaacaacacaaggcagaactgaagcccttaagagccgattatctcatcgccagagtygtgactgtgctggagaaactgatcaaagagtttcaggacaaagggcccaacagcgtccttcccctttattaccgatactgggtccacagtggtcagcaag

SEQ ID NO: 32554 - DNA, 201 bp, Homo sapiens
atggactggtaccccaaaagattgtgtcggtgcacttgcaggactccactctgaaggaagttaaggatcaggtctcaaacaagcaagcccagatcctagakccgaagcctgaaccttctcttgagattaagcctgagcaggacggtatggagcatgttggcagagatgacccaaaggctcttggtgaagaacccaaacaaa

SEQ ID NO: 32555 - DNA, 201 bp, Homo sapiens
cggtctgtgctggccgactgtgtggacattgacagttatattctctaccacctgctggaggacagtgctctcagagacccgtggacggacaactgtctgckgttggtcattgctaccagggagtccattcccgaagacctgtaccagaagttcatggcctatctttctcagggagggaaggtgttgggcctgtcttcatcc

SEQ ID NO: 32556 - DNA, 201 bp, Homo sapiens
gcagagatgacccaaaggctcttggtgaagaacccaaacaaaggagaggcagtgcctctgggagtgagcctgctggggacagtgacaggggagggggcccygttgagcattatcacctccatctgtctagttgccacgagtgtctggaacttgagaacagcaccattgagtcagtcaagtttgcgtctgccgagaacattc

SEQ ID NO: 32557 - DNA, 201 bp, Homo sapiens
agtgctctcagagacccgtggacggacaactgtctgctgttggtcattgctaccagggagtccattcccgaagacctgtaccagaagttcatggcctatcyttctcagggagggaaggtgttgggcctgtcttcatccttcacctttggtggctttcaggtgacaagcaagggtgcactgcacaagacagtccagaacttg

SEQ ID NO: 32558 - DNA, 201 bp, Homo sapiens
gactttctatgtggtttgggctccctcttatttttacaagtttcatttttaaaagtaggcaactactttgggttacagtatttttattcatatttaaacatatttttacaaaataaataaagtgttttacatagtaaggaatatgtacgtatttccaagtattaagaagccaagtgtttttttttttgacgtattattgac

SEQ ID NO: 32559 - DNA, 201 bp, Homo sapiens
agtatttttattcatatttaaacatatttttacaaaataaataaagtgttttacatagtaaggaatatgtacgtatttccaagtattaagaagccaagtgtttttttttttgacgtattattgacaaatgtattcagcgccatacacaagagaaatattattactccaaagaacgaaagttaacaaaactccaaagcaaaa

SEQ ID NO: 32560 - DNA, 201 bp, Homo sapiens
gaagtagaaataaccccatcttgtatacctgtggtgaccaacatggaggccttctcatcagaacatttcaacttagagatctatcgccaaaatctgcagaycaagcagttggggaaagtaattttgtttgccgaagtgacccccacaacgatgcgtctcctggatgggctgatgtttcagacaccgcaggaaatgggctta

SEQ ID NO: 32561 - DNA, 201 bp, Homo sapiens; identical to SEQ ID NO: 32531

SEQ ID NO: 32562 - DNA, 201 bp, Homo sapiens; identical to SEQ ID NO: 32532

SEQ ID NO: 32563 - DNA, 201 bp, Homo sapiens; identical to SEQ ID NO: 32538

SEQ ID NO: 32564 - DNA, 201 bp, Homo sapiens; identical to SEQ ID NO: 32539

SEQ ID NO: 32565 - DNA, 201 bp, Homo sapiens; identical to SEQ ID NO: 32543

SEQ ID NO: 32566 - DNA, 201 bp, Homo sapiens; identical to SEQ ID NO: 32544

SEQ ID NO: 32567 - DNA, 201 bp, Homo sapiens; identical to SEQ ID NO: 32547

SEQ ID NO: 32568 - DNA, 201 bp, Homo sapiens; identical to SEQ ID NO: 32546

SEQ ID NO: 32569 - DNA, 201 bp, Homo sapiens; identical to SEQ ID NO: 32549

SEQ ID NO: 32570 - DNA, 201 bp, Homo sapiens; identical to SEQ ID NO: 32548

SEQ ID NO: 32571 - DNA, 201 bp, Homo sapiens; identical to SEQ ID NO: 32551

SEQ ID NO: 32572 - DNA, 201 bp, Homo sapiens; identical to SEQ ID NO: 32550

SEQ ID NO: 32573 - DNA, 201 bp, Homo sapiens; identical to SEQ ID NO: 32553

SEQ ID NO: 32574 - DNA, 201 bp, Homo sapiens; identical to SEQ ID NO: 32554

SEQ ID NO: 32575 - DNA, 201 bp, Homo sapiens; identical to SEQ ID NO: 32555

SEQ ID NO: 32576 - DNA, 201 bp, Homo sapiens; identical to SEQ ID NO: 32533

SEQ ID NO: 32577 - DNA, 201 bp, Homo sapiens; identical to SEQ ID NO: 32534

SEQ ID NO: 32578 - DNA, 201 bp, Homo sapiens; identical to SEQ ID NO: 32535

SEQ ID NO: 32579 - DNA, 201 bp, Homo sapiens
gcctgccaatgccccctgttgggcagggccacctgtgctagtttaacctggggtctttcactcccggactgcttcttggatgtgagttttaagttgagcasagaagatatgccttgcctgctgccatacattgtaacatcaagtcaagagctttagttacttaacagatttctgctggctgctattataggaggaaactcc

SEQ ID NO: 32580 - DNA, 201 bp, Homo sapiens; identical to SEQ ID NO: 32536

SEQ ID NO: 32581 - DNA, 201 bp, Homo sapiens; identical to SEQ ID NO: 32537

SEQ ID NO: 32582 - DNA, 201 bp, Homo sapiens
tgcctgccaatgccccctgttgggcagggccacctgtgctagtttaacctggggtctttcactcccggactgcttcttggatgtgagttttaagttgagcmgagaagatatgccttgcctgctgccatacattgtaacatcaagtcaagagctttagttacttaacagatttctgctggctgctattataggaggaaactc

SEQ ID NO: 32583 - DNA, 201 bp, Homo sapiens; identical to SEQ ID NO: 32540

SEQ ID NO: 32584 - DNA, 201 bp, Homo sapiens; identical to SEQ ID NO: 32541

SEQ ID NO: 32585 - DNA, 201 bp, Homo sapiens; identical to SEQ ID NO: 32542

SEQ ID NO: 32586 - DNA, 201 bp, Homo sapiens; identical to SEQ ID NO: 32545

SEQ ID NO: 32587 - DNA, 201 bp, Homo sapiens; identical to SEQ ID NO: 32552

SEQ ID NO: 32588 - DNA, 201 bp, Homo sapiens
cttgacttcccttctcttttccatgcctttgtttccatctcgaagtgcaaatttaaagtgtcctgtttgcctttatccactggaaggcaaacaccctggaygacgtatcagtgacagcgcggttctgctttgatcggagcacccagcgctgcttgaaggcgtttgcatggtccatggctcatggaccacgctcctagaaaa

SEQ ID NO: 32589 - DNA, 201 bp, Homo sapiens; identical to SEQ ID NO: 32556

SEQ ID NO: 32590 - DNA, 201 bp, Homo sapiens; identical to SEQ ID NO: 32557

SEQ ID NO: 32591 - DNA, 201 bp, Homo sapiens; identical to SEQ ID NO: 32558

SEQ ID NO: 32592 - DNA, 201 bp, Homo sapiens; identical to SEQ ID NO: 32559

SEQ ID NO: 32593 - DNA, 201 bp, Homo sapiens; identical to SEQ ID NO: 32560

SEQ ID NO: 32594 - DNA, 114 bp, Homo sapiens
tgctgtaatgacagaattgtttaaaaaaccaacttgtcatgtaagcactctactgcttattaaaatatagcacaattgaaaaaataaaatgtgttttaaawctttaaaaagtca

SEQ ID NO: 32595 - DNA, 122 bp, Homo sapiens
atcacagttgctgtaatgacagaattgtttaaaaaaccaacttgtcatgtaagcactctactgcttattaaaatatagcacaattgaaaaaataaaatgtrttttaaatctttaaaaagtca

SEQ ID NO: 32596 - DNA, 201 bp, Homo sapiens
tttgtaattttcattaagcatttaattcacagtcaaatacctgccttacaagatatgcatgctgaaatagctcaaccattattacaagcctaatgttactmtgaagtggatttgcatattgaagtggagattccataattatgtcagtgtttaaaggtttcaaattctgggaaaccagttccaaacatttgcagaaaccat

SEQ ID NO: 32597 - DNA, 201 bp, Homo sapiens
attgaagtggagattccataattatgtcagtgtttaaaggtttcaaattctgggaaaccagttccaaacatttgcagaaaccattaagcagttacatattraggtatacacacacacacacacacacatacacacacacggaccaaaatacttacacctgcaaaggaataaagatgtgagagtatgtctccattgttcact

SEQ ID NO: 32598 - DNA, 116 bp, Homo sapiens
gagcgcaggtgagctmctgcgcgttccgggggcgttcctccagtcaccctcccgccgttacccgcggcgcgcccgagggagtctcctccagaccctccctcccgttgctccaaact

SEQ ID NO: 32599 - DNA, 201 bp, Homo sapiens
atgagtcagtttcatttgaagatagagttgccaaaattattgaatggtttacgtcaaaagagcccataaatcttggtcttctctattgggaagaccctgaygacatgggccaccatttgggacctgacagtccgctcatggggcctgtcatttcagatattgacaagaagttaggatatctcatacaaatgctgaaaaagg

SEQ ID NO: 32600 - DNA, 201 bp, Homo sapiens
ggtcatacccttatttcataggggtctctcttggcagcattatagtgattgtattttttgtaattttcattaagcatttaattcacagtcaaatacctgcyttacaagatatgcatgctgaaatagctcaaccattattacaagcctaatgttactttgaagtggatttgcatattgaagtggagattccataattatgtc

SEQ ID NO: 32601 - DNA, 201 bp, Homo sapiens
gctttcctactcattacatgccttacaatgagtcagtttcatttgaagatagagttgccaaaattattgaatggtttacgtcaaaagagcccataaatctkggtcttctctattgggaagaccctgatgacatgggccaccatttgggacctgacagtccgctcatggggcctgtcatttcagatattgacaagaagttag

SEQ ID NO: 32602 - DNA, 201 bp, Homo sapiens
gattgttgcaaatgatatgtttgatcctattcggaacaaatctttctccttggatcacatgaatatttatgattccaagttttgggaagaagcgacaccartatggatcacaaaccagagggcaggacatactagtggtgcagccatgtggcccggaacagatgtaaaaatacataagcgctttcctactcattacatgcc

SEQ ID NO: 32603 - DNA, 201 bp, Homo sapiens
ctgggaaaccagttccaaacatttgcagaaaccattaagcagttacatatttaggtatacacacacacacacacacacatacacacacacggaccaaaatrcttacacctgcaaaggaataaagatgtgagagtatgtctccattgttcactgtagcatagggatagataagatcctgctttatttggacttggcgcagat

SEQ ID NO: 32604 - DNA, 201 bp, Homo sapiens
tacacacacacacacacacacatacacacacacggaccaaaatacttacacctgcaaaggaataaagatgtgagagtatgtctccattgttcactgtagcstagggatagataagatcctgctttatttggacttggcgcagataatgtatatatttagcaactttgcactatgtaaagtaccttatgtattgcactttaa

SEQ ID NO: 32605 - DNA, 201 bp, Homo sapiens
ggtggtcccttatacacagagtactatactcctccctggtagtgttaaaccagcagaatatgaccaagaggggtcatacccttatttcataggggtctctrttggcagcattatagtgattgtattttttgtaattttcattaagcatttaattcacagtcaaatacctgccttacaagatatgcatgctgaaatagctca

SEQ ID NO: 32606 - DNA, 201 bp, Homo sapiens
tcctgctttatttggacttggcgcagataatgtatatatttagcaactttgcactatgtaaagtaccttatgtattgcactttaaatttctctcctgatgrgtactttaatttgaaatgcactttatgcacagttatgtcttataacttgattgaaaatgacaactttttgcacccatgtcacagaatacttgttacgcat

SEQ ID NO: 32607 - DNA, 201 bp, Homo sapiens
tgtgataacctttgaaccttgaattttggagatgtattcccaacagcagaatgcaactgtgggcatttcttgtcttatttctttccagagaacgtggtttycatttatttttccctcaaaagagagtcaaatactgacagattcgttctaaatatattgtttctgtcataaaattattgtgatttcctgatgagtcatatt

SEQ ID NO: 32608 - DNA, 201 bp, Homo sapiens
cagtgtttaaaggtttcaaattctgggaaaccagttccaaacatttgcagaaaccattaagcagttacatatttaggtatacacacacacacacacacacmtacacacacacggaccaaaatacttacacctgcaaaggaataaagatgtgagagtatgtctccattgttcactgtagcatagggatagataagatcctgc

SEQ ID NO: 32609 - DNA, 201 bp, Homo sapiens
aaaatacttacacctgcaaaggaataaagatgtgagagtatgtctccattgttcactgtagcatagggatagataagatcctgctttatttggacttggcrcagataatgtatatatttagcaactttgcactatgtaaagtaccttatgtattgcactttaaatttctctcctgatgggtactttaatttgaaatgcact

SEQ ID NO: 32610 - DNA, 201 bp, Homo sapiens
tatttttagcccatggtcctgccttcagaaagaatttctcaaaagaagccatgaactccacagatttgtacccactactatgccacctcctcaatatcacygccatgccacacaatggatcattctggaatgtccaggatctgctcaattcagcaatgccaagggtggtcccttatacacagagtactatactcctccctg

SEQ ID NO: 32611 - DNA, 201 bp, Homo sapiens
tgatggattccgttgggattacttatataaagttccaacgccccattttcattatattatgaaatatggtgttcacgtgaagcaagttactaatgtttttrttacaaaaacctaccctaaccattatactttggtaactggcctctttgcagagaatcatgggattgttgcaaatgatatgtttgatcctattcggaacaa

SEQ ID NO: 32612 - DNA, 116 bp, Homo sapiens
atgacttcgaaatttmtcttggtgtccttcatacttgctgcactgagtctttcaaccaccttttctctccaaccagaccagcaaaaggttctactagtttcttttgatggattccg

SEQ ID NO: 32613 - DNA, 201 bp, Homo sapiens
ctcttggtgtccttcatacttgctgcactgagtctttcaaccaccttttctctccaaccagaccagcaaaaggttctactagtttcttttgatggattccsttgggattacttatataaagttccaacgccccattttcattatattatgaaatatggtgttcacgtgaagcaagttactaatgtttttattacaaaaacc

SEQ ID NO: 32614 - DNA, 201 bp, Homo sapiens
ctgtcatttcagatattgacaagaagttaggatatctcatacaaatgctgaaaaaggcaaagttgtggaacactctgaacctaatcatcacaagtgatcayggaatgacgcagtgctctgaggaaaggttaatagaacttgaccagtacctggataaagaccactataccctgattgatcaatctccagtagcagccatct

SEQ ID NO: 32615 - DNA, 201 bp, Homo sapiens
cctaatgttactttgaagtggatttgcatattgaagtggagattccataattatgtcagtgtttaaaggtttcaaattctgggaaaccagttccaaacatytgcagaaaccattaagcagttacatatttaggtatacacacacacacacacacacatacacacacacggaccaaaatacttacacctgcaaaggaataaa

SEQ ID NO: 32616 - DNA, 201 bp, Homo sapiens
tgggacctgacagtccgctcatggggcctgtcatttcagatattgacaagaagttaggatatctcatacaaatgctgaaaaaggcaaagttgtggaacackctgaacctaatcatcacaagtgatcatggaatgacgcagtgctctgaggaaaggttaatagaacttgaccagtacctggataaagaccactataccctga

SEQ ID NO: 32617 - DNA, 201 bp, Homo sapiens
gccaccatttgggacctgacagtccgctcatggggcctgtcatttcagatattgacaagaagttaggatatctcatacaaatgctgaaaaaggcaaagttrtggaacactctgaacctaatcatcacaagtgatcatggaatgacgcagtgctctgaggaaaggttaatagaacttgaccagtacctggataaagaccact

SEQ ID NO: 32618 - DNA, 201 bp, Homo sapiens
tgttcactgtagcatagggatagataagatcctgctttatttggacttggcgcagataatgtatatatttagcaactttgcactatgtaaagtaccttatrtattgcactttaaatttctctcctgatgggtactttaatttgaaatgcactttatgcacagttatgtcttataacttgattgaaaatgacaactttttgc

SEQ ID NO: 32619 - DNA, 201 bp, Homo sapiens
catgtggcccggaacagatgtaaaaatacataagcgctttcctactcattacatgccttacaatgagtcagtttcatttgaagatagagttgccaaaattrttgaatggtttacgtcaaaagagcccataaatcttggtcttctctattgggaagaccctgatgacatgggccaccatttgggacctgacagtccgctcat

SEQ ID NO: 32620 - DNA, 201 bp, Homo sapiens
gcatttaattcacagtcaaatacctgccttacaagatatgcatgctgaaatagctcaaccattattacaagcctaatgttactttgaagtggatttgcatrttgaagtggagattccataattatgtcagtgtttaaaggtttcaaattctgggaaaccagttccaaacatttgcagaaaccattaagcagttacatattt

SEQ ID NO: 32621 - DNA, 201 bp, Homo sapiens
aatgtatatatttagcaactttgcactatgtaaagtaccttatgtattgcactttaaatttctctcctgatgggtactttaatttgaaatgcactttatgsacagttatgtcttataacttgattgaaaatgacaactttttgcacccatgtcacagaatacttgttacgcattgttcaaactgaaggaaatttctaataa

SEQ ID NO: 32622 - DNA, 201 bp, Homo sapiens
aacttgattgaaaatgacaactttttgcacccatgtcacagaatacttgttacgcattgttcaaactgaaggaaatttctaataatcccgaataatgaacrtagaaatctatctccataaattgagagaagaagaaggtgataagtgttgaaaattaaatgtgataacctttgaaccttgaattttggagatgtattccca

SEQ ID NO: 32623 - DNA, 201 bp, Homo sapiens
gttctaaatatattgtttctgtcataaaattattgtgatttcctgatgagtcatattactgtgattttcataataatgaagacaccatgaatatacttttyttctatatagttcagcaatggcctgaatagaagcaaccaggcaccatctcagcaatgttttctcttgtttgtaattatttgctcctttgaaaattaaatc

SEQ ID NO: 32624 - DNA, 201 bp, Homo sapiens
ccgcatgaatgacgcccccacacgcggctatgggcgtgacgtgggcaatcgcaccagcctgagggtcatcgcgcattccagcatccagaggatcctccgcwaccgccatgacctgctcaacgtgagccagggcaccgtgttcatcttctggggccccagcagctacatgcggcgggacggcaagggccaggtctacaacaa

SEQ ID NO: 32625 - DNA, 201 bp, Homo sapiens
aaaaatcagagccgcctccgccccattacccatcatggaaaccctccaggaaaaagtggccccggacgcgcgagcctgaggattctgcacaaaagaggtgyccaaaatgaagaccctgatgcgccatggtctggcagtgtgtttagcgctcaccaccatgtgcaccagcttgttgctagtgtacagcagcctcggcggcca

SEQ ID NO: 32626 - DNA, 201 bp, Homo sapiens
agaggtctttaggacccagcaggcggcggcaggcggcagttgtgtagatcgctgagagactacgagggtccggttcagttttaattctgtctctaatctcygcaacagccgcgcttcccgggtcccgcggctcccgcgcgcgatctgccgcggccggctgctgggcaaaaatcagagccgcctccgccccattacccatca

SEQ ID NO: 32627 - DNA, 201 bp, Homo sapiens
ccacctttataatcacttgaagacgttatgttgctcaaacataagtggctcctttggcaatttctatatttgtggaaatttggaaaggcatagtttcaacrtgcaagaatgtaattatattgcttcatctaataatatctcacatatctgtctatcttcagattttagattttctttattaaaaaaaccatcatggtagct

SEQ ID NO: 32628 - DNA, 201 bp, Homo sapiens
catgggctaaaatctaccccctgcttctctcgaagcatcaccatccgcctcttccccagcctctcaacacaaaaacacaggatacacacacacacacacamaaaagacatagctccaaggggttccctggctacaatagcaaacagctgcccttctgtgaggaaaagagactacaaggacatgccctatcattcaactcat

SEQ ID NO: 32629 - DNA, 201 bp, Homo sapiens
tcagaaaatcatggcttcactgggaaatgttttaaatctacatgtagctaggatatgtgatttcatattttttaaaaatgtggtgtaaataagtgtaaaamattaccacttgcaaagtggttttattacagcgttaaagaaaatgactagaattctgatagattgtgctgatgaacctggttgtgggcaattgaattcttg

SEQ ID NO: 32630 - DNA, 201 bp, Homo sapiens
gggactgtgccctggtgaccagctcagggcatctgctgcacagtcggcaaggctcccagattgaccagacagagtgtgtcatccgcatgaatgacgccccyacacgcggctatgggcgtgacgtgggcaatcgcaccagcctgagggtcatcgcgcattccagcatccagaggatcctccgcaaccgccatgacctgctca

SEQ ID NO: 32631 - DNA, 201 bp, Homo sapiens
tggcagtgtgtttagcgctcaccaccatgtgcaccagcttgttgctagtgtacagcagcctcggcggccagaaggagcggcccccgcagcagcagcagcarcagcagcaacagcagcagcaggcgtcggccaccggcagctcgcagccggcggcggagagcagcacccagcagcgccccggggtccccgcgggaccgcggc

SEQ ID NO: 32632 - DNA, 201 bp, Homo sapiens
tttaccggatgcagcaacaagaagggaaatatttaagctgcagtttcactccatgcctgtcagtaatgaagttgacctggatgaactcatccttcaaacckacgcatactcaggagcagagaattcagtttttgatttgagacgagggctggcatcttgtatgatgatatggcaatttgcaggaaacagcaagaggaagac

SEQ ID NO: 32633 - DNA, 201 bp, Homo sapiens
gccagttagatctggaggatacccagatcccaacatcaagaagtactccttataaaccaattgatgacagaattacaaataaagccagtgatgttttgctkgatgttacacagagccctggagatggcagtggacttatgctagaggaagtcacaggtcttaaatgtaattttgaatctgccagagaaggaaatgagcaac

SEQ ID NO: 32634 - DNA, 201 bp, Homo sapiens
tttaccggatgcagcaacaagaagggaaatatttaagctgcagtttcactccatgcctgtcagtaatgaagttgacctggatgaactcatccttcaaacckacgcatactcaggagcagagattgtagctgtctgcagagaggcagctcttctggctctggaagaagacattcaagccaatctcatcatgaaaagacattt

SEQ ID NO: 32635 - DNA, 201 bp, Homo sapiens
cggctagggtaccttgtgaccatgtcttccaagaagaatagaaagcggttgaaccaaagcgcggaaaatggttcgtccttgccctctgctgcttcctcttstgcggaggcacgggctccttctgctggatcagacttcgcggcaacctccgggactctgacggtgaccaacttattagaaaagggtaaagaattccgggtg

SEQ ID NO: 32636 - DNA, 201 bp, Homo sapiens
gaatgatatcagacccagtgccatgagggaaatagcaattgatgtcccaaatgtatcctggtcagatataggaggactggaaagtatcaaactgaagttgsaacaggctgtggaatggcccttaaaacatccagagtctttcattcgaatgggtattcagccacctaaaggagttcttctctatgggccacctgggtgctc

SEQ ID NO: 32637 - DNA, 201 bp, Homo sapiens
gaacaggctgtggaatggcccttaaaacatccagagtctttcattcgaatgggtattcagccacctaaaggagttcttctctatgggccacctgggtgctmtaaaacaatgatagcaaaggctttggccaatgagagtggactgaattttctagctataaaggggcctgaattaatgaataaatatgttggtgaatctgaa

SEQ ID NO: 32638 - DNA, 201 bp, Homo sapiens; identical to SEQ ID NO: 32633

SEQ ID NO: 32639 - DNA, 201 bp, Homo sapiens; identical to SEQ ID NO: 32634

SEQ ID NO: 32640 - DNA, 201 bp, Homo sapiens
cggctagggtaccttgtgaccatgtcttccaagaagaatagaaagcggttgaaccaaagcgcggaaaatggttcgtccttgccctctgctgcttcctcttstgcggaggcacgggctccttctgctggatcagacttcgcggcaacctccgggactctgacggtgaccaacttattagaaaaggtagatgacaaaattcct

SEQ ID NO: 32641 - DNA, 201 bp, Homo sapiens; identical to SEQ ID NO: 32636

SEQ ID NO: 32642 - DNA, 201 bp, Homo sapiens; identical to SEQ ID NO: 32637

SEQ ID NO: 32643 - DNA, 201 bp, Homo sapiens
acgtgtccttcctcctgtctgaggatggcagcggcaagggggccgccctcatcacggccgtgggcgtgcggttacgcacagaggcaagcagctaagagtcygggatccccagcctactgcctctccagcacttctctcttcaagcggcgaccccctaccctcccagcgagttgcgctgggagacgctggcgccagggcctg

SEQ ID NO: 32644 - DNA, 201 bp, Homo sapiens
gaagatgatcagtggtatgtacctgggtgaaatcgtccgcaacatcttaatcgacttcaccaagaagggattcctcttccgagggcagatctctgagacgmtgaagacccggggcatctttgagaccaagtttctctctcagatcgagagtgaccgattagcactgctccaggtccgggctatcctccagcagctaggtct

SEQ ID NO: 32645 - DNA, 201 bp, Homo sapiens
gagctggggctgaggaagcagacgcacaacaatgccgtggttaagatgctgccctccttcgtccggagaactcccgacgggaccgagaatggtgacttctyggccctggatcttggaggaaccaatttccgtgtgctgctggtgaaaatccgtagtgggaaaaagagaacggtggaaatgcacaacaagatctacgccatt

SEQ ID NO: 32646 - DNA, 201 bp, Homo sapiens
tttgacctggacgtggtggctgtggtcaacgacacagtgggcaccatgatgacctgtgcttatgaggagcccacctgtgaggttggactcattgttgggascggcagcaatgcctgctacatggaggagatgaagaacgtggagatggtggagggggaccaggggcagatgtgcatcaacatggagtggggggcctttggg

SEQ ID NO: 32647 - DNA, 201 bp, Homo sapiens
cccactgtggcctggcatcgcatcgtggtgtgtcaatgccacaaaatcgtgtgtccgtggaaccagtcctagccgcgtgtgacagtcttgcattctgtttktctcgtggggggaggtggacagtcctgcggaaatgtgtcttgaaacaatgccatcactggaatttcccaccgctttgtgagccgtgtcgtatgacctagt

SEQ ID NO: 32648 - DNA, 201 bp, Homo sapiens
ttgacctggacgtggtggctgtggtcaacgacacagtgggcaccatgatgacctgtgcttatgaggagcccacctgtgaggttggactcattgttgggacyggcagcaatgcctgctacatggaggagatgaagaacgtggagatggtggagggggaccaggggcagatgtgcatcaacatggagtggggggcctttgggg

SEQ ID NO: 32649 - DNA, 201 bp, Homo sapiens
cattcatccaacagagttatttattggctggagatggaaaatcacaccacctgacaggccttctgggcctccaaagcccatccttggggttccccctcccygtgtgaaatgtattatcaccagcagacactgccgggcctccctcccgggggcactgcctgaaggcgagtgtgggcatagcattagctgcttcctcccctc

SEQ ID NO: 32650 - DNA, 201 bp, Homo sapiens
gccccgcgaccccgaccgccagcatgatcgccgcgcagctcctggcctattacttcacggagctgaaggatgaccaggtcaaaaagattgacaagtatctstatgccatgcggctctccgatgaaactctcatagatatcatgactcgcttcaggaaggagatgaagaatggcctctcccgggattttaatccaacagcca

SEQ ID NO: 32651 - DNA, 201 bp, Homo sapiens
tggctgcggttgtggataagatccgcgagaacagaggactggaccgtctgaatgtgactgtgggagtggacgggacactctacaagcttcatccacacttytccagaatcatgcaccagacggtgaaggaactgtcaccaaaatgtaacgtgtccttcctcctgtctgaggatggcagcggcaagggggccgccctcatca

SEQ ID NO: 32652 - DNA, 201 bp, Homo sapiens
tctacaagcttcatccacacttctccagaatcatgcaccagacggtgaaggaactgtcaccaaaatgtaacgtgtccttcctcctgtctgaggatggcagyggcaagggggccgccctcatcacggccgtgggcgtgcggttacgcacagaggcaagcagctaagagtccgggatccccagcctactgcctctccagcact

SEQ ID NO: 32653 - DNA, 201 bp, Homo sapiens
gcaccaatgcttgctacatggaggaactgaggcacattgatctggtggaaggagacgaggggaggatgtgtatcaatacagaatggggagcctttggagaygatggatcattagaagacatccggacagagtttgacagggagatagaccggggatccctcaaccctggaaaacagctgtttgagaagatggtcagtggca

SEQ ID NO: 32654 - DNA, 201 bp, Homo sapiens
gtctgaggatggcagcggcaagggggccgccctcatcacggccgtgggcgtgcggttacgcacagaggcaagcagctaagagtccgggatccccagcctastgcctctccagcacttctctcttcaagcggcgaccccctaccctcccagcgagttgcgctgggagacgctggcgccagggcctgccggcgcggggaggaa

SEQ ID NO: 32655 - DNA, 201 bp, Homo sapiens
atgaaactctcatagatatcatgactcgcttcaggaaggagatgaagaatggcctctcccgggattttaatccaacagccacagtcaagatgttgccaacwttcgtaaggtccattcctgatggctctgaaaagggagatttcattgccctggatcttggtgggtcttcctttcgaattctgcgggtgcaagtgaatcatg

SEQ ID NO: 32656 - DNA, 201 bp, Homo sapiens
ggtttgattttgacctggtcccccacgtgtgaagtgtagtggcatccatttctaatgtatgcattcatccaacagagttatttattggctggagatggaawatcacaccacctgacaggccttctgggcctccaaagcccatccttggggttccccctccctgtgtgaaatgtattatcaccagcagacactgccgggcct

SEQ ID NO: 32657 - DNA, 201 bp, Homo sapiens
cccagagcattgttcctgagaaggaaaagagtccaaacacctacccacacctgctttgtgccaagaatccacagttggattgcaaggacagtgcgttcaaracccagctgttgagagtagaaaagcagaagaaaggacccgaggtcagcaagtgccctccccacaatggggcagatctgccagcgagaatcggctacagca

SEQ ID NO: 32658 - DNA, 201 bp, Homo sapiens
gcagcggcaagggggctgccatggtgacggcggtggcctaccgcttggccgagcagcaccggcagatagaggagaccctggctcatttccacctcaccaargacatgctgctggaggtgaagaagaggatgcgggccgagatggagctggggctgaggaagcagacgcacaacaatgccgtggttaagatgctgccctcct

SEQ ID NO: 32659 - DNA, 201 bp, Homo sapiens
cgcacagaggcaagcagctaagagtccgggatccccagcctactgcctctccagcacttctctcttcaagcggcgaccccctaccctcccagcgagttgckctgggagacgctggcgccagggcctgccggcgcggggaggaaagcaaaatccaactaatggtatatattgtagggtacagaatagagcgtgtgctgttga

SEQ ID NO: 32660 - DNA, 201 bp, Homo sapiens
ttgatcatgttgctgagtgcctgggagatttcatggagaaaaggaagatcaaggacaagaagttacctgtgggattcacgttttcttttccttgccaacartccaaaatagatgaggccatcctgatcacctggacaaagcgatttaaagcgagcggagtggaaggagcagatgtggtcaaactgcttaacaaagccatca

SEQ ID NO: 32661 - DNA, 201 bp, Homo sapiens; identical to SEQ ID NO: 32643

SEQ ID NO: 32662 - DNA, 201 bp, Homo sapiens; identical to SEQ ID NO: 32644

SEQ ID NO: 32663 - DNA, 201 bp, Homo sapiens; identical to SEQ ID NO: 32645

SEQ ID NO: 32664 - DNA, 201 bp, Homo sapiens; identical to SEQ ID NO: 32646

SEQ ID NO: 32665 - DNA, 201 bp, Homo sapiens
cccactgtggcctggcatcgcatcgtggtgtgtcaatgccacaaaatcgtgtgtccgtggaaccagtcctagccgcgtgtgacagtcttgcattctgtttktctcgtggggggaggtggacagtcctgcggaaatgtgtcttgtctccatttggataaaaggaaccaaccaacaaacaatgccatcactggaatttcccac

SEQ ID NO: 32666 - DNA, 201 bp, Homo sapiens; identical to SEQ ID NO: 32648

SEQ ID NO: 32667 - DNA, 201 bp, Homo sapiens; identical to SEQ ID NO: 32649

SEQ ID NO: 32668 - DNA, 201 bp, Homo sapiens
ccctccccacaatggggcagatctgccagcgagaatcggctacagcagctgaaaaaccaaaacttcatctacttgctgaaagtgagattgacaagtatctstatgccatgcggctctccgatgaaactctcatagatatcatgactcgcttcaggaaggagatgaagaatggcctctcccgggattttaatccaacagcca

SEQ ID NO: 32669 - DNA, 201 bp, Homo sapiens; identical to SEQ ID NO: 32651

SEQ ID NO: 32670 - DNA, 201 bp, Homo sapiens; identical to SEQ ID NO: 32652

SEQ ID NO: 32671 - DNA, 201 bp, Homo sapiens; identical to SEQ ID NO: 32653

SEQ ID NO: 32672 - DNA, 201 bp, Homo sapiens; identical to SEQ ID NO: 32654

SEQ ID NO: 32673 - DNA, 201 bp, Homo sapiens; identical to SEQ ID NO: 32655

SEQ ID NO: 32674 - DNA, 201 bp, Homo sapiens; identical to SEQ ID NO: 32656

SEQ ID NO: 32675 - DNA, 201 bp, Homo sapiens
tttgtgccaagaatccacagttggattgcaaggacagtgtatgttgtccttttggaaaaatgagagtgagcccaaatgaagaacaagcaaaggcgttcaaracccagctgttgagagtagaaaagcagaagaaaggacccgaggtcagcaagtgccctccccacaatggggcagatctgccagcgagaatcggctacagca

SEQ ID NO: 32676 - DNA, 201 bp, Homo sapiens; identical to SEQ ID NO: 32658

SEQ ID NO: 32677 - DNA, 201 bp, Homo sapiens; identical to SEQ ID NO: 32659

SEQ ID NO: 32678 - DNA, 201 bp, Homo sapiens; identical to SEQ ID NO: 32660

SEQ ID NO: 32679 - DNA, 201 bp, Homo sapiens; identical to SEQ ID NO: 32645

SEQ ID NO: 32680 - DNA, 201 bp, Homo sapiens; identical to SEQ ID NO: 32648

SEQ ID NO: 32681 - DNA, 201 bp, Homo sapiens; identical to SEQ ID NO: 32656

SEQ ID NO: 32682 - DNA, 201 bp, Homo sapiens; identical to SEQ ID NO: 32675

SEQ ID NO: 32683 - DNA, 201 bp, Homo sapiens; identical to SEQ ID NO: 32659

SEQ ID NO: 32684 - DNA, 201 bp, Homo sapiens; identical to SEQ ID NO: 32660

SEQ ID NO: 32685 - DNA, 201 bp, Homo sapiens; identical to SEQ ID NO: 32644

SEQ ID NO: 32686 - DNA, 201 bp, Homo sapiens; identical to SEQ ID NO: 32643

SEQ ID NO: 32687 - DNA, 201 bp, Homo sapiens; identical to SEQ ID NO: 32646

SEQ ID NO: 32688 - DNA, 201 bp, Homo sapiens; identical to SEQ ID NO: 32665

SEQ ID NO: 32689 - DNA, 201 bp, Homo sapiens; identical to SEQ ID NO: 32649

SEQ ID NO: 32690 - DNA, 201 bp, Homo sapiens
gatgctcttgagagcatcagccaggacattaatgtgcaccactgtggtggcgtggaaagatggcaaaaagagccctgcgtgattttattgacaagtatctstatgccatgcggctctccgatgaaactctcatagatatcatgactcgcttcaggaaggagatgaagaatggcctctcccgggattttaatccaacagcca

SEQ ID NO: 32691 - DNA, 201 bp, Homo sapiens
cttgctgaaagtgagcattgttgatgctcttgagagcatcagccaggacattaatgtgcaccactgtggtggcgtggaaagatggcaaaaagagccctgcrtgattttattgacaagtatctctatgccatgcggctctccgatgaaactctcatagatatcatgactcgcttcaggaaggagatgaagaatggcctctcc

SEQ ID NO: 32692 - DNA, 201 bp, Homo sapiens; identical to SEQ ID NO: 32651

SEQ ID NO: 32693 - DNA, 201 bp, Homo sapiens; identical to SEQ ID NO: 32652

SEQ ID NO: 32694 - DNA, 201 bp, Homo sapiens; identical to SEQ ID NO: 32653

SEQ ID NO: 32695 - DNA, 201 bp, Homo sapiens; identical to SEQ ID NO: 32654

SEQ ID NO: 32696 - DNA, 201 bp, Homo sapiens; identical to SEQ ID NO: 32655

SEQ ID NO: 32697 - DNA, 201 bp, Homo sapiens; identical to SEQ ID NO: 32658

SEQ ID NO: 32698 - DNA, 201 bp, Homo sapiens; identical to SEQ ID NO: 32644

SEQ ID NO: 32699 - DNA, 201 bp, Homo sapiens; identical to SEQ ID NO: 32643

SEQ ID NO: 32700 - DNA, 201 bp, Homo sapiens; identical to SEQ ID NO: 32645

SEQ ID NO: 32701 - DNA, 201 bp, Homo sapiens; identical to SEQ ID NO: 32646

SEQ ID NO: 32702 - DNA, 201 bp, Homo sapiens; identical to SEQ ID NO: 32648

SEQ ID NO: 32703 - DNA, 201 bp, Homo sapiens; identical to SEQ ID NO: 32665

SEQ ID NO: 32704 - DNA, 201 bp, Homo sapiens; identical to SEQ ID NO: 32649

SEQ ID NO: 32705 - DNA, 201 bp, Homo sapiens; identical to SEQ ID NO: 32650

SEQ ID NO: 32706 - DNA, 201 bp, Homo sapiens; identical to SEQ ID NO: 32651

SEQ ID NO: 32707 - DNA, 201 bp, Homo sapiens; identical to SEQ ID NO: 32652

SEQ ID NO: 32708 - DNA, 201 bp, Homo sapiens; identical to SEQ ID NO: 32653

SEQ ID NO: 32709 - DNA, 201 bp, Homo sapiens; identical to SEQ ID NO: 32654

SEQ ID NO: 32710 - DNA, 201 bp, Homo sapiens; identical to SEQ ID NO: 32655

SEQ ID NO: 32711 - DNA, 201 bp, Homo sapiens; identical to SEQ ID NO: 32656

SEQ ID NO: 32712 - DNA, 201 bp, Homo sapiens; identical to SEQ ID NO: 32660

SEQ ID NO: 32713 - DNA, 201 bp, Homo sapiens; identical to SEQ ID NO: 32658

SEQ ID NO: 32714 - DNA, 201 bp, Homo sapiens; identical to SEQ ID NO: 32659

SEQ ID NO: 32715 - DNA, 201 bp, Homo sapiens; identical to SEQ ID NO: 32643

SEQ ID NO: 32716 - DNA, 201 bp, Homo sapiens; identical to SEQ ID NO: 32644

SEQ ID NO: 32717 - DNA, 201 bp, Homo sapiens; identical to SEQ ID NO: 32645

SEQ ID NO: 32718 - DNA, 201 bp, Homo sapiens; identical to SEQ ID NO: 32646

SEQ ID NO: 32719 - DNA, 201 bp, Homo sapiens; identical to SEQ ID NO: 32665

SEQ ID NO: 32720 - DNA, 201 bp, Homo sapiens; identical to SEQ ID NO: 32648

SEQ ID NO: 32721 - DNA, 201 bp, Homo sapiens; identical to SEQ ID NO: 32649

SEQ ID NO: 32722 - DNA, 201 bp, Homo sapiens; identical to SEQ ID NO: 32650

SEQ ID NO: 32723 - DNA, 201 bp, Homo sapiens; identical to SEQ ID NO: 32651

SEQ ID NO: 32724 - DNA, 201 bp, Homo sapiens; identical to SEQ ID NO: 32652

SEQ ID NO: 32725 - DNA, 201 bp, Homo sapiens; identical to SEQ ID NO: 32653

SEQ ID NO: 32726 - DNA, 201 bp, Homo sapiens; identical to SEQ ID NO: 32654

SEQ ID NO: 32727 - DNA, 201 bp, Homo sapiens; identical to SEQ ID NO: 32655

SEQ ID NO: 32728 - DNA, 201 bp, Homo sapiens; identical to SEQ ID NO: 32656

SEQ ID NO: 32729 - DNA, 201 bp, Homo sapiens; identical to SEQ ID NO: 32657

SEQ ID NO: 32730 - DNA, 201 bp, Homo sapiens; identical to SEQ ID NO: 32658

SEQ ID NO: 32731 - DNA, 201 bp, Homo sapiens; identical to SEQ ID NO: 32659

SEQ ID NO: 32732 - DNA, 201 bp, Homo sapiens; identical to SEQ ID NO: 32660

SEQ ID NO: 32733 - DNA, 201 bp, Homo sapiens
gaaatccatctctcctctcaaaggcagctaaagctatgtggtcaggctctgggccccagattccagtcctgatttctgagtctgctttccaggcgttcaaracccagctgttgagagtagaaaagcagaagaaaggacccgaggtcagcaagtgccctccccacaatggggcagatctgccagcgagaatcgaggggtgtg

SEQ ID NO: 32734 - DNA, 201 bp, Homo sapiens; identical to SEQ ID NO: 32643

SEQ ID NO: 32735 - DNA, 201 bp, Homo sapiens; identical to SEQ ID NO: 32644

SEQ ID NO: 32736 - DNA, 201 bp, Homo sapiens; identical to SEQ ID NO: 32645

SEQ ID NO: 32737 - DNA, 201 bp, Homo sapiens; identical to SEQ ID NO: 32646

SEQ ID NO: 32738 - DNA, 201 bp, Homo sapiens; identical to SEQ ID NO: 32647

SEQ ID NO: 32739 - DNA, 201 bp, Homo sapiens; identical to SEQ ID NO: 32648

SEQ ID NO: 32740 - DNA, 201 bp, Homo sapiens; identical to SEQ ID NO: 32649

SEQ ID NO: 32741 - DNA, 201 bp, Homo sapiens; identical to SEQ ID NO: 32668

SEQ ID NO: 32742 - DNA, 201 bp, Homo sapiens; identical to SEQ ID NO: 32651

SEQ ID NO: 32743 - DNA, 201 bp, Homo sapiens; identical to SEQ ID NO: 32652

SEQ ID NO: 32744 - DNA, 201 bp, Homo sapiens; identical to SEQ ID NO: 32653

SEQ ID NO: 32745 - DNA, 201 bp, Homo sapiens; identical to SEQ ID NO: 32654

SEQ ID NO: 32746 - DNA, 201 bp, Homo sapiens; identical to SEQ ID NO: 32655

SEQ ID NO: 32747 - DNA, 201 bp, Homo sapiens; identical to SEQ ID NO: 32656

SEQ ID NO: 32748 - DNA, 201 bp, Homo sapiens; identical to SEQ ID NO: 32657

SEQ ID NO: 32749 - DNA, 201 bp, Homo sapiens; identical to SEQ ID NO: 32658

SEQ ID NO: 32750 - DNA, 201 bp, Homo sapiens; identical to SEQ ID NO: 32659

SEQ ID NO: 32751 - DNA, 201 bp, Homo sapiens; identical to SEQ ID NO: 32660
